United States Patent Application Publication US 2026/0242757 A1, published August 20, 2026 (application 19/442,440).

The application's sequence listing, which the Patent Office published only in electronic form, follows.

SEQUENCE LISTING (6775 sequences)

SEQ ID NO: 1 - DNA, 1539 bp, synthetic construct
  misc_feature 1..1539: note = Orthologs of terminal deoxynucleotidyl transferase
  source 1..1539: mol_type = other DNA
atggataaaatcaaagcttcagctgttatctcccacaggaagagacagaaggggttacattcctcaaaactttcctgcacttatgaagtaaaatttcctaagtttgtaatttttattatgcagaggaagatgggggttaccagaaggatgtttttgacggagctggcaagaagaaaaggtttcagagtagaaagtgagctaagtgatgctgtcactcacattgtggctgagaacaactcttacttggaggtgctggactggctgaaaggacaggctgtgggtgacagctccaggtttgaactactggacatctcctggtttacagcctgcatggaagcaggaagaccagttgattcagaaatgaagtatcatctcatggtaagacagaagcatcctccttcaaatacaccagaattggaagtgccatcagttattgcaagaaaagtatctcagtattcgtgccagaggaagacaactttaaataactacaacaagaaattcacggatgcctttgagataatggccgaaaattatgagttcaaagaaaatgaaatattctgcctggaatttctgagggcagcttctttgctgaaatatcttccatttccagtaacccgaatgaaagatatacaagggttgccctgcataggagaccaagtcagagatgtcattgaggagattattgaagaaggagagagttctagagttaaagaagtgttaaatgatgagcgatacaaggcttttaagcaatttacttcagtctttggagtgggagtgaagacatctgagaaatggttcagaatgggtttgcgaacagtggaagagttaaaagctgacaagagcctcaagctgtccaaaatgcagaaagcagggtttctctactatgaggaccttgttagctgtgtatctaaggcagaagcagatgcagtaaccttgattgtcaagaataccgtatctacctttctaccagatgctttagttaccataacaggtggtttcaggaggggtaagaagatgggacatgacattgattttttgatcaccaatccaggaccaaaagaagatgatgaacttctgcataaagttgttgacttattgaaaaagcagggtttactcctatattgtgatatcattgaatcaacatttgtagaagaacaactaccaagcagaaagattgatgccatggataattttcagaagtgttttgcaattttaaaattatatcagccaggagtagacaacagcagttacaacacgtcaaaaaaatcggatatggcagaagtcaaagactggaaggcaatccgtgtggatctggtcataaccccctttgagcaatatgcatatgctctgttaggttggacaggctccagggaatttggacgtgatttgcggagatatgctagtcatgaaaggaagatgatattggataaccatgggttatatgacaggaaaaagcggatctttctcaaagctggaagtgaggaagaaatctttgcccatcttggcttggattatgttgaaccatgggaaagaaatgct

SEQ ID NO: 2 - protein, 513 aa, synthetic construct
  REGION 1..513: note = Orthologs of terminal deoxynucleotidyl transferase
MDKIKASAVISHRKRQKGLHSSKLSCTYEVKFPKFVIFIMQRKMGVTRRMFLTELARRKGFRVESELSDAVTHIVAENNSYLEVLDWLKGQAVGDSSRFELLDISWFTACMEAGRPVDSEMKYHLMVRQKHPPSNTPELEVPSVIARKVSQYSCQRKTTLNNYNKKFTDAFEIMAENYEFKENEIFCLEFLRAASLLKYLPFPVTRMKDIQGLPCIGDQVRDVIEEIIEEGESSRVKEVLNDERYKAFKQFTSVFGVGVKTSEKWFRMGLRTVEELKADKSLKLSKMQKAGFLYYEDLVSCVSKAEADAVTLIVKNTVSTFLPDALVTITGGFRRGKKMGHDIDFLITNPGPKEDDELLHKVVDLLKKQGLLLYCDIIESTFVEEQLPSRKIDAMDNFQKCFAILKLYQPGVDNSSYNTSKKSDMAEVKDWKAIRVDLVITPFEQYAYALLGWTGSREFGRDLRRYASHERKMILDNHGLYDRKKRIFLKAGSEEEIFAHLGLDYVEPWERNA

SEQ ID NO: 3 - DNA, 1182 bp, synthetic construct
  misc_feature 1..1182: note = Orthologs of terminal deoxynucleotidyl transferase
  source 1..1182: mol_type = other DNA
atgcaccatcatcatcatcatggcggtagcggccatccgccgagcaataccccggagctggaagtgccgagcgttatcgcccgcaaggttagtcagtacagctgccagcgcaagaccacgctgaataactacaacaaaaagtttaccgacgcgttcgagatcatggccgagaactacgaatttaaagagaacgaaatcttctgtctggaatttctgcgcgccgcgagtctgctgaaatatctgccgttcccggttacccgcatgaaagacatccaaggtctgccgtgcattggcgaccaagttcgtgacgtgatcgaggagatcatcgaagaaggcgagagcagccgtgttaaagaagttctcaatgacgagcgctacaaggcctttaagcagttcaccagcgtgttcggtgtgggcgtgaaaaccagcgaaaagtggtttcgtatgggcctccgtacggttgaagagctgaaggccgacaagagtctgaagctgagcaagatgcagaaggcgggctttctgtattacgaggatctggtgagctgcgttagtaaagcggaagccgatgccgttacgctcatcgtgaagaacacggtgagtacctttctgccggatgcgctggtgaccatcacgggcggtttccgccgtggcaaaaagatgggccacgacatcgactttctgatcacgaatccgggcccgaaagaggatgacgaactgctccacaaagtggttgatctgctcaagaagcaaggtctgctgctgtactgcgacatcatcgagagcacgttcgtggaggaacaactgccaagtcgcaaaatcgacgccatggacaacttccagaagtgcttcgccattctcaagctgtaccagccgggcgtggataacagcagctataacacgagtaagaagagtgacatggccgaggttaaggattggaaagcgatccgtgtggatctggtgatcacgccattcgagcagtacgcctatgcgctgctcggttggacgggcagccgcgaatttggtcgcgatctgcgccgctatgcgagtcatgagcgcaagatgatcctcgacaaccatggcctctacgaccgcaaaaagcgcatctttctgaaagcgggcagcgaagaagagattttcgcgcatctgggtctggattatgtggagccgtgggaacgcaacgcg

SEQ ID NO: 4 - protein, 394 aa, synthetic construct
  REGION 1..394: note = Orthologs of terminal deoxynucleotidyl transferase
MHHHHHHGGSGHPPSNTPELEVPSVIARKVSQYSCQRKTTLNNYNKKFTDAFEIMAENYEFKENEIFCLEFLRAASLLKYLPFPVTRMKDIQGLPCIGDQVRDVIEEIIEEGESSRVKEVLNDERYKAFKQFTSVFGVGVKTSEKWFRMGLRTVEELKADKSLKLSKMQKAGFLYYEDLVSCVSKAEADAVTLIVKNTVSTFLPDALVTITGGFRRGKKMGHDIDFLITNPGPKEDDELLHKVVDLLKKQGLLLYCDIIESTFVEEQLPSRKIDAMDNFQKCFAILKLYQPGVDNSSYNTSKKSDMAEVKDWKAIRVDLVITPFEQYAYALLGWTGSREFGRDLRRYASHERKMILDNHGLYDRKKRIFLKAGSEEEIFAHLGLDYVEPWERNA

SEQ ID NO: 5 - DNA, 1182 bp, synthetic construct
  misc_feature 1..1182: note = Variant of terminal deoxynucleotidyl transferase
  source 1..1182: mol_type = other DNA
atgcaccatcatcatcatcatggcggtagcggccatccgccgagcaataccccggagctggaagtgccgagcgttatcgcccgcaaggttagtcagtacagctgccagcgcaagaccacgctgaataactacaacaaaaagtttaccgacgcgttcgagatcatggccgagaactacgaatttaaagagaacgaaatcttctgtctggaatttctgcgcgccgcgagtctgctgaaatatctgccgttcccggttacccgcatgaaagacatccaaggtctgccgtgcattggcgaccaagttcgtgacgtgatcgaggagatcatcgaagaaggcgagagcagccgtgttaaagaagttctcaatgacgagcgctacaaggcctttaagcagttcaccagcgtgttcggtgtgggcgtgaaaaccagcgaaaagtggtttcgtatgggcctccgtacggttgaagagctgaaggccgacaagagtctgaagctgagcaagatgcagaaggcgggctttctgtattacgaggatctggtgagctgcgttagtaaagcggaagccgatgccgttacgctcatcgtgaagaacacggtgagtacctttctgccggatgcgctggtgaccatcacgggcggtttccgccgtggcaaaaagatgggccacgacatcgactttctgatcacgaatccgggcccgaaagaggatgacgggctgctccacaaagtggttgatctgctcaagaagcaaggtctgctgctgtactgcgacatcatcgagagcacgttcgtggaggaacaactgccaagtcgcaaaatcgacgccatggacaacttccagaagtgcttcgccattctcaagctgtaccagccgggcgtggataacagcagctataacacgagtaagaagagtgacatggccgaggttaaggattggaaagcgatccgtgtggatctggtgatcacgccattcgagcagtacgcctatgcgctgctcggttggacgggcagccgcgaatttggtcgcgatctgcgccgctatgcgagtcatgagcgcaagatgatcctcgacaaccatggcctctacgaccgcaaaaagcgcatctttctgaaagcgggcagcgaagaagagattttcgcgcatctgggtctggattatgtggagccgtgggaacgcaacgcg

SEQ ID NO: 6 - protein, 394 aa, synthetic construct
  REGION 1..394: note = Variant of terminal deoxynucleotidyl transferase
MHHHHHHGGSGHPPSNTPELEVPSVIARKVSQYSCQRKTTLNNYNKKFTDAFEIMAENYEFKENEIFCLEFLRAASLLKYLPFPVTRMKDIQGLPCIGDQVRDVIEEIIEEGESSRVKEVLNDERYKAFKQFTSVFGVGVKTSEKWFRMGLRTVEELKADKSLKLSKMQKAGFLYYEDLVSCVSKAEADAVTLIVKNTVSTFLPDALVTITGGFRRGKKMGHDIDFLITNPGPKEDDGLLHKVVDLLKKQGLLLYCDIIESTFVEEQLPSRKIDAMDNFQKCFAILKLYQPGVDNSSYNTSKKSDMAEVKDWKAIRVDLVITPFEQYAYALLGWTGSREFGRDLRRYASHERKMILDNHGLYDRKKRIFLKAGSEEEIFAHLGLDYVEPWERNA

SEQ ID NO: 7 - DNA, 1182 bp, synthetic construct
  misc_feature 1..1182: note = Variant of terminal deoxynucleotidyl transferase
  source 1..1182: mol_type = other DNA
atgcaccatcatcatcatcatggcggtagcggccatccgccgagcaataccccggagctggaagtgccgagcgttatcgcccgcaaggttagtcagtacagctgccagcgcaagaccacgctgaataactacaacaaaaagtttaccgacgcgttcgagatcatggccgagaactacgaatttaaagagaacgaaatcttctgtctggaatttctgcgcgccgcgagtctgctgaaatctctgccgttcccggttacccgcatgaaagacatccaaggtctgccgtgcattggcgaccaagttcgtgacgtgatcgaggagatcatcgaagaaggcgagagcagccgtgttaaagaagttctcaatgacgagcgctacaaggcctttaagcagttcaccagcgtgttcggtgtgggcgtgaaaaccagcgaaaagtggtttcgtatgggcctccgtacggttgaagagctgaaggccgacaagagtctgaagctgagcaagatgcagaaggcgggctttctgtattacgaggatctggtgagctgcgttagtaaagcggaagccgatgccgttacgctcatcgtgaagaacacggtgagtacctttctgccggatgcgctggtgaccatcacgggcggtttccgccgtggcaaaaagatgggccacgacatcgactttctgatcacgaatccgggcccgaaagaggatgacgaactgctccacaaagtggttgatctgctcaagaagcaaggtctgctgctgtactgcgacatcatcgagagcacgttcgtggaggaacaactgccaagtcgcaaaatcgacgccatggacaacttccagaagtgcttcgccattctcaagctgtaccagccgggcgtggataacagcagctataacacgagtaagaagagtgacatggccgaggttaaggattggaaagcgatccgtgtggatctggtgatcacgccattcgagcagtacgcctatgcgctgctcggttggacgggcagccgcgaatttggtcgcgatctgcgccgctatgcgagtcatgagcgcaagatgatcctcgacaaccatggcctctacgaccgcaaaaagcgcatctttctgaaagcgggcagcgaagaagagattttcgcgcatctgggtctggattatgtggagccgtgggaacgcaacgcg

SEQ ID NO: 8 - protein, 394 aa, synthetic construct
  REGION 1..394: note = Variant of terminal deoxynucleotidyl transferase
MHHHHHHGGSGHPPSNTPELEVPSVIARKVSQYSCQRKTTLNNYNKKFTDAFEIMAENYEFKENEIFCLEFLRAASLLKSLPFPVTRMKDIQGLPCIGDQVRDVIEEIIEEGESSRVKEVLNDERYKAFKQFTSVFGVGVKTSEKWFRMGLRTVEELKADKSLKLSKMQKAGFLYYEDLVSCVSKAEADAVTLIVKNTVSTFLPDALVTITGGFRRGKKMGHDIDFLITNPGPKEDDELLHKVVDLLKKQGLLLYCDIIESTFVEEQLPSRKIDAMDNFQKCFAILKLYQPGVDNSSYNTSKKSDMAEVKDWKAIRVDLVITPFEQYAYALLGWTGSREFGRDLRRYASHERKMILDNHGLYDRKKRIFLKAGSEEEIFAHLGLDYVEPWERNA

SEQ ID NO: 9 - DNA, 1182 bp, synthetic construct
  misc_feature 1..1182: note = Variant of terminal deoxynucleotidyl transferase
  source 1..1182: mol_type = other DNA
atgcaccatcatcatcatcatggcggtagcggccatccgccgagcaataccccggagctggaagtgccgagcgttatcgcccgcaaggttagtcagtacagctgccagcgcaagaccacgctgaataactacaacaaaaagtttaccgacgcgttcgagatcatggccgagaactacgaatttaaagagaacgaaatcttctgtctggaatttctgcgcgccgcgagtctgctgaaatatctgccgttcccggttacccgcatgaaagacatccaaggtctgccgtgcattggcgaccaagttcgtgacgtgatcgaggagatcatcgaagaaggcgagagcagccgtgttaaagaagttctcaatgacgagcgctacaaggcctttaagcagttcaccagcgtgttcggtgtgggcgtgaaaaccagcgaaaagtggtttcgtatgggcctccgtacggttgaagagctgaaggccgacaagagtctgaagctgagcaagatgcagaaggcgggctttctgtattacgaggatctggtgagctgcgttagtaaagcggaagccgatgccgttacgctcatcgtgaagaacacggtgagtacctttctgccggatgcgctggtgaccatcacgggcggtttccgccgtggcaaaaagatgggccacgacatcgactttctgatcacgaatccgggcccgaaagaggatgacgaactgctccacaaagtggttgatctgctcaagaagcaaggtctgctgctgtactgcgacatcatcgagagcacgttcgtggaggaacaactgccaagtcgcaaaatcgacgccatggacaacttccagaagtgcttcgccattctcaagctgtaccagccgggcgtggataacgttagctataacacgagtaagaagagtgacatggccgaggttaaggattggaaagcgatccgtgtggatctggtgatcacgccattcgagcagtacgcctatgcgctgctcggttggacgggcagccgcgaatttggtcgcgatctgcgccgctatgcgagtcatgagcgcaagatgatcctcgacaaccatggcctctacgaccgcaaaaagcgcatctttctgaaagcgggcagcgaagaagagattttcgcgcatctgggtctggattatgtggagccgtgggaacgcaacgcg

SEQ ID NO: 10 - protein, 394 aa, synthetic construct
  REGION 1..394: note = Variant of terminal deoxynucleotidyl transferase
MHHHHHHGGSGHPPSNTPELEVPSVIARKVSQYSCQRKTTLNNYNKKFTDAFEIMAENYEFKENEIFCLEFLRAASLLKYLPFPVTRMKDIQGLPCIGDQVRDVIEEIIEEGESSRVKEVLNDERYKAFKQFTSVFGVGVKTSEKWFRMGLRTVEELKADKSLKLSKMQKAGFLYYEDLVSCVSKAEADAVTLIVKNTVSTFLPDALVTITGGFRRGKKMGHDIDFLITNPGPKEDDELLHKVVDLLKKQGLLLYCDIIESTFVEEQLPSRKIDAMDNFQKCFAILKLYQPGVDNVSYNTSKKSDMAEVKDWKAIRVDLVITPFEQYAYALLGWTGSREFGRDLRRYASHERKMILDNHGLYDRKKRIFLKAGSEEEIFAHLGLDYVEPWERNA

SEQ ID NO: 11 - DNA, 1182 bp, synthetic construct
  misc_feature 1..1182: note = Variant of terminal deoxynucleotidyl transferase
  source 1..1182: mol_type = other DNA
atgcaccatcatcatcatcatggcggtagcggccatccgccgagcaataccccggagctggaagtgccgagcgttatcgcccgcaaggttagtcagtacagctgccagcgcaagaccacgctgaataactacaacaaaaagtttaccgacgcgttcgagatcatggccgagaactacgaatttaaagagaacgaaatcttctgtctggaatttctgcgcgccgcgagtctgctgaaatatctgccgttcccggttacccgcatgaaagacatccaaggtctgccgtgcattggcgaccaagttcgtgacgtgatcgaggagatcatcgaagaaggcgagagcagccgtgttaaagaagttctcaatgacgagcgctacaaggcctttaagcagttcaccagcgtgttcggtgtgggcgtgaaaaccagcgaaaagtggtttcgtatgggcctccgtacggttgaagagctgcgtgccgacaagagtctgaagctgagcaagatgcagaaggcgggctttctgtattacgaggatctggtgagctgcgttagtaaagcggaagccgatgccgttacgctcatcgtgaagaacacggtgagtacctttctgccggatgcgctggtgaccatcacgggcggtttccgccgtggcaaaaagatgggccacgacatcgactttctgatcacgaatccgggcccgaaagaggatgacgaactgctccacaaagtggttgatctgctcaagaagcaaggtctgctgctgtactgcgacatcatcgagagcacgttcgtggaggaacaactgccaagtcgcaaaatcgacgccatggacaacttccagaagtgcttcgccattctcaagctgtaccagccgggcgtggataacagcagctataacacgagtaagaagagtgacatggccgaggttaaggattggaaagcgatccgtgtggatctggtgatcacgccattcgagcagtacgcctatgcgctgctcggttggacgggcagccgcgaatttggtcgcgatctgcgccgctatgcgagtcatgagcgcaagatgatcctcgacaaccatggcctctacgaccgcaaaaagcgcatctttctgaaagcgggcagcgaagaagagattttcgcgcatctgggtctggattatgtggagccgtgggaacgcaacgcg

SEQ ID NO: 12 - protein, 394 aa, synthetic construct
  REGION 1..394: note = Variant of terminal deoxynucleotidyl transferase
MHHHHHHGGSGHPPSNTPELEVPSVIARKVSQYSCQRKTTLNNYNKKFTDAFEIMAENYEFKENEIFCLEFLRAASLLKYLPFPVTRMKDIQGLPCIGDQVRDVIEEIIEEGESSRVKEVLNDERYKAFKQFTSVFGVGVKTSEKWFRMGLRTVEELRADKSLKLSKMQKAGFLYYEDLVSCVSKAEADAVTLIVKNTVSTFLPDALVTITGGFRRGKKMGHDIDFLITNPGPKEDDELLHKVVDLLKKQGLLLYCDIIESTFVEEQLPSRKIDAMDNFQKCFAILKLYQPGVDNSSYNTSKKSDMAEVKDWKAIRVDLVITPFEQYAYALLGWTGSREFGRDLRRYASHERKMILDNHGLYDRKKRIFLKAGSEEEIFAHLGLDYVEPWERNA

SEQ ID NO: 13 - DNA, 1182 bp, synthetic construct
  misc_feature 1..1182: note = Variant of terminal deoxynucleotidyl transferase
  source 1..1182: mol_type = other DNA
atgcaccatcatcatcatcatggcggtagcggccatccgccgagcaataccccggagctggaagtgccggaggttatcgcccgcaaggttagtcagtacagctgccagcgcaagaccacgctgaataactacaacaaaaagtttaccgacgcgttcgagatcatggccgagaactacgaatttaaagagaacgaaatcttctgtctggaatttctgcgcgccgcgagtctgctgaaatatctgccgttcccggttacccgcatgaaagacatccaaggtctgccgtgcattggcgaccaagttcgtgacgtgatcgaggagatcatcgaagaaggcgagagcagccgtgttaaagaagttctcaatgacgagcgctacaaggcctttaagcagttcaccagcgtgttcggtgtgggcgtgaaaaccagcgaaaagtggtttcgtatgggcctccgtacggttgaagagctgaaggccgacaagagtctgaagctgagcaagatgcagaaggcgggctttctgtattacgaggatctggtgagctgcgttagtaaagcggaagccgatgccgttacgctcatcgtgaagaacacggtgagtacctttctgccggatgcgctggtgaccatcacgggcggtttccgccgtggcaaaaagatgggccacgacatcgactttctgatcacgaatccgggcccgaaagaggatgacgaactgctccacaaagtggttgatctgctcaagaagcaaggtctgctgctgtactgcgacatcatcgagagcacgttcgtggaggaacaactgccaagtcgcaaaatcgacgccatggacaacttccagaagtgcttcgccattctcaagctgtaccagccgggcgtggataacagcagctataacacgagtaagaagagtgacatggccgaggttaaggattggaaagcgatccgtgtggatctggtgatcacgccattcgagcagtacgcctatgcgctgctcggttggacgggcagccgcgaatttggtcgcgatctgcgccgctatgcgagtcatgagcgcaagatgatcctcgacaaccatggcctctacgaccgcaaaaagcgcatctttctgaaagcgggcagcgaagaagagattttcgcgcatctgggtctggattatgtggagccgtgggaacgcaacgcg

SEQ ID NO: 14 - protein, 394 aa, synthetic construct
  REGION 1..394: note = Variant of terminal deoxynucleotidyl transferase
MHHHHHHGGSGHPPSNTPELEVPEVIARKVSQYSCQRKTTLNNYNKKFTDAFEIMAENYEFKENEIFCLEFLRAASLLKYLPFPVTRMKDIQGLPCIGDQVRDVIEEIIEEGESSRVKEVLNDERYKAFKQFTSVFGVGVKTSEKWFRMGLRTVEELKADKSLKLSKMQKAGFLYYEDLVSCVSKAEADAVTLIVKNTVSTFLPDALVTITGGFRRGKKMGHDIDFLITNPGPKEDDELLHKVVDLLKKQGLLLYCDIIESTFVEEQLPSRKIDAMDNFQKCFAILKLYQPGVDNSSYNTSKKSDMAEVKDWKAIRVDLVITPFEQYAYALLGWTGSREFGRDLRRYASHERKMILDNHGLYDRKKRIFLKAGSEEEIFAHLGLDYVEPWERNA

SEQ ID NO: 15 - DNA, 1182 bp, synthetic construct
  misc_feature 1..1182: note = Variant of terminal deoxynucleotidyl transferase
  source 1..1182: mol_type = other DNA
atgcaccatcatcatcatcatggcggtagcggccatccgccgagcaataccccggagtctgaagtgccgagcgttatcgcccgcaaggttagtcagtacagctgccagcgcaagaccacgctgaataactacaacaaaaagtttaccgacgcgttcgagatcatggccgagaactacgaatttaaagagaacgaaatcttctgtctggaatttctgcgcgccgcgagtctgctgaaatatctgccgttcccggttacccgcatgaaagacatccaaggtctgccgtgcattggcgaccaagttcgtgacgtgatcgaggagatcatcgaagaaggcgagagcagccgtgttaaagaagttctcaatgacgagcgctacaaggcctttaagcagttcaccagcgtgttcggtgtgggcgtgaaaaccagcgaaaagtggtttcgtatgggcctccgtacggttgaagagctgaaggccgacaagagtctgaagctgagcaagatgcagaaggcgggctttctgtattacgaggatctggtgagctgcgttagtaaagcggaagccgatgccgttacgctcatcgtgaagaacacggtgagtacctttctgccggatgcgctggtgaccatcacgggcggtttccgccgtggcaaaaagatgggccacgacatcgactttctgatcacgaatccgggcccgaaagaggatgacgaactgctccacaaagtggttgatctgctcaagaagcaaggtctgctgctgtactgcgacatcatcgagagcacgttcgtggaggaacaactgccaagtcgcaaaatcgacgccatggacaacttccagaagtgcttcgccattctcaagctgtaccagccgggcgtggataacagcagctataacacgagtaagaagagtgacatggccgaggttaaggattggaaagcgatccgtgtggatctggtgatcacgccattcgagcagtacgcctatgcgctgctcggttggacgggcagccgcgaatttggtcgcgatctgcgccgctatgcgagtcatgagcgcaagatgatcctcgacaaccatggcctctacgaccgcaaaaagcgcatctttctgaaagcgggcagcgaagaagagattttcgcgcatctgggtctggattatgtggagccgtgggaacgcaacgcg

SEQ ID NO: 16 - protein, 394 aa, synthetic construct
  REGION 1..394: note = Variant of terminal deoxynucleotidyl transferase
MHHHHHHGGSGHPPSNTPESEVPSVIARKVSQYSCQRKTTLNNYNKKFTDAFEIMAENYEFKENEIFCLEFLRAASLLKYLPFPVTRMKDIQGLPCIGDQVRDVIEEIIEEGESSRVKEVLNDERYKAFKQFTSVFGVGVKTSEKWFRMGLRTVEELKADKSLKLSKMQKAGFLYYEDLVSCVSKAEADAVTLIVKNTVSTFLPDALVTITGGFRRGKKMGHDIDFLITNPGPKEDDELLHKVVDLLKKQGLLLYCDIIESTFVEEQLPSRKIDAMDNFQKCFAILKLYQPGVDNSSYNTSKKSDMAEVKDWKAIRVDLVITPFEQYAYALLGWTGSREFGRDLRRYASHERKMILDNHGLYDRKKRIFLKAGSEEEIFAHLGLDYVEPWERNA

SEQ ID NO: 17 - DNA, 1182 bp, synthetic construct
  misc_feature 1..1182: note = Variant of terminal deoxynucleotidyl transferase
  source 1..1182: mol_type = other DNA
atgcaccatcatcatcatcatggcggtagcggccatccgccgagcaataccccggagctggaagtgccgagcgttatcgcccgcaaggttagtcagtacagctgccagcgcaagaccacgctgaataactacaacaaaaagtttaccgacgcgttcgagatcatggccgagaactacgaatttaaagagaacgaaatcttctgtctggaatttctgcgcgccgcgagtctgctgaaatatctgccgttcccggttacccgcatgaaagacatccaaggtctgccgtgcattggcgaccaagttcgtgacgtgatcgaggagatcatcgaagaaggcgagagcagccgtgttaaagaagttctcaatgacgagcgctacaaggcctttaagcagttcaccagcgtgttcggtgtgggcgtgaaaaccagcgaaaagtggtttcgtatgggcctccgtacggttgaagagctgaaggccgacaagagtctgaagctgagcaagatgcagaaggcgggctttctgtattacgaggatctggtgagctgcgttagtaaagcggaagccgatgccgttacgctcatcgtgaagaacacggtgagtacctttctgccggatgcgctggtgaccatcacgggcggtttccgccgtggcaaaaagatgggccacgacatcgactttctgatcacgaatccgggcccgaaagaggatgacgaactgctccacaaagtggttgatctgctcaagaagcaaggtctgctgctgtactgcgacatcatcgagagcacgttcgtggaggaacaactgccaagtcgcaaaatcgacgccatggacaacttccagaagtgcttcgccattctcaagctgtaccagccgggcgtggataacagcagctataacacgagtaagaagagtgacatggccgaggttaaggattggaaagcgatccgtgtggatctggtgatcacgccattcgagcagtacgcctatgcgctgctcggttggacgggcagccgcgaatttggtcgcgatctgcgccgctatgcgagtcatgagcgcaatatgatcctcgacaaccatggcctctacgaccgcaaaaagcgcatctttctgaaagcgggcagcgaagaagagattttcgcgcatctgggtctggattatgtggagccgtgggaacgcaacgcg

SEQ ID NO: 18 - protein, 394 aa, synthetic construct
  REGION 1..394: note = Variant of terminal deoxynucleotidyl transferase
MHHHHHHGGSGHPPSNTPELEVPSVIARKVSQYSCQRKTTLNNYNKKFTDAFEIMAENYEFKENEIFCLEFLRAASLLKYLPFPVTRMKDIQGLPCIGDQVRDVIEEIIEEGESSRVKEVLNDERYKAFKQFTSVFGVGVKTSEKWFRMGLRTVEELKADKSLKLSKMQKAGFLYYEDLVSCVSKAEADAVTLIVKNTVSTFLPDALVTITGGFRRGKKMGHDIDFLITNPGPKEDDELLHKVVDLLKKQGLLLYCDIIESTFVEEQLPSRKIDAMDNFQKCFAILKLYQPGVDNSSYNTSKKSDMAEVKDWKAIRVDLVITPFEQYAYALLGWTGSREFGRDLRRYASHERNMILDNHGLYDRKKRIFLKAGSEEEIFAHLGLDYVEPWERNA

SEQ ID NO: 19 - DNA, 1182 bp, synthetic construct
  misc_feature 1..1182: note = Variant of terminal deoxynucleotidyl transferase
  source 1..1182: mol_type = other DNA
atgcaccatcatcatcatcatggcggtagcggccatccgccgagcaataccccggagctggaagtgccgagcgttatcgcccgcaaggttagtcagtacagctgccagcgcaagaccacgctgaataactacaacaaaaagtttaccgacgcgttcgagatcatggccgagaactacgaatttaaagagaacgaaatcaagtgtctggaatttctgcgcgccgcgagtctgctgaaatatctgccgttcccggttacccgcatgaaagacatccaaggtctgccgtgcattggcgaccaagttcgtgacgtgatcgaggagatcatcgaagaaggcgagagcagccgtgttaaagaagttctcaatgacgagcgctacaaggcctttaagcagttcaccagcgtgttcggtgtgggcgtgaaaaccagcgaaaagtggtttcgtatgggcctccgtacggttgaagagctgaaggccgacaagagtctgaagctgagcaagatgcagaaggcgggctttctgtattacgaggatctggtgagctgcgttagtaaagcggaagccgatgccgttacgctcatcgtgaagaacacggtgagtacctttctgccggatgcgctggtgaccatcacgggcggtttccgccgtggcaaaaagatgggccacgacatcgactttctgatcacgaatccgggcccgaaagaggatgacgaactgctccacaaagtggttgatctgctcaagaagcaaggtctgctgctgtactgcgacatcatcgagagcacgttcgtggaggaacaactgccaagtcgcaaaatcgacgccatggacaacttccagaagtgcttcgccattctcaagctgtaccagccgggcgtggataacagcagctataacacgagtaagaagagtgacatggccgaggttaaggattggaaagcgatccgtgtggatctggtgatcacgccattcgagcagtacgcctatgcgctgctcggttggacgggcagccgcgaatttggtcgcgatctgcgccgctatgcgagtcatgagcgcaagatgatcctcgacaaccatggcctctacgaccgcaaaaagcgcatctttctgaaagcgggcagcgaagaagagattttcgcgcatctgggtctggattatgtggagccgtgggaacgcaacgcg

SEQ ID NO: 20 - protein, 394 aa, synthetic construct
  REGION 1..394: note = Variant of terminal deoxynucleotidyl transferase
MHHHHHHGGSGHPPSNTPELEVPSVIARKVSQYSCQRKTTLNNYNKKFTDAFEIMAENYEFKENEIKCLEFLRAASLLKYLPFPVTRMKDIQGLPCIGDQVRDVIEEIIEEGESSRVKEVLNDERYKAFKQFTSVFGVGVKTSEKWFRMGLRTVEELKADKSLKLSKMQKAGFLYYEDLVSCVSKAEADAVTLIVKNTVSTFLPDALVTITGGFRRGKKMGHDIDFLITNPGPKEDDELLHKVVDLLKKQGLLLYCDIIESTFVEEQLPSRKIDAMDNFQKCFAILKLYQPGVDNSSYNTSKKSDMAEVKDWKAIRVDLVITPFEQYAYALLGWTGSREFGRDLRRYASHERKMILDNHGLYDRKKRIFLKAGSEEEIFAHLGLDYVEPWERNA

SEQ ID NO: 21 - DNA, 1182 bp, synthetic construct
  misc_feature 1..1182: note = Variant of terminal deoxynucleotidyl transferase
  source 1..1182: mol_type = other DNA
atgcaccatcatcatcatcatggcggtagcggccatccgccgagcaataccccggagctggaagtgccgagcgttatcgcccgcaaggttagtcagtacagctgccagcgcaagaccacgctgaataactacaacaaaaagtttaccgacgcgttcgagatcatggccgagaactacgaatttaaagagaacgaaatccgttgtctggaatttctgcgcgccgcgagtctgctgaaatatctgccgttcccggttacccgcatgaaagacatccaaggtctgccgtgcattggcgaccaagttcgtgacgtgatcgaggagatcatcgaagaaggcgagagcagccgtgttaaagaagttctcaatgacgagcgctacaaggcctttaagcagttcaccagcgtgttcggtgtgggcgtgaaaaccagcgaaaagtggtttcgtatgggcctccgtacggttgaagagctgaaggccgacaagagtctgaagctgagcaagatgcagaaggcgggctttctgtattacgaggatctggtgagctgcgttagtaaagcggaagccgatgccgttacgctcatcgtgaagaacacggtgagtacctttctgccggatgcgctggtgaccatcacgggcggtttccgccgtggcaaaaagatgggccacgacatcgactttctgatcacgaatccgggcccgaaagaggatgacgaactgctccacaaagtggttgatctgctcaagaagcaaggtctgctgctgtactgcgacatcatcgagagcacgttcgtggaggaacaactgccaagtcgcaaaatcgacgccatggacaacttccagaagtgcttcgccattctcaagctgtaccagccgggcgtggataacagcagctataacacgagtaagaagagtgacatggccgaggttaaggattggaaagcgatccgtgtggatctggtgatcacgccattcgagcagtacgcctatgcgctgctcggttggacgggcagccgcgaatttggtcgcgatctgcgccgctatgcgagtcatgagcgcaagatgatcctcgacaaccatggcctctacgaccgcaaaaagcgcatctttctgaaagcgggcagcgaagaagagattttcgcgcatctgggtctggattatgtggagccgtgggaacgcaacgcg

SEQ ID NO: 22 - protein, 394 aa, synthetic construct
  REGION 1..394: note = Variant of terminal deoxynucleotidyl transferase
MHHHHHHGGSGHPPSNTPELEVPSVIARKVSQYSCQRKTTLNNYNKKFTDAFEIMAENYEFKENEIRCLEFLRAASLLKYLPFPVTRMKDIQGLPCIGDQVRDVIEEIIEEGESSRVKEVLNDERYKAFKQFTSVFGVGVKTSEKWFRMGLRTVEELKADKSLKLSKMQKAGFLYYEDLVSCVSKAEADAVTLIVKNTVSTFLPDALVTITGGFRRGKKMGHDIDFLITNPGPKEDDELLHKVVDLLKKQGLLLYCDIIESTFVEEQLPSRKIDAMDNFQKCFAILKLYQPGVDNSSYNTSKKSDMAEVKDWKAIRVDLVITPFEQYAYALLGWTGSREFGRDLRRYASHERKMILDNHGLYDRKKRIFLKAGSEEEIFAHLGLDYVEPWERNA

SEQ ID NO: 23 - DNA, 1182 bp, synthetic construct
  misc_feature 1..1182: note = Variant of terminal deoxynucleotidyl transferase
  source 1..1182: mol_type = other DNA
atgcaccatcatcatcatcatggcggtagcggccatccgccgagcaataccccggagctggaagtgccgagcgttatcgcccgcaaggttagtcagtacagctgccagcgcaagaccacgctgaataactacaacaaaaagtttaccgacgcgttcgagatcatggccgagaactacgaatttaaagagaacgaaatcttctgtctggaatttctgcgcgccgcgagtctgctgaaatatctgccgttcccggttacccgcatgaaagacatccaaggtctgccgtgcattggcgaccaagttcgtgacgtgatcgaggagatcatcgaagaaggcgagagcagccgtgttaaagaagttctcaatgacgagcgctacaaggcctttaagcagttcaccagcgtgttcggtgtgggcgtgaaaaccagcgaaaagtggtttcgtatgggcctccgtacggttgaagagctgaaggccgacaagagtctgaagctgagcaagatgcagaaggcgggctttctgtattacgaggatctggtgagctgcgttagtaaagcggaagccgatgccgttacgctcatcgtgaagaacacggtgagtacctttctgccggatgcgctggtgaccatcacgggcggtttccgccgtggcaaaaagatgggccacgacatcgactttctgatcacgaatccgggcccgaaagaggatgacgaactgctccacaaagtggttgatctgctcaagaagcaaggtctgctgctgtactgcgacatcatcgagagcacgttcgtggaggaacaactgccaagtcgcaaaatcgacgccatggacaacttccagaagtgcttcgccattctcaagctgtaccagccgggcgtggatgatagcagctataacacgagtaagaagagtgacatggccgaggttaaggattggaaagcgatccgtgtggatctggtgatcacgccattcgagcagtacgcctatgcgctgctcggttggacgggcagccgcgaatttggtcgcgatctgcgccgctatgcgagtcatgagcgcaagatgatcctcgacaaccatggcctctacgaccgcaaaaagcgcatctttctgaaagcgggcagcgaagaagagattttcgcgcatctgggtctggattatgtggagccgtgggaacgcaacgcg

SEQ ID NO: 24 - protein, 394 aa, synthetic construct
  REGION 1..394: note = Variant of terminal deoxynucleotidyl transferase
MHHHHHHGGSGHPPSNTPELEVPSVIARKVSQYSCQRKTTLNNYNKKFTDAFEIMAENYEFKENEIFCLEFLRAASLLKYLPFPVTRMKDIQGLPCIGDQVRDVIEEIIEEGESSRVKEVLNDERYKAFKQFTSVFGVGVKTSEKWFRMGLRTVEELKADKSLKLSKMQKAGFLYYEDLVSCVSKAEADAVTLIVKNTVSTFLPDALVTITGGFRRGKKMGHDIDFLITNPGPKEDDELLHKVVDLLKKQGLLLYCDIIESTFVEEQLPSRKIDAMDNFQKCFAILKLYQPGVDDSSYNTSKKSDMAEVKDWKAIRVDLVITPFEQYAYALLGWTGSREFGRDLRRYASHERKMILDNHGLYDRKKRIFLKAGSEEEIFAHLGLDYVEPWERNA

SEQ ID NO: 25 - DNA, 1182 bp, synthetic construct
  misc_feature 1..1182: note = Variant of terminal deoxynucleotidyl transferase
  source 1..1182: mol_type = other DNA
atgcaccatcatcatcatcatggcggtagcggccatccgccgagcaataccccggagctggaagtgccgagcgttatcgcccgcaaggttagtcagtacagctgccagcgcaagaccacgctgaataactacaacaaaaagtttaccgacgcgttcgagatcatggccgagaactacgaatttaaagagaacgaaatcttctgtctggaatttctgcgcgccgcgagtctgctgaaatatctgccgttcccggttacccgcatgaaagacatccaaggtctgccgtgcattggcgaccaagttcgttctgtgatcgaggagatcatcgaagaaggcgagagcagccgtgttaaagaagttctcaatgacgagcgctacaaggcctttaagcagttcaccagcgtgttcggtgtgggcgtgaaaaccagcgaaaagtggtttcgtatgggcctccgtacggttgaagagctgaaggccgacaagagtctgaagctgagcaagatgcagaaggcgggctttctgtattacgaggatctggtgagctgcgttagtaaagcggaagccgatgccgttacgctcatcgtgaagaacacggtgagtacctttctgccggatgcgctggtgaccatcacgggcggtttccgccgtggcaaaaagatgggccacgacatcgactttctgatcacgaatccgggcccgaaagaggatgacgaactgctccacaaagtggttgatctgctcaagaagcaaggtctgctgctgtactgcgacatcatcgagagcacgttcgtggaggaacaactgccaagtcgcaaaatcgacgccatggacaacttccagaagtgcttcgccattctcaagctgtaccagccgggcgtggataacagcagctataacacgagtaagaagagtgacatggccgaggttaaggattggaaagcgatccgtgtggatctggtgatcacgccattcgagcagtacgcctatgcgctgctcggttggacgggcagccgcgaatttggtcgcgatctgcgccgctatgcgagtcatgagcgcaagatgatcctcgacaaccatggcctctacgaccgcaaaaagcgcatctttctgaaagcgggcagcgaagaagagattttcgcgcatctgggtctggattatgtggagccgtgggaacgcaacgcg

SEQ ID NO: 26 - protein, 394 aa, synthetic construct
  REGION 1..394: note = Variant of terminal deoxynucleotidyl transferase
MHHHHHHGGSGHPPSNTPELEVPSVIARKVSQYSCQRKTTLNNYNKKFTDAFEIMAENYEFKENEIFCLEFLRAASLLKYLPFPVTRMKDIQGLPCIGDQVRSVIEEIIEEGESSRVKEVLNDERYKAFKQFTSVFGVGVKTSEKWFRMGLRTVEELKADKSLKLSKMQKAGFLYYEDLVSCVSKAEADAVTLIVKNTVSTFLPDALVTITGGFRRGKKMGHDIDFLITNPGPKEDDELLHKVVDLLKKQGLLLYCDIIESTFVEEQLPSRKIDAMDNFQKCFAILKLYQPGVDNSSYNTSKKSDMAEVKDWKAIRVDLVITPFEQYAYALLGWTGSREFGRDLRRYASHERKMILDNHGLYDRKKRIFLKAGSEEEIFAHLGLDYVEPWERNA

SEQ ID NO: 27 - DNA, 1182 bp, synthetic construct
  misc_feature 1..1182: note = Variant of terminal deoxynucleotidyl transferase
  source 1..1182: mol_type = other DNA
atgcaccatcatcatcatcatggcggtagcggccatccgccgagcaataccccggagctgggggtgccgagcgttatcgcccgcaaggttagtcagtacagctgccagcgcaagaccacgctgaataactacaacaaaaagtttaccgacgcgttcgagatcatggccgagaactacgaatttaaagagaacgaaatcttctgtctggaatttctgcgcgccgcgagtctgctgaaatatctgccgttcccggttacccgcatgaaagacatccaaggtctgccgtgcattggcgaccaagttcgtgacgtgatcgaggagatcatcgaagaaggcgagagcagccgtgttaaagaagttctcaatgacgagcgctacaaggcctttaagcagttcaccagcgtgttcggtgtgggcgtgaaaaccagcgaaaagtggtttcgtatgggcctccgtacggttgaagagctgaaggccgacaagagtctgaagctgagcaagatgcagaaggcgggctttctgtattacgaggatctggtgagctgcgttagtaaagcggaagccgatgccgttacgctcatcgtgaagaacacggtgagtacctttctgccggatgcgctggtgaccatcacgggcggtttccgccgtggcaaaaagatgggccacgacatcgactttctgatcacgaatccgggcccgaaagaggatgacgaactgctccacaaagtggttgatctgctcaagaagcaaggtctgctgctgtactgcgacatcatcgagagcacgttcgtggaggaacaactgccaagtcgcaaaatcgacgccatggacaacttccagaagtgcttcgccattctcaagctgtaccagccgggcgtggataacagcagctataacacgagtaagaagagtgacatggccgaggttaaggattggaaagcgatccgtgtggatctggtgatcacgccattcgagcagtacgcctatgcgctgctcggttggacgggcagccgcgaatttggtcgcgatctgcgccgctatgcgagtcatgagcgcaagatgatcctcgacaaccatggcctctacgaccgcaaaaagcgcatctttctgaaagcgggcagcgaagaagagattttcgcgcatctgggtctggattatgtggagccgtgggaacgcaacgcg

SEQ ID NO: 28 - protein, 394 aa, synthetic construct
  REGION 1..394: note = Variant of terminal deoxynucleotidyl transferase
MHHHHHHGGSGHPPSNTPELGVPSVIARKVSQYSCQRKTTLNNYNKKFTDAFEIMAENYEFKENEIFCLEFLRAASLLKYLPFPVTRMKDIQGLPCIGDQVRDVIEEIIEEGESSRVKEVLNDERYKAFKQFTSVFGVGVKTSEKWFRMGLRTVEELKADKSLKLSKMQKAGFLYYEDLVSCVSKAEADAVTLIVKNTVSTFLPDALVTITGGFRRGKKMGHDIDFLITNPGPKEDDELLHKVVDLLKKQGLLLYCDIIESTFVEEQLPSRKIDAMDNFQKCFAILKLYQPGVDNSSYNTSKKSDMAEVKDWKAIRVDLVITPFEQYAYALLGWTGSREFGRDLRRYASHERKMILDNHGLYDRKKRIFLKAGSEEEIFAHLGLDYVEPWERNA

SEQ ID NO: 29 - DNA, 1182 bp, synthetic construct
  misc_feature 1..1182: note = Variant of terminal deoxynucleotidyl transferase
  source 1..1182: mol_type = other DNA
atgcaccatcatcatcatcatggcggtagcggccatccgccgagcaataccccggagctggaagtgccgagcgttatcgcccgcaaggttagtcagtacagctgccagcgcaagaccacgctgaataactacaacaaaaagtttaccgacgcgttcgagatcatggccgagaactacgaatttaaagagaacgaaatcttctgtctggaatttctgcgcgccgcgagtctgctgaaatatctgccgttcccggttacccgcatgaaagacatccaaggtctgccgtgcattggcgaccaagttcgtgacgtgatcgaggagatcatcgaagaaggcgagagcagccgtgttaaagaagttctcaatgacgagcgctacaaggcctttaagcagttcaccagcgtgttcggtgtgggcgtgaaaaccagcgaaaagtggtttcgtatgggcctccgtacggttgaagagctgaaggccgacaagagtctgaagctgagcaagatgcagaaggcgggctttctgtattacgaggatctggtgagctgcgttagtaaagcggaagccgatgccgttacgctcatcgtgaagaacacggtgagtacctttctgccggatgcgctggtgaccatcacgggcggtttccgccgtggcaaaaagatgggccacgacatcgactttctgatcacgaatccgggcccgaaagaggatgacgaactgctccacaaagtggttgatctgctcaagaagcaaggtctgctgctgtactgcgacatcatcgagagcacgttcgtggaggaacaactgccaagtcgcaaaatcgacgccatggacaacttccagaagtgcttcgccattctcaagctgtaccagccgggcgtggattctagcagctataacacgagtaagaagagtgacatggccgaggttaaggattggaaagcgatccgtgtggatctggtgatcacgccattcgagcagtacgcctatgcgctgctcggttggacgggcagccgcgaatttggtcgcgatctgcgccgctatgcgagtcatgagcgcaagatgatcctcgacaaccatggcctctacgaccgcaaaaagcgcatctttctgaaagcgggcagcgaagaagagattttcgcgcatctgggtctggattatgtggagccgtgggaacgcaacgcg

SEQ ID NO: 30 - protein, 394 aa, synthetic construct
  REGION 1..394: note = Variant of terminal deoxynucleotidyl transferase
MHHHHHHGGSGHPPSNTPELEVPSVIARKVSQYSCQRKTTLNNYNKKFTDAFEIMAENYEFKENEIFCLEFLRAASLLKYLPFPVTRMKDIQGLPCIGDQVRDVIEEIIEEGESSRVKEVLNDERYKAFKQFTSVFGVGVKTSEKWFRMGLRTVEELKADKSLKLSKMQKAGFLYYEDLVSCVSKAEADAVTLIVKNTVSTFLPDALVTITGGFRRGKKMGHDIDFLITNPGPKEDDELLHKVVDLLKKQGLLLYCDIIESTFVEEQLPSRKIDAMDNFQKCFAILKLYQPGVDSSSYNTSKKSDMAEVKDWKAIRVDLVITPFEQYAYALLGWTGSREFGRDLRRYASHERKMILDNHGLYDRKKRIFLKAGSEEEIFAHLGLDYVEPWERNA

SEQ ID NO: 31 - DNA, 1182 bp, synthetic construct
  misc_feature 1..1182: note = Variant of terminal deoxynucleotidyl transferase
  source 1..1182: mol_type = other DNA
atgcaccatcatcatcatcatggcggtagcggccatccgccgagcaataccccggagctggaagtgccgagcgttatcgcccgcaaggttagtcagtacagctgccagcgcaagaccacgctgaataactacaacaaaaagtttaccgacgcgttcgagatcatggccgagaactacgaatttaaagagaacgaaaggttctgtctggaatttctgcgcgccgcgagtctgctgaaatatctgccgttcccggttacccgcatgaaagacatccaaggtctgccgtgcattggcgaccaagttcgtgacgtgatcgaggagatcatcgaagaaggcgagagcagccgtgttaaagaagttctcaatgacgagcgctacaaggcctttaagcagttcaccagcgtgttcggtgtgggcgtgaaaaccagcgaaaagtggtttcgtatgggcctccgtacggttgaagagctgaaggccgacaagagtctgaagctgagcaagatgcagaaggcgggctttctgtattacgaggatctggtgagctgcgttagtaaagcggaagccgatgccgttacgctcatcgtgaagaacacggtgagtacctttctgccggatgcgctggtgaccatcacgggcggtttccgccgtggcaaaaagatgggccacgacatcgactttctgatcacgaatccgggcccgaaagaggatgacgaactgctccacaaagtggttgatctgctcaagaagcaaggtctgctgctgtactgcgacatcatcgagagcacgttcgtggaggaacaactgccaagtcgcaaaatcgacgccatggacaacttccagaagtgcttcgccattctcaagctgtaccagccgggcgtggataacagcagctataacacgagtaagaagagtgacatggccgaggttaaggattggaaagcgatccgtgtggatctggtgatcacgccattcgagcagtacgcctatgcgctgctcggttggacgggcagccgcgaatttggtcgcgatctgcgccgctatgcgagtcatgagcgcaagatgatcctcgacaaccatggcctctacgaccgcaaaaagcgcatctttctgaaagcgggcagcgaagaagagattttcgcgcatctgggtctggattatgtggagccgtgggaacgcaacgcg

SEQ ID NO: 32 - protein, 394 aa, synthetic construct
  REGION 1..394: note = Variant of terminal deoxynucleotidyl transferase
MHHHHHHGGSGHPPSNTPELEVPSVIARKVSQYSCQRKTTLNNYNKKFTDAFEIMAENYEFKENERFCLEFLRAASLLKYLPFPVTRMKDIQGLPCIGDQVRDVIEEIIEEGESSRVKEVLNDERYKAFKQFTSVFGVGVKTSEKWFRMGLRTVEELKADKSLKLSKMQKAGFLYYEDLVSCVSKAEADAVTLIVKNTVSTFLPDALVTITGGFRRGKKMGHDIDFLITNPGPKEDDELLHKVVDLLKKQGLLLYCDIIESTFVEEQLPSRKIDAMDNFQKCFAILKLYQPGVDNSSYNTSKKSDMAEVKDWKAIRVDLVITPFEQYAYALLGWTGSREFGRDLRRYASHERKMILDNHGLYDRKKRIFLKAGSEEEIFAHLGLDYVEPWERNA

SEQ ID NO: 33 - DNA, 1182 bp, synthetic construct
  misc_feature 1..1182: note = Variant of terminal deoxynucleotidyl transferase
  source 1..1182: mol_type = other DNA
atgcaccatcatcatcatcatggcggtagcggccatccgccgagcaataccccggagctggaagtgccgagcgttatcgcccgcaaggttagtcagtacagctgccagcgcaagaccacgctgaataactacaacaaaaagtttaccgacgcgttcgagatcatggccgagaactacgaatttaaagagaacgaaatcttctgtctggaatttctgcgcgccgcgagtctgctgaaatatctgccgttcccggttacccgcatgaaagacatccaaggtctgccgtgcattggcgaccaagttcgtgacgtgatcgaggagatcatcgaagaaggcgagagcagccgtgttaaagaagttctcaatgacgagcgctacaaggcctttaagcagttcaccagcgtgttcggtgtgggcgtgaaaaccagcgaaaagtggtttcgtatgggcctccgtacggttgaagagctgaaggccgacaagagtctgaagctgagcaagatgcagaaggcgggctttctgtattacgaggatctggtgagctgcgttagtaaagcggaagccgatgccgttacgctcatcgtgaagaacacggtggctacctttctgccggatgcgctggtgaccatcacgggcggtttccgccgtggcaaaaagatgggccacgacatcgactttctgatcacgaatccgggcccgaaagaggatgacgaactgctccacaaagtggttgatctgctcaagaagcaaggtctgctgctgtactgcgacatcatcgagagcacgttcgtggaggaacaactgccaagtcgcaaaatcgacgccatggacaacttccagaagtgcttcgccattctcaagctgtaccagccgggcgtggataacagcagctataacacgagtaagaagagtgacatggccgaggttaaggattggaaagcgatccgtgtggatctggtgatcacgccattcgagcagtacgcctatgcgctgctcggttggacgggcagccgcgaatttggtcgcgatctgcgccgctatgcgagtcatgagcgcaagatgatcctcgacaaccatggcctctacgaccgcaaaaagcgcatctttctgaaagcgggcagcgaagaagagattttcgcgcatctgggtctggattatgtggagccgtgggaacgcaacgcg

SEQ ID NO: 34 - protein, 394 aa, synthetic construct
  REGION 1..394: note = Variant of terminal deoxynucleotidyl transferase
MHHHHHHGGSGHPPSNTPELEVPSVIARKVSQYSCQRKTTLNNYNKKFTDAFEIMAENYEFKENEIFCLEFLRAASLLKYLPFPVTRMKDIQGLPCIGDQVRDVIEEIIEEGESSRVKEVLNDERYKAFKQFTSVFGVGVKTSEKWFRMGLRTVEELKADKSLKLSKMQKAGFLYYEDLVSCVSKAEADAVTLIVKNTVATFLPDALVTITGGFRRGKKMGHDIDFLITNPGPKEDDELLHKVVDLLKKQGLLLYCDIIESTFVEEQLPSRKIDAMDNFQKCFAILKLYQPGVDNSSYNTSKKSDMAEVKDWKAIRVDLVITPFEQYAYALLGWTGSREFGRDLRRYASHERKMILDNHGLYDRKKRIFLKAGSEEEIFAHLGLDYVEPWERNA

SEQ ID NO: 35 - DNA, 1182 bp, synthetic construct
  misc_feature 1..1182: note = Variant of terminal deoxynucleotidyl transferase
  source 1..1182: mol_type = other DNA
atgcaccatcatcatcatcatggcggtagcggccatccgccgagcaataccccggagctggaagtgccgagcgttatcgcccgcaaggttagtcagtacagctgccagcgcaagaccacgctgaataactacaacaaaaagtttaccgacgcgttcgagatcatggccgagaactacgaatttaaagagaacgaaatcttctgtctggaatttctgcgcgccgcgagtctgctgaaatatctgccgttcccggttacccgcatgaaagacatccaaggtctgccgtgcattggcgaccaagttcgtgacgtgatcgaggagatcatcgaagaaggcgagagcagccgtgttaaagaagttctcaatgacgagcgctacaaggcctttaagcagttcaccagcgtgttcggtgtgggcgtgaaaaccagcgaaaagtggtttcgtatgggcctccgtacggttgaagagctgaaggccgacagtagtctgaagctgagcaagatgcagaaggcgggctttctgtattacgaggatctggtgagctgcgttagtaaagcggaagccgatgccgttacgctcatcgtgaagaacacggtgagtacctttctgccggatgcgctggtgaccatcacgggcggtttccgccgtggcaaaaagatgggccacgacatcgactttctgatcacgaatccgggcccgaaagaggatgacgaactgctccacaaagtggttgatctgctcaagaagcaaggtctgctgctgtactgcgacatcatcgagagcacgttcgtggaggaacaactgccaagtcgcaaaatcgacgccatggacaacttccagaagtgcttcgccattctcaagctgtaccagccgggcgtggataacagcagctataacacgagtaagaagagtgacatggccgaggttaaggattggaaagcgatccgtgtggatctggtgatcacgccattcgagcagtacgcctatgcgctgctcggttggacgggcagccgcgaatttggtcgcgatctgcgccgctatgcgagtcatgagcgcaagatgatcctcgacaaccatggcctctacgaccgcaaaaagcgcatctttctgaaagcgggcagcgaagaagagattttcgcgcatctgggtctggattatgtggagccgtgggaacgcaacgcg

SEQ ID NO: 36 - protein, 394 aa, synthetic construct
  REGION 1..394: note = Variant of terminal deoxynucleotidyl transferase
MHHHHHHGGSGHPPSNTPELEVPSVIARKVSQYSCQRKTTLNNYNKKFTDAFEIMAENYEFKENEIFCLEFLRAASLLKYLPFPVTRMKDIQGLPCIGDQVRDVIEEIIEEGESSRVKEVLNDERYKAFKQFTSVFGVGVKTSEKWFRMGLRTVEELKADSSLKLSKMQKAGFLYYEDLVSCVSKAEADAVTLIVKNTVSTFLPDALVTITGGFRRGKKMGHDIDFLITNPGPKEDDELLHKVVDLLKKQGLLLYCDIIESTFVEEQLPSRKIDAMDNFQKCFAILKLYQPGVDNSSYNTSKKSDMAEVKDWKAIRVDLVITPFEQYAYALLGWTGSREFGRDLRRYASHERKMILDNHGLYDRKKRIFLKAGSEEEIFAHLGLDYVEPWERNA

SEQ ID NO: 37 - DNA, 1182 bp, synthetic construct
  misc_feature 1..1182: note = Variant of terminal deoxynucleotidyl transferase
  source 1..1182: mol_type = other DNA
atgcaccatcatcatcatcatggcggtagcggccatccgccgagcaataccccggagctggaagtgccgagcgttatcgcccgcaaggttagtcagtacagctgccagcgcaagaccacgctgaataactacaacaaaaagtttaccgacgcgttcgagatcatggccgagaactacgaatttaaagagaacgaaatcttctgtctggaatttctgcgcgccgcgagtctgctgaaatatctgccgttcccggttacccgcatgaaagacatccaaggtctgccgtgcattggcgaccaagttcgtgacgtgatcgaggagatcatcgaacgtggcgagagcagccgtgttaaagaagttctcaatgacgagcgctacaaggcctttaagcagttcaccagcgtgttcggtgtgggcgtgaaaaccagcgaaaagtggtttcgtatgggcctccgtacggttgaagagctgaaggccgacaagagtctgaagctgagcaagatgcagaaggcgggctttctgtattacgaggatctggtgagctgcgttagtaaagcggaagccgatgccgttacgctcatcgtgaagaacacggtgagtacctttctgccggatgcgctggtgaccatcacgggcggtttccgccgtggcaaaaagatgggccacgacatcgactttctgatcacgaatccgggcccgaaagaggatgacgaactgctccacaaagtggttgatctgctcaagaagcaaggtctgctgctgtactgcgacatcatcgagagcacgttcgtggaggaacaactgccaagtcgcaaaatcgacgccatggacaacttccagaagtgcttcgccattctcaagctgtaccagccgggcgtggataacagcagctataacacgagtaagaagagtgacatggccgaggttaaggattggaaagcgatccgtgtggatctggtgatcacgccattcgagcagtacgcctatgcgctgctcggttggacgggcagccgcgaatttggtcgcgatctgcgccgctatgcgagtcatgagcgcaagatgatcctcgacaaccatggcctctacgaccgcaaaaagcgcatctttctgaaagcgggcagcgaagaagagattttcgcgcatctgggtctggattatgtggagccgtgggaacgcaacgcg

SEQ ID NO: 38 - protein, 394 aa, synthetic construct
  REGION 1..394: note = Variant of terminal deoxynucleotidyl transferase
MHHHHHHGGSGHPPSNTPELEVPSVIARKVSQYSCQRKTTLNNYNKKFTDAFEIMAENYEFKENEIFCLEFLRAASLLKYLPFPVTRMKDIQGLPCIGDQVRDVIEEIIERGESSRVKEVLNDERYKAFKQFTSVFGVGVKTSEKWFRMGLRTVEELKADKSLKLSKMQKAGFLYYEDLVSCVSKAEADAVTLIVKNTVSTFLPDALVTITGGFRRGKKMGHDIDFLITNPGPKEDDELLHKVVDLLKKQGLLLYCDIIESTFVEEQLPSRKIDAMDNFQKCFAILKLYQPGVDNSSYNTSKKSDMAEVKDWKAIRVDLVITPFEQYAYALLGWTGSREFGRDLRRYASHERKMILDNHGLYDRKKRIFLKAGSEEEIFAHLGLDYVEPWERNA

SEQ ID NO: 39 - DNA, 1182 bp, synthetic construct
  misc_feature 1..1182: note = Variant of terminal deoxynucleotidyl transferase
  source 1..1182: mol_type = other DNA
atgcaccatcatcatcatcatggcggtagcggccatccgccgagcaataccccggagctggaagtgccgagcgttatcgcccgcaaggttagtcagtacagctgccagcgcaagaccacgctgaataactacaacaaaaagtttaccgacgcgttcgagatcatggccgagaactacgaatttaaagagaacgaaatcttctgtctggaatttctgcgcgccgcgagtctgctgaaatatctgccgttcccggttacccgcatgaaagacatccaaggtctgccgtgcattggcgaccaagttcgtgacgtgatcgaggagatcatcgaagaaggcgagagcagccgtgttaaagaagttctcaatgacgagcgctacaaggcctttaagcagttcaccagcgtgttcggtgtgggcgtgaaaaccagcgaaaagtggtttcgtatgggcctccgtacggttgaagagctgaaggccgacaagagtctgaagctgagcaagatgcagaaggcgggctttctgtattacgaggatctggtgagctgcgttagtaaagcggaagccgatgccgttacgctcatcgtgaaggggacggtgagtacctttctgccggatgcgctggtgaccatcacgggcggtttccgccgtggcaaaaagatgggccacgacatcgactttctgatcacgaatccgggcccgaaagaggatgacgaactgctccacaaagtggttgatctgctcaagaagcaaggtctgctgctgtactgcgacatcatcgagagcacgttcgtggaggaacaactgccaagtcgcaaaatcgacgccatggacaacttccagaagtgcttcgccattctcaagctgtaccagccgggcgtggataacagcagctataacacgagtaagaagagtgacatggccgaggttaaggattggaaagcgatccgtgtggatctggtgatcacgccattcgagcagtacgcctatgcgctgctcggttggacgggcagccgcgaatttggtcgcgatctgcgccgctatgcgagtcatgagcgcaagatgatcctcgacaaccatggcctctacgaccgcaaaaagcgcatctttctgaaagcgggcagcgaagaagagattttcgcgcatctgggtctggattatgtggagccgtgggaacgcaacgcg

SEQ ID NO: 40 - protein, 394 aa, synthetic construct
  REGION 1..394: note = Variant of terminal deoxynucleotidyl transferase
MHHHHHHGGSGHPPSNTPELEVPSVIARKVSQYSCQRKTTLNNYNKKFTDAFEIMAENYEFKENEIFCLEFLRAASLLKYLPFPVTRMKDIQGLPCIGDQVRDVIEEIIEEGESSRVKEVLNDERYKAFKQFTSVFGVGVKTSEKWFRMGLRTVEELKADKSLKLSKMQKAGFLYYEDLVSCVSKAEADAVTLIVKGTVSTFLPDALVTITGGFRRGKKMGHDIDFLITNPGPKEDDELLHKVVDLLKKQGLLLYCDIIESTFVEEQLPSRKIDAMDNFQKCFAILKLYQPGVDNSSYNTSKKSDMAEVKDWKAIRVDLVITPFEQYAYALLGWTGSREFGRDLRRYASHERKMILDNHGLYDRKKRIFLKAGSEEEIFAHLGLDYVEPWERNA

SEQ ID NO: 41 - DNA, 1182 bp, synthetic construct
  misc_feature 1..1182: note = Variant of terminal deoxynucleotidyl transferase
  source 1..1182: mol_type = other DNA
atgcaccatcatcatcatcatggcggtagcggccatccgccgagcaataccccggagctggaagtgccgagcgttatcgcccgcaaggttagtcagtacagctgccagcgcaagaccacgctgaataactacaacaaaaagtttaccgacgcgttcgagatcatggccgagaactacgaatttaaagagaacgaaatcttctgtctggaatttctgcgcgccgcgagtctgctgaaatatctgccgttcccggttacccgcatgaaagacatccaaggtctgccgtgcattggcgaccaagttcgtgacgtgatcgaggagatcatcgaagaaggcgagagcagccgtgttaaagaagttctcaatgacgagcgctacaaggcctttaagcagttcaccagcgtgttcggtgtgggcgtgaaaaccagcgaaaagtggtttcgtatgggcctccgtacggttgaagagctgaaggccgacaagagtctgaagctgagcaagatgcagaaggcgggctttctgtattacgaggatctggtgagctgcgttagtaaagcggaagccgatgccgttacgctcatcgtgaagaacacggtgagtacctttctgccggatgcgctggtgaccatcacgggcggtttccgccgtggcaaaaagatgggccacgacatcgactttctgatcacgaatccgggcccgaaagaggatgacgaactgctccacaaagtggttgatctgctcaagaagcaaggtctgctgctgtactgcgacatcatcgagagcacgttcgtggaggaagggctgccaagtcgcaaaatcgacgccatggacaacttccagaagtgcttcgccattctcaagctgtaccagccgggcgtggataacagcagctataacacgagtaagaagagtgacatggccgaggttaaggattggaaagcgatccgtgtggatctggtgatcacgccattcgagcagtacgcctatgcgctgctcggttggacgggcagccgcgaatttggtcgcgatctgcgccgctatgcgagtcatgagcgcaagatgatcctcgacaaccatggcctctacgaccgcaaaaagcgcatctttctgaaagcgggcagcgaagaagagattttcgcgcatctgggtctggattatgtggagccgtgggaacgcaacgcg

SEQ ID NO: 42 - protein, 394 aa, synthetic construct
  REGION 1..394: note = Variant of terminal deoxynucleotidyl transferase
MHHHHHHGGSGHPPSNTPELEVPSVIARKVSQYSCQRKTTLNNYNKKFTDAFEIMAENYEFKENEIFCLEFLRAASLLKYLPFPVTRMKDIQGLPCIGDQVRDVIEEIIEEGESSRVKEVLNDERYKAFKQFTSVFGVGVKTSEKWFRMGLRTVEELKADKSLKLSKMQKAGFLYYEDLVSCVSKAEADAVTLIVKNTVSTFLPDALVTITGGFRRGKKMGHDIDFLITNPGPKEDDELLHKVVDLLKKQGLLLYCDIIESTFVEEGLPSRKIDAMDNFQKCFAILKLYQPGVDNSSYNTSKKSDMAEVKDWKAIRVDLVITPFEQYAYALLGWTGSREFGRDLRRYASHERKMILDNHGLYDRKKRIFLKAGSEEEIFAHLGLDYVEPWERNA

SEQ ID NO: 43 - DNA, 1182 bp, synthetic construct
  misc_feature 1..1182: note = Variant of terminal deoxynucleotidyl transferase
  source 1..1182: mol_type = other DNA
atgcaccatcatcatcatcatggcggtagcggccatccgccgagcaataccccggagctggaagtgccgagcgttatcgcccgcaaggttagtcagtacagctgccagcgcaagaccacgctgaataactacaacaaaaagtttaccgacgcgttcgagatcatggccgagaactacgaatttaaagagaacgaaatcttctgtctggaatttctgcgcgccgcgagtctgctgaaatatctgccgttcccggttacccgcatgaaagacatccaaggtctgccgtgcattggcgaccaagttcgtgacgtgatcgaggagatcatcgaagaaggcgagagcagccgtgttaaagaagttctcaatgacgagcgctacaaggcctttaagcagttcaccagcgtgttcggtgtgggcgtgaaaaccagcgaaaagtggtttcgtatgggcctccgtacggttgaagagctgaaggccgacaagagtctgaagctgagcaagatgcagaaggcgggctttctgtattacgaggatctggtgagctgcgttagtaaagcggaagccgatgccgttacgctcatcgtgaagaacacggtgagtacctttctgccggatgcgctggtgaccatcacgggcggtttccgccgtggcaaaaagatgggccacgacatcgactttctgatcacgaatccgggcccgaaagaggatgacgaactgctccacaaagtggttgatctgctcaagaagcaaggtctgctgctgtactgcgacatcatcgagagcacgttcgtggaggaacaactgccaagtcgcaaaatcgacgccatggacaacttccagaagtgcttcgccattctcaagctgtaccagccgggcgtggataacagcagctataacacgagtaagaagagtgacatggccgaggttaaggattggaaagcgatccgtgtggatctggtgatcacgccattcgagcagtacgcctatgcgctgctcggttggacgggcagccgcgaatttggtcgcgatctgcgccgctatgcgagtcatgagcgcaagatgatcctcgacaaccatggcctctacgaccgcaaaaagcgcatctttctgaaagcggatagcgaagaagagattttcgcgcatctgggtctggattatgtggagccgtgggaacgcaacgcg

SEQ ID NO: 44 - protein, 394 aa, synthetic construct
  REGION 1..394: note = Variant of terminal deoxynucleotidyl transferase
MHHHHHHGGSGHPPSNTPELEVPSVIARKVSQYSCQRKTTLNNYNKKFTDAFEIMAENYEFKENEIFCLEFLRAASLLKYLPFPVTRMKDIQGLPCIGDQVRDVIEEIIEEGESSRVKEVLNDERYKAFKQFTSVFGVGVKTSEKWFRMGLRTVEELKADKSLKLSKMQKAGFLYYEDLVSCVSKAEADAVTLIVKNTVSTFLPDALVTITGGFRRGKKMGHDIDFLITNPGPKEDDELLHKVVDLLKKQGLLLYCDIIESTFVEEQLPSRKIDAMDNFQKCFAILKLYQPGVDNSSYNTSKKSDMAEVKDWKAIRVDLVITPFEQYAYALLGWTGSREFGRDLRRYASHERKMILDNHGLYDRKKRIFLKADSEEEIFAHLGLDYVEPWERNA

SEQ ID NO: 45 - DNA, 1182 bp, synthetic construct
  misc_feature 1..1182: note = Variant of terminal deoxynucleotidyl transferase
  source 1..1182: mol_type = other DNA
atgcaccatcatcatcatcatggcggtagcggccatccgccgagcaataccccggagctggaagtgccgagcgttatcgcccgcaaggttagtcagtacagctgccagcgcaagaccacgctgaataactacaacaaaaagtttaccgacgcgttcgagatcatggccgagaactacgaatttaaagagaacgaaatcttctgtctggaatttctgcgcgccgcgagtctgctgaaatatctgccgttcccggttacccgcatgaaagacatccaaggtctgccgtgcattggcgaccaagttcgtgacgtgatcgaggagatcatcgaagaaggcgagagcagccgtgttaaagaagttctcaatgacgagcgctacaaggcctttaagcagttcaccagcgtgttcggtgtgggcgtgaaaaccagcgaaaagtggtttcgtatgggcctccgtacggttgaagagctgaaggccgacaagagtctgaagctgagcaagatgcagaaggcgggctttctgtattacgaggatctggtgagctgcgttagtaaagcggaagccgatgccgtttctctcatcgtgaagaacacggtgagtacctttctgccggatgcgctggtgaccatcacgggcggtttccgccgtggcaaaaagatgggccacgacatcgactttctgatcacgaatccgggcccgaaagaggatgacgaactgctccacaaagtggttgatctgctcaagaagcaaggtctgctgctgtactgcgacatcatcgagagcacgttcgtggaggaacaactgccaagtcgcaaaatcgacgccatggacaacttccagaagtgcttcgccattctcaagctgtaccagccgggcgtggataacagcagctataacacgagtaagaagagtgacatggccgaggttaaggattggaaagcgatccgtgtggatctggtgatcacgccattcgagcagtacgcctatgcgctgctcggttggacgggcagccgcgaatttggtcgcgatctgcgccgctatgcgagtcatgagcgcaagatgatcctcgacaaccatggcctctacgaccgcaaaaagcgcatctttctgaaagcgggcagcgaagaagagattttcgcgcatctgggtctggattatgtggagccgtgggaacgcaacgcg

SEQ ID NO: 46 - protein, 394 aa, synthetic construct
  REGION 1..394: note = Variant of terminal deoxynucleotidyl transferase
MHHHHHHGGSGHPPSNTPELEVPSVIARKVSQYSCQRKTTLNNYNKKFTDAFEIMAENYEFKENEIFCLEFLRAASLLKYLPFPVTRMKDIQGLPCIGDQVRDVIEEIIEEGESSRVKEVLNDERYKAFKQFTSVFGVGVKTSEKWFRMGLRTVEELKADKSLKLSKMQKAGFLYYEDLVSCVSKAEADAVSLIVKNTVSTFLPDALVTITGGFRRGKKMGHDIDFLITNPGPKEDDELLHKVVDLLKKQGLLLYCDIIESTFVEEQLPSRKIDAMDNFQKCFAILKLYQPGVDNSSYNTSKKSDMAEVKDWKAIRVDLVITPFEQYAYALLGWTGSREFGRDLRRYASHERKMILDNHGLYDRKKRIFLKAGSEEEIFAHLGLDYVEPWERNA

SEQ ID NO: 47 - DNA, 1182 bp, synthetic construct
  misc_feature 1..1182: note = Variant of terminal deoxynucleotidyl transferase
  source 1..1182: mol_type = other DNA
atgcaccatcatcatcatcatggcggtagcggccatccgccgagcaataccccggagctggaagtgccgagcgttatcgcccgcaaggttagtcagtacagctgccagcgcaagaccacgctgaataactacaacaaaaagtttaccgacgcgttcgagatcatggccgagaactacgaatttaaagagaacgaaatcttctgtctggaatttctgcgcgccgcgagtctgctgaaatatctgccgttcccggttacccgcatgaaagacatccaaggtctgccgtgcattggcagtcaagttcgtgacgtgatcgaggagatcatcgaagaaggcgagagcagccgtgttaaagaagttctcaatgacgagcgctacaaggcctttaagcagttcaccagcgtgttcggtgtgggcgtgaaaaccagcgaaaagtggtttcgtatgggcctccgtacggttgaagagctgaaggccgacaagagtctgaagctgagcaagatgcagaaggcgggctttctgtattacgaggatctggtgagctgcgttagtaaagcggaagccgatgccgttacgctcatcgtgaagaacacggtgagtacctttctgccggatgcgctggtgaccatcacgggcggtttccgccgtggcaaaaagatgggccacgacatcgactttctgatcacgaatccgggcccgaaagaggatgacgaactgctccacaaagtggttgatctgctcaagaagcaaggtctgctgctgtactgcgacatcatcgagagcacgttcgtggaggaacaactgccaagtcgcaaaatcgacgccatggacaacttccagaagtgcttcgccattctcaagctgtaccagccgggcgtggataacagcagctataacacgagtaagaagagtgacatggccgaggttaaggattggaaagcgatccgtgtggatctggtgatcacgccattcgagcagtacgcctatgcgctgctcggttggacgggcagccgcgaatttggtcgcgatctgcgccgctatgcgagtcatgagcgcaagatgatcctcgacaaccatggcctctacgaccgcaaaaagcgcatctttctgaaagcgggcagcgaagaagagattttcgcgcatctgggtctggattatgtggagccgtgggaacgcaacgcg

SEQ ID NO: 48 - protein, 394 aa, synthetic construct
  REGION 1..394: note = Variant of terminal deoxynucleotidyl transferase
MHHHHHHGGSGHPPSNTPELEVPSVIARKVSQYSCQRKTTLNNYNKKFTDAFEIMAENYEFKENEIFCLEFLRAASLLKYLPFPVTRMKDIQGLPCIGSQVRDVIEEIIEEGESSRVKEVLNDERYKAFKQFTSVFGVGVKTSEKWFRMGLRTVEELKADKSLKLSKMQKAGFLYYEDLVSCVSKAEADAVTLIVKNTVSTFLPDALVTITGGFRRGKKMGHDIDFLITNPGPKEDDELLHKVVDLLKKQGLLLYCDIIESTFVEEQLPSRKIDAMDNFQKCFAILKLYQPGVDNSSYNTSKKSDMAEVKDWKAIRVDLVITPFEQYAYALLGWTGSREFGRDLRRYASHERKMILDNHGLYDRKKRIFLKAGSEEEIFAHLGLDYVEPWERNA

SEQ ID NO: 49 - DNA, 1182 bp, synthetic construct
  misc_feature 1..1182: note = Variant of terminal deoxynucleotidyl transferase
  source 1..1182: mol_type = other DNA
atgcaccatcatcatcatcatggcggtagcggccatccgccgagcaataccccggagctggaagtgccgagcgttatcgccagcaaggttagtcagtacagctgccagcgcaagaccacgctgaataactacaacaaaaagtttaccgacgcgttcgagatcatggccgagaactacgaatttaaagagaacgaaatcttctgtctggaatttctgcgcgccgcgagtctgctgaaatatctgccgttcccggttacccgcatgaaagacatccaaggtctgccgtgcattggcgaccaagttcgtgacgtgatcgaggagatcatcgaagaaggcgagagcagccgtgttaaagaagttctcaatgacgagcgctacaaggcctttaagcagttcaccagcgtgttcggtgtgggcgtgaaaaccagcgaaaagtggtttcgtatgggcctccgtacggttgaagagctgaaggccgacaagagtctgaagctgagcaagatgcagaaggcgggctttctgtattacgaggatctggtgagctgcgttagtaaagcggaagccgatgccgttacgctcatcgtgaagaacacggtgagtacctttctgccggatgcgctggtgaccatcacgggcggtttccgccgtggcaaaaagatgggccacgacatcgactttctgatcacgaatccgggcccgaaagaggatgacgaactgctccacaaagtggttgatctgctcaagaagcaaggtctgctgctgtactgcgacatcatcgagagcacgttcgtggaggaacaactgccaagtcgcaaaatcgacgccatggacaacttccagaagtgcttcgccattctcaagctgtaccagccgggcgtggataacagcagctataacacgagtaagaagttggacatggccgaggttaaggattggaaagcgatccgtgtggatctggtgatcacgccattcgagcagtacgcctatgcgctgctcggttggacgggcagccgcgaatttggtcgcgatctgcgccgctatgcgagtcatgagcgcaagatgatcctcgacaaccatggcctctacgaccgcaaaaagcgcatctttctgaaagcgggcagcgaagaagagattttcgcgcatctgggtctggattatgtggagccgtgggaacgcaacgcg

SEQ ID NO: 50 - protein, 394 aa, synthetic construct
  REGION 1..394: note = Variant of terminal deoxynucleotidyl transferase
MHHHHHHGGSGHPPSNTPELEVPSVIASKVSQYSCQRKTTLNNYNKKFTDAFEIMAENYEFKENEIFCLEFLRAASLLKYLPFPVTRMKDIQGLPCIGDQVRDVIEEIIEEGESSRVKEVLNDERYKAFKQFTSVFGVGVKTSEKWFRMGLRTVEELKADKSLKLSKMQKAGFLYYEDLVSCVSKAEADAVTLIVKNTVSTFLPDALVTITGGFRRGKKMGHDIDFLITNPGPKEDDELLHKVVDLLKKQGLLLYCDIIESTFVEEQLPSRKIDAMDNFQKCFAILKLYQPGVDNSSYNTSKKLDMAEVKDWKAIRVDLVITPFEQYAYALLGWTGSREFGRDLRRYASHERKMILDNHGLYDRKKRIFLKAGSEEEIFAHLGLDYVEPWERNA

SEQ ID NO: 51 - DNA, 1182 bp, synthetic construct
  misc_feature 1..1182: note = Variant of terminal deoxynucleotidyl transferase
  source 1..1182: mol_type = other DNA
atgcaccatcatcatcatcatggcggtagcggccatccgccgagcaataccccggagctggaagtgccgagcgttatcgcccgcaaggttagtcagtacagctgccagcgcaagaccacgctgaataactacaacaaaaagtttaccgacgcgttcgagatcatggccgagaactacgaatttaaagagaacgaaatcttctgtctggaatttctgcgcgccgcgagtctgctgaaatatctgccgttcccggttacccgcatgaaagacatccaaggtctgccgtgcattggcgaccaagttcgtgacgtgatcgaggagatcatcgaagaaggcgagagcagccgtgttaaagaagttctcaatgacgagcgctacaaggcctttaagcagttcaccagcgtgttcggtgtgggcgtgaaaaccagcgaaaagtggtttcgtatgggcctccgtacggttgaagagctgaaggccgacaagagtctgaagctgagcgagatgcagaaggcgggctttctgtattacgaggatctggtgagctgcgttagtaaagcggaagccgatgccgttacgctcatcgtgaagaacacggtgagtacctttctgccggatgcgctggtgaccatcacgggcggtttccgccgtggcaaaaagatgggccacgacatcgactttctgatcacgaatccgggcccgaaagaggatgacgaactgctccacaaagtggttgatctgctcaagaagcaaggtctgctgctgtactgcgacatcatcgagagcacgttcgtggaggaacaactgccaagtcgcaaaatcgacgccatggacaacttccagaagtgcttcgccattctcaagctgtaccagccgggcgtggataacagcagctataacacgagtaagaagagtgacatggccgaggttaaggattggaaagcgatccgtgtggatctggtgatcacgccattcgagcagtacgcctatgcgctgctcggttggacgggcagccgcgaatttggtcgcgatctgcgccgctatgcgagtcatgagcgcaagatgatcctcgacaaccatggcctctacgaccgcaaaaagcgcatctttctgaaagcgggcagcgaagaagagattttcgcgcatctgggtctggattatgtggagccgtgggaacgcaacgcg

SEQ ID NO: 52 - protein, 394 aa, synthetic construct
  REGION 1..394: note = Variant of terminal deoxynucleotidyl transferase
MHHHHHHGGSGHPPSNTPELEVPSVIARKVSQYSCQRKTTLNNYNKKFTDAFEIMAENYEFKENEIFCLEFLRAASLLKYLPFPVTRMKDIQGLPCIGDQVRDVIEEIIEEGESSRVKEVLNDERYKAFKQFTSVFGVGVKTSEKWFRMGLRTVEELKADKSLKLSEMQKAGFLYYEDLVSCVSKAEADAVTLIVKNTVSTFLPDALVTITGGFRRGKKMGHDIDFLITNPGPKEDDELLHKVVDLLKKQGLLLYCDIIESTFVEEQLPSRKIDAMDNFQKCFAILKLYQPGVDNSSYNTSKKSDMAEVKDWKAIRVDLVITPFEQYAYALLGWTGSREFGRDLRRYASHERKMILDNHGLYDRKKRIFLKAGSEEEIFAHLGLDYVEPWERNA

SEQ ID NO: 53 - DNA, 1182 bp, synthetic construct
  misc_feature 1..1182: note = Variant of terminal deoxynucleotidyl transferase
  source 1..1182: mol_type = other DNA
atgcaccatcatcatcatcatggcggtagcggccatccgccgagcaataccccggagctggaagtgccgagcgttatcgcccgcaaggttagtcagtacagctgccagcgcaagaccacgctgaataactacaacaaaaagtttaccgacgcgttcgagatcatggccgagaactacgaatttaaagagaacgaaatcttctgtctggaatttctgcgcgccgcgagtctgctgaaatatctgccgttcccggttacccgcatgaaagacatccaaggtctgccgtgcattggcgaccaagttcgtgacgtgatcgaggagatcatcgaagaaggcgagagcagccgtgttaaagaagttctcaatgacgagcgctacaaggcctttaagcagttcaccagcgtgttcggtgtgggcgtgaaaaccagcgaaaagtggtttcgtatgggcctccgtacggttgaagagctgaaggccgacaagagtctgaagctgagcaagatgcagaaggcgggctttctgtattacgaggatctggtgagctgcgttagtaaagcggaagccgatgccgttacgctcatcgtgaagaacacggtgagtacctttctgccggatgcgctggtgaccatcacgggcggtttccgccgtggcaaaaagatgggccacgacatcgactttctgatcacgaatccgggcccgaaagaggatgacgaactgctccacaaagtggttgatctgctcaagaagcaaggtctgctgctgtactgcgactgtatcgagagcacgttcgtggaggaacaactgccaagtcgcaaaatcgacgccatggacaacttccagaagtgcttcgccattctcaagctgtaccagccgggcgtggataacagcagctataacacgagtaagaagagtgacatggccgaggttaaggattggaaagcgatccgtgtggatctggtgatcacgccattcgagcagtacgcctatgcgctgctcggttggacgggcagccgcgaatttggtcgcgatctgcgccgctatgcgagtcatgagcgcaagatgatcctcgacaaccatggcctctacgaccgcaaaaagcgcatctttctgaaagcgggcagcgaagaagagattttcgcgcatctgggtctggattatgtggagccgtgggaacgcaacgcg

SEQ ID NO: 54 - protein, 394 aa, synthetic construct
  REGION 1..394: note = Variant of terminal deoxynucleotidyl transferase
MHHHHHHGGSGHPPSNTPELEVPSVIARKVSQYSCQRKTTLNNYNKKFTDAFEIMAENYEFKENEIFCLEFLRAASLLKYLPFPVTRMKDIQGLPCIGDQVRDVIEEIIEEGESSRVKEVLNDERYKAFKQFTSVFGVGVKTSEKWFRMGLRTVEELKADKSLKLSKMQKAGFLYYEDLVSCVSKAEADAVTLIVKNTVSTFLPDALVTITGGFRRGKKMGHDIDFLITNPGPKEDDELLHKVVDLLKKQGLLLYCDCIESTFVEEQLPSRKIDAMDNFQKCFAILKLYQPGVDNSSYNTSKKSDMAEVKDWKAIRVDLVITPFEQYAYALLGWTGSREFGRDLRRYASHERKMILDNHGLYDRKKRIFLKAGSEEEIFAHLGLDYVEPWERNA

SEQ ID NO: 55 - DNA, 1182 bp, synthetic construct
  misc_feature 1..1182: note = Variant of terminal deoxynucleotidyl transferase
  source 1..1182: mol_type = other DNA
atgcaccatcatcatcatcatggcggtagcggccatccgccgagcaataccccggagtttgaagtgccgagcgttatcgcccgcaaggttagtcagtacagctgccagcgcaagaccacgctgaataactacaacaaaaagtttaccgacgcgttcgagatcatggccgagaactacgaatttaaagagaacgaaatcttctgtctggaatttctgcgcgccgcgagtctgctgaaatatctgccgttcccggttacccgcatgaaagacatccaaggtctgccgtgcattggcgaccaagttcgtgacgtgatcgaggagatcatcgaagaaggcgagagcagccgtgttaaagaagttctcaatgacgagcgctacaaggcctttaagcagttcaccagcgtgttcggtgtgggcgtgaaaaccagcgaaaagtggtttcgtatgggcctccgtacggttgaagagctgaaggccgacaagagtctgaagctgagcaagatgcagaaggcgggctttctgtattacgaggatctggtgagctgcgttagtaaagcggaagccgatgccgttacgctcatcgtgaagaacacggtgagtacctttctgccggatgcgctggtgaccatcacgggcggtttccgccgtggcaaaaagatgggccacgacatcgactttctgatcacgaatccgggcccgaaagaggatgacgaactgctccacaaagtggttgatctgctcaagaagcaaggtctgctgctgtactgcgacatcatcgagagcacgttcgtggaggaacaactgccaagtcgcaaaatcgacgccatggacaacttccagaagtgcttcgccattctcaagctgtaccagccgggcgtggataacagcagctataacacgagtaagaagagtgacatggccgaggttaaggattggaaagcgatccgtgtggatctggtgatcacgccattcgagcagtacgcctatgcgctgctcggttggacgggcagccgcgaatttggtcgcgatctgcgccgctatgcgagtcatgagcgcaagatgatcctcgacaaccatggcctctacgaccgcaaaaagcgcatctttctgaaagcgggcagcgaagaagagattttcgcgcatctgggtctggattatgtggagccgtgggaacgcaacgcg

SEQ ID NO: 56 - protein, 394 aa, synthetic construct
  REGION 1..394: note = Variant of terminal deoxynucleotidyl transferase
MHHHHHHGGSGHPPSNTPEFEVPSVIARKVSQYSCQRKTTLNNYNKKFTDAFEIMAENYEFKENEIFCLEFLRAASLLKYLPFPVTRMKDIQGLPCIGDQVRDVIEEIIEEGESSRVKEVLNDERYKAFKQFTSVFGVGVKTSEKWFRMGLRTVEELKADKSLKLSKMQKAGFLYYEDLVSCVSKAEADAVTLIVKNTVSTFLPDALVTITGGFRRGKKMGHDIDFLITNPGPKEDDELLHKVVDLLKKQGLLLYCDIIESTFVEEQLPSRKIDAMDNFQKCFAILKLYQPGVDNSSYNTSKKSDMAEVKDWKAIRVDLVITPFEQYAYALLGWTGSREFGRDLRRYASHERKMILDNHGLYDRKKRIFLKAGSEEEIFAHLGLDYVEPWERNA

SEQ ID NO: 57 - DNA, 1182 bp, synthetic construct
  misc_feature 1..1182: note = Variant of terminal deoxynucleotidyl transferase
  source 1..1182: mol_type = other DNA
atgcaccatcatcatcatcatggcggtagcggccatccgccgagcaataccccggagctggaagtgccgagcgttatcgggcgcaaggttagtcagtacagctgccagcgcaagaccacgctgaataactacaacaaaaagtttaccgacgcgttcgagatcatggccgagaactacgaatttaaagagaacgaaatcttctgtctggaatttctgcgcgccgcgagtctgctgaaatatctgccgttcccggttacccgcatgaaagacatccaaggtctgccgtgcattggcgaccaagttcgtgacgtgatcgaggagatcatcgaagaaggcgagagcagccgtgttaaagaagttctcaatgacgagcgctacaaggcctttaagcagttcaccagcgtgttcggtgtgggcgtgaaaaccagcgaaaagtggtttcgtatgggcctccgtacggttgaagagctgaaggccgacaagagtctgaagctgagcaagatgcagaaggcgggctttctgtattacgaggatctggtgagctgcgttagtaaagcggaagccgatgccgttacgctcatcgtgaagaacacggtgagtacctttctgccggatgcgctggtgaccatcacgggcggtttccgccgtggcaaaaagatgggccacgacatcgactttctgatcacgaatccgggcccgaaagaggatgacgaactgctccacaaagtggttgatctgctcaagaagcaaggtctgctgctgtactgcgacatcatcgagagcacgttcgtggaggaacaactgccaagtcgcaaaatcgacgccatggacaacttccagaagtgcttcgccattctcaagctgtaccagccgggcgtggataacagcagctataacacgagtaagaagagtgacatggccgaggttaaggattggaaagcgatccgtgtggatctggtgatcacgccattcgagcagtacgcctatgcgctgctcggttggacgggcagccgcgaatttggtcgcgatctgcgccgctatgcgagtcatgagcgcaagatgatcctcgacaaccatggcctctacgaccgcaaaaagcgcatctttctgaaagcgggcagcgaagaagagattttcgcgcatctgggtctggattatgtggagccgtgggaacgcaacgcg

SEQ ID NO: 58 - protein, 394 aa, synthetic construct
  REGION 1..394: note = Variant of terminal deoxynucleotidyl transferase
MHHHHHHGGSGHPPSNTPELEVPSVIGRKVSQYSCQRKTTLNNYNKKFTDAFEIMAENYEFKENEIFCLEFLRAASLLKYLPFPVTRMKDIQGLPCIGDQVRDVIEEIIEEGESSRVKEVLNDERYKAFKQFTSVFGVGVKTSEKWFRMGLRTVEELKADKSLKLSKMQKAGFLYYEDLVSCVSKAEADAVTLIVKNTVSTFLPDALVTITGGFRRGKKMGHDIDFLITNPGPKEDDELLHKVVDLLKKQGLLLYCDIIESTFVEEQLPSRKIDAMDNFQKCFAILKLYQPGVDNSSYNTSKKSDMAEVKDWKAIRVDLVITPFEQYAYALLGWTGSREFGRDLRRYASHERKMILDNHGLYDRKKRIFLKAGSEEEIFAHLGLDYVEPWERNA

SEQ ID NO: 59 - DNA, 1182 bp, synthetic construct
  misc_feature 1..1182: note = Variant of terminal deoxynucleotidyl transferase
  source 1..1182: mol_type = other DNA
atgcaccatcatcatcatcatggcggtagcggccatccgccgagcaataccccggagctggaagtgccgagcgttatcgcccgcaaggttagtcagtacagctgccagcgcaagaccacgctgaataactacaacaaaaagtttaccgacgcgttcgagatcatggccgagaactacgaatttaaagagaacgaaatcttctgtctggaatttctgcgcgccgcgagtctgctgaaatatctgccgttcccggttacccgcatgaaagacatccaaggtctgccgtgcattggcgaccaagttcgtgacgtgatcgaggagatcatcgaagaaggcgagagcagccgtgttaaagaagttctcaatgacgagcgctacaaggcctttaagcagttcaccagcgtgttcggtgtgggcgtgaaaaccagcgaaaagtggtttcgtatgggcctccgtacggttgaagagctgaaggccgacaagagtctgaagctgagcaagatgcagaaggcgggctttctgtattacgaggatctggtgagctgcgttagtaaagcggaagccgatgccgttacgctcatcgtgaagaacacggtgagtacctttctgccggatgcgctggtgaccatcacgggcggtttccgccgtggcaaaaagatgggccacgacatcgactttctgatcacgaatccgggcccgaaagaggatgacgaactgctccacaaagtggttgatctgctcaagaagcaaggtctgctgctgtactgcgacatcatcgagagcacgttcgtggaggaacaactgccaagtcgcaaaatcgacgccatggacaacttccagaagtgcttcgccattctcaagctgtaccagccgggcgtggattggagcagctataacacgagtaagaagagtgacatggccgaggttaaggattggaaagcgatccgtgtggatctggtgatcacgccattcgagcagtacgcctatgcgctgctcggttggacgggcagccgcgaatttggtcgcgatctgcgccgctatgcgagtcatgagcgcaagatgatcctcgacaaccatggcctctacgaccgcaaaaagcgcatctttctgaaagcgggcagcgaagaagagattttcgcgcatctgggtctggattatgtggagccgtgggaacgcaacgcg

SEQ ID NO: 60 - protein, 394 aa, synthetic construct
  REGION 1..394: note = Variant of terminal deoxynucleotidyl transferase
MHHHHHHGGSGHPPSNTPELEVPSVIARKVSQYSCQRKTTLNNYNKKFTDAFEIMAENYEFKENEIFCLEFLRAASLLKYLPFPVTRMKDIQGLPCIGDQVRDVIEEIIEEGESSRVKEVLNDERYKAFKQFTSVFGVGVKTSEKWFRMGLRTVEELKADKSLKLSKMQKAGFLYYEDLVSCVSKAEADAVTLIVKNTVSTFLPDALVTITGGFRRGKKMGHDIDFLITNPGPKEDDELLHKVVDLLKKQGLLLYCDIIESTFVEEQLPSRKIDAMDNFQKCFAILKLYQPGVDWSSYNTSKKSDMAEVKDWKAIRVDLVITPFEQYAYALLGWTGSREFGRDLRRYASHERKMILDNHGLYDRKKRIFLKAGSEEEIFAHLGLDYVEPWERNA

SEQ ID NO: 61 - DNA, 1182 bp, synthetic construct
  misc_feature 1..1182: note = Variant of terminal deoxynucleotidyl transferase
  source 1..1182: mol_type = other DNA
atgcaccatcatcatcatcatggcggtagcggccatccgccgagcaataccccggagggtgaagtgccgagcgttatcgcccgcaaggttagtcagtacagctgccagcgcaagaccacgctgaataactacaacaaaaagtttaccgacgcgttcgagatcatggccgagaactacgaatttaaagagaacgaaatcttctgtctggaatttctgcgcgccgcgagtctgctgaaatatctgccgttcccggttacccgcatgaaagacatccaaggtctgccgtgcattggcgaccaagttcgtgacgtgatcgaggagatcatcgaagaaggcgagagcagccgtgttaaagaagttctcaatgacgagcgctacaaggcctttaagcagttcaccagcgtgttcggtgtgggcgtgaaaaccagcgaaaagtggtttcgtatgggcctccgtacggttgaagagctgaaggccgacaagagtctgaagctgagcaagatgcagaaggcgggctttctgtattacgaggatctggtgagctgcgttagtaaagcggaagccgatgccgttacgctcatcgtgaagaacacggtgagtacctttctgccggatgcgctggtgaccatcacgggcggtttccgccgtggcaaaaagatgggccacgacatcgactttctgatcacgaatccgggcccgaaagaggatgacgaactgctccacaaagtggttgatctgctcaagaagcaaggtctgctgctgtactgcgacatcatcgagagcacgttcgtggaggaacaactgccaagtcgcaaaatcgacgccatggacaacttccagaagtgcttcgccattctcaagctgtaccagccgggcgtggataacagcagctataacacgagtaagaagagtgacatggccgaggttaaggattggaaagcgatccgtgtggatctggtgatcacgccattcgagcagtacgcctatgcgctgctcggttggacgggcagccgcgaatttggtcgcgatctgcgccgctatgcgagtcatgagcgcaagatgatcctcgacaaccatggcctctacgaccgcaaaaagcgcatctttctgaaagcgggcagcgaagaagagattttcgcgcatctgggtctggattatgtggagccgtgggaacgcaacgcg

SEQ ID NO: 62 - protein, 394 aa, synthetic construct
  REGION 1..394: note = Variant of terminal deoxynucleotidyl transferase
MHHHHHHGGSGHPPSNTPEGEVPSVIARKVSQYSCQRKTTLNNYNKKFTDAFEIMAENYEFKENEIFCLEFLRAASLLKYLPFPVTRMKDIQGLPCIGDQVRDVIEEIIEEGESSRVKEVLNDERYKAFKQFTSVFGVGVKTSEKWFRMGLRTVEELKADKSLKLSKMQKAGFLYYEDLVSCVSKAEADAVTLIVKNTVSTFLPDALVTITGGFRRGKKMGHDIDFLITNPGPKEDDELLHKVVDLLKKQGLLLYCDIIESTFVEEQLPSRKIDAMDNFQKCFAILKLYQPGVDNSSYNTSKKSDMAEVKDWKAIRVDLVITPFEQYAYALLGWTGSREFGRDLRRYASHERKMILDNHGLYDRKKRIFLKAGSEEEIFAHLGLDYVEPWERNA

SEQ ID NO: 63 - DNA, 1182 bp, synthetic construct
  misc_feature 1..1182: note = Variant of terminal deoxynucleotidyl transferase
  source 1..1182: mol_type = other DNA
atgcaccatcatcatcatcatggcggtagcggccatccgccgagcaataccccggagctggaagtgccgagcgttatcgcccgcaaggttagtcagtacagctgccagcgcaagaccacgctgaataactacaacaaaaagtttaccgacgcgttcgagatcatggccgagaactacgaatttaaagagaacgaaatcttctgtctggaatttctgcgcgccgcgagtctgctgaaatatctgccgttcccggttacccgcatgaaagacatccaaggtctgccgtgcattggcgaccaagttcgtgacgtgatcgaggagatcatcgaagaaggcgagagcagccgtgttaaagaagttctcaatgacgagcgctacaaggcctttaagcagttcaccagcgtgttcggtgtgggcgtgaaaaccagcgaaaagtggtttcgtatgggcctccgtacggttgaagagctgaaggccgacaagagtctgaagctgagcaagatgcagaaggcgggctttctgtattacgaggatctggtgagctgcgttagtaaagcggaagccgatgccgttacgctcatcgtgaagaacacggtgagtacctttctgccggatgcgctggtgaccatcacgggcggtttccgccgtggcaaaaagatgggccacgacatcgactttctgatcacgaatccgggcgggaaagaggatgacgaactgctccacaaagtggttgatctgctcaagaagcaaggtctgctgctgtactgcgacatcatcgagagcacgttcgtggaggaacaactgccaagtcgcaaaatcgacgccatggacaacttccagaagtgcttcgccattctcaagctgtaccagccgggcgtggataacagcagctataacacgagtaagaagagtgacatggccgaggttaaggattggaaagcgatccgtgtggatctggtgatcacgccattcgagcagtacgcctatgcgctgctcggttggacgggcagccgcgaatttggtcgcgatctgcgccgctatgcgagtcatgagcgcaagatgatcctcgacaaccatggcctctacgaccgcaaaaagcgcatctttctgaaagcgggcagcgaagaagagattttcgcgcatctgggtctggattatgtggagccgtgggaacgcaacgcg

SEQ ID NO: 64 - protein, 394 aa, synthetic construct
  REGION 1..394: note = Variant of terminal deoxynucleotidyl transferase
MHHHHHHGGSGHPPSNTPELEVPSVIARKVSQYSCQRKTTLNNYNKKFTDAFEIMAENYEFKENEIFCLEFLRAASLLKYLPFPVTRMKDIQGLPCIGDQVRDVIEEIIEEGESSRVKEVLNDERYKAFKQFTSVFGVGVKTSEKWFRMGLRTVEELKADKSLKLSKMQKAGFLYYEDLVSCVSKAEADAVTLIVKNTVSTFLPDALVTITGGFRRGKKMGHDIDFLITNPGGKEDDELLHKVVDLLKKQGLLLYCDIIESTFVEEQLPSRKIDAMDNFQKCFAILKLYQPGVDNSSYNTSKKSDMAEVKDWKAIRVDLVITPFEQYAYALLGWTGSREFGRDLRRYASHERKMILDNHGLYDRKKRIFLKAGSEEEIFAHLGLDYVEPWERNA

SEQ ID NO: 65 - DNA, 1182 bp, synthetic construct
  misc_feature 1..1182: note = Variant of terminal deoxynucleotidyl transferase
  source 1..1182: mol_type = other DNA
atgcaccatcatcatcatcatggcggtagcggccatccgccgagcaataccccggagctggaagtgccgagcgttatcgcccgcaaggttagtcagtacagctgccagcgcaagaccacgctgaataactacaacaaaaagtttaccgacgcgttcgagatcatggccgagaactacgaatttaaagagaacgaaatcttctgtctggaatttctgcgcgccgcgagtctgctgaaatatctgccgttcccggttacccgcatgaaagacatccaaggtctgccgtgcattggcgaccaagttcgtgacgtgatcgaggagatcatcgaagaaggcgagagcagccgtgttaaagaagttctcaatgacgagcgctacaaggcctttaagcagttcaccagcgtgttcggtgtgggcgtgaaaaccagcgaaaagtggtttcgtatgggcctccgtacggttgaagagctgaaggccgacaagagtctgaagctgagcaagatgcagaaggcgggctttctgtattacgaggatctggtgagctgcgttagtaaagcggaagccgatgccgttacgctcatcgtgaagaacacggtgagtacctttctgccggatgcgctggtgaccatcacgggcggtttccgccgtggcaaatggatgggccacgacatcgactttctgatcacgaatccgggcccgaaagaggatgacgaactgctccacaaagtggttgatctgctcaagaagcaaggtctgctgctgtactgcgacatcatcgagagcacgttcgtggaggaacaactgccaagtcgcaaaatcgacgccatggacaacttccagaagtgcttcgccattctcaagctgtaccagccgggcgtggataacagcagctataacacgagtaagaagagtgacatggccgaggttaaggattggaaagcgatccgtgtggatctggtgatcacgccattcgagcagtacgcctatgcgctgctcggttggacgggcagccgcgaatttggtcgcgatctgcgccgctatgcgagtcatgagcgcaagatgatcctcgacaaccatggcctctacgaccgcaaaaagcgcatctttctgaaagcgggcagcgaagaagagattttcgcgcatctgggtctggattatgtggagccgtgggaacgcaacgcg

SEQ ID NO: 66 - protein, 394 aa, synthetic construct
  REGION 1..394: note = Variant of terminal deoxynucleotidyl transferase
MHHHHHHGGSGHPPSNTPELEVPSVIARKVSQYSCQRKTTLNNYNKKFTDAFEIMAENYEFKENEIFCLEFLRAASLLKYLPFPVTRMKDIQGLPCIGDQVRDVIEEIIEEGESSRVKEVLNDERYKAFKQFTSVFGVGVKTSEKWFRMGLRTVEELKADKSLKLSKMQKAGFLYYEDLVSCVSKAEADAVTLIVKNTVSTFLPDALVTITGGFRRGKWMGHDIDFLITNPGPKEDDELLHKVVDLLKKQGLLLYCDIIESTFVEEQLPSRKIDAMDNFQKCFAILKLYQPGVDNSSYNTSKKSDMAEVKDWKAIRVDLVITPFEQYAYALLGWTGSREFGRDLRRYASHERKMILDNHGLYDRKKRIFLKAGSEEEIFAHLGLDYVEPWERNA

SEQ ID NO: 67 - DNA, 1182 bp, synthetic construct
  misc_feature 1..1182: note = Variant of terminal deoxynucleotidyl transferase
  source 1..1182: mol_type = other DNA
atgcaccatcatcatcatcatggcggtagcggccatccgccgagcaataggccggagctggaagtgccgagcgttatcgcccgcaaggttagtcagtacagctgccagcgcaagaccacgctgaataactacaacaaaaagtttaccgacgcgttcgagatcatggccgagaactacgaatttaaagagaacgaaatcttctgtctggaatttctgcgcgccgcgagtctgctgaaatatctgccgttcccggttacccgcatgaaagacatccaaggtctgccgtgcattggcgaccaagttcgtgacgtgatcgaggagatcatcgaagaaggcgagagcagccgtgttaaagaagttctcaatgacgagcgctacaaggcctttaagcagttcaccagcgtgttcggtgtgggcgtgaaaaccagcgaaaagtggtttcgtatgggcctccgtacggttgaagagctgaaggccgacaagagtctgaagctgagcaagatgcagaaggcgggctttctgtattacgaggatctggtgagctgcgttagtaaagcggaagccgatgccgttacgctcatcgtgaagaacacggtgagtacctttctgccggatgcgctggtgaccatcacgggcggtttccgccgtggcaaaaagatgggccacgacatcgactttctgatcacgaatccgggcccgaaagaggatgacgaactgctccacaaagtggttgatctgctcaagaagcaaggtctgctgctgtactgcgacatcatcgagagcacgttcgtggaggaacaactgccaagtcgcaaaatcgacgccatggacaacttccagaagtgcttcgccattctcaagctgtaccagccgggcgtggataacagcagctataacacgagtaagaagagtgacatggccgaggttaaggattggaaagcgatccgtgtggatctggtgatcacgccattcgagcagtacgcctatgcgctgctcggttggacgggcagccgcgaatttggtcgcgatctgcgccgctatgcgagtcatgagcgcaagatgatcctcgacaaccatggcctctacgaccgcaaaaagcgcatctttctgaaagcgggcagcgaagaagagattttcgcgcatctgggtctggattatgtggagccgtgggaacgcaacgcg

SEQ ID NO: 68 - protein, 394 aa, synthetic construct
  REGION 1..394: note = Variant of terminal deoxynucleotidyl transferase
MHHHHHHGGSGHPPSNRPELEVPSVIARKVSQYSCQRKTTLNNYNKKFTDAFEIMAENYEFKENEIFCLEFLRAASLLKYLPFPVTRMKDIQGLPCIGDQVRDVIEEIIEEGESSRVKEVLNDERYKAFKQFTSVFGVGVKTSEKWFRMGLRTVEELKADKSLKLSKMQKAGFLYYEDLVSCVSKAEADAVTLIVKNTVSTFLPDALVTITGGFRRGKKMGHDIDFLITNPGPKEDDELLHKVVDLLKKQGLLLYCDIIESTFVEEQLPSRKIDAMDNFQKCFAILKLYQPGVDNSSYNTSKKSDMAEVKDWKAIRVDLVITPFEQYAYALLGWTGSREFGRDLRRYASHERKMILDNHGLYDRKKRIFLKAGSEEEIFAHLGLDYVEPWERNA

SEQ ID NO: 69 - DNA, 1182 bp, synthetic construct
  misc_feature 1..1182: note = Variant of terminal deoxynucleotidyl transferase
  source 1..1182: mol_type = other DNA
atgcaccatcatcatcatcatggcggtagcggccatccgccgagcaataccccggagctggaagtgccgcaggttatcgcccgcaaggttagtcagtacagctgccagcgcaagaccacgctgaataactacaacaaaaagtttaccgacgcgttcgagatcatggccgagaactacgaatttaaagagaacgaaatcttctgtctggaatttctgcgcgccgcgagtctgctgaaatatctgccgttcccggttacccgcatgaaagacatccaaggtctgccgtgcattggcgaccaagttcgtgacgtgatcgaggagatcatcgaagaaggcgagagcagccgtgttaaagaagttctcaatgacgagcgctacaaggcctttaagcagttcaccagcgtgttcggtgtgggcgtgaaaaccagcgaaaagtggtttcgtatgggcctccgtacggttgaagagctgaaggccgacaagagtctgaagctgagcaagatgcagaaggcgggctttctgtattacgaggatctggtgagctgcgttagtaaagcggaagccgatgccgttacgctcatcgtgaagaacacggtgagtacctttctgccggatgcgctggtgaccatcacgggcggtttccgccgtggcaaaaagatgggccacgacatcgactttctgatcacgaatccgggcccgaaagaggatgacgaactgctccacaaagtggttgatctgctcaagaagcaaggtctgctgctgtactgcgacatcatcgagagcacgttcgtggaggaacaactgccaagtcgcaaaatcgacgccatggacaacttccagaagtgcttcgccattctcaagctgtaccagccgggcgtggataacagcagctataacacgagtaagaagagtgacatggccgaggttaaggattggaaagcgatccgtgtggatctggtgatcacgccattcgagcagtacgcctatgcgctgctcggttggacgggcagccgcgaatttggtcgcgatctgcgccgctatgcgagtcatgagcgcaagatgatcctcgacaaccatggcctctacgaccgcaaaaagcgcatctttctgaaagcgggcagcgaagaagagattttcgcgcatctgggtctggattatgtggagccgtgggaacgcaacgcg

SEQ ID NO: 70 - protein, 394 aa, synthetic construct
  REGION 1..394: note = Variant of terminal deoxynucleotidyl transferase
MHHHHHHGGSGHPPSNTPELEVPQVIARKVSQYSCQRKTTLNNYNKKFTDAFEIMAENYEFKENEIFCLEFLRAASLLKYLPFPVTRMKDIQGLPCIGDQVRDVIEEIIEEGESSRVKEVLNDERYKAFKQFTSVFGVGVKTSEKWFRMGLRTVEELKADKSLKLSKMQKAGFLYYEDLVSCVSKAEADAVTLIVKNTVSTFLPDALVTITGGFRRGKKMGHDIDFLITNPGPKEDDELLHKVVDLLKKQGLLLYCDIIESTFVEEQLPSRKIDAMDNFQKCFAILKLYQPGVDNSSYNTSKKSDMAEVKDWKAIRVDLVITPFEQYAYALLGWTGSREFGRDLRRYASHERKMILDNHGLYDRKKRIFLKAGSEEEIFAHLGLDYVEPWERNA

SEQ ID NO: 71 - DNA, 1182 bp, synthetic construct
  misc_feature 1..1182: note = Variant of terminal deoxynucleotidyl transferase
  source 1..1182: mol_type = other DNA
atgcaccatcatcatcatcatggcggtagcggccatccgccgagcaataccccggagctggaagtgccgagcgttatcgcccgcaaggttagtcagtacagctgccagcgcaagaccacgctgaataactacaacaaaaagtttaccgacgcgttcgagatcatggccgagaactacgaatttaaagagaacgaaatcttctgtctggaatttctgcgcgccgcgagtctgctgaaatatctgccgttcccggttacccgcatgaaagacatccaaggtctgccgtgcattggcgaccaagttcgtgacgtgatcgaggagatcatcgaagaaggcgagagcagccgtgttaaagaagttctcaatgacgagcgctacaaggcctttaagcagttcaccagcgtgttcggtgtgggcgtgaaaaccagcgaaaagtggtttcgtatgggcctccgtacggttgaagagctgaaggccgacaagagtctgaagctgagcaagatgcagaaggcgggctttctgtattacgaggatctggtgagctgcgttagtaaagcggaagccgatgccgttacgctcatcgtgaagaacacggtgagtacctttctgccggatgcgctggtgaccatcacgggcggtttccgccgtggcaaaaagatgggccacgacatcgactttctgatcacgaatccgggcccgaaagaggatgacgaactgctccacaaagtggttgatctgctcaagaagcaaggtctgctgctgtactgcgacatcatcgagagcacgttcgtggaggaacaactgccaagtcgcaaaatcgacgccatggacaacttccagaagtgcttcgccattctcaagctgtaccagccgggcgtggataacagcctgtataacacgagtaagaagagtgacatggccgaggttaaggattggaaagcgatccgtgtggatctggtgatcacgccattcgagcagtacgcctatgcgctgctcggttggacgggcagccgcgaatttggtcgcgatctgcgccgctatgcgagtcatgagcgcaagatgatcctcgacaaccatggcctctacgaccgcaaaaagcgcatctttctgaaagcgggcagcgaagaagagattttcgcgcatctgggtctggattatgtggagccgtgggaacgcaacgcg

SEQ ID NO: 72 - protein, 394 aa, synthetic construct
  REGION 1..394: note = Variant of terminal deoxynucleotidyl transferase
MHHHHHHGGSGHPPSNTPELEVPSVIARKVSQYSCQRKTTLNNYNKKFTDAFEIMAENYEFKENEIFCLEFLRAASLLKYLPFPVTRMKDIQGLPCIGDQVRDVIEEIIEEGESSRVKEVLNDERYKAFKQFTSVFGVGVKTSEKWFRMGLRTVEELKADKSLKLSKMQKAGFLYYEDLVSCVSKAEADAVTLIVKNTVSTFLPDALVTITGGFRRGKKMGHDIDFLITNPGPKEDDELLHKVVDLLKKQGLLLYCDIIESTFVEEQLPSRKIDAMDNFQKCFAILKLYQPGVDNSLYNTSKKSDMAEVKDWKAIRVDLVITPFEQYAYALLGWTGSREFGRDLRRYASHERKMILDNHGLYDRKKRIFLKAGSEEEIFAHLGLDYVEPWERNA

SEQ ID NO: 73 - DNA, 1182 bp, synthetic construct
  misc_feature 1..1182: note = Variant of terminal deoxynucleotidyl transferase
  source 1..1182: mol_type = other DNA
atgcaccatcatcatcatcatggcggtagcggccatccgccgagcaataccccggagctggaagtgccgagcgttatcgcccgcaaggttagtcagtacagctgccagcgcaagaccacgctgaataactacaacaaaaagtttaccgacgcgttcgagatcatggccgagaactacgaatttaaagagaacgaaatcttctgtctggaatttctgcgcgccgcgagtctgctgaaatatctgccgttcccggttacccgcatgaaagacatccaaggtctgccgtgcattggcgaccaagttcgtgacgtgatcgaggagatcatcgaagaaggcgagagcagccgtgttaaagaagttctcaatgacgagcgctacaaggcctttaagcagttcaccagcgtgttcggtgtgggcgtgaaaaccagcgaaaagtggtttcgtatgggcctccgtacggttgaagagctgaaggccgacaagagtctgaagctgagcaagatgcagaaggcgggctttctgtattacgaggatctggtgagctgcgttagtaaagcggaagccgatgccgttacgctcatcgtgaagaacacggtgagtacctttctgccggatgcgctggtgaccatcacgggcggtttccgccgtggcaaaaagatgggccacgacatcgactttctgatcacgaatccgggcccgaaagaggatgacgaactgctccacaaagtggttgatctgctcaagaagcaaggtctgctgctgtactgcgacatcatcgagagcacgttcgtggaggaacaagagccaagtcgcaaaatcgacgccatggacaacttccagaagtgcttcgccattctcaagctgtaccagccgggcgtggataacagcagctataacacgagtaagaagagtgacatggccgaggttaaggattggaaagcgatccgtgtggatctggtgatcacgccattcgagcagtacgcctatgcgctgctcggttggacgggcagccgcgaatttggtcgcgatctgcgccgctatgcgagtcatgagcgcaagatgatcctcgacaaccatggcctctacgaccgcaaaaagcgcatctttctgaaagcgggcagcgaagaagagattttcgcgcatctgggtctggattatgtggagccgtgggaacgcaacgcg

SEQ ID NO: 74 - protein, 394 aa, synthetic construct
  REGION 1..394: note = Variant of terminal deoxynucleotidyl transferase
MHHHHHHGGSGHPPSNTPELEVPSVIARKVSQYSCQRKTTLNNYNKKFTDAFEIMAENYEFKENEIFCLEFLRAASLLKYLPFPVTRMKDIQGLPCIGDQVRDVIEEIIEEGESSRVKEVLNDERYKAFKQFTSVFGVGVKTSEKWFRMGLRTVEELKADKSLKLSKMQKAGFLYYEDLVSCVSKAEADAVTLIVKNTVSTFLPDALVTITGGFRRGKKMGHDIDFLITNPGPKEDDELLHKVVDLLKKQGLLLYCDIIESTFVEEQEPSRKIDAMDNFQKCFAILKLYQPGVDNSSYNTSKKSDMAEVKDWKAIRVDLVITPFEQYAYALLGWTGSREFGRDLRRYASHERKMILDNHGLYDRKKRIFLKAGSEEEIFAHLGLDYVEPWERNA

SEQ ID NO: 75 - DNA, 1182 bp, synthetic construct
  misc_feature 1..1182: note = Variant of terminal deoxynucleotidyl transferase
  source 1..1182: mol_type = other DNA
atgcaccatcatcatcatcatggcggtagcggccatccgccgagcaataccccggagctggaagtgccgagcgttatcgcccgcaaggttagtcagtacagctgccagcgcaagaccacgctgaataactacaacaaaaagtttaccgacgcgttcgagatcatggccgagaactacgaatttaaagagaacgaaatcttctgtctggaatttctgcgcgccgcgagtctgctgaaatatctgccgttcccggttacccgcatgaaagacatccaaggtctgccgtgcattggcgaccaagttcgtgacgtgatcgaggagatcatcgaagaaggcgagagcagccgtgttaaagaagttctcaatgacgagcgctacaaggcctttaagcagttcaccagcgtgttcggtgtgggcgtgaaaaccagcgaaaagtggtttcgtatgggcctccgtacggttgaagagctgaaggccgacaagagtctgaagctgagcaagatgcagaaggcgggctttctgtattacgaggatctggtgagctgcgttagtaaagcggaagccgatgccgttacgctcatcgtgaagaacacggtgagtacctttctgccggatgcgctggtgaccatcacgggcggtttccgccgtggcaaaaagatgggccacgacatcgactttctgatcacgaatccgggcccgaaagaggatgacgaactgctccacaaagtggttgatgggctcaagaagcaaggtctgctgctgtactgcgacatcatcgagagcacgttcgtggaggaacaactgccaagtcgcaaaatcgacgccatggacaacttccagaagtgcttcgccattctcaagctgtaccagccgggcgtggataacagcagctataacacgagtaagaagagtgacatggccgaggttaaggattggaaagcgatccgtgtggatctggtgatcacgccattcgagcagtacgcctatgcgctgctcggttggacgggcagccgcgaatttggtcgcgatctgcgccgctatgcgagtcatgagcgcaagatgatcctcgacaaccatggcctctacgaccgcaaaaagcgcatctttctgaaagcgggcagcgaagaagagattttcgcgcatctgggtctggattatgtggagccgtgggaacgcaacgcg

SEQ ID NO: 76 - protein, 394 aa, synthetic construct
  REGION 1..394: note = Variant of terminal deoxynucleotidyl transferase
MHHHHHHGGSGHPPSNTPELEVPSVIARKVSQYSCQRKTTLNNYNKKFTDAFEIMAENYEFKENEIFCLEFLRAASLLKYLPFPVTRMKDIQGLPCIGDQVRDVIEEIIEEGESSRVKEVLNDERYKAFKQFTSVFGVGVKTSEKWFRMGLRTVEELKADKSLKLSKMQKAGFLYYEDLVSCVSKAEADAVTLIVKNTVSTFLPDALVTITGGFRRGKKMGHDIDFLITNPGPKEDDELLHKVVDGLKKQGLLLYCDIIESTFVEEQLPSRKIDAMDNFQKCFAILKLYQPGVDNSSYNTSKKSDMAEVKDWKAIRVDLVITPFEQYAYALLGWTGSREFGRDLRRYASHERKMILDNHGLYDRKKRIFLKAGSEEEIFAHLGLDYVEPWERNA

SEQ ID NO: 77 - DNA, 1182 bp, synthetic construct
  misc_feature 1..1182: note = Variant of terminal deoxynucleotidyl transferase
  source 1..1182: mol_type = other DNA
atgcaccatcatcatcatcatggcggtagcggccatccgccgagcaataccccggagctggaagtgccgagcgttatcgcccgcaaggttagtcagtacagctgccagcgcaagaccacgctgaataactacaacaaaaagtttaccgacgcgttcgagatcatggccgagaactacgaatttaaagagaacgaaatcttctgtctggaatttctgcgcgccgcgagtctgctgaaatatctgccgttcccggttacccgcatgaaagacatccaaggtctgccgtgcattggcgaccaagttcgtgacgtgatcgaggagatcatcgaagaaggcgagagcagccgtgttaaagaagttctcaatgacgagcgctacaaggcctttaagcagttcaccagcgtgttcggtgtgggcgtgaaaaccagcgaaaagtggtttcgtatgggcctccgtacggttgaagagctgaaggccgacaagagtctgaagctgagcaagatgcagaaggcgggctttctgtattacgaggatctggtgagctgcgttagtaaagcggaagccgatgccgttacgctcatcgtgaagaacacggtgagtacctttctgccggatgcgctggtgaccatcacgggcggtttccgccgtggcaaaaagatgggccacgacatcgactttctgatcacgaatccgggcccgaaagaggatgacgaactgctccacaaagtggttgatctgctcaagaagcaaggtctgctgctgtactgcgacatcatcgagagcacgttcgtggaggaacaactgccaagtcgcaaaatcgacgccatggacaacttccagaagtgcttcgccattctcaagctgtaccagccgggcgtggataacagcagctataacacgagtaagggtagtgacatggccgaggttaaggattggaaagcgatccgtgtggatctggtgatcacgccattcgagcagtacgcctatgcgctgctcggttggacgggcagccgcgaatttggtcgcgatctgcgccgctatgcgagtcatgagcgcaagatgatcctcgacaaccatggcctctacgaccgcaaaaagcgcatctttctgaaagcgggcagcgaagaagagattttcgcgcatctgggtctggattatgtggagccgtgggaacgcaacgcg

SEQ ID NO: 78 - protein, 394 aa, synthetic construct
  REGION 1..394: note = Variant of terminal deoxynucleotidyl transferase
MHHHHHHGGSGHPPSNTPELEVPSVIARKVSQYSCQRKTTLNNYNKKFTDAFEIMAENYEFKENEIFCLEFLRAASLLKYLPFPVTRMKDIQGLPCIGDQVRDVIEEIIEEGESSRVKEVLNDERYKAFKQFTSVFGVGVKTSEKWFRMGLRTVEELKADKSLKLSKMQKAGFLYYEDLVSCVSKAEADAVTLIVKNTVSTFLPDALVTITGGFRRGKKMGHDIDFLITNPGPKEDDELLHKVVDLLKKQGLLLYCDIIESTFVEEQLPSRKIDAMDNFQKCFAILKLYQPGVDNSSYNTSKGSDMAEVKDWKAIRVDLVITPFEQYAYALLGWTGSREFGRDLRRYASHERKMILDNHGLYDRKKRIFLKAGSEEEIFAHLGLDYVEPWERNA

SEQ ID NO: 79 - DNA, 1182 bp, synthetic construct
  misc_feature 1..1182: note = Variant of terminal deoxynucleotidyl transferase
  source 1..1182: mol_type = other DNA
atgcaccatcatcatcatcatggcggtagcggccatccgccgagcaataccccggagctggaagtgccgagcgttatcgcccgcaaggttagtcagtacagctgccagcgcaagaccacgctgaataactacaacaaaaagtttaccgacgcgttcgagatcatggccgagaactacgaatttaaagagaacgaaatcttctgtctggaatttctgcgcgccgcgagtctgctgaaatatctgccgttcccggttacccgcatgaaagacatccaaggtctgccgtgcattggcgaccaagttcgtgacgtgatcgaggagatcatcgaagaaggcgagagcagccgtgttaaagaagttctcaatgacgagcgctacaaggcctttaagcagttcaccagcgtgttcggtgtgggcgtgaaaaccagcgaaaagtggtttcgtatgggcctccgtacggttgaagagctgaaggccgacaagagtctgaagctgagcaagatgcagaaggcgggctttctgtattacgaggatctgacgagctgcgttagtaaagcggaagccgatgccgttacgctcatcgtgaagaacacggtgagtacctttctgccggatgcgctggtgaccatcacgggcggtttccgccgtggcaaaaagatgggccacgacatcgactttctgatcacgaatccgggcccgaaagaggatgacgaactgctccacaaagtggttgatctgctcaagaagcaaggtctgctgctgtactgcgacatcatcgagagcacgttcgtggaggaacaactgccaagtcgcaaaatcgacgccatggacaacttccagaagtgcttcgccattctcaagctgtaccagccgggcgtggataacagcagctataacacgagtaagaagagtgacatggccgaggttaaggattggaaagcgatccgtgtggatctggtgatcacgccattcgagcagtacgcctatgcgctgctcggttggacgggcagccgcgaatttggtcgcgatctgcgccgctatgcgagtcatgagcgcaagatgatcctcgacaaccatggcctctacgaccgcaaaaagcgcatctttctgaaagcgggcagcgaagaagagattttcgcgcatctgggtctggattatgtggagccgtgggaacgcaacgcg

SEQ ID NO: 80 - protein, 394 aa, synthetic construct
  REGION 1..394: note = Variant of terminal deoxynucleotidyl transferase
MHHHHHHGGSGHPPSNTPELEVPSVIARKVSQYSCQRKTTLNNYNKKFTDAFEIMAENYEFKENEIFCLEFLRAASLLKYLPFPVTRMKDIQGLPCIGDQVRDVIEEIIEEGESSRVKEVLNDERYKAFKQFTSVFGVGVKTSEKWFRMGLRTVEELKADKSLKLSKMQKAGFLYYEDLTSCVSKAEADAVTLIVKNTVSTFLPDALVTITGGFRRGKKMGHDIDFLITNPGPKEDDELLHKVVDLLKKQGLLLYCDIIESTFVEEQLPSRKIDAMDNFQKCFAILKLYQPGVDNSSYNTSKKSDMAEVKDWKAIRVDLVITPFEQYAYALLGWTGSREFGRDLRRYASHERKMILDNHGLYDRKKRIFLKAGSEEEIFAHLGLDYVEPWERNA

SEQ ID NO: 81 - DNA, 1182 bp, synthetic construct
  misc_feature 1..1182: note = Variant of terminal deoxynucleotidyl transferase
  source 1..1182: mol_type = other DNA
atgcaccatcatcatcatcatggcggtagcggccatccgccgagcaataccccggagctggaagtgccgagcgttatcgcccgcaaggttagtcagtacagctgccagcgcaagaccacgctgaataactacaacaaaaagtttaccgacgcgttcgagatcatggccgagaactacgaatttaaagagaacgaaatcttctgtctggaatttctgcgcgccgcgagtctgctgaaatatctgccgttcccggttacccgcatgaaagacatccaaggtctgccgtgcattggcgaccaagttcgtgacgtgatcgaggagatcatcgaagaaggcgagagcagccgtgttaaagaagttctcaatgacgagcgctacaaggcctttaagcagttcaccagcgtgttcggtgtgggcgtgaaaaccagcgaaaagtggtttcgtatgggcctccgtacggttgaagagctgaaggccgacaagagtctgaagctgagcaagatgcagaaggcgggctttctgtattacgaggatctggtgagctgcgttagtaaagcggaagccgatgccgttacgctcatcgtgaagaacacggtgagtacctttctgccggatgcgctggtgaccatcacgggcggtttccgccgtggcaaaaagatgggccacgacatcgactttctgatcacgaatccgggcccgaaagaggatgacgaactgctccacaaagtggttgatctgctcaagaagcaaggtctgctgctgtactgcgacatcatcgagagcacgttcgtggaggaacaactgccaagtcgcaaaatcgacgccatggacaacttccagaagtgcttcgccattctcaagctgtaccagccgggcgtggataacagcagctataacacgagtaagaagagtgacctggccgaggttaaggattggaaagcgatccgtgtggatctggtgatcacgccattcgagcagtacgcctatgcgctgctcggttggacgggcagccgcgaatttggtcgcgatctgcgccgctatgcgagtcatgagcgcaagatgatcctcgacaaccatggcctctacgaccgcaaaaagcgcatctttctgaaagcgggcagcgaagaagagattttcgcgcatctgggtctggattatgtggagccgtgggaacgcaacgcg

SEQ ID NO: 82 - protein, 394 aa, synthetic construct
  REGION 1..394: note = Variant of terminal deoxynucleotidyl transferase
MHHHHHHGGSGHPPSNTPELEVPSVIARKVSQYSCQRKTTLNNYNKKFTDAFEIMAENYEFKENEIFCLEFLRAASLLKYLPFPVTRMKDIQGLPCIGDQVRDVIEEIIEEGESSRVKEVLNDERYKAFKQFTSVFGVGVKTSEKWFRMGLRTVEELKADKSLKLSKMQKAGFLYYEDLVSCVSKAEADAVTLIVKNTVSTFLPDALVTITGGFRRGKKMGHDIDFLITNPGPKEDDELLHKVVDLLKKQGLLLYCDIIESTFVEEQLPSRKIDAMDNFQKCFAILKLYQPGVDNSSYNTSKKSDLAEVKDWKAIRVDLVITPFEQYAYALLGWTGSREFGRDLRRYASHERKMILDNHGLYDRKKRIFLKAGSEEEIFAHLGLDYVEPWERNA

SEQ ID NO: 83 - DNA, 1182 bp, synthetic construct
  misc_feature 1..1182: note = Variant of terminal deoxynucleotidyl transferase
  source 1..1182: mol_type = other DNA
atgcaccatcatcatcatcatggcggtagcggccatccgccgagcaataccccggagctggaagtgccggtggttatcgcccgcaaggttagtcagtacagctgccagcgcaagaccacgctgaataactacaacaaaaagtttaccgacgcgttcgagatcatggccgagaactacgaatttaaagagaacgaaatcttctgtctggaatttctgcgcgccgcgagtctgctgaaatatctgccgttcccggttacccgcatgaaagacatccaaggtctgccgtgcattggcgaccaagttcgtgacgtgatcgaggagatcatcgaagaaggcgagagcagccgtgttaaagaagttctcaatgacgagcgctacaaggcctttaagcagttcaccagcgtgttcggtgtgggcgtgaaaaccagcgaaaagtggtttcgtatgggcctccgtacggttgaagagctgaaggccgacaagagtctgaagctgagcaagatgcagaaggcgggctttctgtattacgaggatctggtgagctgcgttagtaaagcggaagccgatgccgttacgctcatcgtgaagaacacggtgagtacctttctgccggatgcgctggtgaccatcacgggcggtttccgccgtggcaaaaagatgggccacgacatcgactttctgatcacgaatccgggcccgaaagaggatgacgaactgctccacaaagtggttgatctgctcaagaagcaaggtctgctgctgtactgcgacatcatcgagagcacgttcgtggaggaacaactgccaagtcgcaaaatcgacgccatggacaacttccagaagtgcttcgccattctcaagctgtaccagccgggcgtggataacagcagctataacacgagtaagaagagtgacatggccgaggttaaggattggaaagcgatccgtgtggatctggtgatcacgccattcgagcagtacgcctatgcgctgctcggttggacgggcagccgcgaatttggtcgcgatctgcgccgctatgcgagtcatgagcgcaagatgatcctcgacaaccatggcctctacgaccgcaaaaagcgcatctttctgaaagcgggcagcgaagaagagattttcgcgcatctgggtctggattatgtggagccgtgggaacgcaacgcg

SEQ ID NO: 84 - protein, 394 aa, synthetic construct
  REGION 1..394: note = Variant of terminal deoxynucleotidyl transferase
MHHHHHHGGSGHPPSNTPELEVPVVIARKVSQYSCQRKTTLNNYNKKFTDAFEIMAENYEFKENEIFCLEFLRAASLLKYLPFPVTRMKDIQGLPCIGDQVRDVIEEIIEEGESSRVKEVLNDERYKAFKQFTSVFGVGVKTSEKWFRMGLRTVEELKADKSLKLSKMQKAGFLYYEDLVSCVSKAEADAVTLIVKNTVSTFLPDALVTITGGFRRGKKMGHDIDFLITNPGPKEDDELLHKVVDLLKKQGLLLYCDIIESTFVEEQLPSRKIDAMDNFQKCFAILKLYQPGVDNSSYNTSKKSDMAEVKDWKAIRVDLVITPFEQYAYALLGWTGSREFGRDLRRYASHERKMILDNHGLYDRKKRIFLKAGSEEEIFAHLGLDYVEPWERNA

SEQ ID NO: 85 - DNA, 1182 bp, synthetic construct
  misc_feature 1..1182: note = Variant of terminal deoxynucleotidyl transferase
  source 1..1182: mol_type = other DNA
atgcaccatcatcatcatcatggcggtagcggccatccgccgagcaataccccggagctggaagtgccgagcgttatcgcccgcaaggttagtcagtacagctgccagcgcaagaccacgctgaataactacaacaaaaagtttaccgacgcgttcgagatcatggccgagaactacgaatttaaagagaacgaaatcttctgtctggaatttctgcgcgccgcgagtctgctgaaatatctgccgttcccggttacccgcatgaaagacatccaaggtctgccgtgcattggcgaccaagttcgtgacgtgatcgaggagatcatcgaagaaggcgagagcagccgtgttaaagaagttctcaatgacgagcgctacaaggcctttaagcagttcaccagcgtgttcggtgtgggcgtgaaaaccagcgaaaagtggtttcgtatgggcctccgtacggttgaagagctgaaggccgacaagagtctgaagctgagcaagatgcagaaggcgggctttctgtattacgaggatctggtgagctgcgttagtaaagcggaagccgatgccgttacgctcatcgtgaagaacacggtgagtacctttctgccggatgcgctggtgaccatcacgggcggtttccgccgtggcaaagcgatgggccacgacatcgactttctgatcacgaatccgggcccgaaagaggatgacgaactgctccacaaagtggttgatctgctcaagaagcaaggtctgctgctgtactgcgacatcatcgagagcacgttcgtggaggaacaactgccaagtcgcaaaatcgacgccatggacaacttccagaagtgcttcgccattctcaagctgtaccagccgggcgtggataacagcagctataacacgagtaagaagagtgacatggccgaggttaaggattggaaagcgatccgtgtggatctggtgatcacgccattcgagcagtacgcctatgcgctgctcggttggacgggcagccgcgaatttggtcgcgatctgcgccgctatgcgagtcatgagcgcaagatgatcctcgacaaccatggcctctacgaccgcaaaaagcgcatctttctgaaagcgggcagcgaagaagagattttcgcgcatctgggtctggattatgtggagccgtgggaacgcaacgcg

SEQ ID NO: 86 - protein, 394 aa, synthetic construct
  REGION 1..394: note = Variant of terminal deoxynucleotidyl transferase
MHHHHHHGGSGHPPSNTPELEVPSVIARKVSQYSCQRKTTLNNYNKKFTDAFEIMAENYEFKENEIFCLEFLRAASLLKYLPFPVTRMKDIQGLPCIGDQVRDVIEEIIEEGESSRVKEVLNDERYKAFKQFTSVFGVGVKTSEKWFRMGLRTVEELKADKSLKLSKMQKAGFLYYEDLVSCVSKAEADAVTLIVKNTVSTFLPDALVTITGGFRRGKAMGHDIDFLITNPGPKEDDELLHKVVDLLKKQGLLLYCDIIESTFVEEQLPSRKIDAMDNFQKCFAILKLYQPGVDNSSYNTSKKSDMAEVKDWKAIRVDLVITPFEQYAYALLGWTGSREFGRDLRRYASHERKMILDNHGLYDRKKRIFLKAGSEEEIFAHLGLDYVEPWERNA

SEQ ID NO: 87 - DNA, 1182 bp, synthetic construct
  misc_feature 1..1182: note = Variant of terminal deoxynucleotidyl transferase
  source 1..1182: mol_type = other DNA
atgcaccatcatcatcatcatggcggtagcggccatccgccgagcaataccccgtcgctggaagtgccgagcgttatcgcccgcaaggttagtcagtacagctgccagcgcaagaccacgctgaataactacaacaaaaagtttaccgacgcgttcgagatcatggccgagaactacgaatttaaagagaacgaaatcttctgtctggaatttctgcgcgccgcgagtctgctgaaatatctgccgttcccggttacccgcatgaaagacatccaaggtctgccgtgcattggcgaccaagttcgtgacgtgatcgaggagatcatcgaagaaggcgagagcagccgtgttaaagaagttctcaatgacgagcgctacaaggcctttaagcagttcaccagcgtgttcggtgtgggcgtgaaaaccagcgaaaagtggtttcgtatgggcctccgtacggttgaagagctgaaggccgacaagagtctgaagctgagcaagatgcagaaggcgggctttctgtattacgaggatctggtgagctgcgttagtaaagcggaagccgatgccgttacgctcatcgtgaagaacacggtgagtacctttctgccggatgcgctggtgaccatcacgggcggtttccgccgtggcaaaaagatgggccacgacatcgactttctgatcacgaatccgggcccgaaagaggatgacgaactgctccacaaagtggttgatctgctcaagaagcaaggtctgctgctgtactgcgacatcatcgagagcacgttcgtggaggaacaactgccaagtcgcaaaatcgacgccatggacaacttccagaagtgcttcgccattctcaagctgtaccagccgggcgtggataacagcagctataacacgagtaagaagagtgacatggccgaggttaaggattggaaagcgatccgtgtggatctggtgatcacgccattcgagcagtacgcctatgcgctgctcggttggacgggcagccgcgaatttggtcgcgatctgcgccgctatgcgagtcatgagcgcaagatgatcctcgacaaccatggcctctacgaccgcaaaaagcgcatctttctgaaagcgggcagcgaagaagagattttcgcgcatctgggtctggattatgtggagccgtgggaacgcaacgcg

SEQ ID NO: 88 - protein, 394 aa, synthetic construct
  REGION 1..394: note = Variant of terminal deoxynucleotidyl transferase
MHHHHHHGGSGHPPSNTPSLEVPSVIARKVSQYSCQRKTTLNNYNKKFTDAFEIMAENYEFKENEIFCLEFLRAASLLKYLPFPVTRMKDIQGLPCIGDQVRDVIEEIIEEGESSRVKEVLNDERYKAFKQFTSVFGVGVKTSEKWFRMGLRTVEELKADKSLKLSKMQKAGFLYYEDLVSCVSKAEADAVTLIVKNTVSTFLPDALVTITGGFRRGKKMGHDIDFLITNPGPKEDDELLHKVVDLLKKQGLLLYCDIIESTFVEEQLPSRKIDAMDNFQKCFAILKLYQPGVDNSSYNTSKKSDMAEVKDWKAIRVDLVITPFEQYAYALLGWTGSREFGRDLRRYASHERKMILDNHGLYDRKKRIFLKAGSEEEIFAHLGLDYVEPWERNA

SEQ ID NO: 89 - DNA, 1182 bp, synthetic construct
  misc_feature 1..1182: note = Variant of terminal deoxynucleotidyl transferase
  source 1..1182: mol_type = other DNA
atgcaccatcatcatcatcatggcggtagcggccatccgccgagcaataccccggagctggaagtgccgagcgttatcgcccgcaaggttagtcagtacagctgccagcgcaagaccacgctgaataactacaacaaaaagtttaccgacgcgttcgagatcatggccgagaactacgaatttaaagagaacgaaatcttctgtctggaatttctgcgcgccgcgagtctgctgaaatatctgccgttcccggttacccgcatgaaagacatccaaggtctgccgtgcattggcgaccaagttcgtgacgtgatcgaggagatcatcgaagaaggcgagagcagccgtgttaaagaagttctcaatgacgagcgctacaaggcctttaagcagttcaccagcgtgttcggtgtgggcgtgaaaaccagcgaaaagtggtttcgtatgggcctccgtacggttgaagagctgaaggccgacaagagtctgaagctgagcaagatgcagaaggcgggctttctgtattacgaggatctggtgagctgcgttagtaaagcggaagccgatgccgttacgctcatcgtgaagaacacggtgagtacctttctgccggatgcgctggtgaccatcacgggcggtttccgccgtggcaaaaagatgggccacgacatcgactttctgatcacgaatccgggcccgaaagaggatgacgaactgctccacaaagtggttgatctgctcaagaagcaaggtctgctgctgtactgcgacatcatcgagagcacgttcgtggaggaacaactgccaagtcgcaaaatcgacgccatggacaacttccagaagtgcttcgccattctcaagctgtaccagccgggcgtggataacagcagctataactcgagtaagaagagtgacatggccgaggttaaggattggaaagcgatccgtgtggatctggtgatcacgccattcgagcagtacgcctatgcgctgctcggttggacgggcagccgcgaatttggtcgcgatctgcgccgctatgcgagtcatgagcgcaagatgatcctcgacaaccatggcctctacgaccgcaaaaagcgcatctttctgaaagcgggcagcgaagaagagattttcgcgcatctgggtctggattatgtggagccgtgggaacgcaacgcg

SEQ ID NO: 90 - protein, 394 aa, synthetic construct
  REGION 1..394: note = Variant of terminal deoxynucleotidyl transferase
MHHHHHHGGSGHPPSNTPELEVPSVIARKVSQYSCQRKTTLNNYNKKFTDAFEIMAENYEFKENEIFCLEFLRAASLLKYLPFPVTRMKDIQGLPCIGDQVRDVIEEIIEEGESSRVKEVLNDERYKAFKQFTSVFGVGVKTSEKWFRMGLRTVEELKADKSLKLSKMQKAGFLYYEDLVSCVSKAEADAVTLIVKNTVSTFLPDALVTITGGFRRGKKMGHDIDFLITNPGPKEDDELLHKVVDLLKKQGLLLYCDIIESTFVEEQLPSRKIDAMDNFQKCFAILKLYQPGVDNSSYNSSKKSDMAEVKDWKAIRVDLVITPFEQYAYALLGWTGSREFGRDLRRYASHERKMILDNHGLYDRKKRIFLKAGSEEEIFAHLGLDYVEPWERNA

SEQ ID NO: 91 - DNA, 1182 bp, synthetic construct
  misc_feature 1..1182: note = Variant of terminal deoxynucleotidyl transferase
  source 1..1182: mol_type = other DNA
atgcaccatcatcatcatcatggcggtagcggccatccgccgagcaataccccggagctggaagtgccgagcgttatcgcccgcaaggttagtcagtacagctgccagcgcaagaccacgctgaataactacaacaaaaagtttaccgacgcgttcgagatcatggccgagaactacgaatttaaagagaacgaacttttctgtctggaatttctgcgcgccgcgagtctgctgaaatatctgccgttcccggttacccgcatgaaagacatccaaggtctgccgtgcattggcgaccaagttcgtgacgtgatcgaggagatcatcgaagaaggcgagagcagccgtgttaaagaagttctcaatgacgagcgctacaaggcctttaagcagttcaccagcgtgttcggtgtgggcgtgaaaaccagcgaaaagtggtttcgtatgggcctccgtacggttgaagagctgaaggccgacaagagtctgaagctgagcaagatgcagaaggcgggctttctgtattacgaggatctggtgagctgcgttagtaaagcggaagccgatgccgttacgctcatcgtgaagaacacggtgagtacctttctgccggatgcgctggtgaccatcacgggcggtttccgccgtggcaaaaagatgggccacgacatcgactttctgatcacgaatccgggcccgaaagaggatgacgaactgctccacaaagtggttgatctgctcaagaagcaaggtctgctgctgtactgcgacatcatcgagagcacgttcgtggaggaacaactgccaagtcgcaaaatcgacgccatggacaacttccagaagtgcttcgccattctcaagctgtaccagccgggcgtggataacagcagctataacacgagtaagaagagtgacatggccgaggttaaggattggaaagcgatccgtgtggatctggtgatcacgccattcgagcagtacgcctatgcgctgctcggttggacgggcagccgcgaatttggtcgcgatctgcgccgctatgcgagtcatgagcgcaagatgatcctcgacaaccatggcctctacgaccgcaaaaagcgcatctttctgaaagcgggcagcgaagaagagattttcgcgcatctgggtctggattatgtggagccgtgggaacgcaacgcg

SEQ ID NO: 92 - protein, 394 aa, synthetic construct
  REGION 1..394: note = Variant of terminal deoxynucleotidyl transferase
MHHHHHHGGSGHPPSNTPELEVPSVIARKVSQYSCQRKTTLNNYNKKFTDAFEIMAENYEFKENELFCLEFLRAASLLKYLPFPVTRMKDIQGLPCIGDQVRDVIEEIIEEGESSRVKEVLNDERYKAFKQFTSVFGVGVKTSEKWFRMGLRTVEELKADKSLKLSKMQKAGFLYYEDLVSCVSKAEADAVTLIVKNTVSTFLPDALVTITGGFRRGKKMGHDIDFLITNPGPKEDDELLHKVVDLLKKQGLLLYCDIIESTFVEEQLPSRKIDAMDNFQKCFAILKLYQPGVDNSSYNTSKKSDMAEVKDWKAIRVDLVITPFEQYAYALLGWTGSREFGRDLRRYASHERKMILDNHGLYDRKKRIFLKAGSEEEIFAHLGLDYVEPWERNA

SEQ ID NO: 93 - DNA, 1182 bp, synthetic construct
  misc_feature 1..1182: note = Variant of terminal deoxynucleotidyl transferase
  source 1..1182: mol_type = other DNA
atgcaccatcatcatcatcatggcggtagcggccatccgccgagcaataccccggagctggaagtgccgagcgttatcgcccgcaaggttagtcagtacagctgccagcgcaagaccacgctgaataactacaacaaaaagtttaccgacgcgttcgagatcatggccgagaactacgaatttaaagagaacgaaatcttctgtctggaatttctgcgcgccgcgagtctgctgaaatatctgccgttcccggttacccgcatgaaagacatccaaggtctgccgtgcattggcgaccaagttcgtgacgtgatcgaggagatcatcgaagaaggcgagagcagccgtgttaaagaagttctcaatgacgagcgctacaaggcctttaagcagttcaccagcgtgttcggtgtgggcgtgaaaaccagcgaaaagtggtttcgtatgggcctccgtacggttgaagagctgaaggccgacaagagtctgaagctgagcaagatgcagaaggcgggctttctgtattacgaggatctggtgagctgcgttagtaaagcggaagccgatgccgttacgctcatcgtgaagaacacggtgagtacctttctgccggatgcgctggtgaccatcacgggcggtttccgccgtggcaaaaagatgggccacgacatcgactttctgatcacgaatccgggcccgaaagaggatgacgaactgctccacaaagtggttgatctgctcaagaagcaaggtctgctgctgtactgcgacatcatcgagagcacgttcgtggaggaacaactgccaagtcgcaaaatcgacgccatggacaacttccagaagtgcttcgccattctcaagctgtaccagccgggcgtggataacagcagctataacacgagtaagaaggaggacatggccgaggttaaggattggaaagcgatccgtgtggatctggtgatcacgccattcgagcagtacgcctatgcgctgctcggttggacgggcagccgcgaatttggtcgcgatctgcgccgctatgcgagtcatgagcgcaagatgatcctcgacaaccatggcctctacgaccgcaaaaagcgcatctttctgaaagcgggcagcgaagaagagattttcgcgcatctgggtctggattatgtggagccgtgggaacgcaacgcg

SEQ ID NO: 94 - protein, 394 aa, synthetic construct
  REGION 1..394: note = Variant of terminal deoxynucleotidyl transferase
MHHHHHHGGSGHPPSNTPELEVPSVIARKVSQYSCQRKTTLNNYNKKFTDAFEIMAENYEFKENEIFCLEFLRAASLLKYLPFPVTRMKDIQGLPCIGDQVRDVIEEIIEEGESSRVKEVLNDERYKAFKQFTSVFGVGVKTSEKWFRMGLRTVEELKADKSLKLSKMQKAGFLYYEDLVSCVSKAEADAVTLIVKNTVSTFLPDALVTITGGFRRGKKMGHDIDFLITNPGPKEDDELLHKVVDLLKKQGLLLYCDIIESTFVEEQLPSRKIDAMDNFQKCFAILKLYQPGVDNSSYNTSKKEDMAEVKDWKAIRVDLVITPFEQYAYALLGWTGSREFGRDLRRYASHERKMILDNHGLYDRKKRIFLKAGSEEEIFAHLGLDYVEPWERNA

SEQ ID NO: 95 - DNA, 1182 bp, synthetic construct
  misc_feature 1..1182: note = Variant of terminal deoxynucleotidyl transferase
  source 1..1182: mol_type = other DNA
atgcaccatcatcatcatcatggcggtagcggccatccgccgagcaataccccggagctggaagtgccgagcgttatcgcccgcaaggttagtcagtacagctgccagcgcaagaccacgctgaataactacaacaaaaagtttaccgacgcgttcgagatcatggccgagaactacgaatttaaagagaacgaaatcttctgtctggaatttctgcgcgccgcgagtctgctgaaatatctgccgttcccggttacccgcatgaaagacatccaaggtctgccgtgcattggcgaccaagttcgtgacgtgatcgaggagatcatcgaagaaggcgagagcagccgtgttaaagaagttctcaatgacgagcgctacaaggcctttaagcagttcaccagcgtgttcggtgtgggcgtgaaaaccagcgaaaagtggtttcgtatgggcctccgtacggttgaagagctgaaggccgacaagagtctgaagctgagcaagatgcagaaggcgggctttctgtattacgaggatctggtgagctgcgttagtaaagcggaagccgatgccgttacgctcatcgtgaagaacacggtgagtacctttctgccggatgcgctggtgaccatcacgggcggtttccgccgtggcaaaaagatgggccacgacatcgactttctgatcacgaatccgggcccgaaagtggatgacgaactgctccacaaagtggttgatctgctcaagaagcaaggtctgctgctgtactgcgacatcatcgagagcacgttcgtggaggaacaactgccaagtcgcaaaatcgacgccatggacaacttccagaagtgcttcgccattctcaagctgtaccagccgggcgtggataacagcagctataacacgagtaagaagagtgacatggccgaggttaaggattggaaagcgatccgtgtggatctggtgatcacgccattcgagcagtacgcctatgcgctgctcggttggacgggcagccgcgaatttggtcgcgatctgcgccgctatgcgagtcatgagcgcaagatgatcctcgacaaccatggcctctacgaccgcaaaaagcgcatctttctgaaagcgggcagcgaagaagagattttcgcgcatctgggtctggattatgtggagccgtgggaacgcaacgcg

SEQ ID NO: 96 - protein, 394 aa, synthetic construct
  REGION 1..394: note = Variant of terminal deoxynucleotidyl transferase
MHHHHHHGGSGHPPSNTPELEVPSVIARKVSQYSCQRKTTLNNYNKKFTDAFEIMAENYEFKENEIFCLEFLRAASLLKYLPFPVTRMKDIQGLPCIGDQVRDVIEEIIEEGESSRVKEVLNDERYKAFKQFTSVFGVGVKTSEKWFRMGLRTVEELKADKSLKLSKMQKAGFLYYEDLVSCVSKAEADAVTLIVKNTVSTFLPDALVTITGGFRRGKKMGHDIDFLITNPGPKVDDELLHKVVDLLKKQGLLLYCDIIESTFVEEQLPSRKIDAMDNFQKCFAILKLYQPGVDNSSYNTSKKSDMAEVKDWKAIRVDLVITPFEQYAYALLGWTGSREFGRDLRRYASHERKMILDNHGLYDRKKRIFLKAGSEEEIFAHLGLDYVEPWERNA

SEQ ID NO: 97 - DNA, 1182 bp, synthetic construct
  misc_feature 1..1182: note = Variant of terminal deoxynucleotidyl transferase
  source 1..1182: mol_type = other DNA
atgcaccatcatcatcatcatggcggtagcggccatccgccgagcaataccccggagctggaagtgccgagcgttatcgcccgcaaggttagtcagtacagctgccagcgcaagaccacgctgaataactacaacaaaaagtttaccgacgcgttcgagatcatggccgagaactacgaatttaaagagaacgaaatcttctgtctggaatttctgcgcgccgcgagtctgctgaaatatctgccgttcccggttacccgcatgaaagacatccaaggtctgccgtgcattggcgaccaagttcgtgacgtgatcgaggagatcatcgaagaaggcgagagcagccgtgttaaagaagttctcaatgacgagcgctacaaggcctttaagcagttcaccagcgtgttcggtgtgggcgtgaaaaccagcgaaaagtggtttcgtatgggcctccgtacggttgaagagctgaaggccgacaagagtctgaagctgagcaagatgcagaaggcgggctttctgtattacgaggatctggtgagctgcgttagtaaagcggaagccgatgccgttacgctcatcgtgaagaacacggtgagtaggtttctgccggatgcgctggtgaccatcacgggcggtttccgccgtggcaaaaagatgggccacgacatcgactttctgatcacgaatccgggcccgaaagaggatgacgaactgctccacaaagtggttgatctgctcaagaagcaaggtctgctgctgtactgcgacatcatcgagagcacgttcgtggaggaacaactgccaagtcgcaaaatcgacgccatggacaacttccagaagtgcttcgccattctcaagctgtaccagccgggcgtggataacagcagctataacacgagtaagaagagtgacatggccgaggttaaggattggaaagcgatccgtgtggatctggtgatcacgccattcgagcagtacgcctatgcgctgctcggttggacgggcagccgcgaatttggtcgcgatctgcgccgctatgcgagtcatgagcgcaagatgatcctcgacaaccatggcctctacgaccgcaaaaagcgcatctttctgaaagcgggcagcgaagaagagattttcgcgcatctgggtctggattatgtggagccgtgggaacgcaacgcg

SEQ ID NO: 98 - protein, 394 aa, synthetic construct
  REGION 1..394: note = Variant of terminal deoxynucleotidyl transferase
MHHHHHHGGSGHPPSNTPELEVPSVIARKVSQYSCQRKTTLNNYNKKFTDAFEIMAENYEFKENEIFCLEFLRAASLLKYLPFPVTRMKDIQGLPCIGDQVRDVIEEIIEEGESSRVKEVLNDERYKAFKQFTSVFGVGVKTSEKWFRMGLRTVEELKADKSLKLSKMQKAGFLYYEDLVSCVSKAEADAVTLIVKNTVSRFLPDALVTITGGFRRGKKMGHDIDFLITNPGPKEDDELLHKVVDLLKKQGLLLYCDIIESTFVEEQLPSRKIDAMDNFQKCFAILKLYQPGVDNSSYNTSKKSDMAEVKDWKAIRVDLVITPFEQYAYALLGWTGSREFGRDLRRYASHERKMILDNHGLYDRKKRIFLKAGSEEEIFAHLGLDYVEPWERNA

SEQ ID NO: 99 - DNA, 1182 bp, synthetic construct
  misc_feature 1..1182: note = Variant of terminal deoxynucleotidyl transferase
  source 1..1182: mol_type = other DNA
atgcaccatcatcatcatcatggcggtagcggccatccgccgagcaataccccggagctggaagtgccgagcgttatcgcccgcaaggttagtcagtacagctgccagcgcaagaccacgctgaataactacaacaaaaagtttaccgacgcgttcgagatcatggccgagaactacgaatttaaagagaacgaaatcttctgtctggaatttctgcgcgccgcgagtctgctgaaatatctgccgttcccggttacccgcatgaaagacatccaaggtctgccgtgcattggcgaccaagttcgtgacgtgatcgaggagatcatcgaagaaggcgagagcagccgtgttaaagaagttctcaatgacgagcgctacaaggcctttaagcagttcaccagcgtgttcggtgtgggcattaaaaccagcgaaaagtggtttcgtatgggcctccgtacggttgaagagctgaaggccgacaagagtctgaagctgagcaagatgcagaaggcgggctttctgtattacgaggatctggtgagctgcgttagtaaagcggaagccgatgccgttacgctcatcgtgaagaacacggtgagtacctttctgccggatgcgctggtgaccatcacgggcggtttccgccgtggcaaaaagatgggccacgacatcgactttctgatcacgaatccgggcccgaaagaggatgacgaactgctccacaaagtggttgatctgctcaagaagcaaggtctgctgctgtactgcgacatcatcgagagcacgttcgtggaggaacaactgccaagtcgcaaaatcgacgccatggacaacttccagaagtgcttcgccattctcaagctgtaccagccgggcgtggataacagcagctataacacgagtaagaagagtgacatggccgaggttaaggattggaaagcgatccgtgtggatctggtgatcacgccattcgagcagtacgcctatgcgctgctcggttggacgggcagccgcgaatttggtcgcgatctgcgccgctatgcgagtcatgagcgcaagatgatcctcgacaaccatggcctctacgaccgcaaaaagcgcatctttctgaaagcgggcagcgaagaagagattttcgcgcatctgggtctggattatgtggagccgtgggaacgcaacgcg

SEQ ID NO: 100 - protein, 394 aa, synthetic construct
  REGION 1..394: note = Variant of terminal deoxynucleotidyl transferase
MHHHHHHGGSGHPPSNTPELEVPSVIARKVSQYSCQRKTTLNNYNKKFTDAFEIMAENYEFKENEIFCLEFLRAASLLKYLPFPVTRMKDIQGLPCIGDQVRDVIEEIIEEGESSRVKEVLNDERYKAFKQFTSVFGVGIKTSEKWFRMGLRTVEELKADKSLKLSKMQKAGFLYYEDLVSCVSKAEADAVTLIVKNTVSTFLPDALVTITGGFRRGKKMGHDIDFLITNPGPKEDDELLHKVVDLLKKQGLLLYCDIIESTFVEEQLPSRKIDAMDNFQKCFAILKLYQPGVDNSSYNTSKKSDMAEVKDWKAIRVDLVITPFEQYAYALLGWTGSREFGRDLRRYASHERKMILDNHGLYDRKKRIFLKAGSEEEIFAHLGLDYVEPWERNA

SEQ ID NO: 101 - DNA, 1182 bp, synthetic construct
  misc_feature 1..1182: note = Variant of terminal deoxynucleotidyl transferase
  source 1..1182: mol_type = other DNA
atgcaccatcatcatcatcatggcggtagcggccatccgccgagcaataccccggagctggaagtgccgagcgttatcgcccgcaaggttagtcagtacagctgccagcgcaagaccacgctgaataactacaacaaaaagtttaccgacgcgttcgagatcatggccgagaactacgaatttaaagagaacgaaatcttctgtctggaatttctgcgcgccgcgagtctgctgaaatatctgccgttcccggttacccgcatgaaagacatccaaggtctgccgtgcattggcgaccaagttcgtgacgtgatcgaggagatcatcgaagaaggcgagagcagccgtgttaaagaagttctcaatgacgagcgctacaaggcctttaagcagttcaccagcgtgttcggtgtgggcgtgaaaaccagcgaaaagtggtttcgtatgggcctccgtacggttgaagagctgaaggccgacaagagtctgaagctgagcaagatgcagaaggcgggctttctgtattacgaggatctggcgagctgcgttagtaaagcggaagccgatgccgttacgctcatcgtgaagaacacggtgagtacctttctgccggatgcgctggtgaccatcacgggcggtttccgccgtggcaaaaagatgggccacgacatcgactttctgatcacgaatccgggcccgaaagaggatgacgaactgctccacaaagtggttgatctgctcaagaagcaaggtctgctgctgtactgcgacatcatcgagagcacgttcgtggaggaacaactgccaagtcgcaaaatcgacgccatggacaacttccagaagtgcttcgccattctcaagctgtaccagccgggcgtggataacagcagctataacacgagtaagaagagtgacatggccgaggttaaggattggaaagcgatccgtgtggatctggtgatcacgccattcgagcagtacgcctatgcgctgctcggttggacgggcagccgcgaatttggtcgcgatctgcgccgctatgcgagtcatgagcgcaagatgatcctcgacaaccatggcctctacgaccgcaaaaagcgcatctttctgaaagcgggcagcgaagaagagattttcgcgcatctgggtctggattatgtggagccgtgggaacgcaacgcg

SEQ ID NO: 102 - protein, 394 aa, synthetic construct
  REGION 1..394: note = Variant of terminal deoxynucleotidyl transferase
MHHHHHHGGSGHPPSNTPELEVPSVIARKVSQYSCQRKTTLNNYNKKFTDAFEIMAENYEFKENEIFCLEFLRAASLLKYLPFPVTRMKDIQGLPCIGDQVRDVIEEIIEEGESSRVKEVLNDERYKAFKQFTSVFGVGVKTSEKWFRMGLRTVEELKADKSLKLSKMQKAGFLYYEDLASCVSKAEADAVTLIVKNTVSTFLPDALVTITGGFRRGKKMGHDIDFLITNPGPKEDDELLHKVVDLLKKQGLLLYCDIIESTFVEEQLPSRKIDAMDNFQKCFAILKLYQPGVDNSSYNTSKKSDMAEVKDWKAIRVDLVITPFEQYAYALLGWTGSREFGRDLRRYASHERKMILDNHGLYDRKKRIFLKAGSEEEIFAHLGLDYVEPWERNA

SEQ ID NO: 103 - DNA, 1182 bp, synthetic construct
  misc_feature 1..1182: note = Variant of terminal deoxynucleotidyl transferase
  source 1..1182: mol_type = other DNA
atgcaccatcatcatcatcatggcggtagcggccatccgccgagcaataccccggagctggaagtgccgagcgttatcgcccgcaaggttagtcagtacagctgccagcgcaagaccacgctgaataactacaacaaaaagtttaccgacgcgttcgagatcatggccgagaactacgaatttaaagagaacgaaatcttctgtctggaatttctgcgcgccgcgagtctgctgaaatatctgccgttcccggttacccgcatgaaagacatccaaggtctgccgtgcattggcgaccaagttcgtgacgtgatcgaggagatcatcgaagaaggcgagagcagccgtgttaaagaagttctcaatgacgagcgctacaaggcctttaagcagttcaccagcgtgttcggtgtgggcgtgaaaaccagcgaaaagtggtttcgtatgggcctccgtacggttgaagagctgaaggccgacaagagtctgaagctgagcaagatgcagaaggcgggctttctgtattacgaggatctggtgagctgcgttagtaaagcggaagccgatgccgttacgctcatcgtgaagaacacggtgagtacctttctgccggatgcgctggtgaccatcacgggcggtttccgccgtggcaaaaagatgggccacgacatcgactttctgatcacgaatccgggcccgaaagaggatgacgaactgctccacaaagtggttgatctgctcaagaagcaaggtctgctgctgtactgcgacatcatcgagagcacgttcgtggaggaacaactgccaagtcgcaaaatcgacgccatggacaacttccagaagtgcttcgccattctcaagctgtaccagccgggcgtggataacagcagctataacacgagtaagaagtgggacatggccgaggttaaggattggaaagcgatccgtgtggatctggtgatcacgccattcgagcagtacgcctatgcgctgctcggttggacgggcagccgcgaatttggtcgcgatctgcgccgctatgcgagtcatgagcgcaagatgatcctcgacaaccatggcctctacgaccgcaaaaagcgcatctttctgaaagcgggcagcgaagaagagattttcgcgcatctgggtctggattatgtggagccgtgggaacgcaacgcg

SEQ ID NO: 104 - protein, 394 aa, synthetic construct
  REGION 1..394: note = Variant of terminal deoxynucleotidyl transferase
MHHHHHHGGSGHPPSNTPELEVPSVIARKVSQYSCQRKTTLNNYNKKFTDAFEIMAENYEFKENEIFCLEFLRAASLLKYLPFPVTRMKDIQGLPCIGDQVRDVIEEIIEEGESSRVKEVLNDERYKAFKQFTSVFGVGVKTSEKWFRMGLRTVEELKADKSLKLSKMQKAGFLYYEDLVSCVSKAEADAVTLIVKNTVSTFLPDALVTITGGFRRGKKMGHDIDFLITNPGPKEDDELLHKVVDLLKKQGLLLYCDIIESTFVEEQLPSRKIDAMDNFQKCFAILKLYQPGVDNSSYNTSKKWDMAEVKDWKAIRVDLVITPFEQYAYALLGWTGSREFGRDLRRYASHERKMILDNHGLYDRKKRIFLKAGSEEEIFAHLGLDYVEPWERNA

SEQ ID NO: 105 - DNA, 1182 bp, synthetic construct
  misc_feature 1..1182: note = Variant of terminal deoxynucleotidyl transferase
  source 1..1182: mol_type = other DNA
atgcaccatcatcatcatcatggcggtagcggccatccgccgagcaataccccggagctggaagtgccgagcgttatcgcccgcaaggttagtcagtacagctgccagcgcaagaccacgctgaataactacaacaaaaagtttaccgacgcgttcgagatcatggccgagaactacgaatttaaagagaacgaaatcttctgtctggaatttctgcgcgccgcgagtctgctgaaatatctgccgttcccggttacccgcatgaaagacatccaaggtctgccgtgcattggcgaccaagttcgtgacgtgatcgaggagatcatcgaagaaggcgagagcagccgtgttaaagaagttctcaatgacgagcgctacaaggcctttaagcagttcaccagcgtgttcggtgtgggcgtgaaaaccagcgaaaagtggtttcgtatgggcctccgtacggttgaagagctgaaggccgacaagagtctgaagctgagcaagatgcagcaggcgggctttctgtattacgaggatctggtgagctgcgttagtaaagcggaagccgatgccgttacgctcatcgtgaagaacacggtgagtacctttctgccggatgcgctggtgaccatcacgggcggtttccgccgtggcaaaaagatgggccacgacatcgactttctgatcacgaatccgggcccgaaagaggatgacgaactgctccacaaagtggttgatctgctcaagaagcaaggtctgctgctgtactgcgacatcatcgagagcacgttcgtggaggaacaactgccaagtcgcaaaatcgacgccatggacaacttccagaagtgcttcgccattctcaagctgtaccagccgggcgtggataacagcagctataacacgagtaagaagagtgacatggccgaggttaaggattggaaagcgatccgtgtggatctggtgatcacgccattcgagcagtacgcctatgcgctgctcggttggacgggcagccgcgaatttggtcgcgatctgcgccgctatgcgagtcatgagcgcaagatgatcctcgacaaccatggcctctacgaccgcaaaaagcgcatctttctgaaagcgggcagcgaagaagagattttcgcgcatctgggtctggattatgtggagccgtgggaacgcaacgcg

SEQ ID NO: 106 - protein, 394 aa, synthetic construct
  REGION 1..394: note = Variant of terminal deoxynucleotidyl transferase
MHHHHHHGGSGHPPSNTPELEVPSVIARKVSQYSCQRKTTLNNYNKKFTDAFEIMAENYEFKENEIFCLEFLRAASLLKYLPFPVTRMKDIQGLPCIGDQVRDVIEEIIEEGESSRVKEVLNDERYKAFKQFTSVFGVGVKTSEKWFRMGLRTVEELKADKSLKLSKMQQAGFLYYEDLVSCVSKAEADAVTLIVKNTVSTFLPDALVTITGGFRRGKKMGHDIDFLITNPGPKEDDELLHKVVDLLKKQGLLLYCDIIESTFVEEQLPSRKIDAMDNFQKCFAILKLYQPGVDNSSYNTSKKSDMAEVKDWKAIRVDLVITPFEQYAYALLGWTGSREFGRDLRRYASHERKMILDNHGLYDRKKRIFLKAGSEEEIFAHLGLDYVEPWERNA

SEQ ID NO: 107 - DNA, 1182 bp, synthetic construct
  misc_feature 1..1182: note = Variant of terminal deoxynucleotidyl transferase
  source 1..1182: mol_type = other DNA
atgcaccatcatcatcatcatggcggtagcggccatccgccgagcaataccccggagctggaagtgccgagcgttatcgcccgcaaggttagtcagtacagctgccagcgcaagaccacgctgaataactacaacaaaaagtttaccgacgcgttcgagatcatggccgagaactacgaatttaaagagaacgaaatcttctgtctggaatttctgcgcgccgcgagtctgctgaaatatctgccgttcccggttacccgcatgaaagacatccaaggtctgccgtgcattggcgaccaagttcgtgacgtgatcgaggagatcatcgaagaaggcgagagcagccgtgttaaagaagttctcaatgacgagcgctacaaggcctttaagcagttcaccagcgtgttcggtgtgggcgtgaaaaccagcgaaaagtggtttcgtatgggcctccgtacggttgaagagctgaaggccagtaagagtctgaagctgagcaagatgcagaaggcgggctttctgtattacgaggatctggtgagctgcgttagtaaagcggaagccgatgccgttacgctcatcgtgaagaacacggtgagtacctttctgccggatgcgctggtgaccatcacgggcggtttccgccgtggcaaaaagatgggccacgacatcgactttctgatcacgaatccgggcccgaaagaggatgacgaactgctccacaaagtggttgatctgctcaagaagcaaggtctgctgctgtactgcgacatcatcgagagcacgttcgtggaggaacaactgccaagtcgcaaaatcgacgccatggacaacttccagaagtgcttcgccattctcaagctgtaccagccgggcgtggataacagcagctataacacgagtaagaagagtgacatggccgaggttaaggattggaaagcgatccgtgtggatctggtgatcacgccattcgagcagtacgcctatgcgctgctcggttggacgggcagccgcgaatttggtcgcgatctgcgccgctatgcgagtcatgagcgcaagatgatcctcgacaaccatggcctctacgaccgcaaaaagcgcatctttctgaaagcgggcagcgaagaagagattttcgcgcatctgggtctggattatgtggagccgtgggaacgcaacgcg

SEQ ID NO: 108 - protein, 394 aa, synthetic construct
  REGION 1..394: note = Variant of terminal deoxynucleotidyl transferase
MHHHHHHGGSGHPPSNTPELEVPSVIARKVSQYSCQRKTTLNNYNKKFTDAFEIMAENYEFKENEIFCLEFLRAASLLKYLPFPVTRMKDIQGLPCIGDQVRDVIEEIIEEGESSRVKEVLNDERYKAFKQFTSVFGVGVKTSEKWFRMGLRTVEELKASKSLKLSKMQKAGFLYYEDLVSCVSKAEADAVTLIVKNTVSTFLPDALVTITGGFRRGKKMGHDIDFLITNPGPKEDDELLHKVVDLLKKQGLLLYCDIIESTFVEEQLPSRKIDAMDNFQKCFAILKLYQPGVDNSSYNTSKKSDMAEVKDWKAIRVDLVITPFEQYAYALLGWTGSREFGRDLRRYASHERKMILDNHGLYDRKKRIFLKAGSEEEIFAHLGLDYVEPWERNA

SEQ ID NO: 109 - DNA, 1182 bp, synthetic construct
  misc_feature 1..1182: note = Variant of terminal deoxynucleotidyl transferase
  source 1..1182: mol_type = other DNA
atgcaccatcatcatcatcatggcggtagcggccatccgccgagcaataccccggagctggaagtgccgagcgttatcgcccgcaaggttagtcagtacagctgccagcgcaagaccacgctgaataactacaacaaaaagtttaccgacgcgttcgagatcatggccgagaactacgaatttaaagagaacgaagagttctgtctggaatttctgcgcgccgcgagtctgctgaaatatctgccgttcccggttacccgcatgaaagacatccaaggtctgccgtgcattggcgaccaagttcgtgacgtgatcgaggagatcatcgaagaaggcgagagcagccgtgttaaagaagttctcaatgacgagcgctacaaggcctttaagcagttcaccagcgtgttcggtgtgggcgtgaaaaccagcgaaaagtggtttcgtatgggcctccgtacggttgaagagctgaaggccgacaagagtctgaagctgagcaagatgcagaaggcgggctttctgtattacgaggatctggtgagctgcgttagtaaagcggaagccgatgccgttacgctcatcgtgaagaacacggtgagtacctttctgccggatgcgctggtgaccatcacgggcggtttccgccgtggcaaaaagatgggccacgacatcgactttctgatcacgaatccgggcccgaaagaggatgacgaactgctccacaaagtggttgatctgctcaagaagcaaggtctgctgctgtactgcgacatcatcgagagcacgttcgtggaggaacaactgccaagtcgcaaaatcgacgccatggacaacttccagaagtgcttcgccattctcaagctgtaccagccgggcgtggataacagcagctataacacgagtaagaagagtgacatggccgaggttaaggattggaaagcgatccgtgtggatctggtgatcacgccattcgagcagtacgcctatgcgctgctcggttggacgggcagccgcgaatttggtcgcgatctgcgccgctatgcgagtcatgagcgcaagatgatcctcgacaaccatggcctctacgaccgcaaaaagcgcatctttctgaaagcgggcagcgaagaagagattttcgcgcatctgggtctggattatgtggagccgtgggaacgcaacgcg

SEQ ID NO: 110 - protein, 394 aa, synthetic construct
  REGION 1..394: note = Variant of terminal deoxynucleotidyl transferase
MHHHHHHGGSGHPPSNTPELEVPSVIARKVSQYSCQRKTTLNNYNKKFTDAFEIMAENYEFKENEEFCLEFLRAASLLKYLPFPVTRMKDIQGLPCIGDQVRDVIEEIIEEGESSRVKEVLNDERYKAFKQFTSVFGVGVKTSEKWFRMGLRTVEELKADKSLKLSKMQKAGFLYYEDLVSCVSKAEADAVTLIVKNTVSTFLPDALVTITGGFRRGKKMGHDIDFLITNPGPKEDDELLHKVVDLLKKQGLLLYCDIIESTFVEEQLPSRKIDAMDNFQKCFAILKLYQPGVDNSSYNTSKKSDMAEVKDWKAIRVDLVITPFEQYAYALLGWTGSREFGRDLRRYASHERKMILDNHGLYDRKKRIFLKAGSEEEIFAHLGLDYVEPWERNA

SEQ ID NO: 111 - DNA, 1182 bp, synthetic construct
  misc_feature 1..1182: note = Variant of terminal deoxynucleotidyl transferase
  source 1..1182: mol_type = other DNA
atgcaccatcatcatcatcatggcggtagcggccatccgccgagcaataccccggagctggaagtgccgagcgttatcgcccgcaaggttagtcagtacagctgccagcgcaagaccacgctgaataactacaacaaaaagtttaccgacgcgttcgagatcatggccgagaactacgaatttaaagagaacgaaatcttctgtctggaatttctgcgcgccgcgagtctgctgaaatatctgccgttcccggttacccgcatgaaagacatccaaggtctgccgtgcattggcgaccaagttcgtgacgtgatcgaggagatcatcgaagaaggcgagagcagccgtgttaaagaagttctcaatgacgagcgctacaaggcctttaagcagttcaccagcgtgttcggtgtgggcgtgaaaaccagcgaaaagtggtttcgtatgggcctccgtacggttgaagagctgaaggccgacaagagtctgaagctgagcaagatgcagaaggcgggctttctgtattacgaggatctggtgagctgcgttagtaaagcggaagccgatgccgttacgctcatcgtgaagaacacggtgagtacctttctgccggatgcgctggtgaccatcacgggcggtttccgccgtggcaaaaagatgggccacgacatcgactttctgatcacgaatccgggcccgaaagatgatgacgaactgctccacaaagtggttgatctgctcaagaagcaaggtctgctgctgtactgcgacatcatcgagagcacgttcgtggaggaacaactgccaagtcgcaaaatcgacgccatggacaacttccagaagtgcttcgccattctcaagctgtaccagccgggcgtggataacagcagctataacacgagtaagaagagtgacatggccgaggttaaggattggaaagcgatccgtgtggatctggtgatcacgccattcgagcagtacgcctatgcgctgctcggttggacgggcagccgcgaatttggtcgcgatctgcgccgctatgcgagtcatgagcgcaagatgatcctcgacaaccatggcctctacgaccgcaaaaagcgcatctttctgaaagcgggcagcgaagaagagattttcgcgcatctgggtctggattatgtggagccgtgggaacgcaacgcg

SEQ ID NO: 112 - protein, 394 aa, synthetic construct
  REGION 1..394: note = Variant of terminal deoxynucleotidyl transferase
MHHHHHHGGSGHPPSNTPELEVPSVIARKVSQYSCQRKTTLNNYNKKFTDAFEIMAENYEFKENEIFCLEFLRAASLLKYLPFPVTRMKDIQGLPCIGDQVRDVIEEIIEEGESSRVKEVLNDERYKAFKQFTSVFGVGVKTSEKWFRMGLRTVEELKADKSLKLSKMQKAGFLYYEDLVSCVSKAEADAVTLIVKNTVSTFLPDALVTITGGFRRGKKMGHDIDFLITNPGPKDDDELLHKVVDLLKKQGLLLYCDIIESTFVEEQLPSRKIDAMDNFQKCFAILKLYQPGVDNSSYNTSKKSDMAEVKDWKAIRVDLVITPFEQYAYALLGWTGSREFGRDLRRYASHERKMILDNHGLYDRKKRIFLKAGSEEEIFAHLGLDYVEPWERNA

SEQ ID NO: 113 - DNA, 1182 bp, synthetic construct
  misc_feature 1..1182: note = Variant of terminal deoxynucleotidyl transferase
  source 1..1182: mol_type = other DNA
atgcaccatcatcatcatcatggcggtagcggccatccgccgagcaataccccggagctggaagtgccgagcgttatcgcccgcaaggttagtcagtacagctgccagcgcaagaccacgctgaataactacaacaaaaagtttaccgacgcgttcgagatcatggccgagaactacgaatttaaagagaacgaaatcttctgtctggaatttctgcgcgccgcgagtctgctgaaatatctgccgttcccggttacccgcatgaaagacatccaaggtctgccgtgcattggcgaccaagttcgtgacgtgatcgaggagatcatcgaagaaggcgagagcagccgtgttaaagaagttctcaatgacgagcgctacaaggcctttaagcagttcaccagcgtgttcggtgtgggcgtgaaaaccagcgaaaagtggtttcgtatgggcctccgtacggttgaagagctgaaggccgacaagagtctgaagctgagcaagatgcagaaggcgggctttctgtattacgaggatctggtgagctgcgttagtaaagcggaagccgatgccgttacgctcatcgtgaagaacacggtgagtacctttctgccggatgcgctggtgaccatcacgggcggtttccgccgtggcaaaaagatgggccacgacatcgactttctgatcacgaatccgggcccgaaagaggatgacgaactgctccacaaagtggttgatctgctcaagacgcaaggtctgctgctgtactgcgacatcatcgagagcacgttcgtggaggaacaactgccaagtcgcaaaatcgacgccatggacaacttccagaagtgcttcgccattctcaagctgtaccagccgggcgtggataacagcagctataacacgagtaagaagagtgacatggccgaggttaaggattggaaagcgatccgtgtggatctggtgatcacgccattcgagcagtacgcctatgcgctgctcggttggacgggcagccgcgaatttggtcgcgatctgcgccgctatgcgagtcatgagcgcaagatgatcctcgacaaccatggcctctacgaccgcaaaaagcgcatctttctgaaagcgggcagcgaagaagagattttcgcgcatctgggtctggattatgtggagccgtgggaacgcaacgcg

SEQ ID NO: 114 - protein, 394 aa, synthetic construct
  REGION 1..394: note = Variant of terminal deoxynucleotidyl transferase
MHHHHHHGGSGHPPSNTPELEVPSVIARKVSQYSCQRKTTLNNYNKKFTDAFEIMAENYEFKENEIFCLEFLRAASLLKYLPFPVTRMKDIQGLPCIGDQVRDVIEEIIEEGESSRVKEVLNDERYKAFKQFTSVFGVGVKTSEKWFRMGLRTVEELKADKSLKLSKMQKAGFLYYEDLVSCVSKAEADAVTLIVKNTVSTFLPDALVTITGGFRRGKKMGHDIDFLITNPGPKEDDELLHKVVDLLKTQGLLLYCDIIESTFVEEQLPSRKIDAMDNFQKCFAILKLYQPGVDNSSYNTSKKSDMAEVKDWKAIRVDLVITPFEQYAYALLGWTGSREFGRDLRRYASHERKMILDNHGLYDRKKRIFLKAGSEEEIFAHLGLDYVEPWERNA

SEQ ID NO: 115 - DNA, 1182 bp, synthetic construct
  misc_feature 1..1182: note = Variant of terminal deoxynucleotidyl transferase
  source 1..1182: mol_type = other DNA
atgcaccatcatcatcatcatggcggtagcggccatccgccgagcaataccccggagctggaagtgccgagcgttatcgcccgcaaggttagtcagtacagctgccagcgcaagaccacgctgaataactacaacaaaaagtttaccgacgcgttcgagatcatggccgagaactacgaatttaaagagaacgaaatcttctgtctggaatttctgcgcgccgcgagtctgctgaaatatctgccgttcccggttacccgcatgaaagacatccaaggtctgccgtgcattggcgaccaagttcgtgacgtgatcgaggagatcatcgaagaaggcgagagcaggcgtgttaaagaagttctcaatgacgagcgctacaaggcctttaagcagttcaccagcgtgttcggtgtgggcgtgaaaaccagcgaaaagtggtttcgtatgggcctccgtacggttgaagagctgaaggccgacaagagtctgaagctgagcaagatgcagaaggcgggctttctgtattacgaggatctggtgagctgcgttagtaaagcggaagccgatgccgttacgctcatcgtgaagaacacggtgagtacctttctgccggatgcgctggtgaccatcacgggcggtttccgccgtggcaaaaagatgggccacgacatcgactttctgatcacgaatccgggcccgaaagaggatgacgaactgctccacaaagtggttgatctgctcaagaagcaaggtctgctgctgtactgcgacatcatcgagagcacgttcgtggaggaacaactgccaagtcgcaaaatcgacgccatggacaacttccagaagtgcttcgccattctcaagctgtaccagccgggcgtggataacagcagctataacacgagtaagaagagtgacatggccgaggttaaggattggaaagcgatccgtgtggatctggtgatcacgccattcgagcagtacgcctatgcgctgctcggttggacgggcagccgcgaatttggtcgcgatctgcgccgctatgcgagtcatgagcgcaagatgatcctcgacaaccatggcctctacgaccgcaaaaagcgcatctttctgaaagcgggcagcgaagaagagattttcgcgcatctgggtctggattatgtggagccgtgggaacgcaacgcg

SEQ ID NO: 116 - protein, 394 aa, synthetic construct
  REGION 1..394: note = Variant of terminal deoxynucleotidyl transferase
MHHHHHHGGSGHPPSNTPELEVPSVIARKVSQYSCQRKTTLNNYNKKFTDAFEIMAENYEFKENEIFCLEFLRAASLLKYLPFPVTRMKDIQGLPCIGDQVRDVIEEIIEEGESRRVKEVLNDERYKAFKQFTSVFGVGVKTSEKWFRMGLRTVEELKADKSLKLSKMQKAGFLYYEDLVSCVSKAEADAVTLIVKNTVSTFLPDALVTITGGFRRGKKMGHDIDFLITNPGPKEDDELLHKVVDLLKKQGLLLYCDIIESTFVEEQLPSRKIDAMDNFQKCFAILKLYQPGVDNSSYNTSKKSDMAEVKDWKAIRVDLVITPFEQYAYALLGWTGSREFGRDLRRYASHERKMILDNHGLYDRKKRIFLKAGSEEEIFAHLGLDYVEPWERNA

SEQ ID NO: 117 - DNA, 1182 bp, synthetic construct
  misc_feature 1..1182: note = Variant of terminal deoxynucleotidyl transferase
  source 1..1182: mol_type = other DNA
atgcaccatcatcatcatcatggcggtagcggccatccgccgagcaataccccggagctggaagtgccgagcgttatcgcccgcaaggttagtcagtacagctgccagcgcaagaccacgctgaataactacaacaaaaagtttaccgacgcgttcgagatcatggccgagaactacgaatttaaagagaacgaagctttctgtctggaatttctgcgcgccgcgagtctgctgaaatatctgccgttcccggttacccgcatgaaagacatccaaggtctgccgtgcattggcgaccaagttcgtgacgtgatcgaggagatcatcgaagaaggcgagagcagccgtgttaaagaagttctcaatgacgagcgctacaaggcctttaagcagttcaccagcgtgttcggtgtgggcgtgaaaaccagcgaaaagtggtttcgtatgggcctccgtacggttgaagagctgaaggccgacaagagtctgaagctgagcaagatgcagaaggcgggctttctgtattacgaggatctggtgagctgcgttagtaaagcggaagccgatgccgttacgctcatcgtgaagaacacggtgagtacctttctgccggatgcgctggtgaccatcacgggcggtttccgccgtggcaaaaagatgggccacgacatcgactttctgatcacgaatccgggcccgaaagaggatgacgaactgctccacaaagtggttgatctgctcaagaagcaaggtctgctgctgtactgcgacatcatcgagagcacgttcgtggaggaacaactgccaagtcgcaaaatcgacgccatggacaacttccagaagtgcttcgccattctcaagctgtaccagccgggcgtggataacagcagctataacacgagtaagaagagtgacatggccgaggttaaggattggaaagcgatccgtgtggatctggtgatcacgccattcgagcagtacgcctatgcgctgctcggttggacgggcagccgcgaatttggtcgcgatctgcgccgctatgcgagtcatgagcgcaagatgatcctcgacaaccatggcctctacgaccgcaaaaagcgcatctttctgaaagcgggcagcgaagaagagattttcgcgcatctgggtctggattatgtggagccgtgggaacgcaacgcg

SEQ ID NO: 118 - protein, 394 aa, synthetic construct
  REGION 1..394: note = Variant of terminal deoxynucleotidyl transferase
MHHHHHHGGSGHPPSNTPELEVPSVIARKVSQYSCQRKTTLNNYNKKFTDAFEIMAENYEFKENEAFCLEFLRAASLLKYLPFPVTRMKDIQGLPCIGDQVRDVIEEIIEEGESSRVKEVLNDERYKAFKQFTSVFGVGVKTSEKWFRMGLRTVEELKADKSLKLSKMQKAGFLYYEDLVSCVSKAEADAVTLIVKNTVSTFLPDALVTITGGFRRGKKMGHDIDFLITNPGPKEDDELLHKVVDLLKKQGLLLYCDIIESTFVEEQLPSRKIDAMDNFQKCFAILKLYQPGVDNSSYNTSKKSDMAEVKDWKAIRVDLVITPFEQYAYALLGWTGSREFGRDLRRYASHERKMILDNHGLYDRKKRIFLKAGSEEEIFAHLGLDYVEPWERNA

SEQ ID NO: 119 - DNA, 1182 bp, synthetic construct
  misc_feature 1..1182: note = Variant of terminal deoxynucleotidyl transferase
  source 1..1182: mol_type = other DNA
atgcaccatcatcatcatcatggcggtagcggccatccgccgagcaataccccggagctggaagtgccgagcgttatcgcccgcaaggttagtcagtacagctgccagcgcaagaccacgctgaataactacaacaaaaagtttaccgacgcgttcgagatcatggccgagaactacgaatttaaagagaacgaaatcttctgtctggaatttctgcgcgccgcgagtctgctgaaatatctgccgttcccggttacccgcatgaaagacatccaaggtctgccgtgcattggcgaccaagttcgtcgtgtgatcgaggagatcatcgaagaaggcgagagcagccgtgttaaagaagttctcaatgacgagcgctacaaggcctttaagcagttcaccagcgtgttcggtgtgggcgtgaaaaccagcgaaaagtggtttcgtatgggcctccgtacggttgaagagctgaaggccgacaagagtctgaagctgagcaagatgcagaaggcgggctttctgtattacgaggatctggtgagctgcgttagtaaagcggaagccgatgccgttacgctcatcgtgaagaacacggtgagtacctttctgccggatgcgctggtgaccatcacgggcggtttccgccgtggcaaaaagatgggccacgacatcgactttctgatcacgaatccgggcccgaaagaggatgacgaactgctccacaaagtggttgatctgctcaagaagcaaggtctgctgctgtactgcgacatcatcgagagcacgttcgtggaggaacaactgccaagtcgcaaaatcgacgccatggacaacttccagaagtgcttcgccattctcaagctgtaccagccgggcgtggataacagcagctataacacgagtaagaagagtgacatggccgaggttaaggattggaaagcgatccgtgtggatctggtgatcacgccattcgagcagtacgcctatgcgctgctcggttggacgggcagccgcgaatttggtcgcgatctgcgccgctatgcgagtcatgagcgcaagatgatcctcgacaaccatggcctctacgaccgcaaaaagcgcatctttctgaaagcgggcagcgaagaagagattttcgcgcatctgggtctggattatgtggagccgtgggaacgcaacgcg

SEQ ID NO: 120 - protein, 394 aa, synthetic construct
  REGION 1..394: note = Variant of terminal deoxynucleotidyl transferase
MHHHHHHGGSGHPPSNTPELEVPSVIARKVSQYSCQRKTTLNNYNKKFTDAFEIMAENYEFKENEIFCLEFLRAASLLKYLPFPVTRMKDIQGLPCIGDQVRRVIEEIIEEGESSRVKEVLNDERYKAFKQFTSVFGVGVKTSEKWFRMGLRTVEELKADKSLKLSKMQKAGFLYYEDLVSCVSKAEADAVTLIVKNTVSTFLPDALVTITGGFRRGKKMGHDIDFLITNPGPKEDDELLHKVVDLLKKQGLLLYCDIIESTFVEEQLPSRKIDAMDNFQKCFAILKLYQPGVDNSSYNTSKKSDMAEVKDWKAIRVDLVITPFEQYAYALLGWTGSREFGRDLRRYASHERKMILDNHGLYDRKKRIFLKAGSEEEIFAHLGLDYVEPWERNA

SEQ ID NO: 121 - DNA, 1182 bp, synthetic construct
  misc_feature 1..1182: note = Variant of terminal deoxynucleotidyl transferase
  source 1..1182: mol_type = other DNA
atgcaccatcatcatcatcatggcggtagcggccatccgccgagcaataccccggagctggaagtgccgagcgttatcgcccgcaaggttagtcagtacagctgccagcgcaagaccacgctgaataactacaacaaaaagtttaccgacgcgttcgagatcatggccgagaactacgaatttaaagagaacgaaatcttctgtctggaatttctgcgcgccgcgagtctgctgaaatatctgccgttcccggttacccgcatgaaagacatccaaggtctgccgtgcattggcgaccaagttcgtgacgtgatcgaggagatcatcgaagaaggcgagagcagccgtgttaaagaagttctcaatgacgagcgctacaaggcctttaagcagttcaccagcgtgttcggtgtgggcgtgaaaaccagcgaaaagtggtttcgtatgggcctccgtacggttgaagagctgaaggccgacaagagtctgaagctgagcaagatgcagaaggcgggctttctgtattacgaggatctggtgagctgcgttagtaaagcggaagccgatgccgttacgctcatcgtgaagaacacggtgagtacctttctgccggatgcgctggtgaccatcacgggcggtttccgccgtggcaaaaagatgggccacgacatcgactttctgatcacgaatccgggcccgaaaagtgatgacgaactgctccacaaagtggttgatctgctcaagaagcaaggtctgctgctgtactgcgacatcatcgagagcacgttcgtggaggaacaactgccaagtcgcaaaatcgacgccatggacaacttccagaagtgcttcgccattctcaagctgtaccagccgggcgtggataacagcagctataacacgagtaagaagagtgacatggccgaggttaaggattggaaagcgatccgtgtggatctggtgatcacgccattcgagcagtacgcctatgcgctgctcggttggacgggcagccgcgaatttggtcgcgatctgcgccgctatgcgagtcatgagcgcaagatgatcctcgacaaccatggcctctacgaccgcaaaaagcgcatctttctgaaagcgggcagcgaagaagagattttcgcgcatctgggtctggattatgtggagccgtgggaacgcaacgcg

SEQ ID NO: 122 - protein, 394 aa, synthetic construct
  REGION 1..394: note = Variant of terminal deoxynucleotidyl transferase
MHHHHHHGGSGHPPSNTPELEVPSVIARKVSQYSCQRKTTLNNYNKKFTDAFEIMAENYEFKENEIFCLEFLRAASLLKYLPFPVTRMKDIQGLPCIGDQVRDVIEEIIEEGESSRVKEVLNDERYKAFKQFTSVFGVGVKTSEKWFRMGLRTVEELKADKSLKLSKMQKAGFLYYEDLVSCVSKAEADAVTLIVKNTVSTFLPDALVTITGGFRRGKKMGHDIDFLITNPGPKSDDELLHKVVDLLKKQGLLLYCDIIESTFVEEQLPSRKIDAMDNFQKCFAILKLYQPGVDNSSYNTSKKSDMAEVKDWKAIRVDLVITPFEQYAYALLGWTGSREFGRDLRRYASHERKMILDNHGLYDRKKRIFLKAGSEEEIFAHLGLDYVEPWERNA

SEQ ID NO: 123 - DNA, 1182 bp, synthetic construct
  misc_feature 1..1182: note = Variant of terminal deoxynucleotidyl transferase
  source 1..1182: mol_type = other DNA
atgcaccatcatcatcatcatggcggtagcggccatccggggagcaataccccggagctggaagtgccgagcgttatcgcccgcaaggttagtcagtacagctgccagcgcaagaccacgctgaataactacaacaaaaagtttaccgacgcgttcgagatcatggccgagaactacgaatttaaagagaacgaaatcttctgtctggaatttctgcgcgccgcgagtctgctgaaatatctgccgttcccggttacccgcatgaaagacatccaaggtctgccgtgcattggcgaccaagttcgtgacgtgatcgaggagatcatcgaagaaggcgagagcagccgtgttaaagaagttctcaatgacgagcgctacaaggcctttaagcagttcaccagcgtgttcggtgtgggcgtgaaaaccagcgaaaagtggtttcgtatgggcctccgtacggttgaagagctgaaggccgacaagagtctgaagctgagcaagatgcagaaggcgggctttctgtattacgaggatctggtgagctgcgttagtaaagcggaagccgatgccgttacgctcatcgtgaagaacacggtgagtacctttctgccggatgcgctggtgaccatcacgggcggtttccgccgtggcaaaaagatgggccacgacatcgactttctgatcacgaatccgggcccgaaagaggatgacgaactgctccacaaagtggttgatctgctcaagaagcaaggtctgctgctgtactgcgacatcatcgagagcacgttcgtggaggaacaactgccaagtcgcaaaatcgacgccatggacaacttccagaagtgcttcgccattctcaagctgtaccagccgggcgtggataacagcagctataacacgagtaagaagagtgacatggccgaggttaaggattggaaagcgatccgtgtggatctggtgatcacgccattcgagcagtacgcctatgcgctgctcggttggacgggcagccgcgaatttggtcgcgatctgcgccgctatgcgagtcatgagcgcaagatgatcctcgacaaccatggcctctacgaccgcaaaaagcgcatctttctgaaagcgggcagcgaagaagagattttcgcgcatctgggtctggattatgtggagccgtgggaacgcaacgcg

SEQ ID NO: 124 - protein, 394 aa, synthetic construct
  REGION 1..394: note = Variant of terminal deoxynucleotidyl transferase
MHHHHHHGGSGHPGSNTPELEVPSVIARKVSQYSCQRKTTLNNYNKKFTDAFEIMAENYEFKENEIFCLEFLRAASLLKYLPFPVTRMKDIQGLPCIGDQVRDVIEEIIEEGESSRVKEVLNDERYKAFKQFTSVFGVGVKTSEKWFRMGLRTVEELKADKSLKLSKMQKAGFLYYEDLVSCVSKAEADAVTLIVKNTVSTFLPDALVTITGGFRRGKKMGHDIDFLITNPGPKEDDELLHKVVDLLKKQGLLLYCDIIESTFVEEQLPSRKIDAMDNFQKCFAILKLYQPGVDNSSYNTSKKSDMAEVKDWKAIRVDLVITPFEQYAYALLGWTGSREFGRDLRRYASHERKMILDNHGLYDRKKRIFLKAGSEEEIFAHLGLDYVEPWERNA

SEQ ID NO: 125 - DNA, 1182 bp, synthetic construct
  misc_feature 1..1182: note = Variant of terminal deoxynucleotidyl transferase
  source 1..1182: mol_type = other DNA
atgcaccatcatcatcatcatggcggtagcggccatccgccgagcaataccccggagctggaagtgccgagcgttatcgcccgcaaggttagtcagtacagctgccagcgcaagaccacgctgaataactacaacaaaaagtttaccgacgcgttcgagatcatggccgagaactacgaatttaaagagaacgaaatcttctgtctggaatttctgcgcgccgcgagtctgctgaaatatctgccgttcccggttacccgcatgaaagacatccaaggtctgccgtgcattggcgaccaagttcgtgacgtgatcgaggagatcatcgaagaaggcgagagcagccgtgttaaagaagttctcaatgacgagcgctacaaggcctttaagcagttcaccagcgtgttcggtgtgggcgtgaaaaccagcgaaaagtggtttcgtatgggcctccgtacggttgaagagctgaagttggacaagagtctgaagctgagcaagatgcagaaggcgggctttctgtattacgaggatctggtgagctgcgttagtaaagcggaagccgatgccgttacgctcatcgtgaagaacacggtgagtacctttctgccggatgcgctggtgaccatcacgggcggtttccgccgtggcaaaaagatgggccacgacatcgactttctgatcacgaatccgggcccgaaagaggatgacgaactgctccacaaagtggttgatctgctcaagaagcaaggtctgctgctgtactgcgacatcatcgagagcacgttcgtggaggaacaactgccaagtcgcaaaatcgacgccatggacaacttccagaagtgcttcgccattctcaagctgtaccagccgggcgtggataacagcagctataacacgagtaagaagagtgacatggccgaggttaaggattggaaagcgatccgtgtggatctggtgatcacgccattcgagcagtacgcctatgcgctgctcggttggacgggcagccgcgaatttggtcgcgatctgcgccgctatgcgagtcatgagcgcaagatgatcctcgacaaccatggcctctacgaccgcaaaaagcgcatctttctgaaagcgggcagcgaagaagagattttcgcgcatctgggtctggattatgtggagccgtgggaacgcaacgcg

SEQ ID NO: 126 - protein, 394 aa, synthetic construct
  REGION 1..394: note = Variant of terminal deoxynucleotidyl transferase
MHHHHHHGGSGHPPSNTPELEVPSVIARKVSQYSCQRKTTLNNYNKKFTDAFEIMAENYEFKENEIFCLEFLRAASLLKYLPFPVTRMKDIQGLPCIGDQVRDVIEEIIEEGESSRVKEVLNDERYKAFKQFTSVFGVGVKTSEKWFRMGLRTVEELKLDKSLKLSKMQKAGFLYYEDLVSCVSKAEADAVTLIVKNTVSTFLPDALVTITGGFRRGKKMGHDIDFLITNPGPKEDDELLHKVVDLLKKQGLLLYCDIIESTFVEEQLPSRKIDAMDNFQKCFAILKLYQPGVDNSSYNTSKKSDMAEVKDWKAIRVDLVITPFEQYAYALLGWTGSREFGRDLRRYASHERKMILDNHGLYDRKKRIFLKAGSEEEIFAHLGLDYVEPWERNA

SEQ ID NO: 127 - DNA, 1182 bp, synthetic construct
  misc_feature 1..1182: note = Variant of terminal deoxynucleotidyl transferase
  source 1..1182: mol_type = other DNA
atgcaccatcatcatcatcatggcggtagcggccatccgccgagcaataccccggagctggaagtgccgagcgttatcgcccgcaaggttagtcagtacagctgccagcgcaagaccacgctgaataactacaacaaaaagtttaccgacgcgttcgagatcatggccgagaactacgaatttaaagagaacgaaatcttctgtctggaatttctgcgcgccgcgagtctgctgaaatatctgccgttcccggttacccgcatgaaagacatccaaggtctgccgtgcattggcgaccaagttcgtgacgtgatcgaggagatcatcgaagaaggcgagagcagccgtgttaaagaagttctcaatgacgagcgctacaaggcctttaagcagttcaccagcgtgttcggtgtgggcgtgaaaaccagcgaaaagtggtttcgtatgggcctccgtacggttgaagagctgaaggccgacaagagtctgaagctgagcaagatgcagaaggcgggctttctgtattacgaggatctggtgagctgcgttagtaaagcggaagccgatgccgttacgctcatcgtgaagaacacggtgaggacctttctgccggatgcgctggtgaccatcacgggcggtttccgccgtggcaaaaagatgggccacgacatcgactttctgatcacgaatccgggcccgaaagaggatgacgaactgctccacaaagtggttgatctgctcaagaagcaaggtctgctgctgtactgcgacatcatcgagagcacgttcgtggaggaacaactgccaagtcgcaaaatcgacgccatggacaacttccagaagtgcttcgccattctcaagctgtaccagccgggcgtggataacagcagctataacacgagtaagaagagtgacatggccgaggttaaggattggaaagcgatccgtgtggatctggtgatcacgccattcgagcagtacgcctatgcgctgctcggttggacgggcagccgcgaatttggtcgcgatctgcgccgctatgcgagtcatgagcgcaagatgatcctcgacaaccatggcctctacgaccgcaaaaagcgcatctttctgaaagcgggcagcgaagaagagattttcgcgcatctgggtctggattatgtggagccgtgggaacgcaacgcg

SEQ ID NO: 128 - protein, 394 aa, synthetic construct
  REGION 1..394: note = Variant of terminal deoxynucleotidyl transferase
MHHHHHHGGSGHPPSNTPELEVPSVIARKVSQYSCQRKTTLNNYNKKFTDAFEIMAENYEFKENEIFCLEFLRAASLLKYLPFPVTRMKDIQGLPCIGDQVRDVIEEIIEEGESSRVKEVLNDERYKAFKQFTSVFGVGVKTSEKWFRMGLRTVEELKADKSLKLSKMQKAGFLYYEDLVSCVSKAEADAVTLIVKNTVRTFLPDALVTITGGFRRGKKMGHDIDFLITNPGPKEDDELLHKVVDLLKKQGLLLYCDIIESTFVEEQLPSRKIDAMDNFQKCFAILKLYQPGVDNSSYNTSKKSDMAEVKDWKAIRVDLVITPFEQYAYALLGWTGSREFGRDLRRYASHERKMILDNHGLYDRKKRIFLKAGSEEEIFAHLGLDYVEPWERNA

SEQ ID NO: 129 - DNA, 1182 bp, synthetic construct
  misc_feature 1..1182: note = Variant of terminal deoxynucleotidyl transferase
  source 1..1182: mol_type = other DNA
atgcaccatcatcatcatcatggcggtagcggccatccgccgagcaataccccggagctggaagtgccgagcgttatcgcccgcaaggttagtcagtacagctgccagcgcaagaccacgctgaataactacaacaaaaagtttaccgacgcgttcgagatcatggccgagaactacgaatttaaagagaacgaaatcttctgtctggaatttctgcgcgccgcgagtctgctgaaatatctgccgttcccggttacccgcatgaaagacatccaaggtctgccgtgcattggcgaccaagttcgtgacgtgatcgaggagatcatcgaagaaggcgagagcagccgtgttaaagaagttctcaatgacgagcgctacaaggcctttaagcagttcaccagcgtgttcggtgtgggcgtgaaaaccagcgaaaagtggtttcgtatgggcctccgtacggttgaagagctgaaggccgacaagagtctgaagctgagcaagatgcagaaggcgggctttctgtattacgaggatctggtgagctgcgttagtaaagcggaagccgatgccgttacgctcatcgtgaagaacacggtgagtacctttctgccggatgcgctggtgaccatcacgggcggtttccgccgtggcaaaaagatgggccacgacatcgactttctgatcacgaatccgggcccgaaagaggatgacgaactgctccacaaagtggttgatctgctcaagaagcaaggtctgctgctgtactgcgacatcatcgagagcacgttcgtggaggaacaactgccaagtcgcaaaatcgacgccatggacaacttccagaagtgcttcgccattctcaagctgtaccagccgggcgtggataacagcagctataacacgagtaagaagagtgacatggccgaggttaaggattggaaagcgatccgtgtggatctggtgatcacgccattcgagcagtacgcctatgcgctgctcggttggacgggcagccgcgaatttggtcgcgatctgcgccgctatgcgagtcatgagcgcaagatgatcctcgacaaccatggcctctacgaccgcaaaaagtgtatctttctgaaagcgggcagcgaagaagagattttcgcgcatctgggtctggattatgtggagccgtgggaacgcaacgcg

SEQ ID NO: 130 - protein, 394 aa, synthetic construct
  REGION 1..394: note = Variant of terminal deoxynucleotidyl transferase
MHHHHHHGGSGHPPSNTPELEVPSVIARKVSQYSCQRKTTLNNYNKKFTDAFEIMAENYEFKENEIFCLEFLRAASLLKYLPFPVTRMKDIQGLPCIGDQVRDVIEEIIEEGESSRVKEVLNDERYKAFKQFTSVFGVGVKTSEKWFRMGLRTVEELKADKSLKLSKMQKAGFLYYEDLVSCVSKAEADAVTLIVKNTVSTFLPDALVTITGGFRRGKKMGHDIDFLITNPGPKEDDELLHKVVDLLKKQGLLLYCDIIESTFVEEQLPSRKIDAMDNFQKCFAILKLYQPGVDNSSYNTSKKSDMAEVKDWKAIRVDLVITPFEQYAYALLGWTGSREFGRDLRRYASHERKMILDNHGLYDRKKCIFLKAGSEEEIFAHLGLDYVEPWERNA

SEQ ID NO: 131 - DNA, 1182 bp, synthetic construct
  misc_feature 1..1182: note = Variant of terminal deoxynucleotidyl transferase
  source 1..1182: mol_type = other DNA
atgcaccatcatcatcatcatggcggtagcggccatccgccgagcaataccccggagctggaagtgccgagcgttatcgcccgcaaggttagtcagtacagctgccagcgcaagaccacgctgaataactacaacaaaaagtttaccgacgcgttcgagatcatggccgagaactacgaatttaaagagaacgaaatcttctgtctggaatttctgcgcgccgcgagtctgctgaaatatctgccgttcccggttacccgcatgaaagacatccaaggtctgccgtgcattggcgaccaagttcgtgacgtgatcgaggagatcatcgaagaaggccagagcagccgtgttaaagaagttctcaatgacgagcgctacaaggcctttaagcagttcaccagcgtgttcggtgtgggcgtgaaaaccagcgaaaagtggtttcgtatgggcctccgtacggttgaagagctgaaggccgacaagagtctgaagctgagcaagatgcagaaggcgggctttctgtattacgaggatctggtgagctgcgttagtaaagcggaagccgatgccgttacgctcatcgtgaagaacacggtgagtacctttctgccggatgcgctggtgaccatcacgggcggtttccgccgtggcaaaaagatgggccacgacatcgactttctgatcacgaatccgggcccgaaagaggatgacgaactgctccacaaagtggttgatctgctcaagaagcaaggtctgctgctgtactgcgacatcatcgagagcacgttcgtggaggaacaactgccaagtcgcaaaatcgacgccatggacaacttccagaagtgcttcgccattctcaagctgtaccagccgggcgtggataacagcagctataacacgagtaagaagagtgacatggccgaggttaaggattggaaagcgatccgtgtggatctggtgatcacgccattcgagcagtacgcctatgcgctgctcggttggacgggcagccgcgaatttggtcgcgatctgcgccgctatgcgagtcatgagcgcaagatgatcctcgacaaccatggcctctacgaccgcaaaaagcgcatctttctgaaagcgggcagcgaagaagagattttcgcgcatctgggtctggattatgtggagccgtgggaacgcaacgcg

SEQ ID NO: 132 - protein, 394 aa, synthetic construct
  REGION 1..394: note = Variant of terminal deoxynucleotidyl transferase
MHHHHHHGGSGHPPSNTPELEVPSVIARKVSQYSCQRKTTLNNYNKKFTDAFEIMAENYEFKENEIFCLEFLRAASLLKYLPFPVTRMKDIQGLPCIGDQVRDVIEEIIEEGQSSRVKEVLNDERYKAFKQFTSVFGVGVKTSEKWFRMGLRTVEELKADKSLKLSKMQKAGFLYYEDLVSCVSKAEADAVTLIVKNTVSTFLPDALVTITGGFRRGKKMGHDIDFLITNPGPKEDDELLHKVVDLLKKQGLLLYCDIIESTFVEEQLPSRKIDAMDNFQKCFAILKLYQPGVDNSSYNTSKKSDMAEVKDWKAIRVDLVITPFEQYAYALLGWTGSREFGRDLRRYASHERKMILDNHGLYDRKKRIFLKAGSEEEIFAHLGLDYVEPWERNA

SEQ ID NO: 133 - DNA, 1182 bp, synthetic construct
  misc_feature 1..1182: note = Variant of terminal deoxynucleotidyl transferase
  source 1..1182: mol_type = other DNA
atgcaccatcatcatcatcatggcggtagcggccatccgccgagcaataccccggagctggaagtgccgagcgttatcgcccgcaaggttagtcagtacagctgccagcgcaagaccacgctgaataactacaacaaaaagtttaccgacgcgttcgagatcatggccgagaactacgaatttaaagagaacgaaatcttctgtctggaatttctgcgcgccgcgagtctgctgaaatatctgccgttcccggttacccgcatgaaagacatccaaggtctgccgtgcattggcgaccaagttcgtgacgtgatcgaggagatcatcgaagaaggcgagagcagccgtgttaaagaagttctcaatgacgagcgctacaaggcctttaagcagttcaccagcgtgttcggtgtgggcgtgaaaaccagcgaaaagtggtttcgtatgggcctccgtacggttgaagagctgaaggccgacaagagtctgaagctgagcaagatgcagaaggcgggctttctgtattacgaggatctggtgagctgcgttagtaaagcggaagccgatgccgttacgctcatcgtgaagaacacggtgagtacctttctgccggatgcgctggtgaccatcacgggcggtttccgccgtggcaaacgtatgggccacgacatcgactttctgatcacgaatccgggcccgaaagaggatgacgaactgctccacaaagtggttgatctgctcaagaagcaaggtctgctgctgtactgcgacatcatcgagagcacgttcgtggaggaacaactgccaagtcgcaaaatcgacgccatggacaacttccagaagtgcttcgccattctcaagctgtaccagccgggcgtggataacagcagctataacacgagtaagaagagtgacatggccgaggttaaggattggaaagcgatccgtgtggatctggtgatcacgccattcgagcagtacgcctatgcgctgctcggttggacgggcagccgcgaatttggtcgcgatctgcgccgctatgcgagtcatgagcgcaagatgatcctcgacaaccatggcctctacgaccgcaaaaagcgcatctttctgaaagcgggcagcgaagaagagattttcgcgcatctgggtctggattatgtggagccgtgggaacgcaacgcg

SEQ ID NO: 134 - protein, 394 aa, synthetic construct
  REGION 1..394: note = Variant of terminal deoxynucleotidyl transferase
MHHHHHHGGSGHPPSNTPELEVPSVIARKVSQYSCQRKTTLNNYNKKFTDAFEIMAENYEFKENEIFCLEFLRAASLLKYLPFPVTRMKDIQGLPCIGDQVRDVIEEIIEEGESSRVKEVLNDERYKAFKQFTSVFGVGVKTSEKWFRMGLRTVEELKADKSLKLSKMQKAGFLYYEDLVSCVSKAEADAVTLIVKNTVSTFLPDALVTITGGFRRGKRMGHDIDFLITNPGPKEDDELLHKVVDLLKKQGLLLYCDIIESTFVEEQLPSRKIDAMDNFQKCFAILKLYQPGVDNSSYNTSKKSDMAEVKDWKAIRVDLVITPFEQYAYALLGWTGSREFGRDLRRYASHERKMILDNHGLYDRKKRIFLKAGSEEEIFAHLGLDYVEPWERNA

SEQ ID NO: 135 - DNA, 1182 bp, synthetic construct
  misc_feature 1..1182: note = Variant of terminal deoxynucleotidyl transferase
  source 1..1182: mol_type = other DNA
atgcaccatcatcatcatcatggcggtagcggccatccgccgagcaataccccggagctggaagatccgagcgttatcgcccgcaaggttagtcagtacagctgccagcgcaagaccacgctgaataactacaacaaaaagtttaccgacgcgttcgagatcatggccgagaactacgaatttaaagagaacgaaatcttctgtctggaatttctgcgcgccgcgagtctgctgaaatatctgccgttcccggttacccgcatgaaagacatccaaggtctgccgtgcattggcgaccaagttcgtgacgtgatcgaggagatcatcgaagaaggcgagagcagccgtgttaaagaagttctcaatgacgagcgctacaaggcctttaagcagttcaccagcgtgttcggtgtgggcgtgaaaaccagcgaaaagtggtttcgtatgggcctccgtacggttgaagagctgaaggccgacaagagtctgaagctgagcaagatgcagaaggcgggctttctgtattacgaggatctggtgagctgcgttagtaaagcggaagccgatgccgttacgctcatcgtgaagaacacggtgagtacctttctgccggatgcgctggtgaccatcacgggcggtttccgccgtggcaaaaagatgggccacgacatcgactttctgatcacgaatccgggcccgaaagaggatgacgaactgctccacaaagtggttgatctgctcaagaagcaaggtctgctgctgtactgcgacatcatcgagagcacgttcgtggaggaacaactgccaagtcgcaaaatcgacgccatggacaacttccagaagtgcttcgccattctcaagctgtaccagccgggcgtggataacagcagctataacacgagtaagaagagtgacatggccgaggttaaggattggaaagcgatccgtgtggatctggtgatcacgccattcgagcagtacgcctatgcgctgctcggttggacgggcagccgcgaatttggtcgcgatctgcgccgctatgcgagtcatgagcgcaagatgatcctcgacaaccatggcctctacgaccgcaaaaagcgcatctttctgaaagcgggcagcgaagaagagattttcgcgcatctgggtctggattatgtggagccgtgggaacgcaacgcg

SEQ ID NO: 136 - protein, 394 aa, synthetic construct
  REGION 1..394: note = Variant of terminal deoxynucleotidyl transferase
MHHHHHHGGSGHPPSNTPELEDPSVIARKVSQYSCQRKTTLNNYNKKFTDAFEIMAENYEFKENEIFCLEFLRAASLLKYLPFPVTRMKDIQGLPCIGDQVRDVIEEIIEEGESSRVKEVLNDERYKAFKQFTSVFGVGVKTSEKWFRMGLRTVEELKADKSLKLSKMQKAGFLYYEDLVSCVSKAEADAVTLIVKNTVSTFLPDALVTITGGFRRGKKMGHDIDFLITNPGPKEDDELLHKVVDLLKKQGLLLYCDIIESTFVEEQLPSRKIDAMDNFQKCFAILKLYQPGVDNSSYNTSKKSDMAEVKDWKAIRVDLVITPFEQYAYALLGWTGSREFGRDLRRYASHERKMILDNHGLYDRKKRIFLKAGSEEEIFAHLGLDYVEPWERNA

SEQ ID NO: 137 - DNA, 1182 bp, synthetic construct
  misc_feature 1..1182: note = Variant of terminal deoxynucleotidyl transferase
  source 1..1182: mol_type = other DNA
atgcaccatcatcatcatcatggcggtagcggccatccgccgagcaataccccggagctggaagtgccgagcgttatcgcccgcaaggttagtcagtacagctgccagcgcaagaccacgctgaataactacaacaaaaagtttaccgacgcgttcgagatcatggccgagaactacgaatttaaagagaacgaaatcttctgtctggaatttctgcgcgccgcgagtctgctgaaatatctgccgttcccggttacccgcatgaaagacatccaaggtctgccgtgcattggcgaccaagttcgtgacgtgatcgaggagatcatcgaagaaggcgagagcagccgtgttaaagaagttctcaatgacgagcgctacaaggcctttaagcagttcaccagcgtgttcggtgtgggcgtgaaaaccagcgaaaagtggtttcgtatgggcctccgtacggttgaagagctgaaggccgacaagagtctgaagctgagcaagatgcagaaggcgggctttctgtattacgaggatctggtgagctgcgttagtaaagcggaagccgatgccgttacgctcatcgtgaagaacacggtgagtacctttctgccggatgcgctggtgaccatcacgggcggtttccgccgtggcaaaaagatgggccacgacatcgactttctgatcacgaatccgggcccgaaagaggatgacgaactgctccacaaagtggttgatctgctcaagaagcaaggtctgctgctgtactgcgacatcatcgagagcacgttcgtggaggaacaactgccaagtcgcaaaatcgacgccatggacaacttccagaagtgcttcgccattctcaagctgtaccagccgggcgtggataacagcgcttataacacgagtaagaagagtgacatggccgaggttaaggattggaaagcgatccgtgtggatctggtgatcacgccattcgagcagtacgcctatgcgctgctcggttggacgggcagccgcgaatttggtcgcgatctgcgccgctatgcgagtcatgagcgcaagatgatcctcgacaaccatggcctctacgaccgcaaaaagcgcatctttctgaaagcgggcagcgaagaagagattttcgcgcatctgggtctggattatgtggagccgtgggaacgcaacgcg

SEQ ID NO: 138 - protein, 394 aa, synthetic construct
  REGION 1..394: note = Variant of terminal deoxynucleotidyl transferase
MHHHHHHGGSGHPPSNTPELEVPSVIARKVSQYSCQRKTTLNNYNKKFTDAFEIMAENYEFKENEIFCLEFLRAASLLKYLPFPVTRMKDIQGLPCIGDQVRDVIEEIIEEGESSRVKEVLNDERYKAFKQFTSVFGVGVKTSEKWFRMGLRTVEELKADKSLKLSKMQKAGFLYYEDLVSCVSKAEADAVTLIVKNTVSTFLPDALVTITGGFRRGKKMGHDIDFLITNPGPKEDDELLHKVVDLLKKQGLLLYCDIIESTFVEEQLPSRKIDAMDNFQKCFAILKLYQPGVDNSAYNTSKKSDMAEVKDWKAIRVDLVITPFEQYAYALLGWTGSREFGRDLRRYASHERKMILDNHGLYDRKKRIFLKAGSEEEIFAHLGLDYVEPWERNA

SEQ ID NO: 139 - DNA, 1182 bp, synthetic construct
  misc_feature 1..1182: note = Variant of terminal deoxynucleotidyl transferase
  source 1..1182: mol_type = other DNA
atgcaccatcatcatcatcatggcggtagcggccatccgccgagcaataccccggagctggaagtgccgagcgttatcgcccgcaaggttagtcagtacagctgccagcgcaagaccacgctgaataactacaacaaaaagtttaccgacgcgttcgagatcatggccgagaactacgaatttaaagagaacgaaatcttctgtctggaatttctgcgcgccgcgagtctgctgaaatatctgccgttcccggttacccgcatgaaagacatccaaggtctgccgtgcattggcgaccaagttcgtgacgtgatcgaggagatcatcgaagaaggcgagagcagccgtgttaaagaagttctcaatgacgagcgctacaaggcctttaagcagttcaccagcgtgttcggtgtgggcgtgaaaaccagcgaaaagtggtttcgtatgggcctccgtacggttgaagagctgaaggccgacaagagtctgaagctgagcaagatgcagaaggcgggctttctgtattacgaggatctggtgagctgcgttagtaaagcggaagccgatgccgttacgctcatcgtgaagaacacggtgagtacctttctgccggatgcgctggtgaccatcacgggcggtttccgccgtggcaaaaagatgggccacgacatcgactttctgatcacgaatccgggcccgaaagaggatgacgaactgctccacaaagtggttgatctgctcaagaagcaaggtctgctgctgtactgcgacatcatcgagagcacgttcgtggaggaacaactgccaagtcgcaaaatcgacgccatggacaacttccagaagtgcttcgccattctcaagctgtaccagccgggcgtggataacagcagctataacacgagtaagaagagtgacatggccgaggttaaggattggaaagcgatccgtgtggatctggtgatcacgccattcgagcagtacgcctatgcgctgctcggttggacgggcagccgcgaatttggtcgcgatctgcgccgctatgcgagtgtggagcgcaagatgatcctcgacaaccatggcctctacgaccgcaaaaagcgcatctttctgaaagcgggcagcgaagaagagattttcgcgcatctgggtctggattatgtggagccgtgggaacgcaacgcg

SEQ ID NO: 140 - protein, 394 aa, synthetic construct
  REGION 1..394: note = Variant of terminal deoxynucleotidyl transferase
MHHHHHHGGSGHPPSNTPELEVPSVIARKVSQYSCQRKTTLNNYNKKFTDAFEIMAENYEFKENEIFCLEFLRAASLLKYLPFPVTRMKDIQGLPCIGDQVRDVIEEIIEEGESSRVKEVLNDERYKAFKQFTSVFGVGVKTSEKWFRMGLRTVEELKADKSLKLSKMQKAGFLYYEDLVSCVSKAEADAVTLIVKNTVSTFLPDALVTITGGFRRGKKMGHDIDFLITNPGPKEDDELLHKVVDLLKKQGLLLYCDIIESTFVEEQLPSRKIDAMDNFQKCFAILKLYQPGVDNSSYNTSKKSDMAEVKDWKAIRVDLVITPFEQYAYALLGWTGSREFGRDLRRYASVERKMILDNHGLYDRKKRIFLKAGSEEEIFAHLGLDYVEPWERNA

SEQ ID NO: 141 - DNA, 1182 bp, synthetic construct
  misc_feature 1..1182: note = Variant of terminal deoxynucleotidyl transferase
  source 1..1182: mol_type = other DNA
atgcaccatcatcatcatcatggcggtagcggccatccgccgagcaataccccggagctggaagtgccgagcgttatcgcccgcaaggttagtcagtacagctgccagcgcaagaccacgctgaataactacaacaaaaagtttaccgacgcgttcgagatcatggccgagaactacgaatttaaagagaacgaaatcttctgtctggaatttctgcgcgccgcgagtctgctgaaatatctgccgttcccggttacccgcatgaaagacatccaaggtctgccgtgcattggcgaccaagttcgtgacgtgatcgaggagatcatcgaagaaggcgagagcagccgtgttaaagaagttctcaatgacgagcgctacaaggcctttaagcagttcaccagcgtgttcggtgtgggcgtgaaaaccagcgaaaagtggtttcgtatgggcctccgtacggttgaagagctgaaggccgacaagagtctgaagctgagcaagatgcagaaggcgggctttctgtattacgaggatctggtgagctgcgttagtaaagcggaagccgatgccgttacgctcatcgtgaagaacacggtgagtacctttctgccggatgcgctggtgaccatcacgggcggtttccgccgtggcaaaaagatgggccacgacatcgactttctgatcacgaatccgggcaggaaagaggatgacgaactgctccacaaagtggttgatctgctcaagaagcaaggtctgctgctgtactgcgacatcatcgagagcacgttcgtggaggaacaactgccaagtcgcaaaatcgacgccatggacaacttccagaagtgcttcgccattctcaagctgtaccagccgggcgtggataacagcagctataacacgagtaagaagagtgacatggccgaggttaaggattggaaagcgatccgtgtggatctggtgatcacgccattcgagcagtacgcctatgcgctgctcggttggacgggcagccgcgaatttggtcgcgatctgcgccgctatgcgagtcatgagcgcaagatgatcctcgacaaccatggcctctacgaccgcaaaaagcgcatctttctgaaagcgggcagcgaagaagagattttcgcgcatctgggtctggattatgtggagccgtgggaacgcaacgcg

SEQ ID NO: 142 - protein, 394 aa, synthetic construct
  REGION 1..394: note = Variant of terminal deoxynucleotidyl transferase
MHHHHHHGGSGHPPSNTPELEVPSVIARKVSQYSCQRKTTLNNYNKKFTDAFEIMAENYEFKENEIFCLEFLRAASLLKYLPFPVTRMKDIQGLPCIGDQVRDVIEEIIEEGESSRVKEVLNDERYKAFKQFTSVFGVGVKTSEKWFRMGLRTVEELKADKSLKLSKMQKAGFLYYEDLVSCVSKAEADAVTLIVKNTVSTFLPDALVTITGGFRRGKKMGHDIDFLITNPGRKEDDELLHKVVDLLKKQGLLLYCDIIESTFVEEQLPSRKIDAMDNFQKCFAILKLYQPGVDNSSYNTSKKSDMAEVKDWKAIRVDLVITPFEQYAYALLGWTGSREFGRDLRRYASHERKMILDNHGLYDRKKRIFLKAGSEEEIFAHLGLDYVEPWERNA

SEQ ID NO: 143 - DNA, 1182 bp, synthetic construct
  misc_feature 1..1182: note = Variant of terminal deoxynucleotidyl transferase
  source 1..1182: mol_type = other DNA
atgcaccatcatcatcatcatggcggtagcggccatccgccgagcaataccccggagctggaagtgccgagcgttatctatcgcaaggttagtcagtacagctgccagcgcaagaccacgctgaataactacaacaaaaagtttaccgacgcgttcgagatcatggccgagaactacgaatttaaagagaacgaaatcttctgtctggaatttctgcgcgccgcgagtctgctgaaatatctgccgttcccggttacccgcatgaaagacatccaaggtctgccgtgcattggcgaccaagttcgtgacgtgatcgaggagatcatcgaagaaggcgagagcagccgtgttaaagaagttctcaatgacgagcgctacaaggcctttaagcagttcaccagcgtgttcggtgtgggcgtgaaaaccagcgaaaagtggtttcgtatgggcctccgtacggttgaagagctgaaggccgacaagagtctgaagctgagcaagatgcagaaggcgggctttctgtattacgaggatctggtgagctgcgttagtaaagcggaagccgatgccgttacgctcatcgtgaagaacacggtgagtacctttctgccggatgcgctggtgaccatcacgggcggtttccgccgtggcaaaaagatgggccacgacatcgactttctgatcacgaatccgggcccgaaagaggatgacgaactgctccacaaagtggttgatctgctcaagaagcaaggtctgctgctgtactgcgacatcatcgagagcacgttcgtggaggaacaactgccaagtcgcaaaatcgacgccatggacaacttccagaagtgcttcgccattctcaagctgtaccagccgggcgtggataacagcagctataacacgagtaagaagagtgacatggccgaggttaaggattggaaagcgatccgtgtggatctggtgatcacgccattcgagcagtacgcctatgcgctgctcggttggacgggcagccgcgaatttggtcgcgatctgcgccgctatgcgagtcatgagcgcaagatgatcctcgacaaccatggcctctacgaccgcaaaaagcgcatctttctgaaagcgggcagcgaagaagagattttcgcgcatctgggtctggattatgtggagccgtgggaacgcaacgcg

SEQ ID NO: 144 - protein, 394 aa, synthetic construct
  REGION 1..394: note = Variant of terminal deoxynucleotidyl transferase
MHHHHHHGGSGHPPSNTPELEVPSVIYRKVSQYSCQRKTTLNNYNKKFTDAFEIMAENYEFKENEIFCLEFLRAASLLKYLPFPVTRMKDIQGLPCIGDQVRDVIEEIIEEGESSRVKEVLNDERYKAFKQFTSVFGVGVKTSEKWFRMGLRTVEELKADKSLKLSKMQKAGFLYYEDLVSCVSKAEADAVTLIVKNTVSTFLPDALVTITGGFRRGKKMGHDIDFLITNPGPKEDDELLHKVVDLLKKQGLLLYCDIIESTFVEEQLPSRKIDAMDNFQKCFAILKLYQPGVDNSSYNTSKKSDMAEVKDWKAIRVDLVITPFEQYAYALLGWTGSREFGRDLRRYASHERKMILDNHGLYDRKKRIFLKAGSEEEIFAHLGLDYVEPWERNA

SEQ ID NO: 145 - DNA, 1182 bp, synthetic construct
  misc_feature 1..1182: note = Variant of terminal deoxynucleotidyl transferase
  source 1..1182: mol_type = other DNA
atgcaccatcatcatcatcatggcggtagcggccatccgccgagcaataccccggagctggaagtgccgagcgttatcgcccgcaaggttagtcagtacagctgccagcgcaagaccacgctgaataactacaacaaaaagtttaccgacgcgttcgagatcatggccgagaactacgaatttaaagagaacgaaatcttcaggctggaatttctgcgcgccgcgagtctgctgaaatatctgccgttcccggttacccgcatgaaagacatccaaggtctgccgtgcattggcgaccaagttcgtgacgtgatcgaggagatcatcgaagaaggcgagagcagccgtgttaaagaagttctcaatgacgagcgctacaaggcctttaagcagttcaccagcgtgttcggtgtgggcgtgaaaaccagcgaaaagtggtttcgtatgggcctccgtacggttgaagagctgaaggccgacaagagtctgaagctgagcaagatgcagaaggcgggctttctgtattacgaggatctggtgagctgcgttagtaaagcggaagccgatgccgttacgctcatcgtgaagaacacggtgagtacctttctgccggatgcgctggtgaccatcacgggcggtttccgccgtggcaaaaagatgggccacgacatcgactttctgatcacgaatccgggcccgaaagaggatgacgaactgctccacaaagtggttgatctgctcaagaagcaaggtctgctgctgtactgcgacatcatcgagagcacgttcgtggaggaacaactgccaagtcgcaaaatcgacgccatggacaacttccagaagtgcttcgccattctcaagctgtaccagccgggcgtggataacagcagctataacacgagtaagaagagtgacatggccgaggttaaggattggaaagcgatccgtgtggatctggtgatcacgccattcgagcagtacgcctatgcgctgctcggttggacgggcagccgcgaatttggtcgcgatctgcgccgctatgcgagtcatgagcgcaagatgatcctcgacaaccatggcctctacgaccgcaaaaagcgcatctttctgaaagcgggcagcgaagaagagattttcgcgcatctgggtctggattatgtggagccgtgggaacgcaacgcg

SEQ ID NO: 146 - protein, 394 aa, synthetic construct
  REGION 1..394: note = Variant of terminal deoxynucleotidyl transferase
MHHHHHHGGSGHPPSNTPELEVPSVIARKVSQYSCQRKTTLNNYNKKFTDAFEIMAENYEFKENEIFRLEFLRAASLLKYLPFPVTRMKDIQGLPCIGDQVRDVIEEIIEEGESSRVKEVLNDERYKAFKQFTSVFGVGVKTSEKWFRMGLRTVEELKADKSLKLSKMQKAGFLYYEDLVSCVSKAEADAVTLIVKNTVSTFLPDALVTITGGFRRGKKMGHDIDFLITNPGPKEDDELLHKVVDLLKKQGLLLYCDIIESTFVEEQLPSRKIDAMDNFQKCFAILKLYQPGVDNSSYNTSKKSDMAEVKDWKAIRVDLVITPFEQYAYALLGWTGSREFGRDLRRYASHERKMILDNHGLYDRKKRIFLKAGSEEEIFAHLGLDYVEPWERNA

SEQ ID NO: 147 - DNA, 1182 bp, synthetic construct
  misc_feature 1..1182: note = Variant of terminal deoxynucleotidyl transferase
  source 1..1182: mol_type = other DNA
atgcaccatcatcatcatcatggcggtagcggccatccgccgagcaataccccggagctggaagtgccgagcgttatcgcccgcaaggttagtcagtacagctgccagcgcaagaccacgctgaataactacaacaaaaagtttaccgacgcgttcgagatcatggccgagaactacgaatttaaagagaacgaaatcttctgtctggaatttctgcgcgccgcgagtctgctgaaatatctgccgttcccggttacccgcatgaaagacatccaaggtctgccgtgcattggcgaccaagttcgtgacgtgatcgaggagatcatcgaagaaggcgagagcagccgtgttaaagaagttctcaatgacgagcgctacaaggcctttaagcagttcaccagcgtgttcggtgtgggcgtgaaaaccagcgaaaagtggtttcgtatgggcctccgtacggttgaagagctgaaggccgacaagagtctgaagctgagcaagatgcagaaggcgggctttctgtattacgaggatctggtgagctgcgttagtaaagcggaagccgatgccgttacgctcatcgtgaagaacacggtgagtacctttctgccggatgcgctggtgaccatcacgggcggtttccgccgtggcaaaaagatgggccacgacatcgactttctgatcacgaatccgggcccgaaagaggatgacgaactgctccacaaagtggttgatctgctcaagaagcaaggtctgctgctgtactgcgacatcatcgagagcacgttcgtggaggaacaactgccaagtcgcaaaatcgacgccatggacaacttccagaagtgcttcgccattctcaagctgtaccagccgggcgtggataacagcagctataacacgagtaagaagagtgacatggccgaggttaaggattggaaagcgatccgtgtggatctggtgatcgtgccattcgagcagtacgcctatgcgctgctcggttggacgggcagccgcgaatttggtcgcgatctgcgccgctatgcgagtcatgagcgcaagatgatcctcgacaaccatggcctctacgaccgcaaaaagcgcatctttctgaaagcgggcagcgaagaagagattttcgcgcatctgggtctggattatgtggagccgtgggaacgcaacgcg

SEQ ID NO: 148 - protein, 394 aa, synthetic construct
  REGION 1..394: note = Variant of terminal deoxynucleotidyl transferase
MHHHHHHGGSGHPPSNTPELEVPSVIARKVSQYSCQRKTTLNNYNKKFTDAFEIMAENYEFKENEIFCLEFLRAASLLKYLPFPVTRMKDIQGLPCIGDQVRDVIEEIIEEGESSRVKEVLNDERYKAFKQFTSVFGVGVKTSEKWFRMGLRTVEELKADKSLKLSKMQKAGFLYYEDLVSCVSKAEADAVTLIVKNTVSTFLPDALVTITGGFRRGKKMGHDIDFLITNPGPKEDDELLHKVVDLLKKQGLLLYCDIIESTFVEEQLPSRKIDAMDNFQKCFAILKLYQPGVDNSSYNTSKKSDMAEVKDWKAIRVDLVIVPFEQYAYALLGWTGSREFGRDLRRYASHERKMILDNHGLYDRKKRIFLKAGSEEEIFAHLGLDYVEPWERNA

SEQ ID NO: 149 - DNA, 1182 bp, synthetic construct
  misc_feature 1..1182: note = Variant of terminal deoxynucleotidyl transferase
  source 1..1182: mol_type = other DNA
atgcaccatcatcatcatcatggcggtagcggccatccgccgagcaataccccggagctggaagtgccgagcgttatcgcccgcaaggttagtcagtacagctgccagcgcaagaccacgctgaataactacaacaaaaagtttaccgacgcgttcgagatcatggccgagaactacgaatttaaagagaacgaaatcttctgtctggaatttctgcgcgccgcgagtctgctgaaatatctgccgttcccggttacccgcatgaaagacatccaaggtctgccgtgcattggcgaccaagttcgtgacgtgatcgaggagatcatcgaagaaggcgagagcagccgtgttaaagaagttctcaatgacgagcgctacaaggcctttaagcagttcaccagcgtgttcggtgtgggcgtgaaaaccagcgaaaagtggtttcgtatgggcctccgtacggttgaagagctgaaggccgacaagagtctgaagctgagcaagatgcagaaggcgggctttctgtattacgaggatctggtgagctgcgttagtaaagcggaagccgatgccgttacgctcatcgtgaagaacacggtgagtacctttctgccggatgcgctggtgaccatcacgggcggtttccgccgtggcaaaaagatgggccacgacatcgactttctgatcacgaatccgggcccgaaagaggatgacgaactgctccacaaagtggttgatctgctcaagaagcaaggtctgctgctgtactgcgacatcatcgagagcacgttcgtggaggaacaactgccaagtcgcaaaatcgacgccatggacaacttccagaagtgcttcgccattctcaagctgtaccagccgggcgtggatgttagcagctataacacgagtaagaagagtgacatggccgaggttaaggattggaaagcgatccgtgtggatctggtgatcacgccattcgagcagtacgcctatgcgctgctcggttggacgggcagccgcgaatttggtcgcgatctgcgccgctatgcgagtcatgagcgcaagatgatcctcgacaaccatggcctctacgaccgcaaaaagcgcatctttctgaaagcgggcagcgaagaagagattttcgcgcatctgggtctggattatgtggagccgtgggaacgcaacgcg

SEQ ID NO: 150 - protein, 394 aa, synthetic construct
  REGION 1..394: note = Variant of terminal deoxynucleotidyl transferase
MHHHHHHGGSGHPPSNTPELEVPSVIARKVSQYSCQRKTTLNNYNKKFTDAFEIMAENYEFKENEIFCLEFLRAASLLKYLPFPVTRMKDIQGLPCIGDQVRDVIEEIIEEGESSRVKEVLNDERYKAFKQFTSVFGVGVKTSEKWFRMGLRTVEELKADKSLKLSKMQKAGFLYYEDLVSCVSKAEADAVTLIVKNTVSTFLPDALVTITGGFRRGKKMGHDIDFLITNPGPKEDDELLHKVVDLLKKQGLLLYCDIIESTFVEEQLPSRKIDAMDNFQKCFAILKLYQPGVDVSSYNTSKKSDMAEVKDWKAIRVDLVITPFEQYAYALLGWTGSREFGRDLRRYASHERKMILDNHGLYDRKKRIFLKAGSEEEIFAHLGLDYVEPWERNA

SEQ ID NO: 151 - DNA, 1182 bp, synthetic construct
  misc_feature 1..1182: note = Variant of terminal deoxynucleotidyl transferase
  source 1..1182: mol_type = other DNA
atgcaccatcatcatcatcatggcggtagcggccatccgccgagcaataccccggagctggaagtgccgagcgttatcgcccgcaaggttagtcagtacagctgccagcgcaagaccacgctgaataactacaacaaaaagtttaccgacgcgttcgagatcattgccgagaactacgaatttaaagagaacgaaatcttctgtctggaatttctgcgcgccgcgagtctgctgaaatatctgccgttcccggttacccgcatgaaagacatccaaggtctgccgtgcattggcgaccaagttcgtgacgtgatcgaggagatcatcgaagaaggcgagagcagccgtgttaaagaagttctcaatgacgagcgctacaaggcctttaagcagttcaccagcgtgttcggtgtgggcgtgaaaaccagcgaaaagtggtttcgtatgggcctccgtacggttgaagagctgaaggccgacaagagtctgaagctgagcaagatgcagaaggcgggctttctgtattacgaggatctggtgagctgcgttagtaaagcggaagccgatgccgttacgctcatcgtgaagaacacggtgagtacctttctgccggatgcgctggtgaccatcacgggcggtttccgccgtggcaaaaagatgggccacgacatcgactttctgatcacgaatccgggcccgaaagaggatgacgaactgctccacaaagtggttgatctgctcaagaagcaaggtctgctgctgtactgcgacatcatcgagagcacgttcgtggaggaacaactgccaagtcgcaaaatcgacgccatggacaacttccagaagtgcttcgccattctcaagctgtaccagccgggcgtggataacagcagctataacacgagtaagaagagtgacatggccgaggttaaggattggaaagcgatccgtgtggatctggtgatcacgccattcgagcagtacgcctatgcgctgctcggttggacgggcagccgcgaatttggtcgcgatctgcgccgctatgcgagtcatgagcgcaagatgatcctcgacaaccatggcctctacgaccgcaaaaagcgcatctttctgaaagcgggcagcgaagaagagattttcgcgcatctgggtctggattatgtggagccgtgggaacgcaacgcg

SEQ ID NO: 152 - protein, 394 aa, synthetic construct
  REGION 1..394: note = Variant of terminal deoxynucleotidyl transferase
MHHHHHHGGSGHPPSNTPELEVPSVIARKVSQYSCQRKTTLNNYNKKFTDAFEIIAENYEFKENEIFCLEFLRAASLLKYLPFPVTRMKDIQGLPCIGDQVRDVIEEIIEEGESSRVKEVLNDERYKAFKQFTSVFGVGVKTSEKWFRMGLRTVEELKADKSLKLSKMQKAGFLYYEDLVSCVSKAEADAVTLIVKNTVSTFLPDALVTITGGFRRGKKMGHDIDFLITNPGPKEDDELLHKVVDLLKKQGLLLYCDIIESTFVEEQLPSRKIDAMDNFQKCFAILKLYQPGVDNSSYNTSKKSDMAEVKDWKAIRVDLVITPFEQYAYALLGWTGSREFGRDLRRYASHERKMILDNHGLYDRKKRIFLKAGSEEEIFAHLGLDYVEPWERNA

SEQ ID NO: 153 - DNA, 1182 bp, synthetic construct
  misc_feature 1..1182: note = Variant of terminal deoxynucleotidyl transferase
  source 1..1182: mol_type = other DNA
atgcaccatcatcatcatcatggcggtagcggccatccgccgagcaataccccggagctggaagtgccgagcgttatcgcccgcaaggttagtcagtacagctgccagcgcaagaccacgctgaataactacaacaaaaagtttaccgacgcgttcgagatcatggccgagaactacgaatttaaagagaacgaaatcttctgtctggaatttctgcgcgccgcgagtctgctgaaatatctgccgttcccggttacccgcatgaaagacatccaaggtctgccgtgcattggcgaccaagttcgtgacgtgatcgaggagatcatcgaagaaggcgagagcagccgtgttaaagaagttctcaatgacgagcgctacaaggcctttaagcagttcaccagcgtgttcggtgtgggcgtgaaaaccagcgaaaagtggtttcgtatgggcctccgtacggttgaagagctgaaggccgacaagagtctgaagctgagcaagatgcagaaggcgggctttctgtattacgaggatctggtgagctgcgttagtaaagcggaagccgatgccgttacgctcatcgtgaagaacacggtgagtacctttctgccggatgcgctggtgaccatcacgggcggtttccgccgtggcaaaaagatgggccacgacatcgactttctgatcacgaatccgggcccgaaagaggatgacgaactgctccacaaagtggttgatctgctcaagaagcaaggtctgctgctgtactgcgacatcatcgagagcacgttcgtggaggaacaactgccaagtcgcaaaagggacgccatggacaacttccagaagtgcttcgccattctcaagctgtaccagccgggcgtggataacagcagctataacacgagtaagaagagtgacatggccgaggttaaggattggaaagcgatccgtgtggatctggtgatcacgccattcgagcagtacgcctatgcgctgctcggttggacgggcagccgcgaatttggtcgcgatctgcgccgctatgcgagtcatgagcgcaagatgatcctcgacaaccatggcctctacgaccgcaaaaagcgcatctttctgaaagcgggcagcgaagaagagattttcgcgcatctgggtctggattatgtggagccgtgggaacgcaacgcg

SEQ ID NO: 154 - protein, 394 aa, synthetic construct
  REGION 1..394: note = Variant of terminal deoxynucleotidyl transferase
MHHHHHHGGSGHPPSNTPELEVPSVIARKVSQYSCQRKTTLNNYNKKFTDAFEIMAENYEFKENEIFCLEFLRAASLLKYLPFPVTRMKDIQGLPCIGDQVRDVIEEIIEEGESSRVKEVLNDERYKAFKQFTSVFGVGVKTSEKWFRMGLRTVEELKADKSLKLSKMQKAGFLYYEDLVSCVSKAEADAVTLIVKNTVSTFLPDALVTITGGFRRGKKMGHDIDFLITNPGPKEDDELLHKVVDLLKKQGLLLYCDIIESTFVEEQLPSRKRDAMDNFQKCFAILKLYQPGVDNSSYNTSKKSDMAEVKDWKAIRVDLVITPFEQYAYALLGWTGSREFGRDLRRYASHERKMILDNHGLYDRKKRIFLKAGSEEEIFAHLGLDYVEPWERNA

SEQ ID NO: 155 - DNA, 1182 bp, synthetic construct
  misc_feature 1..1182: note = Variant of terminal deoxynucleotidyl transferase
  source 1..1182: mol_type = other DNA
atgcaccatcatcatcatcatggcggtagcggccatccgccgagcaataccccggagctggaagtgccgagcgttatcgcccgcaaggttagtcagtacagctgccagcgcaagaccacgctgaataactacaacaaaaagtttaccgacgcgttcgagatcatggccgagaactacgaatttaaagagaacgaaatcttctgtctggaatttctgcgcgccgcgagtctgctgaaatatctgccgttcccggttacccgcatgaaagacatccaaggtctgccgtgcattggcgaccaagttcgtgacgtgatcgaggagatcatcgaagaaggcgagagcagccgtgttaaagaagttctcaatgacgagcgctacaaggcctttaagcagttcaccagcgtgttcggtgtgggcgtgaaaaccagcgaaaagtggtttcgtatgggcctccgtacggttgaagagctgaaggccgacaagagtctgaagctgagcaagatgcagaaggcgggctttctgtattacgaggatctggtgagctgcgttagtaaagcggaagccgatgccgttacgctcatcgtgaagaacacggtgagtacctttctgccggatgcgctggtgaccatcacgggcggtttccgccgtggcaaaaagatgggccacgacatcgactttctgatcacgaatccgggcccgaaagaggatgacgaactgctccacaaagtggttgatctgctcaagaagcaaggtctgctgctgtacggggacatcatcgagagcacgttcgtggaggaacaactgccaagtcgcaaaatcgacgccatggacaacttccagaagtgcttcgccattctcaagctgtaccagccgggcgtggataacagcagctataacacgagtaagaagagtgacatggccgaggttaaggattggaaagcgatccgtgtggatctggtgatcacgccattcgagcagtacgcctatgcgctgctcggttggacgggcagccgcgaatttggtcgcgatctgcgccgctatgcgagtcatgagcgcaagatgatcctcgacaaccatggcctctacgaccgcaaaaagcgcatctttctgaaagcgggcagcgaagaagagattttcgcgcatctgggtctggattatgtggagccgtgggaacgcaacgcg

SEQ ID NO: 156 - protein, 394 aa, synthetic construct
  REGION 1..394: note = Variant of terminal deoxynucleotidyl transferase
MHHHHHHGGSGHPPSNTPELEVPSVIARKVSQYSCQRKTTLNNYNKKFTDAFEIMAENYEFKENEIFCLEFLRAASLLKYLPFPVTRMKDIQGLPCIGDQVRDVIEEIIEEGESSRVKEVLNDERYKAFKQFTSVFGVGVKTSEKWFRMGLRTVEELKADKSLKLSKMQKAGFLYYEDLVSCVSKAEADAVTLIVKNTVSTFLPDALVTITGGFRRGKKMGHDIDFLITNPGPKEDDELLHKVVDLLKKQGLLLYGDIIESTFVEEQLPSRKIDAMDNFQKCFAILKLYQPGVDNSSYNTSKKSDMAEVKDWKAIRVDLVITPFEQYAYALLGWTGSREFGRDLRRYASHERKMILDNHGLYDRKKRIFLKAGSEEEIFAHLGLDYVEPWERNA

SEQ ID NO: 157 - DNA, 1182 bp, synthetic construct
  misc_feature 1..1182: note = Variant of terminal deoxynucleotidyl transferase
  source 1..1182: mol_type = other DNA
atgcaccatcatcatcatcatggcggtagcggccatccgccgagcaataccccggagctggaagtgccgagcgttatcgcccgcaaggttagtcagtacagctgccagcgcaagaccacgctgaataactacaacaaaaagtttaccgacgcgttcgagatcatggccgagaactacgaatttaaagagaacgaaatcttctgtctggaatttctgcgcgccgcgagtctgctgaaatatctgccgttcccggttacccgcatgaaagacatccaaggtctgccgtgcattggcgaccaagttcgtgacgtgatcgaggagatcatcgaagaaggcgagagcagccgtgttaaagaagttctcaatgacgagcgctacaaggcctttaagcagttcaccagcgtgttcggtgtgggcgtgaaaaccagcgaaaagtggtttcgtatgggcctccgtacggttgaagagctgaaggccgacaagagtctgaagctgagcaagatgcagaaggcgggctttctgtattacgaggatctggtgagctgcgttagtaaagcggaagccgatgccgttacgctcatcgtgaagaacacggtgagtacctttctgccggatgcgctggtgaccatcacgggcggtttccgccgtggcaaaaagatgggccacgacatcgactttctgatcacgaatccgggcccgaaagaggatgacgaactgctccacaaagtggttgatctgctcaagaagcaaggtctgctgctgtactgcgacatcatcgagagcacgttcgtggaggaacaactgccaagtcgcaaaatcgacgccatggacaacttccagaagtgcttcgccattctcaagctgtaccagccgggcgtggataacagcgtttataacacgagtaagaagagtgacatggccgaggttaaggattggaaagcgatccgtgtggatctggtgatcacgccattcgagcagtacgcctatgcgctgctcggttggacgggcagccgcgaatttggtcgcgatctgcgccgctatgcgagtcatgagcgcaagatgatcctcgacaaccatggcctctacgaccgcaaaaagcgcatctttctgaaagcgggcagcgaagaagagattttcgcgcatctgggtctggattatgtggagccgtgggaacgcaacgcg

SEQ ID NO: 158 - protein, 394 aa, synthetic construct
  REGION 1..394: note = Variant of terminal deoxynucleotidyl transferase
MHHHHHHGGSGHPPSNTPELEVPSVIARKVSQYSCQRKTTLNNYNKKFTDAFEIMAENYEFKENEIFCLEFLRAASLLKYLPFPVTRMKDIQGLPCIGDQVRDVIEEIIEEGESSRVKEVLNDERYKAFKQFTSVFGVGVKTSEKWFRMGLRTVEELKADKSLKLSKMQKAGFLYYEDLVSCVSKAEADAVTLIVKNTVSTFLPDALVTITGGFRRGKKMGHDIDFLITNPGPKEDDELLHKVVDLLKKQGLLLYCDIIESTFVEEQLPSRKIDAMDNFQKCFAILKLYQPGVDNSVYNTSKKSDMAEVKDWKAIRVDLVITPFEQYAYALLGWTGSREFGRDLRRYASHERKMILDNHGLYDRKKRIFLKAGSEEEIFAHLGLDYVEPWERNA

SEQ ID NO: 159 - DNA, 1182 bp, synthetic construct
  misc_feature 1..1182: note = Variant of terminal deoxynucleotidyl transferase
  source 1..1182: mol_type = other DNA
atgcaccatcatcatcatcatggcggtagcggccatccgccgagcaataccccggagctggaagtgccgagcgttatcgcccgcaaggttagtcagtacagctgccagcgcaagaccacgctgaataactacaacaaaaagtttaccgacgcgttcgagatcatggccgagaactacgaatttaaagagaacgaaatcttctgtctggaatttctgcgcgccgcgagtctgctgaaatatctgccgttcccggttacccgcatgaaagacatccaaggtctgccgtgcattggcgaccaagttcgtgacgtgatcgaggagatcatcgaagaaggcgagagcagccgtgttaaagaagttctcaatgacgagcgctacaaggcctttaagcagttcaccagcgtgttcggtgtgggcgtgaaaaccagcgaaaagtggtttcgtatgggcctccgtacggttgaagagattaaggccgacaagagtctgaagctgagcaagatgcagaaggcgggctttctgtattacgaggatctggtgagctgcgttagtaaagcggaagccgatgccgttacgctcatcgtgaagaacacggtgagtacctttctgccggatgcgctggtgaccatcacgggcggtttccgccgtggcaaaaagatgggccacgacatcgactttctgatcacgaatccgggcccgaaagaggatgacgaactgctccacaaagtggttgatctgctcaagaagcaaggtctgctgctgtactgcgacatcatcgagagcacgttcgtggaggaacaactgccaagtcgcaaaatcgacgccatggacaacttccagaagtgcttcgccattctcaagctgtaccagccgggcgtggataacagcagctataacacgagtaagaagagtgacatggccgaggttaaggattggaaagcgatccgtgtggatctggtgatcacgccattcgagcagtacgcctatgcgctgctcggttggacgggcagccgcgaatttggtcgcgatctgcgccgctatgcgagtcatgagcgcaagatgatcctcgacaaccatggcctctacgaccgcaaaaagcgcatctttctgaaagcgggcagcgaagaagagattttcgcgcatctgggtctggattatgtggagccgtgggaacgcaacgcg

SEQ ID NO: 160 - protein, 394 aa, synthetic construct
  REGION 1..394: note = Variant of terminal deoxynucleotidyl transferase
MHHHHHHGGSGHPPSNTPELEVPSVIARKVSQYSCQRKTTLNNYNKKFTDAFEIMAENYEFKENEIFCLEFLRAASLLKYLPFPVTRMKDIQGLPCIGDQVRDVIEEIIEEGESSRVKEVLNDERYKAFKQFTSVFGVGVKTSEKWFRMGLRTVEEIKADKSLKLSKMQKAGFLYYEDLVSCVSKAEADAVTLIVKNTVSTFLPDALVTITGGFRRGKKMGHDIDFLITNPGPKEDDELLHKVVDLLKKQGLLLYCDIIESTFVEEQLPSRKIDAMDNFQKCFAILKLYQPGVDNSSYNTSKKSDMAEVKDWKAIRVDLVITPFEQYAYALLGWTGSREFGRDLRRYASHERKMILDNHGLYDRKKRIFLKAGSEEEIFAHLGLDYVEPWERNA

SEQ ID NO: 161 - DNA, 1182 bp, synthetic construct
  misc_feature 1..1182: note = Variant of terminal deoxynucleotidyl transferase
  source 1..1182: mol_type = other DNA
atgcaccatcatcatcatcatggcggtagcggccatccgccgagcaataccccggagctggaagtgccgagcgttatcgcccgcaaggttagtcagtacagctgccagcgcaagaccacgctgaataactacaacaaaaagtttaccgacgcgttcgagatccttgccgagaactacgaatttaaagagaacgaaatcttctgtctggaatttctgcgcgccgcgagtctgctgaaatatctgccgttcccggttacccgcatgaaagacatccaaggtctgccgtgcattggcgaccaagttcgtgacgtgatcgaggagatcatcgaagaaggcgagagcagccgtgttaaagaagttctcaatgacgagcgctacaaggcctttaagcagttcaccagcgtgttcggtgtgggcgtgaaaaccagcgaaaagtggtttcgtatgggcctccgtacggttgaagagctgaaggccgacaagagtctgaagctgagcaagatgcagaaggcgggctttctgtattacgaggatctggtgagctgcgttagtaaagcggaagccgatgccgttacgctcatcgtgaagaacacggtgagtacctttctgccggatgcgctggtgaccatcacgggcggtttccgccgtggcaaaaagatgggccacgacatcgactttctgatcacgaatccgggcccgaaagaggatgacgaactgctccacaaagtggttgatctgctcaagaagcaaggtctgctgctgtactgcgacatcatcgagagcacgttcgtggaggaacaactgccaagtcgcaaaatcgacgccatggacaacttccagaagtgcttcgccattctcaagctgtaccagccgggcgtggataacagcagctataacacgagtaagaagagtgacatggccgaggttaaggattggaaagcgatccgtgtggatctggtgatcacgccattcgagcagtacgcctatgcgctgctcggttggacgggcagccgcgaatttggtcgcgatctgcgccgctatgcgagtcatgagcgcaagatgatcctcgacaaccatggcctctacgaccgcaaaaagcgcatctttctgaaagcgggcagcgaagaagagattttcgcgcatctgggtctggattatgtggagccgtgggaacgcaacgcg

SEQ ID NO: 162 - protein, 394 aa, synthetic construct
  REGION 1..394: note = Variant of terminal deoxynucleotidyl transferase
MHHHHHHGGSGHPPSNTPELEVPSVIARKVSQYSCQRKTTLNNYNKKFTDAFEILAENYEFKENEIFCLEFLRAASLLKYLPFPVTRMKDIQGLPCIGDQVRDVIEEIIEEGESSRVKEVLNDERYKAFKQFTSVFGVGVKTSEKWFRMGLRTVEELKADKSLKLSKMQKAGFLYYEDLVSCVSKAEADAVTLIVKNTVSTFLPDALVTITGGFRRGKKMGHDIDFLITNPGPKEDDELLHKVVDLLKKQGLLLYCDIIESTFVEEQLPSRKIDAMDNFQKCFAILKLYQPGVDNSSYNTSKKSDMAEVKDWKAIRVDLVITPFEQYAYALLGWTGSREFGRDLRRYASHERKMILDNHGLYDRKKRIFLKAGSEEEIFAHLGLDYVEPWERNA

SEQ ID NO: 163 - DNA, 1182 bp, synthetic construct
  misc_feature 1..1182: note = Variant of terminal deoxynucleotidyl transferase
  source 1..1182: mol_type = other DNA
atgcaccatcatcatcatcatggcggtagcggccatccgccgagcaataccccggagctggaagtgccgagcgttatcgcccgcaaggttagtcagtacagctgccagcgcaagaccacgctgaataactacaacaaaaagtttaccgacgcgttcgagatcatggccgagaactacgaatttaaagagaacgaaatcttctgtctggaatttctgcgcgccgcgagtctgctgaaatatctgccgttcccggttacccgcatgaaagacatccaaggtctgccgtgcattggcgaccaagttcgtgacgtgatcgaggagatcatcgaagaaggcgagagcagccgtgttaaagaagttctcaatgacgagcgctacaaggcctttaagcagttcaccagcgtgttcggtgtgggcgtgaaaaccagcgaaaagtggtttcgtatgggcctccgtacggttgaagagctgaaggccgacaagagtctgaagctgagcaagatgcagaaggcgggctttctgtattacgaggatctggtgagctgcgttagtaaagcggaagccgatgccgttacgctcatcgtgaagaacacggtgagtacctttctgccggatgcgctggtgaccatcacgggcggtttccgccgtggcaaaaagatgggccacgacatcgactttctgatcacgaatccgggcccgaaagaggatgacgaactgctccacaaagtggttgatctgctcaagaagcaaggtctgctgctgtacgaggacatcatcgagagcacgttcgtggaggaacaactgccaagtcgcaaaatcgacgccatggacaacttccagaagtgcttcgccattctcaagctgtaccagccgggcgtggataacagcagctataacacgagtaagaagagtgacatggccgaggttaaggattggaaagcgatccgtgtggatctggtgatcacgccattcgagcagtacgcctatgcgctgctcggttggacgggcagccgcgaatttggtcgcgatctgcgccgctatgcgagtcatgagcgcaagatgatcctcgacaaccatggcctctacgaccgcaaaaagcgcatctttctgaaagcgggcagcgaagaagagattttcgcgcatctgggtctggattatgtggagccgtgggaacgcaacgcg

SEQ ID NO: 164 - protein, 394 aa, synthetic construct
  REGION 1..394: note = Variant of terminal deoxynucleotidyl transferase
MHHHHHHGGSGHPPSNTPELEVPSVIARKVSQYSCQRKTTLNNYNKKFTDAFEIMAENYEFKENEIFCLEFLRAASLLKYLPFPVTRMKDIQGLPCIGDQVRDVIEEIIEEGESSRVKEVLNDERYKAFKQFTSVFGVGVKTSEKWFRMGLRTVEELKADKSLKLSKMQKAGFLYYEDLVSCVSKAEADAVTLIVKNTVSTFLPDALVTITGGFRRGKKMGHDIDFLITNPGPKEDDELLHKVVDLLKKQGLLLYEDIIESTFVEEQLPSRKIDAMDNFQKCFAILKLYQPGVDNSSYNTSKKSDMAEVKDWKAIRVDLVITPFEQYAYALLGWTGSREFGRDLRRYASHERKMILDNHGLYDRKKRIFLKAGSEEEIFAHLGLDYVEPWERNA

SEQ ID NO: 165 - DNA, 1182 bp, synthetic construct
  misc_feature 1..1182: note = Variant of terminal deoxynucleotidyl transferase
  source 1..1182: mol_type = other DNA
atgcaccatcatcatcatcatggcggtagcggccatccgccgagcaataccccggagctggaagtgccgagcgttatcgcccgcaaggttagtcagtacagctgccagcgcaagaccacgctgaataactacaacaaaaagtttaccgacgcgttcgagatcatggccgagaactacgaatttaaagagaacgaaatcttctgtctggaatttctgcgcgccgcgagtctgctgaaatatctgccgttcccggttacctctatgaaagacatccaaggtctgccgtgcattggcgaccaagttcgtgacgtgatcgaggagatcatcgaagaaggcgagagcagccgtgttaaagaagttctcaatgacgagcgctacaaggcctttaagcagttcaccagcgtgttcggtgtgggcgtgaaaaccagcgaaaagtggtttcgtatgggcctccgtacggttgaagagctgaaggccgacaagagtctgaagctgagcaagatgcagaaggcgggctttctgtattacgaggatctggtgagctgcgttagtaaagcggaagccgatgccgttacgctcatcgtgaagaacacggtgagtacctttctgccggatgcgctggtgaccatcacgggcggtttccgccgtggcaaaaagatgggccacgacatcgactttctgatcacgaatccgggcccgaaagaggatgacgaactgctccacaaagtggttgatctgctcaagaagcaaggtctgctgctgtactgcgacatcatcgagagcacgttcgtggaggaacaactgccaagtcgcaaaatcgacgccatggacaacttccagaagtgcttcgccattctcaagctgtaccagccgggcgtggataacagcagctataacacgagtaagaagagtgacatggccgaggttaaggattggaaagcgatccgtgtggatctggtgatcacgccattcgagcagtacgcctatgcgctgctcggttggacgggcagccgcgaatttggtcgcgatctgcgccgctatgcgagtcatgagcgcaagatgatcctcgacaaccatggcctctacgaccgcaaaaagcgcatctttctgaaagcgggcagcgaagaagagattttcgcgcatctgggtctggattatgtggagccgtgggaacgcaacgcg

SEQ ID NO: 166 - protein, 394 aa, synthetic construct
  REGION 1..394: note = Variant of terminal deoxynucleotidyl transferase
MHHHHHHGGSGHPPSNTPELEVPSVIARKVSQYSCQRKTTLNNYNKKFTDAFEIMAENYEFKENEIFCLEFLRAASLLKYLPFPVTSMKDIQGLPCIGDQVRDVIEEIIEEGESSRVKEVLNDERYKAFKQFTSVFGVGVKTSEKWFRMGLRTVEELKADKSLKLSKMQKAGFLYYEDLVSCVSKAEADAVTLIVKNTVSTFLPDALVTITGGFRRGKKMGHDIDFLITNPGPKEDDELLHKVVDLLKKQGLLLYCDIIESTFVEEQLPSRKIDAMDNFQKCFAILKLYQPGVDNSSYNTSKKSDMAEVKDWKAIRVDLVITPFEQYAYALLGWTGSREFGRDLRRYASHERKMILDNHGLYDRKKRIFLKAGSEEEIFAHLGLDYVEPWERNA

SEQ ID NO: 167 - DNA, 1182 bp, synthetic construct
  misc_feature 1..1182: note = Variant of terminal deoxynucleotidyl transferase
  source 1..1182: mol_type = other DNA
atgcaccatcatcatcatcatggcggtagcggccatccgccgagcaataccccggagctggaagtgccgagcgttatcgcccgcaaggttagtcagtacagctgccagcgcaagaccacgctgaataactacaacaaaaagtttaccgacgcgttcgagatcatggccgagaactacgaatttaaagagaacgaaatcaattgtctggaatttctgcgcgccgcgagtctgctgaaatatctgccgttcccggttacccgcatgaaagacatccaaggtctgccgtgcattggcgaccaagttcgtgacgtgatcgaggagatcatcgaagaaggcgagagcagccgtgttaaagaagttctcaatgacgagcgctacaaggcctttaagcagttcaccagcgtgttcggtgtgggcgtgaaaaccagcgaaaagtggtttcgtatgggcctccgtacggttgaagagctgaaggccgacaagagtctgaagctgagcaagatgcagaaggcgggctttctgtattacgaggatctggtgagctgcgttagtaaagcggaagccgatgccgttacgctcatcgtgaagaacacggtgagtacctttctgccggatgcgctggtgaccatcacgggcggtttccgccgtggcaaaaagatgggccacgacatcgactttctgatcacgaatccgggcccgaaagaggatgacgaactgctccacaaagtggttgatctgctcaagaagcaaggtctgctgctgtactgcgacatcatcgagagcacgttcgtggaggaacaactgccaagtcgcaaaatcgacgccatggacaacttccagaagtgcttcgccattctcaagctgtaccagccgggcgtggataacagcagctataacacgagtaagaagagtgacatggccgaggttaaggattggaaagcgatccgtgtggatctggtgatcacgccattcgagcagtacgcctatgcgctgctcggttggacgggcagccgcgaatttggtcgcgatctgcgccgctatgcgagtcatgagcgcaagatgatcctcgacaaccatggcctctacgaccgcaaaaagcgcatctttctgaaagcgggcagcgaagaagagattttcgcgcatctgggtctggattatgtggagccgtgggaacgcaacgcg

SEQ ID NO: 168 - protein, 394 aa, synthetic construct
  REGION 1..394: note = Variant of terminal deoxynucleotidyl transferase
MHHHHHHGGSGHPPSNTPELEVPSVIARKVSQYSCQRKTTLNNYNKKFTDAFEIMAENYEFKENEINCLEFLRAASLLKYLPFPVTRMKDIQGLPCIGDQVRDVIEEIIEEGESSRVKEVLNDERYKAFKQFTSVFGVGVKTSEKWFRMGLRTVEELKADKSLKLSKMQKAGFLYYEDLVSCVSKAEADAVTLIVKNTVSTFLPDALVTITGGFRRGKKMGHDIDFLITNPGPKEDDELLHKVVDLLKKQGLLLYCDIIESTFVEEQLPSRKIDAMDNFQKCFAILKLYQPGVDNSSYNTSKKSDMAEVKDWKAIRVDLVITPFEQYAYALLGWTGSREFGRDLRRYASHERKMILDNHGLYDRKKRIFLKAGSEEEIFAHLGLDYVEPWERNA

SEQ ID NO: 169 - DNA, 1182 bp, synthetic construct
  misc_feature 1..1182: note = Variant of terminal deoxynucleotidyl transferase
  source 1..1182: mol_type = other DNA
atgcaccatcatcatcatcatggcggtagcggccatccgccgagcaataccccggagctggaagtgccgagcgttatcgcccgcaaggttagtcagtacagctgccagcgcaagaccacgctgaataactacaacaaaaagtttaccgacgcgttcgagatcatggccgagaactacgaatttaaagagaacgaaatcttccgtctggaatttctgcgcgccgcgagtctgctgaaatatctgccgttcccggttacccgcatgaaagacatccaaggtctgccgtgcattggcgaccaagttcgtgacgtgatcgaggagatcatcgaagaaggcgagagcagccgtgttaaagaagttctcaatgacgagcgctacaaggcctttaagcagttcaccagcgtgttcggtgtgggcgtgaaaaccagcgaaaagtggtttcgtatgggcctccgtacggttgaagagctgaaggccgacaagagtctgaagctgagcaagatgcagaaggcgggctttctgtattacgaggatctggtgagctgcgttagtaaagcggaagccgatgccgttacgctcatcgtgaagaacacggtgagtacctttctgccggatgcgctggtgaccatcacgggcggtttccgccgtggcaaaaagatgggccacgacatcgactttctgatcacgaatccgggcccgaaagaggatgacgaactgctccacaaagtggttgatctgctcaagaagcaaggtctgctgctgtactgcgacatcatcgagagcacgttcgtggaggaacaactgccaagtcgcaaaatcgacgccatggacaacttccagaagtgcttcgccattctcaagctgtaccagccgggcgtggataacagcagctataacacgagtaagaagagtgacatggccgaggttaaggattggaaagcgatccgtgtggatctggtgatcacgccattcgagcagtacgcctatgcgctgctcggttggacgggcagccgcgaatttggtcgcgatctgcgccgctatgcgagtcatgagcgcaagatgatcctcgacaaccatggcctctacgaccgcaaaaagcgcatctttctgaaagcgggcagcgaagaagagattttcgcgcatctgggtctggattatgtggagccgtgggaacgcaacgcg

SEQ ID NO: 170 - protein, 394 aa, synthetic construct; identical to SEQ ID NO: 146
  REGION 1..394: note = Variant of terminal deoxynucleotidyl transferase

SEQ ID NO: 171 - DNA, 1182 bp, synthetic construct
  misc_feature 1..1182: note = Variant of terminal deoxynucleotidyl transferase
  source 1..1182: mol_type = other DNA
atgcaccatcatcatcatcatggcggtagcggccatccgccgagcaataccccggagctggaagtgccgagcgttatcgcccgcaaggttagtcagtacagctgccagcgcaagaccacgctgaataactacaacaaaaagtttaccgacgcgttcgagatcatggccgagaactacgaatttaaagagaacgaaatcttctgtctggaatttctgcgcgccgcgagtctgctgaaatatctgccgttcccggttacccgcatgaaagacatccaaggtctgccgtgcattggcgaccaagttcgtgacgtgatcgaggagatcatcgaagaaggcgagagcagccgtgttaaagaagttctcaatgacgagcgctacaaggcctttaagcagttcaccagcgtgttcggtgtgggcgtgaaaaccagcgaaaagtggtttcgtatgggcctccgtacggttgaagaggctaaggccgacaagagtctgaagctgagcaagatgcagaaggcgggctttctgtattacgaggatctggtgagctgcgttagtaaagcggaagccgatgccgttacgctcatcgtgaagaacacggtgagtacctttctgccggatgcgctggtgaccatcacgggcggtttccgccgtggcaaaaagatgggccacgacatcgactttctgatcacgaatccgggcccgaaagaggatgacgaactgctccacaaagtggttgatctgctcaagaagcaaggtctgctgctgtactgcgacatcatcgagagcacgttcgtggaggaacaactgccaagtcgcaaaatcgacgccatggacaacttccagaagtgcttcgccattctcaagctgtaccagccgggcgtggataacagcagctataacacgagtaagaagagtgacatggccgaggttaaggattggaaagcgatccgtgtggatctggtgatcacgccattcgagcagtacgcctatgcgctgctcggttggacgggcagccgcgaatttggtcgcgatctgcgccgctatgcgagtcatgagcgcaagatgatcctcgacaaccatggcctctacgaccgcaaaaagcgcatctttctgaaagcgggcagcgaagaagagattttcgcgcatctgggtctggattatgtggagccgtgggaacgcaacgcg

SEQ ID NO: 172 - protein, 394 aa, synthetic construct
  REGION 1..394: note = Variant of terminal deoxynucleotidyl transferase
MHHHHHHGGSGHPPSNTPELEVPSVIARKVSQYSCQRKTTLNNYNKKFTDAFEIMAENYEFKENEIFCLEFLRAASLLKYLPFPVTRMKDIQGLPCIGDQVRDVIEEIIEEGESSRVKEVLNDERYKAFKQFTSVFGVGVKTSEKWFRMGLRTVEEAKADKSLKLSKMQKAGFLYYEDLVSCVSKAEADAVTLIVKNTVSTFLPDALVTITGGFRRGKKMGHDIDFLITNPGPKEDDELLHKVVDLLKKQGLLLYCDIIESTFVEEQLPSRKIDAMDNFQKCFAILKLYQPGVDNSSYNTSKKSDMAEVKDWKAIRVDLVITPFEQYAYALLGWTGSREFGRDLRRYASHERKMILDNHGLYDRKKRIFLKAGSEEEIFAHLGLDYVEPWERNA

SEQ ID NO: 173 - DNA, 1182 bp, synthetic construct
  misc_feature 1..1182: note = Variant of terminal deoxynucleotidyl transferase
  source 1..1182: mol_type = other DNA
atgcaccatcatcatcatcatggcggtagcggccatccgccgagcaataccccggagctggaagtgccgagcgttatcgcccgcaaggttagtcagtacagctgccagcgcaagaccacgctgaataactacaacaaaaagtttaccgacgcgttcgagatcatggccgagaactacgaatttaaagagaacgaaatcttctgtctggaatttctgcgcgccgcgagtctgctgaaatatctgccgttcccggttacccgcatgaaagacatccaaggtctgccgtgcattggcgaccaagttcgtgacgtgatcgaggagatcatcgaaactggcgagagcagccgtgttaaagaagttctcaatgacgagcgctacaaggcctttaagcagttcaccagcgtgttcggtgtgggcgtgaaaaccagcgaaaagtggtttcgtatgggcctccgtacggttgaagagctgaaggccgacaagagtctgaagctgagcaagatgcagaaggcgggctttctgtattacgaggatctggtgagctgcgttagtaaagcggaagccgatgccgttacgctcatcgtgaagaacacggtgagtacctttctgccggatgcgctggtgaccatcacgggcggtttccgccgtggcaaaaagatgggccacgacatcgactttctgatcacgaatccgggcccgaaagaggatgacgaactgctccacaaagtggttgatctgctcaagaagcaaggtctgctgctgtactgcgacatcatcgagagcacgttcgtggaggaacaactgccaagtcgcaaaatcgacgccatggacaacttccagaagtgcttcgccattctcaagctgtaccagccgggcgtggataacagcagctataacacgagtaagaagagtgacatggccgaggttaaggattggaaagcgatccgtgtggatctggtgatcacgccattcgagcagtacgcctatgcgctgctcggttggacgggcagccgcgaatttggtcgcgatctgcgccgctatgcgagtcatgagcgcaagatgatcctcgacaaccatggcctctacgaccgcaaaaagcgcatctttctgaaagcgggcagcgaagaagagattttcgcgcatctgggtctggattatgtggagccgtgggaacgcaacgcg

SEQ ID NO: 174 - protein, 394 aa, synthetic construct
  REGION 1..394: note = Variant of terminal deoxynucleotidyl transferase
MHHHHHHGGSGHPPSNTPELEVPSVIARKVSQYSCQRKTTLNNYNKKFTDAFEIMAENYEFKENEIFCLEFLRAASLLKYLPFPVTRMKDIQGLPCIGDQVRDVIEEIIETGESSRVKEVLNDERYKAFKQFTSVFGVGVKTSEKWFRMGLRTVEELKADKSLKLSKMQKAGFLYYEDLVSCVSKAEADAVTLIVKNTVSTFLPDALVTITGGFRRGKKMGHDIDFLITNPGPKEDDELLHKVVDLLKKQGLLLYCDIIESTFVEEQLPSRKIDAMDNFQKCFAILKLYQPGVDNSSYNTSKKSDMAEVKDWKAIRVDLVITPFEQYAYALLGWTGSREFGRDLRRYASHERKMILDNHGLYDRKKRIFLKAGSEEEIFAHLGLDYVEPWERNA

SEQ ID NO: 175 - DNA, 1182 bp, synthetic construct
  misc_feature 1..1182: note = Variant of terminal deoxynucleotidyl transferase
  source 1..1182: mol_type = other DNA
atgcaccatcatcatcatcatggcggtagcggccatccgccgagcaataccccggagctggaagtgccgagcgttatcgcccgcaaggttagtcagtacagctgccagcgcaagaccacgctgaataactacaacaaaaagtttaccgacgcgttcgagatcatggccgagaactacgaatttaaagagaacgaaatcttctgtctggaatttctgcgcgccgcgagtctgctgaaatatctgccgttcccggttacccgcatgaaagacatccaaggtctgccgtgcattggcgaccaagttcgtgacgtgatcgaggagatcatcgaagaaggcgagagcagccgtgttaaagaagttctcaatgacgagcgctacaaggcctttaagcagttcaccagcgtgttcggtgtgggcgtgaaaaccagcgaaaagtggtttcgtatgggcctccgtacggttgaagagctgaaggccaacaagagtctgaagctgagcaagatgcagaaggcgggctttctgtattacgaggatctggtgagctgcgttagtaaagcggaagccgatgccgttacgctcatcgtgaagaacacggtgagtacctttctgccggatgcgctggtgaccatcacgggcggtttccgccgtggcaaaaagatgggccacgacatcgactttctgatcacgaatccgggcccgaaagaggatgacgaactgctccacaaagtggttgatctgctcaagaagcaaggtctgctgctgtactgcgacatcatcgagagcacgttcgtggaggaacaactgccaagtcgcaaaatcgacgccatggacaacttccagaagtgcttcgccattctcaagctgtaccagccgggcgtggataactggagctataacacgagtaagaagagtgacatggccgaggttaaggattggaaagcgatccgtgtggatctggtgatcacgccattcgagcagtacgcctatgcgctgctcggttggacgggcagccgcgaatttggtcgcgatctgcgccgctatgcgagtcatgagcgcaagatgatcctcgacaaccatggcctctacgaccgcaaaaagcgcatctttctgaaagcgggcagcgaagaagagattttcgcgcatctgggtctggattatgtggagccgtgggaacgcaacgcg

SEQ ID NO: 176 - protein, 394 aa, synthetic construct
  REGION 1..394: note = Variant of terminal deoxynucleotidyl transferase
MHHHHHHGGSGHPPSNTPELEVPSVIARKVSQYSCQRKTTLNNYNKKFTDAFEIMAENYEFKENEIFCLEFLRAASLLKYLPFPVTRMKDIQGLPCIGDQVRDVIEEIIEEGESSRVKEVLNDERYKAFKQFTSVFGVGVKTSEKWFRMGLRTVEELKANKSLKLSKMQKAGFLYYEDLVSCVSKAEADAVTLIVKNTVSTFLPDALVTITGGFRRGKKMGHDIDFLITNPGPKEDDELLHKVVDLLKKQGLLLYCDIIESTFVEEQLPSRKIDAMDNFQKCFAILKLYQPGVDNWSYNTSKKSDMAEVKDWKAIRVDLVITPFEQYAYALLGWTGSREFGRDLRRYASHERKMILDNHGLYDRKKRIFLKAGSEEEIFAHLGLDYVEPWERNA

SEQ ID NO: 177 - DNA, 1182 bp, synthetic construct
  misc_feature 1..1182: note = Variant of terminal deoxynucleotidyl transferase
  source 1..1182: mol_type = other DNA
atgcaccatcatcatcatcatggcggtagcggccatccgccgagcaataccccggagctggaagtgccgagcgttatcgcctttaaggttagtcagtacagctgccagcgcaagaccacgctgaataactacaacaaaaagtttaccgacgcgttcgagatcatggccgagaactacgaatttaaagagaacgaaatcttctgtctggaatttctgcgcgccgcgagtctgctgaaatatctgccgttcccggttacccgcatgaaagacatccaaggtctgccgtgcattggcgaccaagttcgtgacgtgatcgaggagatcatcgaagaaggcgagagcagccgtgttaaagaagttctcaatgacgagcgctacaaggcctttaagcagttcaccagcgtgttcggtgtgggcgtgaaaaccagcgaaaagtggtttcgtatgggcctccgtacggttgaagagctgaaggccgacaagagtctgaagctgagcaagatgcagaaggcgggctttctgtattacgaggatctggtgagctgcgttagtaaagcggaagccgatgccgttacgctcatcgtgaagaacacggtgagtacctttctgccggatgcgctggtgaccatcacgggcggtttccgccgtggcaaaaagatgggccacgacatcgactttctgatcacgaatccgggcccgaaagaggatgacgaactgctccacaaagtggttgatctgctcaagaagcaaggtctgctgctgtactgcgacatcatcgagagcacgttcgtggaggaacaactgccaagtcgcaaaatcgacgccatggacaacttccagaagtgcttcgccattctcaagctgtaccagccgggcgtggataacagcagctataacacgagtaagaagagtgacatggccgaggttaaggattggaaagcgatccgtgtggatctggtgatcacgccattcgagcagtacgcctatgcgctgctcggttggacgggcagccgcgaatttggtcgcgatctgcgccgctatgcgagtcatgagcgcaagatgatcctcgacaaccatggcctctacgaccgcaaaaagcgcatctttctgaaagcgggcagcgaagaagagattttcgcgcatctgggtctggattatgtggagccgtgggaacgcaacgcg

SEQ ID NO: 178 - protein, 394 aa, synthetic construct
  REGION 1..394: note = Variant of terminal deoxynucleotidyl transferase
MHHHHHHGGSGHPPSNTPELEVPSVIAFKVSQYSCQRKTTLNNYNKKFTDAFEIMAENYEFKENEIFCLEFLRAASLLKYLPFPVTRMKDIQGLPCIGDQVRDVIEEIIEEGESSRVKEVLNDERYKAFKQFTSVFGVGVKTSEKWFRMGLRTVEELKADKSLKLSKMQKAGFLYYEDLVSCVSKAEADAVTLIVKNTVSTFLPDALVTITGGFRRGKKMGHDIDFLITNPGPKEDDELLHKVVDLLKKQGLLLYCDIIESTFVEEQLPSRKIDAMDNFQKCFAILKLYQPGVDNSSYNTSKKSDMAEVKDWKAIRVDLVITPFEQYAYALLGWTGSREFGRDLRRYASHERKMILDNHGLYDRKKRIFLKAGSEEEIFAHLGLDYVEPWERNA

SEQ ID NO: 179 - DNA, 1182 bp, synthetic construct; identical to SEQ ID NO: 33
  misc_feature 1..1182: note = Variant of terminal deoxynucleotidyl transferase
  source 1..1182: mol_type = other DNA

SEQ ID NO: 180 - protein, 394 aa, synthetic construct; identical to SEQ ID NO: 34
  REGION 1..394: note = Variant of terminal deoxynucleotidyl transferase

SEQ ID NO: 181 - DNA, 1182 bp, synthetic construct
  misc_feature 1..1182: note = Variant of terminal deoxynucleotidyl transferase
  source 1..1182: mol_type = other DNA
atgcaccatcatcatcatcatggcggtagcggccatccgccgagcaataccccggagctggaagtgccgagcgttatcgcccgcaaggttagtcagtacagctgccagcgcaagaccacgctgaataactacaacaaaaagtttaccgacgcgttcgagatcatggccgagaactacgaatttaaagagaacgaaatcttctgtctggaatttctgcgcgccgcgagtctgctgaaatatctgccgttcccggttacccgcatgaaagacatccaaggtctgccgtgcattggcgaccaagttcgtgacgtgatcgaggagatcatcgaagaaggcgagagcagccgtgttaaagaagttctcaatgacgagcgctacaaggcctttaagcagttcaccagcgtgttcggtgtgggcgtgaaaaccagcgaaaagtggtttcgtatgggcctccgtacggttgaagagctgaaggccgacaagagtctgaagctgagcaagatgcagaaggcgggctttctgtattacgaggatctggtgagctgcgttagtaaagcggaagccgatgccgttacgctcatcgtgaagaacacggtgagtacctttctgccggatgcgctggtgaccatcacgggcggtttccgccgtggcaaaaagatgggccacgacatcgactttctgatcacgaatccgggcccgaaagaggatgacgaactgctccacaaagtggttgatctgctcaagaagcaaggtctgctgctgtactgcgacatcatcgagagcacgttcgtggaggaacaactgccaagtcgcaaaatcgacgccatggacaacttccagaagtgcttcgccattctcaagctgtaccagccgggcgtggataacagcagctataacacgagtaagaagagtgacatggccgaggttaaggattggaaagcgatccgtgtggatctggtgatcacgccattcgagcagtacgcctatgcgctgctcggttggacgggcagccgcgaatttggtcgcgatctgcgccgctatgcgagtcatgagcgcaagatgatcctcgacaaccatggcctctacgaccgcaaaaagcgcatctttctgaaagcgcgtagcgaagaagagattttcgcgcatctgggtctggattatgtggagccgtgggaacgcaacgcg

SEQ ID NO: 182 - protein, 394 aa, synthetic construct
  REGION 1..394: note = Variant of terminal deoxynucleotidyl transferase
MHHHHHHGGSGHPPSNTPELEVPSVIARKVSQYSCQRKTTLNNYNKKFTDAFEIMAENYEFKENEIFCLEFLRAASLLKYLPFPVTRMKDIQGLPCIGDQVRDVIEEIIEEGESSRVKEVLNDERYKAFKQFTSVFGVGVKTSEKWFRMGLRTVEELKADKSLKLSKMQKAGFLYYEDLVSCVSKAEADAVTLIVKNTVSTFLPDALVTITGGFRRGKKMGHDIDFLITNPGPKEDDELLHKVVDLLKKQGLLLYCDIIESTFVEEQLPSRKIDAMDNFQKCFAILKLYQPGVDNSSYNTSKKSDMAEVKDWKAIRVDLVITPFEQYAYALLGWTGSREFGRDLRRYASHERKMILDNHGLYDRKKRIFLKARSEEEIFAHLGLDYVEPWERNA

SEQ ID NO: 183 - DNA, 1182 bp, synthetic construct
  misc_feature 1..1182: note = Variant of terminal deoxynucleotidyl transferase
  source 1..1182: mol_type = other DNA
atgcaccatcatcatcatcatggcggtagcggccatccgccgagcaataccccggagctggaagtgccgagcgttatcgcccgcaaggttagtcagtacagctgccagcgcaagaccacgctgaataactacaacaaaaagtttaccgacgcgttcgagatcatggccgagaactacgaatttaaagggaacgaaatcttctgtctggaatttctgcgcgccgcgagtctgctgaaatatctgccgttcccggttacccgcatgaaagacatccaaggtctgccgtgcattggcgaccaagttcgtgacgtgatcgaggagatcatcgaagaaggcgagagcagccgtgttaaagaagttctcaatgacgagcgctacaaggcctttaagcagttcaccagcgtgttcggtgtgggcgtgaaaaccagcgaaaagtggtttcgtatgggcctccgtacggttgaagagctgaaggccgacaagagtctgaagctgagcaagatgcagaaggcgggctttctgtattacgaggatctggtgagctgcgttagtaaagcggaagccgatgccgttacgctcatcgtgaagaacacggtgagtacctttctgccggatgcgctggtgaccatcacgggcggtttccgccgtggcaaaaagatgggccacgacatcgactttctgatcacgaatccgggcccgaaagaggatgacgaactgctccacaaagtggttgatctgctcaagaagcaaggtctgctgctgtactgcgacatcatcgagagcacgttcgtggaggaacaactgccaagtcgcaaaatcgacgccatggacaacttccagaagtgcttcgccattctcaagctgtaccagccgggcgtggataacagcagctataacacgagtaagaagagtgacatggccgaggttaaggattggaaagcgatccgtgtggatctggtgatcacgccattcgagcagtacgcctatgcgctgctcggttggacgggcagccgcgaatttggtcgcgatctgcgccgctatgcgagtcatgagcgcaagatgatcctcgacaaccatggcctctacgaccgcaaaaagcgcatctttctgaaagcgggcagcgaagaagagattttcgcgcatctgggtctggattatgtggagccgtgggaacgcaacgcg

SEQ ID NO: 184 - protein, 394 aa, synthetic construct
  REGION 1..394: note = Variant of terminal deoxynucleotidyl transferase
MHHHHHHGGSGHPPSNTPELEVPSVIARKVSQYSCQRKTTLNNYNKKFTDAFEIMAENYEFKGNEIFCLEFLRAASLLKYLPFPVTRMKDIQGLPCIGDQVRDVIEEIIEEGESSRVKEVLNDERYKAFKQFTSVFGVGVKTSEKWFRMGLRTVEELKADKSLKLSKMQKAGFLYYEDLVSCVSKAEADAVTLIVKNTVSTFLPDALVTITGGFRRGKKMGHDIDFLITNPGPKEDDELLHKVVDLLKKQGLLLYCDIIESTFVEEQLPSRKIDAMDNFQKCFAILKLYQPGVDNSSYNTSKKSDMAEVKDWKAIRVDLVITPFEQYAYALLGWTGSREFGRDLRRYASHERKMILDNHGLYDRKKRIFLKAGSEEEIFAHLGLDYVEPWERNA

SEQ ID NO: 185 - DNA, 1182 bp, synthetic construct
  misc_feature 1..1182: note = Variant of terminal deoxynucleotidyl transferase
  source 1..1182: mol_type = other DNA
atgcaccatcatcatcatcatggcggtagcggccatccgccgagcaataccccggagctggaagtgccgagcgttatcgcccgcaaggttagtcagtacagctgccagcgcaagaccacgctgaataactacaacaaaaagtttaccgacgcgttcgagatcatggccgagaactacgaatttaaagagaacgaaatcttctgtctggaatttctgcgcgccgcgagtctgctgaaatatctgccgttcccggttacccgcatgaaagacatccaaggtctgccgtgcattggcgaccaagttcgtgacgtgatcgaggagatcatcgaagaaggcgagagcagccgtgttaaagaagttctcaatgacgagcgctacaaggcctttaagcagttcaccagcgtgttcggtgtgggcgtgaaaaccagcgaaaagtggtttcgtatgggcctccgtacggttgaagagctgaaggccgacaagagtctgaagctgagcaagatgcagaaggcgggctttctgtattacgaggatctggtgagctgcgttagtaaagcggaagccgatgccgttacgctcatcgtgaagaacacggtgagtacctttctgccggatgcgctggtgaccatcacgggcggtttccgccgtggcaaaaagatgggccacgacatcgactttctgatcacgaatccgggcccgaaagaggatgacgaactgctccacaaagtggttgatctgctcaagaagcaaggtctgctgctgtactgcgacatcatcgagagcacgttcgtggaggaacaactgccaagtcgcaaaatcgacgccatggacaacttccagaagtgcttcgccattctcaagctgtaccagccgggcgtggataacagcagctataacacgagtaagaagagtgacatggccgaggttaaggattggaaagcggttcgtgtggatctggtgatcacgccattcgagcagtacgcctatgcgctgctcggttggacgggcagccgcgaatttggtcgcgatctgcgccgctatgcgagtcatgagcgcaagatgatcctcgacaaccatggcctctacgaccgcaaaaagcgcatctttctgaaagcgggcagcgaagaagagattttcgcgcatctgggtctggattatgtggagccgtgggaacgcaacgcg

SEQ ID NO: 186 - protein, 394 aa, synthetic construct
  REGION 1..394: note = Variant of terminal deoxynucleotidyl transferase
MHHHHHHGGSGHPPSNTPELEVPSVIARKVSQYSCQRKTTLNNYNKKFTDAFEIMAENYEFKENEIFCLEFLRAASLLKYLPFPVTRMKDIQGLPCIGDQVRDVIEEIIEEGESSRVKEVLNDERYKAFKQFTSVFGVGVKTSEKWFRMGLRTVEELKADKSLKLSKMQKAGFLYYEDLVSCVSKAEADAVTLIVKNTVSTFLPDALVTITGGFRRGKKMGHDIDFLITNPGPKEDDELLHKVVDLLKKQGLLLYCDIIESTFVEEQLPSRKIDAMDNFQKCFAILKLYQPGVDNSSYNTSKKSDMAEVKDWKAVRVDLVITPFEQYAYALLGWTGSREFGRDLRRYASHERKMILDNHGLYDRKKRIFLKAGSEEEIFAHLGLDYVEPWERNA

SEQ ID NO: 187 - DNA, 1182 bp, synthetic construct
  misc_feature 1..1182: note = Variant of terminal deoxynucleotidyl transferase
  source 1..1182: mol_type = other DNA
atgcaccatcatcatcatcatggcggtagcggccatccgccgagcaataccccggagctggaagtgccgagcgttatcgcccgcaaggttagtcagtacagctgccagcgcaagaccacgctgaataactacaacaaaaagtttaccgacgcgttcgagatcatggccgagaactacgaatttaaagagaacgaaatcgattgtctggaatttctgcgcgccgcgagtctgctgaaatatctgccgttcccggttacccgcatgaaagacatccaaggtctgccgtgcattggcgaccaagttcgtgacgtgatcgaggagatcatcgaagaaggcgagagcagccgtgttaaagaagttctcaatgacgagcgctacaaggcctttaagcagttcaccagcgtgttcggtgtgggcgtgaaaaccagcgaaaagtggtttcgtatgggcctccgtacggttgaagagctgaaggccgacaagagtctgaagctgagcaagatgcagaaggcgggctttctgtattacgaggatctggtgagctgcgttagtaaagcggaagccgatgccgttacgctcatcgtgaagaacacggtgagtacctttctgccggatgcgctggtgaccatcacgggcggtttccgccgtggcaaaaagatgggccacgacatcgactttctgatcacgaatccgggcccgaaagaggatgacgaactgctccacaaagtggttgatctgctcaagaagcaaggtctgctgctgtactgcgacatcatcgagagcacgttcgtggaggaacaactgccaagtcgcaaaatcgacgccatggacaacttccagaagtgcttcgccattctcaagctgtaccagccgggcgtggataacagcagctataacacgagtaagaagagtgacatggccgaggttaaggattggaaagcgatccgtgtggatctggtgatcacgccattcgagcagtacgcctatgcgctgctcggttggacgggcagccgcgaatttggtcgcgatctgcgccgctatgcgagtcatgagcgcaagatgatcctcgacaaccatggcctctacgaccgcaaaaagcgcatctttctgaaagcgggcagcgaagaagagattttcgcgcatctgggtctggattatgtggagccgtgggaacgcaacgcg

SEQ ID NO: 188 - protein, 394 aa, synthetic construct
  REGION 1..394: note = Variant of terminal deoxynucleotidyl transferase
MHHHHHHGGSGHPPSNTPELEVPSVIARKVSQYSCQRKTTLNNYNKKFTDAFEIMAENYEFKENEIDCLEFLRAASLLKYLPFPVTRMKDIQGLPCIGDQVRDVIEEIIEEGESSRVKEVLNDERYKAFKQFTSVFGVGVKTSEKWFRMGLRTVEELKADKSLKLSKMQKAGFLYYEDLVSCVSKAEADAVTLIVKNTVSTFLPDALVTITGGFRRGKKMGHDIDFLITNPGPKEDDELLHKVVDLLKKQGLLLYCDIIESTFVEEQLPSRKIDAMDNFQKCFAILKLYQPGVDNSSYNTSKKSDMAEVKDWKAIRVDLVITPFEQYAYALLGWTGSREFGRDLRRYASHERKMILDNHGLYDRKKRIFLKAGSEEEIFAHLGLDYVEPWERNA

SEQ ID NO: 189 - DNA, 1182 bp, synthetic construct
  misc_feature 1..1182: note = Variant of terminal deoxynucleotidyl transferase
  source 1..1182: mol_type = other DNA
atgcaccatcatcatcatcatggcggtcagggccatccgccgagcaataccccggagctggaagtgccgagcgttatcgcccgcaaggttagtcagtacagctgccagcgcaagaccacgctgaataactacaacaaaaagtttaccgacgcgttcgagatcatggccgagaactacgaatttaaagagaacgaaatcttctgtctggaatttctgcgcgccgcgagtctgctgaaatatctgccgttcccggttacccgcatgaaagacatccaaggtctgccgtgcattggcgaccaagttcgtgacgtgatcgaggagatcatcgaagaaggcgagagcagccgtgttaaagaagttctcaatgacgagcgctacaaggcctttaagcagttcaccagcgtgttcggtgtgggcgtgaaaaccagcgaaaagtggtttcgtatgggcctccgtacggttgaagagctgaaggccgacaagagtctgaagctgagcaagatgcagaaggcgggctttctgtattacgaggatctggtgagctgcgttagtaaagcggaagccgatgccgttacgctcatcgtgaagaacacggtgagtacctttctgccggatgcgctggtgaccatcacgggcggtttccgccgtggcaaaaagatgggccacgacatcgactttctgatcacgaatccgggcccgaaagaggatgacgaactgctccacaaagtggttgatctgctcaagaagcaaggtctgctgctgtactgcgacatcatcgagagcacgttcgtggaggaacaactgccaagtcgcaaaatcgacgccatggacaacttccagaagtgcttcgccattctcaagctgtaccagccgggcgtggataacagcagctataacacgagtaagaagagtgacatggccgaggttaaggattggaaagcgatccgtgtggatctggtgatcacgccattcgagcagtacgcctatgcgctgctcggttggacgggcagccgcgaatttggtcgcgatctgcgccgctatgcgagtcatgagcgcaagatgatcctcgacaaccatggcctctacgaccgcaaaaagcgcatctttctgaaagcgggcagcgaagaagagattttcgcgcatctgggtctggattatgtggagccgtgggaacgcaacgcg

SEQ ID NO: 190 - protein, 394 aa, synthetic construct
  REGION 1..394: note = Variant of terminal deoxynucleotidyl transferase
MHHHHHHGGQGHPPSNTPELEVPSVIARKVSQYSCQRKTTLNNYNKKFTDAFEIMAENYEFKENEIFCLEFLRAASLLKYLPFPVTRMKDIQGLPCIGDQVRDVIEEIIEEGESSRVKEVLNDERYKAFKQFTSVFGVGVKTSEKWFRMGLRTVEELKADKSLKLSKMQKAGFLYYEDLVSCVSKAEADAVTLIVKNTVSTFLPDALVTITGGFRRGKKMGHDIDFLITNPGPKEDDELLHKVVDLLKKQGLLLYCDIIESTFVEEQLPSRKIDAMDNFQKCFAILKLYQPGVDNSSYNTSKKSDMAEVKDWKAIRVDLVITPFEQYAYALLGWTGSREFGRDLRRYASHERKMILDNHGLYDRKKRIFLKAGSEEEIFAHLGLDYVEPWERNA

SEQ ID NO: 191 - DNA, 1182 bp, synthetic construct
  misc_feature 1..1182: note = Variant of terminal deoxynucleotidyl transferase
  source 1..1182: mol_type = other DNA
atgcaccatcatcatcatcatggcggtagcggccatccgccgagcaataccccggagctggaagtgccgagcgttatcgcccgcaaggttagtcagtacagctgccagcgcaagaccacgctgaataactacaacaaaaagtttaccgacgcgttcgagatcatggccgagaactacgaatttaaagagaacgaaatcttctgtctggaatttctgcgcgccgcgagtctgctgaaatatctgccgttcccggttacccgcatgaaagacatccaaggtctgccgtgcattggcgaccaagttcgtgacgtgatcgaggagatcatcgaagaaggcgagagcagccgtgttaaagaagttctcaatgacgagcgctacaaggcctttaagcagttcaccagcgtgttcggtgtgggcgtgaaaaccagcgaaaagtggtttcgtatgggcctccgtacggttgaagagctgaaggccgacaagagtctgaagctgagcaagatgcagaaggcgggctttctgtattacgaggatctggtgagctgcgttagtaaagcggaagccgatgccgttacgctcatcgtgaagaacacggtgagtacctttctgccggatgcgctggtgaccatcacgggcggtttccgccgtggcaaaaagatgggccacgacatcgactttctgatcacgaatccgggcccgaaagaggatgacgaactgctccacaaagtggttgatctgctcaagaagcaaggtctgctgctgtactgcgacatcatcgagagcacgttcgtggaggaacaactgccaagtcgcaaaatcgacgccatggacaacttccagaagtgcttcgccattctcaagctgtaccagccgggcgtggataacagcacgtataacacgagtaagaagagtgacatggccgaggttaaggattggaaagcgatccgtgtggatctggtgatcacgccattcgagcagtacgcctatgcgctgctcggttggacgggcagccgcgaatttggtcgcgatctgcgccgctatgcgagtcatgagcgcaagatgatcctcgacaaccatggcctctacgaccgcaaaaagcgcatctttctgaaagcgggcagcgaagaagagattttcgcgcatctgggtctggattatgtggagccgtgggaacgcaacgcg

SEQ ID NO: 192 - protein, 394 aa, synthetic construct
  REGION 1..394: note = Variant of terminal deoxynucleotidyl transferase
MHHHHHHGGSGHPPSNTPELEVPSVIARKVSQYSCQRKTTLNNYNKKFTDAFEIMAENYEFKENEIFCLEFLRAASLLKYLPFPVTRMKDIQGLPCIGDQVRDVIEEIIEEGESSRVKEVLNDERYKAFKQFTSVFGVGVKTSEKWFRMGLRTVEELKADKSLKLSKMQKAGFLYYEDLVSCVSKAEADAVTLIVKNTVSTFLPDALVTITGGFRRGKKMGHDIDFLITNPGPKEDDELLHKVVDLLKKQGLLLYCDIIESTFVEEQLPSRKIDAMDNFQKCFAILKLYQPGVDNSTYNTSKKSDMAEVKDWKAIRVDLVITPFEQYAYALLGWTGSREFGRDLRRYASHERKMILDNHGLYDRKKRIFLKAGSEEEIFAHLGLDYVEPWERNA

SEQ ID NO: 193 - DNA, 1182 bp, synthetic construct
  misc_feature 1..1182: note = Variant of terminal deoxynucleotidyl transferase
  source 1..1182: mol_type = other DNA
atgcaccatcatcatcatcatggcggtagcggccatccgccgagcaataccccggagctggaagtgccgagcgttatcgcccgcaaggttagtcagtacagctgccagcgcaagaccacgctgaataactacaacaaaaagtttaccgacgcgttcgagatcatggccgagaactacgaatttaaagagaacgaagttttctgtctggaatttctgcgcgccgcgagtctgctgaaatatctgccgttcccggttacccgcatgaaagacatccaaggtctgccgtgcattggcgaccaagttcgtgacgtgatcgaggagatcatcgaagaaggcgagagcagccgtgttaaagaagttctcaatgacgagcgctacaaggcctttaagcagttcaccagcgtgttcggtgtgggcgtgaaaaccagcgaaaagtggtttcgtatgggcctccgtacggttgaagagctgaaggccgacaagagtctgaagctgagcaagatgcagaaggcgggctttctgtattacgaggatctggtgagctgcgttagtaaagcggaagccgatgccgttacgctcatcgtgaagaacacggtgagtacctttctgccggatgcgctggtgaccatcacgggcggtttccgccgtggcaaaaagatgggccacgacatcgactttctgatcacgaatccgggcccgaaagaggatgacgaactgctccacaaagtggttgatctgctcaagaagcaaggtctgctgctgtactgcgacatcatcgagagcacgttcgtggaggaacaactgccaagtcgcaaaatcgacgccatggacaacttccagaagtgcttcgccattctcaagctgtaccagccgggcgtggataacagcagctataacacgagtaagaagagtgacatggccgaggttaaggattggaaagcgatccgtgtggatctggtgatcacgccattcgagcagtacgcctatgcgctgctcggttggacgggcagccgcgaatttggtcgcgatctgcgccgctatgcgagtcatgagcgcaagatgatcctcgacaaccatggcctctacgaccgcaaaaagcgcatctttctgaaagcgggcagcgaagaagagattttcgcgcatctgggtctggattatgtggagccgtgggaacgcaacgcg

SEQ ID NO: 194 - protein, 394 aa, synthetic construct
  REGION 1..394: note = Variant of terminal deoxynucleotidyl transferase
MHHHHHHGGSGHPPSNTPELEVPSVIARKVSQYSCQRKTTLNNYNKKFTDAFEIMAENYEFKENEVFCLEFLRAASLLKYLPFPVTRMKDIQGLPCIGDQVRDVIEEIIEEGESSRVKEVLNDERYKAFKQFTSVFGVGVKTSEKWFRMGLRTVEELKADKSLKLSKMQKAGFLYYEDLVSCVSKAEADAVTLIVKNTVSTFLPDALVTITGGFRRGKKMGHDIDFLITNPGPKEDDELLHKVVDLLKKQGLLLYCDIIESTFVEEQLPSRKIDAMDNFQKCFAILKLYQPGVDNSSYNTSKKSDMAEVKDWKAIRVDLVITPFEQYAYALLGWTGSREFGRDLRRYASHERKMILDNHGLYDRKKRIFLKAGSEEEIFAHLGLDYVEPWERNA

SEQ ID NO: 195 - DNA, 1182 bp, synthetic construct; identical to SEQ ID NO: 43
  misc_feature 1..1182: note = Variant of terminal deoxynucleotidyl transferase
  source 1..1182: mol_type = other DNA

SEQ ID NO: 196 - protein, 394 aa, synthetic construct; identical to SEQ ID NO: 44
  REGION 1..394: note = Variant of terminal deoxynucleotidyl transferase

SEQ ID NO: 197 - DNA, 1182 bp, synthetic construct
  misc_feature 1..1182: note = Variant of terminal deoxynucleotidyl transferase
  source 1..1182: mol_type = other DNA
atgcaccatcatcatcatcatggcggtagcggccatccgccgagcaataccccggagctggaagtgccgagcgttatcgcccgcaaggttagtcagtacagctgccagcgcaagaccacgctgaataactacaacaaaaagtttaccgacgcgttcgagatcatggccgagaactacgaatttaaagagaacgaaatcgcttgtctggaatttctgcgcgccgcgagtctgctgaaatatctgccgttcccggttacccgcatgaaagacatccaaggtctgccgtgcattggcgaccaagttcgtgacgtgatcgaggagatcatcgaagaaggcgagagcagccgtgttaaagaagttctcaatgacgagcgctacaaggcctttaagcagttcaccagcgtgttcggtgtgggcgtgaaaaccagcgaaaagtggtttcgtatgggcctccgtacggttgaagagctgaaggccgacaagagtctgaagctgagcaagatgcagaaggcgggctttctgtattacgaggatctggtgagctgcgttagtaaagcggaagccgatgccgttacgctcatcgtgaagaacacggtgagtacctttctgccggatgcgctggtgaccatcacgggcggtttccgccgtggcaaaaagatgggccacgacatcgactttctgatcacgaatccgggcccgaaagaggatgacgaactgctccacaaagtggttgatctgctcaagaagcaaggtctgctgctgtactgcgacatcatcgagagcacgttcgtggaggaacaactgccaagtcgcaaaatcgacgccatggacaacttccagaagtgcttcgccattctcaagctgtaccagccgggcgtggataacagcagctataacacgagtaagaagagtgacatggccgaggttaaggattggaaagcgatccgtgtggatctggtgatcacgccattcgagcagtacgcctatgcgctgctcggttggacgggcagccgcgaatttggtcgcgatctgcgccgctatgcgagtcatgagcgcaagatgatcctcgacaaccatggcctctacgaccgcaaaaagcgcatctttctgaaagcgggcagcgaagaagagattttcgcgcatctgggtctggattatgtggagccgtgggaacgcaacgcg

SEQ ID NO: 198 - protein, 394 aa, synthetic construct
  REGION 1..394: note = Variant of terminal deoxynucleotidyl transferase
MHHHHHHGGSGHPPSNTPELEVPSVIARKVSQYSCQRKTTLNNYNKKFTDAFEIMAENYEFKENEIACLEFLRAASLLKYLPFPVTRMKDIQGLPCIGDQVRDVIEEIIEEGESSRVKEVLNDERYKAFKQFTSVFGVGVKTSEKWFRMGLRTVEELKADKSLKLSKMQKAGFLYYEDLVSCVSKAEADAVTLIVKNTVSTFLPDALVTITGGFRRGKKMGHDIDFLITNPGPKEDDELLHKVVDLLKKQGLLLYCDIIESTFVEEQLPSRKIDAMDNFQKCFAILKLYQPGVDNSSYNTSKKSDMAEVKDWKAIRVDLVITPFEQYAYALLGWTGSREFGRDLRRYASHERKMILDNHGLYDRKKRIFLKAGSEEEIFAHLGLDYVEPWERNA

SEQ ID NO: 199 - DNA, 1182 bp, synthetic construct
  misc_feature 1..1182: note = Variant of terminal deoxynucleotidyl transferase
  source 1..1182: mol_type = other DNA
atgcaccatcatcatcatcatggcggtagcggccatccgccgagcaataccccggagctggaagtgccgagcgttatcgcccgcaaggttagtcagtacagctgccagcgcaagaccacgctgaataactacaacaaaaagtttaccgacgcgttcgagatcatggccgagaactacgaatttaaagagaacgaaatcttccgtctggaatttctgcgcgccgcgagtctgctgaaatatctgccgttcccggttacccgcatgaaagacatccaaggtctgccgtgcattggcgaccaagttcgtgacgtgatcgaggagatcatcgaagaaggcgagagcagccgtgttcatgaagttctcaatgacgagcgctacaaggcctttaagcagttcaccagcgtgttcggtgtgggcgtgaaaaccagcgaaaagtggtttcgtatgggcctccgtacggttgaagagctgaaggccgacaagagtctgaagctgagcaagatgcagaaggcgggctttctgtattacgaggatctggtgagctgcgttagtaaagcggaagccgatgccgttacgctcatcgtgaagaacacggtgagtacctttctgccggatgcgctggtgaccatcacgggcggtttccgccgtggcaaaaagatgggccacgacatcgactttctgatcacgaatccgggcccgaaagaggatgacgaactgctccacaaagtggttgatctgctcaagaagcaaggtctgctgctgtactgcgacatcatcgagagcacgttcgtggaggaacaactgccaagtcgcaaaatcgacgccatggacaacttccagaagtgcttcgccattctcaagctgtaccagccgggcgtggataacagcagctataacacgagtaagaagagtgacatggccgaggttaaggattggaaagcgatccgtgtggatctggtgatcacgccattcgagcagtacgcctatgcgctgctcggttggacgggcagccgcgaatttggtcgcgatctgcgccgctatgcgagtcatgagcgcaagatgatcctcgacaaccatggcctctacgaccgcaaaaagcgcatctttctgaaagcgggcagcgaagaagagattttcgcgcatctgggtctggattatgtggagccgtgggaacgcaacgcg

SEQ ID NO: 200 - protein, 394 aa, synthetic construct
  REGION 1..394: note = Variant of terminal deoxynucleotidyl transferase
MHHHHHHGGSGHPPSNTPELEVPSVIARKVSQYSCQRKTTLNNYNKKFTDAFEIMAENYEFKENEIFRLEFLRAASLLKYLPFPVTRMKDIQGLPCIGDQVRDVIEEIIEEGESSRVHEVLNDERYKAFKQFTSVFGVGVKTSEKWFRMGLRTVEELKADKSLKLSKMQKAGFLYYEDLVSCVSKAEADAVTLIVKNTVSTFLPDALVTITGGFRRGKKMGHDIDFLITNPGPKEDDELLHKVVDLLKKQGLLLYCDIIESTFVEEQLPSRKIDAMDNFQKCFAILKLYQPGVDNSSYNTSKKSDMAEVKDWKAIRVDLVITPFEQYAYALLGWTGSREFGRDLRRYASHERKMILDNHGLYDRKKRIFLKAGSEEEIFAHLGLDYVEPWERNA

SEQ ID NO: 201 - DNA, 1182 bp, synthetic construct
  misc_feature 1..1182: note = Variant of terminal deoxynucleotidyl transferase
  source 1..1182: mol_type = other DNA
atgcaccatcatcatcatcatggcggtagcggccatccgccgagcaataccccggagctggaagtgccgagcgttatcgcccgcaaggttagtcagtacagctgccagcgcaagaccacgctgaataactacaacaaaaagtttaccgacgcgttcgagatcatggccgagaactacgaatttatggagaacgaaatcttctgtctggaatttctgcgcgccgcgagtctgctgaaatatctgccgttcccggttacccgcatgaaagacatccaaggtctgccgtgcattggcgaccaagttcgtgacgtgatcgaggagatcatcgaagaaggcgagagcagccgtgttaaagaagttctcaatgacgagcgctacaaggcctttaagcagttcaccagcgtgttcggtgtgggcgtgaaaaccagcgaaaagtggtttcgtatgggcctccgtacggttgaagagctgaaggccgacaagagtctgaagctgagcaagatgcagaaggcgggctttctgtattacgaggatctggtgagctgcgttagtaaagcggaagccgatgccgttacgctcatcgtgaagaacacggtgagtacctttctgccggatgcgctggtgaccatcacgggcggtttccgccgtggcaaaaagatgggccacgacatcgactttctgatcacgaatccgggcccgaaagaggatgacgaactgctccacaaagtggttgatctgctcaagaagcaaggtctgctgctgtactgcgacatcatcgagagcacgttcgtggaggaacaactgccaagtcgcaaaatcgacgccatggacaacttccagaagtgcttcgccattctcaagctgtaccagccgggcgtggataacagcagctataacacgagtaagaagagtgacatggccgaggttaaggattggaaagcgatccgtgtggatctggtgatcacgccattcgagcagtacgcctatgcgctgctcggttggacgggcagccgcgaatttggtcgcgatctgcgccgctatgcgagtcatgagcgcaagatgatcctcgacaaccatggcctctacgaccgcaaaaagcgcatctttctgaaagcgggcagcgaagaagagattttcgcgcatctgggtctggattatgtggagccgtgggaacgcaacgcg

SEQ ID NO: 202 - protein, 394 aa, synthetic construct
  REGION 1..394: note = Variant of terminal deoxynucleotidyl transferase
MHHHHHHGGSGHPPSNTPELEVPSVIARKVSQYSCQRKTTLNNYNKKFTDAFEIMAENYEFMENEIFCLEFLRAASLLKYLPFPVTRMKDIQGLPCIGDQVRDVIEEIIEEGESSRVKEVLNDERYKAFKQFTSVFGVGVKTSEKWFRMGLRTVEELKADKSLKLSKMQKAGFLYYEDLVSCVSKAEADAVTLIVKNTVSTFLPDALVTITGGFRRGKKMGHDIDFLITNPGPKEDDELLHKVVDLLKKQGLLLYCDIIESTFVEEQLPSRKIDAMDNFQKCFAILKLYQPGVDNSSYNTSKKSDMAEVKDWKAIRVDLVITPFEQYAYALLGWTGSREFGRDLRRYASHERKMILDNHGLYDRKKRIFLKAGSEEEIFAHLGLDYVEPWERNA

SEQ ID NO: 203 - DNA, 1182 bp, synthetic construct
  misc_feature 1..1182: note = Variant of terminal deoxynucleotidyl transferase
  source 1..1182: mol_type = other DNA
atgcaccatcatcatcatcatggcggtagcggccatccgccgagcaataccccggagctggaagtgccgagcgttatcgcccgcaaggttagtcagtacagctgccagcgcaagaccacgctgaataactacaacaaaaagtttaccgacgcgttcgagatcatggccgagaactacgaatttaaagagaacgaaatcttctgtctggaatttctgcgcgccgcgagtctgctgaaatatctgccgttcccggttacccgcatgaaagacatccaaggtctgccgtgcattggcgaccaagttcgtgacgtgatcgaggagatcatcgaagaaggcgagagcagccgtgttaaagaagttctcaatgacgagcgctacaaggcctttaagcagttcaccagcgtgttcggtgtgggcgtgaaaaccagcgaaaagtggtttcgtatgggcctccgtacggttgaagagctgaaggccgacaagagtctgaagctgagcaagatgcagaaggcgggctttctgtattacgaggatctggtgagctgcgttagtaaagcggaagccgatgccgttacgctcatcgtgaagaacacggtgagtacctttctgccggatgcgctggtgaccatcacgggcggtttccgccgtggcaaaaagatgggccacgacatcgactttctgatcacgaatccgggcccgaaagaggatgacgaactgctccacaaagtggttgatctgctcaagaagcaaggtctgctgctgtactgcgacatcatcgagagcacgttcgtggaggaacaactgccaagtcgcaaaatcgacgccatggacaacttccagaagtgcttcgccattctcaagctgtaccagccgggcgtggatgtgagcagctataacacgagtaagaagagtgacatggccgaggttaaggattggaaagcgatccgtgtggatctggtgatcacgccattcgagcagtacgcctatgcgctgctcggttggacgggcagccgcgaatttggtcgcgatctgcgccgctatgcgagtcatgagcgcaagatgatcctcgacaaccatggcctctacgaccgcaaaaagcgcatctttctgaaagcgggcagcgaagaagagattttcgcgcatctgggtctggattatgtggagccgtgggaacgcaacgcg

SEQ ID NO: 204 - protein, 394 aa, synthetic construct; identical to SEQ ID NO: 150
  REGION 1..394: note = Variant of terminal deoxynucleotidyl transferase

SEQ ID NO: 205 - DNA, 1182 bp, synthetic construct
  misc_feature 1..1182: note = Variant of terminal deoxynucleotidyl transferase
  source 1..1182: mol_type = other DNA
atgcaccatcatcatcatcatggcggtagcggccatccgccgagcaataccccggagctggaagtgccgagcgttatcgcccgcaaggttagtcagtacagctgccagcgcaagaccacgctgaataactacaacaaaaagtttaccgacgcgttcgagatcatggccgagaactacgaatttaaagagaacgaaatcttctgtctggaatttctgcgcgccgcgagtctgctgaaatatctgccgttcccggttacccgcatgaaagacatccaaggtctgccgtgcattggcgaccaagttcgtgacgtgatcgaggagatcatcgaagaaggcgagagcagccgtgttaaagaagttctcaatgacgagcgctacaaggcctttaagcagttcaccagcgtgttcggtgtgggcgtgaaaaccagcgaaaagtggtttcgtatgggcctccgtacggttgaagagctgaaggccgacaagagtctgaagctgagcaagatgcagaaggcgggctttctgtattacgaggatctggtgagctgcgttagtaaagcggaagccgatgccgttacgctcatcgtgaagaacacggtgagtacctttctgccggatgcgctggtgaccatcacgggcggtttccgccgtggcaaacctatgggccacgacatcgactttctgatcacgaatccgggcccgaaagaggatgacgaactgctccacaaagtggttgatctgctcaagaagcaaggtctgctgctgtactgcgacatcatcgagagcacgttcgtggaggaacaactgccaagtcgcaaaatcgacgccatggacaacttccagaagtgcttcgccattctcaagctgtaccagccgggcgtggataacagcagctataacacgagtaagaagagtgacatggccgaggttaaggattggaaagcgatccgtgtggatctggtgatcacgccattcgagcagtacgcctatgcgctgctcggttggacgggcagccgcgaatttggtcgcgatctgcgccgctatgcgagtcatgagcgcaagatgatcctcgacaaccatggcctctacgaccgcaaaaagcgcatctttctgaaagcgggcagcgaagaagagattttcgcgcatctgggtctggattatgtggagccgtgggaacgcaacgcg

SEQ ID NO: 206 - protein, 394 aa, synthetic construct
  REGION 1..394: note = Variant of terminal deoxynucleotidyl transferase
MHHHHHHGGSGHPPSNTPELEVPSVIARKVSQYSCQRKTTLNNYNKKFTDAFEIMAENYEFKENEIFCLEFLRAASLLKYLPFPVTRMKDIQGLPCIGDQVRDVIEEIIEEGESSRVKEVLNDERYKAFKQFTSVFGVGVKTSEKWFRMGLRTVEELKADKSLKLSKMQKAGFLYYEDLVSCVSKAEADAVTLIVKNTVSTFLPDALVTITGGFRRGKPMGHDIDFLITNPGPKEDDELLHKVVDLLKKQGLLLYCDIIESTFVEEQLPSRKIDAMDNFQKCFAILKLYQPGVDNSSYNTSKKSDMAEVKDWKAIRVDLVITPFEQYAYALLGWTGSREFGRDLRRYASHERKMILDNHGLYDRKKRIFLKAGSEEEIFAHLGLDYVEPWERNA

SEQ ID NO: 207 - DNA, 1182 bp, synthetic construct
  misc_feature 1..1182: note = Variant of terminal deoxynucleotidyl transferase
  source 1..1182: mol_type = other DNA
atgcaccatcatcatcatcatggcggtagcggccatccgccgagcaataccccggagctggaagtgccgagcgttatcgcctctaaggttagtcagtacagctgccagcgcaagaccacgctgaataactacaacaaaaagtttaccgacgcgttcgagatcatggccgagaactacgaatttaaagagaacgaaatcttctgtctggaatttctgcgcgccgcgagtctgctgaaatatctgccgttcccggttacccgcatgaaagacatccaaggtctgccgtgcattggcgaccaagttcgtgacgtgatcgaggagatcatcgaagaaggcgagagcagccgtgttaaagaagttctcaatgacgagcgctacaaggcctttaagcagttcaccagcgtgttcggtgtgggcgtgaaaaccagcgaaaagtggtttcgtatgggcctccgtacggttgaagagctgaaggccgacaagagtctgaagctgagcaagatgcagaaggcgggctttctgtattacgaggatctggtgagctgcgttagtaaagcggaagccgatgccgttacgctcatcgtgaagaacacggtgagtacctttctgccggatgcgctggtgaccatcacgggcggtttccgccgtggcaaaaagatgggccacgacatcgactttctgatcacgaatccgggcccgaaagaggatgacgaactgctccacaaagtggttgatctgctcaagaagcaaggtctgctgctgtactgcgacatcatcgagagcacgttcgtggaggaacaactgccaagtcgcaaaatcgacgccatggacaacttccagaagtgcttcgccattctcaagctgtaccagccgggcgtggataacagcagctataacacgagtaagaagagtgacatggccgaggttaaggattggaaagcgatccgtgtggatctggtgatcacgccattcgagcagtacgcctatgcgctgctcggttggacgggcagccgcgaatttggtcgcgatctgcgccgctatgcgagtcatgagcgcaagatgatcctcgacaaccatggcctctacgaccgcaaaaagcgcatctttctgaaagcgggcagcgaagaagagattttcgcgcatctgggtctggattatgtggagccgtgggaacgcaacgcg

SEQ ID NO: 208 - protein, 394 aa, synthetic construct
  REGION 1..394: note = Variant of terminal deoxynucleotidyl transferase
MHHHHHHGGSGHPPSNTPELEVPSVIASKVSQYSCQRKTTLNNYNKKFTDAFEIMAENYEFKENEIFCLEFLRAASLLKYLPFPVTRMKDIQGLPCIGDQVRDVIEEIIEEGESSRVKEVLNDERYKAFKQFTSVFGVGVKTSEKWFRMGLRTVEELKADKSLKLSKMQKAGFLYYEDLVSCVSKAEADAVTLIVKNTVSTFLPDALVTITGGFRRGKKMGHDIDFLITNPGPKEDDELLHKVVDLLKKQGLLLYCDIIESTFVEEQLPSRKIDAMDNFQKCFAILKLYQPGVDNSSYNTSKKSDMAEVKDWKAIRVDLVITPFEQYAYALLGWTGSREFGRDLRRYASHERKMILDNHGLYDRKKRIFLKAGSEEEIFAHLGLDYVEPWERNA

SEQ ID NO: 209 - DNA, 1182 bp, synthetic construct
  misc_feature 1..1182: note = Variant of terminal deoxynucleotidyl transferase
  source 1..1182: mol_type = other DNA
atgcaccatcatcatcatcatggcggtagcggccatccgccgagcaataccccggagctggaagtgccgagcgttatcgcccgcaaggttagtcagtacagctgccagcgcaagaccacgctgaataactacaacaaaaagtttaccgacgcgttcgagatcatggccgagaactacgaatttaaagagaacgaaatcttctgtctggaatttctgcgcgccgcgagtctgctgaaatatctgccgttcccggttacccgcatgaaagacatccaaggtctgccgtgcattggcgaccaagttcgtgacgtgatcgaggagatcatcgaagaaggcgagagcagccgtgttaaagaagttctcaatgacgagcgctacaaggcctttaagcagttcaccagcgtgttcggtgtgggcgtgaaaaccagcgaaaagtggtttcgtatgggcctccgtacggttgaagagctgaaggccacgaagagtctgaagctgagcaagatgcagaaggcgggctttctgtattacgaggatctggtgagctgcgttagtaaagcggaagccgatgccgttacgctcatcgtgaagaacacggtgagtacctttctgccggatgcgctggtgaccatcacgggcggtttccgccgtggcaaaaagatgggccacgacatcgactttctgatcacgaatccgggcccgaaagaggatgacgaactgctccacaaagtggttgatctgctcaagaagcaaggtctgctgctgtactgcgacatcatcgagagcacgttcgtggaggaacaactgccaagtcgcaaaatcgacgccatggacaacttccagaagtgcttcgccattctcaagctgtaccagccgggcgtggataacagcagctataacacgagtaagaagagtgacatggccgaggttaaggattggaaagcgatccgtgtggatctggtgatcacgccattcgagcagtacgcctatgcgctgctcggttggacgggcagccgcgaatttggtcgcgatctgcgccgctatgcgagtcatgagcgcaagatgatcctcgacaaccatggcctctacgaccgcaaaaagcgcatctttctgaaagcgggcagcgaagaagagattttcgcgcatctgggtctggattatgtggagccgtgggaacgcaacgcg

SEQ ID NO: 210 - protein, 394 aa, synthetic construct
  REGION 1..394: note = Variant of terminal deoxynucleotidyl transferase
MHHHHHHGGSGHPPSNTPELEVPSVIARKVSQYSCQRKTTLNNYNKKFTDAFEIMAENYEFKENEIFCLEFLRAASLLKYLPFPVTRMKDIQGLPCIGDQVRDVIEEIIEEGESSRVKEVLNDERYKAFKQFTSVFGVGVKTSEKWFRMGLRTVEELKATKSLKLSKMQKAGFLYYEDLVSCVSKAEADAVTLIVKNTVSTFLPDALVTITGGFRRGKKMGHDIDFLITNPGPKEDDELLHKVVDLLKKQGLLLYCDIIESTFVEEQLPSRKIDAMDNFQKCFAILKLYQPGVDNSSYNTSKKSDMAEVKDWKAIRVDLVITPFEQYAYALLGWTGSREFGRDLRRYASHERKMILDNHGLYDRKKRIFLKAGSEEEIFAHLGLDYVEPWERNA

SEQ ID NO: 211 - DNA, 1182 bp, synthetic construct
  misc_feature 1..1182: note = Variant of terminal deoxynucleotidyl transferase
  source 1..1182: mol_type = other DNA
atgcaccatcatcatcatcatggcggtagcggccatccgccgagcaataccccggagctggaagtgccgagcgttatcgcccgcaaggttagtcagtacagctgccagcgcaagaccacgctgaataactacaacaaaaagtttaccgacgcgttcgagatcatggccgagaactacgaatttaaagagaacgaaatcttctgtctggaatttctgcgcgccgcgagtctgctgaaatatctgccgttcccggttacccgcatgaaagacatccaaggtctgccgtgcattggcgaccaagttcgtgacgtgatccgtgagatcatcgaagaaggcgagagcagccgtgttaaagaagttctcaatgacgagcgctacaaggcctttaagcagttcaccagcgtgttcggtgtgggcgtgaaaaccagcgaaaagtggtttcgtatgggcctccgtacggttgaagagctgaaggccgacaagagtctgaagctgagcaagatgcagaaggcgggctttctgtattacgaggatctggtgagctgcgttagtaaagcggaagccgatgccgttacgctcatcgtgaagaacacggtgagtacctttctgccggatgcgctggtgaccatcacgggcggtttccgccgtggcaaaaagatgggccacgacatcgactttctgatcacgaatccgggcccgaaagaggatgacgaactgctccacaaagtggttgatctgctcaagaagcaaggtctgctgctgtactgcgacatcatcgagagcacgttcgtggaggaacaactgccaagtcgcaaaatcgacgccatggacaacttccagaagtgcttcgccattctcaagctgtaccagccgggcgtggataacagcagctataacacgagtaagaagagtgacatggccgaggttaaggattggaaagcgatccgtgtggatctggtgatcacgccattcgagcagtacgcctatgcgctgctcggttggacgggcagccgcgaatttggtcgcgatctgcgccgctatgcgagtcatgagcgcaagatgatcctcgacaaccatggcctctacgaccgcaaaaagcgcatctttctgaaagcgggcagcgaagaagagattttcgcgcatctgggtctggattatgtggagccgtgggaacgcaacgcg

SEQ ID NO: 212 - protein, 394 aa, synthetic construct
  REGION 1..394: note = Variant of terminal deoxynucleotidyl transferase
MHHHHHHGGSGHPPSNTPELEVPSVIARKVSQYSCQRKTTLNNYNKKFTDAFEIMAENYEFKENEIFCLEFLRAASLLKYLPFPVTRMKDIQGLPCIGDQVRDVIREIIEEGESSRVKEVLNDERYKAFKQFTSVFGVGVKTSEKWFRMGLRTVEELKADKSLKLSKMQKAGFLYYEDLVSCVSKAEADAVTLIVKNTVSTFLPDALVTITGGFRRGKKMGHDIDFLITNPGPKEDDELLHKVVDLLKKQGLLLYCDIIESTFVEEQLPSRKIDAMDNFQKCFAILKLYQPGVDNSSYNTSKKSDMAEVKDWKAIRVDLVITPFEQYAYALLGWTGSREFGRDLRRYASHERKMILDNHGLYDRKKRIFLKAGSEEEIFAHLGLDYVEPWERNA

SEQ ID NO: 213 - DNA, 1182 bp, synthetic construct
  misc_feature 1..1182: note = Variant of terminal deoxynucleotidyl transferase
  source 1..1182: mol_type = other DNA
atgcaccatcatcatcatcatggcggtagcggccatccgccgagcaataccccggagctggaagtgccgagcgttatcgcccgcaaggttagtcagtacagctgccagcgcaagaccacgctgaataactacaacaaaaagtttaccgacgcgttcgagatcatggccgagaactacgaatttaaagagaacgaaatcttctgtctggaatttctgcgcgccgcgagtctgctgaaatatctgccgttcccggttacccgcatgaaagacatccaaggtctgccgtgcattggcgaccaagttcgtgacgtgatcgaggagatcatcgaagaaggcgagagcagccgtgttaaagaagttctcaatgacgagcgctacaaggcctttaagcagttcaccagcgtgttcggtgtgggcgtgaaaaccagcgaaaagtggtttcgtatgggcctccgtacggttgaagagctgaaggccgacaagagtctgaagctgagcaagatgcagaaggcgggctttctgtattacgaggatctggtgaggtgcgttagtaaagcggaagccgatgccgttacgctcatcgtgaagaacacggtgagtacctttctgccggatgcgctggtgaccatcacgggcggtttccgccgtggcaaaaagatgggccacgacatcgactttctgatcacgaatccgggcccgaaagaggatgacgaactgctccacaaagtggttgatctgctcaagaagcaaggtctgctgctgtactgcgacatcatcgagagcacgttcgtggaggaacaactgccaagtcgcaaaatcgacgccatggacaacttccagaagtgcttcgccattctcaagctgtaccagccgggcgtggataacagcagctataacacgagtaagaagagtgacatggccgaggttaaggattggaaagcgatccgtgtggatctggtgatcacgccattcgagcagtacgcctatgcgctgctcggttggacgggcagccgcgaatttggtcgcgatctgcgccgctatgcgagtcatgagcgcaagatgatcctcgacaaccatggcctctacgaccgcaaaaagcgcatctttctgaaagcgggcagcgaagaagagattttcgcgcatctgggtctggattatgtggagccgtgggaacgcaacgcg

SEQ ID NO: 214 - protein, 394 aa, synthetic construct
  REGION 1..394: note = Variant of terminal deoxynucleotidyl transferase
MHHHHHHGGSGHPPSNTPELEVPSVIARKVSQYSCQRKTTLNNYNKKFTDAFEIMAENYEFKENEIFCLEFLRAASLLKYLPFPVTRMKDIQGLPCIGDQVRDVIEEIIEEGESSRVKEVLNDERYKAFKQFTSVFGVGVKTSEKWFRMGLRTVEELKADKSLKLSKMQKAGFLYYEDLVRCVSKAEADAVTLIVKNTVSTFLPDALVTITGGFRRGKKMGHDIDFLITNPGPKEDDELLHKVVDLLKKQGLLLYCDIIESTFVEEQLPSRKIDAMDNFQKCFAILKLYQPGVDNSSYNTSKKSDMAEVKDWKAIRVDLVITPFEQYAYALLGWTGSREFGRDLRRYASHERKMILDNHGLYDRKKRIFLKAGSEEEIFAHLGLDYVEPWERNA

SEQ ID NO: 215 - DNA, 1182 bp, synthetic construct
  misc_feature 1..1182: note = Variant of terminal deoxynucleotidyl transferase
  source 1..1182: mol_type = other DNA
atgcaccatcatcatcatcatggcggtagcggccatccgccgagcaataccccggagctggaagtgccgagcgttatcgcccgcaaggttagtcagtacagctgccagcgcaagaccacgctgaataactacaacaaaaagtttaccgacgcgttcgagatcatggccgagaactacgaatttaaagagaacgaaatcttctgtctggaatttctgcgcgccgcgagtctgctgaaatatctgccgttcccggttacccgcatgaaagacatccaaggtctgccgtgcattggcgaccaagttcgtgacgtgatcgaggagatcatcgaagaaggcgagagcagccgtgttaaagaagttctcaatgacgagcgctacaaggcctttaagcagttcaccagcgtgttcggtgtgggcgtgaaaaccagcgaaaagtggtttcgtatgggcctccgtacggttgaagagctgaaggccgacaagagtctgaagctgagcaagatgcagaaggcgggctttctgtattacgaggatctggtgagctgcgttagtaaagcggaagccgatgccgttacgctcatcgtgaagaacacggtgagtacctttctgccggatgcgctggtgaccatcacgggcggtttccgccgtggcaaaaagatgggccacgacatcgactttctgatcacgaatccgggcccgaaagaggatgacgaactgctccacaaagtggttgattgtctcaagaagcaaggtctgctgctgtactgcgacatcatcgagagcacgttcgtggaggaacaactgccaagtcgcaaaatcgacgccatggacaacttccagaagtgcttcgccattctcaagctgtaccagccgggcgtggataacagcagctataacacgagtaagaagagtgacatggccgaggttaaggattggaaagcgatccgtgtggatctggtgatcacgccattcgagcagtacgcctatgcgctgctcggttggacgggcagccgcgaatttggtcgcgatctgcgccgctatgcgagtcatgagcgcaagatgatcctcgacaaccatggcctctacgaccgcaaaaagcgcatctttctgaaagcgggcagcgaagaagagattttcgcgcatctgggtctggattatgtggagccgtgggaacgcaacgcg

SEQ ID NO: 216 - protein, 394 aa, synthetic construct
  REGION 1..394: note = Variant of terminal deoxynucleotidyl transferase
MHHHHHHGGSGHPPSNTPELEVPSVIARKVSQYSCQRKTTLNNYNKKFTDAFEIMAENYEFKENEIFCLEFLRAASLLKYLPFPVTRMKDIQGLPCIGDQVRDVIEEIIEEGESSRVKEVLNDERYKAFKQFTSVFGVGVKTSEKWFRMGLRTVEELKADKSLKLSKMQKAGFLYYEDLVSCVSKAEADAVTLIVKNTVSTFLPDALVTITGGFRRGKKMGHDIDFLITNPGPKEDDELLHKVVDCLKKQGLLLYCDIIESTFVEEQLPSRKIDAMDNFQKCFAILKLYQPGVDNSSYNTSKKSDMAEVKDWKAIRVDLVITPFEQYAYALLGWTGSREFGRDLRRYASHERKMILDNHGLYDRKKRIFLKAGSEEEIFAHLGLDYVEPWERNA

SEQ ID NO: 217 - DNA, 1182 bp, synthetic construct
  misc_feature 1..1182: note = Variant of terminal deoxynucleotidyl transferase
  source 1..1182: mol_type = other DNA
atgcaccatcatcatcatcatggcggtagcggccatccgccgagcaataccccggagctggaagtgccgagcgttatcgcccgcaaggttagtcagtacagctgccagcgcaagaccacgctgaataactacaacaaaaagtttaccgacgcgttcgagatcatggccgagaactacgaatttaaagagaacgaaatcttctgtctggaatttctgcgcgccgcgagtctgctgaaatatctgccgttcccggttacccgcatgaaagacatccaaggtctgccgtgcattggcgaccaagttcgtgacgtgatcgaggagatcatcgaagaaggcgagagcagccgtgttaaagaagttctcaatgacgagcgctacaaggcctttaagcagttcaccagcgtgttcggtgtgggcgtgaaaaccagcgaaaagtggtttcgtatgggcctccgtacggttgaagagctgaaggccgacaagagtctgaagctgagcaagatgcagaaggcgggctttctgtattacgaggatctggtgagctgcgttagtaaagcggaagccgatgccgttacgctcatcgtgaagaacacggtgagtacctttctgccggatgcgctggtgaccatcacgggcggtttccgccgtggcaaaaagatgggccacgacatcgactttctgatcacgaatccgggcccgaaagaggatgacgaactgctccacaaagtggttgatctgctcaagaagcaaggtctgctgctgtactgcgacatcatcgagagcacgttcgtggaggaacaactgccaagtcgcaaaatcgacgccatggacaacttccagaagtgcttcgccattctcaagctgtaccagccgggcgtggataacgggagctataacacgagtaagaagagtgacatggccgaggttaaggattggaaagcgatccgtgtggatctggtgatcacgccattcgagcagtacgcctatgcgctgctcggttggacgggcagccgcgaatttggtcgcgatctgcgccgctatgcgagtcatgagcgcaagatgatcctcgacaaccatggcctctacgaccgcaaaaagcgcatctttctgaaagcgggcagcgaagaagagattttcgcgcatctgggtctggattatgtggagccgtgggaacgcaacgcg

SEQ ID NO: 218 - protein, 394 aa, synthetic construct
  REGION 1..394: note = Variant of terminal deoxynucleotidyl transferase
MHHHHHHGGSGHPPSNTPELEVPSVIARKVSQYSCQRKTTLNNYNKKFTDAFEIMAENYEFKENEIFCLEFLRAASLLKYLPFPVTRMKDIQGLPCIGDQVRDVIEEIIEEGESSRVKEVLNDERYKAFKQFTSVFGVGVKTSEKWFRMGLRTVEELKADKSLKLSKMQKAGFLYYEDLVSCVSKAEADAVTLIVKNTVSTFLPDALVTITGGFRRGKKMGHDIDFLITNPGPKEDDELLHKVVDLLKKQGLLLYCDIIESTFVEEQLPSRKIDAMDNFQKCFAILKLYQPGVDNGSYNTSKKSDMAEVKDWKAIRVDLVITPFEQYAYALLGWTGSREFGRDLRRYASHERKMILDNHGLYDRKKRIFLKAGSEEEIFAHLGLDYVEPWERNA

SEQ ID NO: 219 - DNA, 1182 bp, synthetic construct; identical to SEQ ID NO: 57
  misc_feature 1..1182: note = Variant of terminal deoxynucleotidyl transferase
  source 1..1182: mol_type = other DNA

SEQ ID NO: 220 - protein, 394 aa, synthetic construct; identical to SEQ ID NO: 58
  REGION 1..394: note = Variant of terminal deoxynucleotidyl transferase

SEQ ID NO: 221 - DNA, 1182 bp, synthetic construct
  misc_feature 1..1182: note = Variant of terminal deoxynucleotidyl transferase
  source 1..1182: mol_type = other DNA
atgcaccatcatcatcatcatggcggtagcggccatccgccgagcaataccccggagctggaagtgccgagcgttatcgcccgcaaggttagtcagtacagctgccagcgcaagaccacgctgaataactacaacaaaaagtttaccgacgcgttcgagatcatggccgagaactacgaatttaaagagaacgaaatcttctgtctggaatttctgcgcgccgcgagtctgctgaaatatctgccgttcccggttacccgcatgaaagacatccaaggtctgccgtgcattggcgaccaagttcgtgacgtgatcgaggagatcatcgaagaaggcgagagcagccgtgttaaagaagttctcaatgacgagcgctacaaggcctttaagcagttcaccagcgtgttcggtgtgggcgtgaaaaccagcgaaaagtggtttcgtatgggcctccgtacggttgaagagctgaaggccgacaagagtctgaagctgagcaagatgcagaaggcgggctttctgtattacgaggatctggtgagctgcgttagtaaagcggaagccgatgccgttacgctcatcgtgaagaacacggtgagtacctttctgccggatgcgctggtgaccatcacgggcggtttccgccgtggcaaaaagatgggccacgacatcgactttctgatcacgaatccgggcccgaaagaggatgacgaactgctccacaaagtggttgatctgctcaagaagcaaggtctgctgctgtactgcgacatcatcgagagcacgttcgtggaggaacaactgccaagtcgcaaaatcgacgccatggacaacttccagaagtgcttcgccattctcaagctgtaccagccgggcgtggataacagcagctataacacgagtaagaagagtgacatggccgaggttaaggattggaaagcggggcgtgtggatctggtgatcacgccattcgagcagtacgcctatgcgctgctcggttggacgggcagccgcgaatttggtcgcgatctgcgccgctatgcgagtcatgagcgcaagatgatcctcgacaaccatggcctctacgaccgcaaaaagcgcatctttctgaaagcgggcagcgaagaagagattttcgcgcatctgggtctggattatgtggagccgtgggaacgcaacgcg

SEQ ID NO: 222 - protein, 394 aa, synthetic construct
  REGION 1..394: note = Variant of terminal deoxynucleotidyl transferase
MHHHHHHGGSGHPPSNTPELEVPSVIARKVSQYSCQRKTTLNNYNKKFTDAFEIMAENYEFKENEIFCLEFLRAASLLKYLPFPVTRMKDIQGLPCIGDQVRDVIEEIIEEGESSRVKEVLNDERYKAFKQFTSVFGVGVKTSEKWFRMGLRTVEELKADKSLKLSKMQKAGFLYYEDLVSCVSKAEADAVTLIVKNTVSTFLPDALVTITGGFRRGKKMGHDIDFLITNPGPKEDDELLHKVVDLLKKQGLLLYCDIIESTFVEEQLPSRKIDAMDNFQKCFAILKLYQPGVDNSSYNTSKKSDMAEVKDWKAGRVDLVITPFEQYAYALLGWTGSREFGRDLRRYASHERKMILDNHGLYDRKKRIFLKAGSEEEIFAHLGLDYVEPWERNA

SEQ ID NO: 223 - DNA, 1182 bp, synthetic construct
  misc_feature 1..1182: note = Variant of terminal deoxynucleotidyl transferase
  source 1..1182: mol_type = other DNA
atgcaccatcatcatcatcatggcggtagcggccatccgccgagcaataccccggagagtgaagtgccgagcgttatcgcccgcaaggttagtcagtacagctgccagcgcaagaccacgctgaataactacaacaaaaagtttaccgacgcgttcgagatcatggccgagaactacgaatttaaagagaacgaaatcttctgtctggaatttctgcgcgccgcgagtctgctgaaatatctgccgttcccggttacccgcatgaaagacatccaaggtctgccgtgcattggcgaccaagttcgtgacgtgatcgaggagatcatcgaagaaggcgagagcagccgtgttaaagaagttctcaatgacgagcgctacaaggcctttaagcagttcaccagcgtgttcggtgtgggcgtgaaaaccagcgaaaagtggtttcgtatgggcctccgtacggttgaagagctgaaggccgacaagagtctgaagctgagcaagatgcagaaggcgggctttctgtattacgaggatctggtgagctgcgttagtaaagcggaagccgatgccgttacgctcatcgtgaagaacacggtgagtacctttctgccggatgcgctggtgaccatcacgggcggtttccgccgtggcaaaaagatgggccacgacatcgactttctgatcacgaatccgggcccgaaagaggatgacgaactgctccacaaagtggttgatctgctcaagaagcaaggtctgctgctgtactgcgacatcatcgagagcacgttcgtggaggaacaactgccaagtcgcaaaatcgacgccatggacaacttccagaagtgcttcgccattctcaagctgtaccagccgggcgtggataacagcagctataacacgagtaagaagagtgacatggccgaggttaaggattggaaagcgatccgtgtggatctggtgatcacgccattcgagcagtacgcctatgcgctgctcggttggacgggcagccgcgaatttggtcgcgatctgcgccgctatgcgagtcatgagcgcaagatgatcctcgacaaccatggcctctacgaccgcaaaaagcgcatctttctgaaagcgggcagcgaagaagagattttcgcgcatctgggtctggattatgtggagccgtgggaacgcaacgcg

SEQ ID NO: 224 - protein, 394 aa, synthetic construct; identical to SEQ ID NO: 16
  REGION 1..394: note = Variant of terminal deoxynucleotidyl transferase

SEQ ID NO: 225 - DNA, 1182 bp, synthetic construct
  misc_feature 1..1182: note = Variant of terminal deoxynucleotidyl transferase
  source 1..1182: mol_type = other DNA
atgcaccatcatcatcatcatggcggtagcggccatccgccgagcaataccccggagctggaagtgccgagcgttatcgcccgcaaggttagtcagtacagctgccagcgcaagaccacgctgaataactacaacaaaaagtttaccgacgcgttcgagatcatggccgagaactacgaatttaaagagaacgaaatcttctgtctggaatttctgcgcgccgcgagtctgctgaaatatctgccgttcccggttacccgcatgaaagacatccaaggtctgccgtgcattggcgaccaagttcgtgacgtgatcgaggagatcatcgaagaaggcgagagcagccgtgttaaagaagttctcaatgacgagcgctacaaggcctttaagcagttcaccagcgtgttcggtgtgggcgtgaaaaccagcgaaaagtggtttcgtatgggcctccgtacggttgaagagctgaaggccgacaagagtctgaagctgagcaagatgcagaaggcgggctttctgtattacgaggatctggtgagctgcgttagtaaagcggaagccgatgccgttacgctcatcgtgaagaacacggtgagtacctttctgccggatgcgctggtgaccatcacgggcggtttccgccgtggcaaaaagatgggccacgacatcgactttctgatcacgaatccgggcccgaaagaggatgacgaactgctccacaaagtggttgatctgctcaagaagcaaggtctgctgctgtactgcgacatcatcgagagcacggctgtggaggaacaactgccaagtcgcaaaatcgacgccatggacaacttccagaagtgcttcgccattctcaagctgtaccagccgggcgtggataacagcagctataacacgagtaagaagagtgacatggccgaggttaaggattggaaagcgatccgtgtggatctggtgatcacgccattcgagcagtacgcctatgcgctgctcggttggacgggcagccgcgaatttggtcgcgatctgcgccgctatgcgagtcatgagcgcaagatgatcctcgacaaccatggcctctacgaccgcaaaaagcgcatctttctgaaagcgggcagcgaagaagagattttcgcgcatctgggtctggattatgtggagccgtgggaacgcaacgcg

SEQ ID NO: 226 - protein, 394 aa, synthetic construct
  REGION 1..394: note = Variant of terminal deoxynucleotidyl transferase
MHHHHHHGGSGHPPSNTPELEVPSVIARKVSQYSCQRKTTLNNYNKKFTDAFEIMAENYEFKENEIFCLEFLRAASLLKYLPFPVTRMKDIQGLPCIGDQVRDVIEEIIEEGESSRVKEVLNDERYKAFKQFTSVFGVGVKTSEKWFRMGLRTVEELKADKSLKLSKMQKAGFLYYEDLVSCVSKAEADAVTLIVKNTVSTFLPDALVTITGGFRRGKKMGHDIDFLITNPGPKEDDELLHKVVDLLKKQGLLLYCDIIESTAVEEQLPSRKIDAMDNFQKCFAILKLYQPGVDNSSYNTSKKSDMAEVKDWKAIRVDLVITPFEQYAYALLGWTGSREFGRDLRRYASHERKMILDNHGLYDRKKRIFLKAGSEEEIFAHLGLDYVEPWERNA

SEQ ID NO: 227 - DNA, 1182 bp, synthetic construct
  misc_feature 1..1182: note = Variant of terminal deoxynucleotidyl transferase
  source 1..1182: mol_type = other DNA
atgcaccatcatcatcatcatggcggtagcggccatccgccgagcaataccccggagctggaagtgccgagcgttatcgcccgcaaggttagtcagtacagctgccagcgcaagaccacgctgaataactacaacaaaaagtttaccgacgcgttcgagatcatggccgagaactacgaatttaaagagaacgaaatcttctgtctggaatttctgcgcgccgcgagtctgctgaaatatctgccgttcccggttacccgcatgaaagacatccaaggtctgccgtgcattggcgaccaagttcgtcatgtgatcgaggagatcatcgaagaaggcgagagcagccgtgttaaagaagttctcaatgacgagcgctacaaggcctttaagcagttcaccagcgtgttcggtgtgggcgtgaaaaccagcgaaaagtggtttcgtatgggcctccgtacggttgaagagctgaaggccgacaagagtctgaagctgagcaagatgcagaaggcgggctttctgtattacgaggatctggtgagctgcgttagtaaagcggaagccgatgccgttacgctcatcgtgaagaacacggtgagtacctttctgccggatgcgctggtgaccatcacgggcggtttccgccgtggcaaaaagatgggccacgacatcgactttctgatcacgaatccgggcccgaaagaggatgacgaactgctccacaaagtggttgatctgctcaagaagcaaggtctgctgctgtactgcgacatcatcgagagcacgttcgtggaggaacaactgccaagtcgcaaaatcgacgccatggacaacttccagaagtgcttcgccattctcaagctgtaccagccgggcgtggataacagcagctataacacgagtaagaagagtgacatggccgaggttaaggattggaaagcgatccgtgtggatctggtgatcacgccattcgagcagtacgcctatgcgctgctcggttggacgggcagccgcgaatttggtcgcgatctgcgccgctatgcgagtcatgagcgcaagatgatcctcgacaaccatggcctctacgaccgcaaaaagcgcatctttctgaaagcgggcagcgaagaagagattttcgcgcatctgggtctggattatgtggagccgtgggaacgcaacgcg

SEQ ID NO: 228 - protein, 394 aa, synthetic construct
  REGION 1..394: note = Variant of terminal deoxynucleotidyl transferase
MHHHHHHGGSGHPPSNTPELEVPSVIARKVSQYSCQRKTTLNNYNKKFTDAFEIMAENYEFKENEIFCLEFLRAASLLKYLPFPVTRMKDIQGLPCIGDQVRHVIEEIIEEGESSRVKEVLNDERYKAFKQFTSVFGVGVKTSEKWFRMGLRTVEELKADKSLKLSKMQKAGFLYYEDLVSCVSKAEADAVTLIVKNTVSTFLPDALVTITGGFRRGKKMGHDIDFLITNPGPKEDDELLHKVVDLLKKQGLLLYCDIIESTFVEEQLPSRKIDAMDNFQKCFAILKLYQPGVDNSSYNTSKKSDMAEVKDWKAIRVDLVITPFEQYAYALLGWTGSREFGRDLRRYASHERKMILDNHGLYDRKKRIFLKAGSEEEIFAHLGLDYVEPWERNA

SEQ ID NO: 229 - DNA, 1182 bp, synthetic construct
  misc_feature 1..1182: note = Variant of terminal deoxynucleotidyl transferase
  source 1..1182: mol_type = other DNA
atgcaccatcatcatcatcatggcggtagcggccatccgccgagcaataccccggagctggaagtgccgagcgttatcgcccgcaaggttagtcagtacagctgccagcgcaagaccacgctgaataactacaacaaaaagtttaccgacgcgttcgagatcatggccgagaactacgaatttaaagagaacgaaatcttctgtctggaatttctgcgcgccgcgagtctgctgaaatatctgccgttcccggttacccgcatgaaagacatccaaggtctgccgtgcattggcgaccaagttcgtgacgtgatcgaggagatcatcgaagaaggcgagagcagccgtgttaaagaagttctcaatgacgagcgctacaaggcctttaagcagttcaccagcgtgttcggtgtgggcgtgaaaaccagcgaaaagtggtttcgtatgggcctccgtacggttgaagagctgaaggcctgtaagagtctgaagctgagcaagatgcagaaggcgggctttctgtattacgaggatctggtgagctgcgttagtaaagcggaagccgatgccgttacgctcatcgtgaagaacacggtgagtacctttctgccggatgcgctggtgaccatcacgggcggtttccgccgtggcaaaaagatgggccacgacatcgactttctgatcacgaatccgggcccgaaagaggatgacgaactgctccacaaagtggttgatctgctcaagaagcaaggtctgctgctgtactgcgacatcatcgagagcacgttcgtggaggaacaactgccaagtcgcaaaatcgacgccatggacaacttccagaagtgcttcgccattctcaagctgtaccagccgggcgtggataacagcagctataacacgagtaagaagagtgacatggccgaggttaaggattggaaagcgatccgtgtggatctggtgatcacgccattcgagcagtacgcctatgcgctgctcggttggacgggcagccgcgaatttggtcgcgatctgcgccgctatgcgagtcatgagcgcaagatgatcctcgacaaccatggcctctacgaccgcaaaaagcgcatctttctgaaagcgggcagcgaagaagagattttcgcgcatctgggtctggattatgtggagccgtgggaacgcaacgcg

SEQ ID NO: 230 - protein, 394 aa, synthetic construct
  REGION 1..394: note = Variant of terminal deoxynucleotidyl transferase
MHHHHHHGGSGHPPSNTPELEVPSVIARKVSQYSCQRKTTLNNYNKKFTDAFEIMAENYEFKENEIFCLEFLRAASLLKYLPFPVTRMKDIQGLPCIGDQVRDVIEEIIEEGESSRVKEVLNDERYKAFKQFTSVFGVGVKTSEKWFRMGLRTVEELKACKSLKLSKMQKAGFLYYEDLVSCVSKAEADAVTLIVKNTVSTFLPDALVTITGGFRRGKKMGHDIDFLITNPGPKEDDELLHKVVDLLKKQGLLLYCDIIESTFVEEQLPSRKIDAMDNFQKCFAILKLYQPGVDNSSYNTSKKSDMAEVKDWKAIRVDLVITPFEQYAYALLGWTGSREFGRDLRRYASHERKMILDNHGLYDRKKRIFLKAGSEEEIFAHLGLDYVEPWERNA

SEQ ID NO: 231 - DNA, 1182 bp, synthetic construct
  misc_feature 1..1182: note = Variant of terminal deoxynucleotidyl transferase
  source 1..1182: mol_type = other DNA
atgcaccatcatcatcatcatggcggtagcggccatccgccgagcaataccccggagctggaagtgccgagcgttatcgcccgcaaggttagtcagtacagctgccagcgcaagaccacgctgaataactacaacaaaaagtttaccgacgcgttcgagatcatggccgagaactacgaatttaaagagaacgaaatcttctgtctggaatttctgcgcgccgcgagtctgctgaaatatctgccgttcccggttacccgcatgaaagacatccaaggtctgccgtgcattggcgaccaagttcgtgacgtgatcgaggagatcatcgaagaaggcgagagcagccgtgttaaagaagttctcaatgacgagcgctacaaggcctttaaggagttcaccagcgtgttcggtgtgggcgtgaaaaccagcgaaaagtggtttcgtatgggcctccgtacggttgaagagctgaaggccgacaagagtctgaagctgagcaagatgcagaaggcgggctttctgtattacgaggatctggtgagctgcgttagtaaagcggaagccgatgccgttacgctcatcgtgaagaacacggtgagtacctttctgccggatgcgctggtgaccatcacgggcggtttccgccgtggcaaaaagatgggccacgacatcgactttctgatcacgaatccgggcccgaaagaggatgacgaactgctccacaaagtggttgatctgctcaagaagcaaggtctgctgctgtactgcgacatcatcgagagcacgttcgtggaggaacaactgccaagtcgcaaaatcgacgccatggacaacttccagaagtgcttcgccattctcaagctgtaccagccgggcgtggataacagcagctataacacgagtaagaagagtgacatggccgaggttaaggattggaaagcgatccgtgtggatctggtgatcacgccattcgagcagtacgcctatgcgctgctcggttggacgggcagccgcgaatttggtcgcgatctgcgccgctatgcgagtcatgagcgcaagatgatcctcgacaaccatggcctctacgaccgcaaaaagcgcatctttctgaaagcgggcagcgaagaagagattttcgcgcatctgggtctggattatgtggagccgtgggaacgcaacgcg

SEQ ID NO: 232 - protein, 394 aa, synthetic construct
  REGION 1..394: note = Variant of terminal deoxynucleotidyl transferase
MHHHHHHGGSGHPPSNTPELEVPSVIARKVSQYSCQRKTTLNNYNKKFTDAFEIMAENYEFKENEIFCLEFLRAASLLKYLPFPVTRMKDIQGLPCIGDQVRDVIEEIIEEGESSRVKEVLNDERYKAFKEFTSVFGVGVKTSEKWFRMGLRTVEELKADKSLKLSKMQKAGFLYYEDLVSCVSKAEADAVTLIVKNTVSTFLPDALVTITGGFRRGKKMGHDIDFLITNPGPKEDDELLHKVVDLLKKQGLLLYCDIIESTFVEEQLPSRKIDAMDNFQKCFAILKLYQPGVDNSSYNTSKKSDMAEVKDWKAIRVDLVITPFEQYAYALLGWTGSREFGRDLRRYASHERKMILDNHGLYDRKKRIFLKAGSEEEIFAHLGLDYVEPWERNA

SEQ ID NO: 233 - DNA, 1182 bp, synthetic construct
  misc_feature 1..1182: note = Variant of terminal deoxynucleotidyl transferase
  source 1..1182: mol_type = other DNA
atgcaccatcatcatcatcatggcggtagcggccatccgccgagcaatgatccggagctggaagtgccgagcgttatcgcccgcaaggttagtcagtacagctgccagcgcaagaccacgctgaataactacaacaaaaagtttaccgacgcgttcgagatcatggccgagaactacgaatttaaagagaacgaaatcttctgtctggaatttctgcgcgccgcgagtctgctgaaatatctgccgttcccggttacccgcatgaaagacatccaaggtctgccgtgcattggcgaccaagttcgtgacgtgatcgaggagatcatcgaagaaggcgagagcagccgtgttaaagaagttctcaatgacgagcgctacaaggcctttaagcagttcaccagcgtgttcggtgtgggcgtgaaaaccagcgaaaagtggtttcgtatgggcctccgtacggttgaagagctgaaggccgacaagagtctgaagctgagcaagatgcagaaggcgggctttctgtattacgaggatctggtgagctgcgttagtaaagcggaagccgatgccgttacgctcatcgtgaagaacacggtgagtacctttctgccggatgcgctggtgaccatcacgggcggtttccgccgtggcaaaaagatgggccacgacatcgactttctgatcacgaatccgggcccgaaagaggatgacgaactgctccacaaagtggttgatctgctcaagaagcaaggtctgctgctgtactgcgacatcatcgagagcacgttcgtggaggaacaactgccaagtcgcaaaatcgacgccatggacaacttccagaagtgcttcgccattctcaagctgtaccagccgggcgtggataacagcagctataacacgagtaagaagagtgacatggccgaggttaaggattggaaagcgatccgtgtggatctggtgatcacgccattcgagcagtacgcctatgcgctgctcggttggacgggcagccgcgaatttggtcgcgatctgcgccgctatgcgagtcatgagcgcaagatgatcctcgacaaccatggcctctacgaccgcaaaaagcgcatctttctgaaagcgggcagcgaagaagagattttcgcgcatctgggtctggattatgtggagccgtgggaacgcaacgcg

SEQ ID NO: 234 - protein, 394 aa, synthetic construct
  REGION 1..394: note = Variant of terminal deoxynucleotidyl transferase
MHHHHHHGGSGHPPSNDPELEVPSVIARKVSQYSCQRKTTLNNYNKKFTDAFEIMAENYEFKENEIFCLEFLRAASLLKYLPFPVTRMKDIQGLPCIGDQVRDVIEEIIEEGESSRVKEVLNDERYKAFKQFTSVFGVGVKTSEKWFRMGLRTVEELKADKSLKLSKMQKAGFLYYEDLVSCVSKAEADAVTLIVKNTVSTFLPDALVTITGGFRRGKKMGHDIDFLITNPGPKEDDELLHKVVDLLKKQGLLLYCDIIESTFVEEQLPSRKIDAMDNFQKCFAILKLYQPGVDNSSYNTSKKSDMAEVKDWKAIRVDLVITPFEQYAYALLGWTGSREFGRDLRRYASHERKMILDNHGLYDRKKRIFLKAGSEEEIFAHLGLDYVEPWERNA

SEQ ID NO: 235 - DNA, 1182 bp, synthetic construct
  misc_feature 1..1182: note = Variant of terminal deoxynucleotidyl transferase
  source 1..1182: mol_type = other DNA
atgcaccatcatcatcatcatggcggtagcggccatccgccgagcaataccccggagctggaagtgccgagcgttatcgcccgcaaggttagtcagtacagctgccagcgcaagaccacgctgaataactacaacaaaaagtttaccgacgcgttcgagatcatggccgagaactacgaatttaaagagaacgaaatcttctgtctggaatttctgcgcgccgcgagtctgctgaaatatctgccgttcccggttacccgcatgaaagacatccaaggtctgccgtgcattggcgaccaagttcgtgacgtgatcgaggagatcatcgaagaaggcgagagcagccgtgttaaagaagttctcaatgacgagcgctacaaggcctttaagcagttcaccagcgtgttcggtgtgggcgtgaaaaccagcgaaaagtggtttcgtatgggcctccgtacggtttctgagctgaaggccgacaagagtctgaagctgagcaagatgcagaaggcgggctttctgtattacgaggatctggtgagctgcgttagtaaagcggaagccgatgccgttacgctcatcgtgaagaacacggtgagtacctttctgccggatgcgctggtgaccatcacgggcggtttccgccgtggcaaaaagatgggccacgacatcgactttctgatcacgaatccgggcccgaaagaggatgacgaactgctccacaaagtggttgatctgctcaagaagcaaggtctgctgctgtactgcgacatcatcgagagcacgttcgtggaggaacaactgccaagtcgcaaaatcgacgccatggacaacttccagaagtgcttcgccattctcaagctgtaccagccgggcgtggataacagcagctataacacgagtaagaagagtgacatggccgaggttaaggattggaaagcgatccgtgtggatctggtgatcacgccattcgagcagtacgcctatgcgctgctcggttggacgggcagccgcgaatttggtcgcgatctgcgccgctatgcgagtcatgagcgcaagatgatcctcgacaaccatggcctctacgaccgcaaaaagcgcatctttctgaaagcgggcagcgaagaagagattttcgcgcatctgggtctggattatgtggagccgtgggaacgcaacgcg

SEQ ID NO: 236 - protein, 394 aa, synthetic construct
  REGION 1..394: note = Variant of terminal deoxynucleotidyl transferase
MHHHHHHGGSGHPPSNTPELEVPSVIARKVSQYSCQRKTTLNNYNKKFTDAFEIMAENYEFKENEIFCLEFLRAASLLKYLPFPVTRMKDIQGLPCIGDQVRDVIEEIIEEGESSRVKEVLNDERYKAFKQFTSVFGVGVKTSEKWFRMGLRTVSELKADKSLKLSKMQKAGFLYYEDLVSCVSKAEADAVTLIVKNTVSTFLPDALVTITGGFRRGKKMGHDIDFLITNPGPKEDDELLHKVVDLLKKQGLLLYCDIIESTFVEEQLPSRKIDAMDNFQKCFAILKLYQPGVDNSSYNTSKKSDMAEVKDWKAIRVDLVITPFEQYAYALLGWTGSREFGRDLRRYASHERKMILDNHGLYDRKKRIFLKAGSEEEIFAHLGLDYVEPWERNA

SEQ ID NO: 237 - DNA, 1182 bp, synthetic construct
  misc_feature 1..1182: note = Variant of terminal deoxynucleotidyl transferase
  source 1..1182: mol_type = other DNA
atgcaccatcatcatcatcatggcggtagcggccatccgccgagcaataccccggagctggaagtgccgagcgttatcgcccgcaaggttagtcagtacagctgccagcgcaagaccacgctgaataactacaacaaaaagtttaccgacgcgttcgagatcatggccgagaactacgaatttaaagagaacgaaatcttctgtctggaatttctgcgcgccgcgagtctgctgaaatatctgccgttcccggttacccgcatgaaagacatccaaggtctgccgtgcattggcgaccaagttcgtgacgtgatcgaggagatcatcgaagaaggcgagagcagccgtgttaaagaagttctcaatgacgagcgctacaaggcctttaagcagttcaccagcgtgttcggtgtgggcgtgaaaaccagcgaaaagtggtttcgtatgggcctccgtacggttgaagagctgaaggccgacaagagtctgaagctgagcaagatgcagaaggcgggctttctgtattactcggatctggtgagctgcgttagtaaagcggaagccgatgccgttacgctcatcgtgaagaacacggtgagtacctttctgccggatgcgctggtgaccatcacgggcggtttccgccgtggcaaaaagatgggccacgacatcgactttctgatcacgaatccgggcccgaaagaggatgacgaactgctccacaaagtggttgatctgctcaagaagcaaggtctgctgctgtactgcgacatcatcgagagcacgttcgtggaggaacaactgccaagtcgcaaaatcgacgccatggacaacttccagaagtgcttcgccattctcaagctgtaccagccgggcgtggataacagcagctataacacgagtaagaagagtgacatggccgaggttaaggattggaaagcgatccgtgtggatctggtgatcacgccattcgagcagtacgcctatgcgctgctcggttggacgggcagccgcgaatttggtcgcgatctgcgccgctatgcgagtcatgagcgcaagatgatcctcgacaaccatggcctctacgaccgcaaaaagcgcatctttctgaaagcgggcagcgaagaagagattttcgcgcatctgggtctggattatgtggagccgtgggaacgcaacgcg

SEQ ID NO: 238 - protein, 394 aa, synthetic construct
  REGION 1..394: note = Variant of terminal deoxynucleotidyl transferase
MHHHHHHGGSGHPPSNTPELEVPSVIARKVSQYSCQRKTTLNNYNKKFTDAFEIMAENYEFKENEIFCLEFLRAASLLKYLPFPVTRMKDIQGLPCIGDQVRDVIEEIIEEGESSRVKEVLNDERYKAFKQFTSVFGVGVKTSEKWFRMGLRTVEELKADKSLKLSKMQKAGFLYYSDLVSCVSKAEADAVTLIVKNTVSTFLPDALVTITGGFRRGKKMGHDIDFLITNPGPKEDDELLHKVVDLLKKQGLLLYCDIIESTFVEEQLPSRKIDAMDNFQKCFAILKLYQPGVDNSSYNTSKKSDMAEVKDWKAIRVDLVITPFEQYAYALLGWTGSREFGRDLRRYASHERKMILDNHGLYDRKKRIFLKAGSEEEIFAHLGLDYVEPWERNA

SEQ ID NO: 239 - DNA, 1182 bp, synthetic construct
  misc_feature 1..1182: note = Variant of terminal deoxynucleotidyl transferase
  source 1..1182: mol_type = other DNA
atgcaccatcatcatcatcatggcggtagcggccatccgccgagcaataccccggagctggaagtgccgagcgttatcgcccgcaaggttagtcagtacagctgccagcgcaagaccacgctgaataactacaacaaaaagtttaccgacgcgttcgagatcatggccgagaactacgaatttaaagagaacgaaatcttctgtctggaatttctgcgcgccgcgagtctgctgaaatatctgccgttcccggttacccgcatgaaagacatccaaggtctgccgtgcattggcgaccaagttcgtgacgtgatcgaggagatcatcgaagaaggcgagagcagccgtgttaaagaagttctcaatgacgagcgctacaaggcctttaagcagttcaccagcgtgttcggtgtgggcgtgaaaaccagcgaaaagtggtttcgtatgggcctccgtacggttgaagagctgaaggccgacaagagtctgaagctgagcaagatgcagaaggcgggctttctgtattacgaggatctggtgagctgcgttagtaaagcggaagccgatgccgttacgctcatcgtgaagaacacggtgagtacctttctgccggatgcgctggtgaccatcacgggcggtttccgccgtggcaaaaagatgggccacgacatcgactttctgatcacgaatccgggcccgaaagaggatgacgaactgctccacaaagtggttgatctgctcaagaagcaaggtctgctgctgtactgcgacatcatcgagagcacgttcgtggaggaacaactgccaagtcgcaaaatcgacgccatggacaacttccagaagtgcttcgccattctcaagctgtaccagccgagtgtggataacagcagctataacacgagtaagaagagtgacatggccgaggttaaggattggaaagcgatccgtgtggatctggtgatcacgccattcgagcagtacgcctatgcgctgctcggttggacgggcagccgcgaatttggtcgcgatctgcgccgctatgcgagtcatgagcgcaagatgatcctcgacaaccatggcctctacgaccgcaaaaagcgcatctttctgaaagcgggcagcgaagaagagattttcgcgcatctgggtctggattatgtggagccgtgggaacgcaacgcg

SEQ ID NO: 240 - protein, 394 aa, synthetic construct
  REGION 1..394: note = Variant of terminal deoxynucleotidyl transferase
MHHHHHHGGSGHPPSNTPELEVPSVIARKVSQYSCQRKTTLNNYNKKFTDAFEIMAENYEFKENEIFCLEFLRAASLLKYLPFPVTRMKDIQGLPCIGDQVRDVIEEIIEEGESSRVKEVLNDERYKAFKQFTSVFGVGVKTSEKWFRMGLRTVEELKADKSLKLSKMQKAGFLYYEDLVSCVSKAEADAVTLIVKNTVSTFLPDALVTITGGFRRGKKMGHDIDFLITNPGPKEDDELLHKVVDLLKKQGLLLYCDIIESTFVEEQLPSRKIDAMDNFQKCFAILKLYQPSVDNSSYNTSKKSDMAEVKDWKAIRVDLVITPFEQYAYALLGWTGSREFGRDLRRYASHERKMILDNHGLYDRKKRIFLKAGSEEEIFAHLGLDYVEPWERNA

SEQ ID NO: 241 - DNA, 1182 bp, synthetic construct
  misc_feature 1..1182: note = Variant of terminal deoxynucleotidyl transferase
  source 1..1182: mol_type = other DNA
atgcaccatcatcatcatcatggcggtagcggccatccgccgagcaataccccggagctggaagtgccgagcgttatcgcccgcaaggttagtcagtacagctgccagcgcaagaccacgctgaataactacaacaaaaagtttaccgacgcgttcgagatcatggccgagaactacgaatttaaagagaacgaaatcttctgtctggaatttctgcgcgccgcgagtctgctgaaatatctgccgttcccggttacccgcatgaaagacatccaaggtctgccgtgcattggcgaccaagttcgtgacgtgatcgaggagatcatcgaagaaggcgagagcagccgtgttaaagaagttctcaatgacgagcgctacaaggcctttaagcagttcaccagcgtgttcggtgtgggcgtgaaaaccagcgaaaagtggtttcgtatgggcctccgtacggttgaagagctgaaggccgacaagagtctgaagctgagcaagatgcagaaggcgggcttgctgtattacgaggatctggtgagctgcgttagtaaagcggaagccgatgccgttacgctcatcgtgaagaacacggtgagtacctttctgccggatgcgctggtgaccatcacgggcggtttccgccgtggcaaaaagatgggccacgacatcgactttctgatcacgaatccgggcccgaaagaggatgacgaactgctccacaaagtggttgatctgctcaagaagcaaggtctgctgctgtactgcgacatcatcgagagcacgttcgtggaggaacaactgccaagtcgcaaaatcgacgccatggacaacttccagaagtgcttcgccattctcaagctgtaccagccgggcgtggataacagcagctataacacgagtaagaagagtgacatggccgaggttaaggattggaaagcgatccgtgtggatctggtgatcacgccattcgagcagtacgcctatgcgctgctcggttggacgggcagccgcgaatttggtcgcgatctgcgccgctatgcgagtcatgagcgcaagatgatcctcgacaaccatggcctctacgaccgcaaaaagcgcatctttctgaaagcgggcagcgaagaagagattttcgcgcatctgggtctggattatgtggagccgtgggaacgcaacgcg

SEQ ID NO: 242 - protein, 394 aa, synthetic construct
  REGION 1..394: note = Variant of terminal deoxynucleotidyl transferase
MHHHHHHGGSGHPPSNTPELEVPSVIARKVSQYSCQRKTTLNNYNKKFTDAFEIMAENYEFKENEIFCLEFLRAASLLKYLPFPVTRMKDIQGLPCIGDQVRDVIEEIIEEGESSRVKEVLNDERYKAFKQFTSVFGVGVKTSEKWFRMGLRTVEELKADKSLKLSKMQKAGLLYYEDLVSCVSKAEADAVTLIVKNTVSTFLPDALVTITGGFRRGKKMGHDIDFLITNPGPKEDDELLHKVVDLLKKQGLLLYCDIIESTFVEEQLPSRKIDAMDNFQKCFAILKLYQPGVDNSSYNTSKKSDMAEVKDWKAIRVDLVITPFEQYAYALLGWTGSREFGRDLRRYASHERKMILDNHGLYDRKKRIFLKAGSEEEIFAHLGLDYVEPWERNA

SEQ ID NO: 243 - DNA, 1182 bp, synthetic construct
  misc_feature 1..1182: note = Variant of terminal deoxynucleotidyl transferase
  source 1..1182: mol_type = other DNA
atgcaccatcatcatcatcatggcggtagcggccatccgccgagcaataccccggagctggaagtgccgagcgttatcgcccgcaaggttagtcagtacagctgccagcgcaagaccacgctgaataactacaacaaaaagtttaccgacgcgttcgagatcatggccgagaactacgaatttaaagagaacgaaatcttctgtctggaatttctgcgcgccgcgagtctgctgaaatatctgccgttcccggttacccgcatgaaagacatccaaggtctgccgtgcattggcgaccaagttcgtgacgtgatcgaggagatcatcgaagaaggcgagagcagccgtgttaaagaagttctcaatgacgagcgctacaaggcctttaagcagttcaccagcgtgttcggtgtgggcgtgaaaaccagcgaaaagtggtttcgtatgggcctccgtacggttgaagaggtgaaggccgacaagagtctgaagctgagcaagatgcagaaggcgggctttctgtattacgaggatctggtgagctgcgttagtaaagcggaagccgatgccgttacgctcatcgtgaagaacacggtgagtacctttctgccggatgcgctggtgaccatcacgggcggtttccgccgtggcaaaaagatgggccacgacatcgactttctgatcacgaatccgggcccgaaagaggatgacgaactgctccacaaagtggttgatctgctcaagaagcaaggtctgctgctgtactgcgacatcatcgagagcacgttcgtggaggaacaactgccaagtcgcaaaatcgacgccatggacaacttccagaagtgcttcgccattctcaagctgtaccagccgggcgtggataacagcagctataacacgagtaagaagagtgacatggccgaggttaaggattggaaagcgatccgtgtggatctggtgatcacgccattcgagcagtacgcctatgcgctgctcggttggacgggcagccgcgaatttggtcgcgatctgcgccgctatgcgagtcatgagcgcaagatgatcctcgacaaccatggcctctacgaccgcaaaaagcgcatctttctgaaagcgggcagcgaagaagagattttcgcgcatctgggtctggattatgtggagccgtgggaacgcaacgcg

SEQ ID NO: 244 - protein, 394 aa, synthetic construct
  REGION 1..394: note = Variant of terminal deoxynucleotidyl transferase
MHHHHHHGGSGHPPSNTPELEVPSVIARKVSQYSCQRKTTLNNYNKKFTDAFEIMAENYEFKENEIFCLEFLRAASLLKYLPFPVTRMKDIQGLPCIGDQVRDVIEEIIEEGESSRVKEVLNDERYKAFKQFTSVFGVGVKTSEKWFRMGLRTVEEVKADKSLKLSKMQKAGFLYYEDLVSCVSKAEADAVTLIVKNTVSTFLPDALVTITGGFRRGKKMGHDIDFLITNPGPKEDDELLHKVVDLLKKQGLLLYCDIIESTFVEEQLPSRKIDAMDNFQKCFAILKLYQPGVDNSSYNTSKKSDMAEVKDWKAIRVDLVITPFEQYAYALLGWTGSREFGRDLRRYASHERKMILDNHGLYDRKKRIFLKAGSEEEIFAHLGLDYVEPWERNA

SEQ ID NO: 245 - DNA, 1182 bp, synthetic construct
  misc_feature 1..1182: note = Variant of terminal deoxynucleotidyl transferase
  source 1..1182: mol_type = other DNA
atgcaccatcatcatcatcatggcggtagcggccatccgccgagcaataccccggagctggaagtgccgagcgttatcgcccgcaaggttagtcagtacagctgccagcgcaagaccacgctgaataactacaacaaaaagtttaccgacgcgttcgagatcatggccgagaactacgaatttaaagagaacgaaatcttctgtctggaatttctgcgcgccgcgagtctgctgaaatatctgccgttcccggttacccgcatgaaagacatccaaggtctgccgtgcattggcgaccaagttcgtgacgtgatcgaggagatcatcgaagaaggcgagagcagccgtgttaaagaagttctcaatgacgagcgctacaaggcctttaagcagttcaccagcgtgttcggtgtgggcgtgaaaaccagcgaaaagtggtttcgtatgggcctccgtacggttgaagagctgaaggccgacaagagtctgaagctgagcaagatgcagaaggcgggctttctgtattacgaggatctggtgagctgcgttagtagggcggaagccgatgccgttacgctcatcgtgaagaacacggtgagtacctttctgccggatgcgctggtgaccatcacgggcggtttccgccgtggcaaaaagatgggccacgacatcgactttctgatcacgaatccgggcccgaaagaggatgacgaactgctccacaaagtggttgatctgctcaagaagcaaggtctgctgctgtactgcgacatcatcgagagcacgttcgtggaggaacaactgccaagtcgcaaaatcgacgccatggacaacttccagaagtgcttcgccattctcaagctgtaccagccgggcgtggataacagcagctataacacgagtaagaagagtgacatggccgaggttaaggattggaaagcgatccgtgtggatctggtgatcacgccattcgagcagtacgcctatgcgctgctcggttggacgggcagccgcgaatttggtcgcgatctgcgccgctatgcgagtcatgagcgcaagatgatcctcgacaaccatggcctctacgaccgcaaaaagcgcatctttctgaaagcgggcagcgaagaagagattttcgcgcatctgggtctggattatgtggagccgtgggaacgcaacgcg

SEQ ID NO: 246 - protein, 394 aa, synthetic construct
  REGION 1..394: note = Variant of terminal deoxynucleotidyl transferase
MHHHHHHGGSGHPPSNTPELEVPSVIARKVSQYSCQRKTTLNNYNKKFTDAFEIMAENYEFKENEIFCLEFLRAASLLKYLPFPVTRMKDIQGLPCIGDQVRDVIEEIIEEGESSRVKEVLNDERYKAFKQFTSVFGVGVKTSEKWFRMGLRTVEELKADKSLKLSKMQKAGFLYYEDLVSCVSRAEADAVTLIVKNTVSTFLPDALVTITGGFRRGKKMGHDIDFLITNPGPKEDDELLHKVVDLLKKQGLLLYCDIIESTFVEEQLPSRKIDAMDNFQKCFAILKLYQPGVDNSSYNTSKKSDMAEVKDWKAIRVDLVITPFEQYAYALLGWTGSREFGRDLRRYASHERKMILDNHGLYDRKKRIFLKAGSEEEIFAHLGLDYVEPWERNA

SEQ ID NO: 247 - DNA, 1182 bp, synthetic construct
  misc_feature 1..1182: note = Variant of terminal deoxynucleotidyl transferase
  source 1..1182: mol_type = other DNA
atgcaccatcatcatcatcatggcggtagcggccatccgccgagcaataccccggagctggaagtgccgagcgttatcgcccgcaaggttagtcagtacagctgccagcgcaagaccacgctgaataactacaacaaaaagtttaccgacgcgttcgagatcatggccgagaactacgaatttaaagagaacgaaatcttctgtctggaatttctgcgcgccgcgagtctgctgaaatatctgccgttcccggttacccgcatgaaagacatccaaggtctgccgtgcattggccctcaagttcgtgacgtgatcgaggagatcatcgaagaaggcgagagcagccgtgttaaagaagttctcaatgacgagcgctacaaggcctttaagcagttcaccagcgtgttcggtgtgggcgtgaaaaccagcgaaaagtggtttcgtatgggcctccgtacggttgaagagctgaaggccgacaagagtctgaagctgagcaagatgcagaaggcgggctttctgtattacgaggatctggtgagctgcgttagtaaagcggaagccgatgccgttacgctcatcgtgaagaacacggtgagtacctttctgccggatgcgctggtgaccatcacgggcggtttccgccgtggcaaaaagatgggccacgacatcgactttctgatcacgaatccgggcccgaaagaggatgacgaactgctccacaaagtggttgatctgctcaagaagcaaggtctgctgctgtactgcgacatcatcgagagcacgttcgtggaggaacaactgccaagtcgcaaaatcgacgccatggacaacttccagaagtgcttcgccattctcaagctgtaccagccgggcgtggataacagcagctataacacgagtaagaagagtgacatggccgaggttaaggattggaaagcgatccgtgtggatctggtgatcacgccattcgagcagtacgcctatgcgctgctcggttggacgggcagccgcgaatttggtcgcgatctgcgccgctatgcgagtcatgagcgcaagatgatcctcgacaaccatggcctctacgaccgcaaaaagcgcatctttctgaaagcgggcagcgaagaagagattttcgcgcatctgggtctggattatgtggagccgtgggaacgcaacgcg

SEQ ID NO: 248 - protein, 394 aa, synthetic construct
  REGION 1..394: note = Variant of terminal deoxynucleotidyl transferase
MHHHHHHGGSGHPPSNTPELEVPSVIARKVSQYSCQRKTTLNNYNKKFTDAFEIMAENYEFKENEIFCLEFLRAASLLKYLPFPVTRMKDIQGLPCIGPQVRDVIEEIIEEGESSRVKEVLNDERYKAFKQFTSVFGVGVKTSEKWFRMGLRTVEELKADKSLKLSKMQKAGFLYYEDLVSCVSKAEADAVTLIVKNTVSTFLPDALVTITGGFRRGKKMGHDIDFLITNPGPKEDDELLHKVVDLLKKQGLLLYCDIIESTFVEEQLPSRKIDAMDNFQKCFAILKLYQPGVDNSSYNTSKKSDMAEVKDWKAIRVDLVITPFEQYAYALLGWTGSREFGRDLRRYASHERKMILDNHGLYDRKKRIFLKAGSEEEIFAHLGLDYVEPWERNA

SEQ ID NO: 249 - DNA, 1182 bp, synthetic construct
  misc_feature 1..1182: note = Variant of terminal deoxynucleotidyl transferase
  source 1..1182: mol_type = other DNA
atgcaccatcatcatcatcatggcggtagcggccatccgccgagcaataccccggagctggaagtgccgagcgttatcgcccgcaaggttagtcagtacagctgccagcgcaagaccacgctgaataactacaacaaaaagtttaccgacgcgttcgagatcatggccgagaactacgaatttaaagagaacgaaatcttctgtctggaatttctgcgcgccgcgagtctgctgaaatatctgccgttcccggttacccgcatgaaagacatccaaggtctgccgtgcattggcgaccaagttcgtgacgtgatcgaggagatcatcgaagaaggcgagagcagccgtgttaaagaagttctcaatgacgagcgctacaaggcctttaagcagttcaccagcgtgttcggtgtgggcgtgaaaaccagcgaaaagtggtttcgtatgggcctccgtacggttgaagagctgaaggccgacaagagtctgaagctgagcaagatgcagaaggcgggctttctgtattacgaggatctggtgagctgcgttagtaaagcggaagccgatgccgttacgctcatcgtgaagaacacggtgagtacctttctgccggatgcgctggtgaccatcacgggcggtttccgccgtggcaaaaagatgggccacgacatcgactttctgatcacgaatccgggcccgaaacaggatgacgaactgctccacaaagtggttgatctgctcaagaagcaaggtctgctgctgtactgcgacatcatcgagagcacgttcgtggaggaacaactgccaagtcgcaaaatcgacgccatggacaacttccagaagtgcttcgccattctcaagctgtaccagccgggcgtggataacagcagctataacacgagtaagaagagtgacatggccgaggttaaggattggaaagcgatccgtgtggatctggtgatcacgccattcgagcagtacgcctatgcgctgctcggttggacgggcagccgcgaatttggtcgcgatctgcgccgctatgcgagtcatgagcgcaagatgatcctcgacaaccatggcctctacgaccgcaaaaagcgcatctttctgaaagcgggcagcgaagaagagattttcgcgcatctgggtctggattatgtggagccgtgggaacgcaacgcg

SEQ ID NO: 250 - protein, 394 aa, synthetic construct
  REGION 1..394: note = Variant of terminal deoxynucleotidyl transferase
MHHHHHHGGSGHPPSNTPELEVPSVIARKVSQYSCQRKTTLNNYNKKFTDAFEIMAENYEFKENEIFCLEFLRAASLLKYLPFPVTRMKDIQGLPCIGDQVRDVIEEIIEEGESSRVKEVLNDERYKAFKQFTSVFGVGVKTSEKWFRMGLRTVEELKADKSLKLSKMQKAGFLYYEDLVSCVSKAEADAVTLIVKNTVSTFLPDALVTITGGFRRGKKMGHDIDFLITNPGPKQDDELLHKVVDLLKKQGLLLYCDIIESTFVEEQLPSRKIDAMDNFQKCFAILKLYQPGVDNSSYNTSKKSDMAEVKDWKAIRVDLVITPFEQYAYALLGWTGSREFGRDLRRYASHERKMILDNHGLYDRKKRIFLKAGSEEEIFAHLGLDYVEPWERNA

SEQ ID NO: 251 - DNA, 1182 bp, synthetic construct
  misc_feature 1..1182: note = Variant of terminal deoxynucleotidyl transferase
  source 1..1182: mol_type = other DNA
atgcaccatcatcatcatcatggcggtagcggccatccgccgagcaataccccggagctggaagtgccgagcgttatcgcccgcaaggttagtcagtacagctgccagcgcaagaccacgctgaataactacaacaaaaagtttaccgacgcgttcgagatcatggccgagaactacgaatttaaagagaacgaaatcttctgtctggaatttctgcgcgccgcgagtctgctgaaatatctgccgttcccggttacccgcatgaaagacatccaaggtctgccgtgcattggcgaccaagttcgtgacgtgatcgaggagatcatcgaagaaggcgagagcagccgtgttaaagaagttctcaatgacgagcgctacaaggcctttaagcagttcaccagcgtgttcggtgtgggcgtgaaaaccagcgaaaagtggtttcgtatgggcctccgtacggttgaagagctgaaggccgacaagagtctgaagctgagcaagatgcagaaggcgggctttctgtattacgaggatctggtgagctgcgttagtaaagcggaagccgatgccgttacgctcatcgtgaagaacacggtgagtacctttctgccggatgcgctggtgaccatcacgggcggtttccgccgtggcaaaaagatgggccacgacatcgactttctgatcacgaatccgggcccgaaagaggatgacgaactgctccacaaagtggttgatctgctcaagaagcaaggtctgctgctgtactgcgacatcatcgagagcacgttcgtggaggaacaagtgccaagtcgcaaaatcgacgccatggacaacttccagaagtgcttcgccattctcaagctgtaccagccgggcgtggataacagcagctataacacgagtaagaagagtgacatggccgaggttaaggattggaaagcgatccgtgtggatctggtgatcacgccattcgagcagtacgcctatgcgctgctcggttggacgggcagccgcgaatttggtcgcgatctgcgccgctatgcgagtcatgagcgcaagatgatcctcgacaaccatggcctctacgaccgcaaaaagcgcatctttctgaaagcgggcagcgaagaagagattttcgcgcatctgggtctggattatgtggagccgtgggaacgcaacgcg

SEQ ID NO: 252 - protein, 394 aa, synthetic construct
  REGION 1..394: note = Variant of terminal deoxynucleotidyl transferase
MHHHHHHGGSGHPPSNTPELEVPSVIARKVSQYSCQRKTTLNNYNKKFTDAFEIMAENYEFKENEIFCLEFLRAASLLKYLPFPVTRMKDIQGLPCIGDQVRDVIEEIIEEGESSRVKEVLNDERYKAFKQFTSVFGVGVKTSEKWFRMGLRTVEELKADKSLKLSKMQKAGFLYYEDLVSCVSKAEADAVTLIVKNTVSTFLPDALVTITGGFRRGKKMGHDIDFLITNPGPKEDDELLHKVVDLLKKQGLLLYCDIIESTFVEEQVPSRKIDAMDNFQKCFAILKLYQPGVDNSSYNTSKKSDMAEVKDWKAIRVDLVITPFEQYAYALLGWTGSREFGRDLRRYASHERKMILDNHGLYDRKKRIFLKAGSEEEIFAHLGLDYVEPWERNA

SEQ ID NO: 253 - DNA, 1182 bp, synthetic construct
  misc_feature 1..1182: note = Variant of terminal deoxynucleotidyl transferase
  source 1..1182: mol_type = other DNA
atgcaccatcatcatcatcatggcggtagcggccatccgccgagcaataccccggagctggaagtgccgagcgttatcgcccgcaaggttagtcagtacagctgccagcgcaagaccacgctgaataactacaacaaaaagtttaccgacgcgttggagatcatggccgagaactacgaatttaaagagaacgaaatcttctgtctggaatttctgcgcgccgcgagtctgctgaaatatctgccgttcccggttacccgcatgaaagacatccaaggtctgccgtgcattggcgaccaagttcgtgacgtgatcgaggagatcatcgaagaaggcgagagcagccgtgttaaagaagttctcaatgacgagcgctacaaggcctttaagcagttcaccagcgtgttcggtgtgggcgtgaaaaccagcgaaaagtggtttcgtatgggcctccgtacggttgaagagctgaaggccgacaagagtctgaagctgagcaagatgcagaaggcgggctttctgtattacgaggatctggtgagctgcgttagtaaagcggaagccgatgccgttacgctcatcgtgaagaacacggtgagtacctttctgccggatgcgctggtgaccatcacgggcggtttccgccgtggcaaaaagatgggccacgacatcgactttctgatcacgaatccgggcccgaaagaggatgacgaactgctccacaaagtggttgatctgctcaagaagcaaggtctgctgctgtactgcgacatcatcgagagcacgttcgtggaggaacaactgccaagtcgcaaaatcgacgccatggacaacttccagaagtgcttcgccattctcaagctgtaccagccgggcgtggataacagcagctataacacgagtaagaagagtgacatggccgaggttaaggattggaaagcgatccgtgtggatctggtgatcacgccattcgagcagtacgcctatgcgctgctcggttggacgggcagccgcgaatttggtcgcgatctgcgccgctatgcgagtcatgagcgcaagatgatcctcgacaaccatggcctctacgaccgcaaaaagcgcatctttctgaaagcgggcagcgaagaagagattttcgcgcatctgggtctggattatgtggagccgtgggaacgcaacgcg

SEQ ID NO: 254 - protein, 394 aa, synthetic construct
  REGION 1..394: note = Variant of terminal deoxynucleotidyl transferase
MHHHHHHGGSGHPPSNTPELEVPSVIARKVSQYSCQRKTTLNNYNKKFTDALEIMAENYEFKENEIFCLEFLRAASLLKYLPFPVTRMKDIQGLPCIGDQVRDVIEEIIEEGESSRVKEVLNDERYKAFKQFTSVFGVGVKTSEKWFRMGLRTVEELKADKSLKLSKMQKAGFLYYEDLVSCVSKAEADAVTLIVKNTVSTFLPDALVTITGGFRRGKKMGHDIDFLITNPGPKEDDELLHKVVDLLKKQGLLLYCDIIESTFVEEQLPSRKIDAMDNFQKCFAILKLYQPGVDNSSYNTSKKSDMAEVKDWKAIRVDLVITPFEQYAYALLGWTGSREFGRDLRRYASHERKMILDNHGLYDRKKRIFLKAGSEEEIFAHLGLDYVEPWERNA

SEQ ID NO: 255 - DNA, 1182 bp, synthetic construct
  misc_feature 1..1182: note = Variant of terminal deoxynucleotidyl transferase
  source 1..1182: mol_type = other DNA
atgcaccatcatcatcatcatggcggtagcggccatccgccgagcaataccccggagctggaagtgccgagcgttatcgcccgcaaggttagtcagtacagctgccagcgcaagaccacgctgaataactacaacaaaaagtttaccgacgcgttcgagatcatggccgagaactacgaatttaaagagaacgaaatcttctgtctggaatttctgcgcgccgcgagtctgctgaaatatctgccgttcccggttacccgcatgaaagacatccaaggtctgccgtgcattggcgaccaagttcgtgacgtgatcgaggagatcatcgaagaaggcgagagcagccgtgttaaagaagttctcaatgacgagcgctacaaggcctttaagcagttcaccagcgtgttcggtgtgggcgtgaaaaccagcgaaaagtggtttcgtatgggcctccgtacggttgaagagctgaaggccgacaagagtctgaagctgagcaagatgcagaaggcgggctttctgtattacgaggatctggtgagctgcgttagtaaagcggaagccgatgccgttacgctcatcgtgaagaacacggtgagtacctttctgccggatgcgctggtgaccatcacgggcggtttccgccgtggcaaaaagatgggccacgacatcgactttctgatcacgaatccgggcccgaaagaggatgacgaactgctccacaaagtggttgatctgctcaagaagcaaggtctgctgctgtactgcgacatcatcgagagcacgttcgtggaggaacaactgccaagtcgcaaaatcgacgccatggacaacttccagaagtgcttcgccattctcaagctgtaccagccgggcgtggataacagcagctataacacgagtaagaagagtgacatggccgaggttaaggattggaaagcgatccgtgtggatctggtgatcacgccattcgagcagtacgcctatgcgctgctcggttggacgggcagccgcgaatttggtcgcgatctgcgccgctatgcgagtcatgagcgcgcgatgatcctcgacaaccatggcctctacgaccgcaaaaagcgcatctttctgaaagcgggcagcgaagaagagattttcgcgcatctgggtctggattatgtggagccgtgggaacgcaacgcg

SEQ ID NO: 256 - protein, 394 aa, synthetic construct
  REGION 1..394: note = Variant of terminal deoxynucleotidyl transferase
MHHHHHHGGSGHPPSNTPELEVPSVIARKVSQYSCQRKTTLNNYNKKFTDAFEIMAENYEFKENEIFCLEFLRAASLLKYLPFPVTRMKDIQGLPCIGDQVRDVIEEIIEEGESSRVKEVLNDERYKAFKQFTSVFGVGVKTSEKWFRMGLRTVEELKADKSLKLSKMQKAGFLYYEDLVSCVSKAEADAVTLIVKNTVSTFLPDALVTITGGFRRGKKMGHDIDFLITNPGPKEDDELLHKVVDLLKKQGLLLYCDIIESTFVEEQLPSRKIDAMDNFQKCFAILKLYQPGVDNSSYNTSKKSDMAEVKDWKAIRVDLVITPFEQYAYALLGWTGSREFGRDLRRYASHERAMILDNHGLYDRKKRIFLKAGSEEEIFAHLGLDYVEPWERNA

SEQ ID NO: 257 - DNA, 1182 bp, synthetic construct
  misc_feature 1..1182: note = Variant of terminal deoxynucleotidyl transferase
  source 1..1182: mol_type = other DNA
atgcaccatcatcatcatcatggcggtagcggccatccgccgagcaataccccggagctggaagtgccgagcgttatcgcccgcaaggttagtcagtacagctgccagcgcaagaccacgctgaataactacaacaaaaagtttaccgacgcgttcgagatcatggccgagaactacgaatttaaagagaacgaaatcttctgtctggaatttctgcgcgccgcgagtctgctgaaatatctgccgttcccggttacccgcatgaaagacatccaaggtctgccgtgcattggcgaccaagttcgtgacgtgatcgaggagatcatcgaagaaggcgagagcagccgtgttaaagaagttctcaatgacgagcgctacaaggcctttaagcagttcaccagcgtgttcggtgtgggcgtgaaaaccagcgaaaagtggtttcgtatgggcctccgtacggttgaagagctgaaggccgacaagagtctgaagctgagcaagatgcagaaggcgggctttctgtattacgaggatctggtgagctgcgttagtaaagcggaagccgatgccgttacgctcatcgtgaagaacacggtgagtacctttctgccggatgcgctggtgaccatcacgggcggtttccgccgtggcaaaaagatgggccacgacatcgactttctgatcacgaatccgggcccgaaagaggatgacgaactgctccacaaagtggttgatctgctcaagaagcaaggtctgctgctgtactgcgacatcatcgagagcacgttcgtggaggaacaactgccaagtcgcaaaatcgacgccatggacaacttccagaagtgcttcgccattctcaagctgtaccagccgggcgtggataaccggagctataacacgagtaagaagagtgacatggccgaggttaaggattggaaagcgatccgtgtggatctggtgatcacgccattcgagcagtacgcctatgcgctgctcggttggacgggcagccgcgaatttggtcgcgatctgcgccgctatgcgagtcatgagcgcaagatgatcctcgacaaccatggcctctacgaccgcaaaaagcgcatctttctgaaagcgggcagcgaagaagagattttcgcgcatctgggtctggattatgtggagccgtgggaacgcaacgcg

SEQ ID NO: 258 - protein, 394 aa, synthetic construct
  REGION 1..394: note = Variant of terminal deoxynucleotidyl transferase
MHHHHHHGGSGHPPSNTPELEVPSVIARKVSQYSCQRKTTLNNYNKKFTDAFEIMAENYEFKENEIFCLEFLRAASLLKYLPFPVTRMKDIQGLPCIGDQVRDVIEEIIEEGESSRVKEVLNDERYKAFKQFTSVFGVGVKTSEKWFRMGLRTVEELKADKSLKLSKMQKAGFLYYEDLVSCVSKAEADAVTLIVKNTVSTFLPDALVTITGGFRRGKKMGHDIDFLITNPGPKEDDELLHKVVDLLKKQGLLLYCDIIESTFVEEQLPSRKIDAMDNFQKCFAILKLYQPGVDNRSYNTSKKSDMAEVKDWKAIRVDLVITPFEQYAYALLGWTGSREFGRDLRRYASHERKMILDNHGLYDRKKRIFLKAGSEEEIFAHLGLDYVEPWERNA

SEQ ID NO: 259 - DNA, 1182 bp, synthetic construct
  misc_feature 1..1182: note = Variant of terminal deoxynucleotidyl transferase
  source 1..1182: mol_type = other DNA
atgcaccatcatcatcatcatggcggtagcggccatccgccgagcaataccccggagctggaagtgccgtatgttatcgcccgcaaggttagtcagtacagctgccagcgcaagaccacgctgaataactacaacaaaaagtttaccgacgcgttcgagatcatggccgagaactacgaatttaaagagaacgaaatcttctgtctggaatttctgcgcgccgcgagtctgctgaaatatctgccgttcccggttacccgcatgaaagacatccaaggtctgccgtgcattggcgaccaagttcgtgacgtgatcgaggagatcatcgaagaaggcgagagcagccgtgttaaagaagttctcaatgacgagcgctacaaggcctttaagcagttcaccagcgtgttcggtgtgggcgtgaaaaccagcgaaaagtggtttcgtatgggcctccgtacggttgaagagctgaaggccgacaagagtctgaagctgagcaagatgcagaaggcgggctttctgtattacgaggatctggtgagctgcgttagtaaagcggaagccgatgccgttacgctcatcgtgaagaacacggtgagtacctttctgccggatgcgctggtgaccatcacgggcggtttccgccgtggcaaaaagatgggccacgacatcgactttctgatcacgaatccgggcccgaaagaggatgacgaactgctccacaaagtggttgatctgctcaagaagcaaggtctgctgctgtactgcgacatcatcgagagcacgttcgtggaggaacaactgccaagtcgcaaaatcgacgccatggacaacttccagaagtgcttcgccattctcaagctgtaccagccgggcgtggataacagcagctataacacgagtaagaagagtgacatggccgaggttaaggattggaaagcgatccgtgtggatctggtgatcacgccattcgagcagtacgcctatgcgctgctcggttggacgggcagccgcgaatttggtcgcgatctgcgccgctatgcgagtcatgagcgcaagatgatcctcgacaaccatggcctctacgaccgcaaaaagcgcatctttctgaaagcgggcagcgaagaagagattttcgcgcatctgggtctggattatgtggagccgtgggaacgcaacgcg

SEQ ID NO: 260 - protein, 394 aa, synthetic construct
  REGION 1..394: note = Variant of terminal deoxynucleotidyl transferase
MHHHHHHGGSGHPPSNTPELEVPYVIARKVSQYSCQRKTTLNNYNKKFTDAFEIMAENYEFKENEIFCLEFLRAASLLKYLPFPVTRMKDIQGLPCIGDQVRDVIEEIIEEGESSRVKEVLNDERYKAFKQFTSVFGVGVKTSEKWFRMGLRTVEELKADKSLKLSKMQKAGFLYYEDLVSCVSKAEADAVTLIVKNTVSTFLPDALVTITGGFRRGKKMGHDIDFLITNPGPKEDDELLHKVVDLLKKQGLLLYCDIIESTFVEEQLPSRKIDAMDNFQKCFAILKLYQPGVDNSSYNTSKKSDMAEVKDWKAIRVDLVITPFEQYAYALLGWTGSREFGRDLRRYASHERKMILDNHGLYDRKKRIFLKAGSEEEIFAHLGLDYVEPWERNA

SEQ ID NO: 261 - DNA, 1182 bp, synthetic construct
  misc_feature 1..1182: note = Variant of terminal deoxynucleotidyl transferase
  source 1..1182: mol_type = other DNA
atgcaccatcatcatcatcatggcggtagcggccatccgccgagcaataccccggagctggaagtgccgagcgttatcgcccgcaaggttagtcagtacagctgccagcgcaagaccacgctgaataactacaacaaaaagtttaccgacgcgttcgagatcatggccgagaactacgaatttaaagagaacgaaatcttctgtctggaatttctgcgcgccgcgagtctgctgaaatatctgccgttcccggttacccgcatgaaagacatccaaggtctgccgtgcattggcgaccaagttcgtgacgtgatcgaggagatcatcgaagaaggcgagagcagccgtgttaaagaagttctcaatgacgagcgctacaaggcctttaagcagttcaccagcgtgttcggtgtgggcgtgaaaaccagcgaaaagtggtttcgtatgggcctccgtacggttgaagagctgaaggccgacaagagtctgaagctgagcaagatgcagaaggcgggctttctgtattacgaggatctggtgagctgcgttagtaaagcggaagccgatgccgttacgctcatcgtgaagaacacggtgagtacctttctgccggatgcgctggtgaccatcacgggcggtttccgccgtggcaaaaagatgggccacgacatcgactttctgatcacgaatccgggcccgaaagaggatgacgaactgctccacaaagtggttgatctgctcaagaagcaaggtctgctgctgtactgcgacatcatcgagagcacgttcgtggaggaacaactgccaagtcgcaaaatcgacgccatggacaacttccagaagtgcttcgccattctcaagctgtaccagccgggcgtggataactggagctataacacgagtaagaagagtgacatggccgaggttaaggattggaaagcgatccgtgtggatctggtgatcacgccattcgagcagtacgcctatgcgctgctcggttggacgggcagccgcgaatttggtcgcgatctgcgccgctatgcgagtcatgagcgcaagatgatcctcgacaaccatggcctctacgaccgcaaaaagcgcatctttctgaaagcgggcagcgaagaagagattttcgcgcatctgggtctggattatgtggagccgtgggaacgcaacgcg

SEQ ID NO: 262 - protein, 394 aa, synthetic construct
  REGION 1..394: note = Variant of terminal deoxynucleotidyl transferase
MHHHHHHGGSGHPPSNTPELEVPSVIARKVSQYSCQRKTTLNNYNKKFTDAFEIMAENYEFKENEIFCLEFLRAASLLKYLPFPVTRMKDIQGLPCIGDQVRDVIEEIIEEGESSRVKEVLNDERYKAFKQFTSVFGVGVKTSEKWFRMGLRTVEELKADKSLKLSKMQKAGFLYYEDLVSCVSKAEADAVTLIVKNTVSTFLPDALVTITGGFRRGKKMGHDIDFLITNPGPKEDDELLHKVVDLLKKQGLLLYCDIIESTFVEEQLPSRKIDAMDNFQKCFAILKLYQPGVDNWSYNTSKKSDMAEVKDWKAIRVDLVITPFEQYAYALLGWTGSREFGRDLRRYASHERKMILDNHGLYDRKKRIFLKAGSEEEIFAHLGLDYVEPWERNA

SEQ ID NO: 263 - DNA, 1182 bp, synthetic construct
  misc_feature 1..1182: note = Variant of terminal deoxynucleotidyl transferase
  source 1..1182: mol_type = other DNA
atgcaccatcatcatcatcatggcggtagcggccatccgccgagcaataccccggagctggaagtgccgagcgttatcgcccgcaaggttagtcagtacagctgccagcgcaagaccacgctgaataactacaacaaaaagtttaccgacgcgttcgagatcatggccgagaactacgaatttaaagagaacgaaatcttctgtctggaatttctgcgcgccgcgagtctgctgaaatatctgccgttcccggttacccgcatgaaagacatccaaggtctgccgtgcattggcgaccaagttcgtgacgtgatcgaggagatcatcgaagaaggcgagagcagccgtgttaaagaagttctcaatgacgagcgctacaaggcctttaagcagttcaccagcgtgttcggtgtgggcgtgaaaaccagcgaaaagtggtttcgtatgggcctccgtacggttgaagagctgaaggccgacaagagtctgaagctgagcaagatgcagaaggcgggctttctgtattacgaggatctggtgagctgcgttagtaaagcggaagccgatgccgttacgctcatcgtgaagaacacggtgagtacctttctgccggatgcgctggtgaccatcacgggcggtttccgccgtggcaaaaagatgggccacgacatcgactttctgatcacgaatccgggcccgaaagaggatcgggaactgctccacaaagtggttgatctgctcaagaagcaaggtctgctgctgtactgcgacatcatcgagagcacgttcgtggaggaacaactgccaagtcgcaaaatcgacgccatggacaacttccagaagtgcttcgccattctcaagctgtaccagccgggcgtggataacagcagctataacacgagtaagaagagtgacatggccgaggttaaggattggaaagcgatccgtgtggatctggtgatcacgccattcgagcagtacgcctatgcgctgctcggttggacgggcagccgcgaatttggtcgcgatctgcgccgctatgcgagtcatgagcgcaagatgatcctcgacaaccatggcctctacgaccgcaaaaagcgcatctttctgaaagcgggcagcgaagaagagattttcgcgcatctgggtctggattatgtggagccgtgggaacgcaacgcg

SEQ ID NO: 264 - protein, 394 aa, synthetic construct
  REGION 1..394: note = Variant of terminal deoxynucleotidyl transferase
MHHHHHHGGSGHPPSNTPELEVPSVIARKVSQYSCQRKTTLNNYNKKFTDAFEIMAENYEFKENEIFCLEFLRAASLLKYLPFPVTRMKDIQGLPCIGDQVRDVIEEIIEEGESSRVKEVLNDERYKAFKQFTSVFGVGVKTSEKWFRMGLRTVEELKADKSLKLSKMQKAGFLYYEDLVSCVSKAEADAVTLIVKNTVSTFLPDALVTITGGFRRGKKMGHDIDFLITNPGPKEDRELLHKVVDLLKKQGLLLYCDIIESTFVEEQLPSRKIDAMDNFQKCFAILKLYQPGVDNSSYNTSKKSDMAEVKDWKAIRVDLVITPFEQYAYALLGWTGSREFGRDLRRYASHERKMILDNHGLYDRKKRIFLKAGSEEEIFAHLGLDYVEPWERNA

SEQ ID NO: 265 - DNA, 1182 bp, synthetic construct
  misc_feature 1..1182: note = Variant of terminal deoxynucleotidyl transferase
  source 1..1182: mol_type = other DNA
atgcaccatcatcatcatcatggcggtagcggccatccgccgagcaataccccggagctggaagtgccgagcgttatcgcccgcaaggttagtcagtacagctgccagcgcaagaccacgctgaataactacaacaaaaagtttaccgacgcgttcgagatcatggccgagaactacgaatttaaagagaacgaaatcttctgtctggaatttctgcgcgccgcgagtctgctgaaatatctgccgttcccggttacccgcatgaaagacatccaaggtctgccgtgcattggcgaccaagttcgtgacgtgatcgaggagatcatcgaagaaggcgagagcagccgtgttaaagaagttctcaatgacgagcgctacaaggcctttaagcagttcaccagcgtgttcggtgtgggcgtgaaaaccagcgaaaagtggtttcgtatgggcctccgtacggttgaagagctgaaggccgacaagagtctgaagctgagcaagatgcagaaggcgggctttctgtattacgaggatctggtgagctgcgttagtaaagcggaagccgatgccgttacgctcatcgtgaagaacacggtgagtacctttctgccggatgcgctggtgaccatcacgggcggtttccgccgtggcaaaaagatgggccacgacatcgactttctgatcacgaatccgggcccgaaagaggatgacgaactgctccacaaagtggttgatctgctcaagaagcaaggtctgctgctgtactgcgacatcatcgagagcacgttcgtggaggaacaactgccaagtcgcaaaatcgacgccatggacaacttccagaagtgcttcgccattctcaagctgtaccagccgggcgtggataacagcagctataacacgagtaagaagagtgacatgattgaggttaaggattggaaagcgatccgtgtggatctggtgatcacgccattcgagcagtacgcctatgcgctgctcggttggacgggcagccgcgaatttggtcgcgatctgcgccgctatgcgagtcatgagcgcaagatgatcctcgacaaccatggcctctacgaccgcaaaaagcgcatctttctgaaagcgggcagcgaagaagagattttcgcgcatctgggtctggattatgtggagccgtgggaacgcaacgcg

SEQ ID NO: 266 - protein, 394 aa, synthetic construct
  REGION 1..394: note = Variant of terminal deoxynucleotidyl transferase
MHHHHHHGGSGHPPSNTPELEVPSVIARKVSQYSCQRKTTLNNYNKKFTDAFEIMAENYEFKENEIFCLEFLRAASLLKYLPFPVTRMKDIQGLPCIGDQVRDVIEEIIEEGESSRVKEVLNDERYKAFKQFTSVFGVGVKTSEKWFRMGLRTVEELKADKSLKLSKMQKAGFLYYEDLVSCVSKAEADAVTLIVKNTVSTFLPDALVTITGGFRRGKKMGHDIDFLITNPGPKEDDELLHKVVDLLKKQGLLLYCDIIESTFVEEQLPSRKIDAMDNFQKCFAILKLYQPGVDNSSYNTSKKSDMIEVKDWKAIRVDLVITPFEQYAYALLGWTGSREFGRDLRRYASHERKMILDNHGLYDRKKRIFLKAGSEEEIFAHLGLDYVEPWERNA

SEQ ID NO: 267 - DNA, 1182 bp, synthetic construct
  misc_feature 1..1182: note = Variant of terminal deoxynucleotidyl transferase
  source 1..1182: mol_type = other DNA
atgcaccatcatcatcatcatggcggtagcggccatccgccgagcaataccccggagctggaagtgccgagcgttatcgcccgcaaggttagtcagtacagctgccagcgcaagaccacgctgaataactacaacaaaaagtttaccgacgcgttcgagatcatggccgagaactacgaatttaaagagaacgaaatcttctgtctggaatttctgcgcgccgcgagtctgctgaaatatctgccgttcccggttacccgcatgaaagacatccaaggtctgccgtgcattggcgaccaagttcgtgacgtgatcgaggagatcatcgaagaaggcgagagcagccgtgttaaagaagttctcaatgacgagcgctacaaggcctttaagcagttcaccagcgtgttcggtgtgggcgtgaaaaccagcgaaaagtggtttcgtatgggcctccgtacggttgaagagctgaaggccgacaagcggctgaagctgagcaagatgcagaaggcgggctttctgtattacgaggatctggtgagctgcgttagtaaagcggaagccgatgccgttacgctcatcgtgaagaacacggtgagtacctttctgccggatgcgctggtgaccatcacgggcggtttccgccgtggcaaaaagatgggccacgacatcgactttctgatcacgaatccgggcccgaaagaggatgacgaactgctccacaaagtggttgatctgctcaagaagcaaggtctgctgctgtactgcgacatcatcgagagcacgttcgtggaggaacaactgccaagtcgcaaaatcgacgccatggacaacttccagaagtgcttcgccattctcaagctgtaccagccgggcgtggataacagcagctataacacgagtaagaagagtgacatggccgaggttaaggattggaaagcgatccgtgtggatctggtgatcacgccattcgagcagtacgcctatgcgctgctcggttggacgggcagccgcgaatttggtcgcgatctgcgccgctatgcgagtcatgagcgcaagatgatcctcgacaaccatggcctctacgaccgcaaaaagcgcatctttctgaaagcgggcagcgaagaagagattttcgcgcatctgggtctggattatgtggagccgtgggaacgcaacgcg

SEQ ID NO: 268 - protein, 394 aa, synthetic construct
  REGION 1..394: note = Variant of terminal deoxynucleotidyl transferase
MHHHHHHGGSGHPPSNTPELEVPSVIARKVSQYSCQRKTTLNNYNKKFTDAFEIMAENYEFKENEIFCLEFLRAASLLKYLPFPVTRMKDIQGLPCIGDQVRDVIEEIIEEGESSRVKEVLNDERYKAFKQFTSVFGVGVKTSEKWFRMGLRTVEELKADKRLKLSKMQKAGFLYYEDLVSCVSKAEADAVTLIVKNTVSTFLPDALVTITGGFRRGKKMGHDIDFLITNPGPKEDDELLHKVVDLLKKQGLLLYCDIIESTFVEEQLPSRKIDAMDNFQKCFAILKLYQPGVDNSSYNTSKKSDMAEVKDWKAIRVDLVITPFEQYAYALLGWTGSREFGRDLRRYASHERKMILDNHGLYDRKKRIFLKAGSEEEIFAHLGLDYVEPWERNA

SEQ ID NO: 269 - DNA, 1182 bp, synthetic construct
  misc_feature 1..1182: note = Variant of terminal deoxynucleotidyl transferase
  source 1..1182: mol_type = other DNA
atgcaccatcatcatcatcatggcggtagcggccatccgccgagcaataccccggagctggaagtgccgagcgttatcgcccgcaaggttagtcagtacagctgccagcgcaagaccacgctgaataactacaacaaaaagtttaccgacgcgttcgagatcatggccgagaactacgaatttaaagagaacgaaatcttctgtctggaatttctgcgcgccgcgagtctgctgaaatatctgccgttcccggttacccgcatgaaagacatccaaggtctgccgtgcattggcgaccaagttcgtgacgtgatcgaggagatcatcgaagaaggcgagagcagccgtgttaaagaagttctcaatgacgagcgctacaaggcctttaagcagttcaccagcgtgttcggtgtgggcgtgaaaaccagcgaaaagtggtttcgtatgggcctccgtacggttgaagagctgaaggccgacaagagtctgaagctgagcaagatgcagaaggcgggctttctgtattacgaggatctggtgagctgcgttagtaaagcggaagccgatgccgttacgctcatcgtgaagaacacggtgagtacctttctgccggatgcgctggtgaccatcacgggcggtttccgccgtggcaaaaagatgggccacgacatcgactttctgatcacgaatccgggcccgaaagaggatgacgaactgctccacaaagtggttgatctgctcaagaagcaaggtctgctgctgtactgcgacatcatcgagagcacgttcgtggaggaacaactgccaagtcgcggtatcgacgccatggacaacttccagaagtgcttcgccattctcaagctgtaccagccgggcgtggataacagcagctataacacgagtaagaagagtgacatggccgaggttaaggattggaaagcgatccgtgtggatctggtgatcacgccattcgagcagtacgcctatgcgctgctcggttggacgggcagccgcgaatttggtcgcgatctgcgccgctatgcgagtcatgagcgcaagatgatcctcgacaaccatggcctctacgaccgcaaaaagcgcatctttctgaaagcgggcagcgaagaagagattttcgcgcatctgggtctggattatgtggagccgtgggaacgcaacgcg

SEQ ID NO: 270 - protein, 394 aa, synthetic construct
  REGION 1..394: note = Variant of terminal deoxynucleotidyl transferase
MHHHHHHGGSGHPPSNTPELEVPSVIARKVSQYSCQRKTTLNNYNKKFTDAFEIMAENYEFKENEIFCLEFLRAASLLKYLPFPVTRMKDIQGLPCIGDQVRDVIEEIIEEGESSRVKEVLNDERYKAFKQFTSVFGVGVKTSEKWFRMGLRTVEELKADKSLKLSKMQKAGFLYYEDLVSCVSKAEADAVTLIVKNTVSTFLPDALVTITGGFRRGKKMGHDIDFLITNPGPKEDDELLHKVVDLLKKQGLLLYCDIIESTFVEEQLPSRGIDAMDNFQKCFAILKLYQPGVDNSSYNTSKKSDMAEVKDWKAIRVDLVITPFEQYAYALLGWTGSREFGRDLRRYASHERKMILDNHGLYDRKKRIFLKAGSEEEIFAHLGLDYVEPWERNA

SEQ ID NO: 271 - DNA, 1182 bp, synthetic construct
  misc_feature 1..1182: note = Variant of terminal deoxynucleotidyl transferase
  source 1..1182: mol_type = other DNA
atgcaccatcatcatcatcatggcggtagcggccatccgccgagcaataccccggagctggaagtgccgagcgttatcgcccgcaaggttagtcagtacagctgccagcgcaagaccacgctgaataactacaacaaaaagtttaccgacgcgttcgagatcatggccgagaactacgaatttaaagagaacgaaatcttctgtctggaatttctgcgcgccgcgagtctgctgaaatatctgccgttcccggttacccgcatgaaagacatccaaggtctgccgtgcattggcgaccaagttcgtgacgtgatcgaggagatcatcgaagaaggcgagagcagccgtgttaaagaagttctcaatgacgagcgctacaaggcctttaagcagttcaccagcgtgttcggtgtgggcgtgaaaaccagcgaaaagtggtttcgtatgggcctccgtacggttgaagagctgaaggccgacaagagtctgaagctgagcaagatgcagaaggcgggctttctgtattacgaggatctggtgagctgcgttagtaaagcggaagccgatgccgttacgctcatcgtgaagaacacggtgagtacctttctgccggatgcgctggtgaccatcacgggcggtttccgccgtggcaaaaagatgggccacgacatcgactttctgatcacgaatccgggcccgaaagaggatgacgaactgctccacaaagtggttgatctgctcaagaagcaaggtctgctgctgtactgcgacatcatcgagagcacgttcgtggaggaacaactgccaagtcgcaaaatcgacgccatggacaacttccagaagtgcttcgccattctcaagctgtaccagccgggcgtggataacagcagctataacacgagtaagaagagtgacatggccgaggttaaggattggaaagcgatccgtgtggatctggtgatccggccattcgagcagtacgcctatgcgctgctcggttggacgggcagccgcgaatttggtcgcgatctgcgccgctatgcgagtcatgagcgcaagatgatcctcgacaaccatggcctctacgaccgcaaaaagcgcatctttctgaaagcgggcagcgaagaagagattttcgcgcatctgggtctggattatgtggagccgtgggaacgcaacgcg

SEQ ID NO: 272 - protein, 394 aa, synthetic construct
  REGION 1..394: note = Variant of terminal deoxynucleotidyl transferase
MHHHHHHGGSGHPPSNTPELEVPSVIARKVSQYSCQRKTTLNNYNKKFTDAFEIMAENYEFKENEIFCLEFLRAASLLKYLPFPVTRMKDIQGLPCIGDQVRDVIEEIIEEGESSRVKEVLNDERYKAFKQFTSVFGVGVKTSEKWFRMGLRTVEELKADKSLKLSKMQKAGFLYYEDLVSCVSKAEADAVTLIVKNTVSTFLPDALVTITGGFRRGKKMGHDIDFLITNPGPKEDDELLHKVVDLLKKQGLLLYCDIIESTFVEEQLPSRKIDAMDNFQKCFAILKLYQPGVDNSSYNTSKKSDMAEVKDWKAIRVDLVIRPFEQYAYALLGWTGSREFGRDLRRYASHERKMILDNHGLYDRKKRIFLKAGSEEEIFAHLGLDYVEPWERNA

SEQ ID NO: 273 - DNA, 1182 bp, synthetic construct
  misc_feature 1..1182: note = Variant of terminal deoxynucleotidyl transferase
  source 1..1182: mol_type = other DNA
atgcaccatcatcatcatcatggcggtagcggccatccgccgagcaataccccggagctggaagtgccgagcgttatcgcccgcaaggttagtcagtacagctgccagcgcaagaccacgctgaataactacaacaaaaagtttaccgacgcgttcgagatcatggccgagaactacgaatttaaagagaacgaaatcttctgtctggaatttctgcgcgccgcgagtctgctgaaatatctgccgttcccggttacccgcatgaaagacatccaaggtctgccgtgcattggcgaccaagttcgtgacgtgatcgaggagatcatcgaagaaggcgagagcagccgtgttaaagaagttctcaatgacgagcgctacaaggcctttaagcagttcaccagcgtgttcggtgtgggcgtgaaaaccagcgaaaagtggtttcgtatgggcctccgtacggttgaagagctgaaggccgacaagagtctgaagctgagcaagatgcagaaggcgggctttctgtattacgaggatctggtgagctgcgttagtaaagcggaagccgatgccgttacgctcatcgtgaagaacacggtgagtacctttctgccggatgcgctggtgaccatcacgggcggtttccgccgtggcaaaaagatgggccacgacatcgactttctgatcacgaatccgggcccgaaagaggatgacgaactgctccacaaagtggttgatctgctcaagaagcaaggtctgctgctgtactgcgacatcatcgagagcacgttcgtggaggaacaactgccaagtcgcaaaatcgacgccatggacaacttctgtaagtgcttcgccattctcaagctgtaccagccgggcgtggataacagcagctataacacgagtaagaagagtgacatggccgaggttaaggattggaaagcgatccgtgtggatctggtgatcacgccattcgagcagtacgcctatgcgctgctcggttggacgggcagccgcgaatttggtcgcgatctgcgccgctatgcgagtcatgagcgcaagatgatcctcgacaaccatggcctctacgaccgcaaaaagcgcatctttctgaaagcgggcagcgaagaagagattttcgcgcatctgggtctggattatgtggagccgtgggaacgcaacgcg

SEQ ID NO: 274 - protein, 394 aa, synthetic construct
  REGION 1..394: note = Variant of terminal deoxynucleotidyl transferase
MHHHHHHGGSGHPPSNTPELEVPSVIARKVSQYSCQRKTTLNNYNKKFTDAFEIMAENYEFKENEIFCLEFLRAASLLKYLPFPVTRMKDIQGLPCIGDQVRDVIEEIIEEGESSRVKEVLNDERYKAFKQFTSVFGVGVKTSEKWFRMGLRTVEELKADKSLKLSKMQKAGFLYYEDLVSCVSKAEADAVTLIVKNTVSTFLPDALVTITGGFRRGKKMGHDIDFLITNPGPKEDDELLHKVVDLLKKQGLLLYCDIIESTFVEEQLPSRKIDAMDNFCKCFAILKLYQPGVDNSSYNTSKKSDMAEVKDWKAIRVDLVITPFEQYAYALLGWTGSREFGRDLRRYASHERKMILDNHGLYDRKKRIFLKAGSEEEIFAHLGLDYVEPWERNA

SEQ ID NO: 275 - DNA, 1182 bp, synthetic construct
  misc_feature 1..1182: note = Variant of terminal deoxynucleotidyl transferase
  source 1..1182: mol_type = other DNA
atgcaccatcatcatcatcatggcggtagcggccatccgccgagcaataccccggagctggaagtgccgagcgttatcgcccgcaagccgagtcagtacagctgccagcgcaagaccacgctgaataactacaacaaaaagtttaccgacgcgttcgagatcatggccgagaactacgaatttaaagagaacgaaatcttctgtctggaatttctgcgcgccgcgagtctgctgaaatatctgccgttcccggttacccgcatgaaagacatccaaggtctgccgtgcattggcgaccaagttcgtgacgtgatcgaggagatcatcgaagaaggcgagagcagccgtgttaaagaagttctcaatgacgagcgctacaaggcctttaagcagttcaccagcgtgttcggtgtgggcgtgaaaaccagcgaaaagtggtttcgtatgggcctccgtacggttgaagagctgaaggccgacaagagtctgaagctgagcaagatgcagaaggcgggctttctgtattacgaggatctggtgagctgcgttagtaaagcggaagccgatgccgttacgctcatcgtgaagaacacggtgagtacctttctgccggatgcgctggtgaccatcacgggcggtttccgccgtggcaaaaagatgggccacgacatcgactttctgatcacgaatccgggcccgaaagaggatgacgaactgctccacaaagtggttgatctgctcaagaagcaaggtctgctgctgtactgcgacatcatcgagagcacgttcgtggaggaacaactgccaagtcgcaaaatcgacgccatggacaacttccagaagtgcttcgccattctcaagctgtaccagccgggcgtggataacagcagctataacacgagtaagaagagtgacatggccgaggttaaggattggaaagcgatccgtgtggatctggtgatcacgccattcgagcagtacgcctatgcgctgctcggttggacgggcagccgcgaatttggtcgcgatctgcgccgctatgcgagtcatgagcgcaagatgatcctcgacaaccatggcctctacgaccgcaaaaagcgcatctttctgaaagcgggcagcgaagaagagattttcgcgcatctgggtctggattatgtggagccgtgggaacgcaacgcg

SEQ ID NO: 276 - protein, 394 aa, synthetic construct
  REGION 1..394: note = Variant of terminal deoxynucleotidyl transferase
MHHHHHHGGSGHPPSNTPELEVPSVIARKPSQYSCQRKTTLNNYNKKFTDAFEIMAENYEFKENEIFCLEFLRAASLLKYLPFPVTRMKDIQGLPCIGDQVRDVIEEIIEEGESSRVKEVLNDERYKAFKQFTSVFGVGVKTSEKWFRMGLRTVEELKADKSLKLSKMQKAGFLYYEDLVSCVSKAEADAVTLIVKNTVSTFLPDALVTITGGFRRGKKMGHDIDFLITNPGPKEDDELLHKVVDLLKKQGLLLYCDIIESTFVEEQLPSRKIDAMDNFQKCFAILKLYQPGVDNSSYNTSKKSDMAEVKDWKAIRVDLVITPFEQYAYALLGWTGSREFGRDLRRYASHERKMILDNHGLYDRKKRIFLKAGSEEEIFAHLGLDYVEPWERNA

SEQ ID NO: 277 - DNA, 1182 bp, synthetic construct
  misc_feature 1..1182: note = Variant of terminal deoxynucleotidyl transferase
  source 1..1182: mol_type = other DNA
atgcaccatcatcatcatcatggcggtagcggccatccgccgagcaataccccggagctggaagtgccgagcgttatcgcccgcaaggttagtcagtacagctgccagcgcaagaccacgctgaataactacaacaaaaagtttaccgacgcgttcgagatcatggccgagaactacgaatttaaagagaacgaaatcttctgtctggaatttctgcgcgccgcgagtctgctgaaatatctgccgttcccggttacccgcatgaaagacatccaaggtctgccgtgcattggcgaccaagttcgtgacgtgatcgaggagatcatcgaagaaggcgagagcagccgtgttaaagaagttctcaatgacgagcgctacaaggcctttaagcagttcaccagcgtgttcggtgtgggcgtgaaaaccagcgaaaagtggtttcgtatgggcctccgtacggttgaagagctgaaggccgacaagagtctgaagctgagcaagatgcagaaggcgggctttctgtattacgaggatctggtgagctgcgttagtaaagcggaagccgatgccgttacgctcatcgtgaagaacacggtgagtacctttctgccggatgcgctggtgaccatcacgggcggtttccgccgtggcaaaaagatgggccacgacatcgactttctgatcacgaatccgggcccgaaagaggatgacgaactgctccacaaagtggttgatctgctcaagaagcaaggtctgctgctgtactgcgacatcatcgagagcacgttcgtggaggaacaactgccaagtcgcaaaatcgacgccatggacaacttccagaagtgcttcgccattctcaagctgtaccagccgggcgtggataactatagctataacacgagtaagaagagtgacatggccgaggttaaggattggaaagcgatccgtgtggatctggtgatcacgccattcgagcagtacgcctatgcgctgctcggttggacgggcagccgcgaatttggtcgcgatctgcgccgctatgcgagtcatgagcgcaagatgatcctcgacaaccatggcctctacgaccgcaaaaagcgcatctttctgaaagcgggcagcgaagaagagattttcgcgcatctgggtctggattatgtggagccgtgggaacgcaacgcg

SEQ ID NO: 278 - protein, 394 aa, synthetic construct
  REGION 1..394: note = Variant of terminal deoxynucleotidyl transferase
MHHHHHHGGSGHPPSNTPELEVPSVIARKVSQYSCQRKTTLNNYNKKFTDAFEIMAENYEFKENEIFCLEFLRAASLLKYLPFPVTRMKDIQGLPCIGDQVRDVIEEIIEEGESSRVKEVLNDERYKAFKQFTSVFGVGVKTSEKWFRMGLRTVEELKADKSLKLSKMQKAGFLYYEDLVSCVSKAEADAVTLIVKNTVSTFLPDALVTITGGFRRGKKMGHDIDFLITNPGPKEDDELLHKVVDLLKKQGLLLYCDIIESTFVEEQLPSRKIDAMDNFQKCFAILKLYQPGVDNYSYNTSKKSDMAEVKDWKAIRVDLVITPFEQYAYALLGWTGSREFGRDLRRYASHERKMILDNHGLYDRKKRIFLKAGSEEEIFAHLGLDYVEPWERNA

SEQ ID NO: 279 - DNA, 1182 bp, synthetic construct
  misc_feature 1..1182: note = Variant of terminal deoxynucleotidyl transferase
  source 1..1182: mol_type = other DNA
atgcaccatcatcatcatcatggcggtagcggccatccgccgagcaataccccggagctggaagtgccgagcgttatcgcccgcaaggttagtcagtacagctgccagcgcaagaccacgctgaataactacaacaaaaagtttaccgacgcgttcgagatcatggccgagaactacgaatttaaagagaacgaaatcttctgtctggaatttctgcgcgccgcgagtctgctgaaatatctgccgttcccggttacccgcatgaaagacatccaaggtctgccgtgcattggcgaccaagttcgtgacgtgatcgaggagatcatcgaagaaggcgagagcagccgtgttaaagaagttctcaatgacgagcgctacaaggcctttaagcagttcaccagcgtgttcggtgtgggcgtgaaaaccagcgaaaagtggtttcgtatgggcctccgtacggttgaagagctgaaggccgacaagagtctgaagctgagcaagatgcagaaggcgggctttctgtattacgaggatctggtgagctgcgttagtaaagcggaagccgatgccgttacgctcatcgtgaagaacacggtgagtacctttctgccggatgcgctggtgaccatcacgggcggtttccgccgtggcaaaaagatgggccacgacatcgactttctgatcacgaatccgggcccgaaagaggatgacgaactgctccacaaagtggttgatctgctcaagaagcaaggtctgctgctgtactgcgacatcatcgagagcacgttcgtggaggaacaactgccaagtcgcaaaatcgacgccatggacaacttccagaagtgcttcgccattctcaagctgtaccagccgggcgtggataacagcccgtataacacgagtaagaagagtgacatggccgaggttaaggattggaaagcgatccgtgtggatctggtgatcacgccattcgagcagtacgcctatgcgctgctcggttggacgggcagccgcgaatttggtcgcgatctgcgccgctatgcgagtcatgagcgcaagatgatcctcgacaaccatggcctctacgaccgcaaaaagcgcatctttctgaaagcgggcagcgaagaagagattttcgcgcatctgggtctggattatgtggagccgtgggaacgcaacgcg

SEQ ID NO: 280 - protein, 394 aa, synthetic construct
  REGION 1..394: note = Variant of terminal deoxynucleotidyl transferase
MHHHHHHGGSGHPPSNTPELEVPSVIARKVSQYSCQRKTTLNNYNKKFTDAFEIMAENYEFKENEIFCLEFLRAASLLKYLPFPVTRMKDIQGLPCIGDQVRDVIEEIIEEGESSRVKEVLNDERYKAFKQFTSVFGVGVKTSEKWFRMGLRTVEELKADKSLKLSKMQKAGFLYYEDLVSCVSKAEADAVTLIVKNTVSTFLPDALVTITGGFRRGKKMGHDIDFLITNPGPKEDDELLHKVVDLLKKQGLLLYCDIIESTFVEEQLPSRKIDAMDNFQKCFAILKLYQPGVDNSPYNTSKKSDMAEVKDWKAIRVDLVITPFEQYAYALLGWTGSREFGRDLRRYASHERKMILDNHGLYDRKKRIFLKAGSEEEIFAHLGLDYVEPWERNA

SEQ ID NO: 281 - DNA, 1182 bp, synthetic construct
  misc_feature 1..1182: note = Variant of terminal deoxynucleotidyl transferase
  source 1..1182: mol_type = other DNA
atgcaccatcatcatcatcatggcggtagcggccatccgccgagcaataccccggagctggaagtgccgagcgttatcgcccgcaaggttagtcagtacagctgccagcgcaagaccacgctgaataactacaacaaaaagtttaccgacgcgttcgagatcatggccgagaactacgaatttaaagagaacgaaatcggttgtctggaatttctgcgcgccgcgagtctgctgaaatatctgccgttcccggttacccgcatgaaagacatccaaggtctgccgtgcattggcgaccaagttcgtgacgtgatcgaggagatcatcgaagaaggcgagagcagccgtgttaaagaagttctcaatgacgagcgctacaaggcctttaagcagttcaccagcgtgttcggtgtgggcgtgaaaaccagcgaaaagtggtttcgtatgggcctccgtacggttgaagagctgaaggccgacaagagtctgaagctgagcaagatgcagaaggcgggctttctgtattacgaggatctggtgagctgcgttagtaaagcggaagccgatgccgttacgctcatcgtgaagaacacggtgagtacctttctgccggatgcgctggtgaccatcacgggcggtttccgccgtggcaaaaagatgggccacgacatcgactttctgatcacgaatccgggcccgaaagaggatgacgaactgctccacaaagtggttgatctgctcaagaagcaaggtctgctgctgtactgcgacatcatcgagagcacgttcgtggaggaacaactgccaagtcgcaaaatcgacgccatggacaacttccagaagtgcttcgccattctcaagctgtaccagccgggcgtggataacagcagctataacacgagtaagaagagtgacatggccgaggttaaggattggaaagcgatccgtgtggatctggtgatcacgccattcgagcagtacgcctatgcgctgctcggttggacgggcagccgcgaatttggtcgcgatctgcgccgctatgcgagtcatgagcgcaagatgatcctcgacaaccatggcctctacgaccgcaaaaagcgcatctttctgaaagcgggcagcgaagaagagattttcgcgcatctgggtctggattatgtggagccgtgggaacgcaacgcg

SEQ ID NO: 282 - protein, 394 aa, synthetic construct
  REGION 1..394: note = Variant of terminal deoxynucleotidyl transferase
MHHHHHHGGSGHPPSNTPELEVPSVIARKVSQYSCQRKTTLNNYNKKFTDAFEIMAENYEFKENEIGCLEFLRAASLLKYLPFPVTRMKDIQGLPCIGDQVRDVIEEIIEEGESSRVKEVLNDERYKAFKQFTSVFGVGVKTSEKWFRMGLRTVEELKADKSLKLSKMQKAGFLYYEDLVSCVSKAEADAVTLIVKNTVSTFLPDALVTITGGFRRGKKMGHDIDFLITNPGPKEDDELLHKVVDLLKKQGLLLYCDIIESTFVEEQLPSRKIDAMDNFQKCFAILKLYQPGVDNSSYNTSKKSDMAEVKDWKAIRVDLVITPFEQYAYALLGWTGSREFGRDLRRYASHERKMILDNHGLYDRKKRIFLKAGSEEEIFAHLGLDYVEPWERNA

SEQ ID NO: 283 - DNA, 1182 bp, synthetic construct
  misc_feature 1..1182: note = Variant of terminal deoxynucleotidyl transferase
  source 1..1182: mol_type = other DNA
atgcaccatcatcatcatcatggcggtagcggccatccgccgagcaataccccggagctggaagtgccgagcgttatcgcccgcaaggttagtcagtacagctgccagcgcaagaccacgctgaataactacaacaaaaagtttaccgacgcgttcgagatcatggccgagaactacgaatttaaagagaacgaaatcttctgtctggaatttctgcgcgccgcgagtctgctgaaatatctgccgttcccggttacccgcatgaaagacatccaaggtctgccgtgcattggcgaccaagttcgtgacgtgatcgaggagatcatcgaagaaggcgagagcagccgtgttaaagaagttctcaatgacgagcgctacaaggcctttaagcagttcaccagcgtgttcggtgtgggcgtgaaaaccagcgaaaagtggtttcgtatgggcctccgtacggttgaagagctgaaggccgacaagagtctgaagctgagcaagatgcagaaggcgggctttctgtattacgaggatctggtgagctgcgttagtaaagcggaagccgatgccgttacgctcatcgtgaagaacacggtgagtacctttctgccggatgcgctggtgaccatcacgggcggtttccgccgtggcaaaaagatgggccacgacatcgactttctgatcacgaatccgggcccgaaagaggatgacgaactgctccacaaagtggttgatctgctcaagaagcaaggtctgctgctgtactgcgacatcatcgagagcacgttcgtggaggaacaactgccaagtcgcaaaatcgacgccatggacaacttccagaagtgcttcgccattctcaagctgtaccagccgggcgtggataacagcagctataacacgagtaagaagagtgacatggccgaggttaaggattggaaagcgatccgtgtggatctggtgatcacgccattcgagcagtacgcctatgcgctgctcggttggacgggcagccgcgaatttggtcgcgatctgcgccgctatgcgagtcatgagcgcaagatgatcctcgacaaccatggcctctacgaccgcaaaaagcgcatctttctgattgcgggcagcgaagaagagattttcgcgcatctgggtctggattatgtggagccgtgggaacgcaacgcg

SEQ ID NO: 284 - protein, 394 aa, synthetic construct
  REGION 1..394: note = Variant of terminal deoxynucleotidyl transferase
MHHHHHHGGSGHPPSNTPELEVPSVIARKVSQYSCQRKTTLNNYNKKFTDAFEIMAENYEFKENEIFCLEFLRAASLLKYLPFPVTRMKDIQGLPCIGDQVRDVIEEIIEEGESSRVKEVLNDERYKAFKQFTSVFGVGVKTSEKWFRMGLRTVEELKADKSLKLSKMQKAGFLYYEDLVSCVSKAEADAVTLIVKNTVSTFLPDALVTITGGFRRGKKMGHDIDFLITNPGPKEDDELLHKVVDLLKKQGLLLYCDIIESTFVEEQLPSRKIDAMDNFQKCFAILKLYQPGVDNSSYNTSKKSDMAEVKDWKAIRVDLVITPFEQYAYALLGWTGSREFGRDLRRYASHERKMILDNHGLYDRKKRIFLIAGSEEEIFAHLGLDYVEPWERNA

SEQ ID NO: 285 - DNA, 1182 bp, synthetic construct
  misc_feature 1..1182: note = Variant of terminal deoxynucleotidyl transferase
  source 1..1182: mol_type = other DNA
atgcaccatcatcatcatcatggcggtgatggccatccgccgagcaataccccggagctggaagtgccgagcgttatcgcccgcaaggttagtcagtacagctgccagcgcaagaccacgctgaataactacaacaaaaagtttaccgacgcgttcgagatcatggccgagaactacgaatttaaagagaacgaaatcttctgtctggaatttctgcgcgccgcgagtctgctgaaatatctgccgttcccggttacccgcatgaaagacatccaaggtctgccgtgcattggcgaccaagttcgtgacgtgatcgaggagatcatcgaagaaggcgagagcagccgtgttaaagaagttctcaatgacgagcgctacaaggcctttaagcagttcaccagcgtgttcggtgtgggcgtgaaaaccagcgaaaagtggtttcgtatgggcctccgtacggttgaagagctgaaggccgacaagagtctgaagctgagcaagatgcagaaggcgggctttctgtattacgaggatctggtgagctgcgttagtaaagcggaagccgatgccgttacgctcatcgtgaagaacacggtgagtacctttctgccggatgcgctggtgaccatcacgggcggtttccgccgtggcaaaaagatgggccacgacatcgactttctgatcacgaatccgggcccgaaagaggatgacgaactgctccacaaagtggttgatctgctcaagaagcaaggtctgctgctgtactgcgacatcatcgagagcacgttcgtggaggaacaactgccaagtcgcaaaatcgacgccatggacaacttccagaagtgcttcgccattctcaagctgtaccagccgggcgtggataacagcagctataacacgagtaagaagagtgacatggccgaggttaaggattggaaagcgatccgtgtggatctggtgatcacgccattcgagcagtacgcctatgcgctgctcggttggacgggcagccgcgaatttggtcgcgatctgcgccgctatgcgagtcatgagcgcaagatgatcctcgacaaccatggcctctacgaccgcaaaaagcgcatctttctgaaagcgggcagcgaagaagagattttcgcgcatctgggtctggattatgtggagccgtgggaacgcaacgcg

SEQ ID NO: 286 - protein, 394 aa, synthetic construct
  REGION 1..394: note = Variant of terminal deoxynucleotidyl transferase
MHHHHHHGGDGHPPSNTPELEVPSVIARKVSQYSCQRKTTLNNYNKKFTDAFEIMAENYEFKENEIFCLEFLRAASLLKYLPFPVTRMKDIQGLPCIGDQVRDVIEEIIEEGESSRVKEVLNDERYKAFKQFTSVFGVGVKTSEKWFRMGLRTVEELKADKSLKLSKMQKAGFLYYEDLVSCVSKAEADAVTLIVKNTVSTFLPDALVTITGGFRRGKKMGHDIDFLITNPGPKEDDELLHKVVDLLKKQGLLLYCDIIESTFVEEQLPSRKIDAMDNFQKCFAILKLYQPGVDNSSYNTSKKSDMAEVKDWKAIRVDLVITPFEQYAYALLGWTGSREFGRDLRRYASHERKMILDNHGLYDRKKRIFLKAGSEEEIFAHLGLDYVEPWERNA

SEQ ID NO: 287 - DNA, 1182 bp, synthetic construct
  misc_feature 1..1182: note = Variant of terminal deoxynucleotidyl transferase
  source 1..1182: mol_type = other DNA
atgcaccatcatcatcatcatggcggtagccgtcatccgccgagcaataccccggagctggaagtgccgagcgttatcgcccgcaaggttagtcagtacagctgccagcgcaagaccacgctgaataactacaacaaaaagtttaccgacgcgttcgagatcatggccgagaactacgaatttaaagagaacgaaatcttctgtctggaatttctgcgcgccgcgagtctgctgaaatatctgccgttcccggttacccgcatgaaagacatccaaggtctgccgtgcattggcgaccaagttcgtgacgtgatcgaggagatcatcgaagaaggcgagagcagccgtgttaaagaagttctcaatgacgagcgctacaaggcctttaagcagttcaccagcgtgttcggtgtgggcgtgaaaaccagcgaaaagtggtttcgtatgggcctccgtacggttgaagagctgaaggccgacaagagtctgaagctgagcaagatgcagaaggcgggctttctgtattacgaggatctggtgagctgcgttagtaaagcggaagccgatgccgttacgctcatcgtgaagaacacggtgagtacctttctgccggatgcgctggtgaccatcacgggcggtttccgccgtggcaaaaagatgggccacgacatcgactttctgatcacgaatccgggcccgaaagaggatgacgaactgctccacaaagtggttgatctgctcaagaagcaaggtctgctgctgtactgcgacatcatcgagagcacgttcgtggaggaacaactgccaagtcgcaaaatcgacgccatggacaacttccagaagtgcttcgccattctcaagctgtaccagccgggcgtggataacagcagctataacacgagtaagaagagtgacatggccgaggttaaggattggaaagcgatccgtgtggatctggtgatcacgccattcgagcagtacgcctatgcgctgctcggttggacgggcagccgcgaatttggtcgcgatctgcgccgctatgcgagtcatgagcgcaagatgatcctcgacaaccatggcctctacgaccgcaaaaagcgcatctttctgaaagcgggcagcgaagaagagattttcgcgcatctgggtctggattatgtggagccgtgggaacgcaacgcg

SEQ ID NO: 288 - protein, 394 aa, synthetic construct
  REGION 1..394: note = Variant of terminal deoxynucleotidyl transferase
MHHHHHHGGSRHPPSNTPELEVPSVIARKVSQYSCQRKTTLNNYNKKFTDAFEIMAENYEFKENEIFCLEFLRAASLLKYLPFPVTRMKDIQGLPCIGDQVRDVIEEIIEEGESSRVKEVLNDERYKAFKQFTSVFGVGVKTSEKWFRMGLRTVEELKADKSLKLSKMQKAGFLYYEDLVSCVSKAEADAVTLIVKNTVSTFLPDALVTITGGFRRGKKMGHDIDFLITNPGPKEDDELLHKVVDLLKKQGLLLYCDIIESTFVEEQLPSRKIDAMDNFQKCFAILKLYQPGVDNSSYNTSKKSDMAEVKDWKAIRVDLVITPFEQYAYALLGWTGSREFGRDLRRYASHERKMILDNHGLYDRKKRIFLKAGSEEEIFAHLGLDYVEPWERNA

SEQ ID NO: 289 - DNA, 1182 bp, synthetic construct
  misc_feature 1..1182: note = Variant of terminal deoxynucleotidyl transferase
  source 1..1182: mol_type = other DNA
atgcaccatcatcatcatcatggcggtagcggccatccgccgagcaataccccggagctggaagtgccgagcgttatcgcccgcaaggttagtcagtacagctgccagcgcaagaccacgctgaataactacaacaaaaagtttaccgacgcgttcgagatcatggccgagaactacgaatttaaagagaacgaaatcttctgtctggaatttctgcgcgccgcgagtctgctgaaatatctgccgttcccggttacccgcatgaaagacatccaaggtctgccgtgcattggcgaccaagttcgtgacgtgatcgaggagatcatcgaagaaggcgagagcagccgtgttaaagaagttctcaatgacgagcgctacaaggcctttaagcagttcaccagcgtgttcggtgtgggcgtgaaaaccagcgaaaagtggtttcgtatgggcctccgtacggttgaagagctgaaggccgacaagagtctgaagctgagcaagatgcagaaggcgggctttctgtattacgaggatctggtgagctgcgttagtaaagcggaagccgatgccgttacgctcatcgtgaagaacacggtgagtacctttctgccggatgcgctggtgaccatcacgggcggtttccgccgtggcaaaaagatgggccacgacatcgactttctgatcacgaatccgggcccgaaagaggatgacgaactgctccacaaagtggttgatctgctcaagaagcaaggtctgctgctgtactgcgacatcatcgagagcacgttcgtggaggaacaactgccaagtcgcaaaatcgacgccatggacaacttccagaagtgcttcgccattctcaagctggggcagccgggcgtggataacagcagctataacacgagtaagaagagtgacatggccgaggttaaggattggaaagcgatccgtgtggatctggtgatcacgccattcgagcagtacgcctatgcgctgctcggttggacgggcagccgcgaatttggtcgcgatctgcgccgctatgcgagtcatgagcgcaagatgatcctcgacaaccatggcctctacgaccgcaaaaagcgcatctttctgaaagcgggcagcgaagaagagattttcgcgcatctgggtctggattatgtggagccgtgggaacgcaacgcg

SEQ ID NO: 290 - protein, 394 aa, synthetic construct
  REGION 1..394: note = Variant of terminal deoxynucleotidyl transferase
MHHHHHHGGSGHPPSNTPELEVPSVIARKVSQYSCQRKTTLNNYNKKFTDAFEIMAENYEFKENEIFCLEFLRAASLLKYLPFPVTRMKDIQGLPCIGDQVRDVIEEIIEEGESSRVKEVLNDERYKAFKQFTSVFGVGVKTSEKWFRMGLRTVEELKADKSLKLSKMQKAGFLYYEDLVSCVSKAEADAVTLIVKNTVSTFLPDALVTITGGFRRGKKMGHDIDFLITNPGPKEDDELLHKVVDLLKKQGLLLYCDIIESTFVEEQLPSRKIDAMDNFQKCFAILKLGQPGVDNSSYNTSKKSDMAEVKDWKAIRVDLVITPFEQYAYALLGWTGSREFGRDLRRYASHERKMILDNHGLYDRKKRIFLKAGSEEEIFAHLGLDYVEPWERNA

SEQ ID NO: 291 - DNA, 1182 bp, synthetic construct
  misc_feature 1..1182: note = Variant of terminal deoxynucleotidyl transferase
  source 1..1182: mol_type = other DNA
atgcaccatcatcatcatcatggcggtagcggccatccgccgagcaataccccggagctggaagtgccgagcgttatcgcccgcaaggttagtcagtacagctgccagcgcaagaccacgctgaataactacaacaaaaagtttaccgacgcgttcgagatcatggccgagaactacgaatttaaagagaacgaaatcttctgtctggaatttctgcgcgccgcgagtctgctgaaatatctgccgttcccggttacccgcatgaaagacatccaaggtctgccgtgcattggcgaccaagttcgtgacgtgatcgaggagatcatcgaagaaggcgagagcagccgtgttaaagaagttctcaatgacgagcgctacaaggcctttaagcagttcaccagcgtgttcggtgtgggcgtgaaaaccagcgaaaagtggtttcgtatgggcctccgtacggttgaagagctgaaggccgacaagagtctgaagctgagcaagatgcagaaggcgggctttctgtattacgaggatctggtgagctgcgttagtaaagcggaagccgatgccgttacgctcatcgtgaagaacacggtgagtacctttctgccggatgcgctggtgaccatcacgggcggtttccgccgtggcaaaaagatgggccacgacatcgactttctgatcacgaatccgggcccgaaagaggatgacgaactgctccacaaagtggttgatgttctcaagaagcaaggtctgctgctgtactgcgacatcatcgagagcacgttcgtggaggaacaactgccaagtcgcaaaatcgacgccatggacaacttccagaagtgcttcgccattctcaagctgtaccagccgggcgtggataacagcagctataacacgagtaagaagagtgacatggccgaggttaaggattggaaagcgatccgtgtggatctggtgatcacgccattcgagcagtacgcctatgcgctgctcggttggacgggcagccgcgaatttggtcgcgatctgcgccgctatgcgagtcatgagcgcaagatgatcctcgacaaccatggcctctacgaccgcaaaaagcgcatctttctgaaagcgggcagcgaagaagagattttcgcgcatctgggtctggattatgtggagccgtgggaacgcaacgcg

SEQ ID NO: 292 - protein, 394 aa, synthetic construct
  REGION 1..394: note = Variant of terminal deoxynucleotidyl transferase
MHHHHHHGGSGHPPSNTPELEVPSVIARKVSQYSCQRKTTLNNYNKKFTDAFEIMAENYEFKENEIFCLEFLRAASLLKYLPFPVTRMKDIQGLPCIGDQVRDVIEEIIEEGESSRVKEVLNDERYKAFKQFTSVFGVGVKTSEKWFRMGLRTVEELKADKSLKLSKMQKAGFLYYEDLVSCVSKAEADAVTLIVKNTVSTFLPDALVTITGGFRRGKKMGHDIDFLITNPGPKEDDELLHKVVDVLKKQGLLLYCDIIESTFVEEQLPSRKIDAMDNFQKCFAILKLYQPGVDNSSYNTSKKSDMAEVKDWKAIRVDLVITPFEQYAYALLGWTGSREFGRDLRRYASHERKMILDNHGLYDRKKRIFLKAGSEEEIFAHLGLDYVEPWERNA

SEQ ID NO: 293 - DNA, 1182 bp, synthetic construct
  misc_feature 1..1182: note = Variant of terminal deoxynucleotidyl transferase
  source 1..1182: mol_type = other DNA
atgcaccatcatcatcatcatggcggtagcggccatccgccgagcaataccccggagctggaagtgccgagcgttatcgcccgcaaggttagtcagtacagctgccagcgcaagaccacgctgaataactacaacaaaaagtttaccgacgcgttcgagatcatggccgagaactacgaatttaaagagaacgaaatcttctgtctggaatttctgcgcgccgcgagtctgctgaaatatctgccgttcccggttacccgcatgaaagacatccaaggtctgccgtgcattggcgaccaagtttgggacgtgatcgaggagatcatcgaagaaggcgagagcagccgtgttaaagaagttctcaatgacgagcgctacaaggcctttaagcagttcaccagcgtgttcggtgtgggcgtgaaaaccagcgaaaagtggtttcgtatgggcctccgtacggttgaagagctgaaggccgacaagagtctgaagctgagcaagatgcagaaggcgggctttctgtattacgaggatctggtgagctgcgttagtaaagcggaagccgatgccgttacgctcatcgtgaagaacacggtgagtacctttctgccggatgcgctggtgaccatcacgggcggtttccgccgtggcaaaaagatgggccacgacatcgactttctgatcacgaatccgggcccgaaagaggatgacgaactgctccacaaagtggttgatctgctcaagaagcaaggtctgctgctgtactgcgacatcatcgagagcacgttcgtggaggaacaactgccaagtcgcaaaatcgacgccatggacaacttccagaagtgcttcgccattctcaagctgtaccagccgggcgtggataacagcagctataacacgagtaagaagagtgacatggccgaggttaaggattggaaagcgatccgtgtggatctggtgatcacgccattcgagcagtacgcctatgcgctgctcggttggacgggcagccgcgaatttggtcgcgatctgcgccgctatgcgagtcatgagcgcaagatgatcctcgacaaccatggcctctacgaccgcaaaaagcgcatctttctgaaagcgggcagcgaagaagagattttcgcgcatctgggtctggattatgtggagccgtgggaacgcaacgcg

SEQ ID NO: 294 - protein, 394 aa, synthetic construct
  REGION 1..394: note = Variant of terminal deoxynucleotidyl transferase
MHHHHHHGGSGHPPSNTPELEVPSVIARKVSQYSCQRKTTLNNYNKKFTDAFEIMAENYEFKENEIFCLEFLRAASLLKYLPFPVTRMKDIQGLPCIGDQVWDVIEEIIEEGESSRVKEVLNDERYKAFKQFTSVFGVGVKTSEKWFRMGLRTVEELKADKSLKLSKMQKAGFLYYEDLVSCVSKAEADAVTLIVKNTVSTFLPDALVTITGGFRRGKKMGHDIDFLITNPGPKEDDELLHKVVDLLKKQGLLLYCDIIESTFVEEQLPSRKIDAMDNFQKCFAILKLYQPGVDNSSYNTSKKSDMAEVKDWKAIRVDLVITPFEQYAYALLGWTGSREFGRDLRRYASHERKMILDNHGLYDRKKRIFLKAGSEEEIFAHLGLDYVEPWERNA

SEQ ID NO: 295 - DNA, 1182 bp, synthetic construct
  misc_feature 1..1182: note = Variant of terminal deoxynucleotidyl transferase
  source 1..1182: mol_type = other DNA
atgcaccatcatcatcatcatggcggtagcggccatccgccgagcaataccccggagctggaagtgccgacggttatcgcccgcaaggttagtcagtacagctgccagcgcaagaccacgctgaataactacaacaaaaagtttaccgacgcgttcgagatcatggccgagaactacgaatttaaagagaacgaaatcttctgtctggaatttctgcgcgccgcgagtctgctgaaatatctgccgttcccggttacccgcatgaaagacatccaaggtctgccgtgcattggcgaccaagttcgtgacgtgatcgaggagatcatcgaagaaggcgagagcagccgtgttaaagaagttctcaatgacgagcgctacaaggcctttaagcagttcaccagcgtgttcggtgtgggcgtgaaaaccagcgaaaagtggtttcgtatgggcctccgtacggttgaagagctgaaggccgacaagagtctgaagctgagcaagatgcagaaggcgggctttctgtattacgaggatctggtgagctgcgttagtaaagcggaagccgatgccgttacgctcatcgtgaagaacacggtgagtacctttctgccggatgcgctggtgaccatcacgggcggtttccgccgtggcaaaaagatgggccacgacatcgactttctgatcacgaatccgggcccgaaagaggatgacgaactgctccacaaagtggttgatctgctcaagaagcaaggtctgctgctgtactgcgacatcatcgagagcacgttcgtggaggaacaactgccaagtcgcaaaatcgacgccatggacaacttccagaagtgcttcgccattctcaagctgtaccagccgggcgtggataacagcagctataacacgagtaagaagagtgacatggccgaggttaaggattggaaagcgatccgtgtggatctggtgatcacgccattcgagcagtacgcctatgcgctgctcggttggacgggcagccgcgaatttggtcgcgatctgcgccgctatgcgagtcatgagcgcaagatgatcctcgacaaccatggcctctacgaccgcaaaaagcgcatctttctgaaagcgggcagcgaagaagagattttcgcgcatctgggtctggattatgtggagccgtgggaacgcaacgcg

SEQ ID NO: 296 - protein, 394 aa, synthetic construct
  REGION 1..394: note = Variant of terminal deoxynucleotidyl transferase
MHHHHHHGGSGHPPSNTPELEVPTVIARKVSQYSCQRKTTLNNYNKKFTDAFEIMAENYEFKENEIFCLEFLRAASLLKYLPFPVTRMKDIQGLPCIGDQVRDVIEEIIEEGESSRVKEVLNDERYKAFKQFTSVFGVGVKTSEKWFRMGLRTVEELKADKSLKLSKMQKAGFLYYEDLVSCVSKAEADAVTLIVKNTVSTFLPDALVTITGGFRRGKKMGHDIDFLITNPGPKEDDELLHKVVDLLKKQGLLLYCDIIESTFVEEQLPSRKIDAMDNFQKCFAILKLYQPGVDNSSYNTSKKSDMAEVKDWKAIRVDLVITPFEQYAYALLGWTGSREFGRDLRRYASHERKMILDNHGLYDRKKRIFLKAGSEEEIFAHLGLDYVEPWERNA

SEQ ID NO: 297 - DNA, 1182 bp, synthetic construct
  misc_feature 1..1182: note = Variant of terminal deoxynucleotidyl transferase
  source 1..1182: mol_type = other DNA
atgcaccatcatcatcatcatggcggtagcggccatccgccgagcaataccccggagctggaagtgccgagcgttatcgcccgcaaggttagtcagtacagctgccagcgcaagaccacgctgaataactacaacaaaaagtttaccgacgcgttcgagatcatggccgagaactacgaatttaaagagaacgaaatcttctgtctggaatttctgcgcgccgcgagtctgctgaaatatctgccgttcccggttacccgcatgaaagacatccaaggtctgccgtgcattggcgaccaagttcgtgacgtgatcgaggagatcatcgaagaaggcgagagcagccgtgttaaagaagttctcaatgacgagcgctacaaggcctttaagcagttcaccagcgtgttcggtgtgggcgtgaaaaccagccggaagtggtttcgtatgggcctccgtacggttgaagagctgaaggccgacaagagtctgaagctgagcaagatgcagaaggcgggctttctgtattacgaggatctggtgagctgcgttagtaaagcggaagccgatgccgttacgctcatcgtgaagaacacggtgagtacctttctgccggatgcgctggtgaccatcacgggcggtttccgccgtggcaaaaagatgggccacgacatcgactttctgatcacgaatccgggcccgaaagaggatgacgaactgctccacaaagtggttgatctgctcaagaagcaaggtctgctgctgtactgcgacatcatcgagagcacgttcgtggaggaacaactgccaagtcgcaaaatcgacgccatggacaacttccagaagtgcttcgccattctcaagctgtaccagccgggcgtggataacagcagctataacacgagtaagaagagtgacatggccgaggttaaggattggaaagcgatccgtgtggatctggtgatcacgccattcgagcagtacgcctatgcgctgctcggttggacgggcagccgcgaatttggtcgcgatctgcgccgctatgcgagtcatgagcgcaagatgatcctcgacaaccatggcctctacgaccgcaaaaagcgcatctttctgaaagcgggcagcgaagaagagattttcgcgcatctgggtctggattatgtggagccgtgggaacgcaacgcg

SEQ ID NO: 298 - protein, 394 aa, synthetic construct
  REGION 1..394: note = Variant of terminal deoxynucleotidyl transferase
MHHHHHHGGSGHPPSNTPELEVPSVIARKVSQYSCQRKTTLNNYNKKFTDAFEIMAENYEFKENEIFCLEFLRAASLLKYLPFPVTRMKDIQGLPCIGDQVRDVIEEIIEEGESSRVKEVLNDERYKAFKQFTSVFGVGVKTSRKWFRMGLRTVEELKADKSLKLSKMQKAGFLYYEDLVSCVSKAEADAVTLIVKNTVSTFLPDALVTITGGFRRGKKMGHDIDFLITNPGPKEDDELLHKVVDLLKKQGLLLYCDIIESTFVEEQLPSRKIDAMDNFQKCFAILKLYQPGVDNSSYNTSKKSDMAEVKDWKAIRVDLVITPFEQYAYALLGWTGSREFGRDLRRYASHERKMILDNHGLYDRKKRIFLKAGSEEEIFAHLGLDYVEPWERNA

SEQ ID NO: 299 - DNA, 1182 bp, synthetic construct
  misc_feature 1..1182: note = Variant of terminal deoxynucleotidyl transferase
  source 1..1182: mol_type = other DNA
atgcaccatcatcatcatcatggcggtagcggccatccgccgagcaataccccggagctggaagtgccgagcgttatcgcccgcaaggttagtcagtacagctgccagcgcaagaccacgctgaataactacaacaaaaagtttaccgacgcgttcgagatcatggccgagaactacgaatttaaagagaacgaaatcttctgtctggaatttctgcgcgccgcgagtctgctgaaatatctgccgttcccggttacccgcatgaaagacatcatgggtctgccgtgcattggcgaccaagttcgtgacgtgatcgaggagatcatcgaagaaggcgagagcagccgtgttaaagaagttctcaatgacgagcgctacaaggcctttaagcagttcaccagcgtgttcggtgtgggcgtgaaaaccagcgaaaagtggtttcgtatgggcctccgtacggttgaagagctgaaggccgacaagagtctgaagctgagcaagatgcagaaggcgggctttctgtattacgaggatctggtgagctgcgttagtaaagcggaagccgatgccgttacgctcatcgtgaagaacacggtgagtacctttctgccggatgcgctggtgaccatcacgggcggtttccgccgtggcaaaaagatgggccacgacatcgactttctgatcacgaatccgggcccgaaagaggatgacgaactgctccacaaagtggttgatctgctcaagaagcaaggtctgctgctgtactgcgacatcatcgagagcacgttcgtggaggaacaactgccaagtcgcaaaatcgacgccatggacaacttccagaagtgcttcgccattctcaagctgtaccagccgggcgtggataacagcagctataacacgagtaagaagagtgacatggccgaggttaaggattggaaagcgatccgtgtggatctggtgatcacgccattcgagcagtacgcctatgcgctgctcggttggacgggcagccgcgaatttggtcgcgatctgcgccgctatgcgagtcatgagcgcaagatgatcctcgacaaccatggcctctacgaccgcaaaaagcgcatctttctgaaagcgggcagcgaagaagagattttcgcgcatctgggtctggattatgtggagccgtgggaacgcaacgcg

SEQ ID NO: 300 - protein, 394 aa, synthetic construct
  REGION 1..394: note = Variant of terminal deoxynucleotidyl transferase
MHHHHHHGGSGHPPSNTPELEVPSVIARKVSQYSCQRKTTLNNYNKKFTDAFEIMAENYEFKENEIFCLEFLRAASLLKYLPFPVTRMKDIMGLPCIGDQVRDVIEEIIEEGESSRVKEVLNDERYKAFKQFTSVFGVGVKTSEKWFRMGLRTVEELKADKSLKLSKMQKAGFLYYEDLVSCVSKAEADAVTLIVKNTVSTFLPDALVTITGGFRRGKKMGHDIDFLITNPGPKEDDELLHKVVDLLKKQGLLLYCDIIESTFVEEQLPSRKIDAMDNFQKCFAILKLYQPGVDNSSYNTSKKSDMAEVKDWKAIRVDLVITPFEQYAYALLGWTGSREFGRDLRRYASHERKMILDNHGLYDRKKRIFLKAGSEEEIFAHLGLDYVEPWERNA

SEQ ID NO: 301 - DNA, 1182 bp, synthetic construct
  misc_feature 1..1182: note = Variant of terminal deoxynucleotidyl transferase
  source 1..1182: mol_type = other DNA
atgcaccatcatcatcatcatggcggtagcggccatccgccgagcaataccccggagctggaagtgccgagcgttatcgcccgcaaggttagtcagtacagctgccagcgcaagaccacgctgaataactacaacaaaaagtttaccgacgcgttcgagatcatggccgagaactacgaatttaaagagaacgaaatcttctgtctggaatttctgcgcgccgcgagtctgctgaaatatctgccgttcccggttacccgcatgaaagacatccaaggtctgccgtgcattggcgaccaagttcgtgacgtgatcgaggagatcatcgaagaaggcgagagcagccgtgttaaagaagttctcaatgacgagcgctacaaggcctttaagcagttcaccagcgtgttcggtgtgggcgtgaaaaccagcgaaaagtggtttcgtatgggcctccgtacggttgaagagctgaaggccgacaagagtctgaagctgagcaagatgcagaaggcgggctttctgtattacgaggatctggtgagctgcgttagtaaagcggaagccgatgccgttacgtggatcgtgaagaacacggtgagtacctttctgccggatgcgctggtgaccatcacgggcggtttccgccgtggcaaaaagatgggccacgacatcgactttctgatcacgaatccgggcccgaaagaggatgacgaactgctccacaaagtggttgatctgctcaagaagcaaggtctgctgctgtactgcgacatcatcgagagcacgttcgtggaggaacaactgccaagtcgcaaaatcgacgccatggacaacttccagaagtgcttcgccattctcaagctgtaccagccgggcgtggataacagcagctataacacgagtaagaagagtgacatggccgaggttaaggattggaaagcgatccgtgtggatctggtgatcacgccattcgagcagtacgcctatgcgctgctcggttggacgggcagccgcgaatttggtcgcgatctgcgccgctatgcgagtcatgagcgcaagatgatcctcgacaaccatggcctctacgaccgcaaaaagcgcatctttctgaaagcgggcagcgaagaagagattttcgcgcatctgggtctggattatgtggagccgtgggaacgcaacgcg

SEQ ID NO: 302 - protein, 394 aa, synthetic construct
  REGION 1..394: note = Variant of terminal deoxynucleotidyl transferase
MHHHHHHGGSGHPPSNTPELEVPSVIARKVSQYSCQRKTTLNNYNKKFTDAFEIMAENYEFKENEIFCLEFLRAASLLKYLPFPVTRMKDIQGLPCIGDQVRDVIEEIIEEGESSRVKEVLNDERYKAFKQFTSVFGVGVKTSEKWFRMGLRTVEELKADKSLKLSKMQKAGFLYYEDLVSCVSKAEADAVTWIVKNTVSTFLPDALVTITGGFRRGKKMGHDIDFLITNPGPKEDDELLHKVVDLLKKQGLLLYCDIIESTFVEEQLPSRKIDAMDNFQKCFAILKLYQPGVDNSSYNTSKKSDMAEVKDWKAIRVDLVITPFEQYAYALLGWTGSREFGRDLRRYASHERKMILDNHGLYDRKKRIFLKAGSEEEIFAHLGLDYVEPWERNA

SEQ ID NO: 303 - DNA, 1182 bp, synthetic construct
  misc_feature 1..1182: note = Variant of terminal deoxynucleotidyl transferase
  source 1..1182: mol_type = other DNA
atgcaccatcatcatcatcatggcggtagcggccatccgccgagcaataccccggagctggaagtgccgagcgttatcgcccgcaaggttagtcagtacagctgccagcgcaagaccacgctgaataactacaacaaaaagtttaccgacgcgttcgagatcatggccgagaactacgaatttaaagagaacgaaatcttctgtctggaatttctgcgcgccgcgagtctgctgaaatatctgccgttcccggttacccgcatgaaagacatccaaggtctgccgtgcattggcgaccaagttcgtgacgtgatcgaggagatcatcgaagaaggcgagagcagccgtgttaaagaagttctcaatgacgagcgctacaaggcctttaagcagttcaccagcgtgttcggtgtgggcgtgaaaaccagcgaaaagtggtttcgtatgggcctccgtacggttgaagagctgaaggccgacaagagtctgaagctgagcaagatgcagaaggcgggctttctgtattacgaggatctggtgagctgcgttagtaaagcggaagccgatgccgttacgctcatcgtgaagaacacggtgagtacctttctgccggatgcgctggtgaccatcacgggcggtttccgccgtggcaaaaagatgggccacgacatcgactttctgatcacgaatccgggcccgaaagaggatgacgaactgctccacaaagtggttgatctgctcaagaagcaaggtctgctgctgtactgcgacatcatcgagagcacgttcgtggaggaacaactgccaagtcgcaaaatcgacgccatggacaacttccagaagtgcttcgccattctcaagctgtaccagccgggcgtggataacagcagctataacacgagtaagaagagtgacatggccgaggttaaggattggaaagcgatccgtgtggatctggtgatcacgccattcgagcagtacgcctatgcgctgctcggttggacgggcagccgcgaatttggtcgcgatctgcgccgctatgcgagtcatgagcgcaagatggagctcgacaaccatggcctctacgaccgcaaaaagcgcatctttctgaaagcgggcagcgaagaagagattttcgcgcatctgggtctggattatgtggagccgtgggaacgcaacgcg

SEQ ID NO: 304 - protein, 394 aa, synthetic construct
  REGION 1..394: note = Variant of terminal deoxynucleotidyl transferase
MHHHHHHGGSGHPPSNTPELEVPSVIARKVSQYSCQRKTTLNNYNKKFTDAFEIMAENYEFKENEIFCLEFLRAASLLKYLPFPVTRMKDIQGLPCIGDQVRDVIEEIIEEGESSRVKEVLNDERYKAFKQFTSVFGVGVKTSEKWFRMGLRTVEELKADKSLKLSKMQKAGFLYYEDLVSCVSKAEADAVTLIVKNTVSTFLPDALVTITGGFRRGKKMGHDIDFLITNPGPKEDDELLHKVVDLLKKQGLLLYCDIIESTFVEEQLPSRKIDAMDNFQKCFAILKLYQPGVDNSSYNTSKKSDMAEVKDWKAIRVDLVITPFEQYAYALLGWTGSREFGRDLRRYASHERKMELDNHGLYDRKKRIFLKAGSEEEIFAHLGLDYVEPWERNA

SEQ ID NO: 305 - DNA, 1182 bp, synthetic construct
  misc_feature 1..1182: note = Variant of terminal deoxynucleotidyl transferase
  source 1..1182: mol_type = other DNA
atgcaccatcatcatcatcatggcggtagcggccatccgccgagcaataccccggagctggaagtgccgagcgttatcgcccgcaaggttagtcagtacagctgccagcgcaagaccacgctgaataactacaacaaaaagtttaccgacgcgttcgagatcatggccgagaactacgaatttaaagagaacgaaatcttctgtctggaatttctgcgcgccgcgagtctgctgaaatatctgccgttcccggttacccgcatgaaagacatccaaggtctgccgtgcattggcgaccaagttcgtgacgtgatcgaggagatcatcgaagaaggcgagagcagccgtgttaaagaagttctcaatgacgagcgctacaaggcctttaagcagttcaccagcgtgttcggtgtgggcgtgaaaaccagcgaaaagtggtttcgtatgggcctccgtacggttgaagagctgaaggccgacaagagtctgaagctgagcaagatgcagaaggcgggctttctgtattacgaggatctggtgagctgcgttagtaaagcggaagccgatgccgttacgctcatcgtgaagaacacggtgagtacctttctgccggatgcgctggtgaccatcacgggcggtttccgccgtggcaaaaagatgggccacgacatcgactttctgatcacgaatccgggcccgaaagaggatgacgaactgctccacaaagtggttgatctgctcaagaagcaaggtctgctgctgtactgcgacatcatcgagagcacgttcgtggaggaacaactgccaagtcgcaaaatcgacgccatggacaacttccagaagtgcttcgccattctcaagctgtaccagccgggcgtggataacagcagctataacacgagtaagaagagtgacatggccatggttaaggattggaaagcgatccgtgtggatctggtgatcacgccattcgagcagtacgcctatgcgctgctcggttggacgggcagccgcgaatttggtcgcgatctgcgccgctatgcgagtcatgagcgcaagatgatcctcgacaaccatggcctctacgaccgcaaaaagcgcatctttctgaaagcgggcagcgaagaagagattttcgcgcatctgggtctggattatgtggagccgtgggaacgcaacgcg

SEQ ID NO: 306 - protein, 394 aa, synthetic construct
  REGION 1..394: note = Variant of terminal deoxynucleotidyl transferase
MHHHHHHGGSGHPPSNTPELEVPSVIARKVSQYSCQRKTTLNNYNKKFTDAFEIMAENYEFKENEIFCLEFLRAASLLKYLPFPVTRMKDIQGLPCIGDQVRDVIEEIIEEGESSRVKEVLNDERYKAFKQFTSVFGVGVKTSEKWFRMGLRTVEELKADKSLKLSKMQKAGFLYYEDLVSCVSKAEADAVTLIVKNTVSTFLPDALVTITGGFRRGKKMGHDIDFLITNPGPKEDDELLHKVVDLLKKQGLLLYCDIIESTFVEEQLPSRKIDAMDNFQKCFAILKLYQPGVDNSSYNTSKKSDMAMVKDWKAIRVDLVITPFEQYAYALLGWTGSREFGRDLRRYASHERKMILDNHGLYDRKKRIFLKAGSEEEIFAHLGLDYVEPWERNA

SEQ ID NO: 307 - DNA, 1182 bp, synthetic construct
  misc_feature 1..1182: note = Variant of terminal deoxynucleotidyl transferase
  source 1..1182: mol_type = other DNA
atgcaccatcatcatcatcatggcggtagcggccatccgccgagcaataccccggagctggaagtgccgagcgttatcgcccgcaaggttagtcagtacagctgccagcgcaagaccacgctgaataactacaacaaaaagtttaccgacgcgttcgagatcatggccgagaactacgaatttaaagagaacgaaatcttctgtctggaatttctgcgcgccgcgagtctgctgaaatatctgccgttcacggttacccgcatgaaagacatccaaggtctgccgtgcattggcgaccaagttcgtgacgtgatcgaggagatcatcgaagaaggcgagagcagccgtgttaaagaagttctcaatgacgagcgctacaaggcctttaagcagttcaccagcgtgttcggtgtgggcgtgaaaaccagcgaaaagtggtttcgtatgggcctccgtacggttgaagagctgaaggccgacaagagtctgaagctgagcaagatgcagaaggcgggctttctgtattacgaggatctggtgagctgcgttagtaaagcggaagccgatgccgttacgctcatcgtgaagaacacggtgagtacctttctgccggatgcgctggtgaccatcacgggcggtttccgccgtggcaaaaagatgggccacgacatcgactttctgatcacgaatccgggcccgaaagaggatgacgaactgctccacaaagtggttgatctgctcaagaagcaaggtctgctgctgtactgcgacatcatcgagagcacgttcgtggaggaacaactgccaagtcgcaaaatcgacgccatggacaacttccagaagtgcttcgccattctcaagctgtaccagccgggcgtggataacagcagctataacacgagtaagaagagtgacatggccgaggttaaggattggaaagcgatccgtgtggatctggtgatcacgccattcgagcagtacgcctatgcgctgctcggttggacgggcagccgcgaatttggtcgcgatctgcgccgctatgcgagtcatgagcgcaagatgatcctcgacaaccatggcctctacgaccgcaaaaagcgcatctttctgaaagcgggcagcgaagaagagattttcgcgcatctgggtctggattatgtggagccgtgggaacgcaacgcg

SEQ ID NO: 308 - protein, 394 aa, synthetic construct
  REGION 1..394: note = Variant of terminal deoxynucleotidyl transferase
MHHHHHHGGSGHPPSNTPELEVPSVIARKVSQYSCQRKTTLNNYNKKFTDAFEIMAENYEFKENEIFCLEFLRAASLLKYLPFTVTRMKDIQGLPCIGDQVRDVIEEIIEEGESSRVKEVLNDERYKAFKQFTSVFGVGVKTSEKWFRMGLRTVEELKADKSLKLSKMQKAGFLYYEDLVSCVSKAEADAVTLIVKNTVSTFLPDALVTITGGFRRGKKMGHDIDFLITNPGPKEDDELLHKVVDLLKKQGLLLYCDIIESTFVEEQLPSRKIDAMDNFQKCFAILKLYQPGVDNSSYNTSKKSDMAEVKDWKAIRVDLVITPFEQYAYALLGWTGSREFGRDLRRYASHERKMILDNHGLYDRKKRIFLKAGSEEEIFAHLGLDYVEPWERNA

SEQ ID NO: 309 - DNA, 1182 bp, synthetic construct
  misc_feature 1..1182: note = Variant of terminal deoxynucleotidyl transferase
  source 1..1182: mol_type = other DNA
atgcaccatcatcatcatcatggcggtagcggccatccgccgagcaataccccggagctggaagtgccgagcgttatcgcccgcaaggttagtcagtacagctgccagcgcaagaccacgctgaataactacaacaaaaagtttaccgacgcgttcgagatcatggccgagaactacgaatttaaagagaacgaaatcttctgtctggaatttctgcgcgccgcgagtctgctgaaatatctgccgttcccggttacccgcatgaaagacatccaaggtctgccgtgcattggcgaccaagttcgtgacgtgatcgaggagatcatcgaagaaggcgagagcagccgtgttaaagaagttctcaatgacgagcgctacaaggcctttaagcagttcaccagcgtgttcggtgtgggcgtgaaaaccagcgaaaagtggtttcgtatgggcctccgtacggttgaagagctgaaggccgacaagagtctgaagctgagcaagatgcagaaggcgggctttctgtattacgaggatctggtgagctgcgttagtaaagcggaagccgatgccgttacgctcatcgtgaagaacacggtgagtacctttctgccggatgcgctggtgaccatcacgggcggtttccgccgtggcaaaaagatgggccacgacatcgactttctgatcacgaatccgggcccgaaagaggatgacgaactgctccacaaagtggttgatctgctcaagaagcaaggtctgctgctgtactgcgacatcatcgagagcacgttcgtggaggaagtgctgccaagtcgcaaaatcgacgccatggacaacttccagaagtgcttcgccattctcaagctgtaccagccgggcgtggataacagcagctataacacgagtaagaagagtgacatggccgaggttaaggattggaaagcgatccgtgtggatctggtgatcacgccattcgagcagtacgcctatgcgctgctcggttggacgggcagccgcgaatttggtcgcgatctgcgccgctatgcgagtcatgagcgcaagatgatcctcgacaaccatggcctctacgaccgcaaaaagcgcatctttctgaaagcgggcagcgaagaagagattttcgcgcatctgggtctggattatgtggagccgtgggaacgcaacgcg

SEQ ID NO: 310 - protein, 394 aa, synthetic construct
  REGION 1..394: note = Variant of terminal deoxynucleotidyl transferase
MHHHHHHGGSGHPPSNTPELEVPSVIARKVSQYSCQRKTTLNNYNKKFTDAFEIMAENYEFKENEIFCLEFLRAASLLKYLPFPVTRMKDIQGLPCIGDQVRDVIEEIIEEGESSRVKEVLNDERYKAFKQFTSVFGVGVKTSEKWFRMGLRTVEELKADKSLKLSKMQKAGFLYYEDLVSCVSKAEADAVTLIVKNTVSTFLPDALVTITGGFRRGKKMGHDIDFLITNPGPKEDDELLHKVVDLLKKQGLLLYCDIIESTFVEEVLPSRKIDAMDNFQKCFAILKLYQPGVDNSSYNTSKKSDMAEVKDWKAIRVDLVITPFEQYAYALLGWTGSREFGRDLRRYASHERKMILDNHGLYDRKKRIFLKAGSEEEIFAHLGLDYVEPWERNA

SEQ ID NO: 311 - DNA, 1182 bp, synthetic construct
  misc_feature 1..1182: note = Variant of terminal deoxynucleotidyl transferase
  source 1..1182: mol_type = other DNA
atgcaccatcatcatcatcatggcggtagcggccatccgccgagcaataccccggagctggaagtgccgagcgttatcgcccgcaaggttagtcagtacagctgccagcgcaagaccacgctgaataactacaacaaaaagtttaccgacgcgttcgagatcatggccgagaactacgaatttaaagagaacgaaatcttctgtctggaatttctgcgcgccgcgagtctgctgaaatatctgccgttcccggttacccgcatgaaagacatccaaggtctgccgtgcattggcgaccaagttcgtgcggtgatcgaggagatcatcgaagaaggcgagagcagccgtgttaaagaagttctcaatgacgagcgctacaaggcctttaagcagttcaccagcgtgttcggtgtgggcgtgaaaaccagcgaaaagtggtttcgtatgggcctccgtacggttgaagagctgaaggccgacaagagtctgaagctgagcaagatgcagaaggcgggctttctgtattacgaggatctggtgagctgcgttagtaaagcggaagccgatgccgttacgctcatcgtgaagaacacggtgagtacctttctgccggatgcgctggtgaccatcacgggcggtttccgccgtggcaaaaagatgggccacgacatcgactttctgatcacgaatccgggcccgaaagaggatgacgaactgctccacaaagtggttgatctgctcaagaagcaaggtctgctgctgtactgcgacatcatcgagagcacgttcgtggaggaacaactgccaagtcgcaaaatcgacgccatggacaacttccagaagtgcttcgccattctcaagctgtaccagccgggcgtggataacagcagctataacacgagtaagaagagtgacatggccgaggttaaggattggaaagcgatccgtgtggatctggtgatcacgccattcgagcagtacgcctatgcgctgctcggttggacgggcagccgcgaatttggtcgcgatctgcgccgctatgcgagtcatgagcgcaagatgatcctcgacaaccatggcctctacgaccgcaaaaagcgcatctttctgaaagcgggcagcgaagaagagattttcgcgcatctgggtctggattatgtggagccgtgggaacgcaacgcg

SEQ ID NO: 312 - protein, 394 aa, synthetic construct
  REGION 1..394: note = Variant of terminal deoxynucleotidyl transferase
MHHHHHHGGSGHPPSNTPELEVPSVIARKVSQYSCQRKTTLNNYNKKFTDAFEIMAENYEFKENEIFCLEFLRAASLLKYLPFPVTRMKDIQGLPCIGDQVRAVIEEIIEEGESSRVKEVLNDERYKAFKQFTSVFGVGVKTSEKWFRMGLRTVEELKADKSLKLSKMQKAGFLYYEDLVSCVSKAEADAVTLIVKNTVSTFLPDALVTITGGFRRGKKMGHDIDFLITNPGPKEDDELLHKVVDLLKKQGLLLYCDIIESTFVEEQLPSRKIDAMDNFQKCFAILKLYQPGVDNSSYNTSKKSDMAEVKDWKAIRVDLVITPFEQYAYALLGWTGSREFGRDLRRYASHERKMILDNHGLYDRKKRIFLKAGSEEEIFAHLGLDYVEPWERNA

SEQ ID NO: 313 - DNA, 1182 bp, synthetic construct
  misc_feature 1..1182: note = Variant of terminal deoxynucleotidyl transferase
  source 1..1182: mol_type = other DNA
atgcaccatcatcatcatcatggcggtagcggccatccgccgagcaataccccggagctggaagtgccgagcgttatcgcccgcaaggttagtcagtacagctgccagcgcaagaccacgctgaataactacaacaaaaagtttaccgacgcgttcgagatcatggccgagaactacgaatttaaagagaacgaaatcttctgtctggaatttctgcgcgccgcgagtctgctgaaatatctgccgttcccggttacccgcatgaaagacatccaaggtctgccgtgcattggcgaccaagttcgtgacgtgatcgaggagatcatcgaagaaggcgagagcagccgtgttaaagaagttctcaatgacgagcgctacaaggcctttaagcagttcaccagcgtgttcggtgtgggcgtgaaaaccagcgaaaagtggtatcgtatgggcctccgtacggttgaagagctgaaggccgacaagagtctgaagctgagcaagatgcagaaggcgggctttctgtattacgaggatctggtgagctgcgttagtaaagcggaagccgatgccgttacgctcatcgtgaagaacacggtgagtacctttctgccggatgcgctggtgaccatcacgggcggtttccgccgtggcaaaaagatgggccacgacatcgactttctgatcacgaatccgggcccgaaagaggatgacgaactgctccacaaagtggttgatctgctcaagaagcaaggtctgctgctgtactgcgacatcatcgagagcacgttcgtggaggaacaactgccaagtcgcaaaatcgacgccatggacaacttccagaagtgcttcgccattctcaagctgtaccagccgggcgtggataacagcagctataacacgagtaagaagagtgacatggccgaggttaaggattggaaagcgatccgtgtggatctggtgatcacgccattcgagcagtacgcctatgcgctgctcggttggacgggcagccgcgaatttggtcgcgatctgcgccgctatgcgagtcatgagcgcaagatgatcctcgacaaccatggcctctacgaccgcaaaaagcgcatctttctgaaagcgggcagcgaagaagagattttcgcgcatctgggtctggattatgtggagccgtgggaacgcaacgcg

SEQ ID NO: 314 - protein, 394 aa, synthetic construct
  REGION 1..394: note = Variant of terminal deoxynucleotidyl transferase
MHHHHHHGGSGHPPSNTPELEVPSVIARKVSQYSCQRKTTLNNYNKKFTDAFEIMAENYEFKENEIFCLEFLRAASLLKYLPFPVTRMKDIQGLPCIGDQVRDVIEEIIEEGESSRVKEVLNDERYKAFKQFTSVFGVGVKTSEKWYRMGLRTVEELKADKSLKLSKMQKAGFLYYEDLVSCVSKAEADAVTLIVKNTVSTFLPDALVTITGGFRRGKKMGHDIDFLITNPGPKEDDELLHKVVDLLKKQGLLLYCDIIESTFVEEQLPSRKIDAMDNFQKCFAILKLYQPGVDNSSYNTSKKSDMAEVKDWKAIRVDLVITPFEQYAYALLGWTGSREFGRDLRRYASHERKMILDNHGLYDRKKRIFLKAGSEEEIFAHLGLDYVEPWERNA

SEQ ID NO: 315 - DNA, 1182 bp, synthetic construct
  misc_feature 1..1182: note = Variant of terminal deoxynucleotidyl transferase
  source 1..1182: mol_type = other DNA
atgcaccatcatcatcatcatggcggtagcggccatccgccgagcaataccccggagctggaagtgccgagcgttatcgcccgcaaggttagtcagtacagctgccagcgcaagaccacgctgaataactacaacaaaaagtttaccgacgcgttcgagatcatggccgagaactacgaatttaaagagaacgaaatcttctgtctggaatttctgcgcgccgcgagtctgctgaaatatctgccgttcccggttacccgcatgaaagacatccaaggtctgccgtgcattggcgaccaagttcgtgacgtgatcgaggagatcatcgaagaaggcgagagcagccgtgttaaagaagttctcaatgacgagcgctacaaggcctttaagcagttcaccagcgtgttcggtgtgggcgtgaaaaccagcgaaaagtggtttcgtatgggcctccgtacggttgaagagctgaaggccgacaagagtctgaagctgagcaagatgcagaaggcgggctttctgtattacgaggatctggtgagctgcgttagtaaagcggaagccgatgccgttacgctcatcgtgaagaacacggtgagtacctttctgccggatgcgctggtgaccatcacgggcggtttccgccgtggcaaaaagatgggccacgacatcgactttctgatcacgaatccgggcccgaaagaggatgacgaactgctccacaaagtggttgatctgctcaagaagcaaggtctgctgctgtactgcgacatcatcgagagcacgttcgtggaggaacaactgccaagtcgcaaaatcgacgccatggacaacttccagaagtgcttcgccattctcaagctgtaccagccgggcgtggataacagcagctataacacgagtaagaagagtgacatggccgaggttaaggattggaaagcgatccgtgtggatctggtgatcacgccattcgagcagtacgcctatgcgctgctcggttggacgggcagccgcgaatttggtcgcgatctgcgccgctatgcgagtcatgagcgcaagatgatcctcgacaaccatggcctctacgaccgcaaaaagcgcatctttctgaaagcgaatagcgaagaagagattttcgcgcatctgggtctggattatgtggagccgtgggaacgcaacgcg

SEQ ID NO: 316 - protein, 394 aa, synthetic construct
  REGION 1..394: note = Variant of terminal deoxynucleotidyl transferase
MHHHHHHGGSGHPPSNTPELEVPSVIARKVSQYSCQRKTTLNNYNKKFTDAFEIMAENYEFKENEIFCLEFLRAASLLKYLPFPVTRMKDIQGLPCIGDQVRDVIEEIIEEGESSRVKEVLNDERYKAFKQFTSVFGVGVKTSEKWFRMGLRTVEELKADKSLKLSKMQKAGFLYYEDLVSCVSKAEADAVTLIVKNTVSTFLPDALVTITGGFRRGKKMGHDIDFLITNPGPKEDDELLHKVVDLLKKQGLLLYCDIIESTFVEEQLPSRKIDAMDNFQKCFAILKLYQPGVDNSSYNTSKKSDMAEVKDWKAIRVDLVITPFEQYAYALLGWTGSREFGRDLRRYASHERKMILDNHGLYDRKKRIFLKANSEEEIFAHLGLDYVEPWERNA

SEQ ID NO: 317 - DNA, 1182 bp, synthetic construct
  misc_feature 1..1182: note = Variant of terminal deoxynucleotidyl transferase
  source 1..1182: mol_type = other DNA
atgcaccatcatcatcatcatggcggtagcggccatccgccgagcaataccccggagctggaagtgccgagcgttatcgcccgcaaggttagtcagtacagctgccagcgcaagaccacgctgaataactacaacaaaaagtttaccgacgcgttcgagatcatggccgagaactacgaatttaaagagaacgaaatcttctgtctggaatttctgcgcgccgcgagtctgctgaaatatctgccgttcccggttacccgcatgaaagacatccaaggtctgccgtgcattggcgaccaagttcgtgacgtgatcgaggagatcatcgaagaaggcgagagcagccgtgttaaagaagttctcaatgacgagcgctacaaggcctttaagcagttcaccagcgtgttcggtgtgggcgtgaaaaccagcgaaaagtggtttcgtatgggcctccgtacggttgaagagctgaaggccgacaagagtctgaagctgagcaagatgcagaaggcgggctttctgtattacgaggatctggtgagctgcgttagtaaagcggaagccgatgccgttacgctcatcgtgaagaacacggtgagtacctttctgccggatgcgctggtgaccatcacgggcggtttccgccgtggcaaaaagatgggccacgacatcgactttctgatcacgaatccgggcccgaaagaggatgacgaactgctccacaaagtggttgatctgctcaagaagcaaggtctgctgctgtacccggacatcatcgagagcacgttcgtggaggaacaactgccaagtcgcaaaatcgacgccatggacaacttccagaagtgcttcgccattctcaagctgtaccagccgggcgtggataacagcagctataacacgagtaagaagagtgacatggccgaggttaaggattggaaagcgatccgtgtggatctggtgatcacgccattcgagcagtacgcctatgcgctgctcggttggacgggcagccgcgaatttggtcgcgatctgcgccgctatgcgagtcatgagcgcaagatgatcctcgacaaccatggcctctacgaccgcaaaaagcgcatctttctgaaagcgggcagcgaagaagagattttcgcgcatctgggtctggattatgtggagccgtgggaacgcaacgcg

SEQ ID NO: 318 - protein, 394 aa, synthetic construct
  REGION 1..394: note = Variant of terminal deoxynucleotidyl transferase
MHHHHHHGGSGHPPSNTPELEVPSVIARKVSQYSCQRKTTLNNYNKKFTDAFEIMAENYEFKENEIFCLEFLRAASLLKYLPFPVTRMKDIQGLPCIGDQVRDVIEEIIEEGESSRVKEVLNDERYKAFKQFTSVFGVGVKTSEKWFRMGLRTVEELKADKSLKLSKMQKAGFLYYEDLVSCVSKAEADAVTLIVKNTVSTFLPDALVTITGGFRRGKKMGHDIDFLITNPGPKEDDELLHKVVDLLKKQGLLLYPDIIESTFVEEQLPSRKIDAMDNFQKCFAILKLYQPGVDNSSYNTSKKSDMAEVKDWKAIRVDLVITPFEQYAYALLGWTGSREFGRDLRRYASHERKMILDNHGLYDRKKRIFLKAGSEEEIFAHLGLDYVEPWERNA

SEQ ID NO: 319 - DNA, 1182 bp, synthetic construct
  misc_feature 1..1182: note = Variant of terminal deoxynucleotidyl transferase
  source 1..1182: mol_type = other DNA
atgcaccatcatcatcatcatggcggtagcggccatccgccgagcaataccccggagctggaagtgccgagcgttatcgcccgcaaggttagtcagtacagctgccagcgcaagaccacgctgaataactacaacaaaaagtttaccgacgcgttcgagatcatggccgagaactacgaatttaaagagaacgaaatcttctgtctggaatttctgcgcgccgcgagtctgctgaaatatctgccgttcccggttacccgcatgaaagacatccaaggtctgccgtgcattggcgaccaagttcgtgacgtgatcgaggagatcatcgaagaaggcgagagcagccgtgttaaagaagttctcaatgacgagcgctacaaggcctttaagcagttcaccagcgtgttcggtgtgggcgtgaaaaccagcgaaaagtggtttcgtatgggcctccgtacggttgaagagctgaaggccgacaggagtctgaagctgagcaagatgcagaaggcgggctttctgtattacgaggatctggtgagctgcgttagtaaagcggaagccgatgccgttacgctcatcgtgaagaacacggtgagtacctttctgccggatgcgctggtgaccatcacgggcggtttccgccgtggcaaaaagatgggccacgacatcgactttctgatcacgaatccgggcccgaaagaggatgacgaactgctccacaaagtggttgatctgctcaagaagcaaggtctgctgctgtactgcgacatcatcgagagcacgttcgtggaggaacaactgccaagtcgcaaaatcgacgccatggacaacttccagaagtgcttcgccattctcaagctgtaccagccgggcgtggataacagcagctataacacgagtaagaagagtgacatggccgaggttaaggattggaaagcgatccgtgtggatctggtgatcacgccattcgagcagtacgcctatgcgctgctcggttggacgggcagccgcgaatttggtcgcgatctgcgccgctatgcgagtcatgagcgcaagatgatcctcgacaaccatggcctctacgaccgcaaaaagcgcatctttctgaaagcgggcagcgaagaagagattttcgcgcatctgggtctggattatgtggagccgtgggaacgcaacgcg

SEQ ID NO: 320 - protein, 394 aa, synthetic construct
  REGION 1..394: note = Variant of terminal deoxynucleotidyl transferase
MHHHHHHGGSGHPPSNTPELEVPSVIARKVSQYSCQRKTTLNNYNKKFTDAFEIMAENYEFKENEIFCLEFLRAASLLKYLPFPVTRMKDIQGLPCIGDQVRDVIEEIIEEGESSRVKEVLNDERYKAFKQFTSVFGVGVKTSEKWFRMGLRTVEELKADRSLKLSKMQKAGFLYYEDLVSCVSKAEADAVTLIVKNTVSTFLPDALVTITGGFRRGKKMGHDIDFLITNPGPKEDDELLHKVVDLLKKQGLLLYCDIIESTFVEEQLPSRKIDAMDNFQKCFAILKLYQPGVDNSSYNTSKKSDMAEVKDWKAIRVDLVITPFEQYAYALLGWTGSREFGRDLRRYASHERKMILDNHGLYDRKKRIFLKAGSEEEIFAHLGLDYVEPWERNA

SEQ ID NO: 321 - DNA, 1182 bp, synthetic construct
  misc_feature 1..1182: note = Variant of terminal deoxynucleotidyl transferase
  source 1..1182: mol_type = other DNA
atgcaccatcatcatcatcatggcggtagcggccatccgccgagcaataccccggagctggaagtgccgagcgttatcgcccgcaaggttagtcagtacagctgccagcgcaagaccacgctgaataactacaacaaaaagtttaccgacgcgttcgagatcatggccgagaactacgaatttaaagagaacgaaatcttctgtctggaatttctgcgcgccgcgagtctgctgaaatatctgccgttcccggttacccgcatgaaagacatccaaggtctgccgtgcattggcgaccaagttcgtgacgtgatcgaggagatcatcgaagaaggcgagagcagccgtgttaaagaagttctcaatgacgagcgctacaaggcctttaagcagttcaccagcgtgttcggtgtgggcgtgaaaaccagcgaaaagtggtttcgtatgggcctccgtacggttgaagagctgaaggccgacaagagtctgaagctgagcaagatgcagaaggcgggctttctgtattacgaggatctggtgagctgcgttagtaaagcggaagccgatgccgttacgctcatcgtgaagaacacggtgagtacctttctgccggatgcgctggtgaccatcacgggcggtttccgccgtggcaaaaagatgggccacgacatcgactttctgatcacgaatccgggcccgaaagaggatgacttgctgctccacaaagtggttgatctgctcaagaagcaaggtctgctgctgtactgcgacatcatcgagagcacgttcgtggaggaacaactgccaagtcgcaaaatcgacgccatggacaacttccagaagtgcttcgccattctcaagctgtaccagccgggcgtggataacagcagctataacacgagtaagaagagtgacatggccgaggttaaggattggaaagcgatccgtgtggatctggtgatcacgccattcgagcagtacgcctatgcgctgctcggttggacgggcagccgcgaatttggtcgcgatctgcgccgctatgcgagtcatgagcgcaagatgatcctcgacaaccatggcctctacgaccgcaaaaagcgcatctttctgaaagcgggcagcgaagaagagattttcgcgcatctgggtctggattatgtggagccgtgggaacgcaacgcg

SEQ ID NO: 322 - protein, 394 aa, synthetic construct
  REGION 1..394: note = Variant of terminal deoxynucleotidyl transferase
MHHHHHHGGSGHPPSNTPELEVPSVIARKVSQYSCQRKTTLNNYNKKFTDAFEIMAENYEFKENEIFCLEFLRAASLLKYLPFPVTRMKDIQGLPCIGDQVRDVIEEIIEEGESSRVKEVLNDERYKAFKQFTSVFGVGVKTSEKWFRMGLRTVEELKADKSLKLSKMQKAGFLYYEDLVSCVSKAEADAVTLIVKNTVSTFLPDALVTITGGFRRGKKMGHDIDFLITNPGPKEDDLLLHKVVDLLKKQGLLLYCDIIESTFVEEQLPSRKIDAMDNFQKCFAILKLYQPGVDNSSYNTSKKSDMAEVKDWKAIRVDLVITPFEQYAYALLGWTGSREFGRDLRRYASHERKMILDNHGLYDRKKRIFLKAGSEEEIFAHLGLDYVEPWERNA

SEQ ID NO: 323 - DNA, 1182 bp, synthetic construct
  misc_feature 1..1182: note = Variant of terminal deoxynucleotidyl transferase
  source 1..1182: mol_type = other DNA
atgcaccatcatcatcatcatggcggtagcggccatccgccgagcaataccccggagctggaagtgccgagcgttatcgcccgcaaggttagtcagtacagctgccagcgcaagaccacgctgaataactacaacaaaaagtttaccgacgcgttcgagatcatggccgagaactacgaatttaaagagaacgaaatcttcacgctggaatttctgcgcgccgcgagtctgctgaaatatctgccgttcccggttacccgcatgaaagacatccaaggtctgccgtgcattggcgaccaagttcgtgacgtgatcgaggagatcatcgaagaaggcgagagcagccgtgttaaagaagttctcaatgacgagcgctacaaggcctttaagcagttcaccagcgtgttcggtgtgggcgtgaaaaccagcgaaaagtggtttcgtatgggcctccgtacggttgaagagctgaaggccgacaagagtctgaagctgagcaagatgcagaaggcgggctttctgtattacgaggatctggtgagctgcgttagtaaagcggaagccgatgccgttacgctcatcgtgaagaacacggtgagtacctttctgccggatgcgctggtgaccatcacgggcggtttccgccgtggcaaaaagatgggccacgacatcgactttctgatcacgaatccgggcccgaaagaggatgacgaactgctccacaaagtggttgatctgctcaagaagcaaggtctgctgctgtactgcgacatcatcgagagcacgttcgtggaggaacaactgccaagtcgcaaaatcgacgccatggacaacttccagaagtgcttcgccattctcaagctgtaccagccgggcgtggataacagcagctataacacgagtaagaagagtgacatggccgaggttaaggattggaaagcgatccgtgtggatctggtgatcacgccattcgagcagtacgcctatgcgctgctcggttggacgggcagccgcgaatttggtcgcgatctgcgccgctatgcgagtcatgagcgcaagatgatcctcgacaaccatggcctctacgaccgcaaaaagcgcatctttctgaaagcgggcagcgaagaagagattttcgcgcatctgggtctggattatgtggagccgtgggaacgcaacgcg

SEQ ID NO: 324 - protein, 394 aa, synthetic construct
  REGION 1..394: note = Variant of terminal deoxynucleotidyl transferase
MHHHHHHGGSGHPPSNTPELEVPSVIARKVSQYSCQRKTTLNNYNKKFTDAFEIMAENYEFKENEIFTLEFLRAASLLKYLPFPVTRMKDIQGLPCIGDQVRDVIEEIIEEGESSRVKEVLNDERYKAFKQFTSVFGVGVKTSEKWFRMGLRTVEELKADKSLKLSKMQKAGFLYYEDLVSCVSKAEADAVTLIVKNTVSTFLPDALVTITGGFRRGKKMGHDIDFLITNPGPKEDDELLHKVVDLLKKQGLLLYCDIIESTFVEEQLPSRKIDAMDNFQKCFAILKLYQPGVDNSSYNTSKKSDMAEVKDWKAIRVDLVITPFEQYAYALLGWTGSREFGRDLRRYASHERKMILDNHGLYDRKKRIFLKAGSEEEIFAHLGLDYVEPWERNA

SEQ ID NO: 325 - DNA, 1182 bp, synthetic construct
  misc_feature 1..1182: note = Variant of terminal deoxynucleotidyl transferase
  source 1..1182: mol_type = other DNA
atgcaccatcatcatcatcatggcggtagcggccatccgccgagcaataccccggagctggaagtgccgagcgttatcgcccgcaaggttagtcagtacagctgccagcgcaagaccacgctgaataactacaacaaaaagtttaccgacgcgttcgagatcatggccgagaactacgaatttaaagagaacgaaatcttctgtctggaatttctgcgcgccgcgagtctgctgaaatatctgccgttcccggttacccgcatgaaagacatccaaggtctgccgtgcattggcgaccaagttcgtgacgtgatcgaggagatcatcgaagaaggcgagagcagccgtgttaaagaagttctcaatgacgagcgctacaaggcctttaagcagttcaccagcgtgttcggtgtgggcgtgaaaaccagcgaaaagtggtttcgtatgggcctccgtacggttgaagagctgaaggccgacaagagtctgaagctgagcaagatgcagaaggcgggctttctgtattacgaggatctggtgagctgcgttagtaaagcggaagccgatgccgttacgctcatcgtgaagaacacggtgagtacctttctgccggatgcgctggtgaccatcacgggcggtttccgccgtggcaaaaagatgggccacgacatcgactttctgatcacgaatccgggcccgaaagaggatgacgaactgctcgataaagtggttgatctgctcaagaagcaaggtctgctgctgtactgcgacatcatcgagagcacgttcgtggaggaacaactgccaagtcgcaaaatcgacgccatggacaacttccagaagtgcttcgccattctcaagctgtaccagccgggcgtggataacagcagctataacacgagtaagaagagtgacatggccgaggttaaggattggaaagcgatccgtgtggatctggtgatcacgccattcgagcagtacgcctatgcgctgctcggttggacgggcagccgcgaatttggtcgcgatctgcgccgctatgcgagtcatgagcgcaagatgatcctcgacaaccatggcctctacgaccgcaaaaagcgcatctttctgaaagcgggcagcgaagaagagattttcgcgcatctgggtctggattatgtggagccgtgggaacgcaacgcg

SEQ ID NO: 326 - protein, 394 aa, synthetic construct
  REGION 1..394: note = Variant of terminal deoxynucleotidyl transferase
MHHHHHHGGSGHPPSNTPELEVPSVIARKVSQYSCQRKTTLNNYNKKFTDAFEIMAENYEFKENEIFCLEFLRAASLLKYLPFPVTRMKDIQGLPCIGDQVRDVIEEIIEEGESSRVKEVLNDERYKAFKQFTSVFGVGVKTSEKWFRMGLRTVEELKADKSLKLSKMQKAGFLYYEDLVSCVSKAEADAVTLIVKNTVSTFLPDALVTITGGFRRGKKMGHDIDFLITNPGPKEDDELLDKVVDLLKKQGLLLYCDIIESTFVEEQLPSRKIDAMDNFQKCFAILKLYQPGVDNSSYNTSKKSDMAEVKDWKAIRVDLVITPFEQYAYALLGWTGSREFGRDLRRYASHERKMILDNHGLYDRKKRIFLKAGSEEEIFAHLGLDYVEPWERNA

SEQ ID NO: 327 - DNA, 1182 bp, synthetic construct
  misc_feature 1..1182: note = Variant of terminal deoxynucleotidyl transferase
  source 1..1182: mol_type = other DNA
atgcaccatcatcatcatcatggcggtagcggccatccgccgagcaataccccggagctggaagtgccgagcgttatcgcccgcaaggttagtcagtacagctgccagcgcaagaccacgctgaataactacaacaaaaagtttaccgacgcgttcgagatcatggccgagaactacgaatttaaagagaacgaaatcttctgtctggaatttctgcgcgccgcgagtctgctgaaatatctgccgttcccggttacccgcatgaaagacatccaaggtctgccgtgcattggcgaccaagttcgtgacgtgatcgaggagatcatcgaagaaggcgagagcagccgtgttaaagaagttctcaatgacgagcgctacaaggcctttaagcagttcaccagcgtgttcggtgtgggcgtgaaaaccagcgaaaagtggtttcgtatgggcctccgtacggttgaagagctgaaggccgacaagagtctgaagctgagcaagatgcagaaggcgggctttctgtattacgaggatctggtgagctgcgttagtaaagcggaagccgatgccgttacgctcaaggtgaagaacacggtgagtacctttctgccggatgcgctggtgaccatcacgggcggtttccgccgtggcaaaaagatgggccacgacatcgactttctgatcacgaatccgggcccgaaagaggatgacgaactgctccacaaagtggttgatctgctcaagaagcaaggtctgctgctgtactgcgacatcatcgagagcacgttcgtggaggaacaactgccaagtcgcaaaatcgacgccatggacaacttccagaagtgcttcgccattctcaagctgtaccagccgggcgtggataacagcagctataacacgagtaagaagagtgacatggccgaggttaaggattggaaagcgatccgtgtggatctggtgatcacgccattcgagcagtacgcctatgcgctgctcggttggacgggcagccgcgaatttggtcgcgatctgcgccgctatgcgagtcatgagcgcaagatgatcctcgacaaccatggcctctacgaccgcaaaaagcgcatctttctgaaagcgggcagcgaagaagagattttcgcgcatctgggtctggattatgtggagccgtgggaacgcaacgcg

SEQ ID NO: 328 - protein, 394 aa, synthetic construct
  REGION 1..394: note = Variant of terminal deoxynucleotidyl transferase
MHHHHHHGGSGHPPSNTPELEVPSVIARKVSQYSCQRKTTLNNYNKKFTDAFEIMAENYEFKENEIFCLEFLRAASLLKYLPFPVTRMKDIQGLPCIGDQVRDVIEEIIEEGESSRVKEVLNDERYKAFKQFTSVFGVGVKTSEKWFRMGLRTVEELKADKSLKLSKMQKAGFLYYEDLVSCVSKAEADAVTLKVKNTVSTFLPDALVTITGGFRRGKKMGHDIDFLITNPGPKEDDELLHKVVDLLKKQGLLLYCDIIESTFVEEQLPSRKIDAMDNFQKCFAILKLYQPGVDNSSYNTSKKSDMAEVKDWKAIRVDLVITPFEQYAYALLGWTGSREFGRDLRRYASHERKMILDNHGLYDRKKRIFLKAGSEEEIFAHLGLDYVEPWERNA

SEQ ID NO: 329 - DNA, 1182 bp, synthetic construct
  misc_feature 1..1182: note = Variant of terminal deoxynucleotidyl transferase
  source 1..1182: mol_type = other DNA
atgcaccatcatcatcatcatggcggtagcggccatccgccgagcaataccccggagctggaagtgccgagcgttatcgcccgcaaggttagtcagtacagctgccagcgcaagaccacgctgaataactacaacaaaaagtttaccgacgcgttcgagatcatggccgagaactacgaatttaaagagaacgaaatcttctgtctggaatttctgcgcgccgcgagtctgctgaaatatctgccgttcccggttacccgcatgaaagacatccaaggtctgccgtgcattggcgaccaagttcgtgacgtgatcgaggagatcatcgaagaaggcgagagcagccgtgttaaagaagttctcaatgacgagcgctacaaggcctttaagcagttcaccagcgtgttcggtgtgggcgtgaaaaccagcgaaaagtggtttcgtatgggcctccgtacggttgaagagctgaaggccgaccttagtctgaagctgagcaagatgcagaaggcgggctttctgtattacgaggatctggtgagctgcgttagtaaagcggaagccgatgccgttacgctcatcgtgaagaacacggtgagtacctttctgccggatgcgctggtgaccatcacgggcggtttccgccgtggcaaaaagatgggccacgacatcgactttctgatcacgaatccgggcccgaaagaggatgacgaactgctccacaaagtggttgatctgctcaagaagcaaggtctgctgctgtactgcgacatcatcgagagcacgttcgtggaggaacaactgccaagtcgcaaaatcgacgccatggacaacttccagaagtgcttcgccattctcaagctgtaccagccgggcgtggataacagcagctataacacgagtaagaagagtgacatggccgaggttaaggattggaaagcgatccgtgtggatctggtgatcacgccattcgagcagtacgcctatgcgctgctcggttggacgggcagccgcgaatttggtcgcgatctgcgccgctatgcgagtcatgagcgcaagatgatcctcgacaaccatggcctctacgaccgcaaaaagcgcatctttctgaaagcgggcagcgaagaagagattttcgcgcatctgggtctggattatgtggagccgtgggaacgcaacgcg

SEQ ID NO: 330 - protein, 394 aa, synthetic construct
  REGION 1..394: note = Variant of terminal deoxynucleotidyl transferase
MHHHHHHGGSGHPPSNTPELEVPSVIARKVSQYSCQRKTTLNNYNKKFTDAFEIMAENYEFKENEIFCLEFLRAASLLKYLPFPVTRMKDIQGLPCIGDQVRDVIEEIIEEGESSRVKEVLNDERYKAFKQFTSVFGVGVKTSEKWFRMGLRTVEELKADLSLKLSKMQKAGFLYYEDLVSCVSKAEADAVTLIVKNTVSTFLPDALVTITGGFRRGKKMGHDIDFLITNPGPKEDDELLHKVVDLLKKQGLLLYCDIIESTFVEEQLPSRKIDAMDNFQKCFAILKLYQPGVDNSSYNTSKKSDMAEVKDWKAIRVDLVITPFEQYAYALLGWTGSREFGRDLRRYASHERKMILDNHGLYDRKKRIFLKAGSEEEIFAHLGLDYVEPWERNA

SEQ ID NO: 331 - DNA, 1182 bp, synthetic construct
  misc_feature 1..1182: note = Variant of terminal deoxynucleotidyl transferase
  source 1..1182: mol_type = other DNA
atgcaccatcatcatcatcatggcggtagcggccatccgccgagcaataccccggagctggaagtgccgagcgttatcgcccgcaaggttagtcagtacagctgccagcgcaagaccacgctgaataactacaacaaaaagtttaccgacgcgttcgagatcatggccgagaactacgaatttaaagagaacgaaatcttctgtctggaatttctgcgcgccgcgagtctgctgaaatatctgccgttcccggttacccgcatgaaagacatccaaggtctgccgtgcattggcgaccaagttcgtgacgtgatcgaggagatcatcgaagaaggcgagagcagccgtgttaaagaagttctcaatgacgagcgctacaaggcctttaagcagttcaccagcgtgttcggtgtgggcgtgaaaaccagcgaaaagtggtttcgtatgggcctccgtacggttgaagagctgaaggccgacaagagtctgaagctgagcaagatgcagaaggcgggctttctgtattacgaggatctggtgagctgcgttagtaaagcggaagccgatgccgttacgctcatcgtgaagaacacggtgagtacctttctgccggatgcgctggtgaccatcacgggcggtttccgccgtggcaaaaagatgggccacgacatcgactttctgatcacgaatccgggcccgaaagaggatgacgaactgctccacaaagtggttgatctgctcaagaagcaaggtctgctgctgtactgcgacatcatcgagagcacgttcgtggaggaacaactgccaagtcgcaaaatcgacgccatggacaacttccagaagtgcttcgccattctcaagctgtaccagccgggcgtggataacagcagctataaccggagtaagaagagtgacatggccgaggttaaggattggaaagcgatccgtgtggatctggtgatcacgccattcgagcagtacgcctatgcgctgctcggttggacgggcagccgcgaatttggtcgcgatctgcgccgctatgcgagtcatgagcgcaagatgatcctcgacaaccatggcctctacgaccgcaaaaagcgcatctttctgaaagcgggcagcgaagaagagattttcgcgcatctgggtctggattatgtggagccgtgggaacgcaacgcg

SEQ ID NO: 332 - protein, 394 aa, synthetic construct
  REGION 1..394: note = Variant of terminal deoxynucleotidyl transferase
MHHHHHHGGSGHPPSNTPELEVPSVIARKVSQYSCQRKTTLNNYNKKFTDAFEIMAENYEFKENEIFCLEFLRAASLLKYLPFPVTRMKDIQGLPCIGDQVRDVIEEIIEEGESSRVKEVLNDERYKAFKQFTSVFGVGVKTSEKWFRMGLRTVEELKADKSLKLSKMQKAGFLYYEDLVSCVSKAEADAVTLIVKNTVSTFLPDALVTITGGFRRGKKMGHDIDFLITNPGPKEDDELLHKVVDLLKKQGLLLYCDIIESTFVEEQLPSRKIDAMDNFQKCFAILKLYQPGVDNSSYNRSKKSDMAEVKDWKAIRVDLVITPFEQYAYALLGWTGSREFGRDLRRYASHERKMILDNHGLYDRKKRIFLKAGSEEEIFAHLGLDYVEPWERNA

SEQ ID NO: 333 - DNA, 1182 bp, synthetic construct
  misc_feature 1..1182: note = Variant of terminal deoxynucleotidyl transferase
  source 1..1182: mol_type = other DNA
atgcaccatcatcatcatcatggcggtagcggccatccgccgagcaataccccggagctggaagtgccgagcgttatcgcccgcaaggttagtcagtacagctgccagcgcaagaccacgctgaataactacaacaaaaagtttaccgacgcgttcgagatcatggccgagaactacgaatttaaagagaacgaaatcttctgtctggaatttctgcgcgccgcgagtctgctgaaatatctgccgttcccggttacccgcatgaaagacatccaaggtctgccgtgcattggcgaccaagttcgtgacgtgatcgaggagatcatcgaagaaggcgagagcagccgtgttaaagaagttctcaatgacgagcgctacaaggcctttaagcagttcaccagcgtgttcggtgtgggcgtgaaaaccagcgaaaagtggtttcgtatgggcctccgtacggttgaagagctgaaggccgacaagagtctgaagctgagcaagatgcagaaggcgggctttctgtattacgaggatctggtgagctgcgttagtaaagcggaagccgatgccgttacgctcatcgtgaagaacacggtgagtacctttctgccggatgcgctggtgaccatcacgggcggtttccgccgtggcaaaaagatgggccacgacatcgactttctgatcacgaatccgggcccgaaagaggatgacgaactgctccacaaagtggttgatctgctcaagaagcaaggtctgctgctgtactgcgacatcatcgagagcacgttcgtggaggaacaactgccaagtcgcaaaatcgacgccatggacaacttccagaagtgcttcgccattctcaagctgtaccagccgggcgtggataacagcagctataacacgagtaagaagagtgacatggccgaggttaaggattggaaagcgatccgtgtggatctggtgggtacgccattcgagcagtacgcctatgcgctgctcggttggacgggcagccgcgaatttggtcgcgatctgcgccgctatgcgagtcatgagcgcaagatgatcctcgacaaccatggcctctacgaccgcaaaaagcgcatctttctgaaagcgggcagcgaagaagagattttcgcgcatctgggtctggattatgtggagccgtgggaacgcaacgcg

SEQ ID NO: 334 - protein, 394 aa, synthetic construct
  REGION 1..394: note = Variant of terminal deoxynucleotidyl transferase
MHHHHHHGGSGHPPSNTPELEVPSVIARKVSQYSCQRKTTLNNYNKKFTDAFEIMAENYEFKENEIFCLEFLRAASLLKYLPFPVTRMKDIQGLPCIGDQVRDVIEEIIEEGESSRVKEVLNDERYKAFKQFTSVFGVGVKTSEKWFRMGLRTVEELKADKSLKLSKMQKAGFLYYEDLVSCVSKAEADAVTLIVKNTVSTFLPDALVTITGGFRRGKKMGHDIDFLITNPGPKEDDELLHKVVDLLKKQGLLLYCDIIESTFVEEQLPSRKIDAMDNFQKCFAILKLYQPGVDNSSYNTSKKSDMAEVKDWKAIRVDLVGTPFEQYAYALLGWTGSREFGRDLRRYASHERKMILDNHGLYDRKKRIFLKAGSEEEIFAHLGLDYVEPWERNA

SEQ ID NO: 335 - DNA, 1182 bp, synthetic construct
  misc_feature 1..1182: note = Variant of terminal deoxynucleotidyl transferase
  source 1..1182: mol_type = other DNA
atgcaccatcatcatcatcatggcggtagcggccatccgccgagcaataccccggagctggaagtgccgagcgttatcgcccgcaaggttagtcagtacagctgccagcgcaagaccacgctgaataactacaacaaaaagtttaccgacgcgttcgagatcatggccgagaactacgaatttaaagagaacgaaatcttctgtctggaatttctgcgcgccgcgagtctgctgaaatatctgccgttcccggttacccgcatgaaagacatccaaggtctgccgtgcattggcgaccaagttcgtgacgtgatcgaggagatcatcgaagaaggcgagagcagccgtgttaaagaagttctcaatgacgagcgctacaaggcctttaagcagttcaccagcgtgttcggtgtgggcgtgaaaaccagcgaaaagtggtttcgtatgggcctccgtacggttgaagagctgaaggccgacaagagtctgaagctgagcaagatgcagaaggcgggctttctgtattacgaggatctggtgagctgcgttagtaaagcggaagccgatgccgttacgctcatcgtgaagaacacggtgagtacctttctgccggatgcgctggtgaccatcacgggcggtttccgccgtggcaaaaagatgggccacgacatcgactttctgatcacgaatccgggcccgaaagaggatgacgaactgctccacaaagtggttgatctgctcaagcagcaaggtctgctgctgtactgcgacatcatcgagagcacgttcgtggaggaacaactgccaagtcgcaaaatcgacgccatggacaacttccagaagtgcttcgccattctcaagctgtaccagccgggcgtggataacagcagctataacacgagtaagaagagtgacatggccgaggttaaggattggaaagcgatccgtgtggatctggtgatcacgccattcgagcagtacgcctatgcgctgctcggttggacgggcagccgcgaatttggtcgcgatctgcgccgctatgcgagtcatgagcgcaagatgatcctcgacaaccatggcctctacgaccgcaaaaagcgcatctttctgaaagcgggcagcgaagaagagattttcgcgcatctgggtctggattatgtggagccgtgggaacgcaacgcg

SEQ ID NO: 336 - protein, 394 aa, synthetic construct
  REGION 1..394: note = Variant of terminal deoxynucleotidyl transferase
MHHHHHHGGSGHPPSNTPELEVPSVIARKVSQYSCQRKTTLNNYNKKFTDAFEIMAENYEFKENEIFCLEFLRAASLLKYLPFPVTRMKDIQGLPCIGDQVRDVIEEIIEEGESSRVKEVLNDERYKAFKQFTSVFGVGVKTSEKWFRMGLRTVEELKADKSLKLSKMQKAGFLYYEDLVSCVSKAEADAVTLIVKNTVSTFLPDALVTITGGFRRGKKMGHDIDFLITNPGPKEDDELLHKVVDLLKQQGLLLYCDIIESTFVEEQLPSRKIDAMDNFQKCFAILKLYQPGVDNSSYNTSKKSDMAEVKDWKAIRVDLVITPFEQYAYALLGWTGSREFGRDLRRYASHERKMILDNHGLYDRKKRIFLKAGSEEEIFAHLGLDYVEPWERNA

SEQ ID NO: 337 - DNA, 1182 bp, synthetic construct
  misc_feature 1..1182: note = Variant of terminal deoxynucleotidyl transferase
  source 1..1182: mol_type = other DNA
atgcaccatcatcatcatcatggcggtagcggccatccgccgagcaataccccggagctggaagtgccgagcgttatcgcccgcaaggttagtcagtacagctgccagcgcaagaccacgctgaataactacaacaaaaagtttaccgacgcgttcgagatcatggccgagaactacgaatttaaagagaacgaaatcttctgtctggaatttctgcgcgccgcgagtctgctgaaatatctgccgttcccggttacccgcatgaaagacatccaaggtctgccgtgcattggcgaccaagttcgtgacgtgatcgaggagatcatcgaagaaggcgagagcagccgtgttaaagaagttctcaatgacgagcgctacaaggcctttaagcagttcaccagcgtgttcggtgtgggcgtgaaaaccagcgaaaagtggtttcgtatgggcctccgtacggttgaagagctgaaggccgacaagagtctgaagctgagcaagatgcagaaggcgggctttctgtattacgaggatctgaggagctgcgttagtaaagcggaagccgatgccgttacgctcatcgtgaagaacacggtgagtacctttctgccggatgcgctggtgaccatcacgggcggtttccgccgtggcaaaaagatgggccacgacatcgactttctgatcacgaatccgggcccgaaagaggatgacgaactgctccacaaagtggttgatctgctcaagaagcaaggtctgctgctgtactgcgacatcatcgagagcacgttcgtggaggaacaactgccaagtcgcaaaatcgacgccatggacaacttccagaagtgcttcgccattctcaagctgtaccagccgggcgtggataacagcagctataacacgagtaagaagagtgacatggccgaggttaaggattggaaagcgatccgtgtggatctggtgatcacgccattcgagcagtacgcctatgcgctgctcggttggacgggcagccgcgaatttggtcgcgatctgcgccgctatgcgagtcatgagcgcaagatgatcctcgacaaccatggcctctacgaccgcaaaaagcgcatctttctgaaagcgggcagcgaagaagagattttcgcgcatctgggtctggattatgtggagccgtgggaacgcaacgcg

SEQ ID NO: 338 - protein, 394 aa, synthetic construct
  REGION 1..394: note = Variant of terminal deoxynucleotidyl transferase
MHHHHHHGGSGHPPSNTPELEVPSVIARKVSQYSCQRKTTLNNYNKKFTDAFEIMAENYEFKENEIFCLEFLRAASLLKYLPFPVTRMKDIQGLPCIGDQVRDVIEEIIEEGESSRVKEVLNDERYKAFKQFTSVFGVGVKTSEKWFRMGLRTVEELKADKSLKLSKMQKAGFLYYEDLRSCVSKAEADAVTLIVKNTVSTFLPDALVTITGGFRRGKKMGHDIDFLITNPGPKEDDELLHKVVDLLKKQGLLLYCDIIESTFVEEQLPSRKIDAMDNFQKCFAILKLYQPGVDNSSYNTSKKSDMAEVKDWKAIRVDLVITPFEQYAYALLGWTGSREFGRDLRRYASHERKMILDNHGLYDRKKRIFLKAGSEEEIFAHLGLDYVEPWERNA

SEQ ID NO: 339 - DNA, 1182 bp, synthetic construct
  misc_feature 1..1182: note = Variant of terminal deoxynucleotidyl transferase
  source 1..1182: mol_type = other DNA
atgcaccatcatcatcatcatggcggtagcggccatccgccgagcaataccccggagctggaagtgccgagcgttatcgcccgcaaggttagtcagtacagctgccagcgcaagaccacgctgaataactacaacaaaaagtttaccgacgcgttcgagatcatggccgagaactacgaatttttggagaacgaaatcttctgtctggaatttctgcgcgccgcgagtctgctgaaatatctgccgttcccggttacccgcatgaaagacatccaaggtctgccgtgcattggcgaccaagttcgtgacgtgatcgaggagatcatcgaagaaggcgagagcagccgtgttaaagaagttctcaatgacgagcgctacaaggcctttaagcagttcaccagcgtgttcggtgtgggcgtgaaaaccagcgaaaagtggtttcgtatgggcctccgtacggttgaagagctgaaggccgacaagagtctgaagctgagcaagatgcagaaggcgggctttctgtattacgaggatctggtgagctgcgttagtaaagcggaagccgatgccgttacgctcatcgtgaagaacacggtgagtacctttctgccggatgcgctggtgaccatcacgggcggtttccgccgtggcaaaaagatgggccacgacatcgactttctgatcacgaatccgggcccgaaagaggatgacgaactgctccacaaagtggttgatctgctcaagaagcaaggtctgctgctgtactgcgacatcatcgagagcacgttcgtggaggaacaactgccaagtcgcaaaatcgacgccatggacaacttccagaagtgcttcgccattctcaagctgtaccagccgggcgtggataacagcagctataacacgagtaagaagagtgacatggccgaggttaaggattggaaagcgatccgtgtggatctggtgatcacgccattcgagcagtacgcctatgcgctgctcggttggacgggcagccgcgaatttggtcgcgatctgcgccgctatgcgagtcatgagcgcaagatgatcctcgacaaccatggcctctacgaccgcaaaaagcgcatctttctgaaagcgggcagcgaagaagagattttcgcgcatctgggtctggattatgtggagccgtgggaacgcaacgcg

SEQ ID NO: 340 - protein, 394 aa, synthetic construct
  REGION 1..394: note = Variant of terminal deoxynucleotidyl transferase
MHHHHHHGGSGHPPSNTPELEVPSVIARKVSQYSCQRKTTLNNYNKKFTDAFEIMAENYEFLENEIFCLEFLRAASLLKYLPFPVTRMKDIQGLPCIGDQVRDVIEEIIEEGESSRVKEVLNDERYKAFKQFTSVFGVGVKTSEKWFRMGLRTVEELKADKSLKLSKMQKAGFLYYEDLVSCVSKAEADAVTLIVKNTVSTFLPDALVTITGGFRRGKKMGHDIDFLITNPGPKEDDELLHKVVDLLKKQGLLLYCDIIESTFVEEQLPSRKIDAMDNFQKCFAILKLYQPGVDNSSYNTSKKSDMAEVKDWKAIRVDLVITPFEQYAYALLGWTGSREFGRDLRRYASHERKMILDNHGLYDRKKRIFLKAGSEEEIFAHLGLDYVEPWERNA

SEQ ID NO: 341 - DNA, 1182 bp, synthetic construct
  misc_feature 1..1182: note = Variant of terminal deoxynucleotidyl transferase
  source 1..1182: mol_type = other DNA
atgcaccatcatcatcatcatggcggtagcggccatccgccgagcaataccccggagctggaagtgccgagcgttatcgcccgcaaggttagtcagtacagctgccagcgcaagaccacgctgaataactacaacaaaaagtttaccgacgcgttcgagatcatggccgagaactacgaatttaaagagaacgaaatcttcagtctggaatttctgcgcgccgcgagtctgctgaaatatctgccgttcccggttacccgcatgaaagacatccaaggtctgccgtgcattggcgaccaagttcgtgacgtgatcgaggagatcatcgaagaaggcgagagcagccgtgttaaagaagttctcaatgacgagcgctacaaggcctttaagcagttcaccagcgtgttcggtgtgggcgtgaaaaccagcgaaaagtggtttcgtatgggcctccgtacggttgaagagctgaaggccgacaagagtctgaagctgagcaagatgcagaaggcgggctttctgtattacgaggatctggtgagctgcgttagtaaagcggaagccgatgccgttacgctcatcgtgaagaacacggtgagtacctttctgccggatgcgctggtgaccatcacgggcggtttccgccgtggcaaaaagatgggccacgacatcgactttctgatcacgaatccgggcccgaaagaggatgacgaactgctccacaaagtggttgatctgctcaagaagcaaggtctgctgctgtactgcgacatcatcgagagcacgttcgtggaggaacaactgccaagtcgcaaaatcgacgccatggacaacttccagaagtgcttcgccattctcaagctgtaccagccgggcgtggataacagcagctataacacgagtaagaagagtgacatggccgaggttaaggattggaaagcgatccgtgtggatctggtgatcacgccattcgagcagtacgcctatgcgctgctcggttggacgggcagccgcgaatttggtcgcgatctgcgccgctatgcgagtcatgagcgcaagatgatcctcgacaaccatggcctctacgaccgcaaaaagcgcatctttctgaaagcgggcagcgaagaagagattttcgcgcatctgggtctggattatgtggagccgtgggaacgcaacgcg

SEQ ID NO: 342 - protein, 394 aa, synthetic construct
  REGION 1..394: note = Variant of terminal deoxynucleotidyl transferase
MHHHHHHGGSGHPPSNTPELEVPSVIARKVSQYSCQRKTTLNNYNKKFTDAFEIMAENYEFKENEIFSLEFLRAASLLKYLPFPVTRMKDIQGLPCIGDQVRDVIEEIIEEGESSRVKEVLNDERYKAFKQFTSVFGVGVKTSEKWFRMGLRTVEELKADKSLKLSKMQKAGFLYYEDLVSCVSKAEADAVTLIVKNTVSTFLPDALVTITGGFRRGKKMGHDIDFLITNPGPKEDDELLHKVVDLLKKQGLLLYCDIIESTFVEEQLPSRKIDAMDNFQKCFAILKLYQPGVDNSSYNTSKKSDMAEVKDWKAIRVDLVITPFEQYAYALLGWTGSREFGRDLRRYASHERKMILDNHGLYDRKKRIFLKAGSEEEIFAHLGLDYVEPWERNA

SEQ ID NO: 343 - DNA, 1182 bp, synthetic construct
  misc_feature 1..1182: note = Variant of terminal deoxynucleotidyl transferase
  source 1..1182: mol_type = other DNA
atgcaccatcatcatcatcatggcggtagcggccatccgccgagcaataccccggagctggaagtgccgagcgttatcgcccgcaaggttagtcagtacagctgccagcgcaagaccacgctgacgaactacaacaaaaagtttaccgacgcgttcgagatcatggccgagaactacgaatttaaagagaacgaaatcttctgtctggaatttctgcgcgccgcgagtctgctgaaatatctgccgttcccggttacccgcatgaaagacatccaaggtctgccgtgcattggcgaccaagttcgtgacgtgatcgaggagatcatcgaagaaggcgagagcagccgtgttaaagaagttctcaatgacgagcgctacaaggcctttaagcagttcaccagcgtgttcggtgtgggcgtgaaaaccagcgaaaagtggtttcgtatgggcctccgtacggttgaagagctgaaggccgacaagagtctgaagctgagcaagatgcagaaggcgggctttctgtattacgaggatctggtgagctgcgttagtaaagcggaagccgatgccgttacgctcatcgtgaagaacacggtgagtacctttctgccggatgcgctggtgaccatcacgggcggtttccgccgtggcaaaaagatgggccacgacatcgactttctgatcacgaatccgggcccgaaagaggatgacgaactgctccacaaagtggttgatctgctcaagaagcaaggtctgctgctgtactgcgacatcatcgagagcacgttcgtggaggaacaactgccaagtcgcaaaatcgacgccatggacaacttccagaagtgcttcgccattctcaagctgtaccagccgggcgtggataacagcagctataacacgagtaagaagagtgacatggccgaggttaaggattggaaagcgatccgtgtggatctggtgatcacgccattcgagcagtacgcctatgcgctgctcggttggacgggcagccgcgaatttggtcgcgatctgcgccgctatgcgagtcatgagcgcaagatgatcctcgacaaccatggcctctacgaccgcaaaaagcgcatctttctgaaagcgggcagcgaagaagagattttcgcgcatctgggtctggattatgtggagccgtgggaacgcaacgcg

SEQ ID NO: 344 - protein, 394 aa, synthetic construct
  REGION 1..394: note = Variant of terminal deoxynucleotidyl transferase
MHHHHHHGGSGHPPSNTPELEVPSVIARKVSQYSCQRKTTLTNYNKKFTDAFEIMAENYEFKENEIFCLEFLRAASLLKYLPFPVTRMKDIQGLPCIGDQVRDVIEEIIEEGESSRVKEVLNDERYKAFKQFTSVFGVGVKTSEKWFRMGLRTVEELKADKSLKLSKMQKAGFLYYEDLVSCVSKAEADAVTLIVKNTVSTFLPDALVTITGGFRRGKKMGHDIDFLITNPGPKEDDELLHKVVDLLKKQGLLLYCDIIESTFVEEQLPSRKIDAMDNFQKCFAILKLYQPGVDNSSYNTSKKSDMAEVKDWKAIRVDLVITPFEQYAYALLGWTGSREFGRDLRRYASHERKMILDNHGLYDRKKRIFLKAGSEEEIFAHLGLDYVEPWERNA

SEQ ID NO: 345 - DNA, 1182 bp, synthetic construct
  misc_feature 1..1182: note = Variant of terminal deoxynucleotidyl transferase
  source 1..1182: mol_type = other DNA
atgcaccatcatcatcatcatggcggtagcggccatccgccgagcaataccccggagctggaagtgccgagcgttatcgcccgcaaggttagtcagtacagctgccagcgcaagaccacgctgaataactacaacaaaaagtttaccgacgcgttcgagatcatggccgagaactacgaatttaaagagaacgaaatcttctgtctggaatttctgcgcgccgcgagtctgctgaaatatctgccgttcccggttacccgcatgaaagacatccaaggtctgccgtgcattggcgaccaagttcgtgacgtgatcgaggagatcatcgaagaaggcgagagcagccgtgttaaagaagttctcaatgacgagcgctacaaggcctttaagcagttcaccagcgtgttcggtgtgggcgtgaaaaccagcgaaaagtggtttcgtatgggcctccgtacggttgaagagctgaaggccgacaagagtctgaagctgagcaagatgcagaaggcgggctttctgtattacgaggatctggtgagctgcgttagtaaagcggaagccgatgccgttacgctcatcgtgaagaacacggtgagtacctttctgccggatgcgctggtgaccatcacgggcggtttccgccgtggcaaaaagatgggccacgacatcgactttctgatcacgaatccgggcccgaaagaggatgacgaactgctccacaaagtggttgatctgctcaagaagcaaggtctgctgctgtactgcgacatcatcgagagcacgttcgtggaggaacaactgccaagtcgcaaaatcgacgccatggacaacttccagaagtgcttcgccattctcaagctgtaccagccgggcgtggataacagcagctataacacgagtaagaagagtgacatggccgaggttaaggattggaaagcgatccgtgtggatctggtgatcacgccattcgagcagtacgcctatgcgctgctcggttggacgggcagccgcgaatttggtcgcgatctgcgccgctatgcgagtcatgagcgcaagatgatcctcgacaaccatggcctctacgaccgccgtaagcgcatctttctgaaagcgggcagcgaagaagagattttcgcgcatctgggtctggattatgtggagccgtgggaacgcaacgcg

SEQ ID NO: 346 - protein, 394 aa, synthetic construct
  REGION 1..394: note = Variant of terminal deoxynucleotidyl transferase
MHHHHHHGGSGHPPSNTPELEVPSVIARKVSQYSCQRKTTLNNYNKKFTDAFEIMAENYEFKENEIFCLEFLRAASLLKYLPFPVTRMKDIQGLPCIGDQVRDVIEEIIEEGESSRVKEVLNDERYKAFKQFTSVFGVGVKTSEKWFRMGLRTVEELKADKSLKLSKMQKAGFLYYEDLVSCVSKAEADAVTLIVKNTVSTFLPDALVTITGGFRRGKKMGHDIDFLITNPGPKEDDELLHKVVDLLKKQGLLLYCDIIESTFVEEQLPSRKIDAMDNFQKCFAILKLYQPGVDNSSYNTSKKSDMAEVKDWKAIRVDLVITPFEQYAYALLGWTGSREFGRDLRRYASHERKMILDNHGLYDRRKRIFLKAGSEEEIFAHLGLDYVEPWERNA

SEQ ID NO: 347 - DNA, 1182 bp, synthetic construct
  misc_feature 1..1182: note = Variant of terminal deoxynucleotidyl transferase
  source 1..1182: mol_type = other DNA
atgcaccatcatcatcatcatggcggtagcggccatccgccgagcaataccccggagctggaagtgccgagcgttatcgcccgcaaggttagtcagtacagctgccagcgcaagaccacgctgaataactacaacaaaaagtttaccgacgcgttcgagatcatggccgagaactacgaatttaaagagaacgaaatcttctgtctggaatttctgcgcgccgcgagtctgctgaaatatctgccgttcccggttacccgcatgaaagacatccaaggtctgccgtgcattggcgaccaagttcgtgacgtgatcgaggagatcatcgaagaaggcgagagcagccgtgttaaagaagttctcaatgacgagcgctacaaggcctttaagcagttcaccagcgtgttcggtgtgggcgtgaaaaccagcgaaaagtggtttcgtatgggcctccgtacggttgaatttctgaaggccgacaagagtctgaagctgagcaagatgcagaaggcgggctttctgtattacgaggatctggtgagctgcgttagtaaagcggaagccgatgccgttacgctcatcgtgaagaacacggtgagtacctttctgccggatgcgctggtgaccatcacgggcggtttccgccgtggcaaaaagatgggccacgacatcgactttctgatcacgaatccgggcccgaaagaggatgacgaactgctccacaaagtggttgatctgctcaagaagcaaggtctgctgctgtactgcgacatcatcgagagcacgttcgtggaggaacaactgccaagtcgcaaaatcgacgccatggacaacttccagaagtgcttcgccattctcaagctgtaccagccgggcgtggataacagcagctataacacgagtaagaagagtgacatggccgaggttaaggattggaaagcgatccgtgtggatctggtgatcacgccattcgagcagtacgcctatgcgctgctcggttggacgggcagccgcgaatttggtcgcgatctgcgccgctatgcgagtcatgagcgcaagatgatcctcgacaaccatggcctctacgaccgcaaaaagcgcatctttctgaaagcgggcagcgaagaagagattttcgcgcatctgggtctggattatgtggagccgtgggaacgcaacgcg

SEQ ID NO: 348 - protein, 394 aa, synthetic construct
  REGION 1..394: note = Variant of terminal deoxynucleotidyl transferase
MHHHHHHGGSGHPPSNTPELEVPSVIARKVSQYSCQRKTTLNNYNKKFTDAFEIMAENYEFKENEIFCLEFLRAASLLKYLPFPVTRMKDIQGLPCIGDQVRDVIEEIIEEGESSRVKEVLNDERYKAFKQFTSVFGVGVKTSEKWFRMGLRTVEFLKADKSLKLSKMQKAGFLYYEDLVSCVSKAEADAVTLIVKNTVSTFLPDALVTITGGFRRGKKMGHDIDFLITNPGPKEDDELLHKVVDLLKKQGLLLYCDIIESTFVEEQLPSRKIDAMDNFQKCFAILKLYQPGVDNSSYNTSKKSDMAEVKDWKAIRVDLVITPFEQYAYALLGWTGSREFGRDLRRYASHERKMILDNHGLYDRKKRIFLKAGSEEEIFAHLGLDYVEPWERNA

SEQ ID NO: 349 - DNA, 1182 bp, synthetic construct
  misc_feature 1..1182: note = Variant of terminal deoxynucleotidyl transferase
  source 1..1182: mol_type = other DNA
atgcaccatcatcatcatcatggcggtagcggccatccgccgagcaataccccggagctggaagtgccgagcgttatcgcccgcaaggttagtcagtacagctgccagcgcaagaccacgctgaataactacaacaaaaagtttaccgacgcgttcgagatcatggccgagaactacgaatttaaagagaacgaaatcttctgtctggaatttctgcgcgccgcgagtctgctgaaatatctgccgttcccggttacccgcatgaaagacatccaaggtctgccgtgcattggcgaccaagttcgtgacgtgatcgaggagatcatcgaagaaggcgagagcagccgtgttaaagaagttctctctgacgagcgctacaaggcctttaagcagttcaccagcgtgttcggtgtgggcgtgaaaaccagcgaaaagtggtttcgtatgggcctccgtacggttgaagagctgaaggccgacaagagtctgaagctgagcaagatgcagaaggcgggctttctgtattacgaggatctggtgagctgcgttagtaaagcggaagccgatgccgttacgctcatcgtgaagaacacggtgagtacctttctgccggatgcgctggtgaccatcacgggcggtttccgccgtggcaaaaagatgggccacgacatcgactttctgatcacgaatccgggcccgaaagaggatgacgaactgctccacaaagtggttgatctgctcaagaagcaaggtctgctgctgtactgcgacatcatcgagagcacgttcgtggaggaacaactgccaagtcgcaaaatcgacgccatggacaacttccagaagtgcttcgccattctcaagctgtaccagccgggcgtggataacagcagctataacacgagtaagaagagtgacatggccgaggttaaggattggaaagcgatccgtgtggatctggtgatcacgccattcgagcagtacgcctatgcgctgctcggttggacgggcagccgcgaatttggtcgcgatctgcgccgctatgcgagtcatgagcgcaagatgatcctcgacaaccatggcctctacgaccgcaaaaagcgcatctttctgaaagcgggcagcgaagaagagattttcgcgcatctgggtctggattatgtggagccgtgggaacgcaacgcg

SEQ ID NO: 350 - protein, 394 aa, synthetic construct
  REGION 1..394: note = Variant of terminal deoxynucleotidyl transferase
MHHHHHHGGSGHPPSNTPELEVPSVIARKVSQYSCQRKTTLNNYNKKFTDAFEIMAENYEFKENEIFCLEFLRAASLLKYLPFPVTRMKDIQGLPCIGDQVRDVIEEIIEEGESSRVKEVLSDERYKAFKQFTSVFGVGVKTSEKWFRMGLRTVEELKADKSLKLSKMQKAGFLYYEDLVSCVSKAEADAVTLIVKNTVSTFLPDALVTITGGFRRGKKMGHDIDFLITNPGPKEDDELLHKVVDLLKKQGLLLYCDIIESTFVEEQLPSRKIDAMDNFQKCFAILKLYQPGVDNSSYNTSKKSDMAEVKDWKAIRVDLVITPFEQYAYALLGWTGSREFGRDLRRYASHERKMILDNHGLYDRKKRIFLKAGSEEEIFAHLGLDYVEPWERNA

SEQ ID NO: 351 - DNA, 1182 bp, synthetic construct; identical to SEQ ID NO: 225
  misc_feature 1..1182: note = Variant of terminal deoxynucleotidyl transferase
  source 1..1182: mol_type = other DNA

SEQ ID NO: 352 - protein, 394 aa, synthetic construct; identical to SEQ ID NO: 226
  REGION 1..394: note = Variant of terminal deoxynucleotidyl transferase

SEQ ID NO: 353 - DNA, 1182 bp, synthetic construct
  misc_feature 1..1182: note = Variant of terminal deoxynucleotidyl transferase
  source 1..1182: mol_type = other DNA
atgcaccatcatcatcatcatggcggtagcggccatccgccgagcaataccccggagctggaagtgccgagcgttatcgcccgcaaggttagtcagtacagctgccagcgcaagaccacgctgaataactacaacaaaaagtttaccgacgcgttcgagatcatggccgagaactacgaatttaaagagaacgaaatcttctgtctggaatttctgcgcgccgcgagtctgctgaaatatctgccgttcccggttacccgcatgaaagacatccaaggtctgccgtgcattggcgaccaagttcgtgacgtgatcgaggagatcatcgaagaaggcgagagcagccgtgttaaagaagttctcaatgacgagcgctacaaggcctttaagcagttcaccagcgtgttcggtgtgggcgtgaaaaccagcgaaaagtggtttcgtatgggcctccgtacggttgaagagctgaaggccgacaagagtctgaagctgagcaagatgcagaaggcgggctttctgtattacgaggatctggtgagctgcgttagtaaagcggaagccgatgccgttacgctcatcgtgaagaacacggtgagtacctttctgccggatgcgctggtgaccatcacgggcggtttccgccgtggcaaaaagatgggccacgacatcgactttctgatcacgaatccgggcccgaaagaggatgacgaactgctccacaaagtggttgatctgctcaagaagcaaggtctgctgctgtactgcgacatcatcgagagcacgttcgtggaggaacaactgccaagtcgcaaaatcgacgccatggacaacttccagaagtgcttcgccattctcaagctgtaccagccgggcgtggataacagcagctataacacgagtaagaagagtgacatggccgaggttaaggattggaaagcgatccgtgtggatctggtgatcacgccattcgagcagtacgcctatgcgctgctcggttggacgggcagccgcgaatttggtcgcgatctgcgccgctatgcgagtcatgagcgcaagatgatcctcgacaaccatggcctctacgaccgcaaaccgcgcatctttctgaaagcgggcagcgaagaagagattttcgcgcatctgggtctggattatgtggagccgtgggaacgcaacgcg

SEQ ID NO: 354 - protein, 394 aa, synthetic construct
  REGION 1..394: note = Variant of terminal deoxynucleotidyl transferase
MHHHHHHGGSGHPPSNTPELEVPSVIARKVSQYSCQRKTTLNNYNKKFTDAFEIMAENYEFKENEIFCLEFLRAASLLKYLPFPVTRMKDIQGLPCIGDQVRDVIEEIIEEGESSRVKEVLNDERYKAFKQFTSVFGVGVKTSEKWFRMGLRTVEELKADKSLKLSKMQKAGFLYYEDLVSCVSKAEADAVTLIVKNTVSTFLPDALVTITGGFRRGKKMGHDIDFLITNPGPKEDDELLHKVVDLLKKQGLLLYCDIIESTFVEEQLPSRKIDAMDNFQKCFAILKLYQPGVDNSSYNTSKKSDMAEVKDWKAIRVDLVITPFEQYAYALLGWTGSREFGRDLRRYASHERKMILDNHGLYDRKPRIFLKAGSEEEIFAHLGLDYVEPWERNA

SEQ ID NO: 355 - DNA, 1182 bp, synthetic construct; identical to SEQ ID NO: 193
  misc_feature 1..1182: note = Variant of terminal deoxynucleotidyl transferase
  source 1..1182: mol_type = other DNA

SEQ ID NO: 356 - protein, 394 aa, synthetic construct; identical to SEQ ID NO: 194
  REGION 1..394: note = Variant of terminal deoxynucleotidyl transferase

SEQ ID NO: 357 - DNA, 1182 bp, synthetic construct
  misc_feature 1..1182: note = Variant of terminal deoxynucleotidyl transferase
  source 1..1182: mol_type = other DNA
atgcaccatcatcatcatcatggcggtagcggccatccgccgagcaataccccggagctggaagtgccgagcgttatcgcccgcaaggttagtcagtacagctgccagcgcaagaccacgctgaataactacaacaaaaagtttaccgacgcgttcgagatcatggccgagaactacgaatttaaagagaacgaaatcttctgtctggaatttctgcgcgccgcgagtctgctgaaatatctgccgttcccggttacccgcatgaaagacatccaaggtctgccgtgcattggcgaccaagttcgtgacgtgatcgaggagatcatcgaagaaggcgagagcagccgtgttaaagaagttctcaatgacgagcgctacaaggcctttaagcagttcaccagcgtgttcggtgtgggcgtgaaaaccagcgaaaagtggtttcgtatgggcctccgtacggttgaagagctgaaggccgacaagagtctgaagctgagcaagatgcagaaggcgggctttctgtattacgaggatctggtgagctgcgttagtaaagcggaagccgatgccgttacgctcatcgtgaagaacacggtgagtacctttctgccggatgcgctggtgaccatcacgggcggtttccgccgtggcaaaaagatgggccacgacatcgactttctgatcacgaatccgggcccgaaagaggatgacgaactgctccacaaagtggttgatctgctcaagaagcaaggtctgctgctgtactgcgacatcatcgagagcacgttcgtggaggaacaactgccaagtcgcaaaatcgacgccatggacaacttccagaagtgcttcgccattctcaagctgtaccagaagggcgtggataacagcagctataacacgagtaagaagagtgacatggccgaggttaaggattggaaagcgatccgtgtggatctggtgatcacgccattcgagcagtacgcctatgcgctgctcggttggacgggcagccgcgaatttggtcgcgatctgcgccgctatgcgagtcatgagcgcaagatgatcctcgacaaccatggcctctacgaccgcaaaaagcgcatctttctgaaagcgggcagcgaagaagagattttcgcgcatctgggtctggattatgtggagccgtgggaacgcaacgcg

SEQ ID NO: 358 - protein, 394 aa, synthetic construct
  REGION 1..394: note = Variant of terminal deoxynucleotidyl transferase
MHHHHHHGGSGHPPSNTPELEVPSVIARKVSQYSCQRKTTLNNYNKKFTDAFEIMAENYEFKENEIFCLEFLRAASLLKYLPFPVTRMKDIQGLPCIGDQVRDVIEEIIEEGESSRVKEVLNDERYKAFKQFTSVFGVGVKTSEKWFRMGLRTVEELKADKSLKLSKMQKAGFLYYEDLVSCVSKAEADAVTLIVKNTVSTFLPDALVTITGGFRRGKKMGHDIDFLITNPGPKEDDELLHKVVDLLKKQGLLLYCDIIESTFVEEQLPSRKIDAMDNFQKCFAILKLYQKGVDNSSYNTSKKSDMAEVKDWKAIRVDLVITPFEQYAYALLGWTGSREFGRDLRRYASHERKMILDNHGLYDRKKRIFLKAGSEEEIFAHLGLDYVEPWERNA

SEQ ID NO: 359 - DNA, 1182 bp, synthetic construct
  misc_feature 1..1182: note = Variant of terminal deoxynucleotidyl transferase
  source 1..1182: mol_type = other DNA
atgcaccatcatcatcatcatggcggtagcggccatccgccgagcaataccccggagctggaagtgccgagcgttatcgcccgcaaggttagtcagtacagctgccagcgcaagaccacgctgaataactacaacaaaaagtttaccgacgcgttcgagatcatggccgagaactacgaatttaaagagaacgaaatcttctgtctggaatttctgcgcgccgcgagtctgctgaaatatctgccgttcccggttacccgcatgaaagacatccaaggtctgccgtgcattggcgaccaagttcgtgacgtgatcgaggagatcatcgaagaaggcgagagcagccgtgttaaagaagttctcaatgacgagcgctacaaggcctttaagcagttcaccagcgtgttcggtgtgggcgtgaaaaccagcgaaaagtggtttcgtatgggcctccgtacggttgaagagctgaaggccgacaagagtctgaagctgagcaagatgcagaaggcgggctttctgtattacgaggatctggtgagctgcgttagtaaagcggaagccgatgccgttacgctcatcgtgaagaacacggtgagtaattttctgccggatgcgctggtgaccatcacgggcggtttccgccgtggcaaaaagatgggccacgacatcgactttctgatcacgaatccgggcccgaaagaggatgacgaactgctccacaaagtggttgatctgctcaagaagcaaggtctgctgctgtactgcgacatcatcgagagcacgttcgtggaggaacaactgccaagtcgcaaaatcgacgccatggacaacttccagaagtgcttcgccattctcaagctgtaccagccgggcgtggataacagcagctataacacgagtaagaagagtgacatggccgaggttaaggattggaaagcgatccgtgtggatctggtgatcacgccattcgagcagtacgcctatgcgctgctcggttggacgggcagccgcgaatttggtcgcgatctgcgccgctatgcgagtcatgagcgcaagatgatcctcgacaaccatggcctctacgaccgcaaaaagcgcatctttctgaaagcgggcagcgaagaagagattttcgcgcatctgggtctggattatgtggagccgtgggaacgcaacgcg

SEQ ID NO: 360 - protein, 394 aa, synthetic construct
  REGION 1..394: note = Variant of terminal deoxynucleotidyl transferase
MHHHHHHGGSGHPPSNTPELEVPSVIARKVSQYSCQRKTTLNNYNKKFTDAFEIMAENYEFKENEIFCLEFLRAASLLKYLPFPVTRMKDIQGLPCIGDQVRDVIEEIIEEGESSRVKEVLNDERYKAFKQFTSVFGVGVKTSEKWFRMGLRTVEELKADKSLKLSKMQKAGFLYYEDLVSCVSKAEADAVTLIVKNTVSNFLPDALVTITGGFRRGKKMGHDIDFLITNPGPKEDDELLHKVVDLLKKQGLLLYCDIIESTFVEEQLPSRKIDAMDNFQKCFAILKLYQPGVDNSSYNTSKKSDMAEVKDWKAIRVDLVITPFEQYAYALLGWTGSREFGRDLRRYASHERKMILDNHGLYDRKKRIFLKAGSEEEIFAHLGLDYVEPWERNA

SEQ ID NO: 361 - DNA, 1182 bp, synthetic construct
  misc_feature 1..1182: note = Variant of terminal deoxynucleotidyl transferase
  source 1..1182: mol_type = other DNA
atgcaccatcatcatcatcatggcggtagcggccatccgccgagcaataccccggagctggaagtgccgagcgttatcgcccgcaaggttagtcagtacagctgccagcgcaagaccacgctgaataactacaacaaaaagtttaccgacgcgttcgagatcatggccgagaactacgaatttaaagagaacgaaatcttctgtctggaatttctgcgcgccgcgagtctgctgaaatatctgccgttcccggttacccgcatgaaagacatccaaggtctgccgtgcattggcgaccaagttcgtgacgtgatcgaggagatcatcgaagaaggcgagagcagccgtgttaaagaagttctcaatgacgagcgctacaaggcctttaagcagttcaccagcgtgttcggtgtgggcgtgaaaaccagcgaaaagtggtttcgtatgggcctccgtacggttgaagagctgaaggccgacaagagtctgaagctgagcaagatgcagaaggcgggctttctgtattacgaggatctggtgagctgcgttagtaaagcggaagccgatgccgttacgctcatcgtgaagaacggggtgagtacctttctgccggatgcgctggtgaccatcacgggcggtttccgccgtggcaaaaagatgggccacgacatcgactttctgatcacgaatccgggcccgaaagaggatgacgaactgctccacaaagtggttgatctgctcaagaagcaaggtctgctgctgtactgcgacatcatcgagagcacgttcgtggaggaacaactgccaagtcgcaaaatcgacgccatggacaacttccagaagtgcttcgccattctcaagctgcaccagccgggcgtggataacagcagctataacacgagtaagaagagtgacatggccgaggttaaggattggaaagcgatccgtgtggatctggtgatcacgccattcgagcagtacgcctatgcgctgctcggttggacgggcagccgcgaatttggtcgcgatctgcgccgctatgcgagtcatgagcgcaagatgatcctcgacaaccatggcctctacgaccgcaaaaagcgcatctttctgaaagcgggcagcgaagaagagattttcgcgcatctgggtctggattatgtggagccgtgggaacgcaacgcg

SEQ ID NO: 362 - protein, 394 aa, synthetic construct
  REGION 1..394: note = Variant of terminal deoxynucleotidyl transferase
MHHHHHHGGSGHPPSNTPELEVPSVIARKVSQYSCQRKTTLNNYNKKFTDAFEIMAENYEFKENEIFCLEFLRAASLLKYLPFPVTRMKDIQGLPCIGDQVRDVIEEIIEEGESSRVKEVLNDERYKAFKQFTSVFGVGVKTSEKWFRMGLRTVEELKADKSLKLSKMQKAGFLYYEDLVSCVSKAEADAVTLIVKNGVSTFLPDALVTITGGFRRGKKMGHDIDFLITNPGPKEDDELLHKVVDLLKKQGLLLYCDIIESTFVEEQLPSRKIDAMDNFQKCFAILKLHQPGVDNSSYNTSKKSDMAEVKDWKAIRVDLVITPFEQYAYALLGWTGSREFGRDLRRYASHERKMILDNHGLYDRKKRIFLKAGSEEEIFAHLGLDYVEPWERNA

SEQ ID NO: 363 - DNA, 1182 bp, synthetic construct
  misc_feature 1..1182: note = Variant of terminal deoxynucleotidyl transferase
  source 1..1182: mol_type = other DNA
atgcaccatcatcatcatcatggcggtagcggccatccgccgagcaataccccggagctggaagtgccgagcgttatcgcccgcaaggttagtcagtacagctgccagcgcaagaccacgctgaataactacaacaaaaagtttaccgacgcgttcgagatcatggccgagaactacgaatttaaagagaacgaaatcttctgtctggaatttctgcgcgccgcgagtctgctgaaatatctgccgttcccggttacccgcatgaaagacatccaaggtctgccgtgcattggcgaccaagttcgtgacgtgatcgaggagatcatcgaagaaggcgagagcagccgtgttaaagaagttctcaatgacgagcgctacaaggcctttaagcagttcaccagcgtgttcggtgtgggcgtgaaaaccagcgaaaagtggtttcgtatgggcctccgtacggttgaagagctgaaggccgacaagagtctgaagctgagcaagatgcagaaggcgggctttctgtattacgaggatctggtgagctgcgttagtaaagcggaagccgatgccgttacgctcatcgtgaagtcgacggtgagtacctttctgccggatgcgctggtgaccatcacgggcggtttccgccgtggcaaaaagatgggccacgacatcgactttctgatcacgaatccgggcccgaaagaggatgacgaactgctccacaaagtggttgatctgctcaagaagcaaggtctgctgctgtactgcgacatcatcgagagcacgttcgtggaggaacaactgccaagtcgcaaaatcgacgccatggacaacttccagaagtgcttcgccattctcaagctgtaccagccgggcgtggataacagcagctataacacgagtaagaagagtgacatggccgaggttaaggattggaaagcgatccgtgtggatctggtgatcacgccattcgagcagtacgcctatgcgctgctcggttggacgggcagccgcgaatttggtcgcgatctgcgccgctatgcgagtcatgagcgcaagatgatcctcgacaaccatggcctctacgaccgcaaaaagcgcatctttctgaaagcgggcagcgaagaagagattttcgcgcatctgggtctggattatgtggagccgtgggaacgcaacgcg

SEQ ID NO: 364 - protein, 394 aa, synthetic construct
  REGION 1..394: note = Variant of terminal deoxynucleotidyl transferase
MHHHHHHGGSGHPPSNTPELEVPSVIARKVSQYSCQRKTTLNNYNKKFTDAFEIMAENYEFKENEIFCLEFLRAASLLKYLPFPVTRMKDIQGLPCIGDQVRDVIEEIIEEGESSRVKEVLNDERYKAFKQFTSVFGVGVKTSEKWFRMGLRTVEELKADKSLKLSKMQKAGFLYYEDLVSCVSKAEADAVTLIVKSTVSTFLPDALVTITGGFRRGKKMGHDIDFLITNPGPKEDDELLHKVVDLLKKQGLLLYCDIIESTFVEEQLPSRKIDAMDNFQKCFAILKLYQPGVDNSSYNTSKKSDMAEVKDWKAIRVDLVITPFEQYAYALLGWTGSREFGRDLRRYASHERKMILDNHGLYDRKKRIFLKAGSEEEIFAHLGLDYVEPWERNA

SEQ ID NO: 365 - DNA, 1182 bp, synthetic construct
  misc_feature 1..1182: note = Variant of terminal deoxynucleotidyl transferase
  source 1..1182: mol_type = other DNA
atgcaccatcatcatcatcatggcggtagcggccatccgccgagcaataccccggagctggaagtgccgagcgttatcgcccgcaaggttagtcagtacagctgccagcgcaagaccacgctgaataactacaacaaaaagtttaccgacgcgttcgagatcatggccgagaactacgaatttaaagagaacgaaatcttctgtctggaatttctgcgcgccgcgagtctgctgaaatatctgccgttcccggttacccgcatgaaagacatccaaggtctgccgtgcattggcgaccaagttcgtgacgtgatcgaggagatcatcgaagaaggcgagagcagccgtgttaaagaagttctcaatgacgagcgctacaaggcctttaagcagttcaccagcgtgttcggtgtgggcgtgaaaaccagcgaaaagtggtttcgtatgggcctccgtacggttgaagagctgaaggccgacaagagtctgaagctgagcaagatgcagaaggcgggctttctgtattacgaggatctggtgagctgcgttagtaaagcggaagccgatgccgttacgctcatcgtgaagaacacggtgagtttgtttctgccggatgcgctggtgaccatcacgggcggtttccgccgtggcaaaaagatgggccacgacatcgactttctgatcacgaatccgggcccgaaagaggatgacgaactgctccacaaagtggttgatctgctcaagaagcaaggtctgctgctgtactgcgacatcatcgagagcacgttcgtggaggaacaactgccaagtcgcaaaatcgacgccatggacaacttccagaagtgcttcgccattctcaagctgtaccagccgggcgtggataacagcagctataacacgagtaagaagagtgacatggccgaggttaaggattggaaagcgatccgtgtggatctggtgatcacgccattcgagcagtacgcctatgcgctgctcggttggacgggcagccgcgaatttggtcgcgatctgcgccgctatgcgagtcatgagcgcaagatgatcctcgacaaccatggcctctacgaccgcaaaaagcgcatctttctgaaagcgggcagcgaagaagagattttcgcgcatctgggtctggattatgtggagccgtgggaacgcaacgcg

SEQ ID NO: 366 - protein, 394 aa, synthetic construct
  REGION 1..394: note = Variant of terminal deoxynucleotidyl transferase
MHHHHHHGGSGHPPSNTPELEVPSVIARKVSQYSCQRKTTLNNYNKKFTDAFEIMAENYEFKENEIFCLEFLRAASLLKYLPFPVTRMKDIQGLPCIGDQVRDVIEEIIEEGESSRVKEVLNDERYKAFKQFTSVFGVGVKTSEKWFRMGLRTVEELKADKSLKLSKMQKAGFLYYEDLVSCVSKAEADAVTLIVKNTVSLFLPDALVTITGGFRRGKKMGHDIDFLITNPGPKEDDELLHKVVDLLKKQGLLLYCDIIESTFVEEQLPSRKIDAMDNFQKCFAILKLYQPGVDNSSYNTSKKSDMAEVKDWKAIRVDLVITPFEQYAYALLGWTGSREFGRDLRRYASHERKMILDNHGLYDRKKRIFLKAGSEEEIFAHLGLDYVEPWERNA

SEQ ID NO: 367 - DNA, 1182 bp, synthetic construct
  misc_feature 1..1182: note = Variant of terminal deoxynucleotidyl transferase
  source 1..1182: mol_type = other DNA
atgcaccatcatcatcatcatggcggtagcggccatccgccgagcaataccccggagctggaagtgccgagcgttatcgcccgcaaggttagtcagtacagctgccagcgcaagaccacgctgaataactacaacaaaaagtttaccgacgcgttcgagatcatggccgagaactacgaatttaaagagaacgaaatcttctgtctggaatttctgcgcgccgcgagtctgctgaaatatctgccgttcccggttacccgcatgaaagacatccaaggtctgccgtgcattggcgaccaagttcgtgacgtgatcgaggagatcatcgaatctggcgagagcagccgtgttaaagaagttctcaatgacgagcgctacaaggcctttaagcagttcaccagcgtgttcggtgtgggcgtgaaaaccagcgaaaagtggtttcgtatgggcctccgtacggttgaagagctgaaggccgacaagagtctgaagctgagcaagatgcagaaggcgggctttctgtattacgaggatctggtgagctgcgttagtaaagcggaagccgatgccgttacgctcatcgtgaagaacacggtgagtacctttctgccggatgcgctggtgaccatcacgggcggtttccgccgtggcaaaaagatgggccacgacatcgactttctgatcacgaatccgggcccgaaagaggatgacgaactgctccacaaagtggttgatctgctcaagaagcaaggtctgctgctgtactgcgacatcatcgagagcacgttcgtggaggaacaactgccaagtcgcaaaatcgacgccatggacaacttccagaagtgcttcgccattctcaagctgtaccagccgggcgtggataacagcagctataacacgagtaagaagagtgacatggccgaggttaaggattggaaagcgatccgtgtggatctggtgatcacgccattcgagcagtacgcctatgcgctgctcggttggacgggcagccgcgaatttggtcgcgatctgcgccgctatgcgagtcatgagcgcaagatgatcctcgacaaccatggcctctacgaccgcaaaaagcgcatctttctgaaagcgggcagcgaagaagagattttcgcgcatctgggtctggattatgtggagccgtgggaacgcaacgcg

SEQ ID NO: 368 - protein, 394 aa, synthetic construct
  REGION 1..394: note = Variant of terminal deoxynucleotidyl transferase
MHHHHHHGGSGHPPSNTPELEVPSVIARKVSQYSCQRKTTLNNYNKKFTDAFEIMAENYEFKENEIFCLEFLRAASLLKYLPFPVTRMKDIQGLPCIGDQVRDVIEEIIESGESSRVKEVLNDERYKAFKQFTSVFGVGVKTSEKWFRMGLRTVEELKADKSLKLSKMQKAGFLYYEDLVSCVSKAEADAVTLIVKNTVSTFLPDALVTITGGFRRGKKMGHDIDFLITNPGPKEDDELLHKVVDLLKKQGLLLYCDIIESTFVEEQLPSRKIDAMDNFQKCFAILKLYQPGVDNSSYNTSKKSDMAEVKDWKAIRVDLVITPFEQYAYALLGWTGSREFGRDLRRYASHERKMILDNHGLYDRKKRIFLKAGSEEEIFAHLGLDYVEPWERNA

SEQ ID NO: 369 - DNA, 1182 bp, synthetic construct
  misc_feature 1..1182: note = Variant of terminal deoxynucleotidyl transferase
  source 1..1182: mol_type = other DNA
atgcaccatcatcatcatcatggcggtagcggccatccgccgagcaataccccggagctggaagtgccgagcgttatcgcccgcaaggttagtcagtacagctgccagcgcaagaccacgctgaataactacaacaaaaagtttaccgacgcgttcgagatcatggccgagaactacgaatttaaagagaacgaaatcttctgtctggaatttctgcgcgccgcgagtctgctgaaatatctgccgttcccggttacccgcatgaaagacatccaaggtctgccgtgcattggcgaccaagttcgtgacgtgatcgaggagatcatcgaagaaggcgagagcagccgtgttaaagaagttctcaatgacgagcgctacaaggcctttaagcagttcaccagcgtgttcggtgtgggcgtgaaaaccagcgaaaagtggtttcgtatgggcctccgtacggttgaagagctgaaggccgacaagagtctgaagctgagcaagatgcaggatgcgggctttctgtattacgaggatctggtgagctgcgttagtaaagcggaagccgatgccgttacgctcatcgtgaagaacacggtgagtacctttctgccggatgcgctggtgaccatcacgggcggtttccgccgtggcaaaaagatgggccacgacatcgactttctgatcacgaatccgggcccgaaagaggatgacgaactgctccacaaagtggttgatctgctcaagaagcaaggtctgctgctgtactgcgacatcatcgagagcacgttcgtggaggaacaactgccaagtcgcaaaatcgacgccatggacaacttccagaagtgcttcgccattctcaagctgtaccagccgggcgtggataacagcagctataacacgagtaagaagagtgacatggccgaggttaaggattggaaagcgatccgtgtggatctggtgatcacgccattcgagcagtacgcctatgcgctgctcggttggacgggcagccgcgaatttggtcgcgatctgcgccgctatgcgagtcatgagcgcaagatgatcctcgacaaccatggcctctacgaccgcaaaaagcgcatctttctgaaagcgggcagcgaagaagagattttcgcgcatctgggtctggattatgtggagccgtgggaacgcaacgcg

SEQ ID NO: 370 - protein, 394 aa, synthetic construct
  REGION 1..394: note = Variant of terminal deoxynucleotidyl transferase
MHHHHHHGGSGHPPSNTPELEVPSVIARKVSQYSCQRKTTLNNYNKKFTDAFEIMAENYEFKENEIFCLEFLRAASLLKYLPFPVTRMKDIQGLPCIGDQVRDVIEEIIEEGESSRVKEVLNDERYKAFKQFTSVFGVGVKTSEKWFRMGLRTVEELKADKSLKLSKMQDAGFLYYEDLVSCVSKAEADAVTLIVKNTVSTFLPDALVTITGGFRRGKKMGHDIDFLITNPGPKEDDELLHKVVDLLKKQGLLLYCDIIESTFVEEQLPSRKIDAMDNFQKCFAILKLYQPGVDNSSYNTSKKSDMAEVKDWKAIRVDLVITPFEQYAYALLGWTGSREFGRDLRRYASHERKMILDNHGLYDRKKRIFLKAGSEEEIFAHLGLDYVEPWERNA

SEQ ID NO: 371 - DNA, 1182 bp, synthetic construct
  misc_feature 1..1182: note = Variant of terminal deoxynucleotidyl transferase
  source 1..1182: mol_type = other DNA
atgcaccatcatcatcatcatggcggtagcggccatccgccgagcaataccccggagctggaagtgccgagcgttatcgcccgcaaggttagtcagtacagctgccagcgcaagaccacgctgaataactacaacaaaaagtttaccgacgcgttcgagatcatggccgagaactacgaatttaaagagaacgaaatcttctgtctggaatttctgcgcgccgcgagtctgctgaaatatctgccgttcccggttacccgcatgaaagacatccaaggtctgccgtgcattggcgaccaagttcgtgacgtgatcgaggagatcatcgaagaaggcgagagcagccgtgttaaagaagttctcaatgacgagcgctacaaggcctttaagcagttcaccagcgtgttcggtgtgggcgtgaaaaccagcgaaaagtggtttcgtatgggcctccgtacggttgaagagctgaaggccgacaagagtctgaagctgagcaagatgcagaaggcgggctttctgtattacgaggatctggtgagctgcgttagtaaagcggaagccgatgccgttacgctcatcgtgaagaacacggtgagtacctttctgccggatgcgctggtgaccatcacgggcggtttccgccgtggcaaaaagatgggccacgacatcgactttctgatcacgtgtccgggcccgaaagaggatgacgaactgctccacaaagtggttgatctgctcaagaagcaaggtctgctgctgtactgcgacatcatcgagagcacgttcgtggaggaacaactgccaagtcgcaaaatcgacgccatggacaacttccagaagtgcttcgccattctcaagctgtaccagccgggcgtggataacagcagctataacacgagtaagaagagtgacatggccgaggttaaggattggaaagcgatccgtgtggatctggtgatcacgccattcgagcagtacgcctatgcgctgctcggttggacgggcagccgcgaatttggtcgcgatctgcgccgctatgcgagtcatgagcgcaagatgatcctcgacaaccatggcctctacgaccgcaaaaagcgcatctttctgaaagcgggcagcgaagaagagattttcgcgcatctgggtctggattatgtggagccgtgggaacgcaacgcg

SEQ ID NO: 372 - protein, 394 aa, synthetic construct
  REGION 1..394: note = Variant of terminal deoxynucleotidyl transferase
MHHHHHHGGSGHPPSNTPELEVPSVIARKVSQYSCQRKTTLNNYNKKFTDAFEIMAENYEFKENEIFCLEFLRAASLLKYLPFPVTRMKDIQGLPCIGDQVRDVIEEIIEEGESSRVKEVLNDERYKAFKQFTSVFGVGVKTSEKWFRMGLRTVEELKADKSLKLSKMQKAGFLYYEDLVSCVSKAEADAVTLIVKNTVSTFLPDALVTITGGFRRGKKMGHDIDFLITCPGPKEDDELLHKVVDLLKKQGLLLYCDIIESTFVEEQLPSRKIDAMDNFQKCFAILKLYQPGVDNSSYNTSKKSDMAEVKDWKAIRVDLVITPFEQYAYALLGWTGSREFGRDLRRYASHERKMILDNHGLYDRKKRIFLKAGSEEEIFAHLGLDYVEPWERNA

SEQ ID NO: 373 - DNA, 1182 bp, synthetic construct
  misc_feature 1..1182: note = Variant of terminal deoxynucleotidyl transferase
  source 1..1182: mol_type = other DNA
atgcaccatcatcatcatcatggcggtagcggccatccgccgagcaataccccggagctggaagtgccgagcgttatcgcccgcaaggttagtcagtacagctgccagcgcaagaccacgctgaataactacaacaaaaagtttaccgacgcgttcgagatcatggccgagaactacgaatttaaagagaacgaaatcttctgtctggaatttctgcgcgccgcgagtctgctgaaatatctgccgttcccggttacccgcatgaaagacatccaaggtctgccgtgcattggcgaccaagttcgtgacgtgatcgaggagatcatcgaagaaggcgagagcagccgtgttaaagaagttctcaatgacgagcgctacaaggcctttaagcagttcaccagcgtgttcggtgtgggcgtgaaaaccagcgaaaagtggtttcgtatgggcctccgtacggttgaagagctgaaggccgacaagagtctgaagctgagcaagatgcagaaggcgggctttctgtattacgaggatctggtgagctgcgttagtaaagcggaagccgatgccgttacgctcatcgtgaagaacacggtgagtacctttctgccggatgcgctggtgaccatcacgggcggtttccgccgtggcaaaaagatgggccacgacatcgactttctgatcacgaatccgggcccgaaagaggatgacgaactgctccacaaagtggttgatctgctcaagaagcaaggtctgctgctgtactgcgacatcatcgagagcacgaaggtggaggaacaactgccaagtcgcaaaatcgacgccatggacaacttccagaagtgcttcgccattctcaagctgtaccagccgggcgtggataacagcagctataacacgagtaagaagagtgacatggccgaggttaaggattggaaagcgatccgtgtggatctggtgatcacgccattcgagcagtacgcctatgcgctgctcggttggacgggcagccgcgaatttggtcgcgatctgcgccgctatgcgagtcatgagcgcaagatgatcctcgacaaccatggcctctacgaccgcaaaaagcgcatctttctgaaagcgggcagcgaagaagagattttcgcgcatctgggtctggattatgtggagccgtgggaacgcaacgcg

SEQ ID NO: 374 - protein, 394 aa, synthetic construct
  REGION 1..394: note = Variant of terminal deoxynucleotidyl transferase
MHHHHHHGGSGHPPSNTPELEVPSVIARKVSQYSCQRKTTLNNYNKKFTDAFEIMAENYEFKENEIFCLEFLRAASLLKYLPFPVTRMKDIQGLPCIGDQVRDVIEEIIEEGESSRVKEVLNDERYKAFKQFTSVFGVGVKTSEKWFRMGLRTVEELKADKSLKLSKMQKAGFLYYEDLVSCVSKAEADAVTLIVKNTVSTFLPDALVTITGGFRRGKKMGHDIDFLITNPGPKEDDELLHKVVDLLKKQGLLLYCDIIESTKVEEQLPSRKIDAMDNFQKCFAILKLYQPGVDNSSYNTSKKSDMAEVKDWKAIRVDLVITPFEQYAYALLGWTGSREFGRDLRRYASHERKMILDNHGLYDRKKRIFLKAGSEEEIFAHLGLDYVEPWERNA

SEQ ID NO: 375 - DNA, 1182 bp, synthetic construct
  misc_feature 1..1182: note = Variant of terminal deoxynucleotidyl transferase
  source 1..1182: mol_type = other DNA
atgcaccatcatcatcatcatggcggtgggggccatccgccgagcaataccccggagctggaagtgccgagcgttatcgcccgcaaggttagtcagtacagctgccagcgcaagaccacgctgaataactacaacaaaaagtttaccgacgcgttcgagatcatggccgagaactacgaatttaaagagaacgaaatcttctgtctggaatttctgcgcgccgcgagtctgctgaaatatctgccgttcccggttacccgcatgaaagacatccaaggtctgccgtgcattggcgaccaagttcgtgacgtgatcgaggagatcatcgaagaaggcgagagcagccgtgttaaagaagttctcaatgacgagcgctacaaggcctttaagcagttcaccagcgtgttcggtgtgggcgtgaaaaccagcgaaaagtggtttcgtatgggcctccgtacggttgaagagctgaaggccgacaagagtctgaagctgagcaagatgcagaaggcgggctttctgtattacgaggatctggtgagctgcgttagtaaagcggaagccgatgccgttacgctcatcgtgaagaacacggtgagtacctttctgccggatgcgctggtgaccatcacgggcggtttccgccgtggcaaaaagatgggccacgacatcgactttctgatcacgaatccgggcccgaaagaggatgacgaactgctccacaaagtggttgatctgctcaagaagcaaggtctgctgctgtactgcgacatcatcgagagcacgttcgtggaggaacaactgccaagtcgcaaaatcgacgccatggacaacttccagaagtgcttcgccattctcaagctgtaccagccgggcgtggataacagcagctataacacgagtaagaagagtgacatggccgaggttaaggattggaaagcgatccgtgtggatctggtgatcacgccattcgagcagtacgcctatgcgctgctcggttggacgggcagccgcgaatttggtcgcgatctgcgccgctatgcgagtcatgagcgcaagatgatcctcgacaaccatggcctctacgaccgcaaaaagcgcatctttctgaaagcgggcagcgaagaagagattttcgcgcatctgggtctggattatgtggagccgtgggaacgcaacgcg

SEQ ID NO: 376 - protein, 394 aa, synthetic construct
  REGION 1..394: note = Variant of terminal deoxynucleotidyl transferase
MHHHHHHGGGGHPPSNTPELEVPSVIARKVSQYSCQRKTTLNNYNKKFTDAFEIMAENYEFKENEIFCLEFLRAASLLKYLPFPVTRMKDIQGLPCIGDQVRDVIEEIIEEGESSRVKEVLNDERYKAFKQFTSVFGVGVKTSEKWFRMGLRTVEELKADKSLKLSKMQKAGFLYYEDLVSCVSKAEADAVTLIVKNTVSTFLPDALVTITGGFRRGKKMGHDIDFLITNPGPKEDDELLHKVVDLLKKQGLLLYCDIIESTFVEEQLPSRKIDAMDNFQKCFAILKLYQPGVDNSSYNTSKKSDMAEVKDWKAIRVDLVITPFEQYAYALLGWTGSREFGRDLRRYASHERKMILDNHGLYDRKKRIFLKAGSEEEIFAHLGLDYVEPWERNA

SEQ ID NO: 377 - DNA, 1182 bp, synthetic construct
  misc_feature 1..1182: note = Variant of terminal deoxynucleotidyl transferase
  source 1..1182: mol_type = other DNA
atgcaccatcatcatcatcatggcggtagcggccatccgccgagcaataccccggagctggaagtgccgagcgttctggcccgcaaggttagtcagtacagctgccagcgcaagaccacgctgaataactacaacaaaaagtttaccgacgcgttcgagatcatggccgagaactacgaatttaaagagaacgaaatcttctgtctggaatttctgcgcgccgcgagtctgctgaaatatctgccgttcccggttacccgcatgaaagacatccaaggtctgccgtgcattggcgaccaagttcgtgacgtgatcgaggagatcatcgaagaaggcgagagcagccgtgttaaagaagttctcaatgacgagcgctacaaggcctttaagcagttcaccagcgtgttcggtgtgggcgtgaaaaccagcgaaaagtggtttcgtatgggcctccgtacggttgaagagctgaaggccgacaagagtctgaagctgagcaagatgcagaaggcgggctttctgtattacgaggatctggtgagctgcgttagtaaagcggaagccgatgccgttacgctcatcgtgaagaacacggtgagtacctttctgccggatgcgctggtgaccatcacgggcggtttccgccgtggcaaaaagatgggccacgacatcgactttctgatcacgaatccgggcccgaaagaggatgacgaactgctccacaaagtggttgatctgctcaagaagcaaggtctgctgctgtactgcgacatcatcgagagcacgttcgtggaggaacaactgccaagtcgcaaaatcgacgccatggacaacttccagaagtgcttcgccattctcaagctgtaccagccgggcgtggataacagcagctataacacgagtaagaagagtgacatggccgaggttaaggattggaaagcgatccgtgtggatctggtgatcacgccattcgagcagtacgcctatgcgctgctcggttggacgggcagccgcgaatttggtcgcgatctgcgccgctatgcgagtcatgagcgcaagatgatcctcgacaaccatggcctctacgaccgcaaaaagcgcatctttctgaaagcgggcagcgaagaagagattttcgcgcatctgggtctggattatgtggagccgtgggaacgcaacgcg

SEQ ID NO: 378 - protein, 394 aa, synthetic construct
  REGION 1..394: note = Variant of terminal deoxynucleotidyl transferase
MHHHHHHGGSGHPPSNTPELEVPSVLARKVSQYSCQRKTTLNNYNKKFTDAFEIMAENYEFKENEIFCLEFLRAASLLKYLPFPVTRMKDIQGLPCIGDQVRDVIEEIIEEGESSRVKEVLNDERYKAFKQFTSVFGVGVKTSEKWFRMGLRTVEELKADKSLKLSKMQKAGFLYYEDLVSCVSKAEADAVTLIVKNTVSTFLPDALVTITGGFRRGKKMGHDIDFLITNPGPKEDDELLHKVVDLLKKQGLLLYCDIIESTFVEEQLPSRKIDAMDNFQKCFAILKLYQPGVDNSSYNTSKKSDMAEVKDWKAIRVDLVITPFEQYAYALLGWTGSREFGRDLRRYASHERKMILDNHGLYDRKKRIFLKAGSEEEIFAHLGLDYVEPWERNA

SEQ ID NO: 379 - DNA, 1182 bp, synthetic construct
  misc_feature 1..1182: note = Variant of terminal deoxynucleotidyl transferase
  source 1..1182: mol_type = other DNA
atgcaccatcatcatcatcatggcggtagcggccatccgccgagcaataccccggagctggaagtgccgagcgttatcgcccgcaaggttagtcagtacagctgccagcgcaagaccacgctgaataactacaacaaaaagtttaccgacgcgttcgagatcatggccgagaactacgaatttaaagagaacgaaatcttctgtctggaatttctgcgcgccgcgagtctgctgaaatatctgccgttcccggttacccgcatgaaagacatccaaggtctgccgtgcattggcgaccaagttcgtgacgtgatcgaggagatcatcgaagaaggcgagagcagccgtgttaaagaagttctcaatgacgagcgctacaaggcctttaagcagttcaccagcgtgttcggtgtgggcgtgaaaaccagcgaaaagtggtttcgtatgggcctccgtacggttgaagagctgaaggccgacaagagtctgaagctgagcaagatgcagaaggcgggctttctgtattacgaggatctggtgagctgcgttagtaaagcggaagccgatgccgttacgctcatcgtgaagaacacggtgtgtacctttctgccggatgcgctggtgaccatcacgggcggtttccgccgtggcaaaaagatgggccacgacatcgactttctgatcacgaatccgggcccgaaagaggatgacgaactgctccacaaagtggttgatctgctcaagaagcaaggtctgctgctgtactgcgacatcatcgagagcacgttcgtggaggaacaactgccaagtcgcaaaatcgacgccatggacaacttccagaagtgcttcgccattctcaagctgtaccagccgggcgtggataacagcagctataacacgagtaagaagagtgacatggccgaggttaaggattggaaagcgatccgtgtggatctggtgatcacgccattcgagcagtacgcctatgcgctgctcggttggacgggcagccgcgaatttggtcgcgatctgcgccgctatgcgagtcatgagcgcaagatgatcctcgacaaccatggcctctacgaccgcaaaaagcgcatctttctgaaagcgggcagcgaagaagagattttcgcgcatctgggtctggattatgtggagccgtgggaacgcaacgcg

SEQ ID NO: 380 - protein, 394 aa, synthetic construct
  REGION 1..394: note = Variant of terminal deoxynucleotidyl transferase
MHHHHHHGGSGHPPSNTPELEVPSVIARKVSQYSCQRKTTLNNYNKKFTDAFEIMAENYEFKENEIFCLEFLRAASLLKYLPFPVTRMKDIQGLPCIGDQVRDVIEEIIEEGESSRVKEVLNDERYKAFKQFTSVFGVGVKTSEKWFRMGLRTVEELKADKSLKLSKMQKAGFLYYEDLVSCVSKAEADAVTLIVKNTVCTFLPDALVTITGGFRRGKKMGHDIDFLITNPGPKEDDELLHKVVDLLKKQGLLLYCDIIESTFVEEQLPSRKIDAMDNFQKCFAILKLYQPGVDNSSYNTSKKSDMAEVKDWKAIRVDLVITPFEQYAYALLGWTGSREFGRDLRRYASHERKMILDNHGLYDRKKRIFLKAGSEEEIFAHLGLDYVEPWERNA

SEQ ID NO: 381 - DNA, 1182 bp, synthetic construct
  misc_feature 1..1182: note = Variant of terminal deoxynucleotidyl transferase
  source 1..1182: mol_type = other DNA
atgcaccatcatcatcatcatggcggtagcggccatccgccgagcaataccccggagctggaagtgccgagcgttatcgcccgcaaggttagtcagtacagctgccagcgcaagaccacgctgaataactacaacaaaaagtttaccgacgcgttcgagatcatggccgagaactacgaatttaaagagaacgaaatcttctgtctggaatttctgcgcgccgcgagtctgctgaaatatctgccgttcccggttacccgcatgaaagacatccaaggtctgccgtgcattggcgaccaagttcgtgacgtgatcgaggagatcatcgaagaaggcgagagcagccgtgttaaagaagttctcaatgacgagcgctacaaggcctttaagcagttcaccagcgtgttcggtgtgggcgtgaaaaccagcgaaaagtggtttcgtatgggcctccgtacggttgaagagctgaaggccgacaagagtctgaagctgagcaagatgcagaaggcgggctttctggattacgaggatctggtgagctgcgttagtaaagcggaagccgatgccgttacgctcatcgtgaagaacacggtgagtacctttctgccggatgcgctggtgaccatcacgggcggtttccgccgtggcaaaaagatgggccacgacatcgactttctgatcacgaatccgggcccgaaagaggatgacgaactgctccacaaagtggttgatctgctcaagaagcaaggtctgctgctgtactgcgacatcatcgagagcacgttcgtggaggaacaactgccaagtcgcaaaatcgacgccatggacaacttccagaagtgcttcgccattctcaagctgtaccagccgggcgtggataacagcagctataacacgagtaagaagagtgacatggccgaggttaaggattggaaagcgatccgtgtggatctggtgatcacgccattcgagcagtacgcctatgcgctgctcggttggacgggcagccgcgaatttggtcgcgatctgcgccgctatgcgagtcatgagcgcaagatgatcctcgacaaccatggcctctacgaccgcaaaaagcgcatctttctgaaagcgggcagcgaagaagagattttcgcgcatctgggtctggattatgtggagccgtgggaacgcaacgcg

SEQ ID NO: 382 - protein, 394 aa, synthetic construct
  REGION 1..394: note = Variant of terminal deoxynucleotidyl transferase
MHHHHHHGGSGHPPSNTPELEVPSVIARKVSQYSCQRKTTLNNYNKKFTDAFEIMAENYEFKENEIFCLEFLRAASLLKYLPFPVTRMKDIQGLPCIGDQVRDVIEEIIEEGESSRVKEVLNDERYKAFKQFTSVFGVGVKTSEKWFRMGLRTVEELKADKSLKLSKMQKAGFLDYEDLVSCVSKAEADAVTLIVKNTVSTFLPDALVTITGGFRRGKKMGHDIDFLITNPGPKEDDELLHKVVDLLKKQGLLLYCDIIESTFVEEQLPSRKIDAMDNFQKCFAILKLYQPGVDNSSYNTSKKSDMAEVKDWKAIRVDLVITPFEQYAYALLGWTGSREFGRDLRRYASHERKMILDNHGLYDRKKRIFLKAGSEEEIFAHLGLDYVEPWERNA

SEQ ID NO: 383 - DNA, 1182 bp, synthetic construct
  misc_feature 1..1182: note = Variant of terminal deoxynucleotidyl transferase
  source 1..1182: mol_type = other DNA
atgcaccatcatcatcatcatggcggtagcggccatccgccgagcaataccccggagctggaagtgccgagcgttatcgcccgcaaggttagtcagtacagctgccagcgcaagaccacgctgaataactacaacaaaaagtttaccgacgcgttcgagatcatggccgagaactacgaatttaaagagaacgaaatcttctgtctggaatttctgcgcgccgcgagtctgctgaaatatctgccgttcccggttacccgcatgaaagacatccaaggtctgccgtgcattggcgaccaagttcgtcttgtgatcgaggagatcatcgaagaaggcgagagcagccgtgttaaagaagttctcaatgacgagcgctacaaggcctttaagcagttcaccagcgtgttcggtgtgggcgtgaaaaccagcgaaaagtggtttcgtatgggcctccgtacggttgaagagctgaaggccgacaagagtctgaagctgagcaagatgcagaaggcgggctttctgtattacgaggatctggtgagctgcgttagtaaagcggaagccgatgccgttacgctcatcgtgaagaacacggtgagtacctttctgccggatgcgctggtgaccatcacgggcggtttccgccgtggcaaaaagatgggccacgacatcgactttctgatcacgaatccgggcccgaaagaggatgacgaactgctccacaaagtggttgatctgctcaagaagcaaggtctgctgctgtactgcgacatcatcgagagcacgttcgtggaggaacaactgccaagtcgcaaaatcgacgccatggacaacttccagaagtgcttcgccattctcaagctgtaccagccgggcgtggataacagcagctataacacgagtaagaagagtgacatggccgaggttaaggattggaaagcgatccgtgtggatctggtgatcacgccattcgagcagtacgcctatgcgctgctcggttggacgggcagccgcgaatttggtcgcgatctgcgccgctatgcgagtcatgagcgcaagatgatcctcgacaaccatggcctctacgaccgcaaaaagcgcatctttctgaaagcgggcagcgaagaagagattttcgcgcatctgggtctggattatgtggagccgtgggaacgcaacgcg

SEQ ID NO: 384 - protein, 394 aa, synthetic construct
  REGION 1..394: note = Variant of terminal deoxynucleotidyl transferase
MHHHHHHGGSGHPPSNTPELEVPSVIARKVSQYSCQRKTTLNNYNKKFTDAFEIMAENYEFKENEIFCLEFLRAASLLKYLPFPVTRMKDIQGLPCIGDQVRLVIEEIIEEGESSRVKEVLNDERYKAFKQFTSVFGVGVKTSEKWFRMGLRTVEELKADKSLKLSKMQKAGFLYYEDLVSCVSKAEADAVTLIVKNTVSTFLPDALVTITGGFRRGKKMGHDIDFLITNPGPKEDDELLHKVVDLLKKQGLLLYCDIIESTFVEEQLPSRKIDAMDNFQKCFAILKLYQPGVDNSSYNTSKKSDMAEVKDWKAIRVDLVITPFEQYAYALLGWTGSREFGRDLRRYASHERKMILDNHGLYDRKKRIFLKAGSEEEIFAHLGLDYVEPWERNA

SEQ ID NO: 385 - DNA, 1182 bp, synthetic construct
  misc_feature 1..1182: note = Variant of terminal deoxynucleotidyl transferase
  source 1..1182: mol_type = other DNA
atgcaccatcatcatcatcatggcggtagcggccatccgccgagcaataccccggagctggaagtgccgagcgttatcgcccgcaaggttagtcagtacagctgccagcgcaagaccacgctgaataactacaacaaaaagtttaccgacgcgttcgagatcatggccgagaactacgaatttaaagagaacgaaatcttctgtctggaatttctgcgcgccgcgagtctgctgaaatatctgccgttcccggttacccgcatgaaagacatccaaggtctgccgtgcattggcgaccaagttcgtcaggtgatcgaggagatcatcgaagaaggcgagagcagccgtgttaaagaagttctcaatgacgagcgctacaaggcctttaagcagttcaccagcgtgttcggtgtgggcgtgaaaaccagcgaaaagtggtttcgtatgggcctccgtacggttgaagagctgaaggccgacaagagtctgaagctgagcaagatgcagaaggcgggctttctgtattacgaggatctggtgagctgcgttagtaaagcggaagccgatgccgttacgctcatcgtgaagaacacggtgagtacctttctgccggatgcgctggtgaccatcacgggcggtttccgccgtggcaaaaagatgggccacgacatcgactttctgatcacgaatccgggcccgaaagaggatgacgaactgctccacaaagtggttgatctgctcaagaagcaaggtctgctgctgtactgcgacatcatcgagagcacgttcgtggaggaacaactgccaagtcgcaaaatcgacgccatggacaacttccagaagtgcttcgccattctcaagctgtaccagccgggcgtggataacagcagctataacacgagtaagaagagtgacatggccgaggttaaggattggaaagcgatccgtgtggatctggtgatcacgccattcgagcagtacgcctatgcgctgctcggttggacgggcagccgcgaatttggtcgcgatctgcgccgctatgcgagtcatgagcgcaagatgatcctcgacaaccatggcctctacgaccgcaaaaagcgcatctttctgaaagcgggcagcgaagaagagattttcgcgcatctgggtctggattatgtggagccgtgggaacgcaacgcg

SEQ ID NO: 386 - protein, 394 aa, synthetic construct
  REGION 1..394: note = Variant of terminal deoxynucleotidyl transferase
MHHHHHHGGSGHPPSNTPELEVPSVIARKVSQYSCQRKTTLNNYNKKFTDAFEIMAENYEFKENEIFCLEFLRAASLLKYLPFPVTRMKDIQGLPCIGDQVRQVIEEIIEEGESSRVKEVLNDERYKAFKQFTSVFGVGVKTSEKWFRMGLRTVEELKADKSLKLSKMQKAGFLYYEDLVSCVSKAEADAVTLIVKNTVSTFLPDALVTITGGFRRGKKMGHDIDFLITNPGPKEDDELLHKVVDLLKKQGLLLYCDIIESTFVEEQLPSRKIDAMDNFQKCFAILKLYQPGVDNSSYNTSKKSDMAEVKDWKAIRVDLVITPFEQYAYALLGWTGSREFGRDLRRYASHERKMILDNHGLYDRKKRIFLKAGSEEEIFAHLGLDYVEPWERNA

SEQ ID NO: 387 - DNA, 1182 bp, synthetic construct
  misc_feature 1..1182: note = Variant of terminal deoxynucleotidyl transferase
  source 1..1182: mol_type = other DNA
atgcaccatcatcatcatcatggcggtagcggccatccgccgagcaataccccggagctggaagtgccgagcgttatcgcccgcaaggttagtcagtacagctgccagcgcaagaccacgctgaataactacaacaaaaagtttaccgacgcgttcgagatcatggccgagaactacgaatttaaagagaacgaaatcttctgtctggaatttctgcgcgccgcgagtctgctgaaatatctgccgttcccggttacccgcatgaaagacatccaaggtctgccgtgcattggcgaccaagttcgtgacgtgatcgaggagatcatcgaagaaggcgagagcagccgtgttaaagaagttctcaatgacgagcgctacaaggcctttaagcagttcaccagcgtgttcggtgtgggcgtgaaaaccagcgaaaagtggtttcgtatgggcctccgtacggttgaagagctgaaggccgacaagagtctgaagctgagcaagatgcagaaggcgggctttctgtattacgaggatctggtgagctgcgttagtaaagcggaagccgatgccgttacgctcatcgtgaagaacacggtgagtacctttctgccggatgcgctggtgaccatcacgggcggtttccgccgtggcaaaaagatgggccacgacatcgactttctgatcacgaatccgggcccgaaagaggatgacgaactgctccacaaagtggttgatctgctcaagaagcaaggtctgctgctgtactgcgacatcatcgagagcacgttcgtggaggaacaactgccaagtcgcaaaatcgacgccatggacaacttccagaagtgcttcgccattctcaagctgtacaagccgggcgtggataacagcagctataacacgagtaagaagagtgacatggccgaggttaaggattggaaagcgatccgtgtggatctggtgatcacgccattcgagcagtacgcctatgcgctgctcggttggacgggcagccgcgaatttggtcgcgatctgcgccgctatgcgagtcatgagcgcaagatgatcctcgacaaccatggcctctacgaccgcaaaaagcgcatctttctgaaagcgggcagcgaagaagagattttcgcgcatctgggtctggattatgtggagccgtgggaacgcaacgcg

SEQ ID NO: 388 - protein, 394 aa, synthetic construct
  REGION 1..394: note = Variant of terminal deoxynucleotidyl transferase
MHHHHHHGGSGHPPSNTPELEVPSVIARKVSQYSCQRKTTLNNYNKKFTDAFEIMAENYEFKENEIFCLEFLRAASLLKYLPFPVTRMKDIQGLPCIGDQVRDVIEEIIEEGESSRVKEVLNDERYKAFKQFTSVFGVGVKTSEKWFRMGLRTVEELKADKSLKLSKMQKAGFLYYEDLVSCVSKAEADAVTLIVKNTVSTFLPDALVTITGGFRRGKKMGHDIDFLITNPGPKEDDELLHKVVDLLKKQGLLLYCDIIESTFVEEQLPSRKIDAMDNFQKCFAILKLYKPGVDNSSYNTSKKSDMAEVKDWKAIRVDLVITPFEQYAYALLGWTGSREFGRDLRRYASHERKMILDNHGLYDRKKRIFLKAGSEEEIFAHLGLDYVEPWERNA

SEQ ID NO: 389 - DNA, 1182 bp, synthetic construct
  misc_feature 1..1182: note = Variant of terminal deoxynucleotidyl transferase
  source 1..1182: mol_type = other DNA
atgcaccatcatcatcatcatggcggtagcggccatccgccgagcaataccccggagctggaagtgccgagcgttatcgcccgcaaggttagtcagtacagctgccagcgcaagaccacgctgaataactacaacaaaaagtttaccgacgcgttcgagatcatggccgagaactacgaatttaaagagaacgaaatcttctgtctggaatttctgcgcgccgcgagtctgctgaaatatctgccgttcccggttacccgcatgaaagacatccaaggtctgccgtgcattggcgaccaagttcgtgacgtgatcgaggagatcatcgaaattggcgagagcagccgtgttaaagaagttctcaatgacgagcgctacaaggcctttaagcagttcaccagcgtgttcggtgtgggcgtgaaaaccagcgaaaagtggtttcgtatgggcctccgtacggttgaagagctgaaggccgacaagagtctgaagctgagcaagatgcagaaggcgggctttctgtattacgaggatctggtgagctgcgttagtaaagcggaagccgatgccgttacgctcatcgtgaagaacacggtgagtacctttctgccggatgcgctggtgaccatcacgggcggtttccgccgtggcaaaaagatgggccacgacatcgactttctgatcacgaatccgggcccgaaagaggatgacgaactgctccacaaagtggttgatctgctcaagaagcaaggtctgctgctgtactgcgacatcatcgagagcacgttcgtggaggaacaactgccaagtcgcaaaatcgacgccatggacaacttccagaagtgcttcgccattctcaagctgtaccagccgggcgtggataacagcagctataacacgagtaagaagagtgacatggccgaggttaaggattggaaagcgatccgtgtggatctggtgatcacgccattcgagcagtacgcctatgcgctgctcggttggacgggcagccgcgaatttggtcgcgatctgcgccgctatgcgagtcatgagcgcaagatgatcctcgacaaccatggcctctacgaccgcaaaaagcgcatctttctgaaagcgggcagcgaagaagagattttcgcgcatctgggtctggattatgtggagccgtgggaacgcaacgcg

SEQ ID NO: 390 - protein, 394 aa, synthetic construct
  REGION 1..394: note = Variant of terminal deoxynucleotidyl transferase
MHHHHHHGGSGHPPSNTPELEVPSVIARKVSQYSCQRKTTLNNYNKKFTDAFEIMAENYEFKENEIFCLEFLRAASLLKYLPFPVTRMKDIQGLPCIGDQVRDVIEEIIEIGESSRVKEVLNDERYKAFKQFTSVFGVGVKTSEKWFRMGLRTVEELKADKSLKLSKMQKAGFLYYEDLVSCVSKAEADAVTLIVKNTVSTFLPDALVTITGGFRRGKKMGHDIDFLITNPGPKEDDELLHKVVDLLKKQGLLLYCDIIESTFVEEQLPSRKIDAMDNFQKCFAILKLYQPGVDNSSYNTSKKSDMAEVKDWKAIRVDLVITPFEQYAYALLGWTGSREFGRDLRRYASHERKMILDNHGLYDRKKRIFLKAGSEEEIFAHLGLDYVEPWERNA

SEQ ID NO: 391 - DNA, 1182 bp, synthetic construct
  misc_feature 1..1182: note = Variant of terminal deoxynucleotidyl transferase
  source 1..1182: mol_type = other DNA
atgcaccatcatcatcatcatggcggtagcggccatccgccgagcaataccccggagctggaagtgccgagcgttatcgcccgcaaggttagtcagtacagctgccagcgcaagaccacgctgaataactacaacaaaaagtttaccgacgcgttcgagatcatggccgagaactacgaatttaaagagaacgaaatcttctgtctggaatttctgcgcgccgcgagtctgctgaaatatctgccgttcccggttacccgcatgaaagacatccaaggtctgccgtgcattggcgaccaagttcgtgacgtgatcgaggagatcatcgaagaaggcgagagcagccgtgttaaagaagttctcaatgacgagcgctacaaggcctttaagcagttcaccagcgtgttcggtgtgggcgtgaaaaccagcgaaaagtggtctcgtatgggcctccgtacggttgaagagctgaaggccgacaagagtctgaagctgagcaagatgcagaaggcgggctttctgtattacgaggatctggtgagctgcgttagtaaagcggaagccgatgccgttacgctcatcgtgaagaacacggtgagtacctttctgccggatgcgctggtgaccatcacgggcggtttccgccgtggcaaaaagatgggccacgacatcgactttctgatcacgaatccgggcccgaaagaggatgacgaactgctccacaaagtggttgatctgctcaagaagcaaggtctgctgctgtactgcgacatcatcgagagcacgttcgtggaggaacaactgccaagtcgcaaaatcgacgccatggacaacttccagaagtgcttcgccattctcaagctgtaccagccgggcgtggataacagcagctataacacgagtaagaagagtgacatggccgaggttaaggattggaaagcgatccgtgtggatctggtgatcacgccattcgagcagtacgcctatgcgctgctcggttggacgggcagccgcgaatttggtcgcgatctgcgccgctatgcgagtcatgagcgcaagatgatcctcgacaaccatggcctctacgaccgcaaaaagcgcatctttctgaaagcgggcagcgaagaagagattttcgcgcatctgggtctggattatgtggagccgtgggaacgcaacgcg

SEQ ID NO: 392 - protein, 394 aa, synthetic construct
  REGION 1..394: note = Variant of terminal deoxynucleotidyl transferase
MHHHHHHGGSGHPPSNTPELEVPSVIARKVSQYSCQRKTTLNNYNKKFTDAFEIMAENYEFKENEIFCLEFLRAASLLKYLPFPVTRMKDIQGLPCIGDQVRDVIEEIIEEGESSRVKEVLNDERYKAFKQFTSVFGVGVKTSEKWSRMGLRTVEELKADKSLKLSKMQKAGFLYYEDLVSCVSKAEADAVTLIVKNTVSTFLPDALVTITGGFRRGKKMGHDIDFLITNPGPKEDDELLHKVVDLLKKQGLLLYCDIIESTFVEEQLPSRKIDAMDNFQKCFAILKLYQPGVDNSSYNTSKKSDMAEVKDWKAIRVDLVITPFEQYAYALLGWTGSREFGRDLRRYASHERKMILDNHGLYDRKKRIFLKAGSEEEIFAHLGLDYVEPWERNA

SEQ ID NO: 393 - DNA, 1182 bp, synthetic construct
  misc_feature 1..1182: note = Variant of terminal deoxynucleotidyl transferase
  source 1..1182: mol_type = other DNA
atgcaccatcatcatcatcatggcggtagcggccatccgccgagcaataccccggagctggaagtgccgagcgttatcgcccgcaaggttagtcagtacagctgccagcgcaagaccacgctgaataactacaacaaaaagtttaccgacgcgttcgagatcatggccgagaactacgaatttaaagagaacgaaatcttctgtctggaatttctgcgcgccgcgagtctgctgaaatatctgccgttcccggttacccgcatgaaagacatcagtggtctgccgtgcattggcgaccaagttcgtgacgtgatcgaggagatcatcgaagaaggcgagagcagccgtgttaaagaagttctcaatgacgagcgctacaaggcctttaagcagttcaccagcgtgttcggtgtgggcgtgaaaaccagcgaaaagtggtttcgtatgggcctccgtacggttgaagagctgaaggccgacaagagtctgaagctgagcaagatgcagaaggcgggctttctgtattacgaggatctggtgagctgcgttagtaaagcggaagccgatgccgttacgctcatcgtgaagaacacggtgagtacctttctgccggatgcgctggtgaccatcacgggcggtttccgccgtggcaaaaagatgggccacgacatcgactttctgatcacgaatccgggcccgaaagaggatgacgaactgctccacaaagtggttgatctgctcaagaagcaaggtctgctgctgtactgcgacatcatcgagagcacgttcgtggaggaacaactgccaagtcgcaaaatcgacgccatggacaacttccagaagtgcttcgccattctcaagctgtaccagccgggcgtggataacagcagctataacacgagtaagaagagtgacatggccgaggttaaggattggaaagcgatccgtgtggatctggtgatcacgccattcgagcagtacgcctatgcgctgctcggttggacgggcagccgcgaatttggtcgcgatctgcgccgctatgcgagtcatgagcgcaagatgatcctcgacaaccatggcctctacgaccgcaaaaagcgcatctttctgaaagcgggcagcgaagaagagattttcgcgcatctgggtctggattatgtggagccgtgggaacgcaacgcg

SEQ ID NO: 394 - protein, 394 aa, synthetic construct
  REGION 1..394: note = Variant of terminal deoxynucleotidyl transferase
MHHHHHHGGSGHPPSNTPELEVPSVIARKVSQYSCQRKTTLNNYNKKFTDAFEIMAENYEFKENEIFCLEFLRAASLLKYLPFPVTRMKDISGLPCIGDQVRDVIEEIIEEGESSRVKEVLNDERYKAFKQFTSVFGVGVKTSEKWFRMGLRTVEELKADKSLKLSKMQKAGFLYYEDLVSCVSKAEADAVTLIVKNTVSTFLPDALVTITGGFRRGKKMGHDIDFLITNPGPKEDDELLHKVVDLLKKQGLLLYCDIIESTFVEEQLPSRKIDAMDNFQKCFAILKLYQPGVDNSSYNTSKKSDMAEVKDWKAIRVDLVITPFEQYAYALLGWTGSREFGRDLRRYASHERKMILDNHGLYDRKKRIFLKAGSEEEIFAHLGLDYVEPWERNA

SEQ ID NO: 395 - DNA, 1182 bp, synthetic construct
  misc_feature 1..1182: note = Variant of terminal deoxynucleotidyl transferase
  source 1..1182: mol_type = other DNA
atgcaccatcatcatcatcatggcggtagcggccatccgccgagcaataccccggagctggaagtgccgagcgttatcgcccgcaaggttagtcagtacagctgccagcgcaagaccacgctgaataactacaacaaaaagtttaccgacgcgttcgagatcatggccgagaactacgaatttaaagagaacgaaatcttctgtctggaatttctgcgcgccgcgagtctgctgaaatatctgccgttcccggttacccgcatggcggacatccaaggtctgccgtgcattggcgaccaagttcgtgacgtgatcgaggagatcatcgaagaaggcgagagcagccgcgttaaagaagttctcaatgacgagcgctacaaggcctttaagcagttcaccagcgtgttcggtgtgggcgtgaaaaccagcgaaaagtggtttcgtatgggcctccgtacggttgaagagctgaaggccgacaagagtctgaagctgagcaagatgcagaaggcgggctttctgtattacgaggatctggtgagctgcgttagtaaagcggaagccgatgccgttacgctcatcgtgaagaacacggtgagtacctttctgccggatgcgctggtgaccatcacgggcggtttccgccgtggcaaaaagatgggccacgacatcgactttctgatcacgaatccgggcccgaaagaggatgacgaactgctccacaaagtggttgatctgctcaagaagcaaggtctgctgctgtactgcgacatcatcgagagcacgttcgtggaggaacaactgccaagtcgcaaaatcgacgccatggacaacttccagaagtgcttcgccattctcaagctgtaccagccgggcgtggataacagcagctataacacgagtaagaagagtgacatggccgaggttaaggattggaaagcgatccgtgtggatctggtgatcacgccattcgagcagtacgcctatgcgctgctcggttggacgggcagccgcgaatttggtcgcgatctgcgccgctatgcgagtcatgagcgcaagatgatcctcgacaaccatggcctctacgaccgcaaaaagcgcatctttctgaaagcgggcagcgaagaagagattttcgcgcatctgggtctggattatgtggagccgtgggaacgcaacgcg

SEQ ID NO: 396 - protein, 394 aa, synthetic construct
  REGION 1..394: note = Variant of terminal deoxynucleotidyl transferase
MHHHHHHGGSGHPPSNTPELEVPSVIARKVSQYSCQRKTTLNNYNKKFTDAFEIMAENYEFKENEIFCLEFLRAASLLKYLPFPVTRMADIQGLPCIGDQVRDVIEEIIEEGESSRVKEVLNDERYKAFKQFTSVFGVGVKTSEKWFRMGLRTVEELKADKSLKLSKMQKAGFLYYEDLVSCVSKAEADAVTLIVKNTVSTFLPDALVTITGGFRRGKKMGHDIDFLITNPGPKEDDELLHKVVDLLKKQGLLLYCDIIESTFVEEQLPSRKIDAMDNFQKCFAILKLYQPGVDNSSYNTSKKSDMAEVKDWKAIRVDLVITPFEQYAYALLGWTGSREFGRDLRRYASHERKMILDNHGLYDRKKRIFLKAGSEEEIFAHLGLDYVEPWERNA

SEQ ID NO: 397 - DNA, 1182 bp, synthetic construct
  misc_feature 1..1182: note = Variant of terminal deoxynucleotidyl transferase
  source 1..1182: mol_type = other DNA
atgcaccatcatcatcatcatccgggtagcggccatccgccgagcaataccccggagctggaagtgccgagcgttatcgcccgcaaggttagtcagtacagctgccagcgcaagaccacgctgaataactacaacaaaaagtttaccgacgcgttcgagatcatggccgagaactacgaatttaaagagaacgaaatcttctgtctggaatttctgcgcgccgcgagtctgctgaaatatctgccgttcccggttacccgcatgaaagacatccaaggtctgccgtgcattggcgaccaagttcgtgacgtgatcgaggagatcatcgaagaaggcgagagcagccgtgttaaagaagttctcaatgacgagcgctacaaggcctttaagcagttcaccagcgtgttcggtgtgggcgtgaaaaccagcgaaaagtggtttcgtatgggcctccgtacggttgaagagctgaaggccgacaagagtctgaagctgagcaagatgcagaaggcgggctttctgtattacgaggatctggtgagctgcgttagtaaagcggaagccgatgccgttacgctcatcgtgaagaacacggtgagtacctttctgccggatgcgctggtgaccatcacgggcggtttccgccgtggcaaaaagatgggccacgacatcgactttctgatcacgaatccgggcccgaaagaggatgacgaactgctccacaaagtggttgatctgctcaagaagcaaggtctgctgctgtactgcgacatcatcgagagcacgttcgtggaggaacaactgccaagtcgcaaaatcgacgccatggacaacttccagaagtgcttcgccattctcaagctgtaccagccgggcgtggataacagcagctataacacgagtaagaagagtgacatggccgaggttaaggattggaaagcgatccgtgtggatctggtgatcacgccattcgagcagtacgcctatgcgctgctcggttggacgggcagccgcgaatttggtcgcgatctgcgccgctatgcgagtcatgagcgcaagatgatcctcgacaaccatggcctctacgaccgcaaaaagcgcatctttctgaaagcgggcagcgaagaagagattttcgcgcatctgggtctggattatgtggagccgtgggaacgcaacgcg

SEQ ID NO: 398 - protein, 394 aa, synthetic construct
  REGION 1..394: note = Variant of terminal deoxynucleotidyl transferase
MHHHHHHPGSGHPPSNTPELEVPSVIARKVSQYSCQRKTTLNNYNKKFTDAFEIMAENYEFKENEIFCLEFLRAASLLKYLPFPVTRMKDIQGLPCIGDQVRDVIEEIIEEGESSRVKEVLNDERYKAFKQFTSVFGVGVKTSEKWFRMGLRTVEELKADKSLKLSKMQKAGFLYYEDLVSCVSKAEADAVTLIVKNTVSTFLPDALVTITGGFRRGKKMGHDIDFLITNPGPKEDDELLHKVVDLLKKQGLLLYCDIIESTFVEEQLPSRKIDAMDNFQKCFAILKLYQPGVDNSSYNTSKKSDMAEVKDWKAIRVDLVITPFEQYAYALLGWTGSREFGRDLRRYASHERKMILDNHGLYDRKKRIFLKAGSEEEIFAHLGLDYVEPWERNA

SEQ ID NO: 399 - DNA, 1182 bp, synthetic construct
  misc_feature 1..1182: note = Variant of terminal deoxynucleotidyl transferase
  source 1..1182: mol_type = other DNA
atgcaccatcatcatcatcatggcggtagcggccatccgccgagcaataccccggagctggaagtgccgagcgttatcgcccgcaaggttagtcagtacagctgccagcgcaagaccacgctgaataactacaacaaaaagtttaccgacgcgttcgagatcatggccgagaactacgaatttaaagagaacgaaatcttctgtctggaatttctgcgcgccgcgagtctgctgaaatatctgccgttcccggttacccgcatgaaagacatccaaggtctgccgtgcattggcgaccaagttcgtgacgtgatcgaggagatcatcgaagaaggcgagagcagccgtgttaaagaagttctcaatgacgagcgctacaaggcctttaagcagttcaccagcgtgttcggtgtgggcgtgaaaaccagcgaaaagtggtttcgtatgggcctccgtacggttgaagagctgaaggccgacaagagtctgaagctgagcaagatgcagaaggcgggctttctgtattacgaggatctggtgagctgcgttagtaaagcggaagccgatgccgttacgctcatcgtgaagaacacggtgagtacctttctgccggatgcgctggtgaccatcacgggcggtttccgccgtggcaaaaagatgggccacgacatcgactttctgatcacgaatccgggcccgaaagaggatgacgaactgctccacaaagtggttgatctgctcaagaagcaaggtctgctgctgtactgcgacatcatcgagagcacgttcgtggaggaacaactgccaagtcgcaaaatcgacgccatggacaacttccagaagtgcttcgccattctcaagctgtaccagccgggcgtggataacagcagctataacacgagtgcgaagagtgacatggccgaggttaaggattggaaagcgatccgtgtggatctggtgatcacgccattcgagcagtacgcctatgcgctgctcggttggacgggcagccgcgaatttggtcgcgatctgcgccgctatgcgagtcatgagcgcaagatgatcctcgacaaccatggcctctacgaccgcaaaaagcgcatctttctgaaagcgggcagcgaagaagagattttcgcgcatctgggtctggattatgtggagccgtgggaacgcaacgcg

SEQ ID NO: 400 - protein, 394 aa, synthetic construct
  REGION 1..394: note = Variant of terminal deoxynucleotidyl transferase
MHHHHHHGGSGHPPSNTPELEVPSVIARKVSQYSCQRKTTLNNYNKKFTDAFEIMAENYEFKENEIFCLEFLRAASLLKYLPFPVTRMKDIQGLPCIGDQVRDVIEEIIEEGESSRVKEVLNDERYKAFKQFTSVFGVGVKTSEKWFRMGLRTVEELKADKSLKLSKMQKAGFLYYEDLVSCVSKAEADAVTLIVKNTVSTFLPDALVTITGGFRRGKKMGHDIDFLITNPGPKEDDELLHKVVDLLKKQGLLLYCDIIESTFVEEQLPSRKIDAMDNFQKCFAILKLYQPGVDNSSYNTSAKSDMAEVKDWKAIRVDLVITPFEQYAYALLGWTGSREFGRDLRRYASHERKMILDNHGLYDRKKRIFLKAGSEEEIFAHLGLDYVEPWERNA

SEQ ID NO: 401 - DNA, 1182 bp, synthetic construct
  misc_feature 1..1182: note = Variant of terminal deoxynucleotidyl transferase
  source 1..1182: mol_type = other DNA
atgcaccatcatcatcatcatggcggtagcggccatccgccgagcaataccccggagctggaagtgccgagcgttatcgcccgcaaggttagtcagtacagctgccagcgcaagaccacgctgaataactacaacaaaaagtttaccgacgcgttcgagatcatggccgagaactacgaatttaaagagaacgaaatcttctgtctggaatttctgcgcgccgcgagtctgctgaaatatctgccgttcccggttacccgcatgaaagacatccaaggtctgccgtgcattggcgaccaaacgcgtgacgtgatcgaggagatcatcgaagaaggcgagagcagccgtgttaaagaagttctcaatgacgagcgctacaaggcctttaagcagttcaccagcgtgttcggtgtgggcgtgaaaaccagcgaaaagtggtttcgtatgggcctccgtacggttgaagagctgaaggccgacaagagtctgaagctgagcaagatgcagaaggcgggctttctgtattacgaggatctggtgagctgcgttagtaaagcggaagccgatgccgttacgctcatcgtgaagaacacggtgagtacctttctgccggatgcgctggtgaccatcacgggcggtttccgccgtggcaaaaagatgggccacgacatcgactttctgatcacgaatccgggcccgaaagaggatgacgaactgctccacaaagtggttgatctgctcaagaagcaaggtctgctgctgtactgcgacatcatcgagagcacgttcgtggaggaacaactgccaagtcgcaaaatcgacgccatggacaacttccagaagtgcttcgccattctcaagctgtaccagccgggcgtggataacagcagctataacacgagtaagaagagtgacatggccgaggttaaggattggaaagcgatccgtgtggatctggtgatcacgccattcgagcagtacgcctatgcgctgctcggttggacgggcagccgcgaatttggtcgcgatctgcgccgctatgcgagtcatgagcgcaagatgatcctcgacaaccatggcctctacgaccgcaaaaagcgcatctttctgaaagcgggcagcgaagaagagattttcgcgcatctgggtctggattatgtggagccgtgggaacgcaacgcg

SEQ ID NO: 402 - protein, 394 aa, synthetic construct
  REGION 1..394: note = Variant of terminal deoxynucleotidyl transferase
MHHHHHHGGSGHPPSNTPELEVPSVIARKVSQYSCQRKTTLNNYNKKFTDAFEIMAENYEFKENEIFCLEFLRAASLLKYLPFPVTRMKDIQGLPCIGDQTRDVIEEIIEEGESSRVKEVLNDERYKAFKQFTSVFGVGVKTSEKWFRMGLRTVEELKADKSLKLSKMQKAGFLYYEDLVSCVSKAEADAVTLIVKNTVSTFLPDALVTITGGFRRGKKMGHDIDFLITNPGPKEDDELLHKVVDLLKKQGLLLYCDIIESTFVEEQLPSRKIDAMDNFQKCFAILKLYQPGVDNSSYNTSKKSDMAEVKDWKAIRVDLVITPFEQYAYALLGWTGSREFGRDLRRYASHERKMILDNHGLYDRKKRIFLKAGSEEEIFAHLGLDYVEPWERNA

SEQ ID NO: 403 - DNA, 1182 bp, synthetic construct
  misc_feature 1..1182: note = Variant of terminal deoxynucleotidyl transferase
  source 1..1182: mol_type = other DNA
atgcaccatcatcatcatcatggcggtagcggccatccgccgagcaataccccggagctggaagtgccgagcgttatcgcccgcaaggttagtcagtacagctgccagcgcaagaccacgctgaataactacaacaaaatttttaccgacgcgttcgagatcatggccgagaactacgaatttaaagagaacgaaatcttctgtctggaatttctgcgcgccgcgagtctgctgaaatatctgccgttcccggttacccgcatgaaagacatccaaggtctgccgtgcattggcgaccaagttcgtgacgtgatcgaggagatcatcgaagaaggcgagagcagccgtgttaaagaagttctcaatgacgagcgctacaaggcctttaagcagttcaccagcgtgttcggtgtgggcgtgaaaaccagcgaaaagtggtttcgtatgggcctccgtacggttgaagagctgaaggccgacaagagtctgaagctgagcaagatgcagaaggcgggctttctgtattacgaggatctggtgagctgcgttagtaaagcggaagccgatgccgttacgctcatcgtgaagaacacggtgagtacctttctgccggatgcgctggtgaccatcacgggcggtttccgccgtggcaaaaagatgggccacgacatcgactttctgatcacgaatccgggcccgaaagaggatgacgaactgctccacaaagtggttgatctgctcaagaagcaaggtctgctgctgtactgcgacatcatcgagagcacgttcgtggaggaacaactgccaagtcgcaaaatcgacgccatggacaacttccagaagtgcttcgccattctcaagctgtaccagccgggcgtggataacagcagctataacacgagtaagaagagtgacatggccgaggttaaggattggaaagcgatccgtgtggatctggtgatcacgccattcgagcagtacgcctatgcgctgctcggttggacgggcagccgcgaatttggtcgcgatctgcgccgctatgcgagtcatgagcgcaagatgatcctcgacaaccatggcctctacgaccgcaaaaagcgcatctttctgaaagcgggcagcgaagaagagattttcgcgcatctgggtctggattatgtggagccgtgggaacgcaacgcg

SEQ ID NO: 404 - protein, 394 aa, synthetic construct
  REGION 1..394: note = Variant of terminal deoxynucleotidyl transferase
MHHHHHHGGSGHPPSNTPELEVPSVIARKVSQYSCQRKTTLNNYNKIFTDAFEIMAENYEFKENEIFCLEFLRAASLLKYLPFPVTRMKDIQGLPCIGDQVRDVIEEIIEEGESSRVKEVLNDERYKAFKQFTSVFGVGVKTSEKWFRMGLRTVEELKADKSLKLSKMQKAGFLYYEDLVSCVSKAEADAVTLIVKNTVSTFLPDALVTITGGFRRGKKMGHDIDFLITNPGPKEDDELLHKVVDLLKKQGLLLYCDIIESTFVEEQLPSRKIDAMDNFQKCFAILKLYQPGVDNSSYNTSKKSDMAEVKDWKAIRVDLVITPFEQYAYALLGWTGSREFGRDLRRYASHERKMILDNHGLYDRKKRIFLKAGSEEEIFAHLGLDYVEPWERNA

SEQ ID NO: 405 - DNA, 1182 bp, synthetic construct
  misc_feature 1..1182: note = Variant of terminal deoxynucleotidyl transferase
  source 1..1182: mol_type = other DNA
atgcaccatcatcatcatcatggcggtagcggccatccgccgagcaataccccggagctggaagtgccgagcgttatcgcccgcaaggttagtcagtacagctgccagcgcaagaccacgctgaataactacaacaaaaagtttaccgacgcgttcgagatcatggccgagaactacgaatttaaagagaacgaaatcttctgtctggaatttctgcgcgccgcgagtctgctgaaatatctgccgttcccggttacccgcatgaaagacatccaaggtctgccgtgcattggcgaccaagttcgtgacgtgatcgaggagatcatcgaagaaggcgagagcagccgtgttaaagaagttctcaatgacgagcgctacaaggcctttaagcagttcaccagcgtgttcggtgtgggcgtgaaaaccagcgaaaagtggtttcgtatgggcctccgtacggttgaagagctgaaggccgacaagagtctgaagctgagcaagatgcagaaggcgggctttctgtattacgaggatctggtgagctgcgttagtaaagcggaagccgatgccgttacgctcatcgtgaagaacacggtgagtacctttctgccggatgcgctggtgaccatcacgggcggtttccgccgtggcaaaaagatgggccacgacatcgactttctgatcacgaatccgggcccgaaagaggatgacgaactgctccacaaagtggttgatctgctcaagaagcaaggtctgctgctgtactgcgacatcatcgagagcaggttcgtggaggaacaactgccaagtcgcaaaatcgacgccatggacaacttccagaagtgcttcgccattctcaagctgtaccagccaggcgtggataacagcagctataacacgagtaagaagagtgacatggccgaggttaaggattggaaagcgatccgtgtggatctggtgatcacgccattcgagcagtacgcctatgcgctgctcggttggacgggcagccgcgaatttggtcgcgatctgcgccgctatgcgagtcatgagcgcaagatgatcctcgacaaccatggcctctacgaccgcaaaaagcgcatctttctgaaagcgggcagcgaagaagagattttcgcgcatctgggtctggattatgtggagccgtgggaacgcaacgcg

SEQ ID NO: 406 - protein, 394 aa, synthetic construct
  REGION 1..394: note = Variant of terminal deoxynucleotidyl transferase
MHHHHHHGGSGHPPSNTPELEVPSVIARKVSQYSCQRKTTLNNYNKKFTDAFEIMAENYEFKENEIFCLEFLRAASLLKYLPFPVTRMKDIQGLPCIGDQVRDVIEEIIEEGESSRVKEVLNDERYKAFKQFTSVFGVGVKTSEKWFRMGLRTVEELKADKSLKLSKMQKAGFLYYEDLVSCVSKAEADAVTLIVKNTVSTFLPDALVTITGGFRRGKKMGHDIDFLITNPGPKEDDELLHKVVDLLKKQGLLLYCDIIESRFVEEQLPSRKIDAMDNFQKCFAILKLYQPGVDNSSYNTSKKSDMAEVKDWKAIRVDLVITPFEQYAYALLGWTGSREFGRDLRRYASHERKMILDNHGLYDRKKRIFLKAGSEEEIFAHLGLDYVEPWERNA

SEQ ID NO: 407 - DNA, 1182 bp, synthetic construct
  misc_feature 1..1182: note = Variant of terminal deoxynucleotidyl transferase
  source 1..1182: mol_type = other DNA
atgcaccatcatcatcatcatggcggtagcggccatccgccgagcaataccccggagctggaagtgccgagcgttatcgcccgcaaggttagtcagtacagctgccagcgcaagaccacgctgaataactacaacaaaaagtttaccgacgcgttcgagatcatggccgagaactacgaatttaaagagaacgaaatcttctgtctggaatttctgcgcgccgcgagtctgctgaaatatctgccgttcccggttacccgcatgaaagacatccaaggtctgccgtgcattggcgaccaagttcgtgacgtgatcgaggagatcatcgaaatgggcgagagcagccgtgttaaagaagttctcaatgacgagcgctacaaggcctttaagcagttcaccagcgtgttcggtgtgggcgtgaaaaccagcgaaaagtggtttcgtatgggcctccgtacggttgaagagctgaaggccgacaagagtctgaagctgagcaagatgcagaaggcgggctttctgtattacgaggatctggtgagctgcgttagtaaagcggaagccgatgccgttacgctcatcgtgaagaacacggtgagtacctttctgccggatgcgctggtgaccatcacgggcggtttccgccgtggcaaaaagatgggccacgacatcgactttctgatcacgaatccgggcccgaaagaggatgacgaactgctccacaaagtggttgatctgctcaagaagcaaggtctgctgctgtactgcgacatcatcgagagcacgttcgtggaggaacaactgccaagtcgcaaaatcgacgccatggacaacttccagaagtgcttcgccattctcaagctgtaccagccgggcgtggataacagcagctataacacgagtaagaagagtgacatggccgaggttaaggattggaaagcgatccgtgtggatctggtgatcacgccattcgagcagtacgcctatgcgctgctcggttggacgggcagccgcgaatttggtcgcgatctgcgccgctatgcgagtcatgagcgcaagatgatcctcgacaaccatggcctctacgaccgcaaaaagcgcatctttctgaaagcgggcagcgaagaagagattttcgcgcatctgggtctggattatgtggagccgtgggaacgcaacgcg

SEQ ID NO: 408 - protein, 394 aa, synthetic construct
  REGION 1..394: note = Variant of terminal deoxynucleotidyl transferase
MHHHHHHGGSGHPPSNTPELEVPSVIARKVSQYSCQRKTTLNNYNKKFTDAFEIMAENYEFKENEIFCLEFLRAASLLKYLPFPVTRMKDIQGLPCIGDQVRDVIEEIIEMGESSRVKEVLNDERYKAFKQFTSVFGVGVKTSEKWFRMGLRTVEELKADKSLKLSKMQKAGFLYYEDLVSCVSKAEADAVTLIVKNTVSTFLPDALVTITGGFRRGKKMGHDIDFLITNPGPKEDDELLHKVVDLLKKQGLLLYCDIIESTFVEEQLPSRKIDAMDNFQKCFAILKLYQPGVDNSSYNTSKKSDMAEVKDWKAIRVDLVITPFEQYAYALLGWTGSREFGRDLRRYASHERKMILDNHGLYDRKKRIFLKAGSEEEIFAHLGLDYVEPWERNA

SEQ ID NO: 409 - DNA, 1182 bp, synthetic construct
  misc_feature 1..1182: note = Variant of terminal deoxynucleotidyl transferase
  source 1..1182: mol_type = other DNA
atgcaccatcatcatcatcatggcggtagcggccatccgccgagcaataccccggagctggaagtgccgagcgttatcgcccgcaaggttagtcagtacagctgccagcgcaagaccacgctgaataactacaacaaaaagtttaccgacgcgttcgagatcatggccgagaactacgaatttaaagagaacgaaatcttctgtctggaatttctgcgcgccgcgagtctgctgaaatatctgccgttcccggttacccgcatgaaagacatccaaggtctgccgtgcattggcgaccaagttcgtgacgtgatcgaggagatcatcgaagaaggcgagagcagccgtgttaaagaagttctcaatgacgagcgctacaaggcctttaagcagttcaccagcgtgttcggtgtgggcgtgaaaaccagcgaaaagtggttgcgtatgggcctccgtacggttgaagagctgaaggccgacaagagtctgaagctgagcaagatgcagaaggcgggctttctgtattacgaggatctggtgagctgcgttagtaaagcggaagccgatgccgttacgctcatcgtgaagaacacggtgagtacctttctgccggatgcgctggtgaccatcacgggcggtttccgccgtggcaaaaagatgggccacgacatcgactttctgatcacgaatccgggcccgaaagaggatgacgaactgctccacaaagtggttgatctgctcaagaagcaaggtctgctgctgtactgcgacatcatcgagagcacgttcgtggaggaacaactgccaagtcgcaaaatcgacgccatggacaacttccagaagtgcttcgccattctcaagctgtaccagccgggcgtggataacagcagctataacacgagtaagaagagtgacatggccgaggttaaggattggaaagcgatccgtgtggatctggtgatcacgccattcgagcagtacgcctatgcgctgctcggttggacgggcagccgcgaatttggtcgcgatctgcgccgctatgcgagtcatgagcgcaagatgatcctcgacaaccatggcctctacgaccgcaaaaagcgcatctttctgaaagcgggcagcgaagaagagattttcgcgcatctgggtctggattatgtggagccgtgggaacgcaacgcg

SEQ ID NO: 410 - protein, 394 aa, synthetic construct
  REGION 1..394: note = Variant of terminal deoxynucleotidyl transferase
MHHHHHHGGSGHPPSNTPELEVPSVIARKVSQYSCQRKTTLNNYNKKFTDAFEIMAENYEFKENEIFCLEFLRAASLLKYLPFPVTRMKDIQGLPCIGDQVRDVIEEIIEEGESSRVKEVLNDERYKAFKQFTSVFGVGVKTSEKWLRMGLRTVEELKADKSLKLSKMQKAGFLYYEDLVSCVSKAEADAVTLIVKNTVSTFLPDALVTITGGFRRGKKMGHDIDFLITNPGPKEDDELLHKVVDLLKKQGLLLYCDIIESTFVEEQLPSRKIDAMDNFQKCFAILKLYQPGVDNSSYNTSKKSDMAEVKDWKAIRVDLVITPFEQYAYALLGWTGSREFGRDLRRYASHERKMILDNHGLYDRKKRIFLKAGSEEEIFAHLGLDYVEPWERNA

SEQ ID NO: 411 - DNA, 1182 bp, synthetic construct
  misc_feature 1..1182: note = Variant of terminal deoxynucleotidyl transferase
  source 1..1182: mol_type = other DNA
atgcaccatcatcatcatcatggcggtagcggccatccgccgagcaataccccggagctggaagtgccgagcgttatcgcccgcaaggttagtcagtacagctgccagcgcaagaccacgctgaataactacaacaaaaagtttaccgacgcgttcgagatcatggccgagaactacgaatttaaagagaacgaaatcttctgtctggaatttctgcgcgccgcgagtctgctgaaatatctgccgttcccggttacccgcatgaaagacatccaaggtctgccgtgcattggcgaccaagttcgtgacgtgatcgaggagatcatcgaagaaggcgagagcagccgtgttaaagaagttctcaatgacgagcgctacaaggcctttaagcagttcaccagcgtgttcggtgtgggcgtgaaaaccagcgaaaagtggtttcgtatgggcctccgtacggttgaagagctgaaggccgacaagagtctgaagctgagcaagatgcagaaggcgggctttctgtattacgaggatctggtgagctgcgttagtaaagcggaagccgatgccgttacgctcatcgtgaagaacacggtgagtacctttctgccggatgcgctggtgaccatcacgggcggtttccgccgtggcaaaaagatgggccacgacatcgactttctgatcacgaatccgggcccgaaagaggatgacgaactgctccacaaagtggttgatctgctcaagaagcaaggtctgctgctgtactgcgacatcatcgagagcacgttcgtggaggaatggctgccaagtcgcaaaatcgacgccatggacaacttccagaagtgcttcgccattctcaagctgtaccagccgggcgtggataacagcagctataacacgagtaagaagagtgacatggccgaggttaaggattggaaagcgatccgtgtggatctggtgatcacgccattcgagcagtacgcctatgcgctgctcggttggacgggcagccgcgaatttggtcgcgatctgcgccgctatgcgagtcatgagcgcaagatgatcctcgacaaccatggcctctacgaccgcaaaaagcgcatctttctgaaagcgggcagcgaagaagagattttcgcgcatctgggtctggattatgtggagccgtgggaacgcaacgcg

SEQ ID NO: 412 - protein, 394 aa, synthetic construct
  REGION 1..394: note = Variant of terminal deoxynucleotidyl transferase
MHHHHHHGGSGHPPSNTPELEVPSVIARKVSQYSCQRKTTLNNYNKKFTDAFEIMAENYEFKENEIFCLEFLRAASLLKYLPFPVTRMKDIQGLPCIGDQVRDVIEEIIEEGESSRVKEVLNDERYKAFKQFTSVFGVGVKTSEKWFRMGLRTVEELKADKSLKLSKMQKAGFLYYEDLVSCVSKAEADAVTLIVKNTVSTFLPDALVTITGGFRRGKKMGHDIDFLITNPGPKEDDELLHKVVDLLKKQGLLLYCDIIESTFVEEWLPSRKIDAMDNFQKCFAILKLYQPGVDNSSYNTSKKSDMAEVKDWKAIRVDLVITPFEQYAYALLGWTGSREFGRDLRRYASHERKMILDNHGLYDRKKRIFLKAGSEEEIFAHLGLDYVEPWERNA

SEQ ID NO: 413 - DNA, 1182 bp, synthetic construct
  misc_feature 1..1182: note = Variant of terminal deoxynucleotidyl transferase
  source 1..1182: mol_type = other DNA
atgcaccatcatcatcatcatggcggtagcggccatccgccgagcaataccccggagctggaagtgccgagcgttatcgcccgcaaggttagtcagtacagctgccagcgcaagaccacgctgaataactacaacaaaaagtttaccgacgcgttcgagatcatggccgagaactacgaatttaaagagaacgaaatcttctgtctggaatttctgcgcgccgcgagtctgctgaaatatctgccgttcccggttacccgcatgaaagacatccaaggtctgccgtgcattggcgaccaagttcgtgacgtgatcgaggagatcatcgaagaaggcgagagcagccgtgttaaagaagttctcaatgacgagcgctacaaggcctttaagcagttcaccagcgtgttcggtgtgggcgtgaaaaccagcgaaaagtggtttcgtatgggcctccgtacggttgaagagctgaaggccgacaagagtctgaagctgagcaagatgcagaaggcgggctttctgtattacgaggatctggtgagctgcgttagtaaagcggaagccgatgccgttacgctcatcgtgaagaacacggtgagtacctttctgccggatgcgctggtgaccatcacgggcggtttccgccgtggcaaaaagatgggccacgacatcgactttctgatcacgaatccgggcccgaaagaggatgacgaactgctccacaaagtggttgatctgctcaagaagcaaggtctgctgctgtactgcgacatcatcgagagcacgttctatgaggaacaactgccaagtcgcaaaatcgacgccatggacaacttccagaagtgcttcgccattctcaagctgtaccagccgggcgtggataacagcagctataacacgagtaagaagagtgacatggccgaggttaaggattggaaagcgatccgtgtggatctggtgatcacgccattcgagcagtacgcctatgcgctgctcggttggacgggcagccgcgaatttggtcgcgatctgcgccgctatgcgagtcatgagcgcaagatgatcctcgacaaccatggcctctacgaccgcaaaaagcgcatctttctgaaagcgggcagcgaagaagagattttcgcgcatctgggtctggattatgtggagccgtgggaacgcaacgcg

SEQ ID NO: 414 - protein, 394 aa, synthetic construct
  REGION 1..394: note = Variant of terminal deoxynucleotidyl transferase
MHHHHHHGGSGHPPSNTPELEVPSVIARKVSQYSCQRKTTLNNYNKKFTDAFEIMAENYEFKENEIFCLEFLRAASLLKYLPFPVTRMKDIQGLPCIGDQVRDVIEEIIEEGESSRVKEVLNDERYKAFKQFTSVFGVGVKTSEKWFRMGLRTVEELKADKSLKLSKMQKAGFLYYEDLVSCVSKAEADAVTLIVKNTVSTFLPDALVTITGGFRRGKKMGHDIDFLITNPGPKEDDELLHKVVDLLKKQGLLLYCDIIESTFYEEQLPSRKIDAMDNFQKCFAILKLYQPGVDNSSYNTSKKSDMAEVKDWKAIRVDLVITPFEQYAYALLGWTGSREFGRDLRRYASHERKMILDNHGLYDRKKRIFLKAGSEEEIFAHLGLDYVEPWERNA

SEQ ID NO: 415 - DNA, 1182 bp, synthetic construct
  misc_feature 1..1182: note = Variant of terminal deoxynucleotidyl transferase
  source 1..1182: mol_type = other DNA
atgcaccatcatcatcatcatggcggtagcggccatccgccgagcaataccccggagctggaagtgccgagcgttatcgcccgcaaggttagtcagtacagctgccagcgcaagaccacgctgaataactacaacaaaaagtttaccgacgcgttcgagatcatggccgagaactacgaatttaaagagaacgaaatcttctgtctggaatttctgcgcgccgcgagtctgctgaaatatctgccgttcccggttacccgcatgaaagacatccaaggtctgccgtgcattggcgaccaagttcgtgacgtgatcgaggagatcatcgaagaaggcgagagcagccgtgttaaagaagttctcaatgacgagcgctacaaggcctttaagcagttcaccagcgtgttcggtgtgggcgtgaaaaccagcgaaaagtggtttcgtatgggcctccgtacggttgaagagctgaaggccgacaagagtctgaagctgagcaagatgcagaaggcgggctttctgtattacgaggatctggtgagctgcgttagtaaagcggaagccgatgccgttacgctcatcgtgaagaacacggtgagtacctttctgccggatgcgctggtgaccatcacgggcggtttccgccgtggcaaaaagatgggccacgacatcgactttctgatcacgaatccgggcccgaaagaggatgacgaactgctccacaaagtggttgatctgctcaagaagcaaggtctgctgctgtactgcgacatcatcgagagcacgttcgtggaggaacaactgccaagtcgcaaaatcgacgccatggacaacttccagaagtgcttcgccattgcgaagctgtaccagccgggcgtggataacagcagctataacacgagtaagaagagtgacatggccgaggttaaggattggaaagcgatccgtgtggatctggtgatcacgccattcgagcagtacgcctatgcgctgctcggttggacgggcagccgcgaatttggtcgcgatctgcgccgctatgcgagtcatgagcgcaagatgatcctcgacaaccatggcctctacgaccgcaaaaagcgcatctttctgaaagcgggcagcgaagaagagattttcgcgcatctgggtctggattatgtggagccgtgggaacgcaacgcg

SEQ ID NO: 416 - protein, 394 aa, synthetic construct
  REGION 1..394: note = Variant of terminal deoxynucleotidyl transferase
MHHHHHHGGSGHPPSNTPELEVPSVIARKVSQYSCQRKTTLNNYNKKFTDAFEIMAENYEFKENEIFCLEFLRAASLLKYLPFPVTRMKDIQGLPCIGDQVRDVIEEIIEEGESSRVKEVLNDERYKAFKQFTSVFGVGVKTSEKWFRMGLRTVEELKADKSLKLSKMQKAGFLYYEDLVSCVSKAEADAVTLIVKNTVSTFLPDALVTITGGFRRGKKMGHDIDFLITNPGPKEDDELLHKVVDLLKKQGLLLYCDIIESTFVEEQLPSRKIDAMDNFQKCFAIAKLYQPGVDNSSYNTSKKSDMAEVKDWKAIRVDLVITPFEQYAYALLGWTGSREFGRDLRRYASHERKMILDNHGLYDRKKRIFLKAGSEEEIFAHLGLDYVEPWERNA

SEQ ID NO: 417 - DNA, 1182 bp, synthetic construct
  misc_feature 1..1182: note = Variant of terminal deoxynucleotidyl transferase
  source 1..1182: mol_type = other DNA
atgcaccatcatcatcatcatggcggtagcggccatccgccgagcaataccccggagctggaagtgccgagcgttatcgcccgcaaggttagtcagtacagctgccagcgcaagaccacgctgaataactacaacaaaaagtttaccgacgcgttcgagatcatggccgagaactacgaatttaaagagaacgaaatcttctgtctggaatttctgcgcgccgcgagtctgctgaaatatctgccgttcccggttacccgcatgaaagacatccaaggtctgccgtgcattggcgaccaagttcgtgacgtgatcgaggagatcatcgaagaaggcgagagcagccgtgttaaagaagttctcaatgacgagcgctacaaggcctttaagcagttcaccagcgtgttcggtgtgggcgtgaaaaccagcgaaaagtggtttcgtatgggcctccgtacggttgaagagctgaaggccgacaagagtctgaagctgagcaagatgcagaaggcgggctttctgtattacgaggatctggtgagctgcgttagtaaagcggaagccgatgccgttacggggatcgtgaagaacacggtgagtacctttctgccggatgcgctggtgaccatcacgggcggtttccgccgtggcaaaaagatgggccacgacatcgactttctgatcacgaatccgggcccgaaagaggatgacgaactgctccacaaagtggttgatctgctcaagaagcaaggtctgctgctgtactgcgacatcatcgagagcacgttcgtggaggaacaactgccaagtcgcaaaatcgacgccatggacaacttccagaagtgcttcgccattctcaagctgtaccagccgggcgtggataacagcagctataacacgagtaagaagagtgacatggccgaggttaaggattggaaagcgatccgtgtggatctggtgatcacgccattcgagcagtacgcctatgcgctgctcggttggacgggcagccgcgaatttggtcgcgatctgcgccgctatgcgagtcatgagcgcaagatgatcctcgacaaccatggcctctacgaccgcaaaaagcgcatctttctgaaagcgggcagcgaagaagagattttcgcgcatctgggtctggattatgtggagccgtgggaacgcaacgcg

SEQ ID NO: 418 - protein, 394 aa, synthetic construct
  REGION 1..394: note = Variant of terminal deoxynucleotidyl transferase
MHHHHHHGGSGHPPSNTPELEVPSVIARKVSQYSCQRKTTLNNYNKKFTDAFEIMAENYEFKENEIFCLEFLRAASLLKYLPFPVTRMKDIQGLPCIGDQVRDVIEEIIEEGESSRVKEVLNDERYKAFKQFTSVFGVGVKTSEKWFRMGLRTVEELKADKSLKLSKMQKAGFLYYEDLVSCVSKAEADAVTGIVKNTVSTFLPDALVTITGGFRRGKKMGHDIDFLITNPGPKEDDELLHKVVDLLKKQGLLLYCDIIESTFVEEQLPSRKIDAMDNFQKCFAILKLYQPGVDNSSYNTSKKSDMAEVKDWKAIRVDLVITPFEQYAYALLGWTGSREFGRDLRRYASHERKMILDNHGLYDRKKRIFLKAGSEEEIFAHLGLDYVEPWERNA

SEQ ID NO: 419 - DNA, 1182 bp, synthetic construct
  misc_feature 1..1182: note = Variant of terminal deoxynucleotidyl transferase
  source 1..1182: mol_type = other DNA
atgcaccatcatcatcatcatggcggtagcggccatccgccgagcaataccccggagctggaagtgccgagcgttatcgcccgcaaggttagtcagtacagctgccagcgcaagaccacgctgaataactacaacaaaaagtttaccgacgcgttcgagatcatggccgagaactacgaatttaaagagaacgaaatcttctgtctggaatttctgcgcgccgcgagtctgctgaaatatctgccgttcccggttacccgcatgaaagacatccaaggtctgccgtgcattggcgaccaagttcgtgacgtgatcgaggagatcatcgaagaaggcgagagcagccgtgttaaagaagttctcaatgacgagcgctacaaggcctttaagcagttcaccagcgtgttcggtgtgggcgtgaaaaccagcgaaaagtggtttcgtatgggcctccgtacggttgaagagctgaaggccgacaagagtctgaagctgagcaagatgcagaaggcgggctttctgtattacgaggatctggtgagctgcgttagtaaagcggaagccgatgccgttacgctcatcgtgaagaacacggtgagtacctttctgccggatgcgctggtgaccatcacgggcggtttccgccgtggcaaaaagatgggccacgacatcgactttctgatcacgaatccgggcccgctggaggatgacgaactgctccacaaagtggttgatctgctcaagaagcaaggtctgctgctgtactgcgacatcatcgagagcacgttcgtggaggaacaactgccaagtcgcaaaatcgacgccatggacaacttccagaagtgcttcgccattctcaagctgtaccagccgggcgtggataacagcagctataacacgagtaagaagagtgacatggccgaggttaaggattggaaagcgatccgtgtggatctggtgatcacgccattcgagcagtacgcctatgcgctgctcggttggacgggcagccgcgaatttggtcgcgatctgcgccgctatgcgagtcatgagcgcaagatgatcctcgacaaccatggcctctacgaccgcaaaaagcgcatctttctgaaagcgggcagcgaagaagagattttcgcgcatctgggtctggattatgtggagccgtgggaacgcaacgcg

SEQ ID NO: 420 - protein, 394 aa, synthetic construct
  REGION 1..394: note = Variant of terminal deoxynucleotidyl transferase
MHHHHHHGGSGHPPSNTPELEVPSVIARKVSQYSCQRKTTLNNYNKKFTDAFEIMAENYEFKENEIFCLEFLRAASLLKYLPFPVTRMKDIQGLPCIGDQVRDVIEEIIEEGESSRVKEVLNDERYKAFKQFTSVFGVGVKTSEKWFRMGLRTVEELKADKSLKLSKMQKAGFLYYEDLVSCVSKAEADAVTLIVKNTVSTFLPDALVTITGGFRRGKKMGHDIDFLITNPGPLEDDELLHKVVDLLKKQGLLLYCDIIESTFVEEQLPSRKIDAMDNFQKCFAILKLYQPGVDNSSYNTSKKSDMAEVKDWKAIRVDLVITPFEQYAYALLGWTGSREFGRDLRRYASHERKMILDNHGLYDRKKRIFLKAGSEEEIFAHLGLDYVEPWERNA

SEQ ID NO: 421 - DNA, 1182 bp, synthetic construct
  misc_feature 1..1182: note = Variant of terminal deoxynucleotidyl transferase
  source 1..1182: mol_type = other DNA
atgcaccatcatcatcatcatggcggtagcggccatccgccgagcaataccccggagctggaagtgccgagcgttatcgcccgcaaggttagtcagtacagctgccagcgcaagaccacgctgaataactacaacaaaaagtttaccgacgcgttcgagatcatggccgagaactacgaatttaaagagaacgaaatcttctgtctggaatttctgcgcgccgcgagtctgctgaaatatctgccgttcccggttacccgcatgaaagacatccaaggtctgccgtgcattggcgaccaagttcgtgacgtgatcgaggagatcatcgaagaaggcgagagcagccgtgttaaagaagttctcaatgacgagcgctacaaggcctttaagcagttcaccagcgtgttcggtgtgggcgtgaaaaccagcgaaaagtggtttcgtatgggcctccgtacggttgaagagctgaaggccgacaagagtctgaagctgagcaagatgcagaaggcgggctttaggtattacgaggatctggtgagctgcgttagtaaagcggaagccgatgccgttacgctcatcgtgaagaacacggtgagtacctttctgccggatgcgctggtgaccatcacgggcggtttccgccgtggcaaaaagatgggccacgacatcgactttctgatcacgaatccgggcccgaaagaggatgacgaactgctccacaaagtggttgatctgctcaagaagcaaggtctgctgctgtactgcgacatcatcgagagcacgttcgtggaggaacaactgccaagtcgcaaaatcgacgccatggacaacttccagaagtgcttcgccattctcaagctgtaccagccgggcgtggataacagcagctataacacgagtaagaagagtgacatggccgaggttaaggattggaaagcgatccgtgtggatctggtgatcacgccattcgagcagtacgcctatgcgctgctcggttggacgggcagccgcgaatttggtcgcgatctgcgccgctatgcgagtcatgagcgcaagatgatcctcgacaaccatggcctctacgaccgcaaaaagcgcatctttctgaaagcgggcagcgaagaagagattttcgcgcatctgggtctggattatgtggagccgtgggaacgcaacgcg

SEQ ID NO: 422 - protein, 394 aa, synthetic construct
  REGION 1..394: note = Variant of terminal deoxynucleotidyl transferase
MHHHHHHGGSGHPPSNTPELEVPSVIARKVSQYSCQRKTTLNNYNKKFTDAFEIMAENYEFKENEIFCLEFLRAASLLKYLPFPVTRMKDIQGLPCIGDQVRDVIEEIIEEGESSRVKEVLNDERYKAFKQFTSVFGVGVKTSEKWFRMGLRTVEELKADKSLKLSKMQKAGFRYYEDLVSCVSKAEADAVTLIVKNTVSTFLPDALVTITGGFRRGKKMGHDIDFLITNPGPKEDDELLHKVVDLLKKQGLLLYCDIIESTFVEEQLPSRKIDAMDNFQKCFAILKLYQPGVDNSSYNTSKKSDMAEVKDWKAIRVDLVITPFEQYAYALLGWTGSREFGRDLRRYASHERKMILDNHGLYDRKKRIFLKAGSEEEIFAHLGLDYVEPWERNA

SEQ ID NO: 423 - DNA, 1182 bp, synthetic construct
  misc_feature 1..1182: note = Variant of terminal deoxynucleotidyl transferase
  source 1..1182: mol_type = other DNA
atgcaccatcatcatcatcatggcggtagcggccatccgccgagcaataccccggagctggaagtgccgagcgttatcgcccgcaaggttagtcagtacagctgccagcgcaagaccacgctgaataactacaacaaaaagtttaccgacgcgttcgagatcatggccgagaactacgaatttaaagagaacgaaatcttctgtctggaatttctgcgcgccgcgagtctgctgaaatatctgccgttcccggttacccgcatgaaagacatccaaggtctgccgtgcattggcgaccaagttcgtgacgtgatcgaggagatcatcgaagaaggcgagagcagccgtgttaaagaagttctcaatgacgagcgctacaaggcctttaagcagttcaccagcgtgttcggtgtgggcgtgaaaaccagcgaaaagtggtttcgtatgggcctccgtacggttgaagagctgaaggccgacaagagtctgaagctgagcaagatgcagaaggcgggctttctgtattacgaggatctggtgagctgcgttagtaaagcggaagccgatgccgttacgctcatcgtgaagaacacggtgagtacctttctgccggatgcgctggtgaccatcacgggcggtttccgccgtggcaaaaagatgggccacgacatcgactttctgatcacgaatccgggcccgaaagaggatgacgaactgctccacaaagtggttgatctgctcaagaagcaaggtctgctgctgtactgcgacatcatcgagagcacgttcgtggaggaacaactgccaagtcgcaaaatcgacgccatggacaacttccagaagtgcttcgccattctcaagctgtaccagccgggcgtggataacagcagctataacacgagtaagaagagtgacatggccgaggttaaggattggaaagcgatccgtgtggatctggtgatcacgccattcgagcagtacgcctatgcgctgctcggttggacgggcagccgcgaatttggtcgcgatctgcgccgctatgcgagtcatgagcgcaagatgatcctcgacaaccatggcctctacgaccgcgataagcgcatctttctgaaagcgggcagcgaagaagagattttcgcgcatctgggtctggattatgtggagccgtgggaacgcaacgcg

SEQ ID NO: 424 - protein, 394 aa, synthetic construct
  REGION 1..394: note = Variant of terminal deoxynucleotidyl transferase
MHHHHHHGGSGHPPSNTPELEVPSVIARKVSQYSCQRKTTLNNYNKKFTDAFEIMAENYEFKENEIFCLEFLRAASLLKYLPFPVTRMKDIQGLPCIGDQVRDVIEEIIEEGESSRVKEVLNDERYKAFKQFTSVFGVGVKTSEKWFRMGLRTVEELKADKSLKLSKMQKAGFLYYEDLVSCVSKAEADAVTLIVKNTVSTFLPDALVTITGGFRRGKKMGHDIDFLITNPGPKEDDELLHKVVDLLKKQGLLLYCDIIESTFVEEQLPSRKIDAMDNFQKCFAILKLYQPGVDNSSYNTSKKSDMAEVKDWKAIRVDLVITPFEQYAYALLGWTGSREFGRDLRRYASHERKMILDNHGLYDRDKRIFLKAGSEEEIFAHLGLDYVEPWERNA

SEQ ID NO: 425 - DNA, 1182 bp, synthetic construct
  misc_feature 1..1182: note = Variant of terminal deoxynucleotidyl transferase
  source 1..1182: mol_type = other DNA
atgcaccatcatcatcatcatggcggtagcggccatccgccgagcaataccccggagctggaagtgccgagcgttatcgcccgcaaggttagtcagtacagctgccagcgcaagaccacgctgaataactacaacaaaaagtttaccgacgcgttcgagatcatggccgagaactacgaatttaaagagaacgaaatcttctgtctggaatttctgcgcgccgcgagtctgctgaaatatctgccgttcccggttacccgcatgaaagacatccaaggtctgccgtgcattggcgaccaagttcgtgacgtgatcgaggagatcatcgaagaaggcgagagcagccgtgttaaagaagttctcaatgacgagcgctacaaggcctttaagcagttcaccagcgtgttcggtgtgggcgtgaaaaccagcgaaaagtggtttcgtatgggcctccgtacggttgaagagctgaaggccgacaagagtctgaagctgagcaagatgcagaaggcgggctttctgtattacgaggatctggtgagctgcgttagtaaagcggaagccgatgccgttacgctcatcgtgaagaacacggtgaatacctttctgccggatgcgctggtgaccatcacgggcggtttccgccgtggcaaaaagatgggccacgacatcgactttctgatcacgaatccgggcccgaaagaggatgacgaactgctccacaaagtggttgatctgctcaagaagcaaggtctgctgctgtactgcgacatcatcgagagcacgttcgtggaggaacaactgccaagtcgcaaaatcgacgccatggacaacttccagaagtgcttcgccattctcaagctgtaccagccgggcgtggataacagcagctataacacgagtaagaagagtgacatggccgaggttaaggattggaaagcgatccgtgtggatctggtgatcacgccattcgagcagtacgcctatgcgctgctcggttggacgggcagccgcgaatttggtcgcgatctgcgccgctatgcgagtcatgagcgcaagatgatcctcgacaaccatggcctctacgaccgcaaaaagcgcatctttctgaaagcgggcagcgaagaagagattttcgcgcatctgggtctggattatgtggagccgtgggaacgcaacgcg

SEQ ID NO: 426 - protein, 394 aa, synthetic construct
  REGION 1..394: note = Variant of terminal deoxynucleotidyl transferase
MHHHHHHGGSGHPPSNTPELEVPSVIARKVSQYSCQRKTTLNNYNKKFTDAFEIMAENYEFKENEIFCLEFLRAASLLKYLPFPVTRMKDIQGLPCIGDQVRDVIEEIIEEGESSRVKEVLNDERYKAFKQFTSVFGVGVKTSEKWFRMGLRTVEELKADKSLKLSKMQKAGFLYYEDLVSCVSKAEADAVTLIVKNTVNTFLPDALVTITGGFRRGKKMGHDIDFLITNPGPKEDDELLHKVVDLLKKQGLLLYCDIIESTFVEEQLPSRKIDAMDNFQKCFAILKLYQPGVDNSSYNTSKKSDMAEVKDWKAIRVDLVITPFEQYAYALLGWTGSREFGRDLRRYASHERKMILDNHGLYDRKKRIFLKAGSEEEIFAHLGLDYVEPWERNA

SEQ ID NO: 427 - DNA, 1182 bp, synthetic construct
  misc_feature 1..1182: note = Variant of terminal deoxynucleotidyl transferase
  source 1..1182: mol_type = other DNA
atgcaccatcatcatcatcatggcggtagcggccatccgccgagcaataccccggagctggaagtgccgagcgttatcgcccgcaaggttagtcagtacagctgccagcgcaagaccacgctgaataactacaacaaaaagtttaccgacgcgttcgagatcatggccgagaactacgaatttaaagagaacgaaatcttctgtctggaatttctgcgcgccgcgagtctgctgaaatatctgccgttcccggttacccgcatgaaagacatccaaggtctgccgtgcattggcgaccaagttcgtgacgtgatcgaggagatcatcgaagaaggcgagagcagccgtgttaaagaagttctcaatgacgagcgctacaaggcctttaagcagttcaccagcgtgttcggtgtgggcgtgaaaaccagcgaaaagtggtttcgtatgggcctccgtacggttgaagagctgaaggccgacaagagtctgaagctgagcaagatgcagaaggcgggctttctgtattacgaggatctggtgagctgcgttagtaaagcggaagccgatgccgttacgctcatcgtgaagaacggggtgagtacctttctgccggatgcgctggtgaccatcacgggcggtttccgccgtggcaaaaagatgggccacgacatcgactttctgatcacgaatccgggcccgaaagaggatgacgaactgctccacaaagtggttgatctgctcaagaagcaaggtctgctgctgtactgcgacatcatcgagagcacgttcgtggaggaacaactgccaagtcgcaaaatcgacgccatggacaacttccagaagtgcttcgccattctcaagctgtaccagccgggcgtggataacagcagctataacacgagtaagaagagtgacatggccgaggttaaggattggaaagcgatccgtgtggatctggtgatcacgccattcgagcagtacgcctatgcgctgctcggttggacgggcagccgcgaatttggtcgcgatctgcgccgctatgcgagtcatgagcgcaagatgatcctcgacaaccatggcctctacgaccgcaaaaagcgcatctttctgaaagcgggcagcgaagaagagattttcgcgcatctgggtctggattatgtggagccgtgggaacgcaacgcg

SEQ ID NO: 428 - protein, 394 aa, synthetic construct
  REGION 1..394: note = Variant of terminal deoxynucleotidyl transferase
MHHHHHHGGSGHPPSNTPELEVPSVIARKVSQYSCQRKTTLNNYNKKFTDAFEIMAENYEFKENEIFCLEFLRAASLLKYLPFPVTRMKDIQGLPCIGDQVRDVIEEIIEEGESSRVKEVLNDERYKAFKQFTSVFGVGVKTSEKWFRMGLRTVEELKADKSLKLSKMQKAGFLYYEDLVSCVSKAEADAVTLIVKNGVSTFLPDALVTITGGFRRGKKMGHDIDFLITNPGPKEDDELLHKVVDLLKKQGLLLYCDIIESTFVEEQLPSRKIDAMDNFQKCFAILKLYQPGVDNSSYNTSKKSDMAEVKDWKAIRVDLVITPFEQYAYALLGWTGSREFGRDLRRYASHERKMILDNHGLYDRKKRIFLKAGSEEEIFAHLGLDYVEPWERNA

SEQ ID NO: 429 - DNA, 1182 bp, synthetic construct
  misc_feature 1..1182: note = Variant of terminal deoxynucleotidyl transferase
  source 1..1182: mol_type = other DNA
atgcaccatcatcatcatcatggcggtagcggccatccgccgagcaataccccggagctggaagtgccgagcgttatcgcccgcaaggttagtcagtacagctgccagcgcaagaccacgctgaataactacaacaaaaagtttaccgacgcgttcgagatcatggccgagaactacgaatttaaagagaacgaaatcttctgtctggaatttctgcgcgccgcgagtctgctgaaatatctgccgttcccggttacccgcatgaaagacatccaaggtctgccgtgcattggcgaccaagttcgtgacgtgatcgaggagatcatcgaagaaggcgagagcagccgtgttatggaagttctcaatgacgagcgctacaaggcctttaagcagttcaccagcgtgttcggtgtgggcgtgaaaaccagcgaaaagtggtttcgtatgggcctccgtacggttgaagagctgaaggccgacaagagtctgaagctgagcaagatgcagaaggcgggctttctgtattacgaggatctggtgagctgcgttagtaaagcggaagccgatgccgttacgctcatcgtgaagaacacggtgagtacctttctgccggatgcgctggtgaccatcacgggcggtttccgccgtggcaaaaagatgggccacgacatcgactttctgatcacgaatccgggcccgaaagaggatgacgaactgctccacaaagtggttgatctgctcaagaagcaaggtctgctgctgtactgcgacatcatcgagagcacgttcgtggaggaacaactgccaagtcgcaaaatcgacgccatggacaacttccagaagtgcttcgccattctcaagctgtaccagccgggcgtggataacagcagctataacacgagtaagaagagtgacatggccgaggttaaggattggaaagcgatccgtgtggatctggtgatcacgccattcgagcagtacgcctatgcgctactcggttggacgggcagccgcgaatttggtcgcgatctgcgccgctatgcgagtcatgagcgcaagatgatcctcgacaaccatggcctctacgaccgcaaaaagcgcatctttctgaaagcgggcagcgaagaagagattttcgcgcatctgggtctggattatgtggagccgtgggaacgcaacgcg

SEQ ID NO: 430 - protein, 394 aa, synthetic construct
  REGION 1..394: note = Variant of terminal deoxynucleotidyl transferase
MHHHHHHGGSGHPPSNTPELEVPSVIARKVSQYSCQRKTTLNNYNKKFTDAFEIMAENYEFKENEIFCLEFLRAASLLKYLPFPVTRMKDIQGLPCIGDQVRDVIEEIIEEGESSRVMEVLNDERYKAFKQFTSVFGVGVKTSEKWFRMGLRTVEELKADKSLKLSKMQKAGFLYYEDLVSCVSKAEADAVTLIVKNTVSTFLPDALVTITGGFRRGKKMGHDIDFLITNPGPKEDDELLHKVVDLLKKQGLLLYCDIIESTFVEEQLPSRKIDAMDNFQKCFAILKLYQPGVDNSSYNTSKKSDMAEVKDWKAIRVDLVITPFEQYAYALLGWTGSREFGRDLRRYASHERKMILDNHGLYDRKKRIFLKAGSEEEIFAHLGLDYVEPWERNA

SEQ ID NO: 431 - DNA, 1182 bp, synthetic construct
  misc_feature 1..1182: note = Variant of terminal deoxynucleotidyl transferase
  source 1..1182: mol_type = other DNA
atgcaccatcatcatcatcatggcggtagcggccatccgccgagcaataccccggagctggaagtgccgagcgttatcgcccgcaaggttagtcagtacagctgccagcgcaagaccacgctgaataactacaacaaaaagtttaccgacgcgttcgagatcatggccgagaactacgaatttaaagagaacgaaatcttctgtctggaatttctgcgcgccgcgagtctgctgaaatatctgccgttcccggttacccgcatgaaagacatccaaggtctgccgtgcattggcgaccaagttcgtgacgtgatcgaggagatcttggaagaaggcgagagcagccgtgttaaagaagttctcaatgacgagcgctacaaggcctttaagcagttcaccagcgtgttcggtgtgggcgtgaaaaccagcgaaaagtggtttcgtatgggcctccgtacggttgaagagctgaaggccgacaagagtctgaagctgagcaagatgcagaaggcgggctttctgtattacgaggatctggtgagctgcgttagtaaagcggaagccgatgccgttacgctcatcgtgaagaacacggtgagtacctttctgccggatgcgctggtgaccatcacgggcggtttccgccgtggcaaaaagatgggccacgacatcgactttctgatcacgaatccgggcccgaaagaggatgacgaactgctccacaaagtggttgatctgctcaagaagcaaggtctgctgctgtactgcgacatcatcgagagcacgttcgtggaggaacaactgccaagtcgcaaaatcgacgccatggacaacttccagaagtgcttcgccattctcaagctgtaccagccgggcgtggataacagcagctataacacgagtaagaagagtgacatggccgaggttaaggattggaaagcgatccgtgtggatctggtgatcacgccattcgagcagtacgcctatgcgctgctcggttggacgggcagccgcgaatttggtcgcgatctgcgccgctatgcgagtcatgagcgcaagatgatcctcgacaaccatggcctctacgaccgcaaaaagcgcatctttctgaaagcgggcagcgaagaagagattttcgcgcatctgggtctggattatgtggagccgtgggaacgcaacgcg

SEQ ID NO: 432 - protein, 394 aa, synthetic construct
  REGION 1..394: note = Variant of terminal deoxynucleotidyl transferase
MHHHHHHGGSGHPPSNTPELEVPSVIARKVSQYSCQRKTTLNNYNKKFTDAFEIMAENYEFKENEIFCLEFLRAASLLKYLPFPVTRMKDIQGLPCIGDQVRDVIEEILEEGESSRVKEVLNDERYKAFKQFTSVFGVGVKTSEKWFRMGLRTVEELKADKSLKLSKMQKAGFLYYEDLVSCVSKAEADAVTLIVKNTVSTFLPDALVTITGGFRRGKKMGHDIDFLITNPGPKEDDELLHKVVDLLKKQGLLLYCDIIESTFVEEQLPSRKIDAMDNFQKCFAILKLYQPGVDNSSYNTSKKSDMAEVKDWKAIRVDLVITPFEQYAYALLGWTGSREFGRDLRRYASHERKMILDNHGLYDRKKRIFLKAGSEEEIFAHLGLDYVEPWERNA

SEQ ID NO: 433 - DNA, 1182 bp, synthetic construct
  misc_feature 1..1182: note = Variant of terminal deoxynucleotidyl transferase
  source 1..1182: mol_type = other DNA
atgcaccatcatcatcatcatggcggtagcggccatccgccgagcaataccccggagctggaagtgccgagcgttatcgcccgcaaggttagtcagtacagctgccagcgcaagaccacgctgaataactacaacaaaaagtttaccgacgcgttcgagatcatggccgagaactacgaatttaaagagaacgaaatcttctgtctggaatttctgcgcgccgcgagtctgctgaaatatctgccgttcccggttacccgcatgaaagacatccaaggtctgccgtgcattggcgaccaagttcgtgacgtgatcgaggagatcatcgaagaaggcgagagcagccgtgttaaagaagttctcaatgacgagcgctacaaggcctttaagcagttcaccagcgtgttcggtgtgggcgtgaaaaccagcgaaaagtggtttcgtatgggcctccgtacggttgaagagctgaaggccgacaagagtctgaagctgagcaagatgcagaaggcgggctttctgtattacgaggatctggtgagctgcgttagtaaagcggaagccgatgccgttacgctcatcgtgaagaacacggtgagtacctttctgccggatgcgctggtgaccatcacgggcggtttccgccgtggcaaaaagatgggccacgacatcgactttctgatcacgaatccgggcccgaaagaggatgacgaactgctccacaaagtggttgatctgctcaagaagcaaggtctgctgctgtactgcgacatcatcgagagcacgttcgtggaggaacaactgccaagtcgcaaaccggacgccatggacaacttccagaagtgcttcgccattctcaagctgtaccagccgggcgtggataacagcagctataacacgagtaagaagagtgacatggccgaggttaaggattggaaagcgatccgtgtggatctggtgatcacgccattcgagcagtacgcctatgcgctgctcggttggacgggcagccgcgaatttggtcgcgatctgcgccgctatgcgagtcatgagcgcaagatgatcctcgacaaccatggcctctacgaccgcaaaaagcgcatctttctgaaagcgggcagcgaagaagagattttcgcgcatctgggtctggattatgtggagccgtgggaacgcaacgcg

SEQ ID NO: 434 - protein, 394 aa, synthetic construct
  REGION 1..394: note = Variant of terminal deoxynucleotidyl transferase
MHHHHHHGGSGHPPSNTPELEVPSVIARKVSQYSCQRKTTLNNYNKKFTDAFEIMAENYEFKENEIFCLEFLRAASLLKYLPFPVTRMKDIQGLPCIGDQVRDVIEEIIEEGESSRVKEVLNDERYKAFKQFTSVFGVGVKTSEKWFRMGLRTVEELKADKSLKLSKMQKAGFLYYEDLVSCVSKAEADAVTLIVKNTVSTFLPDALVTITGGFRRGKKMGHDIDFLITNPGPKEDDELLHKVVDLLKKQGLLLYCDIIESTFVEEQLPSRKPDAMDNFQKCFAILKLYQPGVDNSSYNTSKKSDMAEVKDWKAIRVDLVITPFEQYAYALLGWTGSREFGRDLRRYASHERKMILDNHGLYDRKKRIFLKAGSEEEIFAHLGLDYVEPWERNA

SEQ ID NO: 435 - DNA, 1182 bp, synthetic construct
  misc_feature 1..1182: note = Variant of terminal deoxynucleotidyl transferase
  source 1..1182: mol_type = other DNA
atgcaccatcatcatcatcatggcggtagcggccatccgccgagcaataccccggagctggaagtgccgagcgttatcgcccgcaaggttagtcagtacagctgccagcgcaagaccacgctgaataactacaacaaaaagtttaccgacgcgttcgagatcatggccgagaactacgaatttaaagagaacgaaatcttctgtctggaatttctgcgcgccgcgagtctgctgaaatatctgccgttcccggttacccgcatgaaagacatccaaggtctgccgtgcattggcgaccaagttcgtgacgtgatcgaggagatcatcgaagaaggcgagagcagccgtgttaaagaagttctcaatgacgagcgctacaaggcctttaagcagttcaccagcgtgttcggtgtgggcgtgaaaaccagcgaaaagtggtttcgtatgggcctccgtacggttgaagagctgaaggccgacaagagtctgaagctgagcaagatgcagaaggcgggctttctgtattacgaggatctggtgagctgcgttagtaaagcggaagccgatgccgttacgctcatcgtgaagaacacggtgagtacctttctgccggatgcgctggtgaccatcacgggcggtttccgccgtggcaaaaagatgggccacgacatcgactttctgatcacgaatccgggcccgaaagaggatgactatctgctccacaaagtggttgatctgctcaagaagcaaggtctgctgctgtactgcgacatcatcgagagcacgttcgtggaggaacaactgccaagtcgcaaaatcgacgccatggacaacttccagaagtgcttcgccattctcaagctgtaccagccgggcgtggataacagcagctataacacgagtaagaagagtgacatggccgaggttaaggattggaaagcgatccgtgtggatctggtgatcacgccattcgagcagtacgcctatgcgctgctcggttggacgggcagccgcgaatttggtcgcgatctgcgccgctatgcgagtcatgagcgcaagatgatcctcgacaaccatggcctctacgaccgcaaaaagcgcatctttctgaaagcgggcagcgaagaagagattttcgcgcatctgggtctggattatgtggagccgtgggaacgcaacgcg

SEQ ID NO: 436 - protein, 394 aa, synthetic construct
  REGION 1..394: note = Variant of terminal deoxynucleotidyl transferase
MHHHHHHGGSGHPPSNTPELEVPSVIARKVSQYSCQRKTTLNNYNKKFTDAFEIMAENYEFKENEIFCLEFLRAASLLKYLPFPVTRMKDIQGLPCIGDQVRDVIEEIIEEGESSRVKEVLNDERYKAFKQFTSVFGVGVKTSEKWFRMGLRTVEELKADKSLKLSKMQKAGFLYYEDLVSCVSKAEADAVTLIVKNTVSTFLPDALVTITGGFRRGKKMGHDIDFLITNPGPKEDDYLLHKVVDLLKKQGLLLYCDIIESTFVEEQLPSRKIDAMDNFQKCFAILKLYQPGVDNSSYNTSKKSDMAEVKDWKAIRVDLVITPFEQYAYALLGWTGSREFGRDLRRYASHERKMILDNHGLYDRKKRIFLKAGSEEEIFAHLGLDYVEPWERNA

SEQ ID NO: 437 - DNA, 1182 bp, synthetic construct
  misc_feature 1..1182: note = Variant of terminal deoxynucleotidyl transferase
  source 1..1182: mol_type = other DNA
atgcaccatcatcatcatcatggcggtagcggccatccgccgagcaataccccggagctggaagtgccgagcgttatcgcccgcaaggttagtcagtacagctgccagcgcaagaccacgctgaataactacaacaaaaagtttaccgacgcgttcgagatcatggccgagaactacgaatttaaagagaacgaaatcttctgtctggaatttctgcgcgccgcgagtgttctgaaatatctgccgttcccggttacccgcatgaaagacatccaaggtctgccgtgcattggcgaccaagttcgtgacgtgatcgaggagatcatcgaagaaggcgagagcagccgtgttaaagaagttctcaatgacgagcgctacaaggcctttaagcagttcaccagcgtgttcggtgtgggcgtgaaaaccagcgaaaagtggtttcgtatgggcctccgtacggttgaagagctgaaggccgacaagagtctgaagctgagcaagatgcagaaggcgggctttctgtattacgaggatctggtgagctgcgttagtaaagcggaagccgatgccgttacgctcatcgtgaagaacacggtgagtacctttctgccggatgcgctggtgaccatcacgggcggtttccgccgtggcaaaaagatgggccacgacatcgactttctgatcacgaatccgggcccgaaagaggatgacgaactgctccacaaagtggttgatctgctcaagaagcaaggtctgctgctgtactgcgacatcatcgagagcacgttcgtggaggaacaactgccaagtcgcaaaatcgacgccatggacaacttccagaagtgcttcgccattctcaagctgtaccagccgggcgtggataacagcagctataacacgagtaagaagagtgacatggccgaggttaaggattggaaagcgatccgtgtggatctggtgatcacgccattcgagcagtacgcctatgcgctgctcggttggacgggcagccgcgaatttggtcgcgatctgcgccgctatgcgagtcatgagcgcaagatgatcctcgacaaccatggcctctacgaccgcaaaaagcgcatctttctgaaagcgggcagcgaagaagagattttcgcgcatctgggtctggattatgtggagccgtgggaacgcaacgcg

SEQ ID NO: 438 - protein, 394 aa, synthetic construct
  REGION 1..394: note = Variant of terminal deoxynucleotidyl transferase
MHHHHHHGGSGHPPSNTPELEVPSVIARKVSQYSCQRKTTLNNYNKKFTDAFEIMAENYEFKENEIFCLEFLRAASVLKYLPFPVTRMKDIQGLPCIGDQVRDVIEEIIEEGESSRVKEVLNDERYKAFKQFTSVFGVGVKTSEKWFRMGLRTVEELKADKSLKLSKMQKAGFLYYEDLVSCVSKAEADAVTLIVKNTVSTFLPDALVTITGGFRRGKKMGHDIDFLITNPGPKEDDELLHKVVDLLKKQGLLLYCDIIESTFVEEQLPSRKIDAMDNFQKCFAILKLYQPGVDNSSYNTSKKSDMAEVKDWKAIRVDLVITPFEQYAYALLGWTGSREFGRDLRRYASHERKMILDNHGLYDRKKRIFLKAGSEEEIFAHLGLDYVEPWERNA

SEQ ID NO: 439 - DNA, 1182 bp, synthetic construct
  misc_feature 1..1182: note = Variant of terminal deoxynucleotidyl transferase
  source 1..1182: mol_type = other DNA
atgcaccatcatcatcatcatggcggtagcggccatccgccgagcaataccccggagctggaagtgccgagcgttatcgcccgcaaggttagtcagtacagctgccagcgcaagaccacgctgaataactacaacaaaaagtttaccgacgcgttcgagatcatggccgagaactacgaatttaaagagaacgaaatcttctgtctggaatttctgcgcgccgcgagtctgctgaaatatctgccgttcccggttacccgcatgaaagacatccaaggtctgccgtgcattggcgaccaagttcgtgacgtgatcgaggagatcatcgaagaaggcgagagcagccgtgttaaagaagttctcaatgacgagcgctacaaggcctttaagcagttcaccagcgtgttcggtgtgggcgtgaaaaccagcgaaaagtggtttcgtatgggcctccgtacggttgaagagctgaaggccgacaagagtctgaagctgagcaagatgcagaaggcgggctttctgtattacgaggatctggtgagctgcgttagtaaagcggaagccgatgccgttacgctcatcgtgaagaacacggtgagtacctttctgccggatgcgctggtgaccatcacgggcggtttccgccgtggcaaaaagatgggccacgacatcgactttctgatcacgaatccgggcccgaaagaggatgacgaactgctccacaaagtggttgatctgctcaagaagcaaggtctgctgctgtactgcgacatcatcgagagcacgttcgtggaggaacaactgccaagtcgcaaaatcgacgccatggacaacttccagaagtgcttcgccattctcaagctgtaccagccgggcgtggataacagcagctataacacgagtaagaagagtgacatggccgaggttaaggattggaaagcgatccgtgtggatctggtgatcacgccattcgagcagtacgcctatgcgctgctcggttggacgggcagccgcgaatttggtcgcgatctgcgccgctatgcgagttatgagcgcaagatgatcctcgacaaccatggcctctacgaccgcaaaaagcgcatctttctgaaagcgggcagcgaagaagagattttcgcgcatctgggtctggattatgtggagccgtgggaacgcaacgcg

SEQ ID NO: 440 - protein, 394 aa, synthetic construct
  REGION 1..394: note = Variant of terminal deoxynucleotidyl transferase
MHHHHHHGGSGHPPSNTPELEVPSVIARKVSQYSCQRKTTLNNYNKKFTDAFEIMAENYEFKENEIFCLEFLRAASLLKYLPFPVTRMKDIQGLPCIGDQVRDVIEEIIEEGESSRVKEVLNDERYKAFKQFTSVFGVGVKTSEKWFRMGLRTVEELKADKSLKLSKMQKAGFLYYEDLVSCVSKAEADAVTLIVKNTVSTFLPDALVTITGGFRRGKKMGHDIDFLITNPGPKEDDELLHKVVDLLKKQGLLLYCDIIESTFVEEQLPSRKIDAMDNFQKCFAILKLYQPGVDNSSYNTSKKSDMAEVKDWKAIRVDLVITPFEQYAYALLGWTGSREFGRDLRRYASYERKMILDNHGLYDRKKRIFLKAGSEEEIFAHLGLDYVEPWERNA

SEQ ID NO: 441 - DNA, 1182 bp, synthetic construct
  misc_feature 1..1182: note = Variant of terminal deoxynucleotidyl transferase
  source 1..1182: mol_type = other DNA
atgcaccatcatcatcatcatggcggtagcggccatccgccgagcaataccccggagctggaagtgccgagcgttatcgcccgcaaggttagtcagtacagctgccagcgcaagaccacgctgaataactacaacaaaaagtttaccgacgcgttcgagatcatggccgagaactacgaatttaaagagaacgaaatcttctgtctggaatttctgcgcgccgcgagtctgctgaaatatctgccgttcccggttacccgcatgaaagacatccaaggtctgccgtgcattggcgaccaagttcgtgacgtgatcgaggagatcatcgaagaaggcgagagcagccgtgttaaagaagttctcaatgacgagcgctacaaggcctttaagcagttcaccagcgtgttcggtgtgggcgtgaaaaccagcgaaaagtggtttcgtatgggcctccgtacggttgaagagctgaaggccgacaagagtcggaagctgagcaagatgcagaaggcgggctttctgtattacgaggatctggtgagctgcgttagtaaagcggaagccgatgccgttacgctcatcgtgaagaacacggtgagtacctttctgccggatgcgctggtgaccatcacgggcggtttccgccgtggcaaaaagatgggccacgacatcgactttctgatcacgaatccgggcccgaaagaggatgacgaactgctccacaaagtggttgatctgctcaagaagcaaggtctgctgctgtactgcgacatcatcgagagcacgttcgtggaggaacaactgccaagtcgcaaaatcgacgccatggacaacttccagaagtgcttcgccattctcaagctgtaccagccgggcgtggataacagcagctataacacgagtaagaagagtgacatggccgaggttaaggattggaaagcgatccgtgtggatctggtgatcacgccattcgagcagtacgcctatgcgctgctcggttggacgggcagccgcgaatttggtcgcgatctgcgccgctatgcgagtcatgagcgcaagatgatcctcgacaaccatggcctctacgaccgcaaaaagcgcatctttctgaaagcgggcagcgaagaagagattttcgcgcatctgggtctggattatgtggagccgtgggaacgcaacgcg

SEQ ID NO: 442 - protein, 394 aa, synthetic construct
  REGION 1..394: note = Variant of terminal deoxynucleotidyl transferase
MHHHHHHGGSGHPPSNTPELEVPSVIARKVSQYSCQRKTTLNNYNKKFTDAFEIMAENYEFKENEIFCLEFLRAASLLKYLPFPVTRMKDIQGLPCIGDQVRDVIEEIIEEGESSRVKEVLNDERYKAFKQFTSVFGVGVKTSEKWFRMGLRTVEELKADKSRKLSKMQKAGFLYYEDLVSCVSKAEADAVTLIVKNTVSTFLPDALVTITGGFRRGKKMGHDIDFLITNPGPKEDDELLHKVVDLLKKQGLLLYCDIIESTFVEEQLPSRKIDAMDNFQKCFAILKLYQPGVDNSSYNTSKKSDMAEVKDWKAIRVDLVITPFEQYAYALLGWTGSREFGRDLRRYASHERKMILDNHGLYDRKKRIFLKAGSEEEIFAHLGLDYVEPWERNA

SEQ ID NO: 443 - DNA, 1182 bp, synthetic construct
  misc_feature 1..1182: note = Variant of terminal deoxynucleotidyl transferase
  source 1..1182: mol_type = other DNA
atgcaccatcatcatcatcatggcggtagcggccatccgccgagcaataccccggagctggaagtgccgagcgttatcgcccgcaaggttagtcagtacagctgccagcgcaagaccacgctgaataactacaacaaaaagtttaccgacgcgttcgagatcatggccgagaactacgaatttaaagagaacgaaatcttctgtctggaatttctgcgcgccgcgagtctgctgaaatatctgccgttcccggttacccgcatgaaagacatcgatggtctgccgtgcattggcgaccaagttcgtgacgtgatcgaggagatcatcgaagaaggcgagagcagccgtgttaaagaagttctcaatgacgagcgctacaaggcctttaagcagttcaccagcgtgttcggtgtgggcgtgaaaaccagcgaaaagtggtttcgtatgggcctccgtacggttgaagagctgaaggccgacaagagtctgaagctgagcaagatgcagaaggcgggctttctgtattacgaggatctggtgagctgcgttagtaaagcggaagccgatgccgttacgctcatcgtgaagaacacggtgagtacctttctgccggatgcgctggtgaccatcacgggcggtttccgccgtggcaaaaagatgggccacgacatcgactttctgatcacgaatccgggcccgaaagaggatgacgaactgctccacaaagtggttgatctgctcaagaagcaaggtctgctgctgtactgcgacatcatcgagagcacgttcgtggaggaacaactgccaagtcgcaaaatcgacgccatggacaacttccagaagtgcttcgccattctcaagctgtaccagccgggcgtggataacagcagctataacacgagtaagaagagtgacatggccgaggttaaggattggaaagcgatccgtgtggatctggtgatcacgccattcgagcagtacgcctatgcgctgctcggttggacgggcagccgcgaatttggtcgcgatctgcgccgctatgcgagtcatgagcgcaagatgatcctcgacaaccatggcctctacgaccgcaaaaagcgcatctttctgaaagcgggcagcgaagaagagattttcgcgcatctgggtctggattatgtggagccgtgggaacgcaacgcg

SEQ ID NO: 444 - protein, 394 aa, synthetic construct
  REGION 1..394: note = Variant of terminal deoxynucleotidyl transferase
MHHHHHHGGSGHPPSNTPELEVPSVIARKVSQYSCQRKTTLNNYNKKFTDAFEIMAENYEFKENEIFCLEFLRAASLLKYLPFPVTRMKDIDGLPCIGDQVRDVIEEIIEEGESSRVKEVLNDERYKAFKQFTSVFGVGVKTSEKWFRMGLRTVEELKADKSLKLSKMQKAGFLYYEDLVSCVSKAEADAVTLIVKNTVSTFLPDALVTITGGFRRGKKMGHDIDFLITNPGPKEDDELLHKVVDLLKKQGLLLYCDIIESTFVEEQLPSRKIDAMDNFQKCFAILKLYQPGVDNSSYNTSKKSDMAEVKDWKAIRVDLVITPFEQYAYALLGWTGSREFGRDLRRYASHERKMILDNHGLYDRKKRIFLKAGSEEEIFAHLGLDYVEPWERNA

SEQ ID NO: 445 - DNA, 1182 bp, synthetic construct
  misc_feature 1..1182: note = Variant of terminal deoxynucleotidyl transferase
  source 1..1182: mol_type = other DNA
atgcaccatcatcatcatcatggcggtagcggccatccgccgagcaataccccggagctggaagtgccgagcgttatcgcccgcaaggttagtcagtacagctgccagcgcaagaccacgctgaataactacaacaaaaagtttaccgacgcgttcgagatcatggccgagaactacgaatttaaagagaacgaaatcttctgtctggaatttctgcgcgccgcgagtctgctgaaatatctgccgttcccggttacccgcatgaaagacatccaaggtctgccgtgcattggcgaccaagttcgtgacgtgatcgaggagatcatcgaagaaggcgagagcagccgtgttaaagaagttctcaatgacgagcgctacaaggcctttaagcagttcaccagcgtgttcggtgtgggcgtgaaaaccagcgaaaagtggtttcgtatgggcctccgtacggttgaagagctgaaggccgacaagagtctgaagctgagcaagatgcagaaggcgggctttctgtattacgaggatctggtgagctgcgttagtaaagcggaagccgatgccgttacgctcatcgtgaagaacacggtgagtacctttctgccggatgcgctggtgaccatcacgggcggtttccgccgtggcaaaaagatgggccacgacatcgactttctgatcacgaatccgggcccgaaagaggatgacgaactgctccacaaagtggttgatctgctcaagaagcaaggtctgctgctgtactgcgacatcatcgagagcacgttcgtggaggaacaactgccaagtcgcaaaatcgacgccatggacaacttccagaagtgcttcgccattctcaagctgcggcagccgggcgtggataacagcagctataacacgagtaagaagagtgacatggccgaggttaaggattggaaagcgatccgtgtggatctggtgatcacgccattcgagcagtacgcctatgcgctgctcggttggacgggcagccgcgaatttggtcgcgatctgcgccgctatgcgagtcatgagcgcaagatgatcctcgacaaccatggcctctacgaccgcaaaaagcgcatctttctgaaagcgggcagcgaagaagagattttcgcgcatctgggtctggattatgtggagccgtgggaacgcaacgcg

SEQ ID NO: 446 - protein, 394 aa, synthetic construct
  REGION 1..394: note = Variant of terminal deoxynucleotidyl transferase
MHHHHHHGGSGHPPSNTPELEVPSVIARKVSQYSCQRKTTLNNYNKKFTDAFEIMAENYEFKENEIFCLEFLRAASLLKYLPFPVTRMKDIQGLPCIGDQVRDVIEEIIEEGESSRVKEVLNDERYKAFKQFTSVFGVGVKTSEKWFRMGLRTVEELKADKSLKLSKMQKAGFLYYEDLVSCVSKAEADAVTLIVKNTVSTFLPDALVTITGGFRRGKKMGHDIDFLITNPGPKEDDELLHKVVDLLKKQGLLLYCDIIESTFVEEQLPSRKIDAMDNFQKCFAILKLRQPGVDNSSYNTSKKSDMAEVKDWKAIRVDLVITPFEQYAYALLGWTGSREFGRDLRRYASHERKMILDNHGLYDRKKRIFLKAGSEEEIFAHLGLDYVEPWERNA

SEQ ID NO: 447 - DNA, 1182 bp, synthetic construct
  misc_feature 1..1182: note = Variant of terminal deoxynucleotidyl transferase
  source 1..1182: mol_type = other DNA
atgcaccatcatcatcatcatggcggtagcggccatccgccgagcaataccccggagctggaagtgccgagcgttatcgcccgcaaggttagtcagtacagctgccagcgcaagaccacgctgaataactacaacaaaaagtttaccgacgcgttcgagatcatggccgagaactacgaatttaaagagaacgaaatcttctgtctggaatttctgcgcgccgcgagtctgctgaaatatctgccgttcccggttacccgcatgaaagacatccaaggtctgccgtgcattggcgaccaagttcgtgacgtgatcgaggagatcatcgaagaaggcgagagcagccgtgttaaagaagttctcaatgacgagcgctacaaggcctttaagcagttcaccagcgtgttcggtgtgggcgtgaaaaccagcgaaaagtggtttcgtatgggcctccgtacggttgaagagctgaaggccgacaagagtctgaagctgagcaagatgcagaaggcgggctttctgtattacgaggatctggtgagctgcgttagtaaagcggaagccgatgccgttacgctcatcgtgaagaacacggtgagtacctttctgccggatgcgctggtgaccatcacgggcggtttccgccgtggcaaaaagatgggccacgacatcgactttctgatcacgaatccgggcccgaaagaggatgacgaactgctccacaaagtggttgatctgctcaagaagcaaggtctgctgctgtactgcgacatcatcgagagcacgttcgtggaggaacaactgccaagtcgcaaaatcgacgccatggacaacttccagaagtgcttcgccattctcaagctgtaccagccgggcgtggataacagcagctataacacgagtaagaagagtgacatggccgaggttaaggattggaaagcgatccgtgtggatctggtggagacgccattcgagcagtacgcctatgcgctgctcggttggacgggcagccgcgaatttggtcgcgatctgcgccgctatgcgagtcatgagcgcaagatgatcctcgacaaccatggcctctacgaccgcaaaaagcgcatctttctgaaagcgggcagcgaagaagagattttcgcgcatctgggtctggattatgtggagccgtgggaacgcaacgcg

SEQ ID NO: 448 - protein, 394 aa, synthetic construct
  REGION 1..394: note = Variant of terminal deoxynucleotidyl transferase
MHHHHHHGGSGHPPSNTPELEVPSVIARKVSQYSCQRKTTLNNYNKKFTDAFEIMAENYEFKENEIFCLEFLRAASLLKYLPFPVTRMKDIQGLPCIGDQVRDVIEEIIEEGESSRVKEVLNDERYKAFKQFTSVFGVGVKTSEKWFRMGLRTVEELKADKSLKLSKMQKAGFLYYEDLVSCVSKAEADAVTLIVKNTVSTFLPDALVTITGGFRRGKKMGHDIDFLITNPGPKEDDELLHKVVDLLKKQGLLLYCDIIESTFVEEQLPSRKIDAMDNFQKCFAILKLYQPGVDNSSYNTSKKSDMAEVKDWKAIRVDLVETPFEQYAYALLGWTGSREFGRDLRRYASHERKMILDNHGLYDRKKRIFLKAGSEEEIFAHLGLDYVEPWERNA

SEQ ID NO: 449 - DNA, 1182 bp, synthetic construct
  misc_feature 1..1182: note = Variant of terminal deoxynucleotidyl transferase
  source 1..1182: mol_type = other DNA
atgcaccatcatcatcatcatggcggtagcggccatccgccgagcaataccccggagctggaagtgccgagcgttatcgcccgcaaggttagtcagtacagctgccagcgcaagaccacgctgaataactacaacaaaaagtttaccgacgcgttcgagatcatggccgagaactacgaatttaaagagaacgaaatcttctgtctggaatttctgcgcgccgcgagtctgctgaaatatctgccgttcccggttacccgcatgaaagacatccaaggtctgccgtgcattggcgaccaagttcgtgacgtgatcgaggagatcatcgaagaaggcgagagcagcattgttaaagaagttctcaatgacgagcgctacaaggcctttaagcagttcaccagcgtgttcggtgtgggcgtgaaaaccagcgaaaagtggtttcgtatgggcctccgtacggttgaagagctgaaggccgacaagagtctgaagctgagcaagatgcagaaggcgggctttctgtattacgaggatctggtgagctgcgttagtaaagcggaagccgatgccgttacgctcatcgtgaagaacacggtgagtacctttctgccggatgcgctggtgaccatcacgggcggtttccgccgtggcaaaaagatgggccacgacatcgactttctgatcacgaatccgggcccgaaagaggatgacgaactgctccacaaagtggttgatctgctcaagaagcaaggtctgctgctgtactgcgacatcatcgagagcacgttcgtggaggaacaactgccaagtcgcaaaatcgacgccatggacaacttccagaagtgcttcgccattctcaagctgtaccagccgggcgtggataacagcagctataacacgagtaagaagagtgacatggccgaggttaaggattggaaagcgatccgtgtggatctggtgatcacgccattcgagcagtacgcctatgcgctgctcggttggacgggcagccgcgaatttggtcgcgatctgcgccgctatgcgagtcatgagcgcaagatgatcctcgacaaccatggcctctacgaccgcaaaaagcgcatctttctgaaagcgggcagcgaagaagagattttcgcgcatctgggtctggattatgtggagccgtgggaacgcaacgcg

SEQ ID NO: 450 - protein, 394 aa, synthetic construct
  REGION 1..394: note = Variant of terminal deoxynucleotidyl transferase
MHHHHHHGGSGHPPSNTPELEVPSVIARKVSQYSCQRKTTLNNYNKKFTDAFEIMAENYEFKENEIFCLEFLRAASLLKYLPFPVTRMKDIQGLPCIGDQVRDVIEEIIEEGESSIVKEVLNDERYKAFKQFTSVFGVGVKTSEKWFRMGLRTVEELKADKSLKLSKMQKAGFLYYEDLVSCVSKAEADAVTLIVKNTVSTFLPDALVTITGGFRRGKKMGHDIDFLITNPGPKEDDELLHKVVDLLKKQGLLLYCDIIESTFVEEQLPSRKIDAMDNFQKCFAILKLYQPGVDNSSYNTSKKSDMAEVKDWKAIRVDLVITPFEQYAYALLGWTGSREFGRDLRRYASHERKMILDNHGLYDRKKRIFLKAGSEEEIFAHLGLDYVEPWERNA

SEQ ID NO: 451 - DNA, 1182 bp, synthetic construct
  misc_feature 1..1182: note = Variant of terminal deoxynucleotidyl transferase
  source 1..1182: mol_type = other DNA
atgcaccatcatcatcatcatggcggtagcggccatccgccgagcaataccccggagctggaagtgccgagcgttatcgcccgcaaggttagtcagtacagctgccagcgcaagaccacgctgaataactacaacaaaaagtttaccgacgcgttcgagatcatggccgagaactacgaatttaaagagaacgaaatcttctgtctggaatttctgcgcgccgcgagtctgctgaaatatctgccgttcccggttacccgcatgaaagacatccaaggtctgccgtgcattggcgaccaagttcgtgacgtgatcgaggagatcatcgaagaaggcgagagcagccgtgttaaagaagttctcaatgacgagcgctacaaggcctttaagcagttcaccagcgtgttcggtgtgggcgtgaaaaccagcgaaaagtggtttcgtatgggcctccgtacggttgaagagctgaaggccgacaagagtctgaagctgagcaagatgcagaaggcgggctttctgtattacgaggatctggtgagctgcgttagtaaagcggaagccgatgccgttacgctcatcgtgaagaacacggtgagtacctttctgccggatgcgctggtgaccatcacgggcggtttccgccgtggcaaaaagatgggccacgacatcgactttctgatcacgaatccgggcccgaaagaggatgacgaactgctccacaaagtggttgatctgctcaagaagcaaggtctgctgctgtactgcgacatcatcgagagcacgttcgtggaggaagatctgccaagtcgcaaaatcgacgccatggacaacttccagaagtgcttcgccattctcaagctgtaccagccgggcgtggataacagcagctataacacgagtaagaagagtgacatggccgaggttaaggattggaaagcgatccgtgtggatctggtgatcacgccattcgagcagtacgcctatgcgctgctcggttggacgggcagccgcgaatttggtcgcgatctgcgccgctatgcgagtcatgagcgcaagatgatcctcgacaaccatggcctctacgaccgcaaaaagcgcatctttctgaaagcgggcagcgaagaagagattttcgcgcatctgggtctggattatgtggagccgtgggaacgcaacgcg

SEQ ID NO: 452 - protein, 394 aa, synthetic construct
  REGION 1..394: note = Variant of terminal deoxynucleotidyl transferase
MHHHHHHGGSGHPPSNTPELEVPSVIARKVSQYSCQRKTTLNNYNKKFTDAFEIMAENYEFKENEIFCLEFLRAASLLKYLPFPVTRMKDIQGLPCIGDQVRDVIEEIIEEGESSRVKEVLNDERYKAFKQFTSVFGVGVKTSEKWFRMGLRTVEELKADKSLKLSKMQKAGFLYYEDLVSCVSKAEADAVTLIVKNTVSTFLPDALVTITGGFRRGKKMGHDIDFLITNPGPKEDDELLHKVVDLLKKQGLLLYCDIIESTFVEEDLPSRKIDAMDNFQKCFAILKLYQPGVDNSSYNTSKKSDMAEVKDWKAIRVDLVITPFEQYAYALLGWTGSREFGRDLRRYASHERKMILDNHGLYDRKKRIFLKAGSEEEIFAHLGLDYVEPWERNA

SEQ ID NO: 453 - DNA, 1182 bp, synthetic construct
  misc_feature 1..1182: note = Variant of terminal deoxynucleotidyl transferase
  source 1..1182: mol_type = other DNA
atgcaccatcatcatcatcatggcggtagcggccatccgccgagcaataccccggagctggaagtgccgagcgttatcgcccgcaaggttagtcagtacagctgccagcgcaagaccacgctgaataactacaacaaaaagtttaccgacgcgttcgagatcatggccgagaactacgaatttaaagagaacgaaatcttctgtctggaatttctgcgcgccgcgagtctgctgaaatatctgccgttcccggttacccgcatgaaagaccttcaaggtctgccgtgcattggcgaccaagttcgtgacgtgatcgaggagatcatcgaagaaggcgagagcagccgtgttaaagaagttctcaatgacgagcgctacaaggcctttaagcagttcaccagcgtgttcggtgtgggcgtgaaaaccagcgaaaagtggtttcgtatgggcctccgtacggttgaagagctgaaggccgacaagagtctgaagctgagcaagatgcagaaggcgggctttctgtattacgaggatctggtgagctgcgttagtaaagcggaagccgatgccgttacgctcatcgtgaagaacacggtgagtacctttctgccggatgcgctggtgaccatcacgggcggtttccgccgtggcaaaaagatgggccacgacatcgactttctgatcacgaatccgggcccgaaagaggatgacgaactgctccacaaagtggttgatctgctcaagaagcaaggtctgctgctgtactgcgacatcatcgagagcacgttcgtggaggaacaactgccaagtcgcaaaatcgacgccatggacaacttccagaagtgcttcgccattctcaagctgtaccagccgggcgtggataacagcagctataacacgagtaagaagagtgacatggccgaggttaaggattggaaagcgatccgtgtggatctggtgatcacgccattcgagcagtacgcctatgcgctgctcggttggacgggcagccgcgaatttggtcgcgatctgcgccgctatgcgagtcatgagcgcaagatgatcctcgacaaccatggcctctacgaccgcaaaaagcgcatctttctgaaagcgggcagcgaagaagagattttcgcgcatctgggtctggattatgtggagccgtgggaacgcaacgcg

SEQ ID NO: 454 - protein, 394 aa, synthetic construct
  REGION 1..394: note = Variant of terminal deoxynucleotidyl transferase
MHHHHHHGGSGHPPSNTPELEVPSVIARKVSQYSCQRKTTLNNYNKKFTDAFEIMAENYEFKENEIFCLEFLRAASLLKYLPFPVTRMKDLQGLPCIGDQVRDVIEEIIEEGESSRVKEVLNDERYKAFKQFTSVFGVGVKTSEKWFRMGLRTVEELKADKSLKLSKMQKAGFLYYEDLVSCVSKAEADAVTLIVKNTVSTFLPDALVTITGGFRRGKKMGHDIDFLITNPGPKEDDELLHKVVDLLKKQGLLLYCDIIESTFVEEQLPSRKIDAMDNFQKCFAILKLYQPGVDNSSYNTSKKSDMAEVKDWKAIRVDLVITPFEQYAYALLGWTGSREFGRDLRRYASHERKMILDNHGLYDRKKRIFLKAGSEEEIFAHLGLDYVEPWERNA

SEQ ID NO: 455 - DNA, 1182 bp, synthetic construct
  misc_feature 1..1182: note = Variant of terminal deoxynucleotidyl transferase
  source 1..1182: mol_type = other DNA
atgcaccatcatcatcatcatggcggtagcggccatccgccgagcaataccccggagctggaagtgccgagcgttatcgcccgcaaggttagtcagtacagctgccagcgcaagaccacgctgaataactacaacaaaaagtttaccgacgcgttcgagatcatggccgagaactacgaatttaaagagaacgaaatcttctgtctggaatttctgcgcgccgcgagtctgctgaaatatctgccgttcccggttacccgcatgaaagacatccaaggtctgccgtgcattggcgaccaagttcgtgacgtgatcgaggagatctgtgaagaaggcgagagcagccgtgttaaagaagttctcaatgacgagcgctacaaggcctttaagcagttcaccagcgtgttcggtgtgggcgtgaaaaccagcgaaaagtggtttcgtatgggcctccgtacggttgaagagctgaaggccgacaagagtctgaagctgagcaagatgcagaaggcgggctttctgtattacgaggatctggtgagctgcgttagtaaagcggaagccgatgccgttacgctcatcgtgaagaacacggtgagtacctttctgccggatgcgctggtgaccatcacgggcggtttccgccgtggcaaaaagatgggccacgacatcgactttctgatcacgaatccgggcccgaaagaggatgacgaactgctccacaaagtggttgatctgctcaagaagcaaggtctgctgctgtactgcgacatcatcgagagcacgttcgtggaggaacaactgccaagtcgcaaaatcgacgccatggacaacttccagaagtgcttcgccattctcaagctgtaccagccgggcgtggataacagcagctataacacgagtaagaagagtgacatggccgaggttaaggattggaaagcgatccgtgtggatctggtgatcacgccattcgagcagtacgcctatgcgctgctcggttggacgggcagccgcgaatttggtcgcgatctgcgccgctatgcgagtcatgagcgcaagatgatcctcgacaaccatggcctctacgaccgcaaaaagcgcatctttctgaaagcgggcagcgaagaagagattttcgcgcatctgggtctggattatgtggagccgtgggaacgcaacgcg

SEQ ID NO: 456 - protein, 394 aa, synthetic construct
  REGION 1..394: note = Variant of terminal deoxynucleotidyl transferase
MHHHHHHGGSGHPPSNTPELEVPSVIARKVSQYSCQRKTTLNNYNKKFTDAFEIMAENYEFKENEIFCLEFLRAASLLKYLPFPVTRMKDIQGLPCIGDQVRDVIEEICEEGESSRVKEVLNDERYKAFKQFTSVFGVGVKTSEKWFRMGLRTVEELKADKSLKLSKMQKAGFLYYEDLVSCVSKAEADAVTLIVKNTVSTFLPDALVTITGGFRRGKKMGHDIDFLITNPGPKEDDELLHKVVDLLKKQGLLLYCDIIESTFVEEQLPSRKIDAMDNFQKCFAILKLYQPGVDNSSYNTSKKSDMAEVKDWKAIRVDLVITPFEQYAYALLGWTGSREFGRDLRRYASHERKMILDNHGLYDRKKRIFLKAGSEEEIFAHLGLDYVEPWERNA

SEQ ID NO: 457 - DNA, 1182 bp, synthetic construct
  misc_feature 1..1182: note = Variant of terminal deoxynucleotidyl transferase
  source 1..1182: mol_type = other DNA
atgcaccatcatcatcatcatggcggtagcggccatccgccgagcaataccccggagctggaagtgccgagcgttatcgcccgcaaggggagtcagtacagctgccagcgcaagaccacgctgaataactacaacaaaaagtttaccgacgcgttcgagatcatggccgagaactacgaatttaaagagaacgaaatcttctgtctggaatttctgcgcgccgcgagtctgctgaaatatctgccgttcccggttacccgcatgaaagacatccaaggtctgccgtgcattggcgaccaagttcgtgacgtgatcgaggagatcatcgaagaaggcgagagcagccgtgttaaagaagttctcaatgacgagcgctacaaggcctttaagcagttcaccagcgtgttcggtgtgggcgtgaaaaccagcgaaaagtggtttcgtatgggcctccgtacggttgaagagctgaaggccgacaagagtctgaagctgagcaagatgcagaaggcgggctttctgtattacgaggatctggtgagctgcgttagtaaagcggaagccgatgccgttacgctcatcgtgaagaacacggtgagtacctttctgccggatgcgctggtgaccatcacgggcggtttccgccgtggcaaaaagatgggccacgacatcgactttctgatcacgaatccgggcccgaaagaggatgacgaactgctccacaaagtggttgatctgctcaagaagcaaggtctgctgctgtactgcgacatcatcgagagcacgttcgtggaggaacaactgccaagtcgcaaaatcgacgccatggacaacttccagaagtgcttcgccattctcaagctgtaccagccgggcgtggataacagcagctataacacgagtaagaagagtgacatggccgaggttaaggattggaaagcgatccgtgtggatctggtgatcacgccattcgagcagtacgcctatgcgctgctcggttggacgggcagccgcgaatttggtcgcgatctgcgccgctatgcgagtcatgagcgcaagatgatcctcgacaaccatggcctctacgaccgcaaaaagcgcatctttctgaaagcgggcagcgaagaagagattttcgcgcatctgggtctggattatgtggagccgtgggaacgcaacgcg

SEQ ID NO: 458 - protein, 394 aa, synthetic construct
  REGION 1..394: note = Variant of terminal deoxynucleotidyl transferase
MHHHHHHGGSGHPPSNTPELEVPSVIARKGSQYSCQRKTTLNNYNKKFTDAFEIMAENYEFKENEIFCLEFLRAASLLKYLPFPVTRMKDIQGLPCIGDQVRDVIEEIIEEGESSRVKEVLNDERYKAFKQFTSVFGVGVKTSEKWFRMGLRTVEELKADKSLKLSKMQKAGFLYYEDLVSCVSKAEADAVTLIVKNTVSTFLPDALVTITGGFRRGKKMGHDIDFLITNPGPKEDDELLHKVVDLLKKQGLLLYCDIIESTFVEEQLPSRKIDAMDNFQKCFAILKLYQPGVDNSSYNTSKKSDMAEVKDWKAIRVDLVITPFEQYAYALLGWTGSREFGRDLRRYASHERKMILDNHGLYDRKKRIFLKAGSEEEIFAHLGLDYVEPWERNA

SEQ ID NO: 459 - DNA, 1182 bp, synthetic construct
  misc_feature 1..1182: note = Variant of terminal deoxynucleotidyl transferase
  source 1..1182: mol_type = other DNA
atgcaccatcatcatcatcatggcggtagcggccatccgccgagcaataccccggagctggaagtgccgagcgttatcgcccgcaaggttagtcagtacagctgccagcgcaagaccacgctgaataactacaacaaaaagtttaccgacgcgttcgagatcatggccgagaactacgaatttaaagagaacgaaatcttctgtctggaatttctgcgcgccgcgagtctgctgaaatatctgccgttcccggttacccgcatgaaagacatccaaggtctgccgtgcattggcgaccaagttcgtgacgtgatcgaggagatcatcgaagaaggcgagagcagccgtgttaaagaagttctcaatgacgagcgctacaaggcctttaagcagttcaccagcgtgttcggtgtgggcgtgaaaaccagcgaaaagtggtttcgtatgggcctccgtacggttgaagagctgaaggccgacaagagtctgaagctgagcaagatgcagaaggcgggctttctgtattacgaggatctggtgagctgcgttagtaaagcggaagccgatgccgttacgctcatcgtgaagaacacggtgagtacctttctgccggatgcgctggtgaccatcacgggcggtttccgccgtggcaaaaagatgggccacgacatcgactttctgatcacgaatccgggcccgaaagaggatgacgaactgctccacaaagtggttgatctgctcaagaagcaaggtctgctgctgtactgcgacatcatcgagagcacgttcgtggaggaatcgctgccaagtcgcaaaatcgacgccatggacaacttccagaagtgcttcgccattctcaagctgtaccagccgggcgtggataacagcagctataacacgagtaagaagagtgacatggccgaggttaaggattggaaagcgatccgtgtggatctggtgatcacgccattcgagcagtacgcctatgcgctgctcggttggacgggcagccgcgaatttggtcgcgatctgcgccgctatgcgagtcatgagcgcaagatgatcctcgacaaccatggcctctacgaccgcaaaaagcgcatctttctgaaagcgggcagcgaagaagagattttcgcgcatctgggtctggattatgtggagccgtgggaacgcaacgcg

SEQ ID NO: 460 - protein, 394 aa, synthetic construct
  REGION 1..394: note = Variant of terminal deoxynucleotidyl transferase
MHHHHHHGGSGHPPSNTPELEVPSVIARKVSQYSCQRKTTLNNYNKKFTDAFEIMAENYEFKENEIFCLEFLRAASLLKYLPFPVTRMKDIQGLPCIGDQVRDVIEEIIEEGESSRVKEVLNDERYKAFKQFTSVFGVGVKTSEKWFRMGLRTVEELKADKSLKLSKMQKAGFLYYEDLVSCVSKAEADAVTLIVKNTVSTFLPDALVTITGGFRRGKKMGHDIDFLITNPGPKEDDELLHKVVDLLKKQGLLLYCDIIESTFVEESLPSRKIDAMDNFQKCFAILKLYQPGVDNSSYNTSKKSDMAEVKDWKAIRVDLVITPFEQYAYALLGWTGSREFGRDLRRYASHERKMILDNHGLYDRKKRIFLKAGSEEEIFAHLGLDYVEPWERNA

SEQ ID NO: 461 - DNA, 1182 bp, synthetic construct
  misc_feature 1..1182: note = Variant of terminal deoxynucleotidyl transferase
  source 1..1182: mol_type = other DNA
atgcaccatcatcatcatcatggcggtagcggccatccgccgagcaataccccggagctggaagtgccgagcgttatcgcccgcaaggttagtcagtacagctgccagcgcaagaccacgctgaataactacaacaaaaagtttaccgacgcgttcgagatcatggccgagaactacgaatttaaagagaacgaaatcttctgtctggaatttctgcgcgccgcgagtctgctgaaatatctgccgttcccggttacccgcatgaaagacatccaaggtctgccgtgcattggcgaccaagttcgtgacgtgatcgaggagatcatcgaagaaggcgagagcagccgtgttaaagaagttctcaatgacgagcgctacaaggcctttaagcagttcaccagcgtgttcggtgtgggcgtgaaaaccagcgaaaagtggtttcgtatgggcctccgtacggttgaagagctgaaggccgacaagagtctgaagctgagcaagatgcagaaggcgggctttctgtattacgaggatctggtgagctgcgttagtaaagcggaagccgatgccgttacgctcatcgtgaagaacacggtgagtacctttctgccggatgcgctggtgaccatcacgggcggtttccgccgtggcaaaaagatgggccacgacatcgactttctgatcacgaatccgggcccgaaagaggatgacgaactgctccacaaagtggttgatctgctcaagaagcaaggtctgctgctgtactgcgacatcatcgagagcacgttcgtggaggaacaactgccaagtcgcaaaatcgacgccatggacaacttccagaagtgcttcgccattctcaagctgtaccagccgggcgtggatgctagcagctataacacgagtaagaagagtgacatggccgaggttaaggattggaaagcgatccgtgtggatctggtgatcacgccattcgagcagtacgcctatgcgctgctcggttggacgggcagccgcgaatttggtcgcgatctgcgccgctatgcgagtcatgagcgcaagatgatcctcgacaaccatggcctctacgaccgcaaaaagcgcatctttctgaaagcgggcagcgaagaagagattttcgcgcatctgggtctggattatgtggagccgtgggaacgcaacgcg

SEQ ID NO: 462 - protein, 394 aa, synthetic construct
  REGION 1..394: note = Variant of terminal deoxynucleotidyl transferase
MHHHHHHGGSGHPPSNTPELEVPSVIARKVSQYSCQRKTTLNNYNKKFTDAFEIMAENYEFKENEIFCLEFLRAASLLKYLPFPVTRMKDIQGLPCIGDQVRDVIEEIIEEGESSRVKEVLNDERYKAFKQFTSVFGVGVKTSEKWFRMGLRTVEELKADKSLKLSKMQKAGFLYYEDLVSCVSKAEADAVTLIVKNTVSTFLPDALVTITGGFRRGKKMGHDIDFLITNPGPKEDDELLHKVVDLLKKQGLLLYCDIIESTFVEEQLPSRKIDAMDNFQKCFAILKLYQPGVDASSYNTSKKSDMAEVKDWKAIRVDLVITPFEQYAYALLGWTGSREFGRDLRRYASHERKMILDNHGLYDRKKRIFLKAGSEEEIFAHLGLDYVEPWERNA

SEQ ID NO: 463 - DNA, 1182 bp, synthetic construct
  misc_feature 1..1182: note = Variant of terminal deoxynucleotidyl transferase
  source 1..1182: mol_type = other DNA
atgcaccatcatcatcatcatggcggtagcggccatccgccgagcaataccccggagctggaagtgccgagcgttatcgcccgcaaggttagtcagtacagctgccagcgcaagaccacgctgaataactacaacaaaaagtttaccgacgcgttcgagatcatggccgagaactacgaatttaaagagaacgaaatcttctgtctggaatttctgcgcgccgcgagtctgctgaaatatctgccgttcccggttacccgcatgaaagacatccaaggtctgccgtgcattggcgaccaagttcgtgacgtgatcgaggagatcatcgaagaaggcgagagcagccgtgttaaagaagttctcaatgacgagcgctacaaggcctttaagcagttcaccagcgtgttcggtgtgggcgtgaaaaccagcgaaaagtggtttcgtatgggcctccgtacggttgaagagctgaaggccgacaagagtctgaagctgagcaagatgcagaaggcgggctttctgtattacgaggatctggtgagctgcgttagtaaagcggaagccgctgccgttacgctcatcgtgaagaacacggtgagtacctttctgccggatgcgctggtgaccatcacgggcggtttccgccgtggcaaaaagatgggccacgacatcgactttctgatcacgaatccgggcccgaaagaggatgacgaactgctccacaaagtggttgatctgctcaagaagcaaggtctgctgctgtactgcgacatcatcgagagcacgttcgtggaggaacaactgccaagtcgcaaaatcgacgccatggacaacttccagaagtgcttcgccattctcaagctgtaccagccgggcgtggataacagcagctataacacgagtaagaagagtgacatggccgaggttaaggattggaaagcgatccgtgtggatctggtgatcacgccattcgagcagtacgcctatgcgctgctcggttggacgggcagccgcgaatttggtcgcgatctgcgccgctatgcgagtcatgagcgcaagatgatcctcgacaaccatggcctctacgaccgcaaaaagcgcatctttctgaaagcgggcagcgaagaagagattttcgcgcatctgggtctggattatgtggagccgtgggaacgcaacgcg

SEQ ID NO: 464 - protein, 394 aa, synthetic construct
  REGION 1..394: note = Variant of terminal deoxynucleotidyl transferase
MHHHHHHGGSGHPPSNTPELEVPSVIARKVSQYSCQRKTTLNNYNKKFTDAFEIMAENYEFKENEIFCLEFLRAASLLKYLPFPVTRMKDIQGLPCIGDQVRDVIEEIIEEGESSRVKEVLNDERYKAFKQFTSVFGVGVKTSEKWFRMGLRTVEELKADKSLKLSKMQKAGFLYYEDLVSCVSKAEAAAVTLIVKNTVSTFLPDALVTITGGFRRGKKMGHDIDFLITNPGPKEDDELLHKVVDLLKKQGLLLYCDIIESTFVEEQLPSRKIDAMDNFQKCFAILKLYQPGVDNSSYNTSKKSDMAEVKDWKAIRVDLVITPFEQYAYALLGWTGSREFGRDLRRYASHERKMILDNHGLYDRKKRIFLKAGSEEEIFAHLGLDYVEPWERNA

SEQ ID NO: 465 - DNA, 1182 bp, synthetic construct
  misc_feature 1..1182: note = Variant of terminal deoxynucleotidyl transferase
  source 1..1182: mol_type = other DNA
atgcaccatcatcatcatcatggcggtagcggccatccgccgagcaataccccggagctggaagtgccgagcgttatcgcccgcaaggttagtcagtacagctgccagcgcaagaccacgctgaataactacaacaaaaagtttaccgacgcgttcgagatcatggccgagaactacgaatttaaagagaacgaaatcttctgtctggaatttctgcgcgccgcgagtctgctgaaatatctgccgttcccggttacccgcatgaaagacatccaaggtctgccgtgcattggcgaccaagttcgtgacgtgatcgaggagatcatcgaagaaggcgagagcagccgtgttaaagaagttctcaatgacgagcgctacaaggcctttaagcagttcaccagcgtgttcggtgtgggcgtgaaaaccagcgaaaagtggtttcgtatgggcctccgtacggttgaagagctgaaggccgacaagagtctgaggctgagcaagatgcagaaggcgggctttctgtattacgaggatctggtgagctgcgttagtaaagcggaagccgatgccgttacgctcatcgtgaagaacacggtgagtacctttctgccggatgcgctggtgaccatcacgggcggtttccgccgtggcaaaaagatgggccacgacatcgactttctgatcacgaatccgggcccgaaagaggatgacgaactgctccacaaagtggttgatctgctcaagaagcaaggtctgctgctgtactgcgacatcatcgagagcacgttcgtggaggaacaactgccaagtcgcaaaatcgacgccatggacaacttccagaagtgcttcgccattctcaagctgtaccagccgggcgtggataacagcagctataacacgagtaagaagagtgacatggccgaggttaaggattggaaagcgatccgtgtggatctggtgatcacgccattcgagcagtacgcctatgcgctgctcggttggacgggcagccgcgaatttggtcgcgatctgcgccgctatgcgagtcatgagcgcaagatgatcctcgacaaccatggcctctacgaccgcaaaaagcgcatctttctgaaagcgggcagcgaagaagagattttcgcgcatctgggtctggattatgtggagccgtgggaacgcaacgcg

SEQ ID NO: 466 - protein, 394 aa, synthetic construct
  REGION 1..394: note = Variant of terminal deoxynucleotidyl transferase
MHHHHHHGGSGHPPSNTPELEVPSVIARKVSQYSCQRKTTLNNYNKKFTDAFEIMAENYEFKENEIFCLEFLRAASLLKYLPFPVTRMKDIQGLPCIGDQVRDVIEEIIEEGESSRVKEVLNDERYKAFKQFTSVFGVGVKTSEKWFRMGLRTVEELKADKSLRLSKMQKAGFLYYEDLVSCVSKAEADAVTLIVKNTVSTFLPDALVTITGGFRRGKKMGHDIDFLITNPGPKEDDELLHKVVDLLKKQGLLLYCDIIESTFVEEQLPSRKIDAMDNFQKCFAILKLYQPGVDNSSYNTSKKSDMAEVKDWKAIRVDLVITPFEQYAYALLGWTGSREFGRDLRRYASHERKMILDNHGLYDRKKRIFLKAGSEEEIFAHLGLDYVEPWERNA

SEQ ID NO: 467 - DNA, 1182 bp, synthetic construct
  misc_feature 1..1182: note = Variant of terminal deoxynucleotidyl transferase
  source 1..1182: mol_type = other DNA
atgcaccatcatcatcatcatggcggtagcggccatccgccgagcaataccccggagctggaagtgccgagcgttatcgcccgcaaggttagtcagtacagctgccagcgcaagaccacgctgaataactacaacaaaaagtttaccgacgcgttcgagatcatggccgagaactacgaatttaaagagaacgaaatcttctgtctggaatttctgcgcgccgcgagtctgctgaaatatctgccgttcccggttacccgcatgaaagacatccaaggtctgccgtgcattggcgaccaagttcgtgacgtgatcgaggagatcatcgaagaaggcgagagcagccgtgttaaagaagttctcaatgacgagcgctacaaggcctttaagctgttcaccagcgtgttcggtgtgggcgtgaaaaccagcgaaaagtggtttcgtatgggcctccgtacggttgaagagctgaaggccgacaagagtctgaagctgagcaagatgcagaaggcgggctttctgtattacgaggatctggtgagctgcgttagtaaagcggaagccgatgccgttacgctcatcgtgaagaacacggtgagtacctttctgccggatgcgctggtgaccatcacgggcggtttccgccgtggcaaaaagatgggccacgacatcgactttctgatcacgaatccgggcccgaaagaggatgacgaactgctccacaaagtggttgatctgctcaagaagcaaggtctgctgctgtactgcgacatcatcgagagcacgttcgtggaggaacaactgccaagtcgcaaaatcgacgccatggacaacttccagaagtgcttcgccattctcaagctgtaccagccgggcgtggataacagcagctataacacgagtaagaagagtgacatggccgaggttaaggattggaaagcgatccgtgtggatctggtgatcacgccattcgagcagtacgcctatgcgctgctcggttggacgggcagccgcgaatttggtcgcgatctgcgccgctatgcgagtcatgagcgcaagatgatcctcgacaaccatggcctctacgaccgcaaaaagcgcatctttctgaaagcgggcagcgaagaagagattttcgcgcatctgggtctggattatgtggagccgtgggaacgcaacgcg

SEQ ID NO: 468 - protein, 394 aa, synthetic construct
  REGION 1..394: note = Variant of terminal deoxynucleotidyl transferase
MHHHHHHGGSGHPPSNTPELEVPSVIARKVSQYSCQRKTTLNNYNKKFTDAFEIMAENYEFKENEIFCLEFLRAASLLKYLPFPVTRMKDIQGLPCIGDQVRDVIEEIIEEGESSRVKEVLNDERYKAFKLFTSVFGVGVKTSEKWFRMGLRTVEELKADKSLKLSKMQKAGFLYYEDLVSCVSKAEADAVTLIVKNTVSTFLPDALVTITGGFRRGKKMGHDIDFLITNPGPKEDDELLHKVVDLLKKQGLLLYCDIIESTFVEEQLPSRKIDAMDNFQKCFAILKLYQPGVDNSSYNTSKKSDMAEVKDWKAIRVDLVITPFEQYAYALLGWTGSREFGRDLRRYASHERKMILDNHGLYDRKKRIFLKAGSEEEIFAHLGLDYVEPWERNA

SEQ ID NO: 469 - DNA, 1182 bp, synthetic construct
  misc_feature 1..1182: note = Variant of terminal deoxynucleotidyl transferase
  source 1..1182: mol_type = other DNA
atgcaccatcatcatcatcatggcggtagcggccatccgccgagcaataccccggagctggaagtgccgagcgttatcgcccgcaaggttagtcagtaccattgccagcgcaagaccacgctgaataactacaacaaaaagtttaccgacgcgttcgagatcatggccgagaactacgaatttaaagagaacgaaatcttctgtctggaatttctgcgcgccgcgagtctgctgaaatatctgccgttcccggttacccgcatgaaagacatccaaggtctgccgtgcattggcgaccaagttcgtgacgtgatcgaggagatcatcgaagaaggcgagagcagccgtgttaaagaagttctcaatgacgagcgctacaaggcctttaagcagttcaccagcgtgttcggtgtgggcgtgaaaaccagcgaaaagtggtttcgtatgggcctccgtacggttgaagagctgaaggccgacaagagtctgaagctgagcaagatgcagaaggcgggctttctgtattacgaggatctggtgagctgcgttagtaaagcggaagccgatgccgttacgctcatcgtgaagaacacggtgagtacctttctgccggatgcgctggtgaccatcacgggcggtttccgccgtggcaaaaagatgggccacgacatcgactttctgatcacgaatccgggcccgaaagaggatgacgaactgctccacaaagtggttgatctgctcaagaagcaaggtctgctgctgtactgcgacatcatcgagagcacgttcgtggaggaacaactgccaagtcgcaaaatcgacgccatggacaacttccagaagtgcttcgccattctcaagctgtaccagccgggcgtggataacagcagctataacacgagtaagaagagtgacatggccgaggttaaggattggaaagcgatccgtgtggatctggtgatcacgccattcgagcagtacgcctatgcgctgctcggttggacgggcagccgcgaatttggtcgcgatctgcgccgctatgcgagtcatgagcgcaagatgatcctcgacaaccatggcctctacgaccgcaaaaagcgcatctttctgaaagcgggcagcgaagaagagattttcgcgcatctgggtctggattatgtggagccgtgggaacgcaacgcg

SEQ ID NO: 470 - protein, 394 aa, synthetic construct
  REGION 1..394: note = Variant of terminal deoxynucleotidyl transferase
MHHHHHHGGSGHPPSNTPELEVPSVIARKVSQYHCQRKTTLNNYNKKFTDAFEIMAENYEFKENEIFCLEFLRAASLLKYLPFPVTRMKDIQGLPCIGDQVRDVIEEIIEEGESSRVKEVLNDERYKAFKQFTSVFGVGVKTSEKWFRMGLRTVEELKADKSLKLSKMQKAGFLYYEDLVSCVSKAEADAVTLIVKNTVSTFLPDALVTITGGFRRGKKMGHDIDFLITNPGPKEDDELLHKVVDLLKKQGLLLYCDIIESTFVEEQLPSRKIDAMDNFQKCFAILKLYQPGVDNSSYNTSKKSDMAEVKDWKAIRVDLVITPFEQYAYALLGWTGSREFGRDLRRYASHERKMILDNHGLYDRKKRIFLKAGSEEEIFAHLGLDYVEPWERNA

SEQ ID NO: 471 - DNA, 1182 bp, synthetic construct
  misc_feature 1..1182: note = Variant of terminal deoxynucleotidyl transferase
  source 1..1182: mol_type = other DNA
atgcaccatcatcatcatcatggcggtagcggccatccgccgagcaataccccggagctggaagtgccgagcgttatcgcccgcaaggttagtcagtacagctgccagcgcaagaccacgctgaataacgataacaaaaagtttaccgacgcgttcgagatcatggccgagaactacgaatttaaagagaacgaaatcttctgtctggaatttctgcgcgccgcgagtctgctgaaatatctgccgttcccggttacccgcatgaaagacatccaaggtctgccgtgcattggcgaccaagttcgtgacgtgatcgaggagatcatcgaagaaggcgagagcagccgtgttaaagaagttctcaatgacgagcgctacaaggcctttaagcagttcaccagcgtgttcggtgtgggcgtgaaaaccagcgaaaagtggtttcgtatgggcctccgtacggttgaagagctgaaggccgacaagagtctgaagctgagcaagatgcagaaggcgggctttctgtattacgaggatctggtgagctgcgttagtaaagcggaagccgatgccgttacgctcatcgtgaagaacacggtgagtacctttctgccggatgcgctggtgaccatcacgggcggtttccgccgtggcaaaaagatgggccacgacatcgactttctgatcacgaatccgggcccgaaagaggatgacgaactgctccacaaagtggttgatctgctcaagaagcaaggtctgctgctgtactgcgacatcatcgagagcacgttcgtggaggaacaactgccaagtcgcaaaatcgacgccatggacaacttccagaagtgcttcgccattctcaagctgtaccagccgggcgtggataacagcagctataacacgagtaagaagagtgacatggccgaggttaaggattggaaagcgatccgtgtggatctggtgatcacgccattcgagcagtacgcctatgcgctgctcggttggacgggcagccgcgaatttggtcgcgatctgcgccgctatgcgagtcatgagcgcaagatgatcctcgacaaccatggcctctacgaccgcaaaaagcgcatctttctgaaagcgggcagcgaagaagagattttcgcgcatctgggtctggattatgtggagccgtgggaacgcaacgcg

SEQ ID NO: 472 - protein, 394 aa, synthetic construct
  REGION 1..394: note = Variant of terminal deoxynucleotidyl transferase
MHHHHHHGGSGHPPSNTPELEVPSVIARKVSQYSCQRKTTLNNDNKKFTDAFEIMAENYEFKENEIFCLEFLRAASLLKYLPFPVTRMKDIQGLPCIGDQVRDVIEEIIEEGESSRVKEVLNDERYKAFKQFTSVFGVGVKTSEKWFRMGLRTVEELKADKSLKLSKMQKAGFLYYEDLVSCVSKAEADAVTLIVKNTVSTFLPDALVTITGGFRRGKKMGHDIDFLITNPGPKEDDELLHKVVDLLKKQGLLLYCDIIESTFVEEQLPSRKIDAMDNFQKCFAILKLYQPGVDNSSYNTSKKSDMAEVKDWKAIRVDLVITPFEQYAYALLGWTGSREFGRDLRRYASHERKMILDNHGLYDRKKRIFLKAGSEEEIFAHLGLDYVEPWERNA

SEQ ID NO: 473 - DNA, 1182 bp, synthetic construct
  misc_feature 1..1182: note = Variant of terminal deoxynucleotidyl transferase
  source 1..1182: mol_type = other DNA
atgcaccatcatcatcatcatggcggtagcggccatccgccgagcaataccccggagctggaagtgccgagcgttatcgcccgcaaggttagtcagtacagctgccagcgcaagaccacgctgaataactacaacaaaaagtttaccgacgcgttcgagatcatggccgagaactacgaatttaaagagaacgaaatcttctgtctggaatttctgcgcgccgcgagtctgctgaaatatctgccgttcccggttacccgcatgaaagacatccaaggtctgccgtgcattggcgaccaagttcgtgacgtgatcgaggagatcatcgaagaaggcgagagcagccgtgttaaagaagttctcaatgacgagcgctacaaggcctttaagcagttcaccagcgtgttcggtgtgggcgtgaaaaccagcgaaaagtggtttcgtatgggcctccgtacggttgaagagctgaaggccgacaagagtctgaagctgagcaagatgcagaaggcgggctttctgtattacgaggatctggtgagctgcgttagtaaagcggaagccgatgccgttacgctcatcgtgaagaacacggtgagtacctttctgccggatgcgctggtgaccatcacgggcggtttccgccgtggcaaagggatgggccacgacatcgactttctgatcacgaatccgggcccgaaagaggatgacgaactgctccacaaagtggttgatctgctcaagaagcaaggtctgctgctgtactgcgacatcatcgagagcacgttcgtggaggaacaactgccaagtcgcaaaatcgacgccatggacaacttccagaagtgcttcgccattctcaagctgtaccagccgggcgtggataacagcagctataacacgagtaagaagagtgacatggccgaggttaaggattggaaagcgatccgtgtggatctggtgatcacgccattcgagcagtacgcctatgcgctgctcggttggacgggcagccgcgaatttggtcgcgatctgcgccgctatgcgagtcatgagcgcaagatgatcctcgacaaccatggcctctacgaccgcaaaaagcgcatctttctgaaagcgggcagcgaagaagagattttcgcgcatctgggtctggattatgtggagccgtgggaacgcaacgcg

SEQ ID NO: 474 - protein, 394 aa, synthetic construct
  REGION 1..394: note = Variant of terminal deoxynucleotidyl transferase
MHHHHHHGGSGHPPSNTPELEVPSVIARKVSQYSCQRKTTLNNYNKKFTDAFEIMAENYEFKENEIFCLEFLRAASLLKYLPFPVTRMKDIQGLPCIGDQVRDVIEEIIEEGESSRVKEVLNDERYKAFKQFTSVFGVGVKTSEKWFRMGLRTVEELKADKSLKLSKMQKAGFLYYEDLVSCVSKAEADAVTLIVKNTVSTFLPDALVTITGGFRRGKGMGHDIDFLITNPGPKEDDELLHKVVDLLKKQGLLLYCDIIESTFVEEQLPSRKIDAMDNFQKCFAILKLYQPGVDNSSYNTSKKSDMAEVKDWKAIRVDLVITPFEQYAYALLGWTGSREFGRDLRRYASHERKMILDNHGLYDRKKRIFLKAGSEEEIFAHLGLDYVEPWERNA

SEQ ID NO: 475 - DNA, 1182 bp, synthetic construct
  misc_feature 1..1182: note = Variant of terminal deoxynucleotidyl transferase
  source 1..1182: mol_type = other DNA
atgcaccatcatcatcatcatggcggtagcggccatccgccgagcaataccccggagctggaagtgccgagcgttatcgcccgcaaggttagtcagtacagctgccagcgcaagaccacgctgaataactacaacaaaaagtttaccgacgcgttcgagatcatggccgagaactacgaatttaaagagaacgaaatcttctgtctggaatttctgcgcgccgcgagtctgctgaaatatctgccgttcccggttacccgcatgaaagacatccaaggtctgccgtgcattggcgaccaagttcgtgacgtgatcgaggagatcatcgaagaaggcgagagcagccgtgttaaagaagttctcaatgacgagcgctacaaggcctttaagcagttcaccagcgtgttcggtgtgggcgtgaaaaccagcgaaaagtggtttcgtatgggcctccgtacggttgaagagctgaaggccgacaagagtctgaagctgagcaagatgcagaaggcgggctttctgtattacgaggatctggtgagctgcgttagtaaagcggaagccgatgccgttacgctcatcgtgaagaacacggtgagtacctttctgccggatgcgggggtgaccatcacgggcggtttccgccgtggcaaaaagatgggccacgacatcgactttctgatcacgaatccgggcccgaaagaggatgacgaactgctccacaaagtggttgatctgctcaagaagcaaggtctgctgctgtactgcgacatcatcgagagcacgttcgtggaggaacaactgccaagtcgcaaaatcgacgccatggacaacttccagaagtgcttcgccattctcaagctgtaccagccgggcgtggataacagcagctataacacgagtaagaagagtgacatggccgaggttaaggattggaaagcgatccgtgtggatctggtgatcacgccattcgagcagtacgcctatgcgctgctcggttggacgggcagccgcgaatttggtcgcgatctgcgccgctatgcgagtcatgagcgcaagatgatcctcgacaaccatggcctctacgaccgcaaaaagcgcatctttctgaaagcgggcagcgaagaagagattttcgcgcatctgggtctggattatgtggagccgtgggaacgcaacgcg

SEQ ID NO: 476 - protein, 394 aa, synthetic construct
  REGION 1..394: note = Variant of terminal deoxynucleotidyl transferase
MHHHHHHGGSGHPPSNTPELEVPSVIARKVSQYSCQRKTTLNNYNKKFTDAFEIMAENYEFKENEIFCLEFLRAASLLKYLPFPVTRMKDIQGLPCIGDQVRDVIEEIIEEGESSRVKEVLNDERYKAFKQFTSVFGVGVKTSEKWFRMGLRTVEELKADKSLKLSKMQKAGFLYYEDLVSCVSKAEADAVTLIVKNTVSTFLPDAGVTITGGFRRGKKMGHDIDFLITNPGPKEDDELLHKVVDLLKKQGLLLYCDIIESTFVEEQLPSRKIDAMDNFQKCFAILKLYQPGVDNSSYNTSKKSDMAEVKDWKAIRVDLVITPFEQYAYALLGWTGSREFGRDLRRYASHERKMILDNHGLYDRKKRIFLKAGSEEEIFAHLGLDYVEPWERNA

SEQ ID NO: 477 - DNA, 1182 bp, synthetic construct
  misc_feature 1..1182: note = Variant of terminal deoxynucleotidyl transferase
  source 1..1182: mol_type = other DNA
atgcaccatcatcatcatcatggcggtagcggccatccgccgagcaataccccggagctggaagtgccgagcgttatcgcccgcaaggttagtcagtacagctgccagcgcaagaccacgctgaataactacaacaaaaagtttaccgacgcgttcgagatcatggccgagaactacgaatttaaagagaacgaaatcttctgtctggaatttctgcgcgccgcgagtctgctgaaatatctgccgttcccggttacccgcatgaaagacatccaaggtctgccgtgcattggcgaccaagttcgtgacgtgatcgaggagatcatcgaagaaggcgagagcagccgtgttaaagaagttctcaatgacgagcgctacaaggcctttaagcagttcaccagcgtgttcggtgtgggcgtgaaaaccagcgaaaagtggtttcgtatgggcctccgtacggttgaagagctgaaggccgacaagagtctgaagctgagcaagatgcagaaggcgggctttctgtattacgaggatctggtgagctgcgttagtaaagcggaagccgatgccgttacgctcatcgtgaagaacacggtgagtacctttctgccggatgcgctggtgaccatcacgggcggtttccgccgtggcaaaaagatgggccacgacatcgactttctgatcacgaatccgggcccgaaagaggatgacgaactgctccacaaagtggttgatctgctcaagaagcaaggtctgctgctgtactgcgacatcatcgagagcacgttcgtggaggaacaactgccaagtcgcaaaatcgacgccatggacaacttccagaagtgcttcgccattctcaagctgtaccagcagggcgtggataacagcagctataacacgagtaagaagagtgacatggccgaggttaaggattggaaagcgatccgtgtggatctggtgatcacgccattcgagcagtacgcctatgcgctgctcggttggacgggcagccgcgaatttggtcgcgatctgcgccgctatgcgagtcatgagcgcaagatgatcctcgacaaccatggcctctacgaccgcaaaaagcgcatctttctgaaagcgggcagcgaagaagagattttcgcgcatctgggtctggattatgtggagccgtgggaacgcaacgcg

SEQ ID NO: 478 - protein, 394 aa, synthetic construct
  REGION 1..394: note = Variant of terminal deoxynucleotidyl transferase
MHHHHHHGGSGHPPSNTPELEVPSVIARKVSQYSCQRKTTLNNYNKKFTDAFEIMAENYEFKENEIFCLEFLRAASLLKYLPFPVTRMKDIQGLPCIGDQVRDVIEEIIEEGESSRVKEVLNDERYKAFKQFTSVFGVGVKTSEKWFRMGLRTVEELKADKSLKLSKMQKAGFLYYEDLVSCVSKAEADAVTLIVKNTVSTFLPDALVTITGGFRRGKKMGHDIDFLITNPGPKEDDELLHKVVDLLKKQGLLLYCDIIESTFVEEQLPSRKIDAMDNFQKCFAILKLYQQGVDNSSYNTSKKSDMAEVKDWKAIRVDLVITPFEQYAYALLGWTGSREFGRDLRRYASHERKMILDNHGLYDRKKRIFLKAGSEEEIFAHLGLDYVEPWERNA

SEQ ID NO: 479 - DNA, 1182 bp, synthetic construct
  misc_feature 1..1182: note = Variant of terminal deoxynucleotidyl transferase
  source 1..1182: mol_type = other DNA
atgcaccatcatcatcatcatggcggtagcggccatccgccgagcaataccccggagctggaagtgccgagcgttatcgcccgcaaggttagtcagtacagctgccagcgcaagaccacgctgaataactacaacaaaaagtttaccgacgcgttcgagatcatggctgagaactacgaatttaaagagaacgaaatcttctgtctggaatttctgcgcgccgcgagtctgctgaaatatctgccgttcccggttacccgcatgaaagacatccaaggtctgccgtgcattggcgaccaagttcgtgacgtgatcgaggagatcatcgaagaaggcgagagcagccgtgttaaagaagttctcaatgacgagcgctacaaggcctttaagcagttcaccagcgtgttcggtgtgggcgtgaaaaccagcgaaaagtggtttcgtatgggcctccgtacggttgaagagctgaaggccgacaagagtctgaagctgagcaagatgcagaaggcgggctttctgtattacgaggatctggtgagctgcgttagtaaagcggaagccgatgccgttacgctcatcgtgaagaacacggtgagtacctttctgccggatgcgctggtgaccatcacgggcggtttccgccgtggcaaaaagatgggccacgacatcgactttctgatcacgaatccgggcccgaaagaggatgacgaactgctccacaaagtggttgatctgctcaagaagcaaggtctgctgctgtactgcgacatcatcgagagcacgttcgtggaggaacaactgccaagtcgcaaaatcgacgccatggacaacttccagaagtgcttcgccattctcaagctgtaccagccgggcgtggataacagcagctatgtgacgagtaagaagagtgacatggccgaggttaaggattggaaagcgatccgtgtggatctggtgatcacgccattcgagcagtacgcctatgcgctgctcggttggacgggcagccgcgaatttggtcgcgatctgcgccgctatgcgagtcatgagcgcaagatgatcctcgacaaccatggcctctacgaccgcaaaaagcgcatctttctgaaagcgggcagcgaagaagagattttcgcgcatctgggtctggattatgtggagccgtgggaacgcaacgcg

SEQ ID NO: 480 - protein, 394 aa, synthetic construct
  REGION 1..394: note = Variant of terminal deoxynucleotidyl transferase
MHHHHHHGGSGHPPSNTPELEVPSVIARKVSQYSCQRKTTLNNYNKKFTDAFEIMAENYEFKENEIFCLEFLRAASLLKYLPFPVTRMKDIQGLPCIGDQVRDVIEEIIEEGESSRVKEVLNDERYKAFKQFTSVFGVGVKTSEKWFRMGLRTVEELKADKSLKLSKMQKAGFLYYEDLVSCVSKAEADAVTLIVKNTVSTFLPDALVTITGGFRRGKKMGHDIDFLITNPGPKEDDELLHKVVDLLKKQGLLLYCDIIESTFVEEQLPSRKIDAMDNFQKCFAILKLYQPGVDNSSYVTSKKSDMAEVKDWKAIRVDLVITPFEQYAYALLGWTGSREFGRDLRRYASHERKMILDNHGLYDRKKRIFLKAGSEEEIFAHLGLDYVEPWERNA

SEQ ID NO: 481 - DNA, 1182 bp, synthetic construct
  misc_feature 1..1182: note = Variant of terminal deoxynucleotidyl transferase
  source 1..1182: mol_type = other DNA
atgcaccatcatcatcatcatggcggtagcggccatccgccgagcaataccccggagctggaagtgccgagcgttatcgcccgcaaggttagtcagtacagctgccagcgcaagaccacgctgaataactacaacaaaaagtttaccgacgcgttcgagatcatggccgagaactacgaatttaaagagaacgaaatcttctgtctggaatttctgcgcgccgcgagtctgctgaaatatctgccgttcccggttacccgcatgaaagacatccaaggtctgccgtgcattggcgaccaagttcgtgacgtgatcgaggagatcatcgaagaaggcgagagcagccgtgttaaagaagttctcaatgacgagcgctacaaggcctttaagcagttcaccagcgtgttcggtgtgggcgtgaaaaccagcgaaaagtggtttcgtatgggcctccgtacggttgaagagctgaaggccgacaagagtctgaagctgagcaagatgcagaaggcgggctttctgtattacgaggatctggtgagctgcgttagtaaagcggaagccgatgccgttacgctcatcgtgaagaacacggtgagtacctttctgccggatgcgctggtgaccatcacgggcggtttccgccgtggcaaaaagatgggccacgacatcgactttctgatcacgaatccgggcccgaaagaggatgacgaactgctccacaaagtggttgatctgctcaagaagcaaggtctgctgctgtactgcgacatcatcgagagcacgttcgtggaggaacaactgccaagtcgcaaaatcgacgccatggacaacttccagaagtgcttcgccattctcaagctgtaccagccgggcgtggataacagcagctataacacgagtaagaagagtgacatggccgaggttaaggattggaaagcgatccgtgtggatctggtgatcacgccattcgagcagtacgcctatgcgctgctcggttggacgggcagccgcgaatttggtcgcgatctgcgccgctatgcgagtcatgagcgctttatgatcctcgacaaccatggcctctacgaccgcaaaaagcgcatctttctgaaagcgggcagcgaagaagagattttcgcgcatctgggtctggattatgtggagccgtgggaacgcaacgcg

SEQ ID NO: 482 - protein, 394 aa, synthetic construct
  REGION 1..394: note = Variant of terminal deoxynucleotidyl transferase
MHHHHHHGGSGHPPSNTPELEVPSVIARKVSQYSCQRKTTLNNYNKKFTDAFEIMAENYEFKENEIFCLEFLRAASLLKYLPFPVTRMKDIQGLPCIGDQVRDVIEEIIEEGESSRVKEVLNDERYKAFKQFTSVFGVGVKTSEKWFRMGLRTVEELKADKSLKLSKMQKAGFLYYEDLVSCVSKAEADAVTLIVKNTVSTFLPDALVTITGGFRRGKKMGHDIDFLITNPGPKEDDELLHKVVDLLKKQGLLLYCDIIESTFVEEQLPSRKIDAMDNFQKCFAILKLYQPGVDNSSYNTSKKSDMAEVKDWKAIRVDLVITPFEQYAYALLGWTGSREFGRDLRRYASHERFMILDNHGLYDRKKRIFLKAGSEEEIFAHLGLDYVEPWERNA

SEQ ID NO: 483 - DNA, 1182 bp, synthetic construct
  misc_feature 1..1182: note = Variant of terminal deoxynucleotidyl transferase
  source 1..1182: mol_type = other DNA
atgcaccatcatcatcatcatggcggtagcggccatccgccgagcaataccccggagctggaagtgccgagcgttatcgcccgcaaggttagtcagtacagctgccagcgcaagaccacgctgaataactacaacaaaaagtttaccgacgcgttcgagatcatggccgagaactacgaatttaaagagaacgaaatcttctgtctggaatttctgcgcgccgcgagtctgctgaaatatctgccgttcccggttacccgcatgaaagacatccaaggtctgccgtgcattggcgaccaagttcgtgacgtgatcgaggagatcatcgaagaaggctgtagcagccgtgttaaagaagttctcaatgacgagcgctacaaggcctttaagcagttcaccagcgtgttcggtgtgggcgtgaaaaccagcgaaaagtggtttcgtatgggcctccgtacggttgaagagctgaaggccgacaagagtctgaagctgagcaagatgcagaaggcgggctttctgtattacgaggatctggtgagctgcgttagtaaagcggaagccgatgccgttacgctcatcgtgaagaacacggtgagtacctttctgccggatgcgctggtgaccatcacgggcggtttccgccgtggcaaaaagatgggccacgacatcgactttctgatcacgaatccgggcccgaaagaggatgacgaactgctccacaaagtggttgatctgctcaagaagcaaggtctgctgctgtactgcgacatcatcgagagcacgttcgtggaggaacaactgccaagtcgcaaaatcgacgccatggacaacttccagaagtgcttcgccattctcaagctgtaccagccgggcgtggataacagcagctataacacgagtaagaagagtgacatggccgaggttaaggattggaaagcgatccgtgtggatctggtgatcacgccattcgagcagtacgcctatgcgctgctcggttggacgggcagccgcgaatttggtcgcgatctgcgccgctatgcgagtcatgagcgcaagatgatcctcgacaaccatggcctctacgaccgcaaaaagcgcatctttctgaaagcgggcagcgaagaagagattttcgcgcatctgggtctggattatgtggagccgtgggaacgcaacgcg

SEQ ID NO: 484 - protein, 394 aa, synthetic construct
  REGION 1..394: note = Variant of terminal deoxynucleotidyl transferase
MHHHHHHGGSGHPPSNTPELEVPSVIARKVSQYSCQRKTTLNNYNKKFTDAFEIMAENYEFKENEIFCLEFLRAASLLKYLPFPVTRMKDIQGLPCIGDQVRDVIEEIIEEGCSSRVKEVLNDERYKAFKQFTSVFGVGVKTSEKWFRMGLRTVEELKADKSLKLSKMQKAGFLYYEDLVSCVSKAEADAVTLIVKNTVSTFLPDALVTITGGFRRGKKMGHDIDFLITNPGPKEDDELLHKVVDLLKKQGLLLYCDIIESTFVEEQLPSRKIDAMDNFQKCFAILKLYQPGVDNSSYNTSKKSDMAEVKDWKAIRVDLVITPFEQYAYALLGWTGSREFGRDLRRYASHERKMILDNHGLYDRKKRIFLKAGSEEEIFAHLGLDYVEPWERNA

SEQ ID NO: 485 - DNA, 1182 bp, synthetic construct
  misc_feature 1..1182: note = Variant of terminal deoxynucleotidyl transferase
  source 1..1182: mol_type = other DNA
atgcaccatcatcatcatcatggcggtagcggccatccgccgagcaataccccggagctggaagtgccgagcgttatcgcccgcaaggttagtcagtacagctgccagcgcaagaccacgctgaataactacaacaaaaagtttaccgacgcgttcgagatcatggccgagaactacgaatttaaagagaacgaaatcttctgtctggaatttctgcgcgccgcgagtctgctgaaatatctgccgttcccggttacccgcatgaaagacatccaaggtctgccgtgcattggcgaccaagttcgtgacgtgatcgaggagatcatcgaagaaggcgagagcagccgtgttaaagaagttctcaatgacgagcgctacaaggcctttaagcagttcaccagcgtgttcggtgtgggcgtgaaaaccagcgaaaagtggtttcgtatgggcctccgtacggttgaagagctgaaggccgacaagagtctgaagctgagcaagatgcagaaggcgggctttctgtattacgaggatctggtgagctgcgttagtaaagcggaagccgatgccgttacgctcatcgtgaagaacacggtgagtacctttctgccggatgcgctggtgaccatcacgggcggtttccgccgtggcaaaaagatgggccacgacatcgactttctgatcacgaatccgggcccgaaagaggatgacgaactgctccacaaagtggttgatctgctcaagaagcaaggtctgctgctgtactgcgacatcatcgagagcacgttcgtggaggaacaactgccaagtcgcaaaatcgacgccatggacaacttccagaagtgcttcgccattctcaagctgtaccagccgggcgtggataacagcagctataacacgagtaagaagagtgacatggccgaggttaaggattggaaagcgatccgtgtggatctggtgatcacgccattcgagcagtacgcctatgcgctgctcggttggacgggcagccgcgaatttggtcgcgatctgcgccgctatgcgagtcatgagcgcaagatgatcctcgacaaccatggcctctacgaccgcaaaaagcgcttgtttctgaaagcgggcagcgaagaagagattttcgcgcatctgggtctggattatgtggagccgtgggaacgcaacgcg

SEQ ID NO: 486 - protein, 394 aa, synthetic construct
  REGION 1..394: note = Variant of terminal deoxynucleotidyl transferase
MHHHHHHGGSGHPPSNTPELEVPSVIARKVSQYSCQRKTTLNNYNKKFTDAFEIMAENYEFKENEIFCLEFLRAASLLKYLPFPVTRMKDIQGLPCIGDQVRDVIEEIIEEGESSRVKEVLNDERYKAFKQFTSVFGVGVKTSEKWFRMGLRTVEELKADKSLKLSKMQKAGFLYYEDLVSCVSKAEADAVTLIVKNTVSTFLPDALVTITGGFRRGKKMGHDIDFLITNPGPKEDDELLHKVVDLLKKQGLLLYCDIIESTFVEEQLPSRKIDAMDNFQKCFAILKLYQPGVDNSSYNTSKKSDMAEVKDWKAIRVDLVITPFEQYAYALLGWTGSREFGRDLRRYASHERKMILDNHGLYDRKKRLFLKAGSEEEIFAHLGLDYVEPWERNA

SEQ ID NO: 487 - DNA, 1182 bp, synthetic construct
  misc_feature 1..1182: note = Variant of terminal deoxynucleotidyl transferase
  source 1..1182: mol_type = other DNA
atgcaccatcatcatcatcatggcggtagcggccatccgccgagcaataccccggagctggaagtgccgagcgttatcgcccgcaaggttagtcagtacagctgccagcgcaagaccacgctgaataactacaacaaaaagtttaccgacgcgttcgagatcatggccgagaactacgaatttaaagagaacgaaatcttctgtctggaatttctgcgcgccgcgagtctgctgaaatatctgccgttcccggttacccgcatgaaagacatccaaggtctgccgtgcattggcgaccaagttcgtgacgtgatcgaggagatcatcgaagaaggcgagagcagccgtgttaaagaagttctcaatgacgagcgctacaaggcctttaagcagttcaccagcgtgttcggtgtgggcgtgaaaaccagcgaaaagtggtttcgtatgggcctccgtacggttgaagagctgaaggccgacaagagtctgaagctgagcaagatgcagaaggcgggctttctgtattacgaggatctggtgagctgcgttagtaaagcggaagccgatgccgttacgctcatcgtgaagaacacggtgagtacctttctgccggatgcgctggtgaccatcacgggcggtttccgccgtggcaaaaagatgggccacgacatcgactttctgatcacgaatccgggcccgaaagaggatgacgaactgctccacaaagtggttgatctgctcaagaagcaaggtctgctgctgtactgcgacatcatcgagagcacgttcgtggaggaacaactgccaagtcgcaaacaggacgccatggacaacttccagaagtgcttcgccattctcaagctgtaccagccgggcgtggataacagcagctataacacgagtaagaagagtgacatggccgaggttaaggattggaaagcgatccgtgtggatctggtgatcacgccattcgagcagtacgcctatgcgctgctcggttggacgggcagccgcgaatttggtcgcgatctgcgccgctatgcgagtcatgagcgcaagatgatcctcgacaaccatggcctctacgaccgcaaaaagcgcatctttctgaaagcgggcagcgaagaagagattttcgcgcatctgggtctggattatgtggagccgtgggaacgcaacgcg

SEQ ID NO: 488 - protein, 394 aa, synthetic construct
  REGION 1..394: note = Variant of terminal deoxynucleotidyl transferase
MHHHHHHGGSGHPPSNTPELEVPSVIARKVSQYSCQRKTTLNNYNKKFTDAFEIMAENYEFKENEIFCLEFLRAASLLKYLPFPVTRMKDIQGLPCIGDQVRDVIEEIIEEGESSRVKEVLNDERYKAFKQFTSVFGVGVKTSEKWFRMGLRTVEELKADKSLKLSKMQKAGFLYYEDLVSCVSKAEADAVTLIVKNTVSTFLPDALVTITGGFRRGKKMGHDIDFLITNPGPKEDDELLHKVVDLLKKQGLLLYCDIIESTFVEEQLPSRKQDAMDNFQKCFAILKLYQPGVDNSSYNTSKKSDMAEVKDWKAIRVDLVITPFEQYAYALLGWTGSREFGRDLRRYASHERKMILDNHGLYDRKKRIFLKAGSEEEIFAHLGLDYVEPWERNA

SEQ ID NO: 489 - DNA, 1182 bp, synthetic construct
  misc_feature 1..1182: note = Variant of terminal deoxynucleotidyl transferase
  source 1..1182: mol_type = other DNA
atgcaccatcatcatcatcatggcggtagcggccatccgccgggtaataccccggagctggaagtgccgagcgttatcgcccgcaaggttagtcagtacagctgccagcgcaagaccacgctgaataactacaacaaaaagtttaccgacgcgttcgagatcatggccgagaactacgaatttaaagagaacgaaatcttctgtctggaatttctgcgcgccgcgagtctgctgaaatatctgccgttcccggttacccgcatgaaagacatccaaggtctgccgtgcattggcgaccaagttcgtgacgtgatcgaggagatcatcgaagaaggcgagagcagccgtgttaaagaagttctcaatgacgagcgctacaaggcctttaagcagttcaccagcgtgttcggtgtgggcgtgaaaaccagcgaaaagtggtttcgtatgggcctccgtacggttgaagagctgaaggccgacaagagtctgaagctgagcaagatgcagaaggcgggctttctgtattacgaggatctggtgagctgcgttagtaaagcggaagccgatgccgttacgctcatcgtgaagaacacggtgagtacctttctgccggatgcgctggtgaccatcacgggcggtttccgccgtggcaaaaagatgggccacgacatcgactttctgatcacgaatccgggcccgaaagaggatgacgaactgctccacaaagtggttgatctgctcaagaagcaaggtctgctgctgtactgcgacatcatcgagagcacgttcgtggaggaacaactgccaagtcgcaaaatcgacgccatggacaacttccagaagtgcttcgccattctcaagctgtaccagccgggcgtggataacagcagctataacacgagtaagaagagtgacatggccgaggttaaggattggaaagcgatccgtgtggatctggtgatcacgccattcgagcagtacgcctatgcgctgctcggttggacgggcagccgcgaatttggtcgcgatctgcgccgctatgcgagtcatgagcgcaagatgatcctcgacaaccatggcctctacgaccgcaaaaagcgcatctttctgaaagcgggcagcgaagaagagattttcgcgcatctgggtctggattatgtggagccgtgggaacgcaacgcg

SEQ ID NO: 490 - protein, 394 aa, synthetic construct
  REGION 1..394: note = Variant of terminal deoxynucleotidyl transferase
MHHHHHHGGSGHPPGNTPELEVPSVIARKVSQYSCQRKTTLNNYNKKFTDAFEIMAENYEFKENEIFCLEFLRAASLLKYLPFPVTRMKDIQGLPCIGDQVRDVIEEIIEEGESSRVKEVLNDERYKAFKQFTSVFGVGVKTSEKWFRMGLRTVEELKADKSLKLSKMQKAGFLYYEDLVSCVSKAEADAVTLIVKNTVSTFLPDALVTITGGFRRGKKMGHDIDFLITNPGPKEDDELLHKVVDLLKKQGLLLYCDIIESTFVEEQLPSRKIDAMDNFQKCFAILKLYQPGVDNSSYNTSKKSDMAEVKDWKAIRVDLVITPFEQYAYALLGWTGSREFGRDLRRYASHERKMILDNHGLYDRKKRIFLKAGSEEEIFAHLGLDYVEPWERNA

SEQ ID NO: 491 - DNA, 1182 bp, synthetic construct
  misc_feature 1..1182: note = Variant of terminal deoxynucleotidyl transferase
  source 1..1182: mol_type = other DNA
atgcaccatcatcatcatcatggcggtagcggccatccgccgagcaataccccggagctggaagtgccgagcgttatcgcccgcaaggttagtcagtacagctgccagcgcaagaccacgctgaataactacaacaaaaagtttaccgacgcgttcgagatcatggccgagaactacgaatttaaagagaacgaaatcttctgtctggaatttctgcgcgccgcgagtctgctgaaaaggctgccgttcccggttacccgcatgaaagacatccaaggtctgccgtgcattggcgaccaagttcgtgacgtgatcgaggagatcatcgaagaaggcgagagcagccgtgttaaagaagttctcaatgacgagcgctacaaggcctttaagcagttcaccagcgtgttcggtgtgggcgtgaaaaccagcgaaaagtggtttcgtatgggcctccgtacggttgaagagctgaaggccgacaagagtctgaagctgagcaagatgcagaaggcgggctttctgtattacgaggatctggtgagctgcgttagtaaagcggaagccgatgccgttacgctcatcgtgaagaacacggtgagtacctttctgccggatgcgctggtgaccatcacgggcggtttccgccgtggcaaaaagatgggccacgacatcgactttctgatcacgaatccgggcccgaaagaggatgacgaactgctccacaaagtggttgatctgctcaagaagcaaggtctgctgctgtactgcgacatcatcgagagcacgttcgtggaggaacaactgccaagtcgcaaaatcgacgccatggacaacttccagaagtgcttcgccattctcaagctgtaccagccgggcgtggataacagcagctataacacgagtaagaagagtgacatggccgaggttaaggattggaaagcgatccgtgtggatctggtgatcacgccattcgagcagtacgcctatgcgctgctcggttggacgggcagccgcgaatttggtcgcgatctgcgccgctatgcgagtcatgagcgcaagatgatcctcgacaaccatggcctctacgaccgcaaaaagcgcatctttctgaaagcgggcagcgaagaagagattttcgcgcatctgggtctggattatgtggagccgtgggaacgcaacgcg

SEQ ID NO: 492 - protein, 394 aa, synthetic construct
  REGION 1..394: note = Variant of terminal deoxynucleotidyl transferase
MHHHHHHGGSGHPPSNTPELEVPSVIARKVSQYSCQRKTTLNNYNKKFTDAFEIMAENYEFKENEIFCLEFLRAASLLKRLPFPVTRMKDIQGLPCIGDQVRDVIEEIIEEGESSRVKEVLNDERYKAFKQFTSVFGVGVKTSEKWFRMGLRTVEELKADKSLKLSKMQKAGFLYYEDLVSCVSKAEADAVTLIVKNTVSTFLPDALVTITGGFRRGKKMGHDIDFLITNPGPKEDDELLHKVVDLLKKQGLLLYCDIIESTFVEEQLPSRKIDAMDNFQKCFAILKLYQPGVDNSSYNTSKKSDMAEVKDWKAIRVDLVITPFEQYAYALLGWTGSREFGRDLRRYASHERKMILDNHGLYDRKKRIFLKAGSEEEIFAHLGLDYVEPWERNA

SEQ ID NO: 493 - DNA, 1182 bp, synthetic construct
  misc_feature 1..1182: note = Variant of terminal deoxynucleotidyl transferase
  source 1..1182: mol_type = other DNA
atgcaccatcatcatcatcatggcggtagcggccatccgccgagcaataccccggagctggaagtgccgagcgttatcgcccgcaaggttagtcagtacagctgccagcgcaagaccacgctgaataactacaacaaaaagtttaccgacgcgttcgagatcatggccgagaactacgaatttaaagagaacgaaatcttctgtctggaatttctgcgcgccgcgagtctgctgaaaactctgccgttcccggttacccgcatgaaagacatccaaggtctgccgtgcattggcgaccaagttcgtgacgtgatcgaggagatcatcgaagaaggcgagagcagccgtgttaaagaagttctcaatgacgagcgctacaaggcctttaagcagttcaccagcgtgttcggtgtgggcgtgaaaaccagcgaaaagtggtttcgtatgggcctccgtacggttgaagagctgaaggccgacaagagtctgaagctgagcaagatgcagaaggcgggctttctgtattacgaggatctggtgagctgcgttagtaaagcggaagccgatgccgttacgctcatcgtgaagaacacggtgagtacctttctgccggatgcgctggtgaccatcacgggcggtttccgccgtggcaaaaagatgggccacgacatcgactttctgatcacgaatccgggcccgaaagaggatgacgaactgctccacaaagtggttgatctgctcaagaagcaaggtctgctgctgtactgcgacatcatcgagagcacgttcgtggaggaacaactgccaagtcgcaaaatcgacgccatggacaacttccagaagtgcttcgccattctcaagctgtaccagccgggcgtggataacagcagctataacacgagtaagaagagtgacatggccgaggttaaggattggaaagcgatccgtgtggatctggtgatcacgccattcgagcagtacgcctatgcgctgctcggttggacgggcagccgcgaatttggtcgcgatctgcgccgctatgcgagtcatgagcgcaagatgatcctcgacaaccatggcctctacgaccgcaaaaagcgcatctttctgaaagcgggcagcgaagaagagattttcgcgcatctgggtctggattatgtggagccgtgggaacgcaacgcg

SEQ ID NO: 494 - protein, 394 aa, synthetic construct
  REGION 1..394: note = Variant of terminal deoxynucleotidyl transferase
MHHHHHHGGSGHPPSNTPELEVPSVIARKVSQYSCQRKTTLNNYNKKFTDAFEIMAENYEFKENEIFCLEFLRAASLLKTLPFPVTRMKDIQGLPCIGDQVRDVIEEIIEEGESSRVKEVLNDERYKAFKQFTSVFGVGVKTSEKWFRMGLRTVEELKADKSLKLSKMQKAGFLYYEDLVSCVSKAEADAVTLIVKNTVSTFLPDALVTITGGFRRGKKMGHDIDFLITNPGPKEDDELLHKVVDLLKKQGLLLYCDIIESTFVEEQLPSRKIDAMDNFQKCFAILKLYQPGVDNSSYNTSKKSDMAEVKDWKAIRVDLVITPFEQYAYALLGWTGSREFGRDLRRYASHERKMILDNHGLYDRKKRIFLKAGSEEEIFAHLGLDYVEPWERNA

SEQ ID NO: 495 - DNA, 1182 bp, synthetic construct
  misc_feature 1..1182: note = Variant of terminal deoxynucleotidyl transferase
  source 1..1182: mol_type = other DNA
atgcaccatcatcatcatcatggcggtagcggccatccgccgagcaataccccggagctggaagtgccgagcgttatcgcccgcaaggttagtcagtacagctgccagcgcaagaccacgctgaataactacaacaaaaagtttaccgacgcgttcgagatcatggccgagaactacgaatttaaagagaacgaaatcttctgtctggaatttctgcgcgccgcgagtctgctgaaatatctgccgttcccggttacccgcatgaaagacatccaaggtctgccgtgcattggcgaccaagttcgtgacgtgatcgaggagatcatcgaagaaggcgagagcagccgtgttaaagaagttctcaatgacgagcgctacaaggcctttaagcagttcaccagcgtgttcggtgtgggcgtgaaaaccagcgaaaagtggtttcgtatgggcctccgtacggttgaagagctgaaggccgacaagagtctgaagctgagcaagatgcagaaggcgggctttctgtattacgaggatctggtgagctgcgttagtaaagcggaagccgatgccgttacgctcatcgtgaagaacacggtgagtacctttctgccggatgcgctggtgaccatcacgggcggtttccgccgtggcaaaaagatgggccacgacatcgactttctgatcacgaatccgggcccgaaagaggatgacgaactgctccacaaagtggttgagctgctcaagaagcaaggtctgctgctgtactgcgacatcatcgagagcacgttcgtggaggaacaactgccaagtcgcaaaatcgacgccatggacaacttccagaagtgcttcgccattctcaagctgtaccagccgggcgtggataacagcagctataacacgagtaagaagagtgacatggccgaggttaaggattggaaagcgatccgtgtggatctggtgatcacgccattcgagcagtacgcctatgcgctgctcggttggacgggcagccgcgaatttggtcgcgatctgcgccgctatgcgagtcatgagcgcaagatgatcctcgacaaccatggcctctacgaccgcaaaaagcgcatctttctgaaagcgggcagcgaagaagagattttcgcgcatctgggtctggattatgtggagccgtgggaacgcaacgcg

SEQ ID NO: 496 - protein, 394 aa, synthetic construct
  REGION 1..394: note = Variant of terminal deoxynucleotidyl transferase
MHHHHHHGGSGHPPSNTPELEVPSVIARKVSQYSCQRKTTLNNYNKKFTDAFEIMAENYEFKENEIFCLEFLRAASLLKYLPFPVTRMKDIQGLPCIGDQVRDVIEEIIEEGESSRVKEVLNDERYKAFKQFTSVFGVGVKTSEKWFRMGLRTVEELKADKSLKLSKMQKAGFLYYEDLVSCVSKAEADAVTLIVKNTVSTFLPDALVTITGGFRRGKKMGHDIDFLITNPGPKEDDELLHKVVELLKKQGLLLYCDIIESTFVEEQLPSRKIDAMDNFQKCFAILKLYQPGVDNSSYNTSKKSDMAEVKDWKAIRVDLVITPFEQYAYALLGWTGSREFGRDLRRYASHERKMILDNHGLYDRKKRIFLKAGSEEEIFAHLGLDYVEPWERNA

SEQ ID NO: 497 - DNA, 1182 bp, synthetic construct
  misc_feature 1..1182: note = Variant of terminal deoxynucleotidyl transferase
  source 1..1182: mol_type = other DNA
atgcaccatcatcatcatcatggcggtagcggccatccgccgagcaataccccggagctggaagtgccgagcgttatcgcccgcaaggttagtcagtacagctgccagcgcaagaccacgctgaataactacaacaaaaagtttaccgacgcgttcgagatcatggccgagaactacgaatttaaagagaacgaaatcttctgtctggaatttctgcgcgccgcgagtctgctgaaatatctgccgttcccggttacccgcatgaaagacatccaaggtctgccgtgcattggcgaccaagttcgtgacgtgatcgaggagatcatcgaagaaggcgagagcagccgtgttaaagaagttctcaatgacgagcgctacaaggcctttaagcagttcaccagcgtgttcggtgtgggcgtgaaaaccagcgaaaagtggtttcgtatgggcctccgtacggttgaagagctgaaggccgacaagagtctgaagctgagcaagatgcagaaggcgggctttctgtattacgaggatctggtgagctgcgttagtaaagcggaagccgatgccgttacgctcatcgtgaagaacacggtgagtacctttctgccggatgcgctggtgaccatcacgggcggtttccgccgtggcaaaaagatgggccacgacatcgactttctgatcacgaatccgggcccgaaagaggatgacgaactgctccacaaagtggttgatctgctcaagaagcaaggtctgctgctgtactgcgacatcatcgagagcacgttcgtggaggaacaactgccaagtcgcaaaatcgacgccatggacaacttccagaagtgcttcgccattctcaagctgtaccagccgggcgtggataacagcagctataacacgagtaagaaggctgacatggccgaggttaaggattggaaagcgatccgtgtggatctggtgatcacgccattcgagcagtacgcctatgcgctgctcggttggacgggcagccgcgaatttggtcgcgatctgcgccgctatgcgagtcatgagcgcaagatgatcctcgacaaccatggcctctacgaccgcaaaaagcgcatctttctgaaagcgggcagcgaagaagagattttcgcgcatctgggtctggattatgtggagccgtgggaacgcaacgcg

SEQ ID NO: 498 - protein, 394 aa, synthetic construct
  REGION 1..394: note = Variant of terminal deoxynucleotidyl transferase
MHHHHHHGGSGHPPSNTPELEVPSVIARKVSQYSCQRKTTLNNYNKKFTDAFEIMAENYEFKENEIFCLEFLRAASLLKYLPFPVTRMKDIQGLPCIGDQVRDVIEEIIEEGESSRVKEVLNDERYKAFKQFTSVFGVGVKTSEKWFRMGLRTVEELKADKSLKLSKMQKAGFLYYEDLVSCVSKAEADAVTLIVKNTVSTFLPDALVTITGGFRRGKKMGHDIDFLITNPGPKEDDELLHKVVDLLKKQGLLLYCDIIESTFVEEQLPSRKIDAMDNFQKCFAILKLYQPGVDNSSYNTSKKADMAEVKDWKAIRVDLVITPFEQYAYALLGWTGSREFGRDLRRYASHERKMILDNHGLYDRKKRIFLKAGSEEEIFAHLGLDYVEPWERNA

SEQ ID NO: 499 - DNA, 1182 bp, synthetic construct
  misc_feature 1..1182: note = Variant of terminal deoxynucleotidyl transferase
  source 1..1182: mol_type = other DNA
atgcaccatcatcatcatcatggcggtagcggccatccgccgagcaataccccggagctggaaggtccgagcgttatcgcccgcaaggttagtcagtacagctgccagcgcaagaccacgctgaataactacaacaaaaagtttaccgacgcgttcgagatcatggccgagaactacgaatttaaagagaacgaaatcttctgtctggaatttctgcgcgccgcgagtctgctgaaatatctgccgttcccggttacccgcatgaaagacatccaaggtctgccgtgcattggcgaccaagttcgtgacgtgatcgaggagatcatcgaagaaggcgagagcagccgtgttaaagaagttctcaatgacgagcgctacaaggcctttaagcagttcaccagcgtgttcggtgtgggcgtgaaaaccagcgaaaagtggtttcgtatgggcctccgtacggttgaagagctgaaggccgacaagagtctgaagctgagcaagatgcagaaggcgggctttctgtattacgaggatctggtgagctgcgttagtaaagcggaagccgatgccgttacgctcatcgtgaagaacacggtgagtacctttctgccggatgcgctggtgaccatcacgggcggtttccgccgtggcaaaaagatgggccacgacatcgactttctgatcacgaatccgggcccgaaagaggatgacgaactgctccacaaagtggttgatctgctcaagaagcaaggtctgctgctgtactgcgacatcatcgagagcacgttcgtggaggaacaactgccaagtcgcaaaatcgacgccatggacaacttccagaagtgcttcgccattctcaagctgtaccagccgggcgtggataacagcagctataacacgagtaagaagagtgacatggccgaggttaaggattggaaagcgatccgtgtggatctggtgatcacgccattcgagcagtacgcctatgcgctgctcggttggacgggcagccgcgaatttggtcgcgatctgcgccgctatgcgagtcatgagcgcaagatgatcctcgacaaccatggcctctacgaccgcaaaaagcgcatctttctgaaagcgggcagcgaagaagagattttcgcgcatctgggtctggattatgtggagccgtgggaacgcaacgcg

SEQ ID NO: 500 - protein, 394 aa, synthetic construct
  REGION 1..394: note = Variant of terminal deoxynucleotidyl transferase
MHHHHHHGGSGHPPSNTPELEGPSVIARKVSQYSCQRKTTLNNYNKKFTDAFEIMAENYEFKENEIFCLEFLRAASLLKYLPFPVTRMKDIQGLPCIGDQVRDVIEEIIEEGESSRVKEVLNDERYKAFKQFTSVFGVGVKTSEKWFRMGLRTVEELKADKSLKLSKMQKAGFLYYEDLVSCVSKAEADAVTLIVKNTVSTFLPDALVTITGGFRRGKKMGHDIDFLITNPGPKEDDELLHKVVDLLKKQGLLLYCDIIESTFVEEQLPSRKIDAMDNFQKCFAILKLYQPGVDNSSYNTSKKSDMAEVKDWKAIRVDLVITPFEQYAYALLGWTGSREFGRDLRRYASHERKMILDNHGLYDRKKRIFLKAGSEEEIFAHLGLDYVEPWERNA

SEQ ID NO: 501 - DNA, 1182 bp, synthetic construct
  misc_feature 1..1182: note = Variant of terminal deoxynucleotidyl transferase
  source 1..1182: mol_type = other DNA
atgcaccatcatcatcatcatggcggtagcggccatccgccgagcaataccccggagctggaagtgccgagcgttatcgcccgcaaggttagtcagtacagctgccagcgcaagaccacgctgaataactacaacaaaaagtttaccgacgcgttcgagatcatggccgagaactacgaatttaaagagaacgaaatcttctgtctggaatttctgcgcgccgcgagtctgctgaaatatctgccgttcccggttacccgcatgaaagacatccaaggtctgccgtgcattggcgaccaagttcgtgacgtgatcgaggagatcatcgaagaaggcgagagcagccgtgttaaagaagttctcaatgacgagcgctacaaggcctttaagcagttcaccagcgtgttcggtgtgggcgtgaaaaccagcgaaaagtggtttcgtatgggcctccgtacggttgaagagctgaaggccgacaagagtctgaagctgagcaagatgcagaaggcgggctttctgtattacgaggatctggtgagctgcgttagtaaagcggaagccgatgccgttacgctcatcgtgaagaacacggtgagtacctttctgccggatgcgctggtgaccatcacgggcggtttccgccgtggcaaaaagatgggccacgacatcgactttctgatcacgaatccgggcccgaaagaggatgacgaactgctccacaaagtggttgatctgctcaagaagcaaggtctgctgctgtactgcgacagtatcgagagcacgttcgtggaggaacaactgccaagtcgcaaaatcgacgccatggacaacttccagaagtgcttcgccattctcaagctgtaccagccgggcgtggataacagcagctataacacgagtaagaagagtgacatggccgaggttaaggattggaaagcgatccgtgtggatctggtgatcacgccattcgagcagtacgcctatgcgctgctcggttggacgggcagccgcgaatttggtcgcgatctgcgccgctatgcgagtcatgagcgcaagatgatcctcgacaaccatggcctctacgaccgcaaaaagcgcatctttctgaaagcgggcagcgaagaagagattttcgcgcatctgggtctggattatgtggagccgtgggaacgcaacgcg

SEQ ID NO: 502 - protein, 394 aa, synthetic construct
  REGION 1..394: note = Variant of terminal deoxynucleotidyl transferase
MHHHHHHGGSGHPPSNTPELEVPSVIARKVSQYSCQRKTTLNNYNKKFTDAFEIMAENYEFKENEIFCLEFLRAASLLKYLPFPVTRMKDIQGLPCIGDQVRDVIEEIIEEGESSRVKEVLNDERYKAFKQFTSVFGVGVKTSEKWFRMGLRTVEELKADKSLKLSKMQKAGFLYYEDLVSCVSKAEADAVTLIVKNTVSTFLPDALVTITGGFRRGKKMGHDIDFLITNPGPKEDDELLHKVVDLLKKQGLLLYCDSIESTFVEEQLPSRKIDAMDNFQKCFAILKLYQPGVDNSSYNTSKKSDMAEVKDWKAIRVDLVITPFEQYAYALLGWTGSREFGRDLRRYASHERKMILDNHGLYDRKKRIFLKAGSEEEIFAHLGLDYVEPWERNA

SEQ ID NO: 503 - DNA, 1182 bp, synthetic construct
  misc_feature 1..1182: note = Variant of terminal deoxynucleotidyl transferase
  source 1..1182: mol_type = other DNA
atgcaccatcatcatcatcatggcggtagcggccatccgccgagcaataccccggagctggaagtgccgagcgttatcgcccgcaaggttagtcagtacagctgccagcgcaagaccacgctgaataactacaacaaaaagtttaccgacgcgttcgagatcatggccgagaactacgaatttaaagagaacgaaatcttctgtctggaatttgatcgcgccgcgagtctgctgaaatatctgccgttcccggttacccgcatgaaagacatccaaggtctgccgtgcattggcgaccaagttcgtgacgtgatcgaggagatcatcgaagaaggcgagagcagccgtgttaaagaagttctcaatgacgagcgctacaaggcctttaagcagttcaccagcgtgttcggtgtgggcgtgaaaaccagcgaaaagtggtttcgtatgggcctccgtacggttgaagagctgaaggccgacaagagtctgaagctgagcaagatgcagaaggcgggctttctgtattacgaggatctggtgagctgcgttagtaaagcggaagccgatgccgttacgctcatcgtgaagaacacggtgagtacctttctgccggatgcgctggtgaccatcacgggcggtttccgccgtggcaaaaagatgggccacgacatcgactttctgatcacgaatccgggcccgaaagaggatgacgaactgctccacaaagtggttgatctgctcaagaagcaaggtctgctgctgtactgcgacatcatcgagagcacgttcgtggaggaacaactgccaagtcgcaaaatcgacgccatggacaacttccagaagtgcttcgccattctcaagctgtaccagccgggcgtggataacagcagctataacacgagtaagaagagtgacatggccgaggttaaggattggaaagcgatccgtgtggatctggtgatcacgccattcgagcagtacgcctatgcgctgctcggttggacgggcagccgcgaatttggtcgcgatctgcgccgctatgcgagtcatgagcgcaagatgatcctcgacaaccatggcctctacgaccgcaaaaagcgcatctttctgaaagcgggcagcgaagaagagattttcgcgcatctgggtctggattatgtggagccgtgggaacgcaacgcg

SEQ ID NO: 504 - protein, 394 aa, synthetic construct
  REGION 1..394: note = Variant of terminal deoxynucleotidyl transferase
MHHHHHHGGSGHPPSNTPELEVPSVIARKVSQYSCQRKTTLNNYNKKFTDAFEIMAENYEFKENEIFCLEFDRAASLLKYLPFPVTRMKDIQGLPCIGDQVRDVIEEIIEEGESSRVKEVLNDERYKAFKQFTSVFGVGVKTSEKWFRMGLRTVEELKADKSLKLSKMQKAGFLYYEDLVSCVSKAEADAVTLIVKNTVSTFLPDALVTITGGFRRGKKMGHDIDFLITNPGPKEDDELLHKVVDLLKKQGLLLYCDIIESTFVEEQLPSRKIDAMDNFQKCFAILKLYQPGVDNSSYNTSKKSDMAEVKDWKAIRVDLVITPFEQYAYALLGWTGSREFGRDLRRYASHERKMILDNHGLYDRKKRIFLKAGSEEEIFAHLGLDYVEPWERNA

SEQ ID NO: 505 - DNA, 1182 bp, synthetic construct
  misc_feature 1..1182: note = Variant of terminal deoxynucleotidyl transferase
  source 1..1182: mol_type = other DNA
atgcaccatcatcatcatcatggcggtagcggccatccgccgagcaataccccggagctggaagtgccgagcgttatcgcccgcaaggttagtcagtacagctgccagcgcaagaccacgctgaataactacaacaaaaagtttaccgacgcgttcgagatcatggccgagaactacgaatttaaagagaacgaaatcttctgtctggaatttctgcgcgccgcgagtctgctgaaatatctgccgttcccggttacccgcatgaaagacatccaaggtctgccgtgcattggcgaccaagttcgtgacgtgatcgaggagatcatcgaagaaggcgagagcagccgtgttaaagaagttctcaatgacgagcgctacaaggcctttaagcagttcaccagcgtgttcggtgtgggcgtgaaaaccagcgaaaagtggtttcgtatgggcctccgtacggttgaagagctgaaggccgacaagagtctgaagctgagcaagatgcagaaggcgggctttctgtattacgaggatctggtgagctgcgttagtaaagcggaagccgatgccgttacgctcatcgtgaagaacacggtgagtacctttctgccggatgcgctggtgaccatcacgggcggtttccgccgtggcaaaaagatgggccacgacatcgactttctgatcacgaatccgggcccgaaagaggatgacgaactgctccacaaagtggttgatctgctcaagaagcaaggtctgctgctgtactgcgacatcatcgagagcacgttcgtggaggaacaactgccaagtcgcaaaatcgacgccatggacaacttccagaagtgcttcgccattctcaagctgtaccggccgggcgtggataacagcagctataacacgagtaagaagagtgacatggccgaggttaaggattggaaagcgatccgtgtggatctggtgatcacgccattcgagcagtacgcctatgcgctgctcggttggacgggcagccgcgaatttggtcgcgatctgcgccgctatgcgagtcatgagcgcaagatgatcctcgacaaccatggcctctacgaccgcaaaaagcgcatctttctgaaagcgggcagcgaagaagagattttcgcgcatctgggtctggattatgtggagccgtgggaacgcaacgcg

SEQ ID NO: 506 - protein, 394 aa, synthetic construct
  REGION 1..394: note = Variant of terminal deoxynucleotidyl transferase
MHHHHHHGGSGHPPSNTPELEVPSVIARKVSQYSCQRKTTLNNYNKKFTDAFEIMAENYEFKENEIFCLEFLRAASLLKYLPFPVTRMKDIQGLPCIGDQVRDVIEEIIEEGESSRVKEVLNDERYKAFKQFTSVFGVGVKTSEKWFRMGLRTVEELKADKSLKLSKMQKAGFLYYEDLVSCVSKAEADAVTLIVKNTVSTFLPDALVTITGGFRRGKKMGHDIDFLITNPGPKEDDELLHKVVDLLKKQGLLLYCDIIESTFVEEQLPSRKIDAMDNFQKCFAILKLYRPGVDNSSYNTSKKSDMAEVKDWKAIRVDLVITPFEQYAYALLGWTGSREFGRDLRRYASHERKMILDNHGLYDRKKRIFLKAGSEEEIFAHLGLDYVEPWERNA

SEQ ID NO: 507 - DNA, 1182 bp, synthetic construct
  misc_feature 1..1182: note = Variant of terminal deoxynucleotidyl transferase
  source 1..1182: mol_type = other DNA
atgcaccatcatcatcatcatggcggtagcggccatccgccgagcaataccccggagctggaagtgccgagcgttatcgcccgcaaggttagtcagtacagctgccagcgcaagaccacgctgaataactacaacaaaaagtttaccgacgcgttcgagatcatggccgagaactacgaatttaaagagaacgaaatcttctgtctggaatttctgcgcgccgcgagtctgctgaaatatctgccgttcccggttacccgcatgaaagacatccaaggtctgccgtgcattggcgaccaagttcgtgacgtgatcgaggagatcatcgaagcgggcgagagcagccgtgttaaagaagttctcaatgacgagcgctacaaggcctttaagcagttcaccagcgtgttcggtgtgggcgtgaaaaccagcgaaaagtggtttcgtatgggcctccgtacggttgaagagctgaaggccgacaagagtctgaagctgagcaagatgcagaaggcgggctttctgtattacgaggatctggtgagctgcgttagtaaagcggaagccgatgccgttacgctcatcgtgaagaacacggtgagtacctttctgccggatgcgctggtgaccatcacgggcggtttccgccgtggcaaaaagatgggccacgacatcgactttctgatcacgaatccgggcccgaaagaggatgacgaactgctccacaaagtggttgatctgctcaagaagcaaggtctgctgctgtactgcgacatcatcgagagcacgttcgtggaggaacaactgccaagtcgcaaaatcgacgccatggacaacttccagaagtgcttcgccattctcaagctgtaccagccgggcgtggataacagcagctataacacgagtaagaagagtgacatggccgaggttaaggattggaaagcgatccgtgtggatctggtgatcacgccattcgagcagtacgcctatgcgctgctcggttggacgggcagccgcgaatttggtcgcgatctgcgccgctatgcgagtcatgagcgcaagatgatcctcgacaaccatggcctctacgaccgcaaaaagcgcatctttctgaaagcgggcagcgaagaagagattttcgcgcatctgggtctggattatgtggagccgtgggaacgcaacgcg

SEQ ID NO: 508 - protein, 394 aa, synthetic construct
  REGION 1..394: note = Variant of terminal deoxynucleotidyl transferase
MHHHHHHGGSGHPPSNTPELEVPSVIARKVSQYSCQRKTTLNNYNKKFTDAFEIMAENYEFKENEIFCLEFLRAASLLKYLPFPVTRMKDIQGLPCIGDQVRDVIEEIIEAGESSRVKEVLNDERYKAFKQFTSVFGVGVKTSEKWFRMGLRTVEELKADKSLKLSKMQKAGFLYYEDLVSCVSKAEADAVTLIVKNTVSTFLPDALVTITGGFRRGKKMGHDIDFLITNPGPKEDDELLHKVVDLLKKQGLLLYCDIIESTFVEEQLPSRKIDAMDNFQKCFAILKLYQPGVDNSSYNTSKKSDMAEVKDWKAIRVDLVITPFEQYAYALLGWTGSREFGRDLRRYASHERKMILDNHGLYDRKKRIFLKAGSEEEIFAHLGLDYVEPWERNA

SEQ ID NO: 509 - DNA, 1182 bp, synthetic construct
  misc_feature 1..1182: note = Variant of terminal deoxynucleotidyl transferase
  source 1..1182: mol_type = other DNA
atgcaccatcatcatcatcatggcggtagcggccatccgccgagcaataccccggagctggaagtgccgaatgttatcgcccgcaaggttagtcagtacagctgccagcgcaagaccacgctgaataactacaacaaaaagtttaccgacgcgttcgagatcatggccgagaactacgaatttaaagagaacgaaatcttctgtctggaatttctgcgcgccgcgagtctgctgaaatatctgccgttcccggttacccgcatgaaagacatccaaggtctgccgtgcattggcgaccaagttcgtgacgtgatcgaggagatcatcgaagaaggcgagagcagccgtgttaaagaagttctcaatgacgagcgctacaaggcctttaagcagttcaccagcgtgttcggtgtgggcgtgaaaaccagcgaaaagtggtttcgtatgggcctccgtacggttgaagagctgaaggccgacaagagtctgaagctgagcaagatgcagaaggcgggctttctgtattacgaggatctggtgagctgcgttagtaaagcggaagccgatgccgttacgctcatcgtgaagaacacggtgagtacctttctgccggatgcgctggtgaccatcacgggcggtttccgccgtggcaaaaagatgggccacgacatcgactttctgatcacgaatccgggcccgaaagaggatgacgaactgctccacaaagtggttgatctgctcaagaagcaaggtctgctgctgtactgcgacatcatcgagagcacgttcgtggaggaacaactgccaagtcgcaaaatcgacgccatggacaacttccagaagtgcttcgccattctcaagctgtaccagccgggcgtggataacagcagctataacacgagtaagaagagtgacatggccgaggttaaggattggaaagcgatccgtgtggatctggtgatcacgccattcgagcagtacgcctatgcgctgctcggttggacgggcagccgcgaatttggtcgcgatctgcgccgctatgcgagtcatgagcgcaagatgatcctcgacaaccatggcctctacgaccgcaaaaagcgcatctttctgaaagcgggcagcgaagaagagattttcgcgcatctgggtctggattatgtggagccgtgggaacgcaacgcg

SEQ ID NO: 510 - protein, 394 aa, synthetic construct
  REGION 1..394: note = Variant of terminal deoxynucleotidyl transferase
MHHHHHHGGSGHPPSNTPELEVPNVIARKVSQYSCQRKTTLNNYNKKFTDAFEIMAENYEFKENEIFCLEFLRAASLLKYLPFPVTRMKDIQGLPCIGDQVRDVIEEIIEEGESSRVKEVLNDERYKAFKQFTSVFGVGVKTSEKWFRMGLRTVEELKADKSLKLSKMQKAGFLYYEDLVSCVSKAEADAVTLIVKNTVSTFLPDALVTITGGFRRGKKMGHDIDFLITNPGPKEDDELLHKVVDLLKKQGLLLYCDIIESTFVEEQLPSRKIDAMDNFQKCFAILKLYQPGVDNSSYNTSKKSDMAEVKDWKAIRVDLVITPFEQYAYALLGWTGSREFGRDLRRYASHERKMILDNHGLYDRKKRIFLKAGSEEEIFAHLGLDYVEPWERNA

SEQ ID NO: 511 - DNA, 1182 bp, synthetic construct
  misc_feature 1..1182: note = Variant of terminal deoxynucleotidyl transferase
  source 1..1182: mol_type = other DNA
atgcaccatcatcatcatcatggcggtagcggccatccgccgagcaataccccggagctggaagtgccgagcgttatcgcccgcaaggttagtcagtacagctgccagcgcaagaccacgctgaataactacaacaaaaagtttaccgacgcgttcgagatcatggccgagaactacgaatttaaagagaacgaaatcttctgtctggaatttctgcgcgccgcgagtctgctgaaatatctgccgttcccggttacccgcatgaaagacatccaaggtctgccgtgcattggcgaccaagttcgtgacgtgatcgaggagatcatcgaagaaggcgagagcagccgtgttaaagaagttctcaatgacgagcgctacaaggcctttaagcagttcaccagcgtgttcggtgtgggcgtgaaaaccagcgaaaagtggtttcgtatgggcctccgtacggttgaagagctgaaggccgacaagagtctgaagctgagcaagatgcagaaggcgggctttctgtattacgaggatctggtgagctgcgttagtaaagcggaagccgatgccgttacgctcatcgtgaagaacacggtgagtacctttctgccggatgcgctggtgaccatcacgggcggtttccgccgtggcaaaaagatgggccacgacatcgactttctgatcacgaatccgggcccgaaagaggatgacgaactgctccacaaagtggttgatctgctcaagaagcaaggtctgctgctgtactgcgacatcatcgagagcacgttcgtggaggaacaactgccaagtcgcaaaatcgacgccatggacaacttccagaagtgcttcgccattctcaagctgtaccagccggttgtggataacagcagctataacacgagtaagaagagtgacatggccgaggttaaggattggaaagcgatccgtgtggatctggtgatcacgccattcgagcagtacgcctatgcgctgctcggttggacgggcagccgcgaatttggtcgcgatctgcgccgctatgcgagtcatgagcgcaagatgatcctcgacaaccatggcctctacgaccgcaaaaagcgcatctttctgaaagcgggcagcgaagaagagattttcgcgcatctgggtctggattatgtggagccgtgggaacgcaacgcg

SEQ ID NO: 512 - protein, 394 aa, synthetic construct
  REGION 1..394: note = Variant of terminal deoxynucleotidyl transferase
MHHHHHHGGSGHPPSNTPELEVPSVIARKVSQYSCQRKTTLNNYNKKFTDAFEIMAENYEFKENEIFCLEFLRAASLLKYLPFPVTRMKDIQGLPCIGDQVRDVIEEIIEEGESSRVKEVLNDERYKAFKQFTSVFGVGVKTSEKWFRMGLRTVEELKADKSLKLSKMQKAGFLYYEDLVSCVSKAEADAVTLIVKNTVSTFLPDALVTITGGFRRGKKMGHDIDFLITNPGPKEDDELLHKVVDLLKKQGLLLYCDIIESTFVEEQLPSRKIDAMDNFQKCFAILKLYQPVVDNSSYNTSKKSDMAEVKDWKAIRVDLVITPFEQYAYALLGWTGSREFGRDLRRYASHERKMILDNHGLYDRKKRIFLKAGSEEEIFAHLGLDYVEPWERNA

SEQ ID NO: 513 - DNA, 1182 bp, synthetic construct
  misc_feature 1..1182: note = Variant of terminal deoxynucleotidyl transferase
  source 1..1182: mol_type = other DNA
atgcaccatcatcatcatcatggcggtagcggccatccgccgagcaataccccggagctggaagtgccgagcgttatcgcccgcaaggttagtcagtacagctgccagcgcaagaccacgctgaataactacaacaaaaagtttaccgacgcgttcgagatcatggccgagaactacgaatttaaagagaacgaaatcttctgtctggaatttctgcgcgccgcgagtctgctgaaatatctgccgttcccggttacccgcatgaaagacatccaaggtctgccgtgcattggcgaccaagttcgtgacgtgatcgaggagatcatcgaagaaggcgagagcagccgtgttaaagaagttctcaatggggagcgctacaaggcctttaagcagttcaccagcgtgttcggtgtgggcgtgaaaaccagcgaaaagtggtttcgtatgggcctccgtacggttgaagagctgaaggccgacaagagtctgaagctgagcaagatgcagaaggcgggctttctgtattacgaggatctggtgagctgcgttagtaaagcggaagccgatgccgttacgctcatcgtgaagaacacggtgagtacctttctgccggatgcgctggtgaccatcacgggcggtttccgccgtggcaaaaagatgggccacgacatcgactttctgatcacgaatccgggcccgaaagaggatgacgaactgctccacaaagtggttgatctgctcaagaagcaaggtctgctgctgtactgcgacatcatcgagagcacgttcgtggaggaacaactgccaagtcgcaaaatcgacgccatggacaacttccagaagtgcttcgccattctcaagctgtaccagccgggcgtggataacagcagctataacacgagtaagaagagtgacatggccgaggttaaggattggaaagcgatccgtgtggatctggtgatcacgccattcgagcagtacgcctatgcgctgctcggttggacgggcagccgcgaatttggtcgcgatctgcgccgctatgcgagtcatgagcgcaagatgatcctcgacaaccatggcctctacgaccgcaaaaagcgcatctttctgaaagcgggcagcgaagaagagattttcgcgcatctgggtctggattatgtggagccgtgggaacgcaacgcg

SEQ ID NO: 514 - protein, 394 aa, synthetic construct
  REGION 1..394: note = Variant of terminal deoxynucleotidyl transferase
MHHHHHHGGSGHPPSNTPELEVPSVIARKVSQYSCQRKTTLNNYNKKFTDAFEIMAENYEFKENEIFCLEFLRAASLLKYLPFPVTRMKDIQGLPCIGDQVRDVIEEIIEEGESSRVKEVLNGERYKAFKQFTSVFGVGVKTSEKWFRMGLRTVEELKADKSLKLSKMQKAGFLYYEDLVSCVSKAEADAVTLIVKNTVSTFLPDALVTITGGFRRGKKMGHDIDFLITNPGPKEDDELLHKVVDLLKKQGLLLYCDIIESTFVEEQLPSRKIDAMDNFQKCFAILKLYQPGVDNSSYNTSKKSDMAEVKDWKAIRVDLVITPFEQYAYALLGWTGSREFGRDLRRYASHERKMILDNHGLYDRKKRIFLKAGSEEEIFAHLGLDYVEPWERNA

SEQ ID NO: 515 - DNA, 1182 bp, synthetic construct
  misc_feature 1..1182: note = Variant of terminal deoxynucleotidyl transferase
  source 1..1182: mol_type = other DNA
atgcaccatcatcatcatcatggcggtagcggccatccgccgagcaataccccggagctggaagtgccgagcgttatcgcccgcaaggttagtcagtacagctgccagcgcaagaccacgctgaataactacaacaaaaagtttaccgacgcgttcgagatcatggccgagaactacgaatttaaagagaacgaaatcttctgtctggaatttctgcgcgccgcgagtctgctgaaatgtctgccgttcccggttacccgcatgaaagacatccaaggtctgccgtgcattggcgaccaagttcgtgacgtgatcgaggagatcatcgaagaaggcgagagcagccgtgttaaagaagttctcaatgacgagcgctacaaggcctttaagcagttcaccagcgtgttcggtgtgggcgtgaaaaccagcgaaaagtggtttcgtatgggcctccgtacggttgaagagctgaaggccgacaagagtctgaagctgagcaagatgcagaaggcgggctttctgtattacgaggatctggtgagctgcgttagtaaagcggaagccgatgccgttacgctcatcgtgaagaacacggtgagtacctttctgccggatgcgctggtgaccatcacgggcggtttccgccgtggcaaaaagatgggccacgacatcgactttctgatcacgaatccgggcccgaaagaggatgacgaactgctccacaaagtggttgatctgctcaagaagcaaggtctgctgctgtactgcgacatcatcgagagcacgttcgtggaggaacaactgccaagtcgcaaaatcgacgccatggacaacttccagaagtgcttcgccattctcaagctgtaccagccgggcgtggataacagcagctataacacgagtaagaagagtgacatggccgaggttaaggattggaaagcgatccgtgtggatctggtgatcacgccattcgagcagtacgcctatgcgctgctcggttggacgggcagccgcgaatttggtcgcgatctgcgccgctatgcgagtcatgagcgcaagatgatcctcgacaaccatggcctctacgaccgcaaaaagcgcatctttctgaaagcgggcagcgaagaagagattttcgcgcatctgggtctggattatgtggagccgtgggaacgcaacgcg

SEQ ID NO: 516 - protein, 394 aa, synthetic construct
  REGION 1..394: note = Variant of terminal deoxynucleotidyl transferase
MHHHHHHGGSGHPPSNTPELEVPSVIARKVSQYSCQRKTTLNNYNKKFTDAFEIMAENYEFKENEIFCLEFLRAASLLKCLPFPVTRMKDIQGLPCIGDQVRDVIEEIIEEGESSRVKEVLNDERYKAFKQFTSVFGVGVKTSEKWFRMGLRTVEELKADKSLKLSKMQKAGFLYYEDLVSCVSKAEADAVTLIVKNTVSTFLPDALVTITGGFRRGKKMGHDIDFLITNPGPKEDDELLHKVVDLLKKQGLLLYCDIIESTFVEEQLPSRKIDAMDNFQKCFAILKLYQPGVDNSSYNTSKKSDMAEVKDWKAIRVDLVITPFEQYAYALLGWTGSREFGRDLRRYASHERKMILDNHGLYDRKKRIFLKAGSEEEIFAHLGLDYVEPWERNA

SEQ ID NO: 517 - DNA, 1182 bp, synthetic construct
  misc_feature 1..1182: note = Variant of terminal deoxynucleotidyl transferase
  source 1..1182: mol_type = other DNA
atgcaccatcatcatcatcatggcggtagcggccatccgccgagcaataccccggagctggaagtgccgagcgttatcgcccgcaaggttagtcagtacagctgccagcgcaagaccacgctgaataactacaacaaaaagtttaccgacgcgttcgagatcatggccgagaactacgaatttaaagagaacgaaatcttctgtctggaatttctgcgcgccgcgagtctgctgaaatatctgccgttcccggttacccgcatgaaagacatccaaggtctgccgtgcattggcgaccaagttcgtgacgtgatcgaggagatcatcgaacctggcgagagcagccgtgttaaagaagttctcaatgacgagcgctacaaggcctttaagcagttcaccagcgtgttcggtgtgggcgtgaaaaccagcgaaaagtggtttcgtatgggcctccgtacggttgaagagctgaaggccgacaagagtctgaagctgagcaagatgcagaaggcgggctttctgtattacgaggatctggtgagctgcgttagtaaagcggaagccgatgccgttacgctcatcgtgaagaacacggtgagtacctttctgccggatgcgctggtgaccatcacgggcggtttccgccgtggcaaaaagatgggccacgacatcgactttctgatcacgaatccgggcccgaaagaggatgacgaactgctccacaaagtggttgatctgctcaagaagcaaggtctgctgctgtactgcgacatcatcgagagcacgttcgtggaggaacaactgccaagtcgcaaaatcgacgccatggacaacttccagaagtgcttcgccattctcaagctgtaccagccgggcgtggataacagcagctataacacgagtaagaagagtgacatggccgaggttaaggattggaaagcgatccgtgtggatctggtgatcacgccattcgagcagtacgcctatgcgctgctcggttggacgggcagccgcgaatttggtcgcgatctgcgccactatgcgagtcatgagcgcaagatgatcctcgacaaccatggcctctacgaccgcaaaaagcgcatctttctgaaagcgggcagcgaagaagagattttcgcgcatctgggtctggattatgtggagccgtgggaacgcaacgcg

SEQ ID NO: 518 - protein, 394 aa, synthetic construct
  REGION 1..394: note = Variant of terminal deoxynucleotidyl transferase
MHHHHHHGGSGHPPSNTPELEVPSVIARKVSQYSCQRKTTLNNYNKKFTDAFEIMAENYEFKENEIFCLEFLRAASLLKYLPFPVTRMKDIQGLPCIGDQVRDVIEEIIEPGESSRVKEVLNDERYKAFKQFTSVFGVGVKTSEKWFRMGLRTVEELKADKSLKLSKMQKAGFLYYEDLVSCVSKAEADAVTLIVKNTVSTFLPDALVTITGGFRRGKKMGHDIDFLITNPGPKEDDELLHKVVDLLKKQGLLLYCDIIESTFVEEQLPSRKIDAMDNFQKCFAILKLYQPGVDNSSYNTSKKSDMAEVKDWKAIRVDLVITPFEQYAYALLGWTGSREFGRDLRHYASHERKMILDNHGLYDRKKRIFLKAGSEEEIFAHLGLDYVEPWERNA

SEQ ID NO: 519 - DNA, 1182 bp, synthetic construct
  misc_feature 1..1182: note = Variant of terminal deoxynucleotidyl transferase
  source 1..1182: mol_type = other DNA
atgcaccatcatcatcatcatggcggtagcggccatccgccgagcaataccccggagctggaagtgccgagcgttatcgcccgcaaggttagtcagtacagctgccagcgcaagaccacgctgaataactacaacaaaaagtttaccgacgcgttcgagatcatggccgagaactacgaatttaaagagaacgaaatcttctgtctggaatttctgcgcgccgcgagtctgctgaaatatctgccgttcccggttacccgcatgaaagacatccaaggtctgccgtgcattggcgaccaagttcgtgacgtgatcgaggagatcatcgaagaaggcgagagcagccgtgttaaagaagttctcaatgacgagcgctacaaggcctttaagcagttcaccagcgtgttcggtgtgggcgtgaaaaccagcgaaaagtggtttcgtatgggcctccgtacggttgaagagctgaaggccgacaagagtctgaagctgagcaagatgcagaaggcgggctttctgtattacgaggatctggtgagctgcgttagtaaagcggaagccgatgccgttacgctcatcgtgaagaacacggtgagtacctttctgccggatgcgctggtgaccatcacgggcggtttccgccgtggcaaaaagatgggccacgacatcgactttctgatcacgaatccgggcccgaaagaggatgacgaactgctccacaaagtggttgatctgctcaagaagcaaggtctgctgctgtactgcgacatcatcgagagcacgttcactgaggaacaactgccaagtcgcaaaatcgacgccatggacaacttccagaagtgcttcgccattctcaagctgtaccagccgggcgtggataacagcagctataacacgagtaagaagagtgacatggccgaggttaaggattggaaagcgatccgtgtggatctggtgatcacgccattcgagcagtacgcctatgcgctgctcggttggacgggcagccgcgaatttggtcgcgatctgcgccgctatgcgagtcatgagcgcaagatgatcctcgacaaccatggcctctacgaccgcaaaaagcgcatctttctgaaagcgggcagcgaagaagagattttcgcgcatctgggtctggattatgtggagccgtgggaacgcaacgcg

SEQ ID NO: 520 - protein, 394 aa, synthetic construct
  REGION 1..394: note = Variant of terminal deoxynucleotidyl transferase
MHHHHHHGGSGHPPSNTPELEVPSVIARKVSQYSCQRKTTLNNYNKKFTDAFEIMAENYEFKENEIFCLEFLRAASLLKYLPFPVTRMKDIQGLPCIGDQVRDVIEEIIEEGESSRVKEVLNDERYKAFKQFTSVFGVGVKTSEKWFRMGLRTVEELKADKSLKLSKMQKAGFLYYEDLVSCVSKAEADAVTLIVKNTVSTFLPDALVTITGGFRRGKKMGHDIDFLITNPGPKEDDELLHKVVDLLKKQGLLLYCDIIESTFTEEQLPSRKIDAMDNFQKCFAILKLYQPGVDNSSYNTSKKSDMAEVKDWKAIRVDLVITPFEQYAYALLGWTGSREFGRDLRRYASHERKMILDNHGLYDRKKRIFLKAGSEEEIFAHLGLDYVEPWERNA

SEQ ID NO: 521 - DNA, 1182 bp, synthetic construct
  misc_feature 1..1182: note = Variant of terminal deoxynucleotidyl transferase
  source 1..1182: mol_type = other DNA
atgcaccatcatcatcatcatggcggtagcggccatccgccgagcaataccccggagctggaagtgccgagcgttatcgcccgcaaggttagtcagtacagctgccagcgcaagaccacgctgaataactacaacaaaaagtttaccgacgcgttcgagatcatggccgagaactacgaatttaaagagaacgaaatcttctgtctggaatttctgcgcgccgcgagtctgctgaaatatctgccgttcccggttacccgcatgaaagacatccaaggtctgccgtgcattggcgaccaagttcgtgacgtgatcgaggagatcatcgaagaaggcgagagcagccgtgttaaagaagttctcaatgacgagcgctacaaggcctttaagcagttcaccagcgtgttcggtgtgggcgtgaaaaccagcgaaaagtggtttcgtatgggcctccgtacggttgaagagctgaaggccgacaagagtctgaagctgagcaagatgcagaaggcgggctttctgtattacgaggatctggtgagctgcgttagtaaagcggaagccgatgccgttacgctcatcgtgaagaacacggtgagtacctttctgccggatgcgctggtgaccatcacgggcggtttccgccgtggcaaaaagatgggccacgacatcgactttctgatcacgaatccgggcccgaaagaggatgacgaactgctccacaaagtggttgatctgctcaagaagcaaggtctgctgctgtactgcgacatcatcgagagcacgttcgtggaggaacaactgccaagtcgcaaaatcgacgccatggacaacttccagaagtgcttcgccattctcaagctgtaccagccgggcgtggataacagcagctataacacgagtaagaagagtgacatggccgaggttaaggattggaaagcgatccgtgtggatctggtgatcacgccattcgagcagtacgcctatgcgctgctcggttggacgggcagccgcgaatttggtcgcgatctgcgccgctatgcgagtcatgagcgcaagatgtttctcgacaaccatggcctctacgaccgcaaaaagcgcatctttctgaaagcgggcagcgaagaagagattttcgcgcatctgggtctggattatgtggagccgtgggaacgcaacgcg

SEQ ID NO: 522 - protein, 394 aa, synthetic construct
  REGION 1..394: note = Variant of terminal deoxynucleotidyl transferase
MHHHHHHGGSGHPPSNTPELEVPSVIARKVSQYSCQRKTTLNNYNKKFTDAFEIMAENYEFKENEIFCLEFLRAASLLKYLPFPVTRMKDIQGLPCIGDQVRDVIEEIIEEGESSRVKEVLNDERYKAFKQFTSVFGVGVKTSEKWFRMGLRTVEELKADKSLKLSKMQKAGFLYYEDLVSCVSKAEADAVTLIVKNTVSTFLPDALVTITGGFRRGKKMGHDIDFLITNPGPKEDDELLHKVVDLLKKQGLLLYCDIIESTFVEEQLPSRKIDAMDNFQKCFAILKLYQPGVDNSSYNTSKKSDMAEVKDWKAIRVDLVITPFEQYAYALLGWTGSREFGRDLRRYASHERKMFLDNHGLYDRKKRIFLKAGSEEEIFAHLGLDYVEPWERNA

SEQ ID NO: 523 - DNA, 1182 bp, synthetic construct
  misc_feature 1..1182: note = Variant of terminal deoxynucleotidyl transferase
  source 1..1182: mol_type = other DNA
atgcaccatcatcatcatcatggcggtagcggccatccgccgagcaataccccggagctggaagtgccgagcgttatcgcccgcaaggttagtcagtacagctgccagcgcaagaccacgctgaataactacaacaaaaagtttaccgacgcgttcgagatcatggccgagaactacgaatttaaagagaacgaaatcttctgtctggaatttctgcgcgccgcgagtctgctgaaatatctgccgttcccggttacccgcatgaaagacatccaaggtctgccgtgcattggcgaccaagttcgtgacgtgatcgaggagatcatcgaagaaggcgagagcgagcgtgttaaagaagttctcaatgacgagcgctacaaggcctttaagcagttcaccagcgtgttcggtgtgggcgtgaaaaccagcgaaaagtggtttcgtatgggcctccgtacggttgaagagctgaaggccgacaagagtctgaagctgagcaagatgcagaaggcgggctttctgtattacgaggatctggtgagctgcgttagtaaagcggaagccgatgccgttacgctcatcgtgaagaacacggtgagtacctttctgccggatgcgctggtgaccatcacgggcggtttccgccgtggcaaaaagatgggccacgacatcgactttctgatcacgaatccgggcccgaaagaggatgacgaactgctccacaaagtggttgatctgctcaagaagcaaggtctgctgctgtactgcgacatcatcgagagcacgttcgtggaggaacaactgccaagtcgcaaaatcgacgccatggacaacttccagaagtgcttcgccattctcaagctgtaccagccgggcgtggataacagcagctataacacgagtaagaagagtgacatggccgaggttaaggattggaaagcgatccgtgtggatctggtgatcacgccattcgagcagtacgcctatgcgctgctcggttggacgggcagccgcgaatttggtcgcgatctgcgccgctatgcgagtcatgagcgcaagatgatcctcgacaaccatggcctctacgaccgcaaaaagcgcatctttctgaaagcgggcagcgaagaagagattttcgcgcatctgggtctggattatgtggagccgtgggaacgcaacgcg

SEQ ID NO: 524 - protein, 394 aa, synthetic construct
  REGION 1..394: note = Variant of terminal deoxynucleotidyl transferase
MHHHHHHGGSGHPPSNTPELEVPSVIARKVSQYSCQRKTTLNNYNKKFTDAFEIMAENYEFKENEIFCLEFLRAASLLKYLPFPVTRMKDIQGLPCIGDQVRDVIEEIIEEGESERVKEVLNDERYKAFKQFTSVFGVGVKTSEKWFRMGLRTVEELKADKSLKLSKMQKAGFLYYEDLVSCVSKAEADAVTLIVKNTVSTFLPDALVTITGGFRRGKKMGHDIDFLITNPGPKEDDELLHKVVDLLKKQGLLLYCDIIESTFVEEQLPSRKIDAMDNFQKCFAILKLYQPGVDNSSYNTSKKSDMAEVKDWKAIRVDLVITPFEQYAYALLGWTGSREFGRDLRRYASHERKMILDNHGLYDRKKRIFLKAGSEEEIFAHLGLDYVEPWERNA

SEQ ID NO: 525 - DNA, 1182 bp, synthetic construct
  misc_feature 1..1182: note = Variant of terminal deoxynucleotidyl transferase
  source 1..1182: mol_type = other DNA
atgcaccatcatcatcatcatggcggtagcggccatccgccgtttaataccccggagctggaagtgccgagcgttatcgcccgcaaggttagtcagtacagctgccagcgcaagaccacgctgaataactacaacaaaaagtttaccgacgcgttcgagatcatggccgagaactacgaatttaaagagaacgaaatcttctgtctggaatttctgcgcgccgcgagtctgctgaaatatctgccgttcccggttacccgcatgaaagacatccaaggtctgccgtgcattggcgaccaagttcgtgacgtgatcgaggagatcatcgaagaaggcgagagcagccgtgttaaagaagttctcaatgacgagcgctacaaggcctttaagcagttcaccagcgtgttcggtgtgggcgtgaaaaccagcgaaaagtggtttcgtatgggcctccgtacggttgaagagctgaaggccgacaagagtctgaagctgagcaagatgcagaaggcgggctttctgtattacgaggatctggtgagctgcgttagtaaagcggaagccgatgccgttacgctcatcgtgaagaacacggtgagtacctttctgccggatgcgctggtgaccatcacgggcggtttccgccgtggcaaaaagatgggccacgacatcgactttctgatcacgaatccgggcccgaaagaggatgacgaactgctccacaaagtggttgatctgctcaagaagcaaggtctgctgctgtactgcgacatcatcgagagcacgttcgtggaggaacaactgccaagtcgcaaaatcgacgccatggacaacttccagaagtgcttcgccattctcaagctgtaccagccgggcgtggataacagcagctataacacgagtaagaagagtgacatggccgaggttaaggattggaaagcgatccgtgtggatctggtgatcacgccattcgagcagtacgcctatgcgctgctcggttggacgggcagccgcgaatttggtcgcgatctgcgccgctatgcgagtcatgagcgcaagatgatcctcgacaaccatggcctctacgaccgcaaaaagcgcatctttctgaaagcgggcagcgaagaagagattttcgcgcatctgggtctggattatgtggagccgtgggaacgcaacgcg

SEQ ID NO: 526 - protein, 394 aa, synthetic construct
  REGION 1..394: note = Variant of terminal deoxynucleotidyl transferase
MHHHHHHGGSGHPPFNTPELEVPSVIARKVSQYSCQRKTTLNNYNKKFTDAFEIMAENYEFKENEIFCLEFLRAASLLKYLPFPVTRMKDIQGLPCIGDQVRDVIEEIIEEGESSRVKEVLNDERYKAFKQFTSVFGVGVKTSEKWFRMGLRTVEELKADKSLKLSKMQKAGFLYYEDLVSCVSKAEADAVTLIVKNTVSTFLPDALVTITGGFRRGKKMGHDIDFLITNPGPKEDDELLHKVVDLLKKQGLLLYCDIIESTFVEEQLPSRKIDAMDNFQKCFAILKLYQPGVDNSSYNTSKKSDMAEVKDWKAIRVDLVITPFEQYAYALLGWTGSREFGRDLRRYASHERKMILDNHGLYDRKKRIFLKAGSEEEIFAHLGLDYVEPWERNA

SEQ ID NO: 527 - DNA, 1182 bp, synthetic construct
  misc_feature 1..1182: note = Variant of terminal deoxynucleotidyl transferase
  source 1..1182: mol_type = other DNA
atgcaccatcatcatcatcatggcggtagcggccatccgccgagcaataccccggagctggaagtgccgagcgttatcgcccgcaaggttagtcagtacagctgccagcgcaagaccacgctgaataactacaacaaaaagtttaccgacgcgttcgagatcatggccgagaactacgaatttaaagagaacgaaatcttctgtctggaatttctgcgcgccgcgagtctgctgaaatatctgccgttcccggttacccgcatgaaagacatccaaggtctgccgtgcattggcgaccaagttcgtgacgtgatcgaggagatcatcgaagaaggcgagagcagccgtgttaaagaagttctcaatgacgagcgctacaaggcctttaagcagttcaccagcgtgttcggtgtgggcgtgaaaaccagcgaaaagtggtttcgtatgggcctccgtacggttgaagagctgaaggccgacaagagtctgaagctgagcaagatgcagaaggcgggctttctgtattacgaggatctggtgagctgcgttagtaaagcggaagccgatgccgttacgctcatcgtgaagaacacggtgagtacctttctgccggatgcgctggtgaccatcacgggcggtttccgccgtggcaaaaagatgggccacgacatcgactttctgatcacgaatccgggcccgaaagaggatgacgaactgctccacaaagtggttgatctgctcaagaagcaaggtctgctgctgtactgcgacatcatcgagagcacgttcgtggaggaacaactgccaagtcgcaaaatcgacgccatggacaacttccagaagtgcttcgccattctcaagctgtaccagccgggcgtggataacagcagctataacacgagtaagaagaaggacatggccgaggttaaggattggaaagcgatccgtgtggatctggtgatcacgccattcgagcagtacgcctatgcgctgctcggttggacgggcagccgcgaatttggtcgcgatctgcgccgctatgcgagtcatgagcgcaagatgatcctcgacaaccatggcctctacgaccgcaaaaagcgcatctttctgaaagcgggcagcgaagaagagattttcgcgcatctgggtctggattatgtggagccgtgggaacgcaacgcg

SEQ ID NO: 528 - protein, 394 aa, synthetic construct
  REGION 1..394: note = Variant of terminal deoxynucleotidyl transferase
MHHHHHHGGSGHPPSNTPELEVPSVIARKVSQYSCQRKTTLNNYNKKFTDAFEIMAENYEFKENEIFCLEFLRAASLLKYLPFPVTRMKDIQGLPCIGDQVRDVIEEIIEEGESSRVKEVLNDERYKAFKQFTSVFGVGVKTSEKWFRMGLRTVEELKADKSLKLSKMQKAGFLYYEDLVSCVSKAEADAVTLIVKNTVSTFLPDALVTITGGFRRGKKMGHDIDFLITNPGPKEDDELLHKVVDLLKKQGLLLYCDIIESTFVEEQLPSRKIDAMDNFQKCFAILKLYQPGVDNSSYNTSKKKDMAEVKDWKAIRVDLVITPFEQYAYALLGWTGSREFGRDLRRYASHERKMILDNHGLYDRKKRIFLKAGSEEEIFAHLGLDYVEPWERNA

SEQ ID NO: 529 - DNA, 1182 bp, synthetic construct
  misc_feature 1..1182: note = Variant of terminal deoxynucleotidyl transferase
  source 1..1182: mol_type = other DNA
atgcaccatcatcatcatcatggcggtagcggccatccgccgagcaataccccggagctggaagtgccgagcgttatcgcccgcaaggttagtcagtacagctgccagcgcaagaccacgctgaataactacaacaaaaagtttaccgacgcgttcgagatcatggccgagaactacgaatttaaagagaacgaaatcttctgtctggaatttctgcgcgccgcgagtctgctgaaatatctgccgttcccggttacccgcatgaaagacatccaaggtctgccgtgcattggcgaccaagttcgtgacgtgatcgaggagatcatcgaagaaggcgagagcagccgtgttaaagaagttctcaatgacgagcgctacaaggcctttaagcagttcaccagcgtgttcggtgtgggcgtgaaaaccagcgaaaagtggtttcgtatgggcctccgtacggttgaagagctgaaggccgacaagagtctgaagctgagcaagatgcagaaggcgggctttctgtattacgaggatctggtgagctgcgttagtaaagcggaagccgatgccgtttatctcatcgtgaagaacacggtgagtacctttctgccggatgcgctggtgaccatcacgggcggtttccgccgtggcaaaaagatgggccacgacatcgactttctgatcacgaatccgggcccgaaagaggatgacgaactgctccacaaagtggttgatctgctcaagaagcaaggtctgctgctgtactgcgacatcatcgagagcacgttcgtggaggaacaactgccaagtcgcaaaatcgacgccatggacaacttccagaagtgcttcgccattctcaagctgtaccagccgggcgtggataacagcagctataacacgagtaagaagagtgacatggccgaggttaaggattggaaagcgatccgtgtggatctggtgatcacgccattcgagcagtacgcctatgcgctgctcggttggacgggcagccgcgaatttggtcgcgatctgcgccgctatgcgagtcatgagcgcaagatgatcctcgacaaccatggcctctacgaccgcaaaaagcgcatctttctgaaagcgggcagcgaagaagagattttcgcgcatctgggtctggattatgtggagccgtgggaacgcaacgcg

SEQ ID NO: 530 - protein, 394 aa, synthetic construct
  REGION 1..394: note = Variant of terminal deoxynucleotidyl transferase
MHHHHHHGGSGHPPSNTPELEVPSVIARKVSQYSCQRKTTLNNYNKKFTDAFEIMAENYEFKENEIFCLEFLRAASLLKYLPFPVTRMKDIQGLPCIGDQVRDVIEEIIEEGESSRVKEVLNDERYKAFKQFTSVFGVGVKTSEKWFRMGLRTVEELKADKSLKLSKMQKAGFLYYEDLVSCVSKAEADAVYLIVKNTVSTFLPDALVTITGGFRRGKKMGHDIDFLITNPGPKEDDELLHKVVDLLKKQGLLLYCDIIESTFVEEQLPSRKIDAMDNFQKCFAILKLYQPGVDNSSYNTSKKSDMAEVKDWKAIRVDLVITPFEQYAYALLGWTGSREFGRDLRRYASHERKMILDNHGLYDRKKRIFLKAGSEEEIFAHLGLDYVEPWERNA

SEQ ID NO: 531 - DNA, 1182 bp, synthetic construct
  misc_feature 1..1182: note = Variant of terminal deoxynucleotidyl transferase
  source 1..1182: mol_type = other DNA
atgcaccatcatcatcatcatggcggtagcggccatccgccgagcaataccccggagctggaagtgccgagcgttatcgcccgcaaggttagtcagtacagctgccagcgcaagaccacgctgaataactacaacaaaaagtttaccgacgcgttcgagatcatggccgagaactacgaatttaaagagaacgaaatcttctgtctggaatttctgcgcgccgcgagtctgctgaaatatctgccgttcccggttacccgcatgaaagacatccaaggtctgccgtgcattggcgaccaagttcgtgacgtgatcgaggagatcatcgaagaaggcgagagcagccgtgttaaagaagttctcaatgacgagcgctacaaggcctttaagcagttcaccagcgtgttcggtgtgggcgtgaaaaccagcgaaaagtggtttcgtatgggcctccgtacggttgaagagctgaaggccgacaagagtctgaagctgagcaagatgcagaaggcgggctttctgtattacgaggatctggtgagctgcgttagtaaagcggaagccgatgccgttacgctcatcgtgaagaacacggtgagtacctttctgccggatgcgctggtgaccatcacgggcggtttccgccgtggcaaaaagatgggccacgacatcgactttctgatcacgaatccgggcccgaaagaggatgacgaactgctccacaaagtggttgatctgctcaagaagcaaggtctgctgctgtactgcgacatcatcgagagcacgttcgtggaggaacaactgccaagtcgcaaaatcgacgccatggacaacttccagaagtgcttctttattctcaagctgtaccagccgggcgtggataacagcagctataacacgagtaagaagagtgacatggccgaggttaaggattggaaagcgatccgtgtggatctggtgatcacgccattcgagcagtacgcctatgcgctgctcggttggacgggcagccgcgaatttggtcgcgatctgcgccgctatgcgagtcatgagcgcaagatgatcctcgacaaccatggcctctacgaccgcaaaaagcgcatctttctgaaagcgggcagcgaagaagagattttcgcgcatctgggtctggattatgtggagccgtgggaacgcaacgcg

SEQ ID NO: 532 - protein, 394 aa, synthetic construct
  REGION 1..394: note = Variant of terminal deoxynucleotidyl transferase
MHHHHHHGGSGHPPSNTPELEVPSVIARKVSQYSCQRKTTLNNYNKKFTDAFEIMAENYEFKENEIFCLEFLRAASLLKYLPFPVTRMKDIQGLPCIGDQVRDVIEEIIEEGESSRVKEVLNDERYKAFKQFTSVFGVGVKTSEKWFRMGLRTVEELKADKSLKLSKMQKAGFLYYEDLVSCVSKAEADAVTLIVKNTVSTFLPDALVTITGGFRRGKKMGHDIDFLITNPGPKEDDELLHKVVDLLKKQGLLLYCDIIESTFVEEQLPSRKIDAMDNFQKCFFILKLYQPGVDNSSYNTSKKSDMAEVKDWKAIRVDLVITPFEQYAYALLGWTGSREFGRDLRRYASHERKMILDNHGLYDRKKRIFLKAGSEEEIFAHLGLDYVEPWERNA

SEQ ID NO: 533 - DNA, 1182 bp, synthetic construct
  misc_feature 1..1182: note = Variant of terminal deoxynucleotidyl transferase
  source 1..1182: mol_type = other DNA
atgcaccatcatcatcatcatggcggtagcggccatccgccgagcaataccccggagctggaagtgccgagcgttatcgcccgcaaggttagtcagtacagctgccagcgcaagaccacgctgaataactacaacaaaaagtttaccgacgcgttcgagatcatggccgagaactacgaatttaaagagaacgaaatcttctgtctggaatttctgcgcgccgcgagtctgctgaaatatctgccgttcccggttacccgcatgaaagacatccaaggtctgccgtgcattggcgaccaagttcgtgacgtgatcgaggagatcatcgaagaaggcgagagcagccgtgttaaagaagttctcaatgacgagcgctacaaggcctttaagcagttcaccagcgtgttcggtgtgggcgtgaaaaccagcgaaaagtggtttcgtatgggcctccgtacggttgaagagctgaaggccgacaagagtctgaagctgagcaagatgcagaaggcgggctttctgtattacgaggatctggtgagctgcgttagtaaagcggaagccgatgccgttacgctcatcgtgaagaacacggtgagtacctttctgccggatgcgctggtgaccatcacgggcggtttccgccgtggcaaaaagatgggccacgacatcgactttctgatcacgaatccgggcccgaaagaggatgacgaactgctccacaaagtggttgatctgctcaagaagcaaggtctgctgctgtactgctttatcatcgagagcacgttcgtggaggaacaactgccaagtcgcaaaatcgacgccatggacaacttccagaagtgcttcgccattctcaagctgtaccagccgggcgtggataacagcagctataacacgagtaagaagagtgacatggccgaggttaaggattggaaagcgatccgtgtggatctggtgatcacgccattcgagcagtacgcctatgcgctgctcggttggacgggcagccgcgaatttggtcgcgatctgcgccgctatgcgagtcatgagcgcaagatgatcctcgacaaccatggcctctacgaccgcaaaaagcgcatctttctgaaagcgggcagcgaagaagagattttcgcgcatctgggtctggattatgtggagccgtgggaacgcaacgcg

SEQ ID NO: 534 - protein, 394 aa, synthetic construct
  REGION 1..394: note = Variant of terminal deoxynucleotidyl transferase
MHHHHHHGGSGHPPSNTPELEVPSVIARKVSQYSCQRKTTLNNYNKKFTDAFEIMAENYEFKENEIFCLEFLRAASLLKYLPFPVTRMKDIQGLPCIGDQVRDVIEEIIEEGESSRVKEVLNDERYKAFKQFTSVFGVGVKTSEKWFRMGLRTVEELKADKSLKLSKMQKAGFLYYEDLVSCVSKAEADAVTLIVKNTVSTFLPDALVTITGGFRRGKKMGHDIDFLITNPGPKEDDELLHKVVDLLKKQGLLLYCFIIESTFVEEQLPSRKIDAMDNFQKCFAILKLYQPGVDNSSYNTSKKSDMAEVKDWKAIRVDLVITPFEQYAYALLGWTGSREFGRDLRRYASHERKMILDNHGLYDRKKRIFLKAGSEEEIFAHLGLDYVEPWERNA

SEQ ID NO: 535 - DNA, 1182 bp, synthetic construct
  misc_feature 1..1182: note = Variant of terminal deoxynucleotidyl transferase
  source 1..1182: mol_type = other DNA
atgcaccatcatcatcatcatggcggtagcggccatccgccgagcaataccccggagctggaagtgccgagcgttatcgcccgcaaggttagtcagtacagctgccagcgcaagaccacgctgaataactacaacaaaaagtttaccgacgcgttcgagatcatggccgagaactacgaatttaaagagaacgaaatcttctgtctggaatttctgcgcgccgcgagtctgctgaaatatctgccgttcccggttacccgcatgaaagacatccaaggtctgccgtgcattggcgaccaagttcgtgacgtgatcgaggagatcatcgaagaaggcgagagcagccgtgttaaagaagttctcaatgacgagcgctacaaggcctttaagcagttcaccagcgtgttcggtgtgggcgtgaaaaccagcgaaaagtggtttcgtatgggcctccgtacggttgaagagctgaaggccgacaagagtctgaagctgagcaagatgcagaaggcgggctttctgtattacgaggatctggtgagctgcgttagtaaagcggaagccgatgccgttacgctcatcgtgaagaacacggtgagtacctttctgccggatgcgctggtgaccatcacgggcggtttccgccgtggcaaaaagatgggccacgacatcgactttctgatcacgaatccgggcccgaaagaggatgacgaactgctccacaaagtggttgatctgctcaagaagcaaggtctgctgctgtactgcgacatcatcgagagcacgttcgtggaggaacaactgccaagtcgcaaaatcgacgccatggacaacttccagaagtgcttcgccattctcaagctgtaccagccgggcgtggataacagcagctataacttgagtaagaagagtgacatggccgaggttaaggattggaaagcgatccgtgtggatctggtgatcacgccattcgagcagtacgcctatgcgctgctcggttggacgggcagccgcgaatttggtcgcgatctgcgccgctatgcgagtcatgagcgcaagatgatcctcgacaaccatggcctctacgaccgcaaaaagcgcatctttctgaaagcgggcagcgaagaagagattttcgcgcatctgggtctggattatgtggagccgtgggaacgcaacgcg

SEQ ID NO: 536 - protein, 394 aa, synthetic construct
  REGION 1..394: note = Variant of terminal deoxynucleotidyl transferase
MHHHHHHGGSGHPPSNTPELEVPSVIARKVSQYSCQRKTTLNNYNKKFTDAFEIMAENYEFKENEIFCLEFLRAASLLKYLPFPVTRMKDIQGLPCIGDQVRDVIEEIIEEGESSRVKEVLNDERYKAFKQFTSVFGVGVKTSEKWFRMGLRTVEELKADKSLKLSKMQKAGFLYYEDLVSCVSKAEADAVTLIVKNTVSTFLPDALVTITGGFRRGKKMGHDIDFLITNPGPKEDDELLHKVVDLLKKQGLLLYCDIIESTFVEEQLPSRKIDAMDNFQKCFAILKLYQPGVDNSSYNLSKKSDMAEVKDWKAIRVDLVITPFEQYAYALLGWTGSREFGRDLRRYASHERKMILDNHGLYDRKKRIFLKAGSEEEIFAHLGLDYVEPWERNA

SEQ ID NO: 537 - DNA, 1182 bp, synthetic construct
  misc_feature 1..1182: note = Variant of terminal deoxynucleotidyl transferase
  source 1..1182: mol_type = other DNA
atgcaccatcatcatcatcatggcggtagcggccatccgccgagcaataccccggagctggaagtgccgagcgttatcgcccgcaaggttagtcagtacagctgccagcgcaagaccacgctgaataactacaacaaaaagtttaccgacgcgttcgagatcatggccgagaactacgaatttaaagagaacgaaatcttctgtctggaatttctgcgcgccgcgagtctgctgaaatatctgccgttcccggttacccgcatgaaagacatccaaggtctgccgtgcattggcgaccaagttcgtgacgtgatcgaggagatcatcgaagaaggcgagagcagccgtgttaaagaagttctcaatgacgagcgctacaaggcctttaagcagttcaccagcgtgttcggtgtgggcgtgaaaaccagcgaaaagtggtttcgtatgggcctccgtacggttgaagagctgaaggccgacaagagtctgaagctgagcaagatgcagaaggcgggctttctgtattacgaggatctggtgagctgcgttagtaaagcggaagccgatgccgttacgctcatcgtgaagaacacggtgagtacctttctgccggatgcgctggtgaccatcacgggcggtttccgccgtggcaaaaagatgggccacgacatcgactttctgatcacgaatccgggcccgaaagaggatgacgaactgctccacaaagtggttgatctgctcaagaagcaaggtctgctgctgtactgcgacatcatcgagagcacgttcgtggaggaacaactgccaagtcgcaaaatcgacgccatggacaacttccagaagtgcttcgccattctcaagctgtaccagccgggcgtggataacagcagctataacacgagtaagaagagtgacatggccgaggttaaggtttggaaagcgatccgtgtggatctggtgatcacgccattcgagcagtacgcctatgcgctgctcggttggacgggcagccgcgaatttggtcgcgatctgcgccgctatgcgagtcatgagcgcaagatgatcctcgacaaccatggcctctacgaccgcaaaaagcgcatctttctgaaagcgggcagcgaagaagagattttcgcgcatctgggtctggattatgtggagccgtgggaacgcaacgcg

SEQ ID NO: 538 - protein, 394 aa, synthetic construct
  REGION 1..394: note = Variant of terminal deoxynucleotidyl transferase
MHHHHHHGGSGHPPSNTPELEVPSVIARKVSQYSCQRKTTLNNYNKKFTDAFEIMAENYEFKENEIFCLEFLRAASLLKYLPFPVTRMKDIQGLPCIGDQVRDVIEEIIEEGESSRVKEVLNDERYKAFKQFTSVFGVGVKTSEKWFRMGLRTVEELKADKSLKLSKMQKAGFLYYEDLVSCVSKAEADAVTLIVKNTVSTFLPDALVTITGGFRRGKKMGHDIDFLITNPGPKEDDELLHKVVDLLKKQGLLLYCDIIESTFVEEQLPSRKIDAMDNFQKCFAILKLYQPGVDNSSYNTSKKSDMAEVKVWKAIRVDLVITPFEQYAYALLGWTGSREFGRDLRRYASHERKMILDNHGLYDRKKRIFLKAGSEEEIFAHLGLDYVEPWERNA

SEQ ID NO: 539 - DNA, 1182 bp, synthetic construct
  misc_feature 1..1182: note = Variant of terminal deoxynucleotidyl transferase
  source 1..1182: mol_type = other DNA
atgcaccatcatcatcatcatggcggtagcggccatccgccgagcaataccccggagctggaagtgccgagcgttatcgcccgcaaggttagtcagtacagctgccagcgcaagaccacgctgaataactacaacaaaaagtttaccgacgcgttcgagatcatggccgagaactacgaatttaaagagaacgaaatcttctgtctggaatttctgcgcgccgcgagtctgctgaaatatctgccgttcccggttacccgcatgaaagacatccaaggtctgccgtgcattggcgaccaagttcgtgacgtgatcgaggagatcatcgaagaaggcgagagcagccctgttaaagaagttctcaatgacgagcgctacaaggcctttaagcagttcaccagcgtgttcggtgtgggcgtgaaaaccagcgaaaagtggtttcgtatgggcctccgtacggttgaagagctgaaggccgacaagagtctgaagctgagcaagatgcagaaggcgggctttctgtattacgaggatctggtgagctgcgttagtaaagcggaagccgatgccgttacgctcatcgtgaagaacacggtgagtacctttctgccggatgcgctggtgaccatcacgggcggtttccgccgtggcaaaaagatgggccacgacatcgactttctgatcacgaatccgggcccgaaagaggatgacgaactgctccacaaagtggttgatctgctcaagaagcaaggtctgctgctgtactgcgacatcatcgagagcacgttcgtggaggaacaactgccaagtcgcaaaatcgacgccatggacaacttccagaagtgcttcgccattctcaagctgtaccagccgggcgtggataacagcagctataacacgagtaagaagagtgacatggccgaggttaaggattggaaagcgatccgtgtggatctggtgatcacgccattcgagcagtacgcctatgcgctgctcggttggacgggcagccgcgaatttggtcgcgatctgcgccgctatgcgagtcatgagcgcaagatgatcctcgacaaccatggcctctacgaccgcaaaaagcgcatctttctgaaagcgggcagcgaagaagagattttcgcgcatctgggtctggattatgtggagccgtgggaacgcaacgcg

SEQ ID NO: 540 - protein, 394 aa, synthetic construct
  REGION 1..394: note = Variant of terminal deoxynucleotidyl transferase
MHHHHHHGGSGHPPSNTPELEVPSVIARKVSQYSCQRKTTLNNYNKKFTDAFEIMAENYEFKENEIFCLEFLRAASLLKYLPFPVTRMKDIQGLPCIGDQVRDVIEEIIEEGESSPVKEVLNDERYKAFKQFTSVFGVGVKTSEKWFRMGLRTVEELKADKSLKLSKMQKAGFLYYEDLVSCVSKAEADAVTLIVKNTVSTFLPDALVTITGGFRRGKKMGHDIDFLITNPGPKEDDELLHKVVDLLKKQGLLLYCDIIESTFVEEQLPSRKIDAMDNFQKCFAILKLYQPGVDNSSYNTSKKSDMAEVKDWKAIRVDLVITPFEQYAYALLGWTGSREFGRDLRRYASHERKMILDNHGLYDRKKRIFLKAGSEEEIFAHLGLDYVEPWERNA

SEQ ID NO: 541 - DNA, 1182 bp, synthetic construct
  misc_feature 1..1182: note = Variant of terminal deoxynucleotidyl transferase
  source 1..1182: mol_type = other DNA
atgcaccatcatcatcatcataggggtagcggccatccgccgagcaataccccggagctggaagtgccgagcgttatcgcccgcaaggttagtcagtacagctgccagcgcaagaccacgctgaataactacaacaaaaagtttaccgacgcgttcgagatcatggccgagaactacgaatttaaagagaacgaaatcttctgtctggaatttctgcgcgccgcgagtctgctgaaatatctgccgttcccggttacccgcatgaaagacatccaaggtctgccgtgcattggcgaccaagttcgtgacgtgatcgaggagatcatcgaagaaggcgagagcagccgtgttaaagaagttctcaatgacgagcgctacaaggcctttaagcagttcaccagcgtgttcggtgtgggcgtgaaaaccagcgaaaagtggtttcgtatgggcctccgtacggttgaagagctgaaggccgacaagagtctgaagctgagcaagatgcagaaggcgggctttctgtattacgaggatctggtgagctgcgttagtaaagcggaagccgatgccgttacgctcatcgtgaagaacacggtgagtacctttctgccggatgcgctggtgaccatcacgggcggtttccgccgtggcaaaaagatgggccacgacatcgactttctgatcacgaatccgggcccgaaagaggatgacgaactgctccacaaagtggttgatctgctcaagaagcaaggtctgctgctgtactgcgacatcatcgagagcacgttcgtggaggaacaactgccaagtcgcaaaatcgacgccatggacaacttccagaagtgcttcgccattctcaagctgtaccagccgggcgtggataacagcagctataacacgagtaagaagagtgacatggccgaggttaaggattggaaagcgatccgtgtggatctggtgatcacgccattcgagcagtacgcctatgcgctgctcggttggacgggcagccgcgaatttggtcgcgatctgcgccgctatgcgagtcatgagcgcaagatgatcctcgacaaccatggcctctacgaccgcaaaaagcgcatctttctgaaagcgggcagcgaagaagagattttcgcgcatctgggtctggattatgtggagccgtgggaacgcaacgcg

SEQ ID NO: 542 - protein, 394 aa, synthetic construct
  REGION 1..394: note = Variant of terminal deoxynucleotidyl transferase
MHHHHHHRGSGHPPSNTPELEVPSVIARKVSQYSCQRKTTLNNYNKKFTDAFEIMAENYEFKENEIFCLEFLRAASLLKYLPFPVTRMKDIQGLPCIGDQVRDVIEEIIEEGESSRVKEVLNDERYKAFKQFTSVFGVGVKTSEKWFRMGLRTVEELKADKSLKLSKMQKAGFLYYEDLVSCVSKAEADAVTLIVKNTVSTFLPDALVTITGGFRRGKKMGHDIDFLITNPGPKEDDELLHKVVDLLKKQGLLLYCDIIESTFVEEQLPSRKIDAMDNFQKCFAILKLYQPGVDNSSYNTSKKSDMAEVKDWKAIRVDLVITPFEQYAYALLGWTGSREFGRDLRRYASHERKMILDNHGLYDRKKRIFLKAGSEEEIFAHLGLDYVEPWERNA

SEQ ID NO: 543 - DNA, 1182 bp, synthetic construct
  misc_feature 1..1182: note = Variant of terminal deoxynucleotidyl transferase
  source 1..1182: mol_type = other DNA
atgcaccatcatcatcatcatggcggtagcggccatccgccgagcaataccccggagctggaagtgccgagcgttatcgcccgcaaggttagtcagtacagctgccagcgcaagaccacgctgaataactacaacaaaaagtttaccgacgcgttcgagatcatggccgagaactacgaatttaaagagaacgaaatcttctgtctggaatttctgcgcgccgcgagtctgctgaaatatctgccgttcccggttacccgcatgaaagacatccaaggtctgccgtgcattggcgaccaagttcgtgacgtgatcgaggagatcatcgaagaaggcgagagcagccgtgttaaagaagttctcaatgacgagcgctacaaggcctttaagcagttcaccagcgtgttcggtgtgggcgtgaaaaccagcgaaaagtggtttcgtatgggcctccgtacggttgaagagctgaaggccgacaagagtctgaagctgagcaagatgcagaaggcgggctttctgtattacgaggatctggtgagctgcgttagtaaagcggaagccgatgccgttacggcgatcgtgaagaacacggtgagtacctttctgccggatgcgctggtgaccatcacgggcggtttccgccgtggcaaaaagatgggccacgacatcgactttctgatcacgaatccgggcccgaaagaggatgacgaactgctccacaaagtggttgatctgctcaagaagcaaggtctgctgctgtactgcgacatcatcgagagcacgttcgtggaggaacaactgccaagtcgcaaaatcgacgccatggacaacttccagaagtgcttcgccattctcaagctgtaccagccgggcgtggataacagcagctataacacgagtaagaagagtgacatggccgaggttaaggattggaaagcgatccgtgtggatctggtgatcacgccattcgagcagtacgcctatgcgctgctcggttggacgggcagccgcgaatttggtcgcgatctgcgccgctatgcgagtcatgagcgcaagatgatcctcgacaaccatggcctctacgaccgcaaaaagcgcatctttctgaaagcgggcagcgaagaagagattttcgcgcatctgggtctggattatgtggagccgtgggaacgcaacgcg

SEQ ID NO: 544 - protein, 394 aa, synthetic construct
  REGION 1..394: note = Variant of terminal deoxynucleotidyl transferase
MHHHHHHGGSGHPPSNTPELEVPSVIARKVSQYSCQRKTTLNNYNKKFTDAFEIMAENYEFKENEIFCLEFLRAASLLKYLPFPVTRMKDIQGLPCIGDQVRDVIEEIIEEGESSRVKEVLNDERYKAFKQFTSVFGVGVKTSEKWFRMGLRTVEELKADKSLKLSKMQKAGFLYYEDLVSCVSKAEADAVTAIVKNTVSTFLPDALVTITGGFRRGKKMGHDIDFLITNPGPKEDDELLHKVVDLLKKQGLLLYCDIIESTFVEEQLPSRKIDAMDNFQKCFAILKLYQPGVDNSSYNTSKKSDMAEVKDWKAIRVDLVITPFEQYAYALLGWTGSREFGRDLRRYASHERKMILDNHGLYDRKKRIFLKAGSEEEIFAHLGLDYVEPWERNA

SEQ ID NO: 545 - DNA, 1182 bp, synthetic construct
  misc_feature 1..1182: note = Variant of terminal deoxynucleotidyl transferase
  source 1..1182: mol_type = other DNA
atgcaccatcatcatcatcatggcggtagcggccatccgccgagcaataccccggagctggaagtgccgagcgttatcgcccgcaaggttagtcagtacagctgccagcgcaagaccacgctgaataactacaacaaaaagaataccgacgcgttcgagatcatggccgagaactacgaatttaaagagaacgaaatcttctgtctggaatttctgcgcgccgcgagtctgctgaaatatctgccgttcccggttacccgcatgaaagacatccaaggtctgccgtgcattggcgaccaagttcgtgacgtgatcgaggagatcatcgaagaaggcgagagcagccgtgttaaagaagttctcaatgacgagcgctacaaggcctttaagcagttcaccagcgtgttcggtgtgggcgtgaaaaccagcgaaaagtggtttcgtatgggcctccgtacggttgaagagctgaaggccgacaagagtctgaagctgagcaagatgcagaaggcgggctttctgtattacgaggatctggtgagctgcgttagtaaagcggaagccgatgccgttacgctcatcgtgaagaacacggtgagtacctttctgccggatgcgctggtgaccatcacgggcggtttccgccgtggcaaaaagatgggccacgacatcgactttctgatcacgaatccgggcccgaaagaggatgacgaactgctccacaaagtggttgatctgctcaagaagcaaggtctgctgctgtactgcgacatcatcgagagcacgttcgtggaggaacaactgccaagtcgcaaaatcgacgccatggacaacttccagaagtgcttcgccattctcaagctgtaccagccgggcgtggataacagcagctataacacgagtaagaagagtgacatggccgaggttaaggattggaaagcgatccgtgtggatctggtgatcacgccattcgagcagtacgcctatgcgctgctcggttggacgggcagccgcgaatttggtcgcgatctgcgccgctatgcgagtcatgagcgcaagatgatcctcgacaaccatggcctctacgaccgcaaaaagcgcatctttctgaaagcgggcagcgaagaagagattttcgcgcatctgggtctggattatgtggagccgtgggaacgcaacgcg

SEQ ID NO: 546 - protein, 394 aa, synthetic construct
  REGION 1..394: note = Variant of terminal deoxynucleotidyl transferase
MHHHHHHGGSGHPPSNTPELEVPSVIARKVSQYSCQRKTTLNNYNKKNTDAFEIMAENYEFKENEIFCLEFLRAASLLKYLPFPVTRMKDIQGLPCIGDQVRDVIEEIIEEGESSRVKEVLNDERYKAFKQFTSVFGVGVKTSEKWFRMGLRTVEELKADKSLKLSKMQKAGFLYYEDLVSCVSKAEADAVTLIVKNTVSTFLPDALVTITGGFRRGKKMGHDIDFLITNPGPKEDDELLHKVVDLLKKQGLLLYCDIIESTFVEEQLPSRKIDAMDNFQKCFAILKLYQPGVDNSSYNTSKKSDMAEVKDWKAIRVDLVITPFEQYAYALLGWTGSREFGRDLRRYASHERKMILDNHGLYDRKKRIFLKAGSEEEIFAHLGLDYVEPWERNA

SEQ ID NO: 547 - DNA, 1182 bp, synthetic construct
  misc_feature 1..1182: note = Variant of terminal deoxynucleotidyl transferase
  source 1..1182: mol_type = other DNA
atgcaccatcatcatcatcatggcggtagcggccatccgccgagcaataccccggagctggaagtgccgagcgttatcgcccgcaaggttagtcagtacagctgccagcgcaagaccacgctgaataactacaacaaaaagtttaccgacgcgttcgagatcatggccgagaactacgaatttaaagagaacgaaatcttctgtctggaatttctgcgcgccgcgagtctgctgaaatatctgccgttcccggttacccgcatgaaagacatccaaggtctgccgtgcattggcgaccaagttcgtgacgtgatcgaggagatcatcgaagaaggcgagagcagccgtgttaaagaagttctcaatgacgagcgctacaaggcctttaagcagttcaccagcgtgttcggtgtgggcgtgaaaaccagcgaaaagtggtttcgtatgggcctccgtacggttgaagagctgaaggccgacaagagtctgaagctgagcaagatgcagaaggcgggctttctgtattacgaggatctggtgagctgcgttagtaaagcggaagccgatgccgttacgctcatcgtgaagaacacggtgagtacctttctgccggatgcgctggtgaccatcacgggcggtttccgccgtggcaaaaagatgggccacgacatcgactttctgatcacgaatccgggcccgaaagaggatgactcgctgctccacaaagtggttgatctgctcaagaagcaaggtctgctgctgtactgcgacatcatcgagagcacgttcgtggaggaacaactgccaagtcgcaaaatcgacgccatggacaacttccagaagtgcttcgccattctcaagctgtaccagccgggcgtggataacagcagctataacacgagtaagaagagtgacatggccgaggttaaggattggaaagcgatccgtgtggatctggtgatcacgccattcgagcagtacgcctatgcgctgctcggttggacgggcagccgcgaatttggtcgcgatctgcgccgctatgcgagtcatgagcgcaagatgatcctcgacaaccatggcctctacgaccgcaaaaagcgcatctttctgaaagcgggcagcgaagaagagattttcgcgcatctgggtctggattatgtggagccgtgggaacgcaacgcg

SEQ ID NO: 548 - protein, 394 aa, synthetic construct
  REGION 1..394: note = Variant of terminal deoxynucleotidyl transferase
MHHHHHHGGSGHPPSNTPELEVPSVIARKVSQYSCQRKTTLNNYNKKFTDAFEIMAENYEFKENEIFCLEFLRAASLLKYLPFPVTRMKDIQGLPCIGDQVRDVIEEIIEEGESSRVKEVLNDERYKAFKQFTSVFGVGVKTSEKWFRMGLRTVEELKADKSLKLSKMQKAGFLYYEDLVSCVSKAEADAVTLIVKNTVSTFLPDALVTITGGFRRGKKMGHDIDFLITNPGPKEDDSLLHKVVDLLKKQGLLLYCDIIESTFVEEQLPSRKIDAMDNFQKCFAILKLYQPGVDNSSYNTSKKSDMAEVKDWKAIRVDLVITPFEQYAYALLGWTGSREFGRDLRRYASHERKMILDNHGLYDRKKRIFLKAGSEEEIFAHLGLDYVEPWERNA

SEQ ID NO: 549 - DNA, 1182 bp, synthetic construct
  misc_feature 1..1182: note = Variant of terminal deoxynucleotidyl transferase
  source 1..1182: mol_type = other DNA
atgcaccatcatcatcatcatggcggtagcggccatccgccgagcaataccccggagctggaagtgccgagcgttatcgcccgcaaggttagtcagtacagctgccagcgcaagaccacgctgaataactacaacaaaaagtttaccgacgcgttcgagcttatggccgagaactacgaatttaaagagaacgaaatcttctgtctggaatttctgcgcgccgcgagtctgctgaaatatctgccgttcccggttacccgcatgaaagacatccaaggtctgccgtgcattggcgaccaagttcgtgacgtgatcgaggagatcatcgaagaaggcgagagcagccgtgttaaagaagttctcaatgacgagcgctacaaggcctttaagcagttcaccagcgtgttcggtgtgggcgtgaaaaccagcgaaaagtggtttcgtatgggcctccgtacggttgaagagctgaaggccgacaagagtctgaagctgagcaagatgcagaaggcgggctttctgtattacgaggatctggtgagctgcgttagtaaagcggaagccgatgccgttacgctcatcgtgaagaacacggtgagtacctttctgccggatgcgctggtgaccatcacgggcggtttccgccgtggcaaaaagatgggccacgacatcgactttctgatcacgaatccgggcccgaaagaggatgacgaactgctccacaaagtggttgatctgctcaagaagcaaggtctgctgctgtactgcgacatcatcgagagcacgttcgtggaggaacaactgccaagtcgcaaaatcgacgccatggacaacttccagaagtgcttcgccattctcaagctgtaccagccgggcgtggataacagcagctataacacgagtaagaagagtgacatggccgaggttaaggattggaaagcgatccgtgtggatctggtgatcacgccattcgagcagtacgcctatgcgctgctcggttggacgggcagccgcgaatttggtcgcgatctgcgccgctatgcgagtcatgagcgcaagatgatcctcgacaaccatggcctctacgaccgcaaaaagcgcatctttctgaaagcgggcagcgaagaagagattttcgcgcatctgggtctggattatgtggagccgtgggaacgcaacgcg

SEQ ID NO: 550 - protein, 394 aa, synthetic construct
  REGION 1..394: note = Variant of terminal deoxynucleotidyl transferase
MHHHHHHGGSGHPPSNTPELEVPSVIARKVSQYSCQRKTTLNNYNKKFTDAFELMAENYEFKENEIFCLEFLRAASLLKYLPFPVTRMKDIQGLPCIGDQVRDVIEEIIEEGESSRVKEVLNDERYKAFKQFTSVFGVGVKTSEKWFRMGLRTVEELKADKSLKLSKMQKAGFLYYEDLVSCVSKAEADAVTLIVKNTVSTFLPDALVTITGGFRRGKKMGHDIDFLITNPGPKEDDELLHKVVDLLKKQGLLLYCDIIESTFVEEQLPSRKIDAMDNFQKCFAILKLYQPGVDNSSYNTSKKSDMAEVKDWKAIRVDLVITPFEQYAYALLGWTGSREFGRDLRRYASHERKMILDNHGLYDRKKRIFLKAGSEEEIFAHLGLDYVEPWERNA

SEQ ID NO: 551 - DNA, 1182 bp, synthetic construct
  misc_feature 1..1182: note = Variant of terminal deoxynucleotidyl transferase
  source 1..1182: mol_type = other DNA
atgcaccatcatcatcatcatggcggtagcggccatccgccgagcaataccccggagctggaagtgccgagcgttatcgcccgcaaggttagtcagtacagctgccagcgcaagaccacgctgaataactacaacaaaaagtttaccgacgcgttcgagatcatggccgagaactacgaatttaaagagaacgaaatcttctgtctggaatttctgcgcgccgcgagtctgctgaaagggctgccgttcccggttacccgcatgaaagacatccaaggtctgccgtgcattggcgaccaagttcgtgacgtgatcgaggagatcatcgaagaaggcgagagcagccgtgttaaagaagttctcaatgacgagcgctacaaggcctttaagcagttcaccagcgtgttcggtgtgggcgtgaaaaccagcgaaaagtggtttcgtatgggcctccgtacggttgaagagctgaaggccgacaagagtctgaagctgagcaagatgcagaaggcgggctttctgtattacgaggatctggtgagctgcgttagtaaagcggaagccgatgccgttacgctcatcgtgaagaacacggtgagtacctttctgccggatgcgctggtgaccatcacgggcggtttccgccgtggcaaaaagatgggccacgacatcgactttctgatcacgaatccgggcccgaaagaggatgacgaactgctccacaaagtggttgatctgctcaagaagcaaggtctgctgctgtactgcgacatcatcgagagcacgttcgtggaggaacaactgccaagtcgcaaaatcgacgccatggacaacttccagaagtgcttcgccattctcaagctgtaccagccgggcgtggataacagcagctataacacgagtaagaagagtgacatggccgaggttaaggattggaaagcgatccgtgtggatctggtgatcacgccattcgagcagtacgcctatgcgctgctcggttggacgggcagccgcgaatttggtcgcgatctgcgccgctatgcgagtcatgagcgcaagatgatcctcgacaaccatggcctctacgaccgcaaaaagcgcatctttctgaaagcgggcagcgaagaagagattttcgcgcatctgggtctggattatgtggagccgtgggaacgcaacgcg

SEQ ID NO: 552 - protein, 394 aa, synthetic construct
  REGION 1..394: note = Variant of terminal deoxynucleotidyl transferase
MHHHHHHGGSGHPPSNTPELEVPSVIARKVSQYSCQRKTTLNNYNKKFTDAFEIMAENYEFKENEIFCLEFLRAASLLKGLPFPVTRMKDIQGLPCIGDQVRDVIEEIIEEGESSRVKEVLNDERYKAFKQFTSVFGVGVKTSEKWFRMGLRTVEELKADKSLKLSKMQKAGFLYYEDLVSCVSKAEADAVTLIVKNTVSTFLPDALVTITGGFRRGKKMGHDIDFLITNPGPKEDDELLHKVVDLLKKQGLLLYCDIIESTFVEEQLPSRKIDAMDNFQKCFAILKLYQPGVDNSSYNTSKKSDMAEVKDWKAIRVDLVITPFEQYAYALLGWTGSREFGRDLRRYASHERKMILDNHGLYDRKKRIFLKAGSEEEIFAHLGLDYVEPWERNA

SEQ ID NO: 553 - DNA, 1182 bp, synthetic construct
  misc_feature 1..1182: note = Variant of terminal deoxynucleotidyl transferase
  source 1..1182: mol_type = other DNA
atgcaccatcatcatcatcatggcggtagcggccatccgccgagcaataccccggagctggaagtgccgagcgttatcgcccgcaaggttagtcagtacagctgccagcgcaagaccacgctgaataactacaacaaaaagtttaccgacgcgttcgagatcatggccgagaactacgaatttaaagagaacgaaatcttctgtctggaatttctgcgcgccgcgagtctgctgaaatatctgccgttcccggttacccgcatgaaagacatccaaggtctgccgtgcattggcgaccaagttcgtgacgtgatcgaggagatcatcgaagaaggcgagagcagccgtgttaaagaagttctcaatgacgagcgctacaaggcctttaagcagttcaccagcgtgttcggtgtgggcgtgaaaaccagcgaaaagtggtttcgtatgggcctccgtacggttgaagagctgaaggccgacaagagtctgaagctgagcaagatgcagaaggcgggctttctgtattacgaggatctggtgagctgcgttagtaaagcggaagccgatgccgttacgctcatcgtgaagaacacggtgagtacctttctgccggatgcgctggtgaccatcacgggcggtttccgccgtggcaaaaagatgggccacgacatcgactttctgatcacgaatccgggcccgaaagaggatgacgaactgctccacaaagtggttgatctgctcaagaagcaaggtctgctgctgtactgcgacatcatcgagagcacgttcgtggaggaacaactgccaagtcgcaaaatcgacgccatggacaacttccagaagtgcttcgccattctcaagctgtaccagccgggcgtggataacagcagctataacacgagtaagaagagtgacatggccgaggttaaggattggaaagcgatccgtgtggatctggtgatcacgccattcttgcagtacgcctatgcgctgctcggttggacgggcagccgcgaatttggtcgcgatctgcgccgctatgcgagtcatgagcgcaagatgatcctcgacaaccatggcctctacgaccgcaaaaagcgcatctttctgaaagcgggcagcgaagaagagattttcgcgcatctgggtctggattatgtggagccgtgggaacgcaacgcg

SEQ ID NO: 554 - protein, 394 aa, synthetic construct
  REGION 1..394: note = Variant of terminal deoxynucleotidyl transferase
MHHHHHHGGSGHPPSNTPELEVPSVIARKVSQYSCQRKTTLNNYNKKFTDAFEIMAENYEFKENEIFCLEFLRAASLLKYLPFPVTRMKDIQGLPCIGDQVRDVIEEIIEEGESSRVKEVLNDERYKAFKQFTSVFGVGVKTSEKWFRMGLRTVEELKADKSLKLSKMQKAGFLYYEDLVSCVSKAEADAVTLIVKNTVSTFLPDALVTITGGFRRGKKMGHDIDFLITNPGPKEDDELLHKVVDLLKKQGLLLYCDIIESTFVEEQLPSRKIDAMDNFQKCFAILKLYQPGVDNSSYNTSKKSDMAEVKDWKAIRVDLVITPFLQYAYALLGWTGSREFGRDLRRYASHERKMILDNHGLYDRKKRIFLKAGSEEEIFAHLGLDYVEPWERNA

SEQ ID NO: 555 - DNA, 1182 bp, synthetic construct
  misc_feature 1..1182: note = Variant of terminal deoxynucleotidyl transferase
  source 1..1182: mol_type = other DNA
atgcaccatcatcatcatcatggcggtagcggccatccgccgagcaataccccggagctggaagtgccgagcgttatcgcccgcaaggttagtcagtacagctgccagcgcaagaccacgctgaataactacaacaaaaagtttaccgacgcgttcgagatcatggccgagaactacgaatttaaagagaacgaaatcttctgtctggaatttctgcgcgccgcgagtctgctgaaatatctgccgttcccggttacccgcatgaaagacatccaaggtctgccgtgcattggcgaccaagttcgtgaggtgatcgaggagatcatcgaagaaggcgagagcagccgtgttaaagaagttctcaatgacgagcgctacaaggcctttaagcagttcaccagcgtgttcggtgtgggcgtgaaaaccagcgaaaagtggtttcgtatgggcctccgtacggttgaagagctgaaggccgacaagagtctgaagctgagcaagatgcagaaggcgggctttctgtattacgaggatctggtgagctgcgttagtaaagcggaagccgatgccgttacgctcatcgtgaagaacacggtgagtacctttctgccggatgcgctggtgaccatcacgggcggtttccgccgtggcaaaaagatgggccacgacatcgactttctgatcacgaatccgggcccgaaagaggatgacgaactgctccacaaagtggttgatctgctcaagaagcaaggtctgctgctgtactgcgacatcatcgagagcacgttcgtggaggaacaactgccaagtcgcaaaatcgacgccatggacaacttccagaagtgcttcgccattctcaagctgtaccagccgggcgtggataacagcagctataacacgagtaagaagagtgacatggccgaggttaaggattggaaagcgatccgtgtggatctggtgatcacgccattcgagcagtacgcctatgcgctgctcggttggacgggcagccgcgaatttggtcgcgatctgcgccgctatgcgagtcatgagcgcaagatgatcctcgacaaccatggcctctacgaccgcaaaaagcgcatctttctgaaagcgggcagcgaagaagagattttcgcgcatctgggtctggattatgtggagccgtgggaacgcaacgcg

SEQ ID NO: 556 - protein, 394 aa, synthetic construct
  REGION 1..394: note = Variant of terminal deoxynucleotidyl transferase
MHHHHHHGGSGHPPSNTPELEVPSVIARKVSQYSCQRKTTLNNYNKKFTDAFEIMAENYEFKENEIFCLEFLRAASLLKYLPFPVTRMKDIQGLPCIGDQVREVIEEIIEEGESSRVKEVLNDERYKAFKQFTSVFGVGVKTSEKWFRMGLRTVEELKADKSLKLSKMQKAGFLYYEDLVSCVSKAEADAVTLIVKNTVSTFLPDALVTITGGFRRGKKMGHDIDFLITNPGPKEDDELLHKVVDLLKKQGLLLYCDIIESTFVEEQLPSRKIDAMDNFQKCFAILKLYQPGVDNSSYNTSKKSDMAEVKDWKAIRVDLVITPFEQYAYALLGWTGSREFGRDLRRYASHERKMILDNHGLYDRKKRIFLKAGSEEEIFAHLGLDYVEPWERNA

SEQ ID NO: 557 - DNA, 1182 bp, synthetic construct
  misc_feature 1..1182: note = Variant of terminal deoxynucleotidyl transferase
  source 1..1182: mol_type = other DNA
atgcaccatcatcatcatcatggcggtagcggccatccgccgagcaataccccggagctggaagtgccgagcgttatcgcccgcaaggttagtcagtacagctgccagcgcaagaccacgctgaataactacaacaaaaagtttaccgacgcgttcgagatcatggccgagaactacgaatttaaagagaacgaaatcttctgtctggaatttctgcgcgccgcgagtctgctgaaatatctgccgttcccggttacccgcatgaaagacatccaaggtctgccgtgcattggcgaccaagttcgtgacgtgatcgaggagatcatcgaagaaggcgagagcagccgtgttaaagaagttctcaatgacgagcgctacaaggcctttaagcagttcaccagcgtgttcggtgtgggcgtgaaaaccagcgaaaagtggtttcgtatgggcctccgtacggttgaagagctgaaggccgacaagagtctggatctgagcaagatgcagaaggcgggctttctgtattacgaggatctggtgagctgcgttagtaaagcggaagccgatgccgttacgctcatcgtgaagaacacggtgagtacctttctgccggatgcgctggtgaccatcacgggcggtttccgccgtggcaaaaagatgggccacgacatcgactttctgatcacgaatccgggcccgaaagaggatgacgaactgctccacaaagtggttgatctgctcaagaagcaaggtctgctgctgtactgcgacatcatcgagagcacgttcgtggaggaacaactgccaagtcgcaaaatcgacgccatggacaacttccagaagtgcttcgccattctcaagctgtaccagccgggcgtggataacagcagctataacacgagtaagaagagtgacatggccgaggttaaggattggaaagcgatccgtgtggatctggtgatcacgccattcgagcagtacgcctatgcgctgctcggttggacgggcagccgcgaatttggtcgcgatctgcgccgctatgcgagtcatgagcgcaagatgatcctcgacaaccatggcctctacgaccgcaaaaagcgcatctttctgaaagcgggcagcgaagaagagattttcgcgcatctgggtctggattatgtggagccgtgggaacgcaacgcg

SEQ ID NO: 558 - protein, 394 aa, synthetic construct
  REGION 1..394: note = Variant of terminal deoxynucleotidyl transferase
MHHHHHHGGSGHPPSNTPELEVPSVIARKVSQYSCQRKTTLNNYNKKFTDAFEIMAENYEFKENEIFCLEFLRAASLLKYLPFPVTRMKDIQGLPCIGDQVRDVIEEIIEEGESSRVKEVLNDERYKAFKQFTSVFGVGVKTSEKWFRMGLRTVEELKADKSLDLSKMQKAGFLYYEDLVSCVSKAEADAVTLIVKNTVSTFLPDALVTITGGFRRGKKMGHDIDFLITNPGPKEDDELLHKVVDLLKKQGLLLYCDIIESTFVEEQLPSRKIDAMDNFQKCFAILKLYQPGVDNSSYNTSKKSDMAEVKDWKAIRVDLVITPFEQYAYALLGWTGSREFGRDLRRYASHERKMILDNHGLYDRKKRIFLKAGSEEEIFAHLGLDYVEPWERNA

SEQ ID NO: 559 - DNA, 1182 bp, synthetic construct
  misc_feature 1..1182: note = Variant of terminal deoxynucleotidyl transferase
  source 1..1182: mol_type = other DNA
atgcaccatcatcatcatcatggcggtagcggccatccgccgagcaataccccggagctggaagtgccgagcgttatcgcccgcaaggttagtcagtacagctgccagcgcaagaccacgctgaataactacaacaaaaagtttaccgacgcgttcgagatcatggccgagaactacgaatttaaagagaacgaaatcttctgtctggaatttctgcgcgccgcgagtctgctgaaatatctgccgttcccggttacccgcatgaaagacatccaaggtctgccgtgcattggcgaccaagttcgtgacgtgatcgaggagatcatcgaagaaggcgagagcagccgtgttaaagaagttctcaatgacgagcgctacaaggcctttaagcagttcaccagcgtgttcggtgtgggcgtgaaaaccagcgaaaagtggtttcgtatgggcctccgtacggttgaagagctgaaggccgacaagagtctgaagctgagcaagatgcagaaggcgggctttctgtattacgaggatctggtgagctgcgttagtaaagcggaagccgatgccgttacgctcatcgtgaagaacacggtgagtacctttctgccggatgcgctggtgaccatcacgggcggtttccgccgtggcaaaaagatgggccacgacatcgactttctgatcacgaatccgggcccgaaagaggatgacgaactgctccacaaagtggttgatctgctcaagaagcaaggtctgctgctgtactgcgacatcatcgagagcacgttcgtggaggaacaactgccaagtcgcaaaatcgacgccatggacaacttccagaagtgcttcgccattctcaagctgtaccagccgggcgtggataacagcagctataacacgagtaagaagagtgacatggccgaggttggggattggaaagcgatccgtgtggatctggtgatcacgccattcgagcagtacgcctatgcgctgctcggttggacgggcagccgcgaatttggtcgcgatctgcgccgctatgcgagtcatgagcgcaagatgatcctcgacaaccatggcctctacgaccgcaaaaagcgcatctttctgaaagcgggcagcgaagaagagattttcgcgcatctgggtctggattatgtggagccgtgggaacgcaacgcg

SEQ ID NO: 560 - protein, 394 aa, synthetic construct
  REGION 1..394: note = Variant of terminal deoxynucleotidyl transferase
MHHHHHHGGSGHPPSNTPELEVPSVIARKVSQYSCQRKTTLNNYNKKFTDAFEIMAENYEFKENEIFCLEFLRAASLLKYLPFPVTRMKDIQGLPCIGDQVRDVIEEIIEEGESSRVKEVLNDERYKAFKQFTSVFGVGVKTSEKWFRMGLRTVEELKADKSLKLSKMQKAGFLYYEDLVSCVSKAEADAVTLIVKNTVSTFLPDALVTITGGFRRGKKMGHDIDFLITNPGPKEDDELLHKVVDLLKKQGLLLYCDIIESTFVEEQLPSRKIDAMDNFQKCFAILKLYQPGVDNSSYNTSKKSDMAEVGDWKAIRVDLVITPFEQYAYALLGWTGSREFGRDLRRYASHERKMILDNHGLYDRKKRIFLKAGSEEEIFAHLGLDYVEPWERNA

SEQ ID NO: 561 - DNA, 1182 bp, synthetic construct
  misc_feature 1..1182: note = Variant of terminal deoxynucleotidyl transferase
  source 1..1182: mol_type = other DNA
atgcaccatcatcatcatcatggcggtagcggccatccgccgagcgttaccccggagctggaagtgccgagcgttatcgcccgcaaggttagtcagtacagctgccagcgcaagaccacgctgaataactacaacaaaaagtttaccgacgcgttcgagatcatggccgagaactacgaatttaaagagaacgaaatcttctgtctggaatttctgcgcgccgcgagtctgctgaaatatctgccgttcccggttacccgcatgaaagacatccaaggtctgccgtgcattggcgaccaagttcgtgacgtgatcgaggagatcatcgaagaaggcgagagcagccgtgttaaagaagttctcaatgacgagcgctacaaggcctttaagcagttcaccagcgtgttcggtgtgggcgtgaaaaccagcgaaaagtggtttcgtatgggcctccgtacggttgaagagctgaaggccgacaagagtctgaagctgagcaagatgcagaaggcgggctttctgtattacgaggatctggtgagctgcgttagtaaagcggaagccgatgccgttacgctcatcgtgaagaacacggtgagtacctttctgccggatgcgctggtgaccatcacgggcggtttccgccgtggcaaaaagatgggccacgacatcgactttctgatcacgaatccgggcccgaaagaggatgacgaactgctccacaaagtggttgatctgctcaagaagcaaggtctgctgctgtactgcgacatcatcgagagcacgttcgtggaggaacaactgccaagtcgcaaaatcgacgccatggacaacttccagaagtgcttcgccattctcaagctgtaccagccgggcgtggataacagcagctataacacgagtaagaagagtgacatggccgaggttaaggattggaaagcgatccgtgtggatctggtgatcacgccattcgagcagtacgcctatgcgctgctcggttggacgggcagccgcgaatttggtcgcgatctgcgccgctatgcgagtcatgagcgcaagatgatcctcgacaaccatggcctctacgaccgcaaaaagcgcatctttctgaaagcgggcagcgaagaagagattttcgcgcatctgggtctggattatgtggagccgtgggaacgcaacgcg

SEQ ID NO: 562 - protein, 394 aa, synthetic construct
  REGION 1..394: note = Variant of terminal deoxynucleotidyl transferase
MHHHHHHGGSGHPPSVTPELEVPSVIARKVSQYSCQRKTTLNNYNKKFTDAFEIMAENYEFKENEIFCLEFLRAASLLKYLPFPVTRMKDIQGLPCIGDQVRDVIEEIIEEGESSRVKEVLNDERYKAFKQFTSVFGVGVKTSEKWFRMGLRTVEELKADKSLKLSKMQKAGFLYYEDLVSCVSKAEADAVTLIVKNTVSTFLPDALVTITGGFRRGKKMGHDIDFLITNPGPKEDDELLHKVVDLLKKQGLLLYCDIIESTFVEEQLPSRKIDAMDNFQKCFAILKLYQPGVDNSSYNTSKKSDMAEVKDWKAIRVDLVITPFEQYAYALLGWTGSREFGRDLRRYASHERKMILDNHGLYDRKKRIFLKAGSEEEIFAHLGLDYVEPWERNA

SEQ ID NO: 563 - DNA, 1182 bp, synthetic construct
  misc_feature 1..1182: note = Variant of terminal deoxynucleotidyl transferase
  source 1..1182: mol_type = other DNA
atgcaccatcatcatcatcatggcggtagcggccatccgccgagcaataccccggagctggaagtgccgagcgttatcgcccgcaaggttagtcagtacagctgccagcgcaagaccacgctgaataactacaacaaaaagtttaccgacgcgttcgagatcatggccgagaactacgaatttaaagagaacgaaatcttctgtctggaatttctgcgcgccgcgagtctgctgaaatatctgccgttcccggttacccgcatgaaagacatccaaggtctgccgtgcattggcgaccaagttcgtgacgtgatcgaggagatcatcgaagaaggcgagagcagccgtgttaaagaagttctcaatgacgagcgctacaaggcctttaagcagttcaccagcgtgttcggtgtgggcgtgaaaaccagcgaaaagtggtttcgtatgggcctccgtacggttgaagagctgaaggccgacaagagtctgaagctgagcaagatgcagaaggcgggctttctgtattacgaggatctggtgagctgcgttagtaaagcggaagccgatgccgttacgctcatcgtgaagaacacggtgagtacctttctgccggatgcgctggtgaccatcacgggcggtttccgccgtggcaaaaagatgggccacgacatcgactttctgatcacgaatccgggcccgaaagaggatgacgaactgctccacaaagtggttgatctgctcaagaagcaaggtctgctgctgtactgcgacatcatcgagagcacgttcgtggaggaacaactgccaagtcgcaaaatcgacgccatggacaacttccagaagtgcttcgccattctcaagctgtaccagccgggcgtggataacagcagctataacacgagtaagaagagtgacatggccgaggttaaggattggaaagcgatccgtgtggatctggtgatcacgccattcgagcagtacgcctatgcgctgctcggttggacgggcagccgcgaatttggtcgcgatctgcgccgctatgcgagtgaggagcgcaagatgatcctcgacaaccatggcctctacgaccgcaaaaagcgcatctttctgaaagcgggcagcgaagaagagattttcgcgcatctgggtctggattatgtggagccgtgggaacgcaacgcg

SEQ ID NO: 564 - protein, 394 aa, synthetic construct
  REGION 1..394: note = Variant of terminal deoxynucleotidyl transferase
MHHHHHHGGSGHPPSNTPELEVPSVIARKVSQYSCQRKTTLNNYNKKFTDAFEIMAENYEFKENEIFCLEFLRAASLLKYLPFPVTRMKDIQGLPCIGDQVRDVIEEIIEEGESSRVKEVLNDERYKAFKQFTSVFGVGVKTSEKWFRMGLRTVEELKADKSLKLSKMQKAGFLYYEDLVSCVSKAEADAVTLIVKNTVSTFLPDALVTITGGFRRGKKMGHDIDFLITNPGPKEDDELLHKVVDLLKKQGLLLYCDIIESTFVEEQLPSRKIDAMDNFQKCFAILKLYQPGVDNSSYNTSKKSDMAEVKDWKAIRVDLVITPFEQYAYALLGWTGSREFGRDLRRYASEERKMILDNHGLYDRKKRIFLKAGSEEEIFAHLGLDYVEPWERNA

SEQ ID NO: 565 - DNA, 1182 bp, synthetic construct
  misc_feature 1..1182: note = Variant of terminal deoxynucleotidyl transferase
  source 1..1182: mol_type = other DNA
atgcaccatcatcatcatcatggcggtagcggccatccgccgagcaataccccggagctggaagtgccgagcgttatcgcccgcaaggttagtcagtacagctgccagcgcaagaccacgctgaataactacaacaaaaagtttaccgacgcgttcgagatcatggccgagaactacgaatttaaagagaacgaaatcttctgtctggaatttctgcgcgccgcgagtctgctgaaatatctgccgttcccggttacccgcatgaaagacatccaaggtctgccgtgcattggcgaccaagttcgtgacgtgatcgaggagatcatcgaagaaggcgagagcagccgtgttaaagaagttctcaatgacgagcgctacaaggcctttaagcagttcaccagcgtgttcggtgtgggcgtgaaaaccagcgaaaagtggtttcgtatgggcctccgtacggttgaagagctgaaggccgacaagagtctgaagctgagcaagatgcagaaggcgggctttctgtattacgaggatctggtgagctgcgttagtaaagcggaagccgatgccgttacgctcatcgtgaagaacacggtgagtacctttctgccggatgcgctggtgaccatcacgggcggtttccgccgtggcaaaaagatgggccacgacatcgactttctgatcacgaatccgggcccgaaagaggatgacgaactgctccacaaagtggttgatctgctcaagaagcaaggtctgctgctgtactgcgacatcatcgagagcgggttcgtggaggaacaactgccaagtcgcaaaatcgacgccatggacaacttccagaagtgcttcgccattctcaagctgtaccagccgggcgtggataacagcagctataacacgagtaagaagagtgacatggccgaggttaaggattggaaagcgatccgtgtggatctggtgatcacgccattcgagcagtacgcctatgcgctgctcggttggacgggcagccgcgaatttggtcgcgatctgcgccgctatgcgagtcatgagcgcaagatgatcctcgacaaccatggcctctacgaccgcaaaaagcgcatctttctgaaagcgggcagcgaagaagagattttcgcgcatctgggtctggattatgtggagccgtgggaacgcaacgcg

SEQ ID NO: 566 - protein, 394 aa, synthetic construct
  REGION 1..394: note = Variant of terminal deoxynucleotidyl transferase
MHHHHHHGGSGHPPSNTPELEVPSVIARKVSQYSCQRKTTLNNYNKKFTDAFEIMAENYEFKENEIFCLEFLRAASLLKYLPFPVTRMKDIQGLPCIGDQVRDVIEEIIEEGESSRVKEVLNDERYKAFKQFTSVFGVGVKTSEKWFRMGLRTVEELKADKSLKLSKMQKAGFLYYEDLVSCVSKAEADAVTLIVKNTVSTFLPDALVTITGGFRRGKKMGHDIDFLITNPGPKEDDELLHKVVDLLKKQGLLLYCDIIESGFVEEQLPSRKIDAMDNFQKCFAILKLYQPGVDNSSYNTSKKSDMAEVKDWKAIRVDLVITPFEQYAYALLGWTGSREFGRDLRRYASHERKMILDNHGLYDRKKRIFLKAGSEEEIFAHLGLDYVEPWERNA

SEQ ID NO: 567 - DNA, 1182 bp, synthetic construct
  misc_feature 1..1182: note = Variant of terminal deoxynucleotidyl transferase
  source 1..1182: mol_type = other DNA
atgcaccatcatcatcatcatggcggtagcggccatccgccgagcaataccccggagctggaagtgccgagcgttatcgcccgcaaggttagtcagtacagctgccagcgcaagaccacgctgaataactacaacaaaaagtttaccgacgcgttcgagatcatggccgagaactacgaatttaaagagaacgaaatcttctgtctggaatttctgcgcgccgcgagtctgctgaaatatctgccgttcccggttacccgcatgaaagacatccaaggtctgccgtgcattggcgaccaagttcgtgacgtgatcgaggagatcatcgaagaaggcgagagcagccgtgttaaagaagttctcaatgacgagcgctacaaggcctttaagcagttcaccagcgtgttcggtgtgggcgtgaaaaccagcgaaaagtggtttcgtatgggcctccgtacggttgaagagctgaaggccgacaagagtctgaagctgagcaagatgcagaaggcgggctttctgtattacgaggatctggtgagctgcgttagtaaagcggaagccgatgccgttacgctcatcgtgaagaacacggtgagtacctttctgccggatgcgctggtgaccatcacgggcggtttccgccgtggcaaaaagatgggccacgacatcgactttctgatcacgaatccgggcccgaaagaggatgacgaactgctccacaaagtggttgatctgctcaagaagcaaggtctgctgctgtactgcgacatcatcgagagcacgttcgtggaggaacaactgccaagtcgcaaaatcgacgccatggacaacttccagaagtgcttcgccattctcaagctgtaccagccgggcgtggataacagcagctataacacgagtaagaagagtgacatggccgaggttaaggattggaaagcgatccgtgtggatctggtgatcacgccattcgagcagtacgcctatgcgctgctcggttggacgggcagccgcgaatttggtcgcgatctgcgccgctatgcgagtcatgagcgcaagatgatcctcgacaaccatggcctctacgaccgcaaaaagcgcatctttctgaaagcgggcagcgaagaagagattttcgcgcatctgggtctggattatgtgcagccgtgggaacgcaacgcg

SEQ ID NO: 568 - protein, 394 aa, synthetic construct
  REGION 1..394: note = Variant of terminal deoxynucleotidyl transferase
MHHHHHHGGSGHPPSNTPELEVPSVIARKVSQYSCQRKTTLNNYNKKFTDAFEIMAENYEFKENEIFCLEFLRAASLLKYLPFPVTRMKDIQGLPCIGDQVRDVIEEIIEEGESSRVKEVLNDERYKAFKQFTSVFGVGVKTSEKWFRMGLRTVEELKADKSLKLSKMQKAGFLYYEDLVSCVSKAEADAVTLIVKNTVSTFLPDALVTITGGFRRGKKMGHDIDFLITNPGPKEDDELLHKVVDLLKKQGLLLYCDIIESTFVEEQLPSRKIDAMDNFQKCFAILKLYQPGVDNSSYNTSKKSDMAEVKDWKAIRVDLVITPFEQYAYALLGWTGSREFGRDLRRYASHERKMILDNHGLYDRKKRIFLKAGSEEEIFAHLGLDYVQPWERNA

SEQ ID NO: 569 - DNA, 1182 bp, synthetic construct
  misc_feature 1..1182: note = Variant of terminal deoxynucleotidyl transferase
  source 1..1182: mol_type = other DNA
atgcaccatcatcatcatcatggcggtagcggccatccgccgagcaataccccggagctggaagtgccgagcgttatcgcccgcaaggttagtcagtacagctgccagcgcaagaccacgctgaataactacaacaaaaagtttaccgacgcgttcgagatcatggccgagaactacaagtttaaagagaacgaaatcttctgtctggaatttctgcgcgccgcgagtctgctgaaatatctgccgttcccggttacccgcatgaaagacatccaaggtctgccgtgcattggcgaccaagttcgtgacgtgatcgaggagatcatcgaagaaggcgagagcagccgtgttaaagaagttctcaatgacgagcgctacaaggcctttaagcagttcaccagcgtgttcggtgtgggcgtgaaaaccagcgaaaagtggtttcgtatgggcctccgtacggttgaagagctgaaggccgacaagagtctgaagctgagcaagatgcagaaggcgggctttctgtattacgaggatctggtgagctgcgttagtaaagcggaagccgatgccgttacgctcatcgtgaagaacacggtgagtacctttctgccggatgcgctggtgaccatcacgggcggtttccgccgtggcaaaaagatgggccacgacatcgactttctgatcacgaatccgggcccgaaagaggatgacgaactgctccacaaagtggttgatctgctcaagaagcaaggtctgctgctgtactgcgacatcatcgagagcacgttcgtggaggaacaactgccaagtcgcaaaatcgacgccatggacaacttccagaagtgcttcgccattctcaagctgtaccagccgggcgtggataacagcagctataacacgagtaagaagagtgacatggccgaggttaaggattggaaagcgatccgtgtggatctggtgatcacgccattcgagcagtacgcctatgcgctgctcggttggacgggcagccgcgaatttggtcgcgatctgcgccgctatgcgagtcatgagcgcaagatgatcctcgacaaccatggcctctacgaccgcaaaaagcgcatctttctgaaagcgggcagcgaagaagagattttcgcgcatctgggtctggattatgtggagccgtgggaacgcaacgcg

SEQ ID NO: 570 - protein, 394 aa, synthetic construct
  REGION 1..394: note = Variant of terminal deoxynucleotidyl transferase
MHHHHHHGGSGHPPSNTPELEVPSVIARKVSQYSCQRKTTLNNYNKKFTDAFEIMAENYKFKENEIFCLEFLRAASLLKYLPFPVTRMKDIQGLPCIGDQVRDVIEEIIEEGESSRVKEVLNDERYKAFKQFTSVFGVGVKTSEKWFRMGLRTVEELKADKSLKLSKMQKAGFLYYEDLVSCVSKAEADAVTLIVKNTVSTFLPDALVTITGGFRRGKKMGHDIDFLITNPGPKEDDELLHKVVDLLKKQGLLLYCDIIESTFVEEQLPSRKIDAMDNFQKCFAILKLYQPGVDNSSYNTSKKSDMAEVKDWKAIRVDLVITPFEQYAYALLGWTGSREFGRDLRRYASHERKMILDNHGLYDRKKRIFLKAGSEEEIFAHLGLDYVEPWERNA

SEQ ID NO: 571 - DNA, 1182 bp, synthetic construct
  misc_feature 1..1182: note = Variant of terminal deoxynucleotidyl transferase
  source 1..1182: mol_type = other DNA
atgcaccatcatcatcatcatggcggtagcggccatccgccgagcaataccccggagctggaagtgccgagcgttatcgcccgcaaggttagtcagtacagctgccagcgcaagaccacgctgaataactacaacaaaaagtttaccgacgcgttcgagatcatggccgagaactacaagtttaaagagaacgaaatcttctgtctggaatttctgcgcgccgcgagtctgctgaaatatctgccgttcccggttacccgcatgaaagacatccaaggtctgccgtgcattggcgaccaagttcgtgacgtgatcgaggagatcatcgaagaaggcgagagcagccgtgttaaagaagttctcaatgacgagcgctacaaggcctttaagcagttcaccagcgtgttcggtgtgggcgtgaaaaccagcgaaaagtggtttcgtatgggcctccgtacggttgaagagctgaaggccgacaagagtctgaagctgagcaagatgcagaaggcgggctttctgtattacgaggatctggtgagctgcgttagtaaagcggaagccgatgccgttacgctcatcgtgaagaacacggtgagtacctttctgccggatgcgctggtgaccatcacgggcggtttccgccgtggcaaaaagatgggccacgacatcgactttctgatcacgaatccgggcccgaaagaggatgacgaactgctccacaaagtggttgatctgctcaagaagcaaggtctgctgctgtactgcgacatcaaggagagcacgttcgtggaggaacaactgccaagtcgcaaaatcgacgccatggacaacttccagaagtgcttcgccattctcaagctgtaccagccgggcgtggataacagcagctataacacgagtaagaagagtgacatggccgaggttaaggattggaaagcgatccgtgtggatctggtgatcacgccattcgagcagtacgcctatgcgctgctcggttggacgggcagccgcgaatttggtcgcgatctgcgccgctatgcgagtcatgagcgcaagatgatcctcgacaaccatggcctctacgaccgcaaaaagcgcatctttctgaaagcgggcagcgaagaagagattttcgcgcatctgggtctggattatgtggagccgtgggaacgcaacgcg

SEQ ID NO: 572 - protein, 394 aa, synthetic construct
  REGION 1..394: note = Variant of terminal deoxynucleotidyl transferase
MHHHHHHGGSGHPPSNTPELEVPSVIARKVSQYSCQRKTTLNNYNKKFTDAFEIMAENYKFKENEIFCLEFLRAASLLKYLPFPVTRMKDIQGLPCIGDQVRDVIEEIIEEGESSRVKEVLNDERYKAFKQFTSVFGVGVKTSEKWFRMGLRTVEELKADKSLKLSKMQKAGFLYYEDLVSCVSKAEADAVTLIVKNTVSTFLPDALVTITGGFRRGKKMGHDIDFLITNPGPKEDDELLHKVVDLLKKQGLLLYCDIKESTFVEEQLPSRKIDAMDNFQKCFAILKLYQPGVDNSSYNTSKKSDMAEVKDWKAIRVDLVITPFEQYAYALLGWTGSREFGRDLRRYASHERKMILDNHGLYDRKKRIFLKAGSEEEIFAHLGLDYVEPWERNA

SEQ ID NO: 573 - DNA, 1182 bp, synthetic construct
  misc_feature 1..1182: note = Variant of terminal deoxynucleotidyl transferase
  source 1..1182: mol_type = other DNA
atgcaccatcatcatcatcatggcggtagcggccatccgccgagcaataccccggagctggaagtgccgagcgttatcgcccgcaaggttagtcagtacagctgccagcgcaagaccacgctgaataactacaacaaaaagtttaccgacgcgttcgagatcatggccgagaactacaagtttaaagagaacgaaatcttctgtctggaatttctgcgcgccgcgagtctgctgaaatatctgccgttcccggttacccgcatgaaagacatccaaggtctgccgtgcattggcgaccaagttcgtgacgtgatcgaggagatcatcgaagaaggcgagagcagccgtgttaaagaagttctcaatgacgagcgctacaaggcctttaagcagttcaccagcgtgttcggtgtgggcgtgaaaaccagcgaaaagtggtttcgtatgggcctccgtacggttgaagagctgaaggccgacaagagtctgaagctgagcaagatgcagaaggcgggctttctgtattacgaggatctggtgagctgcgttagtaaagcggaagccgatgccgttacgctcatcgtgaagaacacggtgagtacctttctgccggatgcgctggtgaccatcacgggcggtttccgccgtggcaaaaagatgggccacgacatcgactttctgatcacgaatccgggcccgaaagaggatgacgaactgctccacaaagtggttgatctgctcaagaagcaaggtctgctgctgtactgcgacatcatcgagagcacgttcgtggaggaacaactgccaagtcgcaaaatcgacgccatggaccacttccagaagtgcttcgccattctcaagctgtaccagccgggcgtggataacagcagctataacacgagtaagaagagtgacatggccgaggttaaggattggaaagcgatccgtgtggatctggtgatcacgccattcgagcagtacgcctatgcgctgctcggttggacgggcagccgcgaatttggtcgcgatctgcgccgctatgcgagtcatgagcgcaagatgatcctcgacaaccatggcctctacgaccgcaaaaagcgcatctttctgaaagcgggcagcgaagaagagattttcgcgcatctgggtctggattatgtggagccgtgggaacgcaacgcg

SEQ ID NO: 574 - protein, 394 aa, synthetic construct
  REGION 1..394: note = Variant of terminal deoxynucleotidyl transferase
MHHHHHHGGSGHPPSNTPELEVPSVIARKVSQYSCQRKTTLNNYNKKFTDAFEIMAENYKFKENEIFCLEFLRAASLLKYLPFPVTRMKDIQGLPCIGDQVRDVIEEIIEEGESSRVKEVLNDERYKAFKQFTSVFGVGVKTSEKWFRMGLRTVEELKADKSLKLSKMQKAGFLYYEDLVSCVSKAEADAVTLIVKNTVSTFLPDALVTITGGFRRGKKMGHDIDFLITNPGPKEDDELLHKVVDLLKKQGLLLYCDIIESTFVEEQLPSRKIDAMDHFQKCFAILKLYQPGVDNSSYNTSKKSDMAEVKDWKAIRVDLVITPFEQYAYALLGWTGSREFGRDLRRYASHERKMILDNHGLYDRKKRIFLKAGSEEEIFAHLGLDYVEPWERNA

SEQ ID NO: 575 - DNA, 1182 bp, synthetic construct
  misc_feature 1..1182: note = Variant of terminal deoxynucleotidyl transferase
  source 1..1182: mol_type = other DNA
atgcaccatcatcatcatcatggcggtagcggccatccgccgagcaataccccggagctggaagtgccgagcgttatcgcccgcaaggttagtcagtacagctgccagcgcaagaccacgctgaataactacaacaaaaagtttaccgacgcgttcgagatcatggccgagaactacgagtttaaagagaacaaaatcttctgtctggaatttctgcgcgccgcgagtctgctgaaatatctgccgttcccggttacccgcatgaaagacatccaaggtctgccgtgcattggcgaccaagttcgtgacgtgatcgaggagatcatcgaagaaggcgagagcagccgtgttaaagaagttctcaatgacgagcgctacaaggcctttaagcagttcaccagcgtgttcggtgtgggcgtgaaaaccagcgaaaagtggtttcgtatgggcctccgtacggttgaagagctgaaggccgacaagagtctgaagctgagcaagatgcagaaggcgggctttctgtattacgaggatctggtgagctgcgttagtaaagcggaagccgatgccgttacgctcatcgtgaagaacacggtgagtacctttctgccggatgcgctggtgaccatcacgggcggtttccgccgtggcaaaaagatgggccacgacatcgactttctgatcacgaatccgggcccgaaagaggatgacgaactgctccacaaagtggttgatctgctcaagaagcaaggtctgctgctgtactgcgacatccaggagagcacgttcgtggaggaacaactgccaagtcgcaaaatcgacgccatggacaacttccagaagtgcttcgccattctcaagctgtaccagccgggcgtggataacagcagctataacacgagtaagaagagtgacatggccgaggttaaggattggaaagcgatccgtgtggatctggtgatcacgccattcgagcagtacgcctatgcgctgctcggttggacgggcagccgcgaatttggtcgcgatctgcgccgctatgcgagtcatgagcgcaagatgatcctcgacaaccatggcctctacgaccgcaaaaagcgcatctttctgaaagcgggcagcgaagaagagattttcgcgcatctgggtctggattatgtggagccgtgggaacgcaacgcg

SEQ ID NO: 576 - protein, 394 aa, synthetic construct
  REGION 1..394: note = Variant of terminal deoxynucleotidyl transferase
MHHHHHHGGSGHPPSNTPELEVPSVIARKVSQYSCQRKTTLNNYNKKFTDAFEIMAENYEFKENKIFCLEFLRAASLLKYLPFPVTRMKDIQGLPCIGDQVRDVIEEIIEEGESSRVKEVLNDERYKAFKQFTSVFGVGVKTSEKWFRMGLRTVEELKADKSLKLSKMQKAGFLYYEDLVSCVSKAEADAVTLIVKNTVSTFLPDALVTITGGFRRGKKMGHDIDFLITNPGPKEDDELLHKVVDLLKKQGLLLYCDIQESTFVEEQLPSRKIDAMDNFQKCFAILKLYQPGVDNSSYNTSKKSDMAEVKDWKAIRVDLVITPFEQYAYALLGWTGSREFGRDLRRYASHERKMILDNHGLYDRKKRIFLKAGSEEEIFAHLGLDYVEPWERNA

SEQ ID NO: 577 - DNA, 1182 bp, synthetic construct
  misc_feature 1..1182: note = Variant of terminal deoxynucleotidyl transferase
  source 1..1182: mol_type = other DNA
atgcaccatcatcatcatcatggcggtagcggccatccgccgagcaataccccggagagtgaggtgccgagcgttatcgcccgcaaggttagtcagtacagctgccagcgcaagaccacgctgaataactacaacaaaaagtttaccgacgcgttcgagatcatggccgagaactacgaatttaaagagaacgaaatcttccgtctggaatttctgcgcgccgcgagtctgctgaaatatctgccgttcccggttacccgcatgaaagacatccaaggtctgccgtgcattggcgaccaagttcgtagtgtgatcgaggagatcatcgaagaaggcgagagcagccgtgttaaagaagttctcaatgacgagcgctacaaggcctttaagcagttcaccagcgtgttcggtgtgggcgtgaaaaccagcgaaaagtggtttcgtatgggcctccgtacggttgaagagctgaaggccgacaagagtctgaagctgagcaagatgcagaaggcgggctttctgtattacgaggatctggccagctgcgttagtaaagcggaagccgatgccgttacgctcatcgtgaagaacacggtggcgacctttctgccggatgcgctggtgaccatcacgggcggtttccgccgtggcaaaaagatgggccacgacatcgactttctgatcacgaatccgggcccaaaagaggatgacgaactgctccacaaagtggttgatctgctcaagaagcaaggtctgctgctgtactgcgacatcatcgagagcacgttcgtggaggaacaactgccaagtcgcaaaatcgacgccatggacaacttccagaagtgcttcgccattctcaagctgtaccagccgggcgtggataacagcagctataacacgagtaagaagagtgacatggccgaggttaaggattggaaagcgatccgtgtggatctggtgatcacgccattcgagcagtacgcctatgcgctgctcggttggacgggcagccgcgaatttggtcgcgatctgcgccgctatgcgagtcatgagcgcaagatgatcctcgacaaccatggcctctacgaccgcaaaaagcgcatctttctgaaagcgggcagcgaagaagagattttcgcgcatctgggtctggattatgtggagccgtgggaacgcaacgcg

SEQ ID NO: 578 - protein, 394 aa, synthetic construct
  REGION 1..394: note = Variant of terminal deoxynucleotidyl transferase
MHHHHHHGGSGHPPSNTPESEVPSVIARKVSQYSCQRKTTLNNYNKKFTDAFEIMAENYEFKENEIFRLEFLRAASLLKYLPFPVTRMKDIQGLPCIGDQVRSVIEEIIEEGESSRVKEVLNDERYKAFKQFTSVFGVGVKTSEKWFRMGLRTVEELKADKSLKLSKMQKAGFLYYEDLASCVSKAEADAVTLIVKNTVATFLPDALVTITGGFRRGKKMGHDIDFLITNPGPKEDDELLHKVVDLLKKQGLLLYCDIIESTFVEEQLPSRKIDAMDNFQKCFAILKLYQPGVDNSSYNTSKKSDMAEVKDWKAIRVDLVITPFEQYAYALLGWTGSREFGRDLRRYASHERKMILDNHGLYDRKKRIFLKAGSEEEIFAHLGLDYVEPWERNA

SEQ ID NO: 579 - DNA, 1182 bp, synthetic construct
  misc_feature 1..1182: note = Variant of terminal deoxynucleotidyl transferase
  source 1..1182: mol_type = other DNA
atgcaccatcatcatcatcatggcggtagcggccatccgccgagcaataccccggagggtggggtgccgagcgttatcgcccgcaaggttagtcagtacagctgccagcgcaagaccacgctgaataactacaacaaaaagtttaccgacgcgttcgagatcatggccgagaactacgaatttaaagagaacgaaatcttccgtctggaatttctgcgcgccgcgagtctgctgaaatatctgccgttcccggttacccgcatgaaagacatccaaggtctgccgtgcattggcgaccaagttcgtgacgtgatcgaggagatcatcgaagagggcgagagcagccgtgttaaagaagttctcaatgacgagcgctacaaggcctttaagcagttcaccagcgtgttcggtgtgggcgtgaaaaccagcgaaaagtggtttcgtatgggcctccgtacggttgaagagctgaaggccagtaagagtctgaagctgagcaagatgcagaaggcgggctttctgtattacgaggatctggccagctgcgttagtaaagcggaagccgatgccgttacgctcatcgtgaagaacacggtgcgtacctttctgccggatgcgctggtgaccatcacgggcggtttccgccgtggcaaaaagatgggccacgacatcgactttctgatcacgaatccgggcccgaaagaggatgacgagctgctccacaaagtggttgatgggctcaagaagcaaggtctgctgctgtactgcgacatcatcgagagcacgttcgtggaggaacaactgccaagtcgcaaaatcgacgccatggacaacttccagaagtgcttcgccattctcaagctgtaccagccgggcgtggataacagcagctataacacgagtaagaagagtgacatggccgaggttaaggattggaaagcgatccgtgtggatctggtgatcacgccattcgagcagtacgcctatgcgctgctcggttggacgggcagccgcgaatttggtcgcgatctgcgccgctatgcgagtcatgagcgcaagatgatcctcgacaaccatggcctctacgaccgcaaaaagcgcatctttctgaaagcgggcagcgaagaagagattttcgcgcatctgggtctggattatgtggagccgtgggaacgcaacgcg

SEQ ID NO: 580 - protein, 394 aa, synthetic construct
  REGION 1..394: note = Variant of terminal deoxynucleotidyl transferase
MHHHHHHGGSGHPPSNTPEGGVPSVIARKVSQYSCQRKTTLNNYNKKFTDAFEIMAENYEFKENEIFRLEFLRAASLLKYLPFPVTRMKDIQGLPCIGDQVRDVIEEIIEEGESSRVKEVLNDERYKAFKQFTSVFGVGVKTSEKWFRMGLRTVEELKASKSLKLSKMQKAGFLYYEDLASCVSKAEADAVTLIVKNTVRTFLPDALVTITGGFRRGKKMGHDIDFLITNPGPKEDDELLHKVVDGLKKQGLLLYCDIIESTFVEEQLPSRKIDAMDNFQKCFAILKLYQPGVDNSSYNTSKKSDMAEVKDWKAIRVDLVITPFEQYAYALLGWTGSREFGRDLRRYASHERKMILDNHGLYDRKKRIFLKAGSEEEIFAHLGLDYVEPWERNA

SEQ ID NO: 581 - DNA, 1182 bp, synthetic construct
  misc_feature 1..1182: note = Variant of terminal deoxynucleotidyl transferase
  source 1..1182: mol_type = other DNA
atgcaccatcatcatcatcatggcggtagcggccatccgccgagcaataccccggagagtgaggtgccgagcgttatcgcccgcaaggttagtcagtacagctgccagcgcaagaccacgctgaataactacaacaaaaagtttaccgacgcgttcgagatcatggccgagaactacgaatttaaagagaacgaaatcttccgtctggaatttctgcgcgccgcgagtctgctgaaatatctgccgttcccggttacccgcatgaaagacatccaaggtctgccgtgcattggcgaccaagttcgtgatgtgatcgaggagatcatcgaagaaggcgagagcagccgtgttaaagaagttctcaatgacgagcgctacaaggcctttaagcagttcaccagcgtgttcggtgtgggcgtgaaaaccagcgaaaagtggtttcgtatgggcctccgtacggttgaagagctgaaggccgacaagagtctgaagctgagcaagatgcagaaggcgggctttctgtattacgaggatctggtgagctgcgttagtaaagcggaagccgatgccgttacgctcatcgtgaagaacacggtggcgacctttctgccggatgcgctggtgaccatcacgggcggtttccgccgtggcaaaaagatgggccacgacatcgactttctgatcacgaatccgggcccgaaagaggatgacgggctgctccacaaagtggttgatgggctcaagaagcaaggtctgctgctgtactgcgacatcatcgagagcacgttcgtggaggaacaactgccaagtcgcaaaatcgacgccatggacaacttccagaagtgcttcgccattctcaagctgtaccagccgggcgtggataactcgtcgtataacacgagtaagaagagtgacatggccgaggttaaggattggaaagcgatccgtgtggatctggtgatcacgccattcgagcagtacgcctatgcgctgctcggttggacgggcagccgcgaatttggtcgcgatctgcgccgctatgcgagtcatgagcgcaagatgatcctcgacaaccatggcctctacgaccgcaaaaagcgcatctttctgaaagcgggcagcgaagaagagattttcgcgcatctgggtctggattatgtggagccgtgggaacgcaacgcg

SEQ ID NO: 582 - protein, 394 aa, synthetic construct
  REGION 1..394: note = Variant of terminal deoxynucleotidyl transferase
MHHHHHHGGSGHPPSNTPESEVPSVIARKVSQYSCQRKTTLNNYNKKFTDAFEIMAENYEFKENEIFRLEFLRAASLLKYLPFPVTRMKDIQGLPCIGDQVRDVIEEIIEEGESSRVKEVLNDERYKAFKQFTSVFGVGVKTSEKWFRMGLRTVEELKADKSLKLSKMQKAGFLYYEDLVSCVSKAEADAVTLIVKNTVATFLPDALVTITGGFRRGKKMGHDIDFLITNPGPKEDDGLLHKVVDGLKKQGLLLYCDIIESTFVEEQLPSRKIDAMDNFQKCFAILKLYQPGVDNSSYNTSKKSDMAEVKDWKAIRVDLVITPFEQYAYALLGWTGSREFGRDLRRYASHERKMILDNHGLYDRKKRIFLKAGSEEEIFAHLGLDYVEPWERNA

SEQ ID NO: 583 - DNA, 1182 bp, synthetic construct
  misc_feature 1..1182: note = Variant of terminal deoxynucleotidyl transferase
  source 1..1182: mol_type = other DNA
atgcaccatcatcatcatcatggcggtagcggccatccgccgagcaataccccggagctgggggtgccgagcgttatcgcccgcaaggttagtcagtacagctgccagcgcaagaccacgctgaataactacaacaaaaagtttaccgacgcgttcgagatcatggccgagaactacgaatttaaagagaacgaaatcttccgtctggaatttctgcgcgccgcgagtctgctgaaatatctgccgttcccggttacccgcatgaaagacatccaaggtctgccgtgcattggcgaccaagttcgtgacgtgatcgaggagatcatcgaagagggcgagagcagccgtgttaaagaagttctcaatgacgagcgctacaaggcctttaagcagttcaccagcgtgttcggtgtgggcgtgaaaaccagcgaaaagtggtttcgtatgggcctccgtacggttgaagagctgaaggccagtaagagtctgaagctgagcaagatgcagaaggcgggctttctgtattacgaggatctggccagctgcgttagtaaagcggaagccgatgccgttacgctcatcgtgaagaacacggtgcgtacctttctgccggatgcgctggtgaccatcacgggcggtttccgccgtggcaaaaagatgggccacgacatcgactttctgatcacgaatccgggcccgaaagaggatgacgaactgctccacaaagtggttgatctgctcaagaagcaaggtctgctgctgtactgcgacatcatcgagagcacgttcgtggaggaacaactgccaagtcgcaaaatcgacgccatggacaacttccagaagtgcttcgccattctcaagctgtaccagccgggcgtggataactcggcgtataacacgagtaagaagagtgacatggccgaggttaaggattggaaagcgatccgtgtggatctggtgatcacgccattcgagcagtacgcctatgcgctgctcggttggacgggcagccgcgaatttggtcgcgatctgcgccgctatgcgagtcatgagcgcaagatgatcctcgacaaccatggcctctacgaccgcaaaaagcgcatctttctgaaagcgggcagcgaagaagagattttcgcgcatctgggtctggattatgtggagccgtgggaacgcaacgcg

SEQ ID NO: 584 - protein, 394 aa, synthetic construct
  REGION 1..394: note = Variant of terminal deoxynucleotidyl transferase
MHHHHHHGGSGHPPSNTPELGVPSVIARKVSQYSCQRKTTLNNYNKKFTDAFEIMAENYEFKENEIFRLEFLRAASLLKYLPFPVTRMKDIQGLPCIGDQVRDVIEEIIEEGESSRVKEVLNDERYKAFKQFTSVFGVGVKTSEKWFRMGLRTVEELKASKSLKLSKMQKAGFLYYEDLASCVSKAEADAVTLIVKNTVRTFLPDALVTITGGFRRGKKMGHDIDFLITNPGPKEDDELLHKVVDLLKKQGLLLYCDIIESTFVEEQLPSRKIDAMDNFQKCFAILKLYQPGVDNSAYNTSKKSDMAEVKDWKAIRVDLVITPFEQYAYALLGWTGSREFGRDLRRYASHERKMILDNHGLYDRKKRIFLKAGSEEEIFAHLGLDYVEPWERNA

SEQ ID NO: 585 - DNA, 1182 bp, synthetic construct
  misc_feature 1..1182: note = Variant of terminal deoxynucleotidyl transferase
  source 1..1182: mol_type = other DNA
atgcaccatcatcatcatcatggcggtagcggccatccgccgagcaataccccggagctggaggtgccgagcgttatcgcccgcaaggttagtcagtacagctgccagcgcaagaccacgctgaataactacaacaaaaagtttaccgacgcgttcgagatcatggccgagaactacgaatttaaagagaacgaaatcttccgtctggaatttctgcgcgccgcgagtctgctgaaatatctgccgttcccggttacccgcatgaaagacatccaaggtctgccgtgcattggcgaccaagttcgtgacgtgatcgaggagatcatcgaacgtggcgagagcagccgtgttaaagaagttctcaatgacgagcgctacaaggcctttaagcagttcaccagcgtgttcggtgtgggcgtgaaaaccagcgaaaagtggtttcgtatgggcctccgtacggttgaagagctgaaggccgacaagagtctgaagctgagcaagatgcagaaggcgggctttctgtattacgaggatctggtcagctgcgttagtaaagcggaagccgatgccgttacgctcatcgtgaagaacacggtggcgacctttctgccggatgcgctggtgaccatcacgggcggtttccgccgtggcaaaaagatgggccacgacatcgactttctgatcacgaatccgggcccaaaagaggatgacgggctgctccacaaagtggttgatctgctcaagaagcaaggtctgctgctgtactgcgacatcatcgagagcacgttcgtggaggaacaactgccaagtcgcaaaatcgacgccatggacaacttccagaagtgcttcgccattctcaagctgtaccagccgggcgtggataactcgtcgtataacacgagtaagaagagtgacatggccgaggttaaggattggaaagcgatccgtgtggatctggtgatcacgccattcgagcagtacgcctatgcgctgctcggttggacgggcagccgcgaatttggtcgcgatctgcgccgctatgcgagtcatgagcgcaagatgatcctcgacaaccatggcctctacgaccgcaaaaagcgcatctttctgaaagcgggcagcgaagaagagattttcgcgcatctgggtctggattatgtggagccgtgggaacgcaacgcg

SEQ ID NO: 586 - protein, 394 aa, synthetic construct
  REGION 1..394: note = Variant of terminal deoxynucleotidyl transferase
MHHHHHHGGSGHPPSNTPELEVPSVIARKVSQYSCQRKTTLNNYNKKFTDAFEIMAENYEFKENEIFRLEFLRAASLLKYLPFPVTRMKDIQGLPCIGDQVRDVIEEIIERGESSRVKEVLNDERYKAFKQFTSVFGVGVKTSEKWFRMGLRTVEELKADKSLKLSKMQKAGFLYYEDLVSCVSKAEADAVTLIVKNTVATFLPDALVTITGGFRRGKKMGHDIDFLITNPGPKEDDGLLHKVVDLLKKQGLLLYCDIIESTFVEEQLPSRKIDAMDNFQKCFAILKLYQPGVDNSSYNTSKKSDMAEVKDWKAIRVDLVITPFEQYAYALLGWTGSREFGRDLRRYASHERKMILDNHGLYDRKKRIFLKAGSEEEIFAHLGLDYVEPWERNA

SEQ ID NO: 587 - DNA, 1182 bp, synthetic construct
  misc_feature 1..1182: note = Variant of terminal deoxynucleotidyl transferase
  source 1..1182: mol_type = other DNA
atgcaccatcatcatcatcatggcggtagcggccatccgccgagcaataccccggagctgggggtgccgagcgttatcgcccgcaaggttagtcagtacagctgccagcgcaagaccacgctgaataactacaacaaaaagtttaccgacgcgttcgagatcatggccgagaactacgaatttaaagagaacgaaatcttccgtctggaatttctgcgcgccgcgagtctgctgaaatatctgccgttcccggttacccgcatgaaagacatccaaggtctgccgtgcattggcgaccaagttcgtgacgtgatcgaggagatcatcgaagaaggcgagagcagccgtgttaaagaagttctcaatgacgagcgctacaaggcctttaagcagttcaccagcgtgttcggtgtgggcgtgaaaaccagcgaaaagtggtttcgtatgggcctccgtacggttgaagagctgaaggccgacaagagtctgaagctgagcaagatgcagaaggcgggctttctgtattacgaggatctggccagctgcgttagtaaagcggaagccgatgccgttacgctcatcgtgaagaacacggtgagtacctttctgccggatgcgctggtgaccatcacgggcggtttccgccgtggcaaaaagatgggccacgacatcgactttctgatcacgaatccgggcccaaaaagtgatgacgaactgctccacaaagtggttgatctgctcaagaagcaaggtctgctgctgtactgcgacatcatcgagagcacgttcgtggaggaacaactgccaagtcgcaaaatcgacgccatggacaacttccagaagtgcttcgccattctcaagctgtaccagccgggcgtggataacagcagctataacacgagtaagaagagtgacatggccgaggttaaggattggaaagcgatccgtgtggatctggtgatcacgccattcgagcagtacgcctatgcgctgctcggttggacgggcagccgcgaatttggtcgcgatctgcgccgctatgcgagtcatgagcgcaagatgatcctcgacaaccatggcctctacgaccgcaaaaagcgcatctttctgaaagcgggcagcgaagaagagattttcgcgcatctgggtctggattatgtggagccgtgggaacgcaacgcg

SEQ ID NO: 588 - protein, 394 aa, synthetic construct
  REGION 1..394: note = Variant of terminal deoxynucleotidyl transferase
MHHHHHHGGSGHPPSNTPELGVPSVIARKVSQYSCQRKTTLNNYNKKFTDAFEIMAENYEFKENEIFRLEFLRAASLLKYLPFPVTRMKDIQGLPCIGDQVRDVIEEIIEEGESSRVKEVLNDERYKAFKQFTSVFGVGVKTSEKWFRMGLRTVEELKADKSLKLSKMQKAGFLYYEDLASCVSKAEADAVTLIVKNTVSTFLPDALVTITGGFRRGKKMGHDIDFLITNPGPKSDDELLHKVVDLLKKQGLLLYCDIIESTFVEEQLPSRKIDAMDNFQKCFAILKLYQPGVDNSSYNTSKKSDMAEVKDWKAIRVDLVITPFEQYAYALLGWTGSREFGRDLRRYASHERKMILDNHGLYDRKKRIFLKAGSEEEIFAHLGLDYVEPWERNA

SEQ ID NO: 589 - DNA, 1182 bp, synthetic construct
  misc_feature 1..1182: note = Variant of terminal deoxynucleotidyl transferase
  source 1..1182: mol_type = other DNA
atgcaccatcatcatcatcatggcggtagcggccatccgccgagcaataccccggagagtgaggtgccgagcgttatcgcccgcaaggttagtcagtacagctgccagcgcaagaccacgctgaataactacaacaaaaagtttaccgacgcgttcgagatcatggccgagaactacgaatttaaagagaacgaaatcttccgtctggaatttctgcgcgccgcgagtctgctgaaatatctgccgttcccggttacccgcatgaaagacatccaaggtctgccgtgcattggcgaccaagttcgtgatgtgatcgaggagatcatcgaagaaggcgagagcagccgtgttaaagaagttctcaatgacgagcgctacaaggcctttaagcagttcaccagcgtgttcggtgtgggcgtgaaaaccagcgaaaagtggtttcgtatgggcctccgtacggttgaagagctgaaggccagtaagagtctgaagctgagcaagatgcagaaggcgggctttctgtattacgaggatctggtgagctgcgttagtaaagcggaagccgatgccgttacgctcatcgtgaagaacacggtgagtacctttctgccggatgcgctggtgaccatcacgggcggtttccgccgtggcaaaaagatgggccacgacatcgactttctgatcacgaatccgggcccaaaaagtgatgacgaactgctccacaaagtggttgatctgctcaagaagcaaggtctgctgctgtactgcgacatcatcgagagcacgttcgtggaggaacaactgccaagtcgcaaaatcgacgccatggacaacttccagaagtgcttcgccattctcaagctgtaccagccgggcgtggataactcggcgtataacacgagtaagaagagtgacatggccgaggttaaggattggaaagcgatccgtgtggatctggtgatcacgccattcgagcagtacgcctatgcgctgctcggttggacgggcagccgcgaatttggtcgcgatctgcgccgctatgcgagtcatgagcgcaagatgatcctcgacaaccatggcctctacgaccgcaaaaagcgcatctttctgaaagcgggcagcgaagaagagattttcgcgcatctgggtctggattatgtggagccgtgggaacgcaacgcg

SEQ ID NO: 590 - protein, 394 aa, synthetic construct
  REGION 1..394: note = Variant of terminal deoxynucleotidyl transferase
MHHHHHHGGSGHPPSNTPESEVPSVIARKVSQYSCQRKTTLNNYNKKFTDAFEIMAENYEFKENEIFRLEFLRAASLLKYLPFPVTRMKDIQGLPCIGDQVRDVIEEIIEEGESSRVKEVLNDERYKAFKQFTSVFGVGVKTSEKWFRMGLRTVEELKASKSLKLSKMQKAGFLYYEDLVSCVSKAEADAVTLIVKNTVSTFLPDALVTITGGFRRGKKMGHDIDFLITNPGPKSDDELLHKVVDLLKKQGLLLYCDIIESTFVEEQLPSRKIDAMDNFQKCFAILKLYQPGVDNSAYNTSKKSDMAEVKDWKAIRVDLVITPFEQYAYALLGWTGSREFGRDLRRYASHERKMILDNHGLYDRKKRIFLKAGSEEEIFAHLGLDYVEPWERNA

SEQ ID NO: 591 - DNA, 1182 bp, synthetic construct
  misc_feature 1..1182: note = Variant of terminal deoxynucleotidyl transferase
  source 1..1182: mol_type = other DNA
atgcaccatcatcatcatcatggcggtagcggccatccgccgagcaataccccggagagtgaggtgccgagcgttatcgcccgcaaggttagtcagtacagctgccagcgcaagaccacgctgaataactacaacaaaaagtttaccgacgcgttcgagatcatggccgagaactacgaatttaaagagaacgaaatcttccgtctggaatttctgcgcgccgcgagtctgctgaaatatctgccgttcccggttacccgcatgaaagacatccaaggtctgccgtgcattggcgaccaagttcgtgatgtgatcgaggagatcatcgaagaaggcgagagcagccgtgttaaagaagttctcaatgacgagcgctacaaggcctttaagcagttcaccagcgtgttcggtgtgggcgtgaaaaccagcgaaaagtggtttcgtatgggcctccgtacggttgaagagctgaaggccagtaagagtctgaagctgagcaagatgcagaaggcgggctttctgtattacgaggatctggccagctgcgttagtaaagcggaagccgatgccgttacgctcatcgtgaagaacacggtgagtacctttctgccggatgcgctggtgaccatcacgggcggtttccgccgtggcaaaaagatgggccacgacatcgactttctgatcacgaatccgggcggcaaaagtgatgacgaactgctccacaaagtggttgatgggctcaagaagcaaggtctgctgctgtactgcgacatcatcgagagcacgttcgtggaggaacaactgccaagtcgcaaaatcgacgccatggacaacttccagaagtgcttcgccattctcaagctgtaccagccgggcgtggataactcgtcgtataacacgagtaagaagagtgacatggccgaggttaaggattggaaagcgatccgtgtggatctggtgatcacgccattcgagcagtacgcctatgcgctgctcggttggacgggcagccgcgaatttggtcgcgatctgcgccgctatgcgagtcatgagcgcaagatgatcctcgacaaccatggcctctacgaccgcaaaaagcgcatctttctgaaagcgggcagcgaagaagagattttcgcgcatctgggtctggattatgtggagccgtgggaacgcaacgcg

SEQ ID NO: 592 - protein, 394 aa, synthetic construct
  REGION 1..394: note = Variant of terminal deoxynucleotidyl transferase
MHHHHHHGGSGHPPSNTPESEVPSVIARKVSQYSCQRKTTLNNYNKKFTDAFEIMAENYEFKENEIFRLEFLRAASLLKYLPFPVTRMKDIQGLPCIGDQVRDVIEEIIEEGESSRVKEVLNDERYKAFKQFTSVFGVGVKTSEKWFRMGLRTVEELKASKSLKLSKMQKAGFLYYEDLASCVSKAEADAVTLIVKNTVSTFLPDALVTITGGFRRGKKMGHDIDFLITNPGGKSDDELLHKVVDGLKKQGLLLYCDIIESTFVEEQLPSRKIDAMDNFQKCFAILKLYQPGVDNSSYNTSKKSDMAEVKDWKAIRVDLVITPFEQYAYALLGWTGSREFGRDLRRYASHERKMILDNHGLYDRKKRIFLKAGSEEEIFAHLGLDYVEPWERNA

SEQ ID NO: 593 - DNA, 1182 bp, synthetic construct
  misc_feature 1..1182: note = Variant of terminal deoxynucleotidyl transferase
  source 1..1182: mol_type = other DNA
atgcaccatcatcatcatcatggcggtagcggccatccgccgagcaataccccggagctggaagtgccgagcgttatcgcccgcaaggttagtcagtacagctgccagcgcaagaccacgctgaataactacaacaaaaagtttaccgacgcgttcgagatcatggccgagaactacgaatttaaagagaacgaaatcttctgtctggaatttctgcgcgccgcgagtctgctgaaatatctgccgttcccggttacccgcatgaaagacatccaaggtctgccgtgcattggcgaccaagttcgtgacgtgatcgaggagatcatcgaacgtggcgagagcagccgtgttaaagaagttctcaatgacgagcgctacaaggcctttaagcagttcaccagcgtgttcggtgtgggcgtgaaaaccagcgaaaagtggtttcgtatgggcctccgtacggttgaagagctgaaggccgacaagagtctgaagctgagcaagatgcagaaggcgggctttctgtattacgaggatctggtcagctgcgttagtaaagcggaagccgatgccgttacgctcatcgtgaagaacacggtgagtacctttctgccggatgcgctggtgaccatcacgggcggtttccgccgtggcaaaaagatgggccacgacatcgactttctgatcacgaatccgggcccgaaagaggatgacgaactgctccacaaagtggttgatctgctcaagaagcaaggtctgctgctgtactgcgacatcatcgagagcacgttcgtggaggaacaactgccaagtcgcaaaatcgacgccatggacaacttccagaagtgcttcgccattctcaagctgtaccagccgggcgtggataacagcagctataacacgagtaagaagagtgacatggccgaggttaaggattggaaagcgatccgtgtggatctggtgatcacgccattcgagcagtacgcctatgcgctgctcggttggacgggcagccgcgaatttggtcgcgatctgcgccgctatgcgagtcatgagcgcaagatgatcctcgacaaccatggcctctacgaccgcaaaaagcgcatctttctgaaagcgggcagcgaagaagagattttcgcgcatctgggtctggattatgtggagccgtgggaacgcaacgcg

SEQ ID NO: 594 - protein, 394 aa, synthetic construct; identical to SEQ ID NO: 38
  REGION 1..394: note = Variant of terminal deoxynucleotidyl transferase

SEQ ID NO: 595 - DNA, 1182 bp, synthetic construct
  misc_feature 1..1182: note = Variant of terminal deoxynucleotidyl transferase
  source 1..1182: mol_type = other DNA
atgcaccatcatcatcatcatggcggtagcggccatccgccgagcaataccccggagagtgaggtgccgagcgttatcgcccgcaaggttagtcagtacagctgccagcgcaagaccacgctgaataactacaacaaaaagtttaccgacgcgttcgagatcatggccgagaactacgaatttaaagagaacgaaatcttccgtctggaatttctgcgcgccgcgagtctgctgaaatatctgccgttcccggttacccgcatgaaagacatccaaggtctgccgtgcattggcgaccaagttcgtgacgtgatcgaggagatcatcgaagaaggcgagagcagccgtgttaaagaagttctcaatgacgagcgctacaaggcctttaagcagttcaccagcgtgttcggtgtgggcgtgaaaaccagcgaaaagtggtttcgtatgggcctccgtacggttgaagagctgaaggccagtaagagtctgaagctgagcaagatgcagaaggcgggctttctgtattacgaggatctggccagctgcgttagtaaagcggaagccgatgccgttacgctcatcgtgaagaacacggtgagtacctttctgccggatgcgctggtgaccatcacgggcggtttccgccgtggcaaaaagatgggccacgacatcgactttctgatcacgaatccgggcccgaaagaggatgacgaactgctccacaaagtggttgatctgctcaagaagcaaggtctgctgctgtactgcgacatcatcgagagcacgttcgtggaggaacaactgccaagtcgcaaaatcgacgccatggacaacttccagaagtgcttcgccattctcaagctgtaccagccgggcgtggataactcgtcgtataacacgagtaagaagagtgacatggccgaggttaaggattggaaagcgatccgtgtggatctggtgatcacgccattcgagcagtacgcctatgcgctgctcggttggacgggcagccgcgaatttggtcgcgatctgcgccgctatgcgagtcatgagcgcaagatgatcctcgacaaccatggcctctacgaccgcaaaaagcgcatctttctgaaagcgggcagcgaagaagagattttcgcgcatctgggtctggattatgtggagccgtgggaacgcaacgcg

SEQ ID NO: 596 - protein, 394 aa, synthetic construct
  REGION 1..394: note = Variant of terminal deoxynucleotidyl transferase
MHHHHHHGGSGHPPSNTPESEVPSVIARKVSQYSCQRKTTLNNYNKKFTDAFEIMAENYEFKENEIFRLEFLRAASLLKYLPFPVTRMKDIQGLPCIGDQVRDVIEEIIEEGESSRVKEVLNDERYKAFKQFTSVFGVGVKTSEKWFRMGLRTVEELKASKSLKLSKMQKAGFLYYEDLASCVSKAEADAVTLIVKNTVSTFLPDALVTITGGFRRGKKMGHDIDFLITNPGPKEDDELLHKVVDLLKKQGLLLYCDIIESTFVEEQLPSRKIDAMDNFQKCFAILKLYQPGVDNSSYNTSKKSDMAEVKDWKAIRVDLVITPFEQYAYALLGWTGSREFGRDLRRYASHERKMILDNHGLYDRKKRIFLKAGSEEEIFAHLGLDYVEPWERNA

SEQ ID NO: 597 - DNA, 1182 bp, synthetic construct
  misc_feature 1..1182: note = Variant of terminal deoxynucleotidyl transferase
  source 1..1182: mol_type = other DNA
atgcaccatcatcatcatcatggcggtagcggccatccgccgagcaataccccggagctgggggtgccgagcgttatcgcccgcaaggttagtcagtacagctgccagcgcaagaccacgctgaataactacaacaaaaagtttaccgacgcgttcgagatcatggccgagaactacgaatttaaagagaacgaaatcttccgtctggaatttctgcgcgccgcgagtctgctgaaatatctgccgttcccggttacccgcatgaaagacatccaaggtctgccgtgcattggcgaccaagttcgtgatgtgatcgaggagatcatcgaagaaggcgagagcagccgtgttaaagaagttctcaatgacgagcgctacaaggcctttaagcagttcaccagcgtgttcggtgtgggcgtgaaaaccagcgaaaagtggtttcgtatgggcctccgtacggttgaagagctgaaggccgacaagagtctgaagctgagcaagatgcagaaggcgggctttctgtattacgaggatctggtgagctgcgttagtaaagcggaagccgatgccgttacgctcatcgtgaagaacacggtgcgtacctttctgccggatgcgctggtgaccatcacgggcggtttccgccgtggcaaaaagatgggccacgacatcgactttctgatcacgaatccgggcccgaaagaggatgacgaactgctccacaaagtggttgatctgctcaagaagcaaggtctgctgctgtactgcgacatcatcgagagcacgttcgtggaggaacaactgccaagtcgcaaaatcgacgccatggacaacttccagaagtgcttcgccattctcaagctgtaccagccgggcgtggataacagcagctataacacgagtaagaagagtgacatggccgaggttaaggattggaaagcgatccgtgtggatctggtgatcacgccattcgagcagtacgcctatgcgctgctcggttggacgggcagccgcgaatttggtcgcgatctgcgccgctatgcgagtcatgagcgcaagatgatcctcgacaaccatggcctctacgaccgcaaaaagcgcatctttctgaaagcgggcagcgaagaagagattttcgcgcatctgggtctggattatgtggagccgtgggaacgcaacgcg

SEQ ID NO: 598 - protein, 394 aa, synthetic construct
  REGION 1..394: note = Variant of terminal deoxynucleotidyl transferase
MHHHHHHGGSGHPPSNTPELGVPSVIARKVSQYSCQRKTTLNNYNKKFTDAFEIMAENYEFKENEIFRLEFLRAASLLKYLPFPVTRMKDIQGLPCIGDQVRDVIEEIIEEGESSRVKEVLNDERYKAFKQFTSVFGVGVKTSEKWFRMGLRTVEELKADKSLKLSKMQKAGFLYYEDLVSCVSKAEADAVTLIVKNTVRTFLPDALVTITGGFRRGKKMGHDIDFLITNPGPKEDDELLHKVVDLLKKQGLLLYCDIIESTFVEEQLPSRKIDAMDNFQKCFAILKLYQPGVDNSSYNTSKKSDMAEVKDWKAIRVDLVITPFEQYAYALLGWTGSREFGRDLRRYASHERKMILDNHGLYDRKKRIFLKAGSEEEIFAHLGLDYVEPWERNA

SEQ ID NO: 599 - DNA, 1182 bp, synthetic construct
  misc_feature 1..1182: note = Variant of terminal deoxynucleotidyl transferase
  source 1..1182: mol_type = other DNA
atgcaccatcatcatcatcatggcggtagcggccatccgccgagcaataccccggagagtggggtgccgagcgttatcgcccgcaaggttagtcagtacagctgccagcgcaagaccacgctgaataactacaacaaaaagtttaccgacgcgttcgagatcatggccgagaactacgaatttaaagagaacgaaatcttccgtctggaatttctgcgcgccgcgagtctgctgaaatatctgccgttcccggttacccgcatgaaagacatccaaggtctgccgtgcattggcgaccaagttcgtgacgtgatcgaggagatcatcgaagaaggcgagagcagccgtgttaaagaagttctcaatgacgagcgctacaaggcctttaagcagttcaccagcgtgttcggtgtgggcgtgaaaaccagcgaaaagtggtttcgtatgggcctccgtacggttgaagagctgaaggccgacaagagtctgaagctgagcaagatgcagaaggcgggctttctgtattacgaggatctggtgagctgcgttagtaaagcggaagccgatgccgttacgctcatcgtgaagaacacggtgagtacctttctgccggatgcgctggtgaccatcacgggcggtttccgccgtggcaaaaagatgggccacgacatcgactttctgatcacgaatccgggcggcaaagaggatgacgaactgctccacaaagtggttgatgggctcaagaagcaaggtctgctgctgtactgcgacatcatcgagagcacgttcgtggaggaacaactgccaagtcgcaaaatcgacgccatggacaacttccagaagtgcttcgccattctcaagctgtaccagccgggcgtggataactcggcgtataacacgagtaagaagagtgacatggccgaggttaaggattggaaagcgatccgtgtggatctggtgatcacgccattcgagcagtacgcctatgcgctgctcggttggacgggcagccgcgaatttggtcgcgatctgcgccgctatgcgagtcatgagcgcaagatgatcctcgacaaccatggcctctacgaccgcaaaaagcgcatctttctgaaagcgggcagcgaagaagagattttcgcgcatctgggtctggattatgtggagccgtgggaacgcaacgcg

SEQ ID NO: 600 - protein, 394 aa, synthetic construct
  REGION 1..394: note = Variant of terminal deoxynucleotidyl transferase
MHHHHHHGGSGHPPSNTPESGVPSVIARKVSQYSCQRKTTLNNYNKKFTDAFEIMAENYEFKENEIFRLEFLRAASLLKYLPFPVTRMKDIQGLPCIGDQVRDVIEEIIEEGESSRVKEVLNDERYKAFKQFTSVFGVGVKTSEKWFRMGLRTVEELKADKSLKLSKMQKAGFLYYEDLVSCVSKAEADAVTLIVKNTVSTFLPDALVTITGGFRRGKKMGHDIDFLITNPGGKEDDELLHKVVDGLKKQGLLLYCDIIESTFVEEQLPSRKIDAMDNFQKCFAILKLYQPGVDNSAYNTSKKSDMAEVKDWKAIRVDLVITPFEQYAYALLGWTGSREFGRDLRRYASHERKMILDNHGLYDRKKRIFLKAGSEEEIFAHLGLDYVEPWERNA

SEQ ID NO: 601 - DNA, 1182 bp, synthetic construct
  misc_feature 1..1182: note = Variant of terminal deoxynucleotidyl transferase
  source 1..1182: mol_type = other DNA
atgcaccatcatcatcatcatggcggtagcggccatccgccgagcaataccccggagagtgaggtgccgagcgttatcgcccgcaaggttagtcagtacagctgccagcgcaagaccacgctgaataactacaacaaaaagtttaccgacgcgttcgagatcatggccgagaactacgaatttaaagagaacgaaatcttccgtctggaatttctgcgcgccgcgagtctgctgaaatatctgccgttcccggttacccgcatgaaagacatccaaggtctgccgtgcattggcgaccaagttcgtgacgtgatcgaggagatcatcgaagaaggcgagagcagccgtgttaaagaagttctcaatgacgagcgctacaaggcctttaagcagttcaccagcgtgttcggtgtgggcgtgaaaaccagcgaaaagtggtttcgtatgggcctccgtacggttgaagagctgaaggccagtaagagtctgaagctgagcaagatgcagaaggcgggctttctgtattacgaggatctggtgagctgcgttagtaaagcggaagccgatgccgttacgctcatcgtgaagaacacggtgagtacctttctgccggatgcgctggtgaccatcacgggcggtttccgccgtggcaaaaagatgggccacgacatcgactttctgatcacgaatccgggcccgaaagaggatgacgaactgctccacaaagtggttgatgggctcaagaagcaaggtctgctgctgtactgcgacatcatcgagagcacgttcgtggaggaacaactgccaagtcgcaaaatcgacgccatggacaacttccagaagtgcttcgccattctcaagctgtaccagccgggcgtggataacagcagctataacacgagtaagaagagtgacatggccgaggttaaggattggaaagcgatccgtgtggatctggtgatcacgccattcgagcagtacgcctatgcgctgctcggttggacgggcagccgcgaatttggtcgcgatctgcgccgctatgcgagtcatgagcgcaagatgatcctcgacaaccatggcctctacgaccgcaaaaagcgcatctttctgaaagcgggcagcgaagaagagattttcgcgcatctgggtctggattatgtggagccgtgggaacgcaacgcg

SEQ ID NO: 602 - protein, 394 aa, synthetic construct
  REGION 1..394: note = Variant of terminal deoxynucleotidyl transferase
MHHHHHHGGSGHPPSNTPESEVPSVIARKVSQYSCQRKTTLNNYNKKFTDAFEIMAENYEFKENEIFRLEFLRAASLLKYLPFPVTRMKDIQGLPCIGDQVRDVIEEIIEEGESSRVKEVLNDERYKAFKQFTSVFGVGVKTSEKWFRMGLRTVEELKASKSLKLSKMQKAGFLYYEDLVSCVSKAEADAVTLIVKNTVSTFLPDALVTITGGFRRGKKMGHDIDFLITNPGPKEDDELLHKVVDGLKKQGLLLYCDIIESTFVEEQLPSRKIDAMDNFQKCFAILKLYQPGVDNSSYNTSKKSDMAEVKDWKAIRVDLVITPFEQYAYALLGWTGSREFGRDLRRYASHERKMILDNHGLYDRKKRIFLKAGSEEEIFAHLGLDYVEPWERNA

SEQ ID NO: 603 - DNA, 1182 bp, synthetic construct
  misc_feature 1..1182: note = Variant of terminal deoxynucleotidyl transferase
  source 1..1182: mol_type = other DNA
atgcaccatcatcatcatcatggcggtagcggccatccgccgagcaataccccggagctgggggtgccgagcgttatcgcccgcaaggttagtcagtacagctgccagcgcaagaccacgctgaataactacaacaaaaagtttaccgacgcgttcgagatcatggccgagaactacgaatttaaagagaacgaaatcttccgtctggaatttctgcgcgccgcgagtctgctgaaatatctgccgttcccggttacccgcatgaaagacatccaaggtctgccgtgcattggcgaccaagttcgtgacgtgatcgaggagatcatcgaacgtggcgagagcagccgtgttaaagaagttctcaatgacgagcgctacaaggcctttaagcagttcaccagcgtgttcggtgtgggcgtgaaaaccagcgaaaagtggtttcgtatgggcctccgtacggttgaagagctgaaggccgacaagagtctgaagctgagcaagatgcagaaggcgggctttctgtattacgaggatctggtcagctgcgttagtaaagcggaagccgatgccgttacgctcatcgtgaagaacacggtgcgtacctttctgccggatgcgctggtgaccatcacgggcggtttccgccgtggcaaaaagatgggccacgacatcgactttctgatcacgaatccgggcccgaaagaggatgacgaactgctccacaaagtggttgatctgctcaagaagcaaggtctgctgctgtactgcgacatcatcgagagcacgttcgtggaggaacaactgccaagtcgcaaaatcgacgccatggacaacttccagaagtgcttcgccattctcaagctgtaccagccgggcgtggataactcgtcgtataacacgagtaagaagagtgacatggccgaggttaaggattggaaagcgatccgtgtggatctggtgatcacgccattcgagcagtacgcctatgcgctgctcggttggacgggcagccgcgaatttggtcgcgatctgcgccgctatgcgagtcatgagcgcaagatgatcctcgacaaccatggcctctacgaccgcaaaaagcgcatctttctgaaagcgggcagcgaagaagagattttcgcgcatctgggtctggattatgtggagccgtgggaacgcaacgcg

SEQ ID NO: 604 - protein, 394 aa, synthetic construct
  REGION 1..394: note = Variant of terminal deoxynucleotidyl transferase
MHHHHHHGGSGHPPSNTPELGVPSVIARKVSQYSCQRKTTLNNYNKKFTDAFEIMAENYEFKENEIFRLEFLRAASLLKYLPFPVTRMKDIQGLPCIGDQVRDVIEEIIERGESSRVKEVLNDERYKAFKQFTSVFGVGVKTSEKWFRMGLRTVEELKADKSLKLSKMQKAGFLYYEDLVSCVSKAEADAVTLIVKNTVRTFLPDALVTITGGFRRGKKMGHDIDFLITNPGPKEDDELLHKVVDLLKKQGLLLYCDIIESTFVEEQLPSRKIDAMDNFQKCFAILKLYQPGVDNSSYNTSKKSDMAEVKDWKAIRVDLVITPFEQYAYALLGWTGSREFGRDLRRYASHERKMILDNHGLYDRKKRIFLKAGSEEEIFAHLGLDYVEPWERNA

SEQ ID NO: 605 - DNA, 1182 bp, synthetic construct
  misc_feature 1..1182: note = Variant of terminal deoxynucleotidyl transferase
  source 1..1182: mol_type = other DNA
atgcaccatcatcatcatcatggcggtagcggccatccgccgagcaataccccggagagtgaggtgccgagcgttatcgcccgcaaggttagtcagtacagctgccagcgcaagaccacgctgaataactacaacaaaaagtttaccgacgcgttcgagatcatggccgagaactacgaatttaaagagaacgaaatcttctgtctggaatttctgcgcgccgcgagtctgctgaaatatctgccgttcccggttacccgcatgaaagacatccaaggtctgccgtgcattggcgaccaagttcgtagtgtgatcgaggagatcatcgaagagggcgagagcagccgtgttaaagaagttctcaatgacgagcgctacaaggcctttaagcagttcaccagcgtgttcggtgtgggcgtgaaaaccagcgaaaagtggtttcgtatgggcctccgtacggttgaagagctgaaggccagtaagagtctgaagctgagcaagatgcagaaggcgggctttctgtattacgaggatctggccagctgcgttagtaaagcggaagccgatgccgttacgctcatcgtgaagaacacggtgcgtacctttctgccggatgcgctggtgaccatcacgggcggtttccgccgtggcaaaaagatgggccacgacatcgactttctgatcacgaatccgggcccaaaaagtgatgacgaactgctccacaaagtggttgatctgctcaagaagcaaggtctgctgctgtactgcgacatcatcgagagcacgttcgtggaggaacaactgccaagtcgcaaaatcgacgccatggacaacttccagaagtgcttcgccattctcaagctgtaccagccgggcgtggataacagcagctataacacgagtaagaagagtgacatggccgaggttaaggattggaaagcgatccgtgtggatctggtgatcacgccattcgagcagtacgcctatgcgctgctcggttggacgggcagccgcgaatttggtcgcgatctgcgccgctatgcgagtcatgagcgcaagatgatcctcgacaaccatggcctctacgaccgcaaaaagcgcatctttctgaaagcgggcagcgaagaagagattttcgcgcatctgggtctggattatgtggagccgtgggaacgcaacgcg

SEQ ID NO: 606 - protein, 394 aa, synthetic construct
  REGION 1..394: note = Variant of terminal deoxynucleotidyl transferase
MHHHHHHGGSGHPPSNTPESEVPSVIARKVSQYSCQRKTTLNNYNKKFTDAFEIMAENYEFKENEIFCLEFLRAASLLKYLPFPVTRMKDIQGLPCIGDQVRSVIEEIIEEGESSRVKEVLNDERYKAFKQFTSVFGVGVKTSEKWFRMGLRTVEELKASKSLKLSKMQKAGFLYYEDLASCVSKAEADAVTLIVKNTVRTFLPDALVTITGGFRRGKKMGHDIDFLITNPGPKSDDELLHKVVDLLKKQGLLLYCDIIESTFVEEQLPSRKIDAMDNFQKCFAILKLYQPGVDNSSYNTSKKSDMAEVKDWKAIRVDLVITPFEQYAYALLGWTGSREFGRDLRRYASHERKMILDNHGLYDRKKRIFLKAGSEEEIFAHLGLDYVEPWERNA

SEQ ID NO: 607 - DNA, 1182 bp, synthetic construct
  misc_feature 1..1182: note = Variant of terminal deoxynucleotidyl transferase
  source 1..1182: mol_type = other DNA
atgcaccatcatcatcatcatggcggtagcggccatccgccgagcaataccccggagctgggggtgccgagcgttatcgcccgcaaggttagtcagtacagctgccagcgcaagaccacgctgaataactacaacaaaaagtttaccgacgcgttcgagatcatggccgagaactacgaatttaaagagaacgaaatcttccgtctggaatttctgcgcgccgcgagtctgctgaaatatctgccgttcccggttacccgcatgaaagacatccaaggtctgccgtgcattggcgaccaagttcgtgacgtgatcgaggagatcatcgaagaaggcgagagcagccgtgttaaagaagttctcaatgacgagcgctacaaggcctttaagcagttcaccagcgtgttcggtgtgggcgtgaaaaccagcgaaaagtggtttcgtatgggcctccgtacggttgaagagctgaaggccagtaagagtctgaagctgagcaagatgcagaaggcgggctttctgtattacgaggatctggtcagctgcgttagtaaagcggaagccgatgccgttacgctcatcgtgaagaacacggtgagtacctttctgccggatgcgctggtgaccatcacgggcggtttccgccgtggcaaaaagatgggccacgacatcgactttctgatcacgaatccgggcccgaaagaggatgacgggctgctccacaaagtggttgatgggctcaagaagcaaggtctgctgctgtactgcgacatcatcgagagcacgttcgtggaggaacaactgccaagtcgcaaaatcgacgccatggacaacttccagaagtgcttcgccattctcaagctgtaccagccgggcgtggataactcgtcgtataacacgagtaagaagagtgacatggccgaggttaaggattggaaagcgatccgtgtggatctggtgatcacgccattcgagcagtacgcctatgcgctgctcggttggacgggcagccgcgaatttggtcgcgatctgcgccgctatgcgagtcatgagcgcaagatgatcctcgacaaccatggcctctacgaccgcaaaaagcgcatctttctgaaagcgggcagcgaagaagagattttcgcgcatctgggtctggattatgtggagccgtgggaacgcaacgcg

SEQ ID NO: 608 - protein, 394 aa, synthetic construct
  REGION 1..394: note = Variant of terminal deoxynucleotidyl transferase
MHHHHHHGGSGHPPSNTPELGVPSVIARKVSQYSCQRKTTLNNYNKKFTDAFEIMAENYEFKENEIFRLEFLRAASLLKYLPFPVTRMKDIQGLPCIGDQVRDVIEEIIEEGESSRVKEVLNDERYKAFKQFTSVFGVGVKTSEKWFRMGLRTVEELKASKSLKLSKMQKAGFLYYEDLVSCVSKAEADAVTLIVKNTVSTFLPDALVTITGGFRRGKKMGHDIDFLITNPGPKEDDGLLHKVVDGLKKQGLLLYCDIIESTFVEEQLPSRKIDAMDNFQKCFAILKLYQPGVDNSSYNTSKKSDMAEVKDWKAIRVDLVITPFEQYAYALLGWTGSREFGRDLRRYASHERKMILDNHGLYDRKKRIFLKAGSEEEIFAHLGLDYVEPWERNA

SEQ ID NO: 609 - DNA, 1182 bp, synthetic construct
  misc_feature 1..1182: note = Variant of terminal deoxynucleotidyl transferase
  source 1..1182: mol_type = other DNA
atgcaccatcatcatcatcatggcggtagcggccatccgccgagcaataccccggagggtggggtgccgagcgttatcgcccgcaaggttagtcagtacagctgccagcgcaagaccacgctgaataactacaacaaaaagtttaccgacgcgttcgagatcatggccgagaactacgaatttaaagagaacgaaatcttccgtctggaatttctgcgcgccgcgagtctgctgaaatatctgccgttcccggttacccgcatgaaagacatccaaggtctgccgtgcattggcgaccaagttcgtgacgtgatcgaggagatcatcgaagaaggcgagagcagccgtgttaaagaagttctcaatgacgagcgctacaaggcctttaagcagttcaccagcgtgttcggtgtgggcgtgaaaaccagcgaaaagtggtttcgtatgggcctccgtacggttgaagagctgaaggccgacaagagtctgaagctgagcaagatgcagaaggcgggctttctgtattacgaggatctggccagctgcgttagtaaagcggaagccgatgccgttacgctcatcgtgaagaacacggtgagtacctttctgccggatgcgctggtgaccatcacgggcggtttccgccgtggcaaaaagatgggccacgacatcgactttctgatcacgaatccgggcccaaaagaggatgacgaactgctccacaaagtggttgatctgctcaagaagcaaggtctgctgctgtactgcgacatcatcgagagcacgttcgtggaggaacaactgccaagtcgcaaaatcgacgccatggacaacttccagaagtgcttcgccattctcaagctgtaccagccgggcgtggataacagcagctataacacgagtaagaagagtgacatggccgaggttaaggattggaaagcgatccgtgtggatctggtgatcacgccattcgagcagtacgcctatgcgctgctcggttggacgggcagccgcgaatttggtcgcgatctgcgccgctatgcgagtcatgagcgcaagatgatcctcgacaaccatggcctctacgaccgcaaaaagcgcatctttctgaaagcgggcagcgaagaagagattttcgcgcatctgggtctggattatgtggagccgtgggaacgcaacgcg

SEQ ID NO: 610 - protein, 394 aa, synthetic construct
  REGION 1..394: note = Variant of terminal deoxynucleotidyl transferase
MHHHHHHGGSGHPPSNTPEGGVPSVIARKVSQYSCQRKTTLNNYNKKFTDAFEIMAENYEFKENEIFRLEFLRAASLLKYLPFPVTRMKDIQGLPCIGDQVRDVIEEIIEEGESSRVKEVLNDERYKAFKQFTSVFGVGVKTSEKWFRMGLRTVEELKADKSLKLSKMQKAGFLYYEDLASCVSKAEADAVTLIVKNTVSTFLPDALVTITGGFRRGKKMGHDIDFLITNPGPKEDDELLHKVVDLLKKQGLLLYCDIIESTFVEEQLPSRKIDAMDNFQKCFAILKLYQPGVDNSSYNTSKKSDMAEVKDWKAIRVDLVITPFEQYAYALLGWTGSREFGRDLRRYASHERKMILDNHGLYDRKKRIFLKAGSEEEIFAHLGLDYVEPWERNA

SEQ ID NO: 611 - DNA, 1182 bp, synthetic construct
  misc_feature 1..1182: note = Variant of terminal deoxynucleotidyl transferase
  source 1..1182: mol_type = other DNA
atgcaccatcatcatcatcatggcggtagcggccatccgccgagcaataccccggagctggaggtgccgagcgttatcgcccgcaaggttagtcagtacagctgccagcgcaagaccacgctgaataactacaacaaaaagtttaccgacgcgttcgagatcatggccgagaactacgaatttaaagagaacgaaatcttccgtctggaatttctgcgcgccgcgagtctgctgaaatatctgccgttcccggttacccgcatgaaagacatccaaggtctgccgtgcattggcgaccaagttcgtgacgtgatcgaggagatcatcgaagagggcgagagcagccgtgttaaagaagttctcaatgacgagcgctacaaggcctttaagcagttcaccagcgtgttcggtgtgggcgtgaaaaccagcgaaaagtggtttcgtatgggcctccgtacggttgaagagctgaaggccgacaagagtctgaagctgagcaagatgcagaaggcgggctttctgtattacgaggatctggtgagctgcgttagtaaagcggaagccgatgccgttacgctcatcgtgaagaacacggtgtcgacctttctgccggatgcgctggtgaccatcacgggcggtttccgccgtggcaaaaagatgggccacgacatcgactttctgatcacgaatccgggcccgaaagaggatgacgaactgctccacaaagtggttgatctgctcaagaagcaaggtctgctgctgtactgcgacatcatcgagagcacgttcgtggaggaacaactgccaagtcgcaaaatcgacgccatggacaacttccagaagtgcttcgccattctcaagctgtaccagccgggcgtggataacagcagctataacacgagtaagaagagtgacatggccgaggttaaggattggaaagcgatccgtgtggatctggtgatcacgccattcgagcagtacgcctatgcgctgctcggttggacgggcagccgcgaatttggtcgcgatctgcgccgctatgcgagtcatgagcgcaagatgatcctcgacaaccatggcctctacgaccgcaaaaagcgcatctttctgaaagcgggcagcgaagaagagattttcgcgcatctgggtctggattatgtggagccgtgggaacgcaacgcg

SEQ ID NO: 612 - protein, 394 aa, synthetic construct; identical to SEQ ID NO: 146
  REGION 1..394: note = Variant of terminal deoxynucleotidyl transferase

SEQ ID NO: 613 - DNA, 1182 bp, synthetic construct
  misc_feature 1..1182: note = Variant of terminal deoxynucleotidyl transferase
  source 1..1182: mol_type = other DNA
atgcaccatcatcatcatcatggcggtagcggccatccgccgagcaataccccggagctggaggtgccgagcgttatcgcccgcaaggttagtcagtacagctgccagcgcaagaccacgctgaataactacaacaaaaagtttaccgacgcgttcgagatcatggccgagaactacgaatttaaagagaacgaaatcttccgtctggaatttctgcgcgccgcgagtctgctgaaatatctgccgttcccggttacccgcatgaaagacatccaaggtctgccgtgcattggcgaccaagttcgtagtgtgatcgaggagatcatcgaagagggcgagagcagccgtgttaaagaagttctcaatgacgagcgctacaaggcctttaagcagttcaccagcgtgttcggtgtgggcgtgaaaaccagcgaaaagtggtttcgtatgggcctccgtacggttgaagagctgaaggccgacaagagtctgaagctgagcaagatgcagaaggcgggctttctgtattacgaggatctggtcagctgcgttagtaaagcggaagccgatgccgttacgctcatcgtgaagaacacggtgcgtacctttctgccggatgcgctggtgaccatcacgggcggtttccgccgtggcaaaaagatgggccacgacatcgactttctgatcacgaatccgggcccaaaaagtgatgacgaactgctccacaaagtggttgatgggctcaagaagcaaggtctgctgctgtactgcgacatcatcgagagcacgttcgtggaggaacaactgccaagtcgcaaaatcgacgccatggacaacttccagaagtgcttcgccattctcaagctgtaccagccgggcgtggataactcggcgtataacacgagtaagaagagtgacatggccgaggttaaggattggaaagcgatccgtgtggatctggtgatcacgccattcgagcagtacgcctatgcgctgctcggttggacgggcagccgcgaatttggtcgcgatctgcgccgctatgcgagtcatgagcgcaagatgatcctcgacaaccatggcctctacgaccgcaaaaagcgcatctttctgaaagcgggcagcgaagaagagattttcgcgcatctgggtctggattatgtggagccgtgggaacgcaacgcg

SEQ ID NO: 614 - protein, 394 aa, synthetic construct
  REGION 1..394: note = Variant of terminal deoxynucleotidyl transferase
MHHHHHHGGSGHPPSNTPELEVPSVIARKVSQYSCQRKTTLNNYNKKFTDAFEIMAENYEFKENEIFRLEFLRAASLLKYLPFPVTRMKDIQGLPCIGDQVRSVIEEIIEEGESSRVKEVLNDERYKAFKQFTSVFGVGVKTSEKWFRMGLRTVEELKADKSLKLSKMQKAGFLYYEDLVSCVSKAEADAVTLIVKNTVRTFLPDALVTITGGFRRGKKMGHDIDFLITNPGPKSDDELLHKVVDGLKKQGLLLYCDIIESTFVEEQLPSRKIDAMDNFQKCFAILKLYQPGVDNSAYNTSKKSDMAEVKDWKAIRVDLVITPFEQYAYALLGWTGSREFGRDLRRYASHERKMILDNHGLYDRKKRIFLKAGSEEEIFAHLGLDYVEPWERNA

SEQ ID NO: 615 - DNA, 1182 bp, synthetic construct
  misc_feature 1..1182: note = Variant of terminal deoxynucleotidyl transferase
  source 1..1182: mol_type = other DNA
atgcaccatcatcatcatcatggcggtagcggccatccgccgagcaataccccggagagtgaggtgccgagcgttatcgcccgcaaggttagtcagtacagctgccagcgcaagaccacgctgaataactacaacaaaaagtttaccgacgcgttcgagatcatggccgagaactacgaatttaaagagaacgaaatcttccgtctggaatttctgcgcgccgcgagtctgctgaaatatctgccgttcccggttacccgcatgaaagacatccaaggtctgccgtgcattggcgaccaagttcgtgatgtgatcgaggagatcatcgaagaaggcgagagcagccgtgttaaagaagttctcaatgacgagcgctacaaggcctttaagcagttcaccagcgtgttcggtgtgggcgtgaaaaccagcgaaaagtggtttcgtatgggcctccgtacggttgaagagctgaaggccgacaagagtctgaagctgagcaagatgcagaaggcgggctttctgtattacgaggatctggtgagctgcgttagtaaagcggaagccgatgccgttacgctcatcgtgaagaacacggtgtcgacctttctgccggatgcgctggtgaccatcacgggcggtttccgccgtggcaaaaagatgggccacgacatcgactttctgatcacgaatccgggcccaaaaagtgatgacgaactgctccacaaagtggttgatctgctcaagaagcaaggtctgctgctgtactgcgacatcatcgagagcacgttcgtggaggaacaactgccaagtcgcaaaatcgacgccatggacaacttccagaagtgcttcgccattctcaagctgtaccagccgggcgtggataactcggcgtataacacgagtaagaagagtgacatggccgaggttaaggattggaaagcgatccgtgtggatctggtgatcacgccattcgagcagtacgcctatgcgctgctcggttggacgggcagccgcgaatttggtcgcgatctgcgccgctatgcgagtcatgagcgcaagatgatcctcgacaaccatggcctctacgaccgcaaaaagcgcatctttctgaaagcgggcagcgaagaagagattttcgcgcatctgggtctggattatgtggagccgtgggaacgcaacgcg

SEQ ID NO: 616 - protein, 394 aa, synthetic construct
  REGION 1..394: note = Variant of terminal deoxynucleotidyl transferase
MHHHHHHGGSGHPPSNTPESEVPSVIARKVSQYSCQRKTTLNNYNKKFTDAFEIMAENYEFKENEIFRLEFLRAASLLKYLPFPVTRMKDIQGLPCIGDQVRDVIEEIIEEGESSRVKEVLNDERYKAFKQFTSVFGVGVKTSEKWFRMGLRTVEELKADKSLKLSKMQKAGFLYYEDLVSCVSKAEADAVTLIVKNTVSTFLPDALVTITGGFRRGKKMGHDIDFLITNPGPKSDDELLHKVVDLLKKQGLLLYCDIIESTFVEEQLPSRKIDAMDNFQKCFAILKLYQPGVDNSAYNTSKKSDMAEVKDWKAIRVDLVITPFEQYAYALLGWTGSREFGRDLRRYASHERKMILDNHGLYDRKKRIFLKAGSEEEIFAHLGLDYVEPWERNA

SEQ ID NO: 617 - DNA, 1182 bp, synthetic construct
  misc_feature 1..1182: note = Variant of terminal deoxynucleotidyl transferase
  source 1..1182: mol_type = other DNA
atgcaccatcatcatcatcatggcggtagcggccatccgccgagcaataccccggagctgggggtgccgagcgttatcgcccgcaaggttagtcagtacagctgccagcgcaagaccacgctgaataactacaacaaaaagtttaccgacgcgttcgagatcatggccgagaactacgaatttaaagagaacgaaatcttccgtctggaatttctgcgcgccgcgagtctgctgaaatatctgccgttcccggttacccgcatgaaagacatccaaggtctgccgtgcattggcgaccaagttcgtgacgtgatcgaggagatcatcgaagaaggcgagagcagccgtgttaaagaagttctcaatgacgagcgctacaaggcctttaagcagttcaccagcgtgttcggtgtgggcgtgaaaaccagcgaaaagtggtttcgtatgggcctccgtacggttgaagagctgaaggccgacaagagtctgaagctgagcaagatgcagaaggcgggctttctgtattacgaggatctggccagctgcgttagtaaagcggaagccgatgccgttacgctcatcgtgaagaacacggtgagtacctttctgccggatgcgctggtgaccatcacgggcggtttccgccgtggcaaaaagatgggccacgacatcgactttctgatcacgaatccgggcccgaaagaggatgacgaactgctccacaaagtggttgatctgctcaagaagcaaggtctgctgctgtactgcgacatcatcgagagcacgttcgtggaggaacaactgccaagtcgcaaaatcgacgccatggacaacttccagaagtgcttcgccattctcaagctgtaccagccgggcgtggataactcgtcgtataacacgagtaagaagagtgacatggccgaggttaaggattggaaagcgatccgtgtggatctggtgatcacgccattcgagcagtacgcctatgcgctgctcggttggacgggcagccgcgaatttggtcgcgatctgcgccgctatgcgagtcatgagcgcaagatgatcctcgacaaccatggcctctacgaccgcaaaaagcgcatctttctgaaagcgggcagcgaagaagagattttcgcgcatctgggtctggattatgtggagccgtgggaacgcaacgcg

SEQ ID NO: 618 - protein, 394 aa, synthetic construct
  REGION 1..394: note = Variant of terminal deoxynucleotidyl transferase
MHHHHHHGGSGHPPSNTPELGVPSVIARKVSQYSCQRKTTLNNYNKKFTDAFEIMAENYEFKENEIFRLEFLRAASLLKYLPFPVTRMKDIQGLPCIGDQVRDVIEEIIEEGESSRVKEVLNDERYKAFKQFTSVFGVGVKTSEKWFRMGLRTVEELKADKSLKLSKMQKAGFLYYEDLASCVSKAEADAVTLIVKNTVSTFLPDALVTITGGFRRGKKMGHDIDFLITNPGPKEDDELLHKVVDLLKKQGLLLYCDIIESTFVEEQLPSRKIDAMDNFQKCFAILKLYQPGVDNSSYNTSKKSDMAEVKDWKAIRVDLVITPFEQYAYALLGWTGSREFGRDLRRYASHERKMILDNHGLYDRKKRIFLKAGSEEEIFAHLGLDYVEPWERNA

SEQ ID NO: 619 - DNA, 1182 bp, synthetic construct
  misc_feature 1..1182: note = Variant of terminal deoxynucleotidyl transferase
  source 1..1182: mol_type = other DNA
atgcaccatcatcatcatcatggcggtagcggccatccgccgagcaataccccggagggtggggtgccgagcgttatcgcccgcaaggttagtcagtacagctgccagcgcaagaccacgctgaataactacaacaaaaagtttaccgacgcgttcgagatcatggccgagaactacgaatttaaagagaacgaaatcttccgtctggaatttctgcgcgccgcgagtctgctgaaatatctgccgttcccggttacccgcatgaaagacatccaaggtctgccgtgcattggcgaccaagttcgtagtgtgatcgaggagatcatcgaagaaggcgagagcagccgtgttaaagaagttctcaatgacgagcgctacaaggcctttaagcagttcaccagcgtgttcggtgtgggcgtgaaaaccagcgaaaagtggtttcgtatgggcctccgtacggttgaagagctgaaggccgacaagagtctgaagctgagcaagatgcagaaggcgggctttctgtattacgaggatctggtgagctgcgttagtaaagcggaagccgatgccgttacgctcatcgtgaagaacacggtgcgtacctttctgccggatgcgctggtgaccatcacgggcggtttccgccgtggcaaaaagatgggccacgacatcgactttctgatcacgaatccgggcccgaaagaggatgacgggctgctccacaaagtggttgatctgctcaagaagcaaggtctgctgctgtactgcgacatcatcgagagcacgttcgtggaggaacaactgccaagtcgcaaaatcgacgccatggacaacttccagaagtgcttcgccattctcaagctgtaccagccgggcgtggataactcggcgtataacacgagtaagaagagtgacatggccgaggttaaggattggaaagcgatccgtgtggatctggtgatcacgccattcgagcagtacgcctatgcgctgctcggttggacgggcagccgcgaatttggtcgcgatctgcgccgctatgcgagtcatgagcgcaagatgatcctcgacaaccatggcctctacgaccgcaaaaagcgcatctttctgaaagcgggcagcgaagaagagattttcgcgcatctgggtctggattatgtggagccgtgggaacgcaacgcg

SEQ ID NO: 620 - protein, 394 aa, synthetic construct
  REGION 1..394: note = Variant of terminal deoxynucleotidyl transferase
MHHHHHHGGSGHPPSNTPEGGVPSVIARKVSQYSCQRKTTLNNYNKKFTDAFEIMAENYEFKENEIFRLEFLRAASLLKYLPFPVTRMKDIQGLPCIGDQVRSVIEEIIEEGESSRVKEVLNDERYKAFKQFTSVFGVGVKTSEKWFRMGLRTVEELKADKSLKLSKMQKAGFLYYEDLVSCVSKAEADAVTLIVKNTVRTFLPDALVTITGGFRRGKKMGHDIDFLITNPGPKEDDGLLHKVVDLLKKQGLLLYCDIIESTFVEEQLPSRKIDAMDNFQKCFAILKLYQPGVDNSAYNTSKKSDMAEVKDWKAIRVDLVITPFEQYAYALLGWTGSREFGRDLRRYASHERKMILDNHGLYDRKKRIFLKAGSEEEIFAHLGLDYVEPWERNA

SEQ ID NO: 621 - DNA, 1182 bp, synthetic construct
  misc_feature 1..1182: note = Variant of terminal deoxynucleotidyl transferase
  source 1..1182: mol_type = other DNA
atgcaccatcatcatcatcatggcggtagcggccatccgccgagcaataccccggagagtggggtgccgagcgttatcgcccgcaaggttagtcagtacagctgccagcgcaagaccacgctgaataactacaacaaaaagtttaccgacgcgttcgagatcatggccgagaactacgaatttaaagagaacgaaatcttccgtctggaatttctgcgcgccgcgagtctgctgaaatatctgccgttcccggttacccgcatgaaagacatccaaggtctgccgtgcattggcgaccaagttcgtgatgtgatcgaggagatcatcgaagagggcgagagcagccgtgttaaagaagttctcaatgacgagcgctacaaggcctttaagcagttcaccagcgtgttcggtgtgggcgtgaaaaccagcgaaaagtggtttcgtatgggcctccgtacggttgaagagctgaaggccgacaagagtctgaagctgagcaagatgcagaaggcgggctttctgtattacgaggatctggtcagctgcgttagtaaagcggaagccgatgccgttacgctcatcgtgaagaacacggtgcgtacctttctgccggatgcgctggtgaccatcacgggcggtttccgccgtggcaaaaagatgggccacgacatcgactttctgatcacgaatccgggcccaaaaagtgatgacgaactgctccacaaagtggttgatctgctcaagaagcaaggtctgctgctgtactgcgacatcatcgagagcacgttcgtggaggaacaactgccaagtcgcaaaatcgacgccatggacaacttccagaagtgcttcgccattctcaagctgtaccagccgggcgtggataactcggcgtataacacgagtaagaagagtgacatggccgaggttaaggattggaaagcgatccgtgtggatctggtgatcacgccattcgagcagtacgcctatgcgctgctcggttggacgggcagccgcgaatttggtcgcgatctgcgccgctatgcgagtcatgagcgcaagatgatcctcgacaaccatggcctctacgaccgcaaaaagcgcatctttctgaaagcgggcagcgaagaagagattttcgcgcatctgggtctggattatgtggagccgtgggaacgcaacgcg

SEQ ID NO: 622 - protein, 394 aa, synthetic construct
  REGION 1..394: note = Variant of terminal deoxynucleotidyl transferase
MHHHHHHGGSGHPPSNTPESGVPSVIARKVSQYSCQRKTTLNNYNKKFTDAFEIMAENYEFKENEIFRLEFLRAASLLKYLPFPVTRMKDIQGLPCIGDQVRDVIEEIIEEGESSRVKEVLNDERYKAFKQFTSVFGVGVKTSEKWFRMGLRTVEELKADKSLKLSKMQKAGFLYYEDLVSCVSKAEADAVTLIVKNTVRTFLPDALVTITGGFRRGKKMGHDIDFLITNPGPKSDDELLHKVVDLLKKQGLLLYCDIIESTFVEEQLPSRKIDAMDNFQKCFAILKLYQPGVDNSAYNTSKKSDMAEVKDWKAIRVDLVITPFEQYAYALLGWTGSREFGRDLRRYASHERKMILDNHGLYDRKKRIFLKAGSEEEIFAHLGLDYVEPWERNA

SEQ ID NO: 623 - DNA, 1182 bp, synthetic construct
  misc_feature 1..1182: note = Variant of terminal deoxynucleotidyl transferase
  source 1..1182: mol_type = other DNA
atgcaccatcatcatcatcatggcggtagcggccatccgccgagcaataccccggagctgggggtgccgagcgttatcgcccgcaaggttagtcagtacagctgccagcgcaagaccacgctgaataactacaacaaaaagtttaccgacgcgttcgagatcatggccgagaactacgaatttaaagagaacgaaatcttccgtctggaatttctgcgcgccgcgagtctgctgaaatatctgccgttcccggttacccgcatgaaagacatccaaggtctgccgtgcattggcgaccaagttcgtgacgtgatcgaggagatcatcgaagagggcgagagcagccgtgttaaagaagttctcaatgacgagcgctacaaggcctttaagcagttcaccagcgtgttcggtgtgggcgtgaaaaccagcgaaaagtggtttcgtatgggcctccgtacggttgaagagctgaaggccgacaagagtctgaagctgagcaagatgcagaaggcgggctttctgtattacgaggatctggtgagctgcgttagtaaagcggaagccgatgccgttacgctcatcgtgaagaacacggtgagtacctttctgccggatgcgctggtgaccatcacgggcggtttccgccgtggcaaaaagatgggccacgacatcgactttctgatcacgaatccgggcccgaaagaggatgacgaactgctccacaaagtggttgatctgctcaagaagcaaggtctgctgctgtactgcgacatcatcgagagcacgttcgtggaggaacaactgccaagtcgcaaaatcgacgccatggacaacttccagaagtgcttcgccattctcaagctgtaccagccgggcgtggataacagcagctataacacgagtaagaagagtgacatggccgaggttaaggattggaaagcgatccgtgtggatctggtgatcacgccattcgagcagtacgcctatgcgctgctcggttggacgggcagccgcgaatttggtcgcgatctgcgccgctatgcgagtcatgagcgcaagatgatcctcgacaaccatggcctctacgaccgcaaaaagcgcatctttctgaaagcgggcagcgaagaagagattttcgcgcatctgggtctggattatgtggagccgtgggaacgcaacgcg

SEQ ID NO: 624 - protein, 394 aa, synthetic construct
  REGION 1..394: note = Variant of terminal deoxynucleotidyl transferase
MHHHHHHGGSGHPPSNTPELGVPSVIARKVSQYSCQRKTTLNNYNKKFTDAFEIMAENYEFKENEIFRLEFLRAASLLKYLPFPVTRMKDIQGLPCIGDQVRDVIEEIIEEGESSRVKEVLNDERYKAFKQFTSVFGVGVKTSEKWFRMGLRTVEELKADKSLKLSKMQKAGFLYYEDLVSCVSKAEADAVTLIVKNTVSTFLPDALVTITGGFRRGKKMGHDIDFLITNPGPKEDDELLHKVVDLLKKQGLLLYCDIIESTFVEEQLPSRKIDAMDNFQKCFAILKLYQPGVDNSSYNTSKKSDMAEVKDWKAIRVDLVITPFEQYAYALLGWTGSREFGRDLRRYASHERKMILDNHGLYDRKKRIFLKAGSEEEIFAHLGLDYVEPWERNA

SEQ ID NO: 625 - DNA, 1182 bp, synthetic construct
  misc_feature 1..1182: note = Variant of terminal deoxynucleotidyl transferase
  source 1..1182: mol_type = other DNA
atgcaccatcatcatcatcatggcggtagcggccatccgccgagcaataccccggagctgggggtgccgagcgttatcgcccgcaaggttagtcagtacagctgccagcgcaagaccacgctgaataactacaacaaaaagtttaccgacgcgttcgagatcatggccgagaactacgaatttaaagagaacgaaatcttccgtctggaatttctgcgcgccgcgagtctgctgaaatatctgccgttcccggttacccgcatgaaagacatccaaggtctgccgtgcattggcgaccaagttcgtgatgtgatcgaggagatcatcgaagagggcgagagcagccgtgttaaagaagttctcaatgacgagcgctacaaggcctttaagcagttcaccagcgtgttcggtgtgggcgtgaaaaccagcgaaaagtggtttcgtatgggcctccgtacggttgaagagctgaaggccgacaagagtctgaagctgagcaagatgcagaaggcgggctttctgtattacgaggatctggccagctgcgttagtaaagcggaagccgatgccgttacgctcatcgtgaagaacacggtgagtacctttctgccggatgcgctggtgaccatcacgggcggtttccgccgtggcaaaaagatgggccacgacatcgactttctgatcacgaatccgggcccgaaagaggatgacgaactgctccacaaagtggttgatgggctcaagaagcaaggtctgctgctgtactgcgacatcatcgagagcacgttcgtggaggaacaactgccaagtcgcaaaatcgacgccatggacaacttccagaagtgcttcgccattctcaagctgtaccagccgggcgtggataactcgtcgtataacacgagtaagaagagtgacatggccgaggttaaggattggaaagcgatccgtgtggatctggtgatcacgccattcgagcagtacgcctatgcgctgctcggttggacgggcagccgcgaatttggtcgcgatctgcgccgctatgcgagtcatgagcgcaagatgatcctcgacaaccatggcctctacgaccgcaaaaagcgcatctttctgaaagcgggcagcgaagaagagattttcgcgcatctgggtctggattatgtggagccgtgggaacgcaacgcg

SEQ ID NO: 626 - protein, 394 aa, synthetic construct
  REGION 1..394: note = Variant of terminal deoxynucleotidyl transferase
MHHHHHHGGSGHPPSNTPELGVPSVIARKVSQYSCQRKTTLNNYNKKFTDAFEIMAENYEFKENEIFRLEFLRAASLLKYLPFPVTRMKDIQGLPCIGDQVRDVIEEIIEEGESSRVKEVLNDERYKAFKQFTSVFGVGVKTSEKWFRMGLRTVEELKADKSLKLSKMQKAGFLYYEDLASCVSKAEADAVTLIVKNTVSTFLPDALVTITGGFRRGKKMGHDIDFLITNPGPKEDDELLHKVVDGLKKQGLLLYCDIIESTFVEEQLPSRKIDAMDNFQKCFAILKLYQPGVDNSSYNTSKKSDMAEVKDWKAIRVDLVITPFEQYAYALLGWTGSREFGRDLRRYASHERKMILDNHGLYDRKKRIFLKAGSEEEIFAHLGLDYVEPWERNA

SEQ ID NO: 627 - DNA, 1182 bp, synthetic construct
  misc_feature 1..1182: note = Variant of terminal deoxynucleotidyl transferase
  source 1..1182: mol_type = other DNA
atgcaccatcatcatcatcatggcggtagcggccatccgccgagcaataccccggagctggaggtgccgagcgttatcgcccgcaaggttagtcagtacagctgccagcgcaagaccacgctgaataactacaacaaaaagtttaccgacgcgttcgagatcatggccgagaactacgaatttaaagagaacgaaatcttctgtctggaatttctgcgcgccgcgagtctgctgaaatatctgccgttcccggttacccgcatgaaagacatccaaggtctgccgtgcattggcgaccaagttcgtagtgtgatcgaggagatcatcgaagaaggcgagagcagccgtgttaaagaagttctcaatgacgagcgctacaaggcctttaagcagttcaccagcgtgttcggtgtgggcgtgaaaaccagcgaaaagtggtttcgtatgggcctccgtacggttgaagagctgaaggccgacaagagtctgaagctgagcaagatgcagaaggcgggctttctgtattacgaggatctggtgagctgcgttagtaaagcggaagccgatgccgttacgctcatcgtgaagaacacggtgagtacctttctgccggatgcgctggtgaccatcacgggcggtttccgccgtggcaaaaagatgggccacgacatcgactttctgatcacgaatccgggcggcaaagaggatgacgaactgctccacaaagtggttgatctgctcaagaagcaaggtctgctgctgtactgcgacatcatcgagagcacgttcgtggaggaacaactgccaagtcgcaaaatcgacgccatggacaacttccagaagtgcttcgccattctcaagctgtaccagccgggcgtggataacagcagctataacacgagtaagaagagtgacatggccgaggttaaggattggaaagcgatccgtgtggatctggtgatcacgccattcgagcagtacgcctatgcgctgctcggttggacgggcagccgcgaatttggtcgcgatctgcgccgctatgcgagtcatgagcgcaagatgatcctcgacaaccatggcctctacgaccgcaaaaagcgcatctttctgaaagcgggcagcgaagaagagattttcgcgcatctgggtctggattatgtggagccgtgggaacgcaacgcg

SEQ ID NO: 628 - protein, 394 aa, synthetic construct
  REGION 1..394: note = Variant of terminal deoxynucleotidyl transferase
MHHHHHHGGSGHPPSNTPELEVPSVIARKVSQYSCQRKTTLNNYNKKFTDAFEIMAENYEFKENEIFCLEFLRAASLLKYLPFPVTRMKDIQGLPCIGDQVRSVIEEIIEEGESSRVKEVLNDERYKAFKQFTSVFGVGVKTSEKWFRMGLRTVEELKADKSLKLSKMQKAGFLYYEDLVSCVSKAEADAVTLIVKNTVSTFLPDALVTITGGFRRGKKMGHDIDFLITNPGGKEDDELLHKVVDLLKKQGLLLYCDIIESTFVEEQLPSRKIDAMDNFQKCFAILKLYQPGVDNSSYNTSKKSDMAEVKDWKAIRVDLVITPFEQYAYALLGWTGSREFGRDLRRYASHERKMILDNHGLYDRKKRIFLKAGSEEEIFAHLGLDYVEPWERNA

SEQ ID NO: 629 - DNA, 1182 bp, synthetic construct
  misc_feature 1..1182: note = Variant of terminal deoxynucleotidyl transferase
  source 1..1182: mol_type = other DNA
atgcaccatcatcatcatcatggcggtagcggccatccgccgagcaataccccggagctggaggtgccgagcgttatcgcccgcaaggttagtcagtacagctgccagcgcaagaccacgctgaataactacaacaaaaagtttaccgacgcgttcgagatcatggccgagaactacgaatttaaagagaacgaaatcttctgtctggaatttctgcgcgccgcgagtctgctgaaatatctgccgttcccggttacccgcatgaaagacatccaaggtctgccgtgcattggcgaccaagttcgtagtgtgatcgaggagatcatcgaagaaggcgagagcagccgtgttaaagaagttctcaatgacgagcgctacaaggcctttaagcagttcaccagcgtgttcggtgtgggcgtgaaaaccagcgaaaagtggtttcgtatgggcctccgtacggttgaagagctgaaggccagtaagagtctgaagctgagcaagatgcagaaggcgggctttctgtattacgaggatctggccagctgcgttagtaaagcggaagccgatgccgttacgctcatcgtgaagaacacggtgagtacctttctgccggatgcgctggtgaccatcacgggcggtttccgccgtggcaaaaagatgggccacgacatcgactttctgatcacgaatccgggcccgaaagaggatgacgaactgctccacaaagtggttgatctgctcaagaagcaaggtctgctgctgtactgcgacatcatcgagagcacgttcgtggaggaacaactgccaagtcgcaaaatcgacgccatggacaacttccagaagtgcttcgccattctcaagctgtaccagccgggcgtggataactcgtcgtataacacgagtaagaagagtgacatggccgaggttaaggattggaaagcgatccgtgtggatctggtgatcacgccattcgagcagtacgcctatgcgctgctcggttggacgggcagccgcgaatttggtcgcgatctgcgccgctatgcgagtcatgagcgcaagatgatcctcgacaaccatggcctctacgaccgcaaaaagcgcatctttctgaaagcgggcagcgaagaagagattttcgcgcatctgggtctggattatgtggagccgtgggaacgcaacgcg

SEQ ID NO: 630 - protein, 394 aa, synthetic construct
  REGION 1..394: note = Variant of terminal deoxynucleotidyl transferase
MHHHHHHGGSGHPPSNTPELEVPSVIARKVSQYSCQRKTTLNNYNKKFTDAFEIMAENYEFKENEIFCLEFLRAASLLKYLPFPVTRMKDIQGLPCIGDQVRSVIEEIIEEGESSRVKEVLNDERYKAFKQFTSVFGVGVKTSEKWFRMGLRTVEELKASKSLKLSKMQKAGFLYYEDLASCVSKAEADAVTLIVKNTVSTFLPDALVTITGGFRRGKKMGHDIDFLITNPGPKEDDELLHKVVDLLKKQGLLLYCDIIESTFVEEQLPSRKIDAMDNFQKCFAILKLYQPGVDNSSYNTSKKSDMAEVKDWKAIRVDLVITPFEQYAYALLGWTGSREFGRDLRRYASHERKMILDNHGLYDRKKRIFLKAGSEEEIFAHLGLDYVEPWERNA

SEQ ID NO: 631 - DNA, 1182 bp, synthetic construct
  misc_feature 1..1182: note = Variant of terminal deoxynucleotidyl transferase
  source 1..1182: mol_type = other DNA
atgcaccatcatcatcatcatggcggtagcggccatccgccgagcaataccccggagggtggggtgccgagcgttatcgcccgcaaggttagtcagtacagctgccagcgcaagaccacgctgaataactacaacaaaaagtttaccgacgcgttcgagatcatggccgagaactacgaatttaaagagaacgaaatcttctgtctggaatttctgcgcgccgcgagtctgctgaaatatctgccgttcccggttacccgcatgaaagacatccaaggtctgccgtgcattggcgaccaagttcgtgacgtgatcgaggagatcatcgaacgtggcgagagcagccgtgttaaagaagttctcaatgacgagcgctacaaggcctttaagcagttcaccagcgtgttcggtgtgggcgtgaaaaccagcgaaaagtggtttcgtatgggcctccgtacggttgaagagctgaaggccagtaagagtctgaagctgagcaagatgcagaaggcgggctttctgtattacgaggatctggtcagctgcgttagtaaagcggaagccgatgccgttacgctcatcgtgaagaacacggtggcgacctttctgccggatgcgctggtgaccatcacgggcggtttccgccgtggcaaaaagatgggccacgacatcgactttctgatcacgaatccgggcccaaaagaggatgacgaactgctccacaaagtggttgatctgctcaagaagcaaggtctgctgctgtactgcgacatcatcgagagcacgttcgtggaggaacaactgccaagtcgcaaaatcgacgccatggacaacttccagaagtgcttcgccattctcaagctgtaccagccgggcgtggataactcgtcgtataacacgagtaagaagagtgacatggccgaggttaaggattggaaagcgatccgtgtggatctggtgatcacgccattcgagcagtacgcctatgcgctgctcggttggacgggcagccgcgaatttggtcgcgatctgcgccgctatgcgagtcatgagcgcaagatgatcctcgacaaccatggcctctacgaccgcaaaaagcgcatctttctgaaagcgggcagcgaagaagagattttcgcgcatctgggtctggattatgtggagccgtgggaacgcaacgcg

SEQ ID NO: 632 - protein, 394 aa, synthetic construct
  REGION 1..394: note = Variant of terminal deoxynucleotidyl transferase
MHHHHHHGGSGHPPSNTPEGGVPSVIARKVSQYSCQRKTTLNNYNKKFTDAFEIMAENYEFKENEIFCLEFLRAASLLKYLPFPVTRMKDIQGLPCIGDQVRDVIEEIIERGESSRVKEVLNDERYKAFKQFTSVFGVGVKTSEKWFRMGLRTVEELKASKSLKLSKMQKAGFLYYEDLVSCVSKAEADAVTLIVKNTVATFLPDALVTITGGFRRGKKMGHDIDFLITNPGPKEDDELLHKVVDLLKKQGLLLYCDIIESTFVEEQLPSRKIDAMDNFQKCFAILKLYQPGVDNSSYNTSKKSDMAEVKDWKAIRVDLVITPFEQYAYALLGWTGSREFGRDLRRYASHERKMILDNHGLYDRKKRIFLKAGSEEEIFAHLGLDYVEPWERNA

SEQ ID NO: 633 - DNA, 1182 bp, synthetic construct
  misc_feature 1..1182: note = Variant of terminal deoxynucleotidyl transferase
  source 1..1182: mol_type = other DNA
atgcaccatcatcatcatcatggcggtagcggccatccgccgagcaataccccggagagtggggtgccgagcgttatcgcccgcaaggttagtcagtacagctgccagcgcaagaccacgctgaataactacaacaaaaagtttaccgacgcgttcgagatcatggccgagaactacgaatttaaagagaacgaaatcttccgtctggaatttctgcgcgccgcgagtctgctgaaatatctgccgttcccggttacccgcatgaaagacatccaaggtctgccgtgcattggcgaccaagttcgtgatgtgatcgaggagatcatcgaacgtggcgagagcagccgtgttaaagaagttctcaatgacgagcgatacaaggcctttaagcagttcaccagcgtgttcggtgtgggcgtgaaaaccagcgaaaagtggtttcgtatgggcctccgtacggttgaagagctgaaggccgacaagagtctgaagctgagcaagatgcagaaggcgggctttctgtattacgaggatctggtcagctgcgttagtaaagcggaagccgatgccgttacgctcatcgtgaagaacacggtgagtacctttctgccggatgcgctggtgaccatcacgggcggtttccgccgtggcaaaaagatgggccacgacatcgactttctgatcacgaatccgggcccaaaaagtgatgacgaactgctccacaaagtggttgatctgctcaagaagcaaggtctgctgctgtactgcgacatcatcgagagcacgttcgtggaggaacaactgccaagtcgcaaaatcgacgccatggacaacttccagaagtgcttcgccattctcaagctgtaccagccgggcgtggataactcgtcgtataacacgagtaagaagagtgacatggccgaggttaaggattggaaagcgatccgtgtggatctggtgatcacgccattcgagcagtacgcctatgcgctgctcggttggacgggcagccgcgaatttggtcgcgatctgcgccgctatgcgagtcatgagcgcaagatgatcctcgacaaccatggcctctacgaccgcaaaaagcgcatctttctgaaagcgggcagcgaagaagagattttcgcgcatctgggtctggattatgtggagccgtgggaacgcaacgcg

SEQ ID NO: 634 - protein, 394 aa, synthetic construct
  REGION 1..394: note = Variant of terminal deoxynucleotidyl transferase
MHHHHHHGGSGHPPSNTPESGVPSVIARKVSQYSCQRKTTLNNYNKKFTDAFEIMAENYEFKENEIFRLEFLRAASLLKYLPFPVTRMKDIQGLPCIGDQVRDVIEEIIERGESSRVKEVLNDERYKAFKQFTSVFGVGVKTSEKWFRMGLRTVEELKADKSLKLSKMQKAGFLYYEDLVSCVSKAEADAVTLIVKNTVSTFLPDALVTITGGFRRGKKMGHDIDFLITNPGPKSDDELLHKVVDLLKKQGLLLYCDIIESTFVEEQLPSRKIDAMDNFQKCFAILKLYQPGVDNSSYNTSKKSDMAEVKDWKAIRVDLVITPFEQYAYALLGWTGSREFGRDLRRYASHERKMILDNHGLYDRKKRIFLKAGSEEEIFAHLGLDYVEPWERNA

SEQ ID NO: 635 - DNA, 1182 bp, synthetic construct
  misc_feature 1..1182: note = Variant of terminal deoxynucleotidyl transferase
  source 1..1182: mol_type = other DNA
atgcaccatcatcatcatcatggcggtagcggccatccgccgagcaataccccggagctggaagtgccgagcgttatcgcccgcaaggttagtcagtacagctgccagcgcaagaccacgctgaataactacaacaaaaagtttaccgacgcgttcgagatcatggccgagaactacgaatttaaagagaacgaaatcttccgtctggaatttctgcgcgccgcgagtctgctgaaatatctgccgttcccggttacccgcatgaaagacatccaaggtctgccgtgcattggcgaccaagttcgtagtgtgatcgaggagatcatcgaagagggcgagagcagccgtgttaaagaagttctcaatgacgagcgctacaaggcctttaagcagttcaccagcgtgttcggtgtgggcgtgaaaaccagcgaaaagtggtttcgtatgggcctccgtacggttgaagagctgaaggccagtaagagtctgaagctgagcaagatgcagaaggcgggctttctgtattacgaggatctggtgagctgcgttagtaaagcggaagccgatgccgttacgctcatcgtgaagaacacggtgtcgacctttctgccggatgcgctggtgaccatcacgggcggtttccgccgtggcaaaaagatgggccacgacatcgactttctgatcacgaatccgggcccaaaaagtgatgacgaactgctccacaaagtggttgatctgctcaagaagcaaggtctgctgctgtactgcgacatcatcgagagcacgttcgtggaggaacaactgccaagtcgcaaaatcgacgccatggacaacttccagaagtgcttcgccattctcaagctgtaccagccgggcgtggataacagcagctataacacgagtaagaagagtgacatggccgaggttaaggattggaaagcgatccgtgtggatctggtgatcacgccattcgagcagtacgcctatgcgctgctcggttggacgggcagccgcgaatttggtcgcgatctgcgccgctatgcgagtcatgagcgcaagatgatcctcgacaaccatggcctctacgaccgcaaaaagcgcatctttctgaaagcgggcagcgaagaagagattttcgcgcatctgggtctggattatgtggagccgtgggaacgcaacgcg

SEQ ID NO: 636 - protein, 394 aa, synthetic construct
  REGION 1..394: note = Variant of terminal deoxynucleotidyl transferase
MHHHHHHGGSGHPPSNTPELEVPSVIARKVSQYSCQRKTTLNNYNKKFTDAFEIMAENYEFKENEIFRLEFLRAASLLKYLPFPVTRMKDIQGLPCIGDQVRSVIEEIIEEGESSRVKEVLNDERYKAFKQFTSVFGVGVKTSEKWFRMGLRTVEELKASKSLKLSKMQKAGFLYYEDLVSCVSKAEADAVTLIVKNTVSTFLPDALVTITGGFRRGKKMGHDIDFLITNPGPKSDDELLHKVVDLLKKQGLLLYCDIIESTFVEEQLPSRKIDAMDNFQKCFAILKLYQPGVDNSSYNTSKKSDMAEVKDWKAIRVDLVITPFEQYAYALLGWTGSREFGRDLRRYASHERKMILDNHGLYDRKKRIFLKAGSEEEIFAHLGLDYVEPWERNA

SEQ ID NO: 637 - DNA, 1182 bp, synthetic construct
  misc_feature 1..1182: note = Variant of terminal deoxynucleotidyl transferase
  source 1..1182: mol_type = other DNA
atgcaccatcatcatcatcatggcggtagcggccatccgccgagcaataccccggagggtggggtgccgagcgttatcgcccgcaaggttagtcagtacagctgccagcgcaagaccacgctgaataactacaacaaaaagtttaccgacgcgttcgagatcatggccgagaactacgaatttaaagagaacgaaatcttccgtctggaatttctgcgcgccgcgagtctgctgaaatatctgccgttcccggttacccgcatgaaagacatccaaggtctgccgtgcattggcgaccaagttcgtgacgtgatcgaggagatcatcgaagagggcgagagcagccgtgttaaagaagttctcaatgacgagcgctacaaggcctttaagcagttcaccagcgtgttcggtgtgggcgtgaaaaccagcgaaaagtggtttcgtatgggcctccgtacggttgaagagctgaaggccgacaagagtctgaagctgagcaagatgcagaaggcgggctttctgtattacgaggatctggccagctgcgttagtaaagcggaagccgatgccgttacgctcatcgtgaagaacacggtgagtacctttctgccggatgcgctggtgaccatcacgggcggtttccgccgtggcaaaaagatgggccacgacatcgactttctgatcacgaatccgggcccaaaaagtgatgacgaactgctccacaaagtggttgatctgctcaagaagcaaggtctgctgctgtactgcgacatcatcgagagcacgttcgtggaggaacaactgccaagtcgcaaaatcgacgccatggacaacttccagaagtgcttcgccattctcaagctgtaccagccgggcgtggataactcgtcgtataacacgagtaagaagagtgacatggccgaggttaaggattggaaagcgatccgtgtggatctggtgatcacgccattcgagcagtacgcctatgcgctgctcggttggacgggcagccgcgaatttggtcgcgatctgcgccgctatgcgagtcatgagcgcaagatgatcctcgacaaccatggcctctacgaccgcaaaaagcgcatctttctgaaagcgggcagcgaagaagagattttcgcgcatctgggtctggattatgtggagccgtgggaacgcaacgcg

SEQ ID NO: 638 - protein, 394 aa, synthetic construct
  REGION 1..394: note = Variant of terminal deoxynucleotidyl transferase
MHHHHHHGGSGHPPSNTPEGGVPSVIARKVSQYSCQRKTTLNNYNKKFTDAFEIMAENYEFKENEIFRLEFLRAASLLKYLPFPVTRMKDIQGLPCIGDQVRDVIEEIIEEGESSRVKEVLNDERYKAFKQFTSVFGVGVKTSEKWFRMGLRTVEELKADKSLKLSKMQKAGFLYYEDLASCVSKAEADAVTLIVKNTVSTFLPDALVTITGGFRRGKKMGHDIDFLITNPGPKSDDELLHKVVDLLKKQGLLLYCDIIESTFVEEQLPSRKIDAMDNFQKCFAILKLYQPGVDNSSYNTSKKSDMAEVKDWKAIRVDLVITPFEQYAYALLGWTGSREFGRDLRRYASHERKMILDNHGLYDRKKRIFLKAGSEEEIFAHLGLDYVEPWERNA

SEQ ID NO: 639 - DNA, 1182 bp, synthetic construct
  misc_feature 1..1182: note = Variant of terminal deoxynucleotidyl transferase
  source 1..1182: mol_type = other DNA
atgcaccatcatcatcatcatggcggtagcggccatccgccgagcaataccccggagggtggggtgccgagcgttatcgcccgcaaggttagtcagtacagctgccagcgcaagaccacgctgaataactacaacaaaaagtttaccgacgcgttcgagatcatggccgagaactacgaatttaaagagaacgaaatcttctgtctggaatttctgcgcgccgcgagtctgctgaaatatctgccgttcccggttacccgcatgaaagacatccaaggtctgccgtgcattggcgaccaagttcgtgatgtgatcgaggagatcatcgaagaaggcgagagcagccgtgttaaagaagttctcaatgacgagcgctacaaggcctttaagcagttcaccagcgtgttcggtgtgggcgtgaaaaccagcgaaaagtggtttcgtatgggcctccgtacggttgaagagctgaaggccgacaagagtctgaagctgagcaagatgcagaaggcgggctttctgtattacgaggatctggccagctgcgttagtaaagcggaagccgatgccgttacgctcatcgtgaagaacacggtgagtacctttctgccggatgcgctggtgaccatcacgggcggtttccgccgtggcaaaaagatgggccacgacatcgactttctgatcacgaatccgggcccaaaagaggatgacgaactgctccacaaagtggttgatctgctcaagaagcaaggtctgctgctgtactgcgacatcatcgagagcacgttcgtggaggaacaactgccaagtcgcaaaatcgacgccatggacaacttccagaagtgcttcgccattctcaagctgtaccagccgggcgtggataactcggcgtataacacgagtaagaagagtgacatggccgaggttaaggattggaaagcgatccgtgtggatctggtgatcacgccattcgagcagtacgcctatgcgctgctcggttggacgggcagccgcgaatttggtcgcgatctgcgccgctatgcgagtcatgagcgcaagatgatcctcgacaaccatggcctctacgaccgcaaaaagcgcatctttctgaaagcgggcagcgaagaagagattttcgcgcatctgggtctggattatgtggagccgtgggaacgcaacgcg

SEQ ID NO: 640 - protein, 394 aa, synthetic construct
  REGION 1..394: note = Variant of terminal deoxynucleotidyl transferase
MHHHHHHGGSGHPPSNTPEGGVPSVIARKVSQYSCQRKTTLNNYNKKFTDAFEIMAENYEFKENEIFCLEFLRAASLLKYLPFPVTRMKDIQGLPCIGDQVRDVIEEIIEEGESSRVKEVLNDERYKAFKQFTSVFGVGVKTSEKWFRMGLRTVEELKADKSLKLSKMQKAGFLYYEDLASCVSKAEADAVTLIVKNTVSTFLPDALVTITGGFRRGKKMGHDIDFLITNPGPKEDDELLHKVVDLLKKQGLLLYCDIIESTFVEEQLPSRKIDAMDNFQKCFAILKLYQPGVDNSAYNTSKKSDMAEVKDWKAIRVDLVITPFEQYAYALLGWTGSREFGRDLRRYASHERKMILDNHGLYDRKKRIFLKAGSEEEIFAHLGLDYVEPWERNA

SEQ ID NO: 641 - DNA, 1182 bp, synthetic construct
  misc_feature 1..1182: note = Variant of terminal deoxynucleotidyl transferase
  source 1..1182: mol_type = other DNA
atgcaccatcatcatcatcatggcggtagcggccatccgccgagcaataccccggagagtggggtgccgagcgttatcgcccgcaaggttagtcagtacagctgccagcgcaagaccacgctgaataactacaacaaaaagtttaccgacgcgttcgagatcatggccgagaactacgaatttaaagagaacgaaatcttctgtctggaatttctgcgcgccgcgagtctgctgaaatatctgccgttcccggttacccgcatgaaagacatccaaggtctgccgtgcattggcgaccaagttcgtagtgtgatcgaggagatcatcgaagagggcgagagcagccgtgttaaagaagttctcaatgacgagcgctacaaggcctttaagcagttcaccagcgtgttcggtgtgggcgtgaaaaccagcgaaaagtggtttcgtatgggcctccgtacggttgaagagctgaaggccgacaagagtctgaagctgagcaagatgcagaaggcgggctttctgtattacgaggatctggtgagctgcgttagtaaagcggaagccgatgccgttacgctcatcgtgaagaacacggtgagtacctttctgccggatgcgctggtgaccatcacgggcggtttccgccgtggcaaaaagatgggccacgacatcgactttctgatcacgaatccgggcggcaaagaggatgacgaactgctccacaaagtggttgatctgctcaagaagcaaggtctgctgctgtactgcgacatcatcgagagcacgttcgtggaggaacaactgccaagtcgcaaaatcgacgccatggacaacttccagaagtgcttcgccattctcaagctgtaccagccgggcgtggataacagcagctataacacgagtaagaagagtgacatggccgaggttaaggattggaaagcgatccgtgtggatctggtgatcacgccattcgagcagtacgcctatgcgctgctcggttggacgggcagccgcgaatttggtcgcgatctgcgccgctatgcgagtcatgagcgcaagatgatcctcgacaaccatggcctctacgaccgcaaaaagcgcatctttctgaaagcgggcagcgaagaagagattttcgcgcatctgggtctggattatgtggagccgtgggaacgcaacgcg

SEQ ID NO: 642 - protein, 394 aa, synthetic construct
  REGION 1..394: note = Variant of terminal deoxynucleotidyl transferase
MHHHHHHGGSGHPPSNTPESGVPSVIARKVSQYSCQRKTTLNNYNKKFTDAFEIMAENYEFKENEIFCLEFLRAASLLKYLPFPVTRMKDIQGLPCIGDQVRSVIEEIIEEGESSRVKEVLNDERYKAFKQFTSVFGVGVKTSEKWFRMGLRTVEELKADKSLKLSKMQKAGFLYYEDLVSCVSKAEADAVTLIVKNTVSTFLPDALVTITGGFRRGKKMGHDIDFLITNPGGKEDDELLHKVVDLLKKQGLLLYCDIIESTFVEEQLPSRKIDAMDNFQKCFAILKLYQPGVDNSSYNTSKKSDMAEVKDWKAIRVDLVITPFEQYAYALLGWTGSREFGRDLRRYASHERKMILDNHGLYDRKKRIFLKAGSEEEIFAHLGLDYVEPWERNA

SEQ ID NO: 643 - DNA, 1182 bp, synthetic construct
  misc_feature 1..1182: note = Variant of terminal deoxynucleotidyl transferase
  source 1..1182: mol_type = other DNA
atgcaccatcatcatcatcatggcggtagcggccatccgccgagcaataccccggagggtgaggtgccgagcgttatcgcccgcaaggttagtcagtacagctgccagcgcaagaccacgctgaataactacaacaaaaagtttaccgacgcgttcgagatcatggccgagaactacgaatttaaagagaacgaaatcttccgtctggaatttctgcgcgccgcgagtctgctgaaatatctgccgttcccggttacccgcatgaaagacatccaaggtctgccgtgcattggcgaccaagttcgtgacgtgatcgaggagatcatcgaagaaggcgagagcagccgtgttaaagaagttctcaatgacgagcgctacaaggcctttaagcagttcaccagcgtgttcggtgtgggcgtgaaaaccagcgaaaagtggtttcgtatgggcctccgtacggttgaagagctgaaggccagtaagagtctgaagctgagcaagatgcagaaggcgggctttctgtattacgaggatctggtgagctgcgttagtaaagcggaagccgatgccgttacgctcatcgtgaagaacacggtgagtacctttctgccggatgcgctggtgaccatcacgggcggtttccgccgtggcaaaaagatgggccacgacatcgactttctgatcacgaatccgggcccgaaagaggatgacgaactgctccacaaagtggttgatctgctcaagaagcaaggtctgctgctgtactgcgacatcatcgagagcacgttcgtggaggaacaactgccaagtcgcaaaatcgacgccatggacaacttccagaagtgcttcgccattctcaagctgtaccagccgggcgtggataactcgtcgtataacacgagtaagaagagtgacatggccgaggttaaggattggaaagcgatccgtgtggatctggtgatcacgccattcgagcagtacgcctatgcgctgctcggttggacgggcagccgcgaatttggtcgcgatctgcgccgctatgcgagtcatgagcgcaagatgatcctcgacaaccatggcctctacgaccgcaaaaagcgcatctttctgaaagcgggcagcgaagaagagattttcgcgcatctgggtctggattatgtggagccgtgggaacgcaacgcg

SEQ ID NO: 644 - protein, 394 aa, synthetic construct
  REGION 1..394: note = Variant of terminal deoxynucleotidyl transferase
MHHHHHHGGSGHPPSNTPEGEVPSVIARKVSQYSCQRKTTLNNYNKKFTDAFEIMAENYEFKENEIFRLEFLRAASLLKYLPFPVTRMKDIQGLPCIGDQVRDVIEEIIEEGESSRVKEVLNDERYKAFKQFTSVFGVGVKTSEKWFRMGLRTVEELKASKSLKLSKMQKAGFLYYEDLVSCVSKAEADAVTLIVKNTVSTFLPDALVTITGGFRRGKKMGHDIDFLITNPGPKEDDELLHKVVDLLKKQGLLLYCDIIESTFVEEQLPSRKIDAMDNFQKCFAILKLYQPGVDNSSYNTSKKSDMAEVKDWKAIRVDLVITPFEQYAYALLGWTGSREFGRDLRRYASHERKMILDNHGLYDRKKRIFLKAGSEEEIFAHLGLDYVEPWERNA

SEQ ID NO: 645 - DNA, 1182 bp, synthetic construct
  misc_feature 1..1182: note = Variant of terminal deoxynucleotidyl transferase
  source 1..1182: mol_type = other DNA
atgcaccatcatcatcatcatggcggtagcggccatccgccgagcaataccccggagagtggggtgccgagcgttatcgcccgcaaggttagtcagtacagctgccagcgcaagaccacgctgaataactacaacaaaaagtttaccgacgcgttcgagatcatggccgagaactacgaatttaaagagaacgaaatcttccgtctggaatttctgcgcgccgcgagtctgctgaaatatctgccgttcccggttacccgcatgaaagacatccaaggtctgccgtgcattggcgaccaagttcgtgatgtgatcgaggagatcatcgaagaaggcgagagcagccgtgttaaagaagttctcaatgacgagcgctacaaggcctttaagcagttcaccagcgtgttcggtgtgggcgtgaaaaccagcgaaaagtggtttcgtatgggcctccgtacggttgaagagctgaaggccagtaagagtctgaagctgagcaagatgcagaaggcgggctttctgtattacgaggatctggtgagctgcgttagtaaagcggaagccgatgccgttacgctcatcgtgaagaacacggtgtcgacctttctgccggatgcgctggtgaccatcacgggcggtttccgccgtggcaaaaagatgggccacgacatcgactttctgatcacgaatccgggcccgaaagaggatgacgaactgctccacaaagtggttgatctgctcaagaagcaaggtctgctgctgtactgcgacatcatcgagagcacgttcgtggaggaacaactgccaagtcgcaaaatcgacgccatggacaacttccagaagtgcttcgccattctcaagctgtaccagccgggcgtggataacagcagctataacacgagtaagaagagtgacatggccgaggttaaggattggaaagcgatccgtgtggatctggtgatcacgccattcgagcagtacgcctatgcgctgctcggttggacgggcagccgcgaatttggtcgcgatctgcgccgctatgcgagtcatgagcgcaagatgatcctcgacaaccatggcctctacgaccgcaaaaagcgcatctttctgaaagcgggcagcgaagaagagattttcgcgcatctgggtctggattatgtggagccgtgggaacgcaacgcg

SEQ ID NO: 646 - protein, 394 aa, synthetic construct
  REGION 1..394: note = Variant of terminal deoxynucleotidyl transferase
MHHHHHHGGSGHPPSNTPESGVPSVIARKVSQYSCQRKTTLNNYNKKFTDAFEIMAENYEFKENEIFRLEFLRAASLLKYLPFPVTRMKDIQGLPCIGDQVRDVIEEIIEEGESSRVKEVLNDERYKAFKQFTSVFGVGVKTSEKWFRMGLRTVEELKASKSLKLSKMQKAGFLYYEDLVSCVSKAEADAVTLIVKNTVSTFLPDALVTITGGFRRGKKMGHDIDFLITNPGPKEDDELLHKVVDLLKKQGLLLYCDIIESTFVEEQLPSRKIDAMDNFQKCFAILKLYQPGVDNSSYNTSKKSDMAEVKDWKAIRVDLVITPFEQYAYALLGWTGSREFGRDLRRYASHERKMILDNHGLYDRKKRIFLKAGSEEEIFAHLGLDYVEPWERNA

SEQ ID NO: 647 - DNA, 1182 bp, synthetic construct
  misc_feature 1..1182: note = Variant of terminal deoxynucleotidyl transferase
  source 1..1182: mol_type = other DNA
atgcaccatcatcatcatcatggcggtagcggccatccgccgagcaataccccggagctggaggtgccgagcgttatcgcccgcaaggttagtcagtacagctgccagcgcaagaccacgctgaataactacaacaaaaagtttaccgacgcgttcgagatcatggccgagaactacgaatttaaagagaacgaaatcttccgtctggaatttctgcgcgccgcgagtctgctgaaatatctgccgttcccggttacccgcatgaaagacatccaaggtctgccgtgcattggcgaccaagttcgtgacgtgatcgaggagatcatcgaagagggcgagagcagccgtgttaaagaagttctcaatgacgagcgctacaaggcctttaagcagttcaccagcgtgttcggtgtgggcgtgaaaaccagcgaaaagtggtttcgtatgggcctccgtacggttgaagagctgaaggccagtaagagtctgaagctgagcaagatgcagaaggcgggctttctgtattacgaggatctggtgagctgcgttagtaaagcggaagccgatgccgttacgctcatcgtgaagaacacggtgagtacctttctgccggatgcgctggtgaccatcacgggcggtttccgccgtggcaaaaagatgggccacgacatcgactttctgatcacgaatccgggcggcaaagaggatgacgaactgctccacaaagtggttgatgggctcaagaagcaaggtctgctgctgtactgcgacatcatcgagagcacgttcgtggaggaacaactgccaagtcgcaaaatcgacgccatggacaacttccagaagtgcttcgccattctcaagctgtaccagccgggcgtggataacagcagctataacacgagtaagaagagtgacatggccgaggttaaggattggaaagcgatccgtgtggatctggtgatcacgccattcgagcagtacgcctatgcgctgctcggttggacgggcagccgcgaatttggtcgcgatctgcgccgctatgcgagtcatgagcgcaagatgatcctcgacaaccatggcctctacgaccgcaaaaagcgcatctttctgaaagcgggcagcgaagaagagattttcgcgcatctgggtctggattatgtggagccgtgggaacgcaacgcg

SEQ ID NO: 648 - protein, 394 aa, synthetic construct
  REGION 1..394: note = Variant of terminal deoxynucleotidyl transferase
MHHHHHHGGSGHPPSNTPELEVPSVIARKVSQYSCQRKTTLNNYNKKFTDAFEIMAENYEFKENEIFRLEFLRAASLLKYLPFPVTRMKDIQGLPCIGDQVRDVIEEIIEEGESSRVKEVLNDERYKAFKQFTSVFGVGVKTSEKWFRMGLRTVEELKASKSLKLSKMQKAGFLYYEDLVSCVSKAEADAVTLIVKNTVSTFLPDALVTITGGFRRGKKMGHDIDFLITNPGGKEDDELLHKVVDGLKKQGLLLYCDIIESTFVEEQLPSRKIDAMDNFQKCFAILKLYQPGVDNSSYNTSKKSDMAEVKDWKAIRVDLVITPFEQYAYALLGWTGSREFGRDLRRYASHERKMILDNHGLYDRKKRIFLKAGSEEEIFAHLGLDYVEPWERNA

SEQ ID NO: 649 - DNA, 1182 bp, synthetic construct
  misc_feature 1..1182: note = Variant of terminal deoxynucleotidyl transferase
  source 1..1182: mol_type = other DNA
atgcaccatcatcatcatcatggcggtagcggccatccgccgagcaataccccggagctgggggtgccgagcgttatcgcccgcaaggttagtcagtacagctgccagcgcaagaccacgctgaataactacaacaaaaagtttaccgacgcgttcgagatcatggccgagaactacgaatttaaagagaacgaaatcttccgtctggaatttctgcgcgccgcgagtctgctgaaatatctgccgttcccggttacccgcatgaaagacatccaaggtctgccgtgcattggcgaccaagttcgtgacgtgatcgaggagatcatcgaagaaggcgagagcagccgtgttaaagaagttctcaatgacgagcgctacaaggcctttaagcagttcaccagcgtgttcggtgtgggcgtgaaaaccagcgaaaagtggtttcgtatgggcctccgtacggttgaagagctgaaggccagtaagagtctgaagctgagcaagatgcagaaggcgggctttctgtattacgaggatctggtgagctgcgttagtaaagcggaagccgatgccgttacgctcatcgtgaagaacacggtgtcgacctttctgccggatgcgctggtgaccatcacgggcggtttccgccgtggcaaaaagatgggccacgacatcgactttctgatcacgaatccgggcccgaaagaggatgacgggctgctccacaaagtggttgatctgctcaagaagcaaggtctgctgctgtactgcgacatcatcgagagcacgttcgtggaggaacaactgccaagtcgcaaaatcgacgccatggacaacttccagaagtgcttcgccattctcaagctgtaccagccgggcgtggataactcgtcgtataacacgagtaagaagagtgacatggccgaggttaaggattggaaagcgatccgtgtggatctggtgatcacgccattcgagcagtacgcctatgcgctgctcggttggacgggcagccgcgaatttggtcgcgatctgcgccgctatgcgagtcatgagcgcaagatgatcctcgacaaccatggcctctacgaccgcaaaaagcgcatctttctgaaagcgggcagcgaagaagagattttcgcgcatctgggtctggattatgtggagccgtgggaacgcaacgcg

SEQ ID NO: 650 - protein, 394 aa, synthetic construct
  REGION 1..394: note = Variant of terminal deoxynucleotidyl transferase
MHHHHHHGGSGHPPSNTPELGVPSVIARKVSQYSCQRKTTLNNYNKKFTDAFEIMAENYEFKENEIFRLEFLRAASLLKYLPFPVTRMKDIQGLPCIGDQVRDVIEEIIEEGESSRVKEVLNDERYKAFKQFTSVFGVGVKTSEKWFRMGLRTVEELKASKSLKLSKMQKAGFLYYEDLVSCVSKAEADAVTLIVKNTVSTFLPDALVTITGGFRRGKKMGHDIDFLITNPGPKEDDGLLHKVVDLLKKQGLLLYCDIIESTFVEEQLPSRKIDAMDNFQKCFAILKLYQPGVDNSSYNTSKKSDMAEVKDWKAIRVDLVITPFEQYAYALLGWTGSREFGRDLRRYASHERKMILDNHGLYDRKKRIFLKAGSEEEIFAHLGLDYVEPWERNA

SEQ ID NO: 651 - DNA, 1182 bp, synthetic construct
  misc_feature 1..1182: note = Variant of terminal deoxynucleotidyl transferase
  source 1..1182: mol_type = other DNA
atgcaccatcatcatcatcatggcggtagcggccatccgccgagcaataccccggagctgggggtgccgagcgttatcgcccgcaaggttagtcagtacagctgccagcgcaagaccacgctgaataactacaacaaaaagtttaccgacgcgttcgagatcatggccgagaactacgaatttaaagagaacgaaatcttctgtctggaatttctgcgcgccgcgagtctgctgaaatatctgccgttcccggttacccgcatgaaagacatccaaggtctgccgtgcattggcgaccaagttcgtagtgtgatcgaggagatcatcgaagaaggcgagagcagccgtgttaaagaagttctcaatgacgagcgctacaaggcctttaagcagttcaccagcgtgttcggtgtgggcgtgaaaaccagcgaaaagtggtttcgtatgggcctccgtacggttgaagagctgaaggccgacaagagtctgaagctgagcaagatgcagaaggcgggctttctgtattacgaggatctggtcagctgcgttagtaaagcggaagccgatgccgttacgctcatcgtgaagaacacggtgagtacctttctgccggatgcgctggtgaccatcacgggcggtttccgccgtggcaaaaagatgggccacgacatcgactttctgatcacgaatccgggcggcaaagaggatgacgaactgctccacaaagtggttgatctgctcaagaagcaaggtctgctgctgtactgcgacatcatcgagagcacgttcgtggaggaacaactgccaagtcgcaaaatcgacgccatggacaacttccagaagtgcttcgccattctcaagctgtaccagccgggcgtggataactcgtcgtataacacgagtaagaagagtgacatggccgaggttaaggattggaaagcgatccgtgtggatctggtgatcacgccattcgagcagtacgcctatgcgctgctcggttggacgggcagccgcgaatttggtcgcgatctgcgccgctatgcgagtcatgagcgcaagatgatcctcgacaaccatggcctctacgaccgcaaaaagcgcatctttctgaaagcgggcagcgaagaagagattttcgcgcatctgggtctggattatgtggagccgtgggaacgcaacgcg

SEQ ID NO: 652 - protein, 394 aa, synthetic construct
  REGION 1..394: note = Variant of terminal deoxynucleotidyl transferase
MHHHHHHGGSGHPPSNTPELGVPSVIARKVSQYSCQRKTTLNNYNKKFTDAFEIMAENYEFKENEIFCLEFLRAASLLKYLPFPVTRMKDIQGLPCIGDQVRSVIEEIIEEGESSRVKEVLNDERYKAFKQFTSVFGVGVKTSEKWFRMGLRTVEELKADKSLKLSKMQKAGFLYYEDLVSCVSKAEADAVTLIVKNTVSTFLPDALVTITGGFRRGKKMGHDIDFLITNPGGKEDDELLHKVVDLLKKQGLLLYCDIIESTFVEEQLPSRKIDAMDNFQKCFAILKLYQPGVDNSSYNTSKKSDMAEVKDWKAIRVDLVITPFEQYAYALLGWTGSREFGRDLRRYASHERKMILDNHGLYDRKKRIFLKAGSEEEIFAHLGLDYVEPWERNA

SEQ ID NO: 653 - DNA, 1182 bp, synthetic construct
  misc_feature 1..1182: note = Variant of terminal deoxynucleotidyl transferase
  source 1..1182: mol_type = other DNA
atgcaccatcatcatcatcatggcggtagcggccatccgccgagcaataccccggagctggaggtgccgagcgttatcgcccgcaaggttagtcagtacagctgccagcgcaagaccacgctgaataactacaacaaaaagtttaccgacgcgttcgagatcatggccgagaactacgaatttaaagagaacgaaatcttccgtctggaatttctgcgcgccgcgagtctgctgaaatatctgccgttcccggttacccgcatgaaagacatccaaggtctgccgtgcattggcgaccaagttcgtgatgtgatcgaggagatcatcgaacgtggcgagagcagccgtgttaaagaagttctcaatgacgagcgctacaaggcctttaagcagttcaccagcgtgttcggtgtgggcgtgaaaaccagcgaaaagtggtttcgtatgggcctccgtacggttgaagagctgaaggccgacaagagtctgaagctgagcaagatgcagaaggcgggctttctgtattacgaggatctggtgagctgcgttagtaaagcggaagccgatgccgttacgctcatcgtgaagaacacggtgagtacctttctgccggatgcgctggtgaccatcacgggcggtttccgccgtggcaaaaagatgggccacgacatcgactttctgatcacgaatccgggcggcaaagagaatgacgaactgctccacaaagtggttgatctgctcaagaagcaaggtctgctgctgtactgcgacatcatcgagagcacgttcgtggaggaacaactgccaagtcgcaaaatcgacgccatggacaacttccagaagtgcttcgccattctcaagctgtaccagccgggcgtggataactcggcgtataacacgagtaagaagagtgacatggccgaggttaaggattggaaagcgatccgtgtggatctggtgatcacgccattcgagcagtacgcctatgcgctgctcggttggacgggcagccgcgaatttggtcgcgatctgcgccgctatgcgagtcatgagcgcaagatgatcctcgacaaccatggcctctacgaccgcaaaaagcgcatctttctgaaagcgggcagcgaagaagagattttcgcgcatctgggtctggattatgtggagccgtgggaacgcaacgcg

SEQ ID NO: 654 - protein, 394 aa, synthetic construct
  REGION 1..394: note = Variant of terminal deoxynucleotidyl transferase
MHHHHHHGGSGHPPSNTPELEVPSVIARKVSQYSCQRKTTLNNYNKKFTDAFEIMAENYEFKENEIFRLEFLRAASLLKYLPFPVTRMKDIQGLPCIGDQVRDVIEEIIERGESSRVKEVLNDERYKAFKQFTSVFGVGVKTSEKWFRMGLRTVEELKADKSLKLSKMQKAGFLYYEDLVSCVSKAEADAVTLIVKNTVSTFLPDALVTITGGFRRGKKMGHDIDFLITNPGGKENDELLHKVVDLLKKQGLLLYCDIIESTFVEEQLPSRKIDAMDNFQKCFAILKLYQPGVDNSAYNTSKKSDMAEVKDWKAIRVDLVITPFEQYAYALLGWTGSREFGRDLRRYASHERKMILDNHGLYDRKKRIFLKAGSEEEIFAHLGLDYVEPWERNA

SEQ ID NO: 655 - DNA, 1182 bp, synthetic construct
  misc_feature 1..1182: note = Variant of terminal deoxynucleotidyl transferase
  source 1..1182: mol_type = other DNA
atgcaccatcatcatcatcatggcggtagcggccatccgccgagcaataccccggagagtgaggtgccgagcgttatcgcccgcaaggttagtcagtacagctgccagcgcaagaccacgctgaataactacaacaaaaagtttaccgacgcgttcgagatcatggccgagaactacgaatttaaagagaacgaaatcttctgtctggaatttctgcgcgccgcgagtctgctgaaatatctgccgttcccggttacccgcatgaaagacatccaaggtctgccgtgcattggcgaccaagttcgtagtgtgatcgaggagatcatcgaagaaggcgagagcagccgtgttaaagaagttctcaatgacgagcgctacaaggcctttaagcagttcaccagcgtgttcggtgtgggcgtgaaaaccagcgaaaagtggtttcgtatgggcctccgtacggttgaagagctgaaggccgacaagagtctgaagctgagcaagatgcagaaggcgggctttctgtattacgaggatctggtgagctgcgttagtaaagcggaagccgatgccgttacgctcatcgtgaagaacacggtgtcgacctttctgccggatgcgctggtgaccatcacgggcggtttccgccgtggcaaaaagatgggccacgacatcgactttctgatcacgaatccgggcggcaaagaggatgacgaactgctccacaaagtggttgatctgctcaagaagcaaggtctgctgctgtactgcgacatcatcgagagcacgttcgtggaggaacaactgccaagtcgcaaaatcgacgccatggacaacttccagaagtgcttcgccattctcaagctgtaccagccgggcgtggataacagcagctataacacgagtaagaagagtgacatggccgaggttaaggattggaaagcgatccgtgtggatctggtgatcacgccattcgagcagtacgcctatgcgctgctcggttggacgggcagccgcgaatttggtcgcgatctgcgccgctatgcgagtcatgagcgcaagatgatcctcgacaaccatggcctctacgaccgcaaaaagcgcatctttctgaaagcgggcagcgaagaagagattttcgcgcatctgggtctggattatgtggagccgtgggaacgcaacgcg

SEQ ID NO: 656 - protein, 394 aa, synthetic construct
  REGION 1..394: note = Variant of terminal deoxynucleotidyl transferase
MHHHHHHGGSGHPPSNTPESEVPSVIARKVSQYSCQRKTTLNNYNKKFTDAFEIMAENYEFKENEIFCLEFLRAASLLKYLPFPVTRMKDIQGLPCIGDQVRSVIEEIIEEGESSRVKEVLNDERYKAFKQFTSVFGVGVKTSEKWFRMGLRTVEELKADKSLKLSKMQKAGFLYYEDLVSCVSKAEADAVTLIVKNTVSTFLPDALVTITGGFRRGKKMGHDIDFLITNPGGKEDDELLHKVVDLLKKQGLLLYCDIIESTFVEEQLPSRKIDAMDNFQKCFAILKLYQPGVDNSSYNTSKKSDMAEVKDWKAIRVDLVITPFEQYAYALLGWTGSREFGRDLRRYASHERKMILDNHGLYDRKKRIFLKAGSEEEIFAHLGLDYVEPWERNA

SEQ ID NO: 657 - DNA, 1182 bp, synthetic construct
  misc_feature 1..1182: note = Variant of terminal deoxynucleotidyl transferase
  source 1..1182: mol_type = other DNA
atgcaccatcatcatcatcatggcggtagcggccatccgccgagcaataccccggagctgggggtgccgagcgttatcgcccgcaaggttagtcagtacagctgccagcgcaagaccacgctgaataactacaacaaaaagtttaccgacgcgttcgagatcatggccgagaactacgaatttaaagagaacgaaatcttctgtctggaatttctgcgcgccgcgagtctgctgaaatatctgccgttcccggttacccgcatgaaagacatccaaggtctgccgtgcattggcgaccaagttcgtgacgtgatcgaggagatcatcgaagaaggcgagagcagccgtgttaaagaagttctcaatgacgagcgctacaaggcctttaagcagttcaccagcgtgttcggtgtgggcgtgaaaaccagcgaaaagtggtttcgtatgggcctccgtacggttgaagagctgaaggccgacaagagtctgaagctgagcaagatgcagaaggcgggctttctgtattacgaggatctggtgagctgcgttagtaaagcggaagccgatgccgttacgctcatcgtgaagaacacggtgagtacctttctgccggatgcgctggtgaccatcacgggcggtttccgccgtggcaaaaagatgggccacgacatcgactttctgatcacgaatccgggcggcaaagaggatgacgaactgctccacaaagtggttgatctgctcaagaagcaaggtctgctgctgtactgcgacatcatcgagagcacgttcgtggaggaacaactgccaagtcgcaaaatcgacgccatggacaacttccagaagtgcttcgccattctcaagctgtaccagccgggcgtggataactcggcgtataacacgagtaagaagagtgacatggccgaggttaaggattggaaagcgatccgtgtggatctggtgatcacgccattcgagcagtacgcctatgcgctgctcggttggacgggcagccgcgaatttggtcgcgatctgcgccgctatgcgagtcatgagcgcaagatgatcctcgacaaccatggcctctacgaccgcaaaaagcgcatctttctgaaagcgggcagcgaagaagagattttcgcgcatctgggtctggattatgtggagccgtgggaacgcaacgcg

SEQ ID NO: 658 - protein, 394 aa, synthetic construct
  REGION 1..394: note = Variant of terminal deoxynucleotidyl transferase
MHHHHHHGGSGHPPSNTPELGVPSVIARKVSQYSCQRKTTLNNYNKKFTDAFEIMAENYEFKENEIFCLEFLRAASLLKYLPFPVTRMKDIQGLPCIGDQVRDVIEEIIEEGESSRVKEVLNDERYKAFKQFTSVFGVGVKTSEKWFRMGLRTVEELKADKSLKLSKMQKAGFLYYEDLVSCVSKAEADAVTLIVKNTVSTFLPDALVTITGGFRRGKKMGHDIDFLITNPGGKEDDELLHKVVDLLKKQGLLLYCDIIESTFVEEQLPSRKIDAMDNFQKCFAILKLYQPGVDNSAYNTSKKSDMAEVKDWKAIRVDLVITPFEQYAYALLGWTGSREFGRDLRRYASHERKMILDNHGLYDRKKRIFLKAGSEEEIFAHLGLDYVEPWERNA

SEQ ID NO: 659 - DNA, 1182 bp, synthetic construct
  misc_feature 1..1182: note = Variant of terminal deoxynucleotidyl transferase
  source 1..1182: mol_type = other DNA
atgcaccatcatcatcatcatggcggtagcggccatccgccgagcaataccccggagagtggggtgccgagcgttatcgcccgcaaggttagtcagtacagctgccagcgcaagaccacgctgaataactacaacaaaaagtttaccgacgcgttcgagatcatggccgagaactacgaatttaaagagaacgaaatcttctgtctggaatttctgcgcgccgcgagtctgctgaaatatctgccgttcccggttacccgcatgaaagacatccaaggtctgccgtgcattggcgaccaagttcgtgacgtgatcgaggagatcatcgaacgtggcgagagcagccgtgttaaagaagttctcaatgacgagcgctacaaggcctttaagcagttcaccagcgtgttcggtgtgggcgtgaaaaccagcgaaaagtggtttcgtatgggcctccgtacggttgaagagctgaaggccgacaagagtctgaagctgagcaagatgcagaaggcgggctttctgtattacgaggatctggtcagctgcgttagtaaagcggaagccgatgccgttacgctcatcgtgaagaacacggtgcgtacctttctgccggatgcgctggtgaccatcacgggcggtttccgccgtggcaaaaagatgggccacgacatcgactttctgatcacgaatccgggcccgaaagaggatgacgggctgctccacaaagtggttgatctgctcaagaagcaaggtctgctgctgtactgcgacatcatcgagagcacgttcgtggaggaacaactgccaagtcgcaaaatcgacgccatggacaacttccagaagtgcttcgccattctcaagctgtaccagccgggcgtggataacagcagctataacacgagtaagaagagtgacatggccgaggttaaggattggaaagcgatccgtgtggatctggtgatcacgccattcgagcagtacgcctatgcgctgctcggttggacgggcagccgcgaatttggtcgcgatctgcgccgctatgcgagtcatgagcgcaagatgatcctcgacaaccatggcctctacgaccgcaaaaagcgcatctttctgaaagcgggcagcgaagaagagattttcgcgcatctgggtctggattatgtggagccgtgggaacgcaacgcg

SEQ ID NO: 660 - protein, 394 aa, synthetic construct
  REGION 1..394: note = Variant of terminal deoxynucleotidyl transferase
MHHHHHHGGSGHPPSNTPESGVPSVIARKVSQYSCQRKTTLNNYNKKFTDAFEIMAENYEFKENEIFCLEFLRAASLLKYLPFPVTRMKDIQGLPCIGDQVRDVIEEIIERGESSRVKEVLNDERYKAFKQFTSVFGVGVKTSEKWFRMGLRTVEELKADKSLKLSKMQKAGFLYYEDLVSCVSKAEADAVTLIVKNTVRTFLPDALVTITGGFRRGKKMGHDIDFLITNPGPKEDDGLLHKVVDLLKKQGLLLYCDIIESTFVEEQLPSRKIDAMDNFQKCFAILKLYQPGVDNSSYNTSKKSDMAEVKDWKAIRVDLVITPFEQYAYALLGWTGSREFGRDLRRYASHERKMILDNHGLYDRKKRIFLKAGSEEEIFAHLGLDYVEPWERNA

SEQ ID NO: 661 - DNA, 1182 bp, synthetic construct
  misc_feature 1..1182: note = Variant of terminal deoxynucleotidyl transferase
  source 1..1182: mol_type = other DNA
atgcaccatcatcatcatcatggcggtagcggccatccgccgagcaataccccggagagtggggtgccgagcgttatcgcccgcaaggttagtcagtacagctgccagcgcaagaccacgctgaataactacaacaaaaagtttaccgacgcgttcgagatcatggccgagaactacgaatttaaagagaacgaaatcttctgtctggaatttctgcgcgccgcgagtctgctgaaatatctgccgttcccggttacccgcatgaaagacatccaaggtctgccgtgcattggcgaccaagttcgtgacgtgatcgaggagatcatcgaacgtggcgagagcagccgtgttaaagaagttctcaatgacgagcgctacaaggcctttaagcagttcaccagcgtgttcggtgtgggcgtgaaaaccagcgaaaagtggtttcgtatgggcctccgtacggttgaagagctgaaggccgacaagagtctgaagctgagcaagatgcagaaggcgggctttctgtattacgaggatctggtgagctgcgttagtaaagcggaagccgatgccgttacgctcatcgtgaagaacacggtgagtacctttctgccggatgcgctggtgaccatcacgggcggtttccgccgtggcaaaaagatgggccacgacatcgactttctgatcacgaatccgggcccgaaagaggatgacgaactgctccacaaagtggttgatctgctcaagaagcaaggtctgctgctgtactgcgacatcatcgagagcacgttcgtggaggaacaactgccaagtcgcaaaatcgacgccatggacaacttccagaagtgcttcgccattctcaagctgtaccagccgggcgtggataacagcagctataacacgagtaagaagagtgacatggccgaggttaaggattggaaagcgatccgtgtggatctggtgatcacgccattcgagcagtacgcctatgcgctgctcggttggacgggcagccgcgaatttggtcgcgatctgcgccgctatgcgagtcatgagcgcaagatgatcctcgacaaccatggcctctacgaccgcaaaaagcgcatctttctgaaagcgggcagcgaagaagagattttcgcgcatctgggtctggattatgtggagccgtgggaacgcaacgcg

SEQ ID NO: 662 - protein, 394 aa, synthetic construct
  REGION 1..394: note = Variant of terminal deoxynucleotidyl transferase
MHHHHHHGGSGHPPSNTPESGVPSVIARKVSQYSCQRKTTLNNYNKKFTDAFEIMAENYEFKENEIFCLEFLRAASLLKYLPFPVTRMKDIQGLPCIGDQVRDVIEEIIERGESSRVKEVLNDERYKAFKQFTSVFGVGVKTSEKWFRMGLRTVEELKADKSLKLSKMQKAGFLYYEDLVSCVSKAEADAVTLIVKNTVSTFLPDALVTITGGFRRGKKMGHDIDFLITNPGPKEDDELLHKVVDLLKKQGLLLYCDIIESTFVEEQLPSRKIDAMDNFQKCFAILKLYQPGVDNSSYNTSKKSDMAEVKDWKAIRVDLVITPFEQYAYALLGWTGSREFGRDLRRYASHERKMILDNHGLYDRKKRIFLKAGSEEEIFAHLGLDYVEPWERNA

SEQ ID NO: 663 - DNA, 1182 bp, synthetic construct
  misc_feature 1..1182: note = Variant of terminal deoxynucleotidyl transferase
  source 1..1182: mol_type = other DNA
atgcaccatcatcatcatcatggcggtagcggccatccgccgagcaataccccggagagtggggtgccgagcgttatcgcccgcaaggttagtcagtacagctgccagcgcaagaccacgctgaataactacaacaaaaagtttaccgacgcgttcgagatcatggccgagaactacgaatttaaagagaacgaaatcttccgtctggaatttctgcgcgccgcgagtctgctgaaatatctgccgttcccggttacccgcatgaaagacatccaaggtctgccgtgcattggcgaccaagttcgtgacgtgatcgaggagatcatcgaagagggcgagagcagccgtgttaaagaagttctcaatgacgagcgctacaaggcctttaagcagttcaccagcgtgttcggtgtgggcgtgaaaaccagcgaaaagtggtttcgtatgggcctccgtacggttgaagagctgaaggccagtaagagtctgaagctgagcaagatgcagaaggcgggctttctgtattacgaggatctggtgagctgcgttagtaaagcggaagccgatgccgttacgctcatcgtgaagaacacggtgagtacctttctgccggatgcgctggtgaccatcacgggcggtttccgccgtggcaaaaagatgggccacgacatcgactttctgatcacgaatccgggcccgaaagaggatgacgaactgctccacaaagtggttgatgggctcaagaagcaaggtctgctgctgtactgcgacatcatcgagagcacgttcgtggaggaacaactgccaagtcgcaaaatcgacgccatggacaacttccagaagtgcttcgccattctcaagctgtaccagccgggcgtggataacagcagctataacacgagtaagaagagtgacatggccgaggttaaggattggaaagcgatccgtgtggatctggtgatcacgccattcgagcagtacgcctatgcgctgctcggttggacgggcagccgcgaatttggtcgcgatctgcgccgctatgcgagtcatgagcgcaagatgatcctcgacaaccatggcctctacgaccgcaaaaagcgcatctttctgaaagcgggcagcgaagaagagattttcgcgcatctgggtctggattatgtggagccgtgggaacgcaacgcg

SEQ ID NO: 664 - protein, 394 aa, synthetic construct
  REGION 1..394: note = Variant of terminal deoxynucleotidyl transferase
MHHHHHHGGSGHPPSNTPESGVPSVIARKVSQYSCQRKTTLNNYNKKFTDAFEIMAENYEFKENEIFRLEFLRAASLLKYLPFPVTRMKDIQGLPCIGDQVRDVIEEIIEEGESSRVKEVLNDERYKAFKQFTSVFGVGVKTSEKWFRMGLRTVEELKASKSLKLSKMQKAGFLYYEDLVSCVSKAEADAVTLIVKNTVSTFLPDALVTITGGFRRGKKMGHDIDFLITNPGPKEDDELLHKVVDGLKKQGLLLYCDIIESTFVEEQLPSRKIDAMDNFQKCFAILKLYQPGVDNSSYNTSKKSDMAEVKDWKAIRVDLVITPFEQYAYALLGWTGSREFGRDLRRYASHERKMILDNHGLYDRKKRIFLKAGSEEEIFAHLGLDYVEPWERNA

SEQ ID NO: 665 - DNA, 1182 bp, synthetic construct
  misc_feature 1..1182: note = Variant of terminal deoxynucleotidyl transferase
  source 1..1182: mol_type = other DNA
atgcaccatcatcatcatcatggcggtagcggccatccgccgagcaataccccggagctgggggtgccgagcgttatcgcccgcaaggttagtcagtacagctgccagcgcaagaccacgctgaataactacaacaaaaagtttaccgacgcgttcgagatcatggccgagaactacgaatttaaagagaacgaaatcttccgtctggaatttctgcgcgccgcgagtctgctgaaatatctgccgttcccggttacccgcatgaaagacatccaaggtctgccgtgcattggcgaccaagttcgtagtgtgatcgaggagatcatcgaacgtggcgagagcagccgtgttaaagaagttctcaatgacgagcgctacaaggcctttaagcagttcaccagcgtgttcggtgtgggcgtgaaaaccagcgaaaagtggtttcgtatgggcctccgtacggttgaagagctgaaggccgacaagagtctgaagctgagcaagatgcagaaggcgggctttctgtattacgaggatctggtgagctgcgttagtaaagcggaagccgatgccgttacgctcatcgtgaagaacacggtgtcgacctttctgccggatgcgctggtgaccatcacgggcggtttccgccgtggcaaaaagatgggccacgacatcgactttctgatcacgaatccgggcccaaaagaggatgacgaactgctccacaaagtggttgatctgctcaagaagcaaggtctgctgctgtactgcgacatcatcgagagcacgttcgtggaggaacaactgccaagtcgcaaaatcgacgccatggacaacttccagaagtgcttcgccattctcaagctgtaccagccgggcgtggataactcgtcgtataacacgagtaagaagagtgacatggccgaggttaaggattggaaagcgatccgtgtggatctggtgatcacgccattcgagcagtacgcctatgcgctgctcggttggacgggcagccgcgaatttggtcgcgatctgcgccgctatgcgagtcatgagcgcaagatgatcctcgacaaccatggcctctacgaccgcaaaaagcgcatctttctgaaagcgggcagcgaagaagagattttcgcgcatctgggtctggattatgtggagccgtgggaacgcaacgcg

SEQ ID NO: 666 - protein, 394 aa, synthetic construct
  REGION 1..394: note = Variant of terminal deoxynucleotidyl transferase
MHHHHHHGGSGHPPSNTPELGVPSVIARKVSQYSCQRKTTLNNYNKKFTDAFEIMAENYEFKENEIFRLEFLRAASLLKYLPFPVTRMKDIQGLPCIGDQVRSVIEEIIERGESSRVKEVLNDERYKAFKQFTSVFGVGVKTSEKWFRMGLRTVEELKADKSLKLSKMQKAGFLYYEDLVSCVSKAEADAVTLIVKNTVSTFLPDALVTITGGFRRGKKMGHDIDFLITNPGPKEDDELLHKVVDLLKKQGLLLYCDIIESTFVEEQLPSRKIDAMDNFQKCFAILKLYQPGVDNSSYNTSKKSDMAEVKDWKAIRVDLVITPFEQYAYALLGWTGSREFGRDLRRYASHERKMILDNHGLYDRKKRIFLKAGSEEEIFAHLGLDYVEPWERNA

SEQ ID NO: 667 - DNA, 1182 bp, synthetic construct
  misc_feature 1..1182: note = Variant of terminal deoxynucleotidyl transferase
  source 1..1182: mol_type = other DNA
atgcaccatcatcatcatcatggcggtagcggccatccgccgagcaataccccggagggtggggtgccgagcgttatcgcccgcaaggttagtcagtacagctgccagcgcaagaccacgctgaataactacaacaaaaagtttaccgacgcgttcgagatcatggccgagaactacgaatttaaagagaacgaaatcttctgtctggaatttctgcgcgccgcgagtctgctgaaatatctgccgttcccggttacccgcatgaaagacatccaaggtctgccgtgcattggcgaccaagttcgtgatgtgatcgaggagatcatcgaagaaggcgagagcagccgtgttaaagaagttctcaatgacgagcgctacaaggcctttaagcagttcaccagcgtgttcggtgtgggcgtgaaaaccagcgaaaagtggtttcgtatgggcctccgtacggttgaagagctgaaggccgacaagagtctgaagctgagcaagatgcagaaggcgggctttctgtattacgaggatctggtgagctgcgttagtaaagcggaagccgatgccgttacgctcatcgtgaagaacacggtgagtacctttctgccggatgcgctggtgaccatcacgggcggtttccgccgtggcaaaaagatgggccacgacatcgactttctgatcacgaatccgggcggcaaagaggatgacgaactgctccacaaagtggttgatctgctcaagaagcaaggtctgctgctgtactgcgacatcatcgagagcacgttcgtggaggaacaactgccaagtcgcaaaatcgacgccatggacaacttccagaagtgcttcgccattctcaagctgtaccagccgggcgtggataacagcagctataacacgagtaagaagagtgacatggccgaggttaaggattggaaagcgatccgtgtggatctggtgatcacgccattcgagcagtacgcctatgcgctgctcggttggacgggcagccgcgaatttggtcgcgatctgcgccgctatgcgagtcatgagcgcaagatgatcctcgacaaccatggcctctacgaccgcaaaaagcgcatctttctgaaagcgggcagcgaagaagagattttcgcgcatctgggtctggattatgtggagccgtgggaacgcaacgcg

SEQ ID NO: 668 - protein, 394 aa, synthetic construct
  REGION 1..394: note = Variant of terminal deoxynucleotidyl transferase
MHHHHHHGGSGHPPSNTPEGGVPSVIARKVSQYSCQRKTTLNNYNKKFTDAFEIMAENYEFKENEIFCLEFLRAASLLKYLPFPVTRMKDIQGLPCIGDQVRDVIEEIIEEGESSRVKEVLNDERYKAFKQFTSVFGVGVKTSEKWFRMGLRTVEELKADKSLKLSKMQKAGFLYYEDLVSCVSKAEADAVTLIVKNTVSTFLPDALVTITGGFRRGKKMGHDIDFLITNPGGKEDDELLHKVVDLLKKQGLLLYCDIIESTFVEEQLPSRKIDAMDNFQKCFAILKLYQPGVDNSSYNTSKKSDMAEVKDWKAIRVDLVITPFEQYAYALLGWTGSREFGRDLRRYASHERKMILDNHGLYDRKKRIFLKAGSEEEIFAHLGLDYVEPWERNA

SEQ ID NO: 669 - DNA, 1182 bp, synthetic construct
  misc_feature 1..1182: note = Variant of terminal deoxynucleotidyl transferase
  source 1..1182: mol_type = other DNA
atgcaccatcatcatcatcatggcggtagcggccatccgccgagcaataccccggagctggaagtgccgagcgttatcgcccgcaaggttagtcagtacagctgccagcgcaagaccacgctgaataactacaacaaaaagtttaccgacgcgttcgagatcatggccgagaactacgaatttaaagagaacgaaatcttctgtctggaatttctgcgcgccgcgagtctgctgaaatatctgccgttcccggttacccgcatgaaagacatccaaggtctgccgtgcattggcgaccaagttcgtagtgtgatcgaggagatcatcgaagaaggcgagagcagccgtgttaaagaagttctcaatgacgagcgctacaaggcctttaagcagttcaccagcgtgttcggtgtgggcgtgaaaaccagcgaaaagtggtttcgtatgggcctccgtacggttgaagagctgaaggccagtaagagtctgaagctgagcaagatgcagaaggcgggctttctgtattacgaggatctggtcagctgcgttagtaaagcggaagccgatgccgttacgctcatcgtgaagaacacggtgagtacctttctgccggatgcgctggtgaccatcacgggcggtttccgccgtggcaaaaagatgggccacgacatcgactttctgatcacgaatccgggcccaaaagaggatgacgaactgctccacaaagtggttgatctgctcaagaagcaaggtctgctgctgtactgcgacatcatcgagagcacgttcgtggaggaacaactgccaagtcgcaaaatcgacgccatggacaacttccagaagtgcttcgccattctcaagctgtaccagccgggcgtggataactcggcgtataacacgagtaagaagagtgacatggccgaggttaaggattggaaagcgatccgtgtggatctggtgatcacgccattcgagcagtacgcctatgcgctgctcggttggacgggcagccgcgaatttggtcgcgatctgcgccgctatgcgagtcatgagcgcaagatgatcctcgacaaccatggcctctacgaccgcaaaaagcgcatctttctgaaagcgggcagcgaagaagagattttcgcgcatctgggtctggattatgtggagccgtgggaacgcaacgcg

SEQ ID NO: 670 - protein, 394 aa, synthetic construct
  REGION 1..394: note = Variant of terminal deoxynucleotidyl transferase
MHHHHHHGGSGHPPSNTPELEVPSVIARKVSQYSCQRKTTLNNYNKKFTDAFEIMAENYEFKENEIFCLEFLRAASLLKYLPFPVTRMKDIQGLPCIGDQVRSVIEEIIEEGESSRVKEVLNDERYKAFKQFTSVFGVGVKTSEKWFRMGLRTVEELKASKSLKLSKMQKAGFLYYEDLVSCVSKAEADAVTLIVKNTVSTFLPDALVTITGGFRRGKKMGHDIDFLITNPGPKEDDELLHKVVDLLKKQGLLLYCDIIESTFVEEQLPSRKIDAMDNFQKCFAILKLYQPGVDNSAYNTSKKSDMAEVKDWKAIRVDLVITPFEQYAYALLGWTGSREFGRDLRRYASHERKMILDNHGLYDRKKRIFLKAGSEEEIFAHLGLDYVEPWERNA

SEQ ID NO: 671 - DNA, 1182 bp, synthetic construct
  misc_feature 1..1182: note = Variant of terminal deoxynucleotidyl transferase
  source 1..1182: mol_type = other DNA
atgcaccatcatcatcatcatggcggtagcggccatccgccgagcaataccccggagctgggggtgccgagcgttatcgcccgcaaggttagtcagtacagctgccagcgcaagaccacgctgaataactacaacaaaaagtttaccgacgcgttcgagatcatggccgagaactacgaatttaaagagaacgaaatcttccgtctggaatttctgcgcgccgcgagtctgctgaaatatctgccgttcccggttacccgcatgaaagacatccaaggtctgccgtgcattggcgaccaagttcgtgacgtgatcgaggagatcatcgaagagggcgagagcagccgtgttaaagaagttctcaatgacgagcgctacaaggcctttaagcagttcaccagcgtgttcggtgtgggcgtgaaaaccagcgaaaagtggtttcgtatgggcctccgtacggttgaagagctgaaggccgacaagagtctgaagctgagcaagatgcagaaggcgggctttctgtattacgaggatctggtgagctgcgttagtaaagcggaagccgatgccgttacgctcatcgtgaagaacacggtgagtacctttctgccggatgcgctggtgaccatcacgggcggtttccgccgtggcaaaaagatgggccacgacatcgactttctgatcacgaatccgggcccaaaaagtgatgacgaactgctccacaaagtggttgatctgctcaagaagcaaggtctgctgctgtactgcgacatcatcgagagcacgttcgtggaggaacaactgccaagtcgcaaaatcgacgccatggacaacttccagaagtgcttcgccattctcaagctgtaccagccgggcgtggataacagcagctataacacgagtaagaagagtgacatggccgaggttaaggattggaaagcgatccgtgtggatctggtgatcacgccattcgagcagtacgcctatgcgctgctcggttggacgggcagccgcgaatttggtcgcgatctgcgccgctatgcgagtcatgagcgcaagatgatcctcgacaaccatggcctctacgaccgcaaaaagcgcatctttctgaaagcgggcagcgaagaagagattttcgcgcatctgggtctggattatgtggagccgtgggaacgcaacgcg

SEQ ID NO: 672 - protein, 394 aa, synthetic construct
  REGION 1..394: note = Variant of terminal deoxynucleotidyl transferase
MHHHHHHGGSGHPPSNTPELGVPSVIARKVSQYSCQRKTTLNNYNKKFTDAFEIMAENYEFKENEIFRLEFLRAASLLKYLPFPVTRMKDIQGLPCIGDQVRDVIEEIIEEGESSRVKEVLNDERYKAFKQFTSVFGVGVKTSEKWFRMGLRTVEELKADKSLKLSKMQKAGFLYYEDLVSCVSKAEADAVTLIVKNTVSTFLPDALVTITGGFRRGKKMGHDIDFLITNPGPKSDDELLHKVVDLLKKQGLLLYCDIIESTFVEEQLPSRKIDAMDNFQKCFAILKLYQPGVDNSSYNTSKKSDMAEVKDWKAIRVDLVITPFEQYAYALLGWTGSREFGRDLRRYASHERKMILDNHGLYDRKKRIFLKAGSEEEIFAHLGLDYVEPWERNA

SEQ ID NO: 673 - DNA, 1182 bp, synthetic construct
  misc_feature 1..1182: note = Variant of terminal deoxynucleotidyl transferase
  source 1..1182: mol_type = other DNA
atgcaccatcatcatcatcatggcggtagcggccatccgccgagcaataccccggagctggaggtgccgagcgttatcgcccgcaaggttagtcagtacagctgccagcgcaagaccacgctgaataactacaacaaaaagtttaccgacgcgttcgagatcatggccgagaactacgaatttaaagagaacgaaatcttccgtctggaatttctgcgcgccgcgagtctgctgaaatatctgccgttcccggttacccgcatgaaagacatccaaggtctgccgtgcattggcgaccaagttcgtgacgtgatcgaggagatcatcgaagagggcgagagcagccgtgttaaagaagttctcaatgacgagcgctacaaggcctttaagcagttcaccagcgtgttcggtgtgggcgtgaaaaccagcgaaaagtggtttcgtatgggcctccgtacggttgaagagctgaaggccgacaagagtctgaagctgagcaagatgcagaaggcgggctttctgtattacgaggatctggtgagctgcgttagtaaagcggaagccgatgccgttacgctcatcgtgaagaacacggtggcgacctttctgccggatgcgctggtgaccatcacgggcggtttccgccgtggcaaaaagatgggccacgacatcgactttctgatcacgaatccgggcccaaaaagtgatgacgaactgctccacaaagtggttgatctgctcaagaagcaaggtctgctgctgtactgcgacatcatcgagagcacgttcgtggaggaacaactgccaagtcgcaaaatcgacgccatggacaacttccagaagtgcttcgccattctcaagctgtaccagccgggcgtggataactcggcgtataacacgagtaagaagagtgacatggccgaggttaaggattggaaagcgatccgtgtggatctggtgatcacgccattcgagcagtacgcctatgcgctgctcggttggacgggcagccgcgaatttggtcgcgatctgcgccgctatgcgagtcatgagcgcaagatgatcctcgacaaccatggcctctacgaccgcaaaaagcgcatctttctgaaagcgggcagcgaagaagagattttcgcgcatctgggtctggattatgtggagccgtgggaacgcaacgcg

SEQ ID NO: 674 - protein, 394 aa, synthetic construct
  REGION 1..394: note = Variant of terminal deoxynucleotidyl transferase
MHHHHHHGGSGHPPSNTPELEVPSVIARKVSQYSCQRKTTLNNYNKKFTDAFEIMAENYEFKENEIFRLEFLRAASLLKYLPFPVTRMKDIQGLPCIGDQVRDVIEEIIEEGESSRVKEVLNDERYKAFKQFTSVFGVGVKTSEKWFRMGLRTVEELKADKSLKLSKMQKAGFLYYEDLVSCVSKAEADAVTLIVKNTVATFLPDALVTITGGFRRGKKMGHDIDFLITNPGPKSDDELLHKVVDLLKKQGLLLYCDIIESTFVEEQLPSRKIDAMDNFQKCFAILKLYQPGVDNSAYNTSKKSDMAEVKDWKAIRVDLVITPFEQYAYALLGWTGSREFGRDLRRYASHERKMILDNHGLYDRKKRIFLKAGSEEEIFAHLGLDYVEPWERNA

SEQ ID NO: 675 - DNA, 1182 bp, synthetic construct
  misc_feature 1..1182: note = Variant of terminal deoxynucleotidyl transferase
  source 1..1182: mol_type = other DNA
atgcaccatcatcatcatcatggcggtagcggccatccgccgagcaataccccggagctggaggtgccgagcgttatcgcccgcaaggttagtcagtacagctgccagcgcaagaccacgctgaataactacaacaaaaagtttaccgacgcgttcgagatcatggccgagaactacgaatttaaagagaacgaaatcttctgtctggaatttctgcgcgccgcgagtctgctgaaatatctgccgttcccggttacccgcatgaaagacatccaaggtctgccgtgcattggcgaccaagttcgtgatgtgatcgaggagatcatcgaacgtggcgagagcagccgtgttaaagaagttctcaatgacgagcgctacaaggcctttaagcagttcaccagcgtgttcggtgtgggcgtgaaaaccagcgaaaagtggtttcgtatgggcctccgtacggttgaagagctgaaggccagtaagagtctgaagctgagcaagatgcagaaggcgggctttctgtattacgaggatctggtcagctgcgttagtaaagcggaagccgatgccgttacgctcatcgtgaagaacacggtgagtacctttctgccggatgcgctggtgaccatcacgggcggtttccgccgtggcaaaaagatgggccacgacatcgactttctgatcacgaatccgggcggcaaaagtgatgacgaactgctccacaaagtggttgatctgctcaagaagcaaggtctgctgctgtactgcgacatcatcgagagcacgttcgtggaggaacaactgccaagtcgcaaaatcgacgccatggacaacttccagaagtgcttcgccattctcaagctgtaccagccgggcgtggataactcggcgtataacacgagtaagaagagtgacatggccgaggttaaggattggaaagcgatccgtgtggatctggtgatcacgccattcgagcagtacgcctatgcgctgctcggttggacgggcagccgcgaatttggtcgcgatctgcgccgctatgcgagtcatgagcgcaagatgatcctcgacaaccatggcctctacgaccgcaaaaagcgcatctttctgaaagcgggcagcgaagaagagattttcgcgcatctgggtctggattatgtggagccgtgggaacgcaacgcg

SEQ ID NO: 676 - protein, 394 aa, synthetic construct
  REGION 1..394: note = Variant of terminal deoxynucleotidyl transferase
MHHHHHHGGSGHPPSNTPELEVPSVIARKVSQYSCQRKTTLNNYNKKFTDAFEIMAENYEFKENEIFCLEFLRAASLLKYLPFPVTRMKDIQGLPCIGDQVRDVIEEIIERGESSRVKEVLNDERYKAFKQFTSVFGVGVKTSEKWFRMGLRTVEELKASKSLKLSKMQKAGFLYYEDLVSCVSKAEADAVTLIVKNTVSTFLPDALVTITGGFRRGKKMGHDIDFLITNPGGKSDDELLHKVVDLLKKQGLLLYCDIIESTFVEEQLPSRKIDAMDNFQKCFAILKLYQPGVDNSAYNTSKKSDMAEVKDWKAIRVDLVITPFEQYAYALLGWTGSREFGRDLRRYASHERKMILDNHGLYDRKKRIFLKAGSEEEIFAHLGLDYVEPWERNA

SEQ ID NO: 677 - DNA, 1182 bp, synthetic construct
  misc_feature 1..1182: note = Variant of terminal deoxynucleotidyl transferase
  source 1..1182: mol_type = other DNA
atgcaccatcatcatcatcatggcggtagcggccatccgccgagcaataccccggagctggaggtgccgagcgttatcgcccgcaaggttagtcagtacagctgccagcgcaagaccacgctgaataactacaacaaaaagtttaccgacgcgttcgagatcatggccgagaactacgaatttaaagagaacgaaatcttctgtctggaatttctgcgcgccgcgagtctgctgaaatatctgccgttcccggttacccgcatgaaagacatccaaggtctgccgtgcattggcgaccaagttcgtagtgtgatcgaggagatcatcgaagagggcgagagcagccgtgttaaagaagttctcaatgacgagcgctacaaggcctttaagcagttcaccagcgtgttcggtgtgggcgtgaaaaccagcgaaaagtggtttcgtatgggcctccgtacggttgaagagctgaaggccgacaagagtctgaagctgagcaagatgcagaaggcgggctttctgtattacgaggatctggtcagctgcgttagtaaagcggaagccgatgccgttacgctcatcgtgaagaacacggtgtcgacctttctgccggatgcgctggtgaccatcacgggcggtttccgccgtggcaaaaagatgggccacgacatcgactttctgatcacgaatccgggcccgaaagaggatgacgagctgctccacaaagtggttgatctgctcaagaagcaaggtctgctgctgtactgcgacatcatcgagagcacgttcgtggaggaacaactgccaagtcgcaaaatcgacgccatggacaacttccagaagtgcttcgccattctcaagctgtaccagccgggcgtggataacagcagctataacacgagtaagaagagtgacatggccgaggttaaggattggaaagcgatccgtgtggatctggtgatcacgccattcgagcagtacgcctatgcgctgctcggttggacgggcagccgcgaatttggtcgcgatctgcgccgctatgcgagtcatgagcgcaagatgatcctcgacaaccatggcctctacgaccgcaaaaagcgcatctttctgaaagcgggcagcgaagaagagattttcgcgcatctgggtctggattatgtggagccgtgggaacgcaacgcg

SEQ ID NO: 678 - protein, 394 aa, synthetic construct; identical to SEQ ID NO: 26
  REGION 1..394: note = Variant of terminal deoxynucleotidyl transferase

SEQ ID NO: 679 - DNA, 1182 bp, synthetic construct
  misc_feature 1..1182: note = Variant of terminal deoxynucleotidyl transferase
  source 1..1182: mol_type = other DNA
atgcaccatcatcatcatcatggcggtagcggccatccgccgagcaataccccggagggtgaggtgccgagcgttatcgcccgcaaggttagtcagtacagctgccagcgcaagaccacgctgaataactacaacaaaaagtttaccgacgcgttcgagatcatggccgagaactacgaatttaaagagaacgaaatcttccgtctggaatttctgcgcgccgcgagtctgctgaaatatctgccgttcccggttacccgcatgaaagacatccaaggtctgccgtgcattggcgaccaagttcgtagtgtgatcgaggagatcatcgaagagggcgagagcagccgtgttaaagaagttctcaatgacgagcgctacaaggcctttaagcagttcaccagcgtgttcggtgtgggcgtgaaaaccagcgaaaagtggtttcgtatgggcctccgtacggttgaagagctgaaggccagtaagagtctgaagctgagcaagatgcagaaggcgggctttctgtattacgaggatctggtgagctgcgttagtaaagcggaagccgatgccgttacgctcatcgtgaagaacacggtgcgtacctttctgccggatgcgctggtgaccatcacgggcggtttccgccgtggcaaaaagatgggccacgacatcgactttctgatcacgaatccgggcccgaaagaggatgacgagctgctccacaaagtggttgatctgctcaagaagcaaggtctgctgctgtactgcgacatcatcgagagcacgttcgtggaggaacaactgccaagtcgcaaaatcgacgccatggacaacttccagaagtgcttcgccattctcaagctgtaccagccgggcgtggataactcgtcgtataacacgagtaagaagagtgacatggccgaggttaaggattggaaagcgatccgtgtggatctggtgatcacgccattcgagcagtacgcctatgcgctgctcggttggacgggcagccgcgaatttggtcgcgatctgcgccgctatgcgagtcatgagcgcaagatgatcctcgacaaccatggcctctacgaccgcaaaaagcgcatctttctgaaagcgggcagcgaagaagagattttcgcgcatctgggtctggattatgtggagccgtgggaacgcaacgcg

SEQ ID NO: 680 - protein, 394 aa, synthetic construct
  REGION 1..394: note = Variant of terminal deoxynucleotidyl transferase
MHHHHHHGGSGHPPSNTPEGEVPSVIARKVSQYSCQRKTTLNNYNKKFTDAFEIMAENYEFKENEIFRLEFLRAASLLKYLPFPVTRMKDIQGLPCIGDQVRSVIEEIIEEGESSRVKEVLNDERYKAFKQFTSVFGVGVKTSEKWFRMGLRTVEELKASKSLKLSKMQKAGFLYYEDLVSCVSKAEADAVTLIVKNTVRTFLPDALVTITGGFRRGKKMGHDIDFLITNPGPKEDDELLHKVVDLLKKQGLLLYCDIIESTFVEEQLPSRKIDAMDNFQKCFAILKLYQPGVDNSSYNTSKKSDMAEVKDWKAIRVDLVITPFEQYAYALLGWTGSREFGRDLRRYASHERKMILDNHGLYDRKKRIFLKAGSEEEIFAHLGLDYVEPWERNA

SEQ ID NO: 681 - DNA, 1182 bp, synthetic construct
  misc_feature 1..1182: note = Variant of terminal deoxynucleotidyl transferase
  source 1..1182: mol_type = other DNA
atgcaccatcatcatcatcatggcggtagcggccatccgccgagcaataccccggagctgggggtgccgagcgttatcgcccgcaaggttagtcagtacagctgccagcgcaagaccacgctgaataactacaacaaaaagtttaccgacgcgttcgagatcatggccgagaactacgaatttaaagagaacgaaatcttctgtctggaatttctgcgcgccgcgagtctgctgaaatatctgccgttcccggttacccgcatgaaagacatccaaggtctgccgtgcattggcgaccaagttcgtgacgtgatcgaggagatcatcgaagagggcgagagcagccgtgttaaagaagttctcaatgacgagcgctacaaggcctttaagcagttcaccagcgtgttcggtgtgggcgtgaaaaccagcgaaaagtggtttcgtatgggcctccgtacggttgaagagctgaaggccgacaagagtctgaagctgagcaagatgcagaaggcgggctttctgtattacgaggatctggtgagctgcgttagtaaagcggaagccgatgccgttacgctcatcgtgaagaacacggtgagtacctttctgccggatgcgctggtgaccatcacgggcggtttccgccgtggcaaaaagatgggccacgacatcgactttctgatcacgaatccgggcccgaaagaggatgacgaactgctccacaaagtggttgatctgctcaagaagcaaggtctgctgctgtactgcgacatcatcgagagcacgttcgtggaggaacaactgccaagtcgcaaaatcgacgccatggacaacttccagaagtgcttcgccattctcaagctgtaccagccgggcgtggataacagcagctataacacgagtaagaagagtgacatggccgaggttaaggattggaaagcgatccgtgtggatctggtgatcacgccattcgagcagtacgcctatgcgctgctcggttggacgggcagccgcgaatttggtcgcgatctgcgccgctatgcgagtcatgagcgcaagatgatcctcgacaaccatggcctctacgaccgcaaaaagcgcatctttctgaaagcgggcagcgaagaagagattttcgcgcatctgggtctggattatgtggagccgtgggaacgcaacgcg

SEQ ID NO: 682 - protein, 394 aa, synthetic construct; identical to SEQ ID NO: 28
  REGION 1..394: note = Variant of terminal deoxynucleotidyl transferase

SEQ ID NO: 683 - DNA, 1182 bp, synthetic construct
  misc_feature 1..1182: note = Variant of terminal deoxynucleotidyl transferase
  source 1..1182: mol_type = other DNA
atgcaccatcatcatcatcatggcggtagcggccatccgccgagcaataccccggagagtgaggtgccgagcgttatcgcccgcaaggttagtcagtacagctgccagcgcaagaccacgctgaataactacaacaaaaagtttaccgacgcgttcgagatcatggccgagaactacgaatttaaagagaacgaaatcttctgtctggaatttctgcgcgccgcgagtctgctgaaatatctgccgttcccggttacccgcatgaaagacatccaaggtctgccgtgcattggcgaccaagttcgtgacgtgatcgaggagatcatcgaacgtggcgagagcagccgtgttaaagaagttctcaatgacgagcgctacaaggcctttaagcagttcaccagcgtgttcggtgtgggcgtgaaaaccagcgaaaagtggtttcgtatgggcctccgtacggttgaagagctgaaggccgacaagagtctgaagctgagcaagatgcagaaggcgggctttctgtattacgaggatctggtgagctgcgttagtaaagcggaagccgatgccgttacgctcatcgtgaagaacacggtgagtacctttctgccggatgcgctggtgaccatcacgggcggtttccgccgtggcaaaaagatgggccacgacatcgactttctgatcacgaatccgggcccgaaagaggatgacgaactgctccacaaagtggttgatctgctcaagaagcaaggtctgctgctgtactgcgacatcatcgagagcacgttcgtggaggaacaactgccaagtcgcaaaatcgacgccatggacaacttccagaagtgcttcgccattctcaagctgtaccagccgggcgtggataacagcagctataacacgagtaagaagagtgacatggccgaggttaaggattggaaagcgatccgtgtggatctggtgatcacgccattcgagcagtacgcctatgcgctgctcggttggacgggcagccgcgaatttggtcgcgatctgcgccgctatgcgagtcatgagcgcaagatgatcctcgacaaccatggcctctacgaccgcaaaaagcgcatctttctgaaagcgggcagcgaagaagagattttcgcgcatctgggtctggattatgtggagccgtgggaacgcaacgcg

SEQ ID NO: 684 - protein, 394 aa, synthetic construct
  REGION 1..394: note = Variant of terminal deoxynucleotidyl transferase
MHHHHHHGGSGHPPSNTPESEVPSVIARKVSQYSCQRKTTLNNYNKKFTDAFEIMAENYEFKENEIFCLEFLRAASLLKYLPFPVTRMKDIQGLPCIGDQVRDVIEEIIERGESSRVKEVLNDERYKAFKQFTSVFGVGVKTSEKWFRMGLRTVEELKADKSLKLSKMQKAGFLYYEDLVSCVSKAEADAVTLIVKNTVSTFLPDALVTITGGFRRGKKMGHDIDFLITNPGPKEDDELLHKVVDLLKKQGLLLYCDIIESTFVEEQLPSRKIDAMDNFQKCFAILKLYQPGVDNSSYNTSKKSDMAEVKDWKAIRVDLVITPFEQYAYALLGWTGSREFGRDLRRYASHERKMILDNHGLYDRKKRIFLKAGSEEEIFAHLGLDYVEPWERNA

SEQ ID NO: 685 - DNA, 1182 bp, synthetic construct
  misc_feature 1..1182: note = Variant of terminal deoxynucleotidyl transferase
  source 1..1182: mol_type = other DNA
atgcaccatcatcatcatcatggcggtagcggccatccgccgagcaataccccggagctgggggtgccgagcgttatcgcccgcaaggttagtcagtacagctgccagcgcaagaccacgctgaataactacaacaaaaagtttaccgacgcgttcgagatcatggccgagaactacgaatttaaagagaacgaaatcttccgtctggaatttctgcgcgccgcgagtctgctgaaatatctgccgttcccggttacccgcatgaaagacatccaaggtctgccgtgcattggcgaccaagttcgtgacgtgatcgaggagatcatcgaagagggcgagagcagccgtgttaaagaagttctcaatgacgagcgctacaaggcctttaagcagttcaccagcgtgttcggtgtgggcgtgaaaaccagcgaaaagtggtttcgtatgggcctccgtacggttgaagagctgaaggccagtaagagtctgaagctgagcaagatgcagaaggcgggctttctgtattacgaggatctggccagctgcgttagtaaagcggaagccgatgccgttacgctcatcgtgaagaacacggtgcgtacctttctgccggctgcgctggtgaccatcacgggcggtttccgccgtggcaaaaagatgggccacgacatcgactttctgatcacgaatccgggcccgaaagaggatgacgaactgctccacaaagtggttgatctgctcaagaagcaaggtctgctgctgtactgcgacatcatcgagagcacgttcgtggaggaacaactgccaagtcgcaaaatcgacgccatggacaacttccagaagtgcttcgccattctcaagctgtaccagccgggcgtggataactcggcgtataacacgagtaagaagagtgacatggccgaggttaaggattggaaagcgatccgtgtggatctggtgatcacgccattcgagcagtacgcctatgcgctgctcggttggacgggcagccgcgaatttggtcgcgatctgcgccgctatgcgagtcatgagcgcaagatgatcctcgacaaccatggcctctacgaccgcaaaaagcgcatctttctgaaagcgggcagcgaagaagagattttcgcgcatctgggtctggattatgtggagccgtgggaacgcaacgcg

SEQ ID NO: 686 - protein, 394 aa, synthetic construct
  REGION 1..394: note = Variant of terminal deoxynucleotidyl transferase
MHHHHHHGGSGHPPSNTPELGVPSVIARKVSQYSCQRKTTLNNYNKKFTDAFEIMAENYEFKENEIFRLEFLRAASLLKYLPFPVTRMKDIQGLPCIGDQVRDVIEEIIEEGESSRVKEVLNDERYKAFKQFTSVFGVGVKTSEKWFRMGLRTVEELKASKSLKLSKMQKAGFLYYEDLASCVSKAEADAVTLIVKNTVRTFLPAALVTITGGFRRGKKMGHDIDFLITNPGPKEDDELLHKVVDLLKKQGLLLYCDIIESTFVEEQLPSRKIDAMDNFQKCFAILKLYQPGVDNSAYNTSKKSDMAEVKDWKAIRVDLVITPFEQYAYALLGWTGSREFGRDLRRYASHERKMILDNHGLYDRKKRIFLKAGSEEEIFAHLGLDYVEPWERNA

SEQ ID NO: 687 - DNA, 1182 bp, synthetic construct
  misc_feature 1..1182: note = Variant of terminal deoxynucleotidyl transferase
  source 1..1182: mol_type = other DNA
atgcaccatcatcatcatcatggcggtagcggccatccgccgagcaataccccggagagtgaggtgccgagcgttatcgcccgcaaggttagtcagtacagctgccagcgcaagaccacgctgaataactacaacaaaaagtttaccgacgcgttcgagatcatggccgagaactacgaatttaaagagaacgaaatcttctgtctggaatttctgcgcgccgcgagtctgctgaaatatctgccgttcccggttacccgcatgaaagacatccaaggtctgccgtgcattggcgaccaagttcgtgatgtgatcgaggagatcatcgaacgtggcgagagcagccgtgttaaagaagttctcaatgacgagcgctacaaggcctttaagcagttcaccagcgtgttcggtgtgggcgtgaaaaccagcgaaaagtggtttcgtatgggcctccgtacggttgaagagctgaaggccgacaagagtctgaagctgagcaagatgcagaaggcgggctttctgtattacgaggatctggccagctgcgttagtaaagcggaagccgatgccgttacgctcatcgtgaagaacacggtgtcgacctttctgccggatgcgctggtgaccatcacgggcggtttccgccgtggcaaaaagatgggccacgacatcgactttctgatcacgaatccgggcccaaaaagtgatgacgaactgctccacaaagtggttgatgggctcaagaagcaaggtctgctgctgtactgcgacatcatcgagagcacgttcgtggaggaacaactgccaagtcgcaaaatcgacgccatggacaacttccagaagtgcttcgccattctcaagctgtaccagccgggcgtggataactcggcgtataacacgagtaagaagagtgacatggccgaggttaaggattggaaagcgatccgtgtggatctggtgatcacgccattcgagcagtacgcctatgcgctgctcggttggacgggcagccgcgaatttggtcgcgatctgcgccgctatgcgagtcatgagcgcaagatgatcctcgacaaccatggcctctacgaccgcaaaaagcgcatctttctgaaagcgggcagcgaagaagagattttcgcgcatctgggtctggattatgtggagccgtgggaacgcaacgcg

SEQ ID NO: 688 - protein, 394 aa, synthetic construct
  REGION 1..394: note = Variant of terminal deoxynucleotidyl transferase
MHHHHHHGGSGHPPSNTPESEVPSVIARKVSQYSCQRKTTLNNYNKKFTDAFEIMAENYEFKENEIFCLEFLRAASLLKYLPFPVTRMKDIQGLPCIGDQVRDVIEEIIERGESSRVKEVLNDERYKAFKQFTSVFGVGVKTSEKWFRMGLRTVEELKADKSLKLSKMQKAGFLYYEDLASCVSKAEADAVTLIVKNTVSTFLPDALVTITGGFRRGKKMGHDIDFLITNPGPKSDDELLHKVVDGLKKQGLLLYCDIIESTFVEEQLPSRKIDAMDNFQKCFAILKLYQPGVDNSAYNTSKKSDMAEVKDWKAIRVDLVITPFEQYAYALLGWTGSREFGRDLRRYASHERKMILDNHGLYDRKKRIFLKAGSEEEIFAHLGLDYVEPWERNA

SEQ ID NO: 689 - DNA, 1182 bp, synthetic construct
  misc_feature 1..1182: note = Variant of terminal deoxynucleotidyl transferase
  source 1..1182: mol_type = other DNA
atgcaccatcatcatcatcatggcggtagcggccatccgccgagcaataccccggagagtgaggtgccgagcgttatcgcccgcaaggttagtcagtacagctgccagcgcaagaccacgctgaataactacaacaaaaagtttaccgacgcgttcgagatcatggccgagaactacgaatttaaagagaacgaaatcttctgtctggaatttctgcgcgccgcgagtctgctgaaatatctgccgttcccggttacccgcatgaaagacatccaaggtctgccgtgcattggcgaccaagttcgtgacgtgatcgaggagatcatcgaagaaggcgagagcagccgtgttaaagaagttctcaatgacgagcgctacaaggcctttaagcagttcaccagcgtgttcggtgtgggcgtgaaaaccagcgaaaagtggtttcgtatgggcctccgtacggttgaagagctgaaggccgacaagagtctgaagctgagcaagatgcagaaggcgggctttctgtattacgaggatctggtgagctgcgttagtaaagcggaagccgatgccgttacgctcatcgtgaagaacacggtgagtacctttctgccggatgcgctggtgaccatcacgggcggtttccgccgtggcaaaaagatgggccacgacatcgactttctgatcacgaatccgggcccaaaagaggatgacgaactgctccacaaagtggttgatctgctcaagaagcaaggtctgctgctgtactgcgacatcatcgagagcacgttcgtggaggaacaactgccaagtcgcaaaatcgacgccatggacaacttccagaagtgcttcgccattctcaagctgtaccagccgggcgtggataacagcagctataacacgagtaagaagagtgacatggccgaggttaaggattggaaagcgatccgtgtggatctggtgatcacgccattcgagcagtacgcctatgcgctgctcggttggacgggcagccgcgaatttggtcgcgatctgcgccgctatgcgagtcatgagcgcaagatgatcctcgacaaccatggcctctacgaccgcaaaaagcgcatctttctgaaagcgggcagcgaagaagagattttcgcgcatctgggtctggattatgtggagccgtgggaacgcaacgcg

SEQ ID NO: 690 - protein, 394 aa, synthetic construct; identical to SEQ ID NO: 16
  REGION 1..394: note = Variant of terminal deoxynucleotidyl transferase

SEQ ID NO: 691 - DNA, 1182 bp, synthetic construct
  misc_feature 1..1182: note = Variant of terminal deoxynucleotidyl transferase
  source 1..1182: mol_type = other DNA
atgcaccatcatcatcatcatggcggtagcggccatccgccgagcaataccccggagggtggggtgccgagcgttatcgcccgcaaggttagtcagtacagctgccagcgcaagaccacgctgaataactacaacaaaaagtttaccgacgcgttcgagatcatggccgagaactacgaatttaaagagaacgaaatcgctcgtctggaatttctgcgcgccgcgagtctgctgaaatatctgccgttcccggttaccagtatgaaagacatccaaggtctgccgtgcattggcgaccaagttcgtgacgtgatcgaggagatcatcgaaaccggcgagagcagccgtgttaaagaagttctcaatgacgagcgctacaaggcctttaagcagttcaccagcgtgttcggtgtgggcgtgaaaaccagcgaaaagtggtttcgtatgggcctccgtacggttgaagaggcaaaggccagtaagagtctgaagctgagcaagatgcagaaggcgggctttctgtattacgaggatctggccagctgcgttagtaaagcggaagccgatgccgttacgctcatcgtgaagaacacggtgcgtacctttctgccggatgcgctggtgaccatcacgggcggtttccgccgtggcaaaaagatgggccacgacatcgactttctgatcacgaatccgggcccgaaagaggatgacgagctgctccacaaagtggttgatgggctcaagaagcaaggtctgctgctgtactgcgacatcatcgagagcacgttcgtggaggaacaactgccaagtcgcaaaatcgacgccatggacaacttccagaagtgcttcgccattctcaagctgtaccagccgggcgtggataacagcagctataacacgagtaagaagagtgacatggccgaggttaaggattggaaagcggtccgtgtggatctggtgatcacgccattcgagcagtacgcctatgcgctgctcggttggacgggcagccgcgaatttggtcgcgatctgcgccgctatgcgagtcatgagcgcaagatgatcctcgacaaccatggcctctacgaccgcaaaaagcgcatctttctgaaagcgggcagcgaagaagagattttcgcgcatctgggtctggattatgtggagccgtgggaacgcaacgcg

SEQ ID NO: 692 - protein, 394 aa, synthetic construct
  REGION 1..394: note = Variant of terminal deoxynucleotidyl transferase
MHHHHHHGGSGHPPSNTPEGGVPSVIARKVSQYSCQRKTTLNNYNKKFTDAFEIMAENYEFKENEIARLEFLRAASLLKYLPFPVTSMKDIQGLPCIGDQVRDVIEEIIETGESSRVKEVLNDERYKAFKQFTSVFGVGVKTSEKWFRMGLRTVEEAKASKSLKLSKMQKAGFLYYEDLASCVSKAEADAVTLIVKNTVRTFLPDALVTITGGFRRGKKMGHDIDFLITNPGPKEDDELLHKVVDGLKKQGLLLYCDIIESTFVEEQLPSRKIDAMDNFQKCFAILKLYQPGVDNSSYNTSKKSDMAEVKDWKAVRVDLVITPFEQYAYALLGWTGSREFGRDLRRYASHERKMILDNHGLYDRKKRIFLKAGSEEEIFAHLGLDYVEPWERNA

SEQ ID NO: 693 - DNA, 1182 bp, synthetic construct
  misc_feature 1..1182: note = Variant of terminal deoxynucleotidyl transferase
  source 1..1182: mol_type = other DNA
atgcaccatcatcatcatcatggcggtagcggccatccgccgagcaataccccggagggtggggtgccgagcgttatcgcccgcaaggttagtcagtacagctgccagcgcaagaccacgctgaataactacaacaaaaagtttaccgacgcgttcgagatcatggccgagaactacgaatttaaagagaacgaaatcttccgtctggaatttctgcgcgccgcgagtctgctgaaatatctgccgttcccggttaccagtatgaaagacatccaaggtctgccgtgcattggcgaccaagttcgtgacgtgatcgaggagatcatcgaagagggcgagagcagccgtgttaaagaagttctcaatgacgagcgctacaaggcctttaagcagttcaccagcgtgttcggtgtgggcgtgaaaaccagcgaaaagtggtttcgtatgggcctccgtacggttgaagagattaaggccagtaagagtctgaagctgagcaagatgcagaaggcgggctttctgtattacgaggatctggccagctgcgttagtaaagcggaagccgatgccgttacgctcatcgtgaagaacacggtgcgtacctttctgccggatgcgctggtgaccatcacgggcggtttccgccgtggcaaaaagatgggccacgacatcgactttctgatcacgaatccgggcccgaaagaggatgacgagctgctccacaaagtggttgatgggctcaagaagcaaggtctgctgctgtactgcgacatcatcgagagcacgttcgtggaggaacaactgccaagtcgcaaaatcgacgccatggacaacttccagaagtgcttcgccattctcaagctgtaccagccgggcgtggataacagcagctataacacgagtaagaagagtgacatggccgaggttaaggattggaaagcggtccgtgtggatctggtgatcacgccattcgagcagtacgcctatgcgctgctcggttggacgggcagccgcgaatttggtcgcgatctgcgccgctatgcgagtcatgagcgcaagatgatcctcgacaaccatggcctctacgaccgcaaaaagcgcatctttctgaaagcgggcagcgaagaagagattttcgcgcatctgggtctggattatgtggagccgtgggaacgcaacgcg

SEQ ID NO: 694 - protein, 394 aa, synthetic construct
  REGION 1..394: note = Variant of terminal deoxynucleotidyl transferase
MHHHHHHGGSGHPPSNTPEGGVPSVIARKVSQYSCQRKTTLNNYNKKFTDAFEIMAENYEFKENEIFRLEFLRAASLLKYLPFPVTSMKDIQGLPCIGDQVRDVIEEIIEEGESSRVKEVLNDERYKAFKQFTSVFGVGVKTSEKWFRMGLRTVEEIKASKSLKLSKMQKAGFLYYEDLASCVSKAEADAVTLIVKNTVRTFLPDALVTITGGFRRGKKMGHDIDFLITNPGPKEDDELLHKVVDGLKKQGLLLYCDIIESTFVEEQLPSRKIDAMDNFQKCFAILKLYQPGVDNSSYNTSKKSDMAEVKDWKAVRVDLVITPFEQYAYALLGWTGSREFGRDLRRYASHERKMILDNHGLYDRKKRIFLKAGSEEEIFAHLGLDYVEPWERNA

SEQ ID NO: 695 - DNA, 1182 bp, synthetic construct
  misc_feature 1..1182: note = Variant of terminal deoxynucleotidyl transferase
  source 1..1182: mol_type = other DNA
atgcaccatcatcatcatcatggcggtagcggccatccgccgagcaataccccggagggtggggtgccgagcgttatcgcccgcaaggttagtcagtacagctgccagcgcaagaccacgctgaataactacaacaaaaagtttaccgacgcgttcgagatcatggccgagaactacgaatttaaagagaacgaaatcatgcgtctggaatttctgcgcgccgcgagtctgctgaaatatctgccgttcccggttacccgtatgaaagacatccaaggtctgccgtgcattggcgaccaagttcgtgacgtgatcgaggagatcatcgaagagggcgagagcagccgtgttaaagaagttctcaatgacgagcgctacaaggcctttaagcagttcaccagcgtgttcggtgtgggcgtgaaaaccagcgaaaagtggtttcgtatgggcctccgtacggttgaagaggcaaaggccagtaagagtctgaagctgagcaagatgcagaaggcgggctttctgtattacgaggatctggccagctgcgttagtaaagcggaagccgatgccgttacgctcatcgtgaagaacacggtgcgtacctttctgccggatgcgctggtgaccatcacgggcggtttccgccgtggcaaaaagatgggccacgacatcgactttctgatcacgaatccgggcccgaaagaggatgacgagctgctccacaaagtggttgatgggctcaagaagcaaggtctgctgctgtactgcgacatcatcgagagcacgttcgtggaggaacaactgccaagtcgcaaaatcgacgccatggacaacttccagaagtgcttcgccattctcaagctgtaccagccgggcgtggataacagcagctataacacgagtaagaagagtgacatggccgaggttaaggattggaaagcggtccgtgtggatctggtgatcacgccattcgagcagtacgcctatgcgctgctcggttggacgggcagccgcgaatttggtcgcgatctgcgccgctatgcgagtcatgagcgcaagatgatcctcgacaaccatggcctctacgaccgcaaaaagcgcatctttctgaaagcgggcagcgaagaagagattttcgcgcatctgggtctggattatgtggagccgtgggaacgcaacgcg

SEQ ID NO: 696 - protein, 394 aa, synthetic construct
  REGION 1..394: note = Variant of terminal deoxynucleotidyl transferase
MHHHHHHGGSGHPPSNTPEGGVPSVIARKVSQYSCQRKTTLNNYNKKFTDAFEIMAENYEFKENEIMRLEFLRAASLLKYLPFPVTRMKDIQGLPCIGDQVRDVIEEIIEEGESSRVKEVLNDERYKAFKQFTSVFGVGVKTSEKWFRMGLRTVEEAKASKSLKLSKMQKAGFLYYEDLASCVSKAEADAVTLIVKNTVRTFLPDALVTITGGFRRGKKMGHDIDFLITNPGPKEDDELLHKVVDGLKKQGLLLYCDIIESTFVEEQLPSRKIDAMDNFQKCFAILKLYQPGVDNSSYNTSKKSDMAEVKDWKAVRVDLVITPFEQYAYALLGWTGSREFGRDLRRYASHERKMILDNHGLYDRKKRIFLKAGSEEEIFAHLGLDYVEPWERNA

SEQ ID NO: 697 - DNA, 1182 bp, synthetic construct
  misc_feature 1..1182: note = Variant of terminal deoxynucleotidyl transferase
  source 1..1182: mol_type = other DNA
atgcaccatcatcatcatcatggcggtagcggccatccgccgagcaataccccggagggtggggtgccgagcgttatcgcccgcaaggttagtcagtacagctgccagcgcaagaccacgctgaataactacaacaaaaagtttaccgacgcgttcgagatcatggccgagaactacgaatttaaagagaacgaaatcttccgtctggaatttctgcgcgccgcgagtctgctgaaatatctgccgttcccggttaccagtatgaaagacatccaaggtctgccgtgcattggcgaccaagttcgtgacgtgatcgaggagatcatcgaaaccggcgagagcagccgtgttaaagaagttctcaatgacgagcgctacaaggcctttaagcagttcaccagcgtgttcggtgtgggcgtgaaaaccagcgaaaagtggtttcgtatgggcctccgtacggttgaagagattaaggccagtaagagtctgaagctgagcaagatgcagaaggcgggctttctgtattacgaggatctggccagctgcgttagtaaagcggaagccgatgccgttacgctcatcgtgaagaacacggtgcgtacctttctgccggatgcgctggtgaccatcacgggcggtttccgccgtggcaaaaagatgggccacgacatcgactttctgatcacgaatccgggcccgaaagaggatgacgagctgctccacaaagtggttgatgggctcaagaagcaaggtctgctgctgtactgcgacatcatcgagagcacgttcgtggaggaacaactgccaagtcgcaaaatcgacgccatggacaacttccagaagtgcttcgccattctcaagctgtaccagccgggcgtggataacagcagctataacacgagtaagaagagtgacatggccgaggttaaggattggaaagcggtccgtgtggatctggtgatcacgccattcgagcagtacgcctatgcgctgctcggttggacgggcagccgcgaatttggtcgcgatctgcgccgctatgcgagtcatgagcgcaagatgatcctcgacaaccatggcctctacgaccgcaaaaagcgcatctttctgaaagcgggcagcgaagaagagattttcgcgcatctgggtctggattatgtggagccgtgggaacgcaacgcg

SEQ ID NO: 698 - protein, 394 aa, synthetic construct
  REGION 1..394: note = Variant of terminal deoxynucleotidyl transferase
MHHHHHHGGSGHPPSNTPEGGVPSVIARKVSQYSCQRKTTLNNYNKKFTDAFEIMAENYEFKENEIFRLEFLRAASLLKYLPFPVTSMKDIQGLPCIGDQVRDVIEEIIETGESSRVKEVLNDERYKAFKQFTSVFGVGVKTSEKWFRMGLRTVEEIKASKSLKLSKMQKAGFLYYEDLASCVSKAEADAVTLIVKNTVRTFLPDALVTITGGFRRGKKMGHDIDFLITNPGPKEDDELLHKVVDGLKKQGLLLYCDIIESTFVEEQLPSRKIDAMDNFQKCFAILKLYQPGVDNSSYNTSKKSDMAEVKDWKAVRVDLVITPFEQYAYALLGWTGSREFGRDLRRYASHERKMILDNHGLYDRKKRIFLKAGSEEEIFAHLGLDYVEPWERNA

SEQ ID NO: 699 - DNA, 1182 bp, synthetic construct
  misc_feature 1..1182: note = Variant of terminal deoxynucleotidyl transferase
  source 1..1182: mol_type = other DNA
atgcaccatcatcatcatcatggcggtagcggccatccgccgagcaataccccggagggtggggtgccgagcgttatcgcccgcaaggttagtcagtacagctgccagcgcaagaccacgctgaataactacaacaaaaagtttaccgacgcgttcgagatcatggccgagaactacgaatttaaagagaacgaaatcatgcgtctggaatttctgcgcgccgcgagtctgctgaaatatctgccgttcccggttacccgtatgaaagacatccaaggtctgccgtgcattggcgaccaagttcgtgacgtgatccgcgagatcatcgaagagggcgagagcagccgtgttaaagaagttctcaatgacgagcgctacaaggcctttaagcagttcaccagcgtgttcggtgtgggcgtgaaaaccagcgaaaagtggtttcgtatgggcctccgtacggttgaagaggcaaaggccagtaagagtctgaagctgagcaagatgcagaaggcgggctttctgtattacgaggatctggccagctgcgttagtaaagcggaagccgatgccgttacgctcatcgtgaagaacacggtgcgtacctttctgccggatgcgctggtgaccatcacgggcggtttccgccgtggcaaaaagatgggccacgacatcgactttctgatcacgaatccgggcccgaaagaggatgacgagctgctccacaaagtggttgatgggctcaagaagcaaggtctgctgctgtactgcgacatcatcgagagcacgttcgtggaggaacaactgccaagtcgcaaaatcgacgccatggacaacttccagaagtgcttcgccattctcaagctgtaccagccgggcgtggataacagcagctataacacgagtaagaagagtgacatggccgaggttaaggattggaaagcgatccgtgtggatctggtgatcacgccattcgagcagtacgcctatgcgctgctcggttggacgggcagccgcgaatttggtcgcgatctgcgccgctatgcgagtcatgagcgcaagatgatcctcgacaaccatggcctctacgaccgcaaaaagcgcatctttctgaaagcgggcagcgaagaagagattttcgcgcatctgggtctggattatgtggagccgtgggaacgcaacgcg

SEQ ID NO: 700 - protein, 394 aa, synthetic construct
  REGION 1..394: note = Variant of terminal deoxynucleotidyl transferase
MHHHHHHGGSGHPPSNTPEGGVPSVIARKVSQYSCQRKTTLNNYNKKFTDAFEIMAENYEFKENEIMRLEFLRAASLLKYLPFPVTRMKDIQGLPCIGDQVRDVIREIIEEGESSRVKEVLNDERYKAFKQFTSVFGVGVKTSEKWFRMGLRTVEEAKASKSLKLSKMQKAGFLYYEDLASCVSKAEADAVTLIVKNTVRTFLPDALVTITGGFRRGKKMGHDIDFLITNPGPKEDDELLHKVVDGLKKQGLLLYCDIIESTFVEEQLPSRKIDAMDNFQKCFAILKLYQPGVDNSSYNTSKKSDMAEVKDWKAIRVDLVITPFEQYAYALLGWTGSREFGRDLRRYASHERKMILDNHGLYDRKKRIFLKAGSEEEIFAHLGLDYVEPWERNA

SEQ ID NO: 701 - DNA, 1182 bp, synthetic construct
  misc_feature 1..1182: note = Variant of terminal deoxynucleotidyl transferase
  source 1..1182: mol_type = other DNA
atgcaccatcatcatcatcatggcggtagcggccatccgccgagcaataccccggagggtggggtgccgagcgttatcgcccgcaaggttagtcagtacagctgccagcgcaagaccacgctgaataactacaacaaaaagtttaccgacgcgttcgagatcctggccgagaactacgaatttaaagagaacgaaatctttcgtctggaatttctgcgcgccgcgagtctgctgaaatatctgccgttcccggttaccagtatgaaagacatccaaggtctgccgtgcattggcgaccaagttcgtgacgtgatcgaggagatcatcgaagagggcgagagcagccgtgttaaagaagttctcaatgacgagcgctacaaggcctttaagcagttcaccagcgtgttcggtgtgggcgtgaaaaccagcgaaaagtggtttcgtatgggcctccgtacggttgaagaggcaaaggccagtaagagtctgaagctgagcaagatgcagaaggcgggctttctgtattacgaggatctggccagctgcgttagtaaagcggaagccgatgccgttacgctcatcgtgaagaacacggtgcgtacctttctgccggatgcgctggtgaccatcacgggcggtttccgccgtggcaaaaagatgggccacgacatcgactttctgatcacgaatccgggcccgaaagaggatgacgagctgctccacaaagtggttgatgggctcaagaagcaaggtctgctgctgtactgcgacatcatcgagagcacgttcgtggaggaacaactgccaagtcgcaaaatcgacgccatggacaacttccagaagtgcttcgccattctcaagctgtaccagccgggcgtggataacagcagctataacacgagtaagaagagtgacatggccgaggttaaggattggaaagcgatccgtgtggatctggtgatcacgccattcgagcagtacgcctatgcgctgctcggttggacgggcagccgcgaatttggtcgcgatctgcgccgctatgcgagtcatgagcgcaagatgatcctcgacaaccatggcctctacgaccgcaaaaagcgcatctttctgaaagcgggcagcgaagaagagattttcgcgcatctgggtctggattatgtggagccgtgggaacgcaacgcg

SEQ ID NO: 702 - protein, 394 aa, synthetic construct
  REGION 1..394: note = Variant of terminal deoxynucleotidyl transferase
MHHHHHHGGSGHPPSNTPEGGVPSVIARKVSQYSCQRKTTLNNYNKKFTDAFEILAENYEFKENEIFRLEFLRAASLLKYLPFPVTSMKDIQGLPCIGDQVRDVIEEIIEEGESSRVKEVLNDERYKAFKQFTSVFGVGVKTSEKWFRMGLRTVEEAKASKSLKLSKMQKAGFLYYEDLASCVSKAEADAVTLIVKNTVRTFLPDALVTITGGFRRGKKMGHDIDFLITNPGPKEDDELLHKVVDGLKKQGLLLYCDIIESTFVEEQLPSRKIDAMDNFQKCFAILKLYQPGVDNSSYNTSKKSDMAEVKDWKAIRVDLVITPFEQYAYALLGWTGSREFGRDLRRYASHERKMILDNHGLYDRKKRIFLKAGSEEEIFAHLGLDYVEPWERNA

SEQ ID NO: 703 - DNA, 1182 bp, synthetic construct
  misc_feature 1..1182: note = Variant of terminal deoxynucleotidyl transferase
  source 1..1182: mol_type = other DNA
atgcaccatcatcatcatcatggcggtagcggccatccgccgagcaataccccggagggtggggtgccgagcgttatcgcccgcaaggttagtcagtacagctgccagcgcaagaccacgctgaataactacaacaaaaagtttaccgacgcgttcgagatcatggccgagaactacgaatttaaagagaacgaaatcttccgtctggaatttctgcgcgccgcgagtctgctgaaatatctgccgttcccggttaccagtatgaaagacatccaaggtctgccgtgcattggcgaccaagttcgtgacgtgatcgaggagatcatcgaagagggcgagagcagccgtgttaaagaagttctcaatgacgagcgctacaaggcctttaagcagttcaccagcgtgttcggtgtgggcgtgaaaaccagcgaaaagtggtttcgtatgggcctccgtacggttgaagaggcaaaggccagtaagagtctgaagctgagcaagatgcagaaggcgggctttctgtattacgaggatctggccagctgcgttagtaaagcggaagccgatgccgttacgctcatcgtgaagaacacggtgcgtacctttctgccggatgcgctggtgaccatcacgggcggtttccgccgtggcaaaaagatgggccacgacatcgactttctgatcacgaatccgggcccgaaagaggatgacgagctgctccacaaagtggttgatgggctcaagaagcaaggtctgctgctgtactgcgacatcatcgagagcacgttcgtggaggaacaactgccaagtcgcaaaatcgacgccatggacaacttccagaagtgcttcgccattctcaagctgtaccagccgggcgtggataacagcagctataacacgagtaagaagagtgacatggccgaggttaaggattggaaagcgatccgtgtggatctggtgatcacgccattcgagcagtacgcctatgcgctgctcggttggacgggcagccgcgaatttggtcgcgatctgcgccgctatgcgagtcatgagcgcaagatgatcctcgacaaccatggcctctacgaccgcaaaaagcgcatctttctgaaagcgggcagcgaagaagagattttcgcgcatctgggtctggattatgtggagccgtgggaacgcaacgcg

SEQ ID NO: 704 - protein, 394 aa, synthetic construct
  REGION 1..394: note = Variant of terminal deoxynucleotidyl transferase
MHHHHHHGGSGHPPSNTPEGGVPSVIARKVSQYSCQRKTTLNNYNKKFTDAFEIMAENYEFKENEIFRLEFLRAASLLKYLPFPVTSMKDIQGLPCIGDQVRDVIEEIIEEGESSRVKEVLNDERYKAFKQFTSVFGVGVKTSEKWFRMGLRTVEEAKASKSLKLSKMQKAGFLYYEDLASCVSKAEADAVTLIVKNTVRTFLPDALVTITGGFRRGKKMGHDIDFLITNPGPKEDDELLHKVVDGLKKQGLLLYCDIIESTFVEEQLPSRKIDAMDNFQKCFAILKLYQPGVDNSSYNTSKKSDMAEVKDWKAIRVDLVITPFEQYAYALLGWTGSREFGRDLRRYASHERKMILDNHGLYDRKKRIFLKAGSEEEIFAHLGLDYVEPWERNA

SEQ ID NO: 705 - DNA, 1182 bp, synthetic construct
  misc_feature 1..1182: note = Variant of terminal deoxynucleotidyl transferase
  source 1..1182: mol_type = other DNA
atgcaccatcatcatcatcatggcggtagcggccatccgccgagcaataccccggagggtggggtgccgagcgttatcgcccgcaaggttagtcagtacagctgccagcgcaagaccacgctgaataactacaacaaaaagtttaccgacgcgttcgagatcatggccgagaactacgaatttaaagagaacgaaatcttccgtctggaatttctgcgcgccgcgagtctgctgaaatatctgccgttcccggttaccagtatgaaagacatccaaggtctgccgtgcattggcgaccaagttcgtgacgtgatcgaggagatcatcgaaaccggcgagagcagccgtgttaaagaagttctcaatgacgagcgctacaaggcctttaagcagttcaccagcgtgttcggtgtgggcgtgaaaaccagcgaaaagtggtttcgtatgggcctccgtacggttgaagaggcaaaggccagtaagagtctgaagctgagcaagatgcagaaggcgggctttctgtattacgaggatctggccagctgcgttagtaaagcggaagccgatgccgttacgctcatcgtgaagaacacggtgcgtacctttctgccggatgcgctggtgaccatcacgggcggtttccgccgtggcaaaaagatgggccacgacatcgactttctgatcacgaatccgggcccgaaagaggatgacgagctgctccacaaagtggttgatgggctcaagaagcaaggtctgctgctgtactgcgacatcatcgagagcacgttcgtggaggaacaactgccaagtcgcaaaatcgacgccatggacaacttccagaagtgcttcgccattctcaagctgtaccagccgggcgtggataacagcagctataacacgagtaagaagagtgacatggccgaggttaaggattggaaagcggtccgtgtggatctggtgatcacgccattcgagcagtacgcctatgcgctgctcggttggacgggcagccgcgaatttggtcgcgatctgcgccgctatgcgagtcatgagcgcaagatgatcctcgacaaccatggcctctacgaccgcaaaaagcgcatctttctgaaagcgggcagcgaagaagagattttcgcgcatctgggtctggattatgtggagccgtgggaacgcaacgcg

SEQ ID NO: 706 - protein, 394 aa, synthetic construct
  REGION 1..394: note = Variant of terminal deoxynucleotidyl transferase
MHHHHHHGGSGHPPSNTPEGGVPSVIARKVSQYSCQRKTTLNNYNKKFTDAFEIMAENYEFKENEIFRLEFLRAASLLKYLPFPVTSMKDIQGLPCIGDQVRDVIEEIIETGESSRVKEVLNDERYKAFKQFTSVFGVGVKTSEKWFRMGLRTVEEAKASKSLKLSKMQKAGFLYYEDLASCVSKAEADAVTLIVKNTVRTFLPDALVTITGGFRRGKKMGHDIDFLITNPGPKEDDELLHKVVDGLKKQGLLLYCDIIESTFVEEQLPSRKIDAMDNFQKCFAILKLYQPGVDNSSYNTSKKSDMAEVKDWKAVRVDLVITPFEQYAYALLGWTGSREFGRDLRRYASHERKMILDNHGLYDRKKRIFLKAGSEEEIFAHLGLDYVEPWERNA

SEQ ID NO: 707 - DNA, 1182 bp, synthetic construct
  misc_feature 1..1182: note = Variant of terminal deoxynucleotidyl transferase
  source 1..1182: mol_type = other DNA
atgcaccatcatcatcatcatggcggtagcggccatccgccgagcaataccccggagggtggggtgccgagcgttatcgcccgcaaggttagtcagtacagctgccagcgcaagaccacgctgaataactacaacaaaaagtttaccgacgcgttcgagatcatggccgagaactacgaatttaaagagaacgaaatcgctcgtctggaatttctgcgcgccgcgagtctgctgaaatatctgccgttcccggttaccagtatgaaagacatccaaggtctgccgtgcattggcgaccaagttcgtgacgtgatccgcgagatcatcgaagagggcgagagcagccgtgttaaagaagttctcaatgacgagcgctacaaggcctttaagcagttcaccagcgtgttcggtgtgggcgtgaaaaccagcgaaaagtggtttcgtatgggcctccgtacggttgaagaggcaaaggccagtaagagtctgaagctgagcaagatgcagaaggcgggctttctgtattacgaggatctggccagctgcgttagtaaagcggaagccgatgccgttacgctcatcgtgaagaacacggtgcgtacctttctgccggatgcgctggtgaccatcacgggcggtttccgccgtggcaaaaagatgggccacgacatcgactttctgatcacgaatccgggcccgaaagaggatgacgagctgctccacaaagtggttgatgggctcaagaagcaaggtctgctgctgtactgcgacatcatcgagagcacgttcgtggaggaacaactgccaagtcgcaaaatcgacgccatggacaacttccagaagtgcttcgccattctcaagctgtaccagccgggcgtggataacagcagctataacacgagtaagaagagtgacatggccgaggttaaggattggaaagcgatccgtgtggatctggtgatcacgccattcgagcagtacgcctatgcgctgctcggttggacgggcagccgcgaatttggtcgcgatctgcgccgctatgcgagtcatgagcgcaagatgatcctcgacaaccatggcctctacgaccgcaaaaagcgcatctttctgaaagcgggcagcgaagaagagattttcgcgcatctgggtctggattatgtggagccgtgggaacgcaacgcg

SEQ ID NO: 708 - protein, 394 aa, synthetic construct
  REGION 1..394: note = Variant of terminal deoxynucleotidyl transferase
MHHHHHHGGSGHPPSNTPEGGVPSVIARKVSQYSCQRKTTLNNYNKKFTDAFEIMAENYEFKENEIARLEFLRAASLLKYLPFPVTSMKDIQGLPCIGDQVRDVIREIIEEGESSRVKEVLNDERYKAFKQFTSVFGVGVKTSEKWFRMGLRTVEEAKASKSLKLSKMQKAGFLYYEDLASCVSKAEADAVTLIVKNTVRTFLPDALVTITGGFRRGKKMGHDIDFLITNPGPKEDDELLHKVVDGLKKQGLLLYCDIIESTFVEEQLPSRKIDAMDNFQKCFAILKLYQPGVDNSSYNTSKKSDMAEVKDWKAIRVDLVITPFEQYAYALLGWTGSREFGRDLRRYASHERKMILDNHGLYDRKKRIFLKAGSEEEIFAHLGLDYVEPWERNA

SEQ ID NO: 709 - DNA, 1182 bp, synthetic construct
  misc_feature 1..1182: note = Variant of terminal deoxynucleotidyl transferase
  source 1..1182: mol_type = other DNA
atgcaccatcatcatcatcatggcggtagcggccatccgccgagcaataccccggagggtggggtgccgagcgttatcgcccgcaaggttagtcagtacagctgccagcgcaagaccacgctgaataactacaacaaaaagtttaccgacgcgttcgagatcctggccgagaactacgaatttaaagagaacgaaatcgatcgtctggaatttctgcgcgccgcgagtctgctgaaatatctgccgttcccggttaccagtatgaaagacatccaaggtctgccgtgcattggcgaccaagttcgtgacgtgatcgaggagatcatcgaagagggcgagagcagccgtgttaaagaagttctcaatgacgagcgctacaaggcctttaagcagttcaccagcgtgttcggtgtgggcgtgaaaaccagcgaaaagtggtttcgtatgggcctccgtacggttgaagagattaaggccagtaagagtctgaagctgagcaagatgcagaaggcgggctttctgtattacgaggatctggccagctgcgttagtaaagcggaagccgatgccgttacgctcatcgtgaagaacacggtgcgtacctttctgccggatgcgctggtgaccatcacgggcggtttccgccgtggcaaaaagatgggccacgacatcgactttctgatcacgaatccgggcccgaaagaggatgacgagctgctccacaaagtggttgatgggctcaagaagcaaggtctgctgctgtactgcgacatcatcgagagcacgttcgtggaggaacaactgccaagtcgcaaaatcgacgccatggacaacttccagaagtgcttcgccattctcaagctgtaccagccgggcgtggataacagcagctataacacgagtaagaagagtgacatggccgaggttaaggattggaaagcggtccgtgtggatctggtgatcacgccattcgagcagtacgcctatgcgctgctcggttggacgggcagccgcgaatttggtcgcgatctgcgccgctatgcgagtcatgagcgcaagatgatcctcgacaaccatggcctctacgaccgcaaaaagcgcatctttctgaaagcgggcagcgaagaagagattttcgcgcatctgggtctggattatgtggagccgtgggaacgcaacgcg

SEQ ID NO: 710 - protein, 394 aa, synthetic construct
  REGION 1..394: note = Variant of terminal deoxynucleotidyl transferase
MHHHHHHGGSGHPPSNTPEGGVPSVIARKVSQYSCQRKTTLNNYNKKFTDAFEILAENYEFKENEIDRLEFLRAASLLKYLPFPVTSMKDIQGLPCIGDQVRDVIEEIIEEGESSRVKEVLNDERYKAFKQFTSVFGVGVKTSEKWFRMGLRTVEEIKASKSLKLSKMQKAGFLYYEDLASCVSKAEADAVTLIVKNTVRTFLPDALVTITGGFRRGKKMGHDIDFLITNPGPKEDDELLHKVVDGLKKQGLLLYCDIIESTFVEEQLPSRKIDAMDNFQKCFAILKLYQPGVDNSSYNTSKKSDMAEVKDWKAVRVDLVITPFEQYAYALLGWTGSREFGRDLRRYASHERKMILDNHGLYDRKKRIFLKAGSEEEIFAHLGLDYVEPWERNA

SEQ ID NO: 711 - DNA, 1182 bp, synthetic construct
  misc_feature 1..1182: note = Variant of terminal deoxynucleotidyl transferase
  source 1..1182: mol_type = other DNA
atgcaccatcatcatcatcatggcggtagcggccatccgccgagcaataccccggagggtggggtgccgagcgttatcgcccgcaaggttagtcagtacagctgccagcgcaagaccacgctgaataactacaacaaaaagtttaccgacgcgttcgagatcatggccgagaactacgaatttaaagagaacgaaatcatgcgtctggaatttctgcgcgccgcgagtctgctgaaatatctgccgttcccggttaccagtatgaaagacatccaaggtctgccgtgcattggcgaccaagttcgtgacgtgatcgaggagatcatcgaagagggcgagagcagccgtgttaaagaagttctcaatgacgagcgctacaaggcctttaagcagttcaccagcgtgttcggtgtgggcgtgaaaaccagcgaaaagtggtttcgtatgggcctccgtacggttgaagaggcaaaggccagtaagagtctgaagctgagcaagatgcagaaggcgggctttctgtattacgaggatctggccagctgcgttagtaaagcggaagccgatgccgttacgctcatcgtgaagaacacggtgcgtacctttctgccggatgcgctggtgaccatcacgggcggtttccgccgtggcaaaaagatgggccacgacatcgactttctgatcacgaatccgggcccgaaagaggatgacgagctgctccacaaagtggttgatgggctcaagaagcaaggtctgctgctgtactgcgacatcatcgagagcacgttcgtggaggaacaactgccaagtcgcaaaatcgacgccatggacaacttccagaagtgcttcgccattctcaagctgtaccagccgggcgtggataacagcagctataacacgagtaagaagagtgacatggccgaggttaaggattggaaagcgatccgtgtggatctggtgatcacgccattcgagcagtacgcctatgcgctgctcggttggacgggcagccgcgaatttggtcgcgatctgcgccgctatgcgagtcatgagcgcaagatgatcctcgacaaccatggcctctacgaccgcaaaaagcgcatctttctgaaagcgggcagcgaagaagagattttcgcgcatctgggtctggattatgtggagccgtgggaacgcaacgcg

SEQ ID NO: 712 - protein, 394 aa, synthetic construct
  REGION 1..394: note = Variant of terminal deoxynucleotidyl transferase
MHHHHHHGGSGHPPSNTPEGGVPSVIARKVSQYSCQRKTTLNNYNKKFTDAFEIMAENYEFKENEIMRLEFLRAASLLKYLPFPVTSMKDIQGLPCIGDQVRDVIEEIIEEGESSRVKEVLNDERYKAFKQFTSVFGVGVKTSEKWFRMGLRTVEEAKASKSLKLSKMQKAGFLYYEDLASCVSKAEADAVTLIVKNTVRTFLPDALVTITGGFRRGKKMGHDIDFLITNPGPKEDDELLHKVVDGLKKQGLLLYCDIIESTFVEEQLPSRKIDAMDNFQKCFAILKLYQPGVDNSSYNTSKKSDMAEVKDWKAIRVDLVITPFEQYAYALLGWTGSREFGRDLRRYASHERKMILDNHGLYDRKKRIFLKAGSEEEIFAHLGLDYVEPWERNA

SEQ ID NO: 713 - DNA, 1182 bp, synthetic construct
  misc_feature 1..1182: note = Variant of terminal deoxynucleotidyl transferase
  source 1..1182: mol_type = other DNA
atgcaccatcatcatcatcatggcggtagcggccatccgccgagcaataccccggagggtggggtgccgagcgttatcgcccgcaaggttagtcagtacagctgccagcgcaagaccacgctgaataactacaacaaaaagtttaccgacgcgttcgagatcatggccgagaactacgaatttaaagagaacgaaatcttccgtctggaatttctgcgcgccgcgagtctgctgaaatatctgccgttcccggttaccagtatgaaagacatccaaggtctgccgtgcattggcgaccaagttcgtgacgtgatcgaggagatcatcgaagagggcgagagcagccgtgttaaagaagttctcaatgacgagcgctacaaggcctttaagcagttcaccagcgtgttcggtgtgggcgtgaaaaccagcgaaaagtggtttcgtatgggcctccgtacggttgaagagattaaggccagtaagagtctgaagctgagcaagatgcagaaggcgggctttctgtattacgaggatctggccagctgcgttagtaaagcggaagccgatgccgttacgctcatcgtgaagaacacggtgcgtacctttctgccggatgcgctggtgaccatcacgggcggtttccgccgtggcaaaaagatgggccacgacatcgactttctgatcacgaatccgggcccgaaagaggatgacgagctgctccacaaagtggttgatgggctcaagaagcaaggtctgctgctgtactgcgacatcatcgagagcacgttcgtggaggaacaactgccaagtcgcaaaatcgacgccatggacaacttccagaagtgcttcgccattctcaagctgtaccagccgggcgtggataacagcagctataacacgagtaagaagagtgacatggccgaggttaaggattggaaagcgatccgtgtggatctggtgatcacgccattcgagcagtacgcctatgcgctgctcggttggacgggcagccgcgaatttggtcgcgatctgcgccgctatgcgagtcatgagcgcaagatgatcctcgacaaccatggcctctacgaccgcaaaaagcgcatctttctgaaagcgggcagcgaagaagagattttcgcgcatctgggtctggattatgtggagccgtgggaacgcaacgcg

SEQ ID NO: 714 - protein, 394 aa, synthetic construct
  REGION 1..394: note = Variant of terminal deoxynucleotidyl transferase
MHHHHHHGGSGHPPSNTPEGGVPSVIARKVSQYSCQRKTTLNNYNKKFTDAFEIMAENYEFKENEIFRLEFLRAASLLKYLPFPVTSMKDIQGLPCIGDQVRDVIEEIIEEGESSRVKEVLNDERYKAFKQFTSVFGVGVKTSEKWFRMGLRTVEEIKASKSLKLSKMQKAGFLYYEDLASCVSKAEADAVTLIVKNTVRTFLPDALVTITGGFRRGKKMGHDIDFLITNPGPKEDDELLHKVVDGLKKQGLLLYCDIIESTFVEEQLPSRKIDAMDNFQKCFAILKLYQPGVDNSSYNTSKKSDMAEVKDWKAIRVDLVITPFEQYAYALLGWTGSREFGRDLRRYASHERKMILDNHGLYDRKKRIFLKAGSEEEIFAHLGLDYVEPWERNA

SEQ ID NO: 715 - DNA, 1182 bp, synthetic construct
  misc_feature 1..1182: note = Variant of terminal deoxynucleotidyl transferase
  source 1..1182: mol_type = other DNA
atgcaccatcatcatcatcatggcggtagcggccatccgccgagcaataccccggagggtggggtgccgagcgttatcgcccgcaaggttagtcagtacagctgccagcgcaagaccacgctgaataactacaacaaaaagtttaccgacgcgttcgagatcatggccgagaactacgaatttaaagagaacgaaatcttccgtctggaatttctgcgcgccgcgagtctgctgaaatatctgccgttcccggttacccgtatgaaagacatccaaggtctgccgtgcattggcgaccaagttcgtgacgtgatcgaggagatcatcgaagagggcgagagcagccgtgttaaagaagttctcaatgacgagcgctacaaggcctttaagcagttcaccagcgtgttcggtgtgggcgtgaaaaccagcgaaaagtggtttcgtatgggcctccgtacggttgaagagattaaggccagtaagagtctgaagctgagcaagatgcagaaggcgggctttctgtattacgaggatctggccagctgcgttagtaaagcggaagccgatgccgttacgctcatcgtgaagaacacggtgcgtacctttctgccggatgcgctggtgaccatcacgggcggtttccgccgtggcaaaaagatgggccacgacatcgactttctgatcacgaatccgggcccgaaagaggatgacgagctgctccacaaagtggttgatgggctcaagaagcaaggtctgctgctgtactgcgacatcatcgagagcacgttcgtggaggaacaactgccaagtcgcaaaatcgacgccatggacaacttccagaagtgcttcgccattctcaagctgtaccagccgggcgtggataacagcagctataacacgagtaagaagagtgacatggccgaggttaaggattggaaagcgatccgtgtggatctggtgatcacgccattcgagcagtacgcctatgcgctgctcggttggacgggcagccgcgaatttggtcgcgatctgcgccgctatgcgagtcatgagcgcaagatgatcctcgacaaccatggcctctacgaccgcaaaaagcgcatctttctgaaagcgggcagcgaagaagagattttcgcgcatctgggtctggattatgtggagccgtgggaacgcaacgcg

SEQ ID NO: 716 - protein, 394 aa, synthetic construct
  REGION 1..394: note = Variant of terminal deoxynucleotidyl transferase
MHHHHHHGGSGHPPSNTPEGGVPSVIARKVSQYSCQRKTTLNNYNKKFTDAFEIMAENYEFKENEIFRLEFLRAASLLKYLPFPVTRMKDIQGLPCIGDQVRDVIEEIIEEGESSRVKEVLNDERYKAFKQFTSVFGVGVKTSEKWFRMGLRTVEEIKASKSLKLSKMQKAGFLYYEDLASCVSKAEADAVTLIVKNTVRTFLPDALVTITGGFRRGKKMGHDIDFLITNPGPKEDDELLHKVVDGLKKQGLLLYCDIIESTFVEEQLPSRKIDAMDNFQKCFAILKLYQPGVDNSSYNTSKKSDMAEVKDWKAIRVDLVITPFEQYAYALLGWTGSREFGRDLRRYASHERKMILDNHGLYDRKKRIFLKAGSEEEIFAHLGLDYVEPWERNA

SEQ ID NO: 717 - DNA, 1182 bp, synthetic construct
  misc_feature 1..1182: note = Variant of terminal deoxynucleotidyl transferase
  source 1..1182: mol_type = other DNA
atgcaccatcatcatcatcatggcggtagcggccatccgccgagcaataccccggagggtggggtgccgagcgttatcgcccgcaaggttagtcagtacagctgccagcgcaagaccacgctgaataactacaacaaaaagtttaccgacgcgttcgagatcatggccgagaactacgaatttaaagagaacgaaatcgctcgtctggaatttctgcgcgccgcgagtctgctgaaatatctgccgttcccggttacccgtatgaaagacatccaaggtctgccgtgcattggcgaccaagttcgtgacgtgatcgaggagatcatcgaaaccggcgagagcagccgtgttaaagaagttctcaatgacgagcgctacaaggcctttaagcagttcaccagcgtgttcggtgtgggcgtgaaaaccagcgaaaagtggtttcgtatgggcctccgtacggttgaagagctgaaggccagtaagagtctgaagctgagcaagatgcagaaggcgggctttctgtattacgaggatctggccagctgcgttagtaaagcggaagccgatgccgttacgctcatcgtgaagaacacggtgcgtacctttctgccggatgcgctggtgaccatcacgggcggtttccgccgtggcaaaaagatgggccacgacatcgactttctgatcacgaatccgggcccgaaagaggatgacgagctgctccacaaagtggttgatgggctcaagaagcaaggtctgctgctgtactgcgacatcatcgagagcacgttcgtggaggaacaactgccaagtcgcaaaatcgacgccatggacaacttccagaagtgcttcgccattctcaagctgtaccagccgggcgtggataacagcagctataacacgagtaagaagagtgacatggccgaggttaaggattggaaagcgatccgtgtggatctggtgatcacgccattcgagcagtacgcctatgcgctgctcggttggacgggcagccgcgaatttggtcgcgatctgcgccgctatgcgagtcatgagcgcaagatgatcctcgacaaccatggcctctacgaccgcaaaaagcgcatctttctgaaagcgggcagcgaagaagagattttcgcgcatctgggtctggattatgtggagccgtgggaacgcaacgcg

SEQ ID NO: 718 - protein, 394 aa, synthetic construct
  REGION 1..394: note = Variant of terminal deoxynucleotidyl transferase
MHHHHHHGGSGHPPSNTPEGGVPSVIARKVSQYSCQRKTTLNNYNKKFTDAFEIMAENYEFKENEIARLEFLRAASLLKYLPFPVTRMKDIQGLPCIGDQVRDVIEEIIETGESSRVKEVLNDERYKAFKQFTSVFGVGVKTSEKWFRMGLRTVEELKASKSLKLSKMQKAGFLYYEDLASCVSKAEADAVTLIVKNTVRTFLPDALVTITGGFRRGKKMGHDIDFLITNPGPKEDDELLHKVVDGLKKQGLLLYCDIIESTFVEEQLPSRKIDAMDNFQKCFAILKLYQPGVDNSSYNTSKKSDMAEVKDWKAIRVDLVITPFEQYAYALLGWTGSREFGRDLRRYASHERKMILDNHGLYDRKKRIFLKAGSEEEIFAHLGLDYVEPWERNA

SEQ ID NO: 719 - DNA, 1182 bp, synthetic construct
  misc_feature 1..1182: note = Variant of terminal deoxynucleotidyl transferase
  source 1..1182: mol_type = other DNA
atgcaccatcatcatcatcatggcggtagcggccatccgccgagcaataccccggagggtggggtgccgagcgttatcgcccgcaaggttagtcagtacagctgccagcgcaagaccacgctgaataactacaacaaaaagtttaccgacgcgttcgagatcatggccgagaactacgaatttaaagagaacgaaatctttcgtctggaatttctgcgcgccgcgagtctgctgaaatatctgccgttcccggttaccagtatgaaagacatccaaggtctgccgtgcattggcgaccaagttcgtgacgtgatcgaggagatcatcgaagagggcgagagcagccgtgttaaagaagttctcaatgacgagcgctacaaggcctttaagcagttcaccagcgtgttcggtgtgggcgtgaaaaccagcgaaaagtggtttcgtatgggcctccgtacggttgaagagctgaaggccagtaagagtctgaagctgagcaagatgcagaaggcgggctttctgtattacgaggatctggccagctgcgttagtaaagcggaagccgatgccgttacgctcatcgtgaagaacacggtgcgtacctttctgccggatgcgctggtgaccatcacgggcggtttccgccgtggcaaaaagatgggccacgacatcgactttctgatcacgaatccgggcccgaaagaggatgacgagctgctccacaaagtggttgatgggctcaagaagcaaggtctgctgctgtactgcgacatcatcgagagcacgttcgtggaggaacaactgccaagtcgcaaaatcgacgccatggacaacttccagaagtgcttcgccattctcaagctgtaccagccgggcgtggataacagcagctataacacgagtaagaagagtgacatggccgaggttaaggattggaaagcgatccgtgtggatctggtgatcacgccattcgagcagtacgcctatgcgctgctcggttggacgggcagccgcgaatttggtcgcgatctgcgccgctatgcgagtcatgagcgcaagatgatcctcgacaaccatggcctctacgaccgcaaaaagcgcatctttctgaaagcgggcagcgaagaagagattttcgcgcatctgggtctggattatgtggagccgtgggaacgcaacgcg

SEQ ID NO: 720 - protein, 394 aa, synthetic construct
  REGION 1..394: note = Variant of terminal deoxynucleotidyl transferase
MHHHHHHGGSGHPPSNTPEGGVPSVIARKVSQYSCQRKTTLNNYNKKFTDAFEIMAENYEFKENEIFRLEFLRAASLLKYLPFPVTSMKDIQGLPCIGDQVRDVIEEIIEEGESSRVKEVLNDERYKAFKQFTSVFGVGVKTSEKWFRMGLRTVEELKASKSLKLSKMQKAGFLYYEDLASCVSKAEADAVTLIVKNTVRTFLPDALVTITGGFRRGKKMGHDIDFLITNPGPKEDDELLHKVVDGLKKQGLLLYCDIIESTFVEEQLPSRKIDAMDNFQKCFAILKLYQPGVDNSSYNTSKKSDMAEVKDWKAIRVDLVITPFEQYAYALLGWTGSREFGRDLRRYASHERKMILDNHGLYDRKKRIFLKAGSEEEIFAHLGLDYVEPWERNA

SEQ ID NO: 721 - DNA, 1182 bp, synthetic construct
  misc_feature 1..1182: note = Variant of terminal deoxynucleotidyl transferase
  source 1..1182: mol_type = other DNA
atgcaccatcatcatcatcatggcggtagcggccatccgccgagcaataccccggagggtggggtgccgagcgttatcgcccgcaaggttagtcagtacagctgccagcgcaagaccacgctgaataactacaacaaaaagtttaccgacgcgttcgagatcctggccgagaactacgaatttaaagagaacgaaatcttccgtctggaatttctgcgcgccgcgagtctgctgaaatatctgccgttcccggttacccgcatgaaagacatccaaggtctgccgtgcattggcgaccaagttcgtgacgtgatccgcgagatcatcgaagagggcgagagcagccgtgttaaagaagttctcaatgacgagcgctacaaggcctttaagcagttcaccagcgtgttcggtgtgggcgtgaaaaccagcgaaaagtggtttcgtatgggcctccgtacggttgaagagattaaggccagtaagagtctgaagctgagcaagatgcagaaggcgggctttctgtattacgaggatctggccagctgcgttagtaaagcggaagccgatgccgttacgctcatcgtgaagaacacggtgcgtacctttctgccggatgcgctggtgaccatcacgggcggtttccgccgtggcaaaaagatgggccacgacatcgactttctgatcacgaatccgggcccgaaagaggatgacgagctgctccacaaagtggttgatgggctcaagaagcaaggtctgctgctgtactgcgacatcatcgagagcacgttcgtggaggaacaactgccaagtcgcaaaatcgacgccatggacaacttccagaagtgcttcgccattctcaagctgtaccagccgggcgtggataacagcagctataacacgagtaagaagagtgacatggccgaggttaaggattggaaagcgatccgtgtggatctggtgatcacgccattcgagcagtacgcctatgcgctgctcggttggacgggcagccgcgaatttggtcgcgatctgcgccgctatgcgagtcatgagcgcaagatgatcctcgacaaccatggcctctacgaccgcaaaaagcgcatctttctgaaagcgggcagcgaagaagagattttcgcgcatctgggtctggattatgtggagccgtgggaacgcaacgcg

SEQ ID NO: 722 - protein, 394 aa, synthetic construct
  REGION 1..394: note = Variant of terminal deoxynucleotidyl transferase
MHHHHHHGGSGHPPSNTPEGGVPSVIARKVSQYSCQRKTTLNNYNKKFTDAFEILAENYEFKENEIFRLEFLRAASLLKYLPFPVTRMKDIQGLPCIGDQVRDVIREIIEEGESSRVKEVLNDERYKAFKQFTSVFGVGVKTSEKWFRMGLRTVEEIKASKSLKLSKMQKAGFLYYEDLASCVSKAEADAVTLIVKNTVRTFLPDALVTITGGFRRGKKMGHDIDFLITNPGPKEDDELLHKVVDGLKKQGLLLYCDIIESTFVEEQLPSRKIDAMDNFQKCFAILKLYQPGVDNSSYNTSKKSDMAEVKDWKAIRVDLVITPFEQYAYALLGWTGSREFGRDLRRYASHERKMILDNHGLYDRKKRIFLKAGSEEEIFAHLGLDYVEPWERNA

SEQ ID NO: 723 - DNA, 1182 bp, synthetic construct
  misc_feature 1..1182: note = Variant of terminal deoxynucleotidyl transferase
  source 1..1182: mol_type = other DNA
atgcaccatcatcatcatcatggcggtagcggccatccgccgagcaataccccggagggtggggtgccgagcgttatcgcccgcaaggttagtcagtacagctgccagcgcaagaccacgctgaataactacaacaaaaagtttaccgacgcgttcgagatcatggccgagaactacgaatttaaagagaacgaaatctttcgtctggaatttctgcgcgccgcgagtctgctgaaatatctgccgttcccggttaccagtatgaaagacatccaaggtctgccgtgcattggcgaccaagttcgtgacgtgatccgcgagatcatcgaagagggcgagagcagccgtgttaaagaagttctcaatgacgagcgctacaaggcctttaagcagttcaccagcgtgttcggtgtgggcgtgaaaaccagcgaaaagtggtttcgtatgggcctccgtacggttgaagagctgaaggccagtaagagtctgaagctgagcaagatgcagaaggcgggctttctgtattacgaggatctggccagctgcgttagtaaagcggaagccgatgccgttacgctcatcgtgaagaacacggtgcgtacctttctgccggatgcgctggtgaccatcacgggcggtttccgccgtggcaaaaagatgggccacgacatcgactttctgatcacgaatccgggcccgaaagaggatgacgagctgctccacaaagtggttgatgggctcaagaagcaaggtctgctgctgtactgcgacatcatcgagagcacgttcgtggaggaacaactgccaagtcgcaaaatcgacgccatggacaacttccagaagtgcttcgccattctcaagctgtaccagccgggcgtggataacagcagctataacacgagtaagaagagtgacatggccgaggttaaggattggaaagcgatccgtgtggatctggtgatcacgccattcgagcagtacgcctatgcgctgctcggttggacgggcagccgcgaatttggtcgcgatctgcgccgctatgcgagtcatgagcgcaagatgatcctcgacaaccatggcctctacgaccgcaaaaagcgcatctttctgaaagcgggcagcgaagaagagattttcgcgcatctgggtctggattatgtggagccgtgggaacgcaacgcg

SEQ ID NO: 724 - protein, 394 aa, synthetic construct
  REGION 1..394: note = Variant of terminal deoxynucleotidyl transferase
MHHHHHHGGSGHPPSNTPEGGVPSVIARKVSQYSCQRKTTLNNYNKKFTDAFEIMAENYEFKENEIFRLEFLRAASLLKYLPFPVTSMKDIQGLPCIGDQVRDVIREIIEEGESSRVKEVLNDERYKAFKQFTSVFGVGVKTSEKWFRMGLRTVEELKASKSLKLSKMQKAGFLYYEDLASCVSKAEADAVTLIVKNTVRTFLPDALVTITGGFRRGKKMGHDIDFLITNPGPKEDDELLHKVVDGLKKQGLLLYCDIIESTFVEEQLPSRKIDAMDNFQKCFAILKLYQPGVDNSSYNTSKKSDMAEVKDWKAIRVDLVITPFEQYAYALLGWTGSREFGRDLRRYASHERKMILDNHGLYDRKKRIFLKAGSEEEIFAHLGLDYVEPWERNA

SEQ ID NO: 725 - DNA, 1182 bp, synthetic construct
  misc_feature 1..1182: note = Variant of terminal deoxynucleotidyl transferase
  source 1..1182: mol_type = other DNA
atgcaccatcatcatcatcatggcggtagcggccatccgccgagcaataccccggagggtggggtgccgagcgttatcgcccgcaaggttagtcagtacagctgccagcgcaagaccacgctgaataactacaacaaaaagtttaccgacgcgttcgagatcatggccgagaactacgaatttaaagagaacgaaatcatgcgtctggaatttctgcgcgccgcgagtctgctgaaatatctgccgttcccggttaccagtatgaaagacatccaaggtctgccgtgcattggcgaccaagttcgtgacgtgatcgaggagatcatcgaagagggcgagagcagccgtgttaaagaagttctcaatgacgagcgctacaaggcctttaagcagttcaccagcgtgttcggtgtgggcgtgaaaaccagcgaaaagtggtttcgtatgggcctccgtacggttgaagagattaaggccagtaagagtctgaagctgagcaagatgcagaaggcgggctttctgtattacgaggatctggccagctgcgttagtaaagcggaagccgatgccgttacgctcatcgtgaagaacacggtgcgtacctttctgccggatgcgctggtgaccatcacgggcggtttccgccgtggcaaaaagatgggccacgacatcgactttctgatcacgaatccgggcccgaaagaggatgacgagctgctccacaaagtggttgatgggctcaagaagcaaggtctgctgctgtactgcgacatcatcgagagcacgttcgtggaggaacaactgccaagtcgcaaaatcgacgccatggacaacttccagaagtgcttcgccattctcaagctgtaccagccgggcgtggataacagcagctataacacgagtaagaagagtgacatggccgaggttaaggattggaaagcgatccgtgtggatctggtgatcacgccattcgagcagtacgcctatgcgctgctcggttggacgggcagccgcgaatttggtcgcgatctgcgccgctatgcgagtcatgagcgcaagatgatcctcgacaaccatggcctctacgaccgcaaaaagcgcatctttctgaaagcgggcagcgaagaagagattttcgcgcatctgggtctggattatgtggagccgtgggaacgcaacgcg

SEQ ID NO: 726 - protein, 394 aa, synthetic construct
  REGION 1..394: note = Variant of terminal deoxynucleotidyl transferase
MHHHHHHGGSGHPPSNTPEGGVPSVIARKVSQYSCQRKTTLNNYNKKFTDAFEIMAENYEFKENEIMRLEFLRAASLLKYLPFPVTSMKDIQGLPCIGDQVRDVIEEIIEEGESSRVKEVLNDERYKAFKQFTSVFGVGVKTSEKWFRMGLRTVEEIKASKSLKLSKMQKAGFLYYEDLASCVSKAEADAVTLIVKNTVRTFLPDALVTITGGFRRGKKMGHDIDFLITNPGPKEDDELLHKVVDGLKKQGLLLYCDIIESTFVEEQLPSRKIDAMDNFQKCFAILKLYQPGVDNSSYNTSKKSDMAEVKDWKAIRVDLVITPFEQYAYALLGWTGSREFGRDLRRYASHERKMILDNHGLYDRKKRIFLKAGSEEEIFAHLGLDYVEPWERNA

SEQ ID NO: 727 - DNA, 1182 bp, synthetic construct
  misc_feature 1..1182: note = Variant of terminal deoxynucleotidyl transferase
  source 1..1182: mol_type = other DNA
atgcaccatcatcatcatcatggcggtagcggccatccgccgagcaataccccggagggtggggtgccgagcgttatcgcccgcaaggttagtcagtacagctgccagcgcaagaccacgctgaataactacaacaaaaagtttaccgacgcgttcgagatcatggccgagaactacgaatttaaagagaacgaaatcatgcgtctggaatttctgcgcgccgcgagtctgctgaaatatctgccgttcccggttacccgcatgaaagacatccaaggtctgccgtgcattggcgaccaagttcgtgacgtgatcgaggagatcatcgaagagggcgagagcagccgtgttaaagaagttctcaatgacgagcgctacaaggcctttaagcagttcaccagcgtgttcggtgtgggcgtgaaaaccagcgaaaagtggtttcgtatgggcctccgtacggttgaagaggcaaaggccagtaagagtctgaagctgagcaagatgcagaaggcgggctttctgtattacgaggatctggccagctgcgttagtaaagcggaagccgatgccgttacgctcatcgtgaagaacacggtgcgtacctttctgccggatgcgctggtgaccatcacgggcggtttccgccgtggcaaaaagatgggccacgacatcgactttctgatcacgaatccgggcccgaaagaggatgacgagctgctccacaaagtggttgatgggctcaagaagcaaggtctgctgctgtactgcgacatcatcgagagcacgttcgtggaggaacaactgccaagtcgcaaaatcgacgccatggacaacttccagaagtgcttcgccattctcaagctgtaccagccgggcgtggataacagcagctataacacgagtaagaagagtgacatggccgaggttaaggattggaaagcgatccgtgtggatctggtgatcacgccattcgagcagtacgcctatgcgctgctcggttggacgggcagccgcgaatttggtcgcgatctgcgccgctatgcgagtcatgagcgcaagatgatcctcgacaaccatggcctctacgaccgcaaaaagcgcatctttctgaaagcgggcagcgaagaagagattttcgcgcatctgggtctggattatgtggagccgtgggaacgcaacgcg

SEQ ID NO: 728 - protein, 394 aa, synthetic construct
  REGION 1..394: note = Variant of terminal deoxynucleotidyl transferase
MHHHHHHGGSGHPPSNTPEGGVPSVIARKVSQYSCQRKTTLNNYNKKFTDAFEIMAENYEFKENEIMRLEFLRAASLLKYLPFPVTRMKDIQGLPCIGDQVRDVIEEIIEEGESSRVKEVLNDERYKAFKQFTSVFGVGVKTSEKWFRMGLRTVEEAKASKSLKLSKMQKAGFLYYEDLASCVSKAEADAVTLIVKNTVRTFLPDALVTITGGFRRGKKMGHDIDFLITNPGPKEDDELLHKVVDGLKKQGLLLYCDIIESTFVEEQLPSRKIDAMDNFQKCFAILKLYQPGVDNSSYNTSKKSDMAEVKDWKAIRVDLVITPFEQYAYALLGWTGSREFGRDLRRYASHERKMILDNHGLYDRKKRIFLKAGSEEEIFAHLGLDYVEPWERNA

SEQ ID NO: 729 - DNA, 1182 bp, synthetic construct
  misc_feature 1..1182: note = Variant of terminal deoxynucleotidyl transferase
  source 1..1182: mol_type = other DNA
atgcaccatcatcatcatcatggcggtagcggccatccgccgagcaataccccggagggtggggtgccgagcgttatcgcccgcaaggttagtcagtacagctgccagcgcaagaccacgctgaataactacaacaaaaagtttaccgacgcgttcgagatcctggccgagaactacgaatttaaagagaacgaaatcgctcgtctggaatttctgcgcgccgcgagtctgctgaaatatctgccgttcccggttacccgtatgaaagacatccaaggtctgccgtgcattggcgaccaagttcgtgacgtgatccgcgagatcatcgaaaccggcgagagcagccgtgttaaagaagttctcaatgacgagcgctacaaggcctttaagcagttcaccagcgtgttcggtgtgggcgtgaaaaccagcgaaaagtggtttcgtatgggcctccgtacggttgaagagattaaggccagtaagagtctgaagctgagcaagatgcagaaggcgggctttctgtattacgaggatctggccagctgcgttagtaaagcggaagccgatgccgttacgctcatcgtgaagaacacggtgcgtacctttctgccggatgcgctggtgaccatcacgggcggtttccgccgtggcaaaaagatgggccacgacatcgactttctgatcacgaatccgggcccgaaagaggatgacgagctgctccacaaagtggttgatgggctcaagaagcaaggtctgctgctgtactgcgacatcatcgagagcacgttcgtggaggaacaactgccaagtcgcaaaatcgacgccatggacaacttccagaagtgcttcgccattctcaagctgtaccagccgggcgtggataacagcagctataacacgagtaagaagagtgacatggccgaggttaaggattggaaagcgatccgtgtggatctggtgatcacgccattcgagcagtacgcctatgcgctgctcggttggacgggcagccgcgaatttggtcgcgatctgcgccgctatgcgagtcatgagcgcaagatgatcctcgacaaccatggcctctacgaccgcaaaaagcgcatctttctgaaagcgggcagcgaagaagagattttcgcgcatctgggtctggattatgtggagccgtgggaacgcaacgcg

SEQ ID NO: 730 - protein, 394 aa, synthetic construct
  REGION 1..394: note = Variant of terminal deoxynucleotidyl transferase
MHHHHHHGGSGHPPSNTPEGGVPSVIARKVSQYSCQRKTTLNNYNKKFTDAFEILAENYEFKENEIARLEFLRAASLLKYLPFPVTRMKDIQGLPCIGDQVRDVIREIIETGESSRVKEVLNDERYKAFKQFTSVFGVGVKTSEKWFRMGLRTVEEIKASKSLKLSKMQKAGFLYYEDLASCVSKAEADAVTLIVKNTVRTFLPDALVTITGGFRRGKKMGHDIDFLITNPGPKEDDELLHKVVDGLKKQGLLLYCDIIESTFVEEQLPSRKIDAMDNFQKCFAILKLYQPGVDNSSYNTSKKSDMAEVKDWKAIRVDLVITPFEQYAYALLGWTGSREFGRDLRRYASHERKMILDNHGLYDRKKRIFLKAGSEEEIFAHLGLDYVEPWERNA

SEQ ID NO: 731 - DNA, 1182 bp, synthetic construct
  misc_feature 1..1182: note = Variant of terminal deoxynucleotidyl transferase
  source 1..1182: mol_type = other DNA
atgcaccatcatcatcatcatggcggtagcggccatccgccgagcaataccccggagggtggggtgccgagcgttatcgcccgcaaggttagtcagtacagctgccagcgcaagaccacgctgaataactacaacaaaaagtttaccgacgcgttcgagatcatggccgagaactacgaatttaaagagaacgaaatctttcgtctggaatttctgcgcgccgcgagtctgctgaaatatctgccgttcccggttacccgtatgaaagacatccaaggtctgccgtgcattggcgaccaagttcgtgacgtgatccgcgagatcatcgaaaccggcgagagcagccgtgttaaagaagttctcaatgacgagcgctacaaggcctttaagcagttcaccagcgtgttcggtgtgggcgtgaaaaccagcgaaaagtggtttcgtatgggcctccgtacggttgaagagattaaggccagtaagagtctgaagctgagcaagatgcagaaggcgggctttctgtattacgaggatctggccagctgcgttagtaaagcggaagccgatgccgttacgctcatcgtgaagaacacggtgcgtacctttctgccggatgcgctggtgaccatcacgggcggtttccgccgtggcaaaaagatgggccacgacatcgactttctgatcacgaatccgggcccgaaagaggatgacgagctgctccacaaagtggttgatgggctcaagaagcaaggtctgctgctgtactgcgacatcatcgagagcacgttcgtggaggaacaactgccaagtcgcaaaatcgacgccatggacaacttccagaagtgcttcgccattctcaagctgtaccagccgggcgtggataacagcagctataacacgagtaagaagagtgacatggccgaggttaaggattggaaagcgatccgtgtggatctggtgatcacgccattcgagcagtacgcctatgcgctgctcggttggacgggcagccgcgaatttggtcgcgatctgcgccgctatgcgagtcatgagcgcaagatgatcctcgacaaccatggcctctacgaccgcaaaaagcgcatctttctgaaagcgggcagcgaagaagagattttcgcgcatctgggtctggattatgtggagccgtgggaacgcaacgcg

SEQ ID NO: 732 - protein, 394 aa, synthetic construct
  REGION 1..394: note = Variant of terminal deoxynucleotidyl transferase
MHHHHHHGGSGHPPSNTPEGGVPSVIARKVSQYSCQRKTTLNNYNKKFTDAFEIMAENYEFKENEIFRLEFLRAASLLKYLPFPVTRMKDIQGLPCIGDQVRDVIREIIETGESSRVKEVLNDERYKAFKQFTSVFGVGVKTSEKWFRMGLRTVEEIKASKSLKLSKMQKAGFLYYEDLASCVSKAEADAVTLIVKNTVRTFLPDALVTITGGFRRGKKMGHDIDFLITNPGPKEDDELLHKVVDGLKKQGLLLYCDIIESTFVEEQLPSRKIDAMDNFQKCFAILKLYQPGVDNSSYNTSKKSDMAEVKDWKAIRVDLVITPFEQYAYALLGWTGSREFGRDLRRYASHERKMILDNHGLYDRKKRIFLKAGSEEEIFAHLGLDYVEPWERNA

SEQ ID NO: 733 - DNA, 1182 bp, synthetic construct
  misc_feature 1..1182: note = Variant of terminal deoxynucleotidyl transferase
  source 1..1182: mol_type = other DNA
atgcaccatcatcatcatcatggcggtagcggccatccgccgagcaataccccggagggtggggtgccgagcgttatcgcccgcaaggttagtcagtacagctgccagcgcaagaccacgctgaataactacaacaaaaagtttaccgacgcgttcgagatcatggccgagaactacgaatttaaagagaacgaaatcgctcgtctggaatttctgcgcgccgcgagtctgctgaaatatctgccgttcccggttacccgtatgaaagacatccaaggtctgccgtgcattggcgaccaagttcgtgacgtgatcgaggagatcatcgaagagggcgagagcagccgtgttaaagaagttctcaatgacgagcgctacaaggcctttaagcagttcaccagcgtgttcggtgtgggcgtgaaaaccagcgaaaagtggtttcgtatgggcctccgtacggttgaagagattaaggccagtaagagtctgaagctgagcaagatgcagaaggcgggctttctgtattacgaggatctggccagctgcgttagtaaagcggaagccgatgccgttacgctcatcgtgaagaacacggtgcgtacctttctgccggatgcgctggtgaccatcacgggcggtttccgccgtggcaaaaagatgggccacgacatcgactttctgatcacgaatccgggcccgaaagaggatgacgagctgctccacaaagtggttgatgggctcaagaagcaaggtctgctgctgtactgcgacatcatcgagagcacgttcgtggaggaacaactgccaagtcgcaaaatcgacgccatggacaacttccagaagtgcttcgccattctcaagctgtaccagccgggcgtggataacagcagctataacacgagtaagaagagtgacatggccgaggttaaggattggaaagcgatccgtgtggatctggtgatcacgccattcgagcagtacgcctatgcgctgctcggttggacgggcagccgcgaatttggtcgcgatctgcgccgctatgcgagtcatgagcgcaagatgatcctcgacaaccatggcctctacgaccgcaaaaagcgcatctttctgaaagcgggcagcgaagaagagattttcgcgcatctgggtctggattatgtggagccgtgggaacgcaacgcg

SEQ ID NO: 734 - protein, 394 aa, synthetic construct
  REGION 1..394: note = Variant of terminal deoxynucleotidyl transferase
MHHHHHHGGSGHPPSNTPEGGVPSVIARKVSQYSCQRKTTLNNYNKKFTDAFEIMAENYEFKENEIARLEFLRAASLLKYLPFPVTRMKDIQGLPCIGDQVRDVIEEIIEEGESSRVKEVLNDERYKAFKQFTSVFGVGVKTSEKWFRMGLRTVEEIKASKSLKLSKMQKAGFLYYEDLASCVSKAEADAVTLIVKNTVRTFLPDALVTITGGFRRGKKMGHDIDFLITNPGPKEDDELLHKVVDGLKKQGLLLYCDIIESTFVEEQLPSRKIDAMDNFQKCFAILKLYQPGVDNSSYNTSKKSDMAEVKDWKAIRVDLVITPFEQYAYALLGWTGSREFGRDLRRYASHERKMILDNHGLYDRKKRIFLKAGSEEEIFAHLGLDYVEPWERNA

SEQ ID NO: 735 - DNA, 1182 bp, synthetic construct
  misc_feature 1..1182: note = Variant of terminal deoxynucleotidyl transferase
  source 1..1182: mol_type = other DNA
atgcaccatcatcatcatcatggcggtagcggccatccgccgagcaataccccggagggtggggtgccgagcgttatcgcccgcaaggttagtcagtacagctgccagcgcaagaccacgctgaataactacaacaaaaagtttaccgacgcgttcgagatcatggccgagaactacgaatttaaagagaacgaaatcttccgtctggaatttctgcgcgccgcgagtctgctgaaatatctgccgttcccggttacccgcatgaaagacatccaaggtctgccgtgcattggcgaccaagttcgtgacgtgatcgaggagatcatcgaagagggcgagagcagccgtgttaaagaagttctcaatgacgagcgctacaaggcctttaagcagttcaccagcgtgttcggtgtgggcgtgaaaaccagcgaaaagtggtttcgtatgggcctccgtacggttgaagagattaaggccagtaagagtctgaagctgagcaagatgcagaaggcgggctttctgtattacgaggatctggccagctgcgttagtaaagcggaagccgatgccgttacgctcatcgtgaagaacacggtgcgtacctttctgccggatgcgctggtgaccatcacgggcggtttccgccgtggcaaaaagatgggccacgacatcgactttctgatcacgaatccgggcccgaaagaggatgacgagctgctccacaaagtggttgatgggctcaagaagcaaggtctgctgctgtactgcgacatcatcgagagcacgttcgtggaggaacaactgccaagtcgcaaaatcgacgccatggacaacttccagaagtgcttcgccattctcaagctgtaccagccgggcgtggataacagcagctataacacgagtaagaagagtgacatggccgaggttaaggattggaaagcggtccgtgtggatctggtgatcacgccattcgagcagtacgcctatgcgctgctcggttggacgggcagccgcgaatttggtcgcgatctgcgccgctatgcgagtcatgagcgcaagatgatcctcgacaaccatggcctctacgaccgcaaaaagcgcatctttctgaaagcgggcagcgaagaagagattttcgcgcatctgggtctggattatgtggagccgtgggaacgcaacgcg

SEQ ID NO: 736 - protein, 394 aa, synthetic construct
  REGION 1..394: note = Variant of terminal deoxynucleotidyl transferase
MHHHHHHGGSGHPPSNTPEGGVPSVIARKVSQYSCQRKTTLNNYNKKFTDAFEIMAENYEFKENEIFRLEFLRAASLLKYLPFPVTRMKDIQGLPCIGDQVRDVIEEIIEEGESSRVKEVLNDERYKAFKQFTSVFGVGVKTSEKWFRMGLRTVEEIKASKSLKLSKMQKAGFLYYEDLASCVSKAEADAVTLIVKNTVRTFLPDALVTITGGFRRGKKMGHDIDFLITNPGPKEDDELLHKVVDGLKKQGLLLYCDIIESTFVEEQLPSRKIDAMDNFQKCFAILKLYQPGVDNSSYNTSKKSDMAEVKDWKAVRVDLVITPFEQYAYALLGWTGSREFGRDLRRYASHERKMILDNHGLYDRKKRIFLKAGSEEEIFAHLGLDYVEPWERNA

SEQ ID NO: 737 - DNA, 1182 bp, synthetic construct
  misc_feature 1..1182: note = Variant of terminal deoxynucleotidyl transferase
  source 1..1182: mol_type = other DNA
atgcaccatcatcatcatcatggcggtagcggccatccgccgagcaataccccggagggtggggtgccgagcgttatcgcccgcaaggttagtcagtacagctgccagcgcaagaccacgctgaataactacaacaaaaagtttaccgacgcgttcgagatcatggccgagaactacgaatttaaagagaacgaaatcatgcgtctggaatttctgcgcgccgcgagtctgctgaaatatctgccgttcccggttaccagtatgaaagacatccaaggtctgccgtgcattggcgaccaagttcgtgacgtgatcgaggagatcatcgaagagggcgagagcagccgtgttaaagaagttctcaatgacgagcgctacaaggcctttaagcagttcaccagcgtgttcggtgtgggcgtgaaaaccagcgaaaagtggtttcgtatgggcctccgtacggttgaagagctgaaggccagtaagagtctgaagctgagcaagatgcagaaggcgggctttctgtattacgaggatctggccagctgcgttagtaaagcggaagccgatgccgttacgctcatcgtgaagaacacggtgcgtacctttctgccggatgcgctggtgaccatcacgggcggtttccgccgtggcaaaaagatgggccacgacatcgactttctgatcacgaatccgggcccgaaagaggatgacgagctgctccacaaagtggttgatgggctcaagaagcaaggtctgctgctgtactgcgacatcatcgagagcacgttcgtggaggaacaactgccaagtcgcaaaatcgacgccatggacaacttccagaagtgcttcgccattctcaagctgtaccagccgggcgtggataacagcagctataacacgagtaagaagagtgacatggccgaggttaaggattggaaagcgatccgtgtggatctggtgatcacgccattcgagcagtacgcctatgcgctgctcggttggacgggcagccgcgaatttggtcgcgatctgcgccgctatgcgagtcatgagcgcaagatgatcctcgacaaccatggcctctacgaccgcaaaaagcgcatctttctgaaagcgggcagcgaagaagagattttcgcgcatctgggtctggattatgtggagccgtgggaacgcaacgcg

SEQ ID NO: 738 - protein, 394 aa, synthetic construct
  REGION 1..394: note = Variant of terminal deoxynucleotidyl transferase
MHHHHHHGGSGHPPSNTPEGGVPSVIARKVSQYSCQRKTTLNNYNKKFTDAFEIMAENYEFKENEIMRLEFLRAASLLKYLPFPVTSMKDIQGLPCIGDQVRDVIEEIIEEGESSRVKEVLNDERYKAFKQFTSVFGVGVKTSEKWFRMGLRTVEELKASKSLKLSKMQKAGFLYYEDLASCVSKAEADAVTLIVKNTVRTFLPDALVTITGGFRRGKKMGHDIDFLITNPGPKEDDELLHKVVDGLKKQGLLLYCDIIESTFVEEQLPSRKIDAMDNFQKCFAILKLYQPGVDNSSYNTSKKSDMAEVKDWKAIRVDLVITPFEQYAYALLGWTGSREFGRDLRRYASHERKMILDNHGLYDRKKRIFLKAGSEEEIFAHLGLDYVEPWERNA

SEQ ID NO: 739 - DNA, 1182 bp, synthetic construct
  misc_feature 1..1182: note = Variant of terminal deoxynucleotidyl transferase
  source 1..1182: mol_type = other DNA
atgcaccatcatcatcatcatggcggtagcggccatccgccgagcaataccccggagggtggggtgccgagcgttatcgcccgcaaggttagtcagtacagctgccagcgcaagaccacgctgaataactacaacaaaaagtttaccgacgcgttcgagatcctggccgagaactacgaatttaaagagaacgaaatcgatcgtctggaatttctgcgcgccgcgagtctgctgaaatatctgccgttcccggttacccgtatgaaagacatccaaggtctgccgtgcattggcgaccaagttcgtgacgtgatcgaggagatcatcgaagagggcgagagcagccgtgttaaagaagttctcaatgacgagcgctacaaggcctttaagcagttcaccagcgtgttcggtgtgggcgtgaaaaccagcgaaaagtggtttcgtatgggcctccgtacggttgaagagctgaaggccagtaagagtctgaagctgagcaagatgcagaaggcgggctttctgtattacgaggatctggccagctgcgttagtaaagcggaagccgatgccgttacgctcatcgtgaagaacacggtgcgtacctttctgccggatgcgctggtgaccatcacgggcggtttccgccgtggcaaaaagatgggccacgacatcgactttctgatcacgaatccgggcccgaaagaggatgacgagctgctccacaaagtggttgatgggctcaagaagcaaggtctgctgctgtactgcgacatcatcgagagcacgttcgtggaggaacaactgccaagtcgcaaaatcgacgccatggacaacttccagaagtgcttcgccattctcaagctgtaccagccgggcgtggataacagcagctataacacgagtaagaagagtgacatggccgaggttaaggattggaaagcggtccgtgtagatctggtgatcacgccattcgagcagtacgcctatgcgctgctcggttggacgggcagccgcgaatttggtcgcgatctgcgccgctatgcgagtcatgagcgcaagatgatcctcgacaaccatggcctctacgaccgcaaaaagcgcatctttctgaaagcgggcagcgaagaagagattttcgcgcatctgggtctggattatgtggagccgtgggaacgcaacgcg

SEQ ID NO: 740 - protein, 394 aa, synthetic construct
  REGION 1..394: note = Variant of terminal deoxynucleotidyl transferase
MHHHHHHGGSGHPPSNTPEGGVPSVIARKVSQYSCQRKTTLNNYNKKFTDAFEILAENYEFKENEIDRLEFLRAASLLKYLPFPVTRMKDIQGLPCIGDQVRDVIEEIIEEGESSRVKEVLNDERYKAFKQFTSVFGVGVKTSEKWFRMGLRTVEELKASKSLKLSKMQKAGFLYYEDLASCVSKAEADAVTLIVKNTVRTFLPDALVTITGGFRRGKKMGHDIDFLITNPGPKEDDELLHKVVDGLKKQGLLLYCDIIESTFVEEQLPSRKIDAMDNFQKCFAILKLYQPGVDNSSYNTSKKSDMAEVKDWKAVRVDLVITPFEQYAYALLGWTGSREFGRDLRRYASHERKMILDNHGLYDRKKRIFLKAGSEEEIFAHLGLDYVEPWERNA

SEQ ID NO: 741 - DNA, 1182 bp, synthetic construct
  misc_feature 1..1182: note = Variant of terminal deoxynucleotidyl transferase
  source 1..1182: mol_type = other DNA
atgcaccatcatcatcatcatggcggtagcggccatccgccgagcaataccccggagggtggggtgccgagcgttatcgcccgcaaggttagtcagtacagctgccagcgcaagaccacgctgaataactacaacaaaaagtttaccgacgcgttcgagatcctggccgagaactacgaatttaaagagaacgaaatcttccgtctggaatttctgcgcgccgcgagtctgctgaaatatctgccgttcccggttacccgcatgaaagacatccaaggtctgccgtgcattggcgaccaagttcgtgacgtgatcgaggagatcatcgaagagggcgagagcagccgtgttaaagaagttctcaatgacgagcgctacaaggcctttaagcagttcaccagcgtgttcggtgtgggcgtgaaaaccagcgaaaagtggtttcgtatgggcctccgtacggttgaagagattaaggccagtaagagtctgaagctgagcaagatgcagaaggcgggctttctgtattacgaggatctggccagctgcgttagtaaagcggaagccgatgccgttacgctcatcgtgaagaacacggtgcgtacctttctgccggatgcgctggtgaccatcacgggcggtttccgccgtggcaaaaagatgggccacgacatcgactttctgatcacgaatccgggcccgaaagaggatgacgagctgctccacaaagtggttgatgggctcaagaagcaaggtctgctgctgtactgcgacatcatcgagagcacgttcgtggaggaacaactgccaagtcgcaaaatcgacgccatggacaacttccagaagtgcttcgccattctcaagctgtaccagccgggcgtggataacagcagctataacacgagtaagaagagtgacatggccgaggttaaggattggaaagcgatccgtgtggatctggtgatcacgccattcgagcagtacgcctatgcgctgctcggttggacgggcagccgcgaatttggtcgcgatctgcgccgctatgcgagtcatgagcgcaagatgatcctcgacaaccatggcctctacgaccgcaaaaagcgcatctttctgaaagcgggcagcgaagaagagattttcgcgcatctgggtctggattatgtggagccgtgggaacgcaacgcg

SEQ ID NO: 742 - protein, 394 aa, synthetic construct
  REGION 1..394: note = Variant of terminal deoxynucleotidyl transferase
MHHHHHHGGSGHPPSNTPEGGVPSVIARKVSQYSCQRKTTLNNYNKKFTDAFEILAENYEFKENEIFRLEFLRAASLLKYLPFPVTRMKDIQGLPCIGDQVRDVIEEIIEEGESSRVKEVLNDERYKAFKQFTSVFGVGVKTSEKWFRMGLRTVEEIKASKSLKLSKMQKAGFLYYEDLASCVSKAEADAVTLIVKNTVRTFLPDALVTITGGFRRGKKMGHDIDFLITNPGPKEDDELLHKVVDGLKKQGLLLYCDIIESTFVEEQLPSRKIDAMDNFQKCFAILKLYQPGVDNSSYNTSKKSDMAEVKDWKAIRVDLVITPFEQYAYALLGWTGSREFGRDLRRYASHERKMILDNHGLYDRKKRIFLKAGSEEEIFAHLGLDYVEPWERNA

SEQ ID NO: 743 - DNA, 1182 bp, synthetic construct
  misc_feature 1..1182: note = Variant of terminal deoxynucleotidyl transferase
  source 1..1182: mol_type = other DNA
atgcaccatcatcatcatcatggcggtagcggccatccgccgagcaataccccggagggtggggtgccgagcgttatcgcccgcaaggttagtcagtacagctgccagcgcaagaccacgctgaataactacaacaaaaagtttaccgacgcgttcgagatcctggccgagaactacgaatttaaagagaacgaaatcatgcgtctggaatttctgcgcgccgcgagtctgctgaaatatctgccgttcccggttacccgcatgaaagacatccaaggtctgccgtgcattggcgaccaagttcgtgacgtgatccgcgagatcatcgaagagggcgagagcagccgtgttaaagaagttctcaatgacgagcgctacaaggcctttaagcagttcaccagcgtgttcggtgtgggcgtgaaaaccagcgaaaagtggtttcgtatgggcctccgtacggttgaagagctgaaggccagtaagagtctgaagctgagcaagatgcagaaggcgggctttctgtattacgaggatctggccagctgcgttagtaaagcggaagccgatgccgttacgctcatcgtgaagaacacggtgcgtacctttctgccggatgcgctggtgaccatcacgggcggtttccgccgtggcaaaaagatgggccacgacatcgactttctgatcacgaatccgggcccgaaagaggatgacgagctgctccacaaagtggttgatgggctcaagaagcaaggtctgctgctgtactgcgacatcatcgagagcacgttcgtggaggaacaactgccaagtcgcaaaatcgacgccatggacaacttccagaagtgcttcgccattctcaagctgtaccagccgggcgtggataacagcagctataacacgagtaagaagagtgacatggccgaggttaaggattggaaagcggtccgtgtggatctggtgatcacgccattcgagcagtacgcctatgcgctgctcggttggacgggcagccgcgaatttggtcgcgatctgcgccgctatgcgagtcatgagcgcaagatgatcctcgacaaccatggcctctacgaccgcaaaaagcgcatctttctgaaagcgggcagcgaagaagagattttcgcgcatctgggtctggattatgtggagccgtgggaacgcaacgcg

SEQ ID NO: 744 - protein, 394 aa, synthetic construct
  REGION 1..394: note = Variant of terminal deoxynucleotidyl transferase
MHHHHHHGGSGHPPSNTPEGGVPSVIARKVSQYSCQRKTTLNNYNKKFTDAFEILAENYEFKENEIMRLEFLRAASLLKYLPFPVTRMKDIQGLPCIGDQVRDVIREIIEEGESSRVKEVLNDERYKAFKQFTSVFGVGVKTSEKWFRMGLRTVEELKASKSLKLSKMQKAGFLYYEDLASCVSKAEADAVTLIVKNTVRTFLPDALVTITGGFRRGKKMGHDIDFLITNPGPKEDDELLHKVVDGLKKQGLLLYCDIIESTFVEEQLPSRKIDAMDNFQKCFAILKLYQPGVDNSSYNTSKKSDMAEVKDWKAVRVDLVITPFEQYAYALLGWTGSREFGRDLRRYASHERKMILDNHGLYDRKKRIFLKAGSEEEIFAHLGLDYVEPWERNA

SEQ ID NO: 745 - DNA, 1182 bp, synthetic construct
  misc_feature 1..1182: note = Variant of terminal deoxynucleotidyl transferase
  source 1..1182: mol_type = other DNA
atgcaccatcatcatcatcatggcggtagcggccatccgccgagcaataccccggagggtggggtgccgagcgttatcgcccgcaaggttagtcagtacagctgccagcgcaagaccacgctgaataactacaacaaaaagtttaccgacgcgttcgagatcctggccgagaactacgaatttaaagagaacgaaatcgctcgtctggaatttctgcgcgccgcgagtctgctgaaatatctgccgttcccggttacccgcatgaaagacatccaaggtctgccgtgcattggcgaccaagttcgtgacgtgatcgaggagatcatcgaaaccggcgagagcagccgtgttaaagaagttctcaatgacgagcgctacaaggcctttaagcagttcaccagcgtgttcggtgtgggcgtgaaaaccagcgaaaagtggtttcgtatgggcctccgtacggttgaagagctgaaggccagtaagagtctgaagctgagcaagatgcagaaggcgggctttctgtattacgaggatctggccagctgcgttagtaaagcggaagccgatgccgttacgctcatcgtgaagaacacggtgcgtacctttctgccggatgcgctggtgaccatcacgggcggtttccgccgtggcaaaaagatgggccacgacatcgactttctgatcacgaatccgggcccgaaagaggatgacgagctgctccacaaagtggttgatgggctcaagaagcaaggtctgctgctgtactgcgacatcatcgagagcacgttcgtggaggaacaactgccaagtcgcaaaatcgacgccatggacaacttccagaagtgcttcgccattctcaagctgtaccagccgggcgtggataacagcagctataacacgagtaagaagagtgacatggccgaggttaaggattggaaagcggtccgtgtggatctggtgatcacgccattcgagcagtacgcctatgcgctgctcggttggacgggcagccgcgaatttggtcgcgatctgcgccgctatgcgagtcatgagcgcaagatgatcctcgacaaccatggcctctacgaccgcaaaaagcgcatctttctgaaagcgggcagcgaagaagagattttcgcgcatctgggtctggattatgtggagccgtgggaacgcaacgcg

SEQ ID NO: 746 - protein, 394 aa, synthetic construct
  REGION 1..394: note = Variant of terminal deoxynucleotidyl transferase
MHHHHHHGGSGHPPSNTPEGGVPSVIARKVSQYSCQRKTTLNNYNKKFTDAFEILAENYEFKENEIARLEFLRAASLLKYLPFPVTRMKDIQGLPCIGDQVRDVIEEIIETGESSRVKEVLNDERYKAFKQFTSVFGVGVKTSEKWFRMGLRTVEELKASKSLKLSKMQKAGFLYYEDLASCVSKAEADAVTLIVKNTVRTFLPDALVTITGGFRRGKKMGHDIDFLITNPGPKEDDELLHKVVDGLKKQGLLLYCDIIESTFVEEQLPSRKIDAMDNFQKCFAILKLYQPGVDNSSYNTSKKSDMAEVKDWKAVRVDLVITPFEQYAYALLGWTGSREFGRDLRRYASHERKMILDNHGLYDRKKRIFLKAGSEEEIFAHLGLDYVEPWERNA

SEQ ID NO: 747 - DNA, 1182 bp, synthetic construct
  misc_feature 1..1182: note = Variant of terminal deoxynucleotidyl transferase
  source 1..1182: mol_type = other DNA
atgcaccatcatcatcatcatggcggtagcggccatccgccgagcaataccccggagggtggggtgccgagcgttatcgcccgcaaggttagtcagtacagctgccagcgcaagaccacgctgaataactacaacaaaaagtttaccgacgcgttcgagatcctggccgagaactacgaatttaaagagaacgaaatcttccgtctggaatttctgcgcgccgcgagtctgctgaaatatctgccgttcccggttaccagtatgaaagacatccaaggtctgccgtgcattggcgaccaagttcgtgacgtgatcgaggagatcatcgaagagggcgagagcagccgtgttaaagaagttctcaatgacgagcgctacaaggcctttaagcagttcaccagcgtgttcggtgtgggcgtgaaaaccagcgaaaagtggtttcgtatgggcctccgtacggttgaagagattaaggccagtaagagtctgaagctgagcaagatgcagaaggcgggctttctgtattacgaggatctggccagctgcgttagtaaagcggaagccgatgccgttacgctcatcgtgaagaacacggtgcgtacctttctgccggatgcgctggtgaccatcacgggcggtttccgccgtggcaaaaagatgggccacgacatcgactttctgatcacgaatccgggcccgaaagaggatgacgagctgctccacaaagtggttgatgggctcaagaagcaaggtctgctgctgtactgcgacatcatcgagagcacgttcgtggaggaacaactgccaagtcgcaaaatcgacgccatggacaacttccagaagtgcttcgccattctcaagctgtaccagccgggcgtggataacagcagctataacacgagtaagaagagtgacatggccgaggttaaggattggaaagcgatccgtgtggatctggtgatcacgccattcgagcagtacgcctatgcgctgctcggttggacgggcagccgcgaatttggtcgcgatctgcgccgctatgcgagtcatgagcgcaagatgatcctcgacaaccatggcctctacgaccgcaaaaagcgcatctttctgaaagcgggcagcgaagaagagattttcgcgcatctgggtctggattatgtggagccgtgggaacgcaacgcg

SEQ ID NO: 748 - protein, 394 aa, synthetic construct
  REGION 1..394: note = Variant of terminal deoxynucleotidyl transferase
MHHHHHHGGSGHPPSNTPEGGVPSVIARKVSQYSCQRKTTLNNYNKKFTDAFEILAENYEFKENEIFRLEFLRAASLLKYLPFPVTSMKDIQGLPCIGDQVRDVIEEIIEEGESSRVKEVLNDERYKAFKQFTSVFGVGVKTSEKWFRMGLRTVEEIKASKSLKLSKMQKAGFLYYEDLASCVSKAEADAVTLIVKNTVRTFLPDALVTITGGFRRGKKMGHDIDFLITNPGPKEDDELLHKVVDGLKKQGLLLYCDIIESTFVEEQLPSRKIDAMDNFQKCFAILKLYQPGVDNSSYNTSKKSDMAEVKDWKAIRVDLVITPFEQYAYALLGWTGSREFGRDLRRYASHERKMILDNHGLYDRKKRIFLKAGSEEEIFAHLGLDYVEPWERNA

SEQ ID NO: 749 - DNA, 1182 bp, synthetic construct
  misc_feature 1..1182: note = Variant of terminal deoxynucleotidyl transferase
  source 1..1182: mol_type = other DNA
atgcaccatcatcatcatcatggcggtagcggccatccgccgagcaataccccggagggtggggtgccgagcgttatcgcccgcaaggttagtcagtacagctgccagcgcaagaccacgctgaataactacaacaaaaagtttaccgacgcgttcgagatcatggccgagaactacgaatttaaagagaacgaaatcttccgtctggaatttctgcgcgccgcgagtctgctgaaatatctgccgttcccggttacccgcatgaaagacatccaaggtctgccgtgcattggcgaccaagttcgtgacgtgatcgaggagatcatcgaagagggcgagagcagccgtgttaaagaagttctcaatgacgagcgctacaaggcctttaagcagttcaccagcgtgttcggtgtgggcgtgaaaaccagcgaaaagtggtttcgtatgggcctccgtacggttgaagaggcaaaggccagtaagagtctgaagctgagcaagatgcagaaggcgggctttctgtattacgaggatctggccagctgcgttagtaaagcggaagccgatgccgttacgctcatcgtgaagaacacggtgcgtacctttctgccggatgcgctggtgaccatcacgggcggtttccgccgtggcaaaaagatgggccacgacatcgactttctgatcacgaatccgggcccgaaagaggatgacgagctgctccacaaagtggttgatgggctcaagaagcaaggtctgctgctgtactgcgacatcatcgagagcacgttcgtggaggaacaactgccaagtcgcaaaatcgacgccatggacaacttccagaagtgcttcgccattctcaagctgtaccagccgggcgtggataacagcagctataacacgagtaagaagagtgacatggccgaggttaaggattggaaagcgatccgtgtggatctggtgatcacgccattcgagcagtacgcctatgcgctgctcggttggacgggcagccgcgaatttggtcgcgatctgcgccgctatgcgagtcatgagcgcaagatgatcctcgacaaccatggcctctacgaccgcaaaaagcgcatctttctgaaagcgggcagcgaagaagagattttcgcgcatctgggtctggattatgtggagccgtgggaacgcaacgcg

SEQ ID NO: 750 - protein, 394 aa, synthetic construct
  REGION 1..394: note = Variant of terminal deoxynucleotidyl transferase
MHHHHHHGGSGHPPSNTPEGGVPSVIARKVSQYSCQRKTTLNNYNKKFTDAFEIMAENYEFKENEIFRLEFLRAASLLKYLPFPVTRMKDIQGLPCIGDQVRDVIEEIIEEGESSRVKEVLNDERYKAFKQFTSVFGVGVKTSEKWFRMGLRTVEEAKASKSLKLSKMQKAGFLYYEDLASCVSKAEADAVTLIVKNTVRTFLPDALVTITGGFRRGKKMGHDIDFLITNPGPKEDDELLHKVVDGLKKQGLLLYCDIIESTFVEEQLPSRKIDAMDNFQKCFAILKLYQPGVDNSSYNTSKKSDMAEVKDWKAIRVDLVITPFEQYAYALLGWTGSREFGRDLRRYASHERKMILDNHGLYDRKKRIFLKAGSEEEIFAHLGLDYVEPWERNA

SEQ ID NO: 751 - DNA, 1182 bp, synthetic construct
  misc_feature 1..1182: note = Variant of terminal deoxynucleotidyl transferase
  source 1..1182: mol_type = other DNA
atgcaccatcatcatcatcatggcggtagcggccatccgccgagcaataccccggagggtggggtgccgagcgttatcgcccgcaaggttagtcagtacagctgccagcgcaagaccacgctgaataactacaacaaaaagtttaccgacgcgttcgagatcatggccgagaactacgaatttaaagagaacgaaatcttccgtctggaatttctgcgcgccgcgagtctgctgaaatatctgccgttcccggttacccgtatgaaagacatccaaggtctgccgtgcattggcgaccaagttcgtgacgtgatccgcgagatcatcgaagagggcgagagcagccgtgttaaagaagttctcaatgacgagcgctacaaggcctttaagcagttcaccagcgtgttcggtgtgggcgtgaaaaccagcgaaaagtggtttcgtatgggcctccgtacggttgaagagctgaaggccagtaagagtctgaagctgagcaagatgcagaaggcgggctttctgtattacgaggatctggccagctgcgttagtaaagcggaagccgatgccgttacgctcatcgtgaagaacacggtgcgtacctttctgccggatgcgctggtgaccatcacgggcggtttccgccgtggcaaaaagatgggccacgacatcgactttctgatcacgaatccgggcccgaaagaggatgacgagctgctccacaaagtggttgatgggctcaagaagcaaggtctgctgctgtactgcgacatcatcgagagcacgttcgtggaggaacaactgccaagtcgcaaaatcgacgccatggacaacttccagaagtgcttcgccattctcaagctgtaccagccgggcgtggataacagcagctataacacgagtaagaagagtgacatggccgaggttaaggattggaaagcggtccgtgtggatctggtgatcacgccattcgagcagtacgcctatgcgctgctcggttggacgggcagccgcgaatttggtcgcgatctgcgccgctatgcgagtcatgagcgcaagatgatcctcgacaaccatggcctctacgaccgcaaaaagcgcatctttctgaaagcgggcagcgaagaagagattttcgcgcatctgggtctggattatgtggagccgtgggaacgcaacgcg

SEQ ID NO: 752 - protein, 394 aa, synthetic construct
  REGION 1..394: note = Variant of terminal deoxynucleotidyl transferase
MHHHHHHGGSGHPPSNTPEGGVPSVIARKVSQYSCQRKTTLNNYNKKFTDAFEIMAENYEFKENEIFRLEFLRAASLLKYLPFPVTRMKDIQGLPCIGDQVRDVIREIIEEGESSRVKEVLNDERYKAFKQFTSVFGVGVKTSEKWFRMGLRTVEELKASKSLKLSKMQKAGFLYYEDLASCVSKAEADAVTLIVKNTVRTFLPDALVTITGGFRRGKKMGHDIDFLITNPGPKEDDELLHKVVDGLKKQGLLLYCDIIESTFVEEQLPSRKIDAMDNFQKCFAILKLYQPGVDNSSYNTSKKSDMAEVKDWKAVRVDLVITPFEQYAYALLGWTGSREFGRDLRRYASHERKMILDNHGLYDRKKRIFLKAGSEEEIFAHLGLDYVEPWERNA

SEQ ID NO: 753 - DNA, 1182 bp, synthetic construct
  misc_feature 1..1182: note = Variant of terminal deoxynucleotidyl transferase
  source 1..1182: mol_type = other DNA
atgcaccatcatcatcatcatggcggtagcggccatccgccgagcaataccccggagggtggggtgccgagcgttatcgcccgcaaggttagtcagtacagctgccagcgcaagaccacgctgaataactacaacaaaaagtttaccgacgcgttcgagatcctggccgagaactacgaatttaaagagaacgaaatcgctcgtctggaatttctgcgcgccgcgagtctgctgaaatatctgccgttcccggttacccgtatgaaagacatccaaggtctgccgtgcattggcgaccaagttcgtgacgtgatcgaggagatcatcgaaaccggcgagagcagccgtgttaaagaagttctcaatgacgagcgctacaaggcctttaagcagttcaccagcgtgttcggtgtgggcgtgaaaaccagcgaaaagtggtttcgtatgggcctccgtacggttgaagagctgaaggccagtaagagtctgaagctgagcaagatgcagaaggcgggctttctgtattacgaggatctggccagctgcgttagtaaagcggaagccgatgccgttacgctcatcgtgaagaacacggtgcgtacctttctgccggatgcgctggtgaccatcacgggcggtttccgccgtggcaaaaagatgggccacgacatcgactttctgatcacgaatccgggcccgaaagaggatgacgagctgctccacaaagtggttgatgggctcaagaagcaaggtctgctgctgtactgcgacatcatcgagagcacgttcgtggaggaacaactgccaagtcgcaaaatcgacgccatggacaacttccagaagtgcttcgccattctcaagctgtaccagccgggcgtggataacagcagctataacacgagtaagaagagtgacatggccgaggttaaggattggaaagcgatccgtgtggatctggtgatcacgccattcgagcagtacgcctatgcgctgctcggttggacgggcagccgcgaatttggtcgcgatctgcgccgctatgcgagtcatgagcgcaagatgatcctcgacaaccatggcctctacgaccgcaaaaagcgcatctttctgaaagcgggcagcgaagaagagattttcgcgcatctgggtctggattatgtggagccgtgggaacgcaacgcg

SEQ ID NO: 754 - protein, 394 aa, synthetic construct
  REGION 1..394: note = Variant of terminal deoxynucleotidyl transferase
MHHHHHHGGSGHPPSNTPEGGVPSVIARKVSQYSCQRKTTLNNYNKKFTDAFEILAENYEFKENEIARLEFLRAASLLKYLPFPVTRMKDIQGLPCIGDQVRDVIEEIIETGESSRVKEVLNDERYKAFKQFTSVFGVGVKTSEKWFRMGLRTVEELKASKSLKLSKMQKAGFLYYEDLASCVSKAEADAVTLIVKNTVRTFLPDALVTITGGFRRGKKMGHDIDFLITNPGPKEDDELLHKVVDGLKKQGLLLYCDIIESTFVEEQLPSRKIDAMDNFQKCFAILKLYQPGVDNSSYNTSKKSDMAEVKDWKAIRVDLVITPFEQYAYALLGWTGSREFGRDLRRYASHERKMILDNHGLYDRKKRIFLKAGSEEEIFAHLGLDYVEPWERNA

SEQ ID NO: 755 - DNA, 1182 bp, synthetic construct
  misc_feature 1..1182: note = Variant of terminal deoxynucleotidyl transferase
  source 1..1182: mol_type = other DNA
atgcaccatcatcatcatcatggcggtagcggccatccgccgagcaataccccggagggtggggtgccgagcgttatcgcccgcaaggttagtcagtacagctgccagcgcaagaccacgctgaataactacaacaaaaagtttaccgacgcgttcgagatcctggccgagaactacgaatttaaagagaacgaaatcaaccgtctggaatttctgcgcgccgcgagtctgctgaaatatctgccgttcccggttaccagtatgaaagacatccaaggtctgccgtgcattggcgaccaagttcgtgacgtgatcgaggagatcatcgaagagggcgagagcagccgtgttaaagaagttctcaatgacgagcgctacaaggcctttaagcagttcaccagcgtgttcggtgtgggcgtgaaaaccagcgaaaagtggtttcgtatgggcctccgtacggttgaagagctgaaggccagtaagagtctgaagctgagcaagatgcagaaggcgggctttctgtattacgaggatctggccagctgcgttagtaaagcggaagccgatgccgttacgctcatcgtgaagaacacggtgcgtacctttctgccggatgcgctggtgaccatcacgggcggtttccgccgtggcaaaaagatgggccacgacatcgactttctgatcacgaatccgggcccgaaagaggatgacgagctgctccacaaagtggttgatgggctcaagaagcaaggtctgctgctgtactgcgacatcatcgagagcacgttcgtggaggaacaactgccaagtcgcaaaatcgacgccatggacaacttccagaagtgcttcgccattctcaagctgtaccagccgggcgtggataacagcagctataacacgagtaagaagagtgacatggccgaggttaaggattggaaagcgatccgtgtggatctggtgatcacgccattcgagcagtacgcctatgcgctgctcggttggacgggcagccgcgaatttggtcgcgatctgcgccgctatgcgagtcatgagcgcaagatgatcctcgacaaccatggcctctacgaccgcaaaaagcgcatctttctgaaagcgggcagcgaagaagagattttcgcgcatctgggtctggattatgtggagccgtgggaacgcaacgcg

SEQ ID NO: 756 - protein, 394 aa, synthetic construct
  REGION 1..394: note = Variant of terminal deoxynucleotidyl transferase
MHHHHHHGGSGHPPSNTPEGGVPSVIARKVSQYSCQRKTTLNNYNKKFTDAFEILAENYEFKENEINRLEFLRAASLLKYLPFPVTSMKDIQGLPCIGDQVRDVIEEIIEEGESSRVKEVLNDERYKAFKQFTSVFGVGVKTSEKWFRMGLRTVEELKASKSLKLSKMQKAGFLYYEDLASCVSKAEADAVTLIVKNTVRTFLPDALVTITGGFRRGKKMGHDIDFLITNPGPKEDDELLHKVVDGLKKQGLLLYCDIIESTFVEEQLPSRKIDAMDNFQKCFAILKLYQPGVDNSSYNTSKKSDMAEVKDWKAIRVDLVITPFEQYAYALLGWTGSREFGRDLRRYASHERKMILDNHGLYDRKKRIFLKAGSEEEIFAHLGLDYVEPWERNA

SEQ ID NO: 757 - DNA, 1182 bp, synthetic construct
  misc_feature 1..1182: note = Variant of terminal deoxynucleotidyl transferase
  source 1..1182: mol_type = other DNA
atgcaccatcatcatcatcatggcggtagcggccatccgccgagcaataccccggagggtggggtgccgagcgttatcgcccgcaaggttagtcagtacagctgccagcgcaagaccacgctgaataactacaacaaaaagtttaccgacgcgttcgagatcatggccgagaactacgaatttaaagagaacgaaatcaaccgtctggaatttctgcgcgccgcgagtctgctgaaatatctgccgttcccggttaccagtatgaaagacatccaaggtctgccgtgcattggcgaccaagttcgtgacgtgatcgaggagatcatcgaagagggcgagagcagccgtgttaaagaagttctcaatgacgagcgctacaaggcctttaagcagttcaccagcgtgttcggtgtgggcgtgaaaaccagcgaaaagtggtttcgtatgggcctccgtacggttgaagagctgaaggccagtaagagtctgaagctgagcaagatgcagaaggcgggctttctgtattacgaggatctggccagctgcgttagtaaagcggaagccgatgccgttacgctcatcgtgaagaacacggtgcgtacctttctgccggatgcgctggtgaccatcacgggcggtttccgccgtggcaaaaagatgggccacgacatcgactttctgatcacgaatccgggcccgaaagaggatgacgagctgctccacaaagtggttgatgggctcaagaagcaaggtctgctgctgtactgcgacatcatcgagagcacgttcgtggaggaacaactgccaagtcgcaaaatcgacgccatggacaacttccagaagtgcttcgccattctcaagctgtaccagccgggcgtggataacagcagctataacacgagtaagaagagtgacatggccgaggttaaggattggaaagcggtccgtgtggatctggtgatcacgccattcgagcagtacgcctatgcgctgctcggttggacgggcagccgcgaatttggtcgcgatctgcgccgctatgcgagtcatgagcgcaagatgatcctcgacaaccatggcctctacgaccgcaaaaagcgcatctttctgaaagcgggcagcgaagaagagattttcgcgcatctgggtctggattatgtggagccgtgggaacgcaacgcg

SEQ ID NO: 758 - protein, 394 aa, synthetic construct
  REGION 1..394: note = Variant of terminal deoxynucleotidyl transferase
MHHHHHHGGSGHPPSNTPEGGVPSVIARKVSQYSCQRKTTLNNYNKKFTDAFEIMAENYEFKENEINRLEFLRAASLLKYLPFPVTSMKDIQGLPCIGDQVRDVIEEIIEEGESSRVKEVLNDERYKAFKQFTSVFGVGVKTSEKWFRMGLRTVEELKASKSLKLSKMQKAGFLYYEDLASCVSKAEADAVTLIVKNTVRTFLPDALVTITGGFRRGKKMGHDIDFLITNPGPKEDDELLHKVVDGLKKQGLLLYCDIIESTFVEEQLPSRKIDAMDNFQKCFAILKLYQPGVDNSSYNTSKKSDMAEVKDWKAVRVDLVITPFEQYAYALLGWTGSREFGRDLRRYASHERKMILDNHGLYDRKKRIFLKAGSEEEIFAHLGLDYVEPWERNA

SEQ ID NO: 759 - DNA, 1182 bp, synthetic construct
  misc_feature 1..1182: note = Variant of terminal deoxynucleotidyl transferase
  source 1..1182: mol_type = other DNA
atgcaccatcatcatcatcatggcggtagcggccatccgccgagcaataccccggagggtggggtgccgagcgttatcgcccgcaaggttagtcagtacagctgccagcgcaagaccacgctgaataactacaacaaaaagtttaccgacgcgttcgagatcctggccgagaactacgaatttaaagagaacgaaatcaaccgtctggaatttctgcgcgccgcgagtctgctgaaatatctgccgttcccggttaccagtatgaaagacatccaaggtctgccgtgcattggcgaccaagttcgtgacgtgatccgcgagatcatcgaaaccggcgagagcagccgtgttaaagaagttctcaatgacgagcgctacaaggcctttaagcagttcaccagcgtgttcggtgtgggcgtgaaaaccagcgaaaagtggtttcgtatgggcctccgtacggttgaagagctgaaggccagtaagagtctgaagctgagcaagatgcagaaggcgggctttctgtattacgaggatctggccagctgcgttagtaaagcggaagccgatgccgttacgctcatcgtgaagaacacggtgcgtacctttctgccggatgcgctggtgaccatcacgggcggtttccgccgtggcaaaaagatgggccacgacatcgactttctgatcacgaatccgggcccgaaagaggatgacgagctgctccacaaagtggttgatgggctcaagaagcaaggtctgctgctgtactgcgacatcatcgagagcacgttcgtggaggaacaactgccaagtcgcaaaatcgacgccatggacaacttccagaagtgcttcgccattctcaagctgtaccagccgggcgtggataacagcagctataacacgagtaagaagagtgacatggccgaggttaaggattggaaagcggtccgtgtggatctggtgatcacgccattcgagcagtacgcctatgcgctgctcggttggacgggcagccgcgaatttggtcgcgatctgcgccgctatgcgagtcatgagcgcaagatgatcctcgacaaccatggcctctacgaccgcaaaaagcgcatctttctgaaagcgggcagcgaagaagagattttcgcgcatctgggtctggattatgtggagccgtgggaacgcaacgcg

SEQ ID NO: 760 - protein, 394 aa, synthetic construct
  REGION 1..394: note = Variant of terminal deoxynucleotidyl transferase
MHHHHHHGGSGHPPSNTPEGGVPSVIARKVSQYSCQRKTTLNNYNKKFTDAFEILAENYEFKENEINRLEFLRAASLLKYLPFPVTSMKDIQGLPCIGDQVRDVIREIIETGESSRVKEVLNDERYKAFKQFTSVFGVGVKTSEKWFRMGLRTVEELKASKSLKLSKMQKAGFLYYEDLASCVSKAEADAVTLIVKNTVRTFLPDALVTITGGFRRGKKMGHDIDFLITNPGPKEDDELLHKVVDGLKKQGLLLYCDIIESTFVEEQLPSRKIDAMDNFQKCFAILKLYQPGVDNSSYNTSKKSDMAEVKDWKAVRVDLVITPFEQYAYALLGWTGSREFGRDLRRYASHERKMILDNHGLYDRKKRIFLKAGSEEEIFAHLGLDYVEPWERNA

SEQ ID NO: 761 - DNA, 1182 bp, synthetic construct
  misc_feature 1..1182: note = Variant of terminal deoxynucleotidyl transferase
  source 1..1182: mol_type = other DNA
atgcaccatcatcatcatcatggcggtagcggccatccgccgagcaataccccggagggtggggtgccgagcgttatcgcccgcaaggttagtcagtacagctgccagcgcaagaccacgctgaataactacaacaaaaagtttaccgacgcgttcgagatcatggccgagaactacgaatttaaagagaacgaaatctttcgtctggaatttctgcgcgccgcgagtctgctgaaatatctgccgttcccggttacccgtatgaaagacatccaaggtctgccgtgcattggcgaccaagttcgtgacgtgatcgaggagatcatcgaagagggcgagagcagccgtgttaaagaagttctcaatgacgagcgctacaaggcctttaagcagttcaccagcgtgttcggtgtgggcgtgaaaaccagcgaaaagtggtttcgtatgggcctccgtacggttgaagagctgaaggccagtaagagtctgaagctgagcaagatgcagaaggcgggctttctgtattacgaggatctggccagctgcgttagtaaagcggaagccgatgccgttacgctcatcgtgaagaacacggtgcgtacctttctgccggatgcgctggtgaccatcacgggcggtttccgccgtggcaaaaagatgggccacgacatcgactttctgatcacgaatccgggcccgaaagaggatgacgagctgctccacaaagtggttgatgggctcaagaagcaaggtctgctgctgtactgcgacatcatcgagagcacgttcgtggaggaacaactgccaagtcgcaaaatcgacgccatggacaacttccagaagtgcttcgccattctcaagctgtaccagccgggcgtggataacagcagctataacacgagtaagaagagtgacatggccgaggttaaggattggaaagcggtccgtgtggatctggtgatcacgccattcgagcagtacgcctatgcgctgctcggttggacgggcagccgcgaatttggtcgcgatctgcgccgctatgcgagtcatgagcgcaagatgatcctcgacaaccatggcctctacgaccgcaaaaagcgcatctttctgaaagcgggcagcgaagaagagattttcgcgcatctgggtctggattatgtggagccgtgggaacgcaacgcg

SEQ ID NO: 762 - protein, 394 aa, synthetic construct
  REGION 1..394: note = Variant of terminal deoxynucleotidyl transferase
MHHHHHHGGSGHPPSNTPEGGVPSVIARKVSQYSCQRKTTLNNYNKKFTDAFEIMAENYEFKENEIFRLEFLRAASLLKYLPFPVTRMKDIQGLPCIGDQVRDVIEEIIEEGESSRVKEVLNDERYKAFKQFTSVFGVGVKTSEKWFRMGLRTVEELKASKSLKLSKMQKAGFLYYEDLASCVSKAEADAVTLIVKNTVRTFLPDALVTITGGFRRGKKMGHDIDFLITNPGPKEDDELLHKVVDGLKKQGLLLYCDIIESTFVEEQLPSRKIDAMDNFQKCFAILKLYQPGVDNSSYNTSKKSDMAEVKDWKAVRVDLVITPFEQYAYALLGWTGSREFGRDLRRYASHERKMILDNHGLYDRKKRIFLKAGSEEEIFAHLGLDYVEPWERNA

SEQ ID NO: 763 - DNA, 1182 bp, synthetic construct
  misc_feature 1..1182: note = Variant of terminal deoxynucleotidyl transferase
  source 1..1182: mol_type = other DNA
atgcaccatcatcatcatcatggcggtagcggccatccgccgagcaataccccggagggtggggtgccgagcgttatcgcccgcaaggttagtcagtacagctgccagcgcaagaccacgctgaataactacaacaaaaagtttaccgacgcgttcgagatcatggccgagaactacgaatttaaagagaacgaaatcgctcgtctggaatttctgcgcgccgcgagtctgctgaaatatctgccgttcccggttacccgtatgaaagacatccaaggtctgccgtgcattggcgaccaagttcgtgacgtgatccgcgagatcatcgaaaccggcgagagcagccgtgttaaagaagttctcaatgacgagcgctacaaggcctttaagcagttcaccagcgtgttcggtgtgggcgtgaaaaccagcgaaaagtggtttcgtatgggcctccgtacggttgaagagctgaaggccagtaagagtctgaagctgagcaagatgcagaaggcgggctttctgtattacgaggatctggccagctgcgttagtaaagcggaagccgatgccgttacgctcatcgtgaagaacacggtgcgtacctttctgccggatgcgctggtgaccatcacgggcggtttccgccgtggcaaaaagatgggccacgacatcgactttctgatcacgaatccgggcccgaaagaggatgacgagctgctccacaaagtggttgatgggctcaagaagcaaggtctgctgctgtactgcgacatcatcgagagcacgttcgtggaggaacaactgccaagtcgcaaaatcgacgccatggacaacttccagaagtgcttcgccattctcaagctgtaccagccgggcgtggataacagcagctataacacgagtaagaagagtgacatggccgaggttaaggattggaaagcggtccgtgtggatctggtgatcacgccattcgagcagtacgcctatgcgctgctcggttggacgggcagccgcgaatttggtcgcgatctgcgccgctatgcgagtcatgagcgcaagatgatcctcgacaaccatggcctctacgaccgcaaaaagcgcatctttctgaaagcgggcagcgaagaagagattttcgcgcatctgggtctggattatgtggagccgtgggaacgcaacgcg

SEQ ID NO: 764 - protein, 394 aa, synthetic construct
  REGION 1..394: note = Variant of terminal deoxynucleotidyl transferase
MHHHHHHGGSGHPPSNTPEGGVPSVIARKVSQYSCQRKTTLNNYNKKFTDAFEIMAENYEFKENEIARLEFLRAASLLKYLPFPVTRMKDIQGLPCIGDQVRDVIREIIETGESSRVKEVLNDERYKAFKQFTSVFGVGVKTSEKWFRMGLRTVEELKASKSLKLSKMQKAGFLYYEDLASCVSKAEADAVTLIVKNTVRTFLPDALVTITGGFRRGKKMGHDIDFLITNPGPKEDDELLHKVVDGLKKQGLLLYCDIIESTFVEEQLPSRKIDAMDNFQKCFAILKLYQPGVDNSSYNTSKKSDMAEVKDWKAVRVDLVITPFEQYAYALLGWTGSREFGRDLRRYASHERKMILDNHGLYDRKKRIFLKAGSEEEIFAHLGLDYVEPWERNA

SEQ ID NO: 765 - DNA, 1182 bp, synthetic construct
  misc_feature 1..1182: note = Variant of terminal deoxynucleotidyl transferase
  source 1..1182: mol_type = other DNA
atgcaccatcatcatcatcatggcggtagcggccatccgccgagcaataccccggagggtggggtgccgagcgttatcgcccgcaaggttagtcagtacagctgccagcgcaagaccacgctgaataactacaacaaaaagtttaccgacgcgttcgagatcatggccgagaactacgaatttaaagagaacgaaatcatgcgtctggaatttctgcgcgccgcgagtctgctgaaatatctgccgttcccggttacccgcatgaaagacatccaaggtctgccgtgcattggcgaccaagttcgtgacgtgatcgaggagatcatcgaaaccggcgagagcagccgtgttaaagaagttctcaatgacgagcgctacaaggcctttaagcagttcaccagcgtgttcggtgtgggcgtgaaaaccagcgaaaagtggtttcgtatgggcctccgtacggttgaagagctgaaggccagtaagagtctgaagctgagcaagatgcagaaggcgggctttctgtattacgaggatctggccagctgcgttagtaaagcggaagccgatgccgttacgctcatcgtgaagaacacggtgcgtacctttctgccggatgcgctggtgaccatcacgggcggtttccgccgtggcaaaaagatgggccacgacatcgactttctgatcacgaatccgggcccgaaagaggatgacgagctgctccacaaagtggttgatgggctcaagaagcaaggtctgctgctgtactgcgacatcatcgagagcacgttcgtggaggaacaactgccaagtcgcaaaatcgacgccatggacaacttccagaagtgcttcgccattctcaagctgtaccagccgggcgtggataacagcagctataacacgagtaagaagagtgacatggccgaggttaaggattggaaagcggtccgtgtggatctggtgatcacgccattcgagcagtacgcctatgcgctgctcggttggacgggcagccgcgaatttggtcgcgatctgcgccgctatgcgagtcatgagcgcaagatgatcctcgacaaccatggcctctacgaccgcaaaaagcgcatctttctgaaagcgggcagcgaagaagagattttcgcgcatctgggtctggattatgtggagccgtgggaacgcaacgcg

SEQ ID NO: 766 - protein, 394 aa, synthetic construct
  REGION 1..394: note = Variant of terminal deoxynucleotidyl transferase
MHHHHHHGGSGHPPSNTPEGGVPSVIARKVSQYSCQRKTTLNNYNKKFTDAFEIMAENYEFKENEIMRLEFLRAASLLKYLPFPVTRMKDIQGLPCIGDQVRDVIEEIIETGESSRVKEVLNDERYKAFKQFTSVFGVGVKTSEKWFRMGLRTVEELKASKSLKLSKMQKAGFLYYEDLASCVSKAEADAVTLIVKNTVRTFLPDALVTITGGFRRGKKMGHDIDFLITNPGPKEDDELLHKVVDGLKKQGLLLYCDIIESTFVEEQLPSRKIDAMDNFQKCFAILKLYQPGVDNSSYNTSKKSDMAEVKDWKAVRVDLVITPFEQYAYALLGWTGSREFGRDLRRYASHERKMILDNHGLYDRKKRIFLKAGSEEEIFAHLGLDYVEPWERNA

SEQ ID NO: 767 - DNA, 1182 bp, synthetic construct
  misc_feature 1..1182: note = Variant of terminal deoxynucleotidyl transferase
  source 1..1182: mol_type = other DNA
atgcaccatcatcatcatcatggcggtagcggccatccgccgagcaataccccggagggtggggtgccgagcgttatcgcccgcaaggttagtcagtacagctgccagcgcaagaccacgctgaataactacaacaaaaagtttaccgacgcgttcgagatcatggccgagaactacgaatttaaagagaacgaaatcatgcgtctggaatttctgcgcgccgcgagtctgctgaaatatctgccgttcccggttacccgtatgaaagacatccaaggtctgccgtgcattggcgaccaagttcgtgacgtgatcgaggagatcatcgaagagggcgagagcagccgtgttaaagaagttctcaatgacgagcgctacaaggcctttaagcagttcaccagcgtgttcggtgtgggcgtgaaaaccagcgaaaagtggtttcgtatgggcctccgtacggttgaagagctgaaggccagtaagagtctgaagctgagcaagatgcagaaggcgggctttctgtattacgaggatctggccagctgcgttagtaaagcggaagccgatgccgttacgctcatcgtgaagaacacggtgcgtacctttctgccggatgcgctggtgaccatcacgggcggtttccgccgtggcaaaaagatgggccacgacatcgactttctgatcacgaatccgggcccgaaagaggatgacgagctgctccacaaagtggttgatgggctcaagaagcaaggtctgctgctgtactgcgacatcatcgagagcacgttcgtggaggaacaactgccaagtcgcaaaatcgacgccatggacaacttccagaagtgcttcgccattctcaagctgtaccagccgggcgtggataacagcagctataacacgagtaagaagagtgacatggccgaggttaaggattggaaagcgatccgtgtggatctggtgatcacgccattcgagcagtacgcctatgcgctgctcggttggacgggcagccgcgaatttggtcgcgatctgcgccgctatgcgagtcatgagcgcaagatgatcctcgacaaccatggcctctacgaccgcaaaaagcgcatctttctgaaagcgggcagcgaagaagagattttcgcgcatctgggtctggattatgtggagccgtgggaacgcaacgcg

SEQ ID NO: 768 - protein, 394 aa, synthetic construct
  REGION 1..394: note = Variant of terminal deoxynucleotidyl transferase
MHHHHHHGGSGHPPSNTPEGGVPSVIARKVSQYSCQRKTTLNNYNKKFTDAFEIMAENYEFKENEIMRLEFLRAASLLKYLPFPVTRMKDIQGLPCIGDQVRDVIEEIIEEGESSRVKEVLNDERYKAFKQFTSVFGVGVKTSEKWFRMGLRTVEELKASKSLKLSKMQKAGFLYYEDLASCVSKAEADAVTLIVKNTVRTFLPDALVTITGGFRRGKKMGHDIDFLITNPGPKEDDELLHKVVDGLKKQGLLLYCDIIESTFVEEQLPSRKIDAMDNFQKCFAILKLYQPGVDNSSYNTSKKSDMAEVKDWKAIRVDLVITPFEQYAYALLGWTGSREFGRDLRRYASHERKMILDNHGLYDRKKRIFLKAGSEEEIFAHLGLDYVEPWERNA

SEQ ID NO: 769 - DNA, 1182 bp, synthetic construct
  misc_feature 1..1182: note = Variant of terminal deoxynucleotidyl transferase
  source 1..1182: mol_type = other DNA
atgcaccatcatcatcatcatggcggtagcggccatccgccgagcaataccccggagggtggggtgccgagcgttatcgcccgcaaggttagtcagtacagctgccagcgcaagaccacgctgaataactacaacaaaaagtttaccgacgcgttcgagatcctggccgagaactacgaatttaaagagaacgaaatcgatcgtctggaatttctgcgcgccgcgagtctgctgaaatatctgccgttcccggttacccgcatgaaagacatccaaggtctgccgtgcattggcgaccaagttcgtgacgtgatcgaggagatcatcgaagagggcgagagcagccgtgttaaagaagttctcaatgacgagcgctacaaggcctttaagcagttcaccagcgtgttcggtgtgggcgtgaaaaccagcgaaaagtggtttcgtatgggcctccgtacggttgaagagctgaaggccagtaagagtctgaagctgagcaagatgcagaaggcgggctttctgtattacgaggatctggccagctgcgttagtaaagcggaagccgatgccgttacgctcatcgtgaagaacacggtgcgtacctttctgccggatgcgctggtgaccatcacgggcggtttccgccgtggcaaaaagatgggccacgacatcgactttctgatcacgaatccgggcccgaaagaggatgacgagctgctccacaaagtggttgatgggctcaagaagcaaggtctgctgctgtactgcgacatcatcgagagcacgttcgtggaggaacaactgccaagtcgcaaaatcgacgccatggacaacttccagaagtgcttcgccattctcaagctgtaccagccgggcgtggataacagcagctataacacgagtaagaagagtgacatggccgaggttaaggattggaaagcgatccgtgtggatctggtgatcacgccattcgagcagtacgcctatgcgctgctcggttggacgggcagccgcgaatttggtcgcgatctgcgccgctatgcgagtcatgagcgcaagatgatcctcgacaaccatggcctctacgaccgcaaaaagcgcatctttctgaaagcgggcagcgaagaagagattttcgcgcatctgggtctggattatgtggagccgtgggaacgcaacgcg

SEQ ID NO: 770 - protein, 394 aa, synthetic construct
  REGION 1..394: note = Variant of terminal deoxynucleotidyl transferase
MHHHHHHGGSGHPPSNTPEGGVPSVIARKVSQYSCQRKTTLNNYNKKFTDAFEILAENYEFKENEIDRLEFLRAASLLKYLPFPVTRMKDIQGLPCIGDQVRDVIEEIIEEGESSRVKEVLNDERYKAFKQFTSVFGVGVKTSEKWFRMGLRTVEELKASKSLKLSKMQKAGFLYYEDLASCVSKAEADAVTLIVKNTVRTFLPDALVTITGGFRRGKKMGHDIDFLITNPGPKEDDELLHKVVDGLKKQGLLLYCDIIESTFVEEQLPSRKIDAMDNFQKCFAILKLYQPGVDNSSYNTSKKSDMAEVKDWKAIRVDLVITPFEQYAYALLGWTGSREFGRDLRRYASHERKMILDNHGLYDRKKRIFLKAGSEEEIFAHLGLDYVEPWERNA

SEQ ID NO: 771 - DNA, 1182 bp, synthetic construct
  misc_feature 1..1182: note = Variant of terminal deoxynucleotidyl transferase
  source 1..1182: mol_type = other DNA
atgcaccatcatcatcatcatggcggtagcggccatccgccgagcaataccccggagggtggggtgccgagcgttatcgcccgcaaggttagtcagtacagctgccagcgcaagaccacgctgaataactacaacaaaaagtttaccgacgcgttcgagatcatggccgagaactacgaatttaaagagaacgaaatcaaccgtctggaatttctgcgcgccgcgagtctgctgaaatatctgccgttcccggttacccgtatgaaagacatccaaggtctgccgtgcattggcgaccaagttcgtgacgtgatccgcgagatcatcgaagagggcgagagcagccgtgttaaagaagttctcaatgacgagcgctacaaggcctttaagcagttcaccagcgtgttcggtgtgggcgtgaaaaccagcgaaaagtggtttcgtatgggcctccgtacggttgaagagctgaaggccagtaagagtctgaagctgagcaagatgcagaaggcgggctttctgtattacgaggatctggccagctgcgttagtaaagcggaagccgatgccgttacgctcatcgtgaagaacacggtgcgtacctttctgccggatgcgctggtgaccatcacgggcggtttccgccgtggcaaaaagatgggccacgacatcgactttctgatcacgaatccgggcccgaaagaggatgacgagctgctccacaaagtggttgatgggctcaagaagcaaggtctgctgctgtactgcgacatcatcgagagcacgttcgtggaggaacaactgccaagtcgcaaaatcgacgccatggacaacttccagaagtgcttcgccattctcaagctgtaccagccgggcgtggataacagcagctataacacgagtaagaagagtgacatggccgaggttaaggattggaaagcgatccgtgtggatctggtgatcacgccattcgagcagtacgcctatgcgctgctcggttggacgggcagccgcgaatttggtcgcgatctgcgccgctatgcgagtcatgagcgcaagatgatcctcgacaaccatggcctctacgaccgcaaaaagcgcatctttctgaaagcgggcagcgaagaagagattttcgcgcatctgggtctggattatgtggagccgtgggaacgcaacgcg

SEQ ID NO: 772 - protein, 394 aa, synthetic construct
  REGION 1..394: note = Variant of terminal deoxynucleotidyl transferase
MHHHHHHGGSGHPPSNTPEGGVPSVIARKVSQYSCQRKTTLNNYNKKFTDAFEIMAENYEFKENEINRLEFLRAASLLKYLPFPVTRMKDIQGLPCIGDQVRDVIREIIEEGESSRVKEVLNDERYKAFKQFTSVFGVGVKTSEKWFRMGLRTVEELKASKSLKLSKMQKAGFLYYEDLASCVSKAEADAVTLIVKNTVRTFLPDALVTITGGFRRGKKMGHDIDFLITNPGPKEDDELLHKVVDGLKKQGLLLYCDIIESTFVEEQLPSRKIDAMDNFQKCFAILKLYQPGVDNSSYNTSKKSDMAEVKDWKAIRVDLVITPFEQYAYALLGWTGSREFGRDLRRYASHERKMILDNHGLYDRKKRIFLKAGSEEEIFAHLGLDYVEPWERNA

SEQ ID NO: 773 - DNA, 1182 bp, synthetic construct
  misc_feature 1..1182: note = Variant of terminal deoxynucleotidyl transferase
  source 1..1182: mol_type = other DNA
atgcaccatcatcatcatcatggcggtagcggccatccgccgagcaataccccggagggtggggtgccgagcgttatcgcccgcaaggttagtcagtacagctgccagcgcaagaccacgctgaataactacaacaaaaagtttaccgacgcgttcgagatcatggccgagaactacgaatttaaagagaacgaaatcgatcgtctggaatttctgcgcgccgcgagtctgctgaaatatctgccgttcccggttacccgcatgaaagacatccaaggtctgccgtgcattggcgaccaagttcgtgacgtgatcgaggagatcatcgaagagggcgagagcagccgtgttaaagaagttctcaatgacgagcgctacaaggcctttaagcagttcaccagcgtgttcggtgtgggcgtgaaaaccagcgaaaagtggtttcgtatgggcctccgtacggttgaagagctgaaggccagtaagagtctgaagctgagcaagatgcagaaggcgggctttctgtattacgaggatctggccagctgcgttagtaaagcggaagccgatgccgttacgctcatcgtgaagaacacggtgcgtacctttctgccggatgcgctggtgaccatcacgggcggtttccgccgtggcaaaaagatgggccacgacatcgactttctgatcacgaatccgggcccgaaagaggatgacgagctgctccacaaagtggttgatgggctcaagaagcaaggtctgctgctgtactgcgacatcatcgagagcacgttcgtggaggaacaactgccaagtcgcaaaatcgacgccatggacaacttccagaagtgcttcgccattctcaagctgtaccagccgggcgtggataacagcagctataacacgagtaagaagagtgacatggccgaggttaaggattggaaagcgatccgtgtggatctggtgatcacgccattcgagcagtacgcctatgcgctgctcggttggacgggcagccgcgaatttggtcgcgatctgcgccgctatgcgagtcatgagcgcaagatgatcctcgacaaccatggcctctacgaccgcaaaaagcgcatctttctgaaagcgggcagcgaagaagagattttcgcgcatctgggtctggattatgtggagccgtgggaacgcaacgcg

SEQ ID NO: 774 - protein, 394 aa, synthetic construct
  REGION 1..394: note = Variant of terminal deoxynucleotidyl transferase
MHHHHHHGGSGHPPSNTPEGGVPSVIARKVSQYSCQRKTTLNNYNKKFTDAFEIMAENYEFKENEIDRLEFLRAASLLKYLPFPVTRMKDIQGLPCIGDQVRDVIEEIIEEGESSRVKEVLNDERYKAFKQFTSVFGVGVKTSEKWFRMGLRTVEELKASKSLKLSKMQKAGFLYYEDLASCVSKAEADAVTLIVKNTVRTFLPDALVTITGGFRRGKKMGHDIDFLITNPGPKEDDELLHKVVDGLKKQGLLLYCDIIESTFVEEQLPSRKIDAMDNFQKCFAILKLYQPGVDNSSYNTSKKSDMAEVKDWKAIRVDLVITPFEQYAYALLGWTGSREFGRDLRRYASHERKMILDNHGLYDRKKRIFLKAGSEEEIFAHLGLDYVEPWERNA

SEQ ID NO: 775 - DNA, 1182 bp, synthetic construct
  misc_feature 1..1182: note = Variant of terminal deoxynucleotidyl transferase
  source 1..1182: mol_type = other DNA
atgcaccatcatcatcatcatggcggtagcggccatccgccgagcaataccccggagggtggggtgccgagcgttatcgcccgcaaggttagtcagtacagctgccagcgcaagaccacgctgaataactacaacaaaaagtttaccgacgcgttcgagatcctggccgagaactacgaatttaaagagaacgaaatcttccgtctggaatttctgcgcgccgcgagtctgctgaaatatctgccgttcccggttacccgtatgaaagacatccaaggtctgccgtgcattggcgaccaagttcgtgacgtgatcgaggagatcatcgaagagggcgagagcagccgtgttaaagaagttctcaatgacgagcgctacaaggcctttaagcagttcaccagcgtgttcggtgtgggcgtgaaaaccagcgaaaagtggtttcgtatgggcctccgtacggttgaagagctgaaggccagtaagagtctgaagctgagcaagatgcagaaggcgggctttctgtattacgaggatctggccagctgcgttagtaaagcggaagccgatgccgttacgctcatcgtgaagaacacggtgcgtacctttctgccggatgcgctggtgaccatcacgggcggtttccgccgtggcaaaaagatgggccacgacatcgactttctgatcacgaatccgggcccgaaagaggatgacgagctgctccacaaagtggttgatgggctcaagaagcaaggtctgctgctgtactgcgacatcatcgagagcacgttcgtggaggaacaactgccaagtcgcaaaatcgacgccatggacaacttccagaagtgcttcgccattctcaagctgtaccagccgggcgtggataacagcagctataacacgagtaagaagagtgacatggccgaggttaaggattggaaagcggtccgtgtggatctggtgatcacgccattcgagcagtacgcctatgcgctgctcggttggacgggcagccgcgaatttggtcgcgatctgcgccgctatgcgagtcatgagcgcaagatgatcctcgacaaccatggcctctacgaccgcaaaaagcgcatctttctgaaagcgggcagcgaagaagagattttcgcgcatctgggtctggattatgtggagccgtgggaacgcaacgcg

SEQ ID NO: 776 - protein, 394 aa, synthetic construct
  REGION 1..394: note = Variant of terminal deoxynucleotidyl transferase
MHHHHHHGGSGHPPSNTPEGGVPSVIARKVSQYSCQRKTTLNNYNKKFTDAFEILAENYEFKENEIFRLEFLRAASLLKYLPFPVTRMKDIQGLPCIGDQVRDVIEEIIEEGESSRVKEVLNDERYKAFKQFTSVFGVGVKTSEKWFRMGLRTVEELKASKSLKLSKMQKAGFLYYEDLASCVSKAEADAVTLIVKNTVRTFLPDALVTITGGFRRGKKMGHDIDFLITNPGPKEDDELLHKVVDGLKKQGLLLYCDIIESTFVEEQLPSRKIDAMDNFQKCFAILKLYQPGVDNSSYNTSKKSDMAEVKDWKAVRVDLVITPFEQYAYALLGWTGSREFGRDLRRYASHERKMILDNHGLYDRKKRIFLKAGSEEEIFAHLGLDYVEPWERNA

SEQ ID NO: 777 - DNA, 1182 bp, synthetic construct
  misc_feature 1..1182: note = Variant of terminal deoxynucleotidyl transferase
  source 1..1182: mol_type = other DNA
atgcaccatcatcatcatcatggcggtagcggccatccgccgagcaataccccggagggtggggtgccgagcgttatcgcccgcaaggttagtcagtacagctgccagcgcaagaccacgctgaataactacaacaaaaagtttaccgacgcgttcgagatcctggccgagaactacgaatttaaagagaacgaaatcttccgtctggaatttctgcgcgccgcgagtctgctgaaatatctgccgttcccggttaccagtatgaaagacatccaaggtctgccgtgcattggcgaccaagttcgtgacgtgatccgcgagatcatcgaagagggcgagagcagccgtgttaaagaagttctcaatgacgagcgctacaaggcctttaagcagttcaccagcgtgttcggtgtgggcgtgaaaaccagcgaaaagtggtttcgtatgggcctccgtacggttgaagagctgaaggccagtaagagtctgaagctgagcaagatgcagaaggcgggctttctgtattacgaggatctggccagctgcgttagtaaagcggaagccgatgccgttacgctcatcgtgaagaacacggtgcgtacctttctgccggatgcgctggtgaccatcacgggcggtttccgccgtggcaaaaagatgggccacgacatcgactttctgatcacgaatccgggcccgaaagaggatgacgagctgctccacaaagtggttgatgggctcaagaagcaaggtctgctgctgtactgcgacatcatcgagagcacgttcgtggaggaacaactgccaagtcgcaaaatcgacgccatggacaacttccagaagtgcttcgccattctcaagctgtaccagccgggcgtggataacagcagctataacacgagtaagaagagtgacatggccgaggttaaggattggaaagcggtccgtgtggatctggtgatcacgccattcgagcagtacgcctatgcgctgctcggttggacgggcagccgcgaatttggtcgcgatctgcgccgctatgcgagtcatgagcgcaagatgatcctcgacaaccatggcctctacgaccgcaaaaagcgcatctttctgaaagcgggcagcgaagaagagattttcgcgcatctgggtctggattatgtggagccgtgggaacgcaacgcg

SEQ ID NO: 778 - protein, 394 aa, synthetic construct
  REGION 1..394: note = Variant of terminal deoxynucleotidyl transferase
MHHHHHHGGSGHPPSNTPEGGVPSVIARKVSQYSCQRKTTLNNYNKKFTDAFEILAENYEFKENEIFRLEFLRAASLLKYLPFPVTSMKDIQGLPCIGDQVRDVIREIIEEGESSRVKEVLNDERYKAFKQFTSVFGVGVKTSEKWFRMGLRTVEELKASKSLKLSKMQKAGFLYYEDLASCVSKAEADAVTLIVKNTVRTFLPDALVTITGGFRRGKKMGHDIDFLITNPGPKEDDELLHKVVDGLKKQGLLLYCDIIESTFVEEQLPSRKIDAMDNFQKCFAILKLYQPGVDNSSYNTSKKSDMAEVKDWKAVRVDLVITPFEQYAYALLGWTGSREFGRDLRRYASHERKMILDNHGLYDRKKRIFLKAGSEEEIFAHLGLDYVEPWERNA

SEQ ID NO: 779 - DNA, 1182 bp, synthetic construct
  misc_feature 1..1182: note = Variant of terminal deoxynucleotidyl transferase
  source 1..1182: mol_type = other DNA
atgcaccatcatcatcatcatggcggtagcggccatccgccgagcaataccccggagggtggggtgccgagcgttatcgcccgcaaggttagtcagtacagctgccagcgcaagaccacgctgaataactacaacaaaaagtttaccgacgcgttcgagatcatggccgagaactacgaatttaaagagaacgaaatcaaccgtctggaatttctgcgcgccgcgagtctgctgaaatatctgccgttcccggttacccgcatgaaagacatccaaggtctgccgtgcattggcgaccaagttcgtgacgtgatcgaggagatcatcgaagagggcgagagcagccgtgttaaagaagttctcaatgacgagcgctacaaggcctttaagcagttcaccagcgtgttcggtgtgggcgtgaaaaccagcgaaaagtggtttcgtatgggcctccgtacggttgaagagctgaaggccagtaagagtctgaagctgagcaagatgcagaaggcgggctttctgtattacgaggatctggccagctgcgttagtaaagcggaagccgatgccgttacgctcatcgtgaagaacacggtgcgtacctttctgccggatgcgctggtgaccatcacgggcggtttccgccgtggcaaaaagatgggccacgacatcgactttctgatcacgaatccgggcccgaaagaggatgacgagctgctccacaaagtggttgatgggctcaagaagcaaggtctgctgctgtactgcgacatcatcgagagcacgttcgtggaggaacaactgccaagtcgcaaaatcgacgccatggacaacttccagaagtgcttcgccattctcaagctgtaccagccgggcgtggataacagcagctataacacgagtaagaagagtgacatggccgaggttaaggattggaaagcgatccgtgtggatctggtgatcacgccattcgagcagtacgcctatgcgctgctcggttggacgggcagccgcgaatttggtcgcgatctgcgccgctatgcgagtcatgagcgcaagatgatcctcgacaaccatggcctctacgaccgcaaaaagcgcatctttctgaaagcgggcagcgaagaagagattttcgcgcatctgggtctggattatgtggagccgtgggaacgcaacgcg

SEQ ID NO: 780 - protein, 394 aa, synthetic construct
  REGION 1..394: note = Variant of terminal deoxynucleotidyl transferase
MHHHHHHGGSGHPPSNTPEGGVPSVIARKVSQYSCQRKTTLNNYNKKFTDAFEIMAENYEFKENEINRLEFLRAASLLKYLPFPVTRMKDIQGLPCIGDQVRDVIEEIIEEGESSRVKEVLNDERYKAFKQFTSVFGVGVKTSEKWFRMGLRTVEELKASKSLKLSKMQKAGFLYYEDLASCVSKAEADAVTLIVKNTVRTFLPDALVTITGGFRRGKKMGHDIDFLITNPGPKEDDELLHKVVDGLKKQGLLLYCDIIESTFVEEQLPSRKIDAMDNFQKCFAILKLYQPGVDNSSYNTSKKSDMAEVKDWKAIRVDLVITPFEQYAYALLGWTGSREFGRDLRRYASHERKMILDNHGLYDRKKRIFLKAGSEEEIFAHLGLDYVEPWERNA

SEQ ID NO: 781 - DNA, 1182 bp, synthetic construct
  misc_feature 1..1182: note = Variant of terminal deoxynucleotidyl transferase
  source 1..1182: mol_type = other DNA
atgcaccatcatcatcatcatggcggtagcggccatccgccgagcaataccccggagggtggggtgccgagcgttatcgcccgcaaggttagtcagtacagctgccagcgcaagaccacgctgaataactacaacaaaaagtttaccgacgcgttcgagatcctggccgagaactacgaatttaaagagaacgaaatcatgcgtctggaatttctgcgcgccgcgagtctgctgaaatatctgccgttcccggttaccagtatgaaagacatccaaggtctgccgtgcattggcgaccaagttcgtgacgtgatcgaggagatcatcgaagagggcgagagcagccgtgttaaagaagttctcaatgacgagcgctacaaggcctttaagcagttcaccagcgtgttcggtgtgggcgtgaaaaccagcgaaaagtggtttcgtatgggcctccgtacggttgaagagctgaaggccagtaagagtctgaagctgagcaagatgcagaaggcgggctttctgtattacgaggatctggccagctgcgttagtaaagcggaagccgatgccgttacgctcatcgtgaagaacacggtgcgtacctttctgccggatgcgctggtgaccatcacgggcggtttccgccgtggcaaaaagatgggccacgacatcgactttctgatcacgaatccgggcccgaaagaggatgacgagctgctccacaaagtggttgatgggctcaagaagcaaggtctgctgctgtactgcgacatcatcgagagcacgttcgtggaggaacaactgccaagtcgcaaaatcgacgccatggacaacttccagaagtgcttcgccattctcaagctgtaccagccgggcgtggataacagcagctataacacgagtaagaagagtgacatggccgaggttaaggattggaaagcgatccgtgtggatctggtgatcacgccattcgagcagtacgcctatgcgctgctcggttggacgggcagccgcgaatttggtcgcgatctgcgccgctatgcgagtcatgagcgcaagatgatcctcgacaaccatggcctctacgaccgcaaaaagcgcatctttctgaaagcgggcagcgaagaagagattttcgcgcatctgggtctggattatgtggagccgtgggaacgcaacgcg

SEQ ID NO: 782 - protein, 394 aa, synthetic construct
  REGION 1..394: note = Variant of terminal deoxynucleotidyl transferase
MHHHHHHGGSGHPPSNTPEGGVPSVIARKVSQYSCQRKTTLNNYNKKFTDAFEILAENYEFKENEIMRLEFLRAASLLKYLPFPVTSMKDIQGLPCIGDQVRDVIEEIIEEGESSRVKEVLNDERYKAFKQFTSVFGVGVKTSEKWFRMGLRTVEELKASKSLKLSKMQKAGFLYYEDLASCVSKAEADAVTLIVKNTVRTFLPDALVTITGGFRRGKKMGHDIDFLITNPGPKEDDELLHKVVDGLKKQGLLLYCDIIESTFVEEQLPSRKIDAMDNFQKCFAILKLYQPGVDNSSYNTSKKSDMAEVKDWKAIRVDLVITPFEQYAYALLGWTGSREFGRDLRRYASHERKMILDNHGLYDRKKRIFLKAGSEEEIFAHLGLDYVEPWERNA

SEQ ID NO: 783 - DNA, 1182 bp, synthetic construct
  misc_feature 1..1182: note = Variant of terminal deoxynucleotidyl transferase
  source 1..1182: mol_type = other DNA
atgcaccatcatcatcatcatggcggtagcggccatccgccgagcaataccccggagggtggggtgccgagcgttatcgcccgcaaggttagtcagtacagctgccagcgcaagaccacgctgaataactacaacaaaaagtttaccgacgcgttcgagatcctggccgagaactacgaatttaaagagaacgaaatctttcgtctggaatttctgcgcgccgcgagtctgctgaaatatctgccgttcccggttaccagtatgaaagacatccaaggtctgccgtgcattggcgaccaagttcgtgacgtgatccgcgagatcatcgaaaccggcgagagcagccgtgttaaagaagttctcaatgacgagcgctacaaggcctttaagcagttcaccagcgtgttcggtgtgggcgtgaaaaccagcgaaaagtggtttcgtatgggcctccgtacggttgaagagctgaaggccagtaagagtctgaagctgagcaagatgcagaaggcgggctttctgtattacgaggatctggccagctgcgttagtaaagcggaagccgatgccgttacgctcatcgtgaagaacacggtgcgtacctttctgccggatgcgctggtgaccatcacgggcggtttccgccgtggcaaaaagatgggccacgacatcgactttctgatcacgaatccgggcccgaaagaggatgacgagctgctccacaaagtggttgatgggctcaagaagcaaggtctgctgctgtactgcgacatcatcgagagcacgttcgtggaggaacaactgccaagtcgcaaaatcgacgccatggacaacttccagaagtgcttcgccattctcaagctgtaccagccgggcgtggataacagcagctataacacgagtaagaagagtgacatggccgaggttaaggattggaaagcggtccgtgtggatctggtgatcacgccattcgagcagtacgcctatgcgctgctcggttggacgggcagccgcgaatttggtcgcgatctgcgccgctatgcgagtcatgagcgcaagatgatcctcgacaaccatggcctctacgaccgcaaaaagcgcatctttctgaaagcgggcagcgaagaagagattttcgcgcatctgggtctggattatgtggagccgtgggaacgcaacgcg

SEQ ID NO: 784 - protein, 394 aa, synthetic construct
  REGION 1..394: note = Variant of terminal deoxynucleotidyl transferase
MHHHHHHGGSGHPPSNTPEGGVPSVIARKVSQYSCQRKTTLNNYNKKFTDAFEILAENYEFKENEIFRLEFLRAASLLKYLPFPVTSMKDIQGLPCIGDQVRDVIREIIETGESSRVKEVLNDERYKAFKQFTSVFGVGVKTSEKWFRMGLRTVEELKASKSLKLSKMQKAGFLYYEDLASCVSKAEADAVTLIVKNTVRTFLPDALVTITGGFRRGKKMGHDIDFLITNPGPKEDDELLHKVVDGLKKQGLLLYCDIIESTFVEEQLPSRKIDAMDNFQKCFAILKLYQPGVDNSSYNTSKKSDMAEVKDWKAVRVDLVITPFEQYAYALLGWTGSREFGRDLRRYASHERKMILDNHGLYDRKKRIFLKAGSEEEIFAHLGLDYVEPWERNA

SEQ ID NO: 785 - DNA, 1182 bp, synthetic construct
  misc_feature 1..1182: note = Variant of terminal deoxynucleotidyl transferase
  source 1..1182: mol_type = other DNA
atgcaccatcatcatcatcatggcggtagcggccatccgccgagcaataccccggagggtggggtgccgagcgttatcgcccgcaaggttagtcagtacagctgccagcgcaagaccacgctgaataactacaacaaaaagtttaccgacgcgttcgagatcctggccgagaactacgaatttaaagagaacgaaatctttcgtctggaatttctgcgcgccgcgagtctgctgaaatatctgccgttcccggttacccgtatgaaagacatccaaggtctgccgtgcattggcgaccaagttcgtgacgtgatccgcgagatcatcgaaaccggcgagagcagccgtgttaaagaagttctcaatgacgagcgctacaaggcctttaagcagttcaccagcgtgttcggtgtgggcgtgaaaaccagcgaaaagtggtttcgtatgggcctccgtacggttgaagagctgaaggccagtaagagtctgaagctgagcaagatgcagaaggcgggctttctgtattacgaggatctggccagctgcgttagtaaagcggaagccgatgccgttacgctcatcgtgaagaacacggtgcgtacctttctgccggatgcgctggtgaccatcacgggcggtttccgccgtggcaaaaagatgggccacgacatcgactttctgatcacgaatccgggcccgaaagaggatgacgagctgctccacaaagtggttgatgggctcaagaagcaaggtctgctgctgtactgcgacatcatcgagagcacgttcgtggaggaacaactgccaagtcgcaaaatcgacgccatggacaacttccagaagtgcttcgccattctcaagctgtaccagccgggcgtggataacagcagctataacacgagtaagaagagtgacatggccgaggttaaggattggaaagcgatccgtgtggatctggtgatcacgccattcgagcagtacgcctatgcgctgctcggttggacgggcagccgcgaatttggtcgcgatctgcgccgctatgcgagtcatgagcgcaagatgatcctcgacaaccatggcctctacgaccgcaaaaagcgcatctttctgaaagcgggcagcgaagaagagattttcgcgcatctgggtctggattatgtggagccgtgggaacgcaacgcg

SEQ ID NO: 786 - protein, 394 aa, synthetic construct
  REGION 1..394: note = Variant of terminal deoxynucleotidyl transferase
MHHHHHHGGSGHPPSNTPEGGVPSVIARKVSQYSCQRKTTLNNYNKKFTDAFEILAENYEFKENEIFRLEFLRAASLLKYLPFPVTRMKDIQGLPCIGDQVRDVIREIIETGESSRVKEVLNDERYKAFKQFTSVFGVGVKTSEKWFRMGLRTVEELKASKSLKLSKMQKAGFLYYEDLASCVSKAEADAVTLIVKNTVRTFLPDALVTITGGFRRGKKMGHDIDFLITNPGPKEDDELLHKVVDGLKKQGLLLYCDIIESTFVEEQLPSRKIDAMDNFQKCFAILKLYQPGVDNSSYNTSKKSDMAEVKDWKAIRVDLVITPFEQYAYALLGWTGSREFGRDLRRYASHERKMILDNHGLYDRKKRIFLKAGSEEEIFAHLGLDYVEPWERNA

SEQ ID NO: 787 - DNA, 1182 bp, synthetic construct
  misc_feature 1..1182: note = Variant of terminal deoxynucleotidyl transferase
  source 1..1182: mol_type = other DNA
atgcaccatcatcatcatcatggcggtagcggccatccgccgagcaataccccggagggtggggtgccgagcgttatcgcccgcaaggttagtcagtacagctgccagcgcaagaccacgctgaataactacaacaaaaagtttaccgacgcgttcgagatcatggccgagaactacgaatttaaagagaacgaaatcaaccgtctggaatttctgcgcgccgcgagtctgctgaaatatctgccgttcccggttacccgcatgaaagacatccaaggtctgccgtgcattggcgaccaagttcgtgacgtgatccgcgagatcatcgaaaccggcgagagcagccgtgttaaagaagttctcaatgacgagcgctacaaggcctttaagcagttcaccagcgtgttcggtgtgggcgtgaaaaccagcgaaaagtggtttcgtatgggcctccgtacggttgaagagctgaaggccagtaagagtctgaagctgagcaagatgcagaaggcgggctttctgtattacgaggatctggccagctgcgttagtaaagcggaagccgatgccgttacgctcatcgtgaagaacacggtgcgtacctttctgccggatgcgctggtgaccatcacgggcggtttccgccgtggcaaaaagatgggccacgacatcgactttctgatcacgaatccgggcccgaaagaggatgacgagctgctccacaaagtggttgatgggctcaagaagcaaggtctgctgctgtactgcgacatcatcgagagcacgttcgtggaggaacaactgccaagtcgcaaaatcgacgccatggacaacttccagaagtgcttcgccattctcaagctgtaccagccgggcgtggataacagcagctataacacgagtaagaagagtgacatggccgaggttaaggattggaaagcgatccgtgtggatctggtgatcacgccattcgagcagtacgcctatgcgctgctcggttggacgggcagccgcgaatttggtcgcgatctgcgccgctatgcgagtcatgagcgcaagatgatcctcgacaaccatggcctctacgaccgcaaaaagcgcatctttctgaaagcgggcagcgaagaagagattttcgcgcatctgggtctggattatgtggagccgtgggaacgcaacgcg

SEQ ID NO: 788 - protein, 394 aa, synthetic construct
  REGION 1..394: note = Variant of terminal deoxynucleotidyl transferase
MHHHHHHGGSGHPPSNTPEGGVPSVIARKVSQYSCQRKTTLNNYNKKFTDAFEIMAENYEFKENEINRLEFLRAASLLKYLPFPVTRMKDIQGLPCIGDQVRDVIREIIETGESSRVKEVLNDERYKAFKQFTSVFGVGVKTSEKWFRMGLRTVEELKASKSLKLSKMQKAGFLYYEDLASCVSKAEADAVTLIVKNTVRTFLPDALVTITGGFRRGKKMGHDIDFLITNPGPKEDDELLHKVVDGLKKQGLLLYCDIIESTFVEEQLPSRKIDAMDNFQKCFAILKLYQPGVDNSSYNTSKKSDMAEVKDWKAIRVDLVITPFEQYAYALLGWTGSREFGRDLRRYASHERKMILDNHGLYDRKKRIFLKAGSEEEIFAHLGLDYVEPWERNA

SEQ ID NO: 789 - DNA, 1182 bp, synthetic construct
  misc_feature 1..1182: note = Variant of terminal deoxynucleotidyl transferase
  source 1..1182: mol_type = other DNA
atgcaccatcatcatcatcatggcggtagcggccatccgccgagcaataccccggagggtggggtgccgagcgttatcgcccgcaaggttagtcagtacagctgccagcgcaagaccacgctgaataactacaacaaaaagtttaccgacgcgttcgagatcctggccgagaactacgaatttaaagagaacgaaatcttccgtctggaatttctgcgcgccgcgagtctgctgaaatatctgccgttcccggttaccagtatgaaagacatccaaggtctgccgtgcattggcgaccaagttcgtgacgtgatcgaggagatcatcgaagagggcgagagcagccgtgttaaagaagttctcaatgacgagcgctacaaggcctttaagcagttcaccagcgtgttcggtgtgggcgtgaaaaccagcgaaaagtggtttcgtatgggcctccgtacggttgaagagctgaaggccagtaagagtctgaagctgagcaagatgcagaaggcgggctttctgtattacgaggatctggccagctgcgttagtaaagcggaagccgatgccgttacgctcatcgtgaagaacacggtgcgtacctttctgccggatgcgctggtgaccatcacgggcggtttccgccgtggcaaaaagatgggccacgacatcgactttctgatcacgaatccgggcccgaaagaggatgacgagctgctccacaaagtggttgatgggctcaagaagcaaggtctgctgctgtactgcgacatcatcgagagcacgttcgtggaggaacaactgccaagtcgcaaaatcgacgccatggacaacttccagaagtgcttcgccattctcaagctgtaccagccgggcgtggataacagcagctataacacgagtaagaagagtgacatggccgaggttaaggattggaaagcgatccgtgtggatctggtgatcacgccattcgagcagtacgcctatgcgctgctcggttggacgggcagccgcgaatttggtcgcgatctgcgccgctatgcgagtcatgagcgcaagatgatcctcgacaaccatggcctctacgaccgcaaaaagcgcatctttctgaaagcgggcagcgaagaagagattttcgcgcatctgggtctggattatgtggagccgtgggaacgcaacgcg

SEQ ID NO: 790 - protein, 394 aa, synthetic construct
  REGION 1..394: note = Variant of terminal deoxynucleotidyl transferase
MHHHHHHGGSGHPPSNTPEGGVPSVIARKVSQYSCQRKTTLNNYNKKFTDAFEILAENYEFKENEIFRLEFLRAASLLKYLPFPVTSMKDIQGLPCIGDQVRDVIEEIIEEGESSRVKEVLNDERYKAFKQFTSVFGVGVKTSEKWFRMGLRTVEELKASKSLKLSKMQKAGFLYYEDLASCVSKAEADAVTLIVKNTVRTFLPDALVTITGGFRRGKKMGHDIDFLITNPGPKEDDELLHKVVDGLKKQGLLLYCDIIESTFVEEQLPSRKIDAMDNFQKCFAILKLYQPGVDNSSYNTSKKSDMAEVKDWKAIRVDLVITPFEQYAYALLGWTGSREFGRDLRRYASHERKMILDNHGLYDRKKRIFLKAGSEEEIFAHLGLDYVEPWERNA

SEQ ID NO: 791 - DNA, 1182 bp, synthetic construct
  misc_feature 1..1182: note = Variant of terminal deoxynucleotidyl transferase
  source 1..1182: mol_type = other DNA
atgcaccatcatcatcatcatggcggtagcggccatccgccgagcaataccccggagggtggggtgccgagcgttatcgcccgcaaggttagtcagtacagctgccagcgcaagaccacgctgaataactacaacaaaaagtttaccgacgcgttcgagatcctggccgagaactacgaatttaaagagaacgaaatcttccgtctggaatttctgcgcgccgcgagtctgctgaaatatctgccgttcccggttacccgcatgaaagacatccaaggtctgccgtgcattggcgaccaagttcgtgacgtgatcgaggagatcatcgaaaccggcgagagcagccgtgttaaagaagttctcaatgacgagcgctacaaggcctttaagcagttcaccagcgtgttcggtgtgggcgtgaaaaccagcgaaaagtggtttcgtatgggcctccgtacggttgaagagctgaaggccagtaagagtctgaagctgagcaagatgcagaaggcgggctttctgtattacgaggatctggccagctgcgttagtaaagcggaagccgatgccgttacgctcatcgtgaagaacacggtgcgtacctttctgccggatgcgctggtgaccatcacgggcggtttccgccgtggcaaaaagatgggccacgacatcgactttctgatcacgaatccgggcccgaaagaggatgacgagctgctccacaaagtggttgatgggctcaagaagcaaggtctgctgctgtactgcgacatcatcgagagcacgttcgtggaggaacaactgccaagtcgcaaaatcgacgccatggacaacttccagaagtgcttcgccattctcaagctgtaccagccgggcgtggataacagcagctataacacgagtaagaagagtgacatggccgaggttaaggattggaaagcgatccgtgtggatctggtgatcacgccattcgagcagtacgcctatgcgctgctcggttggacgggcagccgcgaatttggtcgcgatctgcgccgctatgcgagtcatgagcgcaagatgatcctcgacaaccatggcctctacgaccgcaaaaagcgcatctttctgaaagcgggcagcgaagaagagattttcgcgcatctgggtctggattatgtggagccgtgggaacgcaacgcg

SEQ ID NO: 792 - protein, 394 aa, synthetic construct
  REGION 1..394: note = Variant of terminal deoxynucleotidyl transferase
MHHHHHHGGSGHPPSNTPEGGVPSVIARKVSQYSCQRKTTLNNYNKKFTDAFEILAENYEFKENEIFRLEFLRAASLLKYLPFPVTRMKDIQGLPCIGDQVRDVIEEIIETGESSRVKEVLNDERYKAFKQFTSVFGVGVKTSEKWFRMGLRTVEELKASKSLKLSKMQKAGFLYYEDLASCVSKAEADAVTLIVKNTVRTFLPDALVTITGGFRRGKKMGHDIDFLITNPGPKEDDELLHKVVDGLKKQGLLLYCDIIESTFVEEQLPSRKIDAMDNFQKCFAILKLYQPGVDNSSYNTSKKSDMAEVKDWKAIRVDLVITPFEQYAYALLGWTGSREFGRDLRRYASHERKMILDNHGLYDRKKRIFLKAGSEEEIFAHLGLDYVEPWERNA

SEQ ID NO: 793 - DNA, 1182 bp, synthetic construct
  misc_feature 1..1182: note = Variant of terminal deoxynucleotidyl transferase
  source 1..1182: mol_type = other DNA
atgcaccatcatcatcatcatggcggtagcggccatccgccgagcaataccccggagggtggggtgccgagcgttatcgcccgcaaggttagtcagtacagctgccagcgcaagaccacgctgaataactacaacaaaaagtttaccgacgcgttcgagatcatggccgagaactacgaatttaaagagaacgaaatcgatcgtctggaatttctgcgcgccgcgagtctgctgaaatatctgccgttcccggttacccgcatgaaagacatccaaggtctgccgtgcattggcgaccaagttcgtgacgtgatcgaggagatcatcgaaaccggcgagagcagccgtgttaaagaagttctcaatgacgagcgctacaaggcctttaagcagttcaccagcgtgttcggtgtgggcgtgaaaaccagcgaaaagtggtttcgtatgggcctccgtacggttgaagagctgaaggccagtaagagtctgaagctgagcaagatgcagaaggcgggctttctgtattacgaggatctggccagctgcgttagtaaagcggaagccgatgccgttacgctcatcgtgaagaacacggtgcgtacctttctgccggatgcgctggtgaccatcacgggcggtttccgccgtggcaaaaagatgggccacgacatcgactttctgatcacgaatccgggcccgaaagaggatgacgagctgctccacaaagtggttgatgggctcaagaagcaaggtctgctgctgtactgcgacatcatcgagagcacgttcgtggaggaacaactgccaagtcgcaaaatcgacgccatggacaacttccagaagtgcttcgccattctcaagctgtaccagccgggcgtggataacagcagctataacacgagtaagaagagtgacatggccgaggttaaggattggaaagcgatccgtgtggatctggtgatcacgccattcgagcagtacgcctatgcgctgctcggttggacgggcagccgcgaatttggtcgcgatctgcgccgctatgcgagtcatgagcgcaagatgatcctcgacaaccatggcctctacgaccgcaaaaagcgcatctttctgaaagcgggcagcgaagaagagattttcgcgcatctgggtctggattatgtggagccgtgggaacgcaacgcg

SEQ ID NO: 794 - protein, 394 aa, synthetic construct
  REGION 1..394: note = Variant of terminal deoxynucleotidyl transferase
MHHHHHHGGSGHPPSNTPEGGVPSVIARKVSQYSCQRKTTLNNYNKKFTDAFEIMAENYEFKENEIDRLEFLRAASLLKYLPFPVTRMKDIQGLPCIGDQVRDVIEEIIETGESSRVKEVLNDERYKAFKQFTSVFGVGVKTSEKWFRMGLRTVEELKASKSLKLSKMQKAGFLYYEDLASCVSKAEADAVTLIVKNTVRTFLPDALVTITGGFRRGKKMGHDIDFLITNPGPKEDDELLHKVVDGLKKQGLLLYCDIIESTFVEEQLPSRKIDAMDNFQKCFAILKLYQPGVDNSSYNTSKKSDMAEVKDWKAIRVDLVITPFEQYAYALLGWTGSREFGRDLRRYASHERKMILDNHGLYDRKKRIFLKAGSEEEIFAHLGLDYVEPWERNA

SEQ ID NO: 795 - DNA, 1182 bp, synthetic construct
  misc_feature 1..1182: note = Variant of terminal deoxynucleotidyl transferase
  source 1..1182: mol_type = other DNA
atgcaccatcatcatcatcatggcggtagcggccatccgccgagcaataccccggagggtggggtgccgagcgttatcgcccgcaaggttagtcagtacagctgccagcgcaagaccacgctgaataactacaacaaaaagtttaccgacgcgttcgagatcctggccgagaactacgaatttaaagagaacgaaatctttcgtctggaatttctgcgcgccgcgagtctgctgaaatatctgccgttcccggttacccgtatgaaagacatccaaggtctgccgtgcattggcgaccaagttcgtgacgtgatcgaggagatcatcgaaaccggcgagagcagccgtgttaaagaagttctcaatgacgagcgctacaaggcctttaagcagttcaccagcgtgttcggtgtgggcgtgaaaaccagcgaaaagtggtttcgtatgggcctccgtacggttgaagagctgaaggccagtaagagtctgaagctgagcaagatgcagaaggcgggctttctgtattacgaggatctggccagctgcgttagtaaagcggaagccgatgccgttacgctcatcgtgaagaacacggtgcgtacctttctgccggatgcgctggtgaccatcacgggcggtttccgccgtggcaaaaagatgggccacgacatcgactttctgatcacgaatccgggcccgaaagaggatgacgagctgctccacaaagtggttgatgggctcaagaagcaaggtctgctgctgtactgcgacatcatcgagagcacgttcgtggaggaacaactgccaagtcgcaaaatcgacgccatggacaacttccagaagtgcttcgccattctcaagctgtaccagccgggcgtggataacagcagctataacacgagtaagaagagtgacatggccgaggttaaggattggaaagcggtccgtgtggatctggtgatcacgccattcgagcagtacgcctatgcgctgctcggttggacgggcagccgcgaatttggtcgcgatctgcgccgctatgcgagtcatgagcgcaagatgatcctcgacaaccatggcctctacgaccgcaaaaagcgcatctttctgaaagcgggcagcgaagaagagattttcgcgcatctgggtctggattatgtggagccgtgggaacgcaacgcg

SEQ ID NO: 796 - protein, 394 aa, synthetic construct
  REGION 1..394: note = Variant of terminal deoxynucleotidyl transferase
MHHHHHHGGSGHPPSNTPEGGVPSVIARKVSQYSCQRKTTLNNYNKKFTDAFEILAENYEFKENEIFRLEFLRAASLLKYLPFPVTRMKDIQGLPCIGDQVRDVIEEIIETGESSRVKEVLNDERYKAFKQFTSVFGVGVKTSEKWFRMGLRTVEELKASKSLKLSKMQKAGFLYYEDLASCVSKAEADAVTLIVKNTVRTFLPDALVTITGGFRRGKKMGHDIDFLITNPGPKEDDELLHKVVDGLKKQGLLLYCDIIESTFVEEQLPSRKIDAMDNFQKCFAILKLYQPGVDNSSYNTSKKSDMAEVKDWKAVRVDLVITPFEQYAYALLGWTGSREFGRDLRRYASHERKMILDNHGLYDRKKRIFLKAGSEEEIFAHLGLDYVEPWERNA

SEQ ID NO: 797 - DNA, 1182 bp, synthetic construct
  misc_feature 1..1182: note = Variant of terminal deoxynucleotidyl transferase
  source 1..1182: mol_type = other DNA
atgcaccatcatcatcatcatggcggtagcggccatccgccgagcaataccccggagggtggggtgccgagcgttatcgcccgcaaggttagtcagtacagctgccagcgcaagaccacgctgaataactacaacaaaaagtttaccgacgcgttcgagatcctggccgagaactacgaatttaaagagaacgaaatctttcgtctggaatttctgcgcgccgcgagtctgctgaaatatctgccgttcccggttaccagtatgaaagacatccaaggtctgccgtgcattggcgaccaagttcgtgacgtgatccgcgagatcatcgaagagggcgagagcagccgtgttaaagaagttctcaatgacgagcgctacaaggcctttaagcagttcaccagcgtgttcggtgtgggcgtgaaaaccagcgaaaagtggtttcgtatgggcctccgtacggttgaagagctgaaggccagtaagagtctgaagctgagcaagatgcagaaggcgggctttctgtattacgaggatctggccagctgcgttagtaaagcggaagccgatgccgttacgctcatcgtgaagaacacggtgcgtacctttctgccggatgcgctggtgaccatcacgggcggtttccgccgtggcaaaaagatgggccacgacatcgactttctgatcacgaatccgggcccgaaagaggatgacgagctgctccacaaagtggttgatgggctcaagaagcaaggtctgctgctgtactgcgacatcatcgagagcacgttcgtggaggaacaactgccaagtcgcaaaatcgacgccatggacaacttccagaagtgcttcgccattctcaagctgtaccagccgggcgtggataacagcagctataacacgagtaagaagagtgacatggccgaggttaaggattggaaagcgatccgtgtggatctggtgatcacgccattcgagcagtacgcctatgcgctgctcggttggacgggcagccgcgaatttggtcgcgatctgcgccgctatgcgagtcatgagcgcaagatgatcctcgacaaccatggcctctacgaccgcaaaaagcgcatctttctgaaagcgggcagcgaagaagagattttcgcgcatctgggtctggattatgtggagccgtgggaacgcaacgcg

SEQ ID NO: 798 - protein, 394 aa, synthetic construct
  REGION 1..394: note = Variant of terminal deoxynucleotidyl transferase
MHHHHHHGGSGHPPSNTPEGGVPSVIARKVSQYSCQRKTTLNNYNKKFTDAFEILAENYEFKENEIFRLEFLRAASLLKYLPFPVTSMKDIQGLPCIGDQVRDVIREIIEEGESSRVKEVLNDERYKAFKQFTSVFGVGVKTSEKWFRMGLRTVEELKASKSLKLSKMQKAGFLYYEDLASCVSKAEADAVTLIVKNTVRTFLPDALVTITGGFRRGKKMGHDIDFLITNPGPKEDDELLHKVVDGLKKQGLLLYCDIIESTFVEEQLPSRKIDAMDNFQKCFAILKLYQPGVDNSSYNTSKKSDMAEVKDWKAIRVDLVITPFEQYAYALLGWTGSREFGRDLRRYASHERKMILDNHGLYDRKKRIFLKAGSEEEIFAHLGLDYVEPWERNA

SEQ ID NO: 799 - DNA, 1182 bp, synthetic construct
  misc_feature 1..1182: note = Variant of terminal deoxynucleotidyl transferase
  source 1..1182: mol_type = other DNA
atgcaccatcatcatcatcatggcggtagcggccatccgccgagcaataccccggagggtggggtgccgagcgttatcgcccgcaaggttagtcagtacagctgccagcgcaagaccacgctgaataactacaacaaaaagtttaccgacgcgttcgagatcatggccgagaactacgaatttaaagagaacgaaatcaaccgtctggaatttctgcgcgccgcgagtctgctgaaatatctgccgttcccggttaccagtatgaaagacatccaaggtctgccgtgcattggcgaccaagttcgtgacgtgatcgaggagatcatcgaagagggcgagagcagccgtgttaaagaagttctcaatgacgagcgctacaaggcctttaagcagttcaccagcgtgttcggtgtgggcgtgaaaaccagcgaaaagtggtttcgtatgggcctccgtacggttgaagagctgaaggccagtaagagtctgaagctgagcaagatgcagaaggcgggctttctgtattacgaggatctggccagctgcgttagtaaagcggaagccgatgccgttacgctcatcgtgaagaacacggtgcgtacctttctgccggatgcgctggtgaccatcacgggcggtttccgccgtggcaaaaagatgggccacgacatcgactttctgatcacgaatccgggcccgaaagaggatgacgagctgctccacaaagtggttgatgggctcaagaagcaaggtctgctgctgtactgcgacatcatcgagagcacgttcgtggaggaacaactgccaagtcgcaaaatcgacgccatggacaacttccagaagtgcttcgccattctcaagctgtaccagccgggcgtggataacagcagctataacacgagtaagaagagtgacatggccgaggttaaggattggaaagcgatccgtgtggatctggtgatcacgccattcgagcagtacgcctatgcgctgctcggttggacgggcagccgcgaatttggtcgcgatctgcgccgctatgcgagtcatgagcgcaagatgatcctcgacaaccatggcctctacgaccgcaaaaagcgcatctttctgaaagcgggcagcgaagaagagattttcgcgcatctgggtctggattatgtggagccgtgggaacgcaacgcg

SEQ ID NO: 800 - protein, 394 aa, synthetic construct
  REGION 1..394: note = Variant of terminal deoxynucleotidyl transferase
MHHHHHHGGSGHPPSNTPEGGVPSVIARKVSQYSCQRKTTLNNYNKKFTDAFEIMAENYEFKENEINRLEFLRAASLLKYLPFPVTSMKDIQGLPCIGDQVRDVIEEIIEEGESSRVKEVLNDERYKAFKQFTSVFGVGVKTSEKWFRMGLRTVEELKASKSLKLSKMQKAGFLYYEDLASCVSKAEADAVTLIVKNTVRTFLPDALVTITGGFRRGKKMGHDIDFLITNPGPKEDDELLHKVVDGLKKQGLLLYCDIIESTFVEEQLPSRKIDAMDNFQKCFAILKLYQPGVDNSSYNTSKKSDMAEVKDWKAIRVDLVITPFEQYAYALLGWTGSREFGRDLRRYASHERKMILDNHGLYDRKKRIFLKAGSEEEIFAHLGLDYVEPWERNA

SEQ ID NO: 801 - DNA, 1182 bp, synthetic construct
  misc_feature 1..1182: note = Variant of terminal deoxynucleotidyl transferase
  source 1..1182: mol_type = other DNA
atgcaccatcatcatcatcatggcggtagcggccatccgccgagcaataccccggagggtggggtgccgagcgttatcgcccgcaaggttagtcagtacagctgccagcgcaagaccacgctgaataactacaacaaaaagtttaccgacgcgttcgagatcctggccgagaactacgaatttaaagagaacgaaatcttccgtctggaatttctgcgcgccgcgagtctgctgaaatatctgccgttcccggttaccagtatgaaagacatccaaggtctgccgtgcattggcgaccaagttcgtgacgtgatcgaggagatcatcgaagagggcgagagcagccgtgttaaagaagttctcaatgacgagcgctacaaggcctttaagcagttcaccagcgtgttcggtgtgggcgtgaaaaccagcgaaaagtggtttcgtatgggcctccgtacggttgaagagattaaggccagtaagagtctgaagctgagcaagatgcagaaggcgggctttctgtattacgaggatctggccagctgcgttagtaaagcggaagccgatgccgttacgctcatcgtgaagaacacggtgcgtacctttctgccggatgcgcaggtgaccatcacgggcggtttccgccgtggcaaaaagatgggccacgacatcgactttctgatcacgaatccgggcccgaaagaggatgacgagctgctccacaaagtggttgatgggctcaagaagcaaggtctgctgctgtactgcgacatcatcgagagcacgttcgtggaggaacaactgccaagtcgcaaaatcgacgccatggacaacttccagaagtgcttcgccattctcaagctgtaccagccgggcgtggataacagcagctataacacgagtaagaagagtgacatggccgaggttaaggattggaaagcgatccgtgtggatctggtgatcacgccattcgagcagtacgcctatgcgctgctcggttggacgggcagccgcgaatttggtcgcgatctgcgccgctatgcgagtcatgagcgcaagatgatcctcgacaaccatggcctctacgaccgcaaaaagcgcatctttctgaaagcgggcagcgaagaagagattttcgcgcatctgggtctggattatgtggagccgtgggaacgcaacgcg

SEQ ID NO: 802 - protein, 394 aa, synthetic construct
  REGION 1..394: note = Variant of terminal deoxynucleotidyl transferase
MHHHHHHGGSGHPPSNTPEGGVPSVIARKVSQYSCQRKTTLNNYNKKFTDAFEILAENYEFKENEIFRLEFLRAASLLKYLPFPVTSMKDIQGLPCIGDQVRDVIEEIIEEGESSRVKEVLNDERYKAFKQFTSVFGVGVKTSEKWFRMGLRTVEEIKASKSLKLSKMQKAGFLYYEDLASCVSKAEADAVTLIVKNTVRTFLPDAQVTITGGFRRGKKMGHDIDFLITNPGPKEDDELLHKVVDGLKKQGLLLYCDIIESTFVEEQLPSRKIDAMDNFQKCFAILKLYQPGVDNSSYNTSKKSDMAEVKDWKAIRVDLVITPFEQYAYALLGWTGSREFGRDLRRYASHERKMILDNHGLYDRKKRIFLKAGSEEEIFAHLGLDYVEPWERNA

SEQ ID NO: 803 - DNA, 1182 bp, synthetic construct
  misc_feature 1..1182: note = Variant of terminal deoxynucleotidyl transferase
  source 1..1182: mol_type = other DNA
atgcaccatcatcatcatcatggcggtagcggccatccgccgagcaataccccggagggtggggtgccgagcgttatcgcccgcaaggttagtcagtacagctgccagcgcaagaccacgctgaataactacaacaaaaagtttaccgacgcgttcgagatcatggccgagaactacgaatttaaagagaacgaaatcttccgtctggaatttctgcgcgccgcgagtctgctgaaatatctgccgttcccggttacccgcatgaaagacatccaaggtctgccgtgcattggcgaccaagttcgtgacgtgatccgcgagatcatcgaagagggcgagagcagccgtgttaaagaagttctcaatgacgagcgctacaaggcctttaagcagttcaccagcgtgttcggtgtgggcgtgaaaaccagcgaaaagtggtttcgtatgggcctccgtacggttgaagagctgaaggccagtaagagtctgaagctgagcaagatgcagaaggcgggctttctgtattacgaggatctggccagctgcgttagtaaagcggaagccgatgccgttacgctcatcgtgaagaacacggtgcgtacctttctgccggatgcgctggtgaccatcacgggcggtttccgccgtggcaaaaagatgggccacgacatcgactttctgatcacgaatccgggcccgaaagaggatgacgagctgctccacaaagtggttgatgggctcaagaagcaaggtctgctgctgtactgcgacatcatcgagagcacgttcgtggaggaacaactgccaagtcgcaaaatcgacgccatggacaacttccagaagtgcttcgccattctcaagctgtaccagccgggcgtggataacagcagctataacacgagtaagaagagtgacatggccgaggttaaggattggaaagcgatccgtgtggatctggtgatcacgccattcgagcagtacgcctatgcgctgctcggttggacgggcagccgcgaatttggtcgcgatctgcgccgctatgcgagtcatgagcgcaagatgatcctcgacaaccatggcctctacgaccgcaaaaagcgcatctttctgaaagcgggcagcgaagaagagattttcgcgcatctgggtctggattatgtggagccgtgggaacgcaacgcg

SEQ ID NO: 804 - protein, 394 aa, synthetic construct
  REGION 1..394: note = Variant of terminal deoxynucleotidyl transferase
MHHHHHHGGSGHPPSNTPEGGVPSVIARKVSQYSCQRKTTLNNYNKKFTDAFEIMAENYEFKENEIFRLEFLRAASLLKYLPFPVTRMKDIQGLPCIGDQVRDVIREIIEEGESSRVKEVLNDERYKAFKQFTSVFGVGVKTSEKWFRMGLRTVEELKASKSLKLSKMQKAGFLYYEDLASCVSKAEADAVTLIVKNTVRTFLPDALVTITGGFRRGKKMGHDIDFLITNPGPKEDDELLHKVVDGLKKQGLLLYCDIIESTFVEEQLPSRKIDAMDNFQKCFAILKLYQPGVDNSSYNTSKKSDMAEVKDWKAIRVDLVITPFEQYAYALLGWTGSREFGRDLRRYASHERKMILDNHGLYDRKKRIFLKAGSEEEIFAHLGLDYVEPWERNA

SEQ ID NO: 805 - DNA, 1182 bp, synthetic construct
  misc_feature 1..1182: note = Variant of terminal deoxynucleotidyl transferase
  source 1..1182: mol_type = other DNA
atgcaccatcatcatcatcatggcggtagcggccatccgccgagcaataccccggagggtggggtgccgagcgttatcgcccgcaaggttagtcagtacagctgccagcgcaagaccacgctgaataactacaacaaaaagtttaccgacgcgttcgagatcatggccgagaactacgaatttaaagagaacgaaatcgctcgtctggaatttctgcgcgccgcgagtctgctgaaatatctgccgttcccggttacccgtatgaaagacatccaaggtctgccgtgcattggcgaccaagttcgtgacgtgatcgaggagatcatcgaagagggcgagagcagccgtgttaaagaagttctcaatgacgagcgctacaaggcctttaagcagttcaccagcgtgttcggtgtgggcgtgaaaaccagcgaaaagtggtttcgtatgggcctccgtacggttgaagagctgaaggccagtaagagtctgaagctgagcaagatgcagaaggcgggctttctgtattacgaggatctggccagctgcgttagtaaagcggaagccgatgccgttacgctcatcgtgaagaacacggtgcgtacctttctgccggatgcgctggtgaccatcacgggcggtttccgccgtggcaaaaagatgggccacgacatcgactttctgatcacgaatccgggcccgaaagaggatgacgagctgctccacaaagtggttgatgggctcaagaagcaaggtctgctgctgtactgcgacatcatcgagagcacgttcgtggaggaacaactgccaagtcgcaaaatcgacgccatggacaacttccagaagtgcttcgccattctcaagctgtaccagccgggcgtggataacagcagctataacacgagtaagaagagtgacatggccgaggttaaggattggaaagcgatccgtgtggatctggtgatcacgccattcgagcagtacgcctatgcgctgctcggttggacgggcagccgcgaatttggtcgcgatctgcgccgctatgcgagtcatgagcgcaagatgatcctcgacaaccatggcctctacgaccgcaaaaagcgcatctttctgaaagcgggcagcgaagaagagattttcgcgcatctgggtctggattatgtggagccgtgggaacgcaacgcg

SEQ ID NO: 806 - protein, 394 aa, synthetic construct
  REGION 1..394: note = Variant of terminal deoxynucleotidyl transferase
MHHHHHHGGSGHPPSNTPEGGVPSVIARKVSQYSCQRKTTLNNYNKKFTDAFEIMAENYEFKENEIARLEFLRAASLLKYLPFPVTRMKDIQGLPCIGDQVRDVIEEIIEEGESSRVKEVLNDERYKAFKQFTSVFGVGVKTSEKWFRMGLRTVEELKASKSLKLSKMQKAGFLYYEDLASCVSKAEADAVTLIVKNTVRTFLPDALVTITGGFRRGKKMGHDIDFLITNPGPKEDDELLHKVVDGLKKQGLLLYCDIIESTFVEEQLPSRKIDAMDNFQKCFAILKLYQPGVDNSSYNTSKKSDMAEVKDWKAIRVDLVITPFEQYAYALLGWTGSREFGRDLRRYASHERKMILDNHGLYDRKKRIFLKAGSEEEIFAHLGLDYVEPWERNA

SEQ ID NO: 807 - DNA, 1182 bp, synthetic construct
  misc_feature 1..1182: note = Variant of terminal deoxynucleotidyl transferase
  source 1..1182: mol_type = other DNA
atgcaccatcatcatcatcatggcggtagcggccatccgccgagcaataccccggagggtggggtgccgagcgttatcgcccgcaaggttagtcagtacagctgccagcgcaagaccacgctgaataactacaacaaaaagtttaccgacgcgttcgagatcatggccgagaactacgaatttaaagagaacgaaatcttccgtctggaatttctgcgcgccgcgagtctgctgaaatatctgccgttcccggttaccagtatgaaagacatccaaggtctgccgtgcattggcgaccaagttcgtgacgtgatccgcgagatcatcgaaaccggcgagagcagccgtgttaaagaagttctcaatgacgagcgctacaaggcctttaagcagttcaccagcgtgttcggtgtgggcgtgaaaaccagcgaaaagtggtttcgtatgggcctccgtacggttgaagagctgaaggccagtaagagtctgaagctgagcaagatgcagaaggcgggctttctgtattacgaggatctggccagctgcgttagtaaagcggaagccgatgccgttacgctcatcgtgaagaacacggtgcgtacctttctgccggatgcgctggtgaccatcacgggcggtttccgccgtggcaaaaagatgggccacgacatcgactttctgatcacgaatccgggcccgaaagaggatgacgagctgctccacaaagtggttgatgggctcaagaagcaaggtctgctgctgtactgcgacatcatcgagagcacgttcgtggaggaacaactgccaagtcgcaaaatcgacgccatggacaacttccagaagtgcttcgccattctcaagctgtaccagccgggcgtggataacagcagctataacacgagtaagaagagtgacatggccgaggttaaggattggaaagcggtccgtgtggatctggtgatcacgccattcgagcagtacgcctatgcgctgctcggttggacgggcagccgcgaatttggtcgcgatctgcgccgctatgcgagtcatgagcgcaagatgatcctcgacaaccatggcctctacgaccgcaaaaagcgcatctttctgaaagcgggcagcgaagaagagattttcgcgcatctgggtctggattatgtggagccgtgggaacgcaacgcg

SEQ ID NO: 808 - protein, 394 aa, synthetic construct
  REGION 1..394: note = Variant of terminal deoxynucleotidyl transferase
MHHHHHHGGSGHPPSNTPEGGVPSVIARKVSQYSCQRKTTLNNYNKKFTDAFEIMAENYEFKENEIFRLEFLRAASLLKYLPFPVTSMKDIQGLPCIGDQVRDVIREIIETGESSRVKEVLNDERYKAFKQFTSVFGVGVKTSEKWFRMGLRTVEELKASKSLKLSKMQKAGFLYYEDLASCVSKAEADAVTLIVKNTVRTFLPDALVTITGGFRRGKKMGHDIDFLITNPGPKEDDELLHKVVDGLKKQGLLLYCDIIESTFVEEQLPSRKIDAMDNFQKCFAILKLYQPGVDNSSYNTSKKSDMAEVKDWKAVRVDLVITPFEQYAYALLGWTGSREFGRDLRRYASHERKMILDNHGLYDRKKRIFLKAGSEEEIFAHLGLDYVEPWERNA

SEQ ID NO: 809 - DNA, 1182 bp, synthetic construct
  misc_feature 1..1182: note = Variant of terminal deoxynucleotidyl transferase
  source 1..1182: mol_type = other DNA
atgcaccatcatcatcatcatggcggtagcggccatccgccgagcaataccccggagggtggggtgccgagcgttatcgcccgcaaggttagtcagtacagctgccagcgcaagaccacgctgaataactacaacaaaaagtttaccgacgcgttcgagatcatggccgagaactacgaatttaaagagaacgaaatcttccgtctggaatttctgcgcgccgcgagtctgctgaaatatctgccgttcccggttaccagtatgaaagacatccaaggtctgccgtgcattggcgaccaagttcgtgacgtgatcgaggagatcatcgaagagggcgagagcagccgtgttaaagaagttctcaatgacgagcgctacaaggcctttaagcagttcaccagcgtgttcggtgtgggcgtgaaaaccagcgaaaagtggtttcgtatgggcctccgtacggttgaagagctgaaggccagtaagagtctgaagctgagcaagatgcagaaggcgggctttctgtattacgaggatctggccagctgcgttagtaaagcggaagccgatgccgttacgctcatcgtgaagaacacggtgcgtacctttctgccggatgcgctggtgaccatcacgggcggtttccgccgtggcaaaaagatgggccacgacatcgactttctgatcacgaatccgggcccgaaagaggatgacgagctgctccacaaagtggttgatgggctcaagaagcaaggtctgctgctgtactgcgacatcatcgagagcacgttcgtggaggaacaactgccaagtcgcaaaatcgacgccatggacaacttccagaagtgcttcgccattctcaagctgtaccagccgggcgtggataacagcagctataacacgagtaagaagagtgacatggccgaggttaaggattggaaagcggtccgtgtggatctggtgatcacgccattcgagcagtacgcctatgcgctgctcggttggacgggcagccgcgaatttggtcgcgatctgcgccgctatgcgagtcatgagcgcaagatgatcctcgacaaccatggcctctacgaccgcaaaaagcgcatctttctgaaagcgggcagcgaagaagagattttcgcgcatctgggtctggattatgtggagccgtgggaacgcaacgcg

SEQ ID NO: 810 - protein, 394 aa, synthetic construct
  REGION 1..394: note = Variant of terminal deoxynucleotidyl transferase
MHHHHHHGGSGHPPSNTPEGGVPSVIARKVSQYSCQRKTTLNNYNKKFTDAFEIMAENYEFKENEIFRLEFLRAASLLKYLPFPVTSMKDIQGLPCIGDQVRDVIEEIIEEGESSRVKEVLNDERYKAFKQFTSVFGVGVKTSEKWFRMGLRTVEELKASKSLKLSKMQKAGFLYYEDLASCVSKAEADAVTLIVKNTVRTFLPDALVTITGGFRRGKKMGHDIDFLITNPGPKEDDELLHKVVDGLKKQGLLLYCDIIESTFVEEQLPSRKIDAMDNFQKCFAILKLYQPGVDNSSYNTSKKSDMAEVKDWKAVRVDLVITPFEQYAYALLGWTGSREFGRDLRRYASHERKMILDNHGLYDRKKRIFLKAGSEEEIFAHLGLDYVEPWERNA

SEQ ID NO: 811 - DNA, 1182 bp, synthetic construct
  misc_feature 1..1182: note = Variant of terminal deoxynucleotidyl transferase
  source 1..1182: mol_type = other DNA
atgcaccatcatcatcatcatggcggtagcggccatccgccgagcaataccccggagggtggggtgccgagcgttatcgcccgcaaggttagtcagtacagctgccagcgcaagaccacgctgaataactacaacaaaaagtttaccgacgcgttcgagatcctggccgagaactacgaatttaaagagaacgaaatcttccgtctggaatttctgcgcgccgcgagtctgctgaaatatctgccgttcccggttacccgcatgaaagacatccaaggtctgccgtgcattggcgaccaagttcgtgacgtgatcgaggagatcatcgaagagggcgagagcagccgtgttaaagaagttctcaatgacgagcgctacaaggcctttaagcagttcaccagcgtgttcggtgtgggcgtgaaaaccagcgaaaagtggtttcgtatgggcctccgtacggttgaagagctgaaggccagtaagagtctgaagctgagcaagatgcagaaggcgggctttctgtattacgaggatctggccagctgcgttagtaaagcggaagccgatgccgttacgctcatcgtgaagaacacggtgcgtacctttctgccggatgcgctggtgaccatcacgggcggtttccgccgtggcaaaaagatgggccacgacatcgactttctgatcacgaatccgggcccgaaagaggatgacgagctgctccacaaagtggttgatgggctcaagaagcaaggtctgctgctgtactgcgacatcatcgagagcacgttcgtggaggaacaactgccaagtcgcaaaatcgacgccatggacaacttccagaagtgcttcgccattctcaagctgtaccagccgggcgtggataacagcagctataacacgagtaagaagagtgacatggccgaggttaaggattggaaagcgatccgtgtggatctggtgatcacgccattcgagcagtacgcctatgcgctgctcggttggacgggcagccgcgaatttggtcgcgatctgcgccgctatgcgagtcatgagcgcaagatgatcctcgacaaccatggcctctacgaccgcaaaaagcgcatctttctgaaagcgggcagcgaagaagagattttcgcgcatctgggtctggattatgtggagccgtgggaacgcaacgcg

SEQ ID NO: 812 - protein, 394 aa, synthetic construct
  REGION 1..394: note = Variant of terminal deoxynucleotidyl transferase
MHHHHHHGGSGHPPSNTPEGGVPSVIARKVSQYSCQRKTTLNNYNKKFTDAFEILAENYEFKENEIFRLEFLRAASLLKYLPFPVTRMKDIQGLPCIGDQVRDVIEEIIEEGESSRVKEVLNDERYKAFKQFTSVFGVGVKTSEKWFRMGLRTVEELKASKSLKLSKMQKAGFLYYEDLASCVSKAEADAVTLIVKNTVRTFLPDALVTITGGFRRGKKMGHDIDFLITNPGPKEDDELLHKVVDGLKKQGLLLYCDIIESTFVEEQLPSRKIDAMDNFQKCFAILKLYQPGVDNSSYNTSKKSDMAEVKDWKAIRVDLVITPFEQYAYALLGWTGSREFGRDLRRYASHERKMILDNHGLYDRKKRIFLKAGSEEEIFAHLGLDYVEPWERNA

SEQ ID NO: 813 - DNA, 1182 bp, synthetic construct
  misc_feature 1..1182: note = Variant of terminal deoxynucleotidyl transferase
  source 1..1182: mol_type = other DNA
atgcaccatcatcatcatcatggcggtagcggccatccgccgagcaataccccggagggtggggtgccgagcgttatcgcccgcaaggttagtcagtacagctgccagcgcaagaccacgctgaataactacaacaaaaagtttaccgacgcgttcgagatcatggccgagaactatgagtttaacgagaacgaaatcttctgtctggaatttctgcgcgccgcgagtctgctgaaatatctgccgttcccggttacccgcatgaaagacattcaaggtctgccgtgcattggcgaccaagttcgtgacgtgatcgaggagatcatcgaatatggcgagagcagccgtgttaaagaagttctcaatgacgagcgctacaaggcctttaagcagttcaccagcgtgttcggtgtgggcgtgaaaaccagcgaaaagtggtttcgtatgggcctccgtacggttgaagagctgaaggccagtaagagtctgaagctgagcaagatgcagaaggcgggctttctgtattacgaggatctggccagctgcgttagtaaagcggaagccgatgccgttacgctcatcgtgaagaacacggtgcgtacctttctgccggatgcgctggtgaccatcacgggcggtttccgccgtggcaaaaagatgggccacgacatcgactttctgatcacgaatccgggcccgaaagaggatgacgagctgctccacaaagtggttgatgggctcaagaagcaaggtctgctgctgtactgcgacatcatcgagagcacgttcgtggaggaacaactgccaagtcgcaaaatcgacgccatggacaacttccagaagtgcttcgccattctcaagctgtaccagccgggcgtggataacagcagctataacacgagtaagaagagtgacatggccgaggttaaggattggaaagcgatccgtgtggatctggtgatcacgccattcgagcagtacgcctatgcgctgctcggttggacgggcagccgcgaatttggtcgcgatctgcgccgctatgcgagtcatgagcgcaagatgatcctcgacaaccatggcctctacgaccgcaaaaagcgcatctttctgaaagcgggcagcgaagaagagattttcgcgcatctgggtctggattatgtggagccgtgggaacgcaacgcg

SEQ ID NO: 814 - protein, 394 aa, synthetic construct
  REGION 1..394: note = Variant of terminal deoxynucleotidyl transferase
MHHHHHHGGSGHPPSNTPEGGVPSVIARKVSQYSCQRKTTLNNYNKKFTDAFEIMAENYEFNENEIFCLEFLRAASLLKYLPFPVTRMKDIQGLPCIGDQVRDVIEEIIEYGESSRVKEVLNDERYKAFKQFTSVFGVGVKTSEKWFRMGLRTVEELKASKSLKLSKMQKAGFLYYEDLASCVSKAEADAVTLIVKNTVRTFLPDALVTITGGFRRGKKMGHDIDFLITNPGPKEDDELLHKVVDGLKKQGLLLYCDIIESTFVEEQLPSRKIDAMDNFQKCFAILKLYQPGVDNSSYNTSKKSDMAEVKDWKAIRVDLVITPFEQYAYALLGWTGSREFGRDLRRYASHERKMILDNHGLYDRKKRIFLKAGSEEEIFAHLGLDYVEPWERNA

SEQ ID NO: 815 - DNA, 1182 bp, synthetic construct
  misc_feature 1..1182: note = Variant of terminal deoxynucleotidyl transferase
  source 1..1182: mol_type = other DNA
atgcaccatcatcatcatcatggcggtagcggccatccgccgagcaataccccggagggtggggtgccgagcgttatcgcccgcaaggttagtcagtacagctgccagcgcaagaccacgctgaataactacaacaaaaagtttaccgacgcgttcgagatcatggccgagaactacgaatttaaagagaacgaaatcttccgtctggaatttctgcgcgccgcgagtctgctgaaatatctgccgttcccggttacccgcatgaaagacattcaaggtctgccgtgcattggcgaccaagttcgtgacgtgatcgaggagatcatcgaatatggcgagagcagccgtgttaaagaagttctcaatgacgagcgctacaaggcctttaagcagttcaccagcgtgttcggtgtgggcgtgaaaaccagcgaaaagtggtttcgtatgggcctccgtacggttgaagagctgaaggccagtaagagtctgaagctgagcaagatgcagaaggcgggctttctgtattacgaggatctggccagctgcgttagtaaagcggaagccgatgccgttacgctcatcgtgaagaacacggtgcgtacctttctgccggatgcgctggtgaccatcacgggcggtttccgccgtggcaaaaagatgggccacgacatcgactttctgatcacgaatccgggcccgaaagaggatgacgagctgctccacaaagtggttgatgggctcaagaagcaaggtctgctgctgtactgcgacatcatcgagagcacgttcgtggaggaacaactgccaagtcgcaaaatcgacgccatggacaacttccagaagtgcttcgccattctcaagctgtaccagccgggcgtggataacagcagctataacacgagtaagaagagtgacatggccgaggttaaggattggaaagcgatccgtgtggatctggtgatcacgccattcgagcagtacgcctatgcgctgctcggttggacgggcagccgcgaatttggtcgcgatctgcgccgctatgcgagtcatgagcgcaagatgatcctcgacaaccatggcctctacgaccgcaaaaagcgcatctttctgaaagcgggcagcgaagaagagattttcgcgcatctgggtctggattatgtggagccgtgggaacgcaacgcg

SEQ ID NO: 816 - protein, 394 aa, synthetic construct
  REGION 1..394: note = Variant of terminal deoxynucleotidyl transferase
MHHHHHHGGSGHPPSNTPEGGVPSVIARKVSQYSCQRKTTLNNYNKKFTDAFEIMAENYEFKENEIFRLEFLRAASLLKYLPFPVTRMKDIQGLPCIGDQVRDVIEEIIEYGESSRVKEVLNDERYKAFKQFTSVFGVGVKTSEKWFRMGLRTVEELKASKSLKLSKMQKAGFLYYEDLASCVSKAEADAVTLIVKNTVRTFLPDALVTITGGFRRGKKMGHDIDFLITNPGPKEDDELLHKVVDGLKKQGLLLYCDIIESTFVEEQLPSRKIDAMDNFQKCFAILKLYQPGVDNSSYNTSKKSDMAEVKDWKAIRVDLVITPFEQYAYALLGWTGSREFGRDLRRYASHERKMILDNHGLYDRKKRIFLKAGSEEEIFAHLGLDYVEPWERNA

SEQ ID NO: 817 - DNA, 1182 bp, synthetic construct
  misc_feature 1..1182: note = Variant of terminal deoxynucleotidyl transferase
  source 1..1182: mol_type = other DNA
atgcaccatcatcatcatcatggcggtagcggccatccgccgagcaataccccggagggtggggtgccgagcgttatcgcccgcaaggttagtcagtacagctgccagcgcaagaccacgctgaataactacaacaaaaagtttaccgacgcgttcgagatcatggccgagaactacgaatttaaagagaacgaaatcttccgtctggaatttctgcgcgccgcgagtctgctgaaatatctgccgttcccggttacccgcatgaaagacatccaaggtctgccgtgcattggcgaccaagttcgtgacgtgatcgaggagatcatcgaagagggcgagagcagccgtgttaaagaagttctcaatgacgagcgctacaaggcctttaagcagttcaccagcgtgttcggtgtgggcgtgaaaaccagcgaaaagtggtatcgtatgggcctccgtacggttgaagagctgaaggccagtaagagtctgaagctgagcaagatgcagaaggcgggctttctgtattacgaggatctggccagctgcgttagtaaagcggaagccgatgccgttacgctcatcgtgaagaacacggtgcgtacctttctgccggatgcgctggtgaccctgacgggcggtttccgccgtggcaaaaagatgggccacgacatcgactttctgatcacgaatccgggcccgggtgaggatgacgaactgctccacaaagtggttgatgggctcaagaagcaaggtctgctgctgtactgcgacatcatcgagagcacgttcgtggaggaacaactgccaagtcgcaaaatcgacgccatggacaacttccagaagtgcttcgccattctcaagctgtaccagccgggcgtggataacagcagctataacacgagtaagaagagtgacatggccgaggttaaggattggaaagcgatccgtgtggatctggtgatcacgccattcgagcagtacgcctatgcgctgctcggttggacgggcagccgcgaatttggtcgcgatctgcgccgctatgcgagtcatgagcgcaagatgatcctcgacaaccatggcctctacgaccgcaaaaagcgcatctttctgaaagcgggcagcgaagaagagattttcgcgcatctgggtctggattatgtggagccgtgggaacgcaacgcg

SEQ ID NO: 818 - protein, 394 aa, synthetic construct
  REGION 1..394: note = Variant of terminal deoxynucleotidyl transferase
MHHHHHHGGSGHPPSNTPEGGVPSVIARKVSQYSCQRKTTLNNYNKKFTDAFEIMAENYEFKENEIFRLEFLRAASLLKYLPFPVTRMKDIQGLPCIGDQVRDVIEEIIEEGESSRVKEVLNDERYKAFKQFTSVFGVGVKTSEKWYRMGLRTVEELKASKSLKLSKMQKAGFLYYEDLASCVSKAEADAVTLIVKNTVRTFLPDALVTLTGGFRRGKKMGHDIDFLITNPGPGEDDELLHKVVDGLKKQGLLLYCDIIESTFVEEQLPSRKIDAMDNFQKCFAILKLYQPGVDNSSYNTSKKSDMAEVKDWKAIRVDLVITPFEQYAYALLGWTGSREFGRDLRRYASHERKMILDNHGLYDRKKRIFLKAGSEEEIFAHLGLDYVEPWERNA

SEQ ID NO: 819 - DNA, 1182 bp, synthetic construct
  misc_feature 1..1182: note = Variant of terminal deoxynucleotidyl transferase
  source 1..1182: mol_type = other DNA
atgcaccatcatcatcatcatggcggtagcggccatccgccgagcaataccccggagggtggggtgccgagcgttatcgcccgcaaggttagtcagtacagctgccagcgcaagaccacgctgaataactacaacaaaaagtttaccgacgcgttcgagatcatggccgagaactatgagtttaacgggaacgaaatcttctgtctggaatttctgcgcgccgcgagtctgctgaaatatctgccgttcccggttacccgcatgaaagacctgcaaggtctgccgtgcattggcgaccaagttcgtgacgtgatcgaggagatcctggaagaaggcgagagcagccgtgttaaagaagttctcaatgacgagcgctacaaggcctttaagcagttcaccagcgtgttcggtgtgggcgtgaaaaccagcgaaaagtggtttcgtatgggcctccgtacggttgaagagctgaaggccagtaagagtctgaagctgagcaagatgcagaaggcgggctttctgtattacgaggatctggccagctgcgttagtaaagcggaagccgatgccgttacgctcatcgtgaagaacacggtgcgtacctttctgccggacgcgctggtgaccctgacgggcggtttccgccgtggcaaaaagatgggccacgacatcgactttctgatcacgaatccgggcccgaaagaggatgacgaactgctccacaaagtggttgatgggctcaagaagcaaggtctgctgctgtactgcgacatcatcgagagcacgttcgtggaggaacaactgccaagtcgcaaaatcgacgccatggacaacttccagaagtgcttcgccattctcaagctgtaccagccgggcgtggataacagcagctataacacgagtaagaagagtgacatggccgaggttaaggattggaaagcgatccgtgtggatctggtgatcacgccattcgagcagtacgcctatgcgctgctcggttggacgggcagccgcgaatttggtcgcgatctgcgccgctatgcgagtcatgagcgcaagatgatcctcgacaaccatggcctctacgaccgcaaaaagcgcatctttctgaaagcgggcagcgaagaagagattttcgcgcatctgggtctggattatgtggagccgtgggaacgcaacgcg

SEQ ID NO: 820 - protein, 394 aa, synthetic construct
  REGION 1..394: note = Variant of terminal deoxynucleotidyl transferase
MHHHHHHGGSGHPPSNTPEGGVPSVIARKVSQYSCQRKTTLNNYNKKFTDAFEIMAENYEFNGNEIFCLEFLRAASLLKYLPFPVTRMKDLQGLPCIGDQVRDVIEEILEEGESSRVKEVLNDERYKAFKQFTSVFGVGVKTSEKWFRMGLRTVEELKASKSLKLSKMQKAGFLYYEDLASCVSKAEADAVTLIVKNTVRTFLPDALVTLTGGFRRGKKMGHDIDFLITNPGPKEDDELLHKVVDGLKKQGLLLYCDIIESTFVEEQLPSRKIDAMDNFQKCFAILKLYQPGVDNSSYNTSKKSDMAEVKDWKAIRVDLVITPFEQYAYALLGWTGSREFGRDLRRYASHERKMILDNHGLYDRKKRIFLKAGSEEEIFAHLGLDYVEPWERNA

SEQ ID NO: 821 - DNA, 1182 bp, synthetic construct
  misc_feature 1..1182: note = Variant of terminal deoxynucleotidyl transferase
  source 1..1182: mol_type = other DNA
atgcaccatcatcatcatcatggcggtagcggccatccgccgagcaataccccggagggtggggtgccgagcgttatcgcccgcaaggttagtcagtacagctgccagcgcaagaccacgctgaataactacaacaaaaagtttaccgacgcgttcgagatcatggccgagaactatgagtttaacgggaacgaaatcttctgtctggaatttctgcgcgccgcgagtctgctgaaatatctgccgttcccggttacccgcatgaaagacatccaaggtctgccgtgcattggcgaccaagttcgtgacgtgatcgaggagatcatcgaagagggcgagagcagccgtgttaaagaagttctcaatgacgagcgctacaaggcctttaagcagttcaccagcgtgttcggtgtgggcgtgaaaaccagcgaaaagtggtttcgtatgggcctccgtacggttgaagagctgaaggccagtaagagtctgaagctgagcaagatgcagaaggcgggctttctgtattacgaggatctggccagctgcgttagtaaagcggaagccgatgccgttacgctcatcgtgaagaacacggtgcgtacctttctgccggatgcgctggtgaccatcacgggcggtttccgccgtggcaaaaagatgggccacgacatcgactttctgatcacgaatccgggcccgaaagaggatgacgagctgctccacaaagtggttgatgggctcaagaagcaaggtctgctgctgtactgcgacatcatcgagagcacgttcgtggaggaacaactgccaagtcgcaaaatcgacgccatggacaacttccagaagtgcttcgccattctcaagctgtaccagccgggcgtggataacagcagctataacacgagtaagaagagtgacatggccgaggttaaggattggaaagcgatccgtgtggatctggtgatcacgccattcgagcagtacgcctatgcgctgctcggttggacgggcagccgcgaatttggtcgcgatctgcgccgctatgcgagtcatgagcgcaagatgatcctcgacaaccatggcctctacgaccgcaaaaagcgcatctttctgaaagcgggcagcgaagaagagattttcgcgcatctgggtctggattatgtggagccgtgggaacgcaacgcg

SEQ ID NO: 822 - protein, 394 aa, synthetic construct
  REGION 1..394: note = Variant of terminal deoxynucleotidyl transferase
MHHHHHHGGSGHPPSNTPEGGVPSVIARKVSQYSCQRKTTLNNYNKKFTDAFEIMAENYEFNGNEIFCLEFLRAASLLKYLPFPVTRMKDIQGLPCIGDQVRDVIEEIIEEGESSRVKEVLNDERYKAFKQFTSVFGVGVKTSEKWFRMGLRTVEELKASKSLKLSKMQKAGFLYYEDLASCVSKAEADAVTLIVKNTVRTFLPDALVTITGGFRRGKKMGHDIDFLITNPGPKEDDELLHKVVDGLKKQGLLLYCDIIESTFVEEQLPSRKIDAMDNFQKCFAILKLYQPGVDNSSYNTSKKSDMAEVKDWKAIRVDLVITPFEQYAYALLGWTGSREFGRDLRRYASHERKMILDNHGLYDRKKRIFLKAGSEEEIFAHLGLDYVEPWERNA

SEQ ID NO: 823 - DNA, 1182 bp, synthetic construct
  misc_feature 1..1182: note = Variant of terminal deoxynucleotidyl transferase
  source 1..1182: mol_type = other DNA
atgcaccatcatcatcatcatggcggtagcggccatccgccgagcaataccccggagggtggggtgccgagcgttatcgcccgcaaggttagtcagtacagctgccagcgcaagaccacgctgaataactacaacaaaaagtttaccgacgcgttcgagatcatggccgagaactatgtgtttaacgagaacgaaatcttctgtctggaatttctgcgcgccgcgagtctgctgaaatatctgccgttcccggttacccgcatgaaagacctgcaaggtctgccgtgcattggcgaccaagttcgtgacgtgatcgaggagatcatcgaatatggcgagagcagccgtgttaaagaagttctcaatgacgagcgctacaaggcctttaagcagttcaccagcgtgttcggtgtgggcgtgaaaaccagcgaaaagtggtttcgtatgggcctccgtacggttgaagagctgaaggccagtaagagtctgaagctgagcaagatgcagaaggcgggctttctgtattacgaggatctggccagctgcgttagtaaagcggaagccgatgccgttacgctcatcgtgaagaacacggtgcgtacctttctgccggacgcgctggtgaccatcacgggcggtttccgccgtggcaaaaagatgggccacgacatcgactttctgatcacgaatccgggcccgggtgaggatgacgaactgctccacaaagtggttgatgggctcaagaagcaaggtctgctgctgtactgcgacatcatcgagagcacgttcgtggaggaacaactgccaagtcgcaaaatcgacgccatggacaacttccagaagtgcttcgccattctcaagctgcctcagccgggcgtggataacagcagctataacacgagtaagaagagtgacatggccgaggttaaggattggaaagcgatccgtgtggatctggtgatcacgccattcgagcagtacgcctatgcgctgctcggttggacgggcagccgcgaatttggtcgcgatctgcgccgctatgcgagtcatgagcgcaagatgatcctcgacaaccatggcctctacgaccgcaaaaagcgcatctttctgaaagcgggcagcgaagaagagattttcgcgcatctgggtctggattatgtggagccgtgggaacgcaacgcg

SEQ ID NO: 824 - protein, 394 aa, synthetic construct
  REGION 1..394: note = Variant of terminal deoxynucleotidyl transferase
MHHHHHHGGSGHPPSNTPEGGVPSVIARKVSQYSCQRKTTLNNYNKKFTDAFEIMAENYVFNENEIFCLEFLRAASLLKYLPFPVTRMKDLQGLPCIGDQVRDVIEEIIEYGESSRVKEVLNDERYKAFKQFTSVFGVGVKTSEKWFRMGLRTVEELKASKSLKLSKMQKAGFLYYEDLASCVSKAEADAVTLIVKNTVRTFLPDALVTITGGFRRGKKMGHDIDFLITNPGPGEDDELLHKVVDGLKKQGLLLYCDIIESTFVEEQLPSRKIDAMDNFQKCFAILKLPQPGVDNSSYNTSKKSDMAEVKDWKAIRVDLVITPFEQYAYALLGWTGSREFGRDLRRYASHERKMILDNHGLYDRKKRIFLKAGSEEEIFAHLGLDYVEPWERNA

SEQ ID NO: 825 - DNA, 1182 bp, synthetic construct
  misc_feature 1..1182: note = Variant of terminal deoxynucleotidyl transferase
  source 1..1182: mol_type = other DNA
atgcaccatcatcatcatcatggcggtagcggccatccgccgagcaataccccggagggtggggtgccgagcgttatcgcccgcaaggttagtcagtacagctgccagcgcaagaccacgctgaataactacaacaaaaagtttaccgacgcgttcgagatcatggccgagaactatgagtttaacgggaacgaaatcttctgtctggaatttctgcgcgccgcgagtctgctgaaatatctgccgttcccggttacccgcatgaaagacctgcaaggtctgccgtgcattggcgaccaagttcgtgacgtgatcgaggagatcatcgaagaaggcgagagcagccgtgttaaagaagttctcaatgacgagcgctacaaggcctttaagcagttcaccagcgtgttcggtgtgggcgtgaaaaccagcgaaaagtggtatcgtatgggcctccgtacggttgaagagctgaaggccagtaagagtctgaagctgagcaagatgcagaaggcgggctttctgtattacgaggatctggccagctgcgttagtaaagcggaagccgatgccgttacgctcatcgtgaagaacacggtgcgtacctttctgccgggcgcgctggtgaccctgacgggcggtttccgccgtggcaaaaagatgggccacgacatcgactttctgatcacgaatccgggcccgggtgaggatgacgaactgctccacaaagtggttgatgggctcaagaagcaaggtctgctgctgtactgcgacatcatcgagagcacgttcgtggaggaacaactgccaagtcgcaaaatcgacgccatggacaacttccagaagtgcttcgccattctcaagctgtaccagccgggcgtggataacagcagctataacacgagtaagaagagtgacatggccgaggttaaggattggaaagcgatccgtgtggatctggtgatcacgccattcgagcagtacgcctatgcgctgctcggttggacgggcagccgcgaatttggtcgcgatctgcgccgctatgcgagtcatgagcgcaagatgatcctcgacaaccatggcctctacgaccgcaaaaagcgcatctttctgaaagcgggcagcgaagaagagattttcgcgcatctgggtctggattatgtggagccgtgggaacgcaacgcg

SEQ ID NO: 826 - protein, 394 aa, synthetic construct
  REGION 1..394: note = Variant of terminal deoxynucleotidyl transferase
MHHHHHHGGSGHPPSNTPEGGVPSVIARKVSQYSCQRKTTLNNYNKKFTDAFEIMAENYEFNGNEIFCLEFLRAASLLKYLPFPVTRMKDLQGLPCIGDQVRDVIEEIIEEGESSRVKEVLNDERYKAFKQFTSVFGVGVKTSEKWYRMGLRTVEELKASKSLKLSKMQKAGFLYYEDLASCVSKAEADAVTLIVKNTVRTFLPGALVTLTGGFRRGKKMGHDIDFLITNPGPGEDDELLHKVVDGLKKQGLLLYCDIIESTFVEEQLPSRKIDAMDNFQKCFAILKLYQPGVDNSSYNTSKKSDMAEVKDWKAIRVDLVITPFEQYAYALLGWTGSREFGRDLRRYASHERKMILDNHGLYDRKKRIFLKAGSEEEIFAHLGLDYVEPWERNA

SEQ ID NO: 827 - DNA, 1182 bp, synthetic construct
  misc_feature 1..1182: note = Variant of terminal deoxynucleotidyl transferase
  source 1..1182: mol_type = other DNA
atgcaccatcatcatcatcatggcggtagcggccatccgccgagcaataccccggagggtggggtgccgagcgttatcgcccgcaaggttagtcagtacagctgccagcgcaagaccacgctgaataactacaacaaaaagtttaccgacgcgttcgagatcatggccgagaactacgaatttaaagagaacgaaatcttccgtctggaatttctgcgcgccgcgagtctgctgaaatatctgccgttcccggttacccgcatgaaagacattcaaggtctgccgtgcattggcgaccaagttcgtgacgtgatcgaggagatcctggaatatggcgagagcagccgtgttaaagaagttctcaatgacgagcgctacaaggcctttaagcagttcaccagcgtgttcggtgtgggcgtgaaaaccagcgaaaagtggtttcgtatgggcctccgtacggttgaagagctgaaggccagtaagagtctgaagctgagcaagatgcagaaggcgggctttctgtattacgaggatctggccagctgcgttagtaaagcggaagccgatgccgttacgctcatcgtgaagaacacggtgcgtacctttctgccgggcgcgctggtgaccctgacgggcggtttccgccgtggcaaaaagatgggccacgacatcgactttctgatcacgaatccgggcccgggtgaggatgacgaactgctccacaaagtggttgatgggctcaagaagcaaggtctgctgctgtactgcgacatcatcgagagcacgttcgtggaggaacaactgccaagtcgcaaaatcgacgccatggacaacttccagaagtgcttcgccattctcaagctgcctcagccgggcgtggataacagcagctataacacgagtaagaagagtgacatggccgaggttaaggattggaaagcgatccgtgtggatctggtgatcacgccattcgagcagtacgcctatgcgctgctcggttggacgggcagccgcgaatttggtcgcgatctgcgccgctatgcgagtcatgagcgcaagatgatcctcgacaaccatggcctctacgaccgcaaaaagcgcatctttctgaaagcgggcagcgaagaagagattttcgcgcatctgggtctggattatgtggagccgtgggaacgcaacgcg

SEQ ID NO: 828 - protein, 394 aa, synthetic construct
  REGION 1..394: note = Variant of terminal deoxynucleotidyl transferase
MHHHHHHGGSGHPPSNTPEGGVPSVIARKVSQYSCQRKTTLNNYNKKFTDAFEIMAENYEFKENEIFRLEFLRAASLLKYLPFPVTRMKDIQGLPCIGDQVRDVIEEILEYGESSRVKEVLNDERYKAFKQFTSVFGVGVKTSEKWFRMGLRTVEELKASKSLKLSKMQKAGFLYYEDLASCVSKAEADAVTLIVKNTVRTFLPGALVTLTGGFRRGKKMGHDIDFLITNPGPGEDDELLHKVVDGLKKQGLLLYCDIIESTFVEEQLPSRKIDAMDNFQKCFAILKLPQPGVDNSSYNTSKKSDMAEVKDWKAIRVDLVITPFEQYAYALLGWTGSREFGRDLRRYASHERKMILDNHGLYDRKKRIFLKAGSEEEIFAHLGLDYVEPWERNA

SEQ ID NO: 829 - DNA, 1182 bp, synthetic construct
  misc_feature 1..1182: note = Variant of terminal deoxynucleotidyl transferase
  source 1..1182: mol_type = other DNA
atgcaccatcatcatcatcatggcggtagcggccatccgccgagcaataccccggagggtggggtgccgagcgttatcgcccgcaaggttagtcagtacagctgccagcgcaagaccacgctgaataactacaacaaaaagtttaccgacgcgttcgagatcatggccgagaacgcagagtttaacgggaacgaaatcttctgtctggaatttctgcgcgccgcgagtctgctgaaatatctgccgttcccggttacccgcatgaaagacattcaaggtctgccgtgcattggcgaccaagttcgtgacgtgatcgaggagatcatcgaagagggcgagagcagccgtgttaaagaagttctcaatgacgagcgctacaaggcctttaagcagttcaccagcgtgttcggtgtgggcgtgaaaaccagcgaaaagtggtttcgtatgggcctccgtacggttgaagagctgaaggccagtaagagtctgaagctgagcaagatgcagaaggcgggctttctgtattacgaggatctggccagctgcgttagtaaagcggaagccgatgccgttacgctcatcgtgaagaacacggtgcgtacctttctgccggatgcgctggtgaccatcacgggcggtttccgccgtggcaaaaagatgggccacgacatcgactttctgatcacgaatccgggcccgaaagaggatgacgagctgctccacaaagtggttgatgggctcaagaagcaaggtctgctgctgtactgcgacatcatcgagagcacgttcgtggaggaacaactgccaagtcgcaaaatcgacgccatggacaacttccagaagtgcttcgccattctcaagctgtaccagccgggcgtggataacagcagctataacacgagtaagaagagtgacatggccgaggttaaggattggaaagcgatccgtgtggatctggtgatcacgccattcgagcagtacgcctatgcgctgctcggttggacgggcagccgcgaatttggtcgcgatctgcgccgctatgcgagtcatgagcgcaagatgatcctcgacaaccatggcctctacgaccgcaaaaagcgcatctttctgaaagcgggcagcgaagaagagattttcgcgcatctgggtctggattatgtggagccgtgggaacgcaacgcg

SEQ ID NO: 830 - protein, 394 aa, synthetic construct
  REGION 1..394: note = Variant of terminal deoxynucleotidyl transferase
MHHHHHHGGSGHPPSNTPEGGVPSVIARKVSQYSCQRKTTLNNYNKKFTDAFEIMAENAEFNGNEIFCLEFLRAASLLKYLPFPVTRMKDIQGLPCIGDQVRDVIEEIIEEGESSRVKEVLNDERYKAFKQFTSVFGVGVKTSEKWFRMGLRTVEELKASKSLKLSKMQKAGFLYYEDLASCVSKAEADAVTLIVKNTVRTFLPDALVTITGGFRRGKKMGHDIDFLITNPGPKEDDELLHKVVDGLKKQGLLLYCDIIESTFVEEQLPSRKIDAMDNFQKCFAILKLYQPGVDNSSYNTSKKSDMAEVKDWKAIRVDLVITPFEQYAYALLGWTGSREFGRDLRRYASHERKMILDNHGLYDRKKRIFLKAGSEEEIFAHLGLDYVEPWERNA

SEQ ID NO: 831 - DNA, 1182 bp, synthetic construct
  misc_feature 1..1182: note = Variant of terminal deoxynucleotidyl transferase
  source 1..1182: mol_type = other DNA
atgcaccatcatcatcatcatggcggtagcggccatccgccgagcaataccccggagggtggggtgccgagcgttatcgcccgcaaggttagtcagtacagctgccagcgcaagaccacgctgaataactacaacaaaaagtttaccgacgcgttcgagatcatggccgagaactatgagtttaacgagaacgaaatcttctgtctggaatttctgcgcgccgcgagtctgctgaaatatctgccgttcccggttacccgcatgaaagacctgcaaggtctgccgtgcattggcgaccaagttcgtgacgtgatcgaggagatcatcgaatatggcgagagcagccgtgttaaagaagttctcaatgacgagcgctacaaggcctttaagcagttcaccagcgtgttcggtgtgggcgtgaaaaccagcgaaaagtggtttcgtatgggcctccgtacggttgaagagctgaaggccagtaagagtctgaagctgagcaagatgcagaaggcgggctttctgtattacgaggatctggccagctgcgttagtaaagcggaagccgatgccgttacgctcatcgtgaagaacacggtgcgtacctttctgccggatgcgctggtgaccatcacgggcggtttccgccgtggcaaaaagatgggccacgacatcgactttctgatcacgaatccgggcccgaaagaggatgacgaactgctccacaaagtggttgatgggctcaagaagcaaggtctgctgctgtactgcgacatcatcgagagcacgttcgtggaggaacaactgccaagtcgcaaaatcgacgccatggacaacttccagaagtgcttcgccattctcaagctgcctcagccgggcgtggataacagcagctataacacgagtaagaagagtgacatggccgaggttaaggattggaaagcgatccgtgtggatctggtgatcacgccattcgagcagtacgcctatgcgctgctcggttggacgggcagccgcgaatttggtcgcgatctgcgccgctatgcgagtcatgagcgcaagatgatcctcgacaaccatggcctctacgaccgcaaaaagcgcatctttctgaaagcgggcagcgaagaagagattttcgcgcatctgggtctggattatgtggagccgtgggaacgcaacgcg

SEQ ID NO: 832 - protein, 394 aa, synthetic construct
  REGION 1..394: note = Variant of terminal deoxynucleotidyl transferase
MHHHHHHGGSGHPPSNTPEGGVPSVIARKVSQYSCQRKTTLNNYNKKFTDAFEIMAENYEFNENEIFCLEFLRAASLLKYLPFPVTRMKDLQGLPCIGDQVRDVIEEIIEYGESSRVKEVLNDERYKAFKQFTSVFGVGVKTSEKWFRMGLRTVEELKASKSLKLSKMQKAGFLYYEDLASCVSKAEADAVTLIVKNTVRTFLPDALVTITGGFRRGKKMGHDIDFLITNPGPKEDDELLHKVVDGLKKQGLLLYCDIIESTFVEEQLPSRKIDAMDNFQKCFAILKLPQPGVDNSSYNTSKKSDMAEVKDWKAIRVDLVITPFEQYAYALLGWTGSREFGRDLRRYASHERKMILDNHGLYDRKKRIFLKAGSEEEIFAHLGLDYVEPWERNA

SEQ ID NO: 833 - DNA, 1182 bp, synthetic construct
  misc_feature 1..1182: note = Variant of terminal deoxynucleotidyl transferase
  source 1..1182: mol_type = other DNA
atgcaccatcatcatcatcatggcggtagcggccatccgccgagcaataccccggagggtggggtgccgagcgttatcgcccgcaaggttagtcagtacagctgccagcgcaagaccacgctgaataactacaacaaaaagtttaccgacgcgttcgagatcatggccgagaactacgaatttaaagagaacgaaatcttccgtctggaatttctgcgcgccgcgagtctgctgaaatatctgccgttcccggttacccgcatgaaagacctgcaaggtctgccgtgcattggcgaccaagttcgtgacgtgatcgaggagatcatcgaagagggcgagagcagccgtgttaaagaagttctcaatgacgagcgctacaaggcctttaagcagttcaccagcgtgttcggtgtgggcgtgaaaaccagcgaaaagtggtttcgtatgggcctccgtacggttgaagagctgaaggccagtaagagtctgaagctgagcaagatgcagaaggcgggctttctgtattacgaggatctggccagctgcgttagtaaagcggaagccgatgccgttacgctcatcgtgaagaacacggtgcgtacctttctgccggacgcgctggtgaccatcacgggcggtttccgccgtggcaaaaagatgggccacgacatcgactttctgatcacgaatccgggcccgaaagaggatgacgagctgctccacaaagtggttgatgggctcaagaagcaaggtctgctgctgtactgcgacatcatcgagagcacgttcgtggaggaacaactgccaagtcgcaaaatcgacgccatggacaacttccagaagtgcttcgccattctcaagctgtaccagccgggcgtggataacagcagctataacacgagtaagaagagtgacatggccgaggttaaggattggaaagcgatccgtgtggatctggtgatcacgccattcgagcagtacgcctatgcgctgctcggttggacgggcagccgcgaatttggtcgcgatctgcgccgctatgcgagtcatgagcgcaagatgatcctcgacaaccatggcctctacgaccgcaaaaagcgcatctttctgaaagcgggcagcgaagaagagattttcgcgcatctgggtctggattatgtggagccgtgggaacgcaacgcg

SEQ ID NO: 834 - protein, 394 aa, synthetic construct
  REGION 1..394: note = Variant of terminal deoxynucleotidyl transferase
MHHHHHHGGSGHPPSNTPEGGVPSVIARKVSQYSCQRKTTLNNYNKKFTDAFEIMAENYEFKENEIFRLEFLRAASLLKYLPFPVTRMKDLQGLPCIGDQVRDVIEEIIEEGESSRVKEVLNDERYKAFKQFTSVFGVGVKTSEKWFRMGLRTVEELKASKSLKLSKMQKAGFLYYEDLASCVSKAEADAVTLIVKNTVRTFLPDALVTITGGFRRGKKMGHDIDFLITNPGPKEDDELLHKVVDGLKKQGLLLYCDIIESTFVEEQLPSRKIDAMDNFQKCFAILKLYQPGVDNSSYNTSKKSDMAEVKDWKAIRVDLVITPFEQYAYALLGWTGSREFGRDLRRYASHERKMILDNHGLYDRKKRIFLKAGSEEEIFAHLGLDYVEPWERNA

SEQ ID NO: 835 - DNA, 1182 bp, synthetic construct
  misc_feature 1..1182: note = Variant of terminal deoxynucleotidyl transferase
  source 1..1182: mol_type = other DNA
atgcaccatcatcatcatcatggcggtagcggccatccgccgagcaataccccggagggtggggtgccgagcgttatcgcccgcaaggttagtcagtacagctgccagcgcaagaccacgctgaataactacaacaaaaagtttaccgacgcgttcgagatcatggccgagaacgcagagtttaacgggaacgaaatcttctgtctggaatttctgcgcgccgcgagtctgctgaaatatctgccgttcccggttacccgcatgaaagacattcaaggtctgccgtgcattggcgaccaagttcgtcgcgtgatcgaggagatcatcgaagagggcgagagcagccgtgttaaagaagttctcaatgacgagcgctacaaggcctttaagcagttcaccagcgtgttcggtgtgggcgtgaaaaccagcgaaaagtggtttcgtatgggcctccgtacggttgaagagctgaaggccagtaagagtctgaagctgagcaagatgcagaaggcgggctttctgtattacgaggatctggccagctgcgttagtaaagcggaagccgatgccgttacgctcatcgtgaagaacacggtgcgtacctttctgccggatgcgctggtgaccatcacgggcggtttccgccgtggcaaaaagatgggccacgacatcgactttctgatcacgaatccgggcccgggtgaggatgacgaactgctccacaaagtggttgatgggctcaagaagcaaggtctgctgctgtactgcgacatcatcgagagcacgttcgtggaggaacaactgccaagtcgcaaaatcgacgccatggacaacttccagaagtgcttcgccattctcaagctgtaccagccgggcgtggataacagcagctataacacgagtaagaagagtgacatggccgaggttaaggattggaaagcgatccgtgtggatctggtgatcacgccattcgagcagtacgcctatgcgctgctcggttggacgggcagccgcgaatttggtcgcgatctgcgccgctatgcgagtcatgagcgcaagatgatcctcgacaaccatggcctctacgaccgcaaaaagcgcatctttctgaaagcgggcagcgaagaagagattttcgcgcatctgggtctggattatgtggagccgtgggaacgcaacgcg

SEQ ID NO: 836 - protein, 394 aa, synthetic construct
  REGION 1..394: note = Variant of terminal deoxynucleotidyl transferase
MHHHHHHGGSGHPPSNTPEGGVPSVIARKVSQYSCQRKTTLNNYNKKFTDAFEIMAENAEFNGNEIFCLEFLRAASLLKYLPFPVTRMKDIQGLPCIGDQVRRVIEEIIEEGESSRVKEVLNDERYKAFKQFTSVFGVGVKTSEKWFRMGLRTVEELKASKSLKLSKMQKAGFLYYEDLASCVSKAEADAVTLIVKNTVRTFLPDALVTITGGFRRGKKMGHDIDFLITNPGPGEDDELLHKVVDGLKKQGLLLYCDIIESTFVEEQLPSRKIDAMDNFQKCFAILKLYQPGVDNSSYNTSKKSDMAEVKDWKAIRVDLVITPFEQYAYALLGWTGSREFGRDLRRYASHERKMILDNHGLYDRKKRIFLKAGSEEEIFAHLGLDYVEPWERNA

SEQ ID NO: 837 - DNA, 1182 bp, synthetic construct
  misc_feature 1..1182: note = Variant of terminal deoxynucleotidyl transferase
  source 1..1182: mol_type = other DNA
atgcaccatcatcatcatcatggcggtagcggccatccgccgagcaataccccggagggtggggtgccgagcgttatcgcccgcaaggttagtcagtacagctgccagcgcaagaccacgctgaataactacaacaaaaagtttaccgacgcgttcgagatcatggccgagaactacgaatttaaagagaacgaaatcttccgtctggaatttctgcgcgccgcgagtctgctgaaatatctgccgttcccggttacccgcatgaaagacctgcaaggtctgccgtgcattggcgaccaagttcgtgacgtgatcgaggagatcctggaagaaggcgagagcagccgtgttaaagaagttctcaatgacgagcgctacaaggcctttaagcagttcaccagcgtgttcggtgtgggcgtgaaaaccagcgaaaagtggtatcgtatgggcctccgtacggttgaagagctgaaggccagtaagagtctgaagctgagcaagatgcagaaggcgggctttctgtattacgaggatctggccagctgcgttagtaaagcggaagccgatgccgttacgctcatcgtgaagaacacggtgcgtacctttctgccgggcgcgctggtgaccctgacgggcggtttccgccgtggcaaaaagatgggccacgacatcgactttctgatcacgaatccgggcccgggtgaggatgacgaactgctccacaaagtggttgatgggctcaagaagcaaggtctgctgctgtactgcgacatcatcgagagcacgttcgtggaggaacaactgccaagtcgcaaaatcgacgccatggacaacttccagaagtgcttcgccattctcaagctgtaccagccgggcgtggataacagcagctataacacgagtaagaagagtgacatggccgaggttaaggattggaaagcgatccgtgtggatctggtgatcacgccattcgagcagtacgcctatgcgctgctcggttggacgggcagccgcgaatttggtcgcgatctgcgccgctatgcgagtcatgagcgcaagatgatcctcgacaaccatggcctctacgaccgcaaaaagcgcatctttctgaaagcgggcagcgaagaagagattttcgcgcatctgggtctggattatgtggagccgtgggaacgcaacgcg

SEQ ID NO: 838 - protein, 394 aa, synthetic construct
  REGION 1..394: note = Variant of terminal deoxynucleotidyl transferase
MHHHHHHGGSGHPPSNTPEGGVPSVIARKVSQYSCQRKTTLNNYNKKFTDAFEIMAENYEFKENEIFRLEFLRAASLLKYLPFPVTRMKDLQGLPCIGDQVRDVIEEILEEGESSRVKEVLNDERYKAFKQFTSVFGVGVKTSEKWYRMGLRTVEELKASKSLKLSKMQKAGFLYYEDLASCVSKAEADAVTLIVKNTVRTFLPGALVTLTGGFRRGKKMGHDIDFLITNPGPGEDDELLHKVVDGLKKQGLLLYCDIIESTFVEEQLPSRKIDAMDNFQKCFAILKLYQPGVDNSSYNTSKKSDMAEVKDWKAIRVDLVITPFEQYAYALLGWTGSREFGRDLRRYASHERKMILDNHGLYDRKKRIFLKAGSEEEIFAHLGLDYVEPWERNA

SEQ ID NO: 839 - DNA, 1182 bp, synthetic construct
  misc_feature 1..1182: note = Variant of terminal deoxynucleotidyl transferase
  source 1..1182: mol_type = other DNA
atgcaccatcatcatcatcatggcggtagcggccatccgccgagcaataccccggagggtggggtgccgagcgttatcgcccgcaaggttagtcagtacagctgccagcgcaagaccacgctgaataactacaacaaaaagtttaccgacgcgttcgagatcatggccgagaacgcagagtttaacgggaacgaaatcttctgtctggaatttctgcgcgccgcgagtctgctgaaatatctgccgttcccggttacccgcatgaaagacatccaaggtctgccgtgcattggcgaccaagttcgtgacgtgatcgaggagatcatcgaagagggcgagagcagccgtgttaaagaagttctcaatgacgagcgctacaaggcctttaagcagttcaccagcgtgttcggtgtgggcgtgaaaaccagcgaaaagtggtatcgtatgggcctccgtacggttgaagagctgaaggccagtaagagtctgaagctgagcaagatgcagaaggcgggctttctgtattacgaggatctggccagctgcgttagtaaagcggaagccgatgccgttacgctcatcgtgaagaacacggtgcgtacctttctgccggatgcgctggtgaccatcacgggcggtttccgccgtggcaaaaagatgggccacgacatcgactttctgatcacgaatccgggcccgaaagaggatgacgaactgctccacaaagtggttgatgggctcaagaagcaaggtctgctgctgtactgcgacatcatcgagagcacgttcgtggaggaacaactgccaagtcgcaaaatcgacgccatggacaacttccagaagtgcttcgccattctcaagctgtaccagccgggcgtggataacagcagctataacacgagtaagaagagtgacatggccgaggttaaggattggaaagcgatccgtgtggatctggtgatcacgccattcgagcagtacgcctatgcgctgctcggttggacgggcagccgcgaatttggtcgcgatctgcgccgctatgcgagtcatgagcgcaagatgatcctcgacaaccatggcctctacgaccgcaaaaagcgcatctttctgaaagcgggcagcgaagaagagattttcgcgcatctgggtctggattatgtggagccgtgggaacgcaacgcg

SEQ ID NO: 840 - protein, 394 aa, synthetic construct
  REGION 1..394: note = Variant of terminal deoxynucleotidyl transferase
MHHHHHHGGSGHPPSNTPEGGVPSVIARKVSQYSCQRKTTLNNYNKKFTDAFEIMAENAEFNGNEIFCLEFLRAASLLKYLPFPVTRMKDIQGLPCIGDQVRDVIEEIIEEGESSRVKEVLNDERYKAFKQFTSVFGVGVKTSEKWYRMGLRTVEELKASKSLKLSKMQKAGFLYYEDLASCVSKAEADAVTLIVKNTVRTFLPDALVTITGGFRRGKKMGHDIDFLITNPGPKEDDELLHKVVDGLKKQGLLLYCDIIESTFVEEQLPSRKIDAMDNFQKCFAILKLYQPGVDNSSYNTSKKSDMAEVKDWKAIRVDLVITPFEQYAYALLGWTGSREFGRDLRRYASHERKMILDNHGLYDRKKRIFLKAGSEEEIFAHLGLDYVEPWERNA

SEQ ID NO: 841 - DNA, 1182 bp, synthetic construct
  misc_feature 1..1182: note = Variant of terminal deoxynucleotidyl transferase
  source 1..1182: mol_type = other DNA
atgcaccatcatcatcatcatggcggtagcggccatccgccgagcaataccccggagggtggggtgccgagcgttatcgcccgcaaggttagtcagtacagctgccagcgcaagaccacgctgaataactacaacaaaaagtttaccgacgcgttcgagatcatggccgagaactatgagtttaacgagaacgaaatcttctgtctggaatttctgcgcgccgcgagtctgctgaaatatctgccgttcccggttacccgcatgaaagacattcaaggtctgccgtgcattggcgaccaagttcgtcgcgtgatcgaggagatcatcgaagagggcgagagcagccgtgttaaagaagttctcaatgacgagcgctacaaggcctttaagcagttcaccagcgtgttcggtgtgggcgtgaaaaccagcgaaaagtggtttcgtatgggcctccgtacggttgaagagctgaaggccagtaagagtctgaagctgagcaagatgcagaaggcgggctttctgtattacgaggatctggccagctgcgttagtaaagcggaagccgatgccgttacgctcatcgtgaagaacacggtgcgtacctttctgccggatgcgctggtgaccatcacgggcggtttccgccgtggcaaaaagatgggccacgacatcgactttctgatcacgaatccgggcccgaaagaggatgacgaactgctccacaaagtggttgatgggctcaagaagcaaggtctgctgctgtactgcgacatcatcgagagcacgttcgtggaggaacaactgccaagtcgcaaaatcgacgccatggacaacttccagaagtgcttcgccattctcaagctgtaccagccgggcgtggataacagcagctataacacgagtaagaagagtgacatggccgaggttaaggattggaaagcgatccgtgtggatctggtgatcacgccattcgagcagtacgcctatgcgctgctcggttggacgggcagccgcgaatttggtcgcgatctgcgccgctatgcgagtcatgagcgcaagatgatcctcgacaaccatggcctctacgaccgcaaaaagcgcatctttctgaaagcgggcagcgaagaagagattttcgcgcatctgggtctggattatgtggagccgtgggaacgcaacgcg

SEQ ID NO: 842 - protein, 394 aa, synthetic construct
  REGION 1..394: note = Variant of terminal deoxynucleotidyl transferase
MHHHHHHGGSGHPPSNTPEGGVPSVIARKVSQYSCQRKTTLNNYNKKFTDAFEIMAENYEFNENEIFCLEFLRAASLLKYLPFPVTRMKDIQGLPCIGDQVRRVIEEIIEEGESSRVKEVLNDERYKAFKQFTSVFGVGVKTSEKWFRMGLRTVEELKASKSLKLSKMQKAGFLYYEDLASCVSKAEADAVTLIVKNTVRTFLPDALVTITGGFRRGKKMGHDIDFLITNPGPKEDDELLHKVVDGLKKQGLLLYCDIIESTFVEEQLPSRKIDAMDNFQKCFAILKLYQPGVDNSSYNTSKKSDMAEVKDWKAIRVDLVITPFEQYAYALLGWTGSREFGRDLRRYASHERKMILDNHGLYDRKKRIFLKAGSEEEIFAHLGLDYVEPWERNA

SEQ ID NO: 843 - DNA, 1182 bp, synthetic construct
  misc_feature 1..1182: note = Variant of terminal deoxynucleotidyl transferase
  source 1..1182: mol_type = other DNA
atgcaccatcatcatcatcatggcggtagcggccatccgccgagcaataccccggagggtggggtgccgagcgttatcgcccgcaaggttagtcagtacagctgccagcgcaagaccacgctgaataactacaacaaaaagtttaccgacgcgttcgagatcatggccgagaactacgaatttaaagagaacgaaatcttccgtctggaatttctgcgcgccgcgagtctgctgaaatatctgccgttcccggttacccgcatgaaagacctgcaaggtctgccgtgcattggcgaccaagttcgtgacgtgatcgaggagatcctggaatatggcgagagcagccgtgttaaagaagttctcaatgacgagcgctacaaggcctttaagcagttcaccagcgtgttcggtgtgggcgtgaaaaccagcgaaaagtggtttcgtatgggcctccgtacggttgaagagctgaaggccagtaagagtctgaagctgagcaagatgcagaaggcgggctttctgtattacgaggatctggccagctgcgttagtaaagcggaagccgatgccgttacgctcatcgtgaagaacacggtgcgtacctttctgccggatgcgctggtgaccatcacgggcggtttccgccgtggcaaaaagatgggccacgacatcgactttctgatcacgaatccgggcccgaaagaggatgacgagctgctccacaaagtggttgatgggctcaagaagcaaggtctgctgctgtactgcgacatcatcgagagcacgttcgtggaggaacaactgccaagtcgcaaaatcgacgccatggacaacttccagaagtgcttcgccattctcaagctgtaccagccgggcgtggataacagcagctataacacgagtaagaagagtgacatggccgaggttaaggattggaaagcgatccgtgtggatctggtgatcacgccattcgagcagtacgcctatgcgctgctcggttggacgggcagccgcgaatttggtcgcgatctgcgccgctatgcgagtcatgagcgcaagatgatcctcgacaaccatggcctctacgaccgcaaaaagcgcatctttctgaaagcgggcagcgaagaagagattttcgcgcatctgggtctggattatgtggagccgtgggaacgcaacgcg

SEQ ID NO: 844 - protein, 394 aa, synthetic construct
  REGION 1..394: note = Variant of terminal deoxynucleotidyl transferase
MHHHHHHGGSGHPPSNTPEGGVPSVIARKVSQYSCQRKTTLNNYNKKFTDAFEIMAENYEFKENEIFRLEFLRAASLLKYLPFPVTRMKDLQGLPCIGDQVRDVIEEILEYGESSRVKEVLNDERYKAFKQFTSVFGVGVKTSEKWFRMGLRTVEELKASKSLKLSKMQKAGFLYYEDLASCVSKAEADAVTLIVKNTVRTFLPDALVTITGGFRRGKKMGHDIDFLITNPGPKEDDELLHKVVDGLKKQGLLLYCDIIESTFVEEQLPSRKIDAMDNFQKCFAILKLYQPGVDNSSYNTSKKSDMAEVKDWKAIRVDLVITPFEQYAYALLGWTGSREFGRDLRRYASHERKMILDNHGLYDRKKRIFLKAGSEEEIFAHLGLDYVEPWERNA

SEQ ID NO: 845 - DNA, 1182 bp, synthetic construct
  misc_feature 1..1182: note = Variant of terminal deoxynucleotidyl transferase
  source 1..1182: mol_type = other DNA
atgcaccatcatcatcatcatggcggtagcggccatccgccgagcaataccccggagggtggggtgccgagcgttatcgcccgcaaggttagtcagtacagctgccagcgcaagaccacgctgaataactacaacaaaaagtttaccgacgcgtttgagatcctggccgagaactacgaatttaaagagaacgaaatcgctcgtctggaatttctgcgcgccgcgagtctgctgaaatatctgccgttcccggttaccagtatgaaagacatccaaggtctgccgtgcattggccctcaagttcgtgacgtgatcgaggagatcatcgaaaccggcgagagcagccgtgttaaagaagttctcaatgacgagcgctacaaggcctttaagcagttcaccagcgtgttcggtgtgggcgtgaaaaccagcgaaaagtggtttcgtatgggcctccgtacggttgaagaggcaaaggccagtaagagtctgaagctgagcaagatgcagaaggcgggcttcctgtattacgaggatctggccagctgcgttagtaaagcggaagccgatgccgttacgctcatcgtgaagaacacggtgcgtacctttctgccggatgcgctggtgaccatcacgggcggtttccgccgtggcaaaaagatgggccacgacatcgactttctgatcacgaatccgggcccgaaagaggatgacgagctgctccacaaagtggttgatgggctcaagaagcaaggtctgctgctgtacggtgacatcatcgagagcacgttcgtggaggaacaactgccaagtcgcaaaatcgacgccatggacaacttccagaagtgcttcgccattctcaagctgtaccagccgggcgtggataacagcagctataacacgagtaagaagagtgacatggccgaggttaaggattggaaagcggtccgtgtggatctggtgatcacgccattcgagcagtacgcctatgcgctgctcggttggacgggcagccgcgaatttggtcgcgatctgcgccgctatgcgagtgttgagcgcaagatgatcctcgacaaccatggcctctacgaccgcaaaaagcgcatctttctgaaagcgggcagcgaagaagagattttcgcgcatctgggtctggattatgtggagccgtgggaacgcaacgcg

SEQ ID NO: 846 - protein, 394 aa, synthetic construct
  REGION 1..394: note = Variant of terminal deoxynucleotidyl transferase
MHHHHHHGGSGHPPSNTPEGGVPSVIARKVSQYSCQRKTTLNNYNKKFTDAFEILAENYEFKENEIARLEFLRAASLLKYLPFPVTSMKDIQGLPCIGPQVRDVIEEIIETGESSRVKEVLNDERYKAFKQFTSVFGVGVKTSEKWFRMGLRTVEEAKASKSLKLSKMQKAGFLYYEDLASCVSKAEADAVTLIVKNTVRTFLPDALVTITGGFRRGKKMGHDIDFLITNPGPKEDDELLHKVVDGLKKQGLLLYGDIIESTFVEEQLPSRKIDAMDNFQKCFAILKLYQPGVDNSSYNTSKKSDMAEVKDWKAVRVDLVITPFEQYAYALLGWTGSREFGRDLRRYASVERKMILDNHGLYDRKKRIFLKAGSEEEIFAHLGLDYVEPWERNA

SEQ ID NO: 847 - DNA, 1182 bp, synthetic construct
  misc_feature 1..1182: note = Variant of terminal deoxynucleotidyl transferase
  source 1..1182: mol_type = other DNA
atgcaccatcatcatcatcatggcggtagcggccatccgccgagcaataccccggagggtggggtgccgagcgttatcgcccgcaaggttagtcagtacagctgccagcgcaagaccacgctgaataactacaacaaaaagtttaccgacgcgtttgagatcctggccgagaactacgaatttaaagagaacgaaatcgctcgtctggaatttctgcgcgccgcgagtctgctgaaatatctgccgttcccggttaccagtatgaaagacatccaaggtctgccgtgcattggcgaccaagttcgtgatgtgatcgaggagatcatcgaaaccggcgagagcagccgtgttaaagaagttctcaatgacgagcgctacaaggcctttaagcagttcaccagcgtgttcggtgtgggcgtgaaaaccagcgaaaagtggtttcgtatgggcctccgtacggttgaagaggcaaaggccagtaagagtctgaagctgagcaagatgcagaaggcgggcttcctgtattacgaggatctggcccgctgcgttagtaaagcggaagccgatgccgttacgctcatcgtgaagaacacggtgcgtacctttctgccggatgcgctggtgaccatcacgggcggtttccgccgtggcaaaaagatgggccacgacatcgactttctgatcacgaatccgggcccgaaacaggatgacgagctgctccacaaagtggttgatgggctcaagaagcaaggtctgctgctgtacgaagacatcatcgagagcacgttcgtggaggaacaactgccaagtcgcaaaatcgacgccatggacaacttccagaagtgcttcgccattctcaagctgtaccagccgggcgtggataacagcagctataacacgagtaagaagagtgacatggccgaggttaaggattggaaagcggtccgtgtggatctggtgatcacgccattcgagcagtacgcctatgcgctgctcggttggacgggcagccgcgaatttggtcgcgatctgcgccgctatgcgagtgttgagcgcaagatgatcctcgacaaccatggcctctacgaccgcaaaaagcgcatctttctgaaagcgggcagcgaagaagagattttcgcgcatctgggtctggattatgtggagccgtgggaacgcaacgcg

SEQ ID NO: 848 - protein, 394 aa, synthetic construct
  REGION 1..394: note = Variant of terminal deoxynucleotidyl transferase
MHHHHHHGGSGHPPSNTPEGGVPSVIARKVSQYSCQRKTTLNNYNKKFTDAFEILAENYEFKENEIARLEFLRAASLLKYLPFPVTSMKDIQGLPCIGDQVRDVIEEIIETGESSRVKEVLNDERYKAFKQFTSVFGVGVKTSEKWFRMGLRTVEEAKASKSLKLSKMQKAGFLYYEDLARCVSKAEADAVTLIVKNTVRTFLPDALVTITGGFRRGKKMGHDIDFLITNPGPKQDDELLHKVVDGLKKQGLLLYEDIIESTFVEEQLPSRKIDAMDNFQKCFAILKLYQPGVDNSSYNTSKKSDMAEVKDWKAVRVDLVITPFEQYAYALLGWTGSREFGRDLRRYASVERKMILDNHGLYDRKKRIFLKAGSEEEIFAHLGLDYVEPWERNA

SEQ ID NO: 849 - DNA, 1182 bp, synthetic construct
  misc_feature 1..1182: note = Variant of terminal deoxynucleotidyl transferase
  source 1..1182: mol_type = other DNA
atgcaccatcatcatcatcatggcggtagcggccatccgccgagcaataccccggagggtggggtgccgagcgttatcgcccgcaaggttagtcagtacagctgccagcgcaagaccacgctgaataactacaacaaaaagtttaccgacgcgctggagatcatggccgagaactacgaatttaaagagaacgaaatcgctcgtctggaatttctgcgcgccgcgagtctgctgaaatatctgccgttcccggttaccagtatgaaagacatccaaggtctgccgtgcattggccctcaagttcgtgacgtgatcgaggagatcatcgaaaccggcgagagcagccgtgttaaagaagttctcaatgacgagcgctacaaggcctttaagcagttcaccagcgtgttcggtgtgggcgtgaaaaccagcgaaaagtggtttcgtatgggcctccgtacggttgaagaggcaaaggccagtaagagtctgaagctgagcaagatgcagaaggcgggcttcctgtattacgaggatctggcccgctgcgttagtaaagcggaagccgatgccgttacgctcatcgtgaagaacacggtgcgtacctttctgccggatgcgctggtgaccatcacgggcggtttccgccgtggcaaaaagatgggccacgacatcgactttctgatcacgaatccgggcccgaaacaggatgacgagctgctccacaaagtggttgatgggctcaagaagcaaggtctgctgctgtactgcgacatcatcgagagcacgttcgtggaggaacaactgccaagtcgcaaaatcgacgccatggacaacttccagaagtgcttcgccattctcaagctgtaccagccgggcgtggataacagcagctataacacgagtaagaagagtgacatggccgaggttaaggattggaaagcggtccgtgtggatctggtgatcacgccattcgagcagtacgcctatgcgctgctcggttggacgggcagccgcgaatttggtcgcgatctgcgccgctatgcgagtcatgagcgcaagatgatcctcgacaaccatggcctctacgaccgcaaaaagcgcatctttctgaaagcgggcagcgaagaagagattttcgcgcatctgggtctggattatgtggagccgtgggaacgcaacgcg

SEQ ID NO: 850 - protein, 394 aa, synthetic construct
  REGION 1..394: note = Variant of terminal deoxynucleotidyl transferase
MHHHHHHGGSGHPPSNTPEGGVPSVIARKVSQYSCQRKTTLNNYNKKFTDALEIMAENYEFKENEIARLEFLRAASLLKYLPFPVTSMKDIQGLPCIGPQVRDVIEEIIETGESSRVKEVLNDERYKAFKQFTSVFGVGVKTSEKWFRMGLRTVEEAKASKSLKLSKMQKAGFLYYEDLARCVSKAEADAVTLIVKNTVRTFLPDALVTITGGFRRGKKMGHDIDFLITNPGPKQDDELLHKVVDGLKKQGLLLYCDIIESTFVEEQLPSRKIDAMDNFQKCFAILKLYQPGVDNSSYNTSKKSDMAEVKDWKAVRVDLVITPFEQYAYALLGWTGSREFGRDLRRYASHERKMILDNHGLYDRKKRIFLKAGSEEEIFAHLGLDYVEPWERNA

SEQ ID NO: 851 - DNA, 1182 bp, synthetic construct
  misc_feature 1..1182: note = Variant of terminal deoxynucleotidyl transferase
  source 1..1182: mol_type = other DNA
atgcaccatcatcatcatcatggcggtagcggccatccgccgagcaataccccggagggtggggtgccgagcgttatcgcccgcaaggttagtcagtacagctgccagcgcaagaccacgctgaataactacaacaaaaagtttaccgacgcgtttgagatcatggccgagaactacgaatttaaagagaacgaaatcgctcgtctggaatttctgcgcgccgcgagtctgctgaaatatctgccgttcccggttaccagtatgaaagacatccaaggtctgccgtgcattggcgaccaagttcgtgatgtgatcgaggagatcatcgaaaccggcgagagcagccgtgttaaagaagttctcaatgacgagcgctacaaggcctttaagcagttcaccagcgtgttcggtgtgggcgtgaaaaccagcgaaaagtggtttcgtatgggcctccgtacggttgaagaggcaaaggccagtaagagtctgaagctgagcaagatgcagaaggcgggcttcctgtattacgaggatctggccagctgcgttagtaaagcggaagccgatgccgttacgctcatcgtgaagaacacggtgcgtacctttctgccggatgcgctggtgaccatcacgggcggtttccgccgtggcaaaaagatgggccacgacatcgactttctgatcacgaatccgggcccgaaacaggatgacgagctgctccacaaagtggttgatgggctcaagaagcaaggtctgctgctgtactgcgacatcatcgagagcacgttcgtggaggaacaactgccaagtcgcaaaatcgacgccatggacaacttccagaagtgcttcgccattctcaagctgtaccagccgggcgtggataacagcagctataacacgagtaagaagagtgacatggccgaggttaaggattggaaagcggtccgtgtggatctggtgatcacgccattcgagcagtacgcctatgcgctgctcggttggacgggcagccgcgaatttggtcgcgatctgcgccgctatgcgagtcatgagcgcaagatgatcctcgacaaccatggcctctacgaccgcaaaaagcgcatctttctgaaagcgggcagcgaagaagagattttcgcgcatctgggtctggattatgtggagccgtgggaacgcaacgcg

SEQ ID NO: 852 - protein, 394 aa, synthetic construct
  REGION 1..394: note = Variant of terminal deoxynucleotidyl transferase
MHHHHHHGGSGHPPSNTPEGGVPSVIARKVSQYSCQRKTTLNNYNKKFTDAFEIMAENYEFKENEIARLEFLRAASLLKYLPFPVTSMKDIQGLPCIGDQVRDVIEEIIETGESSRVKEVLNDERYKAFKQFTSVFGVGVKTSEKWFRMGLRTVEEAKASKSLKLSKMQKAGFLYYEDLASCVSKAEADAVTLIVKNTVRTFLPDALVTITGGFRRGKKMGHDIDFLITNPGPKQDDELLHKVVDGLKKQGLLLYCDIIESTFVEEQLPSRKIDAMDNFQKCFAILKLYQPGVDNSSYNTSKKSDMAEVKDWKAVRVDLVITPFEQYAYALLGWTGSREFGRDLRRYASHERKMILDNHGLYDRKKRIFLKAGSEEEIFAHLGLDYVEPWERNA

SEQ ID NO: 853 - DNA, 1182 bp, synthetic construct
  misc_feature 1..1182: note = Variant of terminal deoxynucleotidyl transferase
  source 1..1182: mol_type = other DNA
atgcaccatcatcatcatcatggcggtagcggccatccgccgagcaataccccggagggtggggtgccgagcgttatcgcccgcaaggttagtcagtacagctgccagcgcaagaccacgctgaataactacaacaaaaagtttaccgacgcgctggagatcatggccgagaactacgaatttaaagagaacgaaatcgctcgtctggaatttctgcgcgccgcgagtctgctgaaatatctgccgttcccggttaccagtatgaaagacatccaaggtctgccgtgcattggcgaccaagttcgtgatgtgatccgtgagatcatcgaaaccggcgagagcagccgtgttaaagaagttctcaatgacgagcgctacaaggcctttaagcagttcaccagcgtgttcggtgtgggcgtgaaaaccagcgaaaagtggtttcgtatgggcctccgtacggttgaagaggcaaaggccagtaagagtctgaagctgagcaagatgcagaaggcgggcttcctgtattacgaggatctggccagctgcgttagtaaagcggaagccgatgccgttacgctcatcgtgaagaacacggtgcgtacctttctgccggatgcgctggtgaccatcacgggcggtttccgccgtggcaaaaagatgggccacgacatcgactttctgatcacgaatccgggcccgaaagaggatgacgagctgctccacaaagtggttgatgggctcaagaagcaaggtctgctgctgtacgaagacatcatcgagagcacgttcgtggaggaacaactgccaagtcgcaaaatcgacgccatggacaacttccagaagtgcttcgccattctcaagctgtaccagccgggcgtggataacagcagctataacacgagtaagaagagtgacatggccgaggttaaggattggaaagcggtccgtgtggatctggtgatcacgccattcgagcagtacgcctatgcgctgctcggttggacgggcagccgcgaatttggtcgcgatctgcgccgctatgcgagtcatgagcgcaagatgatcctcgacaaccatggcctctacgaccgcaaaaagcgcatctttctgaaagcgggcagcgaagaagagattttcgcgcatctgggtctggattatgtggagccgtgggaacgcaacgcg

SEQ ID NO: 854 - protein, 394 aa, synthetic construct
  REGION 1..394: note = Variant of terminal deoxynucleotidyl transferase
MHHHHHHGGSGHPPSNTPEGGVPSVIARKVSQYSCQRKTTLNNYNKKFTDALEIMAENYEFKENEIARLEFLRAASLLKYLPFPVTSMKDIQGLPCIGDQVRDVIREIIETGESSRVKEVLNDERYKAFKQFTSVFGVGVKTSEKWFRMGLRTVEEAKASKSLKLSKMQKAGFLYYEDLASCVSKAEADAVTLIVKNTVRTFLPDALVTITGGFRRGKKMGHDIDFLITNPGPKEDDELLHKVVDGLKKQGLLLYEDIIESTFVEEQLPSRKIDAMDNFQKCFAILKLYQPGVDNSSYNTSKKSDMAEVKDWKAVRVDLVITPFEQYAYALLGWTGSREFGRDLRRYASHERKMILDNHGLYDRKKRIFLKAGSEEEIFAHLGLDYVEPWERNA

SEQ ID NO: 855 - DNA, 1182 bp, synthetic construct
  misc_feature 1..1182: note = Variant of terminal deoxynucleotidyl transferase
  source 1..1182: mol_type = other DNA
atgcaccatcatcatcatcatggcggtagcggccatccgccgagcaataccccggagggtggggtgccgagcgttatcgcccgcaaggttagtcagtacagctgccagcgcaagaccacgctgaataactacaacaaaaagtttaccgacgcgctggagatcatggccgagaactacgaatttaaagagaacgaaatcgctcgtctggaatttctgcgcgccgcgagtctgctgaaatatctgccgttcccggttaccagtatgaaagacatccaaggtctgccgtgcattggcgaccaagttcgtgatgtgatccgtgagatcatcgaaaccggcgagagcagccgtgttaaagaagttctcaatgacgagcgctacaaggcctttaagcagttcaccagcgtgttcggtgtgggcgtgaaaaccagcgaaaagtggtttcgtatgggcctccgtacggttgaagaggcaaaggccagtaagagtctgaagctgagcaagatgcagaaggcgggctttctgtattacgaggatctggcccgctgcgttagtaaagcggaagccgatgccgttacgctcatcgtgaagaacacggtgcgtacctttctgccggatgcgctggtgaccatcacgggcggtttccgccgtggcaaaaagatgggccacgacatcgactttctgatcacgaatccgggcccgaaacaggatgacgagctgctccacaaagtggttgatgggctcaagaagcaaggtctgctgctgtacggtgacatcatcgagagcacgttcgtggaggaacaactgccaagtcgcaaaatcgacgccatggacaacttccagaagtgcttcgccattctcaagctgtaccagccgggcgtggataacagcagctataacacgagtaagaagagtgacatggccgaggttaaggattggaaagcggtccgtgtggatctggtgatcacgccattcgagcagtacgcctatgcgctgctcggttggacgggcagccgcgaatttggtcgcgatctgcgccgctatgcgagtcatgagcgcaagatgatcctcgacaaccatggcctctacgaccgcaaaaagcgcatctttctgaaagcgggcagcgaagaagagattttcgcgcatctgggtctggattatgtggagccgtgggaacgcaacgcg

SEQ ID NO: 856 - protein, 394 aa, synthetic construct
  REGION 1..394: note = Variant of terminal deoxynucleotidyl transferase
MHHHHHHGGSGHPPSNTPEGGVPSVIARKVSQYSCQRKTTLNNYNKKFTDALEIMAENYEFKENEIARLEFLRAASLLKYLPFPVTSMKDIQGLPCIGDQVRDVIREIIETGESSRVKEVLNDERYKAFKQFTSVFGVGVKTSEKWFRMGLRTVEEAKASKSLKLSKMQKAGFLYYEDLARCVSKAEADAVTLIVKNTVRTFLPDALVTITGGFRRGKKMGHDIDFLITNPGPKQDDELLHKVVDGLKKQGLLLYGDIIESTFVEEQLPSRKIDAMDNFQKCFAILKLYQPGVDNSSYNTSKKSDMAEVKDWKAVRVDLVITPFEQYAYALLGWTGSREFGRDLRRYASHERKMILDNHGLYDRKKRIFLKAGSEEEIFAHLGLDYVEPWERNA

SEQ ID NO: 857 - DNA, 1182 bp, synthetic construct
  misc_feature 1..1182: note = Variant of terminal deoxynucleotidyl transferase
  source 1..1182: mol_type = other DNA
atgcaccatcatcatcatcatggcggtagcggccatccgccgagcaataccccggagggtggggtgccgagcgttatcgcccgcaaggttagtcagtacagctgccagcgcaagaccacgctgaataactacaacaaaaagtttaccgacgcgttcgagatcatggccgagaactacgaatttaaagagaacgaaatcgctcgtctggaatttctgcgcgccgcgagtctgctgaaatatctgccgttcccggttaccagtatgaaagacatccaaggtctgccgtgcattggcgaccaagttcgtgacgtgatcgaggagatcatcgaaaccggcgagagcagccgtgttaaagaagttctcaatgacgagcgctacaaggcctttaagcagttcaccagcgtgttcggtgtgggcgtgaaaaccagcgaaaagtggtttcgtatgggcctccgtacggttgaagaggcaaaggccagtaagagtctgaagctgagcaagatgcagaaggcgggcctgctgtattacgaggatctggccagctgcgttagtaaagcggaagccgatgccgttacgctcatcgtgaagaacacggtgcgtacctttctgccggatgcgctggtgaccatcacgggcggtttccgccgtggcaaaaagatgggccacgacatcgactttctgatcacgaatccgggcccgaaagaggatgacgagctgctccacaaagtggttgatgggctcaagaagcaaggtctgctgctgtactgcgacatcatcgagagcacgttcgtggaggaacaactgccaagtcgcaaaatcgacgccatggacaacttccagaagtgcttcgccattctcaagctgtaccagccgggcgtggataacagcagctataacacgagtaagaagagtgacatggccgaggttaaggattggaaagcggtccgtgtggatctggtgatcacgccattcgagcagtacgcctatgcgctgctcggttggacgggcagccgcgaatttggtcgcgatctgcgccgctatgcgagtcatgagcgcaagatgatcctcgacaaccatggcctctacgaccgcaaaaagcgcatctttctgaaagcgggcagcgaagaagagattttcgcgcatctgggtctggattatgtggagccgtgggaacgcaacgcg

SEQ ID NO: 858 - protein, 394 aa, synthetic construct
  REGION 1..394: note = Variant of terminal deoxynucleotidyl transferase
MHHHHHHGGSGHPPSNTPEGGVPSVIARKVSQYSCQRKTTLNNYNKKFTDAFEIMAENYEFKENEIARLEFLRAASLLKYLPFPVTSMKDIQGLPCIGDQVRDVIEEIIETGESSRVKEVLNDERYKAFKQFTSVFGVGVKTSEKWFRMGLRTVEEAKASKSLKLSKMQKAGLLYYEDLASCVSKAEADAVTLIVKNTVRTFLPDALVTITGGFRRGKKMGHDIDFLITNPGPKEDDELLHKVVDGLKKQGLLLYCDIIESTFVEEQLPSRKIDAMDNFQKCFAILKLYQPGVDNSSYNTSKKSDMAEVKDWKAVRVDLVITPFEQYAYALLGWTGSREFGRDLRRYASHERKMILDNHGLYDRKKRIFLKAGSEEEIFAHLGLDYVEPWERNA

SEQ ID NO: 859 - DNA, 1182 bp, synthetic construct
  misc_feature 1..1182: note = Variant of terminal deoxynucleotidyl transferase
  source 1..1182: mol_type = other DNA
atgcaccatcatcatcatcatggcggtagcggccatccgccgagcaataccccggagggtggggtgccgagcgttatcgcccgcaaggttagtcagtacagctgccagcgcaagaccacgctgaataactacaacaaaaagtttaccgacgcgctggagatcctggccgagaactacgaatttaaagagaacgaaatcgctcgtctggaatttctgcgcgccgcgagtctgctgaaatatctgccgttcccggttaccagtatgaaagacatccaaggtctgccgtgcattggcgaccaagttcgtgatgtgatccgtgagatcatcgaaaccggcgagagcagccgtgttaaagaagttctcaatgacgagcgctacaaggcctttaagcagttcaccagcgtgttcggtgtgggcgtgaaaaccagcgaaaagtggtttcgtatgggcctccgtacggttgaagaggcaaaggccagtaagagtctgaagctgagcaagatgcagaaggcgggctttctgtattacgaggatctggccagctgcgttagtaaagcggaagccgatgccgttacgctcatcgtgaagaacacggtgcgtacctttctgccggatgcgctggtgaccatcacgggcggtttccgccgtggcaaaaagatgggccacgacatcgactttctgatcacgaatccgggcccgaaagaggatgacgagctgctccacaaagtggttgatgggctcaagaagcaaggtctgctgctgtacggtgacatcatcgagagcacgttcgtggaggaacaactgccaagtcgcaaaatcgacgccatggacaacttccagaagtgcttcgccattctcaagctgtaccagccgggcgtggataacagcagctataacacgagtaagaagagtgacatggccgaggttaaggattggaaagcggtccgtgtggatctggtgatcacgccattcgagcagtacgcctatgcgctgctcggttggacgggcagccgcgaatttggtcgcgatctgcgccgctatgcgagtcatgagcgcaagatgatcctcgacaaccatggcctctacgaccgcaaaaagcgcatctttctgaaagcgggcagcgaagaagagattttcgcgcatctgggtctggattatgtggagccgtgggaacgcaacgcg

SEQ ID NO: 860 - protein, 394 aa, synthetic construct
  REGION 1..394: note = Variant of terminal deoxynucleotidyl transferase
MHHHHHHGGSGHPPSNTPEGGVPSVIARKVSQYSCQRKTTLNNYNKKFTDALEILAENYEFKENEIARLEFLRAASLLKYLPFPVTSMKDIQGLPCIGDQVRDVIREIIETGESSRVKEVLNDERYKAFKQFTSVFGVGVKTSEKWFRMGLRTVEEAKASKSLKLSKMQKAGFLYYEDLASCVSKAEADAVTLIVKNTVRTFLPDALVTITGGFRRGKKMGHDIDFLITNPGPKEDDELLHKVVDGLKKQGLLLYGDIIESTFVEEQLPSRKIDAMDNFQKCFAILKLYQPGVDNSSYNTSKKSDMAEVKDWKAVRVDLVITPFEQYAYALLGWTGSREFGRDLRRYASHERKMILDNHGLYDRKKRIFLKAGSEEEIFAHLGLDYVEPWERNA

SEQ ID NO: 861 - DNA, 1182 bp, synthetic construct
  misc_feature 1..1182: note = Variant of terminal deoxynucleotidyl transferase
  source 1..1182: mol_type = other DNA
atgcaccatcatcatcatcatggcggtagcggccatccgccgagcaataccccggagggtggggtgccgagcgttatcgcccgcaaggttagtcagtacagctgccagcgcaagaccacgctgaataactacaacaaaaagtttaccgacgcgctggagatcatggccgagaactacgaatttaaagagaacgaaatcgctcgtctggaatttctgcgcgccgcgagtctgctgaaatatctgccgttcccggttaccagtatgaaagacatccaaggtctgccgtgcattggcgaccaagttcgtgatgtgatcgaggagatcatcgaaaccggcgagagcagccgtgttaaagaagttctcaatgacgagcgctacaaggcctttaagcagttcaccagcgtgttcggtgtgggcgtgaaaaccagcgaaaagtggtttcgtatgggcctccgtacggttgaagaggcaaaggccagtaagagtctgaagctgagcaagatgcagaaggcgggcctgctgtattacgaggatctggccagctgcgttagtaaagcggaagccgatgccgttacgctcatcgtgaagaacacggtgcgtacctttctgccggatgcgctggtgaccatcacgggcggtttccgccgtggcaaaaagatgggccacgacatcgactttctgatcacgaatccgggcccgaaacaggatgacgagctgctccacaaagtggttgatgggctcaagaagcaaggtctgctgctgtactgcgacatcatcgagagcacgttcgtggaggaacaactgccaagtcgcaaaatcgacgccatggacaacttccagaagtgcttcgccattctcaagctgtaccagccgggcgtggataacagcagctataacacgagtaagaagagtgacatggccgaggttaaggattggaaagcggtccgtgtggatctggtgatcacgccattcgagcagtacgcctatgcgctgctcggttggacgggcagccgcgaatttggtcgcgatctgcgccgctatgcgagtcatgagcgcaagatgatcctcgacaaccatggcctctacgaccgcaaaaagcgcatctttctgaaagcgggcagcgaagaagagattttcgcgcatctgggtctggattatgtggagccgtgggaacgcaacgcg

SEQ ID NO: 862 - protein, 394 aa, synthetic construct
  REGION 1..394: note = Variant of terminal deoxynucleotidyl transferase
MHHHHHHGGSGHPPSNTPEGGVPSVIARKVSQYSCQRKTTLNNYNKKFTDALEIMAENYEFKENEIARLEFLRAASLLKYLPFPVTSMKDIQGLPCIGDQVRDVIEEIIETGESSRVKEVLNDERYKAFKQFTSVFGVGVKTSEKWFRMGLRTVEEAKASKSLKLSKMQKAGLLYYEDLASCVSKAEADAVTLIVKNTVRTFLPDALVTITGGFRRGKKMGHDIDFLITNPGPKQDDELLHKVVDGLKKQGLLLYCDIIESTFVEEQLPSRKIDAMDNFQKCFAILKLYQPGVDNSSYNTSKKSDMAEVKDWKAVRVDLVITPFEQYAYALLGWTGSREFGRDLRRYASHERKMILDNHGLYDRKKRIFLKAGSEEEIFAHLGLDYVEPWERNA

SEQ ID NO: 863 - DNA, 1182 bp, synthetic construct
  misc_feature 1..1182: note = Variant of terminal deoxynucleotidyl transferase
  source 1..1182: mol_type = other DNA
atgcaccatcatcatcatcatggcggtagcggccatccgccgagcaataccccggagggtggggtgccgagcgttatcgcccgcaaggttagtcagtacagctgccagcgcaagaccacgctgaataactacaacaaaaagtttaccgacgcgctggagatcctggccgagaactacgaatttaaagagaacgaaatcgctcgtctggaatttctgcgcgccgcgagtctgctgaaatatctgccgttcccggttaccagtatgaaagacatccaaggtctgccgtgcattggcgatcaagttcgtgacgtgatcgaggagatcatcgaaaccggcgagagcagccgtgttaaagaagttctcaatgacgagcgctacaaggcctttaagcagttcaccagcgtgttcggtgtgggcgtgaaaaccagcgaaaagtggtttcgtatgggcctccgtacggttgaagaggcaaaggccagtaagagtctgaagctgagcaagatgcagaaggcgggctttctgtattacgaggatctggcccgctgcgttagtaaagcggaagccgatgccgttacgctcatcgtgaagaacacggtgcgtacctttctgccggatgcgctggtgaccatcacgggcggtttccgccgtggcaaaaagatgggccacgacatcgactttctgatcacgaatccgggcccgaaagaggatgacgagctgctccacaaagtggttgatgggctcaagaagcaaggtctgctgctgtacggtgacatcatcgagagcacgttcgtggaggaacaactgccaagtcgcaaaatcgacgccatggacaacttccagaagtgcttcgccattctcaagctgtaccagccgggcgtggataacagcagctataacacgagtaagaagagtgacatggccgaggttaaggattggaaagcggtccgtgtggatctggtgatcacgccattcgagcagtacgcctatgcgctgctcggttggacgggcagccgcgaatttggtcgcgatctgcgccgctatgcgagtcatgagcgcaagatgatcctcgacaaccatggcctctacgaccgcaaaaagcgcatctttctgaaagcgggcagcgaagaagagattttcgcgcatctgggtctggattatgtggagccgtgggaacgcaacgcg

SEQ ID NO: 864 - protein, 394 aa, synthetic construct
  REGION 1..394: note = Variant of terminal deoxynucleotidyl transferase
MHHHHHHGGSGHPPSNTPEGGVPSVIARKVSQYSCQRKTTLNNYNKKFTDALEILAENYEFKENEIARLEFLRAASLLKYLPFPVTSMKDIQGLPCIGDQVRDVIEEIIETGESSRVKEVLNDERYKAFKQFTSVFGVGVKTSEKWFRMGLRTVEEAKASKSLKLSKMQKAGFLYYEDLARCVSKAEADAVTLIVKNTVRTFLPDALVTITGGFRRGKKMGHDIDFLITNPGPKEDDELLHKVVDGLKKQGLLLYGDIIESTFVEEQLPSRKIDAMDNFQKCFAILKLYQPGVDNSSYNTSKKSDMAEVKDWKAVRVDLVITPFEQYAYALLGWTGSREFGRDLRRYASHERKMILDNHGLYDRKKRIFLKAGSEEEIFAHLGLDYVEPWERNA

SEQ ID NO: 865 - DNA, 1182 bp, synthetic construct
  misc_feature 1..1182: note = Variant of terminal deoxynucleotidyl transferase
  source 1..1182: mol_type = other DNA
atgcaccatcatcatcatcatggcggtagcggccatccgccgagcaataccccggagggtggggtgccgagcgttatcgcccgcaaggttagtcagtacagctgccagcgcaagaccacgctgaataactacaacaaaaagtttaccgacgcgctggagatcatggccgagaactacgaatttaaagagaacgaaatcgctcgtctggaatttctgcgcgccgcgagtctgctgaaatatctgccgttcccggttaccagtatgaaagacatccaaggtctgccgtgcattggcgatcaagttcgtgacgtgatcgaggagatcatcgaaaccggcgagagcagccgtgttaaagaagttctcaatgacgagcgctacaaggcctttaagcagttcaccagcgtgttcggtgtgggcgtgaaaaccagcgaaaagtggtttcgtatgggcctccgtacggttgaagaggcaaaggccagtaagagtctgaagctgagcaagatgcagaaggcgggctttctgtattacgaggatctggccagctgcgttagtaaagcggaagccgatgccgttacgctcatcgtgaagaacacggtgcgtacctttctgccggatgcgctggtgaccatcacgggcggtttccgccgtggcaaaaagatgggccacgacatcgactttctgatcacgaatccgggcccgaaacaggatgacgagctgctccacaaagtggttgatgggctcaagaagcaaggtctgctgctgtactgtgacatcatcgagagcacgttcgtggaggaacaactgccaagtcgcaaaatcgacgccatggacaacttccagaagtgcttcgccattctcaagctgtaccagccgggcgtggataacagcagctataacacgagtaagaagagtgacatggccgaggttaaggattggaaagcggtccgtgtggatctggtgatcacgccattcgagcagtacgcctatgcgctgctcggttggacgggcagccgcgaatttggtcgcgatctgcgccgctatgcgagtcatgagcgcaagatgatcctcgacaaccatggcctctacgaccgcaaaaagcgcatctttctgaaagcgggcagcgaagaagagattttcgcgcatctgggtctggattatgtggagccgtgggaacgcaacgcg

SEQ ID NO: 866 - protein, 394 aa, synthetic construct
  REGION 1..394: note = Variant of terminal deoxynucleotidyl transferase
MHHHHHHGGSGHPPSNTPEGGVPSVIARKVSQYSCQRKTTLNNYNKKFTDALEIMAENYEFKENEIARLEFLRAASLLKYLPFPVTSMKDIQGLPCIGDQVRDVIEEIIETGESSRVKEVLNDERYKAFKQFTSVFGVGVKTSEKWFRMGLRTVEEAKASKSLKLSKMQKAGFLYYEDLASCVSKAEADAVTLIVKNTVRTFLPDALVTITGGFRRGKKMGHDIDFLITNPGPKQDDELLHKVVDGLKKQGLLLYCDIIESTFVEEQLPSRKIDAMDNFQKCFAILKLYQPGVDNSSYNTSKKSDMAEVKDWKAVRVDLVITPFEQYAYALLGWTGSREFGRDLRRYASHERKMILDNHGLYDRKKRIFLKAGSEEEIFAHLGLDYVEPWERNA

SEQ ID NO: 867 - DNA, 1182 bp, synthetic construct
  misc_feature 1..1182: note = Variant of terminal deoxynucleotidyl transferase
  source 1..1182: mol_type = other DNA
atgcaccatcatcatcatcatggcggtagcggccatccgccgagcaataccccggagggtggggtgccgagcgttatcgcccgcaaggttagtcagtacagctgccagcgcaagaccacgctgaataactacaacaaaaagtttaccgacgcgttcgagatcatggccgagaactacgaatttaaagagaacgaaatcgctcgtctggaatttctgcgcgccgcgagtctgctgaaatatctgccgttcccggttaccagtatgaaagacatccaaggtctgccgtgcattggccctcaagttcgtgacgtgatcgaggagatcatcgaaaccggcgagagcagccgtgttaaagaagttctcaatgacgagcgctacaaggcctttaagcagttcaccagcgtgttcggtgtgggcgtgaaaaccagcgaaaagtggtttcgtatgggcctccgtacggttgaagaggcaaaggccagtaagagtctgaagctgagcaagatgcagaaggcgggctttctgtattacgaggatctggccagctgcgttagtaaagcggaagccgatgccgttacgctcatcgtgaagaacacggtgcgtacctttctgccggatgcgctggtgaccatcacgggcggtttccgccgtggcaaaaagatgggccacgacatcgactttctgatcacgaatccgggcccgaaacaggatgacgagctgctccacaaagtggttgatgggctcaagaagcaaggtctgctgctgtactgcgacatcatcgagagcacgttcgtggaggaacaactgccaagtcgcaaaatcgacgccatggacaacttccagaagtgcttcgccattctcaagctgtaccagccgggcgtggataacagcagctataacacgagtaagaagagtgacatggccgaggttaaggattggaaagcggtccgtgtggatctggtgatcacgccattcgagcagtacgcctatgcgctgctcggttggacgggcagccgcgaatttggtcgcgatctgcgccgctatgcgagtcatgagcgcaagatgatcctcgacaaccatggcctctacgaccgcaaaaagcgcatctttctgaaagcgggcagcgaagaagagattttcgcgcatctgggtctggattatgtggagccgtgggaacgcaacgcg

SEQ ID NO: 868 - protein, 394 aa, synthetic construct
  REGION 1..394: note = Variant of terminal deoxynucleotidyl transferase
MHHHHHHGGSGHPPSNTPEGGVPSVIARKVSQYSCQRKTTLNNYNKKFTDAFEIMAENYEFKENEIARLEFLRAASLLKYLPFPVTSMKDIQGLPCIGPQVRDVIEEIIETGESSRVKEVLNDERYKAFKQFTSVFGVGVKTSEKWFRMGLRTVEEAKASKSLKLSKMQKAGFLYYEDLASCVSKAEADAVTLIVKNTVRTFLPDALVTITGGFRRGKKMGHDIDFLITNPGPKQDDELLHKVVDGLKKQGLLLYCDIIESTFVEEQLPSRKIDAMDNFQKCFAILKLYQPGVDNSSYNTSKKSDMAEVKDWKAVRVDLVITPFEQYAYALLGWTGSREFGRDLRRYASHERKMILDNHGLYDRKKRIFLKAGSEEEIFAHLGLDYVEPWERNA

SEQ ID NO: 869 - DNA, 1182 bp, synthetic construct
  misc_feature 1..1182: note = Variant of terminal deoxynucleotidyl transferase
  source 1..1182: mol_type = other DNA
atgcaccatcatcatcatcatggcggtagcggccatccgccgagcaataccccggagggtggggtgccgagcgttatcgcccgcaaggttagtcagtacagctgccagcgcaagaccacgctgaataactacaacaaaaagtttaccgacgcgtttgagatcctggccgagaactacgaatttaaagagaacgaaattgcccgtctggaatttctgcgcgccgcgagtctgctgaaatatctgccgttcccggttaccagtatgaaagacatccaaggtctgccgtgcattggccctcaagttcgtgacgtgatcgaggagatcatcgaaaccggcgagagcagccgtgttaaagaagttctcaatgacgagcgctacaaggcctttaagcagttcaccagcgtgttcggtgtgggcgtgaaaaccagcgaaaagtggtttcgtatgggcctccgtacggttgaagaggcaaaggccagtaagagtctgaagctgagcaagatgcagaaggcgggcttcctgtattacgaggatctggcccgctgcgttagtaaagcggaagccgatgccgttacgctcatcgtgaagaacacggtgcgtacctttctgccggatgcgctggtgaccatcacgggcggtttccgccgtggcaaaaagatgggccacgacatcgactttctgatcacgaatccgggcccgaaagaggatgacgagctgctccacaaagtggttgatgggctcaagaagcaaggtctgctgctgtacggtgacatcatcgagagcacgttcgtggaggaacaactgccaagtcgcaaaatcgacgccatggacaacttccagaagtgcttcgccattctcaagctgtaccagccgggcgtggataacagcagctataacacgagtaagaagagtgacatggccgaggttaaggattggaaagcggtccgtgtggatctggtgatcacgccattcgagcagtacgcctatgcgctgctcggttggacgggcagccgcgaatttggtcgcgatctgcgccgctatgcgagtcatgagcgcaagatgatcctcgacaaccatggcctctacgaccgcaaaaagcgcatctttctgaaagcgggcagcgaagaagagattttcgcgcatctgggtctggattatgtggagccgtgggaacgcaacgcg

SEQ ID NO: 870 - protein, 394 aa, synthetic construct
  REGION 1..394: note = Variant of terminal deoxynucleotidyl transferase
MHHHHHHGGSGHPPSNTPEGGVPSVIARKVSQYSCQRKTTLNNYNKKFTDAFEILAENYEFKENEIARLEFLRAASLLKYLPFPVTSMKDIQGLPCIGPQVRDVIEEIIETGESSRVKEVLNDERYKAFKQFTSVFGVGVKTSEKWFRMGLRTVEEAKASKSLKLSKMQKAGFLYYEDLARCVSKAEADAVTLIVKNTVRTFLPDALVTITGGFRRGKKMGHDIDFLITNPGPKEDDELLHKVVDGLKKQGLLLYGDIIESTFVEEQLPSRKIDAMDNFQKCFAILKLYQPGVDNSSYNTSKKSDMAEVKDWKAVRVDLVITPFEQYAYALLGWTGSREFGRDLRRYASHERKMILDNHGLYDRKKRIFLKAGSEEEIFAHLGLDYVEPWERNA

SEQ ID NO: 871 - DNA, 1182 bp, synthetic construct
  misc_feature 1..1182: note = Variant of terminal deoxynucleotidyl transferase
  source 1..1182: mol_type = other DNA
atgcaccatcatcatcatcatggcggtagcggccatccgccgagcaataccccggagggtggggtgccgagcgttatcgcccgcaaggttagtcagtacagctgccagcgcaagaccacgctgaataactacaacaaaaagtttaccgacgcgctggagatcatggccgagaactacgaatttaaagagaacgaaatcgctcgtctggaatttctgcgcgccgcgagtctgctgaaatatctgccgttcccggttaccagtatgaaagacatccaaggtctgccgtgcattggcgaccaagttcgtgatgtgatcgaggagatcatcgaaaccggcgagagcagccgtgttaaagaagttctcaatgacgagcgctacaaggcctttaagcagttcaccagcgtgttcggtgtgggcgtgaaaaccagcgaaaagtggtttcgtatgggcctccgtacggttgaagaggcaaaggccagtaagagtctgaagctgagcaagatgcagaaggcgggctttctgtattacgaggatctggccagctgcgttagtaaagcggaagccgatgccgttacgctcatcgtgaagaacacggtgcgtacctttctgccggatgcgctggtgaccatcacgggcggtttccgccgtggcaaaaagatgggccacgacatcgactttctgatcacgaatccgggcccgaaacaggatgacgagctgctccacaaagtggttgatgggctcaagaagcaaggtctgctgctgtacgaagacatcatcgagagcacgttcgtggaggaacaactgccaagtcgcaaaatcgacgccatggacaacttccagaagtgcttcgccattctcaagctgtaccagccgggcgtggataacagcagctataacacgagtaagaagagtgacatggccgaggttaaggattggaaagcggtccgtgtggatctggtgatcacgccattcgagcagtacgcctatgcgctgctcggttggacgggcagccgcgaatttggtcgcgatctgcgccgctatgcgagtcatgagcgcaagatgatcctcgacaaccatggcctctacgaccgcaaaaagcgcatctttctgaaagcgggcagcgaagaagagattttcgcgcatctgggtctggattatgtggagccgtgggaacgcaacgcg

SEQ ID NO: 872 - protein, 394 aa, synthetic construct
  REGION 1..394: note = Variant of terminal deoxynucleotidyl transferase
MHHHHHHGGSGHPPSNTPEGGVPSVIARKVSQYSCQRKTTLNNYNKKFTDALEIMAENYEFKENEIARLEFLRAASLLKYLPFPVTSMKDIQGLPCIGDQVRDVIEEIIETGESSRVKEVLNDERYKAFKQFTSVFGVGVKTSEKWFRMGLRTVEEAKASKSLKLSKMQKAGFLYYEDLASCVSKAEADAVTLIVKNTVRTFLPDALVTITGGFRRGKKMGHDIDFLITNPGPKQDDELLHKVVDGLKKQGLLLYEDIIESTFVEEQLPSRKIDAMDNFQKCFAILKLYQPGVDNSSYNTSKKSDMAEVKDWKAVRVDLVITPFEQYAYALLGWTGSREFGRDLRRYASHERKMILDNHGLYDRKKRIFLKAGSEEEIFAHLGLDYVEPWERNA

SEQ ID NO: 873 - DNA, 1182 bp, synthetic construct
  misc_feature 1..1182: note = Variant of terminal deoxynucleotidyl transferase
  source 1..1182: mol_type = other DNA
atgcaccatcatcatcatcatggcggtagcggccatccgccgagcaataccccggagggtggggtgccgagcgttatcgcccgcaaggttagtcagtacagctgccagcgcaagaccacgctgaataactacaacaaaaagtttaccgacgcgctggagatcctggccgagaactacgaatttaaagagaacgaaatcgctcgtctggaatttctgcgcgccgcgagtctgctgaaatatctgccgttcccggttaccagtatgaaagacatccaaggtctgccgtgcattggcgatcaagttcgtgacgtgatcgaggagatcatcgaaaccggcgagagcagccgtgttaaagaagttctcaatgacgagcgctacaaggcctttaagcagttcaccagcgtgttcggtgtgggcgtgaaaaccagcgaaaagtggtttcgtatgggcctccgtacggttgaagaggcaaaggccagtaagagtctgaagctgagcaagatgcagaaggcgggctttctgtattacgaggatctggcccgctgcgttagtaaagcggaagccgatgccgttacgctcatcgtgaagaacacggtgcgtacctttctgccggatgcgctggtgaccatcacgggcggtttccgccgtggcaaaaagatgggccacgacatcgactttctgatcacgaatccgggcccgaaacaggatgacgagctgctccacaaagtggttgatgggctcaagaagcaaggtctgctgctgtacgaagacatcatcgagagcacgttcgtggaggaacaactgccaagtcgcaaaatcgacgccatggacaacttccagaagtgcttcgccattctcaagctgtaccagccgggcgtggataacagcagctataacacgagtaagaagagtgacatggccgaggttaaggattggaaagcggtccgtgtggatctggtgatcacgccattcgagcagtacgcctatgcgctgctcggttggacgggcagccgcgaatttggtcgcgatctgcgccgctatgcgagtcatgagcgcaagatgatcctcgacaaccatggcctctacgaccgcaaaaagcgcatctttctgaaagcgggcagcgaagaagagattttcgcgcatctgggtctggattatgtggagccgtgggaacgcaacgcg

SEQ ID NO: 874 - protein, 394 aa, synthetic construct
  REGION 1..394: note = Variant of terminal deoxynucleotidyl transferase
MHHHHHHGGSGHPPSNTPEGGVPSVIARKVSQYSCQRKTTLNNYNKKFTDALEILAENYEFKENEIARLEFLRAASLLKYLPFPVTSMKDIQGLPCIGDQVRDVIEEIIETGESSRVKEVLNDERYKAFKQFTSVFGVGVKTSEKWFRMGLRTVEEAKASKSLKLSKMQKAGFLYYEDLARCVSKAEADAVTLIVKNTVRTFLPDALVTITGGFRRGKKMGHDIDFLITNPGPKQDDELLHKVVDGLKKQGLLLYEDIIESTFVEEQLPSRKIDAMDNFQKCFAILKLYQPGVDNSSYNTSKKSDMAEVKDWKAVRVDLVITPFEQYAYALLGWTGSREFGRDLRRYASHERKMILDNHGLYDRKKRIFLKAGSEEEIFAHLGLDYVEPWERNA

SEQ ID NO: 875 - DNA, 1182 bp, synthetic construct
  misc_feature 1..1182: note = Variant of terminal deoxynucleotidyl transferase
  source 1..1182: mol_type = other DNA
atgcaccatcatcatcatcatggcggtagcggccatccgccgagcaataccccggagggtggggtgccgagcgttatcgcccgcaaggttagtcagtacagctgccagcgcaagaccacgctgaataactacaacaaaaagtttaccgacgcgtttgagatcatggccgagaactacgaatttaaagagaacgaaatcgctcgtctggaatttctgcgcgccgcgagtctgctgaaatatctgccgttcccggttaccagtatgaaagacatccaaggtctgccgtgcattggcgaccaagttcgtgatgtgatccgtgagatcatcgaaaccggcgagagcagccgtgttaaagaagttctcaatgacgagcgctacaaggcctttaagcagttcaccagcgtgttcggtgtgggcgtgaaaaccagcgaaaagtggtttcgtatgggcctccgtacggttgaagaggcaaaggccagtaagagtctgaagctgagcaagatgcagaaggcgggcttcctgtattacgaggatctggccagctgcgttagtaaagcggaagccgatgccgttacgctcatcgtgaagaacacggtgcgtacctttctgccggatgcgctggtgaccatcacgggcggtttccgccgtggcaaaaagatgggccacgacatcgactttctgatcacgaatccgggcccgaaagaggatgacgagctgctccacaaagtggttgatgggctcaagaagcaaggtctgctgctgtactgcgacatcatcgagagcacgttcgtggaggaacaactgccaagtcgcaaaatcgacgccatggacaacttccagaagtgcttcgccattctcaagctgtaccagccgggcgtggataacagcagctataacacgagtaagaagagtgacatggccgaggttaaggattggaaagcggtccgtgtggatctggtgatcacgccattcgagcagtacgcctatgcgctgctcggttggacgggcagccgcgaatttggtcgcgatctgcgccgctatgcgagtcatgagcgcaagatgatcctcgacaaccatggcctctacgaccgcaaaaagcgcatctttctgaaagcgggcagcgaagaagagattttcgcgcatctgggtctggattatgtggagccgtgggaacgcaacgcg

SEQ ID NO: 876 - protein, 394 aa, synthetic construct
  REGION 1..394: note = Variant of terminal deoxynucleotidyl transferase
MHHHHHHGGSGHPPSNTPEGGVPSVIARKVSQYSCQRKTTLNNYNKKFTDAFEIMAENYEFKENEIARLEFLRAASLLKYLPFPVTSMKDIQGLPCIGDQVRDVIREIIETGESSRVKEVLNDERYKAFKQFTSVFGVGVKTSEKWFRMGLRTVEEAKASKSLKLSKMQKAGFLYYEDLASCVSKAEADAVTLIVKNTVRTFLPDALVTITGGFRRGKKMGHDIDFLITNPGPKEDDELLHKVVDGLKKQGLLLYCDIIESTFVEEQLPSRKIDAMDNFQKCFAILKLYQPGVDNSSYNTSKKSDMAEVKDWKAVRVDLVITPFEQYAYALLGWTGSREFGRDLRRYASHERKMILDNHGLYDRKKRIFLKAGSEEEIFAHLGLDYVEPWERNA

SEQ ID NO: 877 - DNA, 1182 bp, synthetic construct
  misc_feature 1..1182: note = Variant of terminal deoxynucleotidyl transferase
  source 1..1182: mol_type = other DNA
atgcaccatcatcatcatcatggcggtagcggccatccgccgagcaataccccggagggtggggtgccgagcgttatcgcccgcaaggttagtcagtacagctgccagcgcaagaccacgctgaataactacaacaaaaagtttaccgacgcgctggagatcatggccgagaactacgaatttaaagagaacgaaatcgctcgtctggaatttctgcgcgccgcgagtctgctgaaatatctgccgttcccggttaccagtatgaaagacatccaaggtctgccgtgcattggcgaccaagttcgtgatgtgatccgtgagatcatcgaaaccggcgagagcagccgtgttaaagaagttctcaatgacgagcgctacaaggcctttaagcagttcaccagcgtgttcggtgtgggcgtgaaaaccagcgaaaagtggtttcgtatgggcctccgtacggttgaagaggcaaaggccagtaagagtctgaagctgagcaagatgcagaaggcgggctttctgtattacgaggatctggccagctgcgttagtaaagcggaagccgatgccgttacgctcatcgtgaagaacacggtgcgtacctttctgccggatgcgctggtgaccatcacgggcggtttccgccgtggcaaaaagatgggccacgacatcgactttctgatcacgaatccgggcccgaaacaggatgacgagctgctccacaaagtggttgatgggctcaagaagcaaggtctgctgctgtacggtgacatcatcgagagcacgttcgtggaggaacaactgccaagtcgcaaaatcgacgccatggacaacttccagaagtgcttcgccattctcaagctgtaccagccgggcgtggataacagcagctataacacgagtaagaagagtgacatggccgaggttaaggattggaaagcggtccgtgtggatctggtgatcacgccattcgagcagtacgcctatgcgctgctcggttggacgggcagccgcgaatttggtcgcgatctgcgccgctatgcgagtcatgagcgcaagatgatcctcgacaaccatggcctctacgaccgcaaaaagcgcatctttctgaaagcgggcagcgaagaagagattttcgcgcatctgggtctggattatgtggagccgtgggaacgcaacgcg

SEQ ID NO: 878 - protein, 394 aa, synthetic construct
  REGION 1..394: note = Variant of terminal deoxynucleotidyl transferase
MHHHHHHGGSGHPPSNTPEGGVPSVIARKVSQYSCQRKTTLNNYNKKFTDALEIMAENYEFKENEIARLEFLRAASLLKYLPFPVTSMKDIQGLPCIGDQVRDVIREIIETGESSRVKEVLNDERYKAFKQFTSVFGVGVKTSEKWFRMGLRTVEEAKASKSLKLSKMQKAGFLYYEDLASCVSKAEADAVTLIVKNTVRTFLPDALVTITGGFRRGKKMGHDIDFLITNPGPKQDDELLHKVVDGLKKQGLLLYGDIIESTFVEEQLPSRKIDAMDNFQKCFAILKLYQPGVDNSSYNTSKKSDMAEVKDWKAVRVDLVITPFEQYAYALLGWTGSREFGRDLRRYASHERKMILDNHGLYDRKKRIFLKAGSEEEIFAHLGLDYVEPWERNA

SEQ ID NO: 879 - DNA, 1182 bp, synthetic construct
  misc_feature 1..1182: note = Variant of terminal deoxynucleotidyl transferase
  source 1..1182: mol_type = other DNA
atgcaccatcatcatcatcatggcggtagcggccatccgccgagcaataccccggagggtggggtgccgagcgttatcgcccgcaaggttagtcagtacagctgccagcgcaagaccacgctgaataactacaacaaaaagtttaccgacgcgtttgagatcctggccgagaactacgaatttaaagagaacgaaatcgctcgtctggaatttctgcgcgccgcgagtctgctgaaatatctgccgttcccggttaccagtatgaaagacatccaaggtctgccgtgcattggcgaccaagttcgtgatgtgatcgaggagatcatcgaaaccggcgagagcagccgtgttaaagaagttctcaatgacgagcgctacaaggcctttaagcagttcaccagcgtgttcggtgtgggcgtgaaaaccagcgaaaagtggtttcgtatgggcctccgtacggttgaagaggcaaaggccagtaagagtctgaagctgagcaagatgcagaaggcgggctttctgtattacgaggatctggccagctgcgttagtaaagcggaagccgatgccgttacgctcatcgtgaagaacacggtgcgtacctttctgccggatgcgctggtgaccatcacgggcggtttccgccgtggcaaaaagatgggccacgacatcgactttctgatcacgaatccgggcccgaaagaggatgacgagctgctccacaaagtggttgatgggctcaagaagcaaggtctgctgctgtacggtgacatcatcgagagcacgttcgtggaggaacaactgccaagtcgcaaaatcgacgccatggacaacttccagaagtgcttcgccattctcaagctgtaccagccgggcgtggataacagcagctataacacgagtaagaagagtgacatggccgaggttaaggattggaaagcggtccgtgtggatctggtgatcacgccattcgagcagtacgcctatgcgctgctcggttggacgggcagccgcgaatttggtcgcgatctgcgccgctatgcgagtcatgagcgcaagatgatcctcgacaaccatggcctctacgaccgcaaaaagcgcatctttctgaaagcgggcagcgaagaagagattttcgcgcatctgggtctggattatgtggagccgtgggaacgcaacgcg

SEQ ID NO: 880 - protein, 394 aa, synthetic construct
  REGION 1..394: note = Variant of terminal deoxynucleotidyl transferase
MHHHHHHGGSGHPPSNTPEGGVPSVIARKVSQYSCQRKTTLNNYNKKFTDAFEILAENYEFKENEIARLEFLRAASLLKYLPFPVTSMKDIQGLPCIGDQVRDVIEEIIETGESSRVKEVLNDERYKAFKQFTSVFGVGVKTSEKWFRMGLRTVEEAKASKSLKLSKMQKAGFLYYEDLASCVSKAEADAVTLIVKNTVRTFLPDALVTITGGFRRGKKMGHDIDFLITNPGPKEDDELLHKVVDGLKKQGLLLYGDIIESTFVEEQLPSRKIDAMDNFQKCFAILKLYQPGVDNSSYNTSKKSDMAEVKDWKAVRVDLVITPFEQYAYALLGWTGSREFGRDLRRYASHERKMILDNHGLYDRKKRIFLKAGSEEEIFAHLGLDYVEPWERNA

SEQ ID NO: 881 - DNA, 1182 bp, synthetic construct
  misc_feature 1..1182: note = Variant of terminal deoxynucleotidyl transferase
  source 1..1182: mol_type = other DNA
atgcaccatcatcatcatcatggcggtagcggccatccgccgagcaataccccggagggtggggtgccgagcgttatcgcccgcaaggttagtcagtacagctgccagcgcaagaccacgctgaataactacaacaaaaagtttaccgacgcgttcgagatcatggccgagaactacaaatttaaagagaacgaaatcttctgtctggaatttaagcgcgccgcgagtctgctgaaatatctgccgttcccggttacccgcatgaaagacatccaaggtctgccgtgcattggcgaccaagttcgtgacgtgatcgaggagatcatcgaagagggcgagagcagccgtgttaaagaagttctcaatgacgagcgctacaaggcctttaagcagttcaccagcgtgttcggtgtgggcgtgaaaaccagcgaaaagtggtttcgtatgggcctccgtacggttgaagagctgaaggccagtaagagtctgaagctgagcaagatgcagaaggcgggctttctgtattacgaggatctggccagctgcgttagtaaagcggaagccgatgccgttacgctcatcgtgaagaacacggtgcgtacctttctgccggatgcgctggtgaccatcacgggcggtttccgccgtggcaaaaagatgggccacgacatcgactttctgatcacgaatccgggcccgaaagaggatgacgagctgctccacaaagtggttgatgggctcaagaagcaaggtctgctgctgtactgcgacatcaaagagagcacgttcgtggaggaacaactgccaagtcgcaaaatcgacgccatggacaacttccagaagtgcttcgccattctcaagctgtaccagccgggcgtggataacagcagctataacacgagtaagaagagtgacatggccgaggttaaggattggaaagcgatccgtgtggatctggtgatcacgccattcgagcagtacgcctatgcgctgctcggttggacgggcagcaaagaatttggtcgcgatctgcgccgctatgcgagtcatgagcgcaagatgatcctcgaccgtcatggcctctacgaccgcaaaaagcgcatctttctgaaagcgggcagcgaagaagagattttcgcgcatctgggtctggattatgtggagccgtgggaacgcaacgcg

SEQ ID NO: 882 - protein, 394 aa, synthetic construct
  REGION 1..394: note = Variant of terminal deoxynucleotidyl transferase
MHHHHHHGGSGHPPSNTPEGGVPSVIARKVSQYSCQRKTTLNNYNKKFTDAFEIMAENYKFKENEIFCLEFKRAASLLKYLPFPVTRMKDIQGLPCIGDQVRDVIEEIIEEGESSRVKEVLNDERYKAFKQFTSVFGVGVKTSEKWFRMGLRTVEELKASKSLKLSKMQKAGFLYYEDLASCVSKAEADAVTLIVKNTVRTFLPDALVTITGGFRRGKKMGHDIDFLITNPGPKEDDELLHKVVDGLKKQGLLLYCDIKESTFVEEQLPSRKIDAMDNFQKCFAILKLYQPGVDNSSYNTSKKSDMAEVKDWKAIRVDLVITPFEQYAYALLGWTGSKEFGRDLRRYASHERKMILDRHGLYDRKKRIFLKAGSEEEIFAHLGLDYVEPWERNA

SEQ ID NO: 883 - DNA, 1182 bp, synthetic construct; identical to SEQ ID NO: 691
  misc_feature 1..1182: note = Variant of terminal deoxynucleotidyl transferase
  source 1..1182: mol_type = other DNA

SEQ ID NO: 884 - protein, 394 aa, synthetic construct; identical to SEQ ID NO: 692
  REGION 1..394: note = Variant of terminal deoxynucleotidyl transferase

SEQ ID NO: 885 - DNA, 1182 bp, synthetic construct
  misc_feature 1..1182: note = Variant of terminal deoxynucleotidyl transferase
  source 1..1182: mol_type = other DNA
atgcaccatcatcatcatcatggcggtagcggccatccgccgagcaataccccggagggtggggtgccgagcgttatcgcccgcaaggttagtcagtacagctgccagcgcaagaccacgctgaataactacaacaaaaagtttaccgacgcgttcgagatcatggccgagaactacaaatttaaagagaacgaaatcttctgtctggaatttaagcgcgccgcgagtctgctgaaatatctgccgttcccggttacccgcatgaaagacatccaaggtctgccgtgcattggcgaccaagttcgtgacgtgatcgaggagatcatcgaagagggcgagagcagccgtgttaaagaagttctcaatgacgagcgctacaaggcctttaagcagttcaccagcgtgttcggtgtgggcgtgaaaaccagcgaaaagtggtttcgtatgggcctccgtacggttgaagagctgaaggccagtaagagtctgaagctgagcaagatgcagaaggcgggctttctgtattacgaggatctggccagctgcgttagtaaagcggaagccgatgccgttacgctcatcgtgaagaacacggtgcgtacctttctgccggatgcgctggtgaccatcacgggcggtttccgccgtggcaaaaagatgggccacgacatcgactttctgatcacgaatccgggcccgaaagaggatgacgagctgctccacaaagtggttgatgggctcaagaagcaaggtctgctgctgtactgcgacatcaaagagagcacgttcgtggaggaacaactgccaagtcgcaaaatcgacgccatggacaacttccagaagtgcttcgccattctcaagctgtaccagccgggcgtggataacagcagctataacacgagtaagaagagtgacatggccgaggttaaggattggaaagcgatccgtgtggatctggtgatcacgccattcgagcagtacgcctatgcgctgctcggttggacgggcagcaaagaatttggtcgcgatctgcgccgctatgcggagcatgagcgcaagatgatcctcgaccgtcatggcctctacgaccgcaaaaagcgcatctttctgaaagcgggcagcgaagaagagattttcgcgcatctgggtctggattatgtggagccgtgggaacgcaacgcg

SEQ ID NO: 886 - protein, 394 aa, synthetic construct
  REGION 1..394: note = Variant of terminal deoxynucleotidyl transferase
MHHHHHHGGSGHPPSNTPEGGVPSVIARKVSQYSCQRKTTLNNYNKKFTDAFEIMAENYKFKENEIFCLEFKRAASLLKYLPFPVTRMKDIQGLPCIGDQVRDVIEEIIEEGESSRVKEVLNDERYKAFKQFTSVFGVGVKTSEKWFRMGLRTVEELKASKSLKLSKMQKAGFLYYEDLASCVSKAEADAVTLIVKNTVRTFLPDALVTITGGFRRGKKMGHDIDFLITNPGPKEDDELLHKVVDGLKKQGLLLYCDIKESTFVEEQLPSRKIDAMDNFQKCFAILKLYQPGVDNSSYNTSKKSDMAEVKDWKAIRVDLVITPFEQYAYALLGWTGSKEFGRDLRRYAEHERKMILDRHGLYDRKKRIFLKAGSEEEIFAHLGLDYVEPWERNA

SEQ ID NO: 887 - DNA, 1182 bp, synthetic construct
  misc_feature 1..1182: note = Variant of terminal deoxynucleotidyl transferase
  source 1..1182: mol_type = other DNA
atgcaccatcatcatcatcatggcggtagcggccatccgccgagcaataccccggagggtggggtgccgagcgttatcgcccgcaaggttagtcagtacagctgccagcgcaagaccacgctgaataactacaacaaaaagtttaccgacgcgttcgagatcatggccgagaactacaaatttaaagagaacgaaatcttctgtctggaatttaagcgcgccgcgagtctgctgaaatatctgccgttcccggttacccgcatgaaagacatccaaggtctgccgtgcattggcgaccaagttcgtgacgtgatcgaggagatcatcgaagagggcgagagcagccgtgttaaagaagttctcaatgacgagcgctacaaggcctttaagcagttcaccagcgtgttcggtgtgggcgtgaaaaccagcgaaaagtggtttcgtatgggcctccgtacggttgaagagctgaaggccagtaagagtctgaagctgagcaagatgcagaaggcgggctttctgtattacgaggatctggccagctgcgttagtaaagcggaagccgatgccgttacgctcatcgtgaagaacacggtgcgtacctttctgccggatgcgctggtgaccatctgtggcggtttccgccgtggcaaaaagatgggccacgacatcgactttctgatcacgaatccgggcccgaaagaggatgacgagctgctccacaaagtggttgatgggctcaagaagcaaggtctgctgctgtactgcgacatcaaagagagcacgttcgtggaggaacaactgccaagtcgcaaaatcgacgccatggacaacttccagaagtgcttcgccattctcaagctgtaccagccgggcgtggataacagcagctataacacgagtaagaagagtgacatggccgaggttaaggattggaaagcgatccgtgtggatctggtgatcacgccattcgagcagtacgcctatgcgctgctcggttggacgggcagcaaagaatttggtcgcgatctgcgccgctatgcgagtcatgagcgcaagatgatcctcgaccgtcatggcctctacgaccgcaaaaagcgcatctttctgaaagcgggcagcgaagaagagattttcgcgcatctgggtctggattatgtggagccgtgggaacgcaacgcg

SEQ ID NO: 888 - protein, 394 aa, synthetic construct
  REGION 1..394: note = Variant of terminal deoxynucleotidyl transferase
MHHHHHHGGSGHPPSNTPEGGVPSVIARKVSQYSCQRKTTLNNYNKKFTDAFEIMAENYKFKENEIFCLEFKRAASLLKYLPFPVTRMKDIQGLPCIGDQVRDVIEEIIEEGESSRVKEVLNDERYKAFKQFTSVFGVGVKTSEKWFRMGLRTVEELKASKSLKLSKMQKAGFLYYEDLASCVSKAEADAVTLIVKNTVRTFLPDALVTICGGFRRGKKMGHDIDFLITNPGPKEDDELLHKVVDGLKKQGLLLYCDIKESTFVEEQLPSRKIDAMDNFQKCFAILKLYQPGVDNSSYNTSKKSDMAEVKDWKAIRVDLVITPFEQYAYALLGWTGSKEFGRDLRRYASHERKMILDRHGLYDRKKRIFLKAGSEEEIFAHLGLDYVEPWERNA

SEQ ID NO: 889 - DNA, 1182 bp, synthetic construct
  misc_feature 1..1182: note = Variant of terminal deoxynucleotidyl transferase
  source 1..1182: mol_type = other DNA
atgcaccatcatcatcatcatggcggtagcggccatccgccgagcaataccccggagggtggggtgccgagcgttatcgcccgcaaggttagtcagtacagctgccagcgcaagaccacgctgaataactacaacaaaaagtttaccgacgcgttcgagatcatggccgagaactacaaatttaaaggtaacgaaatcttctgtctggaatttaagcgcgccgcgagtctgctgaaatatctgccgttcccggttacccgcatgaaagacatccaaggtctgccgtgcattggcgaccaagttcgtgacgtgatcgaggagatcatcgaagagggcgagagcagccgtgttaaagaagttctcaatgacgagcgctacaaggcctttaagcagttcaccagcgtgttcggtgtgggcgtgaaaaccagcgaaaagtggtttcgtatgggcctccgtacggttgaagagctgaaggccagtaagagtctgaagctgagcaagatgcagaaggcgggctttctgtattacgaggatctggccagctgcgttagtaaagcggaagccgatgccgttacgctcatcgtgaagaacacggtgcgtacctttctgccggatgcgctggtgaccatcacgggcggtttccgccgtggcaaaaagatgggccacgacatcgactttctgatcacgaatccgggcccgaaagaggatgacgagctgctccacaaagtggttgatgggctcaagaagcaaggtctgctgctgtactgcgacatcaaagagagcacgttcgtggaggaacaactgccaagtcgcaaaatcgacgccatggacaacttccagaagtgcttcgccattctcaagctgtaccagccgggcgtggataacagcagctataacacgagtaagaagagtgacatggccgaggttaaggattggaaagcgatccgtgtggatctggtgatcacgccattcgagcagtacgcctatgcgctgctcggttggacgggcagcaaagaatttggtcgcgatctgcgccgctatgcgagtcatgagcgcaagatgatcctcgaccgtcatggcctctacgaccgcaaaaagcgcatctttctgaaagcgggcagcgaagaagagattttcgcgcatctgggtctggattatgtggagccgtgggaacgcaacgcg

SEQ ID NO: 890 - protein, 394 aa, synthetic construct
  REGION 1..394: note = Variant of terminal deoxynucleotidyl transferase
MHHHHHHGGSGHPPSNTPEGGVPSVIARKVSQYSCQRKTTLNNYNKKFTDAFEIMAENYKFKGNEIFCLEFKRAASLLKYLPFPVTRMKDIQGLPCIGDQVRDVIEEIIEEGESSRVKEVLNDERYKAFKQFTSVFGVGVKTSEKWFRMGLRTVEELKASKSLKLSKMQKAGFLYYEDLASCVSKAEADAVTLIVKNTVRTFLPDALVTITGGFRRGKKMGHDIDFLITNPGPKEDDELLHKVVDGLKKQGLLLYCDIKESTFVEEQLPSRKIDAMDNFQKCFAILKLYQPGVDNSSYNTSKKSDMAEVKDWKAIRVDLVITPFEQYAYALLGWTGSKEFGRDLRRYASHERKMILDRHGLYDRKKRIFLKAGSEEEIFAHLGLDYVEPWERNA

SEQ ID NO: 891 - DNA, 1182 bp, synthetic construct
  misc_feature 1..1182: note = Variant of terminal deoxynucleotidyl transferase
  source 1..1182: mol_type = other DNA
atgcaccatcatcatcatcatggcggtagcggccatccgccgagcaataccccggagggtggggtgccgagcgttatcgcccgcaaggttagtcagtacagctgccagcgcaagaccacgctgaataactacaacaaaaagtttaccgacgcgttcgagatcatggccgagaactacaaatttaaagagaacgaaatcttctgtctggaatttcggcgcgccgcgagtctgctgaaatatctgccgttcccggttacccgcatgaaagacatccaaggtctgccgtgcattggcgaccaagttcgtgacgtgatcgaggagatcatcgaagagggcgagagcagccgtgttaaagaagttctcaatgacgagcgctacaaggcctttaagcagttcaccagcgtgttcggtgtgggcgtgaaaaccagcgaaaagtggtttcgtatgggcctccgtacggttgaagagctgaaggccagtaagagtctgaagctgagcaagatgcagaaggcgggctttctgtattacgaggatctggccagctgcgttagtaaagcggaagccgatgccgttacgctcatcgtgaagaacacggtgcgtacctttctgccggatgcgctggtgaccatcacgggcggtttccgccgtggcaaaaagatgggccacgacatcgactttctgatcacgaatccgggcccgaaagaggatgacgagctgctccacaaagtggttgatgggctcaagaagcaaggtctgctgctgtactgcgacatcaaagagagcacgttcgtggaggaacaactgccaagtcgcaaaatcgacgccatggacaacttccagaagtgcttcgccattctcaagctgtaccagccgggcgtggataacagcagctataacacgagtaagaagagtgacatggccgaggttaaggattggaaagcgatccgtgtggatctggtgatcacgccattcgagcagtacgcctatgcgctgctcggttggacgggcagcaaagaatttggtcgcgatctgcgccgctatgcgagtcatgagcgcaagatgatcctcgaccgtcatggcctctacgaccgcaaaaagcgcatctttctgaaagcgggcagcgaagaagagattttcgcgcatctgggtctggattatgtggagccgtgggaacgcaacgcg

SEQ ID NO: 892 - protein, 394 aa, synthetic construct
  REGION 1..394: note = Variant of terminal deoxynucleotidyl transferase
MHHHHHHGGSGHPPSNTPEGGVPSVIARKVSQYSCQRKTTLNNYNKKFTDAFEIMAENYKFKENEIFCLEFRRAASLLKYLPFPVTRMKDIQGLPCIGDQVRDVIEEIIEEGESSRVKEVLNDERYKAFKQFTSVFGVGVKTSEKWFRMGLRTVEELKASKSLKLSKMQKAGFLYYEDLASCVSKAEADAVTLIVKNTVRTFLPDALVTITGGFRRGKKMGHDIDFLITNPGPKEDDELLHKVVDGLKKQGLLLYCDIKESTFVEEQLPSRKIDAMDNFQKCFAILKLYQPGVDNSSYNTSKKSDMAEVKDWKAIRVDLVITPFEQYAYALLGWTGSKEFGRDLRRYASHERKMILDRHGLYDRKKRIFLKAGSEEEIFAHLGLDYVEPWERNA

SEQ ID NO: 893 - DNA, 1182 bp, synthetic construct
  misc_feature 1..1182: note = Variant of terminal deoxynucleotidyl transferase
  source 1..1182: mol_type = other DNA
atgcaccatcatcatcatcatggcggtagcggccatccgccgagcaataccccggagggtggggtgccgagcgttatcgcccgcaaggttagtcagtacagctgccagcgcaagaccacgctgaataactacaacaaaaagtttaccgacgcgttcgagatcatggccgagaactacaaatttaaagagaacgaaatcttctgtctggaatttaagcgcgccgcgagtctgctgaaatatctgccgttcccggttacccgcatgaaagacatccaaggtctgccgtgcattggcgaccaagttcgtgacgtgatcgaggagatcatcgaagagggcgagagcagccgtgttaaagaagttctcaatgacgagcgctacaaggcctttaagcagttcaccagcgtgttcggtgtgggcgtgaaaaccagcgaaaagtggtttcgtatgggcctccgtacggttgaagagctgaaggccagtaagagtctgaagctgagcaagatgcagaaggcgggctttctgtattacgaggatctggccagctgcgttagtaaagcggaagccgatgccgttacgctcatcgtgaagaacacggtgcgtacctttctgccggatgcgctggtgaccatcacgggcggtttccgccgtggcaaaaagatgggccacgacatcgactttctgatcacgaatccgggcccgaaagaggatgacgagctgctccacaaagtggttgatgggctcaagaagcaaggtctgctgctgtactgcgacatcaaagagagcacgttcgtggaggaacaactgccaagtcgcaaaatcgacgccatggacaacttccagaagtgcttcgccattctcaagctgtaccagccgggcgtggataacagcagctataacacgagtaagaagagtgacatggccgaggttaaggattggaaagcgatccgtgtggatctggtgatcacgccattcgagcagtacgcctatgcgctgctcggttggacgggcagcaaagaatttggtcgcgatctgcgccgctatgcgatgcatgagcgcaagatgatcctcgaccgtcatggcctctacgaccgcaaaaagcgcatctttctgaaagcgggcagcgaagaagagattttcgcgcatctgggtctggattatgtggagccgtgggaacgcaacgcg

SEQ ID NO: 894 - protein, 394 aa, synthetic construct
  REGION 1..394: note = Variant of terminal deoxynucleotidyl transferase
MHHHHHHGGSGHPPSNTPEGGVPSVIARKVSQYSCQRKTTLNNYNKKFTDAFEIMAENYKFKENEIFCLEFKRAASLLKYLPFPVTRMKDIQGLPCIGDQVRDVIEEIIEEGESSRVKEVLNDERYKAFKQFTSVFGVGVKTSEKWFRMGLRTVEELKASKSLKLSKMQKAGFLYYEDLASCVSKAEADAVTLIVKNTVRTFLPDALVTITGGFRRGKKMGHDIDFLITNPGPKEDDELLHKVVDGLKKQGLLLYCDIKESTFVEEQLPSRKIDAMDNFQKCFAILKLYQPGVDNSSYNTSKKSDMAEVKDWKAIRVDLVITPFEQYAYALLGWTGSKEFGRDLRRYAMHERKMILDRHGLYDRKKRIFLKAGSEEEIFAHLGLDYVEPWERNA

SEQ ID NO: 895 - DNA, 1182 bp, synthetic construct
  misc_feature 1..1182: note = Variant of terminal deoxynucleotidyl transferase
  source 1..1182: mol_type = other DNA
atgcaccatcatcatcatcatggcggtagcggccatccgccgagcaataccccggagggtggggtgccgagcgttatcgcccgcaaggttagtcagtacagctgccagcgcaagaccacgctgaataactacaacaaaaagtttaccgacgcgttcgagatcatggccgagaactacaaatttaaagagaacgaaatcttctgtctggaatttaagcgcgccgcgagtctgctgaaatatctgccgttcccggttacccgcatgaaagacatccaaggtctgccgtgcattggcgaccaagttcgtgacgtgatcgaggagatcatcgaagagggcgagagcagccgtgttaaagaagttctcaatgacgagcgctacaaggcctttaagcagttcaccagcgtgttcggtgtgggcgtgaaaaccagcgaaaagtggtttcgtatgggcctccgtacggttgaagagctgaaggccagtaagagtctgaagctgagcaagatgcagaaggcgggctttctgtattacgaggatctggccagctgcgttagtaaagcggaagccgatgccgttacgctcatcgtgaagaacacggtgcgtacctttctgccggatgcgctggtgaccatcacgggcggtttccgccgtggcaaaaagatgggccacgacatcgactttctgatcacgaatccgggcccgaaagaggatgacgagctgctccacaaagtggttgatgggctcaagaagcaaggtctgctgctgtactgcgacatcaaagagagcacgttcgtggaggaacaactgccaagtcgcaaaatcgacgccatggacaacttccagaagtgcttcgccattctcaagctgtaccagccgggcgtggataacagcagctataacacgagtaagaagagtgacatggccgaggttaaggattggaaagcgatccgtgtggatctggtgatcacgccattcgagcagtacgcctatgcgctgctcggttggacgggcagcaaagaatttggtcgcgatctgcgccgctatgcgagttatgagcgcaagatgatcctcgaccgtcatggcctctacgaccgcaaaaagcgcatctttctgaaagcgggcagcgaagaagagattttcgcgcatctgggtctggattatgtggagccgtgggaacgcaacgcg

SEQ ID NO: 896 - protein, 394 aa, synthetic construct
  REGION 1..394: note = Variant of terminal deoxynucleotidyl transferase
MHHHHHHGGSGHPPSNTPEGGVPSVIARKVSQYSCQRKTTLNNYNKKFTDAFEIMAENYKFKENEIFCLEFKRAASLLKYLPFPVTRMKDIQGLPCIGDQVRDVIEEIIEEGESSRVKEVLNDERYKAFKQFTSVFGVGVKTSEKWFRMGLRTVEELKASKSLKLSKMQKAGFLYYEDLASCVSKAEADAVTLIVKNTVRTFLPDALVTITGGFRRGKKMGHDIDFLITNPGPKEDDELLHKVVDGLKKQGLLLYCDIKESTFVEEQLPSRKIDAMDNFQKCFAILKLYQPGVDNSSYNTSKKSDMAEVKDWKAIRVDLVITPFEQYAYALLGWTGSKEFGRDLRRYASYERKMILDRHGLYDRKKRIFLKAGSEEEIFAHLGLDYVEPWERNA

SEQ ID NO: 897 - DNA, 1182 bp, synthetic construct
  misc_feature 1..1182: note = Variant of terminal deoxynucleotidyl transferase
  source 1..1182: mol_type = other DNA
atgcaccatcatcatcatcatggcggtagcggccatccgccgagcaataccccggagggtggggtgccgagcgttatcgcccgcaaggttagtcagtacagctgccagcgcaagaccacgctgaataactacaacaaaaagtttaccgacgcgttcgagatcatggccgagaactacaaatttaaagagaacgaaatcttctgtctggaatttaagcgcgccgcgagtctgctgaaatatctgccgttcccggttacccgcatgaaagacatccaaggtctgccgtgcattggcgaccaagttcgtgacgtgatcgaggagatcatcgaagagggcgagagcagccgtgttaaagaagttctcaatgacgagcgctacaaggcctttaagcagttcaccagcgtgttcggtgtgggcgtgaaaaccagcgaaaagtggtttcgtatgggcctccgtacggttgaagagctgaaggccagtaagagtctgaagctgagcaagatgcagaaggcgggctttctgtattacgaggatctggccagctgcgttagtaaagcggaagccgatgccgttacgctcatcgtgaagaacacggtgcgtacctttctgccggatgcgctggtgaccatcacgggcggtttccgccgtggcaaaaagatgggccacgacatcgactttctgatcacgaatccgggcccgaaagaggatgacgagctgctccacaaagtggttgatgggctcaagaagcaaggtctgctgctgtactgcgacatcaaagagagcacgttcgtggaggaacaactgccaagtcgcaaaatcgaccggatggacaacttccagaagtgcttcgccattctcaagctgtaccagccgggcgtggataacagcagctataacacgagtaagaagagtgacatggccgaggttaaggattggaaagcgatccgtgtggatctggtgatcacgccattcgagcagtacgcctatgcgctgctcggttggacgggcagcaaagaatttggtcgcgatctgcgccgctatgcgagtcatgagcgcaagatgatcctcgaccgtcatggcctctacgaccgcaaaaagcgcatctttctgaaagcgggcagcgaagaagagattttcgcgcatctgggtctggattatgtggagccgtgggaacgcaacgcg

SEQ ID NO: 898 - protein, 394 aa, synthetic construct
  REGION 1..394: note = Variant of terminal deoxynucleotidyl transferase
MHHHHHHGGSGHPPSNTPEGGVPSVIARKVSQYSCQRKTTLNNYNKKFTDAFEIMAENYKFKENEIFCLEFKRAASLLKYLPFPVTRMKDIQGLPCIGDQVRDVIEEIIEEGESSRVKEVLNDERYKAFKQFTSVFGVGVKTSEKWFRMGLRTVEELKASKSLKLSKMQKAGFLYYEDLASCVSKAEADAVTLIVKNTVRTFLPDALVTITGGFRRGKKMGHDIDFLITNPGPKEDDELLHKVVDGLKKQGLLLYCDIKESTFVEEQLPSRKIDRMDNFQKCFAILKLYQPGVDNSSYNTSKKSDMAEVKDWKAIRVDLVITPFEQYAYALLGWTGSKEFGRDLRRYASHERKMILDRHGLYDRKKRIFLKAGSEEEIFAHLGLDYVEPWERNA

SEQ ID NO: 899 - DNA, 1182 bp, synthetic construct
  misc_feature 1..1182: note = Variant of terminal deoxynucleotidyl transferase
  source 1..1182: mol_type = other DNA
atgcaccatcatcatcatcatggcggtagcggccatccgccgagcaataccccggagggtggggtgccgagcgttatcgcccgcaaggttagtcagtacagctgccagcgcaagaccacgctgaataactacaacaaaaagtttaccgacgcgttcgagatcatggccgagaactacaaatttaaagagaacgaaatcttcatgctggaatttaagcgcgccgcgagtctgctgaaatatctgccgttcccggttacccgcatgaaagacatccaaggtctgccgtgcattggcgaccaagttcgtgacgtgatcgaggagatcatcgaagagggcgagagcagccgtgttaaagaagttctcaatgacgagcgctacaaggcctttaagcagttcaccagcgtgttcggtgtgggcgtgaaaaccagcgaaaagtggtttcgtatgggcctccgtacggttgaagagctgaaggccagtaagagtctgaagctgagcaagatgcagaaggcgggctttctgtattacgaggatctggccagctgcgttagtaaagcggaagccgatgccgttacgctcatcgtgaagaacacggtgcgtacctttctgccggatgcgctggtgaccatcacgggcggtttccgccgtggcaaaaagatgggccacgacatcgactttctgatcacgaatccgggcccgaaagaggatgacgagctgctccacaaagtggttgatgggctcaagaagcaaggtctgctgctgtactgcgacatcaaagagagcacgttcgtggaggaacaactgccaagtcgcaaaatcgacgccatggacaacttccagaagtgcttcgccattctcaagctgtaccagccgggcgtggataacagcagctataacacgagtaagaagagtgacatggccgaggttaaggattggaaagcgatccgtgtggatctggtgatcacgccattcgagcagtacgcctatgcgctgctcggttggacgggcagcaaagaatttggtcgcgatctgcgccgctatgcgagtcatgagcgcaagatgatcctcgaccgtcatggcctctacgaccgcaaaaagcgcatctttctgaaagcgggcagcgaagaagagattttcgcgcatctgggtctggattatgtggagccgtgggaacgcaacgcg

SEQ ID NO: 900 - protein, 394 aa, synthetic construct
  REGION 1..394: note = Variant of terminal deoxynucleotidyl transferase
MHHHHHHGGSGHPPSNTPEGGVPSVIARKVSQYSCQRKTTLNNYNKKFTDAFEIMAENYKFKENEIFMLEFKRAASLLKYLPFPVTRMKDIQGLPCIGDQVRDVIEEIIEEGESSRVKEVLNDERYKAFKQFTSVFGVGVKTSEKWFRMGLRTVEELKASKSLKLSKMQKAGFLYYEDLASCVSKAEADAVTLIVKNTVRTFLPDALVTITGGFRRGKKMGHDIDFLITNPGPKEDDELLHKVVDGLKKQGLLLYCDIKESTFVEEQLPSRKIDAMDNFQKCFAILKLYQPGVDNSSYNTSKKSDMAEVKDWKAIRVDLVITPFEQYAYALLGWTGSKEFGRDLRRYASHERKMILDRHGLYDRKKRIFLKAGSEEEIFAHLGLDYVEPWERNA

SEQ ID NO: 901 - DNA, 1182 bp, synthetic construct
  misc_feature 1..1182: note = Variant of terminal deoxynucleotidyl transferase
  source 1..1182: mol_type = other DNA
atgcaccatcatcatcatcatggcggtagcggccatccgccgagcaataccccggagggtggggtgccgagcgttatcgcccgcaaggttagtcagtacagctgccagcgcaagaccacgctgaataactacaacaaaaagtttaccgacgcgttcgagatcatggccgagaactacaaatttaaagagaacgaaatcttctgtctggaatttaagcgcgccgcgagtctgctgaaatatctgccgttcccggttacccgcatgaaagacatccaaggtctgccgtgcattggcgaccaagttcgtgacgtgatcgaggagatcatcgaagagggcgagagcagccgtgttaaagaagttctcaatgacgagcgctacaaggcctttaagcagttcaccagcgtgttcggtgtgggcgtgaaaaccagcgaaaagtggtttcgtatgggcctccgtacggttgaagagctgaaggccagtaagagtctgaagctgagcaagatgcagaaggcgggctttctgtattacgaggatctggccagctgcgttagtaaagcggaagccgatgccgttacgctcatcgtgaagaacacggtgcgtacctttctgccggatgcgctggtgaccatcacgggcggtttccgccgtggcaaaaagatgggccacgacatcgactttctgatcacgaatccgggcccgaaagaggatgacgagctgctccacaaagtggttgatgggctcaagaagcaaggtctgctgctgtactgcgacatcaaagagagcacgttcgtggaggaacaactgccaagtcgcaaaatcgacgccatggacaacttccagaagtgcttcgccattctcaagctgtaccagccgggcgtggataacagcagctataacacgagtaagaagagtgacatggccgaggttaaggattggaaagcgatccgtgtggatctggtgatcacgccattcgagcagtacgcctatgcgctgctcggttggacgggcagcaaagaatttggtcgcgatctgcgccgctatgcgcggcatgagcgcaagatgatcctcgaccgtcatggcctctacgaccgcaaaaagcgcatctttctgaaagcgggcagcgaagaagagattttcgcgcatctgggtctggattatgtggagccgtgggaacgcaacgcg

SEQ ID NO: 902 - protein, 394 aa, synthetic construct
  REGION 1..394: note = Variant of terminal deoxynucleotidyl transferase
MHHHHHHGGSGHPPSNTPEGGVPSVIARKVSQYSCQRKTTLNNYNKKFTDAFEIMAENYKFKENEIFCLEFKRAASLLKYLPFPVTRMKDIQGLPCIGDQVRDVIEEIIEEGESSRVKEVLNDERYKAFKQFTSVFGVGVKTSEKWFRMGLRTVEELKASKSLKLSKMQKAGFLYYEDLASCVSKAEADAVTLIVKNTVRTFLPDALVTITGGFRRGKKMGHDIDFLITNPGPKEDDELLHKVVDGLKKQGLLLYCDIKESTFVEEQLPSRKIDAMDNFQKCFAILKLYQPGVDNSSYNTSKKSDMAEVKDWKAIRVDLVITPFEQYAYALLGWTGSKEFGRDLRRYARHERKMILDRHGLYDRKKRIFLKAGSEEEIFAHLGLDYVEPWERNA

SEQ ID NO: 903 - DNA, 1182 bp, synthetic construct
  misc_feature 1..1182: note = Variant of terminal deoxynucleotidyl transferase
  source 1..1182: mol_type = other DNA
atgcaccatcatcatcatcatggcggtagcggccatccgccgagcaataccccggagggtggggtgccgagcgttatcgcccgcaaggttagtcagtacagctgccagcgcaagaccacgctgaataactacaacaaaaagtttaccgacgcgttcgagatcatggccgagaactacaaatttaaagagaacgaaatcttctgtctggaatttaagcgcgccgcgagtctgctgaaatatctgccgttcccggttacccgcatgaaagacatccaaggtctgccgtgcattggcgaccaagttcgtgacgtgatcgaggagatcatcgaagagggcgagagcagccgtgttaaagaagttctcaatgacgagcgctacaaggcctttaagcagttcaccagcgtgttcggtgtgggcgtgaaaaccagcgaaaagtggtttcgtatgggcctccgtacggttgaagagctgaaggccagtaagagtctgaagctgagcaagatgcagaaggcgggctttctgtattacgaggatctggccagctgcgttagtaaagcggaagccgatgccgttacgctcatcgtgaagaacacggtgcgtacctttctgccggatgcgctggtgaccatcacgggcggtttccgccgtggcaaaaagatgggccacgacatcgactttctgatcacgaatccgggcccgaaagaggatgacgagctgctccacaaagtggttgatgggctcaagaagcaaggtctgctgctgtactgcgacatcaaagagagcacgttcgtggaggaacaactgccaagtcgcaaaatcgacgccatggacaacttccagaagtgcttcgccattctcaagctgtaccagccgggcgtggataacagcagctataacacgagtaagaagagtgacatggccgaggttaaggattggaaagcgatccgtgtggatctggtgatcacgccattcgagcagtacgcctatgcgctgctcggttggacgggcagcaaagaatttggtcgcgatctgcgccgctatgcgagtgaggagcgcaagatgatcctcgaccgtcatggcctctacgaccgcaaaaagcgcatctttctgaaagcgggcagcgaagaagagattttcgcgcatctgggtctggattatgtggagccgtgggaacgcaacgcg

SEQ ID NO: 904 - protein, 394 aa, synthetic construct
  REGION 1..394: note = Variant of terminal deoxynucleotidyl transferase
MHHHHHHGGSGHPPSNTPEGGVPSVIARKVSQYSCQRKTTLNNYNKKFTDAFEIMAENYKFKENEIFCLEFKRAASLLKYLPFPVTRMKDIQGLPCIGDQVRDVIEEIIEEGESSRVKEVLNDERYKAFKQFTSVFGVGVKTSEKWFRMGLRTVEELKASKSLKLSKMQKAGFLYYEDLASCVSKAEADAVTLIVKNTVRTFLPDALVTITGGFRRGKKMGHDIDFLITNPGPKEDDELLHKVVDGLKKQGLLLYCDIKESTFVEEQLPSRKIDAMDNFQKCFAILKLYQPGVDNSSYNTSKKSDMAEVKDWKAIRVDLVITPFEQYAYALLGWTGSKEFGRDLRRYASEERKMILDRHGLYDRKKRIFLKAGSEEEIFAHLGLDYVEPWERNA

SEQ ID NO: 905 - DNA, 1182 bp, synthetic construct
  misc_feature 1..1182: note = Variant of terminal deoxynucleotidyl transferase
  source 1..1182: mol_type = other DNA
atgcaccatcatcatcatcatggcggtagcggccatccgccgagcaataccccggagggtggggtgccgagcgttatcgcccgcaaggttagtcagtacagctgccagcgcaagaccacgctgaataactacaacaaaaagtttaccgacgcgttcgagatcatggccgagaactacaaatttaaagagaacgaaatcttctgtctggaatttaagcgcgccgcgagtctgctgaaatatctgccgttcccggttacccgcatgaaagacatccaaggtctgccgtgcattggcgaccaagttcgtgacgtgatcgaggagatcatcgaagagggcgagagcagccgtgttaaagaagttctcaatgacgagcgctacaaggcctttaagcagttcaccagcgtgttcggtgtgggcgtgaaaaccagcgaaaagtggtttcgtatgggcctccgtacggttgaagagctgaaggccagtaagagtctgaagctgagcaagatgcagaaggcgggctttctgtattacgaggatctggccagctgcgttagtaaagcggaagccgatgccgttacgctcatcgtgaagaacacggtgcgtacctttctgccggatgcgctggtgaccatcacgggcggtttccgccgtggcaaaaagcggggccacgacatcgactttctgatcacgaatccgggcccgaaagaggatgacgagctgctccacaaagtggttgatgggctcaagaagcaaggtctgctgctgtactgcgacatcaaagagagcacgttcgtggaggaacaactgccaagtcgcaaaatcgacgccatggacaacttccagaagtgcttcgccattctcaagctgtaccagccgggcgtggataacagcagctataacacgagtaagaagagtgacatggccgaggttaaggattggaaagcgatccgtgtggatctggtgatcacgccattcgagcagtacgcctatgcgctgctcggttggacgggcagcaaagaatttggtcgcgatctgcgccgctatgcgagtcatgagcgcaagatgatcctcgaccgtcatggcctctacgaccgcaaaaagcgcatctttctgaaagcgggcagcgaagaagagattttcgcgcatctgggtctggattatgtggagccgtgggaacgcaacgcg

SEQ ID NO: 906 - protein, 394 aa, synthetic construct
  REGION 1..394: note = Variant of terminal deoxynucleotidyl transferase
MHHHHHHGGSGHPPSNTPEGGVPSVIARKVSQYSCQRKTTLNNYNKKFTDAFEIMAENYKFKENEIFCLEFKRAASLLKYLPFPVTRMKDIQGLPCIGDQVRDVIEEIIEEGESSRVKEVLNDERYKAFKQFTSVFGVGVKTSEKWFRMGLRTVEELKASKSLKLSKMQKAGFLYYEDLASCVSKAEADAVTLIVKNTVRTFLPDALVTITGGFRRGKKRGHDIDFLITNPGPKEDDELLHKVVDGLKKQGLLLYCDIKESTFVEEQLPSRKIDAMDNFQKCFAILKLYQPGVDNSSYNTSKKSDMAEVKDWKAIRVDLVITPFEQYAYALLGWTGSKEFGRDLRRYASHERKMILDRHGLYDRKKRIFLKAGSEEEIFAHLGLDYVEPWERNA

SEQ ID NO: 907 - DNA, 1182 bp, synthetic construct
  misc_feature 1..1182: note = Variant of terminal deoxynucleotidyl transferase
  source 1..1182: mol_type = other DNA
atgcaccatcatcatcatcatggcggtagcggccatccgccgagcaataccccggagggggaggtgccgagcgttatcgcccgcaaggttagtcagtacagctgccagcgcaagaccacgctgaataactacaacaaaaagtttaccgacgcgttcgagatcatggccgagaactacaaatttaaagagaacgaaatcgcgtgtctggaatttaagcgcgccgcgagtctgctgaaatatctgccgttcccggttacccgcatgaaagacatccaaggtctgccgtgcattggcgaccaagttcgtgacgtgatcgaggagatcatcgaagaaggcgagagcagccgtgttaaagaagttctcaatgacgagcgctacaaggcctttaagcagttcaccagcgtgttcggtgtgggcgtgaaaaccagcgaaaagtggtttcgtatgggcctccgtacggttgaagagctgaaggccagtaagagtctgaagctgagcaagatgcagaaggcgggctttctgtattacgaggatctggtgagctgcgttagtaaagcggaagccgatgccgttacgctcatcgtgaagaacacggtgcgtacctttctgccggatgcgctggtgaccatcacgggcggtttccgccgtggcaaaaagatgggccacgacatcgactttctgatcacgaatccgggcccgaaagaggatgacgagctgctccacaaagtggttgatggtctcaagaagcaaggtctgctgctgtactgcgacatcaaagagagcacgttcgtggaggaacaactgccaagtcgcaaaatcgacgccatggacaacttccagaagtgcttcgccattctcaagctgtaccagccgggcgtggataacagcagctataacacgagtaagaagagtgacatggccgaggttaaggattggaaagcggttcgtgtggatctggtgatcacgccattcgagcagtacgcctatgcgctgctcggttggacgggcagcaaagaatttggtcgcgatctgcgccgctatgcgagtcatgagcgcaagatgatcctcgaccgtcatggcctctacgaccgcaaaaagcgcatctttctgaaagcgggcagcgaagaagagattttcgcgcatctgggtctggattatgtggagccgtgggaacgcaacgcg

SEQ ID NO: 908 - protein, 394 aa, synthetic construct
  REGION 1..394: note = Variant of terminal deoxynucleotidyl transferase
MHHHHHHGGSGHPPSNTPEGEVPSVIARKVSQYSCQRKTTLNNYNKKFTDAFEIMAENYKFKENEIACLEFKRAASLLKYLPFPVTRMKDIQGLPCIGDQVRDVIEEIIEEGESSRVKEVLNDERYKAFKQFTSVFGVGVKTSEKWFRMGLRTVEELKASKSLKLSKMQKAGFLYYEDLVSCVSKAEADAVTLIVKNTVRTFLPDALVTITGGFRRGKKMGHDIDFLITNPGPKEDDELLHKVVDGLKKQGLLLYCDIKESTFVEEQLPSRKIDAMDNFQKCFAILKLYQPGVDNSSYNTSKKSDMAEVKDWKAVRVDLVITPFEQYAYALLGWTGSKEFGRDLRRYASHERKMILDRHGLYDRKKRIFLKAGSEEEIFAHLGLDYVEPWERNA

SEQ ID NO: 909 - DNA, 1182 bp, synthetic construct
  misc_feature 1..1182: note = Variant of terminal deoxynucleotidyl transferase
  source 1..1182: mol_type = other DNA
atgcaccatcatcatcatcatggcggtagcggccatccgccgagcaataccccggagggtggggtgccgagcgttatcgcccgcaaggttagtcagtacagctgccagcgcaagaccacgctgaataactacaacaaaaagtttaccgacgcgttcgagatcatggccgagaactacaaatttaaagagaacgaaatcttctgtctggaatttaagcgcgccgcgagtctgctgaaatatctgccgttcccggttaccagcatgaaagacatccaaggtctgccgtgcattggcgaccaagttcgtgacgtgatcgaggagatcatcgaagagggcgagagcagccgtgttaaagaagttctcaatgacgagcgctacaaggcctttaagcagttcaccagcgtgttcggtgtgggcgtgaaaaccagcgaaaagtggtttcgtatgggcctccgtacggttgaagaggcaaaggccagtaagagtctgaagctgagcaagatgcagaaggcgggctttctgtattacgaggatctggccagctgcgttagtaaagcggaagccgatgccgttacgctcatcgtgaagaacacggtgcgtacctttctgccggatgcgctggtgaccatcacgggcggtttccgccgtggcaaaaagatgggccacgacatcgactttctgatcacgaatccgggcccgaaagaggatgacgagctgctccacaaagtggttgatggtctcaagaagcaaggtctgctgctgtactgcgacatcaaagagagcacgttcgtggaggaacaactgccaagtcgcaaaatcgacgccatggacaacttccagaagtgcttcgccattctcaagctgtaccagccgggcgtggataacagcagctataacacgagtaagaagagtgacatggccgaggttaaggattggaaagcgatccgtgtggatctggtgatcacgccattcgagcagtacgcctatgcgctgctcggttggacgggcagcaaagaatttggtcgcgatctgcgccgctatgcgagtcatgagcgcaagatgatcctcgaccgtcatggcctctacgaccgcaaaaagcgcatctttctgaaagcgggcagcgaagaagagattttcgcgcatctgggtctggattatgtggagccgtgggaacgcaacgcg

SEQ ID NO: 910 - protein, 394 aa, synthetic construct
  REGION 1..394: note = Variant of terminal deoxynucleotidyl transferase
MHHHHHHGGSGHPPSNTPEGGVPSVIARKVSQYSCQRKTTLNNYNKKFTDAFEIMAENYKFKENEIFCLEFKRAASLLKYLPFPVTSMKDIQGLPCIGDQVRDVIEEIIEEGESSRVKEVLNDERYKAFKQFTSVFGVGVKTSEKWFRMGLRTVEEAKASKSLKLSKMQKAGFLYYEDLASCVSKAEADAVTLIVKNTVRTFLPDALVTITGGFRRGKKMGHDIDFLITNPGPKEDDELLHKVVDGLKKQGLLLYCDIKESTFVEEQLPSRKIDAMDNFQKCFAILKLYQPGVDNSSYNTSKKSDMAEVKDWKAIRVDLVITPFEQYAYALLGWTGSKEFGRDLRRYASHERKMILDRHGLYDRKKRIFLKAGSEEEIFAHLGLDYVEPWERNA

SEQ ID NO: 911 - DNA, 1182 bp, synthetic construct
  misc_feature 1..1182: note = Variant of terminal deoxynucleotidyl transferase
  source 1..1182: mol_type = other DNA
atgcaccatcatcatcatcatggcggtagcggccatccgccgagcaataccccggaggggggggtgccgagcgttatcgcccgcaaggttagtcagtacagctgccagcgcaagaccacgctgaataactacaacaaaaagtttaccgacgcgttcgagatcatggccgagaactacaaatttaaagagaacgaaatcttttgtctggaatttaagcgcgccgcgagtctgctgaaatatctgccgttcccggttacccgcatgaaagacatccaaggtctgccgtgcattggcgaccaagttcgtgacgtgatcgaggagatcatcgaagaaggcgagagcagccgtgttaaagaagttctcaatgacgagcgctacaaggcctttaagcagttcaccagcgtgttcggtgtgggcgtgaaaaccagcgaaaagtggtttcgtatgggcctccgtacggttgaagagctgaaggccagtaagagtctgaagctgagcaagatgcagaaggcgggctttctgtattacgaggatctggcgagctgcgttagtaaagcggaagccgatgccgttacgctcatcgtgaagaacacggtgcgtacctttctgccggatgcgctggtgaccatcacgggcggtttccgccgtggcaaaaagatgggccacgacatcgactttctgatcacgaatccgggcccgaaagaggatgacgagctgctccacaaagtggttgatggtctcaagaagcaaggtctgctgctgtactgcgacatcaaagagagcacgttcgtggaggaacaactgccaagtcgcaaaatcgacgccatggacaacttccagaagtgcttcgccattctcaagctgtaccagccgggcgtggataacagcagctataacacgagtaagaagagtgacatggccgaggttaaggattggaaagcggttcgtgtggatctggtgatcacgccattcgagcagtacgcctatgcgctgctcggttggacgggcagcaaagaatttggtcgcgatctgcgccgctatgcgagtcatgagcgcaagatgatcctcgaccgtcatggcctctacgaccgcaaaaagcgcatctttctgaaagcgggcagcgaagaagagattttcgcgcatctgggtctggattatgtggagccgtgggaacgcaacgcg

SEQ ID NO: 912 - protein, 394 aa, synthetic construct
  REGION 1..394: note = Variant of terminal deoxynucleotidyl transferase
MHHHHHHGGSGHPPSNTPEGGVPSVIARKVSQYSCQRKTTLNNYNKKFTDAFEIMAENYKFKENEIFCLEFKRAASLLKYLPFPVTRMKDIQGLPCIGDQVRDVIEEIIEEGESSRVKEVLNDERYKAFKQFTSVFGVGVKTSEKWFRMGLRTVEELKASKSLKLSKMQKAGFLYYEDLASCVSKAEADAVTLIVKNTVRTFLPDALVTITGGFRRGKKMGHDIDFLITNPGPKEDDELLHKVVDGLKKQGLLLYCDIKESTFVEEQLPSRKIDAMDNFQKCFAILKLYQPGVDNSSYNTSKKSDMAEVKDWKAVRVDLVITPFEQYAYALLGWTGSKEFGRDLRRYASHERKMILDRHGLYDRKKRIFLKAGSEEEIFAHLGLDYVEPWERNA

SEQ ID NO: 913 - DNA, 1182 bp, synthetic construct
  misc_feature 1..1182: note = Variant of terminal deoxynucleotidyl transferase
  source 1..1182: mol_type = other DNA
atgcaccatcatcatcatcatggcggtagcggccatccgccgagcaataccccggagggggaggtgccgagcgttatcgcccgcaaggttagtcagtacagctgccagcgcaagaccacgctgaataactacaacaaaaagtttaccgacgcgttcgagatcatggccgagaactacaaatttaaagagaacgaaatcgcgtgtctggaatttaagcgcgccgcgagtctgctgaaatatctgccgttcccggttaccagcatgaaagacatccaaggtctgccgtgcattggcgaccaagttcgtgacgtgatcgaggagatcatcgaagaaggcgagagcagccgtgttaaagaagttctcaatgacgagcgctacaaggcctttaagcagttcaccagcgtgttcggtgtgggcgtgaaaaccagcgaaaagtggtttcgtatgggcctccgtacggttgaagaggcaaaggccagtaagagtctgaagctgagcaagatgcagaaggcgggctttctgtattacgaggatctggcgagctgcgttagtaaagcggaagccgatgccgttacgctcatcgtgaagaacacggtgcgtacctttctgccggatgcgctggtgaccatcacgggcggtttccgccgtggcaaaaagatgggccacgacatcgactttctgatcacgaatccgggcccgaaagaggatgacgagctgctccacaaagtggttgatctgctcaagaagcaaggtctgctgctgtactgcgacatcaaagagagcacgttcgtggaggaacaactgccaagtcgcaaaatcgacgccatggacaacttccagaagtgcttcgccattctcaagctgtaccagccgggcgtggataacagcagctataacacgagtaagaagagtgacatggccgaggttaaggattggaaagcgatccgtgtggatctggtgatcacgccattcgagcagtacgcctatgcgctgctcggttggacgggcagcaaagaatttggtcgcgatctgcgccgctatgcgagtcatgagcgcaagatgatcctcgaccgtcatggcctctacgaccgcaaaaagcgcatctttctgaaagcgggcagcgaagaagagattttcgcgcatctgggtctggattatgtggagccgtgggaacgcaacgcg

SEQ ID NO: 914 - protein, 394 aa, synthetic construct
  REGION 1..394: note = Variant of terminal deoxynucleotidyl transferase
MHHHHHHGGSGHPPSNTPEGEVPSVIARKVSQYSCQRKTTLNNYNKKFTDAFEIMAENYKFKENEIACLEFKRAASLLKYLPFPVTSMKDIQGLPCIGDQVRDVIEEIIEEGESSRVKEVLNDERYKAFKQFTSVFGVGVKTSEKWFRMGLRTVEEAKASKSLKLSKMQKAGFLYYEDLASCVSKAEADAVTLIVKNTVRTFLPDALVTITGGFRRGKKMGHDIDFLITNPGPKEDDELLHKVVDLLKKQGLLLYCDIKESTFVEEQLPSRKIDAMDNFQKCFAILKLYQPGVDNSSYNTSKKSDMAEVKDWKAIRVDLVITPFEQYAYALLGWTGSKEFGRDLRRYASHERKMILDRHGLYDRKKRIFLKAGSEEEIFAHLGLDYVEPWERNA

SEQ ID NO: 915 - DNA, 1182 bp, synthetic construct
  misc_feature 1..1182: note = Variant of terminal deoxynucleotidyl transferase
  source 1..1182: mol_type = other DNA
atgcaccatcatcatcatcatggcggtagcggccatccgccgagcaataccccggaggggggggtgccgagcgttatcgcccgcaaggttagtcagtacagctgccagcgcaagaccacgctgaataactacaacaaaaagtttaccgacgcgttcgagatcatggccgagaactacaaatttaaagagaacgaaatcttttgtctggaatttaagcgcgccgcgagtctgctgaaatatctgccgttcccggttaccagcatgaaagacatccaaggtctgccgtgcattggcgaccaagttcgtgacgtgatcgaggagatcatcgaaactggcgagagcagccgtgttaaagaagttctcaatgacgagcgctacaaggcctttaagcagttcaccagcgtgttcggtgtgggcgtgaaaaccagcgaaaagtggtttcgtatgggcctccgtacggttgaagagctgaaggccagtaagagtctgaagctgagcaagatgcagaaggcgggctttctgtattacgaggatctggccagctgcgttagtaaagcggaagccgatgccgttacgctcatcgtgaagaacacggtgagtacctttctgccggatgcgctggtgaccatcacgggcggtttccgccgtggcaaaaagatgggccacgacatcgactttctgatcacgaatccgggcccgaaagaggatgacgagctgctccacaaagtggttgatgggctcaagaagcaaggtctgctgctgtactgcgacatcaaagagagcacgttcgtggaggaacaactgccaagtcgcaaaatcgacgccatggacaacttccagaagtgcttcgccattctcaagctgtaccagccgggcgtggataacagcagctataacacgagtaagaagagtgacatggccgaggttaaggattggaaagcgattcgtgtggatctggtgatcacgccattcgagcagtacgcctatgcgctgctcggttggacgggcagcaaagaatttggtcgcgatctgcgccgctatgcgagtcatgagcgcaagatgatcctcgaccgtcatggcctctacgaccgcaaaaagcgcatctttctgaaagcgggcagcgaagaagagattttcgcgcatctgggtctggattatgtggagccgtgggaacgcaacgcg

SEQ ID NO: 916 - protein, 394 aa, synthetic construct
  REGION 1..394: note = Variant of terminal deoxynucleotidyl transferase
MHHHHHHGGSGHPPSNTPEGGVPSVIARKVSQYSCQRKTTLNNYNKKFTDAFEIMAENYKFKENEIFCLEFKRAASLLKYLPFPVTSMKDIQGLPCIGDQVRDVIEEIIETGESSRVKEVLNDERYKAFKQFTSVFGVGVKTSEKWFRMGLRTVEELKASKSLKLSKMQKAGFLYYEDLASCVSKAEADAVTLIVKNTVSTFLPDALVTITGGFRRGKKMGHDIDFLITNPGPKEDDELLHKVVDGLKKQGLLLYCDIKESTFVEEQLPSRKIDAMDNFQKCFAILKLYQPGVDNSSYNTSKKSDMAEVKDWKAIRVDLVITPFEQYAYALLGWTGSKEFGRDLRRYASHERKMILDRHGLYDRKKRIFLKAGSEEEIFAHLGLDYVEPWERNA

SEQ ID NO: 917 - DNA, 1182 bp, synthetic construct
  misc_feature 1..1182: note = Variant of terminal deoxynucleotidyl transferase
  source 1..1182: mol_type = other DNA
atgcaccatcatcatcatcatggcggtagcggccatccgccgagcaataccccggaggggggggtgccgagcgttatcgcccgcaaggttagtcagtacagctgccagcgcaagaccacgctgaataactacaacaaaaagtttaccgacgcgttcgagatcatggccgagaactacaaatttaaagagaacgaaatcgcgtgtctggaatttaagcgcgccgcgagtctgctgaaatatctgccgttcccggttacccgcatgaaagacatccaaggtctgccgtgcattggcgaccaagttcgtgacgtgatcgaggagatcatcgaagagggcgagagcagccgtgttaaagaagttctcaatgacgagcgctacaaggcctttaagcagttcaccagcgtgttcggtgtgggcgtgaaaaccagcgaaaagtggtttcgtatgggcctccgtacggttgaagagctgaaggccagtaagagtctgaagctgagcaagatgcagaaggcgggctttctgtattacgaggatctggtgagctgcgttagtaaagcggaagccgatgccgttacgctcatcgtgaagaacacggtgagtacctttctgccggatgcgctggtgaccatcacgggcggtttccgccgtggcaaaaagatgggccacgacatcgactttctgatcacgaatccgggcccgaaagaggatgacgagctgctccacaaagtggttgatgggctcaagaagcaaggtctgctgctgtactgcgacatcaaagagagcacgttcgtggaggaacaactgccaagtcgcaaaatcgacgccatggacaacttccagaagtgcttcgccattctcaagctgtaccagccgggcgtggataacagcagctataacacgagtaagaagagtgacatggccgaggttaaggattggaaagcggttcgtgtggatctggtgatcacgccattcgagcagtacgcctatgcgctgctcggttggacgggcagcaaagaatttggtcgcgatctgcgccgctatgcgagtcatgagcgcaagatgatcctcgaccgtcatggcctctacgaccgcaaaaagcgcatctttctgaaagcgggcagcgaagaagagattttcgcgcatctgggtctggattatgtggagccgtgggaacgcaacgcg

SEQ ID NO: 918 - protein, 394 aa, synthetic construct
  REGION 1..394: note = Variant of terminal deoxynucleotidyl transferase
MHHHHHHGGSGHPPSNTPEGGVPSVIARKVSQYSCQRKTTLNNYNKKFTDAFEIMAENYKFKENEIACLEFKRAASLLKYLPFPVTRMKDIQGLPCIGDQVRDVIEEIIEEGESSRVKEVLNDERYKAFKQFTSVFGVGVKTSEKWFRMGLRTVEELKASKSLKLSKMQKAGFLYYEDLVSCVSKAEADAVTLIVKNTVSTFLPDALVTITGGFRRGKKMGHDIDFLITNPGPKEDDELLHKVVDGLKKQGLLLYCDIKESTFVEEQLPSRKIDAMDNFQKCFAILKLYQPGVDNSSYNTSKKSDMAEVKDWKAVRVDLVITPFEQYAYALLGWTGSKEFGRDLRRYASHERKMILDRHGLYDRKKRIFLKAGSEEEIFAHLGLDYVEPWERNA

SEQ ID NO: 919 - DNA, 1182 bp, synthetic construct
  misc_feature 1..1182: note = Variant of terminal deoxynucleotidyl transferase
  source 1..1182: mol_type = other DNA
atgcaccatcatcatcatcatggcggtagcggccatccgccgagcaataccccggaggggggggtgccgagcgttatcgcccgcaaggttagtcagtacagctgccagcgcaagaccacgctgaataactacaacaaaaagtttaccgacgcgttcgagatcatggccgagaactacaaatttaaagagaacgaaatcgcgtgtctggaatttaagcgcgccgcgagtctgctgaaatatctgccgttcccggttaccagcatgaaagacatccaaggtctgccgtgcattggcgaccaagttcgtgacgtgatcgaggagatcatcgaagaaggcgagagcagccgtgttaaagaagttctcaatgacgagcgctacaaggcctttaagcagttcaccagcgtgttcggtgtgggcgtgaaaaccagcgaaaagtggtttcgtatgggcctccgtacggttgaagagctgaaggccagtaagagtctgaagctgagcaagatgcagaaggcgggctttctgtattacgaggatctggccagctgcgttagtaaagcggaagccgatgccgttacgctcatcgtgaagaacacggtgcgtacctttctgccggatgcgctggtgaccatcacgggcggtttccgccgtggcaaaaagatgggccacgacatcgactttctgatcacgaatccgggcccgaaagaggatgacgagctgctccacaaagtggttgatgggctcaagaagcaaggtctgctgctgtactgcgacatcaaagagagcacgttcgtggaggaacaactgccaagtcgcaaaatcgacgccatggacaacttccagaagtgcttcgccattctcaagctgtaccagccgggcgtggataacagcagctataacacgagtaagaagagtgacatggccgaggttaaggattggaaagcgattcgtgtggatctggtgatcacgccattcgagcagtacgcctatgcgctgctcggttggacgggcagcaaagaatttggtcgcgatctgcgccgctatgcgagtcatgagcgcaagatgatcctcgaccgtcatggcctctacgaccgcaaaaagcgcatctttctgaaagcgggcagcgaagaagagattttcgcgcatctgggtctggattatgtggagccgtgggaacgcaacgcg

SEQ ID NO: 920 - protein, 394 aa, synthetic construct
  REGION 1..394: note = Variant of terminal deoxynucleotidyl transferase
MHHHHHHGGSGHPPSNTPEGGVPSVIARKVSQYSCQRKTTLNNYNKKFTDAFEIMAENYKFKENEIACLEFKRAASLLKYLPFPVTSMKDIQGLPCIGDQVRDVIEEIIEEGESSRVKEVLNDERYKAFKQFTSVFGVGVKTSEKWFRMGLRTVEELKASKSLKLSKMQKAGFLYYEDLASCVSKAEADAVTLIVKNTVRTFLPDALVTITGGFRRGKKMGHDIDFLITNPGPKEDDELLHKVVDGLKKQGLLLYCDIKESTFVEEQLPSRKIDAMDNFQKCFAILKLYQPGVDNSSYNTSKKSDMAEVKDWKAIRVDLVITPFEQYAYALLGWTGSKEFGRDLRRYASHERKMILDRHGLYDRKKRIFLKAGSEEEIFAHLGLDYVEPWERNA

SEQ ID NO: 921 - DNA, 1182 bp, synthetic construct
  misc_feature 1..1182: note = Variant of terminal deoxynucleotidyl transferase
  source 1..1182: mol_type = other DNA
atgcaccatcatcatcatcatggcggtagcggccatccgccgagcaataccccggaggggggggtgccgagcgttatcgcccgcaaggttagtcagtacagctgccagcgcaagaccacgctgaataactacaacaaaaagtttaccgacgcgttcgagatcatggccgagaactacaaatttaaagagaacgaaatcgcgtgtctggaatttaagcgcgccgcgagtctgctgaaatatctgccgttcccggttacccgcatgaaagacatccaaggtctgccgtgcattggcgaccaagttcgtgacgtgatcgaggagatcatcgaagagggcgagagcagccgtgttaaagaagttctcaatgacgagcgctacaaggcctttaagcagttcaccagcgtgttcggtgtgggcgtgaaaaccagcgaaaagtggtttcgtatgggcctccgtacggttgaagaggcaaaggccgacaagagtctgaagctgagcaagatgcagaaggcgggctttctgtattacgaggatctggtgagctgcgttagtaaagcggaagccgatgccgttacgctcatcgtgaagaacacggtgcgtacctttctgccggatgcgctggtgaccatcacgggcggtttccgccgtggcaaaaagatgggccacgacatcgactttctgatcacgaatccgggcccgaaagaggatgacgagctgctccacaaagtggttgatggtctcaagaagcaaggtctgctgctgtactgcgacatcaaagagagcacgttcgtggaggaacaactgccaagtcgcaaaatcgacgccatggacaacttccagaagtgcttcgccattctcaagctgtaccagccgggcgtggataacagcagctataacacgagtaagaagagtgacatggccgaggttaaggattggaaagcgatccgtgtggatctggtgatcacgccattcgagcagtacgcctatgcgctgctcggttggacgggcagcaaagaatttggtcgcgatctgcgccgctatgcgagtcatgagcgcaagatgatcctcgaccgtcatggcctctacgaccgcaaaaagcgcatctttctgaaagcgggcagcgaagaagagattttcgcgcatctgggtctggattatgtggagccgtgggaacgcaacgcg

SEQ ID NO: 922 - protein, 394 aa, synthetic construct
  REGION 1..394: note = Variant of terminal deoxynucleotidyl transferase
MHHHHHHGGSGHPPSNTPEGGVPSVIARKVSQYSCQRKTTLNNYNKKFTDAFEIMAENYKFKENEIACLEFKRAASLLKYLPFPVTRMKDIQGLPCIGDQVRDVIEEIIEEGESSRVKEVLNDERYKAFKQFTSVFGVGVKTSEKWFRMGLRTVEEAKADKSLKLSKMQKAGFLYYEDLVSCVSKAEADAVTLIVKNTVRTFLPDALVTITGGFRRGKKMGHDIDFLITNPGPKEDDELLHKVVDGLKKQGLLLYCDIKESTFVEEQLPSRKIDAMDNFQKCFAILKLYQPGVDNSSYNTSKKSDMAEVKDWKAIRVDLVITPFEQYAYALLGWTGSKEFGRDLRRYASHERKMILDRHGLYDRKKRIFLKAGSEEEIFAHLGLDYVEPWERNA

SEQ ID NO: 923 - DNA, 1182 bp, synthetic construct
  misc_feature 1..1182: note = Variant of terminal deoxynucleotidyl transferase
  source 1..1182: mol_type = other DNA
atgcaccatcatcatcatcatggcggtagcggccatccgccgagcaataccccggagggtggggtgccgagcgttatcgcccgcaaggttagtcagtacagctgccagcgcaagaccacgctgaataactacaacaaaaagtttaccgacgcgttcgagatcatggccgagaactacaaatttaaagagaacgaaatcgcgtgtctggaatttaagcgcgccgcgagtctgctgaaatatctgccgttcccggttacccgcatgaaagacatccaaggtctgccgtgcattggcgaccaagttcgtgacgtgatcgaggagatcatcgaaactggcgagagcagccgtgttaaagaagttctcaatgacgagcgctacaaggcctttaagcagttcaccagcgtgttcggtgtgggcgtgaaaaccagcgaaaagtggtttcgtatgggcctccgtacggttgaagagctgaaggccagtaagagtctgaagctgagcaagatgcagaaggcgggctttctgtattacgaggatctggcgagctgcgttagtaaagcggaagccgatgccgttacgctcatcgtgaagaacacggtgcgtacctttctgccggatgcgctggtgaccatcacgggcggtttccgccgtggcaaaaagatgggccacgacatcgactttctgatcacgaatccgggcccgaaagaggatgacgagctgctccacaaagtggttgatgggctcaagaagcaaggtctgctgctgtactgcgacatcaaagagagcacgttcgtggaggaacaactgccaagtcgcaaaatcgacgccatggacaacttccagaagtgcttcgccattctcaagctgtaccagccgggcgtggataacagcagctataacacgagtaagaagagtgacatggccgaggttaaggattggaaagcgatccgtgtggatctggtgatcacgccattcgagcagtacgcctatgcgctgctcggttggacgggcagcaaagaatttggtcgcgatctgcgccgctatgcgagtcatgagcgcaagatgatcctcgaccgtcatggcctctacgaccgcaaaaagcgcatctttctgaaagcgggcagcgaagaagagattttcgcgcatctgggtctggattatgtggagccgtgggaacgcaacgcg

SEQ ID NO: 924 - protein, 394 aa, synthetic construct
  REGION 1..394: note = Variant of terminal deoxynucleotidyl transferase
MHHHHHHGGSGHPPSNTPEGGVPSVIARKVSQYSCQRKTTLNNYNKKFTDAFEIMAENYKFKENEIACLEFKRAASLLKYLPFPVTRMKDIQGLPCIGDQVRDVIEEIIETGESSRVKEVLNDERYKAFKQFTSVFGVGVKTSEKWFRMGLRTVEELKASKSLKLSKMQKAGFLYYEDLASCVSKAEADAVTLIVKNTVRTFLPDALVTITGGFRRGKKMGHDIDFLITNPGPKEDDELLHKVVDGLKKQGLLLYCDIKESTFVEEQLPSRKIDAMDNFQKCFAILKLYQPGVDNSSYNTSKKSDMAEVKDWKAIRVDLVITPFEQYAYALLGWTGSKEFGRDLRRYASHERKMILDRHGLYDRKKRIFLKAGSEEEIFAHLGLDYVEPWERNA

SEQ ID NO: 925 - DNA, 1182 bp, synthetic construct
  misc_feature 1..1182: note = Variant of terminal deoxynucleotidyl transferase
  source 1..1182: mol_type = other DNA
atgcaccatcatcatcatcatggcggtagcggccatccgccgagcaataccccggagggggaggtgccgagcgttatcgcccgcaaggttagtcagtacagctgccagcgcaagaccacgctgaataactacaacaaaaagtttaccgacgcgttcgagatcatggccgagaactacaaatttaaagagaacgaaatcttctgtctggaatttaagcgcgccgcgagtctgctgaaatatctgccgttcccggttacccgcatgaaagacatccaaggtctgccgtgcattggcgaccaagttcgtgacgtgatcgaggagatcatcgaagagggcgagagcagccgtgttaaagaagttctcaatgacgagcgctacaaggcctttaagcagttcaccagcgtgttcggtgtgggcgtgaaaaccagcgaaaagtggtttcgtatgggcctccgtacggttgaagagctgaaggccgacaagagtctgaagctgagcaagatgcagaaggcgggctttctgtattacgaggatctggcgagctgcgttagtaaagcggaagccgatgccgttacgctcatcgtgaagaacacggtgcgtacctttctgccggatgcgctggtgaccatcacgggcggtttccgccgtggcaaaaagatgggccacgacatcgactttctgatcacgaatccgggcccgaaagaggatgacgagctgctccacaaagtggttgatggtctcaagaagcaaggtctgctgctgtactgcgacatcaaagagagcacgttcgtggaggaacaactgccaagtcgcaaaatcgacgccatggacaacttccagaagtgcttcgccattctcaagctgtaccagccgggcgtggataacagcagctataacacgagtaagaagagtgacatggccgaggttaaggattggaaagcggttcgtgtggatctggtgatcacgccattcgagcagtacgcctatgcgctgctcggttggacgggcagcaaagaatttggtcgcgatctgcgccgctatgcgagtcatgagcgcaagatgatcctcgaccgtcatggcctctacgaccgcaaaaagcgcatctttctgaaagcgggcagcgaagaagagattttcgcgcatctgggtctggattatgtggagccgtgggaacgcaacgcg

SEQ ID NO: 926 - protein, 394 aa, synthetic construct
  REGION 1..394: note = Variant of terminal deoxynucleotidyl transferase
MHHHHHHGGSGHPPSNTPEGEVPSVIARKVSQYSCQRKTTLNNYNKKFTDAFEIMAENYKFKENEIFCLEFKRAASLLKYLPFPVTRMKDIQGLPCIGDQVRDVIEEIIEEGESSRVKEVLNDERYKAFKQFTSVFGVGVKTSEKWFRMGLRTVEELKADKSLKLSKMQKAGFLYYEDLASCVSKAEADAVTLIVKNTVRTFLPDALVTITGGFRRGKKMGHDIDFLITNPGPKEDDELLHKVVDGLKKQGLLLYCDIKESTFVEEQLPSRKIDAMDNFQKCFAILKLYQPGVDNSSYNTSKKSDMAEVKDWKAVRVDLVITPFEQYAYALLGWTGSKEFGRDLRRYASHERKMILDRHGLYDRKKRIFLKAGSEEEIFAHLGLDYVEPWERNA

SEQ ID NO: 927 - DNA, 1182 bp, synthetic construct
  misc_feature 1..1182: note = Variant of terminal deoxynucleotidyl transferase
  source 1..1182: mol_type = other DNA
atgcaccatcatcatcatcatggcggtagcggccatccgccgagcaataccccggagggggaggtgccgagcgttatcgcccgcaaggttagtcagtacagctgccagcgcaagaccacgctgaataactacaacaaaaagtttaccgacgcgttcgagatcatggccgagaactacaaatttaaagagaacgaaatcttctgtctggaatttaagcgcgccgcgagtctgctgaaatatctgccgttcccggttaccagcatgaaagacatccaaggtctgccgtgcattggcgaccaagttcgtgacgtgatcgaggagatcatcgaagaaggcgagagcagccgtgttaaagaagttctcaatgacgagcgctacaaggcctttaagcagttcaccagcgtgttcggtgtgggcgtgaaaaccagcgaaaagtggtttcgtatgggcctccgtacggttgaagagctgaaggccagtaagagtctgaagctgagcaagatgcagaaggcgggctttctgtattacgaggatctggcgagctgcgttagtaaagcggaagccgatgccgttacgctcatcgtgaagaacacggtgcgtacctttctgccggatgcgctggtgaccatcacgggcggtttccgccgtggcaaaaagatgggccacgacatcgactttctgatcacgaatccgggcccgaaagaggatgacgagctgctccacaaagtggttgatctgctcaagaagcaaggtctgctgctgtactgcgacatcaaagagagcacgttcgtggaggaacaactgccaagtcgcaaaatcgacgccatggacaacttccagaagtgcttcgccattctcaagctgtaccagccgggcgtggataacagcagctataacacgagtaagaagagtgacatggccgaggttaaggattggaaagcggttcgtgtggatctggtgatcacgccattcgagcagtacgcctatgcgctgctcggttggacgggcagcaaagaatttggtcgcgatctgcgccgctatgcgagtcatgagcgcaagatgatcctcgaccgtcatggcctctacgaccgcaaaaagcgcatctttctgaaagcgggcagcgaagaagagattttcgcgcatctgggtctggattatgtggagccgtgggaacgcaacgcg

SEQ ID NO: 928 - protein, 394 aa, synthetic construct
  REGION 1..394: note = Variant of terminal deoxynucleotidyl transferase
MHHHHHHGGSGHPPSNTPEGEVPSVIARKVSQYSCQRKTTLNNYNKKFTDAFEIMAENYKFKENEIFCLEFKRAASLLKYLPFPVTSMKDIQGLPCIGDQVRDVIEEIIEEGESSRVKEVLNDERYKAFKQFTSVFGVGVKTSEKWFRMGLRTVEELKASKSLKLSKMQKAGFLYYEDLASCVSKAEADAVTLIVKNTVRTFLPDALVTITGGFRRGKKMGHDIDFLITNPGPKEDDELLHKVVDLLKKQGLLLYCDIKESTFVEEQLPSRKIDAMDNFQKCFAILKLYQPGVDNSSYNTSKKSDMAEVKDWKAVRVDLVITPFEQYAYALLGWTGSKEFGRDLRRYASHERKMILDRHGLYDRKKRIFLKAGSEEEIFAHLGLDYVEPWERNA

SEQ ID NO: 929 - DNA, 1182 bp, synthetic construct
  misc_feature 1..1182: note = Variant of terminal deoxynucleotidyl transferase
  source 1..1182: mol_type = other DNA
atgcaccatcatcatcatcatggcggtagcggccatccgccgagcaataccccggagggggaggtgccgagcgttatcgcccgcaaggttagtcagtacagctgccagcgcaagaccacgctgaataactacaacaaaaagtttaccgacgcgttcgagatcatggccgagaactacaaatttaaagagaacgaaatcttctgtctggaatttaagcgcgccgcgagtctgctgaaatatctgccgttcccggttacccgcatgaaagacatccaaggtctgccgtgcattggcgaccaagttcgtgacgtgatcgaggagatcatcgaagagggcgagagcagccgtgttaaagaagttctcaatgacgagcgctacaaggcctttaagcagttcaccagcgtgttcggtgtgggcgtgaaaaccagcgaaaagtggtttcgtatgggcctccgtacggttgaagagctgaaggccagtaagagtctgaagctgagcaagatgcagaaggcgggctttctgtattacgaggatctggcgagctgcgttagtaaagcggaagccgatgccgttacgctcatcgtgaagaacacggtgcgtacctttctgccggatgcgctggtgaccatcacgggcggtttccgccgtggcaaaaagatgggccacgacatcgactttctgatcacgaatccgggcccgaaagaggatgacgagctgctccacaaagtggttgatgggctcaagaagcaaggtctgctgctgtactgcgacatcaaagagagcacgttcgtggaggaacaactgccaagtcgcaaaatcgacgccatggacaacttccagaagtgcttcgccattctcaagctgtaccagccgggcgtggataacagcagctataacacgagtaagaagagtgacatggccgaggttaaggattggaaagcgatccgtgtggatctggtgatcacgccattcgagcagtacgcctatgcgctgctcggttggacgggcagcaaagaatttggtcgcgatctgcgccgctatgcgagtcatgagcgcaagatgatcctcgaccgtcatggcctctacgaccgcaaaaagcgcatctttctgaaagcgggcagcgaagaagagattttcgcgcatctgggtctggattatgtggagccgtgggaacgcaacgcg

SEQ ID NO: 930 - protein, 394 aa, synthetic construct
  REGION 1..394: note = Variant of terminal deoxynucleotidyl transferase
MHHHHHHGGSGHPPSNTPEGEVPSVIARKVSQYSCQRKTTLNNYNKKFTDAFEIMAENYKFKENEIFCLEFKRAASLLKYLPFPVTRMKDIQGLPCIGDQVRDVIEEIIEEGESSRVKEVLNDERYKAFKQFTSVFGVGVKTSEKWFRMGLRTVEELKASKSLKLSKMQKAGFLYYEDLASCVSKAEADAVTLIVKNTVRTFLPDALVTITGGFRRGKKMGHDIDFLITNPGPKEDDELLHKVVDGLKKQGLLLYCDIKESTFVEEQLPSRKIDAMDNFQKCFAILKLYQPGVDNSSYNTSKKSDMAEVKDWKAIRVDLVITPFEQYAYALLGWTGSKEFGRDLRRYASHERKMILDRHGLYDRKKRIFLKAGSEEEIFAHLGLDYVEPWERNA

SEQ ID NO: 931 - DNA, 1182 bp, synthetic construct
  misc_feature 1..1182: note = Variant of terminal deoxynucleotidyl transferase
  source 1..1182: mol_type = other DNA
atgcaccatcatcatcatcatggcggtagcggccatccgccgagcaataccccggagctggaggtgccgagcgttatcgcccgcaaggttagtcagtacagctgccagcgcaagaccacgctgaataactacaacaaaaagtttaccgacgcgttcgagatcatggccgagaactacaaatttaaagagaacgaaatcttctgtctggaatttaagcgcgccgcgagtctgctgaaatatctgccgttcccggttaccagcatgaaagacatccaaggtctgccgtgcattggcgaccaagttcgtgacgtgatcgaggagatcatcgaagaaggcgagagcagccgtgttaaagaagttctcaatgacgagcgctacaaggcctttaagcagttcaccagcgtgttcggtgtgggcgtgaaaaccagcgaaaagtggtttcgtatgggcctccgtacggttgaagagctgaaggccagtaagagtctgaagctgagcaagatgcagaaggcgggctttctgtattacgaggatctggtgagctgcgttagtaaagcggaagccgatgccgttacgctcatcgtgaagaacacggtgcgtacctttctgccggatgcgctggtgaccatcacgggcggtttccgccgtggcaaaaagatgggccacgacatcgactttctgatcacgaatccgggcccgaaagaggatgacgagctgctccacaaagtggttgatctgctcaagaagcaaggtctgctgctgtactgcgacatcaaagagagcacgttcgtggaggaacaactgccaagtcgcaaaatcgacgccatggacaacttccagaagtgcttcgccattctcaagctgtaccagccgggcgtggataacagcagctataacacgagtaagaagagtgacatggccgaggttaaggattggaaagcggttcgtgtggatctggtgatcacgccattcgagcagtacgcctatgcgctgctcggttggacgggcagcaaagaatttggtcgcgatctgcgccgctatgcgagtcatgagcgcaagatgatcctcgaccgtcatggcctctacgaccgcaaaaagcgcatctttctgaaagcgggcagcgaagaagagattttcgcgcatctgggtctggattatgtggagccgtgggaacgcaacgcg

SEQ ID NO: 932 - protein, 394 aa, synthetic construct
  REGION 1..394: note = Variant of terminal deoxynucleotidyl transferase
MHHHHHHGGSGHPPSNTPELEVPSVIARKVSQYSCQRKTTLNNYNKKFTDAFEIMAENYKFKENEIFCLEFKRAASLLKYLPFPVTSMKDIQGLPCIGDQVRDVIEEIIEEGESSRVKEVLNDERYKAFKQFTSVFGVGVKTSEKWFRMGLRTVEELKASKSLKLSKMQKAGFLYYEDLVSCVSKAEADAVTLIVKNTVRTFLPDALVTITGGFRRGKKMGHDIDFLITNPGPKEDDELLHKVVDLLKKQGLLLYCDIKESTFVEEQLPSRKIDAMDNFQKCFAILKLYQPGVDNSSYNTSKKSDMAEVKDWKAVRVDLVITPFEQYAYALLGWTGSKEFGRDLRRYASHERKMILDRHGLYDRKKRIFLKAGSEEEIFAHLGLDYVEPWERNA

SEQ ID NO: 933 - DNA, 1182 bp, synthetic construct
  misc_feature 1..1182: note = Variant of terminal deoxynucleotidyl transferase
  source 1..1182: mol_type = other DNA
atgcaccatcatcatcatcatggcggtagcggccatccgccgagcaataccccggagctggaggtgccgagcgttatcgcccgcaaggttagtcagtacagctgccagcgcaagaccacgctgaataactacaacaaaaagtttaccgacgcgttcgagatcatggccgagaactacaaatttaaagagaacgaaatcgcgtgtctggaatttaagcgcgccgcgagtctgctgaaatatctgccgttcccggttacccgcatgaaagacatccaaggtctgccgtgcattggcgaccaagttcgtgacgtgatcgaggagatcatcgaagaaggcgagagcagccgtgttaaagaagttctcaatgacgagcgctacaaggcctttaagcagttcaccagcgtgttcggtgtgggcgtgaaaaccagcgaaaagtggtttcgtatgggcctccgtacggttgaagagctgaaggccgacaagagtctgaagctgagcaagatgcagaaggcgggctttctgtattacgaggatctggccagctgcgttagtaaagcggaagccgatgccgttacgctcatcgtgaagaacacggtgcgtacctttctgccggatgcgctggtgaccatcacgggcggtttccgccgtggcaaaaagatgggccacgacatcgactttctgatcacgaatccgggcccgaaagaggatgacgagctgctccacaaagtggttgatggtctcaagaagcaaggtctgctgctgtactgcgacatcaaagagagcacgttcgtggaggaacaactgccaagtcgcaaaatcgacgccatggacaacttccagaagtgcttcgccattctcaagctgtaccagccgggcgtggataacagcagctataacacgagtaagaagagtgacatggccgaggttaaggattggaaagcgattcgtgtggatctggtgatcacgccattcgagcagtacgcctatgcgctgctcggttggacgggcagcaaagaatttggtcgcgatctgcgccgctatgcgagtcatgagcgcaagatgatcctcgaccgtcatggcctctacgaccgcaaaaagcgcatctttctgaaagcgggcagcgaagaagagattttcgcgcatctgggtctggattatgtggagccgtgggaacgcaacgcg

SEQ ID NO: 934 - protein, 394 aa, synthetic construct
  REGION 1..394: note = Variant of terminal deoxynucleotidyl transferase
MHHHHHHGGSGHPPSNTPELEVPSVIARKVSQYSCQRKTTLNNYNKKFTDAFEIMAENYKFKENEIACLEFKRAASLLKYLPFPVTRMKDIQGLPCIGDQVRDVIEEIIEEGESSRVKEVLNDERYKAFKQFTSVFGVGVKTSEKWFRMGLRTVEELKADKSLKLSKMQKAGFLYYEDLASCVSKAEADAVTLIVKNTVRTFLPDALVTITGGFRRGKKMGHDIDFLITNPGPKEDDELLHKVVDGLKKQGLLLYCDIKESTFVEEQLPSRKIDAMDNFQKCFAILKLYQPGVDNSSYNTSKKSDMAEVKDWKAIRVDLVITPFEQYAYALLGWTGSKEFGRDLRRYASHERKMILDRHGLYDRKKRIFLKAGSEEEIFAHLGLDYVEPWERNA

SEQ ID NO: 935 - DNA, 1182 bp, synthetic construct
  misc_feature 1..1182: note = Variant of terminal deoxynucleotidyl transferase
  source 1..1182: mol_type = other DNA
atgcaccatcatcatcatcatggcggtagcggccatccgccgagcaataccccggagggtggggtgccgagcgttatcgcccgcaaggttagtcagtacagctgccagcgcaagaccacgctgaataactacaacaaaaagtttaccgacgcgttcgagatcatggccgagaactacaaatttaaagagaacgaaatcttctgtctggaatttaagcgcgccgcgagtctgctgaaatatctgccgttcccggttacccgcatgaaagacatccaaggtctgccgtgcattggcgaccaagttcgtgacgtgatcgaggagatcatcgaagagggcgagagcagccgtgttaaagaagttctcaatgacgagcgctacaaggcctttaagcagttcaccagcgtgttcggtgtgggcgtgaaaaccagcgaaaagtggtttcgtatgggcctccgtacggttgaagaggcaaaggccgacaagagtctgaagctgagcaagatgcagaaggcgggctttctgtattacgaggatctggccagctgcgttagtaaagcggaagccgatgccgttacgctcatcgtgaagaacacggtgcgtacctttctgccggatgcgctggtgaccatcacgggcggtttccgccgtggcaaaaagatgggccacgacatcgactttctgatcacgaatccgggcccgaaagaggatgacgagctgctccacaaagtggttgatgggctcaagaagcaaggtctgctgctgtactgcgacatcaaagagagcacgttcgtggaggaacaactgccaagtcgcaaaatcgacgccatggacaacttccagaagtgcttcgccattctcaagctgtaccagccgggcgtggataacagcagctataacacgagtaagaagagtgacatggccgaggttaaggattggaaagcgatccgtgtggatctggtgatcacgccattcgagcagtacgcctatgcgctgctcggttggacgggcagcaaagaatttggtcgcgatctgcgccgctatgcgagtcatgagcgcaagatgatcctcgaccgtcatggcctctacgaccgcaaaaagcgcatctttctgaaagcgggcagcgaagaagagattttcgcgcatctgggtctggattatgtggagccgtgggaacgcaacgcg

SEQ ID NO: 936 - protein, 394 aa, synthetic construct
  REGION 1..394: note = Variant of terminal deoxynucleotidyl transferase
MHHHHHHGGSGHPPSNTPEGGVPSVIARKVSQYSCQRKTTLNNYNKKFTDAFEIMAENYKFKENEIFCLEFKRAASLLKYLPFPVTRMKDIQGLPCIGDQVRDVIEEIIEEGESSRVKEVLNDERYKAFKQFTSVFGVGVKTSEKWFRMGLRTVEEAKADKSLKLSKMQKAGFLYYEDLASCVSKAEADAVTLIVKNTVRTFLPDALVTITGGFRRGKKMGHDIDFLITNPGPKEDDELLHKVVDGLKKQGLLLYCDIKESTFVEEQLPSRKIDAMDNFQKCFAILKLYQPGVDNSSYNTSKKSDMAEVKDWKAIRVDLVITPFEQYAYALLGWTGSKEFGRDLRRYASHERKMILDRHGLYDRKKRIFLKAGSEEEIFAHLGLDYVEPWERNA

SEQ ID NO: 937 - DNA, 1182 bp, synthetic construct
  misc_feature 1..1182: note = Variant of terminal deoxynucleotidyl transferase
  source 1..1182: mol_type = other DNA
atgcaccatcatcatcatcatggcggtagcggccatccgccgagcaataccccggaggggggggtgccgagcgttatcgcccgcaaggttagtcagtacagctgccagcgcaagaccacgctgaataactacaacaaaaagtttaccgacgcgttcgagatcatggccgagaactacaaatttaaagagaacgaaatcttttgtctggaatttaagcgcgccgcgagtctgctgaaatatctgccgttcccggttaccagcatgaaagacatccaaggtctgccgtgcattggcgaccaagttcgtgacgtgatcgaggagatcatcgaaactggcgagagcagccgtgttaaagaagttctcaatgacgagcgctacaaggcctttaagcagttcaccagcgtgttcggtgtgggcgtgaaaaccagcgaaaagtggtttcgtatgggcctccgtacggttgaagagctgaaggccagtaagagtctgaagctgagcaagatgcagaaggcgggctttctgtattacgaggatctggccagctgcgttagtaaagcggaagccgatgccgttacgctcatcgtgaagaacacggtgagtacctttctgccggatgcgctggtgaccatcacgggcggtttccgccgtggcaaaaagatgggccacgacatcgactttctgatcacgaatccgggcccgaaagaggatgacgagctgctccacaaagtggttgatctgctcaagaagcaaggtctgctgctgtactgcgacatcaaagagagcacgttcgtggaggaacaactgccaagtcgcaaaatcgacgccatggacaacttccagaagtgcttcgccattctcaagctgtaccagccgggcgtggataacagcagctataacacgagtaagaagagtgacatggccgaggttaaggattggaaagcgattcgtgtggatctggtgatcacgccattcgagcagtacgcctatgcgctgctcggttggacgggcagcaaagaatttggtcgcgatctgcgccgctatgcgagtcatgagcgcaagatgatcctcgaccgtcatggcctctacgaccgcaaaaagcgcatctttctgaaagcgggcagcgaagaagagattttcgcgcatctgggtctggattatgtggagccgtgggaacgcaacgcg

SEQ ID NO: 938 - protein, 394 aa, synthetic construct
  REGION 1..394: note = Variant of terminal deoxynucleotidyl transferase
MHHHHHHGGSGHPPSNTPEGGVPSVIARKVSQYSCQRKTTLNNYNKKFTDAFEIMAENYKFKENEIFCLEFKRAASLLKYLPFPVTSMKDIQGLPCIGDQVRDVIEEIIETGESSRVKEVLNDERYKAFKQFTSVFGVGVKTSEKWFRMGLRTVEELKASKSLKLSKMQKAGFLYYEDLASCVSKAEADAVTLIVKNTVSTFLPDALVTITGGFRRGKKMGHDIDFLITNPGPKEDDELLHKVVDLLKKQGLLLYCDIKESTFVEEQLPSRKIDAMDNFQKCFAILKLYQPGVDNSSYNTSKKSDMAEVKDWKAIRVDLVITPFEQYAYALLGWTGSKEFGRDLRRYASHERKMILDRHGLYDRKKRIFLKAGSEEEIFAHLGLDYVEPWERNA

SEQ ID NO: 939 - DNA, 1182 bp, synthetic construct
  misc_feature 1..1182: note = Variant of terminal deoxynucleotidyl transferase
  source 1..1182: mol_type = other DNA
atgcaccatcatcatcatcatggcggtagcggccatccgccgagcaataccccggaggggggggtgccgagcgttatcgcccgcaaggttagtcagtacagctgccagcgcaagaccacgctgaataactacaacaaaaagtttaccgacgcgttcgagatcatggccgagaactacaaatttaaagagaacgaaatcgcgtgtctggaatttaagcgcgccgcgagtctgctgaaatatctgccgttcccggttaccagcatgaaagacatccaaggtctgccgtgcattggcgaccaagttcgtgacgtgatcgaggagatcatcgaaactggcgagagcagccgtgttaaagaagttctcaatgacgagcgctacaaggcctttaagcagttcaccagcgtgttcggtgtgggcgtgaaaaccagcgaaaagtggtttcgtatgggcctccgtacggttgaagaggcaaaggccgacaagagtctgaagctgagcaagatgcagaaggcgggctttctgtattacgaggatctggccagctgcgttagtaaagcggaagccgatgccgttacgctcatcgtgaagaacacggtgcgtacctttctgccggatgcgctggtgaccatcacgggcggtttccgccgtggcaaaaagatgggccacgacatcgactttctgatcacgaatccgggcccgaaagaggatgacgagctgctccacaaagtggttgatggtctcaagaagcaaggtctgctgctgtactgcgacatcaaagagagcacgttcgtggaggaacaactgccaagtcgcaaaatcgacgccatggacaacttccagaagtgcttcgccattctcaagctgtaccagccgggcgtggataacagcagctataacacgagtaagaagagtgacatggccgaggttaaggattggaaagcggttcgtgtggatctggtgatcacgccattcgagcagtacgcctatgcgctgctcggttggacgggcagcaaagaatttggtcgcgatctgcgccgctatgcgagtcatgagcgcaagatgatcctcgaccgtcatggcctctacgaccgcaaaaagcgcatctttctgaaagcgggcagcgaagaagagattttcgcgcatctgggtctggattatgtggagccgtgggaacgcaacgcg

SEQ ID NO: 940 - protein, 394 aa, synthetic construct
  REGION 1..394: note = Variant of terminal deoxynucleotidyl transferase
MHHHHHHGGSGHPPSNTPEGGVPSVIARKVSQYSCQRKTTLNNYNKKFTDAFEIMAENYKFKENEIACLEFKRAASLLKYLPFPVTSMKDIQGLPCIGDQVRDVIEEIIETGESSRVKEVLNDERYKAFKQFTSVFGVGVKTSEKWFRMGLRTVEEAKADKSLKLSKMQKAGFLYYEDLASCVSKAEADAVTLIVKNTVRTFLPDALVTITGGFRRGKKMGHDIDFLITNPGPKEDDELLHKVVDGLKKQGLLLYCDIKESTFVEEQLPSRKIDAMDNFQKCFAILKLYQPGVDNSSYNTSKKSDMAEVKDWKAVRVDLVITPFEQYAYALLGWTGSKEFGRDLRRYASHERKMILDRHGLYDRKKRIFLKAGSEEEIFAHLGLDYVEPWERNA

SEQ ID NO: 941 - DNA, 1182 bp, synthetic construct
  misc_feature 1..1182: note = Variant of terminal deoxynucleotidyl transferase
  source 1..1182: mol_type = other DNA
atgcaccatcatcatcatcatggcggtagcggccatccgccgagcaataccccggagctggaggtgccgagcgttatcgcccgcaaggttagtcagtacagctgccagcgcaagaccacgctgaataactacaacaaaaagtttaccgacgcgttcgagatcatggccgagaactacaaatttaaagagaacgaaatcttctgtctggaatttaagcgcgccgcgagtctgctgaaatatctgccgttcccggttacccgcatgaaagacatccaaggtctgccgtgcattggcgaccaagttcgtgacgtgatcgaggagatcatcgaaactggcgagagcagccgtgttaaagaagttctcaatgacgagcgctacaaggcctttaagcagttcaccagcgtgttcggtgtgggcgtgaaaaccagcgaaaagtggtttcgtatgggcctccgtacggttgaagagctgaaggccagtaagagtctgaagctgagcaagatgcagaaggcgggctttctgtattacgaggatctggccagctgcgttagtaaagcggaagccgatgccgttacgctcatcgtgaagaacacggtgcgtacctttctgccggatgcgctggtgaccatcacgggcggtttccgccgtggcaaaaagatgggccacgacatcgactttctgatcacgaatccgggcccgaaagaggatgacgagctgctccacaaagtggttgatctgctcaagaagcaaggtctgctgctgtactgcgacatcaaagagagcacgttcgtggaggaacaactgccaagtcgcaaaatcgacgccatggacaacttccagaagtgcttcgccattctcaagctgtaccagccgggcgtggataacagcagctataacacgagtaagaagagtgacatggccgaggttaaggattggaaagcgatccgtgtggatctggtgatcacgccattcgagcagtacgcctatgcgctgctcggttggacgggcagcaaagaatttggtcgcgatctgcgccgctatgcgagtcatgagcgcaagatgatcctcgaccgtcatggcctctacgaccgcaaaaagcgcatctttctgaaagcgggcagcgaagaagagattttcgcgcatctgggtctggattatgtggagccgtgggaacgcaacgcg

SEQ ID NO: 942 - protein, 394 aa, synthetic construct
  REGION 1..394: note = Variant of terminal deoxynucleotidyl transferase
MHHHHHHGGSGHPPSNTPELEVPSVIARKVSQYSCQRKTTLNNYNKKFTDAFEIMAENYKFKENEIFCLEFKRAASLLKYLPFPVTRMKDIQGLPCIGDQVRDVIEEIIETGESSRVKEVLNDERYKAFKQFTSVFGVGVKTSEKWFRMGLRTVEELKASKSLKLSKMQKAGFLYYEDLASCVSKAEADAVTLIVKNTVRTFLPDALVTITGGFRRGKKMGHDIDFLITNPGPKEDDELLHKVVDLLKKQGLLLYCDIKESTFVEEQLPSRKIDAMDNFQKCFAILKLYQPGVDNSSYNTSKKSDMAEVKDWKAIRVDLVITPFEQYAYALLGWTGSKEFGRDLRRYASHERKMILDRHGLYDRKKRIFLKAGSEEEIFAHLGLDYVEPWERNA

SEQ ID NO: 943 - DNA, 1182 bp, synthetic construct
  misc_feature 1..1182: note = Variant of terminal deoxynucleotidyl transferase
  source 1..1182: mol_type = other DNA
atgcaccatcatcatcatcatggcggtagcggccatccgccgagcaataccccggagctggaggtgccgagcgttatcgcccgcaaggttagtcagtacagctgccagcgcaagaccacgctgaataactacaacaaaaagtttaccgacgcgttcgagatcatggccgagaactacaaatttaaagagaacgaaatcttttgtctggaatttaagcgcgccgcgagtctgctgaaatatctgccgttcccggttaccagcatgaaagacatccaaggtctgccgtgcattggcgaccaagttcgtgacgtgatcgaggagatcatcgaaactggcgagagcagccgtgttaaagaagttctcaatgacgagcgctacaaggcctttaagcagttcaccagcgtgttcggtgtgggcgtgaaaaccagcgaaaagtggtttcgtatgggcctccgtacggttgaagagctgaaggccagtaagagtctgaagctgagcaagatgcagaaggcgggctttctgtattacgaggatctggcgagctgcgttagtaaagcggaagccgatgccgttacgctcatcgtgaagaacacggtgcgtacctttctgccggatgcgctggtgaccatcacgggcggtttccgccgtggcaaaaagatgggccacgacatcgactttctgatcacgaatccgggcccgaaagaggatgacgagctgctccacaaagtggttgatctgctcaagaagcaaggtctgctgctgtactgcgacatcaaagagagcacgttcgtggaggaacaactgccaagtcgcaaaatcgacgccatggacaacttccagaagtgcttcgccattctcaagctgtaccagccgggcgtggataacagcagctataacacgagtaagaagagtgacatggccgaggttaaggattggaaagcggttcgtgtggatctggtgatcacgccattcgagcagtacgcctatgcgctgctcggttggacgggcagcaaagaatttggtcgcgatctgcgccgctatgcgagtcatgagcgcaagatgatcctcgaccgtcatggcctctacgaccgcaaaaagcgcatctttctgaaagcgggcagcgaagaagagattttcgcgcatctgggtctggattatgtggagccgtgggaacgcaacgcg

SEQ ID NO: 944 - protein, 394 aa, synthetic construct
  REGION 1..394: note = Variant of terminal deoxynucleotidyl transferase
MHHHHHHGGSGHPPSNTPELEVPSVIARKVSQYSCQRKTTLNNYNKKFTDAFEIMAENYKFKENEIFCLEFKRAASLLKYLPFPVTSMKDIQGLPCIGDQVRDVIEEIIETGESSRVKEVLNDERYKAFKQFTSVFGVGVKTSEKWFRMGLRTVEELKASKSLKLSKMQKAGFLYYEDLASCVSKAEADAVTLIVKNTVRTFLPDALVTITGGFRRGKKMGHDIDFLITNPGPKEDDELLHKVVDLLKKQGLLLYCDIKESTFVEEQLPSRKIDAMDNFQKCFAILKLYQPGVDNSSYNTSKKSDMAEVKDWKAVRVDLVITPFEQYAYALLGWTGSKEFGRDLRRYASHERKMILDRHGLYDRKKRIFLKAGSEEEIFAHLGLDYVEPWERNA

SEQ ID NO: 945 - DNA, 1182 bp, synthetic construct
  misc_feature 1..1182: note = Variant of terminal deoxynucleotidyl transferase
  source 1..1182: mol_type = other DNA
atgcaccatcatcatcatcatggcggtagcggccatccgccgagcaataccccggagctggaggtgccgagcgttatcgcccgcaaggttagtcagtacagctgccagcgcaagaccacgctgaataactacaacaaaaagtttaccgacgcgttcgagatcatggccgagaactacaaatttaaagagaacgaaatcgcgtgtctggaatttaagcgcgccgcgagtctgctgaaatatctgccgttcccggttaccagcatgaaagacatccaaggtctgccgtgcattggcgaccaagttcgtgacgtgatcgaggagatcatcgaaactggcgagagcagccgtgttaaagaagttctcaatgacgagcgctacaaggcctttaagcagttcaccagcgtgttcggtgtgggcgtgaaaaccagcgaaaagtggtttcgtatgggcctccgtacggttgaagagctgaaggccagtaagagtctgaagctgagcaagatgcagaaggcgggctttctgtattacgaggatctggccagctgcgttagtaaagcggaagccgatgccgttacgctcatcgtgaagaacacggtgagtacctttctgccggatgcgctggtgaccatcacgggcggtttccgccgtggcaaaaagatgggccacgacatcgactttctgatcacgaatccgggcccgaaagaggatgacgagctgctccacaaagtggttgatgggctcaagaagcaaggtctgctgctgtactgcgacatcaaagagagcacgttcgtggaggaacaactgccaagtcgcaaaatcgacgccatggacaacttccagaagtgcttcgccattctcaagctgtaccagccgggcgtggataacagcagctataacacgagtaagaagagtgacatggccgaggttaaggattggaaagcgattcgtgtggatctggtgatcacgccattcgagcagtacgcctatgcgctgctcggttggacgggcagcaaagaatttggtcgcgatctgcgccgctatgcgagtcatgagcgcaagatgatcctcgaccgtcatggcctctacgaccgcaaaaagcgcatctttctgaaagcgggcagcgaagaagagattttcgcgcatctgggtctggattatgtggagccgtgggaacgcaacgcg

SEQ ID NO: 946 - protein, 394 aa, synthetic construct
  REGION 1..394: note = Variant of terminal deoxynucleotidyl transferase
MHHHHHHGGSGHPPSNTPELEVPSVIARKVSQYSCQRKTTLNNYNKKFTDAFEIMAENYKFKENEIACLEFKRAASLLKYLPFPVTSMKDIQGLPCIGDQVRDVIEEIIETGESSRVKEVLNDERYKAFKQFTSVFGVGVKTSEKWFRMGLRTVEELKASKSLKLSKMQKAGFLYYEDLASCVSKAEADAVTLIVKNTVSTFLPDALVTITGGFRRGKKMGHDIDFLITNPGPKEDDELLHKVVDGLKKQGLLLYCDIKESTFVEEQLPSRKIDAMDNFQKCFAILKLYQPGVDNSSYNTSKKSDMAEVKDWKAIRVDLVITPFEQYAYALLGWTGSKEFGRDLRRYASHERKMILDRHGLYDRKKRIFLKAGSEEEIFAHLGLDYVEPWERNA

SEQ ID NO: 947 - DNA, 1182 bp, synthetic construct
  misc_feature 1..1182: note = Variant of terminal deoxynucleotidyl transferase
  source 1..1182: mol_type = other DNA
atgcaccatcatcatcatcatggcggtagcggccatccgccgagcaataccccggagggggaggtgccgagcgttatcgcccgcaaggttagtcagtacagctgccagcgcaagaccacgctgaataactacaacaaaaagtttaccgacgcgttcgagatcatggccgagaactacaaatttaaagagaacgaaatcttttgtctggaatttaagcgcgccgcgagtctgctgaaatatctgccgttcccggttaccagcatgaaagacatccaaggtctgccgtgcattggcgaccaagttcgtgacgtgatcgaggagatcatcgaagaaggcgagagcagccgtgttaaagaagttctcaatgacgagcgctacaaggcctttaagcagttcaccagcgtgttcggtgtgggcgtgaaaaccagcgaaaagtggtttcgtatgggcctccgtacggttgaagagctgaaggccgacaagagtctgaagctgagcaagatgcagaaggcgggctttctgtattacgaggatctggcgagctgcgttagtaaagcggaagccgatgccgttacgctcatcgtgaagaacacggtgcgtacctttctgccggatgcgctggtgaccatcacgggcggtttccgccgtggcaaaaagatgggccacgacatcgactttctgatcacgaatccgggcccgaaagaggatgacgagctgctccacaaagtggttgatgggctcaagaagcaaggtctgctgctgtactgcgacatcaaagagagcacgttcgtggaggaacaactgccaagtcgcaaaatcgacgccatggacaacttccagaagtgcttcgccattctcaagctgtaccagccgggcgtggataacagcagctataacacgagtaagaagagtgacatggccgaggttaaggattggaaagcggttcgtgtggatctggtgatcacgccattcgagcagtacgcctatgcgctgctcggttggacgggcagcaaagaatttggtcgcgatctgcgccgctatgcgagtcatgagcgcaagatgatcctcgaccgtcatggcctctacgaccgcaaaaagcgcatctttctgaaagcgggcagcgaagaagagattttcgcgcatctgggtctggattatgtggagccgtgggaacgcaacgcg

SEQ ID NO: 948 - protein, 394 aa, synthetic construct
  REGION 1..394: note = Variant of terminal deoxynucleotidyl transferase
MHHHHHHGGSGHPPSNTPEGEVPSVIARKVSQYSCQRKTTLNNYNKKFTDAFEIMAENYKFKENEIFCLEFKRAASLLKYLPFPVTSMKDIQGLPCIGDQVRDVIEEIIEEGESSRVKEVLNDERYKAFKQFTSVFGVGVKTSEKWFRMGLRTVEELKADKSLKLSKMQKAGFLYYEDLASCVSKAEADAVTLIVKNTVRTFLPDALVTITGGFRRGKKMGHDIDFLITNPGPKEDDELLHKVVDGLKKQGLLLYCDIKESTFVEEQLPSRKIDAMDNFQKCFAILKLYQPGVDNSSYNTSKKSDMAEVKDWKAVRVDLVITPFEQYAYALLGWTGSKEFGRDLRRYASHERKMILDRHGLYDRKKRIFLKAGSEEEIFAHLGLDYVEPWERNA

SEQ ID NO: 949 - DNA, 1182 bp, synthetic construct
  misc_feature 1..1182: note = Variant of terminal deoxynucleotidyl transferase
  source 1..1182: mol_type = other DNA
atgcaccatcatcatcatcatggcggtagcggccatccgccgagcaataccccggaggggggggtgccgagcgttatcgcccgcaaggttagtcagtacagctgccagcgcaagaccacgctgaataactacaacaaaaagtttaccgacgcgttcgagatcatggccgagaactacaaatttaaagagaacgaaatcgcgtgtctggaatttaagcgcgccgcgagtctgctgaaatatctgccgttcccggttacccgcatgaaagacatccaaggtctgccgtgcattggcgaccaagttcgtgacgtgatcgaggagatcatcgaagagggcgagagcagccgtgttaaagaagttctcaatgacgagcgctacaaggcctttaagcagttcaccagcgtgttcggtgtgggcgtgaaaaccagcgaaaagtggtttcgtatgggcctccgtacggttgaagagctgaaggccagtaagagtctgaagctgagcaagatgcagaaggcgggctttctgtattacgaggatctggtgagctgcgttagtaaagcggaagccgatgccgttacgctcatcgtgaagaacacggtgagtacctttctgccggatgcgctggtgaccatcacgggcggtttccgccgtggcaaaaagatgggccacgacatcgactttctgatcacgaatccgggcccgaaagaggatgacgagctgctccacaaagtggttgatggtctcaagaagcaaggtctgctgctgtactgcgacatcaaagagagcacgttcgtggaggaacaactgccaagtcgcaaaatcgacgccatggacaacttccagaagtgcttcgccattctcaagctgtaccagccgggcgtggataacagcagctataacacgagtaagaagagtgacatggccgaggttaaggattggaaagcgattcgtgtggatctggtgatcacgccattcgagcagtacgcctatgcgctgctcggttggacgggcagcaaagaatttggtcgcgatctgcgccgctatgcgagtcatgagcgcaagatgatcctcgaccgtcatggcctctacgaccgcaaaaagcgcatctttctgaaagcgggcagcgaagaagagattttcgcgcatctgggtctggattatgtggagccgtgggaacgcaacgcg

SEQ ID NO: 950 - protein, 394 aa, synthetic construct
  REGION 1..394: note = Variant of terminal deoxynucleotidyl transferase
MHHHHHHGGSGHPPSNTPEGGVPSVIARKVSQYSCQRKTTLNNYNKKFTDAFEIMAENYKFKENEIACLEFKRAASLLKYLPFPVTRMKDIQGLPCIGDQVRDVIEEIIEEGESSRVKEVLNDERYKAFKQFTSVFGVGVKTSEKWFRMGLRTVEELKASKSLKLSKMQKAGFLYYEDLVSCVSKAEADAVTLIVKNTVSTFLPDALVTITGGFRRGKKMGHDIDFLITNPGPKEDDELLHKVVDGLKKQGLLLYCDIKESTFVEEQLPSRKIDAMDNFQKCFAILKLYQPGVDNSSYNTSKKSDMAEVKDWKAIRVDLVITPFEQYAYALLGWTGSKEFGRDLRRYASHERKMILDRHGLYDRKKRIFLKAGSEEEIFAHLGLDYVEPWERNA

SEQ ID NO: 951 - DNA, 1182 bp, synthetic construct
  misc_feature 1..1182: note = Variant of terminal deoxynucleotidyl transferase
  source 1..1182: mol_type = other DNA
atgcaccatcatcatcatcatggcggtagcggccatccgccgagcaataccccggagggggaggtgccgagcgttatcgcccgcaaggttagtcagtacagctgccagcgcaagaccacgctgaataactacaacaaaaagtttaccgacgcgttcgagatcatggccgagaactacaaatttaaagagaacgaaatcttttgtctggaatttaagcgcgccgcgagtctgctgaaatatctgccgttcccggttaccagcatgaaagacatccaaggtctgccgtgcattggcgaccaagttcgtgacgtgatcgaggagatcatcgaagagggcgagagcagccgtgttaaagaagttctcaatgacgagcgctacaaggcctttaagcagttcaccagcgtgttcggtgtgggcgtgaaaaccagcgaaaagtggtttcgtatgggcctccgtacggttgaagaggcaaaggccgacaagagtctgaagctgagcaagatgcagaaggcgggctttctgtattacgaggatctggcgagctgcgttagtaaagcggaagccgatgccgttacgctcatcgtgaagaacacggtgcgtacctttctgccggatgcgctggtgaccatcacgggcggtttccgccgtggcaaaaagatgggccacgacatcgactttctgatcacgaatccgggcccgaaagaggatgacgagctgctccacaaagtggttgatgggctcaagaagcaaggtctgctgctgtactgcgacatcaaagagagcacgttcgtggaggaacaactgccaagtcgcaaaatcgacgccatggacaacttccagaagtgcttcgccattctcaagctgtaccagccgggcgtggataacagcagctataacacgagtaagaagagtgacatggccgaggttaaggattggaaagcgattcgtgtggatctggtgatcacgccattcgagcagtacgcctatgcgctgctcggttggacgggcagcaaagaatttggtcgcgatctgcgccgctatgcgagtcatgagcgcaagatgatcctcgaccgtcatggcctctacgaccgcaaaaagcgcatctttctgaaagcgggcagcgaagaagagattttcgcgcatctgggtctggattatgtggagccgtgggaacgcaacgcg

SEQ ID NO: 952 - protein, 394 aa, synthetic construct
  REGION 1..394: note = Variant of terminal deoxynucleotidyl transferase
MHHHHHHGGSGHPPSNTPEGEVPSVIARKVSQYSCQRKTTLNNYNKKFTDAFEIMAENYKFKENEIFCLEFKRAASLLKYLPFPVTSMKDIQGLPCIGDQVRDVIEEIIEEGESSRVKEVLNDERYKAFKQFTSVFGVGVKTSEKWFRMGLRTVEEAKADKSLKLSKMQKAGFLYYEDLASCVSKAEADAVTLIVKNTVRTFLPDALVTITGGFRRGKKMGHDIDFLITNPGPKEDDELLHKVVDGLKKQGLLLYCDIKESTFVEEQLPSRKIDAMDNFQKCFAILKLYQPGVDNSSYNTSKKSDMAEVKDWKAIRVDLVITPFEQYAYALLGWTGSKEFGRDLRRYASHERKMILDRHGLYDRKKRIFLKAGSEEEIFAHLGLDYVEPWERNA

SEQ ID NO: 953 - DNA, 1182 bp, synthetic construct
  misc_feature 1..1182: note = Variant of terminal deoxynucleotidyl transferase
  source 1..1182: mol_type = other DNA
atgcaccatcatcatcatcatggcggtagcggccatccgccgagcaataccccggagggtggggtgccgagcgttatcgcccgcaaggttagtcagtacagctgccagcgcaagaccacgctgaataactacaacaaaaagtttaccgacgcgttcgagatcatggccgagaactacaaatttaaagagaacgaaatcttctgtctggaatttaagcgcgccgcgagtctgctgaaatatctgccgttcccggttacccgcatgaaagacatccaaggtctgccgtgcattggcgaccaagttcgtgacgtgatcgaggagatcatcgaagagggcgagagcagccgtgttaaagaagttctcaatgacgagcgctacaaggcctttaagcagttcaccagcgtgttcggtgtgggcgtgaaaaccagcgaaaagtggtttcgtatgggcctccgtacggttgaagagctgaaggccagtaagagtctgaagctgagcaagatgcagaaggcgggctttctgtattacgaggatctggccagctgcgttagtaaagcggaagccgatgccgttacgctcatcgtgaagaacacggtgcgtacctttctgccggatgcgctggtgaccatcacgggcggtttccgccgtggcaaaaagatgggccacgacatcgactttctgatcacgaatccgggcccgaaagaggatgacgagctgctccacaaagtggttgatctgctcaagaagcaaggtctgctgctgtactgcgacatcaaagagagcacgttcgtggaggaacaactgccaagtcgcaaaatcgacgccatggacaacttccagaagtgcttcgccattctcaagctgtaccagccgggcgtggataacagcagctataacacgagtaagaagagtgacatggccgaggttaaggattggaaagcgatccgtgtggatctggtgatcacgccattcgagcagtacgcctatgcgctgctcggttggacgggcagcaaagaatttggtcgcgatctgcgccgctatgcgagtcatgagcgcaagatgatcctcgaccgtcatggcctctacgaccgcaaaaagcgcatctttctgaaagcgggcagcgaagaagagattttcgcgcatctgggtctggattatgtggagccgtgggaacgcaacgcg

SEQ ID NO: 954 - protein, 394 aa, synthetic construct
  REGION 1..394: note = Variant of terminal deoxynucleotidyl transferase
MHHHHHHGGSGHPPSNTPEGGVPSVIARKVSQYSCQRKTTLNNYNKKFTDAFEIMAENYKFKENEIFCLEFKRAASLLKYLPFPVTRMKDIQGLPCIGDQVRDVIEEIIEEGESSRVKEVLNDERYKAFKQFTSVFGVGVKTSEKWFRMGLRTVEELKASKSLKLSKMQKAGFLYYEDLASCVSKAEADAVTLIVKNTVRTFLPDALVTITGGFRRGKKMGHDIDFLITNPGPKEDDELLHKVVDLLKKQGLLLYCDIKESTFVEEQLPSRKIDAMDNFQKCFAILKLYQPGVDNSSYNTSKKSDMAEVKDWKAIRVDLVITPFEQYAYALLGWTGSKEFGRDLRRYASHERKMILDRHGLYDRKKRIFLKAGSEEEIFAHLGLDYVEPWERNA

SEQ ID NO: 955 - DNA, 1182 bp, synthetic construct
  misc_feature 1..1182: note = Variant of terminal deoxynucleotidyl transferase
  source 1..1182: mol_type = other DNA
atgcaccatcatcatcatcatggcggtagcggccatccgccgagcaataccccggagctgggggtgccgagcgttatcgcccgcaaggttagtcagtacagctgccagcgcaagaccacgctgaataactacaacaaaaagtttaccgacgcgttcgagatcatggccgagaactacaaatttaaagagaacgaaatcttctgtctggaatttaagcgcgccgcgagtctgctgaaatatctgccgttcccggttaccagcatgaaagacatccaaggtctgccgtgcattggcgaccaagttcgtgacgtgatcgaggagatcatcgaaactggcgagagcagccgtgttaaagaagttctcaatgacgagcgctacaaggcctttaagcagttcaccagcgtgttcggtgtgggcgtgaaaaccagcgaaaagtggtttcgtatgggcctccgtacggttgaagagctgaaggccagtaagagtctgaagctgagcaagatgcagaaggcgggctttctgtattacgaggatctggtgagctgcgttagtaaagcggaagccgatgccgttacgctcatcgtgaagaacacggtgcgtacctttctgccggatgcgctggtgaccatcacgggcggtttccgccgtggcaaaaagatgggccacgacatcgactttctgatcacgaatccgggcccgaaagaggatgacgagctgctccacaaagtggttgatggtctcaagaagcaaggtctgctgctgtactgcgacatcaaagagagcacgttcgtggaggaacaactgccaagtcgcaaaatcgacgccatggacaacttccagaagtgcttcgccattctcaagctgtaccagccgggcgtggataacagcagctataacacgagtaagaagagtgacatggccgaggttaaggattggaaagcgattcgtgtggatctggtgatcacgccattcgagcagtacgcctatgcgctgctcggttggacgggcagcaaagaatttggtcgcgatctgcgccgctatgcgagtcatgagcgcaagatgatcctcgaccgtcatggcctctacgaccgcaaaaagcgcatctttctgaaagcgggcagcgaagaagagattttcgcgcatctgggtctggattatgtggagccgtgggaacgcaacgcg

SEQ ID NO: 956 - protein, 394 aa, synthetic construct
  REGION 1..394: note = Variant of terminal deoxynucleotidyl transferase
MHHHHHHGGSGHPPSNTPELGVPSVIARKVSQYSCQRKTTLNNYNKKFTDAFEIMAENYKFKENEIFCLEFKRAASLLKYLPFPVTSMKDIQGLPCIGDQVRDVIEEIIETGESSRVKEVLNDERYKAFKQFTSVFGVGVKTSEKWFRMGLRTVEELKASKSLKLSKMQKAGFLYYEDLVSCVSKAEADAVTLIVKNTVRTFLPDALVTITGGFRRGKKMGHDIDFLITNPGPKEDDELLHKVVDGLKKQGLLLYCDIKESTFVEEQLPSRKIDAMDNFQKCFAILKLYQPGVDNSSYNTSKKSDMAEVKDWKAIRVDLVITPFEQYAYALLGWTGSKEFGRDLRRYASHERKMILDRHGLYDRKKRIFLKAGSEEEIFAHLGLDYVEPWERNA

SEQ ID NO: 957 - DNA, 1182 bp, synthetic construct
  misc_feature 1..1182: note = Variant of terminal deoxynucleotidyl transferase
  source 1..1182: mol_type = other DNA
atgcaccatcatcatcatcatggcggtagcggccatccgccgagcaataccccggagggtggggtgccgagcgttatcgcccgcaaggttagtcagtacagctgccagcgcaagaccacgctgaataactacaacaaaaagtttaccgacgcgttcgagatcatggccgagaactacaaatttaaagagaacgaaatcttttgtctggaatttaagcgcgccgcgagtctgctgaaatatctgccgttcccggttacccgcatgaaagacatccaaggtctgccgtgcattggcgaccaagttcgtgacgtgatcgaggagatcatcgaagaaggcgagagcagccgtgttaaagaagttctcaatgacgagcgctacaaggcctttaagcagttcaccagcgtgttcggtgtgggcgtgaaaaccagcgaaaagtggtttcgtatgggcctccgtacggttgaagaggcaaaggccagtaagagtctgaagctgagcaagatgcagaaggcgggctttctgtattacgaggatctggcgagctgcgttagtaaagcggaagccgatgccgttacgctcatcgtgaagaacacggtgcgtacctttctgccggatgcgctggtgaccatcacgggcggtttccgccgtggcaaaaagatgggccacgacatcgactttctgatcacgaatccgggcccgaaagaggatgacgagctgctccacaaagtggttgatgggctcaagaagcaaggtctgctgctgtactgcgacatcaaagagagcacgttcgtggaggaacaactgccaagtcgcaaaatcgacgccatggacaacttccagaagtgcttcgccattctcaagctgtaccagccgggcgtggataacagcagctataacacgagtaagaagagtgacatggccgaggttaaggattggaaagcgatccgtgtggatctggtgatcacgccattcgagcagtacgcctatgcgctgctcggttggacgggcagcaaagaatttggtcgcgatctgcgccgctatgcgagtcatgagcgcaagatgatcctcgaccgtcatggcctctacgaccgcaaaaagcgcatctttctgaaagcgggcagcgaagaagagattttcgcgcatctgggtctggattatgtggagccgtgggaacgcaacgcg

SEQ ID NO: 958 - protein, 394 aa, synthetic construct
  REGION 1..394: note = Variant of terminal deoxynucleotidyl transferase
MHHHHHHGGSGHPPSNTPEGGVPSVIARKVSQYSCQRKTTLNNYNKKFTDAFEIMAENYKFKENEIFCLEFKRAASLLKYLPFPVTRMKDIQGLPCIGDQVRDVIEEIIEEGESSRVKEVLNDERYKAFKQFTSVFGVGVKTSEKWFRMGLRTVEEAKASKSLKLSKMQKAGFLYYEDLASCVSKAEADAVTLIVKNTVRTFLPDALVTITGGFRRGKKMGHDIDFLITNPGPKEDDELLHKVVDGLKKQGLLLYCDIKESTFVEEQLPSRKIDAMDNFQKCFAILKLYQPGVDNSSYNTSKKSDMAEVKDWKAIRVDLVITPFEQYAYALLGWTGSKEFGRDLRRYASHERKMILDRHGLYDRKKRIFLKAGSEEEIFAHLGLDYVEPWERNA

SEQ ID NO: 959 - DNA, 1182 bp, synthetic construct
  misc_feature 1..1182: note = Variant of terminal deoxynucleotidyl transferase
  source 1..1182: mol_type = other DNA
atgcaccatcatcatcatcatggcggtagcggccatccgccgagcaataccccggaggggggggtgccgagcgttatcgcccgcaaggttagtcagtacagctgccagcgcaagaccacgctgaataactacaacaaaaagtttaccgacgcgttcgagatcatggccgagaactacaaatttaaagagaacgaaatcttttgtctggaatttaagcgcgccgcgagtctgctgaaatatctgccgttcccggttaccagcatgaaagacatccaaggtctgccgtgcattggcgaccaagttcgtgacgtgatcgaggagatcatcgaagaaggcgagagcagccgtgttaaagaagttctcaatgacgagcgctacaaggcctttaagcagttcaccagcgtgttcggtgtgggcgtgaaaaccagcgaaaagtggtttcgtatgggcctccgtacggttgaagaggcaaaggccagtaagagtctgaagctgagcaagatgcagaaggcgggctttctgtattacgaggatctggtgagctgcgttagtaaagcggaagccgatgccgttacgctcatcgtgaagaacacggtgagtacctttctgccggatgcgctggtgaccatcacgggcggtttccgccgtggcaaaaagatgggccacgacatcgactttctgatcacgaatccgggcccgaaagaggatgacgagctgctccacaaagtggttgatggtctcaagaagcaaggtctgctgctgtactgcgacatcaaagagagcacgttcgtggaggaacaactgccaagtcgcaaaatcgacgccatggacaacttccagaagtgcttcgccattctcaagctgtaccagccgggcgtggataacagcagctataacacgagtaagaagagtgacatggccgaggttaaggattggaaagcgattcgtgtggatctggtgatcacgccattcgagcagtacgcctatgcgctgctcggttggacgggcagcaaagaatttggtcgcgatctgcgccgctatgcgagtcatgagcgcaagatgatcctcgaccgtcatggcctctacgaccgcaaaaagcgcatctttctgaaagcgggcagcgaagaagagattttcgcgcatctgggtctggattatgtggagccgtgggaacgcaacgcg

SEQ ID NO: 960 - protein, 394 aa, synthetic construct
  REGION 1..394: note = Variant of terminal deoxynucleotidyl transferase
MHHHHHHGGSGHPPSNTPEGGVPSVIARKVSQYSCQRKTTLNNYNKKFTDAFEIMAENYKFKENEIFCLEFKRAASLLKYLPFPVTSMKDIQGLPCIGDQVRDVIEEIIEEGESSRVKEVLNDERYKAFKQFTSVFGVGVKTSEKWFRMGLRTVEEAKASKSLKLSKMQKAGFLYYEDLVSCVSKAEADAVTLIVKNTVSTFLPDALVTITGGFRRGKKMGHDIDFLITNPGPKEDDELLHKVVDGLKKQGLLLYCDIKESTFVEEQLPSRKIDAMDNFQKCFAILKLYQPGVDNSSYNTSKKSDMAEVKDWKAIRVDLVITPFEQYAYALLGWTGSKEFGRDLRRYASHERKMILDRHGLYDRKKRIFLKAGSEEEIFAHLGLDYVEPWERNA

SEQ ID NO: 961 - DNA, 1182 bp, synthetic construct
  misc_feature 1..1182: note = Variant of terminal deoxynucleotidyl transferase
  source 1..1182: mol_type = other DNA
atgcaccatcatcatcatcatggcggtagcggccatccgccgagcaataccccggagggggaggtgccgagcgttatcgcccgcaaggttagtcagtacagctgccagcgcaagaccacgctgaataactacaacaaaaagtttaccgacgcgttcgagatcatggccgagaactacaaatttaaagagaacgaaatcttttgtctggaatttaagcgcgccgcgagtctgctgaaatatctgccgttcccggttacccgcatgaaagacatccaaggtctgccgtgcattggcgaccaagttcgtgacgtgatcgaggagatcatcgaaactggcgagagcagccgtgttaaagaagttctcaatgacgagcgctacaaggcctttaagcagttcaccagcgtgttcggtgtgggcgtgaaaaccagcgaaaagtggtttcgtatgggcctccgtacggttgaagagctgaaggccagtaagagtctgaagctgagcaagatgcagaaggcgggctttctgtattacgaggatctggccagctgcgttagtaaagcggaagccgatgccgttacgctcatcgtgaagaacacggtgcgtacctttctgccggatgcgctggtgaccatcacgggcggtttccgccgtggcaaaaagatgggccacgacatcgactttctgatcacgaatccgggcccgaaagaggatgacgagctgctccacaaagtggttgatgggctcaagaagcaaggtctgctgctgtactgcgacatcaaagagagcacgttcgtggaggaacaactgccaagtcgcaaaatcgacgccatggacaacttccagaagtgcttcgccattctcaagctgtaccagccgggcgtggataacagcagctataacacgagtaagaagagtgacatggccgaggttaaggattggaaagcgatccgtgtggatctggtgatcacgccattcgagcagtacgcctatgcgctgctcggttggacgggcagcaaagaatttggtcgcgatctgcgccgctatgcgagtcatgagcgcaagatgatcctcgaccgtcatggcctctacgaccgcaaaaagcgcatctttctgaaagcgggcagcgaagaagagattttcgcgcatctgggtctggattatgtggagccgtgggaacgcaacgcg

SEQ ID NO: 962 - protein, 394 aa, synthetic construct
  REGION 1..394: note = Variant of terminal deoxynucleotidyl transferase
MHHHHHHGGSGHPPSNTPEGEVPSVIARKVSQYSCQRKTTLNNYNKKFTDAFEIMAENYKFKENEIFCLEFKRAASLLKYLPFPVTRMKDIQGLPCIGDQVRDVIEEIIETGESSRVKEVLNDERYKAFKQFTSVFGVGVKTSEKWFRMGLRTVEELKASKSLKLSKMQKAGFLYYEDLASCVSKAEADAVTLIVKNTVRTFLPDALVTITGGFRRGKKMGHDIDFLITNPGPKEDDELLHKVVDGLKKQGLLLYCDIKESTFVEEQLPSRKIDAMDNFQKCFAILKLYQPGVDNSSYNTSKKSDMAEVKDWKAIRVDLVITPFEQYAYALLGWTGSKEFGRDLRRYASHERKMILDRHGLYDRKKRIFLKAGSEEEIFAHLGLDYVEPWERNA

SEQ ID NO: 963 - DNA, 1182 bp, synthetic construct
  misc_feature 1..1182: note = Variant of terminal deoxynucleotidyl transferase
  source 1..1182: mol_type = other DNA
atgcaccatcatcatcatcatggcggtagcggccatccgccgagcaataccccggagggtggggtgccgagcgttatcgcccgcaaggttagtcagtacagctgccagcgcaagaccacgctgaataactacaacaaaaagtttaccgacgcgttcgagatcatggccgagaactacaaatttaaagagaacgaaatcgcgtgtctggaatttaagcgcgccgcgagtctgctgaaatatctgccgttcccggttacccgcatgaaagacatccaaggtctgccgtgcattggcgaccaagttcgtgacgtgatcgaggagatcatcgaagagggcgagagcagccgtgttaaagaagttctcaatgacgagcgctacaaggcctttaagcagttcaccagcgtgttcggtgtgggcgtgaaaaccagcgaaaagtggtttcgtatgggcctccgtacggttgaagaggcaaaggccgacaagagtctgaagctgagcaagatgcagaaggcgggctttctgtattacgaggatctggcgagctgcgttagtaaagcggaagccgatgccgttacgctcatcgtgaagaacacggtgcgtacctttctgccggatgcgctggtgaccatcacgggcggtttccgccgtggcaaaaagatgggccacgacatcgactttctgatcacgaatccgggcccgaaagaggatgacgagctgctccacaaagtggttgatgggctcaagaagcaaggtctgctgctgtactgcgacatcaaagagagcacgttcgtggaggaacaactgccaagtcgcaaaatcgacgccatggacaacttccagaagtgcttcgccattctcaagctgtaccagccgggcgtggataacagcagctataacacgagtaagaagagtgacatggccgaggttaaggattggaaagcggttcgtgtggatctggtgatcacgccattcgagcagtacgcctatgcgctgctcggttggacgggcagcaaagaatttggtcgcgatctgcgccgctatgcgagtcatgagcgcaagatgatcctcgaccgtcatggcctctacgaccgcaaaaagcgcatctttctgaaagcgggcagcgaagaagagattttcgcgcatctgggtctggattatgtggagccgtgggaacgcaacgcg

SEQ ID NO: 964 - protein, 394 aa, synthetic construct
  REGION 1..394: note = Variant of terminal deoxynucleotidyl transferase
MHHHHHHGGSGHPPSNTPEGGVPSVIARKVSQYSCQRKTTLNNYNKKFTDAFEIMAENYKFKENEIACLEFKRAASLLKYLPFPVTRMKDIQGLPCIGDQVRDVIEEIIEEGESSRVKEVLNDERYKAFKQFTSVFGVGVKTSEKWFRMGLRTVEEAKADKSLKLSKMQKAGFLYYEDLASCVSKAEADAVTLIVKNTVRTFLPDALVTITGGFRRGKKMGHDIDFLITNPGPKEDDELLHKVVDGLKKQGLLLYCDIKESTFVEEQLPSRKIDAMDNFQKCFAILKLYQPGVDNSSYNTSKKSDMAEVKDWKAVRVDLVITPFEQYAYALLGWTGSKEFGRDLRRYASHERKMILDRHGLYDRKKRIFLKAGSEEEIFAHLGLDYVEPWERNA

SEQ ID NO: 965 - DNA, 1182 bp, synthetic construct
  misc_feature 1..1182: note = Variant of terminal deoxynucleotidyl transferase
  source 1..1182: mol_type = other DNA
atgcaccatcatcatcatcatggcggtagcggccatccgccgagcaataccccggagctgggggtgccgagcgttatcgcccgcaaggttagtcagtacagctgccagcgcaagaccacgctgaataactacaacaaaaagtttaccgacgcgttcgagatcatggccgagaactacaaatttaaagagaacgaaatcttttgtctggaatttaagcgcgccgcgagtctgctgaaatatctgccgttcccggttacccgcatgaaagacatccaaggtctgccgtgcattggcgaccaagttcgtgacgtgatcgaggagatcatcgaagagggcgagagcagccgtgttaaagaagttctcaatgacgagcgctacaaggcctttaagcagttcaccagcgtgttcggtgtgggcgtgaaaaccagcgaaaagtggtttcgtatgggcctccgtacggttgaagagctgaaggccagtaagagtctgaagctgagcaagatgcagaaggcgggctttctgtattacgaggatctggcgagctgcgttagtaaagcggaagccgatgccgttacgctcatcgtgaagaacacggtgagtacctttctgccggatgcgctggtgaccatcacgggcggtttccgccgtggcaaaaagatgggccacgacatcgactttctgatcacgaatccgggcccgaaagaggatgacgagctgctccacaaagtggttgatgggctcaagaagcaaggtctgctgctgtactgcgacatcaaagagagcacgttcgtggaggaacaactgccaagtcgcaaaatcgacgccatggacaacttccagaagtgcttcgccattctcaagctgtaccagccgggcgtggataacagcagctataacacgagtaagaagagtgacatggccgaggttaaggattggaaagcgatccgtgtggatctggtgatcacgccattcgagcagtacgcctatgcgctgctcggttggacgggcagcaaagaatttggtcgcgatctgcgccgctatgcgagtcatgagcgcaagatgatcctcgaccgtcatggcctctacgaccgcaaaaagcgcatctttctgaaagcgggcagcgaagaagagattttcgcgcatctgggtctggattatgtggagccgtgggaacgcaacgcg

SEQ ID NO: 966 - protein, 394 aa, synthetic construct
  REGION 1..394: note = Variant of terminal deoxynucleotidyl transferase
MHHHHHHGGSGHPPSNTPELGVPSVIARKVSQYSCQRKTTLNNYNKKFTDAFEIMAENYKFKENEIFCLEFKRAASLLKYLPFPVTRMKDIQGLPCIGDQVRDVIEEIIEEGESSRVKEVLNDERYKAFKQFTSVFGVGVKTSEKWFRMGLRTVEELKASKSLKLSKMQKAGFLYYEDLASCVSKAEADAVTLIVKNTVSTFLPDALVTITGGFRRGKKMGHDIDFLITNPGPKEDDELLHKVVDGLKKQGLLLYCDIKESTFVEEQLPSRKIDAMDNFQKCFAILKLYQPGVDNSSYNTSKKSDMAEVKDWKAIRVDLVITPFEQYAYALLGWTGSKEFGRDLRRYASHERKMILDRHGLYDRKKRIFLKAGSEEEIFAHLGLDYVEPWERNA

SEQ ID NO: 967 - DNA, 1182 bp, synthetic construct
  misc_feature 1..1182: note = Variant of terminal deoxynucleotidyl transferase
  source 1..1182: mol_type = other DNA
atgcaccatcatcatcatcatggcggtagcggccatccgccgagcaataccccggagggtggggtgccgagcgttatcgcccgcaaggttagtcagtacagctgccagcgcaagaccacgctgaataactacaacaaaaagtttaccgacgcgttcgagatcatggccgagaactacaaatttaaagagaacgaaatcttctgtctggaatttaagcgcgccgcgagtctgctgaaatatctgccgttcccggttacccgcatgaaagacatccaaggtctgccgtgcattggcgaccaagttcgtgacgtgatcgaggagatcatcgaaactggcgagagcagccgtgttaaagaagttctcaatgacgagcgctacaaggcctttaagcagttcaccagcgtgttcggtgtgggcgtgaaaaccagcgaaaagtggtttcgtatgggcctccgtacggttgaagaggcaaaggccagtaagagtctgaagctgagcaagatgcagaaggcgggctttctgtattacgaggatctggtgagctgcgttagtaaagcggaagccgatgccgttacgctcatcgtgaagaacacggtgagtacctttctgccggatgcgctggtgaccatcacgggcggtttccgccgtggcaaaaagatgggccacgacatcgactttctgatcacgaatccgggcccgaaagaggatgacgagctgctccacaaagtggttgatggtctcaagaagcaaggtctgctgctgtactgcgacatcaaagagagcacgttcgtggaggaacaactgccaagtcgcaaaatcgacgccatggacaacttccagaagtgcttcgccattctcaagctgtaccagccgggcgtggataacagcagctataacacgagtaagaagagtgacatggccgaggttaaggattggaaagcggttcgtgtggatctggtgatcacgccattcgagcagtacgcctatgcgctgctcggttggacgggcagcaaagaatttggtcgcgatctgcgccgctatgcgagtcatgagcgcaagatgatcctcgaccgtcatggcctctacgaccgcaaaaagcgcatctttctgaaagcgggcagcgaagaagagattttcgcgcatctgggtctggattatgtggagccgtgggaacgcaacgcg

SEQ ID NO: 968 - protein, 394 aa, synthetic construct
  REGION 1..394: note = Variant of terminal deoxynucleotidyl transferase
MHHHHHHGGSGHPPSNTPEGGVPSVIARKVSQYSCQRKTTLNNYNKKFTDAFEIMAENYKFKENEIFCLEFKRAASLLKYLPFPVTRMKDIQGLPCIGDQVRDVIEEIIETGESSRVKEVLNDERYKAFKQFTSVFGVGVKTSEKWFRMGLRTVEEAKASKSLKLSKMQKAGFLYYEDLVSCVSKAEADAVTLIVKNTVSTFLPDALVTITGGFRRGKKMGHDIDFLITNPGPKEDDELLHKVVDGLKKQGLLLYCDIKESTFVEEQLPSRKIDAMDNFQKCFAILKLYQPGVDNSSYNTSKKSDMAEVKDWKAVRVDLVITPFEQYAYALLGWTGSKEFGRDLRRYASHERKMILDRHGLYDRKKRIFLKAGSEEEIFAHLGLDYVEPWERNA

SEQ ID NO: 969 - DNA, 1182 bp, synthetic construct
  misc_feature 1..1182: note = Variant of terminal deoxynucleotidyl transferase
  source 1..1182: mol_type = other DNA
atgcaccatcatcatcatcatggcggtagcggccatccgccgagcaataccccggagggggaggtgccgagcgttatcgcccgcaaggttagtcagtacagctgccagcgcaagaccacgctgaataactacaacaaaaagtttaccgacgcgttcgagatcatggccgagaactacaaatttaaagagaacgaaatcttctgtctggaatttaagcgcgccgcgagtctgctgaaatatctgccgttcccggttacccgcatgaaagacatccaaggtctgccgtgcattggcgaccaagttcgtgacgtgatcgaggagatcatcgaagagggcgagagcagccgtgttaaagaagttctcaatgacgagcgctacaaggcctttaagcagttcaccagcgtgttcggtgtgggcgtgaaaaccagcgaaaagtggtttcgtatgggcctccgtacggttgaagagctgaaggccagtaagagtctgaagctgagcaagatgcagaaggcgggctttctgtattacgaggatctggccagctgcgttagtaaagcggaagccgatgccgttacgctcatcgtgaagaacacggtgagtacctttctgccggatgcgctggtgaccatcacgggcggtttccgccgtggcaaaaagatgggccacgacatcgactttctgatcacgaatccgggcccgaaagaggatgacgagctgctccacaaagtggttgatgggctcaagaagcaaggtctgctgctgtactgcgacatcaaagagagcacgttcgtggaggaacaactgccaagtcgcaaaatcgacgccatggacaacttccagaagtgcttcgccattctcaagctgtaccagccgggcgtggataacagcagctataacacgagtaagaagagtgacatggccgaggttaaggattggaaagcggttcgtgtggatctggtgatcacgccattcgagcagtacgcctatgcgctgctcggttggacgggcagcaaagaatttggtcgcgatctgcgccgctatgcgagtcatgagcgcaagatgatcctcgaccgtcatggcctctacgaccgcaaaaagcgcatctttctgaaagcgggcagcgaagaagagattttcgcgcatctgggtctggattatgtggagccgtgggaacgcaacgcg

SEQ ID NO: 970 - protein, 394 aa, synthetic construct
  REGION 1..394: note = Variant of terminal deoxynucleotidyl transferase
MHHHHHHGGSGHPPSNTPEGEVPSVIARKVSQYSCQRKTTLNNYNKKFTDAFEIMAENYKFKENEIFCLEFKRAASLLKYLPFPVTRMKDIQGLPCIGDQVRDVIEEIIEEGESSRVKEVLNDERYKAFKQFTSVFGVGVKTSEKWFRMGLRTVEELKASKSLKLSKMQKAGFLYYEDLASCVSKAEADAVTLIVKNTVSTFLPDALVTITGGFRRGKKMGHDIDFLITNPGPKEDDELLHKVVDGLKKQGLLLYCDIKESTFVEEQLPSRKIDAMDNFQKCFAILKLYQPGVDNSSYNTSKKSDMAEVKDWKAVRVDLVITPFEQYAYALLGWTGSKEFGRDLRRYASHERKMILDRHGLYDRKKRIFLKAGSEEEIFAHLGLDYVEPWERNA

SEQ ID NO: 971 - DNA, 1182 bp, synthetic construct
  misc_feature 1..1182: note = Variant of terminal deoxynucleotidyl transferase
  source 1..1182: mol_type = other DNA
atgcaccatcatcatcatcatggcggtagcggccatccgccgagcaataccccggagctggaggtgccgagcgttatcgcccgcaaggttagtcagtacagctgccagcgcaagaccacgctgaataactacaacaaaaagtttaccgacgcgttcgagatcatggccgagaactacaaatttaaagagaacgaaatcgcgtgtctggaatttaagcgcgccgcgagtctgctgaaatatctgccgttcccggttaccagcatgaaagacatccaaggtctgccgtgcattggcgaccaagttcgtgacgtgatcgaggagatcatcgaagaaggcgagagcagccgtgttaaagaagttctcaatgacgagcgctacaaggcctttaagcagttcaccagcgtgttcggtgtgggcgtgaaaaccagcgaaaagtggtttcgtatgggcctccgtacggttgaagaggcaaaggccagtaagagtctgaagctgagcaagatgcagaaggcgggctttctgtattacgaggatctggtgagctgcgttagtaaagcggaagccgatgccgttacgctcatcgtgaagaacacggtgcgtacctttctgccggatgcgctggtgaccatcacgggcggtttccgccgtggcaaaaagatgggccacgacatcgactttctgatcacgaatccgggcccgaaagaggatgacgagctgctccacaaagtggttgatgggctcaagaagcaaggtctgctgctgtactgcgacatcaaagagagcacgttcgtggaggaacaactgccaagtcgcaaaatcgacgccatggacaacttccagaagtgcttcgccattctcaagctgtaccagccgggcgtggataacagcagctataacacgagtaagaagagtgacatggccgaggttaaggattggaaagcgatccgtgtggatctggtgatcacgccattcgagcagtacgcctatgcgctgctcggttggacgggcagcaaagaatttggtcgcgatctgcgccgctatgcgagtcatgagcgcaagatgatcctcgaccgtcatggcctctacgaccgcaaaaagcgcatctttctgaaagcgggcagcgaagaagagattttcgcgcatctgggtctggattatgtggagccgtgggaacgcaacgcg

SEQ ID NO: 972 - protein, 394 aa, synthetic construct
  REGION 1..394: note = Variant of terminal deoxynucleotidyl transferase
MHHHHHHGGSGHPPSNTPELEVPSVIARKVSQYSCQRKTTLNNYNKKFTDAFEIMAENYKFKENEIACLEFKRAASLLKYLPFPVTSMKDIQGLPCIGDQVRDVIEEIIEEGESSRVKEVLNDERYKAFKQFTSVFGVGVKTSEKWFRMGLRTVEEAKASKSLKLSKMQKAGFLYYEDLVSCVSKAEADAVTLIVKNTVRTFLPDALVTITGGFRRGKKMGHDIDFLITNPGPKEDDELLHKVVDGLKKQGLLLYCDIKESTFVEEQLPSRKIDAMDNFQKCFAILKLYQPGVDNSSYNTSKKSDMAEVKDWKAIRVDLVITPFEQYAYALLGWTGSKEFGRDLRRYASHERKMILDRHGLYDRKKRIFLKAGSEEEIFAHLGLDYVEPWERNA

SEQ ID NO: 973 - DNA, 1182 bp, synthetic construct
  misc_feature 1..1182: note = Variant of terminal deoxynucleotidyl transferase
  source 1..1182: mol_type = other DNA
atgcaccatcatcatcatcatggcggtagcggccatccgccgagcaataccccggagggtggggtgccgagcgttatcgcccgcaaggttagtcagtacagctgccagcgcaagaccacgctgaataactacaacaaaaagtttaccgacgcgttcgagatcatggccgagaactacaaatttaaagagaacgaaatcgcgtgtctggaatttaagcgcgccgcgagtctgctgaaatatctgccgttcccggttacccgcatgaaagacatccaaggtctgccgtgcattggcgaccaagttcgtgacgtgatcgaggagatcatcgaagagggcgagagcagccgtgttaaagaagttctcaatgacgagcgctacaaggcctttaagcagttcaccagcgtgttcggtgtgggcgtgaaaaccagcgaaaagtggtttcgtatgggcctccgtacggttgaagagctgaaggccgacaagagtctgaagctgagcaagatgcagaaggcgggctttctgtattacgaggatctggccagctgcgttagtaaagcggaagccgatgccgttacgctcatcgtgaagaacacggtgcgtacctttctgccggatgcgctggtgaccatcacgggcggtttccgccgtggcaaaaagatgggccacgacatcgactttctgatcacgaatccgggcccgaaagaggatgacgagctgctccacaaagtggttgatgggctcaagaagcaaggtctgctgctgtactgcgacatcaaagagagcacgttcgtggaggaacaactgccaagtcgcaaaatcgacgccatggacaacttccagaagtgcttcgccattctcaagctgtaccagccgggcgtggataacagcagctataacacgagtaagaagagtgacatggccgaggttaaggattggaaagcgatccgtgtggatctggtgatcacgccattcgagcagtacgcctatgcgctgctcggttggacgggcagcaaagaatttggtcgcgatctgcgccgctatgcgagtcatgagcgcaagatgatcctcgaccgtcatggcctctacgaccgcaaaaagcgcatctttctgaaagcgggcagcgaagaagagattttcgcgcatctgggtctggattatgtggagccgtgggaacgcaacgcg

SEQ ID NO: 974 - protein, 394 aa, synthetic construct
  REGION 1..394: note = Variant of terminal deoxynucleotidyl transferase
MHHHHHHGGSGHPPSNTPEGGVPSVIARKVSQYSCQRKTTLNNYNKKFTDAFEIMAENYKFKENEIACLEFKRAASLLKYLPFPVTRMKDIQGLPCIGDQVRDVIEEIIEEGESSRVKEVLNDERYKAFKQFTSVFGVGVKTSEKWFRMGLRTVEELKADKSLKLSKMQKAGFLYYEDLASCVSKAEADAVTLIVKNTVRTFLPDALVTITGGFRRGKKMGHDIDFLITNPGPKEDDELLHKVVDGLKKQGLLLYCDIKESTFVEEQLPSRKIDAMDNFQKCFAILKLYQPGVDNSSYNTSKKSDMAEVKDWKAIRVDLVITPFEQYAYALLGWTGSKEFGRDLRRYASHERKMILDRHGLYDRKKRIFLKAGSEEEIFAHLGLDYVEPWERNA

SEQ ID NO: 975 - DNA, 1182 bp, synthetic construct
  misc_feature 1..1182: note = Variant of terminal deoxynucleotidyl transferase
  source 1..1182: mol_type = other DNA
atgcaccatcatcatcatcatggcggtagcggccatccgccgagcaataccccggagctgggggtgccgagcgttatcgcccgcaaggttagtcagtacagctgccagcgcaagaccacgctgaataactacaacaaaaagtttaccgacgcgttcgagatcatggccgagaactacaaatttaaagagaacgaaatcgcgtgtctggaatttaagcgcgccgcgagtctgctgaaatatctgccgttcccggttaccagcatgaaagacatccaaggtctgccgtgcattggcgaccaagttcgtgacgtgatcgaggagatcatcgaagaaggcgagagcagccgtgttaaagaagttctcaatgacgagcgctacaaggcctttaagcagttcaccagcgtgttcggtgtgggcgtgaaaaccagcgaaaagtggtttcgtatgggcctccgtacggttgaagaggcaaaggccgacaagagtctgaagctgagcaagatgcagaaggcgggctttctgtattacgaggatctggtgagctgcgttagtaaagcggaagccgatgccgttacgctcatcgtgaagaacacggtgcgtacctttctgccggatgcgctggtgaccatcacgggcggtttccgccgtggcaaaaagatgggccacgacatcgactttctgatcacgaatccgggcccgaaagaggatgacgagctgctccacaaagtggttgatggtctcaagaagcaaggtctgctgctgtactgcgacatcaaagagagcacgttcgtggaggaacaactgccaagtcgcaaaatcgacgccatggacaacttccagaagtgcttcgccattctcaagctgtaccagccgggcgtggataacagcagctataacacgagtaagaagagtgacatggccgaggttaaggattggaaagcggttcgtgtggatctggtgatcacgccattcgagcagtacgcctatgcgctgctcggttggacgggcagcaaagaatttggtcgcgatctgcgccgctatgcgagtcatgagcgcaagatgatcctcgaccgtcatggcctctacgaccgcaaaaagcgcatctttctgaaagcgggcagcgaagaagagattttcgcgcatctgggtctggattatgtggagccgtgggaacgcaacgcg

SEQ ID NO: 976 - protein, 394 aa, synthetic construct
  REGION 1..394: note = Variant of terminal deoxynucleotidyl transferase
MHHHHHHGGSGHPPSNTPELGVPSVIARKVSQYSCQRKTTLNNYNKKFTDAFEIMAENYKFKENEIACLEFKRAASLLKYLPFPVTSMKDIQGLPCIGDQVRDVIEEIIEEGESSRVKEVLNDERYKAFKQFTSVFGVGVKTSEKWFRMGLRTVEEAKADKSLKLSKMQKAGFLYYEDLVSCVSKAEADAVTLIVKNTVRTFLPDALVTITGGFRRGKKMGHDIDFLITNPGPKEDDELLHKVVDGLKKQGLLLYCDIKESTFVEEQLPSRKIDAMDNFQKCFAILKLYQPGVDNSSYNTSKKSDMAEVKDWKAVRVDLVITPFEQYAYALLGWTGSKEFGRDLRRYASHERKMILDRHGLYDRKKRIFLKAGSEEEIFAHLGLDYVEPWERNA

SEQ ID NO: 977 - DNA, 1182 bp, synthetic construct
  misc_feature 1..1182: note = Variant of terminal deoxynucleotidyl transferase
  source 1..1182: mol_type = other DNA
atgcaccatcatcatcatcatggcggtagcggccatccgccgagcaataccccggagggggaggtgccgagcgttatcgcccgcaaggttagtcagtacagctgccagcgcaagaccacgctgaataactacaacaaaaagtttaccgacgcgttcgagatcatggccgagaactacaaatttaaagagaacgaaatcgcgtgtctggaatttaagcgcgccgcgagtctgctgaaatatctgccgttcccggttaccagcatgaaagacatccaaggtctgccgtgcattggcgaccaagttcgtgacgtgatcgaggagatcatcgaaactggcgagagcagccgtgttaaagaagttctcaatgacgagcgctacaaggcctttaagcagttcaccagcgtgttcggtgtgggcgtgaaaaccagcgaaaagtggtttcgtatgggcctccgtacggttgaagagctgaaggccagtaagagtctgaagctgagcaagatgcagaaggcgggctttctgtattacgaggatctggcgagctgcgttagtaaagcggaagccgatgccgttacgctcatcgtgaagaacacggtgagtacctttctgccggatgcgctggtgaccatcacgggcggtttccgccgtggcaaaaagatgggccacgacatcgactttctgatcacgaatccgggcccgaaagaggatgacgagctgctccacaaagtggttgatgggctcaagaagcaaggtctgctgctgtactgcgacatcaaagagagcacgttcgtggaggaacaactgccaagtcgcaaaatcgacgccatggacaacttccagaagtgcttcgccattctcaagctgtaccagccgggcgtggataacagcagctataacacgagtaagaagagtgacatggccgaggttaaggattggaaagcgatccgtgtggatctggtgatcacgccattcgagcagtacgcctatgcgctgctcggttggacgggcagcaaagaatttggtcgcgatctgcgccgctatgcgagtcatgagcgcaagatgatcctcgaccgtcatggcctctacgaccgcaaaaagcgcatctttctgaaagcgggcagcgaagaagagattttcgcgcatctgggtctggattatgtggagccgtgggaacgcaacgcg

SEQ ID NO: 978 - protein, 394 aa, synthetic construct
  REGION 1..394: note = Variant of terminal deoxynucleotidyl transferase
MHHHHHHGGSGHPPSNTPEGEVPSVIARKVSQYSCQRKTTLNNYNKKFTDAFEIMAENYKFKENEIACLEFKRAASLLKYLPFPVTSMKDIQGLPCIGDQVRDVIEEIIETGESSRVKEVLNDERYKAFKQFTSVFGVGVKTSEKWFRMGLRTVEELKASKSLKLSKMQKAGFLYYEDLASCVSKAEADAVTLIVKNTVSTFLPDALVTITGGFRRGKKMGHDIDFLITNPGPKEDDELLHKVVDGLKKQGLLLYCDIKESTFVEEQLPSRKIDAMDNFQKCFAILKLYQPGVDNSSYNTSKKSDMAEVKDWKAIRVDLVITPFEQYAYALLGWTGSKEFGRDLRRYASHERKMILDRHGLYDRKKRIFLKAGSEEEIFAHLGLDYVEPWERNA

SEQ ID NO: 979 - DNA, 1182 bp, synthetic construct
  misc_feature 1..1182: note = Variant of terminal deoxynucleotidyl transferase
  source 1..1182: mol_type = other DNA
atgcaccatcatcatcatcatggcggtagcggccatccgccgagcaataccccggagctgggggtgccgagcgttatcgcccgcaaggttagtcagtacagctgccagcgcaagaccacgctgaataactacaacaaaaagtttaccgacgcgttcgagatcatggccgagaactacaaatttaaagagaacgaaatctttcgtctggaatttaagcgcgccgcgagtctgctgaaatatctgccgttcccggttacccgcatgaaagacatccaaggtctgccgtgcattggcgaccaagttcgtgacgtgatcgaggagatcatcgaagagggcgagagcagccgtgttaaagaagttctcaatgacgagcgctacaaggcctttaagcagttcaccagcgtgttcggtgtgggcgtgaaaaccagcgaaaagtggtttcgtatgggcctccgtacggttgaagagctgaaggccgacaagagtctgaagctgagcaagatgcagaaggcgggctttctgtattacgaggatctggccagctgcgttagtaaagcggaagccgatgccgttacgctcatcgtgaagaacacggtgagtacctttctgccggatgcgctggtgaccatcacgggcggtttccgccgtggcaaaaagatgggccacgacatcgactttctgatcacgaatccgggcccgaaagaggatgacgagctgctccacaaagtggttgatctgctcaagaagcaaggtctgctgctgtactgcgacatcaaagagagcacgttcgtggaggaacaactgccaagtcgcaaaatcgacgccatggacaacttccagaagtgcttcgccattctcaagctgtaccagccgggcgtggataacagcagctataacacgagtaagaagagtgacatggccgaggttaaggattggaaagcgatccgtgtggatctggtgatcacgccattcgagcagtacgcctatgcgctgctcggttggacgggcagcaaagaatttggtcgcgatctgcgccgctatgcgagtcatgagcgcaagatgatcctcgaccgtcatggcctctacgaccgcaaaaagcgcatctttctgaaagcgggcagcgaagaagagattttcgcgcatctgggtctggattatgtggagccgtgggaacgcaacgcg

SEQ ID NO: 980 - protein, 394 aa, synthetic construct
  REGION 1..394: note = Variant of terminal deoxynucleotidyl transferase
MHHHHHHGGSGHPPSNTPELGVPSVIARKVSQYSCQRKTTLNNYNKKFTDAFEIMAENYKFKENEIFRLEFKRAASLLKYLPFPVTRMKDIQGLPCIGDQVRDVIEEIIEEGESSRVKEVLNDERYKAFKQFTSVFGVGVKTSEKWFRMGLRTVEELKADKSLKLSKMQKAGFLYYEDLASCVSKAEADAVTLIVKNTVSTFLPDALVTITGGFRRGKKMGHDIDFLITNPGPKEDDELLHKVVDLLKKQGLLLYCDIKESTFVEEQLPSRKIDAMDNFQKCFAILKLYQPGVDNSSYNTSKKSDMAEVKDWKAIRVDLVITPFEQYAYALLGWTGSKEFGRDLRRYASHERKMILDRHGLYDRKKRIFLKAGSEEEIFAHLGLDYVEPWERNA

SEQ ID NO: 981 - DNA, 1182 bp, synthetic construct
  misc_feature 1..1182: note = Variant of terminal deoxynucleotidyl transferase
  source 1..1182: mol_type = other DNA
atgcaccatcatcatcatcatggcggtagcggccatccgccgagcaataccccggagctggaggtgccgagcgttatcgcccgcaaggttagtcagtacagctgccagcgcaagaccacgctgaataactacaacaaaaagtttaccgacgcgttcgagatcatggccgagaactacaaatttaaagagaacgaaatcttctgtctggaatttaagcgcgccgcgagtctgctgaaatatctgccgttcccggttaccagcatgaaagacatccaaggtctgccgtgcattggcgaccaagttcgtgacgtgatcgaggagatcatcgaagagggcgagagcagccgtgttaaagaagttctcaatgacgagcgctacaaggcctttaagcagttcaccagcgtgttcggtgtgggcgtgaaaaccagcgaaaagtggtttcgtatgggcctccgtacggttgaagagctgaaggccagtaagagtctgaagctgagcaagatgcagaaggcgggctttctgtattacgaggatctggcgagctgcgttagtaaagcggaagccgatgccgttacgctcatcgtgaagaacacggtgcgtacctttctgccggatgcgctggtgaccatcacgggcggtttccgccgtggcaaaaagatgggccacgacatcgactttctgatcacgaatccgggcccgaaagaggatgacgagctgctccacaaagtggttgatggtctcaagaagcaaggtctgctgctgtactgcgacatcaaagagagcacgttcgtggaggaacaactgccaagtcgcaaaatcgacgccatggacaacttccagaagtgcttcgccattctcaagctgtaccagccgggcgtggataacagcagctataacacgagtaagaagagtgacatggccgaggttaaggattggaaagcggttcgtgtggatctggtgatcacgccattcgagcagtacgcctatgcgctgctcggttggacgggcagcaaagaatttggtcgcgatctgcgccgctatgcgagtcatgagcgcaagatgatcctcgaccgtcatggcctctacgaccgcaaaaagcgcatctttctgaaagcgggcagcgaagaagagattttcgcgcatctgggtctggattatgtggagccgtgggaacgcaacgcg

SEQ ID NO: 982 - protein, 394 aa, synthetic construct
  REGION 1..394: note = Variant of terminal deoxynucleotidyl transferase
MHHHHHHGGSGHPPSNTPELEVPSVIARKVSQYSCQRKTTLNNYNKKFTDAFEIMAENYKFKENEIFCLEFKRAASLLKYLPFPVTSMKDIQGLPCIGDQVRDVIEEIIEEGESSRVKEVLNDERYKAFKQFTSVFGVGVKTSEKWFRMGLRTVEELKASKSLKLSKMQKAGFLYYEDLASCVSKAEADAVTLIVKNTVRTFLPDALVTITGGFRRGKKMGHDIDFLITNPGPKEDDELLHKVVDGLKKQGLLLYCDIKESTFVEEQLPSRKIDAMDNFQKCFAILKLYQPGVDNSSYNTSKKSDMAEVKDWKAVRVDLVITPFEQYAYALLGWTGSKEFGRDLRRYASHERKMILDRHGLYDRKKRIFLKAGSEEEIFAHLGLDYVEPWERNA

SEQ ID NO: 983 - DNA, 1182 bp, synthetic construct
  misc_feature 1..1182: note = Variant of terminal deoxynucleotidyl transferase
  source 1..1182: mol_type = other DNA
atgcaccatcatcatcatcatggcggtagcggccatccgccgagcaataccccggagctgggggtgccgagcgttatcgcccgcaaggttagtcagtacagctgccagcgcaagaccacgctgaataactacaacaaaaagtttaccgacgcgttcgagatcatggccgagaactacaaatttaaagagaacgaaatctttcgtctggaatttaagcgcgccgcgagtctgctgaaatatctgccgttcccggttacccgcatgaaagacatccaaggtctgccgtgcattggcgaccaagttcgtgacgtgatcgaggagatcatcgaaactggcgagagcagccgtgttaaagaagttctcaatgacgagcgctacaaggcctttaagcagttcaccagcgtgttcggtgtgggcgtgaaaaccagcgaaaagtggtttcgtatgggcctccgtacggttgaagaggcaaaggccgacaagagtctgaagctgagcaagatgcagaaggcgggctttctgtattacgaggatctggccagctgcgttagtaaagcggaagccgatgccgttacgctcatcgtgaagaacacggtgcgtacctttctgccggatgcgctggtgaccatcacgggcggtttccgccgtggcaaaaagatgggccacgacatcgactttctgatcacgaatccgggcccgaaagaggatgacgagctgctccacaaagtggttgatgggctcaagaagcaaggtctgctgctgtactgcgacatcaaagagagcacgttcgtggaggaacaactgccaagtcgcaaaatcgacgccatggacaacttccagaagtgcttcgccattctcaagctgtaccagccgggcgtggataacagcagctataacacgagtaagaagagtgacatggccgaggttaaggattggaaagcgattcgtgtggatctggtgatcacgccattcgagcagtacgcctatgcgctgctcggttggacgggcagcaaagaatttggtcgcgatctgcgccgctatgcgagtcatgagcgcaagatgatcctcgaccgtcatggcctctacgaccgcaaaaagcgcatctttctgaaagcgggcagcgaagaagagattttcgcgcatctgggtctggattatgtggagccgtgggaacgcaacgcg

SEQ ID NO: 984 - protein, 394 aa, synthetic construct
  REGION 1..394: note = Variant of terminal deoxynucleotidyl transferase
MHHHHHHGGSGHPPSNTPELGVPSVIARKVSQYSCQRKTTLNNYNKKFTDAFEIMAENYKFKENEIFRLEFKRAASLLKYLPFPVTRMKDIQGLPCIGDQVRDVIEEIIETGESSRVKEVLNDERYKAFKQFTSVFGVGVKTSEKWFRMGLRTVEEAKADKSLKLSKMQKAGFLYYEDLASCVSKAEADAVTLIVKNTVRTFLPDALVTITGGFRRGKKMGHDIDFLITNPGPKEDDELLHKVVDGLKKQGLLLYCDIKESTFVEEQLPSRKIDAMDNFQKCFAILKLYQPGVDNSSYNTSKKSDMAEVKDWKAIRVDLVITPFEQYAYALLGWTGSKEFGRDLRRYASHERKMILDRHGLYDRKKRIFLKAGSEEEIFAHLGLDYVEPWERNA

SEQ ID NO: 985 - DNA, 1182 bp, synthetic construct
  misc_feature 1..1182: note = Variant of terminal deoxynucleotidyl transferase
  source 1..1182: mol_type = other DNA
atgcaccatcatcatcatcatggcggtagcggccatccgccgagcaataccccggagctggaggtgccgagcgttatcgcccgcaaggttagtcagtacagctgccagcgcaagaccacgctgaataactacaacaaaaagtttaccgacgcgttcgagatcatggccgagaactacaaatttaaagagaacgaaatcttctgtctggaatttaagcgcgccgcgagtctgctgaaatatctgccgttcccggttacccgcatgaaagacatccaaggtctgccgtgcattggcgaccaagttcgtgacgtgatcgaggagatcatcgaagagggcgagagcagccgtgttaaagaagttctcaatgacgagcgctacaaggcctttaagcagttcaccagcgtgttcggtgtgggcgtgaaaaccagcgaaaagtggtttcgtatgggcctccgtacggttgaagagctgaaggccagtaagagtctgaagctgagcaagatgcagaaggcgggctttctgtattacgaggatctggcgagctgcgttagtaaagcggaagccgatgccgttacgctcatcgtgaagaacacggtgcgtacctttctgccggatgcgctggtgaccatcacgggcggtttccgccgtggcaaaaagatgggccacgacatcgactttctgatcacgaatccgggcccgaaagaggatgacgagctgctccacaaagtggttgatggtctcaagaagcaaggtctgctgctgtactgcgacatcaaagagagcacgttcgtggaggaacaactgccaagtcgcaaaatcgacgccatggacaacttccagaagtgcttcgccattctcaagctgtaccagccgggcgtggataacagcagctataacacgagtaagaagagtgacatggccgaggttaaggattggaaagcggttcgtgtggatctggtgatcacgccattcgagcagtacgcctatgcgctgctcggttggacgggcagcaaagaatttggtcgcgatctgcgccgctatgcgagtcatgagcgcaagatgatcctcgaccgtcatggcctctacgaccgcaaaaagcgcatctttctgaaagcgggcagcgaagaagagattttcgcgcatctgggtctggattatgtggagccgtgggaacgcaacgcg

SEQ ID NO: 986 - protein, 394 aa, synthetic construct
  REGION 1..394: note = Variant of terminal deoxynucleotidyl transferase
MHHHHHHGGSGHPPSNTPELEVPSVIARKVSQYSCQRKTTLNNYNKKFTDAFEIMAENYKFKENEIFCLEFKRAASLLKYLPFPVTRMKDIQGLPCIGDQVRDVIEEIIEEGESSRVKEVLNDERYKAFKQFTSVFGVGVKTSEKWFRMGLRTVEELKASKSLKLSKMQKAGFLYYEDLASCVSKAEADAVTLIVKNTVRTFLPDALVTITGGFRRGKKMGHDIDFLITNPGPKEDDELLHKVVDGLKKQGLLLYCDIKESTFVEEQLPSRKIDAMDNFQKCFAILKLYQPGVDNSSYNTSKKSDMAEVKDWKAVRVDLVITPFEQYAYALLGWTGSKEFGRDLRRYASHERKMILDRHGLYDRKKRIFLKAGSEEEIFAHLGLDYVEPWERNA

SEQ ID NO: 987 - DNA, 1182 bp, synthetic construct
  misc_feature 1..1182: note = Variant of terminal deoxynucleotidyl transferase
  source 1..1182: mol_type = other DNA
atgcaccatcatcatcatcatggcggtagcggccatccgccgagcaataccccggagctggaggtgccgagcgttatcgcccgcaaggttagtcagtacagctgccagcgcaagaccacgctgaataactacaacaaaaagtttaccgacgcgttcgagatcatggccgagaactacaaatttaaagagaacgaaatcttctgtctggaatttaagcgcgccgcgagtctgctgaaatatctgccgttcccggttacccgcatgaaagacatccaaggtctgccgtgcattggcgaccaagttcgtgacgtgatcgaggagatcatcgaaactggcgagagcagccgtgttaaagaagttctcaatgacgagcgctacaaggcctttaagcagttcaccagcgtgttcggtgtgggcgtgaaaaccagcgaaaagtggtttcgtatgggcctccgtacggttgaagaggcaaaggccagtaagagtctgaagctgagcaagatgcagaaggcgggctttctgtattacgaggatctggccagctgcgttagtaaagcggaagccgatgccgttacgctcatcgtgaagaacacggtgcgtacctttctgccggatgcgctggtgaccatcacgggcggtttccgccgtggcaaaaagatgggccacgacatcgactttctgatcacgaatccgggcccgaaagaggatgacgagctgctccacaaagtggttgatggtctcaagaagcaaggtctgctgctgtactgcgacatcaaagagagcacgttcgtggaggaacaactgccaagtcgcaaaatcgacgccatggacaacttccagaagtgcttcgccattctcaagctgtaccagccgggcgtggataacagcagctataacacgagtaagaagagtgacatggccgaggttaaggattggaaagcggttcgtgtggatctggtgatcacgccattcgagcagtacgcctatgcgctgctcggttggacgggcagcaaagaatttggtcgcgatctgcgccgctatgcgagtcatgagcgcaagatgatcctcgaccgtcatggcctctacgaccgcaaaaagcgcatctttctgaaagcgggcagcgaagaagagattttcgcgcatctgggtctggattatgtggagccgtgggaacgcaacgcg

SEQ ID NO: 988 - protein, 394 aa, synthetic construct
  REGION 1..394: note = Variant of terminal deoxynucleotidyl transferase
MHHHHHHGGSGHPPSNTPELEVPSVIARKVSQYSCQRKTTLNNYNKKFTDAFEIMAENYKFKENEIFCLEFKRAASLLKYLPFPVTRMKDIQGLPCIGDQVRDVIEEIIETGESSRVKEVLNDERYKAFKQFTSVFGVGVKTSEKWFRMGLRTVEEAKASKSLKLSKMQKAGFLYYEDLASCVSKAEADAVTLIVKNTVRTFLPDALVTITGGFRRGKKMGHDIDFLITNPGPKEDDELLHKVVDGLKKQGLLLYCDIKESTFVEEQLPSRKIDAMDNFQKCFAILKLYQPGVDNSSYNTSKKSDMAEVKDWKAVRVDLVITPFEQYAYALLGWTGSKEFGRDLRRYASHERKMILDRHGLYDRKKRIFLKAGSEEEIFAHLGLDYVEPWERNA

SEQ ID NO: 989 - DNA, 1182 bp, synthetic construct
  misc_feature 1..1182: note = Variant of terminal deoxynucleotidyl transferase
  source 1..1182: mol_type = other DNA
atgcaccatcatcatcatcatggcggtagcggccatccgccgagcaataccccggagggggaggtgccgagcgttatcgcccgcaaggttagtcagtacagctgccagcgcaagaccacgctgaataactacaacaaaaagtttaccgacgcgttcgagatcatggccgagaactacaaatttaaagagaacgaaatcttctgtctggaatttaagcgcgccgcgagtctgctgaaatatctgccgttcccggttacccgcatgaaagacatccaaggtctgccgtgcattggcgaccaagttcgtgacgtgatcgaggagatcatcgaagagggcgagagcagccgtgttaaagaagttctcaatgacgagcgctacaaggcctttaagcagttcaccagcgtgttcggtgtgggcgtgaaaaccagcgaaaagtggtttcgtatgggcctccgtacggttgaagagctgaaggccagtaagagtctgaagctgagcaagatgcagaaggcgggctttctgtattacgaggatctggcgagctgcgttagtaaagcggaagccgatgccgttacgctcatcgtgaagaacacggtgcgtacctttctgccggatgcgctggtgaccatcacgggcggtttccgccgtggcaaaaagatgggccacgacatcgactttctgatcacgaatccgggcccgaaagaggatgacgagctgctccacaaagtggttgatctgctcaagaagcaaggtctgctgctgtactgcgacatcaaagagagcacgttcgtggaggaacaactgccaagtcgcaaaatcgacgccatggacaacttccagaagtgcttcgccattctcaagctgtaccagccgggcgtggataacagcagctataacacgagtaagaagagtgacatggccgaggttaaggattggaaagcgatccgtgtggatctggtgatcacgccattcgagcagtacgcctatgcgctgctcggttggacgggcagcaaagaatttggtcgcgatctgcgccgctatgcgagtcatgagcgcaagatgatcctcgaccgtcatggcctctacgaccgcaaaaagcgcatctttctgaaagcgggcagcgaagaagagattttcgcgcatctgggtctggattatgtggagccgtgggaacgcaacgcg

SEQ ID NO: 990 - protein, 394 aa, synthetic construct
  REGION 1..394: note = Variant of terminal deoxynucleotidyl transferase
MHHHHHHGGSGHPPSNTPEGEVPSVIARKVSQYSCQRKTTLNNYNKKFTDAFEIMAENYKFKENEIFCLEFKRAASLLKYLPFPVTRMKDIQGLPCIGDQVRDVIEEIIEEGESSRVKEVLNDERYKAFKQFTSVFGVGVKTSEKWFRMGLRTVEELKASKSLKLSKMQKAGFLYYEDLASCVSKAEADAVTLIVKNTVRTFLPDALVTITGGFRRGKKMGHDIDFLITNPGPKEDDELLHKVVDLLKKQGLLLYCDIKESTFVEEQLPSRKIDAMDNFQKCFAILKLYQPGVDNSSYNTSKKSDMAEVKDWKAIRVDLVITPFEQYAYALLGWTGSKEFGRDLRRYASHERKMILDRHGLYDRKKRIFLKAGSEEEIFAHLGLDYVEPWERNA

SEQ ID NO: 991 - DNA, 1182 bp, synthetic construct
  misc_feature 1..1182: note = Variant of terminal deoxynucleotidyl transferase
  source 1..1182: mol_type = other DNA
atgcaccatcatcatcatcatggcggtagcggccatccgccgagcaataccccggagctgggggtgccgagcgttatcgcccgcaaggttagtcagtacagctgccagcgcaagaccacgctgaataactacaacaaaaagtttaccgacgcgttcgagatcatggccgagaactacaaatttaaagagaacgaaatcgcgtgtctggaatttaagcgcgccgcgagtctgctgaaatatctgccgttcccggttaccagcatgaaagacatccaaggtctgccgtgcattggcgaccaagttcgtgacgtgatcgaggagatcatcgaaactggcgagagcagccgtgttaaagaagttctcaatgacgagcgctacaaggcctttaagcagttcaccagcgtgttcggtgtgggcgtgaaaaccagcgaaaagtggtttcgtatgggcctccgtacggttgaagagctgaaggccagtaagagtctgaagctgagcaagatgcagaaggcgggctttctgtattacgaggatctggtgagctgcgttagtaaagcggaagccgatgccgttacgctcatcgtgaagaacacggtgcgtacctttctgccggatgcgctggtgaccatcacgggcggtttccgccgtggcaaaaagatgggccacgacatcgactttctgatcacgaatccgggcccgaaagaggatgacgagctgctccacaaagtggttgatgggctcaagaagcaaggtctgctgctgtactgcgacatcaaagagagcacgttcgtggaggaacaactgccaagtcgcaaaatcgacgccatggacaacttccagaagtgcttcgccattctcaagctgtaccagccgggcgtggataacagcagctataacacgagtaagaagagtgacatggccgaggttaaggattggaaagcgatccgtgtggatctggtgatcacgccattcgagcagtacgcctatgcgctgctcggttggacgggcagcaaagaatttggtcgcgatctgcgccgctatgcgagtcatgagcgcaagatgatcctcgaccgtcatggcctctacgaccgcaaaaagcgcatctttctgaaagcgggcagcgaagaagagattttcgcgcatctgggtctggattatgtggagccgtgggaacgcaacgcg

SEQ ID NO: 992 - protein, 394 aa, synthetic construct
  REGION 1..394: note = Variant of terminal deoxynucleotidyl transferase
MHHHHHHGGSGHPPSNTPELGVPSVIARKVSQYSCQRKTTLNNYNKKFTDAFEIMAENYKFKENEIACLEFKRAASLLKYLPFPVTSMKDIQGLPCIGDQVRDVIEEIIETGESSRVKEVLNDERYKAFKQFTSVFGVGVKTSEKWFRMGLRTVEELKASKSLKLSKMQKAGFLYYEDLVSCVSKAEADAVTLIVKNTVRTFLPDALVTITGGFRRGKKMGHDIDFLITNPGPKEDDELLHKVVDGLKKQGLLLYCDIKESTFVEEQLPSRKIDAMDNFQKCFAILKLYQPGVDNSSYNTSKKSDMAEVKDWKAIRVDLVITPFEQYAYALLGWTGSKEFGRDLRRYASHERKMILDRHGLYDRKKRIFLKAGSEEEIFAHLGLDYVEPWERNA

SEQ ID NO: 993 - DNA, 1182 bp, synthetic construct
  misc_feature 1..1182: note = Variant of terminal deoxynucleotidyl transferase
  source 1..1182: mol_type = other DNA
atgcaccatcatcatcatcatggcggtagcggccatccgccgagcaataccccggagctggaggtgccgagcgttatcgcccgcaaggttagtcagtacagctgccagcgcaagaccacgctgaataactacaacaaaaagtttaccgacgcgttcgagatcatggccgagaactacaaatttaaagagaacgaaatcttttgtctggaatttaagcgcgccgcgagtctgctgaaatatctgccgttcccggttacccgcatgaaagacatccaaggtctgccgtgcattggcgaccaagttcgtgacgtgatcgaggagatcatcgaagagggcgagagcagccgtgttaaagaagttctcaatgacgagcgctacaaggcctttaagcagttcaccagcgtgttcggtgtgggcgtgaaaaccagcgaaaagtggtttcgtatgggcctccgtacggttgaagagctgaaggccagtaagagtctgaagctgagcaagatgcagaaggcgggctttctgtattacgaggatctggccagctgcgttagtaaagcggaagccgatgccgttacgctcatcgtgaagaacacggtgcgtacctttctgccggatgcgctggtgaccatcacgggcggtttccgccgtggcaaaaagatgggccacgacatcgactttctgatcacgaatccgggcccgaaagaggatgacgagctgctccacaaagtggttgatgggctcaagaagcaaggtctgctgctgtactgcgacatcaaagagagcacgttcgtggaggaacaactgccaagtcgcaaaatcgacgccatggacaacttccagaagtgcttcgccattctcaagctgtaccagccgggcgtggataacagcagctataacacgagtaagaagagtgacatggccgaggttaaggattggaaagcgatccgtgtggatctggtgatcacgccattcgagcagtacgcctatgcgctgctcggttggacgggcagcaaagaatttggtcgcgatctgcgccgctatgcgagtcatgagcgcaagatgatcctcgaccgtcatggcctctacgaccgcaaaaagcgcatctttctgaaagcgggcagcgaagaagagattttcgcgcatctgggtctggattatgtggagccgtgggaacgcaacgcg

SEQ ID NO: 994 - protein, 394 aa, synthetic construct
  REGION 1..394: note = Variant of terminal deoxynucleotidyl transferase
MHHHHHHGGSGHPPSNTPELEVPSVIARKVSQYSCQRKTTLNNYNKKFTDAFEIMAENYKFKENEIFCLEFKRAASLLKYLPFPVTRMKDIQGLPCIGDQVRDVIEEIIEEGESSRVKEVLNDERYKAFKQFTSVFGVGVKTSEKWFRMGLRTVEELKASKSLKLSKMQKAGFLYYEDLASCVSKAEADAVTLIVKNTVRTFLPDALVTITGGFRRGKKMGHDIDFLITNPGPKEDDELLHKVVDGLKKQGLLLYCDIKESTFVEEQLPSRKIDAMDNFQKCFAILKLYQPGVDNSSYNTSKKSDMAEVKDWKAIRVDLVITPFEQYAYALLGWTGSKEFGRDLRRYASHERKMILDRHGLYDRKKRIFLKAGSEEEIFAHLGLDYVEPWERNA

SEQ ID NO: 995 - DNA, 1182 bp, synthetic construct
  misc_feature 1..1182: note = Variant of terminal deoxynucleotidyl transferase
  source 1..1182: mol_type = other DNA
atgcaccatcatcatcatcatggcggtagcggccatccgccgagcaataccccggagggtggggtgccgagcgttatcgcccgcaaggttagtcagtacagctgccagcgcaagaccacgctgaataactacaacaaaaagtttaccgacgcgttcgagatcatggccgagaactacaaatttaaagagaacgaaatcgcgtgtctggaatttaagcgcgccgcgagtctgctgaaatatctgccgttcccggttacccgcatgaaagacatccaaggtctgccgtgcattggcgaccaagttcgtgacgtgatcgaggagatcatcgaagagggcgagagcagccgtgttaaagaagttctcaatgacgagcgctacaaggcctttaagcagttcaccagcgtgttcggtgtgggcgtgaaaaccagcgaaaagtggtttcgtatgggcctccgtacggttgaagagctgaaggccagtaagagtctgaagctgagcaagatgcagaaggcgggctttctgtattacgaggatctggccagctgcgttagtaaagcggaagccgatgccgttacgctcatcgtgaagaacacggtgcgtacctttctgccggatgcgctggtgaccatcacgggcggtttccgccgtggcaaaaagatgggccacgacatcgactttctgatcacgaatccgggcccgaaagaggatgacgagctgctccacaaagtggttgatggtctcaagaagcaaggtctgctgctgtactgcgacatcaaagagagcacgttcgtggaggaacaactgccaagtcgcaaaatcgacgccatggacaacttccagaagtgcttcgccattctcaagctgtaccagccgggcgtggataacagcagctataacacgagtaagaagagtgacatggccgaggttaaggattggaaagcggttcgtgtggatctggtgatcacgccattcgagcagtacgcctatgcgctgctcggttggacgggcagcaaagaatttggtcgcgatctgcgccgctatgcgagtcatgagcgcaagatgatcctcgaccgtcatggcctctacgaccgcaaaaagcgcatctttctgaaagcgggcagcgaagaagagattttcgcgcatctgggtctggattatgtggagccgtgggaacgcaacgcg

SEQ ID NO: 996 - protein, 394 aa, synthetic construct
  REGION 1..394: note = Variant of terminal deoxynucleotidyl transferase
MHHHHHHGGSGHPPSNTPEGGVPSVIARKVSQYSCQRKTTLNNYNKKFTDAFEIMAENYKFKENEIACLEFKRAASLLKYLPFPVTRMKDIQGLPCIGDQVRDVIEEIIEEGESSRVKEVLNDERYKAFKQFTSVFGVGVKTSEKWFRMGLRTVEELKASKSLKLSKMQKAGFLYYEDLASCVSKAEADAVTLIVKNTVRTFLPDALVTITGGFRRGKKMGHDIDFLITNPGPKEDDELLHKVVDGLKKQGLLLYCDIKESTFVEEQLPSRKIDAMDNFQKCFAILKLYQPGVDNSSYNTSKKSDMAEVKDWKAVRVDLVITPFEQYAYALLGWTGSKEFGRDLRRYASHERKMILDRHGLYDRKKRIFLKAGSEEEIFAHLGLDYVEPWERNA

SEQ ID NO: 997 - DNA, 1182 bp, synthetic construct
  misc_feature 1..1182: note = Variant of terminal deoxynucleotidyl transferase
  source 1..1182: mol_type = other DNA
atgcaccatcatcatcatcatggcggtagcggccatccgccgagcaataccccggagctggaggtgccgagcgttatcgcccgcaaggttagtcagtacagctgccagcgcaagaccacgctgaataactacaacaaaaagtttaccgacgcgttcgagatcatggccgagaactacaaatttaaagagaacgaaatcgcgtgtctggaatttaagcgcgccgcgagtctgctgaaatatctgccgttcccggttaccagcatgaaagacatccaaggtctgccgtgcattggcgaccaagttcgtgacgtgatcgaggagatcatcgaaactggcgagagcagccgtgttaaagaagttctcaatgacgagcgctacaaggcctttaagcagttcaccagcgtgttcggtgtgggcgtgaaaaccagcgaaaagtggtttcgtatgggcctccgtacggttgaagagctgaaggccagtaagagtctgaagctgagcaagatgcagaaggcgggctttctgtattacgaggatctggccagctgcgttagtaaagcggaagccgatgccgttacgctcatcgtgaagaacacggtgcgtacctttctgccggatgcgctggtgaccatcacgggcggtttccgccgtggcaaaaagatgggccacgacatcgactttctgatcacgaatccgggcccgaaagaggatgacgagctgctccacaaagtggttgatgggctcaagaagcaaggtctgctgctgtactgcgacatcaaagagagcacgttcgtggaggaacaactgccaagtcgcaaaatcgacgccatggacaacttccagaagtgcttcgccattctcaagctgtaccagccgggcgtggataacagcagctataacacgagtaagaagagtgacatggccgaggttaaggattggaaagcggttcgtgtggatctggtgatcacgccattcgagcagtacgcctatgcgctgctcggttggacgggcagcaaagaatttggtcgcgatctgcgccgctatgcgagtcatgagcgcaagatgatcctcgaccgtcatggcctctacgaccgcaaaaagcgcatctttctgaaagcgggcagcgaagaagagattttcgcgcatctgggtctggattatgtggagccgtgggaacgcaacgcg

SEQ ID NO: 998 - protein, 394 aa, synthetic construct
  REGION 1..394: note = Variant of terminal deoxynucleotidyl transferase
MHHHHHHGGSGHPPSNTPELEVPSVIARKVSQYSCQRKTTLNNYNKKFTDAFEIMAENYKFKENEIACLEFKRAASLLKYLPFPVTSMKDIQGLPCIGDQVRDVIEEIIETGESSRVKEVLNDERYKAFKQFTSVFGVGVKTSEKWFRMGLRTVEELKASKSLKLSKMQKAGFLYYEDLASCVSKAEADAVTLIVKNTVRTFLPDALVTITGGFRRGKKMGHDIDFLITNPGPKEDDELLHKVVDGLKKQGLLLYCDIKESTFVEEQLPSRKIDAMDNFQKCFAILKLYQPGVDNSSYNTSKKSDMAEVKDWKAVRVDLVITPFEQYAYALLGWTGSKEFGRDLRRYASHERKMILDRHGLYDRKKRIFLKAGSEEEIFAHLGLDYVEPWERNA

SEQ ID NO: 999 - DNA, 1182 bp, synthetic construct
  misc_feature 1..1182: note = Variant of terminal deoxynucleotidyl transferase
  source 1..1182: mol_type = other DNA
atgcaccatcatcatcatcatggcggtagcggccatccgccgagcaataccccggagggggaggtgccgagcgttatcgcccgcaaggttagtcagtacagctgccagcgcaagaccacgctgaataactacaacaaaaagtttaccgacgcgttcgagatcatggccgagaactacaaatttaaagagaacgaaatcttctgtctggaatttaagcgcgccgcgagtctgctgaaatatctgccgttcccggttaccagcatgaaagacatccaaggtctgccgtgcattggcgaccaagttcgtgacgtgatcgaggagatcatcgaagaaggcgagagcagccgtgttaaagaagttctcaatgacgagcgctacaaggcctttaagcagttcaccagcgtgttcggtgtgggcgtgaaaaccagcgaaaagtggtttcgtatgggcctccgtacggttgaagagctgaaggccgacaagagtctgaagctgagcaagatgcagaaggcgggctttctgtattacgaggatctggcgagctgcgttagtaaagcggaagccgatgccgttacgctcatcgtgaagaacacggtgagtacctttctgccggatgcgctggtgaccatcacgggcggtttccgccgtggcaaaaagatgggccacgacatcgactttctgatcacgaatccgggcccgaaagaggatgacgagctgctccacaaagtggttgatggtctcaagaagcaaggtctgctgctgtactgcgacatcaaagagagcacgttcgtggaggaacaactgccaagtcgcaaaatcgacgccatggacaacttccagaagtgcttcgccattctcaagctgtaccagccgggcgtggataacagcagctataacacgagtaagaagagtgacatggccgaggttaaggattggaaagcggttcgtgtggatctggtgatcacgccattcgagcagtacgcctatgcgctgctcggttggacgggcagcaaagaatttggtcgcgatctgcgccgctatgcgagtcatgagcgcaagatgatcctcgaccgtcatggcctctacgaccgcaaaaagcgcatctttctgaaagcgggcagcgaagaagagattttcgcgcatctgggtctggattatgtggagccgtgggaacgcaacgcg

SEQ ID NO: 1000 - protein, 394 aa, synthetic construct
  REGION 1..394: note = Variant of terminal deoxynucleotidyl transferase
MHHHHHHGGSGHPPSNTPEGEVPSVIARKVSQYSCQRKTTLNNYNKKFTDAFEIMAENYKFKENEIFCLEFKRAASLLKYLPFPVTSMKDIQGLPCIGDQVRDVIEEIIEEGESSRVKEVLNDERYKAFKQFTSVFGVGVKTSEKWFRMGLRTVEELKADKSLKLSKMQKAGFLYYEDLASCVSKAEADAVTLIVKNTVSTFLPDALVTITGGFRRGKKMGHDIDFLITNPGPKEDDELLHKVVDGLKKQGLLLYCDIKESTFVEEQLPSRKIDAMDNFQKCFAILKLYQPGVDNSSYNTSKKSDMAEVKDWKAVRVDLVITPFEQYAYALLGWTGSKEFGRDLRRYASHERKMILDRHGLYDRKKRIFLKAGSEEEIFAHLGLDYVEPWERNA

SEQ ID NO: 1001 - DNA, 1182 bp, synthetic construct
  misc_feature 1..1182: note = Variant of terminal deoxynucleotidyl transferase
  source 1..1182: mol_type = other DNA
atgcaccatcatcatcatcatggcggtagcggccatccgccgagcaataccccggagggtggggtgccgagcgttatcgcccgcaaggttagtcagtacagctgccagcgcaagaccacgctgaataactacaacaaaaagtttaccgacgcgttcgagatcatggccgagaactacaaatttaaagagaacgaaatctttcgtctggaatttaagcgcgccgcgagtctgctgaaatatctgccgttcccggttacccgcatgaaagacatccaaggtctgccgtgcattggcgaccaagttcgtgacgtgatcgaggagatcatcgaagagggcgagagcagccgtgttaaagaagttctcaatgacgagcgctacaaggcctttaagcagttcaccagcgtgttcggtgtgggcgtgaaaaccagcgaaaagtggtttcgtatgggcctccgtacggttgaagaggcaaaggccgacaagagtctgaagctgagcaagatgcagaaggcgggctttctgtattacgaggatctggccagctgcgttagtaaagcggaagccgatgccgttacgctcatcgtgaagaacacggtgagtacctttctgccggatgcgctggtgaccatcacgggcggtttccgccgtggcaaaaagatgggccacgacatcgactttctgatcacgaatccgggcccgaaagaggatgacgagctgctccacaaagtggttgatggtctcaagaagcaaggtctgctgctgtactgcgacatcaaagagagcacgttcgtggaggaacaactgccaagtcgcaaaatcgacgccatggacaacttccagaagtgcttcgccattctcaagctgtaccagccgggcgtggataacagcagctataacacgagtaagaagagtgacatggccgaggttaaggattggaaagcggttcgtgtggatctggtgatcacgccattcgagcagtacgcctatgcgctgctcggttggacgggcagcaaagaatttggtcgcgatctgcgccgctatgcgagtcatgagcgcaagatgatcctcgaccgtcatggcctctacgaccgcaaaaagcgcatctttctgaaagcgggcagcgaagaagagattttcgcgcatctgggtctggattatgtggagccgtgggaacgcaacgcg

SEQ ID NO: 1002 - protein, 394 aa, synthetic construct
  REGION 1..394: note = Variant of terminal deoxynucleotidyl transferase
MHHHHHHGGSGHPPSNTPEGGVPSVIARKVSQYSCQRKTTLNNYNKKFTDAFEIMAENYKFKENEIFRLEFKRAASLLKYLPFPVTRMKDIQGLPCIGDQVRDVIEEIIEEGESSRVKEVLNDERYKAFKQFTSVFGVGVKTSEKWFRMGLRTVEEAKADKSLKLSKMQKAGFLYYEDLASCVSKAEADAVTLIVKNTVSTFLPDALVTITGGFRRGKKMGHDIDFLITNPGPKEDDELLHKVVDGLKKQGLLLYCDIKESTFVEEQLPSRKIDAMDNFQKCFAILKLYQPGVDNSSYNTSKKSDMAEVKDWKAVRVDLVITPFEQYAYALLGWTGSKEFGRDLRRYASHERKMILDRHGLYDRKKRIFLKAGSEEEIFAHLGLDYVEPWERNA

SEQ ID NO: 1003 - DNA, 1182 bp, synthetic construct
  misc_feature 1..1182: note = Variant of terminal deoxynucleotidyl transferase
  source 1..1182: mol_type = other DNA
atgcaccatcatcatcatcatggcggtagcggccatccgccgagcaataccccggagctggaggtgccgagcgttatcgcccgcaaggttagtcagtacagctgccagcgcaagaccacgctgaataactacaacaaaaagtttaccgacgcgttcgagatcatggccgagaactacaaatttaaagagaacgaaatcgcgtgtctggaatttaagcgcgccgcgagtctgctgaaatatctgccgttcccggttacccgcatgaaagacatccaaggtctgccgtgcattggcgaccaagttcgtgacgtgatcgaggagatcatcgaagagggcgagagcagccgtgttaaagaagttctcaatgacgagcgctacaaggcctttaagcagttcaccagcgtgttcggtgtgggcgtgaaaaccagcgaaaagtggtttcgtatgggcctccgtacggttgaagagctgaaggccagtaagagtctgaagctgagcaagatgcagaaggcgggctttctgtattacgaggatctggccagctgcgttagtaaagcggaagccgatgccgttacgctcatcgtgaagaacacggtgcgtacctttctgccggatgcgctggtgaccatcacgggcggtttccgccgtggcaaaaagatgggccacgacatcgactttctgatcacgaatccgggcccgaaagaggatgacgagctgctccacaaagtggttgatgggctcaagaagcaaggtctgctgctgtactgcgacatcaaagagagcacgttcgtggaggaacaactgccaagtcgcaaaatcgacgccatggacaacttccagaagtgcttcgccattctcaagctgtaccagccgggcgtggataacagcagctataacacgagtaagaagagtgacatggccgaggttaaggattggaaagcgatccgtgtggatctggtgatcacgccattcgagcagtacgcctatgcgctgctcggttggacgggcagcaaagaatttggtcgcgatctgcgccgctatgcgagtcatgagcgcaagatgatcctcgaccgtcatggcctctacgaccgcaaaaagcgcatctttctgaaagcgggcagcgaagaagagattttcgcgcatctgggtctggattatgtggagccgtgggaacgcaacgcg

SEQ ID NO: 1004 - protein, 394 aa, synthetic construct
  REGION 1..394: note = Variant of terminal deoxynucleotidyl transferase
MHHHHHHGGSGHPPSNTPELEVPSVIARKVSQYSCQRKTTLNNYNKKFTDAFEIMAENYKFKENEIACLEFKRAASLLKYLPFPVTRMKDIQGLPCIGDQVRDVIEEIIEEGESSRVKEVLNDERYKAFKQFTSVFGVGVKTSEKWFRMGLRTVEELKASKSLKLSKMQKAGFLYYEDLASCVSKAEADAVTLIVKNTVRTFLPDALVTITGGFRRGKKMGHDIDFLITNPGPKEDDELLHKVVDGLKKQGLLLYCDIKESTFVEEQLPSRKIDAMDNFQKCFAILKLYQPGVDNSSYNTSKKSDMAEVKDWKAIRVDLVITPFEQYAYALLGWTGSKEFGRDLRRYASHERKMILDRHGLYDRKKRIFLKAGSEEEIFAHLGLDYVEPWERNA

SEQ ID NO: 1005 - DNA, 1182 bp, synthetic construct
  misc_feature 1..1182: note = Variant of terminal deoxynucleotidyl transferase
  source 1..1182: mol_type = other DNA
atgcaccatcatcatcatcatggcggtagcggccatccgccgagcaataccccggagctggaggtgccgagcgttatcgcccgcaaggttagtcagtacagctgccagcgcaagaccacgctgaataactacaacaaaaagtttaccgacgcgttcgagatcatggccgagaactacaaatttaaagagaacgaaatcgcgtgtctggaatttaagcgcgccgcgagtctgctgaaatatctgccgttcccggttaccagcatgaaagacatccaaggtctgccgtgcattggcgaccaagttcgtgacgtgatcgaggagatcatcgaagaaggcgagagcagccgtgttaaagaagttctcaatgacgagcgctacaaggcctttaagcagttcaccagcgtgttcggtgtgggcgtgaaaaccagcgaaaagtggtttcgtatgggcctccgtacggttgaagagctgaaggccagtaagagtctgaagctgagcaagatgcagaaggcgggctttctgtattacgaggatctggcgagctgcgttagtaaagcggaagccgatgccgttacgctcatcgtgaagaacacggtgcgtacctttctgccggatgcgctggtgaccatcacgggcggtttccgccgtggcaaaaagatgggccacgacatcgactttctgatcacgaatccgggcccgaaagaggatgacgagctgctccacaaagtggttgatgggctcaagaagcaaggtctgctgctgtactgcgacatcaaagagagcacgttcgtggaggaacaactgccaagtcgcaaaatcgacgccatggacaacttccagaagtgcttcgccattctcaagctgtaccagccgggcgtggataacagcagctataacacgagtaagaagagtgacatggccgaggttaaggattggaaagcgatccgtgtggatctggtgatcacgccattcgagcagtacgcctatgcgctgctcggttggacgggcagcaaagaatttggtcgcgatctgcgccgctatgcgagtcatgagcgcaagatgatcctcgaccgtcatggcctctacgaccgcaaaaagcgcatctttctgaaagcgggcagcgaagaagagattttcgcgcatctgggtctggattatgtggagccgtgggaacgcaacgcg

SEQ ID NO: 1006 - protein, 394 aa, synthetic construct
  REGION 1..394: note = Variant of terminal deoxynucleotidyl transferase
MHHHHHHGGSGHPPSNTPELEVPSVIARKVSQYSCQRKTTLNNYNKKFTDAFEIMAENYKFKENEIACLEFKRAASLLKYLPFPVTSMKDIQGLPCIGDQVRDVIEEIIEEGESSRVKEVLNDERYKAFKQFTSVFGVGVKTSEKWFRMGLRTVEELKASKSLKLSKMQKAGFLYYEDLASCVSKAEADAVTLIVKNTVRTFLPDALVTITGGFRRGKKMGHDIDFLITNPGPKEDDELLHKVVDGLKKQGLLLYCDIKESTFVEEQLPSRKIDAMDNFQKCFAILKLYQPGVDNSSYNTSKKSDMAEVKDWKAIRVDLVITPFEQYAYALLGWTGSKEFGRDLRRYASHERKMILDRHGLYDRKKRIFLKAGSEEEIFAHLGLDYVEPWERNA

SEQ ID NO: 1007 - DNA, 1182 bp, synthetic construct
  misc_feature 1..1182: note = Variant of terminal deoxynucleotidyl transferase
  source 1..1182: mol_type = other DNA
atgcaccatcatcatcatcatggcggtagcggccatccgccgagcaataccccggagggggaggtgccgagcgttatcgcccgcaaggttagtcagtacagctgccagcgcaagaccacgctgaataactacaacaaaaagtttaccgacgcgttcgagatcatggccgagaactacaaatttaaagagaacgaaatcttttgtctggaatttaagcgcgccgcgagtctgctgaaatatctgccgttcccggttacccgcatgaaagacatccaaggtctgccgtgcattggcgaccaagttcgtgacgtgatcgaggagatcatcgaagagggcgagagcagccgtgttaaagaagttctcaatgacgagcgctacaaggcctttaagcagttcaccagcgtgttcggtgtgggcgtgaaaaccagcgaaaagtggtttcgtatgggcctccgtacggttgaagaggcaaaggccgacaagagtctgaagctgagcaagatgcagaaggcgggctttctgtattacgaggatctggccagctgcgttagtaaagcggaagccgatgccgttacgctcatcgtgaagaacacggtgcgtacctttctgccggatgcgctggtgaccatcacgggcggtttccgccgtggcaaaaagatgggccacgacatcgactttctgatcacgaatccgggcccgaaagaggatgacgagctgctccacaaagtggttgatgggctcaagaagcaaggtctgctgctgtactgcgacatcaaagagagcacgttcgtggaggaacaactgccaagtcgcaaaatcgacgccatggacaacttccagaagtgcttcgccattctcaagctgtaccagccgggcgtggataacagcagctataacacgagtaagaagagtgacatggccgaggttaaggattggaaagcgattcgtgtggatctggtgatcacgccattcgagcagtacgcctatgcgctgctcggttggacgggcagcaaagaatttggtcgcgatctgcgccgctatgcgagtcatgagcgcaagatgatcctcgaccgtcatggcctctacgaccgcaaaaagcgcatctttctgaaagcgggcagcgaagaagagattttcgcgcatctgggtctggattatgtggagccgtgggaacgcaacgcg

SEQ ID NO: 1008 - protein, 394 aa, synthetic construct
  REGION 1..394: note = Variant of terminal deoxynucleotidyl transferase
MHHHHHHGGSGHPPSNTPEGEVPSVIARKVSQYSCQRKTTLNNYNKKFTDAFEIMAENYKFKENEIFCLEFKRAASLLKYLPFPVTRMKDIQGLPCIGDQVRDVIEEIIEEGESSRVKEVLNDERYKAFKQFTSVFGVGVKTSEKWFRMGLRTVEEAKADKSLKLSKMQKAGFLYYEDLASCVSKAEADAVTLIVKNTVRTFLPDALVTITGGFRRGKKMGHDIDFLITNPGPKEDDELLHKVVDGLKKQGLLLYCDIKESTFVEEQLPSRKIDAMDNFQKCFAILKLYQPGVDNSSYNTSKKSDMAEVKDWKAIRVDLVITPFEQYAYALLGWTGSKEFGRDLRRYASHERKMILDRHGLYDRKKRIFLKAGSEEEIFAHLGLDYVEPWERNA

SEQ ID NO: 1009 - DNA, 1182 bp, synthetic construct
  misc_feature 1..1182: note = Variant of terminal deoxynucleotidyl transferase
  source 1..1182: mol_type = other DNA
atgcaccatcatcatcatcatggcggtagcggccatccgccgagcaataccccggaggggggggtgccgagcgttatcgcccgcaaggttagtcagtacagctgccagcgcaagaccacgctgaataactacaacaaaaagtttaccgacgcgttcgagatcatggccgagaactacaaatttaaagagaacgaaatcttctgtctggaatttaagcgcgccgcgagtctgctgaaatatctgccgttcccggttaccagcatgaaagacatccaaggtctgccgtgcattggcgaccaagttcgtgacgtgatcgaggagatcatcgaaactggcgagagcagccgtgttaaagaagttctcaatgacgagcgctacaaggcctttaagcagttcaccagcgtgttcggtgtgggcgtgaaaaccagcgaaaagtggtttcgtatgggcctccgtacggttgaagagctgaaggccagtaagagtctgaagctgagcaagatgcagaaggcgggctttctgtattacgaggatctggccagctgcgttagtaaagcggaagccgatgccgttacgctcatcgtgaagaacacggtgcgtacctttctgccggatgcgctggtgaccatcacgggcggtttccgccgtggcaaaaagatgggccacgacatcgactttctgatcacgaatccgggcccgaaagaggatgacgagctgctccacaaagtggttgatggtctcaagaagcaaggtctgctgctgtactgcgacatcaaagagagcacgttcgtggaggaacaactgccaagtcgcaaaatcgacgccatggacaacttccagaagtgcttcgccattctcaagctgtaccagccgggcgtggataacagcagctataacacgagtaagaagagtgacatggccgaggttaaggattggaaagcgatccgtgtggatctggtgatcacgccattcgagcagtacgcctatgcgctgctcggttggacgggcagcaaagaatttggtcgcgatctgcgccgctatgcgagtcatgagcgcaagatgatcctcgaccgtcatggcctctacgaccgcaaaaagcgcatctttctgaaagcgggcagcgaagaagagattttcgcgcatctgggtctggattatgtggagccgtgggaacgcaacgcg

SEQ ID NO: 1010 - protein, 394 aa, synthetic construct
  REGION 1..394: note = Variant of terminal deoxynucleotidyl transferase
MHHHHHHGGSGHPPSNTPEGGVPSVIARKVSQYSCQRKTTLNNYNKKFTDAFEIMAENYKFKENEIFCLEFKRAASLLKYLPFPVTSMKDIQGLPCIGDQVRDVIEEIIETGESSRVKEVLNDERYKAFKQFTSVFGVGVKTSEKWFRMGLRTVEELKASKSLKLSKMQKAGFLYYEDLASCVSKAEADAVTLIVKNTVRTFLPDALVTITGGFRRGKKMGHDIDFLITNPGPKEDDELLHKVVDGLKKQGLLLYCDIKESTFVEEQLPSRKIDAMDNFQKCFAILKLYQPGVDNSSYNTSKKSDMAEVKDWKAIRVDLVITPFEQYAYALLGWTGSKEFGRDLRRYASHERKMILDRHGLYDRKKRIFLKAGSEEEIFAHLGLDYVEPWERNA

SEQ ID NO: 1011 - DNA, 1182 bp, synthetic construct
  misc_feature 1..1182: note = Variant of terminal deoxynucleotidyl transferase
  source 1..1182: mol_type = other DNA
atgcaccatcatcatcatcatggcggtagcggccatccgccgagcaataccccggagctggaggtgccgagcgttatcgcccgcaaggttagtcagtacagctgccagcgcaagaccacgctgaataactacaacaaaaagtttaccgacgcgttcgagatcatggccgagaactacaaatttaaagagaacgaaatcgcgtgtctggaatttaagcgcgccgcgagtctgctgaaatatctgccgttcccggttaccagcatgaaagacatccaaggtctgccgtgcattggcgaccaagttcgtgacgtgatcgaggagatcatcgaaactggcgagagcagccgtgttaaagaagttctcaatgacgagcgctacaaggcctttaagcagttcaccagcgtgttcggtgtgggcgtgaaaaccagcgaaaagtggtttcgtatgggcctccgtacggttgaagagctgaaggccagtaagagtctgaagctgagcaagatgcagaaggcgggctttctgtattacgaggatctggccagctgcgttagtaaagcggaagccgatgccgttacgctcatcgtgaagaacacggtgcgtacctttctgccggatgcgctggtgaccatcacgggcggtttccgccgtggcaaaaagatgggccacgacatcgactttctgatcacgaatccgggcccgaaagaggatgacgagctgctccacaaagtggttgatgggctcaagaagcaaggtctgctgctgtactgcgacatcaaagagagcacgttcgtggaggaacaactgccaagtcgcaaaatcgacgccatggacaacttccagaagtgcttcgccattctcaagctgtaccagccgggcgtggataacagcagctataacacgagtaagaagagtgacatggccgaggttaaggattggaaagcgatccgtgtggatctggtgatcacgccattcgagcagtacgcctatgcgctgctcggttggacgggcagcaaagaatttggtcgcgatctgcgccgctatgcgagtcatgagcgcaagatgatcctcgaccgtcatggcctctacgaccgcaaaaagcgcatctttctgaaagcgggcagcgaagaagagattttcgcgcatctgggtctggattatgtggagccgtgggaacgcaacgcg

SEQ ID NO: 1012 - protein, 394 aa, synthetic construct
  REGION 1..394: note = Variant of terminal deoxynucleotidyl transferase
MHHHHHHGGSGHPPSNTPELEVPSVIARKVSQYSCQRKTTLNNYNKKFTDAFEIMAENYKFKENEIACLEFKRAASLLKYLPFPVTSMKDIQGLPCIGDQVRDVIEEIIETGESSRVKEVLNDERYKAFKQFTSVFGVGVKTSEKWFRMGLRTVEELKASKSLKLSKMQKAGFLYYEDLASCVSKAEADAVTLIVKNTVRTFLPDALVTITGGFRRGKKMGHDIDFLITNPGPKEDDELLHKVVDGLKKQGLLLYCDIKESTFVEEQLPSRKIDAMDNFQKCFAILKLYQPGVDNSSYNTSKKSDMAEVKDWKAIRVDLVITPFEQYAYALLGWTGSKEFGRDLRRYASHERKMILDRHGLYDRKKRIFLKAGSEEEIFAHLGLDYVEPWERNA

SEQ ID NO: 1013 - DNA, 1182 bp, synthetic construct
  misc_feature 1..1182: note = Variant of terminal deoxynucleotidyl transferase
  source 1..1182: mol_type = other DNA
atgcaccatcatcatcatcatggcggtagcggccatccgccgagcaataccccggagctgggggtgccgagcgttatcgcccgcaaggttagtcagtacagctgccagcgcaagaccacgctgaataactacaacaaaaagtttaccgacgcgttcgagatcatggccgagaactacaaatttaaagagaacgaaatcttttgtctggaatttaagcgcgccgcgagtctgctgaaatatctgccgttcccggttacccgcatgaaagacatccaaggtctgccgtgcattggcgaccaagttcgtgacgtgatcgaggagatcatcgaagagggcgagagcagccgtgttaaagaagttctcaatgacgagcgctacaaggcctttaagcagttcaccagcgtgttcggtgtgggcgtgaaaaccagcgaaaagtggtttcgtatgggcctccgtacggttgaagagctgaaggccgacaagagtctgaagctgagcaagatgcagaaggcgggctttctgtattacgaggatctggccagctgcgttagtaaagcggaagccgatgccgttacgctcatcgtgaagaacacggtgcgtacctttctgccggatgcgctggtgaccatcacgggcggtttccgccgtggcaaaaagatgggccacgacatcgactttctgatcacgaatccgggcccgaaagaggatgacgagctgctccacaaagtggttgatgggctcaagaagcaaggtctgctgctgtactgcgacatcaaagagagcacgttcgtggaggaacaactgccaagtcgcaaaatcgacgccatggacaacttccagaagtgcttcgccattctcaagctgtaccagccgggcgtggataacagcagctataacacgagtaagaagagtgacatggccgaggttaaggattggaaagcggttcgtgtggatctggtgatcacgccattcgagcagtacgcctatgcgctgctcggttggacgggcagcaaagaatttggtcgcgatctgcgccgctatgcgagtcatgagcgcaagatgatcctcgaccgtcatggcctctacgaccgcaaaaagcgcatctttctgaaagcgggcagcgaagaagagattttcgcgcatctgggtctggattatgtggagccgtgggaacgcaacgcg

SEQ ID NO: 1014 - protein, 394 aa, synthetic construct
  REGION 1..394: note = Variant of terminal deoxynucleotidyl transferase
MHHHHHHGGSGHPPSNTPELGVPSVIARKVSQYSCQRKTTLNNYNKKFTDAFEIMAENYKFKENEIFCLEFKRAASLLKYLPFPVTRMKDIQGLPCIGDQVRDVIEEIIEEGESSRVKEVLNDERYKAFKQFTSVFGVGVKTSEKWFRMGLRTVEELKADKSLKLSKMQKAGFLYYEDLASCVSKAEADAVTLIVKNTVRTFLPDALVTITGGFRRGKKMGHDIDFLITNPGPKEDDELLHKVVDGLKKQGLLLYCDIKESTFVEEQLPSRKIDAMDNFQKCFAILKLYQPGVDNSSYNTSKKSDMAEVKDWKAVRVDLVITPFEQYAYALLGWTGSKEFGRDLRRYASHERKMILDRHGLYDRKKRIFLKAGSEEEIFAHLGLDYVEPWERNA

SEQ ID NO: 1015 - DNA, 1182 bp, synthetic construct
  misc_feature 1..1182: note = Variant of terminal deoxynucleotidyl transferase
  source 1..1182: mol_type = other DNA
atgcaccatcatcatcatcatggcggtagcggccatccgccgagcaataccccggaggggggggtgccgagcgttatcgcccgcaaggttagtcagtacagctgccagcgcaagaccacgctgaataactacaacaaaaagtttaccgacgcgttcgagatcatggccgagaactacaaatttaaagagaacgaaatctttcgtctggaatttaagcgcgccgcgagtctgctgaaatatctgccgttcccggttaccagcatgaaagacatccaaggtctgccgtgcattggcgaccaagttcgtgacgtgatcgaggagatcatcgaagagggcgagagcagccgtgttaaagaagttctcaatgacgagcgctacaaggcctttaagcagttcaccagcgtgttcggtgtgggcgtgaaaaccagcgaaaagtggtttcgtatgggcctccgtacggttgaagagctgaaggccagtaagagtctgaagctgagcaagatgcagaaggcgggctttctgtattacgaggatctggcgagctgcgttagtaaagcggaagccgatgccgttacgctcatcgtgaagaacacggtgcgtacctttctgccggatgcgctggtgaccatcacgggcggtttccgccgtggcaaaaagatgggccacgacatcgactttctgatcacgaatccgggcccgaaagaggatgacgagctgctccacaaagtggttgatgggctcaagaagcaaggtctgctgctgtactgcgacatcaaagagagcacgttcgtggaggaacaactgccaagtcgcaaaatcgacgccatggacaacttccagaagtgcttcgccattctcaagctgtaccagccgggcgtggataacagcagctataacacgagtaagaagagtgacatggccgaggttaaggattggaaagcgattcgtgtggatctggtgatcacgccattcgagcagtacgcctatgcgctgctcggttggacgggcagcaaagaatttggtcgcgatctgcgccgctatgcgagtcatgagcgcaagatgatcctcgaccgtcatggcctctacgaccgcaaaaagcgcatctttctgaaagcgggcagcgaagaagagattttcgcgcatctgggtctggattatgtggagccgtgggaacgcaacgcg

SEQ ID NO: 1016 - protein, 394 aa, synthetic construct
  REGION 1..394: note = Variant of terminal deoxynucleotidyl transferase
MHHHHHHGGSGHPPSNTPEGGVPSVIARKVSQYSCQRKTTLNNYNKKFTDAFEIMAENYKFKENEIFRLEFKRAASLLKYLPFPVTSMKDIQGLPCIGDQVRDVIEEIIEEGESSRVKEVLNDERYKAFKQFTSVFGVGVKTSEKWFRMGLRTVEELKASKSLKLSKMQKAGFLYYEDLASCVSKAEADAVTLIVKNTVRTFLPDALVTITGGFRRGKKMGHDIDFLITNPGPKEDDELLHKVVDGLKKQGLLLYCDIKESTFVEEQLPSRKIDAMDNFQKCFAILKLYQPGVDNSSYNTSKKSDMAEVKDWKAIRVDLVITPFEQYAYALLGWTGSKEFGRDLRRYASHERKMILDRHGLYDRKKRIFLKAGSEEEIFAHLGLDYVEPWERNA

SEQ ID NO: 1017 - DNA, 1182 bp, synthetic construct
  misc_feature 1..1182: note = Variant of terminal deoxynucleotidyl transferase
  source 1..1182: mol_type = other DNA
atgcaccatcatcatcatcatggcggtagcggccatccgccgagcaataccccggagctggaggtgccgagcgttatcgcccgcaaggttagtcagtacagctgccagcgcaagaccacgctgaataactacaacaaaaagtttaccgacgcgttcgagatcatggccgagaactacaaatttaaagagaacgaaatcgcgtgtctggaatttaagcgcgccgcgagtctgctgaaatatctgccgttcccggttaccagcatgaaagacatccaaggtctgccgtgcattggcgaccaagttcgtgacgtgatcgaggagatcatcgaagaaggcgagagcagccgtgttaaagaagttctcaatgacgagcgctacaaggcctttaagcagttcaccagcgtgttcggtgtgggcgtgaaaaccagcgaaaagtggtttcgtatgggcctccgtacggttgaagagctgaaggccagtaagagtctgaagctgagcaagatgcagaaggcgggctttctgtattacgaggatctggcgagctgcgttagtaaagcggaagccgatgccgttacgctcatcgtgaagaacacggtgcgtacctttctgccggatgcgctggtgaccatcacgggcggtttccgccgtggcaaaaagatgggccacgacatcgactttctgatcacgaatccgggcccgaaagaggatgacgagctgctccacaaagtggttgatctgctcaagaagcaaggtctgctgctgtactgcgacatcaaagagagcacgttcgtggaggaacaactgccaagtcgcaaaatcgacgccatggacaacttccagaagtgcttcgccattctcaagctgtaccagccgggcgtggataacagcagctataacacgagtaagaagagtgacatggccgaggttaaggattggaaagcggttcgtgtggatctggtgatcacgccattcgagcagtacgcctatgcgctgctcggttggacgggcagcaaagaatttggtcgcgatctgcgccgctatgcgagtcatgagcgcaagatgatcctcgaccgtcatggcctctacgaccgcaaaaagcgcatctttctgaaagcgggcagcgaagaagagattttcgcgcatctgggtctggattatgtggagccgtgggaacgcaacgcg

SEQ ID NO: 1018 - protein, 394 aa, synthetic construct
  REGION 1..394: note = Variant of terminal deoxynucleotidyl transferase
MHHHHHHGGSGHPPSNTPELEVPSVIARKVSQYSCQRKTTLNNYNKKFTDAFEIMAENYKFKENEIACLEFKRAASLLKYLPFPVTSMKDIQGLPCIGDQVRDVIEEIIEEGESSRVKEVLNDERYKAFKQFTSVFGVGVKTSEKWFRMGLRTVEELKASKSLKLSKMQKAGFLYYEDLASCVSKAEADAVTLIVKNTVRTFLPDALVTITGGFRRGKKMGHDIDFLITNPGPKEDDELLHKVVDLLKKQGLLLYCDIKESTFVEEQLPSRKIDAMDNFQKCFAILKLYQPGVDNSSYNTSKKSDMAEVKDWKAVRVDLVITPFEQYAYALLGWTGSKEFGRDLRRYASHERKMILDRHGLYDRKKRIFLKAGSEEEIFAHLGLDYVEPWERNA

SEQ ID NO: 1019 - DNA, 1182 bp, synthetic construct
  misc_feature 1..1182: note = Variant of terminal deoxynucleotidyl transferase
  source 1..1182: mol_type = other DNA
atgcaccatcatcatcatcatggcggtagcggccatccgccgagcaataccccggagctggaggtgccgagcgttatcgcccgcaaggttagtcagtacagctgccagcgcaagaccacgctgaataactacaacaaaaagtttaccgacgcgttcgagatcatggccgagaactacaaatttaaagagaacgaaatcttctgtctggaatttaagcgcgccgcgagtctgctgaaatatctgccgttcccggttaccagcatgaaagacatccaaggtctgccgtgcattggcgaccaagttcgtgacgtgatcgaggagatcatcgaagagggcgagagcagccgtgttaaagaagttctcaatgacgagcgctacaaggcctttaagcagttcaccagcgtgttcggtgtgggcgtgaaaaccagcgaaaagtggtttcgtatgggcctccgtacggttgaagaggcaaaggccagtaagagtctgaagctgagcaagatgcagaaggcgggctttctgtattacgaggatctggcgagctgcgttagtaaagcggaagccgatgccgttacgctcatcgtgaagaacacggtgagtacctttctgccggatgcgctggtgaccatcacgggcggtttccgccgtggcaaaaagatgggccacgacatcgactttctgatcacgaatccgggcccgaaagaggatgacgagctgctccacaaagtggttgatggtctcaagaagcaaggtctgctgctgtactgcgacatcaaagagagcacgttcgtggaggaacaactgccaagtcgcaaaatcgacgccatggacaacttccagaagtgcttcgccattctcaagctgtaccagccgggcgtggataacagcagctataacacgagtaagaagagtgacatggccgaggttaaggattggaaagcgattcgtgtggatctggtgatcacgccattcgagcagtacgcctatgcgctgctcggttggacgggcagcaaagaatttggtcgcgatctgcgccgctatgcgagtcatgagcgcaagatgatcctcgaccgtcatggcctctacgaccgcaaaaagcgcatctttctgaaagcgggcagcgaagaagagattttcgcgcatctgggtctggattatgtggagccgtgggaacgcaacgcg

SEQ ID NO: 1020 - protein, 394 aa, synthetic construct
  REGION 1..394: note = Variant of terminal deoxynucleotidyl transferase
MHHHHHHGGSGHPPSNTPELEVPSVIARKVSQYSCQRKTTLNNYNKKFTDAFEIMAENYKFKENEIFCLEFKRAASLLKYLPFPVTSMKDIQGLPCIGDQVRDVIEEIIEEGESSRVKEVLNDERYKAFKQFTSVFGVGVKTSEKWFRMGLRTVEEAKASKSLKLSKMQKAGFLYYEDLASCVSKAEADAVTLIVKNTVSTFLPDALVTITGGFRRGKKMGHDIDFLITNPGPKEDDELLHKVVDGLKKQGLLLYCDIKESTFVEEQLPSRKIDAMDNFQKCFAILKLYQPGVDNSSYNTSKKSDMAEVKDWKAIRVDLVITPFEQYAYALLGWTGSKEFGRDLRRYASHERKMILDRHGLYDRKKRIFLKAGSEEEIFAHLGLDYVEPWERNA

SEQ ID NO: 1021 - DNA, 1182 bp, synthetic construct
  misc_feature 1..1182: note = Variant of terminal deoxynucleotidyl transferase
  source 1..1182: mol_type = other DNA
atgcaccatcatcatcatcatggcggtagcggccatccgccgagcaataccccggagggggaggtgccgagcgttatcgcccgcaaggttagtcagtacagctgccagcgcaagaccacgctgaataactacaacaaaaagtttaccgacgcgttcgagatcatggccgagaactacaaatttaaagagaacgaaatcgcgtgtctggaatttaagcgcgccgcgagtctgctgaaatatctgccgttcccggttacccgcatgaaagacatccaaggtctgccgtgcattggcgaccaagttcgtgacgtgatcgaggagatcatcgaagaaggcgagagcagccgtgttaaagaagttctcaatgacgagcgctacaaggcctttaagcagttcaccagcgtgttcggtgtgggcgtgaaaaccagcgaaaagtggtttcgtatgggcctccgtacggttgaagagctgaaggccagtaagagtctgaagctgagcaagatgcagaaggcgggctttctgtattacgaggatctggccagctgcgttagtaaagcggaagccgatgccgttacgctcatcgtgaagaacacggtgagtacctttctgccggatgcgctggtgaccatcacgggcggtttccgccgtggcaaaaagatgggccacgacatcgactttctgatcacgaatccgggcccgaaagaggatgacgagctgctccacaaagtggttgatgggctcaagaagcaaggtctgctgctgtactgcgacatcaaagagagcacgttcgtggaggaacaactgccaagtcgcaaaatcgacgccatggacaacttccagaagtgcttcgccattctcaagctgtaccagccgggcgtggataacagcagctataacacgagtaagaagagtgacatggccgaggttaaggattggaaagcgatccgtgtggatctggtgatcacgccattcgagcagtacgcctatgcgctgctcggttggacgggcagcaaagaatttggtcgcgatctgcgccgctatgcgagtcatgagcgcaagatgatcctcgaccgtcatggcctctacgaccgcaaaaagcgcatctttctgaaagcgggcagcgaagaagagattttcgcgcatctgggtctggattatgtggagccgtgggaacgcaacgcg

SEQ ID NO: 1022 - protein, 394 aa, synthetic construct
  REGION 1..394: note = Variant of terminal deoxynucleotidyl transferase
MHHHHHHGGSGHPPSNTPEGEVPSVIARKVSQYSCQRKTTLNNYNKKFTDAFEIMAENYKFKENEIACLEFKRAASLLKYLPFPVTRMKDIQGLPCIGDQVRDVIEEIIEEGESSRVKEVLNDERYKAFKQFTSVFGVGVKTSEKWFRMGLRTVEELKASKSLKLSKMQKAGFLYYEDLASCVSKAEADAVTLIVKNTVSTFLPDALVTITGGFRRGKKMGHDIDFLITNPGPKEDDELLHKVVDGLKKQGLLLYCDIKESTFVEEQLPSRKIDAMDNFQKCFAILKLYQPGVDNSSYNTSKKSDMAEVKDWKAIRVDLVITPFEQYAYALLGWTGSKEFGRDLRRYASHERKMILDRHGLYDRKKRIFLKAGSEEEIFAHLGLDYVEPWERNA

SEQ ID NO: 1023 - DNA, 1182 bp, synthetic construct
  misc_feature 1..1182: note = Variant of terminal deoxynucleotidyl transferase
  source 1..1182: mol_type = other DNA
atgcaccatcatcatcatcatggcggtagcggccatccgccgagcaataccccggagggggaggtgccgagcgttatcgcccgcaaggttagtcagtacagctgccagcgcaagaccacgctgaataactacaacaaaaagtttaccgacgcgttcgagatcatggccgagaactacaaatttaaagagaacgaaatcttctgtctggaatttaagcgcgccgcgagtctgctgaaatatctgccgttcccggttaccagcatgaaagacatccaaggtctgccgtgcattggcgaccaagttcgtgacgtgatcgaggagatcatcgaagagggcgagagcagccgtgttaaagaagttctcaatgacgagcgctacaaggcctttaagcagttcaccagcgtgttcggtgtgggcgtgaaaaccagcgaaaagtggtttcgtatgggcctccgtacggttgaagagctgaaggccagtaagagtctgaagctgagcaagatgcagaaggcgggctttctgtattacgaggatctggccagctgcgttagtaaagcggaagccgatgccgttacgctcatcgtgaagaacacggtgagtacctttctgccggatgcgctggtgaccatcacgggcggtttccgccgtggcaaaaagatgggccacgacatcgactttctgatcacgaatccgggcccgaaagaggatgacgagctgctccacaaagtggttgatgggctcaagaagcaaggtctgctgctgtactgcgacatcaaagagagcacgttcgtggaggaacaactgccaagtcgcaaaatcgacgccatggacaacttccagaagtgcttcgccattctcaagctgtaccagccgggcgtggataacagcagctataacacgagtaagaagagtgacatggccgaggttaaggattggaaagcgatccgtgtggatctggtgatcacgccattcgagcagtacgcctatgcgctgctcggttggacgggcagcaaagaatttggtcgcgatctgcgccgctatgcgagtcatgagcgcaagatgatcctcgaccgtcatggcctctacgaccgcaaaaagcgcatctttctgaaagcgggcagcgaagaagagattttcgcgcatctgggtctggattatgtggagccgtgggaacgcaacgcg

SEQ ID NO: 1024 - protein, 394 aa, synthetic construct
  REGION 1..394: note = Variant of terminal deoxynucleotidyl transferase
MHHHHHHGGSGHPPSNTPEGEVPSVIARKVSQYSCQRKTTLNNYNKKFTDAFEIMAENYKFKENEIFCLEFKRAASLLKYLPFPVTSMKDIQGLPCIGDQVRDVIEEIIEEGESSRVKEVLNDERYKAFKQFTSVFGVGVKTSEKWFRMGLRTVEELKASKSLKLSKMQKAGFLYYEDLASCVSKAEADAVTLIVKNTVSTFLPDALVTITGGFRRGKKMGHDIDFLITNPGPKEDDELLHKVVDGLKKQGLLLYCDIKESTFVEEQLPSRKIDAMDNFQKCFAILKLYQPGVDNSSYNTSKKSDMAEVKDWKAIRVDLVITPFEQYAYALLGWTGSKEFGRDLRRYASHERKMILDRHGLYDRKKRIFLKAGSEEEIFAHLGLDYVEPWERNA

SEQ ID NO: 1025 - DNA, 1182 bp, synthetic construct
  misc_feature 1..1182: note = Variant of terminal deoxynucleotidyl transferase
  source 1..1182: mol_type = other DNA
atgcaccatcatcatcatcatggcggtagcggccatccgccgagcaataccccggagggtggggtgccgagcgttatcgcccgcaaggttagtcagtacagctgccagcgcaagaccacgctgaataactacaacaaaaagtttaccgacgcgttcgagatcatggccgagaactacaaatttaaagagaacgaaatcgcgtgtctggaatttaagcgcgccgcgagtctgctgaaatatctgccgttcccggttacccgcatgaaagacatccaaggtctgccgtgcattggcgaccaagttcgtgacgtgatcgaggagatcatcgaagagggcgagagcagccgtgttaaagaagttctcaatgacgagcgctacaaggcctttaagcagttcaccagcgtgttcggtgtgggcgtgaaaaccagcgaaaagtggtttcgtatgggcctccgtacggttgaagagctgaaggccagtaagagtctgaagctgagcaagatgcagaaggcgggctttctgtattacgaggatctggccagctgcgttagtaaagcggaagccgatgccgttacgctcatcgtgaagaacacggtgcgtacctttctgccggatgcgctggtgaccatcacgggcggtttccgccgtggcaaaaagatgggccacgacatcgactttctgatcacgaatccgggcccgaaagaggatgacgagctgctccacaaagtggttgatgggctcaagaagcaaggtctgctgctgtactgcgacatcaaagagagcacgttcgtggaggaacaactgccaagtcgcaaaatcgacgccatggacaacttccagaagtgcttcgccattctcaagctgtaccagccgggcgtggataacagcagctataacacgagtaagaagagtgacatggccgaggttaaggattggaaagcgatccgtgtggatctggtgatcacgccattcgagcagtacgcctatgcgctgctcggttggacgggcagcaaagaatttggtcgcgatctgcgccgctatgcgagtcatgagcgcaagatgatcctcgaccgtcatggcctctacgaccgcaaaaagcgcatctttctgaaagcgggcagcgaagaagagattttcgcgcatctgggtctggattatgtggagccgtgggaacgcaacgcg

SEQ ID NO: 1026 - protein, 394 aa, synthetic construct
  REGION 1..394: note = Variant of terminal deoxynucleotidyl transferase
MHHHHHHGGSGHPPSNTPEGGVPSVIARKVSQYSCQRKTTLNNYNKKFTDAFEIMAENYKFKENEIACLEFKRAASLLKYLPFPVTRMKDIQGLPCIGDQVRDVIEEIIEEGESSRVKEVLNDERYKAFKQFTSVFGVGVKTSEKWFRMGLRTVEELKASKSLKLSKMQKAGFLYYEDLASCVSKAEADAVTLIVKNTVRTFLPDALVTITGGFRRGKKMGHDIDFLITNPGPKEDDELLHKVVDGLKKQGLLLYCDIKESTFVEEQLPSRKIDAMDNFQKCFAILKLYQPGVDNSSYNTSKKSDMAEVKDWKAIRVDLVITPFEQYAYALLGWTGSKEFGRDLRRYASHERKMILDRHGLYDRKKRIFLKAGSEEEIFAHLGLDYVEPWERNA

SEQ ID NO: 1027 - DNA, 1182 bp, synthetic construct
  misc_feature 1..1182: note = Variant of terminal deoxynucleotidyl transferase
  source 1..1182: mol_type = other DNA
atgcaccatcatcatcatcatggcggtagcggccatccgccgagcaataccccggagctgggggtgccgagcgttatcgcccgcaaggttagtcagtacagctgccagcgcaagaccacgctgaataactacaacaaaaagtttaccgacgcgttcgagatcatggccgagaactacaaatttaaagagaacgaaatcttctgtctggaatttaagcgcgccgcgagtctgctgaaatatctgccgttcccggttaccagcatgaaagacatccaaggtctgccgtgcattggcgaccaagttcgtgacgtgatcgaggagatcatcgaagagggcgagagcagccgtgttaaagaagttctcaatgacgagcgctacaaggcctttaagcagttcaccagcgtgttcggtgtgggcgtgaaaaccagcgaaaagtggtttcgtatgggcctccgtacggttgaagaggcaaaggccgacaagagtctgaagctgagcaagatgcagaaggcgggctttctgtattacgaggatctggcgagctgcgttagtaaagcggaagccgatgccgttacgctcatcgtgaagaacacggtgcgtacctttctgccggatgcgctggtgaccatcacgggcggtttccgccgtggcaaaaagatgggccacgacatcgactttctgatcacgaatccgggcccgaaagaggatgacgagctgctccacaaagtggttgatgggctcaagaagcaaggtctgctgctgtactgcgacatcaaagagagcacgttcgtggaggaacaactgccaagtcgcaaaatcgacgccatggacaacttccagaagtgcttcgccattctcaagctgtaccagccgggcgtggataacagcagctataacacgagtaagaagagtgacatggccgaggttaaggattggaaagcgattcgtgtggatctggtgatcacgccattcgagcagtacgcctatgcgctgctcggttggacgggcagcaaagaatttggtcgcgatctgcgccgctatgcgagtcatgagcgcaagatgatcctcgaccgtcatggcctctacgaccgcaaaaagcgcatctttctgaaagcgggcagcgaagaagagattttcgcgcatctgggtctggattatgtggagccgtgggaacgcaacgcg

SEQ ID NO: 1028 - protein, 394 aa, synthetic construct
  REGION 1..394: note = Variant of terminal deoxynucleotidyl transferase
MHHHHHHGGSGHPPSNTPELGVPSVIARKVSQYSCQRKTTLNNYNKKFTDAFEIMAENYKFKENEIFCLEFKRAASLLKYLPFPVTSMKDIQGLPCIGDQVRDVIEEIIEEGESSRVKEVLNDERYKAFKQFTSVFGVGVKTSEKWFRMGLRTVEEAKADKSLKLSKMQKAGFLYYEDLASCVSKAEADAVTLIVKNTVRTFLPDALVTITGGFRRGKKMGHDIDFLITNPGPKEDDELLHKVVDGLKKQGLLLYCDIKESTFVEEQLPSRKIDAMDNFQKCFAILKLYQPGVDNSSYNTSKKSDMAEVKDWKAIRVDLVITPFEQYAYALLGWTGSKEFGRDLRRYASHERKMILDRHGLYDRKKRIFLKAGSEEEIFAHLGLDYVEPWERNA

SEQ ID NO: 1029 - DNA, 1182 bp, synthetic construct
  misc_feature 1..1182: note = Variant of terminal deoxynucleotidyl transferase
  source 1..1182: mol_type = other DNA
atgcaccatcatcatcatcatggcggtagcggccatccgccgagcaataccccggagggtggggtgccgagcgttatcgcccgcaaggttagtcagtacagctgccagcgcaagaccacgctgaataactacaacaaaaagtttaccgacgcgttcgagatcatggccgagaactacaaatttaaagagaacgaaatcttctgtctggaatttaagcgcgccgcgagtctgctgaaatatctgccgttcccggttaccagcatgaaagacatccaaggtctgccgtgcattggcgaccaagttcgtgacgtgatcgaggagatcatcgaagagggcgagagcagccgtgttaaagaagttctcaatgacgagcgctacaaggcctttaagcagttcaccagcgtgttcggtgtgggcgtgaaaaccagcgaaaagtggtttcgtatgggcctccgtacggttgaagagctgaaggccagtaagagtctgaagctgagcaagatgcagaaggcgggctttctgtattacgaggatctggccagctgcgttagtaaagcggaagccgatgccgttacgctcatcgtgaagaacacggtgcgtacctttctgccggatgcgctggtgaccatcacgggcggtttccgccgtggcaaaaagatgggccacgacatcgactttctgatcacgaatccgggcccgaaagaggatgacgagctgctccacaaagtggttgatggtctcaagaagcaaggtctgctgctgtactgcgacatcaaagagagcacgttcgtggaggaacaactgccaagtcgcaaaatcgacgccatggacaacttccagaagtgcttcgccattctcaagctgtaccagccgggcgtggataacagcagctataacacgagtaagaagagtgacatggccgaggttaaggattggaaagcgattcgtgtggatctggtgatcacgccattcgagcagtacgcctatgcgctgctcggttggacgggcagcaaagaatttggtcgcgatctgcgccgctatgcgagtcatgagcgcaagatgatcctcgaccgtcatggcctctacgaccgcaaaaagcgcatctttctgaaagcgggcagcgaagaagagattttcgcgcatctgggtctggattatgtggagccgtgggaacgcaacgcg

SEQ ID NO: 1030 - protein, 394 aa, synthetic construct
  REGION 1..394: note = Variant of terminal deoxynucleotidyl transferase
MHHHHHHGGSGHPPSNTPEGGVPSVIARKVSQYSCQRKTTLNNYNKKFTDAFEIMAENYKFKENEIFCLEFKRAASLLKYLPFPVTSMKDIQGLPCIGDQVRDVIEEIIEEGESSRVKEVLNDERYKAFKQFTSVFGVGVKTSEKWFRMGLRTVEELKASKSLKLSKMQKAGFLYYEDLASCVSKAEADAVTLIVKNTVRTFLPDALVTITGGFRRGKKMGHDIDFLITNPGPKEDDELLHKVVDGLKKQGLLLYCDIKESTFVEEQLPSRKIDAMDNFQKCFAILKLYQPGVDNSSYNTSKKSDMAEVKDWKAIRVDLVITPFEQYAYALLGWTGSKEFGRDLRRYASHERKMILDRHGLYDRKKRIFLKAGSEEEIFAHLGLDYVEPWERNA

SEQ ID NO: 1031 - DNA, 1182 bp, synthetic construct
  misc_feature 1..1182: note = Variant of terminal deoxynucleotidyl transferase
  source 1..1182: mol_type = other DNA
atgcaccatcatcatcatcatggcggtagcggccatccgccgagcaataccccggagggggaggtgccgagcgttatcgcccgcaaggttagtcagtacagctgccagcgcaagaccacgctgaataactacaacaaaaagtttaccgacgcgctggagatcatggccgagaactacaaatttaaagagaacgaaatcgcgtgtctggaatttaagcgcgccgcgagtctgctgaaatatctgccgttcccggttaccagcatgaaagacatccaaggtctgccgtgcattggcgaccaagttcgtgacgtgatcgaggagatcatcgaagaaggcgagagcagccgtgttaaagaagttctcaatgacgagcgctacaaggcctttaagcagttcaccagcgtgttcggtgtgggcgtgaaaaccagcgaaaagtggtttcgtatgggcctccgtacggttgaagaggcaaaggccagtaagagtctgaagctgagcaagatgcagaaggcgggcttcctgtattacgaggatctggcgagctgcgttagtaaagcggaagccgatgccgttacgctcatcgtgaagaacacggtgcgtacctttctgccggatgcgctggtgaccatcaccggcggtttccgccgtggcaaaaagatgggccacgacatcgactttctgatcacgaatccgggcccgaaagaggatgacgagctgctccacaaagtggttgatctgctcaagaagcaaggtctgctgctgtactgcgacatcaaagagagcacgttcgtggaggaacaactgccaagtcgcaaaatcgacgccatggacaacttccagaagtgcttcgccattctcaagctgtaccagccgggcgtggataacagcagctataacacgagtaagaagagtgacatggccgaggttaaggattggaaagcgatccgtgtggatctggtgatcacgccattcgagcagtacgcctatgcgctgctcggttggacgggcagcaaagaatttggtcgcgatctgcgccgctatgcggagcacgagcgcaagatgatcctcgaccgtcatggcctctacgaccgcaaaaagcgcatctttctgaaagcgggcagcgaagaagagattttcgcgcatctgggtctggattatgtggagccgtgggaacgcaacgcg

SEQ ID NO: 1032 - protein, 394 aa, synthetic construct
  REGION 1..394: note = Variant of terminal deoxynucleotidyl transferase
MHHHHHHGGSGHPPSNTPEGEVPSVIARKVSQYSCQRKTTLNNYNKKFTDALEIMAENYKFKENEIACLEFKRAASLLKYLPFPVTSMKDIQGLPCIGDQVRDVIEEIIEEGESSRVKEVLNDERYKAFKQFTSVFGVGVKTSEKWFRMGLRTVEEAKASKSLKLSKMQKAGFLYYEDLASCVSKAEADAVTLIVKNTVRTFLPDALVTITGGFRRGKKMGHDIDFLITNPGPKEDDELLHKVVDLLKKQGLLLYCDIKESTFVEEQLPSRKIDAMDNFQKCFAILKLYQPGVDNSSYNTSKKSDMAEVKDWKAIRVDLVITPFEQYAYALLGWTGSKEFGRDLRRYAEHERKMILDRHGLYDRKKRIFLKAGSEEEIFAHLGLDYVEPWERNA

SEQ ID NO: 1033 - DNA, 1182 bp, synthetic construct
  misc_feature 1..1182: note = Variant of terminal deoxynucleotidyl transferase
  source 1..1182: mol_type = other DNA
atgcaccatcatcatcatcatggcggtagcggccatccgccgagcaataccccggagggggaggtgccgagcgttatcgcccgcaaggttagtcagtacagctgccagcgcaagaccacgctgaataactacaacaaaaagtttaccgacgcgctggagatcatggccgagaactacaaatttaaagagaacgaaatcgcgtgtctggaatttaagcgcgccgcgagtctgctgaaatatctgccgttcccggttaccagcatgaaagacatccaaggtctgccgtgcattggcgaccaagttcgtgacgtgatcgaggagatcatcgaagagggcgagagcagccgtgttaaagaagttctcaatgacgagcgctacaaggcctttaagcagttcaccagcgtgttcggtgtgggcgtgaaaaccagcgaaaagtggtttcgtatgggcctccgtacggttgaagaggcaaaggccagtaagagtctgaagctgagcaagatgcagaaggcgggcttcctgtattacgaggatctggcgagctgcgttagtaaagcggaagccgatgccgttacgctcatcgtgaagaacacggtgcgtacctttctgccggatgcgctggtgaccatcaccggcggtttccgccgtggcaaaaagatgggccacgacatcgactttctgatcacgaatccgggcccgaaagaggatgacgagctgctccacaaagtggttgatctgctcaagaagcaaggtctgctgctgtactgcgacatcaaagagagcacgttcgtggaggaacaactgccaagtcgcaaaatcgacgccatggacaacttccagaagtgcttcgccattctcaagctgtaccagccgggcgtggataacagcagctataacacgagtaagaagagtgacatggccgaggttaaggattggaaagcgattcgtgtggatctggtgatcacgccattcgagcagtacgcctatgcgctgctcggttggacgggcagcaaagaatttggtcgcgatctgcgccgctatgcggaggaagagcgcaagatgatcctcgaccgtcatggcctctacgaccgcaaaaagcgcatctttctgaaagcgggcagcgaagaagagattttcgcgcatctgggtctggattatgtggagccgtgggaacgcaacgcg

SEQ ID NO: 1034 - protein, 394 aa, synthetic construct
  REGION 1..394: note = Variant of terminal deoxynucleotidyl transferase
MHHHHHHGGSGHPPSNTPEGEVPSVIARKVSQYSCQRKTTLNNYNKKFTDALEIMAENYKFKENEIACLEFKRAASLLKYLPFPVTSMKDIQGLPCIGDQVRDVIEEIIEEGESSRVKEVLNDERYKAFKQFTSVFGVGVKTSEKWFRMGLRTVEEAKASKSLKLSKMQKAGFLYYEDLASCVSKAEADAVTLIVKNTVRTFLPDALVTITGGFRRGKKMGHDIDFLITNPGPKEDDELLHKVVDLLKKQGLLLYCDIKESTFVEEQLPSRKIDAMDNFQKCFAILKLYQPGVDNSSYNTSKKSDMAEVKDWKAIRVDLVITPFEQYAYALLGWTGSKEFGRDLRRYAEEERKMILDRHGLYDRKKRIFLKAGSEEEIFAHLGLDYVEPWERNA

SEQ ID NO: 1035 - DNA, 1182 bp, synthetic construct
  misc_feature 1..1182: note = Variant of terminal deoxynucleotidyl transferase
  source 1..1182: mol_type = other DNA
atgcaccatcatcatcatcatggcggtagcggccatccgccgagcaataccccggagggggaggtgccgagcgttatcgcccgcaaggttagtcagtacagctgccagcgcaagaccacgctgaataactacaacaaaaagtttaccgacgcgctggagatcatggccgagaactacaaatttaaagagaacgaaatcgcgtgtctggaatttaagcgcgccgcgagtctgctgaaatatctgccgttcccggttaccagcatgaaagacatccaaggtctgccgtgcattggcgaccaagttcgtgacgtgatcgaggagatcatcgaagagggcgagagcagccgtgttaaagaagttctcaatgacgagcgctacaaggcctttaagcagttcaccagcgtgttcggtgtgggcgtgaaaaccagcgaaaagtggtttcgtatgggcctccgtacggttgaagaggcaaaggccagtaagagtctgaagctgagcaagatgcagaaggcgggcttcctgtattacgaggatctggttagctgcgttagtaaagcggaagccgatgccgttacgctcatcgtgaagaacacggtgagtacctttctgccggatgcgctggtgaccatcaccggcggtttccgccgtggcaaaaagatgggccacgacatcgactttctgatcacgaatccgggcccgaaacaagatgacgagctgctccacaaagtggttgatctgctcaagaagcaaggtctgctgctgtactgcgacatcaaagagagcacgttcgtggaggaacaactgccaagtcgcaaaatcgacgccatggacaacttccagaagtgcttcgccattctcaagctgtaccagccgggcgtggataacagcagctataacacgagtaagaagagtgacatggccgaggttaaggattggaaagcggttcgtgtggatctggtgatcacgccattcgagcagtacgcctatgcgctgctcggttggacgggcagcaaagaatttggtcgcgatctgcgccgctatgcggagcacgagcgcaagatgatcctcgaccgtcatggcctctacgaccgcaaaaagcgcatctttctgaaagcgggcagcgaagaagagattttcgcgcatctgggtctggattatgtggagccgtgggaacgcaacgcg

SEQ ID NO: 1036 - protein, 394 aa, synthetic construct
  REGION 1..394: note = Variant of terminal deoxynucleotidyl transferase
MHHHHHHGGSGHPPSNTPEGEVPSVIARKVSQYSCQRKTTLNNYNKKFTDALEIMAENYKFKENEIACLEFKRAASLLKYLPFPVTSMKDIQGLPCIGDQVRDVIEEIIEEGESSRVKEVLNDERYKAFKQFTSVFGVGVKTSEKWFRMGLRTVEEAKASKSLKLSKMQKAGFLYYEDLVSCVSKAEADAVTLIVKNTVSTFLPDALVTITGGFRRGKKMGHDIDFLITNPGPKQDDELLHKVVDLLKKQGLLLYCDIKESTFVEEQLPSRKIDAMDNFQKCFAILKLYQPGVDNSSYNTSKKSDMAEVKDWKAVRVDLVITPFEQYAYALLGWTGSKEFGRDLRRYAEHERKMILDRHGLYDRKKRIFLKAGSEEEIFAHLGLDYVEPWERNA

SEQ ID NO: 1037 - DNA, 1182 bp, synthetic construct
  misc_feature 1..1182: note = Variant of terminal deoxynucleotidyl transferase
  source 1..1182: mol_type = other DNA
atgcaccatcatcatcatcatggcggtagcggccatccgccgagcaataccccggagggggaggtgccgagcgttatcgcccgcaaggttagtcagtacagctgccagcgcaagaccacgctgaataactacaacaaaaagtttaccgacgcgctggagatcatggccgagaactacaaatttaaagagaacgaaatcgcgtgtctggaatttaagcgcgccgcgagtctgctgaaatatctgccgttcccggttaccagcatgaaagacatccaaggtctgccgtgcattggcgaccaagttcgtgacgtgatcgaggagatcatcgaagaaggcgagagcagccgtgttaaagaagttctcaatgacgagcgctacaaggcctttaagcagttcaccagcgtgttcggtgtgggcgtgaaaaccagcgaaaagtggtttcgtatgggcctccgtacggttgaagaggcaaaggccagtaagagtctgaagctgagcaagatgcagaaggcgggcttcctgtattacgaggatctggttagctgcgttagtaaagcggaagccgatgccgttacgctcatcgtgaagaacacggtgcgtacctttctgccggatgcgctggtgaccatcaccggcggtttccgccgtggcaaaaagatgggccacgacatcgactttctgatcacgaatccgggcccgaaagaagatgacgagctgctccacaaagtggttgatctgctcaagaagcaaggtctgctgctgtactgcgacatcaaagagagcacgttcgtggaggaacaactgccaagtcgcaaaatcgacgccatggacaacttccagaagtgcttcgccattctcaagctgtaccagccgggcgtggataacagcagctataacacgagtaagaagagtgacatggccgaggttaaggattggaaagcgatccgtgtggatctggtgatcacgccattcgagcagtacgcctatgcgctgctcggttggacgggcagcaaagaatttggtcgcgatctgcgccgctatgcggagcacgagcgcaagatgatcctcgaccgtcatggcctctacgaccgcaaaaagcgcatctttctgaaagcgggcagcgaagaagagattttcgcgcatctgggtctggattatgtggagccgtgggaacgcaacgcg

SEQ ID NO: 1038 - protein, 394 aa, synthetic construct
  REGION 1..394: note = Variant of terminal deoxynucleotidyl transferase
MHHHHHHGGSGHPPSNTPEGEVPSVIARKVSQYSCQRKTTLNNYNKKFTDALEIMAENYKFKENEIACLEFKRAASLLKYLPFPVTSMKDIQGLPCIGDQVRDVIEEIIEEGESSRVKEVLNDERYKAFKQFTSVFGVGVKTSEKWFRMGLRTVEEAKASKSLKLSKMQKAGFLYYEDLVSCVSKAEADAVTLIVKNTVRTFLPDALVTITGGFRRGKKMGHDIDFLITNPGPKEDDELLHKVVDLLKKQGLLLYCDIKESTFVEEQLPSRKIDAMDNFQKCFAILKLYQPGVDNSSYNTSKKSDMAEVKDWKAIRVDLVITPFEQYAYALLGWTGSKEFGRDLRRYAEHERKMILDRHGLYDRKKRIFLKAGSEEEIFAHLGLDYVEPWERNA

SEQ ID NO: 1039 - DNA, 1182 bp, synthetic construct
  misc_feature 1..1182: note = Variant of terminal deoxynucleotidyl transferase
  source 1..1182: mol_type = other DNA
atgcaccatcatcatcatcatggcggtagcggccatccgccgagcaataccccggagggggaggtgccgagcgttatcgcccgcaaggttagtcagtacagctgccagcgcaagaccacgctgaataactacaacaaaaagtttaccgacgcgctggagatcatggccgagaactacaaatttaaagagaacgaaatcgcgtgtctggaatttaagcgcgccgcgagtctgctgaaatatctgccgttcccggttaccagcatgaaagacatccaaggtctgccgtgcattggcgaccaagttcgtgacgtgatcgaggagatcatcgaagagggcgagagcagccgtgttaaagaagttctcaatgacgagcgctacaaggcctttaagcagttcaccagcgtgttcggtgtgggcgtgaaaaccagcgaaaagtggtttcgtatgggcctccgtacggttgaagaggcaaaggccagtaagagtctgaagctgagcaagatgcagaaggcgggcttcctgtattacgaggatctggctagctgcgttagtaaagcggaagccgatgccgttacgctcatcgtgaagaacacggtgagtacctttctgccggatgcgctggtgaccatcaccggcggtttccgccgtggcaaaaagatgggccacgacatcgactttctgatcacgaatccgggcccgaaagaggatgacgagctgctccacaaagtggttgatctgctcaagaagcaaggtctgctgctgtactgcgacatcaaagagagcacgttcgtggaggaacaactgccaagtcgcaaaatcgacgccatggacaacttccagaagtgcttcgccattctcaagctgtaccagccgggcgtggataacagcagctataacacgagtaagaagagtgacatggccgaggttaaggattggaaagcgattcgtgtggatctggtgatcacgccattcgagcagtacgcctatgcgctgctcggttggacgggcagcaaagaatttggtcgcgatctgcgccgctatgcggaggaagagcgcaagatgatcctcgaccgtcatggcctctacgaccgcaaaaagcgcatctttctgaaagcgggcagcgaagaagagattttcgcgcatctgggtctggattatgtggagccgtgggaacgcaacgcg

SEQ ID NO: 1040 - protein, 394 aa, synthetic construct
  REGION 1..394: note = Variant of terminal deoxynucleotidyl transferase
MHHHHHHGGSGHPPSNTPEGEVPSVIARKVSQYSCQRKTTLNNYNKKFTDALEIMAENYKFKENEIACLEFKRAASLLKYLPFPVTSMKDIQGLPCIGDQVRDVIEEIIEEGESSRVKEVLNDERYKAFKQFTSVFGVGVKTSEKWFRMGLRTVEEAKASKSLKLSKMQKAGFLYYEDLASCVSKAEADAVTLIVKNTVSTFLPDALVTITGGFRRGKKMGHDIDFLITNPGPKEDDELLHKVVDLLKKQGLLLYCDIKESTFVEEQLPSRKIDAMDNFQKCFAILKLYQPGVDNSSYNTSKKSDMAEVKDWKAIRVDLVITPFEQYAYALLGWTGSKEFGRDLRRYAEEERKMILDRHGLYDRKKRIFLKAGSEEEIFAHLGLDYVEPWERNA

SEQ ID NO: 1041 - DNA, 1182 bp, synthetic construct
  misc_feature 1..1182: note = Variant of terminal deoxynucleotidyl transferase
  source 1..1182: mol_type = other DNA
atgcaccatcatcatcatcatggcggtagcggccatccgccgagcaataccccggagggggaggtgccgagcgttatcgcccgcaaggttagtcagtacagctgccagcgcaagaccacgctgaataactacaacaaaaagtttaccgacgcgttcgagatcatggccgagaactacaaatttaaagagaacgaaatcgcgtgtctggaatttaagcgcgccgcgagtctgctgaaatatctgccgttcccggttaccagcatgaaagacatccaaggtctgccgtgcattggcgaccaagttcgtgacgtgatcgaggagatcatcgaagaaggcgagagcagccgtgttaaagaagttctcaatgacgagcgctacaaggcctttaagcagttcaccagcgtgttcggtgtgggcgtgaaaaccagcgaaaagtggtttcgtatgggcctccgtacggttgaagaggcaaaggccagtaagagtctgaagctgagcaagatgcagaaggcgggctttctgtattacgaggatctggcgagctgcgttagtaaagcggaagccgatgccgttacgctcatcgtgaagaacacggtgcgtacctttctgccggatgcgctggtgaccatcacgggcggtttccgccgtggcaaaaagatgggccacgacatcgactttctgatcacgaatccgggcccgaaagaggatgacgagctgctccacaaagtggttgatctgctcaagaagcaaggtctgctgctgtactgcgacatcaaagagagcacgttcgtggaggaacaactgccaagtcgcaaaatcgacgccatggacaacttccagaagtgcttcgccattctcaagctgtaccagccgggcgtggataacagcagctataacacgagtaagaagagtgacatggccgaggttaaggattggaaagcgatccgtgtggatctggtgatcacgccattcgagcagtacgcctatgcgctgctcggttggacgggcagcaaagaatttggtcgcgatctgcgccgctatgcggagcacgagcgcaagatgatcctcgaccgtcatggcctctacgaccgcaaaaagcgcatctttctgaaagcgggcagcgaagaagagattttcgcgcatctgggtctggattatgtggagccgtgggaacgcaacgcg

SEQ ID NO: 1042 - protein, 394 aa, synthetic construct
  REGION 1..394: note = Variant of terminal deoxynucleotidyl transferase
MHHHHHHGGSGHPPSNTPEGEVPSVIARKVSQYSCQRKTTLNNYNKKFTDAFEIMAENYKFKENEIACLEFKRAASLLKYLPFPVTSMKDIQGLPCIGDQVRDVIEEIIEEGESSRVKEVLNDERYKAFKQFTSVFGVGVKTSEKWFRMGLRTVEEAKASKSLKLSKMQKAGFLYYEDLASCVSKAEADAVTLIVKNTVRTFLPDALVTITGGFRRGKKMGHDIDFLITNPGPKEDDELLHKVVDLLKKQGLLLYCDIKESTFVEEQLPSRKIDAMDNFQKCFAILKLYQPGVDNSSYNTSKKSDMAEVKDWKAIRVDLVITPFEQYAYALLGWTGSKEFGRDLRRYAEHERKMILDRHGLYDRKKRIFLKAGSEEEIFAHLGLDYVEPWERNA

SEQ ID NO: 1043 - DNA, 1182 bp, synthetic construct
  misc_feature 1..1182: note = Variant of terminal deoxynucleotidyl transferase
  source 1..1182: mol_type = other DNA
atgcaccatcatcatcatcatggcggtagcggccatccgccgagcaataccccggagggggaggtgccgagcgttatcgcccgcaaggttagtcagtacagctgccagcgcaagaccacgctgaataactacaacaaaaagtttaccgacgcgctggagatcatggccgagaactacaaatttaaagagaacgaaatcgcgtgtctggaatttaagcgcgccgcgagtctgctgaaatatctgccgttcccggttaccagcatgaaagacatccaaggtctgccgtgcattggcgaccaagttcgtgacgtgatcgaggagatcatcgaagagggcgagagcagccgtgttaaagaagttctcaatgacgagcgctacaaggcctttaagcagttcaccagcgtgttcggtgtgggcgtgaaaaccagcgaaaagtggtttcgtatgggcctccgtacggttgaagaggcaaaggccagtaagagtctgaagctgagcaagatgcagaaggcgggctttctgtattacgaggatctggttagctgcgttagtaaagcggaagccgatgccgttacgctcatcgtgaagaacacggtgagtacctttctgccggatgcgctggtgaccatcacgggcggtttccgccgtggcaaaaagatgggccacgacatcgactttctgatcacgaatccgggcccgaaagaggatgacgagctgctccacaaagtggttgatctgctcaagaagcaaggtctgctgctgtactgcgacatcaaagagagcacgttcgtggaggaacaactgccaagtcgcaaaatcgacgccatggacaacttccagaagtgcttcgccattctcaagctgtaccagccgggcgtggataacagcagctataacacgagtaagaagagtgacatggccgaggttaaggattggaaagcgatccgtgtggatctggtgatcacgccattcgagcagtacgcctatgcgctgctcggttggacgggcagcaaagaatttggtcgcgatctgcgccgctatgcggagcacgagcgcaagatgatcctcgaccgtcatggcctctacgaccgcaaaaagcgcatctttctgaaagcgggcagcgaagaagagattttcgcgcatctgggtctggattatgtggagccgtgggaacgcaacgcg

SEQ ID NO: 1044 - protein, 394 aa, synthetic construct
  REGION 1..394: note = Variant of terminal deoxynucleotidyl transferase
MHHHHHHGGSGHPPSNTPEGEVPSVIARKVSQYSCQRKTTLNNYNKKFTDALEIMAENYKFKENEIACLEFKRAASLLKYLPFPVTSMKDIQGLPCIGDQVRDVIEEIIEEGESSRVKEVLNDERYKAFKQFTSVFGVGVKTSEKWFRMGLRTVEEAKASKSLKLSKMQKAGFLYYEDLVSCVSKAEADAVTLIVKNTVSTFLPDALVTITGGFRRGKKMGHDIDFLITNPGPKEDDELLHKVVDLLKKQGLLLYCDIKESTFVEEQLPSRKIDAMDNFQKCFAILKLYQPGVDNSSYNTSKKSDMAEVKDWKAIRVDLVITPFEQYAYALLGWTGSKEFGRDLRRYAEHERKMILDRHGLYDRKKRIFLKAGSEEEIFAHLGLDYVEPWERNA

SEQ ID NO: 1045 - DNA, 1182 bp, synthetic construct
  misc_feature 1..1182: note = Variant of terminal deoxynucleotidyl transferase
  source 1..1182: mol_type = other DNA
atgcaccatcatcatcatcatggcggtagcggccatccgccgagcaataccccggagggggaggtgccgagcgttatcgcccgcaaggttagtcagtacagctgccagcgcaagaccacgctgaataactacaacaaaaagtttaccgacgcgctggagatcatggccgagaactacaaatttaaagagaacgaaatcgcgtgtctggaatttaagcgcgccgcgagtctgctgaaatatctgccgttcccggttaccagcatgaaagacatccaaggtctgccgtgcattggcgaccaagttcgtgacgtgatcgaggagatcatcgaagaaggcgagagcagccgtgttaaagaagttctcaatgacgagcgctacaaggcctttaagcagttcaccagcgtgttcggtgtgggcgtgaaaaccagcgaaaagtggtttcgtatgggcctccgtacggttgaagaggcaaaggccagtaagagtctgaagctgagcaagatgcagaaggcgggctttctgtattacgaggatctggttagctgcgttagtaaagcggaagccgatgccgttacgctcatcgtgaagaacacggtgcgtacctttctgccggatgcgctggtgaccatcaccggcggtttccgccgtggcaaaaagatgggccacgacatcgactttctgatcacgaatccgggcccgaaagaggatgacgagctgctccacaaagtggttgatctgctcaagaagcaaggtctgctgctgtactgcgacatcaaagagagcacgttcgtggaggaacaactgccaagtcgcaaaatcgacgccatggacaacttccagaagtgcttcgccattctcaagctgtaccagccgggcgtggataacagcagctataacacgagtaagaagagtgacatggccgaggttaaggattggaaagcgattcgtgtggatctggtgatcacgccattcgagcagtacgcctatgcgctgctcggttggacgggcagcaaagaatttggtcgcgatctgcgccgctatgcgagtcatgagcgcaagatgatcctcgaccgtcatggcctctacgaccgcaaaaagcgcatctttctgaaagcgggcagcgaagaagagattttcgcgcatctgggtctggattatgtggagccgtgggaacgcaacgcg

SEQ ID NO: 1046 - protein, 394 aa, synthetic construct
  REGION 1..394: note = Variant of terminal deoxynucleotidyl transferase
MHHHHHHGGSGHPPSNTPEGEVPSVIARKVSQYSCQRKTTLNNYNKKFTDALEIMAENYKFKENEIACLEFKRAASLLKYLPFPVTSMKDIQGLPCIGDQVRDVIEEIIEEGESSRVKEVLNDERYKAFKQFTSVFGVGVKTSEKWFRMGLRTVEEAKASKSLKLSKMQKAGFLYYEDLVSCVSKAEADAVTLIVKNTVRTFLPDALVTITGGFRRGKKMGHDIDFLITNPGPKEDDELLHKVVDLLKKQGLLLYCDIKESTFVEEQLPSRKIDAMDNFQKCFAILKLYQPGVDNSSYNTSKKSDMAEVKDWKAIRVDLVITPFEQYAYALLGWTGSKEFGRDLRRYASHERKMILDRHGLYDRKKRIFLKAGSEEEIFAHLGLDYVEPWERNA

SEQ ID NO: 1047 - DNA, 1182 bp, synthetic construct
  misc_feature 1..1182: note = Variant of terminal deoxynucleotidyl transferase
  source 1..1182: mol_type = other DNA
atgcaccatcatcatcatcatggcggtagcggccatccgccgagcaataccccggagggggaggtgccgagcgttatcgcccgcaaggttagtcagtacagctgccagcgcaagaccacgctgaataactacaacaaaaagtttaccgacgcgttggagatcatggccgagaactacaaatttaaagagaacgaaatcgcgtgtctggaatttaagcgcgccgcgagtctgctgaaatatctgccgttcccggttaccagcatgaaagacatccaaggtctgccgtgcattggcgaccaagttcgtgacgtgatcgaggagatcatcgaagagggcgagagcagccgtgttaaagaagttctcaatgacgagcgctacaaggcctttaagcagttcaccagcgtgttcggtgtgggcgtgaaaaccagcgaaaagtggtttcgtatgggcctccgtacggttgaagaggcaaaggccagtaagagtctgaagctgagcaagatgcagaaggcgggcttcctgtattacgaggatctggcgagctgcgttagtaaagcggaagccgatgccgttacgctcatcgtgaagaacacggtgagtacctttctgccggatgcgctggtgaccatcaccggcggtttccgccgtggcaaaaagatgggccacgacatcgactttctgatcacgaatccgggcccgaaagaggatgacgagctgctccacaaagtggttgatctgctcaagaagcaaggtctgctgctgtactgcgacatcaaagagagcacgttcgtggaggaacaactgccaagtcgcaaaatcgacgccatggacaacttccagaagtgcttcgccattctcaagctgtaccagccgggcgtggataacagcagctataacacgagtaagaagagtgacatggccgaggttaaggattggaaagcgatccgtgtggatctggtgatcacgccattcgagcagtacgcctatgcgctgctcggttggacgggcagcaaagaatttggtcgcgatctgcgccgctatgcgagtcacgagcgcaagatgatcctcgaccgtcatggcctctacgaccgcaaaaagcgcatctttctgaaagcgggcagcgaagaagagattttcgcgcatctgggtctggattatgtggagccgtgggaacgcaacgcg

SEQ ID NO: 1048 - protein, 394 aa, synthetic construct
  REGION 1..394: note = Variant of terminal deoxynucleotidyl transferase
MHHHHHHGGSGHPPSNTPEGEVPSVIARKVSQYSCQRKTTLNNYNKKFTDALEIMAENYKFKENEIACLEFKRAASLLKYLPFPVTSMKDIQGLPCIGDQVRDVIEEIIEEGESSRVKEVLNDERYKAFKQFTSVFGVGVKTSEKWFRMGLRTVEEAKASKSLKLSKMQKAGFLYYEDLASCVSKAEADAVTLIVKNTVSTFLPDALVTITGGFRRGKKMGHDIDFLITNPGPKEDDELLHKVVDLLKKQGLLLYCDIKESTFVEEQLPSRKIDAMDNFQKCFAILKLYQPGVDNSSYNTSKKSDMAEVKDWKAIRVDLVITPFEQYAYALLGWTGSKEFGRDLRRYASHERKMILDRHGLYDRKKRIFLKAGSEEEIFAHLGLDYVEPWERNA

SEQ ID NO: 1049 - DNA, 1182 bp, synthetic construct
  misc_feature 1..1182: note = Variant of terminal deoxynucleotidyl transferase
  source 1..1182: mol_type = other DNA
atgcaccatcatcatcatcatggcggtagcggccatccgccgagcaataccccggagggggaggtgccgagcgttatcgcccgcaaggttagtcagtacagctgccagcgcaagaccacgctgaataactacaacaaaaagtttaccgacgcgctggagatcatggccgagaactacaaatttaaagagaacgaaatcgcgtgtctggaatttaagcgcgccgcgagtctgctgaaatatctgccgttcccggttaccagcatgaaagacatccaaggtctgccgtgcattggcgaccaagttcgtgacgtgatcgaggagatcatcgaagaaggcgagagcagccgtgttaaagaagttctcaatgacgagcgctacaaggcctttaagcagttcaccagcgtgttcggtgtgggcgtgaaaaccagcgaaaagtggtttcgtatgggcctccgtacggttgaagaggcaaaggccagtaagagtctgaagctgagcaagatgcagaaggcgggcttcctgtattacgaggatctggctagctgcgttagtaaagcggaagccgatgccgttacgctcatcgtgaagaacacggtgcgtacctttctgccggatgcgctggtgaccatcaccggcggtttccgccgtggcaaaaagatgggccacgacatcgactttctgatcacgaatccgggcccgaaagaggatgacgagctgctccacaaagtggttgatctgctcaagaagcaaggtctgctgctgtactgcgacatcaaagagagcacgttcgtggaggaacaactgccaagtcgcaaaatcgacgccatggacaacttccagaagtgcttcgccattctcaagctgtaccagccgggcgtggataacagcagctataacacgagtaagaagagtgacatggccgaggttaaggattggaaagcggttcgtgtggatctggtgatcacgccattcgagcagtacgcctatgcgctgctcggttggacgggcagcaaagaatttggtcgcgatctgcgccgctatgcggagcacgagcgcaagatgatcctcgaccgtcatggcctctacgaccgcaaaaagcgcatctttctgaaagcgggcagcgaagaagagattttcgcgcatctgggtctggattatgtggagccgtgggaacgcaacgcg

SEQ ID NO: 1050 - protein, 394 aa, synthetic construct
  REGION 1..394: note = Variant of terminal deoxynucleotidyl transferase
MHHHHHHGGSGHPPSNTPEGEVPSVIARKVSQYSCQRKTTLNNYNKKFTDALEIMAENYKFKENEIACLEFKRAASLLKYLPFPVTSMKDIQGLPCIGDQVRDVIEEIIEEGESSRVKEVLNDERYKAFKQFTSVFGVGVKTSEKWFRMGLRTVEEAKASKSLKLSKMQKAGFLYYEDLASCVSKAEADAVTLIVKNTVRTFLPDALVTITGGFRRGKKMGHDIDFLITNPGPKEDDELLHKVVDLLKKQGLLLYCDIKESTFVEEQLPSRKIDAMDNFQKCFAILKLYQPGVDNSSYNTSKKSDMAEVKDWKAVRVDLVITPFEQYAYALLGWTGSKEFGRDLRRYAEHERKMILDRHGLYDRKKRIFLKAGSEEEIFAHLGLDYVEPWERNA

SEQ ID NO: 1051 - DNA, 1182 bp, synthetic construct
  misc_feature 1..1182: note = Variant of terminal deoxynucleotidyl transferase
  source 1..1182: mol_type = other DNA
atgcaccatcatcatcatcatggcggtagcggccatccgccgagcaataccccggagggggaggtgccgagcgttatcgcccgcaaggttagtcagtacagctgccagcgcaagaccacgctgaataactacaacaaaaagtttaccgacgcgctggagatcatggccgagaactacaaatttaaagagaacgaaatcgcgtgtctggaatttaagcgcgccgcgagtctgctgaaatatctgccgttcccggttaccagcatgaaagacatccaaggtctgccgtgcattggcgaccaagttcgtgacgtgatcgaggagatcatcgaagagggcgagagcagccgtgttaaagaagttctcaatgacgagcgctacaaggcctttaagcagttcaccagcgtgttcggtgtgggcgtgaaaaccagcgaaaagtggtttcgtatgggcctccgtacggttgaagaggcaaaggccagtaagagtctgaagctgagcaagatgcagaaggcgggctttctgtattacgaggatctggcgagctgcgttagtaaagcggaagccgatgccgttacgctcatcgtgaagaacacggtgagtacctttctgccggatgcgctggtgaccatcaccggcggtttccgccgtggcaaaaagatgggccacgacatcgactttctgatcacgaatccgggcccgaaagaggatgacgagctgctccacaaagtggttgatctgctcaagaagcaaggtctgctgctgtactgcgacatcaaagagagcacgttcgtggaggaacaactgccaagtcgcaaaatcgacgccatggacaacttccagaagtgcttcgccattctcaagctgtaccagccgggcgtggataacagcagctataacacgagtaagaagagtgacatggccgaggttaaggattggaaagcggttcgtgtggatctggtgatcacgccattcgagcagtacgcctatgcgctgctcggttggacgggcagcaaagaatttggtcgcgatctgcgccgctatgcgagtcatgagcgcaagatgatcctcgaccgtcatggcctctacgaccgcaaaaagcgcatctttctgaaagcgggcagcgaagaagagattttcgcgcatctgggtctggattatgtggagccgtgggaacgcaacgcg

SEQ ID NO: 1052 - protein, 394 aa, synthetic construct
  REGION 1..394: note = Variant of terminal deoxynucleotidyl transferase
MHHHHHHGGSGHPPSNTPEGEVPSVIARKVSQYSCQRKTTLNNYNKKFTDALEIMAENYKFKENEIACLEFKRAASLLKYLPFPVTSMKDIQGLPCIGDQVRDVIEEIIEEGESSRVKEVLNDERYKAFKQFTSVFGVGVKTSEKWFRMGLRTVEEAKASKSLKLSKMQKAGFLYYEDLASCVSKAEADAVTLIVKNTVSTFLPDALVTITGGFRRGKKMGHDIDFLITNPGPKEDDELLHKVVDLLKKQGLLLYCDIKESTFVEEQLPSRKIDAMDNFQKCFAILKLYQPGVDNSSYNTSKKSDMAEVKDWKAVRVDLVITPFEQYAYALLGWTGSKEFGRDLRRYASHERKMILDRHGLYDRKKRIFLKAGSEEEIFAHLGLDYVEPWERNA

SEQ ID NO: 1053 - DNA, 1182 bp, synthetic construct
  misc_feature 1..1182: note = Variant of terminal deoxynucleotidyl transferase
  source 1..1182: mol_type = other DNA
atgcaccatcatcatcatcatggcggtagcggccatccgccgagcaataccccggagggggaggtgccgagcgttatcgcccgcaaggttagtcagtacagctgccagcgcaagaccacgctgaataactacaacaaaaagtttaccgacgcgctggagatcatggccgagaactacaaatttaaagagaacgaaatcgcgtgtctggaatttaagcgcgccgcgagtctgctgaaatatctgccgttcccggttaccagcatgaaagacatccaaggtctgccgtgcattggcgaccaagttcgtgacgtgatcgaggagatcatcgaagaaggcgagagcagccgtgttaaagaagttctcaatgacgagcgctacaaggcctttaagcagttcaccagcgtgttcggtgtgggcgtgaaaaccagcgaaaagtggtttcgtatgggcctccgtacggttgaagaggcaaaggccagtaagagtctgaagctgagcaagatgcagaaggcgggcttcctgtattacgaggatctggctagctgcgttagtaaagcggaagccgatgccgttacgctcatcgtgaagaacacggtgagtacctttctgccggatgcgctggtgaccatcacgggcggtttccgccgtggcaaaaagatgggccacgacatcgactttctgatcacgaatccgggcccgaaagaggatgacgagctgctccacaaagtggttgatctgctcaagaagcaaggtctgctgctgtactgcgacatcaaagagagcacgttcgtggaggaacaactgccaagtcgcaaaatcgacgccatggacaacttccagaagtgcttcgccattctcaagctgtaccagccgggcgtggataacagcagctataacacgagtaagaagagtgacatggccgaggttaaggattggaaagcgatccgtgtggatctggtgatcacgccattcgagcagtacgcctatgcgctgctcggttggacgggcagcaaagaatttggtcgcgatctgcgccgctatgcggagcacgagcgcaagatgatcctcgaccgtcatggcctctacgaccgcaaaaagcgcatctttctgaaagcgggcagcgaagaagagattttcgcgcatctgggtctggattatgtggagccgtgggaacgcaacgcg

SEQ ID NO: 1054 - protein, 394 aa, synthetic construct
  REGION 1..394: note = Variant of terminal deoxynucleotidyl transferase
MHHHHHHGGSGHPPSNTPEGEVPSVIARKVSQYSCQRKTTLNNYNKKFTDALEIMAENYKFKENEIACLEFKRAASLLKYLPFPVTSMKDIQGLPCIGDQVRDVIEEIIEEGESSRVKEVLNDERYKAFKQFTSVFGVGVKTSEKWFRMGLRTVEEAKASKSLKLSKMQKAGFLYYEDLASCVSKAEADAVTLIVKNTVSTFLPDALVTITGGFRRGKKMGHDIDFLITNPGPKEDDELLHKVVDLLKKQGLLLYCDIKESTFVEEQLPSRKIDAMDNFQKCFAILKLYQPGVDNSSYNTSKKSDMAEVKDWKAIRVDLVITPFEQYAYALLGWTGSKEFGRDLRRYAEHERKMILDRHGLYDRKKRIFLKAGSEEEIFAHLGLDYVEPWERNA

SEQ ID NO: 1055 - DNA, 1182 bp, synthetic construct
  misc_feature 1..1182: note = Variant of terminal deoxynucleotidyl transferase
  source 1..1182: mol_type = other DNA
atgcaccatcatcatcatcatggcggtagcggccatccgccgagcaataccccggagggggaggtgccgagcgttatcgcccgcaaggttagtcagtacagctgccagcgcaagaccacgctgaataactacaacaaaaagtttaccgacgcgctggagatcatggccgagaactacaaatttaaagagaacgaaatcgcgtgtctggaatttaagcgcgccgcgagtctgctgaaatatctgccgttcccggttaccagcatgaaagacatccaaggtctgccgtgcattggcgaccaagttcgtgacgtgatcgaggagatcatcgaagaaggcgagagcagccgtgttaaagaagttctcaatgacgagcgctacaaggcctttaagcagttcaccagcgtgttcggtgtgggcgtgaaaaccagcgaaaagtggtttcgtatgggcctccgtacggttgaagaggcaaaggccagtaagagtctgaagctgagcaagatgcagaaggcgggcttcctgtattacgaggatctggcgagctgcgttagtaaagcggaagccgatgccgttacgctcatcgtgaagaacacggtgcgtacctttctgccggatgcgctggtgaccatcaccggcggtttccgccgtggcaaaaagatgggccacgacatcgactttctgatcacgaatccgggcccgaaagaggatgacgagctgctccacaaagtggttgatctgctcaagaagcaaggtctgctgctgtactgcgacatcaaagagagcacgttcgtggaggaacaactgccaagtcgcaaaatcgacgccatggacaacttccagaagtgcttcgccattctcaagctgtaccagccgggcgtggataacagcagctataacacgagtaagaagagtgacatggccgaggttaaggattggaaagcggttcgtgtggatctggtgatcacgccattcgagcagtacgcctatgcgctgctcggttggacgggcagcaaagaatttggtcgcgatctgcgccgctatgcgagtcacgagcgcaagatgatcctcgaccgtcatggcctctacgaccgcaaaaagcgcatctttctgaaagcgggcagcgaagaagagattttcgcgcatctgggtctggattatgtggagccgtgggaacgcaacgcg

SEQ ID NO: 1056 - protein, 394 aa, synthetic construct
  REGION 1..394: note = Variant of terminal deoxynucleotidyl transferase
MHHHHHHGGSGHPPSNTPEGEVPSVIARKVSQYSCQRKTTLNNYNKKFTDALEIMAENYKFKENEIACLEFKRAASLLKYLPFPVTSMKDIQGLPCIGDQVRDVIEEIIEEGESSRVKEVLNDERYKAFKQFTSVFGVGVKTSEKWFRMGLRTVEEAKASKSLKLSKMQKAGFLYYEDLASCVSKAEADAVTLIVKNTVRTFLPDALVTITGGFRRGKKMGHDIDFLITNPGPKEDDELLHKVVDLLKKQGLLLYCDIKESTFVEEQLPSRKIDAMDNFQKCFAILKLYQPGVDNSSYNTSKKSDMAEVKDWKAVRVDLVITPFEQYAYALLGWTGSKEFGRDLRRYASHERKMILDRHGLYDRKKRIFLKAGSEEEIFAHLGLDYVEPWERNA

SEQ ID NO: 1057 - DNA, 1182 bp, synthetic construct
  misc_feature 1..1182: note = Variant of terminal deoxynucleotidyl transferase
  source 1..1182: mol_type = other DNA
atgcaccatcatcatcatcatggcggtagcggccatccgccgagcaataccccggagggggaggtgccgagcgttatcgcccgcaaggttagtcagtacagctgccagcgcaagaccacgctgaataactacaacaaaaagtttaccgacgcgctggagatcatggccgagaactacaaatttaaagagaacgaaatcgcgtgtctggaatttaagcgcgccgcgagtctgctgaaatatctgccgttcccggttaccagcatgaaagacatccaaggtctgccgtgcattggcgaccaagttcgtgacgtgatcgaggagatcatcgaagagggcgagagcagccgtgttaaagaagttctcaatgacgagcgctacaaggcctttaagcagttcaccagcgtgttcggtgtgggcgtgaaaaccagcgaaaagtggtttcgtatgggcctccgtacggttgaagaggcaaaggccagtaagagtctgaagctgagcaagatgcagaaggcgggctttctgtattacgaggatctggcgagctgcgttagtaaagcggaagccgatgccgttacgctcatcgtgaagaacacggtgcgtacctttctgccggatgcgctggtgaccatcacgggcggtttccgccgtggcaaaaagatgggccacgacatcgactttctgatcacgaatccgggcccgaaagaggatgacgagctgctccacaaagtggttgatctgctcaagaagcaaggtctgctgctgtactgcgacatcaaagagagcacgttcgtggaggaacaactgccaagtcgcaaaatcgacgccatggacaacttccagaagtgcttcgccattctcaagctgtaccagccgggcgtggataacagcagctataacacgagtaagaagagtgacatggccgaggttaaggattggaaagcgatccgtgtggatctggtgatcacgccattcgagcagtacgcctatgcgctgctcggttggacgggcagcaaagaatttggtcgcgatctgcgccgctatgcgagtcatgagcgcaagatgatcctcgaccgtcatggcctctacgaccgcaaaaagcgcatctttctgaaagcgggcagcgaagaagagattttcgcgcatctgggtctggattatgtggagccgtgggaacgcaacgcg

SEQ ID NO: 1058 - protein, 394 aa, synthetic construct
  REGION 1..394: note = Variant of terminal deoxynucleotidyl transferase
MHHHHHHGGSGHPPSNTPEGEVPSVIARKVSQYSCQRKTTLNNYNKKFTDALEIMAENYKFKENEIACLEFKRAASLLKYLPFPVTSMKDIQGLPCIGDQVRDVIEEIIEEGESSRVKEVLNDERYKAFKQFTSVFGVGVKTSEKWFRMGLRTVEEAKASKSLKLSKMQKAGFLYYEDLASCVSKAEADAVTLIVKNTVRTFLPDALVTITGGFRRGKKMGHDIDFLITNPGPKEDDELLHKVVDLLKKQGLLLYCDIKESTFVEEQLPSRKIDAMDNFQKCFAILKLYQPGVDNSSYNTSKKSDMAEVKDWKAIRVDLVITPFEQYAYALLGWTGSKEFGRDLRRYASHERKMILDRHGLYDRKKRIFLKAGSEEEIFAHLGLDYVEPWERNA

SEQ ID NO: 1059 - DNA, 1182 bp, synthetic construct
  misc_feature 1..1182: note = Variant of terminal deoxynucleotidyl transferase
  source 1..1182: mol_type = other DNA
atgcaccatcatcatcatcatggcggtagcggccatccgccgagcaataccccggagggggaggtgccgagcgttatcgcccgcaaggttagtcagtacagctgccagcgcaagaccacgctgaataactacaacaaaaagtttaccgacgcgttcgagatcatggccgagaactacaaatttaaagagaacgaaatcgcgtgtctggaatttaagcgcgccgcgagtctgctgaaatatctgccgttcccggttaccagcatgaaagacatccaaggtctgccgtgcattggcgaccaagttcgtgacgtgatcgaggagatcatcgaagaaggcgagagcagccgtgttaaagaagttctcaatgacgagcgctacaaggcctttaagcagttcaccagcgtgttcggtgtgggcgtgaaaaccagcgaaaagtggtttcgtatgggcctccgtacggttgaagaggcaaaggccagtaagagtctgaagctgagcaagatgcagaaggcgggctttctgtattacgaggatctggttagctgcgttagtaaagcggaagccgatgccgttacgctcatcgtgaagaacacggtgcgtacctttctgccggatgcgctggtgaccatcaccggcggtttccgccgtggcaaaaagatgggccacgacatcgactttctgatcacgaatccgggcccgaaagaggatgacgagctgctccacaaagtggttgatctgctcaagaagcaaggtctgctgctgtactgcgacatcaaagagagcacgttcgtggaggaacaactgccaagtcgcaaaatcgacgccatggacaacttccagaagtgcttcgccattctcaagctgtaccagccgggcgtggataacagcagctataacacgagtaagaagagtgacatggccgaggttaaggattggaaagcgatccgtgtggatctggtgatcacgccattcgagcagtacgcctatgcgctgctcggttggacgggcagcaaagaatttggtcgcgatctgcgccgctatgcgagtcatgagcgcaagatgatcctcgaccgtcatggcctctacgaccgcaaaaagcgcatctttctgaaagcgggcagcgaagaagagattttcgcgcatctgggtctggattatgtggagccgtgggaacgcaacgcg

SEQ ID NO: 1060 - protein, 394 aa, synthetic construct
  REGION 1..394: note = Variant of terminal deoxynucleotidyl transferase
MHHHHHHGGSGHPPSNTPEGEVPSVIARKVSQYSCQRKTTLNNYNKKFTDAFEIMAENYKFKENEIACLEFKRAASLLKYLPFPVTSMKDIQGLPCIGDQVRDVIEEIIEEGESSRVKEVLNDERYKAFKQFTSVFGVGVKTSEKWFRMGLRTVEEAKASKSLKLSKMQKAGFLYYEDLVSCVSKAEADAVTLIVKNTVRTFLPDALVTITGGFRRGKKMGHDIDFLITNPGPKEDDELLHKVVDLLKKQGLLLYCDIKESTFVEEQLPSRKIDAMDNFQKCFAILKLYQPGVDNSSYNTSKKSDMAEVKDWKAIRVDLVITPFEQYAYALLGWTGSKEFGRDLRRYASHERKMILDRHGLYDRKKRIFLKAGSEEEIFAHLGLDYVEPWERNA

SEQ ID NO: 1061 - DNA, 1182 bp, synthetic construct
  misc_feature 1..1182: note = Variant of terminal deoxynucleotidyl transferase
  source 1..1182: mol_type = other DNA
atgcaccatcatcatcatcatggcggtagcggccatccgccgagcaataccccggagggggaggtgccgagcgttatcgcccgcaaggttagtcagtacagctgccagcgcaagaccacgctgaataactacaacaaaaagtttaccgacgcgctgcagatcatggccgagaactacaaatttaaagagaacgaaatcgcgtgtctggaatttaagcgcgccgcgagtctgctgaaatatctgccgttcccggttaccagcatgaaagacatccaaggtctgccgtgcattggcgaccaagttcgtgatgtgatcgaggagatcatcgaagagggcgagagcagccgtgttaaagaagttctcaatgacgagcgctacaaggcctttaagcagttcaccagcgtgttcggtgtgggcgtgaaaaccagcgaaaagtggtttcgtatgggcctccgtacggttgaagaggcaaaggccagtaagagtctgaagctgagcaagatgcagaaggcgggcttcctgtattacgaggatctggcgagctgcgttagtaaagcggaagccgatgccgttacgctcatcgtgaagaacacggtgcgtacctttctgccggatgcgctggtgaccatcaccggcggtttccgccgtggcaaacctatgggccacgacatcgactttctgatcacgaatccgggcccgaaagaggatgacgagctgctccacaaagtggttgatctgctcaagaagcaaggtctgctgctgtactgcgacatcaaagagagcacgttcgtggaggaacaactgccaagtcgcaaaatcgacgccatggacaacttccagaagtgcttcgccattctcaagctgtaccagccgggcgtggataacagcagctataacacgagtaagaagagtgacatggccgaggttaaggattggaaagcgattcgtgtggatctggtgatcacgccattcgagcagtacgcctatgcgctgctcggttggacgggcagcaaagaatttggtcgcgatctgcgccgctatgcggaggaagagcgcaagatgatcctcgacaaccatggcctctacgaccgcaaaaagcgcatctttctgaaagcgggcagcgaagaagagattttcgcgcatctgggtctggattatgtggagccgtgggaacgcaacgcg

SEQ ID NO: 1062 - protein, 394 aa, synthetic construct
  REGION 1..394: note = Variant of terminal deoxynucleotidyl transferase
MHHHHHHGGSGHPPSNTPEGEVPSVIARKVSQYSCQRKTTLNNYNKKFTDALQIMAENYKFKENEIACLEFKRAASLLKYLPFPVTSMKDIQGLPCIGDQVRDVIEEIIEEGESSRVKEVLNDERYKAFKQFTSVFGVGVKTSEKWFRMGLRTVEEAKASKSLKLSKMQKAGFLYYEDLASCVSKAEADAVTLIVKNTVRTFLPDALVTITGGFRRGKPMGHDIDFLITNPGPKEDDELLHKVVDLLKKQGLLLYCDIKESTFVEEQLPSRKIDAMDNFQKCFAILKLYQPGVDNSSYNTSKKSDMAEVKDWKAIRVDLVITPFEQYAYALLGWTGSKEFGRDLRRYAEEERKMILDNHGLYDRKKRIFLKAGSEEEIFAHLGLDYVEPWERNA

SEQ ID NO: 1063 - DNA, 1182 bp, synthetic construct
  misc_feature 1..1182: note = Variant of terminal deoxynucleotidyl transferase
  source 1..1182: mol_type = other DNA
atgcaccatcatcatcatcatggcggtagcggccatccgccgagcaataccccggagggggaggtgccgagcgttatcgcccgcaaggttagtcagtacagctgccagcgcaagaccacgctgaataactacaacaaaaagtttaccgacgcgctggagatcctggccgagaactacaaatttaaagagaacgaaatcgcgtgtctggaatttaagcgcgccgcgagtctgctgaaatatctgccgttcccggttaccagcatgaaagacatccaaggtctgccgtgcattggcgaccaagttcgtgatgtgatcgaggagatcatcgaagagggcgagagcagccgtgttaaagaagttctcaatgacgagcgctacaaggcctttaagcagttcaccagcgtgttcggtgtgggcgtgaaaaccagcgaaaagtggtttcgtatgggcctccgtacggttgaagaggcaaaggccagtaagagtctgaagctgagcaagatgcagaaggcgggcttcctgtattacgaggatctggcgagctgcgttagtaaagcggaagccgatgccgttacgctcatcgtgaagaacacggtgcgtacctttctgccggatgcgctggtgaccatcaccggcggtttccgccgtggcaaacctatgggccacgacatcgactttctgatcacgaatccgggcccgaaagaggatgacgagctgctccacaaagtggttgatgggctcaagaagcaaggtctgctgctgtactgcgacatcaaagagagcacgttcgtggaggaacaactgccaagtcgcaaaatcgacgccatggacaacttccagaagtgcttcgccattctcaagctgtaccagccgggcgtggataacagcagctataacacgagtaagaagagtgacatggccgaggttaaggattggaaagcgattcgtgtggatctggtgatcacgccattcgagcagtacgcctatgcgctgctcggttggacgggcagcaaagaatttggtcgcgatctgcgccgctatgcggaggaagagcgcaagatgatcctcgacaaccatggcctctacgaccgcaaaaagcgcatctttctgaaagcgggcagcgaagaagagattttcgcgcatctgggtctggattatgtggagccgtgggaacgcaacgcg

SEQ ID NO: 1064 - protein, 394 aa, synthetic construct
  REGION 1..394: note = Variant of terminal deoxynucleotidyl transferase
MHHHHHHGGSGHPPSNTPEGEVPSVIARKVSQYSCQRKTTLNNYNKKFTDALEILAENYKFKENEIACLEFKRAASLLKYLPFPVTSMKDIQGLPCIGDQVRDVIEEIIEEGESSRVKEVLNDERYKAFKQFTSVFGVGVKTSEKWFRMGLRTVEEAKASKSLKLSKMQKAGFLYYEDLASCVSKAEADAVTLIVKNTVRTFLPDALVTITGGFRRGKPMGHDIDFLITNPGPKEDDELLHKVVDGLKKQGLLLYCDIKESTFVEEQLPSRKIDAMDNFQKCFAILKLYQPGVDNSSYNTSKKSDMAEVKDWKAIRVDLVITPFEQYAYALLGWTGSKEFGRDLRRYAEEERKMILDNHGLYDRKKRIFLKAGSEEEIFAHLGLDYVEPWERNA

SEQ ID NO: 1065 - DNA, 1182 bp, synthetic construct
  misc_feature 1..1182: note = Variant of terminal deoxynucleotidyl transferase
  source 1..1182: mol_type = other DNA
atgcaccatcatcatcatcatggcggtagcggccatccgccgagcaataccccggagggggaggtgccgagcgttatcgcccgcaaggttagtcagtacagctgccagcgcaagaccacgctgaataactacaacaaaaagtttaccgacgcgctggagatcatggccgagaactacaaatttaaagagaacgaaatcgcgtgtctggaatttaagcgcgccgcgagtctgctgaaatatctgccgttcccggttaccagcatgaaagacatccaaggtctgccgtgcattggcgaccaagttcgtgacgtgatcgaggagatcatcgaagagggcgagagcagccgtgttaaagaagttctcaatgacgagcgctacaaggcctttaagcagttcaccagcgtgttcggtgtgggcgtgaaaaccagcgaaaagtggtttcgtatgggcctccgtacggttgaagaggcaaaggccagtaagagtctgaagctgagcaagatgcagaaggcgggcttcctgtattacgaggatctggcgagctgcgttagtaaagcggaagccgatgccgttacgctcatcgtgaagaacacggtgcgtacctttctgccggatgcgctggtgaccatcaccggcggtttccgccgtggcaaacctatgggccacgacatcgactttctgatcacgaatccgggcccgaaagaggatgacgagctgctccacaaagtggttgatctgctcaagaagcaaggtctgctgctgtactgcgacatcaaagagagcacgttcgtggaggaacaactgccaagtcgcaaaatcgacgccatggacaacttccagaagtgcttcgccattctcaagctgtaccagccgggcgtggataacagcagctataacacgagtaagaagagtgacatggccgaggttaaggattggaaagcgattcgtgtggatctggtgatcacgccattcgagcagtacgcctatgcgctgctcggttggacgggcagcaaagaatttggtcgcgatctgcgccgctatgcggaggaagagcgcaagatgatcctcgacaaccatggcctctacgaccgcaaaaagcgcatctttctgaaagcgggcagcgaagaagagattttcgcgcatctgggtctggattatgtggagccgtgggaacgcaacgcg

SEQ ID NO: 1066 - protein, 394 aa, synthetic construct
  REGION 1..394: note = Variant of terminal deoxynucleotidyl transferase
MHHHHHHGGSGHPPSNTPEGEVPSVIARKVSQYSCQRKTTLNNYNKKFTDALEIMAENYKFKENEIACLEFKRAASLLKYLPFPVTSMKDIQGLPCIGDQVRDVIEEIIEEGESSRVKEVLNDERYKAFKQFTSVFGVGVKTSEKWFRMGLRTVEEAKASKSLKLSKMQKAGFLYYEDLASCVSKAEADAVTLIVKNTVRTFLPDALVTITGGFRRGKPMGHDIDFLITNPGPKEDDELLHKVVDLLKKQGLLLYCDIKESTFVEEQLPSRKIDAMDNFQKCFAILKLYQPGVDNSSYNTSKKSDMAEVKDWKAIRVDLVITPFEQYAYALLGWTGSKEFGRDLRRYAEEERKMILDNHGLYDRKKRIFLKAGSEEEIFAHLGLDYVEPWERNA

SEQ ID NO: 1067 - DNA, 1182 bp, synthetic construct
  misc_feature 1..1182: note = Variant of terminal deoxynucleotidyl transferase
  source 1..1182: mol_type = other DNA
atgcaccatcatcatcatcatggcggtagcggccatccgccgagcaataccccggagggggaggtgccgagcgttatcgcccgcaaggttagtcagtacagctgccagcgcaagaccacgctgaataactacaacaaaaagtttaccgacgcgctggagatcatggccgagaactacaaatttaaagagaacgaaatcgcgtgtctggaatttaagcgcgccgcgagtctgctgaaatatctgccgttcccggttaccagcatgaaagacatccaaggtctgccgtgcattggcgaccaagttcgtgatgtgatcgaggagatcatcgaagagggcgagagcagccgtgttaaagaagttctcaatgacgagcgctacaaggcctttaagcagttcaccagcgtgttcggtgtgggcgtgaaaaccagcgaaaagtggtttcgtatgggcctccgtacggttgaagaggcaaaggccagtaagagtctgaagctgagcaagatgcagaaggcgggcttcctgtattacgaggatctggcgagctgcgttagtaaagcggaagccgatgccgttacgctcatcgtgaagaacacggtgcgtacctttctgccggatgcgctggtgaccatcaccggcggtttccgccgtggcaaaaagatgggccacgacatcgactttctgatcacgaatccgggcccgaaagaggatgacgagctgctccacaaagtggttgatctgctcaagaagcaaggtctgctgctgtactgcgacatcaaagagagcacgttcgtggaggaacaactgccaagtcgcaaaatcgacgccatggacaacttccagaagtgcttcgccattctcaagctgtaccagccgggcgtggataacagcagctataacacgagtaagaagagtgacatggccgaggttaaggattggaaagcgattcgtgtggatctggtgatcacgccattcgagcagtacgcctatgcgctgctcggttggacgggcagcaaagaatttggtcgcgatctgcgccgctatgcggaggaagagcgcaagatgatcctcgacaaccatggcctctacgaccgcaaaaagcgcatctttctgaaagcgggcagcgaagaagagattttcgcgcatctgggtctggattatgtggagccgtgggaacgcaacgcg

SEQ ID NO: 1068 - protein, 394 aa, synthetic construct
  REGION 1..394: note = Variant of terminal deoxynucleotidyl transferase
MHHHHHHGGSGHPPSNTPEGEVPSVIARKVSQYSCQRKTTLNNYNKKFTDALEIMAENYKFKENEIACLEFKRAASLLKYLPFPVTSMKDIQGLPCIGDQVRDVIEEIIEEGESSRVKEVLNDERYKAFKQFTSVFGVGVKTSEKWFRMGLRTVEEAKASKSLKLSKMQKAGFLYYEDLASCVSKAEADAVTLIVKNTVRTFLPDALVTITGGFRRGKKMGHDIDFLITNPGPKEDDELLHKVVDLLKKQGLLLYCDIKESTFVEEQLPSRKIDAMDNFQKCFAILKLYQPGVDNSSYNTSKKSDMAEVKDWKAIRVDLVITPFEQYAYALLGWTGSKEFGRDLRRYAEEERKMILDNHGLYDRKKRIFLKAGSEEEIFAHLGLDYVEPWERNA

SEQ ID NO: 1069 - DNA, 1182 bp, synthetic construct
  misc_feature 1..1182: note = Variant of terminal deoxynucleotidyl transferase
  source 1..1182: mol_type = other DNA
atgcaccatcatcatcatcatggcggtagcggccatccgccgagcaataccccggagggggaggtgccgagcgttatcgcccgcaaggttagtcagtacagctgccagcgcaagaccacgctgaataactacaacaaaaagtttaccgacgcgctggagatcctggccgagaactacaaatttaaagagaacgaaatcgcgtgtctggaatttaagcgcgccgcgagtctgctgaaatatctgccgttcccggttaccagcatgaaagacatccaaggtctgccgtgcattggccctcaagttcgtgatgtgatcgaggagatcatcgaagagggcgagagcagccgtgttaaagaagttctcaatgacgagcgctacaaggcctttaagcagttcaccagcgtgttcggtgtgggcgtgaaaaccagcgaaaagtggtttcgtatgggcctccgtacggttgaagaggcaaaggccagtaagagtctgaagctgagcaagatgcagaaggcgggcttcctgtattacgaggatctggcgagctgcgttagtaaagcggaagccgatgccgttacgctcatcgtgaagaacacggtgcgtacctttctgccggatgcgctggtgaccatcaccggcggtttccgccgtggcaaacctatgggccacgacatcgactttctgatcacgaatccgggcccgaaagaggatgacgagctgctccacaaagtggttgatctgctcaagaagcaaggtctgctgctgtactgcgacatcaaagagagcacgttcgtggaggaacaactgccaagtcgcaaaatcgacgccatggacaacttccagaagtgcttcgccattctcaagctgtaccagccgggcgtggataacagcagctataacacgagtaagaagagtgacatggccgaggttaaggattggaaagcgattcgtgtggatctggtgatcacgccattcgagcagtacgcctatgcgctgctcggttggacgggcagcaaagaatttggtcgcgatctgcgccgctatgcggaggaagagcgcaagatgatcctcgacaaccatggcctctacgaccgcaaaaagcgcatctttctgaaagcggacagcgaagaagagattttcgcgcatctgggtctggattatgtggagccgtgggaacgcaacgcg

SEQ ID NO: 1070 - protein, 394 aa, synthetic construct
  REGION 1..394: note = Variant of terminal deoxynucleotidyl transferase
MHHHHHHGGSGHPPSNTPEGEVPSVIARKVSQYSCQRKTTLNNYNKKFTDALEILAENYKFKENEIACLEFKRAASLLKYLPFPVTSMKDIQGLPCIGPQVRDVIEEIIEEGESSRVKEVLNDERYKAFKQFTSVFGVGVKTSEKWFRMGLRTVEEAKASKSLKLSKMQKAGFLYYEDLASCVSKAEADAVTLIVKNTVRTFLPDALVTITGGFRRGKPMGHDIDFLITNPGPKEDDELLHKVVDLLKKQGLLLYCDIKESTFVEEQLPSRKIDAMDNFQKCFAILKLYQPGVDNSSYNTSKKSDMAEVKDWKAIRVDLVITPFEQYAYALLGWTGSKEFGRDLRRYAEEERKMILDNHGLYDRKKRIFLKADSEEEIFAHLGLDYVEPWERNA

SEQ ID NO: 1071 - DNA, 1182 bp, synthetic construct
  misc_feature 1..1182: note = Variant of terminal deoxynucleotidyl transferase
  source 1..1182: mol_type = other DNA
atgcaccatcatcatcatcatggcggtagcggccatccgccgagcaataccccggagggggaggtgccgagcgttatcgcccgcaaggttagtcagtacagctgccagcgcaagaccacgctgaataactacaacaaaaagtttaccgacgcgctggagatcatggccgagaactacaaatttaaagagaacgaaatcgcgtgtctggaatttaagcgcgccgcgagtctgctgaaatatctgccgttcccggttaccagcatgaaagacatccaaggtctgccgtgcattggcgaccaagttcgtgctgtgatcgaggagatcatcgaagagggcgagagcagccgtgttaaagaagttctcaatgacgagcgctacaaggcctttaagcagttcaccagcgtgttcggtgtgggcgtgaaaaccagcgaaaagtggtttcgtatgggcctccgtacggttgaagaggcaaaggccagtaagagtctgaagctgagcaagatgcagaaggcgggcttcctgtattacgaggatctggcgagctgcgttagtaaagcggaagccgatgccgttacgctcatcgtgaagaacacggtgcgtacctttctgccggatgcgctggtgaccatcaccggcggtttccgccgtggcaaacctatgggccacgacatcgactttctgatcacgaatccgggcccgaaagaggatgacgagctgctccacaaagtggttgatctgctcaagaagcaaggtctgctgctgtactgcgacatcaaagagagcacgttcgtggaggaacaactgccaagtcgcaaaatcgacgccatggacaacttccagaagtgcttcgccattctcaagctgtaccagccgggcgtggataacagcagctataacacgagtaagaagagtgacatggccgaggttaaggattggaaagcgattcgtgtggatctggtgatcacgccattcgagcagtacgcctatgcgctgctcggttggacgggcagccgtgaatttggtcgcgatctgcgccgctatgcggaggaagagcgcaagatgatcctcgacaaccatggcctctacgaccgcaaaaagcgcatctttctgaaagcgggcagcgaagaagagattttcgcgcatctgggtctggattatgtggagccgtgggaacgcaacgcg

SEQ ID NO: 1072 - protein, 394 aa, synthetic construct
  REGION 1..394: note = Variant of terminal deoxynucleotidyl transferase
MHHHHHHGGSGHPPSNTPEGEVPSVIARKVSQYSCQRKTTLNNYNKKFTDALEIMAENYKFKENEIACLEFKRAASLLKYLPFPVTSMKDIQGLPCIGDQVRAVIEEIIEEGESSRVKEVLNDERYKAFKQFTSVFGVGVKTSEKWFRMGLRTVEEAKASKSLKLSKMQKAGFLYYEDLASCVSKAEADAVTLIVKNTVRTFLPDALVTITGGFRRGKPMGHDIDFLITNPGPKEDDELLHKVVDLLKKQGLLLYCDIKESTFVEEQLPSRKIDAMDNFQKCFAILKLYQPGVDNSSYNTSKKSDMAEVKDWKAIRVDLVITPFEQYAYALLGWTGSREFGRDLRRYAEEERKMILDNHGLYDRKKRIFLKAGSEEEIFAHLGLDYVEPWERNA

SEQ ID NO: 1073 - DNA, 1182 bp, synthetic construct
  misc_feature 1..1182: note = Variant of terminal deoxynucleotidyl transferase
  source 1..1182: mol_type = other DNA
atgcaccatcatcatcatcatggcggtagcggccatccgccgagcaataccccggagggggaggtgccgagcgttatcgcccgcaaggttagtcagtacagctgccagcgcaagaccacgctgaataactacaacaaaaagtttaccgacgcgctggagatcatggccgagaactacaaatttaaagagaacgaaatcgcgtgtctggaatttaagcgcgccgcgagtctgctgaaatatctgccgttcccggttaccagcatgaaagacatccaaggtctgccgtgcattggcgaccaagttcgtgacgtgatcgaggagatcatcgaaactggcgagagcagccgtgttaaagaagttctcaatgacgagcgctacaaggcctttaagcagttcaccagcgtgttcggtgtgggcgtgaaaaccagcgaaaagtggtttcgtatgggcctccgtacggttgaagaggcaaaggccagtaagagtctgaagctgagcaagatgcagaaggcgggcctgctgtattacgaggatctggcgagctgcgttagtaaagcggaagccgatgccgttacgctcatcgtgaagaacacggtgcgtacctttctgccggatgcgctggtgaccatcaccggcggtttccgccgtggcaaaaagatgggccacgacatcgactttctgatcacgaatccgggcccgaaagaggatgacgagctgctccacaaagtggttgatctgctcaagaagcaaggtctgctgctgtactgcgacatcaaagagagcacgttcgtggaggaacaactgccaagtcgcaaaatcgacgccatggacaacttccagaagtgcttcgccattctcaagctgtaccagccgggcgtggataacagcagctataacacgagtaagaagagtgacatggccgaggttaaggattggaaagcgatccgtgtggatctggtgatcacgccattcgagcagtacgcctatgcgctgctcggttggacgggcagcaaagaatttggtcgcgatctgcgccgctatgcggaggaagagcgcaagatgatcctcgaccgtcatggcctctacgaccgcaaaaagcgcatctttctgaaagcgggcagcgaagaagagattttcgcgcatctgggtctggattatgtggagccgtgggaacgcaacgcg

SEQ ID NO: 1074 - protein, 394 aa, synthetic construct
  REGION 1..394: note = Variant of terminal deoxynucleotidyl transferase
MHHHHHHGGSGHPPSNTPEGEVPSVIARKVSQYSCQRKTTLNNYNKKFTDALEIMAENYKFKENEIACLEFKRAASLLKYLPFPVTSMKDIQGLPCIGDQVRDVIEEIIETGESSRVKEVLNDERYKAFKQFTSVFGVGVKTSEKWFRMGLRTVEEAKASKSLKLSKMQKAGLLYYEDLASCVSKAEADAVTLIVKNTVRTFLPDALVTITGGFRRGKKMGHDIDFLITNPGPKEDDELLHKVVDLLKKQGLLLYCDIKESTFVEEQLPSRKIDAMDNFQKCFAILKLYQPGVDNSSYNTSKKSDMAEVKDWKAIRVDLVITPFEQYAYALLGWTGSKEFGRDLRRYAEEERKMILDRHGLYDRKKRIFLKAGSEEEIFAHLGLDYVEPWERNA

SEQ ID NO: 1075 - DNA, 1182 bp, synthetic construct
  misc_feature 1..1182: note = Variant of terminal deoxynucleotidyl transferase
  source 1..1182: mol_type = other DNA
atgcaccatcatcatcatcatggcggtagcggccatccgccgagcaataccccggagggggaggtgccgagcgttatcgcccgcaaggttagtcagtacagctgccagcgcaagaccacgctgaataactacaacaaaaagtttaccgacgcgctggagatcatggccgagaactacaaatttaaagagaacgaaatcgcgtgtctggaatttaagcgcgccgcgagtctgctgaaatatctgccgttcccggttaccagcatgaaagacatccaaggtctgccgtgcattggcgaccaagttcgtgacgtgatcgaggagatcatcgaaactggcgagagcagccgtgttaaagaagttctcaatgacgagcgctacaaggcctttaagcagttcaccagcgtgttcggtgtgggcgtgaaaaccagcgaaaagtggtttcgtatgggcctccgtacggttgaagaggcaaaggccagtaagagtctgaagctgagcaagatgcagaaggcgggcctgctgtattacgaggatctggcgagctgcgttagtaaagcggaagccgatgccgttacgctcatcgtgaagaacacggtgcgtacctttctgccggatgcgctggtgaccatcaccggcggtttccgccgtggcaaaaagatgggccacgacatcgactttctgatcacgaatccgggcccgaaacaggatgacgagctgctccacaaagtggttgatctgctcaagaagcaaggtctgctgctgtactgcgacatcaaagagagcacgttcgtggaggaacaactgccaagtcgcaaaatcgacgccatggacaacttccagaagtgcttcgccattctcaagctgtaccagccgggcgtggataacagcagctataacacgagtaagaagagtgacatggccgaggttaaggattggaaagcggtccgtgtggatctggtgatcacgccattcgagcagtacgcctatgcgctgctcggttggacgggcagcaaagaatttggtcgcgatctgcgccgctatgcggaggaagagcgcaagatgatcctcgaccgtcatggcctctacgaccgcaaaaagcgcatctttctgaaagcgggcagcgaagaagagattttcgcgcatctgggtctggattatgtggagccgtgggaacgcaacgcg

SEQ ID NO: 1076 - protein, 394 aa, synthetic construct
  REGION 1..394: note = Variant of terminal deoxynucleotidyl transferase
MHHHHHHGGSGHPPSNTPEGEVPSVIARKVSQYSCQRKTTLNNYNKKFTDALEIMAENYKFKENEIACLEFKRAASLLKYLPFPVTSMKDIQGLPCIGDQVRDVIEEIIETGESSRVKEVLNDERYKAFKQFTSVFGVGVKTSEKWFRMGLRTVEEAKASKSLKLSKMQKAGLLYYEDLASCVSKAEADAVTLIVKNTVRTFLPDALVTITGGFRRGKKMGHDIDFLITNPGPKQDDELLHKVVDLLKKQGLLLYCDIKESTFVEEQLPSRKIDAMDNFQKCFAILKLYQPGVDNSSYNTSKKSDMAEVKDWKAVRVDLVITPFEQYAYALLGWTGSKEFGRDLRRYAEEERKMILDRHGLYDRKKRIFLKAGSEEEIFAHLGLDYVEPWERNA

SEQ ID NO: 1077 - DNA, 1182 bp, synthetic construct
  misc_feature 1..1182: note = Variant of terminal deoxynucleotidyl transferase
  source 1..1182: mol_type = other DNA
atgcaccatcatcatcatcatggcggtagcggccatccgccgagcaataccccggagggggaggtgccgagcgttatcgcccgcaaggttagtcagtacagctgccagcgcaagaccacgctgaataactacaacaaaaagtttaccgacgcgctggagatcctggccgagaactacaaatttaaagagaacgaaatcgcgtgtctggaatttaagcgcgccgcgagtctgctgaaatatctgccgttcccggttaccagcatgaaagacatccaaggtctgccgtgcattggcgaccaagttcgtgatgtgatcgaggagatcatcgaagagggcgagagcagccgtgttaaagaagttctcaatgacgagcgctacaaggcctttaagcagttcaccagcgtgttcggtgtgggcgtgaaaaccagcgaaaagtggtttcgtatgggcctccgtacggttgaagaggcaaaggccagtaagagtctgaagctgagcaagatgcagaaggcgggcttcctgtattacgaggatctggcgagctgcgttagtaaagcggaagccgatgccgttacgctcatcgtgaagaacacggtgcgtacctttctgccggatgcgctggtgaccatcaccggcggtttccgccgtggcaaacctatgggccacgacatcgactttctgatcacgaatccgggcccgaaagaggatgacgagctgctccacaaagtggttgatctgctcaagaagcaaggtctgctgctgtacggcgacatcaaagagagcacgttcgtggaggaacaactgccaagtcgcaaaatcgacgccatggacaacttccagaagtgcttcgccattctcaagctgtaccagccgggcgtggataacagcagctataacacgagtaagaagagtgacatggccgaggttaaggattggaaagcgattcgtgtggatctggtgatcacgccattcgagcagtacgcctatgcgctgctcggttggacgggcagccgtgaatttggtcgcgatctgcgccgctatgcggaggaagagcgcaagatgatcctcgaccgtcatggcctctacgaccgcaaaaagcgcatctttctgaaagcgggcagcgaagaagagattttcgcgcatctgggtctggattatgtggagccgtgggaacgcaacgcg

SEQ ID NO: 1078 - protein, 394 aa, synthetic construct
  REGION 1..394: note = Variant of terminal deoxynucleotidyl transferase
MHHHHHHGGSGHPPSNTPEGEVPSVIARKVSQYSCQRKTTLNNYNKKFTDALEILAENYKFKENEIACLEFKRAASLLKYLPFPVTSMKDIQGLPCIGDQVRDVIEEIIEEGESSRVKEVLNDERYKAFKQFTSVFGVGVKTSEKWFRMGLRTVEEAKASKSLKLSKMQKAGFLYYEDLASCVSKAEADAVTLIVKNTVRTFLPDALVTITGGFRRGKPMGHDIDFLITNPGPKEDDELLHKVVDLLKKQGLLLYGDIKESTFVEEQLPSRKIDAMDNFQKCFAILKLYQPGVDNSSYNTSKKSDMAEVKDWKAIRVDLVITPFEQYAYALLGWTGSREFGRDLRRYAEEERKMILDRHGLYDRKKRIFLKAGSEEEIFAHLGLDYVEPWERNA

SEQ ID NO: 1079 - DNA, 1182 bp, synthetic construct
  misc_feature 1..1182: note = Variant of terminal deoxynucleotidyl transferase
  source 1..1182: mol_type = other DNA
atgcaccatcatcatcatcatggcggtagcggccatccgccgagcaataccccggagggggaggtgccgagcgttatcgcccgcaaggttagtcagtacagctgccagcgcaagaccacgctgaataactacaacaaaaagtttaccgacgcgctggagatcctggccgagaactacaaatttaaagagaacgaaatcgcgtgtctggaatttaagcgcgccgcgagtctgctgaaatatctgccgttcccggttaccagcatgaaagacatccaaggtctgccgtgcattggcgaccaagttcgtgatgtgatcgaggagatcatcgaagagggcgagagcagccgtgttaaagaagttctcaatgacgagcgctacaaggcctttaagcagttcaccagcgtgttcggtgtgggcgtgaaaaccagcgaaaagtggtttcgtatgggcctccgtacggttgaagaggcaaaggccagtaagagtctgaagctgagcaagatgcagaaggcgggcttcctgtattacgaggatctggcgcgctgcgttagtaaagcggaagccgatgccgttacgctcatcgtgaagaacacggtgcgtacctttctgccggatgcgctggtgaccatcaccggcggtttccgccgtggcaaaaagatgggccacgacatcgactttctgatcacgaatccgggcccgaaagaggatgacgagctgctccacaaagtggttgatctgctcaagaagcaaggtctgctgctgtactgcgacatcaaagagagcacgttcgtggaggaacaactgccaagtcgcaaaatcgacgccatggacaacttccagaagtgcttcgccattctcaagctgtaccagccgggcgtggataacagcagctataacacgagtaagaagagtgacatggccgaggttaaggattggaaagcgattcgtgtggatctggtgatcacgccattcgagcagtacgcctatgcgctgctcggttggacgggcagcaaagaatttggtcgcgatctgcgccgctatgcggaggaagagcgcaagatgatcctcgacaaccatggcctctacgaccgcaaaaagcgcatctttctgaaagcgggcagcgaagaagagattttcgcgcatctgggtctggattatgtggagccgtgggaacgcaacgcg

SEQ ID NO: 1080 - protein, 394 aa, synthetic construct
  REGION 1..394: note = Variant of terminal deoxynucleotidyl transferase
MHHHHHHGGSGHPPSNTPEGEVPSVIARKVSQYSCQRKTTLNNYNKKFTDALEILAENYKFKENEIACLEFKRAASLLKYLPFPVTSMKDIQGLPCIGDQVRDVIEEIIEEGESSRVKEVLNDERYKAFKQFTSVFGVGVKTSEKWFRMGLRTVEEAKASKSLKLSKMQKAGFLYYEDLARCVSKAEADAVTLIVKNTVRTFLPDALVTITGGFRRGKKMGHDIDFLITNPGPKEDDELLHKVVDLLKKQGLLLYCDIKESTFVEEQLPSRKIDAMDNFQKCFAILKLYQPGVDNSSYNTSKKSDMAEVKDWKAIRVDLVITPFEQYAYALLGWTGSKEFGRDLRRYAEEERKMILDNHGLYDRKKRIFLKAGSEEEIFAHLGLDYVEPWERNA

SEQ ID NO: 1081 - DNA, 1182 bp, synthetic construct
  misc_feature 1..1182: note = Variant of terminal deoxynucleotidyl transferase
  source 1..1182: mol_type = other DNA
atgcaccatcatcatcatcatggcggtagcggccatccgccgagcaataccccggagggggaggtgccgagcgttatcgcccgcaaggttagtcagtacagctgccagcgcaagaccacgctgaataactacaacaaaaagtttaccgacgcgctggagatcctggccgagaactacaaatttaaagagaacgaaatcgcgtgtctggaatttaagcgcgccgcgagtctgctgaaatatctgccgttcccggttaccagcatgaaagacatccaaggtctgccgtgcattggcgaccaagttcgtgatgtgatcgaggagatcatcgaagagggcgagagcagccgtgttaaagaagttctcaatgacgagcgctacaaggcctttaagcagttcaccagcgtgttcggtgtgggcgtgaaaaccagcgaaaagtggtttcgtatgggcctccgtacggttgaagaggcaaaggccagtaagagtctgaagctgagcaagatgcagaaggcgggcttcctgtattacgaggatctggcgagctgcgttagtaaagcggaagccgatgccgttacgctcatcgtgaagaacacggtgcgtacctttctgccggatgcgctggtgaccatcaccggcggtttccgccgtggcaaaaagatgggccacgacatcgactttctgatcacgaatccgggcccgaaagaggatgacgagctgctccacaaagtggttgatctgctcaagaagcaaggtctgctgctgtactgcgacatcaaagagagcacgttcgtggaggaacaactgccaagtcgcaaaatcgacgccatggacaacttccagaagtgcttcgccattctcaagctgtaccagccgggcgtggataacagcagctataacacgagtaagaagagtgacatggccgaggttaaggattggaaagcgattcgtgtggatctggtgatcacgccattcgagcagtacgcctatgcgctgctcggttggacgggcagcaaagaatttggtcgcgatctgcgccgctatgcggaggaagagcgcaagatgatcctcgaccgtcatggcctctacgaccgcaaaaagcgcatctttctgaaagcgggcagcgaagaagagattttcgcgcatctgggtctggattatgtggagccgtgggaacgcaacgcg

SEQ ID NO: 1082 - protein, 394 aa, synthetic construct
  REGION 1..394: note = Variant of terminal deoxynucleotidyl transferase
MHHHHHHGGSGHPPSNTPEGEVPSVIARKVSQYSCQRKTTLNNYNKKFTDALEILAENYKFKENEIACLEFKRAASLLKYLPFPVTSMKDIQGLPCIGDQVRDVIEEIIEEGESSRVKEVLNDERYKAFKQFTSVFGVGVKTSEKWFRMGLRTVEEAKASKSLKLSKMQKAGFLYYEDLASCVSKAEADAVTLIVKNTVRTFLPDALVTITGGFRRGKKMGHDIDFLITNPGPKEDDELLHKVVDLLKKQGLLLYCDIKESTFVEEQLPSRKIDAMDNFQKCFAILKLYQPGVDNSSYNTSKKSDMAEVKDWKAIRVDLVITPFEQYAYALLGWTGSKEFGRDLRRYAEEERKMILDRHGLYDRKKRIFLKAGSEEEIFAHLGLDYVEPWERNA

SEQ ID NO: 1083 - DNA, 1182 bp, synthetic construct
  misc_feature 1..1182: note = Variant of terminal deoxynucleotidyl transferase
  source 1..1182: mol_type = other DNA
atgcaccatcatcatcatcatggcggtagcggccatccgccgagcaataccccggagggggaggtgccgagcgttatcgcccgcaaggttagtcagtacagctgccagcgcaagaccacgctgaataactacaacaaaaagtttaccgacgcgctggagatcatggccgagaactacaaatttaaagagaacgaaatcgcgtgtctggaatttaagcgcgccgcgagtctgctgaaatatctgccgttcccggttaccagcatgaaagacatccaaggtctgccgtgcattggcgaccaagttcgtgacgtgatcgaggagatcatcgaagagggcgagagcagccgtgttaaagaagttctcaatgacgagcgctacaaggcctttaagcagttcaccagcgtgttcggtgtgggcgtgaaaaccagcgaaaagtggtttcgtatgggcctccgtacggttgaagaggcaaaggccagtaagagtctgaagctgagcaagatgcagaaggcgggcctgctgtattacgaggatctggcgagctgcgttagtaaagcggaagccgatgccgttacgctcatcgtgaagaacacggtgcgcacctttctgccggatgcgctggtgaccatcaccggcggtttccgccgtggcaaaaagatgggccacgacatcgactttctgatcacgaatccgggcccgaaagaggatgacgagctgctccacaaagtggttgatctgctcaagaagcaaggtctgctgctgtactgcgacatcaaagagagcacgttcgtggaggaacaactgccaagtcgcaaaatcgacgccatggacaacttccagaagtgcttcgccattctcaagctgtaccagccgggcgtggataatagcgcgtataacacgagtaagaagagtgacatggccgaggttaaggattggaaagcgatccgtgtggatctggtgatcacgccattcgagcagtacgcctatgcgctgctcggttggacgggcagcaaagaatttggtcgcgatctgcgccgctatgcggaggaagagcgcaagatgatcctcgaccgtcatggcctctacgaccgcaaaaagcgcatctttctgaaagcgggcagcgaagaagagattttcgcgcatctgggtctggattatgtggagccgtgggaacgcaacgcg

SEQ ID NO: 1084 - protein, 394 aa, synthetic construct
  REGION 1..394: note = Variant of terminal deoxynucleotidyl transferase
MHHHHHHGGSGHPPSNTPEGEVPSVIARKVSQYSCQRKTTLNNYNKKFTDALEIMAENYKFKENEIACLEFKRAASLLKYLPFPVTSMKDIQGLPCIGDQVRDVIEEIIEEGESSRVKEVLNDERYKAFKQFTSVFGVGVKTSEKWFRMGLRTVEEAKASKSLKLSKMQKAGLLYYEDLASCVSKAEADAVTLIVKNTVRTFLPDALVTITGGFRRGKKMGHDIDFLITNPGPKEDDELLHKVVDLLKKQGLLLYCDIKESTFVEEQLPSRKIDAMDNFQKCFAILKLYQPGVDNSAYNTSKKSDMAEVKDWKAIRVDLVITPFEQYAYALLGWTGSKEFGRDLRRYAEEERKMILDRHGLYDRKKRIFLKAGSEEEIFAHLGLDYVEPWERNA

SEQ ID NO: 1085 - DNA, 1182 bp, synthetic construct
  misc_feature 1..1182: note = Variant of terminal deoxynucleotidyl transferase
  source 1..1182: mol_type = other DNA
atgcaccatcatcatcatcatggcggtagcggccatccgccgagcaataccccggagggggaggtgccgagcgttatcgcccgcaaggttagtcagtacagctgccagcgcaagaccacgctgaataactacaacaaaaagtttaccgacgcgctggagatcctggccgagaactacaaatttaaagagaacgaaatcgcgtgtctggaatttaagcgcgccgcgagtctgctgaaatatctgccgttcccggttaccagcatgaaagacatccaaggtctgccgtgcattggccctcaagttcgtgctgtgatcgaggagatcatcgaagagggcgagagcagccgtgttaaagaagttctcaatgacgagcgctacaaggcctttaagcagttcaccagcgtgttcggtgtgggcgtgaaaaccagcgaaaagtggtttcgtatgggcctccgtacggttgaagaggcaaaggccagtaagagtctgaagctgagcaagatgcagaaggcgggcttcctgtattacgaggatctggcgagctgcgttagtaaagcggaagccgatgccgttacgctcatcgtgaagaacacggtgcgtacctttctgccggatgcgctggtgaccatcaccggcggtttccgccgtggcaaaaagatgggccacgacatcgactttctgatcacgaatccgggcccgaaagaggatgacgagctgctccacaaagtggttgatctgctcaagaagcaaggtctgctgctgtactgcgacatcaaagagagcacgttcgtggaggaacaactgccaagtcgcaaaatcgacgccatggacaacttccagaagtgcttcgccattctcaagctgtaccagccgggcgtggataacagcagctataacacgagtaagaagagtgacatggccgaggttaaggattggaaagcgattcgtgtggatctggtgatcacgccattcgagcagtacgcctatgcgctgctcggttggacgggcagcaaagaatttggtcgcgatctgcgccgctatgcggaggaagagcgcaagatgatcctcgaccgtcatggcctctacgaccgcaaaaagcgcatctttctgaaagcgggcagcgaagaagagattttcgcgcatctgggtctggattatgtggagccgtgggaacgcaacgcg

SEQ ID NO: 1086 - protein, 394 aa, synthetic construct
  REGION 1..394: note = Variant of terminal deoxynucleotidyl transferase
MHHHHHHGGSGHPPSNTPEGEVPSVIARKVSQYSCQRKTTLNNYNKKFTDALEILAENYKFKENEIACLEFKRAASLLKYLPFPVTSMKDIQGLPCIGPQVRAVIEEIIEEGESSRVKEVLNDERYKAFKQFTSVFGVGVKTSEKWFRMGLRTVEEAKASKSLKLSKMQKAGFLYYEDLASCVSKAEADAVTLIVKNTVRTFLPDALVTITGGFRRGKKMGHDIDFLITNPGPKEDDELLHKVVDLLKKQGLLLYCDIKESTFVEEQLPSRKIDAMDNFQKCFAILKLYQPGVDNSSYNTSKKSDMAEVKDWKAIRVDLVITPFEQYAYALLGWTGSKEFGRDLRRYAEEERKMILDRHGLYDRKKRIFLKAGSEEEIFAHLGLDYVEPWERNA

SEQ ID NO: 1087 - DNA, 1182 bp, synthetic construct
  misc_feature 1..1182: note = Variant of terminal deoxynucleotidyl transferase
  source 1..1182: mol_type = other DNA
atgcaccatcatcatcatcatggcggtagcggccatccgccgagcaataccccggagggggaggtgccgagcgttatcgcccgcaaggttagtcagtacagctgccagcgcaagaccacgctgaataactacaacaaaaagtttaccgacgcgctggagatcatggccgagaactacaaatttaaagagaacgaaatcgcgtgtctggaatttaagcgcgccgcgagtctgctgaaatatctgccgttcccggttaccagcatgaaagacatccaaggtctgccgtgcattggcgaccaagttcgtgctgtgatcgaggagatcatcgaagagggcgagagcagccgtgttaaagaagttctcaatgacgagcgctacaaggcctttaagcagttcaccagcgtgttcggtgtgggcgtgaaaaccagcgaaaagtggtttcgtatgggcctccgtacggttgaagaggcaaaggccagtaagagtctgaagctgagcaagatgcagaaggcgggcttcctgtattacgaggatctggcgagctgcgttagtaaagcggaagccgatgccgttacgctcatcgtgaagaacacggtgcgtacctttctgccggatgcgctggtgaccatcaccggcggtttccgccgtggcaaaaagatgggccacgacatcgactttctgatcacgaatccgggcccgaaagaggatgacgagctgctccacaaagtggttgatctgctcaagaagcaaggtctgctgctgtactgcgacatcatcgagagcacgttcgtggaggaacaactgccaagtcgcaaaatcgacgccatggacaacttccagaagtgcttcgccattctcaagctgtaccagccgggcgtggataacagcagctataacacgagtaagaagagtgacatggccgaggttaaggattggaaagcgattcgtgtggatctggtgatcacgccattcgagcagtacgcctatgcgctgctcggttggacgggcagcaaagaatttggtcgcgatctgcgccgctatgcggaggaagagcgcaagatgatcctcgaccgtcatggcctctacgaccgcaaaaagcgcatctttctgaaagcgggcagcgaagaagagattttcgcgcatctgggtctggattatgtggagccgtgggaacgcaacgcg

SEQ ID NO: 1088 - protein, 394 aa, synthetic construct
  REGION 1..394: note = Variant of terminal deoxynucleotidyl transferase
MHHHHHHGGSGHPPSNTPEGEVPSVIARKVSQYSCQRKTTLNNYNKKFTDALEIMAENYKFKENEIACLEFKRAASLLKYLPFPVTSMKDIQGLPCIGDQVRAVIEEIIEEGESSRVKEVLNDERYKAFKQFTSVFGVGVKTSEKWFRMGLRTVEEAKASKSLKLSKMQKAGFLYYEDLASCVSKAEADAVTLIVKNTVRTFLPDALVTITGGFRRGKKMGHDIDFLITNPGPKEDDELLHKVVDLLKKQGLLLYCDIIESTFVEEQLPSRKIDAMDNFQKCFAILKLYQPGVDNSSYNTSKKSDMAEVKDWKAIRVDLVITPFEQYAYALLGWTGSKEFGRDLRRYAEEERKMILDRHGLYDRKKRIFLKAGSEEEIFAHLGLDYVEPWERNA

SEQ ID NO: 1089 - DNA, 1182 bp, synthetic construct
  misc_feature 1..1182: note = Variant of terminal deoxynucleotidyl transferase
  source 1..1182: mol_type = other DNA
atgcaccatcatcatcatcatggcggtagcggccatccgccgagcaataccccggagggggaggtgccgagcgttatcgcccgcaaggttagtcagtacagctgccagcgcaagaccacgctgaataactacaacaaaaagtttaccgacgcgctggagatcctggccgagaactacaaatttaaagagaacgaaatcgcgtgtctggaatttaagcgcgccgcgagtctgctgaaatatctgccgttcccggttaccagcatgaaagacatccaaggtctgccgtgcattggcgaccaagttcgtgctgtgatcgaggagatcatcgaagagggcgagagcagccgtgttaaagaagttctcaatgacgagcgctacaaggcctttaagcagttcaccagcgtgttcggtgtgggcgtgaaaaccagcgaaaagtggtttcgtatgggcctccgtacggttgaagaggcaaaggccagtaagagtctgaagctgagcaagatgcagaaggcgggcttcctgtattacgaggatctggcgagctgcgttagtaaagcggaagccgatgccgttacgctcatcgtgaagaacacggtgcgtacctttctgccggatgcgctggtgaccatcaccggcggtttccgccgtggcaaacctatgggccacgacatcgactttctgatcacgaatccgggcccgaaagaggatgacgagctgctccacaaagtggttgatctgctcaagaagcaaggtctgctgctgtactgcgacatcaaagagagcacgttcgtggaggaacaactgccaagtcgcaaaatcgacgccatggacaacttccagaagtgcttcgccattctcaagctgtaccagccgggcgtggataacagcagctataacacgagtaagaagagtgacatggccgaggttaaggattggaaagcgattcgtgtggatctggtgatcacgccattcgagcagtacgcctatgcgctgctcggttggacgggcagcaaagaatttggtcgcgatctgcgccgctatgcggaggaagagcgcaagatgatcctcgaccgtcatggcctctacgaccgcaaaaagcgcatctttctgaaagcgggcagcgaagaagagattttcgcgcatctgggtctggattatgtggagccgtgggaacgcaacgcg

SEQ ID NO: 1090 - protein, 394 aa, synthetic construct
  REGION 1..394: note = Variant of terminal deoxynucleotidyl transferase
MHHHHHHGGSGHPPSNTPEGEVPSVIARKVSQYSCQRKTTLNNYNKKFTDALEILAENYKFKENEIACLEFKRAASLLKYLPFPVTSMKDIQGLPCIGDQVRAVIEEIIEEGESSRVKEVLNDERYKAFKQFTSVFGVGVKTSEKWFRMGLRTVEEAKASKSLKLSKMQKAGFLYYEDLASCVSKAEADAVTLIVKNTVRTFLPDALVTITGGFRRGKPMGHDIDFLITNPGPKEDDELLHKVVDLLKKQGLLLYCDIKESTFVEEQLPSRKIDAMDNFQKCFAILKLYQPGVDNSSYNTSKKSDMAEVKDWKAIRVDLVITPFEQYAYALLGWTGSKEFGRDLRRYAEEERKMILDRHGLYDRKKRIFLKAGSEEEIFAHLGLDYVEPWERNA

SEQ ID NO: 1091 - DNA, 1182 bp, synthetic construct
  misc_feature 1..1182: note = Variant of terminal deoxynucleotidyl transferase
  source 1..1182: mol_type = other DNA
atgcaccatcatcatcatcatggcggtagcggccatccgccgagcaataccccggagggggaggtgccgagcgttatcgcccgcaaggttagtcagtacagctgccagcgcaagaccacgctgaataactacaacaaaaagtttaccgacgcgctggagatcatggccgagaactacaaatttaaagagaacgaaatcgcgtgtctggaatttaagcgcgccgcgagtctgctgaaatatctgccgttcccggttaccagcatgaaagacatccaaggtctgccgtgcattggcgaccaagttcgtgacgtgatcgaggagatcatcgaagagggcgagagcagccgtgttaaagaagttctcaatgacgagcgctacaaggcctttaagcagttcaccagcgtgttcggtgtgggcgtgaaaaccagcgaaaagtggtttcgtatgggcctccgtacggttgaagaggcaaaggccagtaagagtctgaagctgagcaagatgcagaaggcgggcttcctgtattacgaggatctggcgagctgcgttagtaaagcggaagccgatgccgttacgctcatcgtgaagaacacggtgcgtacctttctgccggatgcgctggtgaccatcaccggcggtttccgccgtggcaaaaagatgggccacgacatcgactttctgatcacgaatccgggcccgaaagaggatgacgagctgctccacaaagtggttgatctgctcaagaagcaaggtctgctgctgtacggcgacatcatcgagagcacgttcgtggaggaacaactgccaagtcgcaaaatcgacgccatggacaacttccagaagtgcttcgccattctcaagctgtaccagccgggcgtggataacagcagctataacacgagtaagaagagtgacatggccgaggttaaggattggaaagcgattcgtgtggatctggtgatcacgccattcgagcagtacgcctatgcgctgctcggttggacgggcagcaaagaatttggtcgcgatctgcgccgctatgcggaggaagagcgcaagatgatcctcgaccgtcatggcctctacgaccgcaaaaagcgcatctttctgaaagcgggcagcgaagaagagattttcgcgcatctgggtctggattatgtggagccgtgggaacgcaacgcg

SEQ ID NO: 1092 - protein, 394 aa, synthetic construct
  REGION 1..394: note = Variant of terminal deoxynucleotidyl transferase
MHHHHHHGGSGHPPSNTPEGEVPSVIARKVSQYSCQRKTTLNNYNKKFTDALEIMAENYKFKENEIACLEFKRAASLLKYLPFPVTSMKDIQGLPCIGDQVRDVIEEIIEEGESSRVKEVLNDERYKAFKQFTSVFGVGVKTSEKWFRMGLRTVEEAKASKSLKLSKMQKAGFLYYEDLASCVSKAEADAVTLIVKNTVRTFLPDALVTITGGFRRGKKMGHDIDFLITNPGPKEDDELLHKVVDLLKKQGLLLYGDIIESTFVEEQLPSRKIDAMDNFQKCFAILKLYQPGVDNSSYNTSKKSDMAEVKDWKAIRVDLVITPFEQYAYALLGWTGSKEFGRDLRRYAEEERKMILDRHGLYDRKKRIFLKAGSEEEIFAHLGLDYVEPWERNA

SEQ ID NO: 1093 - DNA, 1182 bp, synthetic construct
  misc_feature 1..1182: note = Variant of terminal deoxynucleotidyl transferase
  source 1..1182: mol_type = other DNA
atgcaccatcatcatcatcatggcggtagcggccatccgccgagcaataccccggagggggaggtgccgagcgttatcgcccgcaaggttagtcagtacagctgccagcgcaagaccacgctgaataactacaacaaaaagtttaccgacgcgctggagatcctggccgagaactacaaatttaaagagaacgaaatcgcgtgtctggaatttaagcgcgccgcgagtctgctgaaatatctgccgttcccggttaccagcatgaaagacatccaaggtctgccgtgcattggcgaccaagttcgtgacgtgatcgaggagatcatcgaagagggcgagagcagccgtgttaaagaagttctcaatgacgagcgctacaaggcctttaagcagttcaccagcgtgttcggtgtgggcgtgaaaaccagcgaaaagtggtttcgtatgggcctccgtacggttgaagaggcaaaggccagtaagagtctgaagctgagcaagatgcagaaggcgggcttcctgtattacgaggatctggcgcgctgcgttagtaaagcggaagccgatgccgttacgctcatcgtgaagaacacggtgcgtacctttctgccggatgcgctggtgaccatcaccggcggtttccgccgtggcaaacctatgggccacgacatcgactttctgatcacgaatccgggcccgaaagaggatgacgagctgctccacaaagtggttgatctgctcaagaagcaaggtctgctgctgtactgcgacatcaaagagagcacgttcgtggaggaacaactgccaagtcgcaaaatcgacgccatggacaacttccagaagtgcttcgccattctcaagctgtaccagccgggcgtggataacagcagctataacacgagtaagaagagtgacatggccgaggttaaggattggaaagcgattcgtgtggatctggtgatcacgccattcgagcagtacgcctatgcgctgctcggttggacgggcagcaaagaatttggtcgcgatctgcgccgctatgcggaggaagagcgcaagatgatcctcgaccgtcatggcctctacgaccgcaaaaagcgcatctttctgaaagcgggcagcgaagaagagattttcgcgcatctgggtctggattatgtggagccgtgggaacgcaacgcg

SEQ ID NO: 1094 - protein, 394 aa, synthetic construct
  REGION 1..394: note = Variant of terminal deoxynucleotidyl transferase
MHHHHHHGGSGHPPSNTPEGEVPSVIARKVSQYSCQRKTTLNNYNKKFTDALEILAENYKFKENEIACLEFKRAASLLKYLPFPVTSMKDIQGLPCIGDQVRDVIEEIIEEGESSRVKEVLNDERYKAFKQFTSVFGVGVKTSEKWFRMGLRTVEEAKASKSLKLSKMQKAGFLYYEDLARCVSKAEADAVTLIVKNTVRTFLPDALVTITGGFRRGKPMGHDIDFLITNPGPKEDDELLHKVVDLLKKQGLLLYCDIKESTFVEEQLPSRKIDAMDNFQKCFAILKLYQPGVDNSSYNTSKKSDMAEVKDWKAIRVDLVITPFEQYAYALLGWTGSKEFGRDLRRYAEEERKMILDRHGLYDRKKRIFLKAGSEEEIFAHLGLDYVEPWERNA

SEQ ID NO: 1095 - DNA, 1182 bp, synthetic construct
  misc_feature 1..1182: note = Variant of terminal deoxynucleotidyl transferase
  source 1..1182: mol_type = other DNA
atgcaccatcatcatcatcatggcggtagcggccatccgccgagcaataccccggagggggaggtgccgagcgttatcgcccgcaaggttagtcagtacagctgccagcgcaagaccacgctgaataactacaacaaaaagtttaccgacgcgctggagatcctggccgagaactacaaatttaaagagaacgaaatcgcgtgtctggaatttaagcgcgccgcgagtctgctgaaatatctgccgttcccggttaccagcatgaaagacatccaaggtctgccgtgcattggcgaccaagttcgtgacgtgatcgaggagatcatcgaagagggcgagagcagccgtgttaaagaagttctcaatgacgagcgctacaaggcctttaagcagttcaccagcgtgttcggtgtgggcgtgaaaaccagcgaaaagtggtttcgtatgggcctccgtacggttgaagaggcaaaggccagtaagagtctgaagctgagcaagatgcagaaggcgggcttcctgtattacgaggatctggcgcgctgcgttagtaaagcggaagccgatgccgttacgctcatcgtgaagaacacggtgcgtacctttctgccggatgcgctggtgaccatcaccggcggtttccgccgtggcaaaaagatgggccacgacatcgactttctgatcacgaatccgggcccgaaagaggatgacgagctgctccacaaagtggttgatgggctcaagaagcaaggtctgctgctgtactgcgacatcaaagagagcacgttcgtggaggaacaactgccaagtcgcaaaatcgacgccatggacaacttccagaagtgcttcgccattctcaagctgtaccagccgggcgtggataacagcagctataacacgagtaagaagagtgacatggccgaggttaaggattggaaagcgattcgtgtggatctggtgatcacgccattcgagcagtacgcctatgcgctgctcggttggacgggcagcaaagaatttggtcgcgatctgcgccgctatgcggaggaagagcgcaagatgatcctcgaccgtcatggcctctacgaccgcaaaaagcgcatctttctgaaagcgggcagcgaagaagagattttcgcgcatctgggtctggattatgtggagccgtgggaacgcaacgcg

SEQ ID NO: 1096 - protein, 394 aa, synthetic construct
  REGION 1..394: note = Variant of terminal deoxynucleotidyl transferase
MHHHHHHGGSGHPPSNTPEGEVPSVIARKVSQYSCQRKTTLNNYNKKFTDALEILAENYKFKENEIACLEFKRAASLLKYLPFPVTSMKDIQGLPCIGDQVRDVIEEIIEEGESSRVKEVLNDERYKAFKQFTSVFGVGVKTSEKWFRMGLRTVEEAKASKSLKLSKMQKAGFLYYEDLARCVSKAEADAVTLIVKNTVRTFLPDALVTITGGFRRGKKMGHDIDFLITNPGPKEDDELLHKVVDGLKKQGLLLYCDIKESTFVEEQLPSRKIDAMDNFQKCFAILKLYQPGVDNSSYNTSKKSDMAEVKDWKAIRVDLVITPFEQYAYALLGWTGSKEFGRDLRRYAEEERKMILDRHGLYDRKKRIFLKAGSEEEIFAHLGLDYVEPWERNA

SEQ ID NO: 1097 - DNA, 1182 bp, synthetic construct
  misc_feature 1..1182: note = Variant of terminal deoxynucleotidyl transferase
  source 1..1182: mol_type = other DNA
atgcaccatcatcatcatcatggcggtagcggccatccgccgagcaataccccggagggggaggtgccgagcgttatcgcccgcaaggttagtcagtacagctgccagcgcaagaccacgctgaataactacaacaaaaagtttaccgacgcgctggagatcatggccgagaactacaaatttaaagagaacgaaatcgcgtgtctggaatttaagcgcgccgcgagtctgctgaaatatctgccgttcccggttaccagcatgaaagacatccaaggtctgccgtgcattggcgaccaagttcgtgctgtgatcgaggagatcatcgaagagggcgagagcagccgtgttaaagaagttctcaatgacgagcgctacaaggcctttaagcagttcaccagcgtgttcggtgtgggcgtgaaaaccagcgaaaagtggtttcgtatgggcctccgtacggttgaagaggcaaaggccagtaagagtctgaagctgagcaagatgcagaaggcgggcttcctgtattacgaggatctggcgagctgcgttagtaaagcggaagccgatgccgttacgctcatcgtgaagaacacggtgcgtacctttctgccggatgcgctggtgaccatcaccggcggtttccgccgtggcaaacctatgggccacgacatcgactttctgatcacgaatccgggcccgaaagaggatgacgagctgctccacaaagtggttgatctgctcaagaagcaaggtctgctgctgtacgaagacatcaaagagagcacgttcgtggaggaacaactgccaagtcgcaaaatcgacgccatggacaacttccagaagtgcttcgccattctcaagctgtaccagccgggcgtggataacagcagctataacacgagtaagaagagtgacatggccgaggttaaggattggaaagcgattcgtgtggatctggtgatcacgccattcgagcagtacgcctatgcgctgctcggttggacgggcagcaaagaatttggtcgcgatctgcgccgctatgcggaggaagagcgcaagatgatcctcgaccgtcatggcctctacgaccgcaaaaagcgcatctttctgaaagcgggcagcgaagaagagattttcgcgcatctgggtctggattatgtggagccgtgggaacgcaacgcg

SEQ ID NO: 1098 - protein, 394 aa, synthetic construct
  REGION 1..394: note = Variant of terminal deoxynucleotidyl transferase
MHHHHHHGGSGHPPSNTPEGEVPSVIARKVSQYSCQRKTTLNNYNKKFTDALEIMAENYKFKENEIACLEFKRAASLLKYLPFPVTSMKDIQGLPCIGDQVRAVIEEIIEEGESSRVKEVLNDERYKAFKQFTSVFGVGVKTSEKWFRMGLRTVEEAKASKSLKLSKMQKAGFLYYEDLASCVSKAEADAVTLIVKNTVRTFLPDALVTITGGFRRGKPMGHDIDFLITNPGPKEDDELLHKVVDLLKKQGLLLYEDIKESTFVEEQLPSRKIDAMDNFQKCFAILKLYQPGVDNSSYNTSKKSDMAEVKDWKAIRVDLVITPFEQYAYALLGWTGSKEFGRDLRRYAEEERKMILDRHGLYDRKKRIFLKAGSEEEIFAHLGLDYVEPWERNA

SEQ ID NO: 1099 - DNA, 1182 bp, synthetic construct
  misc_feature 1..1182: note = Variant of terminal deoxynucleotidyl transferase
  source 1..1182: mol_type = other DNA
atgcaccatcatcatcatcatggcggtagcggccatccgccgagcaataccccggagggggaggtgccgagcgttatcgcccgcaaggttagtcagtacagctgccagcgcaagaccacgctgaataactacaacaaaaagtttaccgacgcgctggagatcatggccgagaactacaaatttaaagagaacgaaatcgcgtgtctggaatttaagcgcgccgcgagtctgctgaaatatctgccgttcccggttaccagcatgaaagacatccaaggtctgccgtgcattggcgaccaagttcgtgacgtgatccgtgagatcatcgaagagggcgagagcagccgtgttaaagaagttctcaatgacgagcgctacaaggcctttaagcagttcaccagcgtgttcggtgtgggcgtgaaaaccagcgaaaagtggtttcgtatgggcctccgtacggttgaagaggcaaaggccagtaagagtctgaagctgagcaagatgcagaaggcgggcctgctgtattacgaggatctggcgagctgcgttagtaaagcggaagccgatgccgttacgctcatcgtgaagaacacggtgagcacctttctgccggatgcgctggtgaccatcaccggcggtttccgccgtggcaaaaagatgggccacgacatcgactttctgatcacgaatccgggcccgaaacaggatgacgagctgctccacaaagtggttgatctgctcaagaagcaaggtctgctgctgtactgcgacatcaaagagagcacgttcgtggaggaacaactgccaagtcgcaaaatcgacgccatggacaacttccagaagtgcttcgccattctcaagctgtaccagccgggcgtggataacagcagctataacacgagtaagaagagtgacatggccgaggttaaggattggaaagcggtccgtgtggatctggtgatcacgccattcgagcagtacgcctatgcgctgctcggttggacgggcagcaaagaatttggtcgcgatctgcgccgctatgcggaggaagagcgcaagatgatcctcgaccgtcatggcctctacgaccgcaaaaagcgcatctttctgaaagcgggcagcgaagaagagattttcgcgcatctgggtctggattatgtggagccgtgggaacgcaacgcg

SEQ ID NO: 1100 - protein, 394 aa, synthetic construct
  REGION 1..394: note = Variant of terminal deoxynucleotidyl transferase
MHHHHHHGGSGHPPSNTPEGEVPSVIARKVSQYSCQRKTTLNNYNKKFTDALEIMAENYKFKENEIACLEFKRAASLLKYLPFPVTSMKDIQGLPCIGDQVRDVIREIIEEGESSRVKEVLNDERYKAFKQFTSVFGVGVKTSEKWFRMGLRTVEEAKASKSLKLSKMQKAGLLYYEDLASCVSKAEADAVTLIVKNTVSTFLPDALVTITGGFRRGKKMGHDIDFLITNPGPKQDDELLHKVVDLLKKQGLLLYCDIKESTFVEEQLPSRKIDAMDNFQKCFAILKLYQPGVDNSSYNTSKKSDMAEVKDWKAVRVDLVITPFEQYAYALLGWTGSKEFGRDLRRYAEEERKMILDRHGLYDRKKRIFLKAGSEEEIFAHLGLDYVEPWERNA

SEQ ID NO: 1101 - DNA, 1182 bp, synthetic construct
  misc_feature 1..1182: note = Variant of terminal deoxynucleotidyl transferase
  source 1..1182: mol_type = other DNA
atgcaccatcatcatcatcatggcggtagcggccatccgccgagcaataccccggagggggaggtgccgagcgttatcgcccgcaaggttagtcagtacagctgccagcgcaagaccacgctgaataactacaacaaaaagtttaccgacgcgctggagatcatggccgagaactacaaatttaaagagaacgaaatcgcgtgtctggaatttaagcgcgccgcgagtctgctgaaatatctgccgttcccggttaccagcatgaaagacatccaaggtctgccgtgcattggcgaccaagttcgtgatgtgatcgaggagatcatcgaagagggcgagagcagccgtgttaaagaagttctcaatgacgagcgctacaaggcctttaagcagttcaccagcgtgttcggtgtgggcgtgaaaaccagcgaaaagtggtttcgtatgggcctccgtacggttgaagaggcaaaggccagtaagagtctgaagctgagcaagatgcagaaggcgggcttcctgtattacgaggatctggcgcgctgcgttagtaaagcggaagccgatgccgttacgctcatcgtgaagaacacggtgcgtacctttctgccggatgcgctggtgaccatcaccggcggtttccgccgtggcaaaaagatgggccacgacatcgactttctgatcacgaatccgggcccgaaagaggatgacgagctgctccacaaagtggttgatctgctcaagaagcaaggtctgctgctgtactgcgacatcaaagagagcacgttcgtggaggaacaactgccaagtcgcaaaatcgacgccatggacaacttccagaagtgcttcgccattctcaagctgtaccagccgggcgtggataacagcagctataacacgagtaagaagagtgacatggccgaggttaaggattggaaagcgattcgtgtggatctggtgatcacgccattcgagcagtacgcctatgcgctgctcggttggacgggcagcaaagaatttggtcgcgatctgcgccgctatgcggaggaagagcgcaagatgatcctcgaccgtcatggcctctacgaccgcaaaaagcgcatctttctgaaagcgggcagcgaagaagagattttcgcgcatctgggtctggattatgtggagccgtgggaacgcaacgcg

SEQ ID NO: 1102 - protein, 394 aa, synthetic construct
  REGION 1..394: note = Variant of terminal deoxynucleotidyl transferase
MHHHHHHGGSGHPPSNTPEGEVPSVIARKVSQYSCQRKTTLNNYNKKFTDALEIMAENYKFKENEIACLEFKRAASLLKYLPFPVTSMKDIQGLPCIGDQVRDVIEEIIEEGESSRVKEVLNDERYKAFKQFTSVFGVGVKTSEKWFRMGLRTVEEAKASKSLKLSKMQKAGFLYYEDLARCVSKAEADAVTLIVKNTVRTFLPDALVTITGGFRRGKKMGHDIDFLITNPGPKEDDELLHKVVDLLKKQGLLLYCDIKESTFVEEQLPSRKIDAMDNFQKCFAILKLYQPGVDNSSYNTSKKSDMAEVKDWKAIRVDLVITPFEQYAYALLGWTGSKEFGRDLRRYAEEERKMILDRHGLYDRKKRIFLKAGSEEEIFAHLGLDYVEPWERNA

SEQ ID NO: 1103 - DNA, 1182 bp, synthetic construct
  misc_feature 1..1182: note = Variant of terminal deoxynucleotidyl transferase
  source 1..1182: mol_type = other DNA
atgcaccatcatcatcatcatggcggtagcggccatccgccgagcaataccccggagggggaggtgccgagcgttatcgcccgcaaggttagtcagtacagctgccagcgcaagaccacgctgaataactacaacaaaaagtttaccgacgcgctggagatcctggccgagaactacaaatttaaagagaacgaaatcgcgtgtctggaatttaagcgcgccgcgagtctgctgaaatatctgccgttcccggttaccagcatgaaagacatccaaggtctgccgtgcattggcgaccaagttcgtgatgtgatcgaggagatcatcgaagagggcgagagcagccgtgttaaagaagttctcaatgacgagcgctacaaggcctttaagcagttcaccagcgtgttcggtgtgggcgtgaaaaccagcgaaaagtggtttcgtatgggcctccgtacggttgaagaggcaaaggccagtaagagtctgaagctgagcaagatgcagaaggcgggcttcctgtattacgaggatctggcgagctgcgttagtaaagcggaagccgatgccgttacgctcatcgtgaagaacacggtgcgtacctttctgccggatgcgctggtgaccatcaccggcggtttccgccgtggcaaaaagatgggccacgacatcgactttctgatcacgaatccgggcccgaaagaggatgacgagctgctccacaaagtggttgatctgctcaagaagcaaggtctgctgctgtacggcgacatcatcgagagcacgttcgtggaggaacaactgccaagtcgcaaaatcgacgccatggacaacttccagaagtgcttcgccattctcaagctgtaccagccgggcgtggataacagcagctataacacgagtaagaagagtgacatggccgaggttaaggattggaaagcgattcgtgtggatctggtgatcacgccattcgagcagtacgcctatgcgctgctcggttggacgggcagcaaagaatttggtcgcgatctgcgccgctatgcggaggaagagcgcaagatgatcctcgaccgtcatggcctctacgaccgcaaaaagcgcatctttctgaaagcgggcagcgaagaagagattttcgcgcatctgggtctggattatgtggagccgtgggaacgcaacgcg

SEQ ID NO: 1104 - protein, 394 aa, synthetic construct
  REGION 1..394: note = Variant of terminal deoxynucleotidyl transferase
MHHHHHHGGSGHPPSNTPEGEVPSVIARKVSQYSCQRKTTLNNYNKKFTDALEILAENYKFKENEIACLEFKRAASLLKYLPFPVTSMKDIQGLPCIGDQVRDVIEEIIEEGESSRVKEVLNDERYKAFKQFTSVFGVGVKTSEKWFRMGLRTVEEAKASKSLKLSKMQKAGFLYYEDLASCVSKAEADAVTLIVKNTVRTFLPDALVTITGGFRRGKKMGHDIDFLITNPGPKEDDELLHKVVDLLKKQGLLLYGDIIESTFVEEQLPSRKIDAMDNFQKCFAILKLYQPGVDNSSYNTSKKSDMAEVKDWKAIRVDLVITPFEQYAYALLGWTGSKEFGRDLRRYAEEERKMILDRHGLYDRKKRIFLKAGSEEEIFAHLGLDYVEPWERNA

SEQ ID NO: 1105 - DNA, 1182 bp, synthetic construct
  misc_feature 1..1182: note = Variant of terminal deoxynucleotidyl transferase
  source 1..1182: mol_type = other DNA
atgcaccatcatcatcatcatggcggtagcggccatccgccgagcaataccccggagggggaggtgccgagcgttatcgcccgcaaggttagtcagtacagctgccagcgcaagaccacgctgaataactacaacaaaaagtttaccgacgcgctggagatcatggccgagaactacaaatttaaagagaacgaaatcgcgtgtctggaatttaagcgcgccgcgagtctgctgaaatatctgccgttcccggttaccagcatgaaagacatccaaggtctgccgtgcattggcgaccaagttcgtgacgtgatccgtgagatcatcgaagagggcgagagcagccgtgttaaagaagttctcaatgacgagcgctacaaggcctttaagcagttcaccagcgtgttcggtgtgggcgtgaaaaccagcgaaaagtggtttcgtatgggcctccgtacggttgaagaggcaaaggccagtaagagtctgaagctgagcaagatgcagaaggcgggcctgctgtattacgaggatctggcgagctgcgttagtaaagcggaagccgatgccgttacgctcatcgtgaagaacacggtgcgtacctttctgccggatgcgctggtgaccatcaccggcggtttccgccgtggcaaaaagatgggccacgacatcgactttctgatcacgaatccgggcccgaaagaggatgacgagctgctccacaaagtggttgatctgctcaagaagcaaggtctgctgctgtactgcgacatcaaagagagcacgttcgtggaggaacaactgccaagtcgcaaaatcgacgccatggacaacttccagaagtgcttcgccattctcaagctgtaccagccgggcgtggataatagctcgtataacacgagtaagaagagtgacatggccgaggttaaggattggaaagcgattcgtgtggatctggtgatcacgccattcgagcagtacgcctatgcgctgctcggttggacgggcagcaaagaatttggtcgcgatctgcgccgctatgcggaggaagagcgcaagatgatcctcgaccgtcatggcctctacgaccgcaaaaagcgcatctttctgaaagcgggcagcgaagaagagattttcgcgcatctgggtctggattatgtgcagccgtgggaacgcaacgcg

SEQ ID NO: 1106 - protein, 394 aa, synthetic construct
  REGION 1..394: note = Variant of terminal deoxynucleotidyl transferase
MHHHHHHGGSGHPPSNTPEGEVPSVIARKVSQYSCQRKTTLNNYNKKFTDALEIMAENYKFKENEIACLEFKRAASLLKYLPFPVTSMKDIQGLPCIGDQVRDVIREIIEEGESSRVKEVLNDERYKAFKQFTSVFGVGVKTSEKWFRMGLRTVEEAKASKSLKLSKMQKAGLLYYEDLASCVSKAEADAVTLIVKNTVRTFLPDALVTITGGFRRGKKMGHDIDFLITNPGPKEDDELLHKVVDLLKKQGLLLYCDIKESTFVEEQLPSRKIDAMDNFQKCFAILKLYQPGVDNSSYNTSKKSDMAEVKDWKAIRVDLVITPFEQYAYALLGWTGSKEFGRDLRRYAEEERKMILDRHGLYDRKKRIFLKAGSEEEIFAHLGLDYVQPWERNA

SEQ ID NO: 1107 - DNA, 1182 bp, synthetic construct
  misc_feature 1..1182: note = Variant of terminal deoxynucleotidyl transferase
  source 1..1182: mol_type = other DNA
atgcaccatcatcatcatcatggcggtagcggccatccgccgagcaataccccggagggggaggtgccgagcgttatcgcccgcaaggttagtcagtacagctgccagcgcaagaccacgctgaataactacaacaaaaagtttaccgacgcgctggagatcatggccgagaactacaaatttaaagagaacgaaatcgcgtgtctggaatttaagcgcgccgcgagtctgctgaaatatctgccgttcccggttaccagcatgaaagacatccaaggtctgccgtgcattggcgaccaagttcgtgacgtgatcgaggagatcatcgaagagggcgagagcagccgtgttaaagaagttctcaatgacgagcgctacaaggcctttaagcagttcaccagcgtgttcggtgtgggcgtgaaaaccagcgaaaagtggtttcgtatgggcctccgtacggttgaagaggcaaaggccagtaagagtctgaagctgagcaagatgcagaaggcgggcttcctgtattacgaggatctggcgagctgcgttagtaaagcggaagccgatgccgttacgctcatcgtgaagaacacggtgcgtacctttctgccggatgcgctggtgaccatcaccggcggtttccgccgtggcaaaaagatgggccacgacatcgactttctgatcacgaatccgggcccgaaagaggatgacgagctgctccacaaagtggttgatctgctcaagaagcaaggtctgctgctgtacgaagacatcaaagagagcacgttcgtggaggaacaactgccaagtcgcaaaatcgacgccatggacaacttccagaagtgcttcgccattctcaagctgtaccagccgggcgtggataacagcagctataacacgagtaagaagagtgacatggccgaggttaaggattggaaagcgattcgtgtggatctggtgatcacgccattcgagcagtacgcctatgcgctgctcggttggacgggcagcaaagaatttggtcgcgatctgcgccgctatgcggaggaagagcgcaagatgatcctcgaccgtcatggcctctacgaccgcaaaaagcgcatctttctgaaagcgggcagcgaagaagagattttcgcgcatctgggtctggattatgtggagccgtgggaacgcaacgcg

SEQ ID NO: 1108 - protein, 394 aa, synthetic construct
  REGION 1..394: note = Variant of terminal deoxynucleotidyl transferase
MHHHHHHGGSGHPPSNTPEGEVPSVIARKVSQYSCQRKTTLNNYNKKFTDALEIMAENYKFKENEIACLEFKRAASLLKYLPFPVTSMKDIQGLPCIGDQVRDVIEEIIEEGESSRVKEVLNDERYKAFKQFTSVFGVGVKTSEKWFRMGLRTVEEAKASKSLKLSKMQKAGFLYYEDLASCVSKAEADAVTLIVKNTVRTFLPDALVTITGGFRRGKKMGHDIDFLITNPGPKEDDELLHKVVDLLKKQGLLLYEDIKESTFVEEQLPSRKIDAMDNFQKCFAILKLYQPGVDNSSYNTSKKSDMAEVKDWKAIRVDLVITPFEQYAYALLGWTGSKEFGRDLRRYAEEERKMILDRHGLYDRKKRIFLKAGSEEEIFAHLGLDYVEPWERNA

SEQ ID NO: 1109 - DNA, 1182 bp, synthetic construct
  misc_feature 1..1182: note = Variant of terminal deoxynucleotidyl transferase
  source 1..1182: mol_type = other DNA
atgcaccatcatcatcatcatggcggtagcggccatccgccgagcaataccccggagggggaggtgccgagcgttatcgcccgcaaggttagtcagtacagctgccagcgcaagaccacgctgaataactacaacaaaaagtttaccgacgcgctggagatcatggccgagaactacaaatttaaagagaacgaaatcgcgtgtctggaatttaagcgcgccgcgagtctgctgaaatatctgccgttcccggttaccagcatgaaagacatccaaggtctgccgtgcattggcgaccaagttcgtgctgtgatcgaggagatcatcgaagagggcgagagcagccgtgttaaagaagttctcaatgacgagcgctacaaggcctttaagcagttcaccagcgtgttcggtgtgggcgtgaaaaccagcgaaaagtggtttcgtatgggcctccgtacggttgaagaggcaaaggccagtaagagtctgaagctgagcaagatgcagaaggcgggcttcctgtattacgaggatctggcgagctgcgttagtaaagcggaagccgatgccgttacgctcatcgtgaagaacacggtgcgtacctttctgccggatgcgctggtgaccatcaccggcggtttccgccgtggcaaaaagatgggccacgacatcgactttctgatcacgaatccgggcccgaaagaggatgacgagctgctccacaaagtggttgatctgctcaagaagcaaggtctgctgctgtacggcgacatcaaagagagcacgttcgtggaggaacaactgccaagtcgcaaaatcgacgccatggacaacttccagaagtgcttcgccattctcaagctgtaccagccgggcgtggataacagcagctataacacgagtaagaagagtgacatggccgaggttaaggattggaaagcgattcgtgtggatctggtgatcacgccattcgagcagtacgcctatgcgctgctcggttggacgggcagcaaagaatttggtcgcgatctgcgccgctatgcggaggaagagcgcaagatgatcctcgaccgtcatggcctctacgaccgcaaaaagcgcatctttctgaaagcgggcagcgaagaagagattttcgcgcatctgggtctggattatgtggagccgtgggaacgcaacgcg

SEQ ID NO: 1110 - protein, 394 aa, synthetic construct
  REGION 1..394: note = Variant of terminal deoxynucleotidyl transferase
MHHHHHHGGSGHPPSNTPEGEVPSVIARKVSQYSCQRKTTLNNYNKKFTDALEIMAENYKFKENEIACLEFKRAASLLKYLPFPVTSMKDIQGLPCIGDQVRAVIEEIIEEGESSRVKEVLNDERYKAFKQFTSVFGVGVKTSEKWFRMGLRTVEEAKASKSLKLSKMQKAGFLYYEDLASCVSKAEADAVTLIVKNTVRTFLPDALVTITGGFRRGKKMGHDIDFLITNPGPKEDDELLHKVVDLLKKQGLLLYGDIKESTFVEEQLPSRKIDAMDNFQKCFAILKLYQPGVDNSSYNTSKKSDMAEVKDWKAIRVDLVITPFEQYAYALLGWTGSKEFGRDLRRYAEEERKMILDRHGLYDRKKRIFLKAGSEEEIFAHLGLDYVEPWERNA

SEQ ID NO: 1111 - DNA, 1182 bp, synthetic construct
  misc_feature 1..1182: note = Variant of terminal deoxynucleotidyl transferase
  source 1..1182: mol_type = other DNA
atgcaccatcatcatcatcatggcggtagcggccatccgccgagcaataccccggagggggaggtgccgagcgttatcgcccgcaaggttagtcagtacagctgccagcgcaagaccacgctgaataactacaacaaaaagtttaccgacgcgctggagatcatggccgagaactacaaatttaaagagaacgaaatcgcgtgtctggaatttaagcgcgccgcgagtctgctgaaatatctgccgttcccggttaccagcatgaaagacatccaaggtctgccgtgcattggcgaccaagttcgtgacgtgatcgaggagatcatcgaagagggcgagagcagccgtgttaaagaagttctcaatgacgagcgctacaaggcctttaagcagttcaccagcgtgttcggtgtgggcgtgaaaaccagcgaaaagtggtttcgtatgggcctccgtacggttgaagaggcaaaggccagtaagagtctgaagctgagcaagatgcagaaggcgggcctgctgtattacgaggatctggcgagctgcgttagtaaagcggaagccgatgccgttacgctcatcgtgaagaacacggtgcgtacctttctgccggatgcgctggtgaccatcaccggcggtttccgccgtggcaaaaagatgggccacgacatcgactttctgatcacgaatccgggcccgaaagaggatgacgagctgctccacaaagtggttgatctgctcaagaagcaaggtctgctgctgtactgcgacatcaaagagagcacgttcgtggaggaacaactgccaagtcgcaaaatcgacgccatggacaacttccagaagtgcttcgccattctcaagctgtaccagccgggcgtggataacagcagctataacacgagtaagaagagtgacatggccgaggttaaggattggaaagcgattcgtgtggatctggtgatcacgccattcgagcagtacgcctatgcgctgctcggttggacgggcagcaaagaatttggtcgcgatctgcgccgctatgcggaggaagagcgcaagatgatcctcgaccgtcatggcctctacgaccgcaaaaagcgcatctttctgaaagcgggcagcgaagaagagattttcgcgcatctgggtctggattatgtggagccgtgggaacgcaacgcg

SEQ ID NO: 1112 - protein, 394 aa, synthetic construct
  REGION 1..394: note = Variant of terminal deoxynucleotidyl transferase
MHHHHHHGGSGHPPSNTPEGEVPSVIARKVSQYSCQRKTTLNNYNKKFTDALEIMAENYKFKENEIACLEFKRAASLLKYLPFPVTSMKDIQGLPCIGDQVRDVIEEIIEEGESSRVKEVLNDERYKAFKQFTSVFGVGVKTSEKWFRMGLRTVEEAKASKSLKLSKMQKAGLLYYEDLASCVSKAEADAVTLIVKNTVRTFLPDALVTITGGFRRGKKMGHDIDFLITNPGPKEDDELLHKVVDLLKKQGLLLYCDIKESTFVEEQLPSRKIDAMDNFQKCFAILKLYQPGVDNSSYNTSKKSDMAEVKDWKAIRVDLVITPFEQYAYALLGWTGSKEFGRDLRRYAEEERKMILDRHGLYDRKKRIFLKAGSEEEIFAHLGLDYVEPWERNA

SEQ ID NO: 1113 - DNA, 1182 bp, synthetic construct
  misc_feature 1..1182: note = Variant of terminal deoxynucleotidyl transferase
  source 1..1182: mol_type = other DNA
atgcaccatcatcatcatcatggcggtagcggccatccgccgagcaataccccggagggggaggtgccgagcgttatcgcccgcaaggttagtcagtacagctgccagcgcaagaccacgctgaataactacaacaaaaagtttaccgacgcgctggagatcatggccgagaactacaaatttaaagagaacgaaatcgcgtgtctggaatttaagcgcgccgcgagtctgctgaaatatctgccgttcccggttaccagcatgaaagacatccaaggtctgccgtgcattggccctcaagttcgtgctgtgatcgaggagatcatcgaagagggcgagagcagccgtgttaaagaagttctcaatgacgagcgctacaaggcctttaagcagttcaccagcgtgttcggtgtgggcgtgaaaaccagcgaaaagtggtttcgtatgggcctccgtacggttgaagaggcaaaggccagtaagagtctgaagctgagcaagatgcagaaggcgggcttcctgtattacgaggatctggcgagctgcgttagtaaagcggaagccgatgccgttacgctcatcgtgaagaacacggtgcgtacctttctgccggatgcgctggtgaccatcaccggcggtttccgccgtggcaaacctatgggccacgacatcgactttctgatcacgaatccgggcccgaaagaggatgacgagctgctccacaaagtggttgatctgctcaagaagcaaggtctgctgctgtactgcgacatcaaagagagcacgttcgtggaggaacaactgccaagtcgcaaaatcgacgccatggacaacttccagaagtgcttcgccattctcaagctgtaccagccgggcgtggataacagcagctataacacgagtaagaagagtgacatggccgaggttaaggattggaaagcgattcgtgtggatctggtgatcacgccattcgagcagtacgcctatgcgctgctcggttggacgggcagcaaagaatttggtcgcgatctgcgccgctatgcggaggaagagcgcaagatgatcctcgaccgtcatggcctctacgaccgcaaaaagcgcatctttctgaaagcgggcagcgaagaagagattttcgcgcatctgggtctggattatgtggagccgtgggaacgcaacgcg

SEQ ID NO: 1114 - protein, 394 aa, synthetic construct
  REGION 1..394: note = Variant of terminal deoxynucleotidyl transferase
MHHHHHHGGSGHPPSNTPEGEVPSVIARKVSQYSCQRKTTLNNYNKKFTDALEIMAENYKFKENEIACLEFKRAASLLKYLPFPVTSMKDIQGLPCIGPQVRAVIEEIIEEGESSRVKEVLNDERYKAFKQFTSVFGVGVKTSEKWFRMGLRTVEEAKASKSLKLSKMQKAGFLYYEDLASCVSKAEADAVTLIVKNTVRTFLPDALVTITGGFRRGKPMGHDIDFLITNPGPKEDDELLHKVVDLLKKQGLLLYCDIKESTFVEEQLPSRKIDAMDNFQKCFAILKLYQPGVDNSSYNTSKKSDMAEVKDWKAIRVDLVITPFEQYAYALLGWTGSKEFGRDLRRYAEEERKMILDRHGLYDRKKRIFLKAGSEEEIFAHLGLDYVEPWERNA

SEQ ID NO: 1115 - DNA, 1182 bp, synthetic construct
  misc_feature 1..1182: note = Variant of terminal deoxynucleotidyl transferase
  source 1..1182: mol_type = other DNA
atgcaccatcatcatcatcatggcggtagcggccatccgccgagcaataccccggagggggaggtgccgagcgttatcgcccgcaaggttagtcagtacagctgccagcgcaagaccacgctgaataactacaacaaaaagtttaccgacgcgctggagatcctggccgagaactacaaatttaaagagaacgaaatcgcgtgtctggaatttaagcgcgccgcgagtctgctgaaatatctgccgttcccggttaccagcatgaaagacatccaaggtctgccgtgcattggcgaccaagttcgtgctgtgatcgaggagatcatcgaagagggcgagagcagccgtgttaaagaagttctcaatgacgagcgctacaaggcctttaagcagttcaccagcgtgttcggtgtgggcgtgaaaaccagcgaaaagtggtttcgtatgggcctccgtacggttgaagaggcaaaggccagtaagagtctgaagctgagcaagatgcagaaggcgggcttcctgtattacgaggatctggcgagctgcgttagtaaagcggaagccgatgccgttacgctcatcgtgaagaacacggtgcgtacctttctgccggatgcgctggtgaccatcaccggcggtttccgccgtggcaaaaagatgggccacgacatcgactttctgatcacgaatccgggcccgaaagaggatgacgagctgctccacaaagtggttgatctgctcaagaagcaaggtctgctgctgtactgcgacatcaaagagagcacgttcgtggaggaacaactgccaagtcgcaaaatcgacgccatggacaacttccagaagtgcttcgccattctcaagctgtaccagccgggcgtggataacagcagctataacacgagtaagaagagtgacatggccgaggttaaggattggaaagcgattcgtgtggatctggtgatcacgccattcgagcagtacgcctatgcgctgctcggttggacgggcagccgtgaatttggtcgcgatctgcgccgctatgcggaggaagagcgcaagatgatcctcgaccgtcatggcctctacgaccgcaaaaagcgcatctttctgaaagcgggcagcgaagaagagattttcgcgcatctgggtctggattatgtggagccgtgggaacgcaacgcg

SEQ ID NO: 1116 - protein, 394 aa, synthetic construct
  REGION 1..394: note = Variant of terminal deoxynucleotidyl transferase
MHHHHHHGGSGHPPSNTPEGEVPSVIARKVSQYSCQRKTTLNNYNKKFTDALEILAENYKFKENEIACLEFKRAASLLKYLPFPVTSMKDIQGLPCIGDQVRAVIEEIIEEGESSRVKEVLNDERYKAFKQFTSVFGVGVKTSEKWFRMGLRTVEEAKASKSLKLSKMQKAGFLYYEDLASCVSKAEADAVTLIVKNTVRTFLPDALVTITGGFRRGKKMGHDIDFLITNPGPKEDDELLHKVVDLLKKQGLLLYCDIKESTFVEEQLPSRKIDAMDNFQKCFAILKLYQPGVDNSSYNTSKKSDMAEVKDWKAIRVDLVITPFEQYAYALLGWTGSREFGRDLRRYAEEERKMILDRHGLYDRKKRIFLKAGSEEEIFAHLGLDYVEPWERNA

SEQ ID NO: 1117 - DNA, 1182 bp, synthetic construct
  misc_feature 1..1182: note = Variant of terminal deoxynucleotidyl transferase
  source 1..1182: mol_type = other DNA
atgcaccatcatcatcatcatggcggtagcggccatccgccgagcaataccccggagggggaggtgccgagcgttatcgcccgcaaggttagtcagtacagctgccagcgcaagaccacgctgaataactacaacaaaaagtttaccgacgcgctggagatcatggccgagaactacaaatttaaagagaacgaaatcgcgtgtctggaatttaagcgcgccgcgagtctgctgaaatatctgccgttcccggttaccagcatgaaagacatccaaggtctgccgtgcattggcgaccaagttcgtgatgtgatcgaggagatcatcgaagagggcgagagcagccgtgttaaagaagttctcaatgacgagcgctacaaggcctttaagcagttcaccagcgtgttcggtgtgggcgtgaaaaccagcgaaaagtggtttcgtatgggcctccgtacggttgaagaggcaaaggccagtaagagtctgaagctgagcaagatgcagaaggcgggcttcctgtattacgaggatctggcgagctgcgttagtaaagcggaagccgatgccgttacgctcatcgtgaagaacacggtgcgtacctttctgccggatgcgctggtgaccatcaccggcggtttccgccgtggcaaaaagatgggccacgacatcgactttctgatcacgaatccgggcccgaaagaggatgacgagctgctccacaaagtggttgatctgctcaagaagcaaggtctgctgctgtacggcgacatcaaagagagcacgttcgtggaggaacaactgccaagtcgcaaaatcgacgccatggacaacttccagaagtgcttcgccattctcaagctgtaccagccgggcgtggataacagcagctataacacgagtaagaagagtgacatggccgaggttaaggattggaaagcgattcgtgtggatctggtgatcacgccattcgagcagtacgcctatgcgctgctcggttggacgggcagcaaagaatttggtcgcgatctgcgccgctatgcggaggaagagcgcaagatgatcctcgaccgtcatggcctctacgaccgcaaaaagcgcatctttctgaaagcgggcagcgaagaagagattttcgcgcatctgggtctggattatgtggagccgtgggaacgcaacgcg

SEQ ID NO: 1118 - protein, 394 aa, synthetic construct
  REGION 1..394: note = Variant of terminal deoxynucleotidyl transferase
MHHHHHHGGSGHPPSNTPEGEVPSVIARKVSQYSCQRKTTLNNYNKKFTDALEIMAENYKFKENEIACLEFKRAASLLKYLPFPVTSMKDIQGLPCIGDQVRDVIEEIIEEGESSRVKEVLNDERYKAFKQFTSVFGVGVKTSEKWFRMGLRTVEEAKASKSLKLSKMQKAGFLYYEDLASCVSKAEADAVTLIVKNTVRTFLPDALVTITGGFRRGKKMGHDIDFLITNPGPKEDDELLHKVVDLLKKQGLLLYGDIKESTFVEEQLPSRKIDAMDNFQKCFAILKLYQPGVDNSSYNTSKKSDMAEVKDWKAIRVDLVITPFEQYAYALLGWTGSKEFGRDLRRYAEEERKMILDRHGLYDRKKRIFLKAGSEEEIFAHLGLDYVEPWERNA

SEQ ID NO: 1119 - DNA, 1182 bp, synthetic construct
  misc_feature 1..1182: note = Variant of terminal deoxynucleotidyl transferase
  source 1..1182: mol_type = other DNA
atgcaccatcatcatcatcatggcggtagcggccatccgccgagcaataccccggagggggaggtgccgagcgttatcgcccgcaaggttagtcagtacagctgccagcgcaagaccacgctgaataactacaacaaaaagtttaccgacgcgctggagatcctggccgagaactacaaatttaaagagaacgaaatcgcgtgtctggaatttaagcgcgccgcgagtctgctgaaatatctgccgttcccggttaccagcatgaaagacatccaaggtctgccgtgcattggcgaccaagttcgtgctgtgatcgaggagatcatcgaagagggcgagagcagccgtgttaaagaagttctcaatgacgagcgctacaaggcctttaagcagttcaccagcgtgttcggtgtgggcgtgaaaaccagcgaaaagtggtttcgtatgggcctccgtacggttgaagaggcaaaggccagtaagagtctgaagctgagcaagatgcagaaggcgggcttcctgtattacgaggatctggcgcgctgcgttagtaaagcggaagccgatgccgttacgctcatcgtgaagaacacggtgcgtacctttctgccggatgcgctggtgaccatcaccggcggtttccgccgtggcaaaaagatgggccacgacatcgactttctgatcacgaatccgggcccgaaagaggatgacgagctgctccacaaagtggttgatctgctcaagaagcaaggtctgctgctgtactgcgacatcaaagagagcacgttcgtggaggaacaactgccaagtcgcaaaatcgacgccatggacaacttccagaagtgcttcgccattctcaagctgtaccagccgggcgtggataacagcagctataacacgagtaagaagagtgacatggccgaggttaaggattggaaagcgattcgtgtggatctggtgatcacgccattcgagcagtacgcctatgcgctgctcggttggacgggcagcaaagaatttggtcgcgatctgcgccgctatgcggaggaagagcgcaagatgatcctcgaccgtcatggcctctacgaccgcaaaaagcgcatctttctgaaagcgggcagcgaagaagagattttcgcgcatctgggtctggattatgtggagccgtgggaacgcaacgcg

SEQ ID NO: 1120 - protein, 394 aa, synthetic construct
  REGION 1..394: note = Variant of terminal deoxynucleotidyl transferase
MHHHHHHGGSGHPPSNTPEGEVPSVIARKVSQYSCQRKTTLNNYNKKFTDALEILAENYKFKENEIACLEFKRAASLLKYLPFPVTSMKDIQGLPCIGDQVRAVIEEIIEEGESSRVKEVLNDERYKAFKQFTSVFGVGVKTSEKWFRMGLRTVEEAKASKSLKLSKMQKAGFLYYEDLARCVSKAEADAVTLIVKNTVRTFLPDALVTITGGFRRGKKMGHDIDFLITNPGPKEDDELLHKVVDLLKKQGLLLYCDIKESTFVEEQLPSRKIDAMDNFQKCFAILKLYQPGVDNSSYNTSKKSDMAEVKDWKAIRVDLVITPFEQYAYALLGWTGSKEFGRDLRRYAEEERKMILDRHGLYDRKKRIFLKAGSEEEIFAHLGLDYVEPWERNA

SEQ ID NO: 1121 - DNA, 1182 bp, synthetic construct
  misc_feature 1..1182: note = Variant of terminal deoxynucleotidyl transferase
  source 1..1182: mol_type = other DNA
atgcaccatcatcatcatcatggcggtagcggccatccgccgagcaataccccggagggggaggtgccgagcgttatcgcccgcaaggttagtcagtacagctgccagcgcaagaccacgctgaataactacaacaaaaagtttaccgacgcgctggagatcatggccgagaactacaaatttaaagagaacgaaatcgcgtgtctggaatttaagcgcgccgcgagtctgctgaaatatctgccgttcccggttaccagcatgaaagacatccaaggtctgccgtgcattggcgaccaagttcgtgatgtgatcgaggagatcatcgaagagggcgagagcagccgtgttaaagaagttctcaatgacgagcgctacaaggcctttaagcagttcaccagcgtgttcggtgtgggcgtgaaaaccagcgaaaagtggtttcgtatgggcctccgtacggttgaagaggcaaaggccagtaagagtctgaagctgagcaagatgcagaaggcgggcttcctgtattacgaggatctggcgagctgcgttagtaaagcggaagccgatgccgttacgctcatcgtgaagaacacggtgcgtacctttctgccggatgcgctggtgaccatcaccggcggtttccgccgtggcaaacctatgggccacgacatcgactttctgatcacgaatccgggcccgaaagaggatgacgagctgctccacaaagtggttgatctgctcaagaagcaaggtctgctgctgtactgcgacatcaaagagagcacgttcgtggaggaacaactgccaagtcgcaaaatcgacgccatggacaacttccagaagtgcttcgccattctcaagctgtaccagccgggcgtggataacagcagctataacacgagtaagaagagtgacatggccgaggttaaggattggaaagcgattcgtgtggatctggtgatcacgccattcgagcagtacgcctatgcgctgctcggttggacgggcagcaaagaatttggtcgcgatctgcgccgctatgcggaggaagagcgcaagatgatcctcgaccgtcatggcctctacgaccgcaaaaagcgcatctttctgaaagcgggcagcgaagaagagattttcgcgcatctgggtctggattatgtggagccgtgggaacgcaacgcg

SEQ ID NO: 1122 - protein, 394 aa, synthetic construct
  REGION 1..394: note = Variant of terminal deoxynucleotidyl transferase
MHHHHHHGGSGHPPSNTPEGEVPSVIARKVSQYSCQRKTTLNNYNKKFTDALEIMAENYKFKENEIACLEFKRAASLLKYLPFPVTSMKDIQGLPCIGDQVRDVIEEIIEEGESSRVKEVLNDERYKAFKQFTSVFGVGVKTSEKWFRMGLRTVEEAKASKSLKLSKMQKAGFLYYEDLASCVSKAEADAVTLIVKNTVRTFLPDALVTITGGFRRGKPMGHDIDFLITNPGPKEDDELLHKVVDLLKKQGLLLYCDIKESTFVEEQLPSRKIDAMDNFQKCFAILKLYQPGVDNSSYNTSKKSDMAEVKDWKAIRVDLVITPFEQYAYALLGWTGSKEFGRDLRRYAEEERKMILDRHGLYDRKKRIFLKAGSEEEIFAHLGLDYVEPWERNA

SEQ ID NO: 1123 - DNA, 1182 bp, synthetic construct
  misc_feature 1..1182: note = Variant of terminal deoxynucleotidyl transferase
  source 1..1182: mol_type = other DNA
atgcaccatcatcatcatcatggcggtagcggccatccgccgagcaataccccggagggggaggtgccgagcgttatcgcccgcaaggttagtcagtacagctgccagcgcaagaccacgctgaataactacaacaaaaagtttaccgacgcgctggagatcatggccgagaactacaaatttaaagagaacctgatcgcgtgtctggaatttaagcgcgccgcgagtctgctgaaatatctgccgttcccggttaccagcatgaaagacatccaaggtctgccgtgcattggcgaccaagttcgtgacgtgatcgaggagatcatcgaagagggcgagagcagccgtgttaaagaagttctcaatgacgagcgctacaaggcctttaagcagttcaccagcgtgttcggtgtgggcgtgaaaaccagcgaaaagtggtttcgtatgggcctccgtacggttgaagaggcaaaggccagtaagagtctgaagctgagcaagatgcagaaggcgggcttcctgtattacgaggatctggcgagctgcgttagtaaagcggaagccgatgccgttacgctcatcgtgaagaacacggtgcgtacctttctgccggatgcgctggtgaccatcaccggcggtttccgccgtggcaaaaagatgggccacgacatcgactttctgatcacgaatccgggcccgaaagaggatgacgagctgctccacaaagtggttgatctgctcaagaagcaaggtctgctgctgtactgcgacatcaaagagagcacgttcgtggaggaacaactgccaagtcgcaaaatcgacgccatggacaacttccagaagtgcttcgccattctcaagctgtaccagccgggcgtggataacagcagctataacacgagtaagaagagtgacatggccgaggttaaggattggaaagcgattcgtgtggatctggtgatcacgccattcgagcagtacgcctatgcgctgctcggttggacgggcagcaaagaatttggtcgcgatctgcgccgctatgcggaggaagagcgcaagatgatcctcgaccgtcatggcctctacgaccgcaaaaagcgcatctttctgaaagcgggcagcgaagaagagattttcgcgcatctgggtctggattatgtggagccgtgggaacgcaacgcg

SEQ ID NO: 1124 - protein, 394 aa, synthetic construct
  REGION 1..394: note = Variant of terminal deoxynucleotidyl transferase
MHHHHHHGGSGHPPSNTPEGEVPSVIARKVSQYSCQRKTTLNNYNKKFTDALEIMAENYKFKENLIACLEFKRAASLLKYLPFPVTSMKDIQGLPCIGDQVRDVIEEIIEEGESSRVKEVLNDERYKAFKQFTSVFGVGVKTSEKWFRMGLRTVEEAKASKSLKLSKMQKAGFLYYEDLASCVSKAEADAVTLIVKNTVRTFLPDALVTITGGFRRGKKMGHDIDFLITNPGPKEDDELLHKVVDLLKKQGLLLYCDIKESTFVEEQLPSRKIDAMDNFQKCFAILKLYQPGVDNSSYNTSKKSDMAEVKDWKAIRVDLVITPFEQYAYALLGWTGSKEFGRDLRRYAEEERKMILDRHGLYDRKKRIFLKAGSEEEIFAHLGLDYVEPWERNA

SEQ ID NO: 1125 - DNA, 1182 bp, synthetic construct
  misc_feature 1..1182: note = Variant of terminal deoxynucleotidyl transferase
  source 1..1182: mol_type = other DNA
atgcaccatcatcatcatcatggcggtagcggccatccgccgagcaataccccggagggggaggtgccgagcgttatcgcccgcaaggttagtcagtacagctgccagcgcaagaccacgctgaataactacaacaaaaagtttaccgacgcgctggagatcatggccgagaactacaaatttaaagagaacgaaatcgcgtgtctggaatttaagcgcgccgcgagtctgctgaaatatctgccgttcccggttaccagcatgaaagacatccaaggtctgccgtgcattggcgaccaagttcgtgacgtgatcgaggagatcatcgaagagggcgagagcagccgtgttaaagaagttctcaatgacgagcgctacaaggcctttaagcagttcaccagcgtgttcggtgtgggcgtgaaaaccagcgaaaagtggtttcgtatgggcctccgtacggttgaagaggcaaaggccagtaagagtctgaagctgagcaagatgcagaaggcgggcttcctgtattacgaggatctggcgagctgcgttagtaaagcggaagccgatgccgttacgctcatcgtgaagaacacggtgcgtacctttctgccggatgcgctggtgaccatcaccggcggtttccgccgtggcaaaaagatgggccacgacatcgactttctgatcacgaatccgggcccgaaagaggatgacgagctgctccacaaagtggttgatctgctcaagaagcaaggtctgctgctgtactgcgacatcaaagagagcacgttcgtggaggaacaactgccaagtcgcaaaatcgacgccatggacaacttccagaagtgcttcgccattctcaagctgtaccagccgggcgtggataacagcagctataacacgagtaagaagagtgacatggccgaggttaaggattggaaagcgattcgtgtggatctggtgatcacgccattcgagcagtacgcctatgcgctgctcggttggacgggcagcaaagaatttggtcgcgatctgcgccgctatgcggaggaagagcgcaagatggtgctcgaccgtcatggcctctacgaccgcaaaaagcgcatctttctgaaagcgggcagcgaagaagagattttcgcgcatctgggtctggattatgtggagccgtgggaacgcaacgcg

SEQ ID NO: 1126 - protein, 394 aa, synthetic construct
  REGION 1..394: note = Variant of terminal deoxynucleotidyl transferase
MHHHHHHGGSGHPPSNTPEGEVPSVIARKVSQYSCQRKTTLNNYNKKFTDALEIMAENYKFKENEIACLEFKRAASLLKYLPFPVTSMKDIQGLPCIGDQVRDVIEEIIEEGESSRVKEVLNDERYKAFKQFTSVFGVGVKTSEKWFRMGLRTVEEAKASKSLKLSKMQKAGFLYYEDLASCVSKAEADAVTLIVKNTVRTFLPDALVTITGGFRRGKKMGHDIDFLITNPGPKEDDELLHKVVDLLKKQGLLLYCDIKESTFVEEQLPSRKIDAMDNFQKCFAILKLYQPGVDNSSYNTSKKSDMAEVKDWKAIRVDLVITPFEQYAYALLGWTGSKEFGRDLRRYAEEERKMVLDRHGLYDRKKRIFLKAGSEEEIFAHLGLDYVEPWERNA

SEQ ID NO: 1127 - DNA, 1182 bp, synthetic construct
  misc_feature 1..1182: note = Variant of terminal deoxynucleotidyl transferase
  source 1..1182: mol_type = other DNA
atgcaccatcatcatcatcatggcggtagcggccatccgccgagcaataccccggagggggaggtgccgagcgttatcgcccgcaaggttagtcagtacagctgccagcgcaagaccacgctgaataactacaacaaaaagtttaccgacgcgctggagatcatggccgagaactacaaatttaaagagaacgaaatcgcgtgtctggaatttaagcgcgccgcgagtctgctgaaatatctgccgttcccggttaccagcatgaaagacatccaaggtctgccgtgcattggcgaccaagttcgtgacgtgatcgaggagatcatcgaagagggcgagagcagccgtgttaaagaagttctcaatgacgagcgctacaaggcctttaagcagttcaccagcgtgttcggtgtgggcgtgaaaaccagcgaaaagtggtttcgtatgggcctccgtacggttgaagaggcaaaggccagtaagagtctgaagctgagcaagatgcagaaggcgggcttcctgtattacgaggatctggcgagctgcgttagtaaagcggaagccgatgccgttacgctcatcgtgaagaacacggtgcgtacctttctgccggatgcgctggtgaccatcaccggcggtttccgccgtggcaaacttatgggccacgacatcgactttctgatcacgaatccgggcccgaaagaggatgacgagctgctccacaaagtggttgatctgctcaagaagcaaggtctgctgctgtactgcgacatcaaagagagcacgttcgtggaggaacaactgccaagtcgcaaaatcgacgccatggacaacttccagaagtgcttcgccattctcaagctgtaccagccgggcgtggataacagcagctataacacgagtaagaagagtgacatggccgaggttaaggattggaaagcgattcgtgtggatctggtgatcacgccattcgagcagtacgcctatgcgctgctcggttggacgggcagcaaagaatttggtcgcgatctgcgccgctatgcggaggaagagcgcaagatgatcctcgaccgtcatggcctctacgaccgcaaaaagcgcatctttctgaaagcgggcagcgaagaagagattttcgcgcatctgggtctggattatgtggagccgtgggaacgcaacgcg

SEQ ID NO: 1128 - protein, 394 aa, synthetic construct
  REGION 1..394: note = Variant of terminal deoxynucleotidyl transferase
MHHHHHHGGSGHPPSNTPEGEVPSVIARKVSQYSCQRKTTLNNYNKKFTDALEIMAENYKFKENEIACLEFKRAASLLKYLPFPVTSMKDIQGLPCIGDQVRDVIEEIIEEGESSRVKEVLNDERYKAFKQFTSVFGVGVKTSEKWFRMGLRTVEEAKASKSLKLSKMQKAGFLYYEDLASCVSKAEADAVTLIVKNTVRTFLPDALVTITGGFRRGKLMGHDIDFLITNPGPKEDDELLHKVVDLLKKQGLLLYCDIKESTFVEEQLPSRKIDAMDNFQKCFAILKLYQPGVDNSSYNTSKKSDMAEVKDWKAIRVDLVITPFEQYAYALLGWTGSKEFGRDLRRYAEEERKMILDRHGLYDRKKRIFLKAGSEEEIFAHLGLDYVEPWERNA

SEQ ID NO: 1129 - DNA, 1182 bp, synthetic construct
  misc_feature 1..1182: note = Variant of terminal deoxynucleotidyl transferase
  source 1..1182: mol_type = other DNA
atgcaccatcatcatcatcatggcggtagcggccatccgccgagcaataccccggagggggaggtgccgagcgttatcgcccgcaaggttagtcagtacagctgccagcgcaagaccacgctgaataactacaacaaaaagtttaccgacgcgctggagatcatggccgagaactacaaatttaaagagaacgaaatcgcgtgtctggaatttaagcgcgccgcgagtgttctgaaatatctgccgttcccggttaccagcatgaaagacatccaaggtctgccgtgcattggcgaccaagttcgtgacgtgatcgaggagatcatcgaagagggcgagagcagccgtgttaaagaagttctcaatgacgagcgctacaaggcctttaagcagttcaccagcgtgttcggtgtgggcgtgaaaaccagcgaaaagtggtttcgtatgggcctccgtacggttgaagaggcaaaggccagtaagagtctgaagctgagcaagatgcagaaggcgggcttcctgtattacgaggatctggcgagctgcgttagtaaagcggaagccgatgccgttacgctcatcgtgaagaacacggtgcgtacctttctgccggatgcgctggtgaccatcaccggcggtttccgccgtggcaaaaagatgggccacgacatcgactttctgatcacgaatccgggcccgaaagaggatgacgagctgctccacaaagtggttgatctgctcaagaagcaaggtctgctgctgtactgcgacatcaaagagagcacgttcgtggaggaacaactgccaagtcgcaaaatcgacgccatggacaacttccagaagtgcttcgccattctcaagctgtaccagccgggcgtggataacagcagctataacacgagtaagaagagtgacatggccgaggttaaggattggaaagcgattcgtgtggatctggtgatcacgccattcgagcagtacgcctatgcgctgctcggttggacgggcagcaaagaatttggtcgcgatctgcgccgctatgcggaggaagagcgcaagatgatcctcgaccgtcatggcctctacgaccgcaaaaagcgcatctttctgaaagcgggcagcgaagaagagattttcgcgcatctgggtctggattatgtggagccgtgggaacgcaacgcg

SEQ ID NO: 1130 - protein, 394 aa, synthetic construct
  REGION 1..394: note = Variant of terminal deoxynucleotidyl transferase
MHHHHHHGGSGHPPSNTPEGEVPSVIARKVSQYSCQRKTTLNNYNKKFTDALEIMAENYKFKENEIACLEFKRAASVLKYLPFPVTSMKDIQGLPCIGDQVRDVIEEIIEEGESSRVKEVLNDERYKAFKQFTSVFGVGVKTSEKWFRMGLRTVEEAKASKSLKLSKMQKAGFLYYEDLASCVSKAEADAVTLIVKNTVRTFLPDALVTITGGFRRGKKMGHDIDFLITNPGPKEDDELLHKVVDLLKKQGLLLYCDIKESTFVEEQLPSRKIDAMDNFQKCFAILKLYQPGVDNSSYNTSKKSDMAEVKDWKAIRVDLVITPFEQYAYALLGWTGSKEFGRDLRRYAEEERKMILDRHGLYDRKKRIFLKAGSEEEIFAHLGLDYVEPWERNA

SEQ ID NO: 1131 - DNA, 1182 bp, synthetic construct
  misc_feature 1..1182: note = Variant of terminal deoxynucleotidyl transferase
  source 1..1182: mol_type = other DNA
atgcaccatcatcatcatcatggcggtagcggccatccgccgagcaataccccggagggggaggtgccgagcgttatcgcccgcaaggttagtcagtacagctgccagcgcaagaccacgctgaataactacaacaaaaagtttaccgacgcgctggagatcatggccgagaactacaaatttaaagagaacgaaagtgcgtgtctggaatttaagcgcgccgcgagtctgctgaaatatctgccgttcccggttaccagcatgaaagacatccaaggtctgccgtgcattggcgaccaagttcgtgacgtgatcgaggagatcatcgaagagggcgagagcagccgtgttaaagaagttctcaatgacgagcgctacaaggcctttaagcagttcaccagcgtgttcggtgtgggcgtgaaaaccagcgaaaagtggtttcgtatgggcctccgtacggttgaagaggcaaaggccagtaagagtctgaagctgagcaagatgcagaaggcgggcttcctgtattacgaggatctggcgagctgcgttagtaaagcggaagccgatgccgttacgctcatcgtgaagaacacggtgcgtacctttctgccggatgcgctggtgaccatcaccggcggtttccgccgtggcaaaaagatgggccacgacatcgactttctgatcacgaatccgggcccgaaagaggatgacgagctgctccacaaagtggttgatctgctcaagaagcaaggtctgctgctgtactgcgacatcaaagagagcacgttcgtggaggaacaactgccaagtcgcaaaatcgacgccatggacaacttccagaagtgcttcgccattctcaagctgtaccagccgggcgtggataacagcagctataacacgagtaagaagagtgacatggccgaggttaaggattggaaagcgattcgtgtggatctggtgatcacgccattcgagcagtacgcctatgcgctgctcggttggacgggcagcaaagaatttggtcgcgatctgcgccgctatgcggaggaagagcgcaagatgatcctcgaccgtcatggcctctacgaccgcaaaaagcgcatctttctgaaagcgggcagcgaagaagagattttcgcgcatctgggtctggattatgtggagccgtgggaacgcaacgcg

SEQ ID NO: 1132 - protein, 394 aa, synthetic construct
  REGION 1..394: note = Variant of terminal deoxynucleotidyl transferase
MHHHHHHGGSGHPPSNTPEGEVPSVIARKVSQYSCQRKTTLNNYNKKFTDALEIMAENYKFKENESACLEFKRAASLLKYLPFPVTSMKDIQGLPCIGDQVRDVIEEIIEEGESSRVKEVLNDERYKAFKQFTSVFGVGVKTSEKWFRMGLRTVEEAKASKSLKLSKMQKAGFLYYEDLASCVSKAEADAVTLIVKNTVRTFLPDALVTITGGFRRGKKMGHDIDFLITNPGPKEDDELLHKVVDLLKKQGLLLYCDIKESTFVEEQLPSRKIDAMDNFQKCFAILKLYQPGVDNSSYNTSKKSDMAEVKDWKAIRVDLVITPFEQYAYALLGWTGSKEFGRDLRRYAEEERKMILDRHGLYDRKKRIFLKAGSEEEIFAHLGLDYVEPWERNA

SEQ ID NO: 1133 - DNA, 1182 bp, synthetic construct
  misc_feature 1..1182: note = Variant of terminal deoxynucleotidyl transferase
  source 1..1182: mol_type = other DNA
atgcaccatcatcatcatcatggcggtagcggccatccgccgagcaataccccggagggggaggtgccgagcgttatcgcccgcaaggttagtcagtacagctgccagcgcaagaccacgctgaataactacaacaaaaagtttaccgacgcgctggagatcatggccgagaactacaaatttaaagagaacgaaatcgcgtgtctggtgtttaagcgcgccgcgagtctgctgaaatatctgccgttcccggttaccagcatgaaagacatccaaggtctgccgtgcattggcgaccaagttcgtgacgtgatcgaggagatcatcgaagagggcgagagcagccgtgttaaagaagttctcaatgacgagcgctacaaggcctttaagcagttcaccagcgtgttcggtgtgggcgtgaaaaccagcgaaaagtggtttcgtatgggcctccgtacggttgaagaggcaaaggccagtaagagtctgaagctgagcaagatgcagaaggcgggcttcctgtattacgaggatctggcgagctgcgttagtaaagcggaagccgatgccgttacgctcatcgtgaagaacacggtgcgtacctttctgccggatgcgctggtgaccatcaccggcggtttccgccgtggcaaaaagatgggccacgacatcgactttctgatcacgaatccgggcccgaaagaggatgacgagctgctccacaaagtggttgatctgctcaagaagcaaggtctgctgctgtactgcgacatcaaagagagcacgttcgtggaggaacaactgccaagtcgcaaaatcgacgccatggacaacttccagaagtgcttcgccattctcaagctgtaccagccgggcgtggataacagcagctataacacgagtaagaagagtgacatggccgaggttaaggattggaaagcgattcgtgtggatctggtgatcacgccattcgagcagtacgcctatgcgctgctcggttggacgggcagcaaagaatttggtcgcgatctgcgccgctatgcggaggaagagcgcaagatgatcctcgaccgtcatggcctctacgaccgcaaaaagcgcatctttctgaaagcgggcagcgaagaagagattttcgcgcatctgggtctggattatgtggagccgtgggaacgcaacgcg

SEQ ID NO: 1134 - protein, 394 aa, synthetic construct
  REGION 1..394: note = Variant of terminal deoxynucleotidyl transferase
MHHHHHHGGSGHPPSNTPEGEVPSVIARKVSQYSCQRKTTLNNYNKKFTDALEIMAENYKFKENEIACLVFKRAASLLKYLPFPVTSMKDIQGLPCIGDQVRDVIEEIIEEGESSRVKEVLNDERYKAFKQFTSVFGVGVKTSEKWFRMGLRTVEEAKASKSLKLSKMQKAGFLYYEDLASCVSKAEADAVTLIVKNTVRTFLPDALVTITGGFRRGKKMGHDIDFLITNPGPKEDDELLHKVVDLLKKQGLLLYCDIKESTFVEEQLPSRKIDAMDNFQKCFAILKLYQPGVDNSSYNTSKKSDMAEVKDWKAIRVDLVITPFEQYAYALLGWTGSKEFGRDLRRYAEEERKMILDRHGLYDRKKRIFLKAGSEEEIFAHLGLDYVEPWERNA

SEQ ID NO: 1135 - DNA, 1182 bp, synthetic construct
  misc_feature 1..1182: note = Variant of terminal deoxynucleotidyl transferase
  source 1..1182: mol_type = other DNA
atgcaccatcatcatcatcatggcggtagcggccatccgccgagcaataccccggagggggaggtgccgagcgttatcgcccgcaaggttagtcagtacagctgccagcgcaagaccacgctgaataactacaacaaaaagtttaccgacgcgctggagatcatggccgagaactacaaatttaaagagaacgaaatcgcgtgtctggaatttaagcgcgccgcgagtattctgaaatatctgccgttcccggttaccagcatgaaagacatccaaggtctgccgtgcattggcgaccaagttcgtgacgtgatcgaggagatcatcgaagagggcgagagcagccgtgttaaagaagttctcaatgacgagcgctacaaggcctttaagcagttcaccagcgtgttcggtgtgggcgtgaaaaccagcgaaaagtggtttcgtatgggcctccgtacggttgaagaggcaaaggccagtaagagtctgaagctgagcaagatgcagaaggcgggcttcctgtattacgaggatctggcgagctgcgttagtaaagcggaagccgatgccgttacgctcatcgtgaagaacacggtgcgtacctttctgccggatgcgctggtgaccatcaccggcggtttccgccgtggcaaaaagatgggccacgacatcgactttctgatcacgaatccgggcccgaaagaggatgacgagctgctccacaaagtggttgatctgctcaagaagcaaggtctgctgctgtactgcgacatcaaagagagcacgttcgtggaggaacaactgccaagtcgcaaaatcgacgccatggacaacttccagaagtgcttcgccattctcaagctgtaccagccgggcgtggataacagcagctataacacgagtaagaagagtgacatggccgaggttaaggattggaaagcgattcgtgtggatctggtgatcacgccattcgagcagtacgcctatgcgctgctcggttggacgggcagcaaagaatttggtcgcgatctgcgccgctatgcggaggaagagcgcaagatgatcctcgaccgtcatggcctctacgaccgcaaaaagcgcatctttctgaaagcgggcagcgaagaagagattttcgcgcatctgggtctggattatgtggagccgtgggaacgcaacgcg

SEQ ID NO: 1136 - protein, 394 aa, synthetic construct
  REGION 1..394: note = Variant of terminal deoxynucleotidyl transferase
MHHHHHHGGSGHPPSNTPEGEVPSVIARKVSQYSCQRKTTLNNYNKKFTDALEIMAENYKFKENEIACLEFKRAASILKYLPFPVTSMKDIQGLPCIGDQVRDVIEEIIEEGESSRVKEVLNDERYKAFKQFTSVFGVGVKTSEKWFRMGLRTVEEAKASKSLKLSKMQKAGFLYYEDLASCVSKAEADAVTLIVKNTVRTFLPDALVTITGGFRRGKKMGHDIDFLITNPGPKEDDELLHKVVDLLKKQGLLLYCDIKESTFVEEQLPSRKIDAMDNFQKCFAILKLYQPGVDNSSYNTSKKSDMAEVKDWKAIRVDLVITPFEQYAYALLGWTGSKEFGRDLRRYAEEERKMILDRHGLYDRKKRIFLKAGSEEEIFAHLGLDYVEPWERNA

SEQ ID NO: 1137 - DNA, 1182 bp, synthetic construct
  misc_feature 1..1182: note = Variant of terminal deoxynucleotidyl transferase
  source 1..1182: mol_type = other DNA
atgcaccatcatcatcatcatggcggtagcggccatccgccgagcaataccccggagggggaggtgccgagcgttatcgcccgcaaggttagtcagtacagctgccagcgcaagaccacgctgaataactacaacaaaaagtttaccgacgcgctggagatcatggccgaggattacaaatttaaagagaacgaaatcgcgtgtctggaatttaagcgcgccgcgagtctgctgaaatatctgccgttcccggttaccagcatgaaagacatccaaggtctgccgtgcattggcgaccaagttcgtgacgtgatcgaggagatcatcgaagagggcgagagcagccgtgttaaagaagttctcaatgacgagcgctacaaggcctttaagcagttcaccagcgtgttcggtgtgggcgtgaaaaccagcgaaaagtggtttcgtatgggcctccgtacggttgaagaggcaaaggccagtaagagtctgaagctgagcaagatgcagaaggcgggcttcctgtattacgaggatctggcgagctgcgttagtaaagcggaagccgatgccgttacgctcatcgtgaagaacacggtgcgtacctttctgccggatgcgctggtgaccatcaccggcggtttccgccgtggcaaaaagatgggccacgacatcgactttctgatcacgaatccgggcccgaaagaggatgacgagctgctccacaaagtggttgatctgctcaagaagcaaggtctgctgctgtactgcgacatcaaagagagcacgttcgtggaggaacaactgccaagtcgcaaaatcgacgccatggacaacttccagaagtgcttcgccattctcaagctgtaccagccgggcgtggataacagcagctataacacgagtaagaagagtgacatggccgaggttaaggattggaaagcgattcgtgtggatctggtgatcacgccattcgagcagtacgcctatgcgctgctcggttggacgggcagcaaagaatttggtcgcgatctgcgccgctatgcggaggaagagcgcaagatgatcctcgaccgtcatggcctctacgaccgcaaaaagcgcatctttctgaaagcgggcagcgaagaagagattttcgcgcatctgggtctggattatgtggagccgtgggaacgcaacgcg

SEQ ID NO: 1138 - protein, 394 aa, synthetic construct
  REGION 1..394: note = Variant of terminal deoxynucleotidyl transferase
MHHHHHHGGSGHPPSNTPEGEVPSVIARKVSQYSCQRKTTLNNYNKKFTDALEIMAEDYKFKENEIACLEFKRAASLLKYLPFPVTSMKDIQGLPCIGDQVRDVIEEIIEEGESSRVKEVLNDERYKAFKQFTSVFGVGVKTSEKWFRMGLRTVEEAKASKSLKLSKMQKAGFLYYEDLASCVSKAEADAVTLIVKNTVRTFLPDALVTITGGFRRGKKMGHDIDFLITNPGPKEDDELLHKVVDLLKKQGLLLYCDIKESTFVEEQLPSRKIDAMDNFQKCFAILKLYQPGVDNSSYNTSKKSDMAEVKDWKAIRVDLVITPFEQYAYALLGWTGSKEFGRDLRRYAEEERKMILDRHGLYDRKKRIFLKAGSEEEIFAHLGLDYVEPWERNA

SEQ ID NO: 1139 - DNA, 1182 bp, synthetic construct
  misc_feature 1..1182: note = Variant of terminal deoxynucleotidyl transferase
  source 1..1182: mol_type = other DNA
atgcaccatcatcatcatcatggcggtagcggccatccgccgagcaataccccggagggggaggtgccgagcgttatcgcccgcaaggttagtcagtacagctgccagcgcaagaccacgctgaataactacaacaaaaagtttaccgacgcgctggagatcatggccgagaactacaaatttaaagagaacgaaatcgcgtgtctggaagcgaagcgcgccgcgagtctgctgaaatatctgccgttcccggttaccagcatgaaagacatccaaggtctgccgtgcattggcgaccaagttcgtgacgtgatcgaggagatcatcgaagagggcgagagcagccgtgttaaagaagttctcaatgacgagcgctacaaggcctttaagcagttcaccagcgtgttcggtgtgggcgtgaaaaccagcgaaaagtggtttcgtatgggcctccgtacggttgaagaggcaaaggccagtaagagtctgaagctgagcaagatgcagaaggcgggcttcctgtattacgaggatctggcgagctgcgttagtaaagcggaagccgatgccgttacgctcatcgtgaagaacacggtgcgtacctttctgccggatgcgctggtgaccatcaccggcggtttccgccgtggcaaaaagatgggccacgacatcgactttctgatcacgaatccgggcccgaaagaggatgacgagctgctccacaaagtggttgatctgctcaagaagcaaggtctgctgctgtactgcgacatcaaagagagcacgttcgtggaggaacaactgccaagtcgcaaaatcgacgccatggacaacttccagaagtgcttcgccattctcaagctgtaccagccgggcgtggataacagcagctataacacgagtaagaagagtgacatggccgaggttaaggattggaaagcgattcgtgtggatctggtgatcacgccattcgagcagtacgcctatgcgctgctcggttggacgggcagcaaagaatttggtcgcgatctgcgccgctatgcggaggaagagcgcaagatgatcctcgaccgtcatggcctctacgaccgcaaaaagcgcatctttctgaaagcgggcagcgaagaagagattttcgcgcatctgggtctggattatgtggagccgtgggaacgcaacgcg

SEQ ID NO: 1140 - protein, 394 aa, synthetic construct
  REGION 1..394: note = Variant of terminal deoxynucleotidyl transferase
MHHHHHHGGSGHPPSNTPEGEVPSVIARKVSQYSCQRKTTLNNYNKKFTDALEIMAENYKFKENEIACLEAKRAASLLKYLPFPVTSMKDIQGLPCIGDQVRDVIEEIIEEGESSRVKEVLNDERYKAFKQFTSVFGVGVKTSEKWFRMGLRTVEEAKASKSLKLSKMQKAGFLYYEDLASCVSKAEADAVTLIVKNTVRTFLPDALVTITGGFRRGKKMGHDIDFLITNPGPKEDDELLHKVVDLLKKQGLLLYCDIKESTFVEEQLPSRKIDAMDNFQKCFAILKLYQPGVDNSSYNTSKKSDMAEVKDWKAIRVDLVITPFEQYAYALLGWTGSKEFGRDLRRYAEEERKMILDRHGLYDRKKRIFLKAGSEEEIFAHLGLDYVEPWERNA

SEQ ID NO: 1141 - DNA, 1182 bp, synthetic construct
  misc_feature 1..1182: note = Variant of terminal deoxynucleotidyl transferase
  source 1..1182: mol_type = other DNA
atgcaccatcatcatcatcatggcggtagcggccatccgccgagcaataccccggagggggaggtgccgagcgttatcgcccgcaaggttagtcagtacagctgccagcgcaagaccacgctgaataactacaacaaaaagtttaccgacgcgctggagatcatggccgagaactacaaatttaaagagaacgaaatcgcgtgtctggaatttaagcgcgccgcgagtctgtttaaatatctgccgttcccggttaccagcatgaaagacatccaaggtctgccgtgcattggcgaccaagttcgtgacgtgatcgaggagatcatcgaagagggcgagagcagccgtgttaaagaagttctcaatgacgagcgctacaaggcctttaagcagttcaccagcgtgttcggtgtgggcgtgaaaaccagcgaaaagtggtttcgtatgggcctccgtacggttgaagaggcaaaggccagtaagagtctgaagctgagcaagatgcagaaggcgggcttcctgtattacgaggatctggcgagctgcgttagtaaagcggaagccgatgccgttacgctcatcgtgaagaacacggtgcgtacctttctgccggatgcgctggtgaccatcaccggcggtttccgccgtggcaaaaagatgggccacgacatcgactttctgatcacgaatccgggcccgaaagaggatgacgagctgctccacaaagtggttgatctgctcaagaagcaaggtctgctgctgtactgcgacatcaaagagagcacgttcgtggaggaacaactgccaagtcgcaaaatcgacgccatggacaacttccagaagtgcttcgccattctcaagctgtaccagccgggcgtggataacagcagctataacacgagtaagaagagtgacatggccgaggttaaggattggaaagcgattcgtgtggatctggtgatcacgccattcgagcagtacgcctatgcgctgctcggttggacgggcagcaaagaatttggtcgcgatctgcgccgctatgcggaggaagagcgcaagatgatcctcgaccgtcatggcctctacgaccgcaaaaagcgcatctttctgaaagcgggcagcgaagaagagattttcgcgcatctgggtctggattatgtggagccgtgggaacgcaacgcg

SEQ ID NO: 1142 - protein, 394 aa, synthetic construct
  REGION 1..394: note = Variant of terminal deoxynucleotidyl transferase
MHHHHHHGGSGHPPSNTPEGEVPSVIARKVSQYSCQRKTTLNNYNKKFTDALEIMAENYKFKENEIACLEFKRAASLFKYLPFPVTSMKDIQGLPCIGDQVRDVIEEIIEEGESSRVKEVLNDERYKAFKQFTSVFGVGVKTSEKWFRMGLRTVEEAKASKSLKLSKMQKAGFLYYEDLASCVSKAEADAVTLIVKNTVRTFLPDALVTITGGFRRGKKMGHDIDFLITNPGPKEDDELLHKVVDLLKKQGLLLYCDIKESTFVEEQLPSRKIDAMDNFQKCFAILKLYQPGVDNSSYNTSKKSDMAEVKDWKAIRVDLVITPFEQYAYALLGWTGSKEFGRDLRRYAEEERKMILDRHGLYDRKKRIFLKAGSEEEIFAHLGLDYVEPWERNA

SEQ ID NO: 1143 - DNA, 1182 bp, synthetic construct
  misc_feature 1..1182: note = Variant of terminal deoxynucleotidyl transferase
  source 1..1182: mol_type = other DNA
atgcaccatcatcatcatcatggcggtagcggccatccgccgagcaataccccggagggggaggtgccgagcgttatcgcccgcaaggttagtcagtacagctgccagcgcaagaccacgctgaataactacaacaaaaagtttaccgacgcgctggagatcatggccgagaactacaaatttaaagagaacgaaatcgcgtgtctggaatttaagcgcggggcgagtctgctgaaatatctgccgttcccggttaccagcatgaaagacatccaaggtctgccgtgcattggcgaccaagttcgtgacgtgatcgaggagatcatcgaagagggcgagagcagccgtgttaaagaagttctcaatgacgagcgctacaaggcctttaagcagttcaccagcgtgttcggtgtgggcgtgaaaaccagcgaaaagtggtttcgtatgggcctccgtacggttgaagaggcaaaggccagtaagagtctgaagctgagcaagatgcagaaggcgggcttcctgtattacgaggatctggcgagctgcgttagtaaagcggaagccgatgccgttacgctcatcgtgaagaacacggtgcgtacctttctgccggatgcgctggtgaccatcaccggcggtttccgccgtggcaaaaagatgggccacgacatcgactttctgatcacgaatccgggcccgaaagaggatgacgagctgctccacaaagtggttgatctgctcaagaagcaaggtctgctgctgtactgcgacatcaaagagagcacgttcgtggaggaacaactgccaagtcgcaaaatcgacgccatggacaacttccagaagtgcttcgccattctcaagctgtaccagccgggcgtggataacagcagctataacacgagtaagaagagtgacatggccgaggttaaggattggaaagcgattcgtgtggatctggtgatcacgccattcgagcagtacgcctatgcgctgctcggttggacgggcagcaaagaatttggtcgcgatctgcgccgctatgcggaggaagagcgcaagatgatcctcgaccgtcatggcctctacgaccgcaaaaagcgcatctttctgaaagcgggcagcgaagaagagattttcgcgcatctgggtctggattatgtggagccgtgggaacgcaacgcg

SEQ ID NO: 1144 - protein, 394 aa, synthetic construct
  REGION 1..394: note = Variant of terminal deoxynucleotidyl transferase
MHHHHHHGGSGHPPSNTPEGEVPSVIARKVSQYSCQRKTTLNNYNKKFTDALEIMAENYKFKENEIACLEFKRGASLLKYLPFPVTSMKDIQGLPCIGDQVRDVIEEIIEEGESSRVKEVLNDERYKAFKQFTSVFGVGVKTSEKWFRMGLRTVEEAKASKSLKLSKMQKAGFLYYEDLASCVSKAEADAVTLIVKNTVRTFLPDALVTITGGFRRGKKMGHDIDFLITNPGPKEDDELLHKVVDLLKKQGLLLYCDIKESTFVEEQLPSRKIDAMDNFQKCFAILKLYQPGVDNSSYNTSKKSDMAEVKDWKAIRVDLVITPFEQYAYALLGWTGSKEFGRDLRRYAEEERKMILDRHGLYDRKKRIFLKAGSEEEIFAHLGLDYVEPWERNA

SEQ ID NO: 1145 - DNA, 1182 bp, synthetic construct
  misc_feature 1..1182: note = Variant of terminal deoxynucleotidyl transferase
  source 1..1182: mol_type = other DNA
atgcaccatcatcatcatcatggcggtagcggccatccgccgagcaataccccggagggggaggtgccgagcgttatcgcccgcaaggttagtcagtacagctgccagcgcaagaccacgctgaataactacaacaaaaagtttaccgacgcgctggagatcatggccgagaactacaaatttaaagagaacgaaatcgcgtgtctggaatttaagcgcgccgcgagtctgctgaaatatctgccgttcccggttaccagcatgaaagacatccaaggtctgccgtgcattggcgaccaagttcgtgacgtgatcgaggagatcatcgaagagggcgagagcagccgtgttaaagaagttctcaatgacgagcgctacaaggcctttaagcagttcaccagcgtgttcggtgtgggcgtgaaaaccagcgaaaagtggtttcgtatgggcctccgtacggttgaagaggcaaaggccagtaagagtctgaagctgagcaagatgcagaaggcgggcttcctgtattacgaggatctggcgagctgcgttagtaaagcggaagccgatgccgttacgctcatcgtgaagaacacggtgcgtacctttctgccggatgcgctggtgaccatcaccggcggtttccgccgtggcaaaaagatgggccacgacatcgactttctgatcacgaatccgggcccgaaagaggatgacgagctgctccacaaagtggttgatctgctcaagaagcaaggtctgctgctgtactgcgacatcaaagagagcacgttcgtggaggaacaactgccaagtcgcaaaatcgacgccatggacaacttccagaagtgcttcgccattctcaagctgtaccagccgggcgtggataacagcagctataacacgagtaagaagagtgacatggccgaggttaaggattggaaagcgattcgtgtggatctggtgatcacgccattcgagcagtacttttatgcgctgctcggttggacgggcagcaaagaatttggtcgcgatctgcgccgctatgcggaggaagagcgcaagatgatcctcgaccgtcatggcctctacgaccgcaaaaagcgcatctttctgaaagcgggcagcgaagaagagattttcgcgcatctgggtctggattatgtggagccgtgggaacgcaacgcg

SEQ ID NO: 1146 - protein, 394 aa, synthetic construct
  REGION 1..394: note = Variant of terminal deoxynucleotidyl transferase
MHHHHHHGGSGHPPSNTPEGEVPSVIARKVSQYSCQRKTTLNNYNKKFTDALEIMAENYKFKENEIACLEFKRAASLLKYLPFPVTSMKDIQGLPCIGDQVRDVIEEIIEEGESSRVKEVLNDERYKAFKQFTSVFGVGVKTSEKWFRMGLRTVEEAKASKSLKLSKMQKAGFLYYEDLASCVSKAEADAVTLIVKNTVRTFLPDALVTITGGFRRGKKMGHDIDFLITNPGPKEDDELLHKVVDLLKKQGLLLYCDIKESTFVEEQLPSRKIDAMDNFQKCFAILKLYQPGVDNSSYNTSKKSDMAEVKDWKAIRVDLVITPFEQYFYALLGWTGSKEFGRDLRRYAEEERKMILDRHGLYDRKKRIFLKAGSEEEIFAHLGLDYVEPWERNA

SEQ ID NO: 1147 - DNA, 1182 bp, synthetic construct
  misc_feature 1..1182: note = Variant of terminal deoxynucleotidyl transferase
  source 1..1182: mol_type = other DNA
atgcaccatcatcatcatcatggcggtagcggccatccgccgagcaataccccggagggggaggtgccgagcgttatcgcccgcaaggttagtcagtacagctgccagcgcaagaccacgctgaataactacaacaaaaagtttaccgacgcgctggagatcatggccgagaactacaaatttaaagagaacgaaatcgcgtgtctggaatttaagcgcgccgcgagtctgctgcggtatctgccgttcccggttaccagcatgaaagacatccaaggtctgccgtgcattggcgaccaagttcgtgacgtgatcgaggagatcatcgaagagggcgagagcagccgtgttaaagaagttctcaatgacgagcgctacaaggcctttaagcagttcaccagcgtgttcggtgtgggcgtgaaaaccagcgaaaagtggtttcgtatgggcctccgtacggttgaagaggcaaaggccagtaagagtctgaagctgagcaagatgcagaaggcgggcttcctgtattacgaggatctggcgagctgcgttagtaaagcggaagccgatgccgttacgctcatcgtgaagaacacggtgcgtacctttctgccggatgcgctggtgaccatcaccggcggtttccgccgtggcaaaaagatgggccacgacatcgactttctgatcacgaatccgggcccgaaagaggatgacgagctgctccacaaagtggttgatctgctcaagaagcaaggtctgctgctgtactgcgacatcaaagagagcacgttcgtggaggaacaactgccaagtcgcaaaatcgacgccatggacaacttccagaagtgcttcgccattctcaagctgtaccagccgggcgtggataacagcagctataacacgagtaagaagagtgacatggccgaggttaaggattggaaagcgattcgtgtggatctggtgatcacgccattcgagcagtacgcctatgcgctgctcggttggacgggcagcaaagaatttggtcgcgatctgcgccgctatgcggaggaagagcgcaagatgatcctcgaccgtcatggcctctacgaccgcaaaaagcgcatctttctgaaagcgggcagcgaagaagagattttcgcgcatctgggtctggattatgtggagccgtgggaacgcaacgcg

SEQ ID NO: 1148 - protein, 394 aa, synthetic construct
  REGION 1..394: note = Variant of terminal deoxynucleotidyl transferase
MHHHHHHGGSGHPPSNTPEGEVPSVIARKVSQYSCQRKTTLNNYNKKFTDALEIMAENYKFKENEIACLEFKRAASLLRYLPFPVTSMKDIQGLPCIGDQVRDVIEEIIEEGESSRVKEVLNDERYKAFKQFTSVFGVGVKTSEKWFRMGLRTVEEAKASKSLKLSKMQKAGFLYYEDLASCVSKAEADAVTLIVKNTVRTFLPDALVTITGGFRRGKKMGHDIDFLITNPGPKEDDELLHKVVDLLKKQGLLLYCDIKESTFVEEQLPSRKIDAMDNFQKCFAILKLYQPGVDNSSYNTSKKSDMAEVKDWKAIRVDLVITPFEQYAYALLGWTGSKEFGRDLRRYAEEERKMILDRHGLYDRKKRIFLKAGSEEEIFAHLGLDYVEPWERNA

SEQ ID NO: 1149 - DNA, 1182 bp, synthetic construct
  misc_feature 1..1182: note = Variant of terminal deoxynucleotidyl transferase
  source 1..1182: mol_type = other DNA
atgcaccatcatcatcatcatggcggtagcggccatccgccgagcaataccccggagggggaggtgccgagcgttatcgcccgcaaggttagtcagtacagctgccagcgcaagaccacgctgaataactacaacaaaaagtttaccgacgcgctggagatcatggccgagaactacaaatttaaagagaacgaaatcgcgtgtctggaatttaagcgcgccgcgagtctgctgaaatatctgccgttcccggttaccagcatgaaagacatccaaggtctgccgtgcattggcgaccaagttcgtgacgtgatcgaggagatcatcgaagagggcgagagcagccgtgttaaagaagttctcaatgacgagcgctacaaggcctttaagcagttcaccagcgtgttcggtgtgggcgtgaaaaccagcgaaaagtggtttcgtatgggcctccgtacggttgaagaggcaaaggccagtaagagtctgaagctgagcaagatgcagaaggcgggcttcctgtattacgaggatctggcgagctgcgttagtaaagcggaagccgatgccgttacgctcatcgtgaagaacacggtgcgtacctttctgccggatgcgctggtgaccatcaccggcggtttccgccgtggcaaagttatgggccacgacatcgactttctgatcacgaatccgggcccgaaagaggatgacgagctgctccacaaagtggttgatctgctcaagaagcaaggtctgctgctgtactgcgacatcaaagagagcacgttcgtggaggaacaactgccaagtcgcaaaatcgacgccatggacaacttccagaagtgcttcgccattctcaagctgtaccagccgggcgtggataacagcagctataacacgagtaagaagagtgacatggccgaggttaaggattggaaagcgattcgtgtggatctggtgatcacgccattcgagcagtacgcctatgcgctgctcggttggacgggcagcaaagaatttggtcgcgatctgcgccgctatgcggaggaagagcgcaagatgatcctcgaccgtcatggcctctacgaccgcaaaaagcgcatctttctgaaagcgggcagcgaagaagagattttcgcgcatctgggtctggattatgtggagccgtgggaacgcaacgcg

SEQ ID NO: 1150 - protein, 394 aa, synthetic construct
  REGION 1..394: note = Variant of terminal deoxynucleotidyl transferase
MHHHHHHGGSGHPPSNTPEGEVPSVIARKVSQYSCQRKTTLNNYNKKFTDALEIMAENYKFKENEIACLEFKRAASLLKYLPFPVTSMKDIQGLPCIGDQVRDVIEEIIEEGESSRVKEVLNDERYKAFKQFTSVFGVGVKTSEKWFRMGLRTVEEAKASKSLKLSKMQKAGFLYYEDLASCVSKAEADAVTLIVKNTVRTFLPDALVTITGGFRRGKVMGHDIDFLITNPGPKEDDELLHKVVDLLKKQGLLLYCDIKESTFVEEQLPSRKIDAMDNFQKCFAILKLYQPGVDNSSYNTSKKSDMAEVKDWKAIRVDLVITPFEQYAYALLGWTGSKEFGRDLRRYAEEERKMILDRHGLYDRKKRIFLKAGSEEEIFAHLGLDYVEPWERNA

SEQ ID NO: 1151 - DNA, 1182 bp, synthetic construct
  misc_feature 1..1182: note = Variant of terminal deoxynucleotidyl transferase
  source 1..1182: mol_type = other DNA
atgcaccatcatcatcatcatggcggtagcggccatccgccgagcaataccccggagggggaggtgccgagcgttatcgcccgcaaggttagtcagtacagctgccagcgcaagaccacgctgaataactacaacaaaaagtttaccgacgcgctggagatcctggccgagaactacaaatttaaagagaacgaaatcgcgtgtctggaatttaagcgcgccgcgagtctgctgaaatatctgccgttcccggttaccagcatgaaagacatccaaggtctgccgtgcattggcgaccaagttcgtgatgtgatcgaggagatcatcgaagagggcgagagcagccgtgttaaagaagttctcaatgacgagcgctacaaggcctttaagcagttcaccagcgtgttcggtgtgggcgtgaaaaccagcgaaaagtggtttcgtatgggcctccgtacggttgaagaggcaaaggccagtaagagtctgaagctgagcaagatgcagaaggcgggcttcctgtattacgaggatctggcgagctgcgttagtaaagcggaagccgatgccgttacgctcatcgtgaagaacacggtgcgtacctttctgccggatgcgctggtgaccatcaccggcggtttccgccgtggcaaaaagatgggccacgacatcgactttctgatcacgaatccgggcccgaaagaggatgacgagctgctccacaaagtggttgatctgctcaagaagcaaggtctgctgctgtacgaagacatcaaagagagcacgttcgtggaggaacaactgccaagtcgcaaaatcgacgccatggacaacttccagaagtgcttcgccattctcaagctgtaccagccgggcgtggataacagcagctataacacgagtaagaagagtgacatggccgaggttaaggattggaaagcgattcgtgtggatctggtgatcacgccattcgagcagtacgcctatgcgctgctcggttggacgggcagcaaagaatttggtcgcgatctgcgccgctatgcggaggaagagcgcaagatgatcctcgaccgtcatggcctctacgaccgcaaaaagcgcatctttctgaaagcgggcagcgaagaagagattttcgcgcatctgggtctggattatgtggagccgtgggaacgcaacgcg

SEQ ID NO: 1152 - protein, 394 aa, synthetic construct
  REGION 1..394: note = Variant of terminal deoxynucleotidyl transferase
MHHHHHHGGSGHPPSNTPEGEVPSVIARKVSQYSCQRKTTLNNYNKKFTDALEILAENYKFKENEIACLEFKRAASLLKYLPFPVTSMKDIQGLPCIGDQVRDVIEEIIEEGESSRVKEVLNDERYKAFKQFTSVFGVGVKTSEKWFRMGLRTVEEAKASKSLKLSKMQKAGFLYYEDLASCVSKAEADAVTLIVKNTVRTFLPDALVTITGGFRRGKKMGHDIDFLITNPGPKEDDELLHKVVDLLKKQGLLLYEDIKESTFVEEQLPSRKIDAMDNFQKCFAILKLYQPGVDNSSYNTSKKSDMAEVKDWKAIRVDLVITPFEQYAYALLGWTGSKEFGRDLRRYAEEERKMILDRHGLYDRKKRIFLKAGSEEEIFAHLGLDYVEPWERNA

SEQ ID NO: 1153 - DNA, 1182 bp, synthetic construct
  misc_feature 1..1182: note = Variant of terminal deoxynucleotidyl transferase
  source 1..1182: mol_type = other DNA
atgcaccatcatcatcatcatggcggtagcggccatccgccgagcaataccccggagggggaggtgccgagcgttatcgcccgcaaggttagtcagtacagctgccagcgcaagaccacgctgaataactacaacaaaaagtttaccgacgcgctggagatcatggtggagaactacaaatttaaagagaacgaaatcgcgtgtctggaatttaagcgcgccgcgagtctgctgaaatatctgccgttcccggttaccagcatgaaagacatccaaggtctgccgtgcattggcgaccaagttcgtgacgtgatcgaggagatcatcgaagagggcgagagcagccgtgttaaagaagttctcaatgacgagcgctacaaggcctttaagcagttcaccagcgtgttcggtgtgggcgtgaaaaccagcgaaaagtggtttcgtatgggcctccgtacggttgaagaggcaaaggccagtaagagtctgaagctgagcaagatgcagaaggcgggcttcctgtattacgaggatctggcgagctgcgttagtaaagcggaagccgatgccgttacgctcatcgtgaagaacacggtgcgtacctttctgccggatgcgctggtgaccatcaccggcggtttccgccgtggcaaaaagatgggccacgacatcgactttctgatcacgaatccgggcccgaaagaggatgacgagctgctccacaaagtggttgatctgctcaagaagcaaggtctgctgctgtactgcgacatcaaagagagcacgttcgtggaggaacaactgccaagtcgcaaaatcgacgccatggacaacttccagaagtgcttcgccattctcaagctgtaccagccgggcgtggataacagcagctataacacgagtaagaagagtgacatggccgaggttaaggattggaaagcgattcgtgtggatctggtgatcacgccattcgagcagtacgcctatgcgctgctcggttggacgggcagcaaagaatttggtcgcgatctgcgccgctatgcggaggaagagcgcaagatgatcctcgaccgtcatggcctctacgaccgcaaaaagcgcatctttctgaaagcgggcagcgaagaagagattttcgcgcatctgggtctggattatgtggagccgtgggaacgcaacgcg

SEQ ID NO: 1154 - protein, 394 aa, synthetic construct
  REGION 1..394: note = Variant of terminal deoxynucleotidyl transferase
MHHHHHHGGSGHPPSNTPEGEVPSVIARKVSQYSCQRKTTLNNYNKKFTDALEIMVENYKFKENEIACLEFKRAASLLKYLPFPVTSMKDIQGLPCIGDQVRDVIEEIIEEGESSRVKEVLNDERYKAFKQFTSVFGVGVKTSEKWFRMGLRTVEEAKASKSLKLSKMQKAGFLYYEDLASCVSKAEADAVTLIVKNTVRTFLPDALVTITGGFRRGKKMGHDIDFLITNPGPKEDDELLHKVVDLLKKQGLLLYCDIKESTFVEEQLPSRKIDAMDNFQKCFAILKLYQPGVDNSSYNTSKKSDMAEVKDWKAIRVDLVITPFEQYAYALLGWTGSKEFGRDLRRYAEEERKMILDRHGLYDRKKRIFLKAGSEEEIFAHLGLDYVEPWERNA

SEQ ID NO: 1155 - DNA, 1182 bp, synthetic construct
  misc_feature 1..1182: note = Variant of terminal deoxynucleotidyl transferase
  source 1..1182: mol_type = other DNA
atgcaccatcatcatcatcatggcggtagcggccatccgccgagcaataccccggagggggaggtgccgagcgttatcgcccgcaaggttagtcagtacagctgccagcgcaagaccacgctgaataactacaacaaaaagtttaccgacgcggcggagatcatggccgagaactacaaatttaaagagaacgaaatcgcgtgtctggaatttaagcgcgccgcgagtctgctgaaatatctgccgttcccggttaccagcatgaaagacatccaaggtctgccgtgcattggcgaccaagttcgtgacgtgatcgaggagatcatcgaagagggcgagagcagccgtgttaaagaagttctcaatgacgagcgctacaaggcctttaagcagttcaccagcgtgttcggtgtgggcgtgaaaaccagcgaaaagtggtttcgtatgggcctccgtacggttgaagaggcaaaggccagtaagagtctgaagctgagcaagatgcagaaggcgggcttcctgtattacgaggatctggcgagctgcgttagtaaagcggaagccgatgccgttacgctcatcgtgaagaacacggtgcgtacctttctgccggatgcgctggtgaccatcaccggcggtttccgccgtggcaaaaagatgggccacgacatcgactttctgatcacgaatccgggcccgaaagaggatgacgagctgctccacaaagtggttgatctgctcaagaagcaaggtctgctgctgtactgcgacatcaaagagagcacgttcgtggaggaacaactgccaagtcgcaaaatcgacgccatggacaacttccagaagtgcttcgccattctcaagctgtaccagccgggcgtggataacagcagctataacacgagtaagaagagtgacatggccgaggttaaggattggaaagcgattcgtgtggatctggtgatcacgccattcgagcagtacgcctatgcgctgctcggttggacgggcagcaaagaatttggtcgcgatctgcgccgctatgcggaggaagagcgcaagatgatcctcgaccgtcatggcctctacgaccgcaaaaagcgcatctttctgaaagcgggcagcgaagaagagattttcgcgcatctgggtctggattatgtggagccgtgggaacgcaacgcg

SEQ ID NO: 1156 - protein, 394 aa, synthetic construct
  REGION 1..394: note = Variant of terminal deoxynucleotidyl transferase
MHHHHHHGGSGHPPSNTPEGEVPSVIARKVSQYSCQRKTTLNNYNKKFTDAAEIMAENYKFKENEIACLEFKRAASLLKYLPFPVTSMKDIQGLPCIGDQVRDVIEEIIEEGESSRVKEVLNDERYKAFKQFTSVFGVGVKTSEKWFRMGLRTVEEAKASKSLKLSKMQKAGFLYYEDLASCVSKAEADAVTLIVKNTVRTFLPDALVTITGGFRRGKKMGHDIDFLITNPGPKEDDELLHKVVDLLKKQGLLLYCDIKESTFVEEQLPSRKIDAMDNFQKCFAILKLYQPGVDNSSYNTSKKSDMAEVKDWKAIRVDLVITPFEQYAYALLGWTGSKEFGRDLRRYAEEERKMILDRHGLYDRKKRIFLKAGSEEEIFAHLGLDYVEPWERNA

SEQ ID NO: 1157 - DNA, 1182 bp, synthetic construct
  misc_feature 1..1182: note = Variant of terminal deoxynucleotidyl transferase
  source 1..1182: mol_type = other DNA
atgcaccatcatcatcatcatggcggtagcggccatccgccgagcaataccccggagggggaggtgccgagcgttatcgcccgcaaggttagtcagtacagctgccagcgcaagaccacgctgaataactacaacaaaaagtttaccgacgcgctggagatcatggccgagaactacaagtttggtgagaacgaaatcgcgtgcctggaatttaagcgcgccgcgagtctgctgaaatatctgccgttcccggttaccagcatgaaagacatccaaggtctgccgtgcattggcgaccaagttcgtgacgtgatcgaggagatcatcgaagagggcgagagcagccgtgttaaagaagttctcaatgacgagcgctacaaggcctttaagcagttcaccagcgtgttcggtgtgggcgtgaaaaccagcgaaaagtggtttcgtatgggcctccgtacggttgaagaggcaaaggccagtaagagtctgaagctgagcaagatgcagaaggcgggcttcctgtattacgaggatctggcgagctgcgttagtaaagcggaagccgatgccgttacgctcatcgtgaagaacacggtgcgtacctttctgccggatgcgctggtgaccatcaccggcggtttccgccgtggcaaaaagatgggccacgacatcgactttctgatcacgaatccgggcccgaaagaggatgacgagctgctccacaaagtggttgatctgctcaagaagcaaggtctgctgctgtactgcgacatcaaagagagcacgttcgtggaggaacaactgccaagtcgcaaaatcgacgccatggacaacttccagaagtgcttcgccattctcaagctgtaccagccgggcgtggataacagcagctataacacgagtaagaagagtgacatggccgaggttaaggattggaaagcgattcgtgtggatctggtgatcacgccattcgagcagtacgcctatgcgctgctcggttggacgggcagcaaagaatttggtcgcgatctgcgccgctatgcggaggaagagcgcaagatgatcctcgaccgtcatggcctctacgaccgcaaaaagcgcatctttctgaaagcgggcagcgaagaagagattttcgcgcatctgggtctggattatgtggagccgtgggaacgcaacgcg

SEQ ID NO: 1158 - protein, 394 aa, synthetic construct
  REGION 1..394: note = Variant of terminal deoxynucleotidyl transferase
MHHHHHHGGSGHPPSNTPEGEVPSVIARKVSQYSCQRKTTLNNYNKKFTDALEIMAENYKFGENEIACLEFKRAASLLKYLPFPVTSMKDIQGLPCIGDQVRDVIEEIIEEGESSRVKEVLNDERYKAFKQFTSVFGVGVKTSEKWFRMGLRTVEEAKASKSLKLSKMQKAGFLYYEDLASCVSKAEADAVTLIVKNTVRTFLPDALVTITGGFRRGKKMGHDIDFLITNPGPKEDDELLHKVVDLLKKQGLLLYCDIKESTFVEEQLPSRKIDAMDNFQKCFAILKLYQPGVDNSSYNTSKKSDMAEVKDWKAIRVDLVITPFEQYAYALLGWTGSKEFGRDLRRYAEEERKMILDRHGLYDRKKRIFLKAGSEEEIFAHLGLDYVEPWERNA

SEQ ID NO: 1159 - DNA, 1182 bp, synthetic construct
  misc_feature 1..1182: note = Variant of terminal deoxynucleotidyl transferase
  source 1..1182: mol_type = other DNA
atgcaccatcatcatcatcatggcggtagcggccatccgccgagcaataccccggagggggaggtgccgagcgttatcgcccgcaaggttagtcagtacagctgccagcgcaagaccacgctgaataactacaacaaaaagtttaccgacgcgctggagatcatggccgagaactacaaatttaaagagaacgaaccggcgtgtctggaatttaagcgcgccgcgagtctgctgaaatatctgccgttcccggttaccagcatgaaagacatccaaggtctgccgtgcattggcgaccaagttcgtgacgtgatcgaggagatcatcgaagagggcgagagcagccgtgttaaagaagttctcaatgacgagcgctacaaggcctttaagcagttcaccagcgtgttcggtgtgggcgtgaaaaccagcgaaaagtggtttcgtatgggcctccgtacggttgaagaggcaaaggccagtaagagtctgaagctgagcaagatgcagaaggcgggcttcctgtattacgaggatctggcgagctgcgttagtaaagcggaagccgatgccgttacgctcatcgtgaagaacacggtgcgtacctttctgccggatgcgctggtgaccatcaccggcggtttccgccgtggcaaaaagatgggccacgacatcgactttctgatcacgaatccgggcccgaaagaggatgacgagctgctccacaaagtggttgatctgctcaagaagcaaggtctgctgctgtactgcgacatcaaagagagcacgttcgtggaggaacaactgccaagtcgcaaaatcgacgccatggacaacttccagaagtgcttcgccattctcaagctgtaccagccgggcgtggataacagcagctataacacgagtaagaagagtgacatggccgaggttaaggattggaaagcgattcgtgtggatctggtgatcacgccattcgagcagtacgcctatgcgctgctcggttggacgggcagcaaagaatttggtcgcgatctgcgccgctatgcggaggaagagcgcaagatgatcctcgaccgtcatggcctctacgaccgcaaaaagcgcatctttctgaaagcgggcagcgaagaagagattttcgcgcatctgggtctggattatgtggagccgtgggaacgcaacgcg

SEQ ID NO: 1160 - protein, 394 aa, synthetic construct
  REGION 1..394: note = Variant of terminal deoxynucleotidyl transferase
MHHHHHHGGSGHPPSNTPEGEVPSVIARKVSQYSCQRKTTLNNYNKKFTDALEIMAENYKFKENEPACLEFKRAASLLKYLPFPVTSMKDIQGLPCIGDQVRDVIEEIIEEGESSRVKEVLNDERYKAFKQFTSVFGVGVKTSEKWFRMGLRTVEEAKASKSLKLSKMQKAGFLYYEDLASCVSKAEADAVTLIVKNTVRTFLPDALVTITGGFRRGKKMGHDIDFLITNPGPKEDDELLHKVVDLLKKQGLLLYCDIKESTFVEEQLPSRKIDAMDNFQKCFAILKLYQPGVDNSSYNTSKKSDMAEVKDWKAIRVDLVITPFEQYAYALLGWTGSKEFGRDLRRYAEEERKMILDRHGLYDRKKRIFLKAGSEEEIFAHLGLDYVEPWERNA

SEQ ID NO: 1161 - DNA, 1182 bp, synthetic construct
  misc_feature 1..1182: note = Variant of terminal deoxynucleotidyl transferase
  source 1..1182: mol_type = other DNA
atgcaccatcatcatcatcatggcggtagcggccatccgccgagcaataccccggagggggaggtgccgagcgttatcgcccgcaaggttagtcagtacagctgccagcgcaagaccacgctgaataactacaacaaaaagactaccgacgcgctggagatcatggccgagaactacaaatttaaagagaacgaaatcgcgtgtctggaatttaagcgcgccgcgagtctgctgaaatatctgccgttcccggttaccagcatgaaagacatccaaggtctgccgtgcattggcgaccaagttcgtgacgtgatcgaggagatcatcgaagagggcgagagcagccgtgttaaagaagttctcaatgacgagcgctacaaggcctttaagcagttcaccagcgtgttcggtgtgggcgtgaaaaccagcgaaaagtggtttcgtatgggcctccgtacggttgaagaggcaaaggccagtaagagtctgaagctgagcaagatgcagaaggcgggcttcctgtattacgaggatctggcgagctgcgttagtaaagcggaagccgatgccgttacgctcatcgtgaagaacacggtgcgtacctttctgccggatgcgctggtgaccatcaccggcggtttccgccgtggcaaaaagatgggccacgacatcgactttctgatcacgaatccgggcccgaaagaggatgacgagctgctccacaaagtggttgatctgctcaagaagcaaggtctgctgctgtactgcgacatcaaagagagcacgttcgtggaggaacaactgccaagtcgcaaaatcgacgccatggacaacttccagaagtgcttcgccattctcaagctgtaccagccgggcgtggataacagcagctataacacgagtaagaagagtgacatggccgaggttaaggattggaaagcgattcgtgtggatctggtgatcacgccattcgagcagtacgcctatgcgctgctcggttggacgggcagcaaagaatttggtcgcgatctgcgccgctatgcggaggaagagcgcaagatgatcctcgaccgtcatggcctctacgaccgcaaaaagcgcatctttctgaaagcgggcagcgaagaagagattttcgcgcatctgggtctggattatgtggagccgtgggaacgcaacgcg

SEQ ID NO: 1162 - protein, 394 aa, synthetic construct
  REGION 1..394: note = Variant of terminal deoxynucleotidyl transferase
MHHHHHHGGSGHPPSNTPEGEVPSVIARKVSQYSCQRKTTLNNYNKKTTDALEIMAENYKFKENEIACLEFKRAASLLKYLPFPVTSMKDIQGLPCIGDQVRDVIEEIIEEGESSRVKEVLNDERYKAFKQFTSVFGVGVKTSEKWFRMGLRTVEEAKASKSLKLSKMQKAGFLYYEDLASCVSKAEADAVTLIVKNTVRTFLPDALVTITGGFRRGKKMGHDIDFLITNPGPKEDDELLHKVVDLLKKQGLLLYCDIKESTFVEEQLPSRKIDAMDNFQKCFAILKLYQPGVDNSSYNTSKKSDMAEVKDWKAIRVDLVITPFEQYAYALLGWTGSKEFGRDLRRYAEEERKMILDRHGLYDRKKRIFLKAGSEEEIFAHLGLDYVEPWERNA

SEQ ID NO: 1163 - DNA, 1182 bp, synthetic construct
  misc_feature 1..1182: note = Variant of terminal deoxynucleotidyl transferase
  source 1..1182: mol_type = other DNA
atgcaccatcatcatcatcatggcggtagcggccatccgccgagcaataccccggagggggaggtgccgagcgttatcgcccgcaaggttagtcagtacagctgccagcgcaagaccacgctgaataactacaacaaaaagtttaccgacgcgctggagatcatggccgagaactacaaatttaaagagaacgaaatcgcgtgtctggaatttaagcgcgccgcgagtctgctgaaatatctgccgttcccggttaccagcatgaaagacatccaaggtctgccgtgcattggcgaccaagttcgtgacgtgatcgaggagatcatcgaagagggcgagagcagccgtgttaaagaagttctcaatgacgagcgctacaaggcctttaagcagttcaccagcgtgttcggtgtgggcgtgaaaaccagcgaaaagtggtttcgtatgggcctccgtacggttgaagaggcaaaggccagtaagagtctgaagctgagcaagatgcagaaggcgggcttcctgtattacgaggatctggcgagctgcgttagtaaagcggaagccgatgccgttacgctcatcgtgaagaacacggtgcgtacctttctgccggatgcgctggtgaccatcaccggcggtttccgccgtggcaaaaagatgggccacgacatcgactttctgatcacgaatccgggcccgaaagaggatgacgagctgctccacaaagtggttgatctgctcaagaagcaaggtctgctgctgtactgcgacatcaaagagagcacgttcgtggaggaacaactgccaagtcgcaaaatcgacgccatggacaacttccagaagtgcttcgccattctcaagctgtaccagccgggcgtggataacagcagctataacacgagtaagaagagtgacatggccgaggttaaggattggaaagcgattcgtgtggatctggtgatcacgccattcgagcagtacgcctatgcgctgctcggttggacgggcagcaaagaatttggtcgcgatctgcgccgctatgcggaggaagagcgctcgatgatcctcgaccgtcatggcctctacgaccgcaaaaagcgcatctttctgaaagcgggcagcgaagaagagattttcgcgcatctgggtctggattatgtggagccgtgggaacgcaacgcg

SEQ ID NO: 1164 - protein, 394 aa, synthetic construct
  REGION 1..394: note = Variant of terminal deoxynucleotidyl transferase
MHHHHHHGGSGHPPSNTPEGEVPSVIARKVSQYSCQRKTTLNNYNKKFTDALEIMAENYKFKENEIACLEFKRAASLLKYLPFPVTSMKDIQGLPCIGDQVRDVIEEIIEEGESSRVKEVLNDERYKAFKQFTSVFGVGVKTSEKWFRMGLRTVEEAKASKSLKLSKMQKAGFLYYEDLASCVSKAEADAVTLIVKNTVRTFLPDALVTITGGFRRGKKMGHDIDFLITNPGPKEDDELLHKVVDLLKKQGLLLYCDIKESTFVEEQLPSRKIDAMDNFQKCFAILKLYQPGVDNSSYNTSKKSDMAEVKDWKAIRVDLVITPFEQYAYALLGWTGSKEFGRDLRRYAEEERSMILDRHGLYDRKKRIFLKAGSEEEIFAHLGLDYVEPWERNA

SEQ ID NO: 1165 - DNA, 1182 bp, synthetic construct
  misc_feature 1..1182: note = Variant of terminal deoxynucleotidyl transferase
  source 1..1182: mol_type = other DNA
atgcaccatcatcatcatcatggcggtagcggccatccgccgagcaataccccggagggggaggtgccgagcgttatcgcccgcaaggttagtcagtacagctgccagcgcaagaccacgctgaataactacaacaaaaagtttaccgacgcgctggagatcatggccgagaactacaaatttaaagagaacgaaatcgcgtgtctggaatttaagcgcgccgcgagtctgctgaaatatctgccgttcccggttaccagcatgaaagacatccaaggtctgccgtgcattggcgaccaagttcgtgacgtgatcgaggagatcatcgaagagggcgagagcagccgtgttaaagaagttctcaatgacgagcgctacaaggcctttaagcagttcaccagcgtgttcggtgtgggcgtgaaaaccagcgaaaagtggtttcgtatgggcctccgtacggttgaagaggcaaaggccagtaagagtctgaagctgagcaagatgcagaaggcgggcttcctgtattacgaggatctggcgagctgcgttagtaaagcggaagccgatgccgttacgctcatcgtgaagaacacggtgcgtacctttctgccggatgcgctggtgaccatcaccggcggtttccgccgtggcaaaaagatgggccacgacatcgactttctgatcacgaatccgggcccgaaagaggatgacgagctgctccacaaagtggttgatctgctcaagaagcaaggtctgctgctgtactgcgacatcaaagagagcacgttcgtggaggaacaactgccaagtcgcaaaatcgacgccatggacaacttccagaagtgcttcgccattctcaagctgtaccagccgggcgtggataacagcagctataacacgagtaagaagagtgacatggccgaggttaaggattggaaagcgattcgtgtggatctggtgatcacgccattcgagcagtacgcctatgcgctgctcggttggacgggcagcaaagaatttggtcgcgatctgcgccgctatgcggagacggagcgcaagatgatcctcgaccgtcatggcctctacgaccgcaaaaagcgcatctttctgaaagcgggcagcgaagaagagattttcgcgcatctgggtctggattatgtggagccgtgggaacgcaacgcg

SEQ ID NO: 1166 - protein, 394 aa, synthetic construct
  REGION 1..394: note = Variant of terminal deoxynucleotidyl transferase
MHHHHHHGGSGHPPSNTPEGEVPSVIARKVSQYSCQRKTTLNNYNKKFTDALEIMAENYKFKENEIACLEFKRAASLLKYLPFPVTSMKDIQGLPCIGDQVRDVIEEIIEEGESSRVKEVLNDERYKAFKQFTSVFGVGVKTSEKWFRMGLRTVEEAKASKSLKLSKMQKAGFLYYEDLASCVSKAEADAVTLIVKNTVRTFLPDALVTITGGFRRGKKMGHDIDFLITNPGPKEDDELLHKVVDLLKKQGLLLYCDIKESTFVEEQLPSRKIDAMDNFQKCFAILKLYQPGVDNSSYNTSKKSDMAEVKDWKAIRVDLVITPFEQYAYALLGWTGSKEFGRDLRRYAETERKMILDRHGLYDRKKRIFLKAGSEEEIFAHLGLDYVEPWERNA

SEQ ID NO: 1167 - DNA, 1182 bp, synthetic construct
  misc_feature 1..1182: note = Variant of terminal deoxynucleotidyl transferase
  source 1..1182: mol_type = other DNA
atgcaccatcatcatcatcatggcggtagcggccatccgccgagcaataccccggagggggaggtgccgagcgttatcgcccgcaaggttagtcagtacagctgccagcgcaagaccacgctgaataactacaacaaaaagtttaccgacgcgctggagatcatggccgagaactacaaatttaaagagaacgaaatcgcgtgtctggaatttaagcgcgccgcgagtctgctgaaatatctgccgttcccggttaccagcatgaaagacatccaaggtctgccgtgcattggcgaccaagttcgtgacgtgatcgaggagatcatcgaagagggcgagagcagccgtgttaaagaagttctcaatgacgagcgctacaaggcctttaagcagttcaccagcgtgttcggtgtgggcgtgaaaaccagcgaaaagtggtttcgtatgggcctccgtacggttgaagaggcaaaggccagtaagagtctgaagctgagcaagatgcagaaggcgggcttcctgtattacgaggatctggcgagctgcgttagtaaagcggaagccgatgccgttacgctcatcgtgaagaacacggtgcgtacctttctgccggatgcgctggtgaccatcaccggcggtttccgccgtggcaaaaagatgggccacgacatcgactttctgatcacgaatccgggcccgaaagaggatgacgagctgctccacaaagtggttgatctgctcaagaagcaaggtctgctgctgtactgcgacatcaaagagagcacgttcgtggaggaacaactgccaagtcgcaaaatcgacgccatggacaacttccagaagtgcttcgccattctcaagctgtaccagccgggcgtggataacagcagctataacacgagtaagaagagtgacatggccgaggttaaggattggaaagcgattcgtgtggatctggtgatcacgccattcgagcagtacgcctatgcgctgctcggttggacgggcagcaaagaatttggtcgcgatctggtgcgctatgcggaggaagagcgcaagatgatcctcgaccgtcatggcctctacgaccgcaaaaagcgcatctttctgaaagcgggcagcgaagaagagattttcgcgcatctgggtctggattatgtggagccgtgggaacgcaacgcg

SEQ ID NO: 1168 - protein, 394 aa, synthetic construct
  REGION 1..394: note = Variant of terminal deoxynucleotidyl transferase
MHHHHHHGGSGHPPSNTPEGEVPSVIARKVSQYSCQRKTTLNNYNKKFTDALEIMAENYKFKENEIACLEFKRAASLLKYLPFPVTSMKDIQGLPCIGDQVRDVIEEIIEEGESSRVKEVLNDERYKAFKQFTSVFGVGVKTSEKWFRMGLRTVEEAKASKSLKLSKMQKAGFLYYEDLASCVSKAEADAVTLIVKNTVRTFLPDALVTITGGFRRGKKMGHDIDFLITNPGPKEDDELLHKVVDLLKKQGLLLYCDIKESTFVEEQLPSRKIDAMDNFQKCFAILKLYQPGVDNSSYNTSKKSDMAEVKDWKAIRVDLVITPFEQYAYALLGWTGSKEFGRDLVRYAEEERKMILDRHGLYDRKKRIFLKAGSEEEIFAHLGLDYVEPWERNA

SEQ ID NO: 1169 - DNA, 1182 bp, synthetic construct
  misc_feature 1..1182: note = Variant of terminal deoxynucleotidyl transferase
  source 1..1182: mol_type = other DNA
atgcaccatcatcatcatcatggcggtagcggccatccgccgagcaataccccggagggggaggtgccgagcgttatcgcccgcaaggttagtcagtacagctgccagcgcaagaccacgctgaataactacaacaaaaagtttaccgacgcgctggagatcatggccgagaactacaaatttaaagagaacgaaatcgcgtgtctggaatttaagcgcgccgcgagtctgctgaaatatctgccgttcccggttaccagcatgaaagacatccaaggtctgccgtgcattggcgaccaagttcgtgacgtgatcgaggagatcatcgaagagggcgagagcagccgtgttaaagaagttctcaatgacgagcgctacaaggcctttaagcagttcaccagcgtgttcggtgtgggcgtgaaaaccagcgaaaagtggtttcgtatgggcctccgtacggttgaagaggcaaaggccagtaagagtctgaagctgagcaagatgcagaaggcgggcttcctgtattacgaggatctggcgagctgcgttagtaaagcggaagccgatgccgttacgctcatcgtgaagaacacggtgcgtacctttctgccggatgcgctggtgaccatcaccggcggtttccgccgtggcaaaaagatgggccacgacatcgactttctgatcacgaatccgggcccgaaagaggatgacgagctgctccacaaagtggttgatctgctcaagaagcaaggtctgctgctgtactgcgacatcaaagagagcacgttcgtggaggaacaactgccaagtcgcaaaatcgacgccatggacaacttccagaagtgcttcgccattctcaagctgtaccagccgggcgtggataacagcagctataacacgagtaagaagagtgacatggccgaggttaaggattggaaagcgattcgtgtggatctggtgatcacgccattcgagcagtacgcctatgcgctgctcggttggacgggcagcaaagaatttggtcgcgatctgcgccgctatgcggaggaagagcgcatgatgatcctcgaccgtcatggcctctacgaccgcaaaaagcgcatctttctgaaagcgggcagcgaagaagagattttcgcgcatctgggtctggattatgtggagccgtgggaacgcaacgcg

SEQ ID NO: 1170 - protein, 394 aa, synthetic construct
  REGION 1..394: note = Variant of terminal deoxynucleotidyl transferase
MHHHHHHGGSGHPPSNTPEGEVPSVIARKVSQYSCQRKTTLNNYNKKFTDALEIMAENYKFKENEIACLEFKRAASLLKYLPFPVTSMKDIQGLPCIGDQVRDVIEEIIEEGESSRVKEVLNDERYKAFKQFTSVFGVGVKTSEKWFRMGLRTVEEAKASKSLKLSKMQKAGFLYYEDLASCVSKAEADAVTLIVKNTVRTFLPDALVTITGGFRRGKKMGHDIDFLITNPGPKEDDELLHKVVDLLKKQGLLLYCDIKESTFVEEQLPSRKIDAMDNFQKCFAILKLYQPGVDNSSYNTSKKSDMAEVKDWKAIRVDLVITPFEQYAYALLGWTGSKEFGRDLRRYAEEERMMILDRHGLYDRKKRIFLKAGSEEEIFAHLGLDYVEPWERNA

SEQ ID NO: 1171 - DNA, 1182 bp, synthetic construct
  misc_feature 1..1182: note = Variant of terminal deoxynucleotidyl transferase
  source 1..1182: mol_type = other DNA
atgcaccatcatcatcatcatggcggtagcggccatccgccgagcaataccccggagggggaggtgccgagcgttatcgcccgcaaggttagtcagtacagctgccagcgcaagaccacgctgaataactacaacaaaaagtttaccgacgcgctggagatcatggccgagaactacaaatttaaagagaacgaaatcgcgtgtctggaatttaagcgcgccgcgagtctgctgaaatatctgccgttcccggttaccagcatgaaagacatccaaggtctgccgtgcattggcgaccaagttcgtgacgtgatcgaggagatcatcgaagagggcgagagcagccgtgttaaagaagttctcaatgacgagcgctacaaggcctttaagcagttctatagcgtgttcggtgtgggcgtgaaaaccagcgaaaagtggtttcgtatgggcctccgtacggttgaagaggcaaaggccagtaagagtctgaagctgagcaagatgcagaaggcgggcttcctgtattacgaggatctggcgagctgcgttagtaaagcggaagccgatgccgttacgctcatcgtgaagaacacggtgcgtacctttctgccggatgcgctggtgaccatcaccggcggtttccgccgtggcaaaaagatgggccacgacatcgactttctgatcacgaatccgggcccgaaagaggatgacgagctgctccacaaagtggttgatctgctcaagaagcaaggtctgctgctgtactgcgacatcaaagagagcacgttcgtggaggaacaactgccaagtcgcaaaatcgacgccatggacaacttccagaagtgcttcgccattctcaagctgtaccagccgggcgtggataacagcagctataacacgagtaagaagagtgacatggccgaggttaaggattggaaagcgattcgtgtggatctggtgatcacgccattcgagcagtacgcctatgcgctgctcggttggacgggcagcaaagaatttggtcgcgatctgcgccgctatgcggaggaagagcgcaagatgatcctcgaccgtcatggcctctacgaccgcaaaaagcgcatctttctgaaagcgggcagcgaagaagagattttcgcgcatctgggtctggattatgtggagccgtgggaacgcaacgcg

SEQ ID NO: 1172 - protein, 394 aa, synthetic construct
  REGION 1..394: note = Variant of terminal deoxynucleotidyl transferase
MHHHHHHGGSGHPPSNTPEGEVPSVIARKVSQYSCQRKTTLNNYNKKFTDALEIMAENYKFKENEIACLEFKRAASLLKYLPFPVTSMKDIQGLPCIGDQVRDVIEEIIEEGESSRVKEVLNDERYKAFKQFYSVFGVGVKTSEKWFRMGLRTVEEAKASKSLKLSKMQKAGFLYYEDLASCVSKAEADAVTLIVKNTVRTFLPDALVTITGGFRRGKKMGHDIDFLITNPGPKEDDELLHKVVDLLKKQGLLLYCDIKESTFVEEQLPSRKIDAMDNFQKCFAILKLYQPGVDNSSYNTSKKSDMAEVKDWKAIRVDLVITPFEQYAYALLGWTGSKEFGRDLRRYAEEERKMILDRHGLYDRKKRIFLKAGSEEEIFAHLGLDYVEPWERNA

SEQ ID NO: 1173 - DNA, 1182 bp, synthetic construct
  misc_feature 1..1182: note = Variant of terminal deoxynucleotidyl transferase
  source 1..1182: mol_type = other DNA
atgcaccatcatcatcatcatggcggtagcggccatccgccgagcaataccccggagggggaggtgccgagcgttatcgcccgcaaggttagtcagtacagctgccagcgcaagaccacgctgaataactacaacaaaaagtttaccgacgcgctggagatcatggccgagaactacaaatttaaagagaacgaaatcgcgtgtctggcttttaagcgcgccgcgagtctgctgaaatatctgccgttcccggttaccagcatgaaagacatccaaggtctgccgtgcattggcgaccaagttcgtgacgtgatcgaggagatcatcgaagagggcgagagcagccgtgttaaagaagttctcaatgacgagcgctacaaggcctttaagcagttcaccagcgtgttcggtgtgggcgtgaaaaccagcgaaaagtggtttcgtatgggcctccgtacggttgaagaggcaaaggccagtaagagtctgaagctgagcaagatgcagaaggcgggcttcctgtattacgaggatctggcgagctgcgttagtaaagcggaagccgatgccgttacgctcatcgtgaagaacacggtgcgtacctttctgccggatgcgctggtgaccatcaccggcggtttccgccgtggcaaaaagatgggccacgacatcgactttctgatcacgaatccgggcccgaaagaggatgacgagctgctccacaaagtggttgatctgctcaagaagcaaggtctgctgctgtactgcgacatcaaagagagcacgttcgtggaggaacaactgccaagtcgcaaaatcgacgccatggacaacttccagaagtgcttcgccattctcaagctgtaccagccgggcgtggataacagcagctataacacgagtaagaagagtgacatggccgaggttaaggattggaaagcgattcgtgtggatctggtgatcacgccattcgagcagtacgcctatgcgctgctcggttggacgggcagcaaagaatttggtcgcgatctgcgccgctatgcggaggaagagcgcaagatgatcctcgaccgtcatggcctctacgaccgcaaaaagcgcatctttctgaaagcgggcagcgaagaagagattttcgcgcatctgggtctggattatgtggagccgtgggaacgcaacgcg

SEQ ID NO: 1174 - protein, 394 aa, synthetic construct
  REGION 1..394: note = Variant of terminal deoxynucleotidyl transferase
MHHHHHHGGSGHPPSNTPEGEVPSVIARKVSQYSCQRKTTLNNYNKKFTDALEIMAENYKFKENEIACLAFKRAASLLKYLPFPVTSMKDIQGLPCIGDQVRDVIEEIIEEGESSRVKEVLNDERYKAFKQFTSVFGVGVKTSEKWFRMGLRTVEEAKASKSLKLSKMQKAGFLYYEDLASCVSKAEADAVTLIVKNTVRTFLPDALVTITGGFRRGKKMGHDIDFLITNPGPKEDDELLHKVVDLLKKQGLLLYCDIKESTFVEEQLPSRKIDAMDNFQKCFAILKLYQPGVDNSSYNTSKKSDMAEVKDWKAIRVDLVITPFEQYAYALLGWTGSKEFGRDLRRYAEEERKMILDRHGLYDRKKRIFLKAGSEEEIFAHLGLDYVEPWERNA

SEQ ID NO: 1175 - DNA, 1182 bp, synthetic construct
  misc_feature 1..1182: note = Variant of terminal deoxynucleotidyl transferase
  source 1..1182: mol_type = other DNA
atgcaccatcatcatcatcatggcggtagcggccatccgccgagcaataccccggagggggaggtgccgagcgttatcgcccgcaaggttagtcagtacagctgccagcgcaagaccacgctgaataactacaacaaaaagtttaccgacgcgctggagatccgggccgagaactacaaatttaaagagaacgaaatcgcgtgtctggaatttaagcgcgccgcgagtctgctgaaatatctgccgttcccggttaccagcatgaaagacatccaaggtctgccgtgcattggcgaccaagttcgtgacgtgatcgaggagatcatcgaagagggcgagagcagccgtgttaaagaagttctcaatgacgagcgctacaaggcctttaagcagttcaccagcgtgttcggtgtgggcgtgaaaaccagcgaaaagtggtttcgtatgggcctccgtacggttgaagaggcaaaggccagtaagagtctgaagctgagcaagatgcagaaggcgggcttcctgtattacgaggatctggcgagctgcgttagtaaagcggaagccgatgccgttacgctcatcgtgaagaacacggtgcgtacctttctgccggatgcgctggtgaccatcaccggcggtttccgccgtggcaaaaagatgggccacgacatcgactttctgatcacgaatccgggcccgaaagaggatgacgagctgctccacaaagtggttgatctgctcaagaagcaaggtctgctgctgtactgcgacatcaaagagagcacgttcgtggaggaacaactgccaagtcgcaaaatcgacgccatggacaacttccagaagtgcttcgccattctcaagctgtaccagccgggcgtggataacagcagctataacacgagtaagaagagtgacatggccgaggttaaggattggaaagcgattcgtgtggatctggtgatcacgccattcgagcagtacgcctatgcgctgctcggttggacgggcagcaaagaatttggtcgcgatctgcgccgctatgcggaggaagagcgcaagatgatcctcgaccgtcatggcctctacgaccgcaaaaagcgcatctttctgaaagcgggcagcgaagaagagattttcgcgcatctgggtctggattatgtggagccgtgggaacgcaacgcg

SEQ ID NO: 1176 - protein, 394 aa, synthetic construct
  REGION 1..394: note = Variant of terminal deoxynucleotidyl transferase
MHHHHHHGGSGHPPSNTPEGEVPSVIARKVSQYSCQRKTTLNNYNKKFTDALEIRAENYKFKENEIACLEFKRAASLLKYLPFPVTSMKDIQGLPCIGDQVRDVIEEIIEEGESSRVKEVLNDERYKAFKQFTSVFGVGVKTSEKWFRMGLRTVEEAKASKSLKLSKMQKAGFLYYEDLASCVSKAEADAVTLIVKNTVRTFLPDALVTITGGFRRGKKMGHDIDFLITNPGPKEDDELLHKVVDLLKKQGLLLYCDIKESTFVEEQLPSRKIDAMDNFQKCFAILKLYQPGVDNSSYNTSKKSDMAEVKDWKAIRVDLVITPFEQYAYALLGWTGSKEFGRDLRRYAEEERKMILDRHGLYDRKKRIFLKAGSEEEIFAHLGLDYVEPWERNA

SEQ ID NO: 1177 - DNA, 1182 bp, synthetic construct
  misc_feature 1..1182: note = Variant of terminal deoxynucleotidyl transferase
  source 1..1182: mol_type = other DNA
atgcaccatcatcatcatcatggcggtagcggccatccgccgagcaataccccggagggggaggtgccgagcgttatcgcccgcaaggttagtcagtacagctgccagcgcaagaccacgctgaataactacaacaaaaagtttaccgacgcgctggagatcatggccgagatgtacaaatttaaagagaacgaaatcgcgtgtctggaatttaagcgcgccgcgagtctgctgaaatatctgccgttcccggttaccagcatgaaagacatccaaggtctgccgtgcattggcgaccaagttcgtgacgtgatcgaggagatcatcgaagagggcgagagcagccgtgttaaagaagttctcaatgacgagcgctacaaggcctttaagcagttcaccagcgtgttcggtgtgggcgtgaaaaccagcgaaaagtggtttcgtatgggcctccgtacggttgaagaggcaaaggccagtaagagtctgaagctgagcaagatgcagaaggcgggcttcctgtattacgaggatctggcgagctgcgttagtaaagcggaagccgatgccgttacgctcatcgtgaagaacacggtgcgtacctttctgccggatgcgctggtgaccatcaccggcggtttccgccgtggcaaaaagatgggccacgacatcgactttctgatcacgaatccgggcccgaaagaggatgacgagctgctccacaaagtggttgatctgctcaagaagcaaggtctgctgctgtactgcgacatcaaagagagcacgttcgtggaggaacaactgccaagtcgcaaaatcgacgccatggacaacttccagaagtgcttcgccattctcaagctgtaccagccgggcgtggataacagcagctataacacgagtaagaagagtgacatggccgaggttaaggattggaaagcgattcgtgtggatctggtgatcacgccattcgagcagtacgcctatgcgctgctcggttggacgggcagcaaagaatttggtcgcgatctgcgccgctatgcggaggaagagcgcaagatgatcctcgaccgtcatggcctctacgaccgcaaaaagcgcatctttctgaaagcgggcagcgaagaagagattttcgcgcatctgggtctggattatgtggagccgtgggaacgcaacgcg

SEQ ID NO: 1178 - protein, 394 aa, synthetic construct
  REGION 1..394: note = Variant of terminal deoxynucleotidyl transferase
MHHHHHHGGSGHPPSNTPEGEVPSVIARKVSQYSCQRKTTLNNYNKKFTDALEIMAEMYKFKENEIACLEFKRAASLLKYLPFPVTSMKDIQGLPCIGDQVRDVIEEIIEEGESSRVKEVLNDERYKAFKQFTSVFGVGVKTSEKWFRMGLRTVEEAKASKSLKLSKMQKAGFLYYEDLASCVSKAEADAVTLIVKNTVRTFLPDALVTITGGFRRGKKMGHDIDFLITNPGPKEDDELLHKVVDLLKKQGLLLYCDIKESTFVEEQLPSRKIDAMDNFQKCFAILKLYQPGVDNSSYNTSKKSDMAEVKDWKAIRVDLVITPFEQYAYALLGWTGSKEFGRDLRRYAEEERKMILDRHGLYDRKKRIFLKAGSEEEIFAHLGLDYVEPWERNA

SEQ ID NO: 1179 - DNA, 1182 bp, synthetic construct
  misc_feature 1..1182: note = Variant of terminal deoxynucleotidyl transferase
  source 1..1182: mol_type = other DNA
atgcaccatcatcatcatcatggcggtagcggccatccgccgagcaataccccggagggggaggtgccgagcgttatcgcccgcaaggttagtcagtacagctgccagcgcaagaccacgctgaataactacaacaaaaagtttaccgacgcgctggagatcatggccgagaactacaaatttaaagagaacgaaatcgcgtgtctggaatttaagcgcgccgcgagtctgctgaaatatctgccgttcccggttaccagcatgaaagacatccaaggtctgccgtgcattggcgaccaagttcgtgacgtgatcgaggagatcatcgaagagggcgagagcagccgtgttaaagaagttctcaatgacgagcgctacaaggcctttaagcagttcaccgtggtgttcggtgtgggcgtgaaaaccagcgaaaagtggtttcgtatgggcctccgtacggttgaagaggcaaaggccagtaagagtctgaagctgagcaagatgcagaaggcgggcttcctgtattacgaggatctggcgagctgcgttagtaaagcggaagccgatgccgttacgctcatcgtgaagaacacggtgcgtacctttctgccggatgcgctggtgaccatcaccggcggtttccgccgtggcaaaaagatgggccacgacatcgactttctgatcacgaatccgggcccgaaagaggatgacgagctgctccacaaagtggttgatctgctcaagaagcaaggtctgctgctgtactgcgacatcaaagagagcacgttcgtggaggaacaactgccaagtcgcaaaatcgacgccatggacaacttccagaagtgcttcgccattctcaagctgtaccagccgggcgtggataacagcagctataacacgagtaagaagagtgacatggccgaggttaaggattggaaagcgattcgtgtggatctggtgatcacgccattcgagcagtacgcctatgcgctgctcggttggacgggcagcaaagaatttggtcgcgatctgcgccgctatgcggaggaagagcgcaagatgatcctcgaccgtcatggcctctacgaccgcaaaaagcgcatctttctgaaagcgggcagcgaagaagagattttcgcgcatctgggtctggattatgtggagccgtgggaacgcaacgcg

SEQ ID NO: 1180 - protein, 394 aa, synthetic construct
  REGION 1..394: note = Variant of terminal deoxynucleotidyl transferase
MHHHHHHGGSGHPPSNTPEGEVPSVIARKVSQYSCQRKTTLNNYNKKFTDALEIMAENYKFKENEIACLEFKRAASLLKYLPFPVTSMKDIQGLPCIGDQVRDVIEEIIEEGESSRVKEVLNDERYKAFKQFTVVFGVGVKTSEKWFRMGLRTVEEAKASKSLKLSKMQKAGFLYYEDLASCVSKAEADAVTLIVKNTVRTFLPDALVTITGGFRRGKKMGHDIDFLITNPGPKEDDELLHKVVDLLKKQGLLLYCDIKESTFVEEQLPSRKIDAMDNFQKCFAILKLYQPGVDNSSYNTSKKSDMAEVKDWKAIRVDLVITPFEQYAYALLGWTGSKEFGRDLRRYAEEERKMILDRHGLYDRKKRIFLKAGSEEEIFAHLGLDYVEPWERNA

SEQ ID NO: 1181 - DNA, 1182 bp, synthetic construct
  misc_feature 1..1182: note = Variant of terminal deoxynucleotidyl transferase
  source 1..1182: mol_type = other DNA
atgcaccatcatcatcatcatggcggtagcggccatccgccgagcaataccccggagggggaggtgccgagcgttatcgcccgcaaggttagtcagtacagctgccagcgcaagaccacgctgaataactacaacaaaaagtttaccgacgcgctggagatcatggccgagaactacaaatttaaagagaacgaaatcgcgtgtctggaatttaagcgcgccgcgagtctgctgaaatatctgccgttcccggttaccagcatgaaagacatccaaggtctgccgtgcattggcgaccaagttcgtgacgtgatcgaggagatcatcgaagagggcgagagcagccgtgttaaagaagttctcaatgacgagcgctacaaggcctttaagcagttcaccagcgtgttcggtgtgggcgtgaaaaccagcgaaaagtggtttcgtatgggcctccgtacggttgaagaggcaaaggccagtaagagtctgaagctgagcaagatgcagaaggcgggcttcctgtattacgaggatctggcgagctgcgttagtaaagcggaagccgatgccgttacgctcatcgtgaagaacacggtgcgtacctttctgccggatgcgctggtgaccatcaccggcggtttccgccgtggcaaaaagatgggccacgacatcgactttctgatcacgaatccgggcccgaaagaggatgacgagctgctccacaaagtggttgatctgctcaagaagcaaggtctgctgctgtactgcgacatcaaagagagcacgttcgtggaggaacaactgccaagtcgcaaaatcgacgccatggacaacttccagaagtgcttcgccattctcaagctgtaccagccgggcgtggataacagcagctataacacgagtaagaagagtgacatggccgaggttaaggattggaaagcgattcgtgtggatctggtgatcacgccattcgagcagtacgcctatgcgctgctcggttggacgggcagcaaagaatttggtcgcgatctgcgccgctatgcggaggaacagcgcaagatgatcctcgaccgtcatggcctctacgaccgcaaaaagcgcatctttctgaaagcgggcagcgaagaagagattttcgcgcatctgggtctggattatgtggagccgtgggaacgcaacgcg

SEQ ID NO: 1182 - protein, 394 aa, synthetic construct
  REGION 1..394: note = Variant of terminal deoxynucleotidyl transferase
MHHHHHHGGSGHPPSNTPEGEVPSVIARKVSQYSCQRKTTLNNYNKKFTDALEIMAENYKFKENEIACLEFKRAASLLKYLPFPVTSMKDIQGLPCIGDQVRDVIEEIIEEGESSRVKEVLNDERYKAFKQFTSVFGVGVKTSEKWFRMGLRTVEEAKASKSLKLSKMQKAGFLYYEDLASCVSKAEADAVTLIVKNTVRTFLPDALVTITGGFRRGKKMGHDIDFLITNPGPKEDDELLHKVVDLLKKQGLLLYCDIKESTFVEEQLPSRKIDAMDNFQKCFAILKLYQPGVDNSSYNTSKKSDMAEVKDWKAIRVDLVITPFEQYAYALLGWTGSKEFGRDLRRYAEEQRKMILDRHGLYDRKKRIFLKAGSEEEIFAHLGLDYVEPWERNA

SEQ ID NO: 1183 - DNA, 1182 bp, synthetic construct
  misc_feature 1..1182: note = Variant of terminal deoxynucleotidyl transferase
  source 1..1182: mol_type = other DNA
atgcaccatcatcatcatcatggcggtagcggccatccgccgagcaataccccggagggggaggtgccgagcgttatcgcccgcaaggttagtcagtacagctgccagcgcaagaccacgctgaataactacaacaaaaagtttaccgacgcgctggagatcatggccgagaactacaaatttaaagagaacgaaatcgcgtgtattgaatttaagcgcgccgcgagtctgctgaaatatctgccgttcccggttaccagcatgaaagacatccaaggtctgccgtgcattggcgaccaagttcgtgacgtgatcgaggagatcatcgaagagggcgagagcagccgtgttaaagaagttctcaatgacgagcgctacaaggcctttaagcagttcaccagcgtgttcggtgtgggcgtgaaaaccagcgaaaagtggtttcgtatgggcctccgtacggttgaagaggcaaaggccagtaagagtctgaagctgagcaagatgcagaaggcgggcttcctgtattacgaggatctggcgagctgcgttagtaaagcggaagccgatgccgttacgctcatcgtgaagaacacggtgcgtacctttctgccggatgcgctggtgaccatcaccggcggtttccgccgtggcaaaaagatgggccacgacatcgactttctgatcacgaatccgggcccgaaagaggatgacgagctgctccacaaagtggttgatctgctcaagaagcaaggtctgctgctgtactgcgacatcaaagagagcacgttcgtggaggaacaactgccaagtcgcaaaatcgacgccatggacaacttccagaagtgcttcgccattctcaagctgtaccagccgggcgtggataacagcagctataacacgagtaagaagagtgacatggccgaggttaaggattggaaagcgattcgtgtggatctggtgatcacgccattcgagcagtacgcctatgcgctgctcggttggacgggcagcaaagaatttggtcgcgatctgcgccgctatgcggaggaagagcgcaagatgatcctcgaccgtcatggcctctacgaccgcaaaaagcgcatctttctgaaagcgggcagcgaagaagagattttcgcgcatctgggtctggattatgtggagccgtgggaacgcaacgcg

SEQ ID NO: 1184 - protein, 394 aa, synthetic construct
  REGION 1..394: note = Variant of terminal deoxynucleotidyl transferase
MHHHHHHGGSGHPPSNTPEGEVPSVIARKVSQYSCQRKTTLNNYNKKFTDALEIMAENYKFKENEIACIEFKRAASLLKYLPFPVTSMKDIQGLPCIGDQVRDVIEEIIEEGESSRVKEVLNDERYKAFKQFTSVFGVGVKTSEKWFRMGLRTVEEAKASKSLKLSKMQKAGFLYYEDLASCVSKAEADAVTLIVKNTVRTFLPDALVTITGGFRRGKKMGHDIDFLITNPGPKEDDELLHKVVDLLKKQGLLLYCDIKESTFVEEQLPSRKIDAMDNFQKCFAILKLYQPGVDNSSYNTSKKSDMAEVKDWKAIRVDLVITPFEQYAYALLGWTGSKEFGRDLRRYAEEERKMILDRHGLYDRKKRIFLKAGSEEEIFAHLGLDYVEPWERNA

SEQ ID NO: 1185 - DNA, 1182 bp, synthetic construct
  misc_feature 1..1182: note = Variant of terminal deoxynucleotidyl transferase
  source 1..1182: mol_type = other DNA
atgcaccatcatcatcatcatggcggtagcggccatccgccgagcaataccccggagggggaggtgccgagcgttatcgcccgcaaggttagtcagtacagctgccagcgcaagaccacgctgaataactacaacaaaaagtttaccgacgcgctggagatcatggccgagaactacaaatttaaagagagggaaatcgcgtgtctggaatttaagcgcgccgcgagtctgctgaaatatctgccgttcccggttaccagcatgaaagacatccaaggtctgccgtgcattggcgaccaagttcgtgacgtgatcgaggagatcatcgaagagggcgagagcagccgtgttaaagaagttctcaatgacgagcgctacaaggcctttaagcagttcaccagcgtgttcggtgtgggcgtgaaaaccagcgaaaagtggtttcgtatgggcctccgtacggttgaagaggcaaaggccagtaagagtctgaagctgagcaagatgcagaaggcgggcttcctgtattacgaggatctggcgagctgcgttagtaaagcggaagccgatgccgttacgctcatcgtgaagaacacggtgcgtacctttctgccggatgcgctggtgaccatcaccggcggtttccgccgtggcaaaaagatgggccacgacatcgactttctgatcacgaatccgggcccgaaagaggatgacgagctgctccacaaagtggttgatctgctcaagaagcaaggtctgctgctgtactgcgacatcaaagagagcacgttcgtggaggaacaactgccaagtcgcaaaatcgacgccatggacaacttccagaagtgcttcgccattctcaagctgtaccagccgggcgtggataacagcagctataacacgagtaagaagagtgacatggccgaggttaaggattggaaagcgattcgtgtggatctggtgatcacgccattcgagcagtacgcctatgcgctgctcggttggacgggcagcaaagaatttggtcgcgatctgcgccgctatgcggaggaagagcgcaagatgatcctcgaccgtcatggcctctacgaccgcaaaaagcgcatctttctgaaagcgggcagcgaagaagagattttcgcgcatctgggtctggattatgtggagccgtgggaacgcaacgcg

SEQ ID NO: 1186 - protein, 394 aa, synthetic construct
  REGION 1..394: note = Variant of terminal deoxynucleotidyl transferase
MHHHHHHGGSGHPPSNTPEGEVPSVIARKVSQYSCQRKTTLNNYNKKFTDALEIMAENYKFKEREIACLEFKRAASLLKYLPFPVTSMKDIQGLPCIGDQVRDVIEEIIEEGESSRVKEVLNDERYKAFKQFTSVFGVGVKTSEKWFRMGLRTVEEAKASKSLKLSKMQKAGFLYYEDLASCVSKAEADAVTLIVKNTVRTFLPDALVTITGGFRRGKKMGHDIDFLITNPGPKEDDELLHKVVDLLKKQGLLLYCDIKESTFVEEQLPSRKIDAMDNFQKCFAILKLYQPGVDNSSYNTSKKSDMAEVKDWKAIRVDLVITPFEQYAYALLGWTGSKEFGRDLRRYAEEERKMILDRHGLYDRKKRIFLKAGSEEEIFAHLGLDYVEPWERNA

SEQ ID NO: 1187 - DNA, 1182 bp, synthetic construct
  misc_feature 1..1182: note = Variant of terminal deoxynucleotidyl transferase
  source 1..1182: mol_type = other DNA
atgcaccatcatcatcatcatggcggtagcggccatccgccgagcaataccccggagggggaggtgccgagcgttatcgcccgcaaggttagtcagtacagctgccagcgcaagaccacgctgaataactacaacaaaaagtttaccgacgcgctggagatcatggccgagtcttacaaatttaaagagaacgaaatcgcgtgtctggaatttaagcgcgccgcgagtctgctgaaatatctgccgttcccggttaccagcatgaaagacatccaaggtctgccgtgcattggcgaccaagttcgtgacgtgatcgaggagatcatcgaagagggcgagagcagccgtgttaaagaagttctcaatgacgagcgctacaaggcctttaagcagttcaccagcgtgttcggtgtgggcgtgaaaaccagcgaaaagtggtttcgtatgggcctccgtacggttgaagaggcaaaggccagtaagagtctgaagctgagcaagatgcagaaggcgggcttcctgtattacgaggatctggcgagctgcgttagtaaagcggaagccgatgccgttacgctcatcgtgaagaacacggtgcgtacctttctgccggatgcgctggtgaccatcaccggcggtttccgccgtggcaaaaagatgggccacgacatcgactttctgatcacgaatccgggcccgaaagaggatgacgagctgctccacaaagtggttgatctgctcaagaagcaaggtctgctgctgtactgcgacatcaaagagagcacgttcgtggaggaacaactgccaagtcgcaaaatcgacgccatggacaacttccagaagtgcttcgccattctcaagctgtaccagccgggcgtggataacagcagctataacacgagtaagaagagtgacatggccgaggttaaggattggaaagcgattcgtgtggatctggtgatcacgccattcgagcagtacgcctatgcgctgctcggttggacgggcagcaaagaatttggtcgcgatctgcgccgctatgcggaggaagagcgcaagatgatcctcgaccgtcatggcctctacgaccgcaaaaagcgcatctttctgaaagcgggcagcgaagaagagattttcgcgcatctgggtctggattatgtggagccgtgggaacgcaacgcg

SEQ ID NO: 1188 - protein, 394 aa, synthetic construct
  REGION 1..394: note = Variant of terminal deoxynucleotidyl transferase
MHHHHHHGGSGHPPSNTPEGEVPSVIARKVSQYSCQRKTTLNNYNKKFTDALEIMAESYKFKENEIACLEFKRAASLLKYLPFPVTSMKDIQGLPCIGDQVRDVIEEIIEEGESSRVKEVLNDERYKAFKQFTSVFGVGVKTSEKWFRMGLRTVEEAKASKSLKLSKMQKAGFLYYEDLASCVSKAEADAVTLIVKNTVRTFLPDALVTITGGFRRGKKMGHDIDFLITNPGPKEDDELLHKVVDLLKKQGLLLYCDIKESTFVEEQLPSRKIDAMDNFQKCFAILKLYQPGVDNSSYNTSKKSDMAEVKDWKAIRVDLVITPFEQYAYALLGWTGSKEFGRDLRRYAEEERKMILDRHGLYDRKKRIFLKAGSEEEIFAHLGLDYVEPWERNA

SEQ ID NO: 1189 - DNA, 1182 bp, synthetic construct
  misc_feature 1..1182: note = Variant of terminal deoxynucleotidyl transferase
  source 1..1182: mol_type = other DNA
atgcaccatcatcatcatcatggcggtagcggccatccgccgagcaataccccggagggggaggtgccgagcgttatcgcccgcaaggttagtcagtacagctgccagcgcaagaccacgctgaataactacaacaaaaagtttaccgacgcgctggagatcatggccgagaactacaaatttaaagagaacgaaatcgcgtgtctggaatttaagcgcgccgcgagtctgctgaaatatctgccgttcccggttaccagcatgaaagacatccaaggtctgccgtgcattggcgaccaagttcgtgacgtgatcgaggagatcatcgaagagggcgagagcagccgtgttaaagaagttctcaatgacgagcgctacaaggcctttaagcagttcaccagcgtgttcggtgtgggcgtgaaaaccagcgaaaagtggtttcgtatgggcctccgtacggttgaagaggcaaaggccagtaagagtctgaagctgagcaagatgcagaaggcgggcttcctgtattacgaggatctggcgagctgcgttagtaaagcggaagccgatgccgttacgctcatcgtgaagaacacggtgcgtacctttctgccggatgcgctggtgaccatcaccggcggtttccgccgtggcaaaaagatgggccacgacatcgactttctgatcacgaatccgggcccgaaagaggatgacgagctgctccacaaagtggttgatctgctcaagaagcaaggtctgctgctgtactgcgacatcaaagagagcacgttcgtggaggaacaactgccaagtcgcaaaatcgacgccatggacaacttccagaagtgcttcgccattctcaagctgtaccagccgggcgtggataacagcagctataacacgagtaagaagagtgacatggccgaggttaaggattggaaagcgattcgtgtggatctggtgatcacgccattcgagcagtacagttatgcgctgctcggttggacgggcagcaaagaatttggtcgcgatctgcgccgctatgcggaggaagagcgcaagatgatcctcgaccgtcatggcctctacgaccgcaaaaagcgcatctttctgaaagcgggcagcgaagaagagattttcgcgcatctgggtctggattatgtggagccgtgggaacgcaacgcg

SEQ ID NO: 1190 - protein, 394 aa, synthetic construct
  REGION 1..394: note = Variant of terminal deoxynucleotidyl transferase
MHHHHHHGGSGHPPSNTPEGEVPSVIARKVSQYSCQRKTTLNNYNKKFTDALEIMAENYKFKENEIACLEFKRAASLLKYLPFPVTSMKDIQGLPCIGDQVRDVIEEIIEEGESSRVKEVLNDERYKAFKQFTSVFGVGVKTSEKWFRMGLRTVEEAKASKSLKLSKMQKAGFLYYEDLASCVSKAEADAVTLIVKNTVRTFLPDALVTITGGFRRGKKMGHDIDFLITNPGPKEDDELLHKVVDLLKKQGLLLYCDIKESTFVEEQLPSRKIDAMDNFQKCFAILKLYQPGVDNSSYNTSKKSDMAEVKDWKAIRVDLVITPFEQYSYALLGWTGSKEFGRDLRRYAEEERKMILDRHGLYDRKKRIFLKAGSEEEIFAHLGLDYVEPWERNA

SEQ ID NO: 1191 - DNA, 1182 bp, synthetic construct
  misc_feature 1..1182: note = Variant of terminal deoxynucleotidyl transferase
  source 1..1182: mol_type = other DNA
atgcaccatcatcatcatcatggcggtagcggccatccgccgagcaataccccggagggggaggtgccgagcgttatcgcccgcaaggttagtcagtacagctgccagcgcaagaccacgctgaataactacaacaaaaagtttaccgacgcgctggagatcatggccgagaactacaaatttaaagagaacgaaatcgcgtgtctggaatttaagcgcgccgcgagtctgctgaaatatctgccgttcccggttaccagcatgaaagacatccaaggtctgccgtgcattggcgaccaagttcgtgacgtgatcgaggagatcatcgaagagggcgagagcagccgtgttaaagaagttctcaatgacgagcgctacaaggcctttaagcagttcaccagcgtgttcggtgtgggcgtgaaaaccagcgaaaagtggtttcgtatgggcctccgtacggttgaagaggcaaaggccagtaagagtctgaagctgagcaagatgcagaaggcgggcttcctgtattacgaggatctggcgagctgcgttagtaaagcggaagccgatgccgttacgctcatcgtgaagaacacggtgcgtacctttctgccggatgcgctggtgaccatcaccggcggtttccgccgtggcaaaaagatgggccacgacatcgactttctgatcacgaatccgggcccgaaagaggatgacgagctgctccacaaagtggttgatctgctcaagaagcaaggtctgctgctgtactgcgacatcaaagagagcacgttcgtggaggaacaactgccaagtcgcaaaatcgacgccatggacaacttccagaagtgcttcgccattctcaagctgtaccagccgggcgtggataacagcagctataacacgagtaagaagagtgacatggccgaggttaaggattggaaagcgattcgtgtggatctggtgatcacgccattcgagcagtacgcctatgcgctgctcggttggacgggcagcaaagaatttggtcgcgatctgcgccgctatgcggaggaagagtcgaagatgatcctcgaccgtcatggcctctacgaccgcaaaaagcgcatctttctgaaagcgggcagcgaagaagagattttcgcgcatctgggtctggattatgtggagccgtgggaacgcaacgcg

SEQ ID NO: 1192 - protein, 394 aa, synthetic construct
  REGION 1..394: note = Variant of terminal deoxynucleotidyl transferase
MHHHHHHGGSGHPPSNTPEGEVPSVIARKVSQYSCQRKTTLNNYNKKFTDALEIMAENYKFKENEIACLEFKRAASLLKYLPFPVTSMKDIQGLPCIGDQVRDVIEEIIEEGESSRVKEVLNDERYKAFKQFTSVFGVGVKTSEKWFRMGLRTVEEAKASKSLKLSKMQKAGFLYYEDLASCVSKAEADAVTLIVKNTVRTFLPDALVTITGGFRRGKKMGHDIDFLITNPGPKEDDELLHKVVDLLKKQGLLLYCDIKESTFVEEQLPSRKIDAMDNFQKCFAILKLYQPGVDNSSYNTSKKSDMAEVKDWKAIRVDLVITPFEQYAYALLGWTGSKEFGRDLRRYAEEESKMILDRHGLYDRKKRIFLKAGSEEEIFAHLGLDYVEPWERNA

SEQ ID NO: 1193 - DNA, 1182 bp, synthetic construct
  misc_feature 1..1182: note = Variant of terminal deoxynucleotidyl transferase
  source 1..1182: mol_type = other DNA
atgcaccatcatcatcatcatggcggtagcggccatccgccgagcaataccccggagggggaggtgccgagcgttatcgcccgcaaggttagtcagtacagctgccagcgcaagaccacgctgaataactacaacaaaaagtttaccgacgcgctggagatcatggccgagaactacaaatttaaagagaacgaaatcgcgtgtctggaatttaagcgcgccgcgagtctgctgaaatatctgccgttcccggttaccagcatgaaagacatccaaggtctgccgtgcattggcgaccaagttcgtgacgtgatcgaggagatcatcgaagagggcgagagcagccgtgttaaagaagttctcaatgacgagcgctacaaggcctttaagcagttcaccagcgtgttcggtgtgggcgtgaaaaccagcgaaaagtggtttcgtatgggcctccgtacggttgaagaggcaaaggccagtaagagtctgaagctgagcaagatgcagaaggcgggcttcctgtattacgaggatctggcgagctgcgttagtaaagcggaagccgatgccgttacgctcatcgtgaagaacacggtgcgtacctttctgccggatgcgctggtgaccatcaccggcggtttccgccgtggcaaaaagatgggccacgacatcgactttctgatcacgaatccgggcccgaaagaggatgacgagctgctccacaaagtggttgatctgctcaagaagcaaggtctgctgctgtactgcgacatcaaagagagcacgttcgtggaggaacaactgccaagtcgcaaaatcgacgccatggacaacttccagaagtgcttcgccattctcaagctgtaccagccgggcgtggataacagcagctataacacgagtaagaagagtgacatggccgaggttaaggattggaaagcgattcgtgtggatctggtgatcacgccattcgagcagtacgcctatgcgctgctcggttggacgggcagcaaagaatttggtcgcgatctgcgccgctatgcggaggaagagcgcggtatgatcctcgaccgtcatggcctctacgaccgcaaaaagcgcatctttctgaaagcgggcagcgaagaagagattttcgcgcatctgggtctggattatgtggagccgtgggaacgcaacgcg

SEQ ID NO: 1194 - protein, 394 aa, synthetic construct
  REGION 1..394: note = Variant of terminal deoxynucleotidyl transferase
MHHHHHHGGSGHPPSNTPEGEVPSVIARKVSQYSCQRKTTLNNYNKKFTDALEIMAENYKFKENEIACLEFKRAASLLKYLPFPVTSMKDIQGLPCIGDQVRDVIEEIIEEGESSRVKEVLNDERYKAFKQFTSVFGVGVKTSEKWFRMGLRTVEEAKASKSLKLSKMQKAGFLYYEDLASCVSKAEADAVTLIVKNTVRTFLPDALVTITGGFRRGKKMGHDIDFLITNPGPKEDDELLHKVVDLLKKQGLLLYCDIKESTFVEEQLPSRKIDAMDNFQKCFAILKLYQPGVDNSSYNTSKKSDMAEVKDWKAIRVDLVITPFEQYAYALLGWTGSKEFGRDLRRYAEEERGMILDRHGLYDRKKRIFLKAGSEEEIFAHLGLDYVEPWERNA

SEQ ID NO: 1195 - DNA, 1182 bp, synthetic construct
  misc_feature 1..1182: note = Variant of terminal deoxynucleotidyl transferase
  source 1..1182: mol_type = other DNA
atgcaccatcatcatcatcatggcggtagcggccatccgccgagcaataccccggagggggaggtgccgagcgttatcgcccgcaaggttagtcagtacagctgccagcgcaagaccacgctgaataactacaacaaaaagtttaccgacgcgctggagatcatggccgagaactacaaattttgggagaacgaaatcgcgtgtctggaatttaagcgcgccgcgagtctgctgaaatatctgccgttcccggttaccagcatgaaagacatccaaggtctgccgtgcattggcgaccaagttcgtgacgtgatcgaggagatcatcgaagagggcgagagcagccgtgttaaagaagttctcaatgacgagcgctacaaggcctttaagcagttcaccagcgtgttcggtgtgggcgtgaaaaccagcgaaaagtggtttcgtatgggcctccgtacggttgaagaggcaaaggccagtaagagtctgaagctgagcaagatgcagaaggcgggcttcctgtattacgaggatctggcgagctgcgttagtaaagcggaagccgatgccgttacgctcatcgtgaagaacacggtgcgtacctttctgccggatgcgctggtgaccatcaccggcggtttccgccgtggcaaaaagatgggccacgacatcgactttctgatcacgaatccgggcccgaaagaggatgacgagctgctccacaaagtggttgatctgctcaagaagcaaggtctgctgctgtactgcgacatcaaagagagcacgttcgtggaggaacaactgccaagtcgcaaaatcgacgccatggacaacttccagaagtgcttcgccattctcaagctgtaccagccgggcgtggataacagcagctataacacgagtaagaagagtgacatggccgaggttaaggattggaaagcgattcgtgtggatctggtgatcacgccattcgagcagtacgcctatgcgctgctcggttggacgggcagcaaagaatttggtcgcgatctgcgccgctatgcggaggaagagcgcaagatgatcctcgaccgtcatggcctctacgaccgcaaaaagcgcatctttctgaaagcgggcagcgaagaagagattttcgcgcatctgggtctggattatgtggagccgtgggaacgcaacgcg

SEQ ID NO: 1196 - protein, 394 aa, synthetic construct
  REGION 1..394: note = Variant of terminal deoxynucleotidyl transferase
MHHHHHHGGSGHPPSNTPEGEVPSVIARKVSQYSCQRKTTLNNYNKKFTDALEIMAENYKFWENEIACLEFKRAASLLKYLPFPVTSMKDIQGLPCIGDQVRDVIEEIIEEGESSRVKEVLNDERYKAFKQFTSVFGVGVKTSEKWFRMGLRTVEEAKASKSLKLSKMQKAGFLYYEDLASCVSKAEADAVTLIVKNTVRTFLPDALVTITGGFRRGKKMGHDIDFLITNPGPKEDDELLHKVVDLLKKQGLLLYCDIKESTFVEEQLPSRKIDAMDNFQKCFAILKLYQPGVDNSSYNTSKKSDMAEVKDWKAIRVDLVITPFEQYAYALLGWTGSKEFGRDLRRYAEEERKMILDRHGLYDRKKRIFLKAGSEEEIFAHLGLDYVEPWERNA

SEQ ID NO: 1197 - DNA, 1182 bp, synthetic construct
  misc_feature 1..1182: note = Variant of terminal deoxynucleotidyl transferase
  source 1..1182: mol_type = other DNA
atgcaccatcatcatcatcatggcggtagcggccatccgccgagcaataccccggagggggaggtgccgagcgttatcgcccgcaaggttagtcagtacagctgccagcgcaagaccacgctgaataactacaacaaaaagtttaccgacgcgctggagatcatggccgagaactacaaatttaaagagaacgaaatcgcgtgtctggaatttaagcgcgccgcgagtctgctgaaatatctgccgttcccggttaccagcatgaaagacatccaaggtctgccgtgcattggcgaccaagttcgtgacgtgatcgaggagatcatcgaagagggcgagagcagccgtgttaaagaagttctcaatgacgagcgctacaaggcctttaagcagttcaccagcgtgttcggtgtgggcgtgaaaaccagcgaaaagtggtttcgtatgggcctccgtacggttgaagaggcaaaggccagtaagagtctgaagctgagcaagatgcagaaggcgggcttcctgtattacgaggatctggcgagctgcgttagtaaagcggaagccgatgccgttacgctcatcgtgaagaacacggtgcgtacctttctgccggatgcgctggtgaccatcaccggcggtttccgccgtggcaaaaagatgggccacgacatcgactttctgatcacgaatccgggcccgaaagaggatgacgagctgctccacaaagtggttgatctgctcaagaagcaaggtctgctgctgtactgcgacatcaaagagagcacgttcgtggaggaacaactgccaagtcgcaaaatcgacgccatggacaacttccagaagtgcttcgccattctcaagctgtaccagccgggcgtggataacagcagctataacacgagtaagaagagtgacatggccgaggttaaggattggaaagcgattcgtgtggatctggtgatcacgccattcgagcagtacgcctatgcgctgctcggttggacgggcagcaaagaatttggtcgcgatctgcgccgctatgcggaggaagagcgcaagatggctctcgaccgtcatggcctctacgaccgcaaaaagcgcatctttctgaaagcgggcagcgaagaagagattttcgcgcatctgggtctggattatgtggagccgtgggaacgcaacgcg

SEQ ID NO: 1198 - protein, 394 aa, synthetic construct
  REGION 1..394: note = Variant of terminal deoxynucleotidyl transferase
MHHHHHHGGSGHPPSNTPEGEVPSVIARKVSQYSCQRKTTLNNYNKKFTDALEIMAENYKFKENEIACLEFKRAASLLKYLPFPVTSMKDIQGLPCIGDQVRDVIEEIIEEGESSRVKEVLNDERYKAFKQFTSVFGVGVKTSEKWFRMGLRTVEEAKASKSLKLSKMQKAGFLYYEDLASCVSKAEADAVTLIVKNTVRTFLPDALVTITGGFRRGKKMGHDIDFLITNPGPKEDDELLHKVVDLLKKQGLLLYCDIKESTFVEEQLPSRKIDAMDNFQKCFAILKLYQPGVDNSSYNTSKKSDMAEVKDWKAIRVDLVITPFEQYAYALLGWTGSKEFGRDLRRYAEEERKMALDRHGLYDRKKRIFLKAGSEEEIFAHLGLDYVEPWERNA

SEQ ID NO: 1199 - DNA, 1182 bp, synthetic construct
  misc_feature 1..1182: note = Variant of terminal deoxynucleotidyl transferase
  source 1..1182: mol_type = other DNA
atgcaccatcatcatcatcatggcggtagcggccatccgccgagcaataccccggagggggaggtgccgagcgttatcgcccgcaaggttagtcagtacagctgccagcgcaagaccacgctgaataactacaacaaaaagtttaccgacgcgctggagatcatggccgagaactacaaatttaaagagaacgaaatcgcgtgtctggaatttaagcgcgccgcgagtctgctgaaatatctgccgttcccggttaccagcatgaaagacatccaaggtctgccgtgcattggcgaccaagttcgtgacgtgatcgaggagatcatcgaagagggcgagagcagccgtgttaaagaagttctcaatgacgagcgctacaaggcctttaagcagttcaccagcgtgttcggtgtgggcgtgaaaaccagcgaaaagtggtttcgtatgggcctccgtacggttgaagaggcaaaggccagtaagagtctgaagctgagcaagatgcagaaggcgggcttcctgtattacgaggatctggcgagctgcgttagtaaagcggaagccgatgccgttacgctcatcgtgaagaacacggtgcgtacctttctgccggatgcgctggtgaccatcaccggcggtttccgccgtggcaaaaagatgggccacgacatcgactttctgatcacgaatccgggcccgaaagaggatgacgagctgctccacaaagtggttgatctgctcaagaagcaaggtctgctgctgtactgcgacatcaaagagagcacgttcgtggaggaacaactgccaagtcgcaaaatcgacgccatggacaacttccagaagtgcttcgccattctcaagctgtaccagccgggcgtggataacagcagctataacacgagtaagaagagtgacatggccgaggttaaggattggaaagcgattcgtgtggatctggtgatcacgccattcgagcagtacgcctatgcgctgctcggttggacgggcagcaaagaatttggtcgcgatctgcgccgctatgcggagtcggagcgcaagatgatcctcgaccgtcatggcctctacgaccgcaaaaagcgcatctttctgaaagcgggcagcgaagaagagattttcgcgcatctgggtctggattatgtggagccgtgggaacgcaacgcg

SEQ ID NO: 1200 - protein, 394 aa, synthetic construct
  REGION 1..394: note = Variant of terminal deoxynucleotidyl transferase
MHHHHHHGGSGHPPSNTPEGEVPSVIARKVSQYSCQRKTTLNNYNKKFTDALEIMAENYKFKENEIACLEFKRAASLLKYLPFPVTSMKDIQGLPCIGDQVRDVIEEIIEEGESSRVKEVLNDERYKAFKQFTSVFGVGVKTSEKWFRMGLRTVEEAKASKSLKLSKMQKAGFLYYEDLASCVSKAEADAVTLIVKNTVRTFLPDALVTITGGFRRGKKMGHDIDFLITNPGPKEDDELLHKVVDLLKKQGLLLYCDIKESTFVEEQLPSRKIDAMDNFQKCFAILKLYQPGVDNSSYNTSKKSDMAEVKDWKAIRVDLVITPFEQYAYALLGWTGSKEFGRDLRRYAESERKMILDRHGLYDRKKRIFLKAGSEEEIFAHLGLDYVEPWERNA

SEQ ID NO: 1201 - DNA, 1182 bp, synthetic construct
  misc_feature 1..1182: note = Variant of terminal deoxynucleotidyl transferase
  source 1..1182: mol_type = other DNA
atgcaccatcatcatcatcatggcggtagcggccatccgccgagcaataccccggagggggaggtgccgagcgttatcgcccgcaaggttagtcagtacagctgccagcgcaagaccacgctgaataactacaacaaaaagtttaccgacgcgctggagatcatggccgagaactacaaatttaaagagaacgaaatcgcgtgtctggaatttaagggggccgcgagtctgctgaaatatctgccgttcccggttaccagcatgaaagacatccaaggtctgccgtgcattggcgaccaagttcgtgacgtgatcgaggagatcatcgaagagggcgagagcagccgtgttaaagaagttctcaatgacgagcgctacaaggcctttaagcagttcaccagcgtgttcggtgtgggcgtgaaaaccagcgaaaagtggtttcgtatgggcctccgtacggttgaagaggcaaaggccagtaagagtctgaagctgagcaagatgcagaaggcgggcttcctgtattacgaggatctggcgagctgcgttagtaaagcggaagccgatgccgttacgctcatcgtgaagaacacggtgcgtacctttctgccggatgcgctggtgaccatcaccggcggtttccgccgtggcaaaaagatgggccacgacatcgactttctgatcacgaatccgggcccgaaagaggatgacgagctgctccacaaagtggttgatctgctcaagaagcaaggtctgctgctgtactgcgacatcaaagagagcacgttcgtggaggaacaactgccaagtcgcaaaatcgacgccatggacaacttccagaagtgcttcgccattctcaagctgtaccagccgggcgtggataacagcagctataacacgagtaagaagagtgacatggccgaggttaaggattggaaagcgattcgtgtggatctggtgatcacgccattcgagcagtacgcctatgcgctgctcggttggacgggcagcaaagaatttggtcgcgatctgcgccgctatgcggaggaagagcgcaagatgatcctcgaccgtcatggcctctacgaccgcaaaaagcgcatctttctgaaagcgggcagcgaagaagagattttcgcgcatctgggtctggattatgtggagccgtgggaacgcaacgcg

SEQ ID NO: 1202 - protein, 394 aa, synthetic construct
  REGION 1..394: note = Variant of terminal deoxynucleotidyl transferase
MHHHHHHGGSGHPPSNTPEGEVPSVIARKVSQYSCQRKTTLNNYNKKFTDALEIMAENYKFKENEIACLEFKGAASLLKYLPFPVTSMKDIQGLPCIGDQVRDVIEEIIEEGESSRVKEVLNDERYKAFKQFTSVFGVGVKTSEKWFRMGLRTVEEAKASKSLKLSKMQKAGFLYYEDLASCVSKAEADAVTLIVKNTVRTFLPDALVTITGGFRRGKKMGHDIDFLITNPGPKEDDELLHKVVDLLKKQGLLLYCDIKESTFVEEQLPSRKIDAMDNFQKCFAILKLYQPGVDNSSYNTSKKSDMAEVKDWKAIRVDLVITPFEQYAYALLGWTGSKEFGRDLRRYAEEERKMILDRHGLYDRKKRIFLKAGSEEEIFAHLGLDYVEPWERNA

SEQ ID NO: 1203 - DNA, 1182 bp, synthetic construct
  misc_feature 1..1182: note = Variant of terminal deoxynucleotidyl transferase
  source 1..1182: mol_type = other DNA
atgcaccatcatcatcatcatggcggtagcggccatccgccgagcaataccccggagggggaggtgccgagcgttatcgcccgcaaggttagtcagtacagctgccagcgcaagaccacgctgaataactacaacaaaaagtttaccgacgcgctggagatcatggccgagaactacaaatttagggagaacgaaatcgcgtgtctggaatttaagcgcgccgcgagtctgctgaaatatctgccgttcccggttaccagcatgaaagacatccaaggtctgccgtgcattggcgaccaagttcgtgacgtgatcgaggagatcatcgaagagggcgagagcagccgtgttaaagaagttctcaatgacgagcgctacaaggcctttaagcagttcaccagcgtgttcggtgtgggcgtgaaaaccagcgaaaagtggtttcgtatgggcctccgtacggttgaagaggcaaaggccagtaagagtctgaagctgagcaagatgcagaaggcgggcttcctgtattacgaggatctggcgagctgcgttagtaaagcggaagccgatgccgttacgctcatcgtgaagaacacggtgcgtacctttctgccggatgcgctggtgaccatcaccggcggtttccgccgtggcaaaaagatgggccacgacatcgactttctgatcacgaatccgggcccgaaagaggatgacgagctgctccacaaagtggttgatctgctcaagaagcaaggtctgctgctgtactgcgacatcaaagagagcacgttcgtggaggaacaactgccaagtcgcaaaatcgacgccatggacaacttccagaagtgcttcgccattctcaagctgtaccagccgggcgtggataacagcagctataacacgagtaagaagagtgacatggccgaggttaaggattggaaagcgattcgtgtggatctggtgatcacgccattcgagcagtacgcctatgcgctgctcggttggacgggcagcaaagaatttggtcgcgatctgcgccgctatgcggaggaagagcgcaagatgatcctcgaccgtcatggcctctacgaccgcaaaaagcgcatctttctgaaagcgggcagcgaagaagagattttcgcgcatctgggtctggattatgtggagccgtgggaacgcaacgcg

SEQ ID NO: 1204 - protein, 394 aa, synthetic construct
  REGION 1..394: note = Variant of terminal deoxynucleotidyl transferase
MHHHHHHGGSGHPPSNTPEGEVPSVIARKVSQYSCQRKTTLNNYNKKFTDALEIMAENYKFRENEIACLEFKRAASLLKYLPFPVTSMKDIQGLPCIGDQVRDVIEEIIEEGESSRVKEVLNDERYKAFKQFTSVFGVGVKTSEKWFRMGLRTVEEAKASKSLKLSKMQKAGFLYYEDLASCVSKAEADAVTLIVKNTVRTFLPDALVTITGGFRRGKKMGHDIDFLITNPGPKEDDELLHKVVDLLKKQGLLLYCDIKESTFVEEQLPSRKIDAMDNFQKCFAILKLYQPGVDNSSYNTSKKSDMAEVKDWKAIRVDLVITPFEQYAYALLGWTGSKEFGRDLRRYAEEERKMILDRHGLYDRKKRIFLKAGSEEEIFAHLGLDYVEPWERNA

SEQ ID NO: 1205 - DNA, 1182 bp, synthetic construct
  misc_feature 1..1182: note = Variant of terminal deoxynucleotidyl transferase
  source 1..1182: mol_type = other DNA
atgcaccatcatcatcatcatggcggtagcggccatccgccgagcaataccccggagggggaggtgccgagcgttatcgcccgcaaggttagtcagtacagctgccagcgcaagaccacgctgaataactacaacaaaaagtttaccgacgcgctggagatcatggccgagtgttacaaatttaaagagaacgaaatcgcgtgtctggaatttaagcgcgccgcgagtctgctgaaatatctgccgttcccggttaccagcatgaaagacatccaaggtctgccgtgcattggcgaccaagttcgtgacgtgatcgaggagatcatcgaagagggcgagagcagccgtgttaaagaagttctcaatgacgagcgctacaaggcctttaagcagttcaccagcgtgttcggtgtgggcgtgaaaaccagcgaaaagtggtttcgtatgggcctccgtacggttgaagaggcaaaggccagtaagagtctgaagctgagcaagatgcagaaggcgggcttcctgtattacgaggatctggcgagctgcgttagtaaagcggaagccgatgccgttacgctcatcgtgaagaacacggtgcgtacctttctgccggatgcgctggtgaccatcaccggcggtttccgccgtggcaaaaagatgggccacgacatcgactttctgatcacgaatccgggcccgaaagaggatgacgagctgctccacaaagtggttgatctgctcaagaagcaaggtctgctgctgtactgcgacatcaaagagagcacgttcgtggaggaacaactgccaagtcgcaaaatcgacgccatggacaacttccagaagtgcttcgccattctcaagctgtaccagccgggcgtggataacagcagctataacacgagtaagaagagtgacatggccgaggttaaggattggaaagcgattcgtgtggatctggtgatcacgccattcgagcagtacgcctatgcgctgctcggttggacgggcagcaaagaatttggtcgcgatctgcgccgctatgcggaggaagagcgcaagatgatcctcgaccgtcatggcctctacgaccgcaaaaagcgcatctttctgaaagcgggcagcgaagaagagattttcgcgcatctgggtctggattatgtggagccgtgggaacgcaacgcg

SEQ ID NO: 1206 - protein, 394 aa, synthetic construct
  REGION 1..394: note = Variant of terminal deoxynucleotidyl transferase
MHHHHHHGGSGHPPSNTPEGEVPSVIARKVSQYSCQRKTTLNNYNKKFTDALEIMAECYKFKENEIACLEFKRAASLLKYLPFPVTSMKDIQGLPCIGDQVRDVIEEIIEEGESSRVKEVLNDERYKAFKQFTSVFGVGVKTSEKWFRMGLRTVEEAKASKSLKLSKMQKAGFLYYEDLASCVSKAEADAVTLIVKNTVRTFLPDALVTITGGFRRGKKMGHDIDFLITNPGPKEDDELLHKVVDLLKKQGLLLYCDIKESTFVEEQLPSRKIDAMDNFQKCFAILKLYQPGVDNSSYNTSKKSDMAEVKDWKAIRVDLVITPFEQYAYALLGWTGSKEFGRDLRRYAEEERKMILDRHGLYDRKKRIFLKAGSEEEIFAHLGLDYVEPWERNA

SEQ ID NO: 1207 - DNA, 1182 bp, synthetic construct
  misc_feature 1..1182: note = Variant of terminal deoxynucleotidyl transferase
  source 1..1182: mol_type = other DNA
atgcaccatcatcatcatcatggcggtagcggccatccgccgagcaataccccggagggggaggtgccgagcgttatcgcccgcaaggttagtcagtacagctgccagcgcaagaccacgctgaataactacaacaaaaagtttaccgacgcgctggagatcatggccgagaactacaaatttaaagagaacgaaatcgcgtgtctgcattttaagcgcgccgcgagtctgctgaaatatctgccgttcccggttaccagcatgaaagacatccaaggtctgccgtgcattggcgaccaagttcgtgacgtgatcgaggagatcatcgaagagggcgagagcagccgtgttaaagaagttctcaatgacgagcgctacaaggcctttaagcagttcaccagcgtgttcggtgtgggcgtgaaaaccagcgaaaagtggtttcgtatgggcctccgtacggttgaagaggcaaaggccagtaagagtctgaagctgagcaagatgcagaaggcgggcttcctgtattacgaggatctggcgagctgcgttagtaaagcggaagccgatgccgttacgctcatcgtgaagaacacggtgcgtacctttctgccggatgcgctggtgaccatcaccggcggtttccgccgtggcaaaaagatgggccacgacatcgactttctgatcacgaatccgggcccgaaagaggatgacgagctgctccacaaagtggttgatctgctcaagaagcaaggtctgctgctgtactgcgacatcaaagagagcacgttcgtggaggaacaactgccaagtcgcaaaatcgacgccatggacaacttccagaagtgcttcgccattctcaagctgtaccagccgggcgtggataacagcagctataacacgagtaagaagagtgacatggccgaggttaaggattggaaagcgattcgtgtggatctggtgatcacgccattcgagcagtacgcctatgcgctgctcggttggacgggcagcaaagaatttggtcgcgatctgcgccgctatgcggaggaagagcgcaagatgatcctcgaccgtcatggcctctacgaccgcaaaaagcgcatctttctgaaagcgggcagcgaagaagagattttcgcgcatctgggtctggattatgtggagccgtgggaacgcaacgcg

SEQ ID NO: 1208 - protein, 394 aa, synthetic construct
  REGION 1..394: note = Variant of terminal deoxynucleotidyl transferase
MHHHHHHGGSGHPPSNTPEGEVPSVIARKVSQYSCQRKTTLNNYNKKFTDALEIMAENYKFKENEIACLHFKRAASLLKYLPFPVTSMKDIQGLPCIGDQVRDVIEEIIEEGESSRVKEVLNDERYKAFKQFTSVFGVGVKTSEKWFRMGLRTVEEAKASKSLKLSKMQKAGFLYYEDLASCVSKAEADAVTLIVKNTVRTFLPDALVTITGGFRRGKKMGHDIDFLITNPGPKEDDELLHKVVDLLKKQGLLLYCDIKESTFVEEQLPSRKIDAMDNFQKCFAILKLYQPGVDNSSYNTSKKSDMAEVKDWKAIRVDLVITPFEQYAYALLGWTGSKEFGRDLRRYAEEERKMILDRHGLYDRKKRIFLKAGSEEEIFAHLGLDYVEPWERNA

SEQ ID NO: 1209 - DNA, 1182 bp, synthetic construct
  misc_feature 1..1182: note = Variant of terminal deoxynucleotidyl transferase
  source 1..1182: mol_type = other DNA
atgcaccatcatcatcatcatggcggtagcggccatccgccgagcaataccccggagggggaggtgccgagcgttatcgcccgcaaggttagtcagtacagctgccagcgcaagaccacgctgaataactacaacaaaaagtttaccgacgcgctggagatcatggccgagaactacaaatttaaagagaacgaaatcgcgtgtctggaatttaagcgcgccgcgagtctgctgaaatatctgccgttcccggttaccagcatgaaagacatccaaggtctgccgtgcattggcgaccaagttcgtgacgtgatcgaggagatcatcgaagagggcgagagcagccgtgttaaagaagttctcaatgacgagcgctacaaggcctttaaggtgttcaccagcgtgttcggtgtgggcgtgaaaaccagcgaaaagtggtttcgtatgggcctccgtacggttgaagaggcaaaggccagtaagagtctgaagctgagcaagatgcagaaggcgggcttcctgtattacgaggatctggcgagctgcgttagtaaagcggaagccgatgccgttacgctcatcgtgaagaacacggtgcgtacctttctgccggatgcgctggtgaccatcaccggcggtttccgccgtggcaaaaagatgggccacgacatcgactttctgatcacgaatccgggcccgaaagaggatgacgagctgctccacaaagtggttgatctgctcaagaagcaaggtctgctgctgtactgcgacatcaaagagagcacgttcgtggaggaacaactgccaagtcgcaaaatcgacgccatggacaacttccagaagtgcttcgccattctcaagctgtaccagccgggcgtggataacagcagctataacacgagtaagaagagtgacatggccgaggttaaggattggaaagcgattcgtgtggatctggtgatcacgccattcgagcagtacgcctatgcgctgctcggttggacgggcagcaaagaatttggtcgcgatctgcgccgctatgcggaggaagagcgcaagatgatcctcgaccgtcatggcctctacgaccgcaaaaagcgcatctttctgaaagcgggcagcgaagaagagattttcgcgcatctgggtctggattatgtggagccgtgggaacgcaacgcg

SEQ ID NO: 1210 - protein, 394 aa, synthetic construct
  REGION 1..394: note = Variant of terminal deoxynucleotidyl transferase
MHHHHHHGGSGHPPSNTPEGEVPSVIARKVSQYSCQRKTTLNNYNKKFTDALEIMAENYKFKENEIACLEFKRAASLLKYLPFPVTSMKDIQGLPCIGDQVRDVIEEIIEEGESSRVKEVLNDERYKAFKVFTSVFGVGVKTSEKWFRMGLRTVEEAKASKSLKLSKMQKAGFLYYEDLASCVSKAEADAVTLIVKNTVRTFLPDALVTITGGFRRGKKMGHDIDFLITNPGPKEDDELLHKVVDLLKKQGLLLYCDIKESTFVEEQLPSRKIDAMDNFQKCFAILKLYQPGVDNSSYNTSKKSDMAEVKDWKAIRVDLVITPFEQYAYALLGWTGSKEFGRDLRRYAEEERKMILDRHGLYDRKKRIFLKAGSEEEIFAHLGLDYVEPWERNA

SEQ ID NO: 1211 - DNA, 1182 bp, synthetic construct
  misc_feature 1..1182: note = Variant of terminal deoxynucleotidyl transferase
  source 1..1182: mol_type = other DNA
atgcaccatcatcatcatcatggcggtagcggccatccgccgagcaataccccggagggggaggtgccgagcgttatcgcccgcaaggttagtcagtacagctgccagcgcaagaccacgctgaataactacaacaaaaagtttaccgacgcgctggagatcatggccgagaactacaaatttaaagagaacgaaatcgcgtgtctggaatttaagcgcgccgcgagtctgctgaaatatctgccgttcccggttaccagcatgaaagacatccaaggtctgccgtgcattggcgaccaagttcgtgacgtgatcgaggagatcatcgaagagggcgagagcagccgtgttaaagaagttctcaatgacgagcgctacaaggcctttaagcagttcaccatggtgttcggtgtgggcgtgaaaaccagcgaaaagtggtttcgtatgggcctccgtacggttgaagaggcaaaggccagtaagagtctgaagctgagcaagatgcagaaggcgggcttcctgtattacgaggatctggcgagctgcgttagtaaagcggaagccgatgccgttacgctcatcgtgaagaacacggtgcgtacctttctgccggatgcgctggtgaccatcaccggcggtttccgccgtggcaaaaagatgggccacgacatcgactttctgatcacgaatccgggcccgaaagaggatgacgagctgctccacaaagtggttgatctgctcaagaagcaaggtctgctgctgtactgcgacatcaaagagagcacgttcgtggaggaacaactgccaagtcgcaaaatcgacgccatggacaacttccagaagtgcttcgccattctcaagctgtaccagccgggcgtggataacagcagctataacacgagtaagaagagtgacatggccgaggttaaggattggaaagcgattcgtgtggatctggtgatcacgccattcgagcagtacgcctatgcgctgctcggttggacgggcagcaaagaatttggtcgcgatctgcgccgctatgcggaggaagagcgcaagatgatcctcgaccgtcatggcctctacgaccgcaaaaagcgcatctttctgaaagcgggcagcgaagaagagattttcgcgcatctgggtctggattatgtggagccgtgggaacgcaacgcg

SEQ ID NO: 1212 - protein, 394 aa, synthetic construct
  REGION 1..394: note = Variant of terminal deoxynucleotidyl transferase
MHHHHHHGGSGHPPSNTPEGEVPSVIARKVSQYSCQRKTTLNNYNKKFTDALEIMAENYKFKENEIACLEFKRAASLLKYLPFPVTSMKDIQGLPCIGDQVRDVIEEIIEEGESSRVKEVLNDERYKAFKQFTMVFGVGVKTSEKWFRMGLRTVEEAKASKSLKLSKMQKAGFLYYEDLASCVSKAEADAVTLIVKNTVRTFLPDALVTITGGFRRGKKMGHDIDFLITNPGPKEDDELLHKVVDLLKKQGLLLYCDIKESTFVEEQLPSRKIDAMDNFQKCFAILKLYQPGVDNSSYNTSKKSDMAEVKDWKAIRVDLVITPFEQYAYALLGWTGSKEFGRDLRRYAEEERKMILDRHGLYDRKKRIFLKAGSEEEIFAHLGLDYVEPWERNA

SEQ ID NO: 1213 - DNA, 1182 bp, synthetic construct
  misc_feature 1..1182: note = Variant of terminal deoxynucleotidyl transferase
  source 1..1182: mol_type = other DNA
atgcaccatcatcatcatcatggcggtagcggccatccgccgagcaataccccggagggggaggtgccgagcgttatcgcccgcaaggttagtcagtacagctgccagcgcaagaccacgctgaataactacaacaaaaagtttaccgacgcgctggagaatatggccgagaactacaaatttaaagagaacgaaatcgcgtgtctggaatttaagcgcgccgcgagtctgctgaaatatctgccgttcccggttaccagcatgaaagacatccaaggtctgccgtgcattggcgaccaagttcgtgacgtgatcgaggagatcatcgaagagggcgagagcagccgtgttaaagaagttctcaatgacgagcgctacaaggcctttaagcagttcaccagcgtgttcggtgtgggcgtgaaaaccagcgaaaagtggtttcgtatgggcctccgtacggttgaagaggcaaaggccagtaagagtctgaagctgagcaagatgcagaaggcgggcttcctgtattacgaggatctggcgagctgcgttagtaaagcggaagccgatgccgttacgctcatcgtgaagaacacggtgcgtacctttctgccggatgcgctggtgaccatcaccggcggtttccgccgtggcaaaaagatgggccacgacatcgactttctgatcacgaatccgggcccgaaagaggatgacgagctgctccacaaagtggttgatctgctcaagaagcaaggtctgctgctgtactgcgacatcaaagagagcacgttcgtggaggaacaactgccaagtcgcaaaatcgacgccatggacaacttccagaagtgcttcgccattctcaagctgtaccagccgggcgtggataacagcagctataacacgagtaagaagagtgacatggccgaggttaaggattggaaagcgattcgtgtggatctggtgatcacgccattcgagcagtacgcctatgcgctgctcggttggacgggcagcaaagaatttggtcgcgatctgcgccgctatgcggaggaagagcgcaagatgatcctcgaccgtcatggcctctacgaccgcaaaaagcgcatctttctgaaagcgggcagcgaagaagagattttcgcgcatctgggtctggattatgtggagccgtgggaacgcaacgcg

SEQ ID NO: 1214 - protein, 394 aa, synthetic construct
  REGION 1..394: note = Variant of terminal deoxynucleotidyl transferase
MHHHHHHGGSGHPPSNTPEGEVPSVIARKVSQYSCQRKTTLNNYNKKFTDALENMAENYKFKENEIACLEFKRAASLLKYLPFPVTSMKDIQGLPCIGDQVRDVIEEIIEEGESSRVKEVLNDERYKAFKQFTSVFGVGVKTSEKWFRMGLRTVEEAKASKSLKLSKMQKAGFLYYEDLASCVSKAEADAVTLIVKNTVRTFLPDALVTITGGFRRGKKMGHDIDFLITNPGPKEDDELLHKVVDLLKKQGLLLYCDIKESTFVEEQLPSRKIDAMDNFQKCFAILKLYQPGVDNSSYNTSKKSDMAEVKDWKAIRVDLVITPFEQYAYALLGWTGSKEFGRDLRRYAEEERKMILDRHGLYDRKKRIFLKAGSEEEIFAHLGLDYVEPWERNA

SEQ ID NO: 1215 - DNA, 1182 bp, synthetic construct
  misc_feature 1..1182: note = Variant of terminal deoxynucleotidyl transferase
  source 1..1182: mol_type = other DNA
atgcaccatcatcatcatcatggcggtagcggccatccgccgagcaataccccggagggggaggtgccgagcgttatcgcccgcaaggttagtcagtacagctgccagcgcaagaccacgctgaataactacaacaaaaagtttaccgacgcgctggagatcatggccgagaactacaaatttaaagagaacgaaatcgcgtgtctggaatttaagcgcgccgcgagtctgctgaaatatctgccgttcccggttaccagcatgaaagacatccaaggtctgccgtgcattggcgaccaagttcgtgacgtgatcgaggagatcatcgaagagggcgagagcagccgtgttaaagaagttctcaatgacgagcgctacaaggcctttaagcagttcaccagcgtgttcggtgtgggcgtgaaaaccagcgaaaagtggtttcgtatgggcctccgtacggttgaagaggcaaaggccagtaagagtctgaagctgagcaagatgcagaaggcgggcttcctgtattacgaggatctggcgagctgcgttagtaaagcggaagccgatgccgttacgctcatcgtgaagaacacggtgcgtacctttctgccggatgcgctggtgaccatcaccggcggtttccgccgtggcaaaaagatgggccacgacatcgactttctgatcacgaatccgggcccgaaagaggatgacgagctgctccacaaagtggttgatctgctcaagaagcaaggtctgctgctgtactgcgacatcaaagagagcacgttcgtggaggaacaactgccaagtcgcaaaatcgacgccatggacaacttccagaagtgcttcgccattctcaagctgtaccagccgggcgtggataacagcagctataacacgagtaagaagagtgacatggccgaggttaaggattggaaagcgattcgtgtggattttgtgatcacgccattcgagcagtacgcctatgcgctgctcggttggacgggcagcaaagaatttggtcgcgatctgcgccgctatgcggaggaagagcgcaagatgatcctcgaccgtcatggcctctacgaccgcaaaaagcgcatctttctgaaagcgggcagcgaagaagagattttcgcgcatctgggtctggattatgtggagccgtgggaacgcaacgcg

SEQ ID NO: 1216 - protein, 394 aa, synthetic construct
  REGION 1..394: note = Variant of terminal deoxynucleotidyl transferase
MHHHHHHGGSGHPPSNTPEGEVPSVIARKVSQYSCQRKTTLNNYNKKFTDALEIMAENYKFKENEIACLEFKRAASLLKYLPFPVTSMKDIQGLPCIGDQVRDVIEEIIEEGESSRVKEVLNDERYKAFKQFTSVFGVGVKTSEKWFRMGLRTVEEAKASKSLKLSKMQKAGFLYYEDLASCVSKAEADAVTLIVKNTVRTFLPDALVTITGGFRRGKKMGHDIDFLITNPGPKEDDELLHKVVDLLKKQGLLLYCDIKESTFVEEQLPSRKIDAMDNFQKCFAILKLYQPGVDNSSYNTSKKSDMAEVKDWKAIRVDFVITPFEQYAYALLGWTGSKEFGRDLRRYAEEERKMILDRHGLYDRKKRIFLKAGSEEEIFAHLGLDYVEPWERNA

SEQ ID NO: 1217 - DNA, 1182 bp, synthetic construct
  misc_feature 1..1182: note = Variant of terminal deoxynucleotidyl transferase
  source 1..1182: mol_type = other DNA
atgcaccatcatcatcatcatggcggtagcggccatccgccgagcaataccccggagggggaggtgccgagcgttatcgcccgcaaggttagtcagtacagctgccagcgcaagaccacgctgaataactacaacaaaaagtttaccgacgcgctggagatcatggcctgtaactacaaatttaaagagaacgaaatcgcgtgtctggaatttaagcgcgccgcgagtctgctgaaatatctgccgttcccggttaccagcatgaaagacatccaaggtctgccgtgcattggcgaccaagttcgtgacgtgatcgaggagatcatcgaagagggcgagagcagccgtgttaaagaagttctcaatgacgagcgctacaaggcctttaagcagttcaccagcgtgttcggtgtgggcgtgaaaaccagcgaaaagtggtttcgtatgggcctccgtacggttgaagaggcaaaggccagtaagagtctgaagctgagcaagatgcagaaggcgggcttcctgtattacgaggatctggcgagctgcgttagtaaagcggaagccgatgccgttacgctcatcgtgaagaacacggtgcgtacctttctgccggatgcgctggtgaccatcaccggcggtttccgccgtggcaaaaagatgggccacgacatcgactttctgatcacgaatccgggcccgaaagaggatgacgagctgctccacaaagtggttgatctgctcaagaagcaaggtctgctgctgtactgcgacatcaaagagagcacgttcgtggaggaacaactgccaagtcgcaaaatcgacgccatggacaacttccagaagtgcttcgccattctcaagctgtaccagccgggcgtggataacagcagctataacacgagtaagaagagtgacatggccgaggttaaggattggaaagcgattcgtgtggatctggtgatcacgccattcgagcagtacgcctatgcgctgctcggttggacgggcagcaaagaatttggtcgcgatctgcgccgctatgcggaggaagagcgcaagatgatcctcgaccgtcatggcctctacgaccgcaaaaagcgcatctttctgaaagcgggcagcgaagaagagattttcgcgcatctgggtctggattatgtggagccgtgggaacgcaacgcg

SEQ ID NO: 1218 - protein, 394 aa, synthetic construct
  REGION 1..394: note = Variant of terminal deoxynucleotidyl transferase
MHHHHHHGGSGHPPSNTPEGEVPSVIARKVSQYSCQRKTTLNNYNKKFTDALEIMACNYKFKENEIACLEFKRAASLLKYLPFPVTSMKDIQGLPCIGDQVRDVIEEIIEEGESSRVKEVLNDERYKAFKQFTSVFGVGVKTSEKWFRMGLRTVEEAKASKSLKLSKMQKAGFLYYEDLASCVSKAEADAVTLIVKNTVRTFLPDALVTITGGFRRGKKMGHDIDFLITNPGPKEDDELLHKVVDLLKKQGLLLYCDIKESTFVEEQLPSRKIDAMDNFQKCFAILKLYQPGVDNSSYNTSKKSDMAEVKDWKAIRVDLVITPFEQYAYALLGWTGSKEFGRDLRRYAEEERKMILDRHGLYDRKKRIFLKAGSEEEIFAHLGLDYVEPWERNA

SEQ ID NO: 1219 - DNA, 1182 bp, synthetic construct
  misc_feature 1..1182: note = Variant of terminal deoxynucleotidyl transferase
  source 1..1182: mol_type = other DNA
atgcaccatcatcatcatcatggcggtagcggccatccgccgagcaataccccggagggggaggtgccgagcgttatcgcccgcaaggttagtcagtacagctgccagcgcaagaccacgctgaataactacaacaaaaagtttaccgacgcgctggagatcatggccgagaactacaaatttaaagagaacgaaatcgcgtgtctggaatttaagcgcgccgcgagtctgctgaaatatctgccgttcccggttaccagcatgaaagacatccaaggtctgccgtgcattggcgaccaagttcgtgacgtgatcgaggagatcatcgaagagggcgagagcagccgtgttaaagaagttctcaatgacgagcgctacaaggcctttaagcagttcaccagcgtgttcggtgtgggcgtgaaaaccagcgaaaagtggtttcgtatgggcctccgtacggttgaagaggcaaaggccagtaagagtctgaagctgagcaagatgcagaaggcgggcttcctgtattacgaggatctggcgagctgcgttagtaaagcggaagccgatgccgttacgctcatcgtgaagaacacggtgcgtacctttctgccggatgcgctggtgaccatcaccggcggtttccgccgtggcaaaaagatgggccacgacatcgactttctgatcacgaatccgggcccgaaagaggatgacgagctgctccacaaagtggttgatctgctcaagaagcaaggtctgctgctgtactgcgacatcaaagagagcacgttcgtggaggaacaactgccaagtcgcaaaatcgacgccatggacaacttccagaagtgcttcgccattctcaagctgtaccagccgggcgtggataacagcagctataacacgagtaagaagagtgacatggccgaggttaaggattggaaagcgattcgtgtggatctggtgatcacgccattcgagcagtacgcctatgcgctgctcggttggacgggcagcaaagaatttggtcgcgatctgcgccgctatgcggaggaagagcgccagatgatcctcgaccgtcatggcctctacgaccgcaaaaagcgcatctttctgaaagcgggcagcgaagaagagattttcgcgcatctgggtctggattatgtggagccgtgggaacgcaacgcg

SEQ ID NO: 1220 - protein, 394 aa, synthetic construct
  REGION 1..394: note = Variant of terminal deoxynucleotidyl transferase
MHHHHHHGGSGHPPSNTPEGEVPSVIARKVSQYSCQRKTTLNNYNKKFTDALEIMAENYKFKENEIACLEFKRAASLLKYLPFPVTSMKDIQGLPCIGDQVRDVIEEIIEEGESSRVKEVLNDERYKAFKQFTSVFGVGVKTSEKWFRMGLRTVEEAKASKSLKLSKMQKAGFLYYEDLASCVSKAEADAVTLIVKNTVRTFLPDALVTITGGFRRGKKMGHDIDFLITNPGPKEDDELLHKVVDLLKKQGLLLYCDIKESTFVEEQLPSRKIDAMDNFQKCFAILKLYQPGVDNSSYNTSKKSDMAEVKDWKAIRVDLVITPFEQYAYALLGWTGSKEFGRDLRRYAEEERQMILDRHGLYDRKKRIFLKAGSEEEIFAHLGLDYVEPWERNA

SEQ ID NO: 1221 - DNA, 1182 bp, synthetic construct
  misc_feature 1..1182: note = Variant of terminal deoxynucleotidyl transferase
  source 1..1182: mol_type = other DNA
atgcaccatcatcatcatcatggcggtagcggccatccgccgagcaataccccggagggggaggtgccgagcgttatcgcccgcaaggttagtcagtacagctgccagcgcaagaccacgctgaataactacaacaaaaagtttaccgaccttctggagatcatggccgagaactacaaatttaaagagaacgaaatcgcgtgtctggaatttaagcgcgccgcgagtctgctgaaatatctgccgttcccggttaccagcatgaaagacatccaaggtctgccgtgcattggcgaccaagttcgtgacgtgatcgaggagatcatcgaagagggcgagagcagccgtgttaaagaagttctcaatgacgagcgctacaaggcctttaagcagttcaccagcgtgttcggtgtgggcgtgaaaaccagcgaaaagtggtttcgtatgggcctccgtacggttgaagaggcaaaggccagtaagagtctgaagctgagcaagatgcagaaggcgggcttcctgtattacgaggatctggcgagctgcgttagtaaagcggaagccgatgccgttacgctcatcgtgaagaacacggtgcgtacctttctgccggatgcgctggtgaccatcaccggcggtttccgccgtggcaaaaagatgggccacgacatcgactttctgatcacgaatccgggcccgaaagaggatgacgagctgctccacaaagtggttgatctgctcaagaagcaaggtctgctgctgtactgcgacatcaaagagagcacgttcgtggaggaacaactgccaagtcgcaaaatcgacgccatggacaacttccagaagtgcttcgccattctcaagctgtaccagccgggcgtggataacagcagctataacacgagtaagaagagtgacatggccgaggttaaggattggaaagcgattcgtgtggatctggtgatcacgccattcgagcagtacgcctatgcgctgctcggttggacgggcagcaaagaatttggtcgcgatctgcgccgctatgcggaggaagagcgcaagatgatcctcgaccgtcatggcctctacgaccgcaaaaagcgcatctttctgaaagcgggcagcgaagaagagattttcgcgcatctgggtctggattatgtggagccgtgggaacgcaacgcg

SEQ ID NO: 1222 - protein, 394 aa, synthetic construct
  REGION 1..394: note = Variant of terminal deoxynucleotidyl transferase
MHHHHHHGGSGHPPSNTPEGEVPSVIARKVSQYSCQRKTTLNNYNKKFTDLLEIMAENYKFKENEIACLEFKRAASLLKYLPFPVTSMKDIQGLPCIGDQVRDVIEEIIEEGESSRVKEVLNDERYKAFKQFTSVFGVGVKTSEKWFRMGLRTVEEAKASKSLKLSKMQKAGFLYYEDLASCVSKAEADAVTLIVKNTVRTFLPDALVTITGGFRRGKKMGHDIDFLITNPGPKEDDELLHKVVDLLKKQGLLLYCDIKESTFVEEQLPSRKIDAMDNFQKCFAILKLYQPGVDNSSYNTSKKSDMAEVKDWKAIRVDLVITPFEQYAYALLGWTGSKEFGRDLRRYAEEERKMILDRHGLYDRKKRIFLKAGSEEEIFAHLGLDYVEPWERNA

SEQ ID NO: 1223 - DNA, 1182 bp, synthetic construct
  misc_feature 1..1182: note = Variant of terminal deoxynucleotidyl transferase
  source 1..1182: mol_type = other DNA
atgcaccatcatcatcatcatggcggtagcggccatccgccgagcaataccccggagggggaggtgccgagcgttatcgcccgcaaggttagtcagtacagctgccagcgcaagaccacgctgaataactacaacaaaaagtataccgacgcgctggagatcatggccgagaactacaaatttaaagagaacgaaatcgcgtgtctggaatttaagcgcgccgcgagtctgctgaaatatctgccgttcccggttaccagcatgaaagacatccaaggtctgccgtgcattggcgaccaagttcgtgacgtgatcgaggagatcatcgaagagggcgagagcagccgtgttaaagaagttctcaatgacgagcgctacaaggcctttaagcagttcaccagcgtgttcggtgtgggcgtgaaaaccagcgaaaagtggtttcgtatgggcctccgtacggttgaagaggcaaaggccagtaagagtctgaagctgagcaagatgcagaaggcgggcttcctgtattacgaggatctggcgagctgcgttagtaaagcggaagccgatgccgttacgctcatcgtgaagaacacggtgcgtacctttctgccggatgcgctggtgaccatcaccggcggtttccgccgtggcaaaaagatgggccacgacatcgactttctgatcacgaatccgggcccgaaagaggatgacgagctgctccacaaagtggttgatctgctcaagaagcaaggtctgctgctgtactgcgacatcaaagagagcacgttcgtggaggaacaactgccaagtcgcaaaatcgacgccatggacaacttccagaagtgcttcgccattctcaagctgtaccagccgggcgtggataacagcagctataacacgagtaagaagagtgacatggccgaggttaaggattggaaagcgattcgtgtggatctggtgatcacgccattcgagcagtacgcctatgcgctgctcggttggacgggcagcaaagaatttggtcgcgatctgcgccgctatgcggaggaagagcgcaagatgatcctcgaccgtcatggcctctacgaccgcaaaaagcgcatctttctgaaagcgggcagcgaagaagagattttcgcgcatctgggtctggattatgtggagccgtgggaacgcaacgcg

SEQ ID NO: 1224 - protein, 394 aa, synthetic construct
  REGION 1..394: note = Variant of terminal deoxynucleotidyl transferase
MHHHHHHGGSGHPPSNTPEGEVPSVIARKVSQYSCQRKTTLNNYNKKYTDALEIMAENYKFKENEIACLEFKRAASLLKYLPFPVTSMKDIQGLPCIGDQVRDVIEEIIEEGESSRVKEVLNDERYKAFKQFTSVFGVGVKTSEKWFRMGLRTVEEAKASKSLKLSKMQKAGFLYYEDLASCVSKAEADAVTLIVKNTVRTFLPDALVTITGGFRRGKKMGHDIDFLITNPGPKEDDELLHKVVDLLKKQGLLLYCDIKESTFVEEQLPSRKIDAMDNFQKCFAILKLYQPGVDNSSYNTSKKSDMAEVKDWKAIRVDLVITPFEQYAYALLGWTGSKEFGRDLRRYAEEERKMILDRHGLYDRKKRIFLKAGSEEEIFAHLGLDYVEPWERNA

SEQ ID NO: 1225 - DNA, 1182 bp, synthetic construct
  misc_feature 1..1182: note = Variant of terminal deoxynucleotidyl transferase
  source 1..1182: mol_type = other DNA
atgcaccatcatcatcatcatggcggtagcggccatccgccgagcaataccccggagggggaggtgccgagcgttatcgcccgcaaggttagtcagtacagctgccagcgcaagaccacgctgaataactacaacaaaaagtttaccgacgcgctggagatcatggccgagaactacaaatttaaagagaacgaaatcgcgtgtctggaatttaagcgcgccgcgagtctgctgaaatatctgccgttcccggttaccagcatgaaagacatccaaggtctgccgtgcattggcgaccaagttcgtgacgtgatcgaggagatcatcgaagagggcgagagcagccgtgttaaagaagttctcaatgacgagcgctacaaggcctttaagcagttcaccagcgtgttcggtgtgggcgtgaaaaccagcgaaaagtggtttcgtatgggcctccgtacggttgaagaggcaaaggccagtaagagtctgaagctgagcaagatgcagaaggcgggcttcctgtattacgaggatctggcgagctgcgttagtaaagcggaagccgatgccgttacgctcatcgtgaagaacacggtgcgtacctttctgccggatgcgctggtgaccatcaccggcggtttccgccgtggcaaaaagatgggccacgacatcgactttctgatcacgaatccgggcccgaaagaggatgacgagctgctccacaaagtggttgatctgctcaagaagcaaggtctgctgctgtactgcgacatcaaagagagcacgttcgtggaggaacaactgccaagtcgcaaaatcgacgccatggacaacttccagaagtgcttcgccattctcaagctgtaccagccgggcgtggataacagcagctataacacgagtaagaagagtgacatggccgaggttaaggattggaaagcgattcgtgtggatctggtgatcagtccattcgagcagtacgcctatgcgctgctcggttggacgggcagcaaagaatttggtcgcgatctgcgccgctatgcggaggaagagcgcaagatgatcctcgaccgtcatggcctctacgaccgcaaaaagcgcatctttctgaaagcgggcagcgaagaagagattttcgcgcatctgggtctggattatgtggagccgtgggaacgcaacgcg

SEQ ID NO: 1226 - protein, 394 aa, synthetic construct
  REGION 1..394: note = Variant of terminal deoxynucleotidyl transferase
MHHHHHHGGSGHPPSNTPEGEVPSVIARKVSQYSCQRKTTLNNYNKKFTDALEIMAENYKFKENEIACLEFKRAASLLKYLPFPVTSMKDIQGLPCIGDQVRDVIEEIIEEGESSRVKEVLNDERYKAFKQFTSVFGVGVKTSEKWFRMGLRTVEEAKASKSLKLSKMQKAGFLYYEDLASCVSKAEADAVTLIVKNTVRTFLPDALVTITGGFRRGKKMGHDIDFLITNPGPKEDDELLHKVVDLLKKQGLLLYCDIKESTFVEEQLPSRKIDAMDNFQKCFAILKLYQPGVDNSSYNTSKKSDMAEVKDWKAIRVDLVISPFEQYAYALLGWTGSKEFGRDLRRYAEEERKMILDRHGLYDRKKRIFLKAGSEEEIFAHLGLDYVEPWERNA

SEQ ID NO: 1227 - DNA, 1182 bp, synthetic construct
  misc_feature 1..1182: note = Variant of terminal deoxynucleotidyl transferase
  source 1..1182: mol_type = other DNA
atgcaccatcatcatcatcatggcggtagcggccatccgccgagcaataccccggagggggaggtgccgagcgttatcgcccgcaaggttagtcagtacagctgccagcgcaagaccacgctgaataactacaacaaaaagtttaccgacgcgctggagatcatggccgagaactacaaatttaaagagaacgaaatcgcgtgtctggaatcgaagcgcgccgcgagtctgctgaaatatctgccgttcccggttaccagcatgaaagacatccaaggtctgccgtgcattggcgaccaagttcgtgacgtgatcgaggagatcatcgaagagggcgagagcagccgtgttaaagaagttctcaatgacgagcgctacaaggcctttaagcagttcaccagcgtgttcggtgtgggcgtgaaaaccagcgaaaagtggtttcgtatgggcctccgtacggttgaagaggcaaaggccagtaagagtctgaagctgagcaagatgcagaaggcgggcttcctgtattacgaggatctggcgagctgcgttagtaaagcggaagccgatgccgttacgctcatcgtgaagaacacggtgcgtacctttctgccggatgcgctggtgaccatcaccggcggtttccgccgtggcaaaaagatgggccacgacatcgactttctgatcacgaatccgggcccgaaagaggatgacgagctgctccacaaagtggttgatctgctcaagaagcaaggtctgctgctgtactgcgacatcaaagagagcacgttcgtggaggaacaactgccaagtcgcaaaatcgacgccatggacaacttccagaagtgcttcgccattctcaagctgtaccagccgggcgtggataacagcagctataacacgagtaagaagagtgacatggccgaggttaaggattggaaagcgattcgtgtggatctggtgatcacgccattcgagcagtacgcctatgcgctgctcggttggacgggcagcaaagaatttggtcgcgatctgcgccgctatgcggaggaagagcgcaagatgatcctcgaccgtcatggcctctacgaccgcaaaaagcgcatctttctgaaagcgggcagcgaagaagagattttcgcgcatctgggtctggattatgtggagccgtgggaacgcaacgcg

SEQ ID NO: 1228 - protein, 394 aa, synthetic construct
  REGION 1..394: note = Variant of terminal deoxynucleotidyl transferase
MHHHHHHGGSGHPPSNTPEGEVPSVIARKVSQYSCQRKTTLNNYNKKFTDALEIMAENYKFKENEIACLESKRAASLLKYLPFPVTSMKDIQGLPCIGDQVRDVIEEIIEEGESSRVKEVLNDERYKAFKQFTSVFGVGVKTSEKWFRMGLRTVEEAKASKSLKLSKMQKAGFLYYEDLASCVSKAEADAVTLIVKNTVRTFLPDALVTITGGFRRGKKMGHDIDFLITNPGPKEDDELLHKVVDLLKKQGLLLYCDIKESTFVEEQLPSRKIDAMDNFQKCFAILKLYQPGVDNSSYNTSKKSDMAEVKDWKAIRVDLVITPFEQYAYALLGWTGSKEFGRDLRRYAEEERKMILDRHGLYDRKKRIFLKAGSEEEIFAHLGLDYVEPWERNA

SEQ ID NO: 1229 - DNA, 1182 bp, synthetic construct
  misc_feature 1..1182: note = Variant of terminal deoxynucleotidyl transferase
  source 1..1182: mol_type = other DNA
atgcaccatcatcatcatcatggcggtagcggccatccgccgagcaataccccggagggggaggtgccgagcgttatcgcccgcaaggttagtcagtacagctgccagcgcaagaccacgctgaataactacaacaaaaagtttaccgacgcgctggagatcatggccgagaactacaaatttaaagagaacgaaatcgcgtgtctggaatttaagcgcgccgcgagtctgctgaaatatctgccgttcccggttaccagcatgaaagacatccaaggtctgccgtgcattggcgaccaagttcgtgacgtgatcgaggagatcatcgaagagggcgagagcagccgtgttaaagaagttctcaatgacgagcgctacaaggcctttaagcagttcaccagcgtgttcggtgtgggcgtgaaaaccagcgaaaagtggtttcgtatgggcctccgtacggttgaagaggcaaaggccagtaagagtctgaagctgagcaagatgcagaaggcgggcttcctgtattacgaggatctggcgagctgcgttagtaaagcggaagccgatgccgttacgctcatcgtgaagaacacggtgcgtacctttctgccggatgcgctggtgaccatcaccggcggtttccgccgtggcaaaaagatgggccacgacatcgactttctgatcacgaatccgggcccgaaagaggatgacgagctgctccacaaagtggttgatctgctcaagaagcaaggtctgctgctgtactgcgacatcaaagagagcacgttcgtggaggaacaactgccaagtcgcaaaatcgacgccatggacaacttccagaagtgcttcgccattctcaagctgtaccagccgggcgtggataacagcagctataacacgagtaagaagagtgacatggccgaggttaaggattggaaagcgattcgtgtggatctggtgatcacgccattcgagcagtacgcctatgcgctgctcggttggacgggcagcaaagaatttggtcgcgatctgcgccgctatgcggaggaagaggctaagatgatcctcgaccgtcatggcctctacgaccgcaaaaagcgcatctttctgaaagcgggcagcgaagaagagattttcgcgcatctgggtctggattatgtggagccgtgggaacgcaacgcg

SEQ ID NO: 1230 - protein, 394 aa, synthetic construct
  REGION 1..394: note = Variant of terminal deoxynucleotidyl transferase
MHHHHHHGGSGHPPSNTPEGEVPSVIARKVSQYSCQRKTTLNNYNKKFTDALEIMAENYKFKENEIACLEFKRAASLLKYLPFPVTSMKDIQGLPCIGDQVRDVIEEIIEEGESSRVKEVLNDERYKAFKQFTSVFGVGVKTSEKWFRMGLRTVEEAKASKSLKLSKMQKAGFLYYEDLASCVSKAEADAVTLIVKNTVRTFLPDALVTITGGFRRGKKMGHDIDFLITNPGPKEDDELLHKVVDLLKKQGLLLYCDIKESTFVEEQLPSRKIDAMDNFQKCFAILKLYQPGVDNSSYNTSKKSDMAEVKDWKAIRVDLVITPFEQYAYALLGWTGSKEFGRDLRRYAEEEAKMILDRHGLYDRKKRIFLKAGSEEEIFAHLGLDYVEPWERNA

SEQ ID NO: 1231 - DNA, 1182 bp, synthetic construct
  misc_feature 1..1182: note = Variant of terminal deoxynucleotidyl transferase
  source 1..1182: mol_type = other DNA
atgcaccatcatcatcatcatggcggtagcggccatccgccgagcaataccccggagggggaggtgccgagcgttatcgcccgcaaggttagtcagtacagctgccagcgcaagaccacgctgaataactacaacaaaaagtttaccgacgcgctggagatcatggccgagaactacaaatttaaagagcaggaaatcgcgtgtctggaatttaagcgcgccgcgagtctgctgaaatatctgccgttcccggttaccagcatgaaagacatccaaggtctgccgtgcattggcgaccaagttcgtgacgtgatcgaggagatcatcgaagagggcgagagcagccgtgttaaagaagttctcaatgacgagcgctacaaggcctttaagcagttcaccagcgtgttcggtgtgggcgtgaaaaccagcgaaaagtggtttcgtatgggcctccgtacggttgaagaggcaaaggccagtaagagtctgaagctgagcaagatgcagaaggcgggcttcctgtattacgaggatctggcgagctgcgttagtaaagcggaagccgatgccgttacgctcatcgtgaagaacacggtgcgtacctttctgccggatgcgctggtgaccatcaccggcggtttccgccgtggcaaaaagatgggccacgacatcgactttctgatcacgaatccgggcccgaaagaggatgacgagctgctccacaaagtggttgatctgctcaagaagcaaggtctgctgctgtactgcgacatcaaagagagcacgttcgtggaggaacaactgccaagtcgcaaaatcgacgccatggacaacttccagaagtgcttcgccattctcaagctgtaccagccgggcgtggataacagcagctataacacgagtaagaagagtgacatggccgaggttaaggattggaaagcgattcgtgtggatctggtgatcacgccattcgagcagtacgcctatgcgctgctcggttggacgggcagcaaagaatttggtcgcgatctgcgccgctatgcggaggaagagcgcaagatgatcctcgaccgtcatggcctctacgaccgcaaaaagcgcatctttctgaaagcgggcagcgaagaagagattttcgcgcatctgggtctggattatgtggagccgtgggaacgcaacgcg

SEQ ID NO: 1232 - protein, 394 aa, synthetic construct
  REGION 1..394: note = Variant of terminal deoxynucleotidyl transferase
MHHHHHHGGSGHPPSNTPEGEVPSVIARKVSQYSCQRKTTLNNYNKKFTDALEIMAENYKFKEQEIACLEFKRAASLLKYLPFPVTSMKDIQGLPCIGDQVRDVIEEIIEEGESSRVKEVLNDERYKAFKQFTSVFGVGVKTSEKWFRMGLRTVEEAKASKSLKLSKMQKAGFLYYEDLASCVSKAEADAVTLIVKNTVRTFLPDALVTITGGFRRGKKMGHDIDFLITNPGPKEDDELLHKVVDLLKKQGLLLYCDIKESTFVEEQLPSRKIDAMDNFQKCFAILKLYQPGVDNSSYNTSKKSDMAEVKDWKAIRVDLVITPFEQYAYALLGWTGSKEFGRDLRRYAEEERKMILDRHGLYDRKKRIFLKAGSEEEIFAHLGLDYVEPWERNA

SEQ ID NO: 1233 - DNA, 1182 bp, synthetic construct
  misc_feature 1..1182: note = Variant of terminal deoxynucleotidyl transferase
  source 1..1182: mol_type = other DNA
atgcaccatcatcatcatcatggcggtagcggccatccgccgagcaataccccggagggggaggtgccgagcgttatcgcccgcaaggttagtcagtacagctgccagcgcaagaccacgctgaataactacaacaaaaagtttaccgacgcgctggagatcatggccgagaactacaaatttggggagaacgaaatcgcgtgtctggaatttaagcgcgccgcgagtctgctgaaatatctgccgttcccggttaccagcatgaaagacatccaaggtctgccgtgcattggcgaccaagttcgtgacgtgatcgaggagatcatcgaagagggcgagagcagccgtgttaaagaagttctcaatgacgagcgctacaaggcctttaagcagttcaccagcgtgttcggtgtgggcgtgaaaaccagcgaaaagtggtttcgtatgggcctccgtacggttgaagaggcaaaggccagtaagagtctgaagctgagcaagatgcagaaggcgggcttcctgtattacgaggatctggcgagctgcgttagtaaagcggaagccgatgccgttacgctcatcgtgaagaacacggtgcgtacctttctgccggatgcgctggtgaccatcaccggcggtttccgccgtggcaaaaagatgggccacgacatcgactttctgatcacgaatccgggcccgaaagaggatgacgagctgctccacaaagtggttgatctgctcaagaagcaaggtctgctgctgtactgcgacatcaaagagagcacgttcgtggaggaacaactgccaagtcgcaaaatcgacgccatggacaacttccagaagtgcttcgccattctcaagctgtaccagccgggcgtggataacagcagctataacacgagtaagaagagtgacatggccgaggttaaggattggaaagcgattcgtgtggatctggtgatcacgccattcgagcagtacgcctatgcgctgctcggttggacgggcagcaaagaatttggtcgcgatctgcgccgctatgcggaggaagagcgcaagatgatcctcgaccgtcatggcctctacgaccgcaaaaagcgcatctttctgaaagcgggcagcgaagaagagattttcgcgcatctgggtctggattatgtggagccgtgggaacgcaacgcg

SEQ ID NO: 1234 - protein, 394 aa, synthetic construct; identical to SEQ ID NO: 1158
  REGION 1..394: note = Variant of terminal deoxynucleotidyl transferase

SEQ ID NO: 1235 - DNA, 1182 bp, synthetic construct
  misc_feature 1..1182: note = Variant of terminal deoxynucleotidyl transferase
  source 1..1182: mol_type = other DNA
atgcaccatcatcatcatcatggcggtagcggccatccgccgagcaataccccggagggggaggtgccgagcgttatcgcccgcaaggttagtcagtacagctgccagcgcaagaccacgctgaataactacaacaaaaagtttaccgacgcgctggagatcatggccgagaactggaaatttaaagagaacgaaatcgcgtgtctggaatttaagcgcgccgcgagtctgctgaaatatctgccgttcccggttaccagcatgaaagacatccaaggtctgccgtgcattggcgaccaagttcgtgacgtgatcgaggagatcatcgaagagggcgagagcagccgtgttaaagaagttctcaatgacgagcgctacaaggcctttaagcagttcaccagcgtgttcggtgtgggcgtgaaaaccagcgaaaagtggtttcgtatgggcctccgtacggttgaagaggcaaaggccagtaagagtctgaagctgagcaagatgcagaaggcgggcttcctgtattacgaggatctggcgagctgcgttagtaaagcggaagccgatgccgttacgctcatcgtgaagaacacggtgcgtacctttctgccggatgcgctggtgaccatcaccggcggtttccgccgtggcaaaaagatgggccacgacatcgactttctgatcacgaatccgggcccgaaagaggatgacgagctgctccacaaagtggttgatctgctcaagaagcaaggtctgctgctgtactgcgacatcaaagagagcacgttcgtggaggaacaactgccaagtcgcaaaatcgacgccatggacaacttccagaagtgcttcgccattctcaagctgtaccagccgggcgtggataacagcagctataacacgagtaagaagagtgacatggccgaggttaaggattggaaagcgattcgtgtggatctggtgatcacgccattcgagcagtacgcctatgcgctgctcggttggacgggcagcaaagaatttggtcgcgatctgcgccgctatgcggaggaagagcgcaagatgatcctcgaccgtcatggcctctacgaccgcaaaaagcgcatctttctgaaagcgggcagcgaagaagagattttcgcgcatctgggtctggattatgtggagccgtgggaacgcaacgcg

SEQ ID NO: 1236 - protein, 394 aa, synthetic construct
  REGION 1..394: note = Variant of terminal deoxynucleotidyl transferase
MHHHHHHGGSGHPPSNTPEGEVPSVIARKVSQYSCQRKTTLNNYNKKFTDALEIMAENWKFKENEIACLEFKRAASLLKYLPFPVTSMKDIQGLPCIGDQVRDVIEEIIEEGESSRVKEVLNDERYKAFKQFTSVFGVGVKTSEKWFRMGLRTVEEAKASKSLKLSKMQKAGFLYYEDLASCVSKAEADAVTLIVKNTVRTFLPDALVTITGGFRRGKKMGHDIDFLITNPGPKEDDELLHKVVDLLKKQGLLLYCDIKESTFVEEQLPSRKIDAMDNFQKCFAILKLYQPGVDNSSYNTSKKSDMAEVKDWKAIRVDLVITPFEQYAYALLGWTGSKEFGRDLRRYAEEERKMILDRHGLYDRKKRIFLKAGSEEEIFAHLGLDYVEPWERNA

SEQ ID NO: 1237 - DNA, 1182 bp, synthetic construct
  misc_feature 1..1182: note = Variant of terminal deoxynucleotidyl transferase
  source 1..1182: mol_type = other DNA
atgcaccatcatcatcatcatggcggtagcggccatccgccgagcaataccccggagggggaggtgccgagcgttatcgcccgcaaggttagtcagtacagctgccagcgcaagaccacgctgaataactacaacaaacagtttaccgacgcgctggagatcatggccgagaactacaaatttaaagagaacgaaatcgcgtgtctggaatttaagcgcgccgcgagtctgctgaaatatctgccgttcccggttaccagcatgaaagacatccaaggtctgccgtgcattggcgaccaagttcgtgacgtgatcgaggagatcatcgaagagggcgagagcagccgtgttaaagaagttctcaatgacgagcgctacaaggcctttaagcagttcaccagcgtgttcggtgtgggcgtgaaaaccagcgaaaagtggtttcgtatgggcctccgtacggttgaagaggcaaaggccagtaagagtctgaagctgagcaagatgcagaaggcgggcttcctgtattacgaggatctggcgagctgcgttagtaaagcggaagccgatgccgttacgctcatcgtgaagaacacggtgcgtacctttctgccggatgcgctggtgaccatcaccggcggtttccgccgtggcaaaaagatgggccacgacatcgactttctgatcacgaatccgggcccgaaagaggatgacgagctgctccacaaagtggttgatctgctcaagaagcaaggtctgctgctgtactgcgacatcaaagagagcacgttcgtggaggaacaactgccaagtcgcaaaatcgacgccatggacaacttccagaagtgcttcgccattctcaagctgtaccagccgggcgtggataacagcagctataacacgagtaagaagagtgacatggccgaggttaaggattggaaagcgattcgtgtggatctggtgatcacgccattcgagcagtacgcctatgcgctgctcggttggacgggcagcaaagaatttggtcgcgatctgcgccgctatgcggaggaagagcgcaagatgatcctcgaccgtcatggcctctacgaccgcaaaaagcgcatctttctgaaagcgggcagcgaagaagagattttcgcgcatctgggtctggattatgtggagccgtgggaacgcaacgcg

SEQ ID NO: 1238 - protein, 394 aa, synthetic construct
  REGION 1..394: note = Variant of terminal deoxynucleotidyl transferase
MHHHHHHGGSGHPPSNTPEGEVPSVIARKVSQYSCQRKTTLNNYNKQFTDALEIMAENYKFKENEIACLEFKRAASLLKYLPFPVTSMKDIQGLPCIGDQVRDVIEEIIEEGESSRVKEVLNDERYKAFKQFTSVFGVGVKTSEKWFRMGLRTVEEAKASKSLKLSKMQKAGFLYYEDLASCVSKAEADAVTLIVKNTVRTFLPDALVTITGGFRRGKKMGHDIDFLITNPGPKEDDELLHKVVDLLKKQGLLLYCDIKESTFVEEQLPSRKIDAMDNFQKCFAILKLYQPGVDNSSYNTSKKSDMAEVKDWKAIRVDLVITPFEQYAYALLGWTGSKEFGRDLRRYAEEERKMILDRHGLYDRKKRIFLKAGSEEEIFAHLGLDYVEPWERNA

SEQ ID NO: 1239 - DNA, 1182 bp, synthetic construct
  misc_feature 1..1182: note = Variant of terminal deoxynucleotidyl transferase
  source 1..1182: mol_type = other DNA
atgcaccatcatcatcatcatggcggtagcggccatccgccgagcaataccccggagggggaggtgccgagcgttatcgcccgcaaggttagtcagtacagctgccagcgcaagaccacgctgaataactacaacaaaaagtttaccgacgcgctggagatcatggccgagaactacaaatttaaagagaacgaaatcgcgtgtctggaatttaagcgcgccgcgagtctgctgaaatatctgccgttcccggttaccagcatgaaagacatccaaggtctgccgtgcattggcgaccaagttcgtgacgtgatcgaggagatcatcgaagagggcgagagcagccgtgttaaagaagttctcaatgacgagcgctacaaggcctttaagcagttcaccagcgtgttcggtgtgggcgtgaaaaccagcgaaaagtggtttcgtatgggcctccgtacggttgaagaggcaaaggccagtaagagtctgaagctgagcaagatgcagaaggcgggcttcctgtattacgaggatctggcgagctgcgttagtaaagcggaagccgatgccgttacgctcatcgtgaagaacacggtgcgtacctttctgccggatgcgctggtgaccatcaccggcggtttccgccgtggcaaaaagatgggccacgacatcgactttctgatcacgaatccgggcccgaaagaggatgacgagctgctccacaaagtggttgatctgctcaagaagcaaggtctgctgctgtactgcgacatcaaagagagcacgttcgtggaggaacaactgccaagtcgcaaaatcgacgccatggacaacttccagaagtgcttcgccattctcaagctgtaccagccgggcgtggataacagcagctataacacgagtaagaagagtgacatggccgaggttaaggattggaaagcgattcgtgtggatctggtggtgacgccattcgagcagtacgcctatgcgctgctcggttggacgggcagcaaagaatttggtcgcgatctgcgccgctatgcggaggaagagcgcaagatgatcctcgaccgtcatggcctctacgaccgcaaaaagcgcatctttctgaaagcgggcagcgaagaagagattttcgcgcatctgggtctggattatgtggagccgtgggaacgcaacgcg

SEQ ID NO: 1240 - protein, 394 aa, synthetic construct
  REGION 1..394: note = Variant of terminal deoxynucleotidyl transferase
MHHHHHHGGSGHPPSNTPEGEVPSVIARKVSQYSCQRKTTLNNYNKKFTDALEIMAENYKFKENEIACLEFKRAASLLKYLPFPVTSMKDIQGLPCIGDQVRDVIEEIIEEGESSRVKEVLNDERYKAFKQFTSVFGVGVKTSEKWFRMGLRTVEEAKASKSLKLSKMQKAGFLYYEDLASCVSKAEADAVTLIVKNTVRTFLPDALVTITGGFRRGKKMGHDIDFLITNPGPKEDDELLHKVVDLLKKQGLLLYCDIKESTFVEEQLPSRKIDAMDNFQKCFAILKLYQPGVDNSSYNTSKKSDMAEVKDWKAIRVDLVVTPFEQYAYALLGWTGSKEFGRDLRRYAEEERKMILDRHGLYDRKKRIFLKAGSEEEIFAHLGLDYVEPWERNA

SEQ ID NO: 1241 - DNA, 1182 bp, synthetic construct
  misc_feature 1..1182: note = Variant of terminal deoxynucleotidyl transferase
  source 1..1182: mol_type = other DNA
atgcaccatcatcatcatcatggcggtagcggccatccgccgagcaataccccggagggggaggtgccgagcgttatcgcccgcaaggttagtcagtacagctgccagcgcaagaccacgctgaataactacaacaaaaagtttaccgacgcgctggagatcatggccgagaactacaaaacgaaagagaacgaaatcgcgtgtctggaatttaagcgcgccgcgagtctgctgaaatatctgccgttcccggttaccagcatgaaagacatccaaggtctgccgtgcattggcgaccaagttcgtgacgtgatcgaggagatcatcgaagagggcgagagcagccgtgttaaagaagttctcaatgacgagcgctacaaggcctttaagcagttcaccagcgtgttcggtgtgggcgtgaaaaccagcgaaaagtggtttcgtatgggcctccgtacggttgaagaggcaaaggccagtaagagtctgaagctgagcaagatgcagaaggcgggcttcctgtattacgaggatctggcgagctgcgttagtaaagcggaagccgatgccgttacgctcatcgtgaagaacacggtgcgtacctttctgccggatgcgctggtgaccatcaccggcggtttccgccgtggcaaaaagatgggccacgacatcgactttctgatcacgaatccgggcccgaaagaggatgacgagctgctccacaaagtggttgatctgctcaagaagcaaggtctgctgctgtactgcgacatcaaagagagcacgttcgtggaggaacaactgccaagtcgcaaaatcgacgccatggacaacttccagaagtgcttcgccattctcaagctgtaccagccgggcgtggataacagcagctataacacgagtaagaagagtgacatggccgaggttaaggattggaaagcgattcgtgtggatctggtgatcacgccattcgagcagtacgcctatgcgctgctcggttggacgggcagcaaagaatttggtcgcgatctgcgccgctatgcggaggaagagcgcaagatgatcctcgaccgtcatggcctctacgaccgcaaaaagcgcatctttctgaaagcgggcagcgaagaagagattttcgcgcatctgggtctggattatgtggagccgtgggaacgcaacgcg

SEQ ID NO: 1242 - protein, 394 aa, synthetic construct
  REGION 1..394: note = Variant of terminal deoxynucleotidyl transferase
MHHHHHHGGSGHPPSNTPEGEVPSVIARKVSQYSCQRKTTLNNYNKKFTDALEIMAENYKTKENEIACLEFKRAASLLKYLPFPVTSMKDIQGLPCIGDQVRDVIEEIIEEGESSRVKEVLNDERYKAFKQFTSVFGVGVKTSEKWFRMGLRTVEEAKASKSLKLSKMQKAGFLYYEDLASCVSKAEADAVTLIVKNTVRTFLPDALVTITGGFRRGKKMGHDIDFLITNPGPKEDDELLHKVVDLLKKQGLLLYCDIKESTFVEEQLPSRKIDAMDNFQKCFAILKLYQPGVDNSSYNTSKKSDMAEVKDWKAIRVDLVITPFEQYAYALLGWTGSKEFGRDLRRYAEEERKMILDRHGLYDRKKRIFLKAGSEEEIFAHLGLDYVEPWERNA

SEQ ID NO: 1243 - DNA, 1182 bp, synthetic construct
  misc_feature 1..1182: note = Variant of terminal deoxynucleotidyl transferase
  source 1..1182: mol_type = other DNA
atgcaccatcatcatcatcatggcggtagcggccatccgccgagcaataccccggagggggaggtgccgagcgttatcgcccgcaaggttagtcagtacagctgccagcgcaagaccacgctgaataactacaacaaaaagtttaccgacgcgctggagatcatggccgagaactacaaatttaaagagaacgaaatcgcgtgtctggaatttaagcgcgccgcgagtctgctgaaatatctgccgttcccggttaccagcatgaaagacatccaaggtctgccgtgcattggcgaccaagttcgtgacgtgatcgaggagatcatcgaagagggcgagagcagccgtgttaaagaagttctcaatgacgagcgctacaaggcctttaagcagttcaccagcgtgttcggtgtgggcgtgaaaaccagcgaaaagtggtttcgtatgggcctccgtacggttgaagaggcaaaggccagtaagagtctgaagctgagcaagatgcagaaggcgggcttcctgtattacgaggatctggcgagctgcgttagtaaagcggaagccgatgccgttacgctcatcgtgaagaacacggtgcgtacctttctgccggatgcgctggtgaccatcaccggcggtttccgccgtggcaaaaagatgggccacgacatcgactttctgatcacgaatccgggcccgaaagaggatgacgagctgctccacaaagtggttgatctgctcaagaagcaaggtctgctgctgtactgcgacatcaaagagagcacgttcgtggaggaacaactgccaagtcgcaaaatcgacgccatggacaacttccagaagtgcttcgccattctcaagctgtaccagccgggcgtggataacagcagctataacacgagtaagaagagtgacatggccgaggttaaggattggaaagcgattcgtgtggatctggtgatcacgccattcgagcagtacgcctatgcgctgctcggttggacgggcagcaaagaatttggtcgcgatctgcagcgctatgcggaggaagagcgcaagatgatcctcgaccgtcatggcctctacgaccgcaaaaagcgcatctttctgaaagcgggcagcgaagaagagattttcgcgcatctgggtctggattatgtggagccgtgggaacgcaacgcg

SEQ ID NO: 1244 - protein, 394 aa, synthetic construct
  REGION 1..394: note = Variant of terminal deoxynucleotidyl transferase
MHHHHHHGGSGHPPSNTPEGEVPSVIARKVSQYSCQRKTTLNNYNKKFTDALEIMAENYKFKENEIACLEFKRAASLLKYLPFPVTSMKDIQGLPCIGDQVRDVIEEIIEEGESSRVKEVLNDERYKAFKQFTSVFGVGVKTSEKWFRMGLRTVEEAKASKSLKLSKMQKAGFLYYEDLASCVSKAEADAVTLIVKNTVRTFLPDALVTITGGFRRGKKMGHDIDFLITNPGPKEDDELLHKVVDLLKKQGLLLYCDIKESTFVEEQLPSRKIDAMDNFQKCFAILKLYQPGVDNSSYNTSKKSDMAEVKDWKAIRVDLVITPFEQYAYALLGWTGSKEFGRDLQRYAEEERKMILDRHGLYDRKKRIFLKAGSEEEIFAHLGLDYVEPWERNA

SEQ ID NO: 1245 - DNA, 1182 bp, synthetic construct
  misc_feature 1..1182: note = Variant of terminal deoxynucleotidyl transferase
  source 1..1182: mol_type = other DNA
atgcaccatcatcatcatcatggcggtagcggccatccgccgagcaataccccggagggggaggtgccgagcgttatcgcccgcaaggttagtcagtacagctgccagcgcaagaccacgctgaataactacaacaaaaagtttaccgacgcgctggagatcatggccgagaactacaaatttaaagagaacgaaatcgcgtgtctggaatttaagcgcgccgcgagtctgctgaaatatctgccgttcccggttaccagcatgaaagacatccaaggtctgccgtgcattggcgaccaagttcgtgacgtgatcgaggagatcatcgaagagggcgagagcagccgtgttaaagaagttctcaatgacgagcgctacaaggcctttaagcagttcaccagcgtgttcggtgtgggcgtgaaaaccagcgaaaagtggtttcgtatgggcctccgtacggttgaagaggcaaaggccagtaagagtctgaagctgagcaagatgcagaaggcgggcttcctgtattacgaggatctggcgagctgcgttagtaaagcggaagccgatgccgttacgctcatcgtgaagaacacggtgcgtacctttctgccggatgcgctggtgaccatcaccggcggtttccgccgtggcaaaaagatgggccacgacatcgactttctgatcacgaatccgggcccgaaagaggatgacgagctgctccacaaagtggttgatctgctcaagaagcaaggtctgctgctgtactgcgacatcaaagagagcacgttcgtggaggaacaactgccaagtcgcaaaatcgacgccatggacaacttccagaagtgcttcgccattctcaagctgtaccagccgggcgtggataacagcagctataacacgagtaagaagagtgacatggccgaggttaaggattggaaagcgattcgtgtggatctggtgatcacgccattcgagcagtacgcctatgcgctgctcggttggacgggcagcaaagaatttggtcgcgatctggctcgctatgcggaggaagagcgcaagatgatcctcgaccgtcatggcctctacgaccgcaaaaagcgcatctttctgaaagcgggcagcgaagaagagattttcgcgcatctgggtctggattatgtggagccgtgggaacgcaacgcg

SEQ ID NO: 1246 - protein, 394 aa, synthetic construct
  REGION 1..394: note = Variant of terminal deoxynucleotidyl transferase
MHHHHHHGGSGHPPSNTPEGEVPSVIARKVSQYSCQRKTTLNNYNKKFTDALEIMAENYKFKENEIACLEFKRAASLLKYLPFPVTSMKDIQGLPCIGDQVRDVIEEIIEEGESSRVKEVLNDERYKAFKQFTSVFGVGVKTSEKWFRMGLRTVEEAKASKSLKLSKMQKAGFLYYEDLASCVSKAEADAVTLIVKNTVRTFLPDALVTITGGFRRGKKMGHDIDFLITNPGPKEDDELLHKVVDLLKKQGLLLYCDIKESTFVEEQLPSRKIDAMDNFQKCFAILKLYQPGVDNSSYNTSKKSDMAEVKDWKAIRVDLVITPFEQYAYALLGWTGSKEFGRDLARYAEEERKMILDRHGLYDRKKRIFLKAGSEEEIFAHLGLDYVEPWERNA

SEQ ID NO: 1247 - DNA, 1182 bp, synthetic construct
  misc_feature 1..1182: note = Variant of terminal deoxynucleotidyl transferase
  source 1..1182: mol_type = other DNA
atgcaccatcatcatcatcatggcggtagcggccatccgccgagcaataccccggagggggaggtgccgagcgttatcgcccgcaaggttagtcagtacagctgccagcgcaagaccacgctgaataactacaacaaaaagtttaccgacgcgctggagatcatggccgagaactacaaatttaaagagaacgaaatcgcgtgtctggaatttaagcgcgccgcgagtctgctgaaatatctgccgttcccggttaccagcatgaaagacatccaaggtctgccgtgcattggcgaccaagttcgtgacgtgatcgaggagatcatcgaagagggcgagagcagccgtgttaaagaagttctcaatgacgagcgctacaaggcctttaagcagttcaccagcgtgttcggtgtgggcgtgaaaaccagcgaaaagtggtttcgtatgggcctccgtacggttgaagaggcaaaggccagtaagagtctgaagctgagcaagatgcagaaggcgggcttcctgtattacgaggatctggcgagctgcgttagtaaagcggaagccgatgccgttacgctcatcgtgaagaacacggtgcgtacctttctgccggatgcgctggtgaccatcaccggcggtttccgccgtggcaaaaagatgggccacgacatcgactttctgatcacgaatccgggcccgaaagaggatgacgagctgctccacaaagtggttgatctgctcaagaagcaaggtctgctgctgtactgcgacatcaaagagagcacgttcgtggaggaacaactgccaagtcgcaaaatcgacgccatggacaacttccagaagtgcttcgccattctcaagctgtaccagccgggcgtggataacagcagctataacacgagtaagaagagtgacatggccgaggttaaggattggaaagcgattcgtgtggatctggtgatcacgccattcgagcagtacgcctatgcgctgtgtggttggacgggcagcaaagaatttggtcgcgatctgcgccgctatgcggaggaagagcgcaagatgatcctcgaccgtcatggcctctacgaccgcaaaaagcgcatctttctgaaagcgggcagcgaagaagagattttcgcgcatctgggtctggattatgtggagccgtgggaacgcaacgcg

SEQ ID NO: 1248 - protein, 394 aa, synthetic construct
  REGION 1..394: note = Variant of terminal deoxynucleotidyl transferase
MHHHHHHGGSGHPPSNTPEGEVPSVIARKVSQYSCQRKTTLNNYNKKFTDALEIMAENYKFKENEIACLEFKRAASLLKYLPFPVTSMKDIQGLPCIGDQVRDVIEEIIEEGESSRVKEVLNDERYKAFKQFTSVFGVGVKTSEKWFRMGLRTVEEAKASKSLKLSKMQKAGFLYYEDLASCVSKAEADAVTLIVKNTVRTFLPDALVTITGGFRRGKKMGHDIDFLITNPGPKEDDELLHKVVDLLKKQGLLLYCDIKESTFVEEQLPSRKIDAMDNFQKCFAILKLYQPGVDNSSYNTSKKSDMAEVKDWKAIRVDLVITPFEQYAYALCGWTGSKEFGRDLRRYAEEERKMILDRHGLYDRKKRIFLKAGSEEEIFAHLGLDYVEPWERNA

SEQ ID NO: 1249 - DNA, 1182 bp, synthetic construct
  misc_feature 1..1182: note = Variant of terminal deoxynucleotidyl transferase
  source 1..1182: mol_type = other DNA
atgcaccatcatcatcatcatggcggtagcggccatccgccgagcaataccccggagggggaggtgccgagcgttatcgcccgcaaggttagtcagtacagctgccagcgcaagaccacgctgaataactacaacaaaaagtttaccgacgcgctggagatcatggccgagaactacaaatttaaagagaacgaaatcgcgtgtctgatttttaagcgcgccgcgagtctgctgaaatatctgccgttcccggttaccagcatgaaagacatccaaggtctgccgtgcattggcgaccaagttcgtgacgtgatcgaggagatcatcgaagagggcgagagcagccgtgttaaagaagttctcaatgacgagcgctacaaggcctttaagcagttcaccagcgtgttcggtgtgggcgtgaaaaccagcgaaaagtggtttcgtatgggcctccgtacggttgaagaggcaaaggccagtaagagtctgaagctgagcaagatgcagaaggcgggcttcctgtattacgaggatctggcgagctgcgttagtaaagcggaagccgatgccgttacgctcatcgtgaagaacacggtgcgtacctttctgccggatgcgctggtgaccatcaccggcggtttccgccgtggcaaaaagatgggccacgacatcgactttctgatcacgaatccgggcccgaaagaggatgacgagctgctccacaaagtggttgatctgctcaagaagcaaggtctgctgctgtactgcgacatcaaagagagcacgttcgtggaggaacaactgccaagtcgcaaaatcgacgccatggacaacttccagaagtgcttcgccattctcaagctgtaccagccgggcgtggataacagcagctataacacgagtaagaagagtgacatggccgaggttaaggattggaaagcgattcgtgtggatctggtgatcacgccattcgagcagtacgcctatgcgctgctcggttggacgggcagcaaagaatttggtcgcgatctgcgccgctatgcggaggaagagcgcaagatgatcctcgaccgtcatggcctctacgaccgcaaaaagcgcatctttctgaaagcgggcagcgaagaagagattttcgcgcatctgggtctggattatgtggagccgtgggaacgcaacgcg

SEQ ID NO: 1250 - protein, 394 aa, synthetic construct
  REGION 1..394: note = Variant of terminal deoxynucleotidyl transferase
MHHHHHHGGSGHPPSNTPEGEVPSVIARKVSQYSCQRKTTLNNYNKKFTDALEIMAENYKFKENEIACLIFKRAASLLKYLPFPVTSMKDIQGLPCIGDQVRDVIEEIIEEGESSRVKEVLNDERYKAFKQFTSVFGVGVKTSEKWFRMGLRTVEEAKASKSLKLSKMQKAGFLYYEDLASCVSKAEADAVTLIVKNTVRTFLPDALVTITGGFRRGKKMGHDIDFLITNPGPKEDDELLHKVVDLLKKQGLLLYCDIKESTFVEEQLPSRKIDAMDNFQKCFAILKLYQPGVDNSSYNTSKKSDMAEVKDWKAIRVDLVITPFEQYAYALLGWTGSKEFGRDLRRYAEEERKMILDRHGLYDRKKRIFLKAGSEEEIFAHLGLDYVEPWERNA

SEQ ID NO: 1251 - DNA, 1182 bp, synthetic construct
  misc_feature 1..1182: note = Variant of terminal deoxynucleotidyl transferase
  source 1..1182: mol_type = other DNA
atgcaccatcatcatcatcatggcggtagcggccatccgccgagcaataccccggagggggaggtgccgagcgttatcgcccgcaaggttagtcagtacagctgccagcgcaagaccacgctgaataactacaacaaaaagtttaccgacgcgctggagatcatggccgagaactacaaatttaaagagaacgaaatcgcgtgtctggaatttaagcgcgccgcgagtctgctgaaatatctgccgttcccggttaccagcatgaaagacatccaaggtctgccgtgcattggcgaccaagttcgtgacgtgatcgaggagatcatcgaagagggcgagagcagccgtgttaaagaagttctcaatgacgagcgctacaaggcctttaagcagttcaccagcgtgttcggtgtgggcgtgaaaaccagcgaaaagtggtttcgtatgggcctccgtacggttgaagaggcaaaggccagtaagagtctgaagctgagcaagatgcagaaggcgggcttcctgtattacgaggatctggcgagctgcgttagtaaagcggaagccgatgccgttacgctcatcgtgaagaacacggtgcgtacctttctgccggatgcgctggtgaccatcaccggcggtttccgccgtggcaaaaagatgggccacgacatcgactttctgatcacgaatccgggcccgaaagaggatgacgagctgctccacaaagtggttgatctgctcaagaagcaaggtctgctgctgtactgcgacatcaaagagagcacgttcgtggaggaacaactgccaagtcgcaaaatcgacgccatggacaacttccagaagtgcttcgccattctcaagctgtaccagccgggcgtggataacagcagctataacacgagtaagaagagtgacatggccgaggttaaggattggaaagcgattcgtgtggatctggtgatcacgccattctctcagtacgcctatgcgctgctcggttggacgggcagcaaagaatttggtcgcgatctgcgccgctatgcggaggaagagcgcaagatgatcctcgaccgtcatggcctctacgaccgcaaaaagcgcatctttctgaaagcgggcagcgaagaagagattttcgcgcatctgggtctggattatgtggagccgtgggaacgcaacgcg

SEQ ID NO: 1252 - protein, 394 aa, synthetic construct
  REGION 1..394: note = Variant of terminal deoxynucleotidyl transferase
MHHHHHHGGSGHPPSNTPEGEVPSVIARKVSQYSCQRKTTLNNYNKKFTDALEIMAENYKFKENEIACLEFKRAASLLKYLPFPVTSMKDIQGLPCIGDQVRDVIEEIIEEGESSRVKEVLNDERYKAFKQFTSVFGVGVKTSEKWFRMGLRTVEEAKASKSLKLSKMQKAGFLYYEDLASCVSKAEADAVTLIVKNTVRTFLPDALVTITGGFRRGKKMGHDIDFLITNPGPKEDDELLHKVVDLLKKQGLLLYCDIKESTFVEEQLPSRKIDAMDNFQKCFAILKLYQPGVDNSSYNTSKKSDMAEVKDWKAIRVDLVITPFSQYAYALLGWTGSKEFGRDLRRYAEEERKMILDRHGLYDRKKRIFLKAGSEEEIFAHLGLDYVEPWERNA

SEQ ID NO: 1253 - DNA, 1182 bp, synthetic construct
  misc_feature 1..1182: note = Variant of terminal deoxynucleotidyl transferase
  source 1..1182: mol_type = other DNA
atgcaccatcatcatcatcatggcggtagcggccatccgccgagcaataccccggagggggaggtgccgagcgttatcgcccgcaaggttagtcagtacagctgccagcgcaagaccacgctgaataactacaacaaaaagtttaccgactctctggagatcatggccgagaactacaaatttaaagagaacgaaatcgcgtgtctggaatttaagcgcgccgcgagtctgctgaaatatctgccgttcccggttaccagcatgaaagacatccaaggtctgccgtgcattggcgaccaagttcgtgacgtgatcgaggagatcatcgaagagggcgagagcagccgtgttaaagaagttctcaatgacgagcgctacaaggcctttaagcagttcaccagcgtgttcggtgtgggcgtgaaaaccagcgaaaagtggtttcgtatgggcctccgtacggttgaagaggcaaaggccagtaagagtctgaagctgagcaagatgcagaaggcgggcttcctgtattacgaggatctggcgagctgcgttagtaaagcggaagccgatgccgttacgctcatcgtgaagaacacggtgcgtacctttctgccggatgcgctggtgaccatcaccggcggtttccgccgtggcaaaaagatgggccacgacatcgactttctgatcacgaatccgggcccgaaagaggatgacgagctgctccacaaagtggttgatctgctcaagaagcaaggtctgctgctgtactgcgacatcaaagagagcacgttcgtggaggaacaactgccaagtcgcaaaatcgacgccatggacaacttccagaagtgcttcgccattctcaagctgtaccagccgggcgtggataacagcagctataacacgagtaagaagagtgacatggccgaggttaaggattggaaagcgattcgtgtggatctggtgatcacgccattcgagcagtacgcctatgcgctgctcggttggacgggcagcaaagaatttggtcgcgatctgcgccgctatgcggaggaagagcgcaagatgatcctcgaccgtcatggcctctacgaccgcaaaaagcgcatctttctgaaagcgggcagcgaagaagagattttcgcgcatctgggtctggattatgtggagccgtgggaacgcaacgcg

SEQ ID NO: 1254 - protein, 394 aa, synthetic construct
  REGION 1..394: note = Variant of terminal deoxynucleotidyl transferase
MHHHHHHGGSGHPPSNTPEGEVPSVIARKVSQYSCQRKTTLNNYNKKFTDSLEIMAENYKFKENEIACLEFKRAASLLKYLPFPVTSMKDIQGLPCIGDQVRDVIEEIIEEGESSRVKEVLNDERYKAFKQFTSVFGVGVKTSEKWFRMGLRTVEEAKASKSLKLSKMQKAGFLYYEDLASCVSKAEADAVTLIVKNTVRTFLPDALVTITGGFRRGKKMGHDIDFLITNPGPKEDDELLHKVVDLLKKQGLLLYCDIKESTFVEEQLPSRKIDAMDNFQKCFAILKLYQPGVDNSSYNTSKKSDMAEVKDWKAIRVDLVITPFEQYAYALLGWTGSKEFGRDLRRYAEEERKMILDRHGLYDRKKRIFLKAGSEEEIFAHLGLDYVEPWERNA

SEQ ID NO: 1255 - DNA, 1182 bp, synthetic construct
  misc_feature 1..1182: note = Variant of terminal deoxynucleotidyl transferase
  source 1..1182: mol_type = other DNA
atgcaccatcatcatcatcatggcggtagcggccatccgccgagcaataccccggagggggaggtgccgagcgttatcgcccgcaaggttagtcagtacagctgccagcgcaagaccacgctgaataactacaacaaaaagtttaccgacgcgctggagatcatggccgagaactacaaatttaaagagaacgaaatcgcgtgtctggaatttaagcgcgccgcgagtctgctgaaatatctgccgttcccggttaccagcatgaaagacatccaaggtctgccgtgcattggcgaccaagttcgtgacgtgatcgaggagatcatcgaagagggcgagagcagccgtgttaaagaagttctcaatgacgagcgctacaaggcctttaagcagttcaccagcgtgttcggtgtgggcgtgaaaaccagcgaaaagtggtttcgtatgggcctccgtacggttgaagaggcaaaggccagtaagagtctgaagctgagcaagatgcagaaggcgggcttcctgtattacgaggatctggcgagctgcgttagtaaagcggaagccgatgccgttacgctcatcgtgaagaacacggtgcgtacctttctgccggatgcgctggtgaccatcaccggcggtttccgccgtggcaaaaagatgggccacgacatcgactttctgatcacgaatccgggcccgaaagaggatgacgagctgctccacaaagtggttgatctgctcaagaagcaaggtctgctgctgtactgcgacatcaaagagagcacgttcgtggaggaacaactgccaagtcgcaaaatcgacgccatggacaacttccagaagtgcttcgccattctcaagctgtaccagccgggcgtggataacagcagctataacacgagtaagaagagtgacatggccgaggttaaggattggaaagcgattcgtgtggatctggtgatcacgccattcgagcagtactggtatgcgctgctcggttggacgggcagcaaagaatttggtcgcgatctgcgccgctatgcggaggaagagcgcaagatgatcctcgaccgtcatggcctctacgaccgcaaaaagcgcatctttctgaaagcgggcagcgaagaagagattttcgcgcatctgggtctggattatgtggagccgtgggaacgcaacgcg

SEQ ID NO: 1256 - protein, 394 aa, synthetic construct
  REGION 1..394: note = Variant of terminal deoxynucleotidyl transferase
MHHHHHHGGSGHPPSNTPEGEVPSVIARKVSQYSCQRKTTLNNYNKKFTDALEIMAENYKFKENEIACLEFKRAASLLKYLPFPVTSMKDIQGLPCIGDQVRDVIEEIIEEGESSRVKEVLNDERYKAFKQFTSVFGVGVKTSEKWFRMGLRTVEEAKASKSLKLSKMQKAGFLYYEDLASCVSKAEADAVTLIVKNTVRTFLPDALVTITGGFRRGKKMGHDIDFLITNPGPKEDDELLHKVVDLLKKQGLLLYCDIKESTFVEEQLPSRKIDAMDNFQKCFAILKLYQPGVDNSSYNTSKKSDMAEVKDWKAIRVDLVITPFEQYWYALLGWTGSKEFGRDLRRYAEEERKMILDRHGLYDRKKRIFLKAGSEEEIFAHLGLDYVEPWERNA

SEQ ID NO: 1257 - DNA, 1182 bp, synthetic construct
  misc_feature 1..1182: note = Variant of terminal deoxynucleotidyl transferase
  source 1..1182: mol_type = other DNA
atgcaccatcatcatcatcatggcggtagcggccatccgccgagcaataccccggagggggaggtgccgagcgttatcgcccgcaaggttagtcagtacagctgccagcgcaagaccacgctgaataactacaacaaaaagtttaccgacgcgctggagatcatggccgagaactacaaatttaaagagaacgaaatcgcgtgtctggaatttaagcgcgccgcgagtctgctgaaatatctgccgttcccggttaccagcatgaaagacatccaaggtctgccgtgcattggcgaccaagttcgtgacgtgatcgaggagatcatcgaagagggcgagagcagccgtgttaaagaagttctcaatgacgagcgctacaaggcctttaagcagttcaccagcgtgttcggtgtgggcgtgaaaaccagcgaaaagtggtttcgtatgggcctccgtacggttgaagaggcaaaggccagtaagagtctgaagctgagcaagatgcagaaggcgggcttcctgtattacgaggatctggcgagctgcgttagtaaagcggaagccgatgccgttacgctcatcgtgaagaacacggtgcgtacctttctgccggatgcgctggtgaccatcaccggcggtttccgccgtggcaaaaagatgggccacgacatcgactttctgatcacgaatccgggcccgaaagaggatgacgagctgctccacaaagtggttgatctgctcaagaagcaaggtctgctgctgtactgcgacatcaaagagagcacgttcgtggaggaacaactgccaagtcgcaaaatcgacgccatggacaacttccagaagtgcttcgccattctcaagctgtaccagccgggcgtggataacagcagctataacacgagtaagaagagtgacatggccgaggttaaggattggaaagcgattcgtgtggatctggtgatcacgccattcgagcagtacgcctatgcgctgctcggttggacgggcagcaaagaatttggtcgcgatctgcgccgctatgcggaggaagagcgcaagatgttgctcgaccgtcatggcctctacgaccgcaaaaagcgcatctttctgaaagcgggcagcgaagaagagattttcgcgcatctgggtctggattatgtggagccgtgggaacgcaacgcg

SEQ ID NO: 1258 - protein, 394 aa, synthetic construct
  REGION 1..394: note = Variant of terminal deoxynucleotidyl transferase
MHHHHHHGGSGHPPSNTPEGEVPSVIARKVSQYSCQRKTTLNNYNKKFTDALEIMAENYKFKENEIACLEFKRAASLLKYLPFPVTSMKDIQGLPCIGDQVRDVIEEIIEEGESSRVKEVLNDERYKAFKQFTSVFGVGVKTSEKWFRMGLRTVEEAKASKSLKLSKMQKAGFLYYEDLASCVSKAEADAVTLIVKNTVRTFLPDALVTITGGFRRGKKMGHDIDFLITNPGPKEDDELLHKVVDLLKKQGLLLYCDIKESTFVEEQLPSRKIDAMDNFQKCFAILKLYQPGVDNSSYNTSKKSDMAEVKDWKAIRVDLVITPFEQYAYALLGWTGSKEFGRDLRRYAEEERKMLLDRHGLYDRKKRIFLKAGSEEEIFAHLGLDYVEPWERNA

SEQ ID NO: 1259 - DNA, 1182 bp, synthetic construct
  misc_feature 1..1182: note = Variant of terminal deoxynucleotidyl transferase
  source 1..1182: mol_type = other DNA
atgcaccatcatcatcatcatggcggtagcggccatccgccgagcaataccccggagggggaggtgccgagcgttatcgcccgcaaggttagtcagtacagctgccagcgcaagaccacgctgaataactacaacaaaaagattaccgacgcgctggagatcatggccgagaactacaaatttaaagagaacgaaatcgcgtgtctggaatttaagcgcgccgcgagtctgctgaaatatctgccgttcccggttaccagcatgaaagacatccaaggtctgccgtgcattggcgaccaagttcgtgacgtgatcgaggagatcatcgaagagggcgagagcagccgtgttaaagaagttctcaatgacgagcgctacaaggcctttaagcagttcaccagcgtgttcggtgtgggcgtgaaaaccagcgaaaagtggtttcgtatgggcctccgtacggttgaagaggcaaaggccagtaagagtctgaagctgagcaagatgcagaaggcgggcttcctgtattacgaggatctggcgagctgcgttagtaaagcggaagccgatgccgttacgctcatcgtgaagaacacggtgcgtacctttctgccggatgcgctggtgaccatcaccggcggtttccgccgtggcaaaaagatgggccacgacatcgactttctgatcacgaatccgggcccgaaagaggatgacgagctgctccacaaagtggttgatctgctcaagaagcaaggtctgctgctgtactgcgacatcaaagagagcacgttcgtggaggaacaactgccaagtcgcaaaatcgacgccatggacaacttccagaagtgcttcgccattctcaagctgtaccagccgggcgtggataacagcagctataacacgagtaagaagagtgacatggccgaggttaaggattggaaagcgattcgtgtggatctggtgatcacgccattcgagcagtacgcctatgcgctgctcggttggacgggcagcaaagaatttggtcgcgatctgcgccgctatgcggaggaagagcgcaagatgatcctcgaccgtcatggcctctacgaccgcaaaaagcgcatctttctgaaagcgggcagcgaagaagagattttcgcgcatctgggtctggattatgtggagccgtgggaacgcaacgcg

SEQ ID NO: 1260 - protein, 394 aa, synthetic construct
  REGION 1..394: note = Variant of terminal deoxynucleotidyl transferase
MHHHHHHGGSGHPPSNTPEGEVPSVIARKVSQYSCQRKTTLNNYNKKITDALEIMAENYKFKENEIACLEFKRAASLLKYLPFPVTSMKDIQGLPCIGDQVRDVIEEIIEEGESSRVKEVLNDERYKAFKQFTSVFGVGVKTSEKWFRMGLRTVEEAKASKSLKLSKMQKAGFLYYEDLASCVSKAEADAVTLIVKNTVRTFLPDALVTITGGFRRGKKMGHDIDFLITNPGPKEDDELLHKVVDLLKKQGLLLYCDIKESTFVEEQLPSRKIDAMDNFQKCFAILKLYQPGVDNSSYNTSKKSDMAEVKDWKAIRVDLVITPFEQYAYALLGWTGSKEFGRDLRRYAEEERKMILDRHGLYDRKKRIFLKAGSEEEIFAHLGLDYVEPWERNA

SEQ ID NO: 1261 - DNA, 1182 bp, synthetic construct
  misc_feature 1..1182: note = Variant of terminal deoxynucleotidyl transferase
  source 1..1182: mol_type = other DNA
atgcaccatcatcatcatcatggcggtagcggccatccgccgagcaataccccggagggggaggtgccgagcgttatcgcccgcaaggttagtcagtacagctgccagcgcaagaccacgctgaataactacaacaaaaagtttaccgacgcgctggagatcatggccgagaactacaaatttaaagagaacgaaatcgcgtgtctggaatttaagcgcgccgcgagtctgctgaaatatctgccgttcccggttaccagcatgaaagacatccaaggtctgccgtgcattggcgaccaagttcgtgacgtgatcgaggagatcatcgaagagggcgagagcagccgtgttaaagaagttctcaatgacgagcgctacaaggcctttaagcagttcaccagcgtgttcggtgtgggcgtgaaaaccagcgaaaagtggtttcgtatgggcctccgtacggttgaagaggcaaaggccagtaagagtctgaagctgagcaagatgcagaaggcgggcttcctgtattacgaggatctggcgagctgcgttagtaaagcggaagccgatgccgttacgctcatcgtgaagaacacggtgcgtacctttctgccggatgcgctggtgaccatcaccggcggtttccgccgtggcaaaaagatgggccacgacatcgactttctgatcacgaatccgggcccgaaagaggatgacgagctgctccacaaagtggttgatctgctcaagaagcaaggtctgctgctgtactgcgacatcaaagagagcacgttcgtggaggaacaactgccaagtcgcaaaatcgacgccatggacaacttccagaagtgcttcgccattctcaagctgtaccagccgggcgtggataacagcagctataacacgagtaagaagagtgacatggccgaggttaaggattggaaagcgattcgtgtggatctggtgatcacgccattcgagcagtacccttatgcgctgctcggttggacgggcagcaaagaatttggtcgcgatctgcgccgctatgcggaggaagagcgcaagatgatcctcgaccgtcatggcctctacgaccgcaaaaagcgcatctttctgaaagcgggcagcgaagaagagattttcgcgcatctgggtctggattatgtggagccgtgggaacgcaacgcg

SEQ ID NO: 1262 - protein, 394 aa, synthetic construct
  REGION 1..394: note = Variant of terminal deoxynucleotidyl transferase
MHHHHHHGGSGHPPSNTPEGEVPSVIARKVSQYSCQRKTTLNNYNKKFTDALEIMAENYKFKENEIACLEFKRAASLLKYLPFPVTSMKDIQGLPCIGDQVRDVIEEIIEEGESSRVKEVLNDERYKAFKQFTSVFGVGVKTSEKWFRMGLRTVEEAKASKSLKLSKMQKAGFLYYEDLASCVSKAEADAVTLIVKNTVRTFLPDALVTITGGFRRGKKMGHDIDFLITNPGPKEDDELLHKVVDLLKKQGLLLYCDIKESTFVEEQLPSRKIDAMDNFQKCFAILKLYQPGVDNSSYNTSKKSDMAEVKDWKAIRVDLVITPFEQYPYALLGWTGSKEFGRDLRRYAEEERKMILDRHGLYDRKKRIFLKAGSEEEIFAHLGLDYVEPWERNA

SEQ ID NO: 1263 - DNA, 1182 bp, synthetic construct
  misc_feature 1..1182: note = Variant of terminal deoxynucleotidyl transferase
  source 1..1182: mol_type = other DNA
atgcaccatcatcatcatcatggcggtagcggccatccgccgagcaataccccggagggggaggtgccgagcgttatcgcccgcaaggttagtcagtacagctgccagcgcaagaccacgctgaataactacaacaaaaagtttaccgacgcgctggagatcatggccgagaactacaaatttaaagataacgaaatcgcgtgtctggaatttaagcgcgccgcgagtctgctgaaatatctgccgttcccggttaccagcatgaaagacatccaaggtctgccgtgcattggcgaccaagttcgtgacgtgatcgaggagatcatcgaagagggcgagagcagccgtgttaaagaagttctcaatgacgagcgctacaaggcctttaagcagttcaccagcgtgttcggtgtgggcgtgaaaaccagcgaaaagtggtttcgtatgggcctccgtacggttgaagaggcaaaggccagtaagagtctgaagctgagcaagatgcagaaggcgggcttcctgtattacgaggatctggcgagctgcgttagtaaagcggaagccgatgccgttacgctcatcgtgaagaacacggtgcgtacctttctgccggatgcgctggtgaccatcaccggcggtttccgccgtggcaaaaagatgggccacgacatcgactttctgatcacgaatccgggcccgaaagaggatgacgagctgctccacaaagtggttgatctgctcaagaagcaaggtctgctgctgtactgcgacatcaaagagagcacgttcgtggaggaacaactgccaagtcgcaaaatcgacgccatggacaacttccagaagtgcttcgccattctcaagctgtaccagccgggcgtggataacagcagctataacacgagtaagaagagtgacatggccgaggttaaggattggaaagcgattcgtgtggatctggtgatcacgccattcgagcagtacgcctatgcgctgctcggttggacgggcagcaaagaatttggtcgcgatctgcgccgctatgcggaggaagagcgcaagatgatcctcgaccgtcatggcctctacgaccgcaaaaagcgcatctttctgaaagcgggcagcgaagaagagattttcgcgcatctgggtctggattatgtggagccgtgggaacgcaacgcg

SEQ ID NO: 1264 - protein, 394 aa, synthetic construct
  REGION 1..394: note = Variant of terminal deoxynucleotidyl transferase
MHHHHHHGGSGHPPSNTPEGEVPSVIARKVSQYSCQRKTTLNNYNKKFTDALEIMAENYKFKDNEIACLEFKRAASLLKYLPFPVTSMKDIQGLPCIGDQVRDVIEEIIEEGESSRVKEVLNDERYKAFKQFTSVFGVGVKTSEKWFRMGLRTVEEAKASKSLKLSKMQKAGFLYYEDLASCVSKAEADAVTLIVKNTVRTFLPDALVTITGGFRRGKKMGHDIDFLITNPGPKEDDELLHKVVDLLKKQGLLLYCDIKESTFVEEQLPSRKIDAMDNFQKCFAILKLYQPGVDNSSYNTSKKSDMAEVKDWKAIRVDLVITPFEQYAYALLGWTGSKEFGRDLRRYAEEERKMILDRHGLYDRKKRIFLKAGSEEEIFAHLGLDYVEPWERNA

SEQ ID NO: 1265 - DNA, 1182 bp, synthetic construct
  misc_feature 1..1182: note = Variant of terminal deoxynucleotidyl transferase
  source 1..1182: mol_type = other DNA
atgcaccatcatcatcatcatggcggtagcggccatccgccgagcaataccccggagggggaggtgccgagcgttatcgcccgcaaggttagtcagtacagctgccagcgcaagaccacgctgaataactacaacaaaaagtttaccgacgcgctggagatcatggccgagaactacaaatttaaagagaacgaaagggcgtgtctggaatttaagcgcgccgcgagtctgctgaaatatctgccgttcccggttaccagcatgaaagacatccaaggtctgccgtgcattggcgaccaagttcgtgacgtgatcgaggagatcatcgaagagggcgagagcagccgtgttaaagaagttctcaatgacgagcgctacaaggcctttaagcagttcaccagcgtgttcggtgtgggcgtgaaaaccagcgaaaagtggtttcgtatgggcctccgtacggttgaagaggcaaaggccagtaagagtctgaagctgagcaagatgcagaaggcgggcttcctgtattacgaggatctggcgagctgcgttagtaaagcggaagccgatgccgttacgctcatcgtgaagaacacggtgcgtacctttctgccggatgcgctggtgaccatcaccggcggtttccgccgtggcaaaaagatgggccacgacatcgactttctgatcacgaatccgggcccgaaagaggatgacgagctgctccacaaagtggttgatctgctcaagaagcaaggtctgctgctgtactgcgacatcaaagagagcacgttcgtggaggaacaactgccaagtcgcaaaatcgacgccatggacaacttccagaagtgcttcgccattctcaagctgtaccagccgggcgtggataacagcagctataacacgagtaagaagagtgacatggccgaggttaaggattggaaagcgattcgtgtggatctggtgatcacgccattcgagcagtacgcctatgcgctgctcggttggacgggcagcaaagaatttggtcgcgatctgcgccgctatgcggaggaagagcgcaagatgatcctcgaccgtcatggcctctacgaccgcaaaaagcgcatctttctgaaagcgggcagcgaagaagagattttcgcgcatctgggtctggattatgtggagccgtgggaacgcaacgcg

SEQ ID NO: 1266 - protein, 394 aa, synthetic construct
  REGION 1..394: note = Variant of terminal deoxynucleotidyl transferase
MHHHHHHGGSGHPPSNTPEGEVPSVIARKVSQYSCQRKTTLNNYNKKFTDALEIMAENYKFKENERACLEFKRAASLLKYLPFPVTSMKDIQGLPCIGDQVRDVIEEIIEEGESSRVKEVLNDERYKAFKQFTSVFGVGVKTSEKWFRMGLRTVEEAKASKSLKLSKMQKAGFLYYEDLASCVSKAEADAVTLIVKNTVRTFLPDALVTITGGFRRGKKMGHDIDFLITNPGPKEDDELLHKVVDLLKKQGLLLYCDIKESTFVEEQLPSRKIDAMDNFQKCFAILKLYQPGVDNSSYNTSKKSDMAEVKDWKAIRVDLVITPFEQYAYALLGWTGSKEFGRDLRRYAEEERKMILDRHGLYDRKKRIFLKAGSEEEIFAHLGLDYVEPWERNA

SEQ ID NO: 1267 - DNA, 1182 bp, synthetic construct
  misc_feature 1..1182: note = Variant of terminal deoxynucleotidyl transferase
  source 1..1182: mol_type = other DNA
atgcaccatcatcatcatcatggcggtagcggccatccgccgagcaataccccggagggggaggtgccgagcgttatcgcccgcaaggttagtcagtacagctgccagcgcaagaccacgctgaataactacaacaaaaagtttaccgacgcgctggaggtgatggccgagaactacaaatttaaagagaacgaaatcgcgtgtctggaatttaagcgcgccgcgagtctgctgaaatatctgccgttcccggttaccagcatgaaagacatccaaggtctgccgtgcattggcgaccaagttcgtgacgtgatcgaggagatcatcgaagagggcgagagcagccgtgttaaagaagttctcaatgacgagcgctacaaggcctttaagcagttcaccagcgtgttcggtgtgggcgtgaaaaccagcgaaaagtggtttcgtatgggcctccgtacggttgaagaggcaaaggccagtaagagtctgaagctgagcaagatgcagaaggcgggcttcctgtattacgaggatctggcgagctgcgttagtaaagcggaagccgatgccgttacgctcatcgtgaagaacacggtgcgtacctttctgccggatgcgctggtgaccatcaccggcggtttccgccgtggcaaaaagatgggccacgacatcgactttctgatcacgaatccgggcccgaaagaggatgacgagctgctccacaaagtggttgatctgctcaagaagcaaggtctgctgctgtactgcgacatcaaagagagcacgttcgtggaggaacaactgccaagtcgcaaaatcgacgccatggacaacttccagaagtgcttcgccattctcaagctgtaccagccgggcgtggataacagcagctataacacgagtaagaagagtgacatggccgaggttaaggattggaaagcgattcgtgtggatctggtgatcacgccattcgagcagtacgcctatgcgctgctcggttggacgggcagcaaagaatttggtcgcgatctgcgccgctatgcggaggaagagcgcaagatgatcctcgaccgtcatggcctctacgaccgcaaaaagcgcatctttctgaaagcgggcagcgaagaagagattttcgcgcatctgggtctggattatgtggagccgtgggaacgcaacgcg

SEQ ID NO: 1268 - protein, 394 aa, synthetic construct
  REGION 1..394: note = Variant of terminal deoxynucleotidyl transferase
MHHHHHHGGSGHPPSNTPEGEVPSVIARKVSQYSCQRKTTLNNYNKKFTDALEVMAENYKFKENEIACLEFKRAASLLKYLPFPVTSMKDIQGLPCIGDQVRDVIEEIIEEGESSRVKEVLNDERYKAFKQFTSVFGVGVKTSEKWFRMGLRTVEEAKASKSLKLSKMQKAGFLYYEDLASCVSKAEADAVTLIVKNTVRTFLPDALVTITGGFRRGKKMGHDIDFLITNPGPKEDDELLHKVVDLLKKQGLLLYCDIKESTFVEEQLPSRKIDAMDNFQKCFAILKLYQPGVDNSSYNTSKKSDMAEVKDWKAIRVDLVITPFEQYAYALLGWTGSKEFGRDLRRYAEEERKMILDRHGLYDRKKRIFLKAGSEEEIFAHLGLDYVEPWERNA

SEQ ID NO: 1269 - DNA, 1182 bp, synthetic construct; identical to SEQ ID NO: 1065
  misc_feature 1..1182: note = Variant of terminal deoxynucleotidyl transferase
  source 1..1182: mol_type = other DNA

SEQ ID NO: 1270 - protein, 394 aa, synthetic construct; identical to SEQ ID NO: 1066
  REGION 1..394: note = Variant of terminal deoxynucleotidyl transferase

SEQ ID NO: 1271 - DNA, 1182 bp, synthetic construct
  misc_feature 1..1182: note = Variant of terminal deoxynucleotidyl transferase
  source 1..1182: mol_type = other DNA
atgcaccatcatcatcatcatggcggtagcggccatccgccgagcaataccccggagggggaggtgccgagcgttatcgcccgcaaggttagtcagtacagctgccagcgcaagaccacgctgaataactacaacaaaaagtttaccgacgcgctggagatcatggccgagaactacaaatttaaagagaacgaaatcgcgtgtctggaatttaagcgcgccgcgagtctgctgaaatatctgccgttcccggttaccagcatgaaagacatccaaggtctgccgtgcattggcgaccaagttcgtgacgtgatcgaggagatcatcgaagagggcgagagcagccgtgttaaagaagttctcaatgacgagcgctacaaggcctttaagcagttcaccagcgtgttcggtgtgggcgtgaaaaccagcgaaaagtggtttcgtatgggcctccgtacggttgaagaggcaaaggccagtaagagtctgaagctgagcaagatgcagaaggcgggcttcctgtattacgaggatctggcgagctgcgttagtaaagcggaagccgatgccgttacgctcatcgtgaagaacacggtgcgtacctttctgccggatgcgctggtgaccatcaccggcggtttccgccgtggcaaacctatgggccacgacatcgactttctgatcacgaatccgggcccgaaagaggatgacgagctgctccacaaagtggttgatctgctcaagaagcaaggtctgctgctgtactgcgacatcaaagagagcacgttcgtggaggaacaactgccaagtcgcaaaatcgacgccatggacaacttccagaagtgcttcgccattctcaagctgtaccagccgggcgtggataacagcagctataacacgagtaagaagagtgacatggccgaggttaaggattggaaagcgattcgtgtggatctggtgatcacgccattcgagcagtacgcctatgcgctgctcggttggacgggcagcaaagaatttggtcgcgatctgcgccgctatgcggaggaagagcgcaagatgatcctcgacaaccatggcctctacgaccgcaaaaagcgcatctttctgaaagcgggcgaggaagaagagattttcgcgcatctgggtctggattatgtggagccgtgggaacgcaacgcg

SEQ ID NO: 1272 - protein, 394 aa, synthetic construct
  REGION 1..394: note = Variant of terminal deoxynucleotidyl transferase
MHHHHHHGGSGHPPSNTPEGEVPSVIARKVSQYSCQRKTTLNNYNKKFTDALEIMAENYKFKENEIACLEFKRAASLLKYLPFPVTSMKDIQGLPCIGDQVRDVIEEIIEEGESSRVKEVLNDERYKAFKQFTSVFGVGVKTSEKWFRMGLRTVEEAKASKSLKLSKMQKAGFLYYEDLASCVSKAEADAVTLIVKNTVRTFLPDALVTITGGFRRGKPMGHDIDFLITNPGPKEDDELLHKVVDLLKKQGLLLYCDIKESTFVEEQLPSRKIDAMDNFQKCFAILKLYQPGVDNSSYNTSKKSDMAEVKDWKAIRVDLVITPFEQYAYALLGWTGSKEFGRDLRRYAEEERKMILDNHGLYDRKKRIFLKAGEEEEIFAHLGLDYVEPWERNA

SEQ ID NO: 1273 - DNA, 1182 bp, synthetic construct
  misc_feature 1..1182: note = Variant of terminal deoxynucleotidyl transferase
  source 1..1182: mol_type = other DNA
atgcaccatcatcatcatcatggcggtagcggccatccgccgagcaataccccggagggggaggtgccgagcgttatcgcccgcaaggttagtcagtacagctgccagcgcaagacctctctgaataactacaacaaaaagtttaccgacgcgctggagatcatggccgagaactacaaatttaaagagaacgaaatcgcgtgtctggaatttaagcgcgccgcgagtctgctgaaatatctgccgttcccggttaccagcatgaaagacatccaaggtctgccgtgcattggcgaccaagttcgtgacgtgatcgaggagatcatcgaagagggcgagagcagccgtgttaaagaagttctcaatgacgagcgctacaaggcctttaagcagttcaccagcgtgttcggtgtgggcgtgaaaaccagcgaaaagtggtttcgtatgggcctccgtacggttgaagaggcaaaggccagtaagagtctgaagctgagcaagatgcagaaggcgggcttcctgtattacgaggatctggcgagctgcgttagtaaagcggaagccgatgccgttacgctcatcgtgaagaacacggtgcgtacctttctgccggatgcgctggtgaccatcaccggcggtttccgccgtggcaaacctatgggccacgacatcgactttctgatcacgaatccgggcccgaaagaggatgacgagctgctccacaaagtggttgatctgctcaagaagcaaggtctgctgctgtactgcgacatcaaagagagcacgttcgtggaggaacaactgccaagtcgcaaaatcgacgccatggacaacttccagaagtgcttcgccattctcaagctgtaccagccgggcgtggataacagcagctataacacgagtaagaagagtgacatggccgaggttaaggattggaaagcgattcgtgtggatctggtgatcacgccattcgagcagtacgcctatgcgctgctcggttggacgggcagcaaagaatttggtcgcgatctgcgccgctatgcggaggaagagcgcaagatgatcctcgacaaccatggcctctacgaccgcaaaaagcgcatctttctgaaagcgggcagcgaagaagagattttcgcgcatctgggtctggattatgtggagccgtgggaacgcaacgcg

SEQ ID NO: 1274 - protein, 394 aa, synthetic construct
  REGION 1..394: note = Variant of terminal deoxynucleotidyl transferase
MHHHHHHGGSGHPPSNTPEGEVPSVIARKVSQYSCQRKTSLNNYNKKFTDALEIMAENYKFKENEIACLEFKRAASLLKYLPFPVTSMKDIQGLPCIGDQVRDVIEEIIEEGESSRVKEVLNDERYKAFKQFTSVFGVGVKTSEKWFRMGLRTVEEAKASKSLKLSKMQKAGFLYYEDLASCVSKAEADAVTLIVKNTVRTFLPDALVTITGGFRRGKPMGHDIDFLITNPGPKEDDELLHKVVDLLKKQGLLLYCDIKESTFVEEQLPSRKIDAMDNFQKCFAILKLYQPGVDNSSYNTSKKSDMAEVKDWKAIRVDLVITPFEQYAYALLGWTGSKEFGRDLRRYAEEERKMILDNHGLYDRKKRIFLKAGSEEEIFAHLGLDYVEPWERNA

SEQ ID NO: 1275 - DNA, 1182 bp, synthetic construct
  misc_feature 1..1182: note = Variant of terminal deoxynucleotidyl transferase
  source 1..1182: mol_type = other DNA
atgcaccatcatcatcatcatggcggtagcggccatccgccgagcaataccccggagggggaggtgccgagcgttatcgcccgcaaggttagtcagtacagctgccagcgcaagaccacgctgaataactacaacaaaaagtttaccgacgcgctggagatcatggccgagaactacaaatttaaagagaacgaaatcgcgtgtctggaatttaagcgcgccgcgagtctgctgaaatatctgccgttcccggttaccagcatgaaagacatccaaggtctgccgtgcattggcgaccaagttcgtgacgtgatcgaggagatcatcgaagagggcgagagcagccgtgttaaagaagttctcaatgacgagcgctacaaggcctttaagcagttcaccagcgtgttcggtgtgggcgtgaaaaccagcgaaaagtggtttcgtatgggcctccgtacggttgaagaggcaaaggccagtaagagtctgaagctgagcaagatgcagaaggcgggcttcctgtattacgaggatctggcgagctgcgttagtaaagatgaagccgatgccgttacgctcatcgtgaagaacacggtgcgtacctttctgccggatgcgctggtgaccatcaccggcggtttccgccgtggcaaacctatgggccacgacatcgactttctgatcacgaatccgggcccgaaagaggatgacgagctgctccacaaagtggttgatctgctcaagaagcaaggtctgctgctgtactgcgacatcaaagagagcacgttcgtggaggaacaactgccaagtcgcaaaatcgacgccatggacaacttccagaagtgcttcgccattctcaagctgtaccagccgggcgtggataacagcagctataacacgagtaagaagagtgacatggccgaggttaaggattggaaagcgattcgtgtggatctggtgatcacgccattcgagcagtacgcctatgcgctgctcggttggacgggcagcaaagaatttggtcgcgatctgcgccgctatgcggaggaagagcgcaagatgatcctcgacaaccatggcctctacgaccgcaaaaagcgcatctttctgaaagcgggcagcgaagaagagattttcgcgcatctgggtctggattatgtggagccgtgggaacgcaacgcg

SEQ ID NO: 1276 - protein, 394 aa, synthetic construct
  REGION 1..394: note = Variant of terminal deoxynucleotidyl transferase
MHHHHHHGGSGHPPSNTPEGEVPSVIARKVSQYSCQRKTTLNNYNKKFTDALEIMAENYKFKENEIACLEFKRAASLLKYLPFPVTSMKDIQGLPCIGDQVRDVIEEIIEEGESSRVKEVLNDERYKAFKQFTSVFGVGVKTSEKWFRMGLRTVEEAKASKSLKLSKMQKAGFLYYEDLASCVSKDEADAVTLIVKNTVRTFLPDALVTITGGFRRGKPMGHDIDFLITNPGPKEDDELLHKVVDLLKKQGLLLYCDIKESTFVEEQLPSRKIDAMDNFQKCFAILKLYQPGVDNSSYNTSKKSDMAEVKDWKAIRVDLVITPFEQYAYALLGWTGSKEFGRDLRRYAEEERKMILDNHGLYDRKKRIFLKAGSEEEIFAHLGLDYVEPWERNA

SEQ ID NO: 1277 - DNA, 1182 bp, synthetic construct
  misc_feature 1..1182: note = Variant of terminal deoxynucleotidyl transferase
  source 1..1182: mol_type = other DNA
atgcaccatcatcatcatcatggcggtagcggccatccgccgagcaataccccggagggggaggtgcttagcgttatcgcccgcaaggttagtcagtacagctgccagcgcaagaccacgctgaataactacaacaaaaagtttaccgacgcgctggagatcatggccgagaactacaaatttaaagagaacgaaatcgcgtgtctggaatttaagcgcgccgcgagtctgctgaaatatctgccgttcccggttaccagcatgaaagacatccaaggtctgccgtgcattggcgaccaagttcgtgacgtgatcgaggagatcatcgaagagggcgagagcagccgtgttaaagaagttctcaatgacgagcgctacaaggcctttaagcagttcaccagcgtgttcggtgtgggcgtgaaaaccagcgaaaagtggtttcgtatgggcctccgtacggttgaagaggcaaaggccagtaagagtctgaagctgagcaagatgcagaaggcgggcttcctgtattacgaggatctggcgagctgcgttagtaaagcggaagccgatgccgttacgctcatcgtgaagaacacggtgcgtacctttctgccggatgcgctggtgaccatcaccggcggtttccgccgtggcaaacctatgggccacgacatcgactttctgatcacgaatccgggcccgaaagaggatgacgagctgctccacaaagtggttgatctgctcaagaagcaaggtctgctgctgtactgcgacatcaaagagagcacgttcgtggaggaacaactgccaagtcgcaaaatcgacgccatggacaacttccagaagtgcttcgccattctcaagctgtaccagccgggcgtggataacagcagctataacacgagtaagaagagtgacatggccgaggttaaggattggaaagcgattcgtgtggatctggtgatcacgccattcgagcagtacgcctatgcgctgctcggttggacgggcagcaaagaatttggtcgcgatctgcgccgctatgcggaggaagagcgcaagatgatcctcgacaaccatggcctctacgaccgcaaaaagcgcatctttctgaaagcgggcagcgaagaagagattttcgcgcatctgggtctggattatgtggagccgtgggaacgcaacgcg

SEQ ID NO: 1278 - protein, 394 aa, synthetic construct
  REGION 1..394: note = Variant of terminal deoxynucleotidyl transferase
MHHHHHHGGSGHPPSNTPEGEVLSVIARKVSQYSCQRKTTLNNYNKKFTDALEIMAENYKFKENEIACLEFKRAASLLKYLPFPVTSMKDIQGLPCIGDQVRDVIEEIIEEGESSRVKEVLNDERYKAFKQFTSVFGVGVKTSEKWFRMGLRTVEEAKASKSLKLSKMQKAGFLYYEDLASCVSKAEADAVTLIVKNTVRTFLPDALVTITGGFRRGKPMGHDIDFLITNPGPKEDDELLHKVVDLLKKQGLLLYCDIKESTFVEEQLPSRKIDAMDNFQKCFAILKLYQPGVDNSSYNTSKKSDMAEVKDWKAIRVDLVITPFEQYAYALLGWTGSKEFGRDLRRYAEEERKMILDNHGLYDRKKRIFLKAGSEEEIFAHLGLDYVEPWERNA

SEQ ID NO: 1279 - DNA, 1182 bp, synthetic construct
  misc_feature 1..1182: note = Variant of terminal deoxynucleotidyl transferase
  source 1..1182: mol_type = other DNA
atgcaccatcatcatcatcatggcggtagcggccatccgccgagcaataccccggagggggaggtgccgagcgttatcgcccgcaaggttagtcagtacagctgccagcgcaagaccacgctgaataactacaacaaaaagtttaccgacgcgctggagatcatggccgagaactacaaatttaaagagaacgaaatcgcgtgtctggaatttaagcgcgccgcgagtctgctgaaatatctgccgttcccggttaccagcatgaaagacatccaaggtctgccgtgcattggcgaccaagttcgtgacgtgatcgaggagatcatcgaagagggcgagagcagccgtgttaaagaagttctcaatgacgagcgctacaaggcctttaagcagttcaccagcgtgttcggtgtgggcgtgaaaaccagcgaaaagtggtttcgtatgggcctccgtacggttgaagaggcaaaggccagtaagagtctgaagctgagcaagatgcagaaggcgggcttcctgtattacgaggatctggcgagctgcgttagtaaagcggaagccgatgccgttacgctcatcgtgaagaacacggtgcgtacctttctgccggatgcgctggtgaccatcaccggcggtttccgccgtggcaaacctatgggccacgacatcgactttctgatcacgaatccgggcccgaaagaggatgacgagctgctccacaaagtggttgatctgctcaagaagcaaggtctgctgctgtactgcgacatcaaagagagcacgttcgtggaggaacaactgccaagtcgcaaaatcgacgccatggacaacttccagaagtgcttcgccattctcaagcattaccagccgggcgtggataacagcagctataacacgagtaagaagagtgacatggccgaggttaaggattggaaagcgattcgtgtggatctggtgatcacgccattcgagcagtacgcctatgcgctgctcggttggacgggcagcaaagaatttggtcgcgatctgcgccgctatgcggaggaagagcgcaagatgatcctcgacaaccatggcctctacgaccgcaaaaagcgcatctttctgaaagcgggcagcgaagaagagattttcgcgcatctgggtctggattatgtggagccgtgggaacgcaacgcg

SEQ ID NO: 1280 - protein, 394 aa, synthetic construct
  REGION 1..394: note = Variant of terminal deoxynucleotidyl transferase
MHHHHHHGGSGHPPSNTPEGEVPSVIARKVSQYSCQRKTTLNNYNKKFTDALEIMAENYKFKENEIACLEFKRAASLLKYLPFPVTSMKDIQGLPCIGDQVRDVIEEIIEEGESSRVKEVLNDERYKAFKQFTSVFGVGVKTSEKWFRMGLRTVEEAKASKSLKLSKMQKAGFLYYEDLASCVSKAEADAVTLIVKNTVRTFLPDALVTITGGFRRGKPMGHDIDFLITNPGPKEDDELLHKVVDLLKKQGLLLYCDIKESTFVEEQLPSRKIDAMDNFQKCFAILKHYQPGVDNSSYNTSKKSDMAEVKDWKAIRVDLVITPFEQYAYALLGWTGSKEFGRDLRRYAEEERKMILDNHGLYDRKKRIFLKAGSEEEIFAHLGLDYVEPWERNA

SEQ ID NO: 1281 - DNA, 1182 bp, synthetic construct
  misc_feature 1..1182: note = Variant of terminal deoxynucleotidyl transferase
  source 1..1182: mol_type = other DNA
atgcaccatcatcatcatcatggcggtagcggccatccgccgagcaataccccggagggggaggtgccgagcgttatcgcccgcaaggttagtcattacagctgccagcgcaagaccacgctgaataactacaacaaaaagtttaccgacgcgctggagatcatggccgagaactacaaatttaaagagaacgaaatcgcgtgtctggaatttaagcgcgccgcgagtctgctgaaatatctgccgttcccggttaccagcatgaaagacatccaaggtctgccgtgcattggcgaccaagttcgtgacgtgatcgaggagatcatcgaagagggcgagagcagccgtgttaaagaagttctcaatgacgagcgctacaaggcctttaagcagttcaccagcgtgttcggtgtgggcgtgaaaaccagcgaaaagtggtttcgtatgggcctccgtacggttgaagaggcaaaggccagtaagagtctgaagctgagcaagatgcagaaggcgggcttcctgtattacgaggatctggcgagctgcgttagtaaagcggaagccgatgccgttacgctcatcgtgaagaacacggtgcgtacctttctgccggatgcgctggtgaccatcaccggcggtttccgccgtggcaaacctatgggccacgacatcgactttctgatcacgaatccgggcccgaaagaggatgacgagctgctccacaaagtggttgatctgctcaagaagcaaggtctgctgctgtactgcgacatcaaagagagcacgttcgtggaggaacaactgccaagtcgcaaaatcgacgccatggacaacttccagaagtgcttcgccattctcaagctgtaccagccgggcgtggataacagcagctataacacgagtaagaagagtgacatggccgaggttaaggattggaaagcgattcgtgtggatctggtgatcacgccattcgagcagtacgcctatgcgctgctcggttggacgggcagcaaagaatttggtcgcgatctgcgccgctatgcggaggaagagcgcaagatgatcctcgacaaccatggcctctacgaccgcaaaaagcgcatctttctgaaagcgggcagcgaagaagagattttcgcgcatctgggtctggattatgtggagccgtgggaacgcaacgcg

SEQ ID NO: 1282 - protein, 394 aa, synthetic construct
  REGION 1..394: note = Variant of terminal deoxynucleotidyl transferase
MHHHHHHGGSGHPPSNTPEGEVPSVIARKVSHYSCQRKTTLNNYNKKFTDALEIMAENYKFKENEIACLEFKRAASLLKYLPFPVTSMKDIQGLPCIGDQVRDVIEEIIEEGESSRVKEVLNDERYKAFKQFTSVFGVGVKTSEKWFRMGLRTVEEAKASKSLKLSKMQKAGFLYYEDLASCVSKAEADAVTLIVKNTVRTFLPDALVTITGGFRRGKPMGHDIDFLITNPGPKEDDELLHKVVDLLKKQGLLLYCDIKESTFVEEQLPSRKIDAMDNFQKCFAILKLYQPGVDNSSYNTSKKSDMAEVKDWKAIRVDLVITPFEQYAYALLGWTGSKEFGRDLRRYAEEERKMILDNHGLYDRKKRIFLKAGSEEEIFAHLGLDYVEPWERNA

SEQ ID NO: 1283 - DNA, 1182 bp, synthetic construct
  misc_feature 1..1182: note = Variant of terminal deoxynucleotidyl transferase
  source 1..1182: mol_type = other DNA
atgcaccatcatcatcatcatggcggtagcggccatccgccgagcaataccccggagggggaggtgccgagcgttatcgcccgcaaggttagtcagtacagctgccagcgcaagaccacgctgaataactacaacaaaaagtttaccgacgcgctggagatcatggccgagaactacaaatttaaagagaacgaaatcgcgtgtctggaatttaagcgcgccgcgagtctgctgaaatatctgccgttcccggttaccagcatgaaagacatccaaggtctgccgtgcattggcgaccaagttcgtgacgtgatcgaggagatcatcgaagagggcgagagcagccgtgttaaagaagttctcaatgacgagcgctacaaggcctttaagcagttcaccagcgtgttcggtgtgggcgtgaaaaccagcgaaaagtggtttcgtatgggcctccgtacggttgaagaggcaaaggccagtaagagtctgaagctgagcaagatgcagaaggcgggcttcctgtattacgaggatctggcgagctgcgttagtaaagcggaagccgatgccgttacgctcatcgtgaagaacacggtgcgtacctttctgccggatgcgctggtgaccatcaccggcggtttccgccgtggcaaacctatgggccacgacatcgactttctgatcacgaatccgggcccgaaagaggatgacgagctgctccacaaagtggttgatctgctcaagaagcaaggtctgctgctgtactgcgacatcaaagagagcacgttcgtggaggaacaactgccaagtcgcaaaatcgacgccatggacaacttccagaagtgcttcgccattctcaagctgtaccagccgggcgtggataacagcagctataacacgagtaagaagagtgacatggccgagaagaaggattggaaagcgattcgtgtggatctggtgatcacgccattcgagcagtacgcctatgcgctgctcggttggacgggcagcaaagaatttggtcgcgatctgcgccgctatgcggaggaagagcgcaagatgatcctcgacaaccatggcctctacgaccgcaaaaagcgcatctttctgaaagcgggcagcgaagaagagattttcgcgcatctgggtctggattatgtggagccgtgggaacgcaacgcg

SEQ ID NO: 1284 - protein, 394 aa, synthetic construct
  REGION 1..394: note = Variant of terminal deoxynucleotidyl transferase
MHHHHHHGGSGHPPSNTPEGEVPSVIARKVSQYSCQRKTTLNNYNKKFTDALEIMAENYKFKENEIACLEFKRAASLLKYLPFPVTSMKDIQGLPCIGDQVRDVIEEIIEEGESSRVKEVLNDERYKAFKQFTSVFGVGVKTSEKWFRMGLRTVEEAKASKSLKLSKMQKAGFLYYEDLASCVSKAEADAVTLIVKNTVRTFLPDALVTITGGFRRGKPMGHDIDFLITNPGPKEDDELLHKVVDLLKKQGLLLYCDIKESTFVEEQLPSRKIDAMDNFQKCFAILKLYQPGVDNSSYNTSKKSDMAEKKDWKAIRVDLVITPFEQYAYALLGWTGSKEFGRDLRRYAEEERKMILDNHGLYDRKKRIFLKAGSEEEIFAHLGLDYVEPWERNA

SEQ ID NO: 1285 - DNA, 1182 bp, synthetic construct
  misc_feature 1..1182: note = Variant of terminal deoxynucleotidyl transferase
  source 1..1182: mol_type = other DNA
atgcaccatcatcatcatcatggcggtagcggccatccgccgagcaataccccggagggggaggtgccgagcgttatcgcccgcaaggttagtcagtacagctgccagcgcaagaccacgctgaataactacaacaaaaagtttaccgacgcgctggagatcatggccgagaactacaaatttaaagagaacgaaatcgcgtgtctggaatttaagcgcgccgcgagtctgctgaaatatctgccgttcccggttaccagcatgaaagacatccaaggtctgccgtgcattggcgaccaagttcgtgacgtgatcgaggggatcatcgaagagggcgagagcagccgtgttaaagaagttctcaatgacgagcgctacaaggcctttaagcagttcaccagcgtgttcggtgtgggcgtgaaaaccagcgaaaagtggtttcgtatgggcctccgtacggttgaagaggcaaaggccagtaagagtctgaagctgagcaagatgcagaaggcgggcttcctgtattacgaggatctggcgagctgcgttagtaaagcggaagccgatgccgttacgctcatcgtgaagaacacggtgcgtacctttctgccggatgcgctggtgaccatcaccggcggtttccgccgtggcaaacctatgggccacgacatcgactttctgatcacgaatccgggcccgaaagaggatgacgagctgctccacaaagtggttgatctgctcaagaagcaaggtctgctgctgtactgcgacatcaaagagagcacgttcgtggaggaacaactgccaagtcgcaaaatcgacgccatggacaacttccagaagtgcttcgccattctcaagctgtaccagccgggcgtggataacagcagctataacacgagtaagaagagtgacatggccgaggttaaggattggaaagcgattcgtgtggatctggtgatcacgccattcgagcagtacgcctatgcgctgctcggttggacgggcagcaaagaatttggtcgcgatctgcgccgctatgcggaggaagagcgcaagatgatcctcgacaaccatggcctctacgaccgcaaaaagcgcatctttctgaaagcgggcagcgaagaagagattttcgcgcatctgggtctggattatgtggagccgtgggaacgcaacgcg

SEQ ID NO: 1286 - protein, 394 aa, synthetic construct
  REGION 1..394: note = Variant of terminal deoxynucleotidyl transferase
MHHHHHHGGSGHPPSNTPEGEVPSVIARKVSQYSCQRKTTLNNYNKKFTDALEIMAENYKFKENEIACLEFKRAASLLKYLPFPVTSMKDIQGLPCIGDQVRDVIEGIIEEGESSRVKEVLNDERYKAFKQFTSVFGVGVKTSEKWFRMGLRTVEEAKASKSLKLSKMQKAGFLYYEDLASCVSKAEADAVTLIVKNTVRTFLPDALVTITGGFRRGKPMGHDIDFLITNPGPKEDDELLHKVVDLLKKQGLLLYCDIKESTFVEEQLPSRKIDAMDNFQKCFAILKLYQPGVDNSSYNTSKKSDMAEVKDWKAIRVDLVITPFEQYAYALLGWTGSKEFGRDLRRYAEEERKMILDNHGLYDRKKRIFLKAGSEEEIFAHLGLDYVEPWERNA

SEQ ID NO: 1287 - DNA, 1182 bp, synthetic construct
  misc_feature 1..1182: note = Variant of terminal deoxynucleotidyl transferase
  source 1..1182: mol_type = other DNA
atgcaccatcatcatcatcatggcggtagcggccatccgccgagcaataccccggagggggaggtgccgagcgttatcgcccgcaaggttagtcagtacagctgccagcgcaagaccacgctgaataactacaacaaaaagtttaccgacgcgctggagatcatggccgagaactacaaatttaaagagaacgaaatcgcgtgtctggaatttaagcgcgccgcgagtctgctgaaatatctgccgttcccggttaccagcatgaaagacatccaaggtctgccgtgcattggcgaccaagttcgtgacgtgatcgaggagatcatcgaagagggcgagagcagccgtgttaaagaagttctcaatgacgagcgctacaaggcctttaagcagttcaccagcgtgttcggtgtgggcgtgaaaaccagcgaaaagtggtttcgtatgggcctccgtacggttgaagaggcaaaggccagtaagagtctgaagctgagcaagatgcagaaggcgggcttcctgtattacgaggatctggcgagctgcgttagtaaacgggaagccgatgccgttacgctcatcgtgaagaacacggtgcgtacctttctgccggatgcgctggtgaccatcaccggcggtttccgccgtggcaaacctatgggccacgacatcgactttctgatcacgaatccgggcccgaaagaggatgacgagctgctccacaaagtggttgatctgctcaagaagcaaggtctgctgctgtactgcgacatcaaagagagcacgttcgtggaggaacaactgccaagtcgcaaaatcgacgccatggacaacttccagaagtgcttcgccattctcaagctgtaccagccgggcgtggataacagcagctataacacgagtaagaagagtgacatggccgaggttaaggattggaaagcgattcgtgtggatctggtgatcacgccattcgagcagtacgcctatgcgctgctcggttggacgggcagcaaagaatttggtcgcgatctgcgccgctatgcggaggaagagcgcaagatgatcctcgacaaccatggcctctacgaccgcaaaaagcgcatctttctgaaagcgggcagcgaagaagagattttcgcgcatctgggtctggattatgtggagccgtgggaacgcaacgcg

SEQ ID NO: 1288 - protein, 394 aa, synthetic construct
  REGION 1..394: note = Variant of terminal deoxynucleotidyl transferase
MHHHHHHGGSGHPPSNTPEGEVPSVIARKVSQYSCQRKTTLNNYNKKFTDALEIMAENYKFKENEIACLEFKRAASLLKYLPFPVTSMKDIQGLPCIGDQVRDVIEEIIEEGESSRVKEVLNDERYKAFKQFTSVFGVGVKTSEKWFRMGLRTVEEAKASKSLKLSKMQKAGFLYYEDLASCVSKREADAVTLIVKNTVRTFLPDALVTITGGFRRGKPMGHDIDFLITNPGPKEDDELLHKVVDLLKKQGLLLYCDIKESTFVEEQLPSRKIDAMDNFQKCFAILKLYQPGVDNSSYNTSKKSDMAEVKDWKAIRVDLVITPFEQYAYALLGWTGSKEFGRDLRRYAEEERKMILDNHGLYDRKKRIFLKAGSEEEIFAHLGLDYVEPWERNA

SEQ ID NO: 1289 - DNA, 1182 bp, synthetic construct
  misc_feature 1..1182: note = Variant of terminal deoxynucleotidyl transferase
  source 1..1182: mol_type = other DNA
atgcaccatcatcatcatcatggcggtagcggccatccgccgagcaataccccggagggggaggtgccgagcgttatcgcccgcaaggttagtcagtacagctgccagcgcaagaccacgctgaataactacaacaaaaagtttaccgacgcgctggagatcatggccgagaactacaaatttaaagagaacgaaatcgcgtgtctggaatttaagcgcgccgcgagtctgctgaaatatctgccgttcccggttaccagcatgaaagacatccaacagctgccgtgcattggcgaccaagttcgtgacgtgatcgaggagatcatcgaagagggcgagagcagccgtgttaaagaagttctcaatgacgagcgctacaaggcctttaagcagttcaccagcgtgttcggtgtgggcgtgaaaaccagcgaaaagtggtttcgtatgggcctccgtacggttgaagaggcaaaggccagtaagagtctgaagctgagcaagatgcagaaggcgggcttcctgtattacgaggatctggcgagctgcgttagtaaagcggaagccgatgccgttacgctcatcgtgaagaacacggtgcgtacctttctgccggatgcgctggtgaccatcaccggcggtttccgccgtggcaaacctatgggccacgacatcgactttctgatcacgaatccgggcccgaaagaggatgacgagctgctccacaaagtggttgatctgctcaagaagcaaggtctgctgctgtactgcgacatcaaagagagcacgttcgtggaggaacaactgccaagtcgcaaaatcgacgccatggacaacttccagaagtgcttcgccattctcaagctgtaccagccgggcgtggataacagcagctataacacgagtaagaagagtgacatggccgaggttaaggattggaaagcgattcgtgtggatctggtgatcacgccattcgagcagtacgcctatgcgctgctcggttggacgggcagcaaagaatttggtcgcgatctgcgccgctatgcggaggaagagcgcaagatgatcctcgacaaccatggcctctacgaccgcaaaaagcgcatctttctgaaagcgggcagcgaagaagagattttcgcgcatctgggtctggattatgtggagccgtgggaacgcaacgcg

SEQ ID NO: 1290 - protein, 394 aa, synthetic construct
  REGION 1..394: note = Variant of terminal deoxynucleotidyl transferase
MHHHHHHGGSGHPPSNTPEGEVPSVIARKVSQYSCQRKTTLNNYNKKFTDALEIMAENYKFKENEIACLEFKRAASLLKYLPFPVTSMKDIQQLPCIGDQVRDVIEEIIEEGESSRVKEVLNDERYKAFKQFTSVFGVGVKTSEKWFRMGLRTVEEAKASKSLKLSKMQKAGFLYYEDLASCVSKAEADAVTLIVKNTVRTFLPDALVTITGGFRRGKPMGHDIDFLITNPGPKEDDELLHKVVDLLKKQGLLLYCDIKESTFVEEQLPSRKIDAMDNFQKCFAILKLYQPGVDNSSYNTSKKSDMAEVKDWKAIRVDLVITPFEQYAYALLGWTGSKEFGRDLRRYAEEERKMILDNHGLYDRKKRIFLKAGSEEEIFAHLGLDYVEPWERNA

SEQ ID NO: 1291 - DNA, 1182 bp, synthetic construct
  misc_feature 1..1182: note = Variant of terminal deoxynucleotidyl transferase
  source 1..1182: mol_type = other DNA
atgcaccatcatcatcatcatggcggtagcggccatccgccgagcaataccccggagggggaggtgccgagcgttatcgcccgcaaggttagtcagtacagctgccagcgcaagaccacgctgaataactacaacaaaaagtttagtgacgcgctggagatcatggccgagaactacaaatttaaagagaacgaaatcgcgtgtctggaatttaagcgcgccgcgagtctgctgaaatatctgccgttcccggttaccagcatgaaagacatccaaggtctgccgtgcattggcgaccaagttcgtgacgtgatcgaggagatcatcgaagagggcgagagcagccgtgttaaagaagttctcaatgacgagcgctacaaggcctttaagcagttcaccagcgtgttcggtgtgggcgtgaaaaccagcgaaaagtggtttcgtatgggcctccgtacggttgaagaggcaaaggccagtaagagtctgaagctgagcaagatgcagaaggcgggcttcctgtattacgaggatctggcgagctgcgttagtaaagcggaagccgatgccgttacgctcatcgtgaagaacacggtgcgtacctttctgccggatgcgctggtgaccatcaccggcggtttccgccgtggcaaacctatgggccacgacatcgactttctgatcacgaatccgggcccgaaagaggatgacgagctgctccacaaagtggttgatctgctcaagaagcaaggtctgctgctgtactgcgacatcaaagagagcacgttcgtggaggaacaactgccaagtcgcaaaatcgacgccatggacaacttccagaagtgcttcgccattctcaagctgtaccagccgggcgtggataacagcagctataacacgagtaagaagagtgacatggccgaggttaaggattggaaagcgattcgtgtggatctggtgatcacgccattcgagcagtacgcctatgcgctgctcggttggacgggcagcaaagaatttggtcgcgatctgcgccgctatgcggaggaagagcgcaagatgatcctcgacaaccatggcctctacgaccgcaaaaagcgcatctttctgaaagcgggcagcgaagaagagattttcgcgcatctgggtctggattatgtggagccgtgggaacgcaacgcg

SEQ ID NO: 1292 - protein, 394 aa, synthetic construct
  REGION 1..394: note = Variant of terminal deoxynucleotidyl transferase
MHHHHHHGGSGHPPSNTPEGEVPSVIARKVSQYSCQRKTTLNNYNKKFSDALEIMAENYKFKENEIACLEFKRAASLLKYLPFPVTSMKDIQGLPCIGDQVRDVIEEIIEEGESSRVKEVLNDERYKAFKQFTSVFGVGVKTSEKWFRMGLRTVEEAKASKSLKLSKMQKAGFLYYEDLASCVSKAEADAVTLIVKNTVRTFLPDALVTITGGFRRGKPMGHDIDFLITNPGPKEDDELLHKVVDLLKKQGLLLYCDIKESTFVEEQLPSRKIDAMDNFQKCFAILKLYQPGVDNSSYNTSKKSDMAEVKDWKAIRVDLVITPFEQYAYALLGWTGSKEFGRDLRRYAEEERKMILDNHGLYDRKKRIFLKAGSEEEIFAHLGLDYVEPWERNA

SEQ ID NO: 1293 - DNA, 1182 bp, synthetic construct
  misc_feature 1..1182: note = Variant of terminal deoxynucleotidyl transferase
  source 1..1182: mol_type = other DNA
atgcaccatcatcatcatcatggcggtagcggccatccgccgagcaataccccggagggggaggtgccgagcgttatcgcccgcaaggttagtcagtacagctgccagcgcaagaccacgctgaataactacaacaaaaagtttaccgacgcgctggagatcatggccgagaactacaaatttaaagagaacgaaatcgcgtgtctggaatttaagcgcgccgcgagtctgctgaaatatctgccgttcccggttaccagcatgaaagacatccaaggtctgccgtgcattggcgaccaagttcgtgacgtgatcgaggagatcatcgaagagggcgagagcagccgtgttaaagaagttctcaatgacgagcgctacaaggcctttaagcagttcaccagcgtgttcggtgtgggcgtgaaaaccagcgaaaagtggtttcgtatgggcctccgtacggttgaagaggcaaaggccagtaagagtctgaagctgagcaagatgcagaaggcgggcttcctgtattacgaggatctggcgagctgcgttagtaaagcggaagccgatgccgttacgctcatcgtgaagaacacggtgcgtacctttctgccggatgcgctggtgaccatcaccggcggtttccgccgtggcaaacctatgggccacgacatcgactttctgatcacgaatccgggcccgaaagaggatgacgagctgctccacaaagtggttgatctgctcaagaagcaaggtctgctgctgtactgcgacatcaaagagagcacgttcgtggaggaacaactgccaagtcgcaaaatcgacgccatggacaacttccagaagtgcttcgccattctcaagctgtaccagccgggcgtggataacagcagctataacacgagtaagaagagtgacatggccgaggttaaggattggaaagcgattcgtgtggatctggtgatcacgccattcgagcagtacgcctatgcgctgctcggttggacgggcagcaaagaatttggtcgcgatctgcgccgctatgcggaggaagagcgcaagatgatcctcgacaaccatggcctctacgaccgcaaaaagcgcatctttctgaaagcgggcagcgaagaaaatattttcgcgcatctgggtctggattatgtggagccgtgggaacgcaacgcg

SEQ ID NO: 1294 - protein, 394 aa, synthetic construct
  REGION 1..394: note = Variant of terminal deoxynucleotidyl transferase
MHHHHHHGGSGHPPSNTPEGEVPSVIARKVSQYSCQRKTTLNNYNKKFTDALEIMAENYKFKENEIACLEFKRAASLLKYLPFPVTSMKDIQGLPCIGDQVRDVIEEIIEEGESSRVKEVLNDERYKAFKQFTSVFGVGVKTSEKWFRMGLRTVEEAKASKSLKLSKMQKAGFLYYEDLASCVSKAEADAVTLIVKNTVRTFLPDALVTITGGFRRGKPMGHDIDFLITNPGPKEDDELLHKVVDLLKKQGLLLYCDIKESTFVEEQLPSRKIDAMDNFQKCFAILKLYQPGVDNSSYNTSKKSDMAEVKDWKAIRVDLVITPFEQYAYALLGWTGSKEFGRDLRRYAEEERKMILDNHGLYDRKKRIFLKAGSEENIFAHLGLDYVEPWERNA

SEQ ID NO: 1295 - DNA, 1182 bp, synthetic construct
  misc_feature 1..1182: note = Variant of terminal deoxynucleotidyl transferase
  source 1..1182: mol_type = other DNA
atgcaccatcatcatcatcatggcggtagcggccatccgccgagcaataccccggagggggaggtgccgagcgttatcgcccgcaaggttagtcagtacagctgccagcgcaagaccacgctgaataactacaacaaaaagtttaccgacgcgctggagatcatggccgagaactacaaatttaaagagaacgaaatcgcgtgtctggaatttaagcgcgccgcgagtctgctgaaatatctgccgttcccggttaccagcatgaaagacatccaaggtctgccgtgcattggcgaccaagttcgtgacgtgatcgaggagatcatcgaagagggcgagagcagccgtgttaaagaagttctcaatgacgagcgctacaaggcctttaagcagttcaccagcgtgttcggtgtgggcgtgaaaaccagcgaaaagtggtttcgtatgggcctccgtacggttgaagaggcaaaggccagtaagagtctgaagctgagcaagatgcagaaggcgggcttcctgtattacgaggatctggcgagctgcgttagtaaagcggaagccgatgccgttacgctcatcgtgaagaacacggtgcgtacctttctgccggatgcgctggtgaccatcaccggcggtttccgccgtggcaaacctatgggccacgacatcgactttctgatcacgaatccgggcccgaaagaggatgacgagctgctccacaaagtggttgatctgctcaagaagcaaggtctgctgctgtactgcgacatcaaagagagcacgttcgtggaggaacaactgaggagtcgcaaaatcgacgccatggacaacttccagaagtgcttcgccattctcaagctgtaccagccgggcgtggataacagcagctataacacgagtaagaagagtgacatggccgaggttaaggattggaaagcgattcgtgtggatctggtgatcacgccattcgagcagtacgcctatgcgctgctcggttggacgggcagcaaagaatttggtcgcgatctgcgccgctatgcggaggaagagcgcaagatgatcctcgacaaccatggcctctacgaccgcaaaaagcgcatctttctgaaagcgggcagcgaagaagagattttcgcgcatctgggtctggattatgtggagccgtgggaacgcaacgcg

SEQ ID NO: 1296 - protein, 394 aa, synthetic construct
  REGION 1..394: note = Variant of terminal deoxynucleotidyl transferase
MHHHHHHGGSGHPPSNTPEGEVPSVIARKVSQYSCQRKTTLNNYNKKFTDALEIMAENYKFKENEIACLEFKRAASLLKYLPFPVTSMKDIQGLPCIGDQVRDVIEEIIEEGESSRVKEVLNDERYKAFKQFTSVFGVGVKTSEKWFRMGLRTVEEAKASKSLKLSKMQKAGFLYYEDLASCVSKAEADAVTLIVKNTVRTFLPDALVTITGGFRRGKPMGHDIDFLITNPGPKEDDELLHKVVDLLKKQGLLLYCDIKESTFVEEQLRSRKIDAMDNFQKCFAILKLYQPGVDNSSYNTSKKSDMAEVKDWKAIRVDLVITPFEQYAYALLGWTGSKEFGRDLRRYAEEERKMILDNHGLYDRKKRIFLKAGSEEEIFAHLGLDYVEPWERNA

SEQ ID NO: 1297 - DNA, 1182 bp, synthetic construct
  misc_feature 1..1182: note = Variant of terminal deoxynucleotidyl transferase
  source 1..1182: mol_type = other DNA
atgcaccatcatcatcatcatggcggtagcggccatccgccgagcaataccccggagggggaggtgccgagcgttatcgcccgcaaggttagtcagtacagctgccagcgcaagaccacgctgaataactacaacaaaaagtttaccgacgcgctggagatcatggccgagaactacaaatttaaagagaacgaaatcgcgtgtctggaatttaagcgcgccgcgagtctgctgaaatatctgccgttcccggttaccagcatgaaagacatccaatggctgccgtgcattggcgaccaagttcgtgacgtgatcgaggagatcatcgaagagggcgagagcagccgtgttaaagaagttctcaatgacgagcgctacaaggcctttaagcagttcaccagcgtgttcggtgtgggcgtgaaaaccagcgaaaagtggtttcgtatgggcctccgtacggttgaagaggcaaaggccagtaagagtctgaagctgagcaagatgcagaaggcgggcttcctgtattacgaggatctggcgagctgcgttagtaaagcggaagccgatgccgttacgctcatcgtgaagaacacggtgcgtacctttctgccggatgcgctggtgaccatcaccggcggtttccgccgtggcaaacctatgggccacgacatcgactttctgatcacgaatccgggcccgaaagaggatgacgagctgctccacaaagtggttgatctgctcaagaagcaaggtctgctgctgtactgcgacatcaaagagagcacgttcgtggaggaacaactgccaagtcgcaaaatcgacgccatggacaacttccagaagtgcttcgccattctcaagctgtaccagccgggcgtggataacagcagctataacacgagtaagaagagtgacatggccgaggttaaggattggaaagcgattcgtgtggatctggtgatcacgccattcgagcagtacgcctatgcgctgctcggttggacgggcagcaaagaatttggtcgcgatctgcgccgctatgcggaggaagagcgcaagatgatcctcgacaaccatggcctctacgaccgcaaaaagcgcatctttctgaaagcgggcagcgaagaagagattttcgcgcatctgggtctggattatgtggagccgtgggaacgcaacgcg

SEQ ID NO: 1298 - protein, 394 aa, synthetic construct
  REGION 1..394: note = Variant of terminal deoxynucleotidyl transferase
MHHHHHHGGSGHPPSNTPEGEVPSVIARKVSQYSCQRKTTLNNYNKKFTDALEIMAENYKFKENEIACLEFKRAASLLKYLPFPVTSMKDIQWLPCIGDQVRDVIEEIIEEGESSRVKEVLNDERYKAFKQFTSVFGVGVKTSEKWFRMGLRTVEEAKASKSLKLSKMQKAGFLYYEDLASCVSKAEADAVTLIVKNTVRTFLPDALVTITGGFRRGKPMGHDIDFLITNPGPKEDDELLHKVVDLLKKQGLLLYCDIKESTFVEEQLPSRKIDAMDNFQKCFAILKLYQPGVDNSSYNTSKKSDMAEVKDWKAIRVDLVITPFEQYAYALLGWTGSKEFGRDLRRYAEEERKMILDNHGLYDRKKRIFLKAGSEEEIFAHLGLDYVEPWERNA

SEQ ID NO: 1299 - DNA, 1182 bp, synthetic construct
  misc_feature 1..1182: note = Variant of terminal deoxynucleotidyl transferase
  source 1..1182: mol_type = other DNA
atgcaccatcatcatcatcatggcggtagcggccatccgccgagcaataccccggagggggaggtgccgagcgttatcgcccgcaaggttagtcagtacagctgccagcgcaagaccacgctgaataactacaacaaaaagtttaccgacgcgctggagatcatggccgagaactacaaatttaaagagaacgaaatcgcgtgtctggaatttaagcgcgccgcgagtctgctgaaatatctgccgttcccggttaccagcatgaaagacatccaaggtctgccgtgcattggcgaccaagttcgtgacgtgatcgaggagatcatcgaagagggcgagagcagccgtgttaaagaagttctcaatgacgagcgctacaaggcctttaagcagttcaccagcgtgttcggtgtgggcgtgaaaaccagcgaaaagtggtttcgtatgggcctccgtacggttgaagaggcaaaggccagtaagagtctgaagctgagcaagatgcagaaggcgggcttcctgtattacgaggatctggcgagctgcgttagtaaagcggaagccgatgccgttacgctcatcgtgaagaacacggtgcgtacctttctgccggatgcgctggtgaccatcaccggcggtttccgccgtggcaaacctatgggccacgacatcgactttctgatcacgaatccgggcccgaaagaggatgacgagctgctccacaaagtggttgatctgctcaagaagcaaggtctgctgctgtactgcgacatcaaagagagcacgttcgtggaggaacaactgccaagtcgcaaaatcgacgccatggacaacttccagaagtgcttcgccattctcaagctgtaccagccgggcgtggataacagcagctataacacgagtaagaagagtgacatggccgaggttaaggattggaaagcgattcgtgtggatctggtgatcacgccattcgagcagtacgcctatgcgctgctcggttggacgggcagcaaagaatttggtcgcgatctgcgccgctatgcggaggaagagcgcaagatgatcctcgacaaccatggcctctacgaccgcaaaaagcgcatctttctgaaagcgggcggggaagaagagattttcgcgcatctgggtctggattatgtggagccgtgggaacgcaacgcg

SEQ ID NO: 1300 - protein, 394 aa, synthetic construct
  REGION 1..394: note = Variant of terminal deoxynucleotidyl transferase
MHHHHHHGGSGHPPSNTPEGEVPSVIARKVSQYSCQRKTTLNNYNKKFTDALEIMAENYKFKENEIACLEFKRAASLLKYLPFPVTSMKDIQGLPCIGDQVRDVIEEIIEEGESSRVKEVLNDERYKAFKQFTSVFGVGVKTSEKWFRMGLRTVEEAKASKSLKLSKMQKAGFLYYEDLASCVSKAEADAVTLIVKNTVRTFLPDALVTITGGFRRGKPMGHDIDFLITNPGPKEDDELLHKVVDLLKKQGLLLYCDIKESTFVEEQLPSRKIDAMDNFQKCFAILKLYQPGVDNSSYNTSKKSDMAEVKDWKAIRVDLVITPFEQYAYALLGWTGSKEFGRDLRRYAEEERKMILDNHGLYDRKKRIFLKAGGEEEIFAHLGLDYVEPWERNA

SEQ ID NO: 1301 - DNA, 1182 bp, synthetic construct
  misc_feature 1..1182: note = Variant of terminal deoxynucleotidyl transferase
  source 1..1182: mol_type = other DNA
atgcaccatcatcatcatcatggcggtagcggccatccgccgagcaataccccggagggggaggtgccgagcgttatcgcccgcaaggttagtcagtacagctgccagcgcaagaccacgctgaataactacaacaaaaagtttaccgacgcgctggagatcatggccgagaactacaaatttaaagagaacgaaatcgcgtgtctggaatttaagcgcgccgcgagtctgctgaaatatctgccgttcccggttaccagcatgaaagacatccaaggtctgccgtgcattggcgaccaagttcgtgacgtgatcgaggagatcatcgaagagggcgagagcagccgtgttaaagaagttctcaatgacgagcgctacaaggcctttaagcagttcaccagcgtgttcggtgtgggcgtgaaaaccagcgaaaagtggtttcgtatgggcctccgtacggttgaagaggcaaaggccagtaagagtctgaagctgagcaagatgcagaaggcgggcttcctgtattacgaggatctggcgagctgcgttagtaaagcggaagccgatgccgttacgctcatcgtgaagaacacggtgcgtacctttctgccggatgcgctggtgaccatcaccggcggtttccgccgtggcaaacctatgggccacgacatcgactttctgatcacgaatccgggcccgaaagaggatgacgagctgctccacaaagtggttgatctgctcaagaagcaaggtctgctgctgtactgcgacatcaaagagagcacgttcgtggaggaacaactgccaagtcgcaaaatcgacgccatggacaacttccagaagtgcttcgccattctcaagctgtaccagccgggcgtggataacagcagctataacacgagtaagaagagtgacatggccgaggttaaggattggaaagcgattcgtgtggatctggtgatcacgccattcgagcagtacgcctatgcgctgctcggttggacgggcagcaaagaatttggtcgcgatctgcgccgctatgcggaggaagagcgcaagatgatcctcgacaaccatggcctctacgaccgcaaaaagcgcatctttctgaaagcgggcagcgaagaagagattttcgcgcatctgggtctggatgtggtggagccgtgggaacgcaacgcg

SEQ ID NO: 1302 - protein, 394 aa, synthetic construct
  REGION 1..394: note = Variant of terminal deoxynucleotidyl transferase
MHHHHHHGGSGHPPSNTPEGEVPSVIARKVSQYSCQRKTTLNNYNKKFTDALEIMAENYKFKENEIACLEFKRAASLLKYLPFPVTSMKDIQGLPCIGDQVRDVIEEIIEEGESSRVKEVLNDERYKAFKQFTSVFGVGVKTSEKWFRMGLRTVEEAKASKSLKLSKMQKAGFLYYEDLASCVSKAEADAVTLIVKNTVRTFLPDALVTITGGFRRGKPMGHDIDFLITNPGPKEDDELLHKVVDLLKKQGLLLYCDIKESTFVEEQLPSRKIDAMDNFQKCFAILKLYQPGVDNSSYNTSKKSDMAEVKDWKAIRVDLVITPFEQYAYALLGWTGSKEFGRDLRRYAEEERKMILDNHGLYDRKKRIFLKAGSEEEIFAHLGLDVVEPWERNA

SEQ ID NO: 1303 - DNA, 1182 bp, synthetic construct
  misc_feature 1..1182: note = Variant of terminal deoxynucleotidyl transferase
  source 1..1182: mol_type = other DNA
atgcaccatcatcatcatcatggcggtagcggccatccgccgagcaataccccggagggggaggtgccgagcgttatcgcccgcaaggttagtcagtacagctgccagcgcaagaccacgctgaataactacaacaaaaagtttaccgacgcgctggagatcatggccgagaactacaaatttaaagagaacgaaatcgcgtgtctggaatttaagcgcgccgcgagtctgctgaaatatctgccgttcccggttaccagcatgaaagacatccaaggtctgccgtgcattggcgaccaagttcgtgacgtgatcgaggagatcatcgaagagggcgagagcagccgtattaaagaagttctcaatgacgagcgctacaaggcctttaagcagttcaccagcgtgttcggtgtgggcgtgaaaaccagcgaaaagtggtttcgtatgggcctccgtacggttgaagaggcaaaggccagtaagagtctgaagctgagcaagatgcagaaggcgggcttcctgtattacgaggatctggcgagctgcgttagtaaagcggaagccgatgccgttacgctcatcgtgaagaacacggtgcgtacctttctgccggatgcgctggtgaccatcaccggcggtttccgccgtggcaaacctatgggccacgacatcgactttctgatcacgaatccgggcccgaaagaggatgacgagctgctccacaaagtggttgatctgctcaagaagcaaggtctgctgctgtactgcgacatcaaagagagcacgttcgtggaggaacaactgccaagtcgcaaaatcgacgccatggacaacttccagaagtgcttcgccattctcaagctgtaccagccgggcgtggataacagcagctataacacgagtaagaagagtgacatggccgaggttaaggattggaaagcgattcgtgtggatctggtgatcacgccattcgagcagtacgcctatgcgctgctcggttggacgggcagcaaagaatttggtcgcgatctgcgccgctatgcggaggaagagcgcaagatgatcctcgacaaccatggcctctacgaccgcaaaaagcgcatctttctgaaagcgggcagcgaagaagagattttcgcgcatctgggtctggattatgtggagccgtgggaacgcaacgcg

SEQ ID NO: 1304 - protein, 394 aa, synthetic construct
  REGION 1..394: note = Variant of terminal deoxynucleotidyl transferase
MHHHHHHGGSGHPPSNTPEGEVPSVIARKVSQYSCQRKTTLNNYNKKFTDALEIMAENYKFKENEIACLEFKRAASLLKYLPFPVTSMKDIQGLPCIGDQVRDVIEEIIEEGESSRIKEVLNDERYKAFKQFTSVFGVGVKTSEKWFRMGLRTVEEAKASKSLKLSKMQKAGFLYYEDLASCVSKAEADAVTLIVKNTVRTFLPDALVTITGGFRRGKPMGHDIDFLITNPGPKEDDELLHKVVDLLKKQGLLLYCDIKESTFVEEQLPSRKIDAMDNFQKCFAILKLYQPGVDNSSYNTSKKSDMAEVKDWKAIRVDLVITPFEQYAYALLGWTGSKEFGRDLRRYAEEERKMILDNHGLYDRKKRIFLKAGSEEEIFAHLGLDYVEPWERNA

SEQ ID NO: 1305 - DNA, 1182 bp, synthetic construct
  misc_feature 1..1182: note = Variant of terminal deoxynucleotidyl transferase
  source 1..1182: mol_type = other DNA
atgcaccatcatcatcatcatggcggtagcggccatccgccgagcaataccccggagggggaggtgccgagcgttatcgcccgcaaggttagtcagtacagctgccagcgcaagaccacgctgaataactacaacaaaaagtttaccgacgcgctggagatcatggccgagaactacaaatttaaagagaacgaaatcgcgtgtctggaatttaagcgcgccgcgagtctgctgaaatatctgccgttcccggttaccagcatgaaagacatccaaggtctgccgtgcattggcgaccaagttcgtgacgtgatcgaggagatcatcgaagagggcgagagcagccgtgttaaagaagttctcaatgacgagcgctacaaggcctttaagcagttcaccagcgtgttcggtgtgggcgtgaaaaccagcgaaaagtggtttcgtatgggcctccgtacggttgaagaggcaaaggccagtaagagtctgaagctgagcaagatgcagaaggcgggcttcctgtattacgaggatctggcgagcggtgttagtaaagcggaagccgatgccgttacgctcatcgtgaagaacacggtgcgtacctttctgccggatgcgctggtgaccatcaccggcggtttccgccgtggcaaacctatgggccacgacatcgactttctgatcacgaatccgggcccgaaagaggatgacgagctgctccacaaagtggttgatctgctcaagaagcaaggtctgctgctgtactgcgacatcaaagagagcacgttcgtggaggaacaactgccaagtcgcaaaatcgacgccatggacaacttccagaagtgcttcgccattctcaagctgtaccagccgggcgtggataacagcagctataacacgagtaagaagagtgacatggccgaggttaaggattggaaagcgattcgtgtggatctggtgatcacgccattcgagcagtacgcctatgcgctgctcggttggacgggcagcaaagaatttggtcgcgatctgcgccgctatgcggaggaagagcgcaagatgatcctcgacaaccatggcctctacgaccgcaaaaagcgcatctttctgaaagcgggcagcgaagaagagattttcgcgcatctgggtctggattatgtggagccgtgggaacgcaacgcg

SEQ ID NO: 1306 - protein, 394 aa, synthetic construct
  REGION 1..394: note = Variant of terminal deoxynucleotidyl transferase
MHHHHHHGGSGHPPSNTPEGEVPSVIARKVSQYSCQRKTTLNNYNKKFTDALEIMAENYKFKENEIACLEFKRAASLLKYLPFPVTSMKDIQGLPCIGDQVRDVIEEIIEEGESSRVKEVLNDERYKAFKQFTSVFGVGVKTSEKWFRMGLRTVEEAKASKSLKLSKMQKAGFLYYEDLASGVSKAEADAVTLIVKNTVRTFLPDALVTITGGFRRGKPMGHDIDFLITNPGPKEDDELLHKVVDLLKKQGLLLYCDIKESTFVEEQLPSRKIDAMDNFQKCFAILKLYQPGVDNSSYNTSKKSDMAEVKDWKAIRVDLVITPFEQYAYALLGWTGSKEFGRDLRRYAEEERKMILDNHGLYDRKKRIFLKAGSEEEIFAHLGLDYVEPWERNA

SEQ ID NO: 1307 - DNA, 1182 bp, synthetic construct
  misc_feature 1..1182: note = Variant of terminal deoxynucleotidyl transferase
  source 1..1182: mol_type = other DNA
atgcaccatcatcatcatcatggcggtagcggccatccgccgagcaataccccggagggggaggtgccgagcgttatcgcccgcaaggttagtcagtacagctgccagcgcaagaccacgctgaataactacaacaaaaagtttaccgacgcgctggagatcatggccgagaactacaaatttaaagagaacgaaatcgcgtgtctggaatttaagcgcgccgcgagtctgctgaaatatctgccgttcccggttaccagcatgaaagacatccaaggtctgccgtgcattggcgaccaagttcgtgacgtgatcgagagtatcatcgaagagggcgagagcagccgtgttaaagaagttctcaatgacgagcgctacaaggcctttaagcagttcaccagcgtgttcggtgtgggcgtgaaaaccagcgaaaagtggtttcgtatgggcctccgtacggttgaagaggcaaaggccagtaagagtctgaagctgagcaagatgcagaaggcgggcttcctgtattacgaggatctggcgagctgcgttagtaaagcggaagccgatgccgttacgctcatcgtgaagaacacggtgcgtacctttctgccggatgcgctggtgaccatcaccggcggtttccgccgtggcaaacctatgggccacgacatcgactttctgatcacgaatccgggcccgaaagaggatgacgagctgctccacaaagtggttgatctgctcaagaagcaaggtctgctgctgtactgcgacatcaaagagagcacgttcgtggaggaacaactgccaagtcgcaaaatcgacgccatggacaacttccagaagtgcttcgccattctcaagctgtaccagccgggcgtggataacagcagctataacacgagtaagaagagtgacatggccgaggttaaggattggaaagcgattcgtgtggatctggtgatcacgccattcgagcagtacgcctatgcgctgctcggttggacgggcagcaaagaatttggtcgcgatctgcgccgctatgcggaggaagagcgcaagatgatcctcgacaaccatggcctctacgaccgcaaaaagcgcatctttctgaaagcgggcagcgaagaagagattttcgcgcatctgggtctggattatgtggagccgtgggaacgcaacgcg

SEQ ID NO: 1308 - protein, 394 aa, synthetic construct
  REGION 1..394: note = Variant of terminal deoxynucleotidyl transferase
MHHHHHHGGSGHPPSNTPEGEVPSVIARKVSQYSCQRKTTLNNYNKKFTDALEIMAENYKFKENEIACLEFKRAASLLKYLPFPVTSMKDIQGLPCIGDQVRDVIESIIEEGESSRVKEVLNDERYKAFKQFTSVFGVGVKTSEKWFRMGLRTVEEAKASKSLKLSKMQKAGFLYYEDLASCVSKAEADAVTLIVKNTVRTFLPDALVTITGGFRRGKPMGHDIDFLITNPGPKEDDELLHKVVDLLKKQGLLLYCDIKESTFVEEQLPSRKIDAMDNFQKCFAILKLYQPGVDNSSYNTSKKSDMAEVKDWKAIRVDLVITPFEQYAYALLGWTGSKEFGRDLRRYAEEERKMILDNHGLYDRKKRIFLKAGSEEEIFAHLGLDYVEPWERNA

SEQ ID NO: 1309 - DNA, 1182 bp, synthetic construct
  misc_feature 1..1182: note = Variant of terminal deoxynucleotidyl transferase
  source 1..1182: mol_type = other DNA
atgcaccatcatcatcatcatggcggtagcggccatccgccgagcaataccccggagggggaggtgccgagcgttatcgcccgcaaggttagtcagtacagctgccatcgcaagaccacgctgaataactacaacaaaaagtttaccgacgcgctggagatcatggccgagaactacaaatttaaagagaacgaaatcgcgtgtctggaatttaagcgcgccgcgagtctgctgaaatatctgccgttcccggttaccagcatgaaagacatccaaggtctgccgtgcattggcgaccaagttcgtgacgtgatcgaggagatcatcgaagagggcgagagcagccgtgttaaagaagttctcaatgacgagcgctacaaggcctttaagcagttcaccagcgtgttcggtgtgggcgtgaaaaccagcgaaaagtggtttcgtatgggcctccgtacggttgaagaggcaaaggccagtaagagtctgaagctgagcaagatgcagaaggcgggcttcctgtattacgaggatctggcgagctgcgttagtaaagcggaagccgatgccgttacgctcatcgtgaagaacacggtgcgtacctttctgccggatgcgctggtgaccatcaccggcggtttccgccgtggcaaacctatgggccacgacatcgactttctgatcacgaatccgggcccgaaagaggatgacgagctgctccacaaagtggttgatctgctcaagaagcaaggtctgctgctgtactgcgacatcaaagagagcacgttcgtggaggaacaactgccaagtcgcaaaatcgacgccatggacaacttccagaagtgcttcgccattctcaagctgtaccagccgggcgtggataacagcagctataacacgagtaagaagagtgacatggccgaggttaaggattggaaagcgattcgtgtggatctggtgatcacgccattcgagcagtacgcctatgcgctgctcggttggacgggcagcaaagaatttggtcgcgatctgcgccgctatgcggaggaagagcgcaagatgatcctcgacaaccatggcctctacgaccgcaaaaagcgcatctttctgaaagcgggcagcgaagaagagattttcgcgcatctgggtctggattatgtggagccgtgggaacgcaacgcg

SEQ ID NO: 1310 - protein, 394 aa, synthetic construct
  REGION 1..394: note = Variant of terminal deoxynucleotidyl transferase
MHHHHHHGGSGHPPSNTPEGEVPSVIARKVSQYSCHRKTTLNNYNKKFTDALEIMAENYKFKENEIACLEFKRAASLLKYLPFPVTSMKDIQGLPCIGDQVRDVIEEIIEEGESSRVKEVLNDERYKAFKQFTSVFGVGVKTSEKWFRMGLRTVEEAKASKSLKLSKMQKAGFLYYEDLASCVSKAEADAVTLIVKNTVRTFLPDALVTITGGFRRGKPMGHDIDFLITNPGPKEDDELLHKVVDLLKKQGLLLYCDIKESTFVEEQLPSRKIDAMDNFQKCFAILKLYQPGVDNSSYNTSKKSDMAEVKDWKAIRVDLVITPFEQYAYALLGWTGSKEFGRDLRRYAEEERKMILDNHGLYDRKKRIFLKAGSEEEIFAHLGLDYVEPWERNA

SEQ ID NO: 1311 - DNA, 1182 bp, synthetic construct
  misc_feature 1..1182: note = Variant of terminal deoxynucleotidyl transferase
  source 1..1182: mol_type = other DNA
atgcaccatcatcatcatcatggcggtagcggccatccgccgagcaataccccggagggggaggtgccgagcgttatcgcccgcaaggttagtcagtacagctgccagcgcaagaccacgctgaataactacaacaaaaagtttaccgacgcgctggagatcatggccgagaactacaaatttaaagagaacgaaatcgcgtgtctggaatttaagcgcgccgcgagtctgctgaaatatctgccgttcccggttaccagcatgaaagacatccaaggtctgccgtgcattggcgaccaagttcgtgacgtgatcgaggagatcatcgaagagggcgagagcagccgtgttaaagaagttctcaatgacccgcgctacaaggcctttaagcagttcaccagcgtgttcggtgtgggcgtgaaaaccagcgaaaagtggtttcgtatgggcctccgtacggttgaagaggcaaaggccagtaagagtctgaagctgagcaagatgcagaaggcgggcttcctgtattacgaggatctggcgagctgcgttagtaaagcggaagccgatgccgttacgctcatcgtgaagaacacggtgcgtacctttctgccggatgcgctggtgaccatcaccggcggtttccgccgtggcaaacctatgggccacgacatcgactttctgatcacgaatccgggcccgaaagaggatgacgagctgctccacaaagtggttgatctgctcaagaagcaaggtctgctgctgtactgcgacatcaaagagagcacgttcgtggaggaacaactgccaagtcgcaaaatcgacgccatggacaacttccagaagtgcttcgccattctcaagctgtaccagccgggcgtggataacagcagctataacacgagtaagaagagtgacatggccgaggttaaggattggaaagcgattcgtgtggatctggtgatcacgccattcgagcagtacgcctatgcgctgctcggttggacgggcagcaaagaatttggtcgcgatctgcgccgctatgcggaggaagagcgcaagatgatcctcgacaaccatggcctctacgaccgcaaaaagcgcatctttctgaaagcgggcagcgaagaagagattttcgcgcatctgggtctggattatgtggagccgtgggaacgcaacgcg

SEQ ID NO: 1312 - protein, 394 aa, synthetic construct
  REGION 1..394: note = Variant of terminal deoxynucleotidyl transferase
MHHHHHHGGSGHPPSNTPEGEVPSVIARKVSQYSCQRKTTLNNYNKKFTDALEIMAENYKFKENEIACLEFKRAASLLKYLPFPVTSMKDIQGLPCIGDQVRDVIEEIIEEGESSRVKEVLNDPRYKAFKQFTSVFGVGVKTSEKWFRMGLRTVEEAKASKSLKLSKMQKAGFLYYEDLASCVSKAEADAVTLIVKNTVRTFLPDALVTITGGFRRGKPMGHDIDFLITNPGPKEDDELLHKVVDLLKKQGLLLYCDIKESTFVEEQLPSRKIDAMDNFQKCFAILKLYQPGVDNSSYNTSKKSDMAEVKDWKAIRVDLVITPFEQYAYALLGWTGSKEFGRDLRRYAEEERKMILDNHGLYDRKKRIFLKAGSEEEIFAHLGLDYVEPWERNA

SEQ ID NO: 1313 - DNA, 1182 bp, synthetic construct
  misc_feature 1..1182: note = Variant of terminal deoxynucleotidyl transferase
  source 1..1182: mol_type = other DNA
atgcaccatcatcatcatcatggcggtagcggccatccgccgagcaataccccggagggggaggtgccgagcgttatcgcccgcaaggttagtcagtacagctgccagcgcaagaccacgctgaataactacaacaaaaagtttaccgacgcgctggagatcatggccgagaactacaaatttaaagagaacgaaatcgcgtgtctggaatttaagcgcgccgcgagtctgctgaaatatctgccgttcccggttaccagcatgaaagacatccaaggtctgccgtgcattccggaccaagttcgtgacgtgatcgaggagatcatcgaagagggcgagagcagccgtgttaaagaagttctcaatgacgagcgctacaaggcctttaagcagttcaccagcgtgttcggtgtgggcgtgaaaaccagcgaaaagtggtttcgtatgggcctccgtacggttgaagaggcaaaggccagtaagagtctgaagctgagcaagatgcagaaggcgggcttcctgtattacgaggatctggcgagctgcgttagtaaagcggaagccgatgccgttacgctcatcgtgaagaacacggtgcgtacctttctgccggatgcgctggtgaccatcaccggcggtttccgccgtggcaaacctatgggccacgacatcgactttctgatcacgaatccgggcccgaaagaggatgacgagctgctccacaaagtggttgatctgctcaagaagcaaggtctgctgctgtactgcgacatcaaagagagcacgttcgtggaggaacaactgccaagtcgcaaaatcgacgccatggacaacttccagaagtgcttcgccattctcaagctgtaccagccgggcgtggataacagcagctataacacgagtaagaagagtgacatggccgaggttaaggattggaaagcgattcgtgtggatctggtgatcacgccattcgagcagtacgcctatgcgctgctcggttggacgggcagcaaagaatttggtcgcgatctgcgccgctatgcggaggaagagcgcaagatgatcctcgacaaccatggcctctacgaccgcaaaaagcgcatctttctgaaagcgggcagcgaagaagagattttcgcgcatctgggtctggattatgtggagccgtgggaacgcaacgcg

SEQ ID NO: 1314 - protein, 394 aa, synthetic construct
  REGION 1..394: note = Variant of terminal deoxynucleotidyl transferase
MHHHHHHGGSGHPPSNTPEGEVPSVIARKVSQYSCQRKTTLNNYNKKFTDALEIMAENYKFKENEIACLEFKRAASLLKYLPFPVTSMKDIQGLPCIPDQVRDVIEEIIEEGESSRVKEVLNDERYKAFKQFTSVFGVGVKTSEKWFRMGLRTVEEAKASKSLKLSKMQKAGFLYYEDLASCVSKAEADAVTLIVKNTVRTFLPDALVTITGGFRRGKPMGHDIDFLITNPGPKEDDELLHKVVDLLKKQGLLLYCDIKESTFVEEQLPSRKIDAMDNFQKCFAILKLYQPGVDNSSYNTSKKSDMAEVKDWKAIRVDLVITPFEQYAYALLGWTGSKEFGRDLRRYAEEERKMILDNHGLYDRKKRIFLKAGSEEEIFAHLGLDYVEPWERNA

SEQ ID NO: 1315 - DNA, 1182 bp, synthetic construct
  misc_feature 1..1182: note = Variant of terminal deoxynucleotidyl transferase
  source 1..1182: mol_type = other DNA
atgcaccatcatcatcatcatggcggtagcggccatccgccgagcaataccccggagggggaggtgccgagcgttatcgcccgcaaggttagtcagtacagctgccagcgcaagaccacgctgaataactacaacaaaaagtttaccgacgcgctggagatcatggccgagaactacaaatttaaagagaacgaaatcgcgtgtctggaatttaagcgcgccgcgagtctgctgaaatatctgccgttcccggttaccagcatgaaagacatccaaggtctgccgtgcattggcgaccaagttcgtgacgtgatcgaggagatcatcgaagagggcgagagcagccgtgttaaagaagttctcaatgacgagcgctacaaggcctttaagcagttcaccagcgtgttcggtgtgggcgtgaaaaccagcgaaaagtggtttcgtatgggcctccgtacggttgaagaggcaaaggccagtaagagtctgaagatgagcaagatgcagaaggcgggcttcctgtattacgaggatctggcgagctgcgttagtaaagcggaagccgatgccgttacgctcatcgtgaagaacacggtgcgtacctttctgccggatgcgctggtgaccatcaccggcggtttccgccgtggcaaacctatgggccacgacatcgactttctgatcacgaatccgggcccgaaagaggatgacgagctgctccacaaagtggttgatctgctcaagaagcaaggtctgctgctgtactgcgacatcaaagagagcacgttcgtggaggaacaactgccaagtcgcaaaatcgacgccatggacaacttccagaagtgcttcgccattctcaagctgtaccagccgggcgtggataacagcagctataacacgagtaagaagagtgacatggccgaggttaaggattggaaagcgattcgtgtggatctggtgatcacgccattcgagcagtacgcctatgcgctgctcggttggacgggcagcaaagaatttggtcgcgatctgcgccgctatgcggaggaagagcgcaagatgatcctcgacaaccatggcctctacgaccgcaaaaagcgcatctttctgaaagcgggcagcgaagaagagattttcgcgcatctgggtctggattatgtggagccgtgggaacgcaacgcg

SEQ ID NO: 1316 - protein, 394 aa, synthetic construct
  REGION 1..394: note = Variant of terminal deoxynucleotidyl transferase
MHHHHHHGGSGHPPSNTPEGEVPSVIARKVSQYSCQRKTTLNNYNKKFTDALEIMAENYKFKENEIACLEFKRAASLLKYLPFPVTSMKDIQGLPCIGDQVRDVIEEIIEEGESSRVKEVLNDERYKAFKQFTSVFGVGVKTSEKWFRMGLRTVEEAKASKSLKMSKMQKAGFLYYEDLASCVSKAEADAVTLIVKNTVRTFLPDALVTITGGFRRGKPMGHDIDFLITNPGPKEDDELLHKVVDLLKKQGLLLYCDIKESTFVEEQLPSRKIDAMDNFQKCFAILKLYQPGVDNSSYNTSKKSDMAEVKDWKAIRVDLVITPFEQYAYALLGWTGSKEFGRDLRRYAEEERKMILDNHGLYDRKKRIFLKAGSEEEIFAHLGLDYVEPWERNA

SEQ ID NO: 1317 - DNA, 1182 bp, synthetic construct
  misc_feature 1..1182: note = Variant of terminal deoxynucleotidyl transferase
  source 1..1182: mol_type = other DNA
atgcaccatcatcatcatcatggcggtagcggccatccgccgagcaataccccggagggggaggtgccgagcgttatcgcccgcaaggttagtcagtacagctgccagcgcaagaccacgctgaataactacaacaaaaagtttaccgacgcgctggagatcatggccgagaactacaaatttaaagagaacgaaatcgcgtgtctggaatttaagcgcgccgcgagtctgctgaaatatctgccgttcccggttaccagcatgaaagacatccaaggtctgccgtgcattggcgaccaagttcgtgacgtgatcgaggagatcatcgaagagactgagagcagccgtgttaaagaagttctcaatgacgagcgctacaaggcctttaagcagttcaccagcgtgttcggtgtgggcgtgaaaaccagcgaaaagtggtttcgtatgggcctccgtacggttgaagaggcaaaggccagtaagagtctgaagctgagcaagatgcagaaggcgggcttcctgtattacgaggatctggcgagctgcgttagtaaagcggaagccgatgccgttacgctcatcgtgaagaacacggtgcgtacctttctgccggatgcgctggtgaccatcaccggcggtttccgccgtggcaaacctatgggccacgacatcgactttctgatcacgaatccgggcccgaaagaggatgacgagctgctccacaaagtggttgatctgctcaagaagcaaggtctgctgctgtactgcgacatcaaagagagcacgttcgtggaggaacaactgccaagtcgcaaaatcgacgccatggacaacttccagaagtgcttcgccattctcaagctgtaccagccgggcgtggataacagcagctataacacgagtaagaagagtgacatggccgaggttaaggattggaaagcgattcgtgtggatctggtgatcacgccattcgagcagtacgcctatgcgctgctcggttggacgggcagcaaagaatttggtcgcgatctgcgccgctatgcggaggaagagcgcaagatgatcctcgacaaccatggcctctacgaccgcaaaaagcgcatctttctgaaagcgggcagcgaagaagagattttcgcgcatctgggtctggattatgtggagccgtgggaacgcaacgcg

SEQ ID NO: 1318 - protein, 394 aa, synthetic construct
  REGION 1..394: note = Variant of terminal deoxynucleotidyl transferase
MHHHHHHGGSGHPPSNTPEGEVPSVIARKVSQYSCQRKTTLNNYNKKFTDALEIMAENYKFKENEIACLEFKRAASLLKYLPFPVTSMKDIQGLPCIGDQVRDVIEEIIEETESSRVKEVLNDERYKAFKQFTSVFGVGVKTSEKWFRMGLRTVEEAKASKSLKLSKMQKAGFLYYEDLASCVSKAEADAVTLIVKNTVRTFLPDALVTITGGFRRGKPMGHDIDFLITNPGPKEDDELLHKVVDLLKKQGLLLYCDIKESTFVEEQLPSRKIDAMDNFQKCFAILKLYQPGVDNSSYNTSKKSDMAEVKDWKAIRVDLVITPFEQYAYALLGWTGSKEFGRDLRRYAEEERKMILDNHGLYDRKKRIFLKAGSEEEIFAHLGLDYVEPWERNA

SEQ ID NO: 1319 - DNA, 1182 bp, synthetic construct
  misc_feature 1..1182: note = Variant of terminal deoxynucleotidyl transferase
  source 1..1182: mol_type = other DNA
atgcaccatcatcatcatcatggcggtagcggccatccgccgagcaataccccggagggggaggtgccgagcgttatcgcccgcaaggttagtcagtacagctgccagcgcaagaccacgctgaataactacaacaaaaagtttaccgacgcgctggagatcatggccgagaactacaaatttaaagagaacgaaatcgcgtgtctggaatttaagcgcgccgcgagtctgctgaaatatctgccgttcccggttaccagcatgaaagacatccaaggtctgccgtgcattggcgaccaagttcgtgacgtgatcgaggagatcatcgaagagggcgagagcagccgtgttaaagaagttctcaatgacgagcgctacaaggcctttaagcagttcaccagcgtgttcggtgtgggcgtgaaaaccagcgaaaagtggtttcgtatgggcctccgtacggttgaagaggcaaaggccagtaagagtctgaagctgagcaagatgcagaaggcgggcttcctgtattacgaggatctggcgagctgcgttagtaaagcggaagccgatgccgttacgctcatcgtgaagaacacggtgcgtacctttctgccggatgcgctggtgaccatcaccggcggtttccgccgtggcaaacctatgggccacgacatcgactttctgatcacgaatccgggcccgaaagaggatgacgagctgctccacaaagtggttgatctgctcaagaagcaaggtctgctgctgtactgcgacatcaaagagagcacgttcgtggaggaacaactgccaagtcagaaaatcgacgccatggacaacttccagaagtgcttcgccattctcaagctgtaccagccgggcgtggataacagcagctataacacgagtaagaagagtgacatggccgaggttaaggattggaaagcgattcgtgtggatctggtgatcacgccattcgagcagtacgcctatgcgctgctcggttggacgggcagcaaagaatttggtcgcgatctgcgccgctatgcggaggaagagcgcaagatgatcctcgacaaccatggcctctacgaccgcaaaaagcgcatctttctgaaagcgggcagcgaagaagagattttcgcgcatctgggtctggattatgtggagccgtgggaacgcaacgcg

SEQ ID NO: 1320 - protein, 394 aa, synthetic construct
  REGION 1..394: note = Variant of terminal deoxynucleotidyl transferase
MHHHHHHGGSGHPPSNTPEGEVPSVIARKVSQYSCQRKTTLNNYNKKFTDALEIMAENYKFKENEIACLEFKRAASLLKYLPFPVTSMKDIQGLPCIGDQVRDVIEEIIEEGESSRVKEVLNDERYKAFKQFTSVFGVGVKTSEKWFRMGLRTVEEAKASKSLKLSKMQKAGFLYYEDLASCVSKAEADAVTLIVKNTVRTFLPDALVTITGGFRRGKPMGHDIDFLITNPGPKEDDELLHKVVDLLKKQGLLLYCDIKESTFVEEQLPSQKIDAMDNFQKCFAILKLYQPGVDNSSYNTSKKSDMAEVKDWKAIRVDLVITPFEQYAYALLGWTGSKEFGRDLRRYAEEERKMILDNHGLYDRKKRIFLKAGSEEEIFAHLGLDYVEPWERNA

SEQ ID NO: 1321 - DNA, 1182 bp, synthetic construct
  misc_feature 1..1182: note = Variant of terminal deoxynucleotidyl transferase
  source 1..1182: mol_type = other DNA
atgcaccatcatcatcatcatggcggtagcggccatccgccgagcaataccccggagggggaggtgccgagcgttatcgcccgcaaggttagtcagtacagctgccagcgcaagaccacgctgaataactacaacaaaaagtttaccgacgcgctggagatcatggccgagaactacaaatttaaagagaacgaaatcgcgtgtctggaatttaagcgcgccgcgagtctgctgaaatatctgccgttcccggttaccagcatgaaagacatccaaggtctgccgtgcattggcgaccaagttcgtgacgtgatcgaggagatcatcgaagagggcgagagcagccgtgttaaagaaactctcaatgacgagcgctacaaggcctttaagcagttcaccagcgtgttcggtgtgggcgtgaaaaccagcgaaaagtggtttcgtatgggcctccgtacggttgaagaggcaaaggccagtaagagtctgaagctgagcaagatgcagaaggcgggcttcctgtattacgaggatctggcgagctgcgttagtaaagcggaagccgatgccgttacgctcatcgtgaagaacacggtgcgtacctttctgccggatgcgctggtgaccatcaccggcggtttccgccgtggcaaacctatgggccacgacatcgactttctgatcacgaatccgggcccgaaagaggatgacgagctgctccacaaagtggttgatctgctcaagaagcaaggtctgctgctgtactgcgacatcaaagagagcacgttcgtggaggaacaactgccaagtcgcaaaatcgacgccatggacaacttccagaagtgcttcgccattctcaagctgtaccagccgggcgtggataacagcagctataacacgagtaagaagagtgacatggccgaggttaaggattggaaagcgattcgtgtggatctggtgatcacgccattcgagcagtacgcctatgcgctgctcggttggacgggcagcaaagaatttggtcgcgatctgcgccgctatgcggaggaagagcgcaagatgatcctcgacaaccatggcctctacgaccgcaaaaagcgcatctttctgaaagcgggcagcgaagaagagattttcgcgcatctgggtctggattatgtggagccgtgggaacgcaacgcg

SEQ ID NO: 1322 - protein, 394 aa, synthetic construct
  REGION 1..394: note = Variant of terminal deoxynucleotidyl transferase
MHHHHHHGGSGHPPSNTPEGEVPSVIARKVSQYSCQRKTTLNNYNKKFTDALEIMAENYKFKENEIACLEFKRAASLLKYLPFPVTSMKDIQGLPCIGDQVRDVIEEIIEEGESSRVKETLNDERYKAFKQFTSVFGVGVKTSEKWFRMGLRTVEEAKASKSLKLSKMQKAGFLYYEDLASCVSKAEADAVTLIVKNTVRTFLPDALVTITGGFRRGKPMGHDIDFLITNPGPKEDDELLHKVVDLLKKQGLLLYCDIKESTFVEEQLPSRKIDAMDNFQKCFAILKLYQPGVDNSSYNTSKKSDMAEVKDWKAIRVDLVITPFEQYAYALLGWTGSKEFGRDLRRYAEEERKMILDNHGLYDRKKRIFLKAGSEEEIFAHLGLDYVEPWERNA

SEQ ID NO: 1323 - DNA, 1182 bp, synthetic construct
  misc_feature 1..1182: note = Variant of terminal deoxynucleotidyl transferase
  source 1..1182: mol_type = other DNA
atgcaccatcatcatcatcatggcggtagcggccatccgccgagcaataccccggagggggaggtgccgagcgttatcgcccgcaaggttagtcagtacagctgccagcgcaagaccacgctgaataactacaacaaaaagtttaccgacgcgctggagatcatggccgagaactacaaatttaaagagaacgaaatcgcgtgtctggaatttaagcgcgccgcgagtctgctgaaatatctgccgttcccggttaccagcatgaaagacatccaaggtctgccgtgcattggcgaccaagttcgtgacgtgatcgaggagatcatcgaagagggcgagagcagccgtgttaaagaagttctcaatgacgagcgctacaaggcctttaagcagttcaccagcgtgttcggtgtgggcgtgaaaaccagcgaaaagtggtttcgtatgggcctccgtacggttgaagaggcaaaggccagtaagagtctgaagctgagcaagatgcagaaggcgggcttcctgtattacgaggatctggcgagctgcgttagtaaagcggaagccgatgccgttacgctcatcgtgaagaacacggtgcgtacctttctgccggatgcgctggtgaccatcaccggcggtttccgccgtggcaaacctatgggccacgacatcgactttctgatcacgaatccgggcccgaaagaggatgacgagctgctccacaaagtggttgatctgctcaagaagcaaggtctgctgctgtactgcgacatcaaagagagcacgttcgtggaggaacaactgccaagtcgcaaaatcgacgccatggacaacttccagaagtgcttcgccattctcaagctgtaccagccgggcgtggataacagcagctataacacgagtaagaagagtgacatggccgaggttaaggattggaaagcgattcgtgtggatctggtgatcacgccattcgagcagtacgcctatgcgctgctcggttggacgggcagcaaagaatttggtcgcgatctgcgccgctatgcggaggaagagcgcaagatgatcctcgacaaccatgcgctctacgaccgcaaaaagcgcatctttctgaaagcgggcagcgaagaagagattttcgcgcatctgggtctggattatgtggagccgtgggaacgcaacgcg

SEQ ID NO: 1324 - protein, 394 aa, synthetic construct
  REGION 1..394: note = Variant of terminal deoxynucleotidyl transferase
MHHHHHHGGSGHPPSNTPEGEVPSVIARKVSQYSCQRKTTLNNYNKKFTDALEIMAENYKFKENEIACLEFKRAASLLKYLPFPVTSMKDIQGLPCIGDQVRDVIEEIIEEGESSRVKEVLNDERYKAFKQFTSVFGVGVKTSEKWFRMGLRTVEEAKASKSLKLSKMQKAGFLYYEDLASCVSKAEADAVTLIVKNTVRTFLPDALVTITGGFRRGKPMGHDIDFLITNPGPKEDDELLHKVVDLLKKQGLLLYCDIKESTFVEEQLPSRKIDAMDNFQKCFAILKLYQPGVDNSSYNTSKKSDMAEVKDWKAIRVDLVITPFEQYAYALLGWTGSKEFGRDLRRYAEEERKMILDNHALYDRKKRIFLKAGSEEEIFAHLGLDYVEPWERNA

SEQ ID NO: 1325 - DNA, 1182 bp, synthetic construct
  misc_feature 1..1182: note = Variant of terminal deoxynucleotidyl transferase
  source 1..1182: mol_type = other DNA
atgcaccatcatcatcatcatggcggtagcggccatccgccgagcaataccccggagggggaggtgccgagcgttatcgcccgcaaggttagtcagtacagctgccagcgcaagaccacgctgaataactacaacaaaaagtttaccgacgcgctggagatcatggccgagaactacaaatttaaagagaacgaaatcgcgtgtctggaatttaagcgcgccgcgagtctgctgaaatatctgccgttcccggttaccagcatgaaagacatccaaggtctgccgtgcattggcgaccaagttcgtgacgtgatcgaggagatcatcgaagagggcgagagcagccgtgttaaagaagttctcaatgacgagcgctacaaggcctttaagcagttcaccagcgtgttcggtgtgggcgtgaaaaccagcgaaaagtggtttcgtatgggcctccgtacggttgaagaggcaaaggccagtaagagtctgaagctgagcaagatgcagaaggcgggcttcctgtattacgaggatctggcgagctgcgttagtaaagcggaagccgatgccgttacgctcatcgtgaagaacacggtgcgtacctttctgccggatgcgctggtgaccatcaccggcggtttccgccgtggcaaacctatgggccacgacatcgactttctgatcacgaatccgggcccgaaagaggatgacgagctgctccacaaagtggttgatctgctcaagaagcaaggtctgctgctgtactgcgacatcaaagagagcacgttcgtggaggaacaactgccaacgcgcaaaatcgacgccatggacaacttccagaagtgcttcgccattctcaagctgtaccagccgggcgtggataacagcagctataacacgagtaagaagagtgacatggccgaggttaaggattggaaagcgattcgtgtggatctggtgatcacgccattcgagcagtacgcctatgcgctgctcggttggacgggcagcaaagaatttggtcgcgatctgcgccgctatgcggaggaagagcgcaagatgatcctcgacaaccatggcctctacgaccgcaaaaagcgcatctttctgaaagcgggcagcgaagaagagattttcgcgcatctgggtctggattatgtggagccgtgggaacgcaacgcg

SEQ ID NO: 1326 - protein, 394 aa, synthetic construct
  REGION 1..394: note = Variant of terminal deoxynucleotidyl transferase
MHHHHHHGGSGHPPSNTPEGEVPSVIARKVSQYSCQRKTTLNNYNKKFTDALEIMAENYKFKENEIACLEFKRAASLLKYLPFPVTSMKDIQGLPCIGDQVRDVIEEIIEEGESSRVKEVLNDERYKAFKQFTSVFGVGVKTSEKWFRMGLRTVEEAKASKSLKLSKMQKAGFLYYEDLASCVSKAEADAVTLIVKNTVRTFLPDALVTITGGFRRGKPMGHDIDFLITNPGPKEDDELLHKVVDLLKKQGLLLYCDIKESTFVEEQLPTRKIDAMDNFQKCFAILKLYQPGVDNSSYNTSKKSDMAEVKDWKAIRVDLVITPFEQYAYALLGWTGSKEFGRDLRRYAEEERKMILDNHGLYDRKKRIFLKAGSEEEIFAHLGLDYVEPWERNA

SEQ ID NO: 1327 - DNA, 1182 bp, synthetic construct
  misc_feature 1..1182: note = Variant of terminal deoxynucleotidyl transferase
  source 1..1182: mol_type = other DNA
atgcaccatcatcatcatcatggcggtagcggccatccgccgagcaataccccggagggggaggtgccgagcgttatcgcccgcaaggttagtcagtacagctgccagcgcaagaccacgctgaataactacaacaaaaagtttaccgacgcgctggagatcatggccgagaactacaaatttaaagagaacgaaatcgcgtgtctggaatttaagcgcgccgcgagtctgctgaaatatctgccgttcccggttaccagcatgaaagacatccaaggtctgccgtgcattggcgaccaagttcgtgacgtgatcgaggagatcatcgaagagggcgagagcagccgtgttaaagaagttctcaatgacgagcgctacaaggcctttaagcagttcaccagcgtgttcggtgtgggcgtgaaaaccagcgaaaagtggtttcgtatgggcctccgtacggttgaagaggcaaaggccagtaagagtctgaagctgagcaagatgcagaaggcgggcttcctgtattacgaggatctggcgagctgcgttagtaaagcggaagccgatgccgttacgctcatcgtgaagaacacggtgcgtacctttctgccggatgcgctggtgaccatcaccggcggtttccgccgtggcaaacctatgggccacgacatcgactttctgatcacgaatccgggcccgaaagaggatgacgagctgctccacaaagtggttgatctgctcaagaagcaaggtctgctgctgtactgcgacatcaaagagagcacgttcgtggaggaacaactgccaagtcgcaaaatcgacgccatggacaacttccagaagtgcttcgccattctcaagctgtaccagccgggcgtggataacagcagctataacacgagtaagaagagtgacatggccgaggttaaggattggaaagcgattcgtgtggatctggtgatcacgccattcgagcagtacgcctatgcgctgctcggttggacgggcagcaaagaatttggtcgcgatctgcgccgctatgcggaggaagagcgcaagatgatcctcgacaaccatggcctctacgaccgcaaaaagcgcatctttctgaaagcgggcagcgaagaagagtgtttcgcgcatctgggtctggattatgtggagccgtgggaacgcaacgcg

SEQ ID NO: 1328 - protein, 394 aa, synthetic construct
  REGION 1..394: note = Variant of terminal deoxynucleotidyl transferase
MHHHHHHGGSGHPPSNTPEGEVPSVIARKVSQYSCQRKTTLNNYNKKFTDALEIMAENYKFKENEIACLEFKRAASLLKYLPFPVTSMKDIQGLPCIGDQVRDVIEEIIEEGESSRVKEVLNDERYKAFKQFTSVFGVGVKTSEKWFRMGLRTVEEAKASKSLKLSKMQKAGFLYYEDLASCVSKAEADAVTLIVKNTVRTFLPDALVTITGGFRRGKPMGHDIDFLITNPGPKEDDELLHKVVDLLKKQGLLLYCDIKESTFVEEQLPSRKIDAMDNFQKCFAILKLYQPGVDNSSYNTSKKSDMAEVKDWKAIRVDLVITPFEQYAYALLGWTGSKEFGRDLRRYAEEERKMILDNHGLYDRKKRIFLKAGSEEECFAHLGLDYVEPWERNA

SEQ ID NO: 1329 - DNA, 1182 bp, synthetic construct
  misc_feature 1..1182: note = Variant of terminal deoxynucleotidyl transferase
  source 1..1182: mol_type = other DNA
atgcaccatcatcatcatcatggcggtagcggccatccgccgagcaataccccggagggggaggtgccgagcgttatcgcccgcaaggttagtcagtacagctgccagcgcaagaccacgctgaataactacaacaaaaagtttaccgacgcgctggagatcatggccgagaactacaaatttaaagagaacgaaatcgcgtgtctggaatttaagcgcgccgcgagtctgctgaaatatctgccgttcccggttaccagcatgaaagacatccaaggtctgccgtgcattggcgaccaagttcgtgacgtgatcgaggagatcatcgaagagggcgagagcagccgtgttaaagaagttctcaatgacgagcgctacaaggcctttaagcagttcaccagcgtgttcggtgtgggcgtgaaaaccagcgaaaagtggtttcgtatgggcctccgtacggttgaagaggcaaaggccagtaagagtctgaagctgagcaagatgcagaaggcgggcttcctgtattacgaggatctggcgagccgggttagtaaagcggaagccgatgccgttacgctcatcgtgaagaacacggtgcgtacctttctgccggatgcgctggtgaccatcaccggcggtttccgccgtggcaaacctatgggccacgacatcgactttctgatcacgaatccgggcccgaaagaggatgacgagctgctccacaaagtggttgatctgctcaagaagcaaggtctgctgctgtactgcgacatcaaagagagcacgttcgtggaggaacaactgccaagtcgcaaaatcgacgccatggacaacttccagaagtgcttcgccattctcaagctgtaccagccgggcgtggataacagcagctataacacgagtaagaagagtgacatggccgaggttaaggattggaaagcgattcgtgtggatctggtgatcacgccattcgagcagtacgcctatgcgctgctcggttggacgggcagcaaagaatttggtcgcgatctgcgccgctatgcggaggaagagcgcaagatgatcctcgacaaccatggcctctacgaccgcaaaaagcgcatctttctgaaagcgggcagcgaagaagagattttcgcgcatctgggtctggattatgtggagccgtgggaacgcaacgcg

SEQ ID NO: 1330 - protein, 394 aa, synthetic construct
  REGION 1..394: note = Variant of terminal deoxynucleotidyl transferase
MHHHHHHGGSGHPPSNTPEGEVPSVIARKVSQYSCQRKTTLNNYNKKFTDALEIMAENYKFKENEIACLEFKRAASLLKYLPFPVTSMKDIQGLPCIGDQVRDVIEEIIEEGESSRVKEVLNDERYKAFKQFTSVFGVGVKTSEKWFRMGLRTVEEAKASKSLKLSKMQKAGFLYYEDLASRVSKAEADAVTLIVKNTVRTFLPDALVTITGGFRRGKPMGHDIDFLITNPGPKEDDELLHKVVDLLKKQGLLLYCDIKESTFVEEQLPSRKIDAMDNFQKCFAILKLYQPGVDNSSYNTSKKSDMAEVKDWKAIRVDLVITPFEQYAYALLGWTGSKEFGRDLRRYAEEERKMILDNHGLYDRKKRIFLKAGSEEEIFAHLGLDYVEPWERNA

SEQ ID NO: 1331 - DNA, 1182 bp, synthetic construct
  misc_feature 1..1182: note = Variant of terminal deoxynucleotidyl transferase
  source 1..1182: mol_type = other DNA
atgcaccatcatcatcatcatggcggtagcggccatccgccgagcaataccccggagggggaggtggtgagcgttatcgcccgcaaggttagtcagtacagctgccagcgcaagaccacgctgaataactacaacaaaaagtttaccgacgcgctggagatcatggccgagaactacaaatttaaagagaacgaaatcgcgtgtctggaatttaagcgcgccgcgagtctgctgaaatatctgccgttcccggttaccagcatgaaagacatccaaggtctgccgtgcattggcgaccaagttcgtgacgtgatcgaggagatcatcgaagagggcgagagcagccgtgttaaagaagttctcaatgacgagcgctacaaggcctttaagcagttcaccagcgtgttcggtgtgggcgtgaaaaccagcgaaaagtggtttcgtatgggcctccgtacggttgaagaggcaaaggccagtaagagtctgaagctgagcaagatgcagaaggcgggcttcctgtattacgaggatctggcgagctgcgttagtaaagcggaagccgatgccgttacgctcatcgtgaagaacacggtgcgtacctttctgccggatgcgctggtgaccatcaccggcggtttccgccgtggcaaacctatgggccacgacatcgactttctgatcacgaatccgggcccgaaagaggatgacgagctgctccacaaagtggttgatctgctcaagaagcaaggtctgctgctgtactgcgacatcaaagagagcacgttcgtggaggaacaactgccaagtcgcaaaatcgacgccatggacaacttccagaagtgcttcgccattctcaagctgtaccagccgggcgtggataacagcagctataacacgagtaagaagagtgacatggccgaggttaaggattggaaagcgattcgtgtggatctggtgatcacgccattcgagcagtacgcctatgcgctgctcggttggacgggcagcaaagaatttggtcgcgatctgcgccgctatgcggaggaagagcgcaagatgatcctcgacaaccatggcctctacgaccgcaaaaagcgcatctttctgaaagcgggcagcgaagaagagattttcgcgcatctgggtctggattatgtggagccgtgggaacgcaacgcg

SEQ ID NO: 1332 - protein, 394 aa, synthetic construct
  REGION 1..394: note = Variant of terminal deoxynucleotidyl transferase
MHHHHHHGGSGHPPSNTPEGEVVSVIARKVSQYSCQRKTTLNNYNKKFTDALEIMAENYKFKENEIACLEFKRAASLLKYLPFPVTSMKDIQGLPCIGDQVRDVIEEIIEEGESSRVKEVLNDERYKAFKQFTSVFGVGVKTSEKWFRMGLRTVEEAKASKSLKLSKMQKAGFLYYEDLASCVSKAEADAVTLIVKNTVRTFLPDALVTITGGFRRGKPMGHDIDFLITNPGPKEDDELLHKVVDLLKKQGLLLYCDIKESTFVEEQLPSRKIDAMDNFQKCFAILKLYQPGVDNSSYNTSKKSDMAEVKDWKAIRVDLVITPFEQYAYALLGWTGSKEFGRDLRRYAEEERKMILDNHGLYDRKKRIFLKAGSEEEIFAHLGLDYVEPWERNA

SEQ ID NO: 1333 - DNA, 1182 bp, synthetic construct
  misc_feature 1..1182: note = Variant of terminal deoxynucleotidyl transferase
  source 1..1182: mol_type = other DNA
atgcaccatcatcatcatcatggcggtagcggccatccgccgagcaataccccggagggggaggtgccgagcgttatcgcccgcaaggttagtcagtacagctgccagcgcaagaccacgctgaataactacaacaaaaagtttaccgacgcgctggagatcatggccgagaactacaaatttaaagagaacgaaatcgcgtgtctggaatttaagcgcgccgcgagtctgctgaaatatctgccgttcccggttaccagcatgaaagacatccaaggtctgccgtgcattggcgaccaagttcgtgacgtgatcgaggagatcatcgaagagggcgagagcagccgtgttaaagaagttctcaatgacgagcgctacaaggcctttaagcagttcaccagcgtgttcggtgtgggcgtgaaaaccagcgaaaagtggtttcgtatgggcctccgtacggttgaagaggcaaaggccagtaagagtctgaagctgagcaagatgcagaaggcgggcttcctgtattacgaggatctggcgagctgcgttagtaaagcggaagccgatgccgttacgctcatcgtgaagaacacggtgcgtacctttctgccggatgcgctggtgaccatcaccggcggtttccgccgtggcaaacctatgggccacgacatcgactttctgatcacgaatccgggcccgaaagaggatgacgagctgctccacaaagtggttgatctgctcaagaagcaaggtctgctgctgtactgcgacatcaaagagagcacgttcgtggaggaacaactgccaagtcgcaaaatcgacgccatggacaacttccagaagtgcttcgccattctcaagctgtaccagccgggcgtggataacagcagctataacacgagtaagaagagtgacatggccgaggttaaggattggaaagcgattcgtgtggatctggtgatcacgccattcgagcagtacgcctatgcgctgctcggttggacgggcagcaaagaatttggtcgcgatctgcgccgctatgcggaggaagagcgcaagatgatcctcgacaaccatggcctctacgaccgcaaaaagcgcatctttctgaaagggggcagcgaagaagagattttcgcgcatctgggtctggattatgtggagccgtgggaacgcaacgcg

SEQ ID NO: 1334 - protein, 394 aa, synthetic construct
  REGION 1..394: note = Variant of terminal deoxynucleotidyl transferase
MHHHHHHGGSGHPPSNTPEGEVPSVIARKVSQYSCQRKTTLNNYNKKFTDALEIMAENYKFKENEIACLEFKRAASLLKYLPFPVTSMKDIQGLPCIGDQVRDVIEEIIEEGESSRVKEVLNDERYKAFKQFTSVFGVGVKTSEKWFRMGLRTVEEAKASKSLKLSKMQKAGFLYYEDLASCVSKAEADAVTLIVKNTVRTFLPDALVTITGGFRRGKPMGHDIDFLITNPGPKEDDELLHKVVDLLKKQGLLLYCDIKESTFVEEQLPSRKIDAMDNFQKCFAILKLYQPGVDNSSYNTSKKSDMAEVKDWKAIRVDLVITPFEQYAYALLGWTGSKEFGRDLRRYAEEERKMILDNHGLYDRKKRIFLKGGSEEEIFAHLGLDYVEPWERNA

SEQ ID NO: 1335 - DNA, 1182 bp, synthetic construct
  misc_feature 1..1182: note = Variant of terminal deoxynucleotidyl transferase
  source 1..1182: mol_type = other DNA
atgcaccatcatcatcatcatggcggtagcggccatccgccgagcaataccccggagggggaggtgccgagcgttatcgcccgcaaggttagtcagtacagctgccagcgcaagaccacgctgaataactacaacaaaaagtttaccgacgcgctggagatcatggccgagaactacaaatttaaagagaacgaaatcgcgtgtctggaatttaagcgcgccgcgagtctgctgaaatatctgccgttcccggttaccagcatgaaagacatccaaggtctgccgtgcattggcgaccaagttcgtgacgtgatcgaggagatcatcgaagagggcgagagcagccgtgttaaagaagttctcaatgacgagcgctacaaggcctttaagcagttcaccagcgtgttcggtgtgggcgtgaaaaccagcgaaaagtggtttcgtatgggcctccgtacggttgaagaggcaaaggccagtaagagtctgaagctgagcaagatgcagaaggcgggcttcctgtattacgaggatctggcgagctgcgttagtaaagcggaagccgatgccgttacgctcatcgtgaagaacacggtgcgtacctttctgccggatgcgctggtgaccatcaccggcggtttccgccgtggcaaacctatgggccacgacatcgactttctgatcacgaatccgggcccgaaagaggatgacgagctgctccacaaagtggttgatctgctcaagaagcaaggtctgctgctgtactgcgacatcaaagagagcacgttcgtggaggaacaactggctagtcgcaaaatcgacgccatggacaacttccagaagtgcttcgccattctcaagctgtaccagccgggcgtggataacagcagctataacacgagtaagaagagtgacatggccgaggttaaggattggaaagcgattcgtgtggatctggtgatcacgccattcgagcagtacgcctatgcgctgctcggttggacgggcagcaaagaatttggtcgcgatctgcgccgctatgcggaggaagagcgcaagatgatcctcgacaaccatggcctctacgaccgcaaaaagcgcatctttctgaaagcgggcagcgaagaagagattttcgcgcatctgggtctggattatgtggagccgtgggaacgcaacgcg

SEQ ID NO: 1336 - protein, 394 aa, synthetic construct
  REGION 1..394: note = Variant of terminal deoxynucleotidyl transferase
MHHHHHHGGSGHPPSNTPEGEVPSVIARKVSQYSCQRKTTLNNYNKKFTDALEIMAENYKFKENEIACLEFKRAASLLKYLPFPVTSMKDIQGLPCIGDQVRDVIEEIIEEGESSRVKEVLNDERYKAFKQFTSVFGVGVKTSEKWFRMGLRTVEEAKASKSLKLSKMQKAGFLYYEDLASCVSKAEADAVTLIVKNTVRTFLPDALVTITGGFRRGKPMGHDIDFLITNPGPKEDDELLHKVVDLLKKQGLLLYCDIKESTFVEEQLASRKIDAMDNFQKCFAILKLYQPGVDNSSYNTSKKSDMAEVKDWKAIRVDLVITPFEQYAYALLGWTGSKEFGRDLRRYAEEERKMILDNHGLYDRKKRIFLKAGSEEEIFAHLGLDYVEPWERNA

SEQ ID NO: 1337 - DNA, 1182 bp, synthetic construct
  misc_feature 1..1182: note = Variant of terminal deoxynucleotidyl transferase
  source 1..1182: mol_type = other DNA
atgcaccatcatcatcatcatggcggtagcggccatccgccgagcaataccccggagggggaggtgccgagcgttatcgcccgcaaggttagtcagtacagctgccagcgcaagaccacgctgaataactacaacaaaaagtttaccgacgcgctggagatcatggccgagaactacaaatttaaagagaacgaaatcgcgtgtctggaatttaagcgcgccgcgagtctgctgaaatatctgccgttcccggttaccagcatgaaagacatccaaggtctgccgtgcattggcgaccaagttcgtgacgtgatcgaggagatcatcgaagagggcgagagcagccgtgttaaagaagttctcaatgacgagcgctacaaggcctttaagcagttcaccagcgtgttcggtgtgggcgtgaaaaccagcgaaaagtggtttcgtatgggcctccgtacggttgaagaggcaaaggccagtaagagtctgaagctgagcaagatgcagaaggcgggcttcctgtattacgaggatctggcgagctgcgttagtaaagaggaagccgatgccgttacgctcatcgtgaagaacacggtgcgtacctttctgccggatgcgctggtgaccatcaccggcggtttccgccgtggcaaacctatgggccacgacatcgactttctgatcacgaatccgggcccgaaagaggatgacgagctgctccacaaagtggttgatctgctcaagaagcaaggtctgctgctgtactgcgacatcaaagagagcacgttcgtggaggaacaactgccaagtcgcaaaatcgacgccatggacaacttccagaagtgcttcgccattctcaagctgtaccagccgggcgtggataacagcagctataacacgagtaagaagagtgacatggccgaggttaaggattggaaagcgattcgtgtggatctggtgatcacgccattcgagcagtacgcctatgcgctgctcggttggacgggcagcaaagaatttggtcgcgatctgcgccgctatgcggaggaagagcgcaagatgatcctcgacaaccatggcctctacgaccgcaaaaagcgcatctttctgaaagcgggcagcgaagaagagattttcgcgcatctgggtctggattatgtggagccgtgggaacgcaacgcg

SEQ ID NO: 1338 - protein, 394 aa, synthetic construct
  REGION 1..394: note = Variant of terminal deoxynucleotidyl transferase
MHHHHHHGGSGHPPSNTPEGEVPSVIARKVSQYSCQRKTTLNNYNKKFTDALEIMAENYKFKENEIACLEFKRAASLLKYLPFPVTSMKDIQGLPCIGDQVRDVIEEIIEEGESSRVKEVLNDERYKAFKQFTSVFGVGVKTSEKWFRMGLRTVEEAKASKSLKLSKMQKAGFLYYEDLASCVSKEEADAVTLIVKNTVRTFLPDALVTITGGFRRGKPMGHDIDFLITNPGPKEDDELLHKVVDLLKKQGLLLYCDIKESTFVEEQLPSRKIDAMDNFQKCFAILKLYQPGVDNSSYNTSKKSDMAEVKDWKAIRVDLVITPFEQYAYALLGWTGSKEFGRDLRRYAEEERKMILDNHGLYDRKKRIFLKAGSEEEIFAHLGLDYVEPWERNA

SEQ ID NO: 1339 - DNA, 1182 bp, synthetic construct
  misc_feature 1..1182: note = Variant of terminal deoxynucleotidyl transferase
  source 1..1182: mol_type = other DNA
atgcaccatcatcatcatcatggcggtagcggccatccgccgagcaataccccggagggggaggtgccgagcgttatcgcccgcaaggttagtcagtacagctgccagcgcaagaccacgctgaataactacaacaaaaagtttaccgacgcgctggagatcatggccgagaactacaaatttaaagagaacgaaatcgcgtgtctggaatttaagcgcgccgcgagtctgctgaaatatctgccgttcccggttaccagcatgaaagacatccaaggtctgccgtgcattggcgaccaagttcgtgacgtgatcgaggagatcatcgaagagggcgagagcagccgtgttaaagaagttctcaatgacgagcgctacaaggcctttaagcagttcaccagcgtgttcggtgtgggcgtgaaaaccagcgaaaagtggtttcgtatgggcctccgtacggttgaagaggcaaaggccagtaagagtctgaagctgagcaagatgcagaaggcgggcttcctgtattacgaggatctggcgagctgcgttagtaaagcggaagccgatgccgttacgctcatcgtgaagaacacggtgcgtacctttctgccggatgcgctggtgaccatcaccggcggtttccgccgtggcaaacctatgggccacgacatcgactttctgatcacgaatccgggcccgaaagaggatgacgagctgctccacaaagtggttgatctgctcaagaagcaaggtctgctgctgtactgcgacatcaaagagagcacgttcgtggaggaacaactgccaagtcgcaaaatcgacgccatggacaacttccagaagtgcttcgccattctcaagctgtaccagccgggcggggataacagcagctataacacgagtaagaagagtgacatggccgaggttaaggattggaaagcgattcgtgtggatctggtgatcacgccattcgagcagtacgcctatgcgctgctcggttggacgggcagcaaagaatttggtcgcgatctgcgccgctatgcggaggaagagcgcaagatgatcctcgacaaccatggcctctacgaccgcaaaaagcgcatctttctgaaagcgggcagcgaagaagagattttcgcgcatctgggtctggattatgtggagccgtgggaacgcaacgcg

SEQ ID NO: 1340 - protein, 394 aa, synthetic construct
  REGION 1..394: note = Variant of terminal deoxynucleotidyl transferase
MHHHHHHGGSGHPPSNTPEGEVPSVIARKVSQYSCQRKTTLNNYNKKFTDALEIMAENYKFKENEIACLEFKRAASLLKYLPFPVTSMKDIQGLPCIGDQVRDVIEEIIEEGESSRVKEVLNDERYKAFKQFTSVFGVGVKTSEKWFRMGLRTVEEAKASKSLKLSKMQKAGFLYYEDLASCVSKAEADAVTLIVKNTVRTFLPDALVTITGGFRRGKPMGHDIDFLITNPGPKEDDELLHKVVDLLKKQGLLLYCDIKESTFVEEQLPSRKIDAMDNFQKCFAILKLYQPGGDNSSYNTSKKSDMAEVKDWKAIRVDLVITPFEQYAYALLGWTGSKEFGRDLRRYAEEERKMILDNHGLYDRKKRIFLKAGSEEEIFAHLGLDYVEPWERNA

SEQ ID NO: 1341 - DNA, 1182 bp, synthetic construct
  misc_feature 1..1182: note = Variant of terminal deoxynucleotidyl transferase
  source 1..1182: mol_type = other DNA
atgcaccatcatcatcatcatggcggtagcggccatccgccgagcaataccccggagggggaggtgccgagcgttatcgcccgcaaggttagtcagtacagctgccagcgcaagaccacgctgaataactacaacaaaaagtttaccgacgcgctggagatcatggccgagaactacaaatttaaagagaacgaaatcgcgtgtctggaatttaagcgcgccgcgagtctgctgaaatatctgccgttcccggttaccagcatgaaagacatccaaggtctgccgtgcattggcgaccaagttcgtgacgtgatcgaggagatcatcgaagagggcgagagcagccgtgttaaagaagttctcaatgacgagcgctacaaggcctttaagcagttcaccagcgtgttcggtgtgggcgtgaaaaccagcgaaaagtggtttcgtatgggcctccgtacggttgaagaggcaaaggccagtaagagtctgaagctgagcaagatgcagaaggcgggcttcctgtattacgaggatctggcgagcgcggttagtaaagcggaagccgatgccgttacgctcatcgtgaagaacacggtgcgtacctttctgccggatgcgctggtgaccatcaccggcggtttccgccgtggcaaacctatgggccacgacatcgactttctgatcacgaatccgggcccgaaagaggatgacgagctgctccacaaagtggttgatctgctcaagaagcaaggtctgctgctgtactgcgacatcaaagagagcacgttcgtggaggaacaactgccaagtcgcaaaatcgacgccatggacaacttccagaagtgcttcgccattctcaagctgtaccagccgggcgtggataacagcagctataacacgagtaagaagagtgacatggccgaggttaaggattggaaagcgattcgtgtggatctggtgatcacgccattcgagcagtacgcctatgcgctgctcggttggacgggcagcaaagaatttggtcgcgatctgcgccgctatgcggaggaagagcgcaagatgatcctcgacaaccatggcctctacgaccgcaaaaagcgcatctttctgaaagcgggcagcgaagaagagattttcgcgcatctgggtctggattatgtggagccgtgggaacgcaacgcg

SEQ ID NO: 1342 - protein, 394 aa, synthetic construct
  REGION 1..394: note = Variant of terminal deoxynucleotidyl transferase
MHHHHHHGGSGHPPSNTPEGEVPSVIARKVSQYSCQRKTTLNNYNKKFTDALEIMAENYKFKENEIACLEFKRAASLLKYLPFPVTSMKDIQGLPCIGDQVRDVIEEIIEEGESSRVKEVLNDERYKAFKQFTSVFGVGVKTSEKWFRMGLRTVEEAKASKSLKLSKMQKAGFLYYEDLASAVSKAEADAVTLIVKNTVRTFLPDALVTITGGFRRGKPMGHDIDFLITNPGPKEDDELLHKVVDLLKKQGLLLYCDIKESTFVEEQLPSRKIDAMDNFQKCFAILKLYQPGVDNSSYNTSKKSDMAEVKDWKAIRVDLVITPFEQYAYALLGWTGSKEFGRDLRRYAEEERKMILDNHGLYDRKKRIFLKAGSEEEIFAHLGLDYVEPWERNA

SEQ ID NO: 1343 - DNA, 1182 bp, synthetic construct
  misc_feature 1..1182: note = Variant of terminal deoxynucleotidyl transferase
  source 1..1182: mol_type = other DNA
atgcaccatcatcatcatcatggcggtagcggccatccgccgagcaataccccggagggggaggtgccgagcgttatcgcccgcaaggttagtcagtacagctgccagcgcaagaccacgctgaataactacaacaaaaagtttaccgacgcgctggagatcatggccgagaactacaaatttaaagagaacctgatcgcgtgtctggaatttaagcgcgccgcgagtctgctgaaatatctgccgttcccggttaccagcatgaaagacatccaaggtctgccgtgcattggcgaccaagttcgtgacgtgatcgaggagatcatcgaagagggcgagagcagccgtgttaaagaagttctcaatgacgagcgctacaaggcctttaagcagttcaccagcgtgttcggtgtgggcgtgaaaaccagcgaaaagtggtttcgtatgggcctccgtacggttgaagaggcaaaggccagtaagagtctgaagctgagcaagatgcagaaggcgggcttcctgtattacgaggatctggcgagctgcgttagtaaagcggaagccgatgccgttacgctcatcgtgaagaacacggtgcgtacctttctgccggatgcgctggtgaccatcaccggcggtttccgccgtggcaaacctatgggccacgacatcgactttctgatcacgaatccgggcccgaaagaggatgacgagctgctccacaaagtggttgatctgctcaagaagcaaggtctgctgctgtactgcgacatcaaagagagcacgttcgtggaggaacaactgccaagtcgcaaaatcgacgccatggacaacttccagaagtgcttcgccattctcaagctgtaccagccgggcgtggataacagcagctataacacgagtaagaagagtgacatggccgaggttaaggattggaaagcgattcgtgtggatctggtgatcacgccattcgagcagtacgcctatgcgctgctcggttggacgggcagcaaagaatttggtcgcgatctgcgccgctatgcggaggaagagcgcaagatgatcctcgacaaccatggcctctacgaccgcaaaaagcgcatctttctgaaagcgggcagcgaagaagagattttcgcgcatctgggtctggattatgtggagccgtgggaacgcaacgcg

SEQ ID NO: 1344 - protein, 394 aa, synthetic construct
  REGION 1..394: note = Variant of terminal deoxynucleotidyl transferase
MHHHHHHGGSGHPPSNTPEGEVPSVIARKVSQYSCQRKTTLNNYNKKFTDALEIMAENYKFKENLIACLEFKRAASLLKYLPFPVTSMKDIQGLPCIGDQVRDVIEEIIEEGESSRVKEVLNDERYKAFKQFTSVFGVGVKTSEKWFRMGLRTVEEAKASKSLKLSKMQKAGFLYYEDLASCVSKAEADAVTLIVKNTVRTFLPDALVTITGGFRRGKPMGHDIDFLITNPGPKEDDELLHKVVDLLKKQGLLLYCDIKESTFVEEQLPSRKIDAMDNFQKCFAILKLYQPGVDNSSYNTSKKSDMAEVKDWKAIRVDLVITPFEQYAYALLGWTGSKEFGRDLRRYAEEERKMILDNHGLYDRKKRIFLKAGSEEEIFAHLGLDYVEPWERNA

SEQ ID NO: 1345 - DNA, 1182 bp, synthetic construct
  misc_feature 1..1182: note = Variant of terminal deoxynucleotidyl transferase
  source 1..1182: mol_type = other DNA
atgcaccatcatcatcatcatggcggtagcggccatccgccgagcaataccccggagggggaggtgccgagcgttatcgcccgcaaggttagtcagtacagctgccagcgcaagaccacgctgaataactacaacaaaaagtttaccgacgcgctggagatcatggccgagaactacaaatttaaagagaacctgatcgcgtgtctggaagccaagcgcgccgcgagtattctgaaatatctgccgttcccggttaccagcatgaaagacatccaaggtctgccgtgcattggcgaccaagttcgtgacgtgatcgaggagatcatcgaagagggcgagagcagccgtgttaaagaagttctcaatgacgagcgctacaaggcctttaagcagttcaccagcgtgttcggtgtgggcgtgaaaaccagcgaaaagtggtttcgtatgggcctccgtacggttgaagaggcaaaggccagtaagagtctgaagctgagcaagatgcagaaggcgggcttcctgtattacgaggatctggcgagctgcgttagtaaagcggaagccgatgccgttacgctcatcgtgaagaacacggtgcgtacctttctgccggatgcgctggtgaccatcaccggcggtttccgccgtggcaaacctatgggccacgacatcgactttctgatcacgaatccgggcccgaaagaggatgacgagctgctccacaaagtggttgatctgctcaagaagcaaggtctgctgctgtactgcgacatcaaagagagcacgttcgtggaggaacaactgccaagtcgcaaaatcgacgccatggacaacttccagaagtgcttcgccattctcaagctgtaccagccgggcgtggataacagcagctataacacgagtaagaagagtgacatggccgaggttaaggattggaaagcgattcgtgtggatctggtgatcacgccattcgagcagtacgcctatgcgctgctcggttggacgggcagcaaagaatttggtcgcgatctgcgccgctatgcggaggaagagcgcggcatgatcctcgacaaccatggcctctacgaccgcaaaaagcgcatctttctgaaagcgggcagcgaagaagagattttcgcgcatctgggtctggattatgtggagccgtgggaacgcaacgcg

SEQ ID NO: 1346 - protein, 394 aa, synthetic construct
  REGION 1..394: note = Variant of terminal deoxynucleotidyl transferase
MHHHHHHGGSGHPPSNTPEGEVPSVIARKVSQYSCQRKTTLNNYNKKFTDALEIMAENYKFKENLIACLEAKRAASILKYLPFPVTSMKDIQGLPCIGDQVRDVIEEIIEEGESSRVKEVLNDERYKAFKQFTSVFGVGVKTSEKWFRMGLRTVEEAKASKSLKLSKMQKAGFLYYEDLASCVSKAEADAVTLIVKNTVRTFLPDALVTITGGFRRGKPMGHDIDFLITNPGPKEDDELLHKVVDLLKKQGLLLYCDIKESTFVEEQLPSRKIDAMDNFQKCFAILKLYQPGVDNSSYNTSKKSDMAEVKDWKAIRVDLVITPFEQYAYALLGWTGSKEFGRDLRRYAEEERGMILDNHGLYDRKKRIFLKAGSEEEIFAHLGLDYVEPWERNA

SEQ ID NO: 1347 - DNA, 1182 bp, synthetic construct
  misc_feature 1..1182: note = Variant of terminal deoxynucleotidyl transferase
  source 1..1182: mol_type = other DNA
atgcaccatcatcatcatcatggcggtagcggccatccgccgagcaataccccggagggggaggtgccgagcgttatcgcccgcaaggttagtcagtacagctgccagcgcaagaccacgctgaataactacaacaaaaagtttaccgacgcgctggagatcatggccgagaactacaaatttaaagagaacctgatcgcgtgtctggaatttaagcgcgccgcgagtattctgaaatatctgccgttcccggttaccagcatgaaagacatccaaggtctgccgtgcattggcgaccaagttcgtgacgtgatcgaggagatcatcgaagagggcgagagcagccgtgttaaagaagttctcaatgacgagcgctacaaggcctttaagcagttcactagcgtgttcggtgtgggcgtgaaaaccagcgaaaagtggtttcgtatgggcctccgtacggttgaagaggcaaaggccagtaagagtctgaagctgagcaagatgcagaaggcgggcttcctgtattacgaggatctggcgagctgcgttagtaaagcggaagccgatgccgttacgctcatcgtgaagaacacggtgcgtacctttctgccggatgcgctggtgaccatcaccggcggtttccgccgtggcaaacctatgggccacgacatcgactttctgatcacgaatccgggcccgaaagaggatgacgagctgctccacaaagtggttgatctgctcaagaagcaaggtctgctgctgtactgcgacatcaaagagagcacgttcgtggaggaacaactgccaagtcgcaaaatcgacgccatggacaacttccagaagtgcttcgccattctcaagctgtaccagccgggcgtggataacagcagctataacacgagtaagaagagtgacatggccgaggttaaggattggaaagcgattcgtgtggatctggtgatcacgccattcgagcagtacgcctatgcgctgctcggttggacgggcagcaaagaatttggtcgcgatctgcgccgctatgcggaggaagagcgcatgatgatcctcgacaaccatggcctctacgaccgcaaaaagcgcatctttctgaaagcgggcagcgaagaagagattttcgcgcatctgggtctggattatgtggagccgtgggaacgcaacgcg

SEQ ID NO: 1348 - protein, 394 aa, synthetic construct
  REGION 1..394: note = Variant of terminal deoxynucleotidyl transferase
MHHHHHHGGSGHPPSNTPEGEVPSVIARKVSQYSCQRKTTLNNYNKKFTDALEIMAENYKFKENLIACLEFKRAASILKYLPFPVTSMKDIQGLPCIGDQVRDVIEEIIEEGESSRVKEVLNDERYKAFKQFTSVFGVGVKTSEKWFRMGLRTVEEAKASKSLKLSKMQKAGFLYYEDLASCVSKAEADAVTLIVKNTVRTFLPDALVTITGGFRRGKPMGHDIDFLITNPGPKEDDELLHKVVDLLKKQGLLLYCDIKESTFVEEQLPSRKIDAMDNFQKCFAILKLYQPGVDNSSYNTSKKSDMAEVKDWKAIRVDLVITPFEQYAYALLGWTGSKEFGRDLRRYAEEERMMILDNHGLYDRKKRIFLKAGSEEEIFAHLGLDYVEPWERNA

SEQ ID NO: 1349 - DNA, 1182 bp, synthetic construct
  misc_feature 1..1182: note = Variant of terminal deoxynucleotidyl transferase
  source 1..1182: mol_type = other DNA
atgcaccatcatcatcatcatggcggtagcggccatccgccgagcaataccccggagggggaggtgccgagcgttatcgcccgcaaggttagtcagtacagctgccagcgcaagaccacgctgaataactacaacaaaaagtttaccgacgcgctggagatcatggccgagaactacaaatttaaagagaacctgatcgcgtgtctggaatttaagcgcgccgcgagtctgctgaaatatctgccgttcccggttaccagcatgaaagacatccaaggtctgccgtgcattggcgaccaagttcgtgacgtgatcgaggagatcatcgaagagggcgagagcagccgtgttaaagaagttctcaatgacgagcgctacaaggcctttaagcagttcaccagcgtgttcggtgtgggcgtgaaaaccagcgaaaagtggtttcgtatgggcctccgtacggttgaagaggcaaaggccagtaagagtctgaagctgagcaagatgcagaaggcgggcttcctgtattacgaggatctggcgagctgcgttagtaaagcggaagccgatgccgttacgctcatcgtgaagaacacggtgcgtacctttctgccggatgcgctggtgaccatcaccggcggtttccgccgtggcaaacctatgggccacgacatcgactttctgatcacgaatccgggcccgaaagaggatgacgagctgctccacaaagtggttgatctgctcaagaagcaaggtctgctgctgtactgcgacatcaaagagagcacgttcgtggaggaacaactgccaagtcgcaaaatcgacgccatggacaacttccagaagtgcttcgccattctcaagctgtaccagccgggcgtggataacagcagctataacacgagtaagaagagtgacatggccgaggttaaggattggaaagcgattcgtgtggatctggtgatcacgccattcgagcagtacgcctatgcgctgctcggttggacgggcagcaaagaatttggtcgcgatctgcgccgctatgcggaggaagagcgcggcatgatcctcgacaaccatggcctctacgaccgcaaaaagcgcatctttctgaaagcgggcagcgaagaagagattttcgcgcatctgggtctggattatgtggagccgtgggaacgcaacgcg

SEQ ID NO: 1350 - protein, 394 aa, synthetic construct
  REGION 1..394: note = Variant of terminal deoxynucleotidyl transferase
MHHHHHHGGSGHPPSNTPEGEVPSVIARKVSQYSCQRKTTLNNYNKKFTDALEIMAENYKFKENLIACLEFKRAASLLKYLPFPVTSMKDIQGLPCIGDQVRDVIEEIIEEGESSRVKEVLNDERYKAFKQFTSVFGVGVKTSEKWFRMGLRTVEEAKASKSLKLSKMQKAGFLYYEDLASCVSKAEADAVTLIVKNTVRTFLPDALVTITGGFRRGKPMGHDIDFLITNPGPKEDDELLHKVVDLLKKQGLLLYCDIKESTFVEEQLPSRKIDAMDNFQKCFAILKLYQPGVDNSSYNTSKKSDMAEVKDWKAIRVDLVITPFEQYAYALLGWTGSKEFGRDLRRYAEEERGMILDNHGLYDRKKRIFLKAGSEEEIFAHLGLDYVEPWERNA

SEQ ID NO: 1351 - DNA, 1182 bp, synthetic construct
  misc_feature 1..1182: note = Variant of terminal deoxynucleotidyl transferase
  source 1..1182: mol_type = other DNA
atgcaccatcatcatcatcatggcggtagcggccatccgccgagcaataccccggagggggaggtgccgagcgttatcgcccgcaaggttagtcagtacagctgccagcgcaagaccacgctgaataactacaacaaaaagtttaccgacgcgctggagatcatggccgagaactacaaatttaaagagaacctgatcgcgtgtctggaagccaagcgcgccgcgagtctgctgaaatatctgccgttcccggttaccagcatgaaagacatccaaggtctgccgtgcattggcgaccaagttcgtgacgtgatcgaggagatcatcgaagagggcgagagcagccgtgttaaagaagttctcaatgacgagcgctacaaggcctttaagcagttcaccagcgtgttcggtgtgggcgtgaaaaccagcgaaaagtggtttcgtatgggcctccgtacggttgaagaggcaaaggccagtaagagtctgaagctgagcaagatgcagaaggcgggcttcctgtattacgaggatctggcgagctgcgttagtaaagcggaagccgatgccgttacgctcatcgtgaagaacacggtgcgtacctttctgccggatgcgctggtgaccatcaccggcggtttccgccgtggcaaacctatgggccacgacatcgactttctgatcacgaatccgggcccgaaagaggatgacgagctgctccacaaagtggttgatctgctcaagaagcaaggtctgctgctgtactgcgacatcaaagagagcacgttcgtggaggaacaactgccaagtcgcaaaatcgacgccatggacaacttccagaagtgcttcgccattctcaagctgtaccagccgggcgtggataacagcagctataacacgagtaagaagagtgacatggccgaggttaaggattggaaagcgattcgtgtggatctggtgatcacgccattcgagcagtacgcctatgcgctgctcggttggacgggcagcaaagaatttggtcgcgatctgcgccgctatgcggaggaagagcgcggcatgatcctcgacaaccatggcctctacgaccgcaaaaagcgcatctttctgaaagcgggcagcgaagaagagattttcgcgcatctgggtctggattatgtggagccgtgggaacgcaacgcg

SEQ ID NO: 1352 - protein, 394 aa, synthetic construct
  REGION 1..394: note = Variant of terminal deoxynucleotidyl transferase
MHHHHHHGGSGHPPSNTPEGEVPSVIARKVSQYSCQRKTTLNNYNKKFTDALEIMAENYKFKENLIACLEAKRAASLLKYLPFPVTSMKDIQGLPCIGDQVRDVIEEIIEEGESSRVKEVLNDERYKAFKQFTSVFGVGVKTSEKWFRMGLRTVEEAKASKSLKLSKMQKAGFLYYEDLASCVSKAEADAVTLIVKNTVRTFLPDALVTITGGFRRGKPMGHDIDFLITNPGPKEDDELLHKVVDLLKKQGLLLYCDIKESTFVEEQLPSRKIDAMDNFQKCFAILKLYQPGVDNSSYNTSKKSDMAEVKDWKAIRVDLVITPFEQYAYALLGWTGSKEFGRDLRRYAEEERGMILDNHGLYDRKKRIFLKAGSEEEIFAHLGLDYVEPWERNA

SEQ ID NO: 1353 - DNA, 1182 bp, synthetic construct
  misc_feature 1..1182: note = Variant of terminal deoxynucleotidyl transferase
  source 1..1182: mol_type = other DNA
atgcaccatcatcatcatcatggcggtagcggccatccgccgagcaataccccggagggggaggtgccgagcgttatcgcccgcaaggttagtcagtacagctgccagcgcaagaccacgctgaataactacaacaaaaagtttaccgacgcgctggagatcatggccgagaactacaaatttaaagagaacctgatcgcgtgtctggaatttaagcgcgccgcgagtattctgaaatatctgccgttcccggttaccagcatgaaagacatccaaggtctgccgtgcattggcgaccaagttcgtgacgtgatcgaggagatcatcgaagagggcgagagcagccgtgttaaagaagttctcaatgacgagcgctacaaggcctttaagcagttcactagcgtgttcggtgtgggcgtgaaaaccagcgaaaagtggtttcgtatgggcctccgtacggttgaagaggcaaaggccagtaagagtctgaagctgagcaagatgcagaaggcgggcttcctgtattacgaggatctggcgagctgcgttagtaaagcggaagccgatgccgttacgctcatcgtgaagaacacggtgcgtacctttctgccggatgcgctggtgaccatcaccggcggtttccgccgtggcaaacctatgggccacgacatcgactttctgatcacgaatccgggcccgaaagaggatgacgagctgctccacaaagtggttgatctgctcaagaagcaaggtctgctgctgtactgcgacatcaaagagagcacgttcgtggaggaacaactgccaagtcgcaaaatcgacgccatggacaacttccagaagtgcttcgccattctcaagctgtaccagccgggcgtggataacagcagctataacacgagtaagaagagtgacatggccgaggttaaggattggaaagcgattcgtgtggatctggtgatcacgccattcgagcagtacgcctatgcgctgctcggttggacgggcagcaaagaatttggtcgcgatctgcgccgctatgcggaggaagagcgcaagatgatcctcgacaaccatggcctctacgaccgcaaaaagcgcatctttctgaaagcgggcagcgaagaagagattttcgcgcatctgggtctggattatgtggagccgtgggaacgcaacgcg

SEQ ID NO: 1354 - protein, 394 aa, synthetic construct
  REGION 1..394: note = Variant of terminal deoxynucleotidyl transferase
MHHHHHHGGSGHPPSNTPEGEVPSVIARKVSQYSCQRKTTLNNYNKKFTDALEIMAENYKFKENLIACLEFKRAASILKYLPFPVTSMKDIQGLPCIGDQVRDVIEEIIEEGESSRVKEVLNDERYKAFKQFTSVFGVGVKTSEKWFRMGLRTVEEAKASKSLKLSKMQKAGFLYYEDLASCVSKAEADAVTLIVKNTVRTFLPDALVTITGGFRRGKPMGHDIDFLITNPGPKEDDELLHKVVDLLKKQGLLLYCDIKESTFVEEQLPSRKIDAMDNFQKCFAILKLYQPGVDNSSYNTSKKSDMAEVKDWKAIRVDLVITPFEQYAYALLGWTGSKEFGRDLRRYAEEERKMILDNHGLYDRKKRIFLKAGSEEEIFAHLGLDYVEPWERNA

SEQ ID NO: 1355 - DNA, 1182 bp, synthetic construct
  misc_feature 1..1182: note = Variant of terminal deoxynucleotidyl transferase
  source 1..1182: mol_type = other DNA
atgcaccatcatcatcatcatggcggtagcggccatccgccgagcaataccccggagggggaggtgccgagcgttatcgcccgcaaggttagtcagtacagctgccagcgcaagaccacgctgaataactacaacaaaaagtttaccgacgcgctggagatcatggccgagtcgtacaaatttaaagagaacctgatcgcgtgtctggaatttaagcgcgccgcgagtctgctgaaatatctgccgttcccggttaccagcatgaaagacatccaaggtctgccgtgcattggcgaccaagttcgtgacgtgatcgaggagatcatcgaagagggcgagagcagccgtgttaaagaagttctcaatgacgagcgctacaaggcctttaagcagttcaccagcgtgttcggtgtgggcgtgaaaaccagcgaaaagtggtttcgtatgggcctccgtacggttgaagaggcaaaggccagtaagagtctgaagctgagcaagatgcagaaggcgggcttcctgtattacgaggatctggcgagctgcgttagtaaagcggaagccgatgccgttacgctcatcgtgaagaacacggtgcgtacctttctgccggatgcgctggtgaccatcaccggcggtttccgccgtggcaaacctatgggccacgacatcgactttctgatcacgaatccgggcccgaaagaggatgacgagctgctccacaaagtggttgatctgctcaagaagcaaggtctgctgctgtacgaagacatcaaagagagcacgttcgtggaggaacaactgccaagtcgcaaaatcgacgccatggacaacttccagaagtgcttcgccattctcaagctgtaccagccgggcgtggataacagcagctataacacgagtaagaagagtgacatggccgaggttaaggattggaaagcgattcgtgtggatctggtgatcacgccattcgagcagtacgcctatgcgctgctcggttggacgggcagcaaagaatttggtcgcgatctgcgccgctatgcggaggaggagcgcaagatgatcctcgacaaccatggcctctacgaccgcaaaaagcgcatctttctgaaagcgggtagcgaagaagagattttcgcgcatctgggtctggattatgtggagccgtgggaacgcaacgcg

SEQ ID NO: 1356 - protein, 394 aa, synthetic construct
  REGION 1..394: note = Variant of terminal deoxynucleotidyl transferase
MHHHHHHGGSGHPPSNTPEGEVPSVIARKVSQYSCQRKTTLNNYNKKFTDALEIMAESYKFKENLIACLEFKRAASLLKYLPFPVTSMKDIQGLPCIGDQVRDVIEEIIEEGESSRVKEVLNDERYKAFKQFTSVFGVGVKTSEKWFRMGLRTVEEAKASKSLKLSKMQKAGFLYYEDLASCVSKAEADAVTLIVKNTVRTFLPDALVTITGGFRRGKPMGHDIDFLITNPGPKEDDELLHKVVDLLKKQGLLLYEDIKESTFVEEQLPSRKIDAMDNFQKCFAILKLYQPGVDNSSYNTSKKSDMAEVKDWKAIRVDLVITPFEQYAYALLGWTGSKEFGRDLRRYAEEERKMILDNHGLYDRKKRIFLKAGSEEEIFAHLGLDYVEPWERNA

SEQ ID NO: 1357 - DNA, 1182 bp, synthetic construct
  misc_feature 1..1182: note = Variant of terminal deoxynucleotidyl transferase
  source 1..1182: mol_type = other DNA
atgcaccatcatcatcatcatggcggtagcggccatccgccgagcaataccccggagggggaggtgccgagcgttatcgcccgcaaggttagtcagtacagctgccagcgcaagaccacgctgaataactacaacaaaaagtttaccgacgcgctggagatcatggccgagaactacaaatttaaagagaacctgatcgcgtgtctggaatttaagcgcgccgcgagtattctgaaatatctgccgttcccggttaccagcatgaaagacatccaaggtctgccgtgcattggcgaccaagttcgtgacgtgatcgaggagatcatcgaagagggcgagagcagccgtgttaaagaagttctcaatgacgagcgctacaaggcctttaagcagttcactgtggtgttcggtgtgggcgtgaaaaccagcgaaaagtggtttcgtatgggcctccgtacggttgaagaggcaaaggccagtaagagtctgaagctgagcaagatgcagaaggcgggcttcctgtattacgaggatctggcgagctgcgttagtaaagcggaagccgatgccgttacgctcatcgtgaagaacacggtgcgtacctttctgccggatgcgctggtgaccatcaccggcggtttccgccgtggcaaacctatgggccacgacatcgactttctgatcacgaatccgggcccgaaagaggatgacgagctgctccacaaagtggttgatctgctcaagaagcaaggtctgctgctgtactgcgacatcaaagagagcacgttcgtggaggaacaactgccaagtcgcaaaatcgacgccatggacaacttccagaagtgcttcgccattctcaagctgtaccagccgggcgtggataacagcagctataacacgagtaagaagagtgacatggccgaggttaaggattggaaagcgattcgtgtggatctggtgatcacgccattcgagcagtacgcctatgcgctgctcggttggacgggcagcaaagaatttggtcgcgatctgcgccgctatgcggaggaagagcgcggcatgatcctcgacaaccatggcctctacgaccgcaaaaagcgcatctttctgaaagcgggcagcgaagaagagattttcgcgcatctgggtctggattatgtggagccgtgggaacgcaacgcg

SEQ ID NO: 1358 - protein, 394 aa, synthetic construct
  REGION 1..394: note = Variant of terminal deoxynucleotidyl transferase
MHHHHHHGGSGHPPSNTPEGEVPSVIARKVSQYSCQRKTTLNNYNKKFTDALEIMAENYKFKENLIACLEFKRAASILKYLPFPVTSMKDIQGLPCIGDQVRDVIEEIIEEGESSRVKEVLNDERYKAFKQFTVVFGVGVKTSEKWFRMGLRTVEEAKASKSLKLSKMQKAGFLYYEDLASCVSKAEADAVTLIVKNTVRTFLPDALVTITGGFRRGKPMGHDIDFLITNPGPKEDDELLHKVVDLLKKQGLLLYCDIKESTFVEEQLPSRKIDAMDNFQKCFAILKLYQPGVDNSSYNTSKKSDMAEVKDWKAIRVDLVITPFEQYAYALLGWTGSKEFGRDLRRYAEEERGMILDNHGLYDRKKRIFLKAGSEEEIFAHLGLDYVEPWERNA

SEQ ID NO: 1359 - DNA, 1182 bp, synthetic construct
  misc_feature 1..1182: note = Variant of terminal deoxynucleotidyl transferase
  source 1..1182: mol_type = other DNA
atgcaccatcatcatcatcatggcggtagcggccatccgccgagcaataccccggagggggaggtgccgagcgttatcgcccgcaaggttagtcagtacagctgccagcgcaagaccacgctgaataactacaacaaaaagtttaccgacgcgctggagatcatggccgagaactacaaatttaaagagaacctgatcgcgtgtctggaatttaagcgcgccgcgagtctgctgaaatatctgccgttcccggttaccagcatgaaagacatccaaggtctgccgtgcattggcgaccaagttcgtgacgtgatcgaggagatcatcgaagagggcgagagcagccgtgttaaagaagttctcaatgacgagcgctacaaggcctttaagcagttcactagcgtgttcggtgtgggcgtgaaaaccagcgaaaagtggtttcgtatgggcctccgtacggttgaagaggcaaaggccagtaagagtctgaagctgagcaagatgcagaaggcgggcttcctgtattacgaggatctggcgagctgcgttagtaaagcggaagccgatgccgttacgctcatcgtgaagaacacggtgcgtacctttctgccggatgcgctggtgaccatcaccggcggtttccgccgtggcaaacctatgggccacgacatcgactttctgatcacgaatccgggcccgaaagaggatgacgagctgctccacaaagtggttgatctgctcaagaagcaaggtctgctgctgtactgcgacatcaaagagagcacgttcgtggaggaacaactgccaagtcgcaaaatcgacgccatggacaacttccagaagtgcttcgccattctcaagctgtaccagccgggcgtggataacagcagctataacacgagtaagaagagtgacatggccgaggttaaggattggaaagcgattcgtgtggatctggtgatcacgccattcgagcagtacgcctatgcgctgctcggttggacgggcagcaaagaatttggtcgcgatctgcgccgctatgcggaggaagagcgcatgatgatcctcgacaaccatggcctctacgaccgcaaaaagcgcatctttctgaaagcgggcagcgaagaagagattttcgcgcatctgggtctggattatgtggagccgtgggaacgcaacgcg

SEQ ID NO: 1360 - protein, 394 aa, synthetic construct
  REGION 1..394: note = Variant of terminal deoxynucleotidyl transferase
MHHHHHHGGSGHPPSNTPEGEVPSVIARKVSQYSCQRKTTLNNYNKKFTDALEIMAENYKFKENLIACLEFKRAASLLKYLPFPVTSMKDIQGLPCIGDQVRDVIEEIIEEGESSRVKEVLNDERYKAFKQFTSVFGVGVKTSEKWFRMGLRTVEEAKASKSLKLSKMQKAGFLYYEDLASCVSKAEADAVTLIVKNTVRTFLPDALVTITGGFRRGKPMGHDIDFLITNPGPKEDDELLHKVVDLLKKQGLLLYCDIKESTFVEEQLPSRKIDAMDNFQKCFAILKLYQPGVDNSSYNTSKKSDMAEVKDWKAIRVDLVITPFEQYAYALLGWTGSKEFGRDLRRYAEEERMMILDNHGLYDRKKRIFLKAGSEEEIFAHLGLDYVEPWERNA

SEQ ID NO: 1361 - DNA, 1182 bp, synthetic construct
  misc_feature 1..1182: note = Variant of terminal deoxynucleotidyl transferase
  source 1..1182: mol_type = other DNA
atgcaccatcatcatcatcatggcggtagcggccatccgccgagcaataccccggagggggaggtgccgagcgttatcgcccgcaaggttagtcagtacagctgccagcgcaagaccacgctgaataactacaacaaaaagtttaccgacgcgctggagatcatggccgagaactacaaatttaaagagaacctgatcgcgtgtctggtatttaagcgcgccgcgagtctgctgaaatatctgccgttcccggttaccagcatgaaagacatccaaggtctgccgtgcattggcgaccaagttcgtgacgtgatcgaggagatcatcgaagagggcgagagcagccgtgttaaagaagttctcaatgacgagcgctacaaggcctttaagcagttcaccagcgtgttcggtgtgggcgtgaaaaccagcgaaaagtggtttcgtatgggcctccgtacggttgaagaggcaaaggccagtaagagtctgaagctgagcaagatgcagaaggcgggcttcctgtattacgaggatctggcgagctgcgttagtaaagcggaagccgatgccgttacgctcatcgtgaagaacacggtgcgtacctttctgccggatgcgctggtgaccatcaccggcggtttccgccgtggcaaacctatgggccacgacatcgactttctgatcacgaatccgggcccgaaagaggatgacgagctgctccacaaagtggttgatctgctcaagaagcaaggtctgctgctgtactgcgacatcaaagagagcacgttcgtggaggaacaactgccaagtcgcaaaatcgacgccatggacaacttccagaagtgcttcgccattctcaagctgtaccagccgggcgtggataacagcagctataacacgagtaagaagagtgacatggccgaggttaaggattggaaagcgattcgtgtggatctggtgatcacgccattcgagcagtacgcctatgcgctgctcggttggacgggcagcaaagaatttggtcgcgatctgcgccgctatgcggaggaagagcgcatgatgatcctcgacaaccatggcctctacgaccgcaaaaagcgcatctttctgaaagcgggcagcgaagaagagattttcgcgcatctgggtctggattatgtggagccgtgggaacgcaacgcg

SEQ ID NO: 1362 - protein, 394 aa, synthetic construct
  REGION 1..394: note = Variant of terminal deoxynucleotidyl transferase
MHHHHHHGGSGHPPSNTPEGEVPSVIARKVSQYSCQRKTTLNNYNKKFTDALEIMAENYKFKENLIACLVFKRAASLLKYLPFPVTSMKDIQGLPCIGDQVRDVIEEIIEEGESSRVKEVLNDERYKAFKQFTSVFGVGVKTSEKWFRMGLRTVEEAKASKSLKLSKMQKAGFLYYEDLASCVSKAEADAVTLIVKNTVRTFLPDALVTITGGFRRGKPMGHDIDFLITNPGPKEDDELLHKVVDLLKKQGLLLYCDIKESTFVEEQLPSRKIDAMDNFQKCFAILKLYQPGVDNSSYNTSKKSDMAEVKDWKAIRVDLVITPFEQYAYALLGWTGSKEFGRDLRRYAEEERMMILDNHGLYDRKKRIFLKAGSEEEIFAHLGLDYVEPWERNA

SEQ ID NO: 1363 - DNA, 1182 bp, synthetic construct
  misc_feature 1..1182: note = Variant of terminal deoxynucleotidyl transferase
  source 1..1182: mol_type = other DNA
atgcaccatcatcatcatcatggcggtagcggccatccgccgagcaataccccggagggggaggtgccgagcgttatcgcccgcaaggttagtcagtacagctgccagcgcaagaccacgctgaataactacaacaaaaagtttaccgacgcgctggagatcatggccgagaactacaaatttaaagagaacctgatcgcgtgtctggaatttaagcgcgccgcgagtctgctgaaatatctgccgttcccggttaccagcatgaaagacatccaaggtctgccgtgcattggcgaccaagttcgtgacgtgatcgaggagatcatcgaagagggcgagagcagccgtgttaaagaagttctcaatgacgagcgctacaaggcctttaagcagttcactgtggtgttcggtgtgggcgtgaaaaccagcgaaaagtggtttcgtatgggcctccgtacggttgaagaggcaaaggccagtaagagtctgaagctgagcaagatgcagaaggcgggcttcctgtattacgaggatctggcgagctgcgttagtaaagcggaagccgatgccgttacgctcatcgtgaagaacacggtgcgtacctttctgccggatgcgctggtgaccatcaccggcggtttccgccgtggcaaacctatgggccacgacatcgactttctgatcacgaatccgggcccgaaagaggatgacgagctgctccacaaagtggttgatctgctcaagaagcaaggtctgctgctgtactgcgacatcaaagagagcacgttcgtggaggaacaactgccaagtcgcaaaatcgacgccatggacaacttccagaagtgcttcgccattctcaagctgtaccagccgggcgtggataacagcagctataacacgagtaagaagagtgacatggccgaggttaaggattggaaagcgattcgtgtggatctggtgatcacgccattcgagcagtacgcctatgcgctgctcggttggacgggcagcaaagaatttggtcgcgatctgcgccgctatgcggaggaagagcgcggcatgatcctcgacaaccatggcctctacgaccgcaaaaagcgcatctttctgaaagcgggcagcgaagaagagattttcgcgcatctgggtctggattatgtggagccgtgggaacgcaacgcg

SEQ ID NO: 1364 - protein, 394 aa, synthetic construct
  REGION 1..394: note = Variant of terminal deoxynucleotidyl transferase
MHHHHHHGGSGHPPSNTPEGEVPSVIARKVSQYSCQRKTTLNNYNKKFTDALEIMAENYKFKENLIACLEFKRAASLLKYLPFPVTSMKDIQGLPCIGDQVRDVIEEIIEEGESSRVKEVLNDERYKAFKQFTVVFGVGVKTSEKWFRMGLRTVEEAKASKSLKLSKMQKAGFLYYEDLASCVSKAEADAVTLIVKNTVRTFLPDALVTITGGFRRGKPMGHDIDFLITNPGPKEDDELLHKVVDLLKKQGLLLYCDIKESTFVEEQLPSRKIDAMDNFQKCFAILKLYQPGVDNSSYNTSKKSDMAEVKDWKAIRVDLVITPFEQYAYALLGWTGSKEFGRDLRRYAEEERGMILDNHGLYDRKKRIFLKAGSEEEIFAHLGLDYVEPWERNA

SEQ ID NO: 1365 - DNA, 1182 bp, synthetic construct
  misc_feature 1..1182: note = Variant of terminal deoxynucleotidyl transferase
  source 1..1182: mol_type = other DNA
atgcaccatcatcatcatcatggcggtagcggccatccgccgagcaataccccggagggggaggtgccgagcgttatcgcccgcaaggttagtcagtacagctgccagcgcaagaccacgctgaataactacaacaaaaagtttaccgacgcgctggagatcatggccgagtcgtacaaatttaaagagaatctgatcgcgtgtattgaatttaagcgcgccgcgagtctgctgaaatatctgccgttcccggttaccagcatgaaagacatccaaggtctgccgtgcattggcgaccaagttcgtgacgtgatcgaggagatcatcgaagagggcgagagcagccgtgttaaagaagttctcaatgacgagcgctacaaggcctttaagcagttcaccagcgtgttcggtgtgggcgtgaaaaccagcgaaaagtggtttcgtatgggcctccgtacggttgaagaggcaaaggccagtaagagtctgaagctgagcaagatgcagaaggcgggcttcctgtattacgaggatctggcgagctgcgttagtaaagcggaagccgatgccgttacgctcatcgtgaagaacacggtgcgtacctttctgccggatgcgctggtgaccatcaccggcggtttccgccgtggcaaacctatgggccacgacatcgactttctgatcacgaatccgggcccgaaagaggatgacgagctgctccacaaagtggttgatctgctcaagaagcaaggtctgctgctgtacgaagacatcaaagagagcacgttcgtggaggaacaactgccaagtcgcaaaatcgacgccatggacaacttccagaagtgcttcgccattctcaagctgtaccagccgggcgtggataacagcagctataacacgagtaagaagagtgacatggccgaggttaaggattggaaagcgattcgtgtggatctggtgatcacgccattcgagcagtacgcctatgcgctgctcggttggacgggcagcaaagaatttggtcgcgatctgcgccgctatgcggaggaagagcgcaagatgatcctcgacaaccatggcctctacgaccgcaaaaagcgcatctttctgaaagcggatagcgaagaagagattttcgcgcatctgggtctggattatgtggagccgtgggaacgcaacgcg

SEQ ID NO: 1366 - protein, 394 aa, synthetic construct
  REGION 1..394: note = Variant of terminal deoxynucleotidyl transferase
MHHHHHHGGSGHPPSNTPEGEVPSVIARKVSQYSCQRKTTLNNYNKKFTDALEIMAESYKFKENLIACIEFKRAASLLKYLPFPVTSMKDIQGLPCIGDQVRDVIEEIIEEGESSRVKEVLNDERYKAFKQFTSVFGVGVKTSEKWFRMGLRTVEEAKASKSLKLSKMQKAGFLYYEDLASCVSKAEADAVTLIVKNTVRTFLPDALVTITGGFRRGKPMGHDIDFLITNPGPKEDDELLHKVVDLLKKQGLLLYEDIKESTFVEEQLPSRKIDAMDNFQKCFAILKLYQPGVDNSSYNTSKKSDMAEVKDWKAIRVDLVITPFEQYAYALLGWTGSKEFGRDLRRYAEEERKMILDNHGLYDRKKRIFLKADSEEEIFAHLGLDYVEPWERNA

SEQ ID NO: 1367 - DNA, 1182 bp, synthetic construct
  misc_feature 1..1182: note = Variant of terminal deoxynucleotidyl transferase
  source 1..1182: mol_type = other DNA
atgcaccatcatcatcatcatggcggtagcggccatccgccgagcaataccccggagggggaggtgccgagcgttatcgcccgcaaggttagtcagtacagctgccagcgcaagaccacgctgaataactacaacaaaaagtttaccgacgcgctggagatcatggccgagaactacaaatttaaagagaacctgatcgcgtgtctggtatttaagcgcgccgcgagtctgctgaaatatctgccgttcccggttaccagcatgaaagacatccaaggtctgccgtgcattggcgaccaagttcgtgacgtgatcgaggagatcatcgaagagggcgagagcagccgtgttaaagaagttctcaatgacgagcgctacaaggcctttaagcagttcactatggtgttcggtgtgggcgtgaaaaccagcgaaaagtggtttcgtatgggcctccgtacggttgaagaggcaaaggccagtaagagtctgaagctgagcaagatgcagaaggcgggcttcctgtattacgaggatctggcgagctgcgttagtaaagcggaagccgatgccgttacgctcatcgtgaagaacacggtgcgtacctttctgccggatgcgctggtgaccatcaccggcggtttccgccgtggcaaacctatgggccacgacatcgactttctgatcacgaatccgggcccgaaagaggatgacgagctgctccacaaagtggttgatctgctcaagaagcaaggtctgctgctgtactgcgacatcaaagagagcacgttcgtggaggaacaactgccaagtcgcaaaatcgacgccatggacaacttccagaagtgcttcgccattctcaagctgtaccagccgggcgtggataacagcagctataacacgagtaagaagagtgacatggccgaggttaaggattggaaagcgattcgtgtggatctggtgatcacgccattcgagcagtacgcctatgcgctgctcggttggacgggcagcaaagaatttggtcgcgatctgcgccgctatgcggaggaagagcgcggcatgatcctcgacaaccatggcctctacgaccgcaaaaagcgcatctttctgaaagcgggcagcgaagaagagattttcgcgcatctgggtctggattatgtggagccgtgggaacgcaacgcg

SEQ ID NO: 1368 - protein, 394 aa, synthetic construct
  REGION 1..394: note = Variant of terminal deoxynucleotidyl transferase
MHHHHHHGGSGHPPSNTPEGEVPSVIARKVSQYSCQRKTTLNNYNKKFTDALEIMAENYKFKENLIACLVFKRAASLLKYLPFPVTSMKDIQGLPCIGDQVRDVIEEIIEEGESSRVKEVLNDERYKAFKQFTMVFGVGVKTSEKWFRMGLRTVEEAKASKSLKLSKMQKAGFLYYEDLASCVSKAEADAVTLIVKNTVRTFLPDALVTITGGFRRGKPMGHDIDFLITNPGPKEDDELLHKVVDLLKKQGLLLYCDIKESTFVEEQLPSRKIDAMDNFQKCFAILKLYQPGVDNSSYNTSKKSDMAEVKDWKAIRVDLVITPFEQYAYALLGWTGSKEFGRDLRRYAEEERGMILDNHGLYDRKKRIFLKAGSEEEIFAHLGLDYVEPWERNA

SEQ ID NO: 1369 - DNA, 1182 bp, synthetic construct
  misc_feature 1..1182: note = Variant of terminal deoxynucleotidyl transferase
  source 1..1182: mol_type = other DNA
atgcaccatcatcatcatcatggcggtagcggccatccgccgagcaataccccggagggggaggtgccgagcgttatcgcccgcaaggttagtcagtacagctgccagcgcaagaccacgctgaataactacaacaaaaagtttaccgacgcgctggagatcatggccgagaactacaaatttaaagagaacctgatcgcgtgtctggtagccaagcgcgccgcgagtctgctgaaatatctgccgttcccggttaccagcatgaaagacatccaaggtctgccgtgcattggcgaccaagttcgtgacgtgatcgaggagatcatcgaagagggcgagagcagccgtgttaaagaagttctcaatgacgagcgctacaaggcctttaagcagttcactagcgtgttcggtgtgggcgtgaaaaccagcgaaaagtggtttcgtatgggcctccgtacggttgaagaggcaaaggccagtaagagtctgaagctgagcaagatgcagaaggcgggcttcctgtattacgaggatctggcgagctgcgttagtaaagcggaagccgatgccgttacgctcatcgtgaagaacacggtgcgtacctttctgccggatgcgctggtgaccatcaccggcggtttccgccgtggcaaacctatgggccacgacatcgactttctgatcacgaatccgggcccgaaagaggatgacgagctgctccacaaagtggttgatctgctcaagaagcaaggtctgctgctgtactgcgacatcaaagagagcacgttcgtggaggaacaactgccaagtcgcaaaatcgacgccatggacaacttccagaagtgcttcgccattctcaagctgtaccagccgggcgtggataacagcagctataacacgagtaagaagagtgacatggccgaggttaaggattggaaagcgattcgtgtggatctggtgatcacgccattcgagcagtacgcctatgcgctgctcggttggacgggcagcaaagaatttggtcgcgatctgcgccgctatgcggaggaagagcgcaagatgatcctcgacaaccatggcctctacgaccgcaaaaagcgcatctttctgaaagcgggcagcgaagaagagattttcgcgcatctgggtctggattatgtggagccgtgggaacgcaacgcg

SEQ ID NO: 1370 - protein, 394 aa, synthetic construct
  REGION 1..394: note = Variant of terminal deoxynucleotidyl transferase
MHHHHHHGGSGHPPSNTPEGEVPSVIARKVSQYSCQRKTTLNNYNKKFTDALEIMAENYKFKENLIACLVAKRAASLLKYLPFPVTSMKDIQGLPCIGDQVRDVIEEIIEEGESSRVKEVLNDERYKAFKQFTSVFGVGVKTSEKWFRMGLRTVEEAKASKSLKLSKMQKAGFLYYEDLASCVSKAEADAVTLIVKNTVRTFLPDALVTITGGFRRGKPMGHDIDFLITNPGPKEDDELLHKVVDLLKKQGLLLYCDIKESTFVEEQLPSRKIDAMDNFQKCFAILKLYQPGVDNSSYNTSKKSDMAEVKDWKAIRVDLVITPFEQYAYALLGWTGSKEFGRDLRRYAEEERKMILDNHGLYDRKKRIFLKAGSEEEIFAHLGLDYVEPWERNA

SEQ ID NO: 1371 - DNA, 1182 bp, synthetic construct
  misc_feature 1..1182: note = Variant of terminal deoxynucleotidyl transferase
  source 1..1182: mol_type = other DNA
atgcaccatcatcatcatcatggcggtagcggccatccgccgagcaataccccggagggggaggtgccgagcgttatcgcccgcaaggttagtcagtacagctgccagcgcaagaccacgctgaataactacaacaaaaagtttaccgacgcgctggagatcatggccgaggattacaaatttaaagagaacctgatcgcgtgtctggaatttaagcgcgccgcgagtctgctgaaatatctgccgttcccggttaccagcatgaaagacatccaaggtctgccgtgcattggcgaccaagttcgtgacgtgatcgaggagatcatcgaagagggcgagagcagccgtgttaaagaagttctcaatgacgagcgctacaaggcctttaagcagttcaccagcgtgttcggtgtgggcgtgaaaaccagcgaaaagtggtttcgtatgggcctccgtacggttgaagaggcaaaggccagtaagagtctgaagctgagcaagatgcagaaggcgggcttcctgtattacgaggatctggcgagctgcgttagtaaagcggaagccgatgccgttacgctcatcgtgaagaacacggtgcgtacctttctgccggatgcgctggtgaccatcaccggcggtttccgccgtggcaaacctatgggccacgacatcgactttctgatcacgaatccgggcccgaaagaggatgacgagctgctccacaaagtggttgatctgctcaagaagcaaggtctgctgctgtactgtgacatcaaagagagcacgttcgtggaggaacaactgccaagtcgcaaaatcgacgccatggacaacttccagaagtgcttcgccattctcaagctgtaccagccgggcgtggataacagcagctataacacgagtaagaagagtgacatggccgaggttaaggattggaaagcgattcgtgtggatctggtgatcacgccattcgagcagtacgcctatgcgctgctcggttggacgggcagcaaagaatttggtcgcgatctgcgccgctatgcggaggaagagcgcaagatgatcctcgacaaccatggcctctacgaccgcaaaaagcgcatctttctgaaagcgggtagcgaagaagagattttcgcgcatctgggtctggattatgtggagccgtgggaacgcaacgcg

SEQ ID NO: 1372 - protein, 394 aa, synthetic construct
  REGION 1..394: note = Variant of terminal deoxynucleotidyl transferase
MHHHHHHGGSGHPPSNTPEGEVPSVIARKVSQYSCQRKTTLNNYNKKFTDALEIMAEDYKFKENLIACLEFKRAASLLKYLPFPVTSMKDIQGLPCIGDQVRDVIEEIIEEGESSRVKEVLNDERYKAFKQFTSVFGVGVKTSEKWFRMGLRTVEEAKASKSLKLSKMQKAGFLYYEDLASCVSKAEADAVTLIVKNTVRTFLPDALVTITGGFRRGKPMGHDIDFLITNPGPKEDDELLHKVVDLLKKQGLLLYCDIKESTFVEEQLPSRKIDAMDNFQKCFAILKLYQPGVDNSSYNTSKKSDMAEVKDWKAIRVDLVITPFEQYAYALLGWTGSKEFGRDLRRYAEEERKMILDNHGLYDRKKRIFLKAGSEEEIFAHLGLDYVEPWERNA

SEQ ID NO: 1373 - DNA, 1182 bp, synthetic construct
  misc_feature 1..1182: note = Variant of terminal deoxynucleotidyl transferase
  source 1..1182: mol_type = other DNA
atgcaccatcatcatcatcatggcggtagcggccatccgccgagcaataccccggagggggaggtgccgagcgttatcgcccgcaaggttagtcagtacagctgccagcgcaagaccacgctgaataactacaacaaaaagtttaccgacgcgctggagatcatggccgagaactacaaatttaaagagaacctgatcgcgtgtctggtagccaagcgcgccgcgagtctgctgaaatatctgccgttcccggttaccagcatgaaagacatccaaggtctgccgtgcattggcgaccaagttcgtgacgtgatcgaggagatcatcgaagagggcgagagcagccgtgttaaagaagttctcaatgacgagcgctacaaggcctttaagcagttcactagcgtgttcggtgtgggcgtgaaaaccagcgaaaagtggtttcgtatgggcctccgtacggttgaagaggcaaaggccagtaagagtctgaagctgagcaagatgcagaaggcgggcttcctgtattacgaggatctggcgagctgcgttagtaaagcggaagccgatgccgttacgctcatcgtgaagaacacggtgcgtacctttctgccggatgcgctggtgaccatcaccggcggtttccgccgtggcaaacctatgggccacgacatcgactttctgatcacgaatccgggcccgaaagaggatgacgagctgctccacaaagtggttgatctgctcaagaagcaaggtctgctgctgtactgcgacatcaaagagagcacgttcgtggaggaacaactgccaagtcgcaaaatcgacgccatggacaacttccagaagtgcttcgccattctcaagctgtaccagccgggcgtggataacagcagctataacacgagtaagaagagtgacatggccgaggttaaggattggaaagcgattcgtgtggatctggtgatcacgccattcgagcagtacgcctatgcgctgctcggttggacgggcagcaaagaatttggtcgcgatctgcgccgctatgcggaggaagagcgcggcatgatcctcgacaaccatggcctctacgaccgcaaaaagcgcatctttctgaaagcgggcagcgaagaagagattttcgcgcatctgggtctggattatgtggagccgtgggaacgcaacgcg

SEQ ID NO: 1374 - protein, 394 aa, synthetic construct
  REGION 1..394: note = Variant of terminal deoxynucleotidyl transferase
MHHHHHHGGSGHPPSNTPEGEVPSVIARKVSQYSCQRKTTLNNYNKKFTDALEIMAENYKFKENLIACLVAKRAASLLKYLPFPVTSMKDIQGLPCIGDQVRDVIEEIIEEGESSRVKEVLNDERYKAFKQFTSVFGVGVKTSEKWFRMGLRTVEEAKASKSLKLSKMQKAGFLYYEDLASCVSKAEADAVTLIVKNTVRTFLPDALVTITGGFRRGKPMGHDIDFLITNPGPKEDDELLHKVVDLLKKQGLLLYCDIKESTFVEEQLPSRKIDAMDNFQKCFAILKLYQPGVDNSSYNTSKKSDMAEVKDWKAIRVDLVITPFEQYAYALLGWTGSKEFGRDLRRYAEEERGMILDNHGLYDRKKRIFLKAGSEEEIFAHLGLDYVEPWERNA

SEQ ID NO: 1375 - DNA, 1182 bp, synthetic construct
  misc_feature 1..1182: note = Variant of terminal deoxynucleotidyl transferase
  source 1..1182: mol_type = other DNA
atgcaccatcatcatcatcatggcggtagcggccatccgccgagcaataccccggagggggaggtgccgagcgttatcgcccgcaaggttagtcagtacagctgccagcgcaagaccacgctgaataactacaacaaaaagtttaccgacgcgctggagatcatggccgagtcgtacaaatttaaagagaacctgatcgcgtgtctggaatttaagcgcgccgcgagtctgctgaaatatctgccgttcccggttaccagcatgaaagacatccaaggtctgccgtgcattggcgtccaagttcgtgacgtgatcgaggagatcatcgaagagggcgagagcagccgtgttaaagaagttctcaatgacgagcgctacaaggcctttaagcagttcaccagcgtgttcggtgtgggcgtgaaaaccagcgaaaagtggtttcgtatgggcctccgtacggttgaagaggcaaaggccagtaagagtctgaagctgagcaagatgcagaaggcgggcttcctgtattacgaggatctggcgagctgcgttagtaaagcggaagccgatgccgttacgctcatcgtgaagaacacggtgcgtacctttctgccggatgcgctggtgaccatcaccggcggtttccgccgtggcaaacctatgggccacgacatcgactttctgatcacgaatccgggcccgaaagaggatgacgagctgctccacaaagtggttgatctgctcaagaagcaaggtctgctgctgtactgtgacatcaaagagagcacgttcgtggaggaacaactgccaagtcgcaaaatcgacgccatggacaacttccagaagtgcttcgccattctcaagctgtaccagccgggcgtggataacagcagctataacacgagtaagaagagtgacatggccgaggttaaggattggaaagcgattcgtgtggatctggtgatcacgccattcgagcagtacgcctatgcgctgctcggttggacgggcagcaaagaatttggtcgcgatctgcgccgctatgcggaggagcagcgcaagatggccctcgacaaccatggcctctacgaccgcaaaaagcgcatctttctgaaagcgggcagcgaagaagagattttcgcgcatctgggtctggattatgtggagccgtgggaacgcaacgcg

SEQ ID NO: 1376 - protein, 394 aa, synthetic construct
  REGION 1..394: note = Variant of terminal deoxynucleotidyl transferase
MHHHHHHGGSGHPPSNTPEGEVPSVIARKVSQYSCQRKTTLNNYNKKFTDALEIMAESYKFKENLIACLEFKRAASLLKYLPFPVTSMKDIQGLPCIGVQVRDVIEEIIEEGESSRVKEVLNDERYKAFKQFTSVFGVGVKTSEKWFRMGLRTVEEAKASKSLKLSKMQKAGFLYYEDLASCVSKAEADAVTLIVKNTVRTFLPDALVTITGGFRRGKPMGHDIDFLITNPGPKEDDELLHKVVDLLKKQGLLLYCDIKESTFVEEQLPSRKIDAMDNFQKCFAILKLYQPGVDNSSYNTSKKSDMAEVKDWKAIRVDLVITPFEQYAYALLGWTGSKEFGRDLRRYAEEQRKMALDNHGLYDRKKRIFLKAGSEEEIFAHLGLDYVEPWERNA

SEQ ID NO: 1377 - DNA, 1182 bp, synthetic construct
  misc_feature 1..1182: note = Variant of terminal deoxynucleotidyl transferase
  source 1..1182: mol_type = other DNA
atgcaccatcatcatcatcatggcggtagcggccatccgccgagcaataccccggagggggaggtgccgagcgttatcgcccgcaaggttagtcagtacagctgccagcgcaagaccacgctgaataactacaacaaaaagtttaccgacgcgctggagatcatggccgagaattacaaatttaaagagaacctgatcgcgtgtctggaatttaagcgcgccgcgagtctgctgaaatatctgccgttcccggttaccagcatgaaagacatccaaggtctgccgtgcattggcgaccaagttcgtgacgtgatcgaggagatcatcgaagagggcgagagcagccgtgttaaagaagttctcaatgacgagcgctacaaggcctttaagcagttcaccagcgtgttcggtgtgggcgtgaaaaccagcgaaaagtggtttcgtatgggcctccgtacggttgaagaggcaaaggccagtaagagtctgaagctgagcaagatgcagaaggcgggcttcctgtattacgaggatctggcgagctgcgttagtaaagcggaagccgatgccgttacgctcatcgtgaagaacacggtgcgtacctttctgccggatgcgctggtgaccatcaccggcggtttccgccgtggcaaacctatgggccacgacatcgactttctgatcacgaatccgggcccgaaagaggatgacgagctgctccacaaagtggttgatctgctcaagaagcaaggtctgctgctgtactgtgacatcaaagagagcacgttcgtggaggaacaactgccaagtcgcaaaatcgacgccatggacaacttccagaagtgcttcgccattctcaagctgtaccagccgggcgtggataacagcagctataacacgagtaagaagagtgacatggccgaggttaaggattggaaagcgattcgtgtggatctggtgatcacgccattcgagcagtacgcctatgcgctgctcggttggacgggcagcaaagaatttggtcgcgatctgcgccgctatgcggagtcggagcgcaagatgatcctcgacaaccatggcctctacgaccgcaaaaagcgcatctttctgaaagcgggtagcgaagaagagattttcgcgcatctgggtctggattatgtggagccgtgggaacgcaacgcg

SEQ ID NO: 1378 - protein, 394 aa, synthetic construct
  REGION 1..394: note = Variant of terminal deoxynucleotidyl transferase
MHHHHHHGGSGHPPSNTPEGEVPSVIARKVSQYSCQRKTTLNNYNKKFTDALEIMAENYKFKENLIACLEFKRAASLLKYLPFPVTSMKDIQGLPCIGDQVRDVIEEIIEEGESSRVKEVLNDERYKAFKQFTSVFGVGVKTSEKWFRMGLRTVEEAKASKSLKLSKMQKAGFLYYEDLASCVSKAEADAVTLIVKNTVRTFLPDALVTITGGFRRGKPMGHDIDFLITNPGPKEDDELLHKVVDLLKKQGLLLYCDIKESTFVEEQLPSRKIDAMDNFQKCFAILKLYQPGVDNSSYNTSKKSDMAEVKDWKAIRVDLVITPFEQYAYALLGWTGSKEFGRDLRRYAESERKMILDNHGLYDRKKRIFLKAGSEEEIFAHLGLDYVEPWERNA

SEQ ID NO: 1379 - DNA, 1182 bp, synthetic construct
  misc_feature 1..1182: note = Variant of terminal deoxynucleotidyl transferase
  source 1..1182: mol_type = other DNA
atgcaccatcatcatcatcatggcggtagcggccatccgccgagcaataccccggagggggaggtgccgagcgttatcgcccgcaaggttagtcagtacagctgccagcgcaagaccacgctgaataactacaacaaaaagtttaccgacgcgctggagatccgtgccgaggattacaaatttaaagagaacctgatcgcgtgtctggaatttaagcgcgccgcgagtctgctgaaatatctgccgttcccggttaccagcatgaaagacatccaaggtctgccgtgcattggcgaccaagttcgtgacgtgatcgaggagatcatcgaagagggcgagagcagccgtgttaaagaagttctcaatgacgagcgctacaaggcctttaagcagttcaccagcgtgttcggtgtgggcgtgaaaaccagcgaaaagtggtttcgtatgggcctccgtacggttgaagaggcaaaggccagtaagagtctgaagctgagcaagatgcagaaggcgggcttcctgtattacgaggatctggcgagctgcgttagtaaagcggaagccgatgccgttacgctcatcgtgaagaacacggtgcgtacctttctgccggatgcgctggtgaccatcaccggcggtttccgccgtggcaaacctatgggccacgacatcgactttctgatcacgaatccgggcccgaaagaggatgacgagctgctccacaaagtggttgatctgctcaagaagcaaggtctgctgctgtacgaagacatcaaagagagcacgttcgtggaggaacaactgccaagtcgcaaaatcgacgccatggacaacttccagaagtgcttcgccattctcaagctgtaccagccgggcgtggataacagcagctataacacgagtaagaagagtgacatggccgaggttaaggattggaaagcgattcgtgtggatctggtgatcacgccattcgagcagtacgcctatgcgctgctcggttggacgggcagcaaagaatttggtcgcgatctgcgccgctatgcggagtcggagcgcaagatgatcctcgacaaccatggcctctacgaccgcaaaaagcgcatctttctgaaagcggatagcgaagaagagattttcgcgcatctgggtctggattatgtggagccgtgggaacgcaacgcg

SEQ ID NO: 1380 - protein, 394 aa, synthetic construct
  REGION 1..394: note = Variant of terminal deoxynucleotidyl transferase
MHHHHHHGGSGHPPSNTPEGEVPSVIARKVSQYSCQRKTTLNNYNKKFTDALEIRAEDYKFKENLIACLEFKRAASLLKYLPFPVTSMKDIQGLPCIGDQVRDVIEEIIEEGESSRVKEVLNDERYKAFKQFTSVFGVGVKTSEKWFRMGLRTVEEAKASKSLKLSKMQKAGFLYYEDLASCVSKAEADAVTLIVKNTVRTFLPDALVTITGGFRRGKPMGHDIDFLITNPGPKEDDELLHKVVDLLKKQGLLLYEDIKESTFVEEQLPSRKIDAMDNFQKCFAILKLYQPGVDNSSYNTSKKSDMAEVKDWKAIRVDLVITPFEQYAYALLGWTGSKEFGRDLRRYAESERKMILDNHGLYDRKKRIFLKADSEEEIFAHLGLDYVEPWERNA

SEQ ID NO: 1381 - DNA, 1182 bp, synthetic construct
  misc_feature 1..1182: note = Variant of terminal deoxynucleotidyl transferase
  source 1..1182: mol_type = other DNA
atgcaccatcatcatcatcatggcggtagcggccatccgccgagcaataccccggagggggaggtgccgagcgttatcgcccgcaaggttagtcagtacagctgccagcgcaagaccacgctgaataactacaacaaaaagtttaccgacgcgctggagatcatggccgagaattacaaatttaaagagaacctgatcgcgtgtctggaatttaagcgcgccgcgagtctgctgaaatatctgccgttcccggttaccagcatgaaagacatccaaggtctgccgtgcattggcgtccaagttcgtgacgtgatcgaggagatcatcgaagagggcgagagcagccgtgttaaagaagttctcaatgacgagcgctacaaggcctttaagcagttcaccagcgtgttcggtgtgggcgtgaaaaccagcgaaaagtggtttcgtatgggcctccgtacggttgaagaggcaaaggccagtaagagtctgaagctgagcaagatgcagaaggcgggcttcctgtattacgaggatctggcgagctgcgttagtaaagcggaagccgatgccgttacgctcatcgtgaagaacacggtgcgtacctttctgccggatgcgctggtgaccatcaccggcggtttccgccgtggcaaacctatgggccacgacatcgactttctgatcacgaatccgggcccgaaagaggatgacgagctgctccacaaagtggttgatctgctcaagaagcaaggtctgctgctgtacgaagacatcaaagagagcacgttcgtggaggaacaactgccaagtcgcaaaatcgacgccatggacaacttccagaagtgcttcgccattctcaagctgtaccagccgggcgtggataacagcagctataacacgagtaagaagagtgacatggccgaggttaaggattggaaagcgattcgtgtggatctggtgatcacgccattcgagcagtacgcctatgcgctgctcggttggacgggcagcaaagaatttggtcgcgatctgcgccgctatgcggaggagcagcgcaagatggccctcgacaaccatggcctctacgaccgcaaaaagcgcatctttctgaaagcgggtagcgaagaagagattttcgcgcatctgggtctggattatgtggagccgtgggaacgcaacgcg

SEQ ID NO: 1382 - protein, 394 aa, synthetic construct
  REGION 1..394: note = Variant of terminal deoxynucleotidyl transferase
MHHHHHHGGSGHPPSNTPEGEVPSVIARKVSQYSCQRKTTLNNYNKKFTDALEIMAENYKFKENLIACLEFKRAASLLKYLPFPVTSMKDIQGLPCIGVQVRDVIEEIIEEGESSRVKEVLNDERYKAFKQFTSVFGVGVKTSEKWFRMGLRTVEEAKASKSLKLSKMQKAGFLYYEDLASCVSKAEADAVTLIVKNTVRTFLPDALVTITGGFRRGKPMGHDIDFLITNPGPKEDDELLHKVVDLLKKQGLLLYEDIKESTFVEEQLPSRKIDAMDNFQKCFAILKLYQPGVDNSSYNTSKKSDMAEVKDWKAIRVDLVITPFEQYAYALLGWTGSKEFGRDLRRYAEEQRKMALDNHGLYDRKKRIFLKAGSEEEIFAHLGLDYVEPWERNA

SEQ ID NO: 1383 - DNA, 1182 bp, synthetic construct
  misc_feature 1..1182: note = Variant of terminal deoxynucleotidyl transferase
  source 1..1182: mol_type = other DNA
atgcaccatcatcatcatcatggcggtagcggccatccgccgagcaataccccggagggggaggtgccgagcgttatcgcccgcaaggttagtcagtacagctgccagcgcaagaccacgctgaataactacaacaaaaagtttaccgacgcgctggagatcatggccgagaactacaaatttaaagagaacctgatcgcgtgtctggaatttaagcgcgccgcgagtctgctgaaatatctgccgttcccggttaccagcatgaaagacatccaaggtctgccgtgcattggcgaccaagttcgtgacgtgatcgaggagatcatcgaagagggcgagagcagccgtgttaaagaagttctcaatgacgagcgctacaaggcctttaagcagttcaccagcgtgttcggtgtgggcgtgaaaaccagcgaaaagtggtttcgtatgggcctccgtacggttgaagaggcaaaggccagtaagagtctgaagctgagcaagatgcagaaggcgggcttcctgtattacgaggatctggcgagctgcgttagtaaagcggaagccgatgccgttacgctcatcgtgaagaacacggtgcgtacctttctgccggatgcgctggtgaccatcaccggcggtttccgccgtggcaaacctatgggccacgacatcgactttctgatcacgaatccgggcccgaaagaggatgacgagctgctccacaaagtggttgatctgctcaagaagcaaggtctgctgctgtacgaagacatcaaagagagcacgttcgtggaggaacaactgccaagtcgcaaaatcgacgccatggacaacttccagaagtgcttcgccattctcaagctgtaccagccgggcgtggataacagcagctataacacgagtaagaagagtgacatggccgaggttaaggattggaaagcgattcgtgtggatctggtgatcacgccattcgagcagtacgcctatgcgctgctcggttggacgggcagcaaagaatttggtcgcgatctgcgccgctatgcggaggaagagcgcaagatgatcctcgacaaccatggcctctacgaccgcaaaaagcgcatctttctgaaagcgggcagcgaagaagagattttcgcgcatctgggtctggattatgtggagccgtgggaacgcaacgcg

SEQ ID NO: 1384 - protein, 394 aa, synthetic construct
  REGION 1..394: note = Variant of terminal deoxynucleotidyl transferase
MHHHHHHGGSGHPPSNTPEGEVPSVIARKVSQYSCQRKTTLNNYNKKFTDALEIMAENYKFKENLIACLEFKRAASLLKYLPFPVTSMKDIQGLPCIGDQVRDVIEEIIEEGESSRVKEVLNDERYKAFKQFTSVFGVGVKTSEKWFRMGLRTVEEAKASKSLKLSKMQKAGFLYYEDLASCVSKAEADAVTLIVKNTVRTFLPDALVTITGGFRRGKPMGHDIDFLITNPGPKEDDELLHKVVDLLKKQGLLLYEDIKESTFVEEQLPSRKIDAMDNFQKCFAILKLYQPGVDNSSYNTSKKSDMAEVKDWKAIRVDLVITPFEQYAYALLGWTGSKEFGRDLRRYAEEERKMILDNHGLYDRKKRIFLKAGSEEEIFAHLGLDYVEPWERNA

SEQ ID NO: 1385 - DNA, 1182 bp, synthetic construct
  misc_feature 1..1182: note = Variant of terminal deoxynucleotidyl transferase
  source 1..1182: mol_type = other DNA
atgcaccatcatcatcatcatggcggtagcggccatccgccgagcaataccccggagggggaggtgccgagcgttatcgcccgcaaggttagtcagtacagctgccagcgcaagaccacgctgaataactacaacaaaaagtttaccgacgcgctggagatccgtgccgagtcgtacaaatttaaagagaacctgatcgcgtgtctggaatttaagcgcgccgcgagtctgctgaaatatctgccgttcccggttaccagcatgaaagacatccaaggtctgccgtgcattggcgaccaagttcgtgacgtgatcgaggagatcatcgaagagggcgagagcagccgtgttaaagaagttctcaatgacgagcgctacaaggcctttaagcagttcaccagcgtgttcggtgtgggcgtgaaaaccagcgaaaagtggtttcgtatgggcctccgtacggttgaagaggcaaaggccagtaagagtctgaagctgagcaagatgcagaaggcgggcttcctgtattacgaggatctggcgagctgcgttagtaaagcggaagccgatgccgttacgctcatcgtgaagaacacggtgcgtacctttctgccggatgcgctggtgaccatcaccggcggtttccgccgtggcaaacctatgggccacgacatcgactttctgatcacgaatccgggcccgaaagaggatgacgagctgctccacaaagtggttgatctgctcaagaagcaaggtctgctgctgtactgtgacatcaaagagagcacgttcgtggaggaacaactgccaagtcgcaaaatcgacgccatggacaacttccagaagtgcttcgccattctcaagctgtaccagccgggcgtggataacagcagctataacacgagtaagaagagtgacatggccgaggttaaggattggaaagcgattcgtgtggatctggtgatcacgccattcgagcagtacgcctatgcgctgctcggttggacgggcagcaaagaatttggtcgcgatctgcgccgctatgcggagtcgcagcgcaagatgatcctcgacaaccatggcctctacgaccgcaaaaagcgcatctttctgaaagcgggcagcgaagaagagattttcgcgcatctgggtctggattatgtggagccgtgggaacgcaacgcg

SEQ ID NO: 1386 - protein, 394 aa, synthetic construct
  REGION 1..394: note = Variant of terminal deoxynucleotidyl transferase
MHHHHHHGGSGHPPSNTPEGEVPSVIARKVSQYSCQRKTTLNNYNKKFTDALEIRAESYKFKENLIACLEFKRAASLLKYLPFPVTSMKDIQGLPCIGDQVRDVIEEIIEEGESSRVKEVLNDERYKAFKQFTSVFGVGVKTSEKWFRMGLRTVEEAKASKSLKLSKMQKAGFLYYEDLASCVSKAEADAVTLIVKNTVRTFLPDALVTITGGFRRGKPMGHDIDFLITNPGPKEDDELLHKVVDLLKKQGLLLYCDIKESTFVEEQLPSRKIDAMDNFQKCFAILKLYQPGVDNSSYNTSKKSDMAEVKDWKAIRVDLVITPFEQYAYALLGWTGSKEFGRDLRRYAESQRKMILDNHGLYDRKKRIFLKAGSEEEIFAHLGLDYVEPWERNA

SEQ ID NO: 1387 - DNA, 1182 bp, synthetic construct; identical to SEQ ID NO: 1349
  misc_feature 1..1182: note = Variant of terminal deoxynucleotidyl transferase
  source 1..1182: mol_type = other DNA

SEQ ID NO: 1388 - protein, 394 aa, synthetic construct; identical to SEQ ID NO: 1350
  REGION 1..394: note = Variant of terminal deoxynucleotidyl transferase

SEQ ID NO: 1389 - DNA, 1182 bp, synthetic construct
  misc_feature 1..1182: note = Variant of terminal deoxynucleotidyl transferase
  source 1..1182: mol_type = other DNA
atgcaccatcatcatcatcatggcggtagcggccatccgccgagcaataccccggagggggaggtgccgagcgttatcgcccgcaaggttagtcagtacagctgccagcgcaagaccacgctgaataactacaacaaaaagtttaccgacgcgctggagatccgtgccgagatgtacaaatttaaagagaacctgatcgcgtgtctggaatttaagcgcgccgcgagtctgctgaaatatctgccgttcccggttaccagcatgaaagacatccaaggtctgccgtgcattggcgaccaagttcgtgacgtgatcgaggagatcatcgaagagggcgagagcagccgtgttaaagaagttctcaatgacgagcgctacaaggcctttaagcagttcaccagcgtgttcggtgtgggcgtgaaaaccagcgaaaagtggtttcgtatgggcctccgtacggttgaagaggcaaaggccagtaagagtctgaagctgagcaagatgcagaaggcgggcttcctgtattacgaggatctggcgagctgcgttagtaaagcggaagccgatgccgttacgctcatcgtgaagaacacggtgcgtacctttctgccggatgcgctggtgaccatcaccggcggtttccgccgtggcaaacctatgggccacgacatcgactttctgatcacgaatccgggcccgaaagaggatgacgagctgctccacaaagtggttgatctgctcaagaagcaaggtctgctgctgtactgtgacatcaaagagagcacgttcgtggaggaacaactgccaagtcgcaaaatcgacgccatggacaacttccagaagtgcttcgccattctcaagctgtaccagccgggcgtggataacagcagctataacacgagtaagaagagtgacatggccgaggttaaggattggaaagcgattcgtgtggatctggtgatcacgccattcgagcagtacgcctatgcgctgctcggttggacgggcagcaaagaatttggtcgcgatctgcgccgctatgcggaggaagagcgcaagatgatcctcgacaaccatggcctctacgaccgcaaaaagcgcatctttctgaaagcgggcagcgaagaagagattttcgcgcatctgggtctggattatgtggagccgtgggaacgcaacgcg

SEQ ID NO: 1390 - protein, 394 aa, synthetic construct
  REGION 1..394: note = Variant of terminal deoxynucleotidyl transferase
MHHHHHHGGSGHPPSNTPEGEVPSVIARKVSQYSCQRKTTLNNYNKKFTDALEIRAEMYKFKENLIACLEFKRAASLLKYLPFPVTSMKDIQGLPCIGDQVRDVIEEIIEEGESSRVKEVLNDERYKAFKQFTSVFGVGVKTSEKWFRMGLRTVEEAKASKSLKLSKMQKAGFLYYEDLASCVSKAEADAVTLIVKNTVRTFLPDALVTITGGFRRGKPMGHDIDFLITNPGPKEDDELLHKVVDLLKKQGLLLYCDIKESTFVEEQLPSRKIDAMDNFQKCFAILKLYQPGVDNSSYNTSKKSDMAEVKDWKAIRVDLVITPFEQYAYALLGWTGSKEFGRDLRRYAEEERKMILDNHGLYDRKKRIFLKAGSEEEIFAHLGLDYVEPWERNA

SEQ ID NO: 1391 - DNA, 1182 bp, synthetic construct
  misc_feature 1..1182: note = Variant of terminal deoxynucleotidyl transferase
  source 1..1182: mol_type = other DNA
atgcaccatcatcatcatcatggcggtagcggccatccgccgagcaataccccggagggggaggtgccgagcgttatcgcccgcaaggttagtcagtacagctgccagcgcaagaccacgctgaataactacaacaaaaagtttaccgacgcgctggagatcatggccgagaactacaaatttaaagagaacctgatcgcgtgtctggtatttaagcgcgccgcgagtctgctgaaatatctgccgttcccggttaccagcatgaaagacatccaaggtctgccgtgcattggcgaccaagttcgtgacgtgatcgaggagatcatcgaagagggcgagagcagccgtgttaaagaagttctcaatgacgagcgctacaaggcctttaagcagttcactagcgtgttcggtgtgggcgtgaaaaccagcgaaaagtggtttcgtatgggcctccgtacggttgaagaggcaaaggccagtaagagtctgaagctgagcaagatgcagaaggcgggcttcctgtattacgaggatctggcgagctgcgttagtaaagcggaagccgatgccgttacgctcatcgtgaagaacacggtgcgtacctttctgccggatgcgctggtgaccatcaccggcggtttccgccgtggcaaacctatgggccacgacatcgactttctgatcacgaatccgggcccgaaagaggatgacgagctgctccacaaagtggttgatctgctcaagaagcaaggtctgctgctgtactgcgacatcaaagagagcacgttcgtggaggaacaactgccaagtcgcaaaatcgacgccatggacaacttccagaagtgcttcgccattctcaagctgtaccagccgggcgtggataacagcagctataacacgagtaagaagagtgacatggccgaggttaaggattggaaagcgattcgtgtggatctggtgatcacgccattcgagcagtacgcctatgcgctgctcggttggacgggcagcaaagaatttggtcgcgatctgcgccgctatgcggaggaagagcgcggcatgatcctcgacaaccatggcctctacgaccgcaaaaagcgcatctttctgaaagcgggcagcgaagaagagattttcgcgcatctgggtctggattatgtggagccgtgggaacgcaacgcg

SEQ ID NO: 1392 - protein, 394 aa, synthetic construct
  REGION 1..394: note = Variant of terminal deoxynucleotidyl transferase
MHHHHHHGGSGHPPSNTPEGEVPSVIARKVSQYSCQRKTTLNNYNKKFTDALEIMAENYKFKENLIACLVFKRAASLLKYLPFPVTSMKDIQGLPCIGDQVRDVIEEIIEEGESSRVKEVLNDERYKAFKQFTSVFGVGVKTSEKWFRMGLRTVEEAKASKSLKLSKMQKAGFLYYEDLASCVSKAEADAVTLIVKNTVRTFLPDALVTITGGFRRGKPMGHDIDFLITNPGPKEDDELLHKVVDLLKKQGLLLYCDIKESTFVEEQLPSRKIDAMDNFQKCFAILKLYQPGVDNSSYNTSKKSDMAEVKDWKAIRVDLVITPFEQYAYALLGWTGSKEFGRDLRRYAEEERGMILDNHGLYDRKKRIFLKAGSEEEIFAHLGLDYVEPWERNA

SEQ ID NO: 1393 - DNA, 1182 bp, synthetic construct
  misc_feature 1..1182: note = Variant of terminal deoxynucleotidyl transferase
  source 1..1182: mol_type = other DNA
atgcaccatcatcatcatcatggcggtagcggccatccgccgagcaataccccggagggggaggtgccgagcgttatcgcccgcaaggttagtcagtacagctgccagcgcaagaccacgctgaataactacaacaaaaagtttaccgacgcgctggagatccgtgccgagtcgtacaaatttaaagagaacctgatcgcgtgtctggaatttaagcgcgccgcgagtctgctgaaatatctgccgttcccggttaccagcatgaaagacatccaaggtctgccgtgcattggcgtccaagttcgtgacgtgatcgaggagatcatcgaagagggcgagagcagccgtgttaaagaagttctcaatgacgagcgctacaaggcctttaagcagttcaccagcgtgttcggtgtgggcgtgaaaaccagcgaaaagtggtttcgtatgggcctccgtacggttgaagaggcaaaggccagtaagagtctgaagctgagcaagatgcagaaggcgggcttcctgtattacgaggatctggcgagctgcgttagtaaagcggaagccgatgccgttacgctcatcgtgaagaacacggtgcgtacctttctgccggatgcgctggtgaccatcaccggcggtttccgccgtggcaaacctatgggccacgacatcgactttctgatcacgaatccgggcccgaaagaggatgacgagctgctccacaaagtggttgatctgctcaagaagcaaggtctgctgctgtactgtgacatcaaagagagcacgttcgtggaggaacaactgccaagtcgcaaaatcgacgccatggacaacttccagaagtgcttcgccattctcaagctgtaccagccgggcgtggataacagcagctataacacgagtaagaagagtgacatggccgaggttaaggattggaaagcgattcgtgtggatctggtgatcacgccattcgagcagtacgcctatgcgctgctcggttggacgggcagcaaagaatttggtcgcgatctgcgccgctatgcggaggagcagcgcaagatgatcctcgacaaccatggcctctacgaccgcaaaaagcgcatctttctgaaagcgggtagcgaagaagagattttcgcgcatctgggtctggattatgtggagccgtgggaacgcaacgcg

SEQ ID NO: 1394 - protein, 394 aa, synthetic construct
  REGION 1..394: note = Variant of terminal deoxynucleotidyl transferase
MHHHHHHGGSGHPPSNTPEGEVPSVIARKVSQYSCQRKTTLNNYNKKFTDALEIRAESYKFKENLIACLEFKRAASLLKYLPFPVTSMKDIQGLPCIGVQVRDVIEEIIEEGESSRVKEVLNDERYKAFKQFTSVFGVGVKTSEKWFRMGLRTVEEAKASKSLKLSKMQKAGFLYYEDLASCVSKAEADAVTLIVKNTVRTFLPDALVTITGGFRRGKPMGHDIDFLITNPGPKEDDELLHKVVDLLKKQGLLLYCDIKESTFVEEQLPSRKIDAMDNFQKCFAILKLYQPGVDNSSYNTSKKSDMAEVKDWKAIRVDLVITPFEQYAYALLGWTGSKEFGRDLRRYAEEQRKMILDNHGLYDRKKRIFLKAGSEEEIFAHLGLDYVEPWERNA

SEQ ID NO: 1395 - DNA, 1182 bp, synthetic construct
  misc_feature 1..1182: note = Variant of terminal deoxynucleotidyl transferase
  source 1..1182: mol_type = other DNA
atgcaccatcatcatcatcatggcggtagcggccatccgccgagcaataccccggagggggaggtgccgagcgttatcgcccgcaaggttagtcagtacagctgccagcgcaagaccacgctgaataactacaacaaaaagtttaccgacgcgctggagatcatggccgagtcgtacaaatttaaagagaacctgatcgcgtgtctggaatttaagcgcgccgcgagtctgctgaaatatctgccgttcccggttaccagcatgaaagacatccaaggtctgccgtgcattggcgaccaagttcgtgacgtgatcgaggagatcatcgaagagggcgagagcagccgtgttaaagaagttctcaatgacgagcgctacaaggcctttaagcagttcaccagcgtgttcggtgtgggcgtgaaaaccagcgaaaagtggtttcgtatgggcctccgtacggttgaagaggcaaaggccagtaagagtctgaagctgagcaagatgcagaaggcgggcttcctgtattacgaggatctggcgagctgcgttagtaaagcggaagccgatgccgttacgctcatcgtgaagaacacggtgcgtacctttctgccggatgcgctggtgaccatcaccggcggtttccgccgtggcaaacctatgggccacgacatcgactttctgatcacgaatccgggcccgaaagaggatgacgagctgctccacaaagtggttgatctgctcaagaagcaaggtctgctgctgtactgcgacatcaaagagagcacgttcgtggaggaacaactgccaagtcgcaaaatcgacgccatggacaacttccagaagtgcttcgccattctcaagctgtaccagccgggcgtggataacagcagctataacacgagtaagaagagtgacatggccgaggttaaggattggaaagcgattcgtgtggatctggtgatcacgccattcgagcagtacgcctatgcgctgctcggttggacgggcagcaaagaatttggtcgcgatctgcgccgctatgcggagtcggagcgcaagatggtcctcgacaaccatggcctctacgaccgcaaaaagcgcatctttctgaaagcgggcagcgaagaagagattttcgcgcatctgggtctggattatgtggagccgtgggaacgcaacgcg

SEQ ID NO: 1396 - protein, 394 aa, synthetic construct
  REGION 1..394: note = Variant of terminal deoxynucleotidyl transferase
MHHHHHHGGSGHPPSNTPEGEVPSVIARKVSQYSCQRKTTLNNYNKKFTDALEIMAESYKFKENLIACLEFKRAASLLKYLPFPVTSMKDIQGLPCIGDQVRDVIEEIIEEGESSRVKEVLNDERYKAFKQFTSVFGVGVKTSEKWFRMGLRTVEEAKASKSLKLSKMQKAGFLYYEDLASCVSKAEADAVTLIVKNTVRTFLPDALVTITGGFRRGKPMGHDIDFLITNPGPKEDDELLHKVVDLLKKQGLLLYCDIKESTFVEEQLPSRKIDAMDNFQKCFAILKLYQPGVDNSSYNTSKKSDMAEVKDWKAIRVDLVITPFEQYAYALLGWTGSKEFGRDLRRYAESERKMVLDNHGLYDRKKRIFLKAGSEEEIFAHLGLDYVEPWERNA

SEQ ID NO: 1397 - DNA, 1182 bp, synthetic construct
  misc_feature 1..1182: note = Variant of terminal deoxynucleotidyl transferase
  source 1..1182: mol_type = other DNA
atgcaccatcatcatcatcatggcggtagcggccatccgccgagcaataccccggagggggaggtgccgagcgttatcgcccgcaaggttagtcagtacagctgccagcgcaagaccacgctgaataactacaacaaaaagtttaccgacgcgctggagatccgtgccgagtcgtacaaatttaaagagaacctgatcgcgtgtctggaatttaagcgcgccgcgagtctgctgaaatatctgccgttcccggttaccagcatgaaagacatccaaggtctgccgtgcattggcgaccaagttcgtgacgtgatcgaggagatcatcgaagagggcgagagcagccgtgttaaagaagttctcaatgacgagcgctacaaggcctttaagcagttcaccagcgtgttcggtgtgggcgtgaaaaccagcgaaaagtggtttcgtatgggcctccgtacggttgaagaggcaaaggccagtaagagtctgaagctgagcaagatgcagaaggcgggcttcctgtattacgaggatctggcgagctgcgttagtaaagcggaagccgatgccgttacgctcatcgtgaagaacacggtgcgtacctttctgccggatgcgctggtgaccatcaccggcggtttccgccgtggcaaacctatgggccacgacatcgactttctgatcacgaatccgggcccgaaagaggatgacgagctgctccacaaagtggttgatctgctcaagaagcaaggtctgctgctgtacgaagacatcaaagagagcacgttcgtggaggaacaactgccaagtcgcaaaatcgacgccatggacaacttccagaagtgcttcgccattctcaagctgtaccagccgggcgtggataacagcagctataacacgagtaagaagagtgacatggccgaggttaaggattggaaagcgattcgtgtggatctggtgatcacgccattcgagcagtacgcctatgcgctgctcggttggacgggcagcaaagaatttggtcgcgatctgcgccgctatgcggaagaggagcgcaagatggccctcgacaaccatggcctctacgaccgcaaaaagcgcatctttctgaaagcgggcagcgaagaagagattttcgcgcatctgggtctggattatgtggagccgtgggaacgcaacgcg

SEQ ID NO: 1398 - protein, 394 aa, synthetic construct
  REGION 1..394: note = Variant of terminal deoxynucleotidyl transferase
MHHHHHHGGSGHPPSNTPEGEVPSVIARKVSQYSCQRKTTLNNYNKKFTDALEIRAESYKFKENLIACLEFKRAASLLKYLPFPVTSMKDIQGLPCIGDQVRDVIEEIIEEGESSRVKEVLNDERYKAFKQFTSVFGVGVKTSEKWFRMGLRTVEEAKASKSLKLSKMQKAGFLYYEDLASCVSKAEADAVTLIVKNTVRTFLPDALVTITGGFRRGKPMGHDIDFLITNPGPKEDDELLHKVVDLLKKQGLLLYEDIKESTFVEEQLPSRKIDAMDNFQKCFAILKLYQPGVDNSSYNTSKKSDMAEVKDWKAIRVDLVITPFEQYAYALLGWTGSKEFGRDLRRYAEEERKMALDNHGLYDRKKRIFLKAGSEEEIFAHLGLDYVEPWERNA

SEQ ID NO: 1399 - DNA, 1182 bp, synthetic construct; identical to SEQ ID NO: 1351
  misc_feature 1..1182: note = Variant of terminal deoxynucleotidyl transferase
  source 1..1182: mol_type = other DNA

SEQ ID NO: 1400 - protein, 394 aa, synthetic construct; identical to SEQ ID NO: 1352
  REGION 1..394: note = Variant of terminal deoxynucleotidyl transferase

SEQ ID NO: 1401 - DNA, 1182 bp, synthetic construct
  misc_feature 1..1182: note = Variant of terminal deoxynucleotidyl transferase
  source 1..1182: mol_type = other DNA
atgcaccatcatcatcatcatggcggtagcggccatccgccgagcaataccccggagggggaggtgccgagcgttatcgcccgcaaggttagtcagtacagctgccagcgcaagaccacgctgaataactacaacaaaaagtttaccgacgcgctggagatccgtgccgagatgtacaaatttaaagagaacctgatcgcgtgtctggaatttaagcgcgccgcgagtctgctgaaatatctgccgttcccggttaccagcatgaaagacatccaaggtctgccgtgcattggcgaccaagttcgtgacgtgatcgaggagatcatcgaagagggcgagagcagccgtgttaaagaagttctcaatgacgagcgctacaaggcctttaagcagttcaccagcgtgttcggtgtgggcgtgaaaaccagcgaaaagtggtttcgtatgggcctccgtacggttgaagaggcaaaggccagtaagagtctgaagctgagcaagatgcagaaggcgggcttcctgtattacgaggatctggcgagctgcgttagtaaagcggaagccgatgccgttacgctcatcgtgaagaacacggtgcgtacctttctgccggatgcgctggtgaccatcaccggcggtttccgccgtggcaaacctatgggccacgacatcgactttctgatcacgaatccgggcccgaaagaggatgacgagctgctccacaaagtggttgatctgctcaagaagcaaggtctgctgctgtacgaagacatcaaagagagcacgttcgtggaggaacaactgccaagtcgcaaaatcgacgccatggacaacttccagaagtgcttcgccattctcaagctgtaccagccgggcgtggataacagcagctataacacgagtaagaagagtgacatggccgaggttaaggattggaaagcgattcgtgtggatctggtgatcacgccattcgagcagtacgcctatgcgctgctcggttggacgggcagcaaagaatttggtcgcgatctgcgccgctatgcggaggaggagcgcaagatgatcctcgacaaccatggcctctacgaccgcaaaaagcgcatctttctgaaagcgggcagcgaagaagagattttcgcgcatctgggtctggattatgtggagccgtgggaacgcaacgcg

SEQ ID NO: 1402 - protein, 394 aa, synthetic construct
  REGION 1..394: note = Variant of terminal deoxynucleotidyl transferase
MHHHHHHGGSGHPPSNTPEGEVPSVIARKVSQYSCQRKTTLNNYNKKFTDALEIRAEMYKFKENLIACLEFKRAASLLKYLPFPVTSMKDIQGLPCIGDQVRDVIEEIIEEGESSRVKEVLNDERYKAFKQFTSVFGVGVKTSEKWFRMGLRTVEEAKASKSLKLSKMQKAGFLYYEDLASCVSKAEADAVTLIVKNTVRTFLPDALVTITGGFRRGKPMGHDIDFLITNPGPKEDDELLHKVVDLLKKQGLLLYEDIKESTFVEEQLPSRKIDAMDNFQKCFAILKLYQPGVDNSSYNTSKKSDMAEVKDWKAIRVDLVITPFEQYAYALLGWTGSKEFGRDLRRYAEEERKMILDNHGLYDRKKRIFLKAGSEEEIFAHLGLDYVEPWERNA

SEQ ID NO: 1403 - DNA, 1182 bp, synthetic construct
  misc_feature 1..1182: note = Variant of terminal deoxynucleotidyl transferase
  source 1..1182: mol_type = other DNA
atgcaccatcatcatcatcatggcggtagcggccatccgccgagcaataccccggagggggaggtgccgagcgttatcgcccgcaaggttagtcagtacagctgccagcgcaagaccacgctgaataactacaacaaaaagtttaccgacgcgctggagatcatggccgagatgtacaaatttaaagagaacctgatcgcgtgtctggaatttaagcgcgccgcgagtctgctgaaatatctgccgttcccggttaccagcatgaaagacatccaaggtctgccgtgcattggcgaccaagttcgtgacgtgatcgaggagatcatcgaagagggcgagagcagccgtgttaaagaagttctcaatgacgagcgctacaaggcctttaagcagttcaccagcgtgttcggtgtgggcgtgaaaaccagcgaaaagtggtttcgtatgggcctccgtacggttgaagaggcaaaggccagtaagagtctgaagctgagcaagatgcagaaggcgggcttcctgtattacgaggatctggcgagctgcgttagtaaagcggaagccgatgccgttacgctcatcgtgaagaacacggtgcgtacctttctgccggatgcgctggtgaccatcaccggcggtttccgccgtggcaaacctatgggccacgacatcgactttctgatcacgaatccgggcccgaaagaggatgacgagctgctccacaaagtggttgatctgctcaagaagcaaggtctgctgctgtacgaagacatcaaagagagcacgttcgtggaggaacaactgccaagtcgcaaaatcgacgccatggacaacttccagaagtgcttcgccattctcaagctgtaccagccgggcgtggataacagcagctataacacgagtaagaagagtgacatggccgaggttaaggattggaaagcgattcgtgtggatctggtgatcacgccattcgagcagtacgcctatgcgctgctcggttggacgggcagcaaagaatttggtcgcgatctgcgccgctatgcggagtcggagcgcaagatggtcctcgacaaccatggcctctacgaccgcaaaaagcgcatctttctgaaagcgggtagcgaagaagagattttcgcgcatctgggtctggattatgtggagccgtgggaacgcaacgcg

SEQ ID NO: 1404 - protein, 394 aa, synthetic construct
  REGION 1..394: note = Variant of terminal deoxynucleotidyl transferase
MHHHHHHGGSGHPPSNTPEGEVPSVIARKVSQYSCQRKTTLNNYNKKFTDALEIMAEMYKFKENLIACLEFKRAASLLKYLPFPVTSMKDIQGLPCIGDQVRDVIEEIIEEGESSRVKEVLNDERYKAFKQFTSVFGVGVKTSEKWFRMGLRTVEEAKASKSLKLSKMQKAGFLYYEDLASCVSKAEADAVTLIVKNTVRTFLPDALVTITGGFRRGKPMGHDIDFLITNPGPKEDDELLHKVVDLLKKQGLLLYEDIKESTFVEEQLPSRKIDAMDNFQKCFAILKLYQPGVDNSSYNTSKKSDMAEVKDWKAIRVDLVITPFEQYAYALLGWTGSKEFGRDLRRYAESERKMVLDNHGLYDRKKRIFLKAGSEEEIFAHLGLDYVEPWERNA

SEQ ID NO: 1405 - DNA, 1182 bp, synthetic construct
  misc_feature 1..1182: note = Variant of terminal deoxynucleotidyl transferase
  source 1..1182: mol_type = other DNA
atgcaccatcatcatcatcatggcggtagcggccatccgccgagcaataccccggagggggaggtgccgagcgttatcgcccgcaaggttagtcagtacagctgccagcgcaagaccacgctgaataactacaacaaaaagtttaccgacgcgctggagatcatggccgagaactacaaatttaaagagaacctgatcgcgtgtctggaatttaagcgcgccgcgagtattctgaaatatctgccgttcccggttaccagcatgaaagacatccaaggtctgccgtgcattggcgaccaagttcgtgacgtgatcgaggagatcatcgaagagggcgagagcagccgtgttaaagaagttctcaatgacgagcgctacaaggcctttaagcagttctatagcgtgttcggtgtgggcgtgaaaaccagcgaaaagtggtttcgtatgggcctccgtacggttgaagaggcaaaggccagtaagagtctgaagctgagcaagatgcagaaggcgggcttcctgtattacgaggatctggcgagctgcgttagtaaagcggaagccgatgccgttacgctcatcgtgaagaacacggtgcgtacctttctgccggatgcgctggtgaccatcaccggcggtttccgccgtggcaaacctatgggccacgacatcgactttctgatcacgaatccgggcccgaaagaggatgacgagctgctccacaaagtggttgatctgctcaagaagcaaggtctgctgctgtactgcgacatcaaagagagcacgttcgtggaggaacaactgccaagtcgcaaaatcgacgccatggacaacttccagaagtgcttcgccattctcaagctgtaccagccgggcgtggataacagcagctataacacgagtaagaagagtgacatggccgaggttaaggattggaaagcgattcgtgtggatctggtgatcacgccattcgagcagtacgcctatgcgctgctcggttggacgggcagcaaagaatttggtcgcgatctgcgccgctatgcggaggaagagcgcggcatgatcctcgacaaccatggcctctacgaccgcaaaaagcgcatctttctgaaagcgggcagcgaagaagagattttcgcgcatctgggtctggattatgtggagccgtgggaacgcaacgcg

SEQ ID NO: 1406 - protein, 394 aa, synthetic construct
  REGION 1..394: note = Variant of terminal deoxynucleotidyl transferase
MHHHHHHGGSGHPPSNTPEGEVPSVIARKVSQYSCQRKTTLNNYNKKFTDALEIMAENYKFKENLIACLEFKRAASILKYLPFPVTSMKDIQGLPCIGDQVRDVIEEIIEEGESSRVKEVLNDERYKAFKQFYSVFGVGVKTSEKWFRMGLRTVEEAKASKSLKLSKMQKAGFLYYEDLASCVSKAEADAVTLIVKNTVRTFLPDALVTITGGFRRGKPMGHDIDFLITNPGPKEDDELLHKVVDLLKKQGLLLYCDIKESTFVEEQLPSRKIDAMDNFQKCFAILKLYQPGVDNSSYNTSKKSDMAEVKDWKAIRVDLVITPFEQYAYALLGWTGSKEFGRDLRRYAEEERGMILDNHGLYDRKKRIFLKAGSEEEIFAHLGLDYVEPWERNA

SEQ ID NO: 1407 - DNA, 1182 bp, synthetic construct
  misc_feature 1..1182: note = Variant of terminal deoxynucleotidyl transferase
  source 1..1182: mol_type = other DNA
atgcaccatcatcatcatcatggcggtagcggccatccgccgagcaataccccggagggggaggtgccgagcgttatcgcccgcaaggttagtcagtacagctgccagcgcaagaccacgctgaataactacaacaaaaagtttaccgacgcgctggagatcatggccgagaactacaaatttaaagagaacctgatcgcgtgtctggaagccaagcgcgccgcgagtattctgaaatatctgccgttcccggttaccagcatgaaagacatccaaggtctgccgtgcattggcgaccaagttcgtgacgtgatcgaggagatcatcgaagagggcgagagcagccgtgttaaagaagttctcaatgacgagcgctacaaggcctttaagcagttctatagcgtgttcggtgtgggcgtgaaaaccagcgaaaagtggtttcgtatgggcctccgtacggttgaagaggcaaaggccagtaagagtctgaagctgagcaagatgcagaaggcgggcttcctgtattacgaggatctggcgagctgcgttagtaaagcggaagccgatgccgttacgctcatcgtgaagaacacggtgcgtacctttctgccggatgcgctggtgaccatcaccggcggtttccgccgtggcaaacctatgggccacgacatcgactttctgatcacgaatccgggcccgaaagaggatgacgagctgctccacaaagtggttgatctgctcaagaagcaaggtctgctgctgtactgcgacatcaaagagagcacgttcgtggaggaacaactgccaagtcgcaaaatcgacgccatggacaacttccagaagtgcttcgccattctcaagctgtaccagccgggcgtggataacagcagctataacacgagtaagaagagtgacatggccgaggttaaggattggaaagcgattcgtgtggatctggtgatcacgccattcgagcagtacgcctatgcgctgctcggttggacgggcagcaaagaatttggtcgcgatctgcgccgctatgcggaggaagagcgcatgatgatcctcgacaaccatggcctctacgaccgcaaaaagcgcatctttctgaaagcgggcagcgaagaagagattttcgcgcatctgggtctggattatgtggagccgtgggaacgcaacgcg

SEQ ID NO: 1408 - protein, 394 aa, synthetic construct
  REGION 1..394: note = Variant of terminal deoxynucleotidyl transferase
MHHHHHHGGSGHPPSNTPEGEVPSVIARKVSQYSCQRKTTLNNYNKKFTDALEIMAENYKFKENLIACLEAKRAASILKYLPFPVTSMKDIQGLPCIGDQVRDVIEEIIEEGESSRVKEVLNDERYKAFKQFYSVFGVGVKTSEKWFRMGLRTVEEAKASKSLKLSKMQKAGFLYYEDLASCVSKAEADAVTLIVKNTVRTFLPDALVTITGGFRRGKPMGHDIDFLITNPGPKEDDELLHKVVDLLKKQGLLLYCDIKESTFVEEQLPSRKIDAMDNFQKCFAILKLYQPGVDNSSYNTSKKSDMAEVKDWKAIRVDLVITPFEQYAYALLGWTGSKEFGRDLRRYAEEERMMILDNHGLYDRKKRIFLKAGSEEEIFAHLGLDYVEPWERNA

SEQ ID NO: 1409 - DNA, 1182 bp, synthetic construct
  misc_feature 1..1182: note = Variant of terminal deoxynucleotidyl transferase
  source 1..1182: mol_type = other DNA
atgcaccatcatcatcatcatggcggtagcggccatccgccgagcaataccccggagggggaggtgccgagcgttatcgcccgcaaggttagtcagtacagctgccagcgcaagaccacgctgaataactacaacaaaaagtttaccgacgcgctggagatcatggccgagaactacaaatttaaagagaacctgatcgcgtgtctggaatttaagcgcgccgcgagtattctgaaatatctgccgttcccggttaccagcatgaaagacatccaaggtctgccgtgcattggcgaccaagttcgtgacgtgatcgaggagatcatcgaagagggcgagagcagccgtgttaaagaagttctcaatgacgagcgctacaaggcctttaagcagttcaccagcgtgttcggtgtgggcgtgaaaaccagcgaaaagtggtttcgtatgggcctccgtacggttgaagaggcaaaggccagtaagagtctgaagctgagcaagatgcagaaggcgggcttcctgtattacgaggatctggcgagctgcgttagtaaagcggaagccgatgccgttacgctcatcgtgaagaacacggtgcgtacctttctgccggatgcgctggtgaccatcaccggcggtttccgccgtggcaaacctatgggccacgacatcgactttctgatcacgaatccgggcccgaaagaggatgacgagctgctccacaaagtggttgatctgctcaagaagcaaggtctgctgctgtactgcgacatcaaagagagcacgttcgtggaggaacaactgccaagtcgcaaaatcgacgccatggacaacttccagaagtgcttcgccattctcaagctgtaccagccgggcgtggataacagcagctataacacgagtaagaagagtgacatggccgaggttaaggattggaaagcgattcgtgtggatctggtgatcacgccattcgagcagtacgcctatgcgctgctcggttggacgggcagcaaagaatttggtcgcgatctgcgccgctatgcggaggaagagcgcggcatgatcctcgacaaccatggcctctacgaccgcaaaaagcgcatctttctgaaagcgggcagcgaagaagagattttcgcgcatctgggtctggattatgtggagccgtgggaacgcaacgcg

SEQ ID NO: 1410 - protein, 394 aa, synthetic construct
  REGION 1..394: note = Variant of terminal deoxynucleotidyl transferase
MHHHHHHGGSGHPPSNTPEGEVPSVIARKVSQYSCQRKTTLNNYNKKFTDALEIMAENYKFKENLIACLEFKRAASILKYLPFPVTSMKDIQGLPCIGDQVRDVIEEIIEEGESSRVKEVLNDERYKAFKQFTSVFGVGVKTSEKWFRMGLRTVEEAKASKSLKLSKMQKAGFLYYEDLASCVSKAEADAVTLIVKNTVRTFLPDALVTITGGFRRGKPMGHDIDFLITNPGPKEDDELLHKVVDLLKKQGLLLYCDIKESTFVEEQLPSRKIDAMDNFQKCFAILKLYQPGVDNSSYNTSKKSDMAEVKDWKAIRVDLVITPFEQYAYALLGWTGSKEFGRDLRRYAEEERGMILDNHGLYDRKKRIFLKAGSEEEIFAHLGLDYVEPWERNA

SEQ ID NO: 1411 - DNA, 1182 bp, synthetic construct
  misc_feature 1..1182: note = Variant of terminal deoxynucleotidyl transferase
  source 1..1182: mol_type = other DNA
atgcaccatcatcatcatcatggcggtagcggccatccgccgagcaataccccggagggggaggtgccgagcgttatcgcccgcaaggttagtcagtacagctgccagcgcaagaccacgctgaataactacaacaaaaagtttaccgacgcgctggagatccgtgccgagtcgtacaaatttaaagagaacctgatcgcgtgtctggaatttaagcgcgccgcgagtctgctgaaatatctgccgttcccggttaccagcatgaaagacatccaaggtctgccgtgcattggcgtccaagttcgtgacgtgatcgaggagatcatcgaagagggcgagagcagccgtgttaaagaagttctcaatgacgagcgctacaaggcctttaagcagttcaccagcgtgttcggtgtgggcgtgaaaaccagcgaaaagtggtttcgtatgggcctccgtacggttgaagaggcaaaggccagtaagagtctgaagctgagcaagatgcagaaggcgggcttcctgtattacgaggatctggcgagctgcgttagtaaagcggaagccgatgccgttacgctcatcgtgaagaacacggtgcgtacctttctgccggatgcgctggtgaccatcaccggcggtttccgccgtggcaaacctatgggccacgacatcgactttctgatcacgaatccgggcccgaaagaggatgacgagctgctccacaaagtggttgatctgctcaagaagcaaggtctgctgctgtacgaagacatcaaagagagcacgttcgtggaggaacaactgccaagtcgcaaaatcgacgccatggacaacttccagaagtgcttcgccattctcaagctgtaccagccgggcgtggataacagcagctataacacgagtaagaagagtgacatggccgaggttaaggattggaaagcgattcgtgtggatctggtgatcacgccattcgagcagtacgcctatgcgctgctcggttggacgggcagcaaagaatttggtcgcgatctgcgccgctatgcggaggagcagcgcaagatgatcctcgacaaccatggcctctacgaccgcaaaaagcgcatctttctgaaagcggatagcgaagaagagattttcgcgcatctgggtctggattatgtggagccgtgggaacgcaacgcg

SEQ ID NO: 1412 - protein, 394 aa, synthetic construct
  REGION 1..394: note = Variant of terminal deoxynucleotidyl transferase
MHHHHHHGGSGHPPSNTPEGEVPSVIARKVSQYSCQRKTTLNNYNKKFTDALEIRAESYKFKENLIACLEFKRAASLLKYLPFPVTSMKDIQGLPCIGVQVRDVIEEIIEEGESSRVKEVLNDERYKAFKQFTSVFGVGVKTSEKWFRMGLRTVEEAKASKSLKLSKMQKAGFLYYEDLASCVSKAEADAVTLIVKNTVRTFLPDALVTITGGFRRGKPMGHDIDFLITNPGPKEDDELLHKVVDLLKKQGLLLYEDIKESTFVEEQLPSRKIDAMDNFQKCFAILKLYQPGVDNSSYNTSKKSDMAEVKDWKAIRVDLVITPFEQYAYALLGWTGSKEFGRDLRRYAEEQRKMILDNHGLYDRKKRIFLKADSEEEIFAHLGLDYVEPWERNA

SEQ ID NO: 1413 - DNA, 1182 bp, synthetic construct
  misc_feature 1..1182: note = Variant of terminal deoxynucleotidyl transferase
  source 1..1182: mol_type = other DNA
atgcaccatcatcatcatcatggcggtagcggccatccgccgagcaataccccggagggggaggtgccgagcgttatcgcccgcaaggttagtcagtacagctgccagcgcaagaccacgctgaataactacaacaaaaagtttaccgacgcgctggagatcatggccgagaactacaaatttaaagagaacctgatcgcgtgtctgttatttaagcgcgccgcgagtctgctgaaatatctgccgttcccggttaccagcatgaaagacatccaaggtctgccgtgcattggcgaccaagttcgtgacgtgatcgaggagatcatcgaagagggcgagagcagccgtgttaaagaagttctcaatgacgagcgctacaaggcctttaagcagttcactagcgtgttcggtgtgggcgtgaaaaccagcgaaaagtggtttcgtatgggcctccgtacggttgaagaggcaaaggccagtaagagtctgaagctgagcaagatgcagaaggcgggcttcctgtattacgaggatctggcgagctgcgttagtaaagcggaagccgatgccgttacgctcatcgtgaagaacacggtgcgtacctttctgccggatgcgctggtgaccatcaccggcggtttccgccgtggcaaacctatgggccacgacatcgactttctgatcacgaatccgggcccgaaagaggatgacgagctgctccacaaagtggttgatctgctcaagaagcaaggtctgctgctgtactgcgacatcaaagagagcacgttcgtggaggaacaactgccaagtcgcaaaatcgacgccatggacaacttccagaagtgcttcgccattctcaagctgtaccagccgggcgtggataacagcagctataacacgagtaagaagagtgacatggccgaggttaaggattggaaagcgattcgtgtggatctggtgatcacgccattcgagcagtacgcctatgcgctgctcggttggacgggcagcaaagaatttggtcgcgatctgcgccgctatgcggaggaagagcgcaagatgatcctcgacaaccatggcctctacgaccgcaaaaagcgcatctttctgaaagcgggcagcgaagaagagattttcgcgcatctgggtctggattatgtggagccgtgggaacgcaacgcg

SEQ ID NO: 1414 - protein, 394 aa, synthetic construct
  REGION 1..394: note = Variant of terminal deoxynucleotidyl transferase
MHHHHHHGGSGHPPSNTPEGEVPSVIARKVSQYSCQRKTTLNNYNKKFTDALEIMAENYKFKENLIACLLFKRAASLLKYLPFPVTSMKDIQGLPCIGDQVRDVIEEIIEEGESSRVKEVLNDERYKAFKQFTSVFGVGVKTSEKWFRMGLRTVEEAKASKSLKLSKMQKAGFLYYEDLASCVSKAEADAVTLIVKNTVRTFLPDALVTITGGFRRGKPMGHDIDFLITNPGPKEDDELLHKVVDLLKKQGLLLYCDIKESTFVEEQLPSRKIDAMDNFQKCFAILKLYQPGVDNSSYNTSKKSDMAEVKDWKAIRVDLVITPFEQYAYALLGWTGSKEFGRDLRRYAEEERKMILDNHGLYDRKKRIFLKAGSEEEIFAHLGLDYVEPWERNA

SEQ ID NO: 1415 - DNA, 1182 bp, synthetic construct
  misc_feature 1..1182: note = Variant of terminal deoxynucleotidyl transferase
  source 1..1182: mol_type = other DNA
atgcaccatcatcatcatcatggcggtagcggccatccgccgagcaataccccggagggggaggtgccgagcgttatcgcccgcaaggttagtcagtacagctgccagcgcaagaccacgctgaataactacaacaaaaagtttaccgacgcgctggagatcatggccgaggattacaaatttaaagagaacctgatcgcgtgtctggaatttaagcgcgccgcgagtctgctgaaatatctgccgttcccggttaccagcatgaaagacatccaaggtctgccgtgcattggcgtccaagttcgtgacgtgatcgaggagatcatcgaagagggcgagagcagccgtgttaaagaagttctcaatgacgagcgctacaaggcctttaagcagttcaccagcgtgttcggtgtgggcgtgaaaaccagcgaaaagtggtttcgtatgggcctccgtacggttgaagaggcaaaggccagtaagagtctgaagctgagcaagatgcagaaggcgggcttcctgtattacgaggatctggcgagctgcgttagtaaagcggaagccgatgccgttacgctcatcgtgaagaacacggtgcgtacctttctgccggatgcgctggtgaccatcaccggcggtttccgccgtggcaaacctatgggccacgacatcgactttctgatcacgaatccgggcccgaaagaggatgacgagctgctccacaaagtggttgatctgctcaagaagcaaggtctgctgctgtactgtgacatcaaagagagcacgttcgtggaggaacaactgccaagtcgcaaaatcgacgccatggacaacttccagaagtgcttcgccattctcaagctgtaccagccgggcgtggataacagcagctataacacgagtaagaagagtgacatggccgaggttaaggattggaaagcgattcgtgtggatctggtgatcacgccattcgagcagtacgcctatgcgctgctcggttggacgggcagcaaagaatttggtcgcgatctgcgccgctatgcggaggaggagcgcaagatggtcctcgacaaccatggcctctacgaccgcaaaaagcgcatctttctgaaagcgggcagcgaagaagagattttcgcgcatctgggtctggattatgtggagccgtgggaacgcaacgcg

SEQ ID NO: 1416 - protein, 394 aa, synthetic construct
  REGION 1..394: note = Variant of terminal deoxynucleotidyl transferase
MHHHHHHGGSGHPPSNTPEGEVPSVIARKVSQYSCQRKTTLNNYNKKFTDALEIMAEDYKFKENLIACLEFKRAASLLKYLPFPVTSMKDIQGLPCIGVQVRDVIEEIIEEGESSRVKEVLNDERYKAFKQFTSVFGVGVKTSEKWFRMGLRTVEEAKASKSLKLSKMQKAGFLYYEDLASCVSKAEADAVTLIVKNTVRTFLPDALVTITGGFRRGKPMGHDIDFLITNPGPKEDDELLHKVVDLLKKQGLLLYCDIKESTFVEEQLPSRKIDAMDNFQKCFAILKLYQPGVDNSSYNTSKKSDMAEVKDWKAIRVDLVITPFEQYAYALLGWTGSKEFGRDLRRYAEEERKMVLDNHGLYDRKKRIFLKAGSEEEIFAHLGLDYVEPWERNA

SEQ ID NO: 1417 - DNA, 1182 bp, synthetic construct
  misc_feature 1..1182: note = Variant of terminal deoxynucleotidyl transferase
  source 1..1182: mol_type = other DNA
atgcaccatcatcatcatcatggcggtagcggccatccgccgagcaataccccggagggggaggtgccgagcgttatcgcccgcaaggttagtcagtacagctgccagcgcaagaccacgctgaataactacaacaaaaagtttaccgacgcgctggagatccgtgccgagatgtacaaatttaaagagaacctgatcgcgtgtattgaatttaagcgcgccgcgagtctgctgaaatatctgccgttcccggttaccagcatgaaagacatccaaggtctgccgtgcattggcgaccaagttcgtgacgtgatcgaggagatcatcgaagagggcgagagcagccgtgttaaagaagttctcaatgacgagcgctacaaggcctttaagcagttcaccagcgtgttcggtgtgggcgtgaaaaccagcgaaaagtggtttcgtatgggcctccgtacggttgaagaggcaaaggccagtaagagtctgaagctgagcaagatgcagaaggcgggcttcctgtattacgaggatctggcgagctgcgttagtaaagcggaagccgatgccgttacgctcatcgtgaagaacacggtgcgtacctttctgccggatgcgctggtgaccatcaccggcggtttccgccgtggcaaacctatgggccacgacatcgactttctgatcacgaatccgggcccgaaagaggatgacgagctgctccacaaagtggttgatctgctcaagaagcaaggtctgctgctgtactgtgacatcaaagagagcacgttcgtggaggaacaactgccaagtcgcaaaatcgacgccatggacaacttccagaagtgcttcgccattctcaagctgtaccagccgggcgtggataacagcagctataacacgagtaagaagagtgacatggccgaggttaaggattggaaagcgattcgtgtggatctggtgatcacgccattcgagcagtacgcctatgcgctgctcggttggacgggcagcaaagaatttggtcgcgatctgcgccgctatgcggagtcgcagcgcaagatgatcctcgacaaccatggcctctacgaccgcaaaaagcgcatctttctgaaagcgggcagcgaagaagagattttcgcgcatctgggtctggattatgtggagccgtgggaacgcaacgcg

SEQ ID NO: 1418 - protein, 394 aa, synthetic construct
  REGION 1..394: note = Variant of terminal deoxynucleotidyl transferase
MHHHHHHGGSGHPPSNTPEGEVPSVIARKVSQYSCQRKTTLNNYNKKFTDALEIRAEMYKFKENLIACIEFKRAASLLKYLPFPVTSMKDIQGLPCIGDQVRDVIEEIIEEGESSRVKEVLNDERYKAFKQFTSVFGVGVKTSEKWFRMGLRTVEEAKASKSLKLSKMQKAGFLYYEDLASCVSKAEADAVTLIVKNTVRTFLPDALVTITGGFRRGKPMGHDIDFLITNPGPKEDDELLHKVVDLLKKQGLLLYCDIKESTFVEEQLPSRKIDAMDNFQKCFAILKLYQPGVDNSSYNTSKKSDMAEVKDWKAIRVDLVITPFEQYAYALLGWTGSKEFGRDLRRYAESQRKMILDNHGLYDRKKRIFLKAGSEEEIFAHLGLDYVEPWERNA

SEQ ID NO: 1419 - DNA, 1182 bp, synthetic construct
  misc_feature 1..1182: note = Variant of terminal deoxynucleotidyl transferase
  source 1..1182: mol_type = other DNA
atgcaccatcatcatcatcatggcggtagcggccatccgccgagcaataccccggagggggaggtgccgagcgttatcgcccgcaaggttagtcagtacagctgccagcgcaagaccacgctgaataactacaacaaaaagtttaccgacgcgctggagatcatggccgagaactacaaatttaaagagaacctgatcgcgtgtctggaatttaagcgcgccgcgagtctgctgaaatatctgccgttcccggttaccagcatgaaagacatccaaggtctgccgtgcattggcgaccaagttcgtgacgtgatcgaggagatcatcgaagagggcgagagcagccgtgttaaagaagttctcaatgacgagcgctacaaggcctttaagcagttcaccagcgtgttcggtgtgggcgtgaaaaccagcgaaaagtggtttcgtatgggcctccgtacggttgaagaggcaaaggccagtaagagtctgaagctgagcaagatgcagaaggcgggcttcctgtattacgaggatctggcgagctgcgttagtaaagcggaagccgatgccgttacgctcatcgtgaagaacacggtgcgtacctttctgccggatgcgctggtgaccatcaccggcggtttccgccgtggcaaacctatgggccacgacatcgactttctgatcacgaatccgggcccgaaagaggatgacgagctgctccacaaagtggttgatctgctcaagaagcaaggtctgctgctgtactgcgacatcaaagagagcacgttcgtggaggaacaactgccaagtcgcaaaatcgacgccatggacaacttccagaagtgcttcgccattctcaagctgtaccagccgggcgtggataacagcagctataacacgagtaagaagagtgacatggccgaggttaaggattggaaagcgattcgtgtggatctggtgatcacgccattcgagcagtacgcctatgcgctgctcggttggacgggcagcaaagaatttggtcgcgatctgcgccgctatgcggaggaagagcgcatgatgatcctcgacaaccatggcctctacgaccgcaaaaagcgcatctttctgaaagcgggcagcgaagaagagattttcgcgcatctgggtctggattatgtggagccgtgggaacgcaacgcg

SEQ ID NO: 1420 - protein, 394 aa, synthetic construct; identical to SEQ ID NO: 1360
  REGION 1..394: note = Variant of terminal deoxynucleotidyl transferase

SEQ ID NO: 1421 - DNA, 1182 bp, synthetic construct
  misc_feature 1..1182: note = Variant of terminal deoxynucleotidyl transferase
  source 1..1182: mol_type = other DNA
atgcaccatcatcatcatcatggcggtagcggccatccgccgagcaataccccggagggggaggtgccgagcgttatcgcccgcaaggttagtcagtacagctgccagcgcaagaccacgctgaataactacaacaaaaagtttaccgacgcgctggagatcatggccgagtcgtacaaatttaaagagaacctgatcgcgtgtctggaatttaagcgcgccgcgagtctgctgaaatatctgccgttcccggttaccagcatgaaagacatccaaggtctgccgtgcattggcgtccaagttcgtgacgtgatcgaggagatcatcgaagagggcgagagcagccgtgttaaagaagttctcaatgacgagcgctacaaggcctttaagcagttcaccagcgtgttcggtgtgggcgtgaaaaccagcgaaaagtggtttcgtatgggcctccgtacggttgaagaggcaaaggccagtaagagtctgaagctgagcaagatgcagaaggcgggcttcctgtattacgaggatctggcgagctgcgttagtaaagcggaagccgatgccgttacgctcatcgtgaagaacacggtgcgtacctttctgccggatgcgctggtgaccatcaccggcggtttccgccgtggcaaacctatgggccacgacatcgactttctgatcacgaatccgggcccgaaagaggatgacgagctgctccacaaagtggttgatctgctcaagaagcaaggtctgctgctgtactgtgacatcaaagagagcacgttcgtggaggaacaactgccaagtcgcaaaatcgacgccatggacaacttccagaagtgcttcgccattctcaagctgtaccagccgggcgtggataacagcagctataacacgagtaagaagagtgacatggccgaggttaaggattggaaagcgattcgtgtggatctggtgatcacgccattcgagcagtacgcctatgcgctgctcggttggacgggcagcaaagaatttggtcgcgatctgcgccgctatgcggaggaagagcgcaagatgatcctcgacaaccatggcctctacgaccgcaaaaagcgcatctttctgaaagcgggcagcgaagaagagattttcgcgcatctgggtctggattatgtggagccgtgggaacgcaacgcg

SEQ ID NO: 1422 - protein, 394 aa, synthetic construct
  REGION 1..394: note = Variant of terminal deoxynucleotidyl transferase
MHHHHHHGGSGHPPSNTPEGEVPSVIARKVSQYSCQRKTTLNNYNKKFTDALEIMAESYKFKENLIACLEFKRAASLLKYLPFPVTSMKDIQGLPCIGVQVRDVIEEIIEEGESSRVKEVLNDERYKAFKQFTSVFGVGVKTSEKWFRMGLRTVEEAKASKSLKLSKMQKAGFLYYEDLASCVSKAEADAVTLIVKNTVRTFLPDALVTITGGFRRGKPMGHDIDFLITNPGPKEDDELLHKVVDLLKKQGLLLYCDIKESTFVEEQLPSRKIDAMDNFQKCFAILKLYQPGVDNSSYNTSKKSDMAEVKDWKAIRVDLVITPFEQYAYALLGWTGSKEFGRDLRRYAEEERKMILDNHGLYDRKKRIFLKAGSEEEIFAHLGLDYVEPWERNA

SEQ ID NO: 1423 - DNA, 1182 bp, synthetic construct
  misc_feature 1..1182: note = Variant of terminal deoxynucleotidyl transferase
  source 1..1182: mol_type = other DNA
atgcaccatcatcatcatcatggcggtagcggccatccgccgagcaataccccggagggggaggtgccgagcgttatcgcccgcaaggttagtcagtacagctgccagcgcaagaccacgctgaataactacaacaaaaagtttaccgacgcgctggagatcatggccgagaactacaaatttaaagagaacctgatcgcgtgtctggaatttaagcgcgccgcgagtattctgaaatatctgccgttcccggttaccagcatgaaagacatccaaggtctgccgtgcattggcgaccaagttcgtgacgtgatcgaggagatcatcgaagagggcgagagcagccgtgttaaagaagttctcaatgacgagcgctacaaggcctttaagcagttctatagcgtgttcggtgtgggcgtgaaaaccagcgaaaagtggtttcgtatgggcctccgtacggttgaagaggcaaaggccagtaagagtctgaagctgagcaagatgcagaaggcgggcttcctgtattacgaggatctggcgagctgcgttagtaaagcggaagccgatgccgttacgctcatcgtgaagaacacggtgcgtacctttctgccggatgcgctggtgaccatcaccggcggtttccgccgtggcaaacctatgggccacgacatcgactttctgatcacgaatccgggcccgaaagaggatgacgagctgctccacaaagtggttgatctgctcaagaagcaaggtctgctgctgtactgcgacatcaaagagagcacgttcgtggaggaacaactgccaagtcgcaaaatcgacgccatggacaacttccagaagtgcttcgccattctcaagctgtaccagccgggcgtggataacagcagctataacacgagtaagaagagtgacatggccgaggttaaggattggaaagcgattcgtgtggatctggtgatcacgccattcgagcagtacgcctatgcgctgctcggttggacgggcagcaaagaatttggtcgcgatctgcgccgctatgcggaggaagagcgcatgatgatcctcgacaaccatggcctctacgaccgcaaaaagcgcatctttctgaaagcgggcagcgaagaagagattttcgcgcatctgggtctggattatgtggagccgtgggaacgcaacgcg

SEQ ID NO: 1424 - protein, 394 aa, synthetic construct
  REGION 1..394: note = Variant of terminal deoxynucleotidyl transferase
MHHHHHHGGSGHPPSNTPEGEVPSVIARKVSQYSCQRKTTLNNYNKKFTDALEIMAENYKFKENLIACLEFKRAASILKYLPFPVTSMKDIQGLPCIGDQVRDVIEEIIEEGESSRVKEVLNDERYKAFKQFYSVFGVGVKTSEKWFRMGLRTVEEAKASKSLKLSKMQKAGFLYYEDLASCVSKAEADAVTLIVKNTVRTFLPDALVTITGGFRRGKPMGHDIDFLITNPGPKEDDELLHKVVDLLKKQGLLLYCDIKESTFVEEQLPSRKIDAMDNFQKCFAILKLYQPGVDNSSYNTSKKSDMAEVKDWKAIRVDLVITPFEQYAYALLGWTGSKEFGRDLRRYAEEERMMILDNHGLYDRKKRIFLKAGSEEEIFAHLGLDYVEPWERNA

SEQ ID NO: 1425 - DNA, 1182 bp, synthetic construct
  misc_feature 1..1182: note = Variant of terminal deoxynucleotidyl transferase
  source 1..1182: mol_type = other DNA
atgcaccatcatcatcatcatggcggtagcggccatccgccgagcaataccccggagggggaggtgccgagcgttatcgcccgcaaggttagtcagtacagctgccagcgcaagaccacgctgaataactacaacaaaaagtttaccgacgcgctggagatcatggccgagaactacaaatttaaagagaacctgatcgcgtgtctggaatttaagcgcgccgcgagtctgctgaaatatctgccgttcccggttaccagcatgaaagacatccaaggtctgccgtgcattggcgaccaagttcgtgacgtgatcgaggagatcatcgaagagggcgagagcagccgtgttaaagaagttctcaatgacgagcgctacaaggcctttaagcagttcaccagcgtgttcggtgtgggcgtgaaaaccagcgaaaagtggtttcgtatgggcctccgtacggttgaagaggcaaaggccagtaagagtctgaagctgagcaagatgcagaaggcgggcttcctgtattacgaggatctggcgagctgcgttagtaaagcggaagccgatgccgttacgctcatcgtgaagaacacggtgcgtacctttctgccggatgcgctggtgaccatcaccggcggtttccgccgtggcaaacctatgggccacgacatcgactttctgatcacgaatccgggcccgaaagaggatgacgagctgctccacaaagtggttgatctgctcaagaagcaaggtctgctgctgtactgtgacatcaaagagagcacgttcgtggaggaacaactgccaagtcgcaaaatcgacgccatggacaacttccagaagtgcttcgccattctcaagctgtaccagccgggcgtggataacagcagctataacacgagtaagaagagtgacatggccgaggttaaggattggaaagcgattcgtgtggatctggtgatcacgccattcgagcagtacgcctatgcgctgctcggttggacgggcagcaaagaatttggtcgcgatctgcgccgctatgcggaggaggagcgcaagatggtcctcgacaaccatggcctctacgaccgcaaaaagcgcatctttctgaaagcggatagcgaagaagagattttcgcgcatctgggtctggattatgtggagccgtgggaacgcaacgcg

SEQ ID NO: 1426 - protein, 394 aa, synthetic construct
  REGION 1..394: note = Variant of terminal deoxynucleotidyl transferase
MHHHHHHGGSGHPPSNTPEGEVPSVIARKVSQYSCQRKTTLNNYNKKFTDALEIMAENYKFKENLIACLEFKRAASLLKYLPFPVTSMKDIQGLPCIGDQVRDVIEEIIEEGESSRVKEVLNDERYKAFKQFTSVFGVGVKTSEKWFRMGLRTVEEAKASKSLKLSKMQKAGFLYYEDLASCVSKAEADAVTLIVKNTVRTFLPDALVTITGGFRRGKPMGHDIDFLITNPGPKEDDELLHKVVDLLKKQGLLLYCDIKESTFVEEQLPSRKIDAMDNFQKCFAILKLYQPGVDNSSYNTSKKSDMAEVKDWKAIRVDLVITPFEQYAYALLGWTGSKEFGRDLRRYAEEERKMVLDNHGLYDRKKRIFLKADSEEEIFAHLGLDYVEPWERNA

SEQ ID NO: 1427 - DNA, 1182 bp, synthetic construct
  misc_feature 1..1182: note = Variant of terminal deoxynucleotidyl transferase
  source 1..1182: mol_type = other DNA
atgcaccatcatcatcatcatggcggtagcggccatccgccgagcaataccccggagggggaggtgccgagcgttatcgcccgcaaggttagtcagtacagctgccagcgcaagaccacgctgaataactacaacaaaaagtttaccgacgcgctggagatccgtgccgagtcgtacaaatttaaagagaacctgatcgcgtgtctggaatttaagcgcgccgcgagtctgctgaaatatctgccgttcccggttaccagcatgaaagacatccaaggtctgccgtgcattggcgtccaagttcgtgacgtgatcgaggagatcatcgaagagggcgagagcagccgtgttaaagaagttctcaatgacgagcgctacaaggcctttaagcagttcaccagcgtgttcggtgtgggcgtgaaaaccagcgaaaagtggtttcgtatgggcctccgtacggttgaagaggcaaaggccagtaagagtctgaagctgagcaagatgcagaaggcgggcttcctgtattacgaggatctggcgagctgcgttagtaaagcggaagccgatgccgttacgctcatcgtgaagaacacggtgcgtacctttctgccggatgcgctggtgaccatcaccggcggtttccgccgtggcaaacctatgggccacgacatcgactttctgatcacgaatccgggcccgaaagaggatgacgagctgctccacaaagtggttgatctgctcaagaagcaaggtctgctgctgtacgaagacatcaaagagagcacgttcgtggaggaacaactgccaagtcgcaaaatcgacgccatggacaacttccagaagtgcttcgccattctcaagctgtaccagccgggcgtggataacagcagctataacacgagtaagaagagtgacatggccgaggttaaggattggaaagcgattcgtgtggatctggtgatcacgccattcgagcagtacgcctatgcgctgctcggttggacgggcagcaaagaatttggtcgcgatctgcgccgctatgcggaggaggagcgcaagatggccctcgacaaccatggcctctacgaccgcaaaaagcgcatctttctgaaagcgggtagcgaagaagagattttcgcgcatctgggtctggattatgtggagccgtgggaacgcaacgcg

SEQ ID NO: 1428 - protein, 394 aa, synthetic construct
  REGION 1..394: note = Variant of terminal deoxynucleotidyl transferase
MHHHHHHGGSGHPPSNTPEGEVPSVIARKVSQYSCQRKTTLNNYNKKFTDALEIRAESYKFKENLIACLEFKRAASLLKYLPFPVTSMKDIQGLPCIGVQVRDVIEEIIEEGESSRVKEVLNDERYKAFKQFTSVFGVGVKTSEKWFRMGLRTVEEAKASKSLKLSKMQKAGFLYYEDLASCVSKAEADAVTLIVKNTVRTFLPDALVTITGGFRRGKPMGHDIDFLITNPGPKEDDELLHKVVDLLKKQGLLLYEDIKESTFVEEQLPSRKIDAMDNFQKCFAILKLYQPGVDNSSYNTSKKSDMAEVKDWKAIRVDLVITPFEQYAYALLGWTGSKEFGRDLRRYAEEERKMALDNHGLYDRKKRIFLKAGSEEEIFAHLGLDYVEPWERNA

SEQ ID NO: 1429 - DNA, 1182 bp, synthetic construct
  misc_feature 1..1182: note = Variant of terminal deoxynucleotidyl transferase
  source 1..1182: mol_type = other DNA
atgcaccatcatcatcatcatggcggtagcggccatccgccgagcaataccccggagggggaggtgccgagcgttatcgcccgcaaggttagtcagtacagctgccagcgcaagaccacgctgaataactacaacaaaaagtttaccgacgcgctggagatcatggccgagaactacaaatttaaagagaacctgatcgcgtgtctggaatttaagcgcgccgcgagtctgctgaaatatctgccgttcccggttaccagcatgaaagacatccaaggtctgccgtgcattggcgaccaagttcgtgacgtgatcgaggagatcatcgaagagggcgagagcagccgtgttaaagaagttctcaatgacgagcgctacaaggcctttaagcagttctatagcgtgttcggtgtgggcgtgaaaaccagcgaaaagtggtttcgtatgggcctccgtacggttgaagaggcaaaggccagtaagagtctgaagctgagcaagatgcagaaggcgggcttcctgtattacgaggatctggcgagctgcgttagtaaagcggaagccgatgccgttacgctcatcgtgaagaacacggtgcgtacctttctgccggatgcgctggtgaccatcaccggcggtttccgccgtggcaaacctatgggccacgacatcgactttctgatcacgaatccgggcccgaaagaggatgacgagctgctccacaaagtggttgatctgctcaagaagcaaggtctgctgctgtactgcgacatcaaagagagcacgttcgtggaggaacaactgccaagtcgcaaaatcgacgccatggacaacttccagaagtgcttcgccattctcaagctgtaccagccgggcgtggataacagcagctataacacgagtaagaagagtgacatggccgaggttaaggattggaaagcgattcgtgtggatctggtgatcacgccattcgagcagtacgcctatgcgctgctcggttggacgggcagcaaagaatttggtcgcgatctgcgccgctatgcggaggaagagcgcaagatgatcctcgacaaccatggcctctacgaccgcaaaaagcgcatctttctgaaagcgggcagcgaagaagagattttcgcgcatctgggtctggattatgtggagccgtgggaacgcaacgcg

SEQ ID NO: 1430 - protein, 394 aa, synthetic construct
  REGION 1..394: note = Variant of terminal deoxynucleotidyl transferase
MHHHHHHGGSGHPPSNTPEGEVPSVIARKVSQYSCQRKTTLNNYNKKFTDALEIMAENYKFKENLIACLEFKRAASLLKYLPFPVTSMKDIQGLPCIGDQVRDVIEEIIEEGESSRVKEVLNDERYKAFKQFYSVFGVGVKTSEKWFRMGLRTVEEAKASKSLKLSKMQKAGFLYYEDLASCVSKAEADAVTLIVKNTVRTFLPDALVTITGGFRRGKPMGHDIDFLITNPGPKEDDELLHKVVDLLKKQGLLLYCDIKESTFVEEQLPSRKIDAMDNFQKCFAILKLYQPGVDNSSYNTSKKSDMAEVKDWKAIRVDLVITPFEQYAYALLGWTGSKEFGRDLRRYAEEERKMILDNHGLYDRKKRIFLKAGSEEEIFAHLGLDYVEPWERNA

SEQ ID NO: 1431 - DNA, 1182 bp, synthetic construct
  misc_feature 1..1182: note = Variant of terminal deoxynucleotidyl transferase
  source 1..1182: mol_type = other DNA
atgcaccatcatcatcatcatggcgatagcggccatccgccgagcaataccccggagggggaggtgccgagcgttatcgcccgcaaggttagtcagtacagctgccagcgcaagaccacgctgaataactacaacaaaaagtttaccgacgcgctggagatcatggccgagaactacaaatttaaagagaacctgatcgcgtgtctggaatttaagcgcgccgcgagtctgctgaaatatctgccgttcccggttaccagcatgaaagacatccaaggtctgccgtgcattggcgaccaagttcgtgacgtgatcgaggagatcatcgaagagggcgagagcagccgtgttaaagaagttctcaatgacgagcgctacaaggcctttaagcagttcaccagcgtgttcggtgtgggcgtgaaaaccagcgaaaagtggtttcgtatgggcctccgtacggttgaagaggcaaaggccagtaagagtctgaagctgagcaagatgcagaaggcgggcttcctgtattacgaggatctggcgagctgcgttagtaaagcggaagccgatgccgttacgctcatcgtgaagaacacggtgcgtacctttctgccggatgcgctggtgaccatcaccggcggtttccgccgtggcaaacctatgggccacgacatcgactttctgatcacgaatccgggcccgaaagaggatgacgagctgctccacaaagtggttgatctgctcaagaagcaaggtctgctgctgtactgcgacatcaaagagagcacgttcgtggaggaacaactgccaagtcgcaaaatcgacgccatggacaacttccagaagtgcttcgccattctcaagctgtaccagccgggcgtggataacagcagctataacacgagtaagaagagtgacatggccgaggttaaggattggaaagcgattcgtgtggatctggtgatcacgccattcgagcagtacgcctatgcgctgctcggttggacgggcagcaaagaatttggtcgcgatctgcgccgctatgcggaggaagagcgcaagatgatcctcgacaaccatggcctctacgaccgcaaaaagcgcatctttctgaaagcgggcagcgaagaagagattttcgcgcatctgggtctggattatgtggagccgtgggaacgcaacgcg

SEQ ID NO: 1432 - protein, 394 aa, synthetic construct
  REGION 1..394: note = Variant of terminal deoxynucleotidyl transferase
MHHHHHHGDSGHPPSNTPEGEVPSVIARKVSQYSCQRKTTLNNYNKKFTDALEIMAENYKFKENLIACLEFKRAASLLKYLPFPVTSMKDIQGLPCIGDQVRDVIEEIIEEGESSRVKEVLNDERYKAFKQFTSVFGVGVKTSEKWFRMGLRTVEEAKASKSLKLSKMQKAGFLYYEDLASCVSKAEADAVTLIVKNTVRTFLPDALVTITGGFRRGKPMGHDIDFLITNPGPKEDDELLHKVVDLLKKQGLLLYCDIKESTFVEEQLPSRKIDAMDNFQKCFAILKLYQPGVDNSSYNTSKKSDMAEVKDWKAIRVDLVITPFEQYAYALLGWTGSKEFGRDLRRYAEEERKMILDNHGLYDRKKRIFLKAGSEEEIFAHLGLDYVEPWERNA

SEQ ID NO: 1433 - DNA, 1182 bp, synthetic construct
  misc_feature 1..1182: note = Variant of terminal deoxynucleotidyl transferase
  source 1..1182: mol_type = other DNA
atgcaccatcatcatcatcatggcggtagcggccatccgccgagcaataccccggagggggaggtgccgagcgttatcgcccgcaaggttagtcagtacagctgccagcgcaagaccacgctgaataactacaacaaaaagtttaccgacgcgctggagatcatggccgagaactacaaatttaaagagaacctgatcgcgtgtctggaatttaagcgcgccgcgagtctgctgaaatatctgccgttcccggttaccagcatgaaagacatccaaggtctgccgtgcattggcgaccaagttcgtgacgtgatcgaggagatcatcgaagagggcgagagcagccgtgttaaagaagttctcaatgacgagcgctacaaggcctttaagcagttcaccagcgtgttcggtgtgggcgtgaaaaccagcgaaaagtggtttcgtatgggcctccgtacggttgaagaggcaaaggccagtaagagtctgaagctgagcaagatgcagaaggcgggcttcctgtattacgaggatctggcgagctgcgttagtaaagcggaagccgatgccgttacgctcatcgtgaagaacacggtgcgtacctttctgccggatgcgctggtgaccatcaccggcggtttccgccgtggcaaacctatgggccacgacatcgactttctgatcacgaatccgggcccgaaagaggatgacgagctgctccacaaagtggttgatctgctcaagaagcaaggtctgctgctgtactgcgacatcaaagagagcacgttcgtggaggaacaactgccaagtcgcaaaatcgacgccatggacaacttccagaagtgcttcgccattctcaagctgtaccagccgggcgtggataacagcagctataacacgagtaagaagagtgacatggccgaggttaaggattggaaagcgattcgtgtggatctggtgatcacgccattcgagcagtacgcctatgcgctgctcggttggacgggcagcaaagaatttggtcgcgatctgcgccgctatgcggaggaagagcgcaagatgatcctcgacaaccatggcctctacgaccgcaaaaagcgctcttttctgaaagcgggcagcgaagaagagattttcgcgcatctgggtctggattatgtggagccgtgggaacgcaacgcg

SEQ ID NO: 1434 - protein, 394 aa, synthetic construct
  REGION 1..394: note = Variant of terminal deoxynucleotidyl transferase
MHHHHHHGGSGHPPSNTPEGEVPSVIARKVSQYSCQRKTTLNNYNKKFTDALEIMAENYKFKENLIACLEFKRAASLLKYLPFPVTSMKDIQGLPCIGDQVRDVIEEIIEEGESSRVKEVLNDERYKAFKQFTSVFGVGVKTSEKWFRMGLRTVEEAKASKSLKLSKMQKAGFLYYEDLASCVSKAEADAVTLIVKNTVRTFLPDALVTITGGFRRGKPMGHDIDFLITNPGPKEDDELLHKVVDLLKKQGLLLYCDIKESTFVEEQLPSRKIDAMDNFQKCFAILKLYQPGVDNSSYNTSKKSDMAEVKDWKAIRVDLVITPFEQYAYALLGWTGSKEFGRDLRRYAEEERKMILDNHGLYDRKKRSFLKAGSEEEIFAHLGLDYVEPWERNA

SEQ ID NO: 1435 - DNA, 1182 bp, synthetic construct
  misc_feature 1..1182: note = Variant of terminal deoxynucleotidyl transferase
  source 1..1182: mol_type = other DNA
atgcaccatcatcatcatcatggcggtagcggccatccgccgagcaataccccggagggggaggtgccgagcgttatcgcccgcaaggttagtcagtacagctgccagcgcaagaccacgctgaataactacaacaaaaagtttaccgacgcgctggagatcatggccgagaactacaaatttaaagagaacctgatcgcgtgtctggaatttaagcgcgccgcgagtctgctgaaatatctgccgttcccggttaccagcatgaaagacatccaaggtctgccgtgcattggcgaccaagttcgtgacgtgatcgaggagatcatcgaagagggcgagagcagccgtgttaaagaagttctcaatgacgagcgctacaaggcctttaagcagttcaccagcgtgttcggtgtgggcgtgaaaaccagcgaaaagtggtttcgtatgggcctccgtacggttgaagaggcaaaggccagtaagagtctgaagctgagcaagatgcagaaggcgggcttcctgtattacgaggatctggcgagctgcgttagtaaagcggaagccgatgccgttacgctcatcgtgaagaacacggtgcgtacctttctgccggatgcgctggtgaccatcaccggcggtttccgccgtggcaaacctatgggccacgacatcgactttctgatcacgaatccgggcccgaaagaggatgacgagctgctccacaaagtggttgatctgctcaagaagcaaggtctgctgctgtactgcgacatcaaagagagcacgttcgtggaggaacaactgccaagtcgcaaaatcgacgccatggacaacttccagaagtgcttcgccattctcaagctgtaccagccgggcgtggataacagcagctataacacgagtaagaagagtgacatggccgaggttaaggattggaaagcgattcgtgtggatctggtgatcacgccattcgagcagtacgcctatgcgctgctcggttggacgggcagcaaagaatttggtcgcgatctgcgccgctatgcggaggaagagcgcaagatgatcctcgacaaccatggcctctacgaccgcaaaaagcgcatctttctgaaagcgggcagcgaagaagagattttcgggcatctgggtctggattatgtggagccgtgggaacgcaacgcg

SEQ ID NO: 1436 - protein, 394 aa, synthetic construct
  REGION 1..394: note = Variant of terminal deoxynucleotidyl transferase
MHHHHHHGGSGHPPSNTPEGEVPSVIARKVSQYSCQRKTTLNNYNKKFTDALEIMAENYKFKENLIACLEFKRAASLLKYLPFPVTSMKDIQGLPCIGDQVRDVIEEIIEEGESSRVKEVLNDERYKAFKQFTSVFGVGVKTSEKWFRMGLRTVEEAKASKSLKLSKMQKAGFLYYEDLASCVSKAEADAVTLIVKNTVRTFLPDALVTITGGFRRGKPMGHDIDFLITNPGPKEDDELLHKVVDLLKKQGLLLYCDIKESTFVEEQLPSRKIDAMDNFQKCFAILKLYQPGVDNSSYNTSKKSDMAEVKDWKAIRVDLVITPFEQYAYALLGWTGSKEFGRDLRRYAEEERKMILDNHGLYDRKKRIFLKAGSEEEIFGHLGLDYVEPWERNA

SEQ ID NO: 1437 - DNA, 1182 bp, synthetic construct
  misc_feature 1..1182: note = Variant of terminal deoxynucleotidyl transferase
  source 1..1182: mol_type = other DNA
atgcaccatcatcatcatcatggcggtagcggccatccgccgagcaataccccggagggggaggtgccgagcgttatcgcccgcaaggttagtcagtacagctgccagcgcaagaccacgctgaataactacaacaaaaagtttaccgacgcgctggagatcatggccgagaactacaaatttaaagagaacctgatcgcgtgtctggaatttaagcgcgccgcgagtctgctgaaatatctgccgttcccggttaccagcatgaaagacatccaaggtctgccgtgcattggcgaccaagttcgtgacgtgatcgaggagatcatcgaagagggcgagagcagccgtgttaaagaagttctcaatgacgagcgctacaaggcctttaagcagttcaccagcgtgttcggtgtgggcgtgaaaaccagcgaaaagtggtttcgtatgggcctccgtacggttgaagaggcaaaggccagtaagagtctgaagctgagcaagatgcagaaggcgggcttcctgtattacgaggatctggcgagctgcgttagtaaagcggaagccgatgccgttacgctcatcgtgaagaacacggtgcgtacctttctgccggatgcgctggtgaccatcaccggcggtttccgccgtggcaaacctatgggccacgacatcgactttctgatcacgaatccgggcaggaaagaggatgacgagctgctccacaaagtggttgatctgctcaagaagcaaggtctgctgctgtactgcgacatcaaagagagcacgttcgtggaggaacaactgccaagtcgcaaaatcgacgccatggacaacttccagaagtgcttcgccattctcaagctgtaccagccgggcgtggataacagcagctataacacgagtaagaagagtgacatggccgaggttaaggattggaaagcgattcgtgtggatctggtgatcacgccattcgagcagtacgcctatgcgctgctcggttggacgggcagcaaagaatttggtcgcgatctgcgccgctatgcggaggaagagcgcaagatgatcctcgacaaccatggcctctacgaccgcaaaaagcgcatctttctgaaagcgggcagcgaagaagagattttcgcgcatctgggtctggattatgtggagccgtgggaacgcaacgcg

SEQ ID NO: 1438 - protein, 394 aa, synthetic construct
  REGION 1..394: note = Variant of terminal deoxynucleotidyl transferase
MHHHHHHGGSGHPPSNTPEGEVPSVIARKVSQYSCQRKTTLNNYNKKFTDALEIMAENYKFKENLIACLEFKRAASLLKYLPFPVTSMKDIQGLPCIGDQVRDVIEEIIEEGESSRVKEVLNDERYKAFKQFTSVFGVGVKTSEKWFRMGLRTVEEAKASKSLKLSKMQKAGFLYYEDLASCVSKAEADAVTLIVKNTVRTFLPDALVTITGGFRRGKPMGHDIDFLITNPGRKEDDELLHKVVDLLKKQGLLLYCDIKESTFVEEQLPSRKIDAMDNFQKCFAILKLYQPGVDNSSYNTSKKSDMAEVKDWKAIRVDLVITPFEQYAYALLGWTGSKEFGRDLRRYAEEERKMILDNHGLYDRKKRIFLKAGSEEEIFAHLGLDYVEPWERNA

SEQ ID NO: 1439 - DNA, 1182 bp, synthetic construct
  misc_feature 1..1182: note = Variant of terminal deoxynucleotidyl transferase
  source 1..1182: mol_type = other DNA
atgcaccatcatcatcatcatggcggtagcggccatccgccgagcaataccccggagggggaggtgccgagcgttatcgcccgcaaggttagtcagtacagctgccagcgcaagaccacgctgaataactacaacaaaaagtttaccgacgcgctggagatcatggccgagaactacaaatttaaagagaacctgatcgcgtgtctggaatttaagcgcgccgcgagtctgctgaaatatctgccgttcccggttaccagcatgaaagacatccaaggtctgccgtgcattggcgaccaagttcgtgacgtgatcgaggagatcatcgaagagggcgagagcagccgtgttaaagaagttctcaatgacgagcgctacaaggcctttaagcagttcaccagcgtgttcggtgtgggcgtgaaaaccagcgaaaagtggtttcgtatgggcctccgtacggttgaagaggcaaaggccagtaagagtctgaagctgagcaagatgcagaaggcgggcttcctgtattacgaggatctggcgagctgcgttagtaaagcggaagccgatgccgttacgctcatcgtgaagaacacggtgcgtacctttctgccggatgcgctggtgaccatcaccggcggtttccgccgtggcaaacctatgggccacgacatcgactttctgatcacgaatccgggcccgaaagaggatgacgagctgctccacaaagtggttgatctgctcaagaagcaaggtctgctgctgtactgcgacatcaaagagagcacgttcgtggaggaacaactgccaagtcgcaaaatcgacgccatggacaacttccagaagtgcttcgccattctcaagctgtaccagccgggcgtggataacagcagctataacacgagtgcgaagagtgacatggccgaggttaaggattggaaagcgattcgtgtggatctggtgatcacgccattcgagcagtacgcctatgcgctgctcggttggacgggcagcaaagaatttggtcgcgatctgcgccgctatgcggaggaagagcgcaagatgatcctcgacaaccatggcctctacgaccgcaaaaagcgcatctttctgaaagcgggcagcgaagaagagattttcgcgcatctgggtctggattatgtggagccgtgggaacgcaacgcg

SEQ ID NO: 1440 - protein, 394 aa, synthetic construct
  REGION 1..394: note = Variant of terminal deoxynucleotidyl transferase
MHHHHHHGGSGHPPSNTPEGEVPSVIARKVSQYSCQRKTTLNNYNKKFTDALEIMAENYKFKENLIACLEFKRAASLLKYLPFPVTSMKDIQGLPCIGDQVRDVIEEIIEEGESSRVKEVLNDERYKAFKQFTSVFGVGVKTSEKWFRMGLRTVEEAKASKSLKLSKMQKAGFLYYEDLASCVSKAEADAVTLIVKNTVRTFLPDALVTITGGFRRGKPMGHDIDFLITNPGPKEDDELLHKVVDLLKKQGLLLYCDIKESTFVEEQLPSRKIDAMDNFQKCFAILKLYQPGVDNSSYNTSAKSDMAEVKDWKAIRVDLVITPFEQYAYALLGWTGSKEFGRDLRRYAEEERKMILDNHGLYDRKKRIFLKAGSEEEIFAHLGLDYVEPWERNA

SEQ ID NO: 1441 - DNA, 1182 bp, synthetic construct
  misc_feature 1..1182: note = Variant of terminal deoxynucleotidyl transferase
  source 1..1182: mol_type = other DNA
atgcaccatcatcatcatcatggcggtagcggccatccgccgagcggtaccccggagggggaggtgccgagcgttatcgcccgcaaggttagtcagtacagctgccagcgcaagaccacgctgaataactacaacaaaaagtttaccgacgcgctggagatcatggccgagaactacaaatttaaagagaacctgatcgcgtgtctggaatttaagcgcgccgcgagtctgctgaaatatctgccgttcccggttaccagcatgaaagacatccaaggtctgccgtgcattggcgaccaagttcgtgacgtgatcgaggagatcatcgaagagggcgagagcagccgtgttaaagaagttctcaatgacgagcgctacaaggcctttaagcagttcaccagcgtgttcggtgtgggcgtgaaaaccagcgaaaagtggtttcgtatgggcctccgtacggttgaagaggcaaaggccagtaagagtctgaagctgagcaagatgcagaaggcgggcttcctgtattacgaggatctggcgagctgcgttagtaaagcggaagccgatgccgttacgctcatcgtgaagaacacggtgcgtacctttctgccggatgcgctggtgaccatcaccggcggtttccgccgtggcaaacctatgggccacgacatcgactttctgatcacgaatccgggcccgaaagaggatgacgagctgctccacaaagtggttgatctgctcaagaagcaaggtctgctgctgtactgcgacatcaaagagagcacgttcgtggaggaacaactgccaagtcgcaaaatcgacgccatggacaacttccagaagtgcttcgccattctcaagctgtaccagccgggcgtggataacagcagctataacacgagtaagaagagtgacatggccgaggttaaggattggaaagcgattcgtgtggatctggtgatcacgccattcgagcagtacgcctatgcgctgctcggttggacgggcagcaaagaatttggtcgcgatctgcgccgctatgcggaggaagagcgcaagatgatcctcgacaaccatggcctctacgaccgcaaaaagcgcatctttctgaaagcgggcagcgaagaagagattttcgcgcatctgggtctggattatgtggagccgtgggaacgcaacgcg

SEQ ID NO: 1442 - protein, 394 aa, synthetic construct
  REGION 1..394: note = Variant of terminal deoxynucleotidyl transferase
MHHHHHHGGSGHPPSGTPEGEVPSVIARKVSQYSCQRKTTLNNYNKKFTDALEIMAENYKFKENLIACLEFKRAASLLKYLPFPVTSMKDIQGLPCIGDQVRDVIEEIIEEGESSRVKEVLNDERYKAFKQFTSVFGVGVKTSEKWFRMGLRTVEEAKASKSLKLSKMQKAGFLYYEDLASCVSKAEADAVTLIVKNTVRTFLPDALVTITGGFRRGKPMGHDIDFLITNPGPKEDDELLHKVVDLLKKQGLLLYCDIKESTFVEEQLPSRKIDAMDNFQKCFAILKLYQPGVDNSSYNTSKKSDMAEVKDWKAIRVDLVITPFEQYAYALLGWTGSKEFGRDLRRYAEEERKMILDNHGLYDRKKRIFLKAGSEEEIFAHLGLDYVEPWERNA

SEQ ID NO: 1443 - DNA, 1182 bp, synthetic construct
  misc_feature 1..1182: note = Variant of terminal deoxynucleotidyl transferase
  source 1..1182: mol_type = other DNA
atgcaccatcatcatcatcatggcggtagcggccatccgccgagcaataccccggagggggaggtgccgagcgttatcgcccgcaaggttagtcagtacagctgccagcgcaagaccacgctgaataactacaacaaaaagtttaccgacgcgctggagatcatggccgagaactacaaatttaaagagaacctgatcgcgtgtctggaatttaagcgcgccgcgagtctgctgaaatatctgccgttcccggttaccagcatgaaagacatccaaggtctgccgtgcattggcgacgaggttcgtgacgtgatcgaggagatcatcgaagagggcgagagcagccgtgttaaagaagttctcaatgacgagcgctacaaggcctttaagcagttcaccagcgtgttcggtgtgggcgtgaaaaccagcgaaaagtggtttcgtatgggcctccgtacggttgaagaggcaaaggccagtaagagtctgaagctgagcaagatgcagaaggcgggcttcctgtattacgaggatctggcgagctgcgttagtaaagcggaagccgatgccgttacgctcatcgtgaagaacacggtgcgtacctttctgccggatgcgctggtgaccatcaccggcggtttccgccgtggcaaacctatgggccacgacatcgactttctgatcacgaatccgggcccgaaagaggatgacgagctgctccacaaagtggttgatctgctcaagaagcaaggtctgctgctgtactgcgacatcaaagagagcacgttcgtggaggaacaactgccaagtcgcaaaatcgacgccatggacaacttccagaagtgcttcgccattctcaagctgtaccagccgggcgtggataacagcagctataacacgagtaagaagagtgacatggccgaggttaaggattggaaagcgattcgtgtggatctggtgatcacgccattcgagcagtacgcctatgcgctgctcggttggacgggcagcaaagaatttggtcgcgatctgcgccgctatgcggaggaagagcgcaagatgatcctcgacaaccatggcctctacgaccgcaaaaagcgcatctttctgaaagcgggcagcgaagaagagattttcgcgcatctgggtctggattatgtggagccgtgggaacgcaacgcg

SEQ ID NO: 1444 - protein, 394 aa, synthetic construct
  REGION 1..394: note = Variant of terminal deoxynucleotidyl transferase
MHHHHHHGGSGHPPSNTPEGEVPSVIARKVSQYSCQRKTTLNNYNKKFTDALEIMAENYKFKENLIACLEFKRAASLLKYLPFPVTSMKDIQGLPCIGDEVRDVIEEIIEEGESSRVKEVLNDERYKAFKQFTSVFGVGVKTSEKWFRMGLRTVEEAKASKSLKLSKMQKAGFLYYEDLASCVSKAEADAVTLIVKNTVRTFLPDALVTITGGFRRGKPMGHDIDFLITNPGPKEDDELLHKVVDLLKKQGLLLYCDIKESTFVEEQLPSRKIDAMDNFQKCFAILKLYQPGVDNSSYNTSKKSDMAEVKDWKAIRVDLVITPFEQYAYALLGWTGSKEFGRDLRRYAEEERKMILDNHGLYDRKKRIFLKAGSEEEIFAHLGLDYVEPWERNA

SEQ ID NO: 1445 - DNA, 1182 bp, synthetic construct
  misc_feature 1..1182: note = Variant of terminal deoxynucleotidyl transferase
  source 1..1182: mol_type = other DNA
atgcaccatcatcatcatcatggcggtagcggccatccgccgagcaataccccggagggggaggtgccgagcgttatcgcccgcaaggttagtcagtacagctgccagcgcaagaccacgctgaataactacaacaaaaagtttaccgacgcgctggagatcatggccgagaactacaaatttaaagagaacctgatcgcgtgtctggaatttaagcgcgccgcgagtctgctgaaatatctgccgttcccggttaccagcatgggggacatccaaggtctgccgtgcattggcgaccaagttcgtgacgtgatcgaggagatcatcgaagagggcgagagcagccgtgttaaagaagttctcaatgacgagcgctacaaggcctttaagcagttcaccagcgtgttcggtgtgggcgtgaaaaccagcgaaaagtggtttcgtatgggcctccgtacggttgaagaggcaaaggccagtaagagtctgaagctgagcaagatgcagaaggcgggcttcctgtattacgaggatctggcgagctgcgttagtaaagcggaagccgatgccgttacgctcatcgtgaagaacacggtgcgtacctttctgccggatgcgctggtgaccatcaccggcggtttccgccgtggcaaacctatgggccacgacatcgactttctgatcacgaatccgggcccgaaagaggatgacgagctgctccacaaagtggttgatctgctcaagaagcaaggtctgctgctgtactgcgacatcaaagagagcacgttcgtggaggaacaactgccaagtcgcaaaatcgacgccatggacaacttccagaagtgcttcgccattctcaagctgtaccagccgggcgtggataacagcagctataacacgagtaagaagagtgacatggccgaggttaaggattggaaagcgattcgtgtggatctggtgatcacgccattcgagcagtacgcctatgcgctgctcggttggacgggcagcaaagaatttggtcgcgatctgcgccgctatgcggaggaagagcgcaagatgatcctcgacaaccatggcctctacgaccgcaaaaagcgcatctttctgaaagcgggcagcgaagaagagattttcgcgcatctgggtctggattatgtggagccgtgggaacgcaacgcg

SEQ ID NO: 1446 - protein, 394 aa, synthetic construct
  REGION 1..394: note = Variant of terminal deoxynucleotidyl transferase
MHHHHHHGGSGHPPSNTPEGEVPSVIARKVSQYSCQRKTTLNNYNKKFTDALEIMAENYKFKENLIACLEFKRAASLLKYLPFPVTSMGDIQGLPCIGDQVRDVIEEIIEEGESSRVKEVLNDERYKAFKQFTSVFGVGVKTSEKWFRMGLRTVEEAKASKSLKLSKMQKAGFLYYEDLASCVSKAEADAVTLIVKNTVRTFLPDALVTITGGFRRGKPMGHDIDFLITNPGPKEDDELLHKVVDLLKKQGLLLYCDIKESTFVEEQLPSRKIDAMDNFQKCFAILKLYQPGVDNSSYNTSKKSDMAEVKDWKAIRVDLVITPFEQYAYALLGWTGSKEFGRDLRRYAEEERKMILDNHGLYDRKKRIFLKAGSEEEIFAHLGLDYVEPWERNA

SEQ ID NO: 1447 - DNA, 1182 bp, synthetic construct
  misc_feature 1..1182: note = Variant of terminal deoxynucleotidyl transferase
  source 1..1182: mol_type = other DNA
atgcaccatcatcatcatcatggcggtagcggccatccgccgagcaataccccggagggggaggtgccgagcgttatcgcccgcaaggttagtcagtacagctgccagcgcaagaccacgctgaataactacaacaaaaagtttaccgacgcgctggagatcatggccgagaactacaaatttaaagagaacctgatcgcgtgtctggaatttaagcgcgccgcgagtctgctgaaatatctgccgttcccggttaccagcatgaaagacatccaaggtctgccgtgcattggcgaccaagttcgtgacgtgatcgaggagatcatcgaagagggcgagagcagccgtgttaaagaagttctcaatgacgagcgctacaaggcctttaagcagttcaccagcgtgttcggtgtgggcgtgaaaaccagcgaaaagtggtttcgtatgggcctccgtacggttgaagaggcaaaggccagtaagagtctgaagctgagcaagatgcagaaggcgggcttcctgtattacgaggatctggcgagctgcgttagtaaagcggaagccgatgccgttacgctcatcgtgaagaacacggtgcgtggttttctgccggatgcgctggtgaccatcaccggcggtttccgccgtggcaaacctatgggccacgacatcgactttctgatcacgaatccgggcccgaaagaggatgacgagctgctccacaaagtggttgatctgctcaagaagcaaggtctgctgctgtactgcgacatcaaagagagcacgttcgtggaggaacaactgccaagtcgcaaaatcgacgccatggacaacttccagaagtgcttcgccattctcaagctgtaccagccgggcgtggataacagcagctataacacgagtaagaagagtgacatggccgaggttaaggattggaaagcgattcgtgtggatctggtgatcacgccattcgagcagtacgcctatgcgctgctcggttggacgggcagcaaagaatttggtcgcgatctgcgccgctatgcggaggaagagcgcaagatgatcctcgacaaccatggcctctacgaccgcaaaaagcgcatctttctgaaagcgggcagcgaagaagagattttcgcgcatctgggtctggattatgtggagccgtgggaacgcaacgcg

SEQ ID NO: 1448 - protein, 394 aa, synthetic construct
  REGION 1..394: note = Variant of terminal deoxynucleotidyl transferase
MHHHHHHGGSGHPPSNTPEGEVPSVIARKVSQYSCQRKTTLNNYNKKFTDALEIMAENYKFKENLIACLEFKRAASLLKYLPFPVTSMKDIQGLPCIGDQVRDVIEEIIEEGESSRVKEVLNDERYKAFKQFTSVFGVGVKTSEKWFRMGLRTVEEAKASKSLKLSKMQKAGFLYYEDLASCVSKAEADAVTLIVKNTVRGFLPDALVTITGGFRRGKPMGHDIDFLITNPGPKEDDELLHKVVDLLKKQGLLLYCDIKESTFVEEQLPSRKIDAMDNFQKCFAILKLYQPGVDNSSYNTSKKSDMAEVKDWKAIRVDLVITPFEQYAYALLGWTGSKEFGRDLRRYAEEERKMILDNHGLYDRKKRIFLKAGSEEEIFAHLGLDYVEPWERNA

SEQ ID NO: 1449 - DNA, 1182 bp, synthetic construct
  misc_feature 1..1182: note = Variant of terminal deoxynucleotidyl transferase
  source 1..1182: mol_type = other DNA
atgcaccatcatcatcatcatggcggtagcggccatccgccgagcaataccccggagggggaggtgccgagcgttatcgcccgcaaggttagtcagtacagctgccagcgcaagaccacgctgaataactacaacaaaaagtttaccgacgcgctggagatcatggccgagaactacaaatttaaagagaacctgatcgcgtgtctggaatttaagcgcgccgcgagtctgctgaaatatctgccgttcccggttaccagcatgaaagacatccaaggtctgccgtgcattggcgaccaagttcgtgacgtgatcgaggagatcatcgaagagggcgagagcagccgtgttaaagaagttctcaatgacgagcgctacaaggcctttaagcagttcaccagcgtgttcggtgtgggcgtgaaaaccagcgaaaagtggtttcgtatgggcctccgtacggttgaagaggcaaaggccagtaagagtctgaagctgagcaagatgcagaaggcgggcttcctgtattacgaggatctggcgagctgcgttagtaaagcggaagccgatgccgttacgctcatcgtgaaggggacggtgcgtacctttctgccggatgcgctggtgaccatcaccggcggtttccgccgtggcaaacctatgggccacgacatcgactttctgatcacgaatccgggcccgaaagaggatgacgagctgctccacaaagtggttgatctgctcaagaagcaaggtctgctgctgtactgcgacatcaaagagagcacgttcgtggaggaacaactgccaagtcgcaaaatcgacgccatggacaacttccagaagtgcttcgccattctcaagctgtaccagccgggcgtggataacagcagctataacacgagtaagaagagtgacatggccgaggttaaggattggaaagcgattcgtgtggatctggtgatcacgccattcgagcagtacgcctatgcgctgctcggttggacgggcagcaaagaatttggtcgcgatctgcgccgctatgcggaggaagagcgcaagatgatcctcgacaaccatggcctctacgaccgcaaaaagcgcatctttctgaaagcgggcagcgaagaagagattttcgcgcatctgggtctggattatgtggagccgtgggaacgcaacgcg

SEQ ID NO: 1450 - protein, 394 aa, synthetic construct
  REGION 1..394: note = Variant of terminal deoxynucleotidyl transferase
MHHHHHHGGSGHPPSNTPEGEVPSVIARKVSQYSCQRKTTLNNYNKKFTDALEIMAENYKFKENLIACLEFKRAASLLKYLPFPVTSMKDIQGLPCIGDQVRDVIEEIIEEGESSRVKEVLNDERYKAFKQFTSVFGVGVKTSEKWFRMGLRTVEEAKASKSLKLSKMQKAGFLYYEDLASCVSKAEADAVTLIVKGTVRTFLPDALVTITGGFRRGKPMGHDIDFLITNPGPKEDDELLHKVVDLLKKQGLLLYCDIKESTFVEEQLPSRKIDAMDNFQKCFAILKLYQPGVDNSSYNTSKKSDMAEVKDWKAIRVDLVITPFEQYAYALLGWTGSKEFGRDLRRYAEEERKMILDNHGLYDRKKRIFLKAGSEEEIFAHLGLDYVEPWERNA

SEQ ID NO: 1451 - DNA, 1182 bp, synthetic construct
  misc_feature 1..1182: note = Variant of terminal deoxynucleotidyl transferase
  source 1..1182: mol_type = other DNA
atgcaccatcatcatcatcatggcggtagcggccatccgccgagcaataccccggagggggaggtgccgagcgttatcgcccgcaaggttagtcagtacagctgccagcgcaagaccacgctgaataactacaacaaaaagtttaccgacgcgctggagatcatggccgagaactacaaatttaaagagaacctgatcgcgtgtctggaatttaagcgcgccgcgagtctgctgaaatatctgccgttcccggttaccagcatgaaagacatccaaggtctgccgtgcattggcgaccaagttcgtgacgtgatcgaggagatcatcgaagagggcgagagcagccgtgttaaagaagttctcaatgacgagcgctacaaggcctttaagcagttcaccagcgtgttcggtgtgggcgtgaaaaccagcgaaaagtggtttcgtatgggcctccgtacggttgaagaggcaaaggccagtaagagtctgaagctgagcaagatgcagaaggcgggcttcctgtattacgaggatctggcgagctgcgttagtaaagcggaagccgatgccgttacgctcatcgtgaagaacacggtgcgtacctttctgccggatgcgctggtgaccatcaccggcggtttccgccgtggcaaacctatgggccacgacatcgactttctgatcacgaatccgggcccgaaagaggatgacgagctgctccacaaagtggttgatctgctcaagaagcaaggtctgctgctgtactgcgacatcaaagagagcacgttcgtggaggaacaactgccaagtcgcaaaatcgacgccatggacaacttccagaagtgcttcgccattctcaagctgtaccagccgggcgtggataacagcagctataacacgagtaagaagagtgacatggccgaggttaaggattggaaagcgattcgtgtggatctggtgatcacgccattcgagcagtacgcctatgcgctgctcggttggacgggcagcaaagaatttggtcgcgatctgcgccgctatgcggaggaagagcgcaagatgatcctcgacaaccatggcctctacgactggaaaaagcgcatctttctgaaagcgggcagcgaagaagagattttcgcgcatctgggtctggattatgtggagccgtgggaacgcaacgcg

SEQ ID NO: 1452 - protein, 394 aa, synthetic construct
  REGION 1..394: note = Variant of terminal deoxynucleotidyl transferase
MHHHHHHGGSGHPPSNTPEGEVPSVIARKVSQYSCQRKTTLNNYNKKFTDALEIMAENYKFKENLIACLEFKRAASLLKYLPFPVTSMKDIQGLPCIGDQVRDVIEEIIEEGESSRVKEVLNDERYKAFKQFTSVFGVGVKTSEKWFRMGLRTVEEAKASKSLKLSKMQKAGFLYYEDLASCVSKAEADAVTLIVKNTVRTFLPDALVTITGGFRRGKPMGHDIDFLITNPGPKEDDELLHKVVDLLKKQGLLLYCDIKESTFVEEQLPSRKIDAMDNFQKCFAILKLYQPGVDNSSYNTSKKSDMAEVKDWKAIRVDLVITPFEQYAYALLGWTGSKEFGRDLRRYAEEERKMILDNHGLYDWKKRIFLKAGSEEEIFAHLGLDYVEPWERNA

SEQ ID NO: 1453 - DNA, 1182 bp, synthetic construct
  misc_feature 1..1182: note = Variant of terminal deoxynucleotidyl transferase
  source 1..1182: mol_type = other DNA
atgcaccatcatcatcatcatggcggtagcggccatccgccgagcaataccccggagggggaggtgccgagcgttatcgcccgcaaggttagtcagtacagctgccagcgcaagaccacgctgaataactacaacaaaaagtttaccgacgcgctggagatcatggccgagaactacaaatttaaagagaacctgatcgcgtgtctggaatttaagcgcgccgcgagtctgctgaaatatctgccgttcccggttaccagcatgaaagacatccaaggtctgccgtgcattggcgaccaagttcgtgacgtgatcgaggagatcatcgaagagggcgagagcagccgtgttaaagaagttctcaatgacgagcgctacaaggcctttaagcagttcaccagcgtgttcggtgtgggcgtgaaaaccagcgaaaagtggtttcgtatgggcctccgtacggttgaagaggcaaaggccagtaagagtctgaagctgagcaagatgcagaaggcgggcttcctgtattacgaggatctggcgagctgcgttagtaaagcggaagccgatgccgttacgctcatcgtgaagaacacggtgcgtacctttctgccggatgcgctggtgaccatcaccggcggtttccgccgtggcaaacctatgggccacgacatcgactttctgatcacgaatccgggcccgaaagaggatgacgagctgctccacaaagtggttgatctgctcaagaagcaaggtctgctgctgtactgcgacatcaaagagagcacgttcgtggaggaacaactgccaagtcgcaaaatcgacgccatggacaacttccagaagtgcttcgccattctcaagctgtaccagccgggcgtggataacagcagctataacacgagtgggaagagtgacatggccgaggttaaggattggaaagcgattcgtgtggatctggtgatcacgccattcgagcagtacgcctatgcgctgctcggttggacgggcagcaaagaatttggtcgcgatctgcgccgctatgcggaggaagagcgcaagatgatcctcgacaaccatggcctctacgaccgcaaaaagcgcatctttctgaaagcgggcagcgaagaagagattttcgcgcatctgggtctggattatgtggagccgtgggaacgcaacgcg

SEQ ID NO: 1454 - protein, 394 aa, synthetic construct
  REGION 1..394: note = Variant of terminal deoxynucleotidyl transferase
MHHHHHHGGSGHPPSNTPEGEVPSVIARKVSQYSCQRKTTLNNYNKKFTDALEIMAENYKFKENLIACLEFKRAASLLKYLPFPVTSMKDIQGLPCIGDQVRDVIEEIIEEGESSRVKEVLNDERYKAFKQFTSVFGVGVKTSEKWFRMGLRTVEEAKASKSLKLSKMQKAGFLYYEDLASCVSKAEADAVTLIVKNTVRTFLPDALVTITGGFRRGKPMGHDIDFLITNPGPKEDDELLHKVVDLLKKQGLLLYCDIKESTFVEEQLPSRKIDAMDNFQKCFAILKLYQPGVDNSSYNTSGKSDMAEVKDWKAIRVDLVITPFEQYAYALLGWTGSKEFGRDLRRYAEEERKMILDNHGLYDRKKRIFLKAGSEEEIFAHLGLDYVEPWERNA

SEQ ID NO: 1455 - DNA, 1182 bp, synthetic construct
  misc_feature 1..1182: note = Variant of terminal deoxynucleotidyl transferase
  source 1..1182: mol_type = other DNA
atgcaccatcatcatcatcatagtggtagcggccatccgccgagcaataccccggagggggaggtgccgagcgttatcgcccgcaaggttagtcagtacagctgccagcgcaagaccacgctgaataactacaacaaaaagtttaccgacgcgctggagatcatggccgagaactacaaatttaaagagaacctgatcgcgtgtctggaatttaagcgcgccgcgagtctgctgaaatatctgccgttcccggttaccagcatgaaagacatccaaggtctgccgtgcattggcgaccaagttcgtgacgtgatcgaggagatcatcgaagagggcgagagcagccgtgttaaagaagttctcaatgacgagcgctacaaggcctttaagcagttcaccagcgtgttcggtgtgggcgtgaaaaccagcgaaaagtggtttcgtatgggcctccgtacggttgaagaggcaaaggccagtaagagtctgaagctgagcaagatgcagaaggcgggcttcctgtattacgaggatctggcgagctgcgttagtaaagcggaagccgatgccgttacgctcatcgtgaagaacacggtgcgtacctttctgccggatgcgctggtgaccatcaccggcggtttccgccgtggcaaacctatgggccacgacatcgactttctgatcacgaatccgggcccgaaagaggatgacgagctgctccacaaagtggttgatctgctcaagaagcaaggtctgctgctgtactgcgacatcaaagagagcacgttcgtggaggaacaactgccaagtcgcaaaatcgacgccatggacaacttccagaagtgcttcgccattctcaagctgtaccagccgggcgtggataacagcagctataacacgagtaagaagagtgacatggccgaggttaaggattggaaagcgattcgtgtggatctggtgatcacgccattcgagcagtacgcctatgcgctgctcggttggacgggcagcaaagaatttggtcgcgatctgcgccgctatgcggaggaagagcgcaagatgatcctcgacaaccatggcctctacgaccgcaaaaagcgcatctttctgaaagcgggcagcgaagaagagattttcgcgcatctgggtctggattatgtggagccgtgggaacgcaacgcg

SEQ ID NO: 1456 - protein, 394 aa, synthetic construct
  REGION 1..394: note = Variant of terminal deoxynucleotidyl transferase
MHHHHHHSGSGHPPSNTPEGEVPSVIARKVSQYSCQRKTTLNNYNKKFTDALEIMAENYKFKENLIACLEFKRAASLLKYLPFPVTSMKDIQGLPCIGDQVRDVIEEIIEEGESSRVKEVLNDERYKAFKQFTSVFGVGVKTSEKWFRMGLRTVEEAKASKSLKLSKMQKAGFLYYEDLASCVSKAEADAVTLIVKNTVRTFLPDALVTITGGFRRGKPMGHDIDFLITNPGPKEDDELLHKVVDLLKKQGLLLYCDIKESTFVEEQLPSRKIDAMDNFQKCFAILKLYQPGVDNSSYNTSKKSDMAEVKDWKAIRVDLVITPFEQYAYALLGWTGSKEFGRDLRRYAEEERKMILDNHGLYDRKKRIFLKAGSEEEIFAHLGLDYVEPWERNA

SEQ ID NO: 1457 - DNA, 1182 bp, synthetic construct
  misc_feature 1..1182: note = Variant of terminal deoxynucleotidyl transferase
  source 1..1182: mol_type = other DNA
atgcaccatcatcatcatcatggcggtagcggccatccgccgagcaataccccggagggggaggtgccgagcgttatcgcccgcaaggttagtcagtacagctgccagcgcaagaccacgctgaataactacaacaaaaagtttaccgacgcgctggagatcatggccgagaactacaaatttaaagagaacctgatcgcgtgtctggaatttaagcgcgccgcgagtctgctgaaatatctgccgttcccggttaccagcatgaaagacatccaaggtctgccgtgcattggcgaccaagttcgtgacgtgatcgaggagatcatcgaagagggcgagagcagccgtgttaaagaagttctcaatgacgagcgctacaaggcctttaagcagttcaccagcgtgttcggtgtgggcgtgaaaaccagcgaaaagtggtttcgtatgggcctccgtacggttgaagaggcaaaggccagtaagagtctgaagctgagcaagatgcagaaggcgggcttcctgtattacgaggatctggcgagctgcgttagtaaagcggaagccgatgccgttacgctcatcgtgaagaacacggtgcgtacctttctgccggatgcgctggtgaccatcaccggcggtttccgccgtggcaaacctatgggccacgacatcgactttctgatcacgaatccgggcccgaaagaggatgacgagctgctccacaaagtggttgatctgctcaagaagcaaggtctgctgctgtactgcgacatcaaagagagcacgttcgtggaggaacaactgccaagtcgcaaaatcgacgccatggacaacttccagaagtgcttcgccattctcaagctgtaccagccgggcgtggataacagcagcgataacacgagtaagaagagtgacatggccgaggttaaggattggaaagcgattcgtgtggatctggtgatcacgccattcgagcagtacgcctatgcgctgctcggttggacgggcagcaaagaatttggtcgcgatctgcgccgctatgcggaggaagagcgcaagatgatcctcgacaaccatggcctctacgaccgcaaaaagcgcatctttctgaaagcgggcagcgaagaagagattttcgcgcatctgggtctggattatgtggagccgtgggaacgcaacgcg

SEQ ID NO: 1458 - protein, 394 aa, synthetic construct
  REGION 1..394: note = Variant of terminal deoxynucleotidyl transferase
MHHHHHHGGSGHPPSNTPEGEVPSVIARKVSQYSCQRKTTLNNYNKKFTDALEIMAENYKFKENLIACLEFKRAASLLKYLPFPVTSMKDIQGLPCIGDQVRDVIEEIIEEGESSRVKEVLNDERYKAFKQFTSVFGVGVKTSEKWFRMGLRTVEEAKASKSLKLSKMQKAGFLYYEDLASCVSKAEADAVTLIVKNTVRTFLPDALVTITGGFRRGKPMGHDIDFLITNPGPKEDDELLHKVVDLLKKQGLLLYCDIKESTFVEEQLPSRKIDAMDNFQKCFAILKLYQPGVDNSSDNTSKKSDMAEVKDWKAIRVDLVITPFEQYAYALLGWTGSKEFGRDLRRYAEEERKMILDNHGLYDRKKRIFLKAGSEEEIFAHLGLDYVEPWERNA

SEQ ID NO: 1459 - DNA, 1182 bp, synthetic construct
  misc_feature 1..1182: note = Variant of terminal deoxynucleotidyl transferase
  source 1..1182: mol_type = other DNA
atgcaccatcatcatcatcatggcggtagcggccatccgccgagcaataccccggagggggaggtgccgagcgttatcgcccgcaaggttagtcagtacagctgccagcgcaagaccacgctgaataactacaacaaaaagtttaccgacgcgctggagatcatggccgagaactacaaatttaaagagaacctgatcgcgtgtctggaatttaagcgcgccgcgagtctgctgaaatatctgccgttcccggttaccagcatgaaagacatccaaggtctgccgtgcattggcgaccaagttcgtgacgtgatcgaggagatcatcgaagagggcgagagcagccgtgttaaagaagttctcaatgacgagcgctacaaggcctttaagcagttcaccagcgtgttcggtgtgggcgtgaaaaccagcgaaaagtggtttcgtatgggcctccgtacggttgaagaggcaaaggccagtaagagtctgaagctgagcaagatgcagaaggcgggcttcctgtattacgaggatctggcgagctgcgttagtaaagcggaagccgatgccgttacgctcatcgtgaagaacacggtgcgtacctttctgccggatgcgctggtgaccatcaccggcggtttccgccgtggcaaacctatgggccacgacatcgactttctgatcacgaatccgggcccgaaagaggatgcggagctgctccacaaagtggttgatctgctcaagaagcaaggtctgctgctgtactgcgacatcaaagagagcacgttcgtggaggaacaactgccaagtcgcaaaatcgacgccatggacaacttccagaagtgcttcgccattctcaagctgtaccagccgggcgtggataacagcagctataacacgagtaagaagagtgacatggccgaggttaaggattggaaagcgattcgtgtggatctggtgatcacgccattcgagcagtacgcctatgcgctgctcggttggacgggcagcaaagaatttggtcgcgatctgcgccgctatgcggaggaagagcgcaagatgatcctcgacaaccatggcctctacgaccgcaaaaagcgcatctttctgaaagcgggcagcgaagaagagattttcgcgcatctgggtctggattatgtggagccgtgggaacgcaacgcg

SEQ ID NO: 1460 - protein, 394 aa, synthetic construct
  REGION 1..394: note = Variant of terminal deoxynucleotidyl transferase
MHHHHHHGGSGHPPSNTPEGEVPSVIARKVSQYSCQRKTTLNNYNKKFTDALEIMAENYKFKENLIACLEFKRAASLLKYLPFPVTSMKDIQGLPCIGDQVRDVIEEIIEEGESSRVKEVLNDERYKAFKQFTSVFGVGVKTSEKWFRMGLRTVEEAKASKSLKLSKMQKAGFLYYEDLASCVSKAEADAVTLIVKNTVRTFLPDALVTITGGFRRGKPMGHDIDFLITNPGPKEDAELLHKVVDLLKKQGLLLYCDIKESTFVEEQLPSRKIDAMDNFQKCFAILKLYQPGVDNSSYNTSKKSDMAEVKDWKAIRVDLVITPFEQYAYALLGWTGSKEFGRDLRRYAEEERKMILDNHGLYDRKKRIFLKAGSEEEIFAHLGLDYVEPWERNA

SEQ ID NO: 1461 - DNA, 1182 bp, synthetic construct
  misc_feature 1..1182: note = Variant of terminal deoxynucleotidyl transferase
  source 1..1182: mol_type = other DNA
atgcaccatcatcatcatcatggcggtagcggccatccgccgagcaataccccggagggggaggtgccgagcgttatcgcccgcagggttagtcagtacagctgccagcgcaagaccacgctgaataactacaacaaaaagtttaccgacgcgctggagatcatggccgagaactacaaatttaaagagaacctgatcgcgtgtctggaatttaagcgcgccgcgagtctgctgaaatatctgccgttcccggttaccagcatgaaagacatccaaggtctgccgtgcattggcgaccaagttcgtgacgtgatcgaggagatcatcgaagagggcgagagcagccgtgttaaagaagttctcaatgacgagcgctacaaggcctttaagcagttcaccagcgtgttcggtgtgggcgtgaaaaccagcgaaaagtggtttcgtatgggcctccgtacggttgaagaggcaaaggccagtaagagtctgaagctgagcaagatgcagaaggcgggcttcctgtattacgaggatctggcgagctgcgttagtaaagcggaagccgatgccgttacgctcatcgtgaagaacacggtgcgtacctttctgccggatgcgctggtgaccatcaccggcggtttccgccgtggcaaacctatgggccacgacatcgactttctgatcacgaatccgggcccgaaagaggatgacgagctgctccacaaagtggttgatctgctcaagaagcaaggtctgctgctgtactgcgacatcaaagagagcacgttcgtggaggaacaactgccaagtcgcaaaatcgacgccatggacaacttccagaagtgcttcgccattctcaagctgtaccagccgggcgtggataacagcagctataacacgagtaagaagagtgacatggccgaggttaaggattggaaagcgattcgtgtggatctggtgatcacgccattcgagcagtacgcctatgcgctgctcggttggacgggcagcaaagaatttggtcgcgatctgcgccgctatgcggaggaagagcgcaagatgatcctcgacaaccatggcctctacgaccgcaaaaagcgcatctttctgaaagcgggcagcgaagaagagattttcgcgcatctgggtctggattatgtggagccgtgggaacgcaacgcg

SEQ ID NO: 1462 - protein, 394 aa, synthetic construct
  REGION 1..394: note = Variant of terminal deoxynucleotidyl transferase
MHHHHHHGGSGHPPSNTPEGEVPSVIARRVSQYSCQRKTTLNNYNKKFTDALEIMAENYKFKENLIACLEFKRAASLLKYLPFPVTSMKDIQGLPCIGDQVRDVIEEIIEEGESSRVKEVLNDERYKAFKQFTSVFGVGVKTSEKWFRMGLRTVEEAKASKSLKLSKMQKAGFLYYEDLASCVSKAEADAVTLIVKNTVRTFLPDALVTITGGFRRGKPMGHDIDFLITNPGPKEDDELLHKVVDLLKKQGLLLYCDIKESTFVEEQLPSRKIDAMDNFQKCFAILKLYQPGVDNSSYNTSKKSDMAEVKDWKAIRVDLVITPFEQYAYALLGWTGSKEFGRDLRRYAEEERKMILDNHGLYDRKKRIFLKAGSEEEIFAHLGLDYVEPWERNA

SEQ ID NO: 1463 - DNA, 1182 bp, synthetic construct
  misc_feature 1..1182: note = Variant of terminal deoxynucleotidyl transferase
  source 1..1182: mol_type = other DNA
atgcaccatcatcatcatcatggcggtagcggccatccgccgagcaataccccggagggggaggtgccgagcgttatcgcccgcaaggttagtcagtacagctgccagcgcaagaccacgctgaataactacaacaaaaagtttaccgacgcgctggagatcatggccgagaactacaaatttaaagagaacctgatcgcgtgtctggaatttaagcgcgccgcgagtctgctgaaatatctgccgttcccggttaccagcatgaaagacatccaaggtctgccgtgcattggcgaccaagttcgtgacgtgatcgaggagatcatcgaagagggcgagagcagccgtgttaaagaagttctcaatgacgagcgctacaaggcctttaagcagttcaccagcgtgttcggtgtgggcgtgaaaaccagcgaaaagtggtttcgtatgggcctccgtacggttgaagaggcaaaggccagtaagagtctgaagctgagcaagatgcagaaggcgggcttcctgtattacgaggatctggcgagctgcgttagtaaagcggaagccgatgccgttacgctcatcgtgaagaacacggtgcgtacctttctgccggatgcgctggtgaccatcaccggcggtttccgccgtggcaaacctatgggccacgacatcgactttctgatcacgaatccgggcccgaaagaggatggggagctgctccacaaagtggttgatctgctcaagaagcaaggtctgctgctgtactgcgacatcaaagagagcacgttcgtggaggaacaactgccaagtcgcaaaatcgacgccatggacaacttccagaagtgcttcgccattctcaagctgtaccagccgggcgtggataacagcagctataacacgagtaagaagagtgacatggccgaggttaaggattggaaagcgattcgtgtggatctggtgatcacgccattcgagcagtacgcctatgcgctgctcggttggacgggcagcaaagaatttggtcgcgatctgcgccgctatgcggaggaagagcgcaagatgatcctcgacaaccatggcctctacgaccgcaaaaagcgcatctttctgaaagcgggcagcgaagaagagattttcgcgcatctgggtctggattatgtggagccgtgggaacgcaacgcg

SEQ ID NO: 1464 - protein, 394 aa, synthetic construct
  REGION 1..394: note = Variant of terminal deoxynucleotidyl transferase
MHHHHHHGGSGHPPSNTPEGEVPSVIARKVSQYSCQRKTTLNNYNKKFTDALEIMAENYKFKENLIACLEFKRAASLLKYLPFPVTSMKDIQGLPCIGDQVRDVIEEIIEEGESSRVKEVLNDERYKAFKQFTSVFGVGVKTSEKWFRMGLRTVEEAKASKSLKLSKMQKAGFLYYEDLASCVSKAEADAVTLIVKNTVRTFLPDALVTITGGFRRGKPMGHDIDFLITNPGPKEDGELLHKVVDLLKKQGLLLYCDIKESTFVEEQLPSRKIDAMDNFQKCFAILKLYQPGVDNSSYNTSKKSDMAEVKDWKAIRVDLVITPFEQYAYALLGWTGSKEFGRDLRRYAEEERKMILDNHGLYDRKKRIFLKAGSEEEIFAHLGLDYVEPWERNA

SEQ ID NO: 1465 - DNA, 1182 bp, synthetic construct
  misc_feature 1..1182: note = Variant of terminal deoxynucleotidyl transferase
  source 1..1182: mol_type = other DNA
atgcaccatcatcatcatcatggcggtagcggccatccgccgagcaataccccggagggggaggtgccgagcgttatcgcccgcaaggttagtcagtacagctgccagcgcaagaccacgctgaataactacaacaaaaagtttaccgacgcgctggagatcatggccgagaactacaaatttaaagagaacctgatcgcgtgtctggaatttaagcgcgccgcgagtctgctgaaatatctgccgttcccggttaccagcatgtatgacatccaaggtctgccgtgcattggcgaccaagttcgtgacgtgatcgaggagatcatcgaagagggcgagagcagccgtgttaaagaagttctcaatgacgagcgctacaaggcctttaagcagttcaccagcgtgttcggtgtgggcgtgaaaaccagcgaaaagtggtttcgtatgggcctccgtacggttgaagaggcaaaggccagtaagagtctgaagctgagcaagatgcagaaggcgggcttcctgtattacgaggatctggcgagctgcgttagtaaagcggaagccgatgccgttacgctcatcgtgaagaacacggtgcgtacctttctgccggatgcgctggtgaccatcaccggcggtttccgccgtggcaaacctatgggccacgacatcgactttctgatcacgaatccgggcccgaaagaggatgacgagctgctccacaaagtggttgatctgctcaagaagcaaggtctgctgctgtactgcgacatcaaagagagcacgttcgtggaggaacaactgccaagtcgcaaaatcgacgccatggacaacttccagaagtgcttcgccattctcaagctgtaccagccgggcgtggataacagcagctataacacgagtaagaagagtgacatggccgaggttaaggattggaaagcgattcgtgtggatctggtgatcacgccattcgagcagtacgcctatgcgctgctcggttggacgggcagcaaagaatttggtcgcgatctgcgccgctatgcggaggaagagcgcaagatgatcctcgacaaccatggcctctacgaccgcaaaaagcgcatctttctgaaagcgggcagcgaagaagagattttcgcgcatctgggtctggattatgtggagccgtgggaacgcaacgcg

SEQ ID NO: 1466 - protein, 394 aa, synthetic construct
  REGION 1..394: note = Variant of terminal deoxynucleotidyl transferase
MHHHHHHGGSGHPPSNTPEGEVPSVIARKVSQYSCQRKTTLNNYNKKFTDALEIMAENYKFKENLIACLEFKRAASLLKYLPFPVTSMYDIQGLPCIGDQVRDVIEEIIEEGESSRVKEVLNDERYKAFKQFTSVFGVGVKTSEKWFRMGLRTVEEAKASKSLKLSKMQKAGFLYYEDLASCVSKAEADAVTLIVKNTVRTFLPDALVTITGGFRRGKPMGHDIDFLITNPGPKEDDELLHKVVDLLKKQGLLLYCDIKESTFVEEQLPSRKIDAMDNFQKCFAILKLYQPGVDNSSYNTSKKSDMAEVKDWKAIRVDLVITPFEQYAYALLGWTGSKEFGRDLRRYAEEERKMILDNHGLYDRKKRIFLKAGSEEEIFAHLGLDYVEPWERNA

SEQ ID NO: 1467 - DNA, 1182 bp, synthetic construct
  misc_feature 1..1182: note = Variant of terminal deoxynucleotidyl transferase
  source 1..1182: mol_type = other DNA
atgcaccatcatcatcatcatggcggtagcggccatccggggagcaataccccggagggggaggtgccgagcgttatcgcccgcaaggttagtcagtacagctgccagcgcaagaccacgctgaataactacaacaaaaagtttaccgacgcgctggagatcatggccgagaactacaaatttaaagagaacctgatcgcgtgtctggaatttaagcgcgccgcgagtctgctgaaatatctgccgttcccggttaccagcatgaaagacatccaaggtctgccgtgcattggcgaccaagttcgtgacgtgatcgaggagatcatcgaagagggcgagagcagccgtgttaaagaagttctcaatgacgagcgctacaaggcctttaagcagttcaccagcgtgttcggtgtgggcgtgaaaaccagcgaaaagtggtttcgtatgggcctccgtacggttgaagaggcaaaggccagtaagagtctgaagctgagcaagatgcagaaggcgggcttcctgtattacgaggatctggcgagctgcgttagtaaagcggaagccgatgccgttacgctcatcgtgaagaacacggtgcgtacctttctgccggatgcgctggtgaccatcaccggcggtttccgccgtggcaaacctatgggccacgacatcgactttctgatcacgaatccgggcccgaaagaggatgacgagctgctccacaaagtggttgatctgctcaagaagcaaggtctgctgctgtactgcgacatcaaagagagcacgttcgtggaggaacaactgccaagtcgcaaaatcgacgccatggacaacttccagaagtgcttcgccattctcaagctgtaccagccgggcgtggataacagcagctataacacgagtaagaagagtgacatggccgaggttaaggattggaaagcgattcgtgtggatctggtgatcacgccattcgagcagtacgcctatgcgctgctcggttggacgggcagcaaagaatttggtcgcgatctgcgccgctatgcggaggaagagcgcaagatgatcctcgacaaccatggcctctacgaccgcaaaaagcgcatctttctgaaagcgggcagcgaagaagagattttcgcgcatctgggtctggattatgtggagccgtgggaacgcaacgcg

SEQ ID NO: 1468 - protein, 394 aa, synthetic construct
  REGION 1..394: note = Variant of terminal deoxynucleotidyl transferase
MHHHHHHGGSGHPGSNTPEGEVPSVIARKVSQYSCQRKTTLNNYNKKFTDALEIMAENYKFKENLIACLEFKRAASLLKYLPFPVTSMKDIQGLPCIGDQVRDVIEEIIEEGESSRVKEVLNDERYKAFKQFTSVFGVGVKTSEKWFRMGLRTVEEAKASKSLKLSKMQKAGFLYYEDLASCVSKAEADAVTLIVKNTVRTFLPDALVTITGGFRRGKPMGHDIDFLITNPGPKEDDELLHKVVDLLKKQGLLLYCDIKESTFVEEQLPSRKIDAMDNFQKCFAILKLYQPGVDNSSYNTSKKSDMAEVKDWKAIRVDLVITPFEQYAYALLGWTGSKEFGRDLRRYAEEERKMILDNHGLYDRKKRIFLKAGSEEEIFAHLGLDYVEPWERNA

SEQ ID NO: 1469 - DNA, 1182 bp, synthetic construct
  misc_feature 1..1182: note = Variant of terminal deoxynucleotidyl transferase
  source 1..1182: mol_type = other DNA
atgcaccatcatcatcatcatggcggtagcggccatccgccgagcaataccccggagggggaggtgccgagcgttatcgcccgcaaggttagtcagtacagctgccagcgcaagaccacgctgaataactacaacaaaaagtttaccgacgcgctggagatcatggccgagaactacaaatttaaagagaacctgatcgcgtgtctggaatttaagcgcgccgcgagtctgctgaaatatctgccgttcccggttaccagcatgaaagacatccaaggtctgccgtgcattggcgaccaagttcgtgacgtgatcgaggagatcatcgaagagggcgagagcagccgtgttaaagaagttctcaatgacgagcgctacaaggcctttaagcagttcaccagcgtgttcggtgtgggcgtgaaaaccagcgaaaagtggtttcgtatgggcctccgtacggttgaagaggcaaaggccagtaagagtctgaagctgagcaagatgcagaaggcgggcttcctgtattacgaggatctggcgagctgcgttagtaaagcggaagccgatgccgttacgctcatcgtgaagaacacggtgcgtacctttctgccggatgcgctggtgaccatcaccggcggtttccgccgtggcaaacctatgggccacgacatcgactttctgatcacgaatccgggcccgaaagaggatgacgagctgctccacaaagtggttgatctgctcaagaagcaaggtctgctgctgtactgcgacatcaaagagagcacgttcgtggaggaacaactgccaagtcgcaaaatcgacgccatggacaacttccagaagtgcttcgccattctcaagctgtaccagccgggcgtggataacagcagctataacacgagtaagaagagtgacatggccgaggttaaggattggaaagcgattcgtgtggatctggtgatcacgccattcgagcagtacgcctatgcgctgctcggttggacgggcagcaaagaatttggtcgcgatctgcgccgctatgcggaggaagagcgcaagatgatcctcgacaaccatggcctctacgactttaaaaagcgcatctttctgaaagcgggcagcgaagaagagattttcgcgcatctgggtctggattatgtggagccgtgggaacgcaacgcg

SEQ ID NO: 1470 - protein, 394 aa, synthetic construct
  REGION 1..394: note = Variant of terminal deoxynucleotidyl transferase
MHHHHHHGGSGHPPSNTPEGEVPSVIARKVSQYSCQRKTTLNNYNKKFTDALEIMAENYKFKENLIACLEFKRAASLLKYLPFPVTSMKDIQGLPCIGDQVRDVIEEIIEEGESSRVKEVLNDERYKAFKQFTSVFGVGVKTSEKWFRMGLRTVEEAKASKSLKLSKMQKAGFLYYEDLASCVSKAEADAVTLIVKNTVRTFLPDALVTITGGFRRGKPMGHDIDFLITNPGPKEDDELLHKVVDLLKKQGLLLYCDIKESTFVEEQLPSRKIDAMDNFQKCFAILKLYQPGVDNSSYNTSKKSDMAEVKDWKAIRVDLVITPFEQYAYALLGWTGSKEFGRDLRRYAEEERKMILDNHGLYDFKKRIFLKAGSEEEIFAHLGLDYVEPWERNA

SEQ ID NO: 1471 - DNA, 1182 bp, synthetic construct
  misc_feature 1..1182: note = Variant of terminal deoxynucleotidyl transferase
  source 1..1182: mol_type = other DNA
atgcaccatcatcatcatcatggcggtagcggccatccggagagcaataccccggagggggaggtgccgagcgttatcgcccgcaaggttagtcagtacagctgccagcgcaagaccacgctgaataactacaacaaaaagtttaccgacgcgctggagatcatggccgagaactacaaatttaaagagaacctgatcgcgtgtctggaatttaagcgcgccgcgagtctgctgaaatatctgccgttcccggttaccagcatgaaagacatccaaggtctgccgtgcattggcgaccaagttcgtgacgtgatcgaggagatcatcgaagagggcgagagcagccgtgttaaagaagttctcaatgacgagcgctacaaggcctttaagcagttcaccagcgtgttcggtgtgggcgtgaaaaccagcgaaaagtggtttcgtatgggcctccgtacggttgaagaggcaaaggccagtaagagtctgaagctgagcaagatgcagaaggcgggcttcctgtattacgaggatctggcgagctgcgttagtaaagcggaagccgatgccgttacgctcatcgtgaagaacacggtgcgtacctttctgccggatgcgctggtgaccatcaccggcggtttccgccgtggcaaacctatgggccacgacatcgactttctgatcacgaatccgggcccgaaagaggatgacgagctgctccacaaagtggttgatctgctcaagaagcaaggtctgctgctgtactgcgacatcaaagagagcacgttcgtggaggaacaactgccaagtcgcaaaatcgacgccatggacaacttccagaagtgcttcgccattctcaagctgtaccagccgggcgtggataacagcagctataacacgagtaagaagagtgacatggccgaggttaaggattggaaagcgattcgtgtggatctggtgatcacgccattcgagcagtacgcctatgcgctgctcggttggacgggcagcaaagaatttggtcgcgatctgcgccgctatgcggaggaagagcgcaagatgatcctcgacaaccatggcctctacgaccgcaaaaagcgcatctttctgaaagcgggcagcgaagaagagattttcgcgcatctgggtctggattatgtggagccgtgggaacgcaacgcg

SEQ ID NO: 1472 - protein, 394 aa, synthetic construct
  REGION 1..394: note = Variant of terminal deoxynucleotidyl transferase
MHHHHHHGGSGHPESNTPEGEVPSVIARKVSQYSCQRKTTLNNYNKKFTDALEIMAENYKFKENLIACLEFKRAASLLKYLPFPVTSMKDIQGLPCIGDQVRDVIEEIIEEGESSRVKEVLNDERYKAFKQFTSVFGVGVKTSEKWFRMGLRTVEEAKASKSLKLSKMQKAGFLYYEDLASCVSKAEADAVTLIVKNTVRTFLPDALVTITGGFRRGKPMGHDIDFLITNPGPKEDDELLHKVVDLLKKQGLLLYCDIKESTFVEEQLPSRKIDAMDNFQKCFAILKLYQPGVDNSSYNTSKKSDMAEVKDWKAIRVDLVITPFEQYAYALLGWTGSKEFGRDLRRYAEEERKMILDNHGLYDRKKRIFLKAGSEEEIFAHLGLDYVEPWERNA

SEQ ID NO: 1473 - DNA, 1182 bp, synthetic construct
  misc_feature 1..1182: note = Variant of terminal deoxynucleotidyl transferase
  source 1..1182: mol_type = other DNA
atgcaccatcatcatcatcatggcggtagcggccatccgccgagcaataccccggagggggaggtgccgagcgttatcgcccgcaaggttagtcagtacagctgccagcgcaagaccacgctggttaactacaacaaaaagtttaccgacgcgctggagatcatggccgagaactacaaatttaaagagaacctgatcgcgtgtctggaatttaagcgcgccgcgagtctgctgaaatatctgccgttcccggttaccagcatgaaagacatccaaggtctgccgtgcattggcgaccaagttcgtgacgtgatcgaggagatcatcgaagagggcgagagcagccgtgttaaagaagttctcaatgacgagcgctacaaggcctttaagcagttcaccagcgtgttcggtgtgggcgtgaaaaccagcgaaaagtggtttcgtatgggcctccgtacggttgaagaggcaaaggccagtaagagtctgaagctgagcaagatgcagaaggcgggcttcctgtattacgaggatctggcgagctgcgttagtaaagcggaagccgatgccgttacgctcatcgtgaagaacacggtgcgtacctttctgccggatgcgctggtgaccatcaccggcggtttccgccgtggcaaacctatgggccacgacatcgactttctgatcacgaatccgggcccgaaagaggatgacgagctgctccacaaagtggttgatctgctcaagaagcaaggtctgctgctgtactgcgacatcaaagagagcacgttcgtggaggaacaactgccaagtcgcaaaatcgacgccatggacaacttccagaagtgcttcgccattctcaagctgtaccagccgggcgtggataacagcagctataacacgagtaagaagagtgacatggccgaggttaaggattggaaagcgattcgtgtggatctggtgatcacgccattcgagcagtacgcctatgcgctgctcggttggacgggcagcaaagaatttggtcgcgatctgcgccgctatgcggaggaagagcgcaagatgatcctcgacaaccatggcctctacgaccgcaaaaagcgcatctttctgaaagcgggcagcgaagaagagattttcgcgcatctgggtctggattatgtggagccgtgggaacgcaacgcg

SEQ ID NO: 1474 - protein, 394 aa, synthetic construct
  REGION 1..394: note = Variant of terminal deoxynucleotidyl transferase
MHHHHHHGGSGHPPSNTPEGEVPSVIARKVSQYSCQRKTTLVNYNKKFTDALEIMAENYKFKENLIACLEFKRAASLLKYLPFPVTSMKDIQGLPCIGDQVRDVIEEIIEEGESSRVKEVLNDERYKAFKQFTSVFGVGVKTSEKWFRMGLRTVEEAKASKSLKLSKMQKAGFLYYEDLASCVSKAEADAVTLIVKNTVRTFLPDALVTITGGFRRGKPMGHDIDFLITNPGPKEDDELLHKVVDLLKKQGLLLYCDIKESTFVEEQLPSRKIDAMDNFQKCFAILKLYQPGVDNSSYNTSKKSDMAEVKDWKAIRVDLVITPFEQYAYALLGWTGSKEFGRDLRRYAEEERKMILDNHGLYDRKKRIFLKAGSEEEIFAHLGLDYVEPWERNA

SEQ ID NO: 1475 - DNA, 1182 bp, synthetic construct
  misc_feature 1..1182: note = Variant of terminal deoxynucleotidyl transferase
  source 1..1182: mol_type = other DNA
atgcaccatcatcatcatcatggcggtagcggccatccgccgagcaataccccggagggggaggtgccgagcgttatcgcccgcaaggttagtcagtacagctgccagcgcaagaccacgctgaataactacaacaaaaagtttaccgacgcgctggagatcatggccgagaactacaaatttaaagagaacctgatcgcgtgtctggaatttaagcgcgccgcgagtctgctgaaatatctgccgttcccggttaccagcatgaaagacatccaaggtctgccgtgcattggcgaccaagttcgtgacgtgatcgaggagatcatcgaagagggcgagagcagccgtgttaaagaagttctcaatgacgagcgctacaaggcctttaagcagttcaccagcgtgttcggtgtgggcgtgaaaaccagcgaaaagtggtttcgtatgggcctccgtacggttgaagaggcaaaggccagtaagagtctgaagctgagcaagatgcagaaggcgggcttcctgtattacgaggatctggcgagctgcgttagtaaagcggaagccgatgccgttacgctcatcgtgaagaacacggtgcgtacctttctgccggatgcgctggtgaccatcaccggcggtttccgccgtggcaaacctatgggccacgacatcgactttctgatcacgaatccgggcccgaaagaggatgacgagctgctccacaaagtggttgatctgctcaagaagcaaggtctgctgctgtactgcgacatcaaagagagcacgttcgtggaggaacaactgccaagtcgcaaaatcgacgccatggacaacttccagaagtgcttcgccattctcaagctggggcagccgggcgtggataacagcagctataacacgagtaagaagagtgacatggccgaggttaaggattggaaagcgattcgtgtggatctggtgatcacgccattcgagcagtacgcctatgcgctgctcggttggacgggcagcaaagaatttggtcgcgatctgcgccgctatgcggaggaagagcgcaagatgatcctcgacaaccatggcctctacgaccgcaaaaagcgcatctttctgaaagcgggcagcgaagaagagattttcgcgcatctgggtctggattatgtggagccgtgggaacgcaacgcg

SEQ ID NO: 1476 - protein, 394 aa, synthetic construct
  REGION 1..394: note = Variant of terminal deoxynucleotidyl transferase
MHHHHHHGGSGHPPSNTPEGEVPSVIARKVSQYSCQRKTTLNNYNKKFTDALEIMAENYKFKENLIACLEFKRAASLLKYLPFPVTSMKDIQGLPCIGDQVRDVIEEIIEEGESSRVKEVLNDERYKAFKQFTSVFGVGVKTSEKWFRMGLRTVEEAKASKSLKLSKMQKAGFLYYEDLASCVSKAEADAVTLIVKNTVRTFLPDALVTITGGFRRGKPMGHDIDFLITNPGPKEDDELLHKVVDLLKKQGLLLYCDIKESTFVEEQLPSRKIDAMDNFQKCFAILKLGQPGVDNSSYNTSKKSDMAEVKDWKAIRVDLVITPFEQYAYALLGWTGSKEFGRDLRRYAEEERKMILDNHGLYDRKKRIFLKAGSEEEIFAHLGLDYVEPWERNA

SEQ ID NO: 1477 - DNA, 1182 bp, synthetic construct
  misc_feature 1..1182: note = Variant of terminal deoxynucleotidyl transferase
  source 1..1182: mol_type = other DNA
atgcaccatcatcatcatcatggcggtagcggccatccgccgagcaataccccggagggggaggtgccgagcgttatcgccgggaaggttagtcagtacagctgccagcgcaagaccacgctgaataactacaacaaaaagtttaccgacgcgctggagatcatggccgagaactacaaatttaaagagaacctgatcgcgtgtctggaatttaagcgcgccgcgagtctgctgaaatatctgccgttcccggttaccagcatgaaagacatccaaggtctgccgtgcattggcgaccaagttcgtgacgtgatcgaggagatcatcgaagagggcgagagcagccgtgttaaagaagttctcaatgacgagcgctacaaggcctttaagcagttcaccagcgtgttcggtgtgggcgtgaaaaccagcgaaaagtggtttcgtatgggcctccgtacggttgaagaggcaaaggccagtaagagtctgaagctgagcaagatgcagaaggcgggcttcctgtattacgaggatctggcgagctgcgttagtaaagcggaagccgatgccgttacgctcatcgtgaagaacacggtgcgtacctttctgccggatgcgctggtgaccatcaccggcggtttccgccgtggcaaacctatgggccacgacatcgactttctgatcacgaatccgggcccgaaagaggatgacgagctgctccacaaagtggttgatctgctcaagaagcaaggtctgctgctgtactgcgacatcaaagagagcacgttcgtggaggaacaactgccaagtcgcaaaatcgacgccatggacaacttccagaagtgcttcgccattctcaagctgtaccagccgggcgtggataacagcagctataacacgagtaagaagagtgacatggccgaggttaaggattggaaagcgattcgtgtggatctggtgatcacgccattcgagcagtacgcctatgcgctgctcggttggacgggcagcaaagaatttggtcgcgatctgcgccgctatgcggaggaagagcgcaagatgatcctcgacaaccatggcctctacgaccgcaaaaagcgcatctttctgaaagcgggcagcgaagaagagattttcgcgcatctgggtctggattatgtggagccgtgggaacgcaacgcg

SEQ ID NO: 1478 - protein, 394 aa, synthetic construct
  REGION 1..394: note = Variant of terminal deoxynucleotidyl transferase
MHHHHHHGGSGHPPSNTPEGEVPSVIAGKVSQYSCQRKTTLNNYNKKFTDALEIMAENYKFKENLIACLEFKRAASLLKYLPFPVTSMKDIQGLPCIGDQVRDVIEEIIEEGESSRVKEVLNDERYKAFKQFTSVFGVGVKTSEKWFRMGLRTVEEAKASKSLKLSKMQKAGFLYYEDLASCVSKAEADAVTLIVKNTVRTFLPDALVTITGGFRRGKPMGHDIDFLITNPGPKEDDELLHKVVDLLKKQGLLLYCDIKESTFVEEQLPSRKIDAMDNFQKCFAILKLYQPGVDNSSYNTSKKSDMAEVKDWKAIRVDLVITPFEQYAYALLGWTGSKEFGRDLRRYAEEERKMILDNHGLYDRKKRIFLKAGSEEEIFAHLGLDYVEPWERNA

SEQ ID NO: 1479 - DNA, 1182 bp, synthetic construct
  misc_feature 1..1182: note = Variant of terminal deoxynucleotidyl transferase
  source 1..1182: mol_type = other DNA
atgcaccatcatcatcatcatggcggtagcggccatccgccgagcaataccccggagggggaggtgccgagcgttatcgcccgcaaggttagtcagtacagctgccagcgcaagaccacgctgaataactacaacaaaaagtttaccgacgcgctggagatcatggccgagaactacaaatttaaagagaacctgatcgcgtgtctggaatttaagcgcgccgcgagtctgctgaaatatctgccgttcccggttaccagcatgaaagacatccaaggtctgccgtgcattggcgaccaagttcgtgacgtgatcgaggagatcatcgaagagggcgagagcagccgtgttaaagaagttctcaatgacgagcgctacaaggcctttaagcagttcaccagcgtgttcggtgtgggcgtgaaaaccagcgaaaagtggtttcgtatgggcctccgtacggttgaagaggcaaaggccagtaagagtctgaagctgagcaagatgcagaaggcgggcttcctgtattacgaggatctggcgagctgcgttagtaaagcggaagccgatgtggttacgctcatcgtgaagaacacggtgcgtacctttctgccggatgcgctggtgaccatcaccggcggtttccgccgtggcaaacctatgggccacgacatcgactttctgatcacgaatccgggcccgaaagaggatgacgagctgctccacaaagtggttgatctgctcaagaagcaaggtctgctgctgtactgcgacatcaaagagagcacgttcgtggaggaacaactgccaagtcgcaaaatcgacgccatggacaacttccagaagtgcttcgccattctcaagctgtaccagccgggcgtggataacagcagctataacacgagtaagaagagtgacatggccgaggttaaggattggaaagcgattcgtgtggatctggtgatcacgccattcgagcagtacgcctatgcgctgctcggttggacgggcagcaaagaatttggtcgcgatctgcgccgctatgcggaggaagagcgcaagatgatcctcgacaaccatggcctctacgaccgcaaaaagcgcatctttctgaaagcgggcagcgaagaagagattttcgcgcatctgggtctggattatgtggagccgtgggaacgcaacgcg

SEQ ID NO: 1480 - protein, 394 aa, synthetic construct
  REGION 1..394: note = Variant of terminal deoxynucleotidyl transferase
MHHHHHHGGSGHPPSNTPEGEVPSVIARKVSQYSCQRKTTLNNYNKKFTDALEIMAENYKFKENLIACLEFKRAASLLKYLPFPVTSMKDIQGLPCIGDQVRDVIEEIIEEGESSRVKEVLNDERYKAFKQFTSVFGVGVKTSEKWFRMGLRTVEEAKASKSLKLSKMQKAGFLYYEDLASCVSKAEADVVTLIVKNTVRTFLPDALVTITGGFRRGKPMGHDIDFLITNPGPKEDDELLHKVVDLLKKQGLLLYCDIKESTFVEEQLPSRKIDAMDNFQKCFAILKLYQPGVDNSSYNTSKKSDMAEVKDWKAIRVDLVITPFEQYAYALLGWTGSKEFGRDLRRYAEEERKMILDNHGLYDRKKRIFLKAGSEEEIFAHLGLDYVEPWERNA

SEQ ID NO: 1481 - DNA, 1182 bp, synthetic construct
  misc_feature 1..1182: note = Variant of terminal deoxynucleotidyl transferase
  source 1..1182: mol_type = other DNA
atgcaccatcatcatcatcatggcggtagcggccatccgccggagaataccccggagggggaggtgccgagcgttatcgcccgcaaggttagtcagtacagctgccagcgcaagaccacgctgaataactacaacaaaaagtttaccgacgcgctggagatcatggccgagaactacaaatttaaagagaacctgatcgcgtgtctggaatttaagcgcgccgcgagtctgctgaaatatctgccgttcccggttaccagcatgaaagacatccaaggtctgccgtgcattggcgaccaagttcgtgacgtgatcgaggagatcatcgaagagggcgagagcagccgtgttaaagaagttctcaatgacgagcgctacaaggcctttaagcagttcaccagcgtgttcggtgtgggcgtgaaaaccagcgaaaagtggtttcgtatgggcctccgtacggttgaagaggcaaaggccagtaagagtctgaagctgagcaagatgcagaaggcgggcttcctgtattacgaggatctggcgagctgcgttagtaaagcggaagccgatgccgttacgctcatcgtgaagaacacggtgcgtacctttctgccggatgcgctggtgaccatcaccggcggtttccgccgtggcaaacctatgggccacgacatcgactttctgatcacgaatccgggcccgaaagaggatgacgagctgctccacaaagtggttgatctgctcaagaagcaaggtctgctgctgtactgcgacatcaaagagagcacgttcgtggaggaacaactgccaagtcgcaaaatcgacgccatggacaacttccagaagtgcttcgccattctcaagctgtaccagccgggcgtggataacagcagctataacacgagtaagaagagtgacatggccgaggttaaggattggaaagcgattcgtgtggatctggtgatcacgccattcgagcagtacgcctatgcgctgctcggttggacgggcagcaaagaatttggtcgcgatctgcgccgctatgcggaggaagagcgcaagatgatcctcgacaaccatggcctctacgaccgcaaaaagcgcatctttctgaaagcgggcagcgaagaagagattttcgcgcatctgggtctggattatgtggagccgtgggaacgcaacgcg

SEQ ID NO: 1482 - protein, 394 aa, synthetic construct
  REGION 1..394: note = Variant of terminal deoxynucleotidyl transferase
MHHHHHHGGSGHPPENTPEGEVPSVIARKVSQYSCQRKTTLNNYNKKFTDALEIMAENYKFKENLIACLEFKRAASLLKYLPFPVTSMKDIQGLPCIGDQVRDVIEEIIEEGESSRVKEVLNDERYKAFKQFTSVFGVGVKTSEKWFRMGLRTVEEAKASKSLKLSKMQKAGFLYYEDLASCVSKAEADAVTLIVKNTVRTFLPDALVTITGGFRRGKPMGHDIDFLITNPGPKEDDELLHKVVDLLKKQGLLLYCDIKESTFVEEQLPSRKIDAMDNFQKCFAILKLYQPGVDNSSYNTSKKSDMAEVKDWKAIRVDLVITPFEQYAYALLGWTGSKEFGRDLRRYAEEERKMILDNHGLYDRKKRIFLKAGSEEEIFAHLGLDYVEPWERNA

SEQ ID NO: 1483 - DNA, 1182 bp, synthetic construct
  misc_feature 1..1182: note = Variant of terminal deoxynucleotidyl transferase
  source 1..1182: mol_type = other DNA
atgcaccatcatcatcatcatggcggtagcggccatccgccgagcaataccccggagggggaggtgccgagcgttatcgcccgcaaggttagtcagtacagctgccagcgcaagaccacgctgaataactacaacaaaaagtttaccgacgcgctggagatcatggccgagaactacaaatttaaagagaacctgatcgcgtgtctggaatttaagcgcgccgcgagtctgctgaaatatctgccgttcccggttaccagcatgaaagacatccaaggtctgccgtgcattggcgaccaagttcgtgacgtgatcgaggagatcatcgaagagggcgagagcagcttggttaaagaagttctcaatgacgagcgctacaaggcctttaagcagttcaccagcgtgttcggtgtgggcgtgaaaaccagcgaaaagtggtttcgtatgggcctccgtacggttgaagaggcaaaggccagtaagagtctgaagctgagcaagatgcagaaggcgggcttcctgtattacgaggatctggcgagctgcgttagtaaagcggaagccgatgccgttacgctcatcgtgaagaacacggtgcgtacctttctgccggatgcgctggtgaccatcaccggcggtttccgccgtggcaaacctatgggccacgacatcgactttctgatcacgaatccgggcccgaaagaggatgacgagctgctccacaaagtggttgatctgctcaagaagcaaggtctgctgctgtactgcgacatcaaagagagcacgttcgtggaggaacaactgccaagtcgcaaaatcgacgccatggacaacttccagaagtgcttcgccattctcaagctgtaccagccgggcgtggataacagcagctataacacgagtaagaagagtgacatggccgaggttaaggattggaaagcgattcgtgtggatctggtgatcacgccattcgagcagtacgcctatgcgctgctcggttggacgggcagcaaagaatttggtcgcgatctgcgccgctatgcggaggaagagcgcaagatgatcctcgacaaccatggcctctacgaccgcaaaaagcgcatctttctgaaagcgggcagcgaagaagagattttcgcgcatctgggtctggattatgtggagccgtgggaacgcaacgcg

SEQ ID NO: 1484 - protein, 394 aa, synthetic construct
  REGION 1..394: note = Variant of terminal deoxynucleotidyl transferase
MHHHHHHGGSGHPPSNTPEGEVPSVIARKVSQYSCQRKTTLNNYNKKFTDALEIMAENYKFKENLIACLEFKRAASLLKYLPFPVTSMKDIQGLPCIGDQVRDVIEEIIEEGESSLVKEVLNDERYKAFKQFTSVFGVGVKTSEKWFRMGLRTVEEAKASKSLKLSKMQKAGFLYYEDLASCVSKAEADAVTLIVKNTVRTFLPDALVTITGGFRRGKPMGHDIDFLITNPGPKEDDELLHKVVDLLKKQGLLLYCDIKESTFVEEQLPSRKIDAMDNFQKCFAILKLYQPGVDNSSYNTSKKSDMAEVKDWKAIRVDLVITPFEQYAYALLGWTGSKEFGRDLRRYAEEERKMILDNHGLYDRKKRIFLKAGSEEEIFAHLGLDYVEPWERNA

SEQ ID NO: 1485 - DNA, 1182 bp, synthetic construct
  misc_feature 1..1182: note = Variant of terminal deoxynucleotidyl transferase
  source 1..1182: mol_type = other DNA
atgcaccatcatcatcatcatggcggtagcggccatccgccgagcaataccccggagggggaggtgccgagcgttatcgcccgcaaggttagtcagtacagctgccagcgcaagaccacgctgaataactacaacaaaaagtttaccgacgcgctggagatcatggccgagaactacaaatttaaagagaacctgatcgcgtgtctggaatttaagcgcgccgcgagtctgctgaaatatctgccgttcccggttaccagcatgaaagacatccaaggtctgccgtgcattggcgaccaagttcgtgacgtgatcgaggagatcatcgaagagggcgagagcagccgtgttaaagaagttctcaatgacgagaagtacaaggcctttaagcagttcaccagcgtgttcggtgtgggcgtgaaaaccagcgaaaagtggtttcgtatgggcctccgtacggttgaagaggcaaaggccagtaagagtctgaagctgagcaagatgcagaaggcgggcttcctgtattacgaggatctggcgagctgcgttagtaaagcggaagccgatgccgttacgctcatcgtgaagaacacggtgcgtacctttctgccggatgcgctggtgaccatcaccggcggtttccgccgtggcaaacctatgggccacgacatcgactttctgatcacgaatccgggcccgaaagaggatgacgagctgctccacaaagtggttgatctgctcaagaagcaaggtctgctgctgtactgcgacatcaaagagagcacgttcgtggaggaacaactgccaagtcgcaaaatcgacgccatggacaacttccagaagtgcttcgccattctcaagctgtaccagccgggcgtggataacagcagctataacacgagtaagaagagtgacatggccgaggttaaggattggaaagcgattcgtgtggatctggtgatcacgccattcgagcagtacgcctatgcgctgctcggttggacgggcagcaaagaatttggtcgcgatctgcgccgctatgcggaggaagagcgcaagatgatcctcgacaaccatggcctctacgaccgcaaaaagcgcatctttctgaaagcgggcagcgaagaagagattttcgcgcatctgggtctggattatgtggagccgtgggaacgcaacgcg

SEQ ID NO: 1486 - protein, 394 aa, synthetic construct
  REGION 1..394: note = Variant of terminal deoxynucleotidyl transferase
MHHHHHHGGSGHPPSNTPEGEVPSVIARKVSQYSCQRKTTLNNYNKKFTDALEIMAENYKFKENLIACLEFKRAASLLKYLPFPVTSMKDIQGLPCIGDQVRDVIEEIIEEGESSRVKEVLNDEKYKAFKQFTSVFGVGVKTSEKWFRMGLRTVEEAKASKSLKLSKMQKAGFLYYEDLASCVSKAEADAVTLIVKNTVRTFLPDALVTITGGFRRGKPMGHDIDFLITNPGPKEDDELLHKVVDLLKKQGLLLYCDIKESTFVEEQLPSRKIDAMDNFQKCFAILKLYQPGVDNSSYNTSKKSDMAEVKDWKAIRVDLVITPFEQYAYALLGWTGSKEFGRDLRRYAEEERKMILDNHGLYDRKKRIFLKAGSEEEIFAHLGLDYVEPWERNA

SEQ ID NO: 1487 - DNA, 1182 bp, synthetic construct
  misc_feature 1..1182: note = Variant of terminal deoxynucleotidyl transferase
  source 1..1182: mol_type = other DNA
atgcaccatcatcatcatcatggcggtagcggccatccgccgagcaataccccggagggggaggtgccgagcgttatcgcccgcaaggttagtcagtacagctgccagcgcaagaccacgctgaataactacaacaaaaagtttaccgacgcgctggagatcatggccgagaactacaaatttaaagagaacctgatcgcgtgtctggaatttaagcgcgccgcgagtctgctgaaatatctgccgttcccggttaccagcatgaaagacatccaaggtctgccgtgcattggcgaccaagttcgtgacgtgatcgaggagatcatcgaagagggcgagagcagccgtgttaaagaagttctcaatgacgagcgctacaaggcctttaagcagttcaccagcgtgttcggtgtgggcgtgaaaaccagcgaaaagtggtttcgtatgggcctccgtacggttgaagaggcaaaggccagtaagagtctgaagctgagcaagatgcagaaggcgggcttcctgtattacgaggatctggcgagctgcgttagtaaagcggaagccgatgccgttacgctcatcgtgaagaacacggtgcgtacctttctgccggatgcgctggtgaccatcaccggcggtttccgccgtggcaaacctatgggccacgacatcgactttctgatcacgaatccgggcccgaaagaggatgacgagctgctccacaaagtggttgatctgctcaagaagcaaggtctgctgctgtactgcgacatcaaagagagcacgttcgtggaggaacaactgccaagtcgcaaaatcgacgccatggacaacttccagaagtgcttcgccattctcaagctgtaccagccgggcgtggataacagcagctataacacgagtaagaagagtgacatggccgaggttaaggattggaaagcgattcgtgtggatctggtgatcacgccattcgagcagtacgcctatgcgctgctcggttggacgggcagcaaagaatttggtcgcgatctgcgccgctatgcggaggaagagcgcaagatgatcctcgacaaccatggcctctacgacctgaaaaagcgcatctttctgaaagcgggcagcgaagaagagattttcgcgcatctgggtctggattatgtggagccgtgggaacgcaacgcg

SEQ ID NO: 1488 - protein, 394 aa, synthetic construct
  REGION 1..394: note = Variant of terminal deoxynucleotidyl transferase
MHHHHHHGGSGHPPSNTPEGEVPSVIARKVSQYSCQRKTTLNNYNKKFTDALEIMAENYKFKENLIACLEFKRAASLLKYLPFPVTSMKDIQGLPCIGDQVRDVIEEIIEEGESSRVKEVLNDERYKAFKQFTSVFGVGVKTSEKWFRMGLRTVEEAKASKSLKLSKMQKAGFLYYEDLASCVSKAEADAVTLIVKNTVRTFLPDALVTITGGFRRGKPMGHDIDFLITNPGPKEDDELLHKVVDLLKKQGLLLYCDIKESTFVEEQLPSRKIDAMDNFQKCFAILKLYQPGVDNSSYNTSKKSDMAEVKDWKAIRVDLVITPFEQYAYALLGWTGSKEFGRDLRRYAEEERKMILDNHGLYDLKKRIFLKAGSEEEIFAHLGLDYVEPWERNA

SEQ ID NO: 1489 - DNA, 1182 bp, synthetic construct
  misc_feature 1..1182: note = Variant of terminal deoxynucleotidyl transferase
  source 1..1182: mol_type = other DNA
atgcaccatcatcatcatcatggcgagagcggccatccgccgagcaataccccggagggggaggtgccgagcgttatcgcccgcaaggttagtcagtacagctgccagcgcaagaccacgctgaataactacaacaaaaagtttaccgacgcgctggagatcatggccgagaactacaaatttaaagagaacctgatcgcgtgtctggaatttaagcgcgccgcgagtctgctgaaatatctgccgttcccggttaccagcatgaaagacatccaaggtctgccgtgcattggcgaccaagttcgtgacgtgatcgaggagatcatcgaagagggcgagagcagccgtgttaaagaagttctcaatgacgagcgctacaaggcctttaagcagttcaccagcgtgttcggtgtgggcgtgaaaaccagcgaaaagtggtttcgtatgggcctccgtacggttgaagaggcaaaggccagtaagagtctgaagctgagcaagatgcagaaggcgggcttcctgtattacgaggatctggcgagctgcgttagtaaagcggaagccgatgccgttacgctcatcgtgaagaacacggtgcgtacctttctgccggatgcgctggtgaccatcaccggcggtttccgccgtggcaaacctatgggccacgacatcgactttctgatcacgaatccgggcccgaaagaggatgacgagctgctccacaaagtggttgatctgctcaagaagcaaggtctgctgctgtactgcgacatcaaagagagcacgttcgtggaggaacaactgccaagtcgcaaaatcgacgccatggacaacttccagaagtgcttcgccattctcaagctgtaccagccgggcgtggataacagcagctataacacgagtaagaagagtgacatggccgaggttaaggattggaaagcgattcgtgtggatctggtgatcacgccattcgagcagtacgcctatgcgctgctcggttggacgggcagcaaagaatttggtcgcgatctgcgccgctatgcggaggaagagcgcaagatgatcctcgacaaccatggcctctacgaccgcaaaaagcgcatctttctgaaagcgggcagcgaagaagagattttcgcgcatctgggtctggattatgtggagccgtgggaacgcaacgcg

SEQ ID NO: 1490 - protein, 394 aa, synthetic construct
  REGION 1..394: note = Variant of terminal deoxynucleotidyl transferase
MHHHHHHGESGHPPSNTPEGEVPSVIARKVSQYSCQRKTTLNNYNKKFTDALEIMAENYKFKENLIACLEFKRAASLLKYLPFPVTSMKDIQGLPCIGDQVRDVIEEIIEEGESSRVKEVLNDERYKAFKQFTSVFGVGVKTSEKWFRMGLRTVEEAKASKSLKLSKMQKAGFLYYEDLASCVSKAEADAVTLIVKNTVRTFLPDALVTITGGFRRGKPMGHDIDFLITNPGPKEDDELLHKVVDLLKKQGLLLYCDIKESTFVEEQLPSRKIDAMDNFQKCFAILKLYQPGVDNSSYNTSKKSDMAEVKDWKAIRVDLVITPFEQYAYALLGWTGSKEFGRDLRRYAEEERKMILDNHGLYDRKKRIFLKAGSEEEIFAHLGLDYVEPWERNA

SEQ ID NO: 1491 - DNA, 1182 bp, synthetic construct
  misc_feature 1..1182: note = Variant of terminal deoxynucleotidyl transferase
  source 1..1182: mol_type = other DNA
atgcaccatcatcatcatcatggcggtagcggccatccgattagcaataccccggagggggaggtgccgagcgttatcgcccgcaaggttagtcagtacagctgccagcgcaagaccacgctgaataactacaacaaaaagtttaccgacgcgctggagatcatggccgagaactacaaatttaaagagaacctgatcgcgtgtctggaatttaagcgcgccgcgagtctgctgaaatatctgccgttcccggttaccagcatgaaagacatccaaggtctgccgtgcattggcgaccaagttcgtgacgtgatcgaggagatcatcgaagagggcgagagcagccgtgttaaagaagttctcaatgacgagcgctacaaggcctttaagcagttcaccagcgtgttcggtgtgggcgtgaaaaccagcgaaaagtggtttcgtatgggcctccgtacggttgaagaggcaaaggccagtaagagtctgaagctgagcaagatgcagaaggcgggcttcctgtattacgaggatctggcgagctgcgttagtaaagcggaagccgatgccgttacgctcatcgtgaagaacacggtgcgtacctttctgccggatgcgctggtgaccatcaccggcggtttccgccgtggcaaacctatgggccacgacatcgactttctgatcacgaatccgggcccgaaagaggatgacgagctgctccacaaagtggttgatctgctcaagaagcaaggtctgctgctgtactgcgacatcaaagagagcacgttcgtggaggaacaactgccaagtcgcaaaatcgacgccatggacaacttccagaagtgcttcgccattctcaagctgtaccagccgggcgtggataacagcagctataacacgagtaagaagagtgacatggccgaggttaaggattggaaagcgattcgtgtggatctggtgatcacgccattcgagcagtacgcctatgcgctgctcggttggacgggcagcaaagaatttggtcgcgatctgcgccgctatgcggaggaagagcgcaagatgatcctcgacaaccatggcctctacgaccgcaaaaagcgcatctttctgaaagcgggcagcgaagaagagattttcgcgcatctgggtctggattatgtggagccgtgggaacgcaacgcg

SEQ ID NO: 1492 - protein, 394 aa, synthetic construct
  REGION 1..394: note = Variant of terminal deoxynucleotidyl transferase
MHHHHHHGGSGHPISNTPEGEVPSVIARKVSQYSCQRKTTLNNYNKKFTDALEIMAENYKFKENLIACLEFKRAASLLKYLPFPVTSMKDIQGLPCIGDQVRDVIEEIIEEGESSRVKEVLNDERYKAFKQFTSVFGVGVKTSEKWFRMGLRTVEEAKASKSLKLSKMQKAGFLYYEDLASCVSKAEADAVTLIVKNTVRTFLPDALVTITGGFRRGKPMGHDIDFLITNPGPKEDDELLHKVVDLLKKQGLLLYCDIKESTFVEEQLPSRKIDAMDNFQKCFAILKLYQPGVDNSSYNTSKKSDMAEVKDWKAIRVDLVITPFEQYAYALLGWTGSKEFGRDLRRYAEEERKMILDNHGLYDRKKRIFLKAGSEEEIFAHLGLDYVEPWERNA

SEQ ID NO: 1493 - DNA, 1182 bp, synthetic construct
  misc_feature 1..1182: note = Variant of terminal deoxynucleotidyl transferase
  source 1..1182: mol_type = other DNA
atgcaccatcatcatcatcatggcggtagcggccatccgccgagcaataccccggagggggaggtgccgagcgttatcgcccgcaaggttagtcagtacagctgccagcgcaagaccacgctgaataactacaacaaaaagtttaccgacgcgctggagatcatggccgagaactacaaatttaaagagaacctgatcgcgtgtctggaatttaagcgcgccgcgagtctgctgaaatatctgccgttcccggttaccagcatgaaagacatccaaggtctgccgtgcattggcgaccaagttcgtgacgtgatcgaggagatcatcgaagagggcgagagcagccgtgttaaagaagttctcaatgacgagcgctacaaggcctttaagcagttcaccagcgtgttcggtgtgggcgtgaaaaccagcgaaaagtggtttcgtatgggcctccgtacggttgaagaggcaaaggccagtaagagtctgaagctgagcaagatgcagaaggcgggcttcctgtattacgaggatctggcgagctgcgttagtaaagcggaagccgatgccgttacgctcatcgtgaagaacacggtgcgtacctttctgccggatgcgctggtgaccatcaccggcggtttccgccgtggcaaacctatgggccacgacatcgactttctgatcacgaatccgggcccgaaagaggatgacgagctgctccacaaagtggttgatctgctcaagaagcaaggtctgctgctgtactgcgacatcaaagagagcacgttcgtggaggaacaactgccaagtcgcaaaatcgacgccatggacaacttccagaagtgcttcgccattctcaagctgtaccagccgggcgtggataacagcagcgtgaacacgagtaagaagagtgacatggccgaggttaaggattggaaagcgattcgtgtggatctggtgatcacgccattcgagcagtacgcctatgcgctgctcggttggacgggcagcaaagaatttggtcgcgatctgcgccgctatgcggaggaagagcgcaagatgatcctcgacaaccatggcctctacgaccgcaaaaagcgcatctttctgaaagcgggcagcgaagaagagattttcgcgcatctgggtctggattatgtggagccgtgggaacgcaacgcg

SEQ ID NO: 1494 - protein, 394 aa, synthetic construct
  REGION 1..394: note = Variant of terminal deoxynucleotidyl transferase
MHHHHHHGGSGHPPSNTPEGEVPSVIARKVSQYSCQRKTTLNNYNKKFTDALEIMAENYKFKENLIACLEFKRAASLLKYLPFPVTSMKDIQGLPCIGDQVRDVIEEIIEEGESSRVKEVLNDERYKAFKQFTSVFGVGVKTSEKWFRMGLRTVEEAKASKSLKLSKMQKAGFLYYEDLASCVSKAEADAVTLIVKNTVRTFLPDALVTITGGFRRGKPMGHDIDFLITNPGPKEDDELLHKVVDLLKKQGLLLYCDIKESTFVEEQLPSRKIDAMDNFQKCFAILKLYQPGVDNSSVNTSKKSDMAEVKDWKAIRVDLVITPFEQYAYALLGWTGSKEFGRDLRRYAEEERKMILDNHGLYDRKKRIFLKAGSEEEIFAHLGLDYVEPWERNA

SEQ ID NO: 1495 - DNA, 1182 bp, synthetic construct
  misc_feature 1..1182: note = Variant of terminal deoxynucleotidyl transferase
  source 1..1182: mol_type = other DNA
atgcaccatcatcatcatcatggcggtagcggccatccgccgagcaataccccggagggggaggtgccgagcgttatcgcctcgaaggttagtcagtacagctgccagcgcaagaccacgctgaataactacaacaaaaagtttaccgacgcgctggagatcatggccgagaactacaaatttaaagagaacctgatcgcgtgtctggaatttaagcgcgccgcgagtctgctgaaatatctgccgttcccggttaccagcatgaaagacatccaaggtctgccgtgcattggcgaccaagttcgtgacgtgatcgaggagatcatcgaagagggcgagagcagccgtgttaaagaagttctcaatgacgagcgctacaaggcctttaagcagttcaccagcgtgttcggtgtgggcgtgaaaaccagcgaaaagtggtttcgtatgggcctccgtacggttgaagaggcaaaggccagtaagagtctgaagctgagcaagatgcagaaggcgggcttcctgtattacgaggatctggcgagctgcgttagtaaagcggaagccgatgccgttacgctcatcgtgaagaacacggtgcgtacctttctgccggatgcgctggtgaccatcaccggcggtttccgccgtggcaaacctatgggccacgacatcgactttctgatcacgaatccgggcccgaaagaggatgacgagctgctccacaaagtggttgatctgctcaagaagcaaggtctgctgctgtactgcgacatcaaagagagcacgttcgtggaggaacaactgccaagtcgcaaaatcgacgccatggacaacttccagaagtgcttcgccattctcaagctgtaccagccgggcgtggataacagcagctataacacgagtaagaagagtgacatggccgaggttaaggattggaaagcgattcgtgtggatctggtgatcacgccattcgagcagtacgcctatgcgctgctcggttggacgggcagcaaagaatttggtcgcgatctgcgccgctatgcggaggaagagcgcaagatgatcctcgacaaccatggcctctacgaccgcaaaaagcgcatctttctgaaagcgggcagcgaagaagagattttcgcgcatctgggtctggattatgtggagccgtgggaacgcaacgcg

SEQ ID NO: 1496 - protein, 394 aa, synthetic construct
  REGION 1..394: note = Variant of terminal deoxynucleotidyl transferase
MHHHHHHGGSGHPPSNTPEGEVPSVIASKVSQYSCQRKTTLNNYNKKFTDALEIMAENYKFKENLIACLEFKRAASLLKYLPFPVTSMKDIQGLPCIGDQVRDVIEEIIEEGESSRVKEVLNDERYKAFKQFTSVFGVGVKTSEKWFRMGLRTVEEAKASKSLKLSKMQKAGFLYYEDLASCVSKAEADAVTLIVKNTVRTFLPDALVTITGGFRRGKPMGHDIDFLITNPGPKEDDELLHKVVDLLKKQGLLLYCDIKESTFVEEQLPSRKIDAMDNFQKCFAILKLYQPGVDNSSYNTSKKSDMAEVKDWKAIRVDLVITPFEQYAYALLGWTGSKEFGRDLRRYAEEERKMILDNHGLYDRKKRIFLKAGSEEEIFAHLGLDYVEPWERNA

SEQ ID NO: 1497 - DNA, 1182 bp, synthetic construct
  misc_feature 1..1182: note = Variant of terminal deoxynucleotidyl transferase
  source 1..1182: mol_type = other DNA
atgcaccatcatcatcatcatggcggtagcggccatccgccgagcaataccccggagggggaggtgccgagcgttatcgcccgcaaggttagtcagtacagctgccagcgcaagaccacgctgaataactacaacaaaaagtttaccgacgcgctggagatcatggccgagaactacaaatttaaagagaacctgatcgcgtgtctggaatttaagcgcgccgcgagtctgctgaaatatctgccgttcccggttcagagcatgaaagacatccaaggtctgccgtgcattggcgaccaagttcgtgacgtgatcgaggagatcatcgaagagggcgagagcagccgtgttaaagaagttctcaatgacgagcgctacaaggcctttaagcagttcaccagcgtgttcggtgtgggcgtgaaaaccagcgaaaagtggtttcgtatgggcctccgtacggttgaagaggcaaaggccagtaagagtctgaagctgagcaagatgcagaaggcgggcttcctgtattacgaggatctggcgagctgcgttagtaaagcggaagccgatgccgttacgctcatcgtgaagaacacggtgcgtacctttctgccggatgcgctggtgaccatcaccggcggtttccgccgtggcaaacctatgggccacgacatcgactttctgatcacgaatccgggcccgaaagaggatgacgagctgctccacaaagtggttgatctgctcaagaagcaaggtctgctgctgtactgcgacatcaaagagagcacgttcgtggaggaacaactgccaagtcgcaaaatcgacgccatggacaacttccagaagtgcttcgccattctcaagctgtaccagccgggcgtggataacagcagctataacacgagtaagaagagtgacatggccgaggttaaggattggaaagcgattcgtgtggatctggtgatcacgccattcgagcagtacgcctatgcgctgctcggttggacgggcagcaaagaatttggtcgcgatctgcgccgctatgcggaggaagagcgcaagatgatcctcgacaaccatggcctctacgaccgcaaaaagcgcatctttctgaaagcgggcagcgaagaagagattttcgcgcatctgggtctggattatgtggagccgtgggaacgcaacgcg

SEQ ID NO: 1498 - protein, 394 aa, synthetic construct
  REGION 1..394: note = Variant of terminal deoxynucleotidyl transferase
MHHHHHHGGSGHPPSNTPEGEVPSVIARKVSQYSCQRKTTLNNYNKKFTDALEIMAENYKFKENLIACLEFKRAASLLKYLPFPVQSMKDIQGLPCIGDQVRDVIEEIIEEGESSRVKEVLNDERYKAFKQFTSVFGVGVKTSEKWFRMGLRTVEEAKASKSLKLSKMQKAGFLYYEDLASCVSKAEADAVTLIVKNTVRTFLPDALVTITGGFRRGKPMGHDIDFLITNPGPKEDDELLHKVVDLLKKQGLLLYCDIKESTFVEEQLPSRKIDAMDNFQKCFAILKLYQPGVDNSSYNTSKKSDMAEVKDWKAIRVDLVITPFEQYAYALLGWTGSKEFGRDLRRYAEEERKMILDNHGLYDRKKRIFLKAGSEEEIFAHLGLDYVEPWERNA

SEQ ID NO: 1499 - DNA, 1182 bp, synthetic construct
  misc_feature 1..1182: note = Variant of terminal deoxynucleotidyl transferase
  source 1..1182: mol_type = other DNA
atgcaccatcatcatcatcatggcggtagcggccatccgccgagcaataccccggagggggaggtgccgagcgttatcgcccgcaaggttagtcagtacagctgccagcgcaagaccacgctgaataactacaacaaaaagtttaccgacgcgctggagatcatggccgagaactacaaatttaaagagaacctgatcgcgtgtctggaatttaagcgcgccgcgagtctgctgaaatatctgccgttcccggttaccagcatgaaagacatccaaggtctgccgtgcattggcgaccaagttcgtgacgtgatcgaggagatcatcgaagagggcgagagcagccgtgttaaagaagttctcaatgacgagcgctacaaggcctttaagcagttcaccagcgtgttcggtgtgggcgtgaaaaccagcgaaaagtggtttcgtatgggcctccgtacggttgaagaggcaaaggccagtaagagtctgaagctgagcaagatgcagaaggcgggcttcctgtattacgaggatctggcgagctgcgttagtaaagcggaagccgatgccgttacgctcatcgtgaagaacacggtgcgtacctttctgccggatgcgctggtgaccatcaccggcggtttccgccgtggcaaacctatgggccacgacatcgactttctgatcacgaatccgggcccgaaagaggatgacgagctgctccacaaagtggttgatctgctcaagaagcaaggtctgctgctgtactgcgacatcaaagagagcacgttcgtggaggaacaactgccaagtcgcaaaatcgacgccatggacaacttccagaagtgcttcgccattctcaagctgtaccagccgggcgtggataacagcagctataacacgagtaagaagagtgacatggccgaggttaaggattggaaagcgattcgtgtggatctggtgatcacgccattcgagcagtacgcctatgcgctgctcggttggacgggcagcaaagaatttactcgcgatctgcgccgctatgcggaggaagagcgcaagatgatcctcgacaaccatggcctctacgaccgcaaaaagcgcatctttctgaaagcgggcagcgaagaagagattttcgcgcatctgggtctggattatgtggagccgtgggaacgcaacgcg

SEQ ID NO: 1500 - protein, 394 aa, synthetic construct
  REGION 1..394: note = Variant of terminal deoxynucleotidyl transferase
MHHHHHHGGSGHPPSNTPEGEVPSVIARKVSQYSCQRKTTLNNYNKKFTDALEIMAENYKFKENLIACLEFKRAASLLKYLPFPVTSMKDIQGLPCIGDQVRDVIEEIIEEGESSRVKEVLNDERYKAFKQFTSVFGVGVKTSEKWFRMGLRTVEEAKASKSLKLSKMQKAGFLYYEDLASCVSKAEADAVTLIVKNTVRTFLPDALVTITGGFRRGKPMGHDIDFLITNPGPKEDDELLHKVVDLLKKQGLLLYCDIKESTFVEEQLPSRKIDAMDNFQKCFAILKLYQPGVDNSSYNTSKKSDMAEVKDWKAIRVDLVITPFEQYAYALLGWTGSKEFTRDLRRYAEEERKMILDNHGLYDRKKRIFLKAGSEEEIFAHLGLDYVEPWERNA

SEQ ID NO: 1501 - DNA, 1182 bp, synthetic construct
  misc_feature 1..1182: note = Variant of terminal deoxynucleotidyl transferase
  source 1..1182: mol_type = other DNA
atgcaccatcatcatcatcatggcggtagcggccatccgccgagcaataccccggagggggaggtgccgagcgttatcgcccgcaaggttagtcagtacagctgccagcgcaagaccacgctgaataactacaacaaaaagtttaccgacgcgctggagatcatggccgagaactacaaatttaaagagaacctgatcgcgtgtctggaatttaagcgcgccgcgagtctgctgaaatatctgccgttcccggttaccagcatgaaagactgtcaaggtctgccgtgcattggcgaccaagttcgtgacgtgatcgaggagatcatcgaagagggcgagagcagccgtgttaaagaagttctcaatgacgagcgctacaaggcctttaagcagttcaccagcgtgttcggtgtgggcgtgaaaaccagcgaaaagtggtttcgtatgggcctccgtacggttgaagaggcaaaggccagtaagagtctgaagctgagcaagatgcagaaggcgggcttcctgtattacgaggatctggcgagctgcgttagtaaagcggaagccgatgccgttacgctcatcgtgaagaacacggtgcgtacctttctgccggatgcgctggtgaccatcaccggcggtttccgccgtggcaaacctatgggccacgacatcgactttctgatcacgaatccgggcccgaaagaggatgacgagctgctccacaaagtggttgatctgctcaagaagcaaggtctgctgctgtactgcgacatcaaagagagcacgttcgtggaggaacaactgccaagtcgcaaaatcgacgccatggacaacttccagaagtgcttcgccattctcaagctgtaccagccgggcgtggataacagcagctataacacgagtaagaagagtgacatggccgaggttaaggattggaaagcgattcgtgtggatctggtgatcacgccattcgagcagtacgcctatgcgctgctcggttggacgggcagcaaagaatttggtcgcgatctgcgccgctatgcggaggaagagcgcaagatgatcctcgacaaccatggcctctacgaccgcaaaaagcgcatctttctgaaagcgggcagcgaagaagagattttcgcgcatctgggtctggattatgtggagccgtgggaacgcaacgcg

SEQ ID NO: 1502 - protein, 394 aa, synthetic construct
  REGION 1..394: note = Variant of terminal deoxynucleotidyl transferase
MHHHHHHGGSGHPPSNTPEGEVPSVIARKVSQYSCQRKTTLNNYNKKFTDALEIMAENYKFKENLIACLEFKRAASLLKYLPFPVTSMKDCQGLPCIGDQVRDVIEEIIEEGESSRVKEVLNDERYKAFKQFTSVFGVGVKTSEKWFRMGLRTVEEAKASKSLKLSKMQKAGFLYYEDLASCVSKAEADAVTLIVKNTVRTFLPDALVTITGGFRRGKPMGHDIDFLITNPGPKEDDELLHKVVDLLKKQGLLLYCDIKESTFVEEQLPSRKIDAMDNFQKCFAILKLYQPGVDNSSYNTSKKSDMAEVKDWKAIRVDLVITPFEQYAYALLGWTGSKEFGRDLRRYAEEERKMILDNHGLYDRKKRIFLKAGSEEEIFAHLGLDYVEPWERNA

SEQ ID NO: 1503 - DNA, 1182 bp, synthetic construct
  misc_feature 1..1182: note = Variant of terminal deoxynucleotidyl transferase
  source 1..1182: mol_type = other DNA
atgcaccatcatcatcatcatggcggtagcggccatccgccgagcaataccccggagggggaggtgccgagcgttatcgcccgcaaggttagtcagtacagctgccagcgcaagaccacgctgaataactacaacaaaaagtttaccgacgcgctggagatcatggccgagaactacaaatttaaagagaacctgatcgcgtgtctggaatttaagcgcgccgcgagtctgctgaaatatctgccgttcccggttaccagcatgaaagacatcgtgggtctgccgtgcattggcgaccaagttcgtgacgtgatcgaggagatcatcgaagagggcgagagcagccgtgttaaagaagttctcaatgacgagcgctacaaggcctttaagcagttcaccagcgtgttcggtgtgggcgtgaaaaccagcgaaaagtggtttcgtatgggcctccgtacggttgaagaggcaaaggccagtaagagtctgaagctgagcaagatgcagaaggcgggcttcctgtattacgaggatctggcgagctgcgttagtaaagcggaagccgatgccgttacgctcatcgtgaagaacacggtgcgtacctttctgccggatgcgctggtgaccatcaccggcggtttccgccgtggcaaacctatgggccacgacatcgactttctgatcacgaatccgggcccgaaagaggatgacgagctgctccacaaagtggttgatctgctcaagaagcaaggtctgctgctgtactgcgacatcaaagagagcacgttcgtggaggaacaactgccaagtcgcaaaatcgacgccatggacaacttccagaagtgcttcgccattctcaagctgtaccagccgggcgtggataacagcagctataacacgagtaagaagagtgacatggccgaggttaaggattggaaagcgattcgtgtggatctggtgatcacgccattcgagcagtacgcctatgcgctgctcggttggacgggcagcaaagaatttggtcgcgatctgcgccgctatgcggaggaagagcgcaagatgatcctcgacaaccatggcctctacgaccgcaaaaagcgcatctttctgaaagcgggcagcgaagaagagattttcgcgcatctgggtctggattatgtggagccgtgggaacgcaacgcg

SEQ ID NO: 1504 - protein, 394 aa, synthetic construct
  REGION 1..394: note = Variant of terminal deoxynucleotidyl transferase
MHHHHHHGGSGHPPSNTPEGEVPSVIARKVSQYSCQRKTTLNNYNKKFTDALEIMAENYKFKENLIACLEFKRAASLLKYLPFPVTSMKDIVGLPCIGDQVRDVIEEIIEEGESSRVKEVLNDERYKAFKQFTSVFGVGVKTSEKWFRMGLRTVEEAKASKSLKLSKMQKAGFLYYEDLASCVSKAEADAVTLIVKNTVRTFLPDALVTITGGFRRGKPMGHDIDFLITNPGPKEDDELLHKVVDLLKKQGLLLYCDIKESTFVEEQLPSRKIDAMDNFQKCFAILKLYQPGVDNSSYNTSKKSDMAEVKDWKAIRVDLVITPFEQYAYALLGWTGSKEFGRDLRRYAEEERKMILDNHGLYDRKKRIFLKAGSEEEIFAHLGLDYVEPWERNA

SEQ ID NO: 1505 - DNA, 1182 bp, synthetic construct
  misc_feature 1..1182: note = Variant of terminal deoxynucleotidyl transferase
  source 1..1182: mol_type = other DNA
atgcaccatcatcatcatcatggcggtagcggccatccgccgagcaataccccggagggggaggtgccgagcgttatcgcccgcaaggttagtcagtacagctgccagcgcaagaccacgctgaataactacaacaaaaagtttaccgacgcgctggagatcatggccgagaactacaaatttaaagagaacctgatcgcgtgtctggaatttaagcgcgccgcgagtctgctgaaatatctgccgttcccggttaccagcatgaaagacgtgcaaggtctgccgtgcattggcgaccaagttcgtgacgtgatcgaggagatcatcgaagagggcgagagcagccgtgttaaagaagttctcaatgacgagcgctacaaggcctttaagcagttcaccagcgtgttcggtgtgggcgtgaaaaccagcgaaaagtggtttcgtatgggcctccgtacggttgaagaggcaaaggccagtaagagtctgaagctgagcaagatgcagaaggcgggcttcctgtattacgaggatctggcgagctgcgttagtaaagcggaagccgatgccgttacgctcatcgtgaagaacacggtgcgtacctttctgccggatgcgctggtgaccatcaccggcggtttccgccgtggcaaacctatgggccacgacatcgactttctgatcacgaatccgggcccgaaagaggatgacgagctgctccacaaagtggttgatctgctcaagaagcaaggtctgctgctgtactgcgacatcaaagagagcacgttcgtggaggaacaactgccaagtcgcaaaatcgacgccatggacaacttccagaagtgcttcgccattctcaagctgtaccagccgggcgtggataacagcagctataacacgagtaagaagagtgacatggccgaggttaaggattggaaagcgattcgtgtggatctggtgatcacgccattcgagcagtacgcctatgcgctgctcggttggacgggcagcaaagaatttggtcgcgatctgcgccgctatgcggaggaagagcgcaagatgatcctcgacaaccatggcctctacgaccgcaaaaagcgcatctttctgaaagcgggcagcgaagaagagattttcgcgcatctgggtctggattatgtggagccgtgggaacgcaacgcg

SEQ ID NO: 1506 - protein, 394 aa, synthetic construct
  REGION 1..394: note = Variant of terminal deoxynucleotidyl transferase
MHHHHHHGGSGHPPSNTPEGEVPSVIARKVSQYSCQRKTTLNNYNKKFTDALEIMAENYKFKENLIACLEFKRAASLLKYLPFPVTSMKDVQGLPCIGDQVRDVIEEIIEEGESSRVKEVLNDERYKAFKQFTSVFGVGVKTSEKWFRMGLRTVEEAKASKSLKLSKMQKAGFLYYEDLASCVSKAEADAVTLIVKNTVRTFLPDALVTITGGFRRGKPMGHDIDFLITNPGPKEDDELLHKVVDLLKKQGLLLYCDIKESTFVEEQLPSRKIDAMDNFQKCFAILKLYQPGVDNSSYNTSKKSDMAEVKDWKAIRVDLVITPFEQYAYALLGWTGSKEFGRDLRRYAEEERKMILDNHGLYDRKKRIFLKAGSEEEIFAHLGLDYVEPWERNA

SEQ ID NO: 1507 - DNA, 1182 bp, synthetic construct
  misc_feature 1..1182: note = Variant of terminal deoxynucleotidyl transferase
  source 1..1182: mol_type = other DNA
atgcaccatcatcatcatcatggcggtagcggccatccgccgagcaataccccggagggggaggtgccgagcgttatcgcccgcaaggttagtcagtacagctgccagcgcaagaccacgctgaataactacaacaaaaagtttaccgacgcgctggagatcatggccgagaactacaaatttaaagagaacctgatcgcgtgtctggaatttaagcgcgccgcgagtctgctgaaatatctgccgttcccggttaccagcatgaaagacatccaaggtctgccgtgcattggcgaccaagttcgtgacgtgatcgaggagatcatcgaagagggcgagagcagccgtgttaaagaagttctcaatgacgagcgctacaaggcctttaagcagttcaccagcgtgttcggtgtgggcgtgaaaaccagcgaaaagtggtttcgtatgggcctccgtacggttgaagaggcaaaggccagtaagagtctgaagctgagcaagatgcagaaggcgggcttcctgtattacgaggatctggcgagctgcgttagtaaagcggaagccgatgccgttacgctcatcgtgaagaacacggtgcgtacctttctgccggatgcgctggtgaccatcaccggcggtttccgccgtggcaaacctatgggccacgacatcgactttctgatcacgaatccgggcccgaaagaggatgacgagctgctccacaaagtggttgatctgctcaagaagcaaggtctgctgctgtactgcgacatcaaagagagcacgttcgtggaggaacaactgccaagtcgcaaaatcgacgccatggacaacttccagaagtgcttcgccattctcaagctgtaccagccgggcgtggataacagcagctataacacgagtaagaagagtgacatggccgaggttaaggattggaaagcgattcgtgtggatctggtgatcacgccattcgagcagtacgcctatgcgctgctcggttggacgggcagcaaagaatttgagcgcgatctgcgccgctatgcggaggaagagcgcaagatgatcctcgacaaccatggcctctacgaccgcaaaaagcgcatctttctgaaagcgggcagcgaagaagagattttcgcgcatctgggtctggattatgtggagccgtgggaacgcaacgcg

SEQ ID NO: 1508 - protein, 394 aa, synthetic construct
  REGION 1..394: note = Variant of terminal deoxynucleotidyl transferase
MHHHHHHGGSGHPPSNTPEGEVPSVIARKVSQYSCQRKTTLNNYNKKFTDALEIMAENYKFKENLIACLEFKRAASLLKYLPFPVTSMKDIQGLPCIGDQVRDVIEEIIEEGESSRVKEVLNDERYKAFKQFTSVFGVGVKTSEKWFRMGLRTVEEAKASKSLKLSKMQKAGFLYYEDLASCVSKAEADAVTLIVKNTVRTFLPDALVTITGGFRRGKPMGHDIDFLITNPGPKEDDELLHKVVDLLKKQGLLLYCDIKESTFVEEQLPSRKIDAMDNFQKCFAILKLYQPGVDNSSYNTSKKSDMAEVKDWKAIRVDLVITPFEQYAYALLGWTGSKEFERDLRRYAEEERKMILDNHGLYDRKKRIFLKAGSEEEIFAHLGLDYVEPWERNA

SEQ ID NO: 1509 - DNA, 1182 bp, synthetic construct
  misc_feature 1..1182: note = Variant of terminal deoxynucleotidyl transferase
  source 1..1182: mol_type = other DNA
atgcaccatcatcatcatcatggcggtagcggccatccgccgagcaataccccggagggggaggtgccgagcgttatcgcccgcaaggttagtcagtacagctgccagcgcaagaccacgctgaataactacaacaaaaagtttaccgacgcgctggagatcatggccgagaactacaaatttaaagagaacctgatcgcgtgtctggaatttaagcgcgccgcgagtctgctgaaatatctgccgttcccggttaccagcatggatgacatccaaggtctgccgtgcattggcgaccaagttcgtgacgtgatcgaggagatcatcgaagagggcgagagcagccgtgttaaagaagttctcaatgacgagcgctacaaggcctttaagcagttcaccagcgtgttcggtgtgggcgtgaaaaccagcgaaaagtggtttcgtatgggcctccgtacggttgaagaggcaaaggccagtaagagtctgaagctgagcaagatgcagaaggcgggcttcctgtattacgaggatctggcgagctgcgttagtaaagcggaagccgatgccgttacgctcatcgtgaagaacacggtgcgtacctttctgccggatgcgctggtgaccatcaccggcggtttccgccgtggcaaacctatgggccacgacatcgactttctgatcacgaatccgggcccgaaagaggatgacgagctgctccacaaagtggttgatctgctcaagaagcaaggtctgctgctgtactgcgacatcaaagagagcacgttcgtggaggaacaactgccaagtcgcaaaatcgacgccatggacaacttccagaagtgcttcgccattctcaagctgtaccagccgggcgtggataacagcagctataacacgagtaagaagagtgacatggccgaggttaaggattggaaagcgattcgtgtggatctggtgatcacgccattcgagcagtacgcctatgcgctgctcggttggacgggcagcaaagaatttggtcgcgatctgcgccgctatgcggaggaagagcgcaagatgatcctcgacaaccatggcctctacgaccgcaaaaagcgcatctttctgaaagcgggcagcgaagaagagattttcgcgcatctgggtctggattatgtggagccgtgggaacgcaacgcg

SEQ ID NO: 1510 - protein, 394 aa, synthetic construct
  REGION 1..394: note = Variant of terminal deoxynucleotidyl transferase
MHHHHHHGGSGHPPSNTPEGEVPSVIARKVSQYSCQRKTTLNNYNKKFTDALEIMAENYKFKENLIACLEFKRAASLLKYLPFPVTSMDDIQGLPCIGDQVRDVIEEIIEEGESSRVKEVLNDERYKAFKQFTSVFGVGVKTSEKWFRMGLRTVEEAKASKSLKLSKMQKAGFLYYEDLASCVSKAEADAVTLIVKNTVRTFLPDALVTITGGFRRGKPMGHDIDFLITNPGPKEDDELLHKVVDLLKKQGLLLYCDIKESTFVEEQLPSRKIDAMDNFQKCFAILKLYQPGVDNSSYNTSKKSDMAEVKDWKAIRVDLVITPFEQYAYALLGWTGSKEFGRDLRRYAEEERKMILDNHGLYDRKKRIFLKAGSEEEIFAHLGLDYVEPWERNA

SEQ ID NO: 1511 - DNA, 1182 bp, synthetic construct
  misc_feature 1..1182: note = Variant of terminal deoxynucleotidyl transferase
  source 1..1182: mol_type = other DNA
atgcaccatcatcatcatcatggcggtagcggccatccgccgagcaataccccggagggggaggtgccgagcgttatcgcccgcaaggttagtcagtacagctgccagcgcaagaccacgctgaataactacaacaaaaagtttaccgacgcgctggagatcatggccgagaactacaaatttaaagagaacctgatcgcgtgtctggaatttaagcgcgccgcgagtctgctgaaatatctgccgttcccggttaccagcatgaaagacatccaaggtctgccgtgcattggcgaccaagttcgtgacgtgatcgaggagatcatcgaagagggcgagagcagccgtgttaaagaagttctcaatgacgagcgctacaaggcctttaagcagttcaccagcgtgttcggtgtgggcgtgaaaaccagcgaaaagtggtttcgtatgggcctccgtacggttgaagaggcaaaggccagtaagagtctgaagctgagcaagatgcagaaggcgggcttcctgtattacgaggatctggcgagctgcgttagtaaagcggaagccgatgccgttacgctcatcgtgaagaacacggtgcgtacctttctgccggatgcgctggtgaccatcaccggcggtttccgccgtggcaaacctatgggccacgacatcgactttctgatcacgaatccgggcccgaaagaggatgacgagctgctccacaaagtggttgatctgctcaagaagcaaggtctgctgctgtactgcgacatcaaagagagcacgttcgtggaggaacaactgccaagtcgcaaaatcgacgccatggacaacttccagaagtgcttcgccattctcaagctgtaccagccgggcgtggataacagcagctataacacgagtaagaaggtggacatggccgaggttaaggattggaaagcgattcgtgtggatctggtgatcacgccattcgagcagtacgcctatgcgctgctcggttggacgggcagcaaagaatttggtcgcgatctgcgccgctatgcggaggaagagcgcaagatgatcctcgacaaccatggcctctacgaccgcaaaaagcgcatctttctgaaagcgggcagcgaagaagagattttcgcgcatctgggtctggattatgtggagccgtgggaacgcaacgcg

SEQ ID NO: 1512 - protein, 394 aa, synthetic construct
  REGION 1..394: note = Variant of terminal deoxynucleotidyl transferase
MHHHHHHGGSGHPPSNTPEGEVPSVIARKVSQYSCQRKTTLNNYNKKFTDALEIMAENYKFKENLIACLEFKRAASLLKYLPFPVTSMKDIQGLPCIGDQVRDVIEEIIEEGESSRVKEVLNDERYKAFKQFTSVFGVGVKTSEKWFRMGLRTVEEAKASKSLKLSKMQKAGFLYYEDLASCVSKAEADAVTLIVKNTVRTFLPDALVTITGGFRRGKPMGHDIDFLITNPGPKEDDELLHKVVDLLKKQGLLLYCDIKESTFVEEQLPSRKIDAMDNFQKCFAILKLYQPGVDNSSYNTSKKVDMAEVKDWKAIRVDLVITPFEQYAYALLGWTGSKEFGRDLRRYAEEERKMILDNHGLYDRKKRIFLKAGSEEEIFAHLGLDYVEPWERNA

SEQ ID NO: 1513 - DNA, 1182 bp, synthetic construct
  misc_feature 1..1182: note = Variant of terminal deoxynucleotidyl transferase
  source 1..1182: mol_type = other DNA
atgcaccatcatcatcatcatggcggtagcggccatccgccgagcaataccccggagggggaggtgccgagcgttatcgcccgcaaggttagtcagtacagctgccagcgcaagaccacgctgaataactacaacaaaaagtttaccgacgcgctggagatcatggccgagaactacaaatttaaagagaacctgatcgcgtgtctggaatttaagcgcgccgcgagtctgctgaaatatctgccgttcccggttaccagcatgaaagacatccaaggtctgccgtgcattggcgaccaagttcgtgacgtgatcgaggagatcatcgaagagggcgagagcagccgtgttaaagaagttctcaatgacgagcgctacaaggcctttaagcagttcaccagcgtgttcggtgtgggcgtgaaaaccagcgaaaagtggtttcgtatgggcctccgtacggttgaagaggcaaaggccagtaagagtctgaagctgagcaagatgcagaaggcgggcttcctgtattacgaggatctggcgagctgcgttagtaaagcggaagccgatgccgttacgctcatcgtgtgtaacacggtgcgtacctttctgccggatgcgctggtgaccatcaccggcggtttccgccgtggcaaacctatgggccacgacatcgactttctgatcacgaatccgggcccgaaagaggatgacgagctgctccacaaagtggttgatctgctcaagaagcaaggtctgctgctgtactgcgacatcaaagagagcacgttcgtggaggaacaactgccaagtcgcaaaatcgacgccatggacaacttccagaagtgcttcgccattctcaagctgtaccagccgggcgtggataacagcagctataacacgagtaagaagagtgacatggccgaggttaaggattggaaagcgattcgtgtggatctggtgatcacgccattcgagcagtacgcctatgcgctgctcggttggacgggcagcaaagaatttggtcgcgatctgcgccgctatgcggaggaagagcgcaagatgatcctcgacaaccatggcctctacgaccgcaaaaagcgcatctttctgaaagcgggcagcgaagaagagattttcgcgcatctgggtctggattatgtggagccgtgggaacgcaacgcg

SEQ ID NO: 1514 - protein, 394 aa, synthetic construct
  REGION 1..394: note = Variant of terminal deoxynucleotidyl transferase
MHHHHHHGGSGHPPSNTPEGEVPSVIARKVSQYSCQRKTTLNNYNKKFTDALEIMAENYKFKENLIACLEFKRAASLLKYLPFPVTSMKDIQGLPCIGDQVRDVIEEIIEEGESSRVKEVLNDERYKAFKQFTSVFGVGVKTSEKWFRMGLRTVEEAKASKSLKLSKMQKAGFLYYEDLASCVSKAEADAVTLIVCNTVRTFLPDALVTITGGFRRGKPMGHDIDFLITNPGPKEDDELLHKVVDLLKKQGLLLYCDIKESTFVEEQLPSRKIDAMDNFQKCFAILKLYQPGVDNSSYNTSKKSDMAEVKDWKAIRVDLVITPFEQYAYALLGWTGSKEFGRDLRRYAEEERKMILDNHGLYDRKKRIFLKAGSEEEIFAHLGLDYVEPWERNA

SEQ ID NO: 1515 - DNA, 1182 bp, synthetic construct
  misc_feature 1..1182: note = Variant of terminal deoxynucleotidyl transferase
  source 1..1182: mol_type = other DNA
atgcaccatcatcatcatcatggcggtagcggccatccgccgagcaataccccggagggggaggtgccgagcgttatcgcccgcaaggttagtcagtacagctgccagcgcaagaccacgctgaataactacaacaaaaagtttaccgacgcgctggagatcatggccgagaactacaaatttaaagagaacctgatcgcgtgtctggaatttaagcgcgccgcgagtctgctgaaatatctgccgttcccggttaccagcatgaaagacatccaaggtctgccgtgcattggcgaccaagttcgtgacgtgatcgaggagatcatcgaagagggcgagagcagccgtgttaaagaagttctcaatgacgagcgctacaaggcctttaagcagttcaccagcgtgttcggtgtgggcgtgaaaaccagcgaaaagtggtttcgtatgggcctccgtacggttgaagaggcaaaggccagtaagagtctgaagctgagcaagatgcagaaggcgggcttcctgtattacgaggatctggcgagctgcgttagtaaagcggaagccgatgccgttacgctcatcgtgaagaacacggtgcgtacctttctgccggatgcgctggtgaccatcaccggcggtttccgccgtggcaaacctatgggccacgacatcgactttctgatcacgaatccgggcccgaaagaggatgacgagctgctccacaaagtggttgatctgctcaagaagcaaggtctgctgctgtactgcgacatcaaagagagcacgttcgtggaggaacaactgccaagtcgcaaaatcgacgccatggacaacttccagaagtgcttcgccattctcaagctgtaccagccgggcgtggataacagcagctataacacgagtaagaagagtgacatggccgaggttaaggattggaaagcgattcgtgtggatctggtgatcacgccattcgagcagtacgcctatgcgctgctcggttggacgggcagcaaagaatttggtcgcgatctgcgccgctatgcggaggaagagcgcaagatgatcctcgacaaccatggcctctacgaccgcggtaagcgcatctttctgaaagcgggcagcgaagaagagattttcgcgcatctgggtctggattatgtggagccgtgggaacgcaacgcg

SEQ ID NO: 1516 - protein, 394 aa, synthetic construct
  REGION 1..394: note = Variant of terminal deoxynucleotidyl transferase
MHHHHHHGGSGHPPSNTPEGEVPSVIARKVSQYSCQRKTTLNNYNKKFTDALEIMAENYKFKENLIACLEFKRAASLLKYLPFPVTSMKDIQGLPCIGDQVRDVIEEIIEEGESSRVKEVLNDERYKAFKQFTSVFGVGVKTSEKWFRMGLRTVEEAKASKSLKLSKMQKAGFLYYEDLASCVSKAEADAVTLIVKNTVRTFLPDALVTITGGFRRGKPMGHDIDFLITNPGPKEDDELLHKVVDLLKKQGLLLYCDIKESTFVEEQLPSRKIDAMDNFQKCFAILKLYQPGVDNSSYNTSKKSDMAEVKDWKAIRVDLVITPFEQYAYALLGWTGSKEFGRDLRRYAEEERKMILDNHGLYDRGKRIFLKAGSEEEIFAHLGLDYVEPWERNA

SEQ ID NO: 1517 - DNA, 1182 bp, synthetic construct
  misc_feature 1..1182: note = Variant of terminal deoxynucleotidyl transferase
  source 1..1182: mol_type = other DNA
atgcaccatcatcatcatcatggcggtagcggccatccgccgagcaataccccggagggggaggtgccgagcgttatcgcccgcaaggttagtcagtacagctgccagcgcaagaccacgctgaataactacaacaaaaagtttaccgacgcgctggagatcatggccgagaactacaaatttaaagagaacctgatcgcgtgtctggaatttaagcgcgccgcgagtctgctgaaatatctgccgttcccggttaccagcatgaaagacatccaaggtctgccgtgcattggcgaccaagttcgtgacgtgatcgaggagatcatcgaagagggcgagagcagccgtgttaaagaagttctcaatgacgagcgctacaaggcctttaagcagttcaccagcgtgttcggtgtgggcgtgaaaaccagcgaaaagtggtttcgtatgggcctccgtacggttgaagaggcaaaggccagtaagagtctgaagctgagcaagatgcagaaggcgggcttcctgtattacgaggatctggcgagctgcgttagtaaagcggaagccgatgccgttacgctcatcgtgaagaacacggtgcgtacctttctgccggatgcgctggtgaccatcaccggcggtttccgccgtggcaaacctatgggccacgacatcgactttctgatcacgaatccgggcccgaaagaggatgacgagctgctccacaaagtggttgatctgctcaagaagcaaggtctgctgctgtactgcgacatcaaagagagcacgttcgtggaggaacaactgccaagtcgcaaaatcgacgccatggacaacttccagaagtgcttcgccattctcaagctgtaccagccgggcgtggataacagcagctataacacgagtaagaagagtgacatggccgatgttaaggattggaaagcgattcgtgtggatctggtgatcacgccattcgagcagtacgcctatgcgctgctcggttggacgggcagcaaagaatttggtcgcgatctgcgccgctatgcggaggaagagcgcaagatgatcctcgacaaccatggcctctacgaccgcaaaaagcgcatctttctgaaagcgggcagcgaagaagagattttcgcgcatctgggtctggattatgtggagccgtgggaacgcaacgcg

SEQ ID NO: 1518 - protein, 394 aa, synthetic construct
  REGION 1..394: note = Variant of terminal deoxynucleotidyl transferase
MHHHHHHGGSGHPPSNTPEGEVPSVIARKVSQYSCQRKTTLNNYNKKFTDALEIMAENYKFKENLIACLEFKRAASLLKYLPFPVTSMKDIQGLPCIGDQVRDVIEEIIEEGESSRVKEVLNDERYKAFKQFTSVFGVGVKTSEKWFRMGLRTVEEAKASKSLKLSKMQKAGFLYYEDLASCVSKAEADAVTLIVKNTVRTFLPDALVTITGGFRRGKPMGHDIDFLITNPGPKEDDELLHKVVDLLKKQGLLLYCDIKESTFVEEQLPSRKIDAMDNFQKCFAILKLYQPGVDNSSYNTSKKSDMADVKDWKAIRVDLVITPFEQYAYALLGWTGSKEFGRDLRRYAEEERKMILDNHGLYDRKKRIFLKAGSEEEIFAHLGLDYVEPWERNA

SEQ ID NO: 1519 - DNA, 1182 bp, synthetic construct
  misc_feature 1..1182: note = Variant of terminal deoxynucleotidyl transferase
  source 1..1182: mol_type = other DNA
atgcaccatcatcatcatcatggcggtagcggccatccgccgagcaataccccggagggggaggtgccgagcgttatcgcccgcaaggttagtcagtacagctgccagcgcaagaccacgctgaataactacaacaaaaagtttaccgacgcgctggagatcatggccgagaactacaaatttaaagagaacctgatcgcgtgtctggaatttaagcgcgccgcgagtctgctgaaatatctgccgttcccggttaccagcatgaaagacatccaaggtctgccgtgcattggcgaccaagttcgtgacgtgatcgaggagatcatcgaagagggcgagagcagccgtgttaaagaagttctcaatgacgagcgctacaaggcctttaagcagttcaccagcgtgttcggtgtgggcgtgaaaaccagcgaaaagtggtttcgtatgggcctccgtacggttgaagaggcaaaggccagtaagagtctgaagctgagcaagatgcagaaggcgggcttcctgtattacgaggatctggcgagctgcgttagtaaagcggaagccgatgccgttacgctcatcgtgaagaacacggtgcgtacctttctgccggatgcgctggtgaccatcaccggcggtttccgccgtggcaaacctatgggccacgacatcgactttctgatcacgaatccgggcccgaaagaggatgacgagctgctccacaaagtggttgatctgctctggaagcaaggtctgctgctgtactgcgacatcaaagagagcacgttcgtggaggaacaactgccaagtcgcaaaatcgacgccatggacaacttccagaagtgcttcgccattctcaagctgtaccagccgggcgtggataacagcagctataacacgagtaagaagagtgacatggccgaggttaaggattggaaagcgattcgtgtggatctggtgatcacgccattcgagcagtacgcctatgcgctgctcggttggacgggcagcaaagaatttggtcgcgatctgcgccgctatgcggaggaagagcgcaagatgatcctcgacaaccatggcctctacgaccgcaaaaagcgcatctttctgaaagcgggcagcgaagaagagattttcgcgcatctgggtctggattatgtggagccgtgggaacgcaacgcg

SEQ ID NO: 1520 - protein, 394 aa, synthetic construct
  REGION 1..394: note = Variant of terminal deoxynucleotidyl transferase
MHHHHHHGGSGHPPSNTPEGEVPSVIARKVSQYSCQRKTTLNNYNKKFTDALEIMAENYKFKENLIACLEFKRAASLLKYLPFPVTSMKDIQGLPCIGDQVRDVIEEIIEEGESSRVKEVLNDERYKAFKQFTSVFGVGVKTSEKWFRMGLRTVEEAKASKSLKLSKMQKAGFLYYEDLASCVSKAEADAVTLIVKNTVRTFLPDALVTITGGFRRGKPMGHDIDFLITNPGPKEDDELLHKVVDLLWKQGLLLYCDIKESTFVEEQLPSRKIDAMDNFQKCFAILKLYQPGVDNSSYNTSKKSDMAEVKDWKAIRVDLVITPFEQYAYALLGWTGSKEFGRDLRRYAEEERKMILDNHGLYDRKKRIFLKAGSEEEIFAHLGLDYVEPWERNA

SEQ ID NO: 1521 - DNA, 1182 bp, synthetic construct
  misc_feature 1..1182: note = Variant of terminal deoxynucleotidyl transferase
  source 1..1182: mol_type = other DNA
atgcaccatcatcatcatcatggcggtagcggccatccgccgagcaataccccggagggggaggtgccgagcgttatcgcccgcaaggttagtcagtacagctgccagcgcaagaccacgctgaataactacaacaaaaagtttaccgacgcgctggagatcatggccgagaactacaaatttaaagagaacctgatcgcgtgtctggaatttaagcgcgccgcgagtctgctgaaatatctgccgttcccggttaccagcatgaaagacatccaaggtctgccgtgcattggcgaccaagttcgtgacgtgatcgaggagatcatcgaagagggcgagagcagccgtgttaaagaagttctcaatgacgagcgctacaaggcctttaagcagttcaccagcgtgttcggtgtgggcgtgaaaaccagcgaaaagtggtttcgtatgggcctccgtacggttgaagaggcaaaggccagtaagagtctgaagctgagcaagatgcagaaggcgggcttcctgtattacgaggatctggcgagctgcgttagtaaagcggaagccgatgccgttacgctcatcgtgaagaacacggtgcgtacctttctgccggatgcgctggtgaccatcaccggcggtttccgccgtggcaaacctatgggccacgacatcgactttctgatcacgaatccgggcccgaaagaggatgacgagctgctccacaaagtggttgatctgctcctgaagcaaggtctgctgctgtactgcgacatcaaagagagcacgttcgtggaggaacaactgccaagtcgcaaaatcgacgccatggacaacttccagaagtgcttcgccattctcaagctgtaccagccgggcgtggataacagcagctataacacgagtaagaagagtgacatggccgaggttaaggattggaaagcgattcgtgtggatctggtgatcacgccattcgagcagtacgcctatgcgctgctcggttggacgggcagcaaagaatttggtcgcgatctgcgccgctatgcggaggaagagcgcaagatgatcctcgacaaccatggcctctacgaccgcaaaaagcgcatctttctgaaagcgggcagcgaagaagagattttcgcgcatctgggtctggattatgtggagccgtgggaacgcaacgcg

SEQ ID NO: 1522 - protein, 394 aa, synthetic construct
  REGION 1..394: note = Variant of terminal deoxynucleotidyl transferase
MHHHHHHGGSGHPPSNTPEGEVPSVIARKVSQYSCQRKTTLNNYNKKFTDALEIMAENYKFKENLIACLEFKRAASLLKYLPFPVTSMKDIQGLPCIGDQVRDVIEEIIEEGESSRVKEVLNDERYKAFKQFTSVFGVGVKTSEKWFRMGLRTVEEAKASKSLKLSKMQKAGFLYYEDLASCVSKAEADAVTLIVKNTVRTFLPDALVTITGGFRRGKPMGHDIDFLITNPGPKEDDELLHKVVDLLLKQGLLLYCDIKESTFVEEQLPSRKIDAMDNFQKCFAILKLYQPGVDNSSYNTSKKSDMAEVKDWKAIRVDLVITPFEQYAYALLGWTGSKEFGRDLRRYAEEERKMILDNHGLYDRKKRIFLKAGSEEEIFAHLGLDYVEPWERNA

SEQ ID NO: 1523 - DNA, 1182 bp, synthetic construct
  misc_feature 1..1182: note = Variant of terminal deoxynucleotidyl transferase
  source 1..1182: mol_type = other DNA
atgcaccatcatcatcatcatggcggtagcggccatccgccgagcaataccccggagggggaggtgccgagcgttatcgcccgcaaggttagtcagtacagctgccagcgcaagaccacgctgaataactacaacaaaaagtttaccgacgcgctggagatcatggccgagaactacaaatttaaagagaacctgatcgcgtgtctggaatttaagcgcgccgcgagtctgctgaaatatctgccgttcccggttaccagcatgaaagacatccaaggtctgccgtgcattggcgaccaagttcgtgacgtgatcgaggagatcatcgaagagggcgagagcagccgtgttaaagaagttctcaatgacgagcgctacaaggcctttaagcagttcaccagcgtgttcggtgtgggcgtgaaaaccagcgaaaagtggtttcgtatgggcctccgtacggttgaagaggcaaaggccagtaagagtctgaagctgagcaagatgcagaaggcgggcttcctgtattacgaggatctggcgagctgcgttagtaaagcggaagccgatgccgttacgctcatcgtgaagaacacggtgcgtacctttctgccggatgcgctggtgaccatcaccggcggtttccgccgtggcaaacctatgggccacgacatcgactttctgatcacgaatccgggcccgaaagaggatgacgagctgctccacaaagtggttgatctgctcaagaagcaaggtctgctgctgtactgcgacatcaaagagagcacgttcgtggagcagcaactgccaagtcgcaaaatcgacgccatggacaacttccagaagtgcttcgccattctcaagctgtaccagccgggcgtggataacagcagctataacacgagtaagaagagtgacatggccgaggttaaggattggaaagcgattcgtgtggatctggtgatcacgccattcgagcagtacgcctatgcgctgctcggttggacgggcagcaaagaatttggtcgcgatctgcgccgctatgcggaggaagagcgcaagatgatcctcgacaaccatggcctctacgaccgcaaaaagcgcatctttctgaaagcgggcagcgaagaagagattttcgcgcatctgggtctggattatgtggagccgtgggaacgcaacgcg

SEQ ID NO: 1524 - protein, 394 aa, synthetic construct
  REGION 1..394: note = Variant of terminal deoxynucleotidyl transferase
MHHHHHHGGSGHPPSNTPEGEVPSVIARKVSQYSCQRKTTLNNYNKKFTDALEIMAENYKFKENLIACLEFKRAASLLKYLPFPVTSMKDIQGLPCIGDQVRDVIEEIIEEGESSRVKEVLNDERYKAFKQFTSVFGVGVKTSEKWFRMGLRTVEEAKASKSLKLSKMQKAGFLYYEDLASCVSKAEADAVTLIVKNTVRTFLPDALVTITGGFRRGKPMGHDIDFLITNPGPKEDDELLHKVVDLLKKQGLLLYCDIKESTFVEQQLPSRKIDAMDNFQKCFAILKLYQPGVDNSSYNTSKKSDMAEVKDWKAIRVDLVITPFEQYAYALLGWTGSKEFGRDLRRYAEEERKMILDNHGLYDRKKRIFLKAGSEEEIFAHLGLDYVEPWERNA

SEQ ID NO: 1525 - DNA, 1182 bp, synthetic construct
  misc_feature 1..1182: note = Variant of terminal deoxynucleotidyl transferase
  source 1..1182: mol_type = other DNA
atgcaccatcatcatcatcatggcggtagcggccatccgccgagcaataccccggagggggaggtgccgagcgttatcgcccgcaaggttagtcagtacagctgccagcgcaagaccacgctgaataactacaacaaaaagtttaccgacgcgctggagatcatggccgagaactacaaatttaaagagaacctgatcgcgtgtctggaatttaagcgcgccgcgagtctgctgaaatatctgccgttcccggttaccagcatgaaagacatccaaggtctgccgtgcattggcgaccaagttcgtgacgtgatcgaggagatcatcgaagagggcgagagcagccgtgttaaagaagttctcaatgacgagcgctacaaggcctttaagcagttcaccagcgtgttcggtgtgggcgtgaaaaccagcgaaaagtggtttcgtatgggcctccgtacggttgaagaggcaaaggccagtaagagtctgaagctgagcaagatgcagaaggcgggcttcctgtattacgaggatctggcgagctgcgttagtaaagcggaagccgatgccgttacgctcatcgtgaagaacacggtgcgtacctttctgccggatgcgctggtgaccatcaccggcggtttccgccgtggcaaacctatgggccacgacatcgactttctgatcacgaatccgggcccgaaagaggatgacgagctgctccacaaagtggttgatctgctcaagaagcaaggtctgctgctgtactgcgacatcaaagagagcacgttcgtggaggaacaactgccaagtcgcaaaatcgacgccatggactcgttccagaagtgcttcgccattctcaagctgtaccagccgggcgtggataacagcagctataacacgagtaagaagagtgacatggccgaggttaaggattggaaagcgattcgtgtggatctggtgatcacgccattcgagcagtacgcctatgcgctgctcggttggacgggcagcaaagaatttggtcgcgatctgcgccgctatgcggaggaagagcgcaagatgatcctcgacaaccatggcctctacgaccgcaaaaagcgcatctttctgaaagcgggcagcgaagaagagattttcgcgcatctgggtctggattatgtggagccgtgggaacgcaacgcg

SEQ ID NO: 1526 - protein, 394 aa, synthetic construct
  REGION 1..394: note = Variant of terminal deoxynucleotidyl transferase
MHHHHHHGGSGHPPSNTPEGEVPSVIARKVSQYSCQRKTTLNNYNKKFTDALEIMAENYKFKENLIACLEFKRAASLLKYLPFPVTSMKDIQGLPCIGDQVRDVIEEIIEEGESSRVKEVLNDERYKAFKQFTSVFGVGVKTSEKWFRMGLRTVEEAKASKSLKLSKMQKAGFLYYEDLASCVSKAEADAVTLIVKNTVRTFLPDALVTITGGFRRGKPMGHDIDFLITNPGPKEDDELLHKVVDLLKKQGLLLYCDIKESTFVEEQLPSRKIDAMDSFQKCFAILKLYQPGVDNSSYNTSKKSDMAEVKDWKAIRVDLVITPFEQYAYALLGWTGSKEFGRDLRRYAEEERKMILDNHGLYDRKKRIFLKAGSEEEIFAHLGLDYVEPWERNA

SEQ ID NO: 1527 - DNA, 1182 bp, synthetic construct
  misc_feature 1..1182: note = Variant of terminal deoxynucleotidyl transferase
  source 1..1182: mol_type = other DNA
atgcaccatcatcatcatcatggcggtagcggccatccgccgagcaataccccggagggggaggtgccgagcgttatcgccattaaggttagtcagtacagctgccagcgcaagaccacgctgaataactacaacaaaaagtttaccgacgcgctggagatcatggccgagaactacaaatttaaagagaacctgatcgcgtgtctggaatttaagcgcgccgcgagtctgctgaaatatctgccgttcccggttaccagcatgaaagacatccaaggtctgccgtgcattggcgaccaagttcgtgacgtgatcgaggagatcatcgaagagggcgagagcagccgtgttaaagaagttctcaatgacgagcgctacaaggcctttaagcagttcaccagcgtgttcggtgtgggcgtgaaaaccagcgaaaagtggtttcgtatgggcctccgtacggttgaagaggcaaaggccagtaagagtctgaagctgagcaagatgcagaaggcgggcttcctgtattacgaggatctggcgagctgcgttagtaaagcggaagccgatgccgttacgctcatcgtgaagaacacggtgcgtacctttctgccggatgcgctggtgaccatcaccggcggtttccgccgtggcaaacctatgggccacgacatcgactttctgatcacgaatccgggcccgaaagaggatgacgagctgctccacaaagtggttgatctgctcaagaagcaaggtctgctgctgtactgcgacatcaaagagagcacgttcgtggaggaacaactgccaagtcgcaaaatcgacgccatggacaacttccagaagtgcttcgccattctcaagctgtaccagccgggcgtggataacagcagctataacacgagtaagaagagtgacatggccgaggttaaggattggaaagcgattcgtgtggatctggtgatcacgccattcgagcagtacgcctatgcgctgctcggttggacgggcagcaaagaatttggtcgcgatctgcgccgctatgcggaggaagagcgcaagatgatcctcgacaaccatggcctctacgaccgcaaaaagcgcatctttctgaaagcgggcagcgaagaagagattttcgcgcatctgggtctggattatgtggagccgtgggaacgcaacgcg

SEQ ID NO: 1528 - protein, 394 aa, synthetic construct
  REGION 1..394: note = Variant of terminal deoxynucleotidyl transferase
MHHHHHHGGSGHPPSNTPEGEVPSVIAIKVSQYSCQRKTTLNNYNKKFTDALEIMAENYKFKENLIACLEFKRAASLLKYLPFPVTSMKDIQGLPCIGDQVRDVIEEIIEEGESSRVKEVLNDERYKAFKQFTSVFGVGVKTSEKWFRMGLRTVEEAKASKSLKLSKMQKAGFLYYEDLASCVSKAEADAVTLIVKNTVRTFLPDALVTITGGFRRGKPMGHDIDFLITNPGPKEDDELLHKVVDLLKKQGLLLYCDIKESTFVEEQLPSRKIDAMDNFQKCFAILKLYQPGVDNSSYNTSKKSDMAEVKDWKAIRVDLVITPFEQYAYALLGWTGSKEFGRDLRRYAEEERKMILDNHGLYDRKKRIFLKAGSEEEIFAHLGLDYVEPWERNA

SEQ ID NO: 1529 - DNA, 1182 bp, synthetic construct
  misc_feature 1..1182: note = Variant of terminal deoxynucleotidyl transferase
  source 1..1182: mol_type = other DNA
atgcaccatcatcatcatcatggcggtagcggccatccgccgagcaataccccggagggggaggtgccgagcgttatcgcccgcaaggttagtcagtacagctgccagcgcaagaccacgctgaataactacaacaaaaagtttaccgacgcgctggagatcatggccgagaactacaaatttaaagagaacctgatcgcgtgtctggaatttaagcgcgccgcgagtctgctgaaatatctgccgttcccggttaccagcatgaaagacatccaaggtctgccgtgcattggcgaccaagttcgtgacgtgatcgaggagatcatcgaagagggcgagagcagccgtgttaaagaagttctcaatgacgagcgctacaaggcctttaagcagttcaccagcgtgttcggtgtgggcgtgaaaaccagcgaaaagtggtttcgtatgggcctccgtacggttgaagaggcaaaggccagtaagagtctgaagctgagcaagatgcagaaggcgggcttcctgtattacgaggatctggcgagctgcgttagtaaagcggaagccgatgccgttacgctcatcgtgtttaacacggtgcgtacctttctgccggatgcgctggtgaccatcaccggcggtttccgccgtggcaaacctatgggccacgacatcgactttctgatcacgaatccgggcccgaaagaggatgacgagctgctccacaaagtggttgatctgctcaagaagcaaggtctgctgctgtactgcgacatcaaagagagcacgttcgtggaggaacaactgccaagtcgcaaaatcgacgccatggacaacttccagaagtgcttcgccattctcaagctgtaccagccgggcgtggataacagcagctataacacgagtaagaagagtgacatggccgaggttaaggattggaaagcgattcgtgtggatctggtgatcacgccattcgagcagtacgcctatgcgctgctcggttggacgggcagcaaagaatttggtcgcgatctgcgccgctatgcggaggaagagcgcaagatgatcctcgacaaccatggcctctacgaccgcaaaaagcgcatctttctgaaagcgggcagcgaagaagagattttcgcgcatctgggtctggattatgtggagccgtgggaacgcaacgcg

SEQ ID NO: 1530 - protein, 394 aa, synthetic construct
  REGION 1..394: note = Variant of terminal deoxynucleotidyl transferase
MHHHHHHGGSGHPPSNTPEGEVPSVIARKVSQYSCQRKTTLNNYNKKFTDALEIMAENYKFKENLIACLEFKRAASLLKYLPFPVTSMKDIQGLPCIGDQVRDVIEEIIEEGESSRVKEVLNDERYKAFKQFTSVFGVGVKTSEKWFRMGLRTVEEAKASKSLKLSKMQKAGFLYYEDLASCVSKAEADAVTLIVFNTVRTFLPDALVTITGGFRRGKPMGHDIDFLITNPGPKEDDELLHKVVDLLKKQGLLLYCDIKESTFVEEQLPSRKIDAMDNFQKCFAILKLYQPGVDNSSYNTSKKSDMAEVKDWKAIRVDLVITPFEQYAYALLGWTGSKEFGRDLRRYAEEERKMILDNHGLYDRKKRIFLKAGSEEEIFAHLGLDYVEPWERNA

SEQ ID NO: 1531 - DNA, 1182 bp, synthetic construct
  misc_feature 1..1182: note = Variant of terminal deoxynucleotidyl transferase
  source 1..1182: mol_type = other DNA
atgcaccatcatcatcatcatggcggtagcggccatccgccgagcaataccccggagggggaggtgccgagcgttatcgcccgcaaggttagtcagtacagctgccagcgcaagaccacgctgaataactacaacaaaaagtttaccgacgcgctggagatcatggccgagaactacaaatttaaagagaacctgatcgcgtgtctggaatttaagcgcgccgcgagtctgctgaaatatctgccgttcccggttaccagcatgaaagacatccaaggtctgccgtgcattggcgaccaagttcgtgacgtgatcgaggagatcatcgaagagggcgagagcagccgtgttaaagaagttctcaatgacgagcgctacaaggcctttaagcagttcaccagcgtgttcggtgtgggcgtgaaaaccagcgaaaagtggtttcgtatgggcctccgtacggttgaagaggcaaaggccagtaagagtctgaagctgagcaagatgcagaaggcgggcttcctgtattacgaggatctggcgagctgcgttagtaaagcggaagccgatgccgttacgctcatcgtgaggaacacggtgcgtacctttctgccggatgcgctggtgaccatcaccggcggtttccgccgtggcaaacctatgggccacgacatcgactttctgatcacgaatccgggcccgaaagaggatgacgagctgctccacaaagtggttgatctgctcaagaagcaaggtctgctgctgtactgcgacatcaaagagagcacgttcgtggaggaacaactgccaagtcgcaaaatcgacgccatggacaacttccagaagtgcttcgccattctcaagctgtaccagccgggcgtggataacagcagctataacacgagtaagaagagtgacatggccgaggttaaggattggaaagcgattcgtgtggatctggtgatcacgccattcgagcagtacgcctatgcgctgctcggttggacgggcagcaaagaatttggtcgcgatctgcgccgctatgcggaggaagagcgcaagatgatcctcgacaaccatggcctctacgaccgcaaaaagcgcatctttctgaaagcgggcagcgaagaagagattttcgcgcatctgggtctggattatgtggagccgtgggaacgcaacgcg

SEQ ID NO: 1532 - protein, 394 aa, synthetic construct
  REGION 1..394: note = Variant of terminal deoxynucleotidyl transferase
MHHHHHHGGSGHPPSNTPEGEVPSVIARKVSQYSCQRKTTLNNYNKKFTDALEIMAENYKFKENLIACLEFKRAASLLKYLPFPVTSMKDIQGLPCIGDQVRDVIEEIIEEGESSRVKEVLNDERYKAFKQFTSVFGVGVKTSEKWFRMGLRTVEEAKASKSLKLSKMQKAGFLYYEDLASCVSKAEADAVTLIVRNTVRTFLPDALVTITGGFRRGKPMGHDIDFLITNPGPKEDDELLHKVVDLLKKQGLLLYCDIKESTFVEEQLPSRKIDAMDNFQKCFAILKLYQPGVDNSSYNTSKKSDMAEVKDWKAIRVDLVITPFEQYAYALLGWTGSKEFGRDLRRYAEEERKMILDNHGLYDRKKRIFLKAGSEEEIFAHLGLDYVEPWERNA

SEQ ID NO: 1533 - DNA, 1182 bp, synthetic construct
  misc_feature 1..1182: note = Variant of terminal deoxynucleotidyl transferase
  source 1..1182: mol_type = other DNA
atgcaccatcatcatcatcatggcggtagcggccatccgccgagcaataccccggagggggaggtgccgagcgttatcgcccgcaaggttagtcagtacagctgccagcgcaagaccacgctgaataactacaacaaaaagtttaccgacgcgctggagatcatggccgagaactacaaatttaaagagaacctgatcgcgtgtctggaatttaagcgcgccgcgagtctgctgaaatatctgccgttcccggttaccagcatgaaagacatccaaggtctgccgtgcattggcgaccaagttcgtgacgtgatcgaggagatcatcgaagagggcgagagcagccgtgttaaagaagttctcaatgacgagcgctacaaggcctttaagcagttcaccagcgtgttcggtgtgggcgtgaaaaccagcgaaaagtggtttcgtatgggcctccgtacggttgaagaggcaaaggccagtaagagtctgaagctgagcaagatgcagaaggcgggcttcctgtattacgaggatctggcgagctgcgttagtaaagcggaagccgatgccgttacgctcatcgtgaagaggacggtgcgtacctttctgccggatgcgctggtgaccatcaccggcggtttccgccgtggcaaacctatgggccacgacatcgactttctgatcacgaatccgggcccgaaagaggatgacgagctgctccacaaagtggttgatctgctcaagaagcaaggtctgctgctgtactgcgacatcaaagagagcacgttcgtggaggaacaactgccaagtcgcaaaatcgacgccatggacaacttccagaagtgcttcgccattctcaagctgtaccagccgggcgtggataacagcagctataacacgagtaagaagagtgacatggccgaggttaaggattggaaagcgattcgtgtggatctggtgatcacgccattcgagcagtacgcctatgcgctgctcggttggacgggcagcaaagaatttggtcgcgatctgcgccgctatgcggaggaagagcgcaagatgatcctcgacaaccatggcctctacgaccgcaaaaagcgcatctttctgaaagcgggcagcgaagaagagattttcgcgcatctgggtctggattatgtggagccgtgggaacgcaacgcg

SEQ ID NO: 1534 - protein, 394 aa, synthetic construct
  REGION 1..394: note = Variant of terminal deoxynucleotidyl transferase
MHHHHHHGGSGHPPSNTPEGEVPSVIARKVSQYSCQRKTTLNNYNKKFTDALEIMAENYKFKENLIACLEFKRAASLLKYLPFPVTSMKDIQGLPCIGDQVRDVIEEIIEEGESSRVKEVLNDERYKAFKQFTSVFGVGVKTSEKWFRMGLRTVEEAKASKSLKLSKMQKAGFLYYEDLASCVSKAEADAVTLIVKRTVRTFLPDALVTITGGFRRGKPMGHDIDFLITNPGPKEDDELLHKVVDLLKKQGLLLYCDIKESTFVEEQLPSRKIDAMDNFQKCFAILKLYQPGVDNSSYNTSKKSDMAEVKDWKAIRVDLVITPFEQYAYALLGWTGSKEFGRDLRRYAEEERKMILDNHGLYDRKKRIFLKAGSEEEIFAHLGLDYVEPWERNA

SEQ ID NO: 1535 - DNA, 1182 bp, synthetic construct
  misc_feature 1..1182: note = Variant of terminal deoxynucleotidyl transferase
  source 1..1182: mol_type = other DNA
atgcaccatcatcatcatcatggcggtagcggccatccgccgagcaataccccggagggggaggtgccgagcgttatcgcccgcaaggttagtcagtacagctgccagcgcaagaccacgctgaataactacaacaaaaagtttaccgacgcgctggagatcatggccgagaactacaaatttaaagagaacctgatcgcgtgtctggaatttaagcgcgccgcgagtctgctgaaatatctgccgttcccggttaccagcatgaaagacatccaaggtctgccgtgcattggcgaccaagttcgtgacgtgatcgaggagatcatcgaagagggcgagagcagccgtgttaaagaagttctcaatgacgagttttacaaggcctttaagcagttcaccagcgtgttcggtgtgggcgtgaaaaccagcgaaaagtggtttcgtatgggcctccgtacggttgaagaggcaaaggccagtaagagtctgaagctgagcaagatgcagaaggcgggcttcctgtattacgaggatctggcgagctgcgttagtaaagcggaagccgatgccgttacgctcatcgtgaagaacacggtgcgtacctttctgccggatgcgctggtgaccatcaccggcggtttccgccgtggcaaacctatgggccacgacatcgactttctgatcacgaatccgggcccgaaagaggatgacgagctgctccacaaagtggttgatctgctcaagaagcaaggtctgctgctgtactgcgacatcaaagagagcacgttcgtggaggaacaactgccaagtcgcaaaatcgacgccatggacaacttccagaagtgcttcgccattctcaagctgtaccagccgggcgtggataacagcagctataacacgagtaagaagagtgacatggccgaggttaaggattggaaagcgattcgtgtggatctggtgatcacgccattcgagcagtacgcctatgcgctgctcggttggacgggcagcaaagaatttggtcgcgatctgcgccgctatgcggaggaagagcgcaagatgatcctcgacaaccatggcctctacgaccgcaaaaagcgcatctttctgaaagcgggcagcgaagaagagattttcgcgcatctgggtctggattatgtggagccgtgggaacgcaacgcg

SEQ ID NO: 1536 - protein, 394 aa, synthetic construct
  REGION 1..394: note = Variant of terminal deoxynucleotidyl transferase
MHHHHHHGGSGHPPSNTPEGEVPSVIARKVSQYSCQRKTTLNNYNKKFTDALEIMAENYKFKENLIACLEFKRAASLLKYLPFPVTSMKDIQGLPCIGDQVRDVIEEIIEEGESSRVKEVLNDEFYKAFKQFTSVFGVGVKTSEKWFRMGLRTVEEAKASKSLKLSKMQKAGFLYYEDLASCVSKAEADAVTLIVKNTVRTFLPDALVTITGGFRRGKPMGHDIDFLITNPGPKEDDELLHKVVDLLKKQGLLLYCDIKESTFVEEQLPSRKIDAMDNFQKCFAILKLYQPGVDNSSYNTSKKSDMAEVKDWKAIRVDLVITPFEQYAYALLGWTGSKEFGRDLRRYAEEERKMILDNHGLYDRKKRIFLKAGSEEEIFAHLGLDYVEPWERNA

SEQ ID NO: 1537 - DNA, 1182 bp, synthetic construct
  misc_feature 1..1182: note = Variant of terminal deoxynucleotidyl transferase
  source 1..1182: mol_type = other DNA
atgcaccatcatcatcatcatggcggtagcggccatccgccgagcaataccccggagggggaggtgccgagcgttatcgcccgcaaggttagtcagtacagctgccagcgcaagaccacgctgaataactacaacaaaaagtttaccgacgcgctggagatcatggccgagaactacaaatttaaagagaacctgatcgcgtgtctggaatttaagcgcgccgcgagtctgctgaaatatctgccgttcccggttaccagcatgaaagacatccaaggtctgccgtgcattggcgaccaagttcgtgacgtgatcgaggagatcatcgaagagggcgagagcagccgtgttaaagaagttctcaatgacgagcgctacaaggcctttaagcagttcaccagcgtgttcggtgtgggcgtgaaaaccagcgaaaagtggtttcgtatgggcctccgtacggttgaagaggcaaaggccagtaagagtctgaagctgagcaagatgcagaaggcgggcttcctgtattacgaggatctggcgagctgcgttagtaaagcggaagccgatgccgttacgctcatcgtgaagaacacggtgcgtacctttctgccggatgcgctggtgaccatcaccggcggtttccgccgtggcaaacctatgggccacgacatcgactttctgatcacgaatccgggcccgaaagaggatgacgagctgctccacaaagtggttgatctgctcaagaagcaaggtctgctgctgtactgcgacatcaaagagagcacgttcgtggaggaacaactgccaagtcgcaaaatcgacgccatggacaacttccagaagtgcttcgccattctcaagctgtaccagccgggcgtggataacagcagctataacacgagtaagaagagtgacatggccgaggttaaggattggaaagcgattcgtgtggatctggtgatcacgccattcgagcagtacgcctatgcgctgctcggttggacgggcagcaaagaatttggtcgcgatctgcgccgctatgcggaggaagagcgcaagatgatcctcgacaaccatggcctctacgaccgcaaaaagcgcatctttctgaaagcgggcagcgaagaagagattttcggtcatctgggtctggattatgtggagccgtgggaacgcaacgcg

SEQ ID NO: 1538 - protein, 394 aa, synthetic construct; identical to SEQ ID NO: 1436
  REGION 1..394: note = Variant of terminal deoxynucleotidyl transferase

SEQ ID NO: 1539 - DNA, 1182 bp, synthetic construct
  misc_feature 1..1182: note = Variant of terminal deoxynucleotidyl transferase
  source 1..1182: mol_type = other DNA
atgcaccatcatcatcatcatggcggtagcggccatccgccgagcaataccccggagggggaggtgccgagcgttatcgcccgcaaggttagtcagtacagctgccagcgcaagaccacgctgaataactacaacaaaaagtttaccgacgcgctggagatcatggccgagaactacaaatttaaagagaacctgatcgcgtgtctggaatttaagcgcgccgcgagtctgctgaaatatctgccgttcccggttaccagcatgaaagacatccaaggtctgccgtgcattggcgaccaagttcgtgacgtgatcgaggagatcatcgaagagggcgagagcagccgtgttaaagaagttctcaatgacgaggcgtacaaggcctttaagcagttcaccagcgtgttcggtgtgggcgtgaaaaccagcgaaaagtggtttcgtatgggcctccgtacggttgaagaggcaaaggccagtaagagtctgaagctgagcaagatgcagaaggcgggcttcctgtattacgaggatctggcgagctgcgttagtaaagcggaagccgatgccgttacgctcatcgtgaagaacacggtgcgtacctttctgccggatgcgctggtgaccatcaccggcggtttccgccgtggcaaacctatgggccacgacatcgactttctgatcacgaatccgggcccgaaagaggatgacgagctgctccacaaagtggttgatctgctcaagaagcaaggtctgctgctgtactgcgacatcaaagagagcacgttcgtggaggaacaactgccaagtcgcaaaatcgacgccatggacaacttccagaagtgcttcgccattctcaagctgtaccagccgggcgtggataacagcagctataacacgagtaagaagagtgacatggccgaggttaaggattggaaagcgattcgtgtggatctggtgatcacgccattcgagcagtacgcctatgcgctgctcggttggacgggcagcaaagaatttggtcgcgatctgcgccgctatgcggaggaagagcgcaagatgatcctcgacaaccatggcctctacgaccgcaaaaagcgcatctttctgaaagcgggcagcgaagaagagattttcgcgcatctgggtctggattatgtggagccgtgggaacgcaacgcg

SEQ ID NO: 1540 - protein, 394 aa, synthetic construct
  REGION 1..394: note = Variant of terminal deoxynucleotidyl transferase
MHHHHHHGGSGHPPSNTPEGEVPSVIARKVSQYSCQRKTTLNNYNKKFTDALEIMAENYKFKENLIACLEFKRAASLLKYLPFPVTSMKDIQGLPCIGDQVRDVIEEIIEEGESSRVKEVLNDEAYKAFKQFTSVFGVGVKTSEKWFRMGLRTVEEAKASKSLKLSKMQKAGFLYYEDLASCVSKAEADAVTLIVKNTVRTFLPDALVTITGGFRRGKPMGHDIDFLITNPGPKEDDELLHKVVDLLKKQGLLLYCDIKESTFVEEQLPSRKIDAMDNFQKCFAILKLYQPGVDNSSYNTSKKSDMAEVKDWKAIRVDLVITPFEQYAYALLGWTGSKEFGRDLRRYAEEERKMILDNHGLYDRKKRIFLKAGSEEEIFAHLGLDYVEPWERNA

SEQ ID NO: 1541 - DNA, 1182 bp, synthetic construct
  misc_feature 1..1182: note = Variant of terminal deoxynucleotidyl transferase
  source 1..1182: mol_type = other DNA
atgcaccatcatcatcatcatggcggtagcggccatccgccgagcaataccccggagggggaggtgccgagcgttatcgcccgcaaggttagtcagtacagctgccagcgcaagaccacgctgaataactacaacaaaaagtttaccgacgcgctggagatcatggccgagaactacaaatttaaagagaacctgatcgcgtgtctggaatttaagcgcgccgcgagtctgctgaaatatctgccgttcccggttaccagcatgaaagacatctttggtctgccgtgcattggcgaccaagttcgtgacgtgatcgaggagatcatcgaagagggcgagagcagccgtgttaaagaagttctcaatgacgagcgctacaaggcctttaagcagttcaccagcgtgttcggtgtgggcgtgaaaaccagcgaaaagtggtttcgtatgggcctccgtacggttgaagaggcaaaggccagtaagagtctgaagctgagcaagatgcagaaggcgggcttcctgtattacgaggatctggcgagctgcgttagtaaagcggaagccgatgccgttacgctcatcgtgaagaacacggtgcgtacctttctgccggatgcgctggtgaccatcaccggcggtttccgccgtggcaaacctatgggccacgacatcgactttctgatcacgaatccgggcccgaaagaggatgacgagctgctccacaaagtggttgatctgctcaagaagcaaggtctgctgctgtactgcgacatcaaagagagcacgttcgtggaggaacaactgccaagtcgcaaaatcgacgccatggacaacttccagaagtgcttcgccattctcaagctgtaccagccgggcgtggataacagcagctataacacgagtaagaagagtgacatggccgaggttaaggattggaaagcgattcgtgtggatctggtgatcacgccattcgagcagtacgcctatgcgctgctcggttggacgggcagcaaagaatttggtcgcgatctgcgccgctatgcggaggaagagcgcaagatgatcctcgacaaccatggcctctacgaccgcaaaaagcgcatctttctgaaagcgggcagcgaagaagagattttcgcgcatctgggtctggattatgtggagccgtgggaacgcaacgcg

SEQ ID NO: 1542 - protein, 394 aa, synthetic construct
  REGION 1..394: note = Variant of terminal deoxynucleotidyl transferase
MHHHHHHGGSGHPPSNTPEGEVPSVIARKVSQYSCQRKTTLNNYNKKFTDALEIMAENYKFKENLIACLEFKRAASLLKYLPFPVTSMKDIFGLPCIGDQVRDVIEEIIEEGESSRVKEVLNDERYKAFKQFTSVFGVGVKTSEKWFRMGLRTVEEAKASKSLKLSKMQKAGFLYYEDLASCVSKAEADAVTLIVKNTVRTFLPDALVTITGGFRRGKPMGHDIDFLITNPGPKEDDELLHKVVDLLKKQGLLLYCDIKESTFVEEQLPSRKIDAMDNFQKCFAILKLYQPGVDNSSYNTSKKSDMAEVKDWKAIRVDLVITPFEQYAYALLGWTGSKEFGRDLRRYAEEERKMILDNHGLYDRKKRIFLKAGSEEEIFAHLGLDYVEPWERNA

SEQ ID NO: 1543 - DNA, 1182 bp, synthetic construct
  misc_feature 1..1182: note = Variant of terminal deoxynucleotidyl transferase
  source 1..1182: mol_type = other DNA
atgcaccatcatcatcatcatggcggtagcggccatccgccgagcaataccccggagggggaggtgccgagcgttatcgcccgcaaggttagtcagtacagctgccagcgcaagaccacgctgaataactacaacaaaaagtttaccgacgcgctggagatcatggccgagaactacaaatttaaagagaacctgatcgcgtgtctggaatttaagcgcgccgcgagtctgctgaaatatctgccgttcccggttaccagcatgaaagacatccaaggtctgccgtgcattggcgaccaagttcgtgacattatcgaggagatcatcgaagagggcgagagcagccgtgttaaagaagttctcaatgacgagcgctacaaggcctttaagcagttcaccagcgtgttcggtgtgggcgtgaaaaccagcgaaaagtggtttcgtatgggcctccgtacggttgaagaggcaaaggccagtaagagtctgaagctgagcaagatgcagaaggcgggcttcctgtattacgaggatctggcgagctgcgttagtaaagcggaagccgatgccgttacgctcatcgtgaagaacacggtgcgtacctttctgccggatgcgctggtgaccatcaccggcggtttccgccgtggcaaacctatgggccacgacatcgactttctgatcacgaatccgggcccgaaagaggatgacgagctgctccacaaagtggttgatctgctcaagaagcaaggtctgctgctgtactgcgacatcaaagagagcacgttcgtggaggaacaactgccaagtcgcaaaatcgacgccatggacaacttccagaagtgcttcgccattctcaagctgtaccagccgggcgtggataacagcagctataacacgagtaagaagagtgacatggccgaggttaaggattggaaagcgattcgtgtggatctggtgatcacgccattcgagcagtacgcctatgcgctgctcggttggacgggcagcaaagaatttggtcgcgatctgcgccgctatgcggaggaagagcgcaagatgatcctcgacaaccatggcctctacgaccgcaaaaagcgcatctttctgaaagcgggcagcgaagaagagattttcgcgcatctgggtctggattatgtggagccgtgggaacgcaacgcg

SEQ ID NO: 1544 - protein, 394 aa, synthetic construct
  REGION 1..394: note = Variant of terminal deoxynucleotidyl transferase
MHHHHHHGGSGHPPSNTPEGEVPSVIARKVSQYSCQRKTTLNNYNKKFTDALEIMAENYKFKENLIACLEFKRAASLLKYLPFPVTSMKDIQGLPCIGDQVRDIIEEIIEEGESSRVKEVLNDERYKAFKQFTSVFGVGVKTSEKWFRMGLRTVEEAKASKSLKLSKMQKAGFLYYEDLASCVSKAEADAVTLIVKNTVRTFLPDALVTITGGFRRGKPMGHDIDFLITNPGPKEDDELLHKVVDLLKKQGLLLYCDIKESTFVEEQLPSRKIDAMDNFQKCFAILKLYQPGVDNSSYNTSKKSDMAEVKDWKAIRVDLVITPFEQYAYALLGWTGSKEFGRDLRRYAEEERKMILDNHGLYDRKKRIFLKAGSEEEIFAHLGLDYVEPWERNA

SEQ ID NO: 1545 - DNA, 1182 bp, synthetic construct
  misc_feature 1..1182: note = Variant of terminal deoxynucleotidyl transferase
  source 1..1182: mol_type = other DNA
atgcaccatcatcatcatcatggcggtagcggccatccgccgagcaataccccggagggggaggtgccgagcgttatcgcccgcaaggttagtcagtacagctgccagcgcaagaccacgctgaataactacaacaaaaagtttaccgacgcgctggagatcatggccgagaactacaaatttaaagagaacctgatcgcgtgtctggaatttaagcgcgccgcgagtctgctgaaatatctgccgttcccggttaccagcatgaaagacatccaaggtctgccgtgcattggcgaccaagttcgtgacgtgatcgaggagatcatcgaagagggcgagagcagccgtgttaaagaagttctcaatgacgagcgctacaaggcctttaagcagttcaccagcgtgttcggtgtgggcgtgaaaaccagcgaaaagtggtttcgtatgggcctccgtacggttgaagaggcaaaggccagtaagagtctgaagctgagcaagatgcagaaggcgggcttcctgtattacgaggatctggcgagctgcgttagtaaagcggaagccgatgccgttacgctcatcgtgaagaacacggtgcgtacctttctgccggatgcgctggtgaccatcaccggcggtttccgccgtggcaaacctatgggccacgacatcgactttctgatcacggatccgggcccgaaagaggatgacgagctgctccacaaagtggttgatctgctcaagaagcaaggtctgctgctgtactgcgacatcaaagagagcacgttcgtggaggaacaactgccaagtcgcaaaatcgacgccatggacaacttccagaagtgcttcgccattctcaagctgtaccagccgggcgtggataacagcagctataacacgagtaagaagagtgacatggccgaggttaaggattggaaagcgattcgtgtggatctggtgatcacgccattcgagcagtacgcctatgcgctgctcggttggacgggcagcaaagaatttggtcgcgatctgcgccgctatgcggaggaagagcgcaagatgatcctcgacaaccatggcctctacgaccgcaaaaagcgcatctttctgaaagcgggcagcgaagaagagattttcgcgcatctgggtctggattatgtggagccgtgggaacgcaacgcg

SEQ ID NO: 1546 - protein, 394 aa, synthetic construct
  REGION 1..394: note = Variant of terminal deoxynucleotidyl transferase
MHHHHHHGGSGHPPSNTPEGEVPSVIARKVSQYSCQRKTTLNNYNKKFTDALEIMAENYKFKENLIACLEFKRAASLLKYLPFPVTSMKDIQGLPCIGDQVRDVIEEIIEEGESSRVKEVLNDERYKAFKQFTSVFGVGVKTSEKWFRMGLRTVEEAKASKSLKLSKMQKAGFLYYEDLASCVSKAEADAVTLIVKNTVRTFLPDALVTITGGFRRGKPMGHDIDFLITDPGPKEDDELLHKVVDLLKKQGLLLYCDIKESTFVEEQLPSRKIDAMDNFQKCFAILKLYQPGVDNSSYNTSKKSDMAEVKDWKAIRVDLVITPFEQYAYALLGWTGSKEFGRDLRRYAEEERKMILDNHGLYDRKKRIFLKAGSEEEIFAHLGLDYVEPWERNA

SEQ ID NO: 1547 - DNA, 1182 bp, synthetic construct
  misc_feature 1..1182: note = Variant of terminal deoxynucleotidyl transferase
  source 1..1182: mol_type = other DNA
atgcaccatcatcatcatcatggcggtagcggccatccgccgagcaataccccggagggggaggtgccgagcgttatcgcccgcaaggttagtcagtacagctgccagcgcaagaccacgctgaataactacaacaaaaagtttaccgacgcgctggagatcatggccgagaactacaaatttaaagagaacctgatcgcgtgtctggaatttaagcgcgccgcgagtctgctgaaatatctgccgttcccggttaccagcatgaaagacatccaaggtctgccgtgcattggcgaccaagttcgtgacgtgatcgaggagatcatcgaagagggcgagagcagccgtgttaaagaagttctcaatgacgagcgctacaaggcctttaagcagttcaccagcgtgttcggtgtgggcgtgaaaaccagcgaaaagtggtttcgtatgggcctccgtacggttgaagaggcaaaggccagtaagagtctgaagctgagcaagatgcagaaggcgggcttcctgtattacgaggatctggcgagctgcgttagtaaagcggaagccgatgccgttacgctcatcgtgaagaacacggtgcgtacctttctgccggatgcgctggtgaccatcaccggcggtttccgccgtggcaaacctatgggccacgacatcgactttctgatcacgaatccgggcccgaaagaggatgacgagctgctccacaaagtggttgatctgctcaagaagcaaggtctgctgctgtactgcgacatcaaagagagcacgttcgtggaggaacaactgccaagtcgcggtatcgacgccatggacaacttccagaagtgcttcgccattctcaagctgtaccagccgggcgtggataacagcagctataacacgagtaagaagagtgacatggccgaggttaaggattggaaagcgattcgtgtggatctggtgatcacgccattcgagcagtacgcctatgcgctgctcggttggacgggcagcaaagaatttggtcgcgatctgcgccgctatgcggaggaagagcgcaagatgatcctcgacaaccatggcctctacgaccgcaaaaagcgcatctttctgaaagcgggcagcgaagaagagattttcgcgcatctgggtctggattatgtggagccgtgggaacgcaacgcg

SEQ ID NO: 1548 - protein, 394 aa, synthetic construct
  REGION 1..394: note = Variant of terminal deoxynucleotidyl transferase
MHHHHHHGGSGHPPSNTPEGEVPSVIARKVSQYSCQRKTTLNNYNKKFTDALEIMAENYKFKENLIACLEFKRAASLLKYLPFPVTSMKDIQGLPCIGDQVRDVIEEIIEEGESSRVKEVLNDERYKAFKQFTSVFGVGVKTSEKWFRMGLRTVEEAKASKSLKLSKMQKAGFLYYEDLASCVSKAEADAVTLIVKNTVRTFLPDALVTITGGFRRGKPMGHDIDFLITNPGPKEDDELLHKVVDLLKKQGLLLYCDIKESTFVEEQLPSRGIDAMDNFQKCFAILKLYQPGVDNSSYNTSKKSDMAEVKDWKAIRVDLVITPFEQYAYALLGWTGSKEFGRDLRRYAEEERKMILDNHGLYDRKKRIFLKAGSEEEIFAHLGLDYVEPWERNA

SEQ ID NO: 1549 - DNA, 1182 bp, synthetic construct
  misc_feature 1..1182: note = Variant of terminal deoxynucleotidyl transferase
  source 1..1182: mol_type = other DNA
atgcaccatcatcatcatcatggcggtagcggccatccgccgagcaataccccggagggggaggtgccgagcgttatcgcccgcaaggttagtcagtacagctgccagcgcaagaccacgctgaataactacaacaaaaagtttaccgacgcgctggagatcatggccgagaactacaaatttaaagagaacctgatcgcgtgtctggaatttaagcgcgccgcgagtctgctgaaatatctgccgttcccggttaccagcatgaaagacatccaaggtctgccgtgcattggcgaccaagttcgtgacgtgatcgaggagatcatcgaagagggcgagagcagccgtgttaaagaagttctcaatgacgagcgctacaaggcctttaagcagttcaccagcgtgttcggtgtgggcgtgaaaaccagcgaaaagtggtttcgtatgggcctccgtacggttgaagaggcaaaggccagtaagagtctgaagctgagcaagatgcagaaggcgggcttcctgtattacgaggatctggcgagctgcgttagtaaagcggaagccgatgccgttacgctcatcgtgaagaacacggtgcgtacctttctgccggatgcgctggtgaccatcaccggcggtttccgccgtggcaaacctatgggccacgacatcgactttctgatcacgaatccgggcccgcaggaggatgacgagctgctccacaaagtggttgatctgctcaagaagcaaggtctgctgctgtactgcgacatcaaagagagcacgttcgtggaggaacaactgccaagtcgcaaaatcgacgccatggacaacttccagaagtgcttcgccattctcaagctgtaccagccgggcgtggataacagcagctataacacgagtaagaagagtgacatggccgaggttaaggattggaaagcgattcgtgtggatctggtgatcacgccattcgagcagtacgcctatgcgctgctcggttggacgggcagcaaagaatttggtcgcgatctgcgccgctatgcggaggaagagcgcaagatgatcctcgacaaccatggcctctacgaccgcaaaaagcgcatctttctgaaagcgggcagcgaagaagagattttcgcgcatctgggtctggattatgtggagccgtgggaacgcaacgcg

SEQ ID NO: 1550 - protein, 394 aa, synthetic construct
  REGION 1..394: note = Variant of terminal deoxynucleotidyl transferase
MHHHHHHGGSGHPPSNTPEGEVPSVIARKVSQYSCQRKTTLNNYNKKFTDALEIMAENYKFKENLIACLEFKRAASLLKYLPFPVTSMKDIQGLPCIGDQVRDVIEEIIEEGESSRVKEVLNDERYKAFKQFTSVFGVGVKTSEKWFRMGLRTVEEAKASKSLKLSKMQKAGFLYYEDLASCVSKAEADAVTLIVKNTVRTFLPDALVTITGGFRRGKPMGHDIDFLITNPGPQEDDELLHKVVDLLKKQGLLLYCDIKESTFVEEQLPSRKIDAMDNFQKCFAILKLYQPGVDNSSYNTSKKSDMAEVKDWKAIRVDLVITPFEQYAYALLGWTGSKEFGRDLRRYAEEERKMILDNHGLYDRKKRIFLKAGSEEEIFAHLGLDYVEPWERNA

SEQ ID NO: 1551 - DNA, 1182 bp, synthetic construct
  misc_feature 1..1182: note = Variant of terminal deoxynucleotidyl transferase
  source 1..1182: mol_type = other DNA
atgcaccatcatcatcatcatggcggtagcggccatccgccgagcaataccccggagggggaggtgccgagcgttatcgcccgcaaggttagtcagtacagctgccagcgcaagaccacgctgaataactacaacaaaaagtttaccgacgcgctggagatcatggccgagaactacaaatttaaagagaacctgatcgcgtgtctggaatttaagcgcgccgcgagtctgctgaaatatctgccgttcccggttaccagcatgaaagacatccaaggtctgccgtgcattggcgaccaagttcgtgacgtgatcgaggagatcatcgaagagggcgagagcagccgtgttaaagaagttctcaatgacgagcgctacaaggcctttaagcagttcaccagcgtgttcggtgtgggcgtgaaaaccagcgaaaagtggtttcgtatgggcctccgtacggttgaagaggcaaaggccagtaagagtctgaagctgagcaagatgcagaaggcgggcttcctgtattacgaggatctggcgagctgcgttagtaaagcggaagccgatgccgttacgctcatcgtgaagaacacggtgcgtacctttctgccggatgcgctggtgaccatcaccggcggtttccgccgtggcaaacctatgggccacgacatcgactttctgatcacgattccgggcccgaaagaggatgacgagctgctccacaaagtggttgatctgctcaagaagcaaggtctgctgctgtactgcgacatcaaagagagcacgttcgtggaggaacaactgccaagtcgcaaaatcgacgccatggacaacttccagaagtgcttcgccattctcaagctgtaccagccgggcgtggataacagcagctataacacgagtaagaagagtgacatggccgaggttaaggattggaaagcgattcgtgtggatctggtgatcacgccattcgagcagtacgcctatgcgctgctcggttggacgggcagcaaagaatttggtcgcgatctgcgccgctatgcggaggaagagcgcaagatgatcctcgacaaccatggcctctacgaccgcaaaaagcgcatctttctgaaagcgggcagcgaagaagagattttcgcgcatctgggtctggattatgtggagccgtgggaacgcaacgcg

SEQ ID NO: 1552 - protein, 394 aa, synthetic construct
  REGION 1..394: note = Variant of terminal deoxynucleotidyl transferase
MHHHHHHGGSGHPPSNTPEGEVPSVIARKVSQYSCQRKTTLNNYNKKFTDALEIMAENYKFKENLIACLEFKRAASLLKYLPFPVTSMKDIQGLPCIGDQVRDVIEEIIEEGESSRVKEVLNDERYKAFKQFTSVFGVGVKTSEKWFRMGLRTVEEAKASKSLKLSKMQKAGFLYYEDLASCVSKAEADAVTLIVKNTVRTFLPDALVTITGGFRRGKPMGHDIDFLITIPGPKEDDELLHKVVDLLKKQGLLLYCDIKESTFVEEQLPSRKIDAMDNFQKCFAILKLYQPGVDNSSYNTSKKSDMAEVKDWKAIRVDLVITPFEQYAYALLGWTGSKEFGRDLRRYAEEERKMILDNHGLYDRKKRIFLKAGSEEEIFAHLGLDYVEPWERNA

SEQ ID NO: 1553 - DNA, 1182 bp, synthetic construct
  misc_feature 1..1182: note = Variant of terminal deoxynucleotidyl transferase
  source 1..1182: mol_type = other DNA
atgcaccatcatcatcatcatggcggtagcggccatccgccgagcaataccccggagggggaggtgccgagcgttatcgcccgcaaggttagtcagtacagctgccagcgcaagaccacgctgaataactacaacaaaaagtttaccgacgcgctggagatcatggccgagaactacaaatttaaagagaacctgatcgcgtgtctggaatttaagcgcgccgcgagtctgctgaaatatctgccgttcccggttaccagcatgaaagacatccaaggtctgccgtgcattggcgaccaagttcgtgacgtgatcgaggagatcatcgaagagggcgagagcagccgtgttaaagaagttctcaatgacgagcgctacaaggcctttaagcagttcaccagcgtgttcggtgtgggcgtgaaaaccagcgaaaagtggtttcgtatgggcctccgtacggttgaagaggcaaaggccagtaagagtctgaagctgagcaagatgcagaaggcgggcttcctgtattacgaggatctggcgagctgcgttagtaaagcggaagccgatgccgttacgctcatcgtgaagaacacggtgcgtacctttctgccggatgcgctggtgaccatcaccggcggtttccgccgtggcaaacctatgggccacgacatcgactttctgatcacgaatccgggcccgaaagaggatgacgagctgctccacaaagtggttgatctgctcaagaagcaaggtctgctgctgtactgcgacatcaaagagagcacgttcgtggaggaacaactgccaagtcgcaaaatcgacgccatggacaacttccagaagtgcttcgccattctcaagctgtaccagccgggcgtggataacagcagctataacacgagtaagaagagtgacatgctggaggttaaggattggaaagcgattcgtgtggatctggtgatcacgccattcgagcagtacgcctatgcgctgctcggttggacgggcagcaaagaatttggtcgcgatctgcgccgctatgcggaggaagagcgcaagatgatcctcgacaaccatggcctctacgaccgcaaaaagcgcatctttctgaaagcgggcagcgaagaagagattttcgcgcatctgggtctggattatgtggagccgtgggaacgcaacgcg

SEQ ID NO: 1554 - protein, 394 aa, synthetic construct
  REGION 1..394: note = Variant of terminal deoxynucleotidyl transferase
MHHHHHHGGSGHPPSNTPEGEVPSVIARKVSQYSCQRKTTLNNYNKKFTDALEIMAENYKFKENLIACLEFKRAASLLKYLPFPVTSMKDIQGLPCIGDQVRDVIEEIIEEGESSRVKEVLNDERYKAFKQFTSVFGVGVKTSEKWFRMGLRTVEEAKASKSLKLSKMQKAGFLYYEDLASCVSKAEADAVTLIVKNTVRTFLPDALVTITGGFRRGKPMGHDIDFLITNPGPKEDDELLHKVVDLLKKQGLLLYCDIKESTFVEEQLPSRKIDAMDNFQKCFAILKLYQPGVDNSSYNTSKKSDMLEVKDWKAIRVDLVITPFEQYAYALLGWTGSKEFGRDLRRYAEEERKMILDNHGLYDRKKRIFLKAGSEEEIFAHLGLDYVEPWERNA

SEQ ID NO: 1555 - DNA, 1182 bp, synthetic construct
  misc_feature 1..1182: note = Variant of terminal deoxynucleotidyl transferase
  source 1..1182: mol_type = other DNA
atgcaccatcatcatcatcatggcggtagcggccatccgccgagcaataccccggagggggaggtgccgagcgttatcgcccgcaaggttagtcagtacagctgccagcgcaagaccacgctgaataactacaacaaaaagtttaccgacgcgctggagatcatggccgagaactacaaatttaaagagaacctgatcgcgtgtctggaatttaagcgcgccgcgagtctgctgaaatatctgccgttcccggttaccagcatgaaagacatccaaggtctgccgtgcattggcgaccaagttcgtgacgtgatcgaggagatcatcgaagagggcgagagcagccgtgttaaagaagttctcaatgacgagcgctacaaggcctttaagcagttcaccagcgtgttcggtgtgggcgtgaaaaccagcgaaaagtggtttcgtatgggcctccgtacggttgaagaggcaaaggccagtaagagtctgaagctgagcaagatgcagaaggcgggcttcctgtattacgaggatctggcgagctgcgttagtaaagcggaagccgatgccgttacgctcatcgtgaagaacacggtgcgtacctttctgccggatgcgctggtgaccatcaccggcggtttccgccgtggcaaacctatgggccacgacatcgactttctgatcacgaatccgggcccgaaagaggatgacgagctgctccacaaagtggttgatctgctcaagaagcaaggtctgctgctgtactgcgacatcaaagagagcacgttcgtggaggaacaactgccaagtcgcaaaatcgacgccatggacaacttccagaagtgcttcgccattctcaagctgtaccagccgggcgtggataacagcagctataacacgagtaagaagagtgacatggccgaggttaaggattggaaagcgattcgtgtggatctggtgatcacgccattcgagcagtacgcctatgcgctgctcggttggacgggcagcaaagaatttggtcgcgatctgcgccgctatgcggaggaagagcgcaagatgatcctcgacaaccatggcctctacgacaataaaaagcgcatctttctgaaagcgggcagcgaagaagagattttcgcgcatctgggtctggattatgtggagccgtgggaacgcaacgcg

SEQ ID NO: 1556 - protein, 394 aa, synthetic construct
  REGION 1..394: note = Variant of terminal deoxynucleotidyl transferase
MHHHHHHGGSGHPPSNTPEGEVPSVIARKVSQYSCQRKTTLNNYNKKFTDALEIMAENYKFKENLIACLEFKRAASLLKYLPFPVTSMKDIQGLPCIGDQVRDVIEEIIEEGESSRVKEVLNDERYKAFKQFTSVFGVGVKTSEKWFRMGLRTVEEAKASKSLKLSKMQKAGFLYYEDLASCVSKAEADAVTLIVKNTVRTFLPDALVTITGGFRRGKPMGHDIDFLITNPGPKEDDELLHKVVDLLKKQGLLLYCDIKESTFVEEQLPSRKIDAMDNFQKCFAILKLYQPGVDNSSYNTSKKSDMAEVKDWKAIRVDLVITPFEQYAYALLGWTGSKEFGRDLRRYAEEERKMILDNHGLYDNKKRIFLKAGSEEEIFAHLGLDYVEPWERNA

SEQ ID NO: 1557 - DNA, 1182 bp, synthetic construct
  misc_feature 1..1182: note = Variant of terminal deoxynucleotidyl transferase
  source 1..1182: mol_type = other DNA
atgcaccatcatcatcatcatggcggtagcggccatccgccgagcaataccccggagggggaggtgccgagcgttatcgcccgcaaggttagtcagtacagctgccagcgcaagaccacgctgaataactacaacaaaaagtttaccgacgcgctggagatcatggccgagaactacaaatttaaagagaacctgatcgcgtgtctggaatttaagcgcgccgcgagtctgctgaaatatctgccgttcccggttaccagcatgaaagacatccaaggtctgccgtgcattggcgaccaagttcgtgacgtgatcgaggagatcatcgaagagggcgagagcagccgtgttaaagaagttctcaatgacgagcgctacaaggcctttaagcagttcaccagcgtgttcggtgtgggcgtgaaaaccagcgaaaagtggtttcgtatgggcctccgtacggttgaagaggcaaaggccagtaagagtctgaagctgagcaagatgcagaaggcgggcttcctgtattacgaggatctggcgagctgcgttagtaaagcggaagccgatgccgttacgctcatcgtgaagaactgtgtgcgtacctttctgccggatgcgctggtgaccatcaccggcggtttccgccgtggcaaacctatgggccacgacatcgactttctgatcacgaatccgggcccgaaagaggatgacgagctgctccacaaagtggttgatctgctcaagaagcaaggtctgctgctgtactgcgacatcaaagagagcacgttcgtggaggaacaactgccaagtcgcaaaatcgacgccatggacaacttccagaagtgcttcgccattctcaagctgtaccagccgggcgtggataacagcagctataacacgagtaagaagagtgacatggccgaggttaaggattggaaagcgattcgtgtggatctggtgatcacgccattcgagcagtacgcctatgcgctgctcggttggacgggcagcaaagaatttggtcgcgatctgcgccgctatgcggaggaagagcgcaagatgatcctcgacaaccatggcctctacgaccgcaaaaagcgcatctttctgaaagcgggcagcgaagaagagattttcgcgcatctgggtctggattatgtggagccgtgggaacgcaacgcg

SEQ ID NO: 1558 - protein, 394 aa, synthetic construct
  REGION 1..394: note = Variant of terminal deoxynucleotidyl transferase
MHHHHHHGGSGHPPSNTPEGEVPSVIARKVSQYSCQRKTTLNNYNKKFTDALEIMAENYKFKENLIACLEFKRAASLLKYLPFPVTSMKDIQGLPCIGDQVRDVIEEIIEEGESSRVKEVLNDERYKAFKQFTSVFGVGVKTSEKWFRMGLRTVEEAKASKSLKLSKMQKAGFLYYEDLASCVSKAEADAVTLIVKNCVRTFLPDALVTITGGFRRGKPMGHDIDFLITNPGPKEDDELLHKVVDLLKKQGLLLYCDIKESTFVEEQLPSRKIDAMDNFQKCFAILKLYQPGVDNSSYNTSKKSDMAEVKDWKAIRVDLVITPFEQYAYALLGWTGSKEFGRDLRRYAEEERKMILDNHGLYDRKKRIFLKAGSEEEIFAHLGLDYVEPWERNA

SEQ ID NO: 1559 - DNA, 1182 bp, synthetic construct
  misc_feature 1..1182: note = Variant of terminal deoxynucleotidyl transferase
  source 1..1182: mol_type = other DNA
atgcaccatcatcatcatcatggcggtagcggccatccgccgagcaataccccggagggggaggtgccgagcgttatcgcccgcaaggttagtcagtacagctgccagcgcaagaccacgctgaataactacaacaaaaagtttaccgacgcgctggagatcatggccgagaactacaaatttaaagagaacctgatcgcgtgtctggaatttaagcgcgccgcgagtctgctgaaatatctgccgttcccggttaccagcatgaaagacatccaaggtctgccgtgcattggcgaccaagttcgtgacgtgatcgaggagatcatcgaagagggcgagagcagcacggttaaagaagttctcaatgacgagcgctacaaggcctttaagcagttcaccagcgtgttcggtgtgggcgtgaaaaccagcgaaaagtggtttcgtatgggcctccgtacggttgaagaggcaaaggccagtaagagtctgaagctgagcaagatgcagaaggcgggcttcctgtattacgaggatctggcgagctgcgttagtaaagcggaagccgatgccgttacgctcatcgtgaagaacacggtgcgtacctttctgccggatgcgctggtgaccatcaccggcggtttccgccgtggcaaacctatgggccacgacatcgactttctgatcacgaatccgggcccgaaagaggatgacgagctgctccacaaagtggttgatctgctcaagaagcaaggtctgctgctgtactgcgacatcaaagagagcacgttcgtggaggaacaactgccaagtcgcaaaatcgacgccatggacaacttccagaagtgcttcgccattctcaagctgtaccagccgggcgtggataacagcagctataacacgagtaagaagagtgacatggccgaggttaaggattggaaagcgattcgtgtggatctggtgatcacgccattcgagcagtacgcctatgcgctgctcggttggacgggcagcaaagaatttggtcgcgatctgcgccgctatgcggaggaagagcgcaagatgatcctcgacaaccatggcctctacgaccgcaaaaagcgcatctttctgaaagcgggcagcgaagaagagattttcgcgcatctgggtctggattatgtggagccgtgggaacgcaacgcg

SEQ ID NO: 1560 - protein, 394 aa, synthetic construct
  REGION 1..394: note = Variant of terminal deoxynucleotidyl transferase
MHHHHHHGGSGHPPSNTPEGEVPSVIARKVSQYSCQRKTTLNNYNKKFTDALEIMAENYKFKENLIACLEFKRAASLLKYLPFPVTSMKDIQGLPCIGDQVRDVIEEIIEEGESSTVKEVLNDERYKAFKQFTSVFGVGVKTSEKWFRMGLRTVEEAKASKSLKLSKMQKAGFLYYEDLASCVSKAEADAVTLIVKNTVRTFLPDALVTITGGFRRGKPMGHDIDFLITNPGPKEDDELLHKVVDLLKKQGLLLYCDIKESTFVEEQLPSRKIDAMDNFQKCFAILKLYQPGVDNSSYNTSKKSDMAEVKDWKAIRVDLVITPFEQYAYALLGWTGSKEFGRDLRRYAEEERKMILDNHGLYDRKKRIFLKAGSEEEIFAHLGLDYVEPWERNA

SEQ ID NO: 1561 - DNA, 1182 bp, synthetic construct
  misc_feature 1..1182: note = Variant of terminal deoxynucleotidyl transferase
  source 1..1182: mol_type = other DNA
atgcaccatcatcatcatcatggcggtagcggccatccgccgagcaataccccggagggggaggtgccgagcgttatcgcccgcaaggttagtcagtacagctgccagcgcaagaccacgctgaataactacaacaaaaagtttaccgacgcgctggagatcatggccgagaactacaaatttaaagagaacctgatcgcgtgtctggaatttaagcgcgccgcgagtctgctgaaatatctgccgttcccggttaccagcatgaaagacatccaaggtctgccgtgcattggcgaccaagttcgtgacgtgatcgaggagatcatcgaagagggcgagagcagccgtgttaaagaagttctcaatgacgagcgctacaaggcctttaagcagttcaccagcgtgttcggtgtgggcgtgaaaaccagcgaaaagtggtttcgtatgggcctccgtacggttgaagaggcaaaggccagtaagagtctgaagctgagcaagatgcagaaggcgggcttcctgtattacgaggatctggcgagctgcgttagtaaagcggaagccgatgccgttacgctcatcgtgaagaacacggtgcgtacctttctgccggatgcgctggtgaccatcaccggcggtttccgccgtggcaaacctatgggccacgacatcgactttctgatcacgaatccgggcccgaaagaggatgacgagctgctccacaaagtggttgatctgctcaagaagcaaggtctgctgctgtactgcgacatcaaagagagcacgttcgtggaggaacaactgccaagtcgcaaaatcgacgccatggacaacttccagaagtgcttcgccattctcaagctgtaccagccgggcgtggataacagcagctataacacgagtaagaagagtgacatggccgaggttaaggattggaaagcgattcgtgtggatctggtgatcacgccattcgagcagtacgcctatgcgctgctcggttggacgggcagcaaagaatttggtcgcgatctgcgccgctatgcggaggaagagcgcaagatgatcctcgacaaccatggcctctacgaccgcaaaaagcgcatctttctgaaagcgggcagcgaagaagagattttcatgcatctgggtctggattatgtggagccgtgggaacgcaacgcg

SEQ ID NO: 1562 - protein, 394 aa, synthetic construct
  REGION 1..394: note = Variant of terminal deoxynucleotidyl transferase
MHHHHHHGGSGHPPSNTPEGEVPSVIARKVSQYSCQRKTTLNNYNKKFTDALEIMAENYKFKENLIACLEFKRAASLLKYLPFPVTSMKDIQGLPCIGDQVRDVIEEIIEEGESSRVKEVLNDERYKAFKQFTSVFGVGVKTSEKWFRMGLRTVEEAKASKSLKLSKMQKAGFLYYEDLASCVSKAEADAVTLIVKNTVRTFLPDALVTITGGFRRGKPMGHDIDFLITNPGPKEDDELLHKVVDLLKKQGLLLYCDIKESTFVEEQLPSRKIDAMDNFQKCFAILKLYQPGVDNSSYNTSKKSDMAEVKDWKAIRVDLVITPFEQYAYALLGWTGSKEFGRDLRRYAEEERKMILDNHGLYDRKKRIFLKAGSEEEIFMHLGLDYVEPWERNA

SEQ ID NO: 1563 - DNA, 1182 bp, synthetic construct
  misc_feature 1..1182: note = Variant of terminal deoxynucleotidyl transferase
  source 1..1182: mol_type = other DNA
atgcaccatcatcatcatcatggcggtagcggccatccgccgagcaataccccggagggggaggtgccgagcgttatcgcccgcaaggttagtcagtacagctgccagcgcaagaccacgctgaataactacaacaaaaagtttaccgacgcgctggagatcatggccgagaactacaaatttaaagagaacctgatcgcgtgtctggaatttaagcgcgccgcgagtctgctgaaatatctgccgttcccggttaccagcatgaaagacatcgcgggtctgccgtgcattggcgaccaagttcgtgacgtgatcgaggagatcatcgaagagggcgagagcagccgtgttaaagaagttctcaatgacgagcgctacaaggcctttaagcagttcaccagcgtgttcggtgtgggcgtgaaaaccagcgaaaagtggtttcgtatgggcctccgtacggttgaagaggcaaaggccagtaagagtctgaagctgagcaagatgcagaaggcgggcttcctgtattacgaggatctggcgagctgcgttagtaaagcggaagccgatgccgttacgctcatcgtgaagaacacggtgcgtacctttctgccggatgcgctggtgaccatcaccggcggtttccgccgtggcaaacctatgggccacgacatcgactttctgatcacgaatccgggcccgaaagaggatgacgagctgctccacaaagtggttgatctgctcaagaagcaaggtctgctgctgtactgcgacatcaaagagagcacgttcgtggaggaacaactgccaagtcgcaaaatcgacgccatggacaacttccagaagtgcttcgccattctcaagctgtaccagccgggcgtggataacagcagctataacacgagtaagaagagtgacatggccgaggttaaggattggaaagcgattcgtgtggatctggtgatcacgccattcgagcagtacgcctatgcgctgctcggttggacgggcagcaaagaatttggtcgcgatctgcgccgctatgcggaggaagagcgcaagatgatcctcgacaaccatggcctctacgaccgcaaaaagcgcatctttctgaaagcgggcagcgaagaagagattttcgcgcatctgggtctggattatgtggagccgtgggaacgcaacgcg

SEQ ID NO: 1564 - protein, 394 aa, synthetic construct
  REGION 1..394: note = Variant of terminal deoxynucleotidyl transferase
MHHHHHHGGSGHPPSNTPEGEVPSVIARKVSQYSCQRKTTLNNYNKKFTDALEIMAENYKFKENLIACLEFKRAASLLKYLPFPVTSMKDIAGLPCIGDQVRDVIEEIIEEGESSRVKEVLNDERYKAFKQFTSVFGVGVKTSEKWFRMGLRTVEEAKASKSLKLSKMQKAGFLYYEDLASCVSKAEADAVTLIVKNTVRTFLPDALVTITGGFRRGKPMGHDIDFLITNPGPKEDDELLHKVVDLLKKQGLLLYCDIKESTFVEEQLPSRKIDAMDNFQKCFAILKLYQPGVDNSSYNTSKKSDMAEVKDWKAIRVDLVITPFEQYAYALLGWTGSKEFGRDLRRYAEEERKMILDNHGLYDRKKRIFLKAGSEEEIFAHLGLDYVEPWERNA

SEQ ID NO: 1565 - DNA, 1182 bp, synthetic construct
  misc_feature 1..1182: note = Variant of terminal deoxynucleotidyl transferase
  source 1..1182: mol_type = other DNA
atgcaccatcatcatcatcatggcggtagcggccatccgccgagcaataccccggagggggaggtgccgagcgttatcgcccgcaaggttagtcagtacagctgccagcgcaagaccacgctgaataactacaacaaaaagtttaccgacgcgctggagatcatggccgagaactacaaatttaaagagaacctgatcgcgtgtctggaatttaagcgcgccgcgagtctgctgaaatatctgccgttcccggttaccagcatgaaagacatccaaggtctgccgtgcattggcgaccaagttcgtgacgtgatcgaggagatcatcgaagagggcgagagcagccgtgttaaagaagttctcaatgacgagcgctacaaggcctttaagcagttcaccagcgtgttcggtgtgggcgtgaaaaccagcgaaaagtggtttcgtatgggcctccgtacggttgaagaggcaaaggccagtaagagtctgaagctgagcaagatgcagaaggcgggcttcctgtattacgaggatctggcgagctgcgttagtaaagcggaagccgatgccgttacgctcatcgtgaagaacacggtgcgtctgtttctgccggatgcgctggtgaccatcaccggcggtttccgccgtggcaaacctatgggccacgacatcgactttctgatcacgaatccgggcccgaaagaggatgacgagctgctccacaaagtggttgatctgctcaagaagcaaggtctgctgctgtactgcgacatcaaagagagcacgttcgtggaggaacaactgccaagtcgcaaaatcgacgccatggacaacttccagaagtgcttcgccattctcaagctgtaccagccgggcgtggataacagcagctataacacgagtaagaagagtgacatggccgaggttaaggattggaaagcgattcgtgtggatctggtgatcacgccattcgagcagtacgcctatgcgctgctcggttggacgggcagcaaagaatttggtcgcgatctgcgccgctatgcggaggaagagcgcaagatgatcctcgacaaccatggcctctacgaccgcaaaaagcgcatctttctgaaagcgggcagcgaagaagagattttcgcgcatctgggtctggattatgtggagccgtgggaacgcaacgcg

SEQ ID NO: 1566 - protein, 394 aa, synthetic construct
  REGION 1..394: note = Variant of terminal deoxynucleotidyl transferase
MHHHHHHGGSGHPPSNTPEGEVPSVIARKVSQYSCQRKTTLNNYNKKFTDALEIMAENYKFKENLIACLEFKRAASLLKYLPFPVTSMKDIQGLPCIGDQVRDVIEEIIEEGESSRVKEVLNDERYKAFKQFTSVFGVGVKTSEKWFRMGLRTVEEAKASKSLKLSKMQKAGFLYYEDLASCVSKAEADAVTLIVKNTVRLFLPDALVTITGGFRRGKPMGHDIDFLITNPGPKEDDELLHKVVDLLKKQGLLLYCDIKESTFVEEQLPSRKIDAMDNFQKCFAILKLYQPGVDNSSYNTSKKSDMAEVKDWKAIRVDLVITPFEQYAYALLGWTGSKEFGRDLRRYAEEERKMILDNHGLYDRKKRIFLKAGSEEEIFAHLGLDYVEPWERNA

SEQ ID NO: 1567 - DNA, 1182 bp, synthetic construct
  misc_feature 1..1182: note = Variant of terminal deoxynucleotidyl transferase
  source 1..1182: mol_type = other DNA
atgcaccatcatcatcatcatggcggtagcggccatccgccgagcaataccccggagggggaggtgccgagcgttatcgcccgcaaggttagtcagtacagctgccagcgcaagaccacgctgaataactacaacaaaaagtttaccgacgcgctggagatcatggccgagaactacaaatttaaagagaacctgatcgcgtgtctggaagccaagcgcgccgcgagtattctgaaatatctgccgttcccggttaccagcatgaaagacatccaaggtctgccgtgcattggcgaccaagttcgtgacgtgatcgaggagatcatcgaagagggcgagagcagccgtgttaaagaagttctcaatgacgagcgctacaaggcctttaagcagttcaccagcgtgttcggtgtgggcgtgaaaaccagcgaaaagtggtttcgtatgggcctccgtacggttgaagaggcaaaggccagtaagagtctgaagctgagcaagatgcagaaggcgggcttcctgtattacgaggatctggcgagctgcgttagtaaagcggaagccgatgccgttacgctcatcgtgaagaacacggtgcgtacctttctgcttgatgcgctggtgaccatcaccggcggtttccgccgtggcaaacctatgggccacgacatcgactttctgatcacgaatccgggcccgaaagaggatgacgagctgctccacaaagtggttgatctgctcaagaagcaaggtctgctgctgtactgcgacatcaaagagagcacgttcgtggaggaacaactgccaagtcgcaaaatcgacgccatggacaacttccagaagtgcttcgccattctcaagctgtaccagccgggcgtggataacagcagctataacacgagtaagaagagtgacatggccgaggttaaggattggaaagcgattcgtgtggatctggtgatcacgccattcgagcagtacgcctatgcgctgctcggttggacgggcagcaaagaatttggtcgcgatctgcgccgctatgcggaggaagagcgcggcatgatcctcgacaaccatggcctctacgaccgcaaaaagcgcatctttctgaaagcgggcagcgaagaagagattttcgcgcatctgggtctggattatgtggagccgtgggaacgcaacgcg

SEQ ID NO: 1568 - protein, 394 aa, synthetic construct
  REGION 1..394: note = Variant of terminal deoxynucleotidyl transferase
MHHHHHHGGSGHPPSNTPEGEVPSVIARKVSQYSCQRKTTLNNYNKKFTDALEIMAENYKFKENLIACLEAKRAASILKYLPFPVTSMKDIQGLPCIGDQVRDVIEEIIEEGESSRVKEVLNDERYKAFKQFTSVFGVGVKTSEKWFRMGLRTVEEAKASKSLKLSKMQKAGFLYYEDLASCVSKAEADAVTLIVKNTVRTFLLDALVTITGGFRRGKPMGHDIDFLITNPGPKEDDELLHKVVDLLKKQGLLLYCDIKESTFVEEQLPSRKIDAMDNFQKCFAILKLYQPGVDNSSYNTSKKSDMAEVKDWKAIRVDLVITPFEQYAYALLGWTGSKEFGRDLRRYAEEERGMILDNHGLYDRKKRIFLKAGSEEEIFAHLGLDYVEPWERNA

SEQ ID NO: 1569 - DNA, 1182 bp, synthetic construct
  misc_feature 1..1182: note = Variant of terminal deoxynucleotidyl transferase
  source 1..1182: mol_type = other DNA
atgcaccatcatcatcatcatggcggtagcggccatccgccgagcaataccccggagggggaggtgccgagcgttatcgcccgcaaggttagtcagtacagctgccagcgcaagaccacgctgaataactacaacaaaaagtttaccgacgcgctggagatcatggccgagaactacaaatttaaagagaacctgatcgcgtgtctggaagccaagcgcgccgcgagtattctgaaatatctgccgttcccggttaccagcatgaaagacatccaaggtctgccgtgcattggcgaccaagttcgtgacgtgatcgaggagatcatcgaagagggcgagagcagccgtgttaaagaagttctcaatgacgagcgctacaaggcctttaagcagttcaccagcgtgttcggtgtgggcgtgaaaaccagcgaaaagtggtttcgtatgggcctccgtacggttgaagaggcaaaggccagtaagagtctgaagctgagcaagatgcagaaggcgggcttcctgtattacgaggatctggcgagctgcgttagtaaagcggaagccgatgccgttacgctcatcgtgaagaacacggtgcgtacctttctgagggatgcgctggtgaccatcaccggcggtttccgccgtggcaaacctatgggccacgacatcgactttctgatcacgaatccgggcccgaaagaggatgacgagctgctccacaaagtggttgatctgctcaagaagcaaggtctgctgctgtactgcgacatcaaagagagcacgttcgtggaggaacaactgccaagtcgcaaaatcgacgccatggacaacttccagaagtgcttcgccattctcaagctgtaccagccgggcgtggataacagcagctataacacgagtaagaagagtgacatggccgaggttaaggattggaaagcgattcgtgtggatctggtgatcacgccattcgagcagtacgcctatgcgctgctcggttggacgggcagcaaagaatttggtcgcgatctgcgccgctatgcggaggaagagcgcggcatgatcctcgacaaccatggcctctacgaccgcaaaaagcgcatctttctgaaagcgggcagcgaagaagagattttcgcgcatctgggtctggattatgtggagccgtgggaacgcaacgcg

SEQ ID NO: 1570 - protein, 394 aa, synthetic construct
  REGION 1..394: note = Variant of terminal deoxynucleotidyl transferase
MHHHHHHGGSGHPPSNTPEGEVPSVIARKVSQYSCQRKTTLNNYNKKFTDALEIMAENYKFKENLIACLEAKRAASILKYLPFPVTSMKDIQGLPCIGDQVRDVIEEIIEEGESSRVKEVLNDERYKAFKQFTSVFGVGVKTSEKWFRMGLRTVEEAKASKSLKLSKMQKAGFLYYEDLASCVSKAEADAVTLIVKNTVRTFLRDALVTITGGFRRGKPMGHDIDFLITNPGPKEDDELLHKVVDLLKKQGLLLYCDIKESTFVEEQLPSRKIDAMDNFQKCFAILKLYQPGVDNSSYNTSKKSDMAEVKDWKAIRVDLVITPFEQYAYALLGWTGSKEFGRDLRRYAEEERGMILDNHGLYDRKKRIFLKAGSEEEIFAHLGLDYVEPWERNA

SEQ ID NO: 1571 - DNA, 1182 bp, synthetic construct
  misc_feature 1..1182: note = Variant of terminal deoxynucleotidyl transferase
  source 1..1182: mol_type = other DNA
atgcaccatcatcatcatcatggcggtagcggccatccgccgagcaataccccggagggggaggtgccgagcgttatcgcccgcaaggttagtcagtacagctgccagcgcaagaccacgctgaataactacaacaaaaagtttaccgacgcgctggagatcatggccgagaactacaaatttaaagagaacctgatcgcgtgtctggaagccaagcgcgccgcgagtattctgaaatatctgccgttcccggttaccagcatgaaagacatccaaggtctgccgtgcattggcgaccaagttcgtgacgtgatcgaggagatcatcgaagagggcgagagcagccgtgttaaagaagttctcaatgacgagcgctacaaggcctttaagcagttcaccagcgtgttcggtgtgggcgtgaaaaccagcgaaaagtggtttcgtatgggcctccgtacggttgaagaggcaaaggccagtaagagtctgaagctgagcaagatgcagaaggcgggcttcctgtattacgaggatctggcgagctgcgttagtaaagcggaagccgatgccgttacgctcatcgtgaagaacacggtgcgtacctttctgatggatgcgctggtgaccatcaccggcggtttccgccgtggcaaacctatgggccacgacatcgactttctgatcacgaatccgggcccgaaagaggatgacgagctgctccacaaagtggttgatctgctcaagaagcaaggtctgctgctgtactgcgacatcaaagagagcacgttcgtggaggaacaactgccaagtcgcaaaatcgacgccatggacaacttccagaagtgcttcgccattctcaagctgtaccagccgggcgtggataacagcagctataacacgagtaagaagagtgacatggccgaggttaaggattggaaagcgattcgtgtggatctggtgatcacgccattcgagcagtacgcctatgcgctgctcggttggacgggcagcaaagaatttggtcgcgatctgcgccgctatgcggaggaagagcgcggcatgatcctcgacaaccatggcctctacgaccgcaaaaagcgcatctttctgaaagcgggcagcgaagaagagattttcgcgcatctgggtctggattatgtggagccgtgggaacgcaacgcg

SEQ ID NO: 1572 - protein, 394 aa, synthetic construct
  REGION 1..394: note = Variant of terminal deoxynucleotidyl transferase
MHHHHHHGGSGHPPSNTPEGEVPSVIARKVSQYSCQRKTTLNNYNKKFTDALEIMAENYKFKENLIACLEAKRAASILKYLPFPVTSMKDIQGLPCIGDQVRDVIEEIIEEGESSRVKEVLNDERYKAFKQFTSVFGVGVKTSEKWFRMGLRTVEEAKASKSLKLSKMQKAGFLYYEDLASCVSKAEADAVTLIVKNTVRTFLMDALVTITGGFRRGKPMGHDIDFLITNPGPKEDDELLHKVVDLLKKQGLLLYCDIKESTFVEEQLPSRKIDAMDNFQKCFAILKLYQPGVDNSSYNTSKKSDMAEVKDWKAIRVDLVITPFEQYAYALLGWTGSKEFGRDLRRYAEEERGMILDNHGLYDRKKRIFLKAGSEEEIFAHLGLDYVEPWERNA

SEQ ID NO: 1573 - DNA, 1182 bp, synthetic construct
  misc_feature 1..1182: note = Variant of terminal deoxynucleotidyl transferase
  source 1..1182: mol_type = other DNA
atgcaccatcatcatcatcatggcggtagcggccatccgccgagcaataccccggagggggaggtgccgagcgttatcgccgggaaggttagtcagtacagctgccagcgcaagaccacgctgaataactacaacaaaaagtttaccgacgcgctggagatcatggccgagaactacaaatttaaagagaacctgatcgcgtgtctggaagccaagcgcgccgcgagtattctgaaatatctgccgttcccggttaccagcatgaaagacatccaaggtctgccgtgcattggcgaccaagttcgtgacgtgatcgaggagatcatcgaagagggcgagagcagccgtgttaaagaagttctcaatgacgagcgctacaaggcctttaagcagttcaccagcgtgttcggtgtgggcgtgaaaaccagcgaaaagtggtttcgtatgggcctccgtacggttgaagaggcaaaggccagtaagagtctgaagctgagcaagatgcagaaggcgggcttcctgtattacgaggatctggcgagctgcgttagtaaagcggaagccgatgccgttacgctcatcgtgaagaacacggtgcgtacctttctgccggatgcgctggtgaccatcaccggcggtttccgccgtggcaaacctatgggccacgacatcgactttctgatcacgaatccgggcccgaaagaggatgacgagctgctccacaaagtggttgatctgctcaagaagcaaggtctgctgctgtactgcgacatcaaagagagcacgttcgtggaggaacaactgccaagtcgcaaaatcgacgccatggacaacttccagaagtgcttcgccattctcaagctgtaccagccgggcgtggataacagcagctataacacgagtaagaagagtgacatggccgaggttaaggattggaaagcgattcgtgtggatctggtgatcacgccattcgagcagtacgcctatgcgctgctcggttggacgggcagcaaagaatttggtcgcgatctgcgccgctatgcggaggaagagcgcggcatgatcctcgacaaccatggcctctacgaccgcaaaaagcgcatctttctgaaagcgggcagcgaagaagagattttcgcgcatctgggtctggattatgtggagccgtgggaacgcaacgcg

SEQ ID NO: 1574 - protein, 394 aa, synthetic construct
  REGION 1..394: note = Variant of terminal deoxynucleotidyl transferase
MHHHHHHGGSGHPPSNTPEGEVPSVIAGKVSQYSCQRKTTLNNYNKKFTDALEIMAENYKFKENLIACLEAKRAASILKYLPFPVTSMKDIQGLPCIGDQVRDVIEEIIEEGESSRVKEVLNDERYKAFKQFTSVFGVGVKTSEKWFRMGLRTVEEAKASKSLKLSKMQKAGFLYYEDLASCVSKAEADAVTLIVKNTVRTFLPDALVTITGGFRRGKPMGHDIDFLITNPGPKEDDELLHKVVDLLKKQGLLLYCDIKESTFVEEQLPSRKIDAMDNFQKCFAILKLYQPGVDNSSYNTSKKSDMAEVKDWKAIRVDLVITPFEQYAYALLGWTGSKEFGRDLRRYAEEERGMILDNHGLYDRKKRIFLKAGSEEEIFAHLGLDYVEPWERNA

SEQ ID NO: 1575 - DNA, 1182 bp, synthetic construct
  misc_feature 1..1182: note = Variant of terminal deoxynucleotidyl transferase
  source 1..1182: mol_type = other DNA
atgcaccatcatcatcatcatggcggtagcggccatccgccgagcaataccccggagggggaggtgccgagcgttatcgcccgcaaggttagtcagtacagctgccagcgcaagaccacgctgaataactacaacaaaaagtttaccgacgcgctggagatcatggccgagaactacaaatttaaagagaacctgatcgcgtgtctggaagccaagcgcgccgcgagtattctgaaatatctgccgttcccggttaccagcatgaaagacatccaaggtctgccgtgcattggcgaccaagttcgtgacgtgatcgaggagatcatcgaagagggcgagagcagccgtgttaaagaagttctcaatgacgagcgctacaaggcctttaagcagttcaccagcgtgttcggtgtgggcgtgaaaaccagcgaaaagtggtttcgtatgggcctccgtacggttgaagaggcaaaggccagtaagagtctgaagctgagcaagatgcagaaggcgggcttcctgtattacgaggatctggcgagctgcgttagtaaagcggaagccgatgccgttacgctcatcgtgaagaacacggtgcgtacctttctgccggatgcgctggtgaccatcaccggcggtttccgccgtggcaaacctatgggccacgacatcgactttctgatcacgaatccgggcccgaaagaggatgacgagctgctccacaaagtggttgatctgctcaagaagcaaggtctgctgctgtactgcgacatcaaagagagcacgttcgtggaggaacaactgccaagtcgcaaaatcgacgccatggacaacttccagaagtgcttcgccattctcaagctgtacgtgccgggcgtggataacagcagctataacacgagtaagaagagtgacatggccgaggttaaggattggaaagcgattcgtgtggatctggtgatcacgccattcgagcagtacgcctatgcgctgctcggttggacgggcagcaaagaatttggtcgcgatctgcgccgctatgcggaggaagagcgcggcatgatcctcgacaaccatggcctctacgaccgcaaaaagcgcatctttctgaaagcgggcagcgaagaagagattttcgcgcatctgggtctggattatgtggagccgtgggaacgcaacgcg

SEQ ID NO: 1576 - protein, 394 aa, synthetic construct
  REGION 1..394: note = Variant of terminal deoxynucleotidyl transferase
MHHHHHHGGSGHPPSNTPEGEVPSVIARKVSQYSCQRKTTLNNYNKKFTDALEIMAENYKFKENLIACLEAKRAASILKYLPFPVTSMKDIQGLPCIGDQVRDVIEEIIEEGESSRVKEVLNDERYKAFKQFTSVFGVGVKTSEKWFRMGLRTVEEAKASKSLKLSKMQKAGFLYYEDLASCVSKAEADAVTLIVKNTVRTFLPDALVTITGGFRRGKPMGHDIDFLITNPGPKEDDELLHKVVDLLKKQGLLLYCDIKESTFVEEQLPSRKIDAMDNFQKCFAILKLYVPGVDNSSYNTSKKSDMAEVKDWKAIRVDLVITPFEQYAYALLGWTGSKEFGRDLRRYAEEERGMILDNHGLYDRKKRIFLKAGSEEEIFAHLGLDYVEPWERNA

SEQ ID NO: 1577 - DNA, 1182 bp, synthetic construct
  misc_feature 1..1182: note = Variant of terminal deoxynucleotidyl transferase
  source 1..1182: mol_type = other DNA
atgcaccatcatcatcatcatggcggtagcggccatccgccgagcaataccccggagggggaggtgccgagcgttatcgcccgcaaggttagtcagtacagctgccagcgcaagaccacgctgaataactacaacaaaaagtttaccgacgcgctggagatcatggccgagaactacaaatttaaagagaacctgatcgcgtgtctggaagccaagcgcgccgcgagtattctgaaatatctgccgttcccggttaccagcatgaaagacatccaaggtctgccgtgcattggcgaccaagttcgtgacgtgatcgaggagatcatcgaagagggcgagagcagccgtgttaaagaagttctcaatgacgagcgctacaaggcctttaagcagttcaccagcgtgttcggtgtgggcgtgaaaaccagcgaaaagtggtttcgtatgggcctccgtacggttgaagaggcaaaggccagtaagagtctgaagctgagcaagatgcagaaggcgggcctgctgtattacgaggatctggcgagctgcgttagtaaagcggaagccgatgccgttacgctcatcgtgaagaacacggtgcgtacctttctgccggatgcgctggtgaccatcaccggcggtttccgccgtggcaaacctatgggccacgacatcgactttctgatcacgaatccgggcccgaaagaggatgacgagctgctccacaaagtggttgatctgctcaagaagcaaggtctgctgctgtactgcgacatcaaagagagcacgttcgtggaggaacaactgccaagtcgcaaaatcgacgccatggacaacttccagaagtgcttcgccattctcaagctgtaccagccgggcgtggataacagcagctataacacgagtaagaagagtgacatggccgaggttaaggattggaaagcgattcgtgtggatctggtgatcacgccattcgagcagtacgcctatgcgctgctcggttggacgggcagcaaagaatttggtcgcgatctgcgccgctatgcggaggaagagcgcggcatgatcctcgacaaccatggcctctacgaccgcaaaaagcgcatctttctgaaagcgggcagcgaagaagagattttcgcgcatctgggtctggattatgtggagccgtgggaacgcaacgcg

SEQ ID NO: 1578 - protein, 394 aa, synthetic construct
  REGION 1..394: note = Variant of terminal deoxynucleotidyl transferase
MHHHHHHGGSGHPPSNTPEGEVPSVIARKVSQYSCQRKTTLNNYNKKFTDALEIMAENYKFKENLIACLEAKRAASILKYLPFPVTSMKDIQGLPCIGDQVRDVIEEIIEEGESSRVKEVLNDERYKAFKQFTSVFGVGVKTSEKWFRMGLRTVEEAKASKSLKLSKMQKAGLLYYEDLASCVSKAEADAVTLIVKNTVRTFLPDALVTITGGFRRGKPMGHDIDFLITNPGPKEDDELLHKVVDLLKKQGLLLYCDIKESTFVEEQLPSRKIDAMDNFQKCFAILKLYQPGVDNSSYNTSKKSDMAEVKDWKAIRVDLVITPFEQYAYALLGWTGSKEFGRDLRRYAEEERGMILDNHGLYDRKKRIFLKAGSEEEIFAHLGLDYVEPWERNA

SEQ ID NO: 1579 - DNA, 1182 bp, synthetic construct
  misc_feature 1..1182: note = Variant of terminal deoxynucleotidyl transferase
  source 1..1182: mol_type = other DNA
atgcaccatcatcatcatcatggcggtagcggccatccgccgagcaataccccggagggggaggtgccgagcgttatcgcccgcaaggttagtcagtacagctgccagcgcaagaccacgctgaataactacaacaaaaagtttaccgacgcgctggagatcatggccgagaactacaaatttaaagagaacctgatcgcgtgtctggaagccaagcgcgccgcgagtattctgaaatatctgccgttcccggttaccagcatgaaagacatccaaggtctgccgtgcattggcgaccaagttcgtgacgtgatcgaggagatcatcgaagagggcgagagcagccgtgttaaagaagttctcaatgacgagcgctacaaggcctttaagcagttcaccagcgtgttcggtgtgggcgtgaaaaccagcgaaaagtggtttcgtatgggcctccgtacggttgaagaggcaaaggccagtaagagtctgaagctgagcaagatgcagaaggcgggcttcctgtattacgaggatctggcgagctgcgttagtaaagcggaagccgatgccgttacgctcatcgtgaagaacacggtgcgtacctttctgccggatgcgctggtgaccatcaccggcggtttccgccgtggcaaacctatgggccacgacatcgactttctgatcacgaatccgggcccgaaagaggatgacgagctgctccacaaagtggttgatctgctcaagaagcaaggtctgctgctgtactgcgacatcaaagagagcacgttcgtggaggaacaactgccaagtcgcaaaatcgacgccatggacaacttccagaagtgcttcgccattctcaagctgtaccagccgggcgtggataacagcagctataacacgagtaagacgagtgacatggccgaggttaaggattggaaagcgattcgtgtggatctggtgatcacgccattcgagcagtacgcctatgcgctgctcggttggacgggcagcaaagaatttggtcgcgatctgcgccgctatgcggaggaagagcgcggcatgatcctcgacaaccatggcctctacgaccgcaaaaagcgcatctttctgaaagcgggcagcgaagaagagattttcgcgcatctgggtctggattatgtggagccgtgggaacgcaacgcg

SEQ ID NO: 1580 - protein, 394 aa, synthetic construct
  REGION 1..394: note = Variant of terminal deoxynucleotidyl transferase
MHHHHHHGGSGHPPSNTPEGEVPSVIARKVSQYSCQRKTTLNNYNKKFTDALEIMAENYKFKENLIACLEAKRAASILKYLPFPVTSMKDIQGLPCIGDQVRDVIEEIIEEGESSRVKEVLNDERYKAFKQFTSVFGVGVKTSEKWFRMGLRTVEEAKASKSLKLSKMQKAGFLYYEDLASCVSKAEADAVTLIVKNTVRTFLPDALVTITGGFRRGKPMGHDIDFLITNPGPKEDDELLHKVVDLLKKQGLLLYCDIKESTFVEEQLPSRKIDAMDNFQKCFAILKLYQPGVDNSSYNTSKTSDMAEVKDWKAIRVDLVITPFEQYAYALLGWTGSKEFGRDLRRYAEEERGMILDNHGLYDRKKRIFLKAGSEEEIFAHLGLDYVEPWERNA

SEQ ID NO: 1581 - DNA, 1182 bp, synthetic construct
  misc_feature 1..1182: note = Variant of terminal deoxynucleotidyl transferase
  source 1..1182: mol_type = other DNA
atgcaccatcatcatcatcatggcggtagcggccatccgccgagcaataccccggagggggaggtgccgagcgttatcgcccgcaaggttagtcagtacagctgccagcgcaagaccacgctgaataactacaacaaaaagtttaccgacgcgctggagatcatggccgagaactacaaatttaaagagaacctgatcgcgtgtctggaagccaagcgcgccgcgagtattctgaaatatctgccgttcccggttaccagcatgaaagacatccaaggtctgccgtgcattggcgaccaagttcgtgacgtgatcgaggagatcatcgaagagggcgagagcagccgtgttaaagaagttctcaatgacgagcgctacaaggcctttaagcagttcaccagcgtgttcggtgtgggcgtgaaaaccagcgaaaagtggtaccgtatgggcctccgtacggttgaagaggcaaaggccagtaagagtctgaagctgagcaagatgcagaaggcgggcttcctgtattacgaggatctggcgagctgcgttagtaaagcggaagccgatgccgttacgctcatcgtgaagaacacggtgcgtacctttctgccggatgcgctggtgaccatcaccggcggtttccgccgtggcaaacctatgggccacgacatcgactttctgatcacgaatccgggcccgaaagaggatgacgagctgctccacaaagtggttgatctgctcaagaagcaaggtctgctgctgtactgcgacatcaaagagagcacgttcgtggaggaacaactgccaagtcgcaaaatcgacgccatggacaacttccagaagtgcttcgccattctcaagctgtaccagccgggcgtggataacagcagctataacacgagtaagaagagtgacatggccgaggttaaggattggaaagcgattcgtgtggatctggtgatcacgccattcgagcagtacgcctatgcgctgctcggttggacgggcagcaaagaatttggtcgcgatctgcgccgctatgcggaggaagagcgcggcatgatcctcgacaaccatggcctctacgaccgcaaaaagcgcatctttctgaaagcgggcagcgaagaagagattttcgcgcatctgggtctggattatgtggagccgtgggaacgcaacgcg

SEQ ID NO: 1582 - protein, 394 aa, synthetic construct
  REGION 1..394: note = Variant of terminal deoxynucleotidyl transferase
MHHHHHHGGSGHPPSNTPEGEVPSVIARKVSQYSCQRKTTLNNYNKKFTDALEIMAENYKFKENLIACLEAKRAASILKYLPFPVTSMKDIQGLPCIGDQVRDVIEEIIEEGESSRVKEVLNDERYKAFKQFTSVFGVGVKTSEKWYRMGLRTVEEAKASKSLKLSKMQKAGFLYYEDLASCVSKAEADAVTLIVKNTVRTFLPDALVTITGGFRRGKPMGHDIDFLITNPGPKEDDELLHKVVDLLKKQGLLLYCDIKESTFVEEQLPSRKIDAMDNFQKCFAILKLYQPGVDNSSYNTSKKSDMAEVKDWKAIRVDLVITPFEQYAYALLGWTGSKEFGRDLRRYAEEERGMILDNHGLYDRKKRIFLKAGSEEEIFAHLGLDYVEPWERNA

SEQ ID NO: 1583 - DNA, 1182 bp, synthetic construct
  misc_feature 1..1182: note = Variant of terminal deoxynucleotidyl transferase
  source 1..1182: mol_type = other DNA
atgcaccatcatcatcatcatggcggtagcggccatccgccgagcaataccccggagggggaggtgccgagcgttatcgcccgcaaggttagtcagtacagctgccagcgcaagaccacgctgaataactacaacaaaaagtttaccgacgcgctggagatcatggccgagaactacaaatttaaagagaacctgatcgcgtgtctggaagccaagcgcgccgcgagtattctgaaatatctgccgttcccggttaccagcatgaaagacatccaaggtctgccgtgcattggcgaccaagttcgtgacgtgatcgaggagatcatcgaagagggcgagagcagccgtgttaaagaagttctcaatgacgagcgctacaaggcctttaagcagttcaccagcgtgttcggtgtgggcgtgaaaaccagcgaaaagtggtttcgtatgggcctccgtacggttgaagaggcaaaggccagtaagagtctgaagctgagcaagatgcagaaggcgggcttcctgtattacgaggatctggcgagctgcgttagtaaagcggaagccgatgccgttacgctcatcgtgaagaacacggtgcgtacctttctgccggatgcgctggtgaccatcaccggcggtttccgccgtggcaaacctatgggccacgacatcgactttctgatcacgaatccgggcccgaaagaggatgacgagctgctccacaaagtggttgatctgctcaagaagcaaggtctgctgctgtactgcgacatcaaagagagcacgttcgtggaggaacaactgccaagtcgcaaaatcgacgccatggacaacttccagaagtgcttcgccattctcaagctgtaccgtccgggcgtggataacagcagctataacacgagtaagaagagtgacatggccgaggttaaggattggaaagcgattcgtgtggatctggtgatcacgccattcgagcagtacgcctatgcgctgctcggttggacgggcagcaaagaatttggtcgcgatctgcgccgctatgcggaggaagagcgcggcatgatcctcgacaaccatggcctctacgaccgcaaaaagcgcatctttctgaaagcgggcagcgaagaagagattttcgcgcatctgggtctggattatgtggagccgtgggaacgcaacgcg

SEQ ID NO: 1584 - protein, 394 aa, synthetic construct
  REGION 1..394: note = Variant of terminal deoxynucleotidyl transferase
MHHHHHHGGSGHPPSNTPEGEVPSVIARKVSQYSCQRKTTLNNYNKKFTDALEIMAENYKFKENLIACLEAKRAASILKYLPFPVTSMKDIQGLPCIGDQVRDVIEEIIEEGESSRVKEVLNDERYKAFKQFTSVFGVGVKTSEKWFRMGLRTVEEAKASKSLKLSKMQKAGFLYYEDLASCVSKAEADAVTLIVKNTVRTFLPDALVTITGGFRRGKPMGHDIDFLITNPGPKEDDELLHKVVDLLKKQGLLLYCDIKESTFVEEQLPSRKIDAMDNFQKCFAILKLYRPGVDNSSYNTSKKSDMAEVKDWKAIRVDLVITPFEQYAYALLGWTGSKEFGRDLRRYAEEERGMILDNHGLYDRKKRIFLKAGSEEEIFAHLGLDYVEPWERNA

SEQ ID NO: 1585 - DNA, 1182 bp, synthetic construct
  misc_feature 1..1182: note = Variant of terminal deoxynucleotidyl transferase
  source 1..1182: mol_type = other DNA
atgcaccatcatcatcatcatggcggtagcggccatccgccgagcaataccccggagggggaggtgccgagcgttatcgccgagaaggttagtcagtacagctgccagcgcaagaccacgctgaataactacaacaaaaagtttaccgacgcgctggagatcatggccgagaactacaaatttaaagagaacctgatcgcgtgtctggaagccaagcgcgccgcgagtattctgaaatatctgccgttcccggttaccagcatgaaagacatccaaggtctgccgtgcattggcgaccaagttcgtgacgtgatcgaggagatcatcgaagagggcgagagcagccgtgttaaagaagttctcaatgacgagcgctacaaggcctttaagcagttcaccagcgtgttcggtgtgggcgtgaaaaccagcgaaaagtggtttcgtatgggcctccgtacggttgaagaggcaaaggccagtaagagtctgaagctgagcaagatgcagaaggcgggcttcctgtattacgaggatctggcgagctgcgttagtaaagcggaagccgatgccgttacgctcatcgtgaagaacacggtgcgtacctttctgccggatgcgctggtgaccatcaccggcggtttccgccgtggcaaacctatgggccacgacatcgactttctgatcacgaatccgggcccgaaagaggatgacgagctgctccacaaagtggttgatctgctcaagaagcaaggtctgctgctgtactgcgacatcaaagagagcacgttcgtggaggaacaactgccaagtcgcaaaatcgacgccatggacaacttccagaagtgcttcgccattctcaagctgtaccagccgggcgtggataacagcagctataacacgagtaagaagagtgacatggccgaggttaaggattggaaagcgattcgtgtggatctggtgatcacgccattcgagcagtacgcctatgcgctgctcggttggacgggcagcaaagaatttggtcgcgatctgcgccgctatgcggaggaagagcgcggcatgatcctcgacaaccatggcctctacgaccgcaaaaagcgcatctttctgaaagcgggcagcgaagaagagattttcgcgcatctgggtctggattatgtggagccgtgggaacgcaacgcg

SEQ ID NO: 1586 - protein, 394 aa, synthetic construct
  REGION 1..394: note = Variant of terminal deoxynucleotidyl transferase
MHHHHHHGGSGHPPSNTPEGEVPSVIAEKVSQYSCQRKTTLNNYNKKFTDALEIMAENYKFKENLIACLEAKRAASILKYLPFPVTSMKDIQGLPCIGDQVRDVIEEIIEEGESSRVKEVLNDERYKAFKQFTSVFGVGVKTSEKWFRMGLRTVEEAKASKSLKLSKMQKAGFLYYEDLASCVSKAEADAVTLIVKNTVRTFLPDALVTITGGFRRGKPMGHDIDFLITNPGPKEDDELLHKVVDLLKKQGLLLYCDIKESTFVEEQLPSRKIDAMDNFQKCFAILKLYQPGVDNSSYNTSKKSDMAEVKDWKAIRVDLVITPFEQYAYALLGWTGSKEFGRDLRRYAEEERGMILDNHGLYDRKKRIFLKAGSEEEIFAHLGLDYVEPWERNA

SEQ ID NO: 1587 - DNA, 1182 bp, synthetic construct
  misc_feature 1..1182: note = Variant of terminal deoxynucleotidyl transferase
  source 1..1182: mol_type = other DNA
atgcaccatcatcatcatcatggcggtagcggccatccgccgagcaataccccggagggggaggtgccgagcgttatcgcccgcaaggttagtcagtacagctgccagcgcaagaccacgctgaataactacaacaaaaagtttaccgacgcgctggagatcatggccgagaactacaaatttaaagagaacctgatcgcgtgtctggaagccaagcgcgccgcgagtattctgaaatatctgccgttcccggttaccagcatgaaagacatccaaggtctgccgtgcattggcgaccaagttcgtgacgtgatcgaggagatcatcgaagagggcgagagcagccgtgttaaagaagttctcaatgacgagcgctacaaggcctttaagcagttcaccagcgtgttcggtgtgggcgtgaaaaccagcgaaaagtggtttcgtatgggcctccgtacggttgaagaggcaaaggccagtaagagtctgaagctgagcaagatgcagaaggcgggcttcctgtattacgaggatctggcgagctgcgttagtaaagcggaagccgatgccgttacgctcatcgtgaagaacacggtgcgtacctttctgccggatgcgctggtgaccatcaccggcggtttccgccgtggcaaacctatgggccacgacatcgactttctgatcacgaatccgggcccgaaagaggatgacgagctgctccacaaagtggttgatctgctcaagaagcaaggtctgctgctgtactgcgacatcaaagagagcacgttcgtggaggaacaactgccaagtcgcaaaatcgacgccatggacaacttccagaagtgcttcgccattctcaagctgtaccagccgggcgtggataacagcagctataacacgagtaaggggagtgacatggccgaggttaaggattggaaagcgattcgtgtggatctggtgatcacgccattcgagcagtacgcctatgcgctgctcggttggacgggcagcaaagaatttggtcgcgatctgcgccgctatgcggaggaagagcgcggcatgatcctcgacaaccatggcctctacgaccgcaaaaagcgcatctttctgaaagcgggcagcgaagaagagattttcgcgcatctgggtctggattatgtggagccgtgggaacgcaacgcg

SEQ ID NO: 1588 - protein, 394 aa, synthetic construct
  REGION 1..394: note = Variant of terminal deoxynucleotidyl transferase
MHHHHHHGGSGHPPSNTPEGEVPSVIARKVSQYSCQRKTTLNNYNKKFTDALEIMAENYKFKENLIACLEAKRAASILKYLPFPVTSMKDIQGLPCIGDQVRDVIEEIIEEGESSRVKEVLNDERYKAFKQFTSVFGVGVKTSEKWFRMGLRTVEEAKASKSLKLSKMQKAGFLYYEDLASCVSKAEADAVTLIVKNTVRTFLPDALVTITGGFRRGKPMGHDIDFLITNPGPKEDDELLHKVVDLLKKQGLLLYCDIKESTFVEEQLPSRKIDAMDNFQKCFAILKLYQPGVDNSSYNTSKGSDMAEVKDWKAIRVDLVITPFEQYAYALLGWTGSKEFGRDLRRYAEEERGMILDNHGLYDRKKRIFLKAGSEEEIFAHLGLDYVEPWERNA

SEQ ID NO: 1589 - DNA, 1182 bp, synthetic construct
  misc_feature 1..1182: note = Variant of terminal deoxynucleotidyl transferase
  source 1..1182: mol_type = other DNA
atgcaccatcatcatcatcatggcggtagcggccatccgccgagcaataccccggagggggaggtgccgagcgttatcgcccgcaaggttagtcagtacagctgccagcgcaagaccacgctgaataactacaacaaaaagtttaccgacgcgctggagatcatggccgagaactacaaatttaaagagaacctgatcgcgtgtctggaagccaagcgcgccgcgagtattctgaaatatctgccgttcccggttaccagcatgaaagacatccaaggtctgccgtgcattggcgaccaagttcgtgacgtgatcgaggagatcatcgaagagggcgagagcagccgtgttaaagaagttctcaatgacgagcgctacaaggcctttaagcagttcaccagcgtgttcggtgtgggcgtgaaaaccagcgaaaagtggtttcgtatgggcctccgtacggttgaagaggcaaaggccagtaagagtctgaagctgagcaagatgcagcgggcgggcttcctgtattacgaggatctggcgagctgcgttagtaaagcggaagccgatgccgttacgctcatcgtgaagaacacggtgcgtacctttctgccggatgcgctggtgaccatcaccggcggtttccgccgtggcaaacctatgggccacgacatcgactttctgatcacgaatccgggcccgaaagaggatgacgagctgctccacaaagtggttgatctgctcaagaagcaaggtctgctgctgtactgcgacatcaaagagagcacgttcgtggaggaacaactgccaagtcgcaaaatcgacgccatggacaacttccagaagtgcttcgccattctcaagctgtaccagccgggcgtggataacagcagctataacacgagtaagaagagtgacatggccgaggttaaggattggaaagcgattcgtgtggatctggtgatcacgccattcgagcagtacgcctatgcgctgctcggttggacgggcagcaaagaatttggtcgcgatctgcgccgctatgcggaggaagagcgcggcatgatcctcgacaaccatggcctctacgaccgcaaaaagcgcatctttctgaaagcgggcagcgaagaagagattttcgcgcatctgggtctggattatgtggagccgtgggaacgcaacgcg

SEQ ID NO: 1590 - protein, 394 aa, synthetic construct
  REGION 1..394: note = Variant of terminal deoxynucleotidyl transferase
MHHHHHHGGSGHPPSNTPEGEVPSVIARKVSQYSCQRKTTLNNYNKKFTDALEIMAENYKFKENLIACLEAKRAASILKYLPFPVTSMKDIQGLPCIGDQVRDVIEEIIEEGESSRVKEVLNDERYKAFKQFTSVFGVGVKTSEKWFRMGLRTVEEAKASKSLKLSKMQRAGFLYYEDLASCVSKAEADAVTLIVKNTVRTFLPDALVTITGGFRRGKPMGHDIDFLITNPGPKEDDELLHKVVDLLKKQGLLLYCDIKESTFVEEQLPSRKIDAMDNFQKCFAILKLYQPGVDNSSYNTSKKSDMAEVKDWKAIRVDLVITPFEQYAYALLGWTGSKEFGRDLRRYAEEERGMILDNHGLYDRKKRIFLKAGSEEEIFAHLGLDYVEPWERNA

SEQ ID NO: 1591 - DNA, 1182 bp, synthetic construct
  misc_feature 1..1182: note = Variant of terminal deoxynucleotidyl transferase
  source 1..1182: mol_type = other DNA
atgcaccatcatcatcatcatggcggtagcggccatccgccgagcaataccccggagggggaggtgccgagcgttatcgcccgcaaggttagtcagtacagctgccagcgcaagaccacgctgaataactacaacaaaaagtttaccgacgcgctggagatcatggccgagaactacaaatttaaagagaacctgatcgcgtgtctggaagccaagcgcgccgcgagtattctgaaatatctgccgttcccggttaccagcatgaaagacatcgaaggtctgccgtgcattggcgaccaagttcgtgacgtgatcgaggagatcatcgaagagggcgagagcagccgtgttaaagaagttctcaatgacgagcgctacaaggcctttaagcagttcaccagcgtgttcggtgtgggcgtgaaaaccagcgaaaagtggtttcgtatgggcctccgtacggttgaagaggcaaaggccagtaagagtctgaagctgagcaagatgcagaaggcgggcttcctgtattacgaggatctggcgagctgcgttagtaaagcggaagccgatgccgttacgctcatcgtgaagaacacggtgcgtacctttctgccggatgcgctggtgaccatcaccggcggtttccgccgtggcaaacctatgggccacgacatcgactttctgatcacgaatccgggcccgaaagaggatgacgagctgctccacaaagtggttgatctgctcaagaagcaaggtctgctgctgtactgcgacatcaaagagagcacgttcgtggaggaacaactgccaagtcgcaaaatcgacgccatggacaacttccagaagtgcttcgccattctcaagctgtaccagccgggcgtggataacagcagctataacacgagtaagaagagtgacatggccgaggttaaggattggaaagcgattcgtgtggatctggtgatcacgccattcgagcagtacgcctatgcgctgctcggttggacgggcagcaaagaatttggtcgcgatctgcgccgctatgcggaggaagagcgcggcatgatcctcgacaaccatggcctctacgaccgcaaaaagcgcatctttctgaaagcgggcagcgaagaagagattttcgcgcatctgggtctggattatgtggagccgtgggaacgcaacgcg

SEQ ID NO: 1592 - protein, 394 aa, synthetic construct
  REGION 1..394: note = Variant of terminal deoxynucleotidyl transferase
MHHHHHHGGSGHPPSNTPEGEVPSVIARKVSQYSCQRKTTLNNYNKKFTDALEIMAENYKFKENLIACLEAKRAASILKYLPFPVTSMKDIEGLPCIGDQVRDVIEEIIEEGESSRVKEVLNDERYKAFKQFTSVFGVGVKTSEKWFRMGLRTVEEAKASKSLKLSKMQKAGFLYYEDLASCVSKAEADAVTLIVKNTVRTFLPDALVTITGGFRRGKPMGHDIDFLITNPGPKEDDELLHKVVDLLKKQGLLLYCDIKESTFVEEQLPSRKIDAMDNFQKCFAILKLYQPGVDNSSYNTSKKSDMAEVKDWKAIRVDLVITPFEQYAYALLGWTGSKEFGRDLRRYAEEERGMILDNHGLYDRKKRIFLKAGSEEEIFAHLGLDYVEPWERNA

SEQ ID NO: 1593 - DNA, 1182 bp, synthetic construct
  misc_feature 1..1182: note = Variant of terminal deoxynucleotidyl transferase
  source 1..1182: mol_type = other DNA
atgcaccatcatcatcatcatggcggtagcggccatccgccgagcaataccccggagggggaggtgccgagcgttatcgcccgcaaggttagtcagtacagctgccagcgcaagaccacgctgaataactacaacaaaaagtttaccgacgcgctggagatcatggccgagaactacaaatttaaagagaacctgatcgcgtgtctggaagccaagcgcgccgcgagtattctgaaatatctgccgttcccggttaccagcatgaaagacatccaaggtctgccgtgcattgcggaccaagttcgtgacgtgatcgaggagatcatcgaagagggcgagagcagccgtgttaaagaagttctcaatgacgagcgctacaaggcctttaagcagttcaccagcgtgttcggtgtgggcgtgaaaaccagcgaaaagtggtttcgtatgggcctccgtacggttgaagaggcaaaggccagtaagagtctgaagctgagcaagatgcagaaggcgggcttcctgtattacgaggatctggcgagctgcgttagtaaagcggaagccgatgccgttacgctcatcgtgaagaacacggtgcgtacctttctgccggatgcgctggtgaccatcaccggcggtttccgccgtggcaaacctatgggccacgacatcgactttctgatcacgaatccgggcccgaaagaggatgacgagctgctccacaaagtggttgatctgctcaagaagcaaggtctgctgctgtactgcgacatcaaagagagcacgttcgtggaggaacaactgccaagtcgcaaaatcgacgccatggacaacttccagaagtgcttcgccattctcaagctgtaccagccgggcgtggataacagcagctataacacgagtaagaagagtgacatggccgaggttaaggattggaaagcgattcgtgtggatctggtgatcacgccattcgagcagtacgcctatgcgctgctcggttggacgggcagcaaagaatttggtcgcgatctgcgccgctatgcggaggaagagcgcggcatgatcctcgacaaccatggcctctacgaccgcaaaaagcgcatctttctgaaagcgggcagcgaagaagagattttcgcgcatctgggtctggattatgtggagccgtgggaacgcaacgcg

SEQ ID NO: 1594 - protein, 394 aa, synthetic construct
  REGION 1..394: note = Variant of terminal deoxynucleotidyl transferase
MHHHHHHGGSGHPPSNTPEGEVPSVIARKVSQYSCQRKTTLNNYNKKFTDALEIMAENYKFKENLIACLEAKRAASILKYLPFPVTSMKDIQGLPCIADQVRDVIEEIIEEGESSRVKEVLNDERYKAFKQFTSVFGVGVKTSEKWFRMGLRTVEEAKASKSLKLSKMQKAGFLYYEDLASCVSKAEADAVTLIVKNTVRTFLPDALVTITGGFRRGKPMGHDIDFLITNPGPKEDDELLHKVVDLLKKQGLLLYCDIKESTFVEEQLPSRKIDAMDNFQKCFAILKLYQPGVDNSSYNTSKKSDMAEVKDWKAIRVDLVITPFEQYAYALLGWTGSKEFGRDLRRYAEEERGMILDNHGLYDRKKRIFLKAGSEEEIFAHLGLDYVEPWERNA

SEQ ID NO: 1595 - DNA, 1182 bp, synthetic construct
  misc_feature 1..1182: note = Variant of terminal deoxynucleotidyl transferase
  source 1..1182: mol_type = other DNA
atgcaccatcatcatcatcatggcggtagcggccatccgccgagcaataccccggagggggaggtgccgagcgttatcgcccgcaaggttagtcagtacagctgccagcgcaagaccacgctgaataactacaacaaaaagtttaccgacgcgctggagatcatggccgagaactacaaatttaaagagaacctgatcgcgtgtctggaagccaagcgcgccgcgagtattctgaaatatctgccgttcgaggttaccagcatgaaagacatccaaggtctgccgtgcattggcgaccaagttcgtgacgtgatcgaggagatcatcgaagagggcgagagcagccgtgttaaagaagttctcaatgacgagcgctacaaggcctttaagcagttcaccagcgtgttcggtgtgggcgtgaaaaccagcgaaaagtggtttcgtatgggcctccgtacggttgaagaggcaaaggccagtaagagtctgaagctgagcaagatgcagaaggcgggcttcctgtattacgaggatctggcgagctgcgttagtaaagcggaagccgatgccgttacgctcatcgtgaagaacacggtgcgtacctttctgccggatgcgctggtgaccatcaccggcggtttccgccgtggcaaacctatgggccacgacatcgactttctgatcactaatccgggcccgaaagaagatgacgagctgctccacaaagtggttgatctgctcaagaagcaaggtctgctgctgtactgcgacatcaaagagagcacgttcgtggaggaacaactgccaagtcgcaaaatcgacgccatggacaacttccagaagtgcttcgccattctcaagctgtaccagccgggcgtggataacagcagctataacacgagtaagaagagtgacatggccgaggttaaggattggaaagcgattcgtgtggatctggtgatcacgccattcgagcagtacgcctatgcgctgctcggttggacgggcagcaaagaatttggtcgcgatctgcgccgctatgcggaggaagagcgcggcatgatcctcgacaaccatggcctctacgaccgcaaaaagcgcatctttctgaaagcgggcagcgaagaagagattttcgcgcatctgggtctggattatgtggagccgtgggaacgcaacgcg

SEQ ID NO: 1596 - protein, 394 aa, synthetic construct
  REGION 1..394: note = Variant of terminal deoxynucleotidyl transferase
MHHHHHHGGSGHPPSNTPEGEVPSVIARKVSQYSCQRKTTLNNYNKKFTDALEIMAENYKFKENLIACLEAKRAASILKYLPFEVTSMKDIQGLPCIGDQVRDVIEEIIEEGESSRVKEVLNDERYKAFKQFTSVFGVGVKTSEKWFRMGLRTVEEAKASKSLKLSKMQKAGFLYYEDLASCVSKAEADAVTLIVKNTVRTFLPDALVTITGGFRRGKPMGHDIDFLITNPGPKEDDELLHKVVDLLKKQGLLLYCDIKESTFVEEQLPSRKIDAMDNFQKCFAILKLYQPGVDNSSYNTSKKSDMAEVKDWKAIRVDLVITPFEQYAYALLGWTGSKEFGRDLRRYAEEERGMILDNHGLYDRKKRIFLKAGSEEEIFAHLGLDYVEPWERNA

SEQ ID NO: 1597 - DNA, 1182 bp, synthetic construct
  misc_feature 1..1182: note = Variant of terminal deoxynucleotidyl transferase
  source 1..1182: mol_type = other DNA
atgcaccatcatcatcatcatggcggtagcggccatccgccgagcaataccccggagggggaggtgccgagcgttatcgcccgcaaggttagtcagtacagctgccagcgcaagaccacgctgaataactacaacaaaaagtttaccgacgcgctggagatcatggccgagaactacaaatttaaagagaacctgatcgcgtgtctggaagccaagcgcgccgcgagtattctgaaatatctgccgttcccggttaccagcatgaaagacatccaaggtctgccgtgcattggcgaccaagttcgtgacgtgatcgaggagatcatcgaagagggcgagagcagccgtgttaaagaagttctcaatgacgagcgctacaaggcctttaagcagttcaccagcgtgttcggtgtgggcgtgaaaaccagcgaaaagtggtttcgtatgggcctccgtacggttgaagaggcaaaggccagtaagagtctgaagctgagcaagatgcagaaggcgggcttcctgtattacgaggatctggcgagctgcgttagtaaagcggaagccgatgccgttacgctcatcgtgaagaacacggtgcgtacctttctgattgatgcgctggtgaccatcaccggcggtttccgccgtggcaaacctatgggccacgacatcgactttctgatcacgaatccgggcccgaaagaggatgacgagctgctccacaaagtggttgatctgctcaagaagcaaggtctgctgctgtactgcgacatcaaagagagcacgttcgtggaggaacaactgccaagtcgcaaaatcgacgccatggacaacttccagaagtgcttcgccattctcaagctgtaccagccgggcgtggataacagcagctataacacgagtaagaagagtgacatggccgaggttaaggattggaaagcgattcgtgtggatctggtgatcacgccattcgagcagtacgcctatgcgctgctcggttggacgggcagcaaagaatttggtcgcgatctgcgccgctatgcggaggaagagcgcggcatgatcctcgacaaccatggcctctacgaccgcaaaaagcgcatctttctgaaagcgggcagcgaagaagagattttcgcgcatctgggtctggattatgtggagccgtgggaacgcaacgcg

SEQ ID NO: 1598 - protein, 394 aa, synthetic construct
  REGION 1..394: note = Variant of terminal deoxynucleotidyl transferase
MHHHHHHGGSGHPPSNTPEGEVPSVIARKVSQYSCQRKTTLNNYNKKFTDALEIMAENYKFKENLIACLEAKRAASILKYLPFPVTSMKDIQGLPCIGDQVRDVIEEIIEEGESSRVKEVLNDERYKAFKQFTSVFGVGVKTSEKWFRMGLRTVEEAKASKSLKLSKMQKAGFLYYEDLASCVSKAEADAVTLIVKNTVRTFLIDALVTITGGFRRGKPMGHDIDFLITNPGPKEDDELLHKVVDLLKKQGLLLYCDIKESTFVEEQLPSRKIDAMDNFQKCFAILKLYQPGVDNSSYNTSKKSDMAEVKDWKAIRVDLVITPFEQYAYALLGWTGSKEFGRDLRRYAEEERGMILDNHGLYDRKKRIFLKAGSEEEIFAHLGLDYVEPWERNA

SEQ ID NO: 1599 - DNA, 1182 bp, synthetic construct
  misc_feature 1..1182: note = Variant of terminal deoxynucleotidyl transferase
  source 1..1182: mol_type = other DNA
atgcaccatcatcatcatcatggcggtagcggccatccgccgagcaataccccggagggggaggtgccgagcgttatcgcccgcaaggttagtcagtacagctgccagcgcaagaccacgctgaataactacaacaaaaagtttaccgacgcgctggagatcatggccgagaactacaaatttaaagagaacctgatcgcgtgtctggaagccaagcgcgccgcgagtattctgaaatatctgccgttcccggttaccagcatgaaagacatccaaggtctgccgtgcattggcgaccaagttcgtgacgtgatcgaggagatcatcgaagagggcgagagcagccgtgttaaagaagttctcaatgacgagcgctacaaggcctttaagcagttcaccagcgtgttcggtgtgggcgtgaaaaccagcgaaaagtggtttcgtatgggcctccgtacggttgaagaggcaaaggccagtaagagtctgaagctgagcaagatgcagaaggcgggcttcctgtattacgaggatctggcgagctgcgttagtaaagcggaagccgatgccgttacgctcatcgtgaagaacacggtgcgtacctttctgccggatgcgctggtgaccatcaccggcggtttccgccgtggcaaacctatgggccacgacatcgactttctgatcacgaatccgggcccgaaagaggatgacgagctgctccacaaagtggttgatctgctcaagaagcaaggtctgctgctgtactgcgacatcaaagagagcacgttcgtggaggaacaactgccaagtcgcaaaatcgacgccatggacaacttccagaagtgcttcgccattctcaagctgtaccagccgggcgtggataacagcgcttataacacgagtaagaagagtgacatggccgaggttaaggattggaaagcgattcgtgtggatctggtgatcacgccattcgagcagtacgcctatgcgctgctcggttggacgggcagcaaagaatttggtcgcgatctgcgccgctatgcggaggaagagcgcggcatgatcctcgacaaccatggcctctacgaccgcaaaaagcgcatctttctgaaagcgggcagcgaagaagagattttcgcgcatctgggtctggattatgtggagccgtgggaacgcaacgcg

SEQ ID NO: 1600 - protein, 394 aa, synthetic construct
  REGION 1..394: note = Variant of terminal deoxynucleotidyl transferase
MHHHHHHGGSGHPPSNTPEGEVPSVIARKVSQYSCQRKTTLNNYNKKFTDALEIMAENYKFKENLIACLEAKRAASILKYLPFPVTSMKDIQGLPCIGDQVRDVIEEIIEEGESSRVKEVLNDERYKAFKQFTSVFGVGVKTSEKWFRMGLRTVEEAKASKSLKLSKMQKAGFLYYEDLASCVSKAEADAVTLIVKNTVRTFLPDALVTITGGFRRGKPMGHDIDFLITNPGPKEDDELLHKVVDLLKKQGLLLYCDIKESTFVEEQLPSRKIDAMDNFQKCFAILKLYQPGVDNSAYNTSKKSDMAEVKDWKAIRVDLVITPFEQYAYALLGWTGSKEFGRDLRRYAEEERGMILDNHGLYDRKKRIFLKAGSEEEIFAHLGLDYVEPWERNA

SEQ ID NO: 1601 - DNA, 1182 bp, synthetic construct
  misc_feature 1..1182: note = Variant of terminal deoxynucleotidyl transferase
  source 1..1182: mol_type = other DNA
atgcaccatcatcatcatcatggcggtagcggccatccgccgagcaataccccggagggggaggtgccgagcgttatcgcccgcaaggttagtcagtacagctgccagcgcaagaccacgctgaataactacaacaaaaagtttaccgacgcgctggagatcatggccgagaactacaaatttaaagagaacctgatcgcgtgtctggaagccaagcgcgccgcgagtattctgaaatatctgccgttcccggttaccagcatgaaagacatccaaggtctgccgtgcattggcgaccaagttcgtgacgtgatcgaggagatcatcgaagagggcgagagcagccgtgttaaagaagttctcaatgacgagcgctacaaggcctttaagcagttcaccagcgtgttcggtgtgggcgtgaaaaccagcgaaaagtggtttcgtatgggcctccgtacggttgaagaggcaaaggccagtaagagtctgaagctgagcaagatgcagaaggcgggcttcctgtattacgaggatctggcgagctgcgttagtaaagcggaagccgatgccgttacgctcatcgtgaagaacacggtgcgtacctttctgccggatgcgctggtgaccatcaccggcggtttccgccgtggcaaacctatgggccacgacatcgactttctgatcacgaatccgggcccgaaagaggatgacgagctgctccacaaagtggttgatctgctcaagaagcaaggtctgcttctgtactgcgacatcaaagagagcacgttcgtggaggaacaactgccaagtcgcaaaatcgacgccatggacaacttccagaagtgcttcgccattctcaagctgtaccagccgggcgtggataacagcagctataacacgagtaagaagagtgacatggccgaggttaaggattggaaagcgattcgtgtggatctggtgatcacgccattcgagcagtacgcctatgcgctgctcggttggacgggcagcaaagaatttggtcgcgatctgcgccgctatgcggaggaagagcgcggcatgatcctcgacaaccatggcctctacgaccgcaaaaagcgcatctttctgaaagcgggcagcgaagaagagattttcgcgcatctgggtctggattatgtggagccgtgggaacgcaacgcg

SEQ ID NO: 1602 - protein, 394 aa, synthetic construct; identical to SEQ ID NO: 1346
  REGION 1..394: note = Variant of terminal deoxynucleotidyl transferase

SEQ ID NO: 1603 - DNA, 1182 bp, synthetic construct
  misc_feature 1..1182: note = Variant of terminal deoxynucleotidyl transferase
  source 1..1182: mol_type = other DNA
atgcaccatcatcatcatcatggcggtagcggccatccgccgagcaataccccggagggggaggtgccgagcgttatcgcccgcaaggttagtcagtacagctgccagcgcaagaccacgctgaataactacaacaaaaagtttaccgacgcgctggagatcatggccgagaactacaaatttaaagagaacctgatcgcgtgtctggaagccaagcgcgccgcgagtattctgaaatatctgccgttcccggttaccagcatgaaagacatccaaggtctgccgtgcattggcgaccaagttcgtgacgtgatcgaggagatcatcgaagagggcgagagcagccgtgttaaagaagttctcaatgacgagcgctacaaggcctttaagcagttcaccagcgtgttcggtgtgggcgtgaaaaccagcgaaaagtggtttcgtatgggcctccgtacggttgaagaggcaaaggccagtaagagtctgaagctgagcaagatgcagaaggcgggcttcctgtattacgaggatctggcgagctgcgttagtaaagcggaagccgatgccgttacgctcatcgtgaaggagacggtgcgtacctttctgccggatgcgctggtgaccatcaccggcggtttccgccgtggcaaacctatgggccacgacatcgactttctgatcacgaatccgggcccgaaagaggatgacgagctgctccacaaagtggttgatctgctcaagaagcaaggtctgctgctgtactgcgacatcaaagagagcacgttcgtggaggaacaactgccaagtcgcaaaatcgacgccatggacaacttccagaagtgcttcgccattctcaagctgtaccagccgggcgtggataacagcagctataacacgagtaagaagagtgacatggccgaggttaaggattggaaagcgattcgtgtggatctggtgatcacgccattcgagcagtacgcctatgcgctgctcggttggacgggcagcaaagaatttggtcgcgatctgcgccgctatgcggaggaagagcgcggcatgatcctcgacaaccatggcctctacgaccgcaaaaagcgcatctttctgaaagcgggcagcgaagaagagattttcgcgcatctgggtctggattatgtggagccgtgggaacgcaacgcg

SEQ ID NO: 1604 - protein, 394 aa, synthetic construct
  REGION 1..394: note = Variant of terminal deoxynucleotidyl transferase
MHHHHHHGGSGHPPSNTPEGEVPSVIARKVSQYSCQRKTTLNNYNKKFTDALEIMAENYKFKENLIACLEAKRAASILKYLPFPVTSMKDIQGLPCIGDQVRDVIEEIIEEGESSRVKEVLNDERYKAFKQFTSVFGVGVKTSEKWFRMGLRTVEEAKASKSLKLSKMQKAGFLYYEDLASCVSKAEADAVTLIVKETVRTFLPDALVTITGGFRRGKPMGHDIDFLITNPGPKEDDELLHKVVDLLKKQGLLLYCDIKESTFVEEQLPSRKIDAMDNFQKCFAILKLYQPGVDNSSYNTSKKSDMAEVKDWKAIRVDLVITPFEQYAYALLGWTGSKEFGRDLRRYAEEERGMILDNHGLYDRKKRIFLKAGSEEEIFAHLGLDYVEPWERNA

SEQ ID NO: 1605 - DNA, 1182 bp, synthetic construct
  misc_feature 1..1182: note = Variant of terminal deoxynucleotidyl transferase
  source 1..1182: mol_type = other DNA
atgcaccatcatcatcatcatggcggtagcggccatccgccgagcaataccccggagggggaggtgccgagcgttatcgcccgcaaggttagtcagtacagctgccagcgcaagaccacgctgaataactacaacaaaaagtttaccgacgcgctggagatcatggccgagaactacaaatttaaagagaacctgatcgcgtgtctggaagccaagcgcgccgcgagtattctgaaatatctgccgttcccggttaccagcatgaaagacatccaaggtctgccgtgcattactgaccaagttcgtgacgtgatcgaggagatcatcgaagagggcgagagcagccgtgttaaagaagttctcaatgacgagcgctacaaggcctttaagcagttcaccagcgtgttcggtgtgggcgtgaaaaccagcgaaaagtggtttcgtatgggcctccgtacggttgaagaggcaaaggccagtaagagtctgaagctgagcaagatgcagaaggcgggcttcctgtattacgaggatctggcgagctgcgttagtaaagcggaagccgatgccgttacgctcatcgtgaagaacacggtgcgtacctttctgccggatgcgctggtgaccatcaccggcggtttccgccgtggcaaacctatgggccacgacatcgactttctgatcacgaatccgggcccgaaagaggatgacgagctgctccacaaagtggttgatctgctcaagaagcaaggtctgctgctgtactgcgacatcaaagagagcacgttcgtggaggaacaactgccaagtcgcaaaatcgacgccatggacaacttccagaagtgcttcgccattctcaagctgtaccagccgggcgtggataacagcagctataacacgagtaagaagagtgacatggccgaggttaaggattggaaagcgattcgtgtggatctggtgatcacgccattcgagcagtacgcctatgcgctgctcggttggacgggcagcaaagaatttggtcgcgatctgcgccgctatgcggaggaagagcgcggcatgatcctcgacaaccatggcctctacgaccgcaaaaagcgcatctttctgaaagcgggcagcgaagaagagattttcgcgcatctgggtctggattatgtggagccgtgggaacgcaacgcg

SEQ ID NO: 1606 - protein, 394 aa, synthetic construct
  REGION 1..394: note = Variant of terminal deoxynucleotidyl transferase
MHHHHHHGGSGHPPSNTPEGEVPSVIARKVSQYSCQRKTTLNNYNKKFTDALEIMAENYKFKENLIACLEAKRAASILKYLPFPVTSMKDIQGLPCITDQVRDVIEEIIEEGESSRVKEVLNDERYKAFKQFTSVFGVGVKTSEKWFRMGLRTVEEAKASKSLKLSKMQKAGFLYYEDLASCVSKAEADAVTLIVKNTVRTFLPDALVTITGGFRRGKPMGHDIDFLITNPGPKEDDELLHKVVDLLKKQGLLLYCDIKESTFVEEQLPSRKIDAMDNFQKCFAILKLYQPGVDNSSYNTSKKSDMAEVKDWKAIRVDLVITPFEQYAYALLGWTGSKEFGRDLRRYAEEERGMILDNHGLYDRKKRIFLKAGSEEEIFAHLGLDYVEPWERNA

SEQ ID NO: 1607 - DNA, 1182 bp, synthetic construct
  misc_feature 1..1182: note = Variant of terminal deoxynucleotidyl transferase
  source 1..1182: mol_type = other DNA
atgcaccatcatcatcatcatggcggtagcggccatccgccgagcaataccccggagggggaggtgccgagcgttatcgcccgcaaggttagtcagtacagctgccagcgcaagaccacgctgaataactacaacaaaaagtttaccgacgcgctggagatcatggccgagaactacaaatttaaagagaacctgatcgcgtgtctggaagccaagcgcgccgcgagtattctgaaatatctgccgttcccggttaccagcatgaaagacatccaaggtctgccgtgcattggcgaccaagttcgtgacgtgatcgaggagatcatcgaagagggcgagagcagccgtgttaaagaagttctcaatgacgagcgctacaaggcctttaagcagttcaccagcgtgttcggtgtgggcgtgaaaaccagcgaaaagtggtttcgtatgggcctccgtacggttgaagaggcaaaggccagtaagagtctgaagctgagcaagatgcagaaggcgggcttcctgtattacgaggatctggcgagctgcgttagtaaagcggaagccgatgccgttacggtgatcgtgaagaacacggtgcgtacctttctgccggatgcgctggtgaccatcaccggcggtttccgccgtggcaaacctatgggccacgacatcgactttctgatcacgaatccgggcccgaaagaggatgacgagctgctccacaaagtggttgatctgctcaagaagcaaggtctgctgctgtactgcgacatcaaagagagcacgttcgtggaggaacaactgccaagtcgcaaaatcgacgccatggacaacttccagaagtgcttcgccattctcaagctgtaccagccgggcgtggataacagcagctataacacgagtaagaagagtgacatggccgaggttaaggattggaaagcgattcgtgtggatctggtgatcacgccattcgagcagtacgcctatgcgctgctcggttggacgggcagcaaagaatttggtcgcgatctgcgccgctatgcggaggaagagcgcggcatgatcctcgacaaccatggcctctacgaccgcaaaaagcgcatctttctgaaagcgggcagcgaagaagagattttcgcgcatctgggtctggattatgtggagccgtgggaacgcaacgcg

SEQ ID NO: 1608 - protein, 394 aa, synthetic construct
  REGION 1..394: note = Variant of terminal deoxynucleotidyl transferase
MHHHHHHGGSGHPPSNTPEGEVPSVIARKVSQYSCQRKTTLNNYNKKFTDALEIMAENYKFKENLIACLEAKRAASILKYLPFPVTSMKDIQGLPCIGDQVRDVIEEIIEEGESSRVKEVLNDERYKAFKQFTSVFGVGVKTSEKWFRMGLRTVEEAKASKSLKLSKMQKAGFLYYEDLASCVSKAEADAVTVIVKNTVRTFLPDALVTITGGFRRGKPMGHDIDFLITNPGPKEDDELLHKVVDLLKKQGLLLYCDIKESTFVEEQLPSRKIDAMDNFQKCFAILKLYQPGVDNSSYNTSKKSDMAEVKDWKAIRVDLVITPFEQYAYALLGWTGSKEFGRDLRRYAEEERGMILDNHGLYDRKKRIFLKAGSEEEIFAHLGLDYVEPWERNA

SEQ ID NO: 1609 - DNA, 1182 bp, synthetic construct
  misc_feature 1..1182: note = Variant of terminal deoxynucleotidyl transferase
  source 1..1182: mol_type = other DNA
atgcaccatcatcatcatcatggcggtagcggccatccgccgagcaataccccggagggggaggtgccgagcgttatcgcccgcaaggttagtcagtacagctgccagcgcaagaccacgctgaataactacaacaaaaagtttaccgacgcgctggagatcatggccgagaactacaaatttaaagagaacctgatcgcgtgtctggaagccaagcgcgccgcgagtattctgaaatatctgccgttcccggttaccagcatgaaagacatccaaggtctgccgtgcattggcgaccaagttcgtgacgtgatcgaggagatcatcgaagagggcgagagcagccgtgttaaagaagttctcaatgacgagcgctacaaggcctttaagcagttcaccagcgtgttcggtgtgggcgtgaaaaccagcgaaaagtggtttcgtatgggcctccgtacggttgaagaggcaaaggccagtaagagtctgaagctgagcaagatgcagaaggcgggcttcctgtattacgaggatctggcgagctgcgttagtaaagcggaagccgatgccgttacgctcatcgtgaagaacacggtgcgtacctttctgtttgatgcgctggtgaccatcaccggcggtttccgccgtggcaaacctatgggccacgacatcgactttctgatcacgaatccgggcccgaaagaggatgacgagctgctccacaaagtggttgatctgctcaagaagcaaggtctgctgctgtactgcgacatcaaagagagcacgttcgtggaggaacaactgccaagtcgcaaaatcgacgccatggacaacttccagaagtgcttcgccattctcaagctgtaccagccgggcgtggataacagcagctataacacgagtaagaagagtgacatggccgaggttaaggattggaaagcgattcgtgtggatctggtgatcacgccattcgagcagtacgcctatgcgctgctcggttggacgggcagcaaagaatttggtcgcgatctgcgccgctatgcggaggaagagcgcggcatgatcctcgacaaccatggcctctacgaccgcaaaaagcgcatctttctgaaagcgggcagcgaagaagagattttcgcgcatctgggtctggattatgtggagccgtgggaacgcaacgcg

SEQ ID NO: 1610 - protein, 394 aa, synthetic construct
  REGION 1..394: note = Variant of terminal deoxynucleotidyl transferase
MHHHHHHGGSGHPPSNTPEGEVPSVIARKVSQYSCQRKTTLNNYNKKFTDALEIMAENYKFKENLIACLEAKRAASILKYLPFPVTSMKDIQGLPCIGDQVRDVIEEIIEEGESSRVKEVLNDERYKAFKQFTSVFGVGVKTSEKWFRMGLRTVEEAKASKSLKLSKMQKAGFLYYEDLASCVSKAEADAVTLIVKNTVRTFLFDALVTITGGFRRGKPMGHDIDFLITNPGPKEDDELLHKVVDLLKKQGLLLYCDIKESTFVEEQLPSRKIDAMDNFQKCFAILKLYQPGVDNSSYNTSKKSDMAEVKDWKAIRVDLVITPFEQYAYALLGWTGSKEFGRDLRRYAEEERGMILDNHGLYDRKKRIFLKAGSEEEIFAHLGLDYVEPWERNA

SEQ ID NO: 1611 - DNA, 1182 bp, synthetic construct
  misc_feature 1..1182: note = Variant of terminal deoxynucleotidyl transferase
  source 1..1182: mol_type = other DNA
atgcaccatcatcatcatcatggcggtagcggccatccgccgagcaataccccggagggggaggtgccgagcgttatcgcccgcaaggttagtcagtacagctgccagcgcaagaccacgctgaataactacaacaaaaagtttaccgacgcgctggagatcatggccgagaactacaaatttaaagagaacctgatcgcgtgtctggaagccaagcgcgccgcgagtattctgaaatatctgccgttcccggttaccagcatgaaagacatccaaggtctgccgtgcattggcgaccaagttcgtgacgtgatcgaggagatcatcgaagagggcgagagcagccgtgttaaagaagttctcaatgacgagcgctacaaggcctttaagcagttcaccagcgtgttcggtgtgggcgtgaaaaccagcgaaaagtggtttcgtatgggcctccgtacggttgaagaggcaaaggccagtaagagtctgaagctgagcaagatgcagaaggcgggcttcctgtattacgaggatctggcgagctgcgttagtaaagcggaagccgatgccgttacgagtatcgtgaagaacacggtgcgtacctttctgccggatgcgctggtgaccatcaccggcggtttccgccgtggcaaacctatgggccacgacatcgactttctgatcacgaatccgggcccgaaagaggatgacgagctgctccacaaagtggttgatctgctcaagaagcaaggtctgctgctgtactgcgacatcaaagagagcacgttcgtggaggaacaactgccaagtcgcaaaatcgacgccatggacaacttccagaagtgcttcgccattctcaagctgtaccagccgggcgtggataacagcagctataacacgagtaagaagagtgacatggccgaggttaaggattggaaagcgattcgtgtggatctggtgatcacgccattcgagcagtacgcctatgcgctgctcggttggacgggcagcaaagaatttggtcgcgatctgcgccgctatgcggaggaagagcgcggcatgatcctcgacaaccatggcctctacgaccgcaaaaagcgcatctttctgaaagcgggcagcgaagaagagattttcgcgcatctgggtctggattatgtggagccgtgggaacgcaacgcg

SEQ ID NO: 1612 - protein, 394 aa, synthetic construct
  REGION 1..394: note = Variant of terminal deoxynucleotidyl transferase
MHHHHHHGGSGHPPSNTPEGEVPSVIARKVSQYSCQRKTTLNNYNKKFTDALEIMAENYKFKENLIACLEAKRAASILKYLPFPVTSMKDIQGLPCIGDQVRDVIEEIIEEGESSRVKEVLNDERYKAFKQFTSVFGVGVKTSEKWFRMGLRTVEEAKASKSLKLSKMQKAGFLYYEDLASCVSKAEADAVTSIVKNTVRTFLPDALVTITGGFRRGKPMGHDIDFLITNPGPKEDDELLHKVVDLLKKQGLLLYCDIKESTFVEEQLPSRKIDAMDNFQKCFAILKLYQPGVDNSSYNTSKKSDMAEVKDWKAIRVDLVITPFEQYAYALLGWTGSKEFGRDLRRYAEEERGMILDNHGLYDRKKRIFLKAGSEEEIFAHLGLDYVEPWERNA

SEQ ID NO: 1613 - DNA, 1182 bp, synthetic construct
  misc_feature 1..1182: note = Variant of terminal deoxynucleotidyl transferase
  source 1..1182: mol_type = other DNA
atgcaccatcatcatcatcatggcggtagcggccatccgccgagcaataccccggagggggaggtgccgagcgttatcgcccgcaaggttagtcagtacagctgccagcgcaagaccacgctgaataactacaacaaaaagtttaccgacgcgctggagatcatggccgagaactacaaatttaaagagaacctgatcgcgtgtctggaagccaagcgcgccgcgagtattctgaaatatctgccgttcccggttaccagcatgaaagacatccaaggtctgccgtgcattggcgaccaagttcgtgacgtgatcgaggagatcatcgaagagggcgagagcagccgtgttaaagaagttctcaatgacgagcgctacaaggcctttaagcagttcaccagcgtgttcggtgtgggcgtgaaaaccagcgaaaagtggtttcgtatgggcctccgtacggttgaagaggcaaaggccagtaaggctctgaagctgagcaagatgcagaaggcgggcttcctgtattacgaggatctggcgagctgcgttagtaaagcggaagccgatgccgttacgctcatcgtgaagaacacggtgcgtacctttctgccggatgcgctggtgaccatcaccggcggtttccgccgtggcaaacctatgggccacgacatcgactttctgatcacgaatccgggcccgaaagaggatgacgagctgctccacaaagtggttgatctgctcaagaagcaaggtctgctgctgtactgcgacatcaaagagagcacgttcgtggaggaacaactgccaagtcgcaaaatcgacgccatggacaacttccagaagtgcttcgccattctcaagctgtaccagccgggcgtggataacagcagctataacacgagtaagaagagtgacatggccgaggttaaggattggaaagcgattcgtgtggatctggtgatcacgccattcgagcagtacgcctatgcgctgctcggttggacgggcagcaaagaatttggtcgcgatctgcgccgctatgcggaggaagagcgcggcatgatcctcgacaaccatggcctctacgaccgcaaaaagcgcatctttctgaaagcgggcagcgaagaagagattttcgcgcatctgggtctggattatgtggagccgtgggaacgcaacgcg

SEQ ID NO: 1614 - protein, 394 aa, synthetic construct
  REGION 1..394: note = Variant of terminal deoxynucleotidyl transferase
MHHHHHHGGSGHPPSNTPEGEVPSVIARKVSQYSCQRKTTLNNYNKKFTDALEIMAENYKFKENLIACLEAKRAASILKYLPFPVTSMKDIQGLPCIGDQVRDVIEEIIEEGESSRVKEVLNDERYKAFKQFTSVFGVGVKTSEKWFRMGLRTVEEAKASKALKLSKMQKAGFLYYEDLASCVSKAEADAVTLIVKNTVRTFLPDALVTITGGFRRGKPMGHDIDFLITNPGPKEDDELLHKVVDLLKKQGLLLYCDIKESTFVEEQLPSRKIDAMDNFQKCFAILKLYQPGVDNSSYNTSKKSDMAEVKDWKAIRVDLVITPFEQYAYALLGWTGSKEFGRDLRRYAEEERGMILDNHGLYDRKKRIFLKAGSEEEIFAHLGLDYVEPWERNA

SEQ ID NO: 1615 - DNA, 1182 bp, synthetic construct
  misc_feature 1..1182: note = Variant of terminal deoxynucleotidyl transferase
  source 1..1182: mol_type = other DNA
atgcaccatcatcatcatcatggcggtagcggccatccgccgagcaataccccggagggggaggtgccgagcgttatcgcccgcaaggttagtcagtacagctgccagcgcaagaccacgctgaataactacaacaaaaagtttaccgacgcgctggagatcatggccgagaactacaaatttaaagagaacctgatcgcgtgtctggaagccaagcgcgccgcgagtattctgaaatatctgccgttcccggttaccagcatgaaagacatccaaggtctgccgtgcattggcgaccaagttcgtgacgtgatcgaggagatcatcgaagagggcgagagcagccgtgttaaagaagttctcaatgacgagcgctacaaggcctttaagcagttcaccagcgtgttcggtgtgggcgtgaaaaccagcgaaaagtggtttcgtatgggcctccgtacggttgaagaggcaaaggccagtaagagtctgaagctgagcaagatgcagaaggcgggcttcctgtattacgaggatctggcgagctgcgttagtcgtgcggaagccgatgccgttacgctcatcgtgaagaacacggtgcgtacctttctgccggatgcgctggtgaccatcaccggcggtttccgccgtggcaaacctatgggccacgacatcgactttctgatcacgaatccgggcccgaaagaggatgacgagctgctccacaaagtggttgatctgctcaagaagcaaggtctgctgctgtactgcgacatcaaagagagcacgttcgtggaggaacaactgccaagtcgcaaaatcgacgccatggacaacttccagaagtgcttcgccattctcaagctgtaccagccgggcgtggataacagcagctataacacgagtaagaagagtgacatggccgaggttaaggattggaaagcgattcgtgtggatctggtgatcacgccattcgagcagtacgcctatgcgctgctcggttggacgggcagcaaagaatttggtcgcgatctgcgccgctatgcggaggaagagcgcggcatgatcctcgacaaccatggcctctacgaccgcaaaaagcgcatctttctgaaagcgggcagcgaagaagagattttcgcgcatctgggtctggattatgtggagccgtgggaacgcaacgcg

SEQ ID NO: 1616 - protein, 394 aa, synthetic construct
  REGION 1..394: note = Variant of terminal deoxynucleotidyl transferase
MHHHHHHGGSGHPPSNTPEGEVPSVIARKVSQYSCQRKTTLNNYNKKFTDALEIMAENYKFKENLIACLEAKRAASILKYLPFPVTSMKDIQGLPCIGDQVRDVIEEIIEEGESSRVKEVLNDERYKAFKQFTSVFGVGVKTSEKWFRMGLRTVEEAKASKSLKLSKMQKAGFLYYEDLASCVSRAEADAVTLIVKNTVRTFLPDALVTITGGFRRGKPMGHDIDFLITNPGPKEDDELLHKVVDLLKKQGLLLYCDIKESTFVEEQLPSRKIDAMDNFQKCFAILKLYQPGVDNSSYNTSKKSDMAEVKDWKAIRVDLVITPFEQYAYALLGWTGSKEFGRDLRRYAEEERGMILDNHGLYDRKKRIFLKAGSEEEIFAHLGLDYVEPWERNA

SEQ ID NO: 1617 - DNA, 1182 bp, synthetic construct
  misc_feature 1..1182: note = Variant of terminal deoxynucleotidyl transferase
  source 1..1182: mol_type = other DNA
atgcaccatcatcatcatcatggcggtagcggccatccgccgagcaataccccggagggggaggtgccgagcgttatcgcccgcaaggttagtcagtacagctgccagcgcaagaccacgctgaataactacaacaaaaagtttaccgacgcgctggagatcatggccgagaactacaaatttaaagagaacctgatcgcgtgtctggaagccaagcgcgccgcgagtattctgaaatatctgccgttcccggttaccagcatgaaagacatccaaggtctgccgtgcattggcgaccaagttcgtgacgtgatcgaggagatcatcttggagggcgagagcagccgtgttaaagaagttctcaatgacgagcgctacaaggcctttaagcagttcaccagcgtgttcggtgtgggcgtgaaaaccagcgaaaagtggtttcgtatgggcctccgtacggttgaagaggcaaaggccagtaagagtctgaagctgagcaagatgcagaaggcgggcttcctgtattacgaggatctggcgagctgcgttagtaaagcggaagccgatgccgttacgctcatcgtgaagaacacggtgcgtacctttctgccggatgcgctggtgaccatcaccggcggtttccgccgtggcaaacctatgggccacgacatcgactttctgatcacgaatccgggcccgaaagaggatgacgagctgctccacaaagtggttgatctgctcaagaagcaaggtctgctgctgtactgcgacatcaaagagagcacgttcgtggaggaacaactgccaagtcgcaaaatcgacgccatggacaacttccagaagtgcttcgccattctcaagctgtaccagccgggcgtggataacagcagctataacacgagtaagaagagtgacatggccgaggttaaggattggaaagcgattcgtgtggatctggtgatcacgccattcgagcagtacgcctatgcgctgctcggttggacgggcagcaaagaatttggtcgcgatctgcgccgctatgcggaggaagagcgcggcatgatcctcgacaaccatggcctctacgaccgcaaaaagcgcatctttctgaaagcgggcagcgaagaagagattttcgcgcatctgggtctggattatgtggagccgtgggaacgcaacgcg

SEQ ID NO: 1618 - protein, 394 aa, synthetic construct
  REGION 1..394: note = Variant of terminal deoxynucleotidyl transferase
MHHHHHHGGSGHPPSNTPEGEVPSVIARKVSQYSCQRKTTLNNYNKKFTDALEIMAENYKFKENLIACLEAKRAASILKYLPFPVTSMKDIQGLPCIGDQVRDVIEEIILEGESSRVKEVLNDERYKAFKQFTSVFGVGVKTSEKWFRMGLRTVEEAKASKSLKLSKMQKAGFLYYEDLASCVSKAEADAVTLIVKNTVRTFLPDALVTITGGFRRGKPMGHDIDFLITNPGPKEDDELLHKVVDLLKKQGLLLYCDIKESTFVEEQLPSRKIDAMDNFQKCFAILKLYQPGVDNSSYNTSKKSDMAEVKDWKAIRVDLVITPFEQYAYALLGWTGSKEFGRDLRRYAEEERGMILDNHGLYDRKKRIFLKAGSEEEIFAHLGLDYVEPWERNA

SEQ ID NO: 1619 - DNA, 1182 bp, synthetic construct
  misc_feature 1..1182: note = Variant of terminal deoxynucleotidyl transferase
  source 1..1182: mol_type = other DNA
atgcaccatcatcatcatcatggcggtagcggccatccgccgagcaataccccggagggggaggtgccgagcgttatcgcccgcaaggttagtcagtacagctgccagcgcaagaccacgctgaataactacaacaaaaagtttaccgacgcgctggagatcatggccgagaactacaaatttaaagagaacctgatcgcgtgtctggaagccaagcgcgccgcgagtattctgaaatatctgccgttcccggttaccagcatgaaagacatccaaggtctgccgtgcattggcgaccaagttcgtgacgtgatcgaggagatcatcgaagagggcgagagcagccgtgttaaagaagttctcaatgacgagcgctacaaggcctttaagcagttcaccagcgtgttcggtgtgggcgtgaaaaccgctgaaaagtggtttcgtatgggcctccgtacggttgaagaggcaaaggccagtaagagtctgaagctgagcaagatgcagaaggcgggcttcctgtattacgaggatctggcgagctgcgttagtaaagcggaagccgatgccgttacgctcatcgtgaagaacacggtgcgtacctttctgccggatgcgctggtgaccatcaccggcggtttccgccgtggcaaacctatgggccacgacatcgactttctgatcacgaatccgggcccgaaagaggatgacgagctgctccacaaagtggttgatctgctcaagaagcaaggtctgctgctgtactgcgacatcaaagagagcacgttcgtggaggaacaactgccaagtcgcaaaatcgacgccatggacaacttccagaagtgcttcgccattctcaagctgtaccagccgggcgtggataacagcagctataacacgagtaagaagagtgacatggccgaggttaaggattggaaagcgattcgtgtggatctggtgatcacgccattcgagcagtacgcctatgcgctgctcggttggacgggcagcaaagaatttggtcgcgatctgcgccgctatgcggaggaagagcgcggcatgatcctcgacaaccatggcctctacgaccgcaaaaagcgcatctttctgaaagcgggcagcgaagaagagattttcgcgcatctgggtctggattatgtggagccgtgggaacgcaacgcg

SEQ ID NO: 1620 - protein, 394 aa, synthetic construct
  REGION 1..394: note = Variant of terminal deoxynucleotidyl transferase
MHHHHHHGGSGHPPSNTPEGEVPSVIARKVSQYSCQRKTTLNNYNKKFTDALEIMAENYKFKENLIACLEAKRAASILKYLPFPVTSMKDIQGLPCIGDQVRDVIEEIIEEGESSRVKEVLNDERYKAFKQFTSVFGVGVKTAEKWFRMGLRTVEEAKASKSLKLSKMQKAGFLYYEDLASCVSKAEADAVTLIVKNTVRTFLPDALVTITGGFRRGKPMGHDIDFLITNPGPKEDDELLHKVVDLLKKQGLLLYCDIKESTFVEEQLPSRKIDAMDNFQKCFAILKLYQPGVDNSSYNTSKKSDMAEVKDWKAIRVDLVITPFEQYAYALLGWTGSKEFGRDLRRYAEEERGMILDNHGLYDRKKRIFLKAGSEEEIFAHLGLDYVEPWERNA

SEQ ID NO: 1621 - DNA, 1182 bp, synthetic construct
  misc_feature 1..1182: note = Variant of terminal deoxynucleotidyl transferase
  source 1..1182: mol_type = other DNA
atgcaccatcatcatcatcatggcggtagcggccatccgccgagcaataccccggagggggaggtgccgagcgttatcgcccgctgtgttagtcagtacagctgccagcgcaagaccacgctgaataactacaacaaaaagtttaccgacgcgctggagatcatggccgagaactacaaatttaaagagaacctgatcgcgtgtctggaagccaagcgcgccgcgagtattctgaaatatctgccgttcccggttaccagcatgaaagacatccaaggtctgccgtgcattggcgaccaagttcgtgacgtgatcgaggagatcatcgaagagggcgagagcagccgtgttaaagaagttctcaatgacgagcgctacaaggcctttaagcagttcaccagcgtgttcggtgtgggcgtgaaaaccagcgaaaagtggtttcgtatgggcctccgtacggttgaagaggcaaaggccagtaagagtctgaagctgagcaagatgcagaaggcgggcttcctgtattacgaggatctggcgagctgcgttagtaaagcggaagccgatgccgttacgctcatcgtgaagaacacggtgcgtacctttctgccggatgcgctggtgaccatcaccggcggtttccgccgtggcaaacctatgggccacgacatcgactttctgatcacgaatccgggcccgaaagaggatgacgagctgctccacaaagtggttgatctgctcaagaagcaaggtctgctgctgtactgcgacatcaaagagagcacgttcgtggaggaacaactgccaagtcgcaaaatcgacgccatggacaacttccagaagtgcttcgccattctcaagctgtaccagccgggcgtggataacagcagctataacacgagtaagaagagtgacatggccgaggttaaggattggaaagcgattcgtgtggatctggtgatcacgccattcgagcagtacgcctatgcgctgctcggttggacgggcagcaaagaatttggtcgcgatctgcgccgctatgcggaggaagagcgcggcatgatcctcgacaaccatggcctctacgaccgcaaaaagcgcatctttctgaaagcgggcagcgaagaagagattttcgcgcatctgggtctggattatgtggagccgtgggaacgcaacgcg

SEQ ID NO: 1622 - protein, 394 aa, synthetic construct
  REGION 1..394: note = Variant of terminal deoxynucleotidyl transferase
MHHHHHHGGSGHPPSNTPEGEVPSVIARCVSQYSCQRKTTLNNYNKKFTDALEIMAENYKFKENLIACLEAKRAASILKYLPFPVTSMKDIQGLPCIGDQVRDVIEEIIEEGESSRVKEVLNDERYKAFKQFTSVFGVGVKTSEKWFRMGLRTVEEAKASKSLKLSKMQKAGFLYYEDLASCVSKAEADAVTLIVKNTVRTFLPDALVTITGGFRRGKPMGHDIDFLITNPGPKEDDELLHKVVDLLKKQGLLLYCDIKESTFVEEQLPSRKIDAMDNFQKCFAILKLYQPGVDNSSYNTSKKSDMAEVKDWKAIRVDLVITPFEQYAYALLGWTGSKEFGRDLRRYAEEERGMILDNHGLYDRKKRIFLKAGSEEEIFAHLGLDYVEPWERNA

SEQ ID NO: 1623 - DNA, 1182 bp, synthetic construct
  misc_feature 1..1182: note = Variant of terminal deoxynucleotidyl transferase
  source 1..1182: mol_type = other DNA
atgcaccatcatcatcatcatggcggtagcggccatccgccgagcaataccccggagggggaggtgccgagcgttatccttcgcaaggttagtcagtacagctgccagcgcaagaccacgctgaataactacaacaaaaagtttaccgacgcgctggagatcatggccgagaactacaaatttaaagagaacctgatcgcgtgtctggaagccaagcgcgccgcgagtattctgaaatatctgccgttcccggttaccagcatgaaagacatccaaggtctgccgtgcattggcgaccaagttcgtgacgtgatcgaggagatcatcgaagagggcgagagcagccgtgttaaagaagttctcaatgacgagcgctacaaggcctttaagcagttcaccagcgtgttcggtgtgggcgtgaaaaccagcgaaaagtggtttcgtatgggcctccgtacggttgaagaggcaaaggccagtaagagtctgaagctgagcaagatgcagaaggcgggcttcctgtattacgaggatctggcgagctgcgttagtaaagcggaagccgatgccgttacgctcatcgtgaagaacacggtgcgtacctttctgccggatgcgctggtgaccatcaccggcggtttccgccgtggcaaacctatgggccacgacatcgactttctgatcactaatccgggcccgaaagaggatgacgagctgctccacaaagtggttgatctgctcaagaagcaaggtctgctgctgtactgcgacatcaaagagagcacgttcgtggaggaacaactgccaagtcgcaaaatcgacgccatggacaacttccagaagtgcttcgccattctcaagctgtaccagccgggcgtggataacagcagctataacacgagtaagaagagtgacatggccgaggttaaggattggaaagcgattcgtgtggatctggtgatcacgccattcgagcagtacgcctatgcgctgctcggttggacgggcagcaaagaatttggtcgcgatctgcgccgctatgcggaggaagagcgcggcatgatcctcgacaaccatggcctctacgaccgcaaaaagcgcatctttctgaaagcgggcagcgaagaagagattttcgcgcatctgggtctggattatgtggagccgtgggaacgcaacgcg

SEQ ID NO: 1624 - protein, 394 aa, synthetic construct
  REGION 1..394: note = Variant of terminal deoxynucleotidyl transferase
MHHHHHHGGSGHPPSNTPEGEVPSVILRKVSQYSCQRKTTLNNYNKKFTDALEIMAENYKFKENLIACLEAKRAASILKYLPFPVTSMKDIQGLPCIGDQVRDVIEEIIEEGESSRVKEVLNDERYKAFKQFTSVFGVGVKTSEKWFRMGLRTVEEAKASKSLKLSKMQKAGFLYYEDLASCVSKAEADAVTLIVKNTVRTFLPDALVTITGGFRRGKPMGHDIDFLITNPGPKEDDELLHKVVDLLKKQGLLLYCDIKESTFVEEQLPSRKIDAMDNFQKCFAILKLYQPGVDNSSYNTSKKSDMAEVKDWKAIRVDLVITPFEQYAYALLGWTGSKEFGRDLRRYAEEERGMILDNHGLYDRKKRIFLKAGSEEEIFAHLGLDYVEPWERNA

SEQ ID NO: 1625 - DNA, 1182 bp, synthetic construct
  misc_feature 1..1182: note = Variant of terminal deoxynucleotidyl transferase
  source 1..1182: mol_type = other DNA
atgcaccatcatcatcatcatggcggtagcggccatccgccgagcaataccccggagggggaggtgccgagcgttatcgcccgcaaggttagtcagtacagctgccagcgcaagaccacgctgaataactacaacaaaaagtttaccgacgcgctggagatcatggccgagaactacaaatttaaagagaacctgatcgcgtgtctggaagccaagcgcgccgcgagtattctgaaatatctgccgttcccggttaccagcatgaaagacatccaaggtctgccgtgcattggcgaccaagttcgtgacgtgatcgaggagatcatcgaagagggcgagagcagccgtgttaaagaagttctcaatgacgagcgctacaaggcctttaagcagttcaccagcgtgttcggtgtgggcgtgaaaaccagcgaaaagtggtttcgtatgggcctccgtacggttgaagaggcacgtgccagtaagagtctgaagctgagcaagatgcagaaggcgggcttcctgtattacgaggatctggcgagctgcgttagtaaagcggaagccgatgccgttacgctcatcgtgaagaacacggtgcgtacctttctgccggatgcgctggtgaccatcaccggcggtttccgccgtggcaaacctatgggccacgacatcgactttctgatcacgaatccgggcccgaaagaggatgacgagctgctccacaaagtggttgatctgctcaagaagcaaggtctgctgctgtactgcgacatcaaagagagcacgttcgtggaggaacaactgccaagtcgcaaaatcgacgccatggacaacttccagaagtgcttcgccattctcaagctgtaccagccgggcgtggataacagcagctataacacgagtaagaagagtgacatggccgaggttaaggattggaaagcgattcgtgtggatctggtgatcacgccattcgagcagtacgcctatgcgctgctcggttggacgggcagcaaagaatttggtcgcgatctgcgccgctatgcggaggaagagcgcggcatgatcctcgacaaccatggcctctacgaccgcaaaaagcgcatctttctgaaagcgggcagcgaagaagagattttcgcgcatctgggtctggattatgtggagccgtgggaacgcaacgcg

SEQ ID NO: 1626 - protein, 394 aa, synthetic construct
  REGION 1..394: note = Variant of terminal deoxynucleotidyl transferase
MHHHHHHGGSGHPPSNTPEGEVPSVIARKVSQYSCQRKTTLNNYNKKFTDALEIMAENYKFKENLIACLEAKRAASILKYLPFPVTSMKDIQGLPCIGDQVRDVIEEIIEEGESSRVKEVLNDERYKAFKQFTSVFGVGVKTSEKWFRMGLRTVEEARASKSLKLSKMQKAGFLYYEDLASCVSKAEADAVTLIVKNTVRTFLPDALVTITGGFRRGKPMGHDIDFLITNPGPKEDDELLHKVVDLLKKQGLLLYCDIKESTFVEEQLPSRKIDAMDNFQKCFAILKLYQPGVDNSSYNTSKKSDMAEVKDWKAIRVDLVITPFEQYAYALLGWTGSKEFGRDLRRYAEEERGMILDNHGLYDRKKRIFLKAGSEEEIFAHLGLDYVEPWERNA

SEQ ID NO: 1627 - DNA, 1182 bp, synthetic construct
  misc_feature 1..1182: note = Variant of terminal deoxynucleotidyl transferase
  source 1..1182: mol_type = other DNA
atgcaccatcatcatcatcatggcggtagcggccatccgccgagcaataccccggagggggaggtgccgagcgttatcgcccgcaaggttagtcagtacagctgccagcgcaagaccacgctgaataactacaacaaaaagtttaccgacgcgctggagatcatggccgagaactacaaatttaaagagaacctgatcgcgtgtctggaagccaagcgcgccgcgagtattctgaaatatctgccgttcccggttaccagcatgaaagacatccaaggtctgccgtgcattggcgaccaagttcgtgacgtgatcgaggagatcatcgaagagggcgagagcagccgtgttaaagaagttctcaatgacgagcgctacaaggcctttaagcagttcaccagcgtgttcggtgtgggcgtgaaaaccagcgaaaagtggtttcgtatgggcctccgtacggttgaagaggcaaaggccagtaagagtctgaagctgagcaagatgcagaaggcgggcttcctgtattacgaggatctggcgagctgcgttagtaaagcggaagccgatgccgttacgcgtatcgtgaagaacacggtgcgtacctttctgccggatgcgctggtgaccatcaccggcggtttccgccgtggcaaacctatgggccacgacatcgactttctgatcacgaatccgggcccgaaagaggatgacgagctgctccacaaagtggttgatctgctcaagaagcaaggtctgctgctgtactgcgacatcaaagagagcacgttcgtggaggaacaactgccaagtcgcaaaatcgacgccatggacaacttccagaagtgcttcgccattctcaagctgtaccagccgggcgtggataacagcagctataacacgagtaagaagagtgacatggccgaggttaaggattggaaagcgattcgtgtggatctggtgatcacgccattcgagcagtacgcctatgcgctgctcggttggacgggcagcaaagaatttggtcgcgatctgcgccgctatgcggaggaagagcgcggcatgatcctcgacaaccatggcctctacgaccgcaaaaagcgcatctttctgaaagcgggcagcgaagaagagattttcgcgcatctgggtctggattatgtggagccgtgggaacgcaacgcg

SEQ ID NO: 1628 - protein, 394 aa, synthetic construct
  REGION 1..394: note = Variant of terminal deoxynucleotidyl transferase
MHHHHHHGGSGHPPSNTPEGEVPSVIARKVSQYSCQRKTTLNNYNKKFTDALEIMAENYKFKENLIACLEAKRAASILKYLPFPVTSMKDIQGLPCIGDQVRDVIEEIIEEGESSRVKEVLNDERYKAFKQFTSVFGVGVKTSEKWFRMGLRTVEEAKASKSLKLSKMQKAGFLYYEDLASCVSKAEADAVTRIVKNTVRTFLPDALVTITGGFRRGKPMGHDIDFLITNPGPKEDDELLHKVVDLLKKQGLLLYCDIKESTFVEEQLPSRKIDAMDNFQKCFAILKLYQPGVDNSSYNTSKKSDMAEVKDWKAIRVDLVITPFEQYAYALLGWTGSKEFGRDLRRYAEEERGMILDNHGLYDRKKRIFLKAGSEEEIFAHLGLDYVEPWERNA

SEQ ID NO: 1629 - DNA, 1182 bp, synthetic construct
  misc_feature 1..1182: note = Variant of terminal deoxynucleotidyl transferase
  source 1..1182: mol_type = other DNA
atgcaccatcatcatcatcatggcggtagcggccatccgccgagcaataccccggagggggaggtgccgagcgttatcgcccgcaaggttagtcagtacagctgccagcgcaagaccacgctgaataactacaacaaaaagtttaccgacgcgctggagatcatggccgagaactacaaatttaaagagaacctgatcgcgtgtctggaagccaagcgcgccgcgagtattctgaaatatctgccgttcccggttaccagcatgaaagacatccaaggtctgccgtgcattggcgaccaagttcgtgacgtgatcgaggagatcatcgaagagggcgagagcagccgtgttaaagaagttctcaatgacgagcgctacaaggcctttaagcagttcaccagcgtgttcggtgtgggcgtgaaaaccagcgaaaagtggtttcgtatgggcctccgtacggttgaagaggcaaaggccagtaagagtctgaagctgagcaagatgcagaaggcgggcttcctgtattacgaggatctggcgagctgcgttagtaaagcggaagccgatgccgttacgctcatcgtgaagaacacggtgcgtacctttctggaggatgcgctggtgaccatcaccggcggtttccgccgtggcaaacctatgggccacgacatcgactttctgatcacgaatccgggcccgaaagaggatgacgagctgctccacaaagtggttgatctgctcaagaagcaaggtctgctgctgtactgcgacatcaaagagagcacgttcttggaggaacaactgccaagtcgcaaaatcgacgccatggacaacttccagaagtgcttcgccattctcaagctgtaccagccgggcgtggataacagcagctataacacgagtaagaagagtgacatggccgaggttaaggattggaaagcgattcgtgtggatctggtgatcacgccattcgagcagtacgcctatgcgctgctcggttggacgggcagcaaagaattaggtcgcgatctgcgccgctatgcggaggaagagcgcggcatgatcctcgacaaccatggcctctacgaccgcaaaaagcgcatctttctgaaagcgggcagcgaagaagagattttcgcgcatctgggtctggattatgtggagccgtgggaacgcaacgcg

SEQ ID NO: 1630 - protein, 394 aa, synthetic construct
  REGION 1..394: note = Variant of terminal deoxynucleotidyl transferase
MHHHHHHGGSGHPPSNTPEGEVPSVIARKVSQYSCQRKTTLNNYNKKFTDALEIMAENYKFKENLIACLEAKRAASILKYLPFPVTSMKDIQGLPCIGDQVRDVIEEIIEEGESSRVKEVLNDERYKAFKQFTSVFGVGVKTSEKWFRMGLRTVEEAKASKSLKLSKMQKAGFLYYEDLASCVSKAEADAVTLIVKNTVRTFLEDALVTITGGFRRGKPMGHDIDFLITNPGPKEDDELLHKVVDLLKKQGLLLYCDIKESTFLEEQLPSRKIDAMDNFQKCFAILKLYQPGVDNSSYNTSKKSDMAEVKDWKAIRVDLVITPFEQYAYALLGWTGSKELGRDLRRYAEEERGMILDNHGLYDRKKRIFLKAGSEEEIFAHLGLDYVEPWERNA

SEQ ID NO: 1631 - DNA, 1182 bp, synthetic construct
  misc_feature 1..1182: note = Variant of terminal deoxynucleotidyl transferase
  source 1..1182: mol_type = other DNA
atgcaccatcatcatcatcatggcggtagcggccatccgccgagcaataccccggagggggaggtgccgagcgttatcgcccgcaaggttagtcagtacagctgccagcgcaagaccacgctgaataactacaacaaaaagtttaccgacgcgctggagatcatggccgagaactacaaatttaaagagaacctgatcgcgtgtctggaagccaagcgcgccgcgagtattctgaaatatctgccgttcccggttaccagcatgaaagacatccaaggtctgccgtgcattggcgaccaagttcgtgacgtgatcgaggagatcatcgaagagggcgagagcagccgtgttaaagaagttctcaatgacgagcgctacaaggcctttaagcagttcaccagcgtgttcggtgtgggcgtgaaaaccagcgaaaagtggtttcgtatgggcctccgtacggttgaagaggcaaaggccagtaagagtctgaagctgagcaagatgcagaaggcgggcttcatgtattacgaggatctggcgagctgcgttagtaaagcggaagccgatgccgttacgctcatcgtgaagaacacggtgcgtacctttctgccggatgcgctggtgaccatcaccggcggtttccgccgtggcaaacctatgggccacgacatcgactttctgatcacgaatccgggcccgaaagaggatgacgagctgctccacaaagtggttgatctgctcaagaagcaaggtctgctgctgtactgcgacatcaaagagagcacgttcgtggaggaacaactgccaagtcgcaaaatcgacgccatggacaacttccagaagtgcttcgccattctcaagctgtaccagccgggcgtggataacagcagctataacacgagtaagaagagtgacatggccgaggttaaggattggaaagcgattcgtgtggatctggtgatcacgccattcgagcagtacgcctatgcgctgctcggttggacgggcagcaaagaatttggtcgcgatctgcgccgctatgcggaggaagagcgcggcatgatcctcgacaaccatggcctctacgaccgcaaaaagcgcatctttctgaaagcgggcagcgaagaagagattttcgcgcatctgggtctggattatgtggagccgtgggaacgcaacgcg

SEQ ID NO: 1632 - protein, 394 aa, synthetic construct
  REGION 1..394: note = Variant of terminal deoxynucleotidyl transferase
MHHHHHHGGSGHPPSNTPEGEVPSVIARKVSQYSCQRKTTLNNYNKKFTDALEIMAENYKFKENLIACLEAKRAASILKYLPFPVTSMKDIQGLPCIGDQVRDVIEEIIEEGESSRVKEVLNDERYKAFKQFTSVFGVGVKTSEKWFRMGLRTVEEAKASKSLKLSKMQKAGFMYYEDLASCVSKAEADAVTLIVKNTVRTFLPDALVTITGGFRRGKPMGHDIDFLITNPGPKEDDELLHKVVDLLKKQGLLLYCDIKESTFVEEQLPSRKIDAMDNFQKCFAILKLYQPGVDNSSYNTSKKSDMAEVKDWKAIRVDLVITPFEQYAYALLGWTGSKEFGRDLRRYAEEERGMILDNHGLYDRKKRIFLKAGSEEEIFAHLGLDYVEPWERNA

SEQ ID NO: 1633 - DNA, 1182 bp, synthetic construct
  misc_feature 1..1182: note = Variant of terminal deoxynucleotidyl transferase
  source 1..1182: mol_type = other DNA
atgcaccatcatcatcatcatggcggtagcggccatccgccgagcaataccccggagggggaggtgccgagcgttatcgcccgcccggttagtcagtacagctgccagcgcaagaccacgctgaataactacaacaaaaagtttaccgacgcgctggagatcatggccgagaactacaaatttaaagagaacctgatcgcgtgtctggaagccaagcgcgccgcgagtattctgaaatatctgccgttcccggttaccagcatgaaagacatccaaggtctgccgtgcattggcgaccaagttcgtgacgtgatcgaggagatcatcgaagagggcgagagcagccgtgttaaagaagttctcaatgacgagcgctacaaggcctttaagcagttcaccagcgtgttcggtgtgggcgtgaaaaccagcgaaaagtggtttcgtatgggcctccgtacggttgaagaggcaaaggccagtaagagtctgaagctgagcaagatgcagaaggcgggcttcctgtattacgaggatctggcgagctgcgttagtaaagcggaagccgatgccgttacgctcatcgtgaagaacacggtgcgtacctttctgccggatgcgctggtgaccatcaccggcggtttccgccgtggcaaacctatgggccacgacatcgactttctgatcacgaatccgggcccgaaagaggatgacgagctgctccacaaagtggttgatctgctcaagaagcaaggtctgctgctgtactgcgacatcaaagagagcacgttcgtggaggaacaactgccaagtcgcaaaatcgacgccatggacaacttccagaagtgcttcgccattctcaagctgtaccagccgggcgtggataacagcagctataacacgagtaagaagagtgacatggccgaggttaaggattggaaagcgattcgtgtggatctggtgatcacgccattcgagcagtacgcctatgcgctgctcggttggacgggcagcaaagaatttggtcgcgatctgcgccgctatgcggaggaagagcgcggcatgatcctcgacaaccatggcctctacgaccgcaaaaagcgcatctttctgaaagcgggcagcgaagaagagattttcgcgcatctgggtctggattatgtggagccgtgggaacgcaacgcg

SEQ ID NO: 1634 - protein, 394 aa, synthetic construct
  REGION 1..394: note = Variant of terminal deoxynucleotidyl transferase
MHHHHHHGGSGHPPSNTPEGEVPSVIARPVSQYSCQRKTTLNNYNKKFTDALEIMAENYKFKENLIACLEAKRAASILKYLPFPVTSMKDIQGLPCIGDQVRDVIEEIIEEGESSRVKEVLNDERYKAFKQFTSVFGVGVKTSEKWFRMGLRTVEEAKASKSLKLSKMQKAGFLYYEDLASCVSKAEADAVTLIVKNTVRTFLPDALVTITGGFRRGKPMGHDIDFLITNPGPKEDDELLHKVVDLLKKQGLLLYCDIKESTFVEEQLPSRKIDAMDNFQKCFAILKLYQPGVDNSSYNTSKKSDMAEVKDWKAIRVDLVITPFEQYAYALLGWTGSKEFGRDLRRYAEEERGMILDNHGLYDRKKRIFLKAGSEEEIFAHLGLDYVEPWERNA

SEQ ID NO: 1635 - DNA, 1182 bp, synthetic construct
  misc_feature 1..1182: note = Variant of terminal deoxynucleotidyl transferase
  source 1..1182: mol_type = other DNA
atgcaccatcatcatcatcatggcggtagcggccatccgccgagcaataccccggagggggaggtgccgagcgttatcgcccgcaaggttagtcagtacagctgccagcgcaagaccacgctgaataactacaacaaaaagtttaccgacgcgctggagatcatggccgagaactacaaatttaaagagaacctgatcgcgtgtctggaagccaagcgcgccgcgagtattctgaaatatctgccgttcccggttaccagcatgaaagacatccaaggtctgccgtgcattggcgaccaagttcgtgacgtgatcgaggagatcatcgaagagggcgagagcagccgtgttaaagaagttctcaatgacgagcgctacaaggcctttaagcagttcaccagcgtgttcggtgtgggcgtgaaaaccagcgaaaagtggtttcgtatgggcctccgtacggttgaagaggcaaaggccagtaagagtctgaagctgagcaagatgcagaaggcgggcttcctgtattacgaggatctggcgaggtgcgttagtaaagcggaagccgatgccgttacgctcatcgtgaagaacacggtgcgtacctttctgccggatgcgctggtgaccatcaccggcggtttccgccgtggcaaacctatgggccacgacatcgactttctgatcacgaatccgggcccgaaagaggatgacgagctgctccacaaagtggttgatctgctcaagaagcaaggtctgctgctgtactgcgacatcaaagagagcacgttcgtggaggaacaactgccaagtcgcaaaatcgacgccatggacaacttccagaagtgcttcgccattctcaagctgtatcagccgggcgtggataacagcagctataacacgagtaagaagagtgacatggccgaggttaaggattggaaagcgattcgtgtggatctggtgatcacgccattcgagcagtacgcctatgcgctgctcggttggacgggcagcaaagaatttggtcgcgatctgcgccgctatgcggaggaagagcgcggcatgatcctcgacaaccatggcctctacgaccgcaaaaagcgcatctttctgaaagcgggcagcgaagaagagattttcgcgcatctgggtctggattatgtggagccgtgggaacgcaacgcg

SEQ ID NO: 1636 - protein, 394 aa, synthetic construct
  REGION 1..394: note = Variant of terminal deoxynucleotidyl transferase
MHHHHHHGGSGHPPSNTPEGEVPSVIARKVSQYSCQRKTTLNNYNKKFTDALEIMAENYKFKENLIACLEAKRAASILKYLPFPVTSMKDIQGLPCIGDQVRDVIEEIIEEGESSRVKEVLNDERYKAFKQFTSVFGVGVKTSEKWFRMGLRTVEEAKASKSLKLSKMQKAGFLYYEDLARCVSKAEADAVTLIVKNTVRTFLPDALVTITGGFRRGKPMGHDIDFLITNPGPKEDDELLHKVVDLLKKQGLLLYCDIKESTFVEEQLPSRKIDAMDNFQKCFAILKLYQPGVDNSSYNTSKKSDMAEVKDWKAIRVDLVITPFEQYAYALLGWTGSKEFGRDLRRYAEEERGMILDNHGLYDRKKRIFLKAGSEEEIFAHLGLDYVEPWERNA

SEQ ID NO: 1637 - DNA, 1182 bp, synthetic construct; identical to SEQ ID NO: 1581
  misc_feature 1..1182: note = Variant of terminal deoxynucleotidyl transferase
  source 1..1182: mol_type = other DNA

SEQ ID NO: 1638 - protein, 394 aa, synthetic construct; identical to SEQ ID NO: 1582
  REGION 1..394: note = Variant of terminal deoxynucleotidyl transferase

SEQ ID NO: 1639 - DNA, 1182 bp, synthetic construct; identical to SEQ ID NO: 1615
  misc_feature 1..1182: note = Variant of terminal deoxynucleotidyl transferase
  source 1..1182: mol_type = other DNA

SEQ ID NO: 1640 - protein, 394 aa, synthetic construct; identical to SEQ ID NO: 1616
  REGION 1..394: note = Variant of terminal deoxynucleotidyl transferase

SEQ ID NO: 1641 - DNA, 1182 bp, synthetic construct
  misc_feature 1..1182: note = Variant of terminal deoxynucleotidyl transferase
  source 1..1182: mol_type = other DNA
atgcaccatcatcatcatcatggcggtagcggccatccgccgagcaataccccggagggggaggtgccgagcgttatcgcccgcaaggttagtcagtacagctgccagcgcaagaccacgctgaataactacaacaaaaagtttaccgacgcgctggagatcatggccgagaactacaaatttaaagagaacctgatcgcgtgtctggaagccaagcgcgccgcgagtattctgaaatatctgccgttcccggttaccagcatgaaagacatccaaggtctgccgtgcattggcgaccaagttcgtgacgtgatcgaggagatcatcgaagagggcgagagcagccgtgttaaagaagttctcaatgacgagcgctacaaggcctttaagcagttcaccagcgtgttcggtgtgggcgtgaaaaccagcgaaaagtggtttcgtatgggcctccgtacggttgaagaggcaaaggccagtaagagtctgaagctgagcaagatgcagaaggcgggcttcctgtattacgaggatctggcgagctgcgttagtaaagcggaagccgatgccgttacgctcatcgtggagaacacggtgcgtacctttctgccggatgcgctggtgaccatcaccggcggtttccgccgtggcaaacctatgggccacgacatcgactttctgatcacgaatccgggcccgaaagaggatgacgagctgctccacaaagtggttgatctgctcaagaagcaaggtctgctgctgtactgcgacatcaaagagagcacgttcgtggaggaacaactgccaagtcgcaaaatcgacgccatggacaacttccagaagtgcttcgccattctcaagctgtaccagccgggcgtggataacagcagctataacacgagtaagaagagtgacatggccgaggttaaggattggaaagcgattcgtgtggatctggtgatcacgccattcgagcagtacgcctatgcgctgctcggttggacgggcagcaaagaatttggtcgcgatctgcgccgctatgcggaggaagagcgcggcatgatcctcgacaaccatggcctctacgaccgcaaaaagcgcatctttctgaaagcgggcagcgaagaagagattttcgcgcatctgggtctggattatgtggagccgtgggaacgcaacgcg

SEQ ID NO: 1642 - protein, 394 aa, synthetic construct
  REGION 1..394: note = Variant of terminal deoxynucleotidyl transferase
MHHHHHHGGSGHPPSNTPEGEVPSVIARKVSQYSCQRKTTLNNYNKKFTDALEIMAENYKFKENLIACLEAKRAASILKYLPFPVTSMKDIQGLPCIGDQVRDVIEEIIEEGESSRVKEVLNDERYKAFKQFTSVFGVGVKTSEKWFRMGLRTVEEAKASKSLKLSKMQKAGFLYYEDLASCVSKAEADAVTLIVENTVRTFLPDALVTITGGFRRGKPMGHDIDFLITNPGPKEDDELLHKVVDLLKKQGLLLYCDIKESTFVEEQLPSRKIDAMDNFQKCFAILKLYQPGVDNSSYNTSKKSDMAEVKDWKAIRVDLVITPFEQYAYALLGWTGSKEFGRDLRRYAEEERGMILDNHGLYDRKKRIFLKAGSEEEIFAHLGLDYVEPWERNA

SEQ ID NO: 1643 - DNA, 1182 bp, synthetic construct
  misc_feature 1..1182: note = Variant of terminal deoxynucleotidyl transferase
  source 1..1182: mol_type = other DNA
atgcaccatcatcatcatcatggcggtagcggccatccgccgagcaataccccggagggggaggtgccgagcgttatcgcccgcaaggttagtcagtacagctgccagcgcaagaccacgctgaataactacaacaaaaagtttaccgacgcgctggagatcatggccgagaactacaaatttaaagagaacctgatcgcgtgtctggaagccaagcgcgccgcgagtattctgaaatatctgccgttcccggttaccagcatgaaagacatccaaggtctgccgtgcattggcgaccaagttcgtgacgtgatcgaggagatcatcgaagagggcgagagcagccgtgttaaagaagttctcaatgacgagcgctacaaggcctttaagcagttcaccagcgtgttcggtgtgggcgtgaaaaccagcgaaaagtggtttcgtatgggcctccgtacggttgaagaggcaaaggccagtaagagtctgaagctgagcaagatgcagaaggcgggcttcctgtattacgaggatctggcgagctgcgttagtaaagcggaagccgatgccgttacgctcatcgtgaagaacacggtgcgtacctttctgccggatgcgctggtgaccatcaccggcggtttccgccgtggcaaacctatgggccacgacatcgactttctgatcacgaatccgggcgaaaaagaggatgacgagctgctccacaaagtggttgatctgctcaagaagcaaggtctgctgctgtactgcgacatcaaagagagcacgttcgtggaggaacaactgccaagtcgcaaaatcgacgccatggacaacttccagaagtgcttcgccattctcaagctgtaccagccgggcgtggataacagcagctataacacgagtaagaagagtgacatggccgaggttaaggattggaaagcgattcgtgtggatctggtgatcacgccattcgagcagtacgcctatgcgctgctcggttggacgggcagcaaagaatttggtcgcgatctgcgccgctatgcggaggaagagcgcggcatgatcctcgacaaccatggcctctacgaccgcaaaaagcgcatctttctgaaagcgggcagcgaagaagagattttcgcgcatctgggtctggattatgtggagccgtgggaacgcaacgcg

SEQ ID NO: 1644 - protein, 394 aa, synthetic construct
  REGION 1..394: note = Variant of terminal deoxynucleotidyl transferase
MHHHHHHGGSGHPPSNTPEGEVPSVIARKVSQYSCQRKTTLNNYNKKFTDALEIMAENYKFKENLIACLEAKRAASILKYLPFPVTSMKDIQGLPCIGDQVRDVIEEIIEEGESSRVKEVLNDERYKAFKQFTSVFGVGVKTSEKWFRMGLRTVEEAKASKSLKLSKMQKAGFLYYEDLASCVSKAEADAVTLIVKNTVRTFLPDALVTITGGFRRGKPMGHDIDFLITNPGEKEDDELLHKVVDLLKKQGLLLYCDIKESTFVEEQLPSRKIDAMDNFQKCFAILKLYQPGVDNSSYNTSKKSDMAEVKDWKAIRVDLVITPFEQYAYALLGWTGSKEFGRDLRRYAEEERGMILDNHGLYDRKKRIFLKAGSEEEIFAHLGLDYVEPWERNA

SEQ ID NO: 1645 - DNA, 1182 bp, synthetic construct
  misc_feature 1..1182: note = Variant of terminal deoxynucleotidyl transferase
  source 1..1182: mol_type = other DNA
atgcaccatcatcatcatcatggcggtagcggccatccgccgagcaataccccggagggggaggtgccgagcgttatcgcccgcaaggttagtcagtacagctgccagcgcaagaccacgctgaataactacaacaaaaagtttaccgacgcgctggagatcatggccgagaactacaaatttaaagagaacctgggggcgtgtctggaagccaagcgcgccgcgagtattctgaaatatctgccgttcccggttaccagcatgaaagacatccaaggtctgccgtgcattggcgaccaagttcgtgacgtgatcgaggagatcatcgaagagggcgagagcagccgtgttaaagaagttctcaatgacgagcgctacaaggcctttaagcagttcaccagcgtgttcggtgtgggcgtgaaaaccagcgaaaagtggtttcgtatgggcctccgtacggttgaagaggcaaaggccagtaagagtctgaagctgagcaagatgcagaaggcgggcttcctgtattacgaggatctggcgagctgcgttagtaaagcggaagccgatgccgttacgctcatcgtgaagaacacggtgcgtacctttctgccggatgcgctggtgaccatcaccggcggtttccgccgtggcaaacctatgggccacgacatcgactttctgatcacgaatccgggcccgaaagaggatgacgagctgctccacaaagtggttgatctgctcaagaagcaaggtctgctgctgtactgcgacatcaaagagagcacgttcgtggaggaacaactgccaagtcgcaaaatcgacgccatggacaacttccagaagtgcttcgccattctcaagctgtaccagccgggcgtggataacagcagctataacacgagtaagaagagtgacatggccgaggttaaggattggaaagcgattcgtgtggatctggtgatcacgccattcgagcagtacgcctatgcgctgctcggttggacgggcagcaaagaatttggtcgcgatctgcgccgctatgcggaggaagagcgcggcatgatcctcgacaaccatggcctctacgaccgcaaaaagcgcatctttctgaaagcgggcagcgaagaagagattttcgcgcatctgggtctggattatgtggagccgtgggaacgcaacgcg

SEQ ID NO: 1646 - protein, 394 aa, synthetic construct
  REGION 1..394: note = Variant of terminal deoxynucleotidyl transferase
MHHHHHHGGSGHPPSNTPEGEVPSVIARKVSQYSCQRKTTLNNYNKKFTDALEIMAENYKFKENLGACLEAKRAASILKYLPFPVTSMKDIQGLPCIGDQVRDVIEEIIEEGESSRVKEVLNDERYKAFKQFTSVFGVGVKTSEKWFRMGLRTVEEAKASKSLKLSKMQKAGFLYYEDLASCVSKAEADAVTLIVKNTVRTFLPDALVTITGGFRRGKPMGHDIDFLITNPGPKEDDELLHKVVDLLKKQGLLLYCDIKESTFVEEQLPSRKIDAMDNFQKCFAILKLYQPGVDNSSYNTSKKSDMAEVKDWKAIRVDLVITPFEQYAYALLGWTGSKEFGRDLRRYAEEERGMILDNHGLYDRKKRIFLKAGSEEEIFAHLGLDYVEPWERNA

SEQ ID NO: 1647 - DNA, 1182 bp, synthetic construct
  misc_feature 1..1182: note = Variant of terminal deoxynucleotidyl transferase
  source 1..1182: mol_type = other DNA
atgcaccatcatcatcatcatggcggtagcggccatccgccgagcaataccccggagggggaggtgccgagcgttatcgcccgcaaggttagtcagtacagctgccagcgcaagaccacgctgaataactacaacaaaaagtttaccgacgcgctggagatcatggccgagaactacaaatttaaagagaacctgatcgcgtgtctggaagccaagcgcgccgcgagtattctgaaatatctgccgttcccggttaccagcatgaaagacatccaaggtctgccgtgcattggcgaccaagttcgtgacgtgatcgaggagatcatcgaagagggcgagagcagccgtgttaaagaagttctcaatgacgagcgctacaaggcctttaagcagttcaccagcgtgttcggtgtgggcgtgaaaaccagcgaaaagtggtttcgtatgggcctccgtacggttgaagaggcaaaggccagtaagagtctgaagctgagcaagatgcagaaggcgggcttcctgtattacgaggatctggcgagctgcgttagtaaagcggaagccgatgccgttacgctcatcgtgaagaacacggtgcgtacctttctgccggatgcgctggtgaccatcaccggcggtttccgccgtggcaaacctatgggccacgacatcgactttctgatcacgaatccgggcccgaaagaggatgacgagctgctccacaaagtggttgatctgctcaagaagcaaggtctgctgctgtactgcgacatcaaagagagcacgttcgtggaggaacaactgccaagtcgcaaaatcgacgccatggacaacttccagaagtgcttcgccattctcaagctgtaccagccgggcgtggataacagcagctataacacgagtaagaagagtgacatggccgaggttaaggattggaaagcgattcgtgtggatctggtgatcacgccaatcgagcagtacgcctatgcgctgctcggttggacgggcagcaaagaatttggtcgcgatctgcgccgctatgcggaggaagagcgcggcatgatcctcgacaaccatggcctctacgaccgcaaaaagcgcatctttctgaaagcgggcagcgaagaagagattttcgcgcatctgggtctggattatgtggagccgtgggaacgcaacgcg

SEQ ID NO: 1648 - protein, 394 aa, synthetic construct
  REGION 1..394: note = Variant of terminal deoxynucleotidyl transferase
MHHHHHHGGSGHPPSNTPEGEVPSVIARKVSQYSCQRKTTLNNYNKKFTDALEIMAENYKFKENLIACLEAKRAASILKYLPFPVTSMKDIQGLPCIGDQVRDVIEEIIEEGESSRVKEVLNDERYKAFKQFTSVFGVGVKTSEKWFRMGLRTVEEAKASKSLKLSKMQKAGFLYYEDLASCVSKAEADAVTLIVKNTVRTFLPDALVTITGGFRRGKPMGHDIDFLITNPGPKEDDELLHKVVDLLKKQGLLLYCDIKESTFVEEQLPSRKIDAMDNFQKCFAILKLYQPGVDNSSYNTSKKSDMAEVKDWKAIRVDLVITPIEQYAYALLGWTGSKEFGRDLRRYAEEERGMILDNHGLYDRKKRIFLKAGSEEEIFAHLGLDYVEPWERNA

SEQ ID NO: 1649 - DNA, 1182 bp, synthetic construct
  misc_feature 1..1182: note = Variant of terminal deoxynucleotidyl transferase
  source 1..1182: mol_type = other DNA
atgcaccatcatcatcatcatggcggtagcggccatccgccgagcaataccccggagggggaggtgccgagcgttatcgcccgcaaggttagtcagtacagctgccagcgcaagaccacgctgaataaccacaacaaaaagtttaccgacgcgctggagatcatggccgagaactacaaatttaaagagaacctgatcgcgtgtctggaagccaagcgcgccgcgagtattctgaaatatctgccgttcccggttaccagcatgaaagacatccaaggtctgccgtgcattggcgaccaagttcgtgacgtgatcgaggagatcatcgaagagggcgagagcagccgtgttaaagaagttctcaatgacgagcgctacaaggcctttaagcagttcaccagcgtgttcggtgtgggcgtgaaaaccagcgaaaagtggtttcgtatgggcctccgtacggttgaagaggcaaaggccagtaagagtctgaagctgagcaagatgcagaaggcgggcttcctgtattacgaggatctggcgagctgcgttagtaaagcggaagccgatgccgttacgctcatcgtgaagaacacggtgcgtacctttctgccggatgcgctggtgaccatcaccggcggtttccgccgtggcaaacctatgggccacgacatcgactttctgatcacgaatccgggcccgaaagaggatgacgagctgctccacaaagtggttgatctgctcaagaagcaaggtctgctgctgtactgcgacatcaaagagagcacgttcgtggaggaacaactgccaagtcgcaaaatcgacgccatggacaacttccagaagtgcttcgccattctcaagctgtaccagccgggcgtggataacagcagctataacacgagtaagaagagtgacatggccgaggttaaggattggaaagcgattcgtgtggatctggtgatcacgccattcgagcagtacgcctatgcgctgctcggttggacgggcagcaaagaatttggtcgcgatctgcgccgctatgcggaggaagagcgcggcatgatcctcgacaaccatggcctctacgaccgcaaaaagcgcatctttctgaaagcgggcagcgaagaagagattttcgcgcatctgggtctggattatgtggagccgtgggaacgcaacgcg

SEQ ID NO: 1650 - protein, 394 aa, synthetic construct
  REGION 1..394: note = Variant of terminal deoxynucleotidyl transferase
MHHHHHHGGSGHPPSNTPEGEVPSVIARKVSQYSCQRKTTLNNHNKKFTDALEIMAENYKFKENLIACLEAKRAASILKYLPFPVTSMKDIQGLPCIGDQVRDVIEEIIEEGESSRVKEVLNDERYKAFKQFTSVFGVGVKTSEKWFRMGLRTVEEAKASKSLKLSKMQKAGFLYYEDLASCVSKAEADAVTLIVKNTVRTFLPDALVTITGGFRRGKPMGHDIDFLITNPGPKEDDELLHKVVDLLKKQGLLLYCDIKESTFVEEQLPSRKIDAMDNFQKCFAILKLYQPGVDNSSYNTSKKSDMAEVKDWKAIRVDLVITPFEQYAYALLGWTGSKEFGRDLRRYAEEERGMILDNHGLYDRKKRIFLKAGSEEEIFAHLGLDYVEPWERNA

SEQ ID NO: 1651 - DNA, 1182 bp, synthetic construct
  misc_feature 1..1182: note = Variant of terminal deoxynucleotidyl transferase
  source 1..1182: mol_type = other DNA
atgcaccatcatcatcatcatggcggtagcggccatccgccgagcaataccccggagggggaggtgccgagcgttatcgcccgcaaggttagtcagtacagctgccagcgcaagaccacgctgaataactacaacaaaaagtttaccgacgcgctggagatcatggccgataactacaaatttaaagagaacctgatcgcgtgtctggaagccaagcgcgccgcgagtattctgaaatatctgccgttcccggttaccagcatgaaagacatccaaggtctgccgtgcattggcgaccaagttcgtgacgtgatcgaggagatcatcgaagagggcgagagcagccgtgttaaagaagttctcaatgacgagcgctacaaggcctttaagcagttcaccagcgtgttcggtgtgggcgtgaaaaccagcgaaaagtggtttcgtatgggcctccgtacggttgaagaggcaaaggccagtaagagtctgaagctgagcaagatgcagaaggcgggcttcctgtattacgaggatctggcgagctgcgttagtaaagcggaagccgatgccgttacgctcatcgtgaagaacacggtgcgtacctttctgccggatgcgctggtgaccatcaccggcggtttccgccgtggcaaacctatgggccacgacatcgactttctgatcacgaatccgggcccgaaagaggatgacgagctgctccacaaagtggttgatctgctcaagaagcaaggtctgctgctgtactgcgacatcaaagagagcacgttcgtggaggaacaactgccaagtcgcaaaatcgacgccatggacaacttccagaagtgcttcgccattctcaagctgtaccagccgggcgtggataacagcagctataacacgagtaagaagagtgacatggccgaggttaaggattggaaagcgattcgtgtggatctggtgatcacgccattcgagcagtacgcctatgcgctgctcggttggacgggcagcaaagaatttggtcgcgatctgcgccgctatgcggaggaagagcgcggcatgatcctcgacaaccatggcctctacgaccgcaaaaagaagatctttctgaaagcgggcagcgaagaagagattttcgcgcatctgggtctggattatgtggagccgtgggaacgcaacgcg

SEQ ID NO: 1652 - protein, 394 aa, synthetic construct
  REGION 1..394: note = Variant of terminal deoxynucleotidyl transferase
MHHHHHHGGSGHPPSNTPEGEVPSVIARKVSQYSCQRKTTLNNYNKKFTDALEIMADNYKFKENLIACLEAKRAASILKYLPFPVTSMKDIQGLPCIGDQVRDVIEEIIEEGESSRVKEVLNDERYKAFKQFTSVFGVGVKTSEKWFRMGLRTVEEAKASKSLKLSKMQKAGFLYYEDLASCVSKAEADAVTLIVKNTVRTFLPDALVTITGGFRRGKPMGHDIDFLITNPGPKEDDELLHKVVDLLKKQGLLLYCDIKESTFVEEQLPSRKIDAMDNFQKCFAILKLYQPGVDNSSYNTSKKSDMAEVKDWKAIRVDLVITPFEQYAYALLGWTGSKEFGRDLRRYAEEERGMILDNHGLYDRKKKIFLKAGSEEEIFAHLGLDYVEPWERNA

SEQ ID NO: 1653 - DNA, 1182 bp, synthetic construct
  misc_feature 1..1182: note = Variant of terminal deoxynucleotidyl transferase
  source 1..1182: mol_type = other DNA
atgcaccatcatcatcatcatggcggtagcggccatccgccgagcaataccccggagggggaggtgccgagcgttatcgcccgcaaggttagtcagtacagctgccagcgcaagaccacgctgaataactacaacaaaaagtttaccgacgcgctggagatcatggccgagaactacaaatttaaagagaacctgatcgcgtgtctggaagccaagcgcgccgcgagtattctgaaatatctgccgttcccggttaccagcatgaaagacatccaaggtctgccgtgcattggcgaccaagttcgtgacgtgatcgaggagatcatcgaagagggcgagagcagccgtgttaaagaagttctcaatgacgagcgctacaaggcctttaagcagttcaccagcgtgttcggtgtgggcgtgaaaaccagcgaaaagtggtttcgtatgggcctccgtacggttgaagaggcaaaggccagtaagagtctgaagctgagcaagatgcagaaggcgggcttcctgtattacgaggatctggcgagctgcgttagtaaagcggaagccgatgccgttacgctcatcgtgaagaacacggtgcgtacctttctgccggatgcgctggtgaccatcaccggcggtttccgccgtggcaaacctatgggccacgacatcgactttctgatcacgaatccgggcccgaaagaggatgacgagctgctccacaaagtggttgatctgctcaagaagcaaggtctgctgctgtactgcgacatcaaagagagcacgttcgtggaggaacaactgccaagtcgcaaaatcgacgccatggacaacttccagaagtgcttcgccattctcaagctgtaccagccgggcgtggataacagcagctataacacgagtaagaagagtgacatggccgaggttaaggattggaaagcgattcgtgtggatctggtgatcacgccattcgagcagtacgcctatgcgctgctcggttggacgggcagcaaagaatttggtcgcgatctgcgccgctatgcggaggaagagaaaggcatgatcctcgacaaccatggcctctacgaccgcaaaaagcgcatctttctgaaagcgggcagcgaagaagagattttcgcgcatctgggtctggattatgtggagccgtgggaacgcaacgcg

SEQ ID NO: 1654 - protein, 394 aa, synthetic construct
  REGION 1..394: note = Variant of terminal deoxynucleotidyl transferase
MHHHHHHGGSGHPPSNTPEGEVPSVIARKVSQYSCQRKTTLNNYNKKFTDALEIMAENYKFKENLIACLEAKRAASILKYLPFPVTSMKDIQGLPCIGDQVRDVIEEIIEEGESSRVKEVLNDERYKAFKQFTSVFGVGVKTSEKWFRMGLRTVEEAKASKSLKLSKMQKAGFLYYEDLASCVSKAEADAVTLIVKNTVRTFLPDALVTITGGFRRGKPMGHDIDFLITNPGPKEDDELLHKVVDLLKKQGLLLYCDIKESTFVEEQLPSRKIDAMDNFQKCFAILKLYQPGVDNSSYNTSKKSDMAEVKDWKAIRVDLVITPFEQYAYALLGWTGSKEFGRDLRRYAEEEKGMILDNHGLYDRKKRIFLKAGSEEEIFAHLGLDYVEPWERNA

SEQ ID NO: 1655 - DNA, 1182 bp, synthetic construct
  misc_feature 1..1182: note = Variant of terminal deoxynucleotidyl transferase
  source 1..1182: mol_type = other DNA
atgcaccatcatcatcatcatggcggtagcggccatccgccgagcaataccccggagggggaggtgccgagcgttatcgcccgcaaggttagtcagtacagctgccagcgcaagaccacgctgaataactacaacaaaaagtttaccgacgcgctggagatcatggccgagaactacaaatttaaagagaacctgatcgcgtgtctggaagccaagcgcgccgcgagtattctgaaatatctgccgttcccggttaccagcatgaaagacatccaaggtctgccgtgcattggcgaccaagttcgtgacgtgatcgaggagatcatcgaagagggcgagagcagccgtgttaaagaagttctcaatgacgagcgctacaaggcctttaagcagttcaccagcgtgttcggtgtgggcgtgaaaaccagcgaaaagtggtttcgtatgggcctccgtacggttgaagaggcaaaggccagtaagagtctgaagctgagcaagatgcagaaggcgggcttcctgtattacgaggatctggcgagctgcgttagtaaagcggaagccgatgccgttacgctcatcgtgaagaacacggtgcgtacctttctgccggatgcgctggtgaccatcaccggcggtttccgccgtggcaaacctatgggccacgacgtcgactttctgatcacgaatccgggcccgaaagaggatgacgagctgctccacaaagtggttgatctgctcaagaagcaaggtctgctgctgtactgcgacatcaaagagagcacgttcgtggaggaacaactgccaagtcgcaaaatcgacgccatggacaacttccagaagtgcttcgccattctcaagctgtaccagccgggcgtggataacagcagctataacacgagtaagaagagtgacatggccgaggttaaggattggaaagcgattcgtgtggatctggtgatcacgccattcgagcagtacgcctatgcgctgctcggttggacgggcagcaaagaatttggtcgcgatctgcgccgctatgcggaggaagagcgcggcatgatcctcgacaaccatggcctctacgaccgcaaaaagcgcatctttctgaaagcgggcagcgaagaagagattttcgcgcatctgggtctggattatgtggagccgtgggaacgcaacgcg

SEQ ID NO: 1656 - protein, 394 aa, synthetic construct
  REGION 1..394: note = Variant of terminal deoxynucleotidyl transferase
MHHHHHHGGSGHPPSNTPEGEVPSVIARKVSQYSCQRKTTLNNYNKKFTDALEIMAENYKFKENLIACLEAKRAASILKYLPFPVTSMKDIQGLPCIGDQVRDVIEEIIEEGESSRVKEVLNDERYKAFKQFTSVFGVGVKTSEKWFRMGLRTVEEAKASKSLKLSKMQKAGFLYYEDLASCVSKAEADAVTLIVKNTVRTFLPDALVTITGGFRRGKPMGHDVDFLITNPGPKEDDELLHKVVDLLKKQGLLLYCDIKESTFVEEQLPSRKIDAMDNFQKCFAILKLYQPGVDNSSYNTSKKSDMAEVKDWKAIRVDLVITPFEQYAYALLGWTGSKEFGRDLRRYAEEERGMILDNHGLYDRKKRIFLKAGSEEEIFAHLGLDYVEPWERNA

SEQ ID NO: 1657 - DNA, 1182 bp, synthetic construct
  misc_feature 1..1182: note = Variant of terminal deoxynucleotidyl transferase
  source 1..1182: mol_type = other DNA
atgcaccatcatcatcatcatggcggtagcggccatccgccgagcaataccccggagggggaggtgccgagcgttatcgcccgcaaggttagtcagtacagctgccagcgcaagaccacgctaaataactacaacaaaaagtttaccgacgcgctggagatcatggccgagaactacaaatttaaagagaacctgatcgcgtgtctggaagccaagcgcgccgcgagtattctgaaatatctgccgttcccggttaccagcatgaaagacatccaaggtctgccgtgcattggcgaccaagttcgtgacgtgatcgaggagatcatcgaagagggcgagagcagccgtgttaaagaagttctcaatgacgagcgctacaaggcctttaagcagttcaccagcgtgttcggtgtgggcgtgaaaaccagcgaaaagtggtttcgtatgggcctccgtacggttgaagaggcaaaggccagtaagagtctgaagctgagcaagatgcagaaggcgggcttcctgtattacgaggatctggcgagctgcgttagtaaagcggaagccgatgccgttacgctcatcgtgaagaacacggtgcgtacctttctgccggatgcgctggtgaccatcaccggcggtttccgccgtggcaaacctatgggccacgacatcgactttctgatcacgaatccgggcccgaaagaggatgacgagctgctccacaaagtggttgatctgctcgaaaagcaaggtctgctgctgtactgcgacatcaaagagagcacgttcgtggaggaacaactgccaagtcgcaaaatcgacgccatggacaacttccagaagtgcttcgccattctcaagctgtaccagccgggcgtggataacagcagctataacacgagtaagaagagtgacatggccgaggttaaggattggaaagcgattcgtgtggatctggtgatcacgccattcgagcagtacgcctatgcgctgctcggttggacgggcagcaaagaatttggtcgcgatctgcgccgctatgcggaggaagagcgcggcatgatcctcgacaaccatggcctctacgaccgcaaaaagcgcatctttctgaaagcgggcagcgaagaagagattttcgcgcatctgggtctggattatgtggagccgtgggaacgcaacgcg

SEQ ID NO: 1658 - protein, 394 aa, synthetic construct
  REGION 1..394: note = Variant of terminal deoxynucleotidyl transferase
MHHHHHHGGSGHPPSNTPEGEVPSVIARKVSQYSCQRKTTLNNYNKKFTDALEIMAENYKFKENLIACLEAKRAASILKYLPFPVTSMKDIQGLPCIGDQVRDVIEEIIEEGESSRVKEVLNDERYKAFKQFTSVFGVGVKTSEKWFRMGLRTVEEAKASKSLKLSKMQKAGFLYYEDLASCVSKAEADAVTLIVKNTVRTFLPDALVTITGGFRRGKPMGHDIDFLITNPGPKEDDELLHKVVDLLEKQGLLLYCDIKESTFVEEQLPSRKIDAMDNFQKCFAILKLYQPGVDNSSYNTSKKSDMAEVKDWKAIRVDLVITPFEQYAYALLGWTGSKEFGRDLRRYAEEERGMILDNHGLYDRKKRIFLKAGSEEEIFAHLGLDYVEPWERNA

SEQ ID NO: 1659 - DNA, 1182 bp, synthetic construct
  misc_feature 1..1182: note = Variant of terminal deoxynucleotidyl transferase
  source 1..1182: mol_type = other DNA
atgcaccatcatcatcatcatggcggtagcggccatccgccgagcaataccccggagggggaggtgccgagcgttatcgcccgcaaggttagtcagtacagctgccagcgcaagaccacgctgaataactacaacaaaaagtttaccgacgcgctggagatcatggccgagaactacaaatttaaagagaacctgatcgcgtgtctggaagccaagcgcgccgcgagtattctgaaatatctgccgttcccggttaccagcatgaaagacatccaaggtctgccgtgcattggcgaccaagttcgtgacgtgatcgaggagatcatcgaagagggcgagagcagccgtgttaaagaagttctcaatgacgagcgctacaaggcctttaagcagttcaccagcgtgttcggtgtgggcgtgaaaaccagcgaaaagtggtttcgtatgggcctccgtacggttgaagaggcaaaggccgaaaagagtctgaagctgagcaagatgcagaaggcgggcttcctgtattacgaggatctggcgagctgcgttagtaaagcggaagccgatgccgttacgctcatcgtgaagaacacggtgcgtacctttctgccggatgcgctggtgaccatcaccggcggtttccgccgtggcaaacctatgggccacgacatcgactttctgatcacgaatccgggcccgaaagaggatgacgagctgctccacaaagtggttgatctgctcaagaagcaaggtctgctgctgtactgcgacatcaaagagagcacgttcgtggaggaacaactgccaagtcgcaaaatcgacgccatggacaacttccagaagtgcttcgccattctcaagctgtaccagccgggcgtggataacagcagctataacacgagtaagaagagtgacatggccgaggttaaggattggaaagcgattcgtgtggatctggtgatcacgccattcgagcagtacgcctatgcgctgctcggttggacgggcagcaaagaatttggtcgcgatctgcgccgctatgcggaggaagagcgcggcatgatcctcgacaaccatggcctctacgaccgcaaaaagcgcatctttctgaaagcgggcagcgaagaagagattttcgcgcatctgggtctggattatgtggagccgtgggaacgcaacgcg

SEQ ID NO: 1660 - protein, 394 aa, synthetic construct
  REGION 1..394: note = Variant of terminal deoxynucleotidyl transferase
MHHHHHHGGSGHPPSNTPEGEVPSVIARKVSQYSCQRKTTLNNYNKKFTDALEIMAENYKFKENLIACLEAKRAASILKYLPFPVTSMKDIQGLPCIGDQVRDVIEEIIEEGESSRVKEVLNDERYKAFKQFTSVFGVGVKTSEKWFRMGLRTVEEAKAEKSLKLSKMQKAGFLYYEDLASCVSKAEADAVTLIVKNTVRTFLPDALVTITGGFRRGKPMGHDIDFLITNPGPKEDDELLHKVVDLLKKQGLLLYCDIKESTFVEEQLPSRKIDAMDNFQKCFAILKLYQPGVDNSSYNTSKKSDMAEVKDWKAIRVDLVITPFEQYAYALLGWTGSKEFGRDLRRYAEEERGMILDNHGLYDRKKRIFLKAGSEEEIFAHLGLDYVEPWERNA

SEQ ID NO: 1661 - DNA, 1182 bp, synthetic construct
  misc_feature 1..1182: note = Variant of terminal deoxynucleotidyl transferase
  source 1..1182: mol_type = other DNA
atgcaccatcatcatcatcatggcggtagcggccatccgccgagcaataccccggagggggaggtgccgagcgttatcgcccgcaaggttagtcagtacagctgccagcgcaagaccacgctgaataactacaacaaaaagtttaccgacgcgctggagatcatggccgagaactacaaatttaaagagaacctgatcgcgtgtctggaagccaagcgcgccgcgagtattctgaaatatctgccgttcccggttaccagcatgaaagacatccaaggtctgccgtgcattggcgaccaagttcgtgacgtgatcgaggagatcatcgaagatggcgagagcagccgtgttaaagaagttctcaatgacgagcgctacaaggcctttaagcagttcaccagcgtgttcggtgtgggcgtgaaaaccagcgaaaagtggtttcgtatgggcctccgtacggttgaagaggcaaaggccagtaagagtctgaagctgagcaagatgcagaaggcgggcttcctgtattacgaggatctggcgagctgcgttagtaaagcggaagccgatgccgttacgctcatcgtgaagaacacggtgcgtacctttctgccggatgcgctggtgaccatcaccggcggtttccgccgtggcaaacctatgggccacgacatcgactttctgatcacgaatccgggcccgaaagaggatgacgagctgctccacaaagtggttgatctgctcaagaagcaaggtctgctgctgtactgcgacatcaaagagagcacgttcgtggaggaacaactgccaagtcgcaaaatcgacgccatggacaacttccagaagtgcttcgccattctcaagctgtaccagccgggcgtggataacagcagctataacacgagtaagaagagtgacatggccgaggttaaggattggaaagcgattcgtgtggatctggtgatcacgccattcgagcagtacgcctatgcgctgctcggttggacgggcagcaaagaatttggtcgcgatctgcgccgctatgcggaggaagagcgcggcatgatcctcgacaaccatggcctctacgaccgcaaaaagcgcatctttctgaaagcgggcagcgaagaagagattttcgcgcatctgggtctggattatgtggagccgtgggaacgcaacgcg

SEQ ID NO: 1662 - protein, 394 aa, synthetic construct
  REGION 1..394: note = Variant of terminal deoxynucleotidyl transferase
MHHHHHHGGSGHPPSNTPEGEVPSVIARKVSQYSCQRKTTLNNYNKKFTDALEIMAENYKFKENLIACLEAKRAASILKYLPFPVTSMKDIQGLPCIGDQVRDVIEEIIEDGESSRVKEVLNDERYKAFKQFTSVFGVGVKTSEKWFRMGLRTVEEAKASKSLKLSKMQKAGFLYYEDLASCVSKAEADAVTLIVKNTVRTFLPDALVTITGGFRRGKPMGHDIDFLITNPGPKEDDELLHKVVDLLKKQGLLLYCDIKESTFVEEQLPSRKIDAMDNFQKCFAILKLYQPGVDNSSYNTSKKSDMAEVKDWKAIRVDLVITPFEQYAYALLGWTGSKEFGRDLRRYAEEERGMILDNHGLYDRKKRIFLKAGSEEEIFAHLGLDYVEPWERNA

SEQ ID NO: 1663 - DNA, 1182 bp, synthetic construct
  misc_feature 1..1182: note = Variant of terminal deoxynucleotidyl transferase
  source 1..1182: mol_type = other DNA
atgcaccatcatcatcatcatggcggtagcggccatccgccgagcaataccccggagggggaggtgccgagcgttatcgcccgcaaggttagtcagtacagctgccagcgcaagaccacgctgaataactacaacaaaaagtttaccgacgcgctggagatcatggccgagaactacaaatttaaagagaacctgatcgcgtgtctggaagccaagcgcgccgcgagtattctgaaatatctgccgttcccggttaccagcatgaaagacatccaaggtctgccgtgcattggcgaccaaagtcgtgacgtgatcgaggagatcatcgaagagggcgagagcagccgtgttaaagaagttctcaatgacgagcgctacaaggcctttaagcagttcaccagcgtgttcggtgtgggcgtgaaaaccagcgaaaagtggtttcgtatgggcctccgtacggttgaagaggcaaaggccagtaagagtctgaagctgagcaagatgcagaaggcgggcttcctgtattacgaggatctggcgagctgcgttagtaaagcggaagccgatgccgttacgctcatcgtgaagaacacggtgcgtacctttctgccggatgcgctggtgaccatcaccggcggtttccgccgtggcaaacctatgggccacgacatcgactttctgatcacgaatccgggcccgaaagaggatgacgagctgctccacaaagtggttgatctgctcaagaagcaaggtctgctgctgtactgcgacatcaaagagagcacgttcgtggaggaacaactgccaagtcgcaaaatcgacgccatggacaacttccagaagtgcttcgccattctcaagctgtaccagccgggcgtggataacagcagctataacacgagtaagaagagtgacatggccgaggttaaggattggaaagcgattcgtgtggatctggtgatcacgccattcgagcagtacgcctatgcgctgctcggttggacgggcagcaaagaatttggtcgcgatctgcgccgctatgcggaggaagagcgcggcatgatcctcgacaaccatggcctctacgaccgcaaaaagcgcatctttctgaaagcgggcagcgaagaagagattttcgcgcatctgggtctggattatgtggagccgtgggaacgcaacgcg

SEQ ID NO: 1664 - protein, 394 aa, synthetic construct
  REGION 1..394: note = Variant of terminal deoxynucleotidyl transferase
MHHHHHHGGSGHPPSNTPEGEVPSVIARKVSQYSCQRKTTLNNYNKKFTDALEIMAENYKFKENLIACLEAKRAASILKYLPFPVTSMKDIQGLPCIGDQSRDVIEEIIEEGESSRVKEVLNDERYKAFKQFTSVFGVGVKTSEKWFRMGLRTVEEAKASKSLKLSKMQKAGFLYYEDLASCVSKAEADAVTLIVKNTVRTFLPDALVTITGGFRRGKPMGHDIDFLITNPGPKEDDELLHKVVDLLKKQGLLLYCDIKESTFVEEQLPSRKIDAMDNFQKCFAILKLYQPGVDNSSYNTSKKSDMAEVKDWKAIRVDLVITPFEQYAYALLGWTGSKEFGRDLRRYAEEERGMILDNHGLYDRKKRIFLKAGSEEEIFAHLGLDYVEPWERNA

SEQ ID NO: 1665 - DNA, 1182 bp, synthetic construct
  misc_feature 1..1182: note = Variant of terminal deoxynucleotidyl transferase
  source 1..1182: mol_type = other DNA
atgcaccatcatcatcatcatggcggtagcggccatccgccgagcaataccccggagggggaggtgccgagcgttatcgcccgcaaggttagtcagtacagctgccagcgcaagaccacgctgaataactacaacaaaaagtttaccgacgcgctggagatcatggccgagaactacaaatttaaagagaacctgatcgcgtgtctggaagccaagcgcgccgcgagtattctgaaatatctgccgttcccggttaccagcatgaaagacatccaaggtctgccgtgcattggcgaccaagttcgtgacgtgatcgaggagatcatcgaagagggcgagagcagccgtgttaaagaagttctcaatgacgagcgctacaaggcctttaagcagttcaccagcgtgttcggtgtgggcgtgaaaaccagcgaaaagtggtttcgtatgggcctccgtacgctggaagaggcaaaggccagtaagagtctgaagctgagcaagatgcagaaggcgggcttcctgtattacgaggatctggcgagctgcgttagtaaagcggaagccgatgccgttacgctcatcgtgaagaacacggtgcgtacctttctgccggatgcgctggtgaccatcaccggcggtttccgccgtggcaaacctatgggccacgacatcgactttctgatcacgaatccgggcccgaaagaggatgacgagctgctccacaaagtggttgatctgctcaagaagcaaggtctgctgctgtactgcgacatcaaagagagcacgttcgtggaggaacaactgccaagtcgcaaaatcgacgccatggacaacttccagaagtgcttcgccattctcaagctgtaccagccgggcgtggataacagcagctataacacgagtaagaagagtgacatggccgaggttaaggattggaaagcgattcgtgtggatctggtgatcacgccattcgagcagtacgcctatgcgctgctcggttggacgggcagcaaagaatttggtcgcgatctgcgccgctatgcggaggaagagcgcggcatgatcctcgacaaccatggcctctacgaccgcaaaaagcgcatctttctgaaagcgggcagcgaagaagagattttcgcgcatctgggtctggattatgtggagccgtgggaacgcaacgcg

SEQ ID NO: 1666 - protein, 394 aa, synthetic construct
  REGION 1..394: note = Variant of terminal deoxynucleotidyl transferase
MHHHHHHGGSGHPPSNTPEGEVPSVIARKVSQYSCQRKTTLNNYNKKFTDALEIMAENYKFKENLIACLEAKRAASILKYLPFPVTSMKDIQGLPCIGDQVRDVIEEIIEEGESSRVKEVLNDERYKAFKQFTSVFGVGVKTSEKWFRMGLRTLEEAKASKSLKLSKMQKAGFLYYEDLASCVSKAEADAVTLIVKNTVRTFLPDALVTITGGFRRGKPMGHDIDFLITNPGPKEDDELLHKVVDLLKKQGLLLYCDIKESTFVEEQLPSRKIDAMDNFQKCFAILKLYQPGVDNSSYNTSKKSDMAEVKDWKAIRVDLVITPFEQYAYALLGWTGSKEFGRDLRRYAEEERGMILDNHGLYDRKKRIFLKAGSEEEIFAHLGLDYVEPWERNA

SEQ ID NO: 1667 - DNA, 1182 bp, synthetic construct
  misc_feature 1..1182: note = Variant of terminal deoxynucleotidyl transferase
  source 1..1182: mol_type = other DNA
atgcaccatcatcatcatcatggcggtagcggccatccgccgagcaataccccggagggggaggtgccgagcgttatcgcccgcaaggttagtcagtacagctgccagcgcaagaccacgctgaataactacaacaaaaagtttaccgacgcgctggagatcatggccgagaactacaaatttaaagagaacctgatcgcgtgtctggaagccaagcgcgccgcgagtattctgaaatatctgccgttcccggttaccagcatgaaagacatccaaggtctgccgtgcattggcgaccaagttcgtgacgtgatcgaggagatcatcgaagagggcgagagcagccgtgttaaagaagttctcaatgacgagcgctacaaggcctttaagcagttcaccagcgtgttcggtgtgggcgtgaaaaccagcgaaaagtggtttcgtatgggcctccgtacggttgaagaggcaaaggccagtaagagtctgaagctgagcaagatgcagaaggcgggcttcctgtattacgaggatctggcgagctgcgttactaaagcggaagccgatgccgttacgctcatcgtgaagaacacggtgcgtacctttctgccggatgcgctggtgaccatcaccggcggtttccgccgtggcaaacctatgggccacgacatcgactttctgatcacgaatccgggcccgaaagaggatgacgagctgctccacaaagtggttgatctgctcaagaagcaaggtctgctgctgtactgcgacatcaaagagagcacgttcgtggaggaacaactgccaagtcgcaaaatcgacgccatggacaacttccagaagtgcttcgccattctcaagctgtaccagccgggcgtggataacagcagctataacacgagtaagaagagtgacatggccgaggttaaggattggaaagcgattcgtgtggatctggtgatcacgccattcgagcagtacgcctatgcgctgctcggttggacgggcagcaaagaatttggtcgcgatctgcgccgctatgcggaggaagagcgcggcatgatcctcgacaaccatggcctctacgaccgcaaaaagcgcatctttctgaaagcgggcagcgaagaagagattttcgcgcatctgggtctggattatgtggagccgtgggaacgcaacgcg

SEQ ID NO: 1668 - protein, 394 aa, synthetic construct
  REGION 1..394: note = Variant of terminal deoxynucleotidyl transferase
MHHHHHHGGSGHPPSNTPEGEVPSVIARKVSQYSCQRKTTLNNYNKKFTDALEIMAENYKFKENLIACLEAKRAASILKYLPFPVTSMKDIQGLPCIGDQVRDVIEEIIEEGESSRVKEVLNDERYKAFKQFTSVFGVGVKTSEKWFRMGLRTVEEAKASKSLKLSKMQKAGFLYYEDLASCVTKAEADAVTLIVKNTVRTFLPDALVTITGGFRRGKPMGHDIDFLITNPGPKEDDELLHKVVDLLKKQGLLLYCDIKESTFVEEQLPSRKIDAMDNFQKCFAILKLYQPGVDNSSYNTSKKSDMAEVKDWKAIRVDLVITPFEQYAYALLGWTGSKEFGRDLRRYAEEERGMILDNHGLYDRKKRIFLKAGSEEEIFAHLGLDYVEPWERNA

SEQ ID NO: 1669 - DNA, 1182 bp, synthetic construct
  misc_feature 1..1182: note = Variant of terminal deoxynucleotidyl transferase
  source 1..1182: mol_type = other DNA
atgcaccatcatcatcatcatggcggtagcggccatccgccgagcaataccccggagggggaggtgccgagcgttatcgcccgcaaggttagtcagtacagctgccagcgcaagaccacgctgaataactacaacaaaaagtttaccgacgcgctggagatcatggccgagaactacaaatttaaagagaacctgatcgcgtgtctggaagccaagcgcgccgcgagtattctgaaatatctgccgttcccggttaccagcatgaaagacatccaaggtctgccgtgcattggcgaccaagttaaggacgtgatcgaggagatcatcgaagagggcgagagcagccgtgttaaagaagttctcaatgacgagcgctacaaggcctttaagcagttcaccagcgtgttcggtgtgggcgtgaaaaccagcgaaaagtggtttcgtatgggcctccgtacggttgaagaggcaaaggccagtaagagtctgaagctgagcaagatgcagaaggcgggcttcctgtattacgaggatctggcgagctgcgttagtaaagcggaagccgatgccgttacgctcatcgtgaagaacacggtgcgtacctttctgccggatgcgctggtgaccatcaccggcggtttccgccgtggcaaacctatgggccacgacatcgactttctgatcacgaatccgggcccgaaagaggatgacgagctgctccacaaagtggttgatctgctcaagaagcaaggtctgctgctgtactgcgacatcaaagagagcacgttcgtggaggaacaactgccaagtcgcaaaatcgacgccatggacaacttccagaagtgcttcgccattctcaagctgtaccagccgggcgtggataacagcagctataacacgagtaagaagagtgacatggccgaggttaaggattggaaagcgattcgtgtggatctggtgatcacgccattcgagcagtacgcctatgcgctgctcggttggacgggcagcaaagaatttggtcgcgatctgcgccgctatgcggaggaagagcgcggcatgatcctcgacaaccatggcctctacgaccgcaaaaagcgcatctttctgaaagcgggcagcgaagaagagattttcgcgcatctgggtctggattatgtggagccgtgggaacgcaacgcg

SEQ ID NO: 1670 - protein, 394 aa, synthetic construct
  REGION 1..394: note = Variant of terminal deoxynucleotidyl transferase
MHHHHHHGGSGHPPSNTPEGEVPSVIARKVSQYSCQRKTTLNNYNKKFTDALEIMAENYKFKENLIACLEAKRAASILKYLPFPVTSMKDIQGLPCIGDQVKDVIEEIIEEGESSRVKEVLNDERYKAFKQFTSVFGVGVKTSEKWFRMGLRTVEEAKASKSLKLSKMQKAGFLYYEDLASCVSKAEADAVTLIVKNTVRTFLPDALVTITGGFRRGKPMGHDIDFLITNPGPKEDDELLHKVVDLLKKQGLLLYCDIKESTFVEEQLPSRKIDAMDNFQKCFAILKLYQPGVDNSSYNTSKKSDMAEVKDWKAIRVDLVITPFEQYAYALLGWTGSKEFGRDLRRYAEEERGMILDNHGLYDRKKRIFLKAGSEEEIFAHLGLDYVEPWERNA

SEQ ID NO: 1671 - DNA, 1182 bp, synthetic construct
  misc_feature 1..1182: note = Variant of terminal deoxynucleotidyl transferase
  source 1..1182: mol_type = other DNA
atgcaccatcatcatcatcatggcggtagcggccatccgccgagcaataccccggagggggaggtgccgagcgttatcgcccgcaaggttagtcagtacagctgccagcgcaagaccacgctgaataactacaacaaaaagtttaccgacgcgctggagatcatggccgagaactacaaatttaaagagaacctgatcgcgtgtctggaagccaagcgcgccgcgagtattctgaaatatctgccgttcccggttaccagcatgaaagacatccaaggtctgccgtgcattggcgaccaagttcgtgacgtgatcgaggagatcatcgaagagggcgagagcagccgtgttaaagaagttctcaatgacgagcgctacaaggcctttaagcagttcaccagcgtgttcggtgtgggcgtgaaaaccagcgaaaagtggtttcgtatgggcctccgtacggttgaagacgcaaaggccagtaagagtctgaagctgagcaagatgcagaaggcgggcttcctgtattacgaggatctggcgagctgcgttagtaaagcggaagccgatgccgttacgctcatcgtgaagaacacggtgcgtacctttctgccggatgcgctggtgaccatcaccggcggtttccgccgtggcaaacctatgggccacgacatcgactttctgatcacgaatccgggcccgaaagaggatgacgagctgctccacaaagtggttgatctgctcaagaagcaaggtctgctgctgtactgcgacatcaaagagagcacgttcgtggaggaacaactgccaagtcgcaaaatcgacgccatggacaacttccagaagtgcttcgccattctcaagctgtaccagccgggcgtggataacagcagctataacacgagtaagaagagtgacatggccgaggttaaggattggaaagcgattcgtgtggatctggtgatcacgccattcgagcagtacgcctatgcgctgctcggttggacgggcagcaaagaatttggtcgcgatctgcgccgctatgcggaggaagagcgcggcatgatcctcgacaaccatggcctctacgaccgcaaaaagcgcatctttctgaaagcgggcagcgaagaagagattttcgcgcatctgggtctggattatgtggagccgtgggaacgcaacgcg

SEQ ID NO: 1672 - protein, 394 aa, synthetic construct
  REGION 1..394: note = Variant of terminal deoxynucleotidyl transferase
MHHHHHHGGSGHPPSNTPEGEVPSVIARKVSQYSCQRKTTLNNYNKKFTDALEIMAENYKFKENLIACLEAKRAASILKYLPFPVTSMKDIQGLPCIGDQVRDVIEEIIEEGESSRVKEVLNDERYKAFKQFTSVFGVGVKTSEKWFRMGLRTVEDAKASKSLKLSKMQKAGFLYYEDLASCVSKAEADAVTLIVKNTVRTFLPDALVTITGGFRRGKPMGHDIDFLITNPGPKEDDELLHKVVDLLKKQGLLLYCDIKESTFVEEQLPSRKIDAMDNFQKCFAILKLYQPGVDNSSYNTSKKSDMAEVKDWKAIRVDLVITPFEQYAYALLGWTGSKEFGRDLRRYAEEERGMILDNHGLYDRKKRIFLKAGSEEEIFAHLGLDYVEPWERNA

SEQ ID NO: 1673 - DNA, 1182 bp, synthetic construct
  misc_feature 1..1182: note = Variant of terminal deoxynucleotidyl transferase
  source 1..1182: mol_type = other DNA
atgcaccatcatcatcatcatggcggtagcggccatccgccgagcaataccccggagggggaggtgccgagcgttatcgcccgcaaggttagtcagtacagctgccagcgcaagaccacgctgaataactacaacaaaaagtttaccgacgcgctggagatcatggccgagaactacaaatttaaagagaacctgatcgcgtgtctggaagccaagcgcgccgcgagtattctgaaatatctgccgttcccggttaccagcatgaaagacatccaaggtctgccgtgcattggcgaccaagttcgtgacgtgatcgaggagatcatcgaagagggcgagagcagccgtgttaaagaagttctcaatgacgagcgctacaaggcctttaagcagttcaccagcgtgttcggtgtgggcgtgaaaaccagcgaaaagtggtttcgtatgggcctccgtacggttgaagaggcaaaggccagtaagagtctgaagctgagccgcatgcagaaggcgggcttcctgtattacgaggatctggcgagctgcgttagtaaagcggaagccgatgccgttacgctcatcgtgaagaacacggtgcgtacctttctgccggatgcgctggtgaccatcaccggcggtttccgccgtggcaaacctatgggccacgacatcgactttctgatcacgaatccgggcccgaaagaggatgacgagctgctccacaaagtggttgatctgctcaagaagcaaggtctgctgctgtactgcgacatcaaagagagcacgttcgtggaggaacaactgccaagtcgcaaaatcgacgccatggacaacttccagaagtgcttcgccattctcaagctgtaccagccgggcgtggataacagcagctataacacgagtaagaagagtgacatggccgaggttaaggattggaaagcgattcgtgtggatctggtgatcacgccattcgagcagtacgcctatgcgctgctcggttggacgggcagcaaagaatttggtcgcgatctgcgccgctatgcggaggaagagcgcggcatgatcctcgacaaccatggcctctacgaccgcaaaaagcgcatctttctgaaagcgggcagcgaagaagagattttcgcgcatctgggtctggattatgtggagccgtgggaacgcaacgcg

SEQ ID NO: 1674 - protein, 394 aa, synthetic construct
  REGION 1..394: note = Variant of terminal deoxynucleotidyl transferase
MHHHHHHGGSGHPPSNTPEGEVPSVIARKVSQYSCQRKTTLNNYNKKFTDALEIMAENYKFKENLIACLEAKRAASILKYLPFPVTSMKDIQGLPCIGDQVRDVIEEIIEEGESSRVKEVLNDERYKAFKQFTSVFGVGVKTSEKWFRMGLRTVEEAKASKSLKLSRMQKAGFLYYEDLASCVSKAEADAVTLIVKNTVRTFLPDALVTITGGFRRGKPMGHDIDFLITNPGPKEDDELLHKVVDLLKKQGLLLYCDIKESTFVEEQLPSRKIDAMDNFQKCFAILKLYQPGVDNSSYNTSKKSDMAEVKDWKAIRVDLVITPFEQYAYALLGWTGSKEFGRDLRRYAEEERGMILDNHGLYDRKKRIFLKAGSEEEIFAHLGLDYVEPWERNA

SEQ ID NO: 1675 - DNA, 1182 bp, synthetic construct
  misc_feature 1..1182: note = Variant of terminal deoxynucleotidyl transferase
  source 1..1182: mol_type = other DNA
atgcaccatcatcatcatcatggcggtagcggccatccgccgagcaataccccggagggggaggtgccgagcgttatcgcccgcaaggttagtcagtacagctgccagcgccgtaccacgctgaataactacaacaaaaagtttaccgacgcgctggagatcatggccgagaactacaaatttaaagagaacctgatcgcgtgtctggaagccaagcgcgccgcgagtattctgaaatatctgccgttcccggttaccagcatgaaagacatccaaggtctgccgtgcattggcgaccaagttcgtgacgtgatcgaggagatcatcgaagagggcgagagcagccgtgttaaagaagttctcaatgacgagcgctacaaggcctttaagcagttcaccagcgtgttcggtgtgggcgtgaaaaccagcgaaaagtggtttcgtatgggcctccgtacggttgaagaggcaaaggccagtaagagtctgaagctgagcaagatgcagaaggcgggcttcctgtattacgaggatctggcgagctgcgttagtaaagcggaagccgatgccgttacgctcatcgtgaagaacacggtgcgtacctttctgccggatgcgctggtgaccatcaccggcggtttccgccgtggcaaacctatgggccacgacatcgactttctgatcacgaatccgggcccgaaagaggatgacgagctgctccacaaagtggttgatctgctcaagaagcaaggtctgctgctgtactgcgacatcaaagagagcacgttcgtggaggaacaactgccaagtcgcaaaatcgacgccatggacaacttccagaagtgcttcgccattctcaagctgtaccagccgggcgtggataacagcagctataacacgagtaagaagagtgacatggccgaggttaaggattggaaagcgattcgtgtggatctggtgatcacgccattcgagcagtacgcctatgcgctgctcggttggacgggcagcaaagaatttggtcgcgatctgcgccgctatgcggaggaagagcgcggcatgatcctcgacaaccatggcctctacgaccgcaaaaagcgcatctttctgaaagcgggcagcgaagaagagattttcgcgcatctgggtctggattatgtggagccgtgggaacgcaacgcg

SEQ ID NO: 1676 - protein, 394 aa, synthetic construct
  REGION 1..394: note = Variant of terminal deoxynucleotidyl transferase
MHHHHHHGGSGHPPSNTPEGEVPSVIARKVSQYSCQRRTTLNNYNKKFTDALEIMAENYKFKENLIACLEAKRAASILKYLPFPVTSMKDIQGLPCIGDQVRDVIEEIIEEGESSRVKEVLNDERYKAFKQFTSVFGVGVKTSEKWFRMGLRTVEEAKASKSLKLSKMQKAGFLYYEDLASCVSKAEADAVTLIVKNTVRTFLPDALVTITGGFRRGKPMGHDIDFLITNPGPKEDDELLHKVVDLLKKQGLLLYCDIKESTFVEEQLPSRKIDAMDNFQKCFAILKLYQPGVDNSSYNTSKKSDMAEVKDWKAIRVDLVITPFEQYAYALLGWTGSKEFGRDLRRYAEEERGMILDNHGLYDRKKRIFLKAGSEEEIFAHLGLDYVEPWERNA

SEQ ID NO: 1677 - DNA, 1182 bp, synthetic construct
  misc_feature 1..1182: note = Variant of terminal deoxynucleotidyl transferase
  source 1..1182: mol_type = other DNA
atgcaccatcatcatcatcatggcggtagcggccatccgccgagcaataccccggagggggaggtgccgagcgttatcgcccgcaaggttagtcagtacagctgccagcgcaagaccacgctgaataactacaacaaaaagtttaccgacgcgctggagatcatggccgagaactacaaatttaaagagaacctgatcgcgtgtctggaagccaagcgcgccgcgagtattctgaaatatctgccgttcccggttaccagcatgaaagacatccaaggtctgccgtgcattggcgaccaagttcgtgacgtgatcgaggagatcatcgaagagggcgagagcagccgtgttaaagaagttctcaatgacgagcgctacaaggcctttaagcagttcaccagcgtgttcggtgtgggcgtgaaaaccagcgaaaagtggtttcgtatgggcctccgtacggttgaagaggcaaaggccagtaagagtctgaagctgagcaagatgcagaaggcgggcttcctgtattacgaggatctggcgagccgcgttagtaaagaagaagccgatgccgttacgctcatcgtgaagaacacggtgcgtacctttctgccggatgcgctggtgaccatcaccggcggtttccgccgtggcaaacctatgggccacgacatcgactttctgatcacgaatccgggcccgaaagaggatgacgagctgctccacaaagtggttgatctgctcaagaagcaaggtctgctgctgtacgaagacatcaaagagagcacgttcgtggaggaacaactgccaagtcgcaaaatcgacgccatggacaacttccagaagtgcttcgccattctcaagctgtaccagccgggcgtggataacagcagctataacacgagtaagaagagtgacatggccgaggttaaggattggaaagcgattcgtgtggatctggtgatcacgccattcgagcagtacgcctatgcgctgctcggttggacgggcagcaaagaatttggtcgcgatctgcgccgctatgcggaggaagagcgcggcatgatcctcgacaaccatgccctctacgaccgcaaaaagcgcatctttctgaaagcgggcagcgaagaagagattttcgcgcatctgggtctggattatgtggagccgtgggaacgcaacgcg

SEQ ID NO: 1678 - protein, 394 aa, synthetic construct
  REGION 1..394: note = Variant of terminal deoxynucleotidyl transferase
MHHHHHHGGSGHPPSNTPEGEVPSVIARKVSQYSCQRKTTLNNYNKKFTDALEIMAENYKFKENLIACLEAKRAASILKYLPFPVTSMKDIQGLPCIGDQVRDVIEEIIEEGESSRVKEVLNDERYKAFKQFTSVFGVGVKTSEKWFRMGLRTVEEAKASKSLKLSKMQKAGFLYYEDLASRVSKEEADAVTLIVKNTVRTFLPDALVTITGGFRRGKPMGHDIDFLITNPGPKEDDELLHKVVDLLKKQGLLLYEDIKESTFVEEQLPSRKIDAMDNFQKCFAILKLYQPGVDNSSYNTSKKSDMAEVKDWKAIRVDLVITPFEQYAYALLGWTGSKEFGRDLRRYAEEERGMILDNHALYDRKKRIFLKAGSEEEIFAHLGLDYVEPWERNA

SEQ ID NO: 1679 - DNA, 1182 bp, synthetic construct
  misc_feature 1..1182: note = Variant of terminal deoxynucleotidyl transferase
  source 1..1182: mol_type = other DNA
atgcaccatcatcatcatcatggcggtagcggccatccgccgagcaataccccggagggggaggtgccgagcgttatcgcccgcaaggttagtcagtacagctgccagcgcaagaccacgctgaataactacaacaaaaagtttaccgacgcgctggagatcatggccgagaactacaaatttaaagagaacctgatcgcgtgtctggaagccaagcgcgccgcgagtattctgaaatatctgccgttcccggttaccagcatgaaagacatccaaggtctgccgtgcattggcgaccaagttcgtgacgtgatcgaggagatcatcgaagagggcgagagcagccgtgttaaagaagttctcaatgacgagcgctacaaggcctttaagcagttcaccagcgtgttcggtgtgggcgtgaaaaccagcgaaaagtggtttcgtatgggcctccgtacggttgaagaggcaaaggccagtaagagtctgaagctgagcaagatgcagaaggcgggcttcctgtattacgaggatctggcgagccgcgttagtaaagccgaagccgatgccgttacgctcatcgtgaagaacacggtgcgtacctttctgccggatgcgctggtgaccatcaccggcggtttccgccgtggcaaacctatgggccacgacatcgactttctgatcacgaatccgggcccgaaagaggatgacgagctgctccacaaagtggttgatctgctcaagaagcaaggtctgctgctgtacgaagacatcaaagagagcacgttcgtggaggaacaactgccaagtcgcaaaatcgacgccatggacaacttccagaagtgcttcgccattctcaagctgtaccagccgggcgtggataacagcagctataacacgagtaagaagagtgacatggccgaggttaaggattggaaagcgattcgtgtggatctggtgatcacgccattcgagcagtacgcctatgcgctgctcggttggacgggcagcaaagaatttggtcgcgatctgcgccgctatgcggaggaagagcgcggcatgatcctcgacaaccatggcctctacgaccgcaaaaagcgcatctttctgaaagcgggcagtgaagaagagattttcgcgcatctgggtctggattatgtggagccgtgggaacgcaacgcg

SEQ ID NO: 1680 - protein, 394 aa, synthetic construct
  REGION 1..394: note = Variant of terminal deoxynucleotidyl transferase
MHHHHHHGGSGHPPSNTPEGEVPSVIARKVSQYSCQRKTTLNNYNKKFTDALEIMAENYKFKENLIACLEAKRAASILKYLPFPVTSMKDIQGLPCIGDQVRDVIEEIIEEGESSRVKEVLNDERYKAFKQFTSVFGVGVKTSEKWFRMGLRTVEEAKASKSLKLSKMQKAGFLYYEDLASRVSKAEADAVTLIVKNTVRTFLPDALVTITGGFRRGKPMGHDIDFLITNPGPKEDDELLHKVVDLLKKQGLLLYEDIKESTFVEEQLPSRKIDAMDNFQKCFAILKLYQPGVDNSSYNTSKKSDMAEVKDWKAIRVDLVITPFEQYAYALLGWTGSKEFGRDLRRYAEEERGMILDNHGLYDRKKRIFLKAGSEEEIFAHLGLDYVEPWERNA

SEQ ID NO: 1681 - DNA, 1182 bp, synthetic construct
  misc_feature 1..1182: note = Variant of terminal deoxynucleotidyl transferase
  source 1..1182: mol_type = other DNA
atgcaccatcatcatcatcatggcggtagcggccatccgccgagcaataccccggagggggaggtgccgagcgttatcgcccgcaaggttagtcagtacagctgccagcgcaagaccactctgaataactacaacaaaaagtttaccgacgcgctggagatcatggccgagaactacaaatttaaagagaacctgatcgcgtgtctggaagccaagcgcgccgcgagtattctgaaatatctgccgttcccggttaccagcatgaaagacatccaaggtctgccgtgcattggcgaccaagttcgtgacgtgatcgaggagatcatcgaagagggcgagagcagccgtgttaaagaagttctcaatgacgagcgctacaaggcctttaagcagttcaccagcgtgttcggtgtgggcgtgaaaaccagcgaaaagtggtttcgtatgggcctccgtacggttgaagaggcaaaggccagtaagagtctgaagctgagcaagatgcagaaggcgggcttcctgtattacgaggatctggcgagctgcgttagtaaagaagaagccgatgccgttacgctcatcgtgaagaacacggtgcgtacctttctgccggatgcgctggtgaccatcaccggcggtttccgccgtggcaaacctatgggccacgacatcgactttctgatcacgaatccgggcccgaaagaggatgacgagctgctccacaaagtggttgatctgctcaagaagcaaggtctgctgctgtacgaagacatcaaagagagcacgttcgtggaggaacaactgccaacccgcaaaatcgacgccatggacaacttccagaagtgcttcgccattctcaagctgtaccagccgggcgtggataacagcagctataacacgagtaagaagagtgacatggccgaggtaaaggattggaaagcgattcgtgtggatctggtgatcacgccattcgagcagtacgcctatgcgctgctcggttggacgggcagcaaagaatttggtcgcgatctgcgccgctatgcggaggaagagcgcggcatgatcctcgacaaccatggcctctacgaccgcaaaaagcgcatctttctgaaagcgggcagcgaagaagagattttcgcgcatctgggtctggattatgtggagccgtgggaacgcaacgcg

SEQ ID NO: 1682 - protein, 394 aa, synthetic construct
  REGION 1..394: note = Variant of terminal deoxynucleotidyl transferase
MHHHHHHGGSGHPPSNTPEGEVPSVIARKVSQYSCQRKTTLNNYNKKFTDALEIMAENYKFKENLIACLEAKRAASILKYLPFPVTSMKDIQGLPCIGDQVRDVIEEIIEEGESSRVKEVLNDERYKAFKQFTSVFGVGVKTSEKWFRMGLRTVEEAKASKSLKLSKMQKAGFLYYEDLASCVSKEEADAVTLIVKNTVRTFLPDALVTITGGFRRGKPMGHDIDFLITNPGPKEDDELLHKVVDLLKKQGLLLYEDIKESTFVEEQLPTRKIDAMDNFQKCFAILKLYQPGVDNSSYNTSKKSDMAEVKDWKAIRVDLVITPFEQYAYALLGWTGSKEFGRDLRRYAEEERGMILDNHGLYDRKKRIFLKAGSEEEIFAHLGLDYVEPWERNA

SEQ ID NO: 1683 - DNA, 1182 bp, synthetic construct
  misc_feature 1..1182: note = Variant of terminal deoxynucleotidyl transferase
  source 1..1182: mol_type = other DNA
atgcaccatcatcatcatcatggcggtagcggccatccgccgagcaataccccggagggggaggtgccgagcgttatcgcccgcaaggttagtcagtacagctgccagcgcaagaccacgctgaataactacaacaaaaagtttaccgacgcgctggagatcatggccgagaactacaaatttaaagagaacctgatcgcgtgtctggaagccaagcgcgccgcgagtattctgaaatatctgccgttcccggttaccagcatgaaagacatccaaggtctgccgtgcattggcgaccaagttcgtgacgtgatcgaggagatcatcgaagagggcgagagcagccgtgttaaagaagttctcaatgacgagcgctacaaggcctttaagcagttcaccagcgtgttcggtgtgggcgtgaaaaccagcgaaaagtggtttcgtatgggcctccgtacggttgaagaggcaaaggccagtaagagtctgaagctgagcaagatgcagaaggcgggcttcctgtattacgaggatctggcgagctgcgttagtaaagccgaagccgatgccgttacgctcatcgtgaagaacacggtgcgtacctttctgccggatgcgctggtgaccatcaccggcggtttccgccgtggcaaacctatgggccacgacatcgactttctgatcacgaatccgggcccgaaagaggatgacgagctgctccacaaagtggttgatctgctcaagaagcaaggtctgctgctgtactgtgacatcaaagagagcacgttcgtggaggaacaactgccaacccgcaaaatcgacgccatggacaacttccagaagtgcttcgccattctcaagctgtaccagccgggcgtggataacagcagctataacacgagtaagaagagtgacatggccgagaaaaaggattggaaagcgattcgtgtggatctggtgatcacgccattcgagcagtacgcctatgcgctgctcggttggacgggcagcaaagaatttggtcgcgatctgcgccgctatgcggaggaagagcgcggcatgatcctcgacaaccatggcctctacgaccgcaaaaagcgcatctttctgaaagcgggcagtgaagaagagattttcgcgcatctgggtctggattatgtggagccgtgggaacgcaacgcg

SEQ ID NO: 1684 - protein, 394 aa, synthetic construct
  REGION 1..394: note = Variant of terminal deoxynucleotidyl transferase
MHHHHHHGGSGHPPSNTPEGEVPSVIARKVSQYSCQRKTTLNNYNKKFTDALEIMAENYKFKENLIACLEAKRAASILKYLPFPVTSMKDIQGLPCIGDQVRDVIEEIIEEGESSRVKEVLNDERYKAFKQFTSVFGVGVKTSEKWFRMGLRTVEEAKASKSLKLSKMQKAGFLYYEDLASCVSKAEADAVTLIVKNTVRTFLPDALVTITGGFRRGKPMGHDIDFLITNPGPKEDDELLHKVVDLLKKQGLLLYCDIKESTFVEEQLPTRKIDAMDNFQKCFAILKLYQPGVDNSSYNTSKKSDMAEKKDWKAIRVDLVITPFEQYAYALLGWTGSKEFGRDLRRYAEEERGMILDNHGLYDRKKRIFLKAGSEEEIFAHLGLDYVEPWERNA

SEQ ID NO: 1685 - DNA, 1182 bp, synthetic construct
  misc_feature 1..1182: note = Variant of terminal deoxynucleotidyl transferase
  source 1..1182: mol_type = other DNA
atgcaccatcatcatcatcatggcggtagcggccatccgccgagcaataccccggagggggaggtgccgagcgttatcgcccgcaaggttagtcagtacagctgccagcgcaagaccacgctgaataactacaacaaaaagtttaccgacgcgctggagatcatggccgagaactacaaatttaaagagaacctgatcgcgtgtctggaagccaagcgcgccgcgagtattctgaaatatctgccgttcccggttaccagcatgaaagacatccaaggtctgccgtgcattggcgaccaagttcgtgacgtgatcgaggagatcatcgaagagggcgagagcagccgtgttaaagaagttctcaatgacgagcgctacaaggcctttaagcagttcaccagcgtgttcggtgtgggcgtgaaaaccagcgaaaagtggtttcgtatgggcctccgtacggttgaagaggcaaaggccagtaagagtctgaagctgagcaagatgcagaaggcgggcttcctgtattacgaggatctggcgagctgcgttagtaaagaagaagccgatgccgttacgctcatcgtgaagaacacggtgcgtacctttctgccggatgcgctggtgaccatcaccggcggtttccgccgtggcaaacctatgggccacgacatcgactttctgatcacgaatccgggcccgaaagaggatgacgagctgctccacaaagtggttgatctgctcaagaagcaaggtctgctgctgtacgaagacatcaaagagagcacgttcgtggaggaacaactgccaagccgcaaaatcgacgccatggacaacttccagaagtgcttcgccattctcaagctgtaccagccgggcgtggataacagcagctataacacgagtaagaagagtgacatggccgaggtaaaggattggaaagcgattcgtgtggatctggtgatcacgccattcgagcagtacgcctatgcgctgctcggttggacgggcagcaaagaatttggtcgcgatctgcgccgctatgcggaggaagagcgcggcatgatcctcgacaaccatggcctctacgaccgcaaaaagcgcatctttctgaaagcgggcagcgaagaagagattttcgcgcatctgggtctggattatgtggagccgtgggaacgcaacgcg

SEQ ID NO: 1686 - protein, 394 aa, synthetic construct
  REGION 1..394: note = Variant of terminal deoxynucleotidyl transferase
MHHHHHHGGSGHPPSNTPEGEVPSVIARKVSQYSCQRKTTLNNYNKKFTDALEIMAENYKFKENLIACLEAKRAASILKYLPFPVTSMKDIQGLPCIGDQVRDVIEEIIEEGESSRVKEVLNDERYKAFKQFTSVFGVGVKTSEKWFRMGLRTVEEAKASKSLKLSKMQKAGFLYYEDLASCVSKEEADAVTLIVKNTVRTFLPDALVTITGGFRRGKPMGHDIDFLITNPGPKEDDELLHKVVDLLKKQGLLLYEDIKESTFVEEQLPSRKIDAMDNFQKCFAILKLYQPGVDNSSYNTSKKSDMAEVKDWKAIRVDLVITPFEQYAYALLGWTGSKEFGRDLRRYAEEERGMILDNHGLYDRKKRIFLKAGSEEEIFAHLGLDYVEPWERNA

SEQ ID NO: 1687 - DNA, 1182 bp, synthetic construct
  misc_feature 1..1182: note = Variant of terminal deoxynucleotidyl transferase
  source 1..1182: mol_type = other DNA
atgcaccatcatcatcatcatggcggtagcggccatccgccgagcaataccccggagggggaggtgccgagcgttatcgcccgcaaggttagtcagtacagctgccagcgcaagaccacgctgaataactacaacaaaaagtttaccgacgcgctggagatcatggccgagagctacaaatttaaagagaacctgatcgcgtgtctggaagccaagcgcgccgcgagtattctgaaatatctgccgttcccggttaccagcatgaaagacatccaaggtctgccgtgcattggcgaccaagttcgtgacgtgatcgaggagatcatcgaagagggcgagagcagccgtgttaaagaagttctcaatgacgagcgctacaaggcctttaagcagttcaccagcgtgttcggtgtgggcgtgaaaaccagcgaaaagtggtttcgtatgggcctccgtacggttgaagaggcaaaggccagtaagagtctgaagctgagcaagatgcagaaggcgggcttcctgtattacgaggatctggcgagctgcgttagtaaagaagaagccgatgccgttacgctcatcgtgaagaacacggtgcgtacctttctgccggatgcgctggtgaccatcaccggcggtttccgccgtggcaaacctatgggccacgacatcgactttctgatcacgaatccgggcccgaaagaggatgacgagctgctccacaaagtggttgatctgctcaagaagcaaggtctgctgctgtactgtgacatcaaagagagcacgttcgtggaggaacaactgccaacccgcaaaatcgacgccatggacaacttccagaagtgcttcgccattctcaagctgtaccagccgggcgtggataacagcagctataacacgagtaagaagagtgacatggccgaggtaaaggattggaaagcgattcgtgtggatctggtgatcacgccattcgagcagtacgcctatgcgctgctcggttggacgggcagcaaagaatttggtcgcgatctgcgccgctatgcggaggaagagcgcggcatgatcctcgacaaccatggcctctacgaccgcaaaaagcgcatctttctgaaagcgggcagtgaagaagagattttcgcgcatctgggtctggattatgtggagccgtgggaacgcaacgcg

SEQ ID NO: 1688 - protein, 394 aa, synthetic construct
  REGION 1..394: note = Variant of terminal deoxynucleotidyl transferase
MHHHHHHGGSGHPPSNTPEGEVPSVIARKVSQYSCQRKTTLNNYNKKFTDALEIMAESYKFKENLIACLEAKRAASILKYLPFPVTSMKDIQGLPCIGDQVRDVIEEIIEEGESSRVKEVLNDERYKAFKQFTSVFGVGVKTSEKWFRMGLRTVEEAKASKSLKLSKMQKAGFLYYEDLASCVSKEEADAVTLIVKNTVRTFLPDALVTITGGFRRGKPMGHDIDFLITNPGPKEDDELLHKVVDLLKKQGLLLYCDIKESTFVEEQLPTRKIDAMDNFQKCFAILKLYQPGVDNSSYNTSKKSDMAEVKDWKAIRVDLVITPFEQYAYALLGWTGSKEFGRDLRRYAEEERGMILDNHGLYDRKKRIFLKAGSEEEIFAHLGLDYVEPWERNA

SEQ ID NO: 1689 - DNA, 1182 bp, synthetic construct
  misc_feature 1..1182: note = Variant of terminal deoxynucleotidyl transferase
  source 1..1182: mol_type = other DNA
atgcaccatcatcatcatcatggcggtagcggccatccgccgagcaataccccggagggggaggtggtgagcgttatcgcccgcaaggttagtcagtacagctgccagcgcaagaccacgctgaataactacaacaaaaagtttaccgacgcgctggagatcatggccgagaactacaaatttaaagagaacctgatcgcgtgtctggaagccaagcgcgccgcgagtattctgaaatatctgccgttcccggttaccagcatgaaagacatccaaggtctgccgtgcattggcgaccaagttcgtgacgtgatcgaggagatcatcgaagagggcgagagcagccgtgttaaagaagttctcaatgacgagcgctacaaggcctttaagcagttcaccagcgtgttcggtgtgggcgtgaaaaccagcgaaaagtggtttcgtatgggcctccgtacggttgaagaggcaaaggccagtaagagtctgaagctgagcaagatgcagaaggcgggcttcctgtattacgaggatctggcgagctgcgttagtaaagaagaagccgatgccgttacgctcatcgtgaagaacacggtgcgtacctttctgccggatgcgctggtgaccatcaccggcggtttccgccgtggcaaacctatgggccacgacatcgactttctgatcacgaatccgggcccgaaagaggatgacgagctgctccacaaagtggttgatctgctcaagaagcaaggtctgctgctgtacgaagacatcaaagagagcacgttcgtggaggaacaactgccaagccgcaaaatcgacgccatggacaacttccagaagtgcttcgccattctcaagctgtaccagccgggcgtggataacagcagctataacacgagtaagaagagtgacatggccgagaaaaaggattggaaagcgattcgtgtggatctggtgatcacgccattcgagcagtacgcctatgcgctgctcggttggacgggcagcaaagaatttggtcgcgatctgcgccgctatgcggaggaagagcgcggcatgatcctcgacaaccatggcctctacgaccgcaaaaagcgcatctttctgaaagcgggcagcgaagaagagattttcgcgcatctgggtctggattatgtggagccgtgggaacgcaacgcg

SEQ ID NO: 1690 - protein, 394 aa, synthetic construct
  REGION 1..394: note = Variant of terminal deoxynucleotidyl transferase
MHHHHHHGGSGHPPSNTPEGEVVSVIARKVSQYSCQRKTTLNNYNKKFTDALEIMAENYKFKENLIACLEAKRAASILKYLPFPVTSMKDIQGLPCIGDQVRDVIEEIIEEGESSRVKEVLNDERYKAFKQFTSVFGVGVKTSEKWFRMGLRTVEEAKASKSLKLSKMQKAGFLYYEDLASCVSKEEADAVTLIVKNTVRTFLPDALVTITGGFRRGKPMGHDIDFLITNPGPKEDDELLHKVVDLLKKQGLLLYEDIKESTFVEEQLPSRKIDAMDNFQKCFAILKLYQPGVDNSSYNTSKKSDMAEKKDWKAIRVDLVITPFEQYAYALLGWTGSKEFGRDLRRYAEEERGMILDNHGLYDRKKRIFLKAGSEEEIFAHLGLDYVEPWERNA

SEQ ID NO: 1691 - DNA, 1182 bp, synthetic construct
  misc_feature 1..1182: note = Variant of terminal deoxynucleotidyl transferase
  source 1..1182: mol_type = other DNA
atgcaccatcatcatcatcatggcggtagcggccatccgccgagcaataccccggagggggaggtgccgagcgttatcgcccgcaaggttagtcagtacagctgccagcgcaagaccacgctgaataactacaacaaaaagtttaccgacgcgctggagatcatggccgagaactacaaatttaaagagaacctgatcgcgtgtctggaagccaagcgcgccgcgagtattctgaaatatctgccgttcccggttaccagcatgaaagacatccaaggtctgccgtgcattggcgaccaagttcgtgacgtgatcgaggagatcatcgaagagggcgagagcagccgtgttaaagaagttctcaatgacgagcgctacaaggcctttaagcagttcaccagcgtgttcggtgtgggcgtgaaaaccagcgaaaagtggtttcgtatgggcctccgtacggttgaagaggcaaaggccagtaagagtctgaagctgagcaagatgcagaaggcgggcttcctgtattacgaggatctggcgagctgcgttagtaaagcggaagccgatgccgttacgctcatcgtgaagaacacggtgcgtacctttctgccggatgcgctggtgaccatcaccggcggtttccgccgtggcaaacctatgggccacgacatcgactttctgatcacgaatccgggcccgaaagaggatgacgagctgctccacaaagtggttgatctgctcaagaagcaaggtctgctgctgtacgaagacatcaaagagagcacgttcgtggaggaacaactgccaagccgcaaaatcgacgccatggacaacttccagaagtgcttcgccattctcaagctgtaccagccgggcgtggataacagcagctataacacgagtaagaagagtgacatggccgaggttaaggattggaaagcgattcgtgtggatctggtgatcacgccattcgagcagtacgcctatgcgctgctcggttggacgggcagcaaagaatttggtcgcgatctgcgccgctatgcggaggaagagcgcggcatgatcctcgacaaccatggcctctacgaccgcaaaaagcgcatctttctgaaagcgggcagcgaagaagagattttcgcgcatctgggtctggattatgtggagccgtgggaacgcaacgcg

SEQ ID NO: 1692 - protein, 394 aa, synthetic construct
  REGION 1..394: note = Variant of terminal deoxynucleotidyl transferase
MHHHHHHGGSGHPPSNTPEGEVPSVIARKVSQYSCQRKTTLNNYNKKFTDALEIMAENYKFKENLIACLEAKRAASILKYLPFPVTSMKDIQGLPCIGDQVRDVIEEIIEEGESSRVKEVLNDERYKAFKQFTSVFGVGVKTSEKWFRMGLRTVEEAKASKSLKLSKMQKAGFLYYEDLASCVSKAEADAVTLIVKNTVRTFLPDALVTITGGFRRGKPMGHDIDFLITNPGPKEDDELLHKVVDLLKKQGLLLYEDIKESTFVEEQLPSRKIDAMDNFQKCFAILKLYQPGVDNSSYNTSKKSDMAEVKDWKAIRVDLVITPFEQYAYALLGWTGSKEFGRDLRRYAEEERGMILDNHGLYDRKKRIFLKAGSEEEIFAHLGLDYVEPWERNA

SEQ ID NO: 1693 - DNA, 1182 bp, synthetic construct
  misc_feature 1..1182: note = Variant of terminal deoxynucleotidyl transferase
  source 1..1182: mol_type = other DNA
atgcaccatcatcatcatcatggcggtagcggccatccgccgagcaataccccggagggggaggtgccgagcgttatcgcccgcaaggttagtcagtacagctgccagcgcaagaccacgctgaataactacaacaaaaagtttaccgacgcgctggagatcatggccgagaactacaaatttaaagagaacctgatcgcgtgtctggaagccaagcgcgccgcgagtattctgaaatatctgccgttcccggttaccagcatgaaagacatccaaggtctgccgtgcattggcgaccaagttcgtgacgtgatcgaggagatcatcgaagagggcgagagcagccgtgttaaagaagttctcaatgacgagcgctacaaggcctttaagcagttcaccagcgtgttcggtgtgggcgtgaaaaccagcgaaaagtggtttcgtatgggcctccgtacggttgaagaggcaaaggccagtaagagtctgaagctgagcaagatgcagaaggcgggcttcctgtattacgaggatctggcgagccgcgttagtaaagaagaagccgatgccgttacgctcatcgtgaagaacacggtgcgtacctttctgccggatgcgctggtgaccatcaccggcggtttccgccgtggcaaacctatgggccacgacatcgactttctgatcacgaatccgggcccgaaagaggatgacgagctgctccacaaagtggttgatctgctcaagaagcaaggtctgctgctgtacgaagacatcaaagagagcacgttcgtggaggaacaactgccaagtcgcaaaatcgacgccatggacaacttccagaagtgcttcgccattctcaagctgtaccagccgggcgtggataacagcagctataacacgagtaagaagagtgacatggccgaggttaaggattggaaagcgattcgtgtggatctggtgatcacgccattcgagcagtacgcctatgcgctgctcggttggacgggcagcaaagaatttaagcgcgatctgcgccgctatgcggaggaagagcgcggcatgatcctcgacaaccatgccctctacgaccgcaaaaagcgcatctttctgaaagcgggcagcgaagaagagattttcgcgcatctgggtctggattatgtggagccgtgggaacgcaacgcg

SEQ ID NO: 1694 - protein, 394 aa, synthetic construct
  REGION 1..394: note = Variant of terminal deoxynucleotidyl transferase
MHHHHHHGGSGHPPSNTPEGEVPSVIARKVSQYSCQRKTTLNNYNKKFTDALEIMAENYKFKENLIACLEAKRAASILKYLPFPVTSMKDIQGLPCIGDQVRDVIEEIIEEGESSRVKEVLNDERYKAFKQFTSVFGVGVKTSEKWFRMGLRTVEEAKASKSLKLSKMQKAGFLYYEDLASRVSKEEADAVTLIVKNTVRTFLPDALVTITGGFRRGKPMGHDIDFLITNPGPKEDDELLHKVVDLLKKQGLLLYEDIKESTFVEEQLPSRKIDAMDNFQKCFAILKLYQPGVDNSSYNTSKKSDMAEVKDWKAIRVDLVITPFEQYAYALLGWTGSKEFKRDLRRYAEEERGMILDNHALYDRKKRIFLKAGSEEEIFAHLGLDYVEPWERNA

SEQ ID NO: 1695 - DNA, 1182 bp, synthetic construct
  misc_feature 1..1182: note = Variant of terminal deoxynucleotidyl transferase
  source 1..1182: mol_type = other DNA
atgcaccatcatcatcatcatggcggtagcggccatccgccgagcaataccccggagggggaggtgccgagcgttatcgcccgcaaggttagtcagtacagctgccagcgcaagaccacgctgaataactacaacaaaaagtttaccgacgcgctggagatcatggccgagaactacaaatttaaagagaacctgatcgcgtgtctggaagccaagcgcgccgcgagtattctgaaatatctgccgttcccggttaccagcatgaaagacatccaaggtctgccgtgcattggcgaccaagttcgtgacgtgatcgaggagatcatcgaagagggcgagagcagccgtgttaaagaagttctcaatgacgagcgctacaaggcctttaagcagttcaccagcgtgttcggtgtgggcgtgaaaaccagcgaaaagtggtttcgtatgggcctccgtacggttgaagaggcaaaggccagtaagagtctgaagctgagcaagatgcagaaggcgggcttcctgtattacgaggatctggcgagccgcgttagtaaagaagaagccgatgccgttacgctcatcgtgaagaacacggtgcgtacctttctgccggatgcgctggtgaccatcaccggcggtttccgccgtggcaaacctatgggccacgacatcgactttctgatcacgaatccgggcccgaaagaggatgacgagctgctccacaaagtggttgatctgctcaagaagcaaggtctgctgctgtacgaagacatcaaagagagcacgttcgtggaggaacaactgccaagtcgcaaaatcgacgccatggacaacttccagaagtgcttcgccattctcaagctgtaccagccgggcgtggataacagcagctataacacgagtaagaagagtgacatggccgaggttaaggattggaaagcgattcgtgtggatctggtgatcacgccattcgagcagtacgcctatgcgctgctcggttggacgggcagcaaagaatttgttcgcgatctgcgccgctatgcggaggaagagcgcggcatgatcctcgacaaccatgccctctacgaccgcaaaaagcgcatctttctgaaagcgggcagcgaagaagagattttcgcgcatctgggtctggattatgtggagccgtgggaacgcaacgcg

SEQ ID NO: 1696 - protein, 394 aa, synthetic construct
  REGION 1..394: note = Variant of terminal deoxynucleotidyl transferase
MHHHHHHGGSGHPPSNTPEGEVPSVIARKVSQYSCQRKTTLNNYNKKFTDALEIMAENYKFKENLIACLEAKRAASILKYLPFPVTSMKDIQGLPCIGDQVRDVIEEIIEEGESSRVKEVLNDERYKAFKQFTSVFGVGVKTSEKWFRMGLRTVEEAKASKSLKLSKMQKAGFLYYEDLASRVSKEEADAVTLIVKNTVRTFLPDALVTITGGFRRGKPMGHDIDFLITNPGPKEDDELLHKVVDLLKKQGLLLYEDIKESTFVEEQLPSRKIDAMDNFQKCFAILKLYQPGVDNSSYNTSKKSDMAEVKDWKAIRVDLVITPFEQYAYALLGWTGSKEFVRDLRRYAEEERGMILDNHALYDRKKRIFLKAGSEEEIFAHLGLDYVEPWERNA

SEQ ID NO: 1697 - DNA, 1182 bp, synthetic construct
  misc_feature 1..1182: note = Variant of terminal deoxynucleotidyl transferase
  source 1..1182: mol_type = other DNA
atgcaccatcatcatcatcatggcggtagcggccatccgccgagcaataccccggagggggaggtgccgagcgttatcgcccgcaaggttagtcagtacagctgccagcgcaagaccacgctgaataactacaacaaaaagtttaccgacgcgctggagatcatggccgagaactacaaatttaaagagaacctgatcgcgtgtctggaagccaagcgcgccgcgagtattctgaaatatctgccgttcccggttaccagcatgaaagacatccaaggtctgccgtgcattggcgaccaagttcgtgacgtgatcgaggagatcatcgaagagggcgagagcagccgtgttaaagaagttctcaatgacgagcgctacaaggcctttaagcagttcaccagcgtgttcggtgtgggcgtgaaaaccagcgaaaagtggtttcgtatgggcctccgtacggttgaagaggcaaaggccagtaagagtctgaagctgagcaagatgcagaaggcgggcttcctgtattacgaggatctggcgagccgcgttagtaaagaagaagccgatgccgttacgctcatcgtgaagaacacggtgcgtacctttctgccggatgcgctggtgaccatcaccggcggtttccgccgtggcaaacctatgggccacgacatcgactttctgatcacgaatccgggcccgaaagaggatgacgagctgctccacaaagtggttgatctgctcaagaagcaaggtctgctgctgtacgaagacatcaaagagagcacgttcgtggaggaacaactgccaagtcgcaaaatcgacgccatggacaacttccagaagtgcttcgccattctcaagctgtaccagccgggcgtggataacagcagctataacacgagtaagaagagtgacatggccgaggttaaggattggaaagcgattcgtgtggatctggtgatcacgccattcgagcagtacgcctatgcgctgctcggttggacgggcagcaaagaatttattcgcgatctgcgccgctatgcggaggaagagcgcggcatgatcctcgacaaccatgccctctacgaccgcaaaaagcgcatctttctgaaagcgggcagcgaagaagagattttcgcgcatctgggtctggattatgtggagccgtgggaacgcaacgcg

SEQ ID NO: 1698 - protein, 394 aa, synthetic construct
  REGION 1..394: note = Variant of terminal deoxynucleotidyl transferase
MHHHHHHGGSGHPPSNTPEGEVPSVIARKVSQYSCQRKTTLNNYNKKFTDALEIMAENYKFKENLIACLEAKRAASILKYLPFPVTSMKDIQGLPCIGDQVRDVIEEIIEEGESSRVKEVLNDERYKAFKQFTSVFGVGVKTSEKWFRMGLRTVEEAKASKSLKLSKMQKAGFLYYEDLASRVSKEEADAVTLIVKNTVRTFLPDALVTITGGFRRGKPMGHDIDFLITNPGPKEDDELLHKVVDLLKKQGLLLYEDIKESTFVEEQLPSRKIDAMDNFQKCFAILKLYQPGVDNSSYNTSKKSDMAEVKDWKAIRVDLVITPFEQYAYALLGWTGSKEFIRDLRRYAEEERGMILDNHALYDRKKRIFLKAGSEEEIFAHLGLDYVEPWERNA

SEQ ID NO: 1699 - DNA, 1182 bp, synthetic construct
  misc_feature 1..1182: note = Variant of terminal deoxynucleotidyl transferase
  source 1..1182: mol_type = other DNA
atgcaccatcatcatcatcatggcggtagcggccatccgccgagcaataccccggagggggaggtgccgagcgttatcgcccgcaaggttagtcagtacagctgccagcgcaagaccacgctgaataactacaacaaaaagtttaccgacgcgctggagatcatggccgagaactacaaatttaaagagaacctgatcgcgtgtctggaagccaagcgcgccgcgagtattctgaaatatctgccgttcccggttaccagcatgaaagacatccaaggtctgccgtgcattggcgaccaagttcgtgacgtgatcgaggagatcatcgaagagggcgagagcagccgtgttaaagaagttctcaatgacgagcgctacaaggcctttaagcagttcaccagcgtgttcggtgtgggcgtgaaaaccagcgaaaagtggtttcgtatgggcctccgtacggttgaagaggcaaaggccagtaagagtctgaagctgagcaagatgcagaaggcgggcttcctgtattacgaggatctggcgagccgcgttagtaaagaagaagccgatgccgttacgctcatcgtgaagaacacggtgcgtacctttctgccggatgcgctggtgaccatcaccggcggtttccgccgtggcaaacctatgggccacgacatcgactttctgatcacgaatccgggcccgaaagaggatgacgagctgctccacaaagtggttgatctgctcaagaagcaaggtctgctgctgtacgaagacatcaaagagagcacgttcgtggaggaacaactgccaagtcgcaaaatcgacgccatggacaacttccagaagtgcttcgccattctcaagctgtaccagccgggcgtggataacagcagctataacacgagtaagaagagtgacatggccgaggttaaggattggaaagcgattcgtgtggatctggtgatcacgccattcgagcagtacgcctatgcgctgctcggttggacgggcagcaaagaatttcgtcgcgatctgcgccgctatgcggaggaagagcgcggcatgatcctcgacaaccatgccctctacgaccgcaaaaagcgcatctttctgaaagcgggcagcgaagaagagattttcgcgcatctgggtctggattatgtggagccgtgggaacgcaacgcg

SEQ ID NO: 1700 - protein, 394 aa, synthetic construct
  REGION 1..394: note = Variant of terminal deoxynucleotidyl transferase
MHHHHHHGGSGHPPSNTPEGEVPSVIARKVSQYSCQRKTTLNNYNKKFTDALEIMAENYKFKENLIACLEAKRAASILKYLPFPVTSMKDIQGLPCIGDQVRDVIEEIIEEGESSRVKEVLNDERYKAFKQFTSVFGVGVKTSEKWFRMGLRTVEEAKASKSLKLSKMQKAGFLYYEDLASRVSKEEADAVTLIVKNTVRTFLPDALVTITGGFRRGKPMGHDIDFLITNPGPKEDDELLHKVVDLLKKQGLLLYEDIKESTFVEEQLPSRKIDAMDNFQKCFAILKLYQPGVDNSSYNTSKKSDMAEVKDWKAIRVDLVITPFEQYAYALLGWTGSKEFRRDLRRYAEEERGMILDNHALYDRKKRIFLKAGSEEEIFAHLGLDYVEPWERNA

SEQ ID NO: 1701 - DNA, 1182 bp, synthetic construct
  misc_feature 1..1182: note = Variant of terminal deoxynucleotidyl transferase
  source 1..1182: mol_type = other DNA
atgcaccatcatcatcatcatggcggtagcggccatccgccgagcaataccccggagggggaggtgccgagcgttatcgcccgcaaggttagtcagtacagctgccagcgcaagaccacgctgaataactacaacaaaaagtttaccgacgcgctggagatcatggccgagaactacaaatttaaagagaacctgatcgcgtgtctggaagccaagcgcgccgcgagtattctgaaatatctgccgttcccggttaccagcatgaaagacatccaaggtctgccgtgcattggcgaccaagttcgtgacgtgatcgaggagatcatcgaagagggcgagagcagccgtgttaaagaagttctcaatgacgagcgctacaaggcctttaagcagttcaccagcgtgttcggtgtgggcgtgaaaaccagcgaaaagtggtttcgtatgggcctccgtacggttgaagaggcaaaggccagtaagagtctgaagctgagcaagatgcagaaggcgggcttcctgtattacgaggatctggcgagccgcgttagtaaagaagaagccgatgccgttacgctcatcgtgaagaacacggtgcgtacctttctgccggatgcgctggtgaccatcaccggcggtttccgccgtggcaaacctatgggccacgacatcgactttctgatcacgaatccgggcccgaaagaggatgacgagctgctccacaaagtggttgatctgctcaagaagcaaggtctgctgctgtacgaagacatcaaagagagcacgttcgtggaggaacaactgccaagtcgcaaaatcgacgccatggacaacttccagaagtgcttcgccattctcaagctgtaccagccgggcgtggataacagcagctataacacgagtaagaagagtgacatggccgaggttaaggattggaaagcgattcgtgtggatctggtgatcacgccattcgagcagtacgcctatgcgctgctcggttggacgggcagcaaagaatttcttcgcgatctgcgccgctatgcggaggaagagcgcggcatgatcctcgacaaccatgccctctacgaccgcaaaaagcgcatctttctgaaagcgggcagcgaagaagagattttcgcgcatctgggtctggattatgtggagccgtgggaacgcaacgcg

SEQ ID NO: 1702 - protein, 394 aa, synthetic construct
  REGION 1..394: note = Variant of terminal deoxynucleotidyl transferase
MHHHHHHGGSGHPPSNTPEGEVPSVIARKVSQYSCQRKTTLNNYNKKFTDALEIMAENYKFKENLIACLEAKRAASILKYLPFPVTSMKDIQGLPCIGDQVRDVIEEIIEEGESSRVKEVLNDERYKAFKQFTSVFGVGVKTSEKWFRMGLRTVEEAKASKSLKLSKMQKAGFLYYEDLASRVSKEEADAVTLIVKNTVRTFLPDALVTITGGFRRGKPMGHDIDFLITNPGPKEDDELLHKVVDLLKKQGLLLYEDIKESTFVEEQLPSRKIDAMDNFQKCFAILKLYQPGVDNSSYNTSKKSDMAEVKDWKAIRVDLVITPFEQYAYALLGWTGSKEFLRDLRRYAEEERGMILDNHALYDRKKRIFLKAGSEEEIFAHLGLDYVEPWERNA

SEQ ID NO: 1703 - DNA, 1182 bp, synthetic construct
  misc_feature 1..1182: note = Variant of terminal deoxynucleotidyl transferase
  source 1..1182: mol_type = other DNA
atgcaccatcatcatcatcatggcggtagcggccatccgccgagcaataccccggagggggaggtgccgagcgttatcgcccgcaaggttagtcagtacagctgccagcgcaagaccacgctgaataactacaacaaaaagtttaccgacgcgctggagatcatggccgagaactacaaatttaaagagaacctgatcgcgtgtctggaagccaagcgcgccgcgagtattctgaaatatctgccgttcccggttaccagcatgaaagacatccaaggtctgccgtgcattggcgaccaagttcgtgacgtgatcgaggagatcatcgaagagggcgagagcagccgtgttaaagaagttctcaatgacgagcgctacaaggcctttaagcagttcaccagcgtgttcggtgtgggcgtgaaaaccagcgaaaagtggtttcgtatgggcctccgtacggttgaagaggcaaaggccagtaagagtctgaagctgagcaagatgcagaaggcgggcttcctgtattacgaggatctggcgagccgcgttagtaaagaagaagccgatgccgttacgctcatcgtgaagaacacggtgcgtacctttctgccggatgcgctggtgaccatcaccggcggtttccgccgtggcaaacctatgggccacgacatcgactttctgatcacgaatccgggcccgaaagaggatgacgagctgctccacaaagtggttgatctgctcaagaagcaaggtctgctgctgtacgaagacatcaaagagagcacgttcgtggaggaacaactgccaagtcgcaaaatcgacgccatggacaacttccagaagtgcttcgccattctcaagctgtaccagccgggcgtggataacagcagctataacacgagtaagaagagtgacatggccgaggttaaggattggaaagcgattcgtgtggatctggtgatcacgccattcgagcagtacgcctatgcgctgctcggttggacgggcagcaaagaatttatgcgcgatctgcgccgctatgcggaggaagagcgcggcatgatcctcgacaaccatgccctctacgaccgcaaaaagcgcatctttctgaaagcgggcagcgaagaagagattttcgcgcatctgggtctggattatgtggagccgtgggaacgcaacgcg

SEQ ID NO: 1704 - protein, 394 aa, synthetic construct
  REGION 1..394: note = Variant of terminal deoxynucleotidyl transferase
MHHHHHHGGSGHPPSNTPEGEVPSVIARKVSQYSCQRKTTLNNYNKKFTDALEIMAENYKFKENLIACLEAKRAASILKYLPFPVTSMKDIQGLPCIGDQVRDVIEEIIEEGESSRVKEVLNDERYKAFKQFTSVFGVGVKTSEKWFRMGLRTVEEAKASKSLKLSKMQKAGFLYYEDLASRVSKEEADAVTLIVKNTVRTFLPDALVTITGGFRRGKPMGHDIDFLITNPGPKEDDELLHKVVDLLKKQGLLLYEDIKESTFVEEQLPSRKIDAMDNFQKCFAILKLYQPGVDNSSYNTSKKSDMAEVKDWKAIRVDLVITPFEQYAYALLGWTGSKEFMRDLRRYAEEERGMILDNHALYDRKKRIFLKAGSEEEIFAHLGLDYVEPWERNA

SEQ ID NO: 1705 - DNA, 1182 bp, synthetic construct
  misc_feature 1..1182: note = Variant of terminal deoxynucleotidyl transferase
  source 1..1182: mol_type = other DNA
atgcaccatcatcatcatcatggcggtagcggccatccgccgagcaataccccggagggggaggtgccgagcgttatcgcccgcaaggttagtcagtacagctgccagcgcaagaccacgctgaataactacaacaaaaagtttaccgacgcgctggagatcatggccgagaactacaaatttaaagagaacctgatcgcgtgtctggaagccaagcgcgccgcgagtattctgaaatatctgccgttcccggttaccagcatgaaagacatccaaggtctgccgtgcattggcgaccaagttcgtgacgtgatcgaggagatcatcgaagagggcgagagcagccgtgttaaagaagttctcaatgacgagcgctacaaggcctttaagcagttcaccagcgtgttcggtgtgggcgtgaaaaccagcgaaaagtggtttcgtatgggcctccgtacggttgaagaggcaaaggccagtaagagtctgaagctgagcaagatgcagaaggcgggcttcctgtattacgaggatctggcgagccgcgttagtaaagaagaagccgatgccgttacgctcatcgtgaagaacacggtgcgtacctttctgccggatgcgctggtgaccatcaccggcggtttccgccgtggcaaacctatgggccacgacatcgactttctgatcacgaatccgggcccgaaagaggatgacgagctgctccacaaagtggttgatctgctcaagaagcaaggtctgctgctgtacgaagacatcaaagagagcacgttcgtggaggaacaactgccaagtcgcaaaatcgacgccatggacaacttccagaagtgcttcgccattctcaagctgtaccagccgggcgtggataacagcagctataacacgagtaagaagagtgacatggccgaggttaaggattggaaagcgattcgtgtggatctggtgatcacgccattcgagcagtacgcctatgcgctgctcggttggacgggcagcaaagaattttgtcgcgatctgcgccgctatgcggaggaagagcgcggcatgatcctcgacaaccatgccctctacgaccgcaaaaagcgcatctttctgaaagcgggcagcgaagaagagattttcgcgcatctgggtctggattatgtggagccgtgggaacgcaacgcg

SEQ ID NO: 1706 - protein, 394 aa, synthetic construct
  REGION 1..394: note = Variant of terminal deoxynucleotidyl transferase
MHHHHHHGGSGHPPSNTPEGEVPSVIARKVSQYSCQRKTTLNNYNKKFTDALEIMAENYKFKENLIACLEAKRAASILKYLPFPVTSMKDIQGLPCIGDQVRDVIEEIIEEGESSRVKEVLNDERYKAFKQFTSVFGVGVKTSEKWFRMGLRTVEEAKASKSLKLSKMQKAGFLYYEDLASRVSKEEADAVTLIVKNTVRTFLPDALVTITGGFRRGKPMGHDIDFLITNPGPKEDDELLHKVVDLLKKQGLLLYEDIKESTFVEEQLPSRKIDAMDNFQKCFAILKLYQPGVDNSSYNTSKKSDMAEVKDWKAIRVDLVITPFEQYAYALLGWTGSKEFCRDLRRYAEEERGMILDNHALYDRKKRIFLKAGSEEEIFAHLGLDYVEPWERNA

SEQ ID NO: 1707 - DNA, 1182 bp, synthetic construct
  misc_feature 1..1182: note = Variant of terminal deoxynucleotidyl transferase
  source 1..1182: mol_type = other DNA
atgcaccatcatcatcatcatggcggtagcggccatccgccgagcaataccccggagggggaggtgccgagcgttatcgcccgcaaggttagtcagtacagctgccagcgcaagaccacgctgaataactacaacaaaaagtttaccgacgcgctggagatcatggccgagaactacaaatttaaagagaacctgatcgcgtgtctggaagccaagcgcgccgcgagtattctgaaatatctgccgttcccggttaccagcatgaaagacatccaaggtctgccgtgcattggcgaccaagttcgtgacgtgatcgaggagatcatcgaagagggcgagagcagccgtgttaaagaagttctcaatgacgagcgctacaaggcctttaagcagttcaccagcgtgttcggtgtgggcgtgaaaaccagcgaaaagtggtttcgtatgggcctccgtacggttgaagaggcaaaggccagtaagagtctgaagctgagcaagatgcagaaggcgggcttcctgtattacgaggatctggcgagccgcgttagtaaagaagaagccgatgccgttacgctcatcgtgaagaacacggtgcgtacctttctgccggatgcgctggtgaccatcaccggcggtttccgccgtggcaaacctatgggccacgacatcgactttctgatcacgaatccgggcccgaaagaggatgacgagctgctccacaaagtggttgatctgctcaagaagcaaggtctgctgctgtacgaagacatcaaagagagcacgttcgtggaggaacaactgccaagtcgcaaaatcgacgccatggacaacttccagaagtgcttcgccattctcaagctgtaccagccgggcgtggataacagcagctataacacgagtaagaagagtgacatggccgaggttaaggattggaaagcgattcgtgtggatctggtgatcacgccattcgagcagtacgcctatgcgctgctcggttggacgggcagcaaagaatttacgcgcgatctgcgccgctatgcggaggaagagcgcggcatgatcctcgacaaccatgccctctacgaccgcaaaaagcgcatctttctgaaagcgggcagcgaagaagagattttcgcgcatctgggtctggattatgtggagccgtgggaacgcaacgcg

SEQ ID NO: 1708 - protein, 394 aa, synthetic construct
  REGION 1..394: note = Variant of terminal deoxynucleotidyl transferase
MHHHHHHGGSGHPPSNTPEGEVPSVIARKVSQYSCQRKTTLNNYNKKFTDALEIMAENYKFKENLIACLEAKRAASILKYLPFPVTSMKDIQGLPCIGDQVRDVIEEIIEEGESSRVKEVLNDERYKAFKQFTSVFGVGVKTSEKWFRMGLRTVEEAKASKSLKLSKMQKAGFLYYEDLASRVSKEEADAVTLIVKNTVRTFLPDALVTITGGFRRGKPMGHDIDFLITNPGPKEDDELLHKVVDLLKKQGLLLYEDIKESTFVEEQLPSRKIDAMDNFQKCFAILKLYQPGVDNSSYNTSKKSDMAEVKDWKAIRVDLVITPFEQYAYALLGWTGSKEFTRDLRRYAEEERGMILDNHALYDRKKRIFLKAGSEEEIFAHLGLDYVEPWERNA

SEQ ID NO: 1709 - DNA, 1182 bp, synthetic construct
  misc_feature 1..1182: note = Variant of terminal deoxynucleotidyl transferase
  source 1..1182: mol_type = other DNA
atgcaccatcatcatcatcatggcggtagcggccatccgccgagcaataccccggagggggaggtgccgagcgttatcgcccgcaaggttagtcagtacagctgccagcgcaagaccacgctgaataactacaacaaaaagtttaccgacgcgctggagatcatggccgagaactacaaatttaaagagaacctgatcgcgtgtctggaagccaagcgcgccgcgagtattctgaaatatctgccgttcccggttaccagcatgaaagacatccaaggtctgccgtgcattggcgaccaagttcgtgacgtgatcgaggagatcatcgaagagggcgagagcagccgtgttaaagaagttctcaatgacgagcgctacaaggcctttaagcagttcaccagcgtgttcggtgtgggcgtgaaaaccagcgaaaagtggtttcgtatgggcctccgtacggttgaagaggcaaaggccagtaagagtctgaagctgagcaagatgcagaaggcgggcttcctgtattacgaggatctggcgagccgcgttagtaaagaagaagccgatgccgttacgctcatcgtgaagaacacggtgcgtacctttctgccggatgcgctggtgaccatcaccggcggtttccgccgtggcaaacctatgggccacgacatcgactttctgatcacgaatccgggcccgaaagaggatgacgagctgctccacaaagtggttgatctgctcaagaagcaaggtctgctgctgtacgaagacatcaaagagagcacgttcgtggaggaacaactgccaagtcgcaaaatcgacgccatggacaacttccagaagtgcttcgccattctcaagctgtaccagccgggcgtggataacagcagctataacacgagtaagaagagtgacatggccgaggttaaggattggaaagcgattcgtgtggatctggtgatcacgccattcgagcagtacgcctatgcgctgctcggttggacgggcagcaaagaatttcatcgcgatctgcgccgctatgcggaggaagagcgcggcatgatcctcgacaaccatgccctctacgaccgcaaaaagcgcatctttctgaaagcgggcagcgaagaagagattttcgcgcatctgggtctggattatgtggagccgtgggaacgcaacgcg

SEQ ID NO: 1710 - protein, 394 aa, synthetic construct
  REGION 1..394: note = Variant of terminal deoxynucleotidyl transferase
MHHHHHHGGSGHPPSNTPEGEVPSVIARKVSQYSCQRKTTLNNYNKKFTDALEIMAENYKFKENLIACLEAKRAASILKYLPFPVTSMKDIQGLPCIGDQVRDVIEEIIEEGESSRVKEVLNDERYKAFKQFTSVFGVGVKTSEKWFRMGLRTVEEAKASKSLKLSKMQKAGFLYYEDLASRVSKEEADAVTLIVKNTVRTFLPDALVTITGGFRRGKPMGHDIDFLITNPGPKEDDELLHKVVDLLKKQGLLLYEDIKESTFVEEQLPSRKIDAMDNFQKCFAILKLYQPGVDNSSYNTSKKSDMAEVKDWKAIRVDLVITPFEQYAYALLGWTGSKEFHRDLRRYAEEERGMILDNHALYDRKKRIFLKAGSEEEIFAHLGLDYVEPWERNA

SEQ ID NO: 1711 - DNA, 1182 bp, synthetic construct
  misc_feature 1..1182: note = Variant of terminal deoxynucleotidyl transferase
  source 1..1182: mol_type = other DNA
atgcaccatcatcatcatcatggcgaaagcggccatccgattagcaataccccggagggggaggtgccgagcgttatcgcccgcaaggttagtcagtacagctgccagcgcaagaccacgctgaataactacaacaaaaagtttaccgacgcgctggagatcatggccgagagttacaaatttaaagagaacctgatcgcgtgtctggaagccaagcgcgccgcgagtattctgaaatatctgccgttcccggttaccagcatgaaagacatccaaggtctgccgtgcattggcgaccaagttcgtgacgtgatcgaggagatcatcgaagagggcgagagcagccgtgttaaagaagttctcaatgacgagcgctacaaggcctttaagcagttcaccagcgtgttcggtgtgggcgtgaaaaccagcgaaaagtggtttcgtatgggcctccgtacggttgaagaggcaaaggccagtaagagtctgaagctgagcaagatgcagaaggcgggcttcctgtattacgaggatctggcgagctgcgttagtaaagaagaagccgatgtagttacgctcatcgtgaagggcacggtgcgtacctttctgccggatgcgctggtgaccatcaccggcggtttccgccgtggcaaacctatgggccacgacatcgactttctgatcacgaatccgggcccgaaagaggatgacgagctgctccacaaagtggttgatctgctcaagaagcaaggtctgctgctgtacgaagacatcaaagagagcacgttcgtggaggaacaactgccaagtcgcaaaatcgacgccatggacaacttccagaagtgcttcgccattctcaagctgtaccagccgggcgtggataacagcagcgttaacacgagtaagaagagtgacatggccgaggttaaggattggaaagcgattcgtgtggatctggtgatcacgccattcgagcagtacgcctatgcgctgctcggttggacgggcagcaaagaatttggtcgcgatctgcgccgctatgcggaggaagagcgcggcatgatcctcgacaaccatgccctctacgaccgcaaaaagcgcatctttctgaaagcgggcagcgaagaagagattttcgcgcatctgggtctggattatgtggagccgtgggaacgcaacgcg

SEQ ID NO: 1712 - protein, 394 aa, synthetic construct
  REGION 1..394: note = Variant of terminal deoxynucleotidyl transferase
MHHHHHHGESGHPISNTPEGEVPSVIARKVSQYSCQRKTTLNNYNKKFTDALEIMAESYKFKENLIACLEAKRAASILKYLPFPVTSMKDIQGLPCIGDQVRDVIEEIIEEGESSRVKEVLNDERYKAFKQFTSVFGVGVKTSEKWFRMGLRTVEEAKASKSLKLSKMQKAGFLYYEDLASCVSKEEADVVTLIVKGTVRTFLPDALVTITGGFRRGKPMGHDIDFLITNPGPKEDDELLHKVVDLLKKQGLLLYEDIKESTFVEEQLPSRKIDAMDNFQKCFAILKLYQPGVDNSSVNTSKKSDMAEVKDWKAIRVDLVITPFEQYAYALLGWTGSKEFGRDLRRYAEEERGMILDNHALYDRKKRIFLKAGSEEEIFAHLGLDYVEPWERNA

SEQ ID NO: 1713 - DNA, 1182 bp, synthetic construct
  misc_feature 1..1182: note = Variant of terminal deoxynucleotidyl transferase
  source 1..1182: mol_type = other DNA
atgcaccatcatcatcatcatggcggtagcggccatccgccgagcaataccccggagggggaggtgccgagcgttatcgcccgcaaggttagtcagtacagctgccagcgcaagaccacgctgaataactacaacaaaaagtttaccgacgcgctggagatcatggccgagagttacaaatttaaagagaacctgatcgcgtgtctggaagccaagcgcgccgcgagtattctgaaatatctgccgttcccggttaccagcatgaaagacatccaaggtctgccgtgcattggcgaccaagttcgtgacgtgatcgaggagatcatcgaagagggcgagagcagccgtgttaaagaagttctcaatgacgagcgctacaaggcctttaagcagttcaccagcgtgttcggtgtgggcgtgaaaaccagcgaaaagtggtttcgtatgggcctccgtacggttgaagaggcaaaggccagtaagagtctgaagctgagcaagatgcagaaggcgggcttcctgtattacgaggatctggcgagccgcgttagtaaagaagaagccgatgccgttacgctcatcgtgaagggcacggtgcgtacctttctgccggatgcgctggtgaccatcaccggcggtttccgccgtggcaaacctatgggccacgacatcgactttctgatcacgaatccgggcccgaaagaggatgacgagctgctccacaaagtggttgatctgctcaagaagcaaggtctgctgctgtacgaagacatcaaagagagcacgttcgtggaggaacaactgccaagtcgcaaaatcgacgccatggacaacttccagaagtgcttcgccattctcaagctgtaccagccgggcgtggataacagcagctacaacacgagtaagaagagtgacatggccgaggttaaggattggaaagcgattcgtgtggatctggtgatcacgccattcgagcagtacgcctatgcgctgctcggttggacgggcagcaaagaatttggtcgcgatctgcgccgctatgcggaggaagagcgcggcatgatcctcgacaaccatgccctctacgacctgaaaaagcgcatctttctgaaagcgggcagcgaagaagagattttcgcgcatctgggtctggattatgtggagccgtgggaacgcaacgcg

SEQ ID NO: 1714 - protein, 394 aa, synthetic construct
  REGION 1..394: note = Variant of terminal deoxynucleotidyl transferase
MHHHHHHGGSGHPPSNTPEGEVPSVIARKVSQYSCQRKTTLNNYNKKFTDALEIMAESYKFKENLIACLEAKRAASILKYLPFPVTSMKDIQGLPCIGDQVRDVIEEIIEEGESSRVKEVLNDERYKAFKQFTSVFGVGVKTSEKWFRMGLRTVEEAKASKSLKLSKMQKAGFLYYEDLASRVSKEEADAVTLIVKGTVRTFLPDALVTITGGFRRGKPMGHDIDFLITNPGPKEDDELLHKVVDLLKKQGLLLYEDIKESTFVEEQLPSRKIDAMDNFQKCFAILKLYQPGVDNSSYNTSKKSDMAEVKDWKAIRVDLVITPFEQYAYALLGWTGSKEFGRDLRRYAEEERGMILDNHALYDLKKRIFLKAGSEEEIFAHLGLDYVEPWERNA

SEQ ID NO: 1715 - DNA, 1182 bp, synthetic construct
  misc_feature 1..1182: note = Variant of terminal deoxynucleotidyl transferase
  source 1..1182: mol_type = other DNA
atgcaccatcatcatcatcatggcgaaagcggccatccgattagcaataccccggagggggaggtgccgagcgttatcgcccgcaaggttagtcagtacagctgccagcgcaagaccacgctgaataactacaacaaaaagtttaccgacgcgctggagatcatggccgagaattacaaatttaaagagaacctgatcgcgtgtctggaagccaagcgcgccgcgagtattctgaaatatctgccgttcccggttaccagcatgaaagacatccaaggtctgccgtgcattggcgaccaagttcgtgacgtgatcgaggagatcatcgaagagggcgagagcagccgtgttaaagaagttctcaatgacgagcgctacaaggcctttaagcagttcaccagcgtgttcggtgtgggcgtgaaaaccagcgaaaagtggtttcgtatgggcctccgtacggttgaagaggcaaaggccagtaagagtctgaagctgagcaagatgcagaaggcgggcttcctgtattacgaggatctggcgagccgcgttagtaaagaagaagccgatgtagttacgctcatcgtgaagggcacggtgcgtacctttctgccggatgcgctggtgaccatcaccggcggtttccgccgtggcaaacctatgggccacgacatcgactttctgatcacgaatccgggcccgaaagaggatgacgagctgctccacaaagtggttgatctgctcaagaagcaaggtctgctgctgtacgaagacatcaaagagagcacgttcgtggaggaacaactgccaagtcgcaaaatcgacgccatggacaacttccagaagtgcttcgccattctcaagctgtaccagccgggcgtggataacagcagctacaacacgagtaagaagagtgacatggccgaggttaaggattggaaagcgattcgtgtggatctggtgatcacgccattcgagcagtacgcctatgcgctgctcggttggacgggcagcaaagaatttggtcgcgatctgcgccgctatgcggaggaagagcgcggcatgatcctcgacaaccatgccctctacgacctgaaaaagcgcatctttctgaaagcgggcagcgaagaagagattttcgcgcatctgggtctggattatgtggagccgtgggaacgcaacgcg

SEQ ID NO: 1716 - protein, 394 aa, synthetic construct
  REGION 1..394: note = Variant of terminal deoxynucleotidyl transferase
MHHHHHHGESGHPISNTPEGEVPSVIARKVSQYSCQRKTTLNNYNKKFTDALEIMAENYKFKENLIACLEAKRAASILKYLPFPVTSMKDIQGLPCIGDQVRDVIEEIIEEGESSRVKEVLNDERYKAFKQFTSVFGVGVKTSEKWFRMGLRTVEEAKASKSLKLSKMQKAGFLYYEDLASRVSKEEADVVTLIVKGTVRTFLPDALVTITGGFRRGKPMGHDIDFLITNPGPKEDDELLHKVVDLLKKQGLLLYEDIKESTFVEEQLPSRKIDAMDNFQKCFAILKLYQPGVDNSSYNTSKKSDMAEVKDWKAIRVDLVITPFEQYAYALLGWTGSKEFGRDLRRYAEEERGMILDNHALYDLKKRIFLKAGSEEEIFAHLGLDYVEPWERNA

SEQ ID NO: 1717 - DNA, 1182 bp, synthetic construct
  misc_feature 1..1182: note = Variant of terminal deoxynucleotidyl transferase
  source 1..1182: mol_type = other DNA
atgcaccatcatcatcatcatggcggcagcggccatccgcctagcaataccccggagggggaggtgccgagcgttatcgcccgcaaggttagtcagtacagctgccagcgcaagaccacgctgaataactacaacaaaaagtttaccgacgcgctggagatcatggccgagaactacaaatttaaagagaacctgatcgcgtgtctggaagccaagcgcgccgcgagtattctgaaatatctgccgttcccggttaccagcatgaaagacatccaaggtctgccgtgcattggcgaccaagttcgtgacgtgatcgaggagatcatcgaagagggcgagagcagccgtgttaaagaagttctcaatgacgagcgctacaaggcctttaagcagttcaccagcgtgttcggtgtgggcgtgaaaaccagcgaaaagtggtttcgtatgggcctccgtacggttgaagaggcaaaggccagtaagagtctgaagctgagcaagatgcagaaggcgggcttcctgtattacgaggatctggcgagccgcgttagtaaagaagaagccgatgccgttacgctcatcgtgaagggcacggtgcgtacctttctgccggatgcgctggtgaccatcaccggcggtttccgccgtggcaaacctatgggccacgacatcgactttctgatcacgaatccgggcccgaaagaggatgacgagctgctccacaaagtggttgatctgctcaagaagcaaggtctgctgctgtacgaagacatcaaagagagcacgttcgtggaggaacaactgccaagtcgcaaaatcgacgccatggacaacttccagaagtgcttcgccattctcaagctgtaccagccgggcgtggataacagcagcgttaacacgagtaagaagagtgacatggccgaggttaaggattggaaagcgattcgtgtggatctggtgatcacgccattcgagcagtacgcctatgcgctgctcggttggacgggcagcaaagaatttggtcgcgatctgcgccgctatgcggaggaagagcgcggcatgatcctcgacaaccatgccctctacgaccgcaaaaagcgcatctttctgaaagcgggcagcgaagaagagattttcgcgcatctgggtctggattatgtggagccgtgggaacgcaacgcg

SEQ ID NO: 1718 - protein, 394 aa, synthetic construct
  REGION 1..394: note = Variant of terminal deoxynucleotidyl transferase
MHHHHHHGGSGHPPSNTPEGEVPSVIARKVSQYSCQRKTTLNNYNKKFTDALEIMAENYKFKENLIACLEAKRAASILKYLPFPVTSMKDIQGLPCIGDQVRDVIEEIIEEGESSRVKEVLNDERYKAFKQFTSVFGVGVKTSEKWFRMGLRTVEEAKASKSLKLSKMQKAGFLYYEDLASRVSKEEADAVTLIVKGTVRTFLPDALVTITGGFRRGKPMGHDIDFLITNPGPKEDDELLHKVVDLLKKQGLLLYEDIKESTFVEEQLPSRKIDAMDNFQKCFAILKLYQPGVDNSSVNTSKKSDMAEVKDWKAIRVDLVITPFEQYAYALLGWTGSKEFGRDLRRYAEEERGMILDNHALYDRKKRIFLKAGSEEEIFAHLGLDYVEPWERNA

SEQ ID NO: 1719 - DNA, 1182 bp, synthetic construct
  misc_feature 1..1182: note = Variant of terminal deoxynucleotidyl transferase
  source 1..1182: mol_type = other DNA
atgcaccatcatcatcatcatggcggtagcggccatccgcctagcaataccccggagggggaggtgccgagcgttatcgcccgcaaggttagtcagtacagctgccagcgcaagaccacgctgaataactacaacaaaaagtttaccgacgcgctggagatcatggccgagaactacaaatttaaagagaacctgatcgcgtgtctggaagccaagcgcgccgcgagtattctgaaatatctgccgttcccggttaccagcatgaaagacatccaaggtctgccgtgcattggcgaccaagttcgtgacgtgatcgaggagatcatcgaagagggcgagagcagccgtgttaaagaagttctcaatgacgagcgctacaaggcctttaagcagttcaccagcgtgttcggtgtgggcgtgaaaaccagcgaaaagtggtttcgtatgggcctccgtacggttgaagaggcaaaggccagtaagagtctgaagctgagcaagatgcagaaggcgggcttcctgtattacgaggatctggcgagctgcgttagtaaagaagaagccgatgccgttacgctcatcgtgaagggcacggtgcgtacctttctgccggatgcgctggtgaccatcaccggcggtttccgccgtggcaaacctatgggccacgacatcgactttctgatcacgaatccgggcccgaaagaggatgacgagctgctccacaaagtggttgatctgctcaagaagcaaggtctgctgctgtacgaagacatcaaagagagcacgttcgtggaggaacaactgccaagtcgcaaaatcgacgccatggacaacttccagaagtgcttcgccattctcaagctgtaccagccgggcgtggataacagcagctacaacacgagtaagaagagtgacatggccgaggttaaggattggaaagcgattcgtgtggatctggtgatcacgccattcgagcagtacgcctatgcgctgctcggttggacgggcagcaaagaatttggtcgcgatctgcgccgctatgcggaggaagagcgcggcatgatcctcgacaaccatgccctctacgaccgcaaaaagcgcatctttctgaaagcgggcagcgaagaagagattttcgcgcatctgggtctggattatgtggagccgtgggaacgcaacgcg

SEQ ID NO: 1720 - protein, 394 aa, synthetic construct
  REGION 1..394: note = Variant of terminal deoxynucleotidyl transferase
MHHHHHHGGSGHPPSNTPEGEVPSVIARKVSQYSCQRKTTLNNYNKKFTDALEIMAENYKFKENLIACLEAKRAASILKYLPFPVTSMKDIQGLPCIGDQVRDVIEEIIEEGESSRVKEVLNDERYKAFKQFTSVFGVGVKTSEKWFRMGLRTVEEAKASKSLKLSKMQKAGFLYYEDLASCVSKEEADAVTLIVKGTVRTFLPDALVTITGGFRRGKPMGHDIDFLITNPGPKEDDELLHKVVDLLKKQGLLLYEDIKESTFVEEQLPSRKIDAMDNFQKCFAILKLYQPGVDNSSYNTSKKSDMAEVKDWKAIRVDLVITPFEQYAYALLGWTGSKEFGRDLRRYAEEERGMILDNHALYDRKKRIFLKAGSEEEIFAHLGLDYVEPWERNA

SEQ ID NO: 1721 - DNA, 1182 bp, synthetic construct
  misc_feature 1..1182: note = Variant of terminal deoxynucleotidyl transferase
  source 1..1182: mol_type = other DNA
atgcaccatcatcatcatcatggcggcagcggccatccgattagcaataccccggagggggaggtgccgagcgttatcgcccgcaaggttagtcagtacagctgccagcgcaagaccacgctgaataactacaacaaaaagtttaccgacgcgctggagatcatggccgagaattacaaatttaaagagaacctgatcgcgtgtctggaagccaagcgcgccgcgagtattctgaaatatctgccgttcccggttaccagcatgaaagacatccaaggtctgccgtgcattggcgaccaagttcgtgacgtgatcgaggagatcatcgaagagggcgagagcagccgtgttaaagaagttctcaatgacgagcgctacaaggcctttaagcagttcaccagcgtgttcggtgtgggcgtgaaaaccagcgaaaagtggtttcgtatgggcctccgtacggttgaagaggcaaaggccagtaagagtctgaagctgagcaagatgcagaaggcgggcttcctgtattacgaggatctggcgagccgcgttagtaaagaagaagccgatgtagttacgctcatcgtgaagggcacggtgcgtacctttctgccggatgcgctggtgaccatcaccggcggtttccgccgtggcaaacctatgggccacgacatcgactttctgatcacgaatccgggcccgaaagaggatgacgagctgctccacaaagtggttgatctgctcaagaagcaaggtctgctgctgtacgaagacatcaaagagagcacgttcgtggaggaacaactgccaagtcgcaaaatcgacgccatggacaacttccagaagtgcttcgccattctcaagctgtaccagccgggcgtggataacagcagcgttaacacgagtaagaagagtgacatggccgaggttaaggattggaaagcgattcgtgtggatctggtgatcacgccattcgagcagtacgcctatgcgctgctcggttggacgggcagcaaagaatttggtcgcgatctgcgccgctatgcggaggaagagcgcggcatgatcctcgacaaccatgccctctacgaccgtaaaaagcgcatctttctgaaagcgggcagcgaagaagagattttcgcgcatctgggtctggattatgtggagccgtgggaacgcaacgcg

SEQ ID NO: 1722 - protein, 394 aa, synthetic construct
  REGION 1..394: note = Variant of terminal deoxynucleotidyl transferase
MHHHHHHGGSGHPISNTPEGEVPSVIARKVSQYSCQRKTTLNNYNKKFTDALEIMAENYKFKENLIACLEAKRAASILKYLPFPVTSMKDIQGLPCIGDQVRDVIEEIIEEGESSRVKEVLNDERYKAFKQFTSVFGVGVKTSEKWFRMGLRTVEEAKASKSLKLSKMQKAGFLYYEDLASRVSKEEADVVTLIVKGTVRTFLPDALVTITGGFRRGKPMGHDIDFLITNPGPKEDDELLHKVVDLLKKQGLLLYEDIKESTFVEEQLPSRKIDAMDNFQKCFAILKLYQPGVDNSSVNTSKKSDMAEVKDWKAIRVDLVITPFEQYAYALLGWTGSKEFGRDLRRYAEEERGMILDNHALYDRKKRIFLKAGSEEEIFAHLGLDYVEPWERNA

SEQ ID NO: 1723 - DNA, 1182 bp, synthetic construct
  misc_feature 1..1182: note = Variant of terminal deoxynucleotidyl transferase
  source 1..1182: mol_type = other DNA
atgcaccatcatcatcatcatggcggcagcggccatccgcctagcaataccccggagggggaggtgccgagcgttatcgcccgcaaggttagtcagtacagctgccagcgcaagaccacgctgaataactacaacaaaaagtttaccgacgcgctggagatcatggccgagagttacaaatttaaagagaacctgatcgcgtgtctggaagccaagcgcgccgcgagtattctgaaatatctgccgttcccggttaccagcatgaaagacatccaaggtctgccgtgcattggcgaccaagttcgtgacgtgatcgaggagatcatcgaagagggcgagagcagccgtgttaaagaagttctcaatgacgagcgctacaaggcctttaagcagttcaccagcgtgttcggtgtgggcgtgaaaaccagcgaaaagtggtttcgtatgggcctccgtacggttgaagaggcaaaggccagtaagagtctgaagctgagcaagatgcagaaggcgggcttcctgtattacgaggatctggcgagccgcgttagtaaagaagaagccgatgcagttacgctcatcgtgaagaacacggtgcgtacctttctgccggatgcgctggtgaccatcaccggcggtttccgccgtggcaaacctatgggccacgacatcgactttctgatcacgaatccgggcccgaaagaggatgacgagctgctccacaaagtggttgatctgctcaagaagcaaggtctgctgctgtacgaagacatcaaagagagcacgttcgtggaggaacaactgccaagtcgcaaaatcgacgccatggacaacttccagaagtgcttcgccattctcaagctgtaccagccgggcgtggataacagcagctacaacacgagtaagaagagtgacatggccgaggttaaggattggaaagcgattcgtgtggatctggtgatcacgccattcgagcagtacgcctatgcgctgctcggttggacgggcagcaaagaatttggtcgcgatctgcgccgctatgcggaggaagagcgcggcatgatcctcgacaaccatgccctctacgacctgaaaaagcgcatctttctgaaagcgggcagcgaagaagagattttcgcgcatctgggtctggattatgtggagccgtgggaacgcaacgcg

SEQ ID NO: 1724 - protein, 394 aa, synthetic construct
  REGION 1..394: note = Variant of terminal deoxynucleotidyl transferase
MHHHHHHGGSGHPPSNTPEGEVPSVIARKVSQYSCQRKTTLNNYNKKFTDALEIMAESYKFKENLIACLEAKRAASILKYLPFPVTSMKDIQGLPCIGDQVRDVIEEIIEEGESSRVKEVLNDERYKAFKQFTSVFGVGVKTSEKWFRMGLRTVEEAKASKSLKLSKMQKAGFLYYEDLASRVSKEEADAVTLIVKNTVRTFLPDALVTITGGFRRGKPMGHDIDFLITNPGPKEDDELLHKVVDLLKKQGLLLYEDIKESTFVEEQLPSRKIDAMDNFQKCFAILKLYQPGVDNSSYNTSKKSDMAEVKDWKAIRVDLVITPFEQYAYALLGWTGSKEFGRDLRRYAEEERGMILDNHALYDLKKRIFLKAGSEEEIFAHLGLDYVEPWERNA

SEQ ID NO: 1725 - DNA, 1182 bp, synthetic construct
  misc_feature 1..1182: note = Variant of terminal deoxynucleotidyl transferase
  source 1..1182: mol_type = other DNA
atgcaccatcatcatcatcatggcggcagcggccatccgattagcaataccccggagggggaggtgccgagcgttatcgcccgcaaggttagtcagtacagctgccagcgcaagaccacgctgaataactacaacaaaaagtttaccgacgcgctggagatcatggccgagaattacaaatttaaagagaacctgatcgcgtgtctggaagccaagcgcgccgcgagtattctgaaatatctgccgttcccggttaccagcatgaaagacatccaaggtctgccgtgcattggcgaccaagttcgtgacgtgatcgaggagatcatcgaagagggcgagagcagccgtgttaaagaagttctcaatgacgagcgctacaaggcctttaagcagttcaccagcgtgttcggtgtgggcgtgaaaaccagcgaaaagtggtttcgtatgggcctccgtacggttgaagaggcaaaggccagtaagagtctgaagctgagcaagatgcagaaggcgggcttcctgtattacgaggatctggcgagccgcgttagtaaagaagaagccgatgccgttacgctcatcgtgaagggcacggtgcgtacctttctgccggatgcgctggtgaccatcaccggcggtttccgccgtggcaaacctatgggccacgacatcgactttctgatcacgaatccgggcccgaaagaggatgacgagctgctccacaaagtggttgatctgctcaagaagcaaggtctgctgctgtacgaagacatcaaagagagcacgttcgtggaggaacaactgccaagtcgcaaaatcgacgccatggacaacttccagaagtgcttcgccattctcaagctgtaccagccgggcgtggataacagcagcgttaacacgagtaagaagagtgacatggccgaggttaaggattggaaagcgattcgtgtggatctggtgatcacgccattcgagcagtacgcctatgcgctgctcggttggacgggcagcaaagaatttggtcgcgatctgcgccgctatgcggaggaagagcgcggcatgatcctcgacaaccatgccctctacgacctgaaaaagcgcatctttctgaaagcgggcagcgaagaagagattttcgcgcatctgggtctggattatgtggagccgtgggaacgcaacgcg

SEQ ID NO: 1726 - protein, 394 aa, synthetic construct
  REGION 1..394: note = Variant of terminal deoxynucleotidyl transferase
MHHHHHHGGSGHPISNTPEGEVPSVIARKVSQYSCQRKTTLNNYNKKFTDALEIMAENYKFKENLIACLEAKRAASILKYLPFPVTSMKDIQGLPCIGDQVRDVIEEIIEEGESSRVKEVLNDERYKAFKQFTSVFGVGVKTSEKWFRMGLRTVEEAKASKSLKLSKMQKAGFLYYEDLASRVSKEEADAVTLIVKGTVRTFLPDALVTITGGFRRGKPMGHDIDFLITNPGPKEDDELLHKVVDLLKKQGLLLYEDIKESTFVEEQLPSRKIDAMDNFQKCFAILKLYQPGVDNSSVNTSKKSDMAEVKDWKAIRVDLVITPFEQYAYALLGWTGSKEFGRDLRRYAEEERGMILDNHALYDLKKRIFLKAGSEEEIFAHLGLDYVEPWERNA

SEQ ID NO: 1727 - DNA, 1182 bp, synthetic construct
  misc_feature 1..1182: note = Variant of terminal deoxynucleotidyl transferase
  source 1..1182: mol_type = other DNA
atgcaccatcatcatcatcatggcggcagcggccatccgcctagcaataccccggagggggaggtgccgagcgttatcgcccgcaaggttagtcagtacagctgccagcgcaagaccacgctgaataactacaacaaaaagtttaccgacgcgctggagatcatggccgagagttacaaatttaaagagaacctgatcgcgtgtctggaagccaagcgcgccgcgagtattctgaaatatctgccgttcccggttaccagcatgaaagacatccaaggtctgccgtgcattggcgaccaagttcgtgacgtgatcgaggagatcatcgaagagggcgagagcagccgtgttaaagaagttctcaatgacgagcgctacaaggcctttaagcagttcaccagcgtgttcggtgtgggcgtgaaaaccagcgaaaagtggtttcgtatgggcctccgtacggttgaagaggcaaaggccagtaagagtctgaagctgagcaagatgcagaaggcgggcttcctgtattacgaggatctggcgagccgcgttagtaaagaagaagccgatgccgttacgctcatcgtgaagggcacggtgcgtacctttctgccggatgcgctggtgaccatcaccggcggtttccgccgtggcaaacctatgggccacgacatcgactttctgatcacgaatccgggcccgaaagaggatgacgagctgctccacaaagtggttgatctgctcaagaagcaaggtctgctgctgtacgaagacatcaaagagagcacgttcgtggaggaacaactgccaagtcgcaaaatcgacgccatggacaacttccagaagtgcttcgccattctcaagctgtaccagccgggcgtggataacagcagctataacacgagtaagaagagtgacatggccgaggttaaggattggaaagcgattcgtgtggatctggtgatcacgccattcgagcagtacgcctatgcgctgctcggttggacgggcagcaaagaatttggtcgcgatctgcgccgctatgcggaggaagagcgcggcatgatcctcgacaaccatgccctctacgaccgtaaaaagcgcatctttctgaaagcgggcagcgaagaagagattttcgcgcatctgggtctggattatgtggagccgtgggaacgcaacgcg

SEQ ID NO: 1728 - protein, 394 aa, synthetic construct
  REGION 1..394: note = Variant of terminal deoxynucleotidyl transferase
MHHHHHHGGSGHPPSNTPEGEVPSVIARKVSQYSCQRKTTLNNYNKKFTDALEIMAESYKFKENLIACLEAKRAASILKYLPFPVTSMKDIQGLPCIGDQVRDVIEEIIEEGESSRVKEVLNDERYKAFKQFTSVFGVGVKTSEKWFRMGLRTVEEAKASKSLKLSKMQKAGFLYYEDLASRVSKEEADAVTLIVKGTVRTFLPDALVTITGGFRRGKPMGHDIDFLITNPGPKEDDELLHKVVDLLKKQGLLLYEDIKESTFVEEQLPSRKIDAMDNFQKCFAILKLYQPGVDNSSYNTSKKSDMAEVKDWKAIRVDLVITPFEQYAYALLGWTGSKEFGRDLRRYAEEERGMILDNHALYDRKKRIFLKAGSEEEIFAHLGLDYVEPWERNA

SEQ ID NO: 1729 - DNA, 1182 bp, synthetic construct
  misc_feature 1..1182: note = Variant of terminal deoxynucleotidyl transferase
  source 1..1182: mol_type = other DNA
atgcaccatcatcatcatcatggcgatagcggccatccgattagcaataccccggagggggaggtgccgagcgttatcgcccgcaaggttagtcagtacagctgccagcgcaagaccacgctgaataactacaacaaaaagtttaccgacgcgctggagatcatggccgagagttacaaatttaaagagaacctgatcgcgtgtctggaagccaagcgcgccgcgagtattctgaaatatctgccgttcccggttaccagcatgaaagacatccaaggtctgccgtgcattggcgaccaagttcgtgacgtgatcgaggagatcatcgaagagggcgagagcagccgtgttaaagaagttctcaatgacgagcgctacaaggcctttaagcagttcaccagcgtgttcggtgtgggcgtgaaaaccagcgaaaagtggtttcgtatgggcctccgtacggttgaagaggcaaaggccagtaagagtctgaagctgagcaagatgcagaaggcgggcttcctgtattacgaggatctggcgagccgcgttagtaaagaagaagccgatgccgttacgctcatcgtgaagaacacggtgcgtacctttctgccggatgcgctggtgaccatcaccggcggtttccgccgtggcaaacctatgggccacgacatcgactttctgatcacgaatccgggcccgaaagaggatgacgagctgctccacaaagtggttgatctgctcaagaagcaaggtctgctgctgtacgaagacatcaaagagagcacgttcgtggaggaacaactgccaagtcgcaaaatcgacgccatggacaacttccagaagtgcttcgccattctcaagctgtaccagccgggcgtggataacagcagctacaacacgagtaagaagagtgacatggccgaggttaaggattggaaagcgattcgtgtggatctggtgatcacgccattcgagcagtacgcctatgcgctgctcggttggacgggcagcaaagaatttggtcgcgatctgcgccgctatgcggaggaagagcgcggcatgatcctcgacaaccatgccctctacgaccgcaaaaagcgcatctttctgaaagcgggcagcgaagaagagattttcgcgcatctgggtctggattatgtggagccgtgggaacgcaacgcg

SEQ ID NO: 1730 - protein, 394 aa, synthetic construct
  REGION 1..394: note = Variant of terminal deoxynucleotidyl transferase
MHHHHHHGDSGHPISNTPEGEVPSVIARKVSQYSCQRKTTLNNYNKKFTDALEIMAESYKFKENLIACLEAKRAASILKYLPFPVTSMKDIQGLPCIGDQVRDVIEEIIEEGESSRVKEVLNDERYKAFKQFTSVFGVGVKTSEKWFRMGLRTVEEAKASKSLKLSKMQKAGFLYYEDLASRVSKEEADAVTLIVKNTVRTFLPDALVTITGGFRRGKPMGHDIDFLITNPGPKEDDELLHKVVDLLKKQGLLLYEDIKESTFVEEQLPSRKIDAMDNFQKCFAILKLYQPGVDNSSYNTSKKSDMAEVKDWKAIRVDLVITPFEQYAYALLGWTGSKEFGRDLRRYAEEERGMILDNHALYDRKKRIFLKAGSEEEIFAHLGLDYVEPWERNA

SEQ ID NO: 1731 - DNA, 1182 bp, synthetic construct
  misc_feature 1..1182: note = Variant of terminal deoxynucleotidyl transferase
  source 1..1182: mol_type = other DNA
atgcaccatcatcatcatcatggcggcagcggccatccgcctagcaataccccggagggggaggtgccgagcgttatcgcccgcaaggttagtcagtacagctgccagcgcaagaccacgctgaataactacaacaaaaagtttaccgacgcgctggagatcatggccgagaactacaaatttaaagagaacctgatcgcgtgtctggaagccaagcgcgccgcgagtattctgaaatatctgccgttcccggttaccagcatgaaagacatccaaggtctgccgtgcattggcgaccaagttcgtgacgtgatcgaggagatcatcgaagagggcgagagcagccgtgttaaagaagttctcaatgacgagcgctacaaggcctttaagcagttcaccagcgtgttcggtgtgggcgtgaaaaccagcgaaaagtggtttcgtatgggcctccgtacggttgaagaggcaaaggccagtaagagtctgaagctgagcaagatgcagaaggcgggcttcctgtattacgaggatctggcgagctgcgttagtaaagaagaagccgatgccgttacgctcatcgtgaagaacacggtgcgtacctttctgccggatgcgctggtgaccatcaccggcggtttccgccgtggcaaacctatgggccacgacatcgactttctgatcacgaatccgggcccgaaagaggatgacgagctgctccacaaagtggttgatctgctcaagaagcaaggtctgctgctgtacgaagacatcaaagagagcacgttcgtggaggaacaactgccaagtcgcaaaatcgacgccatggacaacttccagaagtgcttcgccattctcaagctgtaccagccgggcgtggataacagcagctacaacacgagtaagaagagtgacatggccgaggttaaggattggaaagcgattcgtgtggatctggtgatcacgccattcgagcagtacgcctatgcgctgctcggttggacgggcagcaaagaatttggtcgcgatctgcgccgctatgcggaggaagagcgcggcatgatcctcgacaaccatgccctctacgaccgtaaaaagcgcatctttctgaaagcgggcagcgaagaagagattttcgcgcatctgggtctggattatgtggagccgtgggaacgcaacgcg

SEQ ID NO: 1732 - protein, 394 aa, synthetic construct
  REGION 1..394: note = Variant of terminal deoxynucleotidyl transferase
MHHHHHHGGSGHPPSNTPEGEVPSVIARKVSQYSCQRKTTLNNYNKKFTDALEIMAENYKFKENLIACLEAKRAASILKYLPFPVTSMKDIQGLPCIGDQVRDVIEEIIEEGESSRVKEVLNDERYKAFKQFTSVFGVGVKTSEKWFRMGLRTVEEAKASKSLKLSKMQKAGFLYYEDLASCVSKEEADAVTLIVKNTVRTFLPDALVTITGGFRRGKPMGHDIDFLITNPGPKEDDELLHKVVDLLKKQGLLLYEDIKESTFVEEQLPSRKIDAMDNFQKCFAILKLYQPGVDNSSYNTSKKSDMAEVKDWKAIRVDLVITPFEQYAYALLGWTGSKEFGRDLRRYAEEERGMILDNHALYDRKKRIFLKAGSEEEIFAHLGLDYVEPWERNA

SEQ ID NO: 1733 - DNA, 1182 bp, synthetic construct
  misc_feature 1..1182: note = Variant of terminal deoxynucleotidyl transferase
  source 1..1182: mol_type = other DNA
atgcaccatcatcatcatcatggcggcagcggccatccgattagcaataccccggagggggaggtgccgagcgttatcgcccgcaaggttagtcagtacagctgccagcgcaagaccacgctgaataactacaacaaaaagtttaccgacgcgctggagatcatggccgagaattacaaatttaaagagaacctgatcgcgtgtctggaagccaagcgcgccgcgagtattctgaaatatctgccgttcccggttaccagcatgaaagacatccaaggtctgccgtgcattggcgaccaagttcgtgacgtgatcgaggagatcatcgaagagggcgagagcagccgtgttaaagaagttctcaatgacgagcgctacaaggcctttaagcagttcaccagcgtgttcggtgtgggcgtgaaaaccagcgaaaagtggtttcgtatgggcctccgtacggttgaagaggcaaaggccagtaagagtctgaagctgagcaagatgcagaaggcgggcttcctgtattacgaggatctggcgagccgcgttagtaaagaagaagccgatgccgttacgctcatcgtgaagaacacggtgcgtacctttctgccggatgcgctggtgaccatcaccggcggtttccgccgtggcaaacctatgggccacgacatcgactttctgatcacgaatccgggcccgaaagaggatgacgagctgctccacaaagtggttgatctgctcaagaagcaaggtctgctgctgtacgaagacatcaaagagagcacgttcgtggaggaacaactgccaagtcgcaaaatcgacgccatggacaacttccagaagtgcttcgccattctcaagctgtaccagccgggcgtggataacagcagcgttaacacgagtaagaagagtgacatggccgaggttaaggattggaaagcgattcgtgtggatctggtgatcacgccattcgagcagtacgcctatgcgctgctcggttggacgggcagcaaagaatttggtcgcgatctgcgccgctatgcggaggaagagcgcggcatgatcctcgacaaccatgccctctacgactttaaaaagcgcatctttctgaaagcgggcagcgaagaagagattttcgcgcatctgggtctggattatgtggagccgtgggaacgcaacgcg

SEQ ID NO: 1734 - protein, 394 aa, synthetic construct
  REGION 1..394: note = Variant of terminal deoxynucleotidyl transferase
MHHHHHHGGSGHPISNTPEGEVPSVIARKVSQYSCQRKTTLNNYNKKFTDALEIMAENYKFKENLIACLEAKRAASILKYLPFPVTSMKDIQGLPCIGDQVRDVIEEIIEEGESSRVKEVLNDERYKAFKQFTSVFGVGVKTSEKWFRMGLRTVEEAKASKSLKLSKMQKAGFLYYEDLASRVSKEEADAVTLIVKNTVRTFLPDALVTITGGFRRGKPMGHDIDFLITNPGPKEDDELLHKVVDLLKKQGLLLYEDIKESTFVEEQLPSRKIDAMDNFQKCFAILKLYQPGVDNSSVNTSKKSDMAEVKDWKAIRVDLVITPFEQYAYALLGWTGSKEFGRDLRRYAEEERGMILDNHALYDFKKRIFLKAGSEEEIFAHLGLDYVEPWERNA

SEQ ID NO: 1735 - DNA, 1182 bp, synthetic construct
  misc_feature 1..1182: note = Variant of terminal deoxynucleotidyl transferase
  source 1..1182: mol_type = other DNA
atgcaccatcatcatcatcatggcggcagcggccatccgattagcaataccccggagggggaggtgccgagcgttatcgcccgcaaggttagtcagtacagctgccagcgcaagaccacgctgaataactacaacaaaaagtttaccgacgcgctggagatcatggccgagagttacaaatttaaagagaacctgatcgcgtgtctggaagccaagcgcgccgcgagtattctgaaatatctgccgttcccggttaccagcatgaaagacatccaaggtctgccgtgcattggcgaccaagttcgtgacgtgatcgaggagatcatcgaagagggcgagagcagccgtgttaaagaagttctcaatgacgagcgctacaaggcctttaagcagttcaccagcgtgttcggtgtgggcgtgaaaaccagcgaaaagtggtttcgtatgggcctccgtacggttgaagaggcaaaggccagtaagagtctgaagctgagcaagatgcagaaggcgggcttcctgtattacgaggatctggcgagctgcgttagtaaagaagaagccgatgcagttacgctcatcgtgaagggcacggtgcgtacctttctgccggatgcgctggtgaccatcaccggcggtttccgccgtggcaaacctatgggccacgacatcgactttctgatcacgaatccgggcccgaaagaggatgacgagctgctccacaaagtggttgatctgctcaagaagcaaggtctgctgctgtacgaagacatcaaagagagcacgttcgtggaggaacaactgccaagtcgcaaaatcgacgccatggacaacttccagaagtgcttcgccattctcaagctgtaccagccgggcgtggataacagcagcgttaacacgagtaagaagagtgacatggccgaggttaaggattggaaagcgattcgtgtggatctggtgatcacgccattcgagcagtacgcctatgcgctgctcggttggacgggcagcaaagaatttggtcgcgatctgcgccgctatgcggaggaagagcgcggcatgatcctcgacaaccatgccctctacgacctgaaaaagcgcatctttctgaaagcgggcagcgaagaagagattttcgcgcatctgggtctggattatgtggagccgtgggaacgcaacgcg

SEQ ID NO: 1736 - protein, 394 aa, synthetic construct
  REGION 1..394: note = Variant of terminal deoxynucleotidyl transferase
MHHHHHHGGSGHPISNTPEGEVPSVIARKVSQYSCQRKTTLNNYNKKFTDALEIMAESYKFKENLIACLEAKRAASILKYLPFPVTSMKDIQGLPCIGDQVRDVIEEIIEEGESSRVKEVLNDERYKAFKQFTSVFGVGVKTSEKWFRMGLRTVEEAKASKSLKLSKMQKAGFLYYEDLASCVSKEEADAVTLIVKGTVRTFLPDALVTITGGFRRGKPMGHDIDFLITNPGPKEDDELLHKVVDLLKKQGLLLYEDIKESTFVEEQLPSRKIDAMDNFQKCFAILKLYQPGVDNSSVNTSKKSDMAEVKDWKAIRVDLVITPFEQYAYALLGWTGSKEFGRDLRRYAEEERGMILDNHALYDLKKRIFLKAGSEEEIFAHLGLDYVEPWERNA

SEQ ID NO: 1737 - DNA, 1182 bp, synthetic construct
  misc_feature 1..1182: note = Variant of terminal deoxynucleotidyl transferase
  source 1..1182: mol_type = other DNA
atgcaccatcatcatcatcatggcgatagcggccatccgcctagcaataccccggagggggaggtgccgagcgttatcgcccgcaaggttagtcagtacagctgccagcgcaagaccacgctgaataactacaacaaaaagtttaccgacgcgctggagatcatggccgagaactacaaatttaaagagaacctgatcgcgtgtctggaagccaagcgcgccgcgagtattctgaaatatctgccgttcccggttaccagcatgaaagacatccaaggtctgccgtgcattggcgaccaagttcgtgacgtgatcgaggagatcatcgaagagggcgagagcagccgtgttaaagaagttctcaatgacgagcgctacaaggcctttaagcagttcaccagcgtgttcggtgtgggcgtgaaaaccagcgaaaagtggtttcgtatgggcctccgtacggttgaagaggcaaaggccagtaagagtctgaagctgagcaagatgcagaaggcgggcttcctgtattacgaggatctggcgagccgcgttagtaaagaagaagccgatgccgttacgctcatcgtgaagaacacggtgcgtacctttctgccggatgcgctggtgaccatcaccggcggtttccgccgtggcaaacctatgggccacgacatcgactttctgatcacgaatccgggcccgaaagaggatgacgagctgctccacaaagtggttgatctgctcaagaagcaaggtctgctgctgtacgaagacatcaaagagagcacgttcgtggaggaacaactgccaagtcgcaaaatcgacgccatggacaacttccagaagtgcttcgccattctcaagctgtaccagccgggcgtggataacagcagcgttaacacgagtaagaagagtgacatggccgaggttaaggattggaaagcgattcgtgtggatctggtgatcacgccattcgagcagtacgcctatgcgctgctcggttggacgggcagcaaagaatttggtcgcgatctgcgccgctatgcggaggaagagcgcggcatgatcctcgacaaccatgccctctacgaccgcaaaaagcgcatctttctgaaagcgggcagcgaagaagagattttcgcgcatctgggtctggattatgtggagccgtgggaacgcaacgcg

SEQ ID NO: 1738 - protein, 394 aa, synthetic construct
  REGION 1..394: note = Variant of terminal deoxynucleotidyl transferase
MHHHHHHGDSGHPPSNTPEGEVPSVIARKVSQYSCQRKTTLNNYNKKFTDALEIMAENYKFKENLIACLEAKRAASILKYLPFPVTSMKDIQGLPCIGDQVRDVIEEIIEEGESSRVKEVLNDERYKAFKQFTSVFGVGVKTSEKWFRMGLRTVEEAKASKSLKLSKMQKAGFLYYEDLASRVSKEEADAVTLIVKNTVRTFLPDALVTITGGFRRGKPMGHDIDFLITNPGPKEDDELLHKVVDLLKKQGLLLYEDIKESTFVEEQLPSRKIDAMDNFQKCFAILKLYQPGVDNSSVNTSKKSDMAEVKDWKAIRVDLVITPFEQYAYALLGWTGSKEFGRDLRRYAEEERGMILDNHALYDRKKRIFLKAGSEEEIFAHLGLDYVEPWERNA

SEQ ID NO: 1739 - DNA, 1182 bp, synthetic construct
  misc_feature 1..1182: note = Variant of terminal deoxynucleotidyl transferase
  source 1..1182: mol_type = other DNA
atgcaccatcatcatcatcatggcggcagcggccatccgcctagcaataccccggagggggaggtgccgagcgttatcgcccgcaaggttagtcagtacagctgccagcgcaagaccacgctgaataactacaacaaaaagtttaccgacgcgctggagatcatggccgagaattacaaatttaaagagaacctgatcgcgtgtctggaagccaagcgcgccgcgagtattctgaaatatctgccgttcccggttaccagcatgaaagacatccaaggtctgccgtgcattggcgaccaagttcgtgacgtgatcgaggagatcatcgaagagggcgagagcagccgtgttaaagaagttctcaatgacgagcgctacaaggcctttaagcagttcaccagcgtgttcggtgtgggcgtgaaaaccagcgaaaagtggtttcgtatgggcctccgtacggttgaagaggcaaaggccagtaagagtctgaagctgagcaagatgcagaaggcgggcttcctgtattacgaggatctggcgagctgcgttagtaaagaagaagccgatgcagttacgctcatcgtgaagaacacggtgcgtacctttctgccggatgcgctggtgaccatcaccggcggtttccgccgtggcaaacctatgggccacgacatcgactttctgatcacgaatccgggcccgaaagaggatgacgagctgctccacaaagtggttgatctgctcaagaagcaaggtctgctgctgtacgaagacatcaaagagagcacgttcgtggaggaacaactgccaagtcgcaaaatcgacgccatggacaacttccagaagtgcttcgccattctcaagctgtaccagccgggcgtggataacagcagcgttaacacgagtaagaagagtgacatggccgaggttaaggattggaaagcgattcgtgtggatctggtgatcacgccattcgagcagtacgcctatgcgctgctcggttggacgggcagcaaagaatttggtcgcgatctgcgccgctatgcggaggaagagcgcggcatgatcctcgacaaccatgccctctacgacctgaaaaagcgcatctttctgaaagcgggcagcgaagaagagattttcgcgcatctgggtctggattatgtggagccgtgggaacgcaacgcg

SEQ ID NO: 1740 - protein, 394 aa, synthetic construct
  REGION 1..394: note = Variant of terminal deoxynucleotidyl transferase
MHHHHHHGGSGHPPSNTPEGEVPSVIARKVSQYSCQRKTTLNNYNKKFTDALEIMAENYKFKENLIACLEAKRAASILKYLPFPVTSMKDIQGLPCIGDQVRDVIEEIIEEGESSRVKEVLNDERYKAFKQFTSVFGVGVKTSEKWFRMGLRTVEEAKASKSLKLSKMQKAGFLYYEDLASCVSKEEADAVTLIVKNTVRTFLPDALVTITGGFRRGKPMGHDIDFLITNPGPKEDDELLHKVVDLLKKQGLLLYEDIKESTFVEEQLPSRKIDAMDNFQKCFAILKLYQPGVDNSSVNTSKKSDMAEVKDWKAIRVDLVITPFEQYAYALLGWTGSKEFGRDLRRYAEEERGMILDNHALYDLKKRIFLKAGSEEEIFAHLGLDYVEPWERNA

SEQ ID NO: 1741 - DNA, 1182 bp, synthetic construct
  misc_feature 1..1182: note = Variant of terminal deoxynucleotidyl transferase
  source 1..1182: mol_type = other DNA
atgcaccatcatcatcatcatggcgaaagcggccatccgcctagcaataccccggagggggaggtgccgagcgttatcgcccgcaaggttagtcagtacagctgccagcgcaagaccacgctgaataactacaacaaaaagtttaccgacgcgctggagatcatggccgagagttacaaatttaaagagaacctgatcgcgtgtctggaagccaagcgcgccgcgagtattctgaaatatctgccgttcccggttaccagcatgaaagacatccaaggtctgccgtgcattggcgaccaagttcgtgacgtgatcgaggagatcatcgaagagggcgagagcagccgtgttaaagaagttctcaatgacgagcgctacaaggcctttaagcagttcaccagcgtgttcggtgtgggcgtgaaaaccagcgaaaagtggtttcgtatgggcctccgtacggttgaagaggcaaaggccagtaagagtctgaagctgagcaagatgcagaaggcgggcttcctgtattacgaggatctggcgagccgcgttagtaaagaagaagccgatgcagttacgctcatcgtgaagggcacggtgcgtacctttctgccggatgcgctggtgaccatcaccggcggtttccgccgtggcaaacctatgggccacgacatcgactttctgatcacgaatccgggcccgaaagaggatgacgagctgctccacaaagtggttgatctgctcaagaagcaaggtctgctgctgtacgaagacatcaaagagagcacgttcgtggaggaacaactgccaagtcgcaaaatcgacgccatggacaacttccagaagtgcttcgccattctcaagctgtaccagccgggcgtggataacagcagctacaacacgagtaagaagagtgacatggccgaggttaaggattggaaagcgattcgtgtggatctggtgatcacgccattcgagcagtacgcctatgcgctgctcggttggacgggcagcaaagaatttggtcgcgatctgcgccgctatgcggaggaagagcgcggcatgatcctcgacaaccatgccctctacgaccgcaaaaagcgcatctttctgaaagcgggcagcgaagaagagattttcgcgcatctgggtctggattatgtggagccgtgggaacgcaacgcg

SEQ ID NO: 1742 - protein, 394 aa, synthetic construct
  REGION 1..394: note = Variant of terminal deoxynucleotidyl transferase
MHHHHHHGESGHPPSNTPEGEVPSVIARKVSQYSCQRKTTLNNYNKKFTDALEIMAESYKFKENLIACLEAKRAASILKYLPFPVTSMKDIQGLPCIGDQVRDVIEEIIEEGESSRVKEVLNDERYKAFKQFTSVFGVGVKTSEKWFRMGLRTVEEAKASKSLKLSKMQKAGFLYYEDLASRVSKEEADAVTLIVKGTVRTFLPDALVTITGGFRRGKPMGHDIDFLITNPGPKEDDELLHKVVDLLKKQGLLLYEDIKESTFVEEQLPSRKIDAMDNFQKCFAILKLYQPGVDNSSYNTSKKSDMAEVKDWKAIRVDLVITPFEQYAYALLGWTGSKEFGRDLRRYAEEERGMILDNHALYDRKKRIFLKAGSEEEIFAHLGLDYVEPWERNA

SEQ ID NO: 1743 - DNA, 1182 bp, synthetic construct
  misc_feature 1..1182: note = Variant of terminal deoxynucleotidyl transferase
  source 1..1182: mol_type = other DNA
atgcaccatcatcatcatcatggcggcatcggccatccgattagcaataccccggagggggaggtgccgagcgttatcgcccgcaaggttagtcagtacagctgccagcgcaagaccacgctgaataactacaacaaaaagtttaccgacgcgctggagatcatggccgagaactacaaatttaaagagaacctgatcgcgtgtctggaagccaagcgcgccgcgagtattctgaaatatctgccgttcccggttaccagcatgaaagacatccaaggtctgccgtgcattggcgaccaagttcgtgacgtgatcgaggagatcatcgaagagggcgagagcagccgtgttaaagaagttctcaatgacgagcgctacaaggcctttaagcagttcaccagcgtgttcggtgtgggcgtgaaaaccagcgaaaagtggtttcgtatgggcctccgtacggttgaagaggcaaaggccagtaagagtctgaagctgagcaagatgcagaaggcgggcttcctgtattacgaggatctggcgagccgcgttagtaaagaagaagccgatgcagttacgctcatcgtgaagggcacggtgcgtacctttctgccggatgcgctggtgaccatcaccggcggtttccgccgtggcaaacctatgggccacgacatcgactttctgatcacgaatccgggcccgaaagaggatgacgagctgctccacaaagtggttgatctgctcaagaagcaaggtctgctgctgtacgaagacatcaaagagagcacgttcgtggaggaacaactgccaagtcgcaaaatcgacgccatggacaacttccagaagtgcttcgccattctcaagctgtaccagccgggcgtggataacagcagctacaacacgagtaagaagagtgacatggccgaggttaaggattggaaagcgattcgtgtggatctggtgatcacgccattcgagcagtacgcctatgcgctgctcggttggacgggcagcaaagaatttggtcgcgatctgcgccgctatgcggaggaagagcgcggcatgatcctcgacaaccatgccctctacgacctgaaaaagcgcatctttctgaaagcgggcagcgaagaagagattttcgcgcatctgggtctggattatgtggagccgtgggaacgcaacgcg

SEQ ID NO: 1744 - protein, 394 aa, synthetic construct
  REGION 1..394: note = Variant of terminal deoxynucleotidyl transferase
MHHHHHHGGIGHPISNTPEGEVPSVIARKVSQYSCQRKTTLNNYNKKFTDALEIMAENYKFKENLIACLEAKRAASILKYLPFPVTSMKDIQGLPCIGDQVRDVIEEIIEEGESSRVKEVLNDERYKAFKQFTSVFGVGVKTSEKWFRMGLRTVEEAKASKSLKLSKMQKAGFLYYEDLASRVSKEEADAVTLIVKGTVRTFLPDALVTITGGFRRGKPMGHDIDFLITNPGPKEDDELLHKVVDLLKKQGLLLYEDIKESTFVEEQLPSRKIDAMDNFQKCFAILKLYQPGVDNSSYNTSKKSDMAEVKDWKAIRVDLVITPFEQYAYALLGWTGSKEFGRDLRRYAEEERGMILDNHALYDLKKRIFLKAGSEEEIFAHLGLDYVEPWERNA

SEQ ID NO: 1745 - DNA, 1182 bp, synthetic construct
  misc_feature 1..1182: note = Variant of terminal deoxynucleotidyl transferase
  source 1..1182: mol_type = other DNA
atgcaccatcatcatcatcatggcggtagcggccatccgccgagcaataccccggagggggaggtgccgagcgttatcgcccgcaaggttagtcagtacagctgccagcgcaagaccacgctgaataactacaacaaaaagtttaccgacgcgctggagatcatggccgagaactacaaatttaaagagaacctgatcgcgtgtctggaagccaagcgcgccgcgagtattctgaaatatctgccgttcccggttaccagcatgaaagacatccaaggtctgccgtgcattggcgaccaagttcgtgacgtgatcgaggagatcatcgaagagggcgagagcagccgtgttaaagaagttctcaatgacgagcgctacaaggcctttaagcagttcaccagcgtgttcggtgtgggcgtgaaaaccagcgaaaagtggtttcgtatgggcctccgtacggttgaagaggcaaaggccagtaagagtctgaagctgagcaagatgcagaaggcgggcttcctgtattacgaggatctggcgagccgcgttagtaaagaagaagccgatgccgttacgctcatcgtgaagaacacggtgcgtacctttctgccggatgcgctggtgaccatcaccggcggtttccgccgtggcaaacctatgggccacgacatcgactttctgatcacgaatccgggcccgaaagaggatgacgagctgctccacaaagtggttgatctgctcaagaagcaaggtctgctgctgtacgaagacatcaaagagagcacgttcgtggaggaacaactgccaagtcgcaaaatcgacgccatggacaacttccagaagtgcttcgccattctcaagctgtaccagccgggcgtggataacagcagcgttaacacgagtaagaagagtgacatggccgaggttaaggattggaaagcgattcgtgtggatctggtgatcacgccattcgagcagtacgcctatgcgctgctcggttggacgggcagcaaagaatttggtcgcgatctgcgccgctatgcggaggaagagcgcggcatgatcctcgacaaccatgccctctacgaccgtaaaaagcgcatctttctgaaagcgggcagcgaagaagagattttcgcgcatctgggtctggattatgtggagccgtgggaacgcaacgcg

SEQ ID NO: 1746 - protein, 394 aa, synthetic construct
  REGION 1..394: note = Variant of terminal deoxynucleotidyl transferase
MHHHHHHGGSGHPPSNTPEGEVPSVIARKVSQYSCQRKTTLNNYNKKFTDALEIMAENYKFKENLIACLEAKRAASILKYLPFPVTSMKDIQGLPCIGDQVRDVIEEIIEEGESSRVKEVLNDERYKAFKQFTSVFGVGVKTSEKWFRMGLRTVEEAKASKSLKLSKMQKAGFLYYEDLASRVSKEEADAVTLIVKNTVRTFLPDALVTITGGFRRGKPMGHDIDFLITNPGPKEDDELLHKVVDLLKKQGLLLYEDIKESTFVEEQLPSRKIDAMDNFQKCFAILKLYQPGVDNSSVNTSKKSDMAEVKDWKAIRVDLVITPFEQYAYALLGWTGSKEFGRDLRRYAEEERGMILDNHALYDRKKRIFLKAGSEEEIFAHLGLDYVEPWERNA

SEQ ID NO: 1747 - DNA, 1182 bp, synthetic construct
  misc_feature 1..1182: note = Variant of terminal deoxynucleotidyl transferase
  source 1..1182: mol_type = other DNA
atgcaccatcatcatcatcatggcggtagcggccatccgccgagcaataccccggagggggaggtgccgagcgttatcgcccgcccggttagtcagtacagctgccagcgcaagaccacgctgaataactacaacaaaaagtttaccgacgcgctggagatcatggccgagaactacaaatttaaagagaacctgatcgcgtgtctggaagccaagcgcgccgcgagtattctgaaatatctgccgttcccggttaccagcatgaaagacatccaaggtctgccgtgcattggcgaccaagttcgtgacgtgatcgaggagatcatcgaagagggcgagagcagccgtgttaaagaagttctcaatgacgagcgctacaaggcctttaagcagttcaccagcgtgttcggtgtgggcgtgaaaaccgcggaaaagtggtttcgtatgggcctccgtacggttgaagaggcaaaggccagtaagagtctgaagctgagcaagatgcagaaggcgggcttcctgtattacgaggatctggcgagccgcgttagtcgtgaagaagccgatgccgttacgagcatcgtgaagaatacggtgcgtacctttctgccggatgcgctggtgaccatcaccggcggtttccgccgtggcaaacctatgggccacgacatcgactttctgatcacgaatccgggcccgaaagaggatgacgagctgctccacaaagtggttgatctgctcaagaagcaaggtctgctgctgtacgaagacatcaaagagagcacgttcgtggaggggcaactgccaagtcgcaaaatcgacgccatggacaacttccagaagtgcttcgccattctcaagctgtaccagccgggcgtggataacagcagctataacacgagtaagaagagtgacatggccgaggttaaggattggaaagcgattcgtgtggatctggtgatcacgccattcgagcagtacgcctatgcgctgctcggttggacgggcagcaaagaatttcgtcgcgatctgcgccgctatgcggaggaagagcgcggcatgatcctcgacaaccatgccctctacgaccgcaaaaagcgcatctttctgaaagcgggcagcgaagaagagattttcgcgcatctgggtctggattatgtggagccgtgggaacgcaacgcg

SEQ ID NO: 1748 - protein, 394 aa, synthetic construct
  REGION 1..394: note = Variant of terminal deoxynucleotidyl transferase
MHHHHHHGGSGHPPSNTPEGEVPSVIARPVSQYSCQRKTTLNNYNKKFTDALEIMAENYKFKENLIACLEAKRAASILKYLPFPVTSMKDIQGLPCIGDQVRDVIEEIIEEGESSRVKEVLNDERYKAFKQFTSVFGVGVKTAEKWFRMGLRTVEEAKASKSLKLSKMQKAGFLYYEDLASRVSREEADAVTSIVKNTVRTFLPDALVTITGGFRRGKPMGHDIDFLITNPGPKEDDELLHKVVDLLKKQGLLLYEDIKESTFVEGQLPSRKIDAMDNFQKCFAILKLYQPGVDNSSYNTSKKSDMAEVKDWKAIRVDLVITPFEQYAYALLGWTGSKEFRRDLRRYAEEERGMILDNHALYDRKKRIFLKAGSEEEIFAHLGLDYVEPWERNA

SEQ ID NO: 1749 - DNA, 1182 bp, synthetic construct
  misc_feature 1..1182: note = Variant of terminal deoxynucleotidyl transferase
  source 1..1182: mol_type = other DNA
atgcaccatcatcatcatcatggcggtagcggccatccgccgagcaataccccggagggggaggtgccgagcgttatcgcccgcccggttagtcagtacagctgccagcgcaagaccacgctgaataactacaacaaaaagtttaccgacgcgctggagatcatggccgagaactacaaatttaaagagaacctgatcgcgtgtctggaagccaagcgcgccgcgagtattctgaaatatctgccgttcccggttaccagcatgaaagacatccaaggtctgccgtgcattaccgaccaagttcgtgacgtgatcgaggagatcatcgaagagggcgagagcagccgtgttaaagaagttctcaatgacgagcgctacaaggcctttaagcagttcaccagcgtgttcggtgtgggcgtgaaaaccgcggaaaagtggtttcgtatgggcctccgtacggttgaagaggcaaaggccagtaagagtctgaagctgagcaagatgcagaaggcgggcttcctgtattacgaggatctggcgagccgcgttagtaaagaagaagccgatgccgttacgctcatcgtgaagaacacggtgcgtacctttctgccggatgcgctggtgaccatcaccggcggtttccgccgtggcaaacctatgggccacgacatcgactttctgatcacgaatccgggcccgaaagaggatgacgagctgctccacaaagtggttgatctgctcaagaagcaaggtctgctgctgtacgaagacatcaaagagagcacgttcgtggaggggcaactgccaagtcgcaaaatcgacgccatggacaacttccagaagtgcttcgccattctcaagctgtaccagccgggcgtggataacagcagctataacacgagtaagaagagtgacatggccgaggttaaggattggaaagcgattcgtgtggatctggtgatcacgccattcgagcagtacgcctatgcgctgctcggttggacgggcagcaaagaatttcgtcgcgatctgcgccgctatgcggaggaagagcgcggcatgatcctcgacaaccatgccctctacgaccgcaaaaagcgcatctttctgaaagcgggcagcgaagaagagattttcgcgcatctgggtctggattatgtggagccgtgggaacgcaacgcg

SEQ ID NO: 1750 - protein, 394 aa, synthetic construct
  REGION 1..394: note = Variant of terminal deoxynucleotidyl transferase
MHHHHHHGGSGHPPSNTPEGEVPSVIARPVSQYSCQRKTTLNNYNKKFTDALEIMAENYKFKENLIACLEAKRAASILKYLPFPVTSMKDIQGLPCITDQVRDVIEEIIEEGESSRVKEVLNDERYKAFKQFTSVFGVGVKTAEKWFRMGLRTVEEAKASKSLKLSKMQKAGFLYYEDLASRVSKEEADAVTLIVKNTVRTFLPDALVTITGGFRRGKPMGHDIDFLITNPGPKEDDELLHKVVDLLKKQGLLLYEDIKESTFVEGQLPSRKIDAMDNFQKCFAILKLYQPGVDNSSYNTSKKSDMAEVKDWKAIRVDLVITPFEQYAYALLGWTGSKEFRRDLRRYAEEERGMILDNHALYDRKKRIFLKAGSEEEIFAHLGLDYVEPWERNA

SEQ ID NO: 1751 - DNA, 1182 bp, synthetic construct
  misc_feature 1..1182: note = Variant of terminal deoxynucleotidyl transferase
  source 1..1182: mol_type = other DNA
atgcaccatcatcatcatcatggcggtagcggccatccgccgagcaataccccggagggggaggtgccgagcgttatcgcccgcaaggttagtcagtacagctgccagcgcaagaccacgctgaataactacaacaaaaagtttaccgacgcgctggagatcatggccgagaactacaaatttaaagagaacctgatcgcgtgtctggaagccaagcgcgccgcgagtattctgaaatatctgccgttcccggttaccagcatgaaagacatccaaggtctgccgtgcattggtgaccaagttcgtgacgtgatcgaggagatcatcgaagagggcgagagcagccgtgttaaagaagttctcaatgacgagcgctacaaggcctttaagcagttcaccagcgtgttcggtgtgggcgtgaaaaccgcggaaaagtggtttcgtatgggcctccgtacggttgaagaggcaaaggccagtaagagtctgaagctgagcaagatgcagaaggcgggcttcctgtattacgaggatctggcgagccgcgttagtaaggaagaagccgatgccgttacgctcatcgtgaagaacacggtgcgtacctttctgccggatgcgctggtgaccatcaccggcggtttccgccgtggcaaacctatgggccacgacatcgactttctgatcacgaatccgggcccgaaagaggatgacgagctgctccacaaagtggttgatctgctcaagaagcaaggtctgctgctgtacgaagacatcaaagagagcacgttcgtggaggggcaactgccaagtcgcaaaatcgacgccatggacaacttccagaagtgcttcgccattctcaagctgtaccagccgggcgtggataacaatgcgtataatacgagtaagaagagtgacatggccgaggttaaggattggaaagcgattcgtgtggatctggtgatcacgccattcgagcagtacgcctatgcgctgctcggttggacgggcagcaaagaatttcgtcgcgatctgcgccgctatgcggaggaagagcgcggcatgatcctcgacaaccatgccctctacgaccgcaaaaagcgcatctttctgaaagcgggcagcgaagaagagattttcgcgcatctgggtctggattatgtggagccgtgggaacgcaacgcg

SEQ ID NO: 1752 - protein, 394 aa, synthetic construct
  REGION 1..394: note = Variant of terminal deoxynucleotidyl transferase
MHHHHHHGGSGHPPSNTPEGEVPSVIARKVSQYSCQRKTTLNNYNKKFTDALEIMAENYKFKENLIACLEAKRAASILKYLPFPVTSMKDIQGLPCIGDQVRDVIEEIIEEGESSRVKEVLNDERYKAFKQFTSVFGVGVKTAEKWFRMGLRTVEEAKASKSLKLSKMQKAGFLYYEDLASRVSKEEADAVTLIVKNTVRTFLPDALVTITGGFRRGKPMGHDIDFLITNPGPKEDDELLHKVVDLLKKQGLLLYEDIKESTFVEGQLPSRKIDAMDNFQKCFAILKLYQPGVDNNAYNTSKKSDMAEVKDWKAIRVDLVITPFEQYAYALLGWTGSKEFRRDLRRYAEEERGMILDNHALYDRKKRIFLKAGSEEEIFAHLGLDYVEPWERNA

SEQ ID NO: 1753 - DNA, 1182 bp, synthetic construct
  misc_feature 1..1182: note = Variant of terminal deoxynucleotidyl transferase
  source 1..1182: mol_type = other DNA
atgcaccatcatcatcatcatggcggtagcggccatccgccgagcaataccccggagggggaggtgccgagcgttatcgcccgcccggttagtcagtacagctgccagcgcaagaccacgctgaataactacaacaaaaagtttaccgacgcgctggagatcatggccgagaactacaaatttaaagagaacctgatcgcgtgtctggaagccaagcgcgccgcgagtattctgaaatatctgccgttcccggttaccagcatgaaagacatccaaggtctgccgtgcattaccgaccaagttcgtgacgtgatcgaggagatcatcgaagagggcgagagcagccgtgttaaagaagttctcaatgacgagcgctacaaggcctttaagcagttcaccagcgtgttcggtgtgggcgtgaaaacctcggaaaagtggtttcgtatgggcctccgtacggttgaagaggcaaaggccagtaagagtctgaagctgagcaagatgcagaaggcgggcttcctgtattacgaggatctggcgagccgcgttagtcgtgaagaagccgatgccgttacgctcatcgtgaagaacacggtgcgtacctttctgccggatgcgctggtgaccatcaccggcggtttccgccgtggcaaacctatgggccacgacatcgactttctgatcacgaatccgggcccgaaagaggatgacgagctgctccacaaagtggttgatctgctcaagaagcaaggtctgctgctgtacgaagacatcaaagagagcacgttcgtggaggggcaactgccaagtcgcaaaatcgacgccatggacaacttccagaagtgcttcgccattctcaagctgtaccagccgggcgtggataacaattcgtatgggacgagtaagaagagtgacatggccgaggttaaggattggaaagcgattcgtgtggatctggtgatcacgccattcgagcagtacgcctatgcgctgctcggttggacgggcagcaaagaatttcgtcgcgatctgcgccgctatgcggaggaagagcgcggcatgatcctcgacaaccatgccctctacgaccgcaaaaagcgcatctttctgaaagcgggcagcgaagaagagattttcgcgcatctgggtctggattatgtggagccgtgggaacgcaacgcg

SEQ ID NO: 1754 - protein, 394 aa, synthetic construct
  REGION 1..394: note = Variant of terminal deoxynucleotidyl transferase
MHHHHHHGGSGHPPSNTPEGEVPSVIARPVSQYSCQRKTTLNNYNKKFTDALEIMAENYKFKENLIACLEAKRAASILKYLPFPVTSMKDIQGLPCITDQVRDVIEEIIEEGESSRVKEVLNDERYKAFKQFTSVFGVGVKTSEKWFRMGLRTVEEAKASKSLKLSKMQKAGFLYYEDLASRVSREEADAVTLIVKNTVRTFLPDALVTITGGFRRGKPMGHDIDFLITNPGPKEDDELLHKVVDLLKKQGLLLYEDIKESTFVEGQLPSRKIDAMDNFQKCFAILKLYQPGVDNNSYGTSKKSDMAEVKDWKAIRVDLVITPFEQYAYALLGWTGSKEFRRDLRRYAEEERGMILDNHALYDRKKRIFLKAGSEEEIFAHLGLDYVEPWERNA

SEQ ID NO: 1755 - DNA, 1182 bp, synthetic construct
  misc_feature 1..1182: note = Variant of terminal deoxynucleotidyl transferase
  source 1..1182: mol_type = other DNA
atgcaccatcatcatcatcatggcggtagcggccatccgccgagcaataccccggagggggaggtgccgagcgttatcgcccgcaaggttagtcagtacagctgccagcgcaagaccacgctgaataactacaacaaaaagtttaccgacgcgctggagatcatggccgagaactacaaatttaaagagaacctgatcgcgtgtctggaagccaagcgcgccgcgagtattctgaaatatctgccgttcccggttaccagcatgaaagacatccaaggtctgccgtgcattaccgaccaagttcgtgacgtgatcgaggagatcatcgaagagggcgagagcagccgtgttaaagaagttctcaatgacgagcgctacaaggcctttaagcagttcaccagcgtgttcggtgtgggcgtgaaaaccgcggaaaagtggtttcgtatgggcctccgtacggttgaagaggcaaaggccagtaaggcgctgaagctgagcaagatgcagaaggcgggcttcctgtattacgaggatctggcgagccgcgttagtaaagaagaagccgatgccgttacgctcatcgtgaagaacacggtgcgtacctttctgccggatgcgctggtgaccatcaccggcggtttccgccgtggcaaacctatgggccacgacatcgactttctgatcacgaatccgggcccgaaagaggatgacgagctgctccacaaagtggttgatctgctcaagaagcaaggtctgctgctgtacgaagacatcaaagagagcacgttcgtggaggggcaactgccaagtcgcaaaatcgacgccatggacaacttccagaagtgcttcgccattctcaagctgtaccagccgggcgtggataacagcagctataacacgagtaagaagagtgacatggccgaggttaaggattggaaagcgattcgtgtggatctggtgatcacgccattcgagcagtacgcctatgcgctgctcggttggacgggcagcaaagaatttcgtcgcgatctgcgccgctatgcggaggaagagcgcggcatgatcctcgacaaccatgccctctacgaccgcaaaaagcgcatctttctgaaagcgggcagcgaagaagagattttcgcgcatctgggtctggattatgtggagccgtgggaacgcaacgcg

SEQ ID NO: 1756 - protein, 394 aa, synthetic construct
  REGION 1..394: note = Variant of terminal deoxynucleotidyl transferase
MHHHHHHGGSGHPPSNTPEGEVPSVIARKVSQYSCQRKTTLNNYNKKFTDALEIMAENYKFKENLIACLEAKRAASILKYLPFPVTSMKDIQGLPCITDQVRDVIEEIIEEGESSRVKEVLNDERYKAFKQFTSVFGVGVKTAEKWFRMGLRTVEEAKASKALKLSKMQKAGFLYYEDLASRVSKEEADAVTLIVKNTVRTFLPDALVTITGGFRRGKPMGHDIDFLITNPGPKEDDELLHKVVDLLKKQGLLLYEDIKESTFVEGQLPSRKIDAMDNFQKCFAILKLYQPGVDNSSYNTSKKSDMAEVKDWKAIRVDLVITPFEQYAYALLGWTGSKEFRRDLRRYAEEERGMILDNHALYDRKKRIFLKAGSEEEIFAHLGLDYVEPWERNA

SEQ ID NO: 1757 - DNA, 1182 bp, synthetic construct
  misc_feature 1..1182: note = Variant of terminal deoxynucleotidyl transferase
  source 1..1182: mol_type = other DNA
atgcaccatcatcatcatcatggcggtagcggccatccgccgagcaataccccggagggggaggtgccgagcgttatcgcccgcaaggttagtcagtacagctgccagcgcaagaccacgctgaataactacaacaaaaagtttaccgacgcgctggagatcatggccgagaactacaaatttaaagagaacctgatcgcgtgtctggaagccaagcgcgccgcgagtattctgaaatatctgccgttcccggttaccagcatgaaagacatccaaggtctgccgtgcattaccgaccaagttcgtgacgtgatcgaggagatcatcgaagagggcgagagcagccgtgttaaagaagttctcaatgacgagcgctacaaggcctttaagcagttcaccagcgtgttcggtgtgggcgtgaaaaccgcggaaaagtggtttcgtatgggcctccgtacggttgaagaggcaaaggccagtaagagtctgaagctgagcaagatgcagaaggcgggcttcctgtattacgaggatctggcgagccgcgttagtcgtgaagaagccgatgccgttacgctcatcgtgaagaacacggtgcgtacctttctgccggatgcgctggtgaccatcaccggcggtttccgccgtggcaaacctatgggccacgacatcgactttctgatcacgaatccgggcccgaaagaggatgacgagctgctccacaaagtggttgatctgctcaagaagcaaggtctgctgctgtacgaagacatcaaagagagcacgttcgtggaggggcaactgccaagtcgcaaaatcgacgccatggacaacttccagaagtgcttcgccattctcaagctgtaccagccgggcgtggataacagcagctataacacgagtaagaagagtgacatggccgaggttaaggattggaaagcgattcgtgtggatctggtgatcacgccattcgagcagtacgcctatgcgctgctcggttggacgggcagcaaagaatttcgtcgcgatctgcgccgctatgcggaggaagagcgcggcatgatcctcgacaaccatgccctctacgaccgcaaaaagcgcatctttctgaaagcgggcagcgaagaagagattttcgcgcatctgggtctggattatgtggagccgtgggaacgcaacgcg

SEQ ID NO: 1758 - protein, 394 aa, synthetic construct
  REGION 1..394: note = Variant of terminal deoxynucleotidyl transferase
MHHHHHHGGSGHPPSNTPEGEVPSVIARKVSQYSCQRKTTLNNYNKKFTDALEIMAENYKFKENLIACLEAKRAASILKYLPFPVTSMKDIQGLPCITDQVRDVIEEIIEEGESSRVKEVLNDERYKAFKQFTSVFGVGVKTAEKWFRMGLRTVEEAKASKSLKLSKMQKAGFLYYEDLASRVSREEADAVTLIVKNTVRTFLPDALVTITGGFRRGKPMGHDIDFLITNPGPKEDDELLHKVVDLLKKQGLLLYEDIKESTFVEGQLPSRKIDAMDNFQKCFAILKLYQPGVDNSSYNTSKKSDMAEVKDWKAIRVDLVITPFEQYAYALLGWTGSKEFRRDLRRYAEEERGMILDNHALYDRKKRIFLKAGSEEEIFAHLGLDYVEPWERNA

SEQ ID NO: 1759 - DNA, 1182 bp, synthetic construct
  misc_feature 1..1182: note = Variant of terminal deoxynucleotidyl transferase
  source 1..1182: mol_type = other DNA
atgcaccatcatcatcatcatggcggtagcggccatccgccgagcaataccccggagggggaggtgccgagcgttatcgcccgcccggttagtcagtacagctgccagcgcaagaccacgctgaataactacaacaaaaagtttaccgacgcgctggagatcatggccgagaactacaaatttaaagagaacctgatcgcgtgtctggaagccaagcgcgccgcgagtattctgaaatatctgccgttcccggttaccagcatgaaagacatccaaggtctgccgtgcattggcgaccaagttcgtgacgtgatcgaggagatcatcgaagagggcgagagcagccgtgttaaagaagttctcaatgacgagcgctacaaggcctttaagcagttcaccagcgtgttcggtgtgggcgtgaaaacctcggaaaagtggtttcgtatgggcctccgtacggttgaagaggcaaaggccagtaagagtctgaagctgagcaagatgcagcgtgcgggcttcctgtattacgaggatctggcgagccgcgttagtcgtgaagaagccgatgccgttacgagcatcgtgaagaatacggtgcgtacctttctgccggatgcgctggtgaccatcaccggcggtttccgccgtggcaaacctatgggccacgacatcgactttctgatcacgaatccgggcccgaaagaggatgacgagctgctccacaaagtggttgatctgctcaagaagcaaggtctgctgctgtacgaagacatcaaagagagcacgttcgtggaggggcaactgccaagtcgcaaaatcgacgccatggacaacttccagaagtgcttcgccattctcaagctgtaccagccgggcgtggataacagttcgtatgggacgagtaagaagagtgacatggccgaggttaaggattggaaagcgattcgtgtggatctggtgatcacgccattcgagcagtacgcctatgcgctgctcggttggacgggcagcaaagaatttcgtcgcgatctgcgccgctatgcggaggaagagcgcggcatgatcctcgacaaccatgccctctacgaccgcaaaaagcgcatctttctgaaagcgggcagcgaagaagagattttcgcgcatctgggtctggattatgtggagccgtgggaacgcaacgcg

SEQ ID NO: 1760 - protein, 394 aa, synthetic construct
  REGION 1..394: note = Variant of terminal deoxynucleotidyl transferase
MHHHHHHGGSGHPPSNTPEGEVPSVIARPVSQYSCQRKTTLNNYNKKFTDALEIMAENYKFKENLIACLEAKRAASILKYLPFPVTSMKDIQGLPCIGDQVRDVIEEIIEEGESSRVKEVLNDERYKAFKQFTSVFGVGVKTSEKWFRMGLRTVEEAKASKSLKLSKMQRAGFLYYEDLASRVSREEADAVTSIVKNTVRTFLPDALVTITGGFRRGKPMGHDIDFLITNPGPKEDDELLHKVVDLLKKQGLLLYEDIKESTFVEGQLPSRKIDAMDNFQKCFAILKLYQPGVDNSSYGTSKKSDMAEVKDWKAIRVDLVITPFEQYAYALLGWTGSKEFRRDLRRYAEEERGMILDNHALYDRKKRIFLKAGSEEEIFAHLGLDYVEPWERNA

SEQ ID NO: 1761 - DNA, 1182 bp, synthetic construct
  misc_feature 1..1182: note = Variant of terminal deoxynucleotidyl transferase
  source 1..1182: mol_type = other DNA
atgcaccatcatcatcatcatggcggtagcggccatccgccgagcaataccccggagggggaggtgccgagcgttatcgcccgcaaggttagtcagtacagctgccagcgcaagaccacgctgaataactacaacaaaaagtttaccgacgcgctggagatcatggccgagaactacaaatttaaagagaacctgatcgcgtgtctggaagccaagcgcgccgcgagtattctgaaatatctgccgttcccggttaccagcatgaaagacatccaaggtctgccgtgcattggcgaccaagttcgtgacgtgatcgaggagatcatcgaagagggcgagagcagccgtgttaaagaagttctcaatgacgagcgctacaaggcctttaagcagttcaccagcgtgttcggtgtgggcgtgaaaaccgcggaaaagtggtttcgtatgggcctccgtacggttgaagaggcacgtgccagtaagtcgctgaagctgagcaagatgcagaaggcgggcttcctgtattacgaggatctggcgagccgcgttagtaaagaagaagccgatgccgttacgctgatcgtgaaggaaacggtgcgtacctttctgccggatgcgctggtgaccatcaccggcggtttccgccgtggcaaacctatgggccacgacatcgactttctgatcacgaatccgggcccgaaagaggatgacgagctgctccacaaagtggttgatctgctcaagaagcaaggtctgctgctgtacgaagacatcaaagagagcacgttcgtggaggggcaactgccaagtcgcaaaatcgacgccatggacaacttccagaagtgcttcgccattctcaagctgtaccagccgggcgtggataacagcagctataacacgagtaagaagagtgacatggccgaggttaaggattggaaagcgattcgtgtggatctggtgatcacgccattcgagcagtacgcctatgcgctgctcggttggacgggcagcaaagaatttcgtcgcgatctgcgccgctatgcggaggaagagcgcggcatgatcctcgacaaccatgccctctacgaccgcaaaaagcgcatctttctgaaagcgggcagcgaagaagagattttcgcgcatctgggtctggattatgtggagccgtgggaacgcaacgcg

SEQ ID NO: 1762 - protein, 394 aa, synthetic construct
  REGION 1..394: note = Variant of terminal deoxynucleotidyl transferase
MHHHHHHGGSGHPPSNTPEGEVPSVIARKVSQYSCQRKTTLNNYNKKFTDALEIMAENYKFKENLIACLEAKRAASILKYLPFPVTSMKDIQGLPCIGDQVRDVIEEIIEEGESSRVKEVLNDERYKAFKQFTSVFGVGVKTAEKWFRMGLRTVEEARASKSLKLSKMQKAGFLYYEDLASRVSKEEADAVTLIVKETVRTFLPDALVTITGGFRRGKPMGHDIDFLITNPGPKEDDELLHKVVDLLKKQGLLLYEDIKESTFVEGQLPSRKIDAMDNFQKCFAILKLYQPGVDNSSYNTSKKSDMAEVKDWKAIRVDLVITPFEQYAYALLGWTGSKEFRRDLRRYAEEERGMILDNHALYDRKKRIFLKAGSEEEIFAHLGLDYVEPWERNA

SEQ ID NO: 1763 - DNA, 1182 bp, synthetic construct
  misc_feature 1..1182: note = Variant of terminal deoxynucleotidyl transferase
  source 1..1182: mol_type = other DNA
atgcaccatcatcatcatcatggcggtagcggccatccgccgagcaataccccggagggggaggtgccgagcgttatcgcccgcccggttagtcagtacagctgccagcgcaagaccacgctgaataactacaacaaaaagtttaccgacgcgctggagatcatggccgagaactacaaatttaaagagaacctgatcgcgtgtctggaagccaagcgcgccgcgagtattctgaaatatctgccgttcccggttaccagcatgaaagacatccaaggtctgccgtgcattggtgaccaagttcgtgacgtgatcgaggagatcatcgaagagggcgagagcagccgtgttaaagaagttctcaatgacgagcgctacaaggcctttaagcagttcaccagcgtgttcggtgtgggcgtgaaaacctcggaaaagtggtttcgtatgggcctccgtacggttgaagaggcacgtgccagtaagtcgctgaagctgagcaagatgcagaaggcgggcttcctgtattacgaggatctggcgagccgcgttagtaaagaagaagccgatgccgttacgctcatcgtgaagaacacggtgcgtacctttctgccggatgcgctggtgaccatcaccggcggtttccgccgtggcaaacctatgggccacgacatcgactttctgatcacgaatccgggcccgaaagaggatgacgagctgctccacaaagtggttgatctgctcaagaagcaaggtctgctgctgtacgaagacatcaaagagagcacgttcgtggaggggcaactgccaagtcgcaaaatcgacgccatggacaacttccagaagtgcttcgccattctcaagctgtaccagccgggcgtggataacagcagctataacacgagtaagaagagtgacatggccgaggttaaggattggaaagcgattcgtgtggatctggtgatcacgccattcgagcagtacgcctatgcgctgctcggttggacgggcagcaaagaatttcgtcgcgatctgcgccgctatgcggaggaagagcgcggcatgatcctcgacaaccatgccctctacgaccgcaaaaagcgcatctttctgaaagcgggcagcgaagaagagattttcgcgcatctgggtctggattatgtggagccgtgggaacgcaacgcg

SEQ ID NO: 1764 - protein, 394 aa, synthetic construct
  REGION 1..394: note = Variant of terminal deoxynucleotidyl transferase
MHHHHHHGGSGHPPSNTPEGEVPSVIARPVSQYSCQRKTTLNNYNKKFTDALEIMAENYKFKENLIACLEAKRAASILKYLPFPVTSMKDIQGLPCIGDQVRDVIEEIIEEGESSRVKEVLNDERYKAFKQFTSVFGVGVKTSEKWFRMGLRTVEEARASKSLKLSKMQKAGFLYYEDLASRVSKEEADAVTLIVKNTVRTFLPDALVTITGGFRRGKPMGHDIDFLITNPGPKEDDELLHKVVDLLKKQGLLLYEDIKESTFVEGQLPSRKIDAMDNFQKCFAILKLYQPGVDNSSYNTSKKSDMAEVKDWKAIRVDLVITPFEQYAYALLGWTGSKEFRRDLRRYAEEERGMILDNHALYDRKKRIFLKAGSEEEIFAHLGLDYVEPWERNA

SEQ ID NO: 1765 - DNA, 1182 bp, synthetic construct
  misc_feature 1..1182: note = Variant of terminal deoxynucleotidyl transferase
  source 1..1182: mol_type = other DNA
atgcaccatcatcatcatcatggcggtagcggccatccgccgagcaataccccggagggggaggtgccgagcgttatcgcccgcccggttagtcagtacagctgccagcgcaagaccacgctgaataactacaacaaaaagtttaccgacgcgctggagatcatggccgagaactacaaatttaaagagaacctgatcgcgtgtctggaagccaagcgcgccgcgagtattctgaaatatctgccgttcccggttaccagcatgaaagacatccaaggtctgccgtgcattggtgaccaagttcgtgacgtgatcgaggagatcatcgaagagggcgagagcagccgtgttaaagaagttctcaatgacgagcgctacaaggcctttaagcagttcaccagcgtgttcggtgtgggcgtgaaaaccgcggaaaagtggtttcgtatgggcctccgtacggttgaagaggcaaaggccagtaagagtctgaagctgagcaagatgcagcgtgcgggcttcctgtattacgaggatctggcgagccgcgttagtaaagaagaagccgatgccgttacgagcatcgtgaaggaaacggtgcgtacctttctgccggatgcgctggtgaccatcaccggcggtttccgccgtggcaaacctatgggccacgacatcgactttctgatcacgaatccgggcccgaaagaggatgacgagctgctccacaaagtggttgatctgctcaagaagcaaggtctgctgctgtacgaagacatcaaagagagcacgttcgtggaggggcaactgccaagtcgcaaaatcgacgccatggacaacttccagaagtgcttcgccattctcaagctgtaccagccgggcgtggataacagcagctataacacgagtaagaagagtgacatggccgaggttaaggattggaaagcgattcgtgtggatctggtgatcacgccattcgagcagtacgcctatgcgctgctcggttggacgggcagcaaagaatttcgtcgcgatctgcgccgctatgcggaggaagagcgcggcatgatcctcgacaaccatgccctctacgaccgcaaaaagcgcatctttctgaaagcgggcagcgaagaagagattttcgcgcatctgggtctggattatgtggagccgtgggaacgcaacgcg

SEQ ID NO: 1766 - protein, 394 aa, synthetic construct
  REGION 1..394: note = Variant of terminal deoxynucleotidyl transferase
MHHHHHHGGSGHPPSNTPEGEVPSVIARPVSQYSCQRKTTLNNYNKKFTDALEIMAENYKFKENLIACLEAKRAASILKYLPFPVTSMKDIQGLPCIGDQVRDVIEEIIEEGESSRVKEVLNDERYKAFKQFTSVFGVGVKTAEKWFRMGLRTVEEAKASKSLKLSKMQRAGFLYYEDLASRVSKEEADAVTSIVKETVRTFLPDALVTITGGFRRGKPMGHDIDFLITNPGPKEDDELLHKVVDLLKKQGLLLYEDIKESTFVEGQLPSRKIDAMDNFQKCFAILKLYQPGVDNSSYNTSKKSDMAEVKDWKAIRVDLVITPFEQYAYALLGWTGSKEFRRDLRRYAEEERGMILDNHALYDRKKRIFLKAGSEEEIFAHLGLDYVEPWERNA

SEQ ID NO: 1767 - DNA, 1182 bp, synthetic construct
  misc_feature 1..1182: note = Variant of terminal deoxynucleotidyl transferase
  source 1..1182: mol_type = other DNA
atgcaccatcatcatcatcatggcggtagcggccatccgccgagcaataccccggagggggaggtgccgagcgttatcgcccgcaaggttagtcagtacagctgccagcgcaagaccacgctgaataactacaacaaaaagtttaccgacgcgctggagatcatggccgagaactacaaatttaaagagaacctgatcgcgtgtctggaagccaagcgcgccgcgagtattctgaaatatctgccgttcccggttaccagcatgaaagacatccaaggtctgccgtgcattggcgaccaagttcgtgacgtgatcgaggagatcatcgaagagggcgagagcagccgtgttaaagaagttctcaatgacgagcgctacaaggcctttaagcagttcaccagcgtgttcggtgtgggcgtgaaaaccagcgaaaagtggtttcgtatgggcctccgtacggttgaagaggcaaaggccagtaagagtctgaagctgagcaagatgcagaaggcgggcttcctgtattacgaggatctggcgagcggtgttagtaaagaagaagccgatgccgttacgctcatcgtgaagaacacggtgcgtacctttctgccggatgcgctggtgaccatcaccggcggtttccgccgtggcaaacctatgggccacgacatcgactttctgatcacgaatccgggcccgaaagaggatgacgagctgctccacaaagtggttgatctgctcaagaagcaaggtctgctgctgtacgaagacatcaaagagagcacgttcgtggaggaacaactgccaagtcgcaaaatcgacgccatggacaacttccagaagtgcttcgccattctcaagctgtaccagccgggcgtggataacagcagctataacacgagtaagaagagtgacatggccgaggttaaggattggaaagcgattcgtgtggatctggtgatcacgccattcgagcagtacgcctatgcgctgctcggttggacgggcagcaaagaatttcgtcgcgatctgcgccgctatgcggaggaagagcgcggcatgatcctcgacaaccatgccctctacgaccgcaaaaagcgcatctttctgaaagcgggcagcgaagaagagattttcgcgcatctgggtctggattatgtggagccgtgggaacgcaacgcg

SEQ ID NO: 1768 - protein, 394 aa, synthetic construct
  REGION 1..394: note = Variant of terminal deoxynucleotidyl transferase
MHHHHHHGGSGHPPSNTPEGEVPSVIARKVSQYSCQRKTTLNNYNKKFTDALEIMAENYKFKENLIACLEAKRAASILKYLPFPVTSMKDIQGLPCIGDQVRDVIEEIIEEGESSRVKEVLNDERYKAFKQFTSVFGVGVKTSEKWFRMGLRTVEEAKASKSLKLSKMQKAGFLYYEDLASGVSKEEADAVTLIVKNTVRTFLPDALVTITGGFRRGKPMGHDIDFLITNPGPKEDDELLHKVVDLLKKQGLLLYEDIKESTFVEEQLPSRKIDAMDNFQKCFAILKLYQPGVDNSSYNTSKKSDMAEVKDWKAIRVDLVITPFEQYAYALLGWTGSKEFRRDLRRYAEEERGMILDNHALYDRKKRIFLKAGSEEEIFAHLGLDYVEPWERNA

SEQ ID NO: 1769 - DNA, 1182 bp, synthetic construct
  misc_feature 1..1182: note = Variant of terminal deoxynucleotidyl transferase
  source 1..1182: mol_type = other DNA
atgcaccatcatcatcatcatggcggtagcggccatccgccgagcaataccccggagggggaggtgccgagcgttatcgcccgcaaggttagtcagtacagctgccagcgcaagaccacgctgaataactacaacaaaaagtttaccgacgcgctggagatcatggccgagaactacaaatttaaagagaacctgatcgcgtgtctggaagccaagcgcgccgcgagtattctgaaatatctgccgttcccggttaccagcatgaaagacatccaaggtctgccgtgcattgctgaccaagttcgtgacgtgatcgaggagatcatcgaagagggcgagagcagccgtgttaaagaagttctcaatgacgagcgctacaaggcctttaagcagttcaccagcgtgttcggtgtgggcgtgaaaacctcggaaaagtggtttcgtatgggcctccgtacggttgaagaggcaaaggccagtaagagtctgaagctgagcaagatgcagaaggcgggcttcctgtattacgaggatctggcgagccgcgttagtcgtgaagaagccgatgccgttacgagcatcgtgaaggaaacggtgcgtacctttctgccggatgcgctggtgaccatcaccggcggtttccgccgtggcaaacctatgggccacgacatcgactttctgatcacgaatccgggcccgaaagaggatgacgagctgctccacaaagtggttgatctgctcaagaagcaaggtctgctgctgtacgaagacatcaaagagagcacgttcgtggaggggcaactgccaagtcgcaaaatcgacgccatggacaacttccagaagtgcttcgccattctcaagctgtaccagccgggcgtggataacagtgcgtataatacgagtaagaagagtgacatggccgaggttaaggattggaaagcgattcgtgtggatctggtgatcacgccattcgagcagtacgcctatgcgctgctcggttggacgggcagcaaagaatttcgtcgcgatctgcgccgctatgcggaggaagagcgcggcatgatcctcgacaaccatgccctctacgaccgcaaaaagcgcatctttctgaaagcgggcagcgaagaagagattttcgcgcatctgggtctggattatgtggagccgtgggaacgcaacgcg

SEQ ID NO: 1770 - protein, 394 aa, synthetic construct
  REGION 1..394: note = Variant of terminal deoxynucleotidyl transferase
MHHHHHHGGSGHPPSNTPEGEVPSVIARKVSQYSCQRKTTLNNYNKKFTDALEIMAENYKFKENLIACLEAKRAASILKYLPFPVTSMKDIQGLPCIADQVRDVIEEIIEEGESSRVKEVLNDERYKAFKQFTSVFGVGVKTSEKWFRMGLRTVEEAKASKSLKLSKMQKAGFLYYEDLASRVSREEADAVTSIVKETVRTFLPDALVTITGGFRRGKPMGHDIDFLITNPGPKEDDELLHKVVDLLKKQGLLLYEDIKESTFVEGQLPSRKIDAMDNFQKCFAILKLYQPGVDNSAYNTSKKSDMAEVKDWKAIRVDLVITPFEQYAYALLGWTGSKEFRRDLRRYAEEERGMILDNHALYDRKKRIFLKAGSEEEIFAHLGLDYVEPWERNA

SEQ ID NO: 1771 - DNA, 1182 bp, synthetic construct
  misc_feature 1..1182: note = Variant of terminal deoxynucleotidyl transferase
  source 1..1182: mol_type = other DNA
atgcaccatcatcatcatcatggcggtagcggccatccgccgagcaataccccggagggggaggtgccgagcgttatcgcccgcccggttagtcagtacagctgccagcgcaagaccacgctgaataactacaacaaaaagtttaccgacgcgctggagatcatggccgagaactacaaatttaaagagaacctgatcgcgtgtctggaagccaagcgcgccgcgagtattctgaaatatctgccgttcccggttaccagcatgaaagacatccaaggtctgccgtgcattgctgaccaagttcgtgacgtgatcgaggagatcatcgaagagggcgagagcagccgtgttaaagaagttctcaatgacgagcgctacaaggcctttaagcagttcaccagcgtgttcggtgtgggcgtgaaaaccagcgaaaagtggtttcgtatgggcctccgtacggttgaagaggcaaaggccagtaagtcgctgaagctgagcaagatgcagaaggcgggcttcctgtattacgaggatctggcgagccgcgttagtcgtgaagaagccgatgccgttacgctcatcgtgaaggaaacggtgcgtacctttctgccggatgcgctggtgaccatcaccggcggtttccgccgtggcaaacctatgggccacgacatcgactttctgatcacgaatccgggcccgaaagaggatgacgagctgctccacaaagtggttgatctgctcaagaagcaaggtctgctgctgtacgaagacatcaaagagagcacgttcgtggaggggcaactgccaagtcgcaaaatcgacgccatggacaacttccagaagtgcttcgccattctcaagctgtaccagccgggcgtggataacagcagctataacacgagtaagaagagtgacatggccgaggttaaggattggaaagcgattcgtgtggatctggtgatcacgccattcgagcagtacgcctatgcgctgctcggttggacgggcagcaaagaatttcgtcgcgatctgcgccgctatgcggaggaagagcgcggcatgatcctcgacaaccatgccctctacgaccgcaaaaagcgcatctttctgaaagcgggcagcgaagaagagattttcgcgcatctgggtctggattatgtggagccgtgggaacgcaacgcg

SEQ ID NO: 1772 - protein, 394 aa, synthetic construct
  REGION 1..394: note = Variant of terminal deoxynucleotidyl transferase
MHHHHHHGGSGHPPSNTPEGEVPSVIARPVSQYSCQRKTTLNNYNKKFTDALEIMAENYKFKENLIACLEAKRAASILKYLPFPVTSMKDIQGLPCIADQVRDVIEEIIEEGESSRVKEVLNDERYKAFKQFTSVFGVGVKTSEKWFRMGLRTVEEAKASKSLKLSKMQKAGFLYYEDLASRVSREEADAVTLIVKETVRTFLPDALVTITGGFRRGKPMGHDIDFLITNPGPKEDDELLHKVVDLLKKQGLLLYEDIKESTFVEGQLPSRKIDAMDNFQKCFAILKLYQPGVDNSSYNTSKKSDMAEVKDWKAIRVDLVITPFEQYAYALLGWTGSKEFRRDLRRYAEEERGMILDNHALYDRKKRIFLKAGSEEEIFAHLGLDYVEPWERNA

SEQ ID NO: 1773 - DNA, 1182 bp, synthetic construct
  misc_feature 1..1182: note = Variant of terminal deoxynucleotidyl transferase
  source 1..1182: mol_type = other DNA
atgcaccatcatcatcatcatggcggtagcggccatccgccgagcaataccccggagggggaggtgccgagcgttatcgcccgcaaggttagtcagtacagctgccagcgcaagaccacgctgaataactacaacaaaaagtttaccgacgcgctggagatcatggccgagaactacaaatttaaagagaacctgatcgcgtgtctggaagccaagcgcgccgcgagtattctgaaatatctgccgttcccggttaccagcatgaaagacatccaaggtctgccgtgcattggcgaccaagttcgtgacgtgatcgaggagatcatcgaagagggcgagagcagccgtgttaaagaagttctcaatgacgagcgctacaaggcctttaagcagttcaccagcgtgttcggtgtgggcgtgaaaaccgcggaaaagtggtttcgtatgggcctccgtacggttgaagaggcaaaggccagtaagagtctgaagctgagcaagatgcagaaggcgggcttcctgtattacgaggatctggcgagccgcgttagtaaggaagaagccgatgccgttacgctcatcgtgaagaacacggtgcgtacctttctgccggatgcgctggtgaccatcaccggcggtttccgccgtggcaaacctatgggccacgacatcgactttctgatcacgaatccgggcccgaaagaggatgacgagctgctccacaaagtggttgatctgctcaagaagcaaggtctgctgctgtacgaagacatcaaagagagcacgttcgtggaggagcaactgccaagtcgcaaaatcgacgccatggacaacttccagaagtgcttcgccattctcaagctgtaccagccgggcgtggataacagcagctataacacgagtaagaagagtgacatggccgaggttaaggattggaaagcgattcgtgtggatctggtgatcacgccattcgagcagtacgcctatgcgctgctcggttggacgggcagcaaagaatttcgtcgcgatctgcgccgctatgcggaggaagagcgcggcatgatcctcgacaaccatgccctctacgaccgcaaaaagcgcatctttctgaaagcgggcagcgaagaagagattttcgcgcatctgggtctggattatgtggagccgtgggaacgcaacgcg

SEQ ID NO: 1774 - protein, 394 aa, synthetic construct
  REGION 1..394: note = Variant of terminal deoxynucleotidyl transferase
MHHHHHHGGSGHPPSNTPEGEVPSVIARKVSQYSCQRKTTLNNYNKKFTDALEIMAENYKFKENLIACLEAKRAASILKYLPFPVTSMKDIQGLPCIGDQVRDVIEEIIEEGESSRVKEVLNDERYKAFKQFTSVFGVGVKTAEKWFRMGLRTVEEAKASKSLKLSKMQKAGFLYYEDLASRVSKEEADAVTLIVKNTVRTFLPDALVTITGGFRRGKPMGHDIDFLITNPGPKEDDELLHKVVDLLKKQGLLLYEDIKESTFVEEQLPSRKIDAMDNFQKCFAILKLYQPGVDNSSYNTSKKSDMAEVKDWKAIRVDLVITPFEQYAYALLGWTGSKEFRRDLRRYAEEERGMILDNHALYDRKKRIFLKAGSEEEIFAHLGLDYVEPWERNA

SEQ ID NO: 1775 - DNA, 1182 bp, synthetic construct
  misc_feature 1..1182: note = Variant of terminal deoxynucleotidyl transferase
  source 1..1182: mol_type = other DNA
atgcaccatcatcatcatcatggcggtagcggccatccgccgagcaataccccggagggggaggtgccgagcgttatcgcccgcccggttagtcagtacagctgccagcgcaagaccacgctgaataactacaacaaaaagtttaccgacgcgctggagatcatggccgagaactacaaatttaaagagaacctgatcgcgtgtctggaagccaagcgcgccgcgagtattctgaaatatctgccgttcccggttaccagcatgaaagacatccaaggtctgccgtgcattggcgaccaagttcgtgacgtgatcgaggagatcatcgaagagggcgagagcagccgtgttaaagaagttctcaatgacgagcgctacaaggcctttaagcagttcaccagcgtgttcggtgtgggcgtgaaaaccagcgaaaagtggtttcgtatgggcctccgtacggttgaagaggcaaaggccagtaagagtctgaagctgagcaagatgcagaaggcgggcttcctgtattacgaggatctggcgagccgcgttagtaaggaagaagccgatgccgttacgctcatcgtgaagaacacggtgcgtacctttctgccggatgcgctggtgaccatcaccggcggtttccgccgtggcaaacctatgggccacgacatcgactttctgatcacgaatccgggcccgaaagaggatgacgagctgctccacaaagtggttgatctgctcaagaagcaaggtctgctgctgtacgaagacatcaaagagagcacgttcgtggaggagcaactgccaagtcgcaaaatcgacgccatggacaacttccagaagtgcttcgccattctcaagctgtaccagccgggcgtggataacagcagctataacacgagtaagaagagtgacatggccgaggttaaggattggaaagcgattcgtgtggatctggtgatcacgccattcgagcagtacgcctatgcgctgctcggttggacgggcagcaaagaatttcgtcgcgatctgcgccgctatgcggaggaagagcgcggcatgatcctcgacaaccatgccctctacgaccgcaaaaagcgcatctttctgaaagcgggcagcgaagaagagattttcgcgcatctgggtctggattatgtggagccgtgggaacgcaacgcg

SEQ ID NO: 1776 - protein, 394 aa, synthetic construct
  REGION 1..394: note = Variant of terminal deoxynucleotidyl transferase
MHHHHHHGGSGHPPSNTPEGEVPSVIARPVSQYSCQRKTTLNNYNKKFTDALEIMAENYKFKENLIACLEAKRAASILKYLPFPVTSMKDIQGLPCIGDQVRDVIEEIIEEGESSRVKEVLNDERYKAFKQFTSVFGVGVKTSEKWFRMGLRTVEEAKASKSLKLSKMQKAGFLYYEDLASRVSKEEADAVTLIVKNTVRTFLPDALVTITGGFRRGKPMGHDIDFLITNPGPKEDDELLHKVVDLLKKQGLLLYEDIKESTFVEEQLPSRKIDAMDNFQKCFAILKLYQPGVDNSSYNTSKKSDMAEVKDWKAIRVDLVITPFEQYAYALLGWTGSKEFRRDLRRYAEEERGMILDNHALYDRKKRIFLKAGSEEEIFAHLGLDYVEPWERNA

SEQ ID NO: 1777 - DNA, 1182 bp, synthetic construct
  misc_feature 1..1182: note = Variant of terminal deoxynucleotidyl transferase
  source 1..1182: mol_type = other DNA
atgcaccatcatcatcatcatggcggtagcggccatccgccgagcaataccccggagggggaggtgccgagcgttatcgccgggaaggttagtcagtacagctgccagcgcaagaccacgctgaataactacaacaaaaagtttaccgacgcgctggagatcatggccgagaactacaaatttaaagagaacctgatcgcgtgtctggaagccaagcgcgccgcgagtattctgaaatatctgccgttcccggttaccagcatgaaagacatcgagggtctgccgtgcattggcgaccaagttcgtgacgtgatcgaggagatcatcgaagagggcgagagcagccgtgttaaagaagttctcaatgacgagcgctacaaggcctttaagcagttcaccagcgtgttcggtgtgggcgtgaaaaccagcgaaaagtggtaccgtatgggcctccgtacggttgaagaggcaaaggccagtaagagtctgaagctgagcaagatgcagaaggcgggcttcctgtattacgaggatctggcgagccgcgttagtaaagaagaagccgatgccgttacgctcatcgtgaagaacacggtgcgtacctttctgattgatgcgctggtgaccatcaccggcggtttccgccgtggcaaacctatgggccacgacatcgactttctgatcacgaatccgggcccgaaagaggatgacgagctgctccacaaagtggttgatctgctcaagaagcaaggtctgctgctgtacgaagacatcaaagagagcacgttcgtggaggaacaactgccaagtcgcaaaatcgacgccatggacaacttccagaagtgcttcgccattctcaagctgtaccgcccgggcgtggataacagcagctataacacgagtaagggcagtgacatggccgaggttaaggattggaaagcgattcgtgtggatctggtgatcacgccattcgagcagtacgcctatgcgctgctcggttggacgggcagcaaagaatttcgtcgcgatctgcgccgctatgcggaggaagagcgcggcatgatcctcgacaaccatgccctctacgaccgcaaaaagcgcatctttctgaaagcgggcagcgaagaagagattttcgcgcatctgggtctggattatgtggagccgtgggaacgcaacgcg

SEQ ID NO: 1778 - protein, 394 aa, synthetic construct
  REGION 1..394: note = Variant of terminal deoxynucleotidyl transferase
MHHHHHHGGSGHPPSNTPEGEVPSVIAGKVSQYSCQRKTTLNNYNKKFTDALEIMAENYKFKENLIACLEAKRAASILKYLPFPVTSMKDIEGLPCIGDQVRDVIEEIIEEGESSRVKEVLNDERYKAFKQFTSVFGVGVKTSEKWYRMGLRTVEEAKASKSLKLSKMQKAGFLYYEDLASRVSKEEADAVTLIVKNTVRTFLIDALVTITGGFRRGKPMGHDIDFLITNPGPKEDDELLHKVVDLLKKQGLLLYEDIKESTFVEEQLPSRKIDAMDNFQKCFAILKLYRPGVDNSSYNTSKGSDMAEVKDWKAIRVDLVITPFEQYAYALLGWTGSKEFRRDLRRYAEEERGMILDNHALYDRKKRIFLKAGSEEEIFAHLGLDYVEPWERNA

SEQ ID NO: 1779 - DNA, 1182 bp, synthetic construct
  misc_feature 1..1182: note = Variant of terminal deoxynucleotidyl transferase
  source 1..1182: mol_type = other DNA
atgcaccatcatcatcatcatggcggtagcggccatccgccgagcaataccccggagggggaggtgccgagcgttatcgcccgcccggttagtcagtacagctgccagcgcaagaccacgctgaataactacaacaaaaagtttaccgacgcgctggagatcatggccgagaactacaaatttaaagagaacctgatcgcgtgtctggaagccaagcgcgccgcgagtattctgaaatatctgccgttcccggttaccagcatgaaagacatccaaggtctgccgtgcattggcgaccaagttcgtgacgtgatcgaggagatcatcgaagagggcgagagcagccgtgttaaagaagttctcaatgacgagcgctacaaggcctttaagcagttcaccagcgtgttcggtgtgggcgtgaaaaccgcggaaaagtggtttcgtatgggcctccgtacggttgaagaggcaaaggccagtaagagtctgaagctgagcaagatgcagaaggcgggcttcctgtattacgaggatctggcgagccgcgttagtaaagaagaagccgatgccgttacgctcatcgtgaagaacacggtgcgtacctttctgccggatgcgctggtgaccatcaccggcggtttccgccgtggcaaacctatgggccacgacatcgactttctgatcacgaatccgggcccgaaagaggatgacgagctgctccacaaagtggttgatctgctcaagaagcaaggtctgctgctgtacgaagacatcaaagagagcacgttcgtggaggaacaactgccaagtcgcaaaatcgacgccatggacaacttccagaagtgcttcgccattctcaagctgtaccagccgggcgtggataacagcagctataacacgagtaagaagagtgacatggccgaggttaaggattggaaagcgattcgtgtggatctggtgatcacgccattcgagcagtacgcctatgcgctgctcggttggacgggcagcaaagaatttcgtcgcgatctgcgccgctatgcggaggaagagcgcggcatgatcctcgacaaccatgccctctacgaccgcaaaaagcgcatctttctgaaagcgggcagcgaagaagagattttcgcgcatctgggtctggattatgtggagccgtgggaacgcaacgcg

SEQ ID NO: 1780 - protein, 394 aa, synthetic construct
  REGION 1..394: note = Variant of terminal deoxynucleotidyl transferase
MHHHHHHGGSGHPPSNTPEGEVPSVIARPVSQYSCQRKTTLNNYNKKFTDALEIMAENYKFKENLIACLEAKRAASILKYLPFPVTSMKDIQGLPCIGDQVRDVIEEIIEEGESSRVKEVLNDERYKAFKQFTSVFGVGVKTAEKWFRMGLRTVEEAKASKSLKLSKMQKAGFLYYEDLASRVSKEEADAVTLIVKNTVRTFLPDALVTITGGFRRGKPMGHDIDFLITNPGPKEDDELLHKVVDLLKKQGLLLYEDIKESTFVEEQLPSRKIDAMDNFQKCFAILKLYQPGVDNSSYNTSKKSDMAEVKDWKAIRVDLVITPFEQYAYALLGWTGSKEFRRDLRRYAEEERGMILDNHALYDRKKRIFLKAGSEEEIFAHLGLDYVEPWERNA

SEQ ID NO: 1781 - DNA, 1182 bp, synthetic construct
  misc_feature 1..1182: note = Variant of terminal deoxynucleotidyl transferase
  source 1..1182: mol_type = other DNA
atgcaccatcatcatcatcatggcggtagcggccatccgccgagcaataccccggagggggaggtgccgagcgttatcgccgggaaggttagtcagtacagctgccagcgcaagaccacgctgaataactacaacaaaaagtttaccgacgcgctggagatcatggccgagaactacaaatttaaagagaacctgatcgcgtgtctggaagccaagcgcgccgcgagtattctgaaatatctgccgttcccggttaccagcatgaaagacatcgagggtctgccgtgcattggcgaccaagttcgtgacgtgatcgaggagatcatcgaagagggcgagagcagccgtgttaaagaagttctcaatgacgagcgctacaaggcctttaagcagttcaccagcgtgttcggtgtgggcgtgaaaaccagcgaaaagtggttccgtatgggcctccgtacggttgaagacgcaaaggccagtaagagtctgaagctgagcaagatgcagaaggcgggcttcctgtattacgaggatctggcgagccgcgttagtaaagaagaagccgatgccgttacgctcatcgtgaagaacacggtgcgtacctttctgctggatgcgctggtgaccatcaccggcggtttccgccgtggcaaacctatgggccacgacatcgactttctgatcacgaatccgggcccgaaagaggatgacgagctgctccacaaagtggttgatctgctcaagaagcaaggtctgctgctgtacgaagacatcaaagagagcacgttcgtggaggaacaactgccaagtcgcaaaatcgacgccatggacaacttccagaagtgcttcgccattctcaagctgtaccgcccgggcgtggataacagcagctataacacgagtaagaagagtgacatggccgaggttaaggattggaaagcgattcgtgtggatctggtgatcacgccattcgagcagtacgcctatgcgctgctcggttggacgggcagcaaagaatttcgtcgcgatctgcgccgctatgcggaggaagagcgcggcatgatcctcgacaaccatgccctctacgaccgcaaaaagcgcatctttctgaaagcgggcagcgaagaagagattttcgcgcatctgggtctggattatgtggagccgtgggaacgcaacgcg

SEQ ID NO: 1782 - protein, 394 aa, synthetic construct
  REGION 1..394: note = Variant of terminal deoxynucleotidyl transferase
MHHHHHHGGSGHPPSNTPEGEVPSVIAGKVSQYSCQRKTTLNNYNKKFTDALEIMAENYKFKENLIACLEAKRAASILKYLPFPVTSMKDIEGLPCIGDQVRDVIEEIIEEGESSRVKEVLNDERYKAFKQFTSVFGVGVKTSEKWFRMGLRTVEDAKASKSLKLSKMQKAGFLYYEDLASRVSKEEADAVTLIVKNTVRTFLLDALVTITGGFRRGKPMGHDIDFLITNPGPKEDDELLHKVVDLLKKQGLLLYEDIKESTFVEEQLPSRKIDAMDNFQKCFAILKLYRPGVDNSSYNTSKKSDMAEVKDWKAIRVDLVITPFEQYAYALLGWTGSKEFRRDLRRYAEEERGMILDNHALYDRKKRIFLKAGSEEEIFAHLGLDYVEPWERNA

SEQ ID NO: 1783 - DNA, 1182 bp, synthetic construct
  misc_feature 1..1182: note = Variant of terminal deoxynucleotidyl transferase
  source 1..1182: mol_type = other DNA
atgcaccatcatcatcatcatggcggtagcggccatccgccgagcaataccccggagggggaggtgccgagcgttatcgccgagaaggttagtcagtacagctgccagcgcaagaccacgctgaataactacaacaaaaagtttaccgacgcgctggagatcatggccgagaactacaaatttaaagagaacctgatcgcgtgtctggaagccaagcgcgccgcgagtattctgaaatatctgccgttcgaggttaccagcatgaaagacatccagggtctgccgtgcattggcgaccaagttcgtgacgtgatcgaggagatcatcgaagagggcgagagcagccgtgttaaagaagttctcaatgacgagcgctacaaggcctttaagcagttcaccagcgtgttcggtgtgggcgtgaaaaccagcgaaaagtggttccgtatgggcctccgtacggttgaagacgcaaaggccagtaagagtctgaagctgagcaagatgcagaaggcgggcctgctgtattacgaggatctggcgagccgcgttagtaaagaagaagccgatgccgttacgctcatcgtgaagaacacggtgcgtacctttctgatggatgcgctggtgaccatcaccggcggtttccgccgtggcaaacctatgggccacgacatcgactttctgatcacgaatccgggcccgaaagaggatgacgagctgctccacaaagtggttgatctgctcaagaagcaaggtctgctgctgtacgaagacatcaaagagagcacgttcgtggaggaacaactgccaagtcgcaaaatcgacgccatggacaacttccagaagtgcttcgccattctcaagctgtaccgcccgggcgtggataacagcagctataacacgagtaagggcagtgacatggccgaggttaaggattggaaagcgattcgtgtggatctggtgatcacgccattcgagcagtacgcctatgcgctgctcggttggacgggcagcaaagaatttcgtcgcgatctgcgccgctatgcggaggaagagcgcggcatgatcctcgacaaccatgccctctacgaccgcaaaaagcgcatctttctgaaagcgggcagcgaagaagagattttcgcgcatctgggtctggattatgtggagccgtgggaacgcaacgcg

SEQ ID NO: 1784 - protein, 394 aa, synthetic construct
  REGION 1..394: note = Variant of terminal deoxynucleotidyl transferase
MHHHHHHGGSGHPPSNTPEGEVPSVIAEKVSQYSCQRKTTLNNYNKKFTDALEIMAENYKFKENLIACLEAKRAASILKYLPFEVTSMKDIQGLPCIGDQVRDVIEEIIEEGESSRVKEVLNDERYKAFKQFTSVFGVGVKTSEKWFRMGLRTVEDAKASKSLKLSKMQKAGLLYYEDLASRVSKEEADAVTLIVKNTVRTFLMDALVTITGGFRRGKPMGHDIDFLITNPGPKEDDELLHKVVDLLKKQGLLLYEDIKESTFVEEQLPSRKIDAMDNFQKCFAILKLYRPGVDNSSYNTSKGSDMAEVKDWKAIRVDLVITPFEQYAYALLGWTGSKEFRRDLRRYAEEERGMILDNHALYDRKKRIFLKAGSEEEIFAHLGLDYVEPWERNA

SEQ ID NO: 1785 - DNA, 1182 bp, synthetic construct
  misc_feature 1..1182: note = Variant of terminal deoxynucleotidyl transferase
  source 1..1182: mol_type = other DNA
atgcaccatcatcatcatcatggcggtagcggccatccgccgagcaataccccggagggggaggtgccgagcgttatcgcccgcaaggttagtcagtacagctgccagcgcaagaccacgctgaataactacaacaaaaagtttaccgacgcgctggagatcatggccgagaactacaaatttaaagagaacctgatcgcgtgtctggaagccaagcgcgccgcgagtattctgaaatatctgccgttcccggttaccagcatgaaagacatccaaggtctgccgtgcattggcgaccaagttcgtgacgtgatcgaggagatcatcgaagagggcgagagcagccgtgttaaagaagttctcaatgacgagcgctacaaggcctttaagcagttcaccagcgtgttcggtgtgggcgtgaaaaccagcgaaaagtggtaccgtatgggcctccgtacggttgaagaggcaaaggccagtaagagtctgaagctgagcaagatgcagaaggcgggcttcctgtattacgaggatctggcgagccgcgttagtaaagaagaagccgatgccgttacgctcatcgtgaagaacacggtgcgtacctttctgccggatgcgctggtgaccatcaccggcggtttccgccgtggcaaacctatgggccacgacatcgactttctgatcacgaatccgggcccgaaagaggatgacgagctgctccacaaagtggttgatctgctcaagaagcaaggtctgctgctgtacgaagacatcaaagagagcacgttcgtggaggaacaactgccaagtcgcaaaatcgacgccatggacaacttccagaagtgcttcgccattctcaagctgtaccgcccgggcgtggataacagcagctataacacgagtaagacgagtgacatggtcgaggttaaggattggaaagcgattcgtgtggatctggtgatcacgccattcgagcagtacgcctatgcgctgctcggttggacgggcagcaaagaatttcgtcgcgatctgcgccgctatgcggaggaagagcgcggcatgatcctcgacaaccatgccctctacgaccgcaaaaagcgcatctttctgaaagcgggcagcgaagaagagattttcgcgcatctgggtctggattatgtggagccgtgggaacgcaacgcg

SEQ ID NO: 1786 - protein, 394 aa, synthetic construct
  REGION 1..394: note = Variant of terminal deoxynucleotidyl transferase
MHHHHHHGGSGHPPSNTPEGEVPSVIARKVSQYSCQRKTTLNNYNKKFTDALEIMAENYKFKENLIACLEAKRAASILKYLPFPVTSMKDIQGLPCIGDQVRDVIEEIIEEGESSRVKEVLNDERYKAFKQFTSVFGVGVKTSEKWYRMGLRTVEEAKASKSLKLSKMQKAGFLYYEDLASRVSKEEADAVTLIVKNTVRTFLPDALVTITGGFRRGKPMGHDIDFLITNPGPKEDDELLHKVVDLLKKQGLLLYEDIKESTFVEEQLPSRKIDAMDNFQKCFAILKLYRPGVDNSSYNTSKTSDMVEVKDWKAIRVDLVITPFEQYAYALLGWTGSKEFRRDLRRYAEEERGMILDNHALYDRKKRIFLKAGSEEEIFAHLGLDYVEPWERNA

SEQ ID NO: 1787 - DNA, 1182 bp, synthetic construct
  misc_feature 1..1182: note = Variant of terminal deoxynucleotidyl transferase
  source 1..1182: mol_type = other DNA
atgcaccatcatcatcatcatggcggtagcggccatccgccgagcaataccccggagggggaggtgccgagcgttatcgcccgcaaggttagtcagtacagctgccagcgcaagaccacgctgaataactacaacaaaaagtttaccgacgcgctggagatcatggccgagaactacaaatttaaagagaacctgatcgcgtgtctggaagccaagcgcgccgcgagtattctgaaatatctgccgttcccggttaccagcatgaaagacatccaaggtctgccgtgcattggtgaccaagttcgtgacgtgatcgaggagatcatcgaagagggcgagagcagccgtgttaaagaagttctcaatgacgagcgctacaaggcctttaagcagttcaccagcgtgttcggtgtgggcgtgaaaaccagcgaaaagtggtttcgtatgggcctccgtacggttgaagaggcaaaggccagtaagagtctgaagctgagcaagatgcagcgtgcgggcttcctgtattacgaggatctggcgagccgcgttagtaaagaagaagccgatgccgttacgagcatcgtgaaggaaacggtgcgtacctttctgccggatgcgctggtgaccatcaccggcggtttccgccgtggcaaacctatgggccacgacatcgactttctgatcacgaatccgggcccgaaagaggatgacgagctgctccacaaagtggttgatctgctcaagaagcaaggtctgctgctgtacgaagacatcaaagagagcacgttcgtggaggaacaactgccaagtcgcaaaatcgacgccatggacaacttccagaagtgcttcgccattctcaagctgtaccagccgggcgtggataacagttcgtataatacgagtaagaagagtgacatggccgaggttaaggattggaaagcgattcgtgtggatctggtgatcacgccattcgagcagtacgcctatgcgctgctcggttggacgggcagcaaagaatttcgtcgcgatctgcgccgctatgcggaggaagagcgcggcatgatcctcgacaaccatgccctctacgaccgcaaaaagcgcatctttctgaaagcgggcagcgaagaagagattttcgcgcatctgggtctggattatgtggagccgtgggaacgcaacgcg

SEQ ID NO: 1788 - protein, 394 aa, synthetic construct
  REGION 1..394: note = Variant of terminal deoxynucleotidyl transferase
MHHHHHHGGSGHPPSNTPEGEVPSVIARKVSQYSCQRKTTLNNYNKKFTDALEIMAENYKFKENLIACLEAKRAASILKYLPFPVTSMKDIQGLPCIGDQVRDVIEEIIEEGESSRVKEVLNDERYKAFKQFTSVFGVGVKTSEKWFRMGLRTVEEAKASKSLKLSKMQRAGFLYYEDLASRVSKEEADAVTSIVKETVRTFLPDALVTITGGFRRGKPMGHDIDFLITNPGPKEDDELLHKVVDLLKKQGLLLYEDIKESTFVEEQLPSRKIDAMDNFQKCFAILKLYQPGVDNSSYNTSKKSDMAEVKDWKAIRVDLVITPFEQYAYALLGWTGSKEFRRDLRRYAEEERGMILDNHALYDRKKRIFLKAGSEEEIFAHLGLDYVEPWERNA

SEQ ID NO: 1789 - DNA, 1182 bp, synthetic construct
  misc_feature 1..1182: note = Variant of terminal deoxynucleotidyl transferase
  source 1..1182: mol_type = other DNA
atgcaccatcatcatcatcatggcggtagcggccatccgccgagcaataccccggagggggaggtgccgagcgttatcgcccgcaaggttagtcagtacagctgccagcgcaagaccacgctgaataactacaacaaaaagtttaccgacgcgctggagatcatggccgagaactacaaatttaaagagaacctgatcgcgtgtctggaagccaagcgcgccgcgagtattctgaaatatctgccgttcccggttaccagcatgaaagacatccaaggtctgccgtgcattgctgaccaagttcgtgacgtgatcgaggagatcatcgaagagggcgagagcagccgtgttaaagaagttctcaatgacgagcgctacaaggcctttaagcagttcaccagcgtgttcggtgtgggcgtgaaaacctcggaaaagtggtttcgtatgggcctccgtacggttgaagaggcaaaggccagtaagagtctgaagctgagcaagatgcagaaggcgggcttcctgtattacgaggatctggcgagccgcgttagtcgtgaagaagccgatgccgttacgctcatcgtgaagaacacggtgcgtacctttctgccggatgcgctggtgaccatcaccggcggtttccgccgtggcaaacctatgggccacgacatcgactttctgatcacgaatccgggcccgaaagaggatgacgagctgctccacaaagtggttgatctgctcaagaagcaaggtctgctgctgtacgaagacatcaaagagagcacgttcgtggaggagcaactgccaagtcgcaaaatcgacgccatggacaacttccagaagtgcttcgccattctcaagctgtaccagccgggcgtggataacagcagctataacacgagtaagaagagtgacatggccgaggttaaggattggaaagcgattcgtgtggatctggtgatcacgccattcgagcagtacgcctatgcgctgctcggttggacgggcagcaaagaatttcgtcgcgatctgcgccgctatgcggaggaagagcgcggcatgatcctcgacaaccatgccctctacgaccgcaaaaagcgcatctttctgaaagcgggcagcgaagaagagattttcgcgcatctgggtctggattatgtggagccgtgggaacgcaacgcg

SEQ ID NO: 1790 - protein, 394 aa, synthetic construct
  REGION 1..394: note = Variant of terminal deoxynucleotidyl transferase
MHHHHHHGGSGHPPSNTPEGEVPSVIARKVSQYSCQRKTTLNNYNKKFTDALEIMAENYKFKENLIACLEAKRAASILKYLPFPVTSMKDIQGLPCIADQVRDVIEEIIEEGESSRVKEVLNDERYKAFKQFTSVFGVGVKTSEKWFRMGLRTVEEAKASKSLKLSKMQKAGFLYYEDLASRVSREEADAVTLIVKNTVRTFLPDALVTITGGFRRGKPMGHDIDFLITNPGPKEDDELLHKVVDLLKKQGLLLYEDIKESTFVEEQLPSRKIDAMDNFQKCFAILKLYQPGVDNSSYNTSKKSDMAEVKDWKAIRVDLVITPFEQYAYALLGWTGSKEFRRDLRRYAEEERGMILDNHALYDRKKRIFLKAGSEEEIFAHLGLDYVEPWERNA

SEQ ID NO: 1791 - DNA, 1182 bp, synthetic construct
  misc_feature 1..1182: note = Variant of terminal deoxynucleotidyl transferase
  source 1..1182: mol_type = other DNA
atgcaccatcatcatcatcatggcggtagcggccatccgccgagcaataccccggagggggaggtgccgagcgttatcgccgggaaggttagtcagtacagctgccagcgcaagaccacgctgaataactacaacaaaaagtttaccgacgcgctggagatcatggccgagaactacaaatttaaagagaacctgatcgcgtgtctggaagccaagcgcgccgcgagtattctgaaatatctgccgttcgaggttaccagcatgaaagacatccagggtctgccgtgcattggcgaccaagttcgtgacgtgatcgaggagatcatcgaagagggcgagagcagccgtgttaaagaagttctcaatgacgagcgctacaaggcctttaagcagttcaccagcgtgttcggtgtgggcgtgaaaaccagcgaaaagtggttccgtatgggcctccgtacggttgaagaagcaaaggccagtaagagtctgaagctgagcaagatgcagaaggcgggcctgctgtattacgaggatctggcgagccgcgttagtaaagaagaagccgatgccgttacgctcatcgtgaagaacacggtgcgtacctttctgcgtgatgcgctggtgaccatcaccggcggtttccgccgtggcaaacctatgggccacgacatcgactttctgatcacgaatccgggcccgaaagaggatgacgagctgctccacaaagtggttgatctgctcaagaagcaaggtctgctgctgtacgaagacatcaaagagagcacgttcgtggaggaacaactgccaagtcgcaaaatcgacgccatggacaacttccagaagtgcttcgccattctcaagctgtaccagccgggcgtggataacagcagctataacacgagtaagacgagtgacatggccgaggttaaggattggaaagcgattcgtgtggatctggtgatcacgccattcgagcagtacgcctatgcgctgctcggttggacgggcagcaaagaatttcgtcgcgatctgcgccgctatgcggaggaagagcgcggcatgatcctcgacaaccatgccctctacgaccgcaaaaagcgcatctttctgaaagcgggcagcgaagaagagattttcgcgcatctgggtctggattatgtggagccgtgggaacgcaacgcg

SEQ ID NO: 1792 - protein, 394 aa, synthetic construct
  REGION 1..394: note = Variant of terminal deoxynucleotidyl transferase
MHHHHHHGGSGHPPSNTPEGEVPSVIAGKVSQYSCQRKTTLNNYNKKFTDALEIMAENYKFKENLIACLEAKRAASILKYLPFEVTSMKDIQGLPCIGDQVRDVIEEIIEEGESSRVKEVLNDERYKAFKQFTSVFGVGVKTSEKWFRMGLRTVEEAKASKSLKLSKMQKAGLLYYEDLASRVSKEEADAVTLIVKNTVRTFLRDALVTITGGFRRGKPMGHDIDFLITNPGPKEDDELLHKVVDLLKKQGLLLYEDIKESTFVEEQLPSRKIDAMDNFQKCFAILKLYQPGVDNSSYNTSKTSDMAEVKDWKAIRVDLVITPFEQYAYALLGWTGSKEFRRDLRRYAEEERGMILDNHALYDRKKRIFLKAGSEEEIFAHLGLDYVEPWERNA

SEQ ID NO: 1793 - DNA, 1182 bp, synthetic construct
  misc_feature 1..1182: note = Variant of terminal deoxynucleotidyl transferase
  source 1..1182: mol_type = other DNA
atgcaccatcatcatcatcatggcggtagcggccatccgccgagcaataccccggagggggaggtgccgagcgttatcgcccgcccggttagtcagtacagctgccagcgcaagaccacgctgaataactacaacaaaaagtttaccgacgcgctggagatcatggccgagaactacaaatttaaagagaacctgatcgcgtgtctggaagccaagcgcgccgcgagtattctgaaatatctgccgttcccggttaccagcatgaaagacatccaaggtctgccgtgcattggtgaccaagttcgtgacgtgatcgaggagatcatcgaagagggcgagagcagccgtgttaaagaagttctcaatgacgagcgctacaaggcctttaagcagttcaccagcgtgttcggtgtgggcgtgaaaaccgcggaaaagtggtttcgtatgggcctccgtacggttgaagaggcaaaggccagtaaggcgctgaagctgagcaagatgcagaaggcgggcttcctgtattacgaggatctggcgagccgcgttagtaaggaagaagccgatgccgttacgctcatcgtgaagaacacggtgcgtacctttctgccggatgcgctggtgaccatcaccggcggtttccgccgtggcaaacctatgggccacgacatcgactttctgatcacgaatccgggcccgaaagaggatgacgagctgctccacaaagtggttgatctgctcaagaagcaaggtctgctgctgtacgaagacatcaaagagagcacgttcgtggaggaacaactgccaagtcgcaaaatcgacgccatggacaacttccagaagtgcttcgccattctcaagctgtaccagccgggcgtggataacagcagctataacacgagtaagaagagtgacatggccgaggttaaggattggaaagcgattcgtgtggatctggtgatcacgccattcgagcagtacgcctatgcgctgctcggttggacgggcagcaaagaatttcgtcgcgatctgcgccgctatgcggaggaagagcgcggcatgatcctcgacaaccatgccctctacgaccgcaaaaagcgcatctttctgaaagcgggcagcgaagaagagattttcgcgcatctgggtctggattatgtggagccgtgggaacgcaacgcg

SEQ ID NO: 1794 - protein, 394 aa, synthetic construct
  REGION 1..394: note = Variant of terminal deoxynucleotidyl transferase
MHHHHHHGGSGHPPSNTPEGEVPSVIARPVSQYSCQRKTTLNNYNKKFTDALEIMAENYKFKENLIACLEAKRAASILKYLPFPVTSMKDIQGLPCIGDQVRDVIEEIIEEGESSRVKEVLNDERYKAFKQFTSVFGVGVKTAEKWFRMGLRTVEEAKASKALKLSKMQKAGFLYYEDLASRVSKEEADAVTLIVKNTVRTFLPDALVTITGGFRRGKPMGHDIDFLITNPGPKEDDELLHKVVDLLKKQGLLLYEDIKESTFVEEQLPSRKIDAMDNFQKCFAILKLYQPGVDNSSYNTSKKSDMAEVKDWKAIRVDLVITPFEQYAYALLGWTGSKEFRRDLRRYAEEERGMILDNHALYDRKKRIFLKAGSEEEIFAHLGLDYVEPWERNA

SEQ ID NO: 1795 - DNA, 1182 bp, synthetic construct
  misc_feature 1..1182: note = Variant of terminal deoxynucleotidyl transferase
  source 1..1182: mol_type = other DNA
atgcaccatcatcatcatcatggcggtagcggccatccgccgagcaataccccggagggggaggtgccgagcgttatcgcccgcaaggttagtcagtacagctgccagcgcaagaccacgctgaataactacaacaaaaagtttaccgacgcgctggagatcatggccgagaactacaaatttaaagagaacctgatcgcgtgtctggaagccaagcgcgccgcgagtattctgaaatatctgccgttcgaggttaccagcatgaaagacatccagggtctgccgtgcattggcgaccaagttcgtgacgtgatcgaggagatcatcgaagagggcgagagcagccgtgttaaagaagttctcaatgacgagcgctacaaggcctttaagcagttcaccagcgtgttcggtgtgggcgtgaaaaccagcgaaaagtggtttcgtatgggcctccgtacggttgaagaggcaaaggccagtaagagtctgaagctgagcaagatgcagaaggcgggcctgctgtattacgaggatctggcgagccgcgttagtaaagaagaagccgatgccgttacgctcatcgtgaagaacacggtgcgtacctttctgtttgatgcgctggtgaccatcaccggcggtttccgccgtggcaaacctatgggccacgacatcgactttctgatcacgaatccgggcccgaaagaggatgacgagctgctccacaaagtggttgatctgctcaagaagcaaggtctgctgctgtacgaagacatcaaagagagcacgttcgtggaggaacaactgccaagtcgcaaaatcgacgccatggacaacttccagaagtgcttcgccattctcaagctgtaccagccgggcgtggataacagcagctataacacgagtaagacgagtgacatggccgaggttaaggattggaaagcgattcgtgtggatctggtgatcacgccattcgagcagtacgcctatgcgctgctcggttggacgggcagcaaagaatttcgtcgcgatctgcgccgctatgcggaggaagagcgcggcatgatcctcgacaaccatgccctctacgaccgcaaaaagcgcatctttctgaaagcgggcagcgaagaagagattttcgcgcatctgggtctggattatgtggagccgtgggaacgcaacgcg

SEQ ID NO: 1796 - protein, 394 aa, synthetic construct
  REGION 1..394: note = Variant of terminal deoxynucleotidyl transferase
MHHHHHHGGSGHPPSNTPEGEVPSVIARKVSQYSCQRKTTLNNYNKKFTDALEIMAENYKFKENLIACLEAKRAASILKYLPFEVTSMKDIQGLPCIGDQVRDVIEEIIEEGESSRVKEVLNDERYKAFKQFTSVFGVGVKTSEKWFRMGLRTVEEAKASKSLKLSKMQKAGLLYYEDLASRVSKEEADAVTLIVKNTVRTFLFDALVTITGGFRRGKPMGHDIDFLITNPGPKEDDELLHKVVDLLKKQGLLLYEDIKESTFVEEQLPSRKIDAMDNFQKCFAILKLYQPGVDNSSYNTSKTSDMAEVKDWKAIRVDLVITPFEQYAYALLGWTGSKEFRRDLRRYAEEERGMILDNHALYDRKKRIFLKAGSEEEIFAHLGLDYVEPWERNA

SEQ ID NO: 1797 - DNA, 1182 bp, synthetic construct
  misc_feature 1..1182: note = Variant of terminal deoxynucleotidyl transferase
  source 1..1182: mol_type = other DNA
atgcaccatcatcatcatcatggcggtagcggccatccgccgagcaataccccggagggggaggtgccgagcgttatcgccgagaaggttagtcagtacagctgccagcgcaagaccacgctgaataactacaacaaaaagtttaccgacgcgctggagatcatggccgagaactacaaatttaaagagaacctgatcgcgtgtctggaagccaagcgcgccgcgagtattctgaaatatctgccgttcccggttaccagcatgaaagacatccagggtctgccgtgcattggcgaccaagttcgtgacgtgatcgaggagatcatcgaagagggcgagagcagccgtgttaaagaagttctcaatgacgagcgctacaaggcctttaagcagttcaccagcgtgttcggtgtgggcgtgaaaaccagcgaaaagtggtttcgtatgggcctccgtacggttgaagaggcaaaggccagtaagagtctgaagctgagcaagatgcagaaggcgggcttcctgtattacgaggatctggcgagccgcgttagtaaagaagaagccgatgccgttacgctcatcgtgaagaacacggtgcgtacctttctgcctgatgcgctggtgaccatcaccggcggtttccgccgtggcaaacctatgggccacgacatcgactttctgatcacgaatccgggcccgaaagaggatgacgagctgctccacaaagtggttgatctgctcaagaagcaaggtctgctgctgtacgaagacatcaaagagagcacgttcgtggaggaacaactgccaagtcgcaaaatcgacgccatggacaacttccagaagtgcttcgccattctcaagctgtaccgcccgggcgtggataacagcagctataacacgagtaagaagagtgacatggccgaggttaaggattggaaagcgattcgtgtggatctggtgatcacgccattcgagcagtacgcctatgcgctgctcggttggacgggcagcaaagaatttcgtcgcgatctgcgccgctatgcggaggaagagcgcggcatgatcctcgacaaccatgccctctacgaccgcaaaaagcgcatctttctgaaagcgggcagcgaagaagagattttcgcgcatctgggtctggattatgtggagccgtgggaacgcaacgcg

SEQ ID NO: 1798 - protein, 394 aa, synthetic construct
  REGION 1..394: note = Variant of terminal deoxynucleotidyl transferase
MHHHHHHGGSGHPPSNTPEGEVPSVIAEKVSQYSCQRKTTLNNYNKKFTDALEIMAENYKFKENLIACLEAKRAASILKYLPFPVTSMKDIQGLPCIGDQVRDVIEEIIEEGESSRVKEVLNDERYKAFKQFTSVFGVGVKTSEKWFRMGLRTVEEAKASKSLKLSKMQKAGFLYYEDLASRVSKEEADAVTLIVKNTVRTFLPDALVTITGGFRRGKPMGHDIDFLITNPGPKEDDELLHKVVDLLKKQGLLLYEDIKESTFVEEQLPSRKIDAMDNFQKCFAILKLYRPGVDNSSYNTSKKSDMAEVKDWKAIRVDLVITPFEQYAYALLGWTGSKEFRRDLRRYAEEERGMILDNHALYDRKKRIFLKAGSEEEIFAHLGLDYVEPWERNA

SEQ ID NO: 1799 - DNA, 1182 bp, synthetic construct
  misc_feature 1..1182: note = Variant of terminal deoxynucleotidyl transferase
  source 1..1182: mol_type = other DNA
atgcaccatcatcatcatcatggcggtagcggccatccgccgagcaataccccggagggggaggtgccgagcgttatcgcccgcaaggttagtcagtacagctgccagcgcaagaccacgctgaataactacaacaaaaagtttaccgacgcgctggagatcatggccgagaactacaaatttaaagagaacctgatcgcgtgtctggaagccaagcgcgccgcgagtattctgaaatatctgccgttcccggttaccagcatgaaagacatcgagggtctgccgtgcattggcgaccaagttcgtgacgtgatcgaggagatcatcgaagagggcgagagcagccgtgttaaagaagttctcaatgacgagcgctacaaggcctttaagcagttcaccagcgtgttcggtgtgggcgtgaaaaccagcgaaaagtggttccgtatgggcctccgtacggttgaagaagcaaaggccagtaagagtctgaagctgagcaagatgcagaaggcgggcctgctgtattacgaggatctggcgagccgcgttagtaaagaagaagccgatgccgttacgctcatcgtgaagaacacggtgcgtacctttctgtttgatgcgctggtgaccatcaccggcggtttccgccgtggcaaacctatgggccacgacatcgactttctgatcacgaatccgggcccgaaagaggatgacgagctgctccacaaagtggttgatctgctcaagaagcaaggtctgctgctgtacgaagacatcaaagagagcacgttcgtggaggaacaactgccaagtcgcaaaatcgacgccatggacaacttccagaagtgcttcgccattctcaagctgtacgtaccgggcgtggataacagcagctataacacgagtaagggcagtgacatggccgaggttaaggattggaaagcgattcgtgtggatctggtgatcacgccattcgagcagtacgcctatgcgctgctcggttggacgggcagcaaagaatttcgtcgcgatctgcgccgctatgcggaggaagagcgcggcatgatcctcgacaaccatgccctctacgaccgcaaaaagcgcatctttctgaaagcgggcagcgaagaagagattttcgcgcatctgggtctggattatgtggagccgtgggaacgcaacgcg

SEQ ID NO: 1800 - protein, 394 aa, synthetic construct
  REGION 1..394: note = Variant of terminal deoxynucleotidyl transferase
MHHHHHHGGSGHPPSNTPEGEVPSVIARKVSQYSCQRKTTLNNYNKKFTDALEIMAENYKFKENLIACLEAKRAASILKYLPFPVTSMKDIEGLPCIGDQVRDVIEEIIEEGESSRVKEVLNDERYKAFKQFTSVFGVGVKTSEKWFRMGLRTVEEAKASKSLKLSKMQKAGLLYYEDLASRVSKEEADAVTLIVKNTVRTFLFDALVTITGGFRRGKPMGHDIDFLITNPGPKEDDELLHKVVDLLKKQGLLLYEDIKESTFVEEQLPSRKIDAMDNFQKCFAILKLYVPGVDNSSYNTSKGSDMAEVKDWKAIRVDLVITPFEQYAYALLGWTGSKEFRRDLRRYAEEERGMILDNHALYDRKKRIFLKAGSEEEIFAHLGLDYVEPWERNA

SEQ ID NO: 1801 - DNA, 1182 bp, synthetic construct
  misc_feature 1..1182: note = Variant of terminal deoxynucleotidyl transferase
  source 1..1182: mol_type = other DNA
atgcaccatcatcatcatcatggcggtagcggccatccgccgagcaataccccggagggggaggtgccgagcgttatcgccgagaaggttagtcagtacagctgccagcgcaagaccacgctgaataactacaacaaaaagtttaccgacgcgctggagatcatggccgagaactacaaatttaaagagaacctgatcgcgtgtctggaagccaagcgcgccgcgagtattctgaaatatctgccgttcgaggttaccagcatgaaagacatcgagggtctgccgtgcattggcgaccaagttcgtgacgtgatcgaggagatcatcgaagagggcgagagcagccgtgttaaagaagttctcaatgacgagcgctacaaggcctttaagcagttcaccagcgtgttcggtgtgggcgtgaaaaccagcgaaaagtggtaccgtatgggcctccgtacggttgaagaagcaaaggccagtaagagtctgaagctgagcaagatgcagaaggcgggcttcctgtattacgaggatctggcgagccgcgttagtaaagaagaagccgatgccgttacgctcatcgtgaagaacacggtgcgtacctttctgcgtgatgcgctggtgaccatcaccggcggtttccgccgtggcaaacctatgggccacgacatcgactttctgatcacgaatccgggcccgaaagaggatgacgagctgctccacaaagtggttgatctgctcaagaagcaaggtctgctgctgtacgaagacatcaaagagagcacgttcgtggaggaacaactgccaagtcgcaaaatcgacgccatggacaacttccagaagtgcttcgccattctcaagctgtaccagccgggcgtggataacagcagctataacacgagtaagaagagtgacatggccgaggttaaggattggaaagcgattcgtgtggatctggtgatcacgccattcgagcagtacgcctatgcgctgctcggttggacgggcagcaaagaatttcgtcgcgatctgcgccgctatgcggaggaagagcgcggcatgatcctcgacaaccatgccctctacgaccgcaaaaagcgcatctttctgaaagcgggcagcgaagaagagattttcgcgcatctgggtctggattatgtggagccgtgggaacgcaacgcg

SEQ ID NO: 1802 - protein, 394 aa, synthetic construct
  REGION 1..394: note = Variant of terminal deoxynucleotidyl transferase
MHHHHHHGGSGHPPSNTPEGEVPSVIAEKVSQYSCQRKTTLNNYNKKFTDALEIMAENYKFKENLIACLEAKRAASILKYLPFEVTSMKDIEGLPCIGDQVRDVIEEIIEEGESSRVKEVLNDERYKAFKQFTSVFGVGVKTSEKWYRMGLRTVEEAKASKSLKLSKMQKAGFLYYEDLASRVSKEEADAVTLIVKNTVRTFLRDALVTITGGFRRGKPMGHDIDFLITNPGPKEDDELLHKVVDLLKKQGLLLYEDIKESTFVEEQLPSRKIDAMDNFQKCFAILKLYQPGVDNSSYNTSKKSDMAEVKDWKAIRVDLVITPFEQYAYALLGWTGSKEFRRDLRRYAEEERGMILDNHALYDRKKRIFLKAGSEEEIFAHLGLDYVEPWERNA

SEQ ID NO: 1803 - DNA, 1182 bp, synthetic construct
  misc_feature 1..1182: note = Variant of terminal deoxynucleotidyl transferase
  source 1..1182: mol_type = other DNA
atgcaccatcatcatcatcatggcggtagcggccatccgccgagcaataccccggagggggaggtgccgagcgttatcgccgagaaggttagtcagtacagctgccagcgcaagaccacgctgaataactacaacaaaaagtttaccgacgcgctggagatcatggccgagaactacaaatttaaagagaacctgatcgcgtgtctggaagccaagcgcgccgcgagtattctgaaatatctgccgttcccggttaccagcatgaaagacatcgagggtctgccgtgcattggcgaccaagttcgtgacgtgatcgaggagatcatcgaagagggcgagagcagccgtgttaaagaagttctcaatgacgagcgctacaaggcctttaagcagttcaccagcgtgttcggtgtgggcgtgaaaaccagcgaaaagtggtaccgtatgggcctccgtacggttgaagaagcaaaggccagtaagagtctgaagctgagcaagatgcagaaggcgggcttcctgtattacgaggatctggcgagccgcgttagtaaagaagaagccgatgccgttacgctcatcgtgaagaacacggtgcgtacctttctgccggatgcgctggtgaccatcaccggcggtttccgccgtggcaaacctatgggccacgacatcgactttctgatcacgaatccgggcccgaaagaggatgacgagctgctccacaaagtggttgatctgctcaagaagcaaggtctgctgctgtacgaagacatcaaagagagcacgttcgtggaggaacaactgccaagtcgcaaaatcgacgccatggacaacttccagaagtgcttcgccattctcaagctgtaccagccgggcgtggataacagcagctataacacgagtaagaagagtgacatggccgaggttaaggattggaaagcgattcgtgtggatctggtgatcacgccattcgagcagtacgcctatgcgctgctcggttggacgggcagcaaagaatttcgtcgcgatctgcgccgctatgcggaggaagagcgcggcatgatcctcgacaaccatgccctctacgaccgcaaaaagcgcatctttctgaaagcgggcagcgaagaagagattttcgcgcatctgggtctggattatgtggagccgtgggaacgcaacgcg

SEQ ID NO: 1804 - protein, 394 aa, synthetic construct
  REGION 1..394: note = Variant of terminal deoxynucleotidyl transferase
MHHHHHHGGSGHPPSNTPEGEVPSVIAEKVSQYSCQRKTTLNNYNKKFTDALEIMAENYKFKENLIACLEAKRAASILKYLPFPVTSMKDIEGLPCIGDQVRDVIEEIIEEGESSRVKEVLNDERYKAFKQFTSVFGVGVKTSEKWYRMGLRTVEEAKASKSLKLSKMQKAGFLYYEDLASRVSKEEADAVTLIVKNTVRTFLPDALVTITGGFRRGKPMGHDIDFLITNPGPKEDDELLHKVVDLLKKQGLLLYEDIKESTFVEEQLPSRKIDAMDNFQKCFAILKLYQPGVDNSSYNTSKKSDMAEVKDWKAIRVDLVITPFEQYAYALLGWTGSKEFRRDLRRYAEEERGMILDNHALYDRKKRIFLKAGSEEEIFAHLGLDYVEPWERNA

SEQ ID NO: 1805 - DNA, 1182 bp, synthetic construct
  misc_feature 1..1182: note = Variant of terminal deoxynucleotidyl transferase
  source 1..1182: mol_type = other DNA
atgcaccatcatcatcatcatggcggtagcggccatccgccgagcaataccccggagggggaggtgccgagcgttatcgcccgcaaggttagtcagtacagctgccagcgcaagaccacgctgaataactacaacaaaaagtttaccgacgcgctggagatcatggccgagaactacaaatttaaagagaacctgatcgcgtgtctggaagccaagcgcgccgcgagtattctgaaatatctgccgttcccggttaccagcatgaaagacatccaaggtctgccgtgcattggcgaccaagttcgtgacgtgatcgaggagatcatcgaagagggcgagagcagccgtgttaaagaagttctcaatgacgagcgctacaaggcctttaagcagttcaccagcgtgttcggtgtgggcgtgaaaaccagcgaaaagtggtttcgtatgggcctccgtacggttgaagaggcaaaggccagtaagagtctgaagctgagcaagatgcagaaggcgggcttcctgtattacgaggatctggcgagccgcgttagtaaagaagaagccgatgccgttacgctcatcgtgaagaacacggtgcgtacctttctgccggatgcgctggtgaccatcaccggcggtttccgccgtggcaaacctatgggccacgacatcgactttctgatcacgaatccgggcccgaaagaggatgacgagctgctccacaaagtggttgatctgctcaagaagcaaggtctgctgctgtacgaagacatcaaagagagcacgttcgtggaggggcaactgccaagtcgcaaaatcgacgccatggacaacttccagaagtgcttcgccattctcaagctgtaccagccgggcgtggataacagtgcgtatgggacgagtaagaagagtgacatggccgaggttaaggattggaaagcgattcgtgtggatctggtgatcacgccattcgagcagtacgcctatgcgctgctcggttggacgggcagcaaagaatttcgtcgcgatctgcgccgctatgcggaggaagagcgcggcatgatcctcgacaaccatgccctctacgaccgcaaaaagcgcatctttctgaaagcgggcagcgaagaagagattttcgcgcatctgggtctggattatgtggagccgtgggaacgcaacgcg

SEQ ID NO: 1806 - protein, 394 aa, synthetic construct
  REGION 1..394: note = Variant of terminal deoxynucleotidyl transferase
MHHHHHHGGSGHPPSNTPEGEVPSVIARKVSQYSCQRKTTLNNYNKKFTDALEIMAENYKFKENLIACLEAKRAASILKYLPFPVTSMKDIQGLPCIGDQVRDVIEEIIEEGESSRVKEVLNDERYKAFKQFTSVFGVGVKTSEKWFRMGLRTVEEAKASKSLKLSKMQKAGFLYYEDLASRVSKEEADAVTLIVKNTVRTFLPDALVTITGGFRRGKPMGHDIDFLITNPGPKEDDELLHKVVDLLKKQGLLLYEDIKESTFVEGQLPSRKIDAMDNFQKCFAILKLYQPGVDNSAYGTSKKSDMAEVKDWKAIRVDLVITPFEQYAYALLGWTGSKEFRRDLRRYAEEERGMILDNHALYDRKKRIFLKAGSEEEIFAHLGLDYVEPWERNA

SEQ ID NO: 1807 - DNA, 1182 bp, synthetic construct
  misc_feature 1..1182: note = Variant of terminal deoxynucleotidyl transferase
  source 1..1182: mol_type = other DNA
atgcaccatcatcatcatcatggcggtagcggccatccgccgagcaataccccggagggggaggtgccgagcgttatcgccgggaaggttagtcagtacagctgccagcgcaagaccacgctgaataactacaacaaaaagtttaccgacgcgctggagatcatggccgagaactacaaatttaaagagaacctgatcgcgtgtctggaagccaagcgcgccgcgagtattctgaaatatctgccgttcccggttaccagcatgaaagacatcgagggtctgccgtgcattggcgaccaagttcgtgacgtgatcgaggagatcatcgaagagggcgagagcagccgtgttaaagaagttctcaatgacgagcgctacaaggcctttaagcagttcaccagcgtgttcggtgtgggcgtgaaaaccagcgaaaagtggttccgtatgggcctccgtacggttgaagaggcaaaggccagtaagagtctgaagctgagcaagatgcagaaggcgggcttcctgtattacgaggatctggcgagccgcgttagtaaagaagaagccgatgccgttacgctcatcgtgaagaacacggtgcgtacctttctgcgtgatgcgctggtgaccatcaccggcggtttccgccgtggcaaacctatgggccacgacatcgactttctgatcacgaatccgggcccgaaagaggatgacgagctgctccacaaagtggttgatctgctcaagaagcaaggtctgctgctgtacgaagacatcaaagagagcacgttcgtggaggaacaactgccaagtcgcaaaatcgacgccatggacaacttccagaagtgcttcgccattctcaagctgtaccagccgggcgtggataacagcagctataacacgagtaagaagagtgacatggccgaggttaaggattggaaagcgattcgtgtggatctggtgatcacgccattcgagcagtacgcctatgcgctgctcggttggacgggcagcaaagaatttcgtcgcgatctgcgccgctatgcggaggaagagcgcggcatgatcctcgacaaccatgccctctacgaccgcaaaaagcgcatctttctgaaagcgggcagcgaagaagagattttcgcgcatctgggtctggattatgtggagccgtgggaacgcaacgcg

SEQ ID NO: 1808 - protein, 394 aa, synthetic construct
  REGION 1..394: note = Variant of terminal deoxynucleotidyl transferase
MHHHHHHGGSGHPPSNTPEGEVPSVIAGKVSQYSCQRKTTLNNYNKKFTDALEIMAENYKFKENLIACLEAKRAASILKYLPFPVTSMKDIEGLPCIGDQVRDVIEEIIEEGESSRVKEVLNDERYKAFKQFTSVFGVGVKTSEKWFRMGLRTVEEAKASKSLKLSKMQKAGFLYYEDLASRVSKEEADAVTLIVKNTVRTFLRDALVTITGGFRRGKPMGHDIDFLITNPGPKEDDELLHKVVDLLKKQGLLLYEDIKESTFVEEQLPSRKIDAMDNFQKCFAILKLYQPGVDNSSYNTSKKSDMAEVKDWKAIRVDLVITPFEQYAYALLGWTGSKEFRRDLRRYAEEERGMILDNHALYDRKKRIFLKAGSEEEIFAHLGLDYVEPWERNA

SEQ ID NO: 1809 - DNA, 1182 bp, synthetic construct
  misc_feature 1..1182: note = Variant of terminal deoxynucleotidyl transferase
  source 1..1182: mol_type = other DNA
atgcaccatcatcatcatcatggcggtagcggccatccgccgagcaataccccggagggggaggtgccgagcgttatcgccgggaaggttagtcagtacagctgccagcgcaagaccacgctgaataactacaacaaaaagtttaccgacgcgctggagatcatggccgagaactacaaatttaaagagaacctgatcgcgtgtctggaagccaagcgcgccgcgagtattctgaaatatctgccgttcccggttaccagcatgaaagacatccagggtctgccgtgcattggcgaccaagttcgtgacgtgatcgaggagatcatcgaagagggcgagagcagccgtgttaaagaagttctcaatgacgagcgctacaaggcctttaagcagttcaccagcgtgttcggtgtgggcgtgaaaaccagcgaaaagtggttccgtatgggcctccgtacggttgaagaagcaaaggccagtaagagtctgaagctgagcaagatgcagaaggcgggcttcctgtattacgaggatctggcgagccgcgttagtaaagaagaagccgatgccgttacgctcatcgtgaagaacacggtgcgtacctttctgcgtgatgcgctggtgaccatcaccggcggtttccgccgtggcaaacctatgggccacgacatcgactttctgatcacgaatccgggcccgaaagaggatgacgagctgctccacaaagtggttgatctgctcaagaagcaaggtctgctgctgtacgaagacatcaaagagagcacgttcgtggaggaacaactgccaagtcgcaaaatcgacgccatggacaacttccagaagtgcttcgccattctcaagctgtaccagccgggcgtggataacagcagctataacacgagtaagaagagtgacatggccgaggttaaggattggaaagcgattcgtgtggatctggtgatcacgccattcgagcagtacgcctatgcgctgctcggttggacgggcagcaaagaatttcgtcgcgatctgcgccgctatgcggaggaagagcgcggcatgatcctcgacaaccatgccctctacgaccgcaaaaagcgcatctttctgaaagcgggcagcgaagaagagattttcgcgcatctgggtctggattatgtggagccgtgggaacgcaacgcg

SEQ ID NO: 1810 - protein, 394 aa, synthetic construct
  REGION 1..394: note = Variant of terminal deoxynucleotidyl transferase
MHHHHHHGGSGHPPSNTPEGEVPSVIAGKVSQYSCQRKTTLNNYNKKFTDALEIMAENYKFKENLIACLEAKRAASILKYLPFPVTSMKDIQGLPCIGDQVRDVIEEIIEEGESSRVKEVLNDERYKAFKQFTSVFGVGVKTSEKWFRMGLRTVEEAKASKSLKLSKMQKAGFLYYEDLASRVSKEEADAVTLIVKNTVRTFLRDALVTITGGFRRGKPMGHDIDFLITNPGPKEDDELLHKVVDLLKKQGLLLYEDIKESTFVEEQLPSRKIDAMDNFQKCFAILKLYQPGVDNSSYNTSKKSDMAEVKDWKAIRVDLVITPFEQYAYALLGWTGSKEFRRDLRRYAEEERGMILDNHALYDRKKRIFLKAGSEEEIFAHLGLDYVEPWERNA

SEQ ID NO: 1811 - DNA, 1182 bp, synthetic construct
  misc_feature 1..1182: note = Variant of terminal deoxynucleotidyl transferase
  source 1..1182: mol_type = other DNA
atgcaccatcatcatcatcatggcggtagcggccatccgccgagcaataccccggagggggaggtgccgagcgttatcgccgagaaggttagtcagtacagctgccagcgcaagaccacgctgaataactacaacaaaaagtttaccgacgcgctggagatcatggccgagaactacaaatttaaagagaacctgatcgcgtgtctggaagccaagcgcgccgcgagtattctgaaatatctgccgttcgaggttaccagcatgaaagacatccaaggtctgccgtgcattggcgaccaagttcgtgacgtgatcgaggagatcatcgaagagggcgagagcagccgtgttaaagaagttctcaatgacgagcgctacaaggcctttaagcagttcaccagcgtgttcggtgtgggcgtgaaaaccagcgaaaagtggttccgtatgggcctccgtacggttgaagaggcaaaggccagtaagagtctgaagctgagcaagatgcagaaggcgggcctgctgtattacgaggatctggcgagccgcgttagtaaagaagaagccgatgccgttacgctcatcgtgaagaacacggtgcgtacctttctgccggatgcgctggtgaccatcaccggcggtttccgccgtggcaaacctatgggccacgacatcgactttctgatcacgaatccgggcccgaaagaggatgacgagctgctccacaaagtggttgatctgctcaagaagcaaggtctgctgctgtacgaagacatcaaagagagcacgttcgtggaggaacaactgccaagtcgcaaaatcgacgccatggacaacttccagaagtgcttcgccattctcaagctgtaccagccgggcgtggataacagcagctataacacgagtaagggcagtgacatggccgaggttaaggattggaaagcgattcgtgtggatctggtgatcacgccattcgagcagtacgcctatgcgctgctcggttggacgggcagcaaagaatttcgtcgcgatctgcgccgctatgcggaggaagagcgcggcatgatcctcgacaaccatgccctctacgaccgcaaaaagcgcatctttctgaaagcgggcagcgaagaagagattttcgcgcatctgggtctggattatgtggagccgtgggaacgcaacgcg

SEQ ID NO: 1812 - protein, 394 aa, synthetic construct
  REGION 1..394: note = Variant of terminal deoxynucleotidyl transferase
MHHHHHHGGSGHPPSNTPEGEVPSVIAEKVSQYSCQRKTTLNNYNKKFTDALEIMAENYKFKENLIACLEAKRAASILKYLPFEVTSMKDIQGLPCIGDQVRDVIEEIIEEGESSRVKEVLNDERYKAFKQFTSVFGVGVKTSEKWFRMGLRTVEEAKASKSLKLSKMQKAGLLYYEDLASRVSKEEADAVTLIVKNTVRTFLPDALVTITGGFRRGKPMGHDIDFLITNPGPKEDDELLHKVVDLLKKQGLLLYEDIKESTFVEEQLPSRKIDAMDNFQKCFAILKLYQPGVDNSSYNTSKGSDMAEVKDWKAIRVDLVITPFEQYAYALLGWTGSKEFRRDLRRYAEEERGMILDNHALYDRKKRIFLKAGSEEEIFAHLGLDYVEPWERNA

SEQ ID NO: 1813 - DNA, 1182 bp, synthetic construct
  misc_feature 1..1182: note = Variant of terminal deoxynucleotidyl transferase
  source 1..1182: mol_type = other DNA
atgcaccatcatcatcatcatggcggtagcggccatccgccgagcaataccccggagggggaggtgccgagcgttatcgcccgcaaggttagtcagtacagctgccagcgcaagaccacgctgaataactacaacaaaaagtttaccgacgcgctggagatcatggccgagaactacaaatttaaagagaacctgatcgcgtgtctggaagccaagcgcgccgcgagtattctgaaatatctgccgttcccggttaccagcatgaaagacatccagggtctgccgtgcattggcgaccaagttcgtgacgtgatcgaggagatcatcgaagagggcgagagcagccgtgttaaagaagttctcaatgacgagcgctacaaggcctttaagcagttcaccagcgtgttcggtgtgggcgtgaaaaccagcgaaaagtggttccgtatgggcctccgtacggttgaagaggcaaaggccagtaagagtctgaagctgagcaagatgcagaaggcgggcctgctgtattacgaggatctggcgagccgcgttagtaaagaagaagccgatgccgttacgctcatcgtgaagaacacggtgcgtacctttctgtttgatgcgctggtgaccatcaccggcggtttccgccgtggcaaacctatgggccacgacatcgactttctgatcacgaatccgggcccgaaagaggatgacgagctgctccacaaagtggttgatctgctcaagaagcaaggtctgctgctgtacgaagacatcaaagagagcacgttcgtggaggaacaactgccaagtcgcaaaatcgacgccatggacaacttccagaagtgcttcgccattctcaagctgtaccagccgggcgtggataacagcagctataacacgagtaagggcagtgacatggccgaggttaaggattggaaagcgattcgtgtggatctggtgatcacgccattcgagcagtacgcctatgcgctgctcggttggacgggcagcaaagaatttcgtcgcgatctgcgccgctatgcggaggaagagcgcggcatgatcctcgacaaccatgccctctacgaccgcaaaaagcgcatctttctgaaagcgggcagcgaagaagagattttcgcgcatctgggtctggattatgtggagccgtgggaacgcaacgcg

SEQ ID NO: 1814 - protein, 394 aa, synthetic construct
  REGION 1..394: note = Variant of terminal deoxynucleotidyl transferase
MHHHHHHGGSGHPPSNTPEGEVPSVIARKVSQYSCQRKTTLNNYNKKFTDALEIMAENYKFKENLIACLEAKRAASILKYLPFPVTSMKDIQGLPCIGDQVRDVIEEIIEEGESSRVKEVLNDERYKAFKQFTSVFGVGVKTSEKWFRMGLRTVEEAKASKSLKLSKMQKAGLLYYEDLASRVSKEEADAVTLIVKNTVRTFLFDALVTITGGFRRGKPMGHDIDFLITNPGPKEDDELLHKVVDLLKKQGLLLYEDIKESTFVEEQLPSRKIDAMDNFQKCFAILKLYQPGVDNSSYNTSKGSDMAEVKDWKAIRVDLVITPFEQYAYALLGWTGSKEFRRDLRRYAEEERGMILDNHALYDRKKRIFLKAGSEEEIFAHLGLDYVEPWERNA

SEQ ID NO: 1815 - DNA, 1182 bp, synthetic construct
  misc_feature 1..1182: note = Variant of terminal deoxynucleotidyl transferase
  source 1..1182: mol_type = other DNA
atgcaccatcatcatcatcatggcggtagcggccatccgccgagcaataccccggagggggaggtgccgagcgttatcgccgggaaggttagtcagtacagctgccagcgcaagaccacgctgaataactacaacaaaaagtttaccgacgcgctggagatcatggccgagaactacaaatttaaagagaacctgatcgcgtgtctggaagccaagcgcgccgcgagtattctgaaatatctgccgttcccggttaccagcatgaaagacatccaaggtctgccgtgcattggcgaccaagttcgtgacgtgatcgaggagatcatcgaagagggcgagagcagccgtgttaaagaagttctcaatgacgagcgctacaaggcctttaagcagttcaccagcgtgttcggtgtgggcgtgaaaaccagcgaaaagtggtttcgtatgggcctccgtacggttgaagaggcaaaggccagtaagagtctgaagctgagcaagatgcagaaggcgggcttcctgtattacgaggatctggcgagccgcgttagtaaagaagaagccgatgccgttacgctcatcgtgaagaacacggtgcgtacctttctgccggatgcgctggtgaccatcaccggcggtttccgccgtggcaaacctatgggccacgacatcgactttctgatcacgaatccgggcccgaaagaggatgacgagctgctccacaaagtggttgatctgctcaagaagcaaggtctgctgctgtacgaagacatcaaagagagcacgttcgtggaggaacaactgccaagtcgcaaaatcgacgccatggacaacttccagaagtgcttcgccattctcaagctgtaccagccgggcgtggataacagcagctataacacgagtaagggcagtgacatggccgaggttaaggattggaaagcgattcgtgtggatctggtgatcacgccattcgagcagtacgcctatgcgctgctcggttggacgggcagcaaagaatttcgtcgcgatctgcgccgctatgcggaggaagagcgcggcatgatcctcgacaaccatgccctctacgaccgcaaaaagcgcatctttctgaaagcgggcagcgaagaagagattttcgcgcatctgggtctggattatgtggagccgtgggaacgcaacgcg

SEQ ID NO: 1816 - protein, 394 aa, synthetic construct
  REGION 1..394: note = Variant of terminal deoxynucleotidyl transferase
MHHHHHHGGSGHPPSNTPEGEVPSVIAGKVSQYSCQRKTTLNNYNKKFTDALEIMAENYKFKENLIACLEAKRAASILKYLPFPVTSMKDIQGLPCIGDQVRDVIEEIIEEGESSRVKEVLNDERYKAFKQFTSVFGVGVKTSEKWFRMGLRTVEEAKASKSLKLSKMQKAGFLYYEDLASRVSKEEADAVTLIVKNTVRTFLPDALVTITGGFRRGKPMGHDIDFLITNPGPKEDDELLHKVVDLLKKQGLLLYEDIKESTFVEEQLPSRKIDAMDNFQKCFAILKLYQPGVDNSSYNTSKGSDMAEVKDWKAIRVDLVITPFEQYAYALLGWTGSKEFRRDLRRYAEEERGMILDNHALYDRKKRIFLKAGSEEEIFAHLGLDYVEPWERNA

SEQ ID NO: 1817 - DNA, 1182 bp, synthetic construct
  misc_feature 1..1182: note = Variant of terminal deoxynucleotidyl transferase
  source 1..1182: mol_type = other DNA
atgcaccatcatcatcatcatggcggtagcggccatccgccgagcaataccccggagggggaggtgccgagcgttatcgccgggaaggttagtcagtacagctgccagcgcaagaccacgctgaataactacaacaaaaagtttaccgacgcgctggagatcatggccgagaactacaaatttaaagagaacctgatcgcgtgtctggaagccaagcgcgccgcgagtattctgaaatatctgccgttcccggttaccagcatgaaagacatccagggtctgccgtgcattggcgaccaagttcgtgacgtgatcgaggagatcatcgaagagggcgagagcagccgtgttaaagaagttctcaatgacgagcgctacaaggcctttaagcagttcaccagcgtgttcggtgtgggcgtgaaaaccagcgaaaagtggtaccgtatgggcctccgtacggttgaagaagcaaaggccagtaagagtctgaagctgagcaagatgcagaaggcgggcttcctgtattacgaggatctggcgagccgcgttagtaaagaagaagccgatgccgttacgctcatcgtgaagaacacggtgcgtacctttctgccggatgcgctggtgaccatcaccggcggtttccgccgtggcaaacctatgggccacgacatcgactttctgatcacgaatccgggcccgaaagaggatgacgagctgctccacaaagtggttgatctgctcaagaagcaaggtctgctgctgtacgaagacatcaaagagagcacgttcgtggaggaacaactgccaagtcgcaaaatcgacgccatggacaacttccagaagtgcttcgccattctcaagctgtaccagccgggcgtggataacagcagctataacacgagtaagggcagtgacatggccgaggttaaggattggaaagcgattcgtgtggatctggtgatcacgccattcgagcagtacgcctatgcgctgctcggttggacgggcagcaaagaatttcgtcgcgatctgcgccgctatgcggaggaagagcgcggcatgatcctcgacaaccatgccctctacgaccgcaaaaagcgcatctttctgaaagcgggcagcgaagaagagattttcgcgcatctgggtctggattatgtggagccgtgggaacgcaacgcg

SEQ ID NO: 1818 - protein, 394 aa, synthetic construct
  REGION 1..394: note = Variant of terminal deoxynucleotidyl transferase
MHHHHHHGGSGHPPSNTPEGEVPSVIAGKVSQYSCQRKTTLNNYNKKFTDALEIMAENYKFKENLIACLEAKRAASILKYLPFPVTSMKDIQGLPCIGDQVRDVIEEIIEEGESSRVKEVLNDERYKAFKQFTSVFGVGVKTSEKWYRMGLRTVEEAKASKSLKLSKMQKAGFLYYEDLASRVSKEEADAVTLIVKNTVRTFLPDALVTITGGFRRGKPMGHDIDFLITNPGPKEDDELLHKVVDLLKKQGLLLYEDIKESTFVEEQLPSRKIDAMDNFQKCFAILKLYQPGVDNSSYNTSKGSDMAEVKDWKAIRVDLVITPFEQYAYALLGWTGSKEFRRDLRRYAEEERGMILDNHALYDRKKRIFLKAGSEEEIFAHLGLDYVEPWERNA

SEQ ID NO: 1819 - DNA, 1182 bp, synthetic construct
  misc_feature 1..1182: note = Variant of terminal deoxynucleotidyl transferase
  source 1..1182: mol_type = other DNA
atgcaccatcatcatcatcatggcggtagcggccatccgccgagcaataccccggagggggaggtgccgagcgttatcgcccgcaaggttagtcagtacagctgccagcgcaagaccacgctgaataactacaacaaaaagtttaccgacgcgctggagatcatggccgagaactacaaatttaaagagaacctgatcgcgtgtctggaagccaagcgcgccgcgagtattctgaaatatctgccgttcccggttaccagcatgaaagacatccaaggtctgccgtgcattggcgaccaagttcgtgacgtgatcgaggagatcatcgaagagggcgagagcagccgtgttaaagaagttctcaatgacgagcgctacaaggcctttaagcagttcaccagcgtgttcggtgtgggcgtgaaaaccagcgaaaagtggtttcgtatgggcctccgtacggttgaagaggcaaaggccagtaagagtctgaagctgagcaagatgcagaaggcgggcctgctgtattacgaggatctggcgagccgcgttagtaaagaagaagccgatgccgttacgctcatcgtgaagaacacggtgcgtacctttctgcgtgatgcgctggtgaccatcaccggcggtttccgccgtggcaaacctatgggccacgacatcgactttctgatcacgaatccgggcccgaaagaggatgacgagctgctccacaaagtggttgatctgctcaagaagcaaggtctgctgctgtacgaagacatcaaagagagcacgttcgtggaggaacaactgccaagtcgcaaaatcgacgccatggacaacttccagaagtgcttcgccattctcaagctgtaccagccgggcgtggataacagcagctataacacgagtaagaagagtgacatggccgaggttaaggattggaaagcgattcgtgtggatctggtgatcacgccattcgagcagtacgcctatgcgctgctcggttggacgggcagcaaagaatttcgtcgcgatctgcgccgctatgcggaggaagagcgcggcatgatcctcgacaaccatgccctctacgaccgcaaaaagcgcatctttctgaaagcgggcagcgaagaagagattttcgcgcatctgggtctggattatgtggagccgtgggaacgcaacgcg

SEQ ID NO: 1820 - protein, 394 aa, synthetic construct
  REGION 1..394: note = Variant of terminal deoxynucleotidyl transferase
MHHHHHHGGSGHPPSNTPEGEVPSVIARKVSQYSCQRKTTLNNYNKKFTDALEIMAENYKFKENLIACLEAKRAASILKYLPFPVTSMKDIQGLPCIGDQVRDVIEEIIEEGESSRVKEVLNDERYKAFKQFTSVFGVGVKTSEKWFRMGLRTVEEAKASKSLKLSKMQKAGLLYYEDLASRVSKEEADAVTLIVKNTVRTFLRDALVTITGGFRRGKPMGHDIDFLITNPGPKEDDELLHKVVDLLKKQGLLLYEDIKESTFVEEQLPSRKIDAMDNFQKCFAILKLYQPGVDNSSYNTSKKSDMAEVKDWKAIRVDLVITPFEQYAYALLGWTGSKEFRRDLRRYAEEERGMILDNHALYDRKKRIFLKAGSEEEIFAHLGLDYVEPWERNA

SEQ ID NO: 1821 - DNA, 1182 bp, synthetic construct
  misc_feature 1..1182: note = Variant of terminal deoxynucleotidyl transferase
  source 1..1182: mol_type = other DNA
atgcaccatcatcatcatcatggcggtagcggccatccgccgagcaataccccggagggggaggtgccgagcgttatcgcccgcaaggttagtcagtacagctgccagcgcaagaccacgctgaataactacaacaaaaagtttaccgacgcgctggagatcatggccgagaactacaaatttaaagagaacctgatcgcgtgtctggaagccaagcgcgccgcgagtattctgaaatatctgccgttcgaggttaccagcatgaaagacatcgagggtctgccgtgcattggcgaccaagttcgtgacgtgatcgaggagatcatcgaagagggcgagagcagccgtgttaaagaagttctcaatgacgagcgctacaaggcctttaagcagttcaccagcgtgttcggtgtgggcgtgaaaaccagcgaaaagtggttccgtatgggcctccgtacggttgaagaggcaaaggccagtaagagtctgaagctgagcaagatgcagaaggcgggcctgctgtattacgaggatctggcgagccgcgttagtaaagaagaagccgatgccgttacgctcatcgtgaagaacacggtgcgtacctttctgccggatgcgctggtgaccatcaccggcggtttccgccgtggcaaacctatgggccacgacatcgactttctgatcacgaatccgggcccgaaagaggatgacgagctgctccacaaagtggttgatctgctcaagaagcaaggtctgctgctgtacgaagacatcaaagagagcacgttcgtggaggaacaactgccaagtcgcaaaatcgacgccatggacaacttccagaagtgcttcgccattctcaagctgtaccagccgggcgtggataacagcagctataacacgagtaagaagagtgacatggccgaggttaaggattggaaagcgattcgtgtggatctggtgatcacgccattcgagcagtacgcctatgcgctgctcggttggacgggcagcaaagaatttcgtcgcgatctgcgccgctatgcggaggaagagcgcggcatgatcctcgacaaccatgccctctacgaccgcaaaaagcgcatctttctgaaagcgggcagcgaagaagagattttcgcgcatctgggtctggattatgtggagccgtgggaacgcaacgcg

SEQ ID NO: 1822 - protein, 394 aa, synthetic construct
  REGION 1..394: note = Variant of terminal deoxynucleotidyl transferase
MHHHHHHGGSGHPPSNTPEGEVPSVIARKVSQYSCQRKTTLNNYNKKFTDALEIMAENYKFKENLIACLEAKRAASILKYLPFEVTSMKDIEGLPCIGDQVRDVIEEIIEEGESSRVKEVLNDERYKAFKQFTSVFGVGVKTSEKWFRMGLRTVEEAKASKSLKLSKMQKAGLLYYEDLASRVSKEEADAVTLIVKNTVRTFLPDALVTITGGFRRGKPMGHDIDFLITNPGPKEDDELLHKVVDLLKKQGLLLYEDIKESTFVEEQLPSRKIDAMDNFQKCFAILKLYQPGVDNSSYNTSKKSDMAEVKDWKAIRVDLVITPFEQYAYALLGWTGSKEFRRDLRRYAEEERGMILDNHALYDRKKRIFLKAGSEEEIFAHLGLDYVEPWERNA

SEQ ID NO: 1823 - DNA, 1182 bp, synthetic construct
  misc_feature 1..1182: note = Variant of terminal deoxynucleotidyl transferase
  source 1..1182: mol_type = other DNA
atgcaccatcatcatcatcatggcggtagcggccatccgccgagcaataccccggagggggaggtgccgagcgttatcgcccgcaaggttagtcagtacagctgccagcgcaagaccacgctgaataactacaacaaaaagtttaccgacgcgctggagatcatggccgagaactacaaatttaaagagaacctgatcgcgtgtctggaagccaagcgcgccgcgagtattctgaaatatctgccgttcccggttaccagcatgaaagacatccaaggtctgccgtgcattaccgaccaagttcgtgacgtgatcgaggagatcatcgaagagggcgagagcagccgtgttaaagaagttctcaatgacgagcgctacaaggcctttaagcagttcaccagcgtgttcggtgtgggcgtgaaaacctcggaaaagtggtttcgtatgggcctccgtacggttgaagaggcaaaggccagtaaggcgctgaagctgagcaagatgcagaaggcgggcttcctgtattacgaggatctggcgagccgcgttagtaaagaagaagccgatgccgttacggtgatcgtgaagaatacggtgcgtacctttctgccggatgcgctggtgaccatcaccggcggtttccgccgtggcaaacctatgggccacgacatcgactttctgatcacgaatccgggcccgaaagaggatgacgagctgctccacaaagtggttgatctgctcaagaagcaaggtctgctgctgtacgaagacatcaaagagagcacgttcgtggaggaacaactgccaagtcgcaaaatcgacgccatggacaacttccagaagtgcttcgccattctcaagctgtaccagccgggcgtggataacagcagctataacacgagtaagaagagtgacatggccgaggttaaggattggaaagcgattcgtgtggatctggtgatcacgccattcgagcagtacgcctatgcgctgctcggttggacgggcagcaaagaatttcgtcgcgatctgcgccgctatgcggaggaagagcgcggcatgatcctcgacaaccatgccctctacgaccgcaaaaagcgcatctttctgaaagcgggcagcgaagaagagattttcgcgcatctgggtctggattatgtggagccgtgggaacgcaacgcg

SEQ ID NO: 1824 - protein, 394 aa, synthetic construct
  REGION 1..394: note = Variant of terminal deoxynucleotidyl transferase
MHHHHHHGGSGHPPSNTPEGEVPSVIARKVSQYSCQRKTTLNNYNKKFTDALEIMAENYKFKENLIACLEAKRAASILKYLPFPVTSMKDIQGLPCITDQVRDVIEEIIEEGESSRVKEVLNDERYKAFKQFTSVFGVGVKTSEKWFRMGLRTVEEAKASKALKLSKMQKAGFLYYEDLASRVSKEEADAVTVIVKNTVRTFLPDALVTITGGFRRGKPMGHDIDFLITNPGPKEDDELLHKVVDLLKKQGLLLYEDIKESTFVEEQLPSRKIDAMDNFQKCFAILKLYQPGVDNSSYNTSKKSDMAEVKDWKAIRVDLVITPFEQYAYALLGWTGSKEFRRDLRRYAEEERGMILDNHALYDRKKRIFLKAGSEEEIFAHLGLDYVEPWERNA

SEQ ID NO: 1825 - DNA, 1182 bp, synthetic construct
  misc_feature 1..1182: note = Variant of terminal deoxynucleotidyl transferase
  source 1..1182: mol_type = other DNA
atgcaccatcatcatcatcatggcggtagcggccatccgccgagcaataccccggagggggaggtgccgagcgttatcgcccgcaaggttagtcagtacagctgccagcgcaagaccacgctgaataactacaacaaaaagtttaccgacgcgctggagatcatggccgagaactacaaatttaaagagaacctgatcgcgtgtctggaagccaagcgcgccgcgagtattctgaaatatctgccgttcccggttaccagcatgaaagacatccaaggtctgccgtgcattaccgaccaagttcgtgacgtgatcgaggagatcatcgaagagggcgagagcagccgtgttaaagaagttctcaatgacgagcgctacaaggcctttaagcagttcaccagcgtgttcggtgtgggcgtgaaaaccgcggaaaagtggtttcgtatgggcctccgtacggttgaagaggcacgtgccagtaagtcgctgaagctgagcaagatgcagcgtgcgggcttcctgtattacgaggatctggcgagccgcgttagtcgtgaagaagccgatgccgttacgctgatcgtgaagaatacggtgcgtacctttctgccggatgcgctggtgaccatcaccggcggtttccgccgtggcaaacctatgggccacgacatcgactttctgatcacgaatccgggcccgaaagaggatgacgagctgctccacaaagtggttgatctgctcaagaagcaaggtctgctgctgtacgaagacatcaaagagagcacgttcgtggaggagcaactgccaagtcgcaaaatcgacgccatggacaacttccagaagtgcttcgccattctcaagctgtaccagccgggcgtggataacaatgcgtataatacgagtaagaagagtgacatggccgaggttaaggattggaaagcgattcgtgtggatctggtgatcacgccattcgagcagtacgcctatgcgctgctcggttggacgggcagcaaagaatttcgtcgcgatctgcgccgctatgcggaggaagagcgcggcatgatcctcgacaaccatgccctctacgaccgcaaaaagcgcatctttctgaaagcgggcagcgaagaagagattttcgcgcatctgggtctggattatgtggagccgtgggaacgcaacgcg

SEQ ID NO: 1826 - protein, 394 aa, synthetic construct
  REGION 1..394: note = Variant of terminal deoxynucleotidyl transferase
MHHHHHHGGSGHPPSNTPEGEVPSVIARKVSQYSCQRKTTLNNYNKKFTDALEIMAENYKFKENLIACLEAKRAASILKYLPFPVTSMKDIQGLPCITDQVRDVIEEIIEEGESSRVKEVLNDERYKAFKQFTSVFGVGVKTAEKWFRMGLRTVEEARASKSLKLSKMQRAGFLYYEDLASRVSREEADAVTLIVKNTVRTFLPDALVTITGGFRRGKPMGHDIDFLITNPGPKEDDELLHKVVDLLKKQGLLLYEDIKESTFVEEQLPSRKIDAMDNFQKCFAILKLYQPGVDNNAYNTSKKSDMAEVKDWKAIRVDLVITPFEQYAYALLGWTGSKEFRRDLRRYAEEERGMILDNHALYDRKKRIFLKAGSEEEIFAHLGLDYVEPWERNA

SEQ ID NO: 1827 - DNA, 1182 bp, synthetic construct
  misc_feature 1..1182: note = Variant of terminal deoxynucleotidyl transferase
  source 1..1182: mol_type = other DNA
atgcaccatcatcatcatcatggcggtagcggccatccgccgagcaatacccaggagggggaggtgccgagcgttatcgccgggaaggttagtcagtacagctgccagcgcaagaccacgctgaataactacaacaaaaagtttaccgacgcgctggagatcatggccgagaactacaaatttaaagagaacctgatcgcgtgtctggaagccaagcgcgccgcgagtattctgaaatatctgccgttcccggttaccagcatgaaagacatccagggtctgccgtgcattggcgaccaagttcgtgacgtgatcgaggagatcatcgaagagggcgagagcagccgtgttaaagaagttctcaatgacgagcgctacaaggcctttaagcagttcaccagcgtgttcggtgtgggcgtgaaaaccagcgaaaagtggtaccgtatgggcctccgtacggttgaagaggcaaaggccagtaagagtctgaagctgagcaagatgcagaaggcgggcttcctgtattacgaggatctggcgagccgcgttagtaaagaagaagccgatgccgttacgctcatcgtgaagaacacggtgcgtacctttctgcctgatgcgctggtgaccatcaccggcggtttccgccgtggcaaacctatgggccacgacatcgactttctgatcacgaatccgggcccgaaagaggatgacgagctgctccacaaagtggttgatctgctcaagaagcaaggtctgctgctgtacgaagacatcaaagagagcacgttcgtggaggaacaactgccaagtcgcaaaatcgacgccatggacaacttccagaagtgcttcgccattctcaagctgtaccagccgggcgtggataacagcagctataacacgagtaagggcagtgacatggccgaggttaaggattggaaagcgattcgtgtggatctggtgatcacgccattcgagcagtacgcctatgcgctgctcggttggacgggcagcaaagaatttcgtcgcgatctgcgccgctatgcggaggaagagcgcggcatgatcctcgacaaccatgccctctacgaccgcaaaaagcgcatctttctgaaagcgggcagcgaagaagagattttcgcgcatctgggtctggattatgtggagccgtgggaacgcaacgcg

SEQ ID NO: 1828 - protein, 394 aa, synthetic construct
  REGION 1..394: note = Variant of terminal deoxynucleotidyl transferase
MHHHHHHGGSGHPPSNTQEGEVPSVIAGKVSQYSCQRKTTLNNYNKKFTDALEIMAENYKFKENLIACLEAKRAASILKYLPFPVTSMKDIQGLPCIGDQVRDVIEEIIEEGESSRVKEVLNDERYKAFKQFTSVFGVGVKTSEKWYRMGLRTVEEAKASKSLKLSKMQKAGFLYYEDLASRVSKEEADAVTLIVKNTVRTFLPDALVTITGGFRRGKPMGHDIDFLITNPGPKEDDELLHKVVDLLKKQGLLLYEDIKESTFVEEQLPSRKIDAMDNFQKCFAILKLYQPGVDNSSYNTSKGSDMAEVKDWKAIRVDLVITPFEQYAYALLGWTGSKEFRRDLRRYAEEERGMILDNHALYDRKKRIFLKAGSEEEIFAHLGLDYVEPWERNA

SEQ ID NO: 1829 - DNA, 1182 bp, synthetic construct
  misc_feature 1..1182: note = Variant of terminal deoxynucleotidyl transferase
  source 1..1182: mol_type = other DNA
atgcaccatcatcatcatcatggcggtagcggccatccgccgagcaataccccggagggggaggtgccgagcgttatcgcccgcaaggttagtcagtacagctgccagcgcaagaccacgctgaataactacaacaaaaagtttaccgacgcgctggagatcatggccgagaactacaaatttaaagagaacctgatcgcgtgtctggaagccaggcgcgccgcgagtattctgaaatatctgccgttcccggttaccagcatgaaagacatccaaggtctgccgtgcattggcgaccaagttcgtgacgtgatcgaggagatcatcgaagagggcgagagcagccgtgttaaagaagttctcaatgacgagcgctacaaggcctttaagcagttcaccagcgtgttcggtgtgggcgtgaaaaccagcgaaaagtggtttcgtatgggcctccgtacggttgaagaggcaaaggccagtaagagtctgaagctgagcaagatgcagaaggcgggcttcctgtattacgaggatctggcgagccgcgttagtaaagaagaagccgatgccgttacgctcatcgtgaagaacacggtgcgtacctttctgccggatgcgctggtgaccatcaccggcggtttccgccgtggcaaacctatgggccacgacatcgactttctgatcacgaatccgggcccgaaagaggatgacgagctgctccacaaagtggttgatctgctcaagaagcaaggtctgctgctgtacgaagacatcaaagagagcacgttcgtggaggaacaactgccaagtcgcaaaatcgacgccatggacaacttccagaagtgcttcgccattctcaagctgtaccagccgggcgtggataacagcagctataacacgagtaagaagagtgacatggccgaggttaaggattggaaagcgattcgtgtggatctggtgatcacgccattcgagcagtacgcctatgcgctgctcggttggacgggcagcaaagaatttcgtcgcgatctgcgccgctatgcggaggaagagcgcggcatgatcctcgacaaccatgccctctacgaccgcaaaaagcgcatctttctgaaagcgggcagcgaagaagagattttcgcgcatctgggtctggattatgtggagccgtgggaacgcaacgcg

SEQ ID NO: 1830 - protein, 394 aa, synthetic construct
  REGION 1..394: note = Variant of terminal deoxynucleotidyl transferase
MHHHHHHGGSGHPPSNTPEGEVPSVIARKVSQYSCQRKTTLNNYNKKFTDALEIMAENYKFKENLIACLEARRAASILKYLPFPVTSMKDIQGLPCIGDQVRDVIEEIIEEGESSRVKEVLNDERYKAFKQFTSVFGVGVKTSEKWFRMGLRTVEEAKASKSLKLSKMQKAGFLYYEDLASRVSKEEADAVTLIVKNTVRTFLPDALVTITGGFRRGKPMGHDIDFLITNPGPKEDDELLHKVVDLLKKQGLLLYEDIKESTFVEEQLPSRKIDAMDNFQKCFAILKLYQPGVDNSSYNTSKKSDMAEVKDWKAIRVDLVITPFEQYAYALLGWTGSKEFRRDLRRYAEEERGMILDNHALYDRKKRIFLKAGSEEEIFAHLGLDYVEPWERNA

SEQ ID NO: 1831 - DNA, 1182 bp, synthetic construct
  misc_feature 1..1182: note = Variant of terminal deoxynucleotidyl transferase
  source 1..1182: mol_type = other DNA
atgcaccatcatcatcatcatggcggtagcggccatccgccgagcaataccccggagggggaggtgccgagcgttatcgcccgcccggttagtcagtacagctgccagcgcaagaccacgctgaataactacaacaaaaagtttaccgacgcgctggagatcatggccgagaactacaaatttaaagagaacctgatcgcgtgtctggaagccaagcgcgccgcgagtattctgaaatatctgccgttcccggttaccagcatgaaagacatccaaggtctgccgtgcattggtgaccaagttcgtgacgtgatcgaggagatcatcgaagagggcgagagcagccgtgttaaagaagttctcaatgacgagcgctacaaggcctttaagcagttcaccagcgtgttcggtgtgggcgtgaaaacctcggaaaagtggtttcgtatgggcctccgtacggttgaagaggcaaaggccagtaagagtctgaagctgagcaagatgcagaaggcgggcttcctgtattacgaggatctggcgagccgcgttagtcgtgaagaagccgatgccgttacgctcatcgtgaagaacacggtgcgtacctttctgccggatgcgctggtgaccatcaccggcggtttccgccgtggcaaacctatgggccacgacatcgactttctgatcacgaatccgggcccgaaagaggatgacgagctgctccacaaagtggttgatctgctcaagaagcaaggtctgctgctgtacgaagacatcaaagagagcacgttcgtggaggaacaactgccaagtcgcaaaatcgacgccatggacaacttccagaagtgcttcgccattctcaagctgtaccagccgggcgtggataacaattcgtataatacgagtaagaagagtgacatggccgaggttaaggattggaaagcgattcgtgtggatctggtgatcacgccattcgagcagtacgcctatgcgctgctcggttggacgggcagcaaagaatttcgtcgcgatctgcgccgctatgcggaggaagagcgcggcatgatcctcgacaaccatgccctctacgaccgcaaaaagcgcatctttctgaaagcgggcagcgaagaagagattttcgcgcatctgggtctggattatgtggagccgtgggaacgcaacgcg

SEQ ID NO: 1832 - protein, 394 aa, synthetic construct
  REGION 1..394: note = Variant of terminal deoxynucleotidyl transferase
MHHHHHHGGSGHPPSNTPEGEVPSVIARPVSQYSCQRKTTLNNYNKKFTDALEIMAENYKFKENLIACLEAKRAASILKYLPFPVTSMKDIQGLPCIGDQVRDVIEEIIEEGESSRVKEVLNDERYKAFKQFTSVFGVGVKTSEKWFRMGLRTVEEAKASKSLKLSKMQKAGFLYYEDLASRVSREEADAVTLIVKNTVRTFLPDALVTITGGFRRGKPMGHDIDFLITNPGPKEDDELLHKVVDLLKKQGLLLYEDIKESTFVEEQLPSRKIDAMDNFQKCFAILKLYQPGVDNNSYNTSKKSDMAEVKDWKAIRVDLVITPFEQYAYALLGWTGSKEFRRDLRRYAEEERGMILDNHALYDRKKRIFLKAGSEEEIFAHLGLDYVEPWERNA

SEQ ID NO: 1833 - DNA, 1182 bp, synthetic construct
  misc_feature 1..1182: note = Variant of terminal deoxynucleotidyl transferase
  source 1..1182: mol_type = other DNA
atgcaccatcatcatcatcatggcggtagcggccatccgccgagcaataccccggagggggaggtgccgagcgttatcgcccgcaaggttagtcagtacagctgccagcgcaagaccacgctgaataactacaacaaaaagtttaccgacgcgctggagatcatggccgagaactacaaatttaaagagaacctgatcgcgtgtctggaagccaagcgcgccgcgagtattctgaaatatctgccgttcccggttaccagcatgaaagacatccaaggtctgccgtgcattggcgaccaagttcgtgacgtgatcgaggagatcatcgaagagggcgagagcagccgtgttaaagaagttctcaatgacgagcgctacaaggcctttaagcagttcaccagcgtgttcggtgtgggcgtgaaaaccagcgaaaagtggtttcgtatgggcctccgtacggttgaagaagcaaaggccagtaagagtctgaagctgagcaagatgcagaaggcgggcctgctgtattacgaggatctggcgagccgcgttagtaaagaagaagccgatgccgttacgctcatcgtgaagaacacggtgcgtacctttctgccggatgcgctggtgaccatcaccggcggtttccgccgtggcaaacctatgggccacgacatcgactttctgatcacgaatccgggcccgaaagaggatgacgagctgctccacaaagtggttgatctgctcaagaagcaaggtctgctgctgtacgaagacatcaaagagagcacgttcgtggaggaacaactgccaagtcgcaaaatcgacgccatggacaacttccagaagtgcttcgccattctcaagctgtaccagccgggcgtggataacagcagctataacacgagtaagaagagtgacatggccgaggttaaggattggaaagcgattcgtgtggatctggtgatcacgccattcgagcagtacgcctatgcgctgctcggttggacgggcagcaaagaatttcgtcgcgatctgcgccgctatgcggaggaagagcgcggcatgatcctcgacaaccatgccctctacgaccgcaaaaagcgcatctttctgaaagcgggcagcgaagaagagattttcgcgcatctgggtctggattatgtggagccgtgggaacgcaacgcg

SEQ ID NO: 1834 - protein, 394 aa, synthetic construct
  REGION 1..394: note = Variant of terminal deoxynucleotidyl transferase
MHHHHHHGGSGHPPSNTPEGEVPSVIARKVSQYSCQRKTTLNNYNKKFTDALEIMAENYKFKENLIACLEAKRAASILKYLPFPVTSMKDIQGLPCIGDQVRDVIEEIIEEGESSRVKEVLNDERYKAFKQFTSVFGVGVKTSEKWFRMGLRTVEEAKASKSLKLSKMQKAGLLYYEDLASRVSKEEADAVTLIVKNTVRTFLPDALVTITGGFRRGKPMGHDIDFLITNPGPKEDDELLHKVVDLLKKQGLLLYEDIKESTFVEEQLPSRKIDAMDNFQKCFAILKLYQPGVDNSSYNTSKKSDMAEVKDWKAIRVDLVITPFEQYAYALLGWTGSKEFRRDLRRYAEEERGMILDNHALYDRKKRIFLKAGSEEEIFAHLGLDYVEPWERNA

SEQ ID NO: 1835 - DNA, 1182 bp, synthetic construct
  misc_feature 1..1182: note = Variant of terminal deoxynucleotidyl transferase
  source 1..1182: mol_type = other DNA
atgcaccatcatcatcatcatggcggtagcggccatccgccgagcaataccccggagggggaggtgccgagcgttatcgccgagaaggttagtcagtacagctgccagcgcaagaccacgctgaataactacaacaaaaagtttaccgacgcgctggagatcatggccgagaactacaaatttaaagagaacctgatcgcgtgtctggaagccaagcgcgccgcgagtattctgaaatatctgccgttcgaggttaccagcatgaaagacatccaaggtctgccgtgcattggcgaccaagttcgtgacgtgatcgaggagatcatcgaagagggcgagagcagccgtgttaaagaagttctcaatgacgagcgctacaaggcctttaagcagttcaccagcgtgttcggtgtgggcgtgaaaaccagcgaaaagtggttccgtatgggcctccgtacggttgaagaggcaaaggccagtaagagtctgaagctgagcaagatgcagaaggcgggcttcctgtattacgaggatctggcgagccgcgttagtaaagaagaagccgatgccgttacgctcatcgtgaagaacacggtgcgtacctttctgccggatgcgctggtgaccatcaccggcggtttccgccgtggcaaacctatgggccacgacatcgactttctgatcacgaatccgggcccgaaagaggatgacgagctgctccacaaagtggttgatctgctcaagaagcaaggtctgctgctgtacgaagacatcaaagagagcacgttcgtggaggaacaactgccaagtcgcaaaatcgacgccatggacaacttccagaagtgcttcgccattctcaagctgtaccagccgggcgtggataacagcagctataacacgagtaagaagagtgacatggccgaggttaaggattggaaagcgattcgtgtggatctggtgatcacgccattcgagcagtacgcctatgcgctgctcggttggacgggcagcaaagaatttcgtcgcgatctgcgccgctatgcggaggaagagcgcggcatgatcctcgacaaccatgccctctacgaccgcaaaaagcgcatctttctgaaagcgggcagcgaagaagagattttcgcgcatctgggtctggattatgtggagccgtgggaacgcaacgcg

SEQ ID NO: 1836 - protein, 394 aa, synthetic construct
  REGION 1..394: note = Variant of terminal deoxynucleotidyl transferase
MHHHHHHGGSGHPPSNTPEGEVPSVIAEKVSQYSCQRKTTLNNYNKKFTDALEIMAENYKFKENLIACLEAKRAASILKYLPFEVTSMKDIQGLPCIGDQVRDVIEEIIEEGESSRVKEVLNDERYKAFKQFTSVFGVGVKTSEKWFRMGLRTVEEAKASKSLKLSKMQKAGFLYYEDLASRVSKEEADAVTLIVKNTVRTFLPDALVTITGGFRRGKPMGHDIDFLITNPGPKEDDELLHKVVDLLKKQGLLLYEDIKESTFVEEQLPSRKIDAMDNFQKCFAILKLYQPGVDNSSYNTSKKSDMAEVKDWKAIRVDLVITPFEQYAYALLGWTGSKEFRRDLRRYAEEERGMILDNHALYDRKKRIFLKAGSEEEIFAHLGLDYVEPWERNA

SEQ ID NO: 1837 - DNA, 1182 bp, synthetic construct
  misc_feature 1..1182: note = Variant of terminal deoxynucleotidyl transferase
  source 1..1182: mol_type = other DNA
atgcaccatcatcatcatcatggcggtagcggccatccgccgagcaataccccggagggggaggtgccgagcgttatcgcccgcaaggttagtcagtacagctgccagcgcaagaccacgctgaataactacaacaaaaagtttaccgacgcgctggagatcatggccgagaactacaaatttaaagagaacctgatcgcgtgtctggaagccaagcgcgccgcgagtattctgaaatatctgccgttcccggttaccagcatgaaagacatccaaggtctgccgtgcattaccgaccaagttcgtgacgtgatcgaggagatcatcgaagagggcgagagcagccgtgttaaagaagttctcaatgacgagcgctacaaggcctttaagcagttcaccagcgtgttcggtgtgggcgtgaaaacctcggaaaagtggtttcgtatgggcctccgtacggttgaagaggcaaaggccagtaagtcgctgaagctgagcaagatgcagcgtgcgggcttcctgtattacgaggatctggcgagccgcgttagtaaggaagaagccgatgccgttacgagcatcgtgaaggaaacggtgcgtacctttctgccggatgcgctggtgaccatcaccggcggtttccgccgtggcaaacctatgggccacgacatcgactttctgatcacgaatccgggcccgaaagaggatgacgagctgctccacaaagtggttgatctgctcaagaagcaaggtctgctgctgtacgaagacatcaaagagagcacgttcgtggaggagcaactgccaagtcgcaaaatcgacgccatggacaacttccagaagtgcttcgccattctcaagctgtaccagccgggcgtggataacagttcgtataatacgagtaagaagagtgacatggccgaggttaaggattggaaagcgattcgtgtggatctggtgatcacgccattcgagcagtacgcctatgcgctgctcggttggacgggcagcaaagaatttcgtcgcgatctgcgccgctatgcggaggaagagcgcggcatgatcctcgacaaccatgccctctacgaccgcaaaaagcgcatctttctgaaagcgggcagcgaagaagagattttcgcgcatctgggtctggattatgtggagccgtgggaacgcaacgcg

SEQ ID NO: 1838 - protein, 394 aa, synthetic construct
  REGION 1..394: note = Variant of terminal deoxynucleotidyl transferase
MHHHHHHGGSGHPPSNTPEGEVPSVIARKVSQYSCQRKTTLNNYNKKFTDALEIMAENYKFKENLIACLEAKRAASILKYLPFPVTSMKDIQGLPCITDQVRDVIEEIIEEGESSRVKEVLNDERYKAFKQFTSVFGVGVKTSEKWFRMGLRTVEEAKASKSLKLSKMQRAGFLYYEDLASRVSKEEADAVTSIVKETVRTFLPDALVTITGGFRRGKPMGHDIDFLITNPGPKEDDELLHKVVDLLKKQGLLLYEDIKESTFVEEQLPSRKIDAMDNFQKCFAILKLYQPGVDNSSYNTSKKSDMAEVKDWKAIRVDLVITPFEQYAYALLGWTGSKEFRRDLRRYAEEERGMILDNHALYDRKKRIFLKAGSEEEIFAHLGLDYVEPWERNA

SEQ ID NO: 1839 - DNA, 1182 bp, synthetic construct
  misc_feature 1..1182: note = Variant of terminal deoxynucleotidyl transferase
  source 1..1182: mol_type = other DNA
atgcaccatcatcatcatcatggcggtagcggccatccgccgagcaataccccggagggggaggtgccgagcgttatcgccgggaaggttagtcagtacagctgccagcgcaagaccacgctgaataactacaacaaaaagtttaccgacgcgctggagatcatggccgagaactacaaatttaaagagaacctgatcgcgtgtctggaagccaagcgcgccgcgagtattctgaaatatctgccgttcgaggttaccagcatgaaagacatccaaggtctgccgtgcattggcgaccaagttcgtgacgtgatcgaggagatcatcgaagagggcgagagcagccgtgttaaagaagttctcaatgacgagcgctacaaggcctttaagcagttcaccagcgtgttcggtgtgggcgtgaaaaccagcgaaaagtggttccgtatgggcctccgtacggttgaagaggcaaaggccagtaagagtctgaagctgagcaagatgcagaaggcgggcttcctgtattacgaggatctggcgagccgcgttagtaaagaagaagccgatgccgttacgctcatcgtgaagaacacggtgcgtacctttctgccggatgcgctggtgaccatcaccggcggtttccgccgtggcaaacctatgggccacgacatcgactttctgatcacgaatccgggcccgaaagaggatgacgagctgctccacaaagtggttgatctgctcaagaagcaaggtctgctgctgtacgaagacatcaaagagagcacgttcgtggaggaacaactgccaagtcgcaaaatcgacgccatggacaacttccagaagtgcttcgccattctcaagctgtaccagccgggcgtggataacagcagctataacacgagtaagggcagtgacatggccgaggttaaggattggaaagcgattcgtgtggatctggtgatcacgccattcgagcagtacgcctatgcgctgctcggttggacgggcagcaaagaatttcgtcgcgatctgcgccgctatgcggaggaagagcgcggcatgatcctcgacaaccatgccctctacgaccgcaaaaagcgcatctttctgaaagcgggcagcgaagaagagattttcgcgcatctgggtctggattatgtggagccgtgggaacgcaacgcg

SEQ ID NO: 1840 - protein, 394 aa, synthetic construct
  REGION 1..394: note = Variant of terminal deoxynucleotidyl transferase
MHHHHHHGGSGHPPSNTPEGEVPSVIAGKVSQYSCQRKTTLNNYNKKFTDALEIMAENYKFKENLIACLEAKRAASILKYLPFEVTSMKDIQGLPCIGDQVRDVIEEIIEEGESSRVKEVLNDERYKAFKQFTSVFGVGVKTSEKWFRMGLRTVEEAKASKSLKLSKMQKAGFLYYEDLASRVSKEEADAVTLIVKNTVRTFLPDALVTITGGFRRGKPMGHDIDFLITNPGPKEDDELLHKVVDLLKKQGLLLYEDIKESTFVEEQLPSRKIDAMDNFQKCFAILKLYQPGVDNSSYNTSKGSDMAEVKDWKAIRVDLVITPFEQYAYALLGWTGSKEFRRDLRRYAEEERGMILDNHALYDRKKRIFLKAGSEEEIFAHLGLDYVEPWERNA

SEQ ID NO: 1841 - DNA, 1182 bp, synthetic construct
  misc_feature 1..1182: note = Variant of terminal deoxynucleotidyl transferase
  source 1..1182: mol_type = other DNA
atgcaccatcatcatcatcatggcggtagcggccatccgccgagcaataccccggagggggaggtgccgagcgttatcgcccgcaaggttagtcagtacagctgccagcgcaagaccacgctgaataactacaacaaaaagtttaccgacgcgctggagatcatggccgagaactacaaatttaaagagaacctgatcgcgtgtctggaagccaagcgcgccgcgagtattctgaaatatctgccgttcgaggttaccagcatgaaagacatccaaggtctgccgtgcattggcgaccaagttcgtgacgtgatcgaggagatcatcgaagagggcgagagcagccgtgttaaagaagttctcaatgacgagcgctacaaggcctttaagcagttcaccagcgtgttcggtgtgggcgtgaaaaccagcgaaaagtggtttcgtatgggcctccgtacggttgaagaggcaaaggccagtaagagtctgaagctgagcaagatgcagaaggcgggcttcctgtattacgaggatctggcgagccgcgttagtaaagaagaagccgatgccgttacgctcatcgtgaagaacacggtgcgtacctttctgccggatgcgctggtgaccatcaccggcggtttccgccgtggcaaacctatgggccacgacatcgactttctgatcacgaatccgggcccgaaagaggatgacgagctgctccacaaagtggttgatctgctcaagaagcaaggtctgctgctgtacgaagacatcaaagagagcacgttcgtggaggaacaactgccaagtcgcaaaatcgacgccatggacaacttccagaagtgcttcgccattctcaagctgtaccagccgggcgtggataacagcagctataacacgagtaagaagagtgacatggccgaggttaaggattggaaagcgattcgtgtggatctggtgatcacgccattcgagcagtacgcctatgcgctgctcggttggacgggcagcaaagaatttcgtcgcgatctgcgccgctatgcggaggaagagcgcggcatgatcctcgacaaccatgccctctacgaccgcaaaaagcgcatctttctgaaagcgggcagcgaagaagagattttcgcgcatctgggtctggattatgtggagccgtgggaacgcaacgcg

SEQ ID NO: 1842 - protein, 394 aa, synthetic construct
  REGION 1..394: note = Variant of terminal deoxynucleotidyl transferase
MHHHHHHGGSGHPPSNTPEGEVPSVIARKVSQYSCQRKTTLNNYNKKFTDALEIMAENYKFKENLIACLEAKRAASILKYLPFEVTSMKDIQGLPCIGDQVRDVIEEIIEEGESSRVKEVLNDERYKAFKQFTSVFGVGVKTSEKWFRMGLRTVEEAKASKSLKLSKMQKAGFLYYEDLASRVSKEEADAVTLIVKNTVRTFLPDALVTITGGFRRGKPMGHDIDFLITNPGPKEDDELLHKVVDLLKKQGLLLYEDIKESTFVEEQLPSRKIDAMDNFQKCFAILKLYQPGVDNSSYNTSKKSDMAEVKDWKAIRVDLVITPFEQYAYALLGWTGSKEFRRDLRRYAEEERGMILDNHALYDRKKRIFLKAGSEEEIFAHLGLDYVEPWERNA

SEQ ID NO: 1843 - DNA, 1182 bp, synthetic construct
  misc_feature 1..1182: note = Variant of terminal deoxynucleotidyl transferase
  source 1..1182: mol_type = other DNA
atgcaccatcatcatcatcatggcggtagcggccatccgccgagcaataccccggagggggaggtgccgagcgttatcgccgggaaggttagtcagtacagctgccagcgcaagaccacgctgaataactacaacaaaaagtttaccgacgcgctggagatcatggccgagaactacaaatttaaagagaacctgatcgcgtgtctggaagccaagcgcgccgcgagtattctgaaatatctgccgttcccggttaccagcatgaaagacatccaaggtctgccgtgcattggcgaccaagttcgtgacgtgatcgaggagatcatcgaagagggcgagagcagccgtgttaaagaagttctcaatgacgagcgctacaaggcctttaagcagttcaccagcgtgttcggtgtgggcgtgaaaaccagcgaaaagtggtttcgtatgggcctccgtacggttgaagaagcaaaggccagtaagagtctgaagctgagcaagatgcagaaggcgggcttcctgtattacgaggatctggcgagccgcgttagtaaagaagaagccgatgccgttacgctcatcgtgaagaacacggtgcgtacctttctgccggatgcgctggtgaccatcaccggcggtttccgccgtggcaaacctatgggccacgacatcgactttctgatcacgaatccgggcccgaaagaggatgacgagctgctccacaaagtggttgatctgctcaagaagcaaggtctgctgctgtacgaagacatcaaagagagcacgttcgtggaggaacaactgccaagtcgcaaaatcgacgccatggacaacttccagaagtgcttcgccattctcaagctgtaccagccgggcgtggataacagcagctataacacgagtaagaagagtgacatggccgaggttaaggattggaaagcgattcgtgtggatctggtgatcacgccattcgagcagtacgcctatgcgctgctcggttggacgggcagcaaagaatttcgtcgcgatctgcgccgctatgcggaggaagagcgcggcatgatcctcgacaaccatgccctctacgaccgcaaaaagcgcatctttctgaaagcgggcagcgaagaagagattttcgcgcatctgggtctggattatgtggagccgtgggaacgcaacgcg

SEQ ID NO: 1844 - protein, 394 aa, synthetic construct
  REGION 1..394: note = Variant of terminal deoxynucleotidyl transferase
MHHHHHHGGSGHPPSNTPEGEVPSVIAGKVSQYSCQRKTTLNNYNKKFTDALEIMAENYKFKENLIACLEAKRAASILKYLPFPVTSMKDIQGLPCIGDQVRDVIEEIIEEGESSRVKEVLNDERYKAFKQFTSVFGVGVKTSEKWFRMGLRTVEEAKASKSLKLSKMQKAGFLYYEDLASRVSKEEADAVTLIVKNTVRTFLPDALVTITGGFRRGKPMGHDIDFLITNPGPKEDDELLHKVVDLLKKQGLLLYEDIKESTFVEEQLPSRKIDAMDNFQKCFAILKLYQPGVDNSSYNTSKKSDMAEVKDWKAIRVDLVITPFEQYAYALLGWTGSKEFRRDLRRYAEEERGMILDNHALYDRKKRIFLKAGSEEEIFAHLGLDYVEPWERNA

SEQ ID NO: 1845 - DNA, 1182 bp, synthetic construct
  misc_feature 1..1182: note = Variant of terminal deoxynucleotidyl transferase
  source 1..1182: mol_type = other DNA
atgcaccatcatcatcatcatggcggtagcggccatccgccgagcaataccccggagggggaggtgccgagcgttatcgcccgcaaggttagtcagtacagctgccagcgcaagaccacgctgaataactacaacaaaaagtttaccgacgcgctggagatcatggccgagaactacaaatttaaagagaacctgatcgcgtgtctggaagccaagcgcgccgcgagtattctgaaatatctgccgttcccggttaccagcatgaaagacatccaaggtctgccgtgcattggcgaccaagttcgtgacgtgatcgaggagatcatcgaagagggcgagagcagccgtgttaaagaagttctcaatgacgagcgctacaaggcctttaagcagttcaccagcgtgttcggtgtgggcgtgaaaaccagcgaaaagtggtttcgtatgggcctccgtacggttgaagaagcaaaggccagtaagagtctgaagctgagcaagatgcagaaggcgggcttcctgtattacgaggatctggcgagccgcgttagtaaagaagaagccgatgccgttacgctcatcgtgaagaacacggtgcgtacctttctgccggatgcgctggtgaccatcaccggcggtttccgccgtggcaaacctatgggccacgacatcgactttctgatcacgaatccgggcccgaaagaggatgacgagctgctccacaaagtggttgatctgctcaagaagcaaggtctgctgctgtacgaagacatcaaagagagcacgttcgtggaggaacaactgccaagtcgcaaaatcgacgccatggacaacttccagaagtgcttcgccattctcaagctgtaccagccgggcgtggataacagcagctataacacgagtaagggcagtgacatggccgaggttaaggattggaaagcgattcgtgtggatctggtgatcacgccattcgagcagtacgcctatgcgctgctcggttggacgggcagcaaagaatttcgtcgcgatctgcgccgctatgcggaggaagagcgcggcatgatcctcgacaaccatgccctctacgaccgcaaaaagcgcatctttctgaaagcgggcagcgaagaagagattttcgcgcatctgggtctggattatgtggagccgtgggaacgcaacgcg

SEQ ID NO: 1846 - protein, 394 aa, synthetic construct
  REGION 1..394: note = Variant of terminal deoxynucleotidyl transferase
MHHHHHHGGSGHPPSNTPEGEVPSVIARKVSQYSCQRKTTLNNYNKKFTDALEIMAENYKFKENLIACLEAKRAASILKYLPFPVTSMKDIQGLPCIGDQVRDVIEEIIEEGESSRVKEVLNDERYKAFKQFTSVFGVGVKTSEKWFRMGLRTVEEAKASKSLKLSKMQKAGFLYYEDLASRVSKEEADAVTLIVKNTVRTFLPDALVTITGGFRRGKPMGHDIDFLITNPGPKEDDELLHKVVDLLKKQGLLLYEDIKESTFVEEQLPSRKIDAMDNFQKCFAILKLYQPGVDNSSYNTSKGSDMAEVKDWKAIRVDLVITPFEQYAYALLGWTGSKEFRRDLRRYAEEERGMILDNHALYDRKKRIFLKAGSEEEIFAHLGLDYVEPWERNA

SEQ ID NO: 1847 - DNA, 1182 bp, synthetic construct
  misc_feature 1..1182: note = Variant of terminal deoxynucleotidyl transferase
  source 1..1182: mol_type = other DNA
atgcaccatcatcatcatcatggcggtagcggccatccgccgagcaataccccggagggggaggtgccgagcgttatcgcccgcaaggttagtcagtacagctgccagcgcaagaccacgctgaataactacaacaaaaagtttaccgacgcgctggagatcatggccgagaactacaaatttaaagagaacctgatcgcgtgtctggaagccaagcgcgccgcgagtattctgaaatatctgccgttcccggttaccagcatgaaagacatccaaggtctgccgtgcattggcgaccaagttcgtgacgtgatcgaggagatcatcgaagagggcgagagcagccgtgttaaagaagttctcaatgacgagcgctacaaggcctttaagcagttcaccagcgtgttcggtgtgggcgtgaaaaccagcgaaaagtggtttcgtatgggcctccgtacggttgaagaggcaaaggccagtaagagtctgaagctgagcaagatgcagaaggcgggcttcctgtattacgaggatctggcgagccgcgttagtaaagaagaagccgatgccgttacgctcatcgtgaagaacacggtgcgtacctttctgcgtgatgcgctggtgaccatcaccggcggtttccgccgtggcaaacctatgggccacgacatcgactttctgatcacgaatccgggcccgaaagaggatgacgagctgctccacaaagtggttgatctgctcaagaagcaaggtctgctgctgtacgaagacatcaaagagagcacgttcgtggaggaacaactgccaagtcgcaaaatcgacgccatggacaacttccagaagtgcttcgccattctcaagctgtaccagccgggcgtggataacagcagctataacacgagtaagaagagtgacatggccgaggttaaggattggaaagcgattcgtgtggatctggtgatcacgccattcgagcagtacgcctatgcgctgctcggttggacgggcagcaaagaatttcgtcgcgatctgcgccgctatgcggaggaagagcgcggcatgatcctcgacaaccatgccctctacgaccgcaaaaagcgcatctttctgaaagcgggcagcgaagaagagattttcgcgcatctgggtctggattatgtggagccgtgggaacgcaacgcg

SEQ ID NO: 1848 - protein, 394 aa, synthetic construct
  REGION 1..394: note = Variant of terminal deoxynucleotidyl transferase
MHHHHHHGGSGHPPSNTPEGEVPSVIARKVSQYSCQRKTTLNNYNKKFTDALEIMAENYKFKENLIACLEAKRAASILKYLPFPVTSMKDIQGLPCIGDQVRDVIEEIIEEGESSRVKEVLNDERYKAFKQFTSVFGVGVKTSEKWFRMGLRTVEEAKASKSLKLSKMQKAGFLYYEDLASRVSKEEADAVTLIVKNTVRTFLRDALVTITGGFRRGKPMGHDIDFLITNPGPKEDDELLHKVVDLLKKQGLLLYEDIKESTFVEEQLPSRKIDAMDNFQKCFAILKLYQPGVDNSSYNTSKKSDMAEVKDWKAIRVDLVITPFEQYAYALLGWTGSKEFRRDLRRYAEEERGMILDNHALYDRKKRIFLKAGSEEEIFAHLGLDYVEPWERNA

SEQ ID NO: 1849 - DNA, 1182 bp, synthetic construct
  misc_feature 1..1182: note = Variant of terminal deoxynucleotidyl transferase
  source 1..1182: mol_type = other DNA
atgcaccatcatcatcatcatggcggtagcggccatccgccgagcaataccccggagggggaggtgccgagcgttatcgcccgcaaggttagtcagtacagctgccagcgcaagaccacgctgaataactacaacaaaaagtttaccgacgcgctggagatcatggccgagaactacaaatttaaagagaacctgatcgcgtgtctggaagccaagcgcgccgcgagtattctgaaatatctgccgttcgaggttaccagcatgaaagacatccagggtctgccgtgcattggcgaccaagttcgtgacgtgatcgaggagatcatcgaagagggcgagagcagccgtgttaaagaagttctcaatgacgagcgctacaaggcctttaagcagttcaccagcgtgttcggtgtgggcgtgaaaaccagcgaaaagtggttccgtatgggcctccgtacggttgaagacgcaaaggccagtaagagtctgaagctgagcaagatgcagaaggcgggcctgctgtattacgaggatctggcgagccgcgttagtaaagaagaagccgatgccgttacgctcatcgtgaagaacacggtgcgtacctttctgtttgatgcgctggtgaccatcaccggcggtttccgccgtggcaaacctatgggccacgacatcgactttctgatcacgaatccgggcccgaaagaggatgacgagctgctccacaaagtggttgatctgctcaagaagcaaggtctgctgctgtacgaagacatcaaagagagcacgttcgtggaggaacaactgccaagtcgcaaaatcgacgccatggacaacttccagaagtgcttcgccattctcaagctgtaccagccgggcgtggataacagcagctataacacgagtaagaagagtgacatggccgaggttaaggattggaaagcgattcgtgtggatctggtgatcacgccattcgagcagtacgcctatgcgctgctcggttggacgggcagcaaagaatttcgtcgcgatctgcgccgctatgcggaggaagagcgcggcatgatcctcgacaaccatgccctctacgaccgcaaaaagcgcatctttctgaaagcgggcagcgaagaagagattttcgcgcatctgggtctggattatgtggagccgtgggaacgcaacgcg

SEQ ID NO: 1850 - protein, 394 aa, synthetic construct
  REGION 1..394: note = Variant of terminal deoxynucleotidyl transferase
MHHHHHHGGSGHPPSNTPEGEVPSVIARKVSQYSCQRKTTLNNYNKKFTDALEIMAENYKFKENLIACLEAKRAASILKYLPFEVTSMKDIQGLPCIGDQVRDVIEEIIEEGESSRVKEVLNDERYKAFKQFTSVFGVGVKTSEKWFRMGLRTVEDAKASKSLKLSKMQKAGLLYYEDLASRVSKEEADAVTLIVKNTVRTFLFDALVTITGGFRRGKPMGHDIDFLITNPGPKEDDELLHKVVDLLKKQGLLLYEDIKESTFVEEQLPSRKIDAMDNFQKCFAILKLYQPGVDNSSYNTSKKSDMAEVKDWKAIRVDLVITPFEQYAYALLGWTGSKEFRRDLRRYAEEERGMILDNHALYDRKKRIFLKAGSEEEIFAHLGLDYVEPWERNA

SEQ ID NO: 1851 - DNA, 1182 bp, synthetic construct
  misc_feature 1..1182: note = Variant of terminal deoxynucleotidyl transferase
  source 1..1182: mol_type = other DNA
atgcaccatcatcatcatcatggcggtagcggccatccgccgagcaataccccggagggggaggtgccgagcgttatcgccgggaaggttagtcagtacagctgccagcgcaagaccacgctgaataactacaacaaaaagtttaccgacgcgctggagatcatggccgagaactacaaatttaaagagaacctgatcgcgtgtctggaagccaagcgcgccgcgagtattctgaaatatctgccgttcccggttaccagcatgaaagacatccagggtctgccgtgcattggcgaccaagttcgtgacgtgatcgaggagatcatcgaagagggcgagagcagccgtgttaaagaagttctcaatgacgagcgctacaaggcctttaagcagttcaccagcgtgttcggtgtgggcgtgaaaaccagcgaaaagtggtttcgtatgggcctccgtacggttgaagacgcaaaggccagtaagagtctgaagctgagcaagatgcagaaggcgggcttcctgtattacgaggatctggcgagccgcgttagtaaagaagaagccgatgccgttacgctcatcgtgaagaacacggtgcgtacctttctgattgatgcgctggtgaccatcaccggcggtttccgccgtggcaaacctatgggccacgacatcgactttctgatcacgaatccgggcccgaaagaggatgacgagctgctccacaaagtggttgatctgctcaagaagcaaggtctgctgctgtacgaagacatcaaagagagcacgttcgtggaggaacaactgccaagtcgcaaaatcgacgccatggacaacttccagaagtgcttcgccattctcaagctgtaccagccgggcgtggataacagcagctataacacgagtaagaagagtgacatggccgaggttaaggattggaaagcgattcgtgtggatctggtgatcacgccattcgagcagtacgcctatgcgctgctcggttggacgggcagcaaagaatttcgtcgcgatctgcgccgctatgcggaggaagagcgcggcatgatcctcgacaaccatgccctctacgaccgcaaaaagcgcatctttctgaaagcgggcagcgaagaagagattttcgcgcatctgggtctggattatgtggagccgtgggaacgcaacgcg

SEQ ID NO: 1852 - protein, 394 aa, synthetic construct
  REGION 1..394: note = Variant of terminal deoxynucleotidyl transferase
MHHHHHHGGSGHPPSNTPEGEVPSVIAGKVSQYSCQRKTTLNNYNKKFTDALEIMAENYKFKENLIACLEAKRAASILKYLPFPVTSMKDIQGLPCIGDQVRDVIEEIIEEGESSRVKEVLNDERYKAFKQFTSVFGVGVKTSEKWFRMGLRTVEDAKASKSLKLSKMQKAGFLYYEDLASRVSKEEADAVTLIVKNTVRTFLIDALVTITGGFRRGKPMGHDIDFLITNPGPKEDDELLHKVVDLLKKQGLLLYEDIKESTFVEEQLPSRKIDAMDNFQKCFAILKLYQPGVDNSSYNTSKKSDMAEVKDWKAIRVDLVITPFEQYAYALLGWTGSKEFRRDLRRYAEEERGMILDNHALYDRKKRIFLKAGSEEEIFAHLGLDYVEPWERNA

SEQ ID NO: 1853 - DNA, 1182 bp, synthetic construct
  misc_feature 1..1182: note = Variant of terminal deoxynucleotidyl transferase
  source 1..1182: mol_type = other DNA
atgcaccatcatcatcatcatggcggtagcggccatccgccgagcaataccccggagggggaggtgccgagcgttatcgccgggaaggttagtcagtacagctgccagcgcaagaccacgctgaataactacaacaaaaagtttaccgacgcgctggagatcatggccgagaactacaaatttaaagagaacctgatcgcgtgtctggaagccaagcgcgccgcgagtattctgaaatatctgccgttcgaggttaccagcatgaaagacatccagggtctgccgtgcattggcgaccaagttcgtgacgtgatcgaggagatcatcgaagagggcgagagcagccgtgttaaagaagttctcaatgacgagcgctacaaggcctttaagcagttcaccagcgtgttcggtgtgggcgtgaaaaccagcgaaaagtggtaccgtatgggcctccgtacggttgaagaggcaaaggccagtaagagtctgaagctgagcaagatgcagaaggcgggcttcctgtattacgaggatctggcgagccgcgttagtaaagaagaagccgatgccgttacgctcatcgtgaagaacacggtgcgtacctttctgctggatgcgctggtgaccatcaccggcggtttccgccgtggcaaacctatgggccacgacatcgactttctgatcacgaatccgggcccgaaagaggatgacgagctgctccacaaagtggttgatctgctcaagaagcaaggtctgctgctgtacgaagacatcaaagagagcacgttcgtggaggaacaactgccaagtcgcaaaatcgacgccatggacaacttccagaagtgcttcgccattctcaagctgtaccagccgggcgtggataacagcagctataacacgagtaagaagagtgacatggccgaggttaaggattggaaagcgattcgtgtggatctggtgatcacgccattcgagcagtacgcctatgcgctgctcggttggacgggcagcaaagaatttcgtcgcgatctgcgccgctatgcggaggaagagcgcggcatgatcctcgacaaccatgccctctacgaccgcaaaaagcgcatctttctgaaagcgggcagcgaagaagagattttcgcgcatctgggtctggattatgtggagccgtgggaacgcaacgcg

SEQ ID NO: 1854 - protein, 394 aa, synthetic construct
  REGION 1..394: note = Variant of terminal deoxynucleotidyl transferase
MHHHHHHGGSGHPPSNTPEGEVPSVIAGKVSQYSCQRKTTLNNYNKKFTDALEIMAENYKFKENLIACLEAKRAASILKYLPFEVTSMKDIQGLPCIGDQVRDVIEEIIEEGESSRVKEVLNDERYKAFKQFTSVFGVGVKTSEKWYRMGLRTVEEAKASKSLKLSKMQKAGFLYYEDLASRVSKEEADAVTLIVKNTVRTFLLDALVTITGGFRRGKPMGHDIDFLITNPGPKEDDELLHKVVDLLKKQGLLLYEDIKESTFVEEQLPSRKIDAMDNFQKCFAILKLYQPGVDNSSYNTSKKSDMAEVKDWKAIRVDLVITPFEQYAYALLGWTGSKEFRRDLRRYAEEERGMILDNHALYDRKKRIFLKAGSEEEIFAHLGLDYVEPWERNA

SEQ ID NO: 1855 - DNA, 1182 bp, synthetic construct
  misc_feature 1..1182: note = Variant of terminal deoxynucleotidyl transferase
  source 1..1182: mol_type = other DNA
atgcaccatcatcatcatcatggcggtagcggccatccgccgagcaataccccggagggggaggtgccgagcgttatcgcccgcccggttagtcagtacagctgccagcgcaagaccacgctgaataactacaacaaaaagtttaccgacgcgctggagatcatggccgagaactacaaatttaaagagaacctgatcgcgtgtctggaagccaagcgcgccgcgagtattctgaaatatctgccgttcccggttaccagcatgaaagacatccaaggtctgccgtgcattggtgaccaagttcgtgacgtgatcgaggagatcatcgaagagggcgagagcagccgtgttaaagaagttctcaatgacgagcgctacaaggcctttaagcagttcaccagcgtgttcggtgtgggcgtgaaaaccagcgaaaagtggtttcgtatgggcctccgtacggttgaagaggcaaaggccagtaagtcgctgaagctgagcaagatgcagaaggcgggcttcctgtattacgaggatctggcgagccgcgttagtaaggaagaagccgatgccgttacggtgatcgtgaaggaaacggtgcgtacctttctgccggatgcgctggtgaccatcaccggcggtttccgccgtggcaaacctatgggccacgacatcgactttctgatcacgaatccgggcccgaaagaggatgacgagctgctccacaaagtggttgatctgctcaagaagcaaggtctgctgctgtacgaagacatcaaagagagcacgttcgtggaggagcaactgccaagtcgcaaaatcgacgccatggacaacttccagaagtgcttcgccattctcaagctgtaccagccgggcgtggataacaatgcgtataatacgagtaagaagagtgacatggccgaggttaaggattggaaagcgattcgtgtggatctggtgatcacgccattcgagcagtacgcctatgcgctgctcggttggacgggcagcaaagaatttcgtcgcgatctgcgccgctatgcggaggaagagcgcggcatgatcctcgacaaccatgccctctacgaccgcaaaaagcgcatctttctgaaagcgggcagcgaagaagagattttcgcgcatctgggtctggattatgtggagccgtgggaacgcaacgcg

SEQ ID NO: 1856 - protein, 394 aa, synthetic construct
  REGION 1..394: note = Variant of terminal deoxynucleotidyl transferase
MHHHHHHGGSGHPPSNTPEGEVPSVIARPVSQYSCQRKTTLNNYNKKFTDALEIMAENYKFKENLIACLEAKRAASILKYLPFPVTSMKDIQGLPCIGDQVRDVIEEIIEEGESSRVKEVLNDERYKAFKQFTSVFGVGVKTSEKWFRMGLRTVEEAKASKSLKLSKMQKAGFLYYEDLASRVSKEEADAVTVIVKETVRTFLPDALVTITGGFRRGKPMGHDIDFLITNPGPKEDDELLHKVVDLLKKQGLLLYEDIKESTFVEEQLPSRKIDAMDNFQKCFAILKLYQPGVDNNAYNTSKKSDMAEVKDWKAIRVDLVITPFEQYAYALLGWTGSKEFRRDLRRYAEEERGMILDNHALYDRKKRIFLKAGSEEEIFAHLGLDYVEPWERNA

SEQ ID NO: 1857 - DNA, 1182 bp, synthetic construct
  misc_feature 1..1182: note = Variant of terminal deoxynucleotidyl transferase
  source 1..1182: mol_type = other DNA
atgcaccatcatcatcatcatggcggtagcggccatccgccgagcaataccccggagggggaggtgccgagcgttatcgcccgcaaggttagtcagtacagctgccagcgcaagaccacgctgaataactacaacaaaaagtttaccgacgcgctggagatcatggccgagaactacaaatttaaagagaacctgatcgcgtgtctggaagccaagcgcgccgcgagtattctgaaatatctgccgttcccggttaccagcatgaaagacatccaaggtctgccgtgcattaccgaccaagttcgtgacgtgatcgaggagatcatcgaagagggcgagagcagccgtgttaaagaagttctcaatgacgagcgctacaaggcctttaagcagttcaccagcgtgttcggtgtgggcgtgaaaaccagcgaaaagtggtttcgtatgggcctccgtacggttgaagaggcaaaggccagtaagagtctgaagctgagcaagatgcagaaggcgggcttcctgtattacgaggatctggcgagccgcgttagtaaggaagaagccgatgccgttacgctcatcgtgaagaacacggtgcgtacctttctgccggatgcgctggtgaccatcaccggcggtttccgccgtggcaaacctatgggccacgacatcgactttctgatcacgaatccgggcccgaaagaggatgacgagctgctccacaaagtggttgatctgctcaagaagcaaggtctgctgctgtacgaagacatcaaagagagcacgttcgtggaggaacaactgccaagtcgcaaaatcgacgccatggacaacttccagaagtgcttcgccattctcaagctgtaccagccgggcgtggataacagcagctataacacgagtaagaagagtgacatggccgaggttaaggattggaaagcgattcgtgtggatctggtgatcacgccattcgagcagtacgcctatgcgctgctcggttggacgggcagcaaagaatttcgtcgcgatctgcgccgctatgcggaggaagagcgcggcatgatcctcgacaaccatgccctctacgaccgcaaaaagcgcatctttctgaaagcgggcagcgaagaagagattttcgcgcatctgggtctggattatgtggagccgtgggaacgcaacgcg

SEQ ID NO: 1858 - protein, 394 aa, synthetic construct
  REGION 1..394: note = Variant of terminal deoxynucleotidyl transferase
MHHHHHHGGSGHPPSNTPEGEVPSVIARKVSQYSCQRKTTLNNYNKKFTDALEIMAENYKFKENLIACLEAKRAASILKYLPFPVTSMKDIQGLPCITDQVRDVIEEIIEEGESSRVKEVLNDERYKAFKQFTSVFGVGVKTSEKWFRMGLRTVEEAKASKSLKLSKMQKAGFLYYEDLASRVSKEEADAVTLIVKNTVRTFLPDALVTITGGFRRGKPMGHDIDFLITNPGPKEDDELLHKVVDLLKKQGLLLYEDIKESTFVEEQLPSRKIDAMDNFQKCFAILKLYQPGVDNSSYNTSKKSDMAEVKDWKAIRVDLVITPFEQYAYALLGWTGSKEFRRDLRRYAEEERGMILDNHALYDRKKRIFLKAGSEEEIFAHLGLDYVEPWERNA

SEQ ID NO: 1859 - DNA, 1182 bp, synthetic construct
  misc_feature 1..1182: note = Variant of terminal deoxynucleotidyl transferase
  source 1..1182: mol_type = other DNA
atgcaccatcatcatcatcatggcggtagcggccatccgccgagcaataccccggagggggaggtgccgagcgttatcgcccgcaaggttagtcagtacagctgccagcgcaagaccacgctgaataactacaacaaaaagtttaccgacgcgctggagatcatggccgagaactacaaatttaaagagaacctgatcgcgtgtctggaagccaagcgcgccgcgagtattctgaaatatctgccgttcccggttaccagcatgaaagacatccaaggtctgccgtgcattggtgaccaagttcgtgacgtgatcgaggagatcatcgaagagggcgagagcagccgtgttaaagaagttctcaatgacgagcgctacaaggcctttaagcagttcaccagcgtgttcggtgtgggcgtgaaaacctcggaaaagtggtttcgtatgggcctccgtacggttgaagaggcaaaggccagtaagagtctgaagctgagcaagatgcagaaggcgggcttcctgtattacgaggatctggcgagccgcgttagtaaagaagaagccgatgccgttacgctcatcgtgaagaacacggtgcgtacctttctgccggatgcgctggtgaccatcaccggcggtttccgccgtggcaaacctatgggccacgacatcgactttctgatcacgaatccgggcccgaaagaggatgacgagctgctccacaaagtggttgatctgctcaagaagcaaggtctgctgctgtacgaagacatcaaagagagcacgttcgtggaggggcaactgccaagtcgcaaaatcgacgccatggacaacttccagaagtgcttcgccattctcaagctgtaccagccgggcgtggataacagcagctataacacgagtaagaagagtgacatggccgaggttaaggattggaaagcgattcgtgtggatctggtgatcacgccattcgagcagtacgcctatgcgctgctcggttggacgggcagcaaagaatttcgtcgcgatctgcgccgctatgcggaggaagagcgcggcatgatcctcgacaaccatgccctctacgaccgcaaaaagcgcatctttctgaaagcgggcagcgaagaagagattttcgcgcatctgggtctggattatgtggagccgtgggaacgcaacgcg

SEQ ID NO: 1860 - protein, 394 aa, synthetic construct
  REGION 1..394: note = Variant of terminal deoxynucleotidyl transferase
MHHHHHHGGSGHPPSNTPEGEVPSVIARKVSQYSCQRKTTLNNYNKKFTDALEIMAENYKFKENLIACLEAKRAASILKYLPFPVTSMKDIQGLPCIGDQVRDVIEEIIEEGESSRVKEVLNDERYKAFKQFTSVFGVGVKTSEKWFRMGLRTVEEAKASKSLKLSKMQKAGFLYYEDLASRVSKEEADAVTLIVKNTVRTFLPDALVTITGGFRRGKPMGHDIDFLITNPGPKEDDELLHKVVDLLKKQGLLLYEDIKESTFVEGQLPSRKIDAMDNFQKCFAILKLYQPGVDNSSYNTSKKSDMAEVKDWKAIRVDLVITPFEQYAYALLGWTGSKEFRRDLRRYAEEERGMILDNHALYDRKKRIFLKAGSEEEIFAHLGLDYVEPWERNA

SEQ ID NO: 1861 - DNA, 1182 bp, synthetic construct
  misc_feature 1..1182: note = Variant of terminal deoxynucleotidyl transferase
  source 1..1182: mol_type = other DNA
atgcaccatcatcatcatcatggcggtagcggccatccgccgagcaataccccggagggggaggtgccgagcgttatcgcccgcaaggttagtcagtacagctgccagcgcaagaccacgctgaataactacaacaaaaagtttaccgacgcgctggagatcatggccgagaactacaaatttaaagagaacctgatcgcgtgtctggaagcccagcgcgccgcgagtattctgaaatatctgccgttcccggttaccagcatgaaagacatccaaggtctgccgtgcattggcgaccaagttcgtgacgtgatcgaggagatcatcgaagagggcgagagcagccgtgttaaagaagttctcaatgacgagcgctacaaggcctttaagcagttcaccagcgtgttcggtgtgggcgtgaaaaccagcgaaaagtggtttcgtatgggcctccgtacggttgaagaggcaaaggccagtaagagtctgaagctgagcaagatgcagaaggcgggcttcctgtattacgaggatctggcgagccgcgttagtaaagaagaagccgatgccgttacgctcatcgtgaagaacacggtgcgtacctttctgccggatgcgctggtgaccatcaccggcggtttccgccgtggcaaacctatgggccacgacatcgactttctgatcacgaatccgggcccgaaagaggatgacgagctgctccacaaagtggttgatctgctcaagaagcaaggtctgctgctgtacgaagacatcaaagagagcacgttcgtggaggaacaactgccaagtcgcaaaatcgacgccatggacaacttccagaagtgcttcgccattctcaagctgtaccagccgggcgtggataacagcagctataacacgagtaagaagagtgacatggccgaggttaaggattggaaagcgattcgtgtggatctggtgatcacgccattcgagcagtacgcctatgcgctgctcggttggacgggcagcaaagaatttcgtcgcgatctgcgccgctatgcggaggaagagcgcggcatgatcctcgacaaccatgccctctacgaccgcaaaaagcgcatctttctgaaagcgggcagcgaagaagagattttcgcgcatctgggtctggattatgtggagccgtgggaacgcaacgcg

SEQ ID NO: 1862 - protein, 394 aa, synthetic construct
  REGION 1..394: note = Variant of terminal deoxynucleotidyl transferase
MHHHHHHGGSGHPPSNTPEGEVPSVIARKVSQYSCQRKTTLNNYNKKFTDALEIMAENYKFKENLIACLEAQRAASILKYLPFPVTSMKDIQGLPCIGDQVRDVIEEIIEEGESSRVKEVLNDERYKAFKQFTSVFGVGVKTSEKWFRMGLRTVEEAKASKSLKLSKMQKAGFLYYEDLASRVSKEEADAVTLIVKNTVRTFLPDALVTITGGFRRGKPMGHDIDFLITNPGPKEDDELLHKVVDLLKKQGLLLYEDIKESTFVEEQLPSRKIDAMDNFQKCFAILKLYQPGVDNSSYNTSKKSDMAEVKDWKAIRVDLVITPFEQYAYALLGWTGSKEFRRDLRRYAEEERGMILDNHALYDRKKRIFLKAGSEEEIFAHLGLDYVEPWERNA

SEQ ID NO: 1863 - DNA, 1182 bp, synthetic construct
  misc_feature 1..1182: note = Variant of terminal deoxynucleotidyl transferase
  source 1..1182: mol_type = other DNA
atgcaccatcatcatcatcatggcggtagcggccatccgccgagcaataccccggagggggaggtgccgagcgttatcgcccgcaaggttagtcagtacagctgccagcgcaagaccacgctgaataactacaacaaaaagtttaccgacgcgctggagatcatggccgagaactacaaatttaaagagaacctgatcgcgtgtctggaagccaagcgcgccgcgagtattctgaaatatctgccgttcccggttaccagcatgaaagacatccaaggtctgccgtgcattggcgaccaagttcgtgacgtgatcgaggagatcatcgaagagggcgagagcagccgtgttaaagaagttctcaatgacgagcgctacaaggcctttaagcagttcaccagcgtgttcggtgtgggcgtgaaaaccagcgaaaagtggtttcgtatgggcctccgtacggttgaagaggcaaaggccagtaagagtctgaagctgagcaagatgcagaaggcgggcttcctgtattacgaggatctggcgagccgcgttagtaaagaagaagccgatgccgttacgctcatcgtgaagaacacggtgcgtacctttctgccggatgcgctggtgaccatcaccggcggtttccgccgtggcaaacctatgggccacgacatcgactttctgatcacgaatccgggcccgaaagaggatgacgagctgctccacaaagtggttgatctgctcaagaagcaaggtctgctgctgtacgaagacatcaaagagagcacgttcgtggaggaacaactgccaagtcgcaaaatcgacgccatggacaacttccagaagtgcttcgccattctcaagctgtaccagccgggcgtggataacagcagctataacacgagtaagaagagtgacatggccgaggttaaggattggaaagcgattcgtgtggatctggtgatcacgccattcgagcagtacgcctatgcgctgctcggttggacgggcagcaaagaatttcgtcgcgatctgaagcgctatgcggaggaagagcgcggcatgatcctcgacaaccatgccctctacgaccgcaaaaagcgcatctttctgaaagcgggcagcgaagaagagattttcgcgcatctgggtctggattatgtggagccgtgggaacgcaacgcg

SEQ ID NO: 1864 - protein, 394 aa, synthetic construct
  REGION 1..394: note = Variant of terminal deoxynucleotidyl transferase
MHHHHHHGGSGHPPSNTPEGEVPSVIARKVSQYSCQRKTTLNNYNKKFTDALEIMAENYKFKENLIACLEAKRAASILKYLPFPVTSMKDIQGLPCIGDQVRDVIEEIIEEGESSRVKEVLNDERYKAFKQFTSVFGVGVKTSEKWFRMGLRTVEEAKASKSLKLSKMQKAGFLYYEDLASRVSKEEADAVTLIVKNTVRTFLPDALVTITGGFRRGKPMGHDIDFLITNPGPKEDDELLHKVVDLLKKQGLLLYEDIKESTFVEEQLPSRKIDAMDNFQKCFAILKLYQPGVDNSSYNTSKKSDMAEVKDWKAIRVDLVITPFEQYAYALLGWTGSKEFRRDLKRYAEEERGMILDNHALYDRKKRIFLKAGSEEEIFAHLGLDYVEPWERNA

SEQ ID NO: 1865 - DNA, 1182 bp, synthetic construct
  misc_feature 1..1182: note = Variant of terminal deoxynucleotidyl transferase
  source 1..1182: mol_type = other DNA
atgcaccatcatcatcatcatggcggtagcggccatccgccgagcaataccccggagggggaggtgccgagcgttatcgcccgcaaggttagtcagtacagctgccagcgcaagaccacgctgaataactacaacaaaaagtttaccgacgcgctggagatcatggccgagaactacaaatttaaagagaacctgatcgcgtgtctggaagccaagcgcgccgcgagtattctgaaatatctgccgttcccggttaccagcatgaaagacatccaaggtctgccgtgcattggcgaccaagttcgtgacgtgatcgaggagatcatcgaagagggcgagagcagccgtgttaaagaagttctcaatgacgagcgctacaaggcctttaagcagttcaccagcgtgttcggtgtgggcgtgaaaaccagcgaaaagtggtttcgtatgggcctccgtacggttgaagaggcaaaggccagtaagagtctgaagctgagcaagatgcagaaggcgggcttcctgtattacgaggatctggcgagccgcgttagtaaagaagaagccgatgccgttacgctcatcgtgaagaacacggtgcgtacctttctgccggatgcgctggtgaccatcaccggcggtttccgccgtggcaaacctatgggccacgacgtggactttctgatcacgaatccgggcccgaaagaggatgacgagctgctccacaaagtggttgatctgctcaagaagcaaggtctgctgctgtacgaagacatcaaagagagcacgttcgtggaggaacaactgccaagtcgcaaaatcgacgccatggacaacttccagaagtgcttcgccattctcaagctgtaccagccgggcgtggataacagcagctataacacgagtaagaagagtgacatggccgaggttaaggattggaaagcgattcgtgtggatctggtgatcacgccattcgagcagtacgcctatgcgctgctcggttggacgggcagcaaagaatttcgtcgcgatctgcgccgctatgcggaggaagagcgcggcatgatcctcgacaaccatgccctctacgaccgcaaaaagcgcatctttctgaaagcgggcagcgaagaagagattttcgcgcatctgggtctggattatgtggagccgtgggaacgcaacgcg

SEQ ID NO: 1866 - protein, 394 aa, synthetic construct
  REGION 1..394: note = Variant of terminal deoxynucleotidyl transferase
MHHHHHHGGSGHPPSNTPEGEVPSVIARKVSQYSCQRKTTLNNYNKKFTDALEIMAENYKFKENLIACLEAKRAASILKYLPFPVTSMKDIQGLPCIGDQVRDVIEEIIEEGESSRVKEVLNDERYKAFKQFTSVFGVGVKTSEKWFRMGLRTVEEAKASKSLKLSKMQKAGFLYYEDLASRVSKEEADAVTLIVKNTVRTFLPDALVTITGGFRRGKPMGHDVDFLITNPGPKEDDELLHKVVDLLKKQGLLLYEDIKESTFVEEQLPSRKIDAMDNFQKCFAILKLYQPGVDNSSYNTSKKSDMAEVKDWKAIRVDLVITPFEQYAYALLGWTGSKEFRRDLRRYAEEERGMILDNHALYDRKKRIFLKAGSEEEIFAHLGLDYVEPWERNA

SEQ ID NO: 1867 - DNA, 1182 bp, synthetic construct
  misc_feature 1..1182: note = Variant of terminal deoxynucleotidyl transferase
  source 1..1182: mol_type = other DNA
atgcaccatcatcatcatcatggcggtagcggccatccgccgagcaataccccggagggggaggtgccgagcgttatcgcccgcaaggttagtcagtacagctgccagcgcaagaccacgctgaataactacaacaaaaagtttaccgacgcgctggagatcatggccgagaactacaaatttaaagagaacctgatcgcgtgtctggaagccaagcgcgccgcgagtattctgaaatatctgccgttcccggttaccagcatgaaagacatccaaggtctgccgtgcattggcgaccaagttcgtgacgtgatcgaggagatcatcgaagagggcgagagcagccgtgttaaagaagttctcaatgacgagcgctacaaggcctttaagcagttcaccagcgtgttcggtgtgggcgtgaaaaccagcgaaaagtggtttcgtatgggcctccgtacggttgaagaggcaaaggccagtaagagtctgaagctgagcaagatgcagaaggcgggcttcctgtattacgaggatctggcgagcaatgttagtaaagaagaagccgatgccgttacgctcatcgtgaagaacacggtgcgtacctttctgccggatgcgctggtgaccatcaccggcggtttccgccgtggcaaacctatgggccacgacatcgactttctgatcacgaatccgggcccgaaagaggatgacgagctgctccacaaagtggttgatctgctcaagaagcaaggtctgctgctgtacgaagacatcaaagagagcacgttcgtggaggaacaactgccaagtcgcaaaatcgacgccatggacaacttccagaagtgcttcgccattctcaagctgtaccagccgggcgtggataacagcagctataacacgagtaagaagagtgacatggccgaggttaaggattggaaagcgattcgtgtggatctggtgatcacgccattcgagcagtacgcctatgcgctgctcggttggacgggcagcaaagaatttcgtcgcgatctgcgccgctatgcggaggaagagcgcggcatgatcctcgacaaccatgccctctacgaccgcaaaaagcgcatctttctgaaagcgggcagcgaagaagagattttcgcgcatctgggtctggattatgtggagccgtgggaacgcaacgcg

SEQ ID NO: 1868 - protein, 394 aa, synthetic construct
  REGION 1..394: note = Variant of terminal deoxynucleotidyl transferase
MHHHHHHGGSGHPPSNTPEGEVPSVIARKVSQYSCQRKTTLNNYNKKFTDALEIMAENYKFKENLIACLEAKRAASILKYLPFPVTSMKDIQGLPCIGDQVRDVIEEIIEEGESSRVKEVLNDERYKAFKQFTSVFGVGVKTSEKWFRMGLRTVEEAKASKSLKLSKMQKAGFLYYEDLASNVSKEEADAVTLIVKNTVRTFLPDALVTITGGFRRGKPMGHDIDFLITNPGPKEDDELLHKVVDLLKKQGLLLYEDIKESTFVEEQLPSRKIDAMDNFQKCFAILKLYQPGVDNSSYNTSKKSDMAEVKDWKAIRVDLVITPFEQYAYALLGWTGSKEFRRDLRRYAEEERGMILDNHALYDRKKRIFLKAGSEEEIFAHLGLDYVEPWERNA

SEQ ID NO: 1869 - DNA, 1182 bp, synthetic construct
  misc_feature 1..1182: note = Variant of terminal deoxynucleotidyl transferase
  source 1..1182: mol_type = other DNA
atgcaccatcatcatcatcatggcggtagcggccatccgccgagcaataccccggagggggaggtgccgagcgttatcgcccgcccggttagtcagtacagctgccagcgcaagaccacgctgaataactacaacaaaaagtttaccgacgcgctggagatcatggccgagaactacaaatttaaagagaacctgatcgcgtgtctggaagccaagcgcgccgcgagtattctgaaatatctgccgttcccggttaccagcatgaaagacatccaaggtctgccgtgcattggcgaccaagttcgtgacgtgatcgaggagatcatcgaagagggcgagagcagccgtgttaaagaagttctcaatgacgagcgctacaaggcctttaagcagttcaccagcgtgttcggtgtgggcgtgaaaaccagcgaaaagtggtttcgtatgggcctccgtacggttgaagaggcaaaggccagtaagagtctgaagctgagcaagatgcagaaggcgggcttcctgtattacgaggatctggcgagccgcgttagtaaagaagaagccgatgccgttacgctcatcgtgaagaacacggtgcgtacctttctgccggatgcgctggtgaccatcaccggcggtttccgccgtggcaaacctatgggccacgacatcgactttctgatcacgaatccgggcccgaaagaggatgacgagctgctccacaaagtggttgatctgctcaagaagcaaggtctgctgctgtacgaagacatcaaagagagcacgttcgtggaggaacaactgccaagtcgcaaaatcgacgccatggacaacttccagaagtgcttcgccattctcaagctgtaccagccgggcgtggataacagcagctataacacgagtaagaagagtgacatggccgaggttaaggattggaaagcgattcgtgtggatctggtgatcacgccattcgagcagtacgcctatgcgctgctcggttggacgggcagcaaagaatttcgtcgcgatctgcgccgctatgcggaggaagagcgcggcatgatcctcgacaaccatgccctctacgaccgcaaaaagcgcatctttctgaaagcgggcagcgaagaagagattttcgcgcatctgggtctggattatgtggagccgtgggaacgcaacgcg

SEQ ID NO: 1870 - protein, 394 aa, synthetic construct; identical to SEQ ID NO: 1776
  REGION 1..394: note = Variant of terminal deoxynucleotidyl transferase

SEQ ID NO: 1871 - DNA, 1182 bp, synthetic construct
  misc_feature 1..1182: note = Variant of terminal deoxynucleotidyl transferase
  source 1..1182: mol_type = other DNA
atgcaccatcatcatcatcatggcggtagcggccatccgccgagcaataccccggagggggaggtgccgagcgttatcgcccgcaaggttagtcagtacagctgccagcgcaagaccacgctgaataactacaacaaaaagtttaccgacgcgctggagatcatggccgagaactacaaatttaaagagaacctgatcgcgtgtctggaagcctctcgcgccgcgagtattctgaaatatctgccgttcccggttaccagcatgaaagacatccaaggtctgccgtgcattggcgaccaagttcgtgacgtgatcgaggagatcatcgaagagggcgagagcagccgtgttaaagaagttctcaatgacgagcgctacaaggcctttaagcagttcaccagcgtgttcggtgtgggcgtgaaaaccagcgaaaagtggtttcgtatgggcctccgtacggttgaagaggcaaaggccagtaagagtctgaagctgagcaagatgcagaaggcgggcttcctgtattacgaggatctggcgagccgcgttagtaaagaagaagccgatgccgttacgctcatcgtgaagaacacggtgcgtacctttctgccggatgcgctggtgaccatcaccggcggtttccgccgtggcaaacctatgggccacgacatcgactttctgatcacgaatccgggcccgaaagaggatgacgagctgctccacaaagtggttgatctgctcaagaagcaaggtctgctgctgtacgaagacatcaaagagagcacgttcgtggaggaacaactgccaagtcgcaaaatcgacgccatggacaacttccagaagtgcttcgccattctcaagctgtaccagccgggcgtggataacagcagctataacacgagtaagaagagtgacatggccgaggttaaggattggaaagcgattcgtgtggatctggtgatcacgccattcgagcagtacgcctatgcgctgctcggttggacgggcagcaaagaatttcgtcgcgatctgcgccgctatgcggaggaagagcgcggcatgatcctcgacaaccatgccctctacgaccgcaaaaagcgcatctttctgaaagcgggcagcgaagaagagattttcgcgcatctgggtctggattatgtggagccgtgggaacgcaacgcg

SEQ ID NO: 1872 - protein, 394 aa, synthetic construct
  REGION 1..394: note = Variant of terminal deoxynucleotidyl transferase
MHHHHHHGGSGHPPSNTPEGEVPSVIARKVSQYSCQRKTTLNNYNKKFTDALEIMAENYKFKENLIACLEASRAASILKYLPFPVTSMKDIQGLPCIGDQVRDVIEEIIEEGESSRVKEVLNDERYKAFKQFTSVFGVGVKTSEKWFRMGLRTVEEAKASKSLKLSKMQKAGFLYYEDLASRVSKEEADAVTLIVKNTVRTFLPDALVTITGGFRRGKPMGHDIDFLITNPGPKEDDELLHKVVDLLKKQGLLLYEDIKESTFVEEQLPSRKIDAMDNFQKCFAILKLYQPGVDNSSYNTSKKSDMAEVKDWKAIRVDLVITPFEQYAYALLGWTGSKEFRRDLRRYAEEERGMILDNHALYDRKKRIFLKAGSEEEIFAHLGLDYVEPWERNA

SEQ ID NO: 1873 - DNA, 1182 bp, synthetic construct
  misc_feature 1..1182: note = Variant of terminal deoxynucleotidyl transferase
  source 1..1182: mol_type = other DNA
atgcaccatcatcatcatcatggcggtagcggccatccgccgagcaataccccggagggggaggtgccgagcgttatcgcccgcaaggttagtcagtacagctgccagcgcaagaccacgctgaataactacaacaaaaagtttaccgacgcgctggagatcatggccgagaactacaaatttaaagagaacctgatcgcgtgtctggaagccaagcgcgccgcgagtattctgaaatatctgccgttcccggttaccagcatgaaagacatccaaggtctgccgtgcattggcgaccaagttcgtgacgtgatcgaggagatcatcgaagagggcgagagcagccgtgttaaagaagttctcaatgacgagcgctacaaggcctttaagcagttcaccagcgtgttcggtgtgggcgtgaaaaccagcgaaaagtggtttcgtatgggcctccgtacggttgaagaggcaaaggccagtaagagtctgaagctgagcaagatgcagaaggcgggcttcctgtattacgaggatctggcgagctgggttagtaaagaagaagccgatgccgttacgctcatcgtgaagaacacggtgcgtacctttctgccggatgcgctggtgaccatcaccggcggtttccgccgtggcaaacctatgggccacgacatcgactttctgatcacgaatccgggcccgaaagaggatgacgagctgctccacaaagtggttgatctgctcaagaagcaaggtctgctgctgtacgaagacatcaaagagagcacgttcgtggaggaacaactgccaagtcgcaaaatcgacgccatggacaacttccagaagtgcttcgccattctcaagctgtaccagccgggcgtggataacagcagctataacacgagtaagaagagtgacatggccgaggttaaggattggaaagcgattcgtgtggatctggtgatcacgccattcgagcagtacgcctatgcgctgctcggttggacgggcagcaaagaatttcgtcgcgatctgcgccgctatgcggaggaagagcgcggcatgatcctcgacaaccatgccctctacgaccgcaaaaagcgcatctttctgaaagcgggcagcgaagaagagattttcgcgcatctgggtctggattatgtggagccgtgggaacgcaacgcg

SEQ ID NO: 1874 - protein, 394 aa, synthetic construct
  REGION 1..394: note = Variant of terminal deoxynucleotidyl transferase
MHHHHHHGGSGHPPSNTPEGEVPSVIARKVSQYSCQRKTTLNNYNKKFTDALEIMAENYKFKENLIACLEAKRAASILKYLPFPVTSMKDIQGLPCIGDQVRDVIEEIIEEGESSRVKEVLNDERYKAFKQFTSVFGVGVKTSEKWFRMGLRTVEEAKASKSLKLSKMQKAGFLYYEDLASWVSKEEADAVTLIVKNTVRTFLPDALVTITGGFRRGKPMGHDIDFLITNPGPKEDDELLHKVVDLLKKQGLLLYEDIKESTFVEEQLPSRKIDAMDNFQKCFAILKLYQPGVDNSSYNTSKKSDMAEVKDWKAIRVDLVITPFEQYAYALLGWTGSKEFRRDLRRYAEEERGMILDNHALYDRKKRIFLKAGSEEEIFAHLGLDYVEPWERNA

SEQ ID NO: 1875 - DNA, 1182 bp, synthetic construct
  misc_feature 1..1182: note = Variant of terminal deoxynucleotidyl transferase
  source 1..1182: mol_type = other DNA
atgcaccatcatcatcatcatggcggtagcggccatccgccgagcaataccccggagggggaggtgccgagcgttatcgcccgcaaggttagtcagtacagctgccagcgcaagaccacgctgaataactacaacaaaaagtttaccgacgcgctggagatcatggccgagaactacaaatttaaagagaacctgatcgcgtgtctggaagccaagcgcgccgcgagtattctgaaatatctgccgttcccggttaccagcatgaaagacatccaaggtctgccgtgcattggcgaccaagttcgtgacgtgatcgaggagatcatcgaagagggcgagagcagccgtgttaaagaagttctcaatgacgagcgctacaaggcctttaagcagttcaccagcgtgttcggtgtgggcgtgaaaaccagcgaaaagtggtttcgtatgggcctccgtacggttgaagaggcaaaggccagtaagagtctgaagctgagcaagatgcagaaggcgggcttcctgtattacgaggatctggcgagccaggttagtaaagaagaagccgatgccgttacgctcatcgtgaagaacacggtgcgtacctttctgccggatgcgctggtgaccatcaccggcggtttccgccgtggcaaacctatgggccacgacatcgactttctgatcacgaatccgggcccgaaagaggatgacgagctgctccacaaagtggttgatctgctcaagaagcaaggtctgctgctgtacgaagacatcaaagagagcacgttcgtggaggaacaactgccaagtcgcaaaatcgacgccatggacaacttccagaagtgcttcgccattctcaagctgtaccagccgggcgtggataacagcagctataacacgagtaagaagagtgacatggccgaggttaaggattggaaagcgattcgtgtggatctggtgatcacgccattcgagcagtacgcctatgcgctgctcggttggacgggcagcaaagaatttcgtcgcgatctgcgccgctatgcggaggaagagcgcggcatgatcctcgacaaccatgccctctacgaccgcaaaaagcgcatctttctgaaagcgggcagcgaagaagagattttcgcgcatctgggtctggattatgtggagccgtgggaacgcaacgcg

SEQ ID NO: 1876 - protein, 394 aa, synthetic construct
  REGION 1..394: note = Variant of terminal deoxynucleotidyl transferase
MHHHHHHGGSGHPPSNTPEGEVPSVIARKVSQYSCQRKTTLNNYNKKFTDALEIMAENYKFKENLIACLEAKRAASILKYLPFPVTSMKDIQGLPCIGDQVRDVIEEIIEEGESSRVKEVLNDERYKAFKQFTSVFGVGVKTSEKWFRMGLRTVEEAKASKSLKLSKMQKAGFLYYEDLASQVSKEEADAVTLIVKNTVRTFLPDALVTITGGFRRGKPMGHDIDFLITNPGPKEDDELLHKVVDLLKKQGLLLYEDIKESTFVEEQLPSRKIDAMDNFQKCFAILKLYQPGVDNSSYNTSKKSDMAEVKDWKAIRVDLVITPFEQYAYALLGWTGSKEFRRDLRRYAEEERGMILDNHALYDRKKRIFLKAGSEEEIFAHLGLDYVEPWERNA

SEQ ID NO: 1877 - DNA, 1182 bp, synthetic construct
  misc_feature 1..1182: note = Variant of terminal deoxynucleotidyl transferase
  source 1..1182: mol_type = other DNA
atgcaccatcatcatcatcatggcggtagcggccatccgccgagcaataccccggagggggaggtgccgagcgttatcgcccgcaaggttagtcagtacagctgccagcgcaagaccacgctgaataactacaacaaaaagtttaccgacgcgctggagatcatggccgagaactacaaatttaaagagaacctgatcgcgtgtctggaagccaagcgcgccgcgagtattctgaaatatctgccgttcccggttaccagcatgaaagacatccaaggtctgccgtgcattggcgaccaagttcgtgacgtgatcgaggagatcatcgaagagggcgagagcagccgtgttaaagaagttctcaatgacgagcgctacaaggcctttaagcagttcaccagcgtgttcggtgtgggcgtgaaaaccagcgaaaagtggtttcgtatgggcctccgtacggttgaagaggcaaaggccagtaagagtctgaagctgagcaagatgcagaaggcgggcttcctgtattacgaggatctggcgagctatgttagtaaagaagaagccgatgccgttacgctcatcgtgaagaacacggtgcgtacctttctgccggatgcgctggtgaccatcaccggcggtttccgccgtggcaaacctatgggccacgacatcgactttctgatcacgaatccgggcccgaaagaggatgacgagctgctccacaaagtggttgatctgctcaagaagcaaggtctgctgctgtacgaagacatcaaagagagcacgttcgtggaggaacaactgccaagtcgcaaaatcgacgccatggacaacttccagaagtgcttcgccattctcaagctgtaccagccgggcgtggataacagcagctataacacgagtaagaagagtgacatggccgaggttaaggattggaaagcgattcgtgtggatctggtgatcacgccattcgagcagtacgcctatgcgctgctcggttggacgggcagcaaagaatttcgtcgcgatctgcgccgctatgcggaggaagagcgcggcatgatcctcgacaaccatgccctctacgaccgcaaaaagcgcatctttctgaaagcgggcagcgaagaagagattttcgcgcatctgggtctggattatgtggagccgtgggaacgcaacgcg

SEQ ID NO: 1878 - protein, 394 aa, synthetic construct
  REGION 1..394: note = Variant of terminal deoxynucleotidyl transferase
MHHHHHHGGSGHPPSNTPEGEVPSVIARKVSQYSCQRKTTLNNYNKKFTDALEIMAENYKFKENLIACLEAKRAASILKYLPFPVTSMKDIQGLPCIGDQVRDVIEEIIEEGESSRVKEVLNDERYKAFKQFTSVFGVGVKTSEKWFRMGLRTVEEAKASKSLKLSKMQKAGFLYYEDLASYVSKEEADAVTLIVKNTVRTFLPDALVTITGGFRRGKPMGHDIDFLITNPGPKEDDELLHKVVDLLKKQGLLLYEDIKESTFVEEQLPSRKIDAMDNFQKCFAILKLYQPGVDNSSYNTSKKSDMAEVKDWKAIRVDLVITPFEQYAYALLGWTGSKEFRRDLRRYAEEERGMILDNHALYDRKKRIFLKAGSEEEIFAHLGLDYVEPWERNA

SEQ ID NO: 1879 - DNA, 1182 bp, synthetic construct
  misc_feature 1..1182: note = Variant of terminal deoxynucleotidyl transferase
  source 1..1182: mol_type = other DNA
atgcaccatcatcatcatcatggcggtagcggccatccgccgagcaataccccggagggggaggtgccgagcgttatcgcccgcaaggttagtcagtacagctgccagcgcaagaccacgctgaataactacaacaaaaagtttaccgacgcgctggagatcatggccgagaactacaaatttaaagagaacctgatcgcgtgtctggaagccgggcgcgccgcgagtattctgaaatatctgccgttcccggttaccagcatgaaagacatccaaggtctgccgtgcattggcgaccaagttcgtgacgtgatcgaggagatcatcgaagagggcgagagcagccgtgttaaagaagttctcaatgacgagcgctacaaggcctttaagcagttcaccagcgtgttcggtgtgggcgtgaaaaccagcgaaaagtggtttcgtatgggcctccgtacggttgaagaggcaaaggccagtaagagtctgaagctgagcaagatgcagaaggcgggcttcctgtattacgaggatctggcgagccgcgttagtaaagaagaagccgatgccgttacgctcatcgtgaagaacacggtgcgtacctttctgccggatgcgctggtgaccatcaccggcggtttccgccgtggcaaacctatgggccacgacatcgactttctgatcacgaatccgggcccgaaagaggatgacgagctgctccacaaagtggttgatctgctcaagaagcaaggtctgctgctgtacgaagacatcaaagagagcacgttcgtggaggaacaactgccaagtcgcaaaatcgacgccatggacaacttccagaagtgcttcgccattctcaagctgtaccagccgggcgtggataacagcagctataacacgagtaagaagagtgacatggccgaggttaaggattggaaagcgattcgtgtggatctggtgatcacgccattcgagcagtacgcctatgcgctgctcggttggacgggcagcaaagaatttcgtcgcgatctgcgccgctatgcggaggaagagcgcggcatgatcctcgacaaccatgccctctacgaccgcaaaaagcgcatctttctgaaagcgggcagcgaagaagagattttcgcgcatctgggtctggattatgtggagccgtgggaacgcaacgcg

SEQ ID NO: 1880 - protein, 394 aa, synthetic construct
  REGION 1..394: note = Variant of terminal deoxynucleotidyl transferase
MHHHHHHGGSGHPPSNTPEGEVPSVIARKVSQYSCQRKTTLNNYNKKFTDALEIMAENYKFKENLIACLEAGRAASILKYLPFPVTSMKDIQGLPCIGDQVRDVIEEIIEEGESSRVKEVLNDERYKAFKQFTSVFGVGVKTSEKWFRMGLRTVEEAKASKSLKLSKMQKAGFLYYEDLASRVSKEEADAVTLIVKNTVRTFLPDALVTITGGFRRGKPMGHDIDFLITNPGPKEDDELLHKVVDLLKKQGLLLYEDIKESTFVEEQLPSRKIDAMDNFQKCFAILKLYQPGVDNSSYNTSKKSDMAEVKDWKAIRVDLVITPFEQYAYALLGWTGSKEFRRDLRRYAEEERGMILDNHALYDRKKRIFLKAGSEEEIFAHLGLDYVEPWERNA

SEQ ID NO: 1881 - DNA, 1182 bp, synthetic construct
  misc_feature 1..1182: note = Variant of terminal deoxynucleotidyl transferase
  source 1..1182: mol_type = other DNA
atgcaccatcatcatcatcatggcggtagcggccatccgccgagcaataccccggagggggaggtgccgagcgttatcgcccgcaaggttagtcagtacagctgccagcgcaagaccacgctgaataactacaacaaaaagtttaccgacgcgctggagatcatggccgagaactacaaatttaaagagaacctgatcgcgtgtctggaagccaagcgcgccgcgagtattctgaaatatctgccgttcccggttaccagcatgaaagacatccaaggtctgccgtgcattggcgaccaagttcgtgacgtgatcgaggagatcatcgaagagggcgagagcagccgtgttaaagaagttctcaatgacgagcgctacaaggcctttaagcagttcaccagcgtgttcggtgtgggcgtgaaaaccagcgaaaagtggtttcgtatgggcctccgtacggttgaagaggcaaaggccagtaagagtctgaagctgagcaagatgcagaaggcgggcttcctgtattacgaggatctggcgagccgcgttagtaaagaagaagccgatgccgttacgctcatcgtgaagaacacggtgcgtacctttctgccggatgcgctggtgaccatcaccggcggtttccgccgtggcaaacctatgggccacgacatcgactttctgatcacgaatccgggcccgaaagaggatgacgagctgctccacaaagtggttgatctgctcaagaagcaaggtctgctgctgtacgaagacatcaaagagagcacgttcgtggaggaacaactgccaagtcgcaaaatcgacgccatggacaacttccagaagtgcttcgccattctcaagctgtaccagccgggcgtggataacagcagctataacacgagtaagaagagtgacatggccgaggttaaggattggaaagcgattcgtgtggatctggtgatcacgccattcgagcagtacgcctatgcgctgctcggttggacgggcagcggggaatttcgtcgcgatctgcgccgctatgcggaggaagagcgcggcatgatcctcgacaaccatgccctctacgaccgcaaaaagcgcatctttctgaaagcgggcagcgaagaagagattttcgcgcatctgggtctggattatgtggagccgtgggaacgcaacgcg

SEQ ID NO: 1882 - protein, 394 aa, synthetic construct
  REGION 1..394: note = Variant of terminal deoxynucleotidyl transferase
MHHHHHHGGSGHPPSNTPEGEVPSVIARKVSQYSCQRKTTLNNYNKKFTDALEIMAENYKFKENLIACLEAKRAASILKYLPFPVTSMKDIQGLPCIGDQVRDVIEEIIEEGESSRVKEVLNDERYKAFKQFTSVFGVGVKTSEKWFRMGLRTVEEAKASKSLKLSKMQKAGFLYYEDLASRVSKEEADAVTLIVKNTVRTFLPDALVTITGGFRRGKPMGHDIDFLITNPGPKEDDELLHKVVDLLKKQGLLLYEDIKESTFVEEQLPSRKIDAMDNFQKCFAILKLYQPGVDNSSYNTSKKSDMAEVKDWKAIRVDLVITPFEQYAYALLGWTGSGEFRRDLRRYAEEERGMILDNHALYDRKKRIFLKAGSEEEIFAHLGLDYVEPWERNA

SEQ ID NO: 1883 - DNA, 1182 bp, synthetic construct
  misc_feature 1..1182: note = Variant of terminal deoxynucleotidyl transferase
  source 1..1182: mol_type = other DNA
atgcaccatcatcatcatcatggcggtagcggccatccgccgagcaataccccggagggggaggtgccgagcgttatcgcccgcaaggttagtcagtacagctgccagcgcaagaccacgctgaataactacaacaaaaagtttaccgacgcgctggagatcatggccgagaactacaaatttaaagagaacctgatcgcgtgtctggaagccaagcgcgccgcgagtattctgaaatatctgccgttcccggttaccagcatgaaagacatccaaggtctgccgtgcattggcgaccaagttcgtgacgtgatcgaggagatcatcgaagagggcgagagcagccgtgttaaagaagttctcaatgacgagcgctacaaggcctttaagcagttcaccagcgtgttcggtgtgggcgtgaaaaccagcgaaaagtggtttcgtatgggcctccgtacggttgaagaggcaaaggccagtaagagtctgaagctgagcaagatgcagaaggcgggcttcctgtattacgaggatctggcgagccgcgttagtaaagaagaagccgatgccgttacgctcatcgtgaagaacacggtgcgtacctttctgccggatgcgctggtgaccatcaccggcggtttccgccgtggcaaacctatgggccacgacatcgactttctgatcacgaatccgggcccgaaagaggatgacgagctgctccacaaagtggttgatctgctcaagaagcaaggtctgctgctgtacgaagacatcaaagagagcacgttcgtggaggaacaactgccaagtcgcaaaatcgacgccatggacaacttccagaagtgcttcgccattctcaagctgtaccagccgggcgtggataacagcagctataacacgagtaagaagagtgacatggccgaggttaaggattggaaagcgattcgtgtggatctggtgatcacgccattcgagcagtacgcctatgcgctgctcggttggacgggcagcaaagaatttcgtcgcgatctgattcgctatgcggaggaagagcgcggcatgatcctcgacaaccatgccctctacgaccgcaaaaagcgcatctttctgaaagcgggcagcgaagaagagattttcgcgcatctgggtctggattatgtggagccgtgggaacgcaacgcg

SEQ ID NO: 1884 - protein, 394 aa, synthetic construct
  REGION 1..394: note = Variant of terminal deoxynucleotidyl transferase
MHHHHHHGGSGHPPSNTPEGEVPSVIARKVSQYSCQRKTTLNNYNKKFTDALEIMAENYKFKENLIACLEAKRAASILKYLPFPVTSMKDIQGLPCIGDQVRDVIEEIIEEGESSRVKEVLNDERYKAFKQFTSVFGVGVKTSEKWFRMGLRTVEEAKASKSLKLSKMQKAGFLYYEDLASRVSKEEADAVTLIVKNTVRTFLPDALVTITGGFRRGKPMGHDIDFLITNPGPKEDDELLHKVVDLLKKQGLLLYEDIKESTFVEEQLPSRKIDAMDNFQKCFAILKLYQPGVDNSSYNTSKKSDMAEVKDWKAIRVDLVITPFEQYAYALLGWTGSKEFRRDLIRYAEEERGMILDNHALYDRKKRIFLKAGSEEEIFAHLGLDYVEPWERNA

SEQ ID NO: 1885 - DNA, 1182 bp, synthetic construct
  misc_feature 1..1182: note = Variant of terminal deoxynucleotidyl transferase
  source 1..1182: mol_type = other DNA
atgcaccatcatcatcatcatggcggtagcggccatccgccgagcaataccccggagggggaggtgccgagcgttatcgcccgcaaggttagtcagtacagctgccagcgcaagaccacgctgaataactacaacaaaaagtttaccgacgcgctggagatcatggccgagaactacacgtttaaagagaacctgatcgcgtgtctggaagccaagcgcgccgcgagtattctgaaatatctgccgttcccggttaccagcatgaaagacatccaaggtctgccgtgcattggcgaccaagttcgtgacgtgatcgaggagatcatcgaagagggcgagagcagccgtgttaaagaagttctcaatgacgagcgctacaaggcctttaagcagttcaccagcgtgttcggtgtgggcgtgaaaaccagcgaaaagtggtttcgtatgggcctccgtacggttgaagaggcaaaggccagtaagagtctgaagctgagcaagatgcagaaggcgggcttcctgtattacgaggatctggcgagccgcgttagtaaagaagaagccgatgccgttacgctcatcgtgaagaacacggtgcgtacctttctgccggatgcgctggtgaccatcaccggcggtttccgccgtggcaaacctatgggccacgacatcgactttctgatcacgaatccgggcccgaaagaggatgacgagctgctccacaaagtggttgatctgctcaagaagcaaggtctgctgctgtacgaagacatcaaagagagcacgttcgtggaggaacaactgccaagtcgcaaaatcgacgccatggacaacttccagaagtgcttcgccattctcaagctgtaccagccgggcgtggataacagcagctataacacgagtaagaagagtgacatggccgaggttaaggattggaaagcgattcgtgtggatctggtgatcacgccattcgagcagtacgcctatgcgctgctcggttggacgggcagcaaagaatttcgtcgcgatctgcgccgctatgcggaggaagagcgcggcatgatcctcgacaaccatgccctctacgaccgcaaaaagcgcatctttctgaaagcgggcagcgaagaagagattttcgcgcatctgggtctggattatgtggagccgtgggaacgcaacgcg

SEQ ID NO: 1886 - protein, 394 aa, synthetic construct
  REGION 1..394: note = Variant of terminal deoxynucleotidyl transferase
MHHHHHHGGSGHPPSNTPEGEVPSVIARKVSQYSCQRKTTLNNYNKKFTDALEIMAENYTFKENLIACLEAKRAASILKYLPFPVTSMKDIQGLPCIGDQVRDVIEEIIEEGESSRVKEVLNDERYKAFKQFTSVFGVGVKTSEKWFRMGLRTVEEAKASKSLKLSKMQKAGFLYYEDLASRVSKEEADAVTLIVKNTVRTFLPDALVTITGGFRRGKPMGHDIDFLITNPGPKEDDELLHKVVDLLKKQGLLLYEDIKESTFVEEQLPSRKIDAMDNFQKCFAILKLYQPGVDNSSYNTSKKSDMAEVKDWKAIRVDLVITPFEQYAYALLGWTGSKEFRRDLRRYAEEERGMILDNHALYDRKKRIFLKAGSEEEIFAHLGLDYVEPWERNA

SEQ ID NO: 1887 - DNA, 1182 bp, synthetic construct
  misc_feature 1..1182: note = Variant of terminal deoxynucleotidyl transferase
  source 1..1182: mol_type = other DNA
atgcaccatcatcatcatcatggcggtagcggccatccgccgagcaataccccggagggggaggtgccgagcgttatcgcccgcaaggttagtcagtacagctgccagcgcaagaccacgctgaataactacaacaaaaagtttaccgacgcgctggagatcatggccgagaactacaaatttaaagagaacctgatcgcgtgtctggaagccaagcgcgccgcgagtattctgaaatatctgccgttcccggttaccagcatgaaagacatccaaggtctgccgtgcattggcgaccaagttcgtgacgtgatcgaggagatcatcgaagagggcgagagcagccgtgttaaagaagttctcaatgacgagcgctacaaggcctttaagcagttcaccagcgtgttcggtgtgggcgtgaaaaccagcgaaaagtggtttcgtatgggcctccgtacggttgaagaggcaaaggccagtaagagtctgaagctgagcaagatgcagaaggcgggcttcctgtattacgaggatctggcgagctttgttagtaaagaagaagccgatgccgttacgctcatcgtgaagaacacggtgcgtacctttctgccggatgcgctggtgaccatcaccggcggtttccgccgtggcaaacctatgggccacgacatcgactttctgatcacgaatccgggcccgaaagaggatgacgagctgctccacaaagtggttgatctgctcaagaagcaaggtctgctgctgtacgaagacatcaaagagagcacgttcgtggaggaacaactgccaagtcgcaaaatcgacgccatggacaacttccagaagtgcttcgccattctcaagctgtaccagccgggcgtggataacagcagctataacacgagtaagaagagtgacatggccgaggttaaggattggaaagcgattcgtgtggatctggtgatcacgccattcgagcagtacgcctatgcgctgctcggttggacgggcagcaaagaatttcgtcgcgatctgcgccgctatgcggaggaagagcgcggcatgatcctcgacaaccatgccctctacgaccgcaaaaagcgcatctttctgaaagcgggcagcgaagaagagattttcgcgcatctgggtctggattatgtggagccgtgggaacgcaacgcg

SEQ ID NO: 1888 - protein, 394 aa, synthetic construct
  REGION 1..394: note = Variant of terminal deoxynucleotidyl transferase
MHHHHHHGGSGHPPSNTPEGEVPSVIARKVSQYSCQRKTTLNNYNKKFTDALEIMAENYKFKENLIACLEAKRAASILKYLPFPVTSMKDIQGLPCIGDQVRDVIEEIIEEGESSRVKEVLNDERYKAFKQFTSVFGVGVKTSEKWFRMGLRTVEEAKASKSLKLSKMQKAGFLYYEDLASFVSKEEADAVTLIVKNTVRTFLPDALVTITGGFRRGKPMGHDIDFLITNPGPKEDDELLHKVVDLLKKQGLLLYEDIKESTFVEEQLPSRKIDAMDNFQKCFAILKLYQPGVDNSSYNTSKKSDMAEVKDWKAIRVDLVITPFEQYAYALLGWTGSKEFRRDLRRYAEEERGMILDNHALYDRKKRIFLKAGSEEEIFAHLGLDYVEPWERNA

SEQ ID NO: 1889 - DNA, 1182 bp, synthetic construct
  misc_feature 1..1182: note = Variant of terminal deoxynucleotidyl transferase
  source 1..1182: mol_type = other DNA
atgcaccatcatcatcatcatggcggtagcggccatccgccgagcaataccccggagggggaggtgccgagcgttatcgcccgcaaggttagtcagtacagctgccagcgcaagaccacgctgaataactacaacaaaaagtttaccgacgcgctggagatcatggccgagaactacaaatttaaagagaacctgatcgcgtgtctggaagccaagcgcgccgcgagtattctgaaatatctgccgttcccggttaccagcatgaaagacatccaaggtctgccgtgcattggcgaccaagttcgtgacgtgatcgaggagatcatcgaagagggcgagagcagccgtgttaaagaagttctcaatgacgagcgctacaaggcctttaagcagttcaccagcgtgttcggtgtgggcgtgaaaaccagcgaaaagtggtttcgtatgggcctccgtacggttgaagaggcaaaggccagtaagagtctgaagctgagcaagatgcagaaggcgggcttcctgtattacgaggatctggcgagccgcgttagtaaagaagaagccgatgccgttacgctcatcgtgaagaacacggtgcgtacctttctgccggatgcgctggtgaccatcaccggcggtttccgccgtggcaaacctatgggccacgacactgactttctgatcacgaatccgggcccgaaagaggatgacgagctgctccacaaagtggttgatctgctcaagaagcaaggtctgctgctgtacgaagacatcaaagagagcacgttcgtggaggaacaactgccaagtcgcaaaatcgacgccatggacaacttccagaagtgcttcgccattctcaagctgtaccagccgggcgtggataacagcagctataacacgagtaagaagagtgacatggccgaggttaaggattggaaagcgattcgtgtggatctggtgatcacgccattcgagcagtacgcctatgcgctgctcggttggacgggcagcaaagaatttcgtcgcgatctgcgccgctatgcggaggaagagcgcggcatgatcctcgacaaccatgccctctacgaccgcaaaaagcgcatctttctgaaagcgggcagcgaagaagagattttcgcgcatctgggtctggattatgtggagccgtgggaacgcaacgcg

SEQ ID NO: 1890 - protein, 394 aa, synthetic construct
  REGION 1..394: note = Variant of terminal deoxynucleotidyl transferase
MHHHHHHGGSGHPPSNTPEGEVPSVIARKVSQYSCQRKTTLNNYNKKFTDALEIMAENYKFKENLIACLEAKRAASILKYLPFPVTSMKDIQGLPCIGDQVRDVIEEIIEEGESSRVKEVLNDERYKAFKQFTSVFGVGVKTSEKWFRMGLRTVEEAKASKSLKLSKMQKAGFLYYEDLASRVSKEEADAVTLIVKNTVRTFLPDALVTITGGFRRGKPMGHDTDFLITNPGPKEDDELLHKVVDLLKKQGLLLYEDIKESTFVEEQLPSRKIDAMDNFQKCFAILKLYQPGVDNSSYNTSKKSDMAEVKDWKAIRVDLVITPFEQYAYALLGWTGSKEFRRDLRRYAEEERGMILDNHALYDRKKRIFLKAGSEEEIFAHLGLDYVEPWERNA

SEQ ID NO: 1891 - DNA, 1182 bp, synthetic construct
  misc_feature 1..1182: note = Variant of terminal deoxynucleotidyl transferase
  source 1..1182: mol_type = other DNA
atgcaccatcatcatcatcatggcggtagcggccatccgccgagcaataccccggagggggaggtgccgagcgttatcgcccgcaaggttagtcagtacagctgccagcgcaagaccacgctgaataactacaacaaaaagtttaccgacgcgctggagatcatggccgagaactacaaatttaaagagaacctgatcgcgtgtctggaagccaagcgcgccgcgagtattctgaaatatctgccgttcccggttaccagcatgaaagacatccaaggtctgccgtgcattggcgaccaagttcgtgacgtgatcgaggagatcatcgaagagggcgagagcagccgtgttaaagaagttctcaatgacgagcgctacaaggcctttaagcagttcaccagcgtgttcggtgtgggcgtgaaaaccagcgaaaagtggtttcgtatgggcctccgtacggttgaagaggcaaaggccagtaagagtctgaagctgagcaagatgcagaaggcgggcttcctgtattacgaggatctggcgagccgcgttagtaaagaagaagccgatgccgttacgctcatcgtgaagaacacggtgcgtacctttctgccggatgcgctggtgaccatcaccggcggtttccgccgtggcaaacctatgggccacgacatcgactttctgatcacgaatccgggcccgaaagaggatgacgagctgctccacaaagtggttgatctgctcaagaagcaaggtctgctgctgtacgaagacatcaaagagagcacgttcgtggaggaacaactgccaagtcgcaaaatcgacgccatggacaacttccagaagtgcttcgccattctcaagctgtaccagccgggcgtggataacagcagctataacacgagtaagaagagtgacatggccgaggttaaggattggaaagcgattcgtgtggatctggtgatcacgccattcgagcagtacgcctatgcgctgctcggttggacgggcagcgctgaatttcgtcgcgatctgcgccgctatgcggaggaagagcgcggcatgatcctcgacaaccatgccctctacgaccgcaaaaagcgcatctttctgaaagcgggcagcgaagaagagattttcgcgcatctgggtctggattatgtggagccgtgggaacgcaacgcg

SEQ ID NO: 1892 - protein, 394 aa, synthetic construct
  REGION 1..394: note = Variant of terminal deoxynucleotidyl transferase
MHHHHHHGGSGHPPSNTPEGEVPSVIARKVSQYSCQRKTTLNNYNKKFTDALEIMAENYKFKENLIACLEAKRAASILKYLPFPVTSMKDIQGLPCIGDQVRDVIEEIIEEGESSRVKEVLNDERYKAFKQFTSVFGVGVKTSEKWFRMGLRTVEEAKASKSLKLSKMQKAGFLYYEDLASRVSKEEADAVTLIVKNTVRTFLPDALVTITGGFRRGKPMGHDIDFLITNPGPKEDDELLHKVVDLLKKQGLLLYEDIKESTFVEEQLPSRKIDAMDNFQKCFAILKLYQPGVDNSSYNTSKKSDMAEVKDWKAIRVDLVITPFEQYAYALLGWTGSAEFRRDLRRYAEEERGMILDNHALYDRKKRIFLKAGSEEEIFAHLGLDYVEPWERNA

SEQ ID NO: 1893 - DNA, 1182 bp, synthetic construct
  misc_feature 1..1182: note = Variant of terminal deoxynucleotidyl transferase
  source 1..1182: mol_type = other DNA
atgcaccatcatcatcatcatggcggtagcggccatccgccgagcaataccccggagggggaggtgccgagcgttatcgcccgcaaggttagtcagtacagctgccagcgcaagaccacgctgaataactacaacaaaaagtttaccgacgcgctggagatcatggccgagaactacaaatttaaagagaacctgatcgcgtgtctggaagccaagcgcgccgcgagtattctgaaatatctgccgttcgaggttaccagcatgaaagacatccaaggtctgccgtgcattggcgaccaagttcgtgacgtgatcgaggagatcatcgaagagggcgagagcagccgtgttaaagaagttctcaatgacgagcgctacaaggcctttaagcagttcaccagcgtgttcggtgtgggcgtgaaaaccagcgaaaagtggtttcgtatgggcctccgtacggttgaagaagcaaaggccagtaagagtctgaagctgagcaagatgcagaaggcgggcttcctgtattacgaggatctggcgagccgcgttagtaaagaagaagccgatgccgttacgctcatcgtgaagaacacggtgcgtacctttctgccggatgcgctggtgaccatcaccggcggtttccgccgtggcaaacctatgggccacgacatcgactttctgatcacgaatccgggcccgaaagaggatgacgagctgctccacaaagtggttgatctgctcaagaagcaaggtctgctgctgtacgaagacatcaaagagagcacgttcgtggaggaacaactgccaagtcgcaaaatcgacgccatggacaacttccagaagtgcttcgccattctcaagctgtaccagccgggcgtggataacagcagctataacacgagtaagaagagtgacatggccgaggttaaggattggaaagcgattcgtgtggatctggtgatcacgccattcgagcagtacgcctatgcgctgctcggttggacgggcagcaaagaatttcgtcgcgatctgcgccgctatgcggaggaagagcgcggcatgatcctcgacaaccatgccctctacgaccgcaaaaagcgcatctttctgaaagcgggcagcgaagaagagattttcgcgcatctgggtctggattatgtggagccgtgggaacgcaacgcg

SEQ ID NO: 1894 - protein, 394 aa, synthetic construct; identical to SEQ ID NO: 1842
  REGION 1..394: note = Variant of terminal deoxynucleotidyl transferase

SEQ ID NO: 1895 - DNA, 1182 bp, synthetic construct
  misc_feature 1..1182: note = Variant of terminal deoxynucleotidyl transferase
  source 1..1182: mol_type = other DNA
atgcaccatcatcatcatcatggcggtagcggccatccgccgagcaataccccggagggggaggtgccgagcgttatcgcccgcaaggttagtcagtacagctgccagcgcaagaccacgctgaataactacaacaaaaagtttaccgacgcgctggagatcatggccgagaactacaaatttaaagagaacctgatcgcgtgtctggaagccaagcgcgccgcgagtattctgaaatatctgccgttcccggttaccagcatgaaagacatccaaggtctgccgtgcattggcgaccaagttcgtgacgtgatcgaggagatcatcgaagagggcgagagcagccgtgttaaagaagttctcaatgacgagcgctacaaggcctttaagcagttcaccagcgtgttcggtgtgggcgtgaaaaccagcgaaaagtggtttcgtatgggcctccgtacggttgaagaggcaaaggccagtaagagtctgaagctgagcaagatgcagaaggcgggcttcctgtattacgaggatctggcgagcagtgttagtaaagaagaagccgatgccgttacgctcatcgtgaagaacacggtgcgtacctttctgccggatgcgctggtgaccatcaccggcggtttccgccgtggcaaacctatgggccacgacatcgactttctgatcacgaatccgggcccgaaagaggatgacgagctgctccacaaagtggttgatctgctcaagaagcaaggtctgctgctgtacgaagacatcaaagagagcacgttcgtggaggaacaactgccaagtcgcaaaatcgacgccatggacaacttccagaagtgcttcgccattctcaagctgtaccagccgggcgtggataacagcagctataacacgagtaagaagagtgacatggccgaggttaaggattggaaagcgattcgtgtggatctggtgatcacgccattcgagcagtacgcctatgcgctgctcggttggacgggcagcaaagaatttcgtcgcgatctgcgccgctatgcggaggaagagcgcggcatgatcctcgacaaccatgccctctacgaccgcaaaaagcgcatctttctgaaagcgggcagcgaagaagagattttcgcgcatctgggtctggattatgtggagccgtgggaacgcaacgcg

SEQ ID NO: 1896 - protein, 394 aa, synthetic construct
  REGION 1..394: note = Variant of terminal deoxynucleotidyl transferase
MHHHHHHGGSGHPPSNTPEGEVPSVIARKVSQYSCQRKTTLNNYNKKFTDALEIMAENYKFKENLIACLEAKRAASILKYLPFPVTSMKDIQGLPCIGDQVRDVIEEIIEEGESSRVKEVLNDERYKAFKQFTSVFGVGVKTSEKWFRMGLRTVEEAKASKSLKLSKMQKAGFLYYEDLASSVSKEEADAVTLIVKNTVRTFLPDALVTITGGFRRGKPMGHDIDFLITNPGPKEDDELLHKVVDLLKKQGLLLYEDIKESTFVEEQLPSRKIDAMDNFQKCFAILKLYQPGVDNSSYNTSKKSDMAEVKDWKAIRVDLVITPFEQYAYALLGWTGSKEFRRDLRRYAEEERGMILDNHALYDRKKRIFLKAGSEEEIFAHLGLDYVEPWERNA

SEQ ID NO: 1897 - DNA, 1182 bp, synthetic construct
  misc_feature 1..1182: note = Variant of terminal deoxynucleotidyl transferase
  source 1..1182: mol_type = other DNA
atgcaccatcatcatcatcatggcggtagcggccatccgccgagcaataccccggagggggaggtgccgagcgttatcgcccgcaaggttagtcagtacagctgccagcgcaagaccacgctgaataactacaacaaaaagtttaccgacgcgctggagatcatggccgagaactacaaatttaaagagaacctgatcgcgtgtctggaagccaagcgcgccgcgagtattctgaaatatctgccgttcccggttaccagcatgaaagacatccaaggtctgccgtgcattggcgaccaagttcgtgacgtgatcgaggagatcatcgaagagggcgagagcagccgtgttaaagaagttctcaatgacgagcgctacaaggcctttaagcagttcaccagcgtgttcggtgtgggcgtgaaaaccagcgaaaagtggtttcgtatgggcctccgtacggttgaagaggcaaaggccagtaagagtctgaagctgagcaagatgcagaaggcgggcttcctgtattacgaggatctggcgagcgcggttagtaaagaagaagccgatgccgttacgctcatcgtgaagaacacggtgcgtacctttctgccggatgcgctggtgaccatcaccggcggtttccgccgtggcaaacctatgggccacgacatcgactttctgatcacgaatccgggcccgaaagaggatgacgagctgctccacaaagtggttgatctgctcaagaagcaaggtctgctgctgtacgaagacatcaaagagagcacgttcgtggaggaacaactgccaagtcgcaaaatcgacgccatggacaacttccagaagtgcttcgccattctcaagctgtaccagccgggcgtggataacagcagctataacacgagtaagaagagtgacatggccgaggttaaggattggaaagcgattcgtgtggatctggtgatcacgccattcgagcagtacgcctatgcgctgctcggttggacgggcagcaaagaatttcgtcgcgatctgcgccgctatgcggaggaagagcgcggcatgatcctcgacaaccatgccctctacgaccgcaaaaagcgcatctttctgaaagcgggcagcgaagaagagattttcgcgcatctgggtctggattatgtggagccgtgggaacgcaacgcg

SEQ ID NO: 1898 - protein, 394 aa, synthetic construct
  REGION 1..394: note = Variant of terminal deoxynucleotidyl transferase
MHHHHHHGGSGHPPSNTPEGEVPSVIARKVSQYSCQRKTTLNNYNKKFTDALEIMAENYKFKENLIACLEAKRAASILKYLPFPVTSMKDIQGLPCIGDQVRDVIEEIIEEGESSRVKEVLNDERYKAFKQFTSVFGVGVKTSEKWFRMGLRTVEEAKASKSLKLSKMQKAGFLYYEDLASAVSKEEADAVTLIVKNTVRTFLPDALVTITGGFRRGKPMGHDIDFLITNPGPKEDDELLHKVVDLLKKQGLLLYEDIKESTFVEEQLPSRKIDAMDNFQKCFAILKLYQPGVDNSSYNTSKKSDMAEVKDWKAIRVDLVITPFEQYAYALLGWTGSKEFRRDLRRYAEEERGMILDNHALYDRKKRIFLKAGSEEEIFAHLGLDYVEPWERNA

SEQ ID NO: 1899 - DNA, 1182 bp, synthetic construct
  misc_feature 1..1182: note = Variant of terminal deoxynucleotidyl transferase
  source 1..1182: mol_type = other DNA
atgcaccatcatcatcatcatggcggtagcggccatccgccgagcaataccccggagggggaggtgccgagcgttatcgcccgcaaggttagtcagtacagctgccagcgcaagaccacgctgaataactacaacaaaaagtttaccgacgcgctggagatcatggccgagaactacaaatttaaagagaacctgatcgcgtgtctggaagccaagcgcgccgcgagtattctgaaatatctgccgttcccggttaccagcatgaaagacatccaaggtctgccgtgcattggcgaccaagttcgtgacgtgatcgaggagatcatcgaagagggcgagagcagccgtgttaaagaagttctcaatgacgagcgctacaaggcctttaagcagttcaccagcgtgttcggtgtgggcgtgaaaaccagcgaaaagtggtttcgtatgggcctccgtacggttgaagaggcaaaggccagtaagagtctgaagctgagcaagatgcagaaggcgggcttcctgtattacgaggatctggcgagccgcgttagtaaagaagaagccgatgccgttacgctcatcgtgaagaacacggtgcgtacctttctgccggatgcgctggtgaccatcaccggcggtttccgccgtggcaaacctatgggccacgacgctgactttctgatcacgaatccgggcccgaaagaggatgacgagctgctccacaaagtggttgatctgctcaagaagcaaggtctgctgctgtacgaagacatcaaagagagcacgttcgtggaggaacaactgccaagtcgcaaaatcgacgccatggacaacttccagaagtgcttcgccattctcaagctgtaccagccgggcgtggataacagcagctataacacgagtaagaagagtgacatggccgaggttaaggattggaaagcgattcgtgtggatctggtgatcacgccattcgagcagtacgcctatgcgctgctcggttggacgggcagcaaagaatttcgtcgcgatctgcgccgctatgcggaggaagagcgcggcatgatcctcgacaaccatgccctctacgaccgcaaaaagcgcatctttctgaaagcgggcagcgaagaagagattttcgcgcatctgggtctggattatgtggagccgtgggaacgcaacgcg

SEQ ID NO: 1900 - protein, 394 aa, synthetic construct
  REGION 1..394: note = Variant of terminal deoxynucleotidyl transferase
MHHHHHHGGSGHPPSNTPEGEVPSVIARKVSQYSCQRKTTLNNYNKKFTDALEIMAENYKFKENLIACLEAKRAASILKYLPFPVTSMKDIQGLPCIGDQVRDVIEEIIEEGESSRVKEVLNDERYKAFKQFTSVFGVGVKTSEKWFRMGLRTVEEAKASKSLKLSKMQKAGFLYYEDLASRVSKEEADAVTLIVKNTVRTFLPDALVTITGGFRRGKPMGHDADFLITNPGPKEDDELLHKVVDLLKKQGLLLYEDIKESTFVEEQLPSRKIDAMDNFQKCFAILKLYQPGVDNSSYNTSKKSDMAEVKDWKAIRVDLVITPFEQYAYALLGWTGSKEFRRDLRRYAEEERGMILDNHALYDRKKRIFLKAGSEEEIFAHLGLDYVEPWERNA

SEQ ID NO: 1901 - DNA, 1182 bp, synthetic construct
  misc_feature 1..1182: note = Variant of terminal deoxynucleotidyl transferase
  source 1..1182: mol_type = other DNA
atgcaccatcatcatcatcatggcggtagcggccatccgccgagcaataccccggagggggaggtgccgagcgttatcgcccgcaaggttagtcagtacagctgccagcgcaagaccacgctgaataactacaacaaaaagtttaccgacgcgctggagatcatggccgagaactacaaatttaaagagaacctgatcgcgtgtctggaagccaagcgcgccgcgagtattctgaaatatctgccgttcccggttaccagcatgaaagacatccaaggtctgccgtgcattggcgaccaagttcgtgacgtgatcgaggagatcatcgaagagggcgagagcagccgtgttaaagaagttctcaatgacgagcgctacaaggcctttaagcagttcaccagcgtgttcggtgtgggcgtgaaaaccagcgaaaagtggtttcgtatgggcctccgtacggttgaagaggcaaaggccagtaagagtctgaagctgagcaagatgcagaaggcgggcttcctgtattacgaggatctggcgagccgcgttagtaaagaagaagccgatgccgttacgctcatcgtgaagaacacggtgcgtacctttctgccggatgcgctggtgaccatcgtgggcggtttccgccgtggcaaacctatgggccacgacatcgactttctgatcacgaatccgggcccgaaagaggatgacgagctgctccacaaagtggttgatctgctcaagaagcaaggtctgctgctgtacgaagacatcaaagagagcacgttcgtggaggaacaactgccaagtcgcaaaatcgacgccatggacaacttccagaagtgcttcgccattctcaagctgtaccagccgggcgtggataacagcagctataacacgagtaagaagagtgacatggccgaggttaaggattggaaagcgattcgtgtggatctggtgatcacgccattcgagcagtacgcctatgcgctgctcggttggacgggcagcaaagaatttcgtcgcgatctgcgccgctatgcggaggaagagcgcggcatgatcctcgacaaccatgccctctacgaccgcaaaaagcgcatctttctgaaagcgggcagcgaagaagagattttcgcgcatctgggtctggattatgtggagccgtgggaacgcaacgcg

SEQ ID NO: 1902 - protein, 394 aa, synthetic construct
  REGION 1..394: note = Variant of terminal deoxynucleotidyl transferase
MHHHHHHGGSGHPPSNTPEGEVPSVIARKVSQYSCQRKTTLNNYNKKFTDALEIMAENYKFKENLIACLEAKRAASILKYLPFPVTSMKDIQGLPCIGDQVRDVIEEIIEEGESSRVKEVLNDERYKAFKQFTSVFGVGVKTSEKWFRMGLRTVEEAKASKSLKLSKMQKAGFLYYEDLASRVSKEEADAVTLIVKNTVRTFLPDALVTIVGGFRRGKPMGHDIDFLITNPGPKEDDELLHKVVDLLKKQGLLLYEDIKESTFVEEQLPSRKIDAMDNFQKCFAILKLYQPGVDNSSYNTSKKSDMAEVKDWKAIRVDLVITPFEQYAYALLGWTGSKEFRRDLRRYAEEERGMILDNHALYDRKKRIFLKAGSEEEIFAHLGLDYVEPWERNA

SEQ ID NO: 1903 - DNA, 1182 bp, synthetic construct
  misc_feature 1..1182: note = Variant of terminal deoxynucleotidyl transferase
  source 1..1182: mol_type = other DNA
atgcaccatcatcatcatcatggcggtagcggccatccgccgagcaataccccggagggggaggtgccgagcgttatcgcccgcaaggttagtcagtacagctgccagcgcaagaccacgctgaataactacaacaaaaagtttaccgacgcgctggagatcatggccgagaactacaaatttaaagagaacctgatcgcgtgtctggaagccaagcgcgccgcgagtattctgaaatatctgccgttcccggttaccagcatgaaagacatccaaggtctgccgtgcattggcgaccaagttcgtgacgtgatcgaggagatcatcgaagagggcgagagcagccgtgttaaagaagttctcaatgacgagcgctacaaggcctttaagcagttcaccagcgtgttcggtgtgggcgtgaaaaccagcgaaaagtggtttcgtatgggcctccgtacggttgaagaggcaaaggccagtaagagtctgaagctgagcaagatgcagaaggcgggcttcctgtattacgaggatctggcgagccgcgttagtaaagaagaagccgatgccgttacgctcatcgtgaagaacacggtgcgtacctttctgccggatgcgctggtgaccatcgcgggcggtttccgccgtggcaaacctatgggccacgacatcgactttctgatcacgaatccgggcccgaaagaggatgacgagctgctccacaaagtggttgatctgctcaagaagcaaggtctgctgctgtacgaagacatcaaagagagcacgttcgtggaggaacaactgccaagtcgcaaaatcgacgccatggacaacttccagaagtgcttcgccattctcaagctgtaccagccgggcgtggataacagcagctataacacgagtaagaagagtgacatggccgaggttaaggattggaaagcgattcgtgtggatctggtgatcacgccattcgagcagtacgcctatgcgctgctcggttggacgggcagcaaagaatttcgtcgcgatctgcgccgctatgcggaggaagagcgcggcatgatcctcgacaaccatgccctctacgaccgcaaaaagcgcatctttctgaaagcgggcagcgaagaagagattttcgcgcatctgggtctggattatgtggagccgtgggaacgcaacgcg

SEQ ID NO: 1904 - protein, 394 aa, synthetic construct
  REGION 1..394: note = Variant of terminal deoxynucleotidyl transferase
MHHHHHHGGSGHPPSNTPEGEVPSVIARKVSQYSCQRKTTLNNYNKKFTDALEIMAENYKFKENLIACLEAKRAASILKYLPFPVTSMKDIQGLPCIGDQVRDVIEEIIEEGESSRVKEVLNDERYKAFKQFTSVFGVGVKTSEKWFRMGLRTVEEAKASKSLKLSKMQKAGFLYYEDLASRVSKEEADAVTLIVKNTVRTFLPDALVTIAGGFRRGKPMGHDIDFLITNPGPKEDDELLHKVVDLLKKQGLLLYEDIKESTFVEEQLPSRKIDAMDNFQKCFAILKLYQPGVDNSSYNTSKKSDMAEVKDWKAIRVDLVITPFEQYAYALLGWTGSKEFRRDLRRYAEEERGMILDNHALYDRKKRIFLKAGSEEEIFAHLGLDYVEPWERNA

SEQ ID NO: 1905 - DNA, 1182 bp, synthetic construct
  misc_feature 1..1182: note = Variant of terminal deoxynucleotidyl transferase
  source 1..1182: mol_type = other DNA
atgcaccatcatcatcatcatggcggtagcggccatccgccgagcaataccccggagggggaggtgccgagcgttatcgcccgcaaggttagtcagtacagctgccagcgcaagaccacgctgaataactacaacaaaaagtttaccgacgcgctggagatcatggccgagaactacaaatttaaagagaacctgatcgcgtgtctggaagccaagcgcgccgcgagtattctgaaatatctgccgttcccggttaccagcatgaaagacatccaaggtctgccgtgcattggcgaccaagttcgtgacgtgatcgaggagatcatcgaagagggcgagagcagccgtgttaaagaagttctcaatgacgagcgctacaaggcctttaagcagttcaccagcgtgttcggtgtgggcgtgaaaaccagcgaaaagtggtaccgtatgggcctccgtacggttgaagaggcaaaggccagtaagagtctgaagctgagcaagatgcagaaggcgggcttcctgtattacgaggatctggcgagccgcgttagtaaagaagaagccgatgccgttacgctcatcgtgaagaacacggtgcgtacctttctgccggatgcgctggtgaccatcaccggcggtttccgccgtggcaaacctatgggccacgacatcgactttctgatcacgaatccgggcccgaaagaggatgacgagctgctccacaaagtggttgatctgctcaagaagcaaggtctgctgctgtacgaagacatcaaagagagcacgttcgtggaggaacaactgccaagtcgcaaaatcgacgccatggacaacttccagaagtgcttcgccattctcaagctgtaccagccgggcgtggataacagcagctataacacgagtaagaagagtgacatggccgaggttaaggattggaaagcgattcgtgtggatctggtgatcacgccattcgagcagtacgcctatgcgctgctcggttggacgggcagcaaagaatttcgtcgcgatctgcgccgctatgcggaggaagagcgcggcatgatcctcgacaaccatgccctctacgaccgcaaaaagcgcatctttctgaaagcgggcagcgaagaagagattttcgcgcatctgggtctggattatgtggagccgtgggaacgcaacgcg

SEQ ID NO: 1906 - protein, 394 aa, synthetic construct
  REGION 1..394: note = Variant of terminal deoxynucleotidyl transferase
MHHHHHHGGSGHPPSNTPEGEVPSVIARKVSQYSCQRKTTLNNYNKKFTDALEIMAENYKFKENLIACLEAKRAASILKYLPFPVTSMKDIQGLPCIGDQVRDVIEEIIEEGESSRVKEVLNDERYKAFKQFTSVFGVGVKTSEKWYRMGLRTVEEAKASKSLKLSKMQKAGFLYYEDLASRVSKEEADAVTLIVKNTVRTFLPDALVTITGGFRRGKPMGHDIDFLITNPGPKEDDELLHKVVDLLKKQGLLLYEDIKESTFVEEQLPSRKIDAMDNFQKCFAILKLYQPGVDNSSYNTSKKSDMAEVKDWKAIRVDLVITPFEQYAYALLGWTGSKEFRRDLRRYAEEERGMILDNHALYDRKKRIFLKAGSEEEIFAHLGLDYVEPWERNA

SEQ ID NO: 1907 - DNA, 1182 bp, synthetic construct
  misc_feature 1..1182: note = Variant of terminal deoxynucleotidyl transferase
  source 1..1182: mol_type = other DNA
atgcaccatcatcatcatcatggcggtagcggccatccgccgagcaataccccggagggggaggtgccgagcgttatcgcccgcaaggttagtcagtacagctgccagcgcaagaccacgctgaataactacaacaaaaagtttaccgacgcgctggagatcatggccgagaactacaaatttaaagagaacctgatcgcgtgtctggaagccaagcgcgccgcgagtattctgaaatatctgccgttcccggttaccagcatgaaagacatccaaggtctgccgtgcattggcgaccaagttcgtgacgtgatcgaggagatcatcgaagagggcgagagcagccgtgttaaagaagttctcaatgacgagcgctacaaggcctttaagcagttcaccagcgtgttcggtgtgggcgtgaaaaccagcgaaaagtggttccgtatgggcctccgtacggttgaagaggcaaaggccagtaagagtctgaagctgagcaagatgcagaaggcgggcttcctgtattacgaggatctggcgagccgcgttagtaaagaagaagccgatgccgttacgctcatcgtgaagaacacggtgcgtacctttctgccggatgcgctggtgaccatcaccggcggtttccgccgtggcaaacctatgggccacgacatcgactttctgatcacgaatccgggcccgaaagaggatgacgagctgctccacaaagtggttgatctgctcaagaagcaaggtctgctgctgtacgaagacatcaaagagagcacgttcgtggaggaacaactgccaagtcgcaaaatcgacgccatggacaacttccagaagtgcttcgccattctcaagctgtaccgcccgggcgtggataacagcagctataacacgagtaagaagagtgacatggccgaggttaaggattggaaagcgattcgtgtggatctggtgatcacgccattcgagcagtacgcctatgcgctgctcggttggacgggcagcaaagaatttcgtcgcgatctgcgccgctatgcggaggaagagcgcggcatgatcctcgacaaccatgccctctacgaccgcaaaaagcgcatctttctgaaagcgggcagcgaagaagagattttcgcgcatctgggtctggattatgtggagccgtgggaacgcaacgcg

SEQ ID NO: 1908 - protein, 394 aa, synthetic construct
  REGION 1..394: note = Variant of terminal deoxynucleotidyl transferase
MHHHHHHGGSGHPPSNTPEGEVPSVIARKVSQYSCQRKTTLNNYNKKFTDALEIMAENYKFKENLIACLEAKRAASILKYLPFPVTSMKDIQGLPCIGDQVRDVIEEIIEEGESSRVKEVLNDERYKAFKQFTSVFGVGVKTSEKWFRMGLRTVEEAKASKSLKLSKMQKAGFLYYEDLASRVSKEEADAVTLIVKNTVRTFLPDALVTITGGFRRGKPMGHDIDFLITNPGPKEDDELLHKVVDLLKKQGLLLYEDIKESTFVEEQLPSRKIDAMDNFQKCFAILKLYRPGVDNSSYNTSKKSDMAEVKDWKAIRVDLVITPFEQYAYALLGWTGSKEFRRDLRRYAEEERGMILDNHALYDRKKRIFLKAGSEEEIFAHLGLDYVEPWERNA

SEQ ID NO: 1909 - DNA, 1182 bp, synthetic construct
  misc_feature 1..1182: note = Variant of terminal deoxynucleotidyl transferase
  source 1..1182: mol_type = other DNA
atgcaccatcatcatcatcatggcggtagcggccatccgccgagcaataccccggagggggaggtgccgagcgttatcgcccgcaaggttagtcagtacagctgccagcgcaagaccacgctgaataactacaacaaaaagtttaccgacgcgctggagatcatggccgagaactacaaatttaaagagaacctgatcgcgtgtctggaagcctggcgcgccgcgagtattctgaaatatctgccgttcccggttaccagcatgaaagacatccaaggtctgccgtgcattggcgaccaagttcgtgacgtgatcgaggagatcatcgaagagggcgagagcagccgtgttaaagaagttctcaatgacgagcgctacaaggcctttaagcagttcaccagcgtgttcggtgtgggcgtgaaaaccagcgaaaagtggtttcgtatgggcctccgtacggttgaagaggcaaaggccagtaagagtctgaagctgagcaagatgcagaaggcgggcttcctgtattacgaggatctggcgagccgcgttagtaaagaagaagccgatgccgttacgctcatcgtgaagaacacggtgcgtacctttctgccggatgcgctggtgaccatcaccggcggtttccgccgtggcaaacctatgggccacgacatcgactttctgatcacgaatccgggcccgaaagaggatgacgagctgctccacaaagtggttgatctgctcaagaagcaaggtctgctgctgtacgaagacatcaaagagagcacgttcgtggaggaacaactgccaagtcgcaaaatcgacgccatggacaacttccagaagtgcttcgccattctcaagctgtaccagccgggcgtggataacagcagctataacacgagtaagaagagtgacatggccgaggttaaggattggaaagcgattcgtgtggatctggtgatcacgccattcgagcagtacgcctatgcgctgctcggttggacgggcagcaaagaatttcgtcgcgatctgcgccgctatgcggaggaagagcgcggcatgatcctcgacaaccatgccctctacgaccgcaaaaagcgcatctttctgaaagcgggcagcgaagaagagattttcgcgcatctgggtctggattatgtggagccgtgggaacgcaacgcg

SEQ ID NO: 1910 - protein, 394 aa, synthetic construct
  REGION 1..394: note = Variant of terminal deoxynucleotidyl transferase
MHHHHHHGGSGHPPSNTPEGEVPSVIARKVSQYSCQRKTTLNNYNKKFTDALEIMAENYKFKENLIACLEAWRAASILKYLPFPVTSMKDIQGLPCIGDQVRDVIEEIIEEGESSRVKEVLNDERYKAFKQFTSVFGVGVKTSEKWFRMGLRTVEEAKASKSLKLSKMQKAGFLYYEDLASRVSKEEADAVTLIVKNTVRTFLPDALVTITGGFRRGKPMGHDIDFLITNPGPKEDDELLHKVVDLLKKQGLLLYEDIKESTFVEEQLPSRKIDAMDNFQKCFAILKLYQPGVDNSSYNTSKKSDMAEVKDWKAIRVDLVITPFEQYAYALLGWTGSKEFRRDLRRYAEEERGMILDNHALYDRKKRIFLKAGSEEEIFAHLGLDYVEPWERNA

SEQ ID NO: 1911 - DNA, 1182 bp, synthetic construct
  misc_feature 1..1182: note = Variant of terminal deoxynucleotidyl transferase
  source 1..1182: mol_type = other DNA
atgcaccatcatcatcatcatggcggtagcggccatccgccgagcaataccccggagggggaggtgccgagcgttatcgcccgcaaggttagtcagtacagctgccagcgcaagaccacgctgaataactacaacaaaaagtttaccgacgcgctggagatcatggccgagaactacaaatttaaagagaacctgatcgcgtgtctggaagccaagcgcgccgcgagtattctgaaatatctgccgttcccggttaccagcatgaaagacatccaaggtctgccgtgcattggcgaccaagttcgtgacgtgatcgaggagatcatcgaagagggcgagagcagccgtgttaaagaagttctcaatgacgagcgctacaaggcctttaagcagttcaccagcgtgttcggtgtgggcgtgaaaaccagcgaaaagtggtttcgtatgggcctccgtacggttgaagaggcaaaggccagtaagagtctgaagctgagcaagatgcagaaggcgggcttcctgtattacgaggatctggcgagccgcgttagtaaagaagaagccgatgccgttacgctcatcgtgaagaacacggtgcgtacctttctgccggatgcgctggtgaccatcaccggcggtttccgccgtggcaaaccttatggccacgacatcgactttctgatcacgaatccgggcccgaaagaggatgacgagctgctccacaaagtggttgatctgctcaagaagcaaggtctgctgctgtacgaagacatcaaagagagcacgttcgtggaggaacaactgccaagtcgcaaaatcgacgccatggacaacttccagaagtgcttcgccattctcaagctgtaccagccgggcgtggataacagcagctataacacgagtaagaagagtgacatggccgaggttaaggattggaaagcgattcgtgtggatctggtgatcacgccattcgagcagtacgcctatgcgctgctcggttggacgggcagcaaagaatttcgtcgcgatctgcgccgctatgcggaggaagagcgcggcatgatcctcgacaaccatgccctctacgaccgcaaaaagcgcatctttctgaaagcgggcagcgaagaagagattttcgcgcatctgggtctggattatgtggagccgtgggaacgcaacgcg

SEQ ID NO: 1912 - protein, 394 aa, synthetic construct
  REGION 1..394: note = Variant of terminal deoxynucleotidyl transferase
MHHHHHHGGSGHPPSNTPEGEVPSVIARKVSQYSCQRKTTLNNYNKKFTDALEIMAENYKFKENLIACLEAKRAASILKYLPFPVTSMKDIQGLPCIGDQVRDVIEEIIEEGESSRVKEVLNDERYKAFKQFTSVFGVGVKTSEKWFRMGLRTVEEAKASKSLKLSKMQKAGFLYYEDLASRVSKEEADAVTLIVKNTVRTFLPDALVTITGGFRRGKPYGHDIDFLITNPGPKEDDELLHKVVDLLKKQGLLLYEDIKESTFVEEQLPSRKIDAMDNFQKCFAILKLYQPGVDNSSYNTSKKSDMAEVKDWKAIRVDLVITPFEQYAYALLGWTGSKEFRRDLRRYAEEERGMILDNHALYDRKKRIFLKAGSEEEIFAHLGLDYVEPWERNA

SEQ ID NO: 1913 - DNA, 1182 bp, synthetic construct
  misc_feature 1..1182: note = Variant of terminal deoxynucleotidyl transferase
  source 1..1182: mol_type = other DNA
atgcaccatcatcatcatcatggcggtagcggccatccgccgagcaataccccggagggggaggtgccgagcgttatcgcccgcaaggttagtcagtacagctgccagcgcaagaccacgctgaataactacaacaaaaagtttaccgacgcgctggagatcatggccgagaactacaaatttaaagagaacctgatcgcgtgtctggaagccaagcgcgccgcgagtattctgaaatatctgccgttcccggttaccagcatgaaagacatccaaggtctgccgtgcattggcgaccaagttcgtgacgtgatcgaggagatcatcgaagagggcgagagcagccgtgttaaagaagttctcaatgacgagcgctacaaggcctttaagcagttcaccagcgtgttcggtgtgggcgtgaaaaccagcgaaaagtggtttcgtatgggcctccgtacggttgaagaggcaaaggccagtaagagtctgaagctgagcaagatgcagaaggcgggcttcctgtattacgaggatctggcgagccgcgttagtaaagaagaagccgatgccgttacgctcatcgtgaagaacacggtgcgtacctttctgccggatgcgctggtgaccatcaccggcggtttccgccgtggcaaacctttgggccacgacatcgactttctgatcacgaatccgggcccgaaagaggatgacgagctgctccacaaagtggttgatctgctcaagaagcaaggtctgctgctgtacgaagacatcaaagagagcacgttcgtggaggaacaactgccaagtcgcaaaatcgacgccatggacaacttccagaagtgcttcgccattctcaagctgtaccagccgggcgtggataacagcagctataacacgagtaagaagagtgacatggccgaggttaaggattggaaagcgattcgtgtggatctggtgatcacgccattcgagcagtacgcctatgcgctgctcggttggacgggcagcaaagaatttcgtcgcgatctgcgccgctatgcggaggaagagcgcggcatgatcctcgacaaccatgccctctacgaccgcaaaaagcgcatctttctgaaagcgggcagcgaagaagagattttcgcgcatctgggtctggattatgtggagccgtgggaacgcaacgcg

SEQ ID NO: 1914 - protein, 394 aa, synthetic construct
  REGION 1..394: note = Variant of terminal deoxynucleotidyl transferase
MHHHHHHGGSGHPPSNTPEGEVPSVIARKVSQYSCQRKTTLNNYNKKFTDALEIMAENYKFKENLIACLEAKRAASILKYLPFPVTSMKDIQGLPCIGDQVRDVIEEIIEEGESSRVKEVLNDERYKAFKQFTSVFGVGVKTSEKWFRMGLRTVEEAKASKSLKLSKMQKAGFLYYEDLASRVSKEEADAVTLIVKNTVRTFLPDALVTITGGFRRGKPLGHDIDFLITNPGPKEDDELLHKVVDLLKKQGLLLYEDIKESTFVEEQLPSRKIDAMDNFQKCFAILKLYQPGVDNSSYNTSKKSDMAEVKDWKAIRVDLVITPFEQYAYALLGWTGSKEFRRDLRRYAEEERGMILDNHALYDRKKRIFLKAGSEEEIFAHLGLDYVEPWERNA

SEQ ID NO: 1915 - DNA, 1182 bp, synthetic construct
  misc_feature 1..1182: note = Variant of terminal deoxynucleotidyl transferase
  source 1..1182: mol_type = other DNA
atgcaccatcatcatcatcatggcggtagcggccatccgccgagcaataccccggagggggaggtgccgagcgttatcgcccgcaaggttagtcagtacagctgccagcgcaagaccacgctgaataactacaacaaaaagtttaccgacgcgctggagatcatggccgagaactacaaatttaaagagaacctgatcgcgtgtctggaagccaagcgcgccgcgagtattctgaaatatctgccgttcccggttaccagcatgaaagacatccaaggtctgccgtgcattggcgaccaagttcgtgacgtgatcgaggagatcatcgaagagggcgagagcagccgtgttaaagaagttctcaatgacgagcgctacaaggcctttaagcagttcaccagcgtgttcggtgtgggcgtgaaaaccagcgaaaagtggtttcgtatgggcctccgtacggttgaagaggcaaaggccagtaagagtctgaagctgagcaagatgcagaaggcgggcttcctgtattacgaggatctggcgagccgcgttagtaaagaagaagccgatgccgttacgctcatcgtgaagaacacggtgcgtacctttctgccggatgcgctggtgaccatcaccggcggtttccgccgtggcaaaccttcgggccacgacatcgactttctgatcacgaatccgggcccgaaagaggatgacgagctgctccacaaagtggttgatctgctcaagaagcaaggtctgctgctgtacgaagacatcaaagagagcacgttcgtggaggaacaactgccaagtcgcaaaatcgacgccatggacaacttccagaagtgcttcgccattctcaagctgtaccagccgggcgtggataacagcagctataacacgagtaagaagagtgacatggccgaggttaaggattggaaagcgattcgtgtggatctggtgatcacgccattcgagcagtacgcctatgcgctgctcggttggacgggcagcaaagaatttcgtcgcgatctgcgccgctatgcggaggaagagcgcggcatgatcctcgacaaccatgccctctacgaccgcaaaaagcgcatctttctgaaagcgggcagcgaagaagagattttcgcgcatctgggtctggattatgtggagccgtgggaacgcaacgcg

SEQ ID NO: 1916 - protein, 394 aa, synthetic construct
  REGION 1..394: note = Variant of terminal deoxynucleotidyl transferase
MHHHHHHGGSGHPPSNTPEGEVPSVIARKVSQYSCQRKTTLNNYNKKFTDALEIMAENYKFKENLIACLEAKRAASILKYLPFPVTSMKDIQGLPCIGDQVRDVIEEIIEEGESSRVKEVLNDERYKAFKQFTSVFGVGVKTSEKWFRMGLRTVEEAKASKSLKLSKMQKAGFLYYEDLASRVSKEEADAVTLIVKNTVRTFLPDALVTITGGFRRGKPSGHDIDFLITNPGPKEDDELLHKVVDLLKKQGLLLYEDIKESTFVEEQLPSRKIDAMDNFQKCFAILKLYQPGVDNSSYNTSKKSDMAEVKDWKAIRVDLVITPFEQYAYALLGWTGSKEFRRDLRRYAEEERGMILDNHALYDRKKRIFLKAGSEEEIFAHLGLDYVEPWERNA

SEQ ID NO: 1917 - DNA, 1182 bp, synthetic construct
  misc_feature 1..1182: note = Variant of terminal deoxynucleotidyl transferase
  source 1..1182: mol_type = other DNA
atgcaccatcatcatcatcatggcggtagcggccatccgccgagcaataccccggagggggaggtgccgagcgttatcgcccgcaaggttagtcagtacagctgccagcgcaagaccacgctgaataactacaacaaaaagtttaccgacgcgctggagatcatggccgagaactacaaatttaaagagaacctgatcgcgtgtctggaagccaagcgcgccgcgagtattctgaaatatctgccgttcccggttaccagcatgaaagacatccaaggtctgccgtgcattggcgaccaagttcgtgacgtgatcgaggagatcatcgaagagggcgagagcagccgtgttaaagaagttctcaatgacgagcgctacaaggcctttaagcagttcaccagcgtgttcggtgtgggcgtgaaaaccagcgaaaagtggtttcgtatgggcctccgtacggttgaagaggcaaaggccagtaagagtctgaagctgagcaagatgcagaaggcgggcttcctgtattacgaggatctggcgagccgcgttagtaaagaagaagccgatgccgttacgctcatcgtgaagaacacggtgcgtacctttctgccggatgcgctggtgaccatcaccggcggtttccgccgtggcaaacctgtgggccacgacatcgactttctgatcacgaatccgggcccgaaagaggatgacgagctgctccacaaagtggttgatctgctcaagaagcaaggtctgctgctgtacgaagacatcaaagagagcacgttcgtggaggaacaactgccaagtcgcaaaatcgacgccatggacaacttccagaagtgcttcgccattctcaagctgtaccagccgggcgtggataacagcagctataacacgagtaagaagagtgacatggccgaggttaaggattggaaagcgattcgtgtggatctggtgatcacgccattcgagcagtacgcctatgcgctgctcggttggacgggcagcaaagaatttcgtcgcgatctgcgccgctatgcggaggaagagcgcggcatgatcctcgacaaccatgccctctacgaccgcaaaaagcgcatctttctgaaagcgggcagcgaagaagagattttcgcgcatctgggtctggattatgtggagccgtgggaacgcaacgcg

SEQ ID NO: 1918 - protein, 394 aa, synthetic construct
  REGION 1..394: note = Variant of terminal deoxynucleotidyl transferase
MHHHHHHGGSGHPPSNTPEGEVPSVIARKVSQYSCQRKTTLNNYNKKFTDALEIMAENYKFKENLIACLEAKRAASILKYLPFPVTSMKDIQGLPCIGDQVRDVIEEIIEEGESSRVKEVLNDERYKAFKQFTSVFGVGVKTSEKWFRMGLRTVEEAKASKSLKLSKMQKAGFLYYEDLASRVSKEEADAVTLIVKNTVRTFLPDALVTITGGFRRGKPVGHDIDFLITNPGPKEDDELLHKVVDLLKKQGLLLYEDIKESTFVEEQLPSRKIDAMDNFQKCFAILKLYQPGVDNSSYNTSKKSDMAEVKDWKAIRVDLVITPFEQYAYALLGWTGSKEFRRDLRRYAEEERGMILDNHALYDRKKRIFLKAGSEEEIFAHLGLDYVEPWERNA

SEQ ID NO: 1919 - DNA, 1182 bp, synthetic construct
  misc_feature 1..1182: note = Variant of terminal deoxynucleotidyl transferase
  source 1..1182: mol_type = other DNA
atgcaccatcatcatcatcatggcggtagcggccatccgccgagcaataccccggagggggaggtgccgagcgttatcgcccgcaaggttagtcagtacagctgccagcgcaagaccacgctgaataactacaacaaaaagtttaccgacgcgctggagatcatggccgagaactacaaatttaaagagaacctgatcgcgtgtctggaagccaagcgcgccgcgagtattctgaaatatctgccgttcccggttaccagcatgaaagacatccaaggtctgccgtgcattggcgaccaagttcgtgacgtgatcgaggagatcatcgaagagggcgagagcagccgtgttaaagaagttctcaatgacgagcgctacaaggcctttaagcagttcaccagcgtgttcggtgtgggcgtgaaaaccagcgaaaagtggtttcgtatgggcctccgtacggttgaagaggcaaaggccagtaagagtctgaagctgagcaagatgcagaaggcgggcttcctgtattacgaggatctggcgagccgcgttagtaaagaagaagccgatgccgttacgctcatcgtgaagaacacggtgcgtacctttctgccggatgcgctggtgaccatcaccggcggtttccgccgtggcaaacctatgggccacgacatcgactttctgatcacgaatccgggcccgaaagaggatgacgagctgctccacaaagtggttgatctgctcaagaagcaaggtctgctgctgtacgaagacatcaaagagagcacgttcgtggaggaacaactgccaagtcgcaaaatcgacgccatggacaacttccagaagtgcttcgccattctcaagctgtaccagccgggcgtggataacagcagctataacacgagtaagaagagtgacatggccgaggttaaggattggaaagcgattcgtgtggatctggtgatcacgccattcgagcagtacgcctatgcgctgctcggttggacgggcagcaaagaatttcgtgctgatctgcgccgctatgcggaggaagagcgcggcatgatcctcgacaaccatgccctctacgaccgcaaaaagcgcatctttctgaaagcgggcagcgaagaagagattttcgcgcatctgggtctggattatgtggagccgtgggaacgcaacgcg

SEQ ID NO: 1920 - protein, 394 aa, synthetic construct
  REGION 1..394: note = Variant of terminal deoxynucleotidyl transferase
MHHHHHHGGSGHPPSNTPEGEVPSVIARKVSQYSCQRKTTLNNYNKKFTDALEIMAENYKFKENLIACLEAKRAASILKYLPFPVTSMKDIQGLPCIGDQVRDVIEEIIEEGESSRVKEVLNDERYKAFKQFTSVFGVGVKTSEKWFRMGLRTVEEAKASKSLKLSKMQKAGFLYYEDLASRVSKEEADAVTLIVKNTVRTFLPDALVTITGGFRRGKPMGHDIDFLITNPGPKEDDELLHKVVDLLKKQGLLLYEDIKESTFVEEQLPSRKIDAMDNFQKCFAILKLYQPGVDNSSYNTSKKSDMAEVKDWKAIRVDLVITPFEQYAYALLGWTGSKEFRADLRRYAEEERGMILDNHALYDRKKRIFLKAGSEEEIFAHLGLDYVEPWERNA

SEQ ID NO: 1921 - DNA, 1182 bp, synthetic construct
  misc_feature 1..1182: note = Variant of terminal deoxynucleotidyl transferase
  source 1..1182: mol_type = other DNA
atgcaccatcatcatcatcatggcggtagcggccatccgccgagcaataccccggagggggaggtgccgagcgttatcgcccgcaaggttagtcagtacagctgccagcgcaagaccacgctgaataactacaacaaaaagtttaccgacgcgctggagatcatggccgagaactacaaatttaaagagaacctgatcgcgtgtctggaagccaagcgcgccgcgagtattctgaaatatctgccgttcccggttaccagcatgaaagacatccaaggtctgccgtgcattggcgaccaagttcgtgacgtgatcgaggagatcatcgaagagggcgagagcagccgtgttaaagaagttctcaatgacgagcgctacaaggcctttaagcagttcaccagcgtgttcggtgtgggcgtgaaaaccagcgaaaagtggtttcgtatgggcctccgtacggttgaagaggcaaaggccagtaagagtctgaagctgagcaagatgcagaaggcgggcttcctgtattacgaggatctggcgagccgcgttagtaaagaagaagccgatgccgttacgctcatcgtgaagaacacggtgcgtacctttctgccggatgcgctggtgaccatcaccggcggtttccgccgtggcaaacctatgggccacgactgtgactttctgatcacgaatccgggcccgaaagaggatgacgagctgctccacaaagtggttgatctgctcaagaagcaaggtctgctgctgtacgaagacatcaaagagagcacgttcgtggaggaacaactgccaagtcgcaaaatcgacgccatggacaacttccagaagtgcttcgccattctcaagctgtaccagccgggcgtggataacagcagctataacacgagtaagaagagtgacatggccgaggttaaggattggaaagcgattcgtgtggatctggtgatcacgccattcgagcagtacgcctatgcgctgctcggttggacgggcagcaaagaatttcgtcgcgatctgcgccgctatgcggaggaagagcgcggcatgatcctcgacaaccatgccctctacgaccgcaaaaagcgcatctttctgaaagcgggcagcgaagaagagattttcgcgcatctgggtctggattatgtggagccgtgggaacgcaacgcg

SEQ ID NO: 1922 - protein, 394 aa, synthetic construct
  REGION 1..394: note = Variant of terminal deoxynucleotidyl transferase
MHHHHHHGGSGHPPSNTPEGEVPSVIARKVSQYSCQRKTTLNNYNKKFTDALEIMAENYKFKENLIACLEAKRAASILKYLPFPVTSMKDIQGLPCIGDQVRDVIEEIIEEGESSRVKEVLNDERYKAFKQFTSVFGVGVKTSEKWFRMGLRTVEEAKASKSLKLSKMQKAGFLYYEDLASRVSKEEADAVTLIVKNTVRTFLPDALVTITGGFRRGKPMGHDCDFLITNPGPKEDDELLHKVVDLLKKQGLLLYEDIKESTFVEEQLPSRKIDAMDNFQKCFAILKLYQPGVDNSSYNTSKKSDMAEVKDWKAIRVDLVITPFEQYAYALLGWTGSKEFRRDLRRYAEEERGMILDNHALYDRKKRIFLKAGSEEEIFAHLGLDYVEPWERNA

SEQ ID NO: 1923 - DNA, 1182 bp, synthetic construct
  misc_feature 1..1182: note = Variant of terminal deoxynucleotidyl transferase
  source 1..1182: mol_type = other DNA
atgcaccatcatcatcatcatggcggtagcggccatccgccgagcaataccccggagggggaggtgccgagcgttatcgcccgcaaggttagtcagtacagctgccagcgcaagaccacgctgaataactacaacaaaaagtttaccgacgcgctggagatcatggccgagaactacaaatttaaagagaacctgatcgcgtgtctggaagccgagcgcgccgcgagtattctgaaatatctgccgttcccggttaccagcatgaaagacatccaaggtctgccgtgcattggcgaccaagttcgtgacgtgatcgaggagatcatcgaagagggcgagagcagccgtgttaaagaagttctcaatgacgagcgctacaaggcctttaagcagttcaccagcgtgttcggtgtgggcgtgaaaaccagcgaaaagtggtttcgtatgggcctccgtacggttgaagaggcaaaggccagtaagagtctgaagctgagcaagatgcagaaggcgggcttcctgtattacgaggatctggcgagccgcgttagtaaagaagaagccgatgccgttacgctcatcgtgaagaacacggtgcgtacctttctgccggatgcgctggtgaccatcaccggcggtttccgccgtggcaaacctatgggccacgacatcgactttctgatcacgaatccgggcccgaaagaggatgacgagctgctccacaaagtggttgatctgctcaagaagcaaggtctgctgctgtacgaagacatcaaagagagcacgttcgtggaggaacaactgccaagtcgcaaaatcgacgccatggacaacttccagaagtgcttcgccattctcaagctgtaccagccgggcgtggataacagcagctataacacgagtaagaagagtgacatggccgaggttaaggattggaaagcgattcgtgtggatctggtgatcacgccattcgagcagtacgcctatgcgctgctcggttggacgggcagcaaagaatttcgtcgcgatctgcgccgctatgcggaggaagagcgcggcatgatcctcgacaaccatgccctctacgaccgcaaaaagcgcatctttctgaaagcgggcagcgaagaagagattttcgcgcatctgggtctggattatgtggagccgtgggaacgcaacgcg

SEQ ID NO: 1924 - protein, 394 aa, synthetic construct
  REGION 1..394: note = Variant of terminal deoxynucleotidyl transferase
MHHHHHHGGSGHPPSNTPEGEVPSVIARKVSQYSCQRKTTLNNYNKKFTDALEIMAENYKFKENLIACLEAERAASILKYLPFPVTSMKDIQGLPCIGDQVRDVIEEIIEEGESSRVKEVLNDERYKAFKQFTSVFGVGVKTSEKWFRMGLRTVEEAKASKSLKLSKMQKAGFLYYEDLASRVSKEEADAVTLIVKNTVRTFLPDALVTITGGFRRGKPMGHDIDFLITNPGPKEDDELLHKVVDLLKKQGLLLYEDIKESTFVEEQLPSRKIDAMDNFQKCFAILKLYQPGVDNSSYNTSKKSDMAEVKDWKAIRVDLVITPFEQYAYALLGWTGSKEFRRDLRRYAEEERGMILDNHALYDRKKRIFLKAGSEEEIFAHLGLDYVEPWERNA

SEQ ID NO: 1925 - DNA, 1182 bp, synthetic construct
  misc_feature 1..1182: note = Variant of terminal deoxynucleotidyl transferase
  source 1..1182: mol_type = other DNA
atgcaccatcatcatcatcatggcggtagcggccatccgccgagcaataccccggagggggaggtgccgagcgttatcgcccgcaaggttagtcagtacagctgccagcgcaagaccacgctgaataactacaacaaaaagtttaccgacgcgctggagatcatggccgagaactacaaatttaaagagaacctgatcgcgtgtctggaagccaagcgcgccgcgagtattctgaaatatctgccgttcccggttaccagcatgaaagacatccaaggtctgccgtgcattggcgaccaagttcgtgacgtgatcgaggagatcatcgaagagggcgagagcagccgtgttaaagaagttctcaatgacgagcgctacaaggcctttaagcagttcaccagcgtgttcggtgtgggcgtgaaaaccagcgaaaagtggtttcgtatgggcctccgtacggttgaagaggcaaaggccagtaagagtctgaagctgagcaagatgcagaaggcgggcttcctgtattacgaggatctggcgagccgcgttagtaaagaagaagccgatgccgttacgctcatcgtgaagaacacggtgcgtacctttctgccggatgcgctggtgaccatcaccggcggtttccgccgtggcaaacctatgggccacgacatcgactttctgatcacgaatccgggcccgaaagaggatgacgagctgctccacaaagtggttgatctgctcaagaagcaaggtctgctgctgtacgaagacatcaaagagagcacgttcgtggaggaacaactgccaagtcgcaaaatcgacgccatggacaacttccagaagtgcttcgccattctcaagctgtaccagccgggcgtggataacagcagctataacacgagtaagaagagtgacatggccgaggttaaggattggaaagcgattcgtgtggatctggtgatcacgccattcgagcagtacgcctatgcgctgctcggttggacgggcagcaaatgttttcgtcgcgatctgcgccgctatgcggaggaagagcgcggcatgatcctcgacaaccatgccctctacgaccgcaaaaagcgcatctttctgaaagcgggcagcgaagaagagattttcgcgcatctgggtctggattatgtggagccgtgggaacgcaacgcg

SEQ ID NO: 1926 - protein, 394 aa, synthetic construct
  REGION 1..394: note = Variant of terminal deoxynucleotidyl transferase
MHHHHHHGGSGHPPSNTPEGEVPSVIARKVSQYSCQRKTTLNNYNKKFTDALEIMAENYKFKENLIACLEAKRAASILKYLPFPVTSMKDIQGLPCIGDQVRDVIEEIIEEGESSRVKEVLNDERYKAFKQFTSVFGVGVKTSEKWFRMGLRTVEEAKASKSLKLSKMQKAGFLYYEDLASRVSKEEADAVTLIVKNTVRTFLPDALVTITGGFRRGKPMGHDIDFLITNPGPKEDDELLHKVVDLLKKQGLLLYEDIKESTFVEEQLPSRKIDAMDNFQKCFAILKLYQPGVDNSSYNTSKKSDMAEVKDWKAIRVDLVITPFEQYAYALLGWTGSKCFRRDLRRYAEEERGMILDNHALYDRKKRIFLKAGSEEEIFAHLGLDYVEPWERNA

SEQ ID NO: 1927 - DNA, 1182 bp, synthetic construct
  misc_feature 1..1182: note = Variant of terminal deoxynucleotidyl transferase
  source 1..1182: mol_type = other DNA
atgcaccatcatcatcatcatggcggtagcggccatccgccgagcaataccccggagggggaggtgccgagcgttatcgcccgcccggttagtcagtacagctgccagcgcaagaccacgctgaataactacaacaaaaagtttaccgacgcgctggagatcatggccgagaactacaaatttaaagagaacctgatcgcgtgtctggaagccaagcgcgccgcgagtattctgaaatatctgccgttcccggttaccagcatgaaagacatccaaggtctgccgtgcattaccgaccaagttcgtgacgtgatcgaggagatcatcgaagagggcgagagcagccgtgttaaagaagttctcaatgacgagcgctacaaggcctttaagcagttcaccagcgtgttcggtgtgggcgtgaaaaccgcggaaaagtggtttcgtatgggcctccgtacggttgaagaagcaaaggccagtaagagtctgaagctgagcaagatgcagaaggcgggcttcctgtattacgaggatctggcgagccgcgttagtaaagaagaagccgatgctgttacgctcatcgtgaagaacacggtgcgtacctttctgccggatgcgctggtgaccatcaccggcggtttccgccgtggcaaacctatgggccacgacatcgactttctgatcacgaatccgggcccgaaagaggatgacgagctgctccacaaagtggttgatctgctcaagaagcaaggtctgctgctgtacgaagacatcaaagagagcacgttcgtggaggggcaactgccaagtcgcaaaatcgacgccatggacaacttccagaagtgcttcgccattctcaagctgtaccagccgggcgtggataacagcagctataacacgagtaagaagagtgacatggccgaggttaaggattggaaagcgattcgtgtggatctggtgatcacgccattcgagcagtacgcctatgcgctgctcggttggacgggcagcaaagaatttcgtcgcgatctgcgccgctatgcggaggaagagcgcggcatgatcctcgacaaccatgccctctacgacctgaaaaagcgcatctttctgaaagcgggcagcgaagaagagattttcgcgcatctgggtctggattatgtggagccgtgggaacgcaacgcg

SEQ ID NO: 1928 - protein, 394 aa, synthetic construct
  REGION 1..394: note = Variant of terminal deoxynucleotidyl transferase
MHHHHHHGGSGHPPSNTPEGEVPSVIARPVSQYSCQRKTTLNNYNKKFTDALEIMAENYKFKENLIACLEAKRAASILKYLPFPVTSMKDIQGLPCITDQVRDVIEEIIEEGESSRVKEVLNDERYKAFKQFTSVFGVGVKTAEKWFRMGLRTVEEAKASKSLKLSKMQKAGFLYYEDLASRVSKEEADAVTLIVKNTVRTFLPDALVTITGGFRRGKPMGHDIDFLITNPGPKEDDELLHKVVDLLKKQGLLLYEDIKESTFVEGQLPSRKIDAMDNFQKCFAILKLYQPGVDNSSYNTSKKSDMAEVKDWKAIRVDLVITPFEQYAYALLGWTGSKEFRRDLRRYAEEERGMILDNHALYDLKKRIFLKAGSEEEIFAHLGLDYVEPWERNA

SEQ ID NO: 1929 - DNA, 1182 bp, synthetic construct
  misc_feature 1..1182: note = Variant of terminal deoxynucleotidyl transferase
  source 1..1182: mol_type = other DNA
atgcaccatcatcatcatcatggcgatagcggccatccgccgagcaataccccggagggggaggtgccgagcgttatcgcccgtccggttagtcagtacagctgccagcgcaagaccacgctgaataactacaacaaaaagtttaccgacgcgctggagatcatggccgagaactacaaatttaaagagaacctgatcgcgtgtctggaagccaagcgcgccgcgagtattctgaaatatctgccgttcccggttaccagcatgaaagacatccaaggtctgccgtgcattaccgaccaagttcgtgacgtgatcgaggagatcatcgaagagggcgagagcagccgtgttaaagaagttctcaatgacgagcgctacaaggcctttaagcagttcaccagcgtgttcggtgtgggcgtgaaaaccgcggaaaagtggtttcgtatgggcctccgtacggttgaagacgcaaaggccagtaagagtctgaagctgagcaagatgcagaaggcgggcttcctgtattacgaggatctggcgagccgcgttagtaaagaagaagccgatgccgttacgctcatcgtgaagaacacggtgcgtacctttctgccggatgcgctggtgaccatcaccggcggtttccgccgtggcaaacctatgggccacgacatcgactttctgatcacgaatccgggcccgaaagaggatgacgagctgctccacaaagtggttgatctgctcaagaagcaaggtctgctgctgtacgaagacatcaaagagagcacgttcgtggaggggcaactgccaagtcgcaaaatcgacgccatggacaacttccagaagtgcttcgccattctcaagctgtaccagccgggcgtggataacagcagctataacacgagtaagaagagtgacatggccgaggttaaggattggaaagcgattcgtgtggatctggtgatcacgccattcgagcagtacgcctatgcgctgctcggttggacgggcagcaaagaatttcgtcgcgatctgcgccgctatgcggaggaagagcgcggcatgatcctcgacaaccatgccctctacgacctgaaaaagcgcatctttctgaaagcgggcagcgaagaagagattttcgcgcatctgggtctggattatgtggagccgtgggaacgcaacgcg

SEQ ID NO: 1930 - protein, 394 aa, synthetic construct
  REGION 1..394: note = Variant of terminal deoxynucleotidyl transferase
MHHHHHHGDSGHPPSNTPEGEVPSVIARPVSQYSCQRKTTLNNYNKKFTDALEIMAENYKFKENLIACLEAKRAASILKYLPFPVTSMKDIQGLPCITDQVRDVIEEIIEEGESSRVKEVLNDERYKAFKQFTSVFGVGVKTAEKWFRMGLRTVEDAKASKSLKLSKMQKAGFLYYEDLASRVSKEEADAVTLIVKNTVRTFLPDALVTITGGFRRGKPMGHDIDFLITNPGPKEDDELLHKVVDLLKKQGLLLYEDIKESTFVEGQLPSRKIDAMDNFQKCFAILKLYQPGVDNSSYNTSKKSDMAEVKDWKAIRVDLVITPFEQYAYALLGWTGSKEFRRDLRRYAEEERGMILDNHALYDLKKRIFLKAGSEEEIFAHLGLDYVEPWERNA

SEQ ID NO: 1931 - DNA, 1182 bp, synthetic construct
  misc_feature 1..1182: note = Variant of terminal deoxynucleotidyl transferase
  source 1..1182: mol_type = other DNA
atgcaccatcatcatcatcatggcgatagcggccatccgccgagcaataccccggagggggaggtgccgagcgttatcgcccgtccggttagtcagtacagctgccagcgcaagaccacgctgaataactacaacaaaaagtttaccgacgcgctggagatcatggccgagaactacaaatttaaagagaacctgatcgcgtgtctggaagccaagcgcgccgcgagtattctgaaatatctgccgttcccggttaccagcatgaaagacatccaaggtctgccgtgcattaccgaccaagttcgtgacgtgatcgaggagatcatcgaagagggcgagagcagccgtgttaaagaagttctcaatgacgagcgctacaaggcctttaagcagttcaccagcgtgttcggtgtgggcgtgaaaaccgcggaaaagtggtttcgtatgggcctccgtacggttgaagaagcaaaggccagtaagagtctgaagctgagcaagatgcagaaggcgggcttcctgtattacgaggatctggcgagccgcgttagtaaagaagaagccgatgccgttacgctcatcgtgaagaacacggtgcgtacctttctgccggatgcgctggtgaccatcaccggcggtttccgccgtggcaaacctatgggccacgacatcgactttctgatcacgaatccgggcccgaaagaggatgacgagctgctccacaaagtggttgatctgctcaagaagcaaggtctgctgctgtacgaagacatcaaagagagcacgttcgtggaggggcaactgccaagtcgcaaaatcgacgccatggacaacttccagaagtgcttcgccattctcaagctgtaccagccgggcgtggataacagcagctataacacgagtaagaagagtgacatggccgaggttaaggattggaaagcgattcgtgtggatctggtgatcacgccattcgagcagtacgcctatgcgctgctcggttggacgggcagcaaagaatttcgtcgcgatctgcgccgctatgcggaggaagagcgcggcatgatcctcgacaaccatgccctctacgacctgaaaaagcgcatctttctgaaagcgggcagcgaagaagagattttcgcgcatctgggtctggattatgtggagccgtgggaacgcaacgcg

SEQ ID NO: 1932 - protein, 394 aa, synthetic construct
  REGION 1..394: note = Variant of terminal deoxynucleotidyl transferase
MHHHHHHGDSGHPPSNTPEGEVPSVIARPVSQYSCQRKTTLNNYNKKFTDALEIMAENYKFKENLIACLEAKRAASILKYLPFPVTSMKDIQGLPCITDQVRDVIEEIIEEGESSRVKEVLNDERYKAFKQFTSVFGVGVKTAEKWFRMGLRTVEEAKASKSLKLSKMQKAGFLYYEDLASRVSKEEADAVTLIVKNTVRTFLPDALVTITGGFRRGKPMGHDIDFLITNPGPKEDDELLHKVVDLLKKQGLLLYEDIKESTFVEGQLPSRKIDAMDNFQKCFAILKLYQPGVDNSSYNTSKKSDMAEVKDWKAIRVDLVITPFEQYAYALLGWTGSKEFRRDLRRYAEEERGMILDNHALYDLKKRIFLKAGSEEEIFAHLGLDYVEPWERNA

SEQ ID NO: 1933 - DNA, 1182 bp, synthetic construct
  misc_feature 1..1182: note = Variant of terminal deoxynucleotidyl transferase
  source 1..1182: mol_type = other DNA
atgcaccatcatcatcatcatggcggtagcggccatccgccgagcaataccccggagggggaggtgccgagcgttatcgcccgtccggttagtcagtacagctgccagcgcaagaccacgctgaataactacaacaaaaagtttaccgacgcgctggagatcatggccgagaactacaaatttaaagagaacctgatcgcgtgtctggaagccaagcgcgccgcgagtattctgaaatatctgccgttcccggttaccagcatgaaagacatccaaggtctgccgtgcattaccgaccaagttcgtgacgtgatcgaggagatcatcgaagagggcgagagcagccgtgttaaagaagttctcaatgacgagcgctacaaggcctttaagcagttcaccagcgtgttcggtgtgggcgtgaaaaccgcggaaaagtggtttcgtatgggcctccgtacggttgaagacgcacgtgccagtaagagtctgaagctgagcaagatgcagaaggcgggcttcctgtattacgaggatctggcgagccgcgttagtaaagaagaagccgatgttgttacggtcatcgtgaagaatacggtgcgtacctttctgccggatgcgctggtgaccatcaccggcggtttccgccgtggcaaacctatgggccacgacatcgactttctgatcacgaatccgggcccgaaagaggatgacgagctgctccacaaagtggttgatctgctcaagaagcaaggtctgctgctgtacgaagacatcaaagagagcacgttcgtggaggggcaactgccaagtcgcaaaatcgacgccatggacaacttccagaagtgcttcgccattctcaagctgtaccagccgggcgtggataacagcagctataacacgagtaagaagagtgacatggccgaggttaaggattggaaagcgattcgtgtggatctggtgatcacgccattcgagcagtacgcctatgcgctgctcggttggacgggcagcaaagaatttcgtcgcgatctgcgccgctatgcggaggaagagcgcggcatgatcctcgacaaccatgccctctacgacctgaaaaagcgcatctttctgaaagcgggcagcgaagaagagattttcgcgcatctgggtctggattatgtggagccgtgggaacgcaacgcg

SEQ ID NO: 1934 - protein, 394 aa, synthetic construct
  REGION 1..394: note = Variant of terminal deoxynucleotidyl transferase
MHHHHHHGGSGHPPSNTPEGEVPSVIARPVSQYSCQRKTTLNNYNKKFTDALEIMAENYKFKENLIACLEAKRAASILKYLPFPVTSMKDIQGLPCITDQVRDVIEEIIEEGESSRVKEVLNDERYKAFKQFTSVFGVGVKTAEKWFRMGLRTVEDARASKSLKLSKMQKAGFLYYEDLASRVSKEEADVVTVIVKNTVRTFLPDALVTITGGFRRGKPMGHDIDFLITNPGPKEDDELLHKVVDLLKKQGLLLYEDIKESTFVEGQLPSRKIDAMDNFQKCFAILKLYQPGVDNSSYNTSKKSDMAEVKDWKAIRVDLVITPFEQYAYALLGWTGSKEFRRDLRRYAEEERGMILDNHALYDLKKRIFLKAGSEEEIFAHLGLDYVEPWERNA

SEQ ID NO: 1935 - DNA, 1182 bp, synthetic construct
  misc_feature 1..1182: note = Variant of terminal deoxynucleotidyl transferase
  source 1..1182: mol_type = other DNA
atgcaccatcatcatcatcatggcgatagcggccatccgccgagcaataccccggagggggaggtgccgagcgttatcgccgagccggttagtcagtacagctgccagcgcaagaccacgctgaataactacaacaaaaagtttaccgacgcgctggagatcatggccgagaactacaaatttaaagagaacctgatcgcgtgtctggaagccaagcgcgccgcgagtattctgaaatatctgccgttcccggttaccagcatgaaagacatccaaggtctgccgtgcattaccgaccaagttcgtgacgtgatcgaggagatcatcgaagagggcgagagcagccgtgttaaagaagttctcaatgacgagcgctacaaggcctttaagcagttcaccagcgtgttcggtgtgggcgtgaaaaccgcggaaaagtggtttcgtatgggcctccgtacggttgaagaggcaaaggccagtaagagtctgaagctgagcaagatgcagaaggcgggctttctgtattacgaggatctggcgagccgcgttagtaaagaagaagccgatgccgttacgctcatcgtgaagaacacggtgcgtacctttctgccggatgcgctggtgaccatcaccggcggtttccgccgtggcaaacctatgggccacgacatcgactttctgatcacgaatccgggcccgaaagaggatgacgagctgctccacaaagtggttgatctgctcaagaagcaaggtctgctgctgtacgaagacatcaaagagagcacgttcgtggaggggcaactgccaagtcgcaaaatcgacgccatggacaacttccagaagtgcttcgccattctcaagctgtaccgtccgggcgtggataacagcagctataacacgagtaagggtagtgacatggccgaggttaaggattggaaagcgattcgtgtggatctggtgatcacgccattcgagcagtacgcctatgcgctgctcggttggacgggcagcaaagaatttcgtcgcgatctgcgccgctatgcggaggaagagcgcggcatgatcctcgacaaccatgccctctacgacctgaaaaagcgcatctttctgaaagcgggcagcgaagaagagattttcgcgcatctgggtctggattatgtggagccgtgggaacgcaacgcg

SEQ ID NO: 1936 - protein, 394 aa, synthetic construct
  REGION 1..394: note = Variant of terminal deoxynucleotidyl transferase
MHHHHHHGDSGHPPSNTPEGEVPSVIAEPVSQYSCQRKTTLNNYNKKFTDALEIMAENYKFKENLIACLEAKRAASILKYLPFPVTSMKDIQGLPCITDQVRDVIEEIIEEGESSRVKEVLNDERYKAFKQFTSVFGVGVKTAEKWFRMGLRTVEEAKASKSLKLSKMQKAGFLYYEDLASRVSKEEADAVTLIVKNTVRTFLPDALVTITGGFRRGKPMGHDIDFLITNPGPKEDDELLHKVVDLLKKQGLLLYEDIKESTFVEGQLPSRKIDAMDNFQKCFAILKLYRPGVDNSSYNTSKGSDMAEVKDWKAIRVDLVITPFEQYAYALLGWTGSKEFRRDLRRYAEEERGMILDNHALYDLKKRIFLKAGSEEEIFAHLGLDYVEPWERNA

SEQ ID NO: 1937 - DNA, 1182 bp, synthetic construct
  misc_feature 1..1182: note = Variant of terminal deoxynucleotidyl transferase
  source 1..1182: mol_type = other DNA
atgcaccatcatcatcatcatggcggtagcggccatccgccgagcaataccccggagggggaggtgccgagcgttatcgcccgcccggttagtcagtacagctgccagcgcaagaccacgctgaataactacaacaaaaagtttaccgacgcgctggagatcatggccgagaactacaaatttaaagagaacctgatcgcgtgtctggaagccaagcgcgccgcgagtattctgaaatatctgccgttcccggttaccagcatgaaagacatccaaggtctgccgtgcattaccgaccaagttcgtgacgtgatcgaggagatcatcgaagagggcgagagcagccgtgttaaagaagttctcaatgacgagcgctacaaggcctttaagcagttcaccagcgtgttcggtgtgggcgtgaaaaccgcggaaaagtggtttcgtatgggcctccgtacggttgaagaggcaaaggccagtaagagtctgaagctgagcaagatgcagaaggcgggctttctgtattacgaggatctggcgagccgcgttagtaaagaagaagccgatgccgttacgctcatcgtgaagaacacggtgcgtacctttctgccggatgcgctggtgaccatcaccggcggtttccgccgtggcaaacctatgggccacgacatcgactttctgatcacgaatccgggcccgaaagaggatgacgagctgctccacaaagtggttgatctgctcaagaagcaaggtctgctgctgtacgaagacatcaaagagagcacgttcgtggaggggcaactgccaagtcgcaaaatcgacgccatggacaacttccagaagtgcttcgccattctcaagctgtaccgtccgggcgtggataacagcagctataacacgagtaagggtagtgacatggccgaggttaaggattggaaagcgattcgtgtggatctggtgatcacgccattcgagcagtacgcctatgcgctgctcggttggacgggcagcaaagaatttcgtcgcgatctgcgccgctatgcggaggaagagcgcggcatgatcctcgacaaccatgccctctacgacctgaaaaagcgcatctttctgaaagcgggcagcgaagaagagattttcgcgcatctgggtctggattatgtggagccgtgggaacgcaacgcg

SEQ ID NO: 1938 - protein, 394 aa, synthetic construct
  REGION 1..394: note = Variant of terminal deoxynucleotidyl transferase
MHHHHHHGGSGHPPSNTPEGEVPSVIARPVSQYSCQRKTTLNNYNKKFTDALEIMAENYKFKENLIACLEAKRAASILKYLPFPVTSMKDIQGLPCITDQVRDVIEEIIEEGESSRVKEVLNDERYKAFKQFTSVFGVGVKTAEKWFRMGLRTVEEAKASKSLKLSKMQKAGFLYYEDLASRVSKEEADAVTLIVKNTVRTFLPDALVTITGGFRRGKPMGHDIDFLITNPGPKEDDELLHKVVDLLKKQGLLLYEDIKESTFVEGQLPSRKIDAMDNFQKCFAILKLYRPGVDNSSYNTSKGSDMAEVKDWKAIRVDLVITPFEQYAYALLGWTGSKEFRRDLRRYAEEERGMILDNHALYDLKKRIFLKAGSEEEIFAHLGLDYVEPWERNA

SEQ ID NO: 1939 - DNA, 1182 bp, synthetic construct
  misc_feature 1..1182: note = Variant of terminal deoxynucleotidyl transferase
  source 1..1182: mol_type = other DNA
atgcaccatcatcatcatcatggcgatagcggccatccgccgagcaataccccggagggggaggtgccgagcgttatcgcccgtccggttagtcagtacagctgccagcgcaagaccacgctgaataactacaacaaaaagtttaccgacgcgctggagatcatggccgagaactacaaatttaaagagaacctgatcgcgtgtctggaagccaagcgcgccgcgagtattctgaaatatctgccgttcccggttaccagcatgaaagacatccaaggtctgccgtgcattaccgaccaagttcgtgacgtgatcgaggagatcatcgaagagggcgagagcagccgtgttaaagaagttctcaatgacgagcgctacaaggcctttaagcagttcaccagcgtgttcggtgtgggcgtgaaaaccgcggaaaagtggtttcgtatgggcctccgtacggttgaagacgcacgtgccagtaagagtctgaagctgagcaagatgcagaaggcgggctttctgtattacgaggatctggcgagccgcgttagtaaagaagaagccgatgctgttacggtcatcgtgaagaatacggtgcgtacctttctgccggatgcgctggtgaccatcaccggcggtttccgccgtggcaaacctatgggccacgacatcgactttctgatcacgaatccgggcccgaaagaggatgacgagctgctccacaaagtggttgatctgctcaagaagcaaggtctgctgctgtacgaagacatcaaagagagcacgttcgtggaggggcaactgccaagtcgcaaaatcgacgccatggacaacttccagaagtgcttcgccattctcaagctgtaccgtccgggcgtggataacagcagctataacacgagtaagggtagtgacatggccgaggttaaggattggaaagcgattcgtgtggatctggtgatcacgccattcgagcagtacgcctatgcgctgctcggttggacgggcagcaaagaatttcgtcgcgatctgcgccgctatgcggaggaagagcgcggcatgatcctcgacaaccatgccctctacgacctgaaaaagcgcatctttctgaaagcgggcagcgaagaagagattttcgcgcatctgggtctggattatgtggagccgtgggaacgcaacgcg

SEQ ID NO: 1940 - protein, 394 aa, synthetic construct
  REGION 1..394: note = Variant of terminal deoxynucleotidyl transferase
MHHHHHHGDSGHPPSNTPEGEVPSVIARPVSQYSCQRKTTLNNYNKKFTDALEIMAENYKFKENLIACLEAKRAASILKYLPFPVTSMKDIQGLPCITDQVRDVIEEIIEEGESSRVKEVLNDERYKAFKQFTSVFGVGVKTAEKWFRMGLRTVEDARASKSLKLSKMQKAGFLYYEDLASRVSKEEADAVTVIVKNTVRTFLPDALVTITGGFRRGKPMGHDIDFLITNPGPKEDDELLHKVVDLLKKQGLLLYEDIKESTFVEGQLPSRKIDAMDNFQKCFAILKLYRPGVDNSSYNTSKGSDMAEVKDWKAIRVDLVITPFEQYAYALLGWTGSKEFRRDLRRYAEEERGMILDNHALYDLKKRIFLKAGSEEEIFAHLGLDYVEPWERNA

SEQ ID NO: 1941 - DNA, 1182 bp, synthetic construct
  misc_feature 1..1182: note = Variant of terminal deoxynucleotidyl transferase
  source 1..1182: mol_type = other DNA
atgcaccatcatcatcatcatggcggtagcggccatccgccgagcaataccccggagggggaggtgccgagcgttatcgccgggccggttagtcagtacagctgccagcgcaagaccacgctgaataactacaacaaaaagtttaccgacgcgctggagatcatggccgagaactacaaatttaaagagaacctgatcgcgtgtctggaagccaagcgcgccgcgagtattctgaaatatctgccgttcccggttaccagcatgaaagacatccaaggtctgccgtgcattaccgaccaagttcgtgacgtgatcgaggagatcatcgaagagggcgagagcagccgtgttaaagaagttctcaatgacgagcgctacaaggcctttaagcagttcaccagcgtgttcggtgtgggcgtgaaaaccgcggaaaagtggtttcgtatgggcctccgtacggttgaagaggcaaaggccagtaagagtctgaagctgagcaagatgcagaaggcgggcttcctgtattacgaggatctggcgagccgcgttagtaaagaagaagccgatgccgttacgctcatcgtgaagaacacggtgcgtacctttctgccggatgcgctggtgaccatcaccggcggtttccgccgtggcaaacctatgggccacgacatcgactttctgatcacgaatccgggcccgaaagaggatgacgagctgctccacaaagtggttgatctgctcaagaagcaaggtctgctgctgtacgaagacatcaaagagagcacgttcgtggaggggcaactgccaagtcgcaaaatcgacgccatggacaacttccagaagtgcttcgccattctcaagctgtaccagccgggcgtggataacagcagctataacacgagtaagaagagtgacatggccgaggttaaggattggaaagcgattcgtgtggatctggtgatcacgccattcgagcagtacgcctatgcgctgctcggttggacgggcagcaaagaatttcgtcgcgatctgcgccgctatgcggaggaagagcgcggcatgatcctcgacaaccatgccctctacgacctgaaaaagcgcatctttctgaaagcgggcagcgaagaagagattttcgcgcatctgggtctggattatgtggagccgtgggaacgcaacgcg

SEQ ID NO: 1942 - protein, 394 aa, synthetic construct
  REGION 1..394: note = Variant of terminal deoxynucleotidyl transferase
MHHHHHHGGSGHPPSNTPEGEVPSVIAGPVSQYSCQRKTTLNNYNKKFTDALEIMAENYKFKENLIACLEAKRAASILKYLPFPVTSMKDIQGLPCITDQVRDVIEEIIEEGESSRVKEVLNDERYKAFKQFTSVFGVGVKTAEKWFRMGLRTVEEAKASKSLKLSKMQKAGFLYYEDLASRVSKEEADAVTLIVKNTVRTFLPDALVTITGGFRRGKPMGHDIDFLITNPGPKEDDELLHKVVDLLKKQGLLLYEDIKESTFVEGQLPSRKIDAMDNFQKCFAILKLYQPGVDNSSYNTSKKSDMAEVKDWKAIRVDLVITPFEQYAYALLGWTGSKEFRRDLRRYAEEERGMILDNHALYDLKKRIFLKAGSEEEIFAHLGLDYVEPWERNA

SEQ ID NO: 1943 - DNA, 1182 bp, synthetic construct
  misc_feature 1..1182: note = Variant of terminal deoxynucleotidyl transferase
  source 1..1182: mol_type = other DNA
atgcaccatcatcatcatcatggcgatagcggccatccgccgagcaataccccggagggggaggtgccgagcgttatcgcccgtccggttagtcagtacagctgccagcgcaagaccacgctgaataactacaacaaaaagtttaccgacgcgctggagatcatggccgagaactacaaatttaaagagaacctgatcgcgtgtctggaagccaagcgcgccgcgagtattctgaaatatctgccgttcccggttaccagcatgaaagacatccaaggtctgccgtgcattaccgaccaagttcgtgacgtgatcgaggagatcatcgaagagggcgagagcagccgtgttaaagaagttctcaatgacgagcgctacaaggcctttaagcagttcaccagcgtgttcggtgtgggcgtgaaaaccgcggaaaagtggtttcgtatgggcctccgtacggttgaagaagcaaaggccagtaagagtctgaagctgagcaagatgcagaaggcgggctttctgtattacgaggatctggcgagccgcgttagtaaagaagaagccgatgccgttacgctcatcgtgaagaacacggtgcgtacctttctgccggatgcgctggtgaccatcaccggcggtttccgccgtggcaaacctatgggccacgacatcgactttctgatcacgaatccgggcccgaaagaggatgacgagctgctccacaaagtggttgatctgctcaagaagcaaggtctgctgctgtacgaagacatcaaagagagcacgttcgtggaggggcaactgccaagtcgcaaaatcgacgccatggacaacttccagaagtgcttcgccattctcaagctgtaccgtccgggcgtggataacagcagctataacacgagtaagaagagtgacatggccgaggttaaggattggaaagcgattcgtgtggatctggtgatcacgccattcgagcagtacgcctatgcgctgctcggttggacgggcagcaaagaatttcgtcgcgatctgcgccgctatgcggaggaagagcgcggcatgatcctcgacaaccatgccctctacgacctgaaaaagcgcatctttctgaaagcgggcagcgaagaagagattttcgcgcatctgggtctggattatgtggagccgtgggaacgcaacgcg

SEQ ID NO: 1944 - protein, 394 aa, synthetic construct
  REGION 1..394: note = Variant of terminal deoxynucleotidyl transferase
MHHHHHHGDSGHPPSNTPEGEVPSVIARPVSQYSCQRKTTLNNYNKKFTDALEIMAENYKFKENLIACLEAKRAASILKYLPFPVTSMKDIQGLPCITDQVRDVIEEIIEEGESSRVKEVLNDERYKAFKQFTSVFGVGVKTAEKWFRMGLRTVEEAKASKSLKLSKMQKAGFLYYEDLASRVSKEEADAVTLIVKNTVRTFLPDALVTITGGFRRGKPMGHDIDFLITNPGPKEDDELLHKVVDLLKKQGLLLYEDIKESTFVEGQLPSRKIDAMDNFQKCFAILKLYRPGVDNSSYNTSKKSDMAEVKDWKAIRVDLVITPFEQYAYALLGWTGSKEFRRDLRRYAEEERGMILDNHALYDLKKRIFLKAGSEEEIFAHLGLDYVEPWERNA

SEQ ID NO: 1945 - DNA, 1182 bp, synthetic construct
  misc_feature 1..1182: note = Variant of terminal deoxynucleotidyl transferase
  source 1..1182: mol_type = other DNA
atgcaccatcatcatcatcatggcggtagcggccatccgccgagcaataccccggagggggaggtgccgagcgttatcgcccgcccggttagtcagtacagctgccagcgcaagaccacgctgaataactacaacaaaaagtttaccgacgcgctggagatcatggccgagaactacaaatttaaagagaacctgatcgcgtgtctggaagccaagcgcgccgcgagtattctgaaatatctgccgttcccggttaccagcatgaaagacatccaaggtctgccgtgcattaccgaccaagttcgtgacgtgatcgaggagatcatcgaagagggcgagagcagccgtgttaaagaagttctcaatgacgagcgctacaaggcctttaagcagttcaccagcgtgttcggtgtgggcgtgaaaaccgcggaaaagtggtaccgtatgggcctccgtacggttgaagaggcaaaggccagtaagagtctgaagctgagcaagatgcagaaggcgggcttcctgtattacgaggatctggcgagccgcgttagtaaagaagaagccgatgccgttacgctcatcgtgaagaacacggtgcgtacctttctgccggatgcgctggtgaccatcaccggcggtttccgccgtggcaaacctatgggccacgacgttgactttctgatcacgaatccgggcccgaaagaggatgacgagctgctccacaaagtggttgatctgctcaagaagcaaggtctgctgctgtacgaagacatcaaagagagcacgttcgtggaggggcaactgccaagtcgcaaaatcgacgccatggacaacttccagaagtgcttcgccattctcaagctgtaccagccgggcgtggataacagcagctataacacgagtaagaagagtgacatggccgaggttaaggattggaaagcgattcgtgtggatctggtgatcacgccattcgagcagtacgcctatgcgctgctcggttggacgggcagcaaagaatttcgtcgcgatctgcgccgctatgcggaggaagagcgcggcatgatcctcgacaaccatgccctctacgaccgcaaaaagcgcatctttctgaaagcgggcagcgaagaagagattttcgcgcatctgggtctggattatgtggagccgtgggaacgcaacgcg

SEQ ID NO: 1946 - protein, 394 aa, synthetic construct
  REGION 1..394: note = Variant of terminal deoxynucleotidyl transferase
MHHHHHHGGSGHPPSNTPEGEVPSVIARPVSQYSCQRKTTLNNYNKKFTDALEIMAENYKFKENLIACLEAKRAASILKYLPFPVTSMKDIQGLPCITDQVRDVIEEIIEEGESSRVKEVLNDERYKAFKQFTSVFGVGVKTAEKWYRMGLRTVEEAKASKSLKLSKMQKAGFLYYEDLASRVSKEEADAVTLIVKNTVRTFLPDALVTITGGFRRGKPMGHDVDFLITNPGPKEDDELLHKVVDLLKKQGLLLYEDIKESTFVEGQLPSRKIDAMDNFQKCFAILKLYQPGVDNSSYNTSKKSDMAEVKDWKAIRVDLVITPFEQYAYALLGWTGSKEFRRDLRRYAEEERGMILDNHALYDRKKRIFLKAGSEEEIFAHLGLDYVEPWERNA

SEQ ID NO: 1947 - DNA, 1182 bp, synthetic construct
  misc_feature 1..1182: note = Variant of terminal deoxynucleotidyl transferase
  source 1..1182: mol_type = other DNA
atgcaccatcatcatcatcatggcgatagcggccatccgccgagcaataccccggagggggaggtgccgagcgttatcgccgggccggttagtcagtacagctgccagcgcaagaccacgctgaataactacaacaaaaagtttaccgacgcgctggagatcatggccgagaactacaaatttaaagagaacctgatcgcgtgtctggaagccaagcgcgccgcgagtattctgaaatatctgccgttcccggttaccagcatgaaagacatccaaggtctgccgtgcattaccgaccaagttcgtgacgtgatcgaggagatcatcgaagagggcgagagcagccgtgttaaagaagttctcaatgacgagcgctacaaggcctttaagcagttcaccagcgtgttcggtgtgggcgtgaaaaccgcggaaaagtggtttcgtatgggcctccgtacggttgaagacgcacgtgccagtaagagtctgaagctgagcaagatgcagaaggcgggcctgctgtattacgaggatctggcgagccgcgttagtaaagaagaagccgatgttgttacgtcgatcgtgaagaatacggtgcgtacctttctgccggatgcgctggtgaccatcaccggcggtttccgccgtggcaaacctatgggccacgacatcgactttctgatcacgaatccgggcccgaaagaggatgacgagctgctccacaaagtggttgatctgctcaagaagcaaggtctgctgctgtacgaagacatcaaagagagcacgttcgtggaggggcaactgccaagtcgcaaaatcgacgccatggacaacttccagaagtgcttcgccattctcaagctgtaccagccgggcgtggataacagcagctataacacgagtaagggtagtgacatggccgaggttaaggattggaaagcgattcgtgtggatctggtgatcacgccattcgagcagtacgcctatgcgctgctcggttggacgggcagcaaagaatttcgtcgcgatctgcgccgctatgcggaggaagagcgcggcatgatcctcgacaaccatgccctctacgacctgaaaaagcgcatctttctgaaagcgggcagcgaagaagagattttcgcgcatctgggtctggattatgtggagccgtgggaacgcaacgcg

SEQ ID NO: 1948 - protein, 394 aa, synthetic construct
  REGION 1..394: note = Variant of terminal deoxynucleotidyl transferase
MHHHHHHGDSGHPPSNTPEGEVPSVIAGPVSQYSCQRKTTLNNYNKKFTDALEIMAENYKFKENLIACLEAKRAASILKYLPFPVTSMKDIQGLPCITDQVRDVIEEIIEEGESSRVKEVLNDERYKAFKQFTSVFGVGVKTAEKWFRMGLRTVEDARASKSLKLSKMQKAGLLYYEDLASRVSKEEADVVTSIVKNTVRTFLPDALVTITGGFRRGKPMGHDIDFLITNPGPKEDDELLHKVVDLLKKQGLLLYEDIKESTFVEGQLPSRKIDAMDNFQKCFAILKLYQPGVDNSSYNTSKGSDMAEVKDWKAIRVDLVITPFEQYAYALLGWTGSKEFRRDLRRYAEEERGMILDNHALYDLKKRIFLKAGSEEEIFAHLGLDYVEPWERNA

SEQ ID NO: 1949 - DNA, 1182 bp, synthetic construct
  misc_feature 1..1182: note = Variant of terminal deoxynucleotidyl transferase
  source 1..1182: mol_type = other DNA
atgcaccatcatcatcatcatggcggtagcggccatccgattagcaataccccggagggggaggtgccgagcgttatcgcccgcccggttagtcagtacagctgccagcgcaagaccacgctgaataactacaacaaaaagtttaccgacgcgctggagatcatggccgagaactacaaatttaaagagaacctgatcgcgtgtctggaagccaagcgcgccgcgagtattctgaaatatctgccgttcgaggttaccagcatgaaagacatccaaggtctgccgtgcattaccgaccaagttcgtgacgtgatcgaggagatcatcgaagagggcgagagcagccgtgttaaagaagttctcaatgacgagcgctacaaggcctttaagcagttcaccagcgtgttcggtgtgggcgtgaaaaccgcggaaaagtggttccgtatgggcctccgtacggttgaagaggcaaaggccagtaagagtctgaagctgagcaagatgcagaaggcgggcttcctgtattacgaggatctggcgagccgcgttagtaaagaagaagccgatgccgttacgctcatcgtgaagaacacggtgcgtacctttctgccggatgcgctggtgaccatcaccggcggtttccgccgtggcaaacctatgggccacgacgttgactttctgatcacgaatccgggcccgaaagaggatgacgagctgctccacaaagtggttgatctgctcaagaagcaaggtctgctgctgtacgaagacatcaaagagagcacgttcgtggaggggcaactgccaagtcgcaaaatcgacgccatggacaacttccagaagtgcttcgccattctcaagctgtaccagccgggcgtggataacaactcgtatgggacgagtaagaagagtgacatggccgaggttaaggattggaaagcgattcgtgtggatctggtgatcacgccattcgagcagtacgcctatgcgctgctcggttggacgggcagcaaagaatttcgtcgcgatctgcgccgctatgcggaggaagagcgcggcatgatcctcgacaaccatgccctctacgaccgcaaaaagcgcatctttctgaaagcgggcagcgaagaagagattttcgcgcatctgggtctggattatgtggagccgtgggaacgcaacgcg

SEQ ID NO: 1950 - protein, 394 aa, synthetic construct
  REGION 1..394: note = Variant of terminal deoxynucleotidyl transferase
MHHHHHHGGSGHPISNTPEGEVPSVIARPVSQYSCQRKTTLNNYNKKFTDALEIMAENYKFKENLIACLEAKRAASILKYLPFEVTSMKDIQGLPCITDQVRDVIEEIIEEGESSRVKEVLNDERYKAFKQFTSVFGVGVKTAEKWFRMGLRTVEEAKASKSLKLSKMQKAGFLYYEDLASRVSKEEADAVTLIVKNTVRTFLPDALVTITGGFRRGKPMGHDVDFLITNPGPKEDDELLHKVVDLLKKQGLLLYEDIKESTFVEGQLPSRKIDAMDNFQKCFAILKLYQPGVDNNSYGTSKKSDMAEVKDWKAIRVDLVITPFEQYAYALLGWTGSKEFRRDLRRYAEEERGMILDNHALYDRKKRIFLKAGSEEEIFAHLGLDYVEPWERNA

SEQ ID NO: 1951 - DNA, 1182 bp, synthetic construct
  misc_feature 1..1182: note = Variant of terminal deoxynucleotidyl transferase
  source 1..1182: mol_type = other DNA
atgcaccatcatcatcatcatggcggtagcggccatccgattagcaataccccggagggggaggtgccgagcgttatcgcccgcccggttagtcagtacagctgccagcgcaagaccacgctgaataactacaacaaaaagtttaccgacgcgctggagatcatggccgagaactacaaatttaaagagaacctgatcgcgtgtctggaagccaagcgcgccgcgagtattctgaaatatctgccgttcgaggttaccagcatgaaagacatccaaggtctgccgtgcattaccgaccaagttcgtgacgtgatcgaggagatcatcgaagagggcgagagcagccgtgttaaagaagttctcaatgacgagcgctacaaggcctttaagcagttcaccagcgtgttcggtgtgggcgtgaaaaccgcggaaaagtggttccgtatgggcctccgtacggttgaagaggcaaaggccagtaaggcgctgaagctgagcaagatgcagaaggcgggcttcctgtattacgaggatctggcgagccgcgttagtaaagaagaagccgatgccgttacgctcatcgtgaagaacacggtgcgtacctttctgccggatgcgctggtgaccatcaccggcggtttccgccgtggcaaacctatgggccacgacgttgactttctgatcacgaatccgggcccgaaagaggatgacgagctgctccacaaagtggttgatctgctcaagaagcaaggtctgctgctgtacgaagacatcaaagagagcacgttcgtggaggggcaactgccaagtcgcaaaatcgacgccatggacaacttccagaagtgcttcgccattctcaagctgtaccagccgggcgtggataacagcgcgtatgggacgagtaagaagagtgacatggccgaggttaaggattggaaagcgattcgtgtggatctggtgatcacgccattcgagcagtacgcctatgcgctgctcggttggacgggcagcaaagaatttcgtcgcgatctgcgccgctatgcggaggaagagcgcggcatgatcctcgacaaccatgccctctacgaccgcaaaaagcgcatctttctgaaagcgggcagcgaagaagagattttcgcgcatctgggtctggattatgtggagccgtgggaacgcaacgcg

SEQ ID NO: 1952 - protein, 394 aa, synthetic construct
  REGION 1..394: note = Variant of terminal deoxynucleotidyl transferase
MHHHHHHGGSGHPISNTPEGEVPSVIARPVSQYSCQRKTTLNNYNKKFTDALEIMAENYKFKENLIACLEAKRAASILKYLPFEVTSMKDIQGLPCITDQVRDVIEEIIEEGESSRVKEVLNDERYKAFKQFTSVFGVGVKTAEKWFRMGLRTVEEAKASKALKLSKMQKAGFLYYEDLASRVSKEEADAVTLIVKNTVRTFLPDALVTITGGFRRGKPMGHDVDFLITNPGPKEDDELLHKVVDLLKKQGLLLYEDIKESTFVEGQLPSRKIDAMDNFQKCFAILKLYQPGVDNSAYGTSKKSDMAEVKDWKAIRVDLVITPFEQYAYALLGWTGSKEFRRDLRRYAEEERGMILDNHALYDRKKRIFLKAGSEEEIFAHLGLDYVEPWERNA

SEQ ID NO: 1953 - DNA, 1182 bp, synthetic construct
  misc_feature 1..1182: note = Variant of terminal deoxynucleotidyl transferase
  source 1..1182: mol_type = other DNA
atgcaccatcatcatcatcatggcgatagcggccatccgccgagcaataccccggagggggaggtgccgagcgttatcgccgagccggttagtcagtacagctgccagcgcaagaccacgctgaataactacaacaaaaagtttaccgacgcgctggagatcatggccgagaactacaaatttaaagagaacctgatcgcgtgtctggaagccaagcgcgccgcgagtattctgaaatatctgccgttcccggttaccagcatgaaagacatccaaggtctgccgtgcattaccgaccaagttcgtgacgtgatcgaggagatcatcgaagagggcgagagcagccgtgttaaagaagttctcaatgacgagcgctacaaggcctttaagcagttcaccagcgtgttcggtgtgggcgtgaaaaccgcggaaaagtggtttcgtatgggcctccgtacggttgaagacgcacgtgccagtaagagtctgaagctgagcaagatgcagaaggcgggctttctgtattacgaggatctggcgagccgcgttagtaaagaagaagccgatgccgttacgctcatcgtgaagaacacggtgcgtacctttctgccggatgcgctggtgaccatcaccggcggtttccgccgtggcaaacctatgggccacgacatcgactttctgatcacgaatccgggcccgaaagaggatgacgagctgctccacaaagtggttgatctgctcaagaagcaaggtctgctgctgtacgaagacatcaaagagagcacgttcgtggaggggcaactgccaagtcgcaaaatcgacgccatggacaacttccagaagtgcttcgccattctcaagctgtaccgtccgggcgtggataacagcagctataacacgagtaagaagagtgacatggccgaggttaaggattggaaagcgattcgtgtggatctggtgatcacgccattcgagcagtacgcctatgcgctgctcggttggacgggcagcaaagaatttcgtcgcgatctgcgccgctatgcggaggaagagcgcggcatgatcctcgacaaccatgccctctacgacctgaaaaagcgcatctttctgaaagcgggcagcgaagaagagattttcgcgcatctgggtctggattatgtggagccgtgggaacgcaacgcg

SEQ ID NO: 1954 - protein, 394 aa, synthetic construct
  REGION 1..394: note = Variant of terminal deoxynucleotidyl transferase
MHHHHHHGDSGHPPSNTPEGEVPSVIAEPVSQYSCQRKTTLNNYNKKFTDALEIMAENYKFKENLIACLEAKRAASILKYLPFPVTSMKDIQGLPCITDQVRDVIEEIIEEGESSRVKEVLNDERYKAFKQFTSVFGVGVKTAEKWFRMGLRTVEDARASKSLKLSKMQKAGFLYYEDLASRVSKEEADAVTLIVKNTVRTFLPDALVTITGGFRRGKPMGHDIDFLITNPGPKEDDELLHKVVDLLKKQGLLLYEDIKESTFVEGQLPSRKIDAMDNFQKCFAILKLYRPGVDNSSYNTSKKSDMAEVKDWKAIRVDLVITPFEQYAYALLGWTGSKEFRRDLRRYAEEERGMILDNHALYDLKKRIFLKAGSEEEIFAHLGLDYVEPWERNA

SEQ ID NO: 1955 - DNA, 1182 bp, synthetic construct
  misc_feature 1..1182: note = Variant of terminal deoxynucleotidyl transferase
  source 1..1182: mol_type = other DNA
atgcaccatcatcatcatcatggcggtagcggccatccgattagcaataccccggagggggaggtgccgagcgttatcgcccgcccggttagtcagtacagctgccagcgcaagaccacgctgaataactacaacaaaaagtttaccgacgcgctggagatcatggccgagaactacaaatttaaagagaacctgatcgcgtgtctggaagccaagcgcgccgcgagtattctgaaatatctgccgttcccggttaccagcatgaaagacatccaaggtctgccgtgcattaccgaccaagttcgtgacgtgatcgaggagatcatcgaagagggcgagagcagccgtgttaaagaagttctcaatgacgagcgctacaaggcctttaagcagttcaccagcgtgttcggtgtgggcgtgaaaaccgcggaaaagtggttccgtatgggcctccgtacggttgaagaggcaaaggccagtaagtcgctgaagctgagcaagatgcagaaggcgggcttcctgtattacgaggatctggcgagccgcgttagtaaagaagaagccgatgccgttacgctcatcgtgaagaacacggtgcgtacctttctgccggatgcgctggtgaccatcaccggcggtttccgccgtggcaaacctatgggccacgacgttgactttctgatcacgaatccgggcccgaaagaggatgacgagctgctccacaaagtggttgatctgctcaagaagcaaggtctgctgctgtacgaagacatcaaagagagcacgttcgtggaggggcaactgccaagtcgcaaaatcgacgccatggacaacttccagaagtgcttcgccattctcaagctgtaccagccgggcgtggataacaactcggtgaacacgagtaagaagagtgacatggccgaggttaaggattggaaagcgattcgtgtggatctggtgatcacgccattcgagcagtacgcctatgcgctgctcggttggacgggcagcaaagaatttcgtcgcgatctgcgccgctatgcggaggaagagcgcggcatgatcctcgacaaccatgccctctacgaccgcaaaaagcgcatctttctgaaagcgggcagcgaagaagagattttcgcgcatctgggtctggattatgtggagccgtgggaacgcaacgcg

SEQ ID NO: 1956 - protein, 394 aa, synthetic construct
  REGION 1..394: note = Variant of terminal deoxynucleotidyl transferase
MHHHHHHGGSGHPISNTPEGEVPSVIARPVSQYSCQRKTTLNNYNKKFTDALEIMAENYKFKENLIACLEAKRAASILKYLPFPVTSMKDIQGLPCITDQVRDVIEEIIEEGESSRVKEVLNDERYKAFKQFTSVFGVGVKTAEKWFRMGLRTVEEAKASKSLKLSKMQKAGFLYYEDLASRVSKEEADAVTLIVKNTVRTFLPDALVTITGGFRRGKPMGHDVDFLITNPGPKEDDELLHKVVDLLKKQGLLLYEDIKESTFVEGQLPSRKIDAMDNFQKCFAILKLYQPGVDNNSVNTSKKSDMAEVKDWKAIRVDLVITPFEQYAYALLGWTGSKEFRRDLRRYAEEERGMILDNHALYDRKKRIFLKAGSEEEIFAHLGLDYVEPWERNA

SEQ ID NO: 1957 - DNA, 1182 bp, synthetic construct
  misc_feature 1..1182: note = Variant of terminal deoxynucleotidyl transferase
  source 1..1182: mol_type = other DNA
atgcaccatcatcatcatcatggcggtagcggccatccgccgagcaataccccggagggggaggtgccgagcgttatcgcccgcccggttagtcagtacagctgccagcgcaagaccacgctgaataactacaacaaaaagtttaccgacgcgctggagatcatggccgagaactacaaatttaaagagaacctgatcgcgtgtctggaagccaagcgcgccgcgagtattctgaaatatctgccgttcccggttaccagcatgaaagacatccaaggtctgccgtgcattaccgaccaagttcgtgacgtgatcgaggagatcatcgaagagggcgagagcagccgtgttaaagaagttctcaatgacgagcgctacaaggcctttaagcagttcaccagcgtgttcggtgtgggcgtgaaaaccgcggaaaagtggtaccgtatgggcctccgtacggttgaagaggcaaaggccagtaagtcgctgaagctgagcaagatgcagaaggcgggcttcctgtattacgaggatctggcgagccgcgttagtaaagaagaagccgatgccgttacgctcatcgtgaagaacacggtgcgtacctttctgccggatgcgctggtgaccatcaccggcggtttccgccgtggcaaacctatgggccacgacgttgactttctgatcacgaatccgggcccgaaagaggatgacgagctgctccacaaagtggttgatctgctcaagaagcaaggtctgctgctgtacgaagacatcaaagagagcacgttcgtggaggggcaactgccaagtcgcaaaatcgacgccatggacaacttccagaagtgcttcgccattctcaagctgtaccagccgggcgtggataacagcgcggtgaacacgagtaagaagagtgacatggccgaggttaaggattggaaagcgattcgtgtggatctggtgatcacgccattcgagcagtacgcctatgcgctgctcggttggacgggcagcaaagaatttcgtcgcgatctgcgccgctatgcggaggaagagcgcggcatgatcctcgacaaccatgccctctacgaccgcaaaaagcgcatctttctgaaagcgggcagcgaagaagagattttcgcgcatctgggtctggattatgtggagccgtgggaacgcaacgcg

SEQ ID NO: 1958 - protein, 394 aa, synthetic construct
  REGION 1..394: note = Variant of terminal deoxynucleotidyl transferase
MHHHHHHGGSGHPPSNTPEGEVPSVIARPVSQYSCQRKTTLNNYNKKFTDALEIMAENYKFKENLIACLEAKRAASILKYLPFPVTSMKDIQGLPCITDQVRDVIEEIIEEGESSRVKEVLNDERYKAFKQFTSVFGVGVKTAEKWYRMGLRTVEEAKASKSLKLSKMQKAGFLYYEDLASRVSKEEADAVTLIVKNTVRTFLPDALVTITGGFRRGKPMGHDVDFLITNPGPKEDDELLHKVVDLLKKQGLLLYEDIKESTFVEGQLPSRKIDAMDNFQKCFAILKLYQPGVDNSAVNTSKKSDMAEVKDWKAIRVDLVITPFEQYAYALLGWTGSKEFRRDLRRYAEEERGMILDNHALYDRKKRIFLKAGSEEEIFAHLGLDYVEPWERNA

SEQ ID NO: 1959 - DNA, 1182 bp, synthetic construct
  misc_feature 1..1182: note = Variant of terminal deoxynucleotidyl transferase
  source 1..1182: mol_type = other DNA
atgcaccatcatcatcatcatggcggtagcggccatccgccgagcaataccccggagggggaggtgccgagcgttatcgcccgcccggttagtcagtacagctgccagcgcaagaccacgctgaataactacaacaaaaagtttaccgacgcgctggagatcatggccgagagctacaaatttaaagagaacctgatcgcgtgtctggaagccaagcgcgccgcgagtattctgaaatatctgccgttcccggttaccagcatgaaagacatccaaggtctgccgtgcattaccgaccaagttcgtgacgtgatcgaggagatcatcgaagagggcgagagcagccgtgttaaagaagttctcaatgacgagcgctacaaggcctttaagcagttcaccagcgtgttcggtgtgggcgtgaaaaccgcggaaaagtggtaccgtatgggcctccgtacggttgaagaggcaaaggccagtaaggcgctgaagctgagcaagatgcagaaggcgggcttcctgtattacgaggatctggcgagccgcgttagtaaagaagaagccgatgccgttacgctcatcgtgaaggagacggtgcgtacctttctgccggatgcgctggtgaccatcaccggcggtttccgccgtggcaaacctatgggccacgacgttgactttctgatcacgaatccgggcccgaaagaggatgacgagctgctccacaaagtggttgatctgctcaagaagcaaggtctgctgctgtacgaagacatcaaagagagcacgttcgtggaggggcaactgccaagtcgcaaaatcgacgccatggacaacttccagaagtgcttcgccattctcaagctgtaccagccgggcgtggataacaacgcggtggggacgagtaagaagagtgacatggccgaggttaaggattggaaagcgattcgtgtggatctggtgatcacgccattcgagcagtacgcctatgcgctgctcggttggacgggcagcaaagaatttcgtcgcgatctgcgccgctatgcggaggaagagcgcggcatgatcctcgacaaccatgccctctacgaccgcaaaaagcgcatctttctgaaagcgggcagcgaagaagagattttcgcgcatctgggtctggattatgtggagccgtgggaacgcaacgcg

SEQ ID NO: 1960 - protein, 394 aa, synthetic construct
  REGION 1..394: note = Variant of terminal deoxynucleotidyl transferase
MHHHHHHGGSGHPPSNTPEGEVPSVIARPVSQYSCQRKTTLNNYNKKFTDALEIMAESYKFKENLIACLEAKRAASILKYLPFPVTSMKDIQGLPCITDQVRDVIEEIIEEGESSRVKEVLNDERYKAFKQFTSVFGVGVKTAEKWYRMGLRTVEEAKASKALKLSKMQKAGFLYYEDLASRVSKEEADAVTLIVKETVRTFLPDALVTITGGFRRGKPMGHDVDFLITNPGPKEDDELLHKVVDLLKKQGLLLYEDIKESTFVEGQLPSRKIDAMDNFQKCFAILKLYQPGVDNNAVGTSKKSDMAEVKDWKAIRVDLVITPFEQYAYALLGWTGSKEFRRDLRRYAEEERGMILDNHALYDRKKRIFLKAGSEEEIFAHLGLDYVEPWERNA

SEQ ID NO: 1961 - DNA, 1182 bp, synthetic construct
  misc_feature 1..1182: note = Variant of terminal deoxynucleotidyl transferase
  source 1..1182: mol_type = other DNA
atgcaccatcatcatcatcatggcggtagcggccatccgccgagcaataccccggagggggaggtgtcgagcgttatcgccgagccggttagtcagtacagctgccagcgcaagaccacgctgaataactacaacaaaaagtttaccgacgcgctggagatcatggccgagaactacaaatttaaagagaacctgatcgcgtgtctggaagccaagcgcgccgcgagtattctgaaatatctgccgttcccggttaccagcatgaaagacatccaaggtctgccgtgcattaccgaccaagttcgtgacgtgatcgaggagatcatcgaagagggcgagagcagccgtgttaaagaagttctcaatgacgagcgctacaaggcctttaagcagttcaccagcgtgttcggtgtgggcgtgaaaaccgcggaaaagtggtttcgtatgggcctccgtacggttgaagacgcacgtgccagtaagagtctgaagctgagcaagatgcagaaggcgggctttctgtattacgaggatctggcgagccgcgttagtaaagaagaagccgatgttgttacgtcgatcgtgaagaatacggtgcgtacctttctgccggatgcgctggtgaccatcaccggcggtttccgccgtggcaaacctatgggccacgacatcgactttctgatcacgaatccgggcccgaaagaggatgacgagctgctccacaaagtggttgatctgctcaagaagcaaggtctgctgctgtacgaagacatcaaagagagcacgttcgtggaggggcaactgccaagtcgcaaaatcgacgccatggacaacttccagaagtgcttcgccattctcaagctgtaccgtccgggcgtggataacagcagctataacacgagtaagaagagtgacatggccgaggttaaggattggaaagcgattcgtgtggatctggtgatcacgccattcgagcagtacgcctatgcgctgctcggttggacgggcagcaaagaatttcgtcgcgatctgcgccgctatgcggaggaagagcgcggcatgatcctcgacaaccatgccctctacgacctgaaaaagcgcatctttctgaaagcgggcagcgaagaagagattttcgcgcatctgggtctggattatgtggagccgtgggaacgcaacgcg

SEQ ID NO: 1962 - protein, 394 aa, synthetic construct
  REGION 1..394: note = Variant of terminal deoxynucleotidyl transferase
MHHHHHHGGSGHPPSNTPEGEVSSVIAEPVSQYSCQRKTTLNNYNKKFTDALEIMAENYKFKENLIACLEAKRAASILKYLPFPVTSMKDIQGLPCITDQVRDVIEEIIEEGESSRVKEVLNDERYKAFKQFTSVFGVGVKTAEKWFRMGLRTVEDARASKSLKLSKMQKAGFLYYEDLASRVSKEEADVVTSIVKNTVRTFLPDALVTITGGFRRGKPMGHDIDFLITNPGPKEDDELLHKVVDLLKKQGLLLYEDIKESTFVEGQLPSRKIDAMDNFQKCFAILKLYRPGVDNSSYNTSKKSDMAEVKDWKAIRVDLVITPFEQYAYALLGWTGSKEFRRDLRRYAEEERGMILDNHALYDLKKRIFLKAGSEEEIFAHLGLDYVEPWERNA

SEQ ID NO: 1963 - DNA, 1182 bp, synthetic construct
  misc_feature 1..1182: note = Variant of terminal deoxynucleotidyl transferase
  source 1..1182: mol_type = other DNA
atgcaccatcatcatcatcatggcggtagcggccatccgccgagcaataccccggagggggaggtgccgagcgttatcgcccgcccggttagtcagtacagctgccagcgcaagaccacgctgaataactacaacaaaaagtttaccgacgcgctggagatcatggccgagaactacaaatttaaagagaacctgatcgcgtgtctggaagccaagcgcgccgcgagtattctgaaatatctgccgttcccggttaccagcatgaaagacatccaaggtctgccgtgcattaccgaccaagttcgtgacgtgatcgaggagatcatcgaagagggcgagagcagccgtgttaaagaagttctcaatgacgagcgctacaaggcctttaagcagttcaccagcgtgttcggtgtgggcgtgaaaaccgcggaaaagtggtttcgtatgggcctccgtacggttgaagaggcaaaggccagtaagagtctgaagctgagcaagatgcagaaggcgggcttcctgtattacgaggatctggcgagccgcgttagtaaagaagaagccgatgccgttacgctcatcgtgaagaacacggtgcgtacctttctgccggatgcgctggtgaccatcaccggcggtttccgccgtggcaaacctatgggccacgacgttgactttctgatcacgaatccgggcccgaaagaggatgacgagctgctccacaaagtggttgatctgctcaagaagcaaggtctgctgctgtacgaagacatcaaagagagcacgttcgtggaggggcaactgccaagtcgcaaaatcgacgccatggacaacttccagaagtgcttcgccattctcaagctgtaccagccgggcgtggataacaactcggtgaacacgagtaagaagagtgacatggccgaggttaaggattggaaagcgattcgtgtggatctggtgatcacgccattcgagcagtacgcctatgcgctgctcggttggacgggcagcaaagaatttcgtcgcgatctgcgccgctatgcggaggaagagcgcggcatgatcctcgacaaccatgccctctacgaccgcaaaaagcgcatctttctgaaagcgggcagcgaagaagagattttcgcgcatctgggtctggattatgtggagccgtgggaacgcaacgcg

SEQ ID NO: 1964 - protein, 394 aa, synthetic construct
  REGION 1..394: note = Variant of terminal deoxynucleotidyl transferase
MHHHHHHGGSGHPPSNTPEGEVPSVIARPVSQYSCQRKTTLNNYNKKFTDALEIMAENYKFKENLIACLEAKRAASILKYLPFPVTSMKDIQGLPCITDQVRDVIEEIIEEGESSRVKEVLNDERYKAFKQFTSVFGVGVKTAEKWFRMGLRTVEEAKASKSLKLSKMQKAGFLYYEDLASRVSKEEADAVTLIVKNTVRTFLPDALVTITGGFRRGKPMGHDVDFLITNPGPKEDDELLHKVVDLLKKQGLLLYEDIKESTFVEGQLPSRKIDAMDNFQKCFAILKLYQPGVDNNSVNTSKKSDMAEVKDWKAIRVDLVITPFEQYAYALLGWTGSKEFRRDLRRYAEEERGMILDNHALYDRKKRIFLKAGSEEEIFAHLGLDYVEPWERNA

SEQ ID NO: 1965 - DNA, 1182 bp, synthetic construct
  misc_feature 1..1182: note = Variant of terminal deoxynucleotidyl transferase
  source 1..1182: mol_type = other DNA
atgcaccatcatcatcatcatggcggtagcggccatccgccgagcaataccccggagggggaggtgccgagcgttatcgcccgcccggttagtcagtacagctgccagcgcaagaccacgctgaataactacaacaaaaagtttaccgacgcgctggagatcatggccgagagctacaaatttaaagagaacctgatcgcgtgtctggaagccaagcgcgccgcgagtattctgaaatatctgccgttcccggttaccagcatgaaagacatccaaggtctgccgtgcattaccgaccaagttcgtgacgtgatcgaggagatcatcgaagagggcgagagcagccgtgttaaagaagttctcaatgacgagcgctacaaggcctttaagcagttcaccagcgtgttcggtgtgggcgtgaaaaccgcggaaaagtggttccgtatgggcctccgtacggttgaagaggcaaaggccagtaagtcgctgaagctgagcaagatgcagaaggcgggcttcctgtattacgaggatctggcgagccgcgttagtaaagaagaagccgatgccgttacgctcatcgtgaagaacacggtgcgtacctttctgccggatgcgctggtgaccatcaccggcggtttccgccgtggcaaacctatgggccacgacgttgactttctgatcacgaatccgggcccgaaagaggatgacgagctgctccacaaagtggttgatctgctcaagaagcaaggtctgctgctgtacgaagacatcaaagagagcacgttcgtggaggggcaactgccaagtcgcaaaatcgacgccatggacaacttccagaagtgcttcgccattctcaagctgtaccagccgggcgtggataacagctcgtatgggacgagtaagaagagtgacatggccgaggttaaggattggaaagcgattcgtgtggatctggtgatcacgccattcgagcagtacgcctatgcgctgctcggttggacgggcagcaaagaatttcgtcgcgatctgcgccgctatgcggaggaagagcgcggcatgatcctcgacaaccatgccctctacgaccgcaaaaagcgcatctttctgaaagcgggcagcgaagaagagattttcgcgcatctgggtctggattatgtggagccgtgggaacgcaacgcg

SEQ ID NO: 1966 - protein, 394 aa, synthetic construct
  REGION 1..394: note = Variant of terminal deoxynucleotidyl transferase
MHHHHHHGGSGHPPSNTPEGEVPSVIARPVSQYSCQRKTTLNNYNKKFTDALEIMAESYKFKENLIACLEAKRAASILKYLPFPVTSMKDIQGLPCITDQVRDVIEEIIEEGESSRVKEVLNDERYKAFKQFTSVFGVGVKTAEKWFRMGLRTVEEAKASKSLKLSKMQKAGFLYYEDLASRVSKEEADAVTLIVKNTVRTFLPDALVTITGGFRRGKPMGHDVDFLITNPGPKEDDELLHKVVDLLKKQGLLLYEDIKESTFVEGQLPSRKIDAMDNFQKCFAILKLYQPGVDNSSYGTSKKSDMAEVKDWKAIRVDLVITPFEQYAYALLGWTGSKEFRRDLRRYAEEERGMILDNHALYDRKKRIFLKAGSEEEIFAHLGLDYVEPWERNA

SEQ ID NO: 1967 - DNA, 1182 bp, synthetic construct
  misc_feature 1..1182: note = Variant of terminal deoxynucleotidyl transferase
  source 1..1182: mol_type = other DNA
atgcaccatcatcatcatcatggcggtagcggccatccgattagcaataccccggagggggaggtgccgagcgttatcgcccgcccggttagtcagtacagctgccagcgcaagaccacgctgaataactacaacaaaaagtttaccgacgcgctggagatcatggccgagaactacaaatttaaagagaacctgatcgcgtgtctggaagccaagcgcgccgcgagtattctgaaatatctgccgttcccggttaccagcatgaaagacatccaaggtctgccgtgcattaccgaccaagttcgtgacgtgatcgaggagatcatcgaagagggcgagagcagccgtgttaaagaagttctcaatgacgagcgctacaaggcctttaagcagttcaccagcgtgttcggtgtgggcgtgaaaaccgcggaaaagtggttccgtatgggcctccgtacggttgaagaggcaaaggccagtaaggcgctgaagctgagcaagatgcagaaggcgggcttcctgtattacgaggatctggcgagccgcgttagtaaagaagaagccgatgccgttacgctcatcgtgaagaacacggtgcgtacctttctgccggatgcgctggtgaccatcaccggcggtttccgccgtggcaaacctatgggccacgacgttgactttctgatcacgaatccgggcccgaaagaggatgacgagctgctccacaaagtggttgatctgctcaagaagcaaggtctgctgctgtacgaagacatcaaagagagcacgttcgtggaggggcaactgccaagtcgcaaaatcgacgccatggacaacttccagaagtgcttcgccattctcaagctgtaccagccgggcgtggataacagctcggtggggacgagtaagaagagtgacatggccgaggttaaggattggaaagcgattcgtgtggatctggtgatcacgccattcgagcagtacgcctatgcgctgctcggttggacgggcagcaaagaatttcgtcgcgatctgcgccgctatgcggaggaagagcgcggcatgatcctcgacaaccatgccctctacgaccgcaaaaagcgcatctttctgaaagcgggcagcgaagaagagattttcgcgcatctgggtctggattatgtggagccgtgggaacgcaacgcg

SEQ ID NO: 1968 - protein, 394 aa, synthetic construct
  REGION 1..394: note = Variant of terminal deoxynucleotidyl transferase
MHHHHHHGGSGHPISNTPEGEVPSVIARPVSQYSCQRKTTLNNYNKKFTDALEIMAENYKFKENLIACLEAKRAASILKYLPFPVTSMKDIQGLPCITDQVRDVIEEIIEEGESSRVKEVLNDERYKAFKQFTSVFGVGVKTAEKWFRMGLRTVEEAKASKALKLSKMQKAGFLYYEDLASRVSKEEADAVTLIVKNTVRTFLPDALVTITGGFRRGKPMGHDVDFLITNPGPKEDDELLHKVVDLLKKQGLLLYEDIKESTFVEGQLPSRKIDAMDNFQKCFAILKLYQPGVDNSSVGTSKKSDMAEVKDWKAIRVDLVITPFEQYAYALLGWTGSKEFRRDLRRYAEEERGMILDNHALYDRKKRIFLKAGSEEEIFAHLGLDYVEPWERNA

SEQ ID NO: 1969 - DNA, 1182 bp, synthetic construct
  misc_feature 1..1182: note = Variant of terminal deoxynucleotidyl transferase
  source 1..1182: mol_type = other DNA
atgcaccatcatcatcatcatggcggtagcggccatccgattagcaataccccggagggggaggtgccgagcgttatcgcccgcccggttagtcagtacagctgccagcgcaagaccacgctgaataactacaacaaaaagtttaccgacgcgctggagatcatggccgagaactacaaatttaaagagaacctgatcgcgtgtctggaagccaagcgcgccgcgagtattctgaaatatctgccgttcgaggttaccagcatgaaagacatccaaggtctgccgtgcattaccgaccaagttcgtgacgtgatcgaggagatcatcgaagagggcgagagcagccgtgttaaagaagttctcaatgacgagcgctacaaggcctttaagcagttcaccagcgtgttcggtgtgggcgtgaaaaccgcggaaaagtggtaccgtatgggcctccgtacggttgaagaggcaaaggccagtaagtcgctgaagctgagcaagatgcagaaggcgggcttcctgtattacgaggatctggcgagccgcgttagtaaagaagaagccgatgccgttacgagcatcgtgaaggagacggtgcgtacctttctgccggatgcgctggtgaccatcaccggcggtttccgccgtggcaaacctatgggccacgacgttgactttctgatcacgaatccgggcccgaaagaggatgacgagctgctccacaaagtggttgatctgctcaagaagcaaggtctgctgctgtacgaagacatcaaagagagcacgttcgtggaggggcaactgccaagtcgcaaaatcgacgccatggacaacttccagaagtgcttcgccattctcaagctgtaccagccgggcgtggataacaactcgtataacacgagtaagaagagtgacatggccgaggttaaggattggaaagcgattcgtgtggatctggtgatcacgccattcgagcagtacgcctatgcgctgctcggttggacgggcagcaaagaatttcgtcgcgatctgcgccgctatgcggaggaagagcgcggcatgatcctcgacaaccatgccctctacgaccgcaaaaagcgcatctttctgaaagcgggcagcgaagaagagattttcgcgcatctgggtctggattatgtggagccgtgggaacgcaacgcg

SEQ ID NO: 1970 - protein, 394 aa, synthetic construct
  REGION 1..394: note = Variant of terminal deoxynucleotidyl transferase
MHHHHHHGGSGHPISNTPEGEVPSVIARPVSQYSCQRKTTLNNYNKKFTDALEIMAENYKFKENLIACLEAKRAASILKYLPFEVTSMKDIQGLPCITDQVRDVIEEIIEEGESSRVKEVLNDERYKAFKQFTSVFGVGVKTAEKWYRMGLRTVEEAKASKSLKLSKMQKAGFLYYEDLASRVSKEEADAVTSIVKETVRTFLPDALVTITGGFRRGKPMGHDVDFLITNPGPKEDDELLHKVVDLLKKQGLLLYEDIKESTFVEGQLPSRKIDAMDNFQKCFAILKLYQPGVDNNSYNTSKKSDMAEVKDWKAIRVDLVITPFEQYAYALLGWTGSKEFRRDLRRYAEEERGMILDNHALYDRKKRIFLKAGSEEEIFAHLGLDYVEPWERNA

SEQ ID NO: 1971 - DNA, 1182 bp, synthetic construct
  misc_feature 1..1182: note = Variant of terminal deoxynucleotidyl transferase
  source 1..1182: mol_type = other DNA
atgcaccatcatcatcatcatggcggtagcggccatccgattagcaataccccggagggggaggtgccgagcgttatcgcccgcccggttagtcagtacagctgccagcgcaagaccacgctgaataactacaacaaaaagtttaccgacgcgctggagatcatggccgagagctacaaatttaaagagaacctgatcgcgtgtctggaagccaagcgcgccgcgagtattctgaaatatctgccgttcgaggttaccagcatgaaagacatccaaggtctgccgtgcattaccgaccaagttcgtgacgtgatcgaggagatcatcgaagagggcgagagcagccgtgttaaagaagttctcaatgacgagcgctacaaggcctttaagcagttcaccagcgtgttcggtgtgggcgtgaaaaccgcggaaaagtggtaccgtatgggcctccgtacggttgaagaggcaaaggccagtaaggcgctgaagctgagcaagatgcagaaggcgggcttcctgtattacgaggatctggcgagccgcgttagtaaagaagaagccgatgccgttacgctcatcgtgaagaacacggtgcgtacctttctgccggatgcgctggtgaccatcaccggcggtttccgccgtggcaaacctatgggccacgacgttgactttctgatcacgaatccgggcccgaaagaggatgacgagctgctccacaaagtggttgatctgctcaagaagcaaggtctgctgctgtacgaagacatcaaagagagcacgttcgtggaggggcaactgccaagtcgcaaaatcgacgccatggacaacttccagaagtgcttcgccattctcaagctgtaccagccgggcgtggataacaacgcggtggggacgagtaagaagagtgacatggccgaggttaaggattggaaagcgattcgtgtggatctggtgatcacgccattcgagcagtacgcctatgcgctgctcggttggacgggcagcaaagaatttcgtcgcgatctgcgccgctatgcggaggaagagcgcggcatgatcctcgacaaccatgccctctacgaccgcaaaaagcgcatctttctgaaagcgggcagcgaagaagagattttcgcgcatctgggtctggattatgtggagccgtgggaacgcaacgcg

SEQ ID NO: 1972 - protein, 394 aa, synthetic construct
  REGION 1..394: note = Variant of terminal deoxynucleotidyl transferase
MHHHHHHGGSGHPISNTPEGEVPSVIARPVSQYSCQRKTTLNNYNKKFTDALEIMAESYKFKENLIACLEAKRAASILKYLPFEVTSMKDIQGLPCITDQVRDVIEEIIEEGESSRVKEVLNDERYKAFKQFTSVFGVGVKTAEKWYRMGLRTVEEAKASKALKLSKMQKAGFLYYEDLASRVSKEEADAVTLIVKNTVRTFLPDALVTITGGFRRGKPMGHDVDFLITNPGPKEDDELLHKVVDLLKKQGLLLYEDIKESTFVEGQLPSRKIDAMDNFQKCFAILKLYQPGVDNNAVGTSKKSDMAEVKDWKAIRVDLVITPFEQYAYALLGWTGSKEFRRDLRRYAEEERGMILDNHALYDRKKRIFLKAGSEEEIFAHLGLDYVEPWERNA

SEQ ID NO: 1973 - DNA, 1182 bp, synthetic construct
  misc_feature 1..1182: note = Variant of terminal deoxynucleotidyl transferase
  source 1..1182: mol_type = other DNA
atgcaccatcatcatcatcatggcggtagcggccatccgccgagcaataccccggagggggaggtgccgagcgttatcgccgggccggttagtcagtacagctgccagcgcaagaccacgctgaataactacaacaaaaagtttaccgacgcgctggagatcatggccgagaactacaaatttaaagagaacctgatcgcgtgtctggaagccaagcgcgccgcgagtattctgaaatatctgccgttcccggttaccagcatgaaagacatccaaggtctgccgtgcattaccgaccaagttcgtgacgtgatcgaggagatcatcgaagagggcgagagcagccgtgttaaagaagttctcaatgacgagcgctacaaggcctttaagcagttcaccagcgtgttcggtgtgggcgtgaaaaccgcggaaaagtggtttcgtatgggcctccgtacggttgaagacgcaaaggccagtaagagtctgaagctgagcaagatgcagaaggcgggcctgctgtattacgaggatctggcgagccgcgttagtaaagaagaagccgatgccgttacgctcatcgtgaagaacacggtgcgtacctttctgccggatgcgctggtgaccatcaccggcggtttccgccgtggcaaacctatgggccacgacatcgactttctgatcacgaatccgggcccgaaagaggatgacgagctgctccacaaagtggttgatctgctcaagaagcaaggtctgctgctgtacgaagacatcaaagagagcacgttcgtggaggggcaactgccaagtcgcaaaatcgacgccatggacaacttccagaagtgcttcgccattctcaagctgtaccagccgggcgtggataacagcagctataacacgagtaagaagagtgacatggccgaggttaaggattggaaagcgattcgtgtggatctggtgatcacgccattcgagcagtacgcctatgcgctgctcggttggacgggcagcaaagaatttcgtcgcgatctgcgccgctatgcggaggaagagcgcggcatgatcctcgacaaccatgccctctacgacctgaaaaagcgcatctttctgaaagcgggcagcgaagaagagattttcgcgcatctgggtctggattatgtggagccgtgggaacgcaacgcg

SEQ ID NO: 1974 - protein, 394 aa, synthetic construct
  REGION 1..394: note = Variant of terminal deoxynucleotidyl transferase
MHHHHHHGGSGHPPSNTPEGEVPSVIAGPVSQYSCQRKTTLNNYNKKFTDALEIMAENYKFKENLIACLEAKRAASILKYLPFPVTSMKDIQGLPCITDQVRDVIEEIIEEGESSRVKEVLNDERYKAFKQFTSVFGVGVKTAEKWFRMGLRTVEDAKASKSLKLSKMQKAGLLYYEDLASRVSKEEADAVTLIVKNTVRTFLPDALVTITGGFRRGKPMGHDIDFLITNPGPKEDDELLHKVVDLLKKQGLLLYEDIKESTFVEGQLPSRKIDAMDNFQKCFAILKLYQPGVDNSSYNTSKKSDMAEVKDWKAIRVDLVITPFEQYAYALLGWTGSKEFRRDLRRYAEEERGMILDNHALYDLKKRIFLKAGSEEEIFAHLGLDYVEPWERNA

SEQ ID NO: 1975 - DNA, 1182 bp, synthetic construct
  misc_feature 1..1182: note = Variant of terminal deoxynucleotidyl transferase
  source 1..1182: mol_type = other DNA
atgcaccatcatcatcatcatggcgatagcggccatccgccgagcaataccccggagggggaggtgccgagcgttatcgccgagccggttagtcagtacagctgccagcgcaagaccacgctgaataactacaacaaaaagtttaccgacgcgctggagatcatggccgagaactacaaatttaaagagaacctgatcgcgtgtctggaagccaagcgcgccgcgagtattctgaaatatctgccgttcccggttaccagcatgaaagacatccaaggtctgccgtgcattaccgaccaagttcgtgacgtgatcgaggagatcatcgaagagggcgagagcagccgtgttaaagaagttctcaatgacgagcgctacaaggcctttaagcagttcaccagcgtgttcggtgtgggcgtgaaaaccgcggaaaagtggtttcgtatgggcctccgtacggttgaagaagcaaaggccagtaagagtctgaagctgagcaagatgcagaaggcgggcttcctgtattacgaggatctggcgagccgcgttagtaaagaagaagccgatgttgttacgtcgatcgtgaagaatacggtgcgtacctttctgccggatgcgctggtgaccatcaccggcggtttccgccgtggcaaacctatgggccacgacatcgactttctgatcacgaatccgggcccgaaagaggatgacgagctgctccacaaagtggttgatctgctcaagaagcaaggtctgctgctgtacgaagacatcaaagagagcacgttcgtggaggggcaactgccaagtcgcaaaatcgacgccatggacaacttccagaagtgcttcgccattctcaagctgtaccagccgggcgtggataacagcagctataacacgagtaagggtagtgacatggccgaggttaaggattggaaagcgattcgtgtggatctggtgatcacgccattcgagcagtacgcctatgcgctgctcggttggacgggcagcaaagaatttcgtcgcgatctgcgccgctatgcggaggaagagcgcggcatgatcctcgacaaccatgccctctacgacctgaaaaagcgcatctttctgaaagcgggcagcgaagaagagattttcgcgcatctgggtctggattatgtggagccgtgggaacgcaacgcg

SEQ ID NO: 1976 - protein, 394 aa, synthetic construct
  REGION 1..394: note = Variant of terminal deoxynucleotidyl transferase
MHHHHHHGDSGHPPSNTPEGEVPSVIAEPVSQYSCQRKTTLNNYNKKFTDALEIMAENYKFKENLIACLEAKRAASILKYLPFPVTSMKDIQGLPCITDQVRDVIEEIIEEGESSRVKEVLNDERYKAFKQFTSVFGVGVKTAEKWFRMGLRTVEEAKASKSLKLSKMQKAGFLYYEDLASRVSKEEADVVTSIVKNTVRTFLPDALVTITGGFRRGKPMGHDIDFLITNPGPKEDDELLHKVVDLLKKQGLLLYEDIKESTFVEGQLPSRKIDAMDNFQKCFAILKLYQPGVDNSSYNTSKGSDMAEVKDWKAIRVDLVITPFEQYAYALLGWTGSKEFRRDLRRYAEEERGMILDNHALYDLKKRIFLKAGSEEEIFAHLGLDYVEPWERNA

SEQ ID NO: 1977 - DNA, 1182 bp, synthetic construct
  misc_feature 1..1182: note = Variant of terminal deoxynucleotidyl transferase
  source 1..1182: mol_type = other DNA
atgcaccatcatcatcatcatggcggtagcggccatccgccgagcaataccccggagggggaggtgccgagcgttatcgcccgcccggttagtcagtacagctgccagcgcaagaccacgctgaataactacaacaaaaagtttaccgacgcgctggagatcatggccgagagctacaaatttaaagagaacctgatcgcgtgtctggaagccaagcgcgccgcgagtattctgaaatatctgccgttcccggttaccagcatgaaagacatccaaggtctgccgtgcattaccgaccaagttcgtgacgtgatcgaggagatcatcgaagagggcgagagcagccgtgttaaagaagttctcaatgacgagcgctacaaggcctttaagcagttcaccagcgtgttcggtgtgggcgtgaaaaccgcggaaaagtggttccgtatgggcctccgtacggttgaagaggcaaaggccagtaaggcgctgaagctgagcaagatgcagaaggcgggcttcctgtattacgaggatctggcgagccgcgttagtaaagaagaagccgatgccgttacgctcatcgtgaagaacacggtgcgtacctttctgccggatgcgctggtgaccatcaccggcggtttccgccgtggcaaacctatgggccacgacgttgactttctgatcacgaatccgggcccgaaagaggatgacgagctgctccacaaagtggttgatctgctcaagaagcaaggtctgctgctgtacgaagacatcaaagagagcacgttcgtggaggggcaactgccaagtcgcaaaatcgacgccatggacaacttccagaagtgcttcgccattctcaagctgtaccagccgggcgtggataacaactcggtgaacacgagtaagaagagtgacatggccgaggttaaggattggaaagcgattcgtgtggatctggtgatcacgccattcgagcagtacgcctatgcgctgctcggttggacgggcagcaaagaatttcgtcgcgatctgcgccgctatgcggaggaagagcgcggcatgatcctcgacaaccatgccctctacgaccgcaaaaagcgcatctttctgaaagcgggcagcgaagaagagattttcgcgcatctgggtctggattatgtggagccgtgggaacgcaacgcg

SEQ ID NO: 1978 - protein, 394 aa, synthetic construct
  REGION 1..394: note = Variant of terminal deoxynucleotidyl transferase
MHHHHHHGGSGHPPSNTPEGEVPSVIARPVSQYSCQRKTTLNNYNKKFTDALEIMAESYKFKENLIACLEAKRAASILKYLPFPVTSMKDIQGLPCITDQVRDVIEEIIEEGESSRVKEVLNDERYKAFKQFTSVFGVGVKTAEKWFRMGLRTVEEAKASKALKLSKMQKAGFLYYEDLASRVSKEEADAVTLIVKNTVRTFLPDALVTITGGFRRGKPMGHDVDFLITNPGPKEDDELLHKVVDLLKKQGLLLYEDIKESTFVEGQLPSRKIDAMDNFQKCFAILKLYQPGVDNNSVNTSKKSDMAEVKDWKAIRVDLVITPFEQYAYALLGWTGSKEFRRDLRRYAEEERGMILDNHALYDRKKRIFLKAGSEEEIFAHLGLDYVEPWERNA

SEQ ID NO: 1979 - DNA, 1182 bp, synthetic construct
  misc_feature 1..1182: note = Variant of terminal deoxynucleotidyl transferase
  source 1..1182: mol_type = other DNA
atgcaccatcatcatcatcatggcggtagcggccatccgattagcaataccccggagggggaggtgccgagcgttatcgcccgcccggttagtcagtacagctgccagcgcaagaccacgctgaataactacaacaaaaagtttaccgacgcgctggagatcatggccgagagctacaaatttaaagagaacctgatcgcgtgtctggaagccaagcgcgccgcgagtattctgaaatatctgccgttcgaggttaccagcatgaaagacatccaaggtctgccgtgcattaccgaccaagttcgtgacgtgatcgaggagatcatcgaagagggcgagagcagccgtgttaaagaagttctcaatgacgagcgctacaaggcctttaagcagttcaccagcgtgttcggtgtgggcgtgaaaaccgcggaaaagtggtaccgtatgggcctccgtacggttgaagaggcaaaggccagtaaggcgctgaagctgagcaagatgcagaaggcgggcttcctgtattacgaggatctggcgagccgcgttagtaaagaagaagccgatgccgttacgctcatcgtgaagaacacggtgcgtacctttctgccggatgcgctggtgaccatcaccggcggtttccgccgtggcaaacctatgggccacgacgttgactttctgatcacgaatccgggcccgaaagaggatgacgagctgctccacaaagtggttgatctgctcaagaagcaaggtctgctgctgtacgaagacatcaaagagagcacgttcgtggaggggcaactgccaagtcgcaaaatcgacgccatggacaacttccagaagtgcttcgccattctcaagctgtaccagccgggcgtggataacaacgcgtatgggacgagtaagaagagtgacatggccgaggttaaggattggaaagcgattcgtgtggatctggtgatcacgccattcgagcagtacgcctatgcgctgctcggttggacgggcagcaaagaatttcgtcgcgatctgcgccgctatgcggaggaagagcgcggcatgatcctcgacaaccatgccctctacgaccgcaaaaagcgcatctttctgaaagcgggcagcgaagaagagattttcgcgcatctgggtctggattatgtggagccgtgggaacgcaacgcg

SEQ ID NO: 1980 - protein, 394 aa, synthetic construct
  REGION 1..394: note = Variant of terminal deoxynucleotidyl transferase
MHHHHHHGGSGHPISNTPEGEVPSVIARPVSQYSCQRKTTLNNYNKKFTDALEIMAESYKFKENLIACLEAKRAASILKYLPFEVTSMKDIQGLPCITDQVRDVIEEIIEEGESSRVKEVLNDERYKAFKQFTSVFGVGVKTAEKWYRMGLRTVEEAKASKALKLSKMQKAGFLYYEDLASRVSKEEADAVTLIVKNTVRTFLPDALVTITGGFRRGKPMGHDVDFLITNPGPKEDDELLHKVVDLLKKQGLLLYEDIKESTFVEGQLPSRKIDAMDNFQKCFAILKLYQPGVDNNAYGTSKKSDMAEVKDWKAIRVDLVITPFEQYAYALLGWTGSKEFRRDLRRYAEEERGMILDNHALYDRKKRIFLKAGSEEEIFAHLGLDYVEPWERNA

SEQ ID NO: 1981 - DNA, 1182 bp, synthetic construct
  misc_feature 1..1182: note = Variant of terminal deoxynucleotidyl transferase
  source 1..1182: mol_type = other DNA
atgcaccatcatcatcatcatggcggtagcggccatccgattagcaataccccggagggggaggtgccgagcgttatcgcccgcccggttagtcagtacagctgccagcgcaagaccacgctgaataactacaacaaaaagtttaccgacgcgctggagatcatggccgagagctacaaatttaaagagaacctgatcgcgtgtctggaagccaagcgcgccgcgagtattctgaaatatctgccgttcgaggttaccagcatgaaagacatccaaggtctgccgtgcattaccgaccaagttcgtgacgtgatcgaggagatcatcgaagagggcgagagcagccgtgttaaagaagttctcaatgacgagcgctacaaggcctttaagcagttcaccagcgtgttcggtgtgggcgtgaaaaccgcggaaaagtggtttcgtatgggcctccgtacggttgaagaggcaaaggccagtaagtcgctgaagctgagcaagatgcagaaggcgggcttcctgtattacgaggatctggcgagccgcgttagtaaagaagaagccgatgccgttacgctcatcgtgaagaacacggtgcgtacctttctgccggatgcgctggtgaccatcaccggcggtttccgccgtggcaaacctatgggccacgacgttgactttctgatcacgaatccgggcccgaaagaggatgacgagctgctccacaaagtggttgatctgctcaagaagcaaggtctgctgctgtacgaagacatcaaagagagcacgttcgtggaggggcaactgccaagtcgcaaaatcgacgccatggacaacttccagaagtgcttcgccattctcaagctgtaccagccgggcgtggataacagctcggtgaacacgagtaagaagagtgacatggccgaggttaaggattggaaagcgattcgtgtggatctggtgatcacgccattcgagcagtacgcctatgcgctgctcggttggacgggcagcaaagaatttcgtcgcgatctgcgccgctatgcggaggaagagcgcggcatgatcctcgacaaccatgccctctacgaccgcaaaaagcgcatctttctgaaagcgggcagcgaagaagagattttcgcgcatctgggtctggattatgtggagccgtgggaacgcaacgcg

SEQ ID NO: 1982 - protein, 394 aa, synthetic construct
  REGION 1..394: note = Variant of terminal deoxynucleotidyl transferase
MHHHHHHGGSGHPISNTPEGEVPSVIARPVSQYSCQRKTTLNNYNKKFTDALEIMAESYKFKENLIACLEAKRAASILKYLPFEVTSMKDIQGLPCITDQVRDVIEEIIEEGESSRVKEVLNDERYKAFKQFTSVFGVGVKTAEKWFRMGLRTVEEAKASKSLKLSKMQKAGFLYYEDLASRVSKEEADAVTLIVKNTVRTFLPDALVTITGGFRRGKPMGHDVDFLITNPGPKEDDELLHKVVDLLKKQGLLLYEDIKESTFVEGQLPSRKIDAMDNFQKCFAILKLYQPGVDNSSVNTSKKSDMAEVKDWKAIRVDLVITPFEQYAYALLGWTGSKEFRRDLRRYAEEERGMILDNHALYDRKKRIFLKAGSEEEIFAHLGLDYVEPWERNA

SEQ ID NO: 1983 - DNA, 1182 bp, synthetic construct
  misc_feature 1..1182: note = Variant of terminal deoxynucleotidyl transferase
  source 1..1182: mol_type = other DNA
atgcaccatcatcatcatcatggcggtagcggccatccgccgagcaataccccggagggggaggtgccgagcgttatcgcccgcccggttagtcagtacagctgccagcgcaagaccacgctgaataactacaacaaaaagtttaccgacgcgctggagatcatggccgagagctacaaatttaaagagaacctgatcgcgtgtctggaagccaagcgcgccgcgagtattctgaaatatctgccgttcccggttaccagcatgaaagacatccaaggtctgccgtgcattaccgaccaagttcgtgacgtgatcgaggagatcatcgaagagggcgagagcagccgtgttaaagaagttctcaatgacgagcgctacaaggcctttaagcagttcaccagcgtgttcggtgtgggcgtgaaaaccgcggaaaagtggtttcgtatgggcctccgtacggttgaagaggcaaaggccagtaagagtctgaagctgagcaagatgcagaaggcgggcttcctgtattacgaggatctggcgagccgcgttagtaaagaagaagccgatgccgttacgctcatcgtgaagaacacggtgcgtacctttctgccggatgcgctggtgaccatcaccggcggtttccgccgtggcaaacctatgggccacgacgttgactttctgatcacgaatccgggcccgaaagaggatgacgagctgctccacaaagtggttgatctgctcaagaagcaaggtctgctgctgtacgaagacatcaaagagagcacgttcgtggaggggcaactgccaagtcgcaaaatcgacgccatggacaacttccagaagtgcttcgccattctcaagctgtaccagccgggcgtggataacagcagctataacacgagtaagaagagtgacatggccgaggttaaggattggaaagcgattcgtgtggatctggtgatcacgccattcgagcagtacgcctatgcgctgctcggttggacgggcagcaaagaatttcgtcgcgatctgcgccgctatgcggaggaagagcgcggcatgatcctcgacaaccatgccctctacgaccgcaaaaagcgcatctttctgaaagcgggcagcgaagaagagattttcgcgcatctgggtctggattatgtggagccgtgggaacgcaacgcg

SEQ ID NO: 1984 - protein, 394 aa, synthetic construct
  REGION 1..394: note = Variant of terminal deoxynucleotidyl transferase
MHHHHHHGGSGHPPSNTPEGEVPSVIARPVSQYSCQRKTTLNNYNKKFTDALEIMAESYKFKENLIACLEAKRAASILKYLPFPVTSMKDIQGLPCITDQVRDVIEEIIEEGESSRVKEVLNDERYKAFKQFTSVFGVGVKTAEKWFRMGLRTVEEAKASKSLKLSKMQKAGFLYYEDLASRVSKEEADAVTLIVKNTVRTFLPDALVTITGGFRRGKPMGHDVDFLITNPGPKEDDELLHKVVDLLKKQGLLLYEDIKESTFVEGQLPSRKIDAMDNFQKCFAILKLYQPGVDNSSYNTSKKSDMAEVKDWKAIRVDLVITPFEQYAYALLGWTGSKEFRRDLRRYAEEERGMILDNHALYDRKKRIFLKAGSEEEIFAHLGLDYVEPWERNA

SEQ ID NO: 1985 - DNA, 1182 bp, synthetic construct
  misc_feature 1..1182: note = Variant of terminal deoxynucleotidyl transferase
  source 1..1182: mol_type = other DNA
atgcaccatcatcatcatcatggcggtagcggccatccgccgagcaataccccggagggggaggtgccgagcgttatcgccgagccggttagtcagtacagctgccagcgcaagaccacgctgaataactacaacaaaaagtttaccgacgcgctggagatcatggccgagaactacaaatttaaagagaacctgatcgcgtgtctggaagccaagcgcgccgcgagtattctgaaatatctgccgttcccggttaccagcatgaaagacatccaaggtctgccgtgcattaccgaccaagttcgtgacgtgatcgaggagatcatcgaagagggcgagagcagccgtgttaaagaagttctcaatgacgagcgctacaaggcctttaagcagttcaccagcgtgttcggtgtgggcgtgaaaaccgcggaaaagtggtttcgtatgggcctccgtacggttgaagacgcaaaggccagtaagagtctgaagctgagcaagatgcagaaggcgggcctgctgtattacgaggatctggcgagccgcgttagtaaagaagaagccgatgccgttacgctcatcgtgaagaacacggtgcgtacctttctgccggatgcgctggtgaccatcaccggcggtttccgccgtggcaaacctatgggccacgacatcgactttctgatcacgaatccgggcccgaaagaggatgacgagctgctccacaaagtggttgatctgctcaagaagcaaggtctgctgctgtacgaagacatcaaagagagcacgttcgtggaggggcaactgccaagtcgcaaaatcgacgccatggacaacttccagaagtgcttcgccattctcaagctgtaccagccgggcgtggataacagcagctataacacgagtaagaagagtgacatggccgaggttaaggattggaaagcgattcgtgtggatctggtgatcacgccattcgagcagtacgcctatgcgctgctcggttggacgggcagcaaagaatttcgtcgcgatctgcgccgctatgcggaggaagagcgcggcatgatcctcgacaaccatgccctctacgacctgaaaaagcgcatctttctgaaagcgggcagcgaagaagagattttcgcgcatctgggtctggattatgtggagccgtgggaacgcaacgcg

SEQ ID NO: 1986 - protein, 394 aa, synthetic construct
  REGION 1..394: note = Variant of terminal deoxynucleotidyl transferase
MHHHHHHGGSGHPPSNTPEGEVPSVIAEPVSQYSCQRKTTLNNYNKKFTDALEIMAENYKFKENLIACLEAKRAASILKYLPFPVTSMKDIQGLPCITDQVRDVIEEIIEEGESSRVKEVLNDERYKAFKQFTSVFGVGVKTAEKWFRMGLRTVEDAKASKSLKLSKMQKAGLLYYEDLASRVSKEEADAVTLIVKNTVRTFLPDALVTITGGFRRGKPMGHDIDFLITNPGPKEDDELLHKVVDLLKKQGLLLYEDIKESTFVEGQLPSRKIDAMDNFQKCFAILKLYQPGVDNSSYNTSKKSDMAEVKDWKAIRVDLVITPFEQYAYALLGWTGSKEFRRDLRRYAEEERGMILDNHALYDLKKRIFLKAGSEEEIFAHLGLDYVEPWERNA

SEQ ID NO: 1987 - DNA, 1182 bp, synthetic construct
  misc_feature 1..1182: note = Variant of terminal deoxynucleotidyl transferase
  source 1..1182: mol_type = other DNA
atgcaccatcatcatcatcatggcggtagcggccatccgccgagcaataccccggagggggaggtgccgagcgttatcgccgggccggttagtcagtacagctgccagcgcaagaccacgctgaataactacaacaaaaagtttaccgacgcgctggagatcatggccgagaactacaaatttaaagagaacctgatcgcgtgtctggaagccaagcgcgccgcgagtattctgaaatatctgccgttcccggttaccagcatgaaagacatccaaggtctgccgtgcattaccgaccaagttcgtgacgtgatcgaggagatcatcgaagagggcgagagcagccgtgttaaagaagttctcaatgacgagcgctacaaggcctttaagcagttcaccagcgtgttcggtgtgggcgtgaaaaccgcggaaaagtggtttcgtatgggcctccgtacggttgaagaggcaaaggccagtaagagtctgaagctgagcaagatgcagaaggcgggctttctgtattacgaggatctggcgagccgcgttagtaaagaagaagccgatgttgttacggtcatcgtgaagaatacggtgcgtacctttctgccggatgcgctggtgaccatcaccggcggtttccgccgtggcaaacctatgggccacgacatcgactttctgatcacgaatccgggcccgaaagaggatgacgagctgctccacaaagtggttgatctgctcaagaagcaaggtctgctgctgtacgaagacatcaaagagagcacgttcgtggaggggcaactgccaagtcgcaaaatcgacgccatggacaacttccagaagtgcttcgccattctcaagctgtaccagccgggcgtggataacagcagctataacacgagtaagaagagtgacatggccgaggttaaggattggaaagcgattcgtgtggatctggtgatcacgccattcgagcagtacgcctatgcgctgctcggttggacgggcagcaaagaatttcgtcgcgatctgcgccgctatgcggaggaagagcgcggcatgatcctcgacaaccatgccctctacgaccgcaaaaagcgcatctttctgaaagcgggcagcgaagaagagattttcgcgcatctgggtctggattatgtggagccgtgggaacgcaacgcg

SEQ ID NO: 1988 - protein, 394 aa, synthetic construct
  REGION 1..394: note = Variant of terminal deoxynucleotidyl transferase
MHHHHHHGGSGHPPSNTPEGEVPSVIAGPVSQYSCQRKTTLNNYNKKFTDALEIMAENYKFKENLIACLEAKRAASILKYLPFPVTSMKDIQGLPCITDQVRDVIEEIIEEGESSRVKEVLNDERYKAFKQFTSVFGVGVKTAEKWFRMGLRTVEEAKASKSLKLSKMQKAGFLYYEDLASRVSKEEADVVTVIVKNTVRTFLPDALVTITGGFRRGKPMGHDIDFLITNPGPKEDDELLHKVVDLLKKQGLLLYEDIKESTFVEGQLPSRKIDAMDNFQKCFAILKLYQPGVDNSSYNTSKKSDMAEVKDWKAIRVDLVITPFEQYAYALLGWTGSKEFRRDLRRYAEEERGMILDNHALYDRKKRIFLKAGSEEEIFAHLGLDYVEPWERNA

SEQ ID NO: 1989 - DNA, 1182 bp, synthetic construct
  misc_feature 1..1182: note = Variant of terminal deoxynucleotidyl transferase
  source 1..1182: mol_type = other DNA
atgcaccatcatcatcatcatggcggtagcggccatccgccgagcaataccccggagggggaggtgccgagcgttatcgcccgcccggttagtcagtacagctgccagcgcaagaccacgctgaataactacaacaaaaagtttaccgacgcgctggagatcatggccgagaactacaaatttaaagagaacctgatcgcgtgtctggaagccaagcgcgccgcgagtattctgaaatatctgccgttcccggttaccagcatgaaagacatccaaggtctgccgtgcattaccgaccaagttcgtgacgtgatcgaggagatcatcgaagagggcgagagcagccgtgttaaagaagttctcaatgacgagcgctacaaggcctttaagcagttcaccagcgtgttcggtgtgggcgtgaaaaccgcggaaaagtggtttcgtatgggcctccgtacggttgaagaggcaaaggccagtaagagtctgaagctgagcaagatgcagaaggcgggcttcctgtattacgaggatctggcgagccgcgttagtaaagaagaagccgatgccgttacgctcatcgtgaagaacacggtgcgtacctttctgccggatgcgctggtgaccatcaccggcggtttccgccgtggcaaacctatgggccacgacgttgactttctgatcacgaatccgggcccgaaagaggatgacgagctgctccacaaagtggttgatctgctcaagaagcaaggtctgctgctgtacgaagacatcaaagagagcacgttcgtggaggggcaactgccaagtcgcaaaatcgacgccatggacaacttccagaagtgcttcgccattctcaagctgtaccagccgggcgtggataacagcgcgtatgggacgagtaagaagagtgacatggccgaggttaaggattggaaagcgattcgtgtggatctggtgatcacgccattcgagcagtacgcctatgcgctgctcggttggacgggcagcaaagaatttcgtcgcgatctgcgccgctatgcggaggaagagcgcggcatgatcctcgacaaccatgccctctacgaccgcaaaaagcgcatctttctgaaagcgggcagcgaagaagagattttcgcgcatctgggtctggattatgtggagccgtgggaacgcaacgcg

SEQ ID NO: 1990 - protein, 394 aa, synthetic construct
  REGION 1..394: note = Variant of terminal deoxynucleotidyl transferase
MHHHHHHGGSGHPPSNTPEGEVPSVIARPVSQYSCQRKTTLNNYNKKFTDALEIMAENYKFKENLIACLEAKRAASILKYLPFPVTSMKDIQGLPCITDQVRDVIEEIIEEGESSRVKEVLNDERYKAFKQFTSVFGVGVKTAEKWFRMGLRTVEEAKASKSLKLSKMQKAGFLYYEDLASRVSKEEADAVTLIVKNTVRTFLPDALVTITGGFRRGKPMGHDVDFLITNPGPKEDDELLHKVVDLLKKQGLLLYEDIKESTFVEGQLPSRKIDAMDNFQKCFAILKLYQPGVDNSAYGTSKKSDMAEVKDWKAIRVDLVITPFEQYAYALLGWTGSKEFRRDLRRYAEEERGMILDNHALYDRKKRIFLKAGSEEEIFAHLGLDYVEPWERNA

SEQ ID NO: 1991 - DNA, 1182 bp, synthetic construct
  misc_feature 1..1182: note = Variant of terminal deoxynucleotidyl transferase
  source 1..1182: mol_type = other DNA
atgcaccatcatcatcatcatggcggtagcggccatccgccgagcaataccccggagggggaggtgccgagcgttatcgccgggccggttagtcagtacagctgccagcgcaagaccacgctgaataactacaacaaaaagtttaccgacgcgctggagatcatggccgagaactacaaatttaaagagaacctgatcgcgtgtctggaagccaagcgcgccgcgagtattctgaaatatctgccgttcccggttaccagcatgaaagacatccaaggtctgccgtgcattaccgaccaagttcgtgacgtgatcgaggagatcatcgaagagggcgagagcagccgtgttaaagaagttctcaatgacgagcgctacaaggcctttaagcagttcaccagcgtgttcggtgtgggcgtgaaaaccgcggaaaagtggtttcgtatgggcctccgtacggttgaagaagcacgtgccagtaagagtctgaagctgagcaagatgcagaaggcgggcctgctgtattacgaggatctggcgagccgcgttagtaaagaagaagccgatgttgttacggtcatcgtgaagaatacggtgcgtacctttctgccggatgcgctggtgaccatcaccggcggtttccgccgtggcaaacctatgggccacgacatcgactttctgatcacgaatccgggcccgaaagaggatgacgagctgctccacaaagtggttgatctgctcaagaagcaaggtctgctgctgtacgaagacatcaaagagagcacgttcgtggaggggcaactgccaagtcgcaaaatcgacgccatggacaacttccagaagtgcttcgccattctcaagctgtaccgtccgggcgtggataacagcagctataacacgagtaagaagagtgacatggccgaggttaaggattggaaagcgattcgtgtggatctggtgatcacgccattcgagcagtacgcctatgcgctgctcggttggacgggcagcaaagaatttcgtcgcgatctgcgccgctatgcggaggaagagcgcggcatgatcctcgacaaccatgccctctacgacctgaaaaagcgcatctttctgaaagcgggcagcgaagaagagattttcgcgcatctgggtctggattatgtggagccgtgggaacgcaacgcg

SEQ ID NO: 1992 - protein, 394 aa, synthetic construct
  REGION 1..394: note = Variant of terminal deoxynucleotidyl transferase
MHHHHHHGGSGHPPSNTPEGEVPSVIAGPVSQYSCQRKTTLNNYNKKFTDALEIMAENYKFKENLIACLEAKRAASILKYLPFPVTSMKDIQGLPCITDQVRDVIEEIIEEGESSRVKEVLNDERYKAFKQFTSVFGVGVKTAEKWFRMGLRTVEEARASKSLKLSKMQKAGLLYYEDLASRVSKEEADVVTVIVKNTVRTFLPDALVTITGGFRRGKPMGHDIDFLITNPGPKEDDELLHKVVDLLKKQGLLLYEDIKESTFVEGQLPSRKIDAMDNFQKCFAILKLYRPGVDNSSYNTSKKSDMAEVKDWKAIRVDLVITPFEQYAYALLGWTGSKEFRRDLRRYAEEERGMILDNHALYDLKKRIFLKAGSEEEIFAHLGLDYVEPWERNA

SEQ ID NO: 1993 - DNA, 1182 bp, synthetic construct
  misc_feature 1..1182: note = Variant of terminal deoxynucleotidyl transferase
  source 1..1182: mol_type = other DNA
atgcaccatcatcatcatcatggcggtagcggccatccgccgagcaataccccggagggggaggtgccgagcgttatcgccgggccggttagtcagtacagctgccagcgcaagaccacgctgaataactacaacaaaaagtttaccgacgcgctggagatcatggccgagaactacaaatttaaagagaacctgatcgcgtgtctggaagccaagcgcgccgcgagtattctgaaatatctgccgttcccggttaccagcatgaaagacatccaaggtctgccgtgcattaccgaccaagttcgtgacgtgatcgaggagatcatcgaagagggcgagagcagccgtgttaaagaagttctcaatgacgagcgctacaaggcctttaagcagttcaccagcgtgttcggtgtgggcgtgaaaaccgcggaaaagtggtttcgtatgggcctccgtacggttgaagaggcaaaggccagtaagagtctgaagctgagcaagatgcagaaggcgggctttctgtattacgaggatctggcgagccgcgttagtaaagaagaagccgatgccgttacgctcatcgtgaagaatacggtgcgtacctttctgccggatgcgctggtgaccatcaccggcggtttccgccgtggcaaacctatgggccacgacatcgactttctgatcacgaatccgggcccgaaagaggatgacgagctgctccacaaagtggttgatctgctcaagaagcaaggtctgctgctgtacgaagacatcaaagagagcacgttcgtggaggggcaactgccaagtcgcaaaatcgacgccatggacaacttccagaagtgcttcgccattctcaagctgtaccagccgggcgtggataacggcagctataacacgagtaagggtagtgacatggccgaggttaaggattggaaagcgattcgtgtggatctggtgatcacgccattcgagcagtacgcctatgcgctgctcggttggacgggcagcaaagaatttcgtcgcgatctgcgccgctatgcggaggaagagcgcggcatgatcctcgacaaccatgccctctacgacctgaaaaagcgcatctttctgaaagcgggcagcgaagaagagattttcgcgcatctgggtctggattatgtggagccgtgggaacgcaacgcg

SEQ ID NO: 1994 - protein, 394 aa, synthetic construct
  REGION 1..394: note = Variant of terminal deoxynucleotidyl transferase
MHHHHHHGGSGHPPSNTPEGEVPSVIAGPVSQYSCQRKTTLNNYNKKFTDALEIMAENYKFKENLIACLEAKRAASILKYLPFPVTSMKDIQGLPCITDQVRDVIEEIIEEGESSRVKEVLNDERYKAFKQFTSVFGVGVKTAEKWFRMGLRTVEEAKASKSLKLSKMQKAGFLYYEDLASRVSKEEADAVTLIVKNTVRTFLPDALVTITGGFRRGKPMGHDIDFLITNPGPKEDDELLHKVVDLLKKQGLLLYEDIKESTFVEGQLPSRKIDAMDNFQKCFAILKLYQPGVDNGSYNTSKGSDMAEVKDWKAIRVDLVITPFEQYAYALLGWTGSKEFRRDLRRYAEEERGMILDNHALYDLKKRIFLKAGSEEEIFAHLGLDYVEPWERNA

SEQ ID NO: 1995 - DNA, 1182 bp, synthetic construct
  misc_feature 1..1182: note = Variant of terminal deoxynucleotidyl transferase
  source 1..1182: mol_type = other DNA
atgcaccatcatcatcatcatggcgatagcggccatccgccgagcaataccccggagggggaggtgccgagcgttatcgcccgcccggttagtcagtacagctgccagcgcaagaccacgctgaataactacaacaaaaagtttaccgacgcgctggagatcatggccgagaactacaaatttaaagagaacctgatcgcgtgtctggaagccaagcgcgccgcgagtattctgaaatatctgccgttcccggttaccagcatgaaagacatccaaggtctgccgtgcattaccgaccaagttcgtgacgtgatcgaggagatcatcgaagagggcgagagcagccgtgttaaagaagttctcaatgacgagcgctacaaggcctttaagcagttcaccagcgtgttcggtgtgggcgtgaaaaccgcggaaaagtggtttcgtatgggcctccgtacggttgaagaagcaaaggccagtaagagtctgaagctgagcaagatgcagaaggcgggcttcctgtattacgaggatctggcgagccgcgttagtaaagaagaagccgatgccgttacgctcatcgtgaagaacacggtgcgtacctttctgccggatgcgctggtgaccatcaccggcggtttccgccgtggcaaacctatgggccacgacatcgactttctgatcacgaatccgggcccgaaagaggatgacgagctgctccacaaagtggttgatctgctcaagaagcaaggtctgctgctgtacgaagacatcaaagagagcacgttcgtggaggggcaactgccaagtcgcaaaatcgacgccatggacaacttccagaagtgcttcgccattctcaagctgtaccagccgggcgtggataacagcagctataacacgagtaagaagagtgacatggccgaggttaaggattggaaagcgattcgtgtggatctggtgatcacgccattcgagcagtacgcctatgcgctgctcggttggacgggcagcaaagaatttcgtcgcgatctgcgccgctatgcggaggaagagcgcggcatgatcctcgacaaccatgccctctacgaccgcaaaaagcgcatctttctgaaagcgggcagcgaagaagagattttcgcgcatctgggtctggattatgtggagccgtgggaacgcaacgcg

SEQ ID NO: 1996 - protein, 394 aa, synthetic construct
  REGION 1..394: note = Variant of terminal deoxynucleotidyl transferase
MHHHHHHGDSGHPPSNTPEGEVPSVIARPVSQYSCQRKTTLNNYNKKFTDALEIMAENYKFKENLIACLEAKRAASILKYLPFPVTSMKDIQGLPCITDQVRDVIEEIIEEGESSRVKEVLNDERYKAFKQFTSVFGVGVKTAEKWFRMGLRTVEEAKASKSLKLSKMQKAGFLYYEDLASRVSKEEADAVTLIVKNTVRTFLPDALVTITGGFRRGKPMGHDIDFLITNPGPKEDDELLHKVVDLLKKQGLLLYEDIKESTFVEGQLPSRKIDAMDNFQKCFAILKLYQPGVDNSSYNTSKKSDMAEVKDWKAIRVDLVITPFEQYAYALLGWTGSKEFRRDLRRYAEEERGMILDNHALYDRKKRIFLKAGSEEEIFAHLGLDYVEPWERNA

SEQ ID NO: 1997 - DNA, 1182 bp, synthetic construct
  misc_feature 1..1182: note = Variant of terminal deoxynucleotidyl transferase
  source 1..1182: mol_type = other DNA
atgcaccatcatcatcatcatggcggtagcggccatccgccgagcaataccccggagggggaggtgccgagcgttatcgcccgtccggttagtcagtacagctgccagcgcaagaccacgctgaataactacaacaaaaagtttaccgacgcgctggagatcatggccgagaactacaaatttaaagagaacctgatcgcgtgtctggaagccaagcgcgccgcgagtattctgaaatatctgccgttcccggttaccagcatgaaagacatccaaggtctgccgtgcattaccgaccaagttcgtgacgtgatcgaggagatcatcgaagagggcgagagcagccgtgttaaagaagttctcaatgacgagcgctacaaggcctttaagcagttcaccagcgtgttcggtgtgggcgtgaaaaccgcggaaaagtggtttcgtatgggcctccgtacggttgaagaagcacgtgccagtaagagtctgaagctgagcaagatgcagaaggcgggctttctgtattacgaggatctggcgagccgcgttagtaaagaagaagccgatgctgttacggtcatcgtgaagaatacggtgcgtacctttctgccggatgcgctggtgaccatcaccggcggtttccgccgtggcaaacctatgggccacgacatcgactttctgatcacgaatccgggcccgaaagaggatgacgagctgctccacaaagtggttgatctgctcaagaagcaaggtctgctgctgtacgaagacatcaaagagagcacgttcgtggaggggcaactgccaagtcgcaaaatcgacgccatggacaacttccagaagtgcttcgccattctcaagctgtaccgtccgggcgtggataacagcagctataacacgagtaagggtagtgacatggccgaggttaaggattggaaagcgattcgtgtggatctggtgatcacgccattcgagcagtacgcctatgcgctgctcggttggacgggcagcaaagaatttcgtcgcgatctgcgccgctatgcggaggaagagcgcggcatgatcctcgacaaccatgccctctacgaccgcaaaaagcgcatctttctgaaagcgggcagcgaagaagagattttcgcgcatctgggtctggattatgtggagccgtgggaacgcaacgcg

SEQ ID NO: 1998 - protein, 394 aa, synthetic construct
  REGION 1..394: note = Variant of terminal deoxynucleotidyl transferase
MHHHHHHGGSGHPPSNTPEGEVPSVIARPVSQYSCQRKTTLNNYNKKFTDALEIMAENYKFKENLIACLEAKRAASILKYLPFPVTSMKDIQGLPCITDQVRDVIEEIIEEGESSRVKEVLNDERYKAFKQFTSVFGVGVKTAEKWFRMGLRTVEEARASKSLKLSKMQKAGFLYYEDLASRVSKEEADAVTVIVKNTVRTFLPDALVTITGGFRRGKPMGHDIDFLITNPGPKEDDELLHKVVDLLKKQGLLLYEDIKESTFVEGQLPSRKIDAMDNFQKCFAILKLYRPGVDNSSYNTSKGSDMAEVKDWKAIRVDLVITPFEQYAYALLGWTGSKEFRRDLRRYAEEERGMILDNHALYDRKKRIFLKAGSEEEIFAHLGLDYVEPWERNA

SEQ ID NO: 1999 - DNA, 1182 bp, synthetic construct
  misc_feature 1..1182: note = Variant of terminal deoxynucleotidyl transferase
  source 1..1182: mol_type = other DNA
atgcaccatcatcatcatcatggcggtagcggccatccgattagcaataccccggagggggaggtgccgagcgttatcgcccgcccggttagtcagtacagctgccagcgcaagaccacgctgaataactacaacaaaaagtttaccgacgcgctggagatcatggccgagaactacaaatttaaagagaacctgatcgcgtgtctggaagccaagcgcgccgcgagtattctgaaatatctgccgttcccggttaccagcatgaaagacatccaaggtctgccgtgcattaccgaccaagttcgtgacgtgatcgaggagatcatcgaagagggcgagagcagccgtgttaaagaagttctcaatgacgagcgctacaaggcctttaagcagttcaccagcgtgttcggtgtgggcgtgaaaaccgcggaaaagtggttccgtatgggcctccgtacggttgaagaggcaaaggccagtaagagtctgaagctgagcaagatgcagaaggcgggcttcctgtattacgaggatctggcgagccgcgttagtaaagaagaagccgatgccgttacgctcatcgtgaagaacacggtgcgtacctttctgccggatgcgctggtgaccatcaccggcggtttccgccgtggcaaacctatgggccacgacatcgactttctgatcacgaatccgggcccgaaagaggatgacgagctgctccacaaagtggttgatctgctcaagaagcaaggtctgctgctgtacgaagacatcaaagagagcacgttcgtggaggggcaactgccaagtcgcaaaatcgacgccatggacaacttccagaagtgcttcgccattctcaagctgtaccagccgggcgtggataacagcagctataacacgagtaagaagagtgacatggccgaggttaaggattggaaagcgattcgtgtggatctggtgatcacgccattcgagcagtacgcctatgcgctgctcggttggacgggcagcaaagaatttcgtcgcgatctgcgccgctatgcggaggaagagcgcggcatgatcctcgacaaccatgccctctacgaccgcaaaaagcgcatctttctgaaagcgggcagcgaagaagagattttcgcgcatctgggtctggattatgtggagccgtgggaacgcaacgcg

SEQ ID NO: 2000 - protein, 394 aa, synthetic construct
  REGION 1..394: note = Variant of terminal deoxynucleotidyl transferase
MHHHHHHGGSGHPISNTPEGEVPSVIARPVSQYSCQRKTTLNNYNKKFTDALEIMAENYKFKENLIACLEAKRAASILKYLPFPVTSMKDIQGLPCITDQVRDVIEEIIEEGESSRVKEVLNDERYKAFKQFTSVFGVGVKTAEKWFRMGLRTVEEAKASKSLKLSKMQKAGFLYYEDLASRVSKEEADAVTLIVKNTVRTFLPDALVTITGGFRRGKPMGHDIDFLITNPGPKEDDELLHKVVDLLKKQGLLLYEDIKESTFVEGQLPSRKIDAMDNFQKCFAILKLYQPGVDNSSYNTSKKSDMAEVKDWKAIRVDLVITPFEQYAYALLGWTGSKEFRRDLRRYAEEERGMILDNHALYDRKKRIFLKAGSEEEIFAHLGLDYVEPWERNA

SEQ ID NO: 2001 - DNA, 1182 bp, synthetic construct
  misc_feature 1..1182: note = Variant of terminal deoxynucleotidyl transferase
  source 1..1182: mol_type = other DNA
atgcaccatcatcatcatcatggcggtagcggccatccgccgagcaataccccggagggggaggtgccgagcgttatcgcccgcccggttagtcagtacagctgccagcgcaagaccacgctgaataactacaacaaaaagtttaccgacgcgctggagatcatggccgagaactacaaatttaaagagaacctgatcgcgtgtctggaagccaagcgcgccgcgagtattctgaaatatctgccgttcgaggttaccagcatgaaagacatccaaggtctgccgtgcattaccgaccaagttcgtgacgtgatcgaggagatcatcgaagagggcgagagcagccgtgttaaagaagttctcaatgacgagcgctacaaggcctttaagcagttcaccagcgtgttcggtgtgggcgtgaaaaccgcggaaaagtggtaccgtatgggcctccgtacggttgaagaggcaaaggccagtaagtcgctgaagctgagcaagatgcagaaggcgggcttcctgtattacgaggatctggcgagccgcgttagtaaagaagaagccgatgccgttacgctcatcgtgaagaacacggtgcgtacctttctgccggatgcgctggtgaccatcaccggcggtttccgccgtggcaaacctatgggccacgacatcgactttctgatcacgaatccgggcccgaaagaggatgacgagctgctccacaaagtggttgatctgctcaagaagcaaggtctgctgctgtacgaagacatcaaagagagcacgttcgtggaggggcaactgccaagtcgcaaaatcgacgccatggacaacttccagaagtgcttcgccattctcaagctgtaccagccgggcgtggataacagcagctataacacgagtaagaagagtgacatggccgaggttaaggattggaaagcgattcgtgtggatctggtgatcacgccattcgagcagtacgcctatgcgctgctcggttggacgggcagcaaagaatttcgtcgcgatctgcgccgctatgcggaggaagagcgcggcatgatcctcgacaaccatgccctctacgaccgcaaaaagcgcatctttctgaaagcgggcagcgaagaagagattttcgcgcatctgggtctggattatgtggagccgtgggaacgcaacgcg

SEQ ID NO: 2002 - protein, 394 aa, synthetic construct
  REGION 1..394: note = Variant of terminal deoxynucleotidyl transferase
MHHHHHHGGSGHPPSNTPEGEVPSVIARPVSQYSCQRKTTLNNYNKKFTDALEIMAENYKFKENLIACLEAKRAASILKYLPFEVTSMKDIQGLPCITDQVRDVIEEIIEEGESSRVKEVLNDERYKAFKQFTSVFGVGVKTAEKWYRMGLRTVEEAKASKSLKLSKMQKAGFLYYEDLASRVSKEEADAVTLIVKNTVRTFLPDALVTITGGFRRGKPMGHDIDFLITNPGPKEDDELLHKVVDLLKKQGLLLYEDIKESTFVEGQLPSRKIDAMDNFQKCFAILKLYQPGVDNSSYNTSKKSDMAEVKDWKAIRVDLVITPFEQYAYALLGWTGSKEFRRDLRRYAEEERGMILDNHALYDRKKRIFLKAGSEEEIFAHLGLDYVEPWERNA

SEQ ID NO: 2003 - DNA, 1182 bp, synthetic construct
  misc_feature 1..1182: note = Variant of terminal deoxynucleotidyl transferase
  source 1..1182: mol_type = other DNA
atgcaccatcatcatcatcatggcggtagcggccatccgccgagcaataccccggagggggaggtgccgagcgttatcgcccgtccggttagtcagtacagctgccagcgcaagaccacgctgaataactacaacaaaaagtttaccgacgcgctggagatcatggccgagaactacaaatttaaagagaacctgatcgcgtgtctggaagccaagcgcgccgcgagtattctgaaatatctgccgttcccggttaccagcatgaaagacatccaaggtctgccgtgcattaccgaccaagttcgtgacgtgatcgaggagatcatcgaagagggcgagagcagccgtgttaaagaagttctcaatgacgagcgctacaaggcctttaagcagttcaccagcgtgttcggtgtgggcgtgaaaaccgcggaaaagtggtttcgtatgggcctccgtacggttgaagaagcaaaggccagtaagagtctgaagctgagcaagatgcagaaggcgggctttctgtattacgaggatctggcgagccgcgttagtaaagaagaagccgatgctgttacggtcatcgtgaagaatacggtgcgtacctttctgccggatgcgctggtgaccatcaccggcggtttccgccgtggcaaacctatgggccacgacatcgactttctgatcacgaatccgggcccgaaagaggatgacgagctgctccacaaagtggttgatctgctcaagaagcaaggtctgctgctgtacgaagacatcaaagagagcacgttcgtggaggggcaactgccaagtcgcaaaatcgacgccatggacaacttccagaagtgcttcgccattctcaagctgtaccgtccgggcgtggataacagcagctataacacgagtaagaagagtgacatggccgaggttaaggattggaaagcgattcgtgtggatctggtgatcacgccattcgagcagtacgcctatgcgctgctcggttggacgggcagcaaagaatttcgtcgcgatctgcgccgctatgcggaggaagagcgcggcatgatcctcgacaaccatgccctctacgaccgcaaaaagcgcatctttctgaaagcgggcagcgaagaagagattttcgcgcatctgggtctggattatgtggagccgtgggaacgcaacgcg

SEQ ID NO: 2004 - protein, 394 aa, synthetic construct
  REGION 1..394: note = Variant of terminal deoxynucleotidyl transferase
MHHHHHHGGSGHPPSNTPEGEVPSVIARPVSQYSCQRKTTLNNYNKKFTDALEIMAENYKFKENLIACLEAKRAASILKYLPFPVTSMKDIQGLPCITDQVRDVIEEIIEEGESSRVKEVLNDERYKAFKQFTSVFGVGVKTAEKWFRMGLRTVEEAKASKSLKLSKMQKAGFLYYEDLASRVSKEEADAVTVIVKNTVRTFLPDALVTITGGFRRGKPMGHDIDFLITNPGPKEDDELLHKVVDLLKKQGLLLYEDIKESTFVEGQLPSRKIDAMDNFQKCFAILKLYRPGVDNSSYNTSKKSDMAEVKDWKAIRVDLVITPFEQYAYALLGWTGSKEFRRDLRRYAEEERGMILDNHALYDRKKRIFLKAGSEEEIFAHLGLDYVEPWERNA

SEQ ID NO: 2005 - DNA, 1182 bp, synthetic construct
  misc_feature 1..1182: note = Variant of terminal deoxynucleotidyl transferase
  source 1..1182: mol_type = other DNA
atgcaccatcatcatcatcatggcggtagcggccatccgccgagcaataccccggagggggaggtgccgagcgttatcgcccgcccggttagtcagtacagctgccagcgcaagaccacgctgaataactacaacaaaaagtttaccgacgcgctggagatcatggccgagaactacaaatttaaagagaacctgatcgcgtgtctggaagccaagcgcgccgcgagtattctgaaatatctgccgttcccggttaccagcatgaaagacatccaaggtctgccgtgcattaccgaccaagttcgtgacgtgatcgaggagatcatcgaagagggcgagagcagccgtgttaaagaagttctcaatgacgagcgctacaaggcctttaagcagttcaccagcgtgttcggtgtgggcgtgaaaaccgcggaaaagtggtttcgtatgggcctccgtacggttgaagaggcaaaggccagtaagagtctgaagctgagcaagatgcagaaggcgggcttcctgtattacgaggatctggcgagccgcgttagtaaagaagaagccgatgccgttacgctcatcgtgaagaacacggtgcgtacctttctgccggatgcgctggtgaccatcaccggcggtttccgccgtggcaaacctatgggccacgacatcgactttctgatcacgaatccgggcccgaaagaggatgacgagctgctccacaaagtggttgatctgctcaagaagcaaggtctgctgctgtacgaagacatcaaagagagcacgttcgtggaggggcaactgccaagtcgcaaaatcgacgccatggacaacttccagaagtgcttcgccattctcaagctgtaccagccgggcgtggataacagcagctataacacgagtaagacgagtgacatggccgaggttaaggattggaaagcgattcgtgtggatctggtgatcacgccattcgagcagtacgcctatgcgctgctcggttggacgggcagcaaagaatttcgtcgcgatctgcgccgctatgcggaggaagagcgcggcatgatcctcgacaaccatgccctctacgaccgcaaaaagcgcatctttctgaaagcgggcagcgaagaagagattttcgcgcatctgggtctggattatgtggagccgtgggaacgcaacgcg

SEQ ID NO: 2006 - protein, 394 aa, synthetic construct
  REGION 1..394: note = Variant of terminal deoxynucleotidyl transferase
MHHHHHHGGSGHPPSNTPEGEVPSVIARPVSQYSCQRKTTLNNYNKKFTDALEIMAENYKFKENLIACLEAKRAASILKYLPFPVTSMKDIQGLPCITDQVRDVIEEIIEEGESSRVKEVLNDERYKAFKQFTSVFGVGVKTAEKWFRMGLRTVEEAKASKSLKLSKMQKAGFLYYEDLASRVSKEEADAVTLIVKNTVRTFLPDALVTITGGFRRGKPMGHDIDFLITNPGPKEDDELLHKVVDLLKKQGLLLYEDIKESTFVEGQLPSRKIDAMDNFQKCFAILKLYQPGVDNSSYNTSKTSDMAEVKDWKAIRVDLVITPFEQYAYALLGWTGSKEFRRDLRRYAEEERGMILDNHALYDRKKRIFLKAGSEEEIFAHLGLDYVEPWERNA

SEQ ID NO: 2007 - DNA, 1182 bp, synthetic construct
  misc_feature 1..1182: note = Variant of terminal deoxynucleotidyl transferase
  source 1..1182: mol_type = other DNA
atgcaccatcatcatcatcatggcggtagcggccatccgccgagcaataccccggagggggaggtgccgagcgttatcgcccgcccggttagtcagtacagctgccagcgcaagaccacgctgaataactacaacaaaaagtttaccgacgcgctggagatcatggccgagaactacaaatttaaagagaacctgatcgcgtgtctggaagccaagcgcgccgcgagtattctgaaatatctgccgttcccggttaccagcatgaaagacatccaaggtctgccgtgcattaccgaccaagttcgtgacgtgatcgaggagatcatcgaagagggcgagagcagccgtgttaaagaagttctcaatgacgagcgctacaaggcctttaagcagttcaccagcgtgttcggtgtgggcgtgaaaaccgcggaaaagtggtttcgtatgggcctccgtacggttgaagaggcaaaggccagtaagagtctgaagctgagcaagatgcagaaggcgggcttcctgtattacgaggatctggcgagccgcgttagtaaagaagaagccgatgccgttacgctcatcgtgaagaacacggtgcgtacctttctgccggatgcgctggtgaccatcaccggcggtttccgccgtggcaaacctatgggccacgacatcgactttctgatcacgaatccgggcccgaaagaggatgacgagctgctccacaaagtggttgatctgctcaagaagcaaggtctgctgctgtacgaagacatcaaagagagcacgttcgtggaggggcaactgccaagtcgcaaaatcgacgccatggacaacttccagaagtgcttcgccattctcaagctgtaccagccgggcgtggataacagcagctataacacgagtaagaagagtgacatggccgaggttaaggattggaaagcgattcgtgtggatctggtgatcacgccattcgagcagtacgcctatgcgctgctcggttggacgggcagcaaagaatttcgtcgcgatctgcgccgctatgcggaggaagagcgcggcatgatcctcgacaaccatgccctctacgacctgaaaaagcgcatctttctgaaagcgggcagcgaagaagagattttcgcgcatctgggtctggattatgtggagccgtgggaacgcaacgcg

SEQ ID NO: 2008 - protein, 394 aa, synthetic construct; identical to SEQ ID NO: 1928
  REGION 1..394: note = Variant of terminal deoxynucleotidyl transferase

SEQ ID NO: 2009 - DNA, 1182 bp, synthetic construct
  misc_feature 1..1182: note = Variant of terminal deoxynucleotidyl transferase
  source 1..1182: mol_type = other DNA
atgcaccatcatcatcatcatggcggtagcggccatccgccgagcaataccccggagggggaggtgccgagcgttatcgcccgcccggttagtcagtacgcttgccagcgcaagaccacgctgaataactacaacaaaaagtttaccgacgcgctggagatcatggccgagaactacaaatttaaagagaacctgatcgcgtgtctggaagccaagcgcgccgcgagtattctgaaatatctgccgttcccggttaccagcatgaaagacatccaaggtctgccgtgcattaccgaccaagttcgtgacgtgatcgaggagatcatcgaagagggcgagagcagccgtgttaaagaagttctcaatgacgagcgctacaaggcctttaagcagttcaccagcgtgttcggtgtgggcgtgaaaaccgcggaaaagtggtttcgtatgggcctccgtacggttgaagaggcaaaggccagtaagagtctgaagctgagcaagatgcagaaggcgggcttcctgtattacgaggatctggcgagccgcgttagtaaagaagaagccgatgccgttacgctcatcgtgaagaacacggtgcgtacctttctgccggatgcgctggtgaccatcaccggcggtttccgccgtggcaaacctatgggccacgacatcgactttctgatcacgaatccgggcccgaaagaggatgacgagctgctccacaaagtggttgatctgctcaagaagcaaggtctgctgctgtacgaagacatcaaagagagcacgttcgtggaggggcaactgccaagtcgcaaaatcgacgccatggacaacttccagaagtgcttcgccattctcaagctgtaccagccgggcgtggataacagcagctataacacgagtaagaagagtgacatggccgaggttaaggattggaaagcgattcgtgtggatctggtgatcacgccattcgagcagtacgcctatgcgctgctcggttggacgggcagcaaagaatttcgtcgcgatctgcgccgctatgcggaggaagagcgcggcatgatcctcgacaaccatgccctctacgaccgcaaaaagcgcatctttctgaaagcgggcagcgaagaagagattttcgcgcatctgggtctggattatgtggagccgtgggaacgcaacgcg

SEQ ID NO: 2010 - protein, 394 aa, synthetic construct
  REGION 1..394: note = Variant of terminal deoxynucleotidyl transferase
MHHHHHHGGSGHPPSNTPEGEVPSVIARPVSQYACQRKTTLNNYNKKFTDALEIMAENYKFKENLIACLEAKRAASILKYLPFPVTSMKDIQGLPCITDQVRDVIEEIIEEGESSRVKEVLNDERYKAFKQFTSVFGVGVKTAEKWFRMGLRTVEEAKASKSLKLSKMQKAGFLYYEDLASRVSKEEADAVTLIVKNTVRTFLPDALVTITGGFRRGKPMGHDIDFLITNPGPKEDDELLHKVVDLLKKQGLLLYEDIKESTFVEGQLPSRKIDAMDNFQKCFAILKLYQPGVDNSSYNTSKKSDMAEVKDWKAIRVDLVITPFEQYAYALLGWTGSKEFRRDLRRYAEEERGMILDNHALYDRKKRIFLKAGSEEEIFAHLGLDYVEPWERNA

SEQ ID NO: 2011 - DNA, 1182 bp, synthetic construct
  misc_feature 1..1182: note = Variant of terminal deoxynucleotidyl transferase
  source 1..1182: mol_type = other DNA
atgcaccatcatcatcatcatggcggtagcggccatccgccgagcaataccccggagggggaggtgccgagcgttatcgcccgcccggttagtcagtacagctgccagcgcaagaccacgctgaataactacaacaaaaagtttaccgacgcgctggagatcatggccgagaactacaaatttaaagagaacctgatcgcgtgtctggaagccaagcgcgccgcgagtattttcaaatatctgccgttcccggttaccagcatgaaagacatccaaggtctgccgtgcattaccgaccaagttcgtgacgtgatcgaggagatcatcgaagagggcgagagcagccgtgttaaagaagttctcaatgacgagcgctacaaggcctttaagcagttcaccagcgtgttcggtgtgggcgtgaaaaccgcggaaaagtggtttcgtatgggcctccgtacggttgaagaggcaaaggccagtaagagtctgaagctgagcaagatgcagaaggcgggcttcctgtattacgaggatctggcgagccgcgttagtaaagaagaagccgatgccgttacgctcatcgtgaagaacacggtgcgtacctttctgccggatgcgctggtgaccatcaccggcggtttccgccgtggcaaacctatgggccacgacatcgactttctgatcacgaatccgggcccgaaagaggatgacgagctgctccacaaagtggttgatctgctcaagaagcaaggtctgctgctgtacgaagacatcaaagagagcacgttcgtggaggggcaactgccaagtcgcaaaatcgacgccatggacaacttccagaagtgcttcgccattctcaagctgtaccagccgggcgtggataacagcagctataacacgagtaagaagagtgacatggccgaggttaaggattggaaagcgattcgtgtggatctggtgatcacgccattcgagcagtacgcctatgcgctgctcggttggacgggcagcaaagaatttcgtcgcgatctgcgccgctatgcggaggaagagcgcggcatgatcctcgacaaccatgccctctacgaccgcaaaaagcgcatctttctgaaagcgggcagcgaagaagagattttcgcgcatctgggtctggattatgtggagccgtgggaacgcaacgcg

SEQ ID NO: 2012 - protein, 394 aa, synthetic construct
  REGION 1..394: note = Variant of terminal deoxynucleotidyl transferase
MHHHHHHGGSGHPPSNTPEGEVPSVIARPVSQYSCQRKTTLNNYNKKFTDALEIMAENYKFKENLIACLEAKRAASIFKYLPFPVTSMKDIQGLPCITDQVRDVIEEIIEEGESSRVKEVLNDERYKAFKQFTSVFGVGVKTAEKWFRMGLRTVEEAKASKSLKLSKMQKAGFLYYEDLASRVSKEEADAVTLIVKNTVRTFLPDALVTITGGFRRGKPMGHDIDFLITNPGPKEDDELLHKVVDLLKKQGLLLYEDIKESTFVEGQLPSRKIDAMDNFQKCFAILKLYQPGVDNSSYNTSKKSDMAEVKDWKAIRVDLVITPFEQYAYALLGWTGSKEFRRDLRRYAEEERGMILDNHALYDRKKRIFLKAGSEEEIFAHLGLDYVEPWERNA

SEQ ID NO: 2013 - DNA, 1182 bp, synthetic construct
  misc_feature 1..1182: note = Variant of terminal deoxynucleotidyl transferase
  source 1..1182: mol_type = other DNA
atgcaccatcatcatcatcatggcggtagcggccatccgccgagcaataccccggagggggaggtgccgagcgttatcgcccgcccggttagtcagtacagctgccagcgcaagaccacgctgaataactacaacaaaaagtttaccgacgcgctggagatcatggccgagaactacaaatttaaagagaacctgatcgcgtgtctggaagccaagcgcgccgcgagtattctgaaatatctgccgttcccggttaccagcatgaaagacatccaaggtctgccgtgcattaccgaccaagttcgtgacgtgatcgaggagatcatcgaagagggcgagagcagccgtgttaaagaagttctcaatgacgagcgctacaaggcctttaagcagttcaccagcgtgttcggtgtgggcgtgaaaaccgcggaaaagtggtttcgtatgggcctccgtacggttgaagaggcaaaggccagtaagagtctgaagctgagcaagatgcagaaggcgggcttcctgtattacgaggatctggcgagccgcgttagtaaagaagaagccgatgccgttacgctcatcgtgaagaacacggtgcgtacctttctgccggatgcgctggtgaccatcaccggcggtttccgccgtggcaaacctatgggccacgacatcgactttctgatcacgaatccgggcccgaaagaggatgacgagctgctccacaaagtggttgatctgctcaagaagcaaggtctgctgctgtacgaagacatcaaagagagcacgttcgtggaggggcaactgccaagtcgcaaaatcgacgccatggacaacttccagaagtgcttcgccattctcaagctgtaccagccgggcgtggataacagcagctataacacgagtaagaagagtgacatggccgaggttaaggattggaaagcgattcgtgtggatctggtgatcacgccattcgagcagtacgcctatgcgctgctcggttggacgggcagcaaagaatttcgtcgcgatctgcgccgctatgcggaggaagagcgcggcatgatcctcgacaaccatgccctctacgacttcaaaaagcgcatctttctgaaagcgggcagcgaagaagagattttcgcgcatctgggtctggattatgtggagccgtgggaacgcaacgcg

SEQ ID NO: 2014 - protein, 394 aa, synthetic construct
  REGION 1..394: note = Variant of terminal deoxynucleotidyl transferase
MHHHHHHGGSGHPPSNTPEGEVPSVIARPVSQYSCQRKTTLNNYNKKFTDALEIMAENYKFKENLIACLEAKRAASILKYLPFPVTSMKDIQGLPCITDQVRDVIEEIIEEGESSRVKEVLNDERYKAFKQFTSVFGVGVKTAEKWFRMGLRTVEEAKASKSLKLSKMQKAGFLYYEDLASRVSKEEADAVTLIVKNTVRTFLPDALVTITGGFRRGKPMGHDIDFLITNPGPKEDDELLHKVVDLLKKQGLLLYEDIKESTFVEGQLPSRKIDAMDNFQKCFAILKLYQPGVDNSSYNTSKKSDMAEVKDWKAIRVDLVITPFEQYAYALLGWTGSKEFRRDLRRYAEEERGMILDNHALYDFKKRIFLKAGSEEEIFAHLGLDYVEPWERNA

SEQ ID NO: 2015 - DNA, 1182 bp, synthetic construct
  misc_feature 1..1182: note = Variant of terminal deoxynucleotidyl transferase
  source 1..1182: mol_type = other DNA
atgcaccatcatcatcatcatggcggtagcggccatccgccgagcaataccccggagggggaggtgccgagcgttatcgcccgcccggttagtcagtacagctgccagcgcaagaccacgctgaataactacaacaaaaagtttaccgacgcgctggagatcatggccgagaactacaaatttaaagagaacctgatcgcgtgtctggaagccaagcgcgccgcgagtattctgaaatatctgccgttcccggttaccagcatgaaagacatccaaggtctgccgtgcattaccgaccaagttcgtgacgtgatcgaggagatcatcgaagagggcgagagcagccgtgttaaagaagttctcaatgacgagcgctacaaggcctttaagcagttcaccagcgtgttcggtgtgggcgtgaaaaccgcggaaaagtggtttcgtatgggcctccgtacggttgaagaggcaaaggccagtaagagtctgaagctgagcaagatgcagaaggcgggcttcctgtattacgaggatctggcgagccgcgttagtaaagaagaagccgatgccgttacgctcatcgtgaagaacacggtgcgtacctttctgccggatgcgctggtgaccatcaccggcggtttccgccgtggcaaacctatgggccacgacatcgactttctgatcacgaatccgggcccgaaagaggatgctgagctgctccacaaagtggttgatctgctcaagaagcaaggtctgctgctgtacgaagacatcaaagagagcacgttcgtggaggggcaactgccaagtcacaaaatcgacgccatggacaacttccagaagtgcttcgccattctcaagctgtaccagccgggcgtggataacagcagctataacacgagtaagaagagtgacatggccgaggttaaggattggaaagcgattcgtgtggatctggtgatcacgccattcgagcagtacgcctatgcgctgctcggttggacgggcagcaaagaatttcgtcgcgatctgcgccgctatgcggaggaagagcgcggcatgatcctcgacaaccatgccctctacgaccgcaaaaagcgcatctttctgaaagcgggcagcgaagaagagattttcgcgcatctgggtctggattatgtggagccgtgggaacgcaacgcg

SEQ ID NO: 2016 - protein, 394 aa, synthetic construct
  REGION 1..394: note = Variant of terminal deoxynucleotidyl transferase
MHHHHHHGGSGHPPSNTPEGEVPSVIARPVSQYSCQRKTTLNNYNKKFTDALEIMAENYKFKENLIACLEAKRAASILKYLPFPVTSMKDIQGLPCITDQVRDVIEEIIEEGESSRVKEVLNDERYKAFKQFTSVFGVGVKTAEKWFRMGLRTVEEAKASKSLKLSKMQKAGFLYYEDLASRVSKEEADAVTLIVKNTVRTFLPDALVTITGGFRRGKPMGHDIDFLITNPGPKEDAELLHKVVDLLKKQGLLLYEDIKESTFVEGQLPSHKIDAMDNFQKCFAILKLYQPGVDNSSYNTSKKSDMAEVKDWKAIRVDLVITPFEQYAYALLGWTGSKEFRRDLRRYAEEERGMILDNHALYDRKKRIFLKAGSEEEIFAHLGLDYVEPWERNA

SEQ ID NO: 2017 - DNA, 1182 bp, synthetic construct
  misc_feature 1..1182: note = Variant of terminal deoxynucleotidyl transferase
  source 1..1182: mol_type = other DNA
atgcaccatcatcatcatcatggcggtagcggccatccgccgagcaataccccggagggggaggtgccgagcgttatcgcccgcccggttagtcagtacagctgccagcgcaagaccacgctgaataactacaacaaaaagctgaccgacgcgctggagatcatggccgagaactacaaatttaaagagaacctgatcgcgtgtctggaagccaagcgcgccgcgagtattctgaaatatctgccgttcccggttaccagcatgaaagacatccaaggtctgccgtgcattaccgaccaagttcgtgacgtgatcgaggagatcatcgaagagggcgagagcagccgtgttaaagaagttctcaatgacgagcgctacaaggcctttaagcagttcaccagcgtgttcggtgtgggcgtgaaaaccgcggaaaagtggtttcgtatgggcctccgtacggttgaagaggcaaaggccagtaagagtctgaagctgagcaagatgcagaaggcgggcttcctgtattacgaggatctggcgagccgcgttagtaaagaagaagccgatgccgttacgctcatcgtgaagaacacggtgcgtacctttctgccggatgcgctggtgaccatcaccggcggtttccgccgtggcaaacctatgggccacgacatcgactttctgatcacgaatccgggcccgaaagaggatgacgagctgctccacaaagtggttgatctgctcaagaagcaaggtctgctgctgtacgaagacatcaaagagagcacgttcgtggaggggcaactgccaagtcgcaaaatcgacgccatggacaacttccagaagtgcttcgccattctcaagctgtaccagccgggcgtggataacagcagctataacacgagtaagaagagtgacatggccgaggttaaggattggaaagcgattcgtgtggatctggtgatcacgccattcgagcagtacgcctatgcgctgctcggttggacgggcagcaaagaatttcgtcgcgatctgcgccgctatgcggaggaagagcgcggcatgatcctcgacaaccatgccctctacgaccgcaaaaagcgcatctttctgaaagcgggcagcgaagaagagattttcgcgcatctgggtctggattatgtggagccgtgggaacgcaacgcg

SEQ ID NO: 2018 - protein, 394 aa, synthetic construct
  REGION 1..394: note = Variant of terminal deoxynucleotidyl transferase
MHHHHHHGGSGHPPSNTPEGEVPSVIARPVSQYSCQRKTTLNNYNKKLTDALEIMAENYKFKENLIACLEAKRAASILKYLPFPVTSMKDIQGLPCITDQVRDVIEEIIEEGESSRVKEVLNDERYKAFKQFTSVFGVGVKTAEKWFRMGLRTVEEAKASKSLKLSKMQKAGFLYYEDLASRVSKEEADAVTLIVKNTVRTFLPDALVTITGGFRRGKPMGHDIDFLITNPGPKEDDELLHKVVDLLKKQGLLLYEDIKESTFVEGQLPSRKIDAMDNFQKCFAILKLYQPGVDNSSYNTSKKSDMAEVKDWKAIRVDLVITPFEQYAYALLGWTGSKEFRRDLRRYAEEERGMILDNHALYDRKKRIFLKAGSEEEIFAHLGLDYVEPWERNA

SEQ ID NO: 2019 - DNA, 1182 bp, synthetic construct
  misc_feature 1..1182: note = Variant of terminal deoxynucleotidyl transferase
  source 1..1182: mol_type = other DNA
atgcaccatcatcatcatcatggcggtagcggccatccgccgagcaataccccggagggggaggtgccgagcgttatcgcccgcccggttagtcagtacagctgccagcgcaagaccacgctgaataactacaacaaaaagtttaccgacgcgctggagatcatggccgagaactacaaatttaaagagaacctgatcgcgtgtctggaagccaagcgcgccgcgagtattctgaaatatctgccgttcccggttaccagcatgaaagacatccaaggtctgccgtgcattaccgaccaagttcgtgacgtgatcgaggagatcatcgaagagggcgagagcagccgtgttaaagaagttctcaatgacgagcgctacaaggcctttaagcagttcaccagcgtgttcggtgtgggcgtgaaaaccgcggaaaagtggtttcgtatgggcctccgtacggttgaagaggcaaaggccagtaagagtctgaagctgagcaagatgcagaaggcgggcttcctgtattacgaggatctggcgagccgcgttagtaaagaagaagccgatgccgttacgctcatcgtgaagaacacggtgcgtacctttctgccggatgcgctggtgaccatcaccggcggtttccgccgtggcaaacctatgggccacgacatcgactttctgatcacgaatccgggcccgaaagaggatgacgagctgctccacaaagtggttgatctgctcaagaagcaaggtctgctgctgtacgaagacatcaaagagagcacgttcgtggaggggcaactgccaagtcgcaaaatcgacgccatggacaacttccagaagtgcttcgccattctcaagctgtaccagccgggcgtggataacagcagctataacacgagtaagaagagtgacatggccgaggttaaggattggaaagcggtccgtgtggatctggtgatcacgccattcgagcagtacgcctatgcgctgctcggttggacgggcagcaaagaatttcgtcgcgatctgcgccgctatgcggaggaagagcgcggcatgatcctcgacaaccatgccctctacgaccgcaaaaagcgcatctttctgaaagcgggcagcgaagaagagattttcgcgcatctgggtctggattatgtggagccgtgggaacgcaacgcg

SEQ ID NO: 2020 - protein, 394 aa, synthetic construct
  REGION 1..394: note = Variant of terminal deoxynucleotidyl transferase
MHHHHHHGGSGHPPSNTPEGEVPSVIARPVSQYSCQRKTTLNNYNKKFTDALEIMAENYKFKENLIACLEAKRAASILKYLPFPVTSMKDIQGLPCITDQVRDVIEEIIEEGESSRVKEVLNDERYKAFKQFTSVFGVGVKTAEKWFRMGLRTVEEAKASKSLKLSKMQKAGFLYYEDLASRVSKEEADAVTLIVKNTVRTFLPDALVTITGGFRRGKPMGHDIDFLITNPGPKEDDELLHKVVDLLKKQGLLLYEDIKESTFVEGQLPSRKIDAMDNFQKCFAILKLYQPGVDNSSYNTSKKSDMAEVKDWKAVRVDLVITPFEQYAYALLGWTGSKEFRRDLRRYAEEERGMILDNHALYDRKKRIFLKAGSEEEIFAHLGLDYVEPWERNA

SEQ ID NO: 2021 - DNA, 1182 bp, synthetic construct
  misc_feature 1..1182: note = Variant of terminal deoxynucleotidyl transferase
  source 1..1182: mol_type = other DNA
atgcaccatcatcatcatcatggcggtagcggccatccgccgagcaataccccggagggggaggtgccgagcgttatcgcccgcccggttagtcagtacagctgccagcgcaagaccacgctgaataactacaacaaaaagtttaccgacgcgctggagatcatggccgagaactacaaatttaaagagaacctgatcgcgtgtctggaagccaagcgcgccgcgagtattctgaaatatctgccgttcccggttaccagcatgaaagacatccaaggtctgccgtgcattaccgaccaagttcgtgacgtgatcgaggagatcatcgaagagggcgagagcagccgtgttaaagaagttctcaatgacgagcgctacaaggcctttaagcagttcaccagcgtgttcggtgtgggcgtgaaaaccgcggaaaagtggtttcgtatgggcctccgtacggttgaagaggcaaaggccagtaagagtctgaagctgagcaagatgcagaaggcgggcttcctgtattacgaggatctggcgagccgcgttagtaaagaagaagccgatgccgttacgctcatcgtgaagaacacggtgcgtacctttctgccggatgcgctggtgaccatcaccggcggtttccgccgtggcaaacctatgggccacgacatcgactttctgatcacgaatccgggcccgaaagaggatgacgagctgctccacaaagtggttgatctgctcaagacgcaaggtctgctgctgtacgaagacatcaaagagagcacgttcgtggaggggcaactgccaagtcgcaaaatcgacgccatggacaacttccagaagtgcttcgccattctcaagctgtaccagccgggcgtggataacagcagctataacacgagtaagaagagtgacatggccgaggttaaggattggaaagcgattcgtgtggatctggtgatcacgccattcgagcagtacgcctatgcgctgctcggttggacgggcagcaaagaatttcgtcgcgatctgcgccgctatgcggaggaagagcgcggcatgatcctcgacaaccatgccctctacgaccgcaaaaagcgcatctttctgaaagcgggcagcgaagaagagattttcgcgcatctgggtctggattatgtggagccgtgggaacgcaacgcg

SEQ ID NO: 2022 - protein, 394 aa, synthetic construct
  REGION 1..394: note = Variant of terminal deoxynucleotidyl transferase
MHHHHHHGGSGHPPSNTPEGEVPSVIARPVSQYSCQRKTTLNNYNKKFTDALEIMAENYKFKENLIACLEAKRAASILKYLPFPVTSMKDIQGLPCITDQVRDVIEEIIEEGESSRVKEVLNDERYKAFKQFTSVFGVGVKTAEKWFRMGLRTVEEAKASKSLKLSKMQKAGFLYYEDLASRVSKEEADAVTLIVKNTVRTFLPDALVTITGGFRRGKPMGHDIDFLITNPGPKEDDELLHKVVDLLKTQGLLLYEDIKESTFVEGQLPSRKIDAMDNFQKCFAILKLYQPGVDNSSYNTSKKSDMAEVKDWKAIRVDLVITPFEQYAYALLGWTGSKEFRRDLRRYAEEERGMILDNHALYDRKKRIFLKAGSEEEIFAHLGLDYVEPWERNA

SEQ ID NO: 2023 - DNA, 1182 bp, synthetic construct
  misc_feature 1..1182: note = Variant of terminal deoxynucleotidyl transferase
  source 1..1182: mol_type = other DNA
atgcaccatcatcatcatcatggcggtagcggccatccgccgagcaataccccggagggggaggtgccgagcgttatcgcccgcccggttagtcagtacagctgccagcgcaagaccacgctgaataactacaacaaaaagtttaccgacgcgctggagatcatggccgagaactacaaatttaaagagaacctgatcgcgtgtctggaagccaagcgcgccgcgagtattctgaaatatctgccgttcccggttaccagcatgaaagacatccaaggtctgccgtgcattaccgaccaagttcgtgacgtgatcgaggagatcatcgaagagggcgagagcagccgtgttaaagaagttctcaatgacgagcgctacaaggcctttaagcagttcaccagcgtgttcggtgtgggcgtgaaaaccgcggaaaagtggtttcgtatgggcctccgtacggttgaagaggcaaaggccagtaagagtctgaagctgagcaagatgcagaaggcgggcttcctgtattacgaggatctggcgagccgcgttagtaaagaagaagccgatgccgttacgctcatcgtgaagaacacggtgcgtacctttctgccggatgcgctggtgaccatcaccggcggtttccgccgtggcaaacctatgggccacgacatcgactttctgatcacgaatccgggcccgaaagaggatgacgagctgctccacaaagtggttgatctgctcaagaagcaaggtctgctgctgtacgaagacatcaaagagagcacgttcgtggaggggcaactgccaagtcgcaaaatcgacgccatggacaacttccagaagtgcttcgccattctcaagctgtaccagccgggcgtggataacagcagctataacacgagtggcaagagtgacatggccgaggttaaggattggaaagcgattcgtgtggatctggtgatcacgccattcgagcagtacgcctatgcgctgctcggttggacgggcagcaaagaatttcgtcgcgatctgcgccgctatgcggaggaagagcgcggcatgatcctcgacaaccatgccctctacgaccgcaaaaagcgcatctttctgaaagcgggcagcgaagaagagattttcgcgcatctgggtctggattatgtggagccgtgggaacgcaacgcg

SEQ ID NO: 2024 - protein, 394 aa, synthetic construct
  REGION 1..394: note = Variant of terminal deoxynucleotidyl transferase
MHHHHHHGGSGHPPSNTPEGEVPSVIARPVSQYSCQRKTTLNNYNKKFTDALEIMAENYKFKENLIACLEAKRAASILKYLPFPVTSMKDIQGLPCITDQVRDVIEEIIEEGESSRVKEVLNDERYKAFKQFTSVFGVGVKTAEKWFRMGLRTVEEAKASKSLKLSKMQKAGFLYYEDLASRVSKEEADAVTLIVKNTVRTFLPDALVTITGGFRRGKPMGHDIDFLITNPGPKEDDELLHKVVDLLKKQGLLLYEDIKESTFVEGQLPSRKIDAMDNFQKCFAILKLYQPGVDNSSYNTSGKSDMAEVKDWKAIRVDLVITPFEQYAYALLGWTGSKEFRRDLRRYAEEERGMILDNHALYDRKKRIFLKAGSEEEIFAHLGLDYVEPWERNA

SEQ ID NO: 2025 - DNA, 1182 bp, synthetic construct
  misc_feature 1..1182: note = Variant of terminal deoxynucleotidyl transferase
  source 1..1182: mol_type = other DNA
atgcaccatcatcatcatcatggcggtagcggccatccgccgagcaataccccggagggggaggtgccgagcgttatcgcccgcccggttagtcagtacagctgccagcgcaagaccacgctgaataactacaacaaaaagtttaccgacgcgctggagatcatggccgagaactacaaatttaaagagaacctgatcgcgtgtctggaagccaagcgcgccgcgagtattctgaaatatctgccgttcccggttaccagcatgaaagacatccaaggtctgccgtgcattaccgaccaagttcgtgacgtgatcgaggagatcatcgaagagggcgagagcagccgtgttaaagaagttctcaatgacgagcgctacaaggcctttaagcagttcaccagcgtgttcggtgtgggcgtgaaaaccgcggaaaagtggtttcgtatgggcctccgtacggttgaagaggcaaaggccagtaagagtctgaagctgagcaagatgcagaaggcgggcttcctgtattacgaggatctggcgagccgcgttagtaaagaagaagccgatgccgttacgctcatcgtgaagaacacggtgcgtacctttctgccggatgcgctggtgaccatcaccggcggtttccgccgtggcaaacctatgggccacgacatcgactttctgatcacgaatccgggcccgaaagaggatgacgagctgctccacaaagtggttgatctgctcaagaagcaaggtctgctgctgtacgaagacatcaaagagagcacgttcgtggaggggcaactgccaagtcgcaaaatcgacgccatggacaacttccagaagtgcttcgccattctcaagctgtaccagccgggcgtggataacagcagctataacacgagtaagaagagtgacatggccgaggttaaggattggaaagcgattcgtgtggatctggtgatcacgccattcgagcagtacgcctatgcgctgctcggttggacgggcagcaaagaatttcgtcgcgatctgcgccgctatgcggaggaagagcgcggcatgatcctcgacaaccatgccctctacgaccgcggcaagcgcatctttctgaaagcgggcagcgaagaagagattttcgcgcatctgggtctggattatgtggagccgtgggaacgcaacgcg

SEQ ID NO: 2026 - protein, 394 aa, synthetic construct
  REGION 1..394: note = Variant of terminal deoxynucleotidyl transferase
MHHHHHHGGSGHPPSNTPEGEVPSVIARPVSQYSCQRKTTLNNYNKKFTDALEIMAENYKFKENLIACLEAKRAASILKYLPFPVTSMKDIQGLPCITDQVRDVIEEIIEEGESSRVKEVLNDERYKAFKQFTSVFGVGVKTAEKWFRMGLRTVEEAKASKSLKLSKMQKAGFLYYEDLASRVSKEEADAVTLIVKNTVRTFLPDALVTITGGFRRGKPMGHDIDFLITNPGPKEDDELLHKVVDLLKKQGLLLYEDIKESTFVEGQLPSRKIDAMDNFQKCFAILKLYQPGVDNSSYNTSKKSDMAEVKDWKAIRVDLVITPFEQYAYALLGWTGSKEFRRDLRRYAEEERGMILDNHALYDRGKRIFLKAGSEEEIFAHLGLDYVEPWERNA

SEQ ID NO: 2027 - DNA, 1182 bp, synthetic construct
  misc_feature 1..1182: note = Variant of terminal deoxynucleotidyl transferase
  source 1..1182: mol_type = other DNA
atgcaccatcatcatcatcatggcggtagcggccatccgccgagcaataccccggagggggaggtgccgagcgttatcgcccgcccggttagtcagtacagctgccagcgcaagaccacgctgaataactacaacaaaaagtttaccgacgcgctggagatcatggccgagaactacaaatttaaagagaacctgatcgcgtgtctggaagccaagcgcgccgcgagtattctgaaatatctgccgttcccggttaccagcatgaaagacatccaaggtctgccgtgcattaccgaccaagttcgtgacgtgatcgaggagatcatcgaagagggcgagagcagccgtgttaaagaagttctcaatgacgagcgctacaaggcctttaagcagttcaccagcgtgttcggtgtgggcgtgaaaaccgcggaaaagtggtttcgtatgggcctccgtacggttgaagaggcaaaggccagtaagagtctgaagctgagcaagatgcagaaggcgggcttcctgtattacgaggatctggcgagccgcgttagtaaagaagaagccgatgccgttacgctcatcgtgaagaacacggtgcgtacctttctgccggatgcgctggtgaccatcaccggcggtttccgccgtggcaaacctatgggccacgacatcgactttctgatcacgaatccgggcccgaaagaggatgacgagctgctccacaaagtggttgatctgctcaagaagcaaggtctgctgctgtacgaagacatcaaagagagcacgttcgtggaggggcaactgccaagtcgcaaaatcgacgccatggacaacttccagaagtgcttcgccattctcaagctgtaccagccgggcgtggataacagcagctataacacgagtaagaagagtgacatggccgaggttaaggattggaaagcgattcgtgtggatctggtgatcacgccattcgagcagtacgcctatgcgctgctcggttggacgggcagcaaagaatttcgtcgcgatctgcgccgctatgcggaggaagagcgccagatgatcctcgacaaccatgccctctacgaccgcaaaaagcgcatctttctgaaagcgggcagcgaagaagagattttcgcgcatctgggtctggattatgtggagccgtgggaacgcaacgcg

SEQ ID NO: 2028 - protein, 394 aa, synthetic construct
  REGION 1..394: note = Variant of terminal deoxynucleotidyl transferase
MHHHHHHGGSGHPPSNTPEGEVPSVIARPVSQYSCQRKTTLNNYNKKFTDALEIMAENYKFKENLIACLEAKRAASILKYLPFPVTSMKDIQGLPCITDQVRDVIEEIIEEGESSRVKEVLNDERYKAFKQFTSVFGVGVKTAEKWFRMGLRTVEEAKASKSLKLSKMQKAGFLYYEDLASRVSKEEADAVTLIVKNTVRTFLPDALVTITGGFRRGKPMGHDIDFLITNPGPKEDDELLHKVVDLLKKQGLLLYEDIKESTFVEGQLPSRKIDAMDNFQKCFAILKLYQPGVDNSSYNTSKKSDMAEVKDWKAIRVDLVITPFEQYAYALLGWTGSKEFRRDLRRYAEEERQMILDNHALYDRKKRIFLKAGSEEEIFAHLGLDYVEPWERNA

SEQ ID NO: 2029 - DNA, 1182 bp, synthetic construct
  misc_feature 1..1182: note = Variant of terminal deoxynucleotidyl transferase
  source 1..1182: mol_type = other DNA
atgcaccatcatcatcatcatggcggtagcggccatccgccgagcaataccccggagggggaggtgccgagcgttatcgcccgcccggttagtcagtacagctgccagcgcaagaccacgctgaataactacaacaaaaagtttaccgacgcgctggagatcatggccgagaactacaaatttaaagagaacctgatcgcgtgtattgaagccaagcgcgccgcgagtattctgaaatatctgccgttcccggttaccagcatgaaagacatccaaggtctgccgtgcattaccgaccaagttcgtgacgtgatcgaggagatcatcgaagagggcgagagcagccgtgttaaagaagttctcaatgacgagcgctacaaggcctttaagcagttcaccagcgtgttcggtgtgggcgtgaaaaccgcggaaaagtggtttcgtatgggcctccgtacggttgaagaggcaaaggccagtaagagtctgaagctgagcaagatgcagaaggcgggcttcctgtattacgaggatctggcgagccgcgttagtaaagaagaagccgatgccgttacgctcatcgtgaagaacacggtgcgtacctttctgccggatgcgctggtgaccatcaccggcggtttccgccgtggcaaacctatgggccacgacatcgactttctgatcacgaatccgggcccgaaagaggatgacgagctgctccacaaagtggttgatctgctcaagaagcaaggtctgctgctgtacgaagacatcaaagagagcacgttcgtggaggggcaactgccaagtcgcaaaatcgacgccatggacaacttccagaagtgcttcgccattctcaagctgtaccagccgggcgtggataacagcagctataacacgagtaagaagagtgacatggccgaggttaaggattggaaagcgattcgtgtggatctggtgatcacgccattcgagcagtacgcctatgcgctgctcggttggacgggcagcaaagaatttcgtcgcgatctgcgccgctatgcggaggaagagcgcggcatgatcctcgacaaccatgccctctacgaccgcaaaaagcgcatctttctgaaagcgggcagcgaagaagagattttcgcgcatctgggtctggattatgtggagccgtgggaacgcaacgcg

SEQ ID NO: 2030 - protein, 394 aa, synthetic construct
  REGION 1..394: note = Variant of terminal deoxynucleotidyl transferase
MHHHHHHGGSGHPPSNTPEGEVPSVIARPVSQYSCQRKTTLNNYNKKFTDALEIMAENYKFKENLIACIEAKRAASILKYLPFPVTSMKDIQGLPCITDQVRDVIEEIIEEGESSRVKEVLNDERYKAFKQFTSVFGVGVKTAEKWFRMGLRTVEEAKASKSLKLSKMQKAGFLYYEDLASRVSKEEADAVTLIVKNTVRTFLPDALVTITGGFRRGKPMGHDIDFLITNPGPKEDDELLHKVVDLLKKQGLLLYEDIKESTFVEGQLPSRKIDAMDNFQKCFAILKLYQPGVDNSSYNTSKKSDMAEVKDWKAIRVDLVITPFEQYAYALLGWTGSKEFRRDLRRYAEEERGMILDNHALYDRKKRIFLKAGSEEEIFAHLGLDYVEPWERNA

SEQ ID NO: 2031 - DNA, 1182 bp, synthetic construct
  misc_feature 1..1182: note = Variant of terminal deoxynucleotidyl transferase
  source 1..1182: mol_type = other DNA
atgcaccatcatcatcatcatggcggtagcggccatccgccgagcaataccccggagggggaggtgccgagcgttatcgcccgcccggttagtcagtacagctgccagcgcaagaccacgctgaataactacaacaaaaagtttaccgacgcgctggagatcatggccgagaactacaaatttaaagagaacctgatcgcgtgtctggaagccaagcgcgccgcgagtattctgaaatatctgccgttcccggttaccagcatgaaagacatccaaggtctgccgtgcattaccgaccaagttcgtgacgtgatcgaggagatcatcgaagagggcgagagcagccgtgttaaagaagttctcaatgacgagcgctacaaggcctttaagcagttcaccagcgtgttcggtgtgggcgtgaaaaccgcggaaaagtggtttcgtatgggcctccgtacggttgaagaggcaaaggccagtaagagtctgaagctgagcaagatgcagaaggcgggcttcctgtattacgaggatctggcgagccgcgttagtaaagaagaagccgatgccgttacgctcatcgtgaagaacacggtgcgtacctttctgccggatgcgctggtgaccatcaccggcggtttccgccgtggcaaacctatgggccacgacatcgactttctgatcacgaatccgggcccgaaagaggatgacgagctgctccacaaagtggttgatctgctcaagaagcaaggtctgctgctgtacgaagacatcaaagagagcacgttcgtggaggggcaactgccaagtcgcaaaatcgacgccatggacaacttccagaagtgcttcgccattctcaagctgtaccagccgggcgtggataacagcagctataacacgagtaagaagagtgacatggccgagaagaaggattggaaagcgattcgtgtggatctggtgatcacgccattcgagcagtacgcctatgcgctgctcggttggacgggcagcaaagaatttcgtcgcgatctgcgccgctatgcggaggaagagcgcggcatgatcctcgacaaccatgccctctacgaccgcaaaaagcgcatctttctgaaagcgggcagcgaagaagagattttcgcgcatctgggtctggattatgtggagccgtgggaacgcaacgcg

SEQ ID NO: 2032 - protein, 394 aa, synthetic construct
  REGION 1..394: note = Variant of terminal deoxynucleotidyl transferase
MHHHHHHGGSGHPPSNTPEGEVPSVIARPVSQYSCQRKTTLNNYNKKFTDALEIMAENYKFKENLIACLEAKRAASILKYLPFPVTSMKDIQGLPCITDQVRDVIEEIIEEGESSRVKEVLNDERYKAFKQFTSVFGVGVKTAEKWFRMGLRTVEEAKASKSLKLSKMQKAGFLYYEDLASRVSKEEADAVTLIVKNTVRTFLPDALVTITGGFRRGKPMGHDIDFLITNPGPKEDDELLHKVVDLLKKQGLLLYEDIKESTFVEGQLPSRKIDAMDNFQKCFAILKLYQPGVDNSSYNTSKKSDMAEKKDWKAIRVDLVITPFEQYAYALLGWTGSKEFRRDLRRYAEEERGMILDNHALYDRKKRIFLKAGSEEEIFAHLGLDYVEPWERNA

SEQ ID NO: 2033 - DNA, 1182 bp, synthetic construct
  misc_feature 1..1182: note = Variant of terminal deoxynucleotidyl transferase
  source 1..1182: mol_type = other DNA
atgcaccatcatcatcatcatggcgatagcggccatccgccgagcaataccccggagggggaggtgccgagcgttatcgcccgtccggttagtcagtacagctgccagcgcaagaccacgctgaataactacaacaaaaagtttaccgacgcgctggagatcatggccgagaactacaaatttaaagagaacctgatcgcgtgtctggaagccaagcgcgccgcgagtattctgaaatatctgccgttcccggttaccagcatgaaagacatccaaggtctgccgtgcattaccgaccaagttcgtgacgtgatcgaggagatcatcgaagagggcgagagcagccgtgttaaagaagttctcaatgacgagcgctacaaggcctttaagcagttcaccagcgtgttcggtgtgggcgtgaaaaccgcggaaaagtggtttcgtatgggcctccgtacggttgaagaagcaaaggccagtaagagtctgaagctgagcaagatgcagaaggcgggcttcctgtattacgaggatctggcgagccgcgttagtaaagaagaagccgatgccgttacgctcatcgtgaagaacacggtgcgtacctttctgccggatgcgctggtgaccatcaccggcggtttccgccgtggcaaacctatgggccacgacgttgactttctgatcacgaatccgggcccgaaagaggatgacgagctgctccacaaagtggttgatctgctcaagaagcaaggtctgctgctgtacgaagacatcaaagagagcacgttcgtggaggggcaactgccaagtcgcaaaatcgacgccatggacaacttccagaagtgcttcgccattctcaagctgtaccagccgggcgtggataacagttcggttgggacgagtaagaaaagtgacatggccgaggttaaggattggaaagcgattcgtgtggatctggtgatcacgccattcgagcagtacgcctatgcgctgctcggttggacgggcagcaaagaatttcgtcgcgatctgcgccgctatgcggaggaagagcgcggcatgatcctcgacaaccatgccctctacgacctgaaaaagcgcatctttctgaaagcgggcagcgaagaagagattttcgcgcatctgggtctggattatgtggagccgtgggaacgcaacgcg

SEQ ID NO: 2034 - protein, 394 aa, synthetic construct
  REGION 1..394: note = Variant of terminal deoxynucleotidyl transferase
MHHHHHHGDSGHPPSNTPEGEVPSVIARPVSQYSCQRKTTLNNYNKKFTDALEIMAENYKFKENLIACLEAKRAASILKYLPFPVTSMKDIQGLPCITDQVRDVIEEIIEEGESSRVKEVLNDERYKAFKQFTSVFGVGVKTAEKWFRMGLRTVEEAKASKSLKLSKMQKAGFLYYEDLASRVSKEEADAVTLIVKNTVRTFLPDALVTITGGFRRGKPMGHDVDFLITNPGPKEDDELLHKVVDLLKKQGLLLYEDIKESTFVEGQLPSRKIDAMDNFQKCFAILKLYQPGVDNSSVGTSKKSDMAEVKDWKAIRVDLVITPFEQYAYALLGWTGSKEFRRDLRRYAEEERGMILDNHALYDLKKRIFLKAGSEEEIFAHLGLDYVEPWERNA

SEQ ID NO: 2035 - DNA, 1182 bp, synthetic construct
  misc_feature 1..1182: note = Variant of terminal deoxynucleotidyl transferase
  source 1..1182: mol_type = other DNA
atgcaccatcatcatcatcatggcgatagcggccatccgattagcaataccccggagggggaggtgccgagcgttatcgcccgtccggttagtcagtacagctgccagcgcaagaccacgctgaataactacaacaaaaagtttaccgacgcgctggagatcatggccgagaactacaaatttaaagagaacctgatcgcgtgtctggaagccaagcgcgccgcgagtattctgaaatatctgccgttcccggttaccagcatgaaagacatccaaggtctgccgtgcattaccgaccaagttcgtgacgtgatcgaggagatcatcgaagagggcgagagcagccgtgttaaagaagttctcaatgacgagcgctacaaggcctttaagcagttcaccagcgtgttcggtgtgggcgtgaaaaccgcggaaaagtggtaccgtatgggcctccgtacggttgaagaagcaaaggccagtaagagtctgaagctgagcaagatgcagaaggcgggcttcctgtattacgaggatctggcgagccgcgttagtaaagaagaagccgatgccgttacgctcatcgtgaagaacacggtgcgtacctttctgccggatgcgctggtgaccatcaccggcggtttccgccgtggcaaacctatgggccacgacgttgactttctgatcacgaatccgggcccgaaagaggatgacgagctgctccacaaagtggttgatctgctcaagaagcaaggtctgctgctgtacgaagacatcaaagagagcacgttcgtggaggggcaactgccaagtcgcaaaatcgacgccatggacaacttccagaagtgcttcgccattctcaagctgtaccagccgggcgtggataacagcagctataacacgagtaagaagagtgacatggccgaggttaaggattggaaagcgattcgtgtggatctggtgatcacgccattcgagcagtacgcctatgcgctgctcggttggacgggcagcaaagaatttcgtcgcgatctgcgccgctatgcggaggaagagcgcggcatgatcctcgacaaccatgccctctacgacctgaaaaagcgcatctttctgaaagcgggcagcgaagaagagattttcgcgcatctgggtctggattatgtggagccgtgggaacgcaacgcg

SEQ ID NO: 2036 - protein, 394 aa, synthetic construct
  REGION 1..394: note = Variant of terminal deoxynucleotidyl transferase
MHHHHHHGDSGHPISNTPEGEVPSVIARPVSQYSCQRKTTLNNYNKKFTDALEIMAENYKFKENLIACLEAKRAASILKYLPFPVTSMKDIQGLPCITDQVRDVIEEIIEEGESSRVKEVLNDERYKAFKQFTSVFGVGVKTAEKWYRMGLRTVEEAKASKSLKLSKMQKAGFLYYEDLASRVSKEEADAVTLIVKNTVRTFLPDALVTITGGFRRGKPMGHDVDFLITNPGPKEDDELLHKVVDLLKKQGLLLYEDIKESTFVEGQLPSRKIDAMDNFQKCFAILKLYQPGVDNSSYNTSKKSDMAEVKDWKAIRVDLVITPFEQYAYALLGWTGSKEFRRDLRRYAEEERGMILDNHALYDLKKRIFLKAGSEEEIFAHLGLDYVEPWERNA

SEQ ID NO: 2037 - DNA, 1182 bp, synthetic construct
  misc_feature 1..1182: note = Variant of terminal deoxynucleotidyl transferase
  source 1..1182: mol_type = other DNA
atgcaccatcatcatcatcatggcgatagcggccatccgccgagcaataccccggagggggaggtgccgagcgttatcgcccgtccggttagtcagtacagctgccagcgcaagaccacgctgaataactacaacaaaaagtttaccgacgcgctggagatcatggccgagaactacaaatttaaagagaacctgatcgcgtgtctggaagccaagcgcgccgcgagtattctgaaatatctgccgttcgaggttaccagcatgaaagacatccaaggtctgccgtgcattaccgaccaagttcgtgacgtgatcgaggagatcatcgaagagggcgagagcagccgtgttaaagaagttctcaatgacgagcgctacaaggcctttaagcagttcaccagcgtgttcggtgtgggcgtgaaaaccgcggaaaagtggtttcgtatgggcctccgtacggttgaagaagcaaaggccagtaagagtctgaagctgagcaagatgcagaaggcgggctttctgtattacgaggatctggcgagccgcgttagtaaagaagaagccgatgccgttacgctcatcgtgaagaacacggtgcgtacctttctgccggatgcgctggtgaccatcaccggcggtttccgccgtggcaaacctatgggccacgacgttgactttctgatcacgaatccgggcccgaaagaggatgacgagctgctccacaaagtggttgatctgctcaagaagcaaggtctgctgctgtacgaagacatcaaagagagcacgttcgtggaggggcaactgccaagtcgcaaaatcgacgccatggacaacttccagaagtgcttcgccattctcaagctgtaccagccgggcgtggataacagtgcggttgggacgagtaagaaaagtgacatggccgaggttaaggattggaaagcgattcgtgtggatctggtgatcacgccattcgagcagtacgcctatgcgctgctcggttggacgggcagcaaagaatttcgtcgcgatctgcgccgctatgcggaggaagagcgcggcatgatcctcgacaaccatgccctctacgacctgaaaaagcgcatctttctgaaagcgggcagcgaagaagagattttcgcgcatctgggtctggattatgtggagccgtgggaacgcaacgcg

SEQ ID NO: 2038 - protein, 394 aa, synthetic construct
  REGION 1..394: note = Variant of terminal deoxynucleotidyl transferase
MHHHHHHGDSGHPPSNTPEGEVPSVIARPVSQYSCQRKTTLNNYNKKFTDALEIMAENYKFKENLIACLEAKRAASILKYLPFEVTSMKDIQGLPCITDQVRDVIEEIIEEGESSRVKEVLNDERYKAFKQFTSVFGVGVKTAEKWFRMGLRTVEEAKASKSLKLSKMQKAGFLYYEDLASRVSKEEADAVTLIVKNTVRTFLPDALVTITGGFRRGKPMGHDVDFLITNPGPKEDDELLHKVVDLLKKQGLLLYEDIKESTFVEGQLPSRKIDAMDNFQKCFAILKLYQPGVDNSAVGTSKKSDMAEVKDWKAIRVDLVITPFEQYAYALLGWTGSKEFRRDLRRYAEEERGMILDNHALYDLKKRIFLKAGSEEEIFAHLGLDYVEPWERNA

SEQ ID NO: 2039 - DNA, 1182 bp, synthetic construct
  misc_feature 1..1182: note = Variant of terminal deoxynucleotidyl transferase
  source 1..1182: mol_type = other DNA
atgcaccatcatcatcatcatggcgatagcggccatccgattagcaataccccggagggggaggtgccgagcgttatcgcccgtccggttagtcagtacagctgccagcgcaagaccacgctgaataactacaacaaaaagtttaccgacgcgctggagatcatggccgagaactacaaatttaaagagaacctgatcgcgtgtctggaagccaagcgcgccgcgagtattctgaaatatctgccgttcccggttaccagcatgaaagacatccaaggtctgccgtgcattaccgaccaagttcgtgacgtgatcgaggagatcatcgaagagggcgagagcagccgtgttaaagaagttctcaatgacgagcgctacaaggcctttaagcagttcaccagcgtgttcggtgtgggcgtgaaaaccgcggaaaagtggtaccgtatgggcctccgtacggttgaagaagcacgcgccagtaaggcgctgaagctgagcaagatgcagaaggcgggcttcctgtattacgaggatctggcgagccgcgttagtaaagaagaagccgatgccgttacgctcatcgtgaagaacacggtgcgtacctttctgccggatgcgctggtgaccatcaccggcggtttccgccgtggcaaacctatgggccacgacgttgactttctgatcacgaatccgggcccgaaagaggatgacgagctgctccacaaagtggttgatctgctcaagaagcaaggtctgctgctgtacgaagacatcaaagagagcacgttcgtggaggggcaactgccaagtcgcaaaatcgacgccatggacaacttccagaagtgcttcgccattctcaagctgtaccagccgggcgtggataacagcagctataacacgagtaagaagagtgacatggccgaggttaaggattggaaagcgattcgtgtggatctggtgatcacgccattcgagcagtacgcctatgcgctgctcggttggacgggcagcaaagaatttcgtcgcgatctgcgccgctatgcggaggaagagcgcggcatgatcctcgacaaccatgccctctacgacctgaaaaagcgcatctttctgaaagcgggcagcgaagaagagattttcgcgcatctgggtctggattatgtggagccgtgggaacgcaacgcg

SEQ ID NO: 2040 - protein, 394 aa, synthetic construct
  REGION 1..394: note = Variant of terminal deoxynucleotidyl transferase
MHHHHHHGDSGHPISNTPEGEVPSVIARPVSQYSCQRKTTLNNYNKKFTDALEIMAENYKFKENLIACLEAKRAASILKYLPFPVTSMKDIQGLPCITDQVRDVIEEIIEEGESSRVKEVLNDERYKAFKQFTSVFGVGVKTAEKWYRMGLRTVEEARASKALKLSKMQKAGFLYYEDLASRVSKEEADAVTLIVKNTVRTFLPDALVTITGGFRRGKPMGHDVDFLITNPGPKEDDELLHKVVDLLKKQGLLLYEDIKESTFVEGQLPSRKIDAMDNFQKCFAILKLYQPGVDNSSYNTSKKSDMAEVKDWKAIRVDLVITPFEQYAYALLGWTGSKEFRRDLRRYAEEERGMILDNHALYDLKKRIFLKAGSEEEIFAHLGLDYVEPWERNA

SEQ ID NO: 2041 - DNA, 1182 bp, synthetic construct
  misc_feature 1..1182: note = Variant of terminal deoxynucleotidyl transferase
  source 1..1182: mol_type = other DNA
atgcaccatcatcatcatcatggcgatagcggccatccgccgagcaataccccggagggggaggtgccgagcgttatcgcccgtccggttagtcagtacagctgccagcgcaagaccacgctgaataactacaacaaaaagtttaccgacgcgctggagatcatggccgaggattacaagtttaaagagaacctgatcgcgtgtctggaagccaagcgcgccgcgagtattctgaaatatctgccgttcgaagttaccagcatgaaagacatccaaggtctgccgtgcattaccgaccaagttcgtgacgtgatcgaggagatcatcgaagagggcgagagcagccgtgttaaagaagttctcaatgacgagcgctacaaggcctttaagcagttcaccagcgtgttcggtgtgggcgtgaaaaccgcggaaaagtggtttcgtatgggcctccgtacggttgaagaagcaaaggccagtaagagtctgaagctgagcaagatgcagaaggcgggcttcctgtattacgaggatctggcgagccgcgttagtaaagaagaagccgatgccgttacgctcatcgtgaagaacacggtgcgtacctttctgccggatgcgctggtgaccatcgccggcggtttccgccgtggcaaacctgtaggccacgacgtcgactttctgatcacgaatccgggcccgaaagaggatgacgagctgctccacaaagtggttgatctgctcaagaagcaaggtctgctgctgtacgaagacatcaaagagagcacgttcgtggaggggcaactgccaagtcgcaaaatcgacgccatggacaacttccagaagtgcttcgccattctcaagctgtaccagccgggcgtggataacagcagctataacacgagtaagaagagtgacatggccgaggttaaggattggaaagcgattcgtgtggatctggtgatcacgccattcgagcagtacgcctatgcgctgctcggttggacgggcagcaaagaatttcgtcgcgatctgcgccgctatgcggaggaagagcgcggcatgatcctcgacaaccatgccctctacgacctgaaaaagcgcatctttctgaaagcgggcagcgaagaagagattttcgcgcatctgggtctggattatgtggagccgtgggaacgcaacgcg

SEQ ID NO: 2042 - protein, 394 aa, synthetic construct
  REGION 1..394: note = Variant of terminal deoxynucleotidyl transferase
MHHHHHHGDSGHPPSNTPEGEVPSVIARPVSQYSCQRKTTLNNYNKKFTDALEIMAEDYKFKENLIACLEAKRAASILKYLPFEVTSMKDIQGLPCITDQVRDVIEEIIEEGESSRVKEVLNDERYKAFKQFTSVFGVGVKTAEKWFRMGLRTVEEAKASKSLKLSKMQKAGFLYYEDLASRVSKEEADAVTLIVKNTVRTFLPDALVTIAGGFRRGKPVGHDVDFLITNPGPKEDDELLHKVVDLLKKQGLLLYEDIKESTFVEGQLPSRKIDAMDNFQKCFAILKLYQPGVDNSSYNTSKKSDMAEVKDWKAIRVDLVITPFEQYAYALLGWTGSKEFRRDLRRYAEEERGMILDNHALYDLKKRIFLKAGSEEEIFAHLGLDYVEPWERNA

SEQ ID NO: 2043 - DNA, 1182 bp, synthetic construct
  misc_feature 1..1182: note = Variant of terminal deoxynucleotidyl transferase
  source 1..1182: mol_type = other DNA
atgcaccatcatcatcatcatggcgatagcggccatccgccgagcaataccccggagggggaggtgccgagcgttatcgcccgtccggttagtcagtacagctgccagcgcaagaccacgctgaataactacaacaaaaagtttaccgacgcgctggagatcatggccgagaactacaaatttaaagagaacctgatcgcgtgtctggaagccaagcgcgccgcgagtattctgaaatatctgccgttcccggttaccagcatgaaagacatccaaggtctgccgtgcattaccgaccaagttcgtgacgtgatcgaggagatcatcgaagagggcgagagcagccgtgttaaagaagttctcaatgacgagcgctacaaggcctttaagcagttcaccagcgtgttcggtgtgggcgtgaaaaccgcggaaaagtggtttcgtatgggcctccgtacggttgaagaagcaaaggccagtaagagtctgaagctgagcaagatgcagaaggcgggctttctgtattacgaggatctggcgagccgcgttagtaaagaagaagccgatgccgttacgctcatcgtgaagaacacggtgcgtacctttctgccggatgcgctggtgaccatcaccggcggtttccgccgtggcaaacctatgggccacgacgttgactttctgatcacgaatccgggcccgaaagaggatgacgagctgctccacaaagtggttgatctgctcaagaagcaaggtctgctgctgtacgaagacatcaaagagagcacgttcgtggaggggcaactgccaagtcgcaaaatcgacgccatggacaacttccagaagtgcttcgccattctcaagctgtaccagccgggcgtggataacagcagctataacacgagtaagaagagtgacatggccgaggttaaggattggaaagcgattcgtgtggatctggtgatcacgccattcgagcagtacgcctatgcgctgctcggttggacgggcagcaaagaatttcgtcgcgatctgcgccgctatgcggaggaagagcgcggcatgatcctcgacaaccatgccctctacgacctgaaaaagcgcatctttctgaaagcgggcagcgaagaagagattttcgcgcatctgggtctggattatgtggagccgtgggaacgcaacgcg

SEQ ID NO: 2044 - protein, 394 aa, synthetic construct
  REGION 1..394: note = Variant of terminal deoxynucleotidyl transferase
MHHHHHHGDSGHPPSNTPEGEVPSVIARPVSQYSCQRKTTLNNYNKKFTDALEIMAENYKFKENLIACLEAKRAASILKYLPFPVTSMKDIQGLPCITDQVRDVIEEIIEEGESSRVKEVLNDERYKAFKQFTSVFGVGVKTAEKWFRMGLRTVEEAKASKSLKLSKMQKAGFLYYEDLASRVSKEEADAVTLIVKNTVRTFLPDALVTITGGFRRGKPMGHDVDFLITNPGPKEDDELLHKVVDLLKKQGLLLYEDIKESTFVEGQLPSRKIDAMDNFQKCFAILKLYQPGVDNSSYNTSKKSDMAEVKDWKAIRVDLVITPFEQYAYALLGWTGSKEFRRDLRRYAEEERGMILDNHALYDLKKRIFLKAGSEEEIFAHLGLDYVEPWERNA

SEQ ID NO: 2045 - DNA, 1182 bp, synthetic construct
  misc_feature 1..1182: note = Variant of terminal deoxynucleotidyl transferase
  source 1..1182: mol_type = other DNA
atgcaccatcatcatcatcatggcgatagcggccatccgattagcaataccccggagggggaggtgccgagcgttatcgcccgtccggttagtcagtacagctgccagcgcaagaccacgctgaataactacaacaaaaagtttaccgacgcgctggagatcatggccgagaactacaaatttaaagagaacctgatcgcgtgtctggaagccaagcgcgccgcgagtattctgaaatatctgccgttcccggttaccagcatgaaagacatccaaggtctgccgtgcattaccgaccaagttcgtgacgtgatcgaggagatcatcgaagagggcgagagcagccgtgttaaagaagttctcaatgacgagcgctacaaggcctttaagcagttcaccagcgtgttcggtgtgggcgtgaaaaccgcggaaaagtggtttcgtatgggcctccgtacggttgaagaagcaaaggccagtaagagtctgaagctgagcaagatgcagaaggcgggcttcctgtattacgaggatctggcgagccgcgttagtaaagaagaagccgatgccgttacgctcatcgtgaagaacacggtgcgtacctttctgccggatgcgctggtgaccatcaccggcggtttccgccgtggcaaacctatgggccacgacgttgactttctgatcacgaatccgggcccgaaagaggatgacgagctgctccacaaagtggttgatctgctcaagaagcaaggtctgctgctgtacgaagacatcaaagagagcacgttcgtggaggggcaactgccaagtcgcaaaatcgacgccatggacaacttccagaagtgcttcgccattctcaagctgtaccagccgggcgtggataacaattcgtacaatacgagtaagggcagtgacatggccgaggttaaggattggaaagcgattcgtgtggatctggtgatcacgccattcgagcagtacgcctatgcgctgctcggttggacgggcagcaaagaatttcgtcgcgatctgcgccgctatgcggaggaagagcgcggcatgatcctcgacaaccatgccctctacgacctgaaaaagcgcatctttctgaaagcgggcagcgaagaagagattttcgcgcatctgggtctggattatgtggagccgtgggaacgcaacgcg

SEQ ID NO: 2046 - protein, 394 aa, synthetic construct
  REGION 1..394: note = Variant of terminal deoxynucleotidyl transferase
MHHHHHHGDSGHPISNTPEGEVPSVIARPVSQYSCQRKTTLNNYNKKFTDALEIMAENYKFKENLIACLEAKRAASILKYLPFPVTSMKDIQGLPCITDQVRDVIEEIIEEGESSRVKEVLNDERYKAFKQFTSVFGVGVKTAEKWFRMGLRTVEEAKASKSLKLSKMQKAGFLYYEDLASRVSKEEADAVTLIVKNTVRTFLPDALVTITGGFRRGKPMGHDVDFLITNPGPKEDDELLHKVVDLLKKQGLLLYEDIKESTFVEGQLPSRKIDAMDNFQKCFAILKLYQPGVDNNSYNTSKGSDMAEVKDWKAIRVDLVITPFEQYAYALLGWTGSKEFRRDLRRYAEEERGMILDNHALYDLKKRIFLKAGSEEEIFAHLGLDYVEPWERNA

SEQ ID NO: 2047 - DNA, 1182 bp, synthetic construct
  misc_feature 1..1182: note = Variant of terminal deoxynucleotidyl transferase
  source 1..1182: mol_type = other DNA
atgcaccatcatcatcatcatggcgatagcggccatccgccgagcaataccccggagggggaggtgccgagcgttatcgcccgtccggttagtcagtacagctgccagcgcaagaccacgctgaataactacaacaaaaagtttaccgacgcgctggagatcatggccgagaactacaaatttaaagagaacctgatcgcgtgtctggaagccaagcgcgccgcgagtattctgaaatatctgccgttcccggttaccagcatgaaagacatccaaggtctgccgtgcattaccgaccaagttcgtgacgtgatcgaggagatcatcgaagagggcgagagcagccgtgttaaagaagttctcaatgacgagcgctacaaggcctttaagcagttcaccagcgtgttcggtgtgggcgtgaaaaccgcggaaaagtggtaccgtatgggcctccgtacggttgaagaagcacgcgccagtaaggcgctgaagctgagcaagatgcagaaggcgggctttctgtattacgaggatctggcgagccgcgttagtaaagaagaagccgatgttgttacgctgatcgtgaagaatacggtgcgtacctttctgccggatgcgctggtgaccatcaccggcggtttccgccgtggcaaacctatgggccacgacgttgactttctgatcacgaatccgggcccgaaagaggatgacgagctgctccacaaagtggttgatctgctcaagaagcaaggtctgctgctgtacgaagacatcaaagagagcacgttcgtggaggggcaactgccaagtcgcaaaatcgacgccatggacaacttccagaagtgcttcgccattctcaagctgtaccagccgggcgtggataacaatgcgtacgggacgagtaagggcagtgacatggccgaggttaaggattggaaagcgattcgtgtggatctggtgatcacgccattcgagcagtacgcctatgcgctgctcggttggacgggcagcaaagaatttcgtcgcgatctgcgccgctatgcggaggaagagcgcggcatgatcctcgacaaccatgccctctacgacctgaaaaagcgcatctttctgaaagcgggcagcgaagaagagattttcgcgcatctgggtctggattatgtggagccgtgggaacgcaacgcg

SEQ ID NO: 2048 - protein, 394 aa, synthetic construct
  REGION 1..394: note = Variant of terminal deoxynucleotidyl transferase
MHHHHHHGDSGHPPSNTPEGEVPSVIARPVSQYSCQRKTTLNNYNKKFTDALEIMAENYKFKENLIACLEAKRAASILKYLPFPVTSMKDIQGLPCITDQVRDVIEEIIEEGESSRVKEVLNDERYKAFKQFTSVFGVGVKTAEKWYRMGLRTVEEARASKALKLSKMQKAGFLYYEDLASRVSKEEADVVTLIVKNTVRTFLPDALVTITGGFRRGKPMGHDVDFLITNPGPKEDDELLHKVVDLLKKQGLLLYEDIKESTFVEGQLPSRKIDAMDNFQKCFAILKLYQPGVDNNAYGTSKGSDMAEVKDWKAIRVDLVITPFEQYAYALLGWTGSKEFRRDLRRYAEEERGMILDNHALYDLKKRIFLKAGSEEEIFAHLGLDYVEPWERNA

SEQ ID NO: 2049 - DNA, 1182 bp, synthetic construct
  misc_feature 1..1182: note = Variant of terminal deoxynucleotidyl transferase
  source 1..1182: mol_type = other DNA
atgcaccatcatcatcatcatggcgatagcggccatccgccgagcaataccccggagggggaggtgccgagcgttatcgccgggccggttagtcagtacagctgccagcgcaagaccacgctgaataactacaacaaaaagtttaccgacgcgctggagatcatggccgagaactacaaatttaaagagaacctgatcgcgtgtctggaagccaagcgcgccgcgagtattctgaaatatctgccgttcccggttaccagcatgaaagacatccaaggtctgccgtgcattaccgaccaagttcgtgacgtgatcgaggagatcatcgaagagggcgagagcagccgtgttaaagaagttctcaatgacgagcgctacaaggcctttaagcagttcaccagcgtgttcggtgtgggcgtgaaaaccgcggaaaagtggttccgtatgggcctccgtacggttgaagaagcaaaggccagtaagagtctgaagctgagcaagatgcagaaggcgggcttcctgtattacgaggatctggcgagccgcgttagtaaagaagaagccgatgccgttacgctcatcgtgaagaacacggtgcgtacctttctgccggatgcgctggtgaccatcaccggcggtttccgccgtggcaaacctatgggccacgacgttgactttctgatcacgaatccgggcccgaaagaggatgacgagctgctccacaaagtggttgatctgctcaagaagcaaggtctgctgctgtacgaagacatcaaagagagcacgttcgtggaggggcaactgccaagtcgcaaaatcgacgccatggacaacttccagaagtgcttcgccattctcaagctgtaccagccgggcgtggataacaatgcggttaatacgagtaagggcagtgacatggccgaggttaaggattggaaagcgattcgtgtggatctggtgatcacgccattcgagcagtacgcctatgcgctgctcggttggacgggcagcaaagaatttcgtcgcgatctgcgccgctatgcggaggaagagcgcggcatgatcctcgacaaccatgccctctacgacctgaaaaagcgcatctttctgaaagcgggcagcgaagaagagattttcgcgcatctgggtctggattatgtggagccgtgggaacgcaacgcg

SEQ ID NO: 2050 - protein, 394 aa, synthetic construct
  REGION 1..394: note = Variant of terminal deoxynucleotidyl transferase
MHHHHHHGDSGHPPSNTPEGEVPSVIAGPVSQYSCQRKTTLNNYNKKFTDALEIMAENYKFKENLIACLEAKRAASILKYLPFPVTSMKDIQGLPCITDQVRDVIEEIIEEGESSRVKEVLNDERYKAFKQFTSVFGVGVKTAEKWFRMGLRTVEEAKASKSLKLSKMQKAGFLYYEDLASRVSKEEADAVTLIVKNTVRTFLPDALVTITGGFRRGKPMGHDVDFLITNPGPKEDDELLHKVVDLLKKQGLLLYEDIKESTFVEGQLPSRKIDAMDNFQKCFAILKLYQPGVDNNAVNTSKGSDMAEVKDWKAIRVDLVITPFEQYAYALLGWTGSKEFRRDLRRYAEEERGMILDNHALYDLKKRIFLKAGSEEEIFAHLGLDYVEPWERNA

SEQ ID NO: 2051 - DNA, 1182 bp, synthetic construct
  misc_feature 1..1182: note = Variant of terminal deoxynucleotidyl transferase
  source 1..1182: mol_type = other DNA
atgcaccatcatcatcatcatggcgatagcggccatccgccgagcaataccccggagggggaggtgccgagcgttatcgcccgtccggttagtcagtacagctgccagcgcaagaccacgctgaataactacaacaaaaagtttaccgacgcgctggagatcatggccgagaactacaaatttaaagagaacctgccggcgtgtctggaagccaagcgcgccgcgagtattctgaaatatctgccgttcccggttaccagcatgaaagacatccaaggtctgccgtgcattaccgaccaagttcgtgacgtgatcgaggagatcatcgaagagggcgagagcagccgtgttaaagaagttctcaatgacgagcgctacaaggcctttaagcagttcaccagcgtgttcggtgtgggcgtgaaaaccgcggaaaagtggtttcgtatgggcctccgtacggttgaagaagcaaaggccagtaagagtctgaagctgagcaagatgcagaaggcgggcttcctgtattacgaggatctggcgagccgcgttagtaaagaagaagccgatgccgttacgctcatcgtgaagaacacggtgcgtacctttctgccggatgcgctggtgaccatcactggcggtttccgccgtggcaaacctgtaggccacgacgtcgactttctgatcacgaatccgggcccgaaagaggatgacgagctgctccacaaagtggttgatctgctcaagaagcaaggtctgctgctgtacgaagacatcaaagagagcacgttcgtggaggggcaactgccaagtcgcaaaatcgacgccatggacaacttccagaagtgcttcgccattctcaagctgtaccagccgggcgtggataacagcagctataacacgagtaagaagagtgacatggccgaggttaaggattggaaagcgattcgtgtggatctggtgatcacgccattcgagcagtacgcctatgcgctgctcggttggacgggcagcaaagaatttcgtcgcgatctgcgccgctatgcggaggaagagcgcggcatgatcctcgacaaccatgccctctacgacctgaaaaagcgcatctttctgaaagcgggcagcgaagaagagattttcgcgcatctgggtctggattatgtggagccgtgggaacgcaacgcg

SEQ ID NO: 2052 - protein, 394 aa, synthetic construct
  REGION 1..394: note = Variant of terminal deoxynucleotidyl transferase
MHHHHHHGDSGHPPSNTPEGEVPSVIARPVSQYSCQRKTTLNNYNKKFTDALEIMAENYKFKENLPACLEAKRAASILKYLPFPVTSMKDIQGLPCITDQVRDVIEEIIEEGESSRVKEVLNDERYKAFKQFTSVFGVGVKTAEKWFRMGLRTVEEAKASKSLKLSKMQKAGFLYYEDLASRVSKEEADAVTLIVKNTVRTFLPDALVTITGGFRRGKPVGHDVDFLITNPGPKEDDELLHKVVDLLKKQGLLLYEDIKESTFVEGQLPSRKIDAMDNFQKCFAILKLYQPGVDNSSYNTSKKSDMAEVKDWKAIRVDLVITPFEQYAYALLGWTGSKEFRRDLRRYAEEERGMILDNHALYDLKKRIFLKAGSEEEIFAHLGLDYVEPWERNA

SEQ ID NO: 2053 - DNA, 1182 bp, synthetic construct
  misc_feature 1..1182: note = Variant of terminal deoxynucleotidyl transferase
  source 1..1182: mol_type = other DNA
atgcaccatcatcatcatcatggcgatagcggccatccgccgagcaataccccggagggggaggtgccgagcgttatcgcccgtccggttagtcagtacagctgccagcgcaagaccacgctgaataactacaacaaaaagtttaccgacgcgctggagatcatggccgagaactacaaatttaaagagaacctgatcgcgtgtctggaagccaagcgcgccgcgagtattctgaaatatctgccgttcccggttaccagcatgaaagacatccaaggtctgccgtgcattaccgaccaagttcgtgacgtgatcgaggagatcatcgaagagggcgagagcagccgtgttaaagaagttctcaatgacgagcgctacaaggcctttaagcagttcaccagcgtgttcggtgtgggcgtgaaaaccgcggaaaagtggtttcgtatgggcctccgtacggttgaagaagcaaaggccagtaagagtctgaagctgagcaagatgcagaaggcgggcttcctgtattacgaggatctggcgagccgcgttagtaaagaagaagccgatgccgttacgctcatcgtgaagaacacggtgcgtacctttctgccggatgcgctggtgaccatcaccggcggtttccgccgtggcaaacctgtaggccacgacgtcgactttctgatcacgaatccgggcccgaaagaggatgacgagctgctccacaaagtggttgatctgctcaagaagcaaggtctgctgctgtacgaagacatcaaagagagcacgttcgtggaggggcaactgccaagtcgcaaaatcgacgccatggacaacttccagaagtgcttcgccattctcaagctgtaccagccgggcgtggataacagcagctataacacgagtaagaagagtgacatggccgaggttaaggattggaaagcggttcgtgtggatctggtgatcacgccattcgagcagtacgcctatgcgctgctcggttggacgggcagcaaagaatttcgtcgcgatctgcgccgctatgcggaggaagagcgcggcatgatcctcgacaaccatgccctctacgacctgaaaaagcgcatctttctgaaagcgggcagcgaagaagagattttcgcgcatctgggtctggattatgtggagccgtgggaacgcaacgcg

SEQ ID NO: 2054 - protein, 394 aa, synthetic construct
  REGION 1..394: note = Variant of terminal deoxynucleotidyl transferase
MHHHHHHGDSGHPPSNTPEGEVPSVIARPVSQYSCQRKTTLNNYNKKFTDALEIMAENYKFKENLIACLEAKRAASILKYLPFPVTSMKDIQGLPCITDQVRDVIEEIIEEGESSRVKEVLNDERYKAFKQFTSVFGVGVKTAEKWFRMGLRTVEEAKASKSLKLSKMQKAGFLYYEDLASRVSKEEADAVTLIVKNTVRTFLPDALVTITGGFRRGKPVGHDVDFLITNPGPKEDDELLHKVVDLLKKQGLLLYEDIKESTFVEGQLPSRKIDAMDNFQKCFAILKLYQPGVDNSSYNTSKKSDMAEVKDWKAVRVDLVITPFEQYAYALLGWTGSKEFRRDLRRYAEEERGMILDNHALYDLKKRIFLKAGSEEEIFAHLGLDYVEPWERNA

SEQ ID NO: 2055 - DNA, 1182 bp, synthetic construct
  misc_feature 1..1182: note = Variant of terminal deoxynucleotidyl transferase
  source 1..1182: mol_type = other DNA
atgcaccatcatcatcatcatggcgatagcggccatccgccgagcaataccccggagggggaggtgccgagcgttatcgcccgtccggttagtcagtacagctgccagcgcaagaccacgctgaataactacaacaaaaagtttaccgacgcgctggagatcatggccgagaattacaagtttaaagagaacctgatcgcgtgtctggaagccaagcgcgccgcgagtattctgaaatatctgccgttcgaagttaccagcatgaaagacatccaaggtctgccgtgcattaccgaccaagttcgtgacgtgatcgaggagatcatcgaagagggcgagagcagccgtgttaaagaagttctcaatgacgagcgctacaaggcctttaagcagttcaccagcgtgttcggtgtgggcgtgaaaaccgcggaaaagtggtttcgtatgggcctccgtacggttgaagaagcaaaggccagtaagagtctgaagctgagcaagatgcagaaggcgggcttcctgtattacgaggatctggcgagccgcgttagtaaagaagaagccgatgccgttacgctcatcgtgaagaacacggtgcgtacctttctgccggatgcgctggtgaccatcactggcggtttccgccgtggcaaacctgtaggccacgacatcgactttctgatcacgaatccgggcccgaaagaggatgacgagctgctccacaaagtggttgatctgctcaagaagcaaggtctgctgctgtacgaagacatcaaagagagcacgttcgtggaggggcaactgccaagtcgcaaaatcgacgccatggacaacttccagaagtgcttcgccattctcaagctgtaccagccgggcgtggataacagcagctataacacgagtaagaagagtgacatggccgaggttaaggattggaaagcggttcgtgtggatctggtgatcacgccattcgagcagtacgcctatgcgctgctcggttggacgggcagcaaagaatttcgtcgcgatctgcgccgctatgcggaggaagagcgcggcatgatcctcgacaaccatgccctctacgacctgaaaaagcgcatctttctgaaagcgggcagcgaagaagagattttcgcgcatctgggtctggattatgtggagccgtgggaacgcaacgcg

SEQ ID NO: 2056 - protein, 394 aa, synthetic construct
  REGION 1..394: note = Variant of terminal deoxynucleotidyl transferase
MHHHHHHGDSGHPPSNTPEGEVPSVIARPVSQYSCQRKTTLNNYNKKFTDALEIMAENYKFKENLIACLEAKRAASILKYLPFEVTSMKDIQGLPCITDQVRDVIEEIIEEGESSRVKEVLNDERYKAFKQFTSVFGVGVKTAEKWFRMGLRTVEEAKASKSLKLSKMQKAGFLYYEDLASRVSKEEADAVTLIVKNTVRTFLPDALVTITGGFRRGKPVGHDIDFLITNPGPKEDDELLHKVVDLLKKQGLLLYEDIKESTFVEGQLPSRKIDAMDNFQKCFAILKLYQPGVDNSSYNTSKKSDMAEVKDWKAVRVDLVITPFEQYAYALLGWTGSKEFRRDLRRYAEEERGMILDNHALYDLKKRIFLKAGSEEEIFAHLGLDYVEPWERNA

SEQ ID NO: 2057 - DNA, 1182 bp, synthetic construct
  misc_feature 1..1182: note = Variant of terminal deoxynucleotidyl transferase
  source 1..1182: mol_type = other DNA
atgcaccatcatcatcatcatggcgatagcggccatccgattagcaataccccggagggggaggtgccgagcgttatcgcccgtccggttagtcagtacagctgccagcgcaagaccacgctgaataactacaacaaaaagtttaccgacgcgctggagatcatggccgagaactacaaatttaaagagaacctgatcgcgtgtctggaagccaagcgcgccgcgagtattctgaaatatctgccgttcccggttaccagcatgaaagacatccaaggtctgccgtgcattaccgaccaagttcgtgacgtgatcgaggagatcatcgaagagggcgagagcagccgtgttaaagaagttctcaatgacgagcgctacaaggcctttaagcagttcaccagcgtgttcggtgtgggcgtgaaaaccgcggaaaagtggtttcgtatgggcctccgtacggttgaagaagcacgcgccagtaaggcgctgaagctgagcaagatgcagaaggcgggctttctgtattacgaggatctggcgagccgcgttagtaaagaagaagccgatgctgttacgctgatcgtgaaggagacggtgcgtacctttctgccggatgcgctggtgaccatcaccggcggtttccgccgtggcaaacctatgggccacgacgttgactttctgatcacgaatccgggcccgaaagaggatgacgagctgctccacaaagtggttgatctgctcaagaagcaaggtctgctgctgtacgaagacatcaaagagagcacgttcgtggaggggcaactgccaagtcgcaaaatcgacgccatggacaacttccagaagtgcttcgccattctcaagctgtaccagccgggcgtggataacaattcggttgggacgagtaagaaaagtgacatggccgaggttaaggattggaaagcgattcgtgtggatctggtgatcacgccattcgagcagtacgcctatgcgctgctcggttggacgggcagcaaagaatttcgtcgcgatctgcgccgctatgcggaggaagagcgcggcatgatcctcgacaaccatgccctctacgacctgaaaaagcgcatctttctgaaagcgggcagcgaagaagagattttcgcgcatctgggtctggattatgtggagccgtgggaacgcaacgcg

SEQ ID NO: 2058 - protein, 394 aa, synthetic construct
  REGION 1..394: note = Variant of terminal deoxynucleotidyl transferase
MHHHHHHGDSGHPISNTPEGEVPSVIARPVSQYSCQRKTTLNNYNKKFTDALEIMAENYKFKENLIACLEAKRAASILKYLPFPVTSMKDIQGLPCITDQVRDVIEEIIEEGESSRVKEVLNDERYKAFKQFTSVFGVGVKTAEKWFRMGLRTVEEARASKALKLSKMQKAGFLYYEDLASRVSKEEADAVTLIVKETVRTFLPDALVTITGGFRRGKPMGHDVDFLITNPGPKEDDELLHKVVDLLKKQGLLLYEDIKESTFVEGQLPSRKIDAMDNFQKCFAILKLYQPGVDNNSVGTSKKSDMAEVKDWKAIRVDLVITPFEQYAYALLGWTGSKEFRRDLRRYAEEERGMILDNHALYDLKKRIFLKAGSEEEIFAHLGLDYVEPWERNA

SEQ ID NO: 2059 - DNA, 1179 bp, synthetic construct
  misc_feature 1..1179: note = Variant of terminal deoxynucleotidyl transferase
  source 1..1179: mol_type = other DNA
atgcaccatcatcatcatcatggcgatagcggccatccgattagcaataccccggagggggaggtgccgagcgttatcgcccgtccggttagtcagtacagctgccagcgcaagaccacgctgaataactacaacaaaaagtttaccgacgcgctggagatcatggccgagaactacaaatttaaagagaacctgatcgcgtgtctggaagccaagcgcgccgcgagtattctgaaatatctgccgttcccggttaccagcatgaaagacatccaaggtctgccgtgcattaccgaccaagttcgtgacgtgatcgaggagatcatcgaagagggcgagagcagccgtgttaaagaagttctcaatgacgagcgctacaaggcctttaagcagttcaccagcgtgttcggtgtgggcgtgaaaaccgcggaaaagtggttccgtatgggcctccgtacggttgaagaagcaaaggccagtaagtcgctgaagctgagcaagatgcagaaggcgggctttctgtattacgaggatctggcgagccgcgttagtaaagaagaagccgatgctgttacggtgatcgtgaaggagacggtgcgtacctttctgccggatgcgctggtgaccatcaccggcggtttccgccgtggcaaacctatgggccacgacgttgactttctgatcacgaatccgggcccgaaagaggatgacgagctgctccacaaagtggttgatctgctcaagaagcaaggtctgctgctgtacgaagacatcaaagagagcacgttcgtggaggggcaactgccaagtcgcaaaatcgacgccatggacaacttccagaagtgcttcgccattctcaagctgtaccagccgggcgtggataacagtcgttgggcgagtaagaaaagtgacatggccgaggttaaggattggaaagcgattcgtgtggatctggtgatcacgccattcgagcagtacgcctatgcgctgctcggttggacgggcagcaaagaatttcgtcgcgatctgcgccgctatgcggaggaagagcgcggcatgatcctcgacaaccatgccctctacgacctgaaaaagcgcatctttctgaaagcgggcagcgaagaagagattttcgcgcatctgggtctggattatgtggagccgtgggaacgcaacgcg

SEQ ID NO: 2060 - protein, 393 aa, synthetic construct
  REGION 1..393: note = Variant of terminal deoxynucleotidyl transferase
MHHHHHHGDSGHPISNTPEGEVPSVIARPVSQYSCQRKTTLNNYNKKFTDALEIMAENYKFKENLIACLEAKRAASILKYLPFPVTSMKDIQGLPCITDQVRDVIEEIIEEGESSRVKEVLNDERYKAFKQFTSVFGVGVKTAEKWFRMGLRTVEEAKASKSLKLSKMQKAGFLYYEDLASRVSKEEADAVTVIVKETVRTFLPDALVTITGGFRRGKPMGHDVDFLITNPGPKEDDELLHKVVDLLKKQGLLLYEDIKESTFVEGQLPSRKIDAMDNFQKCFAILKLYQPGVDNSRWASKKSDMAEVKDWKAIRVDLVITPFEQYAYALLGWTGSKEFRRDLRRYAEEERGMILDNHALYDLKKRIFLKAGSEEEIFAHLGLDYVEPWERNA

SEQ ID NO: 2061 - DNA, 1182 bp, synthetic construct
  misc_feature 1..1182: note = Variant of terminal deoxynucleotidyl transferase
  source 1..1182: mol_type = other DNA
atgcaccatcatcatcatcatggcgatagcggccatccgccgagcaataccccggagggggaggtgccgagcgttatcgcccgtccggttagtcagtacagctgccagcgcaagaccacgctgaataactacaacaaaaagtttaccgacgcgctggagatcatggccgagaactacaaatttaaagagaacctgatcgcgtgtctggaagccaagcgcgccgcgagtattctgaaatatctgccgttcgaggttaccagcatgaaagacatccaaggtctgccgtgcattaccgaccaagttcgtgacgtgatcgaggagatcatcgaagagggcgagagcagccgtgttaaagaagttctcaatgacgagcgctacaaggcctttaagcagttcaccagcgtgttcggtgtgggcgtgaaaaccgcggaaaagtggtaccgtatgggcctccgtacggttgaagaagcaaaggccagtaagtcgctgaagctgagcaagatgcagaaggcgggctttctgtattacgaggatctggcgagccgcgttagtaaagaagaagccgatgctgttacgctgatcgtgaaggagacggtgcgtacctttctgccggatgcgctggtgaccatcaccggcggtttccgccgtggcaaacctatgggccacgacattgactttctgatcacgaatccgggcccgaaagaggatgacgagctgctccacaaagtggttgatctgctcaagaagcaaggtctgctgctgtacgaagacatcaaagagagcacgttcgtggaggggcaactgccaagtcgcaaaatcgacgccatggacaacttccagaagtgcttcgccattctcaagctgtaccagccgggcgtggataacaatgcgtacaatacgagtaagaaaagtgacatggccgaggttaaggattggaaagcgattcgtgtggatctggtgatcacgccattcgagcagtacgcctatgcgctgctcggttggacgggcagcaaagaatttcgtcgcgatctgcgccgctatgcggaggaagagcgcggcatgatcctcgacaaccatgccctctacgacctgaaaaagcgcatctttctgaaagcgggcagcgaagaagagattttcgcgcatctgggtctggattatgtggagccgtgggaacgcaacgcg

SEQ ID NO: 2062 - protein, 394 aa, synthetic construct
  REGION 1..394: note = Variant of terminal deoxynucleotidyl transferase
MHHHHHHGDSGHPPSNTPEGEVPSVIARPVSQYSCQRKTTLNNYNKKFTDALEIMAENYKFKENLIACLEAKRAASILKYLPFEVTSMKDIQGLPCITDQVRDVIEEIIEEGESSRVKEVLNDERYKAFKQFTSVFGVGVKTAEKWYRMGLRTVEEAKASKSLKLSKMQKAGFLYYEDLASRVSKEEADAVTLIVKETVRTFLPDALVTITGGFRRGKPMGHDIDFLITNPGPKEDDELLHKVVDLLKKQGLLLYEDIKESTFVEGQLPSRKIDAMDNFQKCFAILKLYQPGVDNNAYNTSKKSDMAEVKDWKAIRVDLVITPFEQYAYALLGWTGSKEFRRDLRRYAEEERGMILDNHALYDLKKRIFLKAGSEEEIFAHLGLDYVEPWERNA

SEQ ID NO: 2063 - DNA, 1182 bp, synthetic construct
  misc_feature 1..1182: note = Variant of terminal deoxynucleotidyl transferase
  source 1..1182: mol_type = other DNA
atgcaccatcatcatcatcatggcgatagcggccatccgccgagcaataccccggagggggaggtgccgagcgttatcgcccgtccggttagtcagtacagctgccagcgcaagaccacgctgaataactacaacaaaaagtttaccgacgcgctggagatcatggccgagaactacaaatttaaagagaacctgatcgcgtgtctggaagcccagcgcgccgcgagtattctgaaatatctgccgttcccggttaccagcatgaaagacatccaaggtctgccgtgcattaccgaccaagttcgtgacgtgatcgaggagatcatcgaagagggcgagagcagccgtgttaaagaagttctcaatgacgagcgctacaaggcctttaagcagttcaccagcgtgttcggtgtgggcgtgaaaaccgcggaaaagtggtttcgtatgggcctccgtacggttgaagaagcaaaggccagtaagagtctgaagctgagcaagatgcagaaggcgggcttcctgtattacgaggatctggcgagccgcgttagtaaagaagaagccgatgccgttacgctcatcgtgaagaacacggtgcgtacctttctgccggatgcgctggtgaccatcaccggcggtttccgccgtggcaaacctatgggccacgacatcgactttctgatcacgaatccgggcccgaaagaggatgacgagctgctccacaaagtggttgatctgctcaagaagcaaggtctgctgctgtacgaagacatcaaagagagcacgttcgtggaggggcaactgccaagtcgcaaaatcgacgccatggacaacttccagaagtgcttcgccattctcaagctgtaccagccgggcgtggataacagcagctataacacgagtaagaagagtgacatggccgaggttaaggattggaaagcgattcgtgtggatctggtgatcacgccattcgagcagtacgcctatgcgctgctcggttggacgggcagcaaagaatttcgtcgcgatctgcgccgctatgcggaggaagagcgcggcatgatcctcgacaaccatgccctctacgacctgaaaaagcgcatctttctgaaagcgggcagcgaagaagagattttcgcgcatctgggtctggattatgtggagccgtgggaacgcaacgcg

SEQ ID NO: 2064 - protein, 394 aa, synthetic construct
  REGION 1..394: note = Variant of terminal deoxynucleotidyl transferase
MHHHHHHGDSGHPPSNTPEGEVPSVIARPVSQYSCQRKTTLNNYNKKFTDALEIMAENYKFKENLIACLEAQRAASILKYLPFPVTSMKDIQGLPCITDQVRDVIEEIIEEGESSRVKEVLNDERYKAFKQFTSVFGVGVKTAEKWFRMGLRTVEEAKASKSLKLSKMQKAGFLYYEDLASRVSKEEADAVTLIVKNTVRTFLPDALVTITGGFRRGKPMGHDIDFLITNPGPKEDDELLHKVVDLLKKQGLLLYEDIKESTFVEGQLPSRKIDAMDNFQKCFAILKLYQPGVDNSSYNTSKKSDMAEVKDWKAIRVDLVITPFEQYAYALLGWTGSKEFRRDLRRYAEEERGMILDNHALYDLKKRIFLKAGSEEEIFAHLGLDYVEPWERNA

SEQ ID NO: 2065 - DNA, 1182 bp, synthetic construct
  misc_feature 1..1182: note = Variant of terminal deoxynucleotidyl transferase
  source 1..1182: mol_type = other DNA
atgcaccatcatcatcatcatggcgatagcggccatccgccgagcaataccccggagggggaggtgccgagcgttatcgcccgtccggttagtcagtacagctgccagcgcaagaccacgctgaataactacaacaaaaagtttaccgacgcgctggagatcatggccgagaactacaaatttaaagagaacctgatcgcgtgtctggaagccaagcgcgccgcgagtattctgaaatatctgccgttcgaggttaccagcatgaaagacatccaaggtctgccgtgcattaccgaccaagttcgtgacgtgatcgaggagatcatcgaagagggcgagagcagccgtgttaaagaagttctcaatgacgagcgctacaaggcctttaagcagttcaccagcgtgttcggtgtgggcgtgaaaaccgcggaaaagtggtaccgtatgggcctccgtacggttgaagaagcaaaggccagtaagtcgctgaagctgagcaagatgcagaaggcgggctttctgtattacgaggatctggcgagccgcgttagtaaagaagaagccgatgccgttacgctcatcgtgaagaacacggtgcgtacctttctgccggatgcgctggtgaccatcaccggcggtttccgccgtggcaaacctatgggccacgacattgactttctgatcacgaatccgggcccgaaagaggatgacgagctgctccacaaagtggttgatctgctcaagaagcaaggtctgctgctgtacgaagacatcaaagagagcacgttcgtggaggggcaactgccaagtcgcaaaatcgacgccatggacaacttccagaagtgcttcgccattctcaagctgtaccagccgggcgtggataacagtgcggttaatacgagtaagggcagtgacatggccgaggttaaggattggaaagcgattcgtgtggatctggtgatcacgccattcgagcagtacgcctatgcgctgctcggttggacgggcagcaaagaatttcgtcgcgatctgcgccgctatgcggaggaagagcgcggcatgatcctcgacaaccatgccctctacgacctgaaaaagcgcatctttctgaaagcgggcagcgaagaagagattttcgcgcatctgggtctggattatgtggagccgtgggaacgcaacgcg

SEQ ID NO: 2066 - protein, 394 aa, synthetic construct
  REGION 1..394: note = Variant of terminal deoxynucleotidyl transferase
MHHHHHHGDSGHPPSNTPEGEVPSVIARPVSQYSCQRKTTLNNYNKKFTDALEIMAENYKFKENLIACLEAKRAASILKYLPFEVTSMKDIQGLPCITDQVRDVIEEIIEEGESSRVKEVLNDERYKAFKQFTSVFGVGVKTAEKWYRMGLRTVEEAKASKSLKLSKMQKAGFLYYEDLASRVSKEEADAVTLIVKNTVRTFLPDALVTITGGFRRGKPMGHDIDFLITNPGPKEDDELLHKVVDLLKKQGLLLYEDIKESTFVEGQLPSRKIDAMDNFQKCFAILKLYQPGVDNSAVNTSKGSDMAEVKDWKAIRVDLVITPFEQYAYALLGWTGSKEFRRDLRRYAEEERGMILDNHALYDLKKRIFLKAGSEEEIFAHLGLDYVEPWERNA

SEQ ID NO: 2067 - DNA, 1182 bp, synthetic construct
  misc_feature 1..1182: note = Variant of terminal deoxynucleotidyl transferase
  source 1..1182: mol_type = other DNA
atgcaccatcatcatcatcatggcgatagcggccatccgccgagcaataccccggagggggaggtgccgagcgttatcgccgagccggttagtcagtacagctgccagcgcaagaccacgctgaataactacaacaaaaagtttaccgacgcgctggagatcatggccgagagctacaaatttaaagagaacctgatcgcgtgtctggaagccaagcgcgccgcgagtattctgaaatatctgccgttcccggttaccagcatgaaagacatccaaggtctgccgtgcattaccgaccaagttcgtgacgtgatcgaggagatcatcgaagagggcgagagcagccgtgttaaagaagttctcaatgacgagcgctacaaggcctttaagcagttcaccagcgtgttcggtgtgggcgtgaaaaccgcggaaaagtggtaccgtatgggcctccgtacggttgaagaagcaaaggccagtaagtcgctgaagctgagcaagatgcagaaggcgggcttcctgtattacgaggatctggcgagccgcgttagtaaagaagaagccgatgccgttacgctcatcgtgaagaacacggtgcgtacctttctgccggatgcgctggtgaccatcaccggcggtttccgccgtggcaaacctatgggccacgacgttgactttctgatcacgaatccgggcccgaaagaggatgacgagctgctccacaaagtggttgatctgctcaagaagcaaggtctgctgctgtacgaagacatcaaagagagcacgttcgtggaggggcaactgccaagtcgcaaaatcgacgccatggacaacttccagaagtgcttcgccattctcaagctgtaccagccgggcgtggataacaatgcggttgggacgagtaagggcagtgacatggccgaggttaaggattggaaagcgattcgtgtggatctggtgatcacgccattcgagcagtacgcctatgcgctgctcggttggacgggcagcaaagaatttcgtcgcgatctgcgccgctatgcggaggaagagcgcggcatgatcctcgacaaccatgccctctacgacctgaaaaagcgcatctttctgaaagcgggcagcgaagaagagattttcgcgcatctgggtctggattatgtggagccgtgggaacgcaacgcg

SEQ ID NO: 2068 - protein, 394 aa, synthetic construct
  REGION 1..394: note = Variant of terminal deoxynucleotidyl transferase
MHHHHHHGDSGHPPSNTPEGEVPSVIAEPVSQYSCQRKTTLNNYNKKFTDALEIMAESYKFKENLIACLEAKRAASILKYLPFPVTSMKDIQGLPCITDQVRDVIEEIIEEGESSRVKEVLNDERYKAFKQFTSVFGVGVKTAEKWYRMGLRTVEEAKASKSLKLSKMQKAGFLYYEDLASRVSKEEADAVTLIVKNTVRTFLPDALVTITGGFRRGKPMGHDVDFLITNPGPKEDDELLHKVVDLLKKQGLLLYEDIKESTFVEGQLPSRKIDAMDNFQKCFAILKLYQPGVDNNAVGTSKGSDMAEVKDWKAIRVDLVITPFEQYAYALLGWTGSKEFRRDLRRYAEEERGMILDNHALYDLKKRIFLKAGSEEEIFAHLGLDYVEPWERNA

SEQ ID NO: 2069 - DNA, 1182 bp, synthetic construct
  misc_feature 1..1182: note = Variant of terminal deoxynucleotidyl transferase
  source 1..1182: mol_type = other DNA
atgcaccatcatcatcatcatggcgatagcggccatccgattagcaataccccggagggggaggtgccgagcgttatcgccgggccggttagtcagtacagctgccagcgcaagaccacgctgaataactacaacaaaaagtttaccgacgcgctggagatcatggccgagagctacaaatttaaagagaacctgatcgcgtgtctggaagccaagcgcgccgcgagtattctgaaatatctgccgttcccggttaccagcatgaaagacatccaaggtctgccgtgcattaccgaccaagttcgtgacgtgatcgaggagatcatcgaagagggcgagagcagccgtgttaaagaagttctcaatgacgagcgctacaaggcctttaagcagttcaccagcgtgttcggtgtgggcgtgaaaaccgcggaaaagtggtttcgtatgggcctccgtacggttgaagaagcaaaggccagtaagagtctgaagctgagcaagatgcagaaggcgggcttcctgtattacgaggatctggcgagccgcgttagtaaagaagaagccgatgccgttacgctcatcgtgaagaacacggtgcgtacctttctgccggatgcgctggtgaccatcaccggcggtttccgccgtggcaaacctatgggccacgacgttgactttctgatcacgaatccgggcccgaaagaggatgacgagctgctccacaaagtggttgatctgctcaagaagcaaggtctgctgctgtacgaagacatcaaagagagcacgttcgtggaggggcaactgccaagtcgcaaaatcgacgccatggacaacttccagaagtgcttcgccattctcaagctgtaccagccgggcgtggataacagcagctataacacgagtaagaagagtgacatggccgaggttaaggattggaaagcgattcgtgtggatctggtgatcacgccattcgagcagtacgcctatgcgctgctcggttggacgggcagcaaagaatttcgtcgcgatctgcgccgctatgcggaggaagagcgcggcatgatcctcgacaaccatgccctctacgacctgaaaaagcgcatctttctgaaagcgggcagcgaagaagagattttcgcgcatctgggtctggattatgtggagccgtgggaacgcaacgcg

SEQ ID NO: 2070 - protein, 394 aa, synthetic construct
  REGION 1..394: note = Variant of terminal deoxynucleotidyl transferase
MHHHHHHGDSGHPISNTPEGEVPSVIAGPVSQYSCQRKTTLNNYNKKFTDALEIMAESYKFKENLIACLEAKRAASILKYLPFPVTSMKDIQGLPCITDQVRDVIEEIIEEGESSRVKEVLNDERYKAFKQFTSVFGVGVKTAEKWFRMGLRTVEEAKASKSLKLSKMQKAGFLYYEDLASRVSKEEADAVTLIVKNTVRTFLPDALVTITGGFRRGKPMGHDVDFLITNPGPKEDDELLHKVVDLLKKQGLLLYEDIKESTFVEGQLPSRKIDAMDNFQKCFAILKLYQPGVDNSSYNTSKKSDMAEVKDWKAIRVDLVITPFEQYAYALLGWTGSKEFRRDLRRYAEEERGMILDNHALYDLKKRIFLKAGSEEEIFAHLGLDYVEPWERNA

SEQ ID NO: 2071 - DNA, 1182 bp, synthetic construct
  misc_feature 1..1182: note = Variant of terminal deoxynucleotidyl transferase
  source 1..1182: mol_type = other DNA
atgcaccatcatcatcatcatggcgatagcggccatccgccgagcaataccccggagggggaggtgccgagcgttatcgccgagccggttagtcagtacagctgccagcgcaagaccacgctgaataactacaacaaaaagtttaccgacgcgctggagatcatggccgagagctacaaatttaaagagaacctgatcgcgtgtctggaagccaagcgcgccgcgagtattctgaaatatctgccgttcccggttaccagcatgaaagacatccaaggtctgccgtgcattaccgaccaagttcgtgacgtgatcgaggagatcatcgaagagggcgagagcagccgtgttaaagaagttctcaatgacgagcgctacaaggcctttaagcagttcaccagcgtgttcggtgtgggcgtgaaaaccgcggaaaagtggttccgtatgggcctccgtacggttgaagaagcaaaggccagtaaggcgctgaagctgagcaagatgcagaaggcgggctttctgtattacgaggatctggcgagccgcgttagtaaagaagaagccgatgccgttacgctcatcgtgaagaacacggtgcgtacctttctgccggatgcgctggtgaccatcaccggcggtttccgccgtggcaaacctatgggccacgacgttgactttctgatcacgaatccgggcccgaaagaggatgacgagctgctccacaaagtggttgatctgctcaagaagcaaggtctgctgctgtacgaagacatcaaagagagcacgttcgtggaggggcaactgccaagtcgcaaaatcgacgccatggacaacttccagaagtgcttcgccattctcaagctgtaccagccgggcgtggataacagttcggttgggacgagtaagaaaagtgacatggccgaggttaaggattggaaagcgattcgtgtggatctggtgatcacgccattcgagcagtacgcctatgcgctgctcggttggacgggcagcaaagaatttcgtcgcgatctgcgccgctatgcggaggaagagcgcggcatgatcctcgacaaccatgccctctacgacctgaaaaagcgcatctttctgaaagcgggcagcgaagaagagattttcgcgcatctgggtctggattatgtggagccgtgggaacgcaacgcg

SEQ ID NO: 2072 - protein, 394 aa, synthetic construct
  REGION 1..394: note = Variant of terminal deoxynucleotidyl transferase
MHHHHHHGDSGHPPSNTPEGEVPSVIAEPVSQYSCQRKTTLNNYNKKFTDALEIMAESYKFKENLIACLEAKRAASILKYLPFPVTSMKDIQGLPCITDQVRDVIEEIIEEGESSRVKEVLNDERYKAFKQFTSVFGVGVKTAEKWFRMGLRTVEEAKASKALKLSKMQKAGFLYYEDLASRVSKEEADAVTLIVKNTVRTFLPDALVTITGGFRRGKPMGHDVDFLITNPGPKEDDELLHKVVDLLKKQGLLLYEDIKESTFVEGQLPSRKIDAMDNFQKCFAILKLYQPGVDNSSVGTSKKSDMAEVKDWKAIRVDLVITPFEQYAYALLGWTGSKEFRRDLRRYAEEERGMILDNHALYDLKKRIFLKAGSEEEIFAHLGLDYVEPWERNA

SEQ ID NO: 2073 - DNA, 1182 bp, synthetic construct
  misc_feature 1..1182: note = Variant of terminal deoxynucleotidyl transferase
  source 1..1182: mol_type = other DNA
atgcaccatcatcatcatcatggcgatagcggccatccgccgagcaataccccggagggggaggtgccgagcgttatcgcccgtccggttagtcagtacagctgccagcgcaagaccacgctgaataactacaacaaaaagtttaccgacgcgctggagatcatggccgagaactacaaatttaaagagaacctgatcgcgtgtctggaagccaagcgcgccgcgagtattctgaaatatctgccgttcgaggttaccagcatgaaagacatccaaggtctgccgtgcattaccgaccaagttcgtgacgtgatcgaggagatcatcgaagagggcgagagcagccgtgttaaagaagttctcaatgacgagcgctacaaggcctttaagcagttcaccagcgtgttcggtgtgggcgtgaaaaccgcggaaaagtggtttcgtatgggcctccgtacggttgaagaagcaaaggccagtaagagtctgaagctgagcaagatgcagaaggcgggcctgctgtattacgaggatctggcgagccgcgttagtaaagaagaagccgatgccgttacgctcatcgtgaagaacacggtgcgtacctttctgccggatgcgctggtgaccatcaccggcggtttccgccgtggcaaacctatgggccacgacgttgactttctgatcacgaatccgggcccgaaagaggatgacgagctgctccacaaagtggttgatctgctcaagaagcaaggtctgctgctgtacgaagacatcaaagagagcacgttcgtggaggggcaactgccaagtcgcaaaatcgacgccatggacaacttccagaagtgcttcgccattctcaagctgtaccagccgggcgtggataacagttcgtacaatacgagtaagaaaagtgacatggccgaggttaaggattggaaagcgattcgtgtggatctggtgatcacgccattcgagcagtacgcctatgcgctgctcggttggacgggcagcaaagaatttcgtcgcgatctgcgccgctatgcggaggaagagcgcggcatgatcctcgacaaccatgccctctacgacctgaaaaagcgcatctttctgaaagcgggcagcgaagaagagattttcgcgcatctgggtctggattatgtggagccgtgggaacgcaacgcg

SEQ ID NO: 2074 - protein, 394 aa, synthetic construct
  REGION 1..394: note = Variant of terminal deoxynucleotidyl transferase
MHHHHHHGDSGHPPSNTPEGEVPSVIARPVSQYSCQRKTTLNNYNKKFTDALEIMAENYKFKENLIACLEAKRAASILKYLPFEVTSMKDIQGLPCITDQVRDVIEEIIEEGESSRVKEVLNDERYKAFKQFTSVFGVGVKTAEKWFRMGLRTVEEAKASKSLKLSKMQKAGLLYYEDLASRVSKEEADAVTLIVKNTVRTFLPDALVTITGGFRRGKPMGHDVDFLITNPGPKEDDELLHKVVDLLKKQGLLLYEDIKESTFVEGQLPSRKIDAMDNFQKCFAILKLYQPGVDNSSYNTSKKSDMAEVKDWKAIRVDLVITPFEQYAYALLGWTGSKEFRRDLRRYAEEERGMILDNHALYDLKKRIFLKAGSEEEIFAHLGLDYVEPWERNA

SEQ ID NO: 2075 - DNA, 1182 bp, synthetic construct
  misc_feature 1..1182: note = Variant of terminal deoxynucleotidyl transferase
  source 1..1182: mol_type = other DNA
atgcaccatcatcatcatcatggcgatagcggccatccgccgagcaataccccggagggggaggtgccgagcgttatcgcccgtccggttagtcagtacagctgccagcgcaagaccacgctgaataactacaacaaaaagtttaccgacgcgctggagatcatggccgagaattacaagtttaaagagaacctgatcgcgtgtctggaagcccagcgcgccgcgagtattctgaaatatctgccgttcccggttcaaagcatgaaagacatccaaggtctgccgtgcattaccgaccaagttcgtgacgtgatcgaggagatcatcgaagagggcgagagcagccgtgttaaagaagttctcaatgacgagcgctacaaggcctttaagcagttcaccagcgtgttcggtgtgggcgtgaaaaccgcggaaaagtggtttcgtatgggcctccgtacggttgaagaagcaaaggccagtaagagtctgaagctgagcaagatgcagaaggcgggcttcctgtattacgaggatctggcgagccgcgttagtaaagaagaagccgatgccgttacgctcatcgtgaagaacacggtgcgtacctttctgccggatgcgctggtgaccatcactggcggtttccgccgtggcaaacctgtaggccacgacatcgactttctgatcaccaatccgggcccgaaagaggatgacgagctgctccacaaagtggttgatctgctcaagaagcaaggtctgctgctgtacgaagacatcaaagagagcacgttcgtggaggggcaactgccaagtcgcaaaatcgacgccatggacaacttccagaagtgcttcgccattctcaagctgtaccagccgggcgtggataacagcagctataacacgagtaagaagagtgacatggccgaggttaaggattggaaagcgattcgtgtggatctggtgatcacgccattcgagcagtacgcctatgcgctgctcggttggacgggcagcaaagaatttcgtcgcgatctgcgccgctatgcggaggaagagcgcggcatgatcctcgacaaccatgccctctacgacctgaaaaagcgcatctttctgaaagcgggcagcgaagaagagattttcgcgcatctgggtctggattatgtggagccgtgggaacgcaacgcg

SEQ ID NO: 2076 - protein, 394 aa, synthetic construct
  REGION 1..394: note = Variant of terminal deoxynucleotidyl transferase
MHHHHHHGDSGHPPSNTPEGEVPSVIARPVSQYSCQRKTTLNNYNKKFTDALEIMAENYKFKENLIACLEAQRAASILKYLPFPVQSMKDIQGLPCITDQVRDVIEEIIEEGESSRVKEVLNDERYKAFKQFTSVFGVGVKTAEKWFRMGLRTVEEAKASKSLKLSKMQKAGFLYYEDLASRVSKEEADAVTLIVKNTVRTFLPDALVTITGGFRRGKPVGHDIDFLITNPGPKEDDELLHKVVDLLKKQGLLLYEDIKESTFVEGQLPSRKIDAMDNFQKCFAILKLYQPGVDNSSYNTSKKSDMAEVKDWKAIRVDLVITPFEQYAYALLGWTGSKEFRRDLRRYAEEERGMILDNHALYDLKKRIFLKAGSEEEIFAHLGLDYVEPWERNA

SEQ ID NO: 2077 - DNA, 1182 bp, synthetic construct
  misc_feature 1..1182: note = Variant of terminal deoxynucleotidyl transferase
  source 1..1182: mol_type = other DNA
atgcaccatcatcatcatcatggcgatagcggccatccgccgagcaataccccggagggggaggtgccgagcgttatcgccgggccggttagtcagtacagctgccagcgcaagaccacgctgaataactacaacaaaaagtttaccgacgcgctggagatcatggccgagaactacaaatttaaagagaacctgatcgcgtgtctggaagccaagcgcgccgcgagtattctgaaatatctgccgttcgaggttaccagcatgaaagacatccaaggtctgccgtgcattaccgaccaagttcgtgacgtgatcgaggagatcatcgaagagggcgagagcagccgtgttaaagaagttctcaatgacgagcgctacaaggcctttaagcagttcaccagcgtgttcggtgtgggcgtgaaaaccgcggaaaagtggtaccgtatgggcctccgtacggttgaagaagcaaaggccagtaagagtctgaagctgagcaagatgcagaaggcgggcttcctgtattacgaggatctggcgagccgcgttagtaaagaagaagccgatgccgttacgctcatcgtgaagaacacggtgcgtacctttctgccggatgcgctggtgaccatcaccggcggtttccgccgtggcaaacctatgggccacgacatcgactttctgatcacgaatccgggcccgaaagaggatgacgagctgctccacaaagtggttgatctgctcaagaagcaaggtctgctgctgtacgaagacatcaaagagagcacgttcgtggaggggcaactgccaagtcgcaaaatcgacgccatggacaacttccagaagtgcttcgccattctcaagctgtaccagccgggcgtggataacagtgcggttaatacgagtaagaaaagtgacatggccgaggttaaggattggaaagcgattcgtgtggatctggtgatcacgccattcgagcagtacgcctatgcgctgctcggttggacgggcagcaaagaatttcgtcgcgatctgcgccgctatgcggaggaagagcgcggcatgatcctcgacaaccatgccctctacgacctgaaaaagcgcatctttctgaaagcgggcagcgaagaagagattttcgcgcatctgggtctggattatgtggagccgtgggaacgcaacgcg

SEQ ID NO: 2078 - protein, 394 aa, synthetic construct
  REGION 1..394: note = Variant of terminal deoxynucleotidyl transferase
MHHHHHHGDSGHPPSNTPEGEVPSVIAGPVSQYSCQRKTTLNNYNKKFTDALEIMAENYKFKENLIACLEAKRAASILKYLPFEVTSMKDIQGLPCITDQVRDVIEEIIEEGESSRVKEVLNDERYKAFKQFTSVFGVGVKTAEKWYRMGLRTVEEAKASKSLKLSKMQKAGFLYYEDLASRVSKEEADAVTLIVKNTVRTFLPDALVTITGGFRRGKPMGHDIDFLITNPGPKEDDELLHKVVDLLKKQGLLLYEDIKESTFVEGQLPSRKIDAMDNFQKCFAILKLYQPGVDNSAVNTSKKSDMAEVKDWKAIRVDLVITPFEQYAYALLGWTGSKEFRRDLRRYAEEERGMILDNHALYDLKKRIFLKAGSEEEIFAHLGLDYVEPWERNA

SEQ ID NO: 2079 - DNA, 1182 bp, synthetic construct
  misc_feature 1..1182: note = Variant of terminal deoxynucleotidyl transferase
  source 1..1182: mol_type = other DNA
atgcaccatcatcatcatcatggcgatagcggccatccgccgagcaataccccggagggggaggtgccgagcgttatcgcccgtccggttagtcagtacagctgccagcgcaagaccacgctgaataactacaacaaaaagtttaccgacgcgctggagatcatggccgagaactacaaatttaaagagaacctgatcgcgtgtctggaagccaagcgcgccgcgagtattctgaaatatctgccgttcccggttaccagcatgaaagacatccaaggtctgccgtgcattaccgaccaagttcgtgacgtgatcgaggagatcatcgaagagggcgagagcagccgtgttaaagaagttctcaatgacgagcgctacaaggcctttaagcagttcaccagcgtgttcggtgtgggcgtgaaaaccgcggaaaagtggtttcgtatgggcctccgtacggttgaagaagcaaaggccagtaagagtctgaagctgagcaagatgcagaaggcgggcttcctgtattacgaggatctggcgagccgcgttagtaaagaagaagccgatgccgttacgctcatcgtgaagaacacggtgcgtacctttctgccggatgcgctggtgaccatcaccggcggtttccgccgtggcaaacctatgggccacgacatcgactttctgatcacgaatccgggcccgaaagaggatgacgagctgctccacaaagtggttgatctgctcaagaagcaaggtctgctgctgtacgaagacatcaaagagagcacgttcgtggaggggcaactgccaagtcgcaaaatcgacgccatggacaacttccagaagtgcttcgccattctcaagctgtaccagccgggcgtggataacagcagctataacacgagtaagaagagtgacatggccgaggttaaggattggaaagcgattcgtgtggatctggtgatcacgccattcgagcagtacgcctatgcgctgctcggttggacgggcagcaaagaatttcgtcgcgatctgcgccgctatgcggaggaagagcgcgatatgatcctcgacaaccatgccctctacgacctgaaaaagcgcatctttctgaaagcgggcagcgaagaagagattttcgcgcatctgggtctggattatgtggagccgtgggaacgcaacgcg

SEQ ID NO: 2080 - protein, 394 aa, synthetic construct
  REGION 1..394: note = Variant of terminal deoxynucleotidyl transferase
MHHHHHHGDSGHPPSNTPEGEVPSVIARPVSQYSCQRKTTLNNYNKKFTDALEIMAENYKFKENLIACLEAKRAASILKYLPFPVTSMKDIQGLPCITDQVRDVIEEIIEEGESSRVKEVLNDERYKAFKQFTSVFGVGVKTAEKWFRMGLRTVEEAKASKSLKLSKMQKAGFLYYEDLASRVSKEEADAVTLIVKNTVRTFLPDALVTITGGFRRGKPMGHDIDFLITNPGPKEDDELLHKVVDLLKKQGLLLYEDIKESTFVEGQLPSRKIDAMDNFQKCFAILKLYQPGVDNSSYNTSKKSDMAEVKDWKAIRVDLVITPFEQYAYALLGWTGSKEFRRDLRRYAEEERDMILDNHALYDLKKRIFLKAGSEEEIFAHLGLDYVEPWERNA

SEQ ID NO: 2081 - DNA, 1182 bp, synthetic construct
  misc_feature 1..1182: note = Variant of terminal deoxynucleotidyl transferase
  source 1..1182: mol_type = other DNA
atgcaccatcatcatcatcatggcgatagcggccatccgattagcaataccccggagggggaggtgccgagcgttatcgccgggccggttagtcagtacagctgccagcgcaagaccacgctgaataactacaacaaaaagtttaccgacgcgctggagatcatggccgagaactacaaatttaaagagaacctgatcgcgtgtctggaagccaagcgcgccgcgagtattctgaaatatctgccgttcccggttaccagcatgaaagacatccaaggtctgccgtgcattaccgaccaagttcgtgacgtgatcgaggagatcatcgaagagggcgagagcagccgtgttaaagaagttctcaatgacgagcgctacaaggcctttaagcagttcaccagcgtgttcggtgtgggcgtgaaaaccgcggaaaagtggttccgtatgggcctccgtacggttgaagaagcaaaggccagtaagagtctgaagctgagcaagatgcagaaggcgggcttcctgtattacgaggatctggcgagccgcgttagtaaagaagaagccgatgccgttacgctcatcgtgaagaacacggtgcgtacctttctgccggatgcgctggtgaccatcaccggcggtttccgccgtggcaaacctatgggccacgacgttgactttctgatcacgaatccgggcccgaaagaggatgacgagctgctccacaaagtggttgatctgctcaagaagcaaggtctgctgctgtacgaagacatcaaagagagcacgttcgtggaggggcaactgccaagtcgcaaaatcgacgccatggacaacttccagaagtgcttcgccattctcaagctgtaccagccgggcgtggataacaattcggttaatacgagtaagaaaagtgacatggccgaggttaaggattggaaagcgattcgtgtggatctggtgatcacgccattcgagcagtacgcctatgcgctgctcggttggacgggcagcaaagaatttcgtcgcgatctgcgccgctatgcggaggaagagcgcggcatgatcctcgacaaccatgccctctacgacctgaaaaagcgcatctttctgaaagcgggcagcgaagaagagattttcgcgcatctgggtctggattatgtggagccgtgggaacgcaacgcg

SEQ ID NO: 2082 - protein, 394 aa, synthetic construct
  REGION 1..394: note = Variant of terminal deoxynucleotidyl transferase
MHHHHHHGDSGHPISNTPEGEVPSVIAGPVSQYSCQRKTTLNNYNKKFTDALEIMAENYKFKENLIACLEAKRAASILKYLPFPVTSMKDIQGLPCITDQVRDVIEEIIEEGESSRVKEVLNDERYKAFKQFTSVFGVGVKTAEKWFRMGLRTVEEAKASKSLKLSKMQKAGFLYYEDLASRVSKEEADAVTLIVKNTVRTFLPDALVTITGGFRRGKPMGHDVDFLITNPGPKEDDELLHKVVDLLKKQGLLLYEDIKESTFVEGQLPSRKIDAMDNFQKCFAILKLYQPGVDNNSVNTSKKSDMAEVKDWKAIRVDLVITPFEQYAYALLGWTGSKEFRRDLRRYAEEERGMILDNHALYDLKKRIFLKAGSEEEIFAHLGLDYVEPWERNA

SEQ ID NO: 2083 - DNA, 1182 bp, synthetic construct
  misc_feature 1..1182: note = Variant of terminal deoxynucleotidyl transferase
  source 1..1182: mol_type = other DNA
atgcaccatcatcatcatcatggcgatagcggccatccgccgagcaataccccggagggggaggtgccgagcgttatcgcccgtccggttagtcagtacagctgccagcgcaagaccacgctgaataactacaacaaaaagtttaccgacgcgctggagatcatggccgagaactacaaatttaaagagaacctgatcgcgtgtctggaagccaagcgcgccgcgagtttgctgaaatatctgccgttcccggttaccagcatgaaagacatccaaggtctgccgtgcattaccgaccaagttcgtgacgtgatcgaggagatcatcgaagagggcgagagcagccgtgttaaagaagttctcaatgacgagcgctacaaggcctttaagcagttcaccagcgtgttcggtgtgggcgtgaaaaccgcggaaaagtggtttcgtatgggcctccgtacggttgaagaagcaaaggccagtaagagtctgaagctgagcaagatgcagaaggcgggcttcctgtattacgaggatctggcgagccgcgttagtaaagaagaagccgatgccgttacgctcatcgtgaagaacacggtgcgtacctttctgccggatgcgctggtgaccatcaccggcggtttccgccgtggcaaacctatgggccacgacatcgactttctgatcacgaatccgggcccgaaagaggatgacgagctgctccacaaagtggttgatctgctcaagaagcaaggtctgctgctgtacgaagacatcaaagagagcacgttcgtggaggggcaactgccaagtcgcaaaatcgacgccatggacaacttccagaagtgcttcgccattctcaagctgtaccagccgggcgtggataacagcagctataacacgagtaagaagagtgacatggccgaggttaaggattggaaagcgattcgtgtggatctggtgatcacgccattcgagcagtacgcctatgcgctgctcggttggacgggcagcaaagaatttcgtcgcgatctgcgccgctatgcggaggaagagcgcggcatgatcctcgacaaccatgccctctacgacctgaaaaagcgcatctttctgaaagcgggcagcgaagaagagattttcgcgcatctgggtctggattatgtggagccgtgggaacgcaacgcg

SEQ ID NO: 2084 - protein, 394 aa, synthetic construct
  REGION 1..394: note = Variant of terminal deoxynucleotidyl transferase
MHHHHHHGDSGHPPSNTPEGEVPSVIARPVSQYSCQRKTTLNNYNKKFTDALEIMAENYKFKENLIACLEAKRAASLLKYLPFPVTSMKDIQGLPCITDQVRDVIEEIIEEGESSRVKEVLNDERYKAFKQFTSVFGVGVKTAEKWFRMGLRTVEEAKASKSLKLSKMQKAGFLYYEDLASRVSKEEADAVTLIVKNTVRTFLPDALVTITGGFRRGKPMGHDIDFLITNPGPKEDDELLHKVVDLLKKQGLLLYEDIKESTFVEGQLPSRKIDAMDNFQKCFAILKLYQPGVDNSSYNTSKKSDMAEVKDWKAIRVDLVITPFEQYAYALLGWTGSKEFRRDLRRYAEEERGMILDNHALYDLKKRIFLKAGSEEEIFAHLGLDYVEPWERNA

SEQ ID NO: 2085 - DNA, 1182 bp, synthetic construct
  misc_feature 1..1182: note = Variant of terminal deoxynucleotidyl transferase
  source 1..1182: mol_type = other DNA
atgcaccatcatcatcatcatggcgatagcggccatccgccgagcaataccccggagggggaggtgccgagcgttatcgccgagccggttagtcagtacagctgccagcgcaagaccacgctgaataactacaacaaaaagtttaccgacgcgctggagatcatggccgagagctacaaatttaaagagaacctgatcgcgtgtctggaagccaagcgcgccgcgagtattctgaaatatctgccgttcgaggttaccagcatgaaagacatccaaggtctgccgtgcattaccgaccaagttcgtgacgtgatcgaggagatcatcgaagagggcgagagcagccgtgttaaagaagttctcaatgacgagcgctacaaggcctttaagcagttcaccagcgtgttcggtgtgggcgtgaaaaccgcggaaaagtggttccgtatgggcctccgtacggttgaagaagcacgcgccagtaaggcgctgaagctgagcaagatgcagaaggcgggctttctgtattacgaggatctggcgagccgcgttagtaaagaagaagccgatgctgttacggtgatcgtgaagaatacggtgcgtacctttctgccggatgcgctggtgaccatcaccggcggtttccgccgtggcaaacctatgggccacgacgttgactttctgatcacgaatccgggcccgaaagaggatgacgagctgctccacaaagtggttgatctgctcaagaagcaaggtctgctgctgtacgaagacatcaaagagagcacgttcgtggaggggcaactgccaagtcgcaaaatcgacgccatggacaacttccagaagtgcttcgccattctcaagctgtaccagccgggcgtggataacaattcggttgggacgagtaagaaaagtgacatggccgaggttaaggattggaaagcgattcgtgtggatctggtgatcacgccattcgagcagtacgcctatgcgctgctcggttggacgggcagcaaagaatttcgtcgcgatctgcgccgctatgcggaggaagagcgcggcatgatcctcgacaaccatgccctctacgacctgaaaaagcgcatctttctgaaagcgggcagcgaagaagagattttcgcgcatctgggtctggattatgtggagccgtgggaacgcaacgcg

SEQ ID NO: 2086 - protein, 394 aa, synthetic construct
  REGION 1..394: note = Variant of terminal deoxynucleotidyl transferase
MHHHHHHGDSGHPPSNTPEGEVPSVIAEPVSQYSCQRKTTLNNYNKKFTDALEIMAESYKFKENLIACLEAKRAASILKYLPFEVTSMKDIQGLPCITDQVRDVIEEIIEEGESSRVKEVLNDERYKAFKQFTSVFGVGVKTAEKWFRMGLRTVEEARASKALKLSKMQKAGFLYYEDLASRVSKEEADAVTVIVKNTVRTFLPDALVTITGGFRRGKPMGHDVDFLITNPGPKEDDELLHKVVDLLKKQGLLLYEDIKESTFVEGQLPSRKIDAMDNFQKCFAILKLYQPGVDNNSVGTSKKSDMAEVKDWKAIRVDLVITPFEQYAYALLGWTGSKEFRRDLRRYAEEERGMILDNHALYDLKKRIFLKAGSEEEIFAHLGLDYVEPWERNA

SEQ ID NO: 2087 - DNA, 1182 bp, synthetic construct
  misc_feature 1..1182: note = Variant of terminal deoxynucleotidyl transferase
  source 1..1182: mol_type = other DNA
atgcaccatcatcatcatcatggcgatagcggccatccgccgagcaataccccggagggggaggtgccgagcgttatcgcccgtccggttagtcagtacagctgccagcgcaagaccacgctgaataactacaacaaaaagtttaccgacgcgctggagatcatggccgagaactacaaatttaaagagaacctgatcgcgtgtctggaagccaagcgcgccgcgagtattctgaaatatctgccgttcccggttaccagcatgaaagacatccaaggtctgccgtgcattaccgaccaagttcgtgacgtgatcgaggagatcatcgaagagggcgagagcagccgtgttaaagaagttctcaatgacgagcgctacaaggcctttaagcagttcaccagcgtgttcggtgtgggcgtgaaaaccgcggaaaagtggtttcgtatgggcctccgtacggttgaagaagcaaaggccagtaagagtctgaagctgagcaagatgcagaaggcgggcttcctgtattacgaggatctggcgagccgcgttagtaaagaagaagccgatgccgttacgctcatcgtgaaggagacggtgcgtacctttctgccggatgcgctggtgaccatcaccggcggtttccgccgtggcaaacctatgggccacgacatcgactttctgatcacgaatccgggcccgaaagaggatgacgagctgctccacaaagtggttgatctgctcaagaagcaaggtctgctgctgtacgaagacatcaaagagagcacgttcgtggaggggcaactgccaagtcgcaaaatcgacgccatggacaacttccagaagtgcttcgccattctcaagctgtaccagccgggcgtggataacagcagctataacacgagtaagaagagtgacatggccgaggttaaggattggaaagcgattcgtgtggatctggtgatcacgccattcgagcagtacgcctatgcgctgctcggttggacgggcagcaaagaatttcgtcgcgatctgcgccgctatgcggaggaagagcgcggcatgatcctcgacaaccatgccctctacgacctgaaaaagcgcatctttctgaaagcgggcagcgaagaagagattttcgcgcatctgggtctggattatgtggagccgtgggaacgcaacgcg

SEQ ID NO: 2088 - protein, 394 aa, synthetic construct
  REGION 1..394: note = Variant of terminal deoxynucleotidyl transferase
MHHHHHHGDSGHPPSNTPEGEVPSVIARPVSQYSCQRKTTLNNYNKKFTDALEIMAENYKFKENLIACLEAKRAASILKYLPFPVTSMKDIQGLPCITDQVRDVIEEIIEEGESSRVKEVLNDERYKAFKQFTSVFGVGVKTAEKWFRMGLRTVEEAKASKSLKLSKMQKAGFLYYEDLASRVSKEEADAVTLIVKETVRTFLPDALVTITGGFRRGKPMGHDIDFLITNPGPKEDDELLHKVVDLLKKQGLLLYEDIKESTFVEGQLPSRKIDAMDNFQKCFAILKLYQPGVDNSSYNTSKKSDMAEVKDWKAIRVDLVITPFEQYAYALLGWTGSKEFRRDLRRYAEEERGMILDNHALYDLKKRIFLKAGSEEEIFAHLGLDYVEPWERNA

SEQ ID NO: 2089 - DNA, 1182 bp, synthetic construct
  misc_feature 1..1182: note = Variant of terminal deoxynucleotidyl transferase
  source 1..1182: mol_type = other DNA
atgcaccatcatcatcatcatggcgatagcggccatccgccgagcaataccccggagggggaggtgccgagcgttatcgcccgtccggttagtcagtacagctgccagcgcaagaccacgctgaataactacaacaaaaagtttaccgacgcgctggagatcatggccgagaactacaaatttaaagagaacctgatcgcgtgtctggaagccaagcgcgccgcgagtattctgaaatatctgccgttcccggttaccagcatgaaagacatccaaggtctgccgtgcattaccgaccaagttcgtgacgtgatcgaggagatcatcgaagagggcgagagcagccgtgttaaagaagttctcaatgacgagcgctacaaggcctttaagcagttcaccagcgtgttcggtgtgggcgtgaaaaccgcggaaaagtggtttcgtatgggcctccgtacggttgaagaagcaaaggccagtaagagtctgaagctgagcaagatgcagaaggcgggcttcctgtattacgaggatctggcgagccgcgttagtaaagaagaagccgatgccgttacgctcatcgtgaagaacacggtgcgtacctttctgccggatgcgctggtgaccatcaccggcggtttccgccgtggcaaacctatgggccacgacatcgactttctgatcacgaatccgggcccgaaagaggatgacgagctgctccacaaagtggttgatctgctcaagaagcaaggtctgctgctgtacgaagacatcaaagagagcacgttcgtggaggggcaactgccaagtcgcaaaatcgacgccatggacaacttccagaagtgcttcgccattctcaagctgtaccagccgaaggtggataacagcagctataacacgagtaagaagagtgacatggccgaggttaaggattggaaagcgattcgtgtggatctggtgatcacgccattcgagcagtacgcctatgcgctgctcggttggacgggcagcaaagaatttcgtcgcgatctgcgccgctatgcggaggaagagcgcggcatgatcctcgacaaccatgccctctacgacctgaaaaagcgcatctttctgaaagcgggcagcgaagaagagattttcgcgcatctgggtctggattatgtggagccgtgggaacgcaacgcg

SEQ ID NO: 2090 - protein, 394 aa, synthetic construct
  REGION 1..394: note = Variant of terminal deoxynucleotidyl transferase
MHHHHHHGDSGHPPSNTPEGEVPSVIARPVSQYSCQRKTTLNNYNKKFTDALEIMAENYKFKENLIACLEAKRAASILKYLPFPVTSMKDIQGLPCITDQVRDVIEEIIEEGESSRVKEVLNDERYKAFKQFTSVFGVGVKTAEKWFRMGLRTVEEAKASKSLKLSKMQKAGFLYYEDLASRVSKEEADAVTLIVKNTVRTFLPDALVTITGGFRRGKPMGHDIDFLITNPGPKEDDELLHKVVDLLKKQGLLLYEDIKESTFVEGQLPSRKIDAMDNFQKCFAILKLYQPKVDNSSYNTSKKSDMAEVKDWKAIRVDLVITPFEQYAYALLGWTGSKEFRRDLRRYAEEERGMILDNHALYDLKKRIFLKAGSEEEIFAHLGLDYVEPWERNA

SEQ ID NO: 2091 - DNA, 1182 bp, synthetic construct
  misc_feature 1..1182: note = Variant of terminal deoxynucleotidyl transferase
  source 1..1182: mol_type = other DNA
atgcaccatcatcatcatcatggcgatagcggccatccgccgagcaataccccggagggggaggtgccgagcgttatcgcccgtccggttagtcagtacagctgccagcgcaagaccacgctgaataactacaacaaaaagtttaccgacgcgctggagatcatggccgagaactacaaatttaaagagaacctgatcgcgtgtctggaagccaagcgcgccgcgagtattctgaaatatctgccgttcccggttaccagcatgaaagacatccaaggtctgccgtgcattaccgaccaagttcgtgacgtgatcgaggagatcatcgaagagggcgagagcagccgtgttaaagaagttctcaatgacgagcgctacaaggcctttaagcagttcaccagcgtgttcggtgtgggcgtgaaaaccgcggaaaagtggtttcgtatgggcctccgtacggttgaagaagcaaaggccagtaagagtctgaagctgagcaagatgcagaaggcgggcttcctgtattacgaggatctggcgagccgcgttagtaaagaagaagccgatgctgttacggtgatcgtgaaggagacggtgcgtacctttctgccggatgcgctggtgaccatcaccggcggtttccgccgtggcaaacctatgggccacgacatcgactttctgatcacgaatccgggcccgaaagaggatgacgagctgctccacaaagtggttgatctgctcaagaagcaaggtctgctgctgtacgaagacatcaaagagagcacgttcgtggaggggcaactgccaagtcgcaaaatcgacgccatggacaacttccagaagtgcttcgccattctcaagctgtaccagccgggcgtggataacaattcgtacaatacgagtaagggcagtgacatggccgaggttaaggattggaaagcgattcgtgtggatctggtgatcacgccattcgagcagtacgcctatgcgctgctcggttggacgggcagcaaagaatttcgtcgcgatctgcgccgctatgcggaggaagagcgcggcatgatcctcgacaaccatgccctctacgacctgaaaaagcgcatctttctgaaagcgggcagcgaagaagagattttcgcgcatctgggtctggattatgtggagccgtgggaacgcaacgcg

SEQ ID NO: 2092 - protein, 394 aa, synthetic construct
  REGION 1..394: note = Variant of terminal deoxynucleotidyl transferase
MHHHHHHGDSGHPPSNTPEGEVPSVIARPVSQYSCQRKTTLNNYNKKFTDALEIMAENYKFKENLIACLEAKRAASILKYLPFPVTSMKDIQGLPCITDQVRDVIEEIIEEGESSRVKEVLNDERYKAFKQFTSVFGVGVKTAEKWFRMGLRTVEEAKASKSLKLSKMQKAGFLYYEDLASRVSKEEADAVTVIVKETVRTFLPDALVTITGGFRRGKPMGHDIDFLITNPGPKEDDELLHKVVDLLKKQGLLLYEDIKESTFVEGQLPSRKIDAMDNFQKCFAILKLYQPGVDNNSYNTSKGSDMAEVKDWKAIRVDLVITPFEQYAYALLGWTGSKEFRRDLRRYAEEERGMILDNHALYDLKKRIFLKAGSEEEIFAHLGLDYVEPWERNA

SEQ ID NO: 2093 - DNA, 1182 bp, synthetic construct
  misc_feature 1..1182: note = Variant of terminal deoxynucleotidyl transferase
  source 1..1182: mol_type = other DNA
atgcaccatcatcatcatcatggcgatagcggccatccgccgagcaataccccggagggggaggtgccgagcgttatcgcccgtccggttagtcagtacagctgccagcgcaagaccacgctgaataactacaacaaaaagtttaccgacgcgctggagatcatggccgagaactacaaatttaaagagaacctgatcgcgtgtctggaagccaagcgcgccgcgagtattctgaaatatctgccgttcccggttaccagcatgaaagacatccaaggtctgccgtgcattaccgaccaagttcgtgacttgatcgaggagatcatcgaagagggcgagagcagccgtgttaaagaagttctcaatgacgagcgctacaaggcctttaagcagttcaccagcgtgttcggtgtgggcgtgaaaaccgcggaaaagtggtttcgtatgggcctccgtacggttgaagaagcaaaggccagtaagagtctgaagctgagcaagatgcagaaggcgggcttcctgtattacgaggatctggcgagccgcgttagtaaagaagaagccgatgccgttacgctcatcgtgaagaacacggtgcgtacctttctgccggatgcgctggtgaccatcaccggcggtttccgccgtggcaaacctatgggccacgacatcgactttctgatcacgaatccgggcccgaaagaggatgacgagctgctccacaaagtggttgatctgctcaagaagcaaggtctgctgctgtacgaagacatcaaagagagcacgttcgtggaggggcaactgccaagtcgcaaaatcgacgccatggacaacttccagaagtgcttcgccattctcaagctgtaccagccgggcgtggataacagcagctataacacgagtaagaagagtgacatggccgaggttaaggattggaaagcgattcgtgtggatctggtgatcacgccattcgagcagtacgcctatgcgctgctcggttggacgggcagcaaagaatttcgtcgcgatctgcgccgctatgcggaggaagagcgcggcatgatcctcgacaaccatgccctctacgacctgaaaaagcgcatctttctgaaagcgggcagcgaagaagagattttcgcgcatctgggtctggattatgtggagccgtgggaacgcaacgcg

SEQ ID NO: 2094 - protein, 394 aa, synthetic construct
  REGION 1..394: note = Variant of terminal deoxynucleotidyl transferase
MHHHHHHGDSGHPPSNTPEGEVPSVIARPVSQYSCQRKTTLNNYNKKFTDALEIMAENYKFKENLIACLEAKRAASILKYLPFPVTSMKDIQGLPCITDQVRDLIEEIIEEGESSRVKEVLNDERYKAFKQFTSVFGVGVKTAEKWFRMGLRTVEEAKASKSLKLSKMQKAGFLYYEDLASRVSKEEADAVTLIVKNTVRTFLPDALVTITGGFRRGKPMGHDIDFLITNPGPKEDDELLHKVVDLLKKQGLLLYEDIKESTFVEGQLPSRKIDAMDNFQKCFAILKLYQPGVDNSSYNTSKKSDMAEVKDWKAIRVDLVITPFEQYAYALLGWTGSKEFRRDLRRYAEEERGMILDNHALYDLKKRIFLKAGSEEEIFAHLGLDYVEPWERNA

SEQ ID NO: 2095 - DNA, 1182 bp, synthetic construct
  misc_feature 1..1182: note = Variant of terminal deoxynucleotidyl transferase
  source 1..1182: mol_type = other DNA
atgcaccatcatcatcatcatggcgatagcggccatccgccgagcaataccccggagggggaggtgccgagcgttatcgcccgtccggttagtcagtacagctgccagcgcaagaccacgctgaataactacaacaaaaagtttaccgacgcgctggagatcatggccgagaactacaaatttaaagagaacctgatcgcgtgtctggaagccaagcgcgccgcgagtattctgaaatatctgccgttcccggttaccagcatgaaagacatccaaggtctgccgtgcattaccgaccaagttcgtgacgtgatcgaggagatcatcgaagagggcgagagcagccgtgttaaagaaattctcaatgacgagcgctacaaggcctttaagcagttcaccagcgtgttcggtgtgggcgtgaaaaccgcggaaaagtggtttcgtatgggcctccgtacggttgaagaagcaaaggccagtaagagtctgaagctgagcaagatgcagaaggcgggcttcctgtattacgaggatctggcgagccgcgttagtaaagaagaagccgatgccgttacgctcatcgtgaagaacacggtgcgtacctttctgccggatgcgctggtgaccatcaccggcggtttccgccgtggcaaacctatgggccacgacatcgactttctgatcacgaatccgggcccgaaagaggatgacgagctgctccacaaagtggttgatctgctcaagaagcaaggtctgctgctgtacgaagacatcaaagagagcacgttcgtggaggggcaactgccaagtcgcaaaatcgacgccatggacaacttccagaagtgcttcgccattctcaagctgtaccagccgggcgtggataacagcagctataacacgagtaagaagagtgacatggccgaggttaaggattggaaagcgattcgtgtggatctggtgatcacgccattcgagcagtacgcctatgcgctgctcggttggacgggcagcaaagaatttcgtcgcgatctgcgccgctatgcggaggaagagcgcggcatgatcctcgacaaccatgccctctacgacctgaaaaagcgcatctttctgaaagcgggcagcgaagaagagattttcgcgcatctgggtctggattatgtggagccgtgggaacgcaacgcg

SEQ ID NO: 2096 - protein, 394 aa, synthetic construct
  REGION 1..394: note = Variant of terminal deoxynucleotidyl transferase
MHHHHHHGDSGHPPSNTPEGEVPSVIARPVSQYSCQRKTTLNNYNKKFTDALEIMAENYKFKENLIACLEAKRAASILKYLPFPVTSMKDIQGLPCITDQVRDVIEEIIEEGESSRVKEILNDERYKAFKQFTSVFGVGVKTAEKWFRMGLRTVEEAKASKSLKLSKMQKAGFLYYEDLASRVSKEEADAVTLIVKNTVRTFLPDALVTITGGFRRGKPMGHDIDFLITNPGPKEDDELLHKVVDLLKKQGLLLYEDIKESTFVEGQLPSRKIDAMDNFQKCFAILKLYQPGVDNSSYNTSKKSDMAEVKDWKAIRVDLVITPFEQYAYALLGWTGSKEFRRDLRRYAEEERGMILDNHALYDLKKRIFLKAGSEEEIFAHLGLDYVEPWERNA

SEQ ID NO: 2097 - DNA, 1182 bp, synthetic construct
  misc_feature 1..1182: note = Variant of terminal deoxynucleotidyl transferase
  source 1..1182: mol_type = other DNA
atgcaccatcatcatcatcatggcgatagcggccatccgccgagcaataccccggagggggaggtgccgagcgttatcgcccgtccggttagtcagtacagctgccagcgcaagaccacgctgaataactacaacaaaaagtttaccgacgcgctggagatcatggccgagaattacaagtttaaagagaacctgatcgcgtgtctggaagccgggcgcgccgcgagtattctgaaatatctgccgttcgaagttcaaagcatgaaagacatccaaggtctgccgtgcattaccgaccaagttcgtgacgtgatcgaggagatcatcgaagagggcgagagcagccgtgttaaagaagttctcaatgacgagcgctacaaggcctttaagcagttcaccagcgtgttcggtgtgggcgtgaaaaccgcggaaaagtggtttcgtatgggcctccgtacggttgaagaagcaaaggccagtaagagtctgaagctgagcaagatgcagaaggcgggcttcctgtattacgaggatctggcgagccgcgttagtaaagaagaagccgatgccgttacgctcatcgtgaagaacacggtgcgtacctttctgccggatgcgctggtgaccatcactggcggtttccgccgtggcaaacctatgggccacgacgtcgactttctgatcacgaatccgggcccgaaagaggatgacgagctgctccacaaagtggttgatctgctcaagaagcaaggtctgctgctgtacgaagacatcaaagagagcacgttcgtggaggggcaactgccaagtcgcaaaatcgacgccatggacaacttccagaagtgcttcgccattctcaagctgtaccagccgggcgtggataacagcagctataacacgagtaagaagagtgacatggccgaggttaaggattggaaagcgattcgtgtggatctggtgatcacgccattcgagcagtacgcctatgcgctgctcggttggacgggcagcaaagaatttcgtcgcgatctgcgccgctatgcggaggaagagcgcggcatgatcctcgacaaccatgccctctacgacctgaaaaagcgcatctttctgaaagcgggcagcgaagaagagattttcgcgcatctgggtctggattatgtggagccgtgggaacgcaacgcg

SEQ ID NO: 2098 - protein, 394 aa, synthetic construct
  REGION 1..394: note = Variant of terminal deoxynucleotidyl transferase
MHHHHHHGDSGHPPSNTPEGEVPSVIARPVSQYSCQRKTTLNNYNKKFTDALEIMAENYKFKENLIACLEAGRAASILKYLPFEVQSMKDIQGLPCITDQVRDVIEEIIEEGESSRVKEVLNDERYKAFKQFTSVFGVGVKTAEKWFRMGLRTVEEAKASKSLKLSKMQKAGFLYYEDLASRVSKEEADAVTLIVKNTVRTFLPDALVTITGGFRRGKPMGHDVDFLITNPGPKEDDELLHKVVDLLKKQGLLLYEDIKESTFVEGQLPSRKIDAMDNFQKCFAILKLYQPGVDNSSYNTSKKSDMAEVKDWKAIRVDLVITPFEQYAYALLGWTGSKEFRRDLRRYAEEERGMILDNHALYDLKKRIFLKAGSEEEIFAHLGLDYVEPWERNA

SEQ ID NO: 2099 - DNA, 1182 bp, synthetic construct
  misc_feature 1..1182: note = Variant of terminal deoxynucleotidyl transferase
  source 1..1182: mol_type = other DNA
atgcaccatcatcatcatcatggcgatagcggccatccgattagcaataccccggagggggaggtgccgagcgttatcgccgggccggttagtcagtacagctgccagcgcaagaccacgctgaataactacaacaaaaagtttaccgacgcgctggagatcatggccgagagctacaaatttaaagagaacctgatcgcgtgtctggaagccaagcgcgccgcgagtattctgaaatatctgccgttcccggttaccagcatgaaagacatccaaggtctgccgtgcattaccgaccaagttcgtgacgtgatcgaggagatcatcgaagagggcgagagcagccgtgttaaagaagttctcaatgacgagcgctacaaggcctttaagcagttcaccagcgtgttcggtgtgggcgtgaaaaccgcggaaaagtggttccgtatgggcctccgtacggttgaagaagcaaaggccagtaaggcgctgaagctgagcaagatgcagaaggcgggctttctgtattacgaggatctggcgagccgcgttagtaaagaagaagccgatgttgttacggtgatcgtgaagaatacggtgcgtacctttctgccggatgcgctggtgaccatcaccggcggtttccgccgtggcaaacctatgggccacgacgttgactttctgatcacgaatccgggcccgaaagaggatgacgagctgctccacaaagtggttgatctgctcaagaagcaaggtctgctgctgtacgaagacatcaaagagagcacgttcgtggaggggcaactgccaagtcgcaaaatcgacgccatggacaacttccagaagtgcttcgccattctcaagctgtaccagccgggcgtggataacagcagctataacacgagtaagaagagtgacatggccgaggttaaggattggaaagcgattcgtgtggatctggtgatcacgccattcgagcagtacgcctatgcgctgctcggttggacgggcagcaaagaatttcgtcgcgatctgcgccgctatgcggaggaagagcgcggcatgatcctcgacaaccatgccctctacgacctgaaaaagcgcatctttctgaaagcgggcagcgaagaagagattttcgcgcatctgggtctggattatgtggagccgtgggaacgcaacgcg

SEQ ID NO: 2100 - protein, 394 aa, synthetic construct
  REGION 1..394: note = Variant of terminal deoxynucleotidyl transferase
MHHHHHHGDSGHPISNTPEGEVPSVIAGPVSQYSCQRKTTLNNYNKKFTDALEIMAESYKFKENLIACLEAKRAASILKYLPFPVTSMKDIQGLPCITDQVRDVIEEIIEEGESSRVKEVLNDERYKAFKQFTSVFGVGVKTAEKWFRMGLRTVEEAKASKALKLSKMQKAGFLYYEDLASRVSKEEADVVTVIVKNTVRTFLPDALVTITGGFRRGKPMGHDVDFLITNPGPKEDDELLHKVVDLLKKQGLLLYEDIKESTFVEGQLPSRKIDAMDNFQKCFAILKLYQPGVDNSSYNTSKKSDMAEVKDWKAIRVDLVITPFEQYAYALLGWTGSKEFRRDLRRYAEEERGMILDNHALYDLKKRIFLKAGSEEEIFAHLGLDYVEPWERNA

SEQ ID NO: 2101 - DNA, 1182 bp, synthetic construct
  misc_feature 1..1182: note = Variant of terminal deoxynucleotidyl transferase
  source 1..1182: mol_type = other DNA
atgcaccatcatcatcatcatggcgatagcggccatccgattagcaataccccggagggggaggtgccgagcgttatcgcccgtccggttagtcagtacagctgccagcgcaagaccacgctgaataactacaacaaaaagtttaccgacgcgctggagatcatggccgagaactacaaatttaaagagaacctgatcgcgtgtctggaagccaagcgcgccgcgagtattctgaaatatctgccgttcccggttaccagcatgaaagacatccaaggtctgccgtgcattaccgaccaagttcgtgacgtgatcgaggagatcatcgaagagggcgagagcagccgtgttaaagaagttctcaatgacgagcgctacaaggcctttaagcagttcaccagcgtgttcggtgtgggcgtgaaaaccgcggaaaagtggtaccgtatgggcctccgtacggttgaagaagcaaaggccagtaagagtctgaagctgagcaagatgcagaaggcgggcctgctgtattacgaggatctggcgagccgcgttagtaaagaagaagccgatgccgttacgctcatcgtgaagaacacggtgcgtacctttctgccggatgcgctggtgaccatcaccggcggtttccgccgtggcaaacctatgggccacgacatcgactttctgatcacgaatccgggcccgaaagaggatgacgagctgctccacaaagtggttgatctgctcaagaagcaaggtctgctgctgtacgaagacatcaaagagagcacgttcgtggaggggcaactgccaagtcgcaaaatcgacgccatggacaacttccagaagtgcttcgccattctcaagctgtaccagccgggcgtggataacagcagctataacacgagtaagaagagtgacatggccgaggttaaggattggaaagcgattcgtgtggatctggtgatcacgccattcgagcagtacgcctatgcgctgctcggttggacgggcagcaaagaatttcgtcgcgatctgcgccgctatgcggaggaagagcgcggcatgatcctcgacaaccatgccctctacgacctgaaaaagcgcatctttctgaaagcgggcagcgaagaagagattttcgcgcatctgggtctggattatgtggagccgtgggaacgcaacgcg

SEQ ID NO: 2102 - protein, 394 aa, synthetic construct
  REGION 1..394: note = Variant of terminal deoxynucleotidyl transferase
MHHHHHHGDSGHPISNTPEGEVPSVIARPVSQYSCQRKTTLNNYNKKFTDALEIMAENYKFKENLIACLEAKRAASILKYLPFPVTSMKDIQGLPCITDQVRDVIEEIIEEGESSRVKEVLNDERYKAFKQFTSVFGVGVKTAEKWYRMGLRTVEEAKASKSLKLSKMQKAGLLYYEDLASRVSKEEADAVTLIVKNTVRTFLPDALVTITGGFRRGKPMGHDIDFLITNPGPKEDDELLHKVVDLLKKQGLLLYEDIKESTFVEGQLPSRKIDAMDNFQKCFAILKLYQPGVDNSSYNTSKKSDMAEVKDWKAIRVDLVITPFEQYAYALLGWTGSKEFRRDLRRYAEEERGMILDNHALYDLKKRIFLKAGSEEEIFAHLGLDYVEPWERNA

SEQ ID NO: 2103 - DNA, 1182 bp, synthetic construct
  misc_feature 1..1182: note = Variant of terminal deoxynucleotidyl transferase
  source 1..1182: mol_type = other DNA
atgcaccatcatcatcatcatggcgatagcggccatccgattagcaataccccggagggggaggtgccgagcgttatcgcccgtccggttagtcagtacagctgccagcgcaagaccacgctgaataactacaacaaaaagtttaccgacgcgctggagatcatggccgagaactacaaatttaaagagaacctgatcgcgtgtctggaagccaagcgcgccgcgagtattctgaaatatctgccgttcccggttaccagcatgaaagacatccaaggtctgccgtgcattaccgaccaagttcgtgacgtgatcgaggagatcatcgaagagggcgagagcagccgtgttaaagaagttctcaatgacgagcgctacaaggcctttaagcagttcaccagcgtgttcggtgtgggcgtgaaaaccgcggaaaagtggtaccgtatgggcctccgtacggttgaagaagcaaaggccagtaagagtctgaagctgagcaagatgcagaaggcgggcttcctgtattacgaggatctggcgagccgcgttagtaaagaagaagccgatgccgttacgctcatcgtgaagaacacggtgcgtacctttctgccggatgcgctggtgaccatcaccggcggtttccgccgtggcaaacctatgggccacgacatcgactttctgatcacgaatccgggcccgaaagaggatgacgagctgctccacaaagtggttgatctgctcaagaagcaaggtctgctgctgtacgaagacatcaaagagagcacgttcgtggaggggcaactgccaagtcgcaaaatcgacgccatggacaacttccagaagtgcttcgccattctcaagctgtaccagccgggcgtggataacagcagctataacacgagtaagaaaagtgacatggccgaggttaaggattggaaagcgattcgtgtggatctggtgatcacgccattcgagcagtacgcctatgcgctgctcggttggacgggcagcaaagaatttcgtcgcgatctgcgccgctatgcggaggaagagcgcggcatgatcctcgacaaccatgccctctacgacctgaaaaagcgcatctttctgaaagcgggcagcgaagaagagattttcgcgcatctgggtctggattatgtggagccgtgggaacgcaacgcg

SEQ ID NO: 2104 - protein, 394 aa, synthetic construct
  REGION 1..394: note = Variant of terminal deoxynucleotidyl transferase
MHHHHHHGDSGHPISNTPEGEVPSVIARPVSQYSCQRKTTLNNYNKKFTDALEIMAENYKFKENLIACLEAKRAASILKYLPFPVTSMKDIQGLPCITDQVRDVIEEIIEEGESSRVKEVLNDERYKAFKQFTSVFGVGVKTAEKWYRMGLRTVEEAKASKSLKLSKMQKAGFLYYEDLASRVSKEEADAVTLIVKNTVRTFLPDALVTITGGFRRGKPMGHDIDFLITNPGPKEDDELLHKVVDLLKKQGLLLYEDIKESTFVEGQLPSRKIDAMDNFQKCFAILKLYQPGVDNSSYNTSKKSDMAEVKDWKAIRVDLVITPFEQYAYALLGWTGSKEFRRDLRRYAEEERGMILDNHALYDLKKRIFLKAGSEEEIFAHLGLDYVEPWERNA

SEQ ID NO: 2105 - DNA, 1182 bp, synthetic construct
  misc_feature 1..1182: note = Variant of terminal deoxynucleotidyl transferase
  source 1..1182: mol_type = other DNA
atgcaccatcatcatcatcatggcgatagcggccatccgccgagcaataccccggagggggaggtgccgagcgttatcgcccgtccggttagtcagtacagctgccagcgcaagaccacgctgaataactacaacaaaaagtttaccgacgcgctggagatcatggccgagaactacaaatttaaagagaacctgatcgcgtgtctggaagccaagcgcgccgcgagtattctgaaatatctgccgttcccggttaccagcatgaaagacatccaaggtctgccgtgcattaccgaccaagttcgtgacgtgatcgaggagatcatcgaagagggcgagagcagccgtgttaaagaagttctcaatgacgagcgctacaaggcctttaagcagttcaccagcgtgttcggtgtgggcgtgaaaaccgcggaaaagtggtttcgtatgggcctccgtacggttgaagaagcaaaggccagtaaggcgctgaagctgagcaagatgcagaaggcgggcttcctgtattacgaggatctggcgagccgcgttagtaaagaagaagccgatgccgttacgctcatcgtgaagaacacggtgcgtacctttctgccggatgcgctggtgaccatcaccggcggtttccgccgtggcaaacctatgggccacgacgttgactttctgatcacgaatccgggcccgaaagaggatgacgagctgctccacaaagtggttgatctgctcaagaagcaaggtctgctgctgtacgaagacatcaaagagagcacgttcgtggaggggcaactgccaagtcgcaaaatcgacgccatggacaacttccagaagtgcttcgccattctcaagctgtaccagccgggcgtggataacagcagctataacacgagtaagaagagtgacatggccgaggttaaggattggaaagcgattcgtgtggatctggtgatcacgccattcgagcagtacgcctatgcgctgctcggttggacgggcagcaaagaatttcgtcgcgatctgcgccgctatgcggaggaagagcgcggcatgatcctcgacaaccatgccctctacgacctgaaaaagcgcatctttctgaaagcgggcagcgaagaagagattttcgcgcatctgggtctggattatgtggagccgtgggaacgcaacgcg

SEQ ID NO: 2106 - protein, 394 aa, synthetic construct
  REGION 1..394: note = Variant of terminal deoxynucleotidyl transferase
MHHHHHHGDSGHPPSNTPEGEVPSVIARPVSQYSCQRKTTLNNYNKKFTDALEIMAENYKFKENLIACLEAKRAASILKYLPFPVTSMKDIQGLPCITDQVRDVIEEIIEEGESSRVKEVLNDERYKAFKQFTSVFGVGVKTAEKWFRMGLRTVEEAKASKALKLSKMQKAGFLYYEDLASRVSKEEADAVTLIVKNTVRTFLPDALVTITGGFRRGKPMGHDVDFLITNPGPKEDDELLHKVVDLLKKQGLLLYEDIKESTFVEGQLPSRKIDAMDNFQKCFAILKLYQPGVDNSSYNTSKKSDMAEVKDWKAIRVDLVITPFEQYAYALLGWTGSKEFRRDLRRYAEEERGMILDNHALYDLKKRIFLKAGSEEEIFAHLGLDYVEPWERNA

SEQ ID NO: 2107 - DNA, 1182 bp, synthetic construct
  misc_feature 1..1182: note = Variant of terminal deoxynucleotidyl transferase
  source 1..1182: mol_type = other DNA
atgcaccatcatcatcatcatggcgatagcggccatccgattagcaataccccggagggggaggtgccgagcgttatcgcccgtccggttagtcagtacagctgccagcgcaagaccacgctgaataactacaacaaaaagtttaccgacgcgctggagatcatggccgagaactacaaatttaaagagaacctgatcgcgtgtctggaagccaagcgcgccgcgagtattctgaaatatctgccgttcccggttaccagcatgaaagacatccaaggtctgccgtgcattaccgaccaagttcgtgacgtgatcgaggagatcatcgaagagggcgagagcagccgtgttaaagaagttctcaatgacgagcgctacaaggcctttaagcagttcaccagcgtgttcggtgtgggcgtgaaaaccgcggaaaagtggttccgtatgggcctccgtacggttgaagaagcaaaggccagtaagtcgctgaagctgagcaagatgcagaaggcgggcctgctgtattacgaggatctggcgagccgcgttagtaaagaagaagccgatgctgttacggtgatcgtgaaggagacggtgcgtacctttctgccggatgcgctggtgaccatcaccggcggtttccgccgtggcaaacctatgggccacgacatcgactttctgatcacgaatccgggcccgaaagaggatgacgagctgctccacaaagtggttgatctgctcaagaagcaaggtctgctgctgtacgaagacatcaaagagagcacgttcgtggaggggcaactgccaagtcgcaaaatcgacgccatggacaacttccagaagtgcttcgccattctcaagctgtaccagccgggcgtggataacaatgcggttgggacgagtaagaaaagtgacatggccgaggttaaggattggaaagcgattcgtgtggatctggtgatcacgccattcgagcagtacgcctatgcgctgctcggttggacgggcagcaaagaatttcgtcgcgatctgcgccgctatgcggaggaagagcgcggcatgatcctcgacaaccatgccctctacgacctgaaaaagcgcatctttctgaaagcgggcagcgaagaagagattttcgcgcatctgggtctggattatgtggagccgtgggaacgcaacgcg

SEQ ID NO: 2108 - protein, 394 aa, synthetic construct
  REGION 1..394: note = Variant of terminal deoxynucleotidyl transferase
MHHHHHHGDSGHPISNTPEGEVPSVIARPVSQYSCQRKTTLNNYNKKFTDALEIMAENYKFKENLIACLEAKRAASILKYLPFPVTSMKDIQGLPCITDQVRDVIEEIIEEGESSRVKEVLNDERYKAFKQFTSVFGVGVKTAEKWFRMGLRTVEEAKASKSLKLSKMQKAGLLYYEDLASRVSKEEADAVTVIVKETVRTFLPDALVTITGGFRRGKPMGHDIDFLITNPGPKEDDELLHKVVDLLKKQGLLLYEDIKESTFVEGQLPSRKIDAMDNFQKCFAILKLYQPGVDNNAVGTSKKSDMAEVKDWKAIRVDLVITPFEQYAYALLGWTGSKEFRRDLRRYAEEERGMILDNHALYDLKKRIFLKAGSEEEIFAHLGLDYVEPWERNA

SEQ ID NO: 2109 - DNA, 1182 bp, synthetic construct
  misc_feature 1..1182: note = Variant of terminal deoxynucleotidyl transferase
  source 1..1182: mol_type = other DNA
atgcaccatcatcatcatcatggcgatagcggccatccgccgagcaataccccggagggggaggtgccgagcgttatcgcccgtccggttagtcagtacagctgccagcgcaagaccacgctgaataactacaacaaaaagtttaccgacgcgctggagatcatggccgaggattacaagtttaaagagaacctgatcgcgtgtctggaagcccagcgcgccgcgagtattctgaaatatctgccgttcccggttaccagcatgaaagacatccaaggtctgccgtgcattaccgaccaagttcgtgacgtgatcgaggagatcatcgaagagggcgagagcagccgtgttaaagaagttctcaatgacgagcgctacaaggcctttaagcagttcaccagcgtgttcggtgtgggcgtgaaaaccgcggaaaagtggtttcgtatgggcctccgtacggttgaagaagcaaaggccagtaagagtctgaagctgagcaagatgcagaaggcgggcttcctgtattacgaggatctggcgagccgcgttagtaaagaagaagccgatgccgttacgctcatcgtgaagaacacggtgcgtacctttctgccggatgcgctggtgaccatcgccggcggtttccgccgtggcaaacctatgggccacgacatcgactttctgatcacgaatccgggcccgaaagaggatgacgagctgctccacaaagtggttgatctgctcaagaagcaaggtctgctgctgtacgaagacatcaaagagagcacgttcgtggaggggcaactgccaagtcgcaaaatcgacgccatggacaacttccagaagtgcttcgccattctcaagctgtaccagccgggcgtggataacagcagctataacacgagtaagaagagtgacatggccgaggttaaggattggaaagcggttcgtgtggatctggtgatcacgccattcgagcagtacgcctatgcgctgctcggttggacgggcagcaaagaatttcgtcgcgatctgcgccgctatgcggaggaagagcgcggcatgatcctcgacaaccatgccctctacgacctgaaaaagcgcatctttctgaaagcgggcagcgaagaagagattttcgcgcatctgggtctggattatgtggagccgtgggaacgcaacgcg

SEQ ID NO: 2110 - protein, 394 aa, synthetic construct
  REGION 1..394: note = Variant of terminal deoxynucleotidyl transferase
MHHHHHHGDSGHPPSNTPEGEVPSVIARPVSQYSCQRKTTLNNYNKKFTDALEIMAEDYKFKENLIACLEAQRAASILKYLPFPVTSMKDIQGLPCITDQVRDVIEEIIEEGESSRVKEVLNDERYKAFKQFTSVFGVGVKTAEKWFRMGLRTVEEAKASKSLKLSKMQKAGFLYYEDLASRVSKEEADAVTLIVKNTVRTFLPDALVTIAGGFRRGKPMGHDIDFLITNPGPKEDDELLHKVVDLLKKQGLLLYEDIKESTFVEGQLPSRKIDAMDNFQKCFAILKLYQPGVDNSSYNTSKKSDMAEVKDWKAVRVDLVITPFEQYAYALLGWTGSKEFRRDLRRYAEEERGMILDNHALYDLKKRIFLKAGSEEEIFAHLGLDYVEPWERNA

SEQ ID NO: 2111 - DNA, 1182 bp, synthetic construct
  misc_feature 1..1182: note = Variant of terminal deoxynucleotidyl transferase
  source 1..1182: mol_type = other DNA
atgcaccatcatcatcatcatggcgatagcggccatccgccgagcaataccccggagggggaggtgccgagcgttatcgcccgtccggttagtcagtacagctgccagcgcaagaccacgctgaataactacaacaaaaagtttaccgacgcgctggagatcatggccgagaattacaagtttaaagagaacctgatcgcgtgtctggaagcccagcgcgccgcgagtattctgaaatatctgccgttcccggttaccagcatgaaagacatccaaggtctgccgtgcattaccgaccaagttcgtgacgtgatcgaggagatcatcgaagagggcgagagcagccgtgttaaagaagttctcaatgacgagcgctacaaggcctttaagcagttcaccagcgtgttcggtgtgggcgtgaaaaccgcggaaaagtggtttcgtatgggcctccgtacggttgaagaagcaaaggccagtaagagtctgaagctgagcaagatgcagaaggcgggcttcctgtattacgaggatctggcgagccgcgttagtaaagaagaagccgatgccgttacgctcatcgtgaagaacacggtgcgtacctttctgccggatgcgctggtgaccatcaccggcggtttccgccgtggcaaacctgtaggccacgacgtcgactttctgatcacgaatccgggcccgaaagaggatgacgagctgctccacaaagtggttgatctgctcaagaagcaaggtctgctgctgtacgaagacatcaaagagagcacgttcgtggaggggcaactgccaagtcgcaaaatcgacgccatggacaacttccagaagtgcttcgccattctcaagctgtaccagccgggcgtggataacagcagctataacacgagtaagaagagtgacatggccgaggttaaggattggaaagcgattcgtgtggatctggtgatcacgccattcgagcagtacgcctatgcgctgctcggttggacgggcagcaaagaatttcgtcgcgatctgcgccgctatgcggaggaagagcgcggcatgatcctcgacaaccatgccctctacgacctgaaaaagcgcatctttctgaaagcgggcagcgaagaagagattttcgcgcatctgggtctggattatgtggagccgtgggaacgcaacgcg

SEQ ID NO: 2112 - protein, 394 aa, synthetic construct
  REGION 1..394: note = Variant of terminal deoxynucleotidyl transferase
MHHHHHHGDSGHPPSNTPEGEVPSVIARPVSQYSCQRKTTLNNYNKKFTDALEIMAENYKFKENLIACLEAQRAASILKYLPFPVTSMKDIQGLPCITDQVRDVIEEIIEEGESSRVKEVLNDERYKAFKQFTSVFGVGVKTAEKWFRMGLRTVEEAKASKSLKLSKMQKAGFLYYEDLASRVSKEEADAVTLIVKNTVRTFLPDALVTITGGFRRGKPVGHDVDFLITNPGPKEDDELLHKVVDLLKKQGLLLYEDIKESTFVEGQLPSRKIDAMDNFQKCFAILKLYQPGVDNSSYNTSKKSDMAEVKDWKAIRVDLVITPFEQYAYALLGWTGSKEFRRDLRRYAEEERGMILDNHALYDLKKRIFLKAGSEEEIFAHLGLDYVEPWERNA

SEQ ID NO: 2113 - DNA, 1182 bp, synthetic construct
  misc_feature 1..1182: note = Variant of terminal deoxynucleotidyl transferase
  source 1..1182: mol_type = other DNA
atgcaccatcatcatcatcatggcgatagcggccatccgccgagcaataccccggagggggaggtgccgagcgttatcgcccgtccggttagtcagtacagctgccagcgcaagaccacgctgaataactacaacaaaaagtttaccgacgcgctggagatcatggccgagaactacaaatttaaagagaacctgatcgcgtgtctggaagccaagcgcgccgcgagtattctgaaatatctgccgttcccggttaccagcatgaaagacatccaaggtctgccgtgcattaccgaccaagttcgtgacgtgatcgaggagatcatcgaagagggcgagagcagccgtgttaaagaagttctcaatgacgagcgctacaaggcctttaagcagttcaccagcgtgttcggtgtgggcgtgaaaaccgcggaaaagtggtttcgtatgggcctccgtacggttgaagaagcaaaggccagtaagagtctgaagctgagcaagatgcagaaggcgggcttcctgtattacgaggatctggcgagccgcgttagtaaagaagaagccgatgccgttacgctcatcgtgaagaacacggtgcgtacctttctgccggatgcgctggtgaccatcaccggcggtttccgccgtggcaaacctatgggccacgacatcgactttctgatcacgaatccgggcggtaaagaggatgacgagctgctccacaaagtggttgatctgctcaagaagcaaggtctgctgctgtacgaagacatcaaagagagcacgttcgtggaggggcaactgccaagtcgcaaaatcgacgccatggacaacttccagaagtgcttcgccattctcaagctgtaccagccgggcgtggataacagcagctataacacgagtaagaagagtgacatggccgaggttaaggattggaaagcgattcgtgtggatctggtgatcacgccattcgagcagtacgcctatgcgctgctcggttggacgggcagcaaagaatttcgtcgcgatctgcgccgctatgcggaggaagagcgcggcatgatcctcgacaaccatgccctctacgacctgaaaaagcgcatctttctgaaagcgggcagcgaagaagagattttcgcgcatctgggtctggattatgtggagccgtgggaacgcaacgcg

SEQ ID NO: 2114 - protein, 394 aa, synthetic construct
  REGION 1..394: note = Variant of terminal deoxynucleotidyl transferase
MHHHHHHGDSGHPPSNTPEGEVPSVIARPVSQYSCQRKTTLNNYNKKFTDALEIMAENYKFKENLIACLEAKRAASILKYLPFPVTSMKDIQGLPCITDQVRDVIEEIIEEGESSRVKEVLNDERYKAFKQFTSVFGVGVKTAEKWFRMGLRTVEEAKASKSLKLSKMQKAGFLYYEDLASRVSKEEADAVTLIVKNTVRTFLPDALVTITGGFRRGKPMGHDIDFLITNPGGKEDDELLHKVVDLLKKQGLLLYEDIKESTFVEGQLPSRKIDAMDNFQKCFAILKLYQPGVDNSSYNTSKKSDMAEVKDWKAIRVDLVITPFEQYAYALLGWTGSKEFRRDLRRYAEEERGMILDNHALYDLKKRIFLKAGSEEEIFAHLGLDYVEPWERNA

SEQ ID NO: 2115 - DNA, 1182 bp, synthetic construct
  misc_feature 1..1182: note = Variant of terminal deoxynucleotidyl transferase
  source 1..1182: mol_type = other DNA
atgcaccatcatcatcatcatggcgatagcggccatccgccgagcaataccccggagggggaggtgccgagcgttatcgcccgtccggttagtcagtacagctgccagcgcaagaccacgctgaataactacaacaaaaagtttaccgacgcgctggagatcatggccgagaactacaaatttaaagagaacctgatcgcgtgtctggaagccaagcgcgccgcgagtgtgctgaaatatctgccgttcccggttaccagcatgaaagacatccaaggtctgccgtgcattaccgaccaagttcgtgacgtgatcgaggagatcatcgaagagggcgagagcagccgtgttaaagaagttctcaatgacgagcgctacaaggcctttaagcagttcaccagcgtgttcggtgtgggcgtgaaaaccgcggaaaagtggtttcgtatgggcctccgtacggttgaagaagcaaaggccagtaagagtctgaagctgagcaagatgcagaaggcgggcttcctgtattacgaggatctggcgagccgcgttagtaaagaagaagccgatgccgttacgctcatcgtgaagaacacggtgcgtacctttctgccggatgcgctggtgaccatcaccggcggtttccgccgtggcaaacctatgggccacgacatcgactttctgatcacgaatccgggcccgaaagaggatgacgagctgctccacaaagtggttgatctgctcaagaagcaaggtctgctgctgtacgaagacatcaaagagagcacgttcgtggaggggcaactgccaagtcgcaaaatcgacgccatggacaacttccagaagtgcttcgccattctcaagctgtaccagccgggcgtggataacagcagctataacacgagtaagaagagtgacatggccgaggttaaggattggaaagcgattcgtgtggatctggtgatcacgccattcgagcagtacgcctatgcgctgctcggttggacgggcagcaaagaatttcgtcgcgatctgcgccgctatgcggaggaagagcgcggcatgatcctcgacaaccatgccctctacgacctgaaaaagcgcatctttctgaaagcgggcagcgaagaagagattttcgcgcatctgggtctggattatgtggagccgtgggaacgcaacgcg

SEQ ID NO: 2116 - protein, 394 aa, synthetic construct
  REGION 1..394: note = Variant of terminal deoxynucleotidyl transferase
MHHHHHHGDSGHPPSNTPEGEVPSVIARPVSQYSCQRKTTLNNYNKKFTDALEIMAENYKFKENLIACLEAKRAASVLKYLPFPVTSMKDIQGLPCITDQVRDVIEEIIEEGESSRVKEVLNDERYKAFKQFTSVFGVGVKTAEKWFRMGLRTVEEAKASKSLKLSKMQKAGFLYYEDLASRVSKEEADAVTLIVKNTVRTFLPDALVTITGGFRRGKPMGHDIDFLITNPGPKEDDELLHKVVDLLKKQGLLLYEDIKESTFVEGQLPSRKIDAMDNFQKCFAILKLYQPGVDNSSYNTSKKSDMAEVKDWKAIRVDLVITPFEQYAYALLGWTGSKEFRRDLRRYAEEERGMILDNHALYDLKKRIFLKAGSEEEIFAHLGLDYVEPWERNA

SEQ ID NO: 2117 - DNA, 1182 bp, synthetic construct
  misc_feature 1..1182: note = Variant of terminal deoxynucleotidyl transferase
  source 1..1182: mol_type = other DNA
atgcaccatcatcatcatcatggcgatagcggccatccgccgagcaataccccggagggggaggtgccgagcgttatcgcccgtccggttagtcagtacagctgccagcgcaagaccacgctgaataactacaacaaaaagtttaccgacgcgctggagatcatggccgagaactacaaatttaaagagaacctgatcgcgtgtctggaagccaagcgcgccgcgagtattctgaaatatctgccgttcccggttaccagcatgaaagacatccaaggtctgccgtgcattaccgaccaagttcgtgacgtgatcgaggagatcatcgaagagggcgagagcagccgtgttaaagaagttctcaatgacgagcgctacaaggcctttaagcagttcaccagcgtgttcggtgtgggcgtgaaaaccgcggaaaagtggtaccgtatgggcctccgtacggttgaagaagcaaaggccagtaagagtctgaagctgagcaagatgcagaaggcgggcttcctgtattacgaggatctggcgagccgcgttagtaaagaagaagccgatgccgttacgctcatcgtgaagaacacggtgcgtacctttctgccggatgcgctggtgaccatcaccggcggtttccgccgtggcaaacctatgggccacgacatcgactttctgatcacgaatccgggcccgaaagaggatgacgagctgctccacaaagtggttgatctgctcaagaagcaaggtctgctgctgtacgaagacatcaaagagagcacgttcgtggaggggcaactgccaagtcgcaaaatcgacgccatggacaacttccagaagtgcttcgccattctcaagctgtaccagccgggcgtggataacagcagctataacacgagtaagaagagtgacatggccgaggttaaggattggaaagcgattcgtgtggatctggtgatcacgccattcgagcagtacgcctatgcgctgctcggttggacgggcagcaaagaatttcgtcgcgatctgcgccgctatgcggaggaagagcgcggcatgatcctcgacaaccatgccctctacgacctgaaaaagcgcatctttctgaaagcgggcagcgaagaagagattttcgcgcatctgggtctggattatgtggagccgtgggaacgcaacgcg

SEQ ID NO: 2118 - protein, 394 aa, synthetic construct
  REGION 1..394: note = Variant of terminal deoxynucleotidyl transferase
MHHHHHHGDSGHPPSNTPEGEVPSVIARPVSQYSCQRKTTLNNYNKKFTDALEIMAENYKFKENLIACLEAKRAASILKYLPFPVTSMKDIQGLPCITDQVRDVIEEIIEEGESSRVKEVLNDERYKAFKQFTSVFGVGVKTAEKWYRMGLRTVEEAKASKSLKLSKMQKAGFLYYEDLASRVSKEEADAVTLIVKNTVRTFLPDALVTITGGFRRGKPMGHDIDFLITNPGPKEDDELLHKVVDLLKKQGLLLYEDIKESTFVEGQLPSRKIDAMDNFQKCFAILKLYQPGVDNSSYNTSKKSDMAEVKDWKAIRVDLVITPFEQYAYALLGWTGSKEFRRDLRRYAEEERGMILDNHALYDLKKRIFLKAGSEEEIFAHLGLDYVEPWERNA

SEQ ID NO: 2119 - DNA, 1182 bp, synthetic construct
  misc_feature 1..1182: note = Variant of terminal deoxynucleotidyl transferase
  source 1..1182: mol_type = other DNA
atgcaccatcatcatcatcatggcgatagcggccatccgccgagcaataccccggagggggaggtgccgagcgttatcgcccgtccggttagtcagtacagctgccagcgcaagaccacgctgaataactacaacaaaaagtttaccgacgcgctggagatcatggccgagaactacaaatttaaagagaacctgatcgcgtgtctggaagccaagcgcgccgcgagtattctgaaatatctgccgttcccggttaccagcatgaaagacatccaaggtctgccgtgcattaccgaccaagttcgtgacgtgatcgaggagatcatcgaagagggcgagagcagccgtgttaaagaagttctcaatgacgagcgctacaaggcctttaagcagttcaccagcgtgttcggtgtgggcgtgaaaaccgcggaaaagtggtttcgtatgggcctccgtacggttgaagaagcaaaggccagtaagagtctgaagctgagcaagatgcagaaggcgggcttcctgtattacgaggatctggcgagccgcgttagtaaagaagaagccgatgccgttacgctcatcgtgaagaacacggtgcgtacctttctgccggatgcgctggtgaccatcaccggcggtttccgccgtggcaaacctatgggccacgacatcgactttctgatcacgaatccgggcaggaaagaggatgacgagctgctccacaaagtggttgatctgctcaagaagcaaggtctgctgctgtacgaagacatcaaagagagcacgttcgtggaggggcaactgccaagtcgcaaaatcgacgccatggacaacttccagaagtgcttcgccattctcaagctgtaccagccgggcgtggataacagcagctataacacgagtaagaagagtgacatggccgaggttaaggattggaaagcgattcgtgtggatctggtgatcacgccattcgagcagtacgcctatgcgctgctcggttggacgggcagcaaagaatttcgtcgcgatctgcgccgctatgcggaggaagagcgcggcatgatcctcgacaaccatgccctctacgacctgaaaaagcgcatctttctgaaagcgggcagcgaagaagagattttcgcgcatctgggtctggattatgtggagccgtgggaacgcaacgcg

SEQ ID NO: 2120 - protein, 394 aa, synthetic construct
  REGION 1..394: note = Variant of terminal deoxynucleotidyl transferase
MHHHHHHGDSGHPPSNTPEGEVPSVIARPVSQYSCQRKTTLNNYNKKFTDALEIMAENYKFKENLIACLEAKRAASILKYLPFPVTSMKDIQGLPCITDQVRDVIEEIIEEGESSRVKEVLNDERYKAFKQFTSVFGVGVKTAEKWFRMGLRTVEEAKASKSLKLSKMQKAGFLYYEDLASRVSKEEADAVTLIVKNTVRTFLPDALVTITGGFRRGKPMGHDIDFLITNPGRKEDDELLHKVVDLLKKQGLLLYEDIKESTFVEGQLPSRKIDAMDNFQKCFAILKLYQPGVDNSSYNTSKKSDMAEVKDWKAIRVDLVITPFEQYAYALLGWTGSKEFRRDLRRYAEEERGMILDNHALYDLKKRIFLKAGSEEEIFAHLGLDYVEPWERNA

SEQ ID NO: 2121 - DNA, 1182 bp, synthetic construct
  misc_feature 1..1182: note = Variant of terminal deoxynucleotidyl transferase
  source 1..1182: mol_type = other DNA
atgcaccatcatcatcatcatggcgatagcggccatccgccgagcaataccccggagggggaggtgccgagcgttatcgcccgtccggttagtcagtacagctgccagcgcaagaccacgctgaataactacaacaaaaagtttaccgacgcgctggagatcatggccgagaactacaaatttaaagagaacctgatcgcgtgtctggaagccaagcgcgccgcgagtattctgaaatatctgccgttcccggttaccagcatgaaagacatccaaggtctgccgtgcattaccgaccaagttcgtgacgtgatcgaggagatcatcgaagagggcgagagcagccgtgttaaagaagttctcaatgacgagcgctacaaggcctttaagcagttcaccagcgtgttcggtgtgggcgtgaaaaccgcggaaaagtggtttcgtatgggcctccgtacggttgaagaagcaaaggccagtaagagtctgaagctgagcaagatgcagaaggcgggcttcctgtattacgaggatctggcgagccgcgttagtaaagaagaagccgatgccgttacgctcatcgtgaagaacacggtgcgtacctttctgccggatgcgctggtgaccatcaccggcggtttccgccgtggcaaacctgtaggccacgacatcgactttctgatcacgaatccgggcccgaaagaggatgacgagctgctccacaaagtggttgatctgctcaagaagcaaggtctgctgctgtacgaagacatcaaagagagcacgttcgtggaggggcaactgccaagtcgcaaaatcgacgccatggacaacttccagaagtgcttcgccattctcaagctgtaccagccgggcgtggataacagcagctataacacgagtaagaagagtgacatggccgaggttaaggattggaaagcggttcgtgtggatctggtgatcacgccattcgagcagtacgcctatgcgctgctcggttggacgggcagcaaagaatttcgtcgcgatctgcgccgctatgcggaggaagagcgcggcatgatcctcgacaaccatgccctctacgacctgaaaaagcgcatctttctgaaagcgggcagcgaagaagagattttcgcgcatctgggtctggattatgtggagccgtgggaacgcaacgcg

SEQ ID NO: 2122 - protein, 394 aa, synthetic construct
  REGION 1..394: note = Variant of terminal deoxynucleotidyl transferase
MHHHHHHGDSGHPPSNTPEGEVPSVIARPVSQYSCQRKTTLNNYNKKFTDALEIMAENYKFKENLIACLEAKRAASILKYLPFPVTSMKDIQGLPCITDQVRDVIEEIIEEGESSRVKEVLNDERYKAFKQFTSVFGVGVKTAEKWFRMGLRTVEEAKASKSLKLSKMQKAGFLYYEDLASRVSKEEADAVTLIVKNTVRTFLPDALVTITGGFRRGKPVGHDIDFLITNPGPKEDDELLHKVVDLLKKQGLLLYEDIKESTFVEGQLPSRKIDAMDNFQKCFAILKLYQPGVDNSSYNTSKKSDMAEVKDWKAVRVDLVITPFEQYAYALLGWTGSKEFRRDLRRYAEEERGMILDNHALYDLKKRIFLKAGSEEEIFAHLGLDYVEPWERNA

SEQ ID NO: 2123 - DNA, 1182 bp, synthetic construct
  misc_feature 1..1182: note = Variant of terminal deoxynucleotidyl transferase
  source 1..1182: mol_type = other DNA
atgcaccatcatcatcatcatggcgatagcggccatccgccgagcaataccccggagggggaggtgccgagcgttatcgccgggccggttagtcagtacagctgccagcgcaagaccacgctgaataactacaacaaaaagtttaccgacgcgctggagatcatggccgagaactacaaatttaaagagaacctgatcgcgtgtctggaagccaagcgcgccgcgagtattctgaaatatctgccgttcccggttaccagcatgaaagacatccaaggtctgccgtgcattaccgaccaagttcgtgacgtgatcgaggagatcatcgaagagggcgagagcagccgtgttaaagaagttctcaatgacgagcgctacaaggcctttaagcagttcaccagcgtgttcggtgtgggcgtgaaaaccgcggaaaagtggtttcgtatgggcctccgtacggttgaagaagcaaaggccagtaagtcgctgaagctgagcaagatgcagaaggcgggcttcctgtattacgaggatctggcgagccgcgttagtaaagaagaagccgatgccgttacgctcatcgtgaagaacacggtgcgtacctttctgccggatgcgctggtgaccatcaccggcggtttccgccgtggcaaacctatgggccacgacatcgactttctgatcacgaatccgggcccgaaagaggatgacgagctgctccacaaagtggttgatctgctcaagaagcaaggtctgctgctgtacgaagacatcaaagagagcacgttcgtggaggggcaactgccaagtcgcaaaatcgacgccatggacaacttccagaagtgcttcgccattctcaagctgtaccagccgggcgtggataacaattcggttaatacgagtaagaaaagtgacatggccgaggttaaggattggaaagcgattcgtgtggatctggtgatcacgccattcgagcagtacgcctatgcgctgctcggttggacgggcagcaaagaatttcgtcgcgatctgcgccgctatgcggaggaagagcgcggcatgatcctcgacaaccatgccctctacgacctgaaaaagcgcatctttctgaaagcgggcagcgaagaagagattttcgcgcatctgggtctggattatgtggagccgtgggaacgcaacgcg

SEQ ID NO: 2124 - protein, 394 aa, synthetic construct
  REGION 1..394: note = Variant of terminal deoxynucleotidyl transferase
MHHHHHHGDSGHPPSNTPEGEVPSVIAGPVSQYSCQRKTTLNNYNKKFTDALEIMAENYKFKENLIACLEAKRAASILKYLPFPVTSMKDIQGLPCITDQVRDVIEEIIEEGESSRVKEVLNDERYKAFKQFTSVFGVGVKTAEKWFRMGLRTVEEAKASKSLKLSKMQKAGFLYYEDLASRVSKEEADAVTLIVKNTVRTFLPDALVTITGGFRRGKPMGHDIDFLITNPGPKEDDELLHKVVDLLKKQGLLLYEDIKESTFVEGQLPSRKIDAMDNFQKCFAILKLYQPGVDNNSVNTSKKSDMAEVKDWKAIRVDLVITPFEQYAYALLGWTGSKEFRRDLRRYAEEERGMILDNHALYDLKKRIFLKAGSEEEIFAHLGLDYVEPWERNA

SEQ ID NO: 2125 - DNA, 1182 bp, synthetic construct
  misc_feature 1..1182: note = Variant of terminal deoxynucleotidyl transferase
  source 1..1182: mol_type = other DNA
atgcaccatcatcatcatcatggcgatagcggccatccgccgagcaataccccggagggggaggtgccgagcgttatcgcccgtccggttagtcagtacagctgccagcgcaagaccacgctgaataactacaacaaaaagtttaccgacgcgctggagatcatggccgagaactacaaatttaaagagaacctgatcgcgtgtctggaagccgggcgcgccgcgagtattctgaaatatctgccgttcgaagttaccagcatgaaagacatccaaggtctgccgtgcattaccgaccaagttcgtgacgtgatcgaggagatcatcgaagagggcgagagcagccgtgttaaagaagttctcaatgacgagcgctacaaggcctttaagcagttcaccagcgtgttcggtgtgggcgtgaaaaccgcggaaaagtggtttcgtatgggcctccgtacggttgaagaagcaaaggccagtaagagtctgaagctgagcaagatgcagaaggcgggcttcctgtattacgaggatctggcgagccgcgttagtaaagaagaagccgatgccgttacgctcatcgtgaagaacacggtgcgtacctttctgccggatgcgctggtgaccatcactggcggtttccgccgtggcaaacctgtaggccacgacgtcgactttctgatcacgaatccgggcccgaaagaggatgacgagctgctccacaaagtggttgatctgctcaagaagcaaggtctgctgctgtacgaagacatcaaagagagcacgttcgtggaggggcaactgccaagtcgcaaaatcgacgccatggacaacttccagaagtgcttcgccattctcaagctgtaccagccgggcgtggataacagcagctataacacgagtaagaagagtgacatggccgaggttaaggattggaaagcggttcgtgtggatctggtgatcacgccattcgagcagtacgcctatgcgctgctcggttggacgggcagcaaagaatttcgtcgcgatctgcgccgctatgcggaggaagagcgcggcatgatcctcgacaaccatgccctctacgacctgaaaaagcgcatctttctgaaagcgggcagcgaagaagagattttcgcgcatctgggtctggattatgtggagccgtgggaacgcaacgcg

SEQ ID NO: 2126 - protein, 394 aa, synthetic construct
  REGION 1..394: note = Variant of terminal deoxynucleotidyl transferase
MHHHHHHGDSGHPPSNTPEGEVPSVIARPVSQYSCQRKTTLNNYNKKFTDALEIMAENYKFKENLIACLEAGRAASILKYLPFEVTSMKDIQGLPCITDQVRDVIEEIIEEGESSRVKEVLNDERYKAFKQFTSVFGVGVKTAEKWFRMGLRTVEEAKASKSLKLSKMQKAGFLYYEDLASRVSKEEADAVTLIVKNTVRTFLPDALVTITGGFRRGKPVGHDVDFLITNPGPKEDDELLHKVVDLLKKQGLLLYEDIKESTFVEGQLPSRKIDAMDNFQKCFAILKLYQPGVDNSSYNTSKKSDMAEVKDWKAVRVDLVITPFEQYAYALLGWTGSKEFRRDLRRYAEEERGMILDNHALYDLKKRIFLKAGSEEEIFAHLGLDYVEPWERNA

SEQ ID NO: 2127 - DNA, 1182 bp, synthetic construct
  misc_feature 1..1182: note = Variant of terminal deoxynucleotidyl transferase
  source 1..1182: mol_type = other DNA
atgcaccatcatcatcatcatggcgatagcggccatccgccgagcaataccccggagggggaggtgccgagcgttatcgcccgtccggttagtcagtacagctgccagcgcaagaccacgctgaataactacaacaaaaagtttaccgacgcgctggagatcatggccgagaactacaaatttaaagagaacctgatcgcgtgtctggaagccaagcgcgccgcgagtattctgaaatatctgccgttcccggttaccagcatgaaagacatccaaggtctgccgtgcattaccgacgatgttcgtgacgtgatcgaggagatcatcgaagagggcgagagcagccgtgttaaagaagttctcaatgacgagcgctacaaggcctttaagcagttcaccagcgtgttcggtgtgggcgtgaaaaccgcggaaaagtggtttcgtatgggcctccgtacggttgaagaagcaaaggccagtaagagtctgaagctgagcaagatgcagaaggcgggcttcctgtattacgaggatctggcgagccgcgttagtaaagaagaagccgatgccgttacgctcatcgtgaagaacacggtgcgtacctttctgccggatgcgctggtgaccatcaccggcggtttccgccgtggcaaacctatgggccacgacatcgactttctgatcacgaatccgggcccgaaagaggatgacgagctgctccacaaagtggttgatctgctcaagaagcaaggtctgctgctgtacgaagacatcaaagagagcacgttcgtggaggggcaactgccaagtcgcaaaatcgacgccatggacaacttccagaagtgcttcgccattctcaagctgtaccagccgggcgtggataacagcagctataacacgagtaagaagagtgacatggccgaggttaaggattggaaagcgattcgtgtggatctggtgatcacgccattcgagcagtacgcctatgcgctgctcggttggacgggcagcaaagaatttcgtcgcgatctgcgccgctatgcggaggaagagcgcggcatgatcctcgacaaccatgccctctacgacctgaaaaagcgcatctttctgaaagcgggcagcgaagaagagattttcgcgcatctgggtctggattatgtggagccgtgggaacgcaacgcg

SEQ ID NO: 2128 - protein, 394 aa, synthetic construct
  REGION 1..394: note = Variant of terminal deoxynucleotidyl transferase
MHHHHHHGDSGHPPSNTPEGEVPSVIARPVSQYSCQRKTTLNNYNKKFTDALEIMAENYKFKENLIACLEAKRAASILKYLPFPVTSMKDIQGLPCITDDVRDVIEEIIEEGESSRVKEVLNDERYKAFKQFTSVFGVGVKTAEKWFRMGLRTVEEAKASKSLKLSKMQKAGFLYYEDLASRVSKEEADAVTLIVKNTVRTFLPDALVTITGGFRRGKPMGHDIDFLITNPGPKEDDELLHKVVDLLKKQGLLLYEDIKESTFVEGQLPSRKIDAMDNFQKCFAILKLYQPGVDNSSYNTSKKSDMAEVKDWKAIRVDLVITPFEQYAYALLGWTGSKEFRRDLRRYAEEERGMILDNHALYDLKKRIFLKAGSEEEIFAHLGLDYVEPWERNA

SEQ ID NO: 2129 - DNA, 1182 bp, synthetic construct
  misc_feature 1..1182: note = Variant of terminal deoxynucleotidyl transferase
  source 1..1182: mol_type = other DNA
atgcaccatcatcatcatcatggcgatagcggccatccgccgagcaataccccggagggggaggtgccgagcgttatcgcccgtccggttagtcagtacagctgccagcgcaagaccacgctgaataactacaacaaaaagtttaccgacgcgctggagatcatggccgagaattacaagtttaaagagaacctgatcgcgtgtctggaagcccagcgcgccgcgagtattctgaaatatctgccgttcccggttaccagcatgaaagacatccaaggtctgccgtgcattaccgaccaagttcgtgacgtgatcgaggagatcatcgaagagggcgagagcagccgtgttaaagaagttctcaatgacgagcgctacaaggcctttaagcagttcaccagcgtgttcggtgtgggcgtgaaaaccgcggaaaagtggtttcgtatgggcctccgtacggttgaagaagcaaaggccagtaagagtctgaagctgagcaagatgcagaaggcgggcttcctgtattacgaggatctggcgagccgcgttagtaaagaagaagccgatgccgttacgctcatcgtgaagaacacggtgcgtacctttctgccggatgcgctggtgaccatcaccggcggtttccgccgtggcaaacctgtaggccacgacatcgactttctgatcacgaatccgggcccgaaagaggatgacgagctgctccacaaagtggttgatctgctcaagaagcaaggtctgctgctgtacgaagacatcaaagagagcacgttcgtggaggggcaactgccaagtcgcaaaatcgacgccatggacaacttccagaagtgcttcgccattctcaagctgtaccagccgggcgtggataacagcagctataacacgagtaagaagagtgacatggccgaggttaaggattggaaagcggttcgtgtggatctggtgatcacgccattcgagcagtacgcctatgcgctgctcggttggacgggcagcaaagaatttcgtcgcgatctgcgccgctatgcggaggaagagcgcggcatgatcctcgacaaccatgccctctacgacctgaaaaagcgcatctttctgaaagcgggcagcgaagaagagattttcgcgcatctgggtctggattatgtggagccgtgggaacgcaacgcg

SEQ ID NO: 2130 - protein, 394 aa, synthetic construct
  REGION 1..394: note = Variant of terminal deoxynucleotidyl transferase
MHHHHHHGDSGHPPSNTPEGEVPSVIARPVSQYSCQRKTTLNNYNKKFTDALEIMAENYKFKENLIACLEAQRAASILKYLPFPVTSMKDIQGLPCITDQVRDVIEEIIEEGESSRVKEVLNDERYKAFKQFTSVFGVGVKTAEKWFRMGLRTVEEAKASKSLKLSKMQKAGFLYYEDLASRVSKEEADAVTLIVKNTVRTFLPDALVTITGGFRRGKPVGHDIDFLITNPGPKEDDELLHKVVDLLKKQGLLLYEDIKESTFVEGQLPSRKIDAMDNFQKCFAILKLYQPGVDNSSYNTSKKSDMAEVKDWKAVRVDLVITPFEQYAYALLGWTGSKEFRRDLRRYAEEERGMILDNHALYDLKKRIFLKAGSEEEIFAHLGLDYVEPWERNA

SEQ ID NO: 2131 - DNA, 1182 bp, synthetic construct
  misc_feature 1..1182: note = Variant of terminal deoxynucleotidyl transferase
  source 1..1182: mol_type = other DNA
atgcaccatcatcatcatcatggcgatagcggccatccgattagcaataccccggagggggaggtgccgagcgttatcgcccgtccggttagtcagtacagctgccagcgcaagaccacgctgaataactacaacaaaaagtttaccgacgcgctggagatcatggccgagagctacaaatttaaagagaacctgatcgcgtgtctggaagccaagcgcgccgcgagtattctgaaatatctgccgttcccggttaccagcatgaaagacatccaaggtctgccgtgcattaccgaccaagttcgtgacgtgatcgaggagatcatcgaagagggcgagagcagccgtgttaaagaagttctcaatgacgagcgctacaaggcctttaagcagttcaccagcgtgttcggtgtgggcgtgaaaaccgcggaaaagtggtttcgtatgggcctccgtacggttgaagaagcacgcgccagtaagtcgctgaagctgagcaagatgcagaaggcgggctttctgtattacgaggatctggcgagccgcgttagtaaagaagaagccgatgccgttacgctcatcgtgaagaacacggtgcgtacctttctgccggatgcgctggtgaccatcaccggcggtttccgccgtggcaaacctatgggccacgacgttgactttctgatcacgaatccgggcccgaaagaggatgacgagctgctccacaaagtggttgatctgctcaagaagcaaggtctgctgctgtacgaagacatcaaagagagcacgttcgtggaggggcaactgccaagtcgcaaaatcgacgccatggacaacttccagaagtgcttcgccattctcaagctgtaccagccgggcgtggataacagcagctataacacgagtaagaagagtgacatggccgaggttaaggattggaaagcgattcgtgtggatctggtgatcacgccattcgagcagtacgcctatgcgctgctcggttggacgggcagcaaagaatttcgtcgcgatctgcgccgctatgcggaggaagagcgcggcatgatcctcgacaaccatgccctctacgacctgaaaaagcgcatctttctgaaagcgggcagcgaagaagagattttcgcgcatctgggtctggattatgtggagccgtgggaacgcaacgcg

SEQ ID NO: 2132 - protein, 394 aa, synthetic construct
  REGION 1..394: note = Variant of terminal deoxynucleotidyl transferase
MHHHHHHGDSGHPISNTPEGEVPSVIARPVSQYSCQRKTTLNNYNKKFTDALEIMAESYKFKENLIACLEAKRAASILKYLPFPVTSMKDIQGLPCITDQVRDVIEEIIEEGESSRVKEVLNDERYKAFKQFTSVFGVGVKTAEKWFRMGLRTVEEARASKSLKLSKMQKAGFLYYEDLASRVSKEEADAVTLIVKNTVRTFLPDALVTITGGFRRGKPMGHDVDFLITNPGPKEDDELLHKVVDLLKKQGLLLYEDIKESTFVEGQLPSRKIDAMDNFQKCFAILKLYQPGVDNSSYNTSKKSDMAEVKDWKAIRVDLVITPFEQYAYALLGWTGSKEFRRDLRRYAEEERGMILDNHALYDLKKRIFLKAGSEEEIFAHLGLDYVEPWERNA

SEQ ID NO: 2133 - DNA, 1182 bp, synthetic construct
  misc_feature 1..1182: note = Variant of terminal deoxynucleotidyl transferase
  source 1..1182: mol_type = other DNA
atgcaccatcatcatcatcatggcgatagcggccatccgccgagcaataccccggagggggaggtgccgagcgttatcgcccgtccggttagtcagtacagctgccagcgcaagaccacgctgaataactacaacaaaaagtttaccgacgcgctggagatcatggccgagaactacaaatttaaagagaacctgatcgcgtgtctggaagccaagcgcgccgcgagtattctgaaatatctgccgttcccggttaccagcatgaaagacatccaaggtctgccgtgcattaccgaccaagttcgtgacgtgatcgaggagatcatcgaagagggcgagagcagccgtgttaaagaagttctcaatgacgagcgctacaaggcctttaagcagttcaccagcgtgttcggtgtgggcgtgaaaaccgcggaaaagtggtttcgtatgggcctccgtacggttgaagaagcaaaggccagtaagagtctgaagctgagcaagatgcagaaggcgggcctgctgtattacgaggatctggcgagccgcgttagtaaagaagaagccgatgccgttacgctcatcgtgaagaacacggtgcgtacctttctgccggatgcgctggtgaccatcaccggcggtttccgccgtggcaaacctatgggccacgacatcgactttctgatcacgaatccgggcccgaaagaggatgacgagctgctccacaaagtggttgatctgctcaagaagcaaggtctgctgctgtacgaagacatcaaagagagcacgttcgtggaggggcaactgccaagtcgcaaaatcgacgccatggacaacttccagaagtgcttcgccattctcaagctgtaccagccgggcgtggataacagcagctataacacgagtaagaagagtgacatggccgaggttaaggattggaaagcgattcgtgtggatctggtgatcacgccattcgagcagtacgcctatgcgctgctcggttggacgggcagcaaagaatttcgtcgcgatctgcgccgctatgcggaggaagagcgcggcatgatcctcgacaaccatgccctctacgacctgaaaaagcgcatctttctgaaagcgggcagcgaagaagagattttcgcgcatctgggtctggattatgtggagccgtgggaacgcaacgcg

SEQ ID NO: 2134 - protein, 394 aa, synthetic construct
  REGION 1..394: note = Variant of terminal deoxynucleotidyl transferase
MHHHHHHGDSGHPPSNTPEGEVPSVIARPVSQYSCQRKTTLNNYNKKFTDALEIMAENYKFKENLIACLEAKRAASILKYLPFPVTSMKDIQGLPCITDQVRDVIEEIIEEGESSRVKEVLNDERYKAFKQFTSVFGVGVKTAEKWFRMGLRTVEEAKASKSLKLSKMQKAGLLYYEDLASRVSKEEADAVTLIVKNTVRTFLPDALVTITGGFRRGKPMGHDIDFLITNPGPKEDDELLHKVVDLLKKQGLLLYEDIKESTFVEGQLPSRKIDAMDNFQKCFAILKLYQPGVDNSSYNTSKKSDMAEVKDWKAIRVDLVITPFEQYAYALLGWTGSKEFRRDLRRYAEEERGMILDNHALYDLKKRIFLKAGSEEEIFAHLGLDYVEPWERNA

SEQ ID NO: 2135 - DNA, 1182 bp, synthetic construct
  misc_feature 1..1182: note = Variant of terminal deoxynucleotidyl transferase
  source 1..1182: mol_type = other DNA
atgcaccatcatcatcatcatggcgatagcggccatccgccgagcaataccccggagggggaggtgccgagcgttatcgcccgtccggttagtcagtacagctgccagcgcaagaccacgctgaataactacaacaaaaagtttaccgacgcgctggagatcatggccgagaactacaaatttaaagagaacctgatcgcgtgtctggaagccaagcgcgccgcgagtattctgaaatatctgccgttcccggttaccagcatgaaagacatccaaggtctgccgtgcattaccgaccaagttcgtgacgtgatcgaggagatcatcgaagagggcgagagcagccgtgttaaagaagttctcaatgacgagcgctacaaggcctttaagcagttcaccagcgtgttcggtgtgggcgtgaaaaccgcggaaaagtggtttcgtatgggcctccgtacggttgaagaagcaaaggccagtaagagtctgaagctgagcaagatgcagaaggcgggcttcctgtattacgaggatctggcgagccgcgttagtaaagaagaagccgatgttgttacggtgatcgtgaaggagacggtgcgtacctttctgccggatgcgctggtgaccatcaccggcggtttccgccgtggcaaacctatgggccacgacatcgactttctgatcacgaatccgggcccgaaagaggatgacgagctgctccacaaagtggttgatctgctcaagaagcaaggtctgctgctgtacgaagacatcaaagagagcacgttcgtggaggggcaactgccaagtcgcaaaatcgacgccatggacaacttccagaagtgcttcgccattctcaagctgtaccagccgggcgtggataacagcagctataacacgagtaagaagagtgacatggccgaggttaaggattggaaagcgattcgtgtggatctggtgatcacgccattcgagcagtacgcctatgcgctgctcggttggacgggcagcaaagaatttcgtcgcgatctgcgccgctatgcggaggaagagcgcggcatgatcctcgacaaccatgccctctacgacctgaaaaagcgcatctttctgaaagcgggcagcgaagaagagattttcgcgcatctgggtctggattatgtggagccgtgggaacgcaacgcg

SEQ ID NO: 2136 - protein, 394 aa, synthetic construct
  REGION 1..394: note = Variant of terminal deoxynucleotidyl transferase
MHHHHHHGDSGHPPSNTPEGEVPSVIARPVSQYSCQRKTTLNNYNKKFTDALEIMAENYKFKENLIACLEAKRAASILKYLPFPVTSMKDIQGLPCITDQVRDVIEEIIEEGESSRVKEVLNDERYKAFKQFTSVFGVGVKTAEKWFRMGLRTVEEAKASKSLKLSKMQKAGFLYYEDLASRVSKEEADVVTVIVKETVRTFLPDALVTITGGFRRGKPMGHDIDFLITNPGPKEDDELLHKVVDLLKKQGLLLYEDIKESTFVEGQLPSRKIDAMDNFQKCFAILKLYQPGVDNSSYNTSKKSDMAEVKDWKAIRVDLVITPFEQYAYALLGWTGSKEFRRDLRRYAEEERGMILDNHALYDLKKRIFLKAGSEEEIFAHLGLDYVEPWERNA

SEQ ID NO: 2137 - DNA, 1182 bp, synthetic construct
  misc_feature 1..1182: note = Variant of terminal deoxynucleotidyl transferase
  source 1..1182: mol_type = other DNA
atgcaccatcatcatcatcatggcgatagcggccatccgccgagcaataccccggagggggaggtgccgagcgttatcgcccgtccggttagtcagtacagctgccagcgcaagaccacgctgaataactacaacaaaaagtttaccgacgcgctggagatcatggccgagaactacaaatttaaagagaacctgatcgcgtgtctggaagccaagcgcgccgcgagtattctgaaatatctgccgttcccggttaccagcatgaaagacatccaaggtctgccgtgcattaccgaccaagttcgtgacgtgatcgaggagatcatcgaagagggcgagagcagccgtgttaaagaagttctcaatgacgagcgctacaaggcctttaagcagttcaccagcgtgttcggtgtgggcgtgaaaaccgcggaaaagtggtttcgtatgggcctccgtacggttgaagaagcaaaggccagtaagagtctgaagctgagcaagatgcagaaggcgggcttcctgtattacgaggatctggcgagccgcgttagtaaagaagaagccgatgccgttacgctcatcgtgaagaacacggtgcgtacctttctgccggatgcgctggtgaccatcaccggcggtttccgccgtggcaaacctatgggccacgacatcgactttctgatcacgaatccgggcccgaaagaggatgacgagctgctccacaaagtggttgatctgctcaagaagcaaggtctgctgctgtacgaagacatcaaagagagcacgttcgtggaggggcaactgccaagtcgcaaaatcgacgccatggacaacttccagaagtgcttcgccattctcaagctgtaccagccgggcgtggataacagcagctataacacgagtaagaagagtgacatggccgaggttaaggattggaaagcgattcgtgtggatctggtgatcacgccattcgagcagtacgcctatgcgctgctcggttggacgggcagcaaagaatttcgtcgcgatctgcgccgctatgcggaggaagagcgcggcatgatcctcgacaaccatgccctctacgacctgaaaaagaagatctttctgaaagcgggcagcgaagaagagattttcgcgcatctgggtctggattatgtggagccgtgggaacgcaacgcg

SEQ ID NO: 2138 - protein, 394 aa, synthetic construct
  REGION 1..394: note = Variant of terminal deoxynucleotidyl transferase
MHHHHHHGDSGHPPSNTPEGEVPSVIARPVSQYSCQRKTTLNNYNKKFTDALEIMAENYKFKENLIACLEAKRAASILKYLPFPVTSMKDIQGLPCITDQVRDVIEEIIEEGESSRVKEVLNDERYKAFKQFTSVFGVGVKTAEKWFRMGLRTVEEAKASKSLKLSKMQKAGFLYYEDLASRVSKEEADAVTLIVKNTVRTFLPDALVTITGGFRRGKPMGHDIDFLITNPGPKEDDELLHKVVDLLKKQGLLLYEDIKESTFVEGQLPSRKIDAMDNFQKCFAILKLYQPGVDNSSYNTSKKSDMAEVKDWKAIRVDLVITPFEQYAYALLGWTGSKEFRRDLRRYAEEERGMILDNHALYDLKKKIFLKAGSEEEIFAHLGLDYVEPWERNA

SEQ ID NO: 2139 - DNA, 1182 bp, synthetic construct
  misc_feature 1..1182: note = Variant of terminal deoxynucleotidyl transferase
  source 1..1182: mol_type = other DNA
atgcaccatcatcatcatcatggcgatagcggccatccgccgagcaataccccggagggggaggtgccgagcgttatcgccgggccggttagtcagtacagctgccagcgcaagaccacgctgaataactacaacaaaaagtttaccgacgcgctggagatcatggccgagaactacaaatttaaagagaacctgatcgcgtgtctggaagccaagcgcgccgcgagtattctgaaatatctgccgttcccggttaccagcatgaaagacatccaaggtctgccgtgcattaccgaccaagttcgtgacgtgatcgaggagatcatcgaagagggcgagagcagccgtgttaaagaagttctcaatgacgagcgctacaaggcctttaagcagttcaccagcgtgttcggtgtgggcgtgaaaaccgcggaaaagtggtttcgtatgggcctccgtacggttgaagaagcaaaggccagtaagagtctgaagctgagcaagatgcagaaggcgggcttcctgtattacgaggatctggcgagccgcgttagtaaagaagaagccgatgccgttacgctcatcgtgaagaacacggtgcgtacctttctgccggatgcgctggtgaccatcaccggcggtttccgccgtggcaaacctatgggccacgacatcgactttctgatcacgaatccgggcccgaaagaggatgacgagctgctccacaaagtggttgatctgctcaagaagcaaggtctgctgctgtacgaagacatcaaagagagcacgttcgtggaggggcaactgccaagtcgcaaaatcgacgccatggacaacttccagaagtgcttcgccattctcaagctgtaccagccgggcgtggataacagcagctataacacgagtaagaagagtgacatggccgaggttaaggattggaaagcgattcgtgtggatctggtgatcacgccattcgagcagtacgcctatgcgctgctcggttggacgggcagcaaagaatttcgtcgcgatctgcgccgctatgcggaggaagagcgcggcatgatcctcgacaaccatgccctctacgacctgaaaaagcgcatctttctgaaagcgggcagcgaagaagagattttcgcgcatctgggtctggattatgtggagccgtgggaacgcaacgcg

SEQ ID NO: 2140 - protein, 394 aa, synthetic construct
  REGION 1..394: note = Variant of terminal deoxynucleotidyl transferase
MHHHHHHGDSGHPPSNTPEGEVPSVIAGPVSQYSCQRKTTLNNYNKKFTDALEIMAENYKFKENLIACLEAKRAASILKYLPFPVTSMKDIQGLPCITDQVRDVIEEIIEEGESSRVKEVLNDERYKAFKQFTSVFGVGVKTAEKWFRMGLRTVEEAKASKSLKLSKMQKAGFLYYEDLASRVSKEEADAVTLIVKNTVRTFLPDALVTITGGFRRGKPMGHDIDFLITNPGPKEDDELLHKVVDLLKKQGLLLYEDIKESTFVEGQLPSRKIDAMDNFQKCFAILKLYQPGVDNSSYNTSKKSDMAEVKDWKAIRVDLVITPFEQYAYALLGWTGSKEFRRDLRRYAEEERGMILDNHALYDLKKRIFLKAGSEEEIFAHLGLDYVEPWERNA

SEQ ID NO: 2141 - DNA, 1182 bp, synthetic construct
  misc_feature 1..1182: note = Variant of terminal deoxynucleotidyl transferase
  source 1..1182: mol_type = other DNA
atgcaccatcatcatcatcatggcgatagcggccatccgattagcaataccccggagggggaggtgccgagcgttatcgcccgtccggttagtcagtacagctgccagcgcaagaccacgctgaataactacaacaaaaagtttaccgacgcgctggagatcatggccgagagctacaaatttaaagagaacctgatcgcgtgtctggaagccaagcgcgccgcgagtattctgaaatatctgccgttcccggttaccagcatgaaagacatccaaggtctgccgtgcattaccgaccaagttcgtgacgtgatcgaggagatcatcgaagagggcgagagcagccgtgttaaagaagttctcaatgacgagcgctacaaggcctttaagcagttcaccagcgtgttcggtgtgggcgtgaaaaccgcggaaaagtggttccgtatgggcctccgtacggttgaagaagcaaaggccagtaaggcgctgaagctgagcaagatgcagaaggcgggcttcctgtattacgaggatctggcgagccgcgttagtaaagaagaagccgatgccgttacgctcatcgtgaagaacacggtgcgtacctttctgccggatgcgctggtgaccatcaccggcggtttccgccgtggcaaacctatgggccacgacattgactttctgatcacgaatccgggcccgaaagaggatgacgagctgctccacaaagtggttgatctgctcaagaagcaaggtctgctgctgtacgaagacatcaaagagagcacgttcgtggaggggcaactgccaagtcgcaaaatcgacgccatggacaacttccagaagtgcttcgccattctcaagctgtaccagccgggcgtggataacagcagctataacacgagtaagaagagtgacatggccgaggttaaggattggaaagcgattcgtgtggatctggtgatcacgccattcgagcagtacgcctatgcgctgctcggttggacgggcagcaaagaatttcgtcgcgatctgcgccgctatgcggaggaagagcgcggcatgatcctcgacaaccatgccctctacgacctgaaaaagcgcatctttctgaaagcgggcagcgaagaagagattttcgcgcatctgggtctggattatgtggagccgtgggaacgcaacgcg

SEQ ID NO: 2142 - protein, 394 aa, synthetic construct
  REGION 1..394: note = Variant of terminal deoxynucleotidyl transferase
MHHHHHHGDSGHPISNTPEGEVPSVIARPVSQYSCQRKTTLNNYNKKFTDALEIMAESYKFKENLIACLEAKRAASILKYLPFPVTSMKDIQGLPCITDQVRDVIEEIIEEGESSRVKEVLNDERYKAFKQFTSVFGVGVKTAEKWFRMGLRTVEEAKASKALKLSKMQKAGFLYYEDLASRVSKEEADAVTLIVKNTVRTFLPDALVTITGGFRRGKPMGHDIDFLITNPGPKEDDELLHKVVDLLKKQGLLLYEDIKESTFVEGQLPSRKIDAMDNFQKCFAILKLYQPGVDNSSYNTSKKSDMAEVKDWKAIRVDLVITPFEQYAYALLGWTGSKEFRRDLRRYAEEERGMILDNHALYDLKKRIFLKAGSEEEIFAHLGLDYVEPWERNA

SEQ ID NO: 2143 - DNA, 1182 bp, synthetic construct
  misc_feature 1..1182: note = Variant of terminal deoxynucleotidyl transferase
  source 1..1182: mol_type = other DNA
atgcaccatcatcatcatcatggcgatagcggcttgccgccgagcaataccccggagggggaggtgccgagcgttatcgcccgtccggttagtcagtacagctgccagcgcaagaccacgctgaataactacaacaaaaagtttaccgacgcgctggagatcatggccgagaactacaaatttaaagagaacctgatcgcgtgtctggaagccaagcgcgccgcgagtattctgaaatatctgccgttcccggttaccagcatgaaagacatccaaggtctgccgtgcattaccgaccaagttcgtgacgtgatcgaggagatcatcgaagagggcgagagcagccgtgttaaagaagttctcaatgacgagcgctacaaggcctttaagcagttcaccagcgtgttcggtgtgggcgtgaaaaccgcggaaaagtggtttcgtatgggcctccgtacggttgaagaagcaaaggccagtaagagtctgaagctgagcaagatgcagaaggcgggcttcctgtattacgaggatctggcgagccgcgttagtaaagaagaagccgatgccgttacgctcatcgtgaagaacacggtgcgtacctttctgccggatgcgctggtgaccatcaccggcggtttccgccgtggcaaacctatgggccacgacatcgactttctgatcacgaatccgggcccgaaagaggatgacgagctgctccacaaagtggttgatctgctcaagaagcaaggtctgctgctgtacgaagacatcaaagagagcacgttcgtggaggggcaactgccaagtcgcaaaatcgacgccatggacaacttccagaagtgcttcgccattctcaagctgtaccagccgggcgtggataacagcagctataacacgagtaagaagagtgacatggccgaggttaaggattggaaagcgattcgtgtggatctggtgatcacgccattcgagcagtacgcctatgcgctgctcggttggacgggcagcaaagaatttcgtcgcgatctgcgccgctatgcggaggaagagcgcggcatgatcctcgacaaccatgccctctacgacctgaaaaagcgcatctttctgaaagcgggcagcgaagaagagattttcgcgcatctgggtctggattatgtggagccgtgggaacgcaacgcg

SEQ ID NO: 2144 - protein, 394 aa, synthetic construct
  REGION 1..394: note = Variant of terminal deoxynucleotidyl transferase
MHHHHHHGDSGLPPSNTPEGEVPSVIARPVSQYSCQRKTTLNNYNKKFTDALEIMAENYKFKENLIACLEAKRAASILKYLPFPVTSMKDIQGLPCITDQVRDVIEEIIEEGESSRVKEVLNDERYKAFKQFTSVFGVGVKTAEKWFRMGLRTVEEAKASKSLKLSKMQKAGFLYYEDLASRVSKEEADAVTLIVKNTVRTFLPDALVTITGGFRRGKPMGHDIDFLITNPGPKEDDELLHKVVDLLKKQGLLLYEDIKESTFVEGQLPSRKIDAMDNFQKCFAILKLYQPGVDNSSYNTSKKSDMAEVKDWKAIRVDLVITPFEQYAYALLGWTGSKEFRRDLRRYAEEERGMILDNHALYDLKKRIFLKAGSEEEIFAHLGLDYVEPWERNA

SEQ ID NO: 2145 - DNA, 1182 bp, synthetic construct
  misc_feature 1..1182: note = Variant of terminal deoxynucleotidyl transferase
  source 1..1182: mol_type = other DNA
atgcaccatcatcatcatcatggcgatagcggccatccgattagcaataccccggagggggaggtgccgagcgttatcgcccgtccggttagtcagtacagctgccagcgcaagaccacgctgaataactacaacaaaaagtttaccgacgcgctggagatcatggccgagagctacaaatttaaagagaacctgatcgcgtgtctggaagccaagcgcgccgcgagtattctgaaatatctgccgttcccggttaccagcatgaaagacatccaaggtctgccgtgcattaccgaccaagttcgtgacgtgatcgaggagatcatcgaagagggcgagagcagccgtgttaaagaagttctcaatgacgagcgctacaaggcctttaagcagttcaccagcgtgttcggtgtgggcgtgaaaaccgcggaaaagtggtaccgtatgggcctccgtacggttgaagaagcaaaggccagtaaggcgctgaagctgagcaagatgcagaaggcgggctttctgtattacgaggatctggcgagccgcgttagtaaagaagaagccgatgttgttacggtgatcgtgaagaatacggtgcgtacctttctgccggatgcgctggtgaccatcaccggcggtttccgccgtggcaaacctatgggccacgacgttgactttctgatcacgaatccgggcccgaaagaggatgacgagctgctccacaaagtggttgatctgctcaagaagcaaggtctgctgctgtacgaagacatcaaagagagcacgttcgtggaggggcaactgccaagtcgcaaaatcgacgccatggacaacttccagaagtgcttcgccattctcaagctgtaccagccgggcgtggataacaattcgtacaatacgagtaagggcagtgacatggccgaggttaaggattggaaagcgattcgtgtggatctggtgatcacgccattcgagcagtacgcctatgcgctgctcggttggacgggcagcaaagaatttcgtcgcgatctgcgccgctatgcggaggaagagcgcggcatgatcctcgacaaccatgccctctacgacctgaaaaagcgcatctttctgaaagcgggcagcgaagaagagattttcgcgcatctgggtctggattatgtggagccgtgggaacgcaacgcg

SEQ ID NO: 2146 - protein, 394 aa, synthetic construct
  REGION 1..394: note = Variant of terminal deoxynucleotidyl transferase
MHHHHHHGDSGHPISNTPEGEVPSVIARPVSQYSCQRKTTLNNYNKKFTDALEIMAESYKFKENLIACLEAKRAASILKYLPFPVTSMKDIQGLPCITDQVRDVIEEIIEEGESSRVKEVLNDERYKAFKQFTSVFGVGVKTAEKWYRMGLRTVEEAKASKALKLSKMQKAGFLYYEDLASRVSKEEADVVTVIVKNTVRTFLPDALVTITGGFRRGKPMGHDVDFLITNPGPKEDDELLHKVVDLLKKQGLLLYEDIKESTFVEGQLPSRKIDAMDNFQKCFAILKLYQPGVDNNSYNTSKGSDMAEVKDWKAIRVDLVITPFEQYAYALLGWTGSKEFRRDLRRYAEEERGMILDNHALYDLKKRIFLKAGSEEEIFAHLGLDYVEPWERNA

SEQ ID NO: 2147 - DNA, 1182 bp, synthetic construct
  misc_feature 1..1182: note = Variant of terminal deoxynucleotidyl transferase
  source 1..1182: mol_type = other DNA
atgcaccatcatcatcatcatggcgatagcggccatccgccgagcaataccccggagggggaggtgccgagcgttatcgcccgtccggttagtcagtacagctgccagcgcaagaccacgctgaataactacaacaaaaagtttaccgacgcgctggagatcatggccgaggattacaagtttaaagagaacctgatcgcgtgtctggaagcccagcgcgccgcgagtattctgaaatatctgccgttcccggttaccagcatgaaagacatccaaggtctgccgtgcattaccgaccaagttcgtgacgtgatcgaggagatcatcgaagagggcgagagcagccgtgttaaagaagttctcaatgacgagcgctacaaggcctttaagcagttcaccagcgtgttcggtgtgggcgtgaaaaccgcggaaaagtggtttcgtatgggcctccgtacggttgaagaagcaaaggccagtaagagtctgaagctgagcaagatgcagaaggcgggcttcctgtattacgaggatctggcgagccgcgttagtaaagaagaagccgatgccgttacgctcatcgtgaagaacacggtgcgtacctttctgccggatgcgctggtgaccatcactggcggtttccgccgtggcaaacctgtaggccacgacgtcgactttctgatcacgaatccgggcccgaaagaggatgacgagctgctccacaaagtggttgatctgctcaagaagcaaggtctgctgctgtacgaagacatcaaagagagcacgttcgtggaggggcaactgccaagtcgcaaaatcgacgccatggacaacttccagaagtgcttcgccattctcaagctgtaccagccgggcgtggataacagcagctataacacgagtaagaagagtgacatggccgaggttaaggattggaaagcgattcgtgtggatctggtgatcacgccattcgagcagtacgcctatgcgctgctcggttggacgggcagcaaagaatttcgtcgcgatctgcgccgctatgcggaggaagagcgcggcatgatcctcgacaaccatgccctctacgacctgaaaaagcgcatctttctgaaagcgggcagcgaagaagagattttcgcgcatctgggtctggattatgtggagccgtgggaacgcaacgcg

SEQ ID NO: 2148 - protein, 394 aa, synthetic construct
  REGION 1..394: note = Variant of terminal deoxynucleotidyl transferase
MHHHHHHGDSGHPPSNTPEGEVPSVIARPVSQYSCQRKTTLNNYNKKFTDALEIMAEDYKFKENLIACLEAQRAASILKYLPFPVTSMKDIQGLPCITDQVRDVIEEIIEEGESSRVKEVLNDERYKAFKQFTSVFGVGVKTAEKWFRMGLRTVEEAKASKSLKLSKMQKAGFLYYEDLASRVSKEEADAVTLIVKNTVRTFLPDALVTITGGFRRGKPVGHDVDFLITNPGPKEDDELLHKVVDLLKKQGLLLYEDIKESTFVEGQLPSRKIDAMDNFQKCFAILKLYQPGVDNSSYNTSKKSDMAEVKDWKAIRVDLVITPFEQYAYALLGWTGSKEFRRDLRRYAEEERGMILDNHALYDLKKRIFLKAGSEEEIFAHLGLDYVEPWERNA

SEQ ID NO: 2149 - DNA, 1182 bp, synthetic construct
  misc_feature 1..1182: note = Variant of terminal deoxynucleotidyl transferase
  source 1..1182: mol_type = other DNA
atgcaccatcatcatcatcatggcgatagcggccatccgccgagcaataccccggagggggaggtgccgagcgttatcgcccgtccggttagtcagtacagctgccagcgcaagaccacgctgaataactacaacaaaaagtttaccgacgcgctggagatcatggccgagagctacaaatttaaagagaacctgatcgcgtgtctggaagccaagcgcgccgcgagtattctgaaatatctgccgttcccggttaccagcatgaaagacatccaaggtctgccgtgcattaccgaccaagttcgtgacgtgatcgaggagatcatcgaagagggcgagagcagccgtgttaaagaagttctcaatgacgagcgctacaaggcctttaagcagttcaccagcgtgttcggtgtgggcgtgaaaaccgcggaaaagtggtaccgtatgggcctccgtacggttgaagaagcaaaggccagtaaggcgctgaagctgagcaagatgcagaaggcgggcttcctgtattacgaggatctggcgagccgcgttagtaaagaagaagccgatgccgttacgctcatcgtgaagaacacggtgcgtacctttctgccggatgcgctggtgaccatcaccggcggtttccgccgtggcaaacctatgggccacgacattgactttctgatcacgaatccgggcccgaaagaggatgacgagctgctccacaaagtggttgatctgctcaagaagcaaggtctgctgctgtacgaagacatcaaagagagcacgttcgtggaggggcaactgccaagtcgcaaaatcgacgccatggacaacttccagaagtgcttcgccattctcaagctgtaccagccgggcgtggataacaattcggttaatacgagtaagaaaagtgacatggccgaggttaaggattggaaagcgattcgtgtggatctggtgatcacgccattcgagcagtacgcctatgcgctgctcggttggacgggcagcaaagaatttcgtcgcgatctgcgccgctatgcggaggaagagcgcggcatgatcctcgacaaccatgccctctacgacctgaaaaagcgcatctttctgaaagcgggcagcgaagaagagattttcgcgcatctgggtctggattatgtggagccgtgggaacgcaacgcg

SEQ ID NO: 2150 - protein, 394 aa, synthetic construct
  REGION 1..394: note = Variant of terminal deoxynucleotidyl transferase
MHHHHHHGDSGHPPSNTPEGEVPSVIARPVSQYSCQRKTTLNNYNKKFTDALEIMAESYKFKENLIACLEAKRAASILKYLPFPVTSMKDIQGLPCITDQVRDVIEEIIEEGESSRVKEVLNDERYKAFKQFTSVFGVGVKTAEKWYRMGLRTVEEAKASKALKLSKMQKAGFLYYEDLASRVSKEEADAVTLIVKNTVRTFLPDALVTITGGFRRGKPMGHDIDFLITNPGPKEDDELLHKVVDLLKKQGLLLYEDIKESTFVEGQLPSRKIDAMDNFQKCFAILKLYQPGVDNNSVNTSKKSDMAEVKDWKAIRVDLVITPFEQYAYALLGWTGSKEFRRDLRRYAEEERGMILDNHALYDLKKRIFLKAGSEEEIFAHLGLDYVEPWERNA

SEQ ID NO: 2151 - DNA, 1182 bp, synthetic construct
  misc_feature 1..1182: note = Variant of terminal deoxynucleotidyl transferase
  source 1..1182: mol_type = other DNA
atgcaccatcatcatcatcatggcgatagcggccatccgattagcaataccccggagggggaggtgccgagcgttatcgcccgtccggttagtcagtacagctgccagcgcaagaccacgctgaataactacaacaaaaagtttaccgacgcgctggagatcatggccgagaactacaaatttaaagagaacctgatcgcgtgtctggaagccaagcgcgccgcgagtattctgaaatatctgccgttcccggttaccagcatgaaagacatccaaggtctgccgtgcattaccgaccaagttcgtgacgtgatcgaggagatcatcgaagagggcgagagcagccgtgttaaagaagttctcaatgacgagcgctacaaggcctttaagcagttcaccagcgtgttcggtgtgggcgtgaaaaccgcggaaaagtggttccgtatgggcctccgtacggttgaagaagcaaaggccagtaagagtctgaagctgagcaagatgcagaaggcgggcttcctgtattacgaggatctggcgagccgcgttagtaaagaagaagccgatgccgttacgctcatcgtgaagaacacggtgcgtacctttctgccggatgcgctggtgaccatcaccggcggtttccgccgtggcaaacctatgggccacgacatcgactttctgatcacgaatccgggcccgaaagaggatgacgagctgctccacaaagtggttgatctgctcaagaagcaaggtctgctgctgtacgaagacatcaaagagagcacgttcgtggaggggcaactgccaagtcgcaaaatcgacgccatggacaacttccagaagtgcttcgccattctcaagctgtaccagccgggcgtggataacagcagctataacacgagtaagaagagtgacatggccgaggttaaggattggaaagcgattcgtgtggatctggtgatcacgccattcgagcagtacgcctatgcgctgctcggttggacgggcagcaaagaatttcgtcgcgatctgcgccgctatgcggaggaagagcgcggcatgatcctcgacaaccatgccctctacgacctgaaaaagcgcatctttctgaaagcgggcagcgaagaagagattttcgcgcatctgggtctggattatgtggagccgtgggaacgcaacgcg

SEQ ID NO: 2152 - protein, 394 aa, synthetic construct
  REGION 1..394: note = Variant of terminal deoxynucleotidyl transferase
MHHHHHHGDSGHPISNTPEGEVPSVIARPVSQYSCQRKTTLNNYNKKFTDALEIMAENYKFKENLIACLEAKRAASILKYLPFPVTSMKDIQGLPCITDQVRDVIEEIIEEGESSRVKEVLNDERYKAFKQFTSVFGVGVKTAEKWFRMGLRTVEEAKASKSLKLSKMQKAGFLYYEDLASRVSKEEADAVTLIVKNTVRTFLPDALVTITGGFRRGKPMGHDIDFLITNPGPKEDDELLHKVVDLLKKQGLLLYEDIKESTFVEGQLPSRKIDAMDNFQKCFAILKLYQPGVDNSSYNTSKKSDMAEVKDWKAIRVDLVITPFEQYAYALLGWTGSKEFRRDLRRYAEEERGMILDNHALYDLKKRIFLKAGSEEEIFAHLGLDYVEPWERNA

SEQ ID NO: 2153 - DNA, 1182 bp, synthetic construct
  misc_feature 1..1182: note = Variant of terminal deoxynucleotidyl transferase
  source 1..1182: mol_type = other DNA
atgcaccatcatcatcatcatggcgatagcggccatccgccgagcaataccccggagggggaggtgccgagcgttatcgcccgtccggttagtcagtacagctgccagcgcaagaccacgctgaataactacaacaaaaagtttaccgacgcgctggagatcatggccgagaactacaaatttaaagagaacctgatcgcgtgtctggaagccaagcgcgccgcgagtattctgaaatatctgccgttcccggttaccagcatgaaagacatccaaggtctgccgtgcattaccgaccaagttcgtgacgtgatcgaggagatcatcgaagagggcgagagcagccgtgttaaagaagttctcaatgacgagcgctacaaggcctttaagcagttcaccagcgtgttcggtgtgggcgtgaaaaccgcggaaaagtggtttcgtatgggcctccgtacggttgaagaagcaaaggccagtaagagtctgaagctgagcaagatgcagaaggcgggcttcctgtattacgaggatctggcgagccgcgttagtaaagaagaagccgatgccgttacgctcatcgtgaagaacacggtgcgtacctttctgccggatgcgctggtgaccatcaccggcggtttccgccgtggcaaacctatgggccacgacatcgactttctgatcacgaatccgggcccgaaagaggatgacgagctgctccacaaagtggttgatctgctcaagaagcaaggtctgctgctgtacgaagacatcaaagagagcacgttcgtggaggggcaactgccaagtcgcaaaatcgacgccatggacaacttccagaagtgcttcgccattctcaagctgtaccagccgggcgtggataacagtgcgtacaatacgagtaagaaaagtgacatggccgaggttaaggattggaaagcgattcgtgtggatctggtgatcacgccattcgagcagtacgcctatgcgctgctcggttggacgggcagcaaagaatttcgtcgcgatctgcgccgctatgcggaggaagagcgcggcatgatcctcgacaaccatgccctctacgacctgaaaaagcgcatctttctgaaagcgggcagcgaagaagagattttcgcgcatctgggtctggattatgtggagccgtgggaacgcaacgcg

SEQ ID NO: 2154 - protein, 394 aa, synthetic construct
  REGION 1..394: note = Variant of terminal deoxynucleotidyl transferase
MHHHHHHGDSGHPPSNTPEGEVPSVIARPVSQYSCQRKTTLNNYNKKFTDALEIMAENYKFKENLIACLEAKRAASILKYLPFPVTSMKDIQGLPCITDQVRDVIEEIIEEGESSRVKEVLNDERYKAFKQFTSVFGVGVKTAEKWFRMGLRTVEEAKASKSLKLSKMQKAGFLYYEDLASRVSKEEADAVTLIVKNTVRTFLPDALVTITGGFRRGKPMGHDIDFLITNPGPKEDDELLHKVVDLLKKQGLLLYEDIKESTFVEGQLPSRKIDAMDNFQKCFAILKLYQPGVDNSAYNTSKKSDMAEVKDWKAIRVDLVITPFEQYAYALLGWTGSKEFRRDLRRYAEEERGMILDNHALYDLKKRIFLKAGSEEEIFAHLGLDYVEPWERNA

SEQ ID NO: 2155 - DNA, 1182 bp, synthetic construct
  misc_feature 1..1182: note = Variant of terminal deoxynucleotidyl transferase
  source 1..1182: mol_type = other DNA
atgcaccatcatcatcatcatggcgatagcggccatccgccgagcaataccccggagggggaggtgccgagcgttatcgcccgtccggttagtcagtacagctgccagcgcaagaccacgctgaataactacaacaaaaagtttaccgacgcgctggagatcatggccgagaattacaagtttaaagagaacctgatcgcgtgtctggaagccaagcgcgccgcgagtattctgaaatatctgccgttcccggttaccagcatgaaagacatccaaggtctgccgtgcattaccgaccaagttcgtgacgtgatcgaggagatcatcgaagagggcgagagcagccgtgttaaagaagttctcaatgacgagcgctacaaggcctttaagcagttcaccagcgtgttcggtgtgggcgtgaaaaccgcggaaaagtggtttcgtatgggcctccgtacggttgaagaagcaaaggccagtaagagtctgaagctgagcaagatgcagaaggcgggcttcctgtattacgaggatctggcgagccgcgttagtaaagaagaagccgatgccgttacgctcatcgtgaagaacacggtgcgtacctttctgccggatgcgctggtgaccatcactggcggtttccgccgtggcaaacctatgggccacgacatcgactttctgatcacgaatccgggcccgaaagaggatgacgagctgctccacaaagtggttgatctgctcaagaagcaaggtctgctgctgtacgaagacatcaaagagagcacgttcgtggaggggcaactgccaagtcgcaaaatcgacgccatggacaacttccagaagtgcttcgccattctcaagctgtaccagccgggcgtggataacagcagctataacacgagtaagaagagtgacatggccgaggttaaggattggaaagcggttcgtgtggatctggtgatcacgccattcgagcagtacgcctatgcgctgctcggttggacgggcagcaaagaatttcgtcgcgatctgcgccgctatgcggaggaagagcgcggcatgatcctcgacaaccatgccctctacgacctgaaaaagcgcatctttctgaaagcgggcagcgaagaagagattttcgcgcatctgggtctggattatgtggagccgtgggaacgcaacgcg

SEQ ID NO: 2156 - protein, 394 aa, synthetic construct
  REGION 1..394: note = Variant of terminal deoxynucleotidyl transferase
MHHHHHHGDSGHPPSNTPEGEVPSVIARPVSQYSCQRKTTLNNYNKKFTDALEIMAENYKFKENLIACLEAKRAASILKYLPFPVTSMKDIQGLPCITDQVRDVIEEIIEEGESSRVKEVLNDERYKAFKQFTSVFGVGVKTAEKWFRMGLRTVEEAKASKSLKLSKMQKAGFLYYEDLASRVSKEEADAVTLIVKNTVRTFLPDALVTITGGFRRGKPMGHDIDFLITNPGPKEDDELLHKVVDLLKKQGLLLYEDIKESTFVEGQLPSRKIDAMDNFQKCFAILKLYQPGVDNSSYNTSKKSDMAEVKDWKAVRVDLVITPFEQYAYALLGWTGSKEFRRDLRRYAEEERGMILDNHALYDLKKRIFLKAGSEEEIFAHLGLDYVEPWERNA

SEQ ID NO: 2157 - DNA, 1182 bp, synthetic construct
  misc_feature 1..1182: note = Variant of terminal deoxynucleotidyl transferase
  source 1..1182: mol_type = other DNA
atgcaccatcatcatcatcatggcgatagcggccatccgattagcaataccccggagggggaggtgccgagcgttatcgccgggccggttagtcagtacagctgccagcgcaagaccacgctgaataactacaacaaaaagtttaccgacgcgctggagatcatggccgagagctacaaatttaaagagaacctgatcgcgtgtctggaagccaagcgcgccgcgagtattctgaaatatctgccgttcgaggttaccagcatgaaagacatccaaggtctgccgtgcattaccgaccaagttcgtgacgtgatcgaggagatcatcgaagagggcgagagcagccgtgttaaagaagttctcaatgacgagcgctacaaggcctttaagcagttcaccagcgtgttcggtgtgggcgtgaaaaccgcggaaaagtggtttcgtatgggcctccgtacggttgaagaagcaaaggccagtaagagtctgaagctgagcaagatgcagaaggcgggcctgctgtattacgaggatctggcgagccgcgttagtaaagaagaagccgatgccgttacgctcatcgtgaagaacacggtgcgtacctttctgccggatgcgctggtgaccatcaccggcggtttccgccgtggcaaacctatgggccacgacattgactttctgatcacgaatccgggcccgaaagaggatgacgagctgctccacaaagtggttgatctgctcaagaagcaaggtctgctgctgtacgaagacatcaaagagagcacgttcgtggaggggcaactgccaagtcgcaaaatcgacgccatggacaacttccagaagtgcttcgccattctcaagctgtaccagccgggcgtggataacagtgcgtacaatacgagtaagaaaagtgacatggccgaggttaaggattggaaagcgattcgtgtggatctggtgatcacgccattcgagcagtacgcctatgcgctgctcggttggacgggcagcaaagaatttcgtcgcgatctgcgccgctatgcggaggaagagcgcggcatgatcctcgacaaccatgccctctacgacctgaaaaagcgcatctttctgaaagcgggcagcgaagaagagattttcgcgcatctgggtctggattatgtggagccgtgggaacgcaacgcg

SEQ ID NO: 2158 - protein, 394 aa, synthetic construct
  REGION 1..394: note = Variant of terminal deoxynucleotidyl transferase
MHHHHHHGDSGHPISNTPEGEVPSVIAGPVSQYSCQRKTTLNNYNKKFTDALEIMAESYKFKENLIACLEAKRAASILKYLPFEVTSMKDIQGLPCITDQVRDVIEEIIEEGESSRVKEVLNDERYKAFKQFTSVFGVGVKTAEKWFRMGLRTVEEAKASKSLKLSKMQKAGLLYYEDLASRVSKEEADAVTLIVKNTVRTFLPDALVTITGGFRRGKPMGHDIDFLITNPGPKEDDELLHKVVDLLKKQGLLLYEDIKESTFVEGQLPSRKIDAMDNFQKCFAILKLYQPGVDNSAYNTSKKSDMAEVKDWKAIRVDLVITPFEQYAYALLGWTGSKEFRRDLRRYAEEERGMILDNHALYDLKKRIFLKAGSEEEIFAHLGLDYVEPWERNA

SEQ ID NO: 2159 - DNA, 1182 bp, synthetic construct
  misc_feature 1..1182: note = Variant of terminal deoxynucleotidyl transferase
  source 1..1182: mol_type = other DNA
atgcaccatcatcatcatcatggcgatagcggccatccgccgagcaataccccggagggggaggtgccgagcgttatcgccgggccggttagtcagtacagctgccagcgcaagaccacgctgaataactacaacaaaaagtttaccgacgcgctggagatcatggccgagaactacaaatttaaagagaacctgatcgcgtgtctggaagccaagcgcgccgcgagtattctgaaatatctgccgttcgaggttaccagcatgaaagacatccaaggtctgccgtgcattaccgaccaagttcgtgacgtgatcgaggagatcatcgaagagggcgagagcagccgtgttaaagaagttctcaatgacgagcgctacaaggcctttaagcagttcaccagcgtgttcggtgtgggcgtgaaaaccgcggaaaagtggtttcgtatgggcctccgtacggttgaagaagcaaaggccagtaagagtctgaagctgagcaagatgcagaaggcgggcttcctgtattacgaggatctggcgagccgcgttagtaaagaagaagccgatgccgttacgctcatcgtgaagaacacggtgcgtacctttctgccggatgcgctggtgaccatcaccggcggtttccgccgtggcaaacctatgggccacgacatcgactttctgatcacgaatccgggcccgaaagaggatgacgagctgctccacaaagtggttgatctgctcaagaagcaaggtctgctgctgtacgaagacatcaaagagagcacgttcgtggaggggcaactgccaagtcgcaaaatcgacgccatggacaacttccagaagtgcttcgccattctcaagctgtaccagccgggcgtggataacagcagctataacacgagtaagaagagtgacatggccgaggttaaggattggaaagcgattcgtgtggatctggtgatcacgccattcgagcagtacgcctatgcgctgctcggttggacgggcagcaaagaatttcgtcgcgatctgcgccgctatgcggaggaagagcgcggcatgatcctcgacaaccatgccctctacgacctgaaaaagcgcatctttctgaaagcgggcagcgaagaagagattttcgcgcatctgggtctggattatgtggagccgtgggaacgcaacgcg

SEQ ID NO: 2160 - protein, 394 aa, synthetic construct
  REGION 1..394: note = Variant of terminal deoxynucleotidyl transferase
MHHHHHHGDSGHPPSNTPEGEVPSVIAGPVSQYSCQRKTTLNNYNKKFTDALEIMAENYKFKENLIACLEAKRAASILKYLPFEVTSMKDIQGLPCITDQVRDVIEEIIEEGESSRVKEVLNDERYKAFKQFTSVFGVGVKTAEKWFRMGLRTVEEAKASKSLKLSKMQKAGFLYYEDLASRVSKEEADAVTLIVKNTVRTFLPDALVTITGGFRRGKPMGHDIDFLITNPGPKEDDELLHKVVDLLKKQGLLLYEDIKESTFVEGQLPSRKIDAMDNFQKCFAILKLYQPGVDNSSYNTSKKSDMAEVKDWKAIRVDLVITPFEQYAYALLGWTGSKEFRRDLRRYAEEERGMILDNHALYDLKKRIFLKAGSEEEIFAHLGLDYVEPWERNA

SEQ ID NO: 2161 - DNA, 1182 bp, synthetic construct
  misc_feature 1..1182: note = Variant of terminal deoxynucleotidyl transferase
  source 1..1182: mol_type = other DNA
atgcaccatcatcatcatcatggcgatagcggccatccgccgagcaataccccggagggggaggtgccgagcgttatcgcccgtccggttagtcagtacagctgccagcgcaagaccacgctgaataactacaacaaaaagtttaccgacgcgctggagatcatggccgagaactacaaatttaaagagaacctgatcgcgtgtctggaagccaagcgcgccgtgagtattctgaaatatctgccgttcccggttaccagcatgaaagacatccaaggtctgccgtgcattaccgaccaagttcgtgacgtgatcgaggagatcatcgaagagggcgagagcagccgtgttaaagaagttctcaatgacgagcgctacaaggcctttaagcagttcaccagcgtgttcggtgtgggcgtgaaaaccgcggaaaagtggtttcgtatgggcctccgtacggttgaagaagcaaaggccagtaagagtctgaagctgagcaagatgcagaaggcgggcttcctgtattacgaggatctggcgagccgcgttagtaaagaagaagccgatgccgttacgctcatcgtgaagaacacggtgcgtacctttctgccggatgcgctggtgaccatcaccggcggtttccgccgtggcaaacctatgggccacgacatcgactttctgatcacgaatccgggcccgaaagaggatgacgagctgctccacaaagtggttgatctgctcaagaagcaaggtctgctgctgtacgaagacatcaaagagagcacgttcgtggaggggcaactgccaagtcgcaaaatcgacgccatggacaacttccagaagtgcttcgccattctcaagctgtaccagccgggcgtggataacagcagctataacacgagtaagaagagtgacatggccgaggttaaggattggaaagcgattcgtgtggatctggtgatcacgccattcgagcagtacgcctatgcgctgctcggttggacgggcagcaaagaatttcgtcgcgatctgcgccgctatgcggaggaagagcgcggcatgatcctcgacaaccatgccctctacgacctgaaaaagcgcatctttctgaaagcgggcagcgaagaagagattttcgcgcatctgggtctggattatgtggagccgtgggaacgcaacgcg

SEQ ID NO: 2162 - protein, 394 aa, synthetic construct
  REGION 1..394: note = Variant of terminal deoxynucleotidyl transferase
MHHHHHHGDSGHPPSNTPEGEVPSVIARPVSQYSCQRKTTLNNYNKKFTDALEIMAENYKFKENLIACLEAKRAVSILKYLPFPVTSMKDIQGLPCITDQVRDVIEEIIEEGESSRVKEVLNDERYKAFKQFTSVFGVGVKTAEKWFRMGLRTVEEAKASKSLKLSKMQKAGFLYYEDLASRVSKEEADAVTLIVKNTVRTFLPDALVTITGGFRRGKPMGHDIDFLITNPGPKEDDELLHKVVDLLKKQGLLLYEDIKESTFVEGQLPSRKIDAMDNFQKCFAILKLYQPGVDNSSYNTSKKSDMAEVKDWKAIRVDLVITPFEQYAYALLGWTGSKEFRRDLRRYAEEERGMILDNHALYDLKKRIFLKAGSEEEIFAHLGLDYVEPWERNA

SEQ ID NO: 2163 - DNA, 1182 bp, synthetic construct
  misc_feature 1..1182: note = Variant of terminal deoxynucleotidyl transferase
  source 1..1182: mol_type = other DNA
atgcatcaccaccatcatcatgggggttctggtcatccgccgagcaataccccggagggggaggtgccgagcgttatcgcccgtccggttagtcagtacagctgccagcgcaagaccacgctgaataactacaacaaaaagtttaccgacgcgctggagatcatggccgagaactacaaatttaaagagaacctgatcgcgtgtctggaagccaagcgcgccgcgagtattctgaaatatctgccgttcgaggttaccagcatgaaagacatccaaggtctgccgtgcattaccgaccaagttcgtgacgtgatcgaggagatcatcgaagagggcgagagcagccgtgttaaagaagttctcaatgacgagcgctacaaggcctttaagcagttcaccagcgtgttcggtgtgggcgtgaaaaccgcggaaaagtggtttcgtatgggcctccgtacggttgaagaagcaaaggccagtaagagtctgaagctgagcaagatgcagaaggcgggctttctgtattacgaggatctggcgagccgcgttagtaaagaagaagccgatgccgttacgctcatcgtgaagaacacggtgcgtacctttctgccggatgcgctggtgaccatcaccggcggtttccgccgtggcaaacctatgggccacgacgttgactttctgatcacgaatccgggcccgaaagaggatgacgagctgctccacaaagtggttgatctgctcaagaagcaaggtctgctgctgtacgaagacatcaaagagagcacgttcgtggaggggcaactgccaagtcgcaaaatcgacgccatggacaacttccagaagtgcttcgccattctcaagctgtaccagccgggcgtggataacagtgcggttgggacgagtaagaaaagtgacatggccgaggttaaggattggaaagcgattcgtgtggatctggtgatcacgccattcgagcagtacgcctatgcgctgctcggttggacgggcagcaaagaatttcgtcgcgatctgcgccgctatgcggaggaagagcgcggcatgatcctcgacaaccatgccctctacgacctgaaaaagcgcatctttctgaaagcgggcagcgaagaagagattttcgcgcatctgggtctggattatgtggagccgtgggaacgcaacgcg

SEQ ID NO: 2164 - protein, 394 aa, synthetic construct
  REGION 1..394: note = Variant of terminal deoxynucleotidyl transferase
MHHHHHHGGSGHPPSNTPEGEVPSVIARPVSQYSCQRKTTLNNYNKKFTDALEIMAENYKFKENLIACLEAKRAASILKYLPFEVTSMKDIQGLPCITDQVRDVIEEIIEEGESSRVKEVLNDERYKAFKQFTSVFGVGVKTAEKWFRMGLRTVEEAKASKSLKLSKMQKAGFLYYEDLASRVSKEEADAVTLIVKNTVRTFLPDALVTITGGFRRGKPMGHDVDFLITNPGPKEDDELLHKVVDLLKKQGLLLYEDIKESTFVEGQLPSRKIDAMDNFQKCFAILKLYQPGVDNSAVGTSKKSDMAEVKDWKAIRVDLVITPFEQYAYALLGWTGSKEFRRDLRRYAEEERGMILDNHALYDLKKRIFLKAGSEEEIFAHLGLDYVEPWERNA

SEQ ID NO: 2165 - DNA, 1182 bp, synthetic construct
  misc_feature 1..1182: note = Variant of terminal deoxynucleotidyl transferase
  source 1..1182: mol_type = other DNA
atgcatcaccaccatcatcatgggggttctggtcatccgccgagcaataccccggagggggaggtgccgagcgttatcgcccgtccggttagtcagtacagctgccagcgcaagaccacgctgaataactacaacaaaaagtttaccgacgcggtggagatcatggccgagaactacaaatttaaagagaacctgatcgcgtgtctggaagccaagcgcgccgcgagtattctgaaatatctgccgttcgaggttaccagcatgaaagacatccaaggtctgccgtgcattaccgaccaagttcgtgacgtgatcgaggagatcatcgaagagggcgagagcagccgtgttaaagaagttctcaatgacgagcgctacaaggcctttaagcagttcaccagcgtgttcggtgtgggcgtgaaaaccgcggaaaagtggtttcgtatgggcctccgtacggttgaagaagcaaaggccagtaagagtctgaagctgagcaagatgcagaaggcgggctttctgtattacgaggatctggcgagccgcgttagtaaagaagaagccgatgccgttacgctcatcgtgaagaacacggtgcgtacctttctgccggatgcgctggtgaccatcaccggcggtttccgccgtggcaaacctatgggccacgacgttgactttctgatcacgaatccgggcccgaaagaggatgacgagctgctccacaaagtggttgatctgctcaagaagcaaggtctgctgctgtacgaagacatcaaagagagcacgttcgtggaggggcaactgccaagtcgcaaaatcgacgccatggacaacttccagaagtgcttcgccattctcaagctgtaccagccgggcgtggataacagtgcggttgggacgagtaagaaaagtgacatggccgaggttaaggattggaaagcgattcgtgtggatctggtgatcacgccattcgagcagtacgcctatgcgctgctcggttggacgggcagcaaagaatttcgtcgcgatctgcgccgctatgcggaggaagagcgcggcatgatcctcgacaaccatgccctctacgacctgaaaaagcgcatctttctgaaagcgggcagcgaagaagagattttcgcgcatctgggtctggattatgtggagccgtgggaacgcaacgcg

SEQ ID NO: 2166 - protein, 394 aa, synthetic construct
  REGION 1..394: note = Variant of terminal deoxynucleotidyl transferase
MHHHHHHGGSGHPPSNTPEGEVPSVIARPVSQYSCQRKTTLNNYNKKFTDAVEIMAENYKFKENLIACLEAKRAASILKYLPFEVTSMKDIQGLPCITDQVRDVIEEIIEEGESSRVKEVLNDERYKAFKQFTSVFGVGVKTAEKWFRMGLRTVEEAKASKSLKLSKMQKAGFLYYEDLASRVSKEEADAVTLIVKNTVRTFLPDALVTITGGFRRGKPMGHDVDFLITNPGPKEDDELLHKVVDLLKKQGLLLYEDIKESTFVEGQLPSRKIDAMDNFQKCFAILKLYQPGVDNSAVGTSKKSDMAEVKDWKAIRVDLVITPFEQYAYALLGWTGSKEFRRDLRRYAEEERGMILDNHALYDLKKRIFLKAGSEEEIFAHLGLDYVEPWERNA

SEQ ID NO: 2167 - DNA, 1182 bp, synthetic construct
  misc_feature 1..1182: note = Variant of terminal deoxynucleotidyl transferase
  source 1..1182: mol_type = other DNA
atgcatcaccaccatcatcatgggggttctggtcatccgccgagcaataccccggagggggaggtgccgagcgttatcgcccgtccggttagtcagtacagctgccagcgcaagaccacgctgaataactacaacaaaaagtttaccgacgcgctggagatcatggccgagaactacaaatttaaagagaacctgtctgcgtgtctggaagccaagcgcgccgcgagtattctgaaatatctgccgttcgaggttaccagcatgaaagacatccaaggtctgccgtgcattaccgaccaagttcgtgacgtgatcgaggagatcatcgaagagggcgagagcagccgtgttaaagaagttctcaatgacgagcgctacaaggcctttaagcagttcaccagcgtgttcggtgtgggcgtgaaaaccgcggaaaagtggtttcgtatgggcctccgtacggttgaagaagcaaaggccagtaagagtctgaagctgagcaagatgcagaaggcgggctttctgtattacgaggatctggcgagccgcgttagtaaagaagaagccgatgccgttacgctcatcgtgaagaacacggtgcgtacctttctgccggatgcgctggtgaccatcaccggcggtttccgccgtggcaaacctatgggccacgacgttgactttctgatcacgaatccgggcccgaaagaggatgacgagctgctccacaaagtggttgatctgctcaagaagcaaggtctgctgctgtacgaagacatcaaagagagcacgttcgtggaggggcaactgccaagtcgcaaaatcgacgccatggacaacttccagaagtgcttcgccattctcaagctgtaccagccgggcgtggataacagtgcggttgggacgagtaagaaaagtgacatggccgaggttaaggattggaaagcgattcgtgtggatctggtgatcacgccattcgagcagtacgcctatgcgctgctcggttggacgggcagcaaagaatttcgtcgcgatctgcgccgctatgcggaggaagagcgcggcatgatcctcgacaaccatgccctctacgacctgaaaaagcgcatctttctgaaagcgggcagcgaagaagagattttcgcgcatctgggtctggattatgtggagccgtgggaacgcaacgcg

SEQ ID NO: 2168 - protein, 394 aa, synthetic construct
  REGION 1..394: note = Variant of terminal deoxynucleotidyl transferase
MHHHHHHGGSGHPPSNTPEGEVPSVIARPVSQYSCQRKTTLNNYNKKFTDALEIMAENYKFKENLSACLEAKRAASILKYLPFEVTSMKDIQGLPCITDQVRDVIEEIIEEGESSRVKEVLNDERYKAFKQFTSVFGVGVKTAEKWFRMGLRTVEEAKASKSLKLSKMQKAGFLYYEDLASRVSKEEADAVTLIVKNTVRTFLPDALVTITGGFRRGKPMGHDVDFLITNPGPKEDDELLHKVVDLLKKQGLLLYEDIKESTFVEGQLPSRKIDAMDNFQKCFAILKLYQPGVDNSAVGTSKKSDMAEVKDWKAIRVDLVITPFEQYAYALLGWTGSKEFRRDLRRYAEEERGMILDNHALYDLKKRIFLKAGSEEEIFAHLGLDYVEPWERNA

SEQ ID NO: 2169 - DNA, 1182 bp, synthetic construct
  misc_feature 1..1182: note = Variant of terminal deoxynucleotidyl transferase
  source 1..1182: mol_type = other DNA
atgcatcaccaccatcatcatgggggttctggtcatccgccgagcaataccccggagggggaggtgccgagcgttatcgcccgtccggttagtcagtacagctgccagcgcaagaccacgctgaataactacaacaaaaagtttaccgacgcgctggagatcatggccgagaactacaaatttaaagagaacctggaggcgtgtctggaagccaagcgcgccgcgagtattctgaaatatctgccgttcgaggttaccagcatgaaagacatccaaggtctgccgtgcattaccgaccaagttcgtgacgtgatcgaggagatcatcgaagagggcgagagcagccgtgttaaagaagttctcaatgacgagcgctacaaggcctttaagcagttcaccagcgtgttcggtgtgggcgtgaaaaccgcggaaaagtggtttcgtatgggcctccgtacggttgaagaagcaaaggccagtaagagtctgaagctgagcaagatgcagaaggcgggctttctgtattacgaggatctggcgagccgcgttagtaaagaagaagccgatgccgttacgctcatcgtgaagaacacggtgcgtacctttctgccggatgcgctggtgaccatcaccggcggtttccgccgtggcaaacctatgggccacgacgttgactttctgatcacgaatccgggcccgaaagaggatgacgagctgctccacaaagtggttgatctgctcaagaagcaaggtctgctgctgtacgaagacatcaaagagagcacgttcgtggaggggcaactgccaagtcgcaaaatcgacgccatggacaacttccagaagtgcttcgccattctcaagctgtaccagccgggcgtggataacagtgcggttgggacgagtaagaaaagtgacatggccgaggttaaggattggaaagcgattcgtgtggatctggtgatcacgccattcgagcagtacgcctatgcgctgctcggttggacgggcagcaaagaatttcgtcgcgatctgcgccgctatgcggaggaagagcgcggcatgatcctcgacaaccatgccctctacgacctgaaaaagcgcatctttctgaaagcgggcagcgaagaagagattttcgcgcatctgggtctggattatgtggagccgtgggaacgcaacgcg

SEQ ID NO: 2170 - protein, 394 aa, synthetic construct
  REGION 1..394: note = Variant of terminal deoxynucleotidyl transferase
MHHHHHHGGSGHPPSNTPEGEVPSVIARPVSQYSCQRKTTLNNYNKKFTDALEIMAENYKFKENLEACLEAKRAASILKYLPFEVTSMKDIQGLPCITDQVRDVIEEIIEEGESSRVKEVLNDERYKAFKQFTSVFGVGVKTAEKWFRMGLRTVEEAKASKSLKLSKMQKAGFLYYEDLASRVSKEEADAVTLIVKNTVRTFLPDALVTITGGFRRGKPMGHDVDFLITNPGPKEDDELLHKVVDLLKKQGLLLYEDIKESTFVEGQLPSRKIDAMDNFQKCFAILKLYQPGVDNSAVGTSKKSDMAEVKDWKAIRVDLVITPFEQYAYALLGWTGSKEFRRDLRRYAEEERGMILDNHALYDLKKRIFLKAGSEEEIFAHLGLDYVEPWERNA

SEQ ID NO: 2171 - DNA, 1182 bp, synthetic construct
  misc_feature 1..1182: note = Variant of terminal deoxynucleotidyl transferase
  source 1..1182: mol_type = other DNA
atgcatcaccaccatcatcatgggggttctggtcatccgccgagcaataccccggagggggaggtgccgagcgttatcgcccgtccggttagtcagtacagctgccagcgcaagaccacgctgaataactacaacaaaaagtttaccgacgttctggagatcatggccgagaactacaaatttaaagagaacctgatcgcgtgtctggaagccaagcgcgccgcgagtattctgaaatatctgccgttcgaggttaccagcatgaaagacatccaaggtctgccgtgcattaccgaccaagttcgtgacgtgatcgaggagatcatcgaagagggcgagagcagccgtgttaaagaagttctcaatgacgagcgctacaaggcctttaagcagttcaccagcgtgttcggtgtgggcgtgaaaaccgcggaaaagtggtttcgtatgggcctccgtacggttgaagaagcaaaggccagtaagagtctgaagctgagcaagatgcagaaggcgggctttctgtattacgaggatctggcgagccgcgttagtaaagaagaagccgatgccgttacgctcatcgtgaagaacacggtgcgtacctttctgccggatgcgctggtgaccatcaccggcggtttccgccgtggcaaacctatgggccacgacgttgactttctgatcacgaatccgggcccgaaagaggatgacgagctgctccacaaagtggttgatctgctcaagaagcaaggtctgctgctgtacgaagacatcaaagagagcacgttcgtggaggggcaactgccaagtcgcaaaatcgacgccatggacaacttccagaagtgcttcgccattctcaagctgtaccagccgggcgtggataacagtgcggttgggacgagtaagaaaagtgacatggccgaggttaaggattggaaagcgattcgtgtggatctggtgatcacgccattcgagcagtacgcctatgcgctgctcggttggacgggcagcaaagaatttcgtcgcgatctgcgccgctatgcggaggaagagcgcggcatgatcctcgacaaccatgccctctacgacctgaaaaagcgcatctttctgaaagcgggcagcgaagaagagattttcgcgcatctgggtctggattatgtggagccgtgggaacgcaacgcg

SEQ ID NO: 2172 - protein, 394 aa, synthetic construct
  REGION 1..394: note = Variant of terminal deoxynucleotidyl transferase
MHHHHHHGGSGHPPSNTPEGEVPSVIARPVSQYSCQRKTTLNNYNKKFTDVLEIMAENYKFKENLIACLEAKRAASILKYLPFEVTSMKDIQGLPCITDQVRDVIEEIIEEGESSRVKEVLNDERYKAFKQFTSVFGVGVKTAEKWFRMGLRTVEEAKASKSLKLSKMQKAGFLYYEDLASRVSKEEADAVTLIVKNTVRTFLPDALVTITGGFRRGKPMGHDVDFLITNPGPKEDDELLHKVVDLLKKQGLLLYEDIKESTFVEGQLPSRKIDAMDNFQKCFAILKLYQPGVDNSAVGTSKKSDMAEVKDWKAIRVDLVITPFEQYAYALLGWTGSKEFRRDLRRYAEEERGMILDNHALYDLKKRIFLKAGSEEEIFAHLGLDYVEPWERNA

SEQ ID NO: 2173 - DNA, 1182 bp, synthetic construct
  misc_feature 1..1182: note = Variant of terminal deoxynucleotidyl transferase
  source 1..1182: mol_type = other DNA
atgcatcaccaccatcatcatgggggttctggtcatccgccgagcaataccccggagggggaggtgccgagcgttatcgcccgtccggttagtcagtacagctgccagcgcaagaccacgctgaataactacaacaaaaagtttaccgacgcgctggagatcatggccgagaactacaaatttaaagagaacctgatcgcgtgtctggaaatgaagcgcgccgcgagtattctgaaatatctgccgttcgaggttaccagcatgaaagacatccaaggtctgccgtgcattaccgaccaagttcgtgacgtgatcgaggagatcatcgaagagggcgagagcagccgtgttaaagaagttctcaatgacgagcgctacaaggcctttaagcagttcaccagcgtgttcggtgtgggcgtgaaaaccgcggaaaagtggtttcgtatgggcctccgtacggttgaagaagcaaaggccagtaagagtctgaagctgagcaagatgcagaaggcgggctttctgtattacgaggatctggcgagccgcgttagtaaagaagaagccgatgccgttacgctcatcgtgaagaacacggtgcgtacctttctgccggatgcgctggtgaccatcaccggcggtttccgccgtggcaaacctatgggccacgacgttgactttctgatcacgaatccgggcccgaaagaggatgacgagctgctccacaaagtggttgatctgctcaagaagcaaggtctgctgctgtacgaagacatcaaagagagcacgttcgtggaggggcaactgccaagtcgcaaaatcgacgccatggacaacttccagaagtgcttcgccattctcaagctgtaccagccgggcgtggataacagtgcggttgggacgagtaagaaaagtgacatggccgaggttaaggattggaaagcgattcgtgtggatctggtgatcacgccattcgagcagtacgcctatgcgctgctcggttggacgggcagcaaagaatttcgtcgcgatctgcgccgctatgcggaggaagagcgcggcatgatcctcgacaaccatgccctctacgacctgaaaaagcgcatctttctgaaagcgggcagcgaagaagagattttcgcacatctgggtctggattatgtggagccgtgggaacgcaacgcg

SEQ ID NO: 2174 - protein, 394 aa, synthetic construct
  REGION 1..394: note = Variant of terminal deoxynucleotidyl transferase
MHHHHHHGGSGHPPSNTPEGEVPSVIARPVSQYSCQRKTTLNNYNKKFTDALEIMAENYKFKENLIACLEMKRAASILKYLPFEVTSMKDIQGLPCITDQVRDVIEEIIEEGESSRVKEVLNDERYKAFKQFTSVFGVGVKTAEKWFRMGLRTVEEAKASKSLKLSKMQKAGFLYYEDLASRVSKEEADAVTLIVKNTVRTFLPDALVTITGGFRRGKPMGHDVDFLITNPGPKEDDELLHKVVDLLKKQGLLLYEDIKESTFVEGQLPSRKIDAMDNFQKCFAILKLYQPGVDNSAVGTSKKSDMAEVKDWKAIRVDLVITPFEQYAYALLGWTGSKEFRRDLRRYAEEERGMILDNHALYDLKKRIFLKAGSEEEIFAHLGLDYVEPWERNA

SEQ ID NO: 2175 - DNA, 1182 bp, synthetic construct
  misc_feature 1..1182: note = Variant of terminal deoxynucleotidyl transferase
  source 1..1182: mol_type = other DNA
atgcatcaccaccatcatcatgggggttctggtcatccgccgagcaataccccggagggggaggtgccgagcgttatcgcccgtccggttagtcagtacagctgccagcgcaagaccacgctgaataactacaacaaaaagtttaccgacgcgctggagatcatggccgagaactacaaatttaaagagaacctgatcgcgtgtctggaagccaagcgcgccgcgagtattctgaaatatctgccgttcgaggttaccagcatgaaagacatccaaggtctgccgtgcattaccgaccaagttcgtgacgtgatcgaggagatcatcgaagagggcgagagcagccgtgttaaagaagttctcaatgacgagcgctacaaggcctttaagcagttcaccagcgtgttcggtgtgggcgtgaaaaccgcggaaaagtggtttcgtatgggcctccgtacggttgaagaagcaaaggccagtaagagtctgaagctgagcaagatgcagaaggcgggctttctgtattacgaggatctggcgagccgcgttagtaaagaagaagccgatgccgttacgctcatcgtgaagaacacggtgcgtacctttctgccggatgcgctggtgaccatcaccggcggtttccgccgtggcaaacctatgggccacgacgttgactttctgatcacgaatccgggcccgaaagaggatgacgagctgctccacaaagtggttgatctgctcaagaagcaaggtctgctgctgtacgaagacatcaaagagagcacgttcgtggaggggcaactgccaagtcgcaaaatcgacgccatggacaacttccagaagtgcttcgccattctcaagctgtaccagccgggcgtggataacagtgcggttgggacgagtaagaaaagtgacatggccgaggttaaggattggaaagcgattcgtgtggatctggtgatcacgccattcgagcagtactggtatgcgctgctcggttggacgggcagcaaagaatttcgtcgcgatctgcgccgctatgcggaggaagagcgcggcatgatcctcgacaaccatgccctctacgacctgaaaaagcgcatctttctgaaagcgggcagcgaagaagagattttcgcgcatctgggtctggattatgtggagccgtgggaacgcaacgcg

SEQ ID NO: 2176 - protein, 394 aa, synthetic construct
  REGION 1..394: note = Variant of terminal deoxynucleotidyl transferase
MHHHHHHGGSGHPPSNTPEGEVPSVIARPVSQYSCQRKTTLNNYNKKFTDALEIMAENYKFKENLIACLEAKRAASILKYLPFEVTSMKDIQGLPCITDQVRDVIEEIIEEGESSRVKEVLNDERYKAFKQFTSVFGVGVKTAEKWFRMGLRTVEEAKASKSLKLSKMQKAGFLYYEDLASRVSKEEADAVTLIVKNTVRTFLPDALVTITGGFRRGKPMGHDVDFLITNPGPKEDDELLHKVVDLLKKQGLLLYEDIKESTFVEGQLPSRKIDAMDNFQKCFAILKLYQPGVDNSAVGTSKKSDMAEVKDWKAIRVDLVITPFEQYWYALLGWTGSKEFRRDLRRYAEEERGMILDNHALYDLKKRIFLKAGSEEEIFAHLGLDYVEPWERNA

SEQ ID NO: 2177 - DNA, 1182 bp, synthetic construct
  misc_feature 1..1182: note = Variant of terminal deoxynucleotidyl transferase
  source 1..1182: mol_type = other DNA
atgcatcaccaccatcatcatgggggttctggtcatccgccgagcaataccccggagggggaggtgccgagcgttatcgcccgtccggttagtcagtacagctgccagcgcaagaccacgctgaataactacaacaaaaagtttaccgacgcgctggagatcatggccgagaactacaaatttaaagagaacctgatcgcgtgtctggaagccaagcgcgccgcgagtattctgaaatatctgccgttcgaggttaccagcatgaaagacatccaaggtctgccgtgcattaccgaccaagttcgtgacgtgatcgaggagatcatcgaagagggcgagagcagccgtgttaaagaagttctcaatgacgagcgctacaaggcctttaagcagttcaccagcgtgttcggtgtgggcgtgaaaaccgcggaaaagtggtttcgtatgggcctccgtacggttgaagaagcaaaggccagtaagagtctgaagctgagcaagatgcagaaggcgggctttctgtattacgaggatctggcgagccgcgttagtaaagaagaagccgatgccgttacgctcatcgtgaagaacacggtgcgtacctttctgccggatgcgctggtgaccatcaccggcggtttccgccgtggcaaacctatgggccacgacgttgactttctgatcacgaatccgggcccgaaagaggatgacgagctgctccacaaagtggttgatctgctcaagaagcaaggtctgctgctgtacgaagacatcaaagagagcacgttcgtggaggggcaactgccaagtcgcaaaatcgacgccatggacaacttccagaagtgcttcgccattctcaagctgtaccagccgggcgtggataacagtgcggttgggacgagtaagaaaagtgacatggccgaggttaaggattggaaagcgattcgtgtggatctggtgatcacgccattcgagcagtacgcctatgcgctgctcggttggacgggcagcaaagaatttcgtcgcgatctgcgccgctatgcggaggaagagcgcggcatgatcctcgacaaccatgccctctacgacctgaaaaagcgcatctttctgaaagcgggcagcgaagaagagattttctcgcatctgggtctggattatgtggagccgtgggaacgcaacgcg

SEQ ID NO: 2178 - protein, 394 aa, synthetic construct
  REGION 1..394: note = Variant of terminal deoxynucleotidyl transferase
MHHHHHHGGSGHPPSNTPEGEVPSVIARPVSQYSCQRKTTLNNYNKKFTDALEIMAENYKFKENLIACLEAKRAASILKYLPFEVTSMKDIQGLPCITDQVRDVIEEIIEEGESSRVKEVLNDERYKAFKQFTSVFGVGVKTAEKWFRMGLRTVEEAKASKSLKLSKMQKAGFLYYEDLASRVSKEEADAVTLIVKNTVRTFLPDALVTITGGFRRGKPMGHDVDFLITNPGPKEDDELLHKVVDLLKKQGLLLYEDIKESTFVEGQLPSRKIDAMDNFQKCFAILKLYQPGVDNSAVGTSKKSDMAEVKDWKAIRVDLVITPFEQYAYALLGWTGSKEFRRDLRRYAEEERGMILDNHALYDLKKRIFLKAGSEEEIFSHLGLDYVEPWERNA

SEQ ID NO: 2179 - DNA, 1182 bp, synthetic construct
  misc_feature 1..1182: note = Variant of terminal deoxynucleotidyl transferase
  source 1..1182: mol_type = other DNA
atgcatcaccaccatcatcatgggggttctggtcatccgccgagcaataccccggagggggaggtgccgagcgttatcgcccgtccggttagtcagtacagctgccagcgcaagaccacgctgaataactacaacaaaaagtttaccgacgcgctggagatcatggccgagaactacaaatttaaagagaacctgatcgcgtgtctggaagccaagcgcgccgcgagtattctgaaaagtctgccgttcgaggttaccagcatgaaagacatccaaggtctgccgtgcattaccgaccaagttcgtgacgtgatcgaggagatcatcgaagagggcgagagcagccgtgttaaagaagttctcaatgacgagcgctacaaggcctttaagcagttcaccagcgtgttcggtgtgggcgtgaaaaccgcggaaaagtggtttcgtatgggcctccgtacggttgaagaagcaaaggccagtaagagtctgaagctgagcaagatgcagaaggcgggctttctgtattacgaggatctggcgagccgcgttagtaaagaagaagccgatgccgttacgctcatcgtgaagaacacggtgcgtacctttctgccggatgcgctggtgaccatcaccggcggtttccgccgtggcaaacctatgggccacgacgttgactttctgatcacgaatccgggcccgaaagaggatgacgagctgctccacaaagtggttgatctgctcaagaagcaaggtctgctgctgtacgaagacatcaaagagagcacgttcgtggaggggcaactgccaagtcgcaaaatcgacgccatggacaacttccagaagtgcttcgccattctcaagctgtaccagccgggcgtggataacagtgcggttgggacgagtaagaaaagtgacatggccgaggttaaggattggaaagcgattcgtgtggatctggtgatcacgccattcgagcagtacgcctatgcgctgctcggttggacgggcagcaaagaatttcgtcgcgatctgcgccgctatgcggaggaagagcgcggcatgatcctcgacaaccatgccctctacgacctgaaaaagcgcatctttctgaaagcgggcagcgaagaagagattttcgcgcatctgggtctggattatgtggagccgtgggaacgcaacgcg

SEQ ID NO: 2180 - protein, 394 aa, synthetic construct
  REGION 1..394: note = Variant of terminal deoxynucleotidyl transferase
MHHHHHHGGSGHPPSNTPEGEVPSVIARPVSQYSCQRKTTLNNYNKKFTDALEIMAENYKFKENLIACLEAKRAASILKSLPFEVTSMKDIQGLPCITDQVRDVIEEIIEEGESSRVKEVLNDERYKAFKQFTSVFGVGVKTAEKWFRMGLRTVEEAKASKSLKLSKMQKAGFLYYEDLASRVSKEEADAVTLIVKNTVRTFLPDALVTITGGFRRGKPMGHDVDFLITNPGPKEDDELLHKVVDLLKKQGLLLYEDIKESTFVEGQLPSRKIDAMDNFQKCFAILKLYQPGVDNSAVGTSKKSDMAEVKDWKAIRVDLVITPFEQYAYALLGWTGSKEFRRDLRRYAEEERGMILDNHALYDLKKRIFLKAGSEEEIFAHLGLDYVEPWERNA

SEQ ID NO: 2181 - DNA, 1182 bp, synthetic construct
  misc_feature 1..1182: note = Variant of terminal deoxynucleotidyl transferase
  source 1..1182: mol_type = other DNA
atgcatcaccatcatcatcatggcgatagcttgcatccgccgagcaataccccggagggggaggtgccgagcgttatcgcccgtccggttagtcagtacagctgccagcgcaagaccacgctgaataactacaacaaaaagtttaccgacgcgctggagatcatggccgagaactacaaatttaaagagaacctgatcgcgtgtctggaagccaagcgcgccgcgagtattctgaaatatctgccgttcgaggttaccagcatgaaagacatccaaggtctgccgtgcattaccgaccaagttcgtgacgtgatcgaggagatcatcgaagagggcgagagcagccgtgttaaagaagttctcaatgacgagcgctacaaggcctttaagcagttcaccagcgtgttcggtgtgggcgtgaaaaccgcggaaaagtggtttcgtatgggcctccgtacggttgaagaagcaaaggccagtaagagtctgaagctgagcaagatgcagaaggcgggctttctgtattacgaggatctggcgagccgcgttagtaaagaagaagccgatgccgttacgctcatcgtgaagaacacggtgcgtacctttctgccggatgcgctggtgaccatcaccggcggtttccgccgtggcaaacctatgggccacgacgttgactttctgatcacgaatccgggcccgaaagaggatgacgagctgctccacaaagtggttgatctgctcaagaagcaaggtctgctgctgtacgaagacatcaaagagagcacgttcgtggaggggcaactgccaagtcgcaaaatcgacgccatggacaacttccagaagtgcttcgccattctcaagctgtaccagccgggcgtggataacagtgcggttgggacgagtaagaaaagtgacatggccgaggttaaggattggaaagcgattcgtgtggatctggtgatcacgccattcgagcagtacgcctatgcgctgctcggttggacgggcagcaaagaatttcgtcgcgatctgcgccgctatgcggaggaagagcgcggcatgatcctcgacaaccatgccctctacgacctgaaaaagcgcatctttctgaaagcgggcagcgaagaagagattttcgcgcatctgggtctggattatgtggagccgtgggaacgcaacgcg

SEQ ID NO: 2182 - protein, 394 aa, synthetic construct
  REGION 1..394: note = Variant of terminal deoxynucleotidyl transferase
MHHHHHHGDSLHPPSNTPEGEVPSVIARPVSQYSCQRKTTLNNYNKKFTDALEIMAENYKFKENLIACLEAKRAASILKYLPFEVTSMKDIQGLPCITDQVRDVIEEIIEEGESSRVKEVLNDERYKAFKQFTSVFGVGVKTAEKWFRMGLRTVEEAKASKSLKLSKMQKAGFLYYEDLASRVSKEEADAVTLIVKNTVRTFLPDALVTITGGFRRGKPMGHDVDFLITNPGPKEDDELLHKVVDLLKKQGLLLYEDIKESTFVEGQLPSRKIDAMDNFQKCFAILKLYQPGVDNSAVGTSKKSDMAEVKDWKAIRVDLVITPFEQYAYALLGWTGSKEFRRDLRRYAEEERGMILDNHALYDLKKRIFLKAGSEEEIFAHLGLDYVEPWERNA

SEQ ID NO: 2183 - DNA, 1182 bp, synthetic construct
  misc_feature 1..1182: note = Variant of terminal deoxynucleotidyl transferase
  source 1..1182: mol_type = other DNA
atgcatcaccaccatcatcatgggggttctggtcatccgccgagcaataccccggagggggaggtgccgagcgttatcgcccgtccggttagtcagtacagctgccagcgcaagaccacgctgaataactacaacaaaaagtttaccgacgcgctggagatcatggccgagaactacaaatttaaagagaacctgatcgcgtgtctggaagccaagcgcgccgcgagtattctgaaatatctgccgttcgaggttaccagcatgaaagacatccaaggtctgccgtgcattaccgaccaagttcgtgacgtgatcgaggagatcatcgaagagggcgagagcagccgtgttaaagaagttctcaatgacgagcgctacaaggcctttaagcagttcaccagcgtgttcggtgtgggcgtgaaaaccgcggaaaagtggtttcgtatgggcctccgtacggttgaagaagcaaaggccagtaagagtctgaagctgagcaagatgcagaaggcgggctttctgtattacgaggatctggcgagccgcgttagtaaagaagaagccgatgccgttacgctcatcgtgaagaacacggtgctgacctttctgccggatgcgctggtgaccatcaccggcggtttccgccgtggcaaacctatgggccacgacgttgactttctgatcacgaatccgggcccgaaagaggatgacgagctgctccacaaagtggttgatctgctcaagaagcaaggtctgctgctgtacgaagacatcaaagagagcacgttcgtggaggggcaactgccaagtcgcaaaatcgacgccatggacaacttccagaagtgcttcgccattctcaagctgtaccagccgggcgtggataacagtgcggttgggacgagtaagaaaagtgacatggccgaggttaaggattggaaagcgattcgtgtggatctggtgatcacgccattcgagcagtacgcctatgcgctgctcggttggacgggcagcaaagaatttcgtcgcgatctgcgccgctatgcggaggaagagcgcggcatgatcctcgacaaccatgccctctacgacctgaaaaagcgcatctttctgaaagcgggcagcgaagaagagattttcgcgcatctgggtctggattatgtggagccgtgggaacgcaacgcg

SEQ ID NO: 2184 - protein, 394 aa, synthetic construct
  REGION 1..394: note = Variant of terminal deoxynucleotidyl transferase
MHHHHHHGGSGHPPSNTPEGEVPSVIARPVSQYSCQRKTTLNNYNKKFTDALEIMAENYKFKENLIACLEAKRAASILKYLPFEVTSMKDIQGLPCITDQVRDVIEEIIEEGESSRVKEVLNDERYKAFKQFTSVFGVGVKTAEKWFRMGLRTVEEAKASKSLKLSKMQKAGFLYYEDLASRVSKEEADAVTLIVKNTVLTFLPDALVTITGGFRRGKPMGHDVDFLITNPGPKEDDELLHKVVDLLKKQGLLLYEDIKESTFVEGQLPSRKIDAMDNFQKCFAILKLYQPGVDNSAVGTSKKSDMAEVKDWKAIRVDLVITPFEQYAYALLGWTGSKEFRRDLRRYAEEERGMILDNHALYDLKKRIFLKAGSEEEIFAHLGLDYVEPWERNA

SEQ ID NO: 2185 - DNA, 1182 bp, synthetic construct
  misc_feature 1..1182: note = Variant of terminal deoxynucleotidyl transferase
  source 1..1182: mol_type = other DNA
atgcatcaccaccatcatcatgggggttctggtcatccgccgagcaataccccggagggggaggtgccgagcgttatcgcccgtccggttagtcagtacagctgccagcgcaagaccacgctgaataactacaacaaaaagtttaccgacgcgctggagatcatggccgagaactacaaatttaaagagaacctgatcgcgtgtctggaagccaagcgcgccgcgagtattctgaaatatctgccgttcgaggttaccagcatgaaagacatccaaggtctgccgtgcattaccgaccaagttcgtgacgtgatcgaggagatcatcgaagagggcgagagcagccgtgttaaagaagttctcaatgacgagcgctacaaggcctttaagcagttcaccagcgtgttcggtgtgggcgtgaaaaccgcggaaaagtggtttcgtatgggcctccgtacggttgaagaagcaaaggccagtaagagtctgaagctgagcaagatgcagaaggcgggctttctgtattacgaggatctggcgagccgcgttagtaaagaagaagccgatgccgttacgctcatcgtgaagaacacggtgcgtacctttctgccggatgtgctggtgaccatcaccggcggtttccgccgtggcaaacctatgggccacgacgttgactttctgatcacgaatccgggcccgaaagaggatgacgagctgctccacaaagtggttgatctgctcaagaagcaaggtctgctgctgtacgaagacatcaaagagagcacgttcgtggaggggcaactgccaagtcgcaaaatcgacgccatggacaacttccagaagtgcttcgccattctcaagctgtaccagccgggcgtggataacagtgcggttgggacgagtaagaaaagtgacatggccgaggttaaggattggaaagcgattcgtgtggatctggtgatcacgccattcgagcagtacgcctatgcgctgctcggttggacgggcagcaaagaatttcgtcgcgatctgcgccgctatgcggaggaagagcgcggcatgatcctcgacaaccatgccctctacgacctgaaaaagcgcatctttctgaaagcgggcagcgaagaagagattttcgcgcatctgggtctggattatgtggagccgtgggaacgcaacgcg

SEQ ID NO: 2186 - protein, 394 aa, synthetic construct
  REGION 1..394: note = Variant of terminal deoxynucleotidyl transferase
MHHHHHHGGSGHPPSNTPEGEVPSVIARPVSQYSCQRKTTLNNYNKKFTDALEIMAENYKFKENLIACLEAKRAASILKYLPFEVTSMKDIQGLPCITDQVRDVIEEIIEEGESSRVKEVLNDERYKAFKQFTSVFGVGVKTAEKWFRMGLRTVEEAKASKSLKLSKMQKAGFLYYEDLASRVSKEEADAVTLIVKNTVRTFLPDVLVTITGGFRRGKPMGHDVDFLITNPGPKEDDELLHKVVDLLKKQGLLLYEDIKESTFVEGQLPSRKIDAMDNFQKCFAILKLYQPGVDNSAVGTSKKSDMAEVKDWKAIRVDLVITPFEQYAYALLGWTGSKEFRRDLRRYAEEERGMILDNHALYDLKKRIFLKAGSEEEIFAHLGLDYVEPWERNA

SEQ ID NO: 2187 - DNA, 1182 bp, synthetic construct
  misc_feature 1..1182: note = Variant of terminal deoxynucleotidyl transferase
  source 1..1182: mol_type = other DNA
atgcatcaccaccatcatcatgggggttctggtcatccgccgagcaataccccggagggggaggtgccgagcgttatcgcccgtccggttagtcagtacagctgccagcgcaagaccacgctgaataactacaacaaaaagtttaccgacgcgctggagatcatggccgagaactacaaatttaaagagaacctgatcgcgtgtctggaagccaagcgcgccgcgagtattctgaaatatctgccgttcgaggttaccagcatgaaagacatccaaggtctgccgtgcattaccgaccaagttcgtgacgtgatcgaggagatcatcgaagagggcgagagcagccgtgttaaagaagttctcaatgacgagcgctacaaggcctttaagcagttcaccagcgtgttcggtgtgggcgtgaaaaccgcggaaaagtggtttcgtatgggcctccgtacggttgaagaagcaaaggccagtaagagtctgaagctgagcaagatgcagaaggcgggctttctgtattacgaggatctggcgagccgcgttagtaaagaagaagccgatgccgttacgctcatcgtgaagaacacggtgcgtacctttctgccggatgcgctggtgaccatcaccggcggtttccgccgtggcaaacctatgggccacgacgttgactttctgatcacgaatccgggcccgaaagaggatgacgagctgctccacaaagtggttgatctgctcaagaagcaaggtctgctgctgtacgaagacatcaaagagagcacgttcacggaggggcaactgccaagtcgcaaaatcgacgccatggacaacttccagaagtgcttcgccattctcaagctgtaccagccgggcgtggataacagtgcggttgggacgagtaagaaaagtgacatggccgaggttaaggattggaaagcgattcgtgtggatctggtgatcacgccattcgagcagtacgcctatgcgctgctcggttggacgggcagcaaagaatttcgtcgcgatctgcgccgctatgcggaggaagagcgcggcatgatcctcgacaaccatgccctctacgacctgaaaaagcgcatctttctgaaagcgggcagcgaagaagagattttcgcgcatctgggtctggattatgtggagccgtgggaacgcaacgcg

SEQ ID NO: 2188 - protein, 394 aa, synthetic construct
  REGION 1..394: note = Variant of terminal deoxynucleotidyl transferase
MHHHHHHGGSGHPPSNTPEGEVPSVIARPVSQYSCQRKTTLNNYNKKFTDALEIMAENYKFKENLIACLEAKRAASILKYLPFEVTSMKDIQGLPCITDQVRDVIEEIIEEGESSRVKEVLNDERYKAFKQFTSVFGVGVKTAEKWFRMGLRTVEEAKASKSLKLSKMQKAGFLYYEDLASRVSKEEADAVTLIVKNTVRTFLPDALVTITGGFRRGKPMGHDVDFLITNPGPKEDDELLHKVVDLLKKQGLLLYEDIKESTFTEGQLPSRKIDAMDNFQKCFAILKLYQPGVDNSAVGTSKKSDMAEVKDWKAIRVDLVITPFEQYAYALLGWTGSKEFRRDLRRYAEEERGMILDNHALYDLKKRIFLKAGSEEEIFAHLGLDYVEPWERNA

SEQ ID NO: 2189 - DNA, 1182 bp, synthetic construct
  misc_feature 1..1182: note = Variant of terminal deoxynucleotidyl transferase
  source 1..1182: mol_type = other DNA
atgcatcaccaccatcatcatgggggttctggtcatccgccgagcaataccccggagggggaggtgccgagcgttatcgcccgtccggttagtcagtacagctgccagcgcaagaccacgctgaataactacaacaaaaagtttaccgacgcgctggagatcatggccgagaactacaaatttaaagagaacctgatcgcgtgtctggaagccaagcgcgccgcgagtattctgaaatatctgccgttcgaggttaccagcatgaaagacatccaaggtctgccgtgcattaccgaccaagttcgtgacgtgatcgaggaggatatcgaagagggcgagagcagccgtgttaaagaagttctcaatgacgagcgctacaaggcctttaagcagttcaccagcgtgttcggtgtgggcgtgaaaaccgcggaaaagtggtttcgtatgggcctccgtacggttgaagaagcaaaggccagtaagagtctgaagctgagcaagatgcagaaggcgggctttctgtattacgaggatctggcgagccgcgttagtaaagaagaagccgatgccgttacgctcatcgtgaagaacacggtgcgtacctttctgccggatgcgctggtgaccatcaccggcggtttccgccgtggcaaacctatgggccacgacgttgactttctgatcacgaatccgggcccgaaagaggatgacgagctgctccacaaagtggttgatctgctcaagaagcaaggtctgctgctgtacgaagacatcaaagagagcacgttcgtggaggggcaactgccaagtcgcaaaatcgacgccatggacaacttccagaagtgcttcgccattctcaagctgtaccagccgggcgtggataacagtgcggttgggacgagtaagaaaagtgacatggccgaggttaaggattggaaagcgattcgtgtggatctggtgatcacgccattcgagcagtacgcctatgcgctgctcggttggacgggcagcaaagaatttcgtcgcgatctgcgccgctatgcggaggaagagcgcggcatgatcctcgacaaccatgccctctacgacctgaaaaagcgcatctttctgaaagcgggcagcgaagaagagattttcgcgcatctgggtctggattatgtggagccgtgggaacgcaacgcg

SEQ ID NO: 2190 - protein, 394 aa, synthetic construct
  REGION 1..394: note = Variant of terminal deoxynucleotidyl transferase
MHHHHHHGGSGHPPSNTPEGEVPSVIARPVSQYSCQRKTTLNNYNKKFTDALEIMAENYKFKENLIACLEAKRAASILKYLPFEVTSMKDIQGLPCITDQVRDVIEEDIEEGESSRVKEVLNDERYKAFKQFTSVFGVGVKTAEKWFRMGLRTVEEAKASKSLKLSKMQKAGFLYYEDLASRVSKEEADAVTLIVKNTVRTFLPDALVTITGGFRRGKPMGHDVDFLITNPGPKEDDELLHKVVDLLKKQGLLLYEDIKESTFVEGQLPSRKIDAMDNFQKCFAILKLYQPGVDNSAVGTSKKSDMAEVKDWKAIRVDLVITPFEQYAYALLGWTGSKEFRRDLRRYAEEERGMILDNHALYDLKKRIFLKAGSEEEIFAHLGLDYVEPWERNA

SEQ ID NO: 2191 - DNA, 1182 bp, synthetic construct
  misc_feature 1..1182: note = Variant of terminal deoxynucleotidyl transferase
  source 1..1182: mol_type = other DNA
atgcatcaccaccatcatcatgggggttctggtcatccgccgagcaataccccggaggttgaggtgccgagcgttatcgcccgtccggttagtcagtacagctgccagcgcaagaccacgctgaataactacaacaaaaagtttaccgacgcgctggagatcatggccgagaactacaaatttaaagagaacctgatcgcgtgtctggaagccaagcgcgccgcgagtattctgaaatatctgccgttcgaggttaccagcatgaaagacatccaaggtctgccgtgcattaccgaccaagttcgtgacgtgatcgaggagatcatcgaagagggcgagagcagccgtgttaaagaagttctcaatgacgagcgctacaaggcctttaagcagttcaccagcgtgttcggtgtgggcgtgaaaaccgcggaaaagtggtttcgtatgggcctccgtacggttgaagaagcaaaggccagtaagagtctgaagctgagcaagatgcagaaggcgggctttctgtattacgaggatctggcgagccgcgttagtaaagaagaagccgatgccgttacgctcatcgtgaagaacacggtgcgtacctttctgccggatgcgctggtgaccatcaccggcggtttccgccgtggcaaacctatgggccacgacgttgactttctgatcacgaatccgggcccgaaagaggatgacgagctgctccacaaagtggttgatctgctcaagaagcaaggtctgctgctgtacgaagacatcaaagagagcacgttcgtggaggggcaactgccaagtcgcaaaatcgacgccatggacaacttccagaagtgcttcgccattctcaagctgtaccagccgggcgtggataacagtgcggttgggacgagtaagaaaagtgacatggccgaggttaaggattggaaagcgattcgtgtggatctggtgatcacgccattcgagcagtacgcctatgcgctgctcggttggacgggcagcaaagaatttcgtcgcgatctgcgccgctatgcggaggaagagcgcggcatgatcctcgacaaccatgccctctacgacctgaaaaagcgcatctttctgaaagcgggcagcgaagaagagattttcgcgcatctgggtctggattatgtggagccgtgggaacgcaacgcg

SEQ ID NO: 2192 - protein, 394 aa, synthetic construct
  REGION 1..394: note = Variant of terminal deoxynucleotidyl transferase
MHHHHHHGGSGHPPSNTPEVEVPSVIARPVSQYSCQRKTTLNNYNKKFTDALEIMAENYKFKENLIACLEAKRAASILKYLPFEVTSMKDIQGLPCITDQVRDVIEEIIEEGESSRVKEVLNDERYKAFKQFTSVFGVGVKTAEKWFRMGLRTVEEAKASKSLKLSKMQKAGFLYYEDLASRVSKEEADAVTLIVKNTVRTFLPDALVTITGGFRRGKPMGHDVDFLITNPGPKEDDELLHKVVDLLKKQGLLLYEDIKESTFVEGQLPSRKIDAMDNFQKCFAILKLYQPGVDNSAVGTSKKSDMAEVKDWKAIRVDLVITPFEQYAYALLGWTGSKEFRRDLRRYAEEERGMILDNHALYDLKKRIFLKAGSEEEIFAHLGLDYVEPWERNA

SEQ ID NO: 2193 - DNA, 1182 bp, synthetic construct
  misc_feature 1..1182: note = Variant of terminal deoxynucleotidyl transferase
  source 1..1182: mol_type = other DNA
atgcatcaccaccatcatcatgggggttctggtcatccgccgagcaataccccggagggggaggtgccgagcgttatcgcccgtccggttagtcagtacagctgccagcgcaagaccacgctgaataactacaacaaaaagtttaccgacgcgctggagatcatggccgagaactacaaatttaaagagaacctgatcgcgtgtctggaagccaagcgcgccgcgagtattctgaaatatctgccgttcgaggttaccagcatgaaagacatccaaggtctgccgtgcattaccgaccaagttcgtgacgtgatcgaggagatcatcgaagagggcgagagcagccgtgttaaagaagttctcaatgacgagcgctacaaggcctttaagcagttcaccagcgtgttcggtgtgggcgtgaaaaccgcggaaaagtggtttcgtatgggcctccgtacggttgaagaagcaaaggccagtaagagtctgaagctgagcaagatgcagaaggcgggctttctgtattacgaggatctggcgagccgcgttagtaaagaagaagccgatgccgttacgctcatcgtgaagaacacggtgcgtacctttctgccggatgcgctggtgaccatcaccggcggtttccgccgtggcaaacctatgggccacgacgttgactttctgatcacgaatccgggcccgaaagaggatgacgagctgctccacaaagtggttgatctgctcaagaagcaaggtctgctgctgtacgaagacatcaaagagagcacgttcgtggaggggcaactgccaagtcgcaaaatcgacgccatggacaacttccagaagtgcttcgccattctcaagctgtaccagccgggcgtggataacagtgcggttgggacgagtaagaaattggacatggccgaggttaaggattggaaagcgattcgtgtggatctggtgatcacgccattcgagcagtacgcctatgcgctgctcggttggacgggcagcaaagaatttcgtcgcgatctgcgccgctatgcggaggaagagcgcggcatgatcctcgacaaccatgccctctacgacctgaaaaagcgcatctttctgaaagcgggcagcgaagaagagattttcgcgcatctgggtctggattatgtggagccgtgggaacgcaacgcg

SEQ ID NO: 2194 - protein, 394 aa, synthetic construct
  REGION 1..394: note = Variant of terminal deoxynucleotidyl transferase
MHHHHHHGGSGHPPSNTPEGEVPSVIARPVSQYSCQRKTTLNNYNKKFTDALEIMAENYKFKENLIACLEAKRAASILKYLPFEVTSMKDIQGLPCITDQVRDVIEEIIEEGESSRVKEVLNDERYKAFKQFTSVFGVGVKTAEKWFRMGLRTVEEAKASKSLKLSKMQKAGFLYYEDLASRVSKEEADAVTLIVKNTVRTFLPDALVTITGGFRRGKPMGHDVDFLITNPGPKEDDELLHKVVDLLKKQGLLLYEDIKESTFVEGQLPSRKIDAMDNFQKCFAILKLYQPGVDNSAVGTSKKLDMAEVKDWKAIRVDLVITPFEQYAYALLGWTGSKEFRRDLRRYAEEERGMILDNHALYDLKKRIFLKAGSEEEIFAHLGLDYVEPWERNA

SEQ ID NO: 2195 - DNA, 1182 bp, synthetic construct
  misc_feature 1..1182: note = Variant of terminal deoxynucleotidyl transferase
  source 1..1182: mol_type = other DNA
atgcatcaccaccatcatcatgggggttctggtcatccgccgagcaataccccggagggggaggtgccgagcgttatcgcccgtccggttagtcagtacagctgccagcgcaagaccacgctgaataactacaacaaaaagtttaccgacgcgctggagatcatggccgagaactacaaatttaaagagaacctgatcgcgtgtctggaagccaagcgcgccgcgagtattatgaaatatctgccgttcgaggttaccagcatgaaagacatccaaggtctgccgtgcattaccgaccaagttcgtgacgtgatcgaggagatcatcgaagagggcgagagcagccgtgttaaagaagttctcaatgacgagcgctacaaggcctttaagcagttcaccagcgtgttcggtgtgggcgtgaaaaccgcggaaaagtggtttcgtatgggcctccgtacggttgaagaagcaaaggccagtaagagtctgaagctgagcaagatgcagaaggcgggctttctgtattacgaggatctggcgagccgcgttagtaaagaagaagccgatgccgttacgctcatcgtgaagaacacggtgcgtacctttctgccggatgcgctggtgaccatcaccggcggtttccgccgtggcaaacctatgggccacgacgttgactttctgatcacgaatccgggcccgaaagaggatgacgagctgctccacaaagtggttgatctgctcaagaagcaaggtctgctgctgtacgaagacatcaaagagagcacgttcgtggaggggcaactgccaagtcgcaaaatcgacgccatggacaacttccagaagtgcttcgccattctcaagctgtaccagccgggcgtggataacagtgcggttgggacgagtaagaaaagtgacatggccgaggttaaggattggaaagcgattcgtgtggatctggtgatcacgccattcgagcagtacgcctatgcgctgctcggttggacgggcagcaaagaatttcgtcgcgatctgcgccgctatgcggaggaagagcgcggcatgatcctcgacaaccatgccctctacgacctgaaaaagcgcatctttctgaaagcgggcagcgaagaagagattttcgcgcatctgggtctggattatgtggagccgtgggaacgcaacgcg

SEQ ID NO: 2196 - protein, 394 aa, synthetic construct
  REGION 1..394: note = Variant of terminal deoxynucleotidyl transferase
MHHHHHHGGSGHPPSNTPEGEVPSVIARPVSQYSCQRKTTLNNYNKKFTDALEIMAENYKFKENLIACLEAKRAASIMKYLPFEVTSMKDIQGLPCITDQVRDVIEEIIEEGESSRVKEVLNDERYKAFKQFTSVFGVGVKTAEKWFRMGLRTVEEAKASKSLKLSKMQKAGFLYYEDLASRVSKEEADAVTLIVKNTVRTFLPDALVTITGGFRRGKPMGHDVDFLITNPGPKEDDELLHKVVDLLKKQGLLLYEDIKESTFVEGQLPSRKIDAMDNFQKCFAILKLYQPGVDNSAVGTSKKSDMAEVKDWKAIRVDLVITPFEQYAYALLGWTGSKEFRRDLRRYAEEERGMILDNHALYDLKKRIFLKAGSEEEIFAHLGLDYVEPWERNA

SEQ ID NO: 2197 - DNA, 1182 bp, synthetic construct
  misc_feature 1..1182: note = Variant of terminal deoxynucleotidyl transferase
  source 1..1182: mol_type = other DNA
atgcatcaccaccatcatcatgggggttctggtcatccgccgagcaataccccggagggggaggtgccgagcgttatcgcccgtccggttagtcagtacagctgccagcgcaagaccacgctgaataactacaacaaaaagtttaccgacgcgctggagatcatggccgagaactacaaatttaaagagaacctgatcgcgtgtctggaagccaagcgcgccgcgagtattctgaaatatctgccgttcgaggttaccagcatgaaagacatccaaggtctgccgtgcattaccgaccaagttcgtgacgtgatcgaggagatcatcgaagagggcgagagcagccgtgttaaagaagttctcaatgacgagcgctacaaggcctttaagcagttcaccagcgtgttcggtgtgggcgtgaaaaccgcggaaaagtggtttcgtatgggcctccgtacggttgaagaagcaaaggccagtaagagtctgaagctgagcaagatgcagaaggcgggctttctgtattacgaggatctggcgagccgcgttagtaaagaagaagccgatgccgttacgctcatcgtgaagaacacggtgcgtacctttctgccggatgcgctggtgaccatcaccggcggtttccgccgtggcaaacctatgggccacgacgttgactttctgatcacgaatccgggcccgaaagaggatgacgagctgctccacaaagtggttgatctgctcaagaagcaaggtctgctgctgtacgaagacatcaaagagagcacgttcgtggaggggcaactgccaagtcgcaaaatcgacgccatggacaacttccagaagtgcttcgccattctcaagctgtaccagccgggcgtggataacagtgcggttgggacgagtaagaaaagtgacatggccgaggttaaggattggaaagcgattcgtgtggatctggtgatcacgccattcgagcagtacgcctatgcgctgctcggttggacgggcagcaaagaatttcgtcgcgatctgcgccgctatgcggagctggagcgcggcatgatcctcgacaaccatgccctctacgacctgaaaaagcgcatctttctgaaagcgggcagcgaagaagagattttcgcgcatctgggtctggattatgtggagccgtgggaacgcaacgcg

SEQ ID NO: 2198 - protein, 394 aa, synthetic construct
  REGION 1..394: note = Variant of terminal deoxynucleotidyl transferase
MHHHHHHGGSGHPPSNTPEGEVPSVIARPVSQYSCQRKTTLNNYNKKFTDALEIMAENYKFKENLIACLEAKRAASILKYLPFEVTSMKDIQGLPCITDQVRDVIEEIIEEGESSRVKEVLNDERYKAFKQFTSVFGVGVKTAEKWFRMGLRTVEEAKASKSLKLSKMQKAGFLYYEDLASRVSKEEADAVTLIVKNTVRTFLPDALVTITGGFRRGKPMGHDVDFLITNPGPKEDDELLHKVVDLLKKQGLLLYEDIKESTFVEGQLPSRKIDAMDNFQKCFAILKLYQPGVDNSAVGTSKKSDMAEVKDWKAIRVDLVITPFEQYAYALLGWTGSKEFRRDLRRYAELERGMILDNHALYDLKKRIFLKAGSEEEIFAHLGLDYVEPWERNA

SEQ ID NO: 2199 - DNA, 1182 bp, synthetic construct
  misc_feature 1..1182: note = Variant of terminal deoxynucleotidyl transferase
  source 1..1182: mol_type = other DNA
atgcatcaccaccatcatcatgggggttctggtcatccgccgagcaataccccggagggggaggtgccgagcgttatcgcccgtccggttagtcagtacagctgccagcgcaagaccacgctgaataactacaacaaaaagtttaccgacgcgctggagatcatggccgagaactacaaatttaaagagaacctgatcgcgtgtctggaagccaagcgcgccgcgagtattctgaaatatctgccgttcgaggttaccagcatgaaagacatccaaggtctgccgtgcattaccgaccaagttcgtgacgtgatcgaggagatcatcgaagagggcgagagcagccctgttaaagaagttctcaatgacgagcgctacaaggcctttaagcagttcaccagcgtgttcggtgtgggcgtgaaaaccgcggaaaagtggtttcgtatgggcctccgtacggttgaagaagcaaaggccagtaagagtctgaagctgagcaagatgcagaaggcgggctttctgtattacgaggatctggcgagccgcgttagtaaagaagaagccgatgccgttacgctcatcgtgaagaacacggtgcgtacctttctgccggatgcgctggtgaccatcaccggcggtttccgccgtggcaaacctatgggccacgacgttgactttctgatcacgaatccgggcccgaaagaggatgacgagctgctccacaaagtggttgatctgctcaagaagcaaggtctgctgctgtacgaagacatcaaagagagcacgttcgtggaggggcaactgccaagtcgcaaaatcgacgccatggacaacttccagaagtgcttcgccattctcaagctgtaccagccgggcgtggataacagtgcggttgggacgagtaagaaaagtgacatggccgaggttaaggattggaaagcgattcgtgtggatctggtgatcacgccattcgagcagtacgcctatgcgctgctcggttggacgggcagcaaagaatttcgtcgcgatctgcgccgctatgcggaggaagagcgcggcatgatcctcgacaaccatgccctctacgacctgaaaaagcgcatctttctgaaagcgggcagcgaagaagagattttcgcgcatctgggtctggattatgtggagccgtgggaacgcaacgcg

SEQ ID NO: 2200 - protein, 394 aa, synthetic construct
  REGION 1..394: note = Variant of terminal deoxynucleotidyl transferase
MHHHHHHGGSGHPPSNTPEGEVPSVIARPVSQYSCQRKTTLNNYNKKFTDALEIMAENYKFKENLIACLEAKRAASILKYLPFEVTSMKDIQGLPCITDQVRDVIEEIIEEGESSPVKEVLNDERYKAFKQFTSVFGVGVKTAEKWFRMGLRTVEEAKASKSLKLSKMQKAGFLYYEDLASRVSKEEADAVTLIVKNTVRTFLPDALVTITGGFRRGKPMGHDVDFLITNPGPKEDDELLHKVVDLLKKQGLLLYEDIKESTFVEGQLPSRKIDAMDNFQKCFAILKLYQPGVDNSAVGTSKKSDMAEVKDWKAIRVDLVITPFEQYAYALLGWTGSKEFRRDLRRYAEEERGMILDNHALYDLKKRIFLKAGSEEEIFAHLGLDYVEPWERNA

SEQ ID NO: 2201 - DNA, 1182 bp, synthetic construct
  misc_feature 1..1182: note = Variant of terminal deoxynucleotidyl transferase
  source 1..1182: mol_type = other DNA
atgcatcaccaccatcatcatgggggttctggtcatccgccgagcaataccccggagggggaggtgccgagcgttatcgcccgtccggttagtcagtacagctgccagcgcaagaccacgctgaataactacaacaaaaagtttaccgacgcgctggagatcatggccgagaactacaaatttaaagagaacctgatcgcgtgtctggaagccaagcgcgccgcgagtattctgaaatatctgccgttcgaggttaccagcatgaaagacatccaaggtctgccgtgcattaccgaccaagttcgtgacgtgatcgaggagatcatcgaagagggcgagagcagccgtgttaaagaagttctcaatgacgagcgctacaaggcctttaagcagttcaccagcgtgttcggtgtgggcgtgaaaaccgcggaaaagtggtttcgtatgggcctccgtacggttgaagaagcaaaggccagtaagagtctgaagctgagcaagatgcagaaggcgggctttctgtattacgaggatctggcgagccgcgttagtaaagaagaagccgatgccgttacgctcatcgtgaagaacacggtgcgtacctttctgccggatgcgctggtgaccatcaccggcggtttccgccgtggcaaacctatgggccacgacgttgactttctgatcacgaatccgggcccgaaagaggatgacgagctgctccacaaagtggttgatctgctcaaggctcaaggtctgctgctgtacgaagacatcaaagagagcacgttcgtggaggggcaactgccaagtcgcaaaatcgacgccatggacaacttccagaagtgcttcgccattctcaagctgtaccagccgggcgtggataacagtgcggttgggacgagtaagaaaagtgacatggccgaggttaaggattggaaagcgattcgtgtggatctggtgatcacgccattcgagcagtacgcctatgcgctgctcggttggacgggcagcaaagaatttcgtcgcgatctgcgccgctatgcggaggaagagcgcggcatgatcctcgacaaccatgccctctacgacctgaaaaagcgcatctttctgaaagcgggcagcgaagaagagattttcgcgcatctgggtctggattatgtggagccgtgggaacgcaacgcg

SEQ ID NO: 2202 - protein, 394 aa, synthetic construct
  REGION 1..394: note = Variant of terminal deoxynucleotidyl transferase
MHHHHHHGGSGHPPSNTPEGEVPSVIARPVSQYSCQRKTTLNNYNKKFTDALEIMAENYKFKENLIACLEAKRAASILKYLPFEVTSMKDIQGLPCITDQVRDVIEEIIEEGESSRVKEVLNDERYKAFKQFTSVFGVGVKTAEKWFRMGLRTVEEAKASKSLKLSKMQKAGFLYYEDLASRVSKEEADAVTLIVKNTVRTFLPDALVTITGGFRRGKPMGHDVDFLITNPGPKEDDELLHKVVDLLKAQGLLLYEDIKESTFVEGQLPSRKIDAMDNFQKCFAILKLYQPGVDNSAVGTSKKSDMAEVKDWKAIRVDLVITPFEQYAYALLGWTGSKEFRRDLRRYAEEERGMILDNHALYDLKKRIFLKAGSEEEIFAHLGLDYVEPWERNA

SEQ ID NO: 2203 - DNA, 1182 bp, synthetic construct
  misc_feature 1..1182: note = Variant of terminal deoxynucleotidyl transferase
  source 1..1182: mol_type = other DNA
atgcatcaccaccatcatcatgggggttctggtcatccgccgagcaataccccggagggggaggtgccgagcgttatcgcccgtccggttagtcagtacagctgccagcgcaagaccacgctgaataactacaacaaaaagtttaccgacgcgggggagatcatggccgagaactacaaatttaaagagaacctgatcgcgtgtctggaagccaagcgcgccgcgagtattctgaaatatctgccgttcgaggttaccagcatgaaagacatccaaggtctgccgtgcattaccgaccaagttcgtgacgtgatcgaggagatcatcgaagagggcgagagcagccgtgttaaagaagttctcaatgacgagcgctacaaggcctttaagcagttcaccagcgtgttcggtgtgggcgtgaaaaccgcggaaaagtggtttcgtatgggcctccgtacggttgaagaagcaaaggccagtaagagtctgaagctgagcaagatgcagaaggcgggctttctgtattacgaggatctggcgagccgcgttagtaaagaagaagccgatgccgttacgctcatcgtgaagaacacggtgcgtacctttctgccggatgcgctggtgaccatcaccggcggtttccgccgtggcaaacctatgggccacgacgttgactttctgatcacgaatccgggcccgaaagaggatgacgagctgctccacaaagtggttgatctgctcaagaagcaaggtctgctgctgtacgaagacatcaaagagagcacgttcgtggaggggcaactgccaagtcgcaaaatcgacgccatggacaacttccagaagtgcttcgccattctcaagctgtaccagccgggcgtggataacagtgcggttgggacgagtaagaaaagtgacatggccgaggttaaggattggaaagcgattcgtgtggatctggtgatcacgccattcgagcagtacgcctatgcgctgctcggttggacgggcagcaaagaatttcgtcgcgatctgcgccgctatgcggaggaagagcgcggcatgatcctcgacaaccatgccctctacgacctgaaaaagcgcatctttctgaaagcgggcagcgaagaagagattttcgcgcatctgggtctggattatgtggagccgtgggaacgcaacgcg

SEQ ID NO: 2204 - protein, 394 aa, synthetic construct
  REGION 1..394: note = Variant of terminal deoxynucleotidyl transferase
MHHHHHHGGSGHPPSNTPEGEVPSVIARPVSQYSCQRKTTLNNYNKKFTDAGEIMAENYKFKENLIACLEAKRAASILKYLPFEVTSMKDIQGLPCITDQVRDVIEEIIEEGESSRVKEVLNDERYKAFKQFTSVFGVGVKTAEKWFRMGLRTVEEAKASKSLKLSKMQKAGFLYYEDLASRVSKEEADAVTLIVKNTVRTFLPDALVTITGGFRRGKPMGHDVDFLITNPGPKEDDELLHKVVDLLKKQGLLLYEDIKESTFVEGQLPSRKIDAMDNFQKCFAILKLYQPGVDNSAVGTSKKSDMAEVKDWKAIRVDLVITPFEQYAYALLGWTGSKEFRRDLRRYAEEERGMILDNHALYDLKKRIFLKAGSEEEIFAHLGLDYVEPWERNA

SEQ ID NO: 2205 - DNA, 1182 bp, synthetic construct
  misc_feature 1..1182: note = Variant of terminal deoxynucleotidyl transferase
  source 1..1182: mol_type = other DNA
atgcatcaccaccatcatcatgggggttctggtcatccgccgagcaataccccggagggggaggtgccgagcgttatcgcccgtccggttagtcagtacagctgccagcgcaagaccacgctgaataactacaacaaaaagtttaccgacgcgctggagatcatggccgagaactacaaatttaaagagaacctgatcgcgtgtctggaagccaagcgcgccgcgagtattctgaaatatctgccgttcgaggttaccagcatgaaagacatccaaggtctgccgtgcattaccgaccaagttcgtgacgtgatcgaggagatcatcgaagagggcgagagcagccgtgttaaagaagttctcaatgacgagcgctacaaggcctttaagcagttcaccagcgtgttcggtgtgggcgtgaaaaccgcggaaaagtggtttcgtatgggcctccgtacggttgaagaagcaaaggccagtaagagtctgaagctgagcaagatgcagaaggcgggctttctgtattacgaggatctggcgagccgcgttagtaaagaagaagccgatgccgttacgctcatcgtgaagaacacggtgcgtacctttctgccggatgcgctggtgaccatcaccggcggtttccgccgtggcaaacctatgggccacgacgttgactttctgatcacgaatccgggcccgaaagaggatgacgagctgctccacaaagtggttgatctgctcaagaagcaaggtctgctgctgtacgaagacatcaaagagagcacgttcgtggaggggcaactgccaagtcgcaaaatcgacgccatggacaacttccagaagtgcttcgccattctcaagctgtaccagccgggcgtggataacagtgcggttgggacgagtaagaaaagtgacatggccgaggttaaggattggaaagcgattcgtgtggatctggtgatcacgccattcgagcagtacgcctatgcgctgctcggttggacgggcagcaaagaatttcgtcgcgatctgcgccgctatgcggaggaagagcgcggcatgatcctcgacaaccatgccctctacgacctgaaaaagcgcatctttctgaaagcgggcagcgaagaagaggggttcgcgcatctgggtctggattatgtggagccgtgggaacgcaacgcg

SEQ ID NO: 2206 - protein, 394 aa, synthetic construct
  REGION 1..394: note = Variant of terminal deoxynucleotidyl transferase
MHHHHHHGGSGHPPSNTPEGEVPSVIARPVSQYSCQRKTTLNNYNKKFTDALEIMAENYKFKENLIACLEAKRAASILKYLPFEVTSMKDIQGLPCITDQVRDVIEEIIEEGESSRVKEVLNDERYKAFKQFTSVFGVGVKTAEKWFRMGLRTVEEAKASKSLKLSKMQKAGFLYYEDLASRVSKEEADAVTLIVKNTVRTFLPDALVTITGGFRRGKPMGHDVDFLITNPGPKEDDELLHKVVDLLKKQGLLLYEDIKESTFVEGQLPSRKIDAMDNFQKCFAILKLYQPGVDNSAVGTSKKSDMAEVKDWKAIRVDLVITPFEQYAYALLGWTGSKEFRRDLRRYAEEERGMILDNHALYDLKKRIFLKAGSEEEGFAHLGLDYVEPWERNA

SEQ ID NO: 2207 - DNA, 1182 bp, synthetic construct
  misc_feature 1..1182: note = Variant of terminal deoxynucleotidyl transferase
  source 1..1182: mol_type = other DNA
atgcatcaccaccatcatcatgggggttctggtcatccgccgagcaataccccggagaaggaggtgccgagcgttatcgcccgtccggttagtcagtacagctgccagcgcaagaccacgctgaataactacaacaaaaagtttaccgacgcgctggagatcatggccgagaactacaaatttaaagagaacctgatcgcgtgtctggaagccaagcgcgccgcgagtattctgaaatatctgccgttcgaggttaccagcatgaaagacatccaaggtctgccgtgcattaccgaccaagttcgtgacgtgatcgaggagatcatcgaagagggcgagagcagccgtgttaaagaagttctcaatgacgagcgctacaaggcctttaagcagttcaccagcgtgttcggtgtgggcgtgaaaaccgcggaaaagtggtttcgtatgggcctccgtacggttgaagaagcaaaggccagtaagagtctgaagctgagcaagatgcagaaggcgggctttctgtattacgaggatctggcgagccgcgttagtaaagaagaagccgatgccgttacgctcatcgtgaagaacacggtgcgtacctttctgccggatgcgctggtgaccatcaccggcggtttccgccgtggcaaacctatgggccacgacgttgactttctgatcacgaatccgggcccgaaagaggatgacgagctgctccacaaagtggttgatctgctcaagaagcaaggtctgctgctgtacgaagacatcaaagagagcacgttcgtggaggggcaactgccaagtcgcaaaatcgacgccatggacaacttccagaagtgcttcgccattctcaagctgtaccagccgggcgtggataacagtgcggttgggacgagtaagaaaagtgacatggccgaggttaaggattggaaagcgattcgtgtggatctggtgatcacgccattcgagcagtacgcctatgcgctgctcggttggacgggcagcaaagaatttcgtcgcgatctgcgccgctatgcggaggaagagcgcggcatgatcctcgacaaccatgccctctacgacctgaaaaagcgcatctttctgaaagcgggcagcgaagaagagattttcgcgcatctgggtctggattatgtggagccgtgggaacgcaacgcg

SEQ ID NO: 2208 - protein, 394 aa, synthetic construct
  REGION 1..394: note = Variant of terminal deoxynucleotidyl transferase
MHHHHHHGGSGHPPSNTPEKEVPSVIARPVSQYSCQRKTTLNNYNKKFTDALEIMAENYKFKENLIACLEAKRAASILKYLPFEVTSMKDIQGLPCITDQVRDVIEEIIEEGESSRVKEVLNDERYKAFKQFTSVFGVGVKTAEKWFRMGLRTVEEAKASKSLKLSKMQKAGFLYYEDLASRVSKEEADAVTLIVKNTVRTFLPDALVTITGGFRRGKPMGHDVDFLITNPGPKEDDELLHKVVDLLKKQGLLLYEDIKESTFVEGQLPSRKIDAMDNFQKCFAILKLYQPGVDNSAVGTSKKSDMAEVKDWKAIRVDLVITPFEQYAYALLGWTGSKEFRRDLRRYAEEERGMILDNHALYDLKKRIFLKAGSEEEIFAHLGLDYVEPWERNA

SEQ ID NO: 2209 - DNA, 1182 bp, synthetic construct
  misc_feature 1..1182: note = Variant of terminal deoxynucleotidyl transferase
  source 1..1182: mol_type = other DNA
atgcatcaccaccatcatcatgggggttctggtcatccgccgagcaataccccggagggggaggtgccgagcgttatcgcccgtccggttagtcagtacagctgccagcgcaagaccacgctgaataactacaacaaaaagtttaccgacgcgctggagatcatggccgagaactacaaatttaaagagaacctgatcgcgtgtctggaagccaagcgcgccgcgagtattctgaaatatctgccgttcgaggttaccagcatgaaagacatccaaggtctgccgtgcattaccgaccaagttcgtgacgtgatcgaggagatcatcgaagagggcgagagcagccgtgttaaagaagttctcaatgacgagcgctacaaggcctttaagcagttcaccagcgtgttcggtgtgggcgtgaaaaccgcggaaaagtggtttcgtatgggcctccgtacggttgaagaagcaaaggccagtaagagtctgaagctgagcaagatgcagaaggcgggctttctgtattacgaggatctggcgagccgcgttagtaaagaagaagccgatgccgttacgctcatcgtgaagaacacggtgcgtacctttctgccggatgcgctggtgaccatcaccggcggtttccgccgtggcaaacctatgggccacgacgttgactttctgatcacgaatccgggcccgaaagaggatgacgagctgctccacaaagtggttgatctgctcaagaagcaaggtctgctgctgtacgaagacatcaaagagagcacgttcgtggaggggcaactgccaagtcgcaaaatcgacgccatggacaacttccagaagtgcttcgccattctcaagctgtaccagccgggcgtggataacagtgcggttgggacgagtaagaaaagtgacatggccgaggttaaggattggaaagcgattcgtgtggatctggtgatcacgccagtggagcagtacgcctatgcgctgctcggttggacgggcagcaaagaatttcgtcgcgatctgcgccgctatgcggaggaagagcgcggcatgatcctcgacaaccatgccctctacgacctgaaaaagcgcatctttctgaaagcgggcagcgaagaagagattttcgcgcatctgggtctggattatgtggagccgtgggaacgcaacgcg

SEQ ID NO: 2210 - protein, 394 aa, synthetic construct
  REGION 1..394: note = Variant of terminal deoxynucleotidyl transferase
MHHHHHHGGSGHPPSNTPEGEVPSVIARPVSQYSCQRKTTLNNYNKKFTDALEIMAENYKFKENLIACLEAKRAASILKYLPFEVTSMKDIQGLPCITDQVRDVIEEIIEEGESSRVKEVLNDERYKAFKQFTSVFGVGVKTAEKWFRMGLRTVEEAKASKSLKLSKMQKAGFLYYEDLASRVSKEEADAVTLIVKNTVRTFLPDALVTITGGFRRGKPMGHDVDFLITNPGPKEDDELLHKVVDLLKKQGLLLYEDIKESTFVEGQLPSRKIDAMDNFQKCFAILKLYQPGVDNSAVGTSKKSDMAEVKDWKAIRVDLVITPVEQYAYALLGWTGSKEFRRDLRRYAEEERGMILDNHALYDLKKRIFLKAGSEEEIFAHLGLDYVEPWERNA

SEQ ID NO: 2211 - DNA, 1182 bp, synthetic construct
  misc_feature 1..1182: note = Variant of terminal deoxynucleotidyl transferase
  source 1..1182: mol_type = other DNA
atgcatcaccaccatcatcatgggggttctggtcatccgccgagcaataccccggagggggaggtgccgagcgttatcgcccgtccggttagtcagtacagctgccagcgcaagaccacgctgaataactacaacaaaaagtttaccgacgcgctggagatcatggccgagaactacaaatttaaagagaacctgatcgcgtgtctggaagccaagcgcgccgcgagtattctgaaatatctgccgttcgaggttaccagcatgaaagacatccaaggtctgccgtgcattaccgaccaagttcgtgacgtgatcgaggagatcatcgaagagggcgagagcagccgtgttaaagaagttctcaatgacgagcgctacaaggcctttaagcagttcaccagcgtgttcggtgtgggcgtgaaaaccgcggaaaagtggtttcgtatgggcctccgtacggttgaagaagcaaaggccagtaagagtctgaagctgagcaagatgcagaaggcgggctttctgtattacgaggatctggcgagccgcgttagtaaagaagaagccgatgccgttacgctcatcgtgaagaacacggtgcgtacctttctgccggatgcgctggtgaccatcaccggcggtttccgccgtggcaaacctatgggccacgacgttgactttctgatcacgaatccgggcccgaaagaggatgacgagctgctccacaaagtggttgatctgctcaagaagcaaggtctgctgctgtacgaagacatcaaagagagcacgttcgtggaggggcaactgccaagtcgcaaaatcgacgccatggacaacttccagaagtgcttcgccattctcaagctgtaccagccgggcgtggataacagtgcggttgggacgagtaagaaaagtgacatggccgaggttaaggattggaaagcgattcgtgtggatctggtgatcacgccattcgagcagtacgcctatgcgctgctcggttggacgggcagcaaagaatttcgtcgcgatctgcgccgctatgcggaggaagagcgcggcatgatcctcgacaaccatgcctggtacgacctgaaaaagcgcatctttctgaaagcgggcagcgaagaagagattttcgcgcatctgggtctggattatgtggagccgtgggaacgcaacgcg

SEQ ID NO: 2212 - protein, 394 aa, synthetic construct
  REGION 1..394: note = Variant of terminal deoxynucleotidyl transferase
MHHHHHHGGSGHPPSNTPEGEVPSVIARPVSQYSCQRKTTLNNYNKKFTDALEIMAENYKFKENLIACLEAKRAASILKYLPFEVTSMKDIQGLPCITDQVRDVIEEIIEEGESSRVKEVLNDERYKAFKQFTSVFGVGVKTAEKWFRMGLRTVEEAKASKSLKLSKMQKAGFLYYEDLASRVSKEEADAVTLIVKNTVRTFLPDALVTITGGFRRGKPMGHDVDFLITNPGPKEDDELLHKVVDLLKKQGLLLYEDIKESTFVEGQLPSRKIDAMDNFQKCFAILKLYQPGVDNSAVGTSKKSDMAEVKDWKAIRVDLVITPFEQYAYALLGWTGSKEFRRDLRRYAEEERGMILDNHAWYDLKKRIFLKAGSEEEIFAHLGLDYVEPWERNA

SEQ ID NO: 2213 - DNA, 1182 bp, synthetic construct
  misc_feature 1..1182: note = Variant of terminal deoxynucleotidyl transferase
  source 1..1182: mol_type = other DNA
atgcatcaccaccatcatcatgggggttctggtcatccgccgagcaataccccggagggggaggtgccgagcgttatcgcccgtccggttagtcagtacagctgccagcgcaagaccacgctgaataactacaacaaaaagtttaccgacgcgctggagatcatggccgagaactacaaatttaaagagaacctgatcgcgtgtctggaagccaagcgcgccgcgagtattctgaaatatctgccgttcgaggttaccagcatgaaagacatccaaggtctgccgtgcattaccgaccaagttcgtgacgtgatcgaggagatcatcgaagagggcgagagcagccgtgttaaagaagttctcaatgacgagcgctacaaggcctttaagcagttcaccagcgtgttcggtgtgggcgtgaaaaccgcggaaaagtggtttcgtatgggcctccgtacggttgaagaagcaaaggccagtaagagtctgaagctgagcaagatgcagaaggcgggctttctgtattacgaggatctggcgagccgcgttagtaaagaagaagccgatgccgttacgctcatcgtgaagaacacggtgcgtacctttctgccggatgcgctggtgaccatcaccggcggtttccgccgtggcaaacctatgggccacgacgttgactttctgatcacgaatccgggcccgaaagaggatgacgagctgctccacaaagtggttgatctgctcaagaagcaaggtctgctgctgtacgaagacatcaaagagagcacgttcgtggaggggcaactgccaagtcgcaaaatcgacgccatggacaacttccagaagtgcttcgccattctcaagctgtaccagccgggcgtggataacagtgcggttgggacgagtaagaaaagtgacatggccgaggttaaggattggaaagcgattcgtgtggatctggtgatcacgccattcgagcagtacgcctatgcgctgctcggttggacgggcagcaaagaatttcgtcgcgatctgcgccgctatgcggaggaagagcgcggcatgatcctcgacaaccatgccctctacgacctgaaaaagcgcatctttctgaaagcgggcgatgaagaagagattttcgcgcatctgggtctggattatgtggagccgtgggaacgcaacgcg

SEQ ID NO: 2214 - protein, 394 aa, synthetic construct
  REGION 1..394: note = Variant of terminal deoxynucleotidyl transferase
MHHHHHHGGSGHPPSNTPEGEVPSVIARPVSQYSCQRKTTLNNYNKKFTDALEIMAENYKFKENLIACLEAKRAASILKYLPFEVTSMKDIQGLPCITDQVRDVIEEIIEEGESSRVKEVLNDERYKAFKQFTSVFGVGVKTAEKWFRMGLRTVEEAKASKSLKLSKMQKAGFLYYEDLASRVSKEEADAVTLIVKNTVRTFLPDALVTITGGFRRGKPMGHDVDFLITNPGPKEDDELLHKVVDLLKKQGLLLYEDIKESTFVEGQLPSRKIDAMDNFQKCFAILKLYQPGVDNSAVGTSKKSDMAEVKDWKAIRVDLVITPFEQYAYALLGWTGSKEFRRDLRRYAEEERGMILDNHALYDLKKRIFLKAGDEEEIFAHLGLDYVEPWERNA

SEQ ID NO: 2215 - DNA, 1182 bp, synthetic construct
  misc_feature 1..1182: note = Variant of terminal deoxynucleotidyl transferase
  source 1..1182: mol_type = other DNA
atgcatcaccaccatcatcatgggggttctggtcatccgccgagcaataccccggaggaggaggtgccgagcgttatcgcccgtccggttagtcagtacagctgccagcgcaagaccacgctgaataactacaacaaaaagtttaccgacgcgctggagatcatggccgagaactacaaatttaaagagaacctgatcgcgtgtctggaagccaagcgcgccgcgagtattctgaaatatctgccgttcgaggttaccagcatgaaagacatccaaggtctgccgtgcattaccgaccaagttcgtgacgtgatcgaggagatcatcgaagagggcgagagcagccgtgttaaagaagttctcaatgacgagcgctacaaggcctttaagcagttcaccagcgtgttcggtgtgggcgtgaaaaccgcggaaaagtggtttcgtatgggcctccgtacggttgaagaagcaaaggccagtaagagtctgaagctgagcaagatgcagaaggcgggctttctgtattacgaggatctggcgagccgcgttagtaaagaagaagccgatgccgttacgctcatcgtgaagaacacggtgcgtacctttctgccggatgcgctggtgaccatcaccggcggtttccgccgtggcaaacctatgggccacgacgttgactttctgatcacgaatccgggcccgaaagaggatgacgagctgctccacaaagtggttgatctgctcaagaagcaaggtctgctgctgtacgaagacatcaaagagagcacgttcgtggaggggcaactgccaagtcgcaaaatcgacgccatggacaacttccagaagtgcttcgccattctcaagctgtaccagccgggcgtggataacagtgcggttgggacgagtaagaaaagtgacatggccgaggttaaggattggaaagcgattcgtgtggatctggtgatcacgccattcgagcagtacgcctatgcgctgctcggttggacgggcagcaaagaatttcgtcgcgatctgcgccgctatgcggaggaagagcgcggcatgatcctcgacaaccatgccctctacgacctgaaaaagcgcatctttctgaaagcgggcagcgaagaagagattttcgcgcatctgggtctggattatgtggagccgtgggaacgcaacgcg

SEQ ID NO: 2216 - protein, 394 aa, synthetic construct
  REGION 1..394: note = Variant of terminal deoxynucleotidyl transferase
MHHHHHHGGSGHPPSNTPEEEVPSVIARPVSQYSCQRKTTLNNYNKKFTDALEIMAENYKFKENLIACLEAKRAASILKYLPFEVTSMKDIQGLPCITDQVRDVIEEIIEEGESSRVKEVLNDERYKAFKQFTSVFGVGVKTAEKWFRMGLRTVEEAKASKSLKLSKMQKAGFLYYEDLASRVSKEEADAVTLIVKNTVRTFLPDALVTITGGFRRGKPMGHDVDFLITNPGPKEDDELLHKVVDLLKKQGLLLYEDIKESTFVEGQLPSRKIDAMDNFQKCFAILKLYQPGVDNSAVGTSKKSDMAEVKDWKAIRVDLVITPFEQYAYALLGWTGSKEFRRDLRRYAEEERGMILDNHALYDLKKRIFLKAGSEEEIFAHLGLDYVEPWERNA

SEQ ID NO: 2217 - DNA, 1182 bp, synthetic construct
  misc_feature 1..1182: note = Variant of terminal deoxynucleotidyl transferase
  source 1..1182: mol_type = other DNA
atgcatcaccaccatcatcatgggggttctggtcatccgccgagcaataccccggagggggaggtgccgagcgttatcgcccgtccggttagtcagtacagctgccagcgcaagaccacgctgaataactacaacaaaaagtttaccgacgcgctggagatcatggccgagaactacaaatttaaagagaacctgatcgcgtgtctggaagccaagcgcgccgcgagtattctgaaatatctgccgttcgaggttaccagcatgaaagacatccaaggtctgccgtgcattaccgaccaagttcgtgacgtgatcgaggagatcatcgaagagggcgagagcagccgtgttaaagaagttctcaatgacgagcgctacaaggcctttaagcagttcaccagcgtgttcggtgtgggcgtgaaaaccgcggaaaagtggtttcgtatgggcctccgtacggttgaagaagcaaaggccagtaagagtctgaagctgagcaagatgcagaaggcgggctttctgtattacgaggatctggcgagccgcgttagtaaagaagaagccgatgccgttacgctcatcgtgaagaacacggtgcgtacctttctgccggatgcgctggtgaccatcaccggcggtttccgccgtggcaaacctatgggccacgacgttgactttctgatcacgaatccgggcccgaaagtggatgacgagctgctccacaaagtggttgatctgctcaagaagcaaggtctgctgctgtacgaagacatcaaagagagcacgttcgtggaggggcaactgccaagtcgcaaaatcgacgccatggacaacttccagaagtgcttcgccattctcaagctgtaccagccgggcgtggataacagtgcggttgggacgagtaagaaaagtgacatggccgaggttaaggattggaaagcgattcgtgtggatctggtgatcacgccattcgagcagtacgcctatgcgctgctcggttggacgggcagcaaagaatttcgtcgcgatctgcgccgctatgcggaggaagagcgcggcatgatcctcgacaaccatgccctctacgacctgaaaaagcgcatctttctgaaagcgggcagcgaagaagagattttcgcgcatctgggtctggattatgtggagccgtgggaacgcaacgcg

SEQ ID NO: 2218 - protein, 394 aa, synthetic construct
  REGION 1..394: note = Variant of terminal deoxynucleotidyl transferase
MHHHHHHGGSGHPPSNTPEGEVPSVIARPVSQYSCQRKTTLNNYNKKFTDALEIMAENYKFKENLIACLEAKRAASILKYLPFEVTSMKDIQGLPCITDQVRDVIEEIIEEGESSRVKEVLNDERYKAFKQFTSVFGVGVKTAEKWFRMGLRTVEEAKASKSLKLSKMQKAGFLYYEDLASRVSKEEADAVTLIVKNTVRTFLPDALVTITGGFRRGKPMGHDVDFLITNPGPKVDDELLHKVVDLLKKQGLLLYEDIKESTFVEGQLPSRKIDAMDNFQKCFAILKLYQPGVDNSAVGTSKKSDMAEVKDWKAIRVDLVITPFEQYAYALLGWTGSKEFRRDLRRYAEEERGMILDNHALYDLKKRIFLKAGSEEEIFAHLGLDYVEPWERNA

SEQ ID NO: 2219 - DNA, 1182 bp, synthetic construct
  misc_feature 1..1182: note = Variant of terminal deoxynucleotidyl transferase
  source 1..1182: mol_type = other DNA
atgcatcaccaccatcatcatgggggttctggtcatccgccgagcaataccccggagggggaggtgccgagcgttatcgcccgtccggttagtcagtacagctgccagcgcaagaccacgctgaataactacaacaaaaagtttaccgacgcgctggagatcatggccgagaactacaaatttaaagagaacctgatcgcgtgtctggaagccaagcgcgccgcgagtattctgaaatatctgccgttcgaggttaccagcatgaaagacatccaaggtctgccgtgcattaccgaccaatgtcgtgacgtgatcgaggagatcatcgaagagggcgagagcagccgtgttaaagaagttctcaatgacgagcgctacaaggcctttaagcagttcaccagcgtgttcggtgtgggcgtgaaaaccgcggaaaagtggtttcgtatgggcctccgtacggttgaagaagcaaaggccagtaagagtctgaagctgagcaagatgcagaaggcgggctttctgtattacgaggatctggcgagccgcgttagtaaagaagaagccgatgccgttacgctcatcgtgaagaacacggtgcgtacctttctgccggatgcgctggtgaccatcaccggcggtttccgccgtggcaaacctatgggccacgacgttgactttctgatcacgaatccgggcccgaaagaggatgacgagctgctccacaaagtggttgatctgctcaagaagcaaggtctgctgctgtacgaagacatcaaagagagcacgttcgtggaggggcaactgccaagtcgcaaaatcgacgccatggacaacttccagaagtgcttcgccattctcaagctgtaccagccgggcgtggataacagtgcggttgggacgagtaagaaaagtgacatggccgaggttaaggattggaaagcgattcgtgtggatctggtgatcacgccattcgagcagtacgcctatgcgctgctcggttggacgggcagcaaagaatttcgtcgcgatctgcgccgctatgcggaggaagagcgcggcatgatcctcgacaaccatgccctctacgacctgaaaaagcgcatctttctgaaagcgggcagcgaagaagagattttcgcgcatctgggtctggattatgtggagccgtgggaacgcaacgcg

SEQ ID NO: 2220 - protein, 394 aa, synthetic construct
  REGION 1..394: note = Variant of terminal deoxynucleotidyl transferase
MHHHHHHGGSGHPPSNTPEGEVPSVIARPVSQYSCQRKTTLNNYNKKFTDALEIMAENYKFKENLIACLEAKRAASILKYLPFEVTSMKDIQGLPCITDQCRDVIEEIIEEGESSRVKEVLNDERYKAFKQFTSVFGVGVKTAEKWFRMGLRTVEEAKASKSLKLSKMQKAGFLYYEDLASRVSKEEADAVTLIVKNTVRTFLPDALVTITGGFRRGKPMGHDVDFLITNPGPKEDDELLHKVVDLLKKQGLLLYEDIKESTFVEGQLPSRKIDAMDNFQKCFAILKLYQPGVDNSAVGTSKKSDMAEVKDWKAIRVDLVITPFEQYAYALLGWTGSKEFRRDLRRYAEEERGMILDNHALYDLKKRIFLKAGSEEEIFAHLGLDYVEPWERNA

SEQ ID NO: 2221 - DNA, 1182 bp, synthetic construct
  misc_feature 1..1182: note = Variant of terminal deoxynucleotidyl transferase
  source 1..1182: mol_type = other DNA
atgcatcaccaccatcatcatgggggttctggtcatccgccgagcaataccccggagggggaggtgccgagcgttatcgcccgtccggttagtcagtacagctgccagcgcaagaccacgctgaataactacaacaaaaagtttaccgacgcgctggagatcatggccgagaactacaaatttaaagagaacctgatcgcgtgtctggaagccaagcgcgccgcgagtattctgaaatatctgccgttcgaggttaccagcatgaaagacatccaaggtctgccgtgcattaccgaccaagttcgtgacgtgatcgaggagatcatcgaagagggcgagagcagccgtgttaaagaagttctcaatgacgagcgctacaaggcctttaagcagttcaccagcgtgttcggtgtgggcgtgaaaaccgcggaaaagtggtttcgtatgggcctccgtacggttgaagaagcaaaggccagtaagagtctgaagctgagcaagatgcagaaggcgggctttctgtattacgaggatctggcgagccgcgttagtaaagaagaagccgatgccgttacgctcatcgtgaagaacacggtgcgtacctttctgccggatgcgctggtgaccatcaccggcggtttccgccgtggcaaacctatgggccacgacgttgactttctgatcacgaatccgggcccgaaaatggatgacgagctgctccacaaagtggttgatctgctcaagaagcaaggtctgctgctgtacgaagacatcaaagagagcacgttcgtggaggggcaactgccaagtcgcaaaatcgacgccatggacaacttccagaagtgcttcgccattctcaagctgtaccagccgggcgtggataacagtgcggttgggacgagtaagaaaagtgacatggccgaggttaaggattggaaagcgattcgtgtggatctggtgatcacgccattcgagcagtacgcctatgcgctgctcggttggacgggcagcaaagaatttcgtcgcgatctgcgccgctatgcggaggaagagcgcggcatgatcctcgacaaccatgccctctacgacctgaaaaagcgcatctttctgaaagcgggcagcgaagaagagattttcgcgcatctgggtctggattatgtggagccgtgggaacgcaacgcg

SEQ ID NO: 2222 - protein, 394 aa, synthetic construct
  REGION 1..394: note = Variant of terminal deoxynucleotidyl transferase
MHHHHHHGGSGHPPSNTPEGEVPSVIARPVSQYSCQRKTTLNNYNKKFTDALEIMAENYKFKENLIACLEAKRAASILKYLPFEVTSMKDIQGLPCITDQVRDVIEEIIEEGESSRVKEVLNDERYKAFKQFTSVFGVGVKTAEKWFRMGLRTVEEAKASKSLKLSKMQKAGFLYYEDLASRVSKEEADAVTLIVKNTVRTFLPDALVTITGGFRRGKPMGHDVDFLITNPGPKMDDELLHKVVDLLKKQGLLLYEDIKESTFVEGQLPSRKIDAMDNFQKCFAILKLYQPGVDNSAVGTSKKSDMAEVKDWKAIRVDLVITPFEQYAYALLGWTGSKEFRRDLRRYAEEERGMILDNHALYDLKKRIFLKAGSEEEIFAHLGLDYVEPWERNA

SEQ ID NO: 2223 - DNA, 1182 bp, synthetic construct
  misc_feature 1..1182: note = Variant of terminal deoxynucleotidyl transferase
  source 1..1182: mol_type = other DNA
atgcatcaccaccatcatcatgggggttctggtcatccgccgagcaataccccggagggggaggtgccgagcgttatcgcccgtccggttagtcagtacagctgccagcgcaagaccacgctgaataactacaacaaaaagtttaccgacgcgctggagatcatggccgagaactacaaatttaaagagaacctgatcgcgtgtctggaagccaagcgcgccgcgagtattctgaaatatctgccgttcgaggttaccagcatgaaagacatccaaggtctgccgtgcattaccgaccaagttcgtgacgtgatcgaggagatcatcgaaaggggcgagagcagccgtgttaaagaagttctcaatgacgagcgctacaaggcctttaagcagttcaccagcgtgttcggtgtgggcgtgaaaaccgcggaaaagtggtttcgtatgggcctccgtacggttgaagaagcaaaggccagtaagagtctgaagctgagcaagatgcagaaggcgggctttctgtattacgaggatctggcgagccgcgttagtaaagaagaagccgatgccgttacgctcatcgtgaagaacacggtgcgtacctttctgccggatgcgctggtgaccatcaccggcggtttccgccgtggcaaacctatgggccacgacgttgactttctgatcacgaatccgggcccgaaagaggatgacgagctgctccacaaagtggttgatctgctcaagaagcaaggtctgctgctgtacgaagacatcaaagagagcacgttcgtggaggggcaactgccaagtcgcaaaatcgacgccatggacaacttccagaagtgcttcgccattctcaagctgtaccagccgggcgtggataacagtgcggttgggacgagtaagaaaagtgacatggccgaggttaaggattggaaagcgattcgtgtggatctggtgatcacgccattcgagcagtacgcctatgcgctgctcggttggacgggcagcaaagaatttcgtcgcgatctgcgccgctatgcggaggaagagcgcggcatgatcctcgacaaccatgccctctacgacctgaaaaagcgcatctttctgaaagcgggcagcgaagaagagattttcgcgcatctgggtctggattatgtggagccgtgggaacgcaacgcg

SEQ ID NO: 2224 - protein, 394 aa, synthetic construct
  REGION 1..394: note = Variant of terminal deoxynucleotidyl transferase
MHHHHHHGGSGHPPSNTPEGEVPSVIARPVSQYSCQRKTTLNNYNKKFTDALEIMAENYKFKENLIACLEAKRAASILKYLPFEVTSMKDIQGLPCITDQVRDVIEEIIERGESSRVKEVLNDERYKAFKQFTSVFGVGVKTAEKWFRMGLRTVEEAKASKSLKLSKMQKAGFLYYEDLASRVSKEEADAVTLIVKNTVRTFLPDALVTITGGFRRGKPMGHDVDFLITNPGPKEDDELLHKVVDLLKKQGLLLYEDIKESTFVEGQLPSRKIDAMDNFQKCFAILKLYQPGVDNSAVGTSKKSDMAEVKDWKAIRVDLVITPFEQYAYALLGWTGSKEFRRDLRRYAEEERGMILDNHALYDLKKRIFLKAGSEEEIFAHLGLDYVEPWERNA

SEQ ID NO: 2225 - DNA, 1182 bp, synthetic construct
  misc_feature 1..1182: note = Variant of terminal deoxynucleotidyl transferase
  source 1..1182: mol_type = other DNA
atgcatcaccaccatcatcatgggggttctggtcatccgccgagcaataccccggagggggaggtgccgagcgttatcgcccgtccggttagtcagtacagctgccagcgcaagaccacgctgaataactacaacaaaaagtttaccgacgcgctggagatcatggccgagaactacaaatttaaagagaacctgatcgcgtgtctggaagccaagcgcgccgcgagtattctgaaatatctgccgttcgaggttaccagcatgaaagacatccaaggtctgccgtgcattaccgaccaagttcgtgacgtgatcgaggagatcatcgaagagggcgagagcagccgtgttaaagaagttctcaatgacgagcgctacaaggcctttaagcagttcaccagcgtgttcggtgtgggcgtgaaaaccgcggaaaagtggatgcgtatgggcctccgtacggttgaagaagcaaaggccagtaagagtctgaagctgagcaagatgcagaaggcgggctttctgtattacgaggatctggcgagccgcgttagtaaagaagaagccgatgccgttacgctcatcgtgaagaacacggtgcgtacctttctgccggatgcgctggtgaccatcaccggcggtttccgccgtggcaaacctatgggccacgacgttgactttctgatcacgaatccgggcccgaaagaggatgacgagctgctccacaaagtggttgatctgctcaagaagcaaggtctgctgctgtacgaagacatcaaagagagcacgttcgtggaggggcaactgccaagtcgcaaaatcgacgccatggacaacttccagaagtgcttcgccattctcaagctgtaccagccgggcgtggataacagtgcggttgggacgagtaagaaaagtgacatggccgaggttaaggattggaaagcgattcgtgtggatctggtgatcacgccattcgagcagtacgcctatgcgctgctcggttggacgggcagcaaagaatttcgtcgcgatctgcgccgctatgcggaggaagagcgcggcatgatcctcgacaaccatgccctctacgacctgaaaaagcgcatctttctgaaagcgggcagcgaagaagagattttcgcgcatctgggtctggattatgtggagccgtgggaacgcaacgcg

SEQ ID NO: 2226 - protein, 394 aa, synthetic construct
  REGION 1..394: note = Variant of terminal deoxynucleotidyl transferase
MHHHHHHGGSGHPPSNTPEGEVPSVIARPVSQYSCQRKTTLNNYNKKFTDALEIMAENYKFKENLIACLEAKRAASILKYLPFEVTSMKDIQGLPCITDQVRDVIEEIIEEGESSRVKEVLNDERYKAFKQFTSVFGVGVKTAEKWMRMGLRTVEEAKASKSLKLSKMQKAGFLYYEDLASRVSKEEADAVTLIVKNTVRTFLPDALVTITGGFRRGKPMGHDVDFLITNPGPKEDDELLHKVVDLLKKQGLLLYEDIKESTFVEGQLPSRKIDAMDNFQKCFAILKLYQPGVDNSAVGTSKKSDMAEVKDWKAIRVDLVITPFEQYAYALLGWTGSKEFRRDLRRYAEEERGMILDNHALYDLKKRIFLKAGSEEEIFAHLGLDYVEPWERNA

SEQ ID NO: 2227 - DNA, 1182 bp, synthetic construct
  misc_feature 1..1182: note = Variant of terminal deoxynucleotidyl transferase
  source 1..1182: mol_type = other DNA
atgcatcaccaccatcatcatgggggttctggtcatccgccgagcaataccccggagggggaggtgccgagcgttatcgcccgtccggttagtcagtacagctgccagcgcaagaccacgctgaataactacaacaaaaagtttaccgacgcgctggagatcatggccgagaactacaaatttaaagagaacctgatcgcgtgtctggaagccaagcgcgccgcgagtattctgaaatatctgccgttcgaggttaccagcatgaaagacatccaaggtctgccgtgcattaccgaccaagttcgtgacgtgatcgaggagatcatcgaagagggcgagagcagccgtgttaaagaagttctcaatgacgagcgctacaaggcctttaagcagttcaccagcgtgttcggtgtgggcgtgaaaaccgcggaaaagtggtttcgtatgggcctccgtacggttgaagaagcaaaggccagtaagagtctgaagctgagcaagatgcagaaggcgggctttctgtattacgaggatctggcgagccgcgttagtaaagaagaagccgatgccgttacgctcatcgtgaagaacacggtgcgtacctttctgccggatgcgctggtgaccatcaccggcggtttccgccgtggcaaacctatgggccacgacgttgactttctgatcacgaatccgggcccgaaagaggatgacgagctgctccacaaagtggttgatctgctcaaggggcaaggtctgctgctgtacgaagacatcaaagagagcacgttcgtggaggggcaactgccaagtcgcaaaatcgacgccatggacaacttccagaagtgcttcgccattctcaagctgtaccagccgggcgtggataacagtgcggttgggacgagtaagaaaagtgacatggccgaggttaaggattggaaagcgattcgtgtggatctggtgatcacgccattcgagcagtacgcctatgcgctgctcggttggacgggcagcaaagaatttcgtcgcgatctgcgccgctatgcggaggaagagcgcggcatgatcctcgacaaccatgccctctacgacctgaaaaagcgcatctttctgaaagcgggcagcgaagaagagattttcgcgcatctgggtctggattatgtggagccgtgggaacgcaacgcg

SEQ ID NO: 2228 - protein, 394 aa, synthetic construct
  REGION 1..394: note = Variant of terminal deoxynucleotidyl transferase
MHHHHHHGGSGHPPSNTPEGEVPSVIARPVSQYSCQRKTTLNNYNKKFTDALEIMAENYKFKENLIACLEAKRAASILKYLPFEVTSMKDIQGLPCITDQVRDVIEEIIEEGESSRVKEVLNDERYKAFKQFTSVFGVGVKTAEKWFRMGLRTVEEAKASKSLKLSKMQKAGFLYYEDLASRVSKEEADAVTLIVKNTVRTFLPDALVTITGGFRRGKPMGHDVDFLITNPGPKEDDELLHKVVDLLKGQGLLLYEDIKESTFVEGQLPSRKIDAMDNFQKCFAILKLYQPGVDNSAVGTSKKSDMAEVKDWKAIRVDLVITPFEQYAYALLGWTGSKEFRRDLRRYAEEERGMILDNHALYDLKKRIFLKAGSEEEIFAHLGLDYVEPWERNA

SEQ ID NO: 2229 - DNA, 1182 bp, synthetic construct
  misc_feature 1..1182: note = Variant of terminal deoxynucleotidyl transferase
  source 1..1182: mol_type = other DNA
atgcatcaccaccatcatcatgggggttctggtcatccgccgagcaataccccggagggggaggtgccgagcgttatcgcccgtccggttagtcagtacagctgccagcgcaagaccacgctgaataactacaacaaaaagtttaccgacgcgctggagatcatggccgagaactacaaatttaaagagaacctgatcgcgtgtctggaagccaagcgcgccgcgagtattctgaaatatctgccgttcgaggttaccagcatgaaagacatccaaggtctgccgtgcattaccgaccaagttcgtgacgtgatcgaggagatcatcgaagagggcgagagcagccgtgttaaagaagttctcaatgacgagcgctacaaggcctttaagcagttcaccagcgtgttcggtgtgggcgtgaaaaccgcggaaaagtggtttcgtatgggcctccgtacggttgaagaagcaaaggccagtaagagtctgaagctgagcaagatgcagaaggcgggctttctgtattacgaggatctggcgagccgcgttagtaaagaagaagccgatgccgttacgctcatcgtgaagaacacggtgcgtacctttctgccggatgcgctggtgaccatcaccggcggtttccgccgtggcaaacctatgggccacgacgttgactttctgatcacgaatccgggcccgaaagaggatgacgagctgctccacaaagtggttgatctgctcaagaagcaaggtctgctgctgtacgaagacatcaaagagagcacgttcgtggaggggcaactgccaagtcgcaaaatcgacgccatggacaacttccagaagtgcttcgccattctcaagctgtaccagccgggcgtggataacagtgcggttgggacgagtaagaaaagtgacatggccctggttaaggattggaaagcgattcgtgtggatctggtgatcacgccattcgagcagtacgcctatgcgctgctcggttggacgggcagcaaagaatttcgtcgcgatctgcgccgctatgcggaggaagagcgcggcatgatcctcgacaaccatgccctctacgacctgaaaaagcgcatctttctgaaagcgggcagcgaagaagagattttcgcgcatctgggtctggattatgtggagccgtgggaacgcaacgcg

SEQ ID NO: 2230 - protein, 394 aa, synthetic construct
  REGION 1..394: note = Variant of terminal deoxynucleotidyl transferase
MHHHHHHGGSGHPPSNTPEGEVPSVIARPVSQYSCQRKTTLNNYNKKFTDALEIMAENYKFKENLIACLEAKRAASILKYLPFEVTSMKDIQGLPCITDQVRDVIEEIIEEGESSRVKEVLNDERYKAFKQFTSVFGVGVKTAEKWFRMGLRTVEEAKASKSLKLSKMQKAGFLYYEDLASRVSKEEADAVTLIVKNTVRTFLPDALVTITGGFRRGKPMGHDVDFLITNPGPKEDDELLHKVVDLLKKQGLLLYEDIKESTFVEGQLPSRKIDAMDNFQKCFAILKLYQPGVDNSAVGTSKKSDMALVKDWKAIRVDLVITPFEQYAYALLGWTGSKEFRRDLRRYAEEERGMILDNHALYDLKKRIFLKAGSEEEIFAHLGLDYVEPWERNA

SEQ ID NO: 2231 - DNA, 1182 bp, synthetic construct
  misc_feature 1..1182: note = Variant of terminal deoxynucleotidyl transferase
  source 1..1182: mol_type = other DNA
atgcatcaccaccatcatcatgggggttctggtcatccgccgagcaataccccggagggggaggtgccgagcgttatcgcccgtccggttagtcagtacagctgccagcgcaagaccacgctgaataactacaacaaaaagtttaccgacgcgctggagatcatggccgagaactacaaatttaaagagaacctgatcgcgtgtctggaagccaagcgcgccgcgagtattctgaaatatctgccgttcgaggttaccagcatgaaagacatccaaggtctgccgtgcattaccgaccaagttcgtgacgtgatcgaggagatcatcgaagagggcgagagcagccgtgttaaagaagttctcaatgacgagcgctacaaggcctttaagcagttcaccagcgtgttcggtgtgggcgtgaaaaccgcggaaaagtggtttcgtatgggcctccgtacggttgaagaagcaaaggccagtaagagtctgaagctgagcaagatgcagaaggcgggctttctgtattacgaggatctggcgagccgcgttagtaaagaagaagccgatgccgttacgctcatcgtgaagaacacggtgcgtacctttctgccggatgcgctggtgaccatcaccggcggtttccgccgtggcaaacctatgggccacgacgttgactttctgatcacgaatccgatgccgaaagaggatgacgagctgctccacaaagtggttgatctgctcaagaagcaaggtctgctgctgtacgaagacatcaaagagagcacgttcgtggaggggcaactgccaagtcgcaaaatcgacgccatggacaacttccagaagtgcttcgccattctcaagctgtaccagccgggcgtggataacagtgcggttgggacgagtaagaaaagtgacatggccgaggttaaggattggaaagcgattcgtgtggatctggtgatcacgccattcgagcagtacgcctatgcgctgctcggttggacgggcagcaaagaatttcgtcgcgatctgcgccgctatgcggaggaagagcgcggcatgatcctcgacaaccatgccctctacgacctgaaaaagcgcatctttctgaaagcgggcagcgaagaagagattttcgcgcatctgggtctggattatgtggagccgtgggaacgcaacgcg

SEQ ID NO: 2232 - protein, 394 aa, synthetic construct
  REGION 1..394: note = Variant of terminal deoxynucleotidyl transferase
MHHHHHHGGSGHPPSNTPEGEVPSVIARPVSQYSCQRKTTLNNYNKKFTDALEIMAENYKFKENLIACLEAKRAASILKYLPFEVTSMKDIQGLPCITDQVRDVIEEIIEEGESSRVKEVLNDERYKAFKQFTSVFGVGVKTAEKWFRMGLRTVEEAKASKSLKLSKMQKAGFLYYEDLASRVSKEEADAVTLIVKNTVRTFLPDALVTITGGFRRGKPMGHDVDFLITNPMPKEDDELLHKVVDLLKKQGLLLYEDIKESTFVEGQLPSRKIDAMDNFQKCFAILKLYQPGVDNSAVGTSKKSDMAEVKDWKAIRVDLVITPFEQYAYALLGWTGSKEFRRDLRRYAEEERGMILDNHALYDLKKRIFLKAGSEEEIFAHLGLDYVEPWERNA

SEQ ID NO: 2233 - DNA, 1182 bp, synthetic construct
  misc_feature 1..1182: note = Variant of terminal deoxynucleotidyl transferase
  source 1..1182: mol_type = other DNA
atgcatcaccaccatcatcatgggggttctggtcatccgccgagcaataccccggagggggaggtgccgagcgttatcgcccgtccggttagtcagtacagctgccagcgcaagaccacgctgaataactacaacaaaaagtttaccgacgcgctggagatcatggccgagaactacaaatttaaagagaacctgatcgcgtgtctggaagccaagcgcgccgcgagtattctgaaatatctgccgttcgaggttaccagcatgaaagacatccaaggtctgccgtgcattaccgaccaagttcgtgacgtgatcgaggagatcatcgaagagggcgagagcagccgtgttaaagaagttctcaatgacgagcgctacaaggcctttaagcagttcaccagcgtgttcggtgtgggcgtgaaaaccgcggaaaagtggtttcgtatgggcctccgtacggttgaagaagcaaaggccagtaagagtctgaagctgagcaagatgcagaaggcgggctttctgtattacgaggatctggcgagccgcgttagtaaagaagaagccgatgccgttacgctcatcgtgaagaacacggtgcgtacctttctgccggatgcgctggtgaccatcaccggcggtttccgccgtggcaaacctatgggccacgacgttgactttctgatcacgaatccgggcccgaaagaggatgacgagctgctccacaaagtggttgatctgctcaagaagcaaggtctgctgctgtacgaagacatcaaagagagcacgttcgtggaggggcaactgccaagtcgcaaaatcgacgccatggacaacttccagaagtgcttcgccattctcaagctgtaccagccgggcgtggataacagtgcggttgggacgagtaagaaaggggacatggccgaggttaaggattggaaagcgattcgtgtggatctggtgatcacgccattcgagcagtacgcctatgcgctgctcggttggacgggcagcaaagaatttcgtcgcgatctgcgccgctatgcggaggaagagcgcggcatgatcctcgacaaccatgccctctacgacctgaaaaagcgcatctttctgaaagcgggcagcgaagaagagattttcgcgcatctgggtctggattatgtggagccgtgggaacgcaacgcg

SEQ ID NO: 2234 - protein, 394 aa, synthetic construct
  REGION 1..394: note = Variant of terminal deoxynucleotidyl transferase
MHHHHHHGGSGHPPSNTPEGEVPSVIARPVSQYSCQRKTTLNNYNKKFTDALEIMAENYKFKENLIACLEAKRAASILKYLPFEVTSMKDIQGLPCITDQVRDVIEEIIEEGESSRVKEVLNDERYKAFKQFTSVFGVGVKTAEKWFRMGLRTVEEAKASKSLKLSKMQKAGFLYYEDLASRVSKEEADAVTLIVKNTVRTFLPDALVTITGGFRRGKPMGHDVDFLITNPGPKEDDELLHKVVDLLKKQGLLLYEDIKESTFVEGQLPSRKIDAMDNFQKCFAILKLYQPGVDNSAVGTSKKGDMAEVKDWKAIRVDLVITPFEQYAYALLGWTGSKEFRRDLRRYAEEERGMILDNHALYDLKKRIFLKAGSEEEIFAHLGLDYVEPWERNA

SEQ ID NO: 2235 - DNA, 1182 bp, synthetic construct
  misc_feature 1..1182: note = Variant of terminal deoxynucleotidyl transferase
  source 1..1182: mol_type = other DNA
atgcatcaccaccatcatcatgggggttctggtcatccgccgagcaataccccggagggggaggtgccgagcgttatcgcccgtccggttagtcagtacagctgccagcgcaagaccacgctgaataactacaacaaaaagtttaccgacgcgctggagatcatggccgagaactacaaatttaaagagaacctgatcgcgtgtctggaagccaagcgcgccgcgagtattctgaaatatctgccgttcgaggttaccagcatgaaagacatccaaggtctgccgtgcattaccgaccaagttcgtgacgtgatcgaggagatcatcgaagagggcgagagcagccgtgttaaagaagttctcaatgacgagcgctacaaggcctttaagcagttcaccagcgtgttcggtgtgggcgtgaaaaccgcggaaaagtggtttcgtatgggcctccgtacggttgaagaagcaaaggccagtaagagtctgaagctgagcaagatgcagaaggcgggctttctgtattacgaggatctggcgagccgcgttagtaaagaagaagccgatgccgttacgctcatcgtgaagaacacggtgattacctttctgccggatgcgctggtgaccatcaccggcggtttccgccgtggcaaacctatgggccacgacgttgactttctgatcacgaatccgggcccgaaagaggatgacgagctgctccacaaagtggttgatctgctcaagaagcaaggtctgctgctgtacgaagacatcaaagagagcacgttcgtggaggggcaactgccaagtcgcaaaatcgacgccatggacaacttccagaagtgcttcgccattctcaagctgtaccagccgggcgtggataacagtgcggttgggacgagtaagaaaagtgacatggccgaggttaaggattggaaagcgattcgtgtggatctggtgatcacgccattcgagcagtacgcctatgcgctgctcggttggacgggcagcaaagaatttcgtcgcgatctgcgccgctatgcggaggaagagcgcggcatgatcctcgacaaccatgccctctacgacctgaaaaagcgcatctttctgaaagcgggcagcgaagaagagattttcgcgcatctgggtctggattatgtggagccgtgggaacgcaacgcg

SEQ ID NO: 2236 - protein, 394 aa, synthetic construct
  REGION 1..394: note = Variant of terminal deoxynucleotidyl transferase
MHHHHHHGGSGHPPSNTPEGEVPSVIARPVSQYSCQRKTTLNNYNKKFTDALEIMAENYKFKENLIACLEAKRAASILKYLPFEVTSMKDIQGLPCITDQVRDVIEEIIEEGESSRVKEVLNDERYKAFKQFTSVFGVGVKTAEKWFRMGLRTVEEAKASKSLKLSKMQKAGFLYYEDLASRVSKEEADAVTLIVKNTVITFLPDALVTITGGFRRGKPMGHDVDFLITNPGPKEDDELLHKVVDLLKKQGLLLYEDIKESTFVEGQLPSRKIDAMDNFQKCFAILKLYQPGVDNSAVGTSKKSDMAEVKDWKAIRVDLVITPFEQYAYALLGWTGSKEFRRDLRRYAEEERGMILDNHALYDLKKRIFLKAGSEEEIFAHLGLDYVEPWERNA

SEQ ID NO: 2237 - DNA, 1182 bp, synthetic construct
  misc_feature 1..1182: note = Variant of terminal deoxynucleotidyl transferase
  source 1..1182: mol_type = other DNA
atgcatcaccaccatcatcatgggggttctggtcatccgccgagcaataccccggagggggaggtgccgagcgttatcgcccgtccggttagtcagtacagctgccagcgcaagaccacgctgaataactacaacaaaaagtttaccgacgcgctggagatcatggccgagaactacaaatttaaagagaacctgatcgcgtgtctggaagccaagcgcgccgcgagtattctgaaatatctgccgttcgaggttaccagcatgaaagacatccaaggtctgccgtgcattaccgaccaagttcgtgacgtgatcgaggagatcatcgaagagggcgagagcagccgtgttaaagaagttctcaatgacgagcgctacaaggcctttaagcagttcaccagcgtgttcggtgtgggcgtgaaaaccgcggaaaagtggtttcgtatgggcctccgtacggttgaagaagcaaaggccagtaagagtctgaagctgagcaagatgcagaaggcgggctttctgtattacgaggatctggcgagccgcgttagtaaagaagaagccgatgccgttacgctcatcgtgaagaacacggtgcgtacctttctgccggatgcgctggtgaccatcaccggcggtttccgccgtggcaaacctatgggccacgacgttgactttctgatcacgaatccgggcccgaaagaggatgacgagctgctccacaaagtggttgatctgctcaagaagcaaggtctgctgctgtacgaagacatcaaagagagcacgttcgtggaggggcaactgccaagtcgcaaaatcgacgccatggacaacttccagaagtgcttcgccattctcaagctgtaccagccgggcgtggataacagtgcggttgggacgagtaagaaaagtgacatggccgaggttaaggattggaaagcgattcgtgtggatctggtgatcacgccattcgagcagtacgcctatgcgctgctcggttggacgggcagcaaagaatttcgtcgcgatctgcgccgctatgcggaggaagagcgcggcatgatcctcgacaaccatgccctctacgacctgaaaaagcgccggtttctgaaagcgggcagcgaagaagagattttcgcgcatctgggtctggattatgtggagccgtgggaacgcaacgcg

SEQ ID NO: 2238 - protein, 394 aa, synthetic construct
  REGION 1..394: note = Variant of terminal deoxynucleotidyl transferase
MHHHHHHGGSGHPPSNTPEGEVPSVIARPVSQYSCQRKTTLNNYNKKFTDALEIMAENYKFKENLIACLEAKRAASILKYLPFEVTSMKDIQGLPCITDQVRDVIEEIIEEGESSRVKEVLNDERYKAFKQFTSVFGVGVKTAEKWFRMGLRTVEEAKASKSLKLSKMQKAGFLYYEDLASRVSKEEADAVTLIVKNTVRTFLPDALVTITGGFRRGKPMGHDVDFLITNPGPKEDDELLHKVVDLLKKQGLLLYEDIKESTFVEGQLPSRKIDAMDNFQKCFAILKLYQPGVDNSAVGTSKKSDMAEVKDWKAIRVDLVITPFEQYAYALLGWTGSKEFRRDLRRYAEEERGMILDNHALYDLKKRRFLKAGSEEEIFAHLGLDYVEPWERNA

SEQ ID NO: 2239 - DNA, 1182 bp, synthetic construct
  misc_feature 1..1182: note = Variant of terminal deoxynucleotidyl transferase
  source 1..1182: mol_type = other DNA
atgcatcaccaccatcatcatgggggttctggtcatccgccgagcaataccccggagggggaggtgccgagcgttatcgcccgtccggttagtcagtacagctgccagcgcaagaccacgctgaataactacaacaaaaagtttaccgacgcgctggagatcatggccgagaactacaaatttaaagagaacctgatcgcgtgtctggaagccaagcgcgccgcgagtattctgaaatatctgccgttcgaggttaccagcatgaaagacatccaaggtctgccgtgcattaccgaccaagttcgtgacgtgatcgaggagatcatcgaatttggcgagagcagccgtgttaaagaagttctcaatgacgagcgctacaaggcctttaagcagttcaccagcgtgttcggtgtgggcgtgaaaaccgcggaaaagtggtttcgtatgggcctccgtacggttgaagaagcaaaggccagtaagagtctgaagctgagcaagatgcagaaggcgggctttctgtattacgaggatctggcgagccgcgttagtaaagaagaagccgatgccgttacgctcatcgtgaagaacacggtgcgtacctttctgccggatgcgctggtgaccatcaccggcggtttccgccgtggcaaacctatgggccacgacgttgactttctgatcacgaatccgggcccgaaagaggatgacgagctgctccacaaagtggttgatctgctcaagaagcaaggtctgctgctgtacgaagacatcaaagagagcacgttcgtggaggggcaactgccaagtcgcaaaatcgacgccatggacaacttccagaagtgcttcgccattctcaagctgtaccagccgggcgtggataacagtgcggttgggacgagtaagaaaagtgacatggccgaggttaaggattggaaagcgattcgtgtggatctggtgatcacgccattcgagcagtacgcctatgcgctgctcggttggacgggcagcaaagaatttcgtcgcgatctgcgccgctatgcggaggaagagcgcggcatgatcctcgacaaccatgccctctacgacctgaaaaagcgcatctttctgaaagcgggcagcgaagaagagattttcgcgcatctgggtctggattatgtggagccgtgggaacgcaacgcg

SEQ ID NO: 2240 - protein, 394 aa, synthetic construct
  REGION 1..394: note = Variant of terminal deoxynucleotidyl transferase
MHHHHHHGGSGHPPSNTPEGEVPSVIARPVSQYSCQRKTTLNNYNKKFTDALEIMAENYKFKENLIACLEAKRAASILKYLPFEVTSMKDIQGLPCITDQVRDVIEEIIEFGESSRVKEVLNDERYKAFKQFTSVFGVGVKTAEKWFRMGLRTVEEAKASKSLKLSKMQKAGFLYYEDLASRVSKEEADAVTLIVKNTVRTFLPDALVTITGGFRRGKPMGHDVDFLITNPGPKEDDELLHKVVDLLKKQGLLLYEDIKESTFVEGQLPSRKIDAMDNFQKCFAILKLYQPGVDNSAVGTSKKSDMAEVKDWKAIRVDLVITPFEQYAYALLGWTGSKEFRRDLRRYAEEERGMILDNHALYDLKKRIFLKAGSEEEIFAHLGLDYVEPWERNA

SEQ ID NO: 2241 - DNA, 1182 bp, synthetic construct
  misc_feature 1..1182: note = Variant of terminal deoxynucleotidyl transferase
  source 1..1182: mol_type = other DNA
atgcatcaccaccatcatcatgggggttctggtcatccgccgagcaataccccggagggggaggtgccgagcgttatcgcccgtccggttagtcagtacagctgccagcgcaagaccacgctgaataactacaacaaaaagtttaccgacgcgctggagatcatggccgagaactacaaatttaaagagaacctgatcgcgtgtctggaagccaagcgcgccgcgagtattctgaaatatctgccgttcgaggttaccagcatgaaagacatccaaggtctgccgtgcattaccgaccaagttcgtgacgtgatcgaggagatcatcgaagagggcgagagcagccgtgttaaagaagttctcaatgacgagcgctacaaggcctttaagcagttcaccagcgtgttcggtgtgggcgtgaaaaccgcggaaaagtggtttcgtatgggcctccgtacggttgaagaagcaaaggccagtaagagtctgaagctgagcaagatgcagaaggcgggctttctgtattacgaggatctggcgagccgcgttagtaaagaagaagccgatgccgttacgctcatcgtgaagaacacggtgcgtacctttctgccggatgcgctggtgaccatcaccggcggtttccgccgtggcaaacctatgggccacgacgttgactttctgatcacgaatccgggcccgaaagaggatgacgagctgctccacaaagtggttgatctgctcaagaagcaaggtctgctgctgtacgaagacatcaaagagagcacgttcgtggaggggcaactgccaagtcgcaaaatcgacgccatggacaacttccagaagtgcttcgccattctcaagctgtaccagccgggcgtggataacagtgcggttgggacgagtaagaaaagtgacatggccgaggttaaggattggaaagcgattcgtgtggatctggtgatcacgccattcgagcagtacgcctatgcgctgctcggttggacgggcagcaaagaatttcgtcgcgatctgcgccgctatgcggagacggagcgcggcatgatcctcgacaaccatgccctctacgacctgaaaaagcgcatctttctgaaagcgggcagcgaagaagagattttcgcgcatctgggtctggattatgtggagccgtgggaacgcaacgcg

SEQ ID NO: 2242 - protein, 394 aa, synthetic construct
  REGION 1..394: note = Variant of terminal deoxynucleotidyl transferase
MHHHHHHGGSGHPPSNTPEGEVPSVIARPVSQYSCQRKTTLNNYNKKFTDALEIMAENYKFKENLIACLEAKRAASILKYLPFEVTSMKDIQGLPCITDQVRDVIEEIIEEGESSRVKEVLNDERYKAFKQFTSVFGVGVKTAEKWFRMGLRTVEEAKASKSLKLSKMQKAGFLYYEDLASRVSKEEADAVTLIVKNTVRTFLPDALVTITGGFRRGKPMGHDVDFLITNPGPKEDDELLHKVVDLLKKQGLLLYEDIKESTFVEGQLPSRKIDAMDNFQKCFAILKLYQPGVDNSAVGTSKKSDMAEVKDWKAIRVDLVITPFEQYAYALLGWTGSKEFRRDLRRYAETERGMILDNHALYDLKKRIFLKAGSEEEIFAHLGLDYVEPWERNA

SEQ ID NO: 2243 - DNA, 1182 bp, synthetic construct
  misc_feature 1..1182: note = Variant of terminal deoxynucleotidyl transferase
  source 1..1182: mol_type = other DNA
atgcatcaccaccatcatcatgggggttctggtcatccgccgagcaataccccggagggggaggtgccgagcgttatcgcccgtccggttagtcagtacagctgccagcgcaagaccacgctgaataactacaacaaaaagtttaccgacgcgctggagatcatggccgagaactacaaatttaaagagaacctgatcgcgtgtctggaagccaagcgcgccgcgagtattctgaaatatctgccgttcgaggttaccagcatgaaagacatccaaggtctgccgtgcattaccgaccaagttcgtgacgtgatcgaggagatcatcgaagagggcgagagcagccgtgttaaagaagttctcaatgacgagcgctacaaggcctttaagcagttcaccagcgtgttcggtgtgggcgtgaaaaccgcggaaaggtggtttcgtatgggcctccgtacggttgaagaagcaaaggccagtaagagtctgaagctgagcaagatgcagaaggcgggctttctgtattacgaggatctggcgagccgcgttagtaaagaagaagccgatgccgttacgctcatcgtgaagaacacggtgcgtacctttctgccggatgcgctggtgaccatcaccggcggtttccgccgtggcaaacctatgggccacgacgttgactttctgatcacgaatccgggcccgaaagaggatgacgagctgctccacaaagtggttgatctgctcaagaagcaaggtctgctgctgtacgaagacatcaaagagagcacgttcgtggaggggcaactgccaagtcgcaaaatcgacgccatggacaacttccagaagtgcttcgccattctcaagctgtaccagccgggcgtggataacagtgcggttgggacgagtaagaaaagtgacatggccgaggttaaggattggaaagcgattcgtgtggatctggtgatcacgccattcgagcagtacgcctatgcgctgctcggttggacgggcagcaaagaatttcgtcgcgatctgcgccgctatgcggaggaagagcgcggcatgatcctcgacaaccatgccctctacgacctgaaaaagcgcatctttctgaaagcgggcagcgaagaagagattttcgcgcatctgggtctggattatgtggagccgtgggaacgcaacgcg

SEQ ID NO: 2244 - protein, 394 aa, synthetic construct
  REGION 1..394: note = Variant of terminal deoxynucleotidyl transferase
MHHHHHHGGSGHPPSNTPEGEVPSVIARPVSQYSCQRKTTLNNYNKKFTDALEIMAENYKFKENLIACLEAKRAASILKYLPFEVTSMKDIQGLPCITDQVRDVIEEIIEEGESSRVKEVLNDERYKAFKQFTSVFGVGVKTAERWFRMGLRTVEEAKASKSLKLSKMQKAGFLYYEDLASRVSKEEADAVTLIVKNTVRTFLPDALVTITGGFRRGKPMGHDVDFLITNPGPKEDDELLHKVVDLLKKQGLLLYEDIKESTFVEGQLPSRKIDAMDNFQKCFAILKLYQPGVDNSAVGTSKKSDMAEVKDWKAIRVDLVITPFEQYAYALLGWTGSKEFRRDLRRYAEEERGMILDNHALYDLKKRIFLKAGSEEEIFAHLGLDYVEPWERNA

SEQ ID NO: 2245 - DNA, 1182 bp, synthetic construct
  misc_feature 1..1182: note = Variant of terminal deoxynucleotidyl transferase
  source 1..1182: mol_type = other DNA
atgcatcaccaccatcatcatgggggttctggtcatccgccgagcaataccccggagggggaggtgccgagcgttatcgcccgtccggttagtcagtacagctgccagcgcaagaccacgctgaataactacaacaaaaagtttaccgacgcgctggagatcatggccgagaactacaaatttaaagagaacctgatcgcgtgtctggaagccaagcgcgccgcgagtattctgaaatatctgccgttcgaggttaccagcatgaaagacatccaaggtctgccgtgcattaccgaccaagttcgtgacgtgatcgaggagatcatcgaagagggcgagagcagccgtgttaaagaagttctcaatgacgagcgctacaaggcctttaagcagttcaccagcgtgttcggtgtgggcgtgaaaaccgcggaaaagtggtttcgtatgggcctccgtacggttgaagaagcaaaggccagtaagagtctgaagctgagcaagatgcagaaggcgggctttctgtattacgaggatctggcgagccgcgttagtaaagaagaagccgatgccgttacgctcatcgtgaagaacacggtgcgtacctttagtccggatgcgctggtgaccatcaccggcggtttccgccgtggcaaacctatgggccacgacgttgactttctgatcacgaatccgggcccgaaagaggatgacgagctgctccacaaagtggttgatctgctcaagaagcaaggtctgctgctgtacgaagacatcaaagagagcacgttcgtggaggggcaactgccaagtcgcaaaatcgacgccatggacaacttccagaagtgcttcgccattctcaagctgtaccagccgggcgtggataacagtgcggttgggacgagtaagaaaagtgacatggccgaggttaaggattggaaagcgattcgtgtggatctggtgatcacgccattcgagcagtacgcctatgcgctgctcggttggacgggcagcaaagaatttcgtcgcgatctgcgccgctatgcggaggaagagcgcggcatgatcctcgacaaccatgccctctacgacctgaaaaagcgcatctttctgaaagcgggcagcgaagaagagattttcgcgcatctgggtctggattatgtggagccgtgggaacgcaacgcg

SEQ ID NO: 2246 - protein, 394 aa, synthetic construct
  REGION 1..394: note = Variant of terminal deoxynucleotidyl transferase
MHHHHHHGGSGHPPSNTPEGEVPSVIARPVSQYSCQRKTTLNNYNKKFTDALEIMAENYKFKENLIACLEAKRAASILKYLPFEVTSMKDIQGLPCITDQVRDVIEEIIEEGESSRVKEVLNDERYKAFKQFTSVFGVGVKTAEKWFRMGLRTVEEAKASKSLKLSKMQKAGFLYYEDLASRVSKEEADAVTLIVKNTVRTFSPDALVTITGGFRRGKPMGHDVDFLITNPGPKEDDELLHKVVDLLKKQGLLLYEDIKESTFVEGQLPSRKIDAMDNFQKCFAILKLYQPGVDNSAVGTSKKSDMAEVKDWKAIRVDLVITPFEQYAYALLGWTGSKEFRRDLRRYAEEERGMILDNHALYDLKKRIFLKAGSEEEIFAHLGLDYVEPWERNA

SEQ ID NO: 2247 - DNA, 1182 bp, synthetic construct
  misc_feature 1..1182: note = Variant of terminal deoxynucleotidyl transferase
  source 1..1182: mol_type = other DNA
atgcatcaccaccatcatcatgggggttctggtcatccgccgagcaataccccggagggggaggtgccgagcgttatcgcccgtccggttagtcagtacagctgccagcgcaagaccacgctgaataactacaacaaaaagtttaccgacgcgctggagatcatggccgagaactacaaatttaaagagaacctgatcgcgtgtctggaagccaagcgcgccgcgagtattctgaaatatctgccgttcgaggttaccagcatgaaagacatccaaggtctgccgtgcattaccgaccaagttcgtgacgtgatcgaggagatcatcgaagagggcgagagcagccgtgttaaagaagttctcaatgacgagcgctacaaggcctttaagcagttcaccagcgtgttcggtgtgggcgtgaaaaccgcggaaaagtggtttcgtatgggcctccgtacggttgaagaagcaaaggccagtaagagtctgaagctgagcaagatgcagaaggcgggctttctgtattacgaggatctggcgagccgcgttagtaaagaagaagccgatgccgttacgctcatcgtgaagaacacggtgcgtacctttctgccggatgcgctggtgaccatcaccggcggtttccgccgtggcaaacctatgggccacgacgttgactttctgatcacgaatccgggcccgaaatttgatgacgagctgctccacaaagtggttgatctgctcaagaagcaaggtctgctgctgtacgaagacatcaaagagagcacgttcgtggaggggcaactgccaagtcgcaaaatcgacgccatggacaacttccagaagtgcttcgccattctcaagctgtaccagccgggcgtggataacagtgcggttgggacgagtaagaaaagtgacatggccgaggttaaggattggaaagcgattcgtgtggatctggtgatcacgccattcgagcagtacgcctatgcgctgctcggttggacgggcagcaaagaatttcgtcgcgatctgcgccgctatgcggaggaagagcgcggcatgatcctcgacaaccatgccctctacgacctgaaaaagcgcatctttctgaaagcgggcagcgaagaagagattttcgcgcatctgggtctggattatgtggagccgtgggaacgcaacgcg

SEQ ID NO: 2248 - protein, 394 aa, synthetic construct
  REGION 1..394: note = Variant of terminal deoxynucleotidyl transferase
MHHHHHHGGSGHPPSNTPEGEVPSVIARPVSQYSCQRKTTLNNYNKKFTDALEIMAENYKFKENLIACLEAKRAASILKYLPFEVTSMKDIQGLPCITDQVRDVIEEIIEEGESSRVKEVLNDERYKAFKQFTSVFGVGVKTAEKWFRMGLRTVEEAKASKSLKLSKMQKAGFLYYEDLASRVSKEEADAVTLIVKNTVRTFLPDALVTITGGFRRGKPMGHDVDFLITNPGPKFDDELLHKVVDLLKKQGLLLYEDIKESTFVEGQLPSRKIDAMDNFQKCFAILKLYQPGVDNSAVGTSKKSDMAEVKDWKAIRVDLVITPFEQYAYALLGWTGSKEFRRDLRRYAEEERGMILDNHALYDLKKRIFLKAGSEEEIFAHLGLDYVEPWERNA

SEQ ID NO: 2249 - DNA, 1182 bp, synthetic construct
  misc_feature 1..1182: note = Variant of terminal deoxynucleotidyl transferase
  source 1..1182: mol_type = other DNA
atgcatcaccaccatcatcatgggggttctggtcatccgccgagcaataccccggagggggaggtgccgagcgttatcgcccgtccggttagtcagtacagctgccagcgcaagaccacgctgaataactacaacaaaaagtttaccgacgcgctggagatcatggccgagaactacaaatttaaagagaacctgatcgcgtgtctggaagccaagcgcgccgcgagtattctgaaatatctgccgttcgaggttaccagcatgaaagacatccaaggtctgccgtgcattaccgaccaagttcgtgacgtgatcgaggagatcatcgaagagggcgagagcagccgtgttaaagaagttctcaatgacgagcgctacaaggcctttaagcagttcaccagcgtgttcggtgtgggcgtgaaaaccgcggaatgttggtttcgtatgggcctccgtacggttgaagaagcaaaggccagtaagagtctgaagctgagcaagatgcagaaggcgggctttctgtattacgaggatctggcgagccgcgttagtaaagaagaagccgatgccgttacgctcatcgtgaagaacacggtgcgtacctttctgccggatgcgctggtgaccatcaccggcggtttccgccgtggcaaacctatgggccacgacgttgactttctgatcacgaatccgggcccgaaagaggatgacgagctgctccacaaagtggttgatctgctcaagaagcaaggtctgctgctgtacgaagacatcaaagagagcacgttcgtggaggggcaactgccaagtcgcaaaatcgacgccatggacaacttccagaagtgcttcgccattctcaagctgtaccagccgggcgtggataacagtgcggttgggacgagtaagaaaagtgacatggccgaggttaaggattggaaagcgattcgtgtggatctggtgatcacgccattcgagcagtacgcctatgcgctgctcggttggacgggcagcaaagaatttcgtcgcgatctgcgccgctatgcggaggaagagcgcggcatgatcctcgacaaccatgccctctacgacctgaaaaagcgcatctttctgaaagcgggcagcgaagaagagattttcgcgcatctgggtctggattatgtggagccgtgggaacgcaacgcg

SEQ ID NO: 2250 - protein, 394 aa, synthetic construct
  REGION 1..394: note = Variant of terminal deoxynucleotidyl transferase
MHHHHHHGGSGHPPSNTPEGEVPSVIARPVSQYSCQRKTTLNNYNKKFTDALEIMAENYKFKENLIACLEAKRAASILKYLPFEVTSMKDIQGLPCITDQVRDVIEEIIEEGESSRVKEVLNDERYKAFKQFTSVFGVGVKTAECWFRMGLRTVEEAKASKSLKLSKMQKAGFLYYEDLASRVSKEEADAVTLIVKNTVRTFLPDALVTITGGFRRGKPMGHDVDFLITNPGPKEDDELLHKVVDLLKKQGLLLYEDIKESTFVEGQLPSRKIDAMDNFQKCFAILKLYQPGVDNSAVGTSKKSDMAEVKDWKAIRVDLVITPFEQYAYALLGWTGSKEFRRDLRRYAEEERGMILDNHALYDLKKRIFLKAGSEEEIFAHLGLDYVEPWERNA

SEQ ID NO: 2251 - DNA, 1182 bp, synthetic construct
  misc_feature 1..1182: note = Variant of terminal deoxynucleotidyl transferase
  source 1..1182: mol_type = other DNA
atgcatcaccaccatcatcatgggggttctggtcatccgccgagcaataccccggagggggaggtgccgagcgttatcgcccgtccggttagtcagtacagctgccagcgcaagaccacgctgaataactacaacaaaaagtttaccgacgcgctggagatcatggccgagaactacaaatttaaagagaacctgatcgcgtgtctggaagccaagcgcctggcgagtattctgaaatatctgccgttcgaggttaccagcatgaaagacatccaaggtctgccgtgcattaccgaccaagttcgtgacgtgatcgaggagatcatcgaagagggcgagagcagccgtgttaaagaagttctcaatgacgagcgctacaaggcctttaagcagttcaccagcgtgttcggtgtgggcgtgaaaaccgcggaaaagtggtttcgtatgggcctccgtacggttgaagaagcaaaggccagtaagagtctgaagctgagcaagatgcagaaggcgggctttctgtattacgaggatctggcgagccgcgttagtaaagaagaagccgatgccgttacgctcatcgtgaagaacacggtgcgtacctttctgccggatgcgctggtgaccatcaccggcggtttccgccgtggcaaacctatgggccacgacgttgactttctgatcacgaatccgggcccgaaagaggatgacgagctgctccacaaagtggttgatctgctcaagaagcaaggtctgctgctgtacgaagacatcaaagagagcacgttcgtggaggggcaactgccaagtcgcaaaatcgacgccatggacaacttccagaagtgcttcgccattctcaagctgtaccagccgggcgtggataacagtgcggttgggacgagtaagaaaagtgacatggccgaggttaaggattggaaagcgattcgtgtggatctggtgatcacgccattcgagcagtacgcctatgcgctgctcggttggacgggcagcaaagaatttcgtcgcgatctgcgccgctatgcggaggaagagcgcggcatgatcctcgacaaccatgccctctacgacctgaaaaagcgcatctttctgaaagcgggcagcgaagaagagattttcgcgcatctgggtctggattatgtggagccgtgggaacgcaacgcg

SEQ ID NO: 2252 - protein, 394 aa, synthetic construct
  REGION 1..394: note = Variant of terminal deoxynucleotidyl transferase
MHHHHHHGGSGHPPSNTPEGEVPSVIARPVSQYSCQRKTTLNNYNKKFTDALEIMAENYKFKENLIACLEAKRLASILKYLPFEVTSMKDIQGLPCITDQVRDVIEEIIEEGESSRVKEVLNDERYKAFKQFTSVFGVGVKTAEKWFRMGLRTVEEAKASKSLKLSKMQKAGFLYYEDLASRVSKEEADAVTLIVKNTVRTFLPDALVTITGGFRRGKPMGHDVDFLITNPGPKEDDELLHKVVDLLKKQGLLLYEDIKESTFVEGQLPSRKIDAMDNFQKCFAILKLYQPGVDNSAVGTSKKSDMAEVKDWKAIRVDLVITPFEQYAYALLGWTGSKEFRRDLRRYAEEERGMILDNHALYDLKKRIFLKAGSEEEIFAHLGLDYVEPWERNA

SEQ ID NO: 2253 - DNA, 1182 bp, synthetic construct
  misc_feature 1..1182: note = Variant of terminal deoxynucleotidyl transferase
  source 1..1182: mol_type = other DNA
atgcatcaccaccatcatcatgggggttctggtcatccgccgagcaataccccggagggggaggtgccgagcgttatcgcccgtccggttagtcagtacagctgccagcgcaagaccacgctgaataactacaacaaaaagtttaccgacgcgctggagatcatggccgagaactacaaatttaaagagaacctgatcgcgtgtctggaagccaagcgcgccgcgagtattctgaaatatctgccgttcgaggttaccagcatgaaagacatccaaggtctgccgtgcattaccgaccaagttcgtgacgtgatcgaggagatcatcgaagagggcgagagcagccgtgttaaagaagttctcaatgacgagcgctacaaggcctttaagcagttcaccagcgtgttcggtgtgggcgtgaaaaccgcggaaaagtggtttcgtatgggcctccgtacggttgaagaagcaaaggccagtaagagtctgaagctgagcaagatgcagaaggcgggctttctgtattacgaggatctggcgagccgcgttagtaaagaagaagccgatgccgttacgctcatcgtgaagaacacggtgcgtacctttctgccggatgcgctggtgaccatcaccggcggtttccgccgtggcaaacctatgggccacgacgttgactttctgatcacgaatccgggcccgaaagaggatgacgagctgctccaccgtgtggttgatctgctcaagaagcaaggtctgctgctgtacgaagacatcaaagagagcacgttcgtggaggggcaactgccaagtcgcaaaatcgacgccatggacaacttccagaagtgcttcgccattctcaagctgtaccagccgggcgtggataacagtgcggttgggacgagtaagaaaagtgacatggccgaggttaaggattggaaagcgattcgtgtggatctggtgatcacgccattcgagcagtacgcctatgcgctgctcggttggacgggcagcaaagaatttcgtcgcgatctgcgccgctatgcggaggaagagcgcggcatgatcctcgacaaccatgccctctacgacctgaaaaagcgcatctttctgaaagcgggcagcgaagaagagattttcgcgcatctgggtctggattatgtggagccgtgggaacgcaacgcg

SEQ ID NO: 2254 - protein, 394 aa, synthetic construct
  REGION 1..394: note = Variant of terminal deoxynucleotidyl transferase
MHHHHHHGGSGHPPSNTPEGEVPSVIARPVSQYSCQRKTTLNNYNKKFTDALEIMAENYKFKENLIACLEAKRAASILKYLPFEVTSMKDIQGLPCITDQVRDVIEEIIEEGESSRVKEVLNDERYKAFKQFTSVFGVGVKTAEKWFRMGLRTVEEAKASKSLKLSKMQKAGFLYYEDLASRVSKEEADAVTLIVKNTVRTFLPDALVTITGGFRRGKPMGHDVDFLITNPGPKEDDELLHRVVDLLKKQGLLLYEDIKESTFVEGQLPSRKIDAMDNFQKCFAILKLYQPGVDNSAVGTSKKSDMAEVKDWKAIRVDLVITPFEQYAYALLGWTGSKEFRRDLRRYAEEERGMILDNHALYDLKKRIFLKAGSEEEIFAHLGLDYVEPWERNA

SEQ ID NO: 2255 - DNA, 1182 bp, synthetic construct
  misc_feature 1..1182: note = Variant of terminal deoxynucleotidyl transferase
  source 1..1182: mol_type = other DNA
atgcatcaccaccatcatcatgggggttctggtcatccgccgagcaataccccggagggggaggtgccgagcgttatcgcccgtccggttagtcagtacagctgccagcgcaagaccacgctgaataactacaacaaaaagtttaccgacgcgctggagatcatggccgagaactacaaatttaaagagaacctgatcgcgtgtctggaagccaagcgcgccgcgagtattctgaaatatctgccgttcgaggttaccagcatgaaagacatccaaggtctgccgtgcattaccgaccaagttcgtgacgtgatcgaggagatcatcgaagagggcgagagcagccgtgttaaagaagttctcaatgacgagcgctacaaggcctttaagcagttcaccagcgtgttcggtgtgggcgtgaaaaccgcggaaaagtggtttcgtatgggcctccgtacggttgaagaagcaaaggccagtaagagtctgaagctgagcaagatgcagaaggcgggctttctgtattacgaggatctggcgagccgcgttagtaaagaagaagccgatgccgttacgctcatcgtgaagaacacggtgcgtacctttctgccggatgcgctggtgaccatcaccggcggtttccgccgtggcaaacctatgggccacgacgttgactttctgatcacgaatccgggcccgaaagaggatgacgagctgctccacaaagtggttgatctgctcaagaagcaaggtctgctgctgtacgaagacatcaaagagagcacgttcgtggaggggagtctgccaagtcgcaaaatcgacgccatggacaacttccagaagtgcttcgccattctcaagctgtaccagccgggcgtggataacagtgcggttgggacgagtaagaaaagtgacatggccgaggttaaggattggaaagcgattcgtgtggatctggtgatcacgccattcgagcagtacgcctatgcgctgctcggttggacgggcagcaaagaatttcgtcgcgatctgcgccgctatgcggaggaagagcgcggcatgatcctcgacaaccatgccctctacgacctgaaaaagcgcatctttctgaaagcgggcagcgaagaagagattttcgcgcatctgggtctggattatgtggagccgtgggaacgcaacgcg

SEQ ID NO: 2256 - protein, 394 aa, synthetic construct
  REGION 1..394: note = Variant of terminal deoxynucleotidyl transferase
MHHHHHHGGSGHPPSNTPEGEVPSVIARPVSQYSCQRKTTLNNYNKKFTDALEIMAENYKFKENLIACLEAKRAASILKYLPFEVTSMKDIQGLPCITDQVRDVIEEIIEEGESSRVKEVLNDERYKAFKQFTSVFGVGVKTAEKWFRMGLRTVEEAKASKSLKLSKMQKAGFLYYEDLASRVSKEEADAVTLIVKNTVRTFLPDALVTITGGFRRGKPMGHDVDFLITNPGPKEDDELLHKVVDLLKKQGLLLYEDIKESTFVEGSLPSRKIDAMDNFQKCFAILKLYQPGVDNSAVGTSKKSDMAEVKDWKAIRVDLVITPFEQYAYALLGWTGSKEFRRDLRRYAEEERGMILDNHALYDLKKRIFLKAGSEEEIFAHLGLDYVEPWERNA

SEQ ID NO: 2257 - DNA, 1182 bp, synthetic construct
  misc_feature 1..1182: note = Variant of terminal deoxynucleotidyl transferase
  source 1..1182: mol_type = other DNA
atgcatcaccaccatcatcatgggggttctggtcatccgccgagcaataccccggagggggaggtgccgagcgttatcgcccgtccggttagtcagtacagctgccagcgcaagaccacgctgaataactacaacaaaaagtttaccgacgcgctggagatcatggccgagaactacaaatttaaagagaacctgatcgcgtgtctggaagccaagcgcgccgcgagtattctgaaatatctgccgttcgaggttaccagcatgaaagacatccaaggtctgccgtgcattaccgaccaagttcgtgacgtgatcgaggagatcatcgaagagggcgagagcagccgtgttaaagaagttctcaatgacgagcgctacaaggcctttaagcagttcaccagcgtgttcggtgtgggcgtgaaaaccgcggaaaagtggtttcgtatgggcctccgtacggttgaagaagcaaaggccagtaagagtctgaagctgagcaagatgcagaaggcgggctttctgtattacgaggatctggcgagccgcgttagtaaagaagaagccgatgccgttacgctcatcgtgaagaacacggtgcgtacctttctgccggatgcgctggtgaccatcaccggcggtttccgccgtggcaaacctatgggccacgacgttgactttctgatcacgaatccgggcccgaaatgtgatgacgagctgctccacaaagtggttgatctgctcaagaagcaaggtctgctgctgtacgaagacatcaaagagagcacgttcgtggaggggcaactgccaagtcgcaaaatcgacgccatggacaacttccagaagtgcttcgccattctcaagctgtaccagccgggcgtggataacagtgcggttgggacgagtaagaaaagtgacatggccgaggttaaggattggaaagcgattcgtgtggatctggtgatcacgccattcgagcagtacgcctatgcgctgctcggttggacgggcagcaaagaatttcgtcgcgatctgcgccgctatgcggaggaagagcgcggcatgatcctcgacaaccatgccctctacgacctgaaaaagcgcatctttctgaaagcgggcagcgaagaagagattttcgcgcatctgggtctggattatgtggagccgtgggaacgcaacgcg

SEQ ID NO: 2258 - protein, 394 aa, synthetic construct
  REGION 1..394: note = Variant of terminal deoxynucleotidyl transferase
MHHHHHHGGSGHPPSNTPEGEVPSVIARPVSQYSCQRKTTLNNYNKKFTDALEIMAENYKFKENLIACLEAKRAASILKYLPFEVTSMKDIQGLPCITDQVRDVIEEIIEEGESSRVKEVLNDERYKAFKQFTSVFGVGVKTAEKWFRMGLRTVEEAKASKSLKLSKMQKAGFLYYEDLASRVSKEEADAVTLIVKNTVRTFLPDALVTITGGFRRGKPMGHDVDFLITNPGPKCDDELLHKVVDLLKKQGLLLYEDIKESTFVEGQLPSRKIDAMDNFQKCFAILKLYQPGVDNSAVGTSKKSDMAEVKDWKAIRVDLVITPFEQYAYALLGWTGSKEFRRDLRRYAEEERGMILDNHALYDLKKRIFLKAGSEEEIFAHLGLDYVEPWERNA

SEQ ID NO: 2259 - DNA, 1182 bp, synthetic construct
  misc_feature 1..1182: note = Variant of terminal deoxynucleotidyl transferase
  source 1..1182: mol_type = other DNA
atgcatcaccaccatcatcatgggggttctggtcatccgccgagcaataccccggagggggaggtgccgagcgttatcgcccgtccggttagtcagtacagctgccagcgcaagaccacgctgaataactacaacaaaaagtttaccgacgcgctggagatcatggccgagaactacaaatttaaagagaacctgatcgcgtgtctggaagccaagcgcgccgcgagtattctgaaatatctgccgttcgaggttaccagcatgaaagacatccaaggtctgccgtgcattaccgaccaagttcgtgacgtgatcgaggagatcatcgaagagggcgagagcagccgtgttaaagaagttctcaatgacgagcgctacaaggcctttaagcagttcaccagcgtgttcggtgtgggcgtgaaaaccgcggaaaagtggtttcgtatgggcctccgtacggttgaagaagcaaaggccagtaagagtctgaagctgagcaagatgcagaaggcgggctttctgtattacgaggatctggcgagccgcgttagtaaagaagaagccgatgccgttacgctcatcgtgaagaacacggtgcgtacctttctgccggatgcgctggtgaccatcaccggcggtttccgccgtggcaaacctatgggccacgacgttgactttctgatcacgaatccgggcccgaaagaggatgacgagctgctccacaaagtggttgatctgctcaagaagcaaggtctgctgctgtacgaagacatcaaagagagcacgttcgtggaggggcaactgccaagtcgcaaaatcgacgccatggacaacttccagaagtgcttcgccattctcaagctgtaccagccgggcgatgataacagtgcggttgggacgagtaagaaaagtgacatggccgaggttaaggattggaaagcgattcgtgtggatctggtgatcacgccattcgagcagtacgcctatgcgctgctcggttggacgggcagcaaagaatttcgtcgcgatctgcgccgctatgcggaggaagagcgcggcatgatcctcgacaaccatgccctctacgacctgaaaaagcgcatctttctgaaagcgggcagcgaagaagagattttcgcgcatctgggtctggattatgtggagccgtgggaacgcaacgcg

SEQ ID NO: 2260 - protein, 394 aa, synthetic construct
  REGION 1..394: note = Variant of terminal deoxynucleotidyl transferase
MHHHHHHGGSGHPPSNTPEGEVPSVIARPVSQYSCQRKTTLNNYNKKFTDALEIMAENYKFKENLIACLEAKRAASILKYLPFEVTSMKDIQGLPCITDQVRDVIEEIIEEGESSRVKEVLNDERYKAFKQFTSVFGVGVKTAEKWFRMGLRTVEEAKASKSLKLSKMQKAGFLYYEDLASRVSKEEADAVTLIVKNTVRTFLPDALVTITGGFRRGKPMGHDVDFLITNPGPKEDDELLHKVVDLLKKQGLLLYEDIKESTFVEGQLPSRKIDAMDNFQKCFAILKLYQPGDDNSAVGTSKKSDMAEVKDWKAIRVDLVITPFEQYAYALLGWTGSKEFRRDLRRYAEEERGMILDNHALYDLKKRIFLKAGSEEEIFAHLGLDYVEPWERNA

SEQ ID NO: 2261 - DNA, 1182 bp, synthetic construct
  misc_feature 1..1182: note = Variant of terminal deoxynucleotidyl transferase
  source 1..1182: mol_type = other DNA
atgcatcaccaccatcatcatgggggttctggtcatccgccgagcaataccccggagagggaggtgccgagcgttatcgcccgtccggttagtcagtacagctgccagcgcaagaccacgctgaataactacaacaaaaagtttaccgacgcgctggagatcatggccgagaactacaaatttaaagagaacctgatcgcgtgtctggaagccaagcgcgccgcgagtattctgaaatatctgccgttcgaggttaccagcatgaaagacatccaaggtctgccgtgcattaccgaccaagttcgtgacgtgatcgaggagatcatcgaagagggcgagagcagccgtgttaaagaagttctcaatgacgagcgctacaaggcctttaagcagttcaccagcgtgttcggtgtgggcgtgaaaaccgcggaaaagtggtttcgtatgggcctccgtacggttgaagaagcaaaggccagtaagagtctgaagctgagcaagatgcagaaggcgggctttctgtattacgaggatctggcgagccgcgttagtaaagaagaagccgatgccgttacgctcatcgtgaagaacacggtgcgtacctttctgccggatgcgctggtgaccatcaccggcggtttccgccgtggcaaacctatgggccacgacgttgactttctgatcacgaatccgggcccgaaagaggatgacgagctgctccacaaagtggttgatctgctcaagaagcaaggtctgctgctgtacgaagacatcaaagagagcacgttcgtggaggggcaactgccaagtcgcaaaatcgacgccatggacaacttccagaagtgcttcgccattctcaagctgtaccagccgggcgtggataacagtgcggttgggacgagtaagaaaagtgacatggccgaggttaaggattggaaagcgattcgtgtggatctggtgatcacgccattcgagcagtacgcctatgcgctgctcggttggacgggcagcaaagaatttcgtcgcgatctgcgccgctatgcggaggaagagcgcggcatgatcctcgacaaccatgccctctacgacctgaaaaagcgcatctttctgaaagcgggcagcgaagaagagattttcgcgcatctgggtctggattatgtggagccgtgggaacgcaacgcg

SEQ ID NO: 2262 - protein, 394 aa, synthetic construct
  REGION 1..394: note = Variant of terminal deoxynucleotidyl transferase
MHHHHHHGGSGHPPSNTPEREVPSVIARPVSQYSCQRKTTLNNYNKKFTDALEIMAENYKFKENLIACLEAKRAASILKYLPFEVTSMKDIQGLPCITDQVRDVIEEIIEEGESSRVKEVLNDERYKAFKQFTSVFGVGVKTAEKWFRMGLRTVEEAKASKSLKLSKMQKAGFLYYEDLASRVSKEEADAVTLIVKNTVRTFLPDALVTITGGFRRGKPMGHDVDFLITNPGPKEDDELLHKVVDLLKKQGLLLYEDIKESTFVEGQLPSRKIDAMDNFQKCFAILKLYQPGVDNSAVGTSKKSDMAEVKDWKAIRVDLVITPFEQYAYALLGWTGSKEFRRDLRRYAEEERGMILDNHALYDLKKRIFLKAGSEEEIFAHLGLDYVEPWERNA

SEQ ID NO: 2263 - DNA, 1182 bp, synthetic construct
  misc_feature 1..1182: note = Variant of terminal deoxynucleotidyl transferase
  source 1..1182: mol_type = other DNA
atgcatcaccaccatcatcatgggggttctggtcatccgccgagcaataccccggagggggaggtgccgagcgttatcgcccgtccggttagtcagtacagctgccagcgcaagaccacgctgaataactacaacaaaaagtttaccgacgcgctggagatcatggccgagaactacaaatttaaagagaacctgatcgcgtgtctggaagccaagcgcgccgcgagtattctgaaatatctgccgttcgaggttaccagcatgaaagacatccaaggtctgccgtgcattaccgaccaagttcgtgacgtgatcgaggagatcatcgaagagggcgagagcagccgtgttaaagaagttctcaatgacgagcgctacaaggcctttaagcagttcaccagcgtgttcggtgtgggcgtgaaaaccgcggaaaagtggtttcgtatgggcctccgtacggttgaagaagcaaaggccagtaagagtctgaagctgagcaagatgcagaaggcgggcaggctgtattacgaggatctggcgagccgcgttagtaaagaagaagccgatgccgttacgctcatcgtgaagaacacggtgcgtacctttctgccggatgcgctggtgaccatcaccggcggtttccgccgtggcaaacctatgggccacgacgttgactttctgatcacgaatccgggcccgaaagaggatgacgagctgctccacaaagtggttgatctgctcaagaagcaaggtctgctgctgtacgaagacatcaaagagagcacgttcgtggaggggcaactgccaagtcgcaaaatcgacgccatggacaacttccagaagtgcttcgccattctcaagctgtaccagccgggcgtggataacagtgcggttgggacgagtaagaaaagtgacatggccgaggttaaggattggaaagcgattcgtgtggatctggtgatcacgccattcgagcagtacgcctatgcgctgctcggttggacgggcagcaaagaatttcgtcgcgatctgcgccgctatgcggaggaagagcgcggcatgatcctcgacaaccatgccctctacgacctgaaaaagcgcatctttctgaaagcgggcagcgaagaagagattttcgcgcatctgggtctggattatgtggagccgtgggaacgcaacgcg

SEQ ID NO: 2264 - protein, 394 aa, synthetic construct
  REGION 1..394: note = Variant of terminal deoxynucleotidyl transferase
MHHHHHHGGSGHPPSNTPEGEVPSVIARPVSQYSCQRKTTLNNYNKKFTDALEIMAENYKFKENLIACLEAKRAASILKYLPFEVTSMKDIQGLPCITDQVRDVIEEIIEEGESSRVKEVLNDERYKAFKQFTSVFGVGVKTAEKWFRMGLRTVEEAKASKSLKLSKMQKAGRLYYEDLASRVSKEEADAVTLIVKNTVRTFLPDALVTITGGFRRGKPMGHDVDFLITNPGPKEDDELLHKVVDLLKKQGLLLYEDIKESTFVEGQLPSRKIDAMDNFQKCFAILKLYQPGVDNSAVGTSKKSDMAEVKDWKAIRVDLVITPFEQYAYALLGWTGSKEFRRDLRRYAEEERGMILDNHALYDLKKRIFLKAGSEEEIFAHLGLDYVEPWERNA

SEQ ID NO: 2265 - DNA, 1182 bp, synthetic construct
  misc_feature 1..1182: note = Variant of terminal deoxynucleotidyl transferase
  source 1..1182: mol_type = other DNA
atgcatcaccaccatcatcatgggggttctggtcatccgccgagcaataccccggagggggaggtgccgagcgttatcgcccgtccggttagtcagtacagctgccagcgcaagaccacgctgaataactacaacaaaaagtttaccgacgcgctggagatcatggccgagaactacaaatttaaagagaacctgatcgcgtgtctggaagccaagcgcgccgcgagtattctgaaatatctgccgttcgaggttaccagcatgaaagacatccaaggtctgccgtgcattaccgaccaagttcgtgacgtgatcgaggagatcatcgaagagggcgagagcagccgtgttaaagaagttctcaatgacgagcgctacaaggcctttaagcagttcaccagcgtgttcggtgtgggcgtgaaaaccgcggaaaagtggtttcgtatgggcctccgtacggttgaagaagcaaaggccagtaagagtctgaagctgagcaagatgcagaaggcgggctttctgtattacgaggatctggcgagccgcgttagtaaagaagaagccgatgccgttacgctcatcgtgaagaacacggtgcgtacctttctgccggatgcgctggtgaccatcaccggcggtttccgccgtggcaaacctatgggccacgacgttgactttctgatcacgaatccgggcccgaaagaggatgacgagctgctccacaaagtggttgatctgctcaagaagcaaggtctgctgctgtacgaagacatcaaagagagcacgttcgtggaggggcaactgccaagtcgcaaaatcgacgccatggacaacttccagaagtgcttcgccattctcaagctgtaccagccgggcggggataacagtgcggttgggacgagtaagaaaagtgacatggccgaggttaaggattggaaagcgattcgtgtggatctggtgatcacgccattcgagcagtacgcctatgcgctgctcggttggacgggcagcaaagaatttcgtcgcgatctgcgccgctatgcggaggaagagcgcggcatgatcctcgacaaccatgccctctacgacctgaaaaagcgcatctttctgaaagcgggcagcgaagaagagattttcgcgcatctgggtctggattatgtggagccgtgggaacgcaacgcg

SEQ ID NO: 2266 - protein, 394 aa, synthetic construct
  REGION 1..394: note = Variant of terminal deoxynucleotidyl transferase
MHHHHHHGGSGHPPSNTPEGEVPSVIARPVSQYSCQRKTTLNNYNKKFTDALEIMAENYKFKENLIACLEAKRAASILKYLPFEVTSMKDIQGLPCITDQVRDVIEEIIEEGESSRVKEVLNDERYKAFKQFTSVFGVGVKTAEKWFRMGLRTVEEAKASKSLKLSKMQKAGFLYYEDLASRVSKEEADAVTLIVKNTVRTFLPDALVTITGGFRRGKPMGHDVDFLITNPGPKEDDELLHKVVDLLKKQGLLLYEDIKESTFVEGQLPSRKIDAMDNFQKCFAILKLYQPGGDNSAVGTSKKSDMAEVKDWKAIRVDLVITPFEQYAYALLGWTGSKEFRRDLRRYAEEERGMILDNHALYDLKKRIFLKAGSEEEIFAHLGLDYVEPWERNA

SEQ ID NO: 2267 - DNA, 1182 bp, synthetic construct
  misc_feature 1..1182: note = Variant of terminal deoxynucleotidyl transferase
  source 1..1182: mol_type = other DNA
atgcatcaccaccatcatcatgggggttctggtcatccgccgagcaataccccggagggggaggtgccgagcgttatcgcccgtccggttagtcagtacagctgccagcgcaagaccacgctgaataactacaacaaaaagtttaccgacgcgctggagatcatggccgagaactacaaatttaaagagaacctgatcgcgtgtctggaagccaagcgcgccgcgagtattctgaaatatctgccgttcgaggttaccagcatgaaagacatccaaggtctgccgtgcattaccgaccaagttcgtgacgtgatcgaggagatcatcgaagagggcgagagcagccgtgttaaagaagttctcaatgacgagcgctacaaggcctttaagcagttcaccagcgtgttcggtgtgggcgtgaaaaccgcggaaaagtggtttcgtatgggcctccgtacggttgaagaagcaaaggccagtaagagtctgaagctgagcaagatgcagaaggcgggctttctgtattacgaggatctggcgagccgcgttagtaaagaagaagccgatgccgttacgctcatcgtgaagaacacggtgcgtacctttctgccggatgcgctggtgaccatcaccggcggtttccgccgtggcaaacctatgggccacgacgttgactttctgatcacgaatccgggcccgaaagaggatgacgagctgctccacaaagtggttgatctgctcaagaagcaaggtctgctgctgtacgaagacatcaaagagagcacgttcgtggaggggcaactgccaagtcgcaaaatcgacgccatggacaacttccagaagtgcttcgccattctcaagctgtaccagccgggcgtggataacagtgcggttgggacgagtaagaaaagtgacccggccgaggttaaggattggaaagcgattcgtgtggatctggtgatcacgccattcgagcagtacgcctatgcgctgctcggttggacgggcagcaaagaatttcgtcgcgatctgcgccgctatgcggaggaagagcgcggcatgatcctcgacaaccatgccctctacgacctgaaaaagcgcatctttctgaaagcgggcagcgaagaagagattttcgcgcatctgggtctggattatgtggagccgtgggaacgcaacgcg

SEQ ID NO: 2268 - protein, 394 aa, synthetic construct
  REGION 1..394: note = Variant of terminal deoxynucleotidyl transferase
MHHHHHHGGSGHPPSNTPEGEVPSVIARPVSQYSCQRKTTLNNYNKKFTDALEIMAENYKFKENLIACLEAKRAASILKYLPFEVTSMKDIQGLPCITDQVRDVIEEIIEEGESSRVKEVLNDERYKAFKQFTSVFGVGVKTAEKWFRMGLRTVEEAKASKSLKLSKMQKAGFLYYEDLASRVSKEEADAVTLIVKNTVRTFLPDALVTITGGFRRGKPMGHDVDFLITNPGPKEDDELLHKVVDLLKKQGLLLYEDIKESTFVEGQLPSRKIDAMDNFQKCFAILKLYQPGVDNSAVGTSKKSDPAEVKDWKAIRVDLVITPFEQYAYALLGWTGSKEFRRDLRRYAEEERGMILDNHALYDLKKRIFLKAGSEEEIFAHLGLDYVEPWERNA

SEQ ID NO: 2269 - DNA, 1182 bp, synthetic construct
  misc_feature 1..1182: note = Variant of terminal deoxynucleotidyl transferase
  source 1..1182: mol_type = other DNA
atgcatcaccaccatcatcatgggggttctggtcatccgccgagcaataccccggagggggaggtaccgagcgttatcgcccgtccggttagtcagtacagctgccagcgcaagaccacgctgaataactacaacaaaaagtttaccgacgcgctggagatcatggccgagaactacaaatttaaagagaacctgatcgcgtgtctggaagccaagcgcgccgcgagtattctgaaatatctgccgttcgaggttaccagcatgaaagacatccaaggtctgccgtgcattaccgaccaagttcgtgacgtgatcgaggagatcatcgaagagggcgagagcagccgtgttaaagaagttctcaatgacgagcgctacaaggcctttaagcagttcaccagcgtgttcggtgtgggcgtgaaaaccgcggaaaagtggtttcgtatgggcctccgtacggttgaagaagcaaaggccagtaagagtctgaagctgagcaagatgcagaaggcgggctttctgtattacgaggatctggcgagccgcgttagtaaagaagaagccgatgccgttacgctcatcgtgaagaacacggtgcgtacctttctgccggatgcgctggtgaccatcaccggcggtttccgccgtggcaaacctatgggccacgacgttgactttctgatcacgaatccgggcccgaaagaggatgacgagctgctccacaaagtggttgatctgctcaagaagcaaggtctgctgctgtacgaagacatcaaagagagcacgttcgtggaggggcaactgccaagtcgcaaaatcgacgccatggacaacttccagaagtgcttcgccattctcaagctgtaccagccgggcgtggataacagtgcggttgggacgagtaagaaaagtgacatggccgaggttaaggattggaaagcgattcgtgtggatctggtgatcacgccattcgagcagtacgcctatgcgctgctcggttggacgggcagcaaagaatttcgtcgcgatctgcgccgctatgcggaggaagaggctggcatgatcctcgacaaccatgccctctacgacctgaaaaagcgcatctttctgaaagcgggcagcgaagaagagattttcgcgcatctgggtctggattatgtggagccgtgggaacgcaacgcg

SEQ ID NO: 2270 - protein, 394 aa, synthetic construct
  REGION 1..394: note = Variant of terminal deoxynucleotidyl transferase
MHHHHHHGGSGHPPSNTPEGEVPSVIARPVSQYSCQRKTTLNNYNKKFTDALEIMAENYKFKENLIACLEAKRAASILKYLPFEVTSMKDIQGLPCITDQVRDVIEEIIEEGESSRVKEVLNDERYKAFKQFTSVFGVGVKTAEKWFRMGLRTVEEAKASKSLKLSKMQKAGFLYYEDLASRVSKEEADAVTLIVKNTVRTFLPDALVTITGGFRRGKPMGHDVDFLITNPGPKEDDELLHKVVDLLKKQGLLLYEDIKESTFVEGQLPSRKIDAMDNFQKCFAILKLYQPGVDNSAVGTSKKSDMAEVKDWKAIRVDLVITPFEQYAYALLGWTGSKEFRRDLRRYAEEEAGMILDNHALYDLKKRIFLKAGSEEEIFAHLGLDYVEPWERNA

SEQ ID NO: 2271 - DNA, 1182 bp, synthetic construct
  misc_feature 1..1182: note = Variant of terminal deoxynucleotidyl transferase
  source 1..1182: mol_type = other DNA
atgcatcaccaccatcatcatgggggttctggtcatccgccgagcaataccccggagggggaggtgccgagcgttatcgcccgtccggttagtcagtacagctgccagcgcaagaccacgctgaataactacaacaaaaagtttaccgacgcgctggagatcatggccgagaactacaaatttaaagagaacctgatcgcgtgtctggaagccaagcgcgccgcgagtattctgaaatatctgccgttcgaggttaccagcatgaaagacatccaaggtctgccgtgcattaccgaccaagttcgtgacgtgatcgaggagatcatcgaagagggcgagagcagccgtgttaaagaagttctcaatgacgagcgctacaaggcctttaagcagttcaccagcgtgttcggtgtgggcgtgaaaaccgcggaagtgtggtttcgtatgggcctccgtacggttgaagaagcaaaggccagtaagagtctgaagctgagcaagatgcagaaggcgggctttctgtattacgaggatctggcgagccgcgttagtaaagaagaagccgatgccgttacgctcatcgtgaagaacacggtgcgtacctttctgccggatgcgctggtgaccatcaccggcggtttccgccgtggcaaacctatgggccacgacgttgactttctgatcacgaatccgggcccgaaagaggatgacgagctgctccacaaagtggttgatctgctcaagaagcaaggtctgctgctgtacgaagacatcaaagagagcacgttcgtggaggggcaactgccaagtcgcaaaatcgacgccatggacaacttccagaagtgcttcgccattctcaagctgtaccagccgggcgtggataacagtgcggttgggacgagtaagaaaagtgacatggccgaggttaaggattggaaagcgattcgtgtggatctggtgatcacgccattcgagcagtacgcctatgcgctgctcggttggacgggcagcaaagaatttcgtcgcgatctgcgccgctatgcggaggaagagcgcggcatgatcctcgacaaccatgccctctacgacctgaaaaagcgcatctttctgaaagcgggcagcgaagaagagattttcgcgcatctgggtctggattatgtggagccgtgggaacgcaacgcg

SEQ ID NO: 2272 - protein, 394 aa, synthetic construct
  REGION 1..394: note = Variant of terminal deoxynucleotidyl transferase
MHHHHHHGGSGHPPSNTPEGEVPSVIARPVSQYSCQRKTTLNNYNKKFTDALEIMAENYKFKENLIACLEAKRAASILKYLPFEVTSMKDIQGLPCITDQVRDVIEEIIEEGESSRVKEVLNDERYKAFKQFTSVFGVGVKTAEVWFRMGLRTVEEAKASKSLKLSKMQKAGFLYYEDLASRVSKEEADAVTLIVKNTVRTFLPDALVTITGGFRRGKPMGHDVDFLITNPGPKEDDELLHKVVDLLKKQGLLLYEDIKESTFVEGQLPSRKIDAMDNFQKCFAILKLYQPGVDNSAVGTSKKSDMAEVKDWKAIRVDLVITPFEQYAYALLGWTGSKEFRRDLRRYAEEERGMILDNHALYDLKKRIFLKAGSEEEIFAHLGLDYVEPWERNA

SEQ ID NO: 2273 - DNA, 1182 bp, synthetic construct
  misc_feature 1..1182: note = Variant of terminal deoxynucleotidyl transferase
  source 1..1182: mol_type = other DNA
atgcatcaccaccatcatcatgggggttctggtcatccgccgagcaataccccggagggggaggtgccgagcgttatcgcccgtccggttagtcagtacagctgccagcgcaagaccacgctgaataactacaacaaaaagtttaccgacgcgctggagatcatggccgagaactacaaatttaaagagaacctgatcgcgtgtctggaagccaagcgcgccgcgagtattctgaaatatctgccgttcgaggttaccagcatgaaagacatccaaggtctgccggcgattaccgaccaagttcgtgacgtgatcgaggagatcatcgaagagggcgagagcagccgtgttaaagaagttctcaatgacgagcgctacaaggcctttaagcagttcaccagcgtgttcggtgtgggcgtgaaaaccgcggaaaagtggtttcgtatgggcctccgtacggttgaagaagcaaaggccagtaagagtctgaagctgagcaagatgcagaaggcgggctttctgtattacgaggatctggcgagccgcgttagtaaagaagaagccgatgccgttacgctcatcgtgaagaacacggtgcgtacctttctgccggatgcgctggtgaccatcaccggcggtttccgccgtggcaaacctatgggccacgacgttgactttctgatcacgaatccgggcccgaaagaggatgacgagctgctccacaaagtggttgatctgctcaagaagcaaggtctgctgctgtacgaagacatcaaagagagcacgttcgtggaggggcaactgccaagtcgcaaaatcgacgccatggacaacttccagaagtgcttcgccattctcaagctgtaccagccgggcgtggataacagtgcggttgggacgagtaagaaaagtgacatggccgaggttaaggattggaaagcgattcgtgtggatctggtgatcacgccattcgagcagtacgcctatgcgctgctcggttggacgggcagcaaagaatttcgtcgcgatctgcgccgctatgcggaggaagagcgcggcatgatcctcgacaaccatgccctctacgacctgaaaaagcgcatctttctgaaagcgggcagcgaagaagagattttcgcgcatctgggtctggattatgtggagccgtgggaacgcaacgcg

SEQ ID NO: 2274 - protein, 394 aa, synthetic construct
  REGION 1..394: note = Variant of terminal deoxynucleotidyl transferase
MHHHHHHGGSGHPPSNTPEGEVPSVIARPVSQYSCQRKTTLNNYNKKFTDALEIMAENYKFKENLIACLEAKRAASILKYLPFEVTSMKDIQGLPAITDQVRDVIEEIIEEGESSRVKEVLNDERYKAFKQFTSVFGVGVKTAEKWFRMGLRTVEEAKASKSLKLSKMQKAGFLYYEDLASRVSKEEADAVTLIVKNTVRTFLPDALVTITGGFRRGKPMGHDVDFLITNPGPKEDDELLHKVVDLLKKQGLLLYEDIKESTFVEGQLPSRKIDAMDNFQKCFAILKLYQPGVDNSAVGTSKKSDMAEVKDWKAIRVDLVITPFEQYAYALLGWTGSKEFRRDLRRYAEEERGMILDNHALYDLKKRIFLKAGSEEEIFAHLGLDYVEPWERNA

SEQ ID NO: 2275 - DNA, 1182 bp, synthetic construct
  misc_feature 1..1182: note = Variant of terminal deoxynucleotidyl transferase
  source 1..1182: mol_type = other DNA
atgcatcaccaccatcatcatgggggttctggtcatccgccgagcaataccccggagggggaggtgccgagcgttatcgcccgtccggttagtcagtacagctgccagcgcaagaccacgctgaataactacaacaaaaagtttaccgacgcgctggagatcatggccgagaactacaaatttaaagagaacctgatcgcgtgtctggaagccaagcgcgccgcgagtattctgaaatatctgccgttcgaggttaccagcatgaaagacatccaaggtctgccgtgcattaccgaccaagttcgtgacgtgatcgaggagatcatcgaagagggcgagagcagccgtgttaaagaagttctcaatgacgagcgctacaaggcctttaagcagttcaccagcgtgttcggtgtgggcgtgaaaaccgcggaaaagtggtttcgtatgggcctccgtacggttgaagaagcaaaggccagtaagagtctgaagctgagcaagatgcagaaggcgggctttctgtattacgaggatctggcgagccgcgttagtaaagaagaagccgatgccgttacgctcatcgtgaagaacacggtgcgtacctttctgccggatgcgctggtgaccatcaccggcggtttccgccgtggcaaacctatgggccacgacgttgactttctgatcacgaatccgggcccgaaaagggatgacgagctgctccacaaagtggttgatctgctcaagaagcaaggtctgctgctgtacgaagacatcaaagagagcacgttcgtggaggggcaactgccaagtcgcaaaatcgacgccatggacaacttccagaagtgcttcgccattctcaagctgtaccagccgggcgtggataacagtgcggttgggacgagtaagaaaagtgacatggccgaggttaaggattggaaagcgattcgtgtggatctggtgatcacgccattcgagcagtacgcctatgcgctgctcggttggacgggcagcaaagaatttcgtcgcgatctgcgccgctatgcggaggaagagcgcggcatgatcctcgacaaccatgccctctacgacctgaaaaagcgcatctttctgaaagcgggcagcgaagaagagattttcgcgcatctgggtctggattatgtggagccgtgggaacgcaacgcg

SEQ ID NO: 2276 - protein, 394 aa, synthetic construct
  REGION 1..394: note = Variant of terminal deoxynucleotidyl transferase
MHHHHHHGGSGHPPSNTPEGEVPSVIARPVSQYSCQRKTTLNNYNKKFTDALEIMAENYKFKENLIACLEAKRAASILKYLPFEVTSMKDIQGLPCITDQVRDVIEEIIEEGESSRVKEVLNDERYKAFKQFTSVFGVGVKTAEKWFRMGLRTVEEAKASKSLKLSKMQKAGFLYYEDLASRVSKEEADAVTLIVKNTVRTFLPDALVTITGGFRRGKPMGHDVDFLITNPGPKRDDELLHKVVDLLKKQGLLLYEDIKESTFVEGQLPSRKIDAMDNFQKCFAILKLYQPGVDNSAVGTSKKSDMAEVKDWKAIRVDLVITPFEQYAYALLGWTGSKEFRRDLRRYAEEERGMILDNHALYDLKKRIFLKAGSEEEIFAHLGLDYVEPWERNA

SEQ ID NO: 2277 - DNA, 1182 bp, synthetic construct
  misc_feature 1..1182: note = Variant of terminal deoxynucleotidyl transferase
  source 1..1182: mol_type = other DNA
atgcatcaccaccatcatcatgggggttctggtcatccgccgagcaataccccggagctggaggtgccgagcgttatcgcccgtccggttagtcagtacagctgccagcgcaagaccacgctgaataactacaacaaaaagtttaccgacgcgctggagatcatggccgagaactacaaatttaaagagaacctgatcgcgtgtctggaagccaagcgcgccgcgagtattctgaaatatctgccgttcgaggttaccagcatgaaagacatccaaggtctgccgtgcattaccgaccaagttcgtgacgtgatcgaggagatcatcgaagagggcgagagcagccgtgttaaagaagttctcaatgacgagcgctacaaggcctttaagcagttcaccagcgtgttcggtgtgggcgtgaaaaccgcggaaaagtggtttcgtatgggcctccgtacggttgaagaagcaaaggccagtaagagtctgaagctgagcaagatgcagaaggcgggctttctgtattacgaggatctggcgagccgcgttagtaaagaagaagccgatgccgttacgctcatcgtgaagaacacggtgcgtacctttctgccggatgcgctggtgaccatcaccggcggtttccgccgtggcaaacctatgggccacgacgttgactttctgatcacgaatccgggcccgaaagaggatgacgagctgctccacaaagtggttgatctgctcaagaagcaaggtctgctgctgtacgaagacatcaaagagagcacgttcgtggaggggcaactgccaagtcgcaaaatcgacgccatggacaacttccagaagtgcttcgccattctcaagctgtaccagccgggcgtggataacagtgcggttgggacgagtaagaaaagtgacatggccgaggttaaggattggaaagcgattcgtgtggatctggtgatcacgccattcgagcagtacgcctatgcgctgctcggttggacgggcagcaaagaatttcgtcgcgatctgcgccgctatgcggaggaagagcgcggcatgatcctcgacaaccatgccctctacgacctgaaaaagcgcatctttctgaaagcgggcagcgaagaagagattttcgcgcatctgggtctggattatgtggagccgtgggaacgcaacgcg

SEQ ID NO: 2278 - protein, 394 aa, synthetic construct
  REGION 1..394: note = Variant of terminal deoxynucleotidyl transferase
MHHHHHHGGSGHPPSNTPELEVPSVIARPVSQYSCQRKTTLNNYNKKFTDALEIMAENYKFKENLIACLEAKRAASILKYLPFEVTSMKDIQGLPCITDQVRDVIEEIIEEGESSRVKEVLNDERYKAFKQFTSVFGVGVKTAEKWFRMGLRTVEEAKASKSLKLSKMQKAGFLYYEDLASRVSKEEADAVTLIVKNTVRTFLPDALVTITGGFRRGKPMGHDVDFLITNPGPKEDDELLHKVVDLLKKQGLLLYEDIKESTFVEGQLPSRKIDAMDNFQKCFAILKLYQPGVDNSAVGTSKKSDMAEVKDWKAIRVDLVITPFEQYAYALLGWTGSKEFRRDLRRYAEEERGMILDNHALYDLKKRIFLKAGSEEEIFAHLGLDYVEPWERNA

SEQ ID NO: 2279 - DNA, 1182 bp, synthetic construct
  misc_feature 1..1182: note = Variant of terminal deoxynucleotidyl transferase
  source 1..1182: mol_type = other DNA
atgcatcaccaccatcatcatgggggttctggtcatccgccgagcaataccccggagggggaggtgccgagcgttatcgcccgtccggttagtcagtacagctgccagcgcaagaccacgctgaataactacaacaaaaagtttaccgacgcgctggagatcatggccgagaactacaaatttaaagagaacctgatcgcgtgtctggaagccaagcgcgccgcgagtattctgaaatatctgccgttcgaggttaccagcatgaaagacatccaaggtctgccgtgcattaccgaccaagttcgtgacgtgatcgaggagatcatcgaagagggcgagagcagccgtgttaaagaagttctcaatgacgagcgctacaaggcctttaagcagttcaccagcgtgttcggtgtgggcgtgaaaaccgcggaaaagtggtttcgtatgggcctccgtacggttgaagaagcaaaggccagtaagagtctgaagctgagcaagatgcagaaggcgggctttctgtattacgaggatctggcgagccgcgttagtaaagaagaagccgatgccgttacgctcatcgtgaagaacacggtgcgtacctttctgccggatgcgctggtgaccatcaccggcggtttccgccgtggcaaacctatgggccacgacgttgactttctgatcacgaatccgggcccgaaagaggatgacgagctgctccacaaagtggttgatctgctcaagaagcaaggtctgctgctgtacgaagacatcaaagagagcacgttcgtggaggggcaactgccaagtcgcaaaatcgacgccatggacaacttccagaagtgcttcgccattctcaagaggtaccagccgggcgtggataacagtgcggttgggacgagtaagaaaagtgacatggccgaggttaaggattggaaagcgattcgtgtggatctggtgatcacgccattcgagcagtacgcctatgcgctgctcggttggacgggcagcaaagaatttcgtcgcgatctgcgccgctatgcggaggaagagcgcggcatgatcctcgacaaccatgccctctacgacctgaaaaagcgcatctttctgaaagcgggcagcgaagaagagattttcgcgcatctgggtctggattatgtggagccgtgggaacgcaacgcg

SEQ ID NO: 2280 - protein, 394 aa, synthetic construct
  REGION 1..394: note = Variant of terminal deoxynucleotidyl transferase
MHHHHHHGGSGHPPSNTPEGEVPSVIARPVSQYSCQRKTTLNNYNKKFTDALEIMAENYKFKENLIACLEAKRAASILKYLPFEVTSMKDIQGLPCITDQVRDVIEEIIEEGESSRVKEVLNDERYKAFKQFTSVFGVGVKTAEKWFRMGLRTVEEAKASKSLKLSKMQKAGFLYYEDLASRVSKEEADAVTLIVKNTVRTFLPDALVTITGGFRRGKPMGHDVDFLITNPGPKEDDELLHKVVDLLKKQGLLLYEDIKESTFVEGQLPSRKIDAMDNFQKCFAILKRYQPGVDNSAVGTSKKSDMAEVKDWKAIRVDLVITPFEQYAYALLGWTGSKEFRRDLRRYAEEERGMILDNHALYDLKKRIFLKAGSEEEIFAHLGLDYVEPWERNA

SEQ ID NO: 2281 - DNA, 1182 bp, synthetic construct
  misc_feature 1..1182: note = Variant of terminal deoxynucleotidyl transferase
  source 1..1182: mol_type = other DNA
atgcatcaccaccatcatcatgggggttctggtcatccgccgagcaataccccggagggggaggtgccgagcgttatcgcccgtccggttagtcagtacagctgccagcgcaagaccacgctgaataactacaacaaaaagtttaccgacgcgctggagatcatggccgagaactacaaatttaaagagaacctgatcgcgtgtctggaagccaagcgcgccgcgagtattctgaaatatctgccgttcgaggttaccagcatgaaagacatccaaggtctgccgtgcattaccgaccaagttcgtgacgtgatcgaggagatcatcgaagagggcgagagcagccgtgttaaagaagttctcaatgacgagcgctacaaggcctttaagcagttcaccagcgtgttcggtgtgggcgtgaaaaccgcggaaaagtggtttcgtatgggcctccgtacggttgaagaagcaaaggccagtaagagtctgaagctgagcaagatgcagaaggcgggctttctgtattacgaggatctggcgagccgcgttagtaaagaagaagccgatgccgttacgctcatcgtgaagaacacggtgcgtacctttctgccggatgcgctggtgaccatcaccggcggtttccgccgtggcaaacctatgggccacgacgttgactttctgatcacgaatccgggcccgaaagaggatgacgagctgctccacaaagtggttgatctgctcaagaagcaaggtctgctgctgtacgaagacatcaaagagagcacgttcgtggaggggcaactgccaagtcgcaaaatcgacgccatggacaacttccagaagtgcttcgccattctcaagctgtaccagccgggcgtggataacagtgcggttgggacgagtaagaaaagtgacatggccgaggttaaggattggaaagcgattcgtgtggatctggtgatcacgccattcgagtgttacgcctatgcgctgctcggttggacgggcagcaaagaatttcgtcgcgatctgcgccgctatgcggaggaagagcgcggcatgatcctcgacaaccatgccctctacgacctgaaaaagcgcatctttctgaaagcgggcagcgaagaagagattttcgcgcatctgggtctggattatgtggagccgtgggaacgcaacgcg

SEQ ID NO: 2282 - protein, 394 aa, synthetic construct
  REGION 1..394: note = Variant of terminal deoxynucleotidyl transferase
MHHHHHHGGSGHPPSNTPEGEVPSVIARPVSQYSCQRKTTLNNYNKKFTDALEIMAENYKFKENLIACLEAKRAASILKYLPFEVTSMKDIQGLPCITDQVRDVIEEIIEEGESSRVKEVLNDERYKAFKQFTSVFGVGVKTAEKWFRMGLRTVEEAKASKSLKLSKMQKAGFLYYEDLASRVSKEEADAVTLIVKNTVRTFLPDALVTITGGFRRGKPMGHDVDFLITNPGPKEDDELLHKVVDLLKKQGLLLYEDIKESTFVEGQLPSRKIDAMDNFQKCFAILKLYQPGVDNSAVGTSKKSDMAEVKDWKAIRVDLVITPFECYAYALLGWTGSKEFRRDLRRYAEEERGMILDNHALYDLKKRIFLKAGSEEEIFAHLGLDYVEPWERNA

SEQ ID NO: 2283 - DNA, 1182 bp, synthetic construct
  misc_feature 1..1182: note = Variant of terminal deoxynucleotidyl transferase
  source 1..1182: mol_type = other DNA
atgcatcaccaccatcatcatgggggttctggtcatccgccgagcaataccccggagggggaggtgccgagcgttatcgcccgtccggttagtcagtacagctgccagcgcaagaccacgctgaataactacaacaaaaagtttaccgacgcgctggagatcatggccgagaactacaaatttaaagagaacctgatcgcgtgtctggaagccaagcgcgccgcgagtattctgaaatatctgccgttcgaggttaccagcatgaaagacatccaaggtctgccgtgcattaccgaccaagttcgtgacgtgatcgaggagatcatcgaagagggcgagagcagcctggttaaagaagttctcaatgacgagcgctacaaggcctttaagcagttcaccagcgtgttcggtgtgggcgtgaaaaccgcggaaaagtggtttcgtatgggcctccgtacggttgaagaagcaaaggccagtaagagtctgaagctgagcaagatgcagaaggcgggctttctgtattacgaggatctggcgagccgcgttagtaaagaagaagccgatgccgttacgctcatcgtgaagaacacggtgcgtacctttctgccggatgcgctggtgaccatcaccggcggtttccgccgtggcaaacctatgggccacgacgttgactttctgatcacgaatccgggcccgaaagaggatgacgagctgctccacaaagtggttgatctgctcaagaagcaaggtctgctgctgtacgaagacatcaaagagagcacgttcgtggaggggcaactgccaagtcgcaaaatcgacgccatggacaacttccagaagtgcttcgccattctcaagctgtaccagccgggcgtggataacagtgcggttgggacgagtaagaaaagtgacatggccgaggttaaggattggaaagcgattcgtgtggatctggtgatcacgccattcgagcagtacgcctatgcgctgctcggttggacgggcagcaaagaatttcgtcgcgatctgcgccgctatgcggaggaagagcgcggcatgatcctcgacaaccatgccctctacgacctgaaaaagcgcatctttctgaaagcgggcagcgaagaagagattttcgcgcatctgggtctggattatgtggagccgtgggaacgcaacgcg

SEQ ID NO: 2284 - protein, 394 aa, synthetic construct
  REGION 1..394: note = Variant of terminal deoxynucleotidyl transferase
MHHHHHHGGSGHPPSNTPEGEVPSVIARPVSQYSCQRKTTLNNYNKKFTDALEIMAENYKFKENLIACLEAKRAASILKYLPFEVTSMKDIQGLPCITDQVRDVIEEIIEEGESSLVKEVLNDERYKAFKQFTSVFGVGVKTAEKWFRMGLRTVEEAKASKSLKLSKMQKAGFLYYEDLASRVSKEEADAVTLIVKNTVRTFLPDALVTITGGFRRGKPMGHDVDFLITNPGPKEDDELLHKVVDLLKKQGLLLYEDIKESTFVEGQLPSRKIDAMDNFQKCFAILKLYQPGVDNSAVGTSKKSDMAEVKDWKAIRVDLVITPFEQYAYALLGWTGSKEFRRDLRRYAEEERGMILDNHALYDLKKRIFLKAGSEEEIFAHLGLDYVEPWERNA

SEQ ID NO: 2285 - DNA, 1182 bp, synthetic construct
  misc_feature 1..1182: note = Variant of terminal deoxynucleotidyl transferase
  source 1..1182: mol_type = other DNA
atgcatcaccaccatcatcatgggggttctggtcatccgccgagcaataccccggagggggaggtgccgagcgttatcgcccgtccggttagtcagtacagctgccagcgcaagaccacgctgaataactacaacaaaaagtttaccgacgcgctggagatcatggccgagaactacaaatttaaagagaacctgatcgcgtgtctggaagccaagcgcgccgcgagtattctgaaatatctgccgttcgaggttaccagcatgaaagacatccaaggtctgccgtgcattaccgaccaagttcgtgacgtgatcgaggagatcatcgaagagggcgagagcagccgtgttaaagaagttctcaatgacgagcgctacaaggcctttaagcagttcaccagcgtgttcggtgtgggcgtgaaaaccgcggaaaagtggtttcgtatgggcctccgtacggttgaagaagcaaaggccagtaagagtctgaagctgagcaagatgcagaaggcgggctttctgtattacgaggatctggcgagccgcgttagtaaagaagaagccgatgccgttacgctcatcgtgaagaacacggtgcgtacctttgtgccggatgcgctggtgaccatcaccggcggtttccgccgtggcaaacctatgggccacgacgttgactttctgatcacgaatccgggcccgaaagaggatgacgagctgctccacaaagtggttgatctgctcaagaagcaaggtctgctgctgtacgaagacatcaaagagagcacgttcgtggaggggcaactgccaagtcgcaaaatcgacgccatggacaacttccagaagtgcttcgccattctcaagctgtaccagccgggcgtggataacagtgcggttgggacgagtaagaaaagtgacatggccgaggttaaggattggaaagcgattcgtgtggatctggtgatcacgccattcgagcagtacgcctatgcgctgctcggttggacgggcagcaaagaatttcgtcgcgatctgcgccgctatgcggaggaagagcgcggcatgatcctcgacaaccatgccctctacgacctgaaaaagcgcatctttctgaaagcgggcagcgaagaagagattttcgcgcatctgggtctggattatgtggagccgtgggaacgcaacgcg

SEQ ID NO: 2286 - protein, 394 aa, synthetic construct
  REGION 1..394: note = Variant of terminal deoxynucleotidyl transferase
MHHHHHHGGSGHPPSNTPEGEVPSVIARPVSQYSCQRKTTLNNYNKKFTDALEIMAENYKFKENLIACLEAKRAASILKYLPFEVTSMKDIQGLPCITDQVRDVIEEIIEEGESSRVKEVLNDERYKAFKQFTSVFGVGVKTAEKWFRMGLRTVEEAKASKSLKLSKMQKAGFLYYEDLASRVSKEEADAVTLIVKNTVRTFVPDALVTITGGFRRGKPMGHDVDFLITNPGPKEDDELLHKVVDLLKKQGLLLYEDIKESTFVEGQLPSRKIDAMDNFQKCFAILKLYQPGVDNSAVGTSKKSDMAEVKDWKAIRVDLVITPFEQYAYALLGWTGSKEFRRDLRRYAEEERGMILDNHALYDLKKRIFLKAGSEEEIFAHLGLDYVEPWERNA

SEQ ID NO: 2287 - DNA, 1182 bp, synthetic construct
  misc_feature 1..1182: note = Variant of terminal deoxynucleotidyl transferase
  source 1..1182: mol_type = other DNA
atgcatcaccaccatcatcatgggggttctggtcatccgccgagcaataccccggagggggaggtgccgagcgttatcgcccgtccggttagtcagtacagctgccagcgcaagaccacgctgaataactacaacaaaaagtttaccgacgcgctggagatcatggccgagaactacaaatttaaagagaacctgatcgcgtgtctggaagccaagcgcgccgcgagtattctgaaatatctgccgttcgaggttaccagcatgaaagacatccaaggtctgccgtgcattaccgaccaagttcgtgacgtgatcgaggagatcatcgaagagggcgagagcagccgtgttaaagaagttctcaatgacgagcgctacaaggcctttaagcagttcaccagcgtgttcggtgtgggcgtgaaaaccgcggaaaagtggtttcgtatgggcctccgtacggttgaagaagcaaaggccagtaagagtctgaagctgagcaagatgcagaaggcgggctttctgtattacgaggatctggcgagccgcgttagtaaagaagaagccgatgccgttacgctcatcgtgaagaacacggtgcgtacctttctgccggatgcgctggtgaccatcaccggcggtttccgccgtggcaaacctatgggccacgacgttgactttctgatcacgaatccgggcccgaaagaggatgacgagctgctccacaaagtggttgatctgctcaagaagcaaggtctgctgctgtacgaagacatcaaagagagcacgttcgtggaggggcaactgccaagtcgcaaaatcgacgccctggacaacttccagaagtgcttcgccattctcaagctgtaccagccgggcgtggataacagtgcggttgggacgagtaagaaaagtgacatggccgaggttaaggattggaaagcgattcgtgtggatctggtgatcacgccattcgagcagtacgcctatgcgctgctcggttggacgggcagcaaagaatttcgtcgcgatctgcgccgctatgcggaggaagagcgcggcatgatcctcgacaaccatgccctctacgacctgaaaaagcgcatctttctgaaagcgggcagcgaagaagagattttcgcgcatctgggtctggattatgtggagccgtgggaacgcaacgcg

SEQ ID NO: 2288 - protein, 394 aa, synthetic construct
  REGION 1..394: note = Variant of terminal deoxynucleotidyl transferase
MHHHHHHGGSGHPPSNTPEGEVPSVIARPVSQYSCQRKTTLNNYNKKFTDALEIMAENYKFKENLIACLEAKRAASILKYLPFEVTSMKDIQGLPCITDQVRDVIEEIIEEGESSRVKEVLNDERYKAFKQFTSVFGVGVKTAEKWFRMGLRTVEEAKASKSLKLSKMQKAGFLYYEDLASRVSKEEADAVTLIVKNTVRTFLPDALVTITGGFRRGKPMGHDVDFLITNPGPKEDDELLHKVVDLLKKQGLLLYEDIKESTFVEGQLPSRKIDALDNFQKCFAILKLYQPGVDNSAVGTSKKSDMAEVKDWKAIRVDLVITPFEQYAYALLGWTGSKEFRRDLRRYAEEERGMILDNHALYDLKKRIFLKAGSEEEIFAHLGLDYVEPWERNA

SEQ ID NO: 2289 - DNA, 1182 bp, synthetic construct
  misc_feature 1..1182: note = Variant of terminal deoxynucleotidyl transferase
  source 1..1182: mol_type = other DNA
atgcatcaccaccatcatcatgggggttctggtcatccgccgagcaataccccggagggggaggtgccgagcgttatcgcccgtccggttagtcagtacagctgccagcgcaagaccacgctgaataactacaacaaaaagtttaccgacgcgctggagatcatggccgagaactacaaatttaaagagaacctgatcgcgtgtctggaagccaagcgcgccgcgagtattctgaaatatctgccgttcgaggttaccagcatgaaagacatccaaggtctgccgtgcattaccgaccaagttcgtgacgtgatcgaggagatcatcgaagagggcgagagcagccgtgttaaagaagttctcaatgacgagcgctacaaggcctttaagcagttcaccagcgtgttcggtgtgggcgtgaaaaccgcggaaaagtggtttcgtatgggcctccgtacggttgaagaagcaaaggccagtaagagtctgaagctgagcaagatgcagaaggcgggctttctgtattacgaggatctggcgagccgcgttagtaaagaagaagccgatgccgttacgctcatcgtgaagaacacggtgcgtacctttctgccggatgcgctggtgaccatcaccggcggtttccgccgtggcaaacctatgggccacgacgttgactttctgatcacgaatccgggcccgaaagaggatgacgagctgctccacaaagtggttgatctgctcaagaagcaaggtctgctgctgtacgaagacatccaagagagcacgttcgtggaggggcaactgccaagtcgcaaaatcgacgccatggacaacttccagaagtgcttcgccattctcaagctgtaccagccgggcgtggataacagtgcggttgggacgagtaagaaaagtgacatggccgaggttaaggattggaaagcgattcgtgtggatctggtgatcacgccattcgagcagtacgcctatgcgctgctcggttggacgggcagcaaagaatttcgtcgcgatctgcgccgctatgcggaggaagagcgcggcatgatcctcgacaaccatgccctctacgacctgaaaaagcgcatctttctgaaagcgggcagcgaagaagagattttcgcgcatctgggtctggattatgtggagccgtgggaacgcaacgcg

SEQ ID NO: 2290 - protein, 394 aa, synthetic construct
  REGION 1..394: note = Variant of terminal deoxynucleotidyl transferase
MHHHHHHGGSGHPPSNTPEGEVPSVIARPVSQYSCQRKTTLNNYNKKFTDALEIMAENYKFKENLIACLEAKRAASILKYLPFEVTSMKDIQGLPCITDQVRDVIEEIIEEGESSRVKEVLNDERYKAFKQFTSVFGVGVKTAEKWFRMGLRTVEEAKASKSLKLSKMQKAGFLYYEDLASRVSKEEADAVTLIVKNTVRTFLPDALVTITGGFRRGKPMGHDVDFLITNPGPKEDDELLHKVVDLLKKQGLLLYEDIQESTFVEGQLPSRKIDAMDNFQKCFAILKLYQPGVDNSAVGTSKKSDMAEVKDWKAIRVDLVITPFEQYAYALLGWTGSKEFRRDLRRYAEEERGMILDNHALYDLKKRIFLKAGSEEEIFAHLGLDYVEPWERNA

SEQ ID NO: 2291 - DNA, 1182 bp, synthetic construct
  misc_feature 1..1182: note = Variant of terminal deoxynucleotidyl transferase
  source 1..1182: mol_type = other DNA
atgcatcaccaccatcatcatgggggttctggtcatccgccgagcaataccccggagggggaggtgccgagcgttatcgcccgtccggttagtcagtacagctgccagcgcaagaccacgctgaataactacaacaaaaagtttaccgacgcgctggagatcatggccgagaactacaaatttaaagagaacctgatcgcgtgtctggaagccaagcgcgccgcgagtattctgaaatatctgccgttcgaggttaccagcatgaaagacatccaaggtctgccgtgcattaccgaccaagttcgtgacgtgatcgaggagatcatcgaagagggcgagagcagccgtgttaaagaagttctcaatgacgagcgctacaaggcctttaagcagttcaccagcgtgttcggtgtgggcgtgaaaaccgcggaaaagtggtttcgtatgggcctccgtacggttgaagaagcaaaggccagtaagagtctgaagctgagcaagatgcagaaggcgggctttctgtattacgaggatctggcgagccgcgttagtaaagaagaagccgatgccgttacgctcatcgtgaagaacacggtgcgtacctttctgccggatgcgctggtgaccatcaccggcggtttccgccgtggcaaacctatgggccacgacgttgactttctgatcacgaatccgggcccgaaagaggatgacgagctgctccacaaagtggttgatctgctcaagaagcaaggtctgctgctgtacgaagacatcaaagagagcacgttcgtggaggggcaactgccaagtcgcaaagttgacgccatggacaacttccagaagtgcttcgccattctcaagctgtaccagccgggcgtggataacagtgcggttgggacgagtaagaaaagtgacatggccgaggttaaggattggaaagcgattcgtgtggatctggtgatcacgccattcgagcagtacgcctatgcgctgctcggttggacgggcagcaaagaatttcgtcgcgatctgcgccgctatgcggaggaagagcgcggcatgatcctcgacaaccatgccctctacgacctgaaaaagcgcatctttctgaaagcgggcagcgaagaagagattttcgcgcatctgggtctggattatgtggagccgtgggaacgcaacgcg

SEQ ID NO: 2292 - protein, 394 aa, synthetic construct
  REGION 1..394: note = Variant of terminal deoxynucleotidyl transferase
MHHHHHHGGSGHPPSNTPEGEVPSVIARPVSQYSCQRKTTLNNYNKKFTDALEIMAENYKFKENLIACLEAKRAASILKYLPFEVTSMKDIQGLPCITDQVRDVIEEIIEEGESSRVKEVLNDERYKAFKQFTSVFGVGVKTAEKWFRMGLRTVEEAKASKSLKLSKMQKAGFLYYEDLASRVSKEEADAVTLIVKNTVRTFLPDALVTITGGFRRGKPMGHDVDFLITNPGPKEDDELLHKVVDLLKKQGLLLYEDIKESTFVEGQLPSRKVDAMDNFQKCFAILKLYQPGVDNSAVGTSKKSDMAEVKDWKAIRVDLVITPFEQYAYALLGWTGSKEFRRDLRRYAEEERGMILDNHALYDLKKRIFLKAGSEEEIFAHLGLDYVEPWERNA

SEQ ID NO: 2293 - DNA, 1182 bp, synthetic construct
  misc_feature 1..1182: note = Variant of terminal deoxynucleotidyl transferase
  source 1..1182: mol_type = other DNA
atgcatcaccaccatcatcatgggggttctggtcatccgccgagcaataccccggagggggaggtgccgagcgttatcgcccgtccggttagtcagtacagctgccagcgcaagaccacgctgaataactacaacaaaaagtttaccgacgcgctggagatcatggccgagaactacaaatttaaagagaacctgatcgcgtgtctggaagccaagcgcgccgcgagtattctgaaatatctgccgttcgaggttaccagcatgaaagacatccaaggtctgccgtgcctgaccgaccaagttcgtgacgtgatcgaggagatcatcgaagagggcgagagcagccgtgttaaagaagttctcaatgacgagcgctacaaggcctttaagcagttcaccagcgtgttcggtgtgggcgtgaaaaccgcggaaaagtggtttcgtatgggcctccgtacggttgaagaagcaaaggccagtaagagtctgaagctgagcaagatgcagaaggcgggctttctgtattacgaggatctggcgagccgcgttagtaaagaagaagccgatgccgttacgctcatcgtgaagaacacggtgcgtacctttctgccggatgcgctggtgaccatcaccggcggtttccgccgtggcaaacctatgggccacgacgttgactttctgatcacgaatccgggcccgaaagaggatgacgagctgctccacaaagtggttgatctgctcaagaagcaaggtctgctgctgtacgaagacatcaaagagagcacgttcgtggaggggcaactgccaagtcgcaaaatcgacgccatggacaacttccagaagtgcttcgccattctcaagctgtaccagccgggcgtggataacagtgcggttgggacgagtaagaaaagtgacatggccgaggttaaggattggaaagcgattcgtgtggatctggtgatcacgccattcgagcagtacgcctatgcgctgctcggttggacgggcagcaaagaatttcgtcgcgatctgcgccgctatgcggaggaagagcgcggcatgatcctcgacaaccatgccctctacgacctgaaaaagcgcatctttctgaaagcgggcagcgaagaagagattttcgcgcatctgggtctggattatgtggagccgtgggaacgcaacgcg

SEQ ID NO: 2294 - protein, 394 aa, synthetic construct
  REGION 1..394: note = Variant of terminal deoxynucleotidyl transferase
MHHHHHHGGSGHPPSNTPEGEVPSVIARPVSQYSCQRKTTLNNYNKKFTDALEIMAENYKFKENLIACLEAKRAASILKYLPFEVTSMKDIQGLPCLTDQVRDVIEEIIEEGESSRVKEVLNDERYKAFKQFTSVFGVGVKTAEKWFRMGLRTVEEAKASKSLKLSKMQKAGFLYYEDLASRVSKEEADAVTLIVKNTVRTFLPDALVTITGGFRRGKPMGHDVDFLITNPGPKEDDELLHKVVDLLKKQGLLLYEDIKESTFVEGQLPSRKIDAMDNFQKCFAILKLYQPGVDNSAVGTSKKSDMAEVKDWKAIRVDLVITPFEQYAYALLGWTGSKEFRRDLRRYAEEERGMILDNHALYDLKKRIFLKAGSEEEIFAHLGLDYVEPWERNA

SEQ ID NO: 2295 - DNA, 1182 bp, synthetic construct
  misc_feature 1..1182: note = Variant of terminal deoxynucleotidyl transferase
  source 1..1182: mol_type = other DNA
atgcatcaccaccatcatcatgggggttctggtcatccgccgagcaataccccggagggggaggtgccgagcgttatcgcccgtccggttagtcagtacagctgccagcgcaagaccacgctgaataactacaacaaaaagtttaccgacgcgctggagatcatggccgagaactacaaatttaaagagaacctgatcgcgtgtctggaagccaagcgcgccgcgagtattctgaaatatctgccgttcgaggttaccagcatgaaagacatccaaggtctgccgtgcattaccgaccaagttcgtgacgtgatcgaggagatcatcgaagagggcgagagcagccgtgttaaagaagttctcaatgacgagcgctacaaggcctttaagcagttcaccagcgtgttcggtgtgggcgtgaaaaccgcggaaaagtggtttcgtatgggcctccgtacggttgaagaagcaaaggccagtaagagtctgaagctgagcaagatgcagaaggcgggctttctgtattacgaggatctggcgagccgcgttagtaaagaagaagccgatgccgttacgctcatcgtgaagaacacggtgcgtacctttctgccggatgcgctggtgaccatcaccggcggtttccgccgtggcaaacctatgggccacgacgttgactttctgatcacgaatccgggcccgaaagaggatgacgagctgctccacaaagtggttgatctgctcaagaagcaaggtctgctgctgtacgaagacatcgttgagagcacgttcgtggaggggcaactgccaagtcgcaaaatcgacgccatggacaacttccagaagtgcttcgccattctcaagctgtaccagccgggcgtggataacagtgcggttgggacgagtaagaaaagtgacatggccgaggttaaggattggaaagcgattcgtgtggatctggtgatcacgccattcgagcagtacgcctatgcgctgctcggttggacgggcagcaaagaatttcgtcgcgatctgcgccgctatgcggaggaagagcgcggcatgatcctcgacaaccatgccctctacgacctgaaaaagcgcatctttctgaaagcgggcagcgaagaagagattttcgcgcatctgggtctggattatgtggagccgtgggaacgcaacgcg

SEQ ID NO: 2296 - protein, 394 aa, synthetic construct
  REGION 1..394: note = Variant of terminal deoxynucleotidyl transferase
MHHHHHHGGSGHPPSNTPEGEVPSVIARPVSQYSCQRKTTLNNYNKKFTDALEIMAENYKFKENLIACLEAKRAASILKYLPFEVTSMKDIQGLPCITDQVRDVIEEIIEEGESSRVKEVLNDERYKAFKQFTSVFGVGVKTAEKWFRMGLRTVEEAKASKSLKLSKMQKAGFLYYEDLASRVSKEEADAVTLIVKNTVRTFLPDALVTITGGFRRGKPMGHDVDFLITNPGPKEDDELLHKVVDLLKKQGLLLYEDIVESTFVEGQLPSRKIDAMDNFQKCFAILKLYQPGVDNSAVGTSKKSDMAEVKDWKAIRVDLVITPFEQYAYALLGWTGSKEFRRDLRRYAEEERGMILDNHALYDLKKRIFLKAGSEEEIFAHLGLDYVEPWERNA

SEQ ID NO: 2297 - DNA, 1182 bp, synthetic construct
  misc_feature 1..1182: note = Variant of terminal deoxynucleotidyl transferase
  source 1..1182: mol_type = other DNA
atgcatcaccaccatcatcatgggggttctggtcatccgccgagcaataccccggagggggaggtgccgagcgttatcgcccgtccggttagtcagtacagctgccagcgcaagaccacgctgaataactacaacaaaaagtttaccgacgcgctggagatcatggccgagaactacaaatttaaagagaacctgatcgcgtgtctggaagccaagcgcgccgcgagtattctgaaatatctgccgttcgaggttaccagcatgaaagacatccaaggtctgccgtgcattaccgaccaagttcgtgacgtgatcgaggagatcatcgaagagggcgagagcagccgtgttaaagaagttctcaatgacgagcgctacaaggcctttaagcagttcaccagcgtgttcggtgtgggcgtgaaaaccgcggaaaagtggtttcgtatgggcctccgtacggttgaagaagcaaaggccagtaagagtctgaagctgagcaagcaacagaaggcgggctttctgtattacgaggatctggcgagccgcgttagtaaagaagaagccgatgccgttacgctcatcgtgaagaacacggtgcgtacctttctgccggatgcgctggtgaccatcaccggcggtttccgccgtggcaaacctatgggccacgacgttgactttctgatcacgaatccgggcccgaaagaggatgacgagctgctccacaaagtggttgatctgctcaagaagcaaggtctgctgctgtacgaagacatcaaagagagcacgttcgtggaggggcaactgccaagtcgcaaaatcgacgccatggacaacttccagaagtgcttcgccattctcaagctgtaccagccgggcgtggataacagtgcggttgggacgagtaagaaaagtgacatggccgaggttaaggattggaaagcgattcgtgtggatctggtgatcacgccattcgagcagtacgcctatgcgctgctcggttggacgggcagcaaagaatttcgtcgcgatctgcgccgctatgcggaggaagagcgcggcatgatcctcgacaaccatgccctctacgacctgaaaaagcgcatctttctgaaagcgggcagcgaagaagagattttcgcgcatctgggtctggattatgtggagccgtgggaacgcaacgcg

SEQ ID NO: 2298 - protein, 394 aa, synthetic construct
  REGION 1..394: note = Variant of terminal deoxynucleotidyl transferase
MHHHHHHGGSGHPPSNTPEGEVPSVIARPVSQYSCQRKTTLNNYNKKFTDALEIMAENYKFKENLIACLEAKRAASILKYLPFEVTSMKDIQGLPCITDQVRDVIEEIIEEGESSRVKEVLNDERYKAFKQFTSVFGVGVKTAEKWFRMGLRTVEEAKASKSLKLSKQQKAGFLYYEDLASRVSKEEADAVTLIVKNTVRTFLPDALVTITGGFRRGKPMGHDVDFLITNPGPKEDDELLHKVVDLLKKQGLLLYEDIKESTFVEGQLPSRKIDAMDNFQKCFAILKLYQPGVDNSAVGTSKKSDMAEVKDWKAIRVDLVITPFEQYAYALLGWTGSKEFRRDLRRYAEEERGMILDNHALYDLKKRIFLKAGSEEEIFAHLGLDYVEPWERNA

SEQ ID NO: 2299 - DNA, 1182 bp, synthetic construct
  misc_feature 1..1182: note = Variant of terminal deoxynucleotidyl transferase
  source 1..1182: mol_type = other DNA
atgcatcaccaccatcatcatgggggttctggtcatccgccgagcaataccccggagggggaggtgccgagcgttatcgcccgtccggttagtcagtacagctgccagcgcaagaccacgctgaataactacaacaaaaagtttaccgacgcgctggagatcatggccgagaactacaaatttaaagagaacctgatcgcgtgtctggaagccaagcgcgccgcgagtattctgaaatatctgccgttcgaggttaccagcatgaaagacatccaaggtctgccgtgcattaccgaccaagttcgtgacgtgatcgaggagatcatcgaagagggcgagagcagccgtgttaaagaagttctcaatgacgagcgctacaaggcctttaagcagttcaccagcgtgttcggtgtgggcgtgaaaaccgcggaaaagtggtttcgtatgggcctccgtacggttgaagaagcaaaggccagtaagagtctgaagctgagcaaggcacagaaggcgggctttctgtattacgaggatctggcgagccgcgttagtaaagaagaagccgatgccgttacgctcatcgtgaagaacacggtgcgtacctttctgccggatgcgctggtgaccatcaccggcggtttccgccgtggcaaacctatgggccacgacgttgactttctgatcacgaatccgggcccgaaagaggatgacgagctgctccacaaagtggttgatctgctcaagaagcaaggtctgctgctgtacgaagacatcaaagagagcacgttcgtggaggggcaactgccaagtcgcaaaatcgacgccatggacaacttccagaagtgcttcgccattctcaagctgtaccagccgggcgtggataacagtgcggttgggacgagtaagaaaagtgacatggccgaggttaaggattggaaagcgattcgtgtggatctggtgatcacgccattcgagcagtacgcctatgcgctgctcggttggacgggcagcaaagaatttcgtcgcgatctgcgccgctatgcggaggaagagcgcggcatgatcctcgacaaccatgccctctacgacctgaaaaagcgcatctttctgaaagcgggcagcgaagaagagattttcgcgcatctgggtctggattatgtggagccgtgggaacgcaacgcg

SEQ ID NO: 2300 - protein, 394 aa, synthetic construct
  REGION 1..394: note = Variant of terminal deoxynucleotidyl transferase
MHHHHHHGGSGHPPSNTPEGEVPSVIARPVSQYSCQRKTTLNNYNKKFTDALEIMAENYKFKENLIACLEAKRAASILKYLPFEVTSMKDIQGLPCITDQVRDVIEEIIEEGESSRVKEVLNDERYKAFKQFTSVFGVGVKTAEKWFRMGLRTVEEAKASKSLKLSKAQKAGFLYYEDLASRVSKEEADAVTLIVKNTVRTFLPDALVTITGGFRRGKPMGHDVDFLITNPGPKEDDELLHKVVDLLKKQGLLLYEDIKESTFVEGQLPSRKIDAMDNFQKCFAILKLYQPGVDNSAVGTSKKSDMAEVKDWKAIRVDLVITPFEQYAYALLGWTGSKEFRRDLRRYAEEERGMILDNHALYDLKKRIFLKAGSEEEIFAHLGLDYVEPWERNA

SEQ ID NO: 2301 - DNA, 1182 bp, synthetic construct
  misc_feature 1..1182: note = Variant of terminal deoxynucleotidyl transferase
  source 1..1182: mol_type = other DNA
atgcatcaccaccatcatcatgggggttctggtcatccgccgagcaataccccggagggggaggtgccgagcgttatcgcccgtccggttagtcagtacagctgccagcgcaagaccacgctgaataactacaacaaaaagtttaccgacgcgctggagatcatggccgagaactacaaatttaaagagaacctgatcgcgtgtctggaagccaagcgcgccgcgagtattctgaaatatctgccgttcgaggttaccagcatgaaagacatccaaggtctgccgtgcattaccgaccaagttcgtgacgtgatcgaggagatcatcgaagagggcgagagcagccgtgttaaagaagttctcaatgacgagcgctacaaggcctttaagcagttcaccagcgtgttcggtgtgggcgtgaaaaccgcggaaaagtggtttcgtatgggcctccgtacggttgaagaagcaaaggccagtaagagtctgaagctgagcaagatgcagaaggcgggctttctgtattacgaggatctggcgagccgcgttagtaaagaagaagccgatgccgttacgctcatcgtgaagaacacggtgcgtacctttctgccggatgcgctggtgaccatcaccggcggtttccgccgtggcaaacctatgggccacgacgttgactttctgatcacgaatccgggcccgaaagaggatgacgagctgctccacaaagtggttgatctgctcaagaagcaaggtctgctgctgtacgaagacatcaaagagagcacgttcgtggaggggcaactgccaagtcgcaaaatcgacgccatggacgcgttccagaagtgcttcgccattctcaagctgtaccagccgggcgtggataacagtgcggttgggacgagtaagaaaagtgacatggccgaggttaaggattggaaagcgattcgtgtggatctggtgatcacgccattcgagcagtacgcctatgcgctgctcggttggacgggcagcaaagaatttcgtcgcgatctgcgccgctatgcggaggaagagcgcggcatgatcctcgacaaccatgccctctacgacctgaaaaagcgcatctttctgaaagcgggcagcgaagaagagattttcgcgcatctgggtctggattatgtggagccgtgggaacgcaacgcg

SEQ ID NO: 2302 - protein, 394 aa, synthetic construct
  REGION 1..394: note = Variant of terminal deoxynucleotidyl transferase
MHHHHHHGGSGHPPSNTPEGEVPSVIARPVSQYSCQRKTTLNNYNKKFTDALEIMAENYKFKENLIACLEAKRAASILKYLPFEVTSMKDIQGLPCITDQVRDVIEEIIEEGESSRVKEVLNDERYKAFKQFTSVFGVGVKTAEKWFRMGLRTVEEAKASKSLKLSKMQKAGFLYYEDLASRVSKEEADAVTLIVKNTVRTFLPDALVTITGGFRRGKPMGHDVDFLITNPGPKEDDELLHKVVDLLKKQGLLLYEDIKESTFVEGQLPSRKIDAMDAFQKCFAILKLYQPGVDNSAVGTSKKSDMAEVKDWKAIRVDLVITPFEQYAYALLGWTGSKEFRRDLRRYAEEERGMILDNHALYDLKKRIFLKAGSEEEIFAHLGLDYVEPWERNA

SEQ ID NO: 2303 - DNA, 1182 bp, synthetic construct; identical to SEQ ID NO: 2293
  misc_feature 1..1182: note = Variant of terminal deoxynucleotidyl transferase
  source 1..1182: mol_type = other DNA

SEQ ID NO: 2304 - protein, 394 aa, synthetic construct; identical to SEQ ID NO: 2294
  REGION 1..394: note = Variant of terminal deoxynucleotidyl transferase

SEQ ID NO: 2305 - DNA, 1182 bp, synthetic construct
  misc_feature 1..1182: note = Variant of terminal deoxynucleotidyl transferase
  source 1..1182: mol_type = other DNA
atgcatcaccaccatcatcatgggggttctggtcatccgccgagcaataccccggagggggaggtgccgagcgttatcgcccgtccggttagtcagtacagctgccagcgcaagaccacgctgaataactacaacaaaaagtttaccgacgcgctggagatcatggccgagaactacaaatttaaagagaacctgatcgcgtgtctggaagccaagcgcgccgcgagtattctgaaatatctgccgttcgaggttaccagcatgaaagacatccaaggtctgccgtgcattaccgaccaagttcgtgacgtgatcgaggagatcatcgaagagggcgagagcagccgtgttaaagaagttctcaatgacgagcgctacaaggcctttaagcagttcaccagcatcttcggtgtgggcgtgaaaaccgcggaaaagtggtttcgtatgggcctccgtacggttgaagaagcaaaggccagtaagagtctgaagctgagcaagatgcagaaggcgggctttctgtattacgaggatctggcgagccgcgttagtaaagaagaagccgatgccgttacgctcatcgtgaagaacacggtgcgtacctttctgccggatgcgctggtgaccatcaccggcggtttccgccgtggcaaacctatgggccacgacgttgactttctgatcacgaatccgggcccgaaagaggatgacgagctgctccacaaagtggttgatctgctcaagaagcaaggtctgctgctgtacgaagacatcaaagagagcacgttcgtggaggggcaactgccaagtcgcaaaatcgacgccatggacaacttccagaagtgcttcgccattctcaagctgtaccagccgggcgtggataacagtgcggttgggacgagtaagaaaagtgacatggccgaggttaaggattggaaagcgattcgtgtggatctggtgatcacgccattcgagcagtacgcctatgcgctgctcggttggacgggcagcaaagaatttcgtcgcgatctgcgccgctatgcggaggaagagcgcggcatgatcctcgacaaccatgccctctacgacctgaaaaagcgcatctttctgaaagcgggcagcgaagaagagattttcgcgcatctgggtctggattatgtggagccgtgggaacgcaacgcg

SEQ ID NO: 2306 - protein, 394 aa, synthetic construct
  REGION 1..394: note = Variant of terminal deoxynucleotidyl transferase
MHHHHHHGGSGHPPSNTPEGEVPSVIARPVSQYSCQRKTTLNNYNKKFTDALEIMAENYKFKENLIACLEAKRAASILKYLPFEVTSMKDIQGLPCITDQVRDVIEEIIEEGESSRVKEVLNDERYKAFKQFTSIFGVGVKTAEKWFRMGLRTVEEAKASKSLKLSKMQKAGFLYYEDLASRVSKEEADAVTLIVKNTVRTFLPDALVTITGGFRRGKPMGHDVDFLITNPGPKEDDELLHKVVDLLKKQGLLLYEDIKESTFVEGQLPSRKIDAMDNFQKCFAILKLYQPGVDNSAVGTSKKSDMAEVKDWKAIRVDLVITPFEQYAYALLGWTGSKEFRRDLRRYAEEERGMILDNHALYDLKKRIFLKAGSEEEIFAHLGLDYVEPWERNA

SEQ ID NO: 2307 - DNA, 1182 bp, synthetic construct; identical to SEQ ID NO: 2289
  misc_feature 1..1182: note = Variant of terminal deoxynucleotidyl transferase
  source 1..1182: mol_type = other DNA

SEQ ID NO: 2308 - protein, 394 aa, synthetic construct; identical to SEQ ID NO: 2290
  REGION 1..394: note = Variant of terminal deoxynucleotidyl transferase

SEQ ID NO: 2309 - DNA, 1182 bp, synthetic construct; identical to SEQ ID NO: 2287
  misc_feature 1..1182: note = Variant of terminal deoxynucleotidyl transferase
  source 1..1182: mol_type = other DNA

SEQ ID NO: 2310 - protein, 394 aa, synthetic construct; identical to SEQ ID NO: 2288
  REGION 1..394: note = Variant of terminal deoxynucleotidyl transferase

SEQ ID NO: 2311 - DNA, 1182 bp, synthetic construct; identical to SEQ ID NO: 2291
  misc_feature 1..1182: note = Variant of terminal deoxynucleotidyl transferase
  source 1..1182: mol_type = other DNA

SEQ ID NO: 2312 - protein, 394 aa, synthetic construct; identical to SEQ ID NO: 2292
  REGION 1..394: note = Variant of terminal deoxynucleotidyl transferase

SEQ ID NO: 2313 - DNA, 1182 bp, synthetic construct; identical to SEQ ID NO: 2295
  misc_feature 1..1182: note = Variant of terminal deoxynucleotidyl transferase
  source 1..1182: mol_type = other DNA

SEQ ID NO: 2314 - protein, 394 aa, synthetic construct; identical to SEQ ID NO: 2296
  REGION 1..394: note = Variant of terminal deoxynucleotidyl transferase

SEQ ID NO: 2315 - DNA, 1182 bp, synthetic construct
  misc_feature 1..1182: note = Variant of terminal deoxynucleotidyl transferase
  source 1..1182: mol_type = other DNA
atgcatcaccaccatcatcatgggggttctggtcatccgccgagcaataccccggagggggaggtgccgagcgttatcgcccgtccggttagtcagtacagctgccagcgcaagaccacgctgaataactacaacaaaaagtttaccgacgcgctggagatcatggccgagaactacaaatttaaagagaacctgatcgcgtgtctggaagccaagcgcgccgcgagtattctgaaatatctgccgttcgaggttaccagcatgaaagacatccaaggtctgccgtgcattaccgaccaagttcgtgacgtgatcgaggagatcatcgaagagggcgagagcagccgtgttaaagaagttctcaatgacgagcgctacaaggcctttaagcagttcaccagcgtgttcggtgtgggcgtgaaaaccgcggaaaagtggtttcgtatgggcctccgtacggttgaagaagcaaaggccagtaagagtctgaagctgaccaagatgcagaaggcgggctttctgtattacgaggatctggcgagccgcgttagtaaagaagaagccgatgccgttacgctcatcgtgaagaacacggtgcgtacctttctgccggatgcgctggtgaccatcaccggcggtttccgccgtggcaaacctatgggccacgacgttgactttctgatcacgaatccgggcccgaaagaggatgacgagctgctccacaaagtggttgatctgctcaagaagcaaggtctgctgctgtacgaagacatcaaagagagcacgttcgtggaggggcaactgccaagtcgcaaaatcgacgccatggacaacttccagaagtgcttcgccattctcaagctgtaccagccgggcgtggataacagtgcggttgggacgagtaagaaaagtgacatggccgaggttaaggattggaaagcgattcgtgtggatctggtgatcacgccattcgagcagtacgcctatgcgctgctcggttggacgggcagcaaagaatttcgtcgcgatctgcgccgctatgcggaggaagagcgcggcatgatcctcgacaaccatgccctctacgacctgaaaaagcgcatctttctgaaagcgggcagcgaagaagagattttcgcgcatctgggtctggattatgtggagccgtgggaacgcaacgcg

SEQ ID NO: 2316 - protein, 394 aa, synthetic construct
  REGION 1..394: note = Variant of terminal deoxynucleotidyl transferase
MHHHHHHGGSGHPPSNTPEGEVPSVIARPVSQYSCQRKTTLNNYNKKFTDALEIMAENYKFKENLIACLEAKRAASILKYLPFEVTSMKDIQGLPCITDQVRDVIEEIIEEGESSRVKEVLNDERYKAFKQFTSVFGVGVKTAEKWFRMGLRTVEEAKASKSLKLTKMQKAGFLYYEDLASRVSKEEADAVTLIVKNTVRTFLPDALVTITGGFRRGKPMGHDVDFLITNPGPKEDDELLHKVVDLLKKQGLLLYEDIKESTFVEGQLPSRKIDAMDNFQKCFAILKLYQPGVDNSAVGTSKKSDMAEVKDWKAIRVDLVITPFEQYAYALLGWTGSKEFRRDLRRYAEEERGMILDNHALYDLKKRIFLKAGSEEEIFAHLGLDYVEPWERNA

SEQ ID NO: 2317 - DNA, 1182 bp, synthetic construct; identical to SEQ ID NO: 2301
  misc_feature 1..1182: note = Variant of terminal deoxynucleotidyl transferase
  source 1..1182: mol_type = other DNA

SEQ ID NO: 2318 - protein, 394 aa, synthetic construct; identical to SEQ ID NO: 2302
  REGION 1..394: note = Variant of terminal deoxynucleotidyl transferase

SEQ ID NO: 2319 - DNA, 1182 bp, synthetic construct; identical to SEQ ID NO: 2291
  misc_feature 1..1182: note = Variant of terminal deoxynucleotidyl transferase
  source 1..1182: mol_type = other DNA

SEQ ID NO: 2320 - protein, 394 aa, synthetic construct; identical to SEQ ID NO: 2292
  REGION 1..394: note = Variant of terminal deoxynucleotidyl transferase

SEQ ID NO: 2321 - DNA, 1182 bp, synthetic construct; identical to SEQ ID NO: 2305
  misc_feature 1..1182: note = Variant of terminal deoxynucleotidyl transferase
  source 1..1182: mol_type = other DNA

SEQ ID NO: 2322 - protein, 394 aa, synthetic construct; identical to SEQ ID NO: 2306
  REGION 1..394: note = Variant of terminal deoxynucleotidyl transferase

SEQ ID NO: 2323 - DNA, 1182 bp, synthetic construct; identical to SEQ ID NO: 2293
  misc_feature 1..1182: note = Variant of terminal deoxynucleotidyl transferase
  source 1..1182: mol_type = other DNA

SEQ ID NO: 2324 - protein, 394 aa, synthetic construct; identical to SEQ ID NO: 2294
  REGION 1..394: note = Variant of terminal deoxynucleotidyl transferase

SEQ ID NO: 2325 - DNA, 1182 bp, synthetic construct; identical to SEQ ID NO: 2289
  misc_feature 1..1182: note = Variant of terminal deoxynucleotidyl transferase
  source 1..1182: mol_type = other DNA

SEQ ID NO: 2326 - protein, 394 aa, synthetic construct; identical to SEQ ID NO: 2290
  REGION 1..394: note = Variant of terminal deoxynucleotidyl transferase

SEQ ID NO: 2327 - DNA, 1182 bp, synthetic construct; identical to SEQ ID NO: 2291
  misc_feature 1..1182: note = Variant of terminal deoxynucleotidyl transferase
  source 1..1182: mol_type = other DNA

SEQ ID NO: 2328 - protein, 394 aa, synthetic construct; identical to SEQ ID NO: 2292
  REGION 1..394: note = Variant of terminal deoxynucleotidyl transferase

SEQ ID NO: 2329 - DNA, 1182 bp, synthetic construct
  misc_feature 1..1182: note = Variant of terminal deoxynucleotidyl transferase
  source 1..1182: mol_type = other DNA
atgcatcaccaccatcatcatgggggttctggtcatccgccgagcaataccccggagggggaggtgccgagcgttatcgcccgtccggttagtcagtacagctgccagcgcaagaccacgctgaataactacaacaaaaagtttaccgacgcgctggagatcatggccgagaactacaaatttaaagagaacctgatcgcgtgtctggaagccaagcgcgccgcgagtattctgaaatatctgccgttcgaggttaccagcatgaaagacatccaaggtctgccgtgcttcaccgaccaagttcgtgacgtgatcgaggagatcatcgaagagggcgagagcagccgtgttaaagaagttctcaatgacgagcgctacaaggcctttaagcagttcaccagcgtgttcggtgtgggcgtgaaaaccgcggaaaagtggtttcgtatgggcctccgtacggttgaagaagcaaaggccagtaagagtctgaagctgagcaagatgcagaaggcgggctttctgtattacgaggatctggcgagccgcgttagtaaagaagaagccgatgccgttacgctcatcgtgaagaacacggtgcgtacctttctgccggatgcgctggtgaccatcaccggcggtttccgccgtggcaaacctatgggccacgacgttgactttctgatcacgaatccgggcccgaaagaggatgacgagctgctccacaaagtggttgatctgctcaagaagcaaggtctgctgctgtacgaagacatcaaagagagcacgttcgtggaggggcaactgccaagtcgcaaaatcgacgccatggacaacttccagaagtgcttcgccattctcaagctgtaccagccgggcgtggataacagtgcggttgggacgagtaagaaaagtgacatggccgaggttaaggattggaaagcgattcgtgtggatctggtgatcacgccattcgagcagtacgcctatgcgctgctcggttggacgggcagcaaagaatttcgtcgcgatctgcgccgctatgcggaggaagagcgcggtatgatcctcgacaaccatgccctctacgacctgaaaaagcgcatctttctgaaagcgggcagcgaagaagagattttcgcgcatctgggtctggattatgtggagccgtgggaacgcaacgcg

SEQ ID NO: 2330 - protein, 394 aa, synthetic construct
  REGION 1..394: note = Variant of terminal deoxynucleotidyl transferase
MHHHHHHGGSGHPPSNTPEGEVPSVIARPVSQYSCQRKTTLNNYNKKFTDALEIMAENYKFKENLIACLEAKRAASILKYLPFEVTSMKDIQGLPCFTDQVRDVIEEIIEEGESSRVKEVLNDERYKAFKQFTSVFGVGVKTAEKWFRMGLRTVEEAKASKSLKLSKMQKAGFLYYEDLASRVSKEEADAVTLIVKNTVRTFLPDALVTITGGFRRGKPMGHDVDFLITNPGPKEDDELLHKVVDLLKKQGLLLYEDIKESTFVEGQLPSRKIDAMDNFQKCFAILKLYQPGVDNSAVGTSKKSDMAEVKDWKAIRVDLVITPFEQYAYALLGWTGSKEFRRDLRRYAEEERGMILDNHALYDLKKRIFLKAGSEEEIFAHLGLDYVEPWERNA

SEQ ID NO: 2331 - DNA, 1182 bp, synthetic construct
  misc_feature 1..1182: note = Variant of terminal deoxynucleotidyl transferase
  source 1..1182: mol_type = other DNA
atgcatcaccaccatcatcatgggggttctggtcatccgccgagcaataccccggagggggaggtgccgagcgttatcgcccgtccggttagtcagtacagctgccagcgcaagaccacgctgaataactacaacaaaaagtttaccgacgcgctggagatcatggccgagaactacaaatttaaagagaacctgatcgcgtgtctggaagccaagcgcgccgcgagtattctgaaatatctgccgttcgaggttaccagcatgaaagacatccaaggtctgccgtgcattaccgaccaagttcgtgacgtgatcgaggagatcatcgaagagggcgagagcagccgtgttaaagaagttctcaatgacgagcgctacaaggcctttaagcagttcaccagcgtgttcggtgtgggcgtgaaaaccgcggaaaagtggtttcgtatgggcctccgtacggttgaagaagcaaaggccagtaagagtctgaagctgagcaagatgcagaaggcgggctttctgtattacgaggatctggcgagccgcgttagtaaagaagaagccgatgccgttacgctcatcgtgaagaacacggtgcgtacctttctgccggatgcgctggtgaccatcaccggcggtttccgccgtggcaaacctatgggccacgacgttgactttctgatcacgcatccgggcccgaaagaggatgacgagctgctccacaaagtggttgatctgctcaagaagcaaggtctgctgctgtacgaagacatcaaagagagcacgttcgtggaggggcaactgccaagtcgcaaaatcgacgccatggacaacttccagaagtgcttcgccattctcaagctgtaccagccgggcgtggataacagtgcggttgggacgagtaagaaaagtgacatggccgaggttaaggattggaaagcgattcgtgtggatctggtgatcacgccattcgagcagtacgcctatgcgctgctcggttggacgggcagcaaagaatttcgtcgcgatctgcgccgctatgcggaggaagagcgcggcatgatcctcgacaaccatgccctctacgacctgaaaaagcgcatctttctgaaagcgggcagcgaagaagagattttcgcgcatctgggtctggattatgtggagccgtgggaacgcaacgcg

SEQ ID NO: 2332 - protein, 394 aa, synthetic construct
  REGION 1..394: note = Variant of terminal deoxynucleotidyl transferase
MHHHHHHGGSGHPPSNTPEGEVPSVIARPVSQYSCQRKTTLNNYNKKFTDALEIMAENYKFKENLIACLEAKRAASILKYLPFEVTSMKDIQGLPCITDQVRDVIEEIIEEGESSRVKEVLNDERYKAFKQFTSVFGVGVKTAEKWFRMGLRTVEEAKASKSLKLSKMQKAGFLYYEDLASRVSKEEADAVTLIVKNTVRTFLPDALVTITGGFRRGKPMGHDVDFLITHPGPKEDDELLHKVVDLLKKQGLLLYEDIKESTFVEGQLPSRKIDAMDNFQKCFAILKLYQPGVDNSAVGTSKKSDMAEVKDWKAIRVDLVITPFEQYAYALLGWTGSKEFRRDLRRYAEEERGMILDNHALYDLKKRIFLKAGSEEEIFAHLGLDYVEPWERNA

SEQ ID NO: 2333 - DNA, 1182 bp, synthetic construct; identical to SEQ ID NO: 2301
  misc_feature 1..1182: note = Variant of terminal deoxynucleotidyl transferase
  source 1..1182: mol_type = other DNA

SEQ ID NO: 2334 - protein, 394 aa, synthetic construct; identical to SEQ ID NO: 2302
  REGION 1..394: note = Variant of terminal deoxynucleotidyl transferase

SEQ ID NO: 2335 - DNA, 1182 bp, synthetic construct; identical to SEQ ID NO: 2295
  misc_feature 1..1182: note = Variant of terminal deoxynucleotidyl transferase
  source 1..1182: mol_type = other DNA

SEQ ID NO: 2336 - protein, 394 aa, synthetic construct; identical to SEQ ID NO: 2296
  REGION 1..394: note = Variant of terminal deoxynucleotidyl transferase

SEQ ID NO: 2337 - DNA, 1182 bp, synthetic construct
  misc_feature 1..1182: note = Variant of terminal deoxynucleotidyl transferase
  source 1..1182: mol_type = other DNA
atgcatcaccaccatcatcatgggggttctggtcatccgccgagcaataccccggagggggaggtgccgagcgttatcgcccgtccggttagtcagtacagctgccagcgcaagaccacgctgaataactacaacaaaaagtttaccgacgcgctggagatcatggccgagaactacaaatttaaagagaacctgatcgcgtgtctggaagccaagcgcgccgcgagtattctgaaatatctgccgttcgaggttaccagcatgaaagacatccaaggtctgccgtgcattaccgaccaagttcgtgacgtgatcgaggagatcatcgaagagggcgagagcagccgtgttaaagaagttctcaatgacgagcgctacaaggcctttaagcagttcaccagcgtgttcggtgtgggcgtgaaaaccgcggaaaagtggtttcgtatgggcctccgtacggttgaagaagcaaaggccagtaagagtctgaagctgagccgtatgcagaaggcgggctttctgtattacgaggatctggcgagccgcgttagtaaagaagaagccgatgccgttacgctcatcgtgaagaacacggtgcgtacctttctgccggatgcgctggtgaccatcaccggcggtttccgccgtggcaaacctatgggccacgacgttgactttctgatcacgaatccgggcccgaaagaggatgacgagctgctccacaaagtggttgatctgctcaagaagcaaggtctgctgctgtacgaagacatcaaagagagcacgttcgtggaggggcaactgccaagtcgcaaaatcgacgccatggacaacttccagaagtgcttcgccattctcaagctgtaccagccgggcgtggataacagtgcggttgggacgagtaagaaaagtgacatggccgaggttaaggattggaaagcgattcgtgtggatctggtgatcacgccattcgagcagtacgcctatgcgctgctcggttggacgggcagcaaagaatttcgtcgcgatctgcgccgctatgcggaggaagagcgcggcatgatcctcgacaaccatgccctctacgacctgaaaaagcgcatctttctgaaagcgggcagcgaagaagagattttcgcgcatctgggtctggattatgtggagccgtgggaacgcaacgcg

SEQ ID NO: 2338 - protein, 394 aa, synthetic construct
  REGION 1..394: note = Variant of terminal deoxynucleotidyl transferase
MHHHHHHGGSGHPPSNTPEGEVPSVIARPVSQYSCQRKTTLNNYNKKFTDALEIMAENYKFKENLIACLEAKRAASILKYLPFEVTSMKDIQGLPCITDQVRDVIEEIIEEGESSRVKEVLNDERYKAFKQFTSVFGVGVKTAEKWFRMGLRTVEEAKASKSLKLSRMQKAGFLYYEDLASRVSKEEADAVTLIVKNTVRTFLPDALVTITGGFRRGKPMGHDVDFLITNPGPKEDDELLHKVVDLLKKQGLLLYEDIKESTFVEGQLPSRKIDAMDNFQKCFAILKLYQPGVDNSAVGTSKKSDMAEVKDWKAIRVDLVITPFEQYAYALLGWTGSKEFRRDLRRYAEEERGMILDNHALYDLKKRIFLKAGSEEEIFAHLGLDYVEPWERNA

SEQ ID NO: 2339 - DNA, 1182 bp, synthetic construct
  misc_feature 1..1182: note = Variant of terminal deoxynucleotidyl transferase
  source 1..1182: mol_type = other DNA
atgcatcaccaccatcatcatgggggttctggtcatccgccgagcaataccccggagggggaggtgccgagcgttatcgcccgtccggttagtcagtacagctgccagcgcaagaccacgctgaataactacaacaaaaagtttaccgacgcgctggagatcatggccgagaactacaaatttaaagagaacctgatcgcgtgtctggaagccaagcgcgccgcgagtattctgaaatatctgccgttcgaggttaccagcatgaaagacatccaaggtctgccgtgcattaccgaccaagttcgtgacgtgatcgaggagatcatcgaagagggcgagagcagccgtgttaaagaagttctcaatgacgagcgctacaaggcctttaagcagttcaccagcgtgttcggtgtgggcctgaaaaccgcggaaaagtggtttcgtatgggcctccgtacggttgaagaagcaaaggccagtaagagtctgaagctgagcaagatgcagaaggcgggctttctgtattacgaggatctggcgagccgcgttagtaaagaagaagccgatgccgttacgctcatcgtgaagaacacggtgcgtacctttctgccggatgcgctggtgaccatcaccggcggtttccgccgtggcaaacctatgggccacgacgttgactttctgatcacgaatccgggcccgaaagaggatgacgagctgctccacaaagtggttgatctgctcaagaagcaaggtctgctgctgtacgaagacatcaaagagagcacgttcgtggaggggcaactgccaagtcgcaaaatcgacgccatggacaacttccagaagtgcttcgccattctcaagctgtaccagccgggcgtggataacagtgcggttgggacgagtaagaaaagtgacatggccgaggttaaggattggaaagcgattcgtgtggatctggtgatcacgccattcgagcagtacgcctatgcgctgctcggttggacgggcagcaaagaatttcgtcgcgatctgcgccgctatgcggaggaagagcgcggcatgatcctcgacaaccatgccctctacgacctgaaaaagcgcatctttctgaaagcgggcagcgaagaagagattttcgcgcatctgggtctggattatgtggagccgtgggaacgcaacgcg

SEQ ID NO: 2340 - protein, 394 aa, synthetic construct
  REGION 1..394: note = Variant of terminal deoxynucleotidyl transferase
MHHHHHHGGSGHPPSNTPEGEVPSVIARPVSQYSCQRKTTLNNYNKKFTDALEIMAENYKFKENLIACLEAKRAASILKYLPFEVTSMKDIQGLPCITDQVRDVIEEIIEEGESSRVKEVLNDERYKAFKQFTSVFGVGLKTAEKWFRMGLRTVEEAKASKSLKLSKMQKAGFLYYEDLASRVSKEEADAVTLIVKNTVRTFLPDALVTITGGFRRGKPMGHDVDFLITNPGPKEDDELLHKVVDLLKKQGLLLYEDIKESTFVEGQLPSRKIDAMDNFQKCFAILKLYQPGVDNSAVGTSKKSDMAEVKDWKAIRVDLVITPFEQYAYALLGWTGSKEFRRDLRRYAEEERGMILDNHALYDLKKRIFLKAGSEEEIFAHLGLDYVEPWERNA

SEQ ID NO: 2341 - DNA, 1182 bp, synthetic construct
  misc_feature 1..1182: note = Variant of terminal deoxynucleotidyl transferase
  source 1..1182: mol_type = other DNA
atgcatcaccaccatcatcatgggggttctggtcatccgccgagcaataccccggagggggaggtgccgagcgttatcgcccgtccggttagtcagtacagctgccagcgcaagaccacgctgaataactacaacaaaaagtttaccgacgcgctggagatcatggccgagaactacaaatttaaagagaacctgatcgcgtgtctggaagccaagcgcgccgcgagtattctgaaatatctgccgttcgaggttaccagcatgaaagacatccaaggtctgccgtgcattaccgaccaagttcgtgacgtgatcgaggagatcatcgaagagggcgagagcagccgtgttaaagaagttctcaatgacgagcgctacaaggcctttaagcagttcaccagcgtgttcggtgtgggcgtgaaaaccgcggaaaagtggtttcgtatgggcctccgtacggttgaagaagcaaaggccagtaagagtctgaagctgaacaagatgcagaaggcgggctttctgtattacgaggatctggcgagccgcgttagtaaagaagaagccgatgccgttacgctcatcgtgaagaacacggtgcgtacctttctgccggatgcgctggtgaccatcaccggcggtttccgccgtggcaaacctatgggccacgacgttgactttctgatcacgaatccgggcccgaaagaggatgacgagctgctccacaaagtggttgatctgctcaagaagcaaggtctgctgctgtacgaagacatcaaagagagcacgttcgtggaggggcaactgccaagtcgcaaaatcgacgccatggacaacttccagaagtgcttcgccattctcaagctgtaccagccgggcgtggataacagtgcggttgggacgagtaagaaaagtgacatggccgaggttaaggattggaaagcgattcgtgtggatctggtgatcacgccattcgagcagtacgcctatgcgctgctcggttggacgggcagcaaagaatttcgtcgcgatctgcgccgctatgcggaggaagagcgcggcatgatcctcgacaaccatgccctctacgacctgaaaaagcgcatctttctgaaagcgggcagcgaagaagagattttcgcgcatctgggtctggattatgtggagccgtgggaacgcaacgcg

SEQ ID NO: 2342 - protein, 394 aa, synthetic construct
  REGION 1..394: note = Variant of terminal deoxynucleotidyl transferase
MHHHHHHGGSGHPPSNTPEGEVPSVIARPVSQYSCQRKTTLNNYNKKFTDALEIMAENYKFKENLIACLEAKRAASILKYLPFEVTSMKDIQGLPCITDQVRDVIEEIIEEGESSRVKEVLNDERYKAFKQFTSVFGVGVKTAEKWFRMGLRTVEEAKASKSLKLNKMQKAGFLYYEDLASRVSKEEADAVTLIVKNTVRTFLPDALVTITGGFRRGKPMGHDVDFLITNPGPKEDDELLHKVVDLLKKQGLLLYEDIKESTFVEGQLPSRKIDAMDNFQKCFAILKLYQPGVDNSAVGTSKKSDMAEVKDWKAIRVDLVITPFEQYAYALLGWTGSKEFRRDLRRYAEEERGMILDNHALYDLKKRIFLKAGSEEEIFAHLGLDYVEPWERNA

SEQ ID NO: 2343 - DNA, 1182 bp, synthetic construct; identical to SEQ ID NO: 2293
  misc_feature 1..1182: note = Variant of terminal deoxynucleotidyl transferase
  source 1..1182: mol_type = other DNA

SEQ ID NO: 2344 - protein, 394 aa, synthetic construct; identical to SEQ ID NO: 2294
  REGION 1..394: note = Variant of terminal deoxynucleotidyl transferase

SEQ ID NO: 2345 - DNA, 1182 bp, synthetic construct; identical to SEQ ID NO: 2287
  misc_feature 1..1182: note = Variant of terminal deoxynucleotidyl transferase
  source 1..1182: mol_type = other DNA

SEQ ID NO: 2346 - protein, 394 aa, synthetic construct; identical to SEQ ID NO: 2288
  REGION 1..394: note = Variant of terminal deoxynucleotidyl transferase

SEQ ID NO: 2347 - DNA, 1182 bp, synthetic construct; identical to SEQ ID NO: 2305
  misc_feature 1..1182: note = Variant of terminal deoxynucleotidyl transferase
  source 1..1182: mol_type = other DNA

SEQ ID NO: 2348 - protein, 394 aa, synthetic construct; identical to SEQ ID NO: 2306
  REGION 1..394: note = Variant of terminal deoxynucleotidyl transferase

SEQ ID NO: 2349 - DNA, 1182 bp, synthetic construct; identical to SEQ ID NO: 2297
  misc_feature 1..1182: note = Variant of terminal deoxynucleotidyl transferase
  source 1..1182: mol_type = other DNA

SEQ ID NO: 2350 - protein, 394 aa, synthetic construct; identical to SEQ ID NO: 2298
  REGION 1..394: note = Variant of terminal deoxynucleotidyl transferase

SEQ ID NO: 2351 - DNA, 1182 bp, synthetic construct
  misc_feature 1..1182: note = Variant of terminal deoxynucleotidyl transferase
  source 1..1182: mol_type = other DNA
atgcatcaccaccatcatcatgggggttctggtcatccgccgagcaataccccggagggggaggtgccgagcgttatcgcccgtccggttagtcagtacagctgccagcgcaagaccacgctgaataactacaacaaaaagtttaccgacgcgctggagatcatggccgagaactacaaatttaaagagaacctgatcgcgtgtctggaagccaagcgcgccgcgagtattctgaaatatctgccgttcgaggttaccagcatgaaagacatccaaggtctgccgtgcattaccgaccaagttcgtgacgtgatcgaggagatcatcgaagagggcgagagcagccgtgttaaagaagttctcaatgacgagcgctacaaggcctttaagcagttcaccagcgtgttcggtgtgggcgtgaaaaccgcggaaaagtggtttcgtatgggcctccgtacggttgaagaagcaaaggccagtaagagtctgaagctgagcaagatgcagaaggcgggctttctgtattacgaggatctggcgagccgcgttagtaaagaagaagccgatgccgttacgctcatcgtgaagaacacggtgcgtacctttctgccggatgcgctggtgaccatcaccggcggtttccgccgtggcaaacctatgggccacgacgttgactttctgatcacgaatccgggcccgaaagaggatgacgagctgctccacaaagtggttgatctgctcaagaagcaaggtctgctgctgtacgaagacatcaaagagagcacgttcgtggaggggcaactgccaagtcgcaaaatcgacgccatggaccgcttccagaagtgcttcgccattctcaagctgtaccagccgggcgtggataacagtgcggttgggacgagtaagaaaagtgacatggccgaggttaaggattggaaagcgattcgtgtggatctggtgatcacgccattcgagcagtacgcctatgcgctgctcggttggacgggcagcaaagaatttcgtcgcgatctgcgccgctatgcggaggaagagcgcggcatgatcctcgacaaccatgccctctacgacctgaaaaagcgcatctttctgaaagcgggcagcgaagaagagattttcgcgcatctgggtctggattatgtggagccgtgggaacgcaacgcg

SEQ ID NO: 2352 - protein, 394 aa, synthetic construct
  REGION 1..394: note = Variant of terminal deoxynucleotidyl transferase
MHHHHHHGGSGHPPSNTPEGEVPSVIARPVSQYSCQRKTTLNNYNKKFTDALEIMAENYKFKENLIACLEAKRAASILKYLPFEVTSMKDIQGLPCITDQVRDVIEEIIEEGESSRVKEVLNDERYKAFKQFTSVFGVGVKTAEKWFRMGLRTVEEAKASKSLKLSKMQKAGFLYYEDLASRVSKEEADAVTLIVKNTVRTFLPDALVTITGGFRRGKPMGHDVDFLITNPGPKEDDELLHKVVDLLKKQGLLLYEDIKESTFVEGQLPSRKIDAMDRFQKCFAILKLYQPGVDNSAVGTSKKSDMAEVKDWKAIRVDLVITPFEQYAYALLGWTGSKEFRRDLRRYAEEERGMILDNHALYDLKKRIFLKAGSEEEIFAHLGLDYVEPWERNA

SEQ ID NO: 2353 - DNA, 1182 bp, synthetic construct
  misc_feature 1..1182: note = Variant of terminal deoxynucleotidyl transferase
  source 1..1182: mol_type = other DNA
atgcatcaccaccatcatcatgggggttctggtcatccgccgagcaataccccggagggggaggtgccgagcgttatcgcccgtccggttagtcagtacgcgtgccagcgcaagaccacgctgaataactacaacaaaaagttcaccgacgcgctggagatcatggccgagaactacaaatttaaagagaacctgatcgcgtgtctggaagccaagcgcgccgcgagtatttttaaatatctgccgttcgaggttaccagcatgaaagacatccaaggtctgccgtgcattaccgaccaagttcgtgacgtgatcgaggagatcatcgaagagggcgagagcagccgtgttaaagaagttctcaatgacgagcgctacaaggcctttaagcagttcaccagcgtgttcggtgtgggcgtgaaaaccgcggaaaagtggtaccgtatgggcctccgtacggttgaagaagcaaaggccagtaagagtctgaagctgagcaagatgcagaaggcgggctttctgtattacgaggatctggcgagcatggttagtaaagaagaagccgatgccgttacgctcatcgtgaagaacacggtgcgtacctttctgccggatgcgctggtgaccatcaccggcggtttccgccgtggcaaacctatgggccacgacgttgactttctgatcacgaacccgggccgcaaagaggatgacgagctgctccacaaagtggttgatctgctcaagaagcaaggtctgctgctgtacgaagacatcaaagagagcacgttcgtggaggggcaactgccaagtcataaaatcgacgccatggacaacttccagaagtgcttcgccattctcaagctgtaccagccgggcgtggataacagtgcggttgggacgagtaagaaaagtgacatggctgaggttaaggattggaaagcgattcgtgtggatctggtgatcacgccattcgagcagtacgcctatgcgctgctcggttggacgggcagcaaacaatttcgtcgcgatctgcgtcgctatgcggaggaagagcgcggcatgatcctcgacaaccatgccctctacgacctgaaaaagcgcatctttctgaaagcgggcagcgaagaagagattttcgcgcatctgggtctggattatgtggagccgtgggaacgcaacgcg

SEQ ID NO: 2354 - protein, 394 aa, synthetic construct
  REGION 1..394: note = Variant of terminal deoxynucleotidyl transferase
MHHHHHHGGSGHPPSNTPEGEVPSVIARPVSQYACQRKTTLNNYNKKFTDALEIMAENYKFKENLIACLEAKRAASIFKYLPFEVTSMKDIQGLPCITDQVRDVIEEIIEEGESSRVKEVLNDERYKAFKQFTSVFGVGVKTAEKWYRMGLRTVEEAKASKSLKLSKMQKAGFLYYEDLASMVSKEEADAVTLIVKNTVRTFLPDALVTITGGFRRGKPMGHDVDFLITNPGRKEDDELLHKVVDLLKKQGLLLYEDIKESTFVEGQLPSHKIDAMDNFQKCFAILKLYQPGVDNSAVGTSKKSDMAEVKDWKAIRVDLVITPFEQYAYALLGWTGSKQFRRDLRRYAEEERGMILDNHALYDLKKRIFLKAGSEEEIFAHLGLDYVEPWERNA

SEQ ID NO: 2355 - DNA, 1182 bp, synthetic construct
  misc_feature 1..1182: note = Variant of terminal deoxynucleotidyl transferase
  source 1..1182: mol_type = other DNA
atgcatcaccaccatcatcatgggggttctggtcatccgccgagcaataccccggagggggaggtgccgagcgttatcgcccgtccggttagtcagtacgcgtgccagcgcaagaccacgctgaataactacaacaaaaagttcaccgacgcgctggagatcatggccgagaactacaaatttaaagagaacctgatcgcgtgtctggaagccaagcgcgccgcgagtattctgaaatatctgccgttcgaggttaccagcatgaaagacatccaaggtctgccgtgcattaccgaccaagttcgtgacgtgatcgaggagatcatcgaagagggcgagagcagccgtgttaaagaagttctcaatgacgagcgctacaaggcctttaagcagttcaccagcgtgttcggtgtgggcgtgaaaaccgcggaaaagtggtaccgtatgggcctccgtacggttgaagaagcaaaggccagtaagagtctgaagctgagcaagatgcagaaggcgggctttctgtattacgaggatctggcgagcggcgttagtaaagaagaagccgatgccgttacgctcatcgtgaagaacacggtgcgtacctttctgccggatgcgctggtgaccatcaccggcggtttccgccgtggcaaacctatgggccacgacgttgactttctgatcacgaatccgggcccgaaagaggatgacgagctgctccacaaagtggttgatctgctcaagaagcaaggtctgctgctgtacgaagacatcaaagagagcacgttcgtggaggggcaactgccaagtcgtaaaatcgacgccatggacaacttccagaagtgcttcgccattctcaagctgtaccagccgggcgtggataacagtgcggttgggacgagtaagaaaagtgacatggctgaggttaaggattggaaagcgattcgtgtggatctggtgatcacgccattcgagcagtacgcctatgcgctgctcggttggacgggcagcaaagaatttcgtcgcgatctgaagcgctatgcggaggaagagcgcggcatgatcctcgacaaccatgccctctacgacctgaaaaagcgcatctttctgaaagcgggcagcgaagaagagattttcgcgcatctgggtctggattatgtggagccgtgggaacgcaacgcg

SEQ ID NO: 2356 - protein, 394 aa, synthetic construct
  REGION 1..394: note = Variant of terminal deoxynucleotidyl transferase
MHHHHHHGGSGHPPSNTPEGEVPSVIARPVSQYACQRKTTLNNYNKKFTDALEIMAENYKFKENLIACLEAKRAASILKYLPFEVTSMKDIQGLPCITDQVRDVIEEIIEEGESSRVKEVLNDERYKAFKQFTSVFGVGVKTAEKWYRMGLRTVEEAKASKSLKLSKMQKAGFLYYEDLASGVSKEEADAVTLIVKNTVRTFLPDALVTITGGFRRGKPMGHDVDFLITNPGPKEDDELLHKVVDLLKKQGLLLYEDIKESTFVEGQLPSRKIDAMDNFQKCFAILKLYQPGVDNSAVGTSKKSDMAEVKDWKAIRVDLVITPFEQYAYALLGWTGSKEFRRDLKRYAEEERGMILDNHALYDLKKRIFLKAGSEEEIFAHLGLDYVEPWERNA

SEQ ID NO: 2357 - DNA, 1182 bp, synthetic construct
  misc_feature 1..1182: note = Variant of terminal deoxynucleotidyl transferase
  source 1..1182: mol_type = other DNA
atgcatcaccaccatcatcatgggggttctggtcatccgccgagcaataccccggagggggaggtgccgagcgttatcgcccgtccggttagtcagtactcgtgccagcgcaagaccacgctgaataactacaacaaaaagttcaccgacgcgctggagatcatggccgagaactacaaatttaaagagaacctgatcgcgtgtctggaagccaagcgcgccgcgagtatttttaaatatctgccgttcgaggttaccagcatgaaagacatccaaggtctgccgtgcattaccgaccaagttcgtgacgtgatcgaggagatcatcgaagagggcgagagcagccgtgttaaagaagttctcaatgacgagcgctacaaggcctttaagcagttcaccagcgtgttcggtgtgggcgtgaaaaccgcggaaaagtggtaccgtatgggcctccgtacggttgaagaagcaaaggccagtaagagtctgaagctgagcaagatgcagaaggcgggctttctgtattacgaggatctggcgagcatggttagtaaagaagaagccgatgccgttacgctcatcgtgaagaacacggtgcgtacctttctgccggatgcgctggtgaccatcaccggcggtttccgccgtggcaaacctatgggccacgacgttgactttctgatcacgaatccgggcccgaaagaggatgacgagctgctccacaaagtggttgatctgctcaagaagcaaggtctgctgctgtacgaagacatcaaagagagcacgttcgtggaggggcaactgccaagtcgtaaaatcgacgccatggacaacttccagaagtgcttcgccattctcaagctgtaccagccgggcgtggataacagtgcggttgggacgagtaagaaaagtgacatggccgaggttaaggattggaaagcgattcgtgtggatctggtgatcacgccattcgagcagtacgcctatgcgctgctcggttggacgggcagcaaacaatttcgtcgcgatctgaagcgctatgcggaggaagagcgcggcatgatcctcgacaaccatgccctctacgacctgaaaaagcgcatctttctgaaagcgggcagcgaagaagagattttcgcgcatctgggtctggattatgtggagccgtgggaacgcaacgcg

SEQ ID NO: 2358 - protein, 394 aa, synthetic construct
  REGION 1..394: note = Variant of terminal deoxynucleotidyl transferase
MHHHHHHGGSGHPPSNTPEGEVPSVIARPVSQYSCQRKTTLNNYNKKFTDALEIMAENYKFKENLIACLEAKRAASIFKYLPFEVTSMKDIQGLPCITDQVRDVIEEIIEEGESSRVKEVLNDERYKAFKQFTSVFGVGVKTAEKWYRMGLRTVEEAKASKSLKLSKMQKAGFLYYEDLASMVSKEEADAVTLIVKNTVRTFLPDALVTITGGFRRGKPMGHDVDFLITNPGPKEDDELLHKVVDLLKKQGLLLYEDIKESTFVEGQLPSRKIDAMDNFQKCFAILKLYQPGVDNSAVGTSKKSDMAEVKDWKAIRVDLVITPFEQYAYALLGWTGSKQFRRDLKRYAEEERGMILDNHALYDLKKRIFLKAGSEEEIFAHLGLDYVEPWERNA

SEQ ID NO: 2359 - DNA, 1182 bp, synthetic construct
  misc_feature 1..1182: note = Variant of terminal deoxynucleotidyl transferase
  source 1..1182: mol_type = other DNA
atgcatcaccaccatcatcatgggggttctggtcatccgccaagcaataccccggagggggaggtgccgagcgttatcgcccgtccggttagtcagtacagctgccagcgcaagaccacgctgaataactacaacaaaaagtttaccgacgcgctggagatcatggccgagaactacaaatttaaagagaacctgatcgcgtgtctggaagccaagcgcgccgcgagtattctgaaatatctgccgttcgaggttaccagcatgaaagacatccaaggtctgccgtgcattaccgaccaagttcgtgacgtgatcgaggagatcatcgaagagggcgagagcagccgtgttaaagaagttctcaatgacgagcgctacaaggcctttaagcagttcaccagcgtgttcggtgtgggcgtgaaaaccgcggaaaagtggtaccgtatgggcctccgtacggttgaagaagcaaaggccagtaagagtctgaagctgagcaagatgcagaaggcgggctttctgtattacgaggatctggcgagccgcgttagtaaagaagaagccgatgccgttacgctcatcgtgaagaacacggtgcgtacctttctgccggatgcgctggtgaccatcaccggcggtttccgccgtggcaaacctatgggccacgacgttgactttctgatcacgaacccgaacggcaaagaggatgacgagctgctccacaaagtggttgatctgctcaagaagcaaggtctgctgctgtacgaagacatcaaagagagcacgttcgtggaggggcaactgccaagtcataaaatcgacgccatggacaacttccagaagtgcttcgccattctcaagctgtaccagccgggcgtggataacagtgcggttgggacgagtaagaaaagtgacatggctgaggttaaggattggaaagcggttcgtgtggatctggtgatcacgccattcgagcagtacgcctatgcgctgctcggttggacgggcagcaaacaatttcgtcgcgatctgcgtcgctatgcggaggaagagcgcggcatgatcctcgacaaccatgccctctacgacctgaaaaagcgcatctttctgaaagcgggcagcgaagaagagattttcgcgcatctgggtctggattatgtggagccgtgggaacgcaacgcg

SEQ ID NO: 2360 - protein, 394 aa, synthetic construct
  REGION 1..394: note = Variant of terminal deoxynucleotidyl transferase
MHHHHHHGGSGHPPSNTPEGEVPSVIARPVSQYSCQRKTTLNNYNKKFTDALEIMAENYKFKENLIACLEAKRAASILKYLPFEVTSMKDIQGLPCITDQVRDVIEEIIEEGESSRVKEVLNDERYKAFKQFTSVFGVGVKTAEKWYRMGLRTVEEAKASKSLKLSKMQKAGFLYYEDLASRVSKEEADAVTLIVKNTVRTFLPDALVTITGGFRRGKPMGHDVDFLITNPNGKEDDELLHKVVDLLKKQGLLLYEDIKESTFVEGQLPSHKIDAMDNFQKCFAILKLYQPGVDNSAVGTSKKSDMAEVKDWKAVRVDLVITPFEQYAYALLGWTGSKQFRRDLRRYAEEERGMILDNHALYDLKKRIFLKAGSEEEIFAHLGLDYVEPWERNA

SEQ ID NO: 2361 - DNA, 1182 bp, synthetic construct
  misc_feature 1..1182: note = Variant of terminal deoxynucleotidyl transferase
  source 1..1182: mol_type = other DNA
atgcatcaccaccatcatcatgggggttctggtcatccgccgagcaataccccggagggggaggtgccgagcgttatcgcccgtccggttagtcagtacgcgtgccagcgcaagaccacgctgaataactacaacaaaaagctgaccgacgcgctggagatcatggccgagaactacaaatttaaagagaacctgatcgcgtgtctggaagccaagcgcgccgcgagtattctgaaatatctgccgttcgaggttaccagcatgaaagacatccaaggtctgccgtgcattaccgaccaagttcgtgacgtgatcgaggagatcatcgaagagggcgagagcagccgtgttaaagaagttctcaatgacgagcgctacaaggcctttaagcagttcaccagcgtgttcggtgtgggcgtgaaaaccgcggaaaagtggtaccgtatgggcctccgtacggttgaagaagcacgcgccagtaagagtctgaagctgagcaagatgcagaaggcgggctttctgtattacgaggatctggcgagcatggttagtaaagaagaagccgatgccgttacgctcatcgtgaagaacacggtgcgtacctttctgccggatgcgctggtgaccatcaccggcggtttccgccgtggcaaacctgtgggccacgacgttgactttctgatcacgaacccgggccgcaaagaggatgacgagctgctccacaaagtggttgatctgctcaagaagcaaggtctgctgctgtacgaagacatcaaagagagcacgttcgtggaggggcaactgccaagtcgcaaaatcgacgccatggacaacttccagaagtgcttcgccattctcaagctgtaccagccgggcgtggataacagtgcggttgggacgagtaagaaaagtgacatgggtgaggttaaggattggaaagcgattcgtgtggatctggtgatcacgccattcgagcagtacgcctatgcgctgctcggttggacgggcagcaaagaatttcgtcgcgatctgcgccgctatgcggaggaagagcgcggcatgatcctcgacaaccatgccctctacgacctgaaaaagcgcatctttctgaaagcgggcagcgaagaagagattttcgcgcatctgggtctggattatgtggagccgtgggaacgcaacgcg

SEQ ID NO: 2362 - protein, 394 aa, synthetic construct
  REGION 1..394: note = Variant of terminal deoxynucleotidyl transferase
MHHHHHHGGSGHPPSNTPEGEVPSVIARPVSQYACQRKTTLNNYNKKLTDALEIMAENYKFKENLIACLEAKRAASILKYLPFEVTSMKDIQGLPCITDQVRDVIEEIIEEGESSRVKEVLNDERYKAFKQFTSVFGVGVKTAEKWYRMGLRTVEEARASKSLKLSKMQKAGFLYYEDLASMVSKEEADAVTLIVKNTVRTFLPDALVTITGGFRRGKPVGHDVDFLITNPGRKEDDELLHKVVDLLKKQGLLLYEDIKESTFVEGQLPSRKIDAMDNFQKCFAILKLYQPGVDNSAVGTSKKSDMGEVKDWKAIRVDLVITPFEQYAYALLGWTGSKEFRRDLRRYAEEERGMILDNHALYDLKKRIFLKAGSEEEIFAHLGLDYVEPWERNA

SEQ ID NO: 2363 - DNA, 1182 bp, synthetic construct
  misc_feature 1..1182: note = Variant of terminal deoxynucleotidyl transferase
  source 1..1182: mol_type = other DNA
atgcatcaccaccatcatcatgggggttctggtcatccgccgagcaataccccggagggggaggtgccgagcgttatcgcccgtccggttagtcagtacgcgtgccagcgcaagaccacgctgaataactacaacaaaaagtttaccgacgcgctggagatcatggccgagaactacaaatttaaagagaacctgatcgcgtgtctggaagccaagcgcgccgcgagtattctgaaatatctgccgttcgaggttaccagcatgaaagacatccaaggtctgccgtgcattaccgaccaagttcgtgacgtgatcgaggagatcatcgaagagggcgagagcagccgtgttaaagaagttctcaatgacgagcgctacaaggcctttaagcagttcaccagcgtgttcggtgtgggcgtgaaaaccgcggaaaagtggtaccgtatgggcctccgtacggttgaagaagcaaaggccagtaagagtctgaagctgagcaagatgcagaaggcgggctttctgtattacgaggatctggcgagccgcgttagtaaagaagaagccgatgccgttacgctcatcgtgaagaacacggtgcgtacctttctgccggatgcgctggtgaccatcaccggcggtttccgccgtggcaaacctatgggccacgacgttgactttctgatcacgaatccgggcccgaaagaggatgacgagctgctccacaaagtggttgatctgctcaagaagcaaggtctgctgctgtacgaagacatcaaagagagcacgttcgtggaggggcaactgccaagtcgtaaaatcgacgccatggacaacttccagaagtgcttcgccattctcaagctgtaccagccgggcgtggataacagtgcggttgggacgagtaagaaaagtgacatggccgaggttaaggattggaaagcggttcgtgtggatctggtgatcacgccattcgagcagtacgcctatgcgctgctcggttggacgggcagcaaacaatttcgtcgcgatctgcgccgctatgcggaggaagagcgcggcatgatcctcgacaaccatgccctctacgacctgaaaaagcgcatctttctgaaagcgggcagcgaagaagagattttcgcgcatctgggtctggattatgtggagccgtgggaacgcaacgcg

SEQ ID NO: 2364 - protein, 394 aa, synthetic construct
  REGION 1..394: note = Variant of terminal deoxynucleotidyl transferase
MHHHHHHGGSGHPPSNTPEGEVPSVIARPVSQYACQRKTTLNNYNKKFTDALEIMAENYKFKENLIACLEAKRAASILKYLPFEVTSMKDIQGLPCITDQVRDVIEEIIEEGESSRVKEVLNDERYKAFKQFTSVFGVGVKTAEKWYRMGLRTVEEAKASKSLKLSKMQKAGFLYYEDLASRVSKEEADAVTLIVKNTVRTFLPDALVTITGGFRRGKPMGHDVDFLITNPGPKEDDELLHKVVDLLKKQGLLLYEDIKESTFVEGQLPSRKIDAMDNFQKCFAILKLYQPGVDNSAVGTSKKSDMAEVKDWKAVRVDLVITPFEQYAYALLGWTGSKQFRRDLRRYAEEERGMILDNHALYDLKKRIFLKAGSEEEIFAHLGLDYVEPWERNA

SEQ ID NO: 2365 - DNA, 1182 bp, synthetic construct
  misc_feature 1..1182: note = Variant of terminal deoxynucleotidyl transferase
  source 1..1182: mol_type = other DNA
atgcatcaccaccatcatcatgggggttctggtcatccgccaagcaataccccggagggggaggtgccgagcgttatcgcccgtccggttagtcagtacgcgtgccagcgcaagaccacgctgaataactacaacaaaaagttcaccgacgcgctggagatcatggccgagaactacaaatttaaagagaacctgatcgcgtgtctggaagccaagcgcgccgcgagtattctgaaatatctgccgttcgaggttaccagcatgaaagacatccaaggtctgccgtgcattaccgaccaagttcgtgacgtgatcgaggagatcatcgaagagggcgagagcagccgtgttaaagaagttctcaatgacgagcgctacaaggcctttaagcagttcaccagcgtgttcggtgtgggcgtgaaaaccgcggaaaagtggtaccgtatgggcctccgtacggttgaagaagcaaaggccagtaagagtctgaagctgagcaagatgcagaaggcgggctttctgtattacgaggatctggcgagcatggttagtaaagaagaagccgatgccgttacgctcatcgtgaagaacacggtgcgtacctttctgccggatgcgctggtgaccatcaccggcggtttccgccgtggcaaacctatgggccacgacgttgactttctgatcacgaatccgggccctaaagaggatgacgagctgctccacaaagtggttgatctgctcaagacgcaaggtctgctgctgtacgaagacatcaaagagagcacgttcgtggaggggcaactgccaagtcgcaaaatcgacgccatggacaacttccagaagtgcttcgccattctcaagctgtaccagccgggcgtggataacagtgcggttgggacgagtaagaaaagtgacatgggtgaggttaaggattggaaagcggttcgtgtggatctggtgatcacgccattcgagcagtacgcctatgcgctgctcggttggacgggcagcaaacaatttcgtcgcgatctgcgtcgctatgcggaggaagagcgcggcatgatcctcgacaaccatgccctctacgacctgaaaaagcgcatctttctgaaagcgggcagcgaagaagagattttcgcgcatctgggtctggattatgtggagccgtgggaacgcaacgcg

SEQ ID NO: 2366 - protein, 394 aa, synthetic construct
  REGION 1..394: note = Variant of terminal deoxynucleotidyl transferase
MHHHHHHGGSGHPPSNTPEGEVPSVIARPVSQYACQRKTTLNNYNKKFTDALEIMAENYKFKENLIACLEAKRAASILKYLPFEVTSMKDIQGLPCITDQVRDVIEEIIEEGESSRVKEVLNDERYKAFKQFTSVFGVGVKTAEKWYRMGLRTVEEAKASKSLKLSKMQKAGFLYYEDLASMVSKEEADAVTLIVKNTVRTFLPDALVTITGGFRRGKPMGHDVDFLITNPGPKEDDELLHKVVDLLKTQGLLLYEDIKESTFVEGQLPSRKIDAMDNFQKCFAILKLYQPGVDNSAVGTSKKSDMGEVKDWKAVRVDLVITPFEQYAYALLGWTGSKQFRRDLRRYAEEERGMILDNHALYDLKKRIFLKAGSEEEIFAHLGLDYVEPWERNA

SEQ ID NO: 2367 - DNA, 1182 bp, synthetic construct
  misc_feature 1..1182: note = Variant of terminal deoxynucleotidyl transferase
  source 1..1182: mol_type = other DNA
atgcatcaccaccatcatcatgggggttctggtcatccgccgagcaataccccggagggggaggtgccgagcgttatcgcccgtccggttagtcagtacgcgtgccagcgcaagaccacgctgaataactacaacaaaaagttcaccgacgcgctggagatcatggccgagaactacaaatttaaagagaacctgatcgcgtgtctggaagccaagcgcgccgcgagtattctgaaatatctgccgttcgaggttaccagcatgaaagacatccaaggtctgccgtgcattaccgaccaagttcgtgacgtgatcgaggagatcatcgaagagggcgagagcagccgtgttaaagaagttctcaatgacgagcgctacaaggcctttaagcagttcaccagcgtgttcggtgtgggcgtgaaaaccgcggaaaagtggttccgtatgggcctccgtacggttgaagaagcacgcgccagtaagagtctgaagctgagcaagatgcagaaggcgggctttctgtattacgaggatctggcgagcggcgttagtaaagaagaagccgatgccgttacgctcatcgtgaagaacacggtgcgtacctttctgccggatgcgctggtgaccatcaccggcggtttccgccgtggcaaacctatgggccacgacgttgactttctgatcacgaatccgggcccgaaagaggatgacgagctgctccacaaagtggttgatctgctcaagaagcaaggtctgctgctgtacgaagacatcaaagagagcacgttcgtggaggggcaactgccaagtcgcaaaatcgacgccatggacaacttccagaagtgcttcgccattctcaagctgtaccagccgggcgtggataacagtgcggttgggacgagtaagaaaagtgacatggctgaggttaaggattggaaagcggttcgtgtggatctggtgatcacgccattcgagcagtacgcctatgcgctgctcggttggacgggcagcaaacaatttcgtcgcgatctgaagcgctatgcggaggaagagcgcggcatgatcctcgacaaccatgccctctacgacctgaaaaagcgcatctttctgaaagcgggcagcgaagaagagattttcgcgcatctgggtctggattatgtggagccgtgggaacgcaacgcg

SEQ ID NO: 2368 - protein, 394 aa, synthetic construct
  REGION 1..394: note = Variant of terminal deoxynucleotidyl transferase
MHHHHHHGGSGHPPSNTPEGEVPSVIARPVSQYACQRKTTLNNYNKKFTDALEIMAENYKFKENLIACLEAKRAASILKYLPFEVTSMKDIQGLPCITDQVRDVIEEIIEEGESSRVKEVLNDERYKAFKQFTSVFGVGVKTAEKWFRMGLRTVEEARASKSLKLSKMQKAGFLYYEDLASGVSKEEADAVTLIVKNTVRTFLPDALVTITGGFRRGKPMGHDVDFLITNPGPKEDDELLHKVVDLLKKQGLLLYEDIKESTFVEGQLPSRKIDAMDNFQKCFAILKLYQPGVDNSAVGTSKKSDMAEVKDWKAVRVDLVITPFEQYAYALLGWTGSKQFRRDLKRYAEEERGMILDNHALYDLKKRIFLKAGSEEEIFAHLGLDYVEPWERNA

SEQ ID NO: 2369 - DNA, 1182 bp, synthetic construct
  misc_feature 1..1182: note = Variant of terminal deoxynucleotidyl transferase
  source 1..1182: mol_type = other DNA
atgcatcaccaccatcatcatgggggttctggtcatccgccgagcaataccccggagggggaggtgccgagcgttatcgcccgtccggttagtcagtacgcgtgccagcgcaagaccacgctgaataactacaacaaaaagtttaccgacgcgctggagatcatggccgagaactacaaatttaaagagaacctgatcgcgtgtctggaagccaagcgcgccgcgagtattctgaaatatctgccgttcgaggttaccagcatgaaagacatccaaggtctgccgtgcattaccgaccaagttcgtgacgtgatcgaggagatcatcgaagagggcgagagcagccgtgttaaagaagttctcaatgacgagcgctacaaggcctttaagcagttcaccagcgtgttcggtgtgggcgtgaaaaccgcggaaaagtggtaccgtatgggcctccgtacggttgaagaagcaaaggccagtaagagtctgaagctgagcaagatgcagaaggcgggctttctgtattacgaggatctggcgagcatggttagtaaagaagaagccgatgccgttacgctcatcgtgaagaacacggtgcgtacctttctgccggatgcgctggtgaccatcaccggcggtttccgccgtggcaaacctatgggccacgacgttgactttctgatcacgaatccgggcccgaaagaggatgacgagctgctccacaaagtggttgatctgctcaagaagcaaggtctgctgctgtacgaagacatcaaagagagcacgttcgtggaggggcaactgccaagtcgcaaaatcgacgccatggacaacttccagaagtgcttcgccattctcaagctgtaccagccgggcgtggataacagtgcggttgggacgagtaagaaaagtgacatggctgaggttaaggattggaaagcggttcgtgtggatctggtgatcacgccattcgagcagtacgcctatgcgctgctcggttggacgggcagcaaagaatttcgtcgcgatctgcgccgctatgcggaggaagagcgcggcatgatcctcgacaaccatgccctctacgacctgaaaaagcgcatctttctgaaagcgggcagcgaagaagagattttcgcgcatctgggtctggattatgtggagccgtgggaacgcaacgcg

SEQ ID NO: 2370 - protein, 394 aa, synthetic construct
  REGION 1..394: note = Variant of terminal deoxynucleotidyl transferase
MHHHHHHGGSGHPPSNTPEGEVPSVIARPVSQYACQRKTTLNNYNKKFTDALEIMAENYKFKENLIACLEAKRAASILKYLPFEVTSMKDIQGLPCITDQVRDVIEEIIEEGESSRVKEVLNDERYKAFKQFTSVFGVGVKTAEKWYRMGLRTVEEAKASKSLKLSKMQKAGFLYYEDLASMVSKEEADAVTLIVKNTVRTFLPDALVTITGGFRRGKPMGHDVDFLITNPGPKEDDELLHKVVDLLKKQGLLLYEDIKESTFVEGQLPSRKIDAMDNFQKCFAILKLYQPGVDNSAVGTSKKSDMAEVKDWKAVRVDLVITPFEQYAYALLGWTGSKEFRRDLRRYAEEERGMILDNHALYDLKKRIFLKAGSEEEIFAHLGLDYVEPWERNA

SEQ ID NO: 2371 - DNA, 1182 bp, synthetic construct
  misc_feature 1..1182: note = Variant of terminal deoxynucleotidyl transferase
  source 1..1182: mol_type = other DNA
atgcatcaccaccatcatcatgggggttctggtcatccgccgagcaataccccggagggggaggtgccgagcgttatcgcccgtccggttagtcagtactcgtgccagcgcaagaccacgctgaataactacaacaaaaagctgaccgacgcgctggagatcatggccgagaactacaaatttaaagagaacctgatcgcgtgtctggaagccaagcgcgccgcgagtatttttaaatatctgccgttcgaggttaccagcatgaaagacatccaaggtctgccgtgcattaccgaccaagttcgtgacgtgatcgaggagatcatcgaagagggcgagagcagccgtgttaaagaagttctcaatgacgagcgctacaaggcctttaagcagttcaccagcgtgttcggtgtgggcgtgaaaaccgcggaaaagtggttccgtatgggcctccgtacggttgaagaagcacgcgccagtaagagtctgaagctgagcaagatgcagaaggcgggctttctgtattacgaggatctggcgagcggcgttagtaaagaagaagccgatgccgttacgctcatcgtgaagaacacggtgcgtacctttctgccggatgcgctggtgaccatcaccggcggtttccgccgtggcaaacctgtgggccacgacgttgactttctgatcacgaacccgggcggcaaagaggatgacgagctgctccacaaagtggttgatctgctcaagacgcaaggtctgctgctgtacgaagacatcaaagagagcacgttcgtggaggggcaactgccaagtcgcaaaatcgacgccatggacaacttccagaagtgcttcgccattctcaagctgtaccagccgggcgtggataacagtgcggttgggacgagtaagaaaagtgacatggccgaggttaaggattggaaagcgattcgtgtggatctggtgatcacgccattcgagcagtacgcctatgcgctgctcggttggacgggcagcaaagaatttcgtcgcgatctgcgccgctatgcggaggaagagcgcggcatgatcctcgacaaccatgccctctacgacctgaaaaagcgcatctttctgaaagcgggcagcgaagaagagattttcgcgcatctgggtctggattatgtggagccgtgggaacgcaacgcg

SEQ ID NO: 2372 - protein, 394 aa, synthetic construct
  REGION 1..394: note = Variant of terminal deoxynucleotidyl transferase
MHHHHHHGGSGHPPSNTPEGEVPSVIARPVSQYSCQRKTTLNNYNKKLTDALEIMAENYKFKENLIACLEAKRAASIFKYLPFEVTSMKDIQGLPCITDQVRDVIEEIIEEGESSRVKEVLNDERYKAFKQFTSVFGVGVKTAEKWFRMGLRTVEEARASKSLKLSKMQKAGFLYYEDLASGVSKEEADAVTLIVKNTVRTFLPDALVTITGGFRRGKPVGHDVDFLITNPGGKEDDELLHKVVDLLKTQGLLLYEDIKESTFVEGQLPSRKIDAMDNFQKCFAILKLYQPGVDNSAVGTSKKSDMAEVKDWKAIRVDLVITPFEQYAYALLGWTGSKEFRRDLRRYAEEERGMILDNHALYDLKKRIFLKAGSEEEIFAHLGLDYVEPWERNA

SEQ ID NO: 2373 - DNA, 1182 bp, synthetic construct
  misc_feature 1..1182: note = Variant of terminal deoxynucleotidyl transferase
  source 1..1182: mol_type = other DNA
atgcatcaccaccatcatcatgggggttctggtcatccgccgagcaataccccggagggggaggtgccgagcgttatcgcccgtccggttagtcagtactcgtgccagcgcaagaccacactgaataactacaacaaaaagttcaccgacgcgctggagatcatggccgagaactacaaatttaaagagaacctgatcgcgtgtctggaagccaagcgcgccgcgagtattctgaaatatctgccgttcgaggttaccagcatgaaagacatccaaggtctgccgtgcattaccgaccaagttcgtgacgtgatcgaggagatcatcgaagagggcgagagcagccgtgttaaagaagttctcaatgacgagcgctacaaggcctttaagcagttcaccagcgtgttcggtgtgggcgtgaaaaccgcggaaaagtggtaccgtatgggcctccgtacggttgaagaagcaaaggccagtaagagtctgaagctgagcaagatgcagaaggcgggctttctgtattacgaggatctggcgagcatggttagtaaagaagaagccgatgccgttacgctcatcgtgaagaacacggtgcgtacctttctgccggatgcgctggtgaccatcaccggcggtttccgccgtggcaaacctgtgggccacgacgttgactttctgatcacgaacccgggccgcaaagaggatgacgagctgctccacaaagtggttgatctgctcaagaagcaaggtctgctgctgtacgaagacatcaaagagagcacgttcgtggaggggcaactgccaagtcgtaaaatcgacgccatggacaacttccagaagtgcttcgccattctcaagctgtaccagccgggcgtggataacagtgcggttgggacgagtaagaaaagtgacatggctgaggttaaggattggaaagcgattcgtgtggatctggtgatcacgccattcgagcagtacgcctatgcgctgctcggttggacgggcagcaaagaatttcgtcgcgatctgaagcgctatgcggaggaagagcgcggcatgatcctcgacaaccatgccctctacgacctgaaaaagcgcatctttctgaaagcgggcagcgaagaagagattttcgcgcatctgggtctggattatgtggagccgtgggaacgcaacgcg

SEQ ID NO: 2374 - protein, 394 aa, synthetic construct
  REGION 1..394: note = Variant of terminal deoxynucleotidyl transferase
MHHHHHHGGSGHPPSNTPEGEVPSVIARPVSQYSCQRKTTLNNYNKKFTDALEIMAENYKFKENLIACLEAKRAASILKYLPFEVTSMKDIQGLPCITDQVRDVIEEIIEEGESSRVKEVLNDERYKAFKQFTSVFGVGVKTAEKWYRMGLRTVEEAKASKSLKLSKMQKAGFLYYEDLASMVSKEEADAVTLIVKNTVRTFLPDALVTITGGFRRGKPVGHDVDFLITNPGRKEDDELLHKVVDLLKKQGLLLYEDIKESTFVEGQLPSRKIDAMDNFQKCFAILKLYQPGVDNSAVGTSKKSDMAEVKDWKAIRVDLVITPFEQYAYALLGWTGSKEFRRDLKRYAEEERGMILDNHALYDLKKRIFLKAGSEEEIFAHLGLDYVEPWERNA

SEQ ID NO: 2375 - DNA, 1182 bp, synthetic construct
  misc_feature 1..1182: note = Variant of terminal deoxynucleotidyl transferase
  source 1..1182: mol_type = other DNA
atgcatcaccaccatcatcatgggggttctggtcatccgccgagcaataccccggagggggaggtgccgagcgttatcgcccgtccggttagtcagtactcgtgccagcgcaagaccacgctgaataactacaacaaaaagttcaccgacgcgctggagatcatggccgagaactacaaatttaaagagaacctgatcgcgtgtctggaagccaagcgcgccgcgagtattctgaaatatctgccgttcgaggttaccagcatgaaagacatccaaggtctgccgtgcattaccgaccaagttcgtgacgtgatcgaggagatcatcgaagagggcgagagcagccgtgttaaagaagttctcaatgacgagcgctacaaggcctttaagcagttcaccagcgtgttcggtgtgggcgtgaaaaccgcggaaaagtggtaccgtatgggcctccgtacggttgaagaagcacgcgccagtaagagtctgaagctgagcaagatgcagaaggcgggctttctgtattacgaggatctggcgagcatggttagtaaagaagaagccgatgccgttacgctcatcgtgaagaacacggtgcgtacctttctgccggatgcgctggtgaccatcaccggcggtttccgccgtggcaaacctatgggccacgacgttgactttctgatcacgaacccgggccgcaaagaggatgacgagctgctccacaaagtggttgatctgctcaagaagcaaggtctgctgctgtacgaagacatcaaagagagcacgttcgtggaggggcaactgccaagtcgcaaaatcgacgccatggacaacttccagaagtgcttcgccattctcaagctgtaccagccgggcgtggataacagtgcggttgggacgagtaagaaaagtgacatggctgaggttaaggattggaaagcggttcgtgtggatctggtgatcacgccattcgagcagtacgcctatgcgctgctcggttggacgggcagcaaagaatttcgtcgcgatctgaagcgctatgcggaggaagagcgcggcatgatcctcgacaaccatgccctctacgacctgaaaaagcgcatctttctgaaagcgggcagcgaagaagagattttcgcgcatctgggtctggattatgtggagccgtgggaacgcaacgcg

SEQ ID NO: 2376 - protein, 394 aa, synthetic construct
  REGION 1..394: note = Variant of terminal deoxynucleotidyl transferase
MHHHHHHGGSGHPPSNTPEGEVPSVIARPVSQYSCQRKTTLNNYNKKFTDALEIMAENYKFKENLIACLEAKRAASILKYLPFEVTSMKDIQGLPCITDQVRDVIEEIIEEGESSRVKEVLNDERYKAFKQFTSVFGVGVKTAEKWYRMGLRTVEEARASKSLKLSKMQKAGFLYYEDLASMVSKEEADAVTLIVKNTVRTFLPDALVTITGGFRRGKPMGHDVDFLITNPGRKEDDELLHKVVDLLKKQGLLLYEDIKESTFVEGQLPSRKIDAMDNFQKCFAILKLYQPGVDNSAVGTSKKSDMAEVKDWKAVRVDLVITPFEQYAYALLGWTGSKEFRRDLKRYAEEERGMILDNHALYDLKKRIFLKAGSEEEIFAHLGLDYVEPWERNA

SEQ ID NO: 2377 - DNA, 1182 bp, synthetic construct
  misc_feature 1..1182: note = Variant of terminal deoxynucleotidyl transferase
  source 1..1182: mol_type = other DNA
atgcatcaccaccatcatcatgggggttctggtcatccgccgagcaataccccggagggggaggtgccgagcgttatcgcccgtccggttagtcagtacgcgtgccagcgcaagaccacgctgaataactacaacaaaaagtttaccgacgcgctggagatcatggccgagaactacaaatttaaagagaacctgatcgcgtgtctggaagccaagcgcgccgcgagtatttttaaatatctgccgttcgaggttaccagcatgaaagacatccaaggtctgccgtgcattaccgaccaagttcgtgacgtgatcgaggagatcatcgaagagggcgagagcagccgtgttaaagaagttctcaatgacgagcgctacaaggcctttaagcagttcaccagcgtgttcggtgtgggcgtgaaaaccgcggaaaagtggttccgtatgggcctccgtacggttgaagaagcaaaggccagtaagagtctgaagctgagcaagatgcagaaggcgggctttctgtattacgaggatctggcgagcatggttagtaaagaagaagccgatgccgttacgctcatcgtgaagaacacggtgcgtacctttctgccggatgcgctggtgaccatcaccggcggtttccgccgtggcaaacctatgggccacgacgttgactttctgatcacgaacccgggccgcaaagaggatgacgagctgctccacaaagtggttgatctgctcaagaagcaaggtctgctgctgtacgaagacatcaaagagagcacgttcgtggaggggcaactgccaagtcgtaaaatcgacgccatggacaacttccagaagtgcttcgccattctcaagctgtaccagccgggcgtggataacagtgcggttgggacgagtaagaaaagtgacatgggtgaggttaaggattggaaagcgattcgtgtggatctggtgatcacgccattcgagcagtacgcctatgcgctgctcggttggacgggcagcaaagaatttcgtcgcgatctgcgccgctatgcggaggaagagcgcggcatgatcctcgacaaccatgccctctacgacctgaaaaagcgcatctttctgaaagcgggcagcgaagaagagattttcgcgcatctgggtctggattatgtggagccgtgggaacgcaacgcg

SEQ ID NO: 2378 - protein, 394 aa, synthetic construct
  REGION 1..394: note = Variant of terminal deoxynucleotidyl transferase
MHHHHHHGGSGHPPSNTPEGEVPSVIARPVSQYACQRKTTLNNYNKKFTDALEIMAENYKFKENLIACLEAKRAASIFKYLPFEVTSMKDIQGLPCITDQVRDVIEEIIEEGESSRVKEVLNDERYKAFKQFTSVFGVGVKTAEKWFRMGLRTVEEAKASKSLKLSKMQKAGFLYYEDLASMVSKEEADAVTLIVKNTVRTFLPDALVTITGGFRRGKPMGHDVDFLITNPGRKEDDELLHKVVDLLKKQGLLLYEDIKESTFVEGQLPSRKIDAMDNFQKCFAILKLYQPGVDNSAVGTSKKSDMGEVKDWKAIRVDLVITPFEQYAYALLGWTGSKEFRRDLRRYAEEERGMILDNHALYDLKKRIFLKAGSEEEIFAHLGLDYVEPWERNA

SEQ ID NO: 2379 - DNA, 1182 bp, synthetic construct
  misc_feature 1..1182: note = Variant of terminal deoxynucleotidyl transferase
  source 1..1182: mol_type = other DNA
atgcatcaccaccatcatcatgggggttctggtcatccgccgagcaataccccggagggggaggtgccgagcgttatcgcccgtccggttagtcagtacgcgtgccagcgcaagaccacgctgaataactacaacaaaaagttcaccgacgcgctggagatcatggccgagaactacaaatttaaagagaacctgatcgcgtgtctggaagccaagcgcgccgcgagtatttttaaatatctgccgttcgaggttaccagcatgaaagacatccaaggtctgccgtgcattaccgaccaagttcgtgacgtgatcgaggagatcatcgaagagggcgagagcagccgtgttaaagaagttctcaatgacgagcgctacaaggcctttaagcagttcaccagcgtgttcggtgtgggcgtgaaaaccgcggaaaagtggttccgtatgggcctccgtacggttgaagaagcacgcgccagtaagagtctgaagctgagcaagatgcagaaggcgggctttctgtattacgaggatctggcgagcatggttagtaaagaagaagccgatgccgttacgctcatcgtgaagaacacggtgcgtacctttctgccggatgcgctggtgaccatcaccggcggtttccgccgtggcaaacctatgggccacgacgttgactttctgatcacgaacccgggccctaaagaggatgacgagctgctccacaaagtggttgatctgctcaagaagcaaggtctgctgctgtacgaagacatcaaagagagcacgttcgtggaggggcaactgccaagtcgcaaaatcgacgccatggacaacttccagaagtgcttcgccattctcaagctgtaccagccgggcgtggataacagtgcggttgggacgagtaagaaaagtgacatggccgaggttaaggattggaaagcggttcgtgtggatctggtgatcacgccattcgagcagtacgcctatgcgctgctcggttggacgggcagcaaagaatttcgtcgcgatctgaagcgctatgcggaggaagagcgcggcatgatcctcgacaaccatgccctctacgacctgaaaaagcgcatctttctgaaagcgggcagcgaagaagagattttcgcgcatctgggtctggattatgtggagccgtgggaacgcaacgcg

SEQ ID NO: 2380 - protein, 394 aa, synthetic construct
  REGION 1..394: note = Variant of terminal deoxynucleotidyl transferase
MHHHHHHGGSGHPPSNTPEGEVPSVIARPVSQYACQRKTTLNNYNKKFTDALEIMAENYKFKENLIACLEAKRAASIFKYLPFEVTSMKDIQGLPCITDQVRDVIEEIIEEGESSRVKEVLNDERYKAFKQFTSVFGVGVKTAEKWFRMGLRTVEEARASKSLKLSKMQKAGFLYYEDLASMVSKEEADAVTLIVKNTVRTFLPDALVTITGGFRRGKPMGHDVDFLITNPGPKEDDELLHKVVDLLKKQGLLLYEDIKESTFVEGQLPSRKIDAMDNFQKCFAILKLYQPGVDNSAVGTSKKSDMAEVKDWKAVRVDLVITPFEQYAYALLGWTGSKEFRRDLKRYAEEERGMILDNHALYDLKKRIFLKAGSEEEIFAHLGLDYVEPWERNA

SEQ ID NO: 2381 - DNA, 1182 bp, synthetic construct
  misc_feature 1..1182: note = Variant of terminal deoxynucleotidyl transferase
  source 1..1182: mol_type = other DNA
atgcatcaccaccatcatcatgggggttctggtcatccgccgagcaataccccggagggggaggtgccgagcgttatcgcccgtccggttagtcagtacgcgtgccagcgcaagaccacgctgaataactacaacaaaaagctgaccgacgcgctggagatcatggccgagaactacaaatttaaagagaacctgatcgcgtgtctggaagccaagcgcgccgcgagtatttttaaatatctgccgttcgaggttaccagcatgaaagacatccaaggtctgccgtgcattaccgaccaagttcgtgacgtgatcgaggagatcatcgaagagggcgagagcagccgtgttaaagaagttctcaatgacgagcgctacaaggcctttaagcagttcaccagcgtgttcggtgtgggcgtgaaaaccgcggaaaagtggtaccgtatgggcctccgtacggttgaagaagcaaaggccagtaagagtctgaagctgagcaagatgcagaaggcgggctttctgtattacgaggatctggcgagcatggttagtaaagaagaagccgatgccgttacgctcatcgtgaagaacacggtgcgtacctttctgccggatgcgctggtgaccatcaccggcggtttccgccgtggcaaacctgtgggccacgacgttgactttctgatcacgaacccgggcggcaaagaggatgacgagctgctccacaaagtggttgatctgctcaagacgcaaggtctgctgctgtacgaagacatcaaagagagcacgttcgtggaggggcaactgccaagtcgtaaaatcgacgccatggacaacttccagaagtgcttcgccattctcaagctgtaccagccgggcgtggataacagtgcggttgggacgagtaagaaaagtgacatgggtgaggttaaggattggaaagcggttcgtgtggatctggtgatcacgccattcgagcagtacgcctatgcgctgctcggttggacgggcagcaaacaatttcgtcgcgatctgcgtcgctatgcggaggaagagcgcggcatgatcctcgacaaccatgccctctacgacctgaaaaagcgcatctttctgaaagcgggcagcgaagaagagattttcgcgcatctgggtctggattatgtggagccgtgggaacgcaacgcg

SEQ ID NO: 2382 - protein, 394 aa, synthetic construct
  REGION 1..394: note = Variant of terminal deoxynucleotidyl transferase
MHHHHHHGGSGHPPSNTPEGEVPSVIARPVSQYACQRKTTLNNYNKKLTDALEIMAENYKFKENLIACLEAKRAASIFKYLPFEVTSMKDIQGLPCITDQVRDVIEEIIEEGESSRVKEVLNDERYKAFKQFTSVFGVGVKTAEKWYRMGLRTVEEAKASKSLKLSKMQKAGFLYYEDLASMVSKEEADAVTLIVKNTVRTFLPDALVTITGGFRRGKPVGHDVDFLITNPGGKEDDELLHKVVDLLKTQGLLLYEDIKESTFVEGQLPSRKIDAMDNFQKCFAILKLYQPGVDNSAVGTSKKSDMGEVKDWKAVRVDLVITPFEQYAYALLGWTGSKQFRRDLRRYAEEERGMILDNHALYDLKKRIFLKAGSEEEIFAHLGLDYVEPWERNA

SEQ ID NO: 2383 - DNA, 1182 bp, synthetic construct
  misc_feature 1..1182: note = Variant of terminal deoxynucleotidyl transferase
  source 1..1182: mol_type = other DNA
atgcatcaccaccatcatcatgggggttctggtcatccgccgagcaataccccggagggggaggtgccgagcgttatcgcccgtccggttagtcagtacagctgccagcgcaagaccacgctgaataactacaacaaaaagtttaccgacgcgctggagatcatggccgagaactacaaatttaaagagaacctgatcgcgtgtctggaagccaagcgcgccgcgagtattctgaaatatctgccgttcgaggttaccagcatgaaagacatccaaggtctgccgtgcattaccgaccaagttcgtgacgtgatcgaggagatcatcgaagagggcgagagcagccgtgttaaagaagttctcaatgacgagcgctacaaggcctttaagcagttcaccagcgtgttcggtgtgggcgtgaaaaccgcggaaaagtggtaccgtatgggcctccgtacggttgaagaagcacgcgccagtaagagtctgaagctgagcaagatgcagaaggcgggctttctgtattacgaggatctggcgagcatggttagtaaagaagaagccgatgccgttacgctcatcgtgaagaacacggtgcgtacctttctgccggatgcgctggtgaccatcaccggcggtttccgccgtggcaaacctatgggccacgacgttgactttctgatcacgctgccgggccgcaaagaggatgacgagctgctccacaaagtggttgatctgctcaagacgcaaggtctgctgctgtacgaagacatcaaagagagcacgttcgtggaggggcaactgccaagtcataaaatcgacgccatggacaacttccagaagtgcttcgccattctcaagctgtaccagccgggcgtggataacagtgcggttgggacgagtaagaaaagtgacatggccgaggttaaggattggaaagcgattcgtgtggatctggtgatcacgccattcgagcagtacgcctatgcgctgctcggttggacgggcagcaaacaatttcgtcgcgatctgcgccgctatgcggaggaagagcgcggcatgatcctcgacaaccatgccctctacgacctgaaaaagcgcatctttctgaaagcgggcagcgaagaagagattttcgcgcatctgggtctggattatgtggagccgtgggaacgcaacgcg

SEQ ID NO: 2384 - protein, 394 aa, synthetic construct
  REGION 1..394: note = Variant of terminal deoxynucleotidyl transferase
MHHHHHHGGSGHPPSNTPEGEVPSVIARPVSQYSCQRKTTLNNYNKKFTDALEIMAENYKFKENLIACLEAKRAASILKYLPFEVTSMKDIQGLPCITDQVRDVIEEIIEEGESSRVKEVLNDERYKAFKQFTSVFGVGVKTAEKWYRMGLRTVEEARASKSLKLSKMQKAGFLYYEDLASMVSKEEADAVTLIVKNTVRTFLPDALVTITGGFRRGKPMGHDVDFLITLPGRKEDDELLHKVVDLLKTQGLLLYEDIKESTFVEGQLPSHKIDAMDNFQKCFAILKLYQPGVDNSAVGTSKKSDMAEVKDWKAIRVDLVITPFEQYAYALLGWTGSKQFRRDLRRYAEEERGMILDNHALYDLKKRIFLKAGSEEEIFAHLGLDYVEPWERNA

SEQ ID NO: 2385 - DNA, 1182 bp, synthetic construct
  misc_feature 1..1182: note = Variant of terminal deoxynucleotidyl transferase
  source 1..1182: mol_type = other DNA
atgcatcaccaccatcatcatgggggttctggtcatccgccgagcaataccccggagggggaggtgccgagcgttatcgcccgtccggttagtcagtactcgtgccagcgcaagaccacgctgaataactacaacaaaaagctgaccgacgcgctggagatcatggccgagaactacaaatttaaagagaacctgatcgcgtgtctggaagccaagcgcgccgcgagtattctgaaatatctgccgttcgaggttaccagcatgaaagacatccaaggtctgccgtgcattaccgaccaagttcgtgacgtgatcgaggagatcatcgaagagggcgagagcagccgtgttaaagaagttctcaatgacgagcgctacaaggcctttaagcagttcaccagcgtgttcggtgtgggcgtgaaaaccgcggaaaagtggtaccgtatgggcctccgtacggttgaagaagcacgcgccagtaagagtctgaagctgagcaagatgcagaaggcgggctttctgtattacgaggatctggcgagcggcgttagtaaagaagaagccgatgccgttacgctcatcgtgaagaacacggtgcgtacctttctgccggatgcgctggtgaccatcaccggcggtttccgccgtggcaaacctgtgggccacgacgttgactttctgatcacgaacccgggccctaaagaggatgacgagctgctccacaaagtggttgatctgctcaagacgcaaggtctgctgctgtacgaagacatcaaagagagcacgttcgtggaggggcaactgccaagtcgtaaaatcgacgccatggacaacttccagaagtgcttcgccattctcaagctgtaccagccgggcgtggataacagtgcggttgggacgagtaagaaaagtgacatgggtgaggttaaggattggaaagcgattcgtgtggatctggtgatcacgccattcgagcagtacgcctatgcgctgctcggttggacgggcagcaaacaatttcgtcgcgatctgcgccgctatgcggaggaagagcgcggcatgatcctcgacaaccatgccctctacgacctgaaaaagcgcatctttctgaaagcgggcagcgaagaagagattttcgcgcatctgggtctggattatgtggagccgtgggaacgcaacgcg

SEQ ID NO: 2386 - protein, 394 aa, synthetic construct
  REGION 1..394: note = Variant of terminal deoxynucleotidyl transferase
MHHHHHHGGSGHPPSNTPEGEVPSVIARPVSQYSCQRKTTLNNYNKKLTDALEIMAENYKFKENLIACLEAKRAASILKYLPFEVTSMKDIQGLPCITDQVRDVIEEIIEEGESSRVKEVLNDERYKAFKQFTSVFGVGVKTAEKWYRMGLRTVEEARASKSLKLSKMQKAGFLYYEDLASGVSKEEADAVTLIVKNTVRTFLPDALVTITGGFRRGKPVGHDVDFLITNPGPKEDDELLHKVVDLLKTQGLLLYEDIKESTFVEGQLPSRKIDAMDNFQKCFAILKLYQPGVDNSAVGTSKKSDMGEVKDWKAIRVDLVITPFEQYAYALLGWTGSKQFRRDLRRYAEEERGMILDNHALYDLKKRIFLKAGSEEEIFAHLGLDYVEPWERNA

SEQ ID NO: 2387 - DNA, 1182 bp, synthetic construct
  misc_feature 1..1182: note = Variant of terminal deoxynucleotidyl transferase
  source 1..1182: mol_type = other DNA
atgcatcaccaccatcatcatgggggttctggtcatccgccgagcaataccccggagggggaggtgccgagcgttatcgcccgtccggttagtcagtacgcgtgccagcgcaagaccacgctgaataactacaacaaaaagtttaccgacgcgctggagatcatggccgagaactacaaatttaaagagaacctgatcgcgtgtctggaagccaagcgcgccgcgagtattctgaaatatctgccgttcgaggttaccagcatgaaagacatccaaggtctgccgtgcattaccgaccaagttcgtgacgtgatcgaggagatcatcgaagagggcgagagcagccgtgttaaagaagttctcaatgacgagcgctacaaggcctttaagcagttcaccagcgtgttcggtgtgggcgtgaaaaccgcggaaaagtggtaccgtatgggcctccgtacggttgaagaagcaaaggccagtaagagtctgaagctgagcaagatgcagaaggcgggctttctgtattacgaggatctggcgagcggcgttagtaaagaagaagccgatgccgttacgctcatcgtgaagaacacggtgcgtacctttctgccggatgcgctggtgaccatcaccggcggtttccgccgtggcaaacctatgggccacgacgttgactttctgatcacgaacccgggcggcaaagaggatgacgagctgctccacaaagtggttgatctgctcaagaagcaaggtctgctgctgtacgaagacatcaaagagagcacgttcgtggaggggcaactgccaagtcataaaatcgacgccatggacaacttccagaagtgcttcgccattctcaagctgtaccagccgggcgtggataacagtgcggttgggacgagtaagaaaagtgacatggccgaggttaaggattggaaagcgattcgtgtggatctggtgatcacgccattcgagcagtacgcctatgcgctgctcggttggacgggcagcaaacaatttcgtcgcgatctgcgccgctatgcggaggaagagcgcggcatgatcctcgacaaccatgccctctacgacctgaaaaagcgcatctttctgaaagcgggcagcgaagaagagattttcgcgcatctgggtctggattatgtggagccgtgggaacgcaacgcg

SEQ ID NO: 2388 - protein, 394 aa, synthetic construct
  REGION 1..394: note = Variant of terminal deoxynucleotidyl transferase
MHHHHHHGGSGHPPSNTPEGEVPSVIARPVSQYACQRKTTLNNYNKKFTDALEIMAENYKFKENLIACLEAKRAASILKYLPFEVTSMKDIQGLPCITDQVRDVIEEIIEEGESSRVKEVLNDERYKAFKQFTSVFGVGVKTAEKWYRMGLRTVEEAKASKSLKLSKMQKAGFLYYEDLASGVSKEEADAVTLIVKNTVRTFLPDALVTITGGFRRGKPMGHDVDFLITNPGGKEDDELLHKVVDLLKKQGLLLYEDIKESTFVEGQLPSHKIDAMDNFQKCFAILKLYQPGVDNSAVGTSKKSDMAEVKDWKAIRVDLVITPFEQYAYALLGWTGSKQFRRDLRRYAEEERGMILDNHALYDLKKRIFLKAGSEEEIFAHLGLDYVEPWERNA

SEQ ID NO: 2389 - DNA, 1182 bp, synthetic construct
  misc_feature 1..1182: note = Variant of terminal deoxynucleotidyl transferase
  source 1..1182: mol_type = other DNA
atgcatcaccaccatcatcatgggggttctggtcatccgccgagcaataccccggagggggaggtgccgagcgttatcgcccgtccggttagtcagtacgcgtgccagcgcaagaccacgctgaataactacaacaaaaagttcaccgacgcgctggagatcatggccgagaactacaaatttaaagagaacctgatcgcgtgtctggaagccaagcgcgccgcgagtattctgaaatatctgccgttcgaggttaccagcatgaaagacatccaaggtctgccgtgcattaccgaccaagttcgtgacgtgatcgaggagatcatcgaagagggcgagagcagccgtgttaaagaagttctcaatgacgagcgctacaaggcctttaagcagttcaccagcgtgttcggtgtgggcgtgaaaaccgcggaaaagtggtaccgtatgggcctccgtacggttgaagaagcaaaggccagtaagagtctgaagctgagcaagatgcagaaggcgggctttctgtattacgaggatctggcgagcatggttagtaaagaagaagccgatgccgttacgctcatcgtgaagaacacggtgcgtacctttctgccggatgcgctggtgaccatcaccggcggtttccgccgtggcaaacctgtgggccacgacgttgactttctgatcacgaatccgggccctaaagaggatgacgagctgctccacaaagtggttgatctgctcaagaagcaaggtctgctgctgtacgaagacatcaaagagagcacgttcgtggaggggcaactgccaagtcataaaatcgacgccatggacaacttccagaagtgcttcgccattctcaagctgtaccagccgggcgtggataacagtgcggttgggacgagtaagaaaagtgacatggctgaggttaaggattggaaagcggttcgtgtggatctggtgatcacgccattcgagcagtacgcctatgcgctgctcggttggacgggcagcaaagaatttcgtcgcgatctgcgtcgctatgcggaggaagagcgcggcatgatcctcgacaaccatgccctctacgacctgaaaaagcgcatctttctgaaagcgggcagcgaagaagagattttcgcgcatctgggtctggattatgtggagccgtgggaacgcaacgcg

SEQ ID NO: 2390 - protein, 394 aa, synthetic construct
  REGION 1..394: note = Variant of terminal deoxynucleotidyl transferase
MHHHHHHGGSGHPPSNTPEGEVPSVIARPVSQYACQRKTTLNNYNKKFTDALEIMAENYKFKENLIACLEAKRAASILKYLPFEVTSMKDIQGLPCITDQVRDVIEEIIEEGESSRVKEVLNDERYKAFKQFTSVFGVGVKTAEKWYRMGLRTVEEAKASKSLKLSKMQKAGFLYYEDLASMVSKEEADAVTLIVKNTVRTFLPDALVTITGGFRRGKPVGHDVDFLITNPGPKEDDELLHKVVDLLKKQGLLLYEDIKESTFVEGQLPSHKIDAMDNFQKCFAILKLYQPGVDNSAVGTSKKSDMAEVKDWKAVRVDLVITPFEQYAYALLGWTGSKEFRRDLRRYAEEERGMILDNHALYDLKKRIFLKAGSEEEIFAHLGLDYVEPWERNA

SEQ ID NO: 2391 - DNA, 1182 bp, synthetic construct
  misc_feature 1..1182: note = Variant of terminal deoxynucleotidyl transferase
  source 1..1182: mol_type = other DNA
atgcatcaccaccatcatcatgggggttctggtcatccgccgagcaataccccggagggggaggtgccgagcgttatcgcccgtccggttagtcagtacgcgtgccagcgcaagaccacgctgaataactacaacaaaaagtttaccgacgcgctggagatcatggccgagaactacaaatttaaagagaacctgatcgcgtgtctggaagccaagcgcgccgcgagtattctgaaatatctgccgttcgaggttaccagcatgaaagacatccaaggtctgccgtgcattaccgaccaagttcgtgacgtgatcgaggagatcatcgaagagggcgagagcagccgtgttaaagaagttctcaatgacgagcgctacaaggcctttaagcagttcaccagcgtgttcggtgtgggcgtgaaaaccgcggaaaagtggttccgtatgggcctccgtacggttgaagaagcacgcgccagtaagagtctgaagctgagcaagatgcagaaggcgggctttctgtattacgaggatctggcgagccgcgttagtaaagaagaagccgatgccgttacgctcatcgtgaagaacacggtgcgtacctttctgccggatgcgctggtgaccatcaccggcggtttccgccgtggcaaacctatgggccacgacgttgactttctgatcacgaatccgggccctaaagaggatgacgagctgctccacaaagtggttgatctgctcaagaagcaaggtctgctgctgtacgaagacatcaaagagagcacgttcgtggaggggcaactgccaagtcgcaaaatcgacgccatggacaacttccagaagtgcttcgccattctcaagctgtaccagccgggcgtggataacagtgcggttgggacgagtaagaaaagtgacatgggtgaggttaaggattggaaagcgattcgtgtggatctggtgatcacgccattcgagcagtacgcctatgcgctgctcggttggacgggcagcaaagaatttcgtcgcgatctgcgccgctatgcggaggaagagcgcggcatgatcctcgacaaccatgccctctacgacctgaaaaagcgcatctttctgaaagcgggcagcgaagaagagattttcgcgcatctgggtctggattatgtggagccgtgggaacgcaacgcg

SEQ ID NO: 2392 - protein, 394 aa, synthetic construct
  REGION 1..394: note = Variant of terminal deoxynucleotidyl transferase
MHHHHHHGGSGHPPSNTPEGEVPSVIARPVSQYACQRKTTLNNYNKKFTDALEIMAENYKFKENLIACLEAKRAASILKYLPFEVTSMKDIQGLPCITDQVRDVIEEIIEEGESSRVKEVLNDERYKAFKQFTSVFGVGVKTAEKWFRMGLRTVEEARASKSLKLSKMQKAGFLYYEDLASRVSKEEADAVTLIVKNTVRTFLPDALVTITGGFRRGKPMGHDVDFLITNPGPKEDDELLHKVVDLLKKQGLLLYEDIKESTFVEGQLPSRKIDAMDNFQKCFAILKLYQPGVDNSAVGTSKKSDMGEVKDWKAIRVDLVITPFEQYAYALLGWTGSKEFRRDLRRYAEEERGMILDNHALYDLKKRIFLKAGSEEEIFAHLGLDYVEPWERNA

SEQ ID NO: 2393 - DNA, 1182 bp, synthetic construct
  misc_feature 1..1182: note = Variant of terminal deoxynucleotidyl transferase
  source 1..1182: mol_type = other DNA
atgcatcaccaccatcatcatgggggttctggtcatccgccgagcaataccccggagggggaggtgccgagcgttatcgcccgtccggttagtcagtacagctgccagcgcaagaccacgctgaataactacaacaaaaagttcaccgacgcgctggagatcatggccgagaactacaaatttaaagagaacctgatcgcgtgtctggaagccaagcgcgccgcgagtattctgaaatatctgccgttcgaggttaccagcatgaaagacatccaaggtctgccgtgcattaccgaccaagttcgtgacgtgatcgaggagatcatcgaagagggcgagagcagccgtgttaaagaagttctcaatgacgagcgctacaaggcctttaagcagttcaccagcgtgttcggtgtgggcgtgaaaaccgcggaaaagtggtaccgtatgggcctccgtacggttgaagaagcaaaggccagtaagagtctgaagctgagcaagatgcagaaggcgggctttctgtattacgaggatctggcgagcatggttagtaaagaagaagccgatgccgttacgctcatcgtgaagaacacggtgcgtacctttctgccggatgcgctggtgaccatcaccggcggtttccgccgtggcaaacctatgggccacgacgttgactttctgatcacgaacccgggccctaaagaggatgacgagctgctccacaaagtggttgatctgctcaagacgcaaggtctgctgctgtacgaagacatcaaagagagcacgttcgtggaggggcaactgccaagtcataaaatcgacgccatggacaacttccagaagtgcttcgccattctcaagctgtaccagccgggcgtggataacagtgcggttgggacgagtaagaaaagtgacatgggtgaggttaaggattggaaagcgattcgtgtggatctggtgatcacgccattcgagcagtacgcctatgcgctgctcggttggacgggcagcaaagaatttcgtcgcgatctgcgtcgctatgcggaggaagagcgcggcatgatcctcgacaaccatgccctctacgacctgaaaaagcgcatctttctgaaagcgggcagcgaagaagagattttcgcgcatctgggtctggattatgtggagccgtgggaacgcaacgcg

SEQ ID NO: 2394 - protein, 394 aa, synthetic construct
  REGION 1..394: note = Variant of terminal deoxynucleotidyl transferase
MHHHHHHGGSGHPPSNTPEGEVPSVIARPVSQYSCQRKTTLNNYNKKFTDALEIMAENYKFKENLIACLEAKRAASILKYLPFEVTSMKDIQGLPCITDQVRDVIEEIIEEGESSRVKEVLNDERYKAFKQFTSVFGVGVKTAEKWYRMGLRTVEEAKASKSLKLSKMQKAGFLYYEDLASMVSKEEADAVTLIVKNTVRTFLPDALVTITGGFRRGKPMGHDVDFLITNPGPKEDDELLHKVVDLLKTQGLLLYEDIKESTFVEGQLPSHKIDAMDNFQKCFAILKLYQPGVDNSAVGTSKKSDMGEVKDWKAIRVDLVITPFEQYAYALLGWTGSKEFRRDLRRYAEEERGMILDNHALYDLKKRIFLKAGSEEEIFAHLGLDYVEPWERNA

SEQ ID NO: 2395 - DNA, 1182 bp, synthetic construct
  misc_feature 1..1182: note = Variant of terminal deoxynucleotidyl transferase
  source 1..1182: mol_type = other DNA
atgcatcaccaccatcatcatgggggttctggtcatccgccgagcaataccccggagggggaggtgccgagcgttatcgcccgtccggttagtcagtacgcgtgccagcgcaagaccacgctgaataactacaacaaaaagttcaccgacgcgctggagatcatggccgagaactacaaatttaaagagaacctgatcgcgtgtctggaagccaagcgcgccgcgagtattctgaaatatctgccgttcgaggttaccagcatgaaagacatccaaggtctgccgtgcattaccgaccaagttcgtgacgtgatcgaggagatcatcgaagagggcgagagcagccgtgttaaagaagttctcaatgacgagcgctacaaggcctttaagcagttcaccagcgtgttcggtgtgggcgtgaaaaccgcggaaaagtggttccgtatgggcctccgtacggttgaagaagcaaaggccagtaagagtctgaagctgagcaagatgcagaaggcgggctttctgtattacgaggatctggcgagcatggttagtaaagaagaagccgatgccgttacgctcatcgtgaagaacacggtgcgtacctttctgccggatgcgctggtgaccatcaccggcggtttccgccgtggcaaacctatgggccacgacgttgactttctgatcacgctgccgggccctaaagaggatgacgagctgctccacaaagtggttgatctgctcaagaagcaaggtctgctgctgtacgaagacatcaaagagagcacgttcgtggaggggcaactgccaagtcgtaaaatcgacgccatggacaacttccagaagtgcttcgccattctcaagctgtaccagccgggcgtggataacagtgcggttgggacgagtaagaaaagtgacatggctgaggttaaggattggaaagcggttcgtgtggatctggtgatcacgccattcgagcagtacgcctatgcgctgctcggttggacgggcagcaaagaatttcgtcgcgatctgcgtcgctatgcggaggaagagcgcggcatgatcctcgacaaccatgccctctacgacctgaaaaagcgcatctttctgaaagcgggcagcgaagaagagattttcgcgcatctgggtctggattatgtggagccgtgggaacgcaacgcg

SEQ ID NO: 2396 - protein, 394 aa, synthetic construct
  REGION 1..394: note = Variant of terminal deoxynucleotidyl transferase
MHHHHHHGGSGHPPSNTPEGEVPSVIARPVSQYACQRKTTLNNYNKKFTDALEIMAENYKFKENLIACLEAKRAASILKYLPFEVTSMKDIQGLPCITDQVRDVIEEIIEEGESSRVKEVLNDERYKAFKQFTSVFGVGVKTAEKWFRMGLRTVEEAKASKSLKLSKMQKAGFLYYEDLASMVSKEEADAVTLIVKNTVRTFLPDALVTITGGFRRGKPMGHDVDFLITLPGPKEDDELLHKVVDLLKKQGLLLYEDIKESTFVEGQLPSRKIDAMDNFQKCFAILKLYQPGVDNSAVGTSKKSDMAEVKDWKAVRVDLVITPFEQYAYALLGWTGSKEFRRDLRRYAEEERGMILDNHALYDLKKRIFLKAGSEEEIFAHLGLDYVEPWERNA

SEQ ID NO: 2397 - DNA, 1182 bp, synthetic construct
  misc_feature 1..1182: note = Variant of terminal deoxynucleotidyl transferase
  source 1..1182: mol_type = other DNA
atgcatcaccaccatcatcatgggggttctggtcatccgccgagcaataccccggagggggaggtgccgagcgttatcgcccgtccggttagtcagtacgcgtgccagcgcaagaccacgctgaataactacaacaaaaagtttaccgacgcgctggagatcatggccgagaactacaaatttaaagagaacctgatcgcgtgtctggaagccaagcgcgccgcgagtattctgaaatatctgccgttcgaggttaccagcatgaaagacatccaaggtctgccgtgcattaccgaccaagttcgtgacgtgatcgaggagatcatcgaagagggcgagagcagccgtgttaaagaagttctcaatgacgagcgctacaaggcctttaagcagttcaccagcgtgttcggtgtgggcgtgaaaaccgcggaaaagtggttccgtatgggcctccgtacggttgaagaagcaaaggccagtaagagtctgaagctgagcaagatgcagaaggcgggctttctgtattacgaggatctggcgagccgcgttagtaaagaagaagccgatgccgttacgctcatcgtgaagaacacggtgcgtacctttctgccggatgcgctggtgaccatcaccggcggtttccgccgtggcaaacctatgggccacgacgttgactttctgatcacgaacccgggccctaaagaggatgacgagctgctccacaaagtggttgatctgctcaagaagcaaggtctgctgctgtacgaagacatcaaagagagcacgttcgtggaggggcaactgccaagtcgcaaaatcgacgccatggacaacttccagaagtgcttcgccattctcaagctgtaccagccgggcgtggataacagtgcggttgggacgagtaagaaaagtgacatggccgaggttaaggattggaaagcgattcgtgtggatctggtgatcacgccattcgagcagtacgcctatgcgctgctcggttggacgggcagcaaagaatttcgtcgcgatctgcgtcgctatgcggaggaagagcgcggcatgatcctcgacaaccatgccctctacgacctgaaaaagcgcatctttctgaaagcgggcagcgaagaagagattttcgcgcatctgggtctggattatgtggagccgtgggaacgcaacgcg

SEQ ID NO: 2398 - protein, 394 aa, synthetic construct
  REGION 1..394: note = Variant of terminal deoxynucleotidyl transferase
MHHHHHHGGSGHPPSNTPEGEVPSVIARPVSQYACQRKTTLNNYNKKFTDALEIMAENYKFKENLIACLEAKRAASILKYLPFEVTSMKDIQGLPCITDQVRDVIEEIIEEGESSRVKEVLNDERYKAFKQFTSVFGVGVKTAEKWFRMGLRTVEEAKASKSLKLSKMQKAGFLYYEDLASRVSKEEADAVTLIVKNTVRTFLPDALVTITGGFRRGKPMGHDVDFLITNPGPKEDDELLHKVVDLLKKQGLLLYEDIKESTFVEGQLPSRKIDAMDNFQKCFAILKLYQPGVDNSAVGTSKKSDMAEVKDWKAIRVDLVITPFEQYAYALLGWTGSKEFRRDLRRYAEEERGMILDNHALYDLKKRIFLKAGSEEEIFAHLGLDYVEPWERNA

SEQ ID NO: 2399 - DNA, 1182 bp, synthetic construct
  misc_feature 1..1182: note = Variant of terminal deoxynucleotidyl transferase
  source 1..1182: mol_type = other DNA
atgcatcaccaccatcatcatgggggttctggtcatccgccaagcaataccccggagggggaggtgccgagcgttatcgcccgtccggttagtcagtacagctgccagcgcaagaccacgctgaataactacaacaaaaagtttaccgacgcgctggagatcatggccgagaactacaaatttaaagagaacctgatcgcgtgtctggaagccaagcgcgccgcgagtatttttaaatatctgccgttcgaggttaccagcatgaaagacatccaaggtctgccgtgcattaccgaccaagttcgtgacgtgatcgaggagatcatcgaagagggcgagagcagccgtgttaaagaagttctcaatgacgagcgctacaaggcctttaagcagttcaccagcgtgttcggtgtgggcgtgaaaaccgcggaaaagtggtaccgtatgggcctccgtacggttgaagaagcacgcgccagtaagagtctgaagctgagcaagatgcagaaggcgggctttctgtattacgaggatctggcgagcatggttagtaaagaagaagccgatgccgttacgctcatcgtgaagaacacggtgcgtacctttctgccggatgcgctggtgaccatcaccggcggtttccgccgtggcaaacctatgggccacgacgttgactttctgatcacgaatccgggcccgaaagaggatgacgagctgctccacaaagtggttgatctgctcaagaagcaaggtctgctgctgtacgaagacatcaaagagagcacgttcgtggaggggcaactgccaagtcgtaaaatcgacgccatggacaacttccagaagtgcttcgccattctcaagctgtaccagccgggcgtggataacagtgcggttgggacgagtaagaaaagtgacatggccgaggttaaggattggaaagcgattcgtgtggatctggtgatcacgccattcgagcagtacgcctatgcgctgctcggttggacgggcagcaaagaatttcgtcgcgatctgcgccgctatgcggaggaagagcgcggcatgatcctcgacaaccatgccctctacgacctgaaaaagcgcatctttctgaaagcgggcagcgaagaagagattttcgcgcatctgggtctggattatgtggagccgtgggaacgcaacgcg

SEQ ID NO: 2400 - protein, 394 aa, synthetic construct
  REGION 1..394: note = Variant of terminal deoxynucleotidyl transferase
MHHHHHHGGSGHPPSNTPEGEVPSVIARPVSQYSCQRKTTLNNYNKKFTDALEIMAENYKFKENLIACLEAKRAASIFKYLPFEVTSMKDIQGLPCITDQVRDVIEEIIEEGESSRVKEVLNDERYKAFKQFTSVFGVGVKTAEKWYRMGLRTVEEARASKSLKLSKMQKAGFLYYEDLASMVSKEEADAVTLIVKNTVRTFLPDALVTITGGFRRGKPMGHDVDFLITNPGPKEDDELLHKVVDLLKKQGLLLYEDIKESTFVEGQLPSRKIDAMDNFQKCFAILKLYQPGVDNSAVGTSKKSDMAEVKDWKAIRVDLVITPFEQYAYALLGWTGSKEFRRDLRRYAEEERGMILDNHALYDLKKRIFLKAGSEEEIFAHLGLDYVEPWERNA

SEQ ID NO: 2401 - DNA, 1182 bp, synthetic construct
  misc_feature 1..1182: note = Variant of terminal deoxynucleotidyl transferase
  source 1..1182: mol_type = other DNA
atgcatcaccaccatcatcatgggggttctggtcatccgccaagcaataccccggagggggaggtgccgagcgttatcgcccgtccggttagtcagtactcgtgccagcgcaagaccacgctgaataactacaacaaaaagctgaccgacgcgctggagatcatggccgagaactacaaatttaaagagaacctgatcgcgtgtctggaagccaagcgcgccgcgagtattctgaaatatctgccgttcgaggttaccagcatgaaagacatccaaggtctgccgtgcattaccgaccaagttcgtgacgtgatcgaggagatcatcgaagagggcgagagcagccgtgttaaagaagttctcaatgacgagcgctacaaggcctttaagcagttcaccagcgtgttcggtgtgggcgtgaaaaccgcggaaaagtggtaccgtatgggcctccgtacggttgaagaagcacgcgccagtaagagtctgaagctgagcaagatgcagaaggcgggctttctgtattacgaggatctggcgagcatggttagtaaagaagaagccgatgccgttacgctcatcgtgaagaacacggtgcgtacctttctgccggatgcgctggtgaccatcaccggcggtttccgccgtggcaaacctatgggccacgacgttgactttctgatcacgaacccgggcggcaaagaggatgacgagctgctccacaaagtggttgatctgctcaagaagcaaggtctgctgctgtacgaagacatcaaagagagcacgttcgtggaggggcaactgccaagtcgcaaaatcgacgccatggacaacttccagaagtgcttcgccattctcaagctgtaccagccgggcgtggataacagtgcggttgggacgagtaagaaaagtgacatggctgaggttaaggattggaaagcgattcgtgtggatctggtgatcacgccattcgagcagtacgcctatgcgctgctcggttggacgggcagcaaagaatttcgtcgcgatctgaagcgctatgcggaggaagagcgcggcatgatcctcgacaaccatgccctctacgacctgaaaaagcgcatctttctgaaagcgggcagcgaagaagagattttcgcgcatctgggtctggattatgtggagccgtgggaacgcaacgcg

SEQ ID NO: 2402 - protein, 394 aa, synthetic construct
  REGION 1..394: note = Variant of terminal deoxynucleotidyl transferase
MHHHHHHGGSGHPPSNTPEGEVPSVIARPVSQYSCQRKTTLNNYNKKLTDALEIMAENYKFKENLIACLEAKRAASILKYLPFEVTSMKDIQGLPCITDQVRDVIEEIIEEGESSRVKEVLNDERYKAFKQFTSVFGVGVKTAEKWYRMGLRTVEEARASKSLKLSKMQKAGFLYYEDLASMVSKEEADAVTLIVKNTVRTFLPDALVTITGGFRRGKPMGHDVDFLITNPGGKEDDELLHKVVDLLKKQGLLLYEDIKESTFVEGQLPSRKIDAMDNFQKCFAILKLYQPGVDNSAVGTSKKSDMAEVKDWKAIRVDLVITPFEQYAYALLGWTGSKEFRRDLKRYAEEERGMILDNHALYDLKKRIFLKAGSEEEIFAHLGLDYVEPWERNA

SEQ ID NO: 2403 - DNA, 1182 bp, synthetic construct
  misc_feature 1..1182: note = Variant of terminal deoxynucleotidyl transferase
  source 1..1182: mol_type = other DNA
atgcatcaccaccatcatcatgggggttctggtcatccgccgagcaataccccggagggggaggtgccgagcgttatcgcccgtccggttagtcagtacgcgtgccagcgcaagaccacgctgaataactacaacaaaaagttcaccgacgcgctggagatcatggccgagaactacaaatttaaagagaacctgatcgcgtgtctggaagccaagcgcgccgcgagtatttttaaatatctgccgttcgaggttaccagcatgaaagacatccaaggtctgccgtgcattaccgaccaagttcgtgacgtgatcgaggagatcatcgaagagggcgagagcagccgtgttaaagaagttctcaatgacgagcgctacaaggcctttaagcagttcaccagcgtgttcggtgtgggcgtgaaaaccgcggaaaagtggtttcgtatgggcctccgtacggttgaagaagcaaaggccagtaagagtctgaagctgagcaagatgcagaaggcgggctttctgtattacgaggatctggcgagccgcgttagtaaagaagaagccgatgccgttacgctcatcgtgaagaacacggtgcgtacctttctgccggatgcgctggtgaccatcaccggcggtttccgccgtggcaaacctgtgggccacgacgttgactttctgatcacgaatccgggcccgaaagaggatgacgagctgctccacaaagtggttgatctgctcaagaagcaaggtctgctgctgtacgaagacatcaaagagagcacgttcgtggaggggcaactgccaagtcgcaaaatcgacgccatggacaacttccagaagtgcttcgccattctcaagctgtaccagccgggcgtggataacagtgcggttgggacgagtaagaaaagtgacatgggtgaggttaaggattggaaagcgattcgtgtggatctggtgatcacgccattcgagcagtacgcctatgcgctgctcggttggacgggcagcaaacaatttcgtcgcgatctgcgccgctatgcggaggaagagcgcggcatgatcctcgacaaccatgccctctacgacctgaaaaagcgcatctttctgaaagcgggcagcgaagaagagattttcgcgcatctgggtctggattatgtggagccgtgggaacgcaacgcg

SEQ ID NO: 2404 - protein, 394 aa, synthetic construct
  REGION 1..394: note = Variant of terminal deoxynucleotidyl transferase
MHHHHHHGGSGHPPSNTPEGEVPSVIARPVSQYACQRKTTLNNYNKKFTDALEIMAENYKFKENLIACLEAKRAASIFKYLPFEVTSMKDIQGLPCITDQVRDVIEEIIEEGESSRVKEVLNDERYKAFKQFTSVFGVGVKTAEKWFRMGLRTVEEAKASKSLKLSKMQKAGFLYYEDLASRVSKEEADAVTLIVKNTVRTFLPDALVTITGGFRRGKPVGHDVDFLITNPGPKEDDELLHKVVDLLKKQGLLLYEDIKESTFVEGQLPSRKIDAMDNFQKCFAILKLYQPGVDNSAVGTSKKSDMGEVKDWKAIRVDLVITPFEQYAYALLGWTGSKQFRRDLRRYAEEERGMILDNHALYDLKKRIFLKAGSEEEIFAHLGLDYVEPWERNA

SEQ ID NO: 2405 - DNA, 1182 bp, synthetic construct
  misc_feature 1..1182: note = Variant of terminal deoxynucleotidyl transferase
  source 1..1182: mol_type = other DNA
atgcatcaccaccatcatcatgggggttctggtcatccgccgagcaataccccggagggggaggtgccgagcgttatcgcccgtccggttagtcagtacgcgtgccagcgcaagaccacgctgaataactacaacaaaaagtttaccgacgcgctggagatcatggccgagaactacaaatttaaagagaacctgatcgcgtgtctggaagccaagcgcgccgcgagtattctgaaatatctgccgttcgaggttaccagcatgaaagacatccaaggtctgccgtgcattaccgaccaagttcgtgacgtgatcgaggagatcatcgaagagggcgagagcagccgtgttaaagaagttctcaatgacgagcgctacaaggcctttaagcagttcaccagcgtgttcggtgtgggcgtgaaaaccgcggaaaagtggtttcgtatgggcctccgtacggttgaagaagcaaaggccagtaagagtctgaagctgagcaagatgcagaaggcgggctttctgtattacgaggatctggcgagccgcgttagtaaagaagaagccgatgccgttacgctcatcgtgaagaacacggtgcgtacctttctgccggatgcgctggtgaccatcaccggcggtttccgccgtggcaaacctatgggccacgacgttgactttctgatcacgaatccgggcccgaaagaggatgacgagctgctccacaaagtggttgatctgctcaagaagcaaggtctgctgctgtacgaagacatcaaagagagcacgttcgtggaggggcaactgccaagtcgtaaaatcgacgccatggacaacttccagaagtgcttcgccattctcaagctgtaccagccgggcgtggataacagtgcggttgggacgagtaagaaaagtgacatggctgaggttaaggattggaaagcggttcgtgtggatctggtgatcacgccattcgagcagtacgcctatgcgctgctcggttggacgggcagcaaagaatttcgtcgcgatctgaagcgctatgcggaggaagagcgcggcatgatcctcgacaaccatgccctctacgacctgaaaaagcgcatctttctgaaagcgggcagcgaagaagagattttcgcgcatctgggtctggattatgtggagccgtgggaacgcaacgcg

SEQ ID NO: 2406 - protein, 394 aa, synthetic construct
  REGION 1..394: note = Variant of terminal deoxynucleotidyl transferase
MHHHHHHGGSGHPPSNTPEGEVPSVIARPVSQYACQRKTTLNNYNKKFTDALEIMAENYKFKENLIACLEAKRAASILKYLPFEVTSMKDIQGLPCITDQVRDVIEEIIEEGESSRVKEVLNDERYKAFKQFTSVFGVGVKTAEKWFRMGLRTVEEAKASKSLKLSKMQKAGFLYYEDLASRVSKEEADAVTLIVKNTVRTFLPDALVTITGGFRRGKPMGHDVDFLITNPGPKEDDELLHKVVDLLKKQGLLLYEDIKESTFVEGQLPSRKIDAMDNFQKCFAILKLYQPGVDNSAVGTSKKSDMAEVKDWKAVRVDLVITPFEQYAYALLGWTGSKEFRRDLKRYAEEERGMILDNHALYDLKKRIFLKAGSEEEIFAHLGLDYVEPWERNA

SEQ ID NO: 2407 - DNA, 1182 bp, synthetic construct
  misc_feature 1..1182: note = Variant of terminal deoxynucleotidyl transferase
  source 1..1182: mol_type = other DNA
atgcatcaccaccatcatcatgggggttctggtcatccgccgagcaataccccggagggggaggtgccgagcgttatcgcccgtccggttagtcagtacgcgtgccagcgcaagaccacgctgaataactacaacaaaaagtttaccgacgcgctggagatcatggccgagaactacaaatttaaagagaacctgatcgcgtgtctggaagccaagcgcgccgcgagtatttttaaatatctgccgttcgaggttaccagcatgaaagacatccaaggtctgccgtgcattaccgaccaagttcgtgacgtgatcgaggagatcatcgaagagggcgagagcagccgtgttaaagaagttctcaatgacgagcgctacaaggcctttaagcagttcaccagcgtgttcggtgtgggcgtgaaaaccgcggaaaagtggtttcgtatgggcctccgtacggttgaagaagcaaaggccagtaagagtctgaagctgagcaagatgcagaaggcgggctttctgtattacgaggatctggcgagccgcgttagtaaagaagaagccgatgccgttacgctcatcgtgaagaacacggtgcgtacctttctgccggatgcgctggtgaccatcaccggcggtttccgccgtggcaaacctatgggccacgacgttgactttctgatcacgaatccgggcccgaaagaggatgacgagctgctccacaaagtggttgatctgctcaagaagcaaggtctgctgctgtacgaagacatcaaagagagcacgttcgtggaggggcaactgccaagtcgcaaaatcgacgccatggacaacttccagaagtgcttcgccattctcaagctgtaccagccgggcgtggataacagtgcggttgggacgagtaagaaaagtgacatggccgaggttaaggattggaaagcgattcgtgtggatctggtgatcacgccattcgagcagtacgcctatgcgctgctcggttggacgggcagcaaagaatttcgtcgcgatctgcgccgctatgcggaggaagagcgcggcatgatcctcgacaaccatgccctctacgacctgaaaaagcgcatctttctgaaagcgggcagcgaagaagagattttcgcgcatctgggtctggattatgtggagccgtgggaacgcaacgcg

SEQ ID NO: 2408 - protein, 394 aa, synthetic construct
  REGION 1..394: note = Variant of terminal deoxynucleotidyl transferase
MHHHHHHGGSGHPPSNTPEGEVPSVIARPVSQYACQRKTTLNNYNKKFTDALEIMAENYKFKENLIACLEAKRAASIFKYLPFEVTSMKDIQGLPCITDQVRDVIEEIIEEGESSRVKEVLNDERYKAFKQFTSVFGVGVKTAEKWFRMGLRTVEEAKASKSLKLSKMQKAGFLYYEDLASRVSKEEADAVTLIVKNTVRTFLPDALVTITGGFRRGKPMGHDVDFLITNPGPKEDDELLHKVVDLLKKQGLLLYEDIKESTFVEGQLPSRKIDAMDNFQKCFAILKLYQPGVDNSAVGTSKKSDMAEVKDWKAIRVDLVITPFEQYAYALLGWTGSKEFRRDLRRYAEEERGMILDNHALYDLKKRIFLKAGSEEEIFAHLGLDYVEPWERNA

SEQ ID NO: 2409 - DNA, 1182 bp, synthetic construct
  misc_feature 1..1182: note = Variant of terminal deoxynucleotidyl transferase
  source 1..1182: mol_type = other DNA
atgcatcaccaccatcatcatgggggttctggtcatccgccgagcaataccccggagggggaggtgccgagcgttatcgcccgtccggttagtcagtacgcgtgccagcgcaagaccacgctgaataactacaacaaaaagtttaccgacgcgctggagatcatggccgagaactacaaatttaaagagaacctgatcgcgtgtctggaagccaagcgcgccgcgagtattctgaaatatctgccgttcgaggttaccagcatgaaagacatccaaggtctgccgtgcattaccgaccaagttcgtgacgtgatcgaggagatcatcgaagagggcgagagcagccgtgttaaagaagttctcaatgacgagcgctacaaggcctttaagcagttcaccagcgtgttcggtgtgggcgtgaaaaccgcggaaaagtggttccgtatgggcctccgtacggttgaagaagcaaaggccagtaagagtctgaagctgagcaagatgcagaaggcgggctttctgtattacgaggatctggcgagccgcgttagtaaagaagaagccgatgccgttacgctcatcgtgaagaacacggtgcgtacctttctgccggatgcgctggtgaccatcaccggcggtttccgccgtggcaaacctgtgggccacgacgttgactttctgatcacgaatccgggcccgaaagaggatgacgagctgctccacaaagtggttgatctgctcaagaagcaaggtctgctgctgtacgaagacatcaaagagagcacgttcgtggaggggcaactgccaagtcgcaaaatcgacgccatggacaacttccagaagtgcttcgccattctcaagctgtaccagccgggcgtggataacagtgcggttgggacgagtaagaaaagtgacatgggtgaggttaaggattggaaagcgattcgtgtggatctggtgatcacgccattcgagcagtacgcctatgcgctgctcggttggacgggcagcaaagaatttcgtcgcgatctgaagcgctatgcggaggaagagcgcggcatgatcctcgacaaccatgccctctacgacctgaaaaagcgcatctttctgaaagcgggcagcgaagaagagattttcgcgcatctgggtctggattatgtggagccgtgggaacgcaacgcg

SEQ ID NO: 2410 - protein, 394 aa, synthetic construct
  REGION 1..394: note = Variant of terminal deoxynucleotidyl transferase
MHHHHHHGGSGHPPSNTPEGEVPSVIARPVSQYACQRKTTLNNYNKKFTDALEIMAENYKFKENLIACLEAKRAASILKYLPFEVTSMKDIQGLPCITDQVRDVIEEIIEEGESSRVKEVLNDERYKAFKQFTSVFGVGVKTAEKWFRMGLRTVEEAKASKSLKLSKMQKAGFLYYEDLASRVSKEEADAVTLIVKNTVRTFLPDALVTITGGFRRGKPVGHDVDFLITNPGPKEDDELLHKVVDLLKKQGLLLYEDIKESTFVEGQLPSRKIDAMDNFQKCFAILKLYQPGVDNSAVGTSKKSDMGEVKDWKAIRVDLVITPFEQYAYALLGWTGSKEFRRDLKRYAEEERGMILDNHALYDLKKRIFLKAGSEEEIFAHLGLDYVEPWERNA

SEQ ID NO: 2411 - DNA, 1182 bp, synthetic construct
  misc_feature 1..1182: note = Variant of terminal deoxynucleotidyl transferase
  source 1..1182: mol_type = other DNA
atgcatcaccaccatcatcatgggggttctggtcatccgccgagcaataccccggagggggaggtgccgagcgttatcgcccgtccggttagtcagtacgcgtgccagcgcaagaccacgctgaataactacaacaaaaagttcaccgacgcgctggagatcatggccgagaactacaaatttaaagagaacctgatcgcgtgtctggaagccaagcgcgccgcgagtattctgaaatatctgccgttcgaggttaccagcatgaaagacatccaaggtctgccgtgcattaccgaccaagttcgtgacgtgatcgaggagatcatcgaagagggcgagagcagccgtgttaaagaagttctcaatgacgagcgctacaaggcctttaagcagttcaccagcgtgttcggtgtgggcgtgaaaaccgcggaaaagtggtaccgtatgggcctccgtacggttgaagaagcacgcgccagtaagagtctgaagctgagcaagatgcagaaggcgggctttctgtattacgaggatctggcgagcggcgttagtaaagaagaagccgatgccgttacgctcatcgtgaagaacacggtgcgtacctttctgccggatgcgctggtgaccatcaccggcggtttccgccgtggcaaacctatgggccacgacgttgactttctgatcacgaatccgggcccgaaagaggatgacgagctgctccacaaagtggttgatctgctcaagacgcaaggtctgctgctgtacgaagacatcaaagagagcacgttcgtggaggggcaactgccaagtcataaaatcgacgccatggacaacttccagaagtgcttcgccattctcaagctgtaccagccgggcgtggataacagtgcggttgggacgagtaagaaaagtgacatggctgaggttaaggattggaaagcgattcgtgtggatctggtgatcacgccattcgagcagtacgcctatgcgctgctcggttggacgggcagcaaagaatttcgtcgcgatctgcgtcgctatgcggaggaagagcgcggcatgatcctcgacaaccatgccctctacgacctgaaaaagcgcatctttctgaaagcgggcagcgaagaagagattttcgcgcatctgggtctggattatgtggagccgtgggaacgcaacgcg

SEQ ID NO: 2412 - protein, 394 aa, synthetic construct
  REGION 1..394: note = Variant of terminal deoxynucleotidyl transferase
MHHHHHHGGSGHPPSNTPEGEVPSVIARPVSQYACQRKTTLNNYNKKFTDALEIMAENYKFKENLIACLEAKRAASILKYLPFEVTSMKDIQGLPCITDQVRDVIEEIIEEGESSRVKEVLNDERYKAFKQFTSVFGVGVKTAEKWYRMGLRTVEEARASKSLKLSKMQKAGFLYYEDLASGVSKEEADAVTLIVKNTVRTFLPDALVTITGGFRRGKPMGHDVDFLITNPGPKEDDELLHKVVDLLKTQGLLLYEDIKESTFVEGQLPSHKIDAMDNFQKCFAILKLYQPGVDNSAVGTSKKSDMAEVKDWKAIRVDLVITPFEQYAYALLGWTGSKEFRRDLRRYAEEERGMILDNHALYDLKKRIFLKAGSEEEIFAHLGLDYVEPWERNA

SEQ ID NO: 2413 - DNA, 1182 bp, synthetic construct
  misc_feature 1..1182: note = Variant of terminal deoxynucleotidyl transferase
  source 1..1182: mol_type = other DNA
atgcatcaccaccatcatcatgggggttctggtcatccgccgagcaataccccggagggggaggtgccgagcgttatcgcccgtccggttagtcagtacagctgccagcgcaagaccacgctgaataactacaacaaaaagttcaccgacgcgctggagatcatggccgagaactacaaatttaaagagaacctgatcgcgtgtctggaagccaagcgcgccgcgagtattctgaaatatctgccgttcgaggttaccagcatgaaagacatccaaggtctgccgtgcattaccgaccaagttcgtgacgtgatcgaggagatcatcgaagagggcgagagcagccgtgttaaagaagttctcaatgacgagcgctacaaggcctttaagcagttcaccagcgtgttcggtgtgggcgtgaaaaccgcggaaaagtggtaccgtatgggcctccgtacggttgaagaagcacgcgccagtaagagtctgaagctgagcaagatgcagaaggcgggctttctgtattacgaggatctggcgagcggcgttagtaaagaagaagccgatgccgttacgctcatcgtgaagaacacggtgcgtacctttctgccggatgcgctggtgaccatcaccggcggtttccgccgtggcaaacctatgggccacgacgttgactttctgatcacgaacccgggcggcaaagaggatgacgagctgctccacaaagtggttgatctgctcaagaagcaaggtctgctgctgtacgaagacatcaaagagagcacgttcgtggaggggcaactgccaagtcgtaaaatcgacgccatggacaacttccagaagtgcttcgccattctcaagctgtaccagccgggcgtggataacagtgcggttgggacgagtaagaaaagtgacatgggtgaggttaaggattggaaagcgattcgtgtggatctggtgatcacgccattcgagcagtacgcctatgcgctgctcggttggacgggcagcaaacaatttcgtcgcgatctgcgccgctatgcggaggaagagcgcggcatgatcctcgacaaccatgccctctacgacctgaaaaagcgcatctttctgaaagcgggcagcgaagaagagattttcgcgcatctgggtctggattatgtggagccgtgggaacgcaacgcg

SEQ ID NO: 2414 - protein, 394 aa, synthetic construct
  REGION 1..394: note = Variant of terminal deoxynucleotidyl transferase
MHHHHHHGGSGHPPSNTPEGEVPSVIARPVSQYSCQRKTTLNNYNKKFTDALEIMAENYKFKENLIACLEAKRAASILKYLPFEVTSMKDIQGLPCITDQVRDVIEEIIEEGESSRVKEVLNDERYKAFKQFTSVFGVGVKTAEKWYRMGLRTVEEARASKSLKLSKMQKAGFLYYEDLASGVSKEEADAVTLIVKNTVRTFLPDALVTITGGFRRGKPMGHDVDFLITNPGGKEDDELLHKVVDLLKKQGLLLYEDIKESTFVEGQLPSRKIDAMDNFQKCFAILKLYQPGVDNSAVGTSKKSDMGEVKDWKAIRVDLVITPFEQYAYALLGWTGSKQFRRDLRRYAEEERGMILDNHALYDLKKRIFLKAGSEEEIFAHLGLDYVEPWERNA

SEQ ID NO: 2415 - DNA, 1182 bp, synthetic construct
  misc_feature 1..1182: note = Variant of terminal deoxynucleotidyl transferase
  source 1..1182: mol_type = other DNA
atgcatcaccaccatcatcatgggggttctggtcatccgccaagcaataccccggagggggaggtgccgagcgttatcgcccgtccggttagtcagtacgcgtgccagcgcaagaccacgctgaataactacaacaaaaagtttaccgacgcgctggagatcatggccgagaactacaaatttaaagagaacctgatcgcgtgtctggaagccaagcgcgccgcgagtattctgaaatatctgccgttcgaggttaccagcatgaaagacatccaaggtctgccgtgcattaccgaccaagttcgtgacgtgatcgaggagatcatcgaagagggcgagagcagccgtgttaaagaagttctcaatgacgagcgctacaaggcctttaagcagttcaccagcgtgttcggtgtgggcgtgaaaaccgcggaaaagtggtttcgtatgggcctccgtacggttgaagaagcaaaggccagtaagagtctgaagctgagcaagatgcagaaggcgggctttctgtattacgaggatctggcgagcggcgttagtaaagaagaagccgatgccgttacgctcatcgtgaagaacacggtgcgtacctttctgccggatgcgctggtgaccatcaccggcggtttccgccgtggcaaacctatgggccacgacgttgactttctgatcacgaatccgggcccgaaagaggatgacgagctgctccacaaagtggttgatctgctcaagaagcaaggtctgctgctgtacgaagacatcaaagagagcacgttcgtggaggggcaactgccaagtcgcaaaatcgacgccatggacaacttccagaagtgcttcgccattctcaagctgtaccagccgggcgtggataacagtgcggttgggacgagtaagaaaagtgacatggccgaggttaaggattggaaagcgattcgtgtggatctggtgatcacgccattcgagcagtacgcctatgcgctgctcggttggacgggcagcaaagaatttcgtcgcgatctgaagcgctatgcggaggaagagcgcggcatgatcctcgacaaccatgccctctacgacctgaaaaagcgcatctttctgaaagcgggcagcgaagaagagattttcgcgcatctgggtctggattatgtggagccgtgggaacgcaacgcg

SEQ ID NO: 2416 - protein, 394 aa, synthetic construct
  REGION 1..394: note = Variant of terminal deoxynucleotidyl transferase
MHHHHHHGGSGHPPSNTPEGEVPSVIARPVSQYACQRKTTLNNYNKKFTDALEIMAENYKFKENLIACLEAKRAASILKYLPFEVTSMKDIQGLPCITDQVRDVIEEIIEEGESSRVKEVLNDERYKAFKQFTSVFGVGVKTAEKWFRMGLRTVEEAKASKSLKLSKMQKAGFLYYEDLASGVSKEEADAVTLIVKNTVRTFLPDALVTITGGFRRGKPMGHDVDFLITNPGPKEDDELLHKVVDLLKKQGLLLYEDIKESTFVEGQLPSRKIDAMDNFQKCFAILKLYQPGVDNSAVGTSKKSDMAEVKDWKAIRVDLVITPFEQYAYALLGWTGSKEFRRDLKRYAEEERGMILDNHALYDLKKRIFLKAGSEEEIFAHLGLDYVEPWERNA

SEQ ID NO: 2417 - DNA, 1182 bp, synthetic construct
  misc_feature 1..1182: note = Variant of terminal deoxynucleotidyl transferase
  source 1..1182: mol_type = other DNA
atgcatcaccaccatcatcatgggggttctggtcatccgccgagcaataccccggagggggaggtgccgagcgttatcgcccgtccggttagtcagtacgcgtgccagcgcaagaccacgctgaataactacaacaaaaagctgaccgacgcgctggagatcatggccgagaactacaaatttaaagagaacctgatcgcgtgtctggaagccaagcgcgccgcgagtatttttaaatatctgccgttcgaggttaccagcatgaaagacatccaaggtctgccgtgcattaccgaccaagttcgtgacgtgatcgaggagatcatcgaagagggcgagagcagccgtgttaaagaagttctcaatgacgagcgctacaaggcctttaagcagttcaccagcgtgttcggtgtgggcgtgaaaaccgcggaaaagtggtaccgtatgggcctccgtacggttgaagaagcacgcgccagtaagagtctgaagctgagcaagatgcagaaggcgggctttctgtattacgaggatctggcgagccgcgttagtaaagaagaagccgatgccgttacgctcatcgtgaagaacacggtgcgtacctttctgccggatgcgctggtgaccatcaccggcggtttccgccgtggcaaacctatgggccacgacgttgactttctgatcacgaatccgggccctaaagaggatgacgagctgctccacaaagtggttgatctgctcaagaagcaaggtctgctgctgtacgaagacatcaaagagagcacgttcgtggaggggcaactgccaagtcgcaaaatcgacgccatggacaacttccagaagtgcttcgccattctcaagctgtaccagccgggcgtggataacagtgcggttgggacgagtaagaaaagtgacatggctgaggttaaggattggaaagcgattcgtgtggatctggtgatcacgccattcgagcagtacgcctatgcgctgctcggttggacgggcagcaaagaatttcgtcgcgatctgcgccgctatgcggaggaagagcgcggcatgatcctcgacaaccatgccctctacgacctgaaaaagcgcatctttctgaaagcgggcagcgaagaagagattttcgcgcatctgggtctggattatgtggagccgtgggaacgcaacgcg

SEQ ID NO: 2418 - protein, 394 aa, synthetic construct
  REGION 1..394: note = Variant of terminal deoxynucleotidyl transferase
MHHHHHHGGSGHPPSNTPEGEVPSVIARPVSQYACQRKTTLNNYNKKLTDALEIMAENYKFKENLIACLEAKRAASIFKYLPFEVTSMKDIQGLPCITDQVRDVIEEIIEEGESSRVKEVLNDERYKAFKQFTSVFGVGVKTAEKWYRMGLRTVEEARASKSLKLSKMQKAGFLYYEDLASRVSKEEADAVTLIVKNTVRTFLPDALVTITGGFRRGKPMGHDVDFLITNPGPKEDDELLHKVVDLLKKQGLLLYEDIKESTFVEGQLPSRKIDAMDNFQKCFAILKLYQPGVDNSAVGTSKKSDMAEVKDWKAIRVDLVITPFEQYAYALLGWTGSKEFRRDLRRYAEEERGMILDNHALYDLKKRIFLKAGSEEEIFAHLGLDYVEPWERNA

SEQ ID NO: 2419 - DNA, 1182 bp, synthetic construct
  misc_feature 1..1182: note = Variant of terminal deoxynucleotidyl transferase
  source 1..1182: mol_type = other DNA
atgcatcaccaccatcatcatgggggttctggtcatccgccgagcaataccccggagggggaggtgccgagcgttatcgcccgtccggttagtcagtactcgtgccagcgcaagaccacgctgaataactacaacaaaaagctgaccgacgcgctggagatcatggccgagaactacaaatttaaagagaacctgatcgcgtgtctggaagccaagcgcgccgcgagtattctgaaatatctgccgttcgaggttaccagcatgaaagacatccaaggtctgccgtgcattaccgaccaagttcgtgacgtgatcgaggagatcatcgaagagggcgagagcagccgtgttaaagaagttctcaatgacgagcgctacaaggcctttaagcagttcaccagcgtgttcggtgtgggcgtgaaaaccgcggaaaagtggtaccgtatgggcctccgtacggttgaagaagcacgcgccagtaagagtctgaagctgagcaagatgcagaaggcgggctttctgtattacgaggatctggcgagcggcgttagtaaagaagaagccgatgccgttacgctcatcgtgaagaacacggtgcgtacctttctgccggatgcgctggtgaccatcaccggcggtttccgccgtggcaaacctatgggccacgacgttgactttctgatcacgctgccgggcggcaaagaggatgacgagctgctccacaaagtggttgatctgctcaagaagcaaggtctgctgctgtacgaagacatcaaagagagcacgttcgtggaggggcaactgccaagtcgcaaaatcgacgccatggacaacttccagaagtgcttcgccattctcaagctgtaccagccgggcgtggataacagtgcggttgggacgagtaagaaaagtgacatggccgaggttaaggattggaaagcgattcgtgtggatctggtgatcacgccattcgagcagtacgcctatgcgctgctcggttggacgggcagcaaagaatttcgtcgcgatctgcgccgctatgcggaggaagagcgcggcatgatcctcgacaaccatgccctctacgacctgaaaaagcgcatctttctgaaagcgggcagcgaagaagagattttcgcgcatctgggtctggattatgtggagccgtgggaacgcaacgcg

SEQ ID NO: 2420 - protein, 394 aa, synthetic construct
  REGION 1..394: note = Variant of terminal deoxynucleotidyl transferase
MHHHHHHGGSGHPPSNTPEGEVPSVIARPVSQYSCQRKTTLNNYNKKLTDALEIMAENYKFKENLIACLEAKRAASILKYLPFEVTSMKDIQGLPCITDQVRDVIEEIIEEGESSRVKEVLNDERYKAFKQFTSVFGVGVKTAEKWYRMGLRTVEEARASKSLKLSKMQKAGFLYYEDLASGVSKEEADAVTLIVKNTVRTFLPDALVTITGGFRRGKPMGHDVDFLITLPGGKEDDELLHKVVDLLKKQGLLLYEDIKESTFVEGQLPSRKIDAMDNFQKCFAILKLYQPGVDNSAVGTSKKSDMAEVKDWKAIRVDLVITPFEQYAYALLGWTGSKEFRRDLRRYAEEERGMILDNHALYDLKKRIFLKAGSEEEIFAHLGLDYVEPWERNA

SEQ ID NO: 2421 - DNA, 1182 bp, synthetic construct
  misc_feature 1..1182: note = Variant of terminal deoxynucleotidyl transferase
  source 1..1182: mol_type = other DNA
atgcatcaccaccatcatcatgggggttctggtcatccgccgagcaataccccggagggggaggtgccgagcgttatcgcccgtccggttagtcagtactcgtgccagcgcaagaccacgctgaataactacaacaaaaagtttaccgacgcgctggagatcatggccgagaactacaaatttaaagagaacctgatcgcgtgtctggaagccaagcgcgccgcgagtattctgaaatatctgccgttcgaggttaccagcatgaaagacatccaaggtctgccgtgcattaccgaccaagttcgtgacgtgatcgaggagatcatcgaagagggcgagagcagccgtgttaaagaagttctcaatgacgagcgctacaaggcctttaagcagttcaccagcgtgttcggtgtgggcgtgaaaaccgcggaaaagtggtaccgtatgggcctccgtacggttgaagaagcacgcgccagtaagagtctgaagctgagcaagatgcagaaggcgggctttctgtattacgaggatctggcgagcatggttagtaaagaagaagccgatgccgttacgctcatcgtgaagaacacggtgcgtacctttctgccggatgcgctggtgaccatcaccggcggtttccgccgtggcaaacctatgggccacgacgttgactttctgatcacgaacccgggccgcaaagaggatgacgagctgctccacaaagtggttgatctgctcaagacgcaaggtctgctgctgtacgaagacatcaaagagagcacgttcgtggaggggcaactgccaagtcgtaaaatcgacgccatggacaacttccagaagtgcttcgccattctcaagctgtaccagccgggcgtggataacagtgcggttgggacgagtaagaaaagtgacatggccgaggttaaggattggaaagcgattcgtgtggatctggtgatcacgccattcgagcagtacgcctatgcgctgctcggttggacgggcagcaaagaatttcgtcgcgatctgcgccgctatgcggaggaagagcgcggcatgatcctcgacaaccatgccctctacgacctgaaaaagcgcatctttctgaaagcgggcagcgaagaagagattttcgcgcatctgggtctggattatgtggagccgtgggaacgcaacgcg

SEQ ID NO: 2422 - protein, 394 aa, synthetic construct
  REGION 1..394: note = Variant of terminal deoxynucleotidyl transferase
MHHHHHHGGSGHPPSNTPEGEVPSVIARPVSQYSCQRKTTLNNYNKKFTDALEIMAENYKFKENLIACLEAKRAASILKYLPFEVTSMKDIQGLPCITDQVRDVIEEIIEEGESSRVKEVLNDERYKAFKQFTSVFGVGVKTAEKWYRMGLRTVEEARASKSLKLSKMQKAGFLYYEDLASMVSKEEADAVTLIVKNTVRTFLPDALVTITGGFRRGKPMGHDVDFLITNPGRKEDDELLHKVVDLLKTQGLLLYEDIKESTFVEGQLPSRKIDAMDNFQKCFAILKLYQPGVDNSAVGTSKKSDMAEVKDWKAIRVDLVITPFEQYAYALLGWTGSKEFRRDLRRYAEEERGMILDNHALYDLKKRIFLKAGSEEEIFAHLGLDYVEPWERNA

SEQ ID NO: 2423 - DNA, 1182 bp, synthetic construct
  misc_feature 1..1182: note = Variant of terminal deoxynucleotidyl transferase
  source 1..1182: mol_type = other DNA
atgcatcaccaccatcatcatgggggttctggtcatccgccgagcaataccccggagggggaggtgccgagcgttatcgcccgtccggttagtcagtacagctgccagcgcaagaccacgctgaataactacaacaaaaagtttaccgacgcgctggagatcatggccgagaactacaaatttaaagagaacctgatcgcgtgtctggaagccaagcgcgccgcgagtatttttaaatatctgccgttcgaggttaccagcatgaaagacatccaaggtctgccgtgcattaccgaccaagttcgtgacgtgatcgaggagatcatcgaagagggcgagagcagccgtgttaaagaagttctcaatgacgagcgctacaaggcctttaagcagttcaccagcgtgttcggtgtgggcgtgaaaaccgcggaaaagtggtaccgtatgggcctccgtacggttgaagaagcaaaggccagtaagagtctgaagctgagcaagatgcagaaggcgggctttctgtattacgaggatctggcgagccgcgttagtaaagaagaagccgatgccgttacgctcatcgtgaagaacacggtgcgtacctttctgccggatgcgctggtgaccatcaccggcggtttccgccgtggcaaacctatgggccacgacgttgactttctgatcacgaacccgggccctaaagaggatgacgagctgctccacaaagtggttgatctgctcaagacgcaaggtctgctgctgtacgaagacatcaaagagagcacgttcgtggaggggcaactgccaagtcataaaatcgacgccatggacaacttccagaagtgcttcgccattctcaagctgtaccagccgggcgtggataacagtgcggttgggacgagtaagaaaagtgacatggctgaggttaaggattggaaagcgattcgtgtggatctggtgatcacgccattcgagcagtacgcctatgcgctgctcggttggacgggcagcaaacaatttcgtcgcgatctgcgccgctatgcggaggaagagcgcggcatgatcctcgacaaccatgccctctacgacctgaaaaagcgcatctttctgaaagcgggcagcgaagaagagattttcgcgcatctgggtctggattatgtggagccgtgggaacgcaacgcg

SEQ ID NO: 2424 - protein, 394 aa, synthetic construct
  REGION 1..394: note = Variant of terminal deoxynucleotidyl transferase
MHHHHHHGGSGHPPSNTPEGEVPSVIARPVSQYSCQRKTTLNNYNKKFTDALEIMAENYKFKENLIACLEAKRAASIFKYLPFEVTSMKDIQGLPCITDQVRDVIEEIIEEGESSRVKEVLNDERYKAFKQFTSVFGVGVKTAEKWYRMGLRTVEEAKASKSLKLSKMQKAGFLYYEDLASRVSKEEADAVTLIVKNTVRTFLPDALVTITGGFRRGKPMGHDVDFLITNPGPKEDDELLHKVVDLLKTQGLLLYEDIKESTFVEGQLPSHKIDAMDNFQKCFAILKLYQPGVDNSAVGTSKKSDMAEVKDWKAIRVDLVITPFEQYAYALLGWTGSKQFRRDLRRYAEEERGMILDNHALYDLKKRIFLKAGSEEEIFAHLGLDYVEPWERNA

SEQ ID NO: 2425 - DNA, 1182 bp, synthetic construct
  misc_feature 1..1182: note = Variant of terminal deoxynucleotidyl transferase
  source 1..1182: mol_type = other DNA
atgcatcaccaccatcatcatgggggttctggtcatccgccgagcaataccccggagggggaggtgccgagcgttatcgcccgtccggttagtcagtacgcgtgccagcgcaagaccacgctgaataactacaacaaaaagctgaccgacgcgctggagatcatggccgagaactacaaatttaaagagaacctgatcgcgtgtctggaagccaagcgcgccgcgagtatttttaaatatctgccgttcgaggttaccagcatgaaagacatccaaggtctgccgtgcattaccgaccaagttcgtgacgtgatcgaggagatcatcgaagagggcgagagcagccgtgttaaagaagttctcaatgacgagcgctacaaggcctttaagcagttcaccagcgtgttcggtgtgggcgtgaaaaccgcggaaaagtggttccgtatgggcctccgtacggttgaagaagcacgcgccagtaagagtctgaagctgagcaagatgcagaaggcgggctttctgtattacgaggatctggcgagcatggttagtaaagaagaagccgatgccgttacgctcatcgtgaagaacacggtgcgtacctttctgccggatgcgctggtgaccatcaccggcggtttccgccgtggcaaacctgtgggccacgacgttgactttctgatcacgaatccgggcccgaaagaggatgacgagctgctccacaaagtggttgatctgctcaagacgcaaggtctgctgctgtacgaagacatcaaagagagcacgttcgtggaggggcaactgccaagtcgtaaaatcgacgccatggacaacttccagaagtgcttcgccattctcaagctgtaccagccgggcgtggataacagtgcggttgggacgagtaagaaaagtgacatgggtgaggttaaggattggaaagcgattcgtgtggatctggtgatcacgccattcgagcagtacgcctatgcgctgctcggttggacgggcagcaaagaatttcgtcgcgatctgcgtcgctatgcggaggaagagcgcggcatgatcctcgacaaccatgccctctacgacctgaaaaagcgcatctttctgaaagcgggcagcgaagaagagattttcgcgcatctgggtctggattatgtggagccgtgggaacgcaacgcg

SEQ ID NO: 2426 - protein, 394 aa, synthetic construct
  REGION 1..394: note = Variant of terminal deoxynucleotidyl transferase
MHHHHHHGGSGHPPSNTPEGEVPSVIARPVSQYACQRKTTLNNYNKKLTDALEIMAENYKFKENLIACLEAKRAASIFKYLPFEVTSMKDIQGLPCITDQVRDVIEEIIEEGESSRVKEVLNDERYKAFKQFTSVFGVGVKTAEKWFRMGLRTVEEARASKSLKLSKMQKAGFLYYEDLASMVSKEEADAVTLIVKNTVRTFLPDALVTITGGFRRGKPVGHDVDFLITNPGPKEDDELLHKVVDLLKTQGLLLYEDIKESTFVEGQLPSRKIDAMDNFQKCFAILKLYQPGVDNSAVGTSKKSDMGEVKDWKAIRVDLVITPFEQYAYALLGWTGSKEFRRDLRRYAEEERGMILDNHALYDLKKRIFLKAGSEEEIFAHLGLDYVEPWERNA

SEQ ID NO: 2427 - DNA, 1182 bp, synthetic construct
  misc_feature 1..1182: note = Variant of terminal deoxynucleotidyl transferase
  source 1..1182: mol_type = other DNA
atgcatcaccaccatcatcatgggggttctggtcatccgccgagcaataccccggagggggaggtgccgagcgttatcgcccgtccggttagtcagtacgcgtgccagcgcaagaccacgctgaataactacaacaaaaagttcaccgacgcgctggagatcatggccgagaactacaaatttaaagagaacctgatcgcgtgtctggaagccaagcgcgccgcgagtattctgaaatatctgccgttcgaggttaccagcatgaaagacatccaaggtctgccgtgcattaccgaccaagttcgtgacgtgatcgaggagatcatcgaagagggcgagagcagccgtgttaaagaagttctcaatgacgagcgctacaaggcctttaagcagttcaccagcgtgttcggtgtgggcgtgaaaaccgcggaaaagtggtaccgtatgggcctccgtacggttgaagaagcacgcgccagtaagagtctgaagctgagcaagatgcagaaggcgggctttctgtattacgaggatctggcgagccgcgttagtaaagaagaagccgatgccgttacgctcatcgtgaagaacacggtgcgtacctttctgccggatgcgctggtgaccatcaccggcggtttccgccgtggcaaacctatgggccacgacgttgactttctgatcacgaacccgggccctaaagaggatgacgagctgctccacaaagtggttgatctgctcaagaagcaaggtctgctgctgtacgaagacatcaaagagagcacgttcgtggaggggcaactgccaagtcgtaaaatcgacgccatggacaacttccagaagtgcttcgccattctcaagctgtaccagccgggcgtggataacagtgcggttgggacgagtaagaaaagtgacatggccgaggttaaggattggaaagcgattcgtgtggatctggtgatcacgccattcgagcagtacgcctatgcgctgctcggttggacgggcagcaaagaatttcgtcgcgatctgcgccgctatgcggaggaagagcgcggcatgatcctcgacaaccatgccctctacgacctgaaaaagcgcatctttctgaaagcgggcagcgaagaagagattttcgcgcatctgggtctggattatgtggagccgtgggaacgcaacgcg

SEQ ID NO: 2428 - protein, 394 aa, synthetic construct
  REGION 1..394: note = Variant of terminal deoxynucleotidyl transferase
MHHHHHHGGSGHPPSNTPEGEVPSVIARPVSQYACQRKTTLNNYNKKFTDALEIMAENYKFKENLIACLEAKRAASILKYLPFEVTSMKDIQGLPCITDQVRDVIEEIIEEGESSRVKEVLNDERYKAFKQFTSVFGVGVKTAEKWYRMGLRTVEEARASKSLKLSKMQKAGFLYYEDLASRVSKEEADAVTLIVKNTVRTFLPDALVTITGGFRRGKPMGHDVDFLITNPGPKEDDELLHKVVDLLKKQGLLLYEDIKESTFVEGQLPSRKIDAMDNFQKCFAILKLYQPGVDNSAVGTSKKSDMAEVKDWKAIRVDLVITPFEQYAYALLGWTGSKEFRRDLRRYAEEERGMILDNHALYDLKKRIFLKAGSEEEIFAHLGLDYVEPWERNA

SEQ ID NO: 2429 - DNA, 1182 bp, synthetic construct
  misc_feature 1..1182: note = Variant of terminal deoxynucleotidyl transferase
  source 1..1182: mol_type = other DNA
atgcatcaccaccatcatcatgggggttctggtcatccgccgagcaataccccggagggggaggtgccgagcgttatcgcccgtccggttagtcagtacgcgtgccagcgcaagaccacgctgaataactacaacaaaaagtttaccgacgcgctggagatcatggccgagaactacaaatttaaagagaacctgatcgcgtgtctggaagccaagcgcgccgcgagtattctgaaatatctgccgttcgaggttaccagcatgaaagacatccaaggtctgccgtgcattaccgaccaagttcgtgacgtgatcgaggagatcatcgaagagggcgagagcagccgtgttaaagaagttctcaatgacgagcgctacaaggcctttaagcagttcaccagcgtgttcggtgtgggcgtgaaaaccgcggaaaagtggtttcgtatgggcctccgtacggttgaagaagcaaaggccagtaagagtctgaagctgagcaagatgcagaaggcgggctttctgtattacgaggatctggcgagccgcgttagtaaagaagaagccgatgccgttacgctcatcgtgaagaacacggtgcgtacctttctgccggatgcgctggtgaccatcaccggcggtttccgccgtggcaaacctatgggccacgacgttgactttctgatcacgaacccgggcggcaaagaggatgacgagctgctccacaaagtggttgatctgctcaagaagcaaggtctgctgctgtacgaagacatcaaagagagcacgttcgtggaggggcaactgccaagtcgcaaaatcgacgccatggacaacttccagaagtgcttcgccattctcaagctgtaccagccgggcgtggataacagtgcggttgggacgagtaagaaaagtgacatggccgaggttaaggattggaaagcgattcgtgtggatctggtgatcacgccattcgagcagtacgcctatgcgctgctcggttggacgggcagcaaagaatttcgtcgcgatctgcgccgctatgcggaggaagagcgcggcatgatcctcgacaaccatgccctctacgacctgaaaaagcgcatctttctgaaagcgggcagcgaagaagagattttcgcgcatctgggtctggattatgtggagccgtgggaacgcaacgcg

SEQ ID NO: 2430 - protein, 394 aa, synthetic construct
  REGION 1..394: note = Variant of terminal deoxynucleotidyl transferase
MHHHHHHGGSGHPPSNTPEGEVPSVIARPVSQYACQRKTTLNNYNKKFTDALEIMAENYKFKENLIACLEAKRAASILKYLPFEVTSMKDIQGLPCITDQVRDVIEEIIEEGESSRVKEVLNDERYKAFKQFTSVFGVGVKTAEKWFRMGLRTVEEAKASKSLKLSKMQKAGFLYYEDLASRVSKEEADAVTLIVKNTVRTFLPDALVTITGGFRRGKPMGHDVDFLITNPGGKEDDELLHKVVDLLKKQGLLLYEDIKESTFVEGQLPSRKIDAMDNFQKCFAILKLYQPGVDNSAVGTSKKSDMAEVKDWKAIRVDLVITPFEQYAYALLGWTGSKEFRRDLRRYAEEERGMILDNHALYDLKKRIFLKAGSEEEIFAHLGLDYVEPWERNA

SEQ ID NO: 2431 - DNA, 1182 bp, synthetic construct
  misc_feature 1..1182: note = Variant of terminal deoxynucleotidyl transferase
  source 1..1182: mol_type = other DNA
atgcatcaccaccatcatcatgggggttctggtcatccgccgagcaataccccggagggggaggtgccgagcgttatcgcccgtccggttagtcagtacagctgccagcgcaagaccacgctgaataactacaacaaaaagtttaccgacgcgctggagatcatggccgagaactacaaatttaaagagaacctgatcgcgtgtctggaagccaagcgcgccgcgagtatttttaaatatctgccgttcgaggttaccagcatgaaagacatccaaggtctgccgtgcattaccgaccaagttcgtgacgtgatcgaggagatcatcgaagagggcgagagcagccgtgttaaagaagttctcaatgacgagcgctacaaggcctttaagcagttcaccagcgtgttcggtgtgggcgtgaaaaccgcggaaaagtggtttcgtatgggcctccgtacggttgaagaagcaaaggccagtaagagtctgaagctgagcaagatgcagaaggcgggctttctgtattacgaggatctggcgagcatggttagtaaagaagaagccgatgccgttacgctcatcgtgaagaacacggtgcgtacctttctgccggatgcgctggtgaccatcaccggcggtttccgccgtggcaaacctgtgggccacgacgttgactttctgatcacgaacccgggccctaaagaggatgacgagctgctccacaaagtggttgatctgctcaagaagcaaggtctgctgctgtacgaagacatcaaagagagcacgttcgtggaggggcaactgccaagtcgcaaaatcgacgccatggacaacttccagaagtgcttcgccattctcaagctgtaccagccgggcgtggataacagtgcggttgggacgagtaagaaaagtgacatggccgaggttaaggattggaaagcgattcgtgtggatctggtgatcacgccattcgagcagtacgcctatgcgctgctcggttggacgggcagcaaacaatttcgtcgcgatctgcgccgctatgcggaggaagagcgcggcatgatcctcgacaaccatgccctctacgacctgaaaaagcgcatctttctgaaagcgggcagcgaagaagagattttcgcgcatctgggtctggattatgtggagccgtgggaacgcaacgcg

SEQ ID NO: 2432 - protein, 394 aa, synthetic construct
  REGION 1..394: note = Variant of terminal deoxynucleotidyl transferase
MHHHHHHGGSGHPPSNTPEGEVPSVIARPVSQYSCQRKTTLNNYNKKFTDALEIMAENYKFKENLIACLEAKRAASIFKYLPFEVTSMKDIQGLPCITDQVRDVIEEIIEEGESSRVKEVLNDERYKAFKQFTSVFGVGVKTAEKWFRMGLRTVEEAKASKSLKLSKMQKAGFLYYEDLASMVSKEEADAVTLIVKNTVRTFLPDALVTITGGFRRGKPVGHDVDFLITNPGPKEDDELLHKVVDLLKKQGLLLYEDIKESTFVEGQLPSRKIDAMDNFQKCFAILKLYQPGVDNSAVGTSKKSDMAEVKDWKAIRVDLVITPFEQYAYALLGWTGSKQFRRDLRRYAEEERGMILDNHALYDLKKRIFLKAGSEEEIFAHLGLDYVEPWERNA

SEQ ID NO: 2433 - DNA, 1182 bp, synthetic construct
  misc_feature 1..1182: note = Variant of terminal deoxynucleotidyl transferase
  source 1..1182: mol_type = other DNA
atgcatcaccaccatcatcatgggggttctggtcatccgccgagcaataccccggagggggaggtgccgagcgttatcgcccgtccggttagtcagtactcgtgccagcgcaagaccacgctgaataactacaacaaaaagctgaccgacgcgctggagatcatggccgagaactacaaatttaaagagaacctgatcgcgtgtctggaagccaagcgcgccgcgagtatttttaaatatctgccgttcgaggttaccagcatgaaagacatccaaggtctgccgtgcattaccgaccaagttcgtgacgtgatcgaggagatcatcgaagagggcgagagcagccgtgttaaagaagttctcaatgacgagcgctacaaggcctttaagcagttcaccagcgtgttcggtgtgggcgtgaaaaccgcggaaaagtggtaccgtatgggcctccgtacggttgaagaagcaaaggccagtaagagtctgaagctgagcaagatgcagaaggcgggctttctgtattacgaggatctggcgagcatggttagtaaagaagaagccgatgccgttacgctcatcgtgaagaacacggtgcgtacctttctgccggatgcgctggtgaccatcaccggcggtttccgccgtggcaaacctgtgggccacgacgttgactttctgatcacgaacccgggccctaaagaggatgacgagctgctccacaaagtggttgatctgctcaagaagcaaggtctgctgctgtacgaagacatcaaagagagcacgttcgtggaggggcaactgccaagtcgcaaaatcgacgccatggacaacttccagaagtgcttcgccattctcaagctgtaccagccgggcgtggataacagtgcggttgggacgagtaagaaaagtgacatggctgaggttaaggattggaaagcggttcgtgtggatctggtgatcacgccattcgagcagtacgcctatgcgctgctcggttggacgggcagcaaagaatttcgtcgcgatctgcgtcgctatgcggaggaagagcgcggcatgatcctcgacaaccatgccctctacgacctgaaaaagcgcatctttctgaaagcgggcagcgaagaagagattttcgcgcatctgggtctggattatgtggagccgtgggaacgcaacgcg

SEQ ID NO: 2434 - protein, 394 aa, synthetic construct
  REGION 1..394: note = Variant of terminal deoxynucleotidyl transferase
MHHHHHHGGSGHPPSNTPEGEVPSVIARPVSQYSCQRKTTLNNYNKKLTDALEIMAENYKFKENLIACLEAKRAASIFKYLPFEVTSMKDIQGLPCITDQVRDVIEEIIEEGESSRVKEVLNDERYKAFKQFTSVFGVGVKTAEKWYRMGLRTVEEAKASKSLKLSKMQKAGFLYYEDLASMVSKEEADAVTLIVKNTVRTFLPDALVTITGGFRRGKPVGHDVDFLITNPGPKEDDELLHKVVDLLKKQGLLLYEDIKESTFVEGQLPSRKIDAMDNFQKCFAILKLYQPGVDNSAVGTSKKSDMAEVKDWKAVRVDLVITPFEQYAYALLGWTGSKEFRRDLRRYAEEERGMILDNHALYDLKKRIFLKAGSEEEIFAHLGLDYVEPWERNA

SEQ ID NO: 2435 - DNA, 1182 bp, synthetic construct
  misc_feature 1..1182: note = Variant of terminal deoxynucleotidyl transferase
  source 1..1182: mol_type = other DNA
atgcatcaccaccatcatcatgggggttctggtcatccgccgagcaataccccggagggggaggtgccgagcgttatcgcccgtccggttagtcagtacgcgtgccagcgcaagaccacgctgaataactacaacaaaaagttcaccgacgcgctggagatcatggccgagaactacaaatttaaagagaacctgatcgcgtgtctggaagccaagcgcgccgcgagtatttttaaatatctgccgttcggggttaccagcatgaaagacatccaaggtctgccgtgcattaccgaccaagttcgtgacgtgatcgaggagatcatcgaagagggcgagagcagccgtgttaaagaagttctcaatgacgagcgctacaaggcctttaagcagttcaccagcgtgttcggtgtgggcgtgaaaaccgcggaaaagtggtaccgtatgggcctccgtacggttgaagaagcacgcgccagtaagagtctgaagctgagcaagatgcagaaggcgggctttctgtattacgaggatctggcgagcatggttagtaaagaagaagccgatgccgttacgctcatcgtgaagaacacggtgcgtacctttctgccggatgcgctggtgaccatcaccggcggtttccgccgtggcaaacctgtgggccacgacgttgactttctgatcacgaatccgggcccgaaagaggatgacgagctgctccacaaagtggttgatctgctcaagaagcaaggtctgctgctgtacgaagacatcaaagagagcacgttcgtggaggggcaactgccaagtcgtaaaatcgacgccatggacaacttccagaagtgcttcgccattctcaagctgtaccagccgggcgtggataacagtgcggttgggacgagtaagaaaagtgacatggccgaggttaaggattggaaagcgattcgtgtggatctggtgatcacgccattcgagcagtacgcctatgcgctgctcggttggacgggcagcaaagaatttcgtcgcgatctgcgccgctatgcggaggaagagcgcggcatgatcctcgacaaccatgccctctacgacctgaaaaagcgcatctttctgaaagcgggcagcgaagaagagattttcgcgcatctgggtctggattatgtggagccgtgggaacgcaacgcg

SEQ ID NO: 2436 - protein, 394 aa, synthetic construct
  REGION 1..394: note = Variant of terminal deoxynucleotidyl transferase
MHHHHHHGGSGHPPSNTPEGEVPSVIARPVSQYACQRKTTLNNYNKKFTDALEIMAENYKFKENLIACLEAKRAASIFKYLPFGVTSMKDIQGLPCITDQVRDVIEEIIEEGESSRVKEVLNDERYKAFKQFTSVFGVGVKTAEKWYRMGLRTVEEARASKSLKLSKMQKAGFLYYEDLASMVSKEEADAVTLIVKNTVRTFLPDALVTITGGFRRGKPVGHDVDFLITNPGPKEDDELLHKVVDLLKKQGLLLYEDIKESTFVEGQLPSRKIDAMDNFQKCFAILKLYQPGVDNSAVGTSKKSDMAEVKDWKAIRVDLVITPFEQYAYALLGWTGSKEFRRDLRRYAEEERGMILDNHALYDLKKRIFLKAGSEEEIFAHLGLDYVEPWERNA

SEQ ID NO: 2437 - DNA, 1182 bp, synthetic construct
  misc_feature 1..1182: note = Variant of terminal deoxynucleotidyl transferase
  source 1..1182: mol_type = other DNA
atgcatcaccaccatcatcatgggggttctggtcatccgccgagcaataccccggagggggaggtgccgagcgttatcgcccgtccggttagtcagtactcgtgccagcgcaagaccacgctgaataactacaacaaaaagttcaccgacgcgctggagatcatggccgagaactacaaatttaaagagaacctgatcgcgtgtctggaagccaagcgcgccgcgagtatttttaaatatctgccgttcgaggttaccagcatgaaagacatccaaggtctgccgtgcattaccgaccaagttcgtgacgtgatcgaggagatcatcgaagagggcgagagcagccgtgttaaagaagttctcaatgacgagcgctacaaggcctttaagcagttcaccagcgtgttcggtgtgggcgtgaaaaccgcggaaaagtggttccgtatgggcctccgtacggttgaagaagcaaaggccagtaagagtctgaagctgagcaagatgcagaaggcgggctttctgtattacgaggatctggcgagcggcgttagtaaagaagaagccgatgccgttacgctcatcgtgaagaacacggtgcgtacctttctgccggatgcgctggtgaccatcaccggcggtttccgccgtggcaaacctatgggccacgacgttgactttctgatcacgaatccgggcccgaaagaggatgacgagctgctccacaaagtggttgatctgctcaagaagcaaggtctgctgctgtacgaagacatcaaagagagcacgttcgtggaggggcaactgccaagtcataaaatcgacgccatggacaacttccagaagtgcttcgccattctcaagctgtaccagccgggcgtggataacagtgcggttgggacgagtaagaaaagtgacatggctgaggttaaggattggaaagcggttcgtgtggatctggtgatcacgccattcgagcagtacgcctatgcgctgctcggttggacgggcagcaaacaatttcgtcgcgatctgcgccgctatgcggaggaagagcgcggcatgatcctcgacaaccatgccctctacgacctgaaaaagcgcatctttctgaaagcgggcagcgaagaagagattttcgcgcatctgggtctggattatgtggagccgtgggaacgcaacgcg

SEQ ID NO: 2438 - protein, 394 aa, synthetic construct
  REGION 1..394: note = Variant of terminal deoxynucleotidyl transferase
MHHHHHHGGSGHPPSNTPEGEVPSVIARPVSQYSCQRKTTLNNYNKKFTDALEIMAENYKFKENLIACLEAKRAASIFKYLPFEVTSMKDIQGLPCITDQVRDVIEEIIEEGESSRVKEVLNDERYKAFKQFTSVFGVGVKTAEKWFRMGLRTVEEAKASKSLKLSKMQKAGFLYYEDLASGVSKEEADAVTLIVKNTVRTFLPDALVTITGGFRRGKPMGHDVDFLITNPGPKEDDELLHKVVDLLKKQGLLLYEDIKESTFVEGQLPSHKIDAMDNFQKCFAILKLYQPGVDNSAVGTSKKSDMAEVKDWKAVRVDLVITPFEQYAYALLGWTGSKQFRRDLRRYAEEERGMILDNHALYDLKKRIFLKAGSEEEIFAHLGLDYVEPWERNA

SEQ ID NO: 2439 - DNA, 1182 bp, synthetic construct
  misc_feature 1..1182: note = Variant of terminal deoxynucleotidyl transferase
  source 1..1182: mol_type = other DNA
atgcatcaccaccatcatcatgggggttctggtcatccgccgagcaataccccggagggggaggtgccgagcgttatcgcccgtccggttagtcagtactcgtgccagcgcaagaccacgctgaataactacaacaaaaagtttaccgacgcgctggagatcatggccgagaactacaaatttaaagagaacctgatcgcgtgtctggaagccaagcgcgccgcgagtattctgaaatatctgccgttcgaggttaccagcatgaaagacatccaaggtctgccgtgcattaccgaccaagttcgtgacgtgatcgaggagatcatcgaagagggcgagagcagccgtgttaaagaagttctcaatgacgagcgctacaaggcctttaagcagttcaccagcgtgttcggtgtgggcgtgaaaaccgcggaaaagtggtttcgtatgggcctccgtacggttgaagaagcacgcgccagtaagagtctgaagctgagcaagatgcagaaggcgggctttctgtattacgaggatctggcgagcggcgttagtaaagaagaagccgatgccgttacgctcatcgtgaagaacacggtgcgtacctttctgccggatgcgctggtgaccatcaccggcggtttccgccgtggcaaacctgtgggccacgacgttgactttctgatcacgctgccgggccctaaagaggatgacgagctgctccacaaagtggttgatctgctcaagacgcaaggtctgctgctgtacgaagacatcaaagagagcacgttcgtggaggggcaactgccaagtcgtaaaatcgacgccatggacaacttccagaagtgcttcgccattctcaagctgtaccagccgggcgtggataacagtgcggttgggacgagtaagaaaagtgacatgggtgaggttaaggattggaaagcgattcgtgtggatctggtgatcacgccattcgagcagtacgcctatgcgctgctcggttggacgggcagcaaacaatttcgtcgcgatctgcgccgctatgcggaggaagagcgcggcatgatcctcgacaaccatgccctctacgacctgaaaaagcgcatctttctgaaagcgggcagcgaagaagagattttcgcgcatctgggtctggattatgtggagccgtgggaacgcaacgcg

SEQ ID NO: 2440 - protein, 394 aa, synthetic construct
  REGION 1..394: note = Variant of terminal deoxynucleotidyl transferase
MHHHHHHGGSGHPPSNTPEGEVPSVIARPVSQYSCQRKTTLNNYNKKFTDALEIMAENYKFKENLIACLEAKRAASILKYLPFEVTSMKDIQGLPCITDQVRDVIEEIIEEGESSRVKEVLNDERYKAFKQFTSVFGVGVKTAEKWFRMGLRTVEEARASKSLKLSKMQKAGFLYYEDLASGVSKEEADAVTLIVKNTVRTFLPDALVTITGGFRRGKPVGHDVDFLITLPGPKEDDELLHKVVDLLKTQGLLLYEDIKESTFVEGQLPSRKIDAMDNFQKCFAILKLYQPGVDNSAVGTSKKSDMGEVKDWKAIRVDLVITPFEQYAYALLGWTGSKQFRRDLRRYAEEERGMILDNHALYDLKKRIFLKAGSEEEIFAHLGLDYVEPWERNA

SEQ ID NO: 2441 - DNA, 1182 bp, synthetic construct
  misc_feature 1..1182: note = Variant of terminal deoxynucleotidyl transferase
  source 1..1182: mol_type = other DNA
atgcatcaccaccatcatcatgggggttctggtcatccgccgagcaataccccggagggggaggtgccgagcgttatcgcccgtccggttagtcagtacgcgtgccagcgcaagaccacgctgaataactacaacaaaaagctgaccgacgcgctggagatcatggccgagaactacaaatttaaagagaacctgatcgcgtgtctggaagccaagcgcgccgcgagtattctgaaatatctgccgttcgaggttaccagcatgaaagacatccaaggtctgccgtgcattaccgaccaagttcgtgacgtgatcgaggagatcatcgaagagggcgagagcagccgtgttaaagaagttctcaatgacgagcgctacaaggcctttaagcagttcaccagcgtgttcggtgtgggcgtgaaaaccgcggaaaagtggtttcgtatgggcctccgtacggttgaagaagcaaaggccagtaagagtctgaagctgagcaagatgcagaaggcgggctttctgtattacgaggatctggcgagcggcgttagtaaagaagaagccgatgccgttacgctcatcgtgaagaacacggtgcgtacctttctgccggatgcgctggtgaccatcaccggcggtttccgccgtggcaaacctatgggccacgacgttgactttctgatcacgaacccgggcggcaaagaggatgacgagctgctccacaaagtggttgatctgctcaagacgcaaggtctgctgctgtacgaagacatcaaagagagcacgttcgtggaggggcaactgccaagtcgcaaaatcgacgccatggacaacttccagaagtgcttcgccattctcaagctgtaccagccgggcgtggataacagtgcggttgggacgagtaagaaaagtgacatggccgaggttaaggattggaaagcgattcgtgtggatctggtgatcacgccattcgagcagtacgcctatgcgctgctcggttggacgggcagcaaagaatttcgtcgcgatctgcgtcgctatgcggaggaagagcgcggcatgatcctcgacaaccatgccctctacgacctgaaaaagcgcatctttctgaaagcgggcagcgaagaagagattttcgcgcatctgggtctggattatgtggagccgtgggaacgcaacgcg

SEQ ID NO: 2442 - protein, 394 aa, synthetic construct
  REGION 1..394: note = Variant of terminal deoxynucleotidyl transferase
MHHHHHHGGSGHPPSNTPEGEVPSVIARPVSQYACQRKTTLNNYNKKLTDALEIMAENYKFKENLIACLEAKRAASILKYLPFEVTSMKDIQGLPCITDQVRDVIEEIIEEGESSRVKEVLNDERYKAFKQFTSVFGVGVKTAEKWFRMGLRTVEEAKASKSLKLSKMQKAGFLYYEDLASGVSKEEADAVTLIVKNTVRTFLPDALVTITGGFRRGKPMGHDVDFLITNPGGKEDDELLHKVVDLLKTQGLLLYEDIKESTFVEGQLPSRKIDAMDNFQKCFAILKLYQPGVDNSAVGTSKKSDMAEVKDWKAIRVDLVITPFEQYAYALLGWTGSKEFRRDLRRYAEEERGMILDNHALYDLKKRIFLKAGSEEEIFAHLGLDYVEPWERNA

SEQ ID NO: 2443 - DNA, 1182 bp, synthetic construct
  misc_feature 1..1182: note = Variant of terminal deoxynucleotidyl transferase
  source 1..1182: mol_type = other DNA
atgcatcaccaccatcatcatgggggttctggtcatccgccgagcaataccccggagggggaggtgccgagcgttatcgcccgtccggttagtcagtacgcgtgccagcgcaagaccacgctgaataactacaacaaaaagtttaccgacgcgctggagatcatggccgagaactacaaatttaaagagaacctgatcgcgtgtctggaagccaagcgcgccgcgagtattctgaaatatctgccgttcgaggttaccagcatgaaagacatccaaggtctgccgtgcattaccgaccaagttcgtgacgtgatcgaggagatcatcgaagagggcgagagcagccgtgttaaagaagttctcaatgacgagcgctacaaggcctttaagcagttcaccagcgtgttcggtgtgggcgtgaaaaccgcggaaaagtggtttcgtatgggcctccgtacggttgaagaagcacgcgccagtaagagtctgaagctgagcaagatgcagaaggcgggctttctgtattacgaggatctggcgagccgcgttagtaaagaagaagccgatgccgttacgctcatcgtgaagaacacggtgcgtacctttctgccggatgcgctggtgaccatcaccggcggtttccgccgtggcaaacctgtgggccacgacgttgactttctgatcacgaatccgggcccgaaagaggatgacgagctgctccacaaagtggttgatctgctcaagaagcaaggtctgctgctgtacgaagacatcaaagagagcacgttcgtggaggggcaactgccaagtcgcaaaatcgacgccatggacaacttccagaagtgcttcgccattctcaagctgtaccagccgggcgtggataacagtgcggttgggacgagtaagaaaagtgacatggccgaggttaaggattggaaagcgattcgtgtggatctggtgatcacgccattcgagcagtacgcctatgcgctgctcggttggacgggcagcaaagaatttcgtcgcgatctgcgccgctatgcggaggaagagcgcggcatgatcctcgacaaccatgccctctacgacctgaaaaagcgcatctttctgaaagcgggcagcgaagaagagattttcgcgcatctgggtctggattatgtggagccgtgggaacgcaacgcg

SEQ ID NO: 2444 - protein, 394 aa, synthetic construct
  REGION 1..394: note = Variant of terminal deoxynucleotidyl transferase
MHHHHHHGGSGHPPSNTPEGEVPSVIARPVSQYACQRKTTLNNYNKKFTDALEIMAENYKFKENLIACLEAKRAASILKYLPFEVTSMKDIQGLPCITDQVRDVIEEIIEEGESSRVKEVLNDERYKAFKQFTSVFGVGVKTAEKWFRMGLRTVEEARASKSLKLSKMQKAGFLYYEDLASRVSKEEADAVTLIVKNTVRTFLPDALVTITGGFRRGKPVGHDVDFLITNPGPKEDDELLHKVVDLLKKQGLLLYEDIKESTFVEGQLPSRKIDAMDNFQKCFAILKLYQPGVDNSAVGTSKKSDMAEVKDWKAIRVDLVITPFEQYAYALLGWTGSKEFRRDLRRYAEEERGMILDNHALYDLKKRIFLKAGSEEEIFAHLGLDYVEPWERNA

SEQ ID NO: 2445 - DNA, 1182 bp, synthetic construct
  misc_feature 1..1182: note = Variant of terminal deoxynucleotidyl transferase
  source 1..1182: mol_type = other DNA
atgcatcaccaccatcatcatgggggttctggtcatccgccgagcaataccccggagggggaggtgccgagcgttatcgcccgtccggttagtcagtactcgtgccagcgcaagaccacgctgaataactacaacaaaaagctgaccgacgcgctggagatcatggccgagaactacaaatttaaagagaacctgatcgcgtgtctggaagccaagcgcgccgcgagtattctgaaatatctgccgttcgaggttaccagcatgaaagacatccaaggtctgccgtgcattaccgaccaagttcgtgacgtgatcgaggagatcatcgaagagggcgagagcagccgtgttaaagaagttctcaatgacgagcgctacaaggcctttaagcagttcaccagcgtgttcggtgtgggcgtgaaaaccgcggaaaagtggtaccgtatgggcctccgtacggttgaagaagcacgcgccagtaagagtctgaagctgagcaagatgcagaaggcgggctttctgtattacgaggatctggcgagcatggttagtaaagaagaagccgatgccgttacgctcatcgtgaagaacacggtgcgtacctttctgccggatgcgctggtgaccatcaccggcggtttccgccgtggcaaacctgtgggccacgacgttgactttctgatcacgaacccgggccctaaagaggatgacgagctgctccacaaagtggttgatctgctcaagaagcaaggtctgctgctgtacgaagacatcaaagagagcacgttcgtggaggggcaactgccaagtcgtaaaatcgacgccatggacaacttccagaagtgcttcgccattctcaagctgtaccagccgggcgtggataacagtgcggttgggacgagtaagaaaagtgacatggccgaggttaaggattggaaagcggttcgtgtggatctggtgatcacgccattcgagcagtacgcctatgcgctgctcggttggacgggcagcaaagaatttcgtcgcgatctgcgccgctatgcggaggaagagcgcggcatgatcctcgacaaccatgccctctacgacctgaaaaagcgcatctttctgaaagcgggcagcgaagaagagattttcgcgcatctgggtctggattatgtggagccgtgggaacgcaacgcg

SEQ ID NO: 2446 - protein, 394 aa, synthetic construct
  REGION 1..394: note = Variant of terminal deoxynucleotidyl transferase
MHHHHHHGGSGHPPSNTPEGEVPSVIARPVSQYSCQRKTTLNNYNKKLTDALEIMAENYKFKENLIACLEAKRAASILKYLPFEVTSMKDIQGLPCITDQVRDVIEEIIEEGESSRVKEVLNDERYKAFKQFTSVFGVGVKTAEKWYRMGLRTVEEARASKSLKLSKMQKAGFLYYEDLASMVSKEEADAVTLIVKNTVRTFLPDALVTITGGFRRGKPVGHDVDFLITNPGPKEDDELLHKVVDLLKKQGLLLYEDIKESTFVEGQLPSRKIDAMDNFQKCFAILKLYQPGVDNSAVGTSKKSDMAEVKDWKAVRVDLVITPFEQYAYALLGWTGSKEFRRDLRRYAEEERGMILDNHALYDLKKRIFLKAGSEEEIFAHLGLDYVEPWERNA

SEQ ID NO: 2447 - DNA, 1182 bp, synthetic construct
  misc_feature 1..1182: note = Variant of terminal deoxynucleotidyl transferase
  source 1..1182: mol_type = other DNA
atgcatcaccaccatcatcatgggggttctggtcatccgccgagcaataccccggagggggaggtgccgagcgttatcgcccgtccggttagtcagtacagctgccagcgcaagaccacgctgaataactacaacaaaaagttcaccgacgcgctggagatcatggccgagaactacaaatttaaagagaacctgatcgcgtgtctggaagccaagcgcgccgcgagtattctgaaatatctgccgttcgaggttaccagcatgaaagacatccaaggtctgccgtgcattaccgaccaagttcgtgacgtgatcgaggagatcatcgaagagggcgagagcagccgtgttaaagaagttctcaatgacgagcgctacaaggcctttaagcagttcaccagcgtgttcggtgtgggcgtgaaaaccgcggaaaagtggtttcgtatgggcctccgtacggttgaagaagcaaaggccagtaagagtctgaagctgagcaagatgcagaaggcgggctttctgtattacgaggatctggcgagccgcgttagtaaagaagaagccgatgccgttacgctcatcgtgaagaacacggtgcgtacctttctgccggatgcgctggtgaccatcaccggcggtttccgccgtggcaaacctgtgggccacgacgttgactttctgatcacgaatccgggcccgaaagaggatgacgagctgctccacaaagtggttgatctgctcaagaagcaaggtctgctgctgtacgaagacatcaaagagagcacgttcgtggaggggcaactgccaagtcgcaaaatcgacgccatggacaacttccagaagtgcttcgccattctcaagctgtaccagccgggcgtggataacagtgcggttgggacgagtaagaaaagtgacatgggtgaggttaaggattggaaagcgattcgtgtggatctggtgatcacgccattcgagcagtacgcctatgcgctgctcggttggacgggcagcaaacaatttcgtcgcgatctgcgccgctatgcggaggaagagcgcggcatgatcctcgacaaccatgccctctacgacctgaaaaagcgcatctttctgaaagcgggcagcgaagaagagattttcgcgcatctgggtctggattatgtggagccgtgggaacgcaacgcg

SEQ ID NO: 2448 - protein, 394 aa, synthetic construct
  REGION 1..394: note = Variant of terminal deoxynucleotidyl transferase
MHHHHHHGGSGHPPSNTPEGEVPSVIARPVSQYSCQRKTTLNNYNKKFTDALEIMAENYKFKENLIACLEAKRAASILKYLPFEVTSMKDIQGLPCITDQVRDVIEEIIEEGESSRVKEVLNDERYKAFKQFTSVFGVGVKTAEKWFRMGLRTVEEAKASKSLKLSKMQKAGFLYYEDLASRVSKEEADAVTLIVKNTVRTFLPDALVTITGGFRRGKPVGHDVDFLITNPGPKEDDELLHKVVDLLKKQGLLLYEDIKESTFVEGQLPSRKIDAMDNFQKCFAILKLYQPGVDNSAVGTSKKSDMGEVKDWKAIRVDLVITPFEQYAYALLGWTGSKQFRRDLRRYAEEERGMILDNHALYDLKKRIFLKAGSEEEIFAHLGLDYVEPWERNA

SEQ ID NO: 2449 - DNA, 1182 bp, synthetic construct
  misc_feature 1..1182: note = Variant of terminal deoxynucleotidyl transferase
  source 1..1182: mol_type = other DNA
atgcatcaccaccatcatcatgggggttctggtcatccgccgagcaataccccggagggggaggtgccgagcgttatcgcccgtccggttagtcagtacagctgccagcgcaagaccacgctgaataactacaacaaaaagttcaccgacgcgctggagatcatggccgagaactacaaatttaaagagaacctgatcgcgtgtctggaagccaagcgcgccgcgagtatttttaaatatctgccgttcgaggttaccagcatgaaagacatccaaggtctgccgtgcattaccgaccaagttcgtgacgtgatcgaggagatcatcgaagagggcgagagcagccgtgttaaagaagttctcaatgacgagcgctacaaggcctttaagcagttcaccagcgtgttcggtgtgggcgtgaaaaccgcggaaaagtggtaccgtatgggcctccgtacggttgaagaagcacgcgccagtaagagtctgaagctgagcaagatgcagaaggcgggctttctgtattacgaggatctggcgagccgcgttagtaaagaagaagccgatgccgttacgctcatcgtgaagaacacggtgcgtacctttctgccggatgcgctggtgaccatcaccggcggtttccgccgtggcaaacctatgggccacgacgttgactttctgatcacgaatccgggcccgaaagaggatgacgagctgctccacaaagtggttgatctgctcaagacgcaaggtctgctgctgtacgaagacatcaaagagagcacgttcgtggaggggcaactgccaagtcgtaaaatcgacgccatggacaacttccagaagtgcttcgccattctcaagctgtaccagccgggcgtggataacagtgcggttgggacgagtaagaaaagtgacatgggtgaggttaaggattggaaagcggttcgtgtggatctggtgatcacgccattcgagcagtacgcctatgcgctgctcggttggacgggcagcaaagaatttcgtcgcgatctgcgtcgctatgcggaggaagagcgcggcatgatcctcgacaaccatgccctctacgacctgaaaaagcgcatctttctgaaagcgggcagcgaagaagagattttcgcgcatctgggtctggattatgtggagccgtgggaacgcaacgcg

SEQ ID NO: 2450 - protein, 394 aa, synthetic construct
  REGION 1..394: note = Variant of terminal deoxynucleotidyl transferase
MHHHHHHGGSGHPPSNTPEGEVPSVIARPVSQYSCQRKTTLNNYNKKFTDALEIMAENYKFKENLIACLEAKRAASIFKYLPFEVTSMKDIQGLPCITDQVRDVIEEIIEEGESSRVKEVLNDERYKAFKQFTSVFGVGVKTAEKWYRMGLRTVEEARASKSLKLSKMQKAGFLYYEDLASRVSKEEADAVTLIVKNTVRTFLPDALVTITGGFRRGKPMGHDVDFLITNPGPKEDDELLHKVVDLLKTQGLLLYEDIKESTFVEGQLPSRKIDAMDNFQKCFAILKLYQPGVDNSAVGTSKKSDMGEVKDWKAVRVDLVITPFEQYAYALLGWTGSKEFRRDLRRYAEEERGMILDNHALYDLKKRIFLKAGSEEEIFAHLGLDYVEPWERNA

SEQ ID NO: 2451 - DNA, 1182 bp, synthetic construct
  misc_feature 1..1182: note = Variant of terminal deoxynucleotidyl transferase
  source 1..1182: mol_type = other DNA
atgcatcaccaccatcatcatgggggttctggtcatccgccgagcaataccccggagggggaggtgccgagcgttatcgcccgtccggttagtcagtactcgtgccagcgcaagaccacgctgaataactacaacaaaaagctgaccgacgcgctggagatcatggccgagaactacaaatttaaagagaacctgatcgcgtgtctggaagccaagcgcgccgcgagtatttttaaatatctgccgttcgaggttaccagcatgaaagacatccaaggtctgccgtgcattaccgaccaagttcgtgacgtgatcgaggagatcatcgaagagggcgagagcagccgtgttaaagaagttctcaatgacgagcgctacaaggcctttaagcagttcaccagcgtgttcggtgtgggcgtgaaaaccgcggaaaagtggtaccgtatgggcctccgtacggttgaagaagcaaaggccagtaagagtctgaagctgagcaagatgcagaaggcgggctttctgtattacgaggatctggcgagcatggttagtaaagaagaagccgatgccgttacgctcatcgtgaagaacacggtgcgtacctttctgccggatgcgctggtgaccatcaccggcggtttccgccgtggcaaacctgtgggccacgacgttgactttctgatcacgaatccgggcggcaaagaggatgacgagctgctccacaaagtggttgatctgctcaagacgcaaggtctgctgctgtacgaagacatcaaagagagcacgttcgtggaggggcaactgccaagtcgcaaaatcgacgccatggacaacttccagaagtgcttcgccattctcaagctgtaccagccgggcgtggataacagtgcggttgggacgagtaagaaaagtgacatggctgaggttaaggattggaaagcgattcgtgtggatctggtgatcacgccattcgagcagtacgcctatgcgctgctcggttggacgggcagcaaacaatttcgtcgcgatctgaagcgctatgcggaggaagagcgcggcatgatcctcgacaaccatgccctctacgacctgaaaaagcgcatctttctgaaagcgggcagcgaagaagagattttcgcgcatctgggtctggattatgtggagccgtgggaacgcaacgcg

SEQ ID NO: 2452 - protein, 394 aa, synthetic construct
  REGION 1..394: note = Variant of terminal deoxynucleotidyl transferase
MHHHHHHGGSGHPPSNTPEGEVPSVIARPVSQYSCQRKTTLNNYNKKLTDALEIMAENYKFKENLIACLEAKRAASIFKYLPFEVTSMKDIQGLPCITDQVRDVIEEIIEEGESSRVKEVLNDERYKAFKQFTSVFGVGVKTAEKWYRMGLRTVEEAKASKSLKLSKMQKAGFLYYEDLASMVSKEEADAVTLIVKNTVRTFLPDALVTITGGFRRGKPVGHDVDFLITNPGGKEDDELLHKVVDLLKTQGLLLYEDIKESTFVEGQLPSRKIDAMDNFQKCFAILKLYQPGVDNSAVGTSKKSDMAEVKDWKAIRVDLVITPFEQYAYALLGWTGSKQFRRDLKRYAEEERGMILDNHALYDLKKRIFLKAGSEEEIFAHLGLDYVEPWERNA

SEQ ID NO: 2453 - DNA, 1182 bp, synthetic construct
  misc_feature 1..1182: note = Variant of terminal deoxynucleotidyl transferase
  source 1..1182: mol_type = other DNA
atgcatcaccaccatcatcatgggggttctggtcatccgccgagcaataccccggagggggaggtgccgagcgttatcgcccgtccggttagtcagtacgcgtgccagcgcaagaccacgctgaataactacaacaaaaagtttaccgacgcgctggagatcatggccgagaactacaaatttaaagagaacctgatcgcgtgtctggaagccaagcgcgccgcgagtattctgaaatatctgccgttcgaggttaccagcatgaaagacatccaaggtctgccgtgcattaccgaccaagttcgtgacgtgatcgaggagatcatcgaagagggcgagagcagccgtgttaaagaagttctcaatgacgagcgctacaaggcctttaagcagttcaccagcgtgttcggtgtgggcgtgaaaaccgcggaaaagtggtaccgtatgggcctccgtacggttgaagaagcaaaggccagtaagagtctgaagctgagcaagatgcagaaggcgggctttctgtattacgaggatctggcgagcatggttagtaaagaagaagccgatgccgttacgctcatcgtgaagaacacggtgcgtacctttctgccggatgcgctggtgaccatcaccggcggtttccgccgtggcaaacctatgggccacgacgttgactttctgatcacgaatccgggcccgaaagaggatgacgagctgctccacaaagtggttgatctgctcaagaagcaaggtctgctgctgtacgaagacatcaaagagagcacgttcgtggaggggcaactgccaagtcgcaaaatcgacgccatggacaacttccagaagtgcttcgccattctcaagctgtaccagccgggcgtggataacagtgcggttgggacgagtaagaaaagtgacatggccgaggttaaggattggaaagcgattcgtgtggatctggtgatcacgccattcgagcagtacgcctatgcgctgctcggttggacgggcagcaaagaatttcgtcgcgatctgcgccgctatgcggaggaagagcgcggcatgatcctcgacaaccatgccctctacgacctgaaaaagcgcatctttctgaaagcgggcagcgaagaagagattttcgcgcatctgggtctggattatgtggagccgtgggaacgcaacgcg

SEQ ID NO: 2454 - protein, 394 aa, synthetic construct
  REGION 1..394: note = Variant of terminal deoxynucleotidyl transferase
MHHHHHHGGSGHPPSNTPEGEVPSVIARPVSQYACQRKTTLNNYNKKFTDALEIMAENYKFKENLIACLEAKRAASILKYLPFEVTSMKDIQGLPCITDQVRDVIEEIIEEGESSRVKEVLNDERYKAFKQFTSVFGVGVKTAEKWYRMGLRTVEEAKASKSLKLSKMQKAGFLYYEDLASMVSKEEADAVTLIVKNTVRTFLPDALVTITGGFRRGKPMGHDVDFLITNPGPKEDDELLHKVVDLLKKQGLLLYEDIKESTFVEGQLPSRKIDAMDNFQKCFAILKLYQPGVDNSAVGTSKKSDMAEVKDWKAIRVDLVITPFEQYAYALLGWTGSKEFRRDLRRYAEEERGMILDNHALYDLKKRIFLKAGSEEEIFAHLGLDYVEPWERNA

SEQ ID NO: 2455 - DNA, 1182 bp, synthetic construct
  misc_feature 1..1182: note = Variant of terminal deoxynucleotidyl transferase
  source 1..1182: mol_type = other DNA
atgcatcaccaccatcatcatgggggttctggtcatccgccaagcaataccccggagggggaggtgccgagcgttatcgcccgtccggttagtcagtacgcgtgccagcgcaagaccacgctgaataactacaacaaaaagttcaccgacgcgctggagatcatggccgagaactacaaatttaaagagaacctgatcgcgtgtctggaagccaagcgcgccgcgagtattctgaaatatctgccgttcgaggttaccagcatgaaagacatccaaggtctgccgtgcattaccgaccaagttcgtgacgtgatcgaggagatcatcgaagagggcgagagcagccgtgttaaagaagttctcaatgacgagcgctacaaggcctttaagcagttcaccagcgtgttcggtgtgggcgtgaaaaccgcggaaaagtggtaccgtatgggcctccgtacggttgaagaagcaaaggccagtaagagtctgaagctgagcaagatgcagaaggcgggctttctgtattacgaggatctggcgagcggcgttagtaaagaagaagccgatgccgttacgctcatcgtgaagaacacggtgcgtacctttctgccggatgcgctggtgaccatcaccggcggtttccgccgtggcaaacctgtgggccacgacgttgactttctgatcacgaatccgggcccgaaagaggatgacgagctgctccacaaagtggttgatctgctcaagaagcaaggtctgctgctgtacgaagacatcaaagagagcacgttcgtggaggggcaactgccaagtcgcaaaatcgacgccatggacaacttccagaagtgcttcgccattctcaagctgtaccagccgggcgtggataacagtgcggttgggacgagtaagaaaagtgacatggctgaggttaaggattggaaagcgattcgtgtggatctggtgatcacgccattcgagcagtacgcctatgcgctgctcggttggacgggcagcaaagaatttcgtcgcgatctgcgccgctatgcggaggaagagcgcggcatgatcctcgacaaccatgccctctacgacctgaaaaagcgcatctttctgaaagcgggcagcgaagaagagattttcgcgcatctgggtctggattatgtggagccgtgggaacgcaacgcg

SEQ ID NO: 2456 - protein, 394 aa, synthetic construct
  REGION 1..394: note = Variant of terminal deoxynucleotidyl transferase
MHHHHHHGGSGHPPSNTPEGEVPSVIARPVSQYACQRKTTLNNYNKKFTDALEIMAENYKFKENLIACLEAKRAASILKYLPFEVTSMKDIQGLPCITDQVRDVIEEIIEEGESSRVKEVLNDERYKAFKQFTSVFGVGVKTAEKWYRMGLRTVEEAKASKSLKLSKMQKAGFLYYEDLASGVSKEEADAVTLIVKNTVRTFLPDALVTITGGFRRGKPVGHDVDFLITNPGPKEDDELLHKVVDLLKKQGLLLYEDIKESTFVEGQLPSRKIDAMDNFQKCFAILKLYQPGVDNSAVGTSKKSDMAEVKDWKAIRVDLVITPFEQYAYALLGWTGSKEFRRDLRRYAEEERGMILDNHALYDLKKRIFLKAGSEEEIFAHLGLDYVEPWERNA

SEQ ID NO: 2457 - DNA, 1182 bp, synthetic construct
  misc_feature 1..1182: note = Variant of terminal deoxynucleotidyl transferase
  source 1..1182: mol_type = other DNA
atgcatcaccaccatcatcatgggggttctggtcatccgccaagcaataccccggagggggaggtgccgagcgttatcgcccgtccggttagtcagtacagctgccagcgcaagaccacgctgaataactacaacaaaaagttcaccgacgcgctggagatcatggccgagaactacaaatttaaagagaacctgatcgcgtgtctggaagccaagcgcgccgcgagtattctgaaatatctgccgttcgaggttaccagcatgaaagacatccaaggtctgccgtgcattaccgaccaagttcgtgacgtgatcgaggagatcatcgaagagggcgagagcagccgtgttaaagaagttctcaatgacgagcgctacaaggcctttaagcagttcaccagcgtgttcggtgtgggcgtgaaaaccgcggaaaagtggtaccgtatgggcctccgtacggttgaagaagcaaaggccagtaagagtctgaagctgagcaagatgcagaaggcgggctttctgtattacgaggatctggcgagcatggttagtaaagaagaagccgatgccgttacgctcatcgtgaagaacacggtgcgtacctttctgccggatgcgctggtgaccatcaccggcggtttccgccgtggcaaacctatgggccacgacgttgactttctgatcacgaacccgggcggcaaagaggatgacgagctgctccacaaagtggttgatctgctcaagacgcaaggtctgctgctgtacgaagacatcaaagagagcacgttcgtggaggggcaactgccaagtcgcaaaatcgacgccatggacaacttccagaagtgcttcgccattctcaagctgtaccagccgggcgtggataacagtgcggttgggacgagtaagaaaagtgacatggccgaggttaaggattggaaagcgattcgtgtggatctggtgatcacgccattcgagcagtacgcctatgcgctgctcggttggacgggcagcaaagaatttcgtcgcgatctgcgccgctatgcggaggaagagcgcggcatgatcctcgacaaccatgccctctacgacctgaaaaagcgcatctttctgaaagcgggcagcgaagaagagattttcgcgcatctgggtctggattatgtggagccgtgggaacgcaacgcg

SEQ ID NO: 2458 - protein, 394 aa, synthetic construct
  REGION 1..394: note = Variant of terminal deoxynucleotidyl transferase
MHHHHHHGGSGHPPSNTPEGEVPSVIARPVSQYSCQRKTTLNNYNKKFTDALEIMAENYKFKENLIACLEAKRAASILKYLPFEVTSMKDIQGLPCITDQVRDVIEEIIEEGESSRVKEVLNDERYKAFKQFTSVFGVGVKTAEKWYRMGLRTVEEAKASKSLKLSKMQKAGFLYYEDLASMVSKEEADAVTLIVKNTVRTFLPDALVTITGGFRRGKPMGHDVDFLITNPGGKEDDELLHKVVDLLKTQGLLLYEDIKESTFVEGQLPSRKIDAMDNFQKCFAILKLYQPGVDNSAVGTSKKSDMAEVKDWKAIRVDLVITPFEQYAYALLGWTGSKEFRRDLRRYAEEERGMILDNHALYDLKKRIFLKAGSEEEIFAHLGLDYVEPWERNA

SEQ ID NO: 2459 - DNA, 1182 bp, synthetic construct
  misc_feature 1..1182: note = Variant of terminal deoxynucleotidyl transferase
  source 1..1182: mol_type = other DNA
atgcatcaccaccatcatcatgggggttctggtcatccgccaagcaataccccggagggggaggtgccgagcgttatcgcccgtccggttagtcagtacgcgtgccagcgcaagaccacgctgaataactacaacaaaaagctgaccgacgcgctggagatcatggccgagaactacaaatttaaagagaacctgatcgcgtgtctggaagccaagcgcgccgcgagtatttttaaatatctgccgttcgaggttaccagcatgaaagacatccaaggtctgccgtgcattaccgaccaagttcgtgacgtgatcgaggagatcatcgaagagggcgagagcagccgtgttaaagaagttctcaatgacgagcgctacaaggcctttaagcagttcaccagcgtgttcggtgtgggcgtgaaaaccgcggaaaagtggttccgtatgggcctccgtacggttgaagaagcaaaggccagtaagagtctgaagctgagcaagatgcagaaggcgggctttctgtattacgaggatctggcgagcggcgttagtaaagaagaagccgatgccgttacgctcatcgtgaagaacacggtgcgtacctttctgccggatgcgctggtgaccatcaccggcggtttccgccgtggcaaacctgtgggccacgacgttgactttctgatcacgctgccgggccctaaagaggatgacgagctgctccacaaagtggttgatctgctcaagaagcaaggtctgctgctgtacgaagacatcaaagagagcacgttcgtggaggggcaactgccaagtcgtaaaatcgacgccatggacaacttccagaagtgcttcgccattctcaagctgtaccagccgggcgtggataacagtgcggttgggacgagtaagaaaagtgacatggctgaggttaaggattggaaagcggttcgtgtggatctggtgatcacgccattcgagcagtacgcctatgcgctgctcggttggacgggcagcaaagaatttcgtcgcgatctgcgccgctatgcggaggaagagcgcggcatgatcctcgacaaccatgccctctacgacctgaaaaagcgcatctttctgaaagcgggcagcgaagaagagattttcgcgcatctgggtctggattatgtggagccgtgggaacgcaacgcg

SEQ ID NO: 2460 - protein, 394 aa, synthetic construct
  REGION 1..394: note = Variant of terminal deoxynucleotidyl transferase
MHHHHHHGGSGHPPSNTPEGEVPSVIARPVSQYACQRKTTLNNYNKKLTDALEIMAENYKFKENLIACLEAKRAASIFKYLPFEVTSMKDIQGLPCITDQVRDVIEEIIEEGESSRVKEVLNDERYKAFKQFTSVFGVGVKTAEKWFRMGLRTVEEAKASKSLKLSKMQKAGFLYYEDLASGVSKEEADAVTLIVKNTVRTFLPDALVTITGGFRRGKPVGHDVDFLITLPGPKEDDELLHKVVDLLKKQGLLLYEDIKESTFVEGQLPSRKIDAMDNFQKCFAILKLYQPGVDNSAVGTSKKSDMAEVKDWKAVRVDLVITPFEQYAYALLGWTGSKEFRRDLRRYAEEERGMILDNHALYDLKKRIFLKAGSEEEIFAHLGLDYVEPWERNA

SEQ ID NO: 2461 - DNA, 1182 bp, synthetic construct
  misc_feature 1..1182: note = Variant of terminal deoxynucleotidyl transferase
  source 1..1182: mol_type = other DNA
atgcatcaccaccatcatcatgggggttctggtcatccgccgagcaataccccggagggggaggtgccgagcgttatcgcccgtccggttagtcagtacgcgtgccagcgcaagaccacgctgaataactacaacaaaaagtttaccgacgcgctggagatcatggccgagaactacaaatttaaagagaacctgatcgcgtgtctggaagccaagcgcgccgcgagtattctgaaatatctgccgttcgaggttaccagcatgaaagacatccaaggtctgccgtgcattaccgaccaagttcgtgacgtgatcgaggagatcatcgaagagggcgagagcagccgtgttaaagaagttctcaatgacgagcgctacaaggcctttaagcagttcaccagcgtgttcggtgtgggcgtgaaaaccgcggaaaagtggttccgtatgggcctccgtacggttgaagaagcaaaggccagtaagagtctgaagctgagcaagatgcagaaggcgggctttctgtattacgaggatctggcgagccgcgttagtaaagaagaagccgatgccgttacgctcatcgtgaagaacacggtgcgtacctttctgccggatgcgctggtgaccatcaccggcggtttccgccgtggcaaacctgtgggccacgacgttgactttctgatcacgaacccgggccctaaagaggatgacgagctgctccacaaagtggttgatctgctcaagaagcaaggtctgctgctgtacgaagacatcaaagagagcacgttcgtggaggggcaactgccaagtcgtaaaatcgacgccatggacaacttccagaagtgcttcgccattctcaagctgtaccagccgggcgtggataacagtgcggttgggacgagtaagaaaagtgacatggctgaggttaaggattggaaagcggttcgtgtggatctggtgatcacgccattcgagcagtacgcctatgcgctgctcggttggacgggcagcaaacaatttcgtcgcgatctgcgccgctatgcggaggaagagcgcggcatgatcctcgacaaccatgccctctacgacctgaaaaagcgcatctttctgaaagcgggcagcgaagaagagattttcgcgcatctgggtctggattatgtggagccgtgggaacgcaacgcg

SEQ ID NO: 2462 - protein, 394 aa, synthetic construct
  REGION 1..394: note = Variant of terminal deoxynucleotidyl transferase
MHHHHHHGGSGHPPSNTPEGEVPSVIARPVSQYACQRKTTLNNYNKKFTDALEIMAENYKFKENLIACLEAKRAASILKYLPFEVTSMKDIQGLPCITDQVRDVIEEIIEEGESSRVKEVLNDERYKAFKQFTSVFGVGVKTAEKWFRMGLRTVEEAKASKSLKLSKMQKAGFLYYEDLASRVSKEEADAVTLIVKNTVRTFLPDALVTITGGFRRGKPVGHDVDFLITNPGPKEDDELLHKVVDLLKKQGLLLYEDIKESTFVEGQLPSRKIDAMDNFQKCFAILKLYQPGVDNSAVGTSKKSDMAEVKDWKAVRVDLVITPFEQYAYALLGWTGSKQFRRDLRRYAEEERGMILDNHALYDLKKRIFLKAGSEEEIFAHLGLDYVEPWERNA

SEQ ID NO: 2463 - DNA, 1182 bp, synthetic construct
  misc_feature 1..1182: note = Variant of terminal deoxynucleotidyl transferase
  source 1..1182: mol_type = other DNA
atgcatcaccaccatcatcatgggggttctggtcatccgccgagcaataccccggagggggaggtgccgagcgttatcgcccgtccggttagtcagtactcgtgccagcgcaagaccacgctgaataactacaacaaaaagtttaccgacgcgctggagatcatggccgagaactacaaatttaaagagaacctgatcgcgtgtctggaagccaagcgcgccgcgagtatttttaaatatctgccgttcgaggttaccagcatgaaagacatccaaggtctgccgtgcattaccgaccaagttcgtgacgtgatcgaggagatcatcgaagagggcgagagcagccgtgttaaagaagttctcaatgacgagcgctacaaggcctttaagcagttcaccagcgtgttcggtgtgggcgtgaaaaccgcggaaaagtggtaccgtatgggcctccgtacggttgaagaagcaaaggccagtaagagtctgaagctgagcaagatgcagaaggcgggctttctgtattacgaggatctggcgagcggcgttagtaaagaagaagccgatgccgttacgctcatcgtgaagaacacggtgcgtacctttctgccggatgcgctggtgaccatcaccggcggtttccgccgtggcaaacctatgggccacgacgttgactttctgatcacgaatccgggcccgaaagaggatgacgagctgctccacaaagtggttgatctgctcaagacgcaaggtctgctgctgtacgaagacatcaaagagagcacgttcgtggaggggcaactgccaagtcgtaaaatcgacgccatggacaacttccagaagtgcttcgccattctcaagctgtaccagccgggcgtggataacagtgcggttgggacgagtaagaaaagtgacatgggtgaggttaaggattggaaagcgattcgtgtggatctggtgatcacgccattcgagcagtacgcctatgcgctgctcggttggacgggcagcaaagaatttcgtcgcgatctgcgtcgctatgcggaggaagagcgcggcatgatcctcgacaaccatgccctctacgacctgaaaaagcgcatctttctgaaagcgggcagcgaagaagagattttcgcgcatctgggtctggattatgtggagccgtgggaacgcaacgcg

SEQ ID NO: 2464 - protein, 394 aa, synthetic construct
  REGION 1..394: note = Variant of terminal deoxynucleotidyl transferase
MHHHHHHGGSGHPPSNTPEGEVPSVIARPVSQYSCQRKTTLNNYNKKFTDALEIMAENYKFKENLIACLEAKRAASIFKYLPFEVTSMKDIQGLPCITDQVRDVIEEIIEEGESSRVKEVLNDERYKAFKQFTSVFGVGVKTAEKWYRMGLRTVEEAKASKSLKLSKMQKAGFLYYEDLASGVSKEEADAVTLIVKNTVRTFLPDALVTITGGFRRGKPMGHDVDFLITNPGPKEDDELLHKVVDLLKTQGLLLYEDIKESTFVEGQLPSRKIDAMDNFQKCFAILKLYQPGVDNSAVGTSKKSDMGEVKDWKAIRVDLVITPFEQYAYALLGWTGSKEFRRDLRRYAEEERGMILDNHALYDLKKRIFLKAGSEEEIFAHLGLDYVEPWERNA

SEQ ID NO: 2465 - DNA, 1182 bp, synthetic construct
  misc_feature 1..1182: note = Variant of terminal deoxynucleotidyl transferase
  source 1..1182: mol_type = other DNA
atgcatcaccaccatcatcatgggggttctggtcatccgccgagcaataccccggagggggaggtgccgagcgttatcgcccgtccggttagtcagtacgcgtgccagcgcaagaccacgctgaataactacaacaaaaagttcaccgacgcgctggagatcatggccgagaactacaaatttaaagagaacctgatcgcgtgtctggaagccaagcgcgccgcgagtattctgaaatatctgccgttcgaggttaccagcatgaaagacatccaaggtctgccgtgcattaccgaccaagttcgtgacgtgatcgaggagatcatcgaagagggcgagagcagccgtgttaaagaagttctcaatgacgagcgctacaaggcctttaagcagttcaccagcgtgttcggtgtgggcgtgaaaaccgcggaaaagtggtaccgtatgggcctccgtacggttgaagaagcaaaggccagtaagagtctgaagctgagcaagatgcagaaggcgggctttctgtattacgaggatctggcgagccgcgttagtaaagaagaagccgatgccgttacgctcatcgtgaagaacacggtgcgtacctttctgccggatgcgctggtgaccatcaccggcggtttccgccgtggcaaacctatgggccacgacgttgactttctgatcacgaacccgggccctaaagaggatgacgagctgctccacaaagtggttgatctgctcaagacgcaaggtctgctgctgtacgaagacatcaaagagagcacgttcgtggaggggcaactgccaagtcgtaaaatcgacgccatggacaacttccagaagtgcttcgccattctcaagctgtaccagccgggcgtggataacagtgcggttgggacgagtaagaaaagtgacatggctgaggttaaggattggaaagcgattcgtgtggatctggtgatcacgccattcgagcagtacgcctatgcgctgctcggttggacgggcagcaaagaatttcgtcgcgatctgcgccgctatgcggaggaagagcgcggcatgatcctcgacaaccatgccctctacgacctgaaaaagcgcatctttctgaaagcgggcagcgaagaagagattttcgcgcatctgggtctggattatgtggagccgtgggaacgcaacgcg

SEQ ID NO: 2466 - protein, 394 aa, synthetic construct
  REGION 1..394: note = Variant of terminal deoxynucleotidyl transferase
MHHHHHHGGSGHPPSNTPEGEVPSVIARPVSQYACQRKTTLNNYNKKFTDALEIMAENYKFKENLIACLEAKRAASILKYLPFEVTSMKDIQGLPCITDQVRDVIEEIIEEGESSRVKEVLNDERYKAFKQFTSVFGVGVKTAEKWYRMGLRTVEEAKASKSLKLSKMQKAGFLYYEDLASRVSKEEADAVTLIVKNTVRTFLPDALVTITGGFRRGKPMGHDVDFLITNPGPKEDDELLHKVVDLLKTQGLLLYEDIKESTFVEGQLPSRKIDAMDNFQKCFAILKLYQPGVDNSAVGTSKKSDMAEVKDWKAIRVDLVITPFEQYAYALLGWTGSKEFRRDLRRYAEEERGMILDNHALYDLKKRIFLKAGSEEEIFAHLGLDYVEPWERNA

SEQ ID NO: 2467 - DNA, 1182 bp, synthetic construct
  misc_feature 1..1182: note = Variant of terminal deoxynucleotidyl transferase
  source 1..1182: mol_type = other DNA
atgcatcaccaccatcatcatgggggttctggtcatccgccgagcaataccccggagggggaggtgccgagcgttatcgcccgtccggttagtcagtacgcgtgccagcgcaagaccacgctgaataactacaacaaaaagtttaccgacgcgctggagatcatggccgagaactacaaatttaaagagaacctgatcgcgtgtctggaagccaagcgcgccgcgagtattctgaaatatctgccgttcgaggttaccagcatgaaagacatccaaggtctgccgtgcattaccgaccaagttcgtgacgtgatcgaggagatcatcgaagagggcgagagcagccgtgttaaagaagttctcaatgacgagcgctacaaggcctttaagcagttcaccagcgtgttcggtgtgggcgtgaaaaccgcggaaaagtggtaccgtatgggcctccgtacggttgaagaagcaaaggccagtaagagtctgaagctgagcaagatgcagaaggcgggctttctgtattacgaggatctggcgagccgcgttagtaaagaagaagccgatgccgttacgctcatcgtgaagaacacggtgcgtacctttctgccggatgcgctggtgaccatcaccggcggtttccgccgtggcaaacctatgggccacgacgttgactttctgatcacgaacccgggccgcaaagaggatgacgagctgctccacaaagtggttgatctgctcaagaagcaaggtctgctgctgtacgaagacatcaaagagagcacgttcgtggaggggcaactgccaagtcgcaaaatcgacgccatggacaacttccagaagtgcttcgccattctcaagctgtaccagccgggcgtggataacagtgcggttgggacgagtaagaaaagtgacatggccgaggttaaggattggaaagcgattcgtgtggatctggtgatcacgccattcgagcagtacgcctatgcgctgctcggttggacgggcagcaaagaatttcgtcgcgatctgcgccgctatgcggaggaagagcgcggcatgatcctcgacaaccatgccctctacgacctgaaaaagcgcatctttctgaaagcgggcagcgaagaagagattttcgcgcatctgggtctggattatgtggagccgtgggaacgcaacgcg

SEQ ID NO: 2468 - protein, 394 aa, synthetic construct
  REGION 1..394: note = Variant of terminal deoxynucleotidyl transferase
MHHHHHHGGSGHPPSNTPEGEVPSVIARPVSQYACQRKTTLNNYNKKFTDALEIMAENYKFKENLIACLEAKRAASILKYLPFEVTSMKDIQGLPCITDQVRDVIEEIIEEGESSRVKEVLNDERYKAFKQFTSVFGVGVKTAEKWYRMGLRTVEEAKASKSLKLSKMQKAGFLYYEDLASRVSKEEADAVTLIVKNTVRTFLPDALVTITGGFRRGKPMGHDVDFLITNPGRKEDDELLHKVVDLLKKQGLLLYEDIKESTFVEGQLPSRKIDAMDNFQKCFAILKLYQPGVDNSAVGTSKKSDMAEVKDWKAIRVDLVITPFEQYAYALLGWTGSKEFRRDLRRYAEEERGMILDNHALYDLKKRIFLKAGSEEEIFAHLGLDYVEPWERNA

SEQ ID NO: 2469 - DNA, 1182 bp, synthetic construct
  misc_feature 1..1182: note = Variant of terminal deoxynucleotidyl transferase
  source 1..1182: mol_type = other DNA
atgcatcaccaccatcatcatgggggttctggtcatccgccgagcaataccccggagggggaggtgccgagcgttatcgcccgtccggttagtcagtactcgtgccagcgcaagaccacgctgaataactacaacaaaaagttcaccgacgcgctggagatcatggccgagaactacaaatttaaagagaacctgatcgcgtgtctggaagccaagcgcgccgcgagtattctgaaatatctgccgttcgaggttaccagcatgaaagacatccaaggtctgccgtgcattaccgaccaagttcgtgacgtgatcgaggagatcatcgaagagggcgagagcagccgtgttaaagaagttctcaatgacgagcgctacaaggcctttaagcagttcaccagcgtgttcggtgtgggcgtgaaaaccgcggaaaagtggtaccgtatgggcctccgtacggttgaagaagcacgcgccagtaagagtctgaagctgagcaagatgcagaaggcgggctttctgtattacgaggatctggcgagcatggttagtaaagaagaagccgatgccgttacgctcatcgtgaagaacacggtgcgtacctttctgccggatgcgctggtgaccatcaccggcggtttccgccgtggcaaacctatgggccacgacgttgactttctgatcacgaatccgggcccgaaagaggatgacgagctgctccacaaagtggttgatctgctcaagaagcaaggtctgctgctgtacgaagacatcaaagagagcacgttcgtggaggggcaactgccaagtcgcaaaatcgacgccatggacaacttccagaagtgcttcgccattctcaagctgtaccagccgggcgtggataacagtgcggttgggacgagtaagaaaagtgacatggccgaggttaaggattggaaagcggttcgtgtggatctggtgatcacgccattcgagcagtacgcctatgcgctgctcggttggacgggcagcaaagaatttcgtcgcgatctgcgccgctatgcggaggaagagcgcggcatgatcctcgacaaccatgccctctacgacctgaaaaagcgcatctttctgaaagcgggcagcgaagaagagattttcgcgcatctgggtctggattatgtggagccgtgggaacgcaacgcg

SEQ ID NO: 2470 - protein, 394 aa, synthetic construct
  REGION 1..394: note = Variant of terminal deoxynucleotidyl transferase
MHHHHHHGGSGHPPSNTPEGEVPSVIARPVSQYSCQRKTTLNNYNKKFTDALEIMAENYKFKENLIACLEAKRAASILKYLPFEVTSMKDIQGLPCITDQVRDVIEEIIEEGESSRVKEVLNDERYKAFKQFTSVFGVGVKTAEKWYRMGLRTVEEARASKSLKLSKMQKAGFLYYEDLASMVSKEEADAVTLIVKNTVRTFLPDALVTITGGFRRGKPMGHDVDFLITNPGPKEDDELLHKVVDLLKKQGLLLYEDIKESTFVEGQLPSRKIDAMDNFQKCFAILKLYQPGVDNSAVGTSKKSDMAEVKDWKAVRVDLVITPFEQYAYALLGWTGSKEFRRDLRRYAEEERGMILDNHALYDLKKRIFLKAGSEEEIFAHLGLDYVEPWERNA

SEQ ID NO: 2471 - DNA, 1182 bp, synthetic construct
  misc_feature 1..1182: note = Variant of terminal deoxynucleotidyl transferase
  source 1..1182: mol_type = other DNA
atgcatcaccaccatcatcatgggggttctggtcatccgccgagcaataccccggagggggaggtgccgagcgttatcgcccgtccggttagtcagtacagctgccagcgcaagaccacgctgaataactacaacaaaaagtttaccgacgcgctggagatcatggccgagaactacaaatttaaagagaacctgatcgcgtgtctggaagccaagcgcgccgcgagtattctgaaatatctgccgttcgaggttaccagcatgaaagacatccaaggtctgccgtgcattaccgaccaagttcgtgacgtgatcgaggagatcatcgaagagggcgagagcagccgtgttaaagaagttctcaatgacgagcgctacaaggcctttaagcagttcaccagcgtgttcggtgtgggcgtgaaaaccgcggaaaagtggtttcgtatgggcctccgtacggttgaagaagcaaaggccagtaagagtctgaagctgagcaagatgcagaaggcgggctttctgtattacgaggatctggcgagcggcgttagtaaagaagaagccgatgccgttacgctcatcgtgaagaacacggtgcgtacctttctgccggatgcgctggtgaccatcaccggcggtttccgccgtggcaaacctatgggccacgacgttgactttctgatcacgaacccgggccctaaagaggatgacgagctgctccacaaagtggttgatctgctcaagaagcaaggtctgctgctgtacgaagacatcaaagagagcacgttcgtggaggggcaactgccaagtcgcaaaatcgacgccatggacaacttccagaagtgcttcgccattctcaagctgtaccagccgggcgtggataacagtgcggttgggacgagtaagaaaagtgacatggccgaggttaaggattggaaagcgattcgtgtggatctggtgatcacgccattcgagcagtacgcctatgcgctgctcggttggacgggcagcaaagaatttcgtcgcgatctgcgccgctatgcggaggaagagcgcggcatgatcctcgacaaccatgccctctacgacctgaaaaagcgcatctttctgaaagcgggcagcgaagaagagattttcgcgcatctgggtctggattatgtggagccgtgggaacgcaacgcg

SEQ ID NO: 2472 - protein, 394 aa, synthetic construct
  REGION 1..394: note = Variant of terminal deoxynucleotidyl transferase
MHHHHHHGGSGHPPSNTPEGEVPSVIARPVSQYSCQRKTTLNNYNKKFTDALEIMAENYKFKENLIACLEAKRAASILKYLPFEVTSMKDIQGLPCITDQVRDVIEEIIEEGESSRVKEVLNDERYKAFKQFTSVFGVGVKTAEKWFRMGLRTVEEAKASKSLKLSKMQKAGFLYYEDLASGVSKEEADAVTLIVKNTVRTFLPDALVTITGGFRRGKPMGHDVDFLITNPGPKEDDELLHKVVDLLKKQGLLLYEDIKESTFVEGQLPSRKIDAMDNFQKCFAILKLYQPGVDNSAVGTSKKSDMAEVKDWKAIRVDLVITPFEQYAYALLGWTGSKEFRRDLRRYAEEERGMILDNHALYDLKKRIFLKAGSEEEIFAHLGLDYVEPWERNA

SEQ ID NO: 2473 - DNA, 1182 bp, synthetic construct
  misc_feature 1..1182: note = Variant of terminal deoxynucleotidyl transferase
  source 1..1182: mol_type = other DNA
atgcatcaccaccatcatcatgggggttctggtcatccgccgagcaataccccggagggggaggtgccgagcgttatcgcccgtccggttagtcagtactcgtgccagcgcaagaccacgctgaataactacaacaaaaagtttaccgacgcgctggagatcatggccgagaactacaaatttaaagagaacctgatcgcgtgtctggaagccaagcgcgccgcgagtattctgaaatatctgccgttcgaggttaccagcatgaaagacatccaaggtctgccgtgcattaccgaccaagttcgtgacgtgatcgaggagatcatcgaagagggcgagagcagccgtgttaaagaagttctcaatgacgagcgctacaaggcctttaagcagttcaccagcgtgttcggtgtgggcgtgaaaaccgcggaaaagtggtttcgtatgggcctccgtacggttgaagaagcaaaggccagtaagagtctgaagctgagcaagatgcagaaggcgggctttctgtattacgaggatctggcgagccgcgttagtaaagaagaagccgatgccgttacgctcatcgtgaagaacacggtgcgtacctttctgccggatgcgctggtgaccatcaccggcggtttccgccgtggcaaacctatgggccacgacgttgactttctgatcacgaatccgggcccgaaagaggatgacgagctgctccacaaagtggttgatctgctcaagaagcaaggtctgctgctgtacgaagacatcaaagagagcacgttcgtggaggggcaactgccaagtcgcaaaatcgacgccatggacaacttccagaagtgcttcgccattctcaagctgtaccagccgggcgtggataacagtgcggttgggacgagtaagaaaagtgacatggccgaggttaaggattggaaagcgattcgtgtggatctggtgatcacgccattcgagcagtacgcctatgcgctgctcggttggacgggcagcaaacaatttcgtcgcgatctgcgccgctatgcggaggaagagcgcggcatgatcctcgacaaccatgccctctacgacctgaaaaagcgcatctttctgaaagcgggcagcgaagaagagattttcgcgcatctgggtctggattatgtggagccgtgggaacgcaacgcg

SEQ ID NO: 2474 - protein, 394 aa, synthetic construct
  REGION 1..394: note = Variant of terminal deoxynucleotidyl transferase
MHHHHHHGGSGHPPSNTPEGEVPSVIARPVSQYSCQRKTTLNNYNKKFTDALEIMAENYKFKENLIACLEAKRAASILKYLPFEVTSMKDIQGLPCITDQVRDVIEEIIEEGESSRVKEVLNDERYKAFKQFTSVFGVGVKTAEKWFRMGLRTVEEAKASKSLKLSKMQKAGFLYYEDLASRVSKEEADAVTLIVKNTVRTFLPDALVTITGGFRRGKPMGHDVDFLITNPGPKEDDELLHKVVDLLKKQGLLLYEDIKESTFVEGQLPSRKIDAMDNFQKCFAILKLYQPGVDNSAVGTSKKSDMAEVKDWKAIRVDLVITPFEQYAYALLGWTGSKQFRRDLRRYAEEERGMILDNHALYDLKKRIFLKAGSEEEIFAHLGLDYVEPWERNA

SEQ ID NO: 2475 - DNA, 1182 bp, synthetic construct
  misc_feature 1..1182: note = Variant of terminal deoxynucleotidyl transferase
  source 1..1182: mol_type = other DNA
atgcatcaccaccatcatcatgggggttctggtcatccgccaagcaataccccggagggggaggtgccgagcgttatcgcccgtccggttagtcagtacgcgtgccagcgcaagaccacgctgaataactacaacaaaaagttcaccgacgcgctggagatcatggccgagaactacaaatttaaagagaacctgatcgcgtgtctggaagccaagcgcgccgcgagtattctgaaatatctgccgttcgaggttaccagcatgaaagacatccaaggtctgccgtgcattaccgaccaagttcgtgacgtgatcgaggagatcatcgaagagggcgagagcagccgtgttaaagaagttctcaatgacgagcgctacaaggcctttaagcagttcaccagcgtgttcggtgtgggcgtgaaaaccgcggaaaagtggttccgtatgggcctccgtacggttgaagaagcaaaggccagtaagagtctgaagctgagcaagatgcagaaggcgggctttctgtattacgaggatctggcgagccgcgttagtaaagaagaagccgatgccgttacgctcatcgtgaagaacacggtgcgtacctttctgccggatgcgctggtgaccatcaccggcggtttccgccgtggcaaacctgtgggccacgacgttgactttctgatcacgaatccgggcccgaaagaggatgacgagctgctccacaaagtggttgatctgctcaagaagcaaggtctgctgctgtacgaagacatcaaagagagcacgttcgtggaggggcaactgccaagtcgcaaaatcgacgccatggacaacttccagaagtgcttcgccattctcaagctgtaccagccgggcgtggataacagtgcggttgggacgagtaagaaaagtgacatggccgaggttaaggattggaaagcgattcgtgtggatctggtgatcacgccattcgagcagtacgcctatgcgctgctcggttggacgggcagcaaagaatttcgtcgcgatctgcgccgctatgcggaggaagagcgcggcatgatcctcgacaaccatgccctctacgacctgaaaaagcgcatctttctgaaagcgggcagcgaagaagagattttcgcgcatctgggtctggattatgtggagccgtgggaacgcaacgcg

SEQ ID NO: 2476 - protein, 394 aa, synthetic construct
  REGION 1..394: note = Variant of terminal deoxynucleotidyl transferase
MHHHHHHGGSGHPPSNTPEGEVPSVIARPVSQYACQRKTTLNNYNKKFTDALEIMAENYKFKENLIACLEAKRAASILKYLPFEVTSMKDIQGLPCITDQVRDVIEEIIEEGESSRVKEVLNDERYKAFKQFTSVFGVGVKTAEKWFRMGLRTVEEAKASKSLKLSKMQKAGFLYYEDLASRVSKEEADAVTLIVKNTVRTFLPDALVTITGGFRRGKPVGHDVDFLITNPGPKEDDELLHKVVDLLKKQGLLLYEDIKESTFVEGQLPSRKIDAMDNFQKCFAILKLYQPGVDNSAVGTSKKSDMAEVKDWKAIRVDLVITPFEQYAYALLGWTGSKEFRRDLRRYAEEERGMILDNHALYDLKKRIFLKAGSEEEIFAHLGLDYVEPWERNA

SEQ ID NO: 2477 - DNA, 1182 bp, synthetic construct
  misc_feature 1..1182: note = Variant of terminal deoxynucleotidyl transferase
  source 1..1182: mol_type = other DNA
atgcatcaccaccatcatcatgggggttctggtcatccgccgagcaataccccggagggggaggtgccgagcgttatcgcccgtccggttagtcagtacgcgtgccagcgcaagaccacgctgaataactacaacaaaaagttcaccgacgcgctggagatcatggccgagaactacaaatttaaagagaacctgatcgcgtgtctggaagccaagcgcgccgcgagtattctgaaatatctgccgttcgaggttaccagcatgaaagacatccaaggtctgccgtgcattaccgaccaagttcgtgacgtgatcgaggagatcatcgaagagggcgagagcagccgtgttaaagaagttctcaatgacgagcgctacaaggcctttaagcagttcaccagcgtgttcggtgtgggcgtgaaaaccgcggaaaagtggtaccgtatgggcctccgtacggttgaagaagcaaaggccagtaagagtctgaagctgagcaagatgcagaaggcgggctttctgtattacgaggatctggcgagcatggttagtaaagaagaagccgatgccgttacgctcatcgtgaagaacacggtgcgtacctttctgccggatgcgctggtgaccatcaccggcggtttccgccgtggcaaacctgtgggccacgacgttgactttctgatcacgctgccgggccctaaagaggatgacgagctgctccacaaagtggttgatctgctcaagacgcaaggtctgctgctgtacgaagacatcaaagagagcacgttcgtggaggggcaactgccaagtcgtaaaatcgacgccatggacaacttccagaagtgcttcgccattctcaagctgtaccagccgggcgtggataacagtgcggttgggacgagtaagaaaagtgacatggccgaggttaaggattggaaagcggttcgtgtggatctggtgatcacgccattcgagcagtacgcctatgcgctgctcggttggacgggcagcaaacaatttcgtcgcgatctgcgccgctatgcggaggaagagcgcggcatgatcctcgacaaccatgccctctacgacctgaaaaagcgcatctttctgaaagcgggcagcgaagaagagattttcgcgcatctgggtctggattatgtggagccgtgggaacgcaacgcg

SEQ ID NO: 2478 - protein, 394 aa, synthetic construct
  REGION 1..394: note = Variant of terminal deoxynucleotidyl transferase
MHHHHHHGGSGHPPSNTPEGEVPSVIARPVSQYACQRKTTLNNYNKKFTDALEIMAENYKFKENLIACLEAKRAASILKYLPFEVTSMKDIQGLPCITDQVRDVIEEIIEEGESSRVKEVLNDERYKAFKQFTSVFGVGVKTAEKWYRMGLRTVEEAKASKSLKLSKMQKAGFLYYEDLASMVSKEEADAVTLIVKNTVRTFLPDALVTITGGFRRGKPVGHDVDFLITLPGPKEDDELLHKVVDLLKTQGLLLYEDIKESTFVEGQLPSRKIDAMDNFQKCFAILKLYQPGVDNSAVGTSKKSDMAEVKDWKAVRVDLVITPFEQYAYALLGWTGSKQFRRDLRRYAEEERGMILDNHALYDLKKRIFLKAGSEEEIFAHLGLDYVEPWERNA

SEQ ID NO: 2479 - DNA, 1182 bp, synthetic construct
  misc_feature 1..1182: note = Variant of terminal deoxynucleotidyl transferase
  source 1..1182: mol_type = other DNA
atgcatcaccaccatcatcatgggggttctggtcatccgccgagcaataccccggagggggaggtgccgagcgttatcgcccgtccggttagtcagtacagctgccagcgcaagaccacgctgaataactacaacaaaaagttcaccgacgcgctggagatcatggccgagaactacaaatttaaagagaacctgatcgcgtgtctggaagccaagcgcgccgcgagtattctgaaatatctgccgttcgaggttaccagcatgaaagacatccaaggtctgccgtgcattaccgaccaagttcgtgacgtgatcgaggagatcatcgaagagggcgagagcagccgtgttaaagaagttctcaatgacgagcgctacaaggcctttaagcagttcaccagcgtgttcggtgtgggcgtgaaaaccgcggaaaagtggttccgtatgggcctccgtacggttgaagaagcaaaggccagtaagagtctgaagctgagcaagatgcagaaggcgggctttctgtattacgaggatctggcgagcatggttagtaaagaagaagccgatgccgttacgctcatcgtgaagaacacggtgcgtacctttctgccggatgcgctggtgaccatcaccggcggtttccgccgtggcaaacctatgggccacgacgttgactttctgatcacgctgccgggccctaaagaggatgacgagctgctccacaaagtggttgatctgctcaagaagcaaggtctgctgctgtacgaagacatcaaagagagcacgttcgtggaggggcaactgccaagtcgcaaaatcgacgccatggacaacttccagaagtgcttcgccattctcaagctgtaccagccgggcgtggataacagtgcggttgggacgagtaagaaaagtgacatggccgaggttaaggattggaaagcgattcgtgtggatctggtgatcacgccattcgagcagtacgcctatgcgctgctcggttggacgggcagcaaagaatttcgtcgcgatctgcgccgctatgcggaggaagagcgcggcatgatcctcgacaaccatgccctctacgacctgaaaaagcgcatctttctgaaagcgggcagcgaagaagagattttcgcgcatctgggtctggattatgtggagccgtgggaacgcaacgcg

SEQ ID NO: 2480 - protein, 394 aa, synthetic construct
  REGION 1..394: note = Variant of terminal deoxynucleotidyl transferase
MHHHHHHGGSGHPPSNTPEGEVPSVIARPVSQYSCQRKTTLNNYNKKFTDALEIMAENYKFKENLIACLEAKRAASILKYLPFEVTSMKDIQGLPCITDQVRDVIEEIIEEGESSRVKEVLNDERYKAFKQFTSVFGVGVKTAEKWFRMGLRTVEEAKASKSLKLSKMQKAGFLYYEDLASMVSKEEADAVTLIVKNTVRTFLPDALVTITGGFRRGKPMGHDVDFLITLPGPKEDDELLHKVVDLLKKQGLLLYEDIKESTFVEGQLPSRKIDAMDNFQKCFAILKLYQPGVDNSAVGTSKKSDMAEVKDWKAIRVDLVITPFEQYAYALLGWTGSKEFRRDLRRYAEEERGMILDNHALYDLKKRIFLKAGSEEEIFAHLGLDYVEPWERNA

SEQ ID NO: 2481 - DNA, 1182 bp, synthetic construct
  misc_feature 1..1182: note = Variant of terminal deoxynucleotidyl transferase
  source 1..1182: mol_type = other DNA
atgcatcaccaccatcatcatgggggttctggtcatccgccgagcaataccccggagggggaggtgccgagcgttatcgcccgtccggttagtcagtactcgtgccagcgcaagaccacgctgaataactacaacaaaaagctgaccgacgcgctggagatcatggccgagaactacaaatttaaagagaacctgatcgcgtgtctggaagccaagcgcgccgcgagtatttttaaatatctgccgttcgaggttaccagcatgaaagacatccaaggtctgccgtgcattaccgaccaagttcgtgacgtgatcgaggagatcatcgaagagggcgagagcagccgtgttaaagaagttctcaatgacgagcgctacaaggcctttaagcagttcaccagcgtgttcggtgtgggcgtgaaaaccgcggaaaagtggtttcgtatgggcctccgtacggttgaagaagcaaaggccagtaagagtctgaagctgagcaagatgcagaaggcgggctttctgtattacgaggatctggcgagccgcgttagtaaagaagaagccgatgccgttacgctcatcgtgaagaacacggtgcgtacctttctgccggatgcgctggtgaccatcaccggcggtttccgccgtggcaaacctatgggccacgacgttgactttctgatcacgaacccgggccgcaaagaggatgacgagctgctccacaaagtggttgatctgctcaagaagcaaggtctgctgctgtacgaagacatcaaagagagcacgttcgtggaggggcaactgccaagtcgtaaaatcgacgccatggacaacttccagaagtgcttcgccattctcaagctgtaccagccgggcgtggataacagtgcggttgggacgagtaagaaaagtgacatggctgaggttaaggattggaaagcggttcgtgtggatctggtgatcacgccattcgagcagtacgcctatgcgctgctcggttggacgggcagcaaacaatttcgtcgcgatctgcgtcgctatgcggaggaagagcgcggcatgatcctcgacaaccatgccctctacgacctgaaaaagcgcatctttctgaaagcgggcagcgaagaagagattttcgcgcatctgggtctggattatgtggagccgtgggaacgcaacgcg

SEQ ID NO: 2482 - protein, 394 aa, synthetic construct
  REGION 1..394: note = Variant of terminal deoxynucleotidyl transferase
MHHHHHHGGSGHPPSNTPEGEVPSVIARPVSQYSCQRKTTLNNYNKKLTDALEIMAENYKFKENLIACLEAKRAASIFKYLPFEVTSMKDIQGLPCITDQVRDVIEEIIEEGESSRVKEVLNDERYKAFKQFTSVFGVGVKTAEKWFRMGLRTVEEAKASKSLKLSKMQKAGFLYYEDLASRVSKEEADAVTLIVKNTVRTFLPDALVTITGGFRRGKPMGHDVDFLITNPGRKEDDELLHKVVDLLKKQGLLLYEDIKESTFVEGQLPSRKIDAMDNFQKCFAILKLYQPGVDNSAVGTSKKSDMAEVKDWKAVRVDLVITPFEQYAYALLGWTGSKQFRRDLRRYAEEERGMILDNHALYDLKKRIFLKAGSEEEIFAHLGLDYVEPWERNA

SEQ ID NO: 2483 - DNA, 1182 bp, synthetic construct
  misc_feature 1..1182: note = Variant of terminal deoxynucleotidyl transferase
  source 1..1182: mol_type = other DNA
atgcatcaccaccatcatcatgggggttctggtcatccgccaagcaataccccggagggggaggtgccgagcgttatcgcccgtccggttagtcagtacgcgtgccagcgcaagaccacgctgaataactacaacaaaaagtttaccgacgcgctggagatcatggccgagaactacaaatttaaagagaacctgatcgcgtgtctggaagccaagcgcgccgcgagtattctgaaatatctgccgttcgaggttaccagcatgaaagacatccaaggtctgccgtgcattaccgaccaagttcgtgacgtgatcgaggagatcatcgaagagggcgagagcagccgtgttaaagaagttctcaatgacgagcgctacaaggcctttaagcagttcaccagcgtgttcggtgtgggcgtgaaaaccgcggaaaagtggttccgtatgggcctccgtacggttgaagaagcaaaggccagtaagagtctgaagctgagcaagatgcagaaggcgggctttctgtattacgaggatctggcgagccgcgttagtaaagaagaagccgatgccgttacgctcatcgtgaagaacacggtgcgtacctttctgccggatgcgctggtgaccatcaccggcggtttccgccgtggcaaacctatgggccacgacgttgactttctgatcacgaatccgggcccgaaagaggatgacgagctgctccacaaagtggttgatctgctcaagaagcaaggtctgctgctgtacgaagacatcaaagagagcacgttcgtggaggggcaactgccaagtcataaaatcgacgccatggacaacttccagaagtgcttcgccattctcaagctgtaccagccgggcgtggataacagtgcggttgggacgagtaagaaaagtgacatggccgaggttaaggattggaaagcgattcgtgtggatctggtgatcacgccattcgagcagtacgcctatgcgctgctcggttggacgggcagcaaacaatttcgtcgcgatctgcgccgctatgcggaggaagagcgcggcatgatcctcgacaaccatgccctctacgacctgaaaaagcgcatctttctgaaagcgggcagcgaagaagagattttcgcgcatctgggtctggattatgtggagccgtgggaacgcaacgcg

SEQ ID NO: 2484 - protein, 394 aa, synthetic construct
  REGION 1..394: note = Variant of terminal deoxynucleotidyl transferase
MHHHHHHGGSGHPPSNTPEGEVPSVIARPVSQYACQRKTTLNNYNKKFTDALEIMAENYKFKENLIACLEAKRAASILKYLPFEVTSMKDIQGLPCITDQVRDVIEEIIEEGESSRVKEVLNDERYKAFKQFTSVFGVGVKTAEKWFRMGLRTVEEAKASKSLKLSKMQKAGFLYYEDLASRVSKEEADAVTLIVKNTVRTFLPDALVTITGGFRRGKPMGHDVDFLITNPGPKEDDELLHKVVDLLKKQGLLLYEDIKESTFVEGQLPSHKIDAMDNFQKCFAILKLYQPGVDNSAVGTSKKSDMAEVKDWKAIRVDLVITPFEQYAYALLGWTGSKQFRRDLRRYAEEERGMILDNHALYDLKKRIFLKAGSEEEIFAHLGLDYVEPWERNA

SEQ ID NO: 2485 - DNA, 1182 bp, synthetic construct
  misc_feature 1..1182: note = Variant of terminal deoxynucleotidyl transferase
  source 1..1182: mol_type = other DNA
atgcatcaccaccatcatcatgggggttctggtcatccgccgagcaataccccggagggggaggtgccgagcgttatcgcccgtccggttagtcagtacgcgtgccagcgcaagaccacgctgaataactacaacaaaaagtttaccgacgcgctggagatcatggccgagaactacaaatttaaagagaacctgatcgcgtgtctggaagccaagcgcgccgcgagtattctgaaatatctgccgttcgaggttaccagcatgaaagacatccaaggtctgccgtgcattaccgaccaagttcgtgacgtgatcgaggagatcatcgaagagggcgagagcagccgtgttaaagaagttctcaatgacgagcgctacaaggcctttaagcagttcaccagcgtgttcggtgtgggcgtgaaaaccgcggaaaagtggttccgtatgggcctccgtacggttgaagaagcaaaggccagtaagagtctgaagctgagcaagatgcagaaggcgggctttctgtattacgaggatctggcgagccgcgttagtaaagaagaagccgatgccgttacgctcatcgtgaagaacacggtgcgtacctttctgccggatgcgctggtgaccatcaccggcggtttccgccgtggcaaacctgtgggccacgacgttgactttctgatcacgaatccgggcccgaaagaggatgacgagctgctccacaaagtggttgatctgctcaagaagcaaggtctgctgctgtacgaagacatcaaagagagcacgttcgtggaggggcaactgccaagtcgcaaaatcgacgccatggacaacttccagaagtgcttcgccattctcaagctgtaccagccgggcgtggataacagtgcggttgggacgagtaagaaaagtgacatggccgaggttaaggattggaaagcgattcgtgtggatctggtgatcacgccattcgagcagtacgcctatgcgctgctcggttggacgggcagcaaacaatttcgtcgcgatctgcgccgctatgcggaggaagagcgcggcatgatcctcgacaaccatgccctctacgacctgaaaaagcgcatctttctgaaagcgggcagcgaagaagagattttcgcgcatctgggtctggattatgtggagccgtgggaacgcaacgcg

SEQ ID NO: 2486 - protein, 394 aa, synthetic construct
  REGION 1..394: note = Variant of terminal deoxynucleotidyl transferase
MHHHHHHGGSGHPPSNTPEGEVPSVIARPVSQYACQRKTTLNNYNKKFTDALEIMAENYKFKENLIACLEAKRAASILKYLPFEVTSMKDIQGLPCITDQVRDVIEEIIEEGESSRVKEVLNDERYKAFKQFTSVFGVGVKTAEKWFRMGLRTVEEAKASKSLKLSKMQKAGFLYYEDLASRVSKEEADAVTLIVKNTVRTFLPDALVTITGGFRRGKPVGHDVDFLITNPGPKEDDELLHKVVDLLKKQGLLLYEDIKESTFVEGQLPSRKIDAMDNFQKCFAILKLYQPGVDNSAVGTSKKSDMAEVKDWKAIRVDLVITPFEQYAYALLGWTGSKQFRRDLRRYAEEERGMILDNHALYDLKKRIFLKAGSEEEIFAHLGLDYVEPWERNA

SEQ ID NO: 2487 - DNA, 1182 bp, synthetic construct
  misc_feature 1..1182: note = Variant of terminal deoxynucleotidyl transferase
  source 1..1182: mol_type = other DNA
atgcatcaccaccatcatcatgggggttctggtcatccgccgagcaataccccggagggggaggtgccgagcgttatcgcccgtccggttagtcagtactcgtgccagcgcaagaccacgctgaataactacaacaaaaagtttaccgacgcgctggagatcatggccgagaactacaaatttaaagagaacctgatcgcgtgtctggaagccaagcgcgccgcgagtattctgaaatatctgccgttcgaggttaccagcatgaaagacatccaaggtctgccgtgcattaccgaccaagttcgtgacgtgatcgaggagatcatcgaagagggcgagagcagccgtgttaaagaagttctcaatgacgagcgctacaaggcctttaagcagttcaccagcgtgttcggtgtgggcgtgaaaaccgcggaaaagtggtttcgtatgggcctccgtacggttgaagaagcaaaggccagtaagagtctgaagctgagcaagatgcagaaggcgggctttctgtattacgaggatctggcgagccgcgttagtaaagaagaagccgatgccgttacgctcatcgtgaagaacacggtgcgtacctttctgccggatgcgctggtgaccatcaccggcggtttccgccgtggcaaacctatgggccacgacgttgactttctgatcacgaatccgggccctaaagaggatgacgagctgctccacaaagtggttgatctgctcaagacgcaaggtctgctgctgtacgaagacatcaaagagagcacgttcgtggaggggcaactgccaagtcgcaaaatcgacgccatggacaacttccagaagtgcttcgccattctcaagctgtaccagccgggcgtggataacagtgcggttgggacgagtaagaaaagtgacatggccgaggttaaggattggaaagcggttcgtgtggatctggtgatcacgccattcgagcagtacgcctatgcgctgctcggttggacgggcagcaaacaatttcgtcgcgatctgcgccgctatgcggaggaagagcgcggcatgatcctcgacaaccatgccctctacgacctgaaaaagcgcatctttctgaaagcgggcagcgaagaagagattttcgcgcatctgggtctggattatgtggagccgtgggaacgcaacgcg

SEQ ID NO: 2488 - protein, 394 aa, synthetic construct
  REGION 1..394: note = Variant of terminal deoxynucleotidyl transferase
MHHHHHHGGSGHPPSNTPEGEVPSVIARPVSQYSCQRKTTLNNYNKKFTDALEIMAENYKFKENLIACLEAKRAASILKYLPFEVTSMKDIQGLPCITDQVRDVIEEIIEEGESSRVKEVLNDERYKAFKQFTSVFGVGVKTAEKWFRMGLRTVEEAKASKSLKLSKMQKAGFLYYEDLASRVSKEEADAVTLIVKNTVRTFLPDALVTITGGFRRGKPMGHDVDFLITNPGPKEDDELLHKVVDLLKTQGLLLYEDIKESTFVEGQLPSRKIDAMDNFQKCFAILKLYQPGVDNSAVGTSKKSDMAEVKDWKAVRVDLVITPFEQYAYALLGWTGSKQFRRDLRRYAEEERGMILDNHALYDLKKRIFLKAGSEEEIFAHLGLDYVEPWERNA

SEQ ID NO: 2489 - DNA, 1182 bp, synthetic construct
  misc_feature 1..1182: note = Variant of terminal deoxynucleotidyl transferase
  source 1..1182: mol_type = other DNA
atgcatcaccaccatcatcatgggggttctggtcatccgccgagcaataccccggagggggaggtgccgagcgttatcgcccgtccggttagtcagtacgcgtgccagcgcaagaccacgctgaataactacaacaaaaagttcaccgacgcgctggagatcatggccgagaactacaaatttaaagagaacctgatcgcgtgtctggaagccaagcgcgccgcgagtatttttaaatatctgccgttcgaggttaccagcatgaaagacatccaaggtctgccgtgcattaccgaccaagttcgtgacgtgatcgaggagatcatcgaagagggcgagagcagccgtgttaaagaagttctcaatgacgagcgctacaaggcctttaagcagttcaccagcgtgttcggtgtgggcgtgaaaaccgcggaaaagtggtttcgtatgggcctccgtacggttgaagaagcaaaggccagtaagagtctgaagctgagcaagatgcagaaggcgggctttctgtattacgaggatctggcgagccgcgttagtaaagaagaagccgatgccgttacgctcatcgtgaagaacacggtgcgtacctttctgccggatgcgctggtgaccatcaccggcggtttccgccgtggcaaacctatgggccacgacgttgactttctgatcacgaatccgggcccgaaagaggatgacgagctgctccacaaagtggttgatctgctcaagaagcaaggtctgctgctgtacgaagacatcaaagagagcacgttcgtggaggggcaactgccaagtcgcaaaatcgacgccatggacaacttccagaagtgcttcgccattctcaagctgtaccagccgggcgtggataacagtgcggttgggacgagtaagaaaagtgacatggctgaggttaaggattggaaagcggttcgtgtggatctggtgatcacgccattcgagcagtacgcctatgcgctgctcggttggacgggcagcaaagaatttcgtcgcgatctgcgtcgctatgcggaggaagagcgcggcatgatcctcgacaaccatgccctctacgacctgaaaaagcgcatctttctgaaagcgggcagcgaagaagagattttcgcgcatctgggtctggattatgtggagccgtgggaacgcaacgcg

SEQ ID NO: 2490 - protein, 394 aa, synthetic construct
  REGION 1..394: note = Variant of terminal deoxynucleotidyl transferase
MHHHHHHGGSGHPPSNTPEGEVPSVIARPVSQYACQRKTTLNNYNKKFTDALEIMAENYKFKENLIACLEAKRAASIFKYLPFEVTSMKDIQGLPCITDQVRDVIEEIIEEGESSRVKEVLNDERYKAFKQFTSVFGVGVKTAEKWFRMGLRTVEEAKASKSLKLSKMQKAGFLYYEDLASRVSKEEADAVTLIVKNTVRTFLPDALVTITGGFRRGKPMGHDVDFLITNPGPKEDDELLHKVVDLLKKQGLLLYEDIKESTFVEGQLPSRKIDAMDNFQKCFAILKLYQPGVDNSAVGTSKKSDMAEVKDWKAVRVDLVITPFEQYAYALLGWTGSKEFRRDLRRYAEEERGMILDNHALYDLKKRIFLKAGSEEEIFAHLGLDYVEPWERNA

SEQ ID NO: 2491 - DNA, 1182 bp, synthetic construct
  misc_feature 1..1182: note = Variant of terminal deoxynucleotidyl transferase
  source 1..1182: mol_type = other DNA
atgcatcaccaccatcatcatgggggttctggtcatccgccgagcaataccccggagggggaggtgccgagcgttatcgcccgtccggttagtcagtactcgtgccagcgcaagaccacgctgaataactacaacaaaaagtttaccgacgcgctggagatcatggccgagaactacaaatttaaagagaacctgatcgcgtgtctggaagccaagcgcgccgcgagtattctgaaatatctgccgttcgaggttaccagcatgaaagacatccaaggtctgccgtgcattaccgaccaagttcgtgacgtgatcgaggagatcatcgaagagggcgagagcagccgtgttaaagaagttctcaatgacgagcgctacaaggcctttaagcagttcaccagcgtgttcggtgtgggcgtgaaaaccgcggaaaagtggtaccgtatgggcctccgtacggttgaagaagcaaaggccagtaagagtctgaagctgagcaagatgcagaaggcgggctttctgtattacgaggatctggcgagcatggttagtaaagaagaagccgatgccgttacgctcatcgtgaagaacacggtgcgtacctttctgccggatgcgctggtgaccatcaccggcggtttccgccgtggcaaacctatgggccacgacgttgactttctgatcacgaatccgggcccgaaagaggatgacgagctgctccacaaagtggttgatctgctcaagaagcaaggtctgctgctgtacgaagacatcaaagagagcacgttcgtggaggggcaactgccaagtcgtaaaatcgacgccatggacaacttccagaagtgcttcgccattctcaagctgtaccagccgggcgtggataacagtgcggttgggacgagtaagaaaagtgacatggctgaggttaaggattggaaagcgattcgtgtggatctggtgatcacgccattcgagcagtacgcctatgcgctgctcggttggacgggcagcaaagaatttcgtcgcgatctgaagcgctatgcggaggaagagcgcggcatgatcctcgacaaccatgccctctacgacctgaaaaagcgcatctttctgaaagcgggcagcgaagaagagattttcgcgcatctgggtctggattatgtggagccgtgggaacgcaacgcg

SEQ ID NO: 2492 - protein, 394 aa, synthetic construct
  REGION 1..394: note = Variant of terminal deoxynucleotidyl transferase
MHHHHHHGGSGHPPSNTPEGEVPSVIARPVSQYSCQRKTTLNNYNKKFTDALEIMAENYKFKENLIACLEAKRAASILKYLPFEVTSMKDIQGLPCITDQVRDVIEEIIEEGESSRVKEVLNDERYKAFKQFTSVFGVGVKTAEKWYRMGLRTVEEAKASKSLKLSKMQKAGFLYYEDLASMVSKEEADAVTLIVKNTVRTFLPDALVTITGGFRRGKPMGHDVDFLITNPGPKEDDELLHKVVDLLKKQGLLLYEDIKESTFVEGQLPSRKIDAMDNFQKCFAILKLYQPGVDNSAVGTSKKSDMAEVKDWKAIRVDLVITPFEQYAYALLGWTGSKEFRRDLKRYAEEERGMILDNHALYDLKKRIFLKAGSEEEIFAHLGLDYVEPWERNA

SEQ ID NO: 2493 - DNA, 1182 bp, synthetic construct
  misc_feature 1..1182: note = Variant of terminal deoxynucleotidyl transferase
  source 1..1182: mol_type = other DNA
atgcatcaccaccatcatcatgggggttctggtcatccgccgagcaataccccggagggggaggtgccgagcgttatcgcccgtccggttagtcagtactcgtgccagcgcaagaccacgctgaataactacaacaaaaagtttaccgacgcgctggagatcatggccgagaactacaaatttaaagagaacctgatcgcgtgtctggaagccaagcgcgccgcgagtattctgaaatatctgccgttcgaggttaccagcatgaaagacatccaaggtctgccgtgcattaccgaccaagttcgtgacgtgatcgaggagatcatcgaagagggcgagagcagccgtgttaaagaagttctcaatgacgagcgctacaaggcctttaagcagttcaccagcgtgttcggtgtgggcgtgaaaaccgcggaaaagtggttccgtatgggcctccgtacggttgaagaagcaaaggccagtaagagtctgaagctgagcaagatgcagaaggcgggctttctgtattacgaggatctggcgagcggcgttagtaaagaagaagccgatgccgttacgctcatcgtgaagaacacggtgcgtacctttctgccggatgcgctggtgaccatcaccggcggtttccgccgtggcaaacctatgggccacgacgttgactttctgatcacgaatccgggccctaaagaggatgacgagctgctccacaaagtggttgatctgctcaagaagcaaggtctgctgctgtacgaagacatcaaagagagcacgttcgtggaggggcaactgccaagtcgtaaaatcgacgccatggacaacttccagaagtgcttcgccattctcaagctgtaccagccgggcgtggataacagtgcggttgggacgagtaagaaaagtgacatggccgaggttaaggattggaaagcgattcgtgtggatctggtgatcacgccattcgagcagtacgcctatgcgctgctcggttggacgggcagcaaagaatttcgtcgcgatctgaagcgctatgctgaggaagagcgcggcatgatcctcgacaaccatgccctctacgacctgaaaaagcgcatctttctgaaagcgggcagcgaagaagagattttcgcgcatctgggtctggattatgtggagccgtgggaacgcaacgcg

SEQ ID NO: 2494 - protein, 394 aa, synthetic construct
  REGION 1..394: note = Variant of terminal deoxynucleotidyl transferase
MHHHHHHGGSGHPPSNTPEGEVPSVIARPVSQYSCQRKTTLNNYNKKFTDALEIMAENYKFKENLIACLEAKRAASILKYLPFEVTSMKDIQGLPCITDQVRDVIEEIIEEGESSRVKEVLNDERYKAFKQFTSVFGVGVKTAEKWFRMGLRTVEEAKASKSLKLSKMQKAGFLYYEDLASGVSKEEADAVTLIVKNTVRTFLPDALVTITGGFRRGKPMGHDVDFLITNPGPKEDDELLHKVVDLLKKQGLLLYEDIKESTFVEGQLPSRKIDAMDNFQKCFAILKLYQPGVDNSAVGTSKKSDMAEVKDWKAIRVDLVITPFEQYAYALLGWTGSKEFRRDLKRYAEEERGMILDNHALYDLKKRIFLKAGSEEEIFAHLGLDYVEPWERNA

SEQ ID NO: 2495 - DNA, 1182 bp, synthetic construct
  misc_feature 1..1182: note = Variant of terminal deoxynucleotidyl transferase
  source 1..1182: mol_type = other DNA
atgcatcaccaccatcatcatgggggttctggtcatccgccgagcaataccccggagggggaggtgccgagcgttatcgcccgtccggttagtcagtactcgtgccagcgcaagaccacgctgaataactacaacaaaaagttcaccgacgcgctggagatcatggccgagaactacaaatttaaagagaacctgatcgcgtgtctggaagccaagcgcgccgcgagtattctgaaatatctgccgttcgaggttaccagcatgaaagacatccaaggtctgccgtgcattaccgaccaagttcgtgacgtgatcgaggagatcatcgaagagggcgagagcagccgtgttaaagaagttctcaatgacgagcgctacaaggcctttaagcagttcaccagcgtgttcggtgtgggcgtgaaaaccgcggaaaagtggtaccgtatgggcctccgtacggttgaagaagcaaaggccagtaagagtctgaagctgagcaagatgcagaaggcgggctttctgtattacgaggatctggcgagccgcgttagtaaagaagaagccgatgccgttacgctcatcgtgaagaacacggtgcgtacctttctgccggatgcgctggtgaccatcaccggcggtttccgccgtggcaaacctatgggccacgacgttgactttctgatcacgaatccgggcccgaaagaggatgacgagctgctccacaaagtggttgatctgctcaagaagcaaggtctgctgctgtacgaagacatcaaagagagcacgttcgtggaggggcaactgccaagtcgcaaaatcgacgccatggacaacttccagaagtgcttcgccattctcaagctgtaccagccgggcgtggataacagtgcggttgggacgagtaagaaaagtgacatggccgaggttaaggattggaaagcgattcgtgtggatctggtgatcacgccattcgagcagtacgcctatgcgctgctcggttggacgggcagcaaagaatttcgtcgcgatctgcgtcgctatgcggaggaagagcgcggcatgatcctcgacaaccatgccctctacgacctgaaaaagcgcatctttctgaaagcgggcagcgaagaagagattttcgcgcatctgggtctggattatgtggagccgtgggaacgcaacgcg

SEQ ID NO: 2496 - protein, 394 aa, synthetic construct
  REGION 1..394: note = Variant of terminal deoxynucleotidyl transferase
MHHHHHHGGSGHPPSNTPEGEVPSVIARPVSQYSCQRKTTLNNYNKKFTDALEIMAENYKFKENLIACLEAKRAASILKYLPFEVTSMKDIQGLPCITDQVRDVIEEIIEEGESSRVKEVLNDERYKAFKQFTSVFGVGVKTAEKWYRMGLRTVEEAKASKSLKLSKMQKAGFLYYEDLASRVSKEEADAVTLIVKNTVRTFLPDALVTITGGFRRGKPMGHDVDFLITNPGPKEDDELLHKVVDLLKKQGLLLYEDIKESTFVEGQLPSRKIDAMDNFQKCFAILKLYQPGVDNSAVGTSKKSDMAEVKDWKAIRVDLVITPFEQYAYALLGWTGSKEFRRDLRRYAEEERGMILDNHALYDLKKRIFLKAGSEEEIFAHLGLDYVEPWERNA

SEQ ID NO: 2497 - DNA, 1182 bp, synthetic construct
  misc_feature 1..1182: note = Variant of terminal deoxynucleotidyl transferase
  source 1..1182: mol_type = other DNA
atgcatcaccaccatcatcatgggggttctggtcatccgccgagcaataccccggagggggaggtgccgagcgttatcgcccgtccggttagtcagtactcgtgccagcgcaagaccacgctgaataactacaacaaaaagttcaccgacgcgctggagatcatggccgagaactacaaatttaaagagaacctgatcgcgtgtctggaagccaagcgcgccgcgagtattctgaaatatctgccgttcgaggttaccagcatgaaagacatccaaggtctgccgtgcattaccgaccaagttcgtgacgtgatcgaggagatcatcgaagagggcgagagcagccgtgttaaagaagttctcaatgacgagcgctacaaggcctttaagcagttcaccagcgtgttcggtgtgggcgtgaaaaccgcggaaaagtggtaccgtatgggcctccgtacggttgaagaagcacgcgccagtaagagtctgaagctgagcaagatgcagaaggcgggctttctgtattacgaggatctggcgagcatggttagtaaagaagaagccgatgccgttacgctcatcgtgaagaacacggtgcgtacctttctgccggatgcgctggtgaccatcaccggcggtttccgccgtggcaaacctatgggccacgacgttgactttctgatcacgaatccgggcccgaaagaggatgacgagctgctccacaaagtggttgatctgctcaagaagcaaggtctgctgctgtacgaagacatcaaagagagcacgttcgtggaggggcaactgccaagtcataaaatcgacgccatggacaacttccagaagtgcttcgccattctcaagctgtaccagccgggcgtggataacagtgcggttgggacgagtaagaaaagtgacatggctgaggttaaggattggaaagcggttcgtgtggatctggtgatcacgccattcgagcagtacgcctatgcgctgctcggttggacgggcagcaaagaatttcgtcgcgatctgcgtcgctatgcggaggaagagcgcggcatgatcctcgacaaccatgccctctacgacctgaaaaagcgcatctttctgaaagcgggcagcgaagaagagattttcgcgcatctgggtctggattatgtggagccgtgggaacgcaacgcg

SEQ ID NO: 2498 - protein, 394 aa, synthetic construct
  REGION 1..394: note = Variant of terminal deoxynucleotidyl transferase
MHHHHHHGGSGHPPSNTPEGEVPSVIARPVSQYSCQRKTTLNNYNKKFTDALEIMAENYKFKENLIACLEAKRAASILKYLPFEVTSMKDIQGLPCITDQVRDVIEEIIEEGESSRVKEVLNDERYKAFKQFTSVFGVGVKTAEKWYRMGLRTVEEARASKSLKLSKMQKAGFLYYEDLASMVSKEEADAVTLIVKNTVRTFLPDALVTITGGFRRGKPMGHDVDFLITNPGPKEDDELLHKVVDLLKKQGLLLYEDIKESTFVEGQLPSHKIDAMDNFQKCFAILKLYQPGVDNSAVGTSKKSDMAEVKDWKAVRVDLVITPFEQYAYALLGWTGSKEFRRDLRRYAEEERGMILDNHALYDLKKRIFLKAGSEEEIFAHLGLDYVEPWERNA

SEQ ID NO: 2499 - DNA, 1182 bp, synthetic construct
  misc_feature 1..1182: note = Variant of terminal deoxynucleotidyl transferase
  source 1..1182: mol_type = other DNA
atgcatcaccaccatcatcatgggggttctggtcatccgccgagcaataccccggagggggaggtgccgagcgttatcgcccgtccggttagtcagtacagctgccagcgcaagaccacgctgaataactacaacaaaaagtttaccgacgcgctggagatcatggccgagaactacaaatttaaagagaacctgatcgcgtgtctggaagccaagcgcgccgcgagtattctgaaatatctgccgttcgaggttaccagcatgaaagacatccaaggtctgccgtgcattaccgaccaagttcgtgacgtgatcgaggagatcatcgaagagggcgagagcagccgtgttaaagaagttctcaatgacgagcgctacaaggcctttaagcagttcaccagcgtgttcggtgtgggcgtgaaaaccgcggaaaagtggtaccgtatgggcctccgtacggttgaagaagcacgcgccagtaagagtctgaagctgagcaagatgcagaaggcgggctttctgtattacgaggatctggcgagcggcgttagtaaagaagaagccgatgccgttacgctcatcgtgaagaacacggtgcgtacctttctgccggatgcgctggtgaccatcaccggcggtttccgccgtggcaaacctgtgggccacgacgttgactttctgatcacgaacccgggcggcaaagaggatgacgagctgctccacaaagtggttgatctgctcaagaagcaaggtctgctgctgtacgaagacatcaaagagagcacgttcgtggaggggcaactgccaagtcgtaaaatcgacgccatggacaacttccagaagtgcttcgccattctcaagctgtaccagccgggcgtggataacagtgcggttgggacgagtaagaaaagtgacatggccgaggttaaggattggaaagcgattcgtgtggatctggtgatcacgccattcgagcagtacgcctatgcgctgctcggttggacgggcagcaaagaatttcgtcgcgatctgcgtcgctatgcggaggaagagcgcggcatgatcctcgacaaccatgccctctacgacctgaaaaagcgcatctttctgaaagcgggcagcgaagaagagattttcgcgcatctgggtctggattatgtggagccgtgggaacgcaacgcg

SEQ ID NO: 2500 - protein, 394 aa, synthetic construct
  REGION 1..394: note = Variant of terminal deoxynucleotidyl transferase
MHHHHHHGGSGHPPSNTPEGEVPSVIARPVSQYSCQRKTTLNNYNKKFTDALEIMAENYKFKENLIACLEAKRAASILKYLPFEVTSMKDIQGLPCITDQVRDVIEEIIEEGESSRVKEVLNDERYKAFKQFTSVFGVGVKTAEKWYRMGLRTVEEARASKSLKLSKMQKAGFLYYEDLASGVSKEEADAVTLIVKNTVRTFLPDALVTITGGFRRGKPVGHDVDFLITNPGGKEDDELLHKVVDLLKKQGLLLYEDIKESTFVEGQLPSRKIDAMDNFQKCFAILKLYQPGVDNSAVGTSKKSDMAEVKDWKAIRVDLVITPFEQYAYALLGWTGSKEFRRDLRRYAEEERGMILDNHALYDLKKRIFLKAGSEEEIFAHLGLDYVEPWERNA

SEQ ID NO: 2501 - DNA, 1182 bp, synthetic construct
  misc_feature 1..1182: note = Variant of terminal deoxynucleotidyl transferase
  source 1..1182: mol_type = other DNA
atgcatcaccaccatcatcatgggggttctggtcatccgccgagcaataccccggagggggaggtgccgagcgttatcgcccgtccggttagtcagtacgcgtgccagcgcaagaccacgctgaataactacaacaaaaagttcaccgacgcgctggagatcatggccgagaactacaaatttaaagagaacctgatcgcgtgtctggaagccaagcgcgccgcgagtattctgaaatatctgccgttcgaggttaccagcatgaaagacatccaaggtctgccgtgcattaccgaccaagttcgtgacgtgatcgaggagatcatcgaagagggcgagagcagccgtgttaaagaagttctcaatgacgagcgctacaaggcctttaagcagttcaccagcgtgttcggtgtgggcgtgaaaaccgcggaaaagtggtaccgtatgggcctccgtacggttgaagaagcacgcgccagtaagagtctgaagctgagcaagatgcagaaggcgggctttctgtattacgaggatctggcgagcatggttagtaaagaagaagccgatgccgttacgctcatcgtgaagaacacggtgcgtacctttctgccggatgcgctggtgaccatcaccggcggtttccgccgtggcaaacctatgggccacgacgttgactttctgatcacgaacccgggccgcaaagaggatgacgagctgctccacaaagtggttgatctgctcaagaagcaaggtctgctgctgtacgaagacatcaaagagagcacgttcgtggaggggcaactgccaagtcgtaaaatcgacgccatggacaacttccagaagtgcttcgccattctcaagctgtaccagccgggcgtggataacagtgcggttgggacgagtaagaaaagtgacatggctgaggttaaggattggaaagcgattcgtgtggatctggtgatcacgccattcgagcagtacgcctatgcgctgctcggttggacgggcagcaaagaatttcgtcgcgatctgcgtcgctatgcggaggaagagcgcggcatgatcctcgacaaccatgccctctacgacctgaaaaagcgcatctttctgaaagcgggcagcgaagaagagattttcgcgcatctgggtctggattatgtggagccgtgggaacgcaacgcg

SEQ ID NO: 2502 - protein, 394 aa, synthetic construct
  REGION 1..394: note = Variant of terminal deoxynucleotidyl transferase
MHHHHHHGGSGHPPSNTPEGEVPSVIARPVSQYACQRKTTLNNYNKKFTDALEIMAENYKFKENLIACLEAKRAASILKYLPFEVTSMKDIQGLPCITDQVRDVIEEIIEEGESSRVKEVLNDERYKAFKQFTSVFGVGVKTAEKWYRMGLRTVEEARASKSLKLSKMQKAGFLYYEDLASMVSKEEADAVTLIVKNTVRTFLPDALVTITGGFRRGKPMGHDVDFLITNPGRKEDDELLHKVVDLLKKQGLLLYEDIKESTFVEGQLPSRKIDAMDNFQKCFAILKLYQPGVDNSAVGTSKKSDMAEVKDWKAIRVDLVITPFEQYAYALLGWTGSKEFRRDLRRYAEEERGMILDNHALYDLKKRIFLKAGSEEEIFAHLGLDYVEPWERNA

SEQ ID NO: 2503 - DNA, 1182 bp, synthetic construct
  misc_feature 1..1182: note = Variant of terminal deoxynucleotidyl transferase
  source 1..1182: mol_type = other DNA
atgcatcaccaccatcatcatgggggttctggtcatccgccgagcaataccccggagggggaggtgccgagcgttatcgcccgtccggttagtcagtacagctgccagcgcaagaccacgctgaataactacaacaaaaagctgaccgacgcgctggagatcatggccgagaactacaaatttaaagagaacctgatcgcgtgtctggaagccaagcgcgccgcgagtattctgaaatatctgccgttcgaggttaccagcatgaaagacatccaaggtctgccgtgcattaccgaccaagttcgtgacgtgatcgaggagatcatcgaagagggcgagagcagccgtgttaaagaagttctcaatgacgagcgctacaaggcctttaagcagttcaccagcgtgttcggtgtgggcgtgaaaaccgcggaaaagtggtaccgtatgggcctccgtacggttgaagaagcaaaggccagtaagagtctgaagctgagcaagatgcagaaggcgggctttctgtattacgaggatctggcgagccgcgttagtaaagaagaagccgatgccgttacgctcatcgtgaagaacacggtgcgtacctttctgccggatgcgctggtgaccatcaccggcggtttccgccgtggcaaacctatgggccacgacgttgactttctgatcacgaacccgggcggcaaagaggatgacgagctgctccacaaagtggttgatctgctcaagaagcaaggtctgctgctgtacgaagacatcaaagagagcacgttcgtggaggggcaactgccaagtcgtaaaatcgacgccatggacaacttccagaagtgcttcgccattctcaagctgtaccagccgggcgtggataacagtgcggttgggacgagtaagaaaagtgacatggctgaggttaaggattggaaagcgattcgtgtggatctggtgatcacgccattcgagcagtacgcctatgcgctgctcggttggacgggcagcaaagaatttcgtcgcgatctgaagcgctatgcggaggaagagcgcggcatgatcctcgacaaccatgccctctacgacctgaaaaagcgcatctttctgaaagcgggcagcgaagaagagattttcgcgcatctgggtctggattatgtggagccgtgggaacgcaacgcg

SEQ ID NO: 2504 - protein, 394 aa, synthetic construct
  REGION 1..394: note = Variant of terminal deoxynucleotidyl transferase
MHHHHHHGGSGHPPSNTPEGEVPSVIARPVSQYSCQRKTTLNNYNKKLTDALEIMAENYKFKENLIACLEAKRAASILKYLPFEVTSMKDIQGLPCITDQVRDVIEEIIEEGESSRVKEVLNDERYKAFKQFTSVFGVGVKTAEKWYRMGLRTVEEAKASKSLKLSKMQKAGFLYYEDLASRVSKEEADAVTLIVKNTVRTFLPDALVTITGGFRRGKPMGHDVDFLITNPGGKEDDELLHKVVDLLKKQGLLLYEDIKESTFVEGQLPSRKIDAMDNFQKCFAILKLYQPGVDNSAVGTSKKSDMAEVKDWKAIRVDLVITPFEQYAYALLGWTGSKEFRRDLKRYAEEERGMILDNHALYDLKKRIFLKAGSEEEIFAHLGLDYVEPWERNA

SEQ ID NO: 2505 - DNA, 1182 bp, synthetic construct
  misc_feature 1..1182: note = Variant of terminal deoxynucleotidyl transferase
  source 1..1182: mol_type = other DNA
atgcatcaccaccatcatcatgggggttctggtcatccgccgagcaataccccggagggggaggtgccgagcgttatcgcccgtccggttagtcagtactcgtgccagcgcaagaccacgctgaataactacaacaaaaagttcaccgacgcgctggagatcatggccgagaactacaaatttaaagagaacctgatcgcgtgtctggaagccaagcgcgccgcgagtatttttaaatatctgccgttcgaggttaccagcatgaaagacatccaaggtctgccgtgcattaccgaccaagttcgtgacgtgatcgaggagatcatcgaagagggcgagagcagccgtgttaaagaagttctcaatgacgagcgctacaaggcctttaagcagttcaccagcgtgttcggtgtgggcgtgaaaaccgcggaaaagtggtaccgtatgggcctccgtacggttgaagaagcaaaggccagtaagagtctgaagctgagcaagatgcagaaggcgggctttctgtattacgaggatctggcgagcatggttagtaaagaagaagccgatgccgttacgctcatcgtgaagaacacggtgcgtacctttctgccggatgcgctggtgaccatcaccggcggtttccgccgtggcaaacctatgggccacgacgttgactttctgatcacgctgccgggcggcaaagaggatgacgagctgctccacaaagtggttgatctgctcaagacgcaaggtctgctgctgtacgaagacatcaaagagagcacgttcgtggaggggcaactgccaagtcgtaaaatcgacgccatggacaacttccagaagtgcttcgccattctcaagctgtaccagccgggcgtggataacagtgcggttgggacgagtaagaaaagtgacatggctgaggttaaggattggaaagcgattcgtgtggatctggtgatcacgccattcgagcagtacgcctatgcgctgctcggttggacgggcagcaaagaatttcgtcgcgatctgcgccgctatgcggaggaagagcgcggcatgatcctcgacaaccatgccctctacgacctgaaaaagcgcatctttctgaaagcgggcagcgaagaagagattttcgcgcatctgggtctggattatgtggagccgtgggaacgcaacgcg

SEQ ID NO: 2506 - protein, 394 aa, synthetic construct
  REGION 1..394: note = Variant of terminal deoxynucleotidyl transferase
MHHHHHHGGSGHPPSNTPEGEVPSVIARPVSQYSCQRKTTLNNYNKKFTDALEIMAENYKFKENLIACLEAKRAASIFKYLPFEVTSMKDIQGLPCITDQVRDVIEEIIEEGESSRVKEVLNDERYKAFKQFTSVFGVGVKTAEKWYRMGLRTVEEAKASKSLKLSKMQKAGFLYYEDLASMVSKEEADAVTLIVKNTVRTFLPDALVTITGGFRRGKPMGHDVDFLITLPGGKEDDELLHKVVDLLKTQGLLLYEDIKESTFVEGQLPSRKIDAMDNFQKCFAILKLYQPGVDNSAVGTSKKSDMAEVKDWKAIRVDLVITPFEQYAYALLGWTGSKEFRRDLRRYAEEERGMILDNHALYDLKKRIFLKAGSEEEIFAHLGLDYVEPWERNA

SEQ ID NO: 2507 - DNA, 1182 bp, synthetic construct
  misc_feature 1..1182: note = Variant of terminal deoxynucleotidyl transferase
  source 1..1182: mol_type = other DNA
atgcatcaccaccatcatcatgggggttctggtcatccgccgagcaataccccggagggggaggtgccgagcgttatcgcccgtccggttagtcagtacgcgtgccagcgcaagaccacgctgaataactacaacaaaaagtttaccgacgcgctggagatcatggccgagaactacaaatttaaagagaacctgatcgcgtgtctggaagccaagcgcgccgcgagtattctgaaatatctgccgttcgaggttaccagcatgaaagacatccaaggtctgccgtgcattaccgaccaagttcgtgacgtgatcgaggagatcatcgaagagggcgagagcagccgtgttaaagaagttctcaatgacgagcgctacaaggcctttaagcagttcaccagcgtgttcggtgtgggcgtgaaaaccgcggaaaagtggtttcgtatgggcctccgtacggttgaagaagcaaaggccagtaagagtctgaagctgagcaagatgcagaaggcgggctttctgtattacgaggatctggcgagcggcgttagtaaagaagaagccgatgccgttacgctcatcgtgaagaacacggtgcgtacctttctgccggatgcgctggtgaccatcaccggcggtttccgccgtggcaaacctatgggccacgacgttgactttctgatcacgaatccgggcccgaaagaggatgacgagctgctccacaaagtggttgatctgctcaagaagcaaggtctgctgctgtacgaagacatcaaagagagcacgttcgtggaggggcaactgccaagtcgtaaaatcgacgccatggacaacttccagaagtgcttcgccattctcaagctgtaccagccgggcgtggataacagtgcggttgggacgagtaagaaaagtgacatgggtgaggttaaggattggaaagcgattcgtgtggatctggtgatcacgccattcgagcagtacgcctatgcgctgctcggttggacgggcagcaaacaatttcgtcgcgatctgcgccgctatgcggaggaagagcgcggcatgatcctcgacaaccatgccctctacgacctgaaaaagcgcatctttctgaaagcgggcagcgaagaagagattttcgcgcatctgggtctggattatgtggagccgtgggaacgcaacgcg

SEQ ID NO: 2508 - protein, 394 aa, synthetic construct
  REGION 1..394: note = Variant of terminal deoxynucleotidyl transferase
MHHHHHHGGSGHPPSNTPEGEVPSVIARPVSQYACQRKTTLNNYNKKFTDALEIMAENYKFKENLIACLEAKRAASILKYLPFEVTSMKDIQGLPCITDQVRDVIEEIIEEGESSRVKEVLNDERYKAFKQFTSVFGVGVKTAEKWFRMGLRTVEEAKASKSLKLSKMQKAGFLYYEDLASGVSKEEADAVTLIVKNTVRTFLPDALVTITGGFRRGKPMGHDVDFLITNPGPKEDDELLHKVVDLLKKQGLLLYEDIKESTFVEGQLPSRKIDAMDNFQKCFAILKLYQPGVDNSAVGTSKKSDMGEVKDWKAIRVDLVITPFEQYAYALLGWTGSKQFRRDLRRYAEEERGMILDNHALYDLKKRIFLKAGSEEEIFAHLGLDYVEPWERNA

SEQ ID NO: 2509 - DNA, 1182 bp, synthetic construct
  misc_feature 1..1182: note = Variant of terminal deoxynucleotidyl transferase
  source 1..1182: mol_type = other DNA
atgcatcaccaccatcatcatgggggttctggtcatccgccaagcaataccccggagggggaggtgccgagcgttatcgcccgtccggttagtcagtactcgtgccagcgcaagaccacgctgaataactacaacaaaaagttcaccgacgcgctggagatcatggccgagaactacaaatttaaagagaacctgatcgcgtgtctggaagccaagcgcgccgcgagtatttttaaatatctgccgttcgaggttaccagcatgaaagacatccaaggtctgccgtgcattaccgaccaagttcgtgacgtgatcgaggagatcatcgaagagggcgagagcagccgtgttaaagaagttctcaatgacgagcgctacaaggcctttaagcagttcaccagcgtgttcggtgtgggcgtgaaaaccgcggaaaagtggtaccgtatgggcctccgtacggttgaagaagcacgcgccagtaagagtctgaagctgagcaagatgcagaaggcgggctttctgtattacgaggatctggcgagcatggttagtaaagaagaagccgatgccgttacgctcatcgtgaagaacacggtgcgtacctttctgccggatgcgctggtgaccatcaccggcggtttccgccgtggcaaacctatgggccacgacgttgactttctgatcacgaacccgggccgcaaagaggatgacgagctgctccacaaagtggttgatctgctcaagaagcaaggtctgctgctgtacgaagacatcaaagagagcacgttcgtggaggggcaactgccaagtcataaaatcgacgccatggacaacttccagaagtgcttcgccattctcaagctgtaccagccgggcgtggataacagtgcggttgggacgagtaagaaaagtgacatgggtgaggttaaggattggaaagcgattcgtgtggatctggtgatcacgccattcgagcagtacgcctatgcgctgctcggttggacgggcagcaaagaatttcgtcgcgatctgaagcgctatgcggaggaagagcgcggcatgatcctcgacaaccatgccctctacgacctgaaaaagcgcatctttctgaaagcgggcagcgaagaagagattttcgcgcatctgggtctggattatgtggagccgtgggaacgcaacgcg

SEQ ID NO: 2510 - protein, 394 aa, synthetic construct
  REGION 1..394: note = Variant of terminal deoxynucleotidyl transferase
MHHHHHHGGSGHPPSNTPEGEVPSVIARPVSQYSCQRKTTLNNYNKKFTDALEIMAENYKFKENLIACLEAKRAASIFKYLPFEVTSMKDIQGLPCITDQVRDVIEEIIEEGESSRVKEVLNDERYKAFKQFTSVFGVGVKTAEKWYRMGLRTVEEARASKSLKLSKMQKAGFLYYEDLASMVSKEEADAVTLIVKNTVRTFLPDALVTITGGFRRGKPMGHDVDFLITNPGRKEDDELLHKVVDLLKKQGLLLYEDIKESTFVEGQLPSHKIDAMDNFQKCFAILKLYQPGVDNSAVGTSKKSDMGEVKDWKAIRVDLVITPFEQYAYALLGWTGSKEFRRDLKRYAEEERGMILDNHALYDLKKRIFLKAGSEEEIFAHLGLDYVEPWERNA

SEQ ID NO: 2511 - DNA, 1182 bp, synthetic construct
  misc_feature 1..1182: note = Variant of terminal deoxynucleotidyl transferase
  source 1..1182: mol_type = other DNA
atgcatcaccaccatcatcatgggggttctggtcatccgccaagcaataccccggagggggaggtgccgagcgttatcgcccgtccggttagtcagtacagctgccagcgcaagaccacgctgaataactacaacaaaaagttcaccgacgcgctggagatcatggccgagaactacaaatttaaagagaacctgatcgcgtgtctggaagccaagcgcgccgcgagtattctgaaatatctgccgttcgaggttaccagcatgaaagacatccaaggtctgccgtgcattaccgaccaagttcgtgacgtgatcgaggagatcatcgaagagggcgagagcagccgtgttaaagaagttctcaatgacgagcgctacaaggcctttaagcagttcaccagcgtgttcggtgtgggcgtgaaaaccgcggaaaagtggtaccgtatgggcctccgtacggttgaagaagcacgcgccagtaagagtctgaagctgagcaagatgcagaaggcgggctttctgtattacgaggatctggcgagcggcgttagtaaagaagaagccgatgccgttacgctcatcgtgaagaacacggtgcgtacctttctgccggatgcgctggtgaccatcaccggcggtttccgccgtggcaaacctatgggccacgacgttgactttctgatcacgaacccgggcggcaaagaggatgacgagctgctccacaaagtggttgatctgctcaagaagcaaggtctgctgctgtacgaagacatcaaagagagcacgttcgtggaggggcaactgccaagtcataaaatcgacgccatggacaacttccagaagtgcttcgccattctcaagctgtaccagccgggcgtggataacagtgcggttgggacgagtaagaaaagtgacatgggtgaggttaaggattggaaagcgattcgtgtggatctggtgatcacgccattcgagcagtacgcctatgcgctgctcggttggacgggcagcaaacaatttcgtcgcgatctgcgtcgctatgcggaggaagagcgcggcatgatcctcgacaaccatgccctctacgacctgaaaaagcgcatctttctgaaagcgggcagcgaagaagagattttcgcgcatctgggtctggattatgtggagccgtgggaacgcaacgcg

SEQ ID NO: 2512 - protein, 394 aa, synthetic construct
  REGION 1..394: note = Variant of terminal deoxynucleotidyl transferase
MHHHHHHGGSGHPPSNTPEGEVPSVIARPVSQYSCQRKTTLNNYNKKFTDALEIMAENYKFKENLIACLEAKRAASILKYLPFEVTSMKDIQGLPCITDQVRDVIEEIIEEGESSRVKEVLNDERYKAFKQFTSVFGVGVKTAEKWYRMGLRTVEEARASKSLKLSKMQKAGFLYYEDLASGVSKEEADAVTLIVKNTVRTFLPDALVTITGGFRRGKPMGHDVDFLITNPGGKEDDELLHKVVDLLKKQGLLLYEDIKESTFVEGQLPSHKIDAMDNFQKCFAILKLYQPGVDNSAVGTSKKSDMGEVKDWKAIRVDLVITPFEQYAYALLGWTGSKQFRRDLRRYAEEERGMILDNHALYDLKKRIFLKAGSEEEIFAHLGLDYVEPWERNA

SEQ ID NO: 2513 - DNA, 1182 bp, synthetic construct
  misc_feature 1..1182: note = Variant of terminal deoxynucleotidyl transferase
  source 1..1182: mol_type = other DNA
atgcatcaccaccatcatcatgggggttctggtcatccgccgagcaataccccggagggggaggtgccgagcgttatcgcccgtccggttagtcagtacgcgtgccagcgcaagaccacgctgaataactacaacaaaaagctgaccgacgcgctggagatcatggccgagaactacaaatttaaagagaacctgatcgcgtgtctggaagccaagcgcgccgcgagtattctgaaatatctgccgttcgaggttaccagcatgaaagacatccaaggtctgccgtgcattaccgaccaagttcgtgacgtgatcgaggagatcatcgaagagggcgagagcagccgtgttaaagaagttctcaatgacgagcgctacaaggcctttaagcagttcaccagcgtgttcggtgtgggcgtgaaaaccgcggaaaagtggtaccgtatgggcctccgtacggttgaagaagcaaaggccagtaagagtctgaagctgagcaagatgcagaaggcgggctttctgtattacgaggatctggcgagccgcgttagtaaagaagaagccgatgccgttacgctcatcgtgaagaacacggtgcgtacctttctgccggatgcgctggtgaccatcaccggcggtttccgccgtggcaaacctatgggccacgacgttgactttctgatcacgaatccgggcccgaaagaggatgacgagctgctccacaaagtggttgatctgctcaagaagcaaggtctgctgctgtacgaagacatcaaagagagcacgttcgtggaggggcaactgccaagtcataaaatcgacgccatggacaacttccagaagtgcttcgccattctcaagctgtaccagccgggcgtggataacagtgcggttgggacgagtaagaaaagtgacatggccgaggttaaggattggaaagcgattcgtgtggatctggtgatcacgccattcgagcagtacgcctatgcgctgctcggttggacgggcagcaaagaatttcgtcgcgatctgcgccgctatgcggaggaagagcgcggcatgatcctcgacaaccatgccctctacgacctgaaaaagcgcatctttctgaaagcgggcagcgaagaagagattttcgcgcatctgggtctggattatgtggagccgtgggaacgcaacgcg

SEQ ID NO: 2514 - protein, 394 aa, synthetic construct
  REGION 1..394: note = Variant of terminal deoxynucleotidyl transferase
MHHHHHHGGSGHPPSNTPEGEVPSVIARPVSQYACQRKTTLNNYNKKLTDALEIMAENYKFKENLIACLEAKRAASILKYLPFEVTSMKDIQGLPCITDQVRDVIEEIIEEGESSRVKEVLNDERYKAFKQFTSVFGVGVKTAEKWYRMGLRTVEEAKASKSLKLSKMQKAGFLYYEDLASRVSKEEADAVTLIVKNTVRTFLPDALVTITGGFRRGKPMGHDVDFLITNPGPKEDDELLHKVVDLLKKQGLLLYEDIKESTFVEGQLPSHKIDAMDNFQKCFAILKLYQPGVDNSAVGTSKKSDMAEVKDWKAIRVDLVITPFEQYAYALLGWTGSKEFRRDLRRYAEEERGMILDNHALYDLKKRIFLKAGSEEEIFAHLGLDYVEPWERNA

SEQ ID NO: 2515 - DNA, 1182 bp, synthetic construct
  misc_feature 1..1182: note = Variant of terminal deoxynucleotidyl transferase
  source 1..1182: mol_type = other DNA
atgcatcaccaccatcatcatgggggttctggtcatccgccgagcaataccccggagggggaggtgccgagcgttatcgcccgtccggttagtcagtacgcgtgccagcgcaagaccacgctgaataactacaacaaaaagtttaccgacgcgctggagatcatggccgagaactacaaatttaaagagaacctgatcgcgtgtctggaagccaagcgcgccgcgagtattctgaaatatctgccgttcgaggttaccagcatgaaagacatccaaggtctgccgtgcattaccgaccaagttcgtgacgtgatcgaggagatcatcgaagagggcgagagcagccgtgttaaagaagttctcaatgacgagcgctacaaggcctttaagcagttcaccagcgtgttcggtgtgggcgtgaaaaccgcggaaaagtggtttcgtatgggcctccgtacggttgaagaagcaaaggccagtaagagtctgaagctgagcaagatgcagaaggcgggctttctgtattacgaggatctggcgagccgcgttagtaaagaagaagccgatgccgttacgctcatcgtgaagaacacggtgcgtacctttctgccggatgcgctggtgaccatcaccggcggtttccgccgtggcaaacctgtgggccacgacgttgactttctgatcacgaatccgggcccgaaagaggatgacgagctgctccacaaagtggttgatctgctcaagaagcaaggtctgctgctgtacgaagacatcaaagagagcacgttcgtggaggggcaactgccaagtcgtaaaatcgacgccatggacaacttccagaagtgcttcgccattctcaagctgtaccagccgggcgtggataacagtgcggttgggacgagtaagaaaagtgacatgggtgaggttaaggattggaaagcgattcgtgtggatctggtgatcacgccattcgagcagtacgcctatgcgctgctcggttggacgggcagcaaagaatttcgtcgcgatctgcgccgctatgcggaggaagagcgcggcatgatcctcgacaaccatgccctctacgacctgaaaaagcgcatctttctgaaagcgggcagcgaagaagagattttcgcgcatctgggtctggattatgtggagccgtgggaacgcaacgcg

SEQ ID NO: 2516 - protein, 394 aa, synthetic construct
  REGION 1..394: note = Variant of terminal deoxynucleotidyl transferase
MHHHHHHGGSGHPPSNTPEGEVPSVIARPVSQYACQRKTTLNNYNKKFTDALEIMAENYKFKENLIACLEAKRAASILKYLPFEVTSMKDIQGLPCITDQVRDVIEEIIEEGESSRVKEVLNDERYKAFKQFTSVFGVGVKTAEKWFRMGLRTVEEAKASKSLKLSKMQKAGFLYYEDLASRVSKEEADAVTLIVKNTVRTFLPDALVTITGGFRRGKPVGHDVDFLITNPGPKEDDELLHKVVDLLKKQGLLLYEDIKESTFVEGQLPSRKIDAMDNFQKCFAILKLYQPGVDNSAVGTSKKSDMGEVKDWKAIRVDLVITPFEQYAYALLGWTGSKEFRRDLRRYAEEERGMILDNHALYDLKKRIFLKAGSEEEIFAHLGLDYVEPWERNA

SEQ ID NO: 2517 - DNA, 1182 bp, synthetic construct
  misc_feature 1..1182: note = Variant of terminal deoxynucleotidyl transferase
  source 1..1182: mol_type = other DNA
atgcatcaccaccatcatcatgggggttctggtcatccgccgagcaataccccggagggggaggtgccgagcgttatcgcccgtccggttagtcagtactcgtgccagcgcaagaccacgctgaataactacaacaaaaagttcaccgacgcgctggagatcatggccgagaactacaaatttaaagagaacctgatcgcgtgtctggaagccaagcgcgccgcgagtattctgaaatatctgccgttcgaggttaccagcatgaaagacatccaaggtctgccgtgcattaccgaccaagttcgtgacgtgatcgaggagatcatcgaagagggcgagagcagccgtgttaaagaagttctcaatgacgagcgctacaaggcctttaagcagttcaccagcgtgttcggtgtgggcgtgaaaaccgcggaaaagtggttccgtatgggcctccgtacggttgaagaagcaaaggccagtaagagtctgaagctgagcaagatgcagaaggcgggctttctgtattacgaggatctggcgagcatggttagtaaagaagaagccgatgccgttacgctcatcgtgaagaacacggtgcgtacctttctgccggatgcgctggtgaccatcaccggcggtttccgccgtggcaaacctgtgggccacgacgttgactttctgatcacgaatccgggcccgaaagaggatgacgagctgctccacaaagtggttgatctgctcaagaagcaaggtctgctgctgtacgaagacatcaaagagagcacgttcgtggaggggcaactgccaagtcgcaaaatcgacgccatggacaacttccagaagtgcttcgccattctcaagctgtaccagccgggcgtggataacagtgcggttgggacgagtaagaaaagtgacatggccgaggttaaggattggaaagcgattcgtgtggatctggtgatcacgccattcgagcagtacgcctatgcgctgctcggttggacgggcagcaaagaatttcgtcgcgatctgaagcgctatgcggaggaagagcgcggcatgatcctcgacaaccatgccctctacgacctgaaaaagcgcatctttctgaaagcgggcagcgaagaagagattttcgcgcatctgggtctggattatgtggagccgtgggaacgcaacgcg

SEQ ID NO: 2518 - protein, 394 aa, synthetic construct
  REGION 1..394: note = Variant of terminal deoxynucleotidyl transferase
MHHHHHHGGSGHPPSNTPEGEVPSVIARPVSQYSCQRKTTLNNYNKKFTDALEIMAENYKFKENLIACLEAKRAASILKYLPFEVTSMKDIQGLPCITDQVRDVIEEIIEEGESSRVKEVLNDERYKAFKQFTSVFGVGVKTAEKWFRMGLRTVEEAKASKSLKLSKMQKAGFLYYEDLASMVSKEEADAVTLIVKNTVRTFLPDALVTITGGFRRGKPVGHDVDFLITNPGPKEDDELLHKVVDLLKKQGLLLYEDIKESTFVEGQLPSRKIDAMDNFQKCFAILKLYQPGVDNSAVGTSKKSDMAEVKDWKAIRVDLVITPFEQYAYALLGWTGSKEFRRDLKRYAEEERGMILDNHALYDLKKRIFLKAGSEEEIFAHLGLDYVEPWERNA

SEQ ID NO: 2519 - DNA, 1182 bp, synthetic construct
  misc_feature 1..1182: note = Variant of terminal deoxynucleotidyl transferase
  source 1..1182: mol_type = other DNA
atgcatcaccaccatcatcatgggggttctggtcatccgccaagcaataccccggagggggaggtgccgagcgttatcgcccgtccggttagtcagtacagctgccagcgcaagaccacgctgaataactacaacaaaaagctgaccgacgcgctggagatcatggccgagaactacaaatttaaagagaacctgatcgcgtgtctggaagccaagcgcgccgcgagtatttttaaatatctgccgttcgaggttaccagcatgaaagacatccaaggtctgccgtgcattaccgaccaagttcgtgacgtgatcgaggagatcatcgaagagggcgagagcagccgtgttaaagaagttctcaatgacgagcgctacaaggcctttaagcagttcaccagcgtgttcggtgtgggcgtgaaaaccgcggaaaagtggtaccgtatgggcctccgtacggttgaagaagcacgcgccagtaagagtctgaagctgagcaagatgcagaaggcgggctttctgtattacgaggatctggcgagccgcgttagtaaagaagaagccgatgccgttacgctcatcgtgaagaacacggtgcgtacctttctgccggatgcgctggtgaccatcaccggcggtttccgccgtggcaaacctatgggccacgacgttgactttctgatcacgaacccgggcggcaaagaggatgacgagctgctccacaaagtggttgatctgctcaagacgcaaggtctgctgctgtacgaagacatcaaagagagcacgttcgtggaggggcaactgccaagtcgcaaaatcgacgccatggacaacttccagaagtgcttcgccattctcaagctgtaccagccgggcgtggataacagtgcggttgggacgagtaagaaaagtgacatggccgaggttaaggattggaaagcgattcgtgtggatctggtgatcacgccattcgagcagtacgcctatgcgctgctcggttggacgggcagcaaagaatttcgtcgcgatctgcgccgctatgcggaggaagagcgcggcatgatcctcgacaaccatgccctctacgacctgaaaaagcgcatctttctgaaagcgggcagcgaagaagagattttcgcgcatctgggtctggattatgtggagccgtgggaacgcaacgcg

SEQ ID NO: 2520 - protein, 394 aa, synthetic construct
  REGION 1..394: note = Variant of terminal deoxynucleotidyl transferase
MHHHHHHGGSGHPPSNTPEGEVPSVIARPVSQYSCQRKTTLNNYNKKLTDALEIMAENYKFKENLIACLEAKRAASIFKYLPFEVTSMKDIQGLPCITDQVRDVIEEIIEEGESSRVKEVLNDERYKAFKQFTSVFGVGVKTAEKWYRMGLRTVEEARASKSLKLSKMQKAGFLYYEDLASRVSKEEADAVTLIVKNTVRTFLPDALVTITGGFRRGKPMGHDVDFLITNPGGKEDDELLHKVVDLLKTQGLLLYEDIKESTFVEGQLPSRKIDAMDNFQKCFAILKLYQPGVDNSAVGTSKKSDMAEVKDWKAIRVDLVITPFEQYAYALLGWTGSKEFRRDLRRYAEEERGMILDNHALYDLKKRIFLKAGSEEEIFAHLGLDYVEPWERNA

SEQ ID NO: 2521 - DNA, 1182 bp, synthetic construct
  misc_feature 1..1182: note = Variant of terminal deoxynucleotidyl transferase
  source 1..1182: mol_type = other DNA
atgcatcaccaccatcatcatgggggttctggtcatccgccgagcaataccccggagggggaggtgccgagcgttatcgcccgtccggttagtcagtactcgtgccagcgcaagaccacgctgaataactacaacaaaaagctgaccgacgcgctggagatcatggccgagaactacaaatttaaagagaacctgatcgcgtgtctggaagccaagcgcgccgcgagtattctgaaatatctgccgttcgaggttaccagcatgaaagacatccaaggtctgccgtgcattaccgaccaagttcgtgacgtgatcgaggagatcatcgaagagggcgagagcagccgtgttaaagaagttctcaatgacgagcgctacaaggcctttaagcagttcaccagcgtgttcggtgtgggcgtgaaaaccgcggaaaagtggtaccgtatgggcctccgtacggttgaagaagcaaaggccagtaagagtctgaagctgagcaagatgcagaaggcgggctttctgtattacgaggatctggcgagccgcgttagtaaagaagaagccgatgccgttacgctcatcgtgaagaacacggtgcgtacctttctgccggatgcgctggtgaccatcaccggcggtttccgccgtggcaaacctatgggccacgacgttgactttctgatcacgaacccgggccgcaaagaggatgacgagctgctccacaaagtggttgatctgctcaagaagcaaggtctgctgctgtacgaagacatcaaagagagcacgttcgtggaggggcaactgccaagtcgtaaaatcgacgccatggacaacttccagaagtgcttcgccattctcaagctgtaccagccgggcgtggataacagtgcggttgggacgagtaagaaaagtgacatggctgaggttaaggattggaaagcgattcgtgtggatctggtgatcacgccattcgagcagtacgcctatgcgctgctcggttggacgggcagcaaagaatttcgtcgcgatctgcgccgctatgcggaggaagagcgcggcatgatcctcgacaaccatgccctctacgacctgaaaaagcgcatctttctgaaagcgggcagcgaagaagagattttcgcgcatctgggtctggattatgtggagccgtgggaacgcaacgcg

SEQ ID NO: 2522 - protein, 394 aa, synthetic construct
  REGION 1..394: note = Variant of terminal deoxynucleotidyl transferase
MHHHHHHGGSGHPPSNTPEGEVPSVIARPVSQYSCQRKTTLNNYNKKLTDALEIMAENYKFKENLIACLEAKRAASILKYLPFEVTSMKDIQGLPCITDQVRDVIEEIIEEGESSRVKEVLNDERYKAFKQFTSVFGVGVKTAEKWYRMGLRTVEEAKASKSLKLSKMQKAGFLYYEDLASRVSKEEADAVTLIVKNTVRTFLPDALVTITGGFRRGKPMGHDVDFLITNPGRKEDDELLHKVVDLLKKQGLLLYEDIKESTFVEGQLPSRKIDAMDNFQKCFAILKLYQPGVDNSAVGTSKKSDMAEVKDWKAIRVDLVITPFEQYAYALLGWTGSKEFRRDLRRYAEEERGMILDNHALYDLKKRIFLKAGSEEEIFAHLGLDYVEPWERNA

SEQ ID NO: 2523 - DNA, 1182 bp, synthetic construct
  misc_feature 1..1182: note = Variant of terminal deoxynucleotidyl transferase
  source 1..1182: mol_type = other DNA
atgcatcaccaccatcatcatgggggttctggtcatccgccaagcaataccccggagggggaggtgccgagcgttatcgcccgtccggttagtcagtactcgtgccagcgcaagaccacgctgaataactacaacaaaaagtttaccgacgcgctggagatcatggccgagaactacaaatttaaagagaacctgatcgcgtgtctggaagccaagcgcgccgcgagtattctgaaatatctgccgttcgaggttaccagcatgaaagacatccaaggtctgccgtgcattaccgaccaagttcgtgacgtgatcgaggagatcatcgaagagggcgagagcagccgtgttaaagaagttctcaatgacgagcgctacaaggcctttaagcagttcaccagcgtgttcggtgtgggcgtgaaaaccgcggaaaagtggtttcgtatgggcctccgtacggttgaagaagcacgcgccagtaagagtctgaagctgagcaagatgcagaaggcgggctttctgtattacgaggatctggcgagccgcgttagtaaagaagaagccgatgccgttacgctcatcgtgaagaacacggtgcgtacctttctgccggatgcgctggtgaccatcaccggcggtttccgccgtggcaaacctatgggccacgacgttgactttctgatcacgaacccgggccctaaagaggatgacgagctgctccacaaagtggttgatctgctcaagaagcaaggtctgctgctgtacgaagacatcaaagagagcacgttcgtggaggggcaactgccaagtcgtaaaatcgacgccatggacaacttccagaagtgcttcgccattctcaagctgtaccagccgggcgtggataacagtgcggttgggacgagtaagaaaagtgacatggctgaggttaaggattggaaagcggttcgtgtggatctggtgatcacgccattcgagcagtacgcctatgcgctgctcggttggacgggcagcaaacaatttcgtcgcgatctgcgccgctatgcggaggaagagcgcggcatgatcctcgacaaccatgccctctacgacctgaaaaagcgcatctttctgaaagcgggcagcgaagaagagattttcgcgcatctgggtctggattatgtggagccgtgggaacgcaacgcg

SEQ ID NO: 2524 - protein, 394 aa, synthetic construct
  REGION 1..394: note = Variant of terminal deoxynucleotidyl transferase
MHHHHHHGGSGHPPSNTPEGEVPSVIARPVSQYSCQRKTTLNNYNKKFTDALEIMAENYKFKENLIACLEAKRAASILKYLPFEVTSMKDIQGLPCITDQVRDVIEEIIEEGESSRVKEVLNDERYKAFKQFTSVFGVGVKTAEKWFRMGLRTVEEARASKSLKLSKMQKAGFLYYEDLASRVSKEEADAVTLIVKNTVRTFLPDALVTITGGFRRGKPMGHDVDFLITNPGPKEDDELLHKVVDLLKKQGLLLYEDIKESTFVEGQLPSRKIDAMDNFQKCFAILKLYQPGVDNSAVGTSKKSDMAEVKDWKAVRVDLVITPFEQYAYALLGWTGSKQFRRDLRRYAEEERGMILDNHALYDLKKRIFLKAGSEEEIFAHLGLDYVEPWERNA

SEQ ID NO: 2525 - DNA, 1182 bp, synthetic construct
  misc_feature 1..1182: note = Variant of terminal deoxynucleotidyl transferase
  source 1..1182: mol_type = other DNA
atgcatcaccaccatcatcatgggggttctggtcatccgccgagcaataccccggagggggaggtgccgagcgttatcgcccgtccggttagtcagtacgcgtgccagcgcaagaccacgctgaataactacaacaaaaagttcaccgacgcgctggagatcatggccgagaactacaaatttaaagagaacctgatcgcgtgtctggaagccaagcgcgccgcgagtatttttaaatatctgccgttcgaggttaccagcatgaaagacatccaaggtctgccgtgcattaccgaccaagttcgtgacgtgatcgaggagatcatcgaagagggcgagagcagccgtgttaaagaagttctcaatgacgagcgctacaaggcctttaagcagttcaccagcgtgttcggtgtgggcgtgaaaaccgcggaaaagtggtttcgtatgggcctccgtacggttgaagaagcaaaggccagtaagagtctgaagctgagcaagatgcagaaggcgggctttctgtattacgaggatctggcgagccgcgttagtaaagaagaagccgatgccgttacgctcatcgtgaagaacacggtgcgtacctttctgccggatgcgctggtgaccatcaccggcggtttccgccgtggcaaacctgtgggccacgacgttgactttctgatcacgaatccgggcccgaaagaggatgacgagctgctccacaaagtggttgatctgctcaagaagcaaggtctgctgctgtacgaagacatcaaagagagcacgttcgtggaggggcaactgccaagtcataaaatcgacgccatggacaacttccagaagtgcttcgccattctcaagctgtaccagccgggcgtggataacagtgcggttgggacgagtaagaaaagtgacatggccgaggttaaggattggaaagcgattcgtgtggatctggtgatcacgccattcgagcagtacgcctatgcgctgctcggttggacgggcagcaaagaatttcgtcgcgatctgcgccgctatgcggaggaagagcgcggcatgatcctcgacaaccatgccctctacgacctgaaaaagcgcatctttctgaaagcgggcagcgaagaagagattttcgcgcatctgggtctggattatgtggagccgtgggaacgcaacgcg

SEQ ID NO: 2526 - protein, 394 aa, synthetic construct
  REGION 1..394: note = Variant of terminal deoxynucleotidyl transferase
MHHHHHHGGSGHPPSNTPEGEVPSVIARPVSQYACQRKTTLNNYNKKFTDALEIMAENYKFKENLIACLEAKRAASIFKYLPFEVTSMKDIQGLPCITDQVRDVIEEIIEEGESSRVKEVLNDERYKAFKQFTSVFGVGVKTAEKWFRMGLRTVEEAKASKSLKLSKMQKAGFLYYEDLASRVSKEEADAVTLIVKNTVRTFLPDALVTITGGFRRGKPVGHDVDFLITNPGPKEDDELLHKVVDLLKKQGLLLYEDIKESTFVEGQLPSHKIDAMDNFQKCFAILKLYQPGVDNSAVGTSKKSDMAEVKDWKAIRVDLVITPFEQYAYALLGWTGSKEFRRDLRRYAEEERGMILDNHALYDLKKRIFLKAGSEEEIFAHLGLDYVEPWERNA

SEQ ID NO: 2527 - DNA, 1182 bp, synthetic construct
  misc_feature 1..1182: note = Variant of terminal deoxynucleotidyl transferase
  source 1..1182: mol_type = other DNA
atgcatcaccaccatcatcatgggggttctggtcatccgccgagcaataccccggagggggaggtgccgagcgttatcgcccgtccggttagtcagtacgcgtgccagcgcaagaccacgctgaataactacaacaaaaagtttaccgacgcgctggagatcatggccgagaactacaaatttaaagagaacctgatcgcgtgtctggaagccaagcgcgccgcgagtattctgaaatatctgccgttcgaggttaccagcatgaaagacatccaaggtctgccgtgcattaccgaccaagttcgtgacgtgatcgaggagatcatcgaagagggcgagagcagccgtgttaaagaagttctcaatgacgagcgctacaaggcctttaagcagttcaccagcgtgttcggtgtgggcgtgaaaaccgcggaaaagtggtaccgtatgggcctccgtacggttgaagaagcaaaggccagtaagagtctgaagctgagcaagatgcagaaggcgggctttctgtattacgaggatctggcgagccgcgttagtaaagaagaagccgatgccgttacgctcatcgtgaagaacacggtgcgtacctttctgccggatgcgctggtgaccatcaccggcggtttccgccgtggcaaacctgtgggccacgacgttgactttctgatcacgaacccgggccctaaagaggatgacgagctgctccacaaagtggttgatctgctcaagaagcaaggtctgctgctgtacgaagacatcaaagagagcacgttcgtggaggggcaactgccaagtcataaaatcgacgccatggacaacttccagaagtgcttcgccattctcaagctgtaccagccgggcgtggataacagtgcggttgggacgagtaagaaaagtgacatggccgaggttaaggattggaaagcgattcgtgtggatctggtgatcacgccattcgagcagtacgcctatgcgctgctcggttggacgggcagcaaagaatttcgtcgcgatctgcgccgctatgcggaggaagagcgcggcatgatcctcgacaaccatgccctctacgacctgaaaaagcgcatctttctgaaagcgggcagcgaagaagagattttcgcgcatctgggtctggattatgtggagccgtgggaacgcaacgcg

SEQ ID NO: 2528 - protein, 394 aa, synthetic construct
  REGION 1..394: note = Variant of terminal deoxynucleotidyl transferase
MHHHHHHGGSGHPPSNTPEGEVPSVIARPVSQYACQRKTTLNNYNKKFTDALEIMAENYKFKENLIACLEAKRAASILKYLPFEVTSMKDIQGLPCITDQVRDVIEEIIEEGESSRVKEVLNDERYKAFKQFTSVFGVGVKTAEKWYRMGLRTVEEAKASKSLKLSKMQKAGFLYYEDLASRVSKEEADAVTLIVKNTVRTFLPDALVTITGGFRRGKPVGHDVDFLITNPGPKEDDELLHKVVDLLKKQGLLLYEDIKESTFVEGQLPSHKIDAMDNFQKCFAILKLYQPGVDNSAVGTSKKSDMAEVKDWKAIRVDLVITPFEQYAYALLGWTGSKEFRRDLRRYAEEERGMILDNHALYDLKKRIFLKAGSEEEIFAHLGLDYVEPWERNA

SEQ ID NO: 2529 - DNA, 1182 bp, synthetic construct
  misc_feature 1..1182: note = Variant of terminal deoxynucleotidyl transferase
  source 1..1182: mol_type = other DNA
atgcatcaccaccatcatcatgggggttctggtcatccgccgagcaataccccggagggggaggtgccgagcgttatcgcccgtccggttagtcagtacagctgccagcgcaagaccacgctgaataactacaacaaaaagtttaccgacgcgctggagatcatggccgagaactacaaatttaaagagaacctgatcgcgtgtctggaagccaagcgcgccgcgagtatttttaaatatctgccgttcgaggttaccagcatgaaagacatccaaggtctgccgtgcattaccgaccaagttcgtgacgtgatcgaggagatcatcgaagagggcgagagcagccgtgttaaagaagttctcaatgacgagcgctacaaggcctttaagcagttcaccagcgtgttcggtgtgggcgtgaaaaccgcggaaaagtggttccgtatgggcctccgtacggttgaagaagcaaaggccagtaagagtctgaagctgagcaagatgcagaaggcgggctttctgtattacgaggatctggcgagccgcgttagtaaagaagaagccgatgccgttacgctcatcgtgaagaacacggtgcgtacctttctgccggatgcgctggtgaccatcaccggcggtttccgccgtggcaaacctatgggccacgacgttgactttctgatcacgaatccgggccctaaagaggatgacgagctgctccacaaagtggttgatctgctcaagaagcaaggtctgctgctgtacgaagacatcaaagagagcacgttcgtggaggggcaactgccaagtcgcaaaatcgacgccatggacaacttccagaagtgcttcgccattctcaagctgtaccagccgggcgtggataacagtgcggttgggacgagtaagaaaagtgacatggctgaggttaaggattggaaagcgattcgtgtggatctggtgatcacgccattcgagcagtacgcctatgcgctgctcggttggacgggcagcaaacaatttcgtcgcgatctgcgccgctatgcggaggaagagcgcggcatgatcctcgacaaccatgccctctacgacctgaaaaagcgcatctttctgaaagcgggcagcgaagaagagattttcgcgcatctgggtctggattatgtggagccgtgggaacgcaacgcg

SEQ ID NO: 2530 - protein, 394 aa, synthetic construct
  REGION 1..394: note = Variant of terminal deoxynucleotidyl transferase
MHHHHHHGGSGHPPSNTPEGEVPSVIARPVSQYSCQRKTTLNNYNKKFTDALEIMAENYKFKENLIACLEAKRAASIFKYLPFEVTSMKDIQGLPCITDQVRDVIEEIIEEGESSRVKEVLNDERYKAFKQFTSVFGVGVKTAEKWFRMGLRTVEEAKASKSLKLSKMQKAGFLYYEDLASRVSKEEADAVTLIVKNTVRTFLPDALVTITGGFRRGKPMGHDVDFLITNPGPKEDDELLHKVVDLLKKQGLLLYEDIKESTFVEGQLPSRKIDAMDNFQKCFAILKLYQPGVDNSAVGTSKKSDMAEVKDWKAIRVDLVITPFEQYAYALLGWTGSKQFRRDLRRYAEEERGMILDNHALYDLKKRIFLKAGSEEEIFAHLGLDYVEPWERNA

SEQ ID NO: 2531 - DNA, 1182 bp, synthetic construct
  misc_feature 1..1182: note = Variant of terminal deoxynucleotidyl transferase
  source 1..1182: mol_type = other DNA
atgcatcaccaccatcatcatgggggttctggtcatccgccgagcaataccccggagggggaggtgccgagcgttatcgcccgtccggttagtcagtacagctgccagcgcaagaccacgctgaataactacaacaaaaagtttaccgacgcgctggagatcatggccgagaactacaaatttaaagagaacctgatcgcgtgtctggaagccaagcgcgccgcgagtatttttaaatatctgccgttcgaggttaccagcatgaaagacatccaaggtctgccgtgcattaccgaccaagttcgtgacgtgatcgaggagatcatcgaagagggcgagagcagccgtgttaaagaagttctcaatgacgagcgctacaaggcctttaagcagttcaccagcgtgttcggtgtgggcgtgaaaaccgcggaaaagtggttccgtatgggcctccgtacggttgaagaagcacgcgccagtaagagtctgaagctgagcaagatgcagaaggcgggctttctgtattacgaggatctggcgagcatggttagtaaagaagaagccgatgccgttacgctcatcgtgaagaacacggtgcgtacctttctgccggatgcgctggtgaccatcaccggcggtttccgccgtggcaaacctatgggccacgacgttgactttctgatcacgaacccgggccctaaagaggatgacgagctgctccacaaagtggttgatctgctcaagaagcaaggtctgctgctgtacgaagacatcaaagagagcacgttcgtggaggggcaactgccaagtcgtaaaatcgacgccatggacaacttccagaagtgcttcgccattctcaagctgtaccagccgggcgtggataacagtgcggttgggacgagtaagaaaagtgacatgggtgaggttaaggattggaaagcggttcgtgtggatctggtgatcacgccattcgagcagtacgcctatgcgctgctcggttggacgggcagcaaagaatttcgtcgcgatctgaagcgctatgcggaggaagagcgcggcatgatcctcgacaaccatgccctctacgacctgaaaaagcgcatctttctgaaagcgggcagcgaagaagagattttcgcgcatctgggtctggattatgtggagccgtgggaacgcaacgcg

SEQ ID NO: 2532 - protein, 394 aa, synthetic construct
  REGION 1..394: note = Variant of terminal deoxynucleotidyl transferase
MHHHHHHGGSGHPPSNTPEGEVPSVIARPVSQYSCQRKTTLNNYNKKFTDALEIMAENYKFKENLIACLEAKRAASIFKYLPFEVTSMKDIQGLPCITDQVRDVIEEIIEEGESSRVKEVLNDERYKAFKQFTSVFGVGVKTAEKWFRMGLRTVEEARASKSLKLSKMQKAGFLYYEDLASMVSKEEADAVTLIVKNTVRTFLPDALVTITGGFRRGKPMGHDVDFLITNPGPKEDDELLHKVVDLLKKQGLLLYEDIKESTFVEGQLPSRKIDAMDNFQKCFAILKLYQPGVDNSAVGTSKKSDMGEVKDWKAVRVDLVITPFEQYAYALLGWTGSKEFRRDLKRYAEEERGMILDNHALYDLKKRIFLKAGSEEEIFAHLGLDYVEPWERNA

SEQ ID NO: 2533 - DNA, 1182 bp, synthetic construct
  misc_feature 1..1182: note = Variant of terminal deoxynucleotidyl transferase
  source 1..1182: mol_type = other DNA
atgcatcaccaccatcatcatgggggttctggtcatccgccgagcaataccccggagggggaggtgccgagcgttatcgcccgtccggttagtcagtactcgtgccagcgcaagaccacgctgaataactacaacaaaaagctgaccgacgcgctggagatcatggccgagaactacaaatttaaagagaacctgatcgcgtgtctggaagccaagcgcgccgcgagtattctgaaatatctgccgttcgaggttaccagcatgaaagacatccaaggtctgccgtgcattaccgaccaagttcgtgacgtgatcgaggagatcatcgaagagggcgagagcagccgtgttaaagaagttctcaatgacgagcgctacaaggcctttaagcagttcaccagcgtgttcggtgtgggcgtgaaaaccgcggaaaagtggttccgtatgggcctccgtacggttgaagaagcacgcgccagtaagagtctgaagctgagcaagatgcagaaggcgggctttctgtattacgaggatctggcgagcatggttagtaaagaagaagccgatgccgttacgctcatcgtgaagaacacggtgcgtacctttctgccggatgcgctggtgaccatcaccggcggtttccgccgtggcaaacctatgggccacgacgttgactttctgatcacgctgccgggccgcaaagaggatgacgagctgctccacaaagtggttgatctgctcaagacgcaaggtctgctgctgtacgaagacatcaaagagagcacgttcgtggaggggcaactgccaagtcgtaaaatcgacgccatggacaacttccagaagtgcttcgccattctcaagctgtaccagccgggcgtggataacagtgcggttgggacgagtaagaaaagtgacatggctgaggttaaggattggaaagcgattcgtgtggatctggtgatcacgccattcgagcagtacgcctatgcgctgctcggttggacgggcagcaaagaatttcgtcgcgatctgcgccgctatgcggaggaagagcgcggcatgatcctcgacaaccatgccctctacgacctgaaaaagcgcatctttctgaaagcgggcagcgaagaagagattttcgcgcatctgggtctggattatgtggagccgtgggaacgcaacgcg

SEQ ID NO: 2534 - protein, 394 aa, synthetic construct
  REGION 1..394: note = Variant of terminal deoxynucleotidyl transferase
MHHHHHHGGSGHPPSNTPEGEVPSVIARPVSQYSCQRKTTLNNYNKKLTDALEIMAENYKFKENLIACLEAKRAASILKYLPFEVTSMKDIQGLPCITDQVRDVIEEIIEEGESSRVKEVLNDERYKAFKQFTSVFGVGVKTAEKWFRMGLRTVEEARASKSLKLSKMQKAGFLYYEDLASMVSKEEADAVTLIVKNTVRTFLPDALVTITGGFRRGKPMGHDVDFLITLPGRKEDDELLHKVVDLLKTQGLLLYEDIKESTFVEGQLPSRKIDAMDNFQKCFAILKLYQPGVDNSAVGTSKKSDMAEVKDWKAIRVDLVITPFEQYAYALLGWTGSKEFRRDLRRYAEEERGMILDNHALYDLKKRIFLKAGSEEEIFAHLGLDYVEPWERNA

SEQ ID NO: 2535 - DNA, 1182 bp, synthetic construct
  misc_feature 1..1182: note = Variant of terminal deoxynucleotidyl transferase
  source 1..1182: mol_type = other DNA
atgcatcaccaccatcatcatgggggttctggtcatccgccgagcaataccccggagggggaggtgccgagcgttatcgcccgtccggttagtcagtacagctgccagcgcaagaccacgctgaataactacaacaaaaagttcaccgacgcgctggagatcatggccgagaactacaaatttaaagagaacctgatcgcgtgtctggaagccaagcgcgccgcgagtatttttaaatatctgccgttcgaggttaccagcatgaaagacatccaaggtctgccgtgcattaccgaccaagttcgtgacgtgatcgaggagatcatcgaagagggcgagagcagccgtgttaaagaagttctcaatgacgagcgctacaaggcctttaagcagttcaccagcgtgttcggtgtgggcgtgaaaaccgcggaaaagtggtaccgtatgggcctccgtacggttgaagaagcaaaggccagtaagagtctgaagctgagcaagatgcagaaggcgggctttctgtattacgaggatctggcgagccgcgttagtaaagaagaagccgatgccgttacgctcatcgtgaagaacacggtgcgtacctttctgccggatgcgctggtgaccatcaccggcggtttccgccgtggcaaacctatgggccacgacgttgactttctgatcacgctgccgggccctaaagaggatgacgagctgctccacaaagtggttgatctgctcaagaagcaaggtctgctgctgtacgaagacatcaaagagagcacgttcgtggaggggcaactgccaagtcgtaaaatcgacgccatggacaacttccagaagtgcttcgccattctcaagctgtaccagccgggcgtggataacagtgcggttgggacgagtaagaaaagtgacatgggtgaggttaaggattggaaagcgattcgtgtggatctggtgatcacgccattcgagcagtacgcctatgcgctgctcggttggacgggcagcaaagaatttcgtcgcgatctgcgccgctatgcggaggaagagcgcggcatgatcctcgacaaccatgccctctacgacctgaaaaagcgcatctttctgaaagcgggcagcgaagaagagattttcgcgcatctgggtctggattatgtggagccgtgggaacgcaacgcg

SEQ ID NO: 2536 - protein, 394 aa, synthetic construct
  REGION 1..394: note = Variant of terminal deoxynucleotidyl transferase
MHHHHHHGGSGHPPSNTPEGEVPSVIARPVSQYSCQRKTTLNNYNKKFTDALEIMAENYKFKENLIACLEAKRAASIFKYLPFEVTSMKDIQGLPCITDQVRDVIEEIIEEGESSRVKEVLNDERYKAFKQFTSVFGVGVKTAEKWYRMGLRTVEEAKASKSLKLSKMQKAGFLYYEDLASRVSKEEADAVTLIVKNTVRTFLPDALVTITGGFRRGKPMGHDVDFLITLPGPKEDDELLHKVVDLLKKQGLLLYEDIKESTFVEGQLPSRKIDAMDNFQKCFAILKLYQPGVDNSAVGTSKKSDMGEVKDWKAIRVDLVITPFEQYAYALLGWTGSKEFRRDLRRYAEEERGMILDNHALYDLKKRIFLKAGSEEEIFAHLGLDYVEPWERNA

SEQ ID NO: 2537 - DNA, 1182 bp, synthetic construct
  misc_feature 1..1182: note = Variant of terminal deoxynucleotidyl transferase
  source 1..1182: mol_type = other DNA
atgcatcaccaccatcatcatgggggttctggtcatccgccgagcaataccccggagggggaggtgccgagcgttatcgcccgtccggttagtcagtacgcgtgccagcgcaagaccacgctgaataactacaacaaaaagttcaccgacgcgctggagatcatggccgagaactacaaatttaaagagaacctgatcgcgtgtctggaagccaagcgcgccgcgagtattctgaaatatctgccgttcgaggttaccagcatgaaagacatccaaggtctgccgtgcattaccgaccaagttcgtgacgtgatcgaggagatcatcgaagagggcgagagcagccgtgttaaagaagttctcaatgacgagcgctacaaggcctttaagcagttcaccagcgtgttcggtgtgggcgtgaaaaccgcggaaaagtggtaccgtatgggcctccgtacggttgaagaagcaaaggccagtaagagtctgaagctgagcaagatgcagaaggcgggctttctgtattacgaggatctggcgagccgcgttagtaaagaagaagccgatgccgttacgctcatcgtgaagaacacggtgcgtacctttctgccggatgcgctggtgaccatcaccggcggtttccgccgtggcaaacctatgggccacgacgttgactttctgatcacgaatccgggccctaaagaggatgacgagctgctccacaaagtggttgatctgctcaagaagcaaggtctgctgctgtacgaagacatcaaagagagcacgttcgtggaggggcaactgccaagtcgcaaaatcgacgccatggacaacttccagaagtgcttcgccattctcaagctgtaccagccgggcgtggataacagtgcggttgggacgagtaagaaaagtgacatggccgaggttaaggattggaaagcgattcgtgtggatctggtgatcacgccattcgagcagtacgcctatgcgctgctcggttggacgggcagcaaagaatttcgtcgcgatctgcgccgctatgcggaggaagagcgcggcatgatcctcgacaaccatgccctctacgacctgaaaaagcgcatctttctgaaagcgggcagcgaagaagagattttcgcgcatctgggtctggattatgtggagccgtgggaacgcaacgcg

SEQ ID NO: 2538 - protein, 394 aa, synthetic construct
  REGION 1..394: note = Variant of terminal deoxynucleotidyl transferase
MHHHHHHGGSGHPPSNTPEGEVPSVIARPVSQYACQRKTTLNNYNKKFTDALEIMAENYKFKENLIACLEAKRAASILKYLPFEVTSMKDIQGLPCITDQVRDVIEEIIEEGESSRVKEVLNDERYKAFKQFTSVFGVGVKTAEKWYRMGLRTVEEAKASKSLKLSKMQKAGFLYYEDLASRVSKEEADAVTLIVKNTVRTFLPDALVTITGGFRRGKPMGHDVDFLITNPGPKEDDELLHKVVDLLKKQGLLLYEDIKESTFVEGQLPSRKIDAMDNFQKCFAILKLYQPGVDNSAVGTSKKSDMAEVKDWKAIRVDLVITPFEQYAYALLGWTGSKEFRRDLRRYAEEERGMILDNHALYDLKKRIFLKAGSEEEIFAHLGLDYVEPWERNA

SEQ ID NO: 2539 - DNA, 1182 bp, synthetic construct
  misc_feature 1..1182: note = Variant of terminal deoxynucleotidyl transferase
  source 1..1182: mol_type = other DNA
atgcatcaccaccatcatcatgggggttctggtcatccgccgagcaataccccggagggggaggtgccgagcgttatcgcccgtccggttagtcagtactcgtgccagcgcaagaccacgctgaataactacaacaaaaagtttaccgacgcgctggagatcatggccgagaactacaaatttaaagagaacctgatcgcgtgtctggaagccaagcgcgccgcgagtatttttaaatatctgccgttcgaggttaccagcatgaaagacatccaaggtctgccgtgcattaccgaccaagttcgtgacgtgatcgaggagatcatcgaagagggcgagagcagccgtgttaaagaagttctcaatgacgagcgctacaaggcctttaagcagttcaccagcgtgttcggtgtgggcgtgaaaaccgcggaaaagtggttccgtatgggcctccgtacggttgaagaagcacgcgccagtaagagtctgaagctgagcaagatgcagaaggcgggctttctgtattacgaggatctggcgagcatggttagtaaagaagaagccgatgccgttacgctcatcgtgaagaacacggtgcgtacctttctgccggatgcgctggtgaccatcaccggcggtttccgccgtggcaaacctatgggccacgacgttgactttctgatcacgaacccgggccgcaaagaggatgacgagctgctccacaaagtggttgatctgctcaagaagcaaggtctgctgctgtacgaagacatcaaagagagcacgttcgtggaggggcaactgccaagtcataaaatcgacgccatggacaacttccagaagtgcttcgccattctcaagctgtaccagccgggcgtggataacagtgcggttgggacgagtaagaaaagtgacatggctgaggttaaggattggaaagcggttcgtgtggatctggtgatcacgccattcgagcagtacgcctatgcgctgctcggttggacgggcagcaaagaatttcgtcgcgatctgcgccgctatgcggaggaagagcgcggcatgatcctcgacaaccatgccctctacgacctgaaaaagcgcatctttctgaaagcgggcagcgaagaagagattttcgcgcatctgggtctggattatgtggagccgtgggaacgcaacgcg

SEQ ID NO: 2540 - protein, 394 aa, synthetic construct
  REGION 1..394: note = Variant of terminal deoxynucleotidyl transferase
MHHHHHHGGSGHPPSNTPEGEVPSVIARPVSQYSCQRKTTLNNYNKKFTDALEIMAENYKFKENLIACLEAKRAASIFKYLPFEVTSMKDIQGLPCITDQVRDVIEEIIEEGESSRVKEVLNDERYKAFKQFTSVFGVGVKTAEKWFRMGLRTVEEARASKSLKLSKMQKAGFLYYEDLASMVSKEEADAVTLIVKNTVRTFLPDALVTITGGFRRGKPMGHDVDFLITNPGRKEDDELLHKVVDLLKKQGLLLYEDIKESTFVEGQLPSHKIDAMDNFQKCFAILKLYQPGVDNSAVGTSKKSDMAEVKDWKAVRVDLVITPFEQYAYALLGWTGSKEFRRDLRRYAEEERGMILDNHALYDLKKRIFLKAGSEEEIFAHLGLDYVEPWERNA

SEQ ID NO: 2541 - DNA, 1182 bp, synthetic construct
  misc_feature 1..1182: note = Variant of terminal deoxynucleotidyl transferase
  source 1..1182: mol_type = other DNA
atgcatcaccaccatcatcatgggggttctggtcatccgccgagcaataccccggagggggaggtgccgagcgttatcgcccgtccggttagtcagtacgcgtgccagcgcaagaccacgctgaataactacaacaaaaagtttaccgacgcgctggagatcatggccgagaactacaaatttaaagagaacctgatcgcgtgtctggaagccaagcgcgccgcgagtatttttaaatatctgccgttcgaggttaccagcatgaaagacatccaaggtctgccgtgcattaccgaccaagttcgtgacgtgatcgaggagatcatcgaagagggcgagagcagccgtgttaaagaagttctcaatgacgagcgctacaaggcctttaagcagttcaccagcgtgttcggtgtgggcgtgaaaaccgcggaaaagtggtaccgtatgggcctccgtacggttgaagaagcaaaggccagtaagagtctgaagctgagcaagatgcagaaggcgggctttctgtattacgaggatctggcgagcggcgttagtaaagaagaagccgatgccgttacgctcatcgtgaagaacacggtgcgtacctttctgccggatgcgctggtgaccatcaccggcggtttccgccgtggcaaacctatgggccacgacgttgactttctgatcacgaacccgggccgcaaagaggatgacgagctgctccacaaagtggttgatctgctcaagacgcaaggtctgctgctgtacgaagacatcaaagagagcacgttcgtggaggggcaactgccaagtcgtaaaatcgacgccatggacaacttccagaagtgcttcgccattctcaagctgtaccagccgggcgtggataacagtgcggttgggacgagtaagaaaagtgacatggctgaggttaaggattggaaagcggttcgtgtggatctggtgatcacgccattcgagcagtacgcctatgcgctgctcggttggacgggcagcaaagaatttcgtcgcgatctgcgccgctatgcggaggaagagcgcggcatgatcctcgacaaccatgccctctacgacctgaaaaagcgcatctttctgaaagcgggcagcgaagaagagattttcgcgcatctgggtctggattatgtggagccgtgggaacgcaacgcg

SEQ ID NO: 2542 - protein, 394 aa, synthetic construct
  REGION 1..394: note = Variant of terminal deoxynucleotidyl transferase
MHHHHHHGGSGHPPSNTPEGEVPSVIARPVSQYACQRKTTLNNYNKKFTDALEIMAENYKFKENLIACLEAKRAASIFKYLPFEVTSMKDIQGLPCITDQVRDVIEEIIEEGESSRVKEVLNDERYKAFKQFTSVFGVGVKTAEKWYRMGLRTVEEAKASKSLKLSKMQKAGFLYYEDLASGVSKEEADAVTLIVKNTVRTFLPDALVTITGGFRRGKPMGHDVDFLITNPGRKEDDELLHKVVDLLKTQGLLLYEDIKESTFVEGQLPSRKIDAMDNFQKCFAILKLYQPGVDNSAVGTSKKSDMAEVKDWKAVRVDLVITPFEQYAYALLGWTGSKEFRRDLRRYAEEERGMILDNHALYDLKKRIFLKAGSEEEIFAHLGLDYVEPWERNA

SEQ ID NO: 2543 - DNA, 1182 bp, synthetic construct
  misc_feature 1..1182: note = Variant of terminal deoxynucleotidyl transferase
  source 1..1182: mol_type = other DNA
atgcatcaccaccatcatcatgggggttctggtcatccgccgagcaataccccggagggggaggtgccgagcgttatcgcccgtccggttagtcagtacgcgtgccagcgcaagaccacgctgaataactacaacaaaaagctgaccgacgcgctggagatcatggccgagaactacaaatttaaagagaacctgatcgcgtgtctggaagccaagcgcgccgcgagtattctgaaatatctgccgttcgaggttaccagcatgaaagacatccaaggtctgccgtgcattaccgaccaagttcgtgacgtgatcgaggagatcatcgaagagggcgagagcagccgtgttaaagaagttctcaatgacgagcgctacaaggcctttaagcagttcaccagcgtgttcggtgtgggcgtgaaaaccgcggaaaagtggtaccgtatgggcctccgtacggttgaagaagcaaaggccagtaagagtctgaagctgagcaagatgcagaaggcgggctttctgtattacgaggatctggcgagccgcgttagtaaagaagaagccgatgccgttacgctcatcgtgaagaacacggtgcgtacctttctgccggatgcgctggtgaccatcaccggcggtttccgccgtggcaaacctatgggccacgacgttgactttctgatcacgaatccgggcccgaaagaggatgacgagctgctccacaaagtggttgatctgctcaagaagcaaggtctgctgctgtacgaagacatcaaagagagcacgttcgtggaggggcaactgccaagtcgcaaaatcgacgccatggacaacttccagaagtgcttcgccattctcaagctgtaccagccgggcgtggataacagtgcggttgggacgagtaagaaaagtgacatggctgaggttaaggattggaaagcgattcgtgtggatctggtgatcacgccattcgagcagtacgcctatgcgctgctcggttggacgggcagcaaagaatttcgtcgcgatctgcgccgctatgcggaggaagagcgcggcatgatcctcgacaaccatgccctctacgacctgaaaaagcgcatctttctgaaagcgggcagcgaagaagagattttcgcgcatctgggtctggattatgtggagccgtgggaacgcaacgcg

SEQ ID NO: 2544 - protein, 394 aa, synthetic construct
  REGION 1..394: note = Variant of terminal deoxynucleotidyl transferase
MHHHHHHGGSGHPPSNTPEGEVPSVIARPVSQYACQRKTTLNNYNKKLTDALEIMAENYKFKENLIACLEAKRAASILKYLPFEVTSMKDIQGLPCITDQVRDVIEEIIEEGESSRVKEVLNDERYKAFKQFTSVFGVGVKTAEKWYRMGLRTVEEAKASKSLKLSKMQKAGFLYYEDLASRVSKEEADAVTLIVKNTVRTFLPDALVTITGGFRRGKPMGHDVDFLITNPGPKEDDELLHKVVDLLKKQGLLLYEDIKESTFVEGQLPSRKIDAMDNFQKCFAILKLYQPGVDNSAVGTSKKSDMAEVKDWKAIRVDLVITPFEQYAYALLGWTGSKEFRRDLRRYAEEERGMILDNHALYDLKKRIFLKAGSEEEIFAHLGLDYVEPWERNA

SEQ ID NO: 2545 - DNA, 1182 bp, synthetic construct
  misc_feature 1..1182: note = Variant of terminal deoxynucleotidyl transferase
  source 1..1182: mol_type = other DNA
atgcatcaccaccatcatcatgggggttctggtcatccgccgagcaataccccggagggggaggtgccgagcgttatcgcccgtccggttagtcagtactcgtgccagcgcaagaccacgctgaataactacaacaaaaagttcaccgacgcgctggagatcatggccgagaactacaaatttaaagagaacctgatcgcgtgtctggaagccaagcgcgccgcgagtattctgaaatatctgccgttcgaggttaccagcatgaaagacatccaaggtctgccgtgcattaccgaccaagttcgtgacgtgatcgaggagatcatcgaagagggcgagagcagccgtgttaaagaagttctcaatgacgagcgctacaaggcctttaagcagttcaccagcgtgttcggtgtgggcgtgaaaaccgcggaaaagtggtaccgtatgggcctccgtacggttgaagaagcaaaggccagtaagagtctgaagctgagcaagatgcagaaggcgggctttctgtattacgaggatctggcgagccgcgttagtaaagaagaagccgatgccgttacgctcatcgtgaagaacacggtgcgtacctttctgccggatgcgctggtgaccatcaccggcggtttccgccgtggcaaacctatgggccacgacgttgactttctgatcacgaatccgggcccgaaagaggatgacgagctgctccacaaagtggttgatctgctcaagacgcaaggtctgctgctgtacgaagacatcaaagagagcacgttcgtggaggggcaactgccaagtcgcaaaatcgacgccatggacaacttccagaagtgcttcgccattctcaagctgtaccagccgggcgtggataacagtgcggttgggacgagtaagaaaagtgacatggccgaggttaaggattggaaagcgattcgtgtggatctggtgatcacgccattcgagcagtacgcctatgcgctgctcggttggacgggcagcaaagaatttcgtcgcgatctgcgccgctatgcggaggaagagcgcggcatgatcctcgacaaccatgccctctacgacctgaaaaagcgcatctttctgaaagcgggcagcgaagaagagattttcgcgcatctgggtctggattatgtggagccgtgggaacgcaacgcg

SEQ ID NO: 2546 - protein, 394 aa, synthetic construct
  REGION 1..394: note = Variant of terminal deoxynucleotidyl transferase
MHHHHHHGGSGHPPSNTPEGEVPSVIARPVSQYSCQRKTTLNNYNKKFTDALEIMAENYKFKENLIACLEAKRAASILKYLPFEVTSMKDIQGLPCITDQVRDVIEEIIEEGESSRVKEVLNDERYKAFKQFTSVFGVGVKTAEKWYRMGLRTVEEAKASKSLKLSKMQKAGFLYYEDLASRVSKEEADAVTLIVKNTVRTFLPDALVTITGGFRRGKPMGHDVDFLITNPGPKEDDELLHKVVDLLKTQGLLLYEDIKESTFVEGQLPSRKIDAMDNFQKCFAILKLYQPGVDNSAVGTSKKSDMAEVKDWKAIRVDLVITPFEQYAYALLGWTGSKEFRRDLRRYAEEERGMILDNHALYDLKKRIFLKAGSEEEIFAHLGLDYVEPWERNA

SEQ ID NO: 2547 - DNA, 1182 bp, synthetic construct
  misc_feature 1..1182: note = Variant of terminal deoxynucleotidyl transferase
  source 1..1182: mol_type = other DNA
atgcatcaccaccatcatcatgggggttctggtcatccgccgagcaataccccggagggggaggtgccgagcgttatcgcccgtccggttagtcagtacagctgccagcgcaagaccacgctgaataactacaacaaaaagtttaccgacgcgctggagatcatggccgagaactacaaatttaaagagaacctgatcgcgtgtctggaagccaagcgcgccgcgagtattctgaaatatctgccgttcgaggttaccagcatgaaagacatccaaggtctgccgtgcattaccgaccaagttcgtgacgtgatcgaggagatcatcgaagagggcgagagcagccgtgttaaagaagttctcaatgacgagcgctacaaggcctttaagcagttcaccagcgtgttcggtgtgggcgtgaaaaccgcggaaaagtggtttcgtatgggcctccgtacggttgaagaagcaaaggccagtaagagtctgaagctgagcaagatgcagaaggcgggctttctgtattacgaggatctggcgagccgcgttagtaaagaagaagccgatgccgttacgctcatcgtgaagaacacggtgcgtacctttctgccggatgcgctggtgaccatcaccggcggtttccgccgtggcaaacctatgggccacgacgttgactttctgatcacgaatccgggcccgaaagaggatgacgagctgctccacaaagtggttgatctgctcaagaagcaaggtctgctgctgtacgaagacatcaaagagagcacgttcgtggaggggcaactgccaagtcataaaatcgacgccatggacaacttccagaagtgcttcgccattctcaagctgtaccagccgggcgtggataacagtgcggttgggacgagtaagaaaagtgacatggccgaggttaaggattggaaagcgattcgtgtggatctggtgatcacgccattcgagcagtacgcctatgcgctgctcggttggacgggcagcaaacaatttcgtcgcgatctgcgccgctatgcggaggaagagcgcggcatgatcctcgacaaccatgccctctacgacctgaaaaagcgcatctttctgaaagcgggcagcgaagaagagattttcgcgcatctgggtctggattatgtggagccgtgggaacgcaacgcg

SEQ ID NO: 2548 - protein, 394 aa, synthetic construct
  REGION 1..394: note = Variant of terminal deoxynucleotidyl transferase
MHHHHHHGGSGHPPSNTPEGEVPSVIARPVSQYSCQRKTTLNNYNKKFTDALEIMAENYKFKENLIACLEAKRAASILKYLPFEVTSMKDIQGLPCITDQVRDVIEEIIEEGESSRVKEVLNDERYKAFKQFTSVFGVGVKTAEKWFRMGLRTVEEAKASKSLKLSKMQKAGFLYYEDLASRVSKEEADAVTLIVKNTVRTFLPDALVTITGGFRRGKPMGHDVDFLITNPGPKEDDELLHKVVDLLKKQGLLLYEDIKESTFVEGQLPSHKIDAMDNFQKCFAILKLYQPGVDNSAVGTSKKSDMAEVKDWKAIRVDLVITPFEQYAYALLGWTGSKQFRRDLRRYAEEERGMILDNHALYDLKKRIFLKAGSEEEIFAHLGLDYVEPWERNA

SEQ ID NO: 2549 - DNA, 1182 bp, synthetic construct
  misc_feature 1..1182: note = Variant of terminal deoxynucleotidyl transferase
  source 1..1182: mol_type = other DNA
atgcatcaccaccatcatcatgggggttctggtcatccgccgagcaataccccggagggggaggtgccgagcgttatcgcccgtccggttagtcagtactcgtgccagcgcaagaccacgctgaataactacaacaaaaagttcaccgacgcgctggagatcatggccgagaactacaaatttaaagagaacctgatcgcgtgtctggaagccaagcgcgccgcgagtatttttaaatatctgccgttcgaggttaccagcatgaaagacatccaaggtctgccgtgcattaccgaccaagttcgtgacgtgatcgaggagatcatcgaagagggcgagagcagccgtgttaaagaagttctcaatgacgagcgctacaaggcctttaagcagttcaccagcgtgttcggtgtgggcgtgaaaaccgcggaaaagtggtaccgtatgggcctccgtacggttgaagaagcacgcgccagtaagagtctgaagctgagcaagatgcagaaggcgggctttctgtattacgaggatctggcgagcggcgttagtaaagaagaagccgatgccgttacgctcatcgtgaagaacacggtgcgtacctttctgccggatgcgctggtgaccatcaccggcggtttccgccgtggcaaacctatgggccacgacgttgactttctgatcacgctgccgggccctaaagaggatgacgagctgctccacaaagtggttgatctgctcaagacgcaaggtctgctgctgtacgaagacatcaaagagagcacgttcgtggaggggcaactgccaagtcgtaaaatcgacgccatggacaacttccagaagtgcttcgccattctcaagctgtaccagccgggcgtggataacagtgcggttgggacgagtaagaaaagtgacatggctgaggttaaggattggaaagcgattcgtgtggatctggtgatcacgccattcgagcagtacgcctatgcgctgctcggttggacgggcagcaaagaatttcgtcgcgatctgcgccgctatgcggaggaagagcgcggcatgatcctcgacaaccatgccctctacgacctgaaaaagcgcatctttctgaaagcgggcagcgaagaagagattttcgcgcatctgggtctggattatgtggagccgtgggaacgcaacgcg

SEQ ID NO: 2550 - protein, 394 aa, synthetic construct
  REGION 1..394: note = Variant of terminal deoxynucleotidyl transferase
MHHHHHHGGSGHPPSNTPEGEVPSVIARPVSQYSCQRKTTLNNYNKKFTDALEIMAENYKFKENLIACLEAKRAASIFKYLPFEVTSMKDIQGLPCITDQVRDVIEEIIEEGESSRVKEVLNDERYKAFKQFTSVFGVGVKTAEKWYRMGLRTVEEARASKSLKLSKMQKAGFLYYEDLASGVSKEEADAVTLIVKNTVRTFLPDALVTITGGFRRGKPMGHDVDFLITLPGPKEDDELLHKVVDLLKTQGLLLYEDIKESTFVEGQLPSRKIDAMDNFQKCFAILKLYQPGVDNSAVGTSKKSDMAEVKDWKAIRVDLVITPFEQYAYALLGWTGSKEFRRDLRRYAEEERGMILDNHALYDLKKRIFLKAGSEEEIFAHLGLDYVEPWERNA

SEQ ID NO: 2551 - DNA, 1182 bp, synthetic construct
  misc_feature 1..1182: note = Variant of terminal deoxynucleotidyl transferase
  source 1..1182: mol_type = other DNA
atgcatcaccaccatcatcatgggggttctggtcatccgccgagcaataccccggagggggaggtgccgagcgttatcgcccgtccggttagtcagtacagctgccagcgcaagaccacgctgaataactacaacaaaaagctgaccgacgcgctggagatcatggccgagaactacaaatttaaagagaacctgatcgcgtgtctggaagccaagcgcgccgcgagtatttttaaatatctgccgttcgaggttaccagcatgaaagacatccaaggtctgccgtgcattaccgaccaagttcgtgacgtgatcgaggagatcatcgaagagggcgagagcagccgtgttaaagaagttctcaatgacgagcgctacaaggcctttaagcagttcaccagcgtgttcggtgtgggcgtgaaaaccgcggaaaagtggtaccgtatgggcctccgtacggttgaagaagcaaaggccagtaagagtctgaagctgagcaagatgcagaaggcgggctttctgtattacgaggatctggcgagcggcgttagtaaagaagaagccgatgccgttacgctcatcgtgaagaacacggtgcgtacctttctgccggatgcgctggtgaccatcaccggcggtttccgccgtggcaaacctatgggccacgacgttgactttctgatcacgctgccgggcggcaaagaggatgacgagctgctccacaaagtggttgatctgctcaagacgcaaggtctgctgctgtacgaagacatcaaagagagcacgttcgtggaggggcaactgccaagtcgtaaaatcgacgccatggacaacttccagaagtgcttcgccattctcaagctgtaccagccgggcgtggataacagtgcggttgggacgagtaagaaaagtgacatggccgaggttaaggattggaaagcgattcgtgtggatctggtgatcacgccattcgagcagtacgcctatgcgctgctcggttggacgggcagcaaagaatttcgtcgcgatctgcgccgctatgcggaggaagagcgcggcatgatcctcgacaaccatgccctctacgacctgaaaaagcgcatctttctgaaagcgggcagcgaagaagagattttcgcgcatctgggtctggattatgtggagccgtgggaacgcaacgcg

SEQ ID NO: 2552 - protein, 394 aa, synthetic construct
  REGION 1..394: note = Variant of terminal deoxynucleotidyl transferase
MHHHHHHGGSGHPPSNTPEGEVPSVIARPVSQYSCQRKTTLNNYNKKLTDALEIMAENYKFKENLIACLEAKRAASIFKYLPFEVTSMKDIQGLPCITDQVRDVIEEIIEEGESSRVKEVLNDERYKAFKQFTSVFGVGVKTAEKWYRMGLRTVEEAKASKSLKLSKMQKAGFLYYEDLASGVSKEEADAVTLIVKNTVRTFLPDALVTITGGFRRGKPMGHDVDFLITLPGGKEDDELLHKVVDLLKTQGLLLYEDIKESTFVEGQLPSRKIDAMDNFQKCFAILKLYQPGVDNSAVGTSKKSDMAEVKDWKAIRVDLVITPFEQYAYALLGWTGSKEFRRDLRRYAEEERGMILDNHALYDLKKRIFLKAGSEEEIFAHLGLDYVEPWERNA

SEQ ID NO: 2553 - DNA, 1182 bp, synthetic construct
  misc_feature 1..1182: note = Variant of terminal deoxynucleotidyl transferase
  source 1..1182: mol_type = other DNA
atgcatcaccaccatcatcatgggggttctggtcatccgccgagcaataccccggagggggaggtgccgagcgttatcgcccgtccggttagtcagtactcgtgccagcgcaagaccacgctgaataactacaacaaaaagctgaccgacgcgctggagatcatggccgagaactacaaatttaaagagaacctgatcgcgtgtctggaagccaagcgcgccgcgagtattctgaaatatctgccgttcgaggttaccagcatgaaagacatccaaggtctgccgtgcattaccgaccaagttcgtgacgtgatcgaggagatcatcgaagagggcgagagcagccgtgttaaagaagttctcaatgacgagcgctacaaggcctttaagcagttcaccagcgtgttcggtgtgggcgtgaaaaccgcggaaaagtggtttcgtatgggcctccgtacggttgaagaagcaaaggccagtaagagtctgaagctgagcaagatgcagaaggcgggctttctgtattacgaggatctggcgagcggcgttagtaaagaagaagccgatgccgttacgctcatcgtgaagaacacggtgcgtacctttctgccggatgcgctggtgaccatcaccggcggtttccgccgtggcaaacctatgggccacgacgttgactttctgatcacgaacccgggccctaaagaggatgacgagctgctccacaaagtggttgatctgctcaagaagcaaggtctgctgctgtacgaagacatcaaagagagcacgttcgtggaggggcaactgccaagtcgtaaaatcgacgccatggacaacttccagaagtgcttcgccattctcaagctgtaccagccgggcgtggataacagtgcggttgggacgagtaagaaaagtgacatgggtgaggttaaggattggaaagcggttcgtgtggatctggtgatcacgccattcgagcagtacgcctatgcgctgctcggttggacgggcagcaaagaatttcgtcgcgatctgcgccgctatgcggaggaagagcgcggcatgatcctcgacaaccatgccctctacgacctgaaaaagcgcatctttctgaaagcgggcagcgaagaagagattttcgcgcatctgggtctggattatgtggagccgtgggaacgcaacgcg

SEQ ID NO: 2554 - protein, 394 aa, synthetic construct
  REGION 1..394: note = Variant of terminal deoxynucleotidyl transferase
MHHHHHHGGSGHPPSNTPEGEVPSVIARPVSQYSCQRKTTLNNYNKKLTDALEIMAENYKFKENLIACLEAKRAASILKYLPFEVTSMKDIQGLPCITDQVRDVIEEIIEEGESSRVKEVLNDERYKAFKQFTSVFGVGVKTAEKWFRMGLRTVEEAKASKSLKLSKMQKAGFLYYEDLASGVSKEEADAVTLIVKNTVRTFLPDALVTITGGFRRGKPMGHDVDFLITNPGPKEDDELLHKVVDLLKKQGLLLYEDIKESTFVEGQLPSRKIDAMDNFQKCFAILKLYQPGVDNSAVGTSKKSDMGEVKDWKAVRVDLVITPFEQYAYALLGWTGSKEFRRDLRRYAEEERGMILDNHALYDLKKRIFLKAGSEEEIFAHLGLDYVEPWERNA

SEQ ID NO: 2555 - DNA, 1182 bp, synthetic construct
  misc_feature 1..1182: note = Variant of terminal deoxynucleotidyl transferase
  source 1..1182: mol_type = other DNA
atgcatcaccaccatcatcatgggggttctggtcatccgccgagcaataccccggagggggaggtgccgagcgttatcgcccgtccggttagtcagtacgcgtgccagcgcaagaccacgctgaataactacaacaaaaagctgaccgacgcgctggagatcatggccgagaactacaaatttaaagagaacctgatcgcgtgtctggaagccaagcgcgccgcgagtattctgaaatatctgccgttcgaggttaccagcatgaaagacatccaaggtctgccgtgcattaccgaccaagttcgtgacgtgatcgaggagatcatcgaagagggcgagagcagccgtgttaaagaagttctcaatgacgagcgctacaaggcctttaagcagttcaccagcgtgttcggtgtgggcgtgaaaaccgcggaaaagtggtaccgtatgggcctccgtacggttgaagaagcaaaggccagtaagagtctgaagctgagcaagatgcagaaggcgggctttctgtattacgaggatctggcgagcggcgttagtaaagaagaagccgatgccgttacgctcatcgtgaagaacacggtgcgtacctttctgccggatgcgctggtgaccatcaccggcggtttccgccgtggcaaacctatgggccacgacgttgactttctgatcacgctgccgggcggcaaagaggatgacgagctgctccacaaagtggttgatctgctcaagacgcaaggtctgctgctgtacgaagacatcaaagagagcacgttcgtggaggggcaactgccaagtcgcaaaatcgacgccatggacaacttccagaagtgcttcgccattctcaagctgtaccagccgggcgtggataacagtgcggttgggacgagtaagaaaagtgacatgggtgaggttaaggattggaaagcgattcgtgtggatctggtgatcacgccattcgagcagtacgcctatgcgctgctcggttggacgggcagcaaagaatttcgtcgcgatctgcgccgctatgcggaggaagagcgcggcatgatcctcgacaaccatgccctctacgacctgaaaaagcgcatctttctgaaagcgggcagcgaagaagagattttcgcgcatctgggtctggattatgtggagccgtgggaacgcaacgcg

SEQ ID NO: 2556 - protein, 394 aa, synthetic construct
  REGION 1..394: note = Variant of terminal deoxynucleotidyl transferase
MHHHHHHGGSGHPPSNTPEGEVPSVIARPVSQYACQRKTTLNNYNKKLTDALEIMAENYKFKENLIACLEAKRAASILKYLPFEVTSMKDIQGLPCITDQVRDVIEEIIEEGESSRVKEVLNDERYKAFKQFTSVFGVGVKTAEKWYRMGLRTVEEAKASKSLKLSKMQKAGFLYYEDLASGVSKEEADAVTLIVKNTVRTFLPDALVTITGGFRRGKPMGHDVDFLITLPGGKEDDELLHKVVDLLKTQGLLLYEDIKESTFVEGQLPSRKIDAMDNFQKCFAILKLYQPGVDNSAVGTSKKSDMGEVKDWKAIRVDLVITPFEQYAYALLGWTGSKEFRRDLRRYAEEERGMILDNHALYDLKKRIFLKAGSEEEIFAHLGLDYVEPWERNA

SEQ ID NO: 2557 - DNA, 1182 bp, synthetic construct
  misc_feature 1..1182: note = Variant of terminal deoxynucleotidyl transferase
  source 1..1182: mol_type = other DNA
atgcatcaccaccatcatcatgggggttctggtcatccgccaagcaataccccggagggggaggtgccgagcgttatcgcccgtccggttagtcagtacagctgccagcgcaagaccacgctgaataactacaacaaaaagttcaccgacgcgctggagatcatggccgagaactacaaatttaaagagaacctgatcgcgtgtctggaagccaagcgcgccgcgagtattctgaaatatctgccgttcgaggttaccagcatgaaagacatccaaggtctgccgtgcattaccgaccaagttcgtgacgtgatcgaggagatcatcgaagagggcgagagcagccgtgttaaagaagttctcaatgacgagcgctacaaggcctttaagcagttcaccagcgtgttcggtgtgggcgtgaaaaccgcggaaaagtggtaccgtatgggcctccgtacggttgaagaagcaaaggccagtaagagtctgaagctgagcaagatgcagaaggcgggctttctgtattacgaggatctggcgagccgcgttagtaaagaagaagccgatgccgttacgctcatcgtgaagaacacggtgcgtacctttctgccggatgcgctggtgaccatcaccggcggtttccgccgtggcaaacctgtgggccacgacgttgactttctgatcacgaatccgggcccgaaagaggatgacgagctgctccacaaagtggttgatctgctcaagaagcaaggtctgctgctgtacgaagacatcaaagagagcacgttcgtggaggggcaactgccaagtcgcaaaatcgacgccatggacaacttccagaagtgcttcgccattctcaagctgtaccagccgggcgtggataacagtgcggttgggacgagtaagaaaagtgacatggccgaggttaaggattggaaagcgattcgtgtggatctggtgatcacgccattcgagcagtacgcctatgcgctgctcggttggacgggcagcaaagaatttcgtcgcgatctgcgccgctatgcggaggaagagcgcggcatgatcctcgacaaccatgccctctacgacctgaaaaagcgcatctttctgaaagcgggcagcgaagaagagattttcgcgcatctgggtctggattatgtggagccgtgggaacgcaacgcg

SEQ ID NO: 2558 - protein, 394 aa, synthetic construct
  REGION 1..394: note = Variant of terminal deoxynucleotidyl transferase
MHHHHHHGGSGHPPSNTPEGEVPSVIARPVSQYSCQRKTTLNNYNKKFTDALEIMAENYKFKENLIACLEAKRAASILKYLPFEVTSMKDIQGLPCITDQVRDVIEEIIEEGESSRVKEVLNDERYKAFKQFTSVFGVGVKTAEKWYRMGLRTVEEAKASKSLKLSKMQKAGFLYYEDLASRVSKEEADAVTLIVKNTVRTFLPDALVTITGGFRRGKPVGHDVDFLITNPGPKEDDELLHKVVDLLKKQGLLLYEDIKESTFVEGQLPSRKIDAMDNFQKCFAILKLYQPGVDNSAVGTSKKSDMAEVKDWKAIRVDLVITPFEQYAYALLGWTGSKEFRRDLRRYAEEERGMILDNHALYDLKKRIFLKAGSEEEIFAHLGLDYVEPWERNA

SEQ ID NO: 2559 - DNA, 1182 bp, synthetic construct
  misc_feature 1..1182: note = Variant of terminal deoxynucleotidyl transferase
  source 1..1182: mol_type = other DNA
atgcatcaccaccatcatcatgggggttctggtcatccgccgagcaataccccggagggggaggtgccgagcgttatcgcccgtccggttagtcagtacgcgtgccagcgcaagaccacgctgaataactacaacaaaaagtttaccgacgcgctggagatcatggccgagaactacaaatttaaagagaacctgatcgcgtgtctggaagccaagcgcgccgcgagtatttttaaatatctgccgttcgaggttaccagcatgaaagacatccaaggtctgccgtgcattaccgaccaagttcgtgacgtgatcgaggagatcatcgaagagggcgagagcagccgtgttaaagaagttctcaatgacgagcgctacaaggcctttaagcagttcaccagcgtgttcggtgtgggcgtgaaaaccgcggaaaagtggtaccgtatgggcctccgtacggttgaagaagcaaaggccagtaagagtctgaagctgagcaagatgcagaaggcgggctttctgtattacgaggatctggcgagcatggttagtaaagaagaagccgatgccgttacgctcatcgtgaagaacacggtgcgtacctttctgccggatgcgctggtgaccatcaccggcggtttccgccgtggcaaacctgtgggccacgacgttgactttctgatcacgaatccgggccctaaagaggatgacgagctgctccacaaagtggttgatctgctcaagacgcaaggtctgctgctgtacgaagacatcaaagagagcacgttcgtggaggggcaactgccaagtcgcaaaatcgacgccatggacaacttccagaagtgcttcgccattctcaagctgtaccagccgggcgtggataacagtgcggttgggacgagtaagaaaagtgacatggctgaggttaaggattggaaagcgattcgtgtggatctggtgatcacgccattcgagcagtacgcctatgcgctgctcggttggacgggcagcaaagaatttcgtcgcgatctgcgccgctatgcggaggaagagcgcggcatgatcctcgacaaccatgccctctacgacctgaaaaagcgcatctttctgaaagcgggcagcgaagaagagattttcgcgcatctgggtctggattatgtggagccgtgggaacgcaacgcg

SEQ ID NO: 2560 - protein, 394 aa, synthetic construct
  REGION 1..394: note = Variant of terminal deoxynucleotidyl transferase
MHHHHHHGGSGHPPSNTPEGEVPSVIARPVSQYACQRKTTLNNYNKKFTDALEIMAENYKFKENLIACLEAKRAASIFKYLPFEVTSMKDIQGLPCITDQVRDVIEEIIEEGESSRVKEVLNDERYKAFKQFTSVFGVGVKTAEKWYRMGLRTVEEAKASKSLKLSKMQKAGFLYYEDLASMVSKEEADAVTLIVKNTVRTFLPDALVTITGGFRRGKPVGHDVDFLITNPGPKEDDELLHKVVDLLKTQGLLLYEDIKESTFVEGQLPSRKIDAMDNFQKCFAILKLYQPGVDNSAVGTSKKSDMAEVKDWKAIRVDLVITPFEQYAYALLGWTGSKEFRRDLRRYAEEERGMILDNHALYDLKKRIFLKAGSEEEIFAHLGLDYVEPWERNA

SEQ ID NO: 2561 - DNA, 1182 bp, synthetic construct
  misc_feature 1..1182: note = Variant of terminal deoxynucleotidyl transferase
  source 1..1182: mol_type = other DNA
atgcatcaccaccatcatcatgggggttctggtcatccgccgagcaataccccggagggggaggtgccgagcgttatcgcccgtccggttagtcagtactcgtgccagcgcaagaccacgctgaataactacaacaaaaagtttaccgacgcgctggagatcatggccgagaactacaaatttaaagagaacctgatcgcgtgtctggaagccaagcgcgccgcgagtatttttaaatatctgccgttcgaggttaccagcatgaaagacatccaaggtctgccgtgcattaccgaccaagttcgtgacgtgatcgaggagatcatcgaagagggcgagagcagccgtgttaaagaagttctcaatgacgagcgctacaaggcctttaagcagttcaccagcgtgttcggtgtgggcgtgaaaaccgcggaaaagtggtttcgtatgggcctccgtacggttgaagaagcacgcgccagtaagagtctgaagctgagcaagatgcagaaggcgggctttctgtattacgaggatctggcgagcatggttagtaaagaagaagccgatgccgttacgctcatcgtgaagaacacggtgcgtacctttctgccggatgcgctggtgaccatcaccggcggtttccgccgtggcaaacctatgggccacgacgttgactttctgatcacgaatccgggcccgaaagaggatgacgagctgctccacaaagtggttgatctgctcaagaagcaaggtctgctgctgtacgaagacatcaaagagagcacgttcgtggaggggcaactgccaagtcgtaaaatcgacgccatggacaacttccagaagtgcttcgccattctcaagctgtaccagccgggcgtggataacagtgcggttgggacgagtaagaaaagtgacatggccgaggttaaggattggaaagcgattcgtgtggatctggtgatcacgccattcgagcagtacgcctatgcgctgctcggttggacgggcagcaaagaatttcgtcgcgatctgcgccgctatgcggaggaagagcgcggcatgatcctcgacaaccatgccctctacgacctgaaaaagcgcatctttctgaaagcgggcagcgaagaagagattttcgcgcatctgggtctggattatgtggagccgtgggaacgcaacgcg

SEQ ID NO: 2562 - protein, 394 aa, synthetic construct
  REGION 1..394: note = Variant of terminal deoxynucleotidyl transferase
MHHHHHHGGSGHPPSNTPEGEVPSVIARPVSQYSCQRKTTLNNYNKKFTDALEIMAENYKFKENLIACLEAKRAASIFKYLPFEVTSMKDIQGLPCITDQVRDVIEEIIEEGESSRVKEVLNDERYKAFKQFTSVFGVGVKTAEKWFRMGLRTVEEARASKSLKLSKMQKAGFLYYEDLASMVSKEEADAVTLIVKNTVRTFLPDALVTITGGFRRGKPMGHDVDFLITNPGPKEDDELLHKVVDLLKKQGLLLYEDIKESTFVEGQLPSRKIDAMDNFQKCFAILKLYQPGVDNSAVGTSKKSDMAEVKDWKAIRVDLVITPFEQYAYALLGWTGSKEFRRDLRRYAEEERGMILDNHALYDLKKRIFLKAGSEEEIFAHLGLDYVEPWERNA

SEQ ID NO: 2563 - DNA, 1182 bp, synthetic construct
  misc_feature 1..1182: note = Variant of terminal deoxynucleotidyl transferase
  source 1..1182: mol_type = other DNA
atgcatcaccaccatcatcatgggggttctggtcatccgccgagcaataccccggagggggaggtgccgagcgttatcgcccgtccggttagtcagtacgcgtgccagcgcaagaccacgctgaataactacaacaaaaagctgaccgacgcgctggagatcatggccgagaactacaaatttaaagagaacctgatcgcgtgtctggaagccaagcgcgccgcgagtattctgaaatatctgccgttcgaggttaccagcatgaaagacatccaaggtctgccgtgcattaccgaccaagttcgtgacgtgatcgaggagatcatcgaagagggcgagagcagccgtgttaaagaagttctcaatgacgagcgctacaaggcctttaagcagttcaccagcgtgttcggtgtgggcgtgaaaaccgcggaaaagtggttccgtatgggcctccgtacggttgaagaagcaaaggccagtaagagtctgaagctgagcaagatgcagaaggcgggctttctgtattacgaggatctggcgagccgcgttagtaaagaagaagccgatgccgttacgctcatcgtgaagaacacggtgcgtacctttctgccggatgcgctggtgaccatcaccggcggtttccgccgtggcaaacctatgggccacgacgttgactttctgatcacgaatccgggcccgaaagaggatgacgagctgctccacaaagtggttgatctgctcaagaagcaaggtctgctgctgtacgaagacatcaaagagagcacgttcgtggaggggcaactgccaagtcgcaaaatcgacgccatggacaacttccagaagtgcttcgccattctcaagctgtaccagccgggcgtggataacagtgcggttgggacgagtaagaaaagtgacatggccgaggttaaggattggaaagcgattcgtgtggatctggtgatcacgccattcgagcagtacgcctatgcgctgctcggttggacgggcagcaaacaatttcgtcgcgatctgcgccgctatgcggaggaagagcgcggcatgatcctcgacaaccatgccctctacgacctgaaaaagcgcatctttctgaaagcgggcagcgaagaagagattttcgcgcatctgggtctggattatgtggagccgtgggaacgcaacgcg

SEQ ID NO: 2564 - protein, 394 aa, synthetic construct
  REGION 1..394: note = Variant of terminal deoxynucleotidyl transferase
MHHHHHHGGSGHPPSNTPEGEVPSVIARPVSQYACQRKTTLNNYNKKLTDALEIMAENYKFKENLIACLEAKRAASILKYLPFEVTSMKDIQGLPCITDQVRDVIEEIIEEGESSRVKEVLNDERYKAFKQFTSVFGVGVKTAEKWFRMGLRTVEEAKASKSLKLSKMQKAGFLYYEDLASRVSKEEADAVTLIVKNTVRTFLPDALVTITGGFRRGKPMGHDVDFLITNPGPKEDDELLHKVVDLLKKQGLLLYEDIKESTFVEGQLPSRKIDAMDNFQKCFAILKLYQPGVDNSAVGTSKKSDMAEVKDWKAIRVDLVITPFEQYAYALLGWTGSKQFRRDLRRYAEEERGMILDNHALYDLKKRIFLKAGSEEEIFAHLGLDYVEPWERNA

SEQ ID NO: 2565 - DNA, 1182 bp, synthetic construct
  misc_feature 1..1182: note = Variant of terminal deoxynucleotidyl transferase
  source 1..1182: mol_type = other DNA
atgcatcaccaccatcatcatgggggttctggtcatccgccaagcaataccccggagggggaggtgccgagcgttatcgcccgtccggttagtcagtactcgtgtcagcgcaagaccacgctgaataactacaacaaaaagctgaccgacgcgctggagatcatggccgagaactacaaatttaaagagaacctgatcgcgtgtctggaagccaagcgcgccgcgagtattctgaaatatctgccgttcgaggttaccagcatgaaagacatccaaggtctgccgtgcattaccgaccaagttcgtgacgtgatcgaggagatcatcgaagagggcgagagcagccgtgttaaagaagttctcaatgacgagcgctacaaggcctttaagcagttcaccagcgtgttcggtgtgggcgtgaaaaccgcggaaaagtggtaccgtatgggcctccgtacggttgaagaagcaaaggccagtaagagtctgaagctgagcaagatgcagaaggcgggctttctgtattacgaggatctggcgagccgcgttagtaaagaagaagccgatgccgttacgctcatcgtgaagaacacggtgcgtacctttctgccggatgcgctggtgaccatcaccggcggtttccgccgtggcaaacctatgggccacgacgttgactttctgatcacgaatccgggcccgaaagaggatgacgagctgctccacaaagtggttgatctgctcaagaagcaaggtctgctgctgtacgaagacatcaaagagagcacgttcgtggaggggcaactgccaagtcataaaatcgacgccatggacaacttccagaagtgcttcgccattctcaagctgtaccagccgggcgtggataacagtgcggttgggacgagtaagaaaagtgacatgggtgaggttaaggattggaaagcgattcgtgtggatctggtgatcacgccattcgagcagtacgcctatgcgctgctcggttggacgggcagcaaacaatttcgtcgcgatctgcgccgctatgcggaggaagagcgcggcatgatcctcgacaaccatgccctctacgacctgaaaaagcgcatctttctgaaagcgggcagcgaagaagagattttcgcgcatctgggtctggattatgtggagccgtgggaacgcaacgcg

SEQ ID NO: 2566 - protein, 394 aa, synthetic construct
  REGION 1..394: note = Variant of terminal deoxynucleotidyl transferase
MHHHHHHGGSGHPPSNTPEGEVPSVIARPVSQYSCQRKTTLNNYNKKLTDALEIMAENYKFKENLIACLEAKRAASILKYLPFEVTSMKDIQGLPCITDQVRDVIEEIIEEGESSRVKEVLNDERYKAFKQFTSVFGVGVKTAEKWYRMGLRTVEEAKASKSLKLSKMQKAGFLYYEDLASRVSKEEADAVTLIVKNTVRTFLPDALVTITGGFRRGKPMGHDVDFLITNPGPKEDDELLHKVVDLLKKQGLLLYEDIKESTFVEGQLPSHKIDAMDNFQKCFAILKLYQPGVDNSAVGTSKKSDMGEVKDWKAIRVDLVITPFEQYAYALLGWTGSKQFRRDLRRYAEEERGMILDNHALYDLKKRIFLKAGSEEEIFAHLGLDYVEPWERNA

SEQ ID NO: 2567 - DNA, 1182 bp, synthetic construct
  misc_feature 1..1182: note = Variant of terminal deoxynucleotidyl transferase
  source 1..1182: mol_type = other DNA
atgcatcaccaccatcatcatgggggttctggtcatccgccgagcaataccccggagggggaggtgccgagcgttatcgcccgtccggttagtcagtacagctgccagcgcaagaccacgctgaataactacaacaaaaagttcaccgacgcgctggagatcatggccgagaactacaaatttaaagagaacctgatcgcgtgtctggaagccaagcgcgccgcgagtattctgaaatatctgccgttcgaggttaccagcatgaaagacatccaaggtctgccgtgcattaccgaccaagttcgtgacgtgatcgaggagatcatcgaagagggcgagagcagccgtgttaaagaagttctcaatgacgagcgctacaaggcctttaagcagttcaccagcgtgttcggtgtgggcgtgaaaaccgcggaaaagtggtaccgtatgggcctccgtacggttgaagaagcaaaggccagtaagagtctgaagctgagcaagatgcagaaggcgggctttctgtattacgaggatctggcgagcatggttagtaaagaagaagccgatgccgttacgctcatcgtgaagaacacggtgcgtacctttctgccggatgcgctggtgaccatcaccggcggtttccgccgtggcaaacctatgggccacgacgttgactttctgatcacgctgccgggccctaaagaggatgacgagctgctccacaaagtggttgatctgctcaagaagcaaggtctgctgctgtacgaagacatcaaagagagcacgttcgtggaggggcaactgccaagtcgcaaaatcgacgccatggacaacttccagaagtgcttcgccattctcaagctgtaccagccgggcgtggataacagtgcggttgggacgagtaagaaaagtgacatgggtgaggttaaggattggaaagcggttcgtgtggatctggtgatcacgccattcgagcagtacgcctatgcgctgctcggttggacgggcagcaaacaatttcgtcgcgatctgcgccgctatgcggaggaagagcgcggcatgatcctcgacaaccatgccctctacgacctgaaaaagcgcatctttctgaaagcgggcagcgaagaagagattttcgcgcatctgggtctggattatgtggagccgtgggaacgcaacgcg

SEQ ID NO: 2568 - protein, 394 aa, synthetic construct
  REGION 1..394: note = Variant of terminal deoxynucleotidyl transferase
MHHHHHHGGSGHPPSNTPEGEVPSVIARPVSQYSCQRKTTLNNYNKKFTDALEIMAENYKFKENLIACLEAKRAASILKYLPFEVTSMKDIQGLPCITDQVRDVIEEIIEEGESSRVKEVLNDERYKAFKQFTSVFGVGVKTAEKWYRMGLRTVEEAKASKSLKLSKMQKAGFLYYEDLASMVSKEEADAVTLIVKNTVRTFLPDALVTITGGFRRGKPMGHDVDFLITLPGPKEDDELLHKVVDLLKKQGLLLYEDIKESTFVEGQLPSRKIDAMDNFQKCFAILKLYQPGVDNSAVGTSKKSDMGEVKDWKAVRVDLVITPFEQYAYALLGWTGSKQFRRDLRRYAEEERGMILDNHALYDLKKRIFLKAGSEEEIFAHLGLDYVEPWERNA

SEQ ID NO: 2569 - DNA, 1182 bp, synthetic construct
  misc_feature 1..1182: note = Variant of terminal deoxynucleotidyl transferase
  source 1..1182: mol_type = other DNA
atgcatcaccaccatcatcatgggggttctggtcatccgccgagcaataccccggagggggaggtgccgagcgttatcgcccgtccggttagtcagtacgcgtgccagcgcaagaccacgctgaataactacaacaaaaagtttaccgacgcgctggagatcatggccgagaactacaaatttaaagagaacctgatcgcgtgtctggaagccaagcgcgccgcgagtatttttaaatatctgccgttcgaggttaccagcatgaaagacatccaaggtctgccgtgcattaccgaccaagttcgtgacgtgatcgaggagatcatcgaagagggcgagagcagccgtgttaaagaagttctcaatgacgagcgctacaaggcctttaagcagttcaccagcgtgttcggtgtgggcgtgaaaaccgcggaaaagtggttccgtatgggcctccgtacggttgaagaagcacgcgccagtaagagtctgaagctgagcaagatgcagaaggcgggctttctgtattacgaggatctggcgagccgcgttagtaaagaagaagccgatgccgttacgctcatcgtgaagaacacggtgcgtacctttctgccggatgcgctggtgaccatcaccggcggtttccgccgtggcaaacctatgggccacgacgttgactttctgatcacgaacccgggccctaaagaggatgacgagctgctccacaaagtggttgatctgctcaagaagcaaggtctgctgctgtacgaagacatcaaagagagcacgttcgtggaggggcaactgccaagtcgtaaaatcgacgccatggacaacttccagaagtgcttcgccattctcaagctgtaccagccgggcgtggataacagtgcggttgggacgagtaagaaaagtgacatggccgaggttaaggattggaaagcgattcgtgtggatctggtgatcacgccattcgagcagtacgcctatgcgctgctcggttggacgggcagcaaagaatttcgtcgcgatctgcgccgctatgcggaggaagagcgcggcatgatcctcgacaaccatgccctctacgacctgaaaaagcgcatctttctgaaagcgggcagcgaagaagagattttcgcgcatctgggtctggattatgtggagccgtgggaacgcaacgcg

SEQ ID NO: 2570 - protein, 394 aa, synthetic construct
  REGION 1..394: note = Variant of terminal deoxynucleotidyl transferase
MHHHHHHGGSGHPPSNTPEGEVPSVIARPVSQYACQRKTTLNNYNKKFTDALEIMAENYKFKENLIACLEAKRAASIFKYLPFEVTSMKDIQGLPCITDQVRDVIEEIIEEGESSRVKEVLNDERYKAFKQFTSVFGVGVKTAEKWFRMGLRTVEEARASKSLKLSKMQKAGFLYYEDLASRVSKEEADAVTLIVKNTVRTFLPDALVTITGGFRRGKPMGHDVDFLITNPGPKEDDELLHKVVDLLKKQGLLLYEDIKESTFVEGQLPSRKIDAMDNFQKCFAILKLYQPGVDNSAVGTSKKSDMAEVKDWKAIRVDLVITPFEQYAYALLGWTGSKEFRRDLRRYAEEERGMILDNHALYDLKKRIFLKAGSEEEIFAHLGLDYVEPWERNA

SEQ ID NO: 2571 - DNA, 1182 bp, synthetic construct
  misc_feature 1..1182: note = Variant of terminal deoxynucleotidyl transferase
  source 1..1182: mol_type = other DNA
atgcatcaccaccatcatcatgggggttctggtcatccgccgagcaataccccggagggggaggtgccgagcgttatcgcccgtccggttagtcagtactcgtgccagcgcaagaccacgctgaataactacaacaaaaagtttaccgacgcgctggagatcatggccgagaactacaaatttaaagagaacctgatcgcgtgtctggaagccaagcgcgccgcgagtattctgaaatatctgccgttcgaggttaccagcatgaaagacatccaaggtctgccgtgcattaccgaccaagttcgtgacgtgatcgaggagatcatcgaagagggcgagagcagccgtgttaaagaagttctcaatgacgagcgctacaaggcctttaagcagttcaccagcgtgttcggtgtgggcgtgaaaaccgcggaaaagtggtaccgtatgggcctccgtacggttgaagaagcaaaggccagtaagagtctgaagctgagcaagatgcagaaggcgggctttctgtattacgaggatctggcgagcggcgttagtaaagaagaagccgatgccgttacgctcatcgtgaagaacacggtgcgtacctttctgccggatgcgctggtgaccatcaccggcggtttccgccgtggcaaacctatgggccacgacgttgactttctgatcacgaacccgggccgcaaagaggatgacgagctgctccacaaagtggttgatctgctcaagaagcaaggtctgctgctgtacgaagacatcaaagagagcacgttcgtggaggggcaactgccaagtcgcaaaatcgacgccatggacaacttccagaagtgcttcgccattctcaagctgtaccagccgggcgtggataacagtgcggttgggacgagtaagaaaagtgacatggccgaggttaaggattggaaagcgattcgtgtggatctggtgatcacgccattcgagcagtacgcctatgcgctgctcggttggacgggcagcaaagaatttcgtcgcgatctgcgccgctatgcggaggaagagcgcggcatgatcctcgacaaccatgccctctacgacctgaaaaagcgcatctttctgaaagcgggcagcgaagaagagattttcgcgcatctgggtctggattatgtggagccgtgggaacgcaacgcg

SEQ ID NO: 2572 - protein, 394 aa, synthetic construct
  REGION 1..394: note = Variant of terminal deoxynucleotidyl transferase
MHHHHHHGGSGHPPSNTPEGEVPSVIARPVSQYSCQRKTTLNNYNKKFTDALEIMAENYKFKENLIACLEAKRAASILKYLPFEVTSMKDIQGLPCITDQVRDVIEEIIEEGESSRVKEVLNDERYKAFKQFTSVFGVGVKTAEKWYRMGLRTVEEAKASKSLKLSKMQKAGFLYYEDLASGVSKEEADAVTLIVKNTVRTFLPDALVTITGGFRRGKPMGHDVDFLITNPGRKEDDELLHKVVDLLKKQGLLLYEDIKESTFVEGQLPSRKIDAMDNFQKCFAILKLYQPGVDNSAVGTSKKSDMAEVKDWKAIRVDLVITPFEQYAYALLGWTGSKEFRRDLRRYAEEERGMILDNHALYDLKKRIFLKAGSEEEIFAHLGLDYVEPWERNA

SEQ ID NO: 2573 - DNA, 1182 bp, synthetic construct
  misc_feature 1..1182: note = Variant of terminal deoxynucleotidyl transferase
  source 1..1182: mol_type = other DNA
atgcatcaccaccatcatcatgggggttctggtcatccgccgagcaataccccggagggggaggtgccgagcgttatcgcccgtccggttagtcagtacgcgtgccagcgcaagaccacgctgaataactacaacaaaaagctgaccgacgcgctggagatcatggccgagaactacaaatttaaagagaacctgatcgcgtgtctggaagccaagcgcgccgcgagtattctgaaatatctgccgttcgaggttaccagcatgaaagacatccaaggtctgccgtgcattaccgaccaagttcgtgacgtgatcgaggagatcatcgaagagggcgagagcagccgtgttaaagaagttctcaatgacgagcgctacaaggcctttaagcagttctccagcgtgttcggtgtgggcgtgaaaaccgcggaaaagtggttccgtatgggcctccgtacggttgaagaagcacgcgccagtaagagtctgaagctgagcaagatgcagaaggcgggctttctgtattacgaggatctggcgagcggcgttagtaaagaagaagccgatgccgttacgctcatcgtgaagaacacggtgcgtacctttctgccggatgcgctggtgaccatcaccggcggtttccgccgtggcaaacctatgggccacgacgttgactttctgatcacgctgccgggcggcaaagaggatgacgagctgctccacaaagtggttgatctgctcaagaagcaaggtctgctgctgtacgaagacatcaaagagagcacgttcgtggaggggcaactgccaagtcataaaatcgacgccatggacaacttccagaagtgcttcgccattctcaagctgtaccagccgggcgtggataacagtgcggttgggacgagtaagaaaagtgacatggccgaggttaaggattggaaagcgattcgtgtggatctggtgatcacgccattcgagcagtacgcctatgcgctgctcggttggacgggcagcaaagaatttcgtcgcgatctgaagcgctatgcggaggaagagcgcggcatgatcctcgacaaccatgccctctacgacctgaaaaagcgcatctttctgaaagcgggcagcgaagaagagattttcgcgcatctgggtctggattatgtggagccgtgggaacgcaacgcg

SEQ ID NO: 2574 - protein, 394 aa, synthetic construct
  REGION 1..394: note = Variant of terminal deoxynucleotidyl transferase
MHHHHHHGGSGHPPSNTPEGEVPSVIARPVSQYACQRKTTLNNYNKKLTDALEIMAENYKFKENLIACLEAKRAASILKYLPFEVTSMKDIQGLPCITDQVRDVIEEIIEEGESSRVKEVLNDERYKAFKQFSSVFGVGVKTAEKWFRMGLRTVEEARASKSLKLSKMQKAGFLYYEDLASGVSKEEADAVTLIVKNTVRTFLPDALVTITGGFRRGKPMGHDVDFLITLPGGKEDDELLHKVVDLLKKQGLLLYEDIKESTFVEGQLPSHKIDAMDNFQKCFAILKLYQPGVDNSAVGTSKKSDMAEVKDWKAIRVDLVITPFEQYAYALLGWTGSKEFRRDLKRYAEEERGMILDNHALYDLKKRIFLKAGSEEEIFAHLGLDYVEPWERNA

SEQ ID NO: 2575 - DNA, 1182 bp, synthetic construct
  misc_feature 1..1182: note = Variant of terminal deoxynucleotidyl transferase
  source 1..1182: mol_type = other DNA
atgcatcaccaccatcatcatgggggttctggtcatccgccgagcaataccccggagggggaggtgccgagcgttatcgcccgtccggttagtcagtactcgtgccagcgcaagaccacgctgaataactacaacaaaaagtttaccgacgcgctggagatcatggccgagaactacaaatttaaagagaacctgatcgcgtgtctggaagccaagcgcgccgcgagtattctgaaatatctgccgttcgaggttaccagcatgaaagacatccaaggtctgccgtgcattaccgaccaagttcgtgacgtgatcgaggagatcatcgaagagggcgagagcagccgtgttaaagaagttctcaatgacgagcgctacaaggcctttaagcagttcaccagcgtgttcggtgtgggcgtgaaaaccgcggaaaagtggttccgtatgggcctccgtacggttgaagaagcaaaggccagtaagagtctgaagctgagcaagatgcagaaggcgggctttctgtattacgaggatctggcgagccgcgttagtaaagaagaagccgatgccgttacgctcatcgtgaagaacacggtgcgtacctttctgccggatgcgctggtgaccatcaccggcggtttccgccgtggcaaacctatgggccacgacgttgactttctgatcacgaacccgggccctaaagaggatgacgagctgctccacaaagtggttgatctgctcaagaagcaaggtctgctgctgtacgaagacatcaaagagagcacgttcgtggaggggcaactgccaagtcgcaaaatcgacgccatggacaacttccagaagtgcttcgccattctcaagctgtaccagccgggcgtggataacagtgcggttgggacgagtaagaaaagtgacatggccgaggttaaggattggaaagcggttcgtgtggatctggtgatcacgccattcgagcagtacgcctatgcgctgctcggttggacgggcagcaaagaatttcgtcgcgatctgcgccgctatgcggaggaagagcgcggcatgatcctcgacaaccatgccctctacgacctgaaaaagcgcatctttctgaaagcgggcagcgaagaagagattttcgcgcatctgggtctggattatgtggagccgtgggaacgcaacgcg

SEQ ID NO: 2576 - protein, 394 aa, synthetic construct
  REGION 1..394: note = Variant of terminal deoxynucleotidyl transferase
MHHHHHHGGSGHPPSNTPEGEVPSVIARPVSQYSCQRKTTLNNYNKKFTDALEIMAENYKFKENLIACLEAKRAASILKYLPFEVTSMKDIQGLPCITDQVRDVIEEIIEEGESSRVKEVLNDERYKAFKQFTSVFGVGVKTAEKWFRMGLRTVEEAKASKSLKLSKMQKAGFLYYEDLASRVSKEEADAVTLIVKNTVRTFLPDALVTITGGFRRGKPMGHDVDFLITNPGPKEDDELLHKVVDLLKKQGLLLYEDIKESTFVEGQLPSRKIDAMDNFQKCFAILKLYQPGVDNSAVGTSKKSDMAEVKDWKAVRVDLVITPFEQYAYALLGWTGSKEFRRDLRRYAEEERGMILDNHALYDLKKRIFLKAGSEEEIFAHLGLDYVEPWERNA

SEQ ID NO: 2577 - DNA, 1182 bp, synthetic construct
  misc_feature 1..1182: note = Variant of terminal deoxynucleotidyl transferase
  source 1..1182: mol_type = other DNA
atgcatcaccaccatcatcatgggggttctggtcatccgccgagcaataccccggagggggaggtgccgagcgttatcgcccgtccggttagtcagtacagctgccagcgcaagaccacgctgaataactacaacaaaaagtttaccgacgcgctggagatcatggccgagaactacaaatttaaagagaacctgatcgcgtgtctggaagccaagcgcgccgcgagtattctgaaatatctgccgttcgaggttaccagcatgaaagacatccaaggtctgccgtgcattaccgaccaagttcgtgacgtgatcgaggagatcatcgaagagggcgagagcagccgtgttaaagaagttctcaatgacgagcgctacaaggcctttaagcagttcaccagcgtgttcggtgtgggcgtgaaaaccgcggaaaagtggtttcgtatgggcctccgtacggttgaagaagcacgcgccagtaagagtctgaagctgagcaagatgcagaaggcgggctttctgtattacgaggatctggcgagccgcgttagtaaagaagaagccgatgccgttacgctcatcgtgaagaacacggtgcgtacctttctgccggatgcgctggtgaccatcaccggcggtttccgccgtggcaaacctatgggccacgacgttgactttctgatcacgaatccgggcccgaaagaggatgacgagctgctccacaaagtggttgatctgctcaagaagcaaggtctgctgctgtacgaagacatcaaagagagcacgttcgtggaggggcaactgccaagtcgcaaaatcgacgccatggacaacttccagaagtgcttcgccattctcaagctgtaccagccgggcgtggataacagtgcggttgggacgagtaagaaaagtgacatgggtgaggttaaggattggaaagcgattcgtgtggatctggtgatcacgccattcgagcagtacgcctatgcgctgctcggttggacgggcagcaaagaatttcgtcgcgatctgcgccgctatgcggaggaagagcgcggcatgatcctcgacaaccatgccctctacgacctgaaaaagcgcatctttctgaaagcgggcagcgaagaagagattttcgcgcatctgggtctggattatgtggagccgtgggaacgcaacgcg

SEQ ID NO: 2578 - protein, 394 aa, synthetic construct
  REGION 1..394: note = Variant of terminal deoxynucleotidyl transferase
MHHHHHHGGSGHPPSNTPEGEVPSVIARPVSQYSCQRKTTLNNYNKKFTDALEIMAENYKFKENLIACLEAKRAASILKYLPFEVTSMKDIQGLPCITDQVRDVIEEIIEEGESSRVKEVLNDERYKAFKQFTSVFGVGVKTAEKWFRMGLRTVEEARASKSLKLSKMQKAGFLYYEDLASRVSKEEADAVTLIVKNTVRTFLPDALVTITGGFRRGKPMGHDVDFLITNPGPKEDDELLHKVVDLLKKQGLLLYEDIKESTFVEGQLPSRKIDAMDNFQKCFAILKLYQPGVDNSAVGTSKKSDMGEVKDWKAIRVDLVITPFEQYAYALLGWTGSKEFRRDLRRYAEEERGMILDNHALYDLKKRIFLKAGSEEEIFAHLGLDYVEPWERNA

SEQ ID NO: 2579 - DNA, 1182 bp, synthetic construct
  misc_feature 1..1182: note = Variant of terminal deoxynucleotidyl transferase
  source 1..1182: mol_type = other DNA
atgcatcaccaccatcatcatgggggttctggtcatccgccgagcaataccccggagggggaggtgccgagcgttatcgcccgtccggttagtcagtacagctgccagcgcaagaccacgctgaataactacaacaaaaagtttaccgacgcgctggagatcatggccgagaactacaaatttaaagagaacctgatcgcgtgtctggaagccaagcgcgccgcgagtatttttaaatatctgccgttcgaggttaccagcatgaaagacatccaaggtctgccgtgcattaccgaccaagttcgtgacgtgatcgaggagatcatcgaagagggcgagagcagccgtgttaaagaagttctcaatgacgagcgctacaaggcctttaagcagttcaccagcgtgttcggtgtgggcgtgaaaaccgcggaaaagtggtaccgtatgggcctccgtacggttgaagaagcaaaggccagtaagagtctgaagctgagcaagatgcagaaggcgggctttctgtattacgaggatctggcgagccgcgttagtaaagaagaagccgatgccgttacgctcatcgtgaagaacacggtgcgtacctttctgccggatgcgctggtgaccatcaccggcggtttccgccgtggcaaacctatgggccacgacgttgactttctgatcacgaacccgggcggcaaagaggatgacgagctgctccacaaagtggttgatctgctcaagaagcaaggtctgctgctgtacgaagacatcaaagagagcacgttcgtggaggggcaactgccaagtcgtaaaatcgacgccatggacaacttccagaagtgcttcgccattctcaagctgtaccagccgggcgtggataacagtgcggttgggacgagtaagaaaagtgacatggccgaggttaaggattggaaagcgattcgtgtggatctggtgatcacgccattcgagcagtacgcctatgcgctgctcggttggacgggcagcaaagaatttcgtcgcgatctgcgccgctatgcggaggaagagcgcggcatgatcctcgacaaccatgccctctacgacctgaaaaagcgcatctttctgaaagcgggcagcgaagaagagattttcgcgcatctgggtctggattatgtggagccgtgggaacgcaacgcg

SEQ ID NO: 2580 - protein, 394 aa, synthetic construct
  REGION 1..394: note = Variant of terminal deoxynucleotidyl transferase
MHHHHHHGGSGHPPSNTPEGEVPSVIARPVSQYSCQRKTTLNNYNKKFTDALEIMAENYKFKENLIACLEAKRAASIFKYLPFEVTSMKDIQGLPCITDQVRDVIEEIIEEGESSRVKEVLNDERYKAFKQFTSVFGVGVKTAEKWYRMGLRTVEEAKASKSLKLSKMQKAGFLYYEDLASRVSKEEADAVTLIVKNTVRTFLPDALVTITGGFRRGKPMGHDVDFLITNPGGKEDDELLHKVVDLLKKQGLLLYEDIKESTFVEGQLPSRKIDAMDNFQKCFAILKLYQPGVDNSAVGTSKKSDMAEVKDWKAIRVDLVITPFEQYAYALLGWTGSKEFRRDLRRYAEEERGMILDNHALYDLKKRIFLKAGSEEEIFAHLGLDYVEPWERNA

SEQ ID NO: 2581 - DNA, 1182 bp, synthetic construct
  misc_feature 1..1182: note = Variant of terminal deoxynucleotidyl transferase
  source 1..1182: mol_type = other DNA
atgcatcaccaccatcatcatgggggttctggtcatccgccgagcaataccccggagggggaggtgccgagcgttatcgcccgtccggttagtcagtacgcgtgccagcgcaagaccacgctgaataactacaacaaaaagttcaccgacgcgctggagatcatggccgagaactacaaatttaaagagaacctgatcgcgtgtctggaagccaagcgcgccgcgagtattctgaaatatctgccgttcgaggttaccagcatgaaagacatccaaggtctgccgtgcattaccgaccaagttcgtgacgtgatcgaggagatcatcgaagagggcgagagcagccgtgttaaagaagttctcaatgacgagcgctacaaggcctttaagcagttcaccagcgtgttcggtgtgggcgtgaaaaccgcggaaaagtggtaccgtatgggcctccgtacggttgaagaagcaaaggccagtaagagtctgaagctgagcaagatgcagaaggcgggctttctgtattacgaggatctggcgagcatggttagtaaagaagaagccgatgccgttacgctcatcgtgaagaacacggtgcgtacctttctgccggatgcgctggtgaccatcaccggcggtttccgccgtggcaaacctgtgggccacgacgttgactttctgatcacgctgccgggccctaaagaggatgacgagctgctccacaaagtggttgatctgctcaagaagcaaggtctgctgctgtacgaagacatcaaagagagcacgttcgtggaggggcaactgccaagtcgcaaaatcgacgccatggacaacttccagaagtgcttcgccattctcaagctgtaccagccgggcgtggataacagtgcggttgggacgagtaagaaaagtgacatggctgaggttaaggattggaaagcgattcgtgtggatctggtgatcacgccattcgagcagtacgcctatgcgctgctcggttggacgggcagcaaacaatttcgtcgcgatctgcgccgctatgcggaggaagagcgcggcatgatcctcgacaaccatgccctctacgacctgaaaaagcgcatctttctgaaagcgggcagcgaagaagagattttcgcgcatctgggtctggattatgtggagccgtgggaacgcaacgcg

SEQ ID NO: 2582 - protein, 394 aa, synthetic construct
  REGION 1..394: note = Variant of terminal deoxynucleotidyl transferase
MHHHHHHGGSGHPPSNTPEGEVPSVIARPVSQYACQRKTTLNNYNKKFTDALEIMAENYKFKENLIACLEAKRAASILKYLPFEVTSMKDIQGLPCITDQVRDVIEEIIEEGESSRVKEVLNDERYKAFKQFTSVFGVGVKTAEKWYRMGLRTVEEAKASKSLKLSKMQKAGFLYYEDLASMVSKEEADAVTLIVKNTVRTFLPDALVTITGGFRRGKPVGHDVDFLITLPGPKEDDELLHKVVDLLKKQGLLLYEDIKESTFVEGQLPSRKIDAMDNFQKCFAILKLYQPGVDNSAVGTSKKSDMAEVKDWKAIRVDLVITPFEQYAYALLGWTGSKQFRRDLRRYAEEERGMILDNHALYDLKKRIFLKAGSEEEIFAHLGLDYVEPWERNA

SEQ ID NO: 2583 - DNA, 1182 bp, synthetic construct
  misc_feature 1..1182: note = Variant of terminal deoxynucleotidyl transferase
  source 1..1182: mol_type = other DNA
atgcatcaccaccatcatcatgggggttctggtcatccgccgagcaataccccggagggggaggtgccgagcgttatcgcccgtccggttagtcagtacagctgccagcgcaagaccacgctgaataactacaacaaaaagttcaccgacgcgctggagatcatggccgagaactacaaatttaaagagaacctgatcgcgtgtctggaagccaagcgcgccgcgagtattctgaaatatctgccgttcgaggttaccagcatgaaagacatccaaggtctgccgtgcattaccgaccaagttcgtgacgtgatcgaggagatcatcgaagagggcgagagcagccgtgttaaagaagttctcaatgacgagcgctacaaggcctttaagcagttcaccagcgtgttcggtgtgggcgtgaaaaccgcggaaaagtggtaccgtatgggcctccgtacggttgaagaagcaaaggccagtaagagtctgaagctgagcaagatgcagaaggcgggctttctgtattacgaggatctggcgagccgcgttagtaaagaagaagccgatgccgttacgctcatcgtgaagaacacggtgcgtacctttctgccggatgcgctggtgaccatcaccggcggtttccgccgtggcaaacctatgggccacgacgttgactttctgatcacgaacccgggccgcaaagaggatgacgagctgctccacaaagtggttgatctgctcaagaagcaaggtctgctgctgtacgaagacatcaaagagagcacgttcgtggaggggcaactgccaagtcgtaaaatcgacgccatggacaacttccagaagtgcttcgccattctcaagctgtaccagccgggcgtggataacagtgcggttgggacgagtaagaaaagtgacatggctgaggttaaggattggaaagcgattcgtgtggatctggtgatcacgccattcgagcagtacgcctatgcgctgctcggttggacgggcagcaaagaatttcgtcgcgatctgaagcgctatgcggaggaagagcgcggcatgatcctcgacaaccatgccctctacgacctgaaaaagcgcatctttctgaaagcgggcagcgaagaagagattttcgcgcatctgggtctggattatgtggagccgtgggaacgcaacgcg

SEQ ID NO: 2584 - protein, 394 aa, synthetic construct
  REGION 1..394: note = Variant of terminal deoxynucleotidyl transferase
MHHHHHHGGSGHPPSNTPEGEVPSVIARPVSQYSCQRKTTLNNYNKKFTDALEIMAENYKFKENLIACLEAKRAASILKYLPFEVTSMKDIQGLPCITDQVRDVIEEIIEEGESSRVKEVLNDERYKAFKQFTSVFGVGVKTAEKWYRMGLRTVEEAKASKSLKLSKMQKAGFLYYEDLASRVSKEEADAVTLIVKNTVRTFLPDALVTITGGFRRGKPMGHDVDFLITNPGRKEDDELLHKVVDLLKKQGLLLYEDIKESTFVEGQLPSRKIDAMDNFQKCFAILKLYQPGVDNSAVGTSKKSDMAEVKDWKAIRVDLVITPFEQYAYALLGWTGSKEFRRDLKRYAEEERGMILDNHALYDLKKRIFLKAGSEEEIFAHLGLDYVEPWERNA

SEQ ID NO: 2585 - DNA, 1182 bp, synthetic construct
  misc_feature 1..1182: note = Variant of terminal deoxynucleotidyl transferase
  source 1..1182: mol_type = other DNA
atgcatcaccaccatcatcatgggggttctggtcatccgccgagcaataccccggagggggaggtgccgagcgttatcgcccgtccggttagtcagtactcgtgccagcgcaagaccacgctgaataactacaacaaaaagttcaccgacgcgctggagatcatggccgagaactacaaatttaaagagaacctgatcgcgtgtctggaagccaagcgcgccgcgagtatttttaaatatctgccgttcgaggttaccagcatgaaagacatccaaggtctgccgtgcattaccgaccaagttcgtgacgtgatcgaggagatcatcgaagagggcgagagcagccgtgttaaagaagttctcaatgacgagcgctacaaggcctttaagcagttcaccagcgtgttcggtgtgggcgtgaaaaccgcggaaaagtggttccgtatgggcctccgtacggttgaagaagcaaaggccagtaagagtctgaagctgagcaagatgcagaaggcgggctttctgtattacgaggatctggcgagccgcgttagtaaagaagaagccgatgccgttacgctcatcgtgaagaacacggtgcgtacctttctgccggatgcgctggtgaccatcaccggcggtttccgccgtggcaaacctatgggccacgacgttgactttctgatcacgaacccgggccgcaaagaggatgacgagctgctccacaaagtggttgatctgctcaagaagcaaggtctgctgctgtacgaagacatcaaagagagcacgttcgtggaggggcaactgccaagtcgcaaaatcgacgccatggacaacttccagaagtgcttcgccattctcaagctgtaccagccgggcgtggataacagtgcggttgggacgagtaagaaaagtgacatggccgaggttaaggattggaaagcgattcgtgtggatctggtgatcacgccattcgagcagtacgcctatgcgctgctcggttggacgggcagcaaagaatttcgtcgcgatctgcgccgctatgcggaggaagagcgcggcatgatcctcgacaaccatgccctctacgacctgaaaaagcgcatctttctgaaagcgggcagcgaagaagagattttcgcgcatctgggtctggattatgtggagccgtgggaacgcaacgcg

SEQ ID NO: 2586 - protein, 394 aa, synthetic construct
  REGION 1..394: note = Variant of terminal deoxynucleotidyl transferase
MHHHHHHGGSGHPPSNTPEGEVPSVIARPVSQYSCQRKTTLNNYNKKFTDALEIMAENYKFKENLIACLEAKRAASIFKYLPFEVTSMKDIQGLPCITDQVRDVIEEIIEEGESSRVKEVLNDERYKAFKQFTSVFGVGVKTAEKWFRMGLRTVEEAKASKSLKLSKMQKAGFLYYEDLASRVSKEEADAVTLIVKNTVRTFLPDALVTITGGFRRGKPMGHDVDFLITNPGRKEDDELLHKVVDLLKKQGLLLYEDIKESTFVEGQLPSRKIDAMDNFQKCFAILKLYQPGVDNSAVGTSKKSDMAEVKDWKAIRVDLVITPFEQYAYALLGWTGSKEFRRDLRRYAEEERGMILDNHALYDLKKRIFLKAGSEEEIFAHLGLDYVEPWERNA

SEQ ID NO: 2587 - DNA, 1182 bp, synthetic construct
  misc_feature 1..1182: note = Variant of terminal deoxynucleotidyl transferase
  source 1..1182: mol_type = other DNA
atgcatcaccaccatcatcatgggggttctggtcatccgccgagcaataccccggagggggaggtgccgagcgttatcgcccgtccggttagtcagtacgcgtgccagcgcaagaccacgctgaataactacaacaaaaagttcaccgacgcgctggagatcatggccgagaactacaaatttaaagagaacctgatcgcgtgtctggaagccaagcgcgccgcgagtatttttaaatatctgccgttcgaggttaccagcatgaaagacatccaaggtctgccgtgcattaccgaccaagttcgtgacgtgatcgaggagatcatcgaagagggcgagagcagccgtgttaaagaagttctcaatgacgagcgctacaaggcctttaagcagttcaccagcgtgttcggtgtgggcgtgaaaaccgcggaaaagtggtttcgtatgggcctccgtacggttgaagaagcaaaggccagtaagagtctgaagctgagcaagatgcagaaggcgggctttctgtattacgaggatctggcgagccgcgttagtaaagaagaagccgatgccgttacgctcatcgtgaagaacacggtgcgtacctttctgacggatgcgctggtgaccatcaccggcggtttccgccgtggcaaacctgtgggccacgacgttgactttctgatcacgaatccgggcccgaaagaggatgacgagctgctccacaaagtggttgatctgctcaagaagcaaggtctgctgctgtacgaagacatcaaagagagcacgttcgtggaggggcaactgccaagtcgcaaaatcgacgccatggacaacttccagaagtgcttcgccattctcaagctgtaccagccgggcgtggataacagtgcggttgggacgagtaagaaaagtgacatggccgaggttaaggattggaaagcgattcgtgtggatctggtgatcacgccattcgagcagtacgcctatgcgctgctcggttggacgggcagcaaacaatttcgtcgcgatctgcgccgctatgcggaggaagagcgcggcatgatcctcgacaaccatgccctctacgacctgaaaaagcgcatctttctgaaagcgggcagcgaagaagagattttcgcgcatctgggtctggattatgtggagccgtgggaacgcaacgcg

SEQ ID NO: 2588 - protein, 394 aa, synthetic construct
  REGION 1..394: note = Variant of terminal deoxynucleotidyl transferase
MHHHHHHGGSGHPPSNTPEGEVPSVIARPVSQYACQRKTTLNNYNKKFTDALEIMAENYKFKENLIACLEAKRAASIFKYLPFEVTSMKDIQGLPCITDQVRDVIEEIIEEGESSRVKEVLNDERYKAFKQFTSVFGVGVKTAEKWFRMGLRTVEEAKASKSLKLSKMQKAGFLYYEDLASRVSKEEADAVTLIVKNTVRTFLTDALVTITGGFRRGKPVGHDVDFLITNPGPKEDDELLHKVVDLLKKQGLLLYEDIKESTFVEGQLPSRKIDAMDNFQKCFAILKLYQPGVDNSAVGTSKKSDMAEVKDWKAIRVDLVITPFEQYAYALLGWTGSKQFRRDLRRYAEEERGMILDNHALYDLKKRIFLKAGSEEEIFAHLGLDYVEPWERNA

SEQ ID NO: 2589 - DNA, 1182 bp, synthetic construct
  misc_feature 1..1182: note = Variant of terminal deoxynucleotidyl transferase
  source 1..1182: mol_type = other DNA
atgcatcaccaccatcatcatgggggttctggtcatccgccgagcaataccccggagggggaggtgccgagcgttatcgcccgtccggttagtcagtactcgtgccagcgcaagaccacgctgaataactacaacaaaaagtttaccgacgcgctggagatcatggccgagaactacaaatttaaagagaacctgatcgcgtgtctggaagccaagcgcgccgcgagtattctgaaatatctgccgttcgaggttaccagcatgaaagacatccaaggtctgccgtgcattaccgaccaagttcgtgacgtgatcgaggagatcatcgaagagggcgagagcagccgtgttaaagaagttctcaatgacgagcgctacaaggcctttaagcagttctccagcgtgttcggtgtgggcgtgaaaaccgcggaaaagtggtttcgtatgggcctccgtacggttgaagaagcaaaggccagtaagagtctgaagctgagcaagatgcagaaggcgggctttctgtattacgaggatctggcgagccgcgttagtaaagaagaagccgatgccgttacgctcatcgtgaagaacacggtgcgtacctttctgccggatgcgctggtgaccatcaccggcggtttccgccgtggcaaacctgtgggccacgacgttgactttctgatcacgaacccgggcggcaaagaggatgacgagctgctccacaaagtggttgatctgctcaagaagcaaggtctgctgctgtacgaagacatcaaagagagcacgttcgtggaggggcaactgccaagtcataaaatcgacgccatggacaacttccagaagtgcttcgccattctcaagctgtaccagccgggcgtggataacagtgcggttgggacgagtaagaaaagtgacatggctgaggttaaggattggaaagcgattcgtgtggatctggtgatcacgccattcgagcagtacgcctatgcgctgctcggttggacgggcagcaaagaatttcgtcgcgatctgcgtcgctatgcggaggaagagcgcggcatgatcctcgacaaccatgccctctacgacctgaaaaagcgcatctttctgaaagcgggcagcgaagaagagattttcgcgcatctgggtctggattatgtggagccgtgggaacgcaacgcg

SEQ ID NO: 2590 - protein, 394 aa, synthetic construct
  REGION 1..394: note = Variant of terminal deoxynucleotidyl transferase
MHHHHHHGGSGHPPSNTPEGEVPSVIARPVSQYSCQRKTTLNNYNKKFTDALEIMAENYKFKENLIACLEAKRAASILKYLPFEVTSMKDIQGLPCITDQVRDVIEEIIEEGESSRVKEVLNDERYKAFKQFSSVFGVGVKTAEKWFRMGLRTVEEAKASKSLKLSKMQKAGFLYYEDLASRVSKEEADAVTLIVKNTVRTFLPDALVTITGGFRRGKPVGHDVDFLITNPGGKEDDELLHKVVDLLKKQGLLLYEDIKESTFVEGQLPSHKIDAMDNFQKCFAILKLYQPGVDNSAVGTSKKSDMAEVKDWKAIRVDLVITPFEQYAYALLGWTGSKEFRRDLRRYAEEERGMILDNHALYDLKKRIFLKAGSEEEIFAHLGLDYVEPWERNA

SEQ ID NO: 2591 - DNA, 1182 bp, synthetic construct
  misc_feature 1..1182: note = Variant of terminal deoxynucleotidyl transferase
  source 1..1182: mol_type = other DNA
atgcatcaccaccatcatcatgggggttctggtcatccgccaagcaataccccggagggggaggtgccgagcgttatcgcccgtccggttagtcagtacgcgtgccagcgcaagaccacgctgaataactacaacaaaaagttcaccgacgcgctggagatcatggccgagaactacaaatttaaagagaacctgatcgcgtgtctggaagccaagcgcgccgcgagtattctgaaatatctgccgttcgaggttaccagcatgaaagacatccaaggtctgccgtgcattaccgaccaagttcgtgacgtgatcgaggagatcatcgaagagggcgagagcagccgtgttaaagaagttctcaatgacgagcgctacaaggcctttaagcagttctccagcgtgttcggtgtgggcgtgaaaaccgcggaaaagtggtaccgtatgggcctccgtacggttgaagaagcacgcgccagtaagagtctgaagctgagcaagatgcagaaggcgggctttctgtattacgaggatctggcgagccgcgttagtaaagaagaagccgatgccgttacgctcatcgtgaagaacacggtgcgtacctttctgccggatgcgctggtgaccatcaccggcggtttccgccgtggcaaacctatgggccacgacgttgactttctgatcacgctgccgggcggcaaagaggatgacgagctgctccacaaagtggttgatctgctcaagacgcaaggtctgctgctgtacgaagacatcaaagagagcacgttcgtggaggggcaactgccaagtcgtaaaatcgacgccatggacaacttccagaagtgcttcgccattctcaagctgtaccagccgggcgtggataacagtgcggttgggacgagtaagaaaagtgacatggctgaggttaaggattggaaagcgattcgtgtggatctggtgatcacgccattcgagcagtacgcctatgcgctgctcggttggacgggcagcaaagaatttcgtcgcgatctgcgccgctatgcggaggaagagcgcggcatgatcctcgacaaccatgccctctacgacctgaaaaagcgcatctttctgaaagcgggcagcgaagaagagattttcgcgcatctgggtctggattatgtggagccgtgggaacgcaacgcg

SEQ ID NO: 2592 - protein, 394 aa, synthetic construct
  REGION 1..394: note = Variant of terminal deoxynucleotidyl transferase
MHHHHHHGGSGHPPSNTPEGEVPSVIARPVSQYACQRKTTLNNYNKKFTDALEIMAENYKFKENLIACLEAKRAASILKYLPFEVTSMKDIQGLPCITDQVRDVIEEIIEEGESSRVKEVLNDERYKAFKQFSSVFGVGVKTAEKWYRMGLRTVEEARASKSLKLSKMQKAGFLYYEDLASRVSKEEADAVTLIVKNTVRTFLPDALVTITGGFRRGKPMGHDVDFLITLPGGKEDDELLHKVVDLLKTQGLLLYEDIKESTFVEGQLPSRKIDAMDNFQKCFAILKLYQPGVDNSAVGTSKKSDMAEVKDWKAIRVDLVITPFEQYAYALLGWTGSKEFRRDLRRYAEEERGMILDNHALYDLKKRIFLKAGSEEEIFAHLGLDYVEPWERNA

SEQ ID NO: 2593 - DNA, 1182 bp, synthetic construct
  misc_feature 1..1182: note = Variant of terminal deoxynucleotidyl transferase
  source 1..1182: mol_type = other DNA
atgcatcaccaccatcatcatgggggttctggtcatccgccgagcaataccccggagggggaggtgccgagcgttatcgcccgtccggttagtcagtactcgtgccagcgcaagaccacgctgaataactacaacaaaaagtttaccgacgcgctggagatcatggccgagaactacaaatttaaagagaacctgatcgcgtgtctggaagccaagcgcgccgcgagtatttttaaatatctgccgttcgaggttaccagcatgaaagacatccaaggtctgccgtgcattaccgaccaagttcgtgacgtgatcgaggagatcatcgaagagggcgagagcagccgtgttaaagaagttctcaatgacgagcgctacaaggcctttaagcagttctccagcgtgttcggtgtgggcgtgaaaaccgcggaaaagtggtaccgtatgggcctccgtacggttgaagaagcacgcgccagtaagagtctgaagctgagcaagatgcagaaggcgggctttctgtattacgaggatctggcgagcggcgttagtaaagaagaagccgatgccgttacgctcatcgtgaagaacacggtgcgtacctttctgccggatgcgctggtgaccatcaccggcggtttccgccgtggcaaacctgtgggccacgacgttgactttctgatcacgaatccgggcccgaaagaggatgacgagctgctccacaaagtggttgatctgctcaagaagcaaggtctgctgctgtacgaagacatcaaagagagcacgttcgtggaggggcaactgccaagtcataaaatcgacgccatggacaacttccagaagtgcttcgccattctcaagctgtaccagccgggcgtggataacagtgcggttgggacgagtaagaaaagtgacatggctgaggttaaggattggaaagcgattcgtgtggatctggtgatcacgccattcgagcagtacgcctatgcgctgctcggttggacgggcagcaaacaatttcgtcgcgatctgcgccgctatgcggaggaagagcgcggcatgatcctcgacaaccatgccctctacgacctgaaaaagcgcatctttctgaaagcgggcagcgaagaagagattttcgcgcatctgggtctggattatgtggagccgtgggaacgcaacgcg

SEQ ID NO: 2594 - protein, 394 aa, synthetic construct
  REGION 1..394: note = Variant of terminal deoxynucleotidyl transferase
MHHHHHHGGSGHPPSNTPEGEVPSVIARPVSQYSCQRKTTLNNYNKKFTDALEIMAENYKFKENLIACLEAKRAASIFKYLPFEVTSMKDIQGLPCITDQVRDVIEEIIEEGESSRVKEVLNDERYKAFKQFSSVFGVGVKTAEKWYRMGLRTVEEARASKSLKLSKMQKAGFLYYEDLASGVSKEEADAVTLIVKNTVRTFLPDALVTITGGFRRGKPVGHDVDFLITNPGPKEDDELLHKVVDLLKKQGLLLYEDIKESTFVEGQLPSHKIDAMDNFQKCFAILKLYQPGVDNSAVGTSKKSDMAEVKDWKAIRVDLVITPFEQYAYALLGWTGSKQFRRDLRRYAEEERGMILDNHALYDLKKRIFLKAGSEEEIFAHLGLDYVEPWERNA

SEQ ID NO: 2595 - DNA, 1182 bp, synthetic construct
  misc_feature 1..1182: note = Variant of terminal deoxynucleotidyl transferase
  source 1..1182: mol_type = other DNA
atgcatcaccaccatcatcatgggggttctggtcatccgccgagcaataccccggagggggaggtgccgagcgttatcgcccgtccggttagtcagtacgcgtgccagcgcaagaccacgctgaataactacaacaaaaagtttaccgacgcgctggagatcatggccgagaactacaaatttaaagagaacctgatcgcgtgtctggaagccaagcgcgccgcgagtatttttaaatatctgccgttcggggttaccagcatgaaagacatccaaggtctgccgtgcattaccgaccaagttcgtgacgtgatcgaggagatcatcgaagagggcgagagcagccgtgttaaagaagttctcaatgacgagcgctacaaggcctttaagcagttcaccagcgtgttcggtgtgggcgtgaaaaccgcggaaaagtggtttcgtatgggcctccgtacggttgaagaagcacgcgccagtaagagtctgaagctgagcaagatgcagaaggcgggctttctgtattacgaggatctggcgagccgcgttagtaaagaagaagccgatgccgttacgctcatcgtgaagaacacggtgcgtacctttctgccggatgcgctggtgaccatcaccggcggtttccgccgtggcaaacctatgggccacgacgttgactttctgatcacgctgccgggccctaaagaggatgacgagctgctccacaaagtggttgatctgctcaagaagcaaggtctgctgctgtacgaagacatcaaagagagcacgttcgtggaggggcaactgccaagtcgcaaaatcgacgccatggacaacttccagaagtgcttcgccattctcaagctgtaccagccgggcgtggataacagtgcggttgggacgagtaagaaaagtgacatggctgaggttaaggattggaaagcgattcgtgtggatctggtgatcacgccattcgagcagtacgcctatgcgctgctcggttggacgggcagcaaagaatttcgtcgcgatctgcgccgctatgcggaggaagagcgcggcatgatcctcgacaaccatgccctctacgacctgaaaaagcgcatctttctgaaagcgggcagcgaagaagagattttcgcgcatctgggtctggattatgtggagccgtgggaacgcaacgcg

SEQ ID NO: 2596 - protein, 394 aa, synthetic construct
  REGION 1..394: note = Variant of terminal deoxynucleotidyl transferase
MHHHHHHGGSGHPPSNTPEGEVPSVIARPVSQYACQRKTTLNNYNKKFTDALEIMAENYKFKENLIACLEAKRAASIFKYLPFGVTSMKDIQGLPCITDQVRDVIEEIIEEGESSRVKEVLNDERYKAFKQFTSVFGVGVKTAEKWFRMGLRTVEEARASKSLKLSKMQKAGFLYYEDLASRVSKEEADAVTLIVKNTVRTFLPDALVTITGGFRRGKPMGHDVDFLITLPGPKEDDELLHKVVDLLKKQGLLLYEDIKESTFVEGQLPSRKIDAMDNFQKCFAILKLYQPGVDNSAVGTSKKSDMAEVKDWKAIRVDLVITPFEQYAYALLGWTGSKEFRRDLRRYAEEERGMILDNHALYDLKKRIFLKAGSEEEIFAHLGLDYVEPWERNA

SEQ ID NO: 2597 - DNA, 1182 bp, synthetic construct
  misc_feature 1..1182: note = Variant of terminal deoxynucleotidyl transferase
  source 1..1182: mol_type = other DNA
atgcatcaccaccatcatcatgggggttctggtcatccgccgagcaataccccggagggggaggtgccgagcgttatcgcccgtccggttagtcagtacagctgccagcgcaagaccacgctgaataactacaacaaaaagtttaccgacgcgctggagatcatggccgagaactacaaatttaaagagaacctgatcgcgtgtctggaagccaagcgcgccgcgagtattctgaaatatctgccgttcgaggttaccagcatgaaagacatccaaggtctgccgtgcattaccgaccaagttcgtgacgtgatcgaggagatcatcgaagagggcgagagcagccgtgttaaagaagttctcaatgacgagcgctacaaggcctttaagcagttctccagcgtgttcggtgtgggcgtgaaaaccgcggaaaagtggtttcgtatgggcctccgtacggttgaagaagcaaaggccagtaagagtctgaagctgagcaagatgcagaaggcgggctttctgtattacgaggatctggcgagccgcgttagtaaagaagaagccgatgccgttacgctcatcgtgaagaacacggtgcgtacctttctgccggatgcgctggtgaccatcaccggcggtttccgccgtggcaaacctatgggccacgacgttgactttctgatcacgaatccgggcccgaaagaggatgacgagctgctccacaaagtggttgatctgctcaagaagcaaggtctgctgctgtacgaagacatcaaagagagcacgttcgtggaggggcaactgccaagtcgtaaaatcgacgccatggacaacttccagaagtgcttcgccattctcaagctgtaccagccgggcgtggataacagtgcggttgggacgagtaagaaaagtgacatgggtgaggttaaggattggaaagcgattcgtgtggatctggtgatcacgccattcgagcagtacgcctatgcgctgctcggttggacgggcagcaaagaatttcgtcgcgatctgcgccgctatgcggaggaagagcgcggcatgatcctcgacaaccatgccctctacgacctgaaaaagcgcatctttctgaaagcgggcagcgaagaagagattttcgcgcatctgggtctggattatgtggagccgtgggaacgcaacgcg

SEQ ID NO: 2598 - protein, 394 aa, synthetic construct
  REGION 1..394: note = Variant of terminal deoxynucleotidyl transferase
MHHHHHHGGSGHPPSNTPEGEVPSVIARPVSQYSCQRKTTLNNYNKKFTDALEIMAENYKFKENLIACLEAKRAASILKYLPFEVTSMKDIQGLPCITDQVRDVIEEIIEEGESSRVKEVLNDERYKAFKQFSSVFGVGVKTAEKWFRMGLRTVEEAKASKSLKLSKMQKAGFLYYEDLASRVSKEEADAVTLIVKNTVRTFLPDALVTITGGFRRGKPMGHDVDFLITNPGPKEDDELLHKVVDLLKKQGLLLYEDIKESTFVEGQLPSRKIDAMDNFQKCFAILKLYQPGVDNSAVGTSKKSDMGEVKDWKAIRVDLVITPFEQYAYALLGWTGSKEFRRDLRRYAEEERGMILDNHALYDLKKRIFLKAGSEEEIFAHLGLDYVEPWERNA

SEQ ID NO: 2599 - DNA, 1182 bp, synthetic construct
  misc_feature 1..1182: note = Variant of terminal deoxynucleotidyl transferase
  source 1..1182: mol_type = other DNA
atgcatcaccaccatcatcatgggggttctggtcatccgccgagcaataccccggagggggaggtgccgagcgttatcgcccgtccggttagtcagtacagctgccagcgcaagaccacgctgaataactacaacaaaaagctgaccgacgcgctggagatcatggccgagaactacaaatttaaagagaacctgatcgcgtgtctggaagccaagcgcgccgcgagtatttttaaatatctgccgttcgaggttaccagcatgaaagacatccaaggtctgccgtgcattaccgaccaagttcgtgacgtgatcgaggagatcatcgaagagggcgagagcagccgtgttaaagaagttctcaatgacgagcgctacaaggcctttaagcagttcaccagcgtgttcggtgtgggcgtgaaaaccgcggaaaagtggtttcgtatgggcctccgtacggttgaagaagcacgcgccagtaagagtctgaagctgagcaagatgcagaaggcgggctttctgtattacgaggatctggcgagccgcgttagtaaagaagaagccgatgccgttacgctcatcgtgaagaacacggtgcgtacctttctgccggatgcgctggtgaccatcaccggcggtttccgccgtggcaaacctatgggccacgacgttgactttctgatcacgctgccgggccctaaagaggatgacgagctgctccacaaagtggttgatctgctcaagaagcaaggtctgctgctgtacgaagacatcaaagagagcacgttcgtggaggggcaactgccaagtcgcaaaatcgacgccatggacaacttccagaagtgcttcgccattctcaagctgtaccagccgggcgtggataacagtgcggttgggacgagtaagaaaagtgacatggccgaggttaaggattggaaagcgattcgtgtggatctggtgatcacgccattcgagcagtacgcctatgcgctgctcggttggacgggcagcaaacaatttcgtcgcgatctgcgccgctatgcggaggaagagcgcggcatgatcctcgacaaccatgccctctacgacctgaaaaagcgcatctttctgaaagcgggcagcgaagaagagattttcgcgcatctgggtctggattatgtggagccgtgggaacgcaacgcg

SEQ ID NO: 2600 - protein, 394 aa, synthetic construct
  REGION 1..394: note = Variant of terminal deoxynucleotidyl transferase
MHHHHHHGGSGHPPSNTPEGEVPSVIARPVSQYSCQRKTTLNNYNKKLTDALEIMAENYKFKENLIACLEAKRAASIFKYLPFEVTSMKDIQGLPCITDQVRDVIEEIIEEGESSRVKEVLNDERYKAFKQFTSVFGVGVKTAEKWFRMGLRTVEEARASKSLKLSKMQKAGFLYYEDLASRVSKEEADAVTLIVKNTVRTFLPDALVTITGGFRRGKPMGHDVDFLITLPGPKEDDELLHKVVDLLKKQGLLLYEDIKESTFVEGQLPSRKIDAMDNFQKCFAILKLYQPGVDNSAVGTSKKSDMAEVKDWKAIRVDLVITPFEQYAYALLGWTGSKQFRRDLRRYAEEERGMILDNHALYDLKKRIFLKAGSEEEIFAHLGLDYVEPWERNA

SEQ ID NO: 2601 - DNA, 1182 bp, synthetic construct
  misc_feature 1..1182: note = Variant of terminal deoxynucleotidyl transferase
  source 1..1182: mol_type = other DNA
atgcatcaccaccatcatcatgggggttctggtcatccgccgagcaataccccggagggggaggtgccgagcgttatcgcccgtccggttagtcagtactcgtgccagcgcaagaccacgctgaataactacaacaaaaagttcaccgacgcgctggagatcatggccgagaactacaaatttaaagagaacctgatcgcgtgtctggaagccaagcgcgccgcgagtatttttaaatatctgccgttcgaggttaccagcatgaaagacatccaaggtctgccgtgcattaccgaccaagttcgtgacgtgatcgaggagatcatcgaagagggcgagagcagccgtgttaaagaagttctcaatgacgagcgctacaaggcctttaagcagttcaccagcgtgttcggtgtgggcgtgaaaaccgcggaaaagtggtaccgtatgggcctccgtacggttgaagaagcacgcgccagtaagagtctgaagctgagcaagatgcagaaggcgggctttctgtattacgaggatctggcgagcggcgttagtaaagaagaagccgatgccgttacgctcatcgtgaagaacacggtgcgtacctttctgccggatgcgctggtgaccatcaccggcggtttccgccgtggcaaacctatgggccacgacgttgactttctgatcacgaatccgggcccgaaagaggatgacgagctgctccacaaagtggttgatctgctcaagaagcaaggtctgctgctgtacgaagacatcaaagagagcacgttcgtggaggggcaactgccaagtcgcaaaatcgacgccatggacaacttccagaagtgcttcgccattctcaagctgtaccagccgggcgtggataacagtgcggttgggacgagtaagaaaagtgacatggccgaggttaaggattggaaagcgattcgtgtggatctggtgatcacgccattcgagcagtacgcctatgcgctgctcggttggacgggcagcaaacaatttcgtcgcgatctgaagcgctatgcggaggaagagcgcggcatgatcctcgacaaccatgccctctacgacctgaaaaagcgcatctttctgaaagcgggcagcgaagaagagattttcgcgcatctgggtctggattatgtggagccgtgggaacgcaacgcg

SEQ ID NO: 2602 - protein, 394 aa, synthetic construct
  REGION 1..394: note = Variant of terminal deoxynucleotidyl transferase
MHHHHHHGGSGHPPSNTPEGEVPSVIARPVSQYSCQRKTTLNNYNKKFTDALEIMAENYKFKENLIACLEAKRAASIFKYLPFEVTSMKDIQGLPCITDQVRDVIEEIIEEGESSRVKEVLNDERYKAFKQFTSVFGVGVKTAEKWYRMGLRTVEEARASKSLKLSKMQKAGFLYYEDLASGVSKEEADAVTLIVKNTVRTFLPDALVTITGGFRRGKPMGHDVDFLITNPGPKEDDELLHKVVDLLKKQGLLLYEDIKESTFVEGQLPSRKIDAMDNFQKCFAILKLYQPGVDNSAVGTSKKSDMAEVKDWKAIRVDLVITPFEQYAYALLGWTGSKQFRRDLKRYAEEERGMILDNHALYDLKKRIFLKAGSEEEIFAHLGLDYVEPWERNA

SEQ ID NO: 2603 - DNA, 1182 bp, synthetic construct
  misc_feature 1..1182: note = Variant of terminal deoxynucleotidyl transferase
  source 1..1182: mol_type = other DNA
atgcatcaccaccatcatcatgggggttctggtcatccgccgagcaataccccggagggggaggtgccgagcgttatcgcccgtccggttagtcagtacgcgtgccagcgcaagaccacgctgaataactacaacaaaaagttgaccgacgcgctggagatcatggccgagaactacaaatttaaagagaacctgatcgcgtgtctggaagccaagcgcgccgcgagtatttttaaatatctgccgttcgaggttaccagcatgaaagacatccaaggtctgccgtgcattaccgaccaagttcgtgacgtgatcgaggagatcatcgaagagggcgagagcagccgtgttaaagaagttctcaatgacgagcgctacaaggcctttaagcagttcaccagcgtgttcggtgtgggcgtgaaaaccgcggaaaagtggttccgtatgggcctccgtacggttgaagaagcacgcgccagtaagagtctgaagctgagcaagatgcagaaggcgggctttctgtattacgaggatctggcgagcggcgttagtaaagaagaagccgatgccgttacgctcatcgtgaagaacacggtgcgtacctttctgccggatgcgctggtgaccatcaccggcggtttccgccgtggcaaacctatgggccacgacgttgactttctgatcacgaacccgggccgcaaagaggatgacgagctgctccacaaagtggttgatctgctcaagaagcaaggtctgctgctgtacgaagacatcaaagagagcacgttcgtggaggggcaactgccaagtcgcaaaatcgacgccatggacaacttccagaagtgcttcgccattctcaagctgtaccagccgggcgtggataacagtgcggttgggacgagtaagaaaagtgacatggccgaggttaaggattggaaagcggttcgtgtggatctggtgatcacgccattcgagcagtacgcctatgcgctgctcggttggacgggcagcaaagaatttcgtcgcgatctgaagcgctatgcggaggaagagcgcggcatgatcctcgacaaccatgccctctacgacctgaaaaagcgcatctttctgaaagcgggcagcgaagaagagattttcgcgcatctgggtctggattatgtggagccgtgggaacgcaacgcg

SEQ ID NO: 2604 - protein, 394 aa, synthetic construct
  REGION 1..394: note = Variant of terminal deoxynucleotidyl transferase
MHHHHHHGGSGHPPSNTPEGEVPSVIARPVSQYACQRKTTLNNYNKKLTDALEIMAENYKFKENLIACLEAKRAASIFKYLPFEVTSMKDIQGLPCITDQVRDVIEEIIEEGESSRVKEVLNDERYKAFKQFTSVFGVGVKTAEKWFRMGLRTVEEARASKSLKLSKMQKAGFLYYEDLASGVSKEEADAVTLIVKNTVRTFLPDALVTITGGFRRGKPMGHDVDFLITNPGRKEDDELLHKVVDLLKKQGLLLYEDIKESTFVEGQLPSRKIDAMDNFQKCFAILKLYQPGVDNSAVGTSKKSDMAEVKDWKAVRVDLVITPFEQYAYALLGWTGSKEFRRDLKRYAEEERGMILDNHALYDLKKRIFLKAGSEEEIFAHLGLDYVEPWERNA

SEQ ID NO: 2605 - DNA, 1182 bp, synthetic construct
  misc_feature 1..1182: note = Variant of terminal deoxynucleotidyl transferase
  source 1..1182: mol_type = other DNA
atgcatcaccaccatcatcatgggggttctggtcatccgccgagcaataccccggagggggaggtgccgagcgttatcgcccgtccggttagtcagtacagctgccagcgcaagaccacgctgaataactacaacaaaaagtttaccgacgcgctggagatcatggccgagaactacaaatttaaagagaacctgatcgcgtgtctggaagccaagcgcgccgcgagtattctgaaatatctgccgttcgaggttaccagcatgaaagacatccaaggtctgccgtgcattaccgaccaagttcgtgacgtgatcgaggagatcatcgaagagggcgagagcagccgtgttaaagaagttctcaatgacgagcgctacaaggcctttaagcagttcaccagcgtgttcggtgtgggcgtgaaaaccgcggaaaagtggtttcgtatgggcctccgtacggttgaagaagcaaaggccagtaagagtctgaagctgagcaagatgcagaaggcgggctttctgtattacgaggatctggcgagccgcgttagtaaagaagaagccgatgccgttacgctcatcgtgaagaacacggtgcgtacctttctgccggatgcgctggtgaccatcaccggcggtttccgccgtggcaaacctatgggccacgacgttgactttctgatcacgaatccgggcccgaaagaggatgacgagctgctccacaaagtggttgatctgctcaagacgcaaggtctgctgctgtacgaagacatcaaagagagcacgttcgtggaggggcaactgccaagtcgcaaaatcgacgccatggacaacttccagaagtgcttcgccattctcaagctgtaccagccgggcgtggataacagtgcggttgggacgagtaagaaaagtgacatggccgaggttaaggattggaaagcgattcgtgtggatctggtgatcacgccattcgagcagtacgcctatgcgctgctcggttggacgggcagcaaagaatttcgtcgcgatctgcgccgctatgcggaggaagagcgcggcatgatcctcgacaaccatgccctctacgacctgaaaaagcgcatctttctgaaagcgggcagcgaagaagagattttcgcgcatctgggtctggattatgtggagccgtgggaacgcaacgcg

SEQ ID NO: 2606 - protein, 394 aa, synthetic construct
  REGION 1..394: note = Variant of terminal deoxynucleotidyl transferase
MHHHHHHGGSGHPPSNTPEGEVPSVIARPVSQYSCQRKTTLNNYNKKFTDALEIMAENYKFKENLIACLEAKRAASILKYLPFEVTSMKDIQGLPCITDQVRDVIEEIIEEGESSRVKEVLNDERYKAFKQFTSVFGVGVKTAEKWFRMGLRTVEEAKASKSLKLSKMQKAGFLYYEDLASRVSKEEADAVTLIVKNTVRTFLPDALVTITGGFRRGKPMGHDVDFLITNPGPKEDDELLHKVVDLLKTQGLLLYEDIKESTFVEGQLPSRKIDAMDNFQKCFAILKLYQPGVDNSAVGTSKKSDMAEVKDWKAIRVDLVITPFEQYAYALLGWTGSKEFRRDLRRYAEEERGMILDNHALYDLKKRIFLKAGSEEEIFAHLGLDYVEPWERNA

SEQ ID NO: 2607 - DNA, 1182 bp, synthetic construct
  misc_feature 1..1182: note = Variant of terminal deoxynucleotidyl transferase
  source 1..1182: mol_type = other DNA
atgcatcaccaccatcatcatgggggttctggtcatccgccgagcaataccccggagggggaggtgccgagcgttatcgcccgtccggttagtcagtacgcgtgccagcgcaagaccacgctgaataactacaacaaaaagctgaccgacgcgctggagatcatggccgagaactacaaatttaaagagaacctgatcgcgtgtctggaagccaagcgcgccgcgagtatttttaaatatctgccgttcgaggttaccagcatgaaagacatccaaggtctgccgtgcattaccgaccaagttcgtgacgtgatcgaggagatcatcgaagagggcgagagcagccgtgttaaagaagttctcaatgacgagcgctacaaggcctttaagcagttcaccagcgtgttcggtgtgggcgtgaaaaccgcggaaaagtggttccgtatgggcctccgtacggttgaagaagcaaaggccagtaagagtctgaagctgagcaagatgcagaaggcgggctttctgtattacgaggatctggcgagcggcgttagtaaagaagaagccgatgccgttacgctcatcgtgaagaacacggtgcgtacctttctgccggatgcgctggtgaccatcaccggcggtttccgccgtggcaaacctgtgggccacgacgttgactttctgatcacgaacccgggccgcaaagaggatgacgagctgctccacaaagtggttgatctgctcaagaagcaaggtctgctgctgtacgaagacatcaaagagagcacgttcgtggaggggcaactgccaagtcgtaaaatcgacgccatggacaacttccagaagtgcttcgccattctcaagctgtaccagccgggcgtggataacagtgcggttgggacgagtaagaaaagtgacatggctgaggttaaggattggaaagcgattcgtgtggatctggtgatcacgccattcgagcagtacgcctatgcgctgctcggttggacgggcagcaaagaatttcgtcgcgatctgcgtcgctatgcggaggaagagcgcggcatgatcctcgacaaccatgccctctacgacctgaaaaagcgcatctttctgaaagcgggcagcgaagaagagattttcgcgcatctgggtctggattatgtggagccgtgggaacgcaacgcg

SEQ ID NO: 2608 - protein, 394 aa, synthetic construct
  REGION 1..394: note = Variant of terminal deoxynucleotidyl transferase
MHHHHHHGGSGHPPSNTPEGEVPSVIARPVSQYACQRKTTLNNYNKKLTDALEIMAENYKFKENLIACLEAKRAASIFKYLPFEVTSMKDIQGLPCITDQVRDVIEEIIEEGESSRVKEVLNDERYKAFKQFTSVFGVGVKTAEKWFRMGLRTVEEAKASKSLKLSKMQKAGFLYYEDLASGVSKEEADAVTLIVKNTVRTFLPDALVTITGGFRRGKPVGHDVDFLITNPGRKEDDELLHKVVDLLKKQGLLLYEDIKESTFVEGQLPSRKIDAMDNFQKCFAILKLYQPGVDNSAVGTSKKSDMAEVKDWKAIRVDLVITPFEQYAYALLGWTGSKEFRRDLRRYAEEERGMILDNHALYDLKKRIFLKAGSEEEIFAHLGLDYVEPWERNA

SEQ ID NO: 2609 - DNA, 1182 bp, synthetic construct
  misc_feature 1..1182: note = Variant of terminal deoxynucleotidyl transferase
  source 1..1182: mol_type = other DNA
atgcatcaccaccatcatcatgggggttctggtcatccgccgagcaataccccggagggggaggtgccgagcgttatcgcccgtccggttagtcagtacagctgccagcgcaagaccacgctgaataactacaacaaaaagtttaccgacgcgctggagatcatggccgagaactacaaatttaaagagaacctgatcgcgtgtctggaagccaagcgcgccgcgagtattctgaaatatctgccgttcgaggttaccagcatgaaagacatccaaggtctgccgtgcattaccgaccaagttcgtgacgtgatcgaggagatcatcgaagagggcgagagcagccgtgttaaagaagttctcaatgacgagcgctacaaggcctttaagcagttcaccagcgtgttcggtgtgggcgtgaaaaccgcggaaaagtggtaccgtatgggcctccgtacggttgaagaagcacgcgccagtaagagtctgaagctgagcaagatgcagaaggcgggctttctgtattacgaggatctggcgagccgcgttagtaaagaagaagccgatgccgttacgctcatcgtgaagaacacggtgcgtacctttctgccggatgcgctggtgaccatcaccggcggtttccgccgtggcaaacctgtgggccacgacgttgactttctgatcacgaatccgggcccgaaagaggatgacgagctgctccacaaagtggttgatctgctcaagacgcaaggtctgctgctgtacgaagacatcaaagagagcacgttcgtggaggggcaactgccaagtcgcaaaatcgacgccatggacaacttccagaagtgcttcgccattctcaagctgtaccagccgggcgtggataacagtgcggttgggacgagtaagaaaagtgacatggccgaggttaaggattggaaagcggttcgtgtggatctggtgatcacgccattcgagcagtacgcctatgcgctgctcggttggacgggcagcaaagaatttcgtcgcgatctgcgtcgctatgcggaggaagagcgcggcatgatcctcgacaaccatgccctctacgacctgaaaaagcgcatctttctgaaagcgggcagcgaagaagagattttcgcgcatctgggtctggattatgtggagccgtgggaacgcaacgcg

SEQ ID NO: 2610 - protein, 394 aa, synthetic construct
  REGION 1..394: note = Variant of terminal deoxynucleotidyl transferase
MHHHHHHGGSGHPPSNTPEGEVPSVIARPVSQYSCQRKTTLNNYNKKFTDALEIMAENYKFKENLIACLEAKRAASILKYLPFEVTSMKDIQGLPCITDQVRDVIEEIIEEGESSRVKEVLNDERYKAFKQFTSVFGVGVKTAEKWYRMGLRTVEEARASKSLKLSKMQKAGFLYYEDLASRVSKEEADAVTLIVKNTVRTFLPDALVTITGGFRRGKPVGHDVDFLITNPGPKEDDELLHKVVDLLKTQGLLLYEDIKESTFVEGQLPSRKIDAMDNFQKCFAILKLYQPGVDNSAVGTSKKSDMAEVKDWKAVRVDLVITPFEQYAYALLGWTGSKEFRRDLRRYAEEERGMILDNHALYDLKKRIFLKAGSEEEIFAHLGLDYVEPWERNA

SEQ ID NO: 2611 - DNA, 1182 bp, synthetic construct
  misc_feature 1..1182: note = Variant of terminal deoxynucleotidyl transferase
  source 1..1182: mol_type = other DNA
atgcatcaccaccatcatcatgggggttctggtcatccgccgagcaataccccggagggggaggtgccgagcgttatcgcccgtccggttagtcagtacagctgccagcgcaagaccacgctgaataactacaacaaaaagttcaccgacgcgctggagatcatggccgagaactacaaatttaaagagaacctgatcgcgtgtctggaagccaagcgcgccgcgagtattctgaaatatctgccgttcgaggttaccagcatgaaagacatccaaggtctgccgtgcattaccgaccaagttcgtgacgtgatcgaggagatcatcgaagagggcgagagcagccgtgttaaagaagttctcaatgacgagcgctacaaggcctttaagcagttcaccagcgtgttcggtgtgggcgtgaaaaccgcggaaaagtggtaccgtatgggcctccgtacggttgaagaagcacgcgccagtaagagtctgaagctgagcaagatgcagaaggcgggctttctgtattacgaggatctggcgagccgcgttagtaaagaagaagccgatgccgttacgctcatcgtgaagaacacggtgcgtacctttctgccggatgcgctggtgaccatcaccggcggtttccgccgtggcaaacctatgggccacgacgttgactttctgatcacgaacccgggcggcaaagaggatgacgagctgctccacaaagtggttgatctgctcaagacgcaaggtctgctgctgtacgaagacatcaaagagagcacgttcgtggaggggcaactgccaagtcgtaaaatcgacgccatggacaacttccagaagtgcttcgccattctcaagctgtaccagccgggcgtggataacagtgcggttgggacgagtaagaaaagtgacatggccgaggttaaggattggaaagcgattcgtgtggatctggtgatcacgccattcgagcagtacgcctatgcgctgctcggttggacgggcagcaaagaatttcgtcgcgatctgcgccgctatgcggaggaagagcgcggcatgatcctcgacaaccatgccctctacgacctgaaaaagcgcatctttctgaaagcgggcagcgaagaagagattttcgcgcatctgggtctggattatgtggagccgtgggaacgcaacgcg

SEQ ID NO: 2612 - protein, 394 aa, synthetic construct
  REGION 1..394: note = Variant of terminal deoxynucleotidyl transferase
MHHHHHHGGSGHPPSNTPEGEVPSVIARPVSQYSCQRKTTLNNYNKKFTDALEIMAENYKFKENLIACLEAKRAASILKYLPFEVTSMKDIQGLPCITDQVRDVIEEIIEEGESSRVKEVLNDERYKAFKQFTSVFGVGVKTAEKWYRMGLRTVEEARASKSLKLSKMQKAGFLYYEDLASRVSKEEADAVTLIVKNTVRTFLPDALVTITGGFRRGKPMGHDVDFLITNPGGKEDDELLHKVVDLLKTQGLLLYEDIKESTFVEGQLPSRKIDAMDNFQKCFAILKLYQPGVDNSAVGTSKKSDMAEVKDWKAIRVDLVITPFEQYAYALLGWTGSKEFRRDLRRYAEEERGMILDNHALYDLKKRIFLKAGSEEEIFAHLGLDYVEPWERNA

SEQ ID NO: 2613 - DNA, 1182 bp, synthetic construct
  misc_feature 1..1182: note = Variant of terminal deoxynucleotidyl transferase
  source 1..1182: mol_type = other DNA
atgcatcaccaccatcatcatgggggttctggtcatccgccgagcaataccccggagggggaggtgccgagcgttatcgcccgtccggttagtcagtacagctgccagcgcaagaccacgctgaataactacaacaaaaagctgaccgacgcgctggagatcatggccgagaactacaaatttaaagagaacctgatcgcgtgtctggaagccaagcgcgccgcgagtattctgaaatatctgccgttcgaggttaccagcatgaaagacatccaaggtctgccgtgcattaccgaccaagttcgtgacgtgatcgaggagatcatcgaagagggcgagagcagccgtgttaaagaagttctcaatgacgagcgctacaaggcctttaagcagttcaccagcgtgttcggtgtgggcgtgaaaaccgcggaaaagtggtttcgtatgggcctccgtacggttgaagaagcaaaggccagtaagagtctgaagctgagcaagatgcagaaggcgggctttctgtattacgaggatctggcgagcatggttagtaaagaagaagccgatgccgttacgctcatcgtgaagaacacggtgcgtacctttctgccggatgcgctggtgaccatcaccggcggtttccgccgtggcaaacctatgggccacgacgttgactttctgatcacgaatccgggcccgaaagaggatgacgagctgctccacaaagtggttgatctgctcaagaagcaaggtctgctgctgtacgaagacatcaaagagagcacgttcgtggaggggcaactgccaagtcgcaaaatcgacgccatggacaacttccagaagtgcttcgccattctcaagctgtaccagccgggcgtggataacagtgcggttgggacgagtaagaaaagtgacatggctgaggttaaggattggaaagcgattcgtgtggatctggtgatcacgccattcgagcagtacgcctatgcgctgctcggttggacgggcagcaaagaatttcgtcgcgatctgcgccgctatgcggaggaagagcgcggcatgatcctcgacaaccatgccctctacgacctgaaaaagcgcatctttctgaaagcgggcagcgaagaagagattttcgcgcatctgggtctggattatgtggagccgtgggaacgcaacgcg

SEQ ID NO: 2614 - protein, 394 aa, synthetic construct
  REGION 1..394: note = Variant of terminal deoxynucleotidyl transferase
MHHHHHHGGSGHPPSNTPEGEVPSVIARPVSQYSCQRKTTLNNYNKKLTDALEIMAENYKFKENLIACLEAKRAASILKYLPFEVTSMKDIQGLPCITDQVRDVIEEIIEEGESSRVKEVLNDERYKAFKQFTSVFGVGVKTAEKWFRMGLRTVEEAKASKSLKLSKMQKAGFLYYEDLASMVSKEEADAVTLIVKNTVRTFLPDALVTITGGFRRGKPMGHDVDFLITNPGPKEDDELLHKVVDLLKKQGLLLYEDIKESTFVEGQLPSRKIDAMDNFQKCFAILKLYQPGVDNSAVGTSKKSDMAEVKDWKAIRVDLVITPFEQYAYALLGWTGSKEFRRDLRRYAEEERGMILDNHALYDLKKRIFLKAGSEEEIFAHLGLDYVEPWERNA

SEQ ID NO: 2615 - DNA, 1182 bp, synthetic construct
  misc_feature 1..1182: note = Variant of terminal deoxynucleotidyl transferase
  source 1..1182: mol_type = other DNA
atgcatcaccaccatcatcatgggggttctggtcatccgccgagcaataccccggagggggaggtgccgagcgttatcgcccgtccggttagtcagtacagctgccagcgcaagaccacgctgaataactacaacaaaaagctgaccgacgcgctggagatcatggccgagaactacaaatttaaagagaacctgatcgcgtgtctggaagccaagcgcgccgcgagtattctgaaatatctgccgttcgaggttaccagcatgaaagacatccaaggtctgccgtgcattaccgaccaagttcgtgacgtgatcgaggagatcatcgaagagggcgagagcagccgtgttaaagaagttctcaatgacgagcgctacaaggcctttaagcagttcaccagcgtgttcggtgtgggcgtgaaaaccgcggaaaagtggtttcgtatgggcctccgtacggttgaagaagcaaaggccagtaagagtctgaagctgagcaagatgcagaaggcgggctttctgtattacgaggatctggcgagccgcgttagtaaagaagaagccgatgccgttacgctcatcgtgaagaacacggtgcgtacctttctgccggatgcgctggtgaccatcaccggcggtttccgccgtggcaaacctatgggccacgacgttgactttctgatcacgaatccgggcccgaaagaggatgacgagctgctccacaaagtggttgatctgctcaagaagcaaggtctgctgctgtacgaagacatcaaagagagcacgttcgtggaggggcaactgccaagtcgcaaaatcgacgccatggacaacttccagaagtgcttcgccattctcaagctgtaccagccgggcgtggataacagtgcggttgggacgagtaagaaaagtgacatggccgaggttaaggattggaaagcgattcgtgtggatctggtgatcacgccattcgagcagtacgcctatgcgctgctcggttggacgggcagcaaacaatttcgtcgcgatctgcgccgctatgcggaggaagagcgcggcatgatcctcgacaaccatgccctctacgacctgaaaaagcgcatctttctgaaagcgggcagcgaagaagagattttcgcgcatctgggtctggattatgtggagccgtgggaacgcaacgcg

SEQ ID NO: 2616 - protein, 394 aa, synthetic construct
  REGION 1..394: note = Variant of terminal deoxynucleotidyl transferase
MHHHHHHGGSGHPPSNTPEGEVPSVIARPVSQYSCQRKTTLNNYNKKLTDALEIMAENYKFKENLIACLEAKRAASILKYLPFEVTSMKDIQGLPCITDQVRDVIEEIIEEGESSRVKEVLNDERYKAFKQFTSVFGVGVKTAEKWFRMGLRTVEEAKASKSLKLSKMQKAGFLYYEDLASRVSKEEADAVTLIVKNTVRTFLPDALVTITGGFRRGKPMGHDVDFLITNPGPKEDDELLHKVVDLLKKQGLLLYEDIKESTFVEGQLPSRKIDAMDNFQKCFAILKLYQPGVDNSAVGTSKKSDMAEVKDWKAIRVDLVITPFEQYAYALLGWTGSKQFRRDLRRYAEEERGMILDNHALYDLKKRIFLKAGSEEEIFAHLGLDYVEPWERNA

SEQ ID NO: 2617 - DNA, 1182 bp, synthetic construct
  misc_feature 1..1182: note = Variant of terminal deoxynucleotidyl transferase
  source 1..1182: mol_type = other DNA
atgcatcaccaccatcatcatgggggttctggtcatccgccgagcaataccccggagggggaggtgccgagcgttatcgcccgtccggttagtcagtactcgtgccagcgcaagaccacgctgaataactacaacaaaaagtttaccgacgcgctggagatcatggccgagaactacaaatttaaagagaacctgatcgcgtgtctggaagccaagcgcgccgcgagtattctgaaatatctgccgttcgaggttaccagcatgaaagacatccaaggtctgccgtgcattaccgaccaagttcgtgacgtgatcgaggagatcatcgaagagggcgagagcagccgtgttaaagaagttctcaatgacgagcgctacaaggcctttaagcagttcaccagcgtgttcggtgtgggcgtgaaaaccgcggaaaagtggtaccgtatgggcctccgtacggttgaagaagcaaaggccagtaagagtctgaagctgagcaagatgcagaaggcgggctttctgtattacgaggatctggcgagccgcgttagtaaagaagaagccgatgccgttacgctcatcgtgaagaacacggtgcgtacctttctgccggatgcgctggtgaccatcaccggcggtttccgccgtggcaaacctatgggccacgacgttgactttctgatcacgaatccgggcccgaaagaggatgacgagctgctccacaaagtggttgatctgctcaagaagcaaggtctgctgctgtacgaagacatcaaagagagcacgttcgtggaggggcaactgccaagtcgcaaaatcgacgccatggacaacttccagaagtgcttcgccattctcaagctgtaccagccgggcgtggataacagtgcggttgggacgagtaagaaaagtgacatggctgaggttaaggattggaaagcgattcgtgtggatctggtgatcacgccattcgagcagtacgcctatgcgctgctcggttggacgggcagcaaacaatttcgtcgcgatctgcgccgctatgcggaggaagagcgcggcatgatcctcgacaaccatgccctctacgacctgaaaaagcgcatctttctgaaagcgggcagcgaagaagagattttcgcgcatctgggtctggattatgtggagccgtgggaacgcaacgcg

SEQ ID NO: 2618 - protein, 394 aa, synthetic construct
  REGION 1..394: note = Variant of terminal deoxynucleotidyl transferase
MHHHHHHGGSGHPPSNTPEGEVPSVIARPVSQYSCQRKTTLNNYNKKFTDALEIMAENYKFKENLIACLEAKRAASILKYLPFEVTSMKDIQGLPCITDQVRDVIEEIIEEGESSRVKEVLNDERYKAFKQFTSVFGVGVKTAEKWYRMGLRTVEEAKASKSLKLSKMQKAGFLYYEDLASRVSKEEADAVTLIVKNTVRTFLPDALVTITGGFRRGKPMGHDVDFLITNPGPKEDDELLHKVVDLLKKQGLLLYEDIKESTFVEGQLPSRKIDAMDNFQKCFAILKLYQPGVDNSAVGTSKKSDMAEVKDWKAIRVDLVITPFEQYAYALLGWTGSKQFRRDLRRYAEEERGMILDNHALYDLKKRIFLKAGSEEEIFAHLGLDYVEPWERNA

SEQ ID NO: 2619 - DNA, 1182 bp, synthetic construct
  misc_feature 1..1182: note = Variant of terminal deoxynucleotidyl transferase
  source 1..1182: mol_type = other DNA
atgcatcaccaccatcatcatgggggttctggtcatccgccgagcaataccccggagggggaggtgccgagcgttatcgcccgtccggttagtcagtactcgtgccagcgcaagaccacgctgaataactacaacaaaaagttcaccgacgcgctggagatcatggccgagaactacaaatttaaagagaacctgatcgcgtgtctggaagccaagcgcgccgcgagtattctgaaatatctgccgttcgaggttaccagcatgaaagacatccaaggtctgccgtgcattaccgaccaagttcgtgacgtgatcgaggagatcatcgaagagggcgagagcagccgtgttaaagaagttctcaatgacgagcgctacaaggcctttaagcagttcaccagcgtgttcggtgtgggcgtgaaaaccgcggaaaagtggttccgtatgggcctccgtacggttgaagaagcacgcgccagtaagagtctgaagctgagcaagatgcagaaggcgggctttctgtattacgaggatctggcgagccgcgttagtaaagaagaagccgatgccgttacgctcatcgtgaagaacacggtgcgtacctttctgccggatgcgctggtgaccatcaccggcggtttccgccgtggcaaacctatgggccacgacgttgactttctgatcacgaacccgggccctaaagaggatgacgagctgctccacaaagtggttgatctgctcaagaagcaaggtctgctgctgtacgaagacatcaaagagagcacgttcgtggaggggcaactgccaagtcgtaaaatcgacgccatggacaacttccagaagtgcttcgccattctcaagctgtaccagccgggcgtggataacagtgcggttgggacgagtaagaaaagtgacatggctgaggttaaggattggaaagcggttcgtgtggatctggtgatcacgccattcgagcagtacgcctatgcgctgctcggttggacgggcagcaaagaatttcgtcgcgatctgcgtcgctatgcggaggaagagcgcggcatgatcctcgacaaccatgccctctacgacctgaaaaagcgcatctttctgaaagcgggcagcgaagaagagattttcgcgcatctgggtctggattatgtggagccgtgggaacgcaacgcg

SEQ ID NO: 2620 - protein, 394 aa, synthetic construct
  REGION 1..394: note = Variant of terminal deoxynucleotidyl transferase
MHHHHHHGGSGHPPSNTPEGEVPSVIARPVSQYSCQRKTTLNNYNKKFTDALEIMAENYKFKENLIACLEAKRAASILKYLPFEVTSMKDIQGLPCITDQVRDVIEEIIEEGESSRVKEVLNDERYKAFKQFTSVFGVGVKTAEKWFRMGLRTVEEARASKSLKLSKMQKAGFLYYEDLASRVSKEEADAVTLIVKNTVRTFLPDALVTITGGFRRGKPMGHDVDFLITNPGPKEDDELLHKVVDLLKKQGLLLYEDIKESTFVEGQLPSRKIDAMDNFQKCFAILKLYQPGVDNSAVGTSKKSDMAEVKDWKAVRVDLVITPFEQYAYALLGWTGSKEFRRDLRRYAEEERGMILDNHALYDLKKRIFLKAGSEEEIFAHLGLDYVEPWERNA

SEQ ID NO: 2621 - DNA, 1182 bp, synthetic construct
  misc_feature 1..1182: note = Variant of terminal deoxynucleotidyl transferase
  source 1..1182: mol_type = other DNA
atgcatcaccaccatcatcatgggggttctggtcatccgccgagcaataccccggagggggaggtgccgagcgttatcgcccgtccggttagtcagtactcgtgccagcgcaagaccacgctgaataactacaacaaaaagctgaccgacgcgctggagatcatggccgagaactacaaatttaaagagaacctgatcgcgtgtctggaagccaagcgcgccgcgagtattctgaaatatctgccgttcgaggttaccagcatgaaagacatccaaggtctgccgtgcattaccgaccaagttcgtgacgtgatcgaggagatcatcgaagagggcgagagcagccgtgttaaagaagttctcaatgacgagcgctacaaggcctttaagcagttcaccagcgtgttcggtgtgggcgtgaaaaccgcggaaaagtggtaccgtatgggcctccgtacggttgaagaagcacgcgccagtaagagtctgaagctgagcaagatgcagaaggcgggctttctgtattacgaggatctggcgagcatggttagtaaagaagaagccgatgccgttacgctcatcgtgaagaacacggtgcgtacctttctgccggatgcgctggtgaccatcaccggcggtttccgccgtggcaaacctgtgggccacgacgttgactttctgatcacgctgccgggccctaaagaggatgacgagctgctccacaaagtggttgatctgctcaagacgcaaggtctgctgctgtacgaagacatcaaagagagcacgttcgtggaggggcaactgccaagtcataaaatcgacgccatggacaacttccagaagtgcttcgccattctcaagctgtaccagccgggcgtggataacagtgcggttgggacgagtaagaaaagtgacatgggtgaggttaaggattggaaagcggttcgtgtggatctggtgatcacgccattcgagcagtacgcctatgcgctgctcggttggacgggcagcaaacaatttcgtcgcgatctgcgccgctatgcggaggaagagcgcggcatgatcctcgacaaccatgccctctacgacctgaaaaagcgcatctttctgaaagcgggcagcgaagaagagattttcgcgcatctgggtctggattatgtggagccgtgggaacgcaacgcg

SEQ ID NO: 2622 - protein, 394 aa, synthetic construct
  REGION 1..394: note = Variant of terminal deoxynucleotidyl transferase
MHHHHHHGGSGHPPSNTPEGEVPSVIARPVSQYSCQRKTTLNNYNKKLTDALEIMAENYKFKENLIACLEAKRAASILKYLPFEVTSMKDIQGLPCITDQVRDVIEEIIEEGESSRVKEVLNDERYKAFKQFTSVFGVGVKTAEKWYRMGLRTVEEARASKSLKLSKMQKAGFLYYEDLASMVSKEEADAVTLIVKNTVRTFLPDALVTITGGFRRGKPVGHDVDFLITLPGPKEDDELLHKVVDLLKTQGLLLYEDIKESTFVEGQLPSHKIDAMDNFQKCFAILKLYQPGVDNSAVGTSKKSDMGEVKDWKAVRVDLVITPFEQYAYALLGWTGSKQFRRDLRRYAEEERGMILDNHALYDLKKRIFLKAGSEEEIFAHLGLDYVEPWERNA

SEQ ID NO: 2623 - DNA, 1182 bp, synthetic construct
  misc_feature 1..1182: note = Variant of terminal deoxynucleotidyl transferase
  source 1..1182: mol_type = other DNA
atgcatcaccaccatcatcatgggggttctggtcatccgccgagcaataccccggagggggaggtgccgagcgttatcgcccgtccggttagtcagtactcgtgccagcgcaagaccacgctgaataactacaacaaaaagctgaccgacgcgctggagatcatggccgagaactacaaatttaaagagaacctgatcgcgtgtctggaagccaagcgcgccgcgagtattctgaaatatctgccgttcgaggttaccagcatgaaagacatccaaggtctgccgtgcattaccgaccaagttcgtgacgtgatcgaggagatcatcgaagagggcgagagcagccgtgttaaagaagttctcaatgacgagcgctacaaggcctttaagcagttcaccagcgtgttcggtgtgggcgtgaaaaccgcggaaaagtggtaccgtatgggcctccgtacggttgaagaagcacgcgccagtaagagtctgaagctgagcaagatgcagaaggcgggctttctgtattacgaggatctggcgagccgcgttagtaaagaagaagccgatgccgttacgctcatcgtgaagaacacggtgcgtacctttctgccggatgcgctggtgaccatcaccggcggtttccgccgtggcaaacctatgggccacgacgttgactttctgatcacgaatccgggcccgaaagaggatgacgagctgctccacaaagtggttgatctgctcaagaagcaaggtctgctgctgtacgaagacatcaaagagagcacgttcgtggaggggcaactgccaagtcgcaaaatcgacgccatggacaacttccagaagtgcttcgccattctcaagctgtaccagccgggcgtggataacagtgcggttgggacgagtaagaaaagtgacatgggtgaggttaaggattggaaagcgattcgtgtggatctggtgatcacgccattcgagcagtacgcctatgcgctgctcggttggacgggcagcaaagaatttcgtcgcgatctgaagcgctatgcggaggaagagcgcggcatgatcctcgacaaccatgccctctacgacctgaaaaagcgcatctttctgaaagcgggcagcgaagaagagattttcgcgcatctgggtctggattatgtggagccgtgggaacgcaacgcg

SEQ ID NO: 2624 - protein, 394 aa, synthetic construct
  REGION 1..394: note = Variant of terminal deoxynucleotidyl transferase
MHHHHHHGGSGHPPSNTPEGEVPSVIARPVSQYSCQRKTTLNNYNKKLTDALEIMAENYKFKENLIACLEAKRAASILKYLPFEVTSMKDIQGLPCITDQVRDVIEEIIEEGESSRVKEVLNDERYKAFKQFTSVFGVGVKTAEKWYRMGLRTVEEARASKSLKLSKMQKAGFLYYEDLASRVSKEEADAVTLIVKNTVRTFLPDALVTITGGFRRGKPMGHDVDFLITNPGPKEDDELLHKVVDLLKKQGLLLYEDIKESTFVEGQLPSRKIDAMDNFQKCFAILKLYQPGVDNSAVGTSKKSDMGEVKDWKAIRVDLVITPFEQYAYALLGWTGSKEFRRDLKRYAEEERGMILDNHALYDLKKRIFLKAGSEEEIFAHLGLDYVEPWERNA

SEQ ID NO: 2625 - DNA, 1182 bp, synthetic construct
  misc_feature 1..1182: note = Variant of terminal deoxynucleotidyl transferase
  source 1..1182: mol_type = other DNA
atgcatcaccaccatcatcatgggggttctggtcatccgccgagcaataccccggagggggaggtgccgagcgttatcgcccgtccggttagtcagtacagctgccagcgcaagaccacgctgaataactacaacaaaaagtttaccgacgcgctggagatcatggccgagaactacaaatttaaagagaacctgatcgcgtgtctggaagccaagcgcgccgcgagtattctgaaatatctgccgttcgaggttaccagcatgaaagacatccaaggtctgccgtgcattaccgaccaagttcgtgacgtgatcgaggagatcatcgaagagggcgagagcagccgtgttaaagaagttctcaatgacgagcgctacaaggcctttaagcagttcaccagcgtgttcggtgtgggcgtgaaaaccgcggaaaagtggtttcgtatgggcctccgtacggttgaagaagcacgcgccagtaagagtctgaagctgagcaagatgcagaaggcgggctttctgtattacgaggatctggcgagccgcgttagtaaagaagaagccgatgccgttacgctcatcgtgaagaacacggtgcgtacctttctgccggatgcgctggtgaccatcaccggcggtttccgccgtggcaaacctatgggccacgacgttgactttctgatcacgaacccgggccgcaaagaggatgacgagctgctccacaaagtggttgatctgctcaagaagcaaggtctgctgctgtacgaagacatcaaagagagcacgttcgtggaggggcaactgccaagtcgcaaaatcgacgccatggacaacttccagaagtgcttcgccattctcaagctgtaccagccgggcgtggataacagtgcggttgggacgagtaagaaaagtgacatggccgaggttaaggattggaaagcgattcgtgtggatctggtgatcacgccattcgagcagtacgcctatgcgctgctcggttggacgggcagcaaagaatttcgtcgcgatctgcgccgctatgcggaggaagagcgcggcatgatcctcgacaaccatgccctctacgacctgaaaaagcgcatctttctgaaagcgggcagcgaagaagagattttcgcgcatctgggtctggattatgtggagccgtgggaacgcaacgcg

SEQ ID NO: 2626 - protein, 394 aa, synthetic construct
  REGION 1..394: note = Variant of terminal deoxynucleotidyl transferase
MHHHHHHGGSGHPPSNTPEGEVPSVIARPVSQYSCQRKTTLNNYNKKFTDALEIMAENYKFKENLIACLEAKRAASILKYLPFEVTSMKDIQGLPCITDQVRDVIEEIIEEGESSRVKEVLNDERYKAFKQFTSVFGVGVKTAEKWFRMGLRTVEEARASKSLKLSKMQKAGFLYYEDLASRVSKEEADAVTLIVKNTVRTFLPDALVTITGGFRRGKPMGHDVDFLITNPGRKEDDELLHKVVDLLKKQGLLLYEDIKESTFVEGQLPSRKIDAMDNFQKCFAILKLYQPGVDNSAVGTSKKSDMAEVKDWKAIRVDLVITPFEQYAYALLGWTGSKEFRRDLRRYAEEERGMILDNHALYDLKKRIFLKAGSEEEIFAHLGLDYVEPWERNA

SEQ ID NO: 2627 - DNA, 1182 bp, synthetic construct
  misc_feature 1..1182: note = Variant of terminal deoxynucleotidyl transferase
  source 1..1182: mol_type = other DNA
atgcatcaccaccatcatcatgggggttctggtcatccgccgagcaataccccggagggggaggtgccgagcgttatcgcccgtccggttagtcagtacgcgtgccagcgcaagaccacgctgaataactacaacaaaaagtttaccgacgcgctggagatcatggccgagaactacaaatttaaagagaacctgatcgcgtgtctggaagccaagcgcgccgcgagtattctgaaatatctgccgttcgaggttaccagcatgaaagacatccaaggtctgccgtgcattaccgaccaagttcgtgacgtgatcgaggagatcatcgaagagggcgagagcagccgtgttaaagaagttctcaatgacgagcgctacaaggcctttaagcagttcaccagcgtgttcggtgtgggcgtgaaaaccgcggaaaagtggtttcgtatgggcctccgtacggttgaagaagcaaaggccagtaagagtctgaagctgagcaagatgcagaaggcgggctttctgtattacgaggatctggcgagccgcgttagtaaagaagaagccgatgccgttacgctcatcgtgaagaacacggtgcgtacctttctgccggatgcgctggtgaccatcaccggcggtttccgccgtggcaaacctatgggccacgacgttgactttctgatcacgaacccgggccctaaagaggatgacgagctgctccacaaagtggttgatctgctcaagaagcaaggtctgctgctgtacgaagacatcaaagagagcacgttcgtggaggggcaactgccaagtcgcaaaatcgacgccatggacaacttccagaagtgcttcgccattctcaagctgtaccagccgggcgtggataacagtgcggttgggacgagtaagaaaagtgacatggccgaggttaaggattggaaagcgattcgtgtggatctggtgatcacgccattcgagcagtacgcctatgcgctgctcggttggacgggcagcaaacaatttcgtcgcgatctgcgccgctatgcggaggaagagcgcggcatgatcctcgacaaccatgccctctacgacctgaaaaagcgcatctttctgaaagcgggcagcgaagaagagattttcgcgcatctgggtctggattatgtggagccgtgggaacgcaacgcg

SEQ ID NO: 2628 - protein, 394 aa, synthetic construct
  REGION 1..394: note = Variant of terminal deoxynucleotidyl transferase
MHHHHHHGGSGHPPSNTPEGEVPSVIARPVSQYACQRKTTLNNYNKKFTDALEIMAENYKFKENLIACLEAKRAASILKYLPFEVTSMKDIQGLPCITDQVRDVIEEIIEEGESSRVKEVLNDERYKAFKQFTSVFGVGVKTAEKWFRMGLRTVEEAKASKSLKLSKMQKAGFLYYEDLASRVSKEEADAVTLIVKNTVRTFLPDALVTITGGFRRGKPMGHDVDFLITNPGPKEDDELLHKVVDLLKKQGLLLYEDIKESTFVEGQLPSRKIDAMDNFQKCFAILKLYQPGVDNSAVGTSKKSDMAEVKDWKAIRVDLVITPFEQYAYALLGWTGSKQFRRDLRRYAEEERGMILDNHALYDLKKRIFLKAGSEEEIFAHLGLDYVEPWERNA

SEQ ID NO: 2629 - DNA, 1182 bp, synthetic construct
  misc_feature 1..1182: note = Variant of terminal deoxynucleotidyl transferase
  source 1..1182: mol_type = other DNA
atgcatcaccaccatcatcatgggggttctggtcatccgccgagcaataccccggagggggaggtgccgagcgttatcgcccgtccggttagtcagtacagctgccagcgcaagaccacgctgaataactacaacaaaaagtttaccgacgcgctggagatcatggccgagaactacaaatttaaagagaacctgatcgcgtgtctggaagccaagcgcgccgcgagtattctgaaatatctgccgttcgaggttaccagcatgaaagacatccaaggtctgccgtgcattaccgaccaagttcgtgacgtgatcgaggagatcatcgaagagggcgagagcagccgtgttaaagaagttctcaatgacgagcgctacaaggcctttaagcagttcaccagcgtgttcggtgtgggcgtgaaaaccgcggaaaagtggtttcgtatgggcctccgtacggttgaagaagcaaaggccagtaagagtctgaagctgagcaagatgcagaaggcgggctttctgtattacgaggatctggcgagccgcgttagtaaagaagaagccgatgccgttacgctcatcgtgaagaacacggtgcgtacctttctgccggatgcgctggtgaccatcaccggcggtttccgccgtggcaaacctgtgggccacgacgttgactttctgatcacgaatccgggcccgaaagaggatgacgagctgctccacaaagtggttgatctgctcaagacgcaaggtctgctgctgtacgaagacatcaaagagagcacgttcgtggaggggcaactgccaagtcgcaaaatcgacgccatggacaacttccagaagtgcttcgccattctcaagctgtaccagccgggcgtggataacagtgcggttgggacgagtaagaaaagtgacatggccgaggttaaggattggaaagcgattcgtgtggatctggtgatcacgccattcgagcagtacgcctatgcgctgctcggttggacgggcagcaaagaatttcgtcgcgatctgcgccgctatgcggaggaagagcgcggcatgatcctcgacaaccatgccctctacgacctgaaaaagcgcatctttctgaaagcgggcagcgaagaagagattttcgcgcatctgggtctggattatgtggagccgtgggaacgcaacgcg

SEQ ID NO: 2630 - protein, 394 aa, synthetic construct
  REGION 1..394: note = Variant of terminal deoxynucleotidyl transferase
MHHHHHHGGSGHPPSNTPEGEVPSVIARPVSQYSCQRKTTLNNYNKKFTDALEIMAENYKFKENLIACLEAKRAASILKYLPFEVTSMKDIQGLPCITDQVRDVIEEIIEEGESSRVKEVLNDERYKAFKQFTSVFGVGVKTAEKWFRMGLRTVEEAKASKSLKLSKMQKAGFLYYEDLASRVSKEEADAVTLIVKNTVRTFLPDALVTITGGFRRGKPVGHDVDFLITNPGPKEDDELLHKVVDLLKTQGLLLYEDIKESTFVEGQLPSRKIDAMDNFQKCFAILKLYQPGVDNSAVGTSKKSDMAEVKDWKAIRVDLVITPFEQYAYALLGWTGSKEFRRDLRRYAEEERGMILDNHALYDLKKRIFLKAGSEEEIFAHLGLDYVEPWERNA

SEQ ID NO: 2631 - DNA, 1182 bp, synthetic construct
  misc_feature 1..1182: note = Variant of terminal deoxynucleotidyl transferase
  source 1..1182: mol_type = other DNA
atgcatcaccaccatcatcatgggggttctggtcatccgccgagcaataccccggagggggaggtgccgagcgttatcgcccgtccggttagtcagtacagctgccagcgcaagaccacgctgaataactacaacaaaaagtttaccgacgcgctggagatcatggccgagaactacaaatttaaagagaacctgatcgcgtgtctggaagccaagcgcgccgcgagtattctgaaatatctgccgttcgaggttaccagcatgaaagacatccaaggtctgccgtgcattaccgaccaagttcgtgacgtgatcgaggagatcatcgaagagggcgagagcagccgtgttaaagaagttctcaatgacgagcgctacaaggcctttaagcagttcaccagcgtgttcggtgtgggcgtgaaaaccgcggaaaagtggtttcgtatgggcctccgtacggttgaagaagcaaaggccagtaagagtctgaagctgagcaagatgcagaaggcgggctttctgtattacgaggatctggcgagcggcgttagtaaagaagaagccgatgccgttacgctcatcgtgaagaacacggtgcgtacctttctgccggatgcgctggtgaccatcaccggcggtttccgccgtggcaaacctatgggccacgacgttgactttctgatcacgctgccgggccgcaaagaggatgacgagctgctccacaaagtggttgatctgctcaagaagcaaggtctgctgctgtacgaagacatcaaagagagcacgttcgtggaggggcaactgccaagtcgcaaaatcgacgccatggacaacttccagaagtgcttcgccattctcaagctgtaccagccgggcgtggataacagtgcggttgggacgagtaagaaaagtgacatggccgaggttaaggattggaaagcgattcgtgtggatctggtgatcacgccattcgagcagtacgcctatgcgctgctcggttggacgggcagcaaagaatttcgtcgcgatctgcgccgctatgcggaggaagagcgcggcatgatcctcgacaaccatgccctctacgacctgaaaaagcgcatctttctgaaagcgggcagcgaagaagagattttcgcgcatctgggtctggattatgtggagccgtgggaacgcaacgcg

SEQ ID NO: 2632 - protein, 394 aa, synthetic construct
  REGION 1..394: note = Variant of terminal deoxynucleotidyl transferase
MHHHHHHGGSGHPPSNTPEGEVPSVIARPVSQYSCQRKTTLNNYNKKFTDALEIMAENYKFKENLIACLEAKRAASILKYLPFEVTSMKDIQGLPCITDQVRDVIEEIIEEGESSRVKEVLNDERYKAFKQFTSVFGVGVKTAEKWFRMGLRTVEEAKASKSLKLSKMQKAGFLYYEDLASGVSKEEADAVTLIVKNTVRTFLPDALVTITGGFRRGKPMGHDVDFLITLPGRKEDDELLHKVVDLLKKQGLLLYEDIKESTFVEGQLPSRKIDAMDNFQKCFAILKLYQPGVDNSAVGTSKKSDMAEVKDWKAIRVDLVITPFEQYAYALLGWTGSKEFRRDLRRYAEEERGMILDNHALYDLKKRIFLKAGSEEEIFAHLGLDYVEPWERNA

SEQ ID NO: 2633 - DNA, 1182 bp, synthetic construct
  misc_feature 1..1182: note = Variant of terminal deoxynucleotidyl transferase
  source 1..1182: mol_type = other DNA
atgcatcaccaccatcatcatgggggttctggtcatccgccgagcaataccccggagggggaggtgccgagcgttatcgcccgtccggttagtcagtacgcgtgccagcgcaagaccacgctgaataactacaacaaaaagttcaccgacgcgctggagatcatggccgagaactacaaatttaaagagaacctgatcgcgtgtctggaagccaagcgcgccgcgagtattctgaaatatctgccgttcgaggttaccagcatgaaagacatccaaggtctgccgtgcattaccgaccaagttcgtgacgtgatcgaggagatcatcgaagagggcgagagcagccgtgttaaagaagttctcaatgacgagcgctacaaggcctttaagcagttcaccagcgtgttcggtgtgggcgtgaaaaccgcggaaaagtggtaccgtatgggcctccgtacggttgaagaagcaaaggccagtaagagtctgaagctgagcaagatgcagaaggcgggctttctgtattacgaggatctggcgagccgcgttagtaaagaagaagccgatgccgttacgctcatcgtgaagaacacggtgcgtacctttctgccggatgcgctggtgaccatcaccggcggtttccgccgtggcaaacctatgggccacgacgttgactttctgatcacgctgccgggccctaaagaggatgacgagctgctccacaaagtggttgatctgctcaagaagcaaggtctgctgctgtacgaagacatcaaagagagcacgttcgtggaggggcaactgccaagtcgtaaaaacgacgccatggacaacttccagaagtgcttcgccattctcaagctgtaccagccgggcgtggataacagtgcggttgggacgagtaagaaaagtgacatggccgaggttaaggattggaaagcggttcgtgtggatctggtgatcacgccattcgagcagtacgcctatgcgctgctcggttggacgggcagcaaagaatttcgtcgcgatctgaagcgctatgcggaggaagagcgcggcatgatcctcgacaaccatgccctctacgacctgaaaaagcgcatctttctgaaagcgggcagcgaagaagagattttcgcgcatctgggtctggattatgtggagccgtgggaacgcaacgcg

SEQ ID NO: 2634 - protein, 394 aa, synthetic construct
  REGION 1..394: note = Variant of terminal deoxynucleotidyl transferase
MHHHHHHGGSGHPPSNTPEGEVPSVIARPVSQYACQRKTTLNNYNKKFTDALEIMAENYKFKENLIACLEAKRAASILKYLPFEVTSMKDIQGLPCITDQVRDVIEEIIEEGESSRVKEVLNDERYKAFKQFTSVFGVGVKTAEKWYRMGLRTVEEAKASKSLKLSKMQKAGFLYYEDLASRVSKEEADAVTLIVKNTVRTFLPDALVTITGGFRRGKPMGHDVDFLITLPGPKEDDELLHKVVDLLKKQGLLLYEDIKESTFVEGQLPSRKNDAMDNFQKCFAILKLYQPGVDNSAVGTSKKSDMAEVKDWKAVRVDLVITPFEQYAYALLGWTGSKEFRRDLKRYAEEERGMILDNHALYDLKKRIFLKAGSEEEIFAHLGLDYVEPWERNA

SEQ ID NO: 2635 - DNA, 1182 bp, synthetic construct
  misc_feature 1..1182: note = Variant of terminal deoxynucleotidyl transferase
  source 1..1182: mol_type = other DNA
atgcatcaccaccatcatcatgggggttctggtcatccgccaagcaataccccggagggggaggtgccgagcgttatcgcccgtccggttagtcagtacagctgccagcgcaagaccacgctgaataactacaacaaaaagtttaccgacgcgctggagatcatggccgagaactacaaatttaaagagaacctgatcgcgtgtctggaagccaagcgcgccgcgagtattctgaaatatctgccgttcgaggttaccagcatgaaagacatccaaggtctgccgtgcattaccgaccaagttcgtgacgtgatcgaggagatcatcgaagagggcgagagcagccgtgttaaagaagttctcaatgacgagcgctacaaggcctttaagcagttcaccagcgtgttcggtgtgggcgtgaaaaccgcggaaaagtggttccgtatgggcctccgtacggttgaagaagcaaaggccagtaagagtctgaagctgagcaagatgcagaaggcgggctttctgtattacgaggatctggcgagccgcgttagtaaagaagaagccgatgccgttacgctcatcgtgaagaacacggtgcgtacctttctgccggatgcgctggtgaccatcaccggcggtttccgccgtggcaaacctatgggccacgacgttgactttctgatcacgaacccgggcggcaaagaggatgacgagctgctccacaaagtggttgatctgctcaagaagcaaggtctgctgctgtacgaagacatcaaagagagcacgttcgtggaggggcaactgccaagtcgcaaaatcgacgccatggacaacttccagaagtgcttcgccattctcaagctgtaccagccgggcgtggataacagtgcggttgggacgagtaagaaaagtgacatggccgaggttaaggattggaaagcggttcgtgtggatctggtgatcacgccattcgagcagtacgcctatgcgctgctcggttggacgggcagcaaagaatttcgtcgcgatctgcgccgctatgcggaggaagagcgcggcatgatcctcgacaaccatgccctctacgacctgaaaaagcgcatctttctgaaagcgggcagcgaagaagagattttcgcgcatctgggtctggattatgtggagccgtgggaacgcaacgcg

SEQ ID NO: 2636 - protein, 394 aa, synthetic construct
  REGION 1..394: note = Variant of terminal deoxynucleotidyl transferase
MHHHHHHGGSGHPPSNTPEGEVPSVIARPVSQYSCQRKTTLNNYNKKFTDALEIMAENYKFKENLIACLEAKRAASILKYLPFEVTSMKDIQGLPCITDQVRDVIEEIIEEGESSRVKEVLNDERYKAFKQFTSVFGVGVKTAEKWFRMGLRTVEEAKASKSLKLSKMQKAGFLYYEDLASRVSKEEADAVTLIVKNTVRTFLPDALVTITGGFRRGKPMGHDVDFLITNPGGKEDDELLHKVVDLLKKQGLLLYEDIKESTFVEGQLPSRKIDAMDNFQKCFAILKLYQPGVDNSAVGTSKKSDMAEVKDWKAVRVDLVITPFEQYAYALLGWTGSKEFRRDLRRYAEEERGMILDNHALYDLKKRIFLKAGSEEEIFAHLGLDYVEPWERNA

SEQ ID NO: 2637 - DNA, 1182 bp, synthetic construct
  misc_feature 1..1182: note = Variant of terminal deoxynucleotidyl transferase
  source 1..1182: mol_type = other DNA
atgcatcaccaccatcatcatgggggttctggtcatccgccgagcaataccccggagggggaggtgccgagcgttatcgcccgtccggttagtcagtacgcgtgccagcgcaagaccacgctgaataactacaacaaaaagctgaccgacgcgctggagatcatggccgagaactacaaatttaaagagaacctgatcgcgtgtctggaagccaagcgcgccgcgagtatttttaaatatctgccgttcgaggttaccagcatgaaagacatccaaggtctgccgtgcattaccgaccaagttcgtgacgtgatcgaggagatcatcgaagagggcgagagcagccgtgttaaagaagttctcaatgacgagcgctacaaggcctttaagcagttctccagcgtgttcggtgtgggcgtgaaaaccgcggaaaagtggtaccgtatgggcctccgtacggttgaagaagcaaaggccagtaagagtctgaagctgagcaagatgcagaaggcgggctttctgtattacgaggatctggcgagcatggttagtaaagaagaagccgatgccgttacgctcatcgtgaagaacacggtgcgtacctttctgccggatgcgctggtgaccatcaccggcggtttccgccgtggcaaacctatgggccacgacgttgactttctgatcacgaatccgggccctaaagaggatgacgagctgctccacaaagtggttgatctgctcaagaagcaaggtctgctgctgtacgaagacatcaaagagagcacgttcgtggaggggcaactgccaagtcgcaaaatcgacgccatggacaacttccagaagtgcttcgccattctcaagctgtaccagccgggcgtggataacagtgcggttgggacgagtaagaaaagtgacatggccgaggttaaggattggaaagcgattcgtgtggatctggtgatcacgccattcgagcagtacgcctatgcgctgctcggttggacgggcagcaaagaatttcgtcgcgatctgcgccgctatgcggaggaagagcgcggcatgatcctcgacaaccatgccctctacgacctgaaaaagcgcatctttctgaaagcgggcagcgaagaagagattttcgcgcatctgggtctggattatgtggagccgtgggaacgcaacgcg

SEQ ID NO: 2638 - protein, 394 aa, synthetic construct
  REGION 1..394: note = Variant of terminal deoxynucleotidyl transferase
MHHHHHHGGSGHPPSNTPEGEVPSVIARPVSQYACQRKTTLNNYNKKLTDALEIMAENYKFKENLIACLEAKRAASIFKYLPFEVTSMKDIQGLPCITDQVRDVIEEIIEEGESSRVKEVLNDERYKAFKQFSSVFGVGVKTAEKWYRMGLRTVEEAKASKSLKLSKMQKAGFLYYEDLASMVSKEEADAVTLIVKNTVRTFLPDALVTITGGFRRGKPMGHDVDFLITNPGPKEDDELLHKVVDLLKKQGLLLYEDIKESTFVEGQLPSRKIDAMDNFQKCFAILKLYQPGVDNSAVGTSKKSDMAEVKDWKAIRVDLVITPFEQYAYALLGWTGSKEFRRDLRRYAEEERGMILDNHALYDLKKRIFLKAGSEEEIFAHLGLDYVEPWERNA

SEQ ID NO: 2639 - DNA, 1182 bp, synthetic construct
  misc_feature 1..1182: note = Variant of terminal deoxynucleotidyl transferase
  source 1..1182: mol_type = other DNA
atgcatcaccaccatcatcatgggggttctggtcatccgccgagcaataccccggagggggaggtgccgagcgttatcgcccgtccggttagtcagtactcgtgccagcgcaagaccacgctgaataactacaacaaaaagtttaccgacgcgctggagatcatggccgagaactacaaatttaaagagaacctgatcgcgtgtctggaagccaagcgcgccgcgagtattctgaaatatctgccgttcgaggttaccagcatgaaagacatccaaggtctgccgtgcattaccgaccaagttcgtgacgtgatcgaggagatcatcgaagagggcgagagcagccgtgttaaagaagttctcaatgacgagcgctacaaggcctttaagcagttcaccagcgtgttcggtgtgggcgtgaaaaccgcggaaaagtggtttcgtatgggcctccgtacggttgaagaagcaaaggccagtaagagtctgaagctgagcaagatgcagaaggcgggctttctgtattacgaggatctggcgagccgcgttagtaaagaagaagccgatgccgttacgctcatcgtgaagaacacggtgcgtacctttctgccggatgcgctggtgaccatcaccggcggtttccgccgtggcaaacctgtgggccacgacgttgactttctgatcacgaatccgggcccgaaagaggatgacgagctgctccacaaagtggttgatctgctcaagaagcaaggtctgctgctgtacgaagacatcaaagagagcacgttcgtggaggggcaactgccaagtcgcaaaatcgacgccatggacaacttccagaagtgcttcgccattctcaagctgtaccagccgggcgtggataacagtgcggttgggacgagtaagaaaagtgacatggccgaggttaaggattggaaagcgattcgtgtggatctggtgatcacgccattcgagcagtacgcctatgcgctgctcggttggacgggcagcaaagaatttcgtcgcgatctgcgccgctatgcggaggaagagcgcggcatgatcctcgacaaccatgccctctacgacctgaaaaagcgcatctttctgaaagcgggcagcgaagaagagattttcgcgcatctgggtctggattatgtggagccgtgggaacgcaacgcg

SEQ ID NO: 2640 - protein, 394 aa, synthetic construct
  REGION 1..394: note = Variant of terminal deoxynucleotidyl transferase
MHHHHHHGGSGHPPSNTPEGEVPSVIARPVSQYSCQRKTTLNNYNKKFTDALEIMAENYKFKENLIACLEAKRAASILKYLPFEVTSMKDIQGLPCITDQVRDVIEEIIEEGESSRVKEVLNDERYKAFKQFTSVFGVGVKTAEKWFRMGLRTVEEAKASKSLKLSKMQKAGFLYYEDLASRVSKEEADAVTLIVKNTVRTFLPDALVTITGGFRRGKPVGHDVDFLITNPGPKEDDELLHKVVDLLKKQGLLLYEDIKESTFVEGQLPSRKIDAMDNFQKCFAILKLYQPGVDNSAVGTSKKSDMAEVKDWKAIRVDLVITPFEQYAYALLGWTGSKEFRRDLRRYAEEERGMILDNHALYDLKKRIFLKAGSEEEIFAHLGLDYVEPWERNA

SEQ ID NO: 2641 - DNA, 1182 bp, synthetic construct
  misc_feature 1..1182: note = Variant of terminal deoxynucleotidyl transferase
  source 1..1182: mol_type = other DNA
atgcatcaccaccatcatcatgggggttctggtcatccgccgagcaataccccggagggggaggtgccgagcgttatcgcccgtccggttagtcagtacagctgccagcgcaagaccacgctgaataactacaacaaaaagtttaccgacgcgctggagatcatggccgagaactacaaatttaaagagaacctgatcgcgtgtctggaagccaagcgcgccgcgagtattctgaaatatctgccgttcgaggttaccagcatgaaagacatccaaggtctgccgtgcattaccgaccaagttcgtgacgtgatcgaggagatcatcgaagagggcgagagcagccgtgttaaagaagttctcaatgacgagcgctacaaggcctttaagcagttcaccagcgtgttcggtgtgggcgtgaaaaccgcggaaaagtggtttcgtatgggcctccgtacggttgaagaagcaaaggccagtaagagtctgaagctgagcaagatgcagaaggcgggctttctgtattacgaggatctggcgagccgcgttagtaaagaagaagccgatgccgttacgctcatcgtgaagaacacggtgcgtacctttctgccggatgcgctggtgaccatcaccggcggtttccgccgtggcaaacctatgggccacgacgttgactttctgatcacgaacccgggccgcaaagaggatgacgagctgctccacaaagtggttgatctgctcaagaagcaaggtctgctgctgtacgaagacatcaaagagagcacgttcgtggaggggcaactgccaagtcataaaatcgacgccatggacaacttccagaagtgcttcgccattctcaagctgtaccagccgggcgtggataacagtgcggttgggacgagtaagaaaagtgacatggccgaggttaaggattggaaagcgattcgtgtggatctggtgatcacgccattcgagcagtacgcctatgcgctgctcggttggacgggcagcaaagaatttcgtcgcgatctgcgccgctatgcggaggaagagcgcggcatgatcctcgacaaccatgccctctacgacctgaaaaagcgcatctttctgaaagcgggcagcgaagaagagattttcgcgcatctgggtctggattatgtggagccgtgggaacgcaacgcg

SEQ ID NO: 2642 - protein, 394 aa, synthetic construct
  REGION 1..394: note = Variant of terminal deoxynucleotidyl transferase
MHHHHHHGGSGHPPSNTPEGEVPSVIARPVSQYSCQRKTTLNNYNKKFTDALEIMAENYKFKENLIACLEAKRAASILKYLPFEVTSMKDIQGLPCITDQVRDVIEEIIEEGESSRVKEVLNDERYKAFKQFTSVFGVGVKTAEKWFRMGLRTVEEAKASKSLKLSKMQKAGFLYYEDLASRVSKEEADAVTLIVKNTVRTFLPDALVTITGGFRRGKPMGHDVDFLITNPGRKEDDELLHKVVDLLKKQGLLLYEDIKESTFVEGQLPSHKIDAMDNFQKCFAILKLYQPGVDNSAVGTSKKSDMAEVKDWKAIRVDLVITPFEQYAYALLGWTGSKEFRRDLRRYAEEERGMILDNHALYDLKKRIFLKAGSEEEIFAHLGLDYVEPWERNA

SEQ ID NO: 2643 - DNA, 1182 bp, synthetic construct
  misc_feature 1..1182: note = Variant of terminal deoxynucleotidyl transferase
  source 1..1182: mol_type = other DNA
atgcatcaccaccatcatcatgggggttctggtcatccgccgagcaataccccggagggggaggtgccgagcgttatcgcccgtccggttagtcagtactcgtgccagcgcaagaccacgctgaataactacaacaaaaagttcaccgacgcgctggagatcatggccgagaactacaaatttaaagagaacctgatcgcgtgtctggaagccaagcgcgccgcgagtatttttaaatatctgccgttcgaggttaccagcatgaaagacatccaaggtctgccgtgcattaccgaccaagttcgtgacgtgatcgaggagatcatcgaagagggcgagagcagccgtgttaaagaagttctcaatgacgagcgctacaaggcctttaagcagttcaccagcgcgttcggtgtgggcgtgaaaaccgcggaaaagtggttccgtatgggcctccgtacggttgaagaagcaaaggccagtaagagtctgaagctgagcaagatgcagaaggcgggctttctgtattacgaggatctggcgagcatggttagtaaagaagaagccgatgccgttacgctcatcgtgaagaacacggtgcgtacctttctgccggatgcgctggtgaccatcaccggcggtttccgccgtggcaaacctatgggccacgacgttgactttctgatcacgaacccgggccgcaaagaggatgacgagctgctccacaaagtggttgatctgctcaagacgcaaggtctgctgctgtacgaagacatcaaagagagcacgttcgtggaggggcaactgccaagtcgtaaaatcgacgccatggacaacttccagaagtgcttcgccattctcaagctgtaccagccgggcgtggataacagtgcggttgggacgagtaagaaaagtgacatggctgaggttaaggattggaaagcggttcgtgtggatctggtgatcacgccattcgagcagtacgcctatgcgctgctcggttggacgggcagcaaagaatttcgtcgcgatctgaagcgctatgcggaggaagagcgcggcatgatcctcgacaaccatgccctctacgacctgaaaaagcgcatctttctgaaagcgggcagcgaagaagagattttcgcgcatctgggtctggattatgtggagccgtgggaacgcaacgcg

SEQ ID NO: 2644 - protein, 394 aa, synthetic construct
  REGION 1..394: note = Variant of terminal deoxynucleotidyl transferase
MHHHHHHGGSGHPPSNTPEGEVPSVIARPVSQYSCQRKTTLNNYNKKFTDALEIMAENYKFKENLIACLEAKRAASIFKYLPFEVTSMKDIQGLPCITDQVRDVIEEIIEEGESSRVKEVLNDERYKAFKQFTSAFGVGVKTAEKWFRMGLRTVEEAKASKSLKLSKMQKAGFLYYEDLASMVSKEEADAVTLIVKNTVRTFLPDALVTITGGFRRGKPMGHDVDFLITNPGRKEDDELLHKVVDLLKTQGLLLYEDIKESTFVEGQLPSRKIDAMDNFQKCFAILKLYQPGVDNSAVGTSKKSDMAEVKDWKAVRVDLVITPFEQYAYALLGWTGSKEFRRDLKRYAEEERGMILDNHALYDLKKRIFLKAGSEEEIFAHLGLDYVEPWERNA

SEQ ID NO: 2645 - DNA, 1182 bp, synthetic construct
  misc_feature 1..1182: note = Variant of terminal deoxynucleotidyl transferase
  source 1..1182: mol_type = other DNA
atgcatcaccaccatcatcatgggggttctggtcatccgccgagcaataccccggagggggaggtgccgagcgttatcgcccgtccggttagtcagtactcgtgccagcgcaagaccacgctgaataactacaacaaaaagttcaccgacgcgctggagatcatggccgagaactacaaatttaaagagaacctgatcgcgtgtctggaagccaagcgcgccgcgagtattctgaaatatctgccgttcgaggttaccagcatgaaagacatccaaggtctgccgtgcattaccgaccaagttcgtgacgtgatcgaggagatcatcgaagagggcgagagcagccgtgttaaagaagttctcaatgacgagcgctacaaggcctttaagcagttcaccagcgtgttcggtgtgggcgtgaaaaccgcggaaaagtggtttcgtatgggcctccgtacggttgaagaagccaaggccagtaagagtctgaagctgagcaagatgcagaaggcgggctttctgtattacgaggatctggcgagccgcgttagtaaagaagaagccgatgccgttacgctcatcgtgaagaacacggtgcgtacctttctgccggatgcgctggtgaccatcaccggcggtttccgccgtggcaaacctatgggccacgacgttgactttctgatcacgaacccgggccgcaaagaggatgacgagctgctccacaaagtggttgatctgctcaagaagcaaggtctgctgctgtacgaagacatcaaagagagcacgttcgtggaggggcaactgccaagtcgcaaaatcgacgccatggacaacttccagaagtgcttcgccattctcaagctgtaccagccgggcgtggataacagtgcggttgggacgagtaagaaaagtgacatggccgaggttaaggattggaaagcgattcgtgtggatctggtgatcacgccattcgagcagtacgcctatgcgctgctcggttggacgggcagcaaagaatttcgtcgcgatctgcgccgctatgcggaggaagagcgcggcatgatcctcgacaaccatgccctctacgacctgaaaaagcgcatctttctgaaagcgggcagcgaagaagagattttcgcgcatctgggtctggattatgtggagccgtgggaacgcaacgcg

SEQ ID NO: 2646 - protein, 394 aa, synthetic construct
  REGION 1..394: note = Variant of terminal deoxynucleotidyl transferase
MHHHHHHGGSGHPPSNTPEGEVPSVIARPVSQYSCQRKTTLNNYNKKFTDALEIMAENYKFKENLIACLEAKRAASILKYLPFEVTSMKDIQGLPCITDQVRDVIEEIIEEGESSRVKEVLNDERYKAFKQFTSVFGVGVKTAEKWFRMGLRTVEEAKASKSLKLSKMQKAGFLYYEDLASRVSKEEADAVTLIVKNTVRTFLPDALVTITGGFRRGKPMGHDVDFLITNPGRKEDDELLHKVVDLLKKQGLLLYEDIKESTFVEGQLPSRKIDAMDNFQKCFAILKLYQPGVDNSAVGTSKKSDMAEVKDWKAIRVDLVITPFEQYAYALLGWTGSKEFRRDLRRYAEEERGMILDNHALYDLKKRIFLKAGSEEEIFAHLGLDYVEPWERNA

SEQ ID NO: 2647 - DNA, 1182 bp, synthetic construct
  misc_feature 1..1182: note = Variant of terminal deoxynucleotidyl transferase
  source 1..1182: mol_type = other DNA
atgcatcaccaccatcatcatgggggttctggtcatccgccgagcaataccccggagggggaggtgccgagcgttatcgcccgtccggttagtcagtacgcgtgccagcgcaagaccacgctgaataactacaacaaaaagtttaccgacgcgctggagatcatggccgagaactacaaatttaaagagaacctgatcgcgtgtctggaagccaagcgcgccgcgagtattctgaaatatctgccgttcgaggttaccagcatgaaagacatccaaggtctgccgtgcattaccgaccaagttcgtgacgtgatcgaggagatcatcgaagagggcgagagcagccgtgttaaagaagttctcaatgacgagcgctacaaggcctttaagcagttcaccagcgtgttcggtgtgggcgtgaaaaccgcggaaaagtggtaccgtatgggcctccgtacggttgatgaagcaaaggccagtaagagtctgaagctgagcaagatgcagaaggcgggctttctgtattacgaggatctggcgagccgcgttagtaaagaagaagccgatgccgttacgctcatcgtgaagaacacggtgcgtacctttctgccggatgcgctggtgaccatcaccggcggtttccgccgtggcaaacctatgggccacgacgttgactttctgatcacgaacccgggcggcaaagaggatgacgagctgctccacaaagtggttgatctgctcaagaagcaaggtctgctgctgtacgaagacatcaaagagagcacgttcgtggaggggcaactgccaagtcgcaaaatcgacgccatggacaacttccagaagtgcttcgccattctcaagctgtaccagccgggcgtggataacagtgcggttgggacgagtaagaaaagtgacatggccgaggttaaggattggaaagcgattcgtgtggatctggtgatcacgccattcgagcagtacgcctatgcgctgctcggttggacgggcagcaaacaatttcgtcgcgatctgcgccgctatgcggaggaagagcgcggcatgatcctcgacaaccatgccctctacgacctgaaaaagcgcatctttctgaaagcgggcagcgaagaagagattttcgcgcatctgggtctggattatgtggagccgtgggaacgcaacgcg

SEQ ID NO: 2648 - protein, 394 aa, synthetic construct
  REGION 1..394: note = Variant of terminal deoxynucleotidyl transferase
MHHHHHHGGSGHPPSNTPEGEVPSVIARPVSQYACQRKTTLNNYNKKFTDALEIMAENYKFKENLIACLEAKRAASILKYLPFEVTSMKDIQGLPCITDQVRDVIEEIIEEGESSRVKEVLNDERYKAFKQFTSVFGVGVKTAEKWYRMGLRTVDEAKASKSLKLSKMQKAGFLYYEDLASRVSKEEADAVTLIVKNTVRTFLPDALVTITGGFRRGKPMGHDVDFLITNPGGKEDDELLHKVVDLLKKQGLLLYEDIKESTFVEGQLPSRKIDAMDNFQKCFAILKLYQPGVDNSAVGTSKKSDMAEVKDWKAIRVDLVITPFEQYAYALLGWTGSKQFRRDLRRYAEEERGMILDNHALYDLKKRIFLKAGSEEEIFAHLGLDYVEPWERNA

SEQ ID NO: 2649 - DNA, 1182 bp, synthetic construct
  misc_feature 1..1182: note = Variant of terminal deoxynucleotidyl transferase
  source 1..1182: mol_type = other DNA
atgcatcaccaccatcatcatgggggttctggtcatccgccgagcaataccccggagggggaggtgccgagcgttatcgcccgtccggttagtcagtactcgtgccagcgcaagaccacgctgaataactacaacaaaaagttcaccgacgcgctggagatcatggccgagaactacaaatttaaagagaacctgatcgcgtgtctggaagccaagcgcgccgcgagtatttttaaatatctgccgttcgaggttaccagcatgaaagacatccaaggtctgccgtgcattaccgaccaagttcgtgacgtgatcgaggagatcatcgaagagggcgagagcagccgtgttaaagaagttctcaatgacgagcgctacaaggcctttaagcagttcaccagcgtgttcggtgtgggcgtgaaaaccgcggaaaagtggtaccgtatgggcctccgtacggttgaagaagcacgcgccagtaagagtctgaagctgagcaagatgcagaaggcgggctttctgtattacgaggatctggcgagccgcgttagtaaagaagaagccgatgccgttacgctcatcgtgaagaacacggtgcgtacctttctgccggatgcgctggtgaccatcaccggcggtttccgccgtggcaaacctgtgggccacgacgttgactttctgatcacgctgccgggcggcaaagaggatgacgagctgctccacaaagtggttgatctgctcaagacgcaaggtctgctgctgtacgaagacatcaaagagagcacgttcgtggaggggcaactgccaagtcataaaatcgacgccatggacaacttccagaagtgcttcgccattctcaagctgtaccagccgggcgtggataacagtgcggttgggacgagtaagaaaagtgacatgggtgaggttaaggattggaaagcggttcgtgtggatctggtgatcacgccattcgagcagtacgcctatgcgctgctcggttggacgggcagcaaagaatttcgtcgcgatctgaagcgctatgcggaggaagagcgcggcatgatcctcgacaaccatgccctctacgacctgaaaaagcgcatctttctgaaagcgggcagcgaagaagagattttcgcgcatctgggtctggattatgtggagccgtgggaacgcaacgcg

SEQ ID NO: 2650 - protein, 394 aa, synthetic construct
  REGION 1..394: note = Variant of terminal deoxynucleotidyl transferase
MHHHHHHGGSGHPPSNTPEGEVPSVIARPVSQYSCQRKTTLNNYNKKFTDALEIMAENYKFKENLIACLEAKRAASIFKYLPFEVTSMKDIQGLPCITDQVRDVIEEIIEEGESSRVKEVLNDERYKAFKQFTSVFGVGVKTAEKWYRMGLRTVEEARASKSLKLSKMQKAGFLYYEDLASRVSKEEADAVTLIVKNTVRTFLPDALVTITGGFRRGKPVGHDVDFLITLPGGKEDDELLHKVVDLLKTQGLLLYEDIKESTFVEGQLPSHKIDAMDNFQKCFAILKLYQPGVDNSAVGTSKKSDMGEVKDWKAVRVDLVITPFEQYAYALLGWTGSKEFRRDLKRYAEEERGMILDNHALYDLKKRIFLKAGSEEEIFAHLGLDYVEPWERNA

SEQ ID NO: 2651 - DNA, 1182 bp, synthetic construct
  misc_feature 1..1182: note = Variant of terminal deoxynucleotidyl transferase
  source 1..1182: mol_type = other DNA
atgcatcaccaccatcatcatgggggttctggtcatccgccgagcaataccccggagggggaggtgccgagcgttatcgcccgtccggttagtcagtacagctgccagcgcaagaccacgctgaataactacaacaaaaagctgaccgacgcgctggagatcatggccgagaactacaaatttaaagagaacctgatcgcgtgtctggaagccaagcgcgccgcgagtattctgaaatatctgccgttcgaggttaccagcatgaaagacatccaaggtctgccgtgcattaccgaccaagttcgtgacgtgatcgaggagatcatcgaagagggcgagagcagccgtgttaaagaagttctcaatgacgagcgctacaaggcctttaagcagttcaccagcgtgttcggtgtgggcgtgaaaaccgcggaaaagtggtaccgtatgggcctccgtacggttgaagaagcacgcgccagtaagagtctgaagctgagcaagatgcagaaggcgggctttctgtattacgaggatctggcgagccgcgttagtaaagaagaagccgatgccgttacgctcatcgtgaagaacacggtgcgtacctttctgccggatgcgctggtgaccatcaccggcggtttccgccgtggcaaacctatgggccacgacgttgactttctgatcacgaacccgggcggcaaagaggatgacgagctgctccacaaagtggttgatctgctcaagaagcaaggtctgctgctgtacgaagacatcaaagagagcacgttcgtggaggggcaactgccaagtcgtaaaatcgacgccatggacaacttccagaagtgcttcgccattctcaagctgtaccagccgggcgtggataacagtgcggttgggacgagtaagaaaagtgacatggccgaggttaaggattggaaagcgattcgtgtggatctggtgatcacgccattcgagcagtacgcctatgcgctgctcggttggacgggcagcaaagaatttcgtcgcgatctgcgccgctatgcggaggaagagcgcggcatgatcctcgacaaccatgccctctacgacctgaaaaagcgcatctttctgaaagcgggcagcgaagaagagattttcgcgcatctgggtctggattatgtggagccgtgggaacgcaacgcg

SEQ ID NO: 2652 - protein, 394 aa, synthetic construct
  REGION 1..394: note = Variant of terminal deoxynucleotidyl transferase
MHHHHHHGGSGHPPSNTPEGEVPSVIARPVSQYSCQRKTTLNNYNKKLTDALEIMAENYKFKENLIACLEAKRAASILKYLPFEVTSMKDIQGLPCITDQVRDVIEEIIEEGESSRVKEVLNDERYKAFKQFTSVFGVGVKTAEKWYRMGLRTVEEARASKSLKLSKMQKAGFLYYEDLASRVSKEEADAVTLIVKNTVRTFLPDALVTITGGFRRGKPMGHDVDFLITNPGGKEDDELLHKVVDLLKKQGLLLYEDIKESTFVEGQLPSRKIDAMDNFQKCFAILKLYQPGVDNSAVGTSKKSDMAEVKDWKAIRVDLVITPFEQYAYALLGWTGSKEFRRDLRRYAEEERGMILDNHALYDLKKRIFLKAGSEEEIFAHLGLDYVEPWERNA

SEQ ID NO: 2653 - DNA, 1182 bp, synthetic construct
  misc_feature 1..1182: note = Variant of terminal deoxynucleotidyl transferase
  source 1..1182: mol_type = other DNA
atgcatcaccaccatcatcatgggggttctggtcatccgccgagcaataccccggagggggaggtgccgagcgttatcgcccgtccggttagtcagtactcgtgccagcgcaagaccacgctgaataactacaacaaaaagctgaccgacgcgctggagatcatggccgagaactacaaatttaaagagaacctgatcgcgtgtctggaagccaagcgcgccgcgagtatttttaaatatctgccgttcgaggttaccagcatgaaagacatccaaggtctgccgtgcattaccgaccaagttcgtgacgtgatcgaggagatcatcgaagagggcgagagcagccgtgttaaagaagttctcaatgacgagcgctacaaggcctttaagcagttcaccagcgtgttcggtgtgggcgtgaaaaccgcggaaaagtggtaccgtatgggcctccgtacggttgaagaagcacgcgccagtaagagtctgaagctgagcaagatgcagaaggcgggctttctgtattacgaggatctggcgagcatggttagtaaagaagaagccgatgccgttacgctcatcgtgaagaacacggtgcgtacctttctgccggatgcgctggtgaccatcaccggcggtttccgccgtggcaaacctgtgggccacgacgttgactttctgatcacgctgccgggccctaaagaggatgacgagctgctccacaaagtggttgatctgctcaagaagcaaggtctgctgctgtacgaagacatcaaagagagcacgttcgtggaggggcaactgccaagtcgtaaaatcgacgccatggacaacttccagaagtgcttcgccattctcaagctgtaccagccgggcgtggataacagtgcggttgggacgagtaagaaaagtgacatgggtgaggttaaggattggaaagcgattcgtgtggatctggtgatcacgccattcgagcagtacgcctatgcgctgctcggttggacgggcagcaaagaatttcgtcgcgatctgcgccgctatgcggaggaagagcgcggcatgatcctcgacaaccatgccctctacgacctgaaaaagcgcatctttctgaaagcgggcagcgaagaagagattttcgcgcatctgggtctggattatgtggagccgtgggaacgcaacgcg

SEQ ID NO: 2654 - protein, 394 aa, synthetic construct
  REGION 1..394: note = Variant of terminal deoxynucleotidyl transferase
MHHHHHHGGSGHPPSNTPEGEVPSVIARPVSQYSCQRKTTLNNYNKKLTDALEIMAENYKFKENLIACLEAKRAASIFKYLPFEVTSMKDIQGLPCITDQVRDVIEEIIEEGESSRVKEVLNDERYKAFKQFTSVFGVGVKTAEKWYRMGLRTVEEARASKSLKLSKMQKAGFLYYEDLASMVSKEEADAVTLIVKNTVRTFLPDALVTITGGFRRGKPVGHDVDFLITLPGPKEDDELLHKVVDLLKKQGLLLYEDIKESTFVEGQLPSRKIDAMDNFQKCFAILKLYQPGVDNSAVGTSKKSDMGEVKDWKAIRVDLVITPFEQYAYALLGWTGSKEFRRDLRRYAEEERGMILDNHALYDLKKRIFLKAGSEEEIFAHLGLDYVEPWERNA

SEQ ID NO: 2655 - DNA, 1182 bp, synthetic construct
  misc_feature 1..1182: note = Variant of terminal deoxynucleotidyl transferase
  source 1..1182: mol_type = other DNA
atgcatcaccaccatcatcatgggggttctggtcatccgccgagcaataccccggagggggaggtgccgagcgttatcgcccgtccggttagtcagtacagctgccagcgcaagaccacgctgaataactacaacaaaaagtttaccgacgcgctggagatcatggccgagaactacaaatttaaagagaacctgatcgcgtgtctggaagccaagcgcgccgcgagtattctgaaatatctgccgttcgaggttaccagcatgaaagacatccaaggtctgccgtgcattaccgaccaagttcgtgacgtgatcgaggagatcatcgaagagggcgagagcagccgtgttaaagaagttctcaatgacgagcgctacaaggcctttaagcagttcaccagcgtgttcggtgtgggcgtgaaaaccgcggaaaagtggtaccgtatgggcctccgtacggttgaagaagcacgcgccagtaagagtctgaagctgagcaagatgcagaaggcgggctttctgtattacgaggatctggcgagccgcgttagtaaagaagaagccgatgccgttacgctcatcgtgaagaacacggtgcgtacctttctgccggatgcgctggtgaccatcaccggcggtttccgccgtggcaaacctgtgggccacgacgttgactttctgatcacgctgccgggccgcaaagaggatgacgagctgctccacaaagtggttgatctgctcaagacgcaaggtctgctgctgtacgaagacatcaaagagagcacgttcgtggaggggcaactgccaagtcgcaaaatcgacgccatggacaacttccagaagtgcttcgccattctcaagctgtaccagccgggcgtggataacagtgcggttgggacgagtaagaaaagtgacatggctgaggttaaggattggaaagcgattcgtgtggatctggtgatcacgccattcgagcagtacgcctatgcgctgctcggttggacgggcagcaaagaatttcgtcgcgatctgaagcgctatgcggaggaagagcgcggcatgatcctcgacaaccatgccctctacgacctgaaaaagcgcatctttctgaaagcgggcagcgaagaagagattttcgcgcatctgggtctggattatgtggagccgtgggaacgcaacgcg

SEQ ID NO: 2656 - protein, 394 aa, synthetic construct
  REGION 1..394: note = Variant of terminal deoxynucleotidyl transferase
MHHHHHHGGSGHPPSNTPEGEVPSVIARPVSQYSCQRKTTLNNYNKKFTDALEIMAENYKFKENLIACLEAKRAASILKYLPFEVTSMKDIQGLPCITDQVRDVIEEIIEEGESSRVKEVLNDERYKAFKQFTSVFGVGVKTAEKWYRMGLRTVEEARASKSLKLSKMQKAGFLYYEDLASRVSKEEADAVTLIVKNTVRTFLPDALVTITGGFRRGKPVGHDVDFLITLPGRKEDDELLHKVVDLLKTQGLLLYEDIKESTFVEGQLPSRKIDAMDNFQKCFAILKLYQPGVDNSAVGTSKKSDMAEVKDWKAIRVDLVITPFEQYAYALLGWTGSKEFRRDLKRYAEEERGMILDNHALYDLKKRIFLKAGSEEEIFAHLGLDYVEPWERNA

SEQ ID NO: 2657 - DNA, 1182 bp, synthetic construct
  misc_feature 1..1182: note = Variant of terminal deoxynucleotidyl transferase
  source 1..1182: mol_type = other DNA
atgcatcaccaccatcatcatgggggttctggtcatccgccgagcaataccccggagggggaggtgccgagcgttatcgcccgtccggttagtcagtacagctgccagcgcaagaccacgctgaataactacaacaaaaagtttaccgacgcgctggagatcatggccgagaactacaaatttaaagagaacctgatcgcgtgtctggaagccaagcgcgccgcgagtattctgaaatatctgccgttcgaggttaccagcatgaaagacatccaaggtctgccgtgcattaccgaccaagttcgtgacgtgatcgaggagatcatcgaagagggcgagagcagccgtgttaaagaagttctcaatgacgagcgctacaaggcctttaagcagttctccagcgcgttcggtgtgggcgtgaaaaccgcggaaaagtggttccgtatgggcctccgtacggttgaagaagcaaaggccagtaagagtctgaagctgagcaagatgcagaaggcgggctttctgtattacgaggatctggcgagccgcgttagtaaagaagaagccgatgccgttacgctcatcgtgaagaacacggtgcgtacctttctgccggatgcgctggtgaccatcaccggcggtttccgccgtggcaaacctatgggccacgacgttgactttctgatcacgaatccgggcccgaaagaggatgacgagctgctccacaaagtggttgatctgctcaagaagcaaggtctgctgctgtacgaagacatcaaagagagcacgttcgtggaggggcaactgccaagtcgcaaaatcgacgccatggacaacttccagaagtgcttcgccattctcaagctgtaccagccgggcgtggataacagtgcggttgggacgagtaagaaaagtgacatgggtgaggttaaggattggaaagcggttcgtgtggatctggtgatcacgccattcgagcagtacgcctatgcgctgctcggttggacgggcagcaaagaatttcgtcgcgatctgcgccgctatgcggaggaagagcgcggcatgatcctcgacaaccatgccctctacgacctgaaaaagcgcatctttctgaaagcgggcagcgaagaagagattttcgcgcatctgggtctggattatgtggagccgtgggaacgcaacgcg

SEQ ID NO: 2658 - protein, 394 aa, synthetic construct
  REGION 1..394: note = Variant of terminal deoxynucleotidyl transferase
MHHHHHHGGSGHPPSNTPEGEVPSVIARPVSQYSCQRKTTLNNYNKKFTDALEIMAENYKFKENLIACLEAKRAASILKYLPFEVTSMKDIQGLPCITDQVRDVIEEIIEEGESSRVKEVLNDERYKAFKQFSSAFGVGVKTAEKWFRMGLRTVEEAKASKSLKLSKMQKAGFLYYEDLASRVSKEEADAVTLIVKNTVRTFLPDALVTITGGFRRGKPMGHDVDFLITNPGPKEDDELLHKVVDLLKKQGLLLYEDIKESTFVEGQLPSRKIDAMDNFQKCFAILKLYQPGVDNSAVGTSKKSDMGEVKDWKAVRVDLVITPFEQYAYALLGWTGSKEFRRDLRRYAEEERGMILDNHALYDLKKRIFLKAGSEEEIFAHLGLDYVEPWERNA

SEQ ID NO: 2659 - DNA, 1182 bp, synthetic construct
  misc_feature 1..1182: note = Variant of terminal deoxynucleotidyl transferase
  source 1..1182: mol_type = other DNA
atgcatcaccaccatcatcatgggggttctggtcatccgccaagcaataccccggagggggaggtgccgagcgttatcgcccgtccggttagtcagtacagctgccagcgcaagaccacgctgaataactacaacaaaaagctgaccgacgcgctggagatcatggccgagaactacaaatttaaagagaacctgatcgcgtgtctggaagccaagcgcgccgcgagtatttttaaatatctgccgttcgaggttaccagcatgaaagacatccaaggtctgccgtgcattaccgaccaagttcgtgacgtgatcgaggagatcatcgaagagggcgagagcagccgtgttaaagaagttctcaatgacgagcgctacaaggcctttaagcagttcaccagcgtgttcggtgtgggcgtgaaaaccgcggaaaagtggtaccgtatgggcctccgtacggttgaagaagcaatggccagtaagagtctgaagctgagcaagatgcagaaggcgggctttctgtattacgaggatctggcgagcggcgttagtaaagaagaagccgatgccgttacgctcatcgtgaagaacacggtgcgtacctttctgccggatgcgctggtgaccatcaccggcggtttccgccgtggcaaacctatgggccacgacgttgactttctgatcacgctgccgggccctaaagaggatgacgagctgctccacaaagtggttgatctgctcaagacgcaaggtctgctgctgtacgaagacatcaaagagagcacgttcgtggaggggcaactgccaagtcataaaatcgacgccatggacaacttccagaagtgcttcgccattctcaagctgtaccagccgggcgtggataacagtgcggttgggacgagtaagaaaagtgacatggctgaggttaaggattggaaagcggttcgtgtggatctggtgatcacgccattcgagcagtacgcctatgcgctgctcggttggacgggcagcaaagaatttcgtcgcgatctgcgccgctatgcggaggaagagcgcggcatgatcctcgacaaccatgccctctacgacctgaaaaagcgcatctttctgaaagcgggcagcgaagaagagattttcgcgcatctgggtctggattatgtggagccgtgggaacgcaacgcg

SEQ ID NO: 2660 - protein, 394 aa, synthetic construct
  REGION 1..394: note = Variant of terminal deoxynucleotidyl transferase
MHHHHHHGGSGHPPSNTPEGEVPSVIARPVSQYSCQRKTTLNNYNKKLTDALEIMAENYKFKENLIACLEAKRAASIFKYLPFEVTSMKDIQGLPCITDQVRDVIEEIIEEGESSRVKEVLNDERYKAFKQFTSVFGVGVKTAEKWYRMGLRTVEEAMASKSLKLSKMQKAGFLYYEDLASGVSKEEADAVTLIVKNTVRTFLPDALVTITGGFRRGKPMGHDVDFLITLPGPKEDDELLHKVVDLLKTQGLLLYEDIKESTFVEGQLPSHKIDAMDNFQKCFAILKLYQPGVDNSAVGTSKKSDMAEVKDWKAVRVDLVITPFEQYAYALLGWTGSKEFRRDLRRYAEEERGMILDNHALYDLKKRIFLKAGSEEEIFAHLGLDYVEPWERNA

SEQ ID NO: 2661 - DNA, 1182 bp, synthetic construct
  misc_feature 1..1182: note = Variant of terminal deoxynucleotidyl transferase
  source 1..1182: mol_type = other DNA
atgcatcaccaccatcatcatgggggttctggtcatccgccgagcaataccccggagggggaggtgccgagcgttatcgcccgtccggttagtcagtacgcgtgccagcgcaagaccacgctgaataactacaacaaaaagtttaccgacgcgctggagatcatggccgagaactacaaatttaaagagaacctgatcgcgtgtctggaagccaagcgcgccgcgagtattctgaaatatctgccgttcgaggttaccagcatgaaagacatccaaggtctgccgtgcattaccgaccaagttcgtgacgtgatcgaggagatcatcgaagagggcgagagcagccgtgttaaagaagttctcaatgacgagcgctacaaggcctttaagcagttcaccagcgtgttcggtgtgggcgtgaaaaccgcggaaaagtggtttcgtatgggcctccgtacggttgaagaagcaaaggccagtaagagtctgaagctgagcaagatgcagaaggcgggctttctgtattacgaggatctggcgagcatggttagtaaagaagaagccgatgccgttacgctcatcgtgaagaacacggtgcgtacctttctgccggatgcgctggtgaccatcaccggcggtttccgccgtggcaaacctatgggccacgacgttgactttctgatcacgaatccgggcccgaaagaggatgacgagctgctccacaaagtggttgatctgctcaagaagcaaggtctgctgctgtacgaagacatcaaagagagcacgttcgtggaggggcaactgccaagtcgcaaaatcgacgccatggacaacttccagaagtgcttcgccattctcaagctgtaccagccgggcgtggataacagtgcggttgggacgagtaagaaaagtgacatggccgaggttaaggattggaaagcgattcgtgtggatctggtgatcacgccattcgagcagtacgcctatgcgctgctcggttggacgggcagcaaagaatttcgtcgcgatctgcgccgctatgcggaggaagagcgcggcatgatcctcgacaaccatgccctctacgacctgaaaaagcgcatctttctgaaagcgggcagcgaagaagagattttcgcgcatctgggtctggattatgtggagccgtgggaacgcaacgcg

SEQ ID NO: 2662 - protein, 394 aa, synthetic construct
  REGION 1..394: note = Variant of terminal deoxynucleotidyl transferase
MHHHHHHGGSGHPPSNTPEGEVPSVIARPVSQYACQRKTTLNNYNKKFTDALEIMAENYKFKENLIACLEAKRAASILKYLPFEVTSMKDIQGLPCITDQVRDVIEEIIEEGESSRVKEVLNDERYKAFKQFTSVFGVGVKTAEKWFRMGLRTVEEAKASKSLKLSKMQKAGFLYYEDLASMVSKEEADAVTLIVKNTVRTFLPDALVTITGGFRRGKPMGHDVDFLITNPGPKEDDELLHKVVDLLKKQGLLLYEDIKESTFVEGQLPSRKIDAMDNFQKCFAILKLYQPGVDNSAVGTSKKSDMAEVKDWKAIRVDLVITPFEQYAYALLGWTGSKEFRRDLRRYAEEERGMILDNHALYDLKKRIFLKAGSEEEIFAHLGLDYVEPWERNA

SEQ ID NO: 2663 - DNA, 1182 bp, synthetic construct
  misc_feature 1..1182: note = Variant of terminal deoxynucleotidyl transferase
  source 1..1182: mol_type = other DNA
atgcatcaccaccatcatcatgggggttctggtcatccgccaagcaataccccggagggggaggtgccgagcgttatcgcccgtccggttagtcagtacgcgtgccagcgcaagaccacgctgaataactacaacaaaaagtttaccgacgcgctggagatcatggccgagaactacaaatttaaagagaacctgatcgcgtgtctggaagccaagcgcgccgcgagtatttttaaatatctgccgttcgaggttaccagcatgaaagacatccaaggtctgccgtgcattaccgaccaagttcgtgacgtgatcgaggagatcatcgaagagggcgagagcagccgtgttaaagaagttctcaatgacgagcgctacaaggcctttaagcagttcaccagcgtgttcggtgtgggcgtgaaaaccgcggaaaagtggttccgtatgggcctccgtacggttgaagaagcacgcgccagtaagagtctgaagctgagcaagatgcagaaggcgggctttctgtattacgaggatctggcgagccgcgttagtaaagaagaagccgatgccgttacgctcatcgtgaagaacacggtgcgtacctttctgccggatgcgctggtgaccatcaccggcggtttccgccgtggcaaacctatgggccacgacgttgactttctgatcacgaatccgggcccgaaagaggatgacgagctgctccacaaagtggttgatctgctcaagacgcaaggtctgctgctgtacgaagacatcaaagagagcacgttcgtggaggggcaactgccaagtcgtaaaatcgacgccatggacaacttccagaagtgcttcgccattctcaagctgtaccagccgggcgtggataacagtgcggttgggacgagtaagaaaagtgacatggctgaggttaaggattggaaagcgattcgtgtggatctggtgatcacgccattcgagcagtacgcctatgcgctgctcggttggacgggcagcaaagaatttcgtcgcgatctgcgccgctatgcggaggaagagcgcggcatgatcctcgacaaccatgccctctacgacctgaaaaagcgcatctttctgaaagcgggcagcgaagaagagattttcgcgcatctgggtctggattatgtggagccgtgggaacgcaacgcg

SEQ ID NO: 2664 - protein, 394 aa, synthetic construct
  REGION 1..394: note = Variant of terminal deoxynucleotidyl transferase
MHHHHHHGGSGHPPSNTPEGEVPSVIARPVSQYACQRKTTLNNYNKKFTDALEIMAENYKFKENLIACLEAKRAASIFKYLPFEVTSMKDIQGLPCITDQVRDVIEEIIEEGESSRVKEVLNDERYKAFKQFTSVFGVGVKTAEKWFRMGLRTVEEARASKSLKLSKMQKAGFLYYEDLASRVSKEEADAVTLIVKNTVRTFLPDALVTITGGFRRGKPMGHDVDFLITNPGPKEDDELLHKVVDLLKTQGLLLYEDIKESTFVEGQLPSRKIDAMDNFQKCFAILKLYQPGVDNSAVGTSKKSDMAEVKDWKAIRVDLVITPFEQYAYALLGWTGSKEFRRDLRRYAEEERGMILDNHALYDLKKRIFLKAGSEEEIFAHLGLDYVEPWERNA

SEQ ID NO: 2665 - DNA, 1182 bp, synthetic construct; identical to SEQ ID NO: 2353
  misc_feature 1..1182: note = Variant of terminal deoxynucleotidyl transferase
  source 1..1182: mol_type = other DNA

SEQ ID NO: 2666 - protein, 394 aa, synthetic construct; identical to SEQ ID NO: 2354
  REGION 1..394: note = Variant of terminal deoxynucleotidyl transferase

SEQ ID NO: 2667 - DNA, 1182 bp, synthetic construct
  misc_feature 1..1182: note = Variant of terminal deoxynucleotidyl transferase
  source 1..1182: mol_type = other DNA
atgcatcaccaccatcatcatgggggttctggtcatccgccgagcaataccccggagggggaggtgccgagcgttatcgcccgtccggttagtcagtacgcgtgccagcgcaagaccacgctgaataactacaacaaaaagttcaccgacgcgctggagatcatggccgagaactacaaatttaaagagaacctgatcgcgtgtctggaagccaagcgcgccgcgagtatttttaaatatctgccgttcgaggttaccagcatgaaagacatccaaggtctgccgtgcattaccgaccaagttcgtgacgtgatcgaggagatcatcgaagagggcgagagcagccgtgttaaagaagttctcaatgacgagcgctacaaggcctttaagcagttcaccagcgtgttcggtgtgggcgtgaaaaccgcggaaaagtggtaccgtatgggcctccgtacggttgaagaagcaaaggccagtaagagtctgaagctgagcaagatgcagaaggcgggctttctgtattacgaggatctggcgagcatggttagtaaagaagaagccgatgccgttacgctcatcgtgaagaacacggtgcgtacctttctgccggatgcgctggtgaccatcaccggcggtttccgccgtggcaaacctatgggccacgacgttgactttctgatcacgaacccgggccgcaaagaggatgacgagctgctccacaaagtggttgatctgctcaagaagcaaggtctgctgctgtacgaagacatcagggagagcacgttcgtggaggggcaactgccaagtcataaaatcgacgccatggacaacttccagaagtgcttcgccattctcaagctgtaccagccgggcgtggataacagtgcggttgggacgagtaagaaaagtgacatggctgaggttaaggattggaaagcgattcgtgtggatctggtgatcacgccattcgagcagtacgcctatgcgctgctcggttggacgggcagcaaacaatttcgtcgcgatctgcgtcgctatgcggaggaagagcgcggcatgatcctcgacaaccatgccctctacgacctgaaaaagcgcatctttctgaaagcgggcagcgaagaagagattttcgcgcatctgggtctggattatgtggagccgtgggaacgcaacgcg

SEQ ID NO: 2668 - protein, 394 aa, synthetic construct
  REGION 1..394: note = Variant of terminal deoxynucleotidyl transferase
MHHHHHHGGSGHPPSNTPEGEVPSVIARPVSQYACQRKTTLNNYNKKFTDALEIMAENYKFKENLIACLEAKRAASIFKYLPFEVTSMKDIQGLPCITDQVRDVIEEIIEEGESSRVKEVLNDERYKAFKQFTSVFGVGVKTAEKWYRMGLRTVEEAKASKSLKLSKMQKAGFLYYEDLASMVSKEEADAVTLIVKNTVRTFLPDALVTITGGFRRGKPMGHDVDFLITNPGRKEDDELLHKVVDLLKKQGLLLYEDIRESTFVEGQLPSHKIDAMDNFQKCFAILKLYQPGVDNSAVGTSKKSDMAEVKDWKAIRVDLVITPFEQYAYALLGWTGSKQFRRDLRRYAEEERGMILDNHALYDLKKRIFLKAGSEEEIFAHLGLDYVEPWERNA

SEQ ID NO: 2669 - DNA, 1182 bp, synthetic construct
  misc_feature 1..1182: note = Variant of terminal deoxynucleotidyl transferase
  source 1..1182: mol_type = other DNA
atgcatcaccaccatcatcatgggggttctggtcatccgccgagcaataccccggagggggaggtgccgagcgttatcgcccgtccggttagtcagtacgcgtgccagcgcaagaccacgctgaataactacaacaaaaagttcaccgacgcgctggagatcatggccgagaactacaaatttaaagagaacctgatcgcgtgtctggaagccaagcgcgccgcgagtatttttaaatatctgccgttcgaggttaccagcatgaaagacatccaaggtctgccgtgcattaccgaccaagttcgtgacgtgatcgaggagatcatcgaagagggcgagagcagccgtgttaaagaagttctcaatgacgagcgctacaaggcctttaagcagttcaccagcgtgttcggtgtgggcgtgaaaaccgcggaaaagtggtaccgtatgggcctccgtacggttgaagaagcaaaggccagtaagagtctgaagctgagcaagatgcagaaggcgggctttctgtattacgaggatctggcgagcatggttagtaaagaagaagccgatgccgttacgctcatcgtgaagaacacggtgcgtacctttctgccggatgcgctggtgaccatcaccggcggtttccgccgtggcaaacctatgggccacgacgttgactttctgatcacgaacccgggccgcaaagaggatgacgagctgctccacaaagtggttgatctgctcaagaagcaaggtctgctgctgtacgaagacatcaaagagagcacgttcgtggaggggcaactgccaagtcataaaatcgacgccatggacaacttccagaagtgcttcgccattctcaagctgtaccagccgggcgtggataacagtgcggttgggacgagtaagaaaagtgacatggctgaggttaaggattggaaagcgattcgtgtggatctggtgatcacgccattcgagcagtacgcctatgcgctgctcggttggacgggcagcaaacaatttcgtcgcgatctgtgtcgctatgcggaggaagagcgcggcatgatcctcgacaaccatgccctctacgacctgaaaaagcgcatctttctgaaagcgggcagcgaagaagagattttcgcgcatctgggtctggattatgtggagccgtgggaacgcaacgcg

SEQ ID NO: 2670 - protein, 394 aa, synthetic construct
  REGION 1..394: note = Variant of terminal deoxynucleotidyl transferase
MHHHHHHGGSGHPPSNTPEGEVPSVIARPVSQYACQRKTTLNNYNKKFTDALEIMAENYKFKENLIACLEAKRAASIFKYLPFEVTSMKDIQGLPCITDQVRDVIEEIIEEGESSRVKEVLNDERYKAFKQFTSVFGVGVKTAEKWYRMGLRTVEEAKASKSLKLSKMQKAGFLYYEDLASMVSKEEADAVTLIVKNTVRTFLPDALVTITGGFRRGKPMGHDVDFLITNPGRKEDDELLHKVVDLLKKQGLLLYEDIKESTFVEGQLPSHKIDAMDNFQKCFAILKLYQPGVDNSAVGTSKKSDMAEVKDWKAIRVDLVITPFEQYAYALLGWTGSKQFRRDLCRYAEEERGMILDNHALYDLKKRIFLKAGSEEEIFAHLGLDYVEPWERNA

SEQ ID NO: 2671 - DNA, 1182 bp, synthetic construct
  misc_feature 1..1182: note = Variant of terminal deoxynucleotidyl transferase
  source 1..1182: mol_type = other DNA
atgcatcaccaccatcatcatgggggttctggtcatccgccgagcaataccccggagggggaggtgccgagcgttatcgcccgtccggttagtcagtacgcgtgccagcgcaagaccacgctgaataactacaacaaaaagttcaccgacgcgctggagatcatggccgagaactacaaatttaaagagaacctgatcgcgtgtctggaagccaagcgcgccgcgagtatttttaaatatctgccgttcgaggttaccagcatgaaagacatccaaggtctgccgtgcattaccgaccaagttcgtgacgtgatcgaggagatcatcgaagagggcgagagcagccgtgttaaagaagttctcaatgacgagcgctacaaggcctttaagcagttcaccagcgtgttcggtgtgggcgtgaaaaccgcggaaaagtggtaccgtatgggcctccgtacggttgaagaagcaaaggccagtaagagtctgaagctgagcaagatgcagaaggcgggctttctgtattacgaggatctggcgagcatggttagtaaagaagaagccgatgccgttacgctcatcgtgaagaacacggtgcgtacctttctgccggatgcgctggtgaccatcaccggcggtttccgccgtggcaaacctatgggccacgacgttgactttctgatcacgaacccgggccgcaaagaggatgacgagctgctccacaaagtggttgatctgctcaagaagcaaggtctgctgctgtacgaagacatcaaagagagcacgttcgtggaggggcaactgccaagtcatatgatcgacgccatggacaacttccagaagtgcttcgccattctcaagctgtaccagccgggcgtggataacagtgcggttgggacgagtaagaaaagtgacatggctgaggttaaggattggaaagcgattcgtgtggatctggtgatcacgccattcgagcagtacgcctatgcgctgctcggttggacgggcagcaaacaatttcgtcgcgatctgcgtcgctatgcggaggaagagcgcggcatgatcctcgacaaccatgccctctacgacctgaaaaagcgcatctttctgaaagcgggcagcgaagaagagattttcgcgcatctgggtctggattatgtggagccgtgggaacgcaacgcg

SEQ ID NO: 2672 - protein, 394 aa, synthetic construct
  REGION 1..394: note = Variant of terminal deoxynucleotidyl transferase
MHHHHHHGGSGHPPSNTPEGEVPSVIARPVSQYACQRKTTLNNYNKKFTDALEIMAENYKFKENLIACLEAKRAASIFKYLPFEVTSMKDIQGLPCITDQVRDVIEEIIEEGESSRVKEVLNDERYKAFKQFTSVFGVGVKTAEKWYRMGLRTVEEAKASKSLKLSKMQKAGFLYYEDLASMVSKEEADAVTLIVKNTVRTFLPDALVTITGGFRRGKPMGHDVDFLITNPGRKEDDELLHKVVDLLKKQGLLLYEDIKESTFVEGQLPSHMIDAMDNFQKCFAILKLYQPGVDNSAVGTSKKSDMAEVKDWKAIRVDLVITPFEQYAYALLGWTGSKQFRRDLRRYAEEERGMILDNHALYDLKKRIFLKAGSEEEIFAHLGLDYVEPWERNA

SEQ ID NO: 2673 - DNA, 1182 bp, synthetic construct
  misc_feature 1..1182: note = Variant of terminal deoxynucleotidyl transferase
  source 1..1182: mol_type = other DNA
atgcatcaccaccatcatcatgggggttctggtcatccgccgagcaataccccggagggggaggtgccgagcgttatcgcccgtccggttagtcagtacgcgtgccagcgcaagaccacgctgaataactacaacaaaaagttcaccgacgcgctggagatcatggccgagaactacaaatttaaagagaacctgatcgcgtgtctggaagccaagcgcgccgcgagtatttttaaatatctgccgttcgaggttaccagcatgaaagacatccaaggtctgccgtgcattaccgaccaagttcgtgacgtgatcgaggagatcatcgaagagggcgagagcagccgtgttaaagaagttctcaatgacgagcgctacaaggcctttaagcagttcaccagcgtgttcggtgtgggcgtgaaaaccgcggaaaagtggtaccgtatgggcctccgtacggttgaagaagcaaaggccagtaagagtctgaagctgagcaagatgcagaaggcgggctttctgtattacgaggatctggcgagcatggttagtaaagaagaagccgatgccgttacgctcatcgtgaagaacacggtgcgtacctttctgccggatgcgctggtgaccatcaccggcggtttccgccgtggcaaacctatgggccacgacgttgactttctgatcacgaacccgggccgcaaagaggatgacgagctgctccacaaagtggttgatctgctcaagaagcaaggtctgctgctgtacgaagacatcaaagagagcacgttcgtggaggggcaactgccaagtcataaaatcgacgccatggacaacttccagaagtgcttcgccattctcaagctgtaccagccgggcgtggataacagtgcggttgggacgagtaagaaaagtgacatggctgaggttaaggattggaaagcgattcgtgtggatctggtgatcacgccattcgagcagtacgcctatgcgctgctcggttggacgggcagcaaacaatttcgtcgcgatctgcgttggtatgcggaggaagagcgcggcatgatcctcgacaaccatgccctctacgacctgaaaaagcgcatctttctgaaagcgggcagcgaagaagagattttcgcgcatctgggtctggattatgtggagccgtgggaacgcaacgcg

SEQ ID NO: 2674 - protein, 394 aa, synthetic construct
  REGION 1..394: note = Variant of terminal deoxynucleotidyl transferase
MHHHHHHGGSGHPPSNTPEGEVPSVIARPVSQYACQRKTTLNNYNKKFTDALEIMAENYKFKENLIACLEAKRAASIFKYLPFEVTSMKDIQGLPCITDQVRDVIEEIIEEGESSRVKEVLNDERYKAFKQFTSVFGVGVKTAEKWYRMGLRTVEEAKASKSLKLSKMQKAGFLYYEDLASMVSKEEADAVTLIVKNTVRTFLPDALVTITGGFRRGKPMGHDVDFLITNPGRKEDDELLHKVVDLLKKQGLLLYEDIKESTFVEGQLPSHKIDAMDNFQKCFAILKLYQPGVDNSAVGTSKKSDMAEVKDWKAIRVDLVITPFEQYAYALLGWTGSKQFRRDLRWYAEEERGMILDNHALYDLKKRIFLKAGSEEEIFAHLGLDYVEPWERNA

SEQ ID NO: 2675 - DNA, 1182 bp, synthetic construct
  misc_feature 1..1182: note = Variant of terminal deoxynucleotidyl transferase
  source 1..1182: mol_type = other DNA
atgcatcaccaccatcatcatgggggttctggtcatccgccgagcaataccccggagggggaggtgccgagcgttatcgcccgtccggttagtcagtacgcgtgccagcgcaagaccacgctgaataactacaacaaaaagttcaccgacgcgctggagatcatggccgagaactacaaatttaaagagaacctgatcgcgtgtctggaagccaagcgcgccgcgagtatttttaaatatctgccgttcgaggttaccagcatgaaagacatccaaggtctgccgtgcattaccgaccaagttcgtgacgtgatcgaggagatcatcgaagagggcgagagcagccgtgttaaagaagttctcaatgacgagcgctacaaggcctttaagcagttcaccagcgtgttcggtgtgggcgtgaaaaccgcggaaaagtggtaccgtatgggcctccgtacggttgaagaagcaaaggccagtaagagtctgaagctgagcaagatgcagaaggcgggctttctgtattacgaggatctggcgagcatggttagtaaagaagaagccgatgccgttacgctcatcgtgaagaacacggtgcgtacctttctgccggatgcgctggtgaccatcaccggcggtttccgccgtggcaaacctatgggccacgacgttgactttctgatcacgaacccgggccgcaaagaggatgacgagctgctccacaaagtggttgatctgctcaagaagcaaggtctgctgctgtacgaagacatcaaagagagcacgttcgtggaggggcaactgccaagtcataaagaggacgccatggacaacttccagaagtgcttcgccattctcaagctgtaccagccgggcgtggataacagtgcggttgggacgagtaagaaaagtgacatggctgaggttaaggattggaaagcgattcgtgtggatctggtgatcacgccattcgagcagtacgcctatgcgctgctcggttggacgggcagcaaacaatttcgtcgcgatctgcgtcgctatgcggaggaagagcgcggcatgatcctcgacaaccatgccctctacgacctgaaaaagcgcatctttctgaaagcgggcagcgaagaagagattttcgcgcatctgggtctggattatgtggagccgtgggaacgcaacgcg

SEQ ID NO: 2676 - protein, 394 aa, synthetic construct
  REGION 1..394: note = Variant of terminal deoxynucleotidyl transferase
MHHHHHHGGSGHPPSNTPEGEVPSVIARPVSQYACQRKTTLNNYNKKFTDALEIMAENYKFKENLIACLEAKRAASIFKYLPFEVTSMKDIQGLPCITDQVRDVIEEIIEEGESSRVKEVLNDERYKAFKQFTSVFGVGVKTAEKWYRMGLRTVEEAKASKSLKLSKMQKAGFLYYEDLASMVSKEEADAVTLIVKNTVRTFLPDALVTITGGFRRGKPMGHDVDFLITNPGRKEDDELLHKVVDLLKKQGLLLYEDIKESTFVEGQLPSHKEDAMDNFQKCFAILKLYQPGVDNSAVGTSKKSDMAEVKDWKAIRVDLVITPFEQYAYALLGWTGSKQFRRDLRRYAEEERGMILDNHALYDLKKRIFLKAGSEEEIFAHLGLDYVEPWERNA

SEQ ID NO: 2677 - DNA, 1182 bp, synthetic construct
  misc_feature 1..1182: note = Variant of terminal deoxynucleotidyl transferase
  source 1..1182: mol_type = other DNA
atgcatcaccaccatcatcatgggggttctggtcatccgccgagcaataccccggagggggaggtgccgagcgttatcgcccgtccggttagtcagtacgcgtgccagcgcaagaccacgctgaataactacaacaaaaagttcaccgacgcgctggagatcatggccgagaactacaaatttaaagagaacctgatcgcgtgtctggaagccaagcgcgccgcgagtatttttaaatatctgccgttcgaggttaccagcatgaaagacatccaaggtctgccgtgcattaccgaccaagttcgtgacgtgatcgaggagatcatcgaagagggcgagagcagccgtgttaaagaagttctcaatgacgagcgctacaaggcctttaagcagttcaccagcgtgttcggtgtgggcgtgaaaaccgcggaaaagtggtaccgtatgggcctccgtacggttgaagaagcaaaggccagtaagagtctgaagctgagcgctatgcagaaggcgggctttctgtattacgaggatctggcgagcatggttagtaaagaagaagccgatgccgttacgctcatcgtgaagaacacggtgcgtacctttctgccggatgcgctggtgaccatcaccggcggtttccgccgtggcaaacctatgggccacgacgttgactttctgatcacgaacccgggccgcaaagaggatgacgagctgctccacaaagtggttgatctgctcaagaagcaaggtctgctgctgtacgaagacatcaaagagagcacgttcgtggaggggcaactgccaagtcataaaatcgacgccatggacaacttccagaagtgcttcgccattctcaagctgtaccagccgggcgtggataacagtgcggttgggacgagtaagaaaagtgacatggctgaggttaaggattggaaagcgattcgtgtggatctggtgatcacgccattcgagcagtacgcctatgcgctgctcggttggacgggcagcaaacaatttcgtcgcgatctgcgtcgctatgcggaggaagagcgcggcatgatcctcgacaaccatgccctctacgacctgaaaaagcgcatctttctgaaagcgggcagcgaagaagagattttcgcgcatctgggtctggattatgtggagccgtgggaacgcaacgcg

SEQ ID NO: 2678 - protein, 394 aa, synthetic construct
  REGION 1..394: note = Variant of terminal deoxynucleotidyl transferase
MHHHHHHGGSGHPPSNTPEGEVPSVIARPVSQYACQRKTTLNNYNKKFTDALEIMAENYKFKENLIACLEAKRAASIFKYLPFEVTSMKDIQGLPCITDQVRDVIEEIIEEGESSRVKEVLNDERYKAFKQFTSVFGVGVKTAEKWYRMGLRTVEEAKASKSLKLSAMQKAGFLYYEDLASMVSKEEADAVTLIVKNTVRTFLPDALVTITGGFRRGKPMGHDVDFLITNPGRKEDDELLHKVVDLLKKQGLLLYEDIKESTFVEGQLPSHKIDAMDNFQKCFAILKLYQPGVDNSAVGTSKKSDMAEVKDWKAIRVDLVITPFEQYAYALLGWTGSKQFRRDLRRYAEEERGMILDNHALYDLKKRIFLKAGSEEEIFAHLGLDYVEPWERNA

SEQ ID NO: 2679 - DNA, 1182 bp, synthetic construct
  misc_feature 1..1182: note = Variant of terminal deoxynucleotidyl transferase
  source 1..1182: mol_type = other DNA
atgcatcaccaccatcatcatgggggttctggtcatccgccgagcaataccccggagggggaggtgccgagcgttatcgcccgtccggttagtcagtacgcgtgccagcgcaagaccacgctgaataactacaacaaaaagttcaccgacgcgctggagatcatggccgagaactacaaatttaaagagaacctgatcgcgtgtctggaagccaagcgcgccgcgagtatttttaaatatctgccgttcgaggttaccagcatgaaagacatccaaggtctgccgtgcattaccgaccaagttcgtgacgtgatcgaggagatcatcgaagagggcgagagcagccgtgttaaagaagttctcaatgacgagcgctacaaggcctttaagcagttcaccagcgtgttcggtgtgggcgtgaaaaccgcggaaaagtggtaccgtatgggcctccgtacggttgaagaagcaaaggccagtaagactctgaagctgagcaagatgcagaaggcgggctttctgtattacgaggatctggcgagcatggttagtaaagaagaagccgatgccgttacgctcatcgtgaagaacacggtgcgtacctttctgccggatgcgctggtgaccatcaccggcggtttccgccgtggcaaacctatgggccacgacgttgactttctgatcacgaacccgggccgcaaagaggatgacgagctgctccacaaagtggttgatctgctcaagaagcaaggtctgctgctgtacgaagacatcaaagagagcacgttcgtggaggggcaactgccaagtcataaaatcgacgccatggacaacttccagaagtgcttcgccattctcaagctgtaccagccgggcgtggataacagtgcggttgggacgagtaagaaaagtgacatggctgaggttaaggattggaaagcgattcgtgtggatctggtgatcacgccattcgagcagtacgcctatgcgctgctcggttggacgggcagcaaacaatttcgtcgcgatctgcgtcgctatgcggaggaagagcgcggcatgatcctcgacaaccatgccctctacgacctgaaaaagcgcatctttctgaaagcgggcagcgaagaagagattttcgcgcatctgggtctggattatgtggagccgtgggaacgcaacgcg

SEQ ID NO: 2680 - protein, 394 aa, synthetic construct
  REGION 1..394: note = Variant of terminal deoxynucleotidyl transferase
MHHHHHHGGSGHPPSNTPEGEVPSVIARPVSQYACQRKTTLNNYNKKFTDALEIMAENYKFKENLIACLEAKRAASIFKYLPFEVTSMKDIQGLPCITDQVRDVIEEIIEEGESSRVKEVLNDERYKAFKQFTSVFGVGVKTAEKWYRMGLRTVEEAKASKTLKLSKMQKAGFLYYEDLASMVSKEEADAVTLIVKNTVRTFLPDALVTITGGFRRGKPMGHDVDFLITNPGRKEDDELLHKVVDLLKKQGLLLYEDIKESTFVEGQLPSHKIDAMDNFQKCFAILKLYQPGVDNSAVGTSKKSDMAEVKDWKAIRVDLVITPFEQYAYALLGWTGSKQFRRDLRRYAEEERGMILDNHALYDLKKRIFLKAGSEEEIFAHLGLDYVEPWERNA

SEQ ID NO: 2681 - DNA, 1182 bp, synthetic construct
  misc_feature 1..1182: note = Variant of terminal deoxynucleotidyl transferase
  source 1..1182: mol_type = other DNA
atgcatcaccaccatcatcatgggggttctggtcatccgccgagcaataccccggagggggaggtgccgagcgttatcgcccgtccggttagtcagtacgcgtgccagcgcaagaccacgctgaataactacaacaaaaagttcaccgacgcgctggagatcatggccgagaactacaaatttaaagagaacctgatcgcgtgtctggaagccaagcgcgccgcgagtatttttaaatatctgccgttcgaggttaccagcatgaaagacatccaaggtctgccgtgcattaccgaccaagttcgtgacgtgatcgaggagatcatcgaagagggcgagagcagccgtgttaaagaagttctcaatgacgagcgctacaaggcctttaagcagttcaccagcgtgttcggtgtgggcgtgaaaaccgcggaaaagtggtaccgtatgggcctccgtacggttgaagaagcaaaggccagtaagagtctgaagctgagcaagatgcagaaggcgggctttctgtattacgaggatctggcgagcatggttagtaaagaagaagccgatgccgttacgctcatcgtgaagaacacggtgcgtacctttctgccggatgcgctggtgaccatcaccggcggtttccgccgtggcaaacctatgggccacgacgttgactttctgatcacgaacccgggccgcaaagaggatgacgagctgctccacaaagtggttgatctgctcaagaagcaaggtctgctgctgtacgaagacatcaaagagagcacgttcgtggaggggcaactgccaagtcataaaatcgacgccatggacaacttccagaagtgcttcgccattctcaagctgtaccagccgggcgtggataacagtgcggttgggacgagtaagaaaagtgacatggctgaggttaaggattggaaagcgattcgtgtggatctggtgatcacgccattcgagcagtacgcctatgcgctgctcggttggacgggcagcaaacaatttcgtcgcgatctgcgtcgctatgcggaggaagagcgcggcatgatcctcgacaaccatgccctctacgacctaggtaagcgcatctttctgaaagcgggcagcgaagaagagattttcgcgcatctgggtctggattatgtggagccgtgggaacgcaacgcg

SEQ ID NO: 2682 - protein, 394 aa, synthetic construct
  REGION 1..394: note = Variant of terminal deoxynucleotidyl transferase
MHHHHHHGGSGHPPSNTPEGEVPSVIARPVSQYACQRKTTLNNYNKKFTDALEIMAENYKFKENLIACLEAKRAASIFKYLPFEVTSMKDIQGLPCITDQVRDVIEEIIEEGESSRVKEVLNDERYKAFKQFTSVFGVGVKTAEKWYRMGLRTVEEAKASKSLKLSKMQKAGFLYYEDLASMVSKEEADAVTLIVKNTVRTFLPDALVTITGGFRRGKPMGHDVDFLITNPGRKEDDELLHKVVDLLKKQGLLLYEDIKESTFVEGQLPSHKIDAMDNFQKCFAILKLYQPGVDNSAVGTSKKSDMAEVKDWKAIRVDLVITPFEQYAYALLGWTGSKQFRRDLRRYAEEERGMILDNHALYDLGKRIFLKAGSEEEIFAHLGLDYVEPWERNA

SEQ ID NO: 2683 - DNA, 1182 bp, synthetic construct
  misc_feature 1..1182: note = Variant of terminal deoxynucleotidyl transferase
  source 1..1182: mol_type = other DNA
atgcatcaccaccatcatcatgggggttctggtcatccgccgagcaataccccggagggggaggtgccgagcgttatcgcccgtccggttagtcagtacgcgtgccagcgcaagaccacgctgaataactacaacaaaaagttcaccgacgcgctggagatcatggccgagaactacaaatttaaagagaacctgatcgcgtgtctggaagccaagcgcgccgcgagtatttttaaatatctgccgttcgaggttaccagcatgaaagacatccaaggtctgccgtgcattaccgaccaagttcgtgacgtgatcgaggagatcatcgaagagggcgagagcagccgtgttaaagaagttctcaatgacgagcgctacaaggcctttaagcagttcaccagcgtgttcggtgtgggcgtgaaaaccgcggaaaagtggtaccgtatgggcctccgtacggttgaagaagcaaaggccagtaagagtctgaagctgagcaagatgcagaaggcgggctttctgtattacgaggatctggcgagcatggttagtaaagaagaagccgatgccgttacgctcatcgtgaagaacacggtgcgtacctttctgccggatgcgctggtgaccatcaccggcggtttccgccgtggcaaacctatgggccacgacgttgactttctgatcacgaacccgggccgcaaagaggatgacgagctgctccacaaagtggttgatctgctcaagaagcaaggtctgctgctgtacgaagacatcaaagagagcacgttcgtggaggggcaactgccaagtcataaaatcgacgccatggacaacttccagaagtgcttcgccattctcaagctgtaccagccgggcgtggataacagtgcggttgggacgagtaagaaaagtgacatggctgaggttaaggattggaaagcgattcgtgtggatctggtgatcacgccattcgagcagtacgcctatgcgctgctcggttggacgggcagcaaacaatttcgtcgcgatctgcgtcagtatgcggaggaagagcgcggcatgatcctcgacaaccatgccctctacgacctgaaaaagcgcatctttctgaaagcgggcagcgaagaagagattttcgcgcatctgggtctggattatgtggagccgtgggaacgcaacgcg

SEQ ID NO: 2684 - protein, 394 aa, synthetic construct
  REGION 1..394: note = Variant of terminal deoxynucleotidyl transferase
MHHHHHHGGSGHPPSNTPEGEVPSVIARPVSQYACQRKTTLNNYNKKFTDALEIMAENYKFKENLIACLEAKRAASIFKYLPFEVTSMKDIQGLPCITDQVRDVIEEIIEEGESSRVKEVLNDERYKAFKQFTSVFGVGVKTAEKWYRMGLRTVEEAKASKSLKLSKMQKAGFLYYEDLASMVSKEEADAVTLIVKNTVRTFLPDALVTITGGFRRGKPMGHDVDFLITNPGRKEDDELLHKVVDLLKKQGLLLYEDIKESTFVEGQLPSHKIDAMDNFQKCFAILKLYQPGVDNSAVGTSKKSDMAEVKDWKAIRVDLVITPFEQYAYALLGWTGSKQFRRDLRQYAEEERGMILDNHALYDLKKRIFLKAGSEEEIFAHLGLDYVEPWERNA

SEQ ID NO: 2685 - DNA, 1182 bp, synthetic construct
  misc_feature 1..1182: note = Variant of terminal deoxynucleotidyl transferase
  source 1..1182: mol_type = other DNA
atgcatcaccaccatcatcatgggggttctggtcatccgccgagcaataccccggagggggaggtgccgagcgttatcgcccgtccggttagtcagtacgcgtgccagcgcaagaccacgctgaataactacaacaaaaagttcaccgacgcgctggagatcatggccgagaactacaaatttaaagagaacctgatcgcgtgtctggaagccaagcgcgccgcgagtatttttaaatatctgccgttcgaggttaccagcatgaaagacatccaaggtctgccgtgcattaccgaccaagttcgtgacgtgatcgaggagatcatcgaagagggcgagagcagccgtgttaaagaagttctcaatgacgagcgctacaaggcctttaagcagttcaccagcgtgttcggtgtgggcgtgaaaaccgcggaaaagtggtaccgtatgggcctccgtacggttgaagaagcaaaggccagtaagagtctgaagctgagcaagatgcagaaggcgggctttctgtattacgaggatctggcgagcatggttagtaaagaagaagccgatgccgttacgctcatcgtgaagaacacggtgcgtacctttctgccggatgcgctggtgaccatcaccggcggtttccgccgtggcaaacctatgggccacgacgttgactttctgatcacgaacccgggccgcaaagaggatgacgagctgctccacaaagtggttgatctgctcaagaagcaaggtctgctgctgtacgaagacatcaaacctagcacgttcgtggaggggcaactgccaagtcataaaatcgacgccatggacaacttccagaagtgcttcgccattctcaagctgtaccagccgggcgtggataacagtgcggttgggacgagtaagaaaagtgacatggctgaggttaaggattggaaagcgattcgtgtggatctggtgatcacgccattcgagcagtacgcctatgcgctgctcggttggacgggcagcaaacaatttcgtcgcgatctgcgtcgctatgcggaggaagagcgcggcatgatcctcgacaaccatgccctctacgacctgaaaaagcgcatctttctgaaagcgggcagcgaagaagagattttcgcgcatctgggtctggattatgtggagccgtgggaacgcaacgcg

SEQ ID NO: 2686 - protein, 394 aa, synthetic construct
  REGION 1..394: note = Variant of terminal deoxynucleotidyl transferase
MHHHHHHGGSGHPPSNTPEGEVPSVIARPVSQYACQRKTTLNNYNKKFTDALEIMAENYKFKENLIACLEAKRAASIFKYLPFEVTSMKDIQGLPCITDQVRDVIEEIIEEGESSRVKEVLNDERYKAFKQFTSVFGVGVKTAEKWYRMGLRTVEEAKASKSLKLSKMQKAGFLYYEDLASMVSKEEADAVTLIVKNTVRTFLPDALVTITGGFRRGKPMGHDVDFLITNPGRKEDDELLHKVVDLLKKQGLLLYEDIKPSTFVEGQLPSHKIDAMDNFQKCFAILKLYQPGVDNSAVGTSKKSDMAEVKDWKAIRVDLVITPFEQYAYALLGWTGSKQFRRDLRRYAEEERGMILDNHALYDLKKRIFLKAGSEEEIFAHLGLDYVEPWERNA

SEQ ID NO: 2687 - DNA, 1182 bp, synthetic construct
  misc_feature 1..1182: note = Variant of terminal deoxynucleotidyl transferase
  source 1..1182: mol_type = other DNA
atgcatcaccaccatcatcatgggggttctggtcatccgccgagcaataccccggagggggaggtgccgagcgttatcgcccgtccggttagtcagtacgcgtgccagcgcaagaccacgctgaataactacaacaaaaagttcaccgacgcgctggagatcatggccgagaactacaaatttaaagagaacctgatcgcgtgtctggaagccaagcgcgccgcgagtatttttaaatatctgccgttcgaggttaccagcatgaaagacatccaaggtctgccgtgcattaccgaccaagttcgtgacgtgatcgaggagatcatcgaagagggcgagagcagccgtgttaaagaagttctcaatgacgagcgctacaaggcctttaagcagttcaccagcgtgttcggtgtgggcgtgaaaaccgcggaaaagtggtaccgtatgggcctccgtacggttgaagaagcaaaggccagtaagagtctgaagctgagcaagatgcagaaggcgggctttctgtattacgaggatctggcgagcatggttagtaaagaagaagccgatgccgttacgctcatcgtgaagaacacggtgcgtacctttctgccggatgcgctggtgaccatcaccggcggtttccgccgtggcaaacctatgggccacgacgttgactttctgatcacgaacccgggccgcaaagaggatgacgagctgctccacaaagtggttgatctgctcaagaagcaaggtctgctgctgtacgaagacatcaaagagagcacgttcgtggaggggcaactgccaagtcataaaatcgacgccatggacaacttctcgaagtgcttcgccattctcaagctgtaccagccgggcgtggataacagtgcggttgggacgagtaagaaaagtgacatggctgaggttaaggattggaaagcgattcgtgtggatctggtgatcacgccattcgagcagtacgcctatgcgctgctcggttggacgggcagcaaacaatttcgtcgcgatctgcgtcgctatgcggaggaagagcgcggcatgatcctcgacaaccatgccctctacgacctgaaaaagcgcatctttctgaaagcgggcagcgaagaagagattttcgcgcatctgggtctggattatgtggagccgtgggaacgcaacgcg

SEQ ID NO: 2688 - protein, 394 aa, synthetic construct
  REGION 1..394: note = Variant of terminal deoxynucleotidyl transferase
MHHHHHHGGSGHPPSNTPEGEVPSVIARPVSQYACQRKTTLNNYNKKFTDALEIMAENYKFKENLIACLEAKRAASIFKYLPFEVTSMKDIQGLPCITDQVRDVIEEIIEEGESSRVKEVLNDERYKAFKQFTSVFGVGVKTAEKWYRMGLRTVEEAKASKSLKLSKMQKAGFLYYEDLASMVSKEEADAVTLIVKNTVRTFLPDALVTITGGFRRGKPMGHDVDFLITNPGRKEDDELLHKVVDLLKKQGLLLYEDIKESTFVEGQLPSHKIDAMDNFSKCFAILKLYQPGVDNSAVGTSKKSDMAEVKDWKAIRVDLVITPFEQYAYALLGWTGSKQFRRDLRRYAEEERGMILDNHALYDLKKRIFLKAGSEEEIFAHLGLDYVEPWERNA

SEQ ID NO: 2689 - DNA, 1182 bp, synthetic construct
  misc_feature 1..1182: note = Variant of terminal deoxynucleotidyl transferase
  source 1..1182: mol_type = other DNA
atgcatcaccaccatcatcatgggggttctggtcatccgccgagcaataccccggagggggaggtgccgagcgttatcgcccgtccggttagtcagtacgcgtgccagcgcaagaccacgctgaataactacaacaaaaagttcaccgacgcgctggagatcatggccgagaactacaaatttaaagagaacctgatcgcgtgtctggaagccaagcgcgccgcgagtatttttaaatatctgccgttcgaggttaccagcatgaaagacatccaaggtctgccgtgcattaccgaccaagttcgtgacgtgatcgaggagatcatcgaagagggcgagagcagccgtgttaaagaagttctcaatgacgagcgctacaaggcctttaagcagttcaccagcgtgttcggtgtgggcgtgaaaaccgcggaaaagtggtaccgtatgggcctccgtacggttgaagaagcaaaggccagtaagagtctgaagctgagcaagatgcagaaggcgggctttctgtattacgaggatctggcgagcatggttagtaaagaagaagccgatgccgttacgctcatcgtgaagaacacggtgcgtacctttctgccggatgcgctggtgaccatcaccggcggtttccgccgtggcaaacctatgggccacgacgttgactttctgatcacgaacccgggccgcaaagaggatgacgagctgctccacaaagtggttgatctgctcaagaagcaaggtctgctgctgtacgaagacatcaaagagagcacgttcgtggaggggcaactgccaagtcatgggatcgacgccatggacaacttccagaagtgcttcgccattctcaagctgtaccagccgggcgtggataacagtgcggttgggacgagtaagaaaagtgacatggctgaggttaaggattggaaagcgattcgtgtggatctggtgatcacgccattcgagcagtacgcctatgcgctgctcggttggacgggcagcaaacaatttcgtcgcgatctgcgtcgctatgcggaggaagagcgcggcatgatcctcgacaaccatgccctctacgacctgaaaaagcgcatctttctgaaagcgggcagcgaagaagagattttcgcgcatctgggtctggattatgtggagccgtgggaacgcaacgcg

SEQ ID NO: 2690 - protein, 394 aa, synthetic construct
  REGION 1..394: note = Variant of terminal deoxynucleotidyl transferase
MHHHHHHGGSGHPPSNTPEGEVPSVIARPVSQYACQRKTTLNNYNKKFTDALEIMAENYKFKENLIACLEAKRAASIFKYLPFEVTSMKDIQGLPCITDQVRDVIEEIIEEGESSRVKEVLNDERYKAFKQFTSVFGVGVKTAEKWYRMGLRTVEEAKASKSLKLSKMQKAGFLYYEDLASMVSKEEADAVTLIVKNTVRTFLPDALVTITGGFRRGKPMGHDVDFLITNPGRKEDDELLHKVVDLLKKQGLLLYEDIKESTFVEGQLPSHGIDAMDNFQKCFAILKLYQPGVDNSAVGTSKKSDMAEVKDWKAIRVDLVITPFEQYAYALLGWTGSKQFRRDLRRYAEEERGMILDNHALYDLKKRIFLKAGSEEEIFAHLGLDYVEPWERNA

SEQ ID NO: 2691 - DNA, 1182 bp, synthetic construct
  misc_feature 1..1182: note = Variant of terminal deoxynucleotidyl transferase
  source 1..1182: mol_type = other DNA
atgcatcaccaccatcatcatgggggttctggtcatccgccgagcaataccccggagggggaggtgccgagcgttatcgcccgtccggttagtcagtacgcgtgccagcgcaagaccacgctgaataactacaacaaaaagttcaccgacgcgctggagatcatggccgagaactacaaatttaaagagaacctgatcgcgtgtctggaagccaagcgcgccgcgagtatttttaaatatctgccgttcgaggttaccagcatgaaagacatccaaggtctgccgtgcattaccgaccaagttcgtgacgtgatcgaggagatcatcgaagagggcgagagcagccgtgttaaagaagttctcaatgacgagcgctacaaggcctttaagcagttcaccagcgtgttcggtgtgggcgtgaaaaccgcggaaaagtggtaccgtatgggcctccgtacggttgaagaagcaaaggccagtaagagtctgaagctgagcaagatgcagaaggcgggctttctgtattacgaggatctggcgagcatggttagtaaagaagaagccgatgccgttacgctcatcgtgaagaacacggtgcgtacctttctgccggatgcgctggtgaccatcaccggcggtttccgccgtggcaaacctatgggccacgacgttgactttctgatcacgaacccgggccgcaaagaggatgacgagctgctccacaaagtggttgatctgctcaagaagcaaggtctgctgctgtacgaagacatcaaagagagcacgttcgtggaggggcaactgccaagtcataaaatcgacgccatggacaacttccagaagtgcttcgccattctcaagctgtaccagccgggcgtggataacagtgcggttgggacgagtaagaaaagtgacatggctgaggttaaggattggaaagcgattcgtgtggatctggtgatcacgccattcgagcagtacgcctatgcgctgctcggttggacgggcagcaaacaatttcgtcgcgatctgcgtcgctatgcggaggaagagcgcggcatgatcctcgacaaccatgccctctacgacctgaaaaagggtatctttctgaaagcgggcagcgaagaagagattttcgcgcatctgggtctggattatgtggagccgtgggaacgcaacgcg

SEQ ID NO: 2692 - protein, 394 aa, synthetic construct
  REGION 1..394: note = Variant of terminal deoxynucleotidyl transferase
MHHHHHHGGSGHPPSNTPEGEVPSVIARPVSQYACQRKTTLNNYNKKFTDALEIMAENYKFKENLIACLEAKRAASIFKYLPFEVTSMKDIQGLPCITDQVRDVIEEIIEEGESSRVKEVLNDERYKAFKQFTSVFGVGVKTAEKWYRMGLRTVEEAKASKSLKLSKMQKAGFLYYEDLASMVSKEEADAVTLIVKNTVRTFLPDALVTITGGFRRGKPMGHDVDFLITNPGRKEDDELLHKVVDLLKKQGLLLYEDIKESTFVEGQLPSHKIDAMDNFQKCFAILKLYQPGVDNSAVGTSKKSDMAEVKDWKAIRVDLVITPFEQYAYALLGWTGSKQFRRDLRRYAEEERGMILDNHALYDLKKGIFLKAGSEEEIFAHLGLDYVEPWERNA

SEQ ID NO: 2693 - DNA, 1182 bp, synthetic construct
  misc_feature 1..1182: note = Variant of terminal deoxynucleotidyl transferase
  source 1..1182: mol_type = other DNA
atgcatcaccaccatcatcatgggggttctggtcatccgccgagcaataccccggagggggaggtgccgagcgttatcgcccgtccggttagtcagtacgcgtgccagcgcaagaccacgctgaataactacaacaaaaagttcaccgacgcgctggagatcatggccgagaactacaaatttaaagagaacctgatcgcgtgtctggaagccaagcgcgccgcgagtatttttaaatatctgccgttcgaggttaccagcatgaaagacatccaaggtctgccgtgcattaccgaccaagttcgtgacgtgatcgaggagatcatcgaagagggcgagagcagccgtgttaaagaagttctcaatgacgagcgctacaaggcctttaagcagttcaccagcgtgttcggtgtgggcgtgaaaaccgcggaaaagtggtaccgtatgggcctccgtacggttgaagaagcaaaggccagtaagagtctgaagctgagcaagatgcagaaggcgggctttctgtattacgaggatctggcgagcatggttagtaaagaagaagccgatgccgttacgctcatcgtgaagaacacggtgcgtacctttctgccggatgcgctggtgaccatcaccggcggtttccgccgtggcaaacctatgggccacgacgttgactttctgatcacgaacccgggccgcaaagaggatgacgagctgctccacaaagtggttgatctgctcaagaagcaaggtctgctgctgtacgaagacatcaaagagagcacgttcgtggaggggcaactgccaagtcataaaatcgacgccatggacaacttccagaagtgcttcgccattctcaagctgtaccagccgggcgtggataacagtgcggttgggacgagtaagaaaagtgacatggctgaggttaaggattggaaagcgattcgtgtggatctggtgatcacgccattcgagcagtacgcctatgcgctgctcggttggacgggcagcaaacaatttcgtcgcgatctgcgtcgctatgcggaggaagagcgcggcatgatcctcgacaaccatgccctctacgacctgaaaaagcgcatctttctgaaagcgatgagcgaagaagagattttcgcgcatctgggtctggattatgtggagccgtgggaacgcaacgcg

SEQ ID NO: 2694 - protein, 394 aa, synthetic construct
  REGION 1..394: note = Variant of terminal deoxynucleotidyl transferase
MHHHHHHGGSGHPPSNTPEGEVPSVIARPVSQYACQRKTTLNNYNKKFTDALEIMAENYKFKENLIACLEAKRAASIFKYLPFEVTSMKDIQGLPCITDQVRDVIEEIIEEGESSRVKEVLNDERYKAFKQFTSVFGVGVKTAEKWYRMGLRTVEEAKASKSLKLSKMQKAGFLYYEDLASMVSKEEADAVTLIVKNTVRTFLPDALVTITGGFRRGKPMGHDVDFLITNPGRKEDDELLHKVVDLLKKQGLLLYEDIKESTFVEGQLPSHKIDAMDNFQKCFAILKLYQPGVDNSAVGTSKKSDMAEVKDWKAIRVDLVITPFEQYAYALLGWTGSKQFRRDLRRYAEEERGMILDNHALYDLKKRIFLKAMSEEEIFAHLGLDYVEPWERNA

SEQ ID NO: 2695 - DNA, 1182 bp, synthetic construct
  misc_feature 1..1182: note = Variant of terminal deoxynucleotidyl transferase
  source 1..1182: mol_type = other DNA
atgcatcaccaccatcatcatgggggttctggtcatccgccgagcaataccccggagggggaggtgccgagcgttatcgcccgtccggttagtcagtacgcgtgccagcgcaagaccacgctgaataactacaacaaaaagttcaccgacgcgctggagatcatggccgagaactacaaatttaaagagaacctgatcgcgtgtctggaagccaagcgcgccgcgagtatttttaaatatctgccgttcgaggttaccagcatgaaagacatccaaggtctgccgtgcattaccgaccaagttcgtgacgtgatcgaggagatcatcgaagagggcgagagcagccgtgttaaagaagttctcaatgacgagcgctacaaggcctttaagcagttcaccagcgtgttcggtgtgggcgtgaaaaccgcggaaaagtggtaccgtatgggcctccgtacggttgaagaagcaaaggccagtaagagtctgaagctgagcaagatgcagagggcgggctttctgtattacgaggatctggcgagcatggttagtaaagaagaagccgatgccgttacgctcatcgtgaagaacacggtgcgtacctttctgccggatgcgctggtgaccatcaccggcggtttccgccgtggcaaacctatgggccacgacgttgactttctgatcacgaacccgggccgcaaagaggatgacgagctgctccacaaagtggttgatctgctcaagaagcaaggtctgctgctgtacgaagacatcaaagagagcacgttcgtggaggggcaactgccaagtcataaaatcgacgccatggacaacttccagaagtgcttcgccattctcaagctgtaccagccgggcgtggataacagtgcggttgggacgagtaagaaaagtgacatggctgaggttaaggattggaaagcgattcgtgtggatctggtgatcacgccattcgagcagtacgcctatgcgctgctcggttggacgggcagcaaacaatttcgtcgcgatctgcgtcgctatgcggaggaagagcgcggcatgatcctcgacaaccatgccctctacgacctgaaaaagcgcatctttctgaaagcgggcagcgaagaagagattttcgcgcatctgggtctggattatgtggagccgtgggaacgcaacgcg

SEQ ID NO: 2696 - protein, 394 aa, synthetic construct
  REGION 1..394: note = Variant of terminal deoxynucleotidyl transferase
MHHHHHHGGSGHPPSNTPEGEVPSVIARPVSQYACQRKTTLNNYNKKFTDALEIMAENYKFKENLIACLEAKRAASIFKYLPFEVTSMKDIQGLPCITDQVRDVIEEIIEEGESSRVKEVLNDERYKAFKQFTSVFGVGVKTAEKWYRMGLRTVEEAKASKSLKLSKMQRAGFLYYEDLASMVSKEEADAVTLIVKNTVRTFLPDALVTITGGFRRGKPMGHDVDFLITNPGRKEDDELLHKVVDLLKKQGLLLYEDIKESTFVEGQLPSHKIDAMDNFQKCFAILKLYQPGVDNSAVGTSKKSDMAEVKDWKAIRVDLVITPFEQYAYALLGWTGSKQFRRDLRRYAEEERGMILDNHALYDLKKRIFLKAGSEEEIFAHLGLDYVEPWERNA

SEQ ID NO: 2697 - DNA, 1182 bp, synthetic construct
  misc_feature 1..1182: note = Variant of terminal deoxynucleotidyl transferase
  source 1..1182: mol_type = other DNA
atgcatcaccaccatcatcatgggggttctggtcatccgccgagcaataccccggagggggaggtgccgagcgttatcgcccgtccggttagtcagtacgcgtgccagcgcaagaccacgctgaataactacaacaaaaagttcaccgacgcgctggagatcatggccgagaactacaaatttaaagagaacctgatcgcgtgtctggaagccaagcgcgccgcgagtatttttaaatatctgccgttcgaggttaccagcatgaaagacatccaaggtctgccgtgcattaccgaccaagttcgtgacgtgatcgaggagatcatcgaagagggcgagagcagccgtgttaaagaagttctcaatgacgagcgctacaaggcctttaagcagttcaccagcgtgttcggtgtgggcgtgaaaaccgcggaaaagtggtaccgtatgggcctccgtacggttgaagaagcaaaggccagtaagagtctgaagctgagcaagatgcagaaggcgggctttctgtattacgaggatctggcgagcatggttagtaaagaagaagccgatgccgttacgctcatcgtgaagaacacggtgcgtacctttctgccggatgcgctggtgaccatcaccggcggtttccgccgtggcaaacctatgggccacgacgttgactttctgatcacgaacccgggccgcaaagaggatgacgagctgctccacaaagtggttgatctgctcaagaagcaaggtctgctgctgtacgaagacatcaaagagagcacgttcgtggaggggcaactgccaagtcataaaatcgacgccatggacaacttccagaagtgcttcgccattctcaagctgtaccagccgggcgtggataacagtgcggttgggacgagtaagaaaagtgacatggctgaggttaaggattggaaagcgattcgtgtggatctggtgatcacgccattcagtcagtacgcctatgcgctgctcggttggacgggcagcaaacaatttcgtcgcgatctgcgtcgctatgcggaggaagagcgcggcatgatcctcgacaaccatgccctctacgacctgaaaaagcgcatctttctgaaagcgggcagcgaagaagagattttcgcgcatctgggtctggattatgtggagccgtgggaacgcaacgcg

SEQ ID NO: 2698 - protein, 394 aa, synthetic construct
  REGION 1..394: note = Variant of terminal deoxynucleotidyl transferase
MHHHHHHGGSGHPPSNTPEGEVPSVIARPVSQYACQRKTTLNNYNKKFTDALEIMAENYKFKENLIACLEAKRAASIFKYLPFEVTSMKDIQGLPCITDQVRDVIEEIIEEGESSRVKEVLNDERYKAFKQFTSVFGVGVKTAEKWYRMGLRTVEEAKASKSLKLSKMQKAGFLYYEDLASMVSKEEADAVTLIVKNTVRTFLPDALVTITGGFRRGKPMGHDVDFLITNPGRKEDDELLHKVVDLLKKQGLLLYEDIKESTFVEGQLPSHKIDAMDNFQKCFAILKLYQPGVDNSAVGTSKKSDMAEVKDWKAIRVDLVITPFSQYAYALLGWTGSKQFRRDLRRYAEEERGMILDNHALYDLKKRIFLKAGSEEEIFAHLGLDYVEPWERNA

SEQ ID NO: 2699 - DNA, 1182 bp, synthetic construct
  misc_feature 1..1182: note = Variant of terminal deoxynucleotidyl transferase
  source 1..1182: mol_type = other DNA
atgcatcaccaccatcatcatgggggttctggtcatccgccgagcaataccccggagggggaggtgccgagcgttatcgcccgtccggttagtcagtacgcgtgccagcgcaagaccacgctgaataactacaacaaaaagttcaccgacgcgctggagatcatggccgagaactacaaatttaaagagaacctgatcgcgtgtctggaagccaagcgcgccgcgagtatttttaaatatctgccgttcgaggttaccagcatgaaagacatccaaggtctgccgtgcattaccgaccaagttcgtgacgtgatcgaggagatcatcgaagagggcgagagcagccgtgttaaagaagttctcaatgacgagcgctacaaggcctttaagcagttcaccagcgtgttcggtgtgggcgtgaaaaccgcggaaaagtggtaccgtatgggcctccgtacggttgaagaagcaaaggccagtaagagtctgaagctgagcaagatgcagaaggcgggctttctgtattacgaggatctggcgagcatggttagtaaagaagaagccgatgccgttacgctcatcgtgaagaacacggtgcgtacctttctgccggatgcgctggtgaccatcaccggcggtttccgccgtggcaaacctatgggccacgacgttgactttctgatcacgaacccgggccgcaaagaggatgacgagctgctccacaaagtggttgatctgctcaagaagcaaggtctgctgctgtacgaagacatcaaagagagcacgttcgtggaggggcaactgccaagtcataaaatcgacgccatggacaacttccagaagtgcttcgccattctcaagctgtaccagccgggcgtggataacagtgcggttgggacgagtaagaaaagtgacatggctgaggttaaggattggaaagcgattcgtgtggatctggtgatcacgccattcgagcagtacgcctatgcgctgctcggttggacgggcagcaaacaatttcgtcgcgatctgcgtcgctatgcggaggaagagcgcggcatgatcctcgacaaccatgccctctacgacctgaaaaagcgcatctttctgccggcgggcagcgaagaagagattttcgcgcatctgggtctggattatgtggagccgtgggaacgcaacgcg

SEQ ID NO: 2700 - protein, 394 aa, synthetic construct
  REGION 1..394: note = Variant of terminal deoxynucleotidyl transferase
MHHHHHHGGSGHPPSNTPEGEVPSVIARPVSQYACQRKTTLNNYNKKFTDALEIMAENYKFKENLIACLEAKRAASIFKYLPFEVTSMKDIQGLPCITDQVRDVIEEIIEEGESSRVKEVLNDERYKAFKQFTSVFGVGVKTAEKWYRMGLRTVEEAKASKSLKLSKMQKAGFLYYEDLASMVSKEEADAVTLIVKNTVRTFLPDALVTITGGFRRGKPMGHDVDFLITNPGRKEDDELLHKVVDLLKKQGLLLYEDIKESTFVEGQLPSHKIDAMDNFQKCFAILKLYQPGVDNSAVGTSKKSDMAEVKDWKAIRVDLVITPFEQYAYALLGWTGSKQFRRDLRRYAEEERGMILDNHALYDLKKRIFLPAGSEEEIFAHLGLDYVEPWERNA

SEQ ID NO: 2701 - DNA, 1182 bp, synthetic construct
  misc_feature 1..1182: note = Variant of terminal deoxynucleotidyl transferase
  source 1..1182: mol_type = other DNA
atgcatcaccaccatcatcatgggggttctggtcatccgccgagcaataccccggagggggaggtgccgagcgttatcgcccgtccggttagtcagtacgcgtgccagcgcaagaccacgctgaataactacaacaaaaagttcaccgacgcgctggagatcatggccgagaactacaaatttaaagagaacctgatcgcgtgtctggaagccaagcgcgccgcgagtatttttaaatatctgccgttcgaggttaccagcatgaaagacatccaaggtctgccgtgcattaccgaccaagttcgtgacgtgatcgaggagatcatcgaagagggcgagagcagccgtgttaaagaagttctcaatgacgagcgctacaaggcctttaagcagttcaccagcgtgttcggtgtgggcgtgaaaaccgcggaaaagtggtaccgtatgggcctccgtacggttgaagaagcaaaggccagtaagagtctgaagctgagccgtatgcagaaggcgggctttctgtattacgaggatctggcgagcatggttagtaaagaagaagccgatgccgttacgctcatcgtgaagaacacggtgcgtacctttctgccggatgcgctggtgaccatcaccggcggtttccgccgtggcaaacctatgggccacgacgttgactttctgatcacgaacccgggccgcaaagaggatgacgagctgctccacaaagtggttgatctgctcaagaagcaaggtctgctgctgtacgaagacatcaaagagagcacgttcgtggaggggcaactgccaagtcataaaatcgacgccatggacaacttccagaagtgcttcgccattctcaagctgtaccagccgggcgtggataacagtgcggttgggacgagtaagaaaagtgacatggctgaggttaaggattggaaagcgattcgtgtggatctggtgatcacgccattcgagcagtacgcctatgcgctgctcggttggacgggcagcaaacaatttcgtcgcgatctgcgtcgctatgcggaggaagagcgcggcatgatcctcgacaaccatgccctctacgacctgaaaaagcgcatctttctgaaagcgggcagcgaagaagagattttcgcgcatctgggtctggattatgtggagccgtgggaacgcaacgcg

SEQ ID NO: 2702 - protein, 394 aa, synthetic construct
  REGION 1..394: note = Variant of terminal deoxynucleotidyl transferase
MHHHHHHGGSGHPPSNTPEGEVPSVIARPVSQYACQRKTTLNNYNKKFTDALEIMAENYKFKENLIACLEAKRAASIFKYLPFEVTSMKDIQGLPCITDQVRDVIEEIIEEGESSRVKEVLNDERYKAFKQFTSVFGVGVKTAEKWYRMGLRTVEEAKASKSLKLSRMQKAGFLYYEDLASMVSKEEADAVTLIVKNTVRTFLPDALVTITGGFRRGKPMGHDVDFLITNPGRKEDDELLHKVVDLLKKQGLLLYEDIKESTFVEGQLPSHKIDAMDNFQKCFAILKLYQPGVDNSAVGTSKKSDMAEVKDWKAIRVDLVITPFEQYAYALLGWTGSKQFRRDLRRYAEEERGMILDNHALYDLKKRIFLKAGSEEEIFAHLGLDYVEPWERNA

SEQ ID NO: 2703 - DNA, 1182 bp, synthetic construct
  misc_feature 1..1182: note = Variant of terminal deoxynucleotidyl transferase
  source 1..1182: mol_type = other DNA
atgcatcaccaccatcatcatgggggttctggtcatccgccgagcaataccccggagggggaggtgccgagcgttatcgcccgtccggttagtcagtacgcgtgccagcgcaagaccacgctgaataactacaacaaaaagttcaccgacgcgctggagatcatggccgagaactacaaatttaaagagaacctgatcgcgtgtctggaagccaagcgcgccgcgagtatttttaaatatctgccgttcgaggttaccagcatgaaagacatccaaggtctgccgtgcattaccgaccaagttcgtgacgtgatcgaggagatcatcgaagagggcgagagcagccgtgttaaagaagttctcaatgacgagcgctacaaggcctttaagcagttcaccagcgtgttcggtgtgggcgtgaaaaccgcggaaaagtggtaccgtatgggcctccgtacggttgaagaagcaaaggccagtaagagtctgaagctgagcaagatgcagaaggcgggctttctgtattacgaggatctggcgagcatggttagtaaagaagaagccgatgccgttacgctcatcgtgaagaacacggtgcgtacctttctgccggatgcgctggtgaccatcaccggcggtttccgccgtggcaaacctatgggccacgacgttgactttctgatcacgaacccgggccgcaaagaggatgacgagctgctccacaaagtggttgatctgctcaagaagcaaggtctgctgctgtacgaagacatcaaagagagcacgttcgtggaggggcaactgccaagtcataaaatcgacgccatggacaacttccagaagtgcttcgccattctcaagctgtaccagccgggcgtggataacagtgcggttgggacgagtaagaaaagtgacatggctgaggttaaggattggaaagcgattcgtgtggatctggtgatcacgccattcgagcagtacgcctatgcgctgctcggttggacgggcagcaaacaatttcgtcgcgatctgcgtcgctatgcggaggaagagcgcggcatgatcctcgacaaccatgccctctacgacctgaaaaagcgctcgtttctgaaagcgggcagcgaagaagagattttcgcgcatctgggtctggattatgtggagccgtgggaacgcaacgcg

SEQ ID NO: 2704 - protein, 394 aa, synthetic construct
  REGION 1..394: note = Variant of terminal deoxynucleotidyl transferase
MHHHHHHGGSGHPPSNTPEGEVPSVIARPVSQYACQRKTTLNNYNKKFTDALEIMAENYKFKENLIACLEAKRAASIFKYLPFEVTSMKDIQGLPCITDQVRDVIEEIIEEGESSRVKEVLNDERYKAFKQFTSVFGVGVKTAEKWYRMGLRTVEEAKASKSLKLSKMQKAGFLYYEDLASMVSKEEADAVTLIVKNTVRTFLPDALVTITGGFRRGKPMGHDVDFLITNPGRKEDDELLHKVVDLLKKQGLLLYEDIKESTFVEGQLPSHKIDAMDNFQKCFAILKLYQPGVDNSAVGTSKKSDMAEVKDWKAIRVDLVITPFEQYAYALLGWTGSKQFRRDLRRYAEEERGMILDNHALYDLKKRSFLKAGSEEEIFAHLGLDYVEPWERNA

SEQ ID NO: 2705 - DNA, 1182 bp, synthetic construct
  misc_feature 1..1182: note = Variant of terminal deoxynucleotidyl transferase
  source 1..1182: mol_type = other DNA
atgcatcaccaccatcatcatgggggttctggtcatccgccgagcaataccccggagggggaggtgccgagcgttatcgcccgtccggttagtcagtacgcgtgccagcgcaagaccacgctgaataactacaacaaaaagttcaccgacgcgctggagatcatggccgagaactacaaatttaaagagaacctgatcgcgtgtctggaagccaagcgcgccgcgagtatttttaaatatctgccgttcgaggttaccagcatgaaagacatccaaggtctgccgtgcattaccgaccaagttcgtgacgtgatcgaggagatcatcgaagagggcgagagcagccgtgttaaagaagttctcaatgacgagcgctacaaggcctttaagcagttcaccagcgtgttcggtgtgggcgtgaaaaccgcggaaaagtggtaccgtatgggcctccgtacggttgaagaagcaaaggccagtaagagtctgaagctgagcaagatgcagaaggcgggctttctgtattacgaggatctggcgagcatggttagtaaagaagaagccgatgccgttacgctcatcgtgaagaacacggtgcgtacctttctgccggatgcgctggtgaccatcaccggcggtttccgccgtggcaaacctatgggccacgacgttgactttctgatcacgaacccgggccgcaaagaggatgacgagctgctccacaaagtggttgatctgctcaagaagcaaggtctgctgctgtacgaagacatcaaagagagcacgttcgtggaggggcaactgccaagtcataaaatcgacgccatggacaacttccagaagtgcttcgccattctcaagctgtaccagccgggcgtggataacagtgcggttgggacgagtaagaaaagtgacatggctgaggttaaggattggaaagcgattcgtgtggatctggtgatcacgccattcgagcagtacgcctatgcgctgctcggttggacgggcagcaaacaatttcgtcgcgatctgcgtcgctatgcggaggaagagcgcggcatgatcctcgacaaccatgccctctacgacctgagtaagcgcatctttctgaaagcgggcagcgaagaagagattttcgcgcatctgggtctggattatgtggagccgtgggaacgcaacgcg

SEQ ID NO: 2706 - protein, 394 aa, synthetic construct
  REGION 1..394: note = Variant of terminal deoxynucleotidyl transferase
MHHHHHHGGSGHPPSNTPEGEVPSVIARPVSQYACQRKTTLNNYNKKFTDALEIMAENYKFKENLIACLEAKRAASIFKYLPFEVTSMKDIQGLPCITDQVRDVIEEIIEEGESSRVKEVLNDERYKAFKQFTSVFGVGVKTAEKWYRMGLRTVEEAKASKSLKLSKMQKAGFLYYEDLASMVSKEEADAVTLIVKNTVRTFLPDALVTITGGFRRGKPMGHDVDFLITNPGRKEDDELLHKVVDLLKKQGLLLYEDIKESTFVEGQLPSHKIDAMDNFQKCFAILKLYQPGVDNSAVGTSKKSDMAEVKDWKAIRVDLVITPFEQYAYALLGWTGSKQFRRDLRRYAEEERGMILDNHALYDLSKRIFLKAGSEEEIFAHLGLDYVEPWERNA

SEQ ID NO: 2707 - DNA, 1182 bp, synthetic construct
  misc_feature 1..1182: note = Variant of terminal deoxynucleotidyl transferase
  source 1..1182: mol_type = other DNA
atgcatcaccaccatcatcatgggggttctggtcatccgccgagcaataccccggagggggaggtgccgagcgttatcgcccgtccggttagtcagtacgcgtgccagcgcaagaccacgctgaataactacaacaaaaagttcaccgacgcgctggagatcatggccgagaactacaaatttaaagagaacctgatcgcgtgtctggaagccaagcgcgccgcgagtatttttaaatatctgccgttcgaggttaccagcatgaaagacatccaaggtctgccgtgcattaccgaccaagttcgtgacgtgatcgaggagatcatcgaagagggcgagagcagccgtgttaaagaagttctcaatgacgagcgctacaaggcctttaagcagttcaccagcgtgttcggtgtgggcgtgaaaaccgcggaaaagtggtaccgtatgggcctccgtacggttgaagaagcaaaggccagtaagagtctgaagctgagcaagatgcagaaggcgggctttctgtattacgaggatctggcgagcatggttagtaaagaagaagccgatgccgttacgctcatcgtgaagaacacggtgcgtacctttctgccggatgcgctggtgaccatcaccggcggtttccgccgtggcaaacctatgggccacgacgttgactttctgatcacgaacccgggccgcaaagaggatgacgagctgctccacaaagtggttgatctgctcaagaagcaaggtctgctgctgtacgaagacatcaaagagagcacgttcgtggaggggcaactgccaagtcataaaatcgacgccatggacaacttccagaagtgcttcgccattctcaagctgtaccagccgggcgtggataacagtgcggttgggacgagtaagaaaagtgacatggctgaggttaaggattggaaagcgattcgtgtggatctggtgatcacgccattcgagcagtacgcctatgcgctgctcggttggacgggcagcaaacaatttcgtcgcgatctgcgtcgctatgcggaggaagagcgcggcatgatcctcgacaaccatgccctctacgacctgaaagagcgcatctttctgaaagcgggcagcgaagaagagattttcgcgcatctgggtctggattatgtggagccgtgggaacgcaacgcg

SEQ ID NO: 2708 - protein, 394 aa, synthetic construct
  REGION 1..394: note = Variant of terminal deoxynucleotidyl transferase
MHHHHHHGGSGHPPSNTPEGEVPSVIARPVSQYACQRKTTLNNYNKKFTDALEIMAENYKFKENLIACLEAKRAASIFKYLPFEVTSMKDIQGLPCITDQVRDVIEEIIEEGESSRVKEVLNDERYKAFKQFTSVFGVGVKTAEKWYRMGLRTVEEAKASKSLKLSKMQKAGFLYYEDLASMVSKEEADAVTLIVKNTVRTFLPDALVTITGGFRRGKPMGHDVDFLITNPGRKEDDELLHKVVDLLKKQGLLLYEDIKESTFVEGQLPSHKIDAMDNFQKCFAILKLYQPGVDNSAVGTSKKSDMAEVKDWKAIRVDLVITPFEQYAYALLGWTGSKQFRRDLRRYAEEERGMILDNHALYDLKERIFLKAGSEEEIFAHLGLDYVEPWERNA

SEQ ID NO: 2709 - DNA, 1182 bp, synthetic construct
  misc_feature 1..1182: note = Variant of terminal deoxynucleotidyl transferase
  source 1..1182: mol_type = other DNA
atgcatcaccaccatcatcatgggggttctggtcatccgccgagcaataccccggagggggaggtgccgagcgttatcgcccgtccggttagtcagtacgcgtgccagcgcaagaccacgctgaataactacaacaaaaagttcaccgacgcgctggagatcatggccgagaactacaaatttaaagagaacctgatcgcgtgtctggaagccaagcgcgccgcgagtatttttaaatatctgccgttcgaggttaccagcatgaaagacatccaaggtctgccgtgcattaccgaccaagttcgtgacgtgatcgaggagatcatcgaagagggcgagagcagccgtgttaaagaagttctcaatgacgagcgctacaaggcctttaagcagttcaccagcgtgttcggtgtgggcgtgaaaaccgcggaaaagtggtaccgtatgggcctccgtacggttgaagaagcaaaggccagtaagagtctgaagctgagcaagatgcagaaggcgggctttctgtattacgaggatctggcgagcatggttagtaaagaagaagccgatgccgttacgctcatcgtgaagaacacggtgcgtacctttctgccggatgcgctggtgaccatcaccggcggtttccgccgtggcaaacctatgggccacgacgttgactttctgatcacgaacccgggccgcaaagaggatgacgagctgctccacaaagtggttgatctgctcaagaagcaaggtctgctgctgtacgaagacatcaaagagagcacgttcgtggaggggcaactgccaagtcataaaatcgacgccatggacaacttccagaagtgcttcgccattctcaagctgtaccagccgggcgtggataacagtgcggttgggacgagtaagaaaagtgacatggctgaggttaaggattggaaagcgattcgtgtggatctggtgatcacgccattcgagcagtacgcctatgcgctgctcggttggacgggcagcaaacaatttcgtcgcgatctgcgtgtttatgcggaggaagagcgcggcatgatcctcgacaaccatgccctctacgacctgaaaaagcgcatctttctgaaagcgggcagcgaagaagagattttcgcgcatctgggtctggattatgtggagccgtgggaacgcaacgcg

SEQ ID NO: 2710 - protein, 394 aa, synthetic construct
  REGION 1..394: note = Variant of terminal deoxynucleotidyl transferase
MHHHHHHGGSGHPPSNTPEGEVPSVIARPVSQYACQRKTTLNNYNKKFTDALEIMAENYKFKENLIACLEAKRAASIFKYLPFEVTSMKDIQGLPCITDQVRDVIEEIIEEGESSRVKEVLNDERYKAFKQFTSVFGVGVKTAEKWYRMGLRTVEEAKASKSLKLSKMQKAGFLYYEDLASMVSKEEADAVTLIVKNTVRTFLPDALVTITGGFRRGKPMGHDVDFLITNPGRKEDDELLHKVVDLLKKQGLLLYEDIKESTFVEGQLPSHKIDAMDNFQKCFAILKLYQPGVDNSAVGTSKKSDMAEVKDWKAIRVDLVITPFEQYAYALLGWTGSKQFRRDLRVYAEEERGMILDNHALYDLKKRIFLKAGSEEEIFAHLGLDYVEPWERNA

SEQ ID NO: 2711 - DNA, 1182 bp, synthetic construct
  misc_feature 1..1182: note = Variant of terminal deoxynucleotidyl transferase
  source 1..1182: mol_type = other DNA
atgcatcaccaccatcatcatgggggttctggtcatccgccgagcaataccccggagggggaggtgccgagcgttatcgcccgtccggttagtcagtacgcgtgccagcgcaagaccacgctgaataactacaacaaaaagttcaccgacgcgctggagatcatggccgagaactacaaatttaaagagaacctgatcgcgtgtctggaagccaagcgcgccgcgagtatttttaaatatctgccgttcgaggttaccagcatgaaagacatccaaggtctgccgtgcattaccgaccaagttcgtgacgtgatcgaggagatcatcgaagagggcgagagcagccgtgttaaagaagttctcaatgacgagcgctacaaggcctttaagcagttcaccagcgtgttcggtgtgggcgtgaaaaccgcggaaaagtggtaccgtatgggcctccgtacggttgaagaagcaaaggccagtaagagtctgaagctgagcaagatgcagaaggcgggctttctgtattacgaggatctggcgagcatggttagtaaagaagaagccgatgccgttacgctcatcgtgaagaacacggtgcgtacctttctgccggatgcgctggtgaccatcaccggcggtttccgccgtggcaaacctatgggccacgacgttgactttctgatcacgaacccgggccgcaaagaggatgacgagctgctccacaaagtggttgatctgctcaagaagcaaggtctgctgctgtacgaagacatcaaagagagcacgttcgtggaggggcaactgccaagtcataaaatcgacgccatggacaacttccagaagtgcttcgccattctcaagctgtaccagccgggcgtggataacagtgcggttgggacgagtaagaaaagtgacatggctgaggttaaggattggaaagcgattcgtgtggatctggtgatcacgccatgggagcagtacgcctatgcgctgctcggttggacgggcagcaaacaatttcgtcgcgatctgcgtcgctatgcggaggaagagcgcggcatgatcctcgacaaccatgccctctacgacctgaaaaagcgcatctttctgaaagcgggcagcgaagaagagattttcgcgcatctgggtctggattatgtggagccgtgggaacgcaacgcg

SEQ ID NO: 2712 - protein, 394 aa, synthetic construct
  REGION 1..394: note = Variant of terminal deoxynucleotidyl transferase
MHHHHHHGGSGHPPSNTPEGEVPSVIARPVSQYACQRKTTLNNYNKKFTDALEIMAENYKFKENLIACLEAKRAASIFKYLPFEVTSMKDIQGLPCITDQVRDVIEEIIEEGESSRVKEVLNDERYKAFKQFTSVFGVGVKTAEKWYRMGLRTVEEAKASKSLKLSKMQKAGFLYYEDLASMVSKEEADAVTLIVKNTVRTFLPDALVTITGGFRRGKPMGHDVDFLITNPGRKEDDELLHKVVDLLKKQGLLLYEDIKESTFVEGQLPSHKIDAMDNFQKCFAILKLYQPGVDNSAVGTSKKSDMAEVKDWKAIRVDLVITPWEQYAYALLGWTGSKQFRRDLRRYAEEERGMILDNHALYDLKKRIFLKAGSEEEIFAHLGLDYVEPWERNA

SEQ ID NO: 2713 - DNA, 1182 bp, synthetic construct
  misc_feature 1..1182: note = Variant of terminal deoxynucleotidyl transferase
  source 1..1182: mol_type = other DNA
atgcatcaccaccatcatcatgggggttctggtcatccgccgagcaataccccggagggggaggtgccgagcgttatcgcccgtccggttagtcagtacgcgtgccagcgcaagaccacgctgaataactacaacaaaaagttcaccgacgcgctggagatcatggccgagaactacaaatttaaagagaacctgatcgcgtgtctggaagccaagcgcgccgcgagtatttttaaatatctgccgttcgaggttaccagcatgaaagacatccaaggtctgccgtgcattaccgaccaagttcgtgacgtgatcgaggagatcatcgaagagggcgagagcagccgtgttaaagaagttctcaatgacgagcgctacaaggcctttaagcagttcaccagcgtgttcggtgtgggcgtgaaaaccgcggaaaagtggtaccgtatgggcctccgtacggttgaagaagcaaaggccagtaagagtctgaagctgagcaagatgcagaaggcgggctttctgtattacgaggatctggcgagcatggttagtaaagaagaagccgatgccgttacgctcatcgtgaagaacacggtgcgtacctttctgccggatgcgctggtgaccatcaccggcggtttccgccgtggcaaacctatgggccacgacgttgactttctgatcacgaacccgggccgcaaagaggatgacgagctgctccacaaagtggttgatctgctcaagaagcaaggtctgctgctgtacgaagacatcaaagagagcacgttcgtggaggggcaaattccaagtcataaaatcgacgccatggacaacttccagaagtgcttcgccattctcaagctgtaccagccgggcgtggataacagtgcggttgggacgagtaagaaaagtgacatggctgaggttaaggattggaaagcgattcgtgtggatctggtgatcacgccattcgagcagtacgcctatgcgctgctcggttggacgggcagcaaacaatttcgtcgcgatctgcgtcgctatgcggaggaagagcgcggcatgatcctcgacaaccatgccctctacgacctgaaaaagcgcatctttctgaaagcgggcagcgaagaagagattttcgcgcatctgggtctggattatgtggagccgtgggaacgcaacgcg

SEQ ID NO: 2714 - protein, 394 aa, synthetic construct
  REGION 1..394: note = Variant of terminal deoxynucleotidyl transferase
MHHHHHHGGSGHPPSNTPEGEVPSVIARPVSQYACQRKTTLNNYNKKFTDALEIMAENYKFKENLIACLEAKRAASIFKYLPFEVTSMKDIQGLPCITDQVRDVIEEIIEEGESSRVKEVLNDERYKAFKQFTSVFGVGVKTAEKWYRMGLRTVEEAKASKSLKLSKMQKAGFLYYEDLASMVSKEEADAVTLIVKNTVRTFLPDALVTITGGFRRGKPMGHDVDFLITNPGRKEDDELLHKVVDLLKKQGLLLYEDIKESTFVEGQIPSHKIDAMDNFQKCFAILKLYQPGVDNSAVGTSKKSDMAEVKDWKAIRVDLVITPFEQYAYALLGWTGSKQFRRDLRRYAEEERGMILDNHALYDLKKRIFLKAGSEEEIFAHLGLDYVEPWERNA

SEQ ID NO: 2715 - DNA, 1182 bp, synthetic construct
  misc_feature 1..1182: note = Variant of terminal deoxynucleotidyl transferase
  source 1..1182: mol_type = other DNA
atgcatcaccaccatcatcatgggggttctggtcatccgccgagcaataccccggagggggaggtgccgagcgttatcgcccgtccggttagtcagtacgcgtgccagcgcaagaccacgctgaataactacaacaaaaagttcaccgacgcgctggagatcatggccgagaactacaaatttaaagagaacctgatcgcgtgtctggaagccaagcgcgccgcgagtatttttaaatatctgccgttcgaggttaccagcatgaaagacatccaaggtctgccgtgcattaccgaccaagttcgtgacgtgatcgaggagatcatcgaagagggcgagagcagccgtgttaaagaagttctcaatgacgagcgctacaaggcctttaagcagttcaccagcgtgttcggtgtgggcgtgaaaaccgcggaaaagtggtaccgtatgggcctccgtacggttgaagaagcaaaggccagtaagagtctgaagctgagcaagatgcagaaggcgggctttctgtattacgaggatctggcgagcatggttagtaaagaagaagccgatgccgttacgctcatcgtgaagaacacggtgcgtacctttctgccggatgcgctggtgaccatcaccggcggtttccgccgtggcaaacctatgggccacgacgttgactttctgatcacgaacccgggccgcaaagaggatgacgagctgctccacaaagtggttgatctgctcaagaagcaaggtctgctgctgtacgaagacatcaaagagagcacgttcgtggaggggcaactgccaagtcataaaatcgacgccatggacaacttccagaagtgcttcgccattctcaagctgtaccagccgggcgtggataacagtgcggttgggacgagtaagaaaagtgacatggctgaggttaaggattggaaagcgattcgtgtggatctggtgatcacgccattcgagcagtacgcctatgcgctgctcggttggacgggcagcaaacaatttcgtcgcgatctgcgtcgctatgcggaggaagagcgcggcatgatcctcgacaaccatgccctctacgacctgaaaaagcgcatctttctgaaagcgtctagcgaagaagagattttcgcgcatctgggtctggattatgtggagccgtgggaacgcaacgcg

SEQ ID NO: 2716 - protein, 394 aa, synthetic construct
  REGION 1..394: note = Variant of terminal deoxynucleotidyl transferase
MHHHHHHGGSGHPPSNTPEGEVPSVIARPVSQYACQRKTTLNNYNKKFTDALEIMAENYKFKENLIACLEAKRAASIFKYLPFEVTSMKDIQGLPCITDQVRDVIEEIIEEGESSRVKEVLNDERYKAFKQFTSVFGVGVKTAEKWYRMGLRTVEEAKASKSLKLSKMQKAGFLYYEDLASMVSKEEADAVTLIVKNTVRTFLPDALVTITGGFRRGKPMGHDVDFLITNPGRKEDDELLHKVVDLLKKQGLLLYEDIKESTFVEGQLPSHKIDAMDNFQKCFAILKLYQPGVDNSAVGTSKKSDMAEVKDWKAIRVDLVITPFEQYAYALLGWTGSKQFRRDLRRYAEEERGMILDNHALYDLKKRIFLKASSEEEIFAHLGLDYVEPWERNA

SEQ ID NO: 2717 - DNA, 1182 bp, synthetic construct
  misc_feature 1..1182: note = Variant of terminal deoxynucleotidyl transferase
  source 1..1182: mol_type = other DNA
atgcatcaccaccatcatcatgggggttctggtcatccgccgagcaataccccggagggggaggtgccgagcgttatcgcccgtccggttagtcagtacgcgtgccagcgcaagaccacgctgaataactacaacaaaaagttcaccgacgcgctggagatcatggccgagaactacaaatttaaagagaacctgatcgcgtgtctggaagccaagcgcgccgcgagtatttttaaatatctgccgttcgaggttaccagcatgaaagacatccaaggtctgccgtgcattaccgaccaagttcgtgacgtgatcgaggagatcatcgaagagggcgagagcagccgtgttaaagaagttctcaatgacgagcgctacaaggcctttaagcagttcaccagcgtgttcggtgtgggcgtgaaaaccgcggaaaagtggtaccgtatgggcctccgtacggttgaagaagcaaaggccagtaagagtctgaagctgagcaagatgcagaaggcgggctttctgtattacgaggatctggcgagcatggttagtaaagaagaagccgatgccgttacgctcatcgtgaagaacacggtgcgtacctttctgccggatgcgctggtgaccatcaccggcggtttccgccgtggcaaacctatgggccacgacgttgactttctgatcacgaacccgggccgcaaagaggatgacgagctgctccacaaagtggttgatctgctcaagaagcaaggtctgctgctgtacgaagacatcaaagagagcacgttcgtggaggggcaagtgccaagtcataaaatcgacgccatggacaacttccagaagtgcttcgccattctcaagctgtaccagccgggcgtggataacagtgcggttgggacgagtaagaaaagtgacatggctgaggttaaggattggaaagcgattcgtgtggatctggtgatcacgccattcgagcagtacgcctatgcgctgctcggttggacgggcagcaaacaatttcgtcgcgatctgcgtcgctatgcggaggaagagcgcggcatgatcctcgacaaccatgccctctacgacctgaaaaagcgcatctttctgaaagcgggcagcgaagaagagattttcgcgcatctgggtctggattatgtggagccgtgggaacgcaacgcg

SEQ ID NO: 2718 - protein, 394 aa, synthetic construct
  REGION 1..394: note = Variant of terminal deoxynucleotidyl transferase
MHHHHHHGGSGHPPSNTPEGEVPSVIARPVSQYACQRKTTLNNYNKKFTDALEIMAENYKFKENLIACLEAKRAASIFKYLPFEVTSMKDIQGLPCITDQVRDVIEEIIEEGESSRVKEVLNDERYKAFKQFTSVFGVGVKTAEKWYRMGLRTVEEAKASKSLKLSKMQKAGFLYYEDLASMVSKEEADAVTLIVKNTVRTFLPDALVTITGGFRRGKPMGHDVDFLITNPGRKEDDELLHKVVDLLKKQGLLLYEDIKESTFVEGQVPSHKIDAMDNFQKCFAILKLYQPGVDNSAVGTSKKSDMAEVKDWKAIRVDLVITPFEQYAYALLGWTGSKQFRRDLRRYAEEERGMILDNHALYDLKKRIFLKAGSEEEIFAHLGLDYVEPWERNA

SEQ ID NO: 2719 - DNA, 1182 bp, synthetic construct
  misc_feature 1..1182: note = Variant of terminal deoxynucleotidyl transferase
  source 1..1182: mol_type = other DNA
atgcatcaccaccatcatcatgggggttctggtcatccgccgagcaataccccggagggggaggtgccgagcgttatcgcccgtccggttagtcagtacgcgtgccagcgcaagaccacgctgaataactacaacaaaaagttcaccgacgcgctggagatcatggccgagaactacaaatttaaagagaacctgatcgcgtgtctggaagccaagcgcgccgcgagtatttttaaatatctgccgttcgaggttaccagcatgaaagacatccaaggtctgccgtgcattaccgaccaagttcgtgacgtgatcgaggagatcatcgaagagggcgagagcagccgtgttaaagaagttctcaatgacgagcgctacaaggcctttaagcagttcaccagcgtgttcggtgtgggcgtgaaaaccgcggaaaagtggtaccgtatgggcctccgtacggttgaagaagcaaaggccagtaagagtctgaagctgagcaagatgcagaaggcgggctttctgtattacgaggatctggcgagcatggttagtaaagaagaagccgatgccgttacgctcatcgtgaagaacacggtgcgtacctttctgccggatgcgctggtgaccatcaccggcggtttccgccgtggcaaacctatgggccacgacgttgactttctgatcacgaacccgggccgcaaagaggatgacgagctgctccacaaagtggttgatctgctcaagaagcaaggtctgctgctgtacgaagacatcaaagagagcacgttcgtggaggggcaactgccaagtcataaaatcgacgccatggacaacttccagaagtgcttcgccattctcaagctgtaccagccgggcgtggataacagtgcggttgggacgagtaagaaaagtgacatggctgaggttaaggattggaaagcgattcgtgtggatctggtgatcacgccattcgagcagtttgcctatgcgctgctcggttggacgggcagcaaacaatttcgtcgcgatctgcgtcgctatgcggaggaagagcgcggcatgatcctcgacaaccatgccctctacgacctgaaaaagcgcatctttctgaaagcgggcagcgaagaagagattttcgcgcatctgggtctggattatgtggagccgtgggaacgcaacgcg

SEQ ID NO: 2720 - protein, 394 aa, synthetic construct
  REGION 1..394: note = Variant of terminal deoxynucleotidyl transferase
MHHHHHHGGSGHPPSNTPEGEVPSVIARPVSQYACQRKTTLNNYNKKFTDALEIMAENYKFKENLIACLEAKRAASIFKYLPFEVTSMKDIQGLPCITDQVRDVIEEIIEEGESSRVKEVLNDERYKAFKQFTSVFGVGVKTAEKWYRMGLRTVEEAKASKSLKLSKMQKAGFLYYEDLASMVSKEEADAVTLIVKNTVRTFLPDALVTITGGFRRGKPMGHDVDFLITNPGRKEDDELLHKVVDLLKKQGLLLYEDIKESTFVEGQLPSHKIDAMDNFQKCFAILKLYQPGVDNSAVGTSKKSDMAEVKDWKAIRVDLVITPFEQFAYALLGWTGSKQFRRDLRRYAEEERGMILDNHALYDLKKRIFLKAGSEEEIFAHLGLDYVEPWERNA

SEQ ID NO: 2721 - DNA, 1182 bp, synthetic construct
  misc_feature 1..1182: note = Variant of terminal deoxynucleotidyl transferase
  source 1..1182: mol_type = other DNA
atgcatcaccaccatcatcatgggggttctggtcatccgccgagcaataccccggagggggaggtgccgagcgttatcgcccgtccggttagtcagtacgcgtgccagcgcaagaccacgctgaataactacaacaaaaagttcaccgacgcgctggagatcatggccgagaactacaaatttaaagagaacctgatcgcgtgtctggaagccaagcgcgccgcgagtatttttaaatatctgccgttcgaggttaccagcatgaaagacatccaaggtctgccgtgcattaccgaccaagttcgtgacgtgatcgaggagatcatcgaagagggcgagagcagccgtgttaaagaagttctcaatgacgagcgctacaaggcctttaagcagttcaccagcgtgttcggtgtgggcgtgaaaaccgcggaaaagtggtaccgtatgggcctccgtacggttgaagaagcaaaggccagtaagagtctgaagctgagcaagatgcagaaggcgggctttctgtattacgaggatctggcgagcatggttagtaaagaagaagccgatgccgttacgctcatcgtgaagaacacggtgcgtacctttctgccggatgcgctggtgaccatcaccggcggtttccgccgtggcaaacctatgggccacgacgttgactttctgatcacgaacccgggccgcaaagaggatgacgagctgctccacaaagtggttgatctgctcaagaagcaaggtctgctgctgtacgaagacatcaaagagagcacgttcgtggaggggcaactgccaagtcataaaatcgacgccatggacaacttccagaagtgcttcgccattctcaagctgtaccagccgggcgtggataacagtgcggttgggacgagtaagaaaagtgacatggctgaggttaaggattggaaagcgattcgtgtggatctggtgatcacgccattcgagcagtacgcctatgcgctgctcggttggacgggcagcaaacaatttcgtcgcgatctgcgtcgctatgcggaggaagagcgcggcatgctgctcgacaaccatgccctctacgacctgaaaaagcgcatctttctgaaagcgggcagcgaagaagagattttcgcgcatctgggtctggattatgtggagccgtgggaacgcaacgcg

SEQ ID NO: 2722 - protein, 394 aa, synthetic construct
  REGION 1..394: note = Variant of terminal deoxynucleotidyl transferase
MHHHHHHGGSGHPPSNTPEGEVPSVIARPVSQYACQRKTTLNNYNKKFTDALEIMAENYKFKENLIACLEAKRAASIFKYLPFEVTSMKDIQGLPCITDQVRDVIEEIIEEGESSRVKEVLNDERYKAFKQFTSVFGVGVKTAEKWYRMGLRTVEEAKASKSLKLSKMQKAGFLYYEDLASMVSKEEADAVTLIVKNTVRTFLPDALVTITGGFRRGKPMGHDVDFLITNPGRKEDDELLHKVVDLLKKQGLLLYEDIKESTFVEGQLPSHKIDAMDNFQKCFAILKLYQPGVDNSAVGTSKKSDMAEVKDWKAIRVDLVITPFEQYAYALLGWTGSKQFRRDLRRYAEEERGMLLDNHALYDLKKRIFLKAGSEEEIFAHLGLDYVEPWERNA

SEQ ID NO: 2723 - DNA, 1182 bp, synthetic construct
  misc_feature 1..1182: note = Variant of terminal deoxynucleotidyl transferase
  source 1..1182: mol_type = other DNA
atgcatcaccaccatcatcatgggggttctggtcatccgccgagcaataccccggagggggaggtgccgagcgttatcgcccgtccggttagtcagtacgcgtgccagcgcaagaccacgctgaataactacaacaaaaagttcaccgacgcgctggagatcatggccgagaactacaaatttaaagagaacctgatcgcgtgtctggaagccaagcgcgccgcgagtatttttaaatatctgccgttcgaggttaccagcatgaaagacatccaaggtctgccgtgcattaccgaccaagttcgtgacgtgatcgaggagatcatcgaagagggcgagagcagccgtgttaaagaagttctcaatgacgagcgctacaaggcctttaagcagttcaccagcgtgttcggtgtgggcgtgaaaaccgcggaaaagtggtaccgtatgggcctccgtacggttgaagaagcaaaggccagtaagagtctgaagctgagcaagatgcagaaggcgggctttctgtattacgaggatctggcgagcatggttagtaaagaagaagccgatgccgttacgctcatcgtgaagaacacggtgtgtacctttctgccggatgcgctggtgaccatcaccggcggtttccgccgtggcaaacctatgggccacgacgttgactttctgatcacgaacccgggccgcaaagaggatgacgagctgctccacaaagtggttgatctgctcaagaagcaaggtctgctgctgtacgaagacatcaaagagagcacgttcgtggaggggcaactgccaagtgggaaaatcgacgccatggacaacttccagaagtgcttcgccattctcaagctgtaccagccgggcgtggataacagtgcggttgggacgagtaagaaaagtgacatggctgaggttaaggattggaaagcgattcgtgtggatctggtgatcacgccattcgagcagtacgcctatgcgctgctcggttggacgggcagcaaacaatttcgtcgcgatctgcgtcgctatgcggaggaagagcgcggcatgatcctcgacaaccatgccctctacgacctgaaaaagcgcatctttctgaaagcgggcagcgaagaagagattttcgcgcatctgggtctggattatgtggagccgtgggaacgcaacgcg

SEQ ID NO: 2724 - protein, 394 aa, synthetic construct
  REGION 1..394: note = Variant of terminal deoxynucleotidyl transferase
MHHHHHHGGSGHPPSNTPEGEVPSVIARPVSQYACQRKTTLNNYNKKFTDALEIMAENYKFKENLIACLEAKRAASIFKYLPFEVTSMKDIQGLPCITDQVRDVIEEIIEEGESSRVKEVLNDERYKAFKQFTSVFGVGVKTAEKWYRMGLRTVEEAKASKSLKLSKMQKAGFLYYEDLASMVSKEEADAVTLIVKNTVCTFLPDALVTITGGFRRGKPMGHDVDFLITNPGRKEDDELLHKVVDLLKKQGLLLYEDIKESTFVEGQLPSGKIDAMDNFQKCFAILKLYQPGVDNSAVGTSKKSDMAEVKDWKAIRVDLVITPFEQYAYALLGWTGSKQFRRDLRRYAEEERGMILDNHALYDLKKRIFLKAGSEEEIFAHLGLDYVEPWERNA

SEQ ID NO: 2725 - DNA, 1182 bp, synthetic construct
  misc_feature 1..1182: note = Variant of terminal deoxynucleotidyl transferase
  source 1..1182: mol_type = other DNA
atgcatcaccaccatcatcatgggggttctggtcatccgccgagcaataccccggagggggaggtgccgagcgttatcgcccgtccggttagtcagtacgcgtgccagcgcaagaccacgctgaataactacaacaaaaagttcaccgacgcgctggagatcatggccgagaactacaaatttaaagagaacctgatcgcgtgtctggaagccaagcgcgccgcgagtatttttaaatatctgccgttcgaggttaccagcatgaaagacatccaaggtctgccgtgcattaccgaccaagttcgtgacgtgatcgaggagatcatcgaagagggcgagagcagccgtgttaaagaagttctcaatgacgagcgctacaaggcctttaagcagttcaccagcgtgttcggtgtgggcgtgaaaaccgcggaaaagtggtaccgtatgggcctccgtacggttgaagaagcaaaggccagtaagagtctgaagctgagcaagatgcagaaggcgggctttctgtattacgaggatctggcgagcatggttagtaaagaagaagccgatgccgttacgctcatcgtgaagaacacggtgcgtacctttctgccggatgcgctggtgaccatcaccggcggtttccgccgtggcaaacctatgggccacgacgttgactttctgatcacgaacccgggccgcaaagaggatgacgagctgctccacaaagtggttgatctgctcaagaagcaaggtctgctgctgtacgaagacatcaaagagagcacgttcgtggaggggcaactgccaagtcataaaatcgacgccatggacaacttccagaagtgcttcgccattctcaagctgtaccagccgggcgtggataacagtgcggttgggacgagtaagaaaagtgacatggctgaggttaaggattggaaagcgattcgtgtggatctggtgatcacgccattcgagcagtacgcctatgcgctgctcggttggacgggcagcaaacaatttcgtcgcgatctgcgtatttatgcggaggaagagcgcggcatgatcctcgacaaccatgccctctacgacctgaaaaagcgcatctttctgaaagcgggcagcgaagaagagattttcgcgcatctgggtctggattatgtggagccgtgggaacgcaacgcg

SEQ ID NO: 2726 - protein, 394 aa, synthetic construct
  REGION 1..394: note = Variant of terminal deoxynucleotidyl transferase
MHHHHHHGGSGHPPSNTPEGEVPSVIARPVSQYACQRKTTLNNYNKKFTDALEIMAENYKFKENLIACLEAKRAASIFKYLPFEVTSMKDIQGLPCITDQVRDVIEEIIEEGESSRVKEVLNDERYKAFKQFTSVFGVGVKTAEKWYRMGLRTVEEAKASKSLKLSKMQKAGFLYYEDLASMVSKEEADAVTLIVKNTVRTFLPDALVTITGGFRRGKPMGHDVDFLITNPGRKEDDELLHKVVDLLKKQGLLLYEDIKESTFVEGQLPSHKIDAMDNFQKCFAILKLYQPGVDNSAVGTSKKSDMAEVKDWKAIRVDLVITPFEQYAYALLGWTGSKQFRRDLRIYAEEERGMILDNHALYDLKKRIFLKAGSEEEIFAHLGLDYVEPWERNA

SEQ ID NO: 2727 - DNA, 1182 bp, synthetic construct
  misc_feature 1..1182: note = Variant of terminal deoxynucleotidyl transferase
  source 1..1182: mol_type = other DNA
atgcatcaccaccatcatcatgggggttctggtcatccgccgagcaataccccggagggggaggtgccgagcgttatcgcccgtccggttagtcagtacgcgtgccagcgcaagaccacgctgaataactacaacaaaaagttcaccgacgcgctggagatcatggccgagaactacaaatttaaagagaacctgatcgcgtgtctggaagccaagcgcgccgcgagtatttttaaatatctgccgttcgaggttaccagcatgaaagacatccaaggtctgccgtgcattaccgaccaagttcgtgacgtgatcgaggagatcatcgaagagggcgagagcagccgtgttaaagaagttctcaatgacgagcgctacaaggcctttaagcagttcaccagcgtgttcggtgtgggcgtgaaaaccgcggaaaagtggtaccgtatgggcctccgtacggttgaagaagcaaaggccagtaagagtctgaagctgagcaagatgcagaaggcgggctttctgtattacgaggatctggcgagcatggttagtaaagaagaagccgatgccgttacgctcatcgtgaagaacacggtgcgtacctttctgccggatgcgctggtgaccatcaccggcggtttccgccgtggcaaacctatgggccacgacgttgactttctgatcacgaacccgggccgcaaagaggatgacgagctgctccacaaagtggttgatctgctcaagaagcaaggtctgctgctgtacgaagacatcaaagagagcacgttcgtggaggggcaactgccaagtcataaaatcgacgccatggacaacttccagaagtgcttcgccattctcaagctgtaccagccgggcgtggataacagtgcggttgggacgagtaagaaaagtgacatggctgaggttaaggattggaaagcgattcgtgtggatctggtgatcacgccattcgagcagtacgcctatgcgctgctcggttggacgggcagcaaacaatttcgtcgcgatctgcgtgcttatgcggaggaagagcgcggcatgatcctcgacaaccatgccctctacgacctgaaaaagcgcatctttctgaaagcgggcagcgaagaagagattttcgcgcatctgggtctggattatgtggagccgtgggaacgcaacgcg

SEQ ID NO: 2728 - protein, 394 aa, synthetic construct
  REGION 1..394: note = Variant of terminal deoxynucleotidyl transferase
MHHHHHHGGSGHPPSNTPEGEVPSVIARPVSQYACQRKTTLNNYNKKFTDALEIMAENYKFKENLIACLEAKRAASIFKYLPFEVTSMKDIQGLPCITDQVRDVIEEIIEEGESSRVKEVLNDERYKAFKQFTSVFGVGVKTAEKWYRMGLRTVEEAKASKSLKLSKMQKAGFLYYEDLASMVSKEEADAVTLIVKNTVRTFLPDALVTITGGFRRGKPMGHDVDFLITNPGRKEDDELLHKVVDLLKKQGLLLYEDIKESTFVEGQLPSHKIDAMDNFQKCFAILKLYQPGVDNSAVGTSKKSDMAEVKDWKAIRVDLVITPFEQYAYALLGWTGSKQFRRDLRAYAEEERGMILDNHALYDLKKRIFLKAGSEEEIFAHLGLDYVEPWERNA

SEQ ID NO: 2729 - DNA, 1182 bp, synthetic construct
  misc_feature 1..1182: note = Variant of terminal deoxynucleotidyl transferase
  source 1..1182: mol_type = other DNA
atgcatcaccaccatcatcatgggggttctggtcatccgccgagcaataccccggagggggaggtgccgagcgttatcgcccgtccggttagtcagtacgcgtgccagcgcaagaccacgctgaataactacaacaaaaagttcaccgacgcgctggagatcatggccgagaactacaaatttaaagagaacctgatcgcgtgtctggaagccaagcgcgccgcgagtatttttaaatatctgccgttcgaggttaccagcatgaaagacatccaaggtctgccgtgcattaccgaccaagttcgtgacgtgatcgaggagatcatcgaagagggcgagagcagccgtgttaaagaagttctcaatgacgagcgctacaaggcctttaagcagttcaccagcgtgttcggtgtgggcgtgaaaaccgcggaaaagtggtaccgtatgggcctccgtacggttgaagaagcaaaggccagtaagagtctgaagctgagcaagatgcagaaggcgggctttctgtattacgaggatctggcgagcatggttagtaaagaagaagccgatgccgttacgctcatcgtgaagaacacggtgcgtacctttctgccggatgcgctggtgaccatcaccggcggtttccgccgtggcaaacctatgggccacgacgttgactttctgatcacgaacccgggccgcaaagaggatgacgagctgctccacaaagtggttgatctgctcaagaagcaaggtctgctgctgtacgaagacatcaaagagagcacgttcgtggaggggcaactgccaagtcataaaatcgacgccatggacaacttccagaagtgcttcgccattctcaagctgtaccagccgggcgtggataacagtgcggttgggacgagtaagaaaagtgacatggctgaggttaaggattggaaagcgattcgtgtggatctggtgatcacgccattcgagcagtactcttatgcgctgctcggttggacgggcagcaaacaatttcgtcgcgatctgcgtcgctatgcggaggaagagcgcggcatgatcctcgacaaccatgccctctacgacctgaaaaagcgcatctttctgaaagcgggcagcgaagaagagattttcgcgcatctgggtctggattatgtggagccgtgggaacgcaacgcg

SEQ ID NO: 2730 - protein, 394 aa, synthetic construct
  REGION 1..394: note = Variant of terminal deoxynucleotidyl transferase
MHHHHHHGGSGHPPSNTPEGEVPSVIARPVSQYACQRKTTLNNYNKKFTDALEIMAENYKFKENLIACLEAKRAASIFKYLPFEVTSMKDIQGLPCITDQVRDVIEEIIEEGESSRVKEVLNDERYKAFKQFTSVFGVGVKTAEKWYRMGLRTVEEAKASKSLKLSKMQKAGFLYYEDLASMVSKEEADAVTLIVKNTVRTFLPDALVTITGGFRRGKPMGHDVDFLITNPGRKEDDELLHKVVDLLKKQGLLLYEDIKESTFVEGQLPSHKIDAMDNFQKCFAILKLYQPGVDNSAVGTSKKSDMAEVKDWKAIRVDLVITPFEQYSYALLGWTGSKQFRRDLRRYAEEERGMILDNHALYDLKKRIFLKAGSEEEIFAHLGLDYVEPWERNA

SEQ ID NO: 2731 - DNA, 1182 bp, synthetic construct
  misc_feature 1..1182: note = Variant of terminal deoxynucleotidyl transferase
  source 1..1182: mol_type = other DNA
atgcatcaccaccatcatcatgggggttctggtcatccgccgagcaataccccggagggggaggtgccgagcgttatcgcccgtccggttagtcagtacgcgtgccagcgcaagaccacgctgaataactacaacaaaaagttcaccgacgcgctggagatcatggccgagaactacaaatttaaagagaacctgatcgcgtgtctggaagccaagcgcgccgcgagtatttttaaatatctgccgttcgaggttaccagcatgaaagacatccaaggtctgccgtgcattaccgaccaagttcgtgacgtgatcgaggagatcatcgaagagggcgagagcagccgtgttaaagaagttctcaatgacgagcgctacaaggcctttaagcagttcaccagcgtgttcggtgtgggcgtgaaaaccgcggaaaagtggtaccgtatgggcctccgtacggttgaagaagcaaaggccagtaagagtctgaagctgagcaagatgcagaaggcgggctttctgtattacgaggatctggcgagcatggttagtaaagaagaagccgatgccgttacgctcatcgtgaagaacacggtgcgtacctttctgccggatgcgctggtgaccatcaccggcggtttccgccgtggcaaacctatgggccacgacgttgactttctgatcacgaacccgggccgcaaagaggatgacgagctgctccacaaagtggttgatctgctcaagaagcaaggtctgctgctgtacgaagacatcaaagagagcacgttcgtggaggggcaactgccaagtcataaaatcgacgccatggacaacttccagaagtgcttcgccattctcaagctgtaccagccgggcgtggataacagtgcggttgggacgagtaagaaaagtgacatggctgaggttaaggattggaaagcgattcgtgtggatctggtggtgacgccattcgagcagtacgcctatgcgctgctcggttggacgggcagcaaacaatttcgtcgcgatctgcgtcgctatgcggaggaagagcgcggcatgatcctcgacaaccatgccctctacgacctgaaaaagcgcatctttctgaaagcgggcagcgaagaagagattttcgcgcatctgggtctggattatgtggagccgtgggaacgcaacgcg

SEQ ID NO: 2732 - protein, 394 aa, synthetic construct
  REGION 1..394: note = Variant of terminal deoxynucleotidyl transferase
MHHHHHHGGSGHPPSNTPEGEVPSVIARPVSQYACQRKTTLNNYNKKFTDALEIMAENYKFKENLIACLEAKRAASIFKYLPFEVTSMKDIQGLPCITDQVRDVIEEIIEEGESSRVKEVLNDERYKAFKQFTSVFGVGVKTAEKWYRMGLRTVEEAKASKSLKLSKMQKAGFLYYEDLASMVSKEEADAVTLIVKNTVRTFLPDALVTITGGFRRGKPMGHDVDFLITNPGRKEDDELLHKVVDLLKKQGLLLYEDIKESTFVEGQLPSHKIDAMDNFQKCFAILKLYQPGVDNSAVGTSKKSDMAEVKDWKAIRVDLVVTPFEQYAYALLGWTGSKQFRRDLRRYAEEERGMILDNHALYDLKKRIFLKAGSEEEIFAHLGLDYVEPWERNA

SEQ ID NO: 2733 - DNA, 1182 bp, synthetic construct
  misc_feature 1..1182: note = Variant of terminal deoxynucleotidyl transferase
  source 1..1182: mol_type = other DNA
atgcatcaccaccatcatcatgggggttctggtcatccgccgagcaataccccggagggggaggtgccgagcgttatcgcccgtccggttagtcagtacgcgtgccagcgcaagaccacgctgaataactacaacaaaaagttcaccgacgcgctggagatcatggccgagaactacaaatttaaagagaacctgatcgcgtgtctggaagccaagcgcgccgcgagtatttttaaatatctgccgttcgaggttaccagcatgaaagacatccaaggtctgccgtgcattaccgaccaagttcgtgacgtgatcgaggagatcatcgaagagggcgagagcagccgtgttaaagaagttctcaatgacgagcgctacaaggcctttaagcagttcaccagcgtgttcggtgtgggcgtgaaaaccgcggaaaagtggtaccgtatgggcctccgtacggttgaagaagcaaaggccagtaagagtctgaagctgagcaagatgcagaaggcgggctttctgtattacgaggatctggcgagcatggttagtaaagaagaagccgatgccgttacgctcatcgtgaagaacacggtgcgtacctttctgccggatgcgctggtgaccatcaccggcggtttccgccgtggcaaacctatgggccacgacgttgactttctgatcacgaacccgggccgcaaagaggatgacgagctgctccacaaagtggttgatctgctcaagaagcaaggtctgctgctgtacgaagacatcaaagagagctctttcgtggaggggcaactgccaagtcataaaatcgacgccatggacaacttccagaagtgcttcgccattctcaagctgtaccagccgggcgtggataacagtgcggttgggacgagtaagaaaagtgacatggctgaggttaaggattggaaagcgattcgtgtggatctggtgatcacgccattcgagcagtacgcctatgcgctgctcggttggacgggcagcaaacaatttcgtcgcgatctgcgtcgctatgcggaggaagagcgcggcatgatcctcgacaaccatgccctctacgacctgaaaaagcgcatctttctgaaagcgggcagcgaagaagagattttcgcgcatctgggtctggattatgtggagccgtgggaacgcaacgcg

SEQ ID NO: 2734 - protein, 394 aa, synthetic construct
  REGION 1..394: note = Variant of terminal deoxynucleotidyl transferase
MHHHHHHGGSGHPPSNTPEGEVPSVIARPVSQYACQRKTTLNNYNKKFTDALEIMAENYKFKENLIACLEAKRAASIFKYLPFEVTSMKDIQGLPCITDQVRDVIEEIIEEGESSRVKEVLNDERYKAFKQFTSVFGVGVKTAEKWYRMGLRTVEEAKASKSLKLSKMQKAGFLYYEDLASMVSKEEADAVTLIVKNTVRTFLPDALVTITGGFRRGKPMGHDVDFLITNPGRKEDDELLHKVVDLLKKQGLLLYEDIKESSFVEGQLPSHKIDAMDNFQKCFAILKLYQPGVDNSAVGTSKKSDMAEVKDWKAIRVDLVITPFEQYAYALLGWTGSKQFRRDLRRYAEEERGMILDNHALYDLKKRIFLKAGSEEEIFAHLGLDYVEPWERNA

SEQ ID NO: 2735 - DNA, 1182 bp, synthetic construct
  misc_feature 1..1182: note = Variant of terminal deoxynucleotidyl transferase
  source 1..1182: mol_type = other DNA
atgcatcaccaccatcatcatgggggttctggtcatccgccgagcaataccccggagggggaggtgccgagcgttatcgcccgtccggttagtcagtacgcgtgccagcgcaagaccacgctgaataactacaacaaaaagttcaccgacgcgctggagatcatggccgagaactacaaatttaaagagaacctgatcgcgtgtctggaagccaagcgcgccgcgagtatttttaaatatctgccgttcgaggttaccagcatgaaagacatccaaggtctgccgtgcattaccgaccaagttcgtgacgtgatcgaggagatcatcgaagagggcgagagcagccgtgttaaagaagttctcaatgacgagcgctacaaggcctttaagcagttcaccagcgtgttcggtgtgggcgtgaaaaccgcggaaaagtggtaccgtatgggcctccgtacggttgaagaagcaaaggccagtaagagtctgtggctgagcaagatgcagaaggcgggctttctgtattacgaggatctggcgagcatggttagtaaagaagaagccgatgccgttacgctcatcgtgaagaacacggtgcgtacctttctgccggatgcgctggtgaccatcaccggcggtttccgccgtggcaaacctatgggccacgacgttgactttctgatcacgaacccgggccgcaaagaggatgacgagctgctccacaaagtggttgatctgctcaagaagcaaggtctgctgctgtacgaagacatcaaagagagcacgttcgtggaggggcaactgccaagtcataaaatcgacgccatggacaacttccagaagtgcttcgccattctcaagctgtaccagccgggcgtggataacagtgcggttgggacgagtaagaaaagtgacatggctgaggttaaggattggaaagcgattcgtgtggatctggtgatcacgccattcgagcagtacgcctatgcgctgctcggttggacgggcagcaaacaatttcgtcgcgatctgcgtcgctatgcggaggaagagcgcggcatgatcctcgacaaccatgccctctacgacctgaaaaagcgcatctttctgaaagcgggcagcgaagaagagattttcgcgcatctgggtctggattatgtggagccgtgggaacgcaacgcg

SEQ ID NO: 2736 - protein, 394 aa, synthetic construct
  REGION 1..394: note = Variant of terminal deoxynucleotidyl transferase
MHHHHHHGGSGHPPSNTPEGEVPSVIARPVSQYACQRKTTLNNYNKKFTDALEIMAENYKFKENLIACLEAKRAASIFKYLPFEVTSMKDIQGLPCITDQVRDVIEEIIEEGESSRVKEVLNDERYKAFKQFTSVFGVGVKTAEKWYRMGLRTVEEAKASKSLWLSKMQKAGFLYYEDLASMVSKEEADAVTLIVKNTVRTFLPDALVTITGGFRRGKPMGHDVDFLITNPGRKEDDELLHKVVDLLKKQGLLLYEDIKESTFVEGQLPSHKIDAMDNFQKCFAILKLYQPGVDNSAVGTSKKSDMAEVKDWKAIRVDLVITPFEQYAYALLGWTGSKQFRRDLRRYAEEERGMILDNHALYDLKKRIFLKAGSEEEIFAHLGLDYVEPWERNA

SEQ ID NO: 2737 - DNA, 1182 bp, synthetic construct
  misc_feature 1..1182: note = Variant of terminal deoxynucleotidyl transferase
  source 1..1182: mol_type = other DNA
atgcatcaccaccatcatcatgggggttctggtcatccgccgagcaataccccggagggggaggtgccgagcgttatcgcccgtccggttagtcagtacgcgtgccagcgcaagaccacgctgaataactacaacaaaaagttcaccgacgcgctggagatcatggccgagaactacaaatttaaagagaacctgatcgcgtgtctggaagccaagcgcgccgcgagtatttttaaatatctgccgttcgaggttaccagcatgaaagacatccaaggtctgccgtgcattaccgaccaagttcgtgacgtgatcgaggagatcatcgaagagggcgagagcagccgtgttaaagaagttctcaatgacgagcgctacaaggcctttaagcagttcaccagcgtgttcggtgtgggcgtgaaaaccgcggaaaagtggtaccgtatgggcctccgtacggttgaagaagcaaaggccagtaaggttctgaagctgagcaagatgcagaaggcgggctttctgtattacgaggatctggcgagcatggttagtaaagaagaagccgatgccgttacgctcatcgtgaagaacacggtgcgtacctttctgccggatgcgctggtgaccatcaccggcggtttccgccgtggcaaacctatgggccacgacgttgactttctgatcacgaacccgggccgcaaagaggatgacgagctgctccacaaagtggttgatctgctcaagaagcaaggtctgctgctgtacgaagacatcaaagagagcacgttcgtggaggggcaactgccaagtcataaaatcgacgccatggacaacttccagaagtgcttcgccattctcaagctgtaccagccgggcgtggataacagtgcggttgggacgagtaagaaaagtgacatggctgaggttaaggattggaaagcgattcgtgtggatctggtgatcacgccattcgagcagtacgcctatgcgctgctcggttggacgggcagcaaacaatttcgtcgcgatctgcgtcgctatgcggaggaagagcgcggcatgatcctcgacaaccatgccctctacgacctgaaaaagcgcatctttctgaaagcgggcagcgaagaagagattttcgcgcatctgggtctggattatgtggagccgtgggaacgcaacgcg

SEQ ID NO: 2738 - protein, 394 aa, synthetic construct
  REGION 1..394: note = Variant of terminal deoxynucleotidyl transferase
MHHHHHHGGSGHPPSNTPEGEVPSVIARPVSQYACQRKTTLNNYNKKFTDALEIMAENYKFKENLIACLEAKRAASIFKYLPFEVTSMKDIQGLPCITDQVRDVIEEIIEEGESSRVKEVLNDERYKAFKQFTSVFGVGVKTAEKWYRMGLRTVEEAKASKVLKLSKMQKAGFLYYEDLASMVSKEEADAVTLIVKNTVRTFLPDALVTITGGFRRGKPMGHDVDFLITNPGRKEDDELLHKVVDLLKKQGLLLYEDIKESTFVEGQLPSHKIDAMDNFQKCFAILKLYQPGVDNSAVGTSKKSDMAEVKDWKAIRVDLVITPFEQYAYALLGWTGSKQFRRDLRRYAEEERGMILDNHALYDLKKRIFLKAGSEEEIFAHLGLDYVEPWERNA

SEQ ID NO: 2739 - DNA, 1182 bp, synthetic construct
  misc_feature 1..1182: note = Variant of terminal deoxynucleotidyl transferase
  source 1..1182: mol_type = other DNA
atgcatcaccaccatcatcatgggggttctggtcatccgccgagcaataccccggagggggaggtgccgagcgttatcgcccgtccggttagtcagtacgcgtgccagcgcaagaccacgctgaataactacaacaaaaagttcaccgacgcgctggagatcatggccgagaactacaaatttaaagagaacctgatcgcgtgtctggaagccaagcgcgccgcgagtatttttaaatatctgccgttcgaggttaccagcatgaaagacatccaaggtctgccgtgcattaccgaccaagttcgtgacgtgatcgaggagatcatcgaagagggcgagagcagccgtgttaaagaagttctcaatgacgagcgctacaaggcctttaagcagttcaccagcgtgttcggtgtgggcgtgaaaaccgcggaaaagtggtaccgtatgggcctccgtacggttgaagaagcaaaggccagtaagagtctgaagctgagcaagatgcagaaggcgggctttctgtattacgaggatctggcgagcatggttagtaaagaagaagccgatgccgttacgctcatcgtgaagaacacggtgcgtacctttctgccggatgcgctggtgaccatcaccggcggtttccgccgtggcaaacctatgggccacgacgttgactttctgatcacgaacccgggccgcaaagaggatgacgagctgctccacaaagtggttgatctgctcaagaagcaaggtctgctgctgtacgaagacatcaaagagagcacgttcgtggaggggcaactgccaagtcataaaatcgacgccatggacgatttccagaagtgcttcgccattctcaagctgtaccagccgggcgtggataacagtgcggttgggacgagtaagaaaagtgacatggctgaggttaaggattggaaagcgattcgtgtggatctggtgatcacgccattcgagcagtacgcctatgcgctgctcggttggacgggcagcaaacaatttcgtcgcgatctgcgtcgctatgcggaggaagagcgcggcatgatcctcgacaaccatgccctctacgacctgaaaaagcgcatctttctgaaagcgggcagcgaagaagagattttcgcgcatctgggtctggattatgtggagccgtgggaacgcaacgcg

SEQ ID NO: 2740 - protein, 394 aa, synthetic construct
  REGION 1..394: note = Variant of terminal deoxynucleotidyl transferase
MHHHHHHGGSGHPPSNTPEGEVPSVIARPVSQYACQRKTTLNNYNKKFTDALEIMAENYKFKENLIACLEAKRAASIFKYLPFEVTSMKDIQGLPCITDQVRDVIEEIIEEGESSRVKEVLNDERYKAFKQFTSVFGVGVKTAEKWYRMGLRTVEEAKASKSLKLSKMQKAGFLYYEDLASMVSKEEADAVTLIVKNTVRTFLPDALVTITGGFRRGKPMGHDVDFLITNPGRKEDDELLHKVVDLLKKQGLLLYEDIKESTFVEGQLPSHKIDAMDDFQKCFAILKLYQPGVDNSAVGTSKKSDMAEVKDWKAIRVDLVITPFEQYAYALLGWTGSKQFRRDLRRYAEEERGMILDNHALYDLKKRIFLKAGSEEEIFAHLGLDYVEPWERNA

SEQ ID NO: 2741 - DNA, 1182 bp, synthetic construct
  misc_feature 1..1182: note = Variant of terminal deoxynucleotidyl transferase
  source 1..1182: mol_type = other DNA
atgcatcaccaccatcatcatgggggttctggtcatccgccgagcaataccccggagggggaggtgccgagcgttatcgcccgtccggttagtcagtacgcgtgccagcgcaagaccacgctgaataactacaacaaaaagttcaccgacgcgctggagatcatggccgagaactacaaatttaaagagaacctgatcgcgtgtctggaagccaagcgcgccgcgagtatttttaaatatctgccgttcgaggttaccagcatgaaagacatccaaggtctgccgtgcattaccgaccaagttcgtgacgtgatcgaggagatcatcgaagagggcgagagcagccgtgttaaagaagttctcaatgacgagcgctacaaggcctttaagcagttcaccagcgtgttcggtgtgggcgtgaaaaccgcggaaaagtggtaccgtatgggcctccgtacggttgaagaagcaaaggccagtaagagtctgagtctgagcaagatgcagaaggcgggctttctgtattacgaggatctggcgagcatggttagtaaagaagaagccgatgccgttacgctcatcgtgaagaacacggtgcgtacctttctgccggatgcgctggtgaccatcaccggcggtttccgccgtggcaaacctatgggccacgacgttgactttctgatcacgaacccgggccgcaaagaggatgacgagctgctccacaaagtggttgatctgctcaagaagcaaggtctgctgctgtacgaagacatcaaagagagcacgttcgtggaggggcaactgccaagtcataaaatcgacgccatggacaacttccagaagtgcttcgccattctcaagctgtaccagccgggcgtggataacagtgcggttgggacgagtaagaaaagtgacatggctgaggttaaggattggaaagcgattcgtgtggatctggtgatcacgccattcgagcagtacgcctatgcgctgctcggttggacgggcagcaaacaatttcgtcgcgatctgcgtcgctatgcggaggaagagcgcggcatgatcctcgacaaccatgccctctacgacctgaaaaagcgcatctttctgaaagcgggcagcgaagaagagattttcgcgcatctgggtctggattatgtggagccgtgggaacgcaacgcg

SEQ ID NO: 2742 - protein, 394 aa, synthetic construct
  REGION 1..394: note = Variant of terminal deoxynucleotidyl transferase
MHHHHHHGGSGHPPSNTPEGEVPSVIARPVSQYACQRKTTLNNYNKKFTDALEIMAENYKFKENLIACLEAKRAASIFKYLPFEVTSMKDIQGLPCITDQVRDVIEEIIEEGESSRVKEVLNDERYKAFKQFTSVFGVGVKTAEKWYRMGLRTVEEAKASKSLSLSKMQKAGFLYYEDLASMVSKEEADAVTLIVKNTVRTFLPDALVTITGGFRRGKPMGHDVDFLITNPGRKEDDELLHKVVDLLKKQGLLLYEDIKESTFVEGQLPSHKIDAMDNFQKCFAILKLYQPGVDNSAVGTSKKSDMAEVKDWKAIRVDLVITPFEQYAYALLGWTGSKQFRRDLRRYAEEERGMILDNHALYDLKKRIFLKAGSEEEIFAHLGLDYVEPWERNA

SEQ ID NO: 2743 - DNA, 1182 bp, synthetic construct
  misc_feature 1..1182: note = Variant of terminal deoxynucleotidyl transferase
  source 1..1182: mol_type = other DNA
atgcatcaccaccatcatcatgggggttctggtcatccgccgagcaataccccggagggggaggtgccgagcgttatcgcccgtccggttagtcagtacgcgtgccagcgcaagaccacgctgaataactacaacaaaaagttcaccgacgcgctggagatcatggccgagaactacaaatttaaagagaacctgatcgcgtgtctggaagccaagcgcgccgcgagtatttttaaatatctgccgttcgaggttaccagcatgaaagacatccaaggtctgccgtgcattaccgaccaagttcgtgacgtgatcgaggagatcatcgaagagggcgagagcagccgtgttaaagaagttctcaatgacgagcgctacaaggcctttaagcagttcaccagcgtgttcggtgtgggcgtgaaaaccgcggaaaagtggtaccgtatgggcctccgtacggttgaagaagcaaaggccagtaagactctgaagctgagcaagatgcagaaggcgggctttctgtattacgaggatctggcgagcatggttagtaaagaagaagccgatgccgttacgctcatcgtgaagaacacggtgcgtacctttctgccggatgcgctggtgaccatcaccggcggtttccgccgtggcaaacctatgggccacgacgttgactttctgatcacgaacccgggccgcaaagaggatgacgagctgctccacaaagtggttgatctgctcaagaagcaaggtctgctgctgtacgaagacatcaaagagagcacgttcgtggaggggcaactgccaagtcataaaatcgacgccatggacaacttccagaagtgcttcgccattctcaagctgtaccagccgggcgtggataacagtgcggttgggacgagtaagaaaagtgacatggccgaggttaaggattggaaagcgattcgtgtggatctggtgatcacgccattcgagcagtacgcctatgcgctgctcggttggacgggcagcaaacaatttcgtcgcgatctgcgtcgctatgcggaggaagagcgcggcatgatcctcgacaaccatgccctctacgacctgaaaaagcgcatctttctgaaagcgggcagcgaagaagagattttcgcgcatctgggtctggattatgtggagccgtgggaacgcaacgcg

SEQ ID NO: 2744 - protein, 394 aa, synthetic construct; identical to SEQ ID NO: 2680
  REGION 1..394: note = Variant of terminal deoxynucleotidyl transferase

SEQ ID NO: 2745 - DNA, 1182 bp, synthetic construct
  misc_feature 1..1182: note = Variant of terminal deoxynucleotidyl transferase
  source 1..1182: mol_type = other DNA
atgcatcaccaccatcatcatgggggttctggtcatccgccgagcaataccccggagggggaggtgccgagcgttatcgcccgtccggttagtcagtacgcgtgccagcgcaagaccacgctgaataactacaacaaaaagttcaccgacgcgctggagatcatggccgagaactacaaatttaaagagaacctgatcgcgtgtctggaagccaagcgcgccgcgagtatttttaaatatctgccgttcgaggttaccagcatgaaagacatccaaggtctgccgtgcattaccgaccaagttcgtgacgtgatcgaggagatcatcgaagagggcgagagcagccgtgttaaagaagttctcaatgacgagcgctacaaggcctttaagcagttcaccagcgtgttcggtgtgggcgtgaaaaccgcggaaaagtggtaccgtatgggcctccgtacggttgaagaagcaaaggccagtaagagtctgaagctgagcaagatgcagaaggcgggctttctgtattacgaggatctggcgagcatggttagtaaagaagaagccgatgccgttacgctcatcgtgaagaacacggtgcgtacctttctgccggatgcgctggtgaccatcaccggcggtttccgccgtggcaaacctatgggccacgacgttgactttctgatcacgaacccgggccgcaaagaggatgacgagctgctccacaaagtggttgatctgctcaagaagcaaggtctgctgctgtacgaagacatcaaagagagcacgttcgtggaggggcaactgccaagtcataaaatcgacgccatggacaacttccagaagtgcttctcgattctcaagctgtaccagccgggcgtggataacagtgcggttgggacgagtaagaaaagtgacatggctgaggttaaggattggaaagcgattcgtgtggatctggtgatcacgccattcgagcagtacgcctatgcgctgctcggttggacgggcagcaaacaatttcgtcgcgatctgcgtcgctatgcggaggaagagcgcggcatgatcctcgacaaccatgccctctacgacctgaaaaagcgcatctttctgaaagcgggcagcgaagaagagattttcgcgcatctgggtctggattatgtggagccgtgggaacgcaacgcg

SEQ ID NO: 2746 - protein, 394 aa, synthetic construct
  REGION 1..394: note = Variant of terminal deoxynucleotidyl transferase
MHHHHHHGGSGHPPSNTPEGEVPSVIARPVSQYACQRKTTLNNYNKKFTDALEIMAENYKFKENLIACLEAKRAASIFKYLPFEVTSMKDIQGLPCITDQVRDVIEEIIEEGESSRVKEVLNDERYKAFKQFTSVFGVGVKTAEKWYRMGLRTVEEAKASKSLKLSKMQKAGFLYYEDLASMVSKEEADAVTLIVKNTVRTFLPDALVTITGGFRRGKPMGHDVDFLITNPGRKEDDELLHKVVDLLKKQGLLLYEDIKESTFVEGQLPSHKIDAMDNFQKCFSILKLYQPGVDNSAVGTSKKSDMAEVKDWKAIRVDLVITPFEQYAYALLGWTGSKQFRRDLRRYAEEERGMILDNHALYDLKKRIFLKAGSEEEIFAHLGLDYVEPWERNA

SEQ ID NO: 2747 - DNA, 1182 bp, synthetic construct
  misc_feature 1..1182: note = Variant of terminal deoxynucleotidyl transferase
  source 1..1182: mol_type = other DNA
atgcatcaccaccatcatcatgggggttctggtcatccgccgagcaataccccggagggggaggtgccgagcgttatcgcccgtccggttagtcagtacgcgtgccagcgcaagaccacgctgaataactacaacaaaaagttcaccgacgcgctggagatcatggccgagaactacaaatttaaagagaacctgatcgcgtgtctggaagccaagcgcgccgcgagtatttttaaatatctgccgttcgaggttaccagcatgaaagacatccaaggtctgccgtgcattaccgaccaagttcgtgacgtgatcgaggagatcatcgaagagggcgagagcagccgtgttaaagaagttctcaatgacgagcgctacaaggcctttaagcagttcaccagcgtgttcggtgtgggcgtgaaaaccgcggaaaagtggtaccgtatgggcctccgtacggttgaagaagcaaaggccagtaagagtctgaagctgagcaagatgcagacggcgggctttctgtattacgaggatctggcgagcatggttagtaaagaagaagccgatgccgttacgctcatcgtgaagaacacggtgcgtacctttctgccggatgcgctggtgaccatcaccggcggtttccgccgtggcaaacctatgggccacgacgttgactttctgatcacgaacccgggccgcaaagaggatgacgagctgctccacaaagtggttgatctgctcaagaagcaaggtctgctgctgtacgaagacatcaaagagagcacgttcgtggaggggcaactgccaagtcataaaatcgacgccatggacaacttccagaagtgcttcgccattctcaagctgtaccagccgggcgtggataacagtgcggttgggacgagtaagaaaagtgacatggctgaggttaaggattggaaagcgattcgtgtggatctggtgatcacgccattcgagcagtacgcctatgcgctgctcggttggacgggcagcaaacaatttcgtcgcgatctgcgtcgctatgcggaggaagagcgcggcatgatcctcgacaaccatgccctctacgacctgaaaaagcgcatctttctgaaagcgggcagcgaagaagagattttcgcgcatctgggtctggattatgtggagccgtgggaacgcaacgcg

SEQ ID NO: 2748 - protein, 394 aa, synthetic construct
  REGION 1..394: note = Variant of terminal deoxynucleotidyl transferase
MHHHHHHGGSGHPPSNTPEGEVPSVIARPVSQYACQRKTTLNNYNKKFTDALEIMAENYKFKENLIACLEAKRAASIFKYLPFEVTSMKDIQGLPCITDQVRDVIEEIIEEGESSRVKEVLNDERYKAFKQFTSVFGVGVKTAEKWYRMGLRTVEEAKASKSLKLSKMQTAGFLYYEDLASMVSKEEADAVTLIVKNTVRTFLPDALVTITGGFRRGKPMGHDVDFLITNPGRKEDDELLHKVVDLLKKQGLLLYEDIKESTFVEGQLPSHKIDAMDNFQKCFAILKLYQPGVDNSAVGTSKKSDMAEVKDWKAIRVDLVITPFEQYAYALLGWTGSKQFRRDLRRYAEEERGMILDNHALYDLKKRIFLKAGSEEEIFAHLGLDYVEPWERNA

SEQ ID NO: 2749 - DNA, 1182 bp, synthetic construct
  misc_feature 1..1182: note = Variant of terminal deoxynucleotidyl transferase
  source 1..1182: mol_type = other DNA
atgcatcaccaccatcatcatgggggttctggtcatccgccgagcaataccccggagggggaggtgccgagcgttatcgcccgtccggttagtcagtacgcgtgccagcgcaagaccacgctgaataactacaacaaaaagttcaccgacgcgctggagatcatggccgagaactacaaatttaaagagaacctgatcgcgtgtctggaagccaagcgcgccgcgagtatttttaaatatctgccgttcgaggttaccagcatgaaagacatccaaggtctgccgtgcattaccgaccaagttcgtgacgtgatcgaggagatcatcgaagagggcgagagcagccgtgttaaagaagttctcaatgacgagcgctacaaggcctttaagcagttcaccagcgtgttcggtgtgggcgtgaaaaccgcggaaaagtggtaccgtatgggcctccgtacggttgaagaagcaaaggccagtaagagtctgaagctgagcaagatgcagaaggcgggctttctgtattacgaggatctggcgagcatggttagtaaagaagaagccgatgccgttacgctcatcgtgaagaacacggtgcgtacctttctgccggatgcgctggtgaccatcaccggcggtttccgccgtggcaaacctatgggccacgacgttgactttctgatcacgaacccgggccgcaaagaggatgacgagctgctccacaaagtggttgatctgctcaagaagcaaggtctgctgctgtacgaagacatcaaagagagcacgttcgtggaggggcaactgccaagtcataaaatcgacgccatggacaacttccagaagtgcttcgccattctcaagctgtaccagccgggcgtggataacagtgcggttgggacgagtaagaaaagtgacatggctgaggttaaggattggaaagcgattcgtgtggatctggtgatcacgccattcgagcagtacgcctatgcgctgctcggttggacgggcagcaaacaatttcgtcgcgatctgcgtcgctatgcggaggaagagcgccatatgatcctcgacaaccatgccctctacgacctgaaaaagcgcatctttctgaaagcgggcagcgaagaagagattttcgcgcatctgggtctggattatgtggagccgtgggaacgcaacgcg

SEQ ID NO: 2750 - protein, 394 aa, synthetic construct
  REGION 1..394: note = Variant of terminal deoxynucleotidyl transferase
MHHHHHHGGSGHPPSNTPEGEVPSVIARPVSQYACQRKTTLNNYNKKFTDALEIMAENYKFKENLIACLEAKRAASIFKYLPFEVTSMKDIQGLPCITDQVRDVIEEIIEEGESSRVKEVLNDERYKAFKQFTSVFGVGVKTAEKWYRMGLRTVEEAKASKSLKLSKMQKAGFLYYEDLASMVSKEEADAVTLIVKNTVRTFLPDALVTITGGFRRGKPMGHDVDFLITNPGRKEDDELLHKVVDLLKKQGLLLYEDIKESTFVEGQLPSHKIDAMDNFQKCFAILKLYQPGVDNSAVGTSKKSDMAEVKDWKAIRVDLVITPFEQYAYALLGWTGSKQFRRDLRRYAEEERHMILDNHALYDLKKRIFLKAGSEEEIFAHLGLDYVEPWERNA

SEQ ID NO: 2751 - DNA, 1182 bp, synthetic construct
  misc_feature 1..1182: note = Variant of terminal deoxynucleotidyl transferase
  source 1..1182: mol_type = other DNA
atgcatcaccaccatcatcatgggggttctggtcatccgccgagcaataccccggagggggaggtgccgagcgttatcgcccgtccggttagtcagtacgcgtgccagcgcaagaccacgctgaataactacaacaaaaagttcaccgacgcgctggagatcatggccgagaactacaaatttaaagagaacctgatcgcgtgtctggaagccaagcgcgccgcgagtatttttaaatatctgccgttcgaggttaccagcatgaaagacatccaaggtctgccgtgcattaccgaccaagttcgtgacgtgatcgaggagatcatcgaagagggcgagagcagccgtgttaaagaagttctcaatgacgagcgctacaaggcctttaagcagttcaccagcgtgttcggtgtgggcgtgaaaaccgcggaaaagtggtaccgtatgggcctccgtacggttgaagaagcaaaggccagtaagagtctgaagctgagcaagatgcagaaggcgggctttctgtattacgaggatctggcgagcatggttagtaaagaagaagccgatgccgttacgctcatcgtgaagaacacggtgcgtacctttctgccggatgcgctggtgaccatcaccggcggtttccgccgtggcaaacctatgggccacgacgttgactttctgatcacgaacccgggccgcaaagaggatgacgagctgctccacaaagtggttgatctgctcaagaagcaaggtctgctgctgtacgaagacatcaaagagagcacgttcgtggaggggcaactgccaagtcataaaatcgacgccatggacaacttccagaagtgcttcgccattctcaagctgtaccagccgggcgtggataacagtgcggttgggacgagtaagaaaagtgacatggctgaggttaaggattggaaagcgattcgtgtggatctggtgatcacgccattcgagcagtacgcctatgcgctgctcggttggacgggcagcaaacaatttcgtcgcgatctgcgtcgctatgcggaggaagagcgcggcatgatcctcgacaaccatgccctctacgacctgaaacggcgcatctttctgaaagcgggcagcgaagaagagattttcgcgcatctgggtctggattatgtggagccgtgggaacgcaacgcg

SEQ ID NO: 2752 - protein, 394 aa, synthetic construct
  REGION 1..394: note = Variant of terminal deoxynucleotidyl transferase
MHHHHHHGGSGHPPSNTPEGEVPSVIARPVSQYACQRKTTLNNYNKKFTDALEIMAENYKFKENLIACLEAKRAASIFKYLPFEVTSMKDIQGLPCITDQVRDVIEEIIEEGESSRVKEVLNDERYKAFKQFTSVFGVGVKTAEKWYRMGLRTVEEAKASKSLKLSKMQKAGFLYYEDLASMVSKEEADAVTLIVKNTVRTFLPDALVTITGGFRRGKPMGHDVDFLITNPGRKEDDELLHKVVDLLKKQGLLLYEDIKESTFVEGQLPSHKIDAMDNFQKCFAILKLYQPGVDNSAVGTSKKSDMAEVKDWKAIRVDLVITPFEQYAYALLGWTGSKQFRRDLRRYAEEERGMILDNHALYDLKRRIFLKAGSEEEIFAHLGLDYVEPWERNA

SEQ ID NO: 2753 - DNA, 1182 bp, synthetic construct
  misc_feature 1..1182: note = Variant of terminal deoxynucleotidyl transferase
  source 1..1182: mol_type = other DNA
atgcatcaccaccatcatcatgggggttctggtcatccgccgagcaataccccggagggggaggtgccgagcgttatcgcccgtccggttagtcagtacgcgtgccagcgcaagaccacgctgaataactacaacaaaaagttcaccgacgcgctggagatcatggccgagaactacaaatttaaagagaacctgatcgcgtgtctggaagccaagcgcgccgcgagtatttttaaatatctgccgttcgaggttaccagcatgaaagacatccaaggtctgccgtgcattaccgaccaagttcgtgacgtgatcgaggagatcatcgaagagggcgagagcagccgtgttaaagaagttctcaatgacgagcgctacaaggcctttaagcagttcaccagcgtgttcggtgtgggcgtgaaaaccgcggaaaagtggtaccgtatgggcctccgtacggttgaagaagcaaaggccagtaagagtctgaagctgagcaagatgcagaaggcgggctttctgtattacgaggatctggcgagcatggttagtaaagaagaagccgatgccgttacgctcatcgtgaagaacacggtgcgtacctttctgccggatgcgctggtgaccatcaccggcggtttccgccgtggcaaacctatgggccacgacgttgactttctgatcacgaacccgggccgcaaagaggatgacgagctgctccacaaagtggttgatctgctcaagaagcaaggtctgctgctgtacgaagacatcaaagagagcacgttcgtggaggggcaactgccaagtcataaaatcgacgccatggacaacttccagaagtgcttcgccattctcaagctgtaccagccgggcgtggataacagtgcggttgggacgagtaagaaaagtgacatggctgaggttaaggattggaaagcgattcgtgtggatctggtgatcacgccattcgagcagtacgcctatgcgctgctcggttggacgggcagcaaacaatttcgtcgcgatctgcgtcgctatgcggaggaagagtgtggcatgatcctcgacaaccatgccctctacgacctgaaaaagcgcatctttctgaaagcgggcagcgaagaagagattttcgcgcatctgggtctggattatgtggagccgtgggaacgcaacgcg

SEQ ID NO: 2754 - protein, 394 aa, synthetic construct
  REGION 1..394: note = Variant of terminal deoxynucleotidyl transferase
MHHHHHHGGSGHPPSNTPEGEVPSVIARPVSQYACQRKTTLNNYNKKFTDALEIMAENYKFKENLIACLEAKRAASIFKYLPFEVTSMKDIQGLPCITDQVRDVIEEIIEEGESSRVKEVLNDERYKAFKQFTSVFGVGVKTAEKWYRMGLRTVEEAKASKSLKLSKMQKAGFLYYEDLASMVSKEEADAVTLIVKNTVRTFLPDALVTITGGFRRGKPMGHDVDFLITNPGRKEDDELLHKVVDLLKKQGLLLYEDIKESTFVEGQLPSHKIDAMDNFQKCFAILKLYQPGVDNSAVGTSKKSDMAEVKDWKAIRVDLVITPFEQYAYALLGWTGSKQFRRDLRRYAEEECGMILDNHALYDLKKRIFLKAGSEEEIFAHLGLDYVEPWERNA

SEQ ID NO: 2755 - DNA, 1182 bp, synthetic construct
  misc_feature 1..1182: note = Variant of terminal deoxynucleotidyl transferase
  source 1..1182: mol_type = other DNA
atgcatcaccaccatcatcatgggggttctggtcatccgccgagcaataccccggagggggaggtgccgagcgttatcgcccgtccggttagtcagtacgcgtgccagcgcaagaccacgctgaataactacaacaaaaagttcaccgacgcgctggagatcatggccgagaactacaaatttaaagagaacctgatcgcgtgtctggaagccaagcgcgccgcgagtatttttaaatatctgccgttcgaggttaccagcatgaaagacatccaaggtctgccgtgcattaccgaccaagttcgtgacgtgatcgaggagatcatcgaagagggcgagagcagccgtgttaaagaagttctcaatgacgagcgctacaaggcctttaagcagttcaccagcgtgttcggtgtgggcgtgaaaaccgcggaaaagtggtaccgtatgggcctccgtacggttgaagaagcaaaggccagtaagagtctgaagctgagcaagatgcagaaggcgggctttctgtattacgaggatctggcgagcatggttagtaaagaagaagccgatgccgttacgctcatcgtgaagaacacggtgcgtacctttctgccggatgcgctggtgaccatcaccggcggtttccgccgtggcaaacctatgggccacgacgttgactttctgatcacgaacccgggccgcaaagaggatgacgagctgctccacaaagtggttgatctgctcaagaagcaaggtctgctgctgtacgaagacatcaaagagagcacgttcgtggaggggcaactgccaagtcataaaatcgacgccatggacaacttccagaagtgcttcgccattctcaagctgtaccagccgggcgtggataacagtgcggttgggacgagtaagaaaagtgacatggctgaggttaaggattggaaagcgattcgtgtggatctggtgatcacgccattcgagcagtacgcctatgcgctgctcggttggacgggcagcaaacaatttcgtcgcgatctgcgttcgtatgcggaggaagagcgcggcatgatcctcgacaaccatgccctctacgacctgaaaaagcgcatctttctgaaagcgggcagcgaagaagagattttcgcgcatctgggtctggattatgtggagccgtgggaacgcaacgcg

SEQ ID NO: 2756 - protein, 394 aa, synthetic construct
  REGION 1..394: note = Variant of terminal deoxynucleotidyl transferase
MHHHHHHGGSGHPPSNTPEGEVPSVIARPVSQYACQRKTTLNNYNKKFTDALEIMAENYKFKENLIACLEAKRAASIFKYLPFEVTSMKDIQGLPCITDQVRDVIEEIIEEGESSRVKEVLNDERYKAFKQFTSVFGVGVKTAEKWYRMGLRTVEEAKASKSLKLSKMQKAGFLYYEDLASMVSKEEADAVTLIVKNTVRTFLPDALVTITGGFRRGKPMGHDVDFLITNPGRKEDDELLHKVVDLLKKQGLLLYEDIKESTFVEGQLPSHKIDAMDNFQKCFAILKLYQPGVDNSAVGTSKKSDMAEVKDWKAIRVDLVITPFEQYAYALLGWTGSKQFRRDLRSYAEEERGMILDNHALYDLKKRIFLKAGSEEEIFAHLGLDYVEPWERNA

SEQ ID NO: 2757 - DNA, 1182 bp, synthetic construct
  misc_feature 1..1182: note = Variant of terminal deoxynucleotidyl transferase
  source 1..1182: mol_type = other DNA
atgcatcaccaccatcatcatgggggttctggtcatccgccgagcaataccccggagggggaggtgccgagcgttatcgcccgtccggttagtcagtacgcgtgccagcgcaagaccacgctgaataactacaacaaaaagttcaccgacgcgctggagatcatggccgagaactacaaatttaaagagaacctgatcgcgtgtctggaagccaagcgcgccgcgagtatttttaaatatctgccgttcgaggttaccagcatgaaagacatccaaggtctgccgtgcattaccgaccaagttcgtgacgtgatcgaggagatcatcgaagagggcgagagcagccgtgttaaagaagttctcaatgacgagcgctacaaggcctttaagcagttcaccagcgtgtggggtgtgggcgtgaaaaccgcggaaaagtggtaccgtatgggcctccgtacggttgaagaagcaaaggccagtaagagtctgaagctgagcaagatgcagaaggcgggctttctgtattacgaggatctggcgagcatggttagtaaagaagaagccgatgccgttacgctcatcgtgaagaacacggtgcgtacctttctgccggatgcgctggtgaccatcaccggcggtttccgccgtggcaaacctatgggccacgacgttgactttctgatcacgaacccgggccgcaaagaggatgacgagctgctccacaaagtggttgatctgctcaagaagcaaggtctgctgctgtacgaagacatcaaagagagcacgttcgtggaggggcaactgccaagtcataaaatcgacgccatggacaacttccagaagtgcttcgccattctcaagctgtaccagccgggcgtggataacagtgcggttgggacgagtaagaaaagtgacatggctgaggttaaggattggaaagcgattcgtgtggatctggtgatcacgccattcgagcagtacgcctatgcgctgctcggttggacgggcagcaaacaatttcgtcgcgatctgcgtcgctatgcggaggaagagcgcggcatgatcctcgacaaccatgccctctacgacctgaaaaagcgcatctttctgaaagcgggcagcgaagaagagattttcgcgcatctgggtctggattatgtggagccgtgggaacgcaacgcg

SEQ ID NO: 2758 - protein, 394 aa, synthetic construct
  REGION 1..394: note = Variant of terminal deoxynucleotidyl transferase
MHHHHHHGGSGHPPSNTPEGEVPSVIARPVSQYACQRKTTLNNYNKKFTDALEIMAENYKFKENLIACLEAKRAASIFKYLPFEVTSMKDIQGLPCITDQVRDVIEEIIEEGESSRVKEVLNDERYKAFKQFTSVWGVGVKTAEKWYRMGLRTVEEAKASKSLKLSKMQKAGFLYYEDLASMVSKEEADAVTLIVKNTVRTFLPDALVTITGGFRRGKPMGHDVDFLITNPGRKEDDELLHKVVDLLKKQGLLLYEDIKESTFVEGQLPSHKIDAMDNFQKCFAILKLYQPGVDNSAVGTSKKSDMAEVKDWKAIRVDLVITPFEQYAYALLGWTGSKQFRRDLRRYAEEERGMILDNHALYDLKKRIFLKAGSEEEIFAHLGLDYVEPWERNA

SEQ ID NO: 2759 - DNA, 1182 bp, synthetic construct
  misc_feature 1..1182: note = Variant of terminal deoxynucleotidyl transferase
  source 1..1182: mol_type = other DNA
atgcatcaccaccatcatcatgggggttctggtcatccgccgagcaataccccggagggggaggtgccgagcgttatcgcccgtccggttagtcagtacgcgtgccagcgcaagaccacgctgaataactacaacaaaaagttcaccgacgcgctggagatcatggccgagaactacaaatttaaagagaacctgatcgcgtgtctggaagccaagcgcgccgcgagtatttttaaatatctgccgttcgaggttaccagcatgaaagacatccaaggtctgccgtgcattaccgaccaagttcgtgacgtgatcgaggagatcatcgaagagggcgagagcagccgtgttaaagaagttctcaatgacgagcgctacaaggcctttaagcagttcaccagcgtgttcggtgtgggcgtgaaaaccgcggaaaagtggtaccgtatgggcctccgtacggttgaagaagcaaaggccagtaagagtctggctctgagcaagatgcagaaggcgggctttctgtattacgaggatctggcgagcatggttagtaaagaagaagccgatgccgttacgctcatcgtgaagaacacggtgcgtacctttctgccggatgcgctggtgaccatcaccggcggtttccgccgtggcaaacctatgggccacgacgttgactttctgatcacgaacccgggccgcaaagaggatgacgagctgctccacaaagtggttgatctgctcaagaagcaaggtctgctgctgtacgaagacatcaaagagagcacgttcgtggaggggcaactgccaagtcataaaatcgacgccatggacaacttccagaagtgcttcgccattctcaagctgtaccagccgggcgtggataacagtgcggttgggacgagtaagaaaagtgacatggctgaggttaaggattggaaagcgattcgtgtggatctggtgatcacgccattcgagcagtacgcctatgcgctgctcggttggacgggcagcaaacaatttcgtcgcgatctgcgtcgctatgcggaggaagagcgcggcatgatcctcgacaaccatgccctctacgacctgaaaaagcgcatctttctgaaagcgggcagcgaagaagagattttcgcgcatctgggtctggattatgtggagccgtgggaacgcaacgcg

SEQ ID NO: 2760 - protein, 394 aa, synthetic construct
  REGION 1..394: note = Variant of terminal deoxynucleotidyl transferase
MHHHHHHGGSGHPPSNTPEGEVPSVIARPVSQYACQRKTTLNNYNKKFTDALEIMAENYKFKENLIACLEAKRAASIFKYLPFEVTSMKDIQGLPCITDQVRDVIEEIIEEGESSRVKEVLNDERYKAFKQFTSVFGVGVKTAEKWYRMGLRTVEEAKASKSLALSKMQKAGFLYYEDLASMVSKEEADAVTLIVKNTVRTFLPDALVTITGGFRRGKPMGHDVDFLITNPGRKEDDELLHKVVDLLKKQGLLLYEDIKESTFVEGQLPSHKIDAMDNFQKCFAILKLYQPGVDNSAVGTSKKSDMAEVKDWKAIRVDLVITPFEQYAYALLGWTGSKQFRRDLRRYAEEERGMILDNHALYDLKKRIFLKAGSEEEIFAHLGLDYVEPWERNA

SEQ ID NO: 2761 - DNA, 1182 bp, synthetic construct
  misc_feature 1..1182: note = Variant of terminal deoxynucleotidyl transferase
  source 1..1182: mol_type = other DNA
atgcatcaccaccatcatcatgggggttctggtcatccgccgagcaataccccggagggggaggtgccgagcgttatcgcccgtccggttagtcagtacgcgtgccagcgcaagaccacgctgaataactacaacaaaaagttcaccgacgcgctggagatcatggccgagaactacaaatttaaagagaacctgatcgcgtgtctggaagccaagcgcgccgcgagtatttttaaatatctgccgttcgaggttaccagcatgaaagacatccaaggtctgccgtgcattaccgaccaagttcgtgacgtgatcgaggagatcatcgaagagggcgagagcagccgtgttaaagaagttctcaatgacgagcgctacaaggcctttaagcagttcaccagcgtgttcggtgtgggcgtgaaaaccgcggaaaagtggtaccgtatgggcctccgtacggttgaagaagcaaaggccagtaagagtctgaagctgagcaagatgcagaaggcgggctttctgtattacgaggatctggcgagcatggttagtaaagaagaagccgatgccgttacgctcatcgtgaagaacacggtgcgtacctttctgccggatgcgctggtgaccatcaccggcggtttccgccgtggcaaacctatgggccacgacgttgactttctgatcacgaacccgggccgcaaagaggatgacgagctgctccacaaagtggttgatctgctcaagaagcaaggtctgctgctgtacgaagacatcaaagagagcacgttcgtggaggggcaactgccaagtcataaaatcgacgccatggacaacttccagaagtgcttcgccattctcaagctgtaccagccgggcgtggataacagtgcggttgggacgagtaagaaaagtgacatggctgaggttaaggattggaaagcgattcgtgtggatctggtgatcacgccattcgagcagtacgcctatgcgctgctcggttggacgggcagcaaacaatttcgtcgcgatctgcgtcgctatgcggaggaagagcgcggcatgatcctcgacaaccatgccctctacgacctgaaaaagcgcgtgtttctgaaagcgggcagcgaagaagagattttcgcgcatctgggtctggattatgtggagccgtgggaacgcaacgcg

SEQ ID NO: 2762 - protein, 394 aa, synthetic construct
  REGION 1..394: note = Variant of terminal deoxynucleotidyl transferase
MHHHHHHGGSGHPPSNTPEGEVPSVIARPVSQYACQRKTTLNNYNKKFTDALEIMAENYKFKENLIACLEAKRAASIFKYLPFEVTSMKDIQGLPCITDQVRDVIEEIIEEGESSRVKEVLNDERYKAFKQFTSVFGVGVKTAEKWYRMGLRTVEEAKASKSLKLSKMQKAGFLYYEDLASMVSKEEADAVTLIVKNTVRTFLPDALVTITGGFRRGKPMGHDVDFLITNPGRKEDDELLHKVVDLLKKQGLLLYEDIKESTFVEGQLPSHKIDAMDNFQKCFAILKLYQPGVDNSAVGTSKKSDMAEVKDWKAIRVDLVITPFEQYAYALLGWTGSKQFRRDLRRYAEEERGMILDNHALYDLKKRVFLKAGSEEEIFAHLGLDYVEPWERNA

SEQ ID NO: 2763 - DNA, 1182 bp, synthetic construct
  misc_feature 1..1182: note = Variant of terminal deoxynucleotidyl transferase
  source 1..1182: mol_type = other DNA
atgcatcaccaccatcatcatgggggttctggtcatccgccgagcaataccccggagggggaggtgccgagcgttatcgcccgtccggttagtcagtacgcgtgccagcgcaagaccacgctgaataactacaacaaaaagttcaccgacgcgctggagatcatggccgagaactacaaatttaaagagaacctgatcgcgtgtctggaagccaagcgcgccgcgagtatttttaaatatctgccgttcgaggttaccagcatgaaagacatccaaggtctgccgtgcattaccgaccaagttcgtgacgtgatcgaggagatcatcgaagagggcgagagcagccgtgttaaagaagttctcaatgacgagcgctacaaggcctttaagcagttcaccagcgtgttcggtgtgggcgtgaaaaccgcggaaaagtggtaccgtatgggcctccgtacggttgaagaagcaaaggccagtaagtgtctgaagctgagcaagatgcagaaggcgggctttctgtattacgaggatctggcgagcatggttagtaaagaagaagccgatgccgttacgctcatcgtgaagaacacggtgcgtacctttctgccggatgcgctggtgaccatcaccggcggtttccgccgtggcaaacctatgggccacgacgttgactttctgatcacgaacccgggccgcaaagaggatgacgagctgctccacaaagtggttgatctgctcaagaagcaaggtctgctgctgtacgaagacatcaaagagagcacgttcgtggaggggcaactgccaagtcataaaatcgacgccatggacaacttccagaagtgcttcgccattctcaagctgtaccagccgggcgtggataacagtgcggttgggacgagtaagaaaagtgacatggctgaggttaaggattggaaagcgattcgtgtggatctggtgatcacgccattcgagcagtacgcctatgcgctgctcggttggacgggcagcaaacaatttcgtcgcgatctgcgtcgctatgcggaggaagagcgcggcatgatcctcgacaaccatgccctctacgacctgaaaaagcgcatctttctgaaagcgggcagcgaagaagagattttcgcgcatctgggtctggattatgtggagccgtgggaacgcaacgcg

SEQ ID NO: 2764 - protein, 394 aa, synthetic construct
  REGION 1..394: note = Variant of terminal deoxynucleotidyl transferase
MHHHHHHGGSGHPPSNTPEGEVPSVIARPVSQYACQRKTTLNNYNKKFTDALEIMAENYKFKENLIACLEAKRAASIFKYLPFEVTSMKDIQGLPCITDQVRDVIEEIIEEGESSRVKEVLNDERYKAFKQFTSVFGVGVKTAEKWYRMGLRTVEEAKASKCLKLSKMQKAGFLYYEDLASMVSKEEADAVTLIVKNTVRTFLPDALVTITGGFRRGKPMGHDVDFLITNPGRKEDDELLHKVVDLLKKQGLLLYEDIKESTFVEGQLPSHKIDAMDNFQKCFAILKLYQPGVDNSAVGTSKKSDMAEVKDWKAIRVDLVITPFEQYAYALLGWTGSKQFRRDLRRYAEEERGMILDNHALYDLKKRIFLKAGSEEEIFAHLGLDYVEPWERNA

SEQ ID NO: 2765 - DNA, 1182 bp, synthetic construct
  misc_feature 1..1182: note = Variant of terminal deoxynucleotidyl transferase
  source 1..1182: mol_type = other DNA
atgcatcaccaccatcatcatgggggttctggtcatccgccgagcaataccccggagggggaggtgccgagcgttatcgcccgtccggttagtcagtacgcgtgccagcgcaagaccacgctgaataactacaacaaaaagttcaccgacgcgctggagatcatggccgagaactacaaatttaaagagaacctgatcgcgtgtctggaagccaagcgcgccgcgagtatttttaaatatctgccgttcgaggttaccagcatgaaagacatccaaggtctgccgtgcattaccgaccaagttcgtgacgtgatcgaggagatcatcgaagagggcgagagcagccgtgttaaagaagttctcaatgacgagcgctacaaggcctttaagcagttcaccagcgtgttcggtgtgggcgtgaaaaccgcggaaaagtggtaccgtatgggcctccgtacggttgaagaagcaaaggccagtaagagtctgaagctgagcaagatgcagaaggcgggctttctgtattacgaggatctggcgagcatggttagtaaagaagaagccgatgccgttacgctcatcgtgaagaacacggtgcgtacctttctgccggatgcgctggtgaccatcaccggcggtttccgccgtggcaaacctatgggccacgacgttgactttctgatcacgaacccgggccgcaaagaggatgacgagctgctccacaaagtggttgatctgctcaagaagcaaggtctgctgctgtacgaagacatcaaagagagcacgttcgtggagggggagctgccaagtcataaaatcgacgccatggacaacttccagaagtgcttcgccattctcaagctgtaccagccgggcgtggataacagtgcggttgggacgagtaagaaaagtgacatggctgaggttaaggattggaaagcgattcgtgtggatctggtgatcacgccattcgagcagtacgcctatgcgctgctcggttggacgggcagcaaacaatttcgtcgcgatctgcgtcgctatgcggaggaagagcgcggcatgatcctcgacaaccatgccctctacgacctgaaaaagcgcatctttctgaaagcgggcagcgaagaagagattttcgcgcatctgggtctggattatgtggagccgtgggaacgcaacgcg

SEQ ID NO: 2766 - protein, 394 aa, synthetic construct
  REGION 1..394: note = Variant of terminal deoxynucleotidyl transferase
MHHHHHHGGSGHPPSNTPEGEVPSVIARPVSQYACQRKTTLNNYNKKFTDALEIMAENYKFKENLIACLEAKRAASIFKYLPFEVTSMKDIQGLPCITDQVRDVIEEIIEEGESSRVKEVLNDERYKAFKQFTSVFGVGVKTAEKWYRMGLRTVEEAKASKSLKLSKMQKAGFLYYEDLASMVSKEEADAVTLIVKNTVRTFLPDALVTITGGFRRGKPMGHDVDFLITNPGRKEDDELLHKVVDLLKKQGLLLYEDIKESTFVEGELPSHKIDAMDNFQKCFAILKLYQPGVDNSAVGTSKKSDMAEVKDWKAIRVDLVITPFEQYAYALLGWTGSKQFRRDLRRYAEEERGMILDNHALYDLKKRIFLKAGSEEEIFAHLGLDYVEPWERNA

SEQ ID NO: 2767 - DNA, 1182 bp, synthetic construct
  misc_feature 1..1182: note = Variant of terminal deoxynucleotidyl transferase
  source 1..1182: mol_type = other DNA
atgcatcaccaccatcatcatgggggttctggtcatccgccgagcaataccccggagggggaggtgccgagcgttatcgcccgtccggttagtcagtacgcgtgccagcgcaagaccacgctgaataactacaacaaaaagttcaccgacgcgctggagatcatggccgagaactacaaatttaaagagaacctgatcgcgtgtctggaagccaagcgcgccgcgagtatttttaaatatctgccgttcgaggttaccagcatgaaagacatccaaggtctgccgtgcattaccgaccaagttcgtgacgtgatcgaggagatcatcgaagagggcgagagcagccgtgttaaagaagttctcaatgacgagcgctacaaggcctttaagcagttcaccagcgtgttcggtgtgggcgtgaaaaccgcggaaaagtggtaccgtatgggcctccgtacggttgaagaagcaaaggccagtaagcatctgaagctgagcaagatgcagaaggcgggctttctgtattacgaggatctggcgagcatggttagtaaagaagaagccgatgccgttacgctcatcgtgaagaacacggtgcgtacctttctgccggatgcgctggtgaccatcaccggcggtttccgccgtggcaaacctatgggccacgacgttgactttctgatcacgaacccgggccgcaaagaggatgacgagctgctccacaaagtggttgatctgctcaagaagcaaggtctgctgctgtacgaagacatcaaagagagcacgttcgtggaggggcaactgccaagtcataaaatcgacgccatggacaacttccagaagtgcttcgccattctcaagctgtaccagccgggcgtggataacagtgcggttgggacgagtaagaaaagtgacatggctgaggttaaggattggaaagcgattcgtgtggatctggtgatcacgccattcgagcagtacgcctatgcgctgctcggttggacgggcagcaaacaatttcgtcgcgatctgcgtcgctatgcggaggaagagcgcggcatgatcctcgacaaccatgccctctacgacctgaaaaagcgcatctttctgaaagcgggcagcgaagaagagattttcgcgcatctgggtctggattatgtggagccgtgggaacgcaacgcg

SEQ ID NO: 2768 - protein, 394 aa, synthetic construct
  REGION 1..394: note = Variant of terminal deoxynucleotidyl transferase
MHHHHHHGGSGHPPSNTPEGEVPSVIARPVSQYACQRKTTLNNYNKKFTDALEIMAENYKFKENLIACLEAKRAASIFKYLPFEVTSMKDIQGLPCITDQVRDVIEEIIEEGESSRVKEVLNDERYKAFKQFTSVFGVGVKTAEKWYRMGLRTVEEAKASKHLKLSKMQKAGFLYYEDLASMVSKEEADAVTLIVKNTVRTFLPDALVTITGGFRRGKPMGHDVDFLITNPGRKEDDELLHKVVDLLKKQGLLLYEDIKESTFVEGQLPSHKIDAMDNFQKCFAILKLYQPGVDNSAVGTSKKSDMAEVKDWKAIRVDLVITPFEQYAYALLGWTGSKQFRRDLRRYAEEERGMILDNHALYDLKKRIFLKAGSEEEIFAHLGLDYVEPWERNA

SEQ ID NO: 2769 - DNA, 1182 bp, synthetic construct
  misc_feature 1..1182: note = Variant of terminal deoxynucleotidyl transferase
  source 1..1182: mol_type = other DNA
atgcatcaccaccatcatcatgggggttctggtcatccgccgagcaataccccggagggggaggtgccgagcgttatcgcccgtccggttagtcagtacgcgtgccagcgcaagaccacgctgaataactacaacaaaaagttcaccgacgcgctggagatcatggccgagaactacaaatttaaagagaacctgatcgcgtgtctggaagccaagcgcgccgcgagtatttttaaatatctgccgttcgaggttaccagcatgaaagacatccaaggtctgccgtgcattaccgaccaagttcgtgacgtgatcgaggagatcatcgaagagggcgagagcagccgtgttaaagaagttctcaatgacgagcgctacaaggcctttaagcagttcaccagcgtgttcggtgtgggcgtgaaaaccgcggaaaagtggtaccgtatgggcctccgtacggttgaagaagcaaaggccagtaagagtctgaagctgagcaagatgcagaaggcgggctttctgtattacgaggatctggcgagcatggttagtaaagaagaagccgatgccgttacgctcatcgtgaagaacacggtgcgtacctttctgccggatgcgctggtgaccatcaccggcggtttccgccgtggcaaacctatgggccacgacgttgactttctgatcacgaacccgggccgcaaagaggatgacgagctgctccacaaagtggttgatctgctcaagaagcaaggtctgctgctgtacgaagacatcaaagagagcacgttcgtggaggggcaactgccaagtcataaaatcgacgccatggacaacttccagaagtgcttcgccattctcaagctgtaccagccgggcgtggataacagtgcggttgggacgagtaagaaaagtgacatggctgaggttaaggattggaaagcgattcgtgtggatctggtgatcacgccattcgagcagtacgcctatgcgctgctcggttggacgggcagcaaacaatttcgtcgcgatctgcgtcgctatgcggaggaagaggtgggcatgatcctcgacaaccatgccctctacgacctgaaaaagcgcatctttctgaaagcgggcagcgaagaagagattttcgcgcatctgggtctggattatgtggagccgtgggaacgcaacgcg

SEQ ID NO: 2770 - protein, 394 aa, synthetic construct
  REGION 1..394: note = Variant of terminal deoxynucleotidyl transferase
MHHHHHHGGSGHPPSNTPEGEVPSVIARPVSQYACQRKTTLNNYNKKFTDALEIMAENYKFKENLIACLEAKRAASIFKYLPFEVTSMKDIQGLPCITDQVRDVIEEIIEEGESSRVKEVLNDERYKAFKQFTSVFGVGVKTAEKWYRMGLRTVEEAKASKSLKLSKMQKAGFLYYEDLASMVSKEEADAVTLIVKNTVRTFLPDALVTITGGFRRGKPMGHDVDFLITNPGRKEDDELLHKVVDLLKKQGLLLYEDIKESTFVEGQLPSHKIDAMDNFQKCFAILKLYQPGVDNSAVGTSKKSDMAEVKDWKAIRVDLVITPFEQYAYALLGWTGSKQFRRDLRRYAEEEVGMILDNHALYDLKKRIFLKAGSEEEIFAHLGLDYVEPWERNA

SEQ ID NO: 2771 - DNA, 1182 bp, synthetic construct
  misc_feature 1..1182: note = Variant of terminal deoxynucleotidyl transferase
  source 1..1182: mol_type = other DNA
atgcatcaccaccatcatcatgggggttctggtcatccgccgagcaataccccggagggggaggtgccgagcgttatcgcccgtccggttagtcagtacgcgtgccagcgcaagaccacgctgaataactacaacaaaaagttcaccgacgcgctggagatcatggccgagaactacaaatttaaagagaacctgatcgcgtgtctggaagccaagcgcgccgcgagtatttttaaatatctgccgttcgaggttaccagcatgaaagacatccaaggtctgccgtgcattaccgaccaagttcgtgacgtgatcgaggagatcatcgaagagggcgagagcagccgtgttaaagaagttctcaatgacgagcgctacaaggcctttaagcagttcaccagcgtgttcggtgtgggcgtgaaaaccgcggaaaagtggtaccgtatgggcctccgtacggttgaagaagcaaaggccagtaagagtctgaagctgagcaagatgcagaaggcgggctttctgtattacgaggatctggcgagcatggttagtaaagaagaagccgatgccgttacgctcatcgtgaagaacacggtgcgtacctttctgccggatgcgctggtgaccatcaccggcggtttccgccgtggcaaacctatgggccacgacgttgactttctgatcacgaacccgggccgcaaagaggatgacgagctgctccacaaagtggttgatctgctcaagaagcaaggtctgctgctgtacgaagacatcaaagagagcacgttcgtggaggggcaactgccaagtcataaaatcgacgccatggacaacttccagaagtgcttcgccattctcaagctgtaccagccgggcgtggataacagtgcggttgggacgagtaagaaaagtgacatggctgaggttaaggattggaaagcgattcgtgtggatctggtgatcacgccattcgagcagtacgcctatgcgctgctcggttggacgggcagcaaacaatttcgtcgcgatctgcgtcgctatgcggaggaagagcgcggcatgatcctcgacaaccatgccctctacgacaagaaaaagcgcatctttctgaaagcgggcagcgaagaagagattttcgcgcatctgggtctggattatgtggagccgtgggaacgcaacgcg

SEQ ID NO: 2772 - protein, 394 aa, synthetic construct
  REGION 1..394: note = Variant of terminal deoxynucleotidyl transferase
MHHHHHHGGSGHPPSNTPEGEVPSVIARPVSQYACQRKTTLNNYNKKFTDALEIMAENYKFKENLIACLEAKRAASIFKYLPFEVTSMKDIQGLPCITDQVRDVIEEIIEEGESSRVKEVLNDERYKAFKQFTSVFGVGVKTAEKWYRMGLRTVEEAKASKSLKLSKMQKAGFLYYEDLASMVSKEEADAVTLIVKNTVRTFLPDALVTITGGFRRGKPMGHDVDFLITNPGRKEDDELLHKVVDLLKKQGLLLYEDIKESTFVEGQLPSHKIDAMDNFQKCFAILKLYQPGVDNSAVGTSKKSDMAEVKDWKAIRVDLVITPFEQYAYALLGWTGSKQFRRDLRRYAEEERGMILDNHALYDKKKRIFLKAGSEEEIFAHLGLDYVEPWERNA

SEQ ID NO: 2773 - DNA, 1182 bp, synthetic construct
  misc_feature 1..1182: note = Variant of terminal deoxynucleotidyl transferase
  source 1..1182: mol_type = other DNA
atgcatcaccaccatcatcatgggggttctggtcatccgccgagcaataccccggagggggaggtgccgagcgttatcgcccgtccggttagtcagtacgcgtgccagcgcaagaccacgctgaataactacaacaaaaagttcaccgacgcgctggagatcatggccgagaactacaaatttaaagagaacctgatcgcgtgtctggaagccaagcgcgccgcgagtatttttaaatatctgccgttcgaggttaccagcatgaaagacatccaaggtctgccgtgcattaccgaccaagttcgtgacgtgatcgaggagatcatcgaagagggcgagagcagccgtgttaaagaagttctcaatgacgagcgctacaaggcctttaagcagttcaccagcgtgttcggtgtgggcgtgaaaaccgcggaaaagtggtaccgtatgggcctccgtacggttgaagaagcaaaggccagtaagtttctgaagctgagcaagatgcagaaggcgggctttctgtattacgaggatctggcgagcatggttagtaaagaagaagccgatgccgttacgctcatcgtgaagaacacggtgcgtacctttctgccggatgcgctggtgaccatcaccggcggtttccgccgtggcaaacctatgggccacgacgttgactttctgatcacgaacccgggccgcaaagaggatgacgagctgctccacaaagtggttgatctgctcaagaagcaaggtctgctgctgtacgaagacatcaaagagagcacgttcgtggaggggcaactgccaagtcataaaatcgacgccatggacaacttccagaagtgcttcgccattctcaagctgtaccagccgggcgtggataacagtgcggttgggacgagtaagaaaagtgacatggctgaggttaaggattggaaagcgattcgtgtggatctggtgatcacgccattcgagcagtacgcctatgcgctgctcggttggacgggcagcaaacaatttcgtcgcgatctgcgtcgctatgcggaggaagagcgcggcatgatcctcgacaaccatgccctctacgacctgaaaaagcgcatctttctgaaagcgggcagcgaagaagagattttcgcgcatctgggtctggattatgtggagccgtgggaacgcaacgcg

SEQ ID NO: 2774 - protein, 394 aa, synthetic construct
  REGION 1..394: note = Variant of terminal deoxynucleotidyl transferase
MHHHHHHGGSGHPPSNTPEGEVPSVIARPVSQYACQRKTTLNNYNKKFTDALEIMAENYKFKENLIACLEAKRAASIFKYLPFEVTSMKDIQGLPCITDQVRDVIEEIIEEGESSRVKEVLNDERYKAFKQFTSVFGVGVKTAEKWYRMGLRTVEEAKASKFLKLSKMQKAGFLYYEDLASMVSKEEADAVTLIVKNTVRTFLPDALVTITGGFRRGKPMGHDVDFLITNPGRKEDDELLHKVVDLLKKQGLLLYEDIKESTFVEGQLPSHKIDAMDNFQKCFAILKLYQPGVDNSAVGTSKKSDMAEVKDWKAIRVDLVITPFEQYAYALLGWTGSKQFRRDLRRYAEEERGMILDNHALYDLKKRIFLKAGSEEEIFAHLGLDYVEPWERNA

SEQ ID NO: 2775 - DNA, 1182 bp, synthetic construct
  misc_feature 1..1182: note = Variant of terminal deoxynucleotidyl transferase
  source 1..1182: mol_type = other DNA
atgcatcaccaccatcatcatgggggttctggtcatccgccgagcaataccccggagggggaggtgccgagcgttatcgcccgtccggttagtcagtacgcgtgccagcgcaagaccacgctgaataactacaacaaaaagttcaccgacgcgctggagatcatggccgagaactacaaatttaaagagaacctgatcgcgtgtctggaagccaagcgcgccgcgagtatttttaaatatctgccgttcgaggttaccagcatgaaagacatccaaggtctgccgtgcattaccgaccaagttcgtgacgtgatcgaggagatcatcgaagagggcgagagcagccgtgttaaagaagttctcaatgacgagcgctacaaggcctttaagcagttcaccagcgtgttcggtgtgggcgtgaaaaccgcggaaaagtggtaccgtatgggcctccgtacggttgaagaagcaaaggccagtaaggagctgaagctgagcaagatgcagaaggcgggctttctgtattacgaggatctggcgagcatggttagtaaagaagaagccgatgccgttacgctcatcgtgaagaacacggtgcgtacctttctgccggatgcgctggtgaccatcaccggcggtttccgccgtggcaaacctatgggccacgacgttgactttctgatcacgaacccgggccgcaaagaggatgacgagctgctccacaaagtggttgatctgctcaagaagcaaggtctgctgctgtacgaagacatcaaagagagcacgttcgtggaggggcaactgccaagtcataaaatcgacgccatggacaacttccagaagtgcttcgccattctcaagctgtaccagccgggcgtggataacagtgcggttgggacgagtaagaaaagtgacatggctgaggttaaggattggaaagcgattcgtgtggatctggtgatcacgccattcgagcagtacgcctatgcgctgctcggttggacgggcagcaaacaatttcgtcgcgatctgcgtcgctatgcggaggaagagcgcggcatgatcctcgacaaccatgccctctacgacctgaaaaagcgcatctttctgaaagcgggcagcgaagaagagattttcgcgcatctgggtctggattatgtggagccgtgggaacgcaacgcg

SEQ ID NO: 2776 - protein, 394 aa, synthetic construct
  REGION 1..394: note = Variant of terminal deoxynucleotidyl transferase
MHHHHHHGGSGHPPSNTPEGEVPSVIARPVSQYACQRKTTLNNYNKKFTDALEIMAENYKFKENLIACLEAKRAASIFKYLPFEVTSMKDIQGLPCITDQVRDVIEEIIEEGESSRVKEVLNDERYKAFKQFTSVFGVGVKTAEKWYRMGLRTVEEAKASKELKLSKMQKAGFLYYEDLASMVSKEEADAVTLIVKNTVRTFLPDALVTITGGFRRGKPMGHDVDFLITNPGRKEDDELLHKVVDLLKKQGLLLYEDIKESTFVEGQLPSHKIDAMDNFQKCFAILKLYQPGVDNSAVGTSKKSDMAEVKDWKAIRVDLVITPFEQYAYALLGWTGSKQFRRDLRRYAEEERGMILDNHALYDLKKRIFLKAGSEEEIFAHLGLDYVEPWERNA

SEQ ID NO: 2777 - DNA, 1182 bp, synthetic construct
  misc_feature 1..1182: note = Variant of terminal deoxynucleotidyl transferase
  source 1..1182: mol_type = other DNA
atgcatcaccaccatcatcatgggggttctggtcatccgccgagcaataccccggagggggaggtgccgagcgttatcgcccgtccggttagtcagtacgcgtgccagcgcaagaccacgctgaataactacaacaaaaagttcaccgacgcgctggagatcatggccgagaactacaaatttaaagagaacctgatcgcgtgtctggaagccaagcgcgccgcgagtatttttaaatatctgccgttcgaggttaccagcatgaaagacatccaaggtctgccgtgcattaccgaccaagttcgtgacgtgatcgaggagatcatcgaagagggcgagagcagccgtgttaaagaagttctcaatgacgagcgctacaaggcctttaagcagttcaccagcgtgttcggtgtgggcgtgaaaaccgcggaaaagtggtaccgtatgggcctccgtacggttgaagaagcaaaggccagtaagagtctgaagctgagcaagatgcagaaggcgggctttctgtattacgaggatctggcgagcatggttagtaaagaagaagccgatgccgttacgctcatcgtgaagaacacggtgcgtacctttctgccggatgcgctggtgaccatcaccggcggtttccgccgtggcaaacctatgggccacgacgttgactttctgatcacgaacccgggccgcaaagaggatgacgagctgctccacaaagtggttgatctgctcaagaagcaaggtctgctgctgtacgaagacatcaaagagagcacgttcgtggaggggcaactgccaagtcataaaatcgacgccatggacaacttccagaagtgcttcgccattctcaagctgtaccagccgggcgtggataacagtgcggttgggacgagtaagaaaagtgacatggctgaggttaaggattggaaagcgattcgtgtggatctggtgatcacgccattcgagcagtacgcctatgcgctgctcggttggacgggcagcaaacaatttcgtcgcgatctgcgtcgctatgcggaggaagagcgcggcatgatcctcgacaaccatgccctctacgacctgaaaaagcgcatcttttataaagcgggcagcgaagaagagattttcgcgcatctgggtctggattatgtggagccgtgggaacgcaacgcg

SEQ ID NO: 2778 - protein, 394 aa, synthetic construct
  REGION 1..394: note = Variant of terminal deoxynucleotidyl transferase
MHHHHHHGGSGHPPSNTPEGEVPSVIARPVSQYACQRKTTLNNYNKKFTDALEIMAENYKFKENLIACLEAKRAASIFKYLPFEVTSMKDIQGLPCITDQVRDVIEEIIEEGESSRVKEVLNDERYKAFKQFTSVFGVGVKTAEKWYRMGLRTVEEAKASKSLKLSKMQKAGFLYYEDLASMVSKEEADAVTLIVKNTVRTFLPDALVTITGGFRRGKPMGHDVDFLITNPGRKEDDELLHKVVDLLKKQGLLLYEDIKESTFVEGQLPSHKIDAMDNFQKCFAILKLYQPGVDNSAVGTSKKSDMAEVKDWKAIRVDLVITPFEQYAYALLGWTGSKQFRRDLRRYAEEERGMILDNHALYDLKKRIFYKAGSEEEIFAHLGLDYVEPWERNA

SEQ ID NO: 2779 - DNA, 1182 bp, synthetic construct
  misc_feature 1..1182: note = Variant of terminal deoxynucleotidyl transferase
  source 1..1182: mol_type = other DNA
atgcatcaccaccatcatcatgggggttctggtcatccgccgagcaataccccggagggggaggtgccgagcgttatcgcccgtccggttagtcagtacgcgtgccagcgcaagaccacgctgaataactacaacaaaaagttcaccgacgcgctggagatcatggccgagaactacaaatttaaagagaacctgatcgcgtgtctggaagccaagcgcgccgcgagtatttttaaatatctgccgttcgaggttaccagcatgaaagacatccaaggtctgccgtgcattaccgaccaagttcgtgacgtgatcgaggagatcatcgaagagggcgagagcagccgtgttaaagaagttctcaatgacgagcgctacaaggcctttaagcagttcaccagcgtgttcggtgtgggcgtgaaaaccgcggaaaagtggtaccgtatgggcctccgtacggttgaagaagcaaaggccagtaagagtctgaagctgagcaagatgcagaaggcgggctttctgtattacgaggatctggcgagcatggttagtaaagaagaagccgatgccgttacgctcatcgtgaagaacacggtgcgtacctttctgccggatgcgctggtgaccatcaccggcggtttccgccgtggcaaacctatgggccacgacgttgactttctgatcacgaacccgggccgcaaagaggatgacgagctgctccacaaagtggttgatctgctcaagaagcaaggtctgctgctgtacgaagacatcgttgagagcacgttcgtggaggggcaactgccaagtcataaaatcgacgccatggacaacttccagaagtgcttcgccattctcaagctgtaccagccgggcgtggataacagtgcggttgggacgagtaagaaaagtgacatggctgaggttaaggattggaaagcgattcgtgtggatctggtgatcacgccattcgagcagtacgcctatgcgctgctcggttggacgggcagcaaacaatttcgtcgcgatctgcgtcgctatgcggaggaagagcgcggcatgatcctcgacaaccatgccctctacgacctgaaaaagcgcatctttctgaaagcgggcagcgaagaagagattttcgcgcatctgggtctggattatgtggagccgtgggaacgcaacgcg

SEQ ID NO: 2780 - protein, 394 aa, synthetic construct
  REGION 1..394: note = Variant of terminal deoxynucleotidyl transferase
MHHHHHHGGSGHPPSNTPEGEVPSVIARPVSQYACQRKTTLNNYNKKFTDALEIMAENYKFKENLIACLEAKRAASIFKYLPFEVTSMKDIQGLPCITDQVRDVIEEIIEEGESSRVKEVLNDERYKAFKQFTSVFGVGVKTAEKWYRMGLRTVEEAKASKSLKLSKMQKAGFLYYEDLASMVSKEEADAVTLIVKNTVRTFLPDALVTITGGFRRGKPMGHDVDFLITNPGRKEDDELLHKVVDLLKKQGLLLYEDIVESTFVEGQLPSHKIDAMDNFQKCFAILKLYQPGVDNSAVGTSKKSDMAEVKDWKAIRVDLVITPFEQYAYALLGWTGSKQFRRDLRRYAEEERGMILDNHALYDLKKRIFLKAGSEEEIFAHLGLDYVEPWERNA

SEQ ID NO: 2781 - DNA, 1182 bp, synthetic construct
  misc_feature 1..1182: note = Variant of terminal deoxynucleotidyl transferase
  source 1..1182: mol_type = other DNA
atgcatcaccaccatcatcatgggggttctggtcatccgccgagcaataccccggagcgtgaggtgccgagcgttatcgcccgtccggttagtcagtacgcgtgccagcgcaagaccacgctgaataactacaacaaaaagttcaccgacgcgctggagatcatggccgagaactacaaatttaaagagaacctgatcgcgtgtctggaagccaagcgcgccgcgagtatttttaaatatctgccgttcgaggttaccagcatgaaagacatccaaggtctgccgtgcattaccgacgatgttcgtgacgtgatcgaggagatcatcgaagagggcgagagcagccgtgttaaagaagtcctcaatgacgagcgctacaaggcctttaagcagttcaccagcgtgttcggtgtgggcgtgaaaaccgcggaaaagtggtaccgtatgggcctccgtacggttgaagaagcaaaggccagtaagagtctgaagctgagcaagatgcagaaggcgggctttctgtattacgaggatctggcgagcatggttagtaaagaagaagccgatgccgttacgctcatcgtgaagaacacggtgcgtacctttgtgccggatgcgctggtgaccatcaccggcggtttccgccgtggcaaacctatgggccacgacgttgattttctgatcacgaacccgggccgcaaagaggatgacgagctgctccacaaagtggttgatctgctcaagaagcaaggtctgctgctgtacgaagacatcaaagagagcacgttcgtggaggggcaactgccaagtcataaaatcgacgccatggacaacttccagaagtgcttcgccattctcaagctgtaccagccgggcgtggataacagtgcggttgggacgagtaagaaaagtgacatggctgaggttaaggattggaaagcgattcgtgtggatctggtgatcacgccattcgagcagtacgcctatgcgctgctcggttggacgggcagcaaacaatttcgtcgcgatctgcgtcgctatgcggaggaagagcgcggcatgatcctcgacaaccatgccctctacgacctgaaaaagcgcatctttctgaaagcgggcagcgaagaagagattttcgcgcatctgggtctggattatgtggagccgtgggaacgcaacgcg

SEQ ID NO: 2782 - protein, 394 aa, synthetic construct
  REGION 1..394: note = Variant of terminal deoxynucleotidyl transferase
MHHHHHHGGSGHPPSNTPEREVPSVIARPVSQYACQRKTTLNNYNKKFTDALEIMAENYKFKENLIACLEAKRAASIFKYLPFEVTSMKDIQGLPCITDDVRDVIEEIIEEGESSRVKEVLNDERYKAFKQFTSVFGVGVKTAEKWYRMGLRTVEEAKASKSLKLSKMQKAGFLYYEDLASMVSKEEADAVTLIVKNTVRTFVPDALVTITGGFRRGKPMGHDVDFLITNPGRKEDDELLHKVVDLLKKQGLLLYEDIKESTFVEGQLPSHKIDAMDNFQKCFAILKLYQPGVDNSAVGTSKKSDMAEVKDWKAIRVDLVITPFEQYAYALLGWTGSKQFRRDLRRYAEEERGMILDNHALYDLKKRIFLKAGSEEEIFAHLGLDYVEPWERNA

SEQ ID NO: 2783 - DNA, 1182 bp, synthetic construct
  misc_feature 1..1182: note = Variant of terminal deoxynucleotidyl transferase
  source 1..1182: mol_type = other DNA
atgcatcaccaccatcatcatgggggttctggtcatccgccgagcaataccccggagcgtgaggtgccgagcgttatcgcccgtccggttagtcagtacgcgtgccagcgcaagaccacgctgaataactacaacaaaaagttcaccgacgcgctggagatcatggccgagaactacaaatttaaagagaacctgatcgcgtgtctggaagccaagcgcgccgcgagtatttttaaatatctgccgttcgaggttaccagcatgaaagacatccaaggtctgccgtgcattaccgacgatgttcgtgacctgatcgaggagatcatcgaagagggcgagagcagccgtgttaaagaaatcctcaatgacgagcgctacaaggcctttaagcagttcaccagcgtgttcggtgtgggcgtgaaaaccgcggaaaagtggtaccgtatgggcctccgtacggttgaagaagcaaaggccagtaagagtctgaagctgagcaagatgcagaaggcgggctttctgtattacgaggatctggcgagcatggttagtaaagaagaagccgatgccgttacgctcatcgtgaaggaaacggtgcgtacctttctgccggatgcgctggtgaccatcaccggcggtttccgccgtggcaaacctatgggccacgacgttgactttctgatcacgaacccgggccgcaaagaggatgacgagctgctccacaaagtggttgatctgctcaagaagcaaggtctgctgctgtacgaagacatcaaagagagcacgttcgtggaggggcaactgccaagtcataaaatcgacgccatggacaacttccagaagtgcttcgccattctcaagctgtaccagccgggcgtggataacagtgcggttgggacgagtaagaaaagtgacatggctgaggttaaggattggaaagcgattcgtgtggatctggtgatcacgccattcgagcagtacgcctatgcgctgctcggttggacgggcagcaaacaatttcgtcgcgatctgcgtcgctatgcggaggaagagcgcggcatgatcctcgacaaccatgccctctacgacctgaaaaaaaaaatctttctgaaagcgggcagcgaagaagagattttcgcgcatctgggtctggattatgtggagccgtgggaacgcaacgcg

SEQ ID NO: 2784 - protein, 394 aa, synthetic construct
  REGION 1..394: note = Variant of terminal deoxynucleotidyl transferase
MHHHHHHGGSGHPPSNTPEREVPSVIARPVSQYACQRKTTLNNYNKKFTDALEIMAENYKFKENLIACLEAKRAASIFKYLPFEVTSMKDIQGLPCITDDVRDLIEEIIEEGESSRVKEILNDERYKAFKQFTSVFGVGVKTAEKWYRMGLRTVEEAKASKSLKLSKMQKAGFLYYEDLASMVSKEEADAVTLIVKETVRTFLPDALVTITGGFRRGKPMGHDVDFLITNPGRKEDDELLHKVVDLLKKQGLLLYEDIKESTFVEGQLPSHKIDAMDNFQKCFAILKLYQPGVDNSAVGTSKKSDMAEVKDWKAIRVDLVITPFEQYAYALLGWTGSKQFRRDLRRYAEEERGMILDNHALYDLKKKIFLKAGSEEEIFAHLGLDYVEPWERNA

SEQ ID NO: 2785 - DNA, 1182 bp, synthetic construct
  misc_feature 1..1182: note = Variant of terminal deoxynucleotidyl transferase
  source 1..1182: mol_type = other DNA
atgcatcaccaccatcatcatgggggttctggtcatccgccgagcaataccccggagaaggaggtgccgagcgttatcgcccgtccggttagtcagtacgcgtgccagcgcaagaccacgctgaataactacaacaaaaagttcaccgacgcgctggagatcatggccgagaactacaaatttaaagagaacctgatcgcgtgtctggaagccaagcgcgccgcgagtatttttaaatatctgccgttcgaggttaccagcatgaaagacatccaaggtctgccgtgcattaccgaccaggttcgtgacgtgatcgaggagatcatcgaagagggcgagagcagccgtgttaaagaaatcctcaatgacgagcgctacaaggcctttaagcagttcaccagcgtgttcggtgtgggcgtgaaaaccgcggaaaagtggtaccgtatgggcctccgtacggttgaagaagcaaaggccagtaagagtctgaagctgagcaagatgcagaaggcgggcttcctgtattacgaggatctggcgagcatggttagtaaagaagaagccgatgccgttacgctcatcgtgaagaatacggtgcgtacctttctgccggatgcgctggtgaccatcaccggcggtttccgccgtggcaaacctatgggccacgacgttgattttctgatcacgaacccgggtcgcaaaatggatgacgagctgctccacaaagtggttgatctgctcaagaagcaaggtctgctgctgtacgaagacatcaaagagagcacgttcgtggaggggcaactgccaagtcataaaatcgacgccatggacaacttccagaagtgcttcgccattctcaagctgtaccagccgggcgtggataacagtgcggttgggacgagtaagaaaagtgacatggctgaggttaaggattggaaagcgattcgtgtggatctggtgatcacgccattcgagcagtacgcctatgcgctgctcggttggacgggcagcaaacaatttcgtcgcgatctgcgtcgctatgcggaggaagagcgcggcatgatcctcgacaaccatgccctctacgacctgaaaaagcgcatctttctgaaagcgggcagcgaagaagagattttcgcgcatctgggtctggattatgtggagccgtgggaacgcaacgcg

SEQ ID NO: 2786 - protein, 394 aa, synthetic construct
  REGION 1..394: note = Variant of terminal deoxynucleotidyl transferase
MHHHHHHGGSGHPPSNTPEKEVPSVIARPVSQYACQRKTTLNNYNKKFTDALEIMAENYKFKENLIACLEAKRAASIFKYLPFEVTSMKDIQGLPCITDQVRDVIEEIIEEGESSRVKEILNDERYKAFKQFTSVFGVGVKTAEKWYRMGLRTVEEAKASKSLKLSKMQKAGFLYYEDLASMVSKEEADAVTLIVKNTVRTFLPDALVTITGGFRRGKPMGHDVDFLITNPGRKMDDELLHKVVDLLKKQGLLLYEDIKESTFVEGQLPSHKIDAMDNFQKCFAILKLYQPGVDNSAVGTSKKSDMAEVKDWKAIRVDLVITPFEQYAYALLGWTGSKQFRRDLRRYAEEERGMILDNHALYDLKKRIFLKAGSEEEIFAHLGLDYVEPWERNA

SEQ ID NO: 2787 - DNA, 1182 bp, synthetic construct
  misc_feature 1..1182: note = Variant of terminal deoxynucleotidyl transferase
  source 1..1182: mol_type = other DNA
atgcatcaccaccatcatcatgggggttctggtcatccgccgagcaataccccggaggaggaggtgccgagcgttatcgcccgtccggttagtcagtacgcgtgccagcgcaagaccacgctgaataactacaacaaaaagttcaccgacgcgctggagatcatggccgagaactacaaatttaaagagaacctgatcgcgtgtctggaagccaagcgcgccgcgagtatttttaaatatctgccgttcgaggttaccagcatgaaagacatccaaggtctgccgtgcattaccgacgatgttcgtgacgtgatcgaggagatcatcgaagagggcgagagcagccgtgttaaagaaatcctcaatgacgagcgctacaaggcctttaagcagttcaccagcgtgttcggtgtgggcgtgaaaaccgcggaaaagtggtaccgtatgggcctccgtacggttgaagaagcaaaggccagtaagagtctgaagctgagcaagatgcagaaggcgggctttctgtattacgaggatctggcgagcatggttagtaaagaagaagccgatgccgttacgctcatcgtgaaggaaacggtgcgtacctttctgccggatgcgctggtgaccatcaccggcggtttccgccgtggcaaacctatgggccacgacgttgattttctgatcacgaacccgatgcgcaaaatggatgacgagctgctccacaaagtggttgatctgctcaagaagcaaggtctgctgctgtacgaagacatcaaagagagcacgttcgtggaggggcaactgccaagtcataaaatcgacgccatggacaacttccagaagtgcttcgccattctcaagctgtaccagccgggggtggataacagtgcggttgggacgagtaagaaaagtgacatggctgaggttaaggattggaaagcggtccgtgtggatctggtgatcacgccattcgagcagtacgcctatgcgctgctcggttggacgggcagcaaacaatttcgtcgcgatctgcgtcgctatgcggaggaagagcgcggcatgatcctcgacaaccatgccctctacgacctgaaaagcaaaatctttctgaaagcgggcagcgaagaagagattttcgcgcatctgggtctggattatgtggagccgtgggaacgcaacgcg

SEQ ID NO: 2788 - protein, 394 aa, synthetic construct
  REGION 1..394: note = Variant of terminal deoxynucleotidyl transferase
MHHHHHHGGSGHPPSNTPEEEVPSVIARPVSQYACQRKTTLNNYNKKFTDALEIMAENYKFKENLIACLEAKRAASIFKYLPFEVTSMKDIQGLPCITDDVRDVIEEIIEEGESSRVKEILNDERYKAFKQFTSVFGVGVKTAEKWYRMGLRTVEEAKASKSLKLSKMQKAGFLYYEDLASMVSKEEADAVTLIVKETVRTFLPDALVTITGGFRRGKPMGHDVDFLITNPMRKMDDELLHKVVDLLKKQGLLLYEDIKESTFVEGQLPSHKIDAMDNFQKCFAILKLYQPGVDNSAVGTSKKSDMAEVKDWKAVRVDLVITPFEQYAYALLGWTGSKQFRRDLRRYAEEERGMILDNHALYDLKSKIFLKAGSEEEIFAHLGLDYVEPWERNA

SEQ ID NO: 2789 - DNA, 1182 bp, synthetic construct
  misc_feature 1..1182: note = Variant of terminal deoxynucleotidyl transferase
  source 1..1182: mol_type = other DNA
atgcatcaccaccatcatcatgggggttctggtcatccgccgagcaataccccggagaaggaggtgccgagcgttatcgcccgtccggttagtcagtacgcgtgccagcgcaagaccacgctgaataactacaacaaaaagttcaccgacgcgctggagatcatggccgagaactacaaatttaaagagaacctgatcgcgtgtctggaagccaagcgcgccgcgagtatttttaaatatctgccgttcgaggttaccagcatgaaagacatccaaggtctgccgtgcattaccgacgatgttcgtgacctgatcgaggagatcatcgaagagggcgagagcagccgtgttaaagaagttctcaatgacgagcgctacaaggcctttaagcagttcaccagcgtgttcggtgtgggcgtgaaaaccgcggaaaagtggtaccgtatgggcctccgtacggttgaagaagcaaaggccagtaagagtctgaagctgagcaagatgcagaaggcgggctttctgtattacgaggatctggcgagcatggttagtaaagaagaagccgatgccgttacgctcatcgtgaagaacacggtgcgtacctttgtgccggatgcgctggtgaccatcaccggcggtttccgccgtggcaaacctatgggccacgacgttgattttctgatcacgaacccgggccgcaaagaggatgacgagctgctccacaaagtggttgatctgctcaagaagcaaggtctgctgctgtacgaagacatcaaagagagcacgttcgtggaggggcaactgccaagtcataaaatcgacgccatggacaacttccagaagtgcttcgccattctcaagctgtaccagccgggcgtggataacagtgcggttgggacgagtaagaaaagtgacatggctgaggttaaggattggaaagcgatccgtgtggatctggtgatcacgccattcgagcagtacgcctatgcgctgctcggttggacgggcagcaaacaatttcgtcgcgatctgcgtcgctatgccgagctggagcgcgatatgatcctcgacaaccatgccctctacgacctgaaaaaacgtatctttctgaaagcgggcagcgaagaagagattttcgcgcatctgggtctggattatgtggagccgtgggaacgcaacgcg

SEQ ID NO: 2790 - protein, 394 aa, synthetic construct
  REGION 1..394: note = Variant of terminal deoxynucleotidyl transferase
MHHHHHHGGSGHPPSNTPEKEVPSVIARPVSQYACQRKTTLNNYNKKFTDALEIMAENYKFKENLIACLEAKRAASIFKYLPFEVTSMKDIQGLPCITDDVRDLIEEIIEEGESSRVKEVLNDERYKAFKQFTSVFGVGVKTAEKWYRMGLRTVEEAKASKSLKLSKMQKAGFLYYEDLASMVSKEEADAVTLIVKNTVRTFVPDALVTITGGFRRGKPMGHDVDFLITNPGRKEDDELLHKVVDLLKKQGLLLYEDIKESTFVEGQLPSHKIDAMDNFQKCFAILKLYQPGVDNSAVGTSKKSDMAEVKDWKAIRVDLVITPFEQYAYALLGWTGSKQFRRDLRRYAELERDMILDNHALYDLKKRIFLKAGSEEEIFAHLGLDYVEPWERNA

SEQ ID NO: 2791 - DNA, 1182 bp, synthetic construct
  misc_feature 1..1182: note = Variant of terminal deoxynucleotidyl transferase
  source 1..1182: mol_type = other DNA
atgcatcaccaccatcatcatgggggttctggtcatccgccgagcaataccccggagcgtgaggtgccgagcgttatcgcccgtccggttagtcagtacgcgtgccagcgcaagaccacgctgaataactacaacaaaaagttcaccgacgcgctggagatcatggccgagaactacaaatttaaagagaacctgatcgcgtgtctggaagccaagcgcgccgcgagtatttttaaatatctgccgttcgaggttaccagcatgaaagacatccaaggtctgccgtgcattaccgacgatgttcgtgacctgatcgaggagatcatcgaacgtggcgagagcagccgtgttaaagaagtcctcaatgacgagcgctacaaggcctttaagcagttcaccagcgtgttcggtgtgggcgtgaaaaccgcggaaaagtggtaccgtatgggcctccgtacggttgaagaagcaaaggccagtaagagtctgaagctgagcaagatgcagaaggcgggcttcctgtattacgaggatctggcgagcatggttagtaaagaagaagccgatgccgttacgctcatcgtgaagaacacggtgcgtacctttctgccggatgcgctggtgaccatcaccggcggtttccgccgtggcaaacctatgggccacgacgttgattttctgatcacgaacccgggtcgcaaagaagatgacgagctgctccaccgtgtggttgatctgctcaagaagcaaggtctgctgctgtacgaagacatcaaagagagcacgttcgtggaggggcaactgccaagtcataaaatcgacgccatggacaacttccagaagtgcttcgccattctcaagctgtaccagccgggcgtggataacagtgcggttgggacgagtaagaaaagtgacatggctgaggttaaggattggaaagcgatccgtgtggatctggtgatcacgccattcgagcagtacgcctatgcgctgctcggttggacgggcagcaaacaatttcgtcgcgatctgcgtcgctatgcggaggaagagcgcggcatgatcctcgacaaccatgccctctacgacctgaaaaagcgcatctttctgaaagcgggcagcgaagaagagattttcgcgcatctgggtctggattatgtggagccgtgggaacgcaacgcg

SEQ ID NO: 2792 - protein, 394 aa, synthetic construct
  REGION 1..394: note = Variant of terminal deoxynucleotidyl transferase
MHHHHHHGGSGHPPSNTPEREVPSVIARPVSQYACQRKTTLNNYNKKFTDALEIMAENYKFKENLIACLEAKRAASIFKYLPFEVTSMKDIQGLPCITDDVRDLIEEIIERGESSRVKEVLNDERYKAFKQFTSVFGVGVKTAEKWYRMGLRTVEEAKASKSLKLSKMQKAGFLYYEDLASMVSKEEADAVTLIVKNTVRTFLPDALVTITGGFRRGKPMGHDVDFLITNPGRKEDDELLHRVVDLLKKQGLLLYEDIKESTFVEGQLPSHKIDAMDNFQKCFAILKLYQPGVDNSAVGTSKKSDMAEVKDWKAIRVDLVITPFEQYAYALLGWTGSKQFRRDLRRYAEEERGMILDNHALYDLKKRIFLKAGSEEEIFAHLGLDYVEPWERNA

SEQ ID NO: 2793 - DNA, 1182 bp, synthetic construct
  misc_feature 1..1182: note = Variant of terminal deoxynucleotidyl transferase
  source 1..1182: mol_type = other DNA
atgcatcaccaccatcatcatgggggttctggtcatccgccgagcaataccccggagaaggaggtgccgagcgttatcgcccgtccggttagtcagtacgcgtgccagcgcaagaccacgctgaataactacaacaaaaagttcaccgacgcgctggagatcatggccgagaactacaaatttaaagagaacctgatcgcgtgtctggaagccaagcgcgccgcgagtatttttaaatatctgccgttcgaggttaccagcatgaaagacatccaaggtctgccgtgcattaccgaccaggttcgtgacgtgatcgaggagatcatcgaagagggcgagagcagccgtgttaaagaaatcctcaatgacgagcgctacaaggcctttaagcagttcaccagcgtgttcggtgtgggcgtgaaaaccgcggaaaagtggtaccgtatgggcctccgtacggttgaagaagcaaaggccagtaagagtctgaagctgagcaagatgcagaaggcgggcttcctgtattacgaggatctggcgagcatggttagtaaagaagaagccgatgccgttacgctcatcgtgaaggaaacggtgcgtacctttctgccggatgcgctggtgaccatcaccggcggtttccgccgtggcaaacctatgggccacgacgttgactttctgatcacgaacccgggccgcaaagaggatgacgagctgctccacaaagtggttgatctgctcaagaagcaaggtctgctgctgtacgaagacatcaaagagagcacgttcgtggaggggcaactgccaagtcataaaatcgacgccatggacaacttccagaagtgcttcgccattctcaagctgtaccagccgaaggtggataacagtgcggttgggacgagtaagaaaagtgacatggctgaggttaaggattggaaagcgatccgtgtggatctggtgatcacgccattcgagcagtacgcctatgcgctgctcggttggacgggcagcaaacaatttcgtcgcgatctgcgtcgctatgcggaggaagagcgcggcatgatcctcgacaaccatgccctctacgacctgaaaaagcgcatctttctgaaagcgggcagcgaagaagagattttcgcgcatctgggtctggattatgtggagccgtgggaacgcaacgcg

SEQ ID NO: 2794 - protein, 394 aa, synthetic construct
  REGION 1..394: note = Variant of terminal deoxynucleotidyl transferase
MHHHHHHGGSGHPPSNTPEKEVPSVIARPVSQYACQRKTTLNNYNKKFTDALEIMAENYKFKENLIACLEAKRAASIFKYLPFEVTSMKDIQGLPCITDQVRDVIEEIIEEGESSRVKEILNDERYKAFKQFTSVFGVGVKTAEKWYRMGLRTVEEAKASKSLKLSKMQKAGFLYYEDLASMVSKEEADAVTLIVKETVRTFLPDALVTITGGFRRGKPMGHDVDFLITNPGRKEDDELLHKVVDLLKKQGLLLYEDIKESTFVEGQLPSHKIDAMDNFQKCFAILKLYQPKVDNSAVGTSKKSDMAEVKDWKAIRVDLVITPFEQYAYALLGWTGSKQFRRDLRRYAEEERGMILDNHALYDLKKRIFLKAGSEEEIFAHLGLDYVEPWERNA

SEQ ID NO: 2795 - DNA, 1182 bp, synthetic construct
  misc_feature 1..1182: note = Variant of terminal deoxynucleotidyl transferase
  source 1..1182: mol_type = other DNA
atgcatcaccaccatcatcatgggggttctggtcatccgccgagcaataccccggagaaggaggtgccgagcgttatcgcccgtccggttagtcagtacgcgtgccagcgcaagaccacgctgaataactacaacaaaaagttcaccgacgcgctggagatcatggccgagaactacaaatttaaagagaacctgatcgcgtgtctggaagccaagcgcgccgcgagtatttttaaatatctgccgttcgaggttaccagcatgaaagacatccaaggtctgccgtgcattaccgacgatgttcgtgacgtgatcgaggagatcatcgaagagggcgagagcagccgtgttaaagaagttctcaatgacgagcgctacaaggcctttaagcagttcaccagcgtgttcggtgtgggcgtgaaaaccgcggaaaagtggtaccgtatgggcctccgtacggttgaagaagcaaaggccagtaagagtctgaagctgagcaagatgcagaaggcgggctttctgtattacgaggatctggcgagcatggttagtaaagaagaagccgatgccgttacgctcatcgtgaagaacacggtgcgtacctttctgccggatgcgctggtgaccatcaccggcggtttccgccgtggcaaacctatgggccacgacgttgactttctgatcacgaacccgatgcgcaaagaagatgacgagctgctccacaaagtggttgatctgctcaagaagcaaggtctgctgctgtacgaagacatcaaagagagcacgttcgtggaggggcaactgccaagtcataaaatcgacgccatggacaacttccagaagtgcttcgccattctcaagctgtaccagccgaaggtggataacagtgcggttgggacgagtaagaaaagtgacatggctgaggttaaggattggaaagcgattcgtgtggatctggtgatcacgccattcgagcagtacgcctatgcgctgctcggttggacgggcagcaaacaatttcgtcgcgatctgcgtcgctatgcggaggaagagcgcggcatgatcctcgacaaccatgccctctacgacctgaaaagcaaaatctttctgaaagcgggcagcgaagaagagattttcgcgcatctgggtctggattatgtggagccgtgggaacgcaacgcg

SEQ ID NO: 2796 - protein, 394 aa, synthetic construct
  REGION 1..394: note = Variant of terminal deoxynucleotidyl transferase
MHHHHHHGGSGHPPSNTPEKEVPSVIARPVSQYACQRKTTLNNYNKKFTDALEIMAENYKFKENLIACLEAKRAASIFKYLPFEVTSMKDIQGLPCITDDVRDVIEEIIEEGESSRVKEVLNDERYKAFKQFTSVFGVGVKTAEKWYRMGLRTVEEAKASKSLKLSKMQKAGFLYYEDLASMVSKEEADAVTLIVKNTVRTFLPDALVTITGGFRRGKPMGHDVDFLITNPMRKEDDELLHKVVDLLKKQGLLLYEDIKESTFVEGQLPSHKIDAMDNFQKCFAILKLYQPKVDNSAVGTSKKSDMAEVKDWKAIRVDLVITPFEQYAYALLGWTGSKQFRRDLRRYAEEERGMILDNHALYDLKSKIFLKAGSEEEIFAHLGLDYVEPWERNA

SEQ ID NO: 2797 - DNA, 1182 bp, synthetic construct
  misc_feature 1..1182: note = Variant of terminal deoxynucleotidyl transferase
  source 1..1182: mol_type = other DNA
atgcatcaccaccatcatcatgggggttctggtcatccgccgagcaataccccggagggggaggtgccgagcgttatcgcccgtccggttagtcagtacgcgtgccagcgcaagaccacgctgaataactacaacaaaaagttcaccgacgcgctggagatcatggccgagaactacaaatttaaagagaacctgatcgcgtgtctggaagccaagcgcgccgcgagtatttttaaatatctgccgttcgaggttaccagcatgaaagacatccaaggtctgccgtgcattaccgacgatgttcgtgacgtgatcgaggagatcatcgaacgtggcgagagcagccgtgttaaagaagtcctcaatgacgagcgctacaaggcctttaagcagttcaccagcgtgttcggtgtgggcgtgaaaaccgcggaaaagtggtaccgtatgggcctccgtacggttgaagaagcaaaggccagtaagagtctgaagctgagcaagatgcagaaggcgggctttctgtattacgaggatctggcgagcatggttagtaaagaagaagccgatgccgttacgctcatcgtgaagaacacggtgcgtacctttctgccggatgcgctggtgaccatcaccggcggtttccgccgtggcaaacctatgggccacgacgttgactttctgatcacgaacccgggccgcaaagaggatgacgagctgctccacaaagtggttgatctgctcaagaagcaaggtctgctgctgtacgaagacatcaaagagagcacgttcgtggaggggcaactgccaagtcataaaatcgacgccatggacaacttccagaagtgcttcgccattctcaagctgtaccagccgggggtggataacagtgcggttgggacgagtaagaaaagtgacatggctgaggttaaggattggaaagcgattcgtgtggatctggtgatcacgccattcgagcagtacgcctatgcgctgctcggttggacgggcagcaaacaatttcgtcgcgatctgcgtcgctatgcggaggaagagcgcggcatgatcctcgacaaccatgccctctacgacctgaaaaagcgcatctttctgaaagcgggcagcgaagaagagattttcgcgcatctgggtctggattatgtggagccgtgggaacgcaacgcg

SEQ ID NO: 2798 - protein, 394 aa, synthetic construct
  REGION 1..394: note = Variant of terminal deoxynucleotidyl transferase
MHHHHHHGGSGHPPSNTPEGEVPSVIARPVSQYACQRKTTLNNYNKKFTDALEIMAENYKFKENLIACLEAKRAASIFKYLPFEVTSMKDIQGLPCITDDVRDVIEEIIERGESSRVKEVLNDERYKAFKQFTSVFGVGVKTAEKWYRMGLRTVEEAKASKSLKLSKMQKAGFLYYEDLASMVSKEEADAVTLIVKNTVRTFLPDALVTITGGFRRGKPMGHDVDFLITNPGRKEDDELLHKVVDLLKKQGLLLYEDIKESTFVEGQLPSHKIDAMDNFQKCFAILKLYQPGVDNSAVGTSKKSDMAEVKDWKAIRVDLVITPFEQYAYALLGWTGSKQFRRDLRRYAEEERGMILDNHALYDLKKRIFLKAGSEEEIFAHLGLDYVEPWERNA

SEQ ID NO: 2799 - DNA, 1182 bp, synthetic construct
  misc_feature 1..1182: note = Variant of terminal deoxynucleotidyl transferase
  source 1..1182: mol_type = other DNA
atgcatcaccaccatcatcatgggggttctggtcatccgccgagcaataccccggagggggaggtgccgagcgttatcgcccgtccggttagtcagtacgcgtgccagcgcaagaccacgctgaataactacaacaaaaagttcaccgacgcgctggagatcatggccgagaactacaaatttaaagagaacctgatcgcgtgtctggaagccaagcgcgccgcgagtatttttaaatatctgccgttcgaggttaccagcatgaaagacatccaaggtctgccgtgcattaccgacgatgttcgtgacgtgatcgaggagatcatcgaagagggcgagagcagccgtgttaaagaaatcctcaatgacgagcgctacaaggcctttaagcagttcaccagcgtgttcggtgtgggcgtgaaaaccgcggaaaagtggtaccgtatgggcctccgtacggttgaagaagcaaaggccagtaagagtctgaagctgagcaagatgcagaaggcgggcttcctgtattacgaggatctggcgagcatggttagtaaagaagaagccgatgccgttacgctcatcgtgaaggaaacggtgcgtacctttctgccggatgcgctggtgaccatcaccggcggtttccgccgtggcaaacctatgggccacgacgttgactttctgatcacgaacccgggccgcaaagaggatgacgagctgctccaccgtgtggttgatctgctcaagaagcaaggtctgctgctgtacgaagacatcaaagagagcacgttcgtggaggggcaactgccaagtcataaaatcgacgccatggacaacttccagaagtgcttcgccattctcaagctgtaccagccgggcgtggataacagtgcggttgggacgagtaagaaaagtgacatggctgaggttaaggattggaaagcgattcgtgtggatctggtgatcacgccattcgagcagtacgcctatgcgctgctcggttggacgggcagcaaacaatttcgtcgcgatctgcgtcgctatgcggaggaagagcgcggcatgatcctcgacaaccatgccctctacgacctgaaaaagcgcatctttctgaaagcgggcagcgaagaagagattttcgcgcatctgggtctggattatgtggagccgtgggaacgcaacgcg

SEQ ID NO: 2800 - protein, 394 aa, synthetic construct
  REGION 1..394: note = Variant of terminal deoxynucleotidyl transferase
MHHHHHHGGSGHPPSNTPEGEVPSVIARPVSQYACQRKTTLNNYNKKFTDALEIMAENYKFKENLIACLEAKRAASIFKYLPFEVTSMKDIQGLPCITDDVRDVIEEIIEEGESSRVKEILNDERYKAFKQFTSVFGVGVKTAEKWYRMGLRTVEEAKASKSLKLSKMQKAGFLYYEDLASMVSKEEADAVTLIVKETVRTFLPDALVTITGGFRRGKPMGHDVDFLITNPGRKEDDELLHRVVDLLKKQGLLLYEDIKESTFVEGQLPSHKIDAMDNFQKCFAILKLYQPGVDNSAVGTSKKSDMAEVKDWKAIRVDLVITPFEQYAYALLGWTGSKQFRRDLRRYAEEERGMILDNHALYDLKKRIFLKAGSEEEIFAHLGLDYVEPWERNA

SEQ ID NO: 2801 - DNA, 1182 bp, synthetic construct
  misc_feature 1..1182: note = Variant of terminal deoxynucleotidyl transferase
  source 1..1182: mol_type = other DNA
atgcatcaccaccatcatcatgggggttctggtcatccgccgagcaataccccggagcgtgaggtgccgagcgttatcgcccgtccggttagtcagtacgcgtgccagcgcaagaccacgctgaataactacaacaaaaagttcaccgacgcgctggagatcatggccgagaactacaaatttaaagagaacctgatcgcgtgtctggaagccaagcgcgccgcgagtatttttaaatatctgccgttcgaggttaccagcatgaaagacatccaaggtctgccgtgcattaccgaccaggttcgtgacctgatcgaggagatcatcgaacgtggcgagagcagccgtgttaaagaaatcctcaatgacgagcgctacaaggcctttaagcagttcaccagcgtgttcggtgtgggcgtgaaaaccgcggaaaagtggtaccgtatgggcctccgtacggttgaagaagcaaaggccagtaagagtctgaagctgagcaagatgcagaaggcgggcttcctgtattacgaggatctggcgagcatggttagtaaagaagaagccgatgccgttacgctcatcgtgaagaacacggtgcgtacctttgtgccggatgcgctggtgaccatcaccggcggtttccgccgtggcaaacctatgggccacgacgttgattttctgatcacgaacccgggccgcaaagaggatgacgagctgctccacaaagtggttgatctgctcaagaagcaaggtctgctgctgtacgaagacatcaaagagagcacgttcgtggaggggcaactgccaagtcataaaatcgacgccatggacaacttccagaagtgcttcgccattctcaagctgtaccagccgggcgtggataacagtgcggttgggacgagtaagaaaagtgacatggctgaggttaaggattggaaagcgattcgtgtggatctggtgatcacgccattcgagcagtacgcctatgcgctgctcggttggacgggcagcaaacaatttcgtcgcgatctgcgtcgctatgcggaggaagagcgcggcatgatcctcgacaaccatgccctctacgacctgaaaaagcgcatctttctgaaagcgggcagcgaagaagagattttcgcgcatctgggtctggattatgtggagccgtgggaacgcaacgcg

SEQ ID NO: 2802 - protein, 394 aa, synthetic construct
  REGION 1..394: note = Variant of terminal deoxynucleotidyl transferase
MHHHHHHGGSGHPPSNTPEREVPSVIARPVSQYACQRKTTLNNYNKKFTDALEIMAENYKFKENLIACLEAKRAASIFKYLPFEVTSMKDIQGLPCITDQVRDLIEEIIERGESSRVKEILNDERYKAFKQFTSVFGVGVKTAEKWYRMGLRTVEEAKASKSLKLSKMQKAGFLYYEDLASMVSKEEADAVTLIVKNTVRTFVPDALVTITGGFRRGKPMGHDVDFLITNPGRKEDDELLHKVVDLLKKQGLLLYEDIKESTFVEGQLPSHKIDAMDNFQKCFAILKLYQPGVDNSAVGTSKKSDMAEVKDWKAIRVDLVITPFEQYAYALLGWTGSKQFRRDLRRYAEEERGMILDNHALYDLKKRIFLKAGSEEEIFAHLGLDYVEPWERNA

SEQ ID NO: 2803 - DNA, 1182 bp, synthetic construct
  misc_feature 1..1182: note = Variant of terminal deoxynucleotidyl transferase
  source 1..1182: mol_type = other DNA
atgcatcaccaccatcatcatgggggttctggtcatccgccgagcaataccccggagaaggaggtgccgagcgttatcgcccgtccggttagtcagtacgcgtgccagcgcaagaccacgctgaataactacaacaaaaagttcaccgacgcgctggagatcatggccgagaactacaaatttaaagagaacctgatcgcgtgtctggaagccaagcgcgccgcgagtatttttaaatatctgccgttcgaggttaccagcatgaaagacatccaaggtctgccgtgcattaccgaccaagttcgtgacgtgatcgaggagatcatcgaagagggcgagagcagccgtgttaaagaagtcctcaatgacgagcgctacaaggcctttaagcagttcaccagcgtgttcggtgtgggcgtgaaaaccgcggaaaagtggtaccgtatgggcctccgtacggttgaagaagcaaaggccagtaagagtctgaagctgagcaagatgcagaaggcgggcttcctgtattacgaggatctggcgagcatggttagtaaagaagaagccgatgccgttacgctcatcgtgaagaatacggtgcgtacctttctgccggatgcgctggtgaccatcaccggcggtttccgccgtggcaaacctatgggccacgacgttgattttctgatcacgaacccgggccgcaaagaggatgacgagctgctccacaaagtggttgatctgctcaagaagcaaggtctgctgctgtacgaagacatcaaagagagcacgttcgtggaggggcaactgccaagtcataaaatcgacgccatggacaacttccagaagtgcttcgccattctcaagctgtaccagccgaaggtggataacagtgcggttgggacgagtaagaaaagtgacatggctgaggttaaggattggaaagcgattcgtgtggatctggtgatcacgccattcgagcagtacgcctatgcgctgctcggttggacgggcagcaaacaatttcgtcgcgatctgcgtcgctatgcggaggaagagcgcggcatgatcctcgacaaccatgccctctacgacctgaaaaagcgcatctttctgaaagcgggcagcgaagaagagattttcgcgcatctgggtctggattatgtggagccgtgggaacgcaacgcg

SEQ ID NO: 2804 - protein, 394 aa, synthetic construct
  REGION 1..394: note = Variant of terminal deoxynucleotidyl transferase
MHHHHHHGGSGHPPSNTPEKEVPSVIARPVSQYACQRKTTLNNYNKKFTDALEIMAENYKFKENLIACLEAKRAASIFKYLPFEVTSMKDIQGLPCITDQVRDVIEEIIEEGESSRVKEVLNDERYKAFKQFTSVFGVGVKTAEKWYRMGLRTVEEAKASKSLKLSKMQKAGFLYYEDLASMVSKEEADAVTLIVKNTVRTFLPDALVTITGGFRRGKPMGHDVDFLITNPGRKEDDELLHKVVDLLKKQGLLLYEDIKESTFVEGQLPSHKIDAMDNFQKCFAILKLYQPKVDNSAVGTSKKSDMAEVKDWKAIRVDLVITPFEQYAYALLGWTGSKQFRRDLRRYAEEERGMILDNHALYDLKKRIFLKAGSEEEIFAHLGLDYVEPWERNA

SEQ ID NO: 2805 - DNA, 1182 bp, synthetic construct
  misc_feature 1..1182: note = Variant of terminal deoxynucleotidyl transferase
  source 1..1182: mol_type = other DNA
atgcatcaccaccatcatcatgggggttctggtcatccgccgagcaataccccggagcgtgaggtgccgagcgttatcgcccgtccggttagtcagtacgcgtgccagcgcaagaccacgctgaataactacaacaaaaagttcaccgacgcgctggagatcatggccgagaactacaaatttaaagagaacctgatcgcgtgtctggaagccaagcgcgccgcgagtatttttaaatatctgccgttcgaggttaccagcatgaaagacatccaaggtctgccgtgcattaccgacgatgttcgtgacctgatcgaggagatcatcgaagagggcgagagcagccgtgttaaagaagttctcaatgacgagcgctacaaggcctttaagcagttcaccagcgtgttcggtgtgggcgtgaaaaccgcggaaaagtggtaccgtatgggcctccgtacggttgaagaagcaaaggccagtaagagtctgaagctgagcaagatgcagaaggcgggcttcctgtattacgaggatctggcgagcatggttagtaaagaagaagccgatgccgttacgctcatcgtgaaggaaacggtgcgtacctttgtgccggatgcgctggtgaccatcaccggcggtttccgccgtggcaaacctatgggccacgacgttgattttctgatcacgaacccgggccgcaaagaggatgacgagctgctccaccgtgtggttgatctgctcaagaagcaaggtctgctgctgtacgaagacatcaaagagagcacgttcgtggaggggcaactgccaagtcataaaatcgacgccatggacaacttccagaagtgcttcgccattctcaagctgtaccagccgaaggtggataacagtgcggttgggacgagtaagaaaagtgacatggctgaggttaaggattggaaagcgatccgtgtggatctggtgatcacgccattcgagcagtacgcctatgcgctgctcggttggacgggcagcaaacaatttcgtcgcgatctgcgtcgctatgcggaggaagagcgcggcatgatcctcgacaaccatgccctctacgacctgaaaaagcgcatctttctgaaagcgggcagcgaagaagagattttcgcgcatctgggtctggattatgtggagccgtgggaacgcaacgcg

SEQ ID NO: 2806 - protein, 394 aa, synthetic construct
  REGION 1..394: note = Variant of terminal deoxynucleotidyl transferase
MHHHHHHGGSGHPPSNTPEREVPSVIARPVSQYACQRKTTLNNYNKKFTDALEIMAENYKFKENLIACLEAKRAASIFKYLPFEVTSMKDIQGLPCITDDVRDLIEEIIEEGESSRVKEVLNDERYKAFKQFTSVFGVGVKTAEKWYRMGLRTVEEAKASKSLKLSKMQKAGFLYYEDLASMVSKEEADAVTLIVKETVRTFVPDALVTITGGFRRGKPMGHDVDFLITNPGRKEDDELLHRVVDLLKKQGLLLYEDIKESTFVEGQLPSHKIDAMDNFQKCFAILKLYQPKVDNSAVGTSKKSDMAEVKDWKAIRVDLVITPFEQYAYALLGWTGSKQFRRDLRRYAEEERGMILDNHALYDLKKRIFLKAGSEEEIFAHLGLDYVEPWERNA

SEQ ID NO: 2807 - DNA, 1182 bp, synthetic construct
  misc_feature 1..1182: note = Variant of terminal deoxynucleotidyl transferase
  source 1..1182: mol_type = other DNA
atgcatcaccaccatcatcatgggggttctggtcatccgccgagcaataccccggagcgtgaggtgccgagcgttatcgcccgtccggttagtcagtacgcgtgccagcgcaagaccacgctgaataactacaacaaaaagttcaccgacgcgctggagatcatggccgagaactacaaatttaaagagaacctgatcgcgtgtctggaagccaagcgcgccgcgagtatttttaaatatctgccgttcgaggttaccagcatgaaagacatccaaggtctgccgtgcattaccgacgatgttcgtgacgtgatcgaggagatcatcgaagagggcgagagcagccgtgttaaagaagttctcaatgacgagcgctacaaggcctttaagcagttcaccagcgtgttcggtgtgggcgtgaaaaccgcggaaaagtggtaccgtatgggcctccgtacggttgaagaagcaaaggccagtaagagtctgaagctgagcaagatgcagaaggcgggcttcctgtattacgaggatctggcgagcatggttagtaaagaagaagccgatgccgttacgctcatcgtgaaggaaacggtgcgtacctttctgccggatgcgctggtgaccatcaccggcggtttccgccgtggcaaacctatgggccacgacgttgattttctgatcacgaacccgggtcgcaaagaagatgacgagctgctccacaaagtggttgatctgctcaagaagcaaggtctgctgctgtacgaagacatcaaagagagcacgttcgtggaggggcaactgccaagtcataaaatcgacgccatggacaacttccagaagtgcttcgccattctcaagctgtaccagccgaaggtggataacagtgcggttgggacgagtaagaaaagtgacatggctgaggttaaggattggaaagcggtccgtgtggatctggtgatcacgccattcgagcagtacgcctatgcgctgctcggttggacgggcagcaaacaatttcgtcgcgatctgcgtcgctatgcggaggaagagcgcggcatgatcctcgacaaccatgccctctacgacctgaaaaagcgcatctttctgaaagcgggcagcgaagaagagattttcgcgcatctgggtctggattatgtggagccgtgggaacgcaacgcg

SEQ ID NO: 2808 - protein, 394 aa, synthetic construct
  REGION 1..394: note = Variant of terminal deoxynucleotidyl transferase
MHHHHHHGGSGHPPSNTPEREVPSVIARPVSQYACQRKTTLNNYNKKFTDALEIMAENYKFKENLIACLEAKRAASIFKYLPFEVTSMKDIQGLPCITDDVRDVIEEIIEEGESSRVKEVLNDERYKAFKQFTSVFGVGVKTAEKWYRMGLRTVEEAKASKSLKLSKMQKAGFLYYEDLASMVSKEEADAVTLIVKETVRTFLPDALVTITGGFRRGKPMGHDVDFLITNPGRKEDDELLHKVVDLLKKQGLLLYEDIKESTFVEGQLPSHKIDAMDNFQKCFAILKLYQPKVDNSAVGTSKKSDMAEVKDWKAVRVDLVITPFEQYAYALLGWTGSKQFRRDLRRYAEEERGMILDNHALYDLKKRIFLKAGSEEEIFAHLGLDYVEPWERNA

SEQ ID NO: 2809 - DNA, 1182 bp, synthetic construct
  misc_feature 1..1182: note = Variant of terminal deoxynucleotidyl transferase
  source 1..1182: mol_type = other DNA
atgcatcaccaccatcatcatgggggttctggtcatccgccgagcaataccccggagggggaggtgccgagcgttatcgcccgtccggttagtcagtacgcgtgccagcgcaagaccacgctgaataactacaacaaaaagttcaccgacgcgctggagatcatggccgagaactacaaatttaaagagaacctgatcgcgtgtctggaagccaagcgcgccgcgagtatttttaaatatctgccgttcgaggttaccagcatgaaagacatccaaggtctgccgtgcattaccgaccaggttcgtgacgtgatcgaggagatcatcgaacgtggcgagagcagccgtgttaaagaagttctcaatgacgagcgctacaaggcctttaagcagttcaccagcgtgttcggtgtgggcgtgaaaaccgcggaaaagtggtaccgtatgggcctccgtacggttgaagaagcaaaggccagtaagagtctgaagctgagcaagatgcagaaggcgggctttctgtattacgaggatctggcgagcatggttagtaaagaagaagccgatgccgttacgctcatcgtgaaggaaacggtgcgtacctttctgccggatgcgctggtgaccatcaccggcggtttccgccgtggcaaacctatgggccacgacgttgactttctgatcacgaacccgggccgcaaagaggatgacgagctgctccaccgtgtggttgatctgctcaagaagcaaggtctgctgctgtacgaagacatcaaagagagcacgttcgtggaggggcaactgccaagtcataaaatcgacgccatggacaacttccagaagtgcttcgccattctcaagctgtaccagccgggcgtggataacagtgcggttgggacgagtaagaaaagtgacatggctgaggttaaggattggaaagcgattcgtgtggatctggtgatcacgccattcgagcagtacgcctatgcgctgctcggttggacgggcagcaaacaatttcgtcgcgatctgcgtcgctatgcggaggaagagcgcggcatgatcctcgacaaccatgccctctacgacctgaaaaagcgcatctttctgaaagcgggcagcgaagaagagattttcgcgcatctgggtctggattatgtggagccgtgggaacgcaacgcg

SEQ ID NO: 2810 - protein, 394 aa, synthetic construct
  REGION 1..394: note = Variant of terminal deoxynucleotidyl transferase
MHHHHHHGGSGHPPSNTPEGEVPSVIARPVSQYACQRKTTLNNYNKKFTDALEIMAENYKFKENLIACLEAKRAASIFKYLPFEVTSMKDIQGLPCITDQVRDVIEEIIERGESSRVKEVLNDERYKAFKQFTSVFGVGVKTAEKWYRMGLRTVEEAKASKSLKLSKMQKAGFLYYEDLASMVSKEEADAVTLIVKETVRTFLPDALVTITGGFRRGKPMGHDVDFLITNPGRKEDDELLHRVVDLLKKQGLLLYEDIKESTFVEGQLPSHKIDAMDNFQKCFAILKLYQPGVDNSAVGTSKKSDMAEVKDWKAIRVDLVITPFEQYAYALLGWTGSKQFRRDLRRYAEEERGMILDNHALYDLKKRIFLKAGSEEEIFAHLGLDYVEPWERNA

SEQ ID NO: 2811 - DNA, 1182 bp, synthetic construct
  misc_feature 1..1182: note = Variant of terminal deoxynucleotidyl transferase
  source 1..1182: mol_type = other DNA
atgcatcaccaccatcatcatgggggttctggtcatccgccgagcaataccccggagaaggaggtgccgagcgttatcgcccgtccggttagtcagtacgcgtgccagcgcaagaccacgctgaataactacaacaaaaagttcaccgacgcgctggagatcatggccgagaactacaaatttaaagagaacctgatcgcgtgtctggaagccaagcgcgccgcgagtatttttaaatatctgccgttcgaggttaccagcatgaaagacatccaaggtctgccgtgcattaccgacgatgttcgtgacgtgatcgaggagatcatcgaacgtggcgagagcagccgtgttaaagaagtcctcaatgacgagcgctacaaggcctttaagcagttcaccagcgtgttcggtgtgggcgtgaaaaccgcggaaaagtggtaccgtatgggcctccgtacggttgaagaagcaaaggccagtaagagtctgaagctgagcaagatgcagaaggcgggctttctgtattacgaggatctggcgagcatggttagtaaagaagaagccgatgccgttacgctcatcgtgaagaacacggtgcgtacctttctgccggatgcgctggtgaccatcaccggcggtttccgccgtggcaaacctatgggccacgacgttgactttctgatcacgaacccgggccgcaaagaggatgacgagctgctccacaaagtggttgatctgctcaagaagcaaggtctgctgctgtacgaagacatcaaagagagcacgttcgtggaggggcaactgccaagtcataaaatcgacgccatggacaacttccagaagtgcttcgccattctcaagctgtaccagccgggcgtggataacagtgcggttgggacgagtaagaaaagtgacatggctgaggttaaggattggaaagcgattcgtgtggatctggtgatcacgccattcgagcagtacgcctatgcgctgctcggttggacgggcagcaaacaatttcgtcgcgatctgcgtcgctatgcggaggaagagcgcggcatgatcctcgacaaccatgccctctacgacctgaaaaagcgcatctttctgaaagcgggcagcgaagaagagattttcgcgcatctgggtctggattatgtggagccgtgggaacgcaacgcg

SEQ ID NO: 2812 - protein, 394 aa, synthetic construct
  REGION 1..394: note = Variant of terminal deoxynucleotidyl transferase
MHHHHHHGGSGHPPSNTPEKEVPSVIARPVSQYACQRKTTLNNYNKKFTDALEIMAENYKFKENLIACLEAKRAASIFKYLPFEVTSMKDIQGLPCITDDVRDVIEEIIERGESSRVKEVLNDERYKAFKQFTSVFGVGVKTAEKWYRMGLRTVEEAKASKSLKLSKMQKAGFLYYEDLASMVSKEEADAVTLIVKNTVRTFLPDALVTITGGFRRGKPMGHDVDFLITNPGRKEDDELLHKVVDLLKKQGLLLYEDIKESTFVEGQLPSHKIDAMDNFQKCFAILKLYQPGVDNSAVGTSKKSDMAEVKDWKAIRVDLVITPFEQYAYALLGWTGSKQFRRDLRRYAEEERGMILDNHALYDLKKRIFLKAGSEEEIFAHLGLDYVEPWERNA

SEQ ID NO: 2813 - DNA, 1182 bp, synthetic construct
  misc_feature 1..1182: note = Variant of terminal deoxynucleotidyl transferase
  source 1..1182: mol_type = other DNA
atgcatcaccaccatcatcatgggggttctggtcatccgccgagcaataccccggagaaggaggtgccgagcgttatcgcccgtccggttagtcagtacgcgtgccagcgcaagaccacgctgaataactacaacaaaaagttcaccgacgcgctggagatcatggccgagaactacaaatttaaagagaacctgatcgcgtgtctggaagccaagcgcgccgcgagtatttttaaatatctgccgttcgaggttaccagcatgaaagacatccaaggtctgccgtgcattaccgacgatgttcgtgacgtgatcgaggagatcatcgaagagggcgagagcagccgtgttaaagaagtcctcaatgacgagcgctacaaggcctttaagcagttcaccagcgtgttcggtgtgggcgtgaaaaccgcggaaaagtggtaccgtatgggcctccgtacggttgaagaagcaaaggccagtaagagtctgaagctgagcaagatgcagaaggcgggctttctgtattacgaggatctggcgagcatggttagtaaagaagaagccgatgccgttacgctcatcgtgaagaacacggtgcgtacctttctgccggatgcgctggtgaccatcaccggcggtttccgccgtggcaaacctatgggccacgacgttgactttctgatcacgaacccgggccgcaaagaggatgacgagctgctccacaaagtggttgatctgctcaagaagcaaggtctgctgctgtacgaagacatcaaagagagcacgttcgtggaggggcaactgccaagtcataaaatcgacgccatggacaacttccagaagtgcttcgccattctcaagctgtaccagccgggcgtggataacagtgcggttgggacgagtaagaaaagtgacatggctgaggttaaggattggaaagcgattcgtgtggatctggtgatcacgccattcgagcagtacgcctatgcgctgctcggttggacgggcagcaaacaatttcgtcgcgatctgcgtcgctatgcggaggaagagcgcggcatgatcctcgacaaccatgccctctacgacctgaaaaagcgcatctttctgaaagcgggcagcgaagaagagattttcgcgcatctgggtctggattatgtggagccgtgggaacgcaacgcg

SEQ ID NO: 2814 - protein, 394 aa, synthetic construct
  REGION 1..394: note = Variant of terminal deoxynucleotidyl transferase
MHHHHHHGGSGHPPSNTPEKEVPSVIARPVSQYACQRKTTLNNYNKKFTDALEIMAENYKFKENLIACLEAKRAASIFKYLPFEVTSMKDIQGLPCITDDVRDVIEEIIEEGESSRVKEVLNDERYKAFKQFTSVFGVGVKTAEKWYRMGLRTVEEAKASKSLKLSKMQKAGFLYYEDLASMVSKEEADAVTLIVKNTVRTFLPDALVTITGGFRRGKPMGHDVDFLITNPGRKEDDELLHKVVDLLKKQGLLLYEDIKESTFVEGQLPSHKIDAMDNFQKCFAILKLYQPGVDNSAVGTSKKSDMAEVKDWKAIRVDLVITPFEQYAYALLGWTGSKQFRRDLRRYAEEERGMILDNHALYDLKKRIFLKAGSEEEIFAHLGLDYVEPWERNA

SEQ ID NO: 2815 - DNA, 1182 bp, synthetic construct
  misc_feature 1..1182: note = Variant of terminal deoxynucleotidyl transferase
  source 1..1182: mol_type = other DNA
atgcatcaccaccatcatcatgggggttctggtcatccgccgagcaataccccggagggggaggtgccgagcgttatcgcccgtccggttagtcagtacgcgtgccagcgcaagaccacgctgaataactacaacaaaaagttcaccgacgcgctggagatcatggccgagaactacaaatttaaagagaacctgatcgcgtgtctggaagccaagcgcgccgcgagtatttttaaatatctgccgttcgaggttaccagcatgaaagacatccaaggtctgccgtgcattaccgaccaggttcgtgacctgatcgaggagatcatcgaagagggcgagagcagccgtgttaaagaaatcctcaatgacgagcgctacaaggcctttaagcagttcaccagcgtgttcggtgtgggcgtgaaaaccgcggaaaagtggtaccgtatgggcctccgtacggttgaagaagcaaaggccagtaagagtctgaagctgagcaagatgcagaaggcgggctttctgtattacgaggatctggcgagcatggttagtaaagaagaagccgatgccgttacgctcatcgtgaagaatacggtgcgtacctttctgccggatgcgctggtgaccatcaccggcggtttccgccgtggcaaacctatgggccacgacgttgactttctgatcacgaacccgatgcgcaaagaagatgacgagctgctccacaaagtggttgatctgctcaagaagcaaggtctgctgctgtacgaagacatcaaagagagcacgttcgtggaggggcaactgccaagtcataaaatcgacgccatggacaacttccagaagtgcttcgccattctcaagctgtaccagccgggcgtggataacagtgcggttgggacgagtaagaaaagtgacatggctgaggttaaggattggaaagcgattcgtgtggatctggtgatcacgccattcgagcagtacgcctatgcgctgctcggttggacgggcagcaaacaatttcgtcgcgatctgcgtcgctatgccgaggaggagcgcgatatgatcctcgacaaccatgccctctacgacctgaaaaagcgcatctttctgaaagcgggcagcgaagaagagattttcgcgcatctgggtctggattatgtggagccgtgggaacgcaacgcg

SEQ ID NO: 2816 - protein, 394 aa, synthetic construct
  REGION 1..394: note = Variant of terminal deoxynucleotidyl transferase
MHHHHHHGGSGHPPSNTPEGEVPSVIARPVSQYACQRKTTLNNYNKKFTDALEIMAENYKFKENLIACLEAKRAASIFKYLPFEVTSMKDIQGLPCITDQVRDLIEEIIEEGESSRVKEILNDERYKAFKQFTSVFGVGVKTAEKWYRMGLRTVEEAKASKSLKLSKMQKAGFLYYEDLASMVSKEEADAVTLIVKNTVRTFLPDALVTITGGFRRGKPMGHDVDFLITNPMRKEDDELLHKVVDLLKKQGLLLYEDIKESTFVEGQLPSHKIDAMDNFQKCFAILKLYQPGVDNSAVGTSKKSDMAEVKDWKAIRVDLVITPFEQYAYALLGWTGSKQFRRDLRRYAEEERDMILDNHALYDLKKRIFLKAGSEEEIFAHLGLDYVEPWERNA

SEQ ID NO: 2817 - DNA, 1182 bp, synthetic construct
  misc_feature 1..1182: note = Variant of terminal deoxynucleotidyl transferase
  source 1..1182: mol_type = other DNA
atgcatcaccaccatcatcatgggggttctggtcatccgccgagcaataccccggagaaggaggtgccgagcgttatcgcccgtccggttagtcagtacgcgtgccagcgcaagaccacgctgaataactacaacaaaaagttcaccgacgcgctggagatcatggccgagaactacaaatttaaagagaacctgatcgcgtgtctggaagccaagcgcgccgcgagtatttttaaatatctgccgttcgaggttaccagcatgaaagacatccaaggtctgccgtgcattaccgaccaagttcgtgacgtgatcgaggagatcatcgaagagggcgagagcagccgtgttaaagaagtcctcaatgacgagcgctacaaggcctttaagcagttcaccagcgtgttcggtgtgggcgtgaaaaccgcggaaaagtggtaccgtatgggcctccgtacggttgaagaagcaaaggccagtaagagtctgaagctgagcaagatgcagaaggcgggctttctgtattacgaggatctggcgagcatggttagtaaagaagaagccgatgccgttacgctcatcgtgaagaacacggtgcgtacctttctgccggatgcgctggtgaccatcaccggcggtttccgccgtggcaaacctatgggccacgacgttgactttctgatcacgaacccgggccgcaaagaggatgacgagctgctccacaaagtggttgatctgctcaagaagcaaggtctgctgctgtacgaagacatcaaagagagcacgttcgtggaggggcaactgccaagtcataaaatcgacgccatggacaacttccagaagtgcttcgccattctcaagctgtaccagccgggcgtggataacagtgcggttgggacgagtaagaaaagtgacatggctgaggttaaggattggaaagcgattcgtgtggatctggtgatcacgccattcgagcagtacgcctatgcgctgctcggttggacgggcagcaaacaatttcgtcgcgatctgcgtcgctatgcggaggaagagcgcggcatgatcctcgacaaccatgccctctacgacctgaaaaagcgcatctttctgaaagcgggcagcgaagaagagattttcgcgcatctgggtctggattatgtggagccgtgggaacgcaacgcg

SEQ ID NO: 2818 - protein, 394 aa, synthetic construct
  REGION 1..394: note = Variant of terminal deoxynucleotidyl transferase
MHHHHHHGGSGHPPSNTPEKEVPSVIARPVSQYACQRKTTLNNYNKKFTDALEIMAENYKFKENLIACLEAKRAASIFKYLPFEVTSMKDIQGLPCITDQVRDVIEEIIEEGESSRVKEVLNDERYKAFKQFTSVFGVGVKTAEKWYRMGLRTVEEAKASKSLKLSKMQKAGFLYYEDLASMVSKEEADAVTLIVKNTVRTFLPDALVTITGGFRRGKPMGHDVDFLITNPGRKEDDELLHKVVDLLKKQGLLLYEDIKESTFVEGQLPSHKIDAMDNFQKCFAILKLYQPGVDNSAVGTSKKSDMAEVKDWKAIRVDLVITPFEQYAYALLGWTGSKQFRRDLRRYAEEERGMILDNHALYDLKKRIFLKAGSEEEIFAHLGLDYVEPWERNA

SEQ ID NO: 2819 - DNA, 1182 bp, synthetic construct
  misc_feature 1..1182: note = Variant of terminal deoxynucleotidyl transferase
  source 1..1182: mol_type = other DNA
atgcatcaccaccatcatcatgggggttctggtcatccgccgagcaataccccggagcgtgaggtgccgagcgttatcgcccgtccggttagtcagtacgcgtgccagcgcaagaccacgctgaataactacaacaaaaagttcaccgacgcgctggagatcatggccgagaactacaaatttaaagagaacctgatcgcgtgtctggaagccaagcgcgccgcgagtatttttaaatatctgccgttcgaggttaccagcatgaaagacatccaaggtctgccgtgcattaccgacgatgttcgtgacgtgatcgaggagatcatcgaagagggcgagagcagccgtgttaaagaagttctcaatgacgagcgctacaaggcctttaagcagttcaccagcgtgttcggtgtgggcgtgaaaaccgcggaaaagtggtaccgtatgggcctccgtacggttgaagaagcaaaggccagtaagagtctgaagctgagcaagatgcagaaggcgggctttctgtattacgaggatctggcgagcatggttagtaaagaagaagccgatgccgttacgctcatcgtgaagaatacggtgcgtacctttctgccggatgcgctggtgaccatcaccggcggtttccgccgtggcaaacctatgggccacgacgttgattttctgatcacgaacccgggtcgcaaaatggatgacgagctgctccacaaagtggttgatctgctcaagaagcaaggtctgctgctgtacgaagacatcaaagagagcacgttcgtggaggggcaactgccaagtcataaaatcgacgccatggacaacttccagaagtgcttcgccattctcaagctgtaccagccgggggtggataacagtgcggttgggacgagtaagaaaagtgacatggctgaggttaaggattggaaagcggtccgtgtggatctggtgatcacgccattcgagcagtacgcctatgcgctgctcggttggacgggcagcaaacaatttcgtcgcgatctgcgtcgctatgcggaggaagagcgcggcatgatcctcgacaaccatgccctctacgacctgaaaaaaaaaatctttctgaaagcgggcagcgaagaagagattttcgcgcatctgggtctggattatgtggagccgtgggaacgcaacgcg

SEQ ID NO: 2820 - protein, 394 aa, synthetic construct
  REGION 1..394: note = Variant of terminal deoxynucleotidyl transferase
MHHHHHHGGSGHPPSNTPEREVPSVIARPVSQYACQRKTTLNNYNKKFTDALEIMAENYKFKENLIACLEAKRAASIFKYLPFEVTSMKDIQGLPCITDDVRDVIEEIIEEGESSRVKEVLNDERYKAFKQFTSVFGVGVKTAEKWYRMGLRTVEEAKASKSLKLSKMQKAGFLYYEDLASMVSKEEADAVTLIVKNTVRTFLPDALVTITGGFRRGKPMGHDVDFLITNPGRKMDDELLHKVVDLLKKQGLLLYEDIKESTFVEGQLPSHKIDAMDNFQKCFAILKLYQPGVDNSAVGTSKKSDMAEVKDWKAVRVDLVITPFEQYAYALLGWTGSKQFRRDLRRYAEEERGMILDNHALYDLKKKIFLKAGSEEEIFAHLGLDYVEPWERNA

SEQ ID NO: 2821 - DNA, 1182 bp, synthetic construct
  misc_feature 1..1182: note = Variant of terminal deoxynucleotidyl transferase
  source 1..1182: mol_type = other DNA
atgcatcaccaccatcatcatgggggttctggtcatccgccgagcaataccccggagggggaggtgccgagcgttatcgcccgtccggttagtcagtacgcgtgccagcgcaagaccacgctgaataactacaacaaaaagttcaccgacgcgctggagatcatggccgagaactacaaatttaaagagaacctgatcgcgtgtctggaagccaagcgcgccgcgagtatttttaaatatctgccgttcgaggttaccagcatgaaagacatccaaggtctgccgtgcattaccgacgatgttcgtgacgtgatcgaggagatcatcgaagagggcgagagcagccgtgttaaagaagttctcaatgacgagcgctacaaggcctttaagcagttcaccagcgtgttcggtgtgggcgtgaaaaccgcggaaaagtggtaccgtatgggcctccgtacggttgaagaagcaaaggccagtaagagtctgaagctgagcaagatgcagaaggcgggctttctgtattacgaggatctggcgagcatggttagtaaagaagaagccgatgccgttacgctcatcgtgaagaacacggtgcgtacctttctgccggatgcgctggtgaccatcaccggcggtttccgccgtggcaaacctatgggccacgacgttgactttctgatcacgaacccgggccgcaaagaggatgacgagctgctccacaaagtggttgatctgctcaagaagcaaggtctgctgctgtacgaagacatcaaagagagcacgttcgtggaggggcaactgccaagtcataaaatcgacgccatggacaacttccagaagtgcttcgccattctcaagctgtaccagccgggcgtggataacagtgcggttgggacgagtaagaaaagtgacatggctgaggttaaggattggaaagcgattcgtgtggatctggtgatcacgccattcgagcagtacgcctatgcgctgctcggttggacgggcagcaaacaatttcgtcgcgatctgcgtcgctatgcggaggaagagcgcggcatgatcctcgacaaccatgccctctacgacctgaaaaagcgcatctttctgaaagcgggcagcgaagaagagattttcgcgcatctgggtctggattatgtggagccgtgggaacgcaacgcg

SEQ ID NO: 2822 - protein, 394 aa, synthetic construct
  REGION 1..394: note = Variant of terminal deoxynucleotidyl transferase
MHHHHHHGGSGHPPSNTPEGEVPSVIARPVSQYACQRKTTLNNYNKKFTDALEIMAENYKFKENLIACLEAKRAASIFKYLPFEVTSMKDIQGLPCITDDVRDVIEEIIEEGESSRVKEVLNDERYKAFKQFTSVFGVGVKTAEKWYRMGLRTVEEAKASKSLKLSKMQKAGFLYYEDLASMVSKEEADAVTLIVKNTVRTFLPDALVTITGGFRRGKPMGHDVDFLITNPGRKEDDELLHKVVDLLKKQGLLLYEDIKESTFVEGQLPSHKIDAMDNFQKCFAILKLYQPGVDNSAVGTSKKSDMAEVKDWKAIRVDLVITPFEQYAYALLGWTGSKQFRRDLRRYAEEERGMILDNHALYDLKKRIFLKAGSEEEIFAHLGLDYVEPWERNA

SEQ ID NO: 2823 - DNA, 1182 bp, synthetic construct
  misc_feature 1..1182: note = Variant of terminal deoxynucleotidyl transferase
  source 1..1182: mol_type = other DNA
atgcatcaccaccatcatcatgggggttctggtcatccgccgagcaataccccggagaaggaggtgccgagcgttatcgcccgtccggttagtcagtacgcgtgccagcgcaagaccacgctgaataactacaacaaaaagttcaccgacgcgctggagatcatggccgagaactacaaatttaaagagaacctgatcgcgtgtctggaagccaagcgcgccgcgagtatttttaaatatctgccgttcgaggttaccagcatgaaagacatccaaggtctgccgtgcattaccgaccaggttcgtgacgtgatcgaggagatcatcgaagagggcgagagcagccgtgttaaagaaatcctcaatgacgagcgctacaaggcctttaagcagttcaccagcgtgttcggtgtgggcgtgaaaaccgcggaaaagtggtaccgtatgggcctccgtacggttgaagaagcaaaggccagtaagagtctgaagctgagcaagatgcagaaggcgggcttcctgtattacgaggatctggcgagcatggttagtaaagaagaagccgatgccgttacgctcatcgtgaaggaaacggtgcgtacctttctgccggatgcgctggtgaccatcaccggcggtttccgccgtggcaaacctatgggccacgacgttgactttctgatcacgaacccgggccgcaaagaggatgacgagctgctccacaaagtggttgatctgctcaagaagcaaggtctgctgctgtacgaagacatcaaagagagcacgttcgtggaggggcaactgccaagtcataaaatcgacgccatggacaacttccagaagtgcttcgccattctcaagctgtaccagccgaaggtggataacagtgcggttgggacgagtaagaaaagtgacatggctgaggttaaggattggaaagcgatccgtgtggatctggtgatcacgccattcgagcagtacgcctatgcgctgctcggttggacgggcagcaaacaatttcgtgtggatctgcgtcgctatgcggaggaagagcgcggcatgatcctcgacaaccatgccctctacgacctgaaaaagcgcatctttctgaaagcgggcagcgaagaagagattttcgcgcatctgggtctggattatgtggagccgtgggaacgcaacgcg

SEQ ID NO: 2824 - protein, 394 aa, synthetic construct
  REGION 1..394: note = Variant of terminal deoxynucleotidyl transferase
MHHHHHHGGSGHPPSNTPEKEVPSVIARPVSQYACQRKTTLNNYNKKFTDALEIMAENYKFKENLIACLEAKRAASIFKYLPFEVTSMKDIQGLPCITDQVRDVIEEIIEEGESSRVKEILNDERYKAFKQFTSVFGVGVKTAEKWYRMGLRTVEEAKASKSLKLSKMQKAGFLYYEDLASMVSKEEADAVTLIVKETVRTFLPDALVTITGGFRRGKPMGHDVDFLITNPGRKEDDELLHKVVDLLKKQGLLLYEDIKESTFVEGQLPSHKIDAMDNFQKCFAILKLYQPKVDNSAVGTSKKSDMAEVKDWKAIRVDLVITPFEQYAYALLGWTGSKQFRVDLRRYAEEERGMILDNHALYDLKKRIFLKAGSEEEIFAHLGLDYVEPWERNA

SEQ ID NO: 2825 - DNA, 1182 bp, synthetic construct
  misc_feature 1..1182: note = Variant of terminal deoxynucleotidyl transferase
  source 1..1182: mol_type = other DNA
atgcatcaccaccatcatcatgggggttctggtcatccgccgagcaataccccggagaaggaggtgccgagcgttatcgcccgtccggttagtcagtacgcgtgccagcgcaagaccacgctgaataactacaacaaaaagttcaccgacgcgctggagatcatggccgagaactacaaatttaaagagaacctgatcgcgtgtctggaagccaagcgcgccgcgagtatttttaaatatctgccgttcgaggttaccagcatgaaagacatccaaggtctgccgtgcattaccgaccaggttcgtgacgtgatcgaggagatcatcgaagagggcgagagcagccgtgttaaagaaatcctcaatgacgagcgctacaaggcctttaagcagttcaccagcgtgttcggtgtgggcgtgaaaaccgcggaaaagtggtaccgtatgggcctccgtacggttgaagaagcaaaggccagtaagagtctgaagctgagcaagatgcagaaggcgggcttcctgtattacgaggatctggcgagcatggttagtaaagaagaagccgatgccgttacgctcatcgtgaaggaaacggtgcgtacctttctgccggatgcgctggtgaccatcaccggcggtttccgccgtggcaaacctatgggccacgacgttgactttctgatcacgaacccgggccgcaaagaggatgacgagctgctccacaaagtggttgatctgctcaagaagcaaggtctgctgctgtacgaagacatcaaagagagcacgttcgtggaggggcaactgccaagtcataaaatcgacgccatggacaacttccagaagtgcttcgccattctcaagctgtaccagccgaaggtggataacagtgcggttgggacgagtaagaaaagtgacatggctgaggttaaggattggaaagcgatccgtgtggatctggtgatcacgccattcgagcagtacgcctatgcgctgctcggttggacgggcagcaaacaatttcgtttggatctgcgtcgctatgcggaggaagagcgcggcatgatcctcgacaaccatgccctctacgacctgaaaaagcgcatctttctgaaagcgggcagcgaagaagagattttcgcgcatctgggtctggattatgtggagccgtgggaacgcaacgcg

SEQ ID NO: 2826 - protein, 394 aa, synthetic construct
  REGION 1..394: note = Variant of terminal deoxynucleotidyl transferase
MHHHHHHGGSGHPPSNTPEKEVPSVIARPVSQYACQRKTTLNNYNKKFTDALEIMAENYKFKENLIACLEAKRAASIFKYLPFEVTSMKDIQGLPCITDQVRDVIEEIIEEGESSRVKEILNDERYKAFKQFTSVFGVGVKTAEKWYRMGLRTVEEAKASKSLKLSKMQKAGFLYYEDLASMVSKEEADAVTLIVKETVRTFLPDALVTITGGFRRGKPMGHDVDFLITNPGRKEDDELLHKVVDLLKKQGLLLYEDIKESTFVEGQLPSHKIDAMDNFQKCFAILKLYQPKVDNSAVGTSKKSDMAEVKDWKAIRVDLVITPFEQYAYALLGWTGSKQFRLDLRRYAEEERGMILDNHALYDLKKRIFLKAGSEEEIFAHLGLDYVEPWERNA

SEQ ID NO: 2827 - DNA, 1182 bp, synthetic construct
  misc_feature 1..1182: note = Variant of terminal deoxynucleotidyl transferase
  source 1..1182: mol_type = other DNA
atgcatcaccaccatcatcatgggggttctggtcatccgccgagcaataccccggagaaggaggtgccgagcgttatcgcccgtccggttagtcagtacgcgtgccagcgcaagaccacgctgaataactacaacaaaaagttcaccgacgcgctggagatcatggccgagaactacaaatttaaagagaacctgatcgcgtgtctggaagccaagcgcgccgcgagtatttttaaatatctgccgttcgaggttaccagcatgaaagacatccaaggtctgccgtgcattaccgaccaggttcgtgacgtgatcgaggagatcatcgaagagggcgagagcagccgtgttaaagaaatcctcaatgacgagcgctacaaggcctttaagcagttcaccagcgtgttcggtgtgggcgtgaaaaccgcggaaaagtggtaccgtatgggcctccgtacggttgaagaagcaaaggccagtaagagtctgaagctgagcaagatgcagaaggcgggcttcctgtattacgaggatctggcgagcatggttagtaaagaagaagccgatgccgttacgctcatcgtgaaggaaacggtgcgtacctttctgccggatgcgctggtgaccatcaccggcggtttccgccgtggcaaacctatgggccacgacgttgactttctgatcacgaacccgggccgcaaagaggatgacgagctgctccacaaagtggttgatctgctcaagaagcaaggtctgctgctgtacgaagacatcaaagagagcacgttcgtggaggggcaactgccaagtcataaaatcgacgccatggacaacttccagaagtgcttcgccattctcaagctgtaccagccgaaggtggataacagtgcggttgggacgagtaagaaaagtgacatggctgaggttaaggattggaaagcgatccgtgtggatctggtgatcacgccattcgagcagtacgcctatgcgctgctcggttggacgggcagcaaacaatttcgtcgcgatctgcgtcgctatgcggaggaagagcgcggcatgatcctcgacaaccatgccctctacgacctgaaagagcgcatctttctgaaagcgggcagcgaagaagagattttcgcgcatctgggtctggattatgtggagccgtgggaacgcaacgcg

SEQ ID NO: 2828 - protein, 394 aa, synthetic construct
  REGION 1..394: note = Variant of terminal deoxynucleotidyl transferase
MHHHHHHGGSGHPPSNTPEKEVPSVIARPVSQYACQRKTTLNNYNKKFTDALEIMAENYKFKENLIACLEAKRAASIFKYLPFEVTSMKDIQGLPCITDQVRDVIEEIIEEGESSRVKEILNDERYKAFKQFTSVFGVGVKTAEKWYRMGLRTVEEAKASKSLKLSKMQKAGFLYYEDLASMVSKEEADAVTLIVKETVRTFLPDALVTITGGFRRGKPMGHDVDFLITNPGRKEDDELLHKVVDLLKKQGLLLYEDIKESTFVEGQLPSHKIDAMDNFQKCFAILKLYQPKVDNSAVGTSKKSDMAEVKDWKAIRVDLVITPFEQYAYALLGWTGSKQFRRDLRRYAEEERGMILDNHALYDLKERIFLKAGSEEEIFAHLGLDYVEPWERNA

SEQ ID NO: 2829 - DNA, 1182 bp, synthetic construct
  misc_feature 1..1182: note = Variant of terminal deoxynucleotidyl transferase
  source 1..1182: mol_type = other DNA
atgcatcaccaccatcatcatgggggttctggtcatccgccgagcaataccccggagaaggaggtgccgagcgttatcgcccgtccggttagtcagtacgcgtgccagcgcaagaccacgctgaataactacaacaaaaagttcaccgacgcgctggagatcatggccgagaactacaaatttaaagagaacctgatcgcgtgtctggaagccaagcgcgccgcgagtatttttaaatatctgccgttcgaggttaccagcatgaaagacatccaaggtctgccgtgcattaccgaccaggttcgtgacgtgatcgaggagatcatcgaagagggcgagagcagccgtgttaaagaaatcctcaatgacgagcgctacaaggcctttaagcagttcaccagcgtgttcggtgtgggcgtgaaaaccgcggaaaagtggtaccgtatgggcctccgtacggttgaagaagcaaaggccagtaagagtctgaagctgagcaagatgcagaaggcgggcttcctgtattacgaggatctggcgagcatggttagtaaagaagaagccgatgccgttacgctcatcgtgaaggaaacggtgcgtacctttctgccggatgcgctggtgaccatcaccggcggtttccgccgtggcaaacctatgggccacgacgttgactttctgatcacgaacccgggccgcaaagaggatgacgagctgctccacaaagtggttgatctgctcaagaagcaaggtctgctgctgtacgaagacatcaaagagagcacgttcgtggaggggcaactgccaagtcataaaatcgacgccatggacaacttccagaagtgcttcgccattctcaagctgtaccagccgaaggtggataacagtgcggttgggacgagtaagaaaagtgacatggctgaggttaaggattggaaagcgatccgtgtggatctggtgatcacgccattcgagcagtacgcctatgcgctgctcggttggacgggcagcaaacaatttcgtcgcgatctgcgtcgctatgcggaggaagagcgcggcatgatcctcgacaaccatgccctctacgacctgaaaaagcgcatctttctgaaagcggcgagcgaagaagagattttcgcgcatctgggtctggattatgtggagccgtgggaacgcaacgcg

SEQ ID NO: 2830 - protein, 394 aa, synthetic construct
  REGION 1..394: note = Variant of terminal deoxynucleotidyl transferase
MHHHHHHGGSGHPPSNTPEKEVPSVIARPVSQYACQRKTTLNNYNKKFTDALEIMAENYKFKENLIACLEAKRAASIFKYLPFEVTSMKDIQGLPCITDQVRDVIEEIIEEGESSRVKEILNDERYKAFKQFTSVFGVGVKTAEKWYRMGLRTVEEAKASKSLKLSKMQKAGFLYYEDLASMVSKEEADAVTLIVKETVRTFLPDALVTITGGFRRGKPMGHDVDFLITNPGRKEDDELLHKVVDLLKKQGLLLYEDIKESTFVEGQLPSHKIDAMDNFQKCFAILKLYQPKVDNSAVGTSKKSDMAEVKDWKAIRVDLVITPFEQYAYALLGWTGSKQFRRDLRRYAEEERGMILDNHALYDLKKRIFLKAASEEEIFAHLGLDYVEPWERNA

SEQ ID NO: 2831 - DNA, 1182 bp, synthetic construct
  misc_feature 1..1182: note = Variant of terminal deoxynucleotidyl transferase
  source 1..1182: mol_type = other DNA
atgcatcaccaccatcatcatgggggttctggtcatccgccgagcaataccccggagaaggaggtgccgagcgttatcgcccgtccggttagtcagtacgcgtgccagcgcaagaccacgctgaataactacaacaaaaagttcaccgacgcgctggagatcatggccgagaactacaaatttaaagagaacctgatcgcgtgtctggaagccaagcgcgccgcgagtatttttaaatatctgccgttcgaggttaccagcatgaaagacatccaaggtctgccgtgcattaccgaccaggttcgtgacgtgatcgaggagatcatcgaagagggcgagagcagccgtgttaaagaaatcctcaatgacgagcgctacaaggcctttaagcagttcaccagcgtgttcggtgtgggcgtgaaaaccgcggaaaagtggtaccgtatgggcctccgtacggttgaagaagcaaaggccagtaagagtctgaagctgagcaagatgcagaaggcgggcttcctgtattacgaggatctggcgagcatggttagtaaagaagaagccgatgccgttacgctcatcgtgaaggaaacggtgcgtcggtttctgccggatgcgctggtgaccatcaccggcggtttccgccgtggcaaacctatgggccacgacgttgactttctgatcacgaacccgggccgcaaagaggatgacgagctgctccacaaagtggttgatctgctcaagaagcaaggtctgctgctgtacgaagacatcaaagagagcacgttcgtggaggggcaactgccaagtcataaaatcgacgccatggacaacttccagaagtgcttcgccattctcaagctgtaccagccgaaggtggataacagtgcggttgggacgagtaagaaaagtgacatggctgaggttaaggattggaaagcgatccgtgtggatctggtgatcacgccattcgagcagtacgcctatgcgctgctcggttggacgggcagcaaacaatttcgtcgcgatctgcgtcgctatgcggaggaagagcgcggcatgatcctcgacaaccatgccctctacgacctgaaaaagcgcatctttctgaaagcgggcagcgaagaagagattttcgcgcatctgggtctggattatgtggagccgtgggaacgcaacgcg

SEQ ID NO: 2832 - protein, 394 aa, synthetic construct
  REGION 1..394: note = Variant of terminal deoxynucleotidyl transferase
MHHHHHHGGSGHPPSNTPEKEVPSVIARPVSQYACQRKTTLNNYNKKFTDALEIMAENYKFKENLIACLEAKRAASIFKYLPFEVTSMKDIQGLPCITDQVRDVIEEIIEEGESSRVKEILNDERYKAFKQFTSVFGVGVKTAEKWYRMGLRTVEEAKASKSLKLSKMQKAGFLYYEDLASMVSKEEADAVTLIVKETVRRFLPDALVTITGGFRRGKPMGHDVDFLITNPGRKEDDELLHKVVDLLKKQGLLLYEDIKESTFVEGQLPSHKIDAMDNFQKCFAILKLYQPKVDNSAVGTSKKSDMAEVKDWKAIRVDLVITPFEQYAYALLGWTGSKQFRRDLRRYAEEERGMILDNHALYDLKKRIFLKAGSEEEIFAHLGLDYVEPWERNA

SEQ ID NO: 2833 - DNA, 1182 bp, synthetic construct
  misc_feature 1..1182: note = Variant of terminal deoxynucleotidyl transferase
  source 1..1182: mol_type = other DNA
atgcatcaccaccatcatcatgggggttctggtcatccgccgagcaataccccggagaaggaggtgccgagcgttatcgcccgtccggttagtcagtacgcgtgccagcgcaagaccacgctgaataactacaacaaaaagttcaccgacgcgctggagatcatggccgagaactacaaatttaaagagaacctgatcgcgtgtctggaagccaagcgcgccgcgagtatttttaaatatctgccgttcgaggttaccagcatgaaagacatccaaggtctgccgtgcattaccgaccaggttcgtgacgtgatcgaggagatcatcgaagagggcgagagcagccgtgttaaagaaatcctcaatgacgagcgctacaaggcctttaagcagttcaccagcgtgttcggtgtgggcgtgaaaaccgcggaaaagtggtaccgtatgggcctccgtacggttgaagaagcaaaggccagtaagagtctgaagctgagcaagatgcagaaggcgggcttcctgtattacgaggatctggcgagcatggttagtaaagaagaagccgatgccgttacgctcatcgtgaaggaaacggtgcgtacctttctgccggatgcgctggtgaccatcaccggcggtttccgccgtggcaaacctatgggccacgacgttgactttctgatcacgaacccgggccgcaaagaggatgacgagctgctccacaaagtggttgatctgctcaagaagcaaggtctgctgctgtacgaagacatcaaagagagcacgttcgtggaggggcaactgccaagtcataaaatcgacgccatggacaacttccagaagtgcttcgccattctcaagctgtaccagccgaaggtggataacagtgcggttgggacgagtaagaaaagtgacatggctgaggttaaggattggaaagcgatccgtgtggatctggtgatcacgccattcgagcagtacgcctatgcgctgctcggttggacgggcagcaaacaatttcgtcgcgatctgcgtcgctatgcggaggaagagcgcggcatgctgctcgacaaccatgccctctacgacctgaaaaagcgcatctttctgaaagcgggcagcgaagaagagattttcgcgcatctgggtctggattatgtggagccgtgggaacgcaacgcg

SEQ ID NO: 2834 - protein, 394 aa, synthetic construct
  REGION 1..394: note = Variant of terminal deoxynucleotidyl transferase
MHHHHHHGGSGHPPSNTPEKEVPSVIARPVSQYACQRKTTLNNYNKKFTDALEIMAENYKFKENLIACLEAKRAASIFKYLPFEVTSMKDIQGLPCITDQVRDVIEEIIEEGESSRVKEILNDERYKAFKQFTSVFGVGVKTAEKWYRMGLRTVEEAKASKSLKLSKMQKAGFLYYEDLASMVSKEEADAVTLIVKETVRTFLPDALVTITGGFRRGKPMGHDVDFLITNPGRKEDDELLHKVVDLLKKQGLLLYEDIKESTFVEGQLPSHKIDAMDNFQKCFAILKLYQPKVDNSAVGTSKKSDMAEVKDWKAIRVDLVITPFEQYAYALLGWTGSKQFRRDLRRYAEEERGMLLDNHALYDLKKRIFLKAGSEEEIFAHLGLDYVEPWERNA

SEQ ID NO: 2835 - DNA, 1182 bp, synthetic construct
  misc_feature 1..1182: note = Variant of terminal deoxynucleotidyl transferase
  source 1..1182: mol_type = other DNA
atgcatcaccaccatcatcatgggggttctggtcatccgccgagcaataccccggagaaggaggtgccgagcgttatcgcccgtccggttagtcagtacgcgtgccagcgcaagaccacgctgaataactacaacaaaaagttcaccgacgcgctggagatcatggccgagaactacaaatttaaagagaacctgatcgcgtgtctggaagccaagcgcgccgcgagtatttttaaatatctgccgttcgaggttaccagcatgaaagacatccaaggtctgccgtgcattaccgaccaggttcgtgacgtgatcgaggagatcatcgaagagggcgagagcagccgtgttaaagaaatcctcaatgacgagcgctacaaggcctttaagcagttcaccagcgtgttcggtgtgggcgtgaaaaccgcggaaaagtggtaccgtatgggcctccgtacggttgaagaagcaaaggccagtaagagtctgaagctgagcaagatgcagaaggcgggcttcctgtattacgaggatctggcgagcatggttagtaaagaagaagccgatgccgttacgctcatcgtgaaggaaacggtgcgtacctttgctccggatgcgctggtgaccatcaccggcggtttccgccgtggcaaacctatgggccacgacgttgactttctgatcacgaacccgggccgcaaagaggatgacgagctgctccacaaagtggttgatctgctcaagaagcaaggtctgctgctgtacgaagacatcaaagagagcacgttcgtggaggggcaactgccaagtcataaaatcgacgccatggacaacttccagaagtgcttcgccattctcaagctgtaccagccgaaggtggataacagtgcggttgggacgagtaagaaaagtgacatggctgaggttaaggattggaaagcgatccgtgtggatctggtgatcacgccattcgagcagtacgcctatgcgctgctcggttggacgggcagcaaacaatttcgtcgcgatctgcgtcgctatgcggaggaagagcgcggcatgatcctcgacaaccatgccctctacgacctgaaaaagcgcatctttctgaaagcgggcagcgaagaagagattttcgcgcatctgggtctggattatgtggagccgtgggaacgcaacgcg

SEQ ID NO: 2836 - protein, 394 aa, synthetic construct
  REGION 1..394: note = Variant of terminal deoxynucleotidyl transferase
MHHHHHHGGSGHPPSNTPEKEVPSVIARPVSQYACQRKTTLNNYNKKFTDALEIMAENYKFKENLIACLEAKRAASIFKYLPFEVTSMKDIQGLPCITDQVRDVIEEIIEEGESSRVKEILNDERYKAFKQFTSVFGVGVKTAEKWYRMGLRTVEEAKASKSLKLSKMQKAGFLYYEDLASMVSKEEADAVTLIVKETVRTFAPDALVTITGGFRRGKPMGHDVDFLITNPGRKEDDELLHKVVDLLKKQGLLLYEDIKESTFVEGQLPSHKIDAMDNFQKCFAILKLYQPKVDNSAVGTSKKSDMAEVKDWKAIRVDLVITPFEQYAYALLGWTGSKQFRRDLRRYAEEERGMILDNHALYDLKKRIFLKAGSEEEIFAHLGLDYVEPWERNA

SEQ ID NO: 2837 - DNA, 1182 bp, synthetic construct
  misc_feature 1..1182: note = Variant of terminal deoxynucleotidyl transferase
  source 1..1182: mol_type = other DNA
atgcatcaccaccatcatcatgggggttctggtcatccgccgagcaataccccggagaaggaggtgccgagcgttatcgcccgtccggttagtcagtacgcgtgccagcgcaagaccacgctgaataactacaacaaaaagttcaccgacgcgctggagatcatggccgagaactacaaatttaaagagaacctgatcgcgtgtctggaagccaagcgcgccgcgagtatttttaaatatctgccgttcgaggttaccagcatgaaagacatccaaggtctgccgtgcattaccgaccaggttcgtgacgtgatcgaggagatcatcgaagagggcgagagcagccgtgttaaagaaatcctcaatgacgagcgctacaaggcctttaagcagttcaccagcgtgttcggtgtgggcgtgaaaaccgcggaaaagtggtaccgtatgggcctccgtacggttgaagaagcaaaggccagtaagagtctgaagctgagcaagatgcagaaggcgggcttcctgtattacgaggatctggcgagcatggttagtaaagaagaagccgatgccgttacgctcatcgtgaaggaaacggtgcgtacctttctgccggatgcgctggtgaccatcaccggcggtttccgccgtggcaaacctatgggccacgacgttgactttctgatcacgaacccgggccgcaaagaggatgacgagctgctccacaaagtggttgatctgctcaagaagcaaggtctgctgctgtacgaagacatcaaagagagcacgttcgtggaggggcaactgccaagtcataaaatcgacgccatggacaacttccagaagtgcttcgccattctcaagctgtaccagccgaaggtggataacagtgcggttgggacgagtaagaaaagtgacatggctgaggttaaggattggaaagcgatccgtgtggatctggtgatcacgccattcgagcagtacgcctatgcgctgctcggttggacgggcagcaaacaatttcgtcgcgatctgcgtcgctatgcggaggaagagcgcggcatgatcctcgacaaccatgccctctacgacctgaaaaagcgcatctttctgaaagcgacgagcgaagaagagattttcgcgcatctgggtctggattatgtggagccgtgggaacgcaacgcg

SEQ ID NO: 2838 - protein, 394 aa, synthetic construct
  REGION 1..394: note = Variant of terminal deoxynucleotidyl transferase
MHHHHHHGGSGHPPSNTPEKEVPSVIARPVSQYACQRKTTLNNYNKKFTDALEIMAENYKFKENLIACLEAKRAASIFKYLPFEVTSMKDIQGLPCITDQVRDVIEEIIEEGESSRVKEILNDERYKAFKQFTSVFGVGVKTAEKWYRMGLRTVEEAKASKSLKLSKMQKAGFLYYEDLASMVSKEEADAVTLIVKETVRTFLPDALVTITGGFRRGKPMGHDVDFLITNPGRKEDDELLHKVVDLLKKQGLLLYEDIKESTFVEGQLPSHKIDAMDNFQKCFAILKLYQPKVDNSAVGTSKKSDMAEVKDWKAIRVDLVITPFEQYAYALLGWTGSKQFRRDLRRYAEEERGMILDNHALYDLKKRIFLKATSEEEIFAHLGLDYVEPWERNA

SEQ ID NO: 2839 - DNA, 1182 bp, synthetic construct
  misc_feature 1..1182: note = Variant of terminal deoxynucleotidyl transferase
  source 1..1182: mol_type = other DNA
atgcatcaccaccatcatcatgggggttctggtcatccgccgagcaataccccggagaaggaggtgccgagcgttatcgcccgtccggttagtcagtacgcgtgccagcgcaagaccacgctgaataactacaacaaaaagttcaccgacgcgctggagatcatggccgagaactacaaatttaaagagaacctgatcgcgtgtctggaagccaagcgcgccgcgagtatttttaaatatctgccgttcgaggttaccagcatgaaagacatccaaggtctgccgtgcattaccgaccaggttcgtgacgtgatcgaggagatcatcgaagagggcgagagcagccgtgttaaagaaatcctcaatgacgagcgctacaaggcctttaagcagttcaccagcgtgttcggtgtgggcgtgaaaaccgcggaaaagtggtaccgtatgggcctccgtacggttgaagaagcaaaggccagtaagagtctgaagctgagcaagatgcagaaggcgggcttcctgtattacgaggatctggcgagcatggttagtaaagaagaagccgatgccgttacgctcatcgtgaaggaaacggtgcgtacctttctgccggatgcgctggtgaccatcaccggcggtttccgccgtggcaaacctatgggccacgacgttgactttctgatcacgaacccgggccgcaaagaggatgacgagctgctccacaaagtggttgatctgctcaagaagcaaggtctgctgctgtacgaagacatcaaagagagcacgttcgtggaggggcaactgccaagtcataaaatcgacgccatggacaacttccagaagtgcttcgccattctcaagctgtaccagccgaaggtggataacagtgcggttgggacgagtaagaaaagtgacatggctgaggttaaggattggaaagcgatccgtgtggatctggtgatcacgccattcgagcagtacgcctatgcgctgctcggttggacgggcagcaaacaatttcgtcgcgatctgcgtcgctatgcggaggaagagcgcggcatgatcctcgacaaccatgggctctacgacctgaaaaagcgcatctttctgaaagcgggcagcgaagaagagattttcgcgcatctgggtctggattatgtggagccgtgggaacgcaacgcg

SEQ ID NO: 2840 - protein, 394 aa, synthetic construct
  REGION 1..394: note = Variant of terminal deoxynucleotidyl transferase
MHHHHHHGGSGHPPSNTPEKEVPSVIARPVSQYACQRKTTLNNYNKKFTDALEIMAENYKFKENLIACLEAKRAASIFKYLPFEVTSMKDIQGLPCITDQVRDVIEEIIEEGESSRVKEILNDERYKAFKQFTSVFGVGVKTAEKWYRMGLRTVEEAKASKSLKLSKMQKAGFLYYEDLASMVSKEEADAVTLIVKETVRTFLPDALVTITGGFRRGKPMGHDVDFLITNPGRKEDDELLHKVVDLLKKQGLLLYEDIKESTFVEGQLPSHKIDAMDNFQKCFAILKLYQPKVDNSAVGTSKKSDMAEVKDWKAIRVDLVITPFEQYAYALLGWTGSKQFRRDLRRYAEEERGMILDNHGLYDLKKRIFLKAGSEEEIFAHLGLDYVEPWERNA

SEQ ID NO: 2841 - DNA, 1182 bp, synthetic construct
  misc_feature 1..1182: note = Variant of terminal deoxynucleotidyl transferase
  source 1..1182: mol_type = other DNA
atgcatcaccaccatcatcatgggggttctggtcatccgccgagcaataccccggagaaggaggtgccgagcgttatcgcccgtccggttagtcagtacgcgtgccagcgcaagaccacgctgaataactacaacaaaaagttcaccgacgcgctggagatcatggccgagaactacaaatttaaagagaacctgatcgcgtgtctggaagccaagcgcgccgcgagtatttttaaatatctgccgttcgaggttaccagcatgaaagacatccaaggtctgccgtgcattaccgaccaggttcgtgacgtgatcgaggagatcatcgaagagggcgagagcagccgtgttaaagaaatcctcaatgacgagcgctacaaggcctttaagcagttcaccagcgtgttcggtgtgggcgtgaaaaccgcggaaaagtggtaccgtatgggcctccgtacggttgaagaagcaaaggccagtaagagtctgaagctgagcaagatgcagaaggcgggcttcctgtattacgaggatctggcgagcatggttagtaaagaagaagccgatgccgttacgctcatcgtgaaggaaacggtgcgtacctttctgccggatgcgctggtgaccatcaccggcggtttccgccgtggcaaacctatgggccacgacgttgactttctgatcacgaacccgggccgcaaagaggatgacgagctgctccacaaagtggttgatctgctcaagaagcaaggtctgctgctgtacgaagacatcaaagagagcacgttcgtggaggggcaactgccaagtcataaaatcgacgccatggacaacttccagaagtgcttcgccattctcaagctgtaccagccgaaggtggataacagtgcggttgggacgagtaagaaaagtgacatggctgaggttaaggattggaaagcgatccgtgtggatctggtgatcacgccattcgagcagtacgcctatgcgctgctcggttggacgggcagcaaacaatttcgtcgcgatctgcgtcgctatgcggaggaagagcgcggcatgatcctcgacaaccatgccctctacgacctgaaaaagcgcatctttctgaaagcgggcagcgaagaagatattttcgcgcatctgggtctggattatgtggagccgtgggaacgcaacgcg

SEQ ID NO: 2842 - protein, 394 aa, synthetic construct
  REGION 1..394: note = Variant of terminal deoxynucleotidyl transferase
MHHHHHHGGSGHPPSNTPEKEVPSVIARPVSQYACQRKTTLNNYNKKFTDALEIMAENYKFKENLIACLEAKRAASIFKYLPFEVTSMKDIQGLPCITDQVRDVIEEIIEEGESSRVKEILNDERYKAFKQFTSVFGVGVKTAEKWYRMGLRTVEEAKASKSLKLSKMQKAGFLYYEDLASMVSKEEADAVTLIVKETVRTFLPDALVTITGGFRRGKPMGHDVDFLITNPGRKEDDELLHKVVDLLKKQGLLLYEDIKESTFVEGQLPSHKIDAMDNFQKCFAILKLYQPKVDNSAVGTSKKSDMAEVKDWKAIRVDLVITPFEQYAYALLGWTGSKQFRRDLRRYAEEERGMILDNHALYDLKKRIFLKAGSEEDIFAHLGLDYVEPWERNA

SEQ ID NO: 2843 - DNA, 1182 bp, synthetic construct
  misc_feature 1..1182: note = Variant of terminal deoxynucleotidyl transferase
  source 1..1182: mol_type = other DNA
atgcatcaccaccatcatcatgggggttctggtcatccgccgagcaataccccggagaaggaggtgccgagcgttatcgcccgtccggttagtcagtacgcgtgccagcgcaagaccacgctgaataactacaacaaaaagttcaccgacgcgctggagatcatggccgagaactacaaatttaaagagaacctgatcgcgtgtctggaagccaagcgcgccgcgagtatttttaaatatctgccgttcgaggttaccagcatgaaagacatccaaggtctgccgtgcattaccgaccaggttcgtgacgtgatcgaggagatcatcgaagagggcgagagcagccgtgttaaagaaatcctcaatgacgagcgctacaaggcctttaagcagttcaccagcgtgttcggtgtgggcgtgaaaaccgcggaaaagtggtaccgtatgggcctccgtacggttgaagaagcaaaggccagtaagagtctgaagctgagcaagatgcagaaggcgggcttcctgtattacgaggatctggcgagcatggttagtaaagaagaagccgatgccgttacgctcatcgtgaaggaaacggtgcgtacctttctgccggatgcgctggtgaccatcaccggcggtttccgccgtggcaaacctatgggccacgacgttgactttctgatcacgaacccgggccgccatgaggatgacgagctgctccacaaagtggttgatctgctcaagaagcaaggtctgctgctgtacgaagacatcaaagagagcacgttcgtggaggggcaactgccaagtcataaaatcgacgccatggacaacttccagaagtgcttcgccattctcaagctgtaccagccgaaggtggataacagtgcggttgggacgagtaagaaaagtgacatggctgaggttaaggattggaaagcgatccgtgtggatctggtgatcacgccattcgagcagtacgcctatgcgctgctcggttggacgggcagcaaacaatttcgtcgcgatctgcgtcgctatgcggaggaagagcgcggcatgatcctcgacaaccatgccctctacgacctgaaaaagcgcatctttctgaaagcgggcagcgaagaagagattttcgcgcatctgggtctggattatgtggagccgtgggaacgcaacgcg

SEQ ID NO: 2844 - protein, 394 aa, synthetic construct
  REGION 1..394: note = Variant of terminal deoxynucleotidyl transferase
MHHHHHHGGSGHPPSNTPEKEVPSVIARPVSQYACQRKTTLNNYNKKFTDALEIMAENYKFKENLIACLEAKRAASIFKYLPFEVTSMKDIQGLPCITDQVRDVIEEIIEEGESSRVKEILNDERYKAFKQFTSVFGVGVKTAEKWYRMGLRTVEEAKASKSLKLSKMQKAGFLYYEDLASMVSKEEADAVTLIVKETVRTFLPDALVTITGGFRRGKPMGHDVDFLITNPGRHEDDELLHKVVDLLKKQGLLLYEDIKESTFVEGQLPSHKIDAMDNFQKCFAILKLYQPKVDNSAVGTSKKSDMAEVKDWKAIRVDLVITPFEQYAYALLGWTGSKQFRRDLRRYAEEERGMILDNHALYDLKKRIFLKAGSEEEIFAHLGLDYVEPWERNA

SEQ ID NO: 2845 - DNA, 1182 bp, synthetic construct
  misc_feature 1..1182: note = Variant of terminal deoxynucleotidyl transferase
  source 1..1182: mol_type = other DNA
atgcatcaccaccatcatcatgggggttctggtcatccgccgagcaataccccggagaaggaggtgccgagcgttatcgcccgtccggttagtcagtacgcgtgccagcgcaagaccacgctgaataactacaacaaaaagttcaccgacgcgctggagatcatggccgagaactacaaatttaaagagaacctgatcgcgtgtctggaagccaagcgcgccgcgagtatttttaaatatctgccgttcgaggttaccagcatgaaagacatccaaggtctgccgtgcattaccgaccaggttcgtgacgtgatcgaggagatcatcgaagagggcgagagcagccgtgttaaagaaatcctcaatgacgagcgctacaaggcctttaagcagttcaccagcgtgttcggtgtgggcgtgaaaaccgcggaaaagtggtaccgtatgggcctccgtacggttgaagaagcaaaggccagtaagagtctgaagctgagcaagatgcagaaggcgggcttcctgtattacgaggatctggcgagcatggttagtaaagaagaagccgatgccgttacgctcatcgtgaaggaaacggtgcgtacctttctgccggatgcgctggtgaccatcaccggcggtttccgccgtggcaaacctatgggccacgacgttgactttctgatcacgaacccgggccgcaaagaggatgacgagctgctccacaaagtggttgatctgctcaagaagcaaggtctgctgctgtacgaagacatcaaagagagcacgttcgtggaggggcaactgccaagtcataaaatcgacgccatggacaacttccagaagtgcttcgccattctcaagctgtaccagccgaaggtggataacagtgcggttgggacgagtaagaaaagtgacatggctgaggttaaggattggaaagcgatccgtgtggatctggtgatcacgccattcgagcagtacgcctatgcgctgctcggttggacgggcagcaaacaatttcgtcgcgatctgcgtcgctatgcggaggaagagcgcggcatgatcctcgacaaccatgccctctacgacctgaaacagcgcatctttctgaaagcgggcagcgaagaagagattttcgcgcatctgggtctggattatgtggagccgtgggaacgcaacgcg

SEQ ID NO: 2846 - protein, 394 aa, synthetic construct
  REGION 1..394: note = Variant of terminal deoxynucleotidyl transferase
MHHHHHHGGSGHPPSNTPEKEVPSVIARPVSQYACQRKTTLNNYNKKFTDALEIMAENYKFKENLIACLEAKRAASIFKYLPFEVTSMKDIQGLPCITDQVRDVIEEIIEEGESSRVKEILNDERYKAFKQFTSVFGVGVKTAEKWYRMGLRTVEEAKASKSLKLSKMQKAGFLYYEDLASMVSKEEADAVTLIVKETVRTFLPDALVTITGGFRRGKPMGHDVDFLITNPGRKEDDELLHKVVDLLKKQGLLLYEDIKESTFVEGQLPSHKIDAMDNFQKCFAILKLYQPKVDNSAVGTSKKSDMAEVKDWKAIRVDLVITPFEQYAYALLGWTGSKQFRRDLRRYAEEERGMILDNHALYDLKQRIFLKAGSEEEIFAHLGLDYVEPWERNA

SEQ ID NO: 2847 - DNA, 1182 bp, synthetic construct
  misc_feature 1..1182: note = Variant of terminal deoxynucleotidyl transferase
  source 1..1182: mol_type = other DNA
atgcatcaccaccatcatcatgggggttctggtcatccgccgagcaataccccggagaaggaggtgccgagcgttatcgcccgtccggttagtcagtacgcgtgccagcgcaagaccacgctgaataactacaacaaaaagttcaccgacgcgctggagatcatggccgagaactacaaatttaaagagaacctgatcgcgtgtctggaagccaagcgcgccgcgagtatttttaaatatctgccgttcgaggttaccagcatgaaagacatccaaggtctgccgtgcattaccgaccaggttcgtgacgtgatcgaggagatcatcgaagagggcgagagcagccgtgttaaagaaatcctcaatgacgagcgctacaaggcctttaagcagttcaccagcgtgttcggtgtgggcgtgaaaaccgcggaaaagtggtaccgtatgggcctccgtacggttgaagaagcaaaggccagtaagagtctgaagctgagcaagatgcagaaggcgggcttcctgtattacgaggatctggcgagcatggttagtaaagaagaagccgatgccgttacgctcatcgtgaaggaaacggtgcgtacctttctgccggatgcgctggtgaccatcaccggcggtttccgccgtggcaaacctatgggccacgacgttgactttctgatcacgaacccgggccgcaaagaggatgacgagctgctccacaaagtggttgatctgctcaagaagcaaggtctgctgctgtacgaagacatcaaagagagcacgttcgtggaggggcaactgccaagtcataaaatcgacgccatggacaacttccagaagtgcttcgccattctcaagctgtaccagccgaaggtggataacagtgcggttgggacgagtaagaaaagtgacatggctgaggttaaggattggaaagcgatccgtgtggatctggtgatcacgccattcgagcagtacgcctatgcgctgctcggttggacgggcagcaaacaatttcgtcgcgatctgcgtcgctatgcggaggaagagcgcggcatgatcctcgacaaccatgccctctacgacctgaaaaagcgcatctttctgaaagcgggcagcgaagaagaggtgttcgcgcatctgggtctggattatgtggagccgtgggaacgcaacgcg

SEQ ID NO: 2848 - protein, 394 aa, synthetic construct
  REGION 1..394: note = Variant of terminal deoxynucleotidyl transferase
MHHHHHHGGSGHPPSNTPEKEVPSVIARPVSQYACQRKTTLNNYNKKFTDALEIMAENYKFKENLIACLEAKRAASIFKYLPFEVTSMKDIQGLPCITDQVRDVIEEIIEEGESSRVKEILNDERYKAFKQFTSVFGVGVKTAEKWYRMGLRTVEEAKASKSLKLSKMQKAGFLYYEDLASMVSKEEADAVTLIVKETVRTFLPDALVTITGGFRRGKPMGHDVDFLITNPGRKEDDELLHKVVDLLKKQGLLLYEDIKESTFVEGQLPSHKIDAMDNFQKCFAILKLYQPKVDNSAVGTSKKSDMAEVKDWKAIRVDLVITPFEQYAYALLGWTGSKQFRRDLRRYAEEERGMILDNHALYDLKKRIFLKAGSEEEVFAHLGLDYVEPWERNA

SEQ ID NO: 2849 - DNA, 1182 bp, synthetic construct
  misc_feature 1..1182: note = Variant of terminal deoxynucleotidyl transferase
  source 1..1182: mol_type = other DNA
atgcatcaccaccatcatcatgggggttctggtcatccgccgagcaataccccggagaaggaggtgccgagcgttatcgcccgtccggttagtcagtacgcgtgccagcgcaagaccacgctgaataactacaacaaaaagttcaccgacgcgctggagatcatggccgagaactacaaatttaaagagaacctgatcgcgtgtctggaagccaagcgcgccgcgagtatttttaaatatctgccgttcgaggttaccagcatgaaagacatccaaggtctgccgtgcattaccgaccaggttcgtgacgtgatcgaggagatcatcgaagagggcgagagcagccgtgttaaagaaatcctcaatgacgagcgctacaaggcctttaagcagttcaccagcgtgttcggtgtgggcgtgaaaaccgcggaaaagtggtaccgtatgggcctccgtacggttgaagaagcaaaggccagtaagagtctgaagctgagcaagatgcagaaggcgggcttcctgtattacgaggatctggcgagcatggttagtaaagaagaagccgatgccgttacgctcatcgtgaaggaaacggtgcgtacctttctgccggatgcgctggtgaccatcaccggcggtttccgccgtggcaaacctatgggccacgacgttgactttctgatcacgaacccgggccgcaaaactgatgacgagctgctccacaaagtggttgatctgctcaagaagcaaggtctgctgctgtacgaagacatcaaagagagcacgttcgtggaggggcaactgccaagtcataaaatcgacgccatggacaacttccagaagtgcttcgccattctcaagctgtaccagccgaaggtggataacagtgcggttgggacgagtaagaaaagtgacatggctgaggttaaggattggaaagcgatccgtgtggatctggtgatcacgccattcgagcagtacgcctatgcgctgctcggttggacgggcagcaaacaatttcgtcgcgatctgcgtcgctatgcggaggaagagcgcggcatgatcctcgacaaccatgccctctacgacctgaaaaagcgcatctttctgaaagcgggcagcgaagaagagattttcgcgcatctgggtctggattatgtggagccgtgggaacgcaacgcg

SEQ ID NO: 2850 - protein, 394 aa, synthetic construct
  REGION 1..394: note = Variant of terminal deoxynucleotidyl transferase
MHHHHHHGGSGHPPSNTPEKEVPSVIARPVSQYACQRKTTLNNYNKKFTDALEIMAENYKFKENLIACLEAKRAASIFKYLPFEVTSMKDIQGLPCITDQVRDVIEEIIEEGESSRVKEILNDERYKAFKQFTSVFGVGVKTAEKWYRMGLRTVEEAKASKSLKLSKMQKAGFLYYEDLASMVSKEEADAVTLIVKETVRTFLPDALVTITGGFRRGKPMGHDVDFLITNPGRKTDDELLHKVVDLLKKQGLLLYEDIKESTFVEGQLPSHKIDAMDNFQKCFAILKLYQPKVDNSAVGTSKKSDMAEVKDWKAIRVDLVITPFEQYAYALLGWTGSKQFRRDLRRYAEEERGMILDNHALYDLKKRIFLKAGSEEEIFAHLGLDYVEPWERNA

SEQ ID NO: 2851 - DNA, 1182 bp, synthetic construct
  misc_feature 1..1182: note = Variant of terminal deoxynucleotidyl transferase
  source 1..1182: mol_type = other DNA
atgcatcaccaccatcatcatgggggttctggtcatccgccgagcaataccccggagaaggaggtgccgagcgttatcgcccgtccggttagtcagtacgcgtgccagcgcaagaccacgctgaataactacaacaaaaagttcaccgacgcgctggagatcatggccgagaactacaaatttaaagagaacctgatcgcgtgtctggaagccaagcgcgccgcgagtatttttaaatatctgccgttcgaggttaccagcatgaaagacatccaaggtctgccgtgcattaccgaccaggttcgtgacgtgatcgaggagatcatcgaagagggcgagagcagccgtgttaaagaaatcctcaatgacgagcgctacaaggcctttaagcagttcaccagcgtgttcggtgtgggcgtgaaaaccgcggaaaagtggtaccgtatgggcctccgtacggttgaagaagcaaaggccagtaagagtctgaagctgagcaagatgcagaaggcgggcttcctgtattacgaggatctggcgagcatggttagtaaagaagaagccgatgccgttacgctcatcgtgaaggaaacggtgcgtacctttctgccggatgcgctggtgaccatcaccggcggtttccgccgtggcaaacctatgggccacgacgttgactttctgatcacgaacccgggccgcaaagaggatgacgagctgctccacaaagtggttgatctgctcaagaagcaaggtctgctgctgtacgaagacatcaaagagagcacgttcgtggaggggcaactgccaagtcataaaatcgacgccatggacaacttccagaagtgcttcgccattctcaagctgtaccagccgaaggtggataacagtgcggttgggacgagtaagaaaagtgacatggctgaggttaaggattggaaagcgatccgtgtggatctggtgatcacgccattcgagcagtacgcctatgcgctgctcggttggacgggcagcaaacaatttcgtcgcgatatgcgtcgctatgcggaggaagagcgcggcatgatcctcgacaaccatgccctctacgacctgaaaaagcgcatctttctgaaagcgggcagcgaagaagagattttcgcgcatctgggtctggattatgtggagccgtgggaacgcaacgcg

SEQ ID NO: 2852 - protein, 394 aa, synthetic construct
  REGION 1..394: note = Variant of terminal deoxynucleotidyl transferase
MHHHHHHGGSGHPPSNTPEKEVPSVIARPVSQYACQRKTTLNNYNKKFTDALEIMAENYKFKENLIACLEAKRAASIFKYLPFEVTSMKDIQGLPCITDQVRDVIEEIIEEGESSRVKEILNDERYKAFKQFTSVFGVGVKTAEKWYRMGLRTVEEAKASKSLKLSKMQKAGFLYYEDLASMVSKEEADAVTLIVKETVRTFLPDALVTITGGFRRGKPMGHDVDFLITNPGRKEDDELLHKVVDLLKKQGLLLYEDIKESTFVEGQLPSHKIDAMDNFQKCFAILKLYQPKVDNSAVGTSKKSDMAEVKDWKAIRVDLVITPFEQYAYALLGWTGSKQFRRDMRRYAEEERGMILDNHALYDLKKRIFLKAGSEEEIFAHLGLDYVEPWERNA

SEQ ID NO: 2853 - DNA, 1182 bp, synthetic construct
  misc_feature 1..1182: note = Variant of terminal deoxynucleotidyl transferase
  source 1..1182: mol_type = other DNA
atgcatcaccaccatcatcatgggggttctggtcatccgccgagcaataccccggagaaggaggtgccgagcgttatcgcccgtccggttagtcagtacgcgtgccagcgcaagaccacgctgaataactacaacaaaaagttcaccgacgcgctggagatcatggccgagaactacaaatttaaagagaacctgatcgcgtgtctggaagccaagcgcgccgcgagtatttttaaatatctgccgttcgaggttaccagcatgaaagacatccaaggtctgccgtgcattaccgaccaggttcgtgacgtgatcgaggagatcatcgaagagggcgagagcagccgtgttaaagaaatcctcaatgacgagcgctacaaggcctttaagcagttcaccagcgtgttcggtgtgggcgtgaaaaccgcggaaaagtggtaccgtatgggcctccgtacggttgaagaagcaaaggccagtaagagtctgaagctgagcaagatgcagaaggcgggcttcctgtattacgaggatctggcgagcatggttagtaaagaagaagccgatgccgttacgctcatcgtgaaggaaacggtgcgtacctttctgccggatgcgctggtgaccatcaccggcggtttccgccgtggcaaacctatgggccacgacgttgactttctgatcacgaacccgggccgcaaagaggatgacgagctgctccacaaagtggttgatctgctcaagaagcaaggtctgctgctgtacgaagacatcaaagagagcacgttcgtggaggggcaactgccaagtcataaaatcgacgccatggacaacttccagaagtgcttcgccattctcaagctgtaccagccgaaggtggataacagtgcggttgggacgagtaagaaaagtgacatggctgaggttaaggattggaaagcgatccgtgtggatctggtgatcacgccattcgagcagtacgcctatgcgctgctcggttggacgggcagcaaacaatttcgtcgcgatctgcgtcgctatgcggaggaagagcgcggcatgatcctcgacaaccatgccctctacgacctgaaaaagcgcatctttctgaaagcgggcagcgaagaagagattttcgcgcatctgggtctggattatgtggagccgtatgaacgcaacgcg

SEQ ID NO: 2854 - protein, 394 aa, synthetic construct
  REGION 1..394: note = Variant of terminal deoxynucleotidyl transferase
MHHHHHHGGSGHPPSNTPEKEVPSVIARPVSQYACQRKTTLNNYNKKFTDALEIMAENYKFKENLIACLEAKRAASIFKYLPFEVTSMKDIQGLPCITDQVRDVIEEIIEEGESSRVKEILNDERYKAFKQFTSVFGVGVKTAEKWYRMGLRTVEEAKASKSLKLSKMQKAGFLYYEDLASMVSKEEADAVTLIVKETVRTFLPDALVTITGGFRRGKPMGHDVDFLITNPGRKEDDELLHKVVDLLKKQGLLLYEDIKESTFVEGQLPSHKIDAMDNFQKCFAILKLYQPKVDNSAVGTSKKSDMAEVKDWKAIRVDLVITPFEQYAYALLGWTGSKQFRRDLRRYAEEERGMILDNHALYDLKKRIFLKAGSEEEIFAHLGLDYVEPYERNA

SEQ ID NO: 2855 - DNA, 1182 bp, synthetic construct
  misc_feature 1..1182: note = Variant of terminal deoxynucleotidyl transferase
  source 1..1182: mol_type = other DNA
atgcatcaccaccatcatcatgggggttctggtcatccgccgagcaataccccggagaaggaggtgccgagcgttatcgcccgtccggttagtcagtacgcgtgccagcgcaagaccacgctgaataactacaacaaaaagttcaccgacgcgctggagatcatggccgagaactacaaatttaaagagaacctgatcgcgtgtctggaagccaagcgcgccgcgagtatttttaaatatctgccgttcgaggttaccagcatgaaagacatccaaggtctgccgtgcattaccgaccaggttcgtgacgtgatcgaggagatcatcgaagagggcgagagcagccgtgttaaagaaatcctcaatgacgagcgctacaaggcctttaagcagttcaccagcgtgttcggtgtgggcgtgaaaaccgcggaaaagtggtaccgtatgggcctccgtacggttgaagaagcaaaggccagtaagagtctgaagctgagcaagatgcagaaggcgggcttcctgtattacgaggatctggcgagcatggttagtaaagaagaagccgatgccgttacgctcatcgtgaaggaaacggtgcgtacctttctgccggatgcgctggtgaccatcaccggcggtttccgccgtggcaaacctatgggccacgacgttgactttctgatcacgaacccgggccgcaaagaggatgacaggctgctccacaaagtggttgatctgctcaagaagcaaggtctgctgctgtacgaagacatcaaagagagcacgttcgtggaggggcaactgccaagtcataaaatcgacgccatggacaacttccagaagtgcttcgccattctcaagctgtaccagccgaaggtggataacagtgcggttgggacgagtaagaaaagtgacatggctgaggttaaggattggaaagcgatccgtgtggatctggtgatcacgccattcgagcagtacgcctatgcgctgctcggttggacgggcagcaaacaatttcgtcgcgatctgcgtcgctatgcggaggaagagcgcggcatgatcctcgacaaccatgccctctacgacctgaaaaagcgcatctttctgaaagcgggcagcgaagaagagattttcgcgcatctgggtctggattatgtggagccgtgggaacgcaacgcg

SEQ ID NO: 2856 - protein, 394 aa, synthetic construct
  REGION 1..394: note = Variant of terminal deoxynucleotidyl transferase
MHHHHHHGGSGHPPSNTPEKEVPSVIARPVSQYACQRKTTLNNYNKKFTDALEIMAENYKFKENLIACLEAKRAASIFKYLPFEVTSMKDIQGLPCITDQVRDVIEEIIEEGESSRVKEILNDERYKAFKQFTSVFGVGVKTAEKWYRMGLRTVEEAKASKSLKLSKMQKAGFLYYEDLASMVSKEEADAVTLIVKETVRTFLPDALVTITGGFRRGKPMGHDVDFLITNPGRKEDDRLLHKVVDLLKKQGLLLYEDIKESTFVEGQLPSHKIDAMDNFQKCFAILKLYQPKVDNSAVGTSKKSDMAEVKDWKAIRVDLVITPFEQYAYALLGWTGSKQFRRDLRRYAEEERGMILDNHALYDLKKRIFLKAGSEEEIFAHLGLDYVEPWERNA

SEQ ID NO: 2857 - DNA, 1182 bp, synthetic construct
  misc_feature 1..1182: note = Variant of terminal deoxynucleotidyl transferase
  source 1..1182: mol_type = other DNA
atgcatcaccaccatcatcatgggggttctggtcatccgccgagcaataccccggagaaggaggtgccgagcgttatcgcccgtccggttagtcagtacgcgtgccagcgcaagaccacgctgaataactacaacaaaaagttcaccgacgcgctggagatcatggccgagaactacaaatttaaagagaacctgatcgcgtgtctggaagccaagcgcgccgcgagtatttttaaatatctgccgttcgaggttaccagcatgaaagacatccaaggtctgccgtgcattaccgaccaggttcgtgacgtgatcgaggagatcatcgaagagggcgagagcagccgtgttaaagaaatcctcaatgacgagcgctacaaggcctttaagcagttcaccagcgtgttcggtgtgggcgtgaaaaccgcggaaaagtggtaccgtatgggcctccgtacggttgaagaagcaaaggccagtaagagtctgaagctgagcaagatgcagaaggcgggcttcctgtattacgaggatctggcgagcatggttagtaaagaagaagccgatgccgttacgctcatcgtgaaggaaacggtgcgtacctttctgccggatgcgctggtgaccatcaccggcggtttccgccgtggcaaacctatgggccacgacgttgacctgctgatcacgaacccgggccgcaaagaggatgacgagctgctccacaaagtggttgatctgctcaagaagcaaggtctgctgctgtacgaagacatcaaagagagcacgttcgtggaggggcaactgccaagtcataaaatcgacgccatggacaacttccagaagtgcttcgccattctcaagctgtaccagccgaaggtggataacagtgcggttgggacgagtaagaaaagtgacatggctgaggttaaggattggaaagcgatccgtgtggatctggtgatcacgccattcgagcagtacgcctatgcgctgctcggttggacgggcagcaaacaatttcgtcgcgatctgcgtcgctatgcggaggaagagcgcggcatgatcctcgacaaccatgccctctacgacctgaaaaagcgcatctttctgaaagcgggcagcgaagaagagattttcgcgcatctgggtctggattatgtggagccgtgggaacgcaacgcg

SEQ ID NO: 2858 - protein, 394 aa, synthetic construct
  REGION 1..394: note = Variant of terminal deoxynucleotidyl transferase
MHHHHHHGGSGHPPSNTPEKEVPSVIARPVSQYACQRKTTLNNYNKKFTDALEIMAENYKFKENLIACLEAKRAASIFKYLPFEVTSMKDIQGLPCITDQVRDVIEEIIEEGESSRVKEILNDERYKAFKQFTSVFGVGVKTAEKWYRMGLRTVEEAKASKSLKLSKMQKAGFLYYEDLASMVSKEEADAVTLIVKETVRTFLPDALVTITGGFRRGKPMGHDVDLLITNPGRKEDDELLHKVVDLLKKQGLLLYEDIKESTFVEGQLPSHKIDAMDNFQKCFAILKLYQPKVDNSAVGTSKKSDMAEVKDWKAIRVDLVITPFEQYAYALLGWTGSKQFRRDLRRYAEEERGMILDNHALYDLKKRIFLKAGSEEEIFAHLGLDYVEPWERNA

SEQ ID NO: 2859 - DNA, 1182 bp, synthetic construct
  misc_feature 1..1182: note = Variant of terminal deoxynucleotidyl transferase
  source 1..1182: mol_type = other DNA
atgcatcaccaccatcatcatgggggttctggtcatccgccgagcaataccccggagaaggaggtgccgagcgttatcgcccgtccggttagtcagtacgcgtgccagcgcaagaccacgctgaataactacaacaaaaagttcaccgacgcgctggagatcatggccgagaactacaaatttaaagagaacctgatcgcgtgtctggaagccaagcgcgccgcgagtatttttaaatatctgccgttcgaggttaccagcatgaaagacatccaaggtctgccgtgcattaccgaccaggttcgtgacgtgatcgaggagatcatcgaagagggcgagagcagccgtgttaaagaaatcctcaatgacgagcgctacaaggcctttaagcagttcaccagcgtgttcggtgtgggcgtgaaaaccgcggaaaagtggtaccgtatgggcctccgtacggttgaagaagcaaaggccagtaagagtctgaagctgagcaagatgcagaaggcgggcttcctgtattacgaggatctggcgagcatggttagtaaagaagaagccgatgccgttacgctcatcgtgaaggaaacggtgcgtacctttctgccggatgcgctggtgaccatcaccggcggtttccgccgtggcaaacctatgggccacgacgttgactttctgatcacgaacccgggccgcaaagaggatgaggagctgctccacaaagtggttgatctgctcaagaagcaaggtctgctgctgtacgaagacatcaaagagagcacgttcgtggaggggcaactgccaagtcataaaatcgacgccatggacaacttccagaagtgcttcgccattctcaagctgtaccagccgaaggtggataacagtgcggttgggacgagtaagaaaagtgacatggctgaggttaaggattggaaagcgatccgtgtggatctggtgatcacgccattcgagcagtacgcctatgcgctgctcggttggacgggcagcaaacaatttcgtcgcgatctgcgtcgctatgcggaggaagagcgcggcatgatcctcgacaaccatgccctctacgacctgaaaaagcgcatctttctgaaagcgggcagcgaagaagagattttcgcgcatctgggtctggattatgtggagccgtgggaacgcaacgcg

SEQ ID NO: 2860 - protein, 394 aa, synthetic construct
  REGION 1..394: note = Variant of terminal deoxynucleotidyl transferase
MHHHHHHGGSGHPPSNTPEKEVPSVIARPVSQYACQRKTTLNNYNKKFTDALEIMAENYKFKENLIACLEAKRAASIFKYLPFEVTSMKDIQGLPCITDQVRDVIEEIIEEGESSRVKEILNDERYKAFKQFTSVFGVGVKTAEKWYRMGLRTVEEAKASKSLKLSKMQKAGFLYYEDLASMVSKEEADAVTLIVKETVRTFLPDALVTITGGFRRGKPMGHDVDFLITNPGRKEDEELLHKVVDLLKKQGLLLYEDIKESTFVEGQLPSHKIDAMDNFQKCFAILKLYQPKVDNSAVGTSKKSDMAEVKDWKAIRVDLVITPFEQYAYALLGWTGSKQFRRDLRRYAEEERGMILDNHALYDLKKRIFLKAGSEEEIFAHLGLDYVEPWERNA

SEQ ID NO: 2861 - DNA, 1182 bp, synthetic construct
  misc_feature 1..1182: note = Variant of terminal deoxynucleotidyl transferase
  source 1..1182: mol_type = other DNA
atgcatcaccaccatcatcatgggggttctggtcatccgccgagcaataccccggagaaggaggtgccgagcgttatcgcccgtccggttagtcagtacgcgtgccagcgcaagaccacgctgaataactacaacaaaaagttcaccgacgcgctggagatcatggccgagaactacaaatttaaagagaacctgatcgcgtgtctggaagccaagcgcgccgcgagtatttttaaatatctgccgttcgaggttaccagcatgaaagacatccaaggtctgccgtgcattaccgaccaggttcgtgacgtgatcgaggagatcatcgaagagggcgagagcagccgtgttaaagaaatcctcaatgacgagcgctacaaggcctttaagcagttcaccagcgtgttcggtgtgggcgtgaaaaccgcggaaaagtggtaccgtatgggcctccgtacggttgaagaagcaaaggccagtaagagtctgaagctgagcaagatgcagaaggcgggcttcctgtattacgaggatctggcgagcatggttagtaaagaagaagccgatgccgttacgctcatcgtgaaggaaacggtgcgtacctttctgccggatgcgctggtgaccatcaccggcggtttccgccgtggcaaacctatgggccacgacgttgactttctgatcacgaacccgggccgcaaagaggatgacgagctgctccacaaagtggttgatctgctcaagaagcaaggtctgctgctgtacgaagacatcaaagagagcacgttcgtggaggggcaactgccaagtcataaaatcgacgccatggacaacttccagaagtgcttcgccattctcaagctgtaccagccgaaggtggataacagtgcggttgggacgagtaagaaaagtgacatggctgaggttaaggattggaaagcgatccgtgtggatctggtgatcacgccattcgagcagtacgcctatgcgctgctcggttggacgggcagcaaacaatttcgtcgcgatctgcgtcgctatgcggaggaagaggtgggcatgatcctcgacaaccatgccctctacgacctgaaaaagcgcatctttctgaaagcgggcagcgaagaagagattttcgcgcatctgggtctggattatgtggagccgtgggaacgcaacgcg

SEQ ID NO: 2862 - protein, 394 aa, synthetic construct
  REGION 1..394: note = Variant of terminal deoxynucleotidyl transferase
MHHHHHHGGSGHPPSNTPEKEVPSVIARPVSQYACQRKTTLNNYNKKFTDALEIMAENYKFKENLIACLEAKRAASIFKYLPFEVTSMKDIQGLPCITDQVRDVIEEIIEEGESSRVKEILNDERYKAFKQFTSVFGVGVKTAEKWYRMGLRTVEEAKASKSLKLSKMQKAGFLYYEDLASMVSKEEADAVTLIVKETVRTFLPDALVTITGGFRRGKPMGHDVDFLITNPGRKEDDELLHKVVDLLKKQGLLLYEDIKESTFVEGQLPSHKIDAMDNFQKCFAILKLYQPKVDNSAVGTSKKSDMAEVKDWKAIRVDLVITPFEQYAYALLGWTGSKQFRRDLRRYAEEEVGMILDNHALYDLKKRIFLKAGSEEEIFAHLGLDYVEPWERNA

SEQ ID NO: 2863 - DNA, 1182 bp, synthetic construct
  misc_feature 1..1182: note = Variant of terminal deoxynucleotidyl transferase
  source 1..1182: mol_type = other DNA
atgcatcaccaccatcatcatgggggttctggtcatccgccgagcaataccccggagaaggaggtgccgagcgttatcgcccgtccggttagtcagtacgcgtgccagcgcaagaccacgctgaataactacaacaaaaagttcaccgacgcgctggagatcatggccgagaactacaaatttaaagagaacctgatcgcgtgtctggaagccaagcgcgccgcgagtatttttaaatatctgccgttcgaggttaccagcatgaaagacatccaaggtctgccgtgcattaccgaccaggttcgtgacgtgatcgaggagatcatcgaagagggcgagagcagccgtgttaaagaaatcctcaatgacgagcgctacaaggcctttaagcagttcaccagcgtgttcggtgtgggcgtgaaaaccgcggaaaagtggtaccgtatgggcctccgtacggttgaagaagcaaaggccagtaagagtctgaagctgagcaagatgcagaaggcgggcttcctgtattacgaggatctggcgagcatggttagtaaagaagaagccgatgccgttacgctcatcgtgaaggaaacggtgcgtacctttctgccggatgcgctggtgaccatcaccggcggtttccgccgtggcaaacctatgggccacgacgttgactttctgatcacgaacccgggccgccgtgaggatgacgagctgctccacaaagtggttgatctgctcaagaagcaaggtctgctgctgtacgaagacatcaaagagagcacgttcgtggaggggcaactgccaagtcataaaatcgacgccatggacaacttccagaagtgcttcgccattctcaagctgtaccagccgaaggtggataacagtgcggttgggacgagtaagaaaagtgacatggctgaggttaaggattggaaagcgatccgtgtggatctggtgatcacgccattcgagcagtacgcctatgcgctgctcggttggacgggcagcaaacaatttcgtcgcgatctgcgtcgctatgcggaggaagagcgcggcatgatcctcgacaaccatgccctctacgacctgaaaaagcgcatctttctgaaagcgggcagcgaagaagagattttcgcgcatctgggtctggattatgtggagccgtgggaacgcaacgcg

SEQ ID NO: 2864 - protein, 394 aa, synthetic construct
  REGION 1..394: note = Variant of terminal deoxynucleotidyl transferase
MHHHHHHGGSGHPPSNTPEKEVPSVIARPVSQYACQRKTTLNNYNKKFTDALEIMAENYKFKENLIACLEAKRAASIFKYLPFEVTSMKDIQGLPCITDQVRDVIEEIIEEGESSRVKEILNDERYKAFKQFTSVFGVGVKTAEKWYRMGLRTVEEAKASKSLKLSKMQKAGFLYYEDLASMVSKEEADAVTLIVKETVRTFLPDALVTITGGFRRGKPMGHDVDFLITNPGRREDDELLHKVVDLLKKQGLLLYEDIKESTFVEGQLPSHKIDAMDNFQKCFAILKLYQPKVDNSAVGTSKKSDMAEVKDWKAIRVDLVITPFEQYAYALLGWTGSKQFRRDLRRYAEEERGMILDNHALYDLKKRIFLKAGSEEEIFAHLGLDYVEPWERNA

SEQ ID NO: 2865 - DNA, 1182 bp, synthetic construct
  misc_feature 1..1182: note = Variant of terminal deoxynucleotidyl transferase
  source 1..1182: mol_type = other DNA
atgcatcaccaccatcatcatgggggttctggtcatccgccgagcaataccccggagaaggaggtgccgagcgttatcgcccgtccggttagtcagtacgcgtgccagcgcaagaccacgctgaataactacaacaaaaagttcaccgacgcgctggagatcatggccgagaactacaaatttaaagagaacctgatcgcgtgtctggaagccaagcgcgccgcgagtatttttaaatatctgccgttcgaggttaccagcatgaaagacatccaaggtctgccgtgcattaccgaccaggttcgtgacgtgatcgaggagatcatcgaagagggcgagagcagccgtgttaaagaaatcctcaatgacgagcgctacaaggcctttaagcagttcaccagcgtgttcggtgtgggcgtgaaaaccgcggaaaagtggtaccgtatgggcctccgtacggttgaagaagcaaaggccagtaagagtctgaagctgagcaagatgcagaaggcgggcttcctgtattacgaggatctggcgagcatggttagtaaagaagaagccgatgccgttacgctcatcgtgaaggaaacggtgcgtacctttctgccggatgcgctggtgaccatcaccggcggtttccgccgtggcaaacctatgggccacgacgttgactttctgatcacgaacccgggccgcaaagaggatgacgagctgctccacaaagtggttgatctgctcaagaagcaaggtctgctgctgtacgaagacatcaaagagagcacgttcgtggaggggcaactgccaagtcataaaatcgacgccatggacaacttccagaagtgcttcgccattctcaagctgtaccagccgaaggtggataacagtgcggttgggacgagtaagaaaagtgacatggctgaggttaaggattggaaagcgatccgtgtggatctggtgatcacgccattcgagtcttacgcctatgcgctgctcggttggacgggcagcaaacaatttcgtcgcgatctgcgtcgctatgcggaggaagagcgcggcatgatcctcgacaaccatgccctctacgacctgaaaaagcgcatctttctgaaagcgggcagcgaagaagagattttcgcgcatctgggtctggattatgtggagccgtgggaacgcaacgcg

SEQ ID NO: 2866 - protein, 394 aa, synthetic construct
  REGION 1..394: note = Variant of terminal deoxynucleotidyl transferase
MHHHHHHGGSGHPPSNTPEKEVPSVIARPVSQYACQRKTTLNNYNKKFTDALEIMAENYKFKENLIACLEAKRAASIFKYLPFEVTSMKDIQGLPCITDQVRDVIEEIIEEGESSRVKEILNDERYKAFKQFTSVFGVGVKTAEKWYRMGLRTVEEAKASKSLKLSKMQKAGFLYYEDLASMVSKEEADAVTLIVKETVRTFLPDALVTITGGFRRGKPMGHDVDFLITNPGRKEDDELLHKVVDLLKKQGLLLYEDIKESTFVEGQLPSHKIDAMDNFQKCFAILKLYQPKVDNSAVGTSKKSDMAEVKDWKAIRVDLVITPFESYAYALLGWTGSKQFRRDLRRYAEEERGMILDNHALYDLKKRIFLKAGSEEEIFAHLGLDYVEPWERNA

SEQ ID NO: 2867 - DNA, 1182 bp, synthetic construct
  misc_feature 1..1182: note = Variant of terminal deoxynucleotidyl transferase
  source 1..1182: mol_type = other DNA
atgcatcaccaccatcatcatgggggttctggtcatccgccgagcaataccccggagaaggaggtgccgagcgttatcgcccgtccggttagtcagtacgcgtgccagcgcaagaccacgctgaataactacaacaaaaagttcaccgacgcgctggagatcatggccgagaactacaaatttaaagagaacctgatcgcgtgtctggaagccaagcgcgccgcgagtatttttaaatatctgccgttcgaggttaccagcatgaaagacatccaaggtctgccgtgcattaccgaccaggttcgtgacgtgatcgaggagatcatcgaagagggcgagagcagccgtgttaaagaaatcctcaatgacgagcgctacaaggcctttaagcagttcaccagcgtgttcggtgtgggcgtgaaaaccgcggaaaagtggtaccgtatgggcctccgtacggttgaagaagcaaaggccagtaagagtctgaagctgagcaagatgcagaaggcgggcttcctgtattacgaggatctggcgagcatggttagtaaagaagaagccgatgccgttacgctcatcgtgaaggaaacggtgatgacctttctgccggatgcgctggtgaccatcaccggcggtttccgccgtggcaaacctatgggccacgacgttgactttctgatcacgaacccgggccgcaaagaggatgacgagctgctccacaaagtggttgatctgctcaagaagcaaggtctgctgctgtacgaagacatcaaagagagcacgttcgtggaggggcaactgccaagtcataaaatcgacgccatggacaacttccagaagtgcttcgccattctcaagctgtaccagccgaaggtggataacagtgcggttgggacgagtaagaaaagtgacatggctgaggttaaggattggaaagcgatccgtgtggatctggtgatcacgccattcgagcagtacgcctatgcgctgctcggttggacgggcagcaaacaatttcgtcgcgatctgcgtcgctatgcggaggaagagcgcggcatgatcctcgacaaccatgccctctacgacctgaaaaagcgcatctttctgaaagcgggcagcgaagaagagattttcgcgcatctgggtctggattatgtggagccgtgggaacgcaacgcg

SEQ ID NO: 2868 - protein, 394 aa, synthetic construct
  REGION 1..394: note = Variant of terminal deoxynucleotidyl transferase
MHHHHHHGGSGHPPSNTPEKEVPSVIARPVSQYACQRKTTLNNYNKKFTDALEIMAENYKFKENLIACLEAKRAASIFKYLPFEVTSMKDIQGLPCITDQVRDVIEEIIEEGESSRVKEILNDERYKAFKQFTSVFGVGVKTAEKWYRMGLRTVEEAKASKSLKLSKMQKAGFLYYEDLASMVSKEEADAVTLIVKETVMTFLPDALVTITGGFRRGKPMGHDVDFLITNPGRKEDDELLHKVVDLLKKQGLLLYEDIKESTFVEGQLPSHKIDAMDNFQKCFAILKLYQPKVDNSAVGTSKKSDMAEVKDWKAIRVDLVITPFEQYAYALLGWTGSKQFRRDLRRYAEEERGMILDNHALYDLKKRIFLKAGSEEEIFAHLGLDYVEPWERNA

SEQ ID NO: 2869 - DNA, 1182 bp, synthetic construct
  misc_feature 1..1182: note = Variant of terminal deoxynucleotidyl transferase
  source 1..1182: mol_type = other DNA
atgcatcaccaccatcatcatgggggttctggtcatccgccgagcaataccccggagaaggaggtgccgagcgttatcgcccgtccggttagtcagtacgcgtgccagcgcaagaccacgctgaataactacaacaaaaagttcaccgacgcgctggagatcatggccgagaactacaaatttaaagagaacctgatcgcgtgtctggaagccaagcgcgccgcgagtatttttaaatatctgccgttcgaggttaccagcatgaaagacatccaaggtctgccgtgcattaccgaccaggttcgtgacgtgatcgaggagatcatcgaagagggcgagagcagccgtgttaaagaaatcctcaatgacgagcgctacaaggcctttaagcagttcaccagcgtgttcggtgtgggcgtgaaaaccgcggaaaagtggtaccgtatgggcctccgtacggttgaagaagcaaaggccagtaagagtctgaagctgagcaagatgcagaaggcgggcttcctgtattacgaggatctggcgagcatggttagtaaagaagaagccgatgccgttacgctcatcgtgaaggaaacggtgcgtacctttctgccggatgcgctggtgaccatcaccggcggtttccgccgtggcaaacctatgggccacgacgttgactttctgatcacgaacccgggccgcaaagaggatgacgagctgctccacaaagtggttgatctgctcaagaagcaaggtctgctgctgtacgaagacatcaaagagagcacgttcgtggaggggcaactgccaagtcataaaatcgacgccatggacaacttccagaagtgcttcgccattctcaagctgtaccagccgaaggtggataacagtgcggttgggacgagtaagaaaagtgacatggctgaggttaaggattggaaagcgatccgtgtggatctggtgatcacgccagcggagcagtacgcctatgcgctgctcggttggacgggcagcaaacaatttcgtcgcgatctgcgtcgctatgcggaggaagagcgcggcatgatcctcgacaaccatgccctctacgacctgaaaaagcgcatctttctgaaagcgggcagcgaagaagagattttcgcgcatctgggtctggattatgtggagccgtgggaacgcaacgcg

SEQ ID NO: 2870 - protein, 394 aa, synthetic construct
  REGION 1..394: note = Variant of terminal deoxynucleotidyl transferase
MHHHHHHGGSGHPPSNTPEKEVPSVIARPVSQYACQRKTTLNNYNKKFTDALEIMAENYKFKENLIACLEAKRAASIFKYLPFEVTSMKDIQGLPCITDQVRDVIEEIIEEGESSRVKEILNDERYKAFKQFTSVFGVGVKTAEKWYRMGLRTVEEAKASKSLKLSKMQKAGFLYYEDLASMVSKEEADAVTLIVKETVRTFLPDALVTITGGFRRGKPMGHDVDFLITNPGRKEDDELLHKVVDLLKKQGLLLYEDIKESTFVEGQLPSHKIDAMDNFQKCFAILKLYQPKVDNSAVGTSKKSDMAEVKDWKAIRVDLVITPAEQYAYALLGWTGSKQFRRDLRRYAEEERGMILDNHALYDLKKRIFLKAGSEEEIFAHLGLDYVEPWERNA

SEQ ID NO: 2871 - DNA, 1182 bp, synthetic construct
  misc_feature 1..1182: note = Variant of terminal deoxynucleotidyl transferase
  source 1..1182: mol_type = other DNA
atgcatcaccaccatcatcatgggggttctggtcatccgccgagcaataccccggagaaggaggtgccgagcgttatcgcccgtccggttagtcagtacgcgtgccagcgcaagaccacgctgaataactacaacaaaaagttcaccgacgcgctggagatcatggccgagaactacaaatttaaagagaacctgatcgcgtgtctggaagccaagcgcgccgcgagtatttttaaatatctgccgttcgaggttaccagcatgaaagacatccaaggtctgccgtgcattaccgaccaggttcgtgacgtgatcgaggagatcatcgaagagggcgagagcagccgtgttaaagaaatcctcaatgacgagcgctacaaggcctttaagcagttcaccagcgtgttcggtgtgggcgtgaaaaccgcggaaaagtggtaccgtatgggcctccgtacggttgaagaagcaaaggccagtaagagtctgaagctgagcaagatgcagaaggcgggcttcctgtattacgaggatctggcgagcatggttagtaaagaagaagccgatgccgttacgctcatcgtgaaggaaacggtgcgtacctttctgccggatgcgctggtgaccatcaccggcggtttccgccgtggcaaacctatgggccacgacgttgactttctgatcacgaacccgggccgcaaagaggattgtgagctgctccacaaagtggttgatctgctcaagaagcaaggtctgctgctgtacgaagacatcaaagagagcacgttcgtggaggggcaactgccaagtcataaaatcgacgccatggacaacttccagaagtgcttcgccattctcaagctgtaccagccgaaggtggataacagtgcggttgggacgagtaagaaaagtgacatggctgaggttaaggattggaaagcgatccgtgtggatctggtgatcacgccattcgagcagtacgcctatgcgctgctcggttggacgggcagcaaacaatttcgtcgcgatctgcgtcgctatgcggaggaagagcgcggcatgatcctcgacaaccatgccctctacgacctgaaaaagcgcatctttctgaaagcgggcagcgaagaagagattttcgcgcatctgggtctggattatgtggagccgtgggaacgcaacgcg

SEQ ID NO: 2872 - protein, 394 aa, synthetic construct
  REGION 1..394: note = Variant of terminal deoxynucleotidyl transferase
MHHHHHHGGSGHPPSNTPEKEVPSVIARPVSQYACQRKTTLNNYNKKFTDALEIMAENYKFKENLIACLEAKRAASIFKYLPFEVTSMKDIQGLPCITDQVRDVIEEIIEEGESSRVKEILNDERYKAFKQFTSVFGVGVKTAEKWYRMGLRTVEEAKASKSLKLSKMQKAGFLYYEDLASMVSKEEADAVTLIVKETVRTFLPDALVTITGGFRRGKPMGHDVDFLITNPGRKEDCELLHKVVDLLKKQGLLLYEDIKESTFVEGQLPSHKIDAMDNFQKCFAILKLYQPKVDNSAVGTSKKSDMAEVKDWKAIRVDLVITPFEQYAYALLGWTGSKQFRRDLRRYAEEERGMILDNHALYDLKKRIFLKAGSEEEIFAHLGLDYVEPWERNA

SEQ ID NO: 2873 - DNA, 1182 bp, synthetic construct
  misc_feature 1..1182: note = Variant of terminal deoxynucleotidyl transferase
  source 1..1182: mol_type = other DNA
atgcatcaccaccatcatcatgggggttctggtcatccgccgagcaataccccggagaaggaggtgccgagcgttatcgcccgtccggttagtcagtacgcgtgccagcgcaagaccacgctgaataactacaacaaaaagttcaccgacgcgctggagatcatggccgagaactacaaatttaaagagaacctgatcgcgtgtctggaagccaagcgcgccgcgagtatttttaaatatctgccgttcgaggttaccagcatgaaagacatccaaggtctgccgtgcattaccgaccaggttcgtgacgtgatcgaggagatcatcgaagagggcgagagcagccgtgttaaagaaatcctcaatgacgagcgctacaaggcctttaagcagttcaccagcgtgttcggtgtgggcgtgaaaaccgcggaaaagtggtaccgtatgggcctccgtacggttgaagaagcaaaggccagtaagagtctgaagctgagcaagatgcagaaggcgggcttcctgtattacgaggatctggcgagcatggttagtaaagaagaagccgatgccgttacgctcatcgtgaaggaaacggtggctacctttctgccggatgcgctggtgaccatcaccggcggtttccgccgtggcaaacctatgggccacgacgttgactttctgatcacgaacccgggccgcaaagaggatgacgagctgctccacaaagtggttgatctgctcaagaagcaaggtctgctgctgtacgaagacatcaaagagagcacgttcgtggaggggcaactgccaagtcataaaatcgacgccatggacaacttccagaagtgcttcgccattctcaagctgtaccagccgaaggtggataacagtgcggttgggacgagtaagaaaagtgacatggctgaggttaaggattggaaagcgatccgtgtggatctggtgatcacgccattcgagcagtacgcctatgcgctgctcggttggacgggcagcaaacaatttcgtcgcgatctgcgtcgctatgcggaggaagagcgcggcatgatcctcgacaaccatgccctctacgacctgaaaaagcgcatctttctgaaagcgggcagcgaagaagagattttcgcgcatctgggtctggattatgtggagccgtgggaacgcaacgcg

SEQ ID NO: 2874 - protein, 394 aa, synthetic construct
  REGION 1..394: note = Variant of terminal deoxynucleotidyl transferase
MHHHHHHGGSGHPPSNTPEKEVPSVIARPVSQYACQRKTTLNNYNKKFTDALEIMAENYKFKENLIACLEAKRAASIFKYLPFEVTSMKDIQGLPCITDQVRDVIEEIIEEGESSRVKEILNDERYKAFKQFTSVFGVGVKTAEKWYRMGLRTVEEAKASKSLKLSKMQKAGFLYYEDLASMVSKEEADAVTLIVKETVATFLPDALVTITGGFRRGKPMGHDVDFLITNPGRKEDDELLHKVVDLLKKQGLLLYEDIKESTFVEGQLPSHKIDAMDNFQKCFAILKLYQPKVDNSAVGTSKKSDMAEVKDWKAIRVDLVITPFEQYAYALLGWTGSKQFRRDLRRYAEEERGMILDNHALYDLKKRIFLKAGSEEEIFAHLGLDYVEPWERNA

SEQ ID NO: 2875 - DNA, 1182 bp, synthetic construct
  misc_feature 1..1182: note = Variant of terminal deoxynucleotidyl transferase
  source 1..1182: mol_type = other DNA
atgcatcaccaccatcatcatgggggttctggtcatccgccgagcaataccccggagaaggaggtgccgagcgttatcgcccgtccggttagtcagtacgcgtgccagcgcaagaccacgctgaataactacaacaaaaagttcaccgacgcgctggagatcatggccgagaactacaaatttaaagagaacctgatcgcgtgtctggaagccaagcgcgccgcgagtatttttaaatatctgccgttcgaggttaccagcatgaaagacatccaaggtctgccgtgcattaccgaccaggttcgtgacgtgatcgaggagatcatcgaagagggcgagagcagccgtgttaaagaaatcctcaatgacgagcgctacaaggcctttaagcagttcaccagcgtgttcggtgtgggcgtgaaaaccgcggaaaagtggtaccgtatgggcctccgtacggttgaagaagcaaaggccagtaagagtctgaagctgagcaagatgcagaaggcgggcttcctgtattacgaggatctggcgagcatggttagtaaagaagaagccgatgccgttacgctcatcgtgaaggaaacggtgcgtacctttctgccggatgcgctggtgaccatcaccggcggtttccgccgtggcaaacctatgggccacgacgttgactttctgatcacgaacccgggccgcaaagaggatgacgagctgctccacaaagtggttgatctgctcaagaagcaaggtctgctgctgtacgaagacatcaaagagagcacgttcgtggaggggcaactgccaagtcataaaatcgacgccatggacaacttccagaagtgcttcgccattctcaagctgtaccagccgaaggtggataacagtgcggttgggacgagtaagaaaagtgacatggctgaggttaaggattggaaagcgatccgtgtggatctggtgatcacgccattcgagcagtacgcctatgcgctgctcggttggacgggcagcaaacaatttcgtcgcgatctgcgtcgctatgcggaggaagagcgcggcatgatcctcgacaaccatgccctctacgacctgaaaaagcgcatccttctgaaagcgggcagcgaagaagagattttcgcgcatctgggtctggattatgtggagccgtgggaacgcaacgcg

SEQ ID NO: 2876 - protein, 394 aa, synthetic construct
  REGION 1..394: note = Variant of terminal deoxynucleotidyl transferase
MHHHHHHGGSGHPPSNTPEKEVPSVIARPVSQYACQRKTTLNNYNKKFTDALEIMAENYKFKENLIACLEAKRAASIFKYLPFEVTSMKDIQGLPCITDQVRDVIEEIIEEGESSRVKEILNDERYKAFKQFTSVFGVGVKTAEKWYRMGLRTVEEAKASKSLKLSKMQKAGFLYYEDLASMVSKEEADAVTLIVKETVRTFLPDALVTITGGFRRGKPMGHDVDFLITNPGRKEDDELLHKVVDLLKKQGLLLYEDIKESTFVEGQLPSHKIDAMDNFQKCFAILKLYQPKVDNSAVGTSKKSDMAEVKDWKAIRVDLVITPFEQYAYALLGWTGSKQFRRDLRRYAEEERGMILDNHALYDLKKRILLKAGSEEEIFAHLGLDYVEPWERNA

SEQ ID NO: 2877 - DNA, 1182 bp, synthetic construct
  misc_feature 1..1182: note = Variant of terminal deoxynucleotidyl transferase
  source 1..1182: mol_type = other DNA
atgcatcaccaccatcatcatgggggttctggtcatccgccgagcaataccccggagaaggaggtgccgagcgttatcgcccgtccggttagtcagtacgcgtgccagcgcaagaccacgctgaataactacaacaaaaagttcaccgacgcgctggagatcatggccgagaactacaaatttaaagagaacctgatcgcgtgtctggaagccaagcgcgccgcgagtatttttaaatatctgccgttcgaggttaccagcatgaaagacatccaaggtctgccgtgcattaccgaccaggttcgtgacgtgatcgaggagatcatcgaagagggcgagagcagccgtgttaaagaaatcctcaatgacgagcgctacaaggcctttaagcagttcaccagcgtgttcggtgtgggcgtgaaaaccgcggaaaagtggtaccgtatgggcctccgtacggttgaagaagcaaaggccagtaagagtctgaagctgagcaagatgcagaaggcgggcttcctgtattacgaggatctggcgagcatggttagtaaagaagaagccgatgccgttacgctcatcgtgaaggaaacggtgcgtacctttctgccggatgcgctggtgaccatcaccggcggtttccgccgtggcaaacctatgggccacgacgttgactttctgatcacgaacccgggccgcaaagaggatgacgagctgctccacaaagtggttgatctgctcaagaagcaaggtctgctgctgtacgaagacatcaaagagagcacgttcgtggaggggcaactgccaagtcataaaatcgacgccatggacaacttccagaagtgcttcgccattctcaagctgtaccagccgaaggtggataacagtgcggttgggacgagtaagaaaagtgacatggctgaggttaaggattggaaagcgatccgtgtggatctggtgatcacgccattcgagcagtacgcctatgcgctgctcggttggacgggcagcaaacaatttcgtcgcgatctgcgtcgctatgcggaggaagagcgcggcatgatcctcgacaaccatgccctctacgacctgaaaaagcgcatctttctgaaagcgagtagcgaagaagagattttcgcgcatctgggtctggattatgtggagccgtgggaacgcaacgcg

SEQ ID NO: 2878 - protein, 394 aa, synthetic construct
  REGION 1..394: note = Variant of terminal deoxynucleotidyl transferase
MHHHHHHGGSGHPPSNTPEKEVPSVIARPVSQYACQRKTTLNNYNKKFTDALEIMAENYKFKENLIACLEAKRAASIFKYLPFEVTSMKDIQGLPCITDQVRDVIEEIIEEGESSRVKEILNDERYKAFKQFTSVFGVGVKTAEKWYRMGLRTVEEAKASKSLKLSKMQKAGFLYYEDLASMVSKEEADAVTLIVKETVRTFLPDALVTITGGFRRGKPMGHDVDFLITNPGRKEDDELLHKVVDLLKKQGLLLYEDIKESTFVEGQLPSHKIDAMDNFQKCFAILKLYQPKVDNSAVGTSKKSDMAEVKDWKAIRVDLVITPFEQYAYALLGWTGSKQFRRDLRRYAEEERGMILDNHALYDLKKRIFLKASSEEEIFAHLGLDYVEPWERNA

SEQ ID NO: 2879 - DNA, 1182 bp, synthetic construct
  misc_feature 1..1182: note = Variant of terminal deoxynucleotidyl transferase
  source 1..1182: mol_type = other DNA
atgcatcaccaccatcatcatgggggttctggtcatccgccgagcaataccccggagaaggaggtgccgagcgttatcgcccgtccggttagtcagtacgcgtgccagcgcaagaccacgctgaataactacaacaaaaagttcaccgacgcgctggagatcatggccgagaactacaaatttaaagagaacctgatcgcgtgtctggaagccaagcgcgccgcgagtatttttaaatatctgccgttcgaggttaccagcatgaaagacatccaaggtctgccgtgcattaccgaccaggttcgtgacgtgatcgaggagatcatcgaagagggcgagagcagccgtgttaaagaaatcctcaatgacgagcgctacaaggcctttaagcagttcaccagcgtgttcggtgtgggcgtgaaaaccgcggaaaagtggtaccgtatgggcctccgtacggttgaagaagcaaaggccagtaagagtctgaagctgagcaagatgcagaaggcgggcttcctgtattacgaggatctggcgagcatggttagtaaagaagaagccgatgccgttacgctcatcgtgaaggaaacggtgcgtacctttctgccggatgcgctggtgaccatcaccggcggtttccgccgtggcaaacctatgggccacgacgttgactttctgatcacgaacccgggccgcaaagaggatgacgagctgctccacaaagtggttgatctgctcaagaagcaaggtctgctgctgtacgaagacatcaaagagagcacgttcgtggaggggcaactgccaagtcataaaatcgacgccatggacaacttccagaagtgcttcgccattctcaagctgtaccagccgaaggtggataacagtgcggttgggacgagtaagaaaagtgacatggctgaggttaaggattggaaagcgatccgtgtggatctggtgatcacgccattcgagcagtacgcctatgcgctgctcggttggacgggcagcaaacaatttcgtcgcgatctgcgtcgctatgcggaggaagagcgcggcatgatcctcgacaaccatgccctctacgacctgaaaaagcgcatctttctggcggcgggcagcgaagaagagattttcgcgcatctgggtctggattatgtggagccgtgggaacgcaacgcg

SEQ ID NO: 2880 - protein, 394 aa, synthetic construct
  REGION 1..394: note = Variant of terminal deoxynucleotidyl transferase
MHHHHHHGGSGHPPSNTPEKEVPSVIARPVSQYACQRKTTLNNYNKKFTDALEIMAENYKFKENLIACLEAKRAASIFKYLPFEVTSMKDIQGLPCITDQVRDVIEEIIEEGESSRVKEILNDERYKAFKQFTSVFGVGVKTAEKWYRMGLRTVEEAKASKSLKLSKMQKAGFLYYEDLASMVSKEEADAVTLIVKETVRTFLPDALVTITGGFRRGKPMGHDVDFLITNPGRKEDDELLHKVVDLLKKQGLLLYEDIKESTFVEGQLPSHKIDAMDNFQKCFAILKLYQPKVDNSAVGTSKKSDMAEVKDWKAIRVDLVITPFEQYAYALLGWTGSKQFRRDLRRYAEEERGMILDNHALYDLKKRIFLAAGSEEEIFAHLGLDYVEPWERNA

SEQ ID NO: 2881 - DNA, 1182 bp, synthetic construct
  misc_feature 1..1182: note = Variant of terminal deoxynucleotidyl transferase
  source 1..1182: mol_type = other DNA
atgcatcaccaccatcatcatgggggttctggtcatccgccgagcaataccccggagaaggaggtgccgagcgttatcgcccgtccggttagtcagtacgcgtgccagcgcaagaccacgctgaataactacaacaaaaagttcaccgacgcgctggagatcatggccgagaactacaaatttaaagagaacctgatcgcgtgtctggaagccaagcgcgccgcgagtatttttaaatatctgccgttcgaggttaccagcatgaaagacatccaaggtctgccgtgcattaccgaccaggttcgtgacgtgatcgaggagatcatcgaagagggcgagagcagccgtgttaaagaaatcctcaatgacgagcgctacaaggcctttaagcagttcaccagcgtgttcggtgtgggcgtgaaaaccgcggaaaagtggtaccgtatgggcctccgtacggttgaagaagcaaaggccagtaagagtctgaagctgagcaagatgcagaaggcgggcttcctgtattacgaggatctggcgagcatggttagtaaagaagaagccgatgccgttacgctcatcgtgaaggaaacggtgcgtacctttctgccggatgcgctggtgaccatcaccggcggtttccgccgtggcaaacctatgggccacgacgttgactttctgatcacgaacccgggccgcaaagaggatgacgagctgctccacaaagtggttgatctgctcaagaagcaaggtctgctgctgtacgaagacatcaaagagagcacgttcgtggaggggcaactgccaagtcataaaatcgacgccatggacaacttccagaagtgcttcgccattctcaagctgtaccagccgaaggtggataacagtgcggttgggacgagtaagaaaagtgacatggctgaggttaaggattggaaagcgatccgtgtggatctggtgatcacgccaacggagcagtacgcctatgcgctgctcggttggacgggcagcaaacaatttcgtcgcgatctgcgtcgctatgcggaggaagagcgcggcatgatcctcgacaaccatgccctctacgacctgaaaaagcgcatctttctgaaagcgggcagcgaagaagagattttcgcgcatctgggtctggattatgtggagccgtgggaacgcaacgcg

SEQ ID NO: 2882 - protein, 394 aa, synthetic construct
  REGION 1..394: note = Variant of terminal deoxynucleotidyl transferase
MHHHHHHGGSGHPPSNTPEKEVPSVIARPVSQYACQRKTTLNNYNKKFTDALEIMAENYKFKENLIACLEAKRAASIFKYLPFEVTSMKDIQGLPCITDQVRDVIEEIIEEGESSRVKEILNDERYKAFKQFTSVFGVGVKTAEKWYRMGLRTVEEAKASKSLKLSKMQKAGFLYYEDLASMVSKEEADAVTLIVKETVRTFLPDALVTITGGFRRGKPMGHDVDFLITNPGRKEDDELLHKVVDLLKKQGLLLYEDIKESTFVEGQLPSHKIDAMDNFQKCFAILKLYQPKVDNSAVGTSKKSDMAEVKDWKAIRVDLVITPTEQYAYALLGWTGSKQFRRDLRRYAEEERGMILDNHALYDLKKRIFLKAGSEEEIFAHLGLDYVEPWERNA

SEQ ID NO: 2883 - DNA, 1182 bp, synthetic construct
  misc_feature 1..1182: note = Variant of terminal deoxynucleotidyl transferase
  source 1..1182: mol_type = other DNA
atgcatcaccaccatcatcatgggggttctggtcatccgccgagcaataccccggagaaggaggtgccgagcgttatcgcccgtccggttagtcagtacgcgtgccagcgcaagaccacgctgaataactacaacaaaaagttcaccgacgcgctggagatcatggccgagaactacaaatttaaagagaacctgatcgcgtgtctggaagccaagcgcgccgcgagtatttttaaatatctgccgttcgaggttaccagcatgaaagacatccaaggtctgccgtgcattaccgaccaggttcgtgacgtgatcgaggagatcatcgaagagggcgagagcagccgtgttaaagaaatcctcaatgacgagcgctacaaggcctttaagcagttcaccagcgtgttcggtgtgggcgtgaaaaccgcggaaaagtggtaccgtatgggcctccgtacggttgaagaagcaaaggccagtaagagtctgaagctgagcaagatgcagaaggcgggcttcctgtattacgaggatctggcgagcatggttagtaaagaagaagccgatgccgttacgctcatcgtgaaggaaacggtgcgtacctttctgccggatgcgctggtgaccatcaccggcggtttccgccgtggcaaacctatgggccacgacgttgactttctgatcacgaacccgggccgcaaagaggatacggagctgctccacaaagtggttgatctgctcaagaagcaaggtctgctgctgtacgaagacatcaaagagagcacgttcgtggaggggcaactgccaagtcataaaatcgacgccatggacaacttccagaagtgcttcgccattctcaagctgtaccagccgaaggtggataacagtgcggttgggacgagtaagaaaagtgacatggctgaggttaaggattggaaagcgatccgtgtggatctggtgatcacgccattcgagcagtacgcctatgcgctgctcggttggacgggcagcaaacaatttcgtcgcgatctgcgtcgctatgcggaggaagagcgcggcatgatcctcgacaaccatgccctctacgacctgaaaaagcgcatctttctgaaagcgggcagcgaagaagagattttcgcgcatctgggtctggattatgtggagccgtgggaacgcaacgcg

SEQ ID NO: 2884 - protein, 394 aa, synthetic construct
  REGION 1..394: note = Variant of terminal deoxynucleotidyl transferase
MHHHHHHGGSGHPPSNTPEKEVPSVIARPVSQYACQRKTTLNNYNKKFTDALEIMAENYKFKENLIACLEAKRAASIFKYLPFEVTSMKDIQGLPCITDQVRDVIEEIIEEGESSRVKEILNDERYKAFKQFTSVFGVGVKTAEKWYRMGLRTVEEAKASKSLKLSKMQKAGFLYYEDLASMVSKEEADAVTLIVKETVRTFLPDALVTITGGFRRGKPMGHDVDFLITNPGRKEDTELLHKVVDLLKKQGLLLYEDIKESTFVEGQLPSHKIDAMDNFQKCFAILKLYQPKVDNSAVGTSKKSDMAEVKDWKAIRVDLVITPFEQYAYALLGWTGSKQFRRDLRRYAEEERGMILDNHALYDLKKRIFLKAGSEEEIFAHLGLDYVEPWERNA

SEQ ID NO: 2885 - DNA, 1182 bp, synthetic construct
  misc_feature 1..1182: note = Variant of terminal deoxynucleotidyl transferase
  source 1..1182: mol_type = other DNA
atgcatcaccaccatcatcatgggggttctggtcatccgccgagcaataccccggagaaggaggtgccgagcgttatcgcccgtccggttagtcagtacgcgtgccagcgcaagaccacgctgaataactacaacaaaaagttcaccgacgcgctggagatcatggccgagaactacaaatttaaagagaacctgatcgcgtgtctggaagccaagcgcgccgcgagtatttttaaatatctgccgttcgaggttaccagcatgaaagacatccaaggtctgccgtgcattaccgaccaggttcgtgacgtgatcgaggagatcatcgaagagggcgagagcagccgtgttaaagaaatcctcaatgacgagcgctacaaggcctttaagcagttcaccagcgtgttcggtgtgggcgtgaaaaccgcggaaaagtggtaccgtatgggcctccgtacggttgaagaagcaaaggccagtaagagtctgaagctgagcaagatgcagaaggcgggcttcctgtattacgaggatctggcgagcatggttagtaaagaagaagccgatgccgttacgctcatcgtgaaggaaacggtgcgtacctttctgccggatgcgctggtgaccatcaccggcggtttccgccgtggcaaacctatgggccacgacgttgactttctgatcacgaacccgggccgcaaagaggatgacgagctgctccacaaagtggttgatctgctcaagaagcaaggtctgctgctgtacgaagacatcaaagagagcacgttcgtggaggggcaactgccaagtcataaaatcgacgccatggacaacttccagaagtgcttcgccattctcaagctgtaccagccgaaggtggataacagtgcggttgggacgagtaagaaaagtgacatggctgaggttaaggattggaaagcgatccgtgtggatctggtgatcacgccattcgagcagtacgcctatgcgctgctcggttggacgggcagcaaacaatttcgtcgcgatctgcgtcgctatgcggaggaagagcgcggcatgatcctcgacaaccatgccctctacgacctgaaaaagcgcatctttctgaaagcgggcagcgaagaagagattttcgcgcatctgggtctggattatgtgctgccgtgggaacgcaacgcg

SEQ ID NO: 2886 - protein, 394 aa, synthetic construct
  REGION 1..394: note = Variant of terminal deoxynucleotidyl transferase
MHHHHHHGGSGHPPSNTPEKEVPSVIARPVSQYACQRKTTLNNYNKKFTDALEIMAENYKFKENLIACLEAKRAASIFKYLPFEVTSMKDIQGLPCITDQVRDVIEEIIEEGESSRVKEILNDERYKAFKQFTSVFGVGVKTAEKWYRMGLRTVEEAKASKSLKLSKMQKAGFLYYEDLASMVSKEEADAVTLIVKETVRTFLPDALVTITGGFRRGKPMGHDVDFLITNPGRKEDDELLHKVVDLLKKQGLLLYEDIKESTFVEGQLPSHKIDAMDNFQKCFAILKLYQPKVDNSAVGTSKKSDMAEVKDWKAIRVDLVITPFEQYAYALLGWTGSKQFRRDLRRYAEEERGMILDNHALYDLKKRIFLKAGSEEEIFAHLGLDYVLPWERNA

SEQ ID NO: 2887 - DNA, 1182 bp, synthetic construct
  misc_feature 1..1182: note = Variant of terminal deoxynucleotidyl transferase
  source 1..1182: mol_type = other DNA
atgcatcaccaccatcatcatgggggttctggtcatccgccgagcaataccccggagaaggaggtgccgagcgttatcgcccgtccggttagtcagtacgcgtgccagcgcaagaccacgctgaataactacaacaaaaagttcaccgacgcgctggagatcatggccgagaactacaaatttaaagagaacctgatcgcgtgtctggaagccaagcgcgccgcgagtatttttaaatatctgccgttcgaggttaccagcatgaaagacatccaaggtctgccgtgcattaccgaccaggttcgtgacgtgatcgaggagatcatcgaagagggcgagagcagccgtgttaaagaaatcctcaatgacgagcgctacaaggcctttaagcagttcaccagcgtgttcggtgtgggcgtgaaaaccgcggaaaagtggtaccgtatgggcctccgtacggttgaagaagcaaaggccagtaagagtctgaagctgagcaagatgcagaaggcgggcttcctgtattacgaggatctggcgagcatggttagtaaagaagaagccgatgccgttacgctcatcgtgaaggaaacggtgcgtacctttctgccggatgcgctggtgaccatcaccggcggtttccgccgtggcaaacctatgggccacgacgttgactttctgatcacgaacccgggccgcaaagaggatgacgagctgctccacaaagtggttgatctgctcaagaagcaaggtctgctgctgtacgaagacatcaaagagagcacgttcgtggaggggcaactgccaagtcataaaatcgacgccatggacaacttccagaagtgcttcgccattctcaagctgtaccagccgaaggtggataacagtgcggttgggacgagtaagaaaagtgacatggctgaggttaaggattggaaagcgatccgtgtggatctggtgatcacgccattcgagcagtacgcctatgcgctgctcggttggacgggcagcaaacaatttcgtcgcgatctgcgtcgctatgcggaggaagagcgcggcatgatcctcgacaaccatgccctctacgacctgaaaaagcgcatctatctgaaagcgggcagcgaagaagagattttcgcgcatctgggtctggattatgtggagccgtgggaacgcaacgcg

SEQ ID NO: 2888 - protein, 394 aa, synthetic construct
  REGION 1..394: note = Variant of terminal deoxynucleotidyl transferase
MHHHHHHGGSGHPPSNTPEKEVPSVIARPVSQYACQRKTTLNNYNKKFTDALEIMAENYKFKENLIACLEAKRAASIFKYLPFEVTSMKDIQGLPCITDQVRDVIEEIIEEGESSRVKEILNDERYKAFKQFTSVFGVGVKTAEKWYRMGLRTVEEAKASKSLKLSKMQKAGFLYYEDLASMVSKEEADAVTLIVKETVRTFLPDALVTITGGFRRGKPMGHDVDFLITNPGRKEDDELLHKVVDLLKKQGLLLYEDIKESTFVEGQLPSHKIDAMDNFQKCFAILKLYQPKVDNSAVGTSKKSDMAEVKDWKAIRVDLVITPFEQYAYALLGWTGSKQFRRDLRRYAEEERGMILDNHALYDLKKRIYLKAGSEEEIFAHLGLDYVEPWERNA

SEQ ID NO: 2889 - DNA, 1182 bp, synthetic construct
  misc_feature 1..1182: note = Variant of terminal deoxynucleotidyl transferase
  source 1..1182: mol_type = other DNA
atgcatcaccaccatcatcatgggggttctggtcatccgccgagcaataccccggagaaggaggtgccgagcgttatcgcccgtccggttagtcagtacgcgtgccagcgcaagaccacgctgaataactacaacaaaaagttcaccgacgcgctggagatcatggccgagaactacaaatttaaagagaacctgatcgcgtgtctggaagccaagcgcgccgcgagtatttttaaatatctgccgttcgaggttaccagcatgaaagacatccaaggtctgccgtgcattaccgaccaggttcgtgacgtgatcgaggagatcatcgaagagggcgagagcagccgtgttaaagaaatcctcaatgacgagcgctacaaggcctttaagcagttcaccagcgtgttcggtgtgggcgtgaaaaccgcggaaaagtggtaccgtatgggcctccgtacggttgaagaagcaaaggccagtaagagtctgaagctgagcaagatgcagaaggcgggcttcctgtattacgaggatctggcgagcatggttagtaaagaagaagccgatgccgttacgctcatcgtgaaggaaacggtgcgtacctttctgccggatgcgctggtgaccatcaccggcggtttccgccgtggcaaacctatgggccacgacgttgactttctgatcacgactccgggccgcaaagaggatgacgagctgctccacaaagtggttgatctgctcaagaagcaaggtctgctgctgtacgaagacatcaaagagagcacgttcgtggaggggcaactgccaagtcataaaatcgacgccatggacaacttccagaagtgcttcgccattctcaagctgtaccagccgaaggtggataacagtgcggttgggacgagtaagaaaagtgacatggctgaggttaaggattggaaagcgatccgtgtggatctggtgatcacgccattcgagcagtacgcctatgcgctgctcggttggacgggcagcaaacaatttcgtcgcgatctgcgtcgctatgcggaggaagagcgcggcatgatcctcgacaaccatgccctctacgacctgaaaaagcgcatctttctgaaagcgggcagcgaagaagagatcttcgcgcatctgggtctggattatgtggagccgtgggaacgcaacgcg

SEQ ID NO: 2890 - protein, 394 aa, synthetic construct
  REGION 1..394: note = Variant of terminal deoxynucleotidyl transferase
MHHHHHHGGSGHPPSNTPEKEVPSVIARPVSQYACQRKTTLNNYNKKFTDALEIMAENYKFKENLIACLEAKRAASIFKYLPFEVTSMKDIQGLPCITDQVRDVIEEIIEEGESSRVKEILNDERYKAFKQFTSVFGVGVKTAEKWYRMGLRTVEEAKASKSLKLSKMQKAGFLYYEDLASMVSKEEADAVTLIVKETVRTFLPDALVTITGGFRRGKPMGHDVDFLITTPGRKEDDELLHKVVDLLKKQGLLLYEDIKESTFVEGQLPSHKIDAMDNFQKCFAILKLYQPKVDNSAVGTSKKSDMAEVKDWKAIRVDLVITPFEQYAYALLGWTGSKQFRRDLRRYAEEERGMILDNHALYDLKKRIFLKAGSEEEIFAHLGLDYVEPWERNA

SEQ ID NO: 2891 - DNA, 1182 bp, synthetic construct
  misc_feature 1..1182: note = Variant of terminal deoxynucleotidyl transferase
  source 1..1182: mol_type = other DNA
atgcatcaccaccatcatcatgggggttctggtcatccgccgagcaataccccggagaaggaggtgccgagcgttatcgcccgtccggttagtcagtacgcgtgccagcgcaagaccacgctgaataactacaacaaaaagttcaccgacgcgctggagatcatggccgagaactacaaatttaaagagaacctgatcgcgtgtctggaagccaagcgcgccgcgagtatttttaaatatctgccgttcgaggttaccagcatgaaagacatccaaggtctgccgtgcattaccgaccaggttcgtgacgtgatcgaggagatcatcgaagagggcgagagcagccgtgttaaagaaatcctcaatgacgagcgctacaaggcctttaagcagttcaccagcgtgttcggtgtgggcgtgaaaaccgcggaaaagtggtaccgtatgggcctccgtacggttgaagaagcaaaggccagtaagagtctgaagctgagcaagatgcagaaggcgggcttcctgtattacgaggatctggcgagcatggttagtaaagaagaagccgatgccgttacgctcatcgtgaaggaaacggtgcgtacctttctgccggatgcgctggtgaccatcaccggcggtttccgccgtggcaaacctatgggccacgacgttgacatgctgatcacgaacccgggccgcaaagaggatgacgagctgctccacaaagtggttgatctgctcaagaagcaaggtctgctgctgtacgaagacatcaaagagagcacgttcgtggaggggcaactgccaagtcataaaatcgacgccatggacaacttccagaagtgcttcgccattctcaagctgtaccagccgaaggtggataacagtgcggttgggacgagtaagaaaagtgacatggctgaggttaaggattggaaagcgatccgtgtggatctggtgatcacgccattcgagcagtacgcctatgcgctgctcggttggacgggcagcaaacaatttcgtcgcgatctgcgtcgctatgcggaggaagagcgcggcatgatcctcgacaaccatgccctctacgacctgaaaaagcgcatctttctgaaagcgggcagcgaagaagagattttcgcgcatctgggtctggattatgtggagccgtgggaacgcaacgcg

SEQ ID NO: 2892 - protein, 394 aa, synthetic construct
  REGION 1..394: note = Variant of terminal deoxynucleotidyl transferase
MHHHHHHGGSGHPPSNTPEKEVPSVIARPVSQYACQRKTTLNNYNKKFTDALEIMAENYKFKENLIACLEAKRAASIFKYLPFEVTSMKDIQGLPCITDQVRDVIEEIIEEGESSRVKEILNDERYKAFKQFTSVFGVGVKTAEKWYRMGLRTVEEAKASKSLKLSKMQKAGFLYYEDLASMVSKEEADAVTLIVKETVRTFLPDALVTITGGFRRGKPMGHDVDMLITNPGRKEDDELLHKVVDLLKKQGLLLYEDIKESTFVEGQLPSHKIDAMDNFQKCFAILKLYQPKVDNSAVGTSKKSDMAEVKDWKAIRVDLVITPFEQYAYALLGWTGSKQFRRDLRRYAEEERGMILDNHALYDLKKRIFLKAGSEEEIFAHLGLDYVEPWERNA

SEQ ID NO: 2893 - DNA, 1182 bp, synthetic construct
  misc_feature 1..1182: note = Variant of terminal deoxynucleotidyl transferase
  source 1..1182: mol_type = other DNA
atgcatcaccaccatcatcatgggggttctggtcatccgccgagcaataccccggagaaggaggtgccgagcgttatcgcccgtccggttagtcagtacgcgtgccagcgcaagaccacgctgaataactacaacaaaaagttcaccgacgcgctggagatcatggccgagaactacaaatttaaagagaacctgatcgcgtgtctggaagccaagcgcgccgcgagtatttttaaatatctgccgttcgaggttaccagcatgaaagacatccaaggtctgccgtgcattaccgaccaggttcgtgacgtgatcgaggagatcatcgaagagggcgagagcagccgtgttaaagaaatcctcaatgacgagcgctacaaggcctttaagcagttcaccagcgtgttcggtgtgggcgtgaaaaccgcggaaaagtggtaccgtatgggcctccgtacggttgaagaagcaaaggccagtaagagtctgaagctgagcaagatgcagaaggcgggcttcctgtattacgaggatctggcgagcatggttagtaaagaagaagccgatgccgttacgctcatcgtgaaggaaacggtgcgtaccgtgctgccggatgcgctggtgaccatcaccggcggtttccgccgtggcaaacctatgggccacgacgttgactttctgatcacgaacccgggccgcaaagaggatgacgagctgctccacaaagtggttgatctgctcaagaagcaaggtctgctgctgtacgaagacatcaaagagagcacgttcgtggaggggcaactgccaagtcataaaatcgacgccatggacaacttccagaagtgcttcgccattctcaagctgtaccagccgaaggtggataacagtgcggttgggacgagtaagaaaagtgacatggctgaggttaaggattggaaagcgatccgtgtggatctggtgatcacgccattcgagcagtacgcctatgcgctgctcggttggacgggcagcaaacaatttcgtcgcgatctgcgtcgctatgcggaggaagagcgcggcatgatcctcgacaaccatgccctctacgacctgaaaaagcgcatctttctgaaagcgggcagcgaagaagagattttcgcgcatctgggtctggattatgtggagccgtgggaacgcaacgcg

SEQ ID NO: 2894 - protein, 394 aa, synthetic construct
  REGION 1..394: note = Variant of terminal deoxynucleotidyl transferase
MHHHHHHGGSGHPPSNTPEKEVPSVIARPVSQYACQRKTTLNNYNKKFTDALEIMAENYKFKENLIACLEAKRAASIFKYLPFEVTSMKDIQGLPCITDQVRDVIEEIIEEGESSRVKEILNDERYKAFKQFTSVFGVGVKTAEKWYRMGLRTVEEAKASKSLKLSKMQKAGFLYYEDLASMVSKEEADAVTLIVKETVRTVLPDALVTITGGFRRGKPMGHDVDFLITNPGRKEDDELLHKVVDLLKKQGLLLYEDIKESTFVEGQLPSHKIDAMDNFQKCFAILKLYQPKVDNSAVGTSKKSDMAEVKDWKAIRVDLVITPFEQYAYALLGWTGSKQFRRDLRRYAEEERGMILDNHALYDLKKRIFLKAGSEEEIFAHLGLDYVEPWERNA

SEQ ID NO: 2895 - DNA, 1182 bp, synthetic construct
  misc_feature 1..1182: note = Variant of terminal deoxynucleotidyl transferase
  source 1..1182: mol_type = other DNA
atgcatcaccaccatcatcatgggggttctggtcatccgccgagcaataccccggagaaggaggtgccgagcgttatcgcccgtccggttagtcagtacgcgtgccagcgcaagaccacgctgaataactacaacaaaaagttcaccgacgcgctggagatcatggccgagaactacaaatttaaagagaacctgatcgcgtgtctggaagccaagcgcgccgcgagtatttttaaatatctgccgttcgaggttaccagcatgaaagacatccaaggtctgccgtgcattaccgaccaggttcgtgacgtgatcgaggagatcatcgaagagggcgagagcagccgtgttaaagaaatcctcaatgacgagcgctacaaggcctttaagcagttcaccagcgtgttcggtgtgggcgtgaaaaccgcggaaaagtggtaccgtatgggcctccgtacggttgaagaagcaaaggccagtaagagtctgaagctgagcaagatgcagaaggcgggcttcctgtattacgaggatctggcgagcatggttagtaaagaagaagccgatgccgttacgctcatcgtgaaggaaacggtgcgtacctttctgccggatgcgctggtgaccatcaccggcggtttccgccgtggcaaacctatgggccacgacgttgactttctgatcacgaacccgggccgcaaagagcttgacgagctgctccacaaagtggttgatctgctcaagaagcaaggtctgctgctgtacgaagacatcaaagagagcacgttcgtggaggggcaactgccaagtcataaaatcgacgccatggacaacttccagaagtgcttcgccattctcaagctgtaccagccgaaggtggataacagtgcggttgggacgagtaagaaaagtgacatggctgaggttaaggattggaaagcgatccgtgtggatctggtgatcacgccattcgagcagtacgcctatgcgctgctcggttggacgggcagcaaacaatttcgtcgcgatctgcgtcgctatgcggaggaagagcgcggcatgatcctcgacaaccatgccctctacgacctgaaaaagcgcatctttctgaaagcgggcagcgaagaagagattttcgcgcatctgggtctggattatgtggagccgtgggaacgcaacgcg

SEQ ID NO: 2896 - protein, 394 aa, synthetic construct
  REGION 1..394: note = Variant of terminal deoxynucleotidyl transferase
MHHHHHHGGSGHPPSNTPEKEVPSVIARPVSQYACQRKTTLNNYNKKFTDALEIMAENYKFKENLIACLEAKRAASIFKYLPFEVTSMKDIQGLPCITDQVRDVIEEIIEEGESSRVKEILNDERYKAFKQFTSVFGVGVKTAEKWYRMGLRTVEEAKASKSLKLSKMQKAGFLYYEDLASMVSKEEADAVTLIVKETVRTFLPDALVTITGGFRRGKPMGHDVDFLITNPGRKELDELLHKVVDLLKKQGLLLYEDIKESTFVEGQLPSHKIDAMDNFQKCFAILKLYQPKVDNSAVGTSKKSDMAEVKDWKAIRVDLVITPFEQYAYALLGWTGSKQFRRDLRRYAEEERGMILDNHALYDLKKRIFLKAGSEEEIFAHLGLDYVEPWERNA

SEQ ID NO: 2897 - DNA, 1182 bp, synthetic construct
  misc_feature 1..1182: note = Variant of terminal deoxynucleotidyl transferase
  source 1..1182: mol_type = other DNA
atgcatcaccaccatcatcatgggggttctggtcatccgccgagcaataccccggagaaggaggtgccgagcgttatcgcccgtccggttagtcagtacgcgtgccagcgcaagaccacgctgaataactacaacaaaaagttcaccgacgcgctggagatcatggccgagaactacaaatttaaagagaacctgatcgcgtgtctggaagccaagcgcgccgcgagtatttttaaatatctgccgttcgaggttaccagcatgaaagacatccaaggtctgccgtgcattaccgaccaggttcgtgacgtgatcgaggagatcatcgaagagggcgagagcagccgtgttaaagaaatcctcaatgacgagcgctacaaggcctttaagcagttcaccagcgtgttcggtgtgggcgtgaaaaccgcggaaaagtggtaccgtatgggcctccgtacggttgaagaagcaaaggccagtaagagtctgaagctgagcaagatgcagaaggcgggcttcctgtattacgaggatctggcgagcatggttagtaaagaagaagccgatgccgttacgctcatcgtgaaggaaacggtgcgtacctttctgccggatgcgctggtgaccatcaccggcggtttccgccgtggcaaacctatgggccacgacgttgactttctgatcacgaacccgggccgcaaagaggatgacgagctgctccacaaagtggttgatctgctcaagaagcaaggtctgctgctgtacgaagacatcaaagagagcacgttcgtggaggggcaactgccaagtcataaaatcgacgccatggacaacttccagaagtgcttcgccattctcaagctgtaccagccgaaggtggataacagtgcggttgggacgagtaagaaaagtgacatggctgaggttaaggattggaaagcgatccgtgtggatctggtgatcacgccattcgagcagtacgcctatgcgctgctcggttggacgggcagcaaacaatttcgtcgcgatctgcgtcgctatgcggaggaagagcgcggcatgatcctcgacaaccatgccctctacgacctgaaaaagcgcatctttctgaaagcgggcagcgaagaagagattttcgcgcatctgggtctggattatgtggcgccgtgggaacgcaacgcg

SEQ ID NO: 2898 - protein, 394 aa, synthetic construct
  REGION 1..394: note = Variant of terminal deoxynucleotidyl transferase
MHHHHHHGGSGHPPSNTPEKEVPSVIARPVSQYACQRKTTLNNYNKKFTDALEIMAENYKFKENLIACLEAKRAASIFKYLPFEVTSMKDIQGLPCITDQVRDVIEEIIEEGESSRVKEILNDERYKAFKQFTSVFGVGVKTAEKWYRMGLRTVEEAKASKSLKLSKMQKAGFLYYEDLASMVSKEEADAVTLIVKETVRTFLPDALVTITGGFRRGKPMGHDVDFLITNPGRKEDDELLHKVVDLLKKQGLLLYEDIKESTFVEGQLPSHKIDAMDNFQKCFAILKLYQPKVDNSAVGTSKKSDMAEVKDWKAIRVDLVITPFEQYAYALLGWTGSKQFRRDLRRYAEEERGMILDNHALYDLKKRIFLKAGSEEEIFAHLGLDYVAPWERNA

SEQ ID NO: 2899 - DNA, 1182 bp, synthetic construct
  misc_feature 1..1182: note = Variant of terminal deoxynucleotidyl transferase
  source 1..1182: mol_type = other DNA
atgcatcaccaccatcatcatgggggttctggtcatccgccgagcaataccccggagaaggaggtgccgagcgttatcgcccgtccggttagtcagtacgcgtgccagcgcaagaccacgctgaataactacaacaaaaagttcaccgacgcgctggagatcatggccgagaactacaaatttaaagagaacctgatcgcgtgtctggaagccaagcgcgccgcgagtatttttaaatatctgccgttcgaggttaccagcatgaaagacatccaaggtctgccgtgcattaccgaccaggttcgtgacgtgatcgaggagatcatcgaagagggcgagagcagccgtgttaaagaaatcctcaatgacgagcgctacaaggcctttaagcagttcaccagcgtgttcggtgtgggcgtgaaaaccgcggaaaagtggtaccgtatgggcctccgtacggttgaagaagcaaaggccagtaagagtctgaagctgagcaagatgcagaaggcgggcttcctgtattacgaggatctggcgagcatggttagtaaagaagaagccgatgccgttacgctcatcgtgaaggaaacggtgcgtacctttctgccggatgcgctggtgaccatcaccggcggtttccgccgtggcaaacctatgggccacgacgttgactttctgatcacgaacccgggccgcaaagaggatgacgagctgctccacaaagtggttgatctgctcaagaagcaaggtctgctgctgtacgaagacatcaaagagagcacgttcgtggaggggcaactgccaagtcataaaatcgacgccatggacaacttccagaagtgcttcgccattctcaagctgtaccagccgaaggtggataacagtgcggttgggacgagtaagaaaagtgacatggctgaggttaaggattggaaagcgatccgtgtggatctggtgatcacgccattcgagcagtacgcctatgcgctgctcggttggacgggcagcaaacaatttcgtcgcgatctgcgtcgctatgcggaggaagagcgcggcatgatcctcgacaaccatgccctctacgacctgaaaaagcgcatctttctgaaagcgggcaatgaagaagagattttcgcgcatctgggtctggattatgtggagccgtgggaacgcaacgcg

SEQ ID NO: 2900 - protein, 394 aa, synthetic construct
  REGION 1..394: note = Variant of terminal deoxynucleotidyl transferase
MHHHHHHGGSGHPPSNTPEKEVPSVIARPVSQYACQRKTTLNNYNKKFTDALEIMAENYKFKENLIACLEAKRAASIFKYLPFEVTSMKDIQGLPCITDQVRDVIEEIIEEGESSRVKEILNDERYKAFKQFTSVFGVGVKTAEKWYRMGLRTVEEAKASKSLKLSKMQKAGFLYYEDLASMVSKEEADAVTLIVKETVRTFLPDALVTITGGFRRGKPMGHDVDFLITNPGRKEDDELLHKVVDLLKKQGLLLYEDIKESTFVEGQLPSHKIDAMDNFQKCFAILKLYQPKVDNSAVGTSKKSDMAEVKDWKAIRVDLVITPFEQYAYALLGWTGSKQFRRDLRRYAEEERGMILDNHALYDLKKRIFLKAGNEEEIFAHLGLDYVEPWERNA

SEQ ID NO: 2901 - DNA, 1182 bp, synthetic construct
  misc_feature 1..1182: note = Variant of terminal deoxynucleotidyl transferase
  source 1..1182: mol_type = other DNA
atgcatcaccaccatcatcatgggggttctggtcatccgccgagcaataccccggagaaggaggtgccgagcgttatcgcccgtccggttagtcagtacgcgtgccagcgcaagaccacgctgaataactacaacaaaaagttcaccgacgcgctggagatcatggccgagaactacaaatttaaagagaacctgatcgcgtgtctggaagccaagcgcgccgcgagtatttttaaatatctgccgttcgaggttaccagcatgaaagacatccaaggtctgccgtgcattaccgaccaggttcgtgacgtgatcgaggagatcatcgaagagggcgagagcagccgtgttaaagaaatcctcaatgacgagcgctacaaggcctttaagcagttcaccagcgtgttcggtgtgggcgtgaaaaccgcggaaaagtggtaccgtatgggcctccgtacggttgaagaagcaaaggccagtaagagtctgaagctgagcaagatgcagaaggcgggcttcctgtattacgaggatctggcgagcatggttagtaaagaagaagccgatgccgttacgctcatcgtgaaggaaacggtgcgtacctttctgccggatgcgctggtgaccatcaccggcggtttccgccgtggcaaacctatgggccacgacgttgactttctgatcacgaacccgggccgcaaagaggatgacgagctgctccacaaagtggttgatctgctcaagaagcaaggtctgctgctgtacgaagacatcaaagagagcacgttcgtggaggggcaactgccaagtcataaaatcgacgccatggacaacttccagaagtgcttcgccattctcaagctgtaccagccgaaggtggataacagtgcggttgggacgagtaagaaaagtgacatggctgaggttaaggattggaaagcgatccgtgtggatctggtgatcacgccattcgagcagtacgcctatgcgctgctcggttggacgggcagcaaacaatttcgtcgcgatctgcgtcgctatgcggaggaagagttgggcatgatcctcgacaaccatgccctctacgacctgaaaaagcgcatctttctgaaagcgggcagcgaagaagagattttcgcgcatctgggtctggattatgtggagccgtgggaacgcaacgcg

SEQ ID NO: 2902 - protein, 394 aa, synthetic construct
  REGION 1..394: note = Variant of terminal deoxynucleotidyl transferase
MHHHHHHGGSGHPPSNTPEKEVPSVIARPVSQYACQRKTTLNNYNKKFTDALEIMAENYKFKENLIACLEAKRAASIFKYLPFEVTSMKDIQGLPCITDQVRDVIEEIIEEGESSRVKEILNDERYKAFKQFTSVFGVGVKTAEKWYRMGLRTVEEAKASKSLKLSKMQKAGFLYYEDLASMVSKEEADAVTLIVKETVRTFLPDALVTITGGFRRGKPMGHDVDFLITNPGRKEDDELLHKVVDLLKKQGLLLYEDIKESTFVEGQLPSHKIDAMDNFQKCFAILKLYQPKVDNSAVGTSKKSDMAEVKDWKAIRVDLVITPFEQYAYALLGWTGSKQFRRDLRRYAEEELGMILDNHALYDLKKRIFLKAGSEEEIFAHLGLDYVEPWERNA

SEQ ID NO: 2903 - DNA, 1182 bp, synthetic construct
  misc_feature 1..1182: note = Variant of terminal deoxynucleotidyl transferase
  source 1..1182: mol_type = other DNA
atgcatcaccaccatcatcatgggggttctggtcatccgccgagcaataccccggagaaggaggtgccgagcgttatcgcccgtccggttagtcagtacgcgtgccagcgcaagaccacgctgaataactacaacaaaaagttcaccgacgcgctggagatcatggccgagaactacaaatttaaagagaacctgatcgcgtgtctggaagccaagcgcgccgcgagtatttttaaatatctgccgttcgaggttaccagcatgaaagacatccaaggtctgccgtgcattaccgaccaggttcgtgacgtgatcgaggagatcatcgaagagggcgagagcagccgtgttaaagaaatcctcaatgacgagcgctacaaggcctttaagcagttcaccagcgtgttcggtgtgggcgtgaaaaccgcggaaaagtggtaccgtatgggcctccgtacggttgaagaagcaaaggccagtaagagtctgaagctgagcaagatgcagaaggcgggcttcctgtattacgaggatctggcgagcatggttagtaaagaagaagccgatgccgttacgctcatcgtgaaggaaacggtgcgtacctttctgccggatgcgctggtgaccatcaccggcggtttccgccgtggcaaacctatgggccacgacgttgactttctgatcagtaacccgggccgcaaagaggatgacgagctgctccacaaagtggttgatctgctcaagaagcaaggtctgctgctgtacgaagacatcaaagagagcacgttcgtggaggggcaactgccaagtcataaaatcgacgccatggacaacttccagaagtgcttcgccattctcaagctgtaccagccgaaggtggataacagtgcggttgggacgagtaagaaaagtgacatggctgaggttaaggattggaaagcgatccgtgtggatctggtgatcacgccattcgagcagtacgcctatgcgctgctcggttggacgggcagcaaacaatttcgtcgcgatctgcgtcgctatgcggaggaagagcgcggcatgatcctcgacaaccatgccctctacgacctgaaaaagcgcatctttctgaaagcgggcagcgaagaagagattttcgcgcatctgggtctggattatgtggagccgtgggaacgcaacgcg

SEQ ID NO: 2904 - protein, 394 aa, synthetic construct
  REGION 1..394: note = Variant of terminal deoxynucleotidyl transferase
MHHHHHHGGSGHPPSNTPEKEVPSVIARPVSQYACQRKTTLNNYNKKFTDALEIMAENYKFKENLIACLEAKRAASIFKYLPFEVTSMKDIQGLPCITDQVRDVIEEIIEEGESSRVKEILNDERYKAFKQFTSVFGVGVKTAEKWYRMGLRTVEEAKASKSLKLSKMQKAGFLYYEDLASMVSKEEADAVTLIVKETVRTFLPDALVTITGGFRRGKPMGHDVDFLISNPGRKEDDELLHKVVDLLKKQGLLLYEDIKESTFVEGQLPSHKIDAMDNFQKCFAILKLYQPKVDNSAVGTSKKSDMAEVKDWKAIRVDLVITPFEQYAYALLGWTGSKQFRRDLRRYAEEERGMILDNHALYDLKKRIFLKAGSEEEIFAHLGLDYVEPWERNA

SEQ ID NO: 2905 - DNA, 1182 bp, synthetic construct
  misc_feature 1..1182: note = Variant of terminal deoxynucleotidyl transferase
  source 1..1182: mol_type = other DNA
atgcatcaccaccatcatcatgggggttctggtcatccgccgagcaataccccggagaaggaggtgccgagcgttatcgcccgtccggttagtcagtacgcgtgccagcgcaagaccacgctgaataactacaacaaaaagttcaccgacgcgctggagatcatggccgagaactacaaatttaaagagaacctgatcgcgtgtctggaagccaagcgcgccgcgagtatttttaaatatctgccgttcgaggttaccagcatgaaagacatccaaggtctgccgtgcattaccgaccaggttcgtgacgtgatcgaggagatcatcgaagagggcgagagcagccgtgttaaagaaatcctcaatgacgagcgctacaaggcctttaagcagttcaccagcgtgttcggtgtgggcgtgaaaaccgcggaaaagtggtaccgtatgggcctccgtacggttgaagaagcaaaggccagtaagagtctgaagctgagcaagatgcagaaggcgggcttcctgtattacgaggatctggcgagcatggttagtaaagaagaagccgatgccgttacgctcatcgtgaaggaaacggtgcgtacctttctgccggatgcgctggtgaccatcaccggcggtttccgccgtggcaaacctatgggccacgacgttgactttctgatcacgaacccgggccgcaaagaggatgacgagctgctccacaaagtggttgatctgctcaagaagcaaggtctgctgctgtacgaagacatcaaagagagcacgttcgtggaggggcaactgccaagtcataaaatcgacgccatggacaacttccagaagtgcttcgccattctcaagctgtaccagccgaaggtggataacagtgcggttgggacgagtaagaaaagtgacatggctgaggttaaggattggaaagcgatccgtgtggatctggtgatcacgccattcgagcagtacgcctatgcgctgctcggttggacgggcagcaaacaatttcgtcgcgatctgcgtcgctatgcggaggaagagcgcggcatgatcctcgacaaccatgccctctacgacctgaaaaagcgcatctttctgaaagcgggcagcgaagaagagattttcgcgcatctgaatctggattatgtggagccgtgggaacgcaacgcg

SEQ ID NO: 2906 - protein, 394 aa, synthetic construct
  REGION 1..394: note = Variant of terminal deoxynucleotidyl transferase
MHHHHHHGGSGHPPSNTPEKEVPSVIARPVSQYACQRKTTLNNYNKKFTDALEIMAENYKFKENLIACLEAKRAASIFKYLPFEVTSMKDIQGLPCITDQVRDVIEEIIEEGESSRVKEILNDERYKAFKQFTSVFGVGVKTAEKWYRMGLRTVEEAKASKSLKLSKMQKAGFLYYEDLASMVSKEEADAVTLIVKETVRTFLPDALVTITGGFRRGKPMGHDVDFLITNPGRKEDDELLHKVVDLLKKQGLLLYEDIKESTFVEGQLPSHKIDAMDNFQKCFAILKLYQPKVDNSAVGTSKKSDMAEVKDWKAIRVDLVITPFEQYAYALLGWTGSKQFRRDLRRYAEEERGMILDNHALYDLKKRIFLKAGSEEEIFAHLNLDYVEPWERNA

SEQ ID NO: 2907 - DNA, 1182 bp, synthetic construct
  misc_feature 1..1182: note = Variant of terminal deoxynucleotidyl transferase
  source 1..1182: mol_type = other DNA
atgcatcaccaccatcatcatgggggttctggtcatccgccgagcaataccccggagaaggaggtgccgagcgttatcgcccgtccggttagtcagtacgcgtgccagcgcaagaccacgctgaataactacaacaaaaagttcaccgacgcgctggagatcatggccgagaactacaaatttaaagagaacctgatcgcgtgtctggaagccaagcgcgccgcgagtatttttaaatatctgccgttcgaggttaccagcatgaaagacatccaaggtctgccgtgcattaccgaccaggttcgtgacgtgatcgaggagatcatcgaagagggcgagagcagccgtgttaaagaaatcctcaatgacgagcgctacaaggcctttaagcagttcaccagcgtgttcggtgtgggcgtgaaaaccgcggaaaagtggtaccgtatgggcctccgtacggttgaagaagcaaaggccagtaagagtctgaagctgagcaagatgcagaaggcgggcttcctgtattacgaggatctggcgagcatggttagtaaagaagaagccgatgccgttacgctcatcgtgaaggaaacggtgcgtacctttctgccggatgcgctggtgaccatcaccggcggtttccgccgtggcaaacctatgggccacgacgttgactttctgatcacgaacccgggccgcaaagaggatgacgagctgctccacaaagtggttgatctgctcaagaagcaaggtctgctgctgtacgaagacatcaaagagagcacgttcgtggaggggcaactgccaagtcataaaatcgacgccatggacaacttccagaagtgcttcgccattctcaagctgtaccagccgaaggtggataacagtgcggttgggacgagtaagaaaagtgacatggctgaggttaaggattggaaagcgatccgtgtggatctggtgatcacgccattcgagcagtacgcctatgcgctgctcggttggacgggcagcaaacaatttcgtcgcgatctgcgtcgctatgcggaggaagagcgcggcatgatcctcgacaaccatgccctctacgacctgaaacggcgcatctttctgaaagcgggcagcgaagaagagattttcgcgcatctgggtctggattatgtggagccgtgggaacgcaacgcg

SEQ ID NO: 2908 - protein, 394 aa, synthetic construct
  REGION 1..394: note = Variant of terminal deoxynucleotidyl transferase
MHHHHHHGGSGHPPSNTPEKEVPSVIARPVSQYACQRKTTLNNYNKKFTDALEIMAENYKFKENLIACLEAKRAASIFKYLPFEVTSMKDIQGLPCITDQVRDVIEEIIEEGESSRVKEILNDERYKAFKQFTSVFGVGVKTAEKWYRMGLRTVEEAKASKSLKLSKMQKAGFLYYEDLASMVSKEEADAVTLIVKETVRTFLPDALVTITGGFRRGKPMGHDVDFLITNPGRKEDDELLHKVVDLLKKQGLLLYEDIKESTFVEGQLPSHKIDAMDNFQKCFAILKLYQPKVDNSAVGTSKKSDMAEVKDWKAIRVDLVITPFEQYAYALLGWTGSKQFRRDLRRYAEEERGMILDNHALYDLKRRIFLKAGSEEEIFAHLGLDYVEPWERNA

SEQ ID NO: 2909 - DNA, 1182 bp, synthetic construct
  misc_feature 1..1182: note = Variant of terminal deoxynucleotidyl transferase
  source 1..1182: mol_type = other DNA
atgcatcaccaccatcatcatgggggttctggtcatccgccgagcaataccccggagaaggaggtgccgagcgttatcgcccgtccggttagtcagtacgcgtgccagcgcaagaccacgctgaataactacaacaaaaagttcaccgacgcgctggagatcatggccgagaactacaaatttaaagagaacctgatcgcgtgtctggaagccaagcgcgccgcgagtatttttaaatatctgccgttcgaggttaccagcatgaaagacatccaaggtctgccgtgcattaccgaccaggttcgtgacgtgatcgaggagatcatcgaagagggcgagagcagccgtgttaaagaaatcctcaatgacgagcgctacaaggcctttaagcagttcaccagcgtgttcggtgtgggcgtgaaaaccgcggaaaagtggtaccgtatgggcctccgtacggttgaagaagcaaaggccagtaagagtctgaagctgagcaagatgcagaaggcgggcttcctgtattacgaggatctggcgagcatggttagtaaagaagaagccgatgccgttacgctcatcgtgaaggaaacggtgcgtacctttctgccggatgcgctggtgaccatcaccggcggtttccgccgtggcaaacctatgggccacgacgttgactttctgatcacgaacccgggccgcaaagaggatgacgagctgctccacaaagtggttgatctgctcaagaagcaaggtctgctgctgtacgaagacatcaaagagagcacgttcgtggaggggcaactgccaagtcataaaatcgacgccatggacaacttccagaagtgcttcgccattctcaagctgtaccagccgaaggtggataacagtgcggttgggacgagtaagaaaagtgacatggctgaggttaaggattggaaagcgatccgtgtggatctggtgatcacgccattcgagcagtacgcctatgcgctgctcggttggacgggcagcaaacaatttcgtcgcgatctgcgtcgctatgcggaggaagagcgcggcatgatcctcgacaaccataggctctacgacctgaaaaagcgcatctttctgaaagcgggcagcgaagaagagattttcgcgcatctgggtctggattatgtggagccgtgggaacgcaacgcg

SEQ ID NO: 2910 - protein, 394 aa, synthetic construct
  REGION 1..394: note = Variant of terminal deoxynucleotidyl transferase
MHHHHHHGGSGHPPSNTPEKEVPSVIARPVSQYACQRKTTLNNYNKKFTDALEIMAENYKFKENLIACLEAKRAASIFKYLPFEVTSMKDIQGLPCITDQVRDVIEEIIEEGESSRVKEILNDERYKAFKQFTSVFGVGVKTAEKWYRMGLRTVEEAKASKSLKLSKMQKAGFLYYEDLASMVSKEEADAVTLIVKETVRTFLPDALVTITGGFRRGKPMGHDVDFLITNPGRKEDDELLHKVVDLLKKQGLLLYEDIKESTFVEGQLPSHKIDAMDNFQKCFAILKLYQPKVDNSAVGTSKKSDMAEVKDWKAIRVDLVITPFEQYAYALLGWTGSKQFRRDLRRYAEEERGMILDNHRLYDLKKRIFLKAGSEEEIFAHLGLDYVEPWERNA

SEQ ID NO: 2911 - DNA, 1182 bp, synthetic construct
  misc_feature 1..1182: note = Variant of terminal deoxynucleotidyl transferase
  source 1..1182: mol_type = other DNA
atgcatcaccaccatcatcatgggggttctggtcatccgccgagcaataccccggagaaggaggtgccgagcgttatcgcccgtccggttagtcagtacgcgtgccagcgcaagaccacgctgaataactacaacaaaaagttcaccgacgcgctggagatcatggccgagaactacaaatttaaagagaacctgatcgcgtgtctggaagccaagcgcgccgcgagtatttttaaatatctgccgttcgaggttaccagcatgaaagacatccaaggtctgccgtgcattaccgaccaggttcgtgacgtgatcgaggagatcatcgaagagggcgagagcagccgtgttaaagaaatcctcaatgacgagcgctacaaggcctttaagcagttcaccagcgtgttcggtgtgggcgtgaaaaccgcggaaaagtggtaccgtatgggcctccgtacggttgaagaagcaaaggccagtaagagtctgaagctgagcaagatgcagaaggcgggcttcctgtattacgaggatctggcgagcatggttagtaaagaagaagccgatgccgttacgctcatcgtgaaggaaacggtgcgtacctttctgccggatgcgctggtgaccatcaccggcggtttccgccgtggcaaacctatgggccacgacgttgactttctgatcacgaacccgggccgcaaagaggatagggagctgctccacaaagtggttgatctgctcaagaagcaaggtctgctgctgtacgaagacatcaaagagagcacgttcgtggaggggcaactgccaagtcataaaatcgacgccatggacaacttccagaagtgcttcgccattctcaagctgtaccagccgaaggtggataacagtgcggttgggacgagtaagaaaagtgacatggctgaggttaaggattggaaagcgatccgtgtggatctggtgatcacgccattcgagcagtacgcctatgcgctgctcggttggacgggcagcaaacaatttcgtcgcgatctgcgtcgctatgcggaggaagagcgcggcatgatcctcgacaaccatgccctctacgacctgaaaaagcgcatctttctgaaagcgggcagcgaagaagagattttcgcgcatctgggtctggattatgtggagccgtgggaacgcaacgcg

SEQ ID NO: 2912 - protein, 394 aa, synthetic construct
  REGION 1..394: note = Variant of terminal deoxynucleotidyl transferase
MHHHHHHGGSGHPPSNTPEKEVPSVIARPVSQYACQRKTTLNNYNKKFTDALEIMAENYKFKENLIACLEAKRAASIFKYLPFEVTSMKDIQGLPCITDQVRDVIEEIIEEGESSRVKEILNDERYKAFKQFTSVFGVGVKTAEKWYRMGLRTVEEAKASKSLKLSKMQKAGFLYYEDLASMVSKEEADAVTLIVKETVRTFLPDALVTITGGFRRGKPMGHDVDFLITNPGRKEDRELLHKVVDLLKKQGLLLYEDIKESTFVEGQLPSHKIDAMDNFQKCFAILKLYQPKVDNSAVGTSKKSDMAEVKDWKAIRVDLVITPFEQYAYALLGWTGSKQFRRDLRRYAEEERGMILDNHALYDLKKRIFLKAGSEEEIFAHLGLDYVEPWERNA

SEQ ID NO: 2913 - DNA, 1182 bp, synthetic construct
  misc_feature 1..1182: note = Variant of terminal deoxynucleotidyl transferase
  source 1..1182: mol_type = other DNA
atgcatcaccaccatcatcatgggggttctggtcatccgccgagcaataccccggagaaggaggtgccgagcgttatcgcccgtccggttagtcagtacgcgtgccagcgcaagaccacgctgaataactacaacaaaaagttcaccgacgcgctggagatcatggccgagaactacaaatttaaagagaacctgatcgcgtgtctggaagccaagcgcgccgcgagtatttttaaatatctgccgttcgaggttaccagcatgaaagacatccaaggtctgccgtgcattaccgaccaggttcgtgacgtgatcgaggagatcatcgaagagggcgagagcagccgtgttaaagaaatcctcaatgacgagcgctacaaggcctttaagcagttcaccagcgtgttcggtgtgggcgtgaaaaccgcggaaaagtggtaccgtatgggcctccgtacggttgaagaagcaaaggccagtaagagtctgaagctgagcaagatgcagaaggcgggcttcctgtattacgaggatctggcgagcatggttagtaaagaagaagccgatgccgttacgctcatcgtgaaggaaacggtggggacctttctgccggatgcgctggtgaccatcaccggcggtttccgccgtggcaaacctatgggccacgacgttgactttctgatcacgaacccgggccgcaaagaggatgacgagctgctccacaaagtggttgatctgctcaagaagcaaggtctgctgctgtacgaagacatcaaagagagcacgttcgtggaggggcaactgccaagtcataaaatcgacgccatggacaacttccagaagtgcttcgccattctcaagctgtaccagccgaaggtggataacagtgcggttgggacgagtaagaaaagtgacatggctgaggttaaggattggaaagcgatccgtgtggatctggtgatcacgccattcgagcagtacgcctatgcgctgctcggttggacgggcagcaaacaatttcgtcgcgatctgcgtcgctatgcggaggaagagcgcggcatgatcctcgacaaccatgccctctacgacctgaaaaagcgcatctttctgaaagcgggcagcgaagaagagattttcgcgcatctgggtctggattatgtggagccgtgggaacgcaacgcg

SEQ ID NO: 2914 - protein, 394 aa, synthetic construct
  REGION 1..394: note = Variant of terminal deoxynucleotidyl transferase
MHHHHHHGGSGHPPSNTPEKEVPSVIARPVSQYACQRKTTLNNYNKKFTDALEIMAENYKFKENLIACLEAKRAASIFKYLPFEVTSMKDIQGLPCITDQVRDVIEEIIEEGESSRVKEILNDERYKAFKQFTSVFGVGVKTAEKWYRMGLRTVEEAKASKSLKLSKMQKAGFLYYEDLASMVSKEEADAVTLIVKETVGTFLPDALVTITGGFRRGKPMGHDVDFLITNPGRKEDDELLHKVVDLLKKQGLLLYEDIKESTFVEGQLPSHKIDAMDNFQKCFAILKLYQPKVDNSAVGTSKKSDMAEVKDWKAIRVDLVITPFEQYAYALLGWTGSKQFRRDLRRYAEEERGMILDNHALYDLKKRIFLKAGSEEEIFAHLGLDYVEPWERNA

SEQ ID NO: 2915 - DNA, 1182 bp, synthetic construct
  misc_feature 1..1182: note = Variant of terminal deoxynucleotidyl transferase
  source 1..1182: mol_type = other DNA
atgcatcaccaccatcatcatgggggttctggtcatccgccgagcaataccccggagaaggaggtgccgagcgttatcgcccgtccggttagtcagtacgcgtgccagcgcaagaccacgctgaataactacaacaaaaagttcaccgacgcgctggagatcatggccgagaactacaaatttaaagagaacctgatcgcgtgtctggaagccaagcgcgccgcgagtatttttaaatatctgccgttcgaggttaccagcatgaaagacatccaaggtctgccgtgcattaccgaccaggttcgtgacgtgatcgaggagatcatcgaagagggcgagagcagccgtgttaaagaaatcctcaatgacgagcgctacaaggcctttaagcagttcaccagcgtgttcggtgtgggcgtgaaaaccgcggaaaagtggtaccgtatgggcctccgtacggttgaagaagcaaaggccagtaagagtctgaagctgagcaagatgcagaaggcgggcttcctgtattacgaggatctggcgagcatggttagtaaagaagaagccgatgccgttacgctcatcgtgaaggaaacggtgcgtacctttctgccggatgcgctggtgaccatcaccggcggtttccgccgtggcaaacctatgggccacgacgttgactttctgatcacgaacccgggccgcaaagaggatgacgagctgctccacaaagtggttgatctgctcaagaagcaaggtctgctgctgtacgaagacatcaaagagagcacgttcgtggaggggcaactgccaagtcataaaatcgacgccatggacaacttccagaagtgcttcgccattctcaagctgtaccagccgaaggtggataacagtgcggttgggacgagtaagaaaagtgacatggctgaggttaaggattggaaagcgatccgtgtggatctggtgatcacgccattcgagcagtacgcctatgcgctgctcggttggacgggcagcaaacaatttcgtcgcgatctgcgtcgctatgcggaggaagagcgcggcatgatcctcgacaaccatgccctctacgacctgaaaaagcgcatctttctgaaagcgggcagcgaagaagagattttcatgcatctgggtctggattatgtggagccgtgggaacgcaacgcg

SEQ ID NO: 2916 - protein, 394 aa, synthetic construct
  REGION 1..394: note = Variant of terminal deoxynucleotidyl transferase
MHHHHHHGGSGHPPSNTPEKEVPSVIARPVSQYACQRKTTLNNYNKKFTDALEIMAENYKFKENLIACLEAKRAASIFKYLPFEVTSMKDIQGLPCITDQVRDVIEEIIEEGESSRVKEILNDERYKAFKQFTSVFGVGVKTAEKWYRMGLRTVEEAKASKSLKLSKMQKAGFLYYEDLASMVSKEEADAVTLIVKETVRTFLPDALVTITGGFRRGKPMGHDVDFLITNPGRKEDDELLHKVVDLLKKQGLLLYEDIKESTFVEGQLPSHKIDAMDNFQKCFAILKLYQPKVDNSAVGTSKKSDMAEVKDWKAIRVDLVITPFEQYAYALLGWTGSKQFRRDLRRYAEEERGMILDNHALYDLKKRIFLKAGSEEEIFMHLGLDYVEPWERNA

SEQ ID NO: 2917 - DNA, 1182 bp, synthetic construct
  misc_feature 1..1182: note = Variant of terminal deoxynucleotidyl transferase
  source 1..1182: mol_type = other DNA
atgcatcaccaccatcatcatgggggttctggtcatccgccgagcaataccccggagaaggaggtgccgagcgttatcgcccgtccggttagtcagtacgcgtgccagcgcaagaccacgctgaataactacaacaaaaagttcaccgacgcgctggagatcatggccgagaactacaaatttaaagagaacctgatcgcgtgtctggaagccaagcgcgccgcgagtatttttaaatatctgccgttcgaggttaccagcatgaaagacatccaaggtctgccgtgcattaccgaccaggttcgtgacgtgatcgaggagatcatcgaagagggcgagagcagccgtgttaaagaaatcctcaatgacgagcgctacaaggcctttaagcagttcaccagcgtgttcggtgtgggcgtgaaaaccgcggaaaagtggtaccgtatgggcctccgtacggttgaagaagcaaaggccagtaagagtctgaagctgagcaagatgcagaaggcgggcttcctgtattacgaggatctggcgagcatggttagtaaagaagaagccgatgccgttacgctcatcgtgaaggaaacggtgcgtacctttctgccggatgcgctggtgaccatcaccggcggtttccgccgtggcaaacctatgggccacgacgttgactttctgatcacgaacccgggccgcaaagaggatgacgagctgctccacaaagtggttgatctgctcaagaagcaaggtctgctgctgtacgaagacatcaaagagagcacgttcgtggaggggcaactgccaagtcataaaatcgacgccatggacaacttccagaagtgcttcgccattctcaagctgtaccagccgaaggtggataacagtgcggttgggacgagtaagaaaagtgacatggctgaggttaaggattggaaagcgatccgtgtggatctggtgatcacgccattcgagcagtacgcctatgcgctgctcggttggacgggcagcaaacaatttcgtcgcgatctgcgtcgctatgcggagattgagcgcggcatgatcctcgacaaccatgccctctacgacctgaaaaagcgcatctttctgaaagcgggcagcgaagaagagattttcgcgcatctgggtctggattatgtggagccgtgggaacgcaacgcg

SEQ ID NO: 2918 - protein, 394 aa, synthetic construct
  REGION 1..394: note = Variant of terminal deoxynucleotidyl transferase
MHHHHHHGGSGHPPSNTPEKEVPSVIARPVSQYACQRKTTLNNYNKKFTDALEIMAENYKFKENLIACLEAKRAASIFKYLPFEVTSMKDIQGLPCITDQVRDVIEEIIEEGESSRVKEILNDERYKAFKQFTSVFGVGVKTAEKWYRMGLRTVEEAKASKSLKLSKMQKAGFLYYEDLASMVSKEEADAVTLIVKETVRTFLPDALVTITGGFRRGKPMGHDVDFLITNPGRKEDDELLHKVVDLLKKQGLLLYEDIKESTFVEGQLPSHKIDAMDNFQKCFAILKLYQPKVDNSAVGTSKKSDMAEVKDWKAIRVDLVITPFEQYAYALLGWTGSKQFRRDLRRYAEIERGMILDNHALYDLKKRIFLKAGSEEEIFAHLGLDYVEPWERNA

SEQ ID NO: 2919 - DNA, 1182 bp, synthetic construct
  misc_feature 1..1182: note = Variant of terminal deoxynucleotidyl transferase
  source 1..1182: mol_type = other DNA
atgcatcaccaccatcatcatgggggttctggtcatccgccgagcaataccccggagaaggaggtgccgagcgttatcgcccgtccggttagtcagtacgcgtgccagcgcaagaccacgctgaataactacaacaaaaagttcaccgacgcgctggagatcatggccgagaactacaaatttaaagagaacctgatcgcgtgtctggaagccaagcgcgccgcgagtatttttaaatatctgccgttcgaggttaccagcatgaaagacatccaaggtctgccgtgcattaccgaccaggttcgtgacgtgatcgaggagatcatcgaagagggcgagagcagccgtgttaaagaaatcctcaatgacgagcgctacaaggcctttaagcagttcaccagcgtgttcggtgtgggcgtgaaaaccgcggaaaagtggtaccgtatgggcctccgtacggttgaagaagcaaaggccagtaagagtctgaagctgagcaagatgcagaaggcgggcttcctgtattacgaggatctggcgagcatggttagtaaagaagaagccgatgccgttacgctcatcgtgaaggaaacggtgcgtacctttctgccggatgcgctggtgaccatcaccggcggtttccgccgtggcaaacctatgggccacgacgttgactttctgatcacgaacccgggccgcaaagaggatgacgagctgctccacaaagtggttgatctgctcaagaagcaaggtctgctgctgtacgaagacatcaaagagagcacgttcgtggaggggcaactgccaagtcataaaatcgacgccatggacaacttccagaagtgcttcgccattctcaagctgtaccagccgaaggtggataacagtgcggttgggacgagtaagaaaagtgacatggctgaggttaaggattggaaagcgatccgtgtggatctggtgatcacgccattcgagcagtacgcctatgcgctgctcggttggacgggcagcaaacaatttcgtcgcgatacgcgtcgctatgcggaggaagagcgcggcatgatcctcgacaaccatgccctctacgacctgaaaaagcgcatctttctgaaagcgggcagcgaagaagagattttcgcgcatctgggtctggattatgtggagccgtgggaacgcaacgcg

SEQ ID NO: 2920 - protein, 394 aa, synthetic construct
  REGION 1..394: note = Variant of terminal deoxynucleotidyl transferase
MHHHHHHGGSGHPPSNTPEKEVPSVIARPVSQYACQRKTTLNNYNKKFTDALEIMAENYKFKENLIACLEAKRAASIFKYLPFEVTSMKDIQGLPCITDQVRDVIEEIIEEGESSRVKEILNDERYKAFKQFTSVFGVGVKTAEKWYRMGLRTVEEAKASKSLKLSKMQKAGFLYYEDLASMVSKEEADAVTLIVKETVRTFLPDALVTITGGFRRGKPMGHDVDFLITNPGRKEDDELLHKVVDLLKKQGLLLYEDIKESTFVEGQLPSHKIDAMDNFQKCFAILKLYQPKVDNSAVGTSKKSDMAEVKDWKAIRVDLVITPFEQYAYALLGWTGSKQFRRDTRRYAEEERGMILDNHALYDLKKRIFLKAGSEEEIFAHLGLDYVEPWERNA

SEQ ID NO: 2921 - DNA, 1182 bp, synthetic construct
  misc_feature 1..1182: note = Variant of terminal deoxynucleotidyl transferase
  source 1..1182: mol_type = other DNA
atgcatcaccaccatcatcatgggggttctggtcatccgccgagcaataccccggagaaggaggtgccgagcgttatcgcccgtccggttagtcagtacgcgtgccagcgcaagaccacgctgaataactacaacaaaaagttcaccgacgcgctggagatcatggccgagaactacaaatttaaagagaacctgatcgcgtgtctggaagccaagcgcgccgcgagtatttttaaatatctgccgttcgaggttaccagcatgaaagacatccaaggtctgccgtgcattaccgaccaggttcgtgacgtgatcgaggagatcatcgaagagggcgagagcagccgtgttaaagaaatcctcaatgacgagcgctacaaggcctttaagcagttcaccagcgtgttcggtgtgggcgtgaaaaccgcggaaaagtggtaccgtatgggcctccgtacggttgaagaagcaaaggccagtaagagtctgaagctgagcaagatgcagaaggcgggcttcctgtattacgaggatctggcgagcatggttagtaaagaagaagccgatgccgttacgctcatcgtgaaggaaacggtgcgtacctttctgccggatgcgctggtgaccatcaccggcggtttccgccgtggcaaacctatgggccacgacgttgactttctgatcacgaacccgggccgcaaagaggatgacgagctgctccacaaagtggttgatctgctcaagaagcaaggtctgctgctgtacgaagacatcaaagagagcacgttcgtggaggggcaactgccaagtcataaaatcgacgccatggacaacttccagaagtgcttcgccattctcaagctgtaccagccgaaggtggataacagtgcggttgggacgagtaagaaaagtgacatggctgaggttaaggattggaaagcgatccgtgtggatctggtgatctgtccattcgagcagtacgcctatgcgctgctcggttggacgggcagcaaacaatttcgtcgcgatctgcgtcgctatgcggaggaagagcgcggcatgatcctcgacaaccatgccctctacgacctgaaaaagcgcatctttctgaaagcgggcagcgaagaagagattttcgcgcatctgggtctggattatgtggagccgtgggaacgcaacgcg

SEQ ID NO: 2922 - protein, 394 aa, synthetic construct
  REGION 1..394: note = Variant of terminal deoxynucleotidyl transferase
MHHHHHHGGSGHPPSNTPEKEVPSVIARPVSQYACQRKTTLNNYNKKFTDALEIMAENYKFKENLIACLEAKRAASIFKYLPFEVTSMKDIQGLPCITDQVRDVIEEIIEEGESSRVKEILNDERYKAFKQFTSVFGVGVKTAEKWYRMGLRTVEEAKASKSLKLSKMQKAGFLYYEDLASMVSKEEADAVTLIVKETVRTFLPDALVTITGGFRRGKPMGHDVDFLITNPGRKEDDELLHKVVDLLKKQGLLLYEDIKESTFVEGQLPSHKIDAMDNFQKCFAILKLYQPKVDNSAVGTSKKSDMAEVKDWKAIRVDLVICPFEQYAYALLGWTGSKQFRRDLRRYAEEERGMILDNHALYDLKKRIFLKAGSEEEIFAHLGLDYVEPWERNA

SEQ ID NO: 2923 - DNA, 1182 bp, synthetic construct
  misc_feature 1..1182: note = Variant of terminal deoxynucleotidyl transferase
  source 1..1182: mol_type = other DNA
atgcatcaccaccatcatcatgggggttctggtcatccgccgagcaataccccggagaaggaggtgccgagcgttatcgcccgtccggttagtcagtacgcgtgccagcgcaagaccacgctgaataactacaacaaaaagttcaccgacgcgctggagatcatggccgagaactacaaatttaaagagaacctgatcgcgtgtctggaagccaagcgcgccgcgagtatttttaaatatctgccgttcgaggttaccagcatgaaagacatccaaggtctgccgtgcattaccgaccaggttcgtgacgtgatcgaggagatcatcgaagagggcgagagcagccgtgttaaagaaatcctcaatgacgagcgctacaaggcctttaagcagttcaccagcgtgttcggtgtgggcgtgaaaaccgcggaaaagtggtaccgtatgggcctccgtacggttgaagaagcaaaggccagtaagagtctgaagctgagcaagatgcagaaggcgggcttcctgtattacgaggatctggcgagcatggttagtaaagaagaagccgatgccgttacgctcatcgtgaaggaaacggtgcgtacctttctgccggatgcgctggtgaccatcaccggcggtttccgccgtggcaaacctatgggccacgacgttgactttctgatcacgaacccgggcagtaaagaggatgacgagctgctccacaaagtggttgatctgctcaagaagcaaggtctgctgctgtacgaagacatcaaagagagcacgttcgtggaggggcaactgccaagtcataaaatcgacgccatggacaacttccagaagtgcttcgccattctcaagctgtaccagccgaaggtggataacagtgcggttgggacgagtaagaaaagtgacatggctgaggttaaggattggaaagcgatccgtgtggatctggtgatcacgccattcgagcagtacgcctatgcgctgctcggttggacgggcagcaaacaatttcgtcgcgatctgcgtcgctatgcggaggaagagcgcggcatgatcctcgacaaccatgccctctacgacctgaaaaagcgcatctttctgaaagcgggcagcgaagaagagattttcgcgcatctgggtctggattatgtggagccgtgggaacgcaacgcg

SEQ ID NO: 2924 - protein, 394 aa, synthetic construct
  REGION 1..394: note = Variant of terminal deoxynucleotidyl transferase
MHHHHHHGGSGHPPSNTPEKEVPSVIARPVSQYACQRKTTLNNYNKKFTDALEIMAENYKFKENLIACLEAKRAASIFKYLPFEVTSMKDIQGLPCITDQVRDVIEEIIEEGESSRVKEILNDERYKAFKQFTSVFGVGVKTAEKWYRMGLRTVEEAKASKSLKLSKMQKAGFLYYEDLASMVSKEEADAVTLIVKETVRTFLPDALVTITGGFRRGKPMGHDVDFLITNPGSKEDDELLHKVVDLLKKQGLLLYEDIKESTFVEGQLPSHKIDAMDNFQKCFAILKLYQPKVDNSAVGTSKKSDMAEVKDWKAIRVDLVITPFEQYAYALLGWTGSKQFRRDLRRYAEEERGMILDNHALYDLKKRIFLKAGSEEEIFAHLGLDYVEPWERNA

SEQ ID NO: 2925 - DNA, 1182 bp, synthetic construct
  misc_feature 1..1182: note = Variant of terminal deoxynucleotidyl transferase
  source 1..1182: mol_type = other DNA
atgcatcaccaccatcatcatgggggttctggtcatccgccgagcaataccccggagaaggaggtgccgagcgttatcgcccgtccggttagtcagtacgcgtgccagcgcaagaccacgctgaataactacaacaaaaagttcaccgacgcgctggagatcatggccgagaactacaaatttaaagagaacctgatcgcgtgtctggaagccaagcgcgccgcgagtatttttaaatatctgccgttcgaggttaccagcatgaaagacatccaaggtctgccgtgcattaccgaccaggttcgtgacgtgatcgaggagatcatcgaagagggcgagagcagccgtgttaaagaaatcctcaatgacgagcgctacaaggcctttaagcagttcaccagcgtgttcggtgtgggcgtgaaaaccgcggaaaagtggtaccgtatgggcctccgtacggttgaagaagcaaaggccagtaagagtctgaagctgagcaagatgcagaaggcgggcttcctgtattacgaggatctggcgagcatggttagtaaagaagaagccgatgccgttacgctcatcgtgaaggaaacggtgcgtacctttctgccggatgcgctggtgaccatcaccggcggtttccgccgtggcaaacctatgggccacgacgttgactttctgatcacgaacccgggccgcaaagaggatgacgagctgctccacaaagtggttgatctgctcaagaagcaaggtctgctgctgtacgaagacatcaaagagagcacgttcgtggaggggcaactgccaagtcataaaatcgacgccatggacaacttccagaagtgcttcgccattctcaagctgtaccagccgaaggtggataacagtgcggttgggacgagtaagaaaagtgacatggctgaggttaaggattggaaagcgatccgtgtggatctggtgatcacgccattcgagcagtacgcctatgcgctgctcggttggacgggcagcaaacaatttcgtcgcgatctgcgtcgctatgcggaggaagagcgcggcatgatcctcgacaaccatgccctctacgacctgaaaaagcgcatctttctgaaagcgggcagcgaagaagagattttcgcgcatctgggtctggattatttggagccgtgggaacgcaacgcg

SEQ ID NO: 2926 - protein, 394 aa, synthetic construct
  REGION 1..394: note = Variant of terminal deoxynucleotidyl transferase
MHHHHHHGGSGHPPSNTPEKEVPSVIARPVSQYACQRKTTLNNYNKKFTDALEIMAENYKFKENLIACLEAKRAASIFKYLPFEVTSMKDIQGLPCITDQVRDVIEEIIEEGESSRVKEILNDERYKAFKQFTSVFGVGVKTAEKWYRMGLRTVEEAKASKSLKLSKMQKAGFLYYEDLASMVSKEEADAVTLIVKETVRTFLPDALVTITGGFRRGKPMGHDVDFLITNPGRKEDDELLHKVVDLLKKQGLLLYEDIKESTFVEGQLPSHKIDAMDNFQKCFAILKLYQPKVDNSAVGTSKKSDMAEVKDWKAIRVDLVITPFEQYAYALLGWTGSKQFRRDLRRYAEEERGMILDNHALYDLKKRIFLKAGSEEEIFAHLGLDYLEPWERNA

SEQ ID NO: 2927 - DNA, 1182 bp, synthetic construct
  misc_feature 1..1182: note = Variant of terminal deoxynucleotidyl transferase
  source 1..1182: mol_type = other DNA
atgcatcaccaccatcatcatgggggttctggtcatccgccgagcaataccccggagaaggaggtgccgagcgttatcgcccgtccggttagtcagtacgcgtgccagcgcaagaccacgctgaataactacaacaaaaagttcaccgacgcgctggagatcatggccgagaactacaaatttaaagagaacctgatcgcgtgtctggaagccaagcgcgccgcgagtatttttaaatatctgccgttcgaggttaccagcatgaaagacatccaaggtctgccgtgcattaccgaccaggttcgtgacgtgatcgaggagatcatcgaagagggcgagagcagccgtgttaaagaaatcctcaatgacgagcgctacaaggcctttaagcagttcaccagcgtgttcggtgtgggcgtgaaaaccgcggaaaagtggtaccgtatgggcctccgtacggttgaagaagcaaaggccagtaagagtctgaagctgagcaagatgcagaaggcgggcttcctgtattacgaggatctggcgagcatggttagtaaagaagaagccgatgccgttacgctcatcgtgaaggaaacggtgcgtacctttctgccggatgcggaggtgaccatcaccggcggtttccgccgtggcaaacctatgggccacgacgttgactttctgatcacgaacccgggccgcaaagaggatgacgagctgctccacaaagtggttgatctgctcaagaagcaaggtctgctgctgtacgaagacatcaaagagagcacgttcgtggaggggcaactgccaagtcataaaatcgacgccatggacaacttccagaagtgcttcgccattctcaagctgtaccagccgaaggtggataacagtgcggttgggacgagtaagaaaagtgacatggctgaggttaaggattggaaagcgatccgtgtggatctggtgatcacgccattcgagcagtacgcctatgcgctgctcggttggacgggcagcaaacaatttcgtcgcgatctgcgtcgctatgcggaggaagagcgcggcatgatcctcgacaaccatgccctctacgacctgaaaaagcgcatctttctgaaagcgggcagcgaagaagagattttcgcgcatctgggtctggattatgtggagccgtgggaacgcaacgcg

SEQ ID NO: 2928 - protein, 394 aa, synthetic construct
  REGION 1..394: note = Variant of terminal deoxynucleotidyl transferase
MHHHHHHGGSGHPPSNTPEKEVPSVIARPVSQYACQRKTTLNNYNKKFTDALEIMAENYKFKENLIACLEAKRAASIFKYLPFEVTSMKDIQGLPCITDQVRDVIEEIIEEGESSRVKEILNDERYKAFKQFTSVFGVGVKTAEKWYRMGLRTVEEAKASKSLKLSKMQKAGFLYYEDLASMVSKEEADAVTLIVKETVRTFLPDAEVTITGGFRRGKPMGHDVDFLITNPGRKEDDELLHKVVDLLKKQGLLLYEDIKESTFVEGQLPSHKIDAMDNFQKCFAILKLYQPKVDNSAVGTSKKSDMAEVKDWKAIRVDLVITPFEQYAYALLGWTGSKQFRRDLRRYAEEERGMILDNHALYDLKKRIFLKAGSEEEIFAHLGLDYVEPWERNA

SEQ ID NO: 2929 - DNA, 1182 bp, synthetic construct
  misc_feature 1..1182: note = Variant of terminal deoxynucleotidyl transferase
  source 1..1182: mol_type = other DNA
atgcatcaccaccatcatcatgggggttctggtcatccgccgagcaataccccggagaaggaggtgccgagcgttatcgcccgtccggttagtcagtacgcgtgccagcgcaagaccacgctgaataactacaacaaaaagttcaccgacgcgctggagatcatggccgagaactacaaatttaaagagaacctgatcgcgtgtctggaagccaagcgcgccgcgagtatttttaaatatctgccgttcgaggttaccagcatgaaagacatccaaggtctgccgtgcattaccgaccaggttcgtgacgtgatcgaggagatcatcgaagagggcgagagcagccgtgttaaagaaatcctcaatgacgagcgctacaaggcctttaagcagttcaccagcgtgttcggtgtgggcgtgaaaaccgcggaaaagtggtaccgtatgggcctccgtacggttgaagaagcaaaggccagtaagagtctgaagctgagcaagatgcagaaggcgggcttcctgtattacgaggatctggcgagcatggttagtaaagaagaagccgatgccgttacgctcatcgtgaaggaaacggtgcgtacctttctgccggatgcgctggtgaccatcaccggcggtttccgccgtggcaaacctatgggccacgacgttgactttctgatcacgtatccgggccgcaaagaggatgacgagctgctccacaaagtggttgatctgctcaagaagcaaggtctgctgctgtacgaagacatcaaagagagcacgttcgtggaggggcaactgccaagtcataaaatcgacgccatggacaacttccagaagtgcttcgccattctcaagctgtaccagccgaaggtggataacagtgcggttgggacgagtaagaaaagtgacatggctgaggttaaggattggaaagcgatccgtgtggatctggtgatcacgccattcgagcagtacgcctatgcgctgctcggttggacgggcagcaaacaatttcgtcgcgatctgcgtcgctatgcggaggaagagcgcggcatgatcctcgacaaccatgccctctacgacctgaaaaagcgcatctttctgaaagcgggcagcgaagaagagattttcgcgcatctgggtctggattatgtggagccgtgggaacgcaacgcg

SEQ ID NO: 2930 - protein, 394 aa, synthetic construct
  REGION 1..394: note = Variant of terminal deoxynucleotidyl transferase
MHHHHHHGGSGHPPSNTPEKEVPSVIARPVSQYACQRKTTLNNYNKKFTDALEIMAENYKFKENLIACLEAKRAASIFKYLPFEVTSMKDIQGLPCITDQVRDVIEEIIEEGESSRVKEILNDERYKAFKQFTSVFGVGVKTAEKWYRMGLRTVEEAKASKSLKLSKMQKAGFLYYEDLASMVSKEEADAVTLIVKETVRTFLPDALVTITGGFRRGKPMGHDVDFLITYPGRKEDDELLHKVVDLLKKQGLLLYEDIKESTFVEGQLPSHKIDAMDNFQKCFAILKLYQPKVDNSAVGTSKKSDMAEVKDWKAIRVDLVITPFEQYAYALLGWTGSKQFRRDLRRYAEEERGMILDNHALYDLKKRIFLKAGSEEEIFAHLGLDYVEPWERNA

SEQ ID NO: 2931 - DNA, 1182 bp, synthetic construct
  misc_feature 1..1182: note = Variant of terminal deoxynucleotidyl transferase
  source 1..1182: mol_type = other DNA
atgcatcaccaccatcatcatgggggttctggtcatccgccgagcaataccccggagaaggaggtgccgagcgttatcgcccgtccggttagtcagtacgcgtgccagcgcaagaccacgctgaataactacaacaaaaagttcaccgacgcgctggagatcatggccgagaactacaaatttaaagagaacctgatcgcgtgtctggaagccaagcgcgccgcgagtatttttaaatatctgccgttcgaggttaccagcatgaaagacatccaaggtctgccgtgcattaccgaccaggttcgtgacgtgatcgaggagatcatcgaagagggcgagagcagccgtgttaaagaaatcctcaatgacgagcgctacaaggcctttaagcagttcaccagcgtgttcggtgtgggcgtgaaaaccgcggaaaagtggtaccgtatgggcctccgtacggttgaagaagcaaaggccagtaagagtctgaagctgagcaagatgcagaaggcgggcttcctgtattacgaggatctggcgagcatggttagtaaagaagaagccgatgccgttacgctcatcgtgaaggaaacggtgcgtacctttctgccggatgcgctggtgaccatcaccggcggtttccgccgtggcaaacctatgggccacgacgttgactttctgatcacgaacccgggccgcaaagaggatgacgagctgctccacaaagtggttgatctgctcaagaagcaaggtctgctgctgtacgaagacatcaaagagagcacgttcgtggaggggcaactgccaagtcataaaatcgacgccatggacaacttccagaagtgcttcgccattctcaagctgtaccagccgaaggtggataacagtgcggttgggacgagtaagaaaagtgacatggctgaggttaaggattggaaagcgatccgtgtggatctggtgatcacgccattcgagcagtacgcctatgcgctgctcggttggacgggcagcaaacaatttcgtcgcgatctgcgtcgctatgcggaggaagagcgcggcatgatcctcgacaaccatgccctctacgacctgaaaaagcgcatctttctgaaagcgggcgatgaagaagagattttcgcgcatctgggtctggattatgtggagccgtgggaacgcaacgcg

SEQ ID NO: 2932 - protein, 394 aa, synthetic construct
  REGION 1..394: note = Variant of terminal deoxynucleotidyl transferase
MHHHHHHGGSGHPPSNTPEKEVPSVIARPVSQYACQRKTTLNNYNKKFTDALEIMAENYKFKENLIACLEAKRAASIFKYLPFEVTSMKDIQGLPCITDQVRDVIEEIIEEGESSRVKEILNDERYKAFKQFTSVFGVGVKTAEKWYRMGLRTVEEAKASKSLKLSKMQKAGFLYYEDLASMVSKEEADAVTLIVKETVRTFLPDALVTITGGFRRGKPMGHDVDFLITNPGRKEDDELLHKVVDLLKKQGLLLYEDIKESTFVEGQLPSHKIDAMDNFQKCFAILKLYQPKVDNSAVGTSKKSDMAEVKDWKAIRVDLVITPFEQYAYALLGWTGSKQFRRDLRRYAEEERGMILDNHALYDLKKRIFLKAGDEEEIFAHLGLDYVEPWERNA

SEQ ID NO: 2933 - DNA, 1182 bp, synthetic construct
  misc_feature 1..1182: note = Variant of terminal deoxynucleotidyl transferase
  source 1..1182: mol_type = other DNA
atgcatcaccaccatcatcatgggggttctggtcatccgccgagcaataccccggagaaggaggtgccgagcgttatcgcccgtccggttagtcagtacgcgtgccagcgcaagaccacgctgaataactacaacaaaaagttcaccgacgcgctggagatcatggccgagaactacaaatttaaagagaacctgatcgcgtgtctggaagccaagcgcgccgcgagtatttttaaatatctgccgttcgaggttaccagcatgaaagacatccaaggtctgccgtgcattaccgaccaggttcgtgacgtgatcgaggagatcatcgaagagggcgagagcagccgtgttaaagaaatcctcaatgacgagcgctacaaggcctttaagcagttcaccagcgtgttcggtgtgggcgtgaaaaccgcggaaaagtggtaccgtatgggcctccgtacggttgaagaagcaaaggccagtaagagtctgaagctgagcaagatgcagaaggcgggcttcctgtattacgaggatctggcgagcatggttagtaaagaagaagccgatgccgttacgctcatcgtgaaggaaacggtgcgtacctttctgccggatgcgctggtgaccatcaccggcggtttccgccgtggcaaacctatgggccacgacgttgactttctgatcacgaacccgggccgcaaagaggatgacgagctgctccacaaagtggttgatctgctcaagaagcaaggtctgctgctgtacgaagacatcaaagagagcacgttcgtggaggggcaactgccaagtcataaaatcgacgccatggacaacttccagaagtgcttcgccattctcaagctgtaccagccgaaggtggataacagtgcggttgggacgagtaagaaaagtgacatggctgaggttaaggattggaaagcgatccgtgtggatctggtgatcacgccattcgagcagtacgcctatgcgctgctcggttggacgggcagcaaacaatttcgtcgcgatctgcgtcgctatgcggaggaagagcgcggcatgatcctcgacaaccatgccctctacgacctgaaaaagcgcatctttctgtctgcgggcagcgaagaagagattttcgcgcatctgggtctggattatgtggagccgtgggaacgcaacgcg

SEQ ID NO: 2934 - protein, 394 aa, synthetic construct
  REGION 1..394: note = Variant of terminal deoxynucleotidyl transferase
MHHHHHHGGSGHPPSNTPEKEVPSVIARPVSQYACQRKTTLNNYNKKFTDALEIMAENYKFKENLIACLEAKRAASIFKYLPFEVTSMKDIQGLPCITDQVRDVIEEIIEEGESSRVKEILNDERYKAFKQFTSVFGVGVKTAEKWYRMGLRTVEEAKASKSLKLSKMQKAGFLYYEDLASMVSKEEADAVTLIVKETVRTFLPDALVTITGGFRRGKPMGHDVDFLITNPGRKEDDELLHKVVDLLKKQGLLLYEDIKESTFVEGQLPSHKIDAMDNFQKCFAILKLYQPKVDNSAVGTSKKSDMAEVKDWKAIRVDLVITPFEQYAYALLGWTGSKQFRRDLRRYAEEERGMILDNHALYDLKKRIFLSAGSEEEIFAHLGLDYVEPWERNA

SEQ ID NO: 2935 - DNA, 1182 bp, synthetic construct
  misc_feature 1..1182: note = Variant of terminal deoxynucleotidyl transferase
  source 1..1182: mol_type = other DNA
atgcatcaccaccatcatcatgggggttctggtcatccgccgagcaataccccggagaaggaggtgccgagcgttatcgcccgtccggttagtcagtacgcgtgccagcgcaagaccacgctgaataactacaacaaaaagttcaccgacgcgctggagatcatggccgagaactacaaatttaaagagaacctgatcgcgtgtctggaagccaagcgcgccgcgagtatttttaaatatctgccgttcgaggttaccagcatgaaagacatccaaggtctgccgtgcattaccgaccaggttcgtgacgtgatcgaggagatcatcgaagagggcgagagcagccgtgttaaagaaatcctcaatgacgagcgctacaaggcctttaagcagttcaccagcgtgttcggtgtgggcgtgaaaaccgcggaaaagtggtaccgtatgggcctccgtacggttgaagaagcaaaggccagtaagagtctgaagctgagcaagatgcagaaggcgggcttcctgtattacgaggatctggcgagcatggttagtaaagaagaagccgatgccgttacgctcatcgtgaaggaaacggtgcgtacctttctgccggatgcggcggtgaccatcaccggcggtttccgccgtggcaaacctatgggccacgacgttgactttctgatcacgaacccgggccgcaaagaggatgacgagctgctccacaaagtggttgatctgctcaagaagcaaggtctgctgctgtacgaagacatcaaagagagcacgttcgtggaggggcaactgccaagtcataaaatcgacgccatggacaacttccagaagtgcttcgccattctcaagctgtaccagccgaaggtggataacagtgcggttgggacgagtaagaaaagtgacatggctgaggttaaggattggaaagcgatccgtgtggatctggtgatcacgccattcgagcagtacgcctatgcgctgctcggttggacgggcagcaaacaatttcgtcgcgatctgcgtcgctatgcggaggaagagcgcggcatgatcctcgacaaccatgccctctacgacctgaaaaagcgcatctttctgaaagcgggcagcgaagaagagattttcgcgcatctgggtctggattatgtggagccgtgggaacgcaacgcg

SEQ ID NO: 2936 - protein, 394 aa, synthetic construct
  REGION 1..394: note = Variant of terminal deoxynucleotidyl transferase
MHHHHHHGGSGHPPSNTPEKEVPSVIARPVSQYACQRKTTLNNYNKKFTDALEIMAENYKFKENLIACLEAKRAASIFKYLPFEVTSMKDIQGLPCITDQVRDVIEEIIEEGESSRVKEILNDERYKAFKQFTSVFGVGVKTAEKWYRMGLRTVEEAKASKSLKLSKMQKAGFLYYEDLASMVSKEEADAVTLIVKETVRTFLPDAAVTITGGFRRGKPMGHDVDFLITNPGRKEDDELLHKVVDLLKKQGLLLYEDIKESTFVEGQLPSHKIDAMDNFQKCFAILKLYQPKVDNSAVGTSKKSDMAEVKDWKAIRVDLVITPFEQYAYALLGWTGSKQFRRDLRRYAEEERGMILDNHALYDLKKRIFLKAGSEEEIFAHLGLDYVEPWERNA

SEQ ID NO: 2937 - DNA, 1182 bp, synthetic construct
  misc_feature 1..1182: note = Variant of terminal deoxynucleotidyl transferase
  source 1..1182: mol_type = other DNA
atgcatcaccaccatcatcatgggggttctggtcatccgccgagcaataccccggagaaggaggtgccgagcgttatcgcccgtccggttagtcagtacgcgtgccagcgcaagaccacgctgaataactacaacaaaaagttcaccgacgcgctggagatcatggccgagaactacaaatttaaagagaacctgatcgcgtgtctggaagccaagcgcgccgcgagtatttttaaatatctgccgttcgaggttaccagcatgaaagacatccaaggtctgccgtgcattaccgaccaggttcgtgacgtgatcgaggagatcatcgaagagggcgagagcagccgtgttaaagaaatcctcaatgacgagcgctacaaggcctttaagcagttcaccagcgtgttcggtgtgggcgtgaaaaccgcggaaaagtggtaccgtatgggcctccgtacggttgaagaagcaaaggccagtaagagtctgaagctgagcaagatgcagaaggcgggcttcctgtattacgaggatctggcgagcatggttagtaaagaagaagccgatgccgttacgctcatcgtgaaggaaacggtgcgtacctttctgccggatgcgctggtgaccatcaccggcggtttccgccgtggcaaacctatgggccacgacgttgactttctgatcacgaacccgggccgcaaagaggatgacgagctgctccacaaagtggttgatctgctcaagaagcaaggtctgctgctgtacgaagacatcaaagagagcacgttcgtggaggggcaactgccaagtcataaaatcgacgccatggacaacttccagaagtgcttcgccattctcaagctgtaccagccgaaggtggataacagtgcggttgggacgagtaagaaaagtgacatggctgaggttaaggattggaaagcgatccgtgtggatctggtgatcccgccattcgagcagtacgcctatgcgctgctcggttggacgggcagcaaacaatttcgtcgcgatctgcgtcgctatgcggaggaagagcgcggcatgatcctcgacaaccatgccctctacgacctgaaaaagcgcatctttctgaaagcgggcagcgaagaagagattttcgcgcatctgggtctggattatgtggagccgtgggaacgcaacgcg

SEQ ID NO: 2938 - protein, 394 aa, synthetic construct
  REGION 1..394: note = Variant of terminal deoxynucleotidyl transferase
MHHHHHHGGSGHPPSNTPEKEVPSVIARPVSQYACQRKTTLNNYNKKFTDALEIMAENYKFKENLIACLEAKRAASIFKYLPFEVTSMKDIQGLPCITDQVRDVIEEIIEEGESSRVKEILNDERYKAFKQFTSVFGVGVKTAEKWYRMGLRTVEEAKASKSLKLSKMQKAGFLYYEDLASMVSKEEADAVTLIVKETVRTFLPDALVTITGGFRRGKPMGHDVDFLITNPGRKEDDELLHKVVDLLKKQGLLLYEDIKESTFVEGQLPSHKIDAMDNFQKCFAILKLYQPKVDNSAVGTSKKSDMAEVKDWKAIRVDLVIPPFEQYAYALLGWTGSKQFRRDLRRYAEEERGMILDNHALYDLKKRIFLKAGSEEEIFAHLGLDYVEPWERNA

SEQ ID NO: 2939 - DNA, 1182 bp, synthetic construct
  misc_feature 1..1182: note = Variant of terminal deoxynucleotidyl transferase
  source 1..1182: mol_type = other DNA
atgcatcaccaccatcatcatgggggttctggtcatccgccgagcaataccccggagaaggaggtgccgagcgttatcgcccgtccggttagtcagtacgcgtgccagcgcaagaccacgctgaataactacaacaaaaagttcaccgacgcgctggagatcatggccgagaactacaaatttaaagagaacctgatcgcgtgtctggaagccaagcgcgccgcgagtatttttaaatatctgccgttcgaggttaccagcatgaaagacatccaaggtctgccgtgcattaccgaccaggttcgtgacgtgatcgaggagatcatcgaagagggcgagagcagccgtgttaaagaaatcctcaatgacgagcgctacaaggcctttaagcagttcaccagcgtgttcggtgtgggcgtgaaaaccgcggaaaagtggtaccgtatgggcctccgtacggttgaagaagcaaaggccagtaagagtctgaagctgagcaagatgcagaaggcgggcttcctgtattacgaggatctggcgagcatggttagtaaagaagaagccgatgccgttacgctcatcgtgaaggaaacggtgcgtacctttctgccggatgcgctggtgaccatcaccggcggtttccgccgtggcaaacctatgggccacgacgttgactttctgatcacgaacccgggccgcaaagaggatgacgagctgctccacaaagtggttgatctgctcaagaagcaaggtctgctgctgtacgaagacatcaaagagagcacgttcgtggaggggcaactgccaagtcataaaatcgacgccatggacaacttccagaagtgcttcgccattctcaagctgtaccagccgaaggtggataacagtgcggttgggacgagtaagaaaagtgacatggctgaggttaaggattggaaagcgatccgtgtggatctggtgtgtacgccattcgagcagtacgcctatgcgctgctcggttggacgggcagcaaacaatttcgtcgcgatctgcgtcgctatgcggaggaagagcgcggcatgatcctcgacaaccatgccctctacgacctgaaaaagcgcatctttctgaaagcgggcagcgaagaagagattttcgcgcatctgggtctggattatgtggagccgtgggaacgcaacgcg

SEQ ID NO: 2940 - protein, 394 aa, synthetic construct
  REGION 1..394: note = Variant of terminal deoxynucleotidyl transferase
MHHHHHHGGSGHPPSNTPEKEVPSVIARPVSQYACQRKTTLNNYNKKFTDALEIMAENYKFKENLIACLEAKRAASIFKYLPFEVTSMKDIQGLPCITDQVRDVIEEIIEEGESSRVKEILNDERYKAFKQFTSVFGVGVKTAEKWYRMGLRTVEEAKASKSLKLSKMQKAGFLYYEDLASMVSKEEADAVTLIVKETVRTFLPDALVTITGGFRRGKPMGHDVDFLITNPGRKEDDELLHKVVDLLKKQGLLLYEDIKESTFVEGQLPSHKIDAMDNFQKCFAILKLYQPKVDNSAVGTSKKSDMAEVKDWKAIRVDLVCTPFEQYAYALLGWTGSKQFRRDLRRYAEEERGMILDNHALYDLKKRIFLKAGSEEEIFAHLGLDYVEPWERNA

SEQ ID NO: 2941 - DNA, 1182 bp, synthetic construct
  misc_feature 1..1182: note = Variant of terminal deoxynucleotidyl transferase
  source 1..1182: mol_type = other DNA
atgcatcaccaccatcatcatgggggttctggtcatccgccgagcaataccccggagaaggaggtgccgagcgttatcgcccgtccggttagtcagtacgcgtgccagcgcaagaccacgctgaataactacaacaaaaagttcaccgacgcgctggagatcatggccgagaactacaaatttaaagagaacctgatcgcgtgtctggaagccaagcgcgccgcgagtatttttaaatatctgccgttcgaggttaccagcatgaaagacatccaaggtctgccgtgcattaccgaccaggttcgtgacgtgatcgaggagatcatcgaagagggcgagagcagccgtgttaaagaaatcctcaatgacgagcgctacaaggcctttaagcagttcaccagcgtgttcggtgtgggcgtgaaaaccgcggaaaagtggtaccgtatgggcctccgtacggttgaagaagcaaaggccagtaagagtctgaagctgagcaagatgcagaaggcgggcttcctgtattacgaggatctggcgagcatggttagtaaagaagaagccgatgccgttacgctcatcgtgaaggaaacggtgcgtacctttctgccggatgcgctggtgaccatcaccggcggtttccgccgtggcaaacctatgggccacgacgttgactttctgatcacgaacccgggccgcaaagaggatgacgagctgctccacaaagtggttgatctgctcaagaagcaaggtctgctgctgtacgaagacatcaaagagagcacgttcgtggaggggcaactgccaagtcataaaatcgacgccatggacaacttccagaagtgcttcgccattctcaagctgtaccagccgaaggtggataacagtgcggttgggacgagtaagaaaagtgacatggctgaggttaaggattggaaagcgatccgtgtggatctggtgatcacgccattcgagcagtacgcctatgcgctgctcggttggacgggcagcaaacaatttcgtcgcgatctgcgtcgctatgcggaggaagagcgcgatatgatcctcgacaaccatgccctctacgacctgaaaaagcgcatctttctgaaagcgggcagcgaagaagagattttcgcgcatctgggtctggattatgtggagccgtgggaacgcaacgcg

SEQ ID NO: 2942 - protein, 394 aa, synthetic construct
  REGION 1..394: note = Variant of terminal deoxynucleotidyl transferase
MHHHHHHGGSGHPPSNTPEKEVPSVIARPVSQYACQRKTTLNNYNKKFTDALEIMAENYKFKENLIACLEAKRAASIFKYLPFEVTSMKDIQGLPCITDQVRDVIEEIIEEGESSRVKEILNDERYKAFKQFTSVFGVGVKTAEKWYRMGLRTVEEAKASKSLKLSKMQKAGFLYYEDLASMVSKEEADAVTLIVKETVRTFLPDALVTITGGFRRGKPMGHDVDFLITNPGRKEDDELLHKVVDLLKKQGLLLYEDIKESTFVEGQLPSHKIDAMDNFQKCFAILKLYQPKVDNSAVGTSKKSDMAEVKDWKAIRVDLVITPFEQYAYALLGWTGSKQFRRDLRRYAEEERDMILDNHALYDLKKRIFLKAGSEEEIFAHLGLDYVEPWERNA

SEQ ID NO: 2943 - DNA, 1182 bp, synthetic construct
  misc_feature 1..1182: note = Variant of terminal deoxynucleotidyl transferase
  source 1..1182: mol_type = other DNA
atgcatcaccaccatcatcatgggggttctggtcatccgccgagcaataccccggagaaggaggtgccgagcgttatcgcccgtccggttagtcagtacgcgtgccagcgcaagaccacgctgaataactacaacaaaaagttcaccgacgcgctggagatcatggccgagaactacaaatttaaagagaacctgatcgcgtgtctggaagccaagcgcgccgcgagtatttttaaatatctgccgttcgaggttaccagcatgaaagacatccaaggtctgccgtgcattaccgaccaggttcgtgacgtgatcgaggagatcatcgaagagggcgagagcagccgtgttaaagaaatcctcaatgacgagcgctacaaggcctttaagcagttcaccagcgtgttcggtgtgggcgtgaaaaccgcggaaaagtggtaccgtatgggcctccgtacggttgaagaagcaaaggccagtaagagtctgaagctgagcaagatgcagaaggcgggcttcctgtattacgaggatctggcgagcatggttagtaaagaagaagccgatgccgttacgctcatcgtgaaggaaacggtgacgacctttctgccggatgcgctggtgaccatcaccggcggtttccgccgtggcaaacctatgggccacgacgttgactttctgatcacgaacccgggccgcaaagaggatgacgagctgctccacaaagtggttgatctgctcaagaagcaaggtctgctgctgtacgaagacatcaaagagagcacgttcgtggaggggcaactgccaagtcataaaatcgacgccatggacaacttccagaagtgcttcgccattctcaagctgtaccagccgaaggtggataacagtgcggttgggacgagtaagaaaagtgacatggctgaggttaaggattggaaagcgatccgtgtggatctggtgatcacgccattcgagcagtacgcctatgcgctgctcggttggacgggcagcaaacaatttcgtcgcgatctgcgtcgctatgcggaggaagagcgcggcatgatcctcgacaaccatgccctctacgacctgaaaaagcgcatctttctgaaagcgggcagcgaagaagagattttcgcgcatctgggtctggattatgtggagccgtgggaacgcaacgcg

SEQ ID NO: 2944 - protein, 394 aa, synthetic construct
  REGION 1..394: note = Variant of terminal deoxynucleotidyl transferase
MHHHHHHGGSGHPPSNTPEKEVPSVIARPVSQYACQRKTTLNNYNKKFTDALEIMAENYKFKENLIACLEAKRAASIFKYLPFEVTSMKDIQGLPCITDQVRDVIEEIIEEGESSRVKEILNDERYKAFKQFTSVFGVGVKTAEKWYRMGLRTVEEAKASKSLKLSKMQKAGFLYYEDLASMVSKEEADAVTLIVKETVTTFLPDALVTITGGFRRGKPMGHDVDFLITNPGRKEDDELLHKVVDLLKKQGLLLYEDIKESTFVEGQLPSHKIDAMDNFQKCFAILKLYQPKVDNSAVGTSKKSDMAEVKDWKAIRVDLVITPFEQYAYALLGWTGSKQFRRDLRRYAEEERGMILDNHALYDLKKRIFLKAGSEEEIFAHLGLDYVEPWERNA

SEQ ID NO: 2945 - DNA, 1182 bp, synthetic construct
  misc_feature 1..1182: note = Variant of terminal deoxynucleotidyl transferase
  source 1..1182: mol_type = other DNA
atgcatcaccaccatcatcatgggggttctggtcatccgccgagcaataccccggagaaggaggtgccgagcgttatcgcccgtccggttagtcagtacgcgtgccagcgcaagaccacgctgaataactacaacaaaaagttcaccgacgcgctggagatcatggccgagaactacaaatttaaagagaacctgatcgcgtgtctggaagccaagcgcgccgcgagtatttttaaatatctgccgttcgaggttaccagcatgaaagacatccaaggtctgccgtgcattaccgaccaggttcgtgacgtgatcgaggagatcatcgaagagggcgagagcagccgtgttaaagaaatcctcaatgacgagcgctacaaggcctttaagcagttcaccagcgtgttcggtgtgggcgtgaaaaccgcggaaaagtggtaccgtatgggcctccgtacggttgaagaagcaaaggccagtaagagtctgaagctgagcaagatgcagaaggcgggcttcctgtattacgaggatctggcgagcatggttagtaaagaagaagccgatgccgttacgctcatcgtgaaggaaacggtgcgtacctttctgccggatgcgggggtgaccatcaccggcggtttccgccgtggcaaacctatgggccacgacgttgactttctgatcacgaacccgggccgcaaagaggatgacgagctgctccacaaagtggttgatctgctcaagaagcaaggtctgctgctgtacgaagacatcaaagagagcacgttcgtggaggggcaactgccaagtcataaaatcgacgccatggacaacttccagaagtgcttcgccattctcaagctgtaccagccgaaggtggataacagtgcggttgggacgagtaagaaaagtgacatggctgaggttaaggattggaaagcgatccgtgtggatctggtgatcacgccattcgagcagtacgcctatgcgctgctcggttggacgggcagcaaacaatttcgtcgcgatctgcgtcgctatgcggaggaagagcgcggcatgatcctcgacaaccatgccctctacgacctgaaaaagcgcatctttctgaaagcgggcagcgaagaagagattttcgcgcatctgggtctggattatgtggagccgtgggaacgcaacgcg

SEQ ID NO: 2946 - protein, 394 aa, synthetic construct
  REGION 1..394: note = Variant of terminal deoxynucleotidyl transferase
MHHHHHHGGSGHPPSNTPEKEVPSVIARPVSQYACQRKTTLNNYNKKFTDALEIMAENYKFKENLIACLEAKRAASIFKYLPFEVTSMKDIQGLPCITDQVRDVIEEIIEEGESSRVKEILNDERYKAFKQFTSVFGVGVKTAEKWYRMGLRTVEEAKASKSLKLSKMQKAGFLYYEDLASMVSKEEADAVTLIVKETVRTFLPDAGVTITGGFRRGKPMGHDVDFLITNPGRKEDDELLHKVVDLLKKQGLLLYEDIKESTFVEGQLPSHKIDAMDNFQKCFAILKLYQPKVDNSAVGTSKKSDMAEVKDWKAIRVDLVITPFEQYAYALLGWTGSKQFRRDLRRYAEEERGMILDNHALYDLKKRIFLKAGSEEEIFAHLGLDYVEPWERNA

SEQ ID NO: 2947 - DNA, 1182 bp, synthetic construct
  misc_feature 1..1182: note = Variant of terminal deoxynucleotidyl transferase
  source 1..1182: mol_type = other DNA
atgcatcaccaccatcatcatgggggttctggtcatccgccgagcaataccccggagaaggaggtgccgagcgttatcgcccgtccggttagtcagtacgcgtgccagcgcaagaccacgctgaataactacaacaaaaagttcaccgacgcgctggagatcatggccgagaactacaaatttaaagagaacctgatcgcgtgtctggaagccaagcgcgccgcgagtatttttaaatatctgccgttcgaggttaccagcatgaaagacatccaaggtctgccgtgcattaccgaccaggttcgtgacgtgatcgaggagatcatcgaagagggcgagagcagccgtgttaaagaaatcctcaatgacgagcgctacaaggcctttaagcagttcaccagcgtgttcggtgtgggcgtgaaaaccgcggaaaagtggtaccgtatgggcctccgtacggttgaagaagcaaaggccagtaagagtctgaagctgagcaagatgcagaaggcgggcttcctgtattacgaggatctggcgagcatggttagtaaagaagaagccgatgccgttacgctcatcgtgaaggaaacggtgcgtacctttctgccggatgcgctggtgaccatcaccggcggtttccgccgtggcaaacctatgggccacgacgttgactttctgatcacgaacccgggccgcaaagaggatgacgagctgctccacaaagtggttgatctgctcaagaagcaaggtctgctgctgtacgaagacatcaaagagagcacgttcgtggaggggcaactgccaagtcataaaatcgacgccatggacaacttccagaagtgcttcgccattctcaagctgtaccagccgaaggtggataacagtgcggttgggacgagtaagaaaagtgacatggctgaggttaaggattggaaagcgatccgtgtggatctggtgatcacgccattcgagcagtacgcctatggtctgctcggttggacgggcagcaaacaatttcgtcgcgatctgcgtcgctatgcggaggaagagcgcggcatgatcctcgacaaccatgccctctacgacctgaaaaagcgcatctttctgaaagcgggcagcgaagaagagattttcgcgcatctgggtctggattatgtggagccgtgggaacgcaacgcg

SEQ ID NO: 2948 - protein, 394 aa, synthetic construct
  REGION 1..394: note = Variant of terminal deoxynucleotidyl transferase
MHHHHHHGGSGHPPSNTPEKEVPSVIARPVSQYACQRKTTLNNYNKKFTDALEIMAENYKFKENLIACLEAKRAASIFKYLPFEVTSMKDIQGLPCITDQVRDVIEEIIEEGESSRVKEILNDERYKAFKQFTSVFGVGVKTAEKWYRMGLRTVEEAKASKSLKLSKMQKAGFLYYEDLASMVSKEEADAVTLIVKETVRTFLPDALVTITGGFRRGKPMGHDVDFLITNPGRKEDDELLHKVVDLLKKQGLLLYEDIKESTFVEGQLPSHKIDAMDNFQKCFAILKLYQPKVDNSAVGTSKKSDMAEVKDWKAIRVDLVITPFEQYAYGLLGWTGSKQFRRDLRRYAEEERGMILDNHALYDLKKRIFLKAGSEEEIFAHLGLDYVEPWERNA

SEQ ID NO: 2949 - DNA, 1182 bp, synthetic construct
  misc_feature 1..1182: note = Variant of terminal deoxynucleotidyl transferase
  source 1..1182: mol_type = other DNA
atgcatcaccaccatcatcatgggggttctggtcatccgccgagcaataccccggagaaggaggtgccgagcgttatcgcccgtccggttagtcagtacgcgtgccagcgcaagaccacgctgaataactacaacaaaaagttcaccgacgcgctggagatcatggccgagaactacaaatttaaagagaacctgatcgcgtgtctggaagccaagcgcgccgcgagtatttttaaatatctgccgttcgaggttaccagcatgaaagacatccaaggtctgccgtgcattaccgaccaggttcgtgacgtgatcgaggagatcatcgaagagggcgagagcagccgtgttaaagaaatcctcaatgacgagcgctacaaggcctttaagcagttcaccagcgtgttcggtgtgggcgtgaaaaccgcggaaaagtggtaccgtatgggcctccgtacggttgaagaagcaaaggccagtaagagtctgaagctgagcaagatgcagaaggcgggcttcctgtattacgaggatctggcgagcatggttagtaaagaagaagccgatgccgttacgctcatcgtgaaggaaacggtgtggacctttctgccggatgcgctggtgaccatcaccggcggtttccgccgtggcaaacctatgggccacgacgttgactttctgatcacgaacccgggccgcaaagaggatgacgagctgctccacaaagtggttgatctgctcaagaagcaaggtctgctgctgtacgaagacatcaaagagagcacgttcgtggaggggcaactgccaagtcataaaatcgacgccatggacaacttccagaagtgcttcgccattctcaagctgtaccagccgaaggtggataacagtgcggttgggacgagtaagaaaagtgacatggctgaggttaaggattggaaagcgatccgtgtggatctggtgatcacgccattcgagcagtacgcctatgcgctgctcggttggacgggcagcaaacaatttcgtcgcgatctgcgtcgctatgcggaggaagagcgcggcatgatcctcgacaaccatgccctctacgacctgaaaaagcgcatctttctgaaagcgggcagcgaagaagagattttcgcgcatctgggtctggattatgtggagccgtgggaacgcaacgcg

SEQ ID NO: 2950 - protein, 394 aa, synthetic construct
  REGION 1..394: note = Variant of terminal deoxynucleotidyl transferase
MHHHHHHGGSGHPPSNTPEKEVPSVIARPVSQYACQRKTTLNNYNKKFTDALEIMAENYKFKENLIACLEAKRAASIFKYLPFEVTSMKDIQGLPCITDQVRDVIEEIIEEGESSRVKEILNDERYKAFKQFTSVFGVGVKTAEKWYRMGLRTVEEAKASKSLKLSKMQKAGFLYYEDLASMVSKEEADAVTLIVKETVWTFLPDALVTITGGFRRGKPMGHDVDFLITNPGRKEDDELLHKVVDLLKKQGLLLYEDIKESTFVEGQLPSHKIDAMDNFQKCFAILKLYQPKVDNSAVGTSKKSDMAEVKDWKAIRVDLVITPFEQYAYALLGWTGSKQFRRDLRRYAEEERGMILDNHALYDLKKRIFLKAGSEEEIFAHLGLDYVEPWERNA

SEQ ID NO: 2951 - DNA, 1182 bp, synthetic construct
  misc_feature 1..1182: note = Variant of terminal deoxynucleotidyl transferase
  source 1..1182: mol_type = other DNA
atgcatcaccaccatcatcatgggggttctggtcatccgccgagcaataccccggagaaggaggtgccgagcgttatcgcccgtccggttagtcagtacgcgtgccagcgcaagaccacgctgaataactacaacaaaaagttcaccgacgcgctggagatcatggccgagaactacaaatttaaagagaacctgatcgcgtgtctggaagccaagcgcgccgcgagtatttttaaatatctgccgttcgaggttaccagcatgaaagacatccaaggtctgccgtgcattaccgaccaggttcgtgacgtgatcgaggagatcatcgaagagggcgagagcagccgtgttaaagaaatcctcaatgacgagcgctacaaggcctttaagcagttcaccagcgtgttcggtgtgggcgtgaaaaccgcggaaaagtggtaccgtatgggcctccgtacggttgaagaagcaaaggccagtaagagtctgaagctgagcaagatgcagaaggcgggcttcctgtattacgaggatctggcgagcatggttagtaaagaagaagccgatgccgttacgctcatcgtgaaggaaacggtgcgtacctttctgccggatgcgctggtgaccatcaccggcggtttccgccgtggcaaacctatgggccacgacgttgactttctgatcacgaacccgggccgcaaagaggatgacgagctgctccacaaagtggttgatctgctcaagaagcaaggtctgctgctgtacgaagacatcaaagagagcacgttcgtggaggggcaactgccaagtcataaaatcgacgccatggacaacttccagaagtgcttcgccattctcaagctgtaccagccgaaggtggataacagtgcggttgggacgagtaagaaaagtgacatggctgaggttaaggattggaaagcgatccgtgtggatctggtgatcacgccattcgagcagtacgcctatgcgctgctcggttggacgggcagcaaacaatttcgtcgcgatctgcgtcgctatgcggaggaagagcgcgctatgatcctcgacaaccatgccctctacgacctgaaaaagcgcatctttctgaaagcgggcagcgaagaagagattttcgcgcatctgggtctggattatgtggagccgtgggaacgcaacgcg

SEQ ID NO: 2952 - protein, 394 aa, synthetic construct
  REGION 1..394: note = Variant of terminal deoxynucleotidyl transferase
MHHHHHHGGSGHPPSNTPEKEVPSVIARPVSQYACQRKTTLNNYNKKFTDALEIMAENYKFKENLIACLEAKRAASIFKYLPFEVTSMKDIQGLPCITDQVRDVIEEIIEEGESSRVKEILNDERYKAFKQFTSVFGVGVKTAEKWYRMGLRTVEEAKASKSLKLSKMQKAGFLYYEDLASMVSKEEADAVTLIVKETVRTFLPDALVTITGGFRRGKPMGHDVDFLITNPGRKEDDELLHKVVDLLKKQGLLLYEDIKESTFVEGQLPSHKIDAMDNFQKCFAILKLYQPKVDNSAVGTSKKSDMAEVKDWKAIRVDLVITPFEQYAYALLGWTGSKQFRRDLRRYAEEERAMILDNHALYDLKKRIFLKAGSEEEIFAHLGLDYVEPWERNA

SEQ ID NO: 2953 - DNA, 1182 bp, synthetic construct
  misc_feature 1..1182: note = Variant of terminal deoxynucleotidyl transferase
  source 1..1182: mol_type = other DNA
atgcatcaccaccatcatcatgggggttctggtcatccgccgagcaataccccggagaaggaggtgccgagcgttatcgcccgtccggttagtcagtacgcgtgccagcgcaagaccacgctgaataactacaacaaaaagttcaccgacgcgctggagatcatggccgagaactacaaatttaaagagaacctgatcgcgtgtctggaagccaagcgcgccgcgagtatttttaaatatctgccgttcgaggttaccagcatgaaagacatccaaggtctgccgtgcattaccgaccaggttcgtgacgtgatcgaggagatcatcgaagagggcgagagcagccgtgttaaagaaatcctcaatgacgagcgctacaaggcctttaagcagttcaccagcgtgttcggtgtgggcgtgaaaaccgcggaaaagtggtaccgtatgggcctccgtacggttgaagaagcaaaggccagtaagagtctgaagctgagcaagatgcagaaggcgggcttcctgtattacgaggatctggcgagcatggttagtaaagaagaagccgatgccgttacgctcatcgtgaaggaaacggtgcgtacctttctgccggatgcgctggtgaccatcaccggcggtttccgccgtggcaaacctatgggccacgacgttgactttctgatcacgaacccgggccgcaaagaggatgacgagctgctccacaaagtggttgatctgctcaagaagcaaggtctgctgctgtacgaagacatcaaagagagcacgttcgtggaggggcaactgccaagtcataaaatcgacgccatggacaacttccagaagtgcttcgccattctcaagctgtaccagccgaaggtggataacagtgcggttgggacgagtaagaaaagtgacatggctgaggttaaggattggaaagcgatccgtgtggatctggtgatcacgccattcgagcagtacgcctatgcgctgctcggttggacgggcagcaaacaatttcgtcgcgatctgcgtcgctatgcggaggaagagcgcggcatgatcctcgacaaccatgccctctacgacctgaaaaagcgcatctttctgaaagcgggcagcgaagaagagattttcgcgcatctgggtctggattatgtgcagccgtgggaacgcaacgcg

SEQ ID NO: 2954 - protein, 394 aa, synthetic construct
  REGION 1..394: note = Variant of terminal deoxynucleotidyl transferase
MHHHHHHGGSGHPPSNTPEKEVPSVIARPVSQYACQRKTTLNNYNKKFTDALEIMAENYKFKENLIACLEAKRAASIFKYLPFEVTSMKDIQGLPCITDQVRDVIEEIIEEGESSRVKEILNDERYKAFKQFTSVFGVGVKTAEKWYRMGLRTVEEAKASKSLKLSKMQKAGFLYYEDLASMVSKEEADAVTLIVKETVRTFLPDALVTITGGFRRGKPMGHDVDFLITNPGRKEDDELLHKVVDLLKKQGLLLYEDIKESTFVEGQLPSHKIDAMDNFQKCFAILKLYQPKVDNSAVGTSKKSDMAEVKDWKAIRVDLVITPFEQYAYALLGWTGSKQFRRDLRRYAEEERGMILDNHALYDLKKRIFLKAGSEEEIFAHLGLDYVQPWERNA

SEQ ID NO: 2955 - DNA, 1182 bp, synthetic construct
  misc_feature 1..1182: note = Variant of terminal deoxynucleotidyl transferase
  source 1..1182: mol_type = other DNA
atgcatcaccaccatcatcatgggggttctggtcatccgccgagcaataccccggagaaggaggtgccgagcgttatcgcccgtccggttagtcagtacgcgtgccagcgcaagaccacgctgaataactacaacaaaaagttcaccgacgcgctggagatcatggccgagaactacaaatttaaagagaacctgatcgcgtgtctggaagccaagcgcgccgcgagtatttttaaatatctgccgttcgaggttaccagcatgaaagacatccaaggtctgccgtgcattaccgaccaggttcgtgacgtgatcgaggagatcatcgaagagggcgagagcagccgtgttaaagaaatcctcaatgacgagcgctacaaggcctttaagcagttcaccagcgtgttcggtgtgggcgtgaaaaccgcggaaaagtggtaccgtatgggcctccgtacggttgaagaagcaaaggccagtaagagtctgaagctgagcaagatgcagaaggcgggcttcctgtattacgaggatctggcgagcatggttagtaaagaagaagccgatgccgttacgctcatcgtgaaggaaacggtgcgtacctttctgccggatgcgctggtgaccatcaccggcggtttccgccgtggcaaacctatgggccacgacgttgactttctgatcacgaacccgggccgcaaagaggatgacgagctgctccacaaagtggttgatctgctcaagaagcaaggtctgctgctgtacgaagacatcaaagagagcacgttcgtggaggggcaactgccaagtcataaaatcgacgccatggacaacttccagaagtgcttcgccattctcaagctgtaccagccgaaggtggataacagtgcggttgggacgagtaagaaaagtgacatggctgaggttaaggattggaaagcgatccgtgtggatctggtgatcacgccattcgagcagtacgcctatgcgctgctcggttggacgggcagcaaacaatttcgtcgcgatctgcgtcgctatgcgatggaagagcgcggcatgatcctcgacaaccatgccctctacgacctgaaaaagcgcatctttctgaaagcgggcagcgaagaagagattttcgcgcatctgggtctggattatgtggagccgtgggaacgcaacgcg

SEQ ID NO: 2956 - protein, 394 aa, synthetic construct
  REGION 1..394: note = Variant of terminal deoxynucleotidyl transferase
MHHHHHHGGSGHPPSNTPEKEVPSVIARPVSQYACQRKTTLNNYNKKFTDALEIMAENYKFKENLIACLEAKRAASIFKYLPFEVTSMKDIQGLPCITDQVRDVIEEIIEEGESSRVKEILNDERYKAFKQFTSVFGVGVKTAEKWYRMGLRTVEEAKASKSLKLSKMQKAGFLYYEDLASMVSKEEADAVTLIVKETVRTFLPDALVTITGGFRRGKPMGHDVDFLITNPGRKEDDELLHKVVDLLKKQGLLLYEDIKESTFVEGQLPSHKIDAMDNFQKCFAILKLYQPKVDNSAVGTSKKSDMAEVKDWKAIRVDLVITPFEQYAYALLGWTGSKQFRRDLRRYAMEERGMILDNHALYDLKKRIFLKAGSEEEIFAHLGLDYVEPWERNA

SEQ ID NO: 2957 - DNA, 1182 bp, synthetic construct
  misc_feature 1..1182: note = Variant of terminal deoxynucleotidyl transferase
  source 1..1182: mol_type = other DNA
atgcatcaccaccatcatcatgggggttctggtcatccgccgagcaataccccggagaaggaggtgccgagcgttatcgcccgtccggttagtcagtacgcgtgccagcgcaagaccacgctgaataactacaacaaaaagttcaccgacgcgctggagatcatggccgagaactacaaatttaaagagaacctgatcgcgtgtctggaagccaagcgcgccgcgagtatttttaaatatctgccgttcgaggttaccagcatgaaagacatccaaggtctgccgtgcattaccgaccaggttcgtgacgtgatcgaggagatcatcgaagagggcgagagcagccgtgttaaagaaatcctcaatgacgagcgctacaaggcctttaagcagttcaccagcgtgttcggtgtgggcgtgaaaaccgcggaaaagtggtaccgtatgggcctccgtacggttgaagaagcaaaggccagtaagagtctgaagctgagcaagatgcagaaggcgggcttcctgtattacgaggatctggcgagcatggttagtaaagaagaagccgatgccgttacgctcatcgtgaaggaaacggtgcgtacctttctgccgggggcgctggtgaccatcaccggcggtttccgccgtggcaaacctatgggccacgacgttgactttctgatcacgaacccgggccgcaaagaggatgacgagctgctccacaaagtggttgatctgctcaagaagcaaggtctgctgctgtacgaagacatcaaagagagcacgttcgtggaggggcaactgccaagtcataaaatcgacgccatggacaacttccagaagtgcttcgccattctcaagctgtaccagccgaaggtggataacagtgcggttgggacgagtaagaaaagtgacatggctgaggttaaggattggaaagcgatccgtgtggatctggtgatcacgccattcgagcagtacgcctatgcgctgctcggttggacgggcagcaaacaatttcgtcgcgatctgcgtcgctatgcggaggaagagcgcggcatgatcctcgacaaccatgccctctacgacctgaaaaagcgcatctttctgaaagcgggcagcgaagaagagattttcgcgcatctgggtctggattatgtggagccgtgggaacgcaacgcg

SEQ ID NO: 2958 - protein, 394 aa, synthetic construct
  REGION 1..394: note = Variant of terminal deoxynucleotidyl transferase
MHHHHHHGGSGHPPSNTPEKEVPSVIARPVSQYACQRKTTLNNYNKKFTDALEIMAENYKFKENLIACLEAKRAASIFKYLPFEVTSMKDIQGLPCITDQVRDVIEEIIEEGESSRVKEILNDERYKAFKQFTSVFGVGVKTAEKWYRMGLRTVEEAKASKSLKLSKMQKAGFLYYEDLASMVSKEEADAVTLIVKETVRTFLPGALVTITGGFRRGKPMGHDVDFLITNPGRKEDDELLHKVVDLLKKQGLLLYEDIKESTFVEGQLPSHKIDAMDNFQKCFAILKLYQPKVDNSAVGTSKKSDMAEVKDWKAIRVDLVITPFEQYAYALLGWTGSKQFRRDLRRYAEEERGMILDNHALYDLKKRIFLKAGSEEEIFAHLGLDYVEPWERNA

SEQ ID NO: 2959 - DNA, 1182 bp, synthetic construct
  misc_feature 1..1182: note = Variant of terminal deoxynucleotidyl transferase
  source 1..1182: mol_type = other DNA
atgcatcaccaccatcatcatgggggttctggtcatccgccgagcaataccccggagaaggaggtgccgagcgttatcgcccgtccggttagtcagtacgcgtgccagcgcaagaccacgctgaataactacaacaaaaagttcaccgacgcgctggagatcatggccgagaactacaaatttaaagagaacctgatcgcgtgtctggaagccaagcgcgccgcgagtatttttaaatatctgccgttcgaggttaccagcatgaaagacatccaaggtctgccgtgcattaccgaccaggttcgtgacgtgatcgaggagatcatcgaagagggcgagagcagccgtgttaaagaaatcctcaatgacgagcgctacaaggcctttaagcagttcaccagcgtgttcggtgtgggcgtgaaaaccgcggaaaagtggtaccgtatgggcctccgtacggttgaagaagcaaaggccagtaagagtctgaagctgagcaagatgcagaaggcgggcttcctgtattacgaggatctggcgagcatggttagtaaagaagaagccgatgccgttacgctcatcgtgaaggaaacggtgcgtacctttctgccggatgcgctggtgaccatcaccggcggtttccgccgtggcaaacctatgggccacgacgttgactttctgatcacgaacgggggccgcaaagaggatgacgagctgctccacaaagtggttgatctgctcaagaagcaaggtctgctgctgtacgaagacatcaaagagagcacgttcgtggaggggcaactgccaagtcataaaatcgacgccatggacaacttccagaagtgcttcgccattctcaagctgtaccagccgaaggtggataacagtgcggttgggacgagtaagaaaagtgacatggctgaggttaaggattggaaagcgatccgtgtggatctggtgatcacgccattcgagcagtacgcctatgcgctgctcggttggacgggcagcaaacaatttcgtcgcgatctgcgtcgctatgcggaggaagagcgcggcatgatcctcgacaaccatgccctctacgacctgaaaaagcgcatctttctgaaagcgggcagcgaagaagagattttcgcgcatctgggtctggattatgtggagccgtgggaacgcaacgcg

SEQ ID NO: 2960 - protein, 394 aa, synthetic construct
  REGION 1..394: note = Variant of terminal deoxynucleotidyl transferase
MHHHHHHGGSGHPPSNTPEKEVPSVIARPVSQYACQRKTTLNNYNKKFTDALEIMAENYKFKENLIACLEAKRAASIFKYLPFEVTSMKDIQGLPCITDQVRDVIEEIIEEGESSRVKEILNDERYKAFKQFTSVFGVGVKTAEKWYRMGLRTVEEAKASKSLKLSKMQKAGFLYYEDLASMVSKEEADAVTLIVKETVRTFLPDALVTITGGFRRGKPMGHDVDFLITNGGRKEDDELLHKVVDLLKKQGLLLYEDIKESTFVEGQLPSHKIDAMDNFQKCFAILKLYQPKVDNSAVGTSKKSDMAEVKDWKAIRVDLVITPFEQYAYALLGWTGSKQFRRDLRRYAEEERGMILDNHALYDLKKRIFLKAGSEEEIFAHLGLDYVEPWERNA

SEQ ID NO: 2961 - DNA, 1182 bp, synthetic construct
  misc_feature 1..1182: note = Variant of terminal deoxynucleotidyl transferase
  source 1..1182: mol_type = other DNA
atgcatcaccaccatcatcatgggggttctggtcatccgccgagcaataccccggagaaggaggtgccgagcgttatcgcccgtccggttagtcagtacgcgtgccagcgcaagaccacgctgaataactacaacaaaaagttcaccgacgcgctggagatcatggccgagaactacaaatttaaagagaacctgatcgcgtgtctggaagccaagcgcgccgcgagtatttttaaatatctgccgttcgaggttaccagcatgaaagacatccaaggtctgccgtgcattaccgaccaggttcgtgacgtgatcgaggagatcatcgaagagggcgagagcagccgtgttaaagaaatcctcaatgacgagcgctacaaggcctttaagcagttcaccagcgtgttcggtgtgggcgtgaaaaccgcggaaaagtggtaccgtatgggcctccgtacggttgaagaagcaaaggccagtaagagtctgaagctgagcaagatgcagaaggcgggcttcctgtattacgaggatctggcgagcatggttagtaaagaagaagccgatgccgttacgctcatcgtgaaggaaacggtgcgtacctttctgccggatgcgctggtgaccatcaccggcggtttccgccgtggcaaacctatgggccacgacgttgactttctgatcacgaacccgggccgcaaagaggatgacgagctgctccacaaagtggttgatctgctcaagaagcaaggtctgctgctgtacgaagacatcaaagagagcacgttcgtggaggggcaactgccaagtcataaaatcgacgccatggacaacttccagaagtgcttcgccattctcaagctgtaccagccgaaggtggataacagtgcggttgggacgagtaagaaaagtgacatggctgaggttaaggattggaaagcgatccgtgtggatctggtgatcacgccattcgagcagtacgcctatgcgctgctcggttggacgggcagcaaacaatttcgtcgcgatctgcgtcgctatgcggaggaagagcgcggcatgatcctcgacaaccatgccctctacgacctgaaaaagcgcatctttctgaaagcgggcagcgaagaagagattttcgcgcatctgggtctggattttgtggagccgtgggaacgcaacgcg

SEQ ID NO: 2962 - protein, 394 aa, synthetic construct
  REGION 1..394: note = Variant of terminal deoxynucleotidyl transferase
MHHHHHHGGSGHPPSNTPEKEVPSVIARPVSQYACQRKTTLNNYNKKFTDALEIMAENYKFKENLIACLEAKRAASIFKYLPFEVTSMKDIQGLPCITDQVRDVIEEIIEEGESSRVKEILNDERYKAFKQFTSVFGVGVKTAEKWYRMGLRTVEEAKASKSLKLSKMQKAGFLYYEDLASMVSKEEADAVTLIVKETVRTFLPDALVTITGGFRRGKPMGHDVDFLITNPGRKEDDELLHKVVDLLKKQGLLLYEDIKESTFVEGQLPSHKIDAMDNFQKCFAILKLYQPKVDNSAVGTSKKSDMAEVKDWKAIRVDLVITPFEQYAYALLGWTGSKQFRRDLRRYAEEERGMILDNHALYDLKKRIFLKAGSEEEIFAHLGLDFVEPWERNA

SEQ ID NO: 2963 - DNA, 1182 bp, synthetic construct
  misc_feature 1..1182: note = Variant of terminal deoxynucleotidyl transferase
  source 1..1182: mol_type = other DNA
atgcatcaccaccatcatcatgggggttctggtcatccgccgagcaataccccggagaaggaggtgccgagcgttatcgcccgtccggttagtcagtacgcgtgccagcgcaagaccacgctgaataactacaacaaaaagttcaccgacgcgctggagatcatggccgagaactacaaatttaaagagaacctgatcgcgtgtctggaagccaagcgcgccgcgagtatttttaaatatctgccgttcgaggttaccagcatgaaagacatccaaggtctgccgtgcattaccgaccaggttcgtgacgtgatcgaggagatcatcgaagagggcgagagcagccgtgttaaagaaatcctcaatgacgagcgctacaaggcctttaagcagttcaccagcgtgttcggtgtgggcgtgaaaaccgcggaaaagtggtaccgtatgggcctccgtacggttgaagaagcaaaggccagtaagagtctgaagctgagcaagatgcagaaggcgggcttcctgtattacgaggatctggcgagcatggttagtaaagaagaagccgatgccgttacgctcatcgtgaaggaaacggtgcgtacctttctgccggatgcgctggtgaccatcaccggcggtttccgccgtggcaaacctatgggccacgacgttgactttctgatcacgaacccgggccgcaaagaggatgacgagctgctccacaaagtggttgatctgctcaagaagcaaggtctgctgctgtacgaagacatcaaagagagcacgttcgtggaggggcaactgccaagtcataaaatcgacgccatggacaacttccagaagtgcttcgccattctcaagctgtaccagccgaaggtggataacagtgcggttgggacgagtaagaaaagtgacatggctgaggttaaggattggaaagcgatccgtgtggatctggtgatcacgccattcgagcagtacgcctatgcgctgctcggttggacgggcagcaaacaatttcgtcgcgatctgcgtcgctatgcggaggaagagcgcaatatgatcctcgacaaccatgccctctacgacctgaaaaagcgcatctttctgaaagcgggcagcgaagaagagattttcgcgcatctgggtctggattatgtggagccgtgggaacgcaacgcg

SEQ ID NO: 2964 - protein, 394 aa, synthetic construct
  REGION 1..394: note = Variant of terminal deoxynucleotidyl transferase
MHHHHHHGGSGHPPSNTPEKEVPSVIARPVSQYACQRKTTLNNYNKKFTDALEIMAENYKFKENLIACLEAKRAASIFKYLPFEVTSMKDIQGLPCITDQVRDVIEEIIEEGESSRVKEILNDERYKAFKQFTSVFGVGVKTAEKWYRMGLRTVEEAKASKSLKLSKMQKAGFLYYEDLASMVSKEEADAVTLIVKETVRTFLPDALVTITGGFRRGKPMGHDVDFLITNPGRKEDDELLHKVVDLLKKQGLLLYEDIKESTFVEGQLPSHKIDAMDNFQKCFAILKLYQPKVDNSAVGTSKKSDMAEVKDWKAIRVDLVITPFEQYAYALLGWTGSKQFRRDLRRYAEEERNMILDNHALYDLKKRIFLKAGSEEEIFAHLGLDYVEPWERNA

SEQ ID NO: 2965 - DNA, 1182 bp, synthetic construct
  misc_feature 1..1182: note = Variant of terminal deoxynucleotidyl transferase
  source 1..1182: mol_type = other DNA
atgcatcaccaccatcatcatgggggttctggtcatccgccgagcaataccccggagaaggaggtgccgagcgttatcgcccgtccggttagtcagtacgcgtgccagcgcaagaccacgctgaataactacaacaaaaagttcaccgacgcgctggagatcatggccgagaactacaaatttaaagagaacctgatcgcgtgtctggaagccaagcgcgccgcgagtatttttaaatatctgccgttcgaggttaccagcatgaaagacatccaaggtctgccgtgcattaccgaccaggttcgtgacgtgatcgaggagatcatcgaagagggcgagagcagccgtgttaaagaaatcctcaatgacgagcgctacaaggcctttaagcagttcaccagcgtgttcggtgtgggcgtgaaaaccgcggaaaagtggtaccgtatgggcctccgtacggttgaagaagcaaaggccagtaagagtctgaagctgagcaagatgcagaaggcgggcttcctgtattacgaggatctggcgagcatggttagtaaagaagaagccgatgccgttacgctcatcgtgaaggaaacggtgcgtacctttctgccggatgcgctggtgaccatcaccggcggtttccgccgtggcaaacctatgggccacgacgttgactttctgatcacggggccgggccgcaaagaggatgacgagctgctccacaaagtggttgatctgctcaagaagcaaggtctgctgctgtacgaagacatcaaagagagcacgttcgtggaggggcaactgccaagtcataaaatcgacgccatggacaacttccagaagtgcttcgccattctcaagctgtaccagccgaaggtggataacagtgcggttgggacgagtaagaaaagtgacatggctgaggttaaggattggaaagcgatccgtgtggatctggtgatcacgccattcgagcagtacgcctatgcgctgctcggttggacgggcagcaaacaatttcgtcgcgatctgcgtcgctatgcggaggaagagcgcggcatgatcctcgacaaccatgccctctacgacctgaaaaagcgcatctttctgaaagcgggcagcgaagaagagattttcgcgcatctgggtctggattatgtggagccgtgggaacgcaacgcg

SEQ ID NO: 2966 - protein, 394 aa, synthetic construct
  REGION 1..394: note = Variant of terminal deoxynucleotidyl transferase
MHHHHHHGGSGHPPSNTPEKEVPSVIARPVSQYACQRKTTLNNYNKKFTDALEIMAENYKFKENLIACLEAKRAASIFKYLPFEVTSMKDIQGLPCITDQVRDVIEEIIEEGESSRVKEILNDERYKAFKQFTSVFGVGVKTAEKWYRMGLRTVEEAKASKSLKLSKMQKAGFLYYEDLASMVSKEEADAVTLIVKETVRTFLPDALVTITGGFRRGKPMGHDVDFLITGPGRKEDDELLHKVVDLLKKQGLLLYEDIKESTFVEGQLPSHKIDAMDNFQKCFAILKLYQPKVDNSAVGTSKKSDMAEVKDWKAIRVDLVITPFEQYAYALLGWTGSKQFRRDLRRYAEEERGMILDNHALYDLKKRIFLKAGSEEEIFAHLGLDYVEPWERNA

SEQ ID NO: 2967 - DNA, 1182 bp, synthetic construct
  misc_feature 1..1182: note = Variant of terminal deoxynucleotidyl transferase
  source 1..1182: mol_type = other DNA
atgcatcaccaccatcatcatgggggttctggtcatccgccgagcaataccccggagaaggaggtgccgagcgttatcgcccgtccggttagtcagtacgcgtgccagcgcaagaccacgctgaataactacaacaaaaagttcaccgacgcgctggagatcatggccgagaactacaaatttaaagagaacctgatcgcgtgtctggaagccaagcgcgccgcgagtatttttaaatatctgccgttcgaggttaccagcatgaaagacatccaaggtctgccgtgcattaccgaccaggttcgtgacgtgatcgaggagatcatcgaagagggcgagagcagccgtgttaaagaaatcctcaatgacgagcgctacaaggcctttaagcagttcaccagcgtgttcggtgtgggcgtgaaaaccgcggaaaagtggtaccgtatgggcctccgtacggttgaagaagcaaaggccagtaagagtctgaagctgagcaagatgcagaaggcgggcttcctgtattacgaggatctggcgagcatggttagtaaagaagaagccgatgccgttacgctcatcgtgaaggaaacggtgcgtacctttctgccggatgggctggtgaccatcaccggcggtttccgccgtggcaaacctatgggccacgacgttgactttctgatcacgaacccgggccgcaaagaggatgacgagctgctccacaaagtggttgatctgctcaagaagcaaggtctgctgctgtacgaagacatcaaagagagcacgttcgtggaggggcaactgccaagtcataaaatcgacgccatggacaacttccagaagtgcttcgccattctcaagctgtaccagccgaaggtggataacagtgcggttgggacgagtaagaaaagtgacatggctgaggttaaggattggaaagcgatccgtgtggatctggtgatcacgccattcgagcagtacgcctatgcgctgctcggttggacgggcagcaaacaatttcgtcgcgatctgcgtcgctatgcggaggaagagcgcggcatgatcctcgacaaccatgccctctacgacctgaaaaagcgcatctttctgaaagcgggcagcgaagaagagattttcgcgcatctgggtctggattatgtggagccgtgggaacgcaacgcg

SEQ ID NO: 2968 - protein, 394 aa, synthetic construct
  REGION 1..394: note = Variant of terminal deoxynucleotidyl transferase
MHHHHHHGGSGHPPSNTPEKEVPSVIARPVSQYACQRKTTLNNYNKKFTDALEIMAENYKFKENLIACLEAKRAASIFKYLPFEVTSMKDIQGLPCITDQVRDVIEEIIEEGESSRVKEILNDERYKAFKQFTSVFGVGVKTAEKWYRMGLRTVEEAKASKSLKLSKMQKAGFLYYEDLASMVSKEEADAVTLIVKETVRTFLPDGLVTITGGFRRGKPMGHDVDFLITNPGRKEDDELLHKVVDLLKKQGLLLYEDIKESTFVEGQLPSHKIDAMDNFQKCFAILKLYQPKVDNSAVGTSKKSDMAEVKDWKAIRVDLVITPFEQYAYALLGWTGSKQFRRDLRRYAEEERGMILDNHALYDLKKRIFLKAGSEEEIFAHLGLDYVEPWERNA

SEQ ID NO: 2969 - DNA, 1182 bp, synthetic construct
  misc_feature 1..1182: note = Variant of terminal deoxynucleotidyl transferase
  source 1..1182: mol_type = other DNA
atgcatcaccaccatcatcatgggggttctggtcatccgccgggcaataccccggagaaggaggtgccgagcgttatcgcccgtccggttagtcagtacgcgtgccagcgcaagaccacgctgaataactacaacaaaaagttcaccgacgcgctggagatcatggccgagaactacaaatttaaagagaacctgatcgcgtgtctggaagccaagcgcgccgcgagtatttttaaatatctgccgttcgaggttaccagcatgaaagacatccaaggtctgccgtgcattaccgaccaggttcgtgacgtgatcgaggagatcatcgaagagggcgagagcagccgtgttaaagaaatcctcaatgacgagcgctacaaggcctttaagcagttcaccagcgtgttcggtgtgggcgtgaaaaccgcggaaaagtggtaccgtatgggcctccgtacggttgaagaagcaaaggccagtaagagtctgaagctgagcaagatgcagaaggcgggcttcctgtattacgaggatctggcgagcatggttagtaaagaagaagccgatgccgttacgctcatcgtgaaggaaacggtgcgtacctttctgccggatgcgctggtgaccatcaccggcggtttccgccgtggcaaacctatgggccacgacgttgactttctgatcacgaacccgggccgcaaagaggatgacgagctgctccacaaagtggttgatctgctcaagaagcaaggtctgctgctgtacgaagacatcaaagagagcacgttcgtggaggggcaactgccaagtcataaaatcgacgccatggacaacttccagaagtgcttcgccattctcaagctgtaccagccgaaggtggataacagtgcggttgggacgagtaagaaaagtgacatggctgaggttaaggattggaaagcgatccgtgtggatctggtgatcacgccattcgagcagtacgcctatgcgctgctcggttggacgggcagcaaacaatttcgtcgcgatctgcgtcgctatgcggaggaagagaggggcatgatcctcgacaaccatgccctctacgacctgaaaaagcgcatctttctgaaagcgggcagcgaagaagagattttcgcgcatctgggtctggattatgtggagccgtgggaacgcaacgcg

SEQ ID NO: 2970 - protein, 394 aa, synthetic construct
  REGION 1..394: note = Variant of terminal deoxynucleotidyl transferase
MHHHHHHGGSGHPPGNTPEKEVPSVIARPVSQYACQRKTTLNNYNKKFTDALEIMAENYKFKENLIACLEAKRAASIFKYLPFEVTSMKDIQGLPCITDQVRDVIEEIIEEGESSRVKEILNDERYKAFKQFTSVFGVGVKTAEKWYRMGLRTVEEAKASKSLKLSKMQKAGFLYYEDLASMVSKEEADAVTLIVKETVRTFLPDALVTITGGFRRGKPMGHDVDFLITNPGRKEDDELLHKVVDLLKKQGLLLYEDIKESTFVEGQLPSHKIDAMDNFQKCFAILKLYQPKVDNSAVGTSKKSDMAEVKDWKAIRVDLVITPFEQYAYALLGWTGSKQFRRDLRRYAEEERGMILDNHALYDLKKRIFLKAGSEEEIFAHLGLDYVEPWERNA

SEQ ID NO: 2971 - DNA, 1182 bp, synthetic construct
  misc_feature 1..1182: note = Variant of terminal deoxynucleotidyl transferase
  source 1..1182: mol_type = other DNA
atgcatcaccaccatcatcatgggggttctggtcatccgccgagcaataccccggagaaggaggtgccgagcgttatcgcccgtccggttagtcagtacgcgtgccagcgcaagaccacgctgaataactacaacaaaaagttcaccgacgcgctggagatcatggccgagaactacaaatttaaagagaacctgatcgcgtgtctggaagccaagcgcgccgcgagtatttttaaatatctgccgttcgaggttaccagcatgaaagacatccaaggtctgccgtgcattaccgaccaggttcgtgacgtgatcgaggagatcatcgaagagggcgagagcagccgtgttaaagaaatcctcaatgacgagcgctacaaggcctttaagcagttcaccagcgtgttcggtgtgggcgtgaaaaccgcggaaaagtggtaccgtatgggcctccgtacggttgaagaagcaaaggccagtaagagtctgaagctgagcaagatgcagaaggcgggcttcctgtattacgaggatctggcgagcatggttagtaaagaagaagccgatgccgttacgctcatcgtgaaggaaacggtgcgtacctttctgccggatgcgctggtgaccatcaccggcggtttccgccgtggcaaacctatgggccacgacgttgactttctgatcacgaacccgggccgcaaagaggatgacgagctgctccacaaagtggttgatctgctcaagaagcaaggtctgctgctgtacgaagacatcaaagagagcacgttcgtggaggggcaactgccaagtcataaaatcgacgccatggacaacttccagaagtgcttcgccattctcaagctgtaccagccgaaggtggataacagtgcggttgggacgagtaagaaaagtgacatggctgaggttaaggattggaaagcgatccgtgtggatctggtgatcacgccattcgagcagcgtgcctatgcgctgctcggttggacgggcagcaaacaatttcgtcgcgatctgcgtcgctatgcggaggaagagcgcggcatgatcctcgacaaccatgccctctacgacctgaaaaagcgcatctttctgaaagcgggcagcgaagaagagattttcgcgcatctgggtctggattatgtggagccgtgggaacgcaacgcg

SEQ ID NO: 2972 - protein, 394 aa, synthetic construct
  REGION 1..394: note = Variant of terminal deoxynucleotidyl transferase
MHHHHHHGGSGHPPSNTPEKEVPSVIARPVSQYACQRKTTLNNYNKKFTDALEIMAENYKFKENLIACLEAKRAASIFKYLPFEVTSMKDIQGLPCITDQVRDVIEEIIEEGESSRVKEILNDERYKAFKQFTSVFGVGVKTAEKWYRMGLRTVEEAKASKSLKLSKMQKAGFLYYEDLASMVSKEEADAVTLIVKETVRTFLPDALVTITGGFRRGKPMGHDVDFLITNPGRKEDDELLHKVVDLLKKQGLLLYEDIKESTFVEGQLPSHKIDAMDNFQKCFAILKLYQPKVDNSAVGTSKKSDMAEVKDWKAIRVDLVITPFEQRAYALLGWTGSKQFRRDLRRYAEEERGMILDNHALYDLKKRIFLKAGSEEEIFAHLGLDYVEPWERNA

SEQ ID NO: 2973 - DNA, 1182 bp, synthetic construct
  misc_feature 1..1182: note = Variant of terminal deoxynucleotidyl transferase
  source 1..1182: mol_type = other DNA
atgcatcaccaccatcatcatgggggttctggtcatccgccgagcaataccccggagaaggaggtgccgagcgttatcgcccgtccggttagtcagtacgcgtgccagcgcaagaccacgctgaataactacaacaaaaagttcaccgacgcgctggagatcatggccgagaactacaaatttaaagagaacctgatcgcgtgtctggaagccaagcgcgccgcgagtatttttaaatatctgccgttcgaggttaccagcatgaaagacatccaaggtctgccgtgcattaccgaccaggttcgtgacgtgatcgaggagatcatcgaagagggcgagagcagccgtgttaaagaaatcctcaatgacgagcgctacaaggcctttaagcagttcaccagcgtgttcggtgtgggcgtgaaaaccgcggaaaagtggtaccgtatgggcctccgtacggttgaagaagcaaaggccagtaagagtctgaagctgagcaagatgcagaaggcgggcttcctgtattacgaggatctggcgagcatggttagtaaagaagaagccgatgccgttacgctcatcgtgaaggaaacggtgcgtacctttctgccggatgcgctggtgaccatcaccggcggtttccgccgtggcaaacctatgggccacgacgttgactttctgatcacgaacccgggccgctcggaggatgacgagctgctccacaaagtggttgatctgctcaagaagcaaggtctgctgctgtacgaagacatcaaagagagcacgttcgtggaggggcaactgccaagtcataaaatcgacgccatggacaacttccagaagtgcttcgccattctcaagctgtaccagccgaaggtggataacagtgcggttgggacgagtaagaaaagtgacatggctgaggttaaggattggaaagcgatccgtgtggatctggtgatcacgccattcgagcagtacgcctatgcgctgctcggttggacgggcagcaaacaatttcgtcgcgatctgcgtcgctatgcggaggaagagcgcggcatgatcctcgacaaccatgccctctacgacctgaaaaagcgcatctttctgaaagcgggcagcgaagaagagattttcgcgcatctgggtctggattatgtggagccgtgggaacgcaacgcg

SEQ ID NO: 2974 - protein, 394 aa, synthetic construct
  REGION 1..394: note = Variant of terminal deoxynucleotidyl transferase
MHHHHHHGGSGHPPSNTPEKEVPSVIARPVSQYACQRKTTLNNYNKKFTDALEIMAENYKFKENLIACLEAKRAASIFKYLPFEVTSMKDIQGLPCITDQVRDVIEEIIEEGESSRVKEILNDERYKAFKQFTSVFGVGVKTAEKWYRMGLRTVEEAKASKSLKLSKMQKAGFLYYEDLASMVSKEEADAVTLIVKETVRTFLPDALVTITGGFRRGKPMGHDVDFLITNPGRSEDDELLHKVVDLLKKQGLLLYEDIKESTFVEGQLPSHKIDAMDNFQKCFAILKLYQPKVDNSAVGTSKKSDMAEVKDWKAIRVDLVITPFEQYAYALLGWTGSKQFRRDLRRYAEEERGMILDNHALYDLKKRIFLKAGSEEEIFAHLGLDYVEPWERNA

SEQ ID NO: 2975 - DNA, 1182 bp, synthetic construct
  misc_feature 1..1182: note = Variant of terminal deoxynucleotidyl transferase
  source 1..1182: mol_type = other DNA
atgcatcaccaccatcatcatgggggttctggtcatccgccgagcaataccccggagaaggaggtgccgagcgttatcgcccgtccggttagtcagtacgcgtgccagcgcaagaccacgctgaataactacaacaaaaagttcaccgacgcgctggagatcatggccgagaactacaaatttaaagagaacctgatcgcgtgtctggaagccaagcgcgccgcgagtatttttaaatatctgccgttcgaggttaccagcatgaaagacatccaaggtctgccgtgcattaccgaccaggttcgtgacgtgatcgaggagatcatcgaagagggcgagagcagccgtgttaaagaaatcctcaatgacgagcgctacaaggcctttaagcagttcaccagcgtgttcggtgtgggcgtgaaaaccgcggaaaagtggtaccgtatgggcctccgtacggttgaagaagcaaaggccagtaagagtctgaagctgagcaagatgcagaaggcgggcttcctgtattacgaggatctggcgagcatggttagtaaagaagaagccgatgccgttacgctcatcgtgaaggaaacggtgcgtacctttctgccggatgcgctggtgaccatcaccggcggtttccgccgtggcaaacctatgggccacgacgttgactttctgatcacgaacccgggccgcaaagaggatgacgagctgctccacaaagtggttgatctgctcaagaagcaaggtctgctgctgtacgaagacatcaaagagagcacgttcgtggaggggcaactgccaagtcataaaatcgacgccatggacaacttccagaagtgcttcgccattctcaagctgtaccagccgaaggtggataacagtgcggttgggacgagtaagaaaagtgacatggctgaggttaaggattggaaagcgatccgtgtggatctggtgatcacgccattcgagcagtacgcctatgcgctgctcggttggacgggcagcaaacaatttcgtcgcgatctgcgtcgctatgcgactgaagagcgcggcatgatcctcgacaaccatgccctctacgacctgaaaaagcgcatctttctgaaagcgggcagcgaagaagagattttcgcgcatctgggtctggattatgtggagccgtgggaacgcaacgcg

SEQ ID NO: 2976 - protein, 394 aa, synthetic construct
  REGION 1..394: note = Variant of terminal deoxynucleotidyl transferase
MHHHHHHGGSGHPPSNTPEKEVPSVIARPVSQYACQRKTTLNNYNKKFTDALEIMAENYKFKENLIACLEAKRAASIFKYLPFEVTSMKDIQGLPCITDQVRDVIEEIIEEGESSRVKEILNDERYKAFKQFTSVFGVGVKTAEKWYRMGLRTVEEAKASKSLKLSKMQKAGFLYYEDLASMVSKEEADAVTLIVKETVRTFLPDALVTITGGFRRGKPMGHDVDFLITNPGRKEDDELLHKVVDLLKKQGLLLYEDIKESTFVEGQLPSHKIDAMDNFQKCFAILKLYQPKVDNSAVGTSKKSDMAEVKDWKAIRVDLVITPFEQYAYALLGWTGSKQFRRDLRRYATEERGMILDNHALYDLKKRIFLKAGSEEEIFAHLGLDYVEPWERNA

SEQ ID NO: 2977 - DNA, 1182 bp, synthetic construct
  misc_feature 1..1182: note = Variant of terminal deoxynucleotidyl transferase
  source 1..1182: mol_type = other DNA
atgcatcaccaccatcatcatgggggttctggtcatccgccgagcaataccccggagaaggaggtgccgagcgttatcgcccgtccggttagtcagtacgcgtgccagcgcaagaccacgctgaataactacaacaaaaagttcaccgacgcgctggagatcatggccgagaactacaaatttaaagagaacctgatcgcgtgtctggaagccaagcgcgccgcgagtatttttaaaagcctgccgttcgaggttaccagcatgaaagacatccaaggtctgccgtgcattaccgaccaggtacgtgacgtgatcgaggagatcatcgaagagggcgagagcagccgtgttaaagaaatcctcaatgacgagcgctacaaggcctttaagcagttcaccagcgtgttcggtgtgggcgtgaaaacctcggaaaagtggtaccgtatgggcctccgtacggttgaagaagcaaaggccagtaagagtctgaagctgagcaagatgcagaaggcgggcttcctgtattacgaggatctggcgagcatggttagtaaagaagaagccgatgccgttacgctcatcgtgaaggaaacggtgcgtacctttgtgccggatgcgctggtgaccatcgccggcggtttccgccgtggcaaacctatgggccacgacgttgactttctgatcacgaacccgggccgcaaagaggatgacgagctgctccacaaagtggttgatctgctcaagaagcaaggtctgctgctgtacgaagacatcaaagagagcacgttcgtggaggggcaactgccaagtcataaaatcgacgccatggacaacttccagaagtgcttcgccattctcaagctgtaccagccgaaggtggataacagtgcggttgggacgagtaagaaaagtgacatggctgaggttaaggattggaaagcgatccgtgtggatctggtgatcacgccattcgagcagtacgcctatgcgctgctcggttggacgggcagcggccaatttcgtcgcgatctgcgtcgctatgcggaggaagagcgcggcatgatcctcgacaaccatgccctctacgacctgaaaaagcgcatctttctgaaagcgggcagcgaagaagagattttcgcgcatctgggtctggattatgtggagccgtgggaacgcaacgcg

SEQ ID NO: 2978 - protein, 394 aa, synthetic construct
  REGION 1..394: note = Variant of terminal deoxynucleotidyl transferase
MHHHHHHGGSGHPPSNTPEKEVPSVIARPVSQYACQRKTTLNNYNKKFTDALEIMAENYKFKENLIACLEAKRAASIFKSLPFEVTSMKDIQGLPCITDQVRDVIEEIIEEGESSRVKEILNDERYKAFKQFTSVFGVGVKTSEKWYRMGLRTVEEAKASKSLKLSKMQKAGFLYYEDLASMVSKEEADAVTLIVKETVRTFVPDALVTIAGGFRRGKPMGHDVDFLITNPGRKEDDELLHKVVDLLKKQGLLLYEDIKESTFVEGQLPSHKIDAMDNFQKCFAILKLYQPKVDNSAVGTSKKSDMAEVKDWKAIRVDLVITPFEQYAYALLGWTGSGQFRRDLRRYAEEERGMILDNHALYDLKKRIFLKAGSEEEIFAHLGLDYVEPWERNA

SEQ ID NO: 2979 - DNA, 1182 bp, synthetic construct
  misc_feature 1..1182: note = Variant of terminal deoxynucleotidyl transferase
  source 1..1182: mol_type = other DNA
atgcatcaccaccatcatcatgggggttctggtcatccgccgagcaataccccggagaaggaggtgccgagcgttatcgcccgtccggttagtcagtacgcgtgccagcgcaagaccacgctgaataactacaacaaaaagttcaccgacgcgctggagatcatggccgagaactacaaatttaaagagaacctgatcgcgtgtctggaagccaagcgcgccgcgagtatttttaaatatctgccgttcgaggttaccagcatgaaagacatccaaggtctgccgtgcattaccgaccaggttcgtgacgtgatcgaggagatcatcgaagagggcgagagcagccgtgttaaagaaatcctcaatgacgagcgctacaaggcctttaagcagttcaccagcgtgttcggtgtgggcgtgaaaaccgcggaaaagtggtaccgtatgggcctccgtacggttgaagaagcaaaggccagtaagagtctgaagctgagcaagatgcagaaggcgggcttcctgtattacgaggatctggcgagcatggttagtaaagaagaagccgatgccgttacgctcatcgtgaaggaaacggtgcgtacctttctgccggatgcgctggtgaccatcaccggcggtttccgccgtggcaaacctatgggccacgacgttgactttctgatcacgaacccgggccgcaaagaggatgacgagctgctccacaaagtggttgatctgctcaagaagcaaggtctgctgctgtacgaagacatcaaagagagcacgttcgtggaggggcaagtcccaagtcataaaatcgacgccatggacaacttccagaagtgcttcgccattctcaagctgtaccagccgaaggtggataacagtgcggttgggacgagtaagaaaagtgacatggctgaggttaaggattggaaagcggttcgtgtggatctggtgatcacgccatttgagcagtacgcctatgcgctgctcggttggacgggcagcaaacaatttcgtcgcgatctgcgtgtatatgcggaggaagagcgcggcatgattctcgacaaccatgccctctacgacctgaaagagcgcatctttctgaaagcgggcagcgaagaagagattttcgcgcatctgggtctggattatgtggagccgtgggaacgcaacgcg

SEQ ID NO: 2980 - protein, 394 aa, synthetic construct
  REGION 1..394: note = Variant of terminal deoxynucleotidyl transferase
MHHHHHHGGSGHPPSNTPEKEVPSVIARPVSQYACQRKTTLNNYNKKFTDALEIMAENYKFKENLIACLEAKRAASIFKYLPFEVTSMKDIQGLPCITDQVRDVIEEIIEEGESSRVKEILNDERYKAFKQFTSVFGVGVKTAEKWYRMGLRTVEEAKASKSLKLSKMQKAGFLYYEDLASMVSKEEADAVTLIVKETVRTFLPDALVTITGGFRRGKPMGHDVDFLITNPGRKEDDELLHKVVDLLKKQGLLLYEDIKESTFVEGQVPSHKIDAMDNFQKCFAILKLYQPKVDNSAVGTSKKSDMAEVKDWKAVRVDLVITPFEQYAYALLGWTGSKQFRRDLRVYAEEERGMILDNHALYDLKERIFLKAGSEEEIFAHLGLDYVEPWERNA

SEQ ID NO: 2981 - DNA, 1182 bp, synthetic construct
  misc_feature 1..1182: note = Variant of terminal deoxynucleotidyl transferase
  source 1..1182: mol_type = other DNA
atgcatcaccaccatcatcatgggggttctggtcatccgccgagcaataccccggagaaggaggtgccgagcgttatcgcccgtccggttagtcagtacgcgtgccagcgcaagaccacgctgaataactacaacaaaaagttcaccgacgcgctggagatcatggccgagaactacaaatttaaagagaacctgatcgcgtgtctggaagccaagcgcgccgcgagtatttttaaatacctgccgttcgaggttaccagcatgaaagacatccaaggtctgccgtgcattaccgaccaggttcgtgacgtgatcgaggagatcatcgaagaaggcgagagcagccgtgttaaagaaatcctcaatgacgagcgctacaaggcctttaagcagttcaccagcgtgttcggtgtgggcgtgaaaaccgcggaaaagtggtaccgtatgggcctccgtacggttgaagaagcaaaggccagtaagagtctgaagctgagcaagatgcagaaggcgggcttcctgtattacgaggatctggcgagcatggttagtaaagaagaagccgatgccgttacgctcatcgtgaaggaaacggtgcgtacctttctgccggatgcgctggtgaccatcaccggcggtttccgccgtggcaaacctatgggccacgacgttgactttctgatcacgaacccgggccgcaaagaggatgacgagctgctccacaaagtggttgatctgctcaagaagcaaggtctgctgctgtacgaagacatcaaagagagcacgttcgtggaggggcaagtcccaagtcataaaatcgacgccatggacaacttccagaagtgcttcgccattctcaagctgtaccagccgaaggtggataacagtgcggttgggacgagtaagaaaagtgacatggctgaggttaaggattggaaagcgatccgtgtggatctggtgatcacgccatgggagcagttcgcctatgcgctgctcggttggacgggcagcaaacaatttcgtcgcgatctgcgtatttatgcggaggaagagcgcggcatgatcctcgacaaccatgccctctacgacctgaaaaagcgcatctttctgaaagcgggcagcgaagaagagattttcgcgcatctgggtctggattatgtggagccgtgggaacgcaacgcg

SEQ ID NO: 2982 - protein, 394 aa, synthetic construct
  REGION 1..394: note = Variant of terminal deoxynucleotidyl transferase
MHHHHHHGGSGHPPSNTPEKEVPSVIARPVSQYACQRKTTLNNYNKKFTDALEIMAENYKFKENLIACLEAKRAASIFKYLPFEVTSMKDIQGLPCITDQVRDVIEEIIEEGESSRVKEILNDERYKAFKQFTSVFGVGVKTAEKWYRMGLRTVEEAKASKSLKLSKMQKAGFLYYEDLASMVSKEEADAVTLIVKETVRTFLPDALVTITGGFRRGKPMGHDVDFLITNPGRKEDDELLHKVVDLLKKQGLLLYEDIKESTFVEGQVPSHKIDAMDNFQKCFAILKLYQPKVDNSAVGTSKKSDMAEVKDWKAIRVDLVITPWEQFAYALLGWTGSKQFRRDLRIYAEEERGMILDNHALYDLKKRIFLKAGSEEEIFAHLGLDYVEPWERNA

SEQ ID NO: 2983 - DNA, 1182 bp, synthetic construct
  misc_feature 1..1182: note = Variant of terminal deoxynucleotidyl transferase
  source 1..1182: mol_type = other DNA
atgcatcaccaccatcatcatgggggttctggtcatccgccgagcaataccccggagaaggaggtgccgagcgttatcgcccgtccggttagtcagtacgcgtgccagcgcaagaccacgctgaataactacaacaaaaagttcaccgacgcgctggagatcatggccgagaactacaaatttaaagagaacctgatcgcgtgtctggaagccaagcgcgccgcgagtatttttaaatatctgccgttcgaggttaccagcatgaaagacatccaaggtctgccgtgcattaccgaccaggttcgtgacgtgatcgaggagatcatcgaagagggcgagagcagccgtgttaaagaaatcctcaatgacgagcgctacaaggcctttaagcagttcaccagcgtgttcggtgtgggcgtgaaaaccgcggaaaagtggtaccgtatgggcctccgtacggttgaagaagcaaaggccagtaagagtctgaagctgagcaagatgcagaaggcgggcttcctgtattacgaggatctggcgagcatggttagtaaagaagaagccgatgccgttacgctcatcgtgaaggaaacggtgcgtacctttctgccggatgcgctggtgaccatcaccggcggtttccgccgtggcaaacctatgggccacgacgttgactttctgatcacgaacccgggccgcaaagaggatgacgagctgctccacaaagtggttgatctgctcaagaagcaaggtctgctgctgtacgaagacatcaaagagagcacgttcgtggaggggcaagtcccaagtcataaaatcgacgccatggacaacttccagaagtgcttcgccattctcaagctgtaccagccgaaggtggataacagtgcggttgggacgagtaagaaaagtgacatggctgaggttaaggattggaaagcgatccgtgtggatctggtgatcacgccattcgagcagtacgcctatgcgctgctcggttggacgggcagcaaacaatttcgtcgcgatctgcgtatttatgcggaggaagagcgcggcatgattctcgacaaccatgccctctacgacctgaaaaagcgcatctttctgaaagcgggcagcgaagaagagattttcgcgcatctgggtctggattatgtggagccgtgggaacgcaacgcg

SEQ ID NO: 2984 - protein, 394 aa, synthetic construct
  REGION 1..394: note = Variant of terminal deoxynucleotidyl transferase
MHHHHHHGGSGHPPSNTPEKEVPSVIARPVSQYACQRKTTLNNYNKKFTDALEIMAENYKFKENLIACLEAKRAASIFKYLPFEVTSMKDIQGLPCITDQVRDVIEEIIEEGESSRVKEILNDERYKAFKQFTSVFGVGVKTAEKWYRMGLRTVEEAKASKSLKLSKMQKAGFLYYEDLASMVSKEEADAVTLIVKETVRTFLPDALVTITGGFRRGKPMGHDVDFLITNPGRKEDDELLHKVVDLLKKQGLLLYEDIKESTFVEGQVPSHKIDAMDNFQKCFAILKLYQPKVDNSAVGTSKKSDMAEVKDWKAIRVDLVITPFEQYAYALLGWTGSKQFRRDLRIYAEEERGMILDNHALYDLKKRIFLKAGSEEEIFAHLGLDYVEPWERNA

SEQ ID NO: 2985 - DNA, 1182 bp, synthetic construct
  misc_feature 1..1182: note = Variant of terminal deoxynucleotidyl transferase
  source 1..1182: mol_type = other DNA
atgcatcaccaccatcatcatgggggttctggtcatccgccgagcaataccccggagaaggaggtgccgagcgttatcgcccgtccggttagtcagtacgcgtgccagcgcaagaccacgctgaataactacaacaaaaagttcaccgacgcgctggagatcctggccgagaactacaaatttaaagagaacctgatcgcgtgtctggaagccaagcgcgccgcgagtatttttaaatatctgccgttcgaggttaccagcatgaaagacatccaaggtctgccgtgcattaccgaccaggttcgtgacgtgatcgaggagatcatcgaagaaggcgagagcagccgtgttaaagaaatcctcaatgacgagcgctacaaggcctttaagcagttcaccagcgtgttcggtgtgggcgtgaaaaccgcggaaaagtggtaccgtatgggcctccgtacggttgaagaagcaaaggccagtaagagtctgaagctgagcaagatgcagaaggcgggcttcctgtattacgaggatctggcgagcatggttagtaaagaagaagccgatgccgttacgctcatcgtgaaggaaacggtgcgtacctttctgccggatgcgctggtgaccatcaccggcggtttccgccgtggcaaacctatgggccacgacgttgactttctgatcacgaacccgggccgcaaagaggatgacgagctgctccacaaagtggttgatctgctcaagaagcaaggtctgctgctgtacgaagacatcaaagagagcacgttcgtggaggggcaagtcccaagtcataaaatcgacgccatggacaacttccagaagtgcttcgccattctcaagctgtaccagccgaaggtggataacagtgcggttgggacgagtaagaaaagtgacatggctgaggttaaggattggaaagcggttcgtgtggatctggtgatcacgccattcgagcagtacgcctatgcgctgctcggttggacgggcagcaaacaatttcgtcgcgatctgcgtgtatatgcggaggaagagcgcggcatgatcctcgacaaccatgccctctacgacctgaaaaagcgcatctttctgaaagcgggcagcgaagaagagattttcgcgcatctgggtctggattatgtggagccgtgggaacgcaacgcg

SEQ ID NO: 2986 - protein, 394 aa, synthetic construct
  REGION 1..394: note = Variant of terminal deoxynucleotidyl transferase
MHHHHHHGGSGHPPSNTPEKEVPSVIARPVSQYACQRKTTLNNYNKKFTDALEILAENYKFKENLIACLEAKRAASIFKYLPFEVTSMKDIQGLPCITDQVRDVIEEIIEEGESSRVKEILNDERYKAFKQFTSVFGVGVKTAEKWYRMGLRTVEEAKASKSLKLSKMQKAGFLYYEDLASMVSKEEADAVTLIVKETVRTFLPDALVTITGGFRRGKPMGHDVDFLITNPGRKEDDELLHKVVDLLKKQGLLLYEDIKESTFVEGQVPSHKIDAMDNFQKCFAILKLYQPKVDNSAVGTSKKSDMAEVKDWKAVRVDLVITPFEQYAYALLGWTGSKQFRRDLRVYAEEERGMILDNHALYDLKKRIFLKAGSEEEIFAHLGLDYVEPWERNA

SEQ ID NO: 2987 - DNA, 1182 bp, synthetic construct
  misc_feature 1..1182: note = Variant of terminal deoxynucleotidyl transferase
  source 1..1182: mol_type = other DNA
atgcatcaccaccatcatcatgggggttctggtcatccgccgagcaataccccggagaaggaggtgccgagcgttatcgcccgtccggttagtcagtacgcgtgccagcgcaagaccacgctgaataactacaacaaaaagttcaccgacgcgctggagatcatggccgagaactacaaatttaaagagaacctgatcgcgtgtctggaagccaagcgcgccgcgagtatttttaaatatctgccgttcgaggttaccagcatgaaagacatccaaggtctgccgtgcattaccgaccaggttcgtgacgtgatcgaggagatcatcgaagagggcgagagcagccgtgttaaagaaatcctcaatgacgagcgctacaaggcctttaagcagttcaccagcgtgttcggtgtgggcgtgaaaaccgcggaaaagtggtaccgtatgggcctccgtacggttgaagaagcaaaggccagtaagagtctgaagctgagcaagatgcagaaggcgggcttcctgtattacgaggatctggcgagcatggttagtaaagaagaagccgatgccgttacgctcatcgtgaaggaaacggtgcgtacctttctgccggatgcgctggtgaccatcaccggcggtttccgccgtggcaaacctatgggccacgacgttgactttctgatcacgaacccgggccgcaaagaggatgacgagctgctccacaaagtggttgatctgctcaagaagcaaggtctgctgctgtacgaagacatcaaagagagcacgttcgtggaggggcaagtcccaagtcataaaatcgacgccatggacaacttccagaagtgcttcgccattctcaagctgtaccagccgaaggtggataacagtgcggttgggacgagtaagaaaagtgacatggctgaggttaaggattggaaagcggttcgtgtggatctggtgatcacgccattcgagcagtacgcctatgcgctgctcggttggacgggcagcaaacaatttcgtcgcgatctgcgtatttatgcggaggaagagcgcggcatgattctcgacaaccatgccctctacgacctgaaaaagcgcatctttctgaaagcgggcagcgaagaagagattttcgcgcatctgggtctggattatgtggagccgtgggaacgcaacgcg

SEQ ID NO: 2988 - protein, 394 aa, synthetic construct
  REGION 1..394: note = Variant of terminal deoxynucleotidyl transferase
MHHHHHHGGSGHPPSNTPEKEVPSVIARPVSQYACQRKTTLNNYNKKFTDALEIMAENYKFKENLIACLEAKRAASIFKYLPFEVTSMKDIQGLPCITDQVRDVIEEIIEEGESSRVKEILNDERYKAFKQFTSVFGVGVKTAEKWYRMGLRTVEEAKASKSLKLSKMQKAGFLYYEDLASMVSKEEADAVTLIVKETVRTFLPDALVTITGGFRRGKPMGHDVDFLITNPGRKEDDELLHKVVDLLKKQGLLLYEDIKESTFVEGQVPSHKIDAMDNFQKCFAILKLYQPKVDNSAVGTSKKSDMAEVKDWKAVRVDLVITPFEQYAYALLGWTGSKQFRRDLRIYAEEERGMILDNHALYDLKKRIFLKAGSEEEIFAHLGLDYVEPWERNA

SEQ ID NO: 2989 - DNA, 1182 bp, synthetic construct
  misc_feature 1..1182: note = Variant of terminal deoxynucleotidyl transferase
  source 1..1182: mol_type = other DNA
atgcatcaccaccatcatcatgggggttctggtcatccgccgagcaataccccggagaaggaggtgccgagcgttatcgcccgtccggttagtcagtacgcgtgccagcgcaagaccacgctgaataactacaacaaaaagttcaccgacgcgctggagatcatggccgagaactacaaatttaaagagaacctgcaggcgtgtcatgaagccaagcgcgccgcgagtatttttaaatatctgccgttcgaggttaccagcatgaaagacatccaaggtctgccgtgcattaccgaccaggttcgtgacgtgatcgaggagatcatcgaagagggcgagagcagccgtgttaaagaaatcctcaatgacgagcgctacaaggcctttaagcagttcaccagcgtgttcggtgtgggcgtgaaaacctcggaaaagtggtaccgtatgggcctccgtacggttgaagaagcaaaggccagtaagagtctgaagctgagcaagatgcagaaggcgggcttcctgtattacgaggatctggcgagcatggttagtaaagaagaagccgatgccgttacgctcatcgtgaaggaaacggtgcgtacctttctgccggatgcgctggtgaccatcaccggcggtttccgccgtggcaaacctatgggccacgacgttgactttctgatcacgaacccgggccgcaaaatggatgacgagctgctccacaaagtggttgatctgctcaagaagcaaggtctgctgctgtacgaagacatcaaagagagcacgttcgtggaggggcaactgccaagtcataaaatcgacgccatggacaacttccagaagtgcttcgccattctcaagctgtaccagccgaaggtggataacagtgcggttgggacgagtaagaaaagtgacatggctgaggttaaggattggaaagcgatccgtgtggatctggtgatcacgccattcgagcagtacgcctatgcgctgctcggttggacgggcagcggccaatttcgtcgcgatctgcgtcgctatgcggaggaagagcgcggcatgatcctcgacaaccatgccctctacgacctgaaaaagcgcatctttctgaaagcgggcagcgaagaagagattttcgcgcatctgggtctggattatgtggagccgtgggaacgcaacgcg

SEQ ID NO: 2990 - protein, 394 aa, synthetic construct
  REGION 1..394: note = Variant of terminal deoxynucleotidyl transferase
MHHHHHHGGSGHPPSNTPEKEVPSVIARPVSQYACQRKTTLNNYNKKFTDALEIMAENYKFKENLQACHEAKRAASIFKYLPFEVTSMKDIQGLPCITDQVRDVIEEIIEEGESSRVKEILNDERYKAFKQFTSVFGVGVKTSEKWYRMGLRTVEEAKASKSLKLSKMQKAGFLYYEDLASMVSKEEADAVTLIVKETVRTFLPDALVTITGGFRRGKPMGHDVDFLITNPGRKMDDELLHKVVDLLKKQGLLLYEDIKESTFVEGQLPSHKIDAMDNFQKCFAILKLYQPKVDNSAVGTSKKSDMAEVKDWKAIRVDLVITPFEQYAYALLGWTGSGQFRRDLRRYAEEERGMILDNHALYDLKKRIFLKAGSEEEIFAHLGLDYVEPWERNA

SEQ ID NO: 2991 - DNA, 1182 bp, synthetic construct
  misc_feature 1..1182: note = Variant of terminal deoxynucleotidyl transferase
  source 1..1182: mol_type = other DNA
atgcatcaccaccatcatcatgggggttctggtcatccgccgagcaataccccggagaaggaggtgccgagcgttatcgcccgtccggttagtcagtacgcgtgccagcgcaagaccacgctgaataactacaacaaaaagttcaccgacgcgctggagatcatggccgagaactacaaatttgaagagaacctgatcgcgtgtcatgaagccaagcgcgccgcgagtatttttaaaagcctgccgttcgaggtcaccagcatgaaagacatccaaggtctgccgtgcattaccgaccagtgccgtgacctgatcgaggagatcatcgaagagggcgagagcagccgtgttaaagaaatcctcaatgacgagcgctacaaggcctttaagcagttcaccagcgtgttcggtgtgggcgtgaaaacctcggaaaagtggtaccgtatgggcctccgtacggttgaagaagcaaaggccagtaagagtctgaagctgagcaagatgcagaaggcgggcttcctgtattacgaggatctggcgagcatggttagtaaagaagaagccgatgccgttacgctcatcgtgaaggaaacggtgcgtacctttctgccggatgcgctggtgaccatcaccggcggtttccgccgtggcaaacctatgggccacgacgttgactttctgatcacgaacccgggccgcaaaatggatgacgagctgctccacaaagtggttgatctgctcaagaagcaaggtctgctgctgtacgaagacatcaaagagagcacgttcgtggaggggcaactgccaagtcataaaatcgacgccatggacaacttccagaagtgcttcgccattctcaagctgtaccagccgaaggtggataacagtgcggttgggacgagtaagaaaagtgacatggctgaggttaaggattggaaagcgatccgtgtggatctggtgatcacgccattcgagcagtacgcctatgcgctgctcggttggacgggcagcggccaatttcgtcgcgatctgcgtcgctatgcggaggaagagcgcggcatgatcctcgacaaccatgccctctacgacctgaaaaagcgcatctttctgaaagcgggcagcgaagaagagattttcgcgcatctgggtctggattatgtggagccgtgggaacgcaacgcg

SEQ ID NO: 2992 - protein, 394 aa, synthetic construct
  REGION 1..394: note = Variant of terminal deoxynucleotidyl transferase
MHHHHHHGGSGHPPSNTPEKEVPSVIARPVSQYACQRKTTLNNYNKKFTDALEIMAENYKFEENLIACHEAKRAASIFKSLPFEVTSMKDIQGLPCITDQCRDLIEEIIEEGESSRVKEILNDERYKAFKQFTSVFGVGVKTSEKWYRMGLRTVEEAKASKSLKLSKMQKAGFLYYEDLASMVSKEEADAVTLIVKETVRTFLPDALVTITGGFRRGKPMGHDVDFLITNPGRKMDDELLHKVVDLLKKQGLLLYEDIKESTFVEGQLPSHKIDAMDNFQKCFAILKLYQPKVDNSAVGTSKKSDMAEVKDWKAIRVDLVITPFEQYAYALLGWTGSGQFRRDLRRYAEEERGMILDNHALYDLKKRIFLKAGSEEEIFAHLGLDYVEPWERNA

SEQ ID NO: 2993 - DNA, 1182 bp, synthetic construct
  misc_feature 1..1182: note = Variant of terminal deoxynucleotidyl transferase
  source 1..1182: mol_type = other DNA
atgcatcaccaccatcatcatgggggttctggtcatccgccgagcaataccccggagaaggaggtgccgagcgttatcgcccgtccggttagtcagtacgcgtgccagcgcaagaccacgctgaataactacaacaaaaagttcaccgacgcgctggagatcatggccgagaactacaaatttaaagagaacctgatcgcgtgtctggaagccaagcgcgccgcgagtatttttaaatacctgccgttcgaggttaccagcatgaaagacatccaaggtctgccgtgcattaccgaccaggttcgtgacgtgatcgaggagatcatcgaagagggcgagagcagccgtgttaaagaaatcctcaatgacgagcgctacaaggcctttaagcagttcaccagcgtgttcggtgtgggcgtgaaaaccgcggaaaagtggtaccgtatgggcctccgtacggttgaagaagcaaaggccagtaagagtctgaagctgagcaagatgcagaaggcgggcttcctgtattacgaggatctggcgagcatggttagtaaagaagaagccgatgccgttacgctcatcgtgaaggaaacggtgcgtacctttctgccggatgcgctggtgaccatcaccggcggtttccgccgtggcaaacctatgggccacgacgttgactttctgatcacgaacccgggccgcaaagaggatgacgagctgctccacaaagtggttgatctgctcaagaagcaaggtctgctgctgtacgaagacatcaaagagagcacgttcgtggaggggcaaatcccaagtcataaaatcgacgccatggacaacttccagaagtgcttcgccattctcaagctgtaccagccgaaggtggataacagtgcggttgggacgagtaagaaaagtgacatggctgaggttaaggattggaaagcggttcgtgtggatctggtgatcacgccattcgagcagtacgcctatgcgctgctcggttggacgggcagcaaacaatttcgtcgcgatctgcgtgtatatgcggaggaagagcgcggcatgattctcgacaaccatgccctctacgacctgaaaaagcgcatctttctgaaagcgggtagcgaagaagagattttcgcgcatctgggtctggattatgtggagccgtgggaacgcaacgcg

SEQ ID NO: 2994 - protein, 394 aa, synthetic construct
  REGION 1..394: note = Variant of terminal deoxynucleotidyl transferase
MHHHHHHGGSGHPPSNTPEKEVPSVIARPVSQYACQRKTTLNNYNKKFTDALEIMAENYKFKENLIACLEAKRAASIFKYLPFEVTSMKDIQGLPCITDQVRDVIEEIIEEGESSRVKEILNDERYKAFKQFTSVFGVGVKTAEKWYRMGLRTVEEAKASKSLKLSKMQKAGFLYYEDLASMVSKEEADAVTLIVKETVRTFLPDALVTITGGFRRGKPMGHDVDFLITNPGRKEDDELLHKVVDLLKKQGLLLYEDIKESTFVEGQIPSHKIDAMDNFQKCFAILKLYQPKVDNSAVGTSKKSDMAEVKDWKAVRVDLVITPFEQYAYALLGWTGSKQFRRDLRVYAEEERGMILDNHALYDLKKRIFLKAGSEEEIFAHLGLDYVEPWERNA

SEQ ID NO: 2995 - DNA, 1182 bp, synthetic construct
  misc_feature 1..1182: note = Variant of terminal deoxynucleotidyl transferase
  source 1..1182: mol_type = other DNA
atgcatcaccaccatcatcatgggggttctggtcatccgccgagcaataccccggagaaggaggtgccgagcgttatcgcccgtccggttagtcagtacgcgtgccagcgcaagaccacgctgaataactacaacaaaaagttcaccgacgcgctggagatcatggccgagaactacaaatttaaagagaacctgatcgcgtgtctggaagccaagcgcgccgcgagtatttttaaaagtctgccgttcgaggttaccagcatgaaagacatccaaggtctgccgtgcattaccgaccaggttcgtgacgtgatcgaggagatcatcgaagagggcgagagcagccgtgttaaagaaatcctcaatgacgagcgctacaaggcctttaagcagttcaccagcgtgttcggtgtgggcgtgaaaaccgcggaaaagtggtaccgtatgggcctccgtacggttgaagaagcaaaggccagtaagagtctgaagctgagcaagatgcagaaggcgggcttcctgtattacgaggatctggcgagcatggttagtaaagaagaagccgatgccgttacgctcatcgtgaaggaaacggtgcgtacctttctgccggatgcgctggtgaccatcaccggcggtttccgccgtggcaaacctatgggccacgacgttgactttctgatcacgaacccgggccgcaaagaggatgacgagctgctccacaaagtggttgatctgctcaagaagcaaggtctgctgctgtacgaagacatcaaagagagcacgttcgtggaggggcaaatcccaagtcataaaatcgacgccatggacaacttccagaagtgcttcgccattctcaagctgtaccagccgaaggtggataacagtgcggttgggacgagtaagaaaagtgacatggctgaggttaaggattggaaagcggttcgtgtggatctggtgatcacgccattcgagcagtacgcctatgcgctgctcggttggacgggcagcaaacaatttcgtcgcgatctgcgtatttatgcggaggaagagcgcggcatgctgctcgacaaccatgccctctacgacctgaaaaagcgcatctttctgaaagcgggcagcgaagaagagattttcgcgcatctgggtctggattatgtggagccgtgggaacgcaacgcg

SEQ ID NO: 2996 - protein, 394 aa, synthetic construct
  REGION 1..394: note = Variant of terminal deoxynucleotidyl transferase
MHHHHHHGGSGHPPSNTPEKEVPSVIARPVSQYACQRKTTLNNYNKKFTDALEIMAENYKFKENLIACLEAKRAASIFKSLPFEVTSMKDIQGLPCITDQVRDVIEEIIEEGESSRVKEILNDERYKAFKQFTSVFGVGVKTAEKWYRMGLRTVEEAKASKSLKLSKMQKAGFLYYEDLASMVSKEEADAVTLIVKETVRTFLPDALVTITGGFRRGKPMGHDVDFLITNPGRKEDDELLHKVVDLLKKQGLLLYEDIKESTFVEGQIPSHKIDAMDNFQKCFAILKLYQPKVDNSAVGTSKKSDMAEVKDWKAVRVDLVITPFEQYAYALLGWTGSKQFRRDLRIYAEEERGMLLDNHALYDLKKRIFLKAGSEEEIFAHLGLDYVEPWERNA

SEQ ID NO: 2997 - DNA, 1182 bp, synthetic construct
  misc_feature 1..1182: note = Variant of terminal deoxynucleotidyl transferase
  source 1..1182: mol_type = other DNA
atgcatcaccaccatcatcatgggggttctggtcatccgccgagcaataccccggagaaggaggtgccgagcgttatcgcccgtccggttagtcagtacgcgtgccagcgcaagaccacgctgaataactacaacaaaaagttcaccgacgcgctggagatcatggccgagaactacaaatttgaagagaacctgatcgcgtgtctggaagccaagcgcgccgcgagtatttttaaatatctgccgttcgaggtcaccagcatgaaagacatccaaggtctgccgtgcattaccgaccaggtacgtgacgtgatcgaggagatcatcgaagagggcgagagcagccgtgttaaagaaatcctcaatgacgagcgctacaaggcctttaagcagttcaccagcgtgttcggtgtgggcgtgaaaaccgcggaaaagtggtaccgtatgggcctccgtacggttgaagaagcaaaggccagtaagagtctgaagctgagcaagatgcagaaggcgggcttcctgtattacgaggatctggcgagcatggttagtaaagaagaagccgatgccgttacgctcatcgtgaaggaaacggtgcgtacctttgtgccggatgcgctggtgaccatcgccggcggtttccgccgtggcaaacctatgggccacgacgttgactttctgatcacgaacccgggccgcaaaatggatgacgagctgctccacaaagtggttgatctgctcaagaagcaaggtctgctgctgtacgaagacatcaaagagagcacgttcgtggaggggcaactgccaagtcataaaatcgacgccatggacaacttccagaagtgcttcgccattctcaagctgtaccagccgaaggtggataacagtgcggttgggacgagtaagaaaagtgacatggctgaggttaaggattggaaagcgatccgtgtggatctggtgatcacgccattcgagcagtacgcctatgcgctgctcggttggacgggcagcggccaatttcgtcgcgatctgcgtcgctatgcggagctggagcgcggcatgatcctcgacaaccatgccctctacgacctgaaaaagcgcatctttctgaaagcgggcagcgaagaagagattttcgcgcatctgggtctggattatgtggagccgtgggaacgcaacgcg

SEQ ID NO: 2998 - protein, 394 aa, synthetic construct
  REGION 1..394: note = Variant of terminal deoxynucleotidyl transferase
MHHHHHHGGSGHPPSNTPEKEVPSVIARPVSQYACQRKTTLNNYNKKFTDALEIMAENYKFEENLIACLEAKRAASIFKYLPFEVTSMKDIQGLPCITDQVRDVIEEIIEEGESSRVKEILNDERYKAFKQFTSVFGVGVKTAEKWYRMGLRTVEEAKASKSLKLSKMQKAGFLYYEDLASMVSKEEADAVTLIVKETVRTFVPDALVTIAGGFRRGKPMGHDVDFLITNPGRKMDDELLHKVVDLLKKQGLLLYEDIKESTFVEGQLPSHKIDAMDNFQKCFAILKLYQPKVDNSAVGTSKKSDMAEVKDWKAIRVDLVITPFEQYAYALLGWTGSGQFRRDLRRYAELERGMILDNHALYDLKKRIFLKAGSEEEIFAHLGLDYVEPWERNA

SEQ ID NO: 2999 - DNA, 1182 bp, synthetic construct
  misc_feature 1..1182: note = Variant of terminal deoxynucleotidyl transferase
  source 1..1182: mol_type = other DNA
atgcatcaccaccatcatcatgggggttctggtcatccgccgagcaataccccggagaaggaggtgccgagcgttatcgcccgtccggttagtcagtacgcgtgccagcgcaagaccacgctgaataactacaacaaaaagttcaccgacgcgctggagatcctggccgagaactacaaatttaaagagaacctgatcgcgtgtctggaagccaagcgcgccgcgagtatttttaaaagtctgccgttcgaggttaccagcatgaaagacatccaaggtctgccgtgcattaccgaccaggttcgtgacgtgatcgaggagatcatcgaagagggcgagagcagccgtgttaaagaaatcctcaatgacgagcgctacaaggcctttaagcagttcaccagcgtgttcggtgtgggcgtgaaaaccgcggaaaagtggtaccgtatgggcctccgtacggttgaagaagcaaaggccagtaagagtctgaagctgagcaagatgcagaaggcgggcttcctgtattacgaggatctggcgagcatggttagtaaagaagaagccgatgccgttacgctcatcgtgaaggaaacggtgcgtacctttctgccggatgcgctggtgaccatcaccggcggtttccgccgtggcaaacctatgggccacgacgttgactttctgatcacgaacccgggccgcaaagaggatgacgagctgctccacaaagtggttgatctgctcaagaagcaaggtctgctgctgtacgaagacatcaaagagagcacgttcgtggaggggcaagtcccaagtcataaaatcgacgccatggacaacttccagaagtgcttcgccattctcaagctgtaccagccgaaggtggataacagtgcggttgggacgagtaagaaaagtgacatggctgaggttaaggattggaaagcgatccgtgtggatctggtgatcacgccattcgagcagtacgcctatgcgctgctcggttggacgggcagcaaacaatttcgtcgcgatctgcgtgtatatgcggaggaagagcgcggcatgatcctcgacaaccatgccctctacgacctgaaaaagcgcatctttctgaaagcgggcagcgaagaagagattttcgcgcatctgggtctggattatgtggagccgtgggaacgcaacgcg

SEQ ID NO: 3000 - protein, 394 aa, synthetic construct
  REGION 1..394: note = Variant of terminal deoxynucleotidyl transferase
MHHHHHHGGSGHPPSNTPEKEVPSVIARPVSQYACQRKTTLNNYNKKFTDALEILAENYKFKENLIACLEAKRAASIFKSLPFEVTSMKDIQGLPCITDQVRDVIEEIIEEGESSRVKEILNDERYKAFKQFTSVFGVGVKTAEKWYRMGLRTVEEAKASKSLKLSKMQKAGFLYYEDLASMVSKEEADAVTLIVKETVRTFLPDALVTITGGFRRGKPMGHDVDFLITNPGRKEDDELLHKVVDLLKKQGLLLYEDIKESTFVEGQVPSHKIDAMDNFQKCFAILKLYQPKVDNSAVGTSKKSDMAEVKDWKAIRVDLVITPFEQYAYALLGWTGSKQFRRDLRVYAEEERGMILDNHALYDLKKRIFLKAGSEEEIFAHLGLDYVEPWERNA

SEQ ID NO: 3001 - DNA, 1182 bp, synthetic construct
  misc_feature 1..1182: note = Variant of terminal deoxynucleotidyl transferase
  source 1..1182: mol_type = other DNA
atgcatcaccaccatcatcatgggggttctggtcatccgccgagcaataccccggagaaggaggtgccgagcgttatcgcccgtccggttagtcagtacgcgtgccagcgcaagaccacgctgaataactacaacaaaaagttcaccgacgcgctggagatcatggccgagaactacaaatttaaagagaacctgatcgcgtgtctggaagccaagcgcgccgcgagtatttttaaatatctgccgttcgaggttaccagcatgaaagacatccaaggtctgccgtgcattaccgaccaggttcgtgacgtgatcgaggagatcatcgaagagggcgagagcagccgtgttaaagaaatcctcaatgacgagcgctacaaggcctttaagcagttcaccagcgtgttcggtgtgggcgtgaaaaccgcggaaaagtggtaccgtatgggcctccgtacggttgaagaagcaaaggccagtaagagtctgaagctgagcaagatgcagaaggcgggcttcctgtattacgaggatctggcgagcatggttagtaaagaagaagccgatgccgttacgctcatcgtgaaggaaacggtgcgtacctttctgccggatgcgctggtgaccatcaccggcggtttccgccgtggcaaacctatgggccacgacgttgactttctgatcacgaacccgggccgcaaagaggatgacgagctgctccacaaagtggttgatctgctcaagaagcaaggtctgctgctgtacgaagacatcaaagagagcacgttcgtggaggggcaagtcccaagtcataaaatcgacgccatggacaacttccagaagtgcttcgccattctcaagctgtaccagccgaaggtggataacagtgcggttgggacgagtaagaaaagtgacatggctgaggttaaggattggaaagcgatccgtgtggatctggtgatcacgccattcgagcagtacgcctatgcgctgctcggttggacgggcagcaaacaatttcgtcgcgatctgcgtgcatatgcggaggaagagcgcggcatgctgctcgacaaccatgccctctacgacctgaaaaagcgcatctttctgaaagcgggtagcgaagaagagattttcgcgcatctgggtctggattatgtggagccgtgggaacgcaacgcg

SEQ ID NO: 3002 - protein, 394 aa, synthetic construct
  REGION 1..394: note = Variant of terminal deoxynucleotidyl transferase
MHHHHHHGGSGHPPSNTPEKEVPSVIARPVSQYACQRKTTLNNYNKKFTDALEIMAENYKFKENLIACLEAKRAASIFKYLPFEVTSMKDIQGLPCITDQVRDVIEEIIEEGESSRVKEILNDERYKAFKQFTSVFGVGVKTAEKWYRMGLRTVEEAKASKSLKLSKMQKAGFLYYEDLASMVSKEEADAVTLIVKETVRTFLPDALVTITGGFRRGKPMGHDVDFLITNPGRKEDDELLHKVVDLLKKQGLLLYEDIKESTFVEGQVPSHKIDAMDNFQKCFAILKLYQPKVDNSAVGTSKKSDMAEVKDWKAIRVDLVITPFEQYAYALLGWTGSKQFRRDLRAYAEEERGMLLDNHALYDLKKRIFLKAGSEEEIFAHLGLDYVEPWERNA

SEQ ID NO: 3003 - DNA, 1182 bp, synthetic construct
  misc_feature 1..1182: note = Variant of terminal deoxynucleotidyl transferase
  source 1..1182: mol_type = other DNA
atgcatcaccaccatcatcatgggggttctggtcatccgccgagcaataccccggagaaggaggtgccgagcgttatcgcccgtccggttagtcagtacgcgtgccagcgcaagaccacgctgaataactacaacaaaaagttcaccgacgcgctggagatcatggccgagaactacaaatttaaagagaacctgatcgcgtgtctggaagccaagcgcgccgcgagtatttttaaatatctgccgttcgaggttaccagcatgaaagacatccaaggtctgccgtgcattaccgaccaggttcgtgacgtgatcgaggagatcatcgaagaaggcgagagcagccgtgttaaagaaatcctcaatgacgagcgctacaaggcctttaagcagttcaccagcgtgttcggtgtgggcgtgaaaaccgcggaaaagtggtaccgtatgggcctccgtacggttgaagaagcaaaggccagtaagagtctgaagctgagcaagatgcagaaggcgggcttcctgtattacgaggatctggcgagcatggttagtaaagaagaagccgatgccgttacgctcatcgtgaaggaaacggtgcgtacctttctgccggatgcgctggtgaccatcaccggcggtttccgccgtggcaaacctatgggccacgacgttgactttctgatcacgaacccgggccgcaaagaggatgacgagctgctccacaaagtggttgatctgctcaagaagcaaggtctgctgctgtacgaagacatcaaagagagcacgttcgtggaggggcaagtcccaagtcataaaatcgacgccatggacaacttccagaagtgcttcgccattctcaagctgtaccagccgaaggtggataacagtgcggttgggacgagtaagaaaagtgacatggctgaggttaaggattggaaagcgattcgtgtggatctggtgatcacgccattcgagcagtacgcctatgcgctgctcggttggacgggcagcaaacaatttcgtcgcgatctgcgtcgttatgcggaggaagagcgcggcatgctgctcgacaaccatgccctctacgacctgaaagagcgcatctttctgaaagcgggcagcgaagaagagattttcgcgcatctgggtctggattatgtggagccgtgggaacgcaacgcg

(The sequence listing continues in the following parts.)